(19) United States
(12) Patent Application Publication
(10) Pub. No.: US 2021/0308171 A1
(43) Pub. Date: Oct. 7, 2021

(54) METHODS FOR COMBINATORIAL SCREENING AND USE OF THERAPEUTIC TARGETS THEREOF

(71) Applicants: THE BROAD INSTITUTE, INC., CAMBRIDGE, MA (US); THE GENERAL HOSPITAL CORPORATION, BOSTON, MA (US)

(72) Inventors: Bradley E. BERNSTEIN, Boston, MA (US); John G. DOENCH, Cambridge, MA (US); Fadi J. NAJM, Boston, MA (US)

(21) Appl. No.: 17/266,538

(22) PCT Filed: Aug. 7, 2019
(86) PCT No.: PCT/US2019/045558

§ 371 Date: Feb. 5, 2021

Related U.S. Application Data
(60) Provisional application No. 62/715,779, filed on Aug. 7, 2018.
(60) Provisional application No. 62/880,579, filed on Jul. 30, 2019.

(51) Int. Cl. A61K 31/713; A61K 35/17; C12N 9/22; A61K 45/06; C12N 15/11; G01N 33/50; A61P 35/02

(52) U.S. Cl. CPC A61K 31/713; A61K 35/17; C12N 9/22; C40B 30/06; C12N 15/111; G01N 33/5023; A61P 35/02; A61K 45/06

(57) ABSTRACT

CRISPR-Cas9 has enabled a new generation of screening strategies to interrogate gene function. However, redundant genes and the complexity of functional gene networks can confound single gene knockout approaches. Furthermore, simple addition of two or more sgRNAs has shown only modest targeting efficacy in screening approaches. The present invention relates to combined orthogonal CRISPR-derived components to maximize gene targeting activity with minimal cross-talk and interference. The present invention also relates to efficient S. aureus Cas9 sgRNA design rules, which were paired with S. pyogenes Cas9 sgRNA design rules to achieve dual target gene inactivation in a high fraction of cells. Applicants developed a lentiviral vector and cloning strategy to generate high complexity pooled dual-knockout libraries and show that screening these libraries can identify combinatorial phenotypes, including synthetic lethal gene pairs across multiple cell types. The gene pairs can be targeted therapeutically and Applicants disclose therapeutically effective combination therapies.

### CROSS-REFERENCE TO RELATED APPLICATIONS

[0001] This application claims the benefit of U.S. Provisional Application Nos. 62/715,779, filed Aug. 7, 2018 and 62/880,579, filed Jul. 30, 2019. The entire contents of the above-identified applications are hereby fully incorporated herein by reference.

### STATEMENT REGARDING FEDERALLY SPONSORED RESEARCH

[0002] This invention was made with government support under Grant Nos. CA216873 and CA224536 awarded by the National Institutes of Health. The government has certain rights in the invention.

### REFERENCE TO AN ELECTRONIC SEQUENCE LISTING

[0003] The contents of the electronic sequence listing (BROD-2600WP_ST25.txt”; Size is 8,549,577 bytes and it was created on Jul. 26, 2019) is herein incorporated by reference in its entirety.

### TECHNICAL FIELD

[0004] The subject matter disclosed herein is generally directed to compositions and methods for combinatorial screening of phenotypic interactions between a set of target sequences using orthogonal CRISPR enzymes and therapeutic targets identified.

### BACKGROUND

[0005] Mapping the functional relationships between genes is a critical step towards understanding how disease states arise from gene dysfunction¹⁻³. In yeast, high-throughput methods have enabled the creation of genetic networks, with 23 million double mutants identifying nearly 1 million interactions⁴. Network complexity is orders of magnitude greater in human cells, with ˜10-fold more pairwise combinations of protein-coding genes and thousands of distinct cell types in which to examine interactions.

[0006] RNAi and CRISPR technologies can simultaneously perturb two or more genes, and thus represent a promising approach to uncover genetic interactions^{2,5}. Initial combinatorial CRISPR screens⁶ were performed using lentiviral constructs. However, repetitive elements in lentiviral vectors, including the U6 promoter, lead to high levels of recombination and decrease combinatorial screen efficiency⁷⁻¹⁰. Two efforts to achieve combinatorial CRISPR screens employed orthologous U6 promoters, from mouse and human^{7,8}, although another study found that multiple copies of the S. pyogenes tracrRNA sequence were likewise prone to recombination¹¹. Finally, because Cpf1 enzymes process their own transcripts, they can deliver multiple sgRNAs from one transcript. However, the reported efficiency of multiple indels in the same cell is less than 10%¹², too low for screening applications. In all cases, loading distinct RNAs into a common effector enzyme may result in competition between individual perturbagens and decreased overall efficiency^{13,14.} These design challenges are accentuated when using lentivirus to deliver reagents at single-copy for large scale, pooled genetic screens.

[0007] Citation or identification of any document in this application is not an admission that such document is available as prior art to the present invention.

### SUMMARY

[0008] It is an objective of the present invention to provide for novel CRISPR-Cas9 screening strategies to interrogate gene function. Redundant genes and the complexity of functional gene networks can confound single gene knockout approaches. Furthermore, simple addition of two or more sgRNAs has shown only modest targeting efficacy in screening approaches. It is another objective of the present invention to provide for combined orthogonal CRISPR-derived components to maximize gene targeting activity with minimal cross-talk and interference. Additionally, it is another objective of the present invention to use machine learning to establish efficient S. aureus Cas9 sgRNA design rules and pair the rules with rules discovered for S. pyogenes Cas9 to achieve dual target gene inactivation in a high fraction of cells. It is another objective of the present invention to develop a lentiviral vector and cloning strategy to generate high complexity pooled dual-knockout libraries and show that screening these libraries can identify synthetic lethal gene pairs across multiple cell types, including genes in the MAPK pathway and anti-apoptotic genes. It is another objective of the present invention to provide for flexible manipulations using the orthogonal CRISPR screening strategy to allow interrogation of combinatorial knockout, activation, or repression screens.

[0009] The present inventors have in an unprecedented way adapted the use of the CRISPR/Cas system to interrogate combinatorial phenotypes using the “Big Papi” approach described herein. It is another objective of the present invention to provide therapeutic targets based on the combination of genes identified in the screens.

[0010] Preferred statements (features) and embodiments of this invention are set herein below. Each statement and embodiment of the invention so defined may be combined with any other statement and/or embodiments unless clearly indicated to the contrary. In particular, any feature indicated as being preferred or advantageous may be combined with any other feature or features or statements indicated as being preferred or advantageous. Hereto, the present invention is in particular captured by any one or any combination of one or more of the below statements and embodiments, with any other statement and/or embodiments.

[0011] In one aspect, the present invention provides for a method for treating cancer in a subject in need thereof comprising administering to the subject a therapeutically effective amount of a combination therapy comprising one or more agents targeting the expression, activity, substrate or products of WDR77 and BRD4. In certain embodiments, the cancer is Acute myeloid leukemia (AML) NUT (nuclear protein in testis) midline carcinoma, or multiple myeloma.

[0012] In another aspect, the present invention provides for a method for treating inflammation in a subject in need thereof comprising administering to the subject a therapeutically effective amount of a combination therapy comprising one or more agents targeting the expression, activity, substrate or products of WDR77 and BRD4. In certain embodiments, the inflammation is caused by an autoimmune disease. In certain embodiments, the inflammation is caused by a pathogen.

[0013] In another aspect, the present invention provides for a method for reactivation of HIV in a subject in need thereof comprising administering to the subject a therapeutically effective amount of a combination therapy comprising one or more agents targeting the expression, activity, substrate or products of WDR77 and BRD4.

[0014] In certain embodiments, the one or more agents targeting BRD4 is selected from the group consisting of AZD5153, PFI-1, CPI-203, CPI-0610, RVX-208, OTX015, I-BET151, I-BET762, I-BET-726, dBET1, ARV-771, ARV-825, BETd-260/ZBC260 and MZ1.

[0015] In another aspect, the present invention provides for a CD8+ T cell for use in adoptive cell transfer comprising a CD8+ T cell treated with a combination of one or more agents targeting the expression, activity, substrate or products of WDR77 and BRD4. The CD8+ T cell may be a CAR T cell. In certain embodiments, the one or more agents targeting BRD4 is selected from the group consisting of AZD5153, JQ1, PFI-1, CPI-203, CPI-0610, RVX-208, OTX015, I-BET151, I-BET762, I-BET-726, dBET1, ARV-771, ARV-825, BETd-260/ZBC260 and MZ1.

[0016] In another aspect, the present invention provides for a method for treating cancer in a subject in need thereof comprising administering to the subject a therapeutically effective amount of a combination therapy comprising one or more agents targeting the expression, activity, substrate or products of SETD6 and INO80. In certain embodiments, the cancer comprises an MLL fusion, such as Acute myeloid leukemia (AML).

[0017] In another aspect, the present invention provides for a method for treating cancer in a subject in need thereof comprising administering to the subject a therapeutically effective amount of a combination therapy comprising one or more agents targeting the expression, activity, substrate or products of KAT6B and CHD8. In certain embodiments, the cancer is Acute myeloid leukemia (AML).

[0018] In another aspect, the present invention provides for a method for treating cancer in a subject in need thereof comprising administering to the subject a therapeutically effective amount of a combination therapy comprising one or more agents targeting the expression, activity, substrate or products of ATRX and SMARCAL1. In certain embodiments, the cancer is Acute myeloid leukemia (AML).

[0019] In another aspect, the present invention provides for a method for treating cancer in a subject in need thereof comprising administering to the subject a therapeutically effective amount of a combination therapy comprising one or more agents targeting the expression, activity, substrate or products of MTA1 and MTA2. In certain embodiments, the cancer comprises Acute myeloid leukemia (AML). In certain embodiments, the cancer comprises a rearrangement in TEL or MLL.

[0020] In another aspect, the present invention provides for a method for treating cancer in a subject in need thereof comprising administering to the subject a therapeutically effective amount of a combination therapy comprising one or more agents targeting the expression, activity, substrate or products of HDAC1 and HDAC2. In certain embodiments, the cancer comprises Acute myeloid leukemia (AML). In certain embodiments, the cancer comprises a rearrangement in TEL or MLL.

[0021] In another aspect, the present invention provides for a method for treating cancer in a subject in need thereof comprising administering to the subject a therapeutically effective amount of a combination therapy comprising one or more agents targeting the expression, activity, substrate or products of CHD3 and HDAC2. In certain embodiments, the cancer comprises Acute myeloid leukemia (AML). In certain embodiments, the cancer does not comprise a rearrangement in TEL or MLL.

[0022] In another aspect, the present invention provides for a method for treating cancer in a subject in need thereof comprising administering to the subject a therapeutically effective amount of a combination therapy comprising one or more agents targeting the expression, activity, substrate or products of ING1 and ING2. In certain embodiments, the cancer comprises Acute myeloid leukemia (AML). In certain embodiments, the cancer comprises a rearrangement in TEL or MLL.

[0023] In another aspect, the present invention provides for a method for treating cancer in a subject in need thereof comprising administering to the subject a therapeutically effective amount of a combination therapy comprising one or more agents targeting the expression, activity, substrate or products of ASF and ASF1A. In certain embodiments, the cancer comprises Acute myeloid leukemia (AML). In certain embodiments, the cancer comprises a rearrangement in TEL or MLL.

[0024] In another aspect, the present invention provides for a method for treating cancer in a subject in need thereof comprising administering to the subject a therapeutically effective amount of a combination therapy comprising one or more agents targeting the expression, activity, substrate or products of ING4 and ING5. In certain embodiments, the cancer comprises Acute myeloid leukemia (AML). In certain embodiments, the cancer comprises a rearrangement in TEL or MLL.

[0025] In another aspect, the present invention provides for a personalized method for treating cancer comprising administering to a subject suffering from a cancer having a deficiency in function or expression or a mutation in either gene in a pair of genes selected from the group consisting of MTA1 and MTA2, HDAC1 and HDAC2, CHD3 and HDAC2, ING1 and ING2, ING4 and ING5, ASF1B and ASF1A, ARID4A and JADE2, ARID4A and SMYD1, ARID4A and SETD9, ATRX and HIRA, SLBP and HIRA, CREBBP and CARM1, ARID3A and RAD54L2, JMJD6 and WDR5, DPF2 and SMYD5, JMJD6 and MBD2, MSL3 and SRCAP, KMT2C and KMT2D, HDAC3 and SETD1B, KMT2A and KMT2B, KDM3B and KMT2D, SMARCA4 and SMARCA2, BRD8 and SMARCA1, WDR77 and BRD4, SETD6 and INO80, SMARCAL1 and ATRX, KAT6B and CHD8, ARID1B and ARID1A, WDR77 and HDAC6, WDR77 and KAT6B, KDM3B and ARID1A, KDM3B and CHD3, SETD2 and NSD1, MTA1 and DOT1L, KDM3B and BRD1, KDM4A and KAT6A, INO80 and CBX1, HDAC6 and EZH2, SMARCAL1 and HDAC8, KAT5 and CHAF1B, SUV39H1 and HDAC6, KDM3B and BRD4, KMT2B and BRD8, PRMT5 and KAT5, SIRT4 and CBX1, KAT6A and CHD6, WDR77 and DOT1L, KAT2B and EHMT1, KMT2E and KAT6A, KDM3B and DOT1L, KDM3B and KDM3A, CHD8 and BRD1, HIRA and ATRX, KDM5C and KDM3B, PRDM6 and KDM3B, KAT6B and KAT6A, SMARCB1 and KDM6A, MECP2 and KDM4B, KAT2A and HDAC5, SETD2 and KDM3B, RFWD2 and CHD6, SMARCB1 and ARID3C, SETMAR and BRD1, HDAC2 and DIDO1, HDAC2 and DNMT3B, KDM4D and BRD1, PRDM1 and HDAC8, SMARCA5 and KAT6A, and KMT2D and ARID1A a therapeutically effective amount of one or more agents targeting the expression, activity, substrate or products of the gene not having the deficiency or mutation. In certain embodiments, the cancer comprises Acute myeloid leukemia (AML). In certain embodiments, the cancer comprises a rearrangement in TEL or MLL.

[0026] In another aspect, the present invention provides for a method for treating cancer in a subject in need thereof comprising administering to the subject a therapeutically effective amount of one or more agents targeting a first gene and one or more agents targeting a second gene for one or more gene pairs, wherein said one or more gene pairs are selected from the group consisting of MTA1 and MTA2, HDAC1 and HDAC2, CHD3 and HDAC2, ING1 and ING2, ING4 and ING5, ASF1B and ASF1A, ARID4A and JADE2, ARID4A and SMYD1, ARID4A and SETD9, ATRX and HIRA, SLBP and HIRA, CREBBP and CARM1, ARID3A and RAD54L2, JMJD6 and WDR5, DPF2 and SMYD5, JMJD6 and MBD2, MSL3 and SRCAP, KMT2C and KMT2D, HDAC3 and SETD1B, KMT2A and KMT2B, KDM3B and KMT2D, SMARCA4 and SMARCA2, BRD8 and SMARCA1, WDR77 and BRD4, SETD6 and INO80, SMARCAL1 and ATRX, KAT6B and CHD8, ARID1B and ARID1A, WDR77 and HDAC6, WDR77 and KAT6B, KDM3B and ARID1A, KDM3B and CHD3, SETD2 and NSD1, MTA1 and DOT1L, KDM3B and BRD1, KDM4A and KAT6A, INO80 and CBX1, HDAC6 and EZH2, SMARCAL1 and HDAC8, KAT5 and CHAF1B, SUV39H1 and HDAC6, KDM3B and BRD4, KMT2B and BRD8, PRMT5 and KAT5, SIRT4 and CBX1, KAT6A and CHD6, WDR77 and DOT1L, KAT2B and EHMT1, KMT2E and KAT6A, KDM3B and DOT1L, KDM3B and KDM3A, CHD8 and BRD1, HIRA and ATRX, KDM5C and KDM3B, PRDM6 and KDM3B, KAT6B and KAT6A, SMARCB1 and KDM6A, MECP2 and KDM4B, KAT2A and HDAC5, SETD2 and KDM3B, RFWD2 and CHD6, SMARCB1 and ARID3C, SETMAR and BRD1, HDAC2 and DIDO1, HDAC2 and DNMT3B, KDM4D and BRD1, PRDM1 and HDAC8, SMARCA5 and KAT6A, and KMT2D and ARID1A, and wherein the one or more agents target the expression, activity, substrate or products of said first and second genes.

[0027] In another aspect, the present invention provides for a method for treating cancer in a subject in need thereof comprising administering to the subject a therapeutically effective amount of one or more agents targeting a gene selected from the group consisting of: MEAF6, SRCAP, WDR77, CHAF1B, TAF5, CSTF1, WDHD1, BRD4, DNMT1, WDR61, GTF3C2, PRMT5, RBBP5, HDAC3, TRIM24, CHD7, HIRA and SMC1A; or HDAC3, PRMT5, DNMT1 and TAF3; or BRD4, KMT2A and CHD7; or SMC2, SMC3, TAF1, WDR92, KDM2B and HUWE1, wherein the one or more agents target the expression, activity, substrate or products of said gene.

[0028] In certain embodiments, the one or more agents according to any embodiment herein comprises a small molecule inhibitor, small molecule degrader (e.g., PROTAC), genetic modifying agent, antibody, antibody fragment, antibody-like protein scaffold, aptamer, protein, or any combination thereof.

[0029] In certain embodiments, the one or more agents comprise a histone acetylation inhibitor, histone deacetylase (HDAC) inhibitor, histone lysine methylation inhibitor, histone lysine demethylation inhibitor, DNA methyltransferase (DNMT) inhibitor, inhibitor of acetylated histone binding proteins, inhibitor of methylated histone binding proteins, sirtuin inhibitor, protein arginine methyltransferase inhibitor or kinase inhibitor. In certain embodiments, the DNA methyltransferase (DNMT) inhibitor is selected from the group consisting of azacitidine (5-azacytidine), decitabine (5-aza-2′-deoxycytidine), EGCG (epigallocatechin-3-gallate), zebularine, hydralazine, and procainamide. In certain embodiments, the histone acetylation inhibitor is C646. In certain embodiments, the histone deacetylase (HDAC) inhibitor is selected from the group consisting of vorinostat, givinostat, panobinostat, belinostat, entinostat, CG-1521, romidepsin, ITF-A, ITF-B, valproic acid, OSU-HDAC-44, HC-toxin, magnesium valproate, plitidepsin, tasquinimod, sodium butyrate, mocetinostat, carbamazepine, SB939, CHR-2845, CHR-3996, JNJ-26481585, sodium phenylbutyrate, pivanex, abexinostat, resminostat, dacinostat, droxinostat, RGFP966 and trichostatin A (TSA). In certain embodiments, the histone lysine demethylation inhibitor is selected from the group consisting of pargyline, clorgyline, bizine, GSK2879552, GSK-J4, KDM5-C70, JIB-04, and tranylcypromine. In certain embodiments, the histone lysine methylation inhibitor is selected from the group consisting of EPZ-6438, GSK126, CPI-360, CPI-1205, CPI-0209, DZNep, GSK343, EI1, BIX-01294, UNC0638, EPZ004777, GSK343, UNC1999 and UNC0224. In certain embodiments, the inhibitor of acetylated histone binding proteins is selected from the group consisting of AZD5153, PFI-1, CPI-203, CPI-0610, RVX-208, OTX015, I-BET151, I-BET762, I-BET-726, dBET1, ARV-771, ARV-825, BETd-260/ZBC260 and MZ1. In certain embodiments, the inhibitor of methylated histone binding proteins is selected from the group consisting of UNC669 and UNC1215. In certain embodiments, the sirtuin inhibitor comprises nicotinamide.

[0030] In certain embodiments, the genetic modifying agent comprises a CRISPR system, shRNA, a zinc finger nuclease system, a TALEN, or a meganuclease. The CRISPR system may comprise a Cas13 system. The Cas13 system may comprise Cas13-ADAR.

[0031] In certain embodiments, the one or more agents target an active site. In certain embodiments, the cancer is Acute lymphoblastic leukemia (ALL) or Acute myeloid leukemia (AML). In certain embodiments, the one or more agents according to any embodiment herein are administered concurrently or sequentially. In certain embodiments, an additional cancer therapy is administered (e.g., chemotherapy, radiation, surgery, immunotherapy).

[0032] In another aspect, the present invention provides for a DNA construct comprising a sequence encoding two CRISPR guide sequences positioned in an inverted orientation to each other and flanked by convergent regulatory sequences, wherein each guide sequence is operably linked to the regulatory sequence flanking the guide sequence, wherein each guide sequences is specific for an orthogonal CRISPR enzyme, and wherein the regulatory sequences do not have 100% sequence identity to one another. In certain embodiments, each regulatory sequence is a RNA polymerase III (RNAP III) promoter. In certain embodiments, one RNAP III promoter comprises the U6 promoter and one RNAP III promoter comprises the H1 promoter. In certain embodiments, the orthogonal CRISPR enzymes comprise S. aureus Cas9 and S. pyogenes Cas9. In certain embodiments, the DNA construct further comprises a sequence encoding a CRISPR enzyme operably linked to a separate regulatory sequence. The CRISPR enzyme may be S. aureus Cas9 (e.g., because it is smaller). In certain embodiments, the DNA construct further comprises a sequence encoding at least one selectable marker. The at least one selectable marker may be an antibiotic resistance gene. The at least one selectable marker may be a fluorescent gene. Each guide sequence may further comprise a barcode sequence (e.g., to identify the guide sequence). In certain embodiments, one or more of the regulatory sequences are inducible. In certain embodiments, one or both of the guide sequences comprise an aptamer sequence (e.g., for recruitment of a functional domain). The aptamer sequence may comprise an MS2 aptamer. In certain embodiments, the DNA construct further comprises primer binding sequences flanking the guide sequences.

[0033] In another aspect, the present invention provides for a vector comprising a DNA construct according to any embodiment herein. The vector may be a viral vector. The viral vector may be a lentivirus, adeno associated virus (AAV) or adenovirus vector.

[0034] In another aspect, the present invention provides for a library for the combinatorial screening of phenotypic interactions between a set of target sequences comprising a plurality of vectors according to any embodiment herein, wherein the library comprises vectors comprising all possible pairwise combinations of guide sequences specific for the set of target sequences. The set of target sequences may comprise sequences targeting expression of at least two protein coding genes. In certain embodiments, at least one protein coding gene is selected from the group consisting of: genes in Table 1; or DNMT1, KDM5A, KDM5B, KDM5C, KDM5D, SETDB1, SETDB2, BAZ2A, BAZ2B, ASH1L, KMT2A, KMT2B, SUV39H1, SUV39H2, JARID2, KAT2A, KAT2B, CHD3, CHD4, CHD5, CHAF1A, ZMYND8, BRPF1, BRPF3, BRD1, MBD2, MBD3, MBD1, HDAC4, HDAC5, HDAC9, BRWD1, BRWD3, KDM2A, PHIP, PBRM1, CXXC1, SETMAR, EHMT1, EHMT2, ATAD2, ATAD2B, KMT2C, KMT2D, KMT2E, MGMT, WBSCR22, CARM1, KDM4A, KDM4B, KDM4C, KDM4D, KDM4E, ARID4A, ARID4B, PHF2, PHF8, SP140L, BPTF, BAZ1A, BAZ1B, KDM7A, TRIM24, TRIM33, TRIM66, KAT5, KAT6A, KAT6B, KATE, CHD1, CHD2, CHD6, CHD7, CHD8, CHD9, SMARCA2, SMARCA4, SMARCA1, SMARCA5, EPC1, EPC2, KDM1A, KDM1B, DNMT3A, DNMT3B, WHSC1, WHSC1L1, NSD1, ZMYND11, SHPRH, MBD4, MBD3L1, MBD3L2, MECP2, ASF1A, ASF1B, ELP3, ING1, ING2, ING3, ING4, ING5, SLBP, SAP30L, SAP30, HAT1, HDAC1, HDAC10, HDAC11, HDAC2, HDAC3, HDAC6, HDAC7, HDAC8, DOT1L, MEAF6, FBXW9, FBXL19, TAF5L, TAF5, WDHD1, WDR48, WDR5, WDR61, WDR77, WDR82, WDR92, CHAF1B, CSTF1, CORO2A, DDB2, ELP2, EED, GTF3C2, HIRA, KDM2B, MTA2, MTA3, MTA1, RBBP4, RBBP5, RBBP7, RFWD2, TET1, TET3, CBX1, CBX2, CBX3, CBX4, CBX5, CBX6, CBX7, CBX8, CDYL2, CDYL, CDY1, CDY1B, CDY2A, CDY2B, SIRT1, SIRT2, SIRT3, SIRT4, SIRT5, SIRT6, SIRT7, SMC1A, SMC1B, SMC2, SMC3, SMC4, PRDM1, PRDM11, PRDM14, PRDM16, PRDM2, PRDM6, PRDM9, SMYD1, SMYD2, SMYD3, SMYD4, SETD1A, SETD1B, SETD2, SETD3, SETD4, SETD5, SETD6, SETD9, SETD7, SMYD5, EZH1, EZH2, ARID1A, ARID1B, ARID2, ARID3A, ARID3B, ARID3C, ARID5A, ARID5B, CREBBP, EP300, SP100, SP140, TAF1L, TAF1, BRD2, BRD3, BRD4, BRD7, BRD8, BRD9, BRDT, CECR2, HR, JMJD1C, JMJD4, JMJD6, KDM3A, KDM3B, KDM6A, KDM6B, UTY, PHRF1, PHF1, PHF10, PHF12, PHF13, PHF14, PHF19, PHF21A, PHF21B, PHF23, PHF3, TAF3, AIRE, DIDO1, DPF1, DPF2, DPF3, INTS12, KAT7, MSL3, MTF2, METTL13, MORF4L1, PRMT1, PRMT2, PRMT5, PYGO1, PYGO2, RSF1, TRIM28, UHRF1, UHRF2, EP400, INO80, RAD54L, RAD54L2, SET, SMARCAL1, SMARCB1, SMARCAD1, SRCAP, TBP, TSPYL2, ATRX, CHD1L, IL411, JADE1, JADE2 and JADE3; or DOT1L, EZH2, EHMT1, EHMT2, SETD7, SMYD2, DNMT1, PRMT1, PRMT3, PRMT5, PRMT4, PRMT6, PRMT5, KDM1A, KDM6A, KDM6B, HDAC1, HDAC2, HDAC3, HDAC6, HDAC8, SIRT1, SIRT2, SIRT6, BAZ2A, BAZ2B, BRD4, BRD9/7, EP300, CECR2, SMARCA4, P300, CDK7, EED, SMYD3, BRPF1, KDM4A, KDM4B, KDM4C, KDM4D, KDM4E, KDM5A, KDM5B, KDM5C and KDM5D.

[0035] In certain embodiments, at least one protein coding gene comprises a protein domain selected from the group consisting of PF00439:Bromodomain, PF00145:C-5 cytosine-specific DNA methylase, PF02373:JmjC domain, hydroxylase, PF00385:Chromo (CHRromatin Organisation MOdifier) domain, PF00850:Histone deacetylase domain, PF01388:ARID/BRIGHT DNA binding domain, PF02375:jmjN domain, PF00856:SET domain, PF13508:Acetyltransferase (GNAT) domain, PF06466:PCAF (P300/CBP-associated factor)N-terminal domain, PF01853:MOZ/SAS family, PF11717:RNA binding activity-knot of a chromodomain, PF08241:Methyltransferase domain, PF13847:Methyltransferase domain, PF05185:PRMT5 arginine-N-methyltransferase, PF12047:Cytosine specific DNA methyltransferase replication foci domain, PF11531:Coactivator-associated arginine methyltransferase 1 N terminal, PF12589:Methyltransferase involved in Williams-Beuren syndrome, PF01035:6-O-methylguanine DNA methyltransferase, DNA binding domain, PF02870:6-O-methylguanine DNA methyltransferase, ribonuclease-like domain, PF00628:PHD-finger, PF05033:Pre-SET motif, PF00004:ATPase family associated with various cellular activities (AAA), PF02463:RecF/RecN/SMC N terminal domain, PF02146:Sir2 family, PF01426:BAH domain, PF02008:CXXC zinc finger domain, PF06464:DMAP1-binding Domain, PF00400:WD domain, G-beta repeat, PF08123:Histone methylation protein DOT1, PF09340:Histone acetyltransferase subunit NuA4, PF10394:Histone acetyl transferase HAT1 N-terminus, PF13867:Sin3 binding region of histone deacetylase complex subunit SAP30, PF12203:Glutamine rich N terminal domain of histone deacetylase 4, PF04729:ASF1 like histone chaperone, PF12998:Inhibitor of growth proteins N-terminal histone-binding, PF15247:Histone RNA hairpin-binding protein RNA-binding domain, PF00583:Acetyltransferase (GNAT) family, PF01429:Methyl-CpG binding domain, PF14048:C-terminal domain of methyl-CpG binding protein 2 and 3, PF00956:Nucleosome assembly protein (NAP), PF01593:Flavin containing amine oxidoreductase, PF06752:Enhancer of Polycomb C-terminus, PF10513:Enhancer of polycomb-like, PF12253:Chromatin assembly factor 1 subunit A, PF15539:CAF1 complex subunit p150, region binding to CAF1-p60 at C-term, PF15557:CAF1 complex subunit p150, region binding to PCNA, PF00176:SNF2 family N-terminal domain, PF09110:HAND and PF04855: SNF5/SMARCB1/INI1.

[0036] In certain embodiments, each pairwise combination of guide sequences comprises a guide sequence selected from SEQ ID NOS: 1-552 and a guide sequence selected from SEQ ID NOS: 553-1104. In certain embodiments, each pairwise combination of guide sequences comprises a guide sequence selected from the group consisting of SEQ ID NOS: 1105-23903 and a guide sequence selected from the group consisting of SEQ ID NOS: 23904-45515.

[0037] In another aspect, the present invention provides for a method of combinatorial screening of phenotypic interactions between a set of target sequences in a population of cells comprising: introducing a library according to any embodiment herein to a population of cells, wherein two orthogonal CRISPR enzymes are expressed in said cells; selecting for cells comprising a vector of the library; selecting for cells having a desired phenotype; and determining in the cells having the desired phenotype the enrichment or depletion of combinations of guide sequences as compared to the representation in the library introduced. In certain embodiments, selecting for cells comprising a vector of the library comprises treating the population of cells with an antibiotic. In certain embodiments, the phenotypic interaction is lethality, wherein combinations of guide sequences depleted in viable cells indicate lethal combinations. In certain embodiments, the method further comprises treating the population of cells with a drug, wherein the phenotypic interaction is sensitivity or resistance to the drug. In certain embodiments, the phenotypic interaction is differentiation, wherein combinations of guide sequences are detected in cells expressing a differentiation marker. In certain embodiments, the phenotypic interaction is modulation of a cell state, wherein combinations of guide sequences are detected in cells expressing a marker of the cell state.

[0038] In certain embodiments, the population of cells is a population of cancer cells. In certain embodiments, the population of cells is a population of stem cells. In certain embodiments, the population of cells is a population of immune cells. In certain embodiments, the method comprises screening for combinations of targets capable of altering the cell state in the immune cells. The cell state may be an effector or suppressive cell state.

[0039] In certain embodiments, the combinations of targets identified are used to treat autoimmunity. In certain embodiments, the combinations of targets are used to treat cancer. In certain embodiments, the combinations of targets are used to modulate cells for adoptive cell transfer (ACT).

[0040] In certain embodiments, the method further comprises prioritizing candidate drug targets comprising determining epistatic genes, pseudo-essential genes, essential genes, pseudo-synthetic lethal genes and synthetic lethal genes, wherein candidate drug targets comprise synthetic lethal gene pairs. In certain embodiments, determining epistatic genes, pseudo-essential genes, essential genes, pseudo-synthetic lethal genes and synthetic lethal genes comprises applying an algorithm to the pair wise combinations identified. In certain embodiments, the orthogonal CRISPR enzymes comprise a Cas9, dCas9, Cas12, dCas12, or dCas13. In certain embodiments, the dCas9 or dCas12 are fusion proteins comprising an activation or repression domain. In certain embodiments, one CRISPR enzyme activates a gene and one CRISPR enzyme inactivates a gene.

[0041] In another aspect, the present invention provides for a method for generating a library for the combinatorial screening of phenotypic interactions between a set of target sequences comprising: synthesizing a first set of oligonucleotides, each oligonucleotide comprising a guide sequence specific for a target sequence in the set of target sequences and specific for a first orthogonal CRISPR enzyme, wherein the oligonucleotides comprise a first non-palindromic hybridization sequence at the 3′ end and a site for cloning into a vector at the 5′end; synthesizing a second set oligonucleotides, each oligonucleotide comprising a guide sequence specific for a target sequence in the set of target sequences and specific for a second orthogonal CRISPR enzyme, wherein the oligonucleotides comprise a second hybridization sequence at the 3′ end of the sequence that is complementary to the first hybridization sequence and a site for cloning into a vector at the 5′end; hybridizing the first and second set of oligonucleotides; performing DNA extension using the hybridization region as priming sequences to generate a pool of dsDNA oligonucleotides comprising pairs of inverted guide sequences specific for orthogonal CRISPR enzymes, wherein all pairwise combinations of guide sequences from the first and second set of oligonucleotides is represented in the pool; joining the oligonucleotides from the pool of dsDNA oligonucleotides into a vector comprising two convergent regulatory sequences flanking a cloning site, wherein the two convergent regulatory sequences do not have 100% sequence identity to one another, and wherein the oligonucleotides are joined between the convergent regulatory sequences. In certain embodiments, the ends of the oligonucleotides comprise restriction enzyme sites and the vector comprises compatible restriction enzyme site(s) between the convergent regulatory sequences, whereby joining is by ligation of compatible restriction enzyme digested ends on the oligonucleotides and the vector. In certain embodiments, the ends of the oligonucleotides comprise homologous sequences configured for recombination and the vector comprises compatible homologous sequences between the convergent regulatory sequences, whereby joining is by recombination of the oligonucleotides into the vector. The convergent regulatory sequences may be RNA polymerase III (RNAP III) promoters. In certain embodiments, one RNAP III promoter comprises the U6 promoter and one RNAP III promoter comprises the H1 promoter. The orthogonal CRISPR enzymes may comprise S. aureus Cas9 and S. pyogenes Cas9. In certain embodiments, the vector may further comprise a sequence encoding a CRISPR enzyme operably linked to a regulatory sequence. The CRISPR enzyme may be S. aureus Cas9.

[0042] In another aspect, the present invention provides for a method for treating cancer comprising a mutation in the MAPK pathway in a subject in need thereof, said method comprising administering to the subject a pharmaceutical composition capable of inhibiting the expression or activity of MAPK1 and MAPK3.

[0043] In another aspect, the present invention provides for a method for treating cancer comprising a mutation in the MAPK pathway in a subject in need thereof, said method comprising administering to the subject a pharmaceutical composition capable of inhibiting the expression or activity of ERK1 and ERK2. In certain embodiments, the mutation in the MAPK pathway comprises BRAF V600E, KRAS G12S or NRAS Q61L.

[0044] In another aspect, the present invention provides for a method for treating cancer comprising a mutation in PIK3CA in a subject in need thereof, said method comprising administering to the subject a pharmaceutical composition capable of inhibiting the expression or activity of AKT1 and AKT2.

[0045] In another aspect, the present invention provides for a kit comprising vectors according to any of embodiment herein or a library according to any embodiment herein and instructions for use.

[0046] In another aspect, the present invention provides for a system for generating a library for combinatorial screening, comprising a vector comprising convergent RNA polymerase III (RNAP III) promoters flanking a cloning site configured for accepting an oligonucleotide comprising inverted CRISPR guide sequences, optionally, a restriction enzyme and buffers specific to the cloning site.

[0047] In another aspect, the present invention provides for a combination of one or more agents targeting a first gene and one or more agents targeting a second gene for use as a medicament, wherein said first and second genes are selected from the group consisting of MTA1 and MTA2, HDAC1 and HDAC2, CHD3 and HDAC2, ING1 and ING2, ING4 and ING5, ASF1B and ASF1A, ARID4A and JADE2, ARID4A and SMYD1, ARID4A and SETD9, ATRX and HIRA, SLBP and HIRA, CREBBP and CARM1, ARID3A and RAD54L2, JMJD6 and WDR5, DPF2 and SMYD5, JMJD6 and MBD2, MSL3 and SRCAP, KMT2C and KMT2D, HDAC3 and SETD1B, KMT2A and KMT2B, KDM3B and KMT2D, SMARCA4 and SMARCA2, BRD8 and SMARCA1, WDR77 and BRD4, SETD6 and INO80, SMARCAL1 and ATRX, KAT6B and CHD8, ARID1B and ARID1A, WDR77 and HDAC6, WDR77 and KAT6B, KDM3B and ARID1A, KDM3B and CHD3, SETD2 and NSD1, MTA1 and DOT1L, KDM3B and BRD1, KDM4A and KAT6A, INO80 and CBX1, HDAC6 and EZH2, SMARCAL1 and HDAC8, KAT5 and CHAF1B, SUV39H1 and HDAC6, KDM3B and BRD4, KMT2B and BRD8, PRMT5 and KAT5, SIRT4 and CBX1, KAT6A and CHD6, WDR77 and DOT1L, KAT2B and EHMT1, KMT2E and KAT6A, KDM3B and DOT1L, KDM3B and KDM3A, CHD8 and BRD1, HIRA and ATRX, KDM5C and KDM3B, PRDM6 and KDM3B, KAT6B and KAT6A, SMARCB1 and KDM6A, MECP2 and KDM4B, KAT2A and HDAC5, SETD2 and KDM3B, RFWD2 and CHD6, SMARCB1 and ARID3C, SETMAR and BRD1, HDAC2 and DIDO1, HDAC2 and DNMT3B, KDM4D and BRD1, PRDM1 and HDAC8, SMARCA5 and KAT6A, and KMT2D and ARID1A.

[0048] In another aspect, the present invention provides for a personalized method for selecting a cancer treatment comprising determining in a subject suffering from cancer a deficiency in function or expression or a mutation in one or more pairs of genes selected from the group consisting of MTA1 and MTA2, HDAC1 and HDAC2, CHD3 and HDAC2, ING1 and ING2, ING4 and ING5, ASF1B and ASF1A, ARID4A and JADE2, ARID4A and SMYD1, ARID4A and SETD9, ATRX and HIRA, SLBP and HIRA, CREBBP and CARM1, ARID3A and RAD54L2, JMJD6 and WDR5, DPF2 and SMYD5, JMJD6 and MBD2, MSL3 and SRCAP, KMT2C and KMT2D, HDAC3 and SETD1B, KMT2A and KMT2B, KDM3B and KMT2D, SMARCA4 and SMARCA2, BRD8 and SMARCA1, WDR77 and BRD4, SETD6 and INO80, SMARCAL1 and ATRX, KAT6B and CHD8, ARID1B and ARID1A, WDR77 and HDAC6, WDR77 and KAT6B, KDM3B and ARID1A, KDM3B and CHD3, SETD2 and NSD1, MTA1 and DOT1L, KDM3B and BRD1, KDM4A and KAT6A, INO80 and CBX1, HDAC6 and EZH2, SMARCAL1 and HDAC8, KAT5 and CHAF1B, SUV39H1 and HDAC6, KDM3B and BRD4, KMT2B and BRD8, PRMT5 and KAT5, SIRT4 and CBX1, KAT6A and CHD6, WDR77 and DOT1L, KAT2B and EHMT1, KMT2E and KAT6A, KDM3B and DOT1L, KDM3B and KDM3A, CHD8 and BRD1, HIRA and ATRX, KDM5C and KDM3B, PRDM6 and KDM3B, KAT6B and KAT6A, SMARCB1 and KDM6A, MECP2 and KDM4B, KAT2A and HDAC5, SETD2 and KDM3B, RFWD2 and CHD6, SMARCB1 and ARID3C, SETMAR and BRD1, HDAC2 and DIDO1, HDAC2 and DNMT3B, KDM4D and BRD1, PRDM1 and HDAC8, SMARCA5 and KAT6A, and KMT2D and ARID1A; and selecting a treatment targeting the gene without a deficiency in function or expression or a mutation if a gene pair has a deficiency in function or expression or a mutation in only one gene in the pair. In certain embodiments, the cancer comprises Acute myeloid leukemia (AML). In certain embodiments, the cancer comprises a rearrangement in TEL or MLL.

[0049] These and other aspects, objects, features, and advantages of the example embodiments will become apparent to those having ordinary skill in the art upon consideration of the following detailed description of illustrated example embodiments.

### BRIEF DESCRIPTION OF THE DRAWINGS

[0050] An understanding of the features and advantages of the present invention will be obtained by reference to the following detailed description that sets forth illustrative embodiments, in which the principles of the invention may be utilized, and the accompanying drawings of which:

[0051] FIG. 1—Development of a two Cas9 system for combinatorial screening. (a) Schematic of the dual sgRNA expressing lentiviral vector used in this study, pPapi, as well as the cloning scheme. Pools of oligos are annealed, extended, and ligated into the pPapi vector, and used in cells that already carry the pLX_311 vector expressing SpCas9. (b) Flow cytometry plots indicating double knockout efficiency with percentage of cells indicated in each quadrant. (c) Area-Under-the-Curve (AUC) analysis of library representation. Representation was evaluated for the pDNA library for the Big Papi and CDKO libraries. Plasmid DNA sequencing was not provided for CombiGEM or Shen-Mali libraries, so early time points of genomic DNA were used, which typically very tightly match distributions of pDNA for sgRNA libraries. A perfectly distributed library (ideal) is shown in black. Big Papi SynLet library: sequencing of plasmid DNA (pDNA); Shen-Mali: day 3 genomic DNA from HeLa cells; CombiGEM: day 5 genomic DNA; CDKO: pDNA; Paired linc: pDNA. Percentages indicate each library's representation at 90% cumulative reads, and AUC values are noted in the key.

[0052] FIG. 2—Development of SaCas9 on-target rules. (a) Performance of tiled libraries of all possible sgRNAs targeting the essential EEF2 gene, grouped by PAM sequence. The box represents the 25^{th}, 50^{th} and 75^{th} percentiles, whiskers show 10^{th} and 90^{th} percentiles. (b) Comparison of the activity of EEF2 sgRNAs targeting the same cut site using either SaCas9 (NNGRRT PAM) or SpCas9 (NGG PAM). (c) Spearman correlations of the activity of sgRNAs targeting essential genes across cell lines. (d) Single nucleotide features predictive of SaCas9 activity. Top 20% of sgRNA sequences were treated as highly active and a 20% versus 80% classification model was used to identify predictive features. The −log 10 p-values are plotted (two-sided Fisher's exact test). (e) Contribution of different groups of features to the gradient boosted regression tree model for SaCas9 activity. (f) Example performance of the model. Using a version of the model in which EEF2 sgRNAs were not used in the training, sgRNA activity score is plotted versus the measured value. (g) For the model version used in (f), the fraction of sgRNAs that led to at least 4-fold depletion, binned by predicted score. The number of sgRNAs in each bin is shown above the bar. (h) Increase in model performance as more genes are used in the training set, using Spearman correlation to compare the predicted activity score to the measured value. Error bars represent standard deviation across random draws of the training genes and the held-out test gene.

[0053] FIG. 3—Evaluation of synthetic lethal screens. (a) Schematic of the Big Papi screens performed with the SynLet library. (b) Comparison of log 2-fold-change for sgRNA pairs across biological replicates and cell lines for the Big Papi approach and other published screens. When multiple time points were assessed, each is shown as a point and the line segment represents the mean. CombiGEM: Day 20 compared to Day 15; Shen-Mali: Day 14, Day 21, and Day 28 compared to Day 3; CDKO: Day 14 compared to pDNA, drug library; Big Papi: Day 9, 11, or 21 compared to pDNA. (c) Example comparison of the activity of targeting sgRNAs in the U6 position when paired with different control sgRNAs in the H1 position for the Big Papi screening approach. This data demonstrates the correlation among subsets of distinct library constructs that all target the same genomic site. (d) Pearson correlations for all pairwise combinations of controls, as in panel (c), for both sgRNA positions for several screening approaches. The point indicates the mean, the error bars represent one standard deviation for the range of pairwise correlation values. The promoter expressing the targeting sgRNA labels the x-axis. CombiGEM (n=3 pairwise comparisons): sgRNAs paired with 3 ‘dummy’ controls. Shen-Mali (n=1): sgRNAs paired with the non-targeting sgRNAs #362 and #412 in the HeLa data. CDKO (n=3,081): sgRNAs paired with 79 ‘safe’ sgRNAs. Big Papi (n=28): sgRNAs paired with ‘6T’ and ‘HPRT intron’ controls in the Meljuso, day 21 data. (e) Assessment of the essentiality of individual genes with the Big Papi screening approach at day 21. The log 2-fold-change for all six targeting sgRNAs, three with SaCas9 and three with SpCas9, were averaged to produce a gene-level score.

[0054] FIG. 4—Synthetic lethal Big Papi screen. (a) Correlation between measured and expected log 2-fold-change values for combinatorial targeting. Data points above (red) and below (blue) 2 standard deviations are highlighted, representing buffering and synthetic lethal interactions, respectively. Data from Meljuso cells are plotted as a representative cell line. (b) Distribution of all false discovery rates determined for buffering and synthetic lethal interactions using either data from individual cell lines (1 line) or combining data from 5 lines. When 5 lines are combined, more pairs score with either low FDRs or with an FDR=1. (c) FDRs for synthetic lethal interactions for gene pairs within pre-defined groups at the day 21 time point. Results are shown from individual cell lines, all leave-one-out combinations, and the combination of all 6 lines. (d) Primary screening data showing the performance of sgRNAs for BCL2L1 and MCL1 when paired together or with 6T controls in Meljuso cells at day 21. Average is denoted with a line whereas each dot represents an sgRNA combination. Dotted line refers to 2 standard deviations (2SD) from the mean for individual sgRNAs paired with controls (black dots). P-values for depletion of the dual-targeting sets of sgRNA pairs are based on the Mann-Whitney test, **P<0.01; ***P<0.001; ****P<0.0001. (e) Comparisons of the estimated true positive rate to the calculated FDR for synthetic lethal and buffering interactions, using either individual cell lines or all leave-one-out combinations of 5 cell lines. (f) Estimation of the false negative rate based on analysis of same-gene buffering interactions, using either individual cell lines or all leave-one-out combinations of 5 cell lines, plotted against the FDR.

[0055] FIG. 5—Validation of synthetic lethal interactions. (a) Gene expression values from the Cancer Cell Line Encyclopedia. (b) Validation of genetic interactions with individual gene knockout combined with small molecules. Seven days after transduction with lentivirus expressing individual sgRNAs, cells were incubated with small molecules for three days before assaying viability by Cell Titer Glo. Points represent the average and whiskers represent the maximum and minimum of two replicate wells. (c) Validation of BCL2L1-MCL1 genetic interaction with combinations of small molecules. Cells were incubated with small molecules for three days before assaying viability by Cell Titer Glo (top). Bliss independence scores were then calculated (bottom). (d) Schematic of a competition experiment used to compare cell viability of single versus double knockout of BRCA1 and PARP1. EGFP is co-delivered with SpCas9 at a low MOI, followed by introduction of the pPapi vector, which contained SaCas9 and two sgRNAs targeting BRCA1 and PARP1 with SpCas9 and SaCas9, respectively (p083), or the reverse (p092). EGFP is thus a marker for SpCas9 delivery; EGFP+ cells are double knockouts while EGFP-cells only have knockout of the SaCas9-targeted gene. Controls, containing 6T in place of the sgRNA, were also included. (e) Fraction of EGFP+ cells over time for cells receiving the indicated vector, normalized to the population that received the 6T control construct. The pPapi vectors were infected in triplicate, and error bars represent the standard deviation of the three measurements.

[0056] FIG. 6—Apoptosis Big Papi screen. (a) Schematic of the screen design. (b) Genes targeted by the Apoptosis library and the viability effects caused by single gene knockout; fold change values are calculated relative to the pDNA pool for targeting sgRNAs paired with the 6T and HPRT intron controls. (c) FDRs for buffering interactions detected between pro- and anti-apoptotic genes in Meljuso and OVCAR8 cells as well as the combined data from both cell lines. (d) From the Cancer Cell Line Encyclopedia, expression levels of these genes in Meljuso cells. BAK1 was not assessed in the CCLE, indicated by an asterisk. (e) In Meljuso cells with single gene knockouts, comparison of resistance and sensitization phenotypes for two small molecules. The fold change values are calculated relative to the no drug arm for targeting sgRNAs paired with the 6T and HPRT intron controls. Genes of interest are colored and labeled. (f) Buffering interactions in Meljuso cells for combinations of multidomain apoptotic genes with BH3-only sensitizer genes in different growth conditions. Data from the three small molecules were combined for the final column. Heat map scale is the same as in panel c. (g) Buffering interactions in Meljuso cells for combinations of pro-apoptotic genes and caspase genes in standard growth conditions and the combined data from the three small molecules. Heat map scale is the same as in panel c.

[0057] FIG. 7—Big Papi screen with two Cas9 activities. (a) In addition to using either or both Cas9s as DNA endonucleases to inactivate genes, nuclease dead versions of Cas9 (dCas9) can be used with appended domains to manipulate DNA with multiple activities. (b) Schematic of the screen for the TsgOnco Big Papi library. (c) For the TsgOnco library in high attachment conditions in HAlE cells, comparison of the activity of CRISPRa sgRNAs when paired with control SaCas9 sgRNAs. (d) Comparison of the activity of CRISPR-knockout sgRNAs when paired with control dSpCas9-VPR sgRNAs in high attachment conditions. (e) Buffering interaction observed in HAlE cells, where knockout of TP53 protects the cells from loss of viability caused by overexpression of TP53. Data for both low and high attachment conditions are shown. P-values for depletion of the dual-targeting sets of sgRNA pairs are based on the Mann-Whitney test; significance labels: **P<0.01; ****P<0.0001. (f) Knockout of tumor suppressor genes, comparing viability upon TP53 overexpression to the average viability of all other CRISPRa target genes. Genes of interest are labeled and colored.

[0058] FIG. 8—Potential sources of inefficiency for single Cas9 systems, and their solutions in a two Cas9 system. (a) Single Cas9 system using two copies of the U6 promoter. Repetitive elements such as the S. pyogenes tracrRNA (Sp tr) and U6 promoter are prone to recombination. Use of one Cas9 also risks unequal targeting due to competitive association resulting from unequal sgRNA transcription rates, sgRNA stability, and/or sequence preferences of Cas9. (b) Single Cas9 system using two different promoters. Promoters are no longer prone to recombination, although SpCas9 trRNA sequences still have sequence overlap. Additionally, unequal transcription from different promoters may exacerbate competitive association for the same Cas9. (c) A two Cas9, two promoter system. Recombination at the plasmid and/or lentiviral stage is minimized since each Cas9 uses a distinct tracrRNA and each sgRNA is driven off a distinct promoter with minimal sequence overlap. Furthermore, a two-Cas9 system enables independent association of each sgRNA to its cognate Cas9, avoiding unequal targeting due to competition for a single Cas9 between sgRNAs with potentially unequal sgRNA transcription rates, sgRNA stability, and sequence preference for Cas9, especially in cases where Cas9 expression may be low.

[0059] FIG. 9—Dual sgRNA vectors targeting EGFP and CD81. (a) Flow cytometry plots of constructs assayed 7 days post-infection. A representative plot for live/dead gating using forward and side scatter is shown. From either promoter, targeting EGFP with SaCas9 achieved greater than 95% knockout efficiency when partnered with an SpCas9 sgRNA employing the other promoter. However, the EGFP-targeting SaCas9 sgRNA was rendered inactive from either promoter when partnered with another SaCas9 sgRNA. The same trend was observed, although with a smaller effect size, with an SpCas9 sgRNA targeting CD81. (b) For two constructs analyzed in (a), flow cytometry analysis 17 days post-infection. (c) PCR analysis of the lentiviral-integrated dual sgRNA expression cassettes from genomic DNA, using the same PCR primers and conditions as used to amplify libraries for sequencing analysis. A single product predominates when the construct contained one SpCas9 sgRNA and one SaCas9 sgRNA, whereas constructs with two SaCas9 sgRNAs or two SpCas9 sgRNAs showed diminished abundance of the full-size product and the appearance of multiple smaller products, suggesting that recombination contributes to decreased knockout efficiency. Constructs are numbered as in panel (a).

[0060] FIG. 10—Development of SaCas9 on-target rules. (a) Representation of all SaCas9 sgRNAs tested according to group and gene. sgRNAs are grouped based on whether the target gene is assayed by 6-thioguanine resistance, cell viability, or vemurafenib resistance. Control sgRNAs are also indicated. (b) Log 2 fold change of sgRNAs relative to their starting abundance in the plasmid DNA library in cell viability and resistance experiments. That knockout of NUDTS confers 6-thioguanine resistance in 293T cells but not A375 cell is expected based on previous results¹⁶. P-values: Kruskal-Wallis test with Dunn's multiple comparisons test for each gene relative to the set of non-targeting controls. Significance labels: ns, not significant; *P<0.05; **P<0.01; ***P<0.001; ****P<0.0001.

[0061] FIG. 11—Screening performance of SynLet library across cell lines. (a) Comparison of the effect of single gene knockout on cell viability as determined with SpCas9 versus SaCas9. Multiple sgRNAs per gene were averaged to generate a gene-level value. Pearson correlations are indicated. (b) Comparison of essentiality of individual genes across samples, plotting the average of the Log 2-fold-change values for SaCas9 and SpCas9. Data are the same as in FIG. 3e, with the addition of earlier time points when available.

[0062] FIG. 12—Analysis methodology for assessing genetic interactions. (a) Model for detecting genetic interactions by determining the delta Log 2-fold-change (ΔLFC), the deviation of the measured Log 2-fold-change from the expectation for two sgRNAs, as determined by their log 2-fold-change when paired with controls. (b) For each of the 6 sgRNAs (3 for each Cas9) for a given test gene, BCL2L1 in this example, the 96 partner sgRNAs are ranked by the ΔLFC calculation. These ranks are then collated by the identity of the partner gene and averaged. When data from multiple conditions (e.g. cell lines, small molecule treatments) were combined, the ΔLFC values were median-centered within each dataset, and then the test-partner analysis performed. (c) Average rank of partnered sgRNAs for the procedure described in (b). The null distribution was determined by performing the same calculations on 2,000 random shuffles of the sgRNA labels, allowing the calculation of a false discovery rate (FDR). Three outlier synthetic lethal gene pairs in Meljuso cells are highlighted. When information from multiple cell lines or small molecule treatments are combined, a new null distribution must be derived, as the ranked list of partner genes spans a larger range (e.g. for combining the SynLet data across all cell lines, there are 6×96=576 partner sgRNAs). (d) Comparison of the average ranks when the identities of test and partner genes are swapped. Pearson correlation is shown. Colored dots represent gene pairs of interest. Gray dots represent the special case where the test and partner genes are the same, which were excluded from the calculation of correlation. (e) Comparison of the average rank of partnered sgRNAs in Meljuso cells harvested at day 9 and day 21. Dots in gray are gene pairs where both Cas9s target the same gene. The blue and red dotted lines indicate ranks that correspond to a false discovery rate of 0.01 for synthetic lethal and buffering interactions, respectively.

[0063] FIG. 13—Comparisons of top hits across screening approaches. Dotted line refers to 2 standard deviations (2SD) from the mean for the set of all individual sgRNAs paired with controls. P-values for depletion of the dual-targeting sets of sgRNA pairs are based on the Mann-Whitney test; significance labels: ns, not significant; *P<0.05; **P<0.01; ***P<0.001; ****P<0.0001. Big Papi: Data from BCL2L1-MCL1 at Day 21 in Meljuso cells are repeated here from FIG. 4d for ease of comparison. Hits from other cell lines are shown; false discovery rates (FDRs) from Supplementary Table 4. CDKO: Data from two top hits in the primary screen. For BCL2L1-MCL1, data are shown when unfiltered or filtered by read count. Shen-Mali: top two hits from each cell line based on analysis provided in that publication. Log-fold-change values are the average for the day 14, 21, and 28 time points compared to the day 3 time point. CombiGEM: Data from comparison of Day 20 to Day 15 for two top hits highlighted in that publication.

[0064] FIG. 14—Analysis of same-gene interactions. These analyses examine the special case where both sgRNAs target the same gene. (a) For each cell line, the number of same-gene interactions that score with an FDR<0.25 for synthetic lethal and buffering interactions. (b) FDRs for the buffering and synthetic lethal interactions for individual cell lines, all leave-one-out iterations, and the combination of all 6 cell lines. Most genes engage in same-gene buffering interactions, indicating effective targeting, but some genes show a synthetic lethal interaction. In this case, each sgRNA is not fully effective in targeting the gene, and thus there is additional viability loss possible when two sgRNAs are used to target the gene.

[0065] FIG. 15—Additional validation of anti-apoptotic gene interactions. (a) As in FIG. 5b, cells were infected with individual sgRNAs and 7 days post-infection treated with small molecules over a range of doses. Cell viability was determined by Cell Titer Glo after 3 days. (b) As in FIG. 5c, cells were treated with combinations of small molecules and cell viability was determined by Cell Titer Glo after 3 days (top) and Bliss independence scores were calculated (bottom).

[0066] FIG. 16—Apoptosis library screening results. All pairwise buffering and synthetic lethal FDRs are shown for the combined OVCAR8 and Meljuso data in standard growth conditions.

[0067] FIG. 17—TsgOnco screening results. The log 2-fold-change values were first averaged across all pairs of sgRNAs targeting the same gene pairs, and then median-centered within each gene knockout.

[0068] FIG. 18—Rescue from TP53 overexpression. As in FIG. 7e, log 2-fold-change values for individual pairs of sgRNAs. P-values for depletion of the dual-targeting sets of sgRNA pairs are based on the Mann-Whitney test; significance labels: ns, not significant; *P<0.05; **P<0.01; ***P<0.001; ****P<0.0001.

[0069] FIG. 19—Subsampling of SynLet library. (a) Random draws of increasing numbers of sgRNAs were sampled and FDRs calculated. The dotted line indicates an FDR threshold of 0.01. 786O cells are not shown because no gene pairs scored with an FDR<0.01. Applicants found the largest single-step improvement in the number of detected interactions going from 3 to 4 total sgRNA combinations, when each gene in a pair is examined with at least 2 sgRNAs. (b) Total number of genes detected across the five cell lines with increasing numbers of sgRNAs. The points indicate the total at an FDR threshold of 0.01, and the whiskers indicate FDR thresholds of 0.005 and 0.02. Thus, the performance of the Big Papi system makes it feasible to reduce from 3 to 2 guides per gene, reducing the screen size by 2.25-fold (3²/2²) or alternatively to decrease the stringency of the analysis by requiring only a fraction of sgRNA pairs to display robust activity for hit identification in the primary screen, improving sensitivity.

[0070] FIG. 20—illustrates pPapi, U6-H1 region of the vector (SEQ ID NO:45,538).

[0071] FIG. 21—illustrates the PCR primers for sequencing deconvolution (SEQ ID NO:45,539 and SEQ ID NO:45,540).

[0072] FIG. 22—illustrates sgRNA sequences (SEQ ID NO:45,541-45,548).

[0073] FIG. 23—illustrates a schematic of disease relevant screening of a dual sgRNA pooled library in leukemia cell lines.

[0074] FIG. 24—illustrates a triage methodology for characterizing genes assayed in the combinatorial screen.

[0075] FIG. 25—illustrates synthetic lethal combinations (ARID1A;ARID1B). NT=non-targeting sgRNA. The combinations are shown for sgRNAs for both of the orthologous CRISPR enzymes.

[0076] FIG. 26—illustrates a schematic for follow-up validation of synthetic lethal combinations using a GFP vector.

[0077] FIG. 27—illustrates validation that ARID1A;ARID1B knockout impairs growth.

[0078] FIG. 28—illustrates that synthetic lethal genes rarely buffer in combinations and epistatic genes buffer lethal genes.

[0079] FIG. 29—illustrates buffering and that HDAC3 is a pseudo essential gene.

[0080] FIG. 30—illustrates buffering and that TAF3 (pseudo essential gene) knockout is rescued by NSD1/2 loss.

[0081] FIG. 31—illustrates buffering and that MLL (KMT2A) knockout is partially rescued by NSD1/2 loss.

[0082] FIG. 32—illustrates that the combination screening methodology can improve or predict responses from existing drugs or drug targets.

[0083] FIG. 33—illustrates that WDR77 and BRD4 are a synthetic lethal combination.

[0084] FIG. 34—illustrates that WDR77 KO sensitizes THP-1 cells to JQ1 treatment. JQ1 dose response+/−WDR77 KO. Octuplicate wells. Repeated with two sgRNAs.

[0085] FIG. 35—illustrates that WDR77 KO sensitizes THP-1 (AML MLL-AF9) cells to AZD5153 treatment.

[0086] FIG. 36—illustrates that WDR77 KO sensitizes MV4-11 (AML MLL-AF4) cells to AZD5153 treatment.

[0087] FIG. 37—illustrates that SETD6 and INO80 are a synthetic lethal combination.

[0088] FIG. 38—illustrates follow-up experiment validating synthetic lethality of SETD6 and INO80 in cancer cell lines. Cell lines THP-1 and Nomo-1 (MLL-AF9 fusion AML) and Reh (no MLL fusion) were utilized. Cells were transduced with combo CRISPR GFP lentivirus and fluorescence analyzed at two time points. NT=non-targeting guide. EEF2 is an essential gene.

[0089] FIG. 39—illustrates follow-up validation experiments for the indicated combinations. Fluorescence was analyzed at two time points (Day 3 and 21). NT=non-targeting guide. EEF2 is an essential gene.

[0090] FIG. 40—illustrates the screening result of TAF3 and PHF23 combination showing that PHF23 knockout buffers TAF3 essentiality.

[0091] FIG. 41—illustrates a singleton gene knockout data library screen in REH and THP-1 cells.

[0092] FIG. 42—Selection and characterization of chromatin regulators for combinatorial screening. a) Pie chart summarizing activities of the 268 selected chromatin regulator genes. These genes contained 374 protein family (PFAM) domains that were compiled into broad functional categories. b) Bar plot with deletion frequency of the 268 genes found in 10,967 TCGA samples. X-axis extends out to 35 deletions. Data were compiled from cbioportal. c) Top homozygous deletions of the 268 chromatin regulators in TCGA samples. Complexes and genes investigated further in this study are demarcated. d) Schematic representation of library cloning, lentiviral production, THP-1 or Reh cell transduction, and screening for viability.

[0093] FIG. 43—Essential singleton and combinatorial hits from the 300 k library screen. a,b) Histogram of singleton knockout data from the combinatorial screen in Reh (acute lymphocytic leukemia, a) and THP-1 (acute myeloid leukemia, b) cells. Hits below 2 standard deviations are highlighted. EEF2 is an essential gene used as a control. c,d) Volcano plot depicting the most likely synthetic lethal combinatorial hits from screening in Reh (c) and THP-1 (d). Data are an average of two replicates. Depletion score is an absolute measurement of loss of averaged gene pair data. Pi score is an interaction score accounting for the effects of each gene separately and measuring the additional effect by pairing the two genes.

[0094] FIG. 44—NuRD and SIN3A complex dependencies across eight leukemia lines. a) Schematic representation of the 8 k library generation from a selection of 39 genes, many hits from the 300 k combinatorial screen, and validation screening in Reh and THP-1 as well as six additional AML lines. b) Graphical representation of the canonical NuRD complex according to HUGO Gene Nomenclature Committee. c,d) Heatmaps of RNAseq data (c) and Avana knockout data (d) from the DepMap for tested NuRD complex members. e) Combinatorial knockout heatmap from the 8 k library screen. Pi score was supplemented with a z-score calculation to indicate confidence in heatmap. f,g) Heatmaps of RNAseq data (f) and Avana knockout data (g) from the DepMap for tested SIN3A complex members. h) Combinatorial knockout heatmap from the 8 k library screen for SIN3A complex members tested. i) Graphical representation of the canonical SIN3A complex according to HUGO Gene Nomenclature Committee. For all panels with Avana, 19q1 data were sourced. For all figures with RNAseq, 18Q1 data were sourced. “TEL-r” and “MLL-r” indicates a rearrangement in the TEL or MLL genes. “None” indicates neither a TEL or MLL rearrangement detected in the lines.

[0095] FIG. 45—ASF1 and KAT7 complex dependencies across eight leukemia lines. a,b) Heatmaps of RNAseq data (a) and Avana knockout data (b) from the DepMap for histone chaperone members. c) Combinatorial knockout heatmap from the 8 k library screen for ASF1A and ASF1B. d,e) Heatmaps of RNAseq data (d) and Avana knockout data (e) from the DepMap for KAT7 acetyltransferase complex. f) Combinatorial knockout heatmap from the 8 k library screen for ING4 and ING5. g) Graphical representation of the canonical KAT7 complex according to CORUM. For all panels with Avana, 19q1 data is sourced. For all figures with RNAseq, 18Q1 data is sourced. “TEL-r” and “MLL-r” indicates a rearrangement in the TEL or MLL genes. “None” indicates neither a TEL or MLL rearrangement detected in the lines.

[0096] FIG. 46—Characterization of 268 chromatin regulator genes. a) Gene ontology, molecular function. b) Homozygous deletion frequency in 881 CCLE samples. Inset: Pie chart depicting the percent of cell lines with 1 or greater deletions compared to no deletions. c) Histogram of the most frequently mutated chromatin regulator genes in blood CCLE sample. Relevant genes and complexes to this study are highlighted.

[0097] FIG. 47—Avana results of selected chromatin regulators. Heatmap with 234 tested of 268 chromatin regulators, with the top 22 pan-essential genes labeled.

[0098] FIG. 48—Cas9 ortholog performance comparison for the 40 k library screen. Two-tailed pearson correlation.

[0099] FIG. 49—Replicate correlation in the 40 k library screen. Two-tailed pearson correlation.

[0100] FIG. 50—40 k library screen data. a,b) Singleton knockout frequency distributions for Reh (a) and THP-1 (b) with hits below 2 standard deviations labeled. c,d) Example guide pair data for each cell line tested. ***P<0.001 e,f) Combinatorial data.

[0101] FIG. 51—Cas9 ortholog performance comparison for the 300 k library screen. Two-tailed pearson correlation.

[0102] FIG. 52—Replicate correlation in the 300 k library screen. Two-tailed pearson correlation.

[0103] FIG. 53—Singleton knockout data from the 300 k library screen correlated to Avana. a,b) Regression analysis of 300 k library screen dependency vs. Avana dependency in Reh (a) and THP-1 (b). 300 k library data were normalized such that the median log-2 fold change is 0 and the median absolute deviation is 1. c) Venn diagram of hits identified in 300 k library screen. Two-tailed pearson correlation.

[0104] FIG. 54—Tumor suppressor mutations found in the eight leukemia lines in this study. A selection of 129 tumor suppressors (Vogelstein) were analyzed for mutations. Data are from cbioportal and DepMap, with a detected mutation in either database selected for display.

[0105] The figures herein are for illustrative purposes only and are not necessarily drawn to scale.

### DETAILED DESCRIPTION OF THE EXAMPLE EMBODIMENTS

### General Definitions

[0106] Unless defined otherwise, technical and scientific terms used herein have the same meaning as commonly understood by one of ordinary skill in the art to which this disclosure pertains. Definitions of common terms and techniques in molecular biology may be found in Molecular Cloning: A Laboratory Manual, 2^{nd} edition (1989) (Sambrook, Fritsch, and Maniatis); Molecular Cloning: A Laboratory Manual, 4^{th} edition (2012) (Green and Sambrook); Current Protocols in Molecular Biology (1987) (F. M. Ausubel et al. eds.); the series Methods in Enzymology (Academic Press, Inc.): PCR 2: A Practical Approach (1995) (M. J. MacPherson, B. D. Hames, and G. R. Taylor eds.): Antibodies, A Laboratory Manual (1988) (Harlow and Lane, eds.): Antibodies A Laboratory Manual, 2^{nd} edition 2013 (E. A. Greenfield ed.); Animal Cell Culture (1987) (R. I. Freshney, ed.); Benjamin Lewin, Genes IX, published by Jones and Bartlet, 2008 (ISBN 0763752223); Kendrew et al. (eds.), The Encyclopedia of Molecular Biology, published by Blackwell Science Ltd., 1994 (ISBN 0632021829); Robert A. Meyers (ed.), Molecular Biology and Biotechnology: a Comprehensive Desk Reference, published by VCH Publishers, Inc., 1995 (ISBN 9780471185710); Singleton et al., Dictionary of Microbiology and Molecular Biology 2nd ed., J. Wiley & Sons (New York, N.Y. 1994), March, Advanced Organic Chemistry Reactions, Mechanisms and Structure 4^{th} ed., John Wiley & Sons (New York, N.Y. 1992); and Marten H. Hofker and Jan van Deursen, Transgenic Mouse Methods and Protocols, 2^{nd} edition (2011).

[0107] Unless otherwise defined, all terms used in disclosing the invention, including technical and scientific terms, have the meaning as commonly understood by one of ordinary skill in the art to which this invention belongs. By means of further guidance, term definitions are included to better appreciate the teaching of the present invention.

[0108] As used herein, the singular forms “a”, “an”, and “the” include both singular and plural referents unless the context clearly dictates otherwise.

[0109] The term “optional” or “optionally” means that the subsequent described event, circumstance or substituent may or may not occur, and that the description includes instances where the event or circumstance occurs and instances where it does not.

[0110] The recitation of numerical ranges by endpoints includes all numbers and fractions subsumed within the respective ranges, as well as the recited endpoints.

[0111] The terms “about” or “approximately” as used herein when referring to a measurable value such as a parameter, an amount, a temporal duration, and the like, are meant to encompass variations of and from the specified value, such as variations of +1-10% or less, +1-5% or less, +/−1% or less, and +1-0.1% or less of and from the specified value, insofar such variations are appropriate to perform in the disclosed invention. It is to be understood that the value to which the modifier “about” or “approximately” refers is itself also specifically, and preferably, disclosed.

[0112] As used herein, a “biological sample” may contain whole cells and/or live cells and/or cell debris. The biological sample may contain (or be derived from) a “bodily fluid”. The present invention encompasses embodiments wherein the bodily fluid is selected from amniotic fluid, aqueous humour, vitreous humour, bile, blood serum, breast milk, cerebrospinal fluid, cerumen (earwax), chyle, chyme, endolymph, perilymph, exudates, feces, female ejaculate, gastric acid, gastric juice, lymph, mucus (including nasal drainage and phlegm), pericardial fluid, peritoneal fluid, pleural fluid, pus, rheum, saliva, sebum (skin oil), semen, sputum, synovial fluid, sweat, tears, urine, vaginal secretion, vomit and mixtures of one or more thereof. Biological samples include cell cultures, bodily fluids, cell cultures from bodily fluids. Bodily fluids may be obtained from a mammal organism, for example by puncture, or other collecting or sampling procedures.

[0113] The terms “subject,” “individual,” and “patient” are used interchangeably herein to refer to a vertebrate, preferably a mammal, more preferably a human. Mammals include, but are not limited to, murines, simians, humans, farm animals, sport animals, and pets. Tissues, cells and their progeny of a biological entity obtained in vivo or cultured in vitro are also encompassed.

[0114] Various embodiments are described hereinafter. It should be noted that the specific embodiments are not intended as an exhaustive description or as a limitation to the broader aspects discussed herein. One aspect described in conjunction with a particular embodiment is not necessarily limited to that embodiment and can be practiced with any other embodiment(s). Reference throughout this specification to “one embodiment”, “an embodiment,” “an example embodiment,” means that a particular feature, structure or characteristic described in connection with the embodiment is included in at least one embodiment of the present invention. Thus, appearances of the phrases “in one embodiment,” “in an embodiment,” or “an example embodiment” in various places throughout this specification are not necessarily all referring to the same embodiment, but may. Furthermore, the particular features, structures or characteristics may be combined in any suitable manner, as would be apparent to a person skilled in the art from this disclosure, in one or more embodiments. Furthermore, while some embodiments described herein include some but not other features included in other embodiments, combinations of features of different embodiments are meant to be within the scope of the invention. For example, in the appended claims, any of the claimed embodiments can be used in any combination.

[0115] Reference is made to the following publication authored by the Applicants: Najm et al., Orthologous CRISPR-Cas9 enzymes for combinatorial genetic screens. Nat Biotechnol. 2018 February; 36(2):179-189. doi: 10.1038/nbt.4048. Epub 2017 Dec. 18.

[0116] All publications, published patent documents, and patent applications cited herein are hereby incorporated by reference to the same extent as though each individual publication, published patent document, or patent application was specifically and individually indicated as being incorporated by reference.

### Overview

[0117] Embodiments disclosed herein provide a screening platform for the combinatorial screening of phenotypic interactions, a combinatorial screening platform that targets chromatin regulators, targets identified using the described screening platform for use as therapeutic candidates, and a synthetic lethality and buffering gene methodology. In certain embodiments, the screening platform can be used to define a chromatin landscape, weaknesses, and/or vulnerabilities in a disease (e.g., cancer), thus, informing therapeutic approaches.

[0118] Combinatorial genetic screening using CRISPR-Cas9 is a useful approach to uncover redundant genes and to explore complex gene networks. However, current approaches suffer from interference between the single-guide RNAs (sgRNAs) and from limited gene targeting activity. Applicants developed an approach that relies on orthogonal Cas9 enzymes, from S. pyogenes and S. aureus (SpCas9 and SaCas9), to overcome practical limitations of previous approaches and to achieve dual-knockout efficiencies that enable robust screening.

[0119] Applicants used machine learning to establish S. aureus Cas9 sgRNA design rules and paired S. aureus Cas9 with S. pyogenes Cas9 to achieve dual targeting in a high fraction of cells. Applicants also developed a lentiviral vector and cloning strategy to generate high-complexity pooled dual-knockout libraries to identify synthetic lethal and buffering gene pairs across multiple cell types, including MAPK pathway genes and apoptotic genes. The orthologous approach enabled a screen combining gene knockouts with transcriptional activation, which revealed genetic interactions with TP53. The “Big Papi” (Paired aureus and pyogenes for interactions) approach described here is widely applicable for the study of combinatorial phenotypes.

[0120] This approach uncovered synthetic lethal and buffering relationships across multiple cell types with excellent correspondence between unique sgRNA pairs targeting the same gene pairs. As two sgRNAs independently program two different Cas9s, this approach can combine different activities in the same screen, such as knockout and overexpression (CRISPRa)¹⁵. The screening platform using paired aureus and pyogenes can be used for interaction screens to interrogate large combinatorial space at scale and has applications in many cellular models.

[0121] Genes that regulate chromatin are often mutated in cancer, and are commonly found in redundant pathways. Applicants have developed a chromatin regulator screening platform and have identified synthetic lethal gene combinations and buffering combinations. These combinations may be targeted pharmaceutically in disease.

### Screening Platform

[0122] In certain example embodiments, the present invention provides for a screening platform to allow for the perturbation of combinations of target sequences. The screening platform advantageously uses orthogonal CRISPR enzymes to perturb two target sequences in combination in a cell. The screening platform advantageously uses a library of pairwise perturbation target combinations to allow for a pooled screen in a population of cells.

[0123] The term “orthogonal CRISPR enzymes” refers to CRISPR enzymes (i) that do not cross-activate or interfere with each other; and (ii) do not interact with the sgRNAs of the other CRISPR enzyme. In certain embodiments, orthogonal CRISPR enzymes recognize different scaffold sequences and recognize different PAM sequences. In certain embodiments, orthogonal CRISPR enzymes can be naturally occurring CRISPR enzymes or engineered non-naturally occurring CRISPR enzymes. In certain embodiments, orthogonal CRISPR enzymes include, but are not limited to SaCas9 and SpCas9 (described further herein). In certain embodiments, the present invention includes any pair of orthogonal CRISPR enzymes having different PAM sequences and recognizing different scaffold sequences.

[0124] The terms “target nucleic acid,” “target site,” and “target sequence” may be used interchangeably throughout and refer to any nucleic acid sequence in a host cell that may be targeted by the CRISPR guide sequences described herein. The target nucleic acid is flanked downstream by a protospacer adjacent motif (PAM) that may interact with the endonuclease (e.g., orthogonal CRISPR enzymes) and be further involved in targeting the endonuclease activity to the target nucleic acid. It is generally thought that the PAM sequence flanking the target nucleic acid depends on the endonuclease and the source from which the endonuclease is derived. For example, for Cas9 endonucleases that are derived from Streptococcus pyogenes, the PAM sequence is NGG. For Cas9 endonucleases derived from Staphylococcus aureus, the PAM sequence is NNGRRT. For Cas9 endonucleases that are derived from Neisseria meningitidis, the PAM sequence is NNNNGATT. For Cas9 endonucleases derived from Streptococcus thermophilus, the PAM sequence is NNAGAA. For Cas9 endonuclease derived from Treponema denticola, the PAM sequence is NAAAAC. For a Cpf1 nuclease, the PAM sequence is TTN. As used herein, the term “targeting” of a selected DNA sequence means that a guide RNA is capable of hybridizing with a selected DNA sequence.

[0125] In any of the non-naturally-occurring CRISPR enzymes, the CRISPR enzyme may comprise a CRISPR enzyme from an organism from a genus comprising Streptococcus, Campylobacter, Nitratifractor, Staphylococcus, Parvibaculum, Roseburia, Neisseria, Gluconacetobacter, Azospirillum, Sphaerochaeta, Lactobacillus, Eubacterium or Corynebacter.

[0126] In any of the non-naturally-occurring CRISPR enzymes, the CRISPR enzyme may comprise a chimeric Cas9 enzyme comprising a first fragment from a first Cas9 ortholog and a second fragment from a second Cas9 ortholog, and the first and second Cas9 orthologs are different. At least one of the first and second Cas9 orthologs may comprise a Cas9 from an organism comprising Streptococcus, Campylobacter, Nitratifractor, Staphylococcus, Parvibaculum, Roseburia, Neisseria, Gluconacetobacter, Azospirillum, Sphaerochaeta, Lactobacillus, Eubacterium or Corynebacter.

[0127] In certain embodiments, the Cas9 endonuclease is derived from Streptococcus pyogenes, Staphylococcus aureus, Neisseria meningitidis, Streptococcus thermophilus, or Treponema denticola. In certain embodiments, the nucleotide sequence encoding the Cas9 endonuclease may be codon optimized for expression in a host cell or organism. In certain embodiments, the endonuclease is a Cas9 homology or ortholog.

[0128] In certain embodiments, the endonuclease is a Cpf1 nuclease (Cas12). In certain embodiments, the Cpf1 nuclease is derived from Pwvetella spp. or Francisella spp. In certain embodiments, the nucleotide sequence encoding the Cpf1 nuclease may be codon optimized for expression in a host cell or organism. Not being bound by a theory, expression of Cpf1 in a combinatorial screening approach as described herein may require that the Cpf1 nuclease is expressed at higher levels than an orthogonal CRISPR enzyme in order to account for lower gene editing efficiency.

[0129] In preferred embodiments, the orthogonal CRISPR enzymes are Cas9 endonucleases derived from Streptococcus pyogenes and Staphylococcus aureus.

[0130] In aspects of the invention the terms “guide sequence” “chimeric RNA”, “chimeric guide RNA”, “guide RNA”, “single guide RNA”, “sgRNA”, and “synthetic guide RNA” are used interchangeably and refer to the polynucleotide sequence comprising the guide sequence, preferably the tracr sequence and the tracr mate sequence. The term “guide sequence” refers to the about 20 bp sequence within the guide RNA that specifies the target site and may be used interchangeably with the terms “guide” or “spacer”. The term “tracr mate sequence” may also be used interchangeably with the term “direct repeat(s)”. In certain embodiments, the term “sgRNA sequence” may refer to a DNA sequence encoding for a sgRNA.

[0131] In a host cell, the DNA element comprising a CRISPR guide sequence and a scaffold sequence is transcribed and forms a CRISPR single guide RNA (sgRNA) that functions to recruit an endonuclease to a specific target nucleic acid in a host cell, which may result in site-specific CRISPR activity. As used herein, a “CRISPR guide sequence” refers to a nucleic acid sequence that is complementary to a target nucleic acid sequence in a host cell. The CRISPR guide sequence targets the sgRNA to a target nucleic acid sequence, also referred to as a target site. The CRISPR guide sequence that is complementary to the target nucleic acid may be between 15-25 nucleotides, 18-22 nucleotides, or 19-21 nucleotides in length. In certain embodiments, the CRISPR guide sequence that is complementary to the target nucleic acid is 15, 16, 17, 18, 19, 20, 21, 22, 23, 24, or 25 nucleotides in length. In certain embodiments, the CRISPR guide sequence that is complementary to the target nucleic acid is 20 nucleotides in length.

[0132] It will be appreciated that a CRISPR guide sequence is complementary to a target nucleic acid in a host cell if the CRISPR guide sequence is capable of hybridizing to the target nucleic acid. In certain embodiments, the CRISPR guide sequence is at least 50%, 55%, 60%, 65%, 70%, 75%, 80%, 85%, 90%, 95%, 96%, 97%, 98%, 99%, or at least 100% complementary to a target nucleic acid (see also U.S. Pat. No. 8,697,359, which is incorporated by reference for its teaching of complementarity of a CRISPR guide sequence with a target polynucleotide sequence). It has been demonstrated that mismatches between a CRISPR guide sequence and the target nucleic acid near the 3′ end of the target nucleic acid may abolish nuclease cleavage activity (Upadhyay, et al. Genes Genome Genetics (2013) 3(12):2233-2238). In certain embodiments, the CRISPR guide sequence is at least 50%, 55%, 60%, 65%, 70%, 75%, 80%, 85%, 90%, 95%, 96%, 97%, 98%, 99%, or at least 100% complementary to the 3′ end of the target nucleic acid (e.g., the last 5, 6, 7, 8, 9, or 10 nucleotides of the 3′ end of the target nucleic acid). The CRISPR guide sequence may be obtained from any source known in the art. For example, the CRISPR guide sequence may be any nucleic acid sequence of the indicated length present in the nucleic acid of a host cell (e.g., genomic nucleic acid and/or extra-genomic nucleic acid). In certain embodiments, CRISPR guide sequences may be designed and synthesized to target desired nucleic acids, such as nucleic acids encoding transcription factors, signaling proteins, transporters, etc. In certain embodiments, the CRISPR guide sequences are designed and synthesized to target epigenetic genes.

[0133] In certain embodiments, the guide sequences are encoded for by a DNA construct comprising a nucleotide sequence. In certain embodiments, the DNA construct comprises a pair of orthologous guide sequences that are inverted in relation to each other. By inverted it is meant that the guide sequences are facing each other. In preferred embodiments, the nucleotide sequence encodes the pair of guide sequences such that the ends of the guide sequences are facing. In certain embodiments, the inverted configuration allows for construction of the orthologous screening platform, such that each construct encodes a guide sequence specific to each orthologous CRISPR enzyme.

[0134] The terms “polynucleotide”, “nucleotide”, “nucleotide sequence”, “nucleic acid” and “oligonucleotide” are used interchangeably. They refer to a polymeric form of nucleotides of any length, either deoxyribonucleotides or ribonucleotides, or analogs thereof. Polynucleotides may have any three-dimensional structure, and may perform any function, known or unknown. The following are non-limiting examples of polynucleotides: coding or non-coding regions of a gene or gene fragment, loci (locus) defined from linkage analysis, exons, introns, messenger RNA (mRNA), transfer RNA, ribosomal RNA, short interfering RNA (siRNA), short-hairpin RNA (shRNA), micro-RNA (miRNA), ribozymes, cDNA, recombinant polynucleotides, branched polynucleotides, plasmids, vectors, isolated DNA of any sequence, isolated RNA of any sequence, nucleic acid probes, and primers. A polynucleotide may comprise one or more modified nucleotides, such as methylated nucleotides and nucleotide analogs. If present, modifications to the nucleotide structure may be imparted before or after assembly of the polymer. The sequence of nucleotides may be interrupted by non-nucleotide components. A polynucleotide may be further modified after polymerization, such as by conjugation with a labeling component.

[0135] In certain embodiments, the screening platform constructs utilize two regulatory sequences that do not have 100% identity, such that each of the two guide sequences is operably linked to one of the regulatory sequences. In certain embodiments, the two regulatory sequences cannot recombine in the host cell because they do not have 100% identity. In certain embodiments, the regulatory sequences do not have 90, 80, 70, 60, 50, or less than 40% identity.

[0136] In certain embodiments, the regulatory sequences (e.g., promoters) operably linked to each guide sequence are convergent. In certain embodiments, the sequences encoding the guide sequences are inverted (e.g., the downstream sequence of each guide sequence face each other and each guide sequence is transcribed in the opposite direction). As used herein the term “convergent promoters” refers to promoters that are situated on either side of the inverted guide sequence cassette, such that the direction of transcription from each promoter is towards the center of the inverted guide sequences. In certain embodiments, this allows for a single construct comprising two inverted guide sequences to be inserted between the convergent regulatory sequences in a single cloning step.

[0137] Within an expression vector, “operably linked” is intended to mean that the nucleotide sequence of interest is linked to the regulatory sequence(s) in a manner which allows for expression of the nucleotide sequence (e.g., in an in vitro transcription/translation system or in a target cell when the vector is introduced into the target cell).

[0138] The term “regulatory element” is intended to include promoters, enhancers, internal ribosomal entry sites (IRES), and other expression control elements (e.g. transcription termination signals, such as polyadenylation signals and poly-U sequences). Such regulatory elements are described, for example, in Goeddel, GENE EXPRESSION TECHNOLOGY: METHODS IN ENZYMOLOGY 185, Academic Press, San Diego, Calif. (1990). Regulatory elements include those that direct constitutive expression of a nucleotide sequence in many types of host cell and those that direct expression of the nucleotide sequence only in certain host cells (e.g., tissue-specific regulatory sequences). A tissue-specific promoter may direct expression primarily in a desired tissue of interest, such as muscle, neuron, bone, skin, blood, specific organs (e.g. liver, pancreas), or particular cell types (e.g. lymphocytes). Regulatory elements may also direct expression in a temporal-dependent manner, such as in a cell-cycle dependent or developmental stage-dependent manner, which may or may not also be tissue or cell-type specific. In certain embodiments, a vector comprises one or more pol III promoter (e.g. 1, 2, 3, 4, 5, or more pol III promoters), one or more pol II promoters (e.g. 1, 2, 3, 4, 5, or more pol II promoters), one or more pol I promoters (e.g. 1, 2, 3, 4, 5, or more pol I promoters), or combinations thereof. Examples of pol III promoters include, but are not limited to, U6 and H1 promoters. Examples of pol II promoters include, but are not limited to, the retroviral Rous sarcoma virus (RSV) LTR promoter (optionally with the RSV enhancer), the cytomegalovirus (CMV) promoter (optionally with the CMV enhancer) (see, e.g., Boshart et al, Cell, 41:521-530 (1985)), the SV40 promoter, the dihydrofolate reductase promoter, the β-actin promoter, the phosphoglycerol kinase (PGK) promoter, and the EF1a promoter. The guide RNA(s), e.g., sgRNA(s) encoding sequences and/or Cas encoding sequences, can be functionally or operatively linked to regulatory element(s) and hence the regulatory element(s) drive expression. The promoter(s) can be constitutive promoter(s) and/or conditional promoter(s) and/or inducible promoter(s) (e.g., a doxycycline inducible promoter) and/or tissue specific promoter(s). In certain embodiments, the invention can include inducible promoters and inducing expression. Also, encompassed by the term “regulatory element” are enhancer elements, such as WPRE; CMV enhancers; the R-U5′ segment in LTR of HTLV-I (Mol. Cell. Biol., Vol. 8(1), p. 466-472, 1988); SV40 enhancer; and the intron sequence between exons 2 and 3 of rabbit β-globin (Proc. Natl. Acad. Sci. USA., Vol. 78(3), p. 1527-31, 1981). It will be appreciated by those skilled in the art that the design of the expression vector can depend on such factors as the choice of the host cell to be transformed, the level of expression desired, etc. A vector can be introduced into host cells to thereby produce transcripts, proteins, or peptides, including fusion proteins or peptides, encoded by nucleic acids as described herein (e.g., clustered regularly interspersed short palindromic repeats (CRISPR) transcripts, proteins, enzymes, mutant forms thereof, fusion proteins thereof, etc.).

[0139] By “RNA polymerase III promoter” or “RNA pol III promoter” or “polymerase III promoter” or “pol III promoter” is meant any invertebrate, vertebrate, or mammalian promoter, e.g., human, murine, porcine, bovine, primate, simian, etc. that, in its native context in a cell, associates or interacts with RNA polymerase III to transcribe its operably linked gene, or any variant thereof, natural or engineered, that will interact in a selected host cell with an RNA polymerase III to transcribe an operably linked nucleic acid sequence. By U6 promoter (e.g., human U6, murine U6), H1 promoter, or 7SK promoter is meant any invertebrate, vertebrate, or mammalian promoter or polymorphic variant or mutant found in nature to interact with RNA polymerase III to transcribe its cognate RNA product, i.e., U6 RNA, H1 RNA, or 7SK RNA, respectively. Preferred in some applications are the Type III RNA pol III promoters including U6, H1, and 7SK which exist in the 5′ flanking region, include TATA boxes, and lack internal promoter sequences. Internal promoters occur for the pol III 5S rRNA, tRNA or VA RNA genes. The 7SLRNA pol III gene contains a weak internal promoter and a sequence in the 5′ flanking region of the gene necessary for transcription. RNA pol III promoters include any higher eukaryotic, including any vertebrate or mammalian, promoter containing any sequence variation or alteration, either natural or produced in the laboratory, which maintains or enhances but does not abolish the binding of RNA polymerase III to said promoter, and which is capable of transcribing a gene or nucleotide sequence, either natural or engineered, which is operably linked to said promoter sequence. Pol III promoters for utilization in an expression construct for a particular application, e.g., to express RNA effector molecules such as guide sequences, may advantageously be selected for optimal binding and transcription by the host cell RNA polymerase III, e.g., including murine pol III promoters and human or other mammalian pol III promoters in an expression construct designed to transcribe a plurality of guide sequences in human host cells.

[0140] In certain embodiments, the DNA construct further comprises a sequence encoding at least one selectable marker. The at least one selectable marker may be an antibiotic resistance gene. The at least one selectable marker may be a fluorescent gene.

[0141] Selectable markers are known in the art and enable screening for targeted integrations. Examples of selectable markers include, but are not limited to, antibiotic resistance genes, such as beta-lactamase, neo, FabI, URA3, cam, tet, blasticidin, hyg, puromycin and the like. A selectable marker useful in accordance with the invention may be any selectable marker appropriate for use in a eukaryotic cell, such as a mammalian cell, or more specifically a human cell. One of skill in the art will understand and be able to identify and use selectable markers in accordance with the invention.

[0142] In certain embodiments, the selectable marker is a fluorescent protein such as green fluorescent protein (GFP), enhanced green fluorescent protein (EGFP), red fluorescent protein (RFP), blue fluorescent protein (BFP), cyan fluorescent protein (CFP), yellow fluorescent protein (YFP), miRFP (e.g., miRFP670, see, Shcherbakova, et al., Nat Commun. 2016; 7: 12405), mCherry, tdTomato, DsRed-Monomer, DsRed-Express, DSRed-Express2, DsRed2, AsRed2, mStrawberry, mPlum, mRaspberry, HcRedl, E2-Crimson, mOrange, mOrange2, mBanana, ZsYellowl, TagBFP, mTagBFP2, Azurite, EBFP2, mKalamal, Sirius, Sapphire, T-Sapphire, ECFP, Cerulean, SCFP3A, mTurquoise, mTurquoise2, monomelic Midoriishi-Cyan, TagCFP, niTFP1, Emerald, Superfolder GFP, Monomeric Azami Green, TagGFP2, mUKG, mWasabi, Clover, mNeonGreen, Citrine, Venus, SYFP2, TagYFP, Monomeric Kusabira-Orange, mKOk, mK02, mTangerine, mApple, mRuby, mRuby2, HcRed-Tandem, mKate2, mNeptune, NiFP, mkeima Red, LSS-mKatel, LSS-mkate2, mBeRFP, PA-GFP, PAmCherryl, PATagRFP, TagRFP6457, IFP1.2, iRFP, Kaede (green), Kaede (red), KikGR1 (green), KikGR1 (red), PS-CFP2, mEos2 (green), mEos2 (red), mEos3.2 (green), mEos3.2 (red), PSmOrange, Dronpa, Dendra2, Timer, AmCyan1, or a combination thereof.

[0143] In certain embodiments, each guide sequence may further comprise a barcode sequence (e.g., to identify the guide sequence). The term “barcode” as used herein refers to a short sequence of nucleotides (for example, DNA or RNA) that is used as an identifier for an associated molecule, such as a target molecule and/or target nucleic acid, or as an identifier of the source of an associated molecule, such as a cell-of-origin. A barcode may also refer to any unique, non-naturally occurring, nucleic acid sequence that may be used to identify the originating source of a nucleic acid fragment. Although it is not necessary to understand the mechanism of an invention, it is believed that the barcode sequence provides a high-quality individual read of a barcode associated with a single cell, a viral vector, labeling ligand (e.g., an aptamer), protein, shRNA, sgRNA or cDNA such that multiple species can be sequenced together. In certain embodiments, barcodes are designed using an error correcting scheme (T. K. Moon, Error Correction Coding: Mathematical Methods and Algorithms (Wiley, New York, ed. 1, 2005)).

[0144] In certain embodiments, the screening platform includes oligonucleotide constructs as described herein. The oligonucleotide construct may be present in a vector, such that the constructs can be delivered to a host cell. In certain embodiments, the screening platform includes a library of vectors wherein each vector of the library may comprise a different pairwise combination of guide sequences. As used herein, the term “vector” refers to a nucleic acid molecule capable of transporting another nucleic acid to which it has been linked. One type of vector is a “plasmid”, which refers to a circular double stranded DNA loop into which additional nucleic acid segments can be ligated. Another type of vector is a viral vector; wherein additional nucleic acid segments can be ligated into the viral genome. Certain vectors are capable of autonomous replication in a host cell into which they are introduced (e.g., bacterial vectors having a bacterial origin of replication and episomal mammalian vectors). Other vectors (e.g., non-episomal mammalian vectors) are integrated into the genome of a host cell upon introduction into the host cell, and thereby are replicated along with the host genome. Moreover, certain vectors are capable of directing the expression of genes to which they are operatively linked. Such vectors are referred to herein as “recombinant expression vectors”, or more simply “expression vectors.” In general, expression vectors of utility in recombinant DNA techniques are often in the form of plasmids. In the present specification, “plasmid” and “vector” can be used interchangeably as the plasmid is the most commonly used form of vector. However, the methods and compositions described herein can include such other forms of expression vectors, such as viral vectors (e.g., replication defective retroviruses, lentiviruses, adenoviruses and adeno-associated viruses), which serve equivalent functions. In certain embodiments, the library of the present invention is introduced by a viral vector. The viral vector may be a lentivirus, adenovirus, or AAV. In preferred embodiments of the invention the viral vector is a lentivirus-derived vector. In certain embodiments, the vector is an Agrobacterium Ti or Ri plasmid for use in plants. In the case of screening for phenotypes in plant cells, plant specific guide sequences may be used.

[0145] In another aspect, the present invention provides for a method of combinatorial screening of phenotypic interactions between a set of target sequences in a population of cells comprising: introducing a library according to any embodiment herein to a population of cells, wherein two orthogonal CRISPR enzymes are expressed in said cells; selecting for cells comprising a vector of the library; selecting for cells having a desired phenotype; and determining in the cells having the desired phenotype the enrichment or depletion of combinations of guide sequences as compared to the representation in the library introduced. In certain embodiments, selecting for cells comprising a vector of the library comprises treating the population of cells with an antibiotic. In certain embodiments, the vector may further comprise a sequence encoding a CRISPR enzyme operably linked to a regulatory sequence. The CRISPR enzyme may be S. aureus Cas9.

[0146] As used herein, “expression” refers to the process by which a polynucleotide is transcribed from a DNA template (such as into and mRNA or other RNA transcript, such as guide sequence) and/or the process by which a transcribed mRNA is subsequently translated into peptides, polypeptides, or proteins. Transcripts and encoded polypeptides may be collectively referred to as “gene product.” If the polynucleotide is derived from genomic DNA, expression may include splicing of the mRNA in a eukaryotic cell.

[0147] In certain embodiments, the library is transduced at an MOI (multiplicity of infection) of about 1 or of about less than 1, about less than 0.75, about less than 0.5, about less than 0.4, about less than 0.3, about less than 0.2 or about less than 0.1. In a further embodiment, the cell is transduced with a multiplicity of infection (MOI) of 0.3-0.75, preferably, the MOI has a value close to 0.4, more preferably the MOI is 0.3 or 0.4. In certain embodiments, the MOI is about 0.3 or 0.4, thereby creating a panel of cells comprising about 1 CRISPR system sgRNA pair per cell, after appropriate selection for successfully transfected/transduced cells, thereby providing a panel of cells comprising a cellular library with pairwise knock outs of every gene in the set of genes. In certain embodiments, where a separate vector comprising a CRISPR enzyme is transduced, the MOI may be about 10, about 5, about 3, or about 1. A high MOI for the vector expressing a CRISPR enzyme provides an increased probability that every cell comprising a library vector will also express both orthogonal CRISPR enzymes.

[0148] In certain embodiments, following a combinatorial screen genomic DNA is extracted and the sgRNA readout is performed using PCR (e.g., guide sequence and/or barcode). In certain embodiments, the sgRNA readout is performed using two rounds of PCR (Shalem et al. 2014). In one embodiment, the first PCR step includes amplification of a region containing the paired sgRNA cassette in the lentiviral genomic integrant from extracted genomic DNA. In one further embodiment, the PCR products are used in a second PCR reaction to add on Illumina sequencing adaptors, barcodes and stagger sequences to prevent monotemplate sequencing issues.

[0149] In a preferred embodiment, the distribution of sgRNAs is determined before any selection pressure has been applied. In certain embodiments, the distribution of sgRNAs is determined at an early time point and compared to a later time point. This baseline sgRNA distribution is used to infer either depletion or enrichment of specific sgRNA species. For both positive and negative selection screens, hits are identified by comparing the distribution of sgRNAs after selection with the baseline sgRNA distribution. Paired sgRNA sequences are identified by searching for sgRNA pairs whose frequency has either significantly reduced or increased after selection for negative and positive screens respectively.

[0150] In certain embodiments, synthetic lethal combinations are determined using the fold change method as described herein. In certain embodiments, combinatorial data is generated using a Pi score method (see, e.g., Horn T, et al. Mapping of signaling networks through synthetic genetic interaction analysis by RNAi. Nature Methods. 2011; 8:341-346) and also a depletion score that measures the absolute decrease in a guide pair combination and averaged for all gene pairs tested. In certain embodiments, synthetic lethal pairs are identified using a Pi z-score to include more statistical confidence in the data as compared to fold change. Pi score takes single gene effects into account and looks for synergies.

[0151] Several methods of DNA extraction and analysis are encompassed in the methods of the invention. As used herein “deep sequencing” indicates that the depth of the process is many times larger than the length of the sequence under study. Deep sequencing is encompassed in next generation sequencing methods which include but are not limited to single molecule real-time sequencing (Pacific Bio), Ion semiconductor (Ion torrent sequencing), Pyrosequencing (454), Sequencing by synthesis (Illumina), Sequencing by ligations (SOLiD sequencing) and Chain termination (Sanger sequencing).

[0152] In certain embodiments, the present invention is used in a method of assaying combinatorial phenotypic interactions in a population of cells or host cells. In certain embodiments, a population of cells or host cells are derived or obtained from an organism or subject. In some methods of the invention the organism or subject is a eukaryote (including mammal including human) or a non-human eukaryote or a non-human animal or a non-human mammal. In some methods of the invention the organism or subject is a plant. In some methods of the invention the organism or subject is a mammal or a non-human mammal. In some methods of the invention the organism or subject is algae.

[0153] The library comprises guide sequences that target a genomic region of interest of an organism. In certain embodiments of the invention the organism or subject is a eukaryote (including mammal including human) or a non-human eukaryote or a non-human animal or a non-human mammal. In certain embodiments, the organism or subject is a non-human animal, and may be an arthropod, for example, an insect, or may be a nematode. In some methods of the invention the organism or subject is a plant. In some methods of the invention the organism or subject is a mammal or a non-human mammal. A non-human mammal may be for example a rodent (preferably a mouse or a rat), an ungulate, or a primate. In some methods of the invention the organism or subject is algae, including microalgae, or is a fungus.

[0154] In certain embodiments, a population of cells or host cells is transiently or non-transiently transfected or transduced with one or more vectors described herein to arrive at a tissue culture model. In certain embodiments, a cell is transfected or transduced in vivo in a subject (e.g., an animal model). In certain embodiments, the animal expresses one or more orthogonal CRISPR enzymes from one or more transgenes. In certain embodiments, cells from a transgenic animal are screened ex vivo (see, e.g., US20180255751A1). In certain embodiments, a cell that is transfected is taken from a subject. In certain embodiments, the cell is derived from cells taken from a subject, such as a cell line. A wide variety of cell lines for tissue culture models are known in the art. In certain embodiments, any disease specific cells may be used (e.g., cancer cell lines). In certain embodiments, any immune specific cells may be used (e.g., T cells). In certain embodiments, any pluripotent cell lines may be used (e.g., stem cells).

[0155] Examples of cell lines include, but are not limited to, C8161, CCRF-CEM, MOLT, mIMCD-3, NHDF, HeLa-S3, Huhl, Huh4, Huh7, HUVEC, HASMC, HEKn, HEKa, MiaPaCell, Pancl, PC-3, TF1, CTLL-2, C1R, Rat6, CV1, RPTE, A10, T24, J82, A375, ARH-77, Calu1, SW480, SW620, SKOV3, SK-UT, CaCo2, P388D1, SEM-K2, WEHI-231, HB56, TIB55, Jurkat, J45.01, LRMB, Bcl-1, BC-3, IC21, DLD2, Raw264.7, NRK, NRK-52E, MRCS, MEF, Hep G2, HeLa B, HeLa T4, COS, COS-1, COS-6, COS-M6A, BS-C-1 monkey kidney epithelial, BALB/3T3 mouse embryo fibroblast, 3T3 Swiss, 3T3-L1, 132-d5 human fetal fibroblasts; 10.1 mouse fibroblasts, 293-T, 3T3, 721, 9L, A2780, A2780ADR, A2780cis, A172, A20, A253, A431, A-549, ALC, B16, B35, BCP-1 cells, BEAS-2B, bEnd.3, BHK-21, BR 293, BxPC3, C3H-10T1/2, C6/36, Cal-27, CHO, CHO-7, CHO-IR, CHO-K1, CHO-K2, CHO-T, CHO Dhfr −/−, COR-L23, COR-L23/CPR, COR-L23/5010, COR-L23/R23, COS-7, COV-434, CML T1, CMT, CT26, D17, DH82, DU145, DuCaP, EL4, EM2, EM3, EMT6/AR1, EMT6/AR10.0, FM3, H1299, H69, HB54, HB55, HCA2, HEK-293, HeLa, Hepa1c1c7, HL-60, HMEC, HT-29, Jurkat, JY cells, K562 cells, Ku812, KCL22, KG1, KYO1, LNCap, Ma-Mel 1-48, MC-38, MCF-7, MCF-10A, MDA-MB-231, MDA-MB-468, MDA-MB-435, MDCK II, MDCK II, MOR/0.2R, MONO-MAC 6, MTD-1A, MyEnd, NCI-H69/CPR, NCI-H69/LX10, NCI-H69/LX20, NCI-H69/LX4, NIH-3T3, NALM-1, NW-145, OPCN/OPCT cell lines, Peer, PNT-1A/PNT 2, RenCa, RIN-5F, RMA/RMAS, Saos-2 cells, Sf-9, SkBr3, T2, T-47D, T84, THP1 cell line, U373, U87, U937, VCaP, Vero cells, WM39, WT-49, X63, YAC-1, YAR, and transgenic varieties thereof. Cell lines are available from a variety of sources known to those with skill in the art (see, e.g., the American Type Culture Collection (ATCC) (Manassas, Va.)).

[0156] Pluripotent cells may include any mammalian stem cell. As used herein, the term “stem cell” refers to a multipotent cell having the capacity to self-renew and to differentiate into multiple cell lineages. Mammalian stem cells may include, but are not limited to embryonic stem cells of various types, such as murine embryonic stem cells, e.g., as described by Evans & Kaufman 1981 (Nature 292: 154-6) and Martin 1981 (PNAS 78: 7634-8); rat pluripotent stem cells, e.g., as described by Iannaccone et al. 1994 (Dev Biol 163: 288-292); hamster embryonic stem cells, e.g., as described by Doetschman et al. 1988 (Dev Biol 127: 224-227); rabbit embryonic stem cells, e.g., as described by Graves et al. 1993 (Mol Reprod Dev 36: 424-433); porcine pluripotent stem cells, e.g., as described by Notarianni et al. 1991 (J Reprod Fertil Suppl 43: 255-60) and Wheeler 1994 (Reprod Fertil Dev 6: 563-8); sheep embryonic stem cells, e.g., as described by Notarianni et al. 1991 (supra); bovine embryonic stem cells, e.g., as described by Roach et al. 2006 (Methods Enzymol 418: 21-37); human embryonic stem (hES) cells, e.g., as described by Thomson et al. 1998 (Science 282: 1 145-1 147); human embryonic germ (hEG) cells, e.g., as described by Shamblott et al. 1998 (PNAS 95: 13726); embryonic stem cells from other primates such as Rhesus stem cells, e.g., as described by Thomson et al. 1995 (PNAS 92:7844-7848) or marmoset stem cells, e.g., as described by Thomson et al. 1996 (Biol Reprod 55: 254-259). In certain embodiments, the pluripotent cells may include, but are not limited to lymphoid stem cells, myeloid stem cells, neural stem cells, skeletal muscle satellite cells, epithelial stem cells, endodermal and neuroectodermal stem cells, germ cells, extraembryonic and embryonic stem cells, mesenchymal stem cells, intestinal stem cells, embryonic stem cells, and induced pluripotent stem cells (iPSCs).

[0157] As noted, prototype “human ES cells” are described by Thomson et al. 1998 (supra) and in U.S. Pat. No. 6,200,806. The scope of the term covers pluripotent stem cells that are derived from a human embryo at the blastocyst stage, or before substantial differentiation of the cells into the three germ layers. ES cells, in particular hES cells, are typically derived from the inner cell mass of blastocysts or from whole blastocysts. Derivation of hES cell lines from the morula stage has been documented and ES cells so obtained can also be used in the invention (Strelchenko et al. 2004. Reproductive BioMedicine Online 9: 623-629). As noted, prototype “human EG cells” are described by Shamblott et al. 1998 (supra). Such cells may be derived, e.g., from gonadal ridges and mesenteries containing primordial germ cells from fetuses. In humans, the fetuses may be typically 5-11 weeks post-fertilization.

[0158] Human embryonic stem cells may include, but are not limited to the HUES66, HUES64, HUES3, HUES8, HUES53, HUES28, HUES49, HUES9, HUES48, HUES45, HUES1, HUES44, HUES6, H1, HUES62, HUES65, H7, HUES13 and HUES63 cell lines.

[0159] General techniques useful in the practice of this invention in cell culture and media uses are known in the art (e.g., Large Scale Mammalian Cell Culture (Hu et al. 1997. Curr Opin Biotechnol 8: 148); Serum-free Media (K. Kitano. 1991. Biotechnology 17: 73); or Large Scale Mammalian Cell Culture (Curr Opin Biotechnol 2: 375, 1991). The terms “culturing” or “cell culture” are common in the art and broadly refer to maintenance of cells and potentially expansion (proliferation, propagation) of cells in vitro. Typically, animal cells, such as mammalian cells, such as human cells, are cultured by exposing them to (i.e., contacting them with) a suitable cell culture medium in a vessel or container adequate for the purpose (e.g., a 96-, 24-, or 6-well plate, a T-25, T-75, T-150 or T-225 flask, or a cell factory), at art-known conditions conducive to in vitro cell culture, such as temperature of 37° C., 5% v/v CO₂ and >95% humidity.

[0160] Methods related to culturing stem cells are also useful in the practice of this invention (see, e.g., “Teratocarcinomas and embryonic stem cells: A practical approach” (E. J. Robertson, ed., IRL Press Ltd. 1987); “Guide to Techniques in Mouse Development” (P. M. Wasserman et al. eds., Academic Press 1993); “Embryonic Stem Cells: Methods and Protocols” (Kursad Turksen, ed., Humana Press, Totowa N.J., 2001); “Embryonic Stem Cell Differentiation in vitro” (M. V. Wiles, Meth. Enzymol. 225: 900, 1993); “Properties and uses of Embryonic Stem Cells: Prospects for Application to Human Biology and Gene Therapy” (P. D. Rathjen et al., al., 1993). Differentiation of stem cells is reviewed, e.g., in Robertson. 1997. Meth Cell Biol 75: 173; Roach and McNeish. 2002. Methods Mol Biol 185: 1-16; and Pedersen. 1998. Reprod Fertil Dev 10: 31). For further elaboration of general techniques useful in the practice of this invention, the practitioner can refer to standard textbooks and reviews in cell biology, tissue culture, and embryology (see, e.g., Culture of Human Stem Cells (R. Ian Freshney, Glyn N. Stacey, Jonathan M. Auerbach—2007); Protocols for Neural Cell Culture (Laurie C. Doering—2009); Neural Stem Cell Assays (Navjot Kaur, Mohan C. Vemuri—2015); Working with Stem Cells (Henning Ulrich, Priscilla Davidson Negraes—2016); and Biomaterials as Stem Cell Niche (Krishnendu Roy—2010)).

[0161] The term “immune cell” as used throughout this specification generally encompasses any cell derived from a hematopoietic stem cell that plays a role in the immune response. The term is intended to encompass immune cells both of the innate or adaptive immune system. The immune cell as referred to herein may be a leukocyte, at any stage of differentiation (e.g., a stem cell, a progenitor cell, a mature cell) or any activation stage. Immune cells include lymphocytes (such as natural killer cells, T-cells (including, e.g., thymocytes, Th or Tc; Th1, Th2, Th17, Thαβ, CD4+, CD8+, effector Th, memory Th, regulatory Th, CD4+/CD8+ thymocytes, CD4−/CD8− thymocytes, γδ T cells, etc.) or B-cells (including, e.g., pro-B cells, early pro-B cells, late pro-B cells, pre-B cells, large pre-B cells, small pre-B cells, immature or mature B-cells, producing antibodies of any isotype, T1 B-cells, T2, B-cells, naïve B-cells, GC B-cells, plasmablasts, memory B-cells, plasma cells, follicular B-cells, marginal zone B-cells, B-1 cells, B-2 cells, regulatory B cells, etc.), such as for instance, monocytes (including, e.g., classical, non-classical, or intermediate monocytes), (segmented or banded) neutrophils, eosinophils, basophils, mast cells, histiocytes, microglia, including various subtypes, maturation, differentiation, or activation stages, such as for instance hematopoietic stem cells, myeloid progenitors, lymphoid progenitors, myeloblasts, promyelocytes, myelocytes, metamyelocytes, monoblasts, promonocytes, lymphoblasts, prolymphocytes, small lymphocytes, macrophages (including, e.g., Kupffer cells, stellate macrophages, M1 or M2 macrophages), (myeloid or lymphoid) dendritic cells (including, e.g., Langerhans cells, conventional or myeloid dendritic cells, plasmacytoid dendritic cells, mDC-1, mDC-2, Mo-DC, HP-DC, veiled cells), granulocytes, polymorphonuclear cells, antigen-presenting cells (APC), etc.

[0162] As used throughout this specification, “immune response” refers to a response by a cell of the immune system, such as a B cell, T cell (CD4+ or CD8+), regulatory T cell, antigen-presenting cell, dendritic cell, monocyte, macrophage, NKT cell, NK cell, basophil, eosinophil, or neutrophil, to a stimulus. In some embodiments, the response is specific for a particular antigen (an “antigen-specific response”), and refers to a response by a CD4 T cell, CD8 T cell, or B cell via their antigen-specific receptor. In some embodiments, an immune response is a T cell response, such as a CD4+ response or a CD8+ response. Such responses by these cells can include, for example, cytotoxicity, proliferation, cytokine or chemokine production, trafficking, or phagocytosis, and can be dependent on the nature of the immune cell undergoing the response.

[0163] T cell response refers more specifically to an immune response in which T cells directly or indirectly mediate or otherwise contribute to an immune response in a subject. T cell-mediated response may be associated with cell mediated effects, cytokine mediated effects, and even effects associated with B cells if the B cells are stimulated, for example, by cytokines secreted by T cells. By means of an example but without limitation, effector functions of MHC class I restricted Cytotoxic T lymphocytes (CTLs), may include cytokine and/or cytolytic capabilities, such as lysis of target cells presenting an antigen peptide recognized by the T cell receptor (naturally-occurring TCR or genetically engineered TCR, e.g., chimeric antigen receptor, CAR), secretion of cytokines, preferably IFN gamma, TNF alpha and/or or more immunostimulatory cytokines, such as IL-2, and/or antigen peptide-induced secretion of cytotoxic effector molecules, such as granzymes, perforins or granulysin. By means of example but without limitation, for MHC class II restricted T helper (Th) cells, effector functions may be antigen peptide-induced secretion of cytokines, preferably, IFN gamma, TNF alpha, IL-4, IL5, IL-10, and/or IL-2. By means of example but without limitation, for T regulatory (Treg) cells, effector functions may be antigen peptide-induced secretion of cytokines, preferably, IL-10, IL-35, and/or TGF-beta. B cell response refers more specifically to an immune response in which B cells directly or indirectly mediate or otherwise contribute to an immune response in a subject. Effector functions of B cells may include in particular production and secretion of antigen-specific antibodies by B cells (e.g., polyclonal B cell response to a plurality of the epitopes of an antigen (antigen-specific antibody response)), antigen presentation, and/or cytokine secretion.

[0164] In certain embodiments, the methods as described herein may comprise providing a Cas transgenic cell in which a vector encoding guide RNAs of the screening platform are provided. As used herein, the term “Cas transgenic cell” refers to a cell, such as a eukaryotic cell, in which a Cas gene or pair of orthologous Cas genes have been genomically integrated. The nature, type, or origin of the cell are not particularly limiting according to the present invention. Also, the way how the Cas transgene is introduced in the cell is may vary and can be any method as is known in the art. In certain embodiments, the Cas transgenic cell is obtained by introducing the Cas transgene in an isolated cell. In certain other embodiments, the Cas transgenic cell is obtained by isolating cells from a Cas transgenic organism. By means of example, and without limitation, the Cas transgenic cell as referred to herein may be derived from a Cas transgenic eukaryote, such as a Cas knock-in eukaryote. Reference is made to WO 2014/093622 (PCT/US13/74667), incorporated herein by reference. Methods of US Patent Publication Nos. 20120017290 and 20110265198 assigned to Sangamo BioSciences, Inc. directed to targeting the Rosa locus may be modified to utilize the CRISPR Cas system of the present invention. Methods of US Patent Publication No. 20130236946 assigned to Cellectis directed to targeting the Rosa locus may also be modified to utilize the CRISPR Cas system of the present invention. By means of further example reference is made to Platt et. al. (Cell; 159(2):440-455 (2014)), describing a Cas9 knock-in mouse, which is incorporated herein by reference. The Cas transgene can further comprise a Lox-Stop-polyA-Lox(LSL) cassette thereby rendering Cas expression inducible by Cre recombinase. Alternatively, the Cas transgenic cell may be obtained by introducing the Cas transgene in an isolated cell. Delivery systems for transgenes are well known in the art. By means of example, the Cas transgene may be delivered in for instance eukaryotic cell by means of vector (e.g., AAV, adenovirus, lentivirus) and/or particle and/or nanoparticle delivery, as also described herein elsewhere.

[0165] It will be understood by the skilled person that the cell, such as the Cas transgenic cell, as referred to herein may comprise further genomic alterations besides having an integrated Cas gene or the mutations arising from the sequence specific action of Cas when complexed with RNA capable of guiding Cas to a target locus, such as for instance one or more oncogenic mutations, as for instance and without limitation described in Platt et al. (2014), Chen et al., (2014) or Kumar et al. (2009).

[0166] The current invention comprehends the use of the compositions of the current invention to establish and utilize conditional or inducible CRISPR transgenic cell/animals; see, e.g., Platt et al., “CRISPR-Cas9 Knockin Mice for Genome Editing and Cancer Modeling” Cell (2014), 159(2): 440-455, or PCT patent publications cited herein, such as WO 2014/093622 (PCT/US2013/074667). For example, cells or animals such as non-human animals, e.g., vertebrates or mammals, such as rodents, e.g., mice, rats, or other laboratory or field animals, e.g., cats, dogs, sheep, etc., may be ‘knock-in’ whereby the animal conditionally or inducibly expresses Cas9 akin to Platt et al. The target cell or animal thus comprises the CRISPR enzyme (e.g., Cas9) conditionally or inducibly (e.g., in the form of Cre dependent constructs), on expression of a vector introduced into the target cell, the vector expresses that which induces or gives rise to the condition of the CRISPR enzyme (e.g., Cas9) expression in the target cell. By applying the teaching and compositions as defined herein with the known method of creating a CRISPR complex, inducible genomic events are also an aspect of the current invention. Examples of such inducible events have been described herein elsewhere. In certain embodiments, the present invention may be used for determining combinatorial phenotypic interactions in immune cells by expressing orthogonal CRISPR enzymes. In certain embodiments, a transgenic animal may express two orthogonal CRISPR enzymes. In other embodiments, the transgenic animal expresses a single CRISPR enzyme and an orthogonal CRISPR enzyme is expressed from a vector comprising combinatorial sgRNA sequences. In certain embodiments, leukocytes are obtained from transgenic animals expressing a CRISPR enzyme (see, e.g., WO2016049251). The library according to the present invention may be introduced to the leukocytes and assayed for a phenotype.

[0167] In certain embodiments, a library for the combinatorial screening of phenotypic interactions between a set of target sequences is constructed. The first step in generating a library according to the present invention is synthesizing a set of oligonucleotides targeting all target sequences in a set of target sequences. The set of target sequences may include genes with known drugs, inhibitors, agonists, and/or antagonists. The set of target sequences may include regulatory sequences present in a genome of interest. The set of target sequences may be genome wide. The set of target sequences may include a set of genes that function in a specific pathway. The set of target genes may include genes expressed in specific cell types (e.g., diseased cells, cancer cells, immune cells, stem cells). In certain embodiments, the genes may represent a subset of the entire genome; for example, genes relating to a particular pathway (for example, an enzymatic pathway) or a particular disease or group of diseases or disorders may be selected. One or more of the genes may include a plurality of target sequences; that is, one gene may be targeted by a plurality of guide sequences (e.g., two or more guide sequences).

[0168] In certain embodiments, the present invention may be used to target non-coding DNA regions in addition to coding genes. In certain embodiments, guide RNAs may target microRNAs, microRNA clusters, long noncoding RNAs (LncRNA), long intergenic noncoding RNAs (LincRNA), regulatory regions, such as, but not limited to promoters, enhancers, insulators. In certain embodiments, CRISPRa/i/x, as described herein, is targeted to a regulatory region associated with a gene.

[0169] In certain embodiments of the invention the unique CRISPR-Cas system guide sequences are selected by an algorithm that predicts the efficacy of the guide sequences based on the primary nucleotide sequence of the guide sequence and/or by a heuristic that ranks the guide sequences based on off target scores. In certain embodiments, orthologous guide sequences are based on the rules described herein (see, examples).

[0170] Oligonucleotides can be synthesized at the same time or at separate times. Oligonucleotides can be synthesized by a commercial oligonucleotide service. Generating oligonucleotides may comprise synthesizing a first set of oligonucleotides, each oligonucleotide comprising a guide sequence specific for a target sequence in the set of target sequences and specific for a first orthogonal CRISPR enzyme, wherein the oligonucleotides comprise a first non-palindromic hybridization sequence at the 3′ end and a site for cloning into a vector at the 5′end and synthesizing a second set oligonucleotides, each oligonucleotide comprising a guide sequence specific for a target sequence in the set of target sequences and specific for a second orthogonal CRISPR enzyme, wherein the oligonucleotides comprise a second hybridization sequence at the 3′ end of the sequence that is complementary to the first hybridization sequence and a site for cloning into a vector at the 5′end. The oligonucleotides corresponding to the first and second set of oligonucleotides include a non-palindromic hybridization sequence so that the oligonucleotides from the first set only hybridize to oligonucleotides in the second set and not to each other.

[0171] “Complementarity” refers to the ability of a nucleic acid to form hydrogen bond(s) with another nucleic acid sequence by either traditional Watson-Crick base pairing or other non-traditional types. A percent complementarity indicates the percentage of residues in a nucleic acid molecule which can form hydrogen bonds (e.g., Watson-Crick base pairing) with a second nucleic acid sequence (e.g., 5, 6, 7, 8, 9, 10 out of 10 being 50%, 60%, 70%, 80%, 90%, and 100% complementary). “Perfectly complementary” means that all the contiguous residues of a nucleic acid sequence will hydrogen bond with the same number of contiguous residues in a second nucleic acid sequence. “Substantially complementary” as used herein refers to a degree of complementarity that is at least 60%, 65%, 70%, 75%, 80%, 85%, 90%, 95%, 97%, 98%, 99%, or 100% over a region of 8, 9, 10, 11, 12, 13, 14, 15, 16, 17, 18, 19, 20, 21, 22, 23, 24, 25, 30, 35, 40, 45, 50, or more nucleotides, or refers to two nucleic acids that hybridize under stringent conditions.

[0172] “Hybridization” refers to a reaction in which one or more polynucleotides react to form a complex that is stabilized via hydrogen bonding between the bases of the nucleotide residues. The hydrogen bonding may occur by Watson Crick base pairing, Hoogstein binding, or in any other sequence specific manner. The complex may comprise two strands forming a duplex structure, three or more strands forming a multi stranded complex, a single self-hybridizing strand, or any combination of these. A hybridization reaction may constitute a step in a more extensive process, such as the initiation of PCR, or the cleavage of a polynucleotide by an enzyme. A sequence capable of hybridizing with a given sequence is referred to as the “complement” of the given sequence.

[0173] In certain embodiments, the next step is hybridizing the first and second set of oligonucleotides to obtain oligonucleotides that are partially double stranded at the hybridization sequence and include a sequence encoding one guide sequence from the first set and one guide sequence from the second set. DNA extension is performed on the partially double stranded oligonucleotide using the hybridization region as priming sequences to generate a pool of double stranded DNA oligonucleotides comprising pairs of inverted guide sequences, each specific for orthogonal CRISPR enzymes. Multiple copies of each guide sequence in the two sets are synthesize, such that all pairwise combinations of guide sequences from the first and second set of oligonucleotides is represented in the pool of oligonucleotides.

[0174] The double stranded oligonucleotides from the pool of dsDNA oligonucleotides can then be joined into a vector comprising two convergent regulatory sequences flanking a cloning site, wherein the two convergent regulatory sequences do not have 100% sequence identity to one another, and wherein the oligonucleotides are joined between the convergent regulatory sequences. In certain embodiments, the ends of the oligonucleotides comprise restriction enzyme sites and the vector comprises compatible restriction enzyme site(s) between the convergent regulatory sequences, whereby joining is by ligation of compatible restriction enzyme digested ends on the oligonucleotides and the vector. In certain embodiments, the ends of the oligonucleotides comprise homologous sequences configured for recombination and the vector comprises compatible homologous sequences between the convergent regulatory sequences, whereby joining is by recombination of the oligonucleotides into the vector. The ends of the oligonucleotides can be made compatible with either cloning method and can be designed such that each oligonucleotide synthesized for each set of oligonucleotides includes a sequence for restriction enzyme sites or homologous recombination.

[0175] The convergent regulatory sequences may be RNA polymerase III (RNAP III) promoters. In certain embodiments, one RNAP III promoter comprises the U6 promoter and one RNAP III promoter comprises the H1 promoter.

[0176] In certain embodiments, the nucleotide sequence encoding the Cas9 endonuclease is modified to alter the activity of the protein. In certain embodiments, the Cas9 endonuclease is a catalytically inactive Cas9. For example, dCas9 contains mutations of catalytically active residues (D10 and H840) and does not have nuclease activity. One skilled in the art may modify orthogonal Cas9 endonucleases to contain homologous mutations to generate catalytically inactive enzymes.

[0177] In certain embodiments, the CRISPR enzyme may comprise one or more heterologous functional domains. The CRISPR enzyme may be fused to a functional domain or may recruit a functional domain. In preferred embodiments, a CRISPR enzyme comprising a functional domain is a dCas9.

[0178] The one or more heterologous functional domains may have one or more of the following activities: methylase activity, demethylase activity, transcription activation activity, transcription repression activity, transcription release factor activity, histone modification activity, nuclease activity, single-strand RNA cleavage activity, double-strand RNA cleavage activity, single-strand DNA cleavage activity, double-strand DNA cleavage activity and nucleic acid binding activity.

[0179] The at least one or more heterologous functional domains may be at or near the amino-terminus of the enzyme and/or at or near the carboxy-terminus of the enzyme. The one or more heterologous functional domains may be fused to the CRISPR enzyme, or tethered to the CRISPR enzyme, or linked to the CRISPR enzyme by a linker moiety.

[0180] As used herein the term “CRISPR interference” (CRISPRi) refers to the use of a CRISPR system to interfere with the expression of a gene and “CRISPR activation” (CRISPRa) refers to the use of CRISPR system to activate expression of a gene. Both CRISPRa and CRISPRi do not result in cutting or cleavage of a target sequence. CRISPRi can sterically repress transcription in two ways—by blocking transcriptional initiation or elongation. This is accomplished by designing sgRNA complementary to the promoter or exonic sequences, respectively. The level of transcriptional repression for exonic sequences is strand-specific. sgRNA complementary to the non-template strand more strongly represses transcription compared to sgRNA complementary to the template strand. One hypothesis to explain this effect is from the activity of helicase, which unwinds the RNA:DNA heteroduplex ahead of RNA pol II when the sgRNA is complementary to exons of the template strand. In prokaryotes, this steric inhibition can repress transcription of the target gene by almost 99.9%. Whereas in human cells, up to 90% repression was observed (Qi, L. S., et al. (2013). “Repurposing CRISPR as an RNA-guided platform for sequence-specific control of gene expression”. Cell. 152 (5): 1173-83).

[0181] CRISPRi can also repress transcription via an effector domain. Fusing a repressor domain to dCas9 allows transcription to be further repressed by inducing heterochromatinization. For example, the well-studied Kruppel associated box (KRAB) domain can be fused to dCas9 to repress transcription of the target gene up to 99% in human cells (Gilbert, L. A., et al., (2013). “CRISPR-mediated modular RNA-guided regulation of transcription in eukaryotes”. Cell. 154 (2): 442-51). In preferred embodiments, the one or more heterologous functional domains comprises one or more transcriptional repression domains. A transcriptional repression domain may comprise a KRAB domain or a SID domain or concatemers of SID (e.g., SID4X).

[0182] CRISPRa can be used to activate transcription of the target gene by fusing a transcriptional activator to dCas9. For example, the transcriptional activator VP16 can increase gene expression by up to 25-fold in human cells on a Tet-ON reporter system (Gilbert, L. A., et al., (2013). “CRISPR-mediated modular RNA-guided regulation of transcription in eukaryotes”. Cell. 154 (2): 442-51). In preferred embodiments, the one or more heterologous functional domains comprises one or more transcriptional activation domains. A transcriptional activation domain may comprise VP64.

[0183] In certain embodiments, such dCas9 fusion proteins are used with the constructs described herein for combinatorial gene repression (e.g. CRISPR interference (CRISPRi)). In certain embodiments, such dCas9 fusion proteins are used with the constructs described herein for combinatorial gene activation (e.g. CRISPR activation (CRISPRa)).

[0184] In certain embodiments, dCas9 is fused to an epigenetic modulating domain, such as a histone demethylase domain, a histone acetyltransferase domain, DNA methyltransferase domain, or DNA demethylation domain (e.g., TET1, see Xu et al., Cell Discov. 2016 May 3; 2:16009; and Choudhury et al., Oncotarget. 2016 Jul. 19; 7(29):46545-46556). In certain embodiments, dCas9 is fused to a LSD1 or p300, or a portion thereof. In certain embodiments, the dCas9 fusion is used for CRISPR-based epigenetic modulation. In certain embodiments, dCas9 or Cas9 is fused to a Fokl nuclease domain. In preferred embodiments, Cas9 or dCas9 fused to a Fokl nuclease domain is used for combinatorial gene editing.

[0185] As used herein the term “CRISPR-X” refers to a strategy to repurpose the somatic hypermutation machinery for protein engineering in situ to specifically mutagenize endogenous targets with limited off-target damage (see, e.g., Komor et al., 2016, Programmable editing of a target base in genomic DNA without double-stranded DNA cleavage, Nature 533, 420-424; Nishida et al., 2016, Targeted nucleotide editing using hybrid prokaryotic and vertebrate adaptive immune systems, Science 353(6305); Yang et al., 2016, Engineering and optimising deaminase fusions for genome editing, Nat Commun. 7:13330; Hess et al., 2016, Directed evolution using dCas9-targeted somatic hypermutation in mammalian cells, Nature Methods 13, 1036-1042; and Ma et al., 2016, Targeted AID-mediated mutagenesis (TAM) enables efficient genomic diversification in mammalian cells, Nature Methods 13, 1029-1035). In certain embodiments, the Cas9 endonuclease is fused another protein or portion thereof to allow the introduction of somatic mutations. In certain embodiments, catalytically inactive dCas9 is used to recruit variants of cytidine deaminase (AID) with MS2-modified sgRNAs. In certain embodiments, dCas9-AID-P182X (AIDx) is used as the CRISPR enzyme. In certain embodiments, AID-P182X is recruited by the CRISPR enzyme. Not being bound by a theory, sgRNAs may be used to target sequences by the CRISPR enzyme to directly change cytidines or guanines to the other three bases independent of AID hotspot motifs. Unmethylated cytosines are converted to uracil and are repaired in a cell by uracil-DNA glycosylase. In certain embodiments, CRISPR-X is coupled with an uracil-DNA glycosylase inhibitor, such that dCas9-AIDx can convert targeted cytidines specifically to thymines, creating specific point mutations. In certain embodiments, AID is fused to any dCas9 orthologue. In certain embodiments, AID is fused to an adapter protein specific for binding an aptamer.

[0186] In certain embodiments, the RNA of the CRISPR-Cas system, e.g., the guide or sgRNA, can be modified; for instance, to include an aptamer or a functional domain (see e.g., WO2016049258A2). In certain embodiments, the aptamer may be incorporated during synthesis of the oligonucleotides used for generating the library of the present invention. Not being bound by a theory, modifying the sgRNA with an aptamer allows for the recruitment of a functional domain without generating orthogonal CRISPR fusion enzymes.

[0187] An aptamer is a synthetic oligonucleotide that binds to a specific target molecule; for instance, a nucleic acid molecule that has been engineered through repeated rounds of in vitro selection or SELEX (systematic evolution of ligands by exponential enrichment) to bind to various molecular targets such as small molecules, proteins, nucleic acids, and even cells, tissues and organisms. Aptamers are useful in that they offer molecular recognition properties that rival that of antibodies. In addition to their discriminate recognition, aptamers offer advantages over antibodies including that they elicit little or no immunogenicity in therapeutic applications. Accordingly, in the practice of the invention, either or both of the enzyme or the RNA can include a functional domain.

[0188] In certain embodiments, the invention provides for introduction of an RNA sequence into a transcript recruitment sequence that forms a loop secondary structure and binds to an adapter protein. In one embodiment, the invention provides a herein-discussed composition, wherein the insertion of distinct RNA sequence(s) that bind to one or more adaptor proteins is an aptamer sequence. In one embodiment, the invention provides a herein-discussed composition, wherein the aptamer sequence is two or more aptamer sequences specific to the same adaptor protein. In an aspect, the invention provides a herein-discussed composition, wherein the aptamer sequence is two or more aptamer sequences specific to a different adaptor protein. In one embodiment, the invention provides a herein-discussed composition, wherein the adaptor protein comprises MS2, PP7, Q13, F2, GA, fr, JP501, M12, R17, BZ13, JP34, JP500, KU1, M11, MX1, TW18, VK, SP, FI, ID2, NL95, TW19, AP205, 4Cb5, Kb8r, 4Cb12r, 4Cb23r, 7s, PRR1. In one embodiment, the invention provides a herein-discussed composition, wherein the cell is a eukaryotic cell. In one embodiment, the invention provides a herein-discussed composition, wherein the eukaryotic cell is a mammalian cell, optionally a mouse cell. one embodiment, the invention provides a herein-discussed composition, wherein the mammalian cell is a human cell. Aspects of the invention encompass embodiments relating to MS2 adaptor proteins described in Konermann et al. “Genome-scale transcriptional activation by an engineered CRISPR-Cas9 complex” Nature. 2014 Dec. 10. doi: 10.1038/nature14136, the contents of which are herein incorporated by reference in its entirety.

[0189] In certain embodiments, the adaptor protein domain is an RNA-binding protein domain. The RNA-binding protein domain recognizes corresponding distinct RNA sequences, which may be aptamers. For example, the MS2 RNA-binding protein recognizes and binds specifically to the MS2 aptamer (or visa versa).

[0190] Similarly, an MS2 variant adaptor domain may also be used, such as the N55 mutant, especially the N55K mutant. This is the N55K mutant of the MS2 bacteriophage coat protein (shown to have higher binding affinity than wild type MS2 in Lim, F., M. Spingola, and D. S. Peabody. “Altering the RNA binding specificity of a translational repressor.” Journal of Biological Chemistry 269.12 (1994): 9006-9010).

[0191] One guide with a first aptamer/RNA-binding protein pair can be linked or fused to an activator, whilst a second guide with a second aptamer/RNA-binding protein pair can be linked or fused to a repressor. The guides are for different targets (loci), so this allows one gene to be activated and one repressed. For example, the following schematic shows such an approach: Guide 1—MS2 aptamer-------MS2 RNA-binding protein-------VP64 activator; and Guide 2—PP7 aptamer-------PP7 RNA-binding protein-------SID4x repressor.

[0192] The present invention also relates to orthogonal PP7/MS2 gene targeting. In this example, sgRNA targeting different loci are modified with distinct RNA loops in order to recruit MS2-VP64 or PP7-SID4X, which activate and repress their target loci, respectively. PP7 is the RNA-binding coat protein of the bacteriophage Pseudomonas. Like MS2, it binds a specific RNA sequence and secondary structure. The PP7 RNA-recognition motif is distinct from that of MS2. Consequently, PP7 and MS2 can be multiplexed to mediate distinct effects at different genomic loci simultaneously. For example, an sgRNA targeting locus A can be modified with MS2 loops, recruiting MS2-VP64 activators, while another sgRNA targeting locus B can be modified with PP7 loops, recruiting PP7-SID4X repressor domains. In the same cell, dCas9 can thus mediate orthogonal, locus-specific modifications. This principle can be extended to incorporate other orthogonal RNA-binding proteins such as Q-beta.

[0193] An alternative option for orthogonal repression includes incorporating non-coding RNA loops with transactive repressive function into the guide (either at similar positions to the MS2/PP7 loops integrated into the guide or at the 3′ terminus of the guide). For instance, guides can be designed with non-coding (but known to be repressive) RNA loops (e.g. using the Alu repressor (in RNA) that interferes with RNA polymerase II in mammalian cells). The Alu RNA sequence can be located: in place of the MS2 RNA sequences as used herein (e.g. at tetraloop and/or stem loop 2); and/or at 3′ terminus of the guide. This gives possible combinations of MS2, PP7 or Alu at the tetraloop and/or stemloop 2 positions, as well as, optionally, addition of Alu at the 3′ end of the guide (with or without a linker).

[0194] The use of two different aptamers (distinct RNA) allows an activator-adaptor protein fusion and a repressor-adaptor protein fusion to be used, with different guides, to activate expression of one gene, whilst repressing another. In certain embodiments, the present invention allows for combinatorial phenotypic screening such that phenotypic interactions between a gene that is activated with a gene that is repressed can be determined. In certain embodiments, the population of cells used may express multiple adapter fusion proteins.

[0195] The adaptor protein may be associated (preferably linked or fused to) one or more activators or one or more repressors. For example, the adaptor protein may be associated with a first activator and a second activator. The first and second activators may be the same, but they are preferably different activators. For example, one might be VP64, whilst the other might be p65, although these are just examples and other transcriptional activators are envisaged. Three or more or even four or more activators (or repressors) may be used, but package size may limit the number being higher than 5 different functional domains. Linkers are preferably used, over a direct fusion to the adaptor protein, where two or more functional domains are associated with the adaptor protein. Suitable linkers might include the GlySer linker.

[0196] The fusion between the adaptor protein and the activator or repressor may include a linker. For example, GlySer linkers GGGS can be used. They can be used in repeats of 3 ((GGGGS)₃ (SEQ ID NO:45,516)) or 6 (SEQ ID NO:45,517), 9 (SEQ ID NO:45,518) or even 12 (SEQ ID NO:45,519) or more, to provide suitable lengths, as required. Linkers can be used between the RNA-binding protein and the functional domain (activator or repressor), or between the CRISPR Enzyme (Cas9) and the functional domain (activator or repressor). The linkers the user to engineer appropriate amounts of “mechanical flexibility”.

[0197] It is also envisaged that the enzyme-guide complex as a whole may be associated with two or more functional domains. For example, there may be two or more functional domains associated with the enzyme, or there may be two or more functional domains associated with the guide (via one or more adaptor proteins), or there may be one or more functional domains associated with the enzyme and one or more functional domains associated with the guide (via one or more adaptor proteins).

[0198] In general, the sgRNAs are modified in a manner that provides specific binding sites (e.g. aptamers) for adapter proteins comprising one or more functional domains (e.g. via fusion protein) to bind to. The modified sgRNA are modified such that once the sgRNA forms a CRISPR complex (i.e. CRISPR enzyme binding to sgRNA and target) the adapter proteins bind and, the functional domain on the adapter protein is positioned in a spatial orientation which is advantageous for the attributed function to be effective. For example, if the functional domain is a transcription activator (e.g. VP64 or p65), the transcription activator is placed in a spatial orientation which allows it to affect the transcription of the target. Likewise, a transcription repressor will be advantageously positioned to affect the transcription of the target and a nuclease (e.g. Fokl) will be advantageously positioned to cleave or partially cleave the target.

[0199] The skilled person will understand that modifications to the sgRNA which allow for binding of the adapter+functional domain but not proper positioning of the adapter+functional domain (e.g. due to steric hindrance within the three-dimensional structure of the CRISPR complex) are modifications which are not intended. The one or more modified sgRNA may be modified at the tetra loop, the stem loop 1, stem loop 2, or stem loop 3, as described herein, preferably at either the tetra loop or stem loop 2, and most preferably at both the tetra loop and stem loop 2. In exemplary embodiments, the MS2-binding loop ggccAACATGAGGATCACCCATGTCTGCAGggcc (SEQ ID NO:45,520) may replace nucleotides+13 to +16 and nucleotides+53 to +56 of the standard sgRNA backbone. The resulting structure is an sgRNA scaffold in which the tetraloop and stemloop 2 sequences have been replaced by an MS2 binding loop. Without being bound by theory, the tetraloop and stemloop 2 were selected for replacement based on information obtained from the Cas9/RNA/DNA crystal structure. Specifically, the tetraloop and stemloop 2 were found to protrude from the Cas9 protein in such a way which suggested that adding an MS2 binding loop would not interfere with any Cas9 residues. Additionally, the proximity of the tetraloop and stemloop 2 sites to the DNA suggested that localization to these locations would result in a high degree of interaction between the DNA and any recruited protein, such as a transcriptional activator. In short, a specific RNA sequence may be inserted into the exposed guide loop(s) and a corresponding RNA-binding protein may be used, whether that is fused to a functional domain, or a further element which in turn recognizes or binds specifically to a functional domain. The functional domain may be a transacting activator or a repressor.

[0200] Although single MS2 addition (i.e. to one or other of the tetraloop or stem loop 2) shows an improvement in terms of Gain of Function (gene upregulation) compared to a standard guide, the double addition (MS2 on both loops) shows even stronger upregulation. The use of two or more functional domains with the guide is therefore preferred.

[0201] As mentioned herein, having one activator, such as VP64, bound to Cas9 and a separate similar activator, again VP64, bound to the guide via MS2 shows the greatest improvement in terms of Gain of Function (gene upregulation). Other activators or repressors may be exchanged here for the activator mentioned. In certain embodiments, host cells for screening combinatorial interactions using CRISPRa may express orthogonal CRISPR enzyme activator fusion proteins and adapter activator fusion proteins.

### Epigenetic Targeting Platform

[0202] Epigenetic modifications play an important role in gene expression and regulation, and are involved in numerous cellular processes such as differentiation, development, and tumorigenesis. For example, the chromatin regulatory network provides for chromatin interaction, reinforcing genes, antagonistic genes, genes often found in multiprotein complexes, readers, writers and erasers. In certain embodiments, combinations of guide sequences targeting combinations of epigenetic or chromatin regulation genes are screened. Genes that regulate chromatin are able to be targeted pharmaceutically, i.e., druggable, are often mutated in cancer, and are commonly found in redundant pathways. Chromatin regulators include enzymatic proteins with functional domains that can be targeted. For example, enzymes include, but are not limited to EZH2, DOT1L, KDM and MT. Chromatin regulator genes with known inhibitors include, but are not limited to DOT1L, EZH2, EHMT1, EHMT2, SETD7, SMYD2, DNMT1, PRMT1, PRMT3, PRMT5, PRMT4, PRMT6, PRMT8, KDM1A, KDM6A, KDM6B, HDAC1, HDAC2, HDAC3, HDAC6, HDAC8, SIRT1, SIRT2, SIRT6, BAZ2A, BAZ2B, BRD4, BRD9/7, EP300, CECR2, SMARCA4, P300, CDK7, EED, SMYD3, BRPF1, KDM4A, KDM4B, KDM4C, KDM4D, KDM4E, KDM5A, KDM5B, KDM5C and KDM5D. In certain embodiments, chromatin regulators may include a gene in Table 1.

TABLE 1

| Gene Symbol | Gene ID |
|---|---|
| AADAT | 51166 |
| AASS | 10157 |
| ABAT | 18 |
| ABT1 | 29777 |
| ACD | 65057 |
| ACTB | 60 |
| ACTL6A | 86 |
| ACTL6B | 51412 |
| ACTR5 | 79913 |
| ACTR6 | 64431 |
| ACTR8 | 93973 |
| ADHFE1 | 137872 |
| ADI1 | 55256 |
| ADO | 84890 |
| ADRM1 | 11047 |
| AEBP2 | 121536 |
| AES | 166 |
| AFF1 | 4299 |
| AFF2 | 2334 |
| AFF3 | 3899 |
| AFF4 | 27125 |
| AGXT | 189 |
| AGXT2 | 64902 |
| AICDA | 57379 |
| AIFM1 | 9131 |
| AIM1 | 202 |
| AIP | 9049 |
| AIRE | 326 |
| AJUBA | 84962 |
| AKAP1 | 8165 |
| AKIRIN2 | 55122 |
| ALDHIB1 | 219 |
| ALDH2 | 217 |
| ALDH3A2 | 224 |
| ALDH7A1 | 501 |
| ALDH9A1 | 223 |
| ALG13 | 79868 |
| ALKBH1 | 8846 |
| ALKBH2 | 121642 |
| ALKBH3 | 221120 |
| ALKBH5 | 54890 |
| ALKBH6 | 84964 |
| ALYREF | 10189 |
| ANKRD1 | 27063 |
| ANP32B | 10541 |
| ANP32E | 81611 |
| APBB1 | 322 |
| APEX1 | 328 |
| APOBEC1 | 339 |
| APPL1 | 26060 |
| APPL2 | 55198 |
| ARHGAP35 | 2909 |
| ARID1A | 8289 |
| ARID1B | 57492 |
| ARID2 | 196528 |
| ARID3A | 1820 |
| ARID3B | 10620 |
| ARID3C | 138715 |
| ARID4A | 5926 |
| ARID4B | 51742 |
| ARID5A | 10865 |
| ARID5B | 84159 |
| ARL2BP | 23568 |
| ARRB1 | 408 |
| AS3MT | 57412 |
| ASF1A | 25842 |
| ASF1B | 55723 |
| ASH1L | 55870 |
| ASH2L | 9070 |
| ASPH | 444 |
| ASPHD1 | 253982 |
| ASPHD2 | 57168 |
| ASXL1 | 171023 |
| ASZ1 | 136991 |
| ATAD2 | 29028 |
| ATAD2B | 54454 |
| ATF2 | 1386 |
| ATF3 | 467 |
| ATF7IP | 55729 |
| ATF7IP2 | 80063 |
| ATN1 | 1822 |
| ATRX | 546 |
| ATXN7 | 6314 |
| ATXN7L3 | 56970 |
| AURKB | 9212 |
| AURKC | 6795 |
| AXIN2 | 8313 |
| BABAM1 | 29086 |
| BAG6 | 7917 |
| BAHD1 | 22893 |
| BANF1 | 8815 |
| BANP | 54971 |
| BAP1 | 8314 |
| BASP1 | 10409 |
| BAZ1A | 11177 |
| BAZ1B | 9031 |
| BAZ2A | 11176 |
| BAZ2B | 29994 |
| BBOX1 | 8424 |
| BCAT1 | 586 |
| BCAT2 | 587 |
| BCMO1 | 53630 |
| BCO2 | 83875 |
| BCOR | 54880 |
| BCORL1 | 63035 |
| BDP1 | 55814 |
| BIRC2 | 329 |
| BMI1 | 648 |
| BPTF | 2186 |
| BRCA1 | 672 |
| BRCA2 | 675 |
| BRCC3 | 79184 |
| BRD1 | 23774 |
| BRD2 | 6046 |
| BRD3 | 8019 |
| BRD4 | 23476 |
| BRD7 | 29117 |
| BRD8 | 10902 |
| BRD9 | 65980 |
| BRDT | 676 |
| BRE | 9577 |
| BRF1 | 2972 |
| BRPF1 | 7862 |
| BRPF3 | 27154 |
| BRWD1 | 54014 |
| BRWD3 | 254065 |
| BUB1 | 699 |
| C11orf30 | 56946 |
| C14orf169 | 79697 |
| C17orf49 | 124944 |
| C1orf85 | 112770 |
| C1QBP | 708 |
| C9orf64 | 84267 |
| CABIN1 | 23523 |
| CALCOCO1 | 57658 |
| CAMK2D | 817 |
| CARM1 | 10498 |
| CASC5 | 57082 |
| CASP8AP2 | 9994 |
| CBFA2T2 | 9139 |
| CBX1 | 10951 |
| CBX2 | 84733 |
| CBX3 | 11335 |
| CBX4 | 8535 |
| CBX5 | 23468 |
| CBX6 | 23466 |
| CBX7 | 23492 |
| CBX8 | 57332 |
| CCAR1 | 55749 |
| CCAR2 | 57805 |
| CCBL1 | 883 |
| CCBL2 | 56267 |
| CCDC101 | 112869 |
| CCNC | 892 |
| CCND1 | 595 |
| CCNE1 | 898 |
| CCNH | 902 |
| CCNT1 | 904 |
| CCNT2 | 905 |
| CD1D | 912 |
| CD3D | 915 |
| CD3EAP | 10849 |
| CDAN1 | 146059 |
| CDC40 | 51362 |
| CDC5L | 988 |
| CDC73 | 79577 |
| CDCA2 | 157313 |
| CDCA5 | 113130 |
| CDCA8 | 55143 |
| CDK12 | 51755 |
| CDK13 | 8621 |
| CDK19 | 23097 |
| CDK2 | 1017 |
| CDK2AP1 | 8099 |
| CDK7 | 1022 |
| CDK8 | 1024 |
| CDK9 | 1025 |
| CDKN2A | 1029 |
| CDO1 | 1036 |
| CDY1 | 9085 |
| CDY1B | 9085 |
| CDY2A | 9085 |
| CDY2B | 9426 |
| CDYL | 9425 |
| CDYL2 | 124359 |
| CECR2 | 27443 |
| CENPA | 1058 |
| CENPB | 1059 |
| CENPC | 1060 |
| CENPH | 64946 |
| CENPI | 2491 |
| CENPK | 64105 |
| CENPL | 91687 |
| CENPM | 79019 |
| CENPN | 55839 |
| CENPO | 79172 |
| CENPP | 401541 |
| CENPQ | 55166 |
| CENPU | 79682 |
| CENPV | 201161 |
| CENPW | 387103 |
| CHAF1A | 10036 |
| CHAF1B | 8208 |
| CHD1 | 1105 |
| CHD1L | 9557 |
| CHD2 | 1106 |
| CHD3 | 1107 |
| CHD4 | 1108 |
| CHD5 | 26038 |
| CHD6 | 84181 |
| CHD7 | 55636 |
| CHD8 | 57680 |
| CHD9 | 80205 |
| CHEK1 | 1111 |
| CHMP1A | 5119 |
| CHRAC1 | 54108 |
| CHUK | 1147 |
| CIITA | 4261 |
| CIR1 | 9541 |
| CITED1 | 4435 |
| CITED2 | 10370 |
| CITED4 | 163732 |
| CLP1 | 10978 |
| COPRS | 55352 |
| COPS5 | 10987 |
| COQ3 | 51805 |
| CORO2A | 7464 |
| CPA4 | 51200 |
| CPSF1 | 29894 |
| CPSF2 | 53981 |
| CPSF3 | 51692 |
| CPSF7 | 79869 |
| CREBBP | 1387 |
| CREG1 | 8804 |
| CRTC1 | 23373 |
| CRYM | 1428 |
| CSNK2A1 | 1457 |
| CSNK2A2 | 1459 |
| CSNK2B | 1460 |
| CSRP2BP | 57325 |
| CSTF1 | 1477 |
| CSTF2 | 1478 |
| CSTF3 | 1479 |
| CTBP1 | 1487 |
| CTBP2 | 1488 |
| CTCF | 10664 |
| CTCFL | 140690 |
| CTDP1 | 9150 |
| CTNNB1 | 1499 |
| CTR9 | 9646 |
| CTSL | 1514 |
| CUL4B | 8450 |
| CXXC1 | 30827 |
| DACH1 | 1602 |
| DAPK3 | 1613 |
| DAXX | 1616 |
| DCAF6 | 55827 |
| DDB1 | 1642 |
| DDB2 | 1643 |
| DDX1 | 1653 |
| DDX17 | 10521 |
| DDX5 | 1655 |
| DDX54 | 79039 |
| DEAF1 | 10522 |
| DEK | 7913 |
| DEPDC1 | 55635 |
| DHTKD1 | 55526 |
| DHX36 | 170506 |
| DHX38 | 9785 |
| DIDO1 | 11083 |
| DLC1 | 10395 |
| DLD | 1738 |
| DLST | 1743 |
| DLX5 | 1749 |
| DMAP1 | 55929 |
| DNAJC1 | 64215 |
| DNAJC2 | 27000 |
| DNMT1 | 1786 |
| DNMT3A | 1788 |
| DNMT3B | 1789 |
| DNMT3L | 29947 |
| DOT1L | 84444 |
| DPF1 | 8193 |
| DPF2 | 5977 |
| DPF3 | 8110 |
| DPPA3 | 359787 |
| DPY30 | 84661 |
| DR1 | 1810 |
| DTX1 | 1840 |
| DTX3L | 151636 |
| DYNLL1 | 8655 |
| DYRK1B | 9149 |
| E2F1 | 1869 |
| E2F6 | 1876 |
| E2F7 | 144455 |
| E2F8 | 79733 |
| E4F1 | 1877 |
| ECD | 11319 |
| EDF1 | 8721 |
| EED | 8726 |
| EGLN1 | 54583 |
| EGLN2 | 112398 |
| EGLN3 | 112399 |
| EHMT1 | 79813 |
| EHMT2 | 10919 |
| EID1 | 23741 |
| ELANE | 1991 |
| ELL | 8178 |
| ELL2 | 22936 |
| ELL3 | 80237 |
| ELP2 | 55250 |
| ELP3 | 55140 |
| ELP4 | 26610 |
| ENO1 | 2023 |
| ENY2 | 56943 |
| EP300 | 2033 |
| EP400 | 57634 |
| EPC1 | 80314 |
| EPC2 | 26122 |
| ERCC1 | 2067 |
| ERCC2 | 2068 |
| ERCC3 | 2071 |
| ERCC4 | 2072 |
| ERCC5 | 2073 |
| ESPL1 | 9700 |
| ETHE1 | 23474 |
| EYA1 | 2138 |
| EYA2 | 2139 |
| EYA3 | 2140 |
| EYA4 | 2070 |
| EZH1 | 2145 |
| EZH2 | 2146 |
| FAM175A | 84142 |
| FAM60A | 58516 |
| FAM64A | 54478 |
| FBL | 2091 |
| FBXL19 | 54620 |
| FBXO11 | 80204 |
| FGF2 | 2247 |
| FHL2 | 2274 |
| FKBP6 | 8468 |
| FLCN | 201163 |
| FLT1 | 2321 |
| FTO | 79068 |
| GATAD1 | 57798 |
| GATAD2A | 54815 |
| GATAD2B | 57459 |
| GFI1 | 2672 |
| GFI1B | 8328 |
| GFPT1 | 2673 |
| GFPT2 | 9945 |
| GLO1 | 2739 |
| GLOD4 | 51031 |
| GLOD5 | 392465 |
| GLS | 2744 |
| GLS2 | 27165 |
| GLUD1 | 2746 |
| GLUD2 | 2747 |
| GLYR1 | 84656 |
| GMEB1 | 10691 |
| GMEB2 | 26205 |
| GMNC | 647309 |
| GOT1 | 2805 |
| GOT2 | 2806 |
| GPS2 | 2874 |
| GPT | 2875 |
| GPT2 | 84706 |
| GRIP1 | 23426 |
| GSG2 | 83903 |
| GTF2A1 | 2957 |
| GTF2A1L | 11036 |
| GTF2A2 | 2958 |
| GTF2B | 2959 |
| GTF2E1 | 2960 |
| GTF2E2 | 2961 |
| GTF2F1 | 2962 |
| GTF2F2 | 2963 |
| GTF2H1 | 2965 |
| GTF2H2 | 2966 |
| GTF2H3 | 2967 |
| GTF2H4 | 2968 |
| GTF3C1 | 2975 |
| GTF3C2 | 2976 |
| GTF3C3 | 9330 |
| GTF3C4 | 9329 |
| GTF3C5 | 9328 |
| GTF3C6 | 112495 |
| H1F0 | 3005 |
| H1FOO | 132243 |
| H1FX | 8971 |
| H2AFB1 | 474382 |
| H2AFB2 | 83740 |
| H2AFX | 3014 |
| H2AFY | 9555 |
| H2AFY2 | 55506 |
| H2AFZ | 3015 |
| H2BFS | 54145 |
| H3F3A | 3020 |
| H3F3B | 3020 |
| H3F3C | 440093 |
| HAAO | 23498 |
| HAT1 | 8520 |
| HCFC1 | 3054 |
| HCFC2 | 29915 |
| HDAC1 | 3065 |
| HDAC10 | 83933 |
| HDAC11 | 79885 |
| HDAC2 | 3066 |
| HDAC3 | 8841 |
| HDAC4 | 9759 |
| HDAC5 | 10014 |
| HDAC6 | 10013 |
| HDAC7 | 51564 |
| HDAC8 | 55869 |
| HDAC9 | 9734 |
| HDGF | 3068 |
| HDGFRP2 | 84717 |
| HELLS | 3070 |
| HELZ2 | 85441 |
| HESS | 388585 |
| HEY2 | 23493 |
| HEYL | 26508 |
| HGD | 3081 |
| HIF1AN | 55662 |
| HIF3A | 64344 |
| HILS1 | 373861 |
| HINFP | 25988 |
| HINT1 | 3094 |
| HIPK2 | 28996 |
| HIRA | 7290 |
| HIST1H1A | 3024 |
| HIST1H1B | 3009 |
| HIST1H1C | 3006 |
| HIST1H1D | 3007 |
| HIST1H1E | 3008 |
| HIST1H2BA | 255626 |
| HIST1H2BB | 3018 |
| HIST1H2BC | 8339 |
| HIST1H2BD | 3017 |
| HIST1H2BE | 8339 |
| HIST1H2BF | 8339 |
| HIST1H2BG | 8339 |
| HIST1H2BH | 8345 |
| HIST1H2BI | 8339 |
| HIST1H2BJ | 8970 |
| HIST1H2BK | 85236 |
| HIST1H2BL | 8340 |
| HIST1H2BM | 8342 |
| HIST1H2BN | 8341 |
| HIST1H2BO | 8348 |
| HIST1H3A | 8350 |
| HIST1H4A | 8294 |
| HIST2H2BE | 8349 |
| HIST2H2BF | 440689 |
| HIST3H2A | 92815 |
| HIST3H2BB | 128312 |
| HJURP | 55355 |
| HLCS | 3141 |
| HLTF | 6596 |
| HMCES | 56941 |
| HMG20A | 10363 |
| HMG20B | 10362 |
| HMGA1 | 3159 |
| HMGA2 | 8091 |
| HMGB1 | 3146 |
| HMGB2 | 3148 |
| HMGB3 | 3149 |
| HMGB4 | 127540 |
| HMGN1 | 3150 |
| HMGN2 | 3151 |
| HMGN3 | 9324 |
| HMGN4 | 10473 |
| HMGN5 | 79366 |
| HMGXB3 | 22993 |
| HMGXB4 | 10042 |
| HNRNPA2B1 | 3181 |
| HNRNPC | 3183 |
| HNRNPK | 3190 |
| HP1BP3 | 50809 |
| HPD | 3242 |
| HPDL | 84842 |
| HR | 55806 |
| HSBP1 | 3281 |
| HSPBAP1 | 79663 |
| HTATIP2 | 10553 |
| HUWE1 | 10075 |
| ID3 | 3399 |
| ID4 | 3400 |
| IDH1 | 3417 |
| IDH2 | 3418 |
| IDH3A | 3419 |
| IDH3B | 3420 |
| IDH3G | 3421 |
| IDO1 | 3620 |
| IDO2 | 169355 |
| IGBP1 | 3476 |
| IKBKAP | 8518 |
| IL1B | 3553 |
| IL31RA | 133396 |
| INCENP | 3619 |
| ING1 | 3621 |
| ING2 | 3622 |
| ING3 | 54556 |
| ING4 | 51147 |
| ING5 | 84289 |
| INO80 | 54617 |
| INO80B | 83444 |
| INO80C | 125476 |
| INO80D | 54891 |
| INO80E | 283899 |
| INSM1 | 3642 |
| INTS12 | 57117 |
| IPO4 | 79711 |
| IPO9 | 55705 |
| IRF1 | 3659 |
| ITGB3BP | 23421 |
| IWS1 | 55677 |
| JADE1 | 79960 |
| JADE2 | 23338 |
| JADE3 | 9767 |
| JAK2 | 3717 |
| JARID2 | 3720 |
| JAZF1 | 221895 |
| JMJD1C | 221037 |
| JMJD4 | 65094 |
| JMJD6 | 23210 |
| JMJD7 | 100137047 |
| JMJD8 | 339123 |
| JMY | 133746 |
| JIB | 10899 |
| JUP | 3728 |
| KANSL1 | 284058 |
| KANSL2 | 54934 |
| KANSL3 | 55683 |
| KAT2A | 2648 |
| KAT2B | 8850 |
| KAT5 | 10524 |
| KAT6A | 7994 |
| KAT6B | 23522 |
| KAT7 | 11143 |
| KAT8 | 84148 |
| KCNIP3 | 30818 |
| KCTD1 | 284252 |
| KDM1A | 23028 |
| KDM1B | 221656 |
| KDM2A | 22992 |
| KDM2B | 84678 |
| KDM3A | 55818 |
| KDM3B | 51780 |
| KDM4A | 9682 |
| KDM4B | 23030 |
| KDM4C | 23081 |
| KDM4D | 55693 |
| KDM4E | 390245 |
| KDM5A | 5927 |
| KDM5B | 10765 |
| KDM5C | 8242 |
| KDM5D | 8284 |
| KDM6A | 7403 |
| KDM6B | 23135 |
| KDM7A | 80853 |
| KDM8 | 79831 |
| KIAA0101 | 9768 |
| KIAA2026 | 158358 |
| KLF1 | 10661 |
| KLF12 | 11278 |
| KLF7 | 8609 |
| KMT2A | 4297 |
| KMT2B | 9757 |
| KMT2C | 58508 |
| KMT2D | 8085 |
| KMT2E | 55904 |
| KTI12 | 112970 |
| L2HGDH | 79944 |
| L3MBTL1 | 26013 |
| L3MBTL2 | 83746 |
| L3MBTL3 | 84456 |
| L3MBTL4 | 91133 |
| LAS1L | 81887 |
| LDB1 | 8861 |
| LEF1 | 51176 |
| LEO1 | 123169 |
| LEPRE1 | 64175 |
| LEPREL1 | 55214 |
| LEPREL2 | 10536 |
| LIF | 3976 |
| LIMD1 | 8994 |
| LIN9 | 286826 |
| LMCD1 | 29995 |
| LOXL2 | 4017 |
| LPIN2 | 9663 |
| LRWD1 | 222229 |
| LSM10 | 84967 |
| LSM11 | 134353 |
| LZTS1 | 11178 |
| M1AP | 130951 |
| MAEL | 84944 |
| MAGED1 | 9500 |
| MAGOH | 4116 |
| MAK | 4117 |
| MAML1 | 9794 |
| MAML2 | 84441 |
| MAML3 | 55534 |
| MAP3K10 | 4294 |
| MAP3K12 | 7786 |
| MAP3K4 | 4216 |
| MAP3K7 | 6885 |
| MAPK11 | 5600 |
| MAPK14 | 1432 |
| MAPK3 | 5595 |
| MAPK8 | 5599 |
| MAPKAPK2 | 9261 |
| MAPKAPK3 | 7867 |
| MAZ | 4150 |
| MBD1 | 4152 |
| MBD2 | 8932 |
| MBD3 | 53615 |
| MBD3L1 | 85509 |
| MBD3L2 | 125997 |
| MBD4 | 8930 |
| MBD5 | 55777 |
| MBD6 | 114785 |
| MBIP | 51562 |
| MBTD1 | 54799 |
| MCEE | 84693 |
| MCMBP | 79892 |
| MCRS1 | 10445 |
| MDC1 | 9656 |
| MEAF6 | 64769 |
| MECOM | 2122 |
| MECP2 | 4204 |
| MED1 | 5469 |
| MED10 | 84246 |
| MED11 | 400569 |
| MED12 | 9968 |
| MED12L | 116931 |
| MED13 | 9969 |
| MED13L | 23389 |
| MED14 | 9282 |
| MED15 | 51586 |
| MED16 | 10025 |
| MED17 | 9440 |
| MED18 | 54797 |
| MED19 | 219541 |
| MED20 | 9477 |
| MED21 | 9412 |
| MED22 | 6837 |
| MED23 | 9439 |
| MED24 | 9862 |
| MED25 | 81857 |
| MED26 | 9441 |
| MED27 | 9442 |
| MED28 | 80306 |
| MED29 | 55588 |
| MED30 | 90390 |
| MED31 | 51003 |
| MED4 | 29079 |
| MED6 | 10001 |
| MED7 | 9443 |
| MED8 | 112950 |
| MED9 | 55090 |
| MEG3 | 55384 |
| MEIS1 | 4211 |
| MEMO1 | 51072 |
| MEN1 | 4221 |
| METTL13 | 51603 |
| MGA | 23269 |
| MGMT | 4255 |
| MIER1 | 57708 |
| MIER2 | 54531 |
| MIER3 | 166968 |
| MINA | 84864 |
| MIS18A | 54069 |
| MIS18BP1 | 55320 |
| MKL1 | 57591 |
| MKL2 | 57496 |
| MKRN1 | 23608 |
| MLLT1 | 4298 |
| MLLT10 | 8028 |
| MLLT3 | 4300 |
| MLLT6 | 4302 |
| MMS19 | 64210 |
| MNAT1 | 4331 |
| MNT | 4335 |
| MORF4L1 | 10933 |
| MORF4L2 | 9643 |
| MPHOSPH8 | 54737 |
| MRGBP | 55257 |
| MSC | 9242 |
| MSH6 | 2956 |
| MSL1 | 339287 |
| MSL2 | 55167 |
| MSL3 | 10943 |
| MSL3P1 | 151507 |
| MT3 | 4504 |
| MTA1 | 9112 |
| MTA2 | 9219 |
| MTA3 | 57504 |
| MTDH | 92140 |
| MTERF | 7978 |
| MTF1 | 4520 |
| MTF2 | 22823 |
| MTRR | 4552 |
| MUC1 | 4582 |
| MXD1 | 4084 |
| MXD4 | 10608 |
| MXI1 | 4601 |
| MYC | 4609 |
| MYCBP | 26292 |
| MYOCD | 93649 |
| MYOD1 | 4654 |
| MYSM1 | 114803 |
| N4BP2L2 | 10443 |
| NAA40 | 79829 |
| NAA50 | 80218 |
| NAA60 | 79903 |
| NAB2 | 4665 |
| NACA | 4666 |
| NACC2 | 138151 |
| NANOG | 79923 |
| NAP1L1 | 4673 |
| NAP1L2 | 4674 |
| NAP1L3 | 4675 |
| NAP1L4 | 4676 |
| NAP1L5 | 266812 |
| NASP | 4678 |
| NCAPD2 | 9918 |
| NCAPD3 | 23310 |
| NCAPG | 64151 |
| NCAPG2 | 54892 |
| NCAPH | 23397 |
| NCBP1 | 4686 |
| NCBP2 | 22916 |
| NCOA1 | 8648 |
| NCOA2 | 10499 |
| NCOA3 | 8202 |
| NCOA4 | 8031 |
| NCOA6 | 23054 |
| NCOA7 | 135112 |
| NCOR1 | 9611 |
| NCOR2 | 9612 |
| NCR1 | 9437 |
| NDUFAF5 | 79133 |
| NEK2 | 4751 |
| NELFA | 7469 |
| NELFB | 25920 |
| NELFCD | 51497 |
| NELFE | 7936 |
| NEUROG1 | 4762 |
| NEUROG3 | 50674 |
| NFATC3 | 4775 |
| NFATC4 | 4776 |
| NFE2 | 4778 |
| NFRKB | 4798 |
| NFX1 | 4799 |
| NFYA | 4800 |
| NFYB | 4801 |
| NFYC | 4802 |
| NIPBL | 25836 |
| NIT2 | 56954 |
| NKX2B | 4821 |
| NOC2L | 26155 |
| NOTCH2 | 4853 |
| NPAT | 4863 |
| NPM1 | 4869 |
| NPM2 | 10361 |
| NPM3 | 10360 |
| NRIP1 | 8204 |
| NSD1 | 64324 |
| NSL1 | 25936 |
| NSMCE2 | 286053 |
| NUDT21 | 11051 |
| OAT | 4942 |
| OGDH | 4967 |
| OGDHL | 55753 |
| OGFOD1 | 55239 |
| OGFOD2 | 79676 |
| OGFOD3 | 79701 |
| OGT | 8473 |
| OIP5 | 11339 |
| OTUB1 | 55611 |
| P4HA1 | 5033 |
| P4HA2 | 8974 |
| P4HA3 | 283208 |
| P4HB | 5034 |
| P4HTM | 54681 |
| PABPN1 | 8106 |
| PADI1 | 29943 |
| PADI2 | 11240 |
| PADI3 | 51702 |
| PADI4 | 23569 |
| PAF1 | 54623 |
| PAGR1 | 79447 |
| PAK1 | 5058 |
| PAPOLA | 10914 |
| PAPOLB | 56903 |
| PARP1 | 142 |
| PARP10 | 84875 |
| PARP12 | 64761 |
| PARP14 | 54625 |
| PARP15 | 165631 |
| PARP2 | 10038 |
| PARP3 | 10039 |
| PARP4 | 143 |
| PARP9 | 83666 |
| PAWR | 5074 |
| PAXIP1 | 22976 |
| PBRM1 | 55193 |
| PBXIP1 | 57326 |
| PCBD1 | 5092 |
| PCF11 | 51585 |
| PCGF1 | 84759 |
| PCGF2 | 7703 |
| PCGF3 | 10336 |
| PCGF5 | 84333 |
| PCGF6 | 84108 |
| PCNA | 5111 |
| PDS5A | 23244 |
| PDS5B | 23047 |
| PELP1 | 27043 |
| PER1 | 5187 |
| PER2 | 8864 |
| PEX14 | 5195 |
| PFDN5 | 5204 |
| PGR | 5241 |
| PHB | 5245 |
| PHC1 | 1911 |
| PHC2 | 1912 |
| PHC3 | 80012 |
| PHF1 | 5252 |
| PHF10 | 55274 |
| PHF11 | 51131 |
| PHF12 | 57649 |
| PHF13 | 148479 |
| PHF14 | 9678 |
| PHF19 | 26147 |
| PHF2 | 5253 |
| PHF20 | 51230 |
| PHF20L1 | 51105 |
| PHF21A | 51317 |
| PHF21B | 112885 |
| PHF23 | 79142 |
| PHF3 | 23469 |
| PHF5A | 84844 |
| PHF6 | 84295 |
| PHF7 | 51533 |
| PHF8 | 23133 |
| PHGDH | 26227 |
| PHIP | 55023 |
| PHRF1 | 57661 |
| PHYH | 5264 |
| PHYHD1 | 254295 |
| PIAS1 | 8554 |
| PIAS2 | 9063 |
| PICK1 | 9463 |
| PIF1 | 80119 |
| PIM1 | 5292 |
| PIWIL2 | 55124 |
| PIWIL4 | 143689 |
| PKN1 | 5585 |
| PLD6 | 201164 |
| PLK1 | 5347 |
| PLOD1 | 5351 |
| PLOD2 | 5352 |
| PLOD3 | 8985 |
| PLRG1 | 5356 |
| PMF1 | 11243 |
| PML | 5371 |
| POLE3 | 54107 |
| POLE4 | 56655 |
| POLR1A | 25885 |
| POLR1B | 84172 |
| POLR1C | 9533 |
| POLR1D | 51082 |
| POLR2A | 5430 |
| POLR2B | 5431 |
| POLR2C | 5432 |
| POLR2D | 5433 |
| POLR2E | 5434 |
| POLR2F | 5435 |
| POLR2G | 5436 |
| POLR2H | 5437 |
| POLR2I | 5438 |
| POLR2J | 5439 |
| POLR2K | 5440 |
| POLR2L | 5441 |
| POLR3A | 11128 |
| POLR3B | 55703 |
| POLR3C | 10623 |
| POLR3D | 661 |
| POLR3E | 55718 |
| POLR3F | 10621 |
| POLR3G | 10622 |
| POLR3GL | 84265 |
| POLR3H | 171568 |
| POLR3K | 51728 |
| POT1 | 25913 |
| POU5F1 | 5460 |
| PPARG | 5468 |
| PPARGC1A | 10891 |
| PPARGC1B | 133522 |
| PPP1CA | 5499 |
| PPP1CB | 5500 |
| PPP1CC | 5501 |
| PPP1R13L | 10848 |
| PPP4R2 | 151987 |
| PQBP1 | 10084 |
| PRDM10 | 56980 |
| PRDM11 | 56981 |
| PRDM12 | 59335 |
| PRDM13 | 59336 |
| PRDM15 | 63977 |
| PRDM16 | 63976 |
| PRDM2 | 7799 |
| PRDM4 | 11108 |
| PRDM5 | 11107 |
| PRDM6 | 93166 |
| PRDM7 | 11105 |
| PRDM8 | 56978 |
| PRDM9 | 56979 |
| PRKAA1 | 5562 |
| PRKAA2 | 5563 |
| PRKCA | 5578 |
| PRKCB | 5579 |
| PRKD1 | 5587 |
| PRKD2 | 25865 |
| PRMT1 | 3276 |
| PRMT2 | 3275 |
| PRMT3 | 10196 |
| PRMT5 | 10419 |
| PRMT6 | 55170 |
| PRMT7 | 54496 |
| PRMT8 | 56341 |
| PRPF31 | 26121 |
| PRPF6 | 24148 |
| PSAT1 | 29968 |
| PSIP1 | 11168 |
| PSMC3 | 5702 |
| PSMC3IP | 29893 |
| PSMD14 | 10213 |
| PSMD9 | 5715 |
| PSME4 | 23198 |
| PTGS1 | 5742 |
| PTGS2 | 5743 |
| PTPN2 | 5771 |
| PTRF | 284119 |
| PWWP2B | 170394 |
| PYGO1 | 26108 |
| PYGO2 | 90780 |
| RAD18 | 56852 |
| RAD21 | 5885 |
| RAD54L | 8438 |
| RAG1 | 5896 |
| RAG2 | 5897 |
| RAI1 | 10743 |
| RAN | 5901 |
| RAP2C | 57826 |
| RARA | 5914 |
| RB1 | 5925 |
| RBBP4 | 5928 |
| RBBP5 | 5929 |
| RBBP7 | 5931 |
| RBBP8 | 5932 |
| RBFOX2 | 23543 |
| RBL1 | 5933 |
| RBL2 | 5934 |
| RBM14 | 10432 |
| RBM8A | 9939 |
| RBP1 | 5947 |
| RBP2 | 5948 |
| RBPMS | 11030 |
| RCBTB1 | 55213 |
| RCC1 | 1104 |
| RCOR1 | 23186 |
| RCOR2 | 283248 |
| RCOR3 | 55758 |
| RERE | 473 |
| REST | 5978 |
| RFX5 | 5993 |
| RFXAP | 5994 |
| RING1 | 6015 |
| RIPK3 | 11035 |
| RLIM | 51132 |
| RNF14 | 9604 |
| RNF168 | 165918 |
| RNF169 | 254225 |
| RNF17 | 56163 |
| RNF2 | 6045 |
| RNF20 | 56254 |
| RNF4 | 6047 |
| RNF40 | 9810 |
| RNF8 | 9025 |
| RNMT | 8731 |
| RNPS1 | 10921 |
| RPE65 | 6121 |
| RPRD1B | 58490 |
| RPS6KA4 | 8986 |
| RPS6KA5 | 9252 |
| RRP8 | 23378 |
| RSF1 | 51773 |
| RUVBL1 | 8607 |
| RUVBL2 | 10856 |
| RYBP | 23429 |
| SALL1 | 6299 |
| SAP130 | 79595 |
| SAP18 | 10284 |
| SAP25 | 100316904 |
| SAP30 | 8819 |
| SAP30L | 79685 |
| SATB1 | 6304 |
| SATB2 | 23314 |
| SCAI | 286205 |
| SCAND1 | 51282 |
| SCG2 | 7857 |
| SCML2 | 10389 |
| SENP3 | 26168 |
| SENP6 | 26054 |
| SET | 6418 |
| SETBP1 | 26040 |
| SETD1A | 9739 |
| SETD1B | 23067 |
| SETD2 | 29072 |
| SETD3 | 84193 |
| SETD4 | 54093 |
| SETD5 | 55209 |
| SETD6 | 79918 |
| SETD7 | 80854 |
| SETD8 | 387893 |
| SETD9 | 133383 |
| SETDB1 | 9869 |
| SETDB2 | 83852 |
| SETMAR | 6419 |
| SF1 | 7536 |
| SFMBT1 | 51460 |
| SFMBT2 | 57713 |
| SFPQ | 6421 |
| SHMT1 | 6470 |
| SHPRH | 257218 |
| SIAH2 | 6478 |
| SIK1 | 150094 |
| SIN3A | 25942 |
| SIN3B | 23309 |
| SIRT1 | 23411 |
| SIRT2 | 22933 |
| SIRT3 | 23410 |
| SIRT4 | 23409 |
| SIRTS | 23408 |
| SIRT6 | 51548 |
| SIRT7 | 51547 |
| SKI | 6497 |
| SKIL | 6498 |
| SKOR2 | 652991 |
| SKP1 | 6500 |
| SLBP | 7884 |
| SLC22A11 | 55867 |
| SLC22A12 | 116085 |
| SLC22A13 | 9390 |
| SLC22A20 | 440044 |
| SLC22A25 | 387601 |
| SLC22A6 | 9356 |
| SLC22A7 | 10864 |
| SLC22A8 | 9376 |
| SMAD2 | 4087 |
| SMAD3 | 4088 |
| SMAD4 | 4089 |
| SMAP2 | 64744 |
| SMARCA1 | 6594 |
| SMARCA2 | 6595 |
| SMARCA4 | 6597 |
| SMARCA5 | 8467 |
| SMARCAD1 | 56916 |
| SMARCAL1 | 50485 |
| SMARCB1 | 6598 |
| SMARCC1 | 6599 |
| SMARCC2 | 6601 |
| SMARCD1 | 6602 |
| SMARCD2 | 6603 |
| SMARCD3 | 6604 |
| SMARCE1 | 6605 |
| SMC1A | 8243 |
| SMC1B | 27127 |
| SMC2 | 10592 |
| SMC3 | 9126 |
| SMC4 | 10051 |
| SMC5 | 23137 |
| SMNDC1 | 10285 |
| SMYD1 | 150572 |
| SMYD2 | 56950 |
| SMYD3 | 64754 |
| SMYD4 | 114826 |
| SMYD5 | 10322 |
| SNAI2 | 6591 |
| SNAPC4 | 6621 |
| SNCA | 6622 |
| SND1 | 27044 |
| SNRPB | 6628 |
| SNRPD3 | 6634 |
| SNRPE | 6635 |
| SNRPF | 6636 |
| SNRPG | 6637 |
| SNW1 | 22938 |
| SP100 | 6672 |
| SP110 | 3431 |
| SP140 | 11262 |
| SP140L | 93349 |
| SP4 | 6671 |
| SPEN | 23013 |
| SPI1 | 6688 |
| SPIN1 | 10927 |
| SPRTN | 83932 |
| SRA1 | 10011 |
| SRCAP | 10847 |
| SRRM1 | 10250 |
| SRSF1 | 6426 |
| SRSF11 | 9295 |
| SRSF2 | 6427 |
| SRSF3 | 6428 |
| SRSF4 | 6429 |
| SRSF5 | 6430 |
| SRSF6 | 6431 |
| SRSF7 | 6432 |
| SRSF9 | 8683 |
| SRY | 6736 |
| SS18 | 6760 |
| SS18L1 | 26039 |
| SSRP1 | 6749 |
| SSX1 | 6756 |
| STAT5B | 6777 |
| STK3 | 6788 |
| STK31 | 56164 |
| STK38 | 11329 |
| SUB1 | 10923 |
| SUDS3 | 64426 |
| SUFU | 51684 |
| SUPT16H | 11198 |
| SUPT20H | 55578 |
| SUPT3H | 8464 |
| SUPT4H1 | 6827 |
| SUPT5H | 6829 |
| SUPT6H | 6830 |
| SUPT7L | 9913 |
| SUV39H1 | 6839 |
| SUV39H2 | 79723 |
| SUV420H1 | 51111 |
| SUV420H2 | 84787 |
| SUZ12 | 23512 |
| SYCP3 | 50511 |
| TADA1 | 117143 |
| TADA2A | 6871 |
| TADA2B | 93624 |
| TADA3 | 10474 |
| TAF1 | 6872 |
| TAF10 | 6881 |
| TAF11 | 6882 |
| TAF12 | 6883 |
| TAF13 | 6884 |
| TAF1A | 9015 |
| TAF1B | 9014 |
| TAF1C | 9013 |
| TAF1D | 79101 |
| TAF1L | 138474 |
| TAF2 | 6873 |
| TAF3 | 83860 |
| TAF4 | 6874 |
| TAF4B | 6875 |
| TAF5 | 6877 |
| TAF5L | 27097 |
| TAF6 | 6878 |
| TAF6L | 10629 |
| TAF7 | 6879 |
| TAF7L | 54457 |
| TAF8 | 129685 |
| TAF9 | 6880 |
| TAF9B | 51616 |
| TAL1 | 6886 |
| TANC1 | 85461 |
| TANC2 | 26115 |
| TAT | 6898 |
| TBL1X | 6907 |
| TBL1XR1 | 79718 |
| TBP | 6908 |
| TBPL1 | 9519 |
| TBX18 | 9096 |
| TBX20 | 57057 |
| TCEA1 | 6917 |
| TCEA2 | 6919 |
| TCEAL1 | 9338 |
| TCEAL2 | 140597 |
| TCEAL3 | 85012 |
| TCEAL4 | 79921 |
| TCEAL5 | 340543 |
| TCEAL6 | 158931 |
| TCEAL7 | 56849 |
| TCEAL8 | 90843 |
| TCEB1 | 6921 |
| TCEB2 | 6923 |
| TCEB3 | 6924 |
| TCERG1 | 10915 |
| TDG | 6996 |
| TDO2 | 6999 |
| TDP2 | 51567 |
| TDRD1 | 56165 |
| TDRD12 | 91646 |
| TDRD3 | 81550 |
| TDRD5 | 163589 |
| TDRD6 | 221400 |
| TDRD7 | 23424 |
| TDRD9 | 122402 |
| TDRKH | 11022 |
| TERF1 | 7013 |
| TERF2 | 7014 |
| TERF2IP | 54386 |
| TERT | 7015 |
| TET1 | 80312 |
| TET2 | 54790 |
| TET3 | 200424 |
| TEX10 | 54881 |
| TFCP2L1 | 29842 |
| TFDP1 | 7027 |
| TFEC | 22797 |
| TFPT | 29844 |
| TGFB111 | 7041 |
| THRAP3 | 9967 |
| THRB | 7068 |
| THUMPD2 | 80745 |
| TICRR | 90381 |
| TINF2 | 26277 |
| TLE1 | 7088 |
| TLE2 | 7089 |
| TLK1 | 9874 |
| TLK2 | 11011 |
| TMLHE | 55217 |
| TNKS | 8658 |
| TNKS2 | 80351 |
| TNP1 | 7141 |
| TONSL | 4796 |
| TOP1 | 7150 |
| TOP1MT | 116447 |
| TOP2B | 7155 |
| TP53BP1 | 7158 |
| TPR | 7175 |
| TRAF7 | 84231 |
| TRDMT1 | 1787 |
| TRERF1 | 55809 |
| TRIB3 | 57761 |
| TRIM16 | 10626 |
| TRIM22 | 10346 |
| TRIM24 | 8805 |
| TRIM28 | 10155 |
| TRIM32 | 22954 |
| TRIM33 | 51592 |
| TRIM66 | 9866 |
| TRIP11 | 9321 |
| TRIP12 | 9320 |
| TRIP4 | 9325 |
| TRRAP | 8295 |
| TSG101 | 7251 |
| TSHZ3 | 57616 |
| TSPYL2 | 64061 |
| TTF1 | 7270 |
| TTF1 | 7080 |
| TTF2 | 8458 |
| TWIST1 | 7291 |
| TYW5 | 129450 |
| U2AF1 | 7307 |
| U2AF2 | 11338 |
| UBAP2L | 9898 |
| UBE2A | 7319 |
| UBE2B | 7320 |
| UBE2E1 | 7324 |
| UBE2I | 7329 |
| UBE2L3 | 7332 |
| UBE2N | 7334 |
| UBE2NL | 389898 |
| UBE2V1 | 7335 |
| UBN1 | 29855 |
| UBP1 | 7342 |
| UBR2 | 23304 |
| UBR5 | 51366 |
| UBTF | 7343 |
| UCHL5 | 51377 |
| UHRF1 | 29128 |
| UHRF2 | 115426 |
| UIMC1 | 51720 |
| UPF1 | 5976 |
| UPF3B | 65109 |
| URI1 | 8725 |
| USP11 | 8237 |
| USP16 | 10600 |
| USP17L2 | 377630 |
| USP21 | 27005 |
| USP22 | 23326 |
| USP3 | 9960 |
| USP49 | 25862 |
| USP7 | 7874 |
| UTF1 | 8433 |
| UTP3 | 57050 |
| UTY | 7404 |
| UXT | 8409 |
| VEGFA | 7422 |
| VGLL1 | 51442 |
| VPRBP | 9730 |
| VPS72 | 6944 |
| VRK1 | 7443 |
| WAC | 51322 |
| WAPAL | 23063 |
| WBP2 | 23558 |
| WBSCR22 | 114049 |
| WDHD1 | 11169 |
| WDR11 | 55717 |
| WDR5 | 11091 |
| WDR61 | 80349 |
| WDR77 | 79084 |
| WDR82 | 80335 |
| WDR92 | 116143 |
| WHSC1 | 7468 |
| WHSC1L1 | 54904 |
| WNT4 | 54361 |
| WWC1 | 23286 |
| WWTR1 | 25937 |
| XIAP | 331 |
| YAF2 | 10138 |
| YAP1 | 10413 |
| YBX2 | 51087 |
| YBX3 | 8531 |
| YEATS2 | 55689 |
| YEATS4 | 8089 |
| YY1 | 7528 |
| ZBTB16 | 7704 |
| ZBTB32 | 27033 |
| ZBTB33 | 10009 |
| ZCCHC12 | 170261 |
| ZCWPW1 | 55063 |
| ZEB1 | 6935 |
| ZFP57 | 346171 |
| ZFPM1 | 161882 |
| ZFPM2 | 23414 |
| ZHX1 | 11244 |
| ZMIZ2 | 83637 |
| ZMYND11 | 10771 |
| ZMYND8 | 23613 |
| ZNF136 | 7695 |
| ZNF217 | 7764 |
| ZNF224 | 7767 |
| ZNF274 | 10782 |
| ZNF281 | 23528 |
| ZNF335 | 63925 |
| ZNF350 | 59348 |
| ZNF366 | 167465 |
| ZNF473 | 25888 |
| ZNF593 | 51042 |
| ZNF85 | 7639 |
| ZNRD1 | 30834 |
| ZSCAN1 | 284312 |
| ZZZ3 | 26009 |

[0203] In one aspect, the present invention provides for a screening platform that enables screening of at least 274 chromatin regulators (“300K library screen”). In certain embodiments, 2 or more guide sequences target each gene for each Cas9 ortholog. In certain embodiments, the screening platform includes non-target control guide sequences for each ortholog. In certain embodiments, the platform includes more than 2, 4, 10, or 20 non-target guide sequences. In certain embodiments, the platform includes one or more essential positive control genes (e.g., 2 or more guide sequences for each ortholog). In certain embodiments, the library screen includes 552 (S. aureus)×552 (S. pyogenes) guide sequences=304,704 combinatorial perturbations.

[0204] In certain embodiments, each S. aureus guide sequence is included in an oligonucleotide having a framework that allows construction of the orthogonal combinatorial library as described herein. In certain embodiments, the S. aureus guide sequence used for the 300K library are SEQ ID NOS: 1-552. In certain embodiments, the frame work includes from 5′ to 3′ a restriction enzyme site for cloning into the vector comprising convergent regulatory sequences, a 20-21 nucleotide S. aureus guide sequence, a S. aureus tracr sequence, optionally, a barcode identifying the guide sequence, and an overlap sequence for hybridization to a complementary overlap sequence on the S. pyogenes oligonucleotide framework. In certain embodiments, the 300K library is designed such that the S. aureus guide sequences are inserted into the vector such that they are operably linked to the H1 cassette. In certain embodiments, the S. aureus oligonucleotide framework is a 140 nucleotide oligonucleotide that includes a BsmBI cassette (e.g., GCCGTCTCGTCCCG) (SEQ ID NO:45,521), the 21 nucleotide S. aureus guide sequence described above, the S. aureus tracr sequence (e.g., GTTTAAGTACTCTGGAAACAGAATCTACTTAAACAAGGCAAAATGCCGTGTTTAT CTCGTCAACTTGTTGGCGAGATTTTTT (SEQ ID NO:45,522)), a 6 nucleotide barcode sequence, and the overlap sequence (e.g., GTGCACGAGATCATCCG (SEQ ID NO:45,523)). In certain embodiment, the S. aureus oligonucleotide is GCCGTCTCGTCCCG—(SEQ ID NO:45,524) 21-nucleotide guide sequence—GTTTAAGTACTCTGGAAACAGAATCTACTTAAACAAGGCAAAATGCCGTGTTTAT CTCGTCAACTTGTTGGCGAGATTTTTT (SEQ ID NO:45,525)—6 nucleotide barcode—GTGCACGAGATCATCCG (SEQ ID NO:45,526).

[0205] In certain embodiments, each S. pyogenes guide sequence is included in an oligonucleotide having a framework that allows construction of the orthogonal combinatorial library as described herein. In certain embodiments, the S. pyogenes guide sequence used for the 300K library are SEQ ID NOS: 553-1104. In certain embodiments, the frame work includes from 5′ to 3′ a restriction enzyme site for cloning into the vector comprising convergent regulatory sequences, a 20-21 nucleotide S. pyogenes guide sequence, a S. pyogenes tracr sequence, optionally, a barcode identifying the guide sequence, and an overlap sequence for hybridization to a complementary overlap sequence on the S. aureus oligonucleotide framework. In certain embodiments, the 300K library is designed such that the S. pyogenes guide sequences are inserted into the vector such that they are operably linked to the U6 cassette. In certain embodiments, the S. pyogenes oligonucleotide framework is a 139 nucleotide oligonucleotide that includes a BsmBI cassette (e.g., GCCGTCTCGCACCG (SEQ ID NO:45,527)), the 20 nucleotide S. pyogenes guide sequence described above, the S. pyogenes tracr sequence (e.g., GTTTGAGAGCTAGAAATAGCAAGTTCAAATAAGGCTAGTCCGTTATCAACTTGA AAAAGTGGCACCGAGTCGGTGCTTTTTT (SEQ ID NO:45,528)), a 6 nucleotide barcode sequence, and the overlap sequence (e.g., ACGGATGATCTCGTGCA (SEQ ID NO:45,529)). In certain embodiment, the S. pyogenes oligonucleotide is GCCGTCTCGCACCG (SEQ ID NO:45,530) —20-nucleotide guide sequence-GTTTGAGAGCTAGAAATAGCAAGTTCAAATAAGGCTAGTCCGTTATCAACTTGA AAAAGTGGCACCGAGTCGGTGCTTTTTT (SEQ ID NO:45,531) —6 nucleotide barcode-ACGGATGATCTCGTGCA (SEQ ID NO:45,532).

[0206] In certain embodiments, the screen can include guide sequences targeting pfam domains in any chromatin regulator. In certain embodiments, the guide sequences are included in the framework described above. In certain embodiments, the S. aureus pfam domain targeting guide sequences are selected from SEQ ID NOS: 1105-23903. In certain embodiments, the S. pyogenes pfam domain targeting guide sequences are selected from SEQ ID NOS: 23904-45515.

Screening for Combinations of Targets that Confer Specific Phenotypes

[0207] In certain embodiments, the combinatorial screening platform can be used to identify combinations of targets that confer specific phenotypes. A “selected phenotype” refers to any phenotype, e.g., any observable characteristic or functional effect that can be measured in an assay such as changes in cell growth, proliferation, morphology, enzyme function, signal transduction, expression patterns, downstream expression patterns, reporter gene activation, hormone release, growth factor release, neurotransmitter release, ligand binding, apoptosis, and product formation. In certain embodiments, a positive or negative screen can be performed. In a negative screen guide sequences pairs that are depleted are identified (e.g., screening for viability, sensitivity to a drug). In certain embodiments, a phenotype can include viability, differentiation, or changes in cell state. In a positive screen guide sequence pairs that are enriched in a population of cells having a specific phenotype are identified (e.g., expression of a cell marker).

[0208] Exemplary assay embodiments include, e.g., transformation assays, e.g., changes in proliferation, anchorage dependence, growth factor dependence, foci formation, growth in soft agar, tumor proliferation in nude mice, and tumor vascularization in nude mice; apoptosis assays, e.g., DNA laddering and cell death, expression of genes involved in apoptosis; signal transduction assays, e.g., changes in intracellular calcium, cAMP, cGMP, inositol trisphosphate (IP3), changes in hormone and neurotransmittor release; receptor assays, e.g., estrogen receptor and cell growth; growth factor assays, e.g., EPO, hypoxia and erythrocyte colony forming units assays; enzyme product assays, e.g., FAD-2 induced oil desaturation; transcription assays, e.g., reporter gene assays; and protein production assays, e.g., VEGF. A candidate gene or genetic element is “associated with” a selected phenotype if modulation of gene expression of the candidate gene or modulation of the genetic element causes a change in the selected phenotype.

[0209] In certain embodiments, cells are assayed for changes in cell state (e.g., immune state, proliferation, senescence). For example, chronic viral infections and cancer often lead to the emergence of dysfunctional or ‘exhausted’ CD8+ T cells, and the restoration of their functions is currently the focus of therapeutic interventions (see, e.g., Wang, Singer and Anderson, 2017, Molecular Dissection of CD8+ T-Cell Dysfunction. Trends in Immunology, volume 38, issue 8, p567-576). In certain embodiments, CD8+ T cells are assayed for markers of dysfunction (e.g., coinhibitory receptors, such as PD-1, TIM-3, CTLA4, LAG3). Determining combinations of chromatin regulators that when targeted restore cell function may advantageously be used in adoptive cell transfer strategies described further herein (e.g., CAR T cells). In certain embodiments, an immune response is screened using the present invention.

[0210] Chromatin regulation and epigenetics is involved in stem cell differentiation and development (see, e.g., Atlasi and Stunnenberg, 2017, The interplay of epigenetic marks during stem cell differentiation and development. Nature Reviews Genetics volume 18, pages 643-658). In certain embodiments, cells are assayed for differentiation markers or markers present on undifferentiated or differentiated cell types (neurons, immune cells, tissue subtype cells).

[0211] In certain embodiments, the present invention may be used with transgenic mice expressing one or more orthologous CRISPR enzymes. In certain embodiments, the transgenic mice are mouse models of disease or are treated with an agent to model a disease. Not being bound by a theory, the present invention may be used for screening combinatorial synthetic lethality phenotypes in the background of a disease model.

[0212] In certain embodiments, the present invention may be used to screen cells in an animal model ex vivo or in vivo. In one aspect, the present invention provides for a method of combinatorial screening of phenotypic interactions between a set of target sequences in a population of cells comprising: introducing a library according to any embodiment described herein to a transgenic animal expressing at least one CRISPR enzyme from a transgene, wherein the cells of the transgenic animal express two orthogonal CRISPR enzymes; obtaining dissected tissue from said transgenic animal; and determining the enrichment or depletion of combinations of sgRNA sequences in said tissue compared to the representation in the library introduced. In one embodiment, the library is introduced to the brain of a transgenic mouse and synthetic lethality of neurons is determined. In another aspect, the library of the present invention is introduced to cells ex vivo and the cells transferred to an animal model. In certain embodiments, the library is introduced to tumor cells. Cells may be selected that express a vector of the library. The tumor cells may be transferred to a mouse model and the representation of sgRNA combinations may be detected in tumor cells grown in the animal model. Not being bound by a theory, combinations of sgRNAs that are lethal in vivo will be reduced as compared to the library input and combinations of sgRNAs that allow proliferation will be enriched as compared to the library input.

[0213] Methods and compositions described herein are broadly applicable to any study that could benefit from the targeting of combinatorial sets of genetic elements. For example, this approach could lead to identification of novel drug targets elucidated by network perturbation, which could define subtler enzymatic pathways leading to disease, or enable drug discovery of novel chemical or biological mediators (including combinations of chemical and/or biological mediators) for treating disease. Additionally, technologies described herein could be applied to the discovery of combinations of existing drug targets for disease treatment and/or prevention, and could lead to novel combination treatments using FDA-approved therapeutics.

[0214] The present invention advantageously allows for assaying changes in phenotypes caused by combinatorial targeting of genetic elements. In certain embodiments, the CRISPR single guide sequence combinations associated with a phenotype may be identified by sequencing the CRISPR single guide sequences or associated barcodes. Several non-limiting examples of phenotypes of interest that may be screened or selected for according to aspects of the invention include, in mammalian cells: gene expression, cell proliferation, synthetic lethality, reduction of disease state, production of disease state, complex multifactorial diseases, aging and age-related diseases, neurodegeneration, drug resistance or sensitivity, chemotherapy resistance, pathway modulation (e.g., stress response, apoptosis, immune cell dysfunction or activation), resistance to infection, stem cell differentiation, cell type transdifferentiation and potentiation of FDA-approved drugs.

[0215] In certain embodiments, methods are provided for identifying combinations of genetic elements that when inhibited or activated reduce or prevent proliferation of a cell or population of cells. In certain embodiments, cell proliferation may be assayed by culturing cells comprising a vector of the present invention for at least two periods of time and identifying combinations of sgRNAs. The methods may involve contacting two populations of cells with a combinatorial library of the present invention. The two populations of cells may be cultured for different durations of time. For example, one population of cells may be cultured for 3-15 days and the other population of cells is cultured for 20-30 days. The identification of the combinations of CRISPR guide sequences are determined for each population of cells, e.g. by sequencing methods. The abundance of each combination of CRISPR single guide sequences in the population of cells that was cultured for a longer duration of time is compared to the abundance of each combination of CRISPR guide sequences in the population of cells that was cultured for the shorter duration of time. Not being bound by a theory, combinations of CRISPR guide sequences that reduced proliferation of the cells will be less abundant in the population of cells that was cultured for the longer duration of time compared to the abundance of the CRISPR guide sequence in the population of cells that was cultured for the shorter duration of time. Such combinations are identified as combinations that reduce cell proliferation.

[0216] The application similarly provides methods of screening for genomic sites associated with resistance to a chemical compound whereby the cells are contacted with the chemical compound and screened based on the phenotypic reaction to said compound. More particularly such methods may comprise introducing the library of CRISPR/Cas system guide RNAs envisaged herein into a population of cells (that are either adapted to contain a Cas protein or whereby the Cas protein is simultaneously introduced), treating the population of cells with the chemical compound; and determining the representation of guide RNAs after treatment with the chemical compound at a later time point as compared to an early time point. In these methods, the genomic sites associated with resistance to the chemical compound are determined by enrichment of guide RNAs.

[0217] Aspects of the invention relate to modulation of gene expression in response to combinatorial CRISPR targeting and modulation can be assayed by determining any parameter that is indirectly or directly affected by the expression of a target gene. Such parameters include, e.g., changes in RNA or protein levels, changes in protein activity, changes in product levels, changes in downstream gene expression, changes in reporter gene transcription (luciferase, CAT, beta-galactosidase, beta-glucuronidase, GFP or any fluorescent protein (see, e.g., Mistili & Spector, Nature Biotechnology 15:961-964 (1997)); changes in signal transduction, phosphorylation and dephosphorylation, receptor-ligand interactions, second messenger concentrations (e.g., cGMP, cAMP, IP3, and Ca²⁺), cell growth, and neovascularization, etc., as described herein. These assays can be in vitro, in vivo, and ex vivo. Such functional effects can be measured by any means known to those skilled in the art, e.g., measurement of RNA or protein levels, measurement of RNA stability, identification of downstream or reporter gene expression, e.g., via chemiluminescence, fluorescence, calorimetric reactions, antibody binding, inducible markers, ligand binding assays; changes in intracellular second messengers such as cGMP and inositol triphosphate (IP3); changes in intracellular calcium levels; cytokine release, and the like, as described herein.

[0218] Aspects of the invention comprehend many types of screens and selection mechanisms that can also be used with CRISPR screening. Screens for resistance to viral or bacterial pathogens may be used to identify genes that prevent infection or pathogen replication. As in drug resistance screens, survival after pathogen exposure provides strong selection. In cancer, negative selection CRISPR screens may identify “oncogene addictions” in specific cancer subtypes that can provide the foundation for molecular targeted therapies. For developmental studies, screening in human and mouse pluripotent cells may pinpoint genes required for pluripotency or for differentiation into distinct cell types. To distinguish cell types, fluorescent or cell surface marker reporters of gene expression may be used and cells may be sorted into groups based on expression level. Gene-based reporters of physiological states, such as activity-dependent transcription during repetitive neural firing or from antigen-based immune cell activation, may also be used. Any phenotype that is compatible with rapid sorting or separation may be harnessed for pooled screening. CRISPR screening may also be used as a diagnostic tool: With patient-derived iPS cells, genome-wide libraries may be used to examine multi-gene interactions (similar to synthetic lethal screens) or how different loss-of-functions mutations accumulated through aging or disease can interact with particular drug treatments.

[0219] Examples of reporter genes include, but are not limited to, glutathione-S-transferase (GST), horseradish peroxidase (HRP), chloramphenicol acetyltransferase (CAT) beta-galactosidase, beta-glucuronidase, luciferase, green fluorescent protein (GFP), HcRed, DsRed, cyan fluorescent protein (CFP), yellow fluorescent protein (YFP), and autofluorescent proteins including blue fluorescent protein (BFP). In an aspect of the invention, a reporter gene which includes but is not limited to glutathione-S-transferase (GST), horseradish peroxidase (HRP), chloramphenicol acetyltransferase (CAT) beta-galactosidase, beta-glucuronidase, luciferase, green fluorescent protein (GFP), HcRed, DsRed, cyan fluorescent protein (CFP), yellow fluorescent protein (YFP), and autofluorescent proteins including blue fluorescent protein (BFP), may be introduced into a cell to encode a gene product which serves as a marker by which to measure the alteration or modification of expression of the gene product. In a further embodiment of the invention, the DNA molecule encoding the gene product may be introduced into the cell via a vector. In a preferred embodiment of the invention the gene product is luciferase. In a further embodiment of the invention the expression of the gene product is decreased.

### Screening for Phenotypes in Plants

[0220] With recent advances in crop genomics, the ability to use CRISPR-Cas systems to perform efficient and cost effective gene editing and manipulation will allow the rapid selection and comparison of single and multiplexed genetic manipulations to transform such genomes for improved production and enhanced traits. In this regard reference is made to US patents and publications: U.S. Pat. No. 6,603,061—Agrobacterium-Mediated Plant Transformation Method; U.S. Pat. No. 7,868,149—Plant Genome Sequences and Uses Thereof and US 2009/0100536—Transgenic Plants with Enhanced Agronomic Traits, all the contents and disclosure of each of which are herein incorporated by reference in their entirety. In the practice of the invention, the contents and disclosure of Morrell et al “Crop genomics: advances and applications” (Nat Rev Genet. 2011 Dec. 29; 13(2):85-96) are also herein incorporated by reference in their entirety. In some methods of the invention the vector is an Agrobacterium Ti or Ri plasmid for use in plants. In exemplary embodiments, the DNA constructs according to the present invention may be used in a vector configured for use in plants and plant cells. In certain embodiments, a library of the present invention is transformed into protoplasts. Plants may be regenerated from the protoplasts and plants having desired characteristics may be selected. The sgRNA combinations may then be identified. Not being bound by a theory, the present invention may allow for pairwise combinations of perturbations to be screened in plants in an unbiased manner.

[0221] In plants, pathogens are often host-specific. For example, Fusarium oxysporum f. sp. lycopersici causes tomato wilt but attacks only tomato, and F. oxysporum f. dianthii Puccinia graminis f sp. tritici attacks only wheat. Plants have existing and induced defenses to resist most pathogens. Mutations and recombination events across plant generations lead to genetic variability that gives rise to susceptibility or reduced susceptibility or resistance, especially as pathogens reproduce with more frequency than plants. In plants, there can be non-host resistance, e.g., the host and pathogen are incompatible. There can also be Horizontal Resistance, e.g., partial resistance against all races of a pathogen, typically controlled by many genes and Vertical Resistance, e.g., complete resistance to some races of a pathogen but not to other races, typically controlled by a few genes. In a Gene-for-Gene level, plants and pathogens evolve together, and the genetic changes in one balance changes in other. Accordingly, using Natural Variability, breeders combine most useful genes for Yield, Quality, Uniformity, Hardiness, Resistance. The sources of resistance genes include native or foreign Varieties, Heirloom Varieties, Wild Plant Relatives, and Induced Mutations, e.g., treating plant material with mutagenic agents. Using the present invention, plant breeders are provided with a new tool to assay combinatorial mutations.

### Diseases

[0222] Epigenetic and chromatin regulation is important for the pathogenicity of various diseases, and may play a crucial role in disease prevention and treatment (e.g., hypertension, coronary heart disease, type II diabetes, osteoporosis, tumors, HIV infection, autoimmune disease, inflammatory diseases and metabolic diseases) (see, e.g., Esteller, Epigenetic drugs: More than meets the eye. Epigenetics. 2017; 12(5): 307; Banerjee, et al., (2012). “BET bromodomain inhibition as a novel strategy for reactivation of HIV-1”. Journal of Leukocyte Biology. 92 (6): 1147-1154; Anand, et al., (2013). “BET Bromodomains Mediate Transcriptional Pause Release in Heart Failure”. Cell. 154 (3): 569; and Mumby et al., Bromodomain and extra-terminal protein mimic JQ1 decreases inflammation in human vascular endothelial cells: Implications for pulmonary arterial hypertension. Respirology. 2017 January; 22(1): 157-164). In certain embodiments, agents targeting combinations of chromatin regulators are used to treat such diseases in a subject in need thereof (e.g., BRD4 and WDR77). The methods involve administering to a subject a combination of two or more inhibitors of epigenetic genes in an effective amount.

[0223] The terms “subject,” “individual,” and “patient” are used interchangeably herein to refer to a vertebrate, preferably a mammal, more preferably a human. Mammals include, but are not limited to, murines, simians, humans, farm animals, sport animals, and pets. Tissues, cells and their progeny of a biological entity obtained in vivo or cultured in vitro are also encompassed.

[0224] In certain embodiments, the invention relates to methods and compositions for treating cancer in a subject. Cancer is a disease characterized by uncontrolled or aberrantly controlled cell proliferation and other malignant cellular properties. As used herein, the term “cancer” refers to any type of cancer known in the art, including without limitation, liquid tumors such as leukemia (e.g., acute myeloid leukemia (AML), acute leukemia, acute lymphocytic leukemia, acute myelocytic leukemia, acute myeloblastic leukemia, acute promyelocytic leukemia, acute myelomonocytic leukemia, acute monocytic leukemia, acute erythroleukemia, chronic leukemia, chronic myelocytic leukemia, chronic lymphocytic leukemia), polycythemia vera, lymphoma (e.g., Hodgkin's disease, non-Hodgkin's disease), Waldenstrom's macroglobulinemia, heavy chain disease, or multiple myeloma.

[0225] The cancer may include, without limitation, solid tumors such as sarcomas and carcinomas. Examples of solid tumors include, but are not limited to fibrosarcoma, myxosarcoma, liposarcoma, chondrosarcoma, osteogenic sarcoma, chordoma, angiosarcoma, endotheliosarcoma, lymphangiosarcoma, lymphangioendotheliosarcoma, synovioma, mesothelioma, Ewing's tumor, leiomyosarcoma, rhabdomyosarcoma, squamous cell carcinoma, basal cell carcinoma, adenocarcinoma, sweat gland carcinoma, sebaceous gland carcinoma, papillary carcinoma, papillary adenocarcinomas, cystadenocarcinoma, medullary carcinoma, epithelial carcinoma, bronchogenic carcinoma, hepatoma, colorectal cancer (e.g., colon cancer, rectal cancer), anal cancer, pancreatic cancer (e.g., pancreatic adenocarcinoma, islet cell carcinoma, neuroendocrine tumors), breast cancer (e.g., ductal carcinoma, lobular carcinoma, inflammatory breast cancer, clear cell carcinoma, mucinous carcinoma), ovarian carcinoma (e.g., ovarian epithelial carcinoma or surface epithelial-stromal tumour including serous tumour, endometrioid tumor and mucinous cystadenocarcinoma, sex-cord-stromal tumor), prostate cancer, liver and bile duct carcinoma (e.g., hepatocelluar carcinoma, cholangiocarcinoma, hemangioma), choriocarcinoma, seminoma, embryonal carcinoma, kidney cancer (e.g., renal cell carcinoma, clear cell carcinoma, Wilm's tumor, nephroblastoma), cervical cancer, uterine cancer (e.g., endometrial adenocarcinoma, uterine papillary serous carcinoma, uterine clear-cell carcinoma, uterine sarcomas and leiomyosarcomas, mixed mullerian tumors), testicular cancer, germ cell tumor, lung cancer (e.g., lung adenocarcinoma, squamous cell carcinoma, large cell carcinoma, bronchioloalveolar carcinoma, non-small-cell carcinoma, small cell carcinoma, mesothelioma), bladder carcinoma, signet ring cell carcinoma, cancer of the head and neck (e.g., squamous cell carcinomas), esophageal carcinoma (e.g., esophageal adenocarcinoma), tumors of the brain (e.g., glioma, glioblastoma, medullablastoma, astrocytoma, medulloblastoma, craniopharyngioma, ependymoma, pinealoma, hemangioblastoma, acoustic neuroma, oligodenroglioma, schwannoma, meningioma), neuroblastoma, retinoblastoma, neuroendocrine tumor, melanoma, cancer of the stomach (e.g., stomach adenocarcinoma, gastrointestinal stromal tumor), or carcinoids. Lymphoproliferative disorders are also considered to be proliferative diseases. In preferred embodiments, the cancer is AML. Most AMLs do not have rearrangements. Certain AMLs have rearrangements in the TEL gene. Certain AMLs have rearrangements in the MLL gene (see, e.g., Ayton and Cleary, Molecular mechanisms of leukemogenesis mediated by MLL fusion proteins, Oncogene. 2001 Sep. 10; 20(40):5695-707). The present invention can be used to target combinations of genes to treat these AMLs.

[0226] The cancer cell may be a cancer cell in vivo (i.e., in an organism), ex vivo (i.e., removed from an organism and maintained in vitro), or in vitro.

[0227] In certain embodiments, the subject is a subject having, suspected of having, or at risk of developing cancer. In certain embodiments, the subject is a mammalian subject, including but not limited to a dog, cat, horse, cow, pig, sheep, goat, chicken, rodent, or primate. In certain embodiments, the subject is a human subject, such as a patient. The human subject may be a pediatric or adult subject. Whether a subject is deemed “at risk” of having a cancer may be determined by a skilled practitioner.

[0228] In certain embodiments, the cancer treated has a mutation in the MAPK pathway. As used herein the “MAPK pathway” may be used interchangeably with “MAPK/ERK pathway” and “Ras-Raf-MEK-ERK pathway.” The MAPK/ERK pathway is a chain of proteins in the cell that communicates a signal from a receptor on the surface of the cell to the DNA in the nucleus of the cell (see, e.g., Orton R J, et al., (2005). “Computational modelling of the receptor-tyrosine-kinase-activated MAPK pathway” The Biochemical Journal. 392 (Pt 2): 249-61). The signal starts when a signaling molecule binds to the receptor on the cell surface and ends when the DNA in the nucleus expresses a protein and produces some change in the cell, such as cell division. The pathway includes many proteins, including MAPK (mitogen-activated protein kinases, originally called ERK, extracellular signal-regulated kinases), which communicate by adding phosphate groups to a neighboring protein, which acts as an “on” or “off” switch. When one of the proteins in the pathway is mutated, it can become stuck in the “on” or “off” position, which is a necessary step in the development of many cancers. In preferred embodiments, the cancer has a mutation in BRAF, KRAS or NRAS. In specific embodiments, the mutations are BRAF V600E, KRAS G12S or NRAS Q61L. BRAF mutations are most common in melanoma. Currently, it is estimated that eight percent of all cancers have mutations in the BRAF gene, and they are present in a wide range of malignant tumors including ˜50% of melanomas, ˜40% of papillary thyroid cancer (PTC), ˜30% of serous ovarian cancer, ˜10% of colorectal cancers (CRC), and ˜2%-3% of lung cancers (Obaid et al., Strategies for Overcoming Resistance in Tumours Harboring BRAF Mutations. Int J Mol Sci. 2017 Mar. 8; 18(3)). Somatic KRAS mutations are found at high rates in leukemias, colorectal cancer, pancreatic cancer and lung cancer (Chiosea S I, et al., (2011) Modern Pathology. 24 (12): 1571-7; Hartman D J, et al., (2012) International Journal of Cancer. 131 (8): 1810-7; and Krasinskas A M, et al., (2013) Modern Pathology. 26 (10): 1346-54). NRAS mutations arise in 15-20% of all melanomas (Johnson and Puzanov, (2015) Curr Treat Options Oncol. 16(4):15) and also occur in colorectal cancer (De Roock W, et al. Lancet Oncol 2010; 11: 753-762).

[0229] In certain embodiments, the cancer has a mutation in PIK3CA. As used herein PIK3CA may refer to the gene or protein according accession number NM_006218.3 and may also include associated fragments and splicing variants, proteins with conservative substitutions and proteins having at least 90% sequence identity. Mutations in PIK3CA occur in colorectal cancer, cervical cancers and breast cancers (De Roock W, et al. Lancet Oncol 2010; 11: 753-762; Samuels, et al., (2010) in Human Cancers. Current Topics in Microbiology and Immunology. Springer Berlin Heidelberg. pp. 21-41; Ma Y Y, et al., (2000) Oncogene. 19 (23): 2739-44; and Zardavas, et al., (2014) Breast Cancer Research. 16 (1)).

[0230] Diseases that may be treated by the foregoing include, without limitation, infection, inflammation, immune-related disorders or aberrant immune responses.

[0231] Diseases with an abberant or pathologic immune response include, for example, Acquired Immunodeficiency Syndrome (AIDS, which is a viral disease with an autoimmune component), Crohn's disease, systemic lupus erythematosus, ulcerative colitis, multiple sclerosis (MS), inflammatory bowel disease and chronic and acute inflammatory disorders. Examples of inflammatory disorders include asthma, atopic allergy, allergy, eczema, glomerulonephritis, graft vs. host disease. In certain embodiments, latent HIV is reactivated by a combination therapy. Reactivation of latent HIV can also be screened to identify additional combination of targets using the screening platform.

[0232] In certain embodiments, the pathological condition may be an infection, inflammation, proliferative disease, autoimmune disease, or allergy.

[0233] The term “infection” as used herein refers to presence of an infective agent, such as a pathogen, e.g., a microorganism, in or on a subject, which, if its presence or growth were inhibited, would result in a benefit to the subject. Hence, the term refers to the state produced by the establishment, more particularly invasion and multiplication, of an infective agent, such as a pathogen, e.g., a microorganism, in or on a suitable host. An infection may produce tissue injury and progress to overt disease through a variety of cellular and toxic mechanisms.

[0234] The term “inflammation” generally refers to a response in vasculated tissues to cellular or tissue injury usually caused by physical, chemical and/or biological agents, that is marked in the acute form by the classical sequences of pain, heat, redness, swelling, and loss of function, and serves as a mechanism initiating the elimination, dilution or walling-off of noxious agents and/or of damaged tissue. Inflammation histologically involves a complex series of events, including dilation of the arterioles, capillaries, and venules with increased permeability and blood flow, exudation of fluids including plasma proteins, and leukocyte migration into the inflammatory focus.

[0235] Further, the term encompasses inflammation caused by extraneous physical or chemical injury or by biological agents, e.g., viruses, bacteria, fungi, protozoan or metazoan parasite infections, as well as inflammation which is seemingly unprovoked, e.g., which occurs in the absence of demonstrable injury or infection, inflammation responses to self-antigens (auto-immune inflammation), inflammation responses to engrafted xenogeneic or allogeneic cells, tissues or organs, inflammation responses to allergens, etc. The term covers both acute inflammation and chronic inflammation. Also, the term includes both local or localised inflammation, as well as systemic inflammation, i.e., where one or more inflammatory processes are not confined to a particular tissue but occur generally in the endothelium and/or other organ systems.

[0236] Systemic inflammatory conditions may particularly encompass systemic inflammatory response syndrome (SIRS) or sepsis. “SIRS” is a systemic inflammatory response syndrome with no signs of infection. It can be characterised by the presence of at least two of the four following clinical criteria: fever or hypothermia (temperature of 38.0° C.) or more, or temperature of 36.0° C. or less); tachycardia (at least 90 beats per minute); tachypnea (at least 20 breaths per minute or PaCO₂ less than 4.3 kPa (32.0 mm Hg) or the need for mechanical ventilation); and an altered white blood cell (WBC) count of 12×10⁶ cells/mL or more, or an altered WBC count of 4×10⁶ cells/mL or less, or the presence of more than 10% band forms. “Sepsis” can generally be defined as SIRS with a documented infection, such as for example a bacterial infection. Infection can be diagnosed by standard textbook criteria or, in case of uncertainty, by an infectious disease specialist. Bacteraemia is defined as sepsis where bacteria can be cultured from blood. Sepsis may be characterised or staged as mild sepsis, severe sepsis (sepsis with acute organ dysfunction), septic shock (sepsis with refractory arterial hypotension), organ failure, multiple organ dysfunction syndrome and death.

[0237] As used throughout the present specification, the terms “autoimmune disease” or “autoimmune disorder” used interchangeably refer to a diseases or disorders caused by an immune response against a self-tissue or tissue component (self-antigen) and include a self-antibody response and/or cell-mediated response. The terms encompass organ-specific autoimmune diseases, in which an autoimmune response is directed against a single tissue, as well as non-organ specific autoimmune diseases, in which an autoimmune response is directed against a component present in two or more, several or many organs throughout the body.

[0238] Non-limiting examples of autoimmune diseases include but are not limited to acute disseminated encephalomyelitis (ADEM); Addison's disease; ankylosing spondylitis; antiphospholipid antibody syndrome (APS); aplastic anemia; autoimmune gastritis; autoimmune hepatitis; autoimmune thrombocytopenia; Behçet's disease; coeliac disease; dermatomyositis; diabetes mellitus type I; Goodpasture's syndrome; Graves' disease; Guillain-Barré syndrome (GBS); Hashimoto's disease; idiopathic thrombocytopenic purpura; inflammatory bowel disease (IBD) including Crohn's disease and ulcerative colitis; mixed connective tissue disease; multiple sclerosis (MS); myasthenia gravis; opsoclonus myoclonus syndrome (OMS); optic neuritis; Ord's thyroiditis; pemphigus; pernicious anaemia; polyarteritis nodosa; polymyositis; primary biliary cirrhosis; primary myoxedema; psoriasis; rheumatic fever; rheumatoid arthritis; Reiter's syndrome; scleroderma; Sjögren's syndrome; systemic lupus erythematosus; Takayasu's arteritis; temporal arteritis; vitiligo; warm autoimmune hemolytic anemia; or Wegener's granulomatosis.

### Therapeutic Agents

[0239] In certain embodiments, the present invention provides for one or more therapeutic agents against combinations of targets identified. Targeting the identified combinations may provide for enhanced or otherwise previously unknown activity in the treatment of disease. In certain embodiments, an agent against one of the targets in a combination may already be known or used clinically. In certain embodiments, targeting the combination may require less of the agent as compared to the current standard of care and provide for less toxicity and improved treatment. In certain embodiments, the agents are used to modulate cell types. For example, the agents may be used to modulate cells for adoptive cell transfer (e.g., BRD4 inhibitors in combination with another agent, such as WDR77). In certain embodiments, the one or more agents comprises a small molecule inhibitor, small molecule degrader (e.g., PROTAC), genetic modifying agent, antibody, antibody fragment, antibody-like protein scaffold, aptamer, protein, or any combination thereof.

[0240] The terms “therapeutic agent”, “therapeutic capable agent” or “treatment agent” are used interchangeably and refer to a molecule or compound that confers some beneficial effect upon administration to a subject. The beneficial effect includes enablement of diagnostic determinations; amelioration of a disease, symptom, disorder, or pathological condition; reducing or preventing the onset of a disease, symptom, disorder or condition; and generally counteracting a disease, symptom, disorder or pathological condition.

[0241] As used herein, “treatment” or “treating,” or “palliating” or “ameliorating” are used interchangeably. These terms refer to an approach for obtaining beneficial or desired results including but not limited to a therapeutic benefit and/or a prophylactic benefit. By therapeutic benefit is meant any therapeutically relevant improvement in or effect on one or more diseases, conditions, or symptoms under treatment. For prophylactic benefit, the compositions may be administered to a subject at risk of developing a particular disease, condition, or symptom, or to a subject reporting one or more of the physiological symptoms of a disease, even though the disease, condition, or symptom may not have yet been manifested. As used herein “treating” includes ameliorating, curing, preventing it from becoming worse, slowing the rate of progression, or preventing the disorder from re-occurring (i.e., to prevent a relapse).

[0242] The term “effective amount” or “therapeutically effective amount” refers to the amount of an agent that is sufficient to effect beneficial or desired results. The therapeutically effective amount may vary depending upon one or more of: the subject and disease condition being treated, the weight and age of the subject, the severity of the disease condition, the manner of administration and the like, which can readily be determined by one of ordinary skill in the art. The term also applies to a dose that will provide an image for detection by any one of the imaging methods described herein. The specific dose may vary depending on one or more of: the particular agent chosen, the dosing regimen to be followed, whether it is administered in combination with other compounds, timing of administration, the tissue to be imaged, and the physical delivery system in which it is carried.

[0243] For example, in methods for treating cancer in a subject, an effective amount of a combination of inhibitors targeting epigenetic genes is any amount that provides an anticancer effect, such as reduces or prevents proliferation of a cancer cell or is cytotoxic towards a cancer cell. In certain embodiments, the effective amount of an inhibitor targeting an epigenetic gene is reduced when an inhibitor is administered concomitantly or in combination with one or more additional inhibitors targeting epigenetic genes as compared to the effective amount of the inhibitor when administered in the absence of one or more additional inhibitors targeting epigenetic genes. In certain embodiments, the inhibitor targeting an epigenetic gene does not reduce or prevent proliferation of a cancer cell when administered in the absence of one or more additional inhibitors targeting epigenetic genes.

### Small Molecules

[0244] In certain embodiments, the one or more agents is a small molecule. The term “small molecule” refers to compounds, preferably organic compounds, with a size comparable to those organic molecules generally used in pharmaceuticals. The term excludes biological macromolecules (e.g., proteins, peptides, nucleic acids, etc.). Preferred small organic molecules range in size up to about 5000 Da, e.g., up to about 4000, preferably up to 3000 Da, more preferably up to 2000 Da, even more preferably up to about 1000 Da, e.g., up to about 900, 800, 700, 600 or up to about 500 Da. In certain embodiments, the small molecule may act as an antagonist or agonist (e.g., blocking an enzyme active site or activating a receptor by binding to a ligand binding site).

[0245] One type of small molecule applicable to the present invention is a degrader molecule. Proteolysis Targeting Chimera (PROTAC) technology is a rapidly emerging alternative therapeutic strategy with the potential to address many of the challenges currently faced in modern drug development programs. PROTAC technology employs small molecules that recruit target proteins for ubiquitination and removal by the proteasome (see, e.g., Bondeson and Crews, Targeted Protein Degradation by Small Molecules, Annu Rev Pharmacol Toxicol. 2017 Jan. 6; 57: 107-123; and Lai et al., Modular PROTAC Design for the Degradation of Oncogenic BCR-ABL Angew Chem Int Ed Engl. 2016 Jan. 11; 55(2): 807-810). Specific small molecule degraders targeting bromodomain and extra-terminal (BET) family proteins, consisting of BRD2, BRD3, BRD4, and testis-specific BRDT members (e.g., BETd-260/ZBC260) are specifically applicable for targeting the identified synthetic lethal combinations comprising BRD4 (see, e.g., Zhou et al., Discovery of a Small-Molecule Degrader of Bromodomain and Extra-Terminal (BET) Proteins with Picomolar Cellular Potencies and Capable of Achieving Tumor Regression. J. Med. Chem. 2018, 61, 462-481).

[0246] As described herein, small molecules targeting epigenetic proteins are currently being developed and/or used in the clinic to treat disease (see, e.g., Qi et al., HEDD: the human epigenetic drug database. Database, 2016, 1-10; and Ackloo et al., Chemical probes targeting epigenetic proteins: Applications beyond oncology. Epigenetics 2017, VOL. 12, NO. 5, 378-400). In certain embodiments, the one or more agents comprise a histone acetylation inhibitor, histone deacetylase (HDAC) inhibitor, histone lysine methylation inhibitor, histone lysine demethylation inhibitor, DNA methyltransferase (DNMT) inhibitor, inhibitor of acetylated histone binding proteins, inhibitor of methylated histone binding proteins, sirtuin inhibitor, protein arginine methyltransferase inhibitor or kinase inhibitor. In certain embodiments, any small molecule exhibiting the functional activity described above may be used in the present invention. In certain embodiments, the DNA methyltransferase (DNMT) inhibitor is selected from the group consisting of azacitidine (5-azacytidine), decitabine (5-aza-2′-deoxycytidine), EGCG (epigallocatechin-3-gallate), zebularine, hydralazine, and procainamide. In certain embodiments, the histone acetylation inhibitor is C646. In certain embodiments, the histone deacetylase (HDAC) inhibitor is selected from the group consisting of vorinostat, givinostat, panobinostat, belinostat, entinostat, CG-1521, romidepsin, ITF-A, ITF-B, valproic acid, OSU-HDAC-44, HC-toxin, magnesium valproate, plitidepsin, tasquinimod, sodium butyrate, mocetinostat, carbamazepine, SB939, CHR-2845, CHR-3996, JNJ-26481585, sodium phenylbutyrate, pivanex, abexinostat, resminostat, dacinostat, droxinostat, and trichostatin A (TSA). In certain embodiments, the histone lysine demethylation inhibitor is selected from the group consisting of pargyline, clorgyline, bizine, GSK2879552, GSK-J4, KDM5-C70, JIB-04, and tranylcypromine. In certain embodiments, the histone lysine methylation inhibitor is selected from the group consisting of EPZ-6438, GSK126, CPI-360, CPI-1205, CPI-0209, DZNep, GSK343, EI1, BIX-01294, UNC0638, EPZ004777, GSK343, UNC1999 and UNC0224. In certain embodiments, the inhibitor of acetylated histone binding proteins is selected from the group consisting of AZD5153 (see e.g., Rhyasen et al., AZD5153: A Novel Bivalent BET Bromodomain Inhibitor Highly Active against Hematologic Malignancies, Mol Cancer Ther. 2016 November; 15(11):2563-2574. Epub 2016 Aug. 29), PFI-1, CPI-203, CPI-0610, RVX-208, OTX015, I-BET151, I-BET762, I-BET-726, dBET1, ARV-771, ARV-825, BETd-260/ZBC260 and MZ1. In certain embodiments, the inhibitor of methylated histone binding proteins is selected from the group consisting of UNC669 and UNC1215. In certain embodiments, the sirtuin inhibitor comprises nicotinamide.

### Genetic Modifying Agents

[0247] In certain embodiments, the one or more modulating agents may be a genetic modifying agent. The genetic modifying agent may comprise a CRISPR system, a zinc finger nuclease system, a TALEN, a meganuclease or RNAi system. In certain embodiments, the orthogonal CRISPR enzymes may be any CRISPR enzyme described herein. The following description of CRISPR can be applied for therapeutic purposes as well as in the screening methods described herein.

[0248] In general, a CRISPR-Cas or CRISPR system as used in herein and in documents, such as WO 2014/093622 (PCT/US2013/074667), refers collectively to transcripts and other elements involved in the expression of or directing the activity of CRISPR-associated (“Cas”) genes, including sequences encoding a Cas gene, a tracr (trans-activating CRISPR) sequence (e.g. tracrRNA or an active partial tracrRNA), a tracr-mate sequence (encompassing a “direct repeat” and a tracrRNA-processed partial direct repeat in the context of an endogenous CRISPR system), a guide sequence (also referred to as a “spacer” in the context of an endogenous CRISPR system), or “RNA(s)” as that term is herein used (e.g., RNA(s) to guide Cas, such as Cas9, e.g. CRISPR RNA and transactivating (tracr) RNA or a single guide RNA (sgRNA) (chimeric RNA)) or other sequences and transcripts from a CRISPR locus. In general, a CRISPR system is characterized by elements that promote the formation of a CRISPR complex at the site of a target sequence (also referred to as a protospacer in the context of an endogenous CRISPR system). See, e.g, Shmakov et al. (2015) “Discovery and Functional Characterization of Diverse Class 2 CRISPR-Cas Systems”, Molecular Cell, DOI: dx. doi. org/10.1016/j.molcel.2015.10.008.

[0249] In certain embodiments, a protospacer adjacent motif (PAM) or PAM-like motif directs binding of the effector protein complex as disclosed herein to the target locus of interest. In some embodiments, the PAM may be a 5′ PAM (i.e., located upstream of the 5′ end of the protospacer). In other embodiments, the PAM may be a 3′ PAM (i.e., located downstream of the 5′ end of the protospacer). The term “PAM” may be used interchangeably with the term “PFS” or “protospacer flanking site” or “protospacer flanking sequence”.

[0250] In a preferred embodiment, the CRISPR effector protein may recognize a 3′ PAM. In certain embodiments, the CRISPR effector protein may recognize a 3′ PAM which is 5′H, wherein H is A, C or U.

[0251] In the context of formation of a CRISPR complex, “target sequence” refers to a sequence to which a guide sequence is designed to have complementarity, where hybridization between a target sequence and a guide sequence promotes the formation of a CRISPR complex. A target sequence may comprise RNA polynucleotides. The term “target RNA” refers to a RNA polynucleotide being or comprising the target sequence. In other words, the target RNA may be a RNA polynucleotide or a part of a RNA polynucleotide to which a part of the gRNA, i.e. the guide sequence, is designed to have complementarity and to which the effector function mediated by the complex comprising CRISPR effector protein and a gRNA is to be directed. In some embodiments, a target sequence is located in the nucleus or cytoplasm of a cell.

[0252] In certain example embodiments, the CRISPR effector protein may be delivered using a nucleic acid molecule encoding the CRISPR effector protein. The nucleic acid molecule encoding a CRISPR effector protein, may advantageously be a codon optimized CRISPR effector protein. An example of a codon optimized sequence, is in this instance a sequence optimized for expression in eukaryote, e.g., humans (i.e. being optimized for expression in humans), or for another eukaryote, animal or mammal as herein discussed; see, e.g., SaCas9 human codon optimized sequence in WO 2014/093622 (PCT/US2013/074667). Whilst this is preferred, it will be appreciated that other examples are possible and codon optimization for a host species other than human, or for codon optimization for specific organs is known. In some embodiments, an enzyme coding sequence encoding a CRISPR effector protein is a codon optimized for expression in particular cells, such as eukaryotic cells. The eukaryotic cells may be those of or derived from a particular organism, such as a plant or a mammal, including but not limited to human, or non-human eukaryote or animal or mammal as herein discussed, e.g., mouse, rat, rabbit, dog, livestock, or non-human mammal or primate. In some embodiments, processes for modifying the germ line genetic identity of human beings and/or processes for modifying the genetic identity of animals which are likely to cause them suffering without any substantial medical benefit to man or animal, and also animals resulting from such processes, may be excluded. In general, codon optimization refers to a process of modifying a nucleic acid sequence for enhanced expression in the host cells of interest by replacing at least one codon (e.g. about or more than about 1, 2, 3, 4, 5, 10, 15, 20, 25, 50, or more codons) of the native sequence with codons that are more frequently or most frequently used in the genes of that host cell while maintaining the native amino acid sequence. Various species exhibit particular bias for certain codons of a particular amino acid. Codon bias (differences in codon usage between organisms) often correlates with the efficiency of translation of messenger RNA (mRNA), which is in turn believed to be dependent on, among other things, the properties of the codons being translated and the availability of particular transfer RNA (tRNA) molecules. The predominance of selected tRNAs in a cell is generally a reflection of the codons used most frequently in peptide synthesis. Accordingly, genes can be tailored for optimal gene expression in a given organism based on codon optimization. Codon usage tables are readily available, for example, at the “Codon Usage Database” available at kazusa.orjp/codon/ and these tables can be adapted in a number of ways. See Nakamura, Y., et al. “Codon usage tabulated from the international DNA sequence databases: status for the year 2000” Nucl. Acids Res. 28:292 (2000). Computer algorithms for codon optimizing a particular sequence for expression in a particular host cell are also available, such as Gene Forge (Aptagen; Jacobus, Pa.), are also available. In some embodiments, one or more codons (e.g. 1, 2, 3, 4, 5, 10, 15, 20, 25, 50, or more, or all codons) in a sequence encoding a Cas correspond to the most frequently used codon for a particular amino acid.

[0253] In certain embodiments, the methods as described herein may comprise providing a Cas transgenic cell in which one or more nucleic acids encoding one or more guide RNAs are provided or introduced operably connected in the cell with a regulatory element comprising a promoter of one or more gene of interest. As used herein, the term “Cas transgenic cell” refers to a cell, such as a eukaryotic cell, in which a Cas gene has been genomically integrated. The nature, type, or origin of the cell are not particularly limiting according to the present invention. Also the way the Cas transgene is introduced in the cell may vary and can be any method as is known in the art. In certain embodiments, the Cas transgenic cell is obtained by introducing the Cas transgene in an isolated cell. In certain other embodiments, the Cas transgenic cell is obtained by isolating cells from a Cas transgenic organism. By means of example, and without limitation, the Cas transgenic cell as referred to herein may be derived from a Cas transgenic eukaryote, such as a Cas knock-in eukaryote. Reference is made to WO 2014/093622 (PCT/US13/74667), incorporated herein by reference. Methods of US Patent Publication Nos. 20120017290 and 20110265198 assigned to Sangamo BioSciences, Inc. directed to targeting the Rosa locus may be modified to utilize the CRISPR Cas system of the present invention. Methods of US Patent Publication No. 20130236946 assigned to Cellectis directed to targeting the Rosa locus may also be modified to utilize the CRISPR Cas system of the present invention. By means of further example reference is made to Platt et. al. (Cell; 159(2):440-455 (2014)), describing a Cas9 knock-in mouse, which is incorporated herein by reference. The Cas transgene can further comprise a Lox-Stop-polyA-Lox(LSL) cassette thereby rendering Cas expression inducible by Cre recombinase. Alternatively, the Cas transgenic cell may be obtained by introducing the Cas transgene in an isolated cell. Delivery systems for transgenes are well known in the art. By means of example, the Cas transgene may be delivered in for instance eukaryotic cell by means of vector (e.g., AAV, adenovirus, lentivirus) and/or particle and/or nanoparticle delivery, as also described herein elsewhere.

[0254] It will be understood by the skilled person that the cell, such as the Cas transgenic cell, as referred to herein may comprise further genomic alterations besides having an integrated Cas gene or the mutations arising from the sequence specific action of Cas when complexed with RNA capable of guiding Cas to a target locus.

[0255] In certain aspects the invention involves vectors, e.g. for delivering or introducing in a cell Cas and/or RNA capable of guiding Cas to a target locus (i.e. guide RNA), but also for propagating these components (e.g. in prokaryotic cells). A used herein, a “vector” is a tool that allows or facilitates the transfer of an entity from one environment to another. It is a replicon, such as a plasmid, phage, or cosmid, into which another DNA segment may be inserted so as to bring about the replication of the inserted segment. Generally, a vector is capable of replication when associated with the proper control elements. In general, the term “vector” refers to a nucleic acid molecule capable of transporting another nucleic acid to which it has been linked. Vectors include, but are not limited to, nucleic acid molecules that are single-stranded, double-stranded, or partially double-stranded; nucleic acid molecules that comprise one or more free ends, no free ends (e.g. circular); nucleic acid molecules that comprise DNA, RNA, or both; and other varieties of polynucleotides known in the art. One type of vector is a “plasmid,” which refers to a circular double stranded DNA loop into which additional DNA segments can be inserted, such as by standard molecular cloning techniques. Another type of vector is a viral vector, wherein virally-derived DNA or RNA sequences are present in the vector for packaging into a virus (e.g. retroviruses, replication defective retroviruses, adenoviruses, replication defective adenoviruses, and adeno-associated viruses (AAVs)). Viral vectors also include polynucleotides carried by a virus for transfection into a host cell. Certain vectors are capable of autonomous replication in a host cell into which they are introduced (e.g. bacterial vectors having a bacterial origin of replication and episomal mammalian vectors). Other vectors (e.g., non-episomal mammalian vectors) are integrated into the genome of a host cell upon introduction into the host cell, and thereby are replicated along with the host genome. Moreover, certain vectors are capable of directing the expression of genes to which they are operatively-linked. Such vectors are referred to herein as “expression vectors.” Common expression vectors of utility in recombinant DNA techniques are often in the form of plasmids.

[0256] Recombinant expression vectors can comprise a nucleic acid of the invention in a form suitable for expression of the nucleic acid in a host cell, which means that the recombinant expression vectors include one or more regulatory elements, which may be selected on the basis of the host cells to be used for expression, that is operatively-linked to the nucleic acid sequence to be expressed. Within a recombinant expression vector, “operably linked” is intended to mean that the nucleotide sequence of interest is linked to the regulatory element(s) in a manner that allows for expression of the nucleotide sequence (e.g. in an in vitro transcription/translation system or in a host cell when the vector is introduced into the host cell). With regards to recombination and cloning methods, mention is made of U.S. patent application Ser. No. 10/815,730, published Sep. 2, 2004 as US 2004-0171156 A1, the contents of which are herein incorporated by reference in their entirety. Thus, the embodiments disclosed herein may also comprise transgenic cells comprising the CRISPR effector system. In certain example embodiments, the transgenic cell may function as an individual discrete volume. In other words samples comprising a masking construct may be delivered to a cell, for example in a suitable delivery vesicle and if the target is present in the delivery vesicle the CRISPR effector is activated and a detectable signal generated.

[0257] The vector(s) can include the regulatory element(s), e.g., promoter(s). The vector(s) can comprise Cas encoding sequences, and/or a single, but possibly also can comprise at least 3 or 8 or 16 or 32 or 48 or 50 guide RNA(s) (e.g., sgRNAs) encoding sequences, such as 1-2, 1-3, 1-4 1-5, 3-6, 3-7, 3-8, 3-9, 3-10, 3-8, 3-16, 3-30, 3-32, 3-48, 3-50 RNA(s) (e.g., sgRNAs). In a single vector there can be a promoter for each RNA (e.g., sgRNA), advantageously when there are up to about 16 RNA(s); and, when a single vector provides for more than 16 RNA(s), one or more promoter(s) can drive expression of more than one of the RNA(s), e.g., when there are 32 RNA(s), each promoter can drive expression of two RNA(s), and when there are 48 RNA(s), each promoter can drive expression of three RNA(s). By simple arithmetic and well established cloning protocols and the teachings in this disclosure one skilled in the art can readily practice the invention as to the RNA(s) for a suitable exemplary vector such as AAV, and a suitable promoter such as the U6 promoter. For example, the packaging limit of AAV is ˜4.7 kb. The length of a single U6-gRNA (plus restriction sites for cloning) is 361 bp. Therefore, the skilled person can readily fit about 12-16, e.g., 13 U6-gRNA cassettes in a single vector. This can be assembled by any suitable means, such as a golden gate strategy used for TALE assembly (genome-engineering.org/taleffectors/). The skilled person can also use a tandem guide strategy to increase the number of U6-gRNAs by approximately 1.5 times, e.g., to increase from 12-16, e.g., 13 to approximately 18-24, e.g., about 19 U6-gRNAs. Therefore, one skilled in the art can readily reach approximately 18-24, e.g., about 19 promoter-RNAs, e.g., U6-gRNAs in a single vector, e.g., an AAV vector. A further means for increasing the number of promoters and RNAs in a vector is to use a single promoter (e.g., U6) to express an array of RNAs separated by cleavable sequences. And an even further means for increasing the number of promoter-RNAs in a vector, is to express an array of promoter-RNAs separated by cleavable sequences in the intron of a coding sequence or gene; and, in this instance it is advantageous to use a polymerase II promoter, which can have increased expression and enable the transcription of long RNA in a tissue specific manner. (see, e.g., nar.oxfordjournals.org/content/34/7/e53.short and nature.com/mt/journal/v16/n9/abs/mt2008144a.html). In an advantageous embodiment, AAV may package U6 tandem gRNA targeting up to about 50 genes. Accordingly, from the knowledge in the art and the teachings in this disclosure the skilled person can readily make and use vector(s), e.g., a single vector, expressing multiple RNAs or guides under the control or operatively or functionally linked to one or more promoters-especially as to the numbers of RNAs or guides discussed herein, without any undue experimentation.

[0258] The guide RNA(s) encoding sequences and/or Cas encoding sequences, can be functionally or operatively linked to regulatory element(s) and hence the regulatory element(s) drive expression. The promoter(s) can be constitutive promoter(s) and/or conditional promoter(s) and/or inducible promoter(s) and/or tissue specific promoter(s). The promoter can be selected from the group consisting of RNA polymerases, pol I, pol II, pol III, T7, U6, H1, retroviral Rous sarcoma virus (RSV) LTR promoter, the cytomegalovirus (CMV) promoter, the SV40 promoter, the dihydrofolate reductase promoter, the β-actin promoter, the phosphoglycerol kinase (PGK) promoter, and the EF1α promoter. An advantageous promoter is the promoter is U6.

[0259] Additional effectors for use according to the invention can be identified by their proximity to cas1 genes, for example, though not limited to, within the region 20 kb from the start of the cas1 gene and 20 kb from the end of the cas1 gene. In certain embodiments, the effector protein comprises at least one HEPN domain and at least 500 amino acids, and wherein the C2c2 effector protein is naturally present in a prokaryotic genome within 20 kb upstream or downstream of a Cas gene or a CRISPR array. Non-limiting examples of Cas proteins include Cas1, Cas1B, Cas2, Cas3, Cas4, Cas5, Cas6, Cas7, Cas8, Cas9 (also known as Csn1 and Csx12), Cas10, Csy1, Csy2, Csy3, Cse1, Cse2, Csc1, Csc2, Csa5, Csn2, Csm2, Csm3, Csm4, Csm5, Csm6, Cmr1, Cmr3, Cmr4, Cmr5, Cmr6, Csbl, Csb2, Csb3, Csx17, Csx14, Csx10, Csx16, CsaX, Csx3, Csx1, Csx15, Csf1, Csf2, Csf3, Csf4, homologues thereof, or modified versions thereof. In certain example embodiments, the C2c2 effector protein is naturally present in a prokaryotic genome within 20 kb upstream or downstream of a Cas 1 gene. The terms “orthologue” (also referred to as “ortholog” herein) and “homologue” (also referred to as “homolog” herein) are well known in the art. By means of further guidance, a “homologue” of a protein as used herein is a protein of the same species which performs the same or a similar function as the protein it is a homologue of. Homologous proteins may but need not be structurally related, or are only partially structurally related. An “orthologue” of a protein as used herein is a protein of a different species which performs the same or a similar function as the protein it is an orthologue of. Orthologous proteins may but need not be structurally related, or are only partially structurally related.

### Guide Molecules

[0260] The methods described herein may be used to screen inhibition of CRISPR systems employing different types of guide molecules. As used herein, the term “guide sequence” and “guide molecule” in the context of a CRISPR-Cas system, comprises any polynucleotide sequence having sufficient complementarity with a target nucleic acid sequence to hybridize with the target nucleic acid sequence and direct sequence-specific binding of a nucleic acid-targeting complex to the target nucleic acid sequence. The guide sequences made using the methods disclosed herein may be a full-length guide sequence, a truncated guide sequence, a full-length sgRNA sequence, a truncated sgRNA sequence, or an E+F sgRNA sequence. In some embodiments, the degree of complementarity of the guide sequence to a given target sequence, when optimally aligned using a suitable alignment algorithm, is about or more than about 50%, 60%, 75%, 80%, 85%, 90%, 95%, 97.5%, 99%, or more. In certain example embodiments, the guide molecule comprises a guide sequence that may be designed to have at least one mismatch with the target sequence, such that a RNA duplex formed between the guide sequence and the target sequence. Accordingly, the degree of complementarity is preferably less than 99%. For instance, where the guide sequence consists of 24 nucleotides, the degree of complementarity is more particularly about 96% or less. In particular embodiments, the guide sequence is designed to have a stretch of two or more adjacent mismatching nucleotides, such that the degree of complementarity over the entire guide sequence is further reduced. For instance, where the guide sequence consists of 24 nucleotides, the degree of complementarity is more particularly about 96% or less, more particularly, about 92% or less, more particularly about 88% or less, more particularly about 84% or less, more particularly about 80% or less, more particularly about 76% or less, more particularly about 72% or less, depending on whether the stretch of two or more mismatching nucleotides encompasses 2, 3, 4, 5, 6 or 7 nucleotides, etc. In some embodiments, aside from the stretch of one or more mismatching nucleotides, the degree of complementarity, when optimally aligned using a suitable alignment algorithm, is about or more than about 50%, 60%, 75%, 80%, 85%, 90%, 95%, 97.5%, 99%, or more. Optimal alignment may be determined with the use of any suitable algorithm for aligning sequences, non-limiting example of which include the Smith-Waterman algorithm, the Needleman-Wunsch algorithm, algorithms based on the Burrows-Wheeler Transform (e.g., the Burrows Wheeler Aligner), ClustalW, Clustal X, BLAT, Novoalign (Novocraft Technologies; available at www.novocraft.com), ELAND (Illumina, San Diego, Calif.), SOAP (available at soap.genomics.org.cn), and Maq (available at maq.sourceforge.net). The ability of a guide sequence (within a nucleic acid-targeting guide RNA) to direct sequence-specific binding of a nucleic acid-targeting complex to a target nucleic acid sequence may be assessed by any suitable assay. For example, the components of a nucleic acid-targeting CRISPR system sufficient to form a nucleic acid-targeting complex, including the guide sequence to be tested, may be provided to a host cell having the corresponding target nucleic acid sequence, such as by transfection with vectors encoding the components of the nucleic acid-targeting complex, followed by an assessment of preferential targeting (e.g., cleavage) within the target nucleic acid sequence, such as by Surveyor assay as described herein. Similarly, cleavage of a target nucleic acid sequence (or a sequence in the vicinity thereof) may be evaluated in a test tube by providing the target nucleic acid sequence, components of a nucleic acid-targeting complex, including the guide sequence to be tested and a control guide sequence different from the test guide sequence, and comparing binding or rate of cleavage at or in the vicinity of the target sequence between the test and control guide sequence reactions. Other assays are possible, and will occur to those skilled in the art. A guide sequence, and hence a nucleic acid-targeting guide RNA may be selected to target any target nucleic acid sequence.

[0261] In certain embodiments, the guide sequence or spacer length of the guide molecules is from 15 to 50 nt. In certain embodiments, the spacer length of the guide RNA is at least 15 nucleotides. In certain embodiments, the spacer length is from 15 to 17 nt, e.g., 15, 16, or 17 nt, from 17 to 20 nt, e.g., 17, 18, 19, or 20 nt, from 20 to 24 nt, e.g., 20, 21, 22, 23, or 24 nt, from 23 to 25 nt, e.g., 23, 24, or 25 nt, from 24 to 27 nt, e.g., 24, 25, 26, or 27 nt, from 27-30 nt, e.g., 27, 28, 29, or 30 nt, from 30-35 nt, e.g., 30, 31, 32, 33, 34, or 35 nt, or 35 nt or longer. In certain example embodiment, the guide sequence is 15, 16, 17,18, 19, 20, 21, 22, 23, 24, 25, 26, 27, 28, 29, 30, 31, 32, 33, 34, 35, 36, 37, 38, 39 40, 41, 42, 43, 44, 45, 46, 47 48, 49, 50, 51, 52, 53, 54, 55, 56, 57, 58, 59, 60, 61, 62, 63, 64, 65, 66, 67, 68, 69, 70, 71, 72, 73, 74, 75, 76, 77, 78, 79, 80, 81, 82, 83, 84, 85, 86, 87, 88, 89, 90, 91, 92, 93, 94, 95, 96, 97, 98, 99, or 100 nt.

[0262] In some embodiments, the guide sequence is an RNA sequence of between 10 to 50 nt in length, but more particularly of about 20-30 nt advantageously about 20 nt, 23-25 nt or 24 nt. The guide sequence is selected so as to ensure that it hybridizes to the target sequence. This is described more in detail below. Selection can encompass further steps which increase efficacy and specificity.

[0263] In some embodiments, the guide sequence has a canonical length (e.g., about 15-30 nt) is used to hybridize with the target RNA or DNA. In some embodiments, a guide molecule is longer than the canonical length (e.g., >30 nt) is used to hybridize with the target RNA or DNA, such that a region of the guide sequence hybridizes with a region of the RNA or DNA strand outside of the Cas-guide target complex. This can be of interest where additional modifications, such deamination of nucleotides is of interest. In alternative embodiments, it is of interest to maintain the limitation of the canonical guide sequence length.

[0264] In some embodiments, the sequence of the guide molecule (direct repeat and/or spacer) is selected to reduce the degree secondary structure within the guide molecule. In some embodiments, about or less than about 75%, 50%, 40%, 30%, 25%, 20%, 15%, 10%, 5%, 1%, or fewer of the nucleotides of the nucleic acid-targeting guide RNA participate in self-complementary base pairing when optimally folded. Optimal folding may be determined by any suitable polynucleotide folding algorithm. Some programs are based on calculating the minimal Gibbs free energy. An example of one such algorithm is mFold, as described by Zuker and Stiegler (Nucleic Acids Res. 9 (1981), 133-148). Another example folding algorithm is the online webserver RNAfold, developed at Institute for Theoretical Chemistry at the University of Vienna, using the centroid structure prediction algorithm (see e.g., A. R. Gruber et al., 2008, Cell 106(1): 23-24; and PA Carr and GM Church, 2009, Nature Biotechnology 27(12): 1151-62).

[0265] In some embodiments, it is of interest to reduce the susceptibility of the guide molecule to RNA cleavage, such as to cleavage by Cas13. Accordingly, in particular embodiments, the guide molecule is adjusted to avoide cleavage by Cas13 or other RNA-cleaving enzymes.

[0266] In certain embodiments, the guide molecule comprises non-naturally occurring nucleic acids and/or non-naturally occurring nucleotides and/or nucleotide analogs, and/or chemically modifications. Preferably, these non-naturally occurring nucleic acids and non-naturally occurring nucleotides are located outside the guide sequence. Non-naturally occurring nucleic acids can include, for example, mixtures of naturally and non-naturally occurring nucleotides. Non-naturally occurring nucleotides and/or nucleotide analogs may be modified at the ribose, phosphate, and/or base moiety. In an embodiment of the invention, a guide nucleic acid comprises ribonucleotides and non-ribonucleotides. In one such embodiment, a guide comprises one or more ribonucleotides and one or more deoxyribonucleotides. In an embodiment of the invention, the guide comprises one or more non-naturally occurring nucleotide or nucleotide analog such as a nucleotide with phosphorothioate linkage, a locked nucleic acid (LNA) nucleotides comprising a methylene bridge between the 2′ and 4′ carbons of the ribose ring, or bridged nucleic acids (BNA). Other examples of modified nucleotides include 2′-O-methyl analogs, 2′-deoxy analogs, or 2′-fluoro analogs. Further examples of modified bases include, but are not limited to, 2-aminopurine, 5-bromo-uridine, pseudouridine, inosine, 7-methylguanosine. Examples of guide RNA chemical modifications include, without limitation, incorporation of 2′-O-methyl (M), 2′-O-methyl 3′ phosphorothioate (MS), S-constrained ethyl(cEt), or 2′-O-methyl 3′ thioPACE (MSP) at one or more terminal nucleotides. Such chemically modified guides can comprise increased stability and increased activity as compared to unmodified guides, though on-target vs. off-target specificity is not predictable. (See, Hendel, 2015, Nat Biotechnol. 33(9):985-9, doi: 10.1038/nbt.3290, published online 29 Jun. 2015 Ragdarm et al., 0215, PNAS, E7110-E7111; Allerson et al., J. Med. Chem. 2005, 48:901-904; Bramsen et al., Front. Genet., 2012, 3:154; Deng et al., PNAS, 2015, 112:11870-11875; Sharma et al., MedChemComm., 2014, 5:1454-1471; Hendel et al., Nat. Biotechnol. (2015) 33(9): 985-989; Li et al., Nature Biomedical Engineering, 2017, 1, 0066 DOI:10.1038/s41551-017-0066). In some embodiments, the 5′ and/or 3′ end of a guide RNA is modified by a variety of functional moieties including fluorescent dyes, polyethylene glycol, cholesterol, proteins, or detection tags. (See Kelly et al., 2016, J. Biotech. 233:74-83). In certain embodiments, a guide comprises ribonucleotides in a region that binds to a target RNA and one or more deoxyribonucletides and/or nucleotide analogs in a region that binds to Cas13. In an embodiment of the invention, deoxyribonucleotides and/or nucleotide analogs are incorporated in engineered guide structures, such as, without limitation, stem-loop regions, and the seed region. For Cas13 guide, in certain embodiments, the modification is not in the 5′-handle of the stem-loop regions. Chemical modification in the 5′-handle of the stem-loop region of a guide may abolish its function (see Li, et al., Nature Biomedical Engineering, 2017, 1:0066). In certain embodiments, at least 1, 2, 3, 4, 5, 6, 7, 8, 9, 10, 11, 12, 13, 14, 15, 16, 17, 18, 19, 20, 21, 22, 23, 24, 25, 26, 27, 28, 29, 30, 35, 40, 45, 50, or 75 nucleotides of a guide is chemically modified. In some embodiments, 3-5 nucleotides at either the 3′ or the 5′ end of a guide is chemically modified. In some embodiments, only minor modifications are introduced in the seed region, such as 2′-F modifications. In some embodiments, 2′-F modification is introduced at the 3′ end of a guide. In certain embodiments, three to five nucleotides at the 5′ and/or the 3′ end of the guide are chemically modified with 2′-O-methyl (M), 2′-O-methyl 3′ phosphorothioate (MS), S-constrained ethyl(cEt), or 2′-O-methyl 3′ thioPACE (MSP). Such modification can enhance genome editing efficiency (see Hendel et al., Nat. Biotechnol. (2015) 33(9): 985-989). In certain embodiments, all of the phosphodiester bonds of a guide are substituted with phosphorothioates (PS) for enhancing levels of gene disruption. In certain embodiments, more than five nucleotides at the 5′ and/or the 3′ end of the guide are chemically modified with 2′-O-Me, 2′-F or S-constrained ethyl(cEt). Such chemically modified guide can mediate enhanced levels of gene disruption (see Ragdarm et al., 0215, PNAS, E7110-E7111). In an embodiment of the invention, a guide is modified to comprise a chemical moiety at its 3′ and/or 5′ end. Such moieties include, but are not limited to amine, azide, alkyne, thio, dibenzocyclooctyne (DBCO), or Rhodamine. In certain embodiment, the chemical moiety is conjugated to the guide by a linker, such as an alkyl chain. In certain embodiments, the chemical moiety of the modified guide can be used to attach the guide to another molecule, such as DNA, RNA, protein, or nanoparticles. Such chemically modified guide can be used to identify or enrich cells generically edited by a CRISPR system (see Lee et al., eLife, 2017, 6:e25312, DOI:10.7554).

[0267] In some embodiments, the modification to the guide is a chemical modification, an insertion, a deletion or a split. In some embodiments, the chemical modification includes, but is not limited to, incorporation of 2′-O-methyl (M) analogs, 2′-deoxy analogs, 2-thiouridine analogs, N6-methyladenosine analogs, 2′-fluoro analogs, 2-aminopurine, 5-bromo-uridine, pseudouridine (Ψ), N1-methylpseudouridine (melΨ), 5-methoxyuridine(5moU), inosine, 7-methylguanosine, 2′-O-methyl 3′phosphorothioate (MS), S-constrained ethyl(cEt), phosphorothioate (PS), or 2′-O-methyl 3′thioPACE (MSP). In some embodiments, the guide comprises one or more of phosphorothioate modifications. In certain embodiments, at least 1, 2, 3, 4, 5, 6, 7, 8, 9, 10, 11, 12, 13, 14, 15, 16, 17, 18, 19, 20, or 25 nucleotides of the guide are chemically modified. In certain embodiments, one or more nucleotides in the seed region are chemically modified. In certain embodiments, one or more nucleotides in the 3′-terminus are chemically modified. In certain embodiments, none of the nucleotides in the 5′-handle is chemically modified. In some embodiments, the chemical modification in the seed region is a minor modification, such as incorporation of a 2′-fluoro analog. In a specific embodiment, one nucleotide of the seed region is replaced with a 2′-fluoro analog. In some embodiments, 5 to 10 nucleotides in the 3′-terminus are chemically modified. Such chemical modifications at the 3′-terminus of the Cas13 CrRNA may improve Cas13 activity. In a specific embodiment, 1, 2, 3, 4, 5, 6, 7, 8, 9 or 10 nucleotides in the 3′-terminus are replaced with 2′-fluoro analogues. In a specific embodiment, 1, 2, 3, 4, 5, 6, 7, 8, 9 or 10 nucleotides in the 3′-terminus are replaced with 2′-O-methyl (M) analogs.

[0268] In some embodiments, the loop of the 5′-handle of the guide is modified. In some embodiments, the loop of the 5′-handle of the guide is modified to have a deletion, an insertion, a split, or chemical modifications. In certain embodiments, the modified loop comprises 3, 4, or 5 nucleotides. In certain embodiments, the loop comprises the sequence of UCUU, UUUU, UAUU, or UGUU.

[0269] In some embodiments, the guide molecule forms a stemloop with a separate non-covalently linked sequence, which can be DNA or RNA. In particular embodiments, the sequences forming the guide are first synthesized using the standard phosphoramidite synthetic protocol (Herdewijn, P., ed., Methods in Molecular Biology Col 288, Oligonucleotide Synthesis: Methods and Applications, Humana Press, New Jersey (2012)). In some embodiments, these sequences can be functionalized to contain an appropriate functional group for ligation using the standard protocol known in the art (Hermanson, G. T., Bioconjugate Techniques, Academic Press (2013)). Examples of functional groups include, but are not limited to, hydroxyl, amine, carboxylic acid, carboxylic acid halide, carboxylic acid active ester, aldehyde, carbonyl, chlorocarbonyl, imidazolylcarbonyl, hydrozide, semicarbazide, thio semicarbazide, thiol, maleimide, haloalkyl, sufonyl, ally, propargyl, diene, alkyne, and azide. Once this sequence is functionalized, a covalent chemical bond or linkage can be formed between this sequence and the direct repeat sequence. Examples of chemical bonds include, but are not limited to, those based on carbamates, ethers, esters, amides, imines, amidines, aminotrizines, hydrozone, disulfides, thioethers, thioesters, phosphorothioates, phosphorodithioates, sulfonamides, sulfonates, fulfones, sulfoxides, ureas, thioureas, hydrazide, oxime, triazole, photolabile linkages, C—C bond forming groups such as Diels-Alder cyclo-addition pairs or ring-closing metathesis pairs, and Michael reaction pairs.

[0270] In some embodiments, these stem-loop forming sequences can be chemically synthesized. In some embodiments, the chemical synthesis uses automated, solid-phase oligonucleotide synthesis machines with 2′-acetoxyethyl orthoester (2′-ACE) (Scaringe et al., J. Am. Chem. Soc. (1998) 120: 11820-11821; Scaringe, Methods Enzymol. (2000) 317: 3-18) or 2′-thionocarbamate (2′-TC) chemistry (Dellinger et al., J. Am. Chem. Soc. (2011) 133: 11540-11546; Hendel et al., Nat. Biotechnol. (2015) 33:985-989).

[0271] In certain embodiments, the guide molecule comprises (1) a guide sequence capable of hybridizing to a target locus and (2) a tracr mate or direct repeat sequence whereby the direct repeat sequence is located upstream (i.e., 5′) from the guide sequence. In a particular embodiment the seed sequence (i.e. the sequence essential critical for recognition and/or hybridization to the sequence at the target locus) of th guide sequence is approximately within the first 10 nucleotides of the guide sequence.

[0272] In a particular embodiment the guide molecule comprises a guide sequence linked to a direct repeat sequence, wherein the direct repeat sequence comprises one or more stem loops or optimized secondary structures. In particular embodiments, the direct repeat has a minimum length of 16 nts and a single stem loop. In further embodiments the direct repeat has a length longer than 16 nts, preferably more than 17 nts, and has more than one stem loops or optimized secondary structures. In particular embodiments the guide molecule comprises or consists of the guide sequence linked to all or part of the natural direct repeat sequence. A typical Type V or Type VI CRISPR-cas guide molecule comprises (in 3′ to 5′ direction or in 5′ to 3′ direction): a guide sequence a first complimentary stretch (the “repeat”), a loop (which is typically 4 or 5 nucleotides long), a second complimentary stretch (the “anti-repeat” being complimentary to the repeat), and a poly A (often poly U in RNA) tail (terminator). In certain embodiments, the direct repeat sequence retains its natural architecture and forms a single stem loop. In particular embodiments, certain aspects of the guide architecture can be modified, for example by addition, subtraction, or substitution of features, whereas certain other aspects of guide architecture are maintained. Preferred locations for engineered guide molecule modifications, including but not limited to insertions, deletions, and substitutions include guide termini and regions of the guide molecule that are exposed when complexed with the CRISPR-Cas protein and/or target, for example the stemloop of the direct repeat sequence.

[0273] In particular embodiments, the stem comprises at least about 4 bp comprising complementary X and Y sequences, although stems of more, e.g., 5, 6, 7, 8, 9, 10, 11 or 12 or fewer, e.g., 3, 2, base pairs are also contemplated. Thus, for example X2-10 and Y2-10 (wherein X and Y represent any complementary set of nucleotides) may be contemplated. In one aspect, the stem made of the X and Y nucleotides, together with the loop will form a complete hairpin in the overall secondary structure; and, this may be advantageous and the amount of base pairs can be any amount that forms a complete hairpin. In one aspect, any complementary X:Y basepairing sequence (e.g., as to length) is tolerated, so long as the secondary structure of the entire guide molecule is preserved. In one aspect, the loop that connects the stem made of X:Y basepairs can be any sequence of the same length (e.g., 4 or 5 nucleotides) or longer that does not interrupt the overall secondary structure of the guide molecule. In one aspect, the stemloop can further comprise, e.g. an MS2 aptamer. In one aspect, the stem comprises about 5-7 bp comprising complementary X and Y sequences, although stems of more or fewer basepairs are also contemplated. In one aspect, non-Watson Crick basepairing is contemplated, where such pairing otherwise generally preserves the architecture of the stemloop at that position.

[0274] In particular embodiments the natural hairpin or stemloop structure of the guide molecule is extended or replaced by an extended stemloop. It has been demonstrated that extension of the stem can enhance the assembly of the guide molecule with the CRISPR-Cas proten (Chen et al. Cell. (2013); 155(7): 1479-1491). In particular embodiments the stem of the stemloop is extended by at least 1, 2, 3, 4, 5 or more complementary basepairs (i.e. corresponding to the addition of 2,4, 6, 8, 10 or more nucleotides in the guide molecule). In particular embodiments these are located at the end of the stem, adjacent to the loop of the stemloop.

[0275] In particular embodiments, the susceptibility of the guide molecule to RNAses or to decreased expression can be reduced by slight modifications of the sequence of the guide molecule which do not affect its function. For instance, in particular embodiments, premature termination of transcription, such as premature transcription of U6 Pol-III, can be removed by modifying a putative Pol-III terminator (4 consecutive U's) in the guide molecules sequence. Where such sequence modification is required in the stemloop of the guide molecule, it is preferably ensured by a basepair flip.

[0276] In a particular embodiment, the direct repeat may be modified to comprise one or more protein-binding RNA aptamers. In a particular embodiment, one or more aptamers may be included such as part of optimized secondary structure. Such aptamers may be capable of binding a bacteriophage coat protein as detailed further herein.

[0277] In some embodiments, the guide molecule forms a duplex with a target RNA comprising at least one target cytosine residue to be edited. Upon hybridization of the guide RNA molecule to the target RNA, the cytidine deaminase binds to the single strand RNA in the duplex made accessible by the mismatch in the guide sequence and catalyzes deamination of one or more target cytosine residues comprised within the stretch of mismatching nucleotides.

[0278] A guide sequence, and hence a nucleic acid-targeting guide RNA may be selected to target any target nucleic acid sequence. The target sequence may be mRNA.

[0279] In certain embodiments, the target sequence should be associated with a PAM (protospacer adjacent motif) or PFS (protospacer flanking sequence or site); that is, a short sequence recognized by the CRISPR complex. Depending on the nature of the CRISPR-Cas protein, the target sequence should be selected such that its complementary sequence in the DNA duplex (also referred to herein as the non-target sequence) is upstream or downstream of the PAM. In the embodiments of the present invention where the CRISPR-Cas protein is a Cas13 protein, the compelementary sequence of the target sequence is downstream or 3′ of the PAM or upstream or 5′ of the PAM. The precise sequence and length requirements for the PAM differ depending on the Cas13 protein used, but PAMs are typically 2-5 base pair sequences adjacent the protospacer (that is, the target sequence). Examples of the natural PAM sequences for different Cas13 orthologues are provided herein below and the skilled person will be able to identify further PAM sequences for use with a given Cas13 protein.

[0280] Further, engineering of the PAM Interacting (PI) domain may allow programing of PAM specificity, improve target site recognition fidelity, and increase the versatility of the CRISPR-Cas protein, for example as described for Cas9 in Kleinstiver B P et al. Engineered CRISPR-Cas9 nucleases with altered PAM specificities. Nature. 2015 Jul. 23; 523(7561):481-5. doi: 10.1038/nature14592. As further detailed herein, the skilled person will understand that Cas13 proteins may be modified analogously.

[0281] In particular embodiment, the guide is an escorted guide. By “escorted” is meant that the CRISPR-Cas system or complex or guide is delivered to a selected time or place within a cell, so that activity of the CRISPR-Cas system or complex or guide is spatially or temporally controlled. For example, the activity and destination of the 3 CRISPR-Cas system or complex or guide may be controlled by an escort RNA aptamer sequence that has binding affinity for an aptamer ligand, such as a cell surface protein or other localized cellular component. Alternatively, the escort aptamer may for example be responsive to an aptamer effector on or in the cell, such as a transient effector, such as an external energy source that is applied to the cell at a particular time.

[0282] The escorted CRISPR-Cas systems or complexes have a guide molecule with a functional structure designed to improve guide molecule structure, architecture, stability, genetic expression, or any combination thereof. Such a structure can include an aptamer.

[0283] Aptamers are biomolecules that can be designed or selected to bind tightly to other ligands, for example using a technique called systematic evolution of ligands by exponential enrichment (SELEX; Tuerk C, Gold L: “Systematic evolution of ligands by exponential enrichment: RNA ligands to bacteriophage T4 DNA polymerase.” Science 1990, 249:505-510). Nucleic acid aptamers can for example be selected from pools of random-sequence oligonucleotides, with high binding affinities and specificities for a wide range of biomedically relevant targets, suggesting a wide range of therapeutic utilities for aptamers (Keefe, Anthony D., Supriya Pai, and Andrew Ellington. “Aptamers as therapeutics.” Nature Reviews Drug Discovery 9.7 (2010): 537-550). These characteristics also suggest a wide range of uses for aptamers as drug delivery vehicles (Levy-Nissenbaum, Etgar, et al. “Nanotechnology and aptamers: applications in drug delivery.” Trends in biotechnology 26.8 (2008): 442-449; and, Hicke B J, Stephens A W. “Escort aptamers: a delivery service for diagnosis and therapy.” J Clin Invest 2000, 106:923-928). Aptamers may also be constructed that function as molecular switches, responding to a que by changing properties, such as RNA aptamers that bind fluorophores to mimic the activity of green flourescent protein (Paige, Jeremy S., Karen Y. Wu, and Samie R. Jaffrey. “RNA mimics of green fluorescent protein.” Science 333.6042 (2011): 642-646). It has also been suggested that aptamers may be used as components of targeted siRNA therapeutic delivery systems, for example targeting cell surface proteins (Zhou, Jiehua, and John J. Rossi. “Aptamer-targeted cell-specific RNA interference.” Silence 1.1 (2010): 4).

[0284] Accordingly, in particular embodiments, the guide molecule is modified, e.g., by one or more aptamer(s) designed to improve guide molecule delivery, including delivery across the cellular membrane, to intracellular compartments, or into the nucleus. Such a structure can include, either in addition to the one or more aptamer(s) or without such one or more aptamer(s), moiety(ies) so as to render the guide molecule deliverable, inducible or responsive to a selected effector. The invention accordingly comprehends an guide molecule that responds to normal or pathological physiological conditions, including without limitation pH, hypoxia, O₂ concentration, temperature, protein concentration, enzymatic concentration, lipid structure, light exposure, mechanical disruption (e.g. ultrasound waves), magnetic fields, electric fields, or electromagnetic radiation.

[0285] Light responsiveness of an inducible system may be achieved via the activation and binding of cryptochrome-2 and CIB1. Blue light stimulation induces an activating conformational change in cryptochrome-2, resulting in recruitment of its binding partner CIB1. This binding is fast and reversible, achieving saturation in <15 sec following pulsed stimulation and returning to baseline <15 min after the end of stimulation. These rapid binding kinetics result in a system temporally bound only by the speed of transcription/translation and transcript/protein degradation, rather than uptake and clearance of inducing agents. Crytochrome-2 activation is also highly sensitive, allowing for the use of low light intensity stimulation and mitigating the risks of phototoxicity. Further, in a context such as the intact mammalian brain, variable light intensity may be used to control the size of a stimulated region, allowing for greater precision than vector delivery alone may offer.

[0286] The invention contemplates energy sources such as electromagnetic radiation, sound energy or thermal energy to induce the guide. Advantageously, the electromagnetic radiation is a component of visible light. In a preferred embodiment, the light is a blue light with a wavelength of about 450 to about 495 nm. In an especially preferred embodiment, the wavelength is about 488 nm. In another preferred embodiment, the light stimulation is via pulses. The light power may range from about 0-9 mW/cm². In a preferred embodiment, a stimulation paradigm of as low as 0.25 sec every 15 sec should result in maximal activation.

[0287] The chemical or energy sensitive guide may undergo a conformational change upon induction by the binding of a chemical source or by the energy allowing it act as a guide and have the Cas13 CRISPR-Cas system or complex function. The invention can involve applying the chemical source or energy so as to have the guide function and the Cas13 CRISPR-Cas system or complex function; and optionally further determining that the expression of the genomic locus is altered.

[0288] There are several different designs of this chemical inducible system: 1. ABI-PYL based system inducible by Abscisic Acid (ABA) (see, e.g., stke.sciencemag.org/cgi/content/abstract/sigtrans;4/164/rs2), 2. FKBP-FRB based system inducible by rapamycin (or related chemicals based on rapamycin) (see, e.g., www.nature.com/nmeth/journal/v2/n6/full/nmeth763.html), 3. GID1-GAI based system inducible by Gibberellin (GA) (see, e.g., www.nature.com/nchembio/journal/v8/n5/full/nchembio.922.html).

[0289] A chemical inducible system can be an estrogen receptor (ER) based system inducible by 4-hydroxytamoxifen (4OHT) (see, e.g., www.pnas.org/content/104/3/1027.abstract). A mutated ligand-binding domain of the estrogen receptor called ERT2 translocates into the nucleus of cells upon binding of 4-hydroxytamoxifen. In further embodiments of the invention any naturally occurring or engineered derivative of any nuclear receptor, thyroid hormone receptor, retinoic acid receptor, estrogen receptor, estrogen-related receptor, glucocorticoid receptor, progesterone receptor, androgen receptor may be used in inducible systems analogous to the ER based inducible system.

[0290] Another inducible system is based on the design using Transient receptor potential (TRP) ion channel based system inducible by energy, heat or radio-wave (see, e.g., www.sciencemag.org/content/336/6081/604). These TRP family proteins respond to different stimuli, including light and heat. When this protein is activated by light or heat, the ion channel will open and allow the entering of ions such as calcium into the plasma membrane. This influx of ions will bind to intracellular ion interacting partners linked to a polypeptide including the guide and the other components of the Cas13 CRISPR-Cas complex or system, and the binding will induce the change of sub-cellular localization of the polypeptide, leading to the entire polypeptide entering the nucleus of cells. Once inside the nucleus, the guide protein and the other components of the Cas13 CRISPR-Cas complex will be active and modulating target gene expression in cells.

[0291] While light activation may be an advantageous embodiment, sometimes it may be disadvantageous especially for in vivo applications in which the light may not penetrate the skin or other organs. In this instance, other methods of energy activation are contemplated, in particular, electric field energy and/or ultrasound which have a similar effect.

[0292] Electric field energy is preferably administered substantially as described in the art, using one or more electric pulses of from about 1 Volt/cm to about 10 kVolts/cm under in vivo conditions. Instead of or in addition to the pulses, the electric field may be delivered in a continuous manner. The electric pulse may be applied for between 1 μs and 500 milliseconds, preferably between 1 μs and 100 milliseconds. The electric field may be applied continuously or in a pulsed manner for 5 about minutes.

[0293] As used herein, ‘electric field energy’ is the electrical energy to which a cell is exposed. Preferably the electric field has a strength of from about 1 Volt/cm to about 10 kVolts/cm or more under in vivo conditions (see WO97/49450).

[0294] As used herein, the term “electric field” includes one or more pulses at variable capacitance and voltage and including exponential and/or square wave and/or modulated wave and/or modulated square wave forms. References to electric fields and electricity should be taken to include reference the presence of an electric potential difference in the environment of a cell. Such an environment may be set up by way of static electricity, alternating current (AC), direct current (DC), etc, as known in the art. The electric field may be uniform, non-uniform or otherwise, and may vary in strength and/or direction in a time dependent manner.

[0295] Single or multiple applications of electric field, as well as single or multiple applications of ultrasound are also possible, in any order and in any combination. The ultrasound and/or the electric field may be delivered as single or multiple continuous applications, or as pulses (pulsatile delivery).

[0296] Electroporation has been used in both in vitro and in vivo procedures to introduce foreign material into living cells. With in vitro applications, a sample of live cells is first mixed with the agent of interest and placed between electrodes such as parallel plates. Then, the electrodes apply an electrical field to the cell/implant mixture. Examples of systems that perform in vitro electroporation include the Electro Cell Manipulator ECM600 product, and the Electro Square Porator T820, both made by the BTX Division of Genetronics, Inc (see U.S. Pat. No. 5,869,326).

[0297] The known electroporation techniques (both in vitro and in vivo) function by applying a brief high voltage pulse to electrodes positioned around the treatment region. The electric field generated between the electrodes causes the cell membranes to temporarily become porous, whereupon molecules of the agent of interest enter the cells. In known electroporation applications, this electric field comprises a single square wave pulse on the order of 1000 V/cm, of about 100.mu.s duration. Such a pulse may be generated, for example, in known applications of the Electro Square Porator T820.

[0298] Preferably, the electric field has a strength of from about 1 V/cm to about 10 kV/cm under in vitro conditions. Thus, the electric field may have a strength of 1 V/cm, 2 V/cm, 3 V/cm, 4 V/cm, 5 V/cm, 6 V/cm, 7 V/cm, 8 V/cm, 9 V/cm, 10 V/cm, 20 V/cm, 50 V/cm, 100 V/cm, 200 V/cm, 300 V/cm, 400 V/cm, 500 V/cm, 600 V/cm, 700 V/cm, 800 V/cm, 900 V/cm, 1 kV/cm, 2 kV/cm, 5 kV/cm, 10 kV/cm, 20 kV/cm, 50 kV/cm or more. More preferably from about 0.5 kV/cm to about 4.0 kV/cm under in vitro conditions. Preferably the electric field has a strength of from about 1 V/cm to about 10 kV/cm under in vivo conditions. However, the electric field strengths may be lowered where the number of pulses delivered to the target site are increased. Thus, pulsatile delivery of electric fields at lower field strengths is envisaged.

[0299] Preferably the application of the electric field is in the form of multiple pulses such as double pulses of the same strength and capacitance or sequential pulses of varying strength and/or capacitance. As used herein, the term “pulse” includes one or more electric pulses at variable capacitance and voltage and including exponential and/or square wave and/or modulated wave/square wave forms.

[0300] Preferably the electric pulse is delivered as a waveform selected from an exponential wave form, a square wave form, a modulated wave form and a modulated square wave form.

[0301] A preferred embodiment employs direct current at low voltage. Thus, Applicants disclose the use of an electric field which is applied to the cell, tissue or tissue mass at a field strength of between 1V/cm and 20V/cm, for a period of 100 milliseconds or more, preferably 15 minutes or more.

[0302] Ultrasound is advantageously administered at a power level of from about 0.05 W/cm2 to about 100 W/cm2. Diagnostic or therapeutic ultrasound may be used, or combinations thereof.

[0303] As used herein, the term “ultrasound” refers to a form of energy which consists of mechanical vibrations the frequencies of which are so high they are above the range of human hearing. Lower frequency limit of the ultrasonic spectrum may generally be taken as about 20 kHz. Most diagnostic applications of ultrasound employ frequencies in the range 1 and 15 MHz′ (From Ultrasonics in Clinical Diagnosis, P. N. T. Wells, ed., 2nd. Edition, Publ. Churchill Livingstone [Edinburgh, London & NY, 1977]).

[0304] Ultrasound has been used in both diagnostic and therapeutic applications. When used as a diagnostic tool (“diagnostic ultrasound”), ultrasound is typically used in an energy density range of up to about 100 mW/cm2 (FDA recommendation), although energy densities of up to 750 mW/cm2 have been used. In physiotherapy, ultrasound is typically used as an energy source in a range up to about 3 to 4 W/cm2 (WHO recommendation). In other therapeutic applications, higher intensities of ultrasound may be employed, for example, HIFU at 100 W/cm up to 1 kW/cm2 (or even higher) for short periods of time. The term “ultrasound” as used in this specification is intended to encompass diagnostic, therapeutic and focused ultrasound.

[0305] Focused ultrasound (FUS) allows thermal energy to be delivered without an invasive probe (see Morocz et al 1998 Journal of Magnetic Resonance Imaging Vol. 8, No. 1, pp. 136-142. Another form of focused ultrasound is high intensity focused ultrasound (HIFU) which is reviewed by Moussatov et al in Ultrasonics (1998) Vol. 36, No. 8, pp. 893-900 and TranHuuHue et al in Acustica (1997) Vol. 83, No. 6, pp. 1103-1106.

[0306] Preferably, a combination of diagnostic ultrasound and a therapeutic ultrasound is employed. This combination is not intended to be limiting, however, and the skilled reader will appreciate that any variety of combinations of ultrasound may be used. Additionally, the energy density, frequency of ultrasound, and period of exposure may be varied.

[0307] Preferably the exposure to an ultrasound energy source is at a power density of from about 0.05 to about 100 Wcm-2. Even more preferably, the exposure to an ultrasound energy source is at a power density of from about 1 to about 15 Wcm-2.

[0308] Preferably the exposure to an ultrasound energy source is at a frequency of from about 0.015 to about 10.0 MHz. More preferably the exposure to an ultrasound energy source is at a frequency of from about 0.02 to about 5.0 MHz or about 6.0 MHz. Most preferably, the ultrasound is applied at a frequency of 3 MHz.

[0309] Preferably the exposure is for periods of from about 10 milliseconds to about 60 minutes. Preferably the exposure is for periods of from about 1 second to about 5 minutes. More preferably, the ultrasound is applied for about 2 minutes. Depending on the particular target cell to be disrupted, however, the exposure may be for a longer duration, for example, for 15 minutes.

[0310] Advantageously, the target tissue is exposed to an ultrasound energy source at an acoustic power density of from about 0.05 Wcm-2 to about 10 Wcm-2 with a frequency ranging from about 0.015 to about 10 MHz (see WO 98/52609). However, alternatives are also possible, for example, exposure to an ultrasound energy source at an acoustic power density of above 100 Wcm-2, but for reduced periods of time, for example, 1000 Wcm-2 for periods in the millisecond range or less.

[0311] Preferably the application of the ultrasound is in the form of multiple pulses; thus, both continuous wave and pulsed wave (pulsatile delivery of ultrasound) may be employed in any combination. For example, continuous wave ultrasound may be applied, followed by pulsed wave ultrasound, or vice versa. This may be repeated any number of times, in any order and combination. The pulsed wave ultrasound may be applied against a background of continuous wave ultrasound, and any number of pulses may be used in any number of groups.

[0312] Preferably, the ultrasound may comprise pulsed wave ultrasound. In a highly preferred embodiment, the ultrasound is applied at a power density of 0.7 Wcm-2 or 1.25 Wcm-2 as a continuous wave. Higher power densities may be employed if pulsed wave ultrasound is used.

[0313] Use of ultrasound is advantageous as, like light, it may be focused accurately on a target. Moreover, ultrasound is advantageous as it may be focused more deeply into tissues unlike light. It is therefore better suited to whole-tissue penetration (such as but not limited to a lobe of the liver) or whole organ (such as but not limited to the entire liver or an entire muscle, such as the heart) therapy. Another important advantage is that ultrasound is a non-invasive stimulus which is used in a wide variety of diagnostic and therapeutic applications. By way of example, ultrasound is well known in medical imaging techniques and, additionally, in orthopedic therapy. Furthermore, instruments suitable for the application of ultrasound to a subject vertebrate are widely available and their use is well known in the art.

[0314] In particular embodiments, the guide molecule is modified by a secondary structure to increase the specificity of the CRISPR-Cas system and the secondary structure can protect against exonuclease activity and allow for 5′ additions to the guide sequence also referred to herein as a protected guide molecule.

[0315] In one aspect, the invention provides for hybridizing a “protector RNA” to a sequence of the guide molecule, wherein the “protector RNA” is an RNA strand complementary to the 3′ end of the guide molecule to thereby generate a partially double-stranded guide RNA. In an embodiment of the invention, protecting mismatched bases (i.e. the bases of the guide molecule which do not form part of the guide sequence) with a perfectly complementary protector sequence decreases the likelihood of target RNA binding to the mismatched basepairs at the 3′ end. In particular embodiments of the invention, additional sequences comprising an extended length may also be present within the guide molecule such that the guide comprises a protector sequence within the guide molecule. This “protector sequence” ensures that the guide molecule comprises a “protected sequence” in addition to an “exposed sequence” (comprising the part of the guide sequence hybridizing to the target sequence). In particular embodiments, the guide molecule is modified by the presence of the protector guide to comprise a secondary structure such as a hairpin. Advantageously there are three or four to thirty or more, e.g., about 10 or more, contiguous base pairs having complementarity to the protected sequence, the guide sequence or both. It is advantageous that the protected portion does not impede thermodynamics of the CRISPR-Cas system interacting with its target. By providing such an extension including a partially double stranded guide molecule, the guide molecule is considered protected and results in improved specific binding of the CRISPR-Cas complex, while maintaining specific activity.

[0316] In particular embodiments, use is made of a truncated guide (tru-guide), i.e. a guide molecule which comprises a guide sequence which is truncated in length with respect to the canonical guide sequence length. As described by Nowak et al. (Nucleic Acids Res (2016) 44 (20): 9555-9564), such guides may allow catalytically active CRISPR-Cas enzyme to bind its target without cleaving the target RNA. In particular embodiments, a truncated guide is used which allows the binding of the target but retains only nickase activity of the CRISPR-Cas enzyme.

### CRiSPR RNA-Targeting Effector Proteins

[0317] In one example embodiment, the CRISPR system effector protein is an RNA-targeting effector protein. In certain embodiments, the CRISPR system effector protein is a Type VI CRISPR system targeting RNA (e.g., Cas13a, Cas13b, Cas13c or Cas13d). Example RNA-targeting effector proteins include Cas13b and C2c2 (now known as Cas13a). It will be understood that the term “C2c2” herein is used interchangeably with “Cas13a”. “C2c2” is now referred to as “Cas13a”, and the terms are used interchangeably herein unless indicated otherwise. As used herein, the term “Cas13” refers to any Type VI CRISPR system targeting RNA (e.g., Cas13a, Cas13b, Cas13c or Cas13d). When the CRISPR protein is a C2c2 protein, a tracrRNA is not required. C2c2 has been described in Abudayyeh et al. (2016) “C2c2 is a single-component programmable RNA-guided RNA-targeting CRISPR effector”; Science; DOI: 10.1126/science.aaf5573; and Shmakov et al. (2015) “Discovery and Functional Characterization of Diverse Class 2 CRISPR-Cas Systems”, Molecular Cell, DOI: dx.doi.org/10.1016/j.molcel.2015.10.008; which are incorporated herein in their entirety by reference. Cas13b has been described in Smargon et al. (2017) “Cas13b Is a Type VI-B CRISPR-Associated RNA-Guided RNases Differentially Regulated by Accessory Proteins Csx27 and Csx28,” Molecular Cell. 65, 1-13; dx.doi.org/10.1016/j.molcel.2016.12.023., which is incorporated herein in its entirety by reference.

[0318] In some embodiments, one or more elements of a nucleic acid-targeting system is derived from a particular organism comprising an endogenous CRISPR RNA-targeting system. In certain example embodiments, the effector protein CRISPR RNA-targeting system comprises at least one HEPN domain, including but not limited to the HEPN domains described herein, HEPN domains known in the art, and domains recognized to be HEPN domains by comparison to consensus sequence motifs. Several such domains are provided herein. In one non-limiting example, a consensus sequence can be derived from the sequences of C2c2 or Cas13b orthologs provided herein. In certain example embodiments, the effector protein comprises a single HEPN domain. In certain other example embodiments, the effector protein comprises two HEPN domains.

[0319] In one example embodiment, the effector protein comprise one or more HEPN domains comprising a RxxxxH motif sequence. The RxxxxH motif sequence can be, without limitation, from a HEPN domain described herein or a HEPN domain known in the art. RxxxxH motif sequences further include motif sequences created by combining portions of two or more HEPN domains. As noted, consensus sequences can be derived from the sequences of the orthologs disclosed in U.S. Provisional Patent Application 62/432,240 entitled “Novel CRISPR Enzymes and Systems,” U.S. Provisional Patent Application 62/471,710 entitled “Novel Type VI CRISPR Orthologs and Systems” filed on Mar. 15, 2017, and U.S. Provisional Patent Application entitled “Novel Type VI CRISPR Orthologs and Systems,” labeled as attorney docket number 47627-05-2133 and filed on Apr. 12, 2017.

[0320] In certain other example embodiments, the CRISPR system effector protein is a C2c2 nuclease (also referred to as Cas13a). The activity of C2c2 may depend on the presence of two HEPN domains. These have been shown to be RNase domains, i.e. nuclease (in particular an endonuclease) cutting RNA. C2c2 HEPN may also target DNA, or potentially DNA and/or RNA. On the basis that the HEPN domains of C2c2 are at least capable of binding to and, in their wild-type form, cutting RNA, then it is preferred that the C2c2 effector protein has RNase function. Regarding C2c2 CRISPR systems, reference is made to U.S. Provisional 62/351,662 filed on Jun. 17, 2016 and U.S. Provisional 62/376,377 filed on Aug. 17, 2016. Reference is also made to U.S. Provisional 62/351,803 filed on Jun. 17, 2016. Reference is also made to U.S. Provisional entitled “Novel Crispr Enzymes and Systems” filed Dec. 8, 2016 bearing Broad Institute No. 10035.PA4 and Attorney Docket No. 47627.03.2133. Reference is further made to East-Seletsky et al. “Two distinct RNase activities of CRISPR-C2c2 enable guide-RNA processing and RNA detection” Nature doi:10/1038/nature19802 and Abudayyeh et al. “C2c2 is a single-component programmable RNA-guided RNA targeting CRISPR effector” bioRxiv doi:10.1101/054742.

[0321] In certain embodiments, the C2c2 effector protein is from an organism of a genus selected from the group consisting of: Leptotrichia, Listeria, Corynebacter, Sutterella, Legionella, Treponema, Filifactor, Eubacterium, Streptococcus, Lactobacillus, Mycoplasma, Bacteroides, Flaviivola, Flavobacterium, Sphaerochaeta, Azospirillum, Gluconacetobacter, Neisseria, Roseburia, Parvibaculum, Staphylococcus, Nitratifractor, Mycoplasma, Campylobacter, and Lachnospira, or the C2c2 effector protein is an organism selected from the group consisting of: Leptotrichia shahii, Leptotrichia. wadei, Listeria seeligeri, Clostridium aminophilum, Carnobacterium gallinarum, Paludibacter propionicigenes, Listeria weihenstephanensis, or the C2c2 effector protein is a L. wadei F0279 or L. wadei F0279 (Lw2) C2C2 effector protein. In another embodiment, the one or more guide RNAs are designed to detect a single nucleotide polymorphism, splice variant of a transcript, or a frameshift mutation in a target RNA or DNA.

[0322] In certain example embodiments, the RNA-targeting effector protein is a Type VI-B effector protein, such as Cas13b and Group 29 or Group 30 proteins. In certain example embodiments, the RNA-targeting effector protein comprises one or more HEPN domains. In certain example embodiments, the RNA-targeting effector protein comprises a C-terminal HEPN domain, a N-terminal HEPN domain, or both. Regarding example Type VI-B effector proteins that may be used in the context of this invention, reference is made to U.S. application Ser. No. 15/331,792 entitled “Novel CRISPR Enzymes and Systems” and filed Oct. 21, 2016, International Patent Application No. PCT/US2016/058302 entitled “Novel CRISPR Enzymes and Systems”, and filed Oct. 21, 2016, and Smargon et al. “Cas13b is a Type VI-B CRISPR-associated RNA-Guided RNase differentially regulated by accessory proteins Csx27 and Csx28” Molecular Cell, 65, 1-13 (2017); dx.doi.org/10.1016/j.molcel.2016.12.023, and U.S. Provisional Application No. to be assigned, entitled “Novel Cas13b Orthologues CRISPR Enzymes and System” filed Mar. 15, 2017. In particular embodiments, the Cas13b enzyme is derived from Bergeyella zoohelcum.

[0323] In certain example embodiments, the RNA-targeting effector protein is a Cas13c effector protein as disclosed in U.S. Provisional Patent Application No. 62/525,165 filed Jun. 26, 2017, and PCT Application No. US 2017/047193 filed Aug. 16, 2017.

[0324] In some embodiments, one or more elements of a nucleic acid-targeting system is derived from a particular organism comprising an endogenous CRISPR RNA-targeting system. In certain embodiments, the CRISPR RNA-targeting system is found in Eubacterium and Ruminococcus. In certain embodiments, the effector protein comprises targeted and collateral ssRNA cleavage activity. In certain embodiments, the effector protein comprises dual HEPN domains. In certain embodiments, the effector protein lacks a counterpart to the Helical-1 domain of Cas13a. In certain embodiments, the effector protein is smaller than previously characterized class 2 CRISPR effectors, with a median size of 928 aa. This median size is 190 aa (17%) less than that of Cas13c, more than 200 aa (18%) less than that of Cas13b, and more than 300 aa (26%) less than that of Cas13a. In certain embodiments, the effector protein has no requirement for a flanking sequence (e.g., PFS, PAM).

[0325] In certain embodiments, the effector protein locus structures include a WYL domain containing accessory protein (so denoted after three amino acids that were conserved in the originally identified group of these domains; see, e.g., WYL domain IPR026881). In certain embodiments, the WYL domain accessory protein comprises at least one helix-turn-helix (HTH) or ribbon-helix-helix (RHH) DNA-binding domain. In certain embodiments, the WYL domain containing accessory protein increases both the targeted and the collateral ssRNA cleavage activity of the RNA-targeting effector protein. In certain embodiments, the WYL domain containing accessory protein comprises an N-terminal RHH domain, as well as a pattern of primarily hydrophobic conserved residues, including an invariant tyrosine-leucine doublet corresponding to the original WYL motif. In certain embodiments, the WYL domain containing accessory protein is WYL1. WYL1 is a single WYL-domain protein associated primarily with Ruminococcus.

[0326] In other example embodiments, the Type VI RNA-targeting Cas enzyme is Cas13d. In certain embodiments, Cas13d is Eubacterium siraeum DSM 15702 (EsCas13d) or Ruminococcus sp. N15.MGS-57 (RspCas13d) (see, e.g., Yan et al., Cas13d Is a Compact RNA-Targeting Type VI CRISPR Effector Positively Modulated by a WYL-Domain-Containing Accessory Protein, Molecular Cell (2018), doi.org/10.1016/j.molcel.2018.02.028). RspCas13d and EsCas13d have no flanking sequence requirements (e.g., PFS, PAM).

### Cas13 RNA Editing

[0327] In one aspect, the invention provides a method of modifying or editing a target transcript in a eukaryotic cell. In some embodiments, the method comprises allowing a CRISPR-Cas effector module complex to bind to the target polynucleotide to effect RNA base editing, wherein the CRISPR-Cas effector module complex comprises a Cas effector module complexed with a guide sequence hybridized to a target sequence within said target polynucleotide, wherein said guide sequence is linked to a direct repeat sequence. In some embodiments, the Cas effector module comprises a catalytically inactive CRISPR-Cas protein. In some embodiments, the guide sequence is designed to introduce one or more mismatches to the RNA/RNA duplex formed between the target sequence and the guide sequence. In particular embodiments, the mismatch is an A-C mismatch. In some embodiments, the Cas effector may associate with one or more functional domains (e.g. via fusion protein or suitable linkers). In some embodiments, the effector domain comprises one or more cytindine or adenosine deaminases that mediate endogenous editing of via hydrolytic deamination. In particular embodiments, the effector domain comprises the adenosine deaminase acting on RNA (ADAR) family of enzymes. In particular embodiments, the adenosine deaminase protein or catalytic domain thereof capable of deaminating adenosine or cytidine in RNA or is an RNA specific adenosine deaminase and/or is a bacterial, human, cephalopod, or Drosophila adenosine deaminase protein or catalytic domain thereof, preferably TadA, more preferably ADAR, optionally huADAR, optionally (hu)ADAR1 or (hu)ADAR2, preferably huADAR2 or catalytic domain thereof.

[0328] The present application relates to modifying a target RNA sequence of interest (see, e.g, Cox et al., Science. 2017 Nov. 24; 358(6366):1019-1027). Using RNA-targeting rather than DNA targeting offers several advantages relevant for therapeutic development. First, there are substantial safety benefits to targeting RNA: there will be fewer off-target events because the available sequence space in the transcriptome is significantly smaller than the genome, and if an off-target event does occur, it will be transient and less likely to induce negative side effects. Second, RNA-targeting therapeutics will be more efficient because they are cell-type independent and not have to enter the nucleus, making them easier to deliver.

[0329] A further aspect of the invention relates to the method and composition as envisaged herein for use in prophylactic or therapeutic treatment, preferably wherein said target locus of interest is within a human or animal and to methods of modifying an Adenine or Cytidine in a target RNA sequence of interest, comprising delivering to said target RNA, the composition as described herein. In particular embodiments, the CRISPR system and the adenonsine deaminase, or catalytic domain thereof, are delivered as one or more polynucleotide molecules, as a ribonucleoprotein complex, optionally via particles, vesicles, or one or more viral vectors. In particular embodiments, the invention thus comprises compositions for use in therapy. This implies that the methods can be performed in vivo, ex vivo or in vitro. In particular embodiments, when the target is a human or animal target, the method is carried out ex vivo or in vitro.

[0330] A further aspect of the invention relates to the method as envisaged herein for use in prophylactic or therapeutic treatment, preferably wherein said target of interest is within a human or animal and to methods of modifying an Adenine or Cytidine in a target RNA sequence of interest, comprising delivering to said target RNA, the composition as described herein. In particular embodiments, the CRISPR system and the adenonsine deaminase, or catalytic domain thereof, are delivered as one or more polynucleotide molecules, as a ribonucleoprotein complex, optionally via particles, vesicles, or one or more viral vectors.

[0331] In one aspect, the invention provides a method of generating a eukaryotic cell comprising a modified or edited gene. In some embodiments, the method comprises (a) introducing one or more vectors into a eukaryotic cell, wherein the one or more vectors drive expression of one or more of: Cas effector module, and a guide sequence linked to a direct repeat sequence, wherein the Cas effector module associate one or more effector domains that mediate base editing, and (b) allowing a CRISPR-Cas effector module complex to bind to a target polynucleotide to effect base editing of the target polynucleotide within said disease gene, wherein the CRISPR-Cas effector module complex comprises a Cas effector module complexed with the guide sequence that is hybridized to the target sequence within the target polynucleotide, wherein the guide sequence may be designed to introduce one or more mismatches between the RNA/RNA duplex formed between the guide sequence and the target sequence. In particular embodiments, the mismatch is an A-C mismatch. In some embodiments, the Cas effector may associate with one or more functional domains (e.g. via fusion protein or suitable linkers). In some embodiments, the effector domain comprises one or more cytidine or adenosine deaminases that mediate endogenous editing of via hydrolytic deamination. In particular embodiments, the effector domain comprises the adenosine deaminase acting on RNA (ADAR) family of enzymes. In particular embodiments, the adenosine deaminase protein or catalytic domain thereof capable of deaminating adenosine or cytidine in RNA or is an RNA specific adenosine deaminase and/or is a bacterial, human, cephalopod, or Drosophila adenosine deaminase protein or catalytic domain thereof, preferably TadA, more preferably ADAR, optionally huADAR, optionally (hu)ADAR1 or (hu)ADAR2, preferably huADAR2 or catalytic domain thereof.

[0332] The present invention may also use a Cas12 CRISPR enzyme. Cas12 enzymes include Cas12a (Cpf1), Cas12b (C2c1), and Cas12c (C2c3), described further herein. The Cas12 may be an ultraCas12. IDT developed a “Alt-R Cas12a” reagent that has 3 main components: a) optimized crRNA; b) A.s. Cas12a; and (c) an electroporation enhancer (for better transfection). The variant is an improved version of IDT's Alt-R Cas12a and is named “Alt-R Cas12a Ultra.”

[0333] A further aspect relates to an isolated cell obtained or obtainable from the methods described herein comprising the composition described herein or progeny of said modified cell, preferably wherein said cell comprises a hypoxanthine or a guanine in replace of said Adenine in said target RNA of interest compared to a corresponding cell not subjected to the method. In particular embodiments, the cell is a eukaryotic cell, preferably a human or non-human animal cell, optionally a therapeutic T cell or an antibody-producing B-cell.

[0334] In some embodiments, the modified cell is a therapeutic T cell, such as a T cell suitable for adoptive cell transfer therapies (e.g., CAR-T therapies). The modification may result in one or more desirable traits in the therapeutic T cell, as described further herein.

[0335] The invention further relates to a method for cell therapy, comprising administering to a patient in need thereof the modified cell described herein, wherein the presence of the modified cell remedies a disease in the patient.

[0336] The present invention may be further illustrated and extended based on aspects of CRISPR-Cas development and use as set forth in the following articles and particularly as relates to delivery of a CRISPR protein complex and uses of an RNA guided endonuclease in cells and organisms:
[0337] Multiplex genome engineering using CRISPR-Cas systems. Cong, L., Ran, F. A., Cox, D., Lin, S., Barretto, R., Habib, N., Hsu, P. D., Wu, X., Jiang, W., Marraffini, L. A., & Zhang, F. Science February 15; 339(6121):819-23 (2013);
[0338] RNA-guided editing of bacterial genomes using CRISPR-Cas systems. Jiang W., Bikard D., Cox D., Zhang F, Marraffini L A. Nat Biotechnol March; 31(3):233-9 (2013);
[0339] One-Step Generation of Mice Carrying Mutations in Multiple Genes by CRISPR-Cas-Mediated Genome Engineering. Wang H., Yang H., Shivalila C S., Dawlaty M M., Cheng A W., Zhang F., Jaenisch R. Cell May 9; 153(4):910-8 (2013);
[0340] Optical control of mammalian endogenous transcription and epigenetic states. Konermann S, Brigham M D, Trevino A E, Hsu P D, Heidenreich M, Cong L, Platt R J, Scott D A, Church G M, Zhang F. Nature. August 22; 500(7463):472-6. doi: 10.1038/Nature12466. Epub 2013 Aug. 23 (2013);
[0341] Double Nicking by RNA-Guided CRISPR Cas9 for Enhanced Genome Editing Specificity. Ran, F A., Hsu, P D., Lin, C Y., Gootenberg, J S., Konermann, S., Trevino, A E., Scott, D A., Inoue, A., Matoba, S., Zhang, Y., & Zhang, F. Cell August 28. pii: S0092-8674(13)01015-5 (2013-A);
[0342] DNA targeting specificity of RNA-guided Cas9 nucleases. Hsu, P., Scott, D., Weinstein, J., Ran, F A., Konermann, S., Agarwala, V., Li, Y., Fine, E., Wu, X., Shalem, O., Cradick, T J., Marraffini, L A., Bao, G., & Zhang, F. Nat Biotechnol doi:10.1038/nbt.2647 (2013);
[0343] Genome engineering using the CRISPR-Cas9 system. Ran, F A., Hsu, P D., Wright, J., Agarwala, V., Scott, D A., Zhang, F. Nature Protocols November; 8(11):2281-308 (2013-B);
[0344] Genome-Scale CRISPR-Cas9 Knockout Screening in Human Cells. Shalem, O., Sanjana, N E., Hartenian, E., Shi, X., Scott, D A., Mikkelson, T., Heckl, D., Ebert, B L., Root, D E., Doench, J G., Zhang, F. Science December 12. (2013);
[0345] Crystal structure of cas9 in complex with guide RNA and target DNA. Nishimasu, H., Ran, F A., Hsu, P D., Konermann, S., Shehata, S I., Dohmae, N., Ishitani, R., Zhang, F., Nureki, O. Cell February 27, 156(5):935-49 (2014);
[0346] Genome-wide binding of the CRISPR endonuclease Cas9 in mammalian cells. Wu X., Scott D A., Kriz A J., Chiu A C., Hsu P D., Dadon D B., Cheng A W., Trevino A E., Konermann S., Chen S., Jaenisch R., Zhang F., Sharp PA. Nat Biotechnol. April 20. doi: 10.1038/nbt.2889 (2014);
[0347] CRISPR-Cas9 Knockin Mice for Genome Editing and Cancer Modeling. Platt R J, Chen S, Zhou Y, Yim M J, Swiech L, Kempton H R, Dahlman J E, Parnas O, Eisenhaure T M, Jovanovic M, Graham D B, Jhunjhunwala S, Heidenreich M, Xavier R J, Langer R, Anderson D G, Hacohen N, Regev A, Feng G, Sharp P A, Zhang F. Cell 159(2): 440-455 DOI: 10.1016/j.cell.2014.09.014(2014);
[0348] Development and Applications of CRISPR-Cas9 for Genome Engineering, Hsu P D, Lander E S, Zhang F., Cell. June 5; 157(6):1262-78 (2014).
[0349] Genetic screens in human cells using the CRISPR-Cas9 system, Wang T, Wei J J, Sabatini D M, Lander E S., Science. January 3; 343(6166): 80-84. doi:10.1126/science.1246981 (2014);
[0350] Rational design of highly active sgRNAs for CRISPR-Cas9-mediated gene inactivation, Doench J G, Hartenian E, Graham D B, Tothova Z, Hegde M, Smith I, Sullender M, Ebert B L, Xavier R J, Root D E., (published online 3 Sep. 2014) Nat Biotechnol. December; 32(12):1262-7 (2014);
[0351] In vivo interrogation of gene function in the mammalian brain using CRISPR-Cas9, Swiech L, Heidenreich M, Banerjee A, Habib N, Li Y, Trombetta J, Sur M, Zhang F., (published online 19 Oct. 2014) Nat Biotechnol. January; 33(1):102-6 (2015);
[0352] Genome-scale transcriptional activation by an engineered CRISPR-Cas9 complex, Konermann S, Brigham M D, Trevino A E, Joung J, Abudayyeh O O, Barcena C, Hsu P D, Habib N, Gootenberg J S, Nishimasu H, Nureki O, Zhang F., Nature. January 29; 517(7536):583-8 (2015).
[0353] A split-Cas9 architecture for inducible genome editing and transcription modulation, Zetsche B, Volz S E, Zhang F., (published online 2 Feb. 2015) Nat Biotechnol. February; 33(2):139-42 (2015);
[0354] Genome-wide CRISPR Screen in a Mouse Model of Tumor Growth and Metastasis, Chen S, Sanjana N E, Zheng K, Shalem O, Lee K, Shi X, Scott D A, Song J, Pan J Q, Weissleder R, Lee H, Zhang F, Sharp P A. Cell 160, 1246-1260, Mar. 12, 2015 (multiplex screen in mouse), and
[0355] In vivo genome editing using Staphylococcus aureus Cas9, Ran F A, Cong L, Yan W X, Scott D A, Gootenberg J S, Kriz A J, Zetsche B, Shalem O, Wu X, Makarova K S, Koonin E V, Sharp P A, Zhang F., (published online 1 Apr. 2015), Nature. April 9; 520(7546):186-91 (2015).
[0356] Shalem et al., “High-throughput functional genomics using CRISPR-Cas9,” Nature Reviews Genetics 16, 299-311 (May 2015).
[0357] Xu et al., “Sequence determinants of improved CRISPR sgRNA design,” Genome Research 25, 1147-1157 (August 2015).
[0358] Parnas et al., “A Genome-wide CRISPR Screen in Primary Immune Cells to Dissect Regulatory Networks,” Cell 162, 675-686 (Jul. 30, 2015).
[0359] Ramanan et al., CRISPR-Cas9 cleavage of viral DNA efficiently suppresses hepatitis B virus,” Scientific Reports 5:10833. doi: 10.1038/srep10833 (Jun. 2, 2015)
[0360] Nishimasu et al., Crystal Structure of Staphylococcus aureus Cas9,” Cell 162, 1113-1126 (Aug. 27, 2015)
[0361] BCL11A enhancer dissection by Cas9-mediated in situ saturating mutagenesis, Canver et al., Nature 527(7577):192-7 (Nov. 12, 2015) doi: 10.1038/nature15521. Epub 2015 Sep. 16.
[0362] Cpf1 Is a Single RNA-Guided Endonuclease of a Class 2 CRISPR-Cas System, Zetsche et al., Cell 163, 759-71 (Sep. 25, 2015).
[0363] Discovery and Functional Characterization of Diverse Class 2 CRISPR-Cas Systems, Shmakov et al., Molecular Cell, 60(3), 385-397 doi: 10.1016/j.molcel.2015.10.008 Epub Oct. 22, 2015.
[0364] Rationally engineered Cas9 nucleases with improved specificity, Slaymaker et al., Science 2016 Jan. 1 351(6268): 84-88 doi: 10.1126/science.aad5227. Epub 2015 Dec. 1.
[0365] Gao et al, “Engineered Cpf1 Enzymes with Altered PAM Specificities,” bioRxiv 091611; doi: http://dx.doi.org/10.1101/091611 (Dec. 4, 2016).
[0366] Cox et al., “RNA editing with CRISPR-Cas13,” Science. 2017 Nov. 24; 358(6366):1019-1027. doi: 10.1126/science.aaq0180. Epub 2017 Oct. 25.
[0367] Gaudelli et al. “Programmable base editing of A-T to G-C in genomic DNA without DNA cleavage” Nature 464(551); 464-471 (2017).
[0368] Strecker et al., “Engineering of CRISPR-Cas12b for human genome editing,” Nature Communications volume 10, Article number: 212 (2019).

[0369] each of which is incorporated herein by reference, may be considered in the practice of the instant invention, and discussed briefly below:
[0370] Cong et al. engineered type II CRISPR-Cas systems for use in eukaryotic cells based on both Streptococcus thermophilus Cas9 and also Streptococcus pyogenes Cas9 and demonstrated that Cas9 nucleases can be directed by short RNAs to induce precise cleavage of DNA in human and mouse cells. Their study further showed that Cas9 as converted into a nicking enzyme can be used to facilitate homology-directed repair in eukaryotic cells with minimal mutagenic activity. Additionally, their study demonstrated that multiple guide sequences can be encoded into a single CRISPR array to enable simultaneous editing of several at endogenous genomic loci sites within the mammalian genome, demonstrating easy programmability and wide applicability of the RNA-guided nuclease technology. This ability to use RNA to program sequence specific DNA cleavage in cells defined a new class of genome engineering tools. These studies further showed that other CRISPR loci are likely to be transplantable into mammalian cells and can also mediate mammalian genome cleavage. Importantly, it can be envisaged that several aspects of the CRISPR-Cas system can be further improved to increase its efficiency and versatility.
[0371] Jiang et al. used the clustered, regularly interspaced, short palindromic repeats (CRISPR)-associated Cas9 endonuclease complexed with dual-RNAs to introduce precise mutations in the genomes of Streptococcus pneumoniae and Escherichia coli. The approach relied on dual-RNA:Cas9-directed cleavage at the targeted genomic site to kill unmutated cells and circumvents the need for selectable markers or counter-selection systems. The study reported reprogramming dual-RNA:Cas9 specificity by changing the sequence of short CRISPR RNA (crRNA) to make single- and multinucleotide changes carried on editing templates. The study showed that simultaneous use of two crRNAs enabled multiplex mutagenesis. Furthermore, when the approach was used in combination with recombineering, in S. pneumoniae, nearly 100% of cells that were recovered using the described approach contained the desired mutation, and in E. coli, 65% that were recovered contained the mutation.
[0372] Wang et al. (2013) used the CRISPR-Cas system for the one-step generation of mice carrying mutations in multiple genes which were traditionally generated in multiple steps by sequential recombination in embryonic stem cells and/or time-consuming intercrossing of mice with a single mutation. The CRISPR-Cas system will greatly accelerate the in vivo study of functionally redundant genes and of epistatic gene interactions.
[0373] Konermann et al. (2013) addressed the need in the art for versatile and robust technologies that enable optical and chemical modulation of DNA-binding domains based CRISPR Cas9 enzyme and also Transcriptional Activator Like Effectors
[0374] Ran et al. (2013-A) described an approach that combined a Cas9 nickase mutant with paired guide RNAs to introduce targeted double-strand breaks. This addresses the issue of the Cas9 nuclease from the microbial CRISPR-Cas system being targeted to specific genomic loci by a guide sequence, which can tolerate certain mismatches to the DNA target and thereby promote undesired off-target mutagenesis. Because individual nicks in the genome are repaired with high fidelity, simultaneous nicking via appropriately offset guide RNAs is required for double-stranded breaks and extends the number of specifically recognized bases for target cleavage. The authors demonstrated that using paired nicking can reduce off-target activity by 50- to 1,500-fold in cell lines and to facilitate gene knockout in mouse zygotes without sacrificing on-target cleavage efficiency. This versatile strategy enables a wide variety of genome editing applications that require high specificity.
[0375] Hsu et al. (2013) characterized SpCas9 targeting specificity in human cells to inform the selection of target sites and avoid off-target effects. The study evaluated >700 guide RNA variants and SpCas9-induced indel mutation levels at >100 predicted genomic off-target loci in 293T and 293FT cells. The authors that SpCas9 tolerates mismatches between guide RNA and target DNA at different positions in a sequence-dependent manner, sensitive to the number, position and distribution of mismatches. The authors further showed that SpCas9-mediated cleavage is unaffected by DNA methylation and that the dosage of SpCas9 and guide RNA can be titrated to minimize off-target modification. Additionally, to facilitate mammalian genome engineering applications, the authors reported providing a web-based software tool to guide the selection and validation of target sequences as well as off-target analyses.
[0376] Ran et al. (2013-B) described a set of tools for Cas9-mediated genome editing via non-homologous end joining (NHEJ) or homology-directed repair (HDR) in mammalian cells, as well as generation of modified cell lines for downstream functional studies. To minimize off-target cleavage, the authors further described a double-nicking strategy using the Cas9 nickase mutant with paired guide RNAs. The protocol provided by the authors experimentally derived guidelines for the selection of target sites, evaluation of cleavage efficiency and analysis of off-target activity. The studies showed that beginning with target design, gene modifications can be achieved within as little as 1-2 weeks, and modified clonal cell lines can be derived within 2-3 weeks.
[0377] Shalem et al. described a new way to interrogate gene function on a genome-wide scale. Their studies showed that delivery of a genome-scale CRISPR-Cas9 knockout (GeCKO) library targeted 18,080 genes with 64,751 unique guide sequences enabled both negative and positive selection screening in human cells. First, the authors showed use of the GeCKO library to identify genes essential for cell viability in cancer and pluripotent stem cells. Next, in a melanoma model, the authors screened for genes whose loss is involved in resistance to vemurafenib, a therapeutic that inhibits mutant protein kinase BRAF. Their studies showed that the highest-ranking candidates included previously validated genes NF1 and MED12 as well as novel hits NF2, CUL3, TADA2B, and TADA1. The authors observed a high level of consistency between independent guide RNAs targeting the same gene and a high rate of hit confirmation, and thus demonstrated the promise of genome-scale screening with Cas9.
[0378] Nishimasu et al. reported the crystal structure of Streptococcus pyogenes Cas9 in complex with sgRNA and its target DNA at 2.5 A° resolution. The structure revealed a bilobed architecture composed of target recognition and nuclease lobes, accommodating the sgRNA:DNA heteroduplex in a positively charged groove at their interface. Whereas the recognition lobe is essential for binding sgRNA and DNA, the nuclease lobe contains the HNH and RuvC nuclease domains, which are properly positioned for cleavage of the complementary and non-complementary strands of the target DNA, respectively. The nuclease lobe also contains a carboxyl-terminal domain responsible for the interaction with the protospacer adjacent motif (PAM). This high-resolution structure and accompanying functional analyses have revealed the molecular mechanism of RNA-guided DNA targeting by Cas9, thus paving the way for the rational design of new, versatile genome-editing technologies.
[0379] Wu et al. mapped genome-wide binding sites of a catalytically inactive Cas9 (dCas9) from Streptococcus pyogenes loaded with single guide RNAs (sgRNAs) in mouse embryonic stem cells (mESCs). The authors showed that each of the four sgRNAs tested targets dCas9 to between tens and thousands of genomic sites, frequently characterized by a 5-nucleotide seed region in the sgRNA and an NGG protospacer adjacent motif (PAM). Chromatin inaccessibility decreases dCas9 binding to other sites with matching seed sequences; thus 70% of off-target sites are associated with genes. The authors showed that targeted sequencing of 295 dCas9 binding sites in mESCs transfected with catalytically active Cas9 identified only one site mutated above background levels. The authors proposed a two-state model for Cas9 binding and cleavage, in which a seed match triggers binding but extensive pairing with target DNA is required for cleavage.
[0380] Platt et al. established a Cre-dependent Cas9 knockin mouse. The authors demonstrated in vivo as well as ex vivo genome editing using adeno-associated virus (AAV)-, lentivirus-, or particle-mediated delivery of guide RNA in neurons, immune cells, and endothelial cells.
[0381] Hsu et al. (2014) is a review article that discusses generally CRISPR-Cas9 history from yogurt to genome editing, including genetic screening of cells.
[0382] Wang et al. (2014) relates to a pooled, loss-of-function genetic screening approach suitable for both positive and negative selection that uses a genome-scale lentiviral single guide RNA (sgRNA) library.
[0383] Doench et al. created a pool of sgRNAs, tiling across all possible target sites of a panel of six endogenous mouse and three endogenous human genes and quantitatively assessed their ability to produce null alleles of their target gene by antibody staining and flow cytometry. The authors showed that optimization of the PAM improved activity and also provided an on-line tool for designing sgRNAs.
[0384] Swiech et al. demonstrate that AAV-mediated SpCas9 genome editing can enable reverse genetic studies of gene function in the brain.
[0385] Konermann et al. (2015) discusses the ability to attach multiple effector domains, e.g., transcriptional activator, functional and epigenomic regulators at appropriate positions on the guide such as stem or tetraloop with and without linkers.
[0386] Zetsche et al. demonstrates that the Cas9 enzyme can be split into two and hence the assembly of Cas9 for activation can be controlled.
[0387] Chen et al. relates to multiplex screening by demonstrating that a genome-wide in vivo CRISPR-Cas9 screen in mice reveals genes regulating lung metastasis.
[0388] Ran et al. (2015) relates to SaCas9 and its ability to edit genomes and demonstrates that one cannot extrapolate from biochemical assays.
[0389] Shalem et al. (2015) described ways in which catalytically inactive Cas9 (dCas9) fusions are used to synthetically repress (CRISPRi) or activate (CRISPRa) expression, showing. advances using Cas9 for genome-scale screens, including arrayed and pooled screens, knockout approaches that inactivate genomic loci and strategies that modulate transcriptional activity.
[0390] Xu et al. (2015) assessed the DNA sequence features that contribute to single guide RNA (sgRNA) efficiency in CRISPR-based screens. The authors explored efficiency of CRISPR-Cas9 knockout and nucleotide preference at the cleavage site. The authors also found that the sequence preference for CRISPRi/a is substantially different from that for CRISPR-Cas9 knockout.
[0391] Parnas et al. (2015) introduced genome-wide pooled CRISPR-Cas9 libraries into dendritic cells (DCs) to identify genes that control the induction of tumor necrosis factor (Tnf) by bacterial lipopolysaccharide (LPS). Known regulators of Tlr4 signaling and previously unknown candidates were identified and classified into three functional modules with distinct effects on the canonical responses to LPS.
[0392] Ramanan et al (2015) demonstrated cleavage of viral episomal DNA (cccDNA) in infected cells. The HBV genome exists in the nuclei of infected hepatocytes as a 3.2 kb double-stranded episomal DNA species called covalently closed circular DNA (cccDNA), which is a key component in the HBV life cycle whose replication is not inhibited by current therapies. The authors showed that sgRNAs specifically targeting highly conserved regions of HBV robustly suppresses viral replication and depleted cccDNA.
[0393] Nishimasu et al. (2015) reported the crystal structures of SaCas9 in complex with a single guide RNA (sgRNA) and its double-stranded DNA targets, containing the 5′-TTGAAT-3′ PAM and the 5′-TTGGGT-3′ PAM. A structural comparison of SaCas9 with SpCas9 highlighted both structural conservation and divergence, explaining their distinct PAM specificities and orthologous sgRNA recognition.
[0394] Canver et al. (2015) demonstrated a CRISPR-Cas9-based functional investigation of non-coding genomic elements. The authors we developed pooled CRISPR-Cas9 guide RNA libraries to perform in situ saturating mutagenesis of the human and mouse BCL11A enhancers which revealed critical features of the enhancers.
[0395] Zetsche et al. (2015) reported characterization of Cpf1, a class 2 CRISPR nuclease from Francisella novicida U112 having features distinct from Cas9. Cpf1 is a single RNA-guided endonuclease lacking tracrRNA, utilizes a T-rich protospacer-adjacent motif, and cleaves DNA via a staggered DNA double-stranded break.
[0396] Shmakov et al. (2015) reported three distinct Class 2 CRISPR-Cas systems. Two system CRISPR enzymes (C2c1 and C2c3) contain RuvC-like endonuclease domains distantly related to Cpf1. Unlike Cpf1, C2c1 depends on both crRNA and tracrRNA for DNA cleavage. The third enzyme (C2c2) contains two predicted HEPN RNase domains and is tracrRNA independent.
[0397] Slaymaker et al (2016) reported the use of structure-guided protein engineering to improve the specificity of Streptococcus pyogenes Cas9 (SpCas9). The authors developed “enhanced specificity” SpCas9 (eSpCas9) variants which maintained robust on-target cleavage with reduced off-target effects.
[0398] Cox et al., (2017) reported the use of catalytically inactive Cas13 (dCas13) to direct adenosine-to-inosine deaminase activity by ADAR2 (adenosine deaminase acting on RNA type 2) to transcripts in mammalian cells. The system, referred to as RNA Editing for Programmable A to I Replacement (REPAIR), has no strict sequence constraints and can be used to edit full-length transcripts. The authors further engineered the system to create a high-specificity variant and minimized the system to facilitate viral delivery.

[0399] The methods and tools provided herein are may be designed for use with or Cas13, a type II nuclease that does not make use of tracrRNA. Orthologs of Cas13 have been identified in different bacterial species as described herein. Further type II nucleases with similar properties can be identified using methods described in the art (Shmakov et al. 2015, 60:385-397; Abudayeh et al. 2016, Science, 5; 353(6299)). In particular embodiments, such methods for identifying novel CRISPR effector proteins may comprise the steps of selecting sequences from the database encoding a seed which identifies the presence of a CRISPR Cas locus, identifying loci located within 10 kb of the seed comprising Open Reading Frames (ORFs) in the selected sequences, selecting therefrom loci comprising ORFs of which only a single ORF encodes a novel CRISPR effector having greater than 700 amino acids and no more than 90% homology to a known CRISPR effector. In particular embodiments, the seed is a protein that is common to the CRISPR-Cas system, such as Cast. In further embodiments, the CRISPR array is used as a seed to identify new effector proteins.

[0400] Also, “Dimeric CRISPR RNA-guided Fokl nucleases for highly specific genome editing”, Shengdar Q. Tsai, Nicolas Wyvekens, Cyd Khayter, Jennifer A. Foden, Vishal Thapar, Deepak Reyon, Mathew J. Goodwin, Martin J. Aryee, J. Keith Joung Nature Biotechnology 32(6): 569-77 (2014), relates to dimeric RNA-guided FokI Nucleases that recognize extended sequences and can edit endogenous genes with high efficiencies in human cells.

[0401] Also, Harrington et al. “Programmed DNA destruction by miniature CRISPR-Cas14 enzymes” Science 2018 doi:10/1126/science.aav4293, relates to Cas14.

[0402] With respect to general information on CRISPR/Cas Systems, components thereof, and delivery of such components, including methods, materials, delivery vehicles, vectors, particles, and making and using thereof, including as to amounts and formulations, as well as CRISPR-Cas-expressing eukaryotic cells, CRISPR-Cas expressing eukaryotes, such as a mouse, reference is made to: U.S. Pat. Nos. 8,999,641, 8,993,233, 8,697,359, 8,771,945, 8,795,965, 8,865,406, 8,871,445, 8,889,356, 8,889,418, 8,895,308, 8,906,616, 8,932,814, and 8,945,839; US Patent Publications US 2014-0310830 (U.S. application Ser. No. 14/105,031), US 2014-0287938 A1 (U.S. application Ser. No. 14/213,991), US 2014-0273234 A1 (U.S. application Ser. No. 14/293,674), US2014-0273232 A1 (U.S. application Ser. No. 14/290,575), US 2014-0273231 (U.S. application Ser. No. 14/259,420), US 2014-0256046 A1 (U.S. application Ser. No. 14/226,274), US 2014-0248702 A1 (U.S. application Ser. No. 14/258,458), US 2014-0242700 A1 (U.S. application Ser. No. 14/222,930), US 2014-0242699 A1 (U.S. application Ser. No. 14/183,512), US 2014-0242664 A1 (U.S. application Ser. No. 14/104,990), US 2014-0234972 A1 (U.S. application Ser. No. 14/183,471), US 2014-0227787 A1 (U.S. application Ser. No. 14/256,912), US 2014-0189896 A1 (U.S. application Ser. No. 14/105,035), US 2014-0186958 (U.S. application Ser. No. 14/105,017), US 2014-0186919 A1 (U.S. application Ser. No. 14/104,977), US 2014-0186843 A1 (U.S. application Ser. No. 14/104,900), US 2014-0179770 A1 (U.S. application Ser. No. 14/104,837) and US 2014-0179006 A1 (U.S. application Ser. No. 14/183,486), US 2014-0170753 (U.S. application Ser. No. 14/183,429); US 2015-0184139 (U.S. application Ser. No. 14/324,960); 14/054,414 European Patent Applications EP 2 771 468 (EP13818570.7), EP 2 764 103 (EP13824232.6), and EP 2 784 162 (EP14170383.5); and PCT Patent Publications WO2014/093661 (PCT/US2013/074743), WO2014/093694 (PCT/US2013/074790), WO2014/093595 (PCT/US2013/074611), WO2014/093718 (PCT/US2013/074825), WO2014/093709 (PCT/US2013/074812), WO2014/093622 (PCT/US2013/074667), WO2014/093635 (PCT/US2013/074691), WO2014/093655 (PCT/US2013/074736), WO2014/093712 (PCT/US2013/074819), WO2014/093701 (PCT/US2013/074800), WO2014/018423 (PCT/US2013/051418), WO2014/204723 (PCT/US2014/041790), WO2014/204724 (PCT/US2014/041800), WO2014/204725 (PCT/US2014/041803), WO2014/204726 (PCT/US2014/041804), WO2014/204727 (PCT/US2014/041806), WO2014/204728 (PCT/US2014/041808), WO2014/204729 (PCT/US2014/041809), WO2015/089351 (PCT/US2014/069897), WO2015/089354 (PCT/US2014/069902), WO2015/089364 (PCT/US2014/069925), WO2015/089427 (PCT/US2014/070068), WO2015/089462 (PCT/US2014/070127), WO2015/089419 (PCT/US2014/070057), WO2015/089465 (PCT/US2014/070135), WO2015/089486 (PCT/US2014/070175), WO2015/058052 (PCT/US2014/061077), WO2015/070083 (PCT/US2014/064663), WO2015/089354 (PCT/US2014/069902), WO2015/089351 (PCT/US2014/069897), WO2015/089364 (PCT/US2014/069925), WO2015/089427 (PCT/US2014/070068), WO2015/089473 (PCT/US2014/070152), WO2015/089486 (PCT/US2014/070175), WO2016/049258 (PCT/US2015/051830), WO2016/094867 (PCT/US2015/065385), WO2016/094872 (PCT/US2015/065393), WO2016/094874 (PCT/US2015/065396), WO2016/106244 (PCT/US2015/067177).

[0403] Mention is also made of U.S. application 62/180,709, 17 Jun. 15, PROTECTED GUIDE RNAS (PGRNAS); U.S. application 62/091,455, filed, 12 Dec. 14, PROTECTED GUIDE RNAS (PGRNAS); U.S. application 62/096,708, 24 Dec. 14, PROTECTED GUIDE RNAS (PGRNAS); U.S. applications 62/091,462, 12 Dec. 14, 62/096,324, 23 Dec. 14, 62/180,681, 17 Jun. 2015, and 62/237,496, 5 Oct. 2015, DEAD GUIDES FOR CRISPR TRANSCRIPTION FACTORS; U.S. application 62/091,456, 12 Dec. 14 and 62/180,692, 17 Jun. 2015, ESCORTED AND FUNCTIONALIZED GUIDES FOR CRISPR-CAS SYSTEMS; U.S. application 62/091,461, 12 Dec. 14, DELIVERY, USE AND THERAPEUTIC APPLICATIONS OF THE CRISPR-CAS SYSTEMS AND COMPOSITIONS FOR GENOME EDITING AS TO HEMATOPOETIC STEM CELLS (HSCs); U.S. application 62/094,903, 19 Dec. 14, UNBIASED IDENTIFICATION OF DOUBLE-STRAND BREAKS AND GENOMIC REARRANGEMENT BY GENOME-WISE INSERT CAPTURE SEQUENCING; U.S. application 62/096,761, 24 Dec. 14, ENGINEERING OF SYSTEMS, METHODS AND OPTIMIZED ENZYME AND GUIDE SCAFFOLDS FOR SEQUENCE MANIPULATION; U.S. application 62/098,059, 30 Dec. 14, 62/181,641, 18 Jun. 2015, and 62/181,667, 18 Jun. 2015, RNA-TARGETING SYSTEM; U.S. application 62/096,656, 24 Dec. 14 and 62/181,151, 17 Jun. 2015, CRISPR HAVING OR ASSOCIATED WITH DESTABILIZATION DOMAINS; U.S. application 62/096,697, 24 Dec. 14, CRISPR HAVING OR ASSOCIATED WITH AAV; U.S. application 62/098,158, 30 Dec. 14, ENGINEERED CRISPR COMPLEX INSERTIONAL TARGETING SYSTEMS; U.S. application 62/151,052, 22 Apr. 15, CELLULAR TARGETING FOR EXTRACELLULAR EXOSOMAL REPORTING; U.S. application 62/054,490, 24 Sep. 14, DELIVERY, USE AND THERAPEUTIC APPLICATIONS OF THE CRISPR-CAS SYSTEMS AND COMPOSITIONS FOR TARGETING DISORDERS AND DISEASES USING PARTICLE DELIVERY COMPONENTS; U.S. application 61/939,154, 12-F

[0404] EB-14, SYSTEMS, METHODS AND COMPOSITIONS FOR SEQUENCE MANIPULATION WITH OPTIMIZED FUNCTIONAL CRISPR-CAS SYSTEMS; U.S. application 62/055,484, 25 Sep. 14, SYSTEMS, METHODS AND COMPOSITIONS FOR SEQUENCE MANIPULATION WITH OPTIMIZED FUNCTIONAL CRISPR-CAS SYSTEMS; U.S. application 62/087,537, 4 Dec. 14, SYSTEMS, METHODS AND COMPOSITIONS FOR SEQUENCE MANIPULATION WITH OPTIMIZED FUNCTIONAL CRISPR-CAS SYSTEMS; U.S. application 62/054,651, 24 Sep. 14, DELIVERY, USE AND THERAPEUTIC APPLICATIONS OF THE CRISPR-CAS SYSTEMS AND COMPOSITIONS FOR MODELING COMPETITION OF MULTIPLE CANCER MUTATIONS IN VIVO; U.S. application 62/067,886, 23 Oct. 14, DELIVERY, USE AND THERAPEUTIC APPLICATIONS OF THE CRISPR-CAS SYSTEMS AND COMPOSITIONS FOR MODELING COMPETITION OF MULTIPLE CANCER MUTATIONS IN VIVO; U.S. applications 62/054,675, 24 Sep. 14 and 62/181,002, 17 Jun. 2015, DELIVERY, USE AND THERAPEUTIC APPLICATIONS OF THE CRISPR-CAS SYSTEMS AND COMPOSITIONS IN NEURONAL CELLS/TISSUES; U.S. application 62/054,528, 24 Sep. 14, DELIVERY, USE AND THERAPEUTIC APPLICATIONS OF THE CRISPR-CAS SYSTEMS AND COMPOSITIONS IN IMMUNE DISEASES OR DISORDERS; U.S. application 62/055,454, 25 Sep. 14, DELIVERY, USE AND THERAPEUTIC APPLICATIONS OF THE CRISPR-CAS SYSTEMS AND COMPOSITIONS FOR TARGETING DISORDERS AND DISEASES USING CELL PENETRATION PEPTIDES (CPP); U.S. application 62/055,460, 25 Sep. 14, MULTIFUNCTIONAL-CRISPR COMPLEXES AND/OR OPTIMIZED ENZYME LINKED FUNCTIONAL-CRISPR COMPLEXES; U.S. application 62/087,475, 4 Dec. 14 and 62/181,690, 18 Jun. 2015, FUNCTIONAL SCREENING WITH OPTIMIZED FUNCTIONAL CRISPR-CAS SYSTEMS; U.S. application 62/055,487, 25 Sep. 14, FUNCTIONAL SCREENING WITH OPTIMIZED FUNCTIONAL CRISPR-CAS SYSTEMS; U.S. application 62/087,546, 4 Dec. 14 and 62/181,687, 18 Jun. 2015, MULTIFUNCTIONAL CRISPR COMPLEXES AND/OR OPTIMIZED ENZYME LINKED FUNCTIONAL-CRISPR COMPLEXES; and U.S. application 62/098,285, 30 Dec. 14, CRISPR MEDIATED IN VIVO MODELING AND GENETIC SCREENING OF TUMOR GROWTH AND METASTASIS.

[0405] Mention is made of U.S. applications 62/181,659, 18 Jun. 2015 and 62/207,318, 19 Aug. 2015, ENGINEERING AND OPTIMIZATION OF SYSTEMS, METHODS, ENZYME AND GUIDE SCAFFOLDS OF CAS9 ORTHOLOGS AND VARIANTS FOR SEQUENCE MANIPULATION. Mention is made of U.S. applications 62/181,663, 18 Jun. 2015 and 62/245,264, 22 Oct. 2015, NOVEL CRISPR ENZYMES AND SYSTEMS, U.S. applications 62/181,675, 18 Jun. 2015, 62/285,349, 22 Oct. 2015, 62/296,522, 17 Feb. 2016, and 62/320,231, 8 Apr. 2016, NOVEL CRISPR ENZYMES AND SYSTEMS, U.S. application 62/232,067, 24 Sep. 2015, U.S. application Ser. No. 14/975,085, 18 Dec. 2015, European application No. 16150428.7, U.S. application 62/205,733, 16 Aug. 2015, U.S. application 62/201,542, 5 Aug. 2015, U.S. application 62/193,507, 16 Jul. 2015, and U.S. application 62/181,739, 18 Jun. 2015, each entitled NOVEL CRISPR ENZYMES AND SYSTEMS and of U.S. application 62/245,270, 22 Oct. 2015, NOVEL CRISPR ENZYMES AND SYSTEMS. Mention is also made of U.S. application 61/939,256, 12 Feb. 2014, and WO 2015/089473 (PCT/US2014/070152), 12 Dec. 2014, each entitled ENGINEERING OF SYSTEMS, METHODS AND OPTIMIZED GUIDE COMPOSITIONS WITH NEW ARCHITECTURES FOR SEQUENCE MANIPULATION. Mention is also made of PCT/US2015/045504, 15 Aug. 2015, U.S. application 62/180,699, 17 Jun. 2015, and U.S. application 62/038,358, 17 Aug. 2014, each entitled GENOME EDITING USING CAS9 NICKASES.

[0406] Each of these patents, patent publications, and applications, and all documents cited therein or during their prosecution (“appln cited documents”) and all documents cited or referenced in the appln cited documents, together with any instructions, descriptions, product specifications, and product sheets for any products mentioned therein or in any document therein and incorporated by reference herein, are hereby incorporated herein by reference, and may be employed in the practice of the invention. All documents (e.g., these patents, patent publications and applications and the appln cited documents) are incorporated herein by reference to the same extent as if each individual document was specifically and individually indicated to be incorporated by reference.

[0407] In particular embodiments, pre-complexed guide RNA and CRISPR effector protein, (optionally, adenosine deaminase fused to a CRISPR protein or an adaptor) are delivered as a ribonucleoprotein (RNP). RNPs have the advantage that they lead to rapid editing effects even more so than the RNA method because this process avoids the need for transcription. An important advantage is that both RNP delivery is transient, reducing off-target effects and toxicity issues. Efficient genome editing in different cell types has been observed by Kim et al. (2014, Genome Res. 24(6):1012-9), Paix et al. (2015, Genetics 204(1):47-54), Chu et al. (2016, BMC Biotechnol. 16:4), and Wang et al. (2013, Cell. 9; 153(4):910-8).

[0408] In particular embodiments, the ribonucleoprotein is delivered by way of a polypeptide-based shuttle agent as described in WO2016161516. WO2016161516 describes efficient transduction of polypeptide cargos using synthetic peptides comprising an endosome leakage domain (ELD) operably linked to a cell penetrating domain (CPD), to a histidine-rich domain and a CPD. Similarly these polypeptides can be used for the delivery of CRISPR-effector based RNPs in eukaryotic cells.

### Tale Systems

[0409] As disclosed herein editing can be made by way of the transcription activator-like effector nucleases (TALENs) system. Transcription activator-like effectors (TALEs) can be engineered to bind practically any desired DNA sequence. Exemplary methods of genome editing using the TALEN system can be found for example in Cermak T. Doyle E L. Christian M. Wang L. Zhang Y. Schmidt C, et al. Efficient design and assembly of custom TALEN and other TAL effector-based constructs for DNA targeting. Nucleic Acids Res. 2011; 39:e82; Zhang F. Cong L. Lodato S. Kosuri S. Church G M. Arlotta P Efficient construction of sequence-specific TAL effectors for modulating mammalian transcription. Nat Biotechnol. 2011; 29:149-153 and U.S. Pat. Nos. 8,450,471, 8,440,431 and 8,440,432, all of which are specifically incorporated by reference.

[0410] In advantageous embodiments of the invention, the methods provided herein use isolated, non-naturally occurring, recombinant or engineered DNA binding proteins that comprise TALE monomers as a part of their organizational structure that enable the targeting of nucleic acid sequences with improved efficiency and expanded specificity.

[0411] Naturally occurring TALEs or “wild type TALEs” are nucleic acid binding proteins secreted by numerous species of proteobacteria. TALE polypeptides contain a nucleic acid binding domain composed of tandem repeats of highly conserved monomer polypeptides that are predominantly 33, 34 or 35 amino acids in length and that differ from each other mainly in amino acid positions 12 and 13. In advantageous embodiments the nucleic acid is DNA. As used herein, the term “polypeptide monomers”, or “TALE monomers” will be used to refer to the highly conserved repetitive polypeptide sequences within the TALE nucleic acid binding domain and the term “repeat variable di-residues” or “RVD” will be used to refer to the highly variable amino acids at positions 12 and 13 of the polypeptide monomers. As provided throughout the disclosure, the amino acid residues of the RVD are depicted using the IUPAC single letter code for amino acids. A general representation of a TALE monomer which is comprised within the DNA binding domain is X1-11-(X12X13)-X14-33 or 34 or 35, where the subscript indicates the amino acid position and X represents any amino acid. X12X13 indicate the RVDs. In some polypeptide monomers, the variable amino acid at position 13 is missing or absent and in such polypeptide monomers, the RVD consists of a single amino acid. In such cases the RVD may be alternatively represented as X*, where X represents X12 and (*) indicates that X13 is absent. The DNA binding domain comprises several repeats of TALE monomers and this may be represented as (X1-11-(X12X13)-X14-33 or 34 or 35)z, where in an advantageous embodiment, z is at least 5 to 40. In a further advantageous embodiment, z is at least 10 to 26.

[0412] The TALE monomers have a nucleotide binding affinity that is determined by the identity of the amino acids in its RVD. For example, polypeptide monomers with an RVD of NI preferentially bind to adenine (A), polypeptide monomers with an RVD of NG preferentially bind to thymine (T), polypeptide monomers with an RVD of HD preferentially bind to cytosine (C) and polypeptide monomers with an RVD of NN preferentially bind to both adenine (A) and guanine (G). In yet another embodiment of the invention, polypeptide monomers with an RVD of IG preferentially bind to T. Thus, the number and order of the polypeptide monomer repeats in the nucleic acid binding domain of a TALE determines its nucleic acid target specificity. In still further embodiments of the invention, polypeptide monomers with an RVD of NS recognize all four base pairs and may bind to A, T, G or C. The structure and function of TALEs is further described in, for example, Moscou et al., Science 326:1501 (2009); Boch et al., Science 326:1509-1512 (2009); and Zhang et al., Nature Biotechnology 29:149-153 (2011), each of which is incorporated by reference in its entirety.

[0413] The TALE polypeptides used in methods of the invention are isolated, non-naturally occurring, recombinant or engineered nucleic acid-binding proteins that have nucleic acid or DNA binding regions containing polypeptide monomer repeats that are designed to target specific nucleic acid sequences.

[0414] As described herein, polypeptide monomers having an RVD of HN or NH preferentially bind to guanine and thereby allow the generation of TALE polypeptides with high binding specificity for guanine containing target nucleic acid sequences. In a preferred embodiment of the invention, polypeptide monomers having RVDs RN, NN, NK, SN, NH, KN, HN, NQ, HH, RG, KH, RH and SS preferentially bind to guanine. In a much more advantageous embodiment of the invention, polypeptide monomers having RVDs RN, NK, NQ, HH, KH, RH, SS and SN preferentially bind to guanine and thereby allow the generation of TALE polypeptides with high binding specificity for guanine containing target nucleic acid sequences. In an even more advantageous embodiment of the invention, polypeptide monomers having RVDs HH, KH, NH, NK, NQ, RH, RN and SS preferentially bind to guanine and thereby allow the generation of TALE polypeptides with high binding specificity for guanine containing target nucleic acid sequences. In a further advantageous embodiment, the RVDs that have high binding specificity for guanine are RN, NH RH and KH. Furthermore, polypeptide monomers having an RVD of NV preferentially bind to adenine and guanine. In more preferred embodiments of the invention, polypeptide monomers having RVDs of H*, HA, KA, N*, NA, NC, NS, RA, and S* bind to adenine, guanine, cytosine and thymine with comparable affinity.

[0415] The predetermined N-terminal to C-terminal order of the one or more polypeptide monomers of the nucleic acid or DNA binding domain determines the corresponding predetermined target nucleic acid sequence to which the TALE polypeptides will bind. As used herein the polypeptide monomers and at least one or more half polypeptide monomers are “specifically ordered to target” the genomic locus or gene of interest. In plant genomes, the natural TALE-binding sites always begin with a thymine (T), which may be specified by a cryptic signal within the non-repetitive N-terminus of the TALE polypeptide; in some cases this region may be referred to as repeat 0. In animal genomes, TALE binding sites do not necessarily have to begin with a thymine (T) and TALE polypeptides may target DNA sequences that begin with T, A, G or C. The tandem repeat of TALE monomers always ends with a half-length repeat or a stretch of sequence that may share identity with only the first 20 amino acids of a repetitive full length TALE monomer and this half repeat may be referred to as a half-monomer (FIG. 8), which is included in the term “TALE monomer”. Therefore, it follows that the length of the nucleic acid or DNA being targeted is equal to the number of full polypeptide monomers plus two.

[0416] As described in Zhang et al., Nature Biotechnology 29:149-153 (2011), TALE polypeptide binding efficiency may be increased by including amino acid sequences from the “capping regions” that are directly N-terminal or C-terminal of the DNA binding region of naturally occurring TALEs into the engineered TALEs at positions N-terminal or C-terminal of the engineered TALE DNA binding region. Thus, in certain embodiments, the TALE polypeptides described herein further comprise an N-terminal capping region and/or a C-terminal capping region.

An exemplary amino acid sequence of a N-terminal capping region is:

(SEQ ID NO: 45,533)
M D P I R S R T P S P A R E L L S G P Q P D G V Q
P T A D R G V S P P A G G P L D G L P A R R T M S
R T R L P S P P A P S P A F S A D S F S D L L R Q
F D P S L F N T S L F D S L P P F G A H H T E A A
T G E W D E V Q S G L R A A D A P P P T M R V A V
T A A R P P R A K P A P R R R A A Q P S D A S P A
A Q V D L R T L G Y S Q Q Q Q E K I K P K V R S T
V A Q H H E A L V G H G F T H A H I V A L S Q H P
A A L G T V A V K Y Q D M I A A L P E A T H E A I
V G V G K Q W S G A R A L E A L L T V A G E L R G
P P L Q L D T G Q L L K I A K R G G V T A V E A V
H A W R N A L T G A P L N

An exemplary amino acid sequence of a C-terminal capping region is:

(SEQ ID NO: 45,534)
R P A L E S I V A Q L S R P D P A L A A L T N D H
L V A L A C L G G R P A L D A V K K G L P H A P A
L I K R T N R R I P E R T S H R V A D H A Q V V R
V L G F F Q C H S H P A Q A F D D A M T Q F G M S
R H G L L Q L F R R V G V T E L E A R S G T L P P
A S Q R W D R I L Q A S G M K R A K P S P T S T Q
T P D Q A S L H A F A D S L E R D L D A P S P M H
E G D Q T R A S

[0417] As used herein the predetermined “N-terminus” to “C terminus” orientation of the N-terminal capping region, the DNA binding domain comprising the repeat TALE monomers and the C-terminal capping region provide structural basis for the organization of different domains in the d-TALEs or polypeptides of the invention.

[0418] The entire N-terminal and/or C-terminal capping regions are not necessary to enhance the binding activity of the DNA binding region. Therefore, in certain embodiments, fragments of the N-terminal and/or C-terminal capping regions are included in the TALE polypeptides described herein.

[0419] In certain embodiments, the TALE polypeptides described herein contain a N-terminal capping region fragment that included at least 10, 20, 30, 40, 50, 54, 60, 70, 80, 87, 90, 94, 100, 102, 110, 117, 120, 130, 140, 147, 150, 160, 170, 180, 190, 200, 210, 220, 230, 240, 250, 260 or 270 amino acids of an N-terminal capping region. In certain embodiments, the N-terminal capping region fragment amino acids are of the C-terminus (the DNA-binding region proximal end) of an N-terminal capping region. As described in Zhang et al., Nature Biotechnology 29:149-153 (2011), N-terminal capping region fragments that include the C-terminal 240 amino acids enhance binding activity equal to the full length capping region, while fragments that include the C-terminal 147 amino acids retain greater than 80% of the efficacy of the full length capping region, and fragments that include the C-terminal 117 amino acids retain greater than 50% of the activity of the full-length capping region.

[0420] In some embodiments, the TALE polypeptides described herein contain a C-terminal capping region fragment that included at least 6, 10, 20, 30, 37, 40, 50, 60, 68, 70, 80, 90, 100, 110, 120, 127, 130, 140, 150, 155, 160, 170, 180 amino acids of a C-terminal capping region. In certain embodiments, the C-terminal capping region fragment amino acids are of the N-terminus (the DNA-binding region proximal end) of a C-terminal capping region. As described in Zhang et al., Nature Biotechnology 29:149-153 (2011), C-terminal capping region fragments that include the C-terminal 68 amino acids enhance binding activity equal to the full length capping region, while fragments that include the C-terminal 20 amino acids retain greater than 50% of the efficacy of the full length capping region.

[0421] In certain embodiments, the capping regions of the TALE polypeptides described herein do not need to have identical sequences to the capping region sequences provided herein. Thus, in some embodiments, the capping region of the TALE polypeptides described herein have sequences that are at least 50%, 60%, 70%, 80%, 85%, 90%, 91%, 92%, 93%, 94%, 95%, 96%, 97%, 98% or 99% identical or share identity to the capping region amino acid sequences provided herein. Sequence identity is related to sequence homology. Homology comparisons may be conducted by eye, or more usually, with the aid of readily available sequence comparison programs. These commercially available computer programs may calculate percent (%) homology between two or more sequences and may also calculate the sequence identity shared by two or more amino acid or nucleic acid sequences. In some preferred embodiments, the capping region of the TALE polypeptides described herein have sequences that are at least 95% identical or share identity to the capping region amino acid sequences provided herein.

[0422] Sequence homologies may be generated by any of a number of computer programs known in the art, which include but are not limited to BLAST or FASTA. Suitable computer program for carrying out alignments like the GCG Wisconsin Bestfit package may also be used. Once the software has produced an optimal alignment, it is possible to calculate % homology, preferably % sequence identity. The software typically does this as part of the sequence comparison and generates a numerical result.

[0423] In advantageous embodiments described herein, the TALE polypeptides of the invention include a nucleic acid binding domain linked to the one or more effector domains. The terms “effector domain” or “regulatory and functional domain” refer to a polypeptide sequence that has an activity other than binding to the nucleic acid sequence recognized by the nucleic acid binding domain. By combining a nucleic acid binding domain with one or more effector domains, the polypeptides of the invention may be used to target the one or more functions or activities mediated by the effector domain to a particular target DNA sequence to which the nucleic acid binding domain specifically binds.

[0424] In some embodiments of the TALE polypeptides described herein, the activity mediated by the effector domain is a biological activity. For example, in some embodiments the effector domain is a transcriptional inhibitor (i.e., a repressor domain), such as an mSin interaction domain (SID). SID4X domain or a Krüppel-associated box (KRAB) or fragments of the KRAB domain. In some embodiments the effector domain is an enhancer of transcription (i.e. an activation domain), such as the VP16, VP64 or p65 activation domain. In some embodiments, the nucleic acid binding is linked, for example, with an effector domain that includes but is not limited to a transposase, integrase, recombinase, resolvase, invertase, protease, DNA methyltransferase, DNA demethylase, histone acetylase, histone deacetylase, nuclease, transcriptional repressor, transcriptional activator, transcription factor recruiting, protein nuclear-localization signal or cellular uptake signal.

[0425] In some embodiments, the effector domain is a protein domain which exhibits activities which include but are not limited to transposase activity, integrase activity, recombinase activity, resolvase activity, invertase activity, protease activity, DNA methyltransferase activity, DNA demethylase activity, histone acetylase activity, histone deacetylase activity, nuclease activity, nuclear-localization signaling activity, transcriptional repressor activity, transcriptional activator activity, transcription factor recruiting activity, or cellular uptake signaling activity. Other preferred embodiments of the invention may include any combination the activities described herein.

### ZN-Finger Nucleases

[0426] Other preferred tools for genome editing for use in the context of this invention include zinc finger systems. One type of programmable DNA-binding domain is provided by artificial zinc-finger (ZF) technology, which involves arrays of ZF modules to target new DNA-binding sites in the genome. Each finger module in a ZF array targets three DNA bases. A customized array of individual zinc finger domains is assembled into a ZF protein (ZFP).

[0427] ZFPs can comprise a functional domain. The first synthetic zinc finger nucleases (ZFNs) were developed by fusing a ZF protein to the catalytic domain of the Type IIS restriction enzyme Fokl. (Kim, Y. G. et al., 1994, Chimeric restriction endonuclease, Proc. Natl. Acad. Sci. U.S.A. 91, 883-887; Kim, Y. G. et al., 1996, Hybrid restriction enzymes: zinc finger fusions to Fok I cleavage domain. Proc. Natl. Acad. Sci. U.S.A. 93, 1156-1160). Increased cleavage specificity can be attained with decreased off target activity by use of paired ZFN heterodimers, each targeting different nucleotide sequences separated by a short spacer. (Doyon, Y. et al., 2011, Enhancing zinc-finger-nuclease activity with improved obligate heterodimeric architectures. Nat. Methods 8, 74-79). ZFPs can also be designed as transcription activators and repressors and have been used to target many genes in a wide variety of organisms. Exemplary methods of genome editing using ZFNs can be found for example in U.S. Pat. Nos. 6,534,261, 6,607,882, 6,746,838, 6,794,136, 6,824,978, 6,866,997, 6,933,113, 6,979,539, 7,013,219, 7,030,215, 7,220,719, 7,241,573, 7,241,574, 7,585,849, 7,595,376, 6,903,185, and 6,479,626, all of which are specifically incorporated by reference.

### Meganucleases

[0428] As disclosed herein editing can be made by way of meganucleases, which are endodeoxyribonucleases characterized by a large recognition site (double-stranded DNA sequences of 12 to 40 base pairs). Exemplary method for using meganucleases can be found in U.S. Pat. Nos. 8,163,514; 8,133,697; 8,021,867; 8,119,361; 8,119,381; 8,124,369; and 8,129,134, which are specifically incorporated by reference.

### RNAi

[0429] In certain embodiments, the genetic modifying agent is RNAi (e.g., shRNA). As used herein, “gene silencing” or “gene silenced” in reference to an activity of an RNAi molecule, for example a siRNA or miRNA refers to a decrease in the mRNA level in a cell for a target gene by at least about 5%, about 10%, about 20%, about 30%, about 40%, about 50%, about 60%, about 70%, about 80%, about 90%, about 95%, about 99%, about 100% of the mRNA level found in the cell without the presence of the miRNA or RNA interference molecule. In one preferred embodiment, the mRNA levels are decreased by at least about 70%, about 80%, about 90%, about 95%, about 99%, about 100%.

[0430] As used herein, the term “RNAi” refers to any type of interfering RNA, including but not limited to, siRNAi, shRNAi, endogenous microRNA and artificial microRNA. For instance, it includes sequences previously identified as siRNA, regardless of the mechanism of down-stream processing of the RNA (i.e. although siRNAs are believed to have a specific method of in vivo processing resulting in the cleavage of mRNA, such sequences can be incorporated into the vectors in the context of the flanking sequences described herein). The term “RNAi” can include both gene silencing RNAi molecules, and also RNAi effector molecules which activate the expression of a gene.

[0431] As used herein, a “siRNA” refers to a nucleic acid that forms a double stranded RNA, which double stranded RNA has the ability to reduce or inhibit expression of a gene or target gene when the siRNA is present or expressed in the same cell as the target gene. The double stranded RNA siRNA can be formed by the complementary strands. In one embodiment, a siRNA refers to a nucleic acid that can form a double stranded siRNA. The sequence of the siRNA can correspond to the full-length target gene, or a subsequence thereof. Typically, the siRNA is at least about 15-50 nucleotides in length (e.g., each complementary sequence of the double stranded siRNA is about 15-50 nucleotides in length, and the double stranded siRNA is about 15-50 base pairs in length, preferably about 19-30 base nucleotides, preferably about 20-25 nucleotides in length, e.g., 20, 21, 22, 23, 24, 25, 26, 27, 28, 29, or 30 nucleotides in length).

[0432] As used herein “shRNA” or “small hairpin RNA” (also called stem loop) is a type of siRNA. In one embodiment, these shRNAs are composed of a short, e.g. about 19 to about 25 nucleotide, antisense strand, followed by a nucleotide loop of about 5 to about 9 nucleotides, and the analogous sense strand. Alternatively, the sense strand can precede the nucleotide loop structure and the antisense strand can follow.

[0433] The terms “microRNA” or “miRNA” are used interchangeably herein are endogenous RNAs, some of which are known to regulate the expression of protein-coding genes at the posttranscriptional level. Endogenous microRNAs are small RNAs naturally present in the genome that are capable of modulating the productive utilization of mRNA. The term artificial microRNA includes any type of RNA sequence, other than endogenous microRNA, which is capable of modulating the productive utilization of mRNA. MicroRNA sequences have been described in publications such as Lim, et al., Genes & Development, 17, p. 991-1008 (2003), Lim et al Science 299, 1540 (2003), Lee and Ambros Science, 294, 862 (2001), Lau et al., Science 294, 858-861 (2001), Lagos-Quintana et al, Current Biology, 12, 735-739 (2002), Lagos Quintana et al, Science 294, 853-857 (2001), and Lagos-Quintana et al, RNA, 9, 175-179 (2003), which are incorporated by reference. Multiple microRNAs can also be incorporated into a precursor molecule. Furthermore, miRNA-like stem-loops can be expressed in cells as a vehicle to deliver artificial miRNAs and short interfering RNAs (siRNAs) for the purpose of modulating the expression of endogenous genes through the miRNA and or RNAi pathways.

[0434] As used herein, “double stranded RNA” or “dsRNA” refers to RNA molecules that are comprised of two strands. Double-stranded molecules include those comprised of a single RNA molecule that doubles back on itself to form a two-stranded structure. For example, the stem loop structure of the progenitor molecules from which the single-stranded miRNA is derived, called the pre-miRNA (Bartel et al. 2004. Cell 1 16:281-297), comprises a dsRNA molecule.

### Antibodies

[0435] In certain embodiments, the one or more agents is an antibody. The term “antibody” is used interchangeably with the term “immunoglobulin” herein, and includes intact antibodies, fragments of antibodies, e.g., Fab, F(ab′)2 fragments, and intact antibodies and fragments that have been mutated either in their constant and/or variable region (e.g., mutations to produce chimeric, partially humanized, or fully humanized antibodies, as well as to produce antibodies with a desired trait, e.g., enhanced binding and/or reduced FcR binding). The term “fragment” refers to a part or portion of an antibody or antibody chain comprising fewer amino acid residues than an intact or complete antibody or antibody chain. Fragments can be obtained via chemical or enzymatic treatment of an intact or complete antibody or antibody chain. Fragments can also be obtained by recombinant means. Exemplary fragments include Fab, Fab′, F(ab′)2, Fabc, Fd, dAb, V_{HH} and scFv and/or Fv fragments.

[0436] As used herein, a preparation of antibody protein having less than about 50% of non-antibody protein (also referred to herein as a “contaminating protein”), or of chemical precursors, is considered to be “substantially free.” 40%, 30%, 20%, 10% and more preferably 5% (by dry weight), of non-antibody protein, or of chemical precursors is considered to be substantially free. When the antibody protein or biologically active portion thereof is recombinantly produced, it is also preferably substantially free of culture medium, i.e., culture medium represents less than about 30%, preferably less than about 20%, more preferably less than about 10%, and most preferably less than about 5% of the volume or mass of the protein preparation.

[0437] The term “antigen-binding fragment” refers to a polypeptide fragment of an immunoglobulin or antibody that binds antigen or competes with intact antibody (i.e., with the intact antibody from which they were derived) for antigen binding (i.e., specific binding). As such these antibodies or fragments thereof are included in the scope of the invention, provided that the antibody or fragment binds specifically to a target molecule.

[0438] It is intended that the term “antibody” encompass any Ig class or any Ig subclass (e.g. the IgG1, IgG2, IgG3, and IgG4 subclassess of IgG) obtained from any source (e.g., humans and non-human primates, and in rodents, lagomorphs, caprines, bovines, equines, ovines, etc.).

[0439] The term “Ig class” or “immunoglobulin class”, as used herein, refers to the five classes of immunoglobulin that have been identified in humans and higher mammals, IgG, IgM, IgA, IgD, and IgE. The term “Ig subclass” refers to the two subclasses of IgM (H and L), three subclasses of IgA (IgA1, IgA2, and secretory IgA), and four subclasses of IgG (IgG1, IgG2, IgG3, and IgG4) that have been identified in humans and higher mammals. The antibodies can exist in monomeric or polymeric form; for example, IgM antibodies exist in pentameric form, and IgA antibodies exist in monomeric, dimeric or multimeric form.

[0440] The term “IgG subclass” refers to the four subclasses of immunoglobulin class IgG-IgG1, IgG2, IgG3, and IgG4 that have been identified in humans and higher mammals by the heavy chains of the immunoglobulins, V1-γ4, respectively. The term “single-chain immunoglobulin” or “single-chain antibody” (used interchangeably herein) refers to a protein having a two-polypeptide chain structure consisting of a heavy and a light chain, said chains being stabilized, for example, by interchain peptide linkers, which has the ability to specifically bind antigen. The term “domain” refers to a globular region of a heavy or light chain polypeptide comprising peptide loops (e.g., comprising 3 to 4 peptide loops) stabilized, for example, by (3 pleated sheet and/or intrachain disulfide bond. Domains are further referred to herein as “constant” or “variable”, based on the relative lack of sequence variation within the domains of various class members in the case of a “constant” domain, or the significant variation within the domains of various class members in the case of a “variable” domain. Antibody or polypeptide “domains” are often referred to interchangeably in the art as antibody or polypeptide “regions”. The “constant” domains of an antibody light chain are referred to interchangeably as “light chain constant regions”, “light chain constant domains”, “CL” regions or “CL” domains. The “constant” domains of an antibody heavy chain are referred to interchangeably as “heavy chain constant regions”, “heavy chain constant domains”, “CH” regions or “CH” domains). The “variable” domains of an antibody light chain are referred to interchangeably as “light chain variable regions”, “light chain variable domains”, “VL” regions or “VL” domains). The “variable” domains of an antibody heavy chain are referred to interchangeably as “heavy chain constant regions”, “heavy chain constant domains”, “VH” regions or “VH” domains).

[0441] The term “region” can also refer to a part or portion of an antibody chain or antibody chain domain (e.g., a part or portion of a heavy or light chain or a part or portion of a constant or variable domain, as defined herein), as well as more discrete parts or portions of said chains or domains. For example, light and heavy chains or light and heavy chain variable domains include “complementarity determining regions” or “CDRs” interspersed among “framework regions” or “FRs”, as defined herein.

[0442] The term “conformation” refers to the tertiary structure of a protein or polypeptide (e.g., an antibody, antibody chain, domain or region thereof). For example, the phrase “light (or heavy) chain conformation” refers to the tertiary structure of a light (or heavy) chain variable region, and the phrase “antibody conformation” or “antibody fragment conformation” refers to the tertiary structure of an antibody or fragment thereof.

[0443] The term “antibody-like protein scaffolds” or “engineered protein scaffolds” broadly encompasses proteinaceous non-immunoglobulin specific-binding agents, typically obtained by combinatorial engineering (such as site-directed random mutagenesis in combination with phage display or other molecular selection techniques). Usually, such scaffolds are derived from robust and small soluble monomeric proteins (such as Kunitz inhibitors or lipocalins) or from a stably folded extra-membrane domain of a cell surface receptor (such as protein A, fibronectin or the ankyrin repeat).

[0444] Such scaffolds have been extensively reviewed in Binz et al. (Engineering novel binding proteins from nonimmunoglobulin domains. Nat Biotechnol 2005, 23:1257-1268), Gebauer and Skerra (Engineered protein scaffolds as next-generation antibody therapeutics. Curr Opin Chem Biol. 2009, 13:245-55), Gill and Damle (Biopharmaceutical drug discovery using novel protein scaffolds. Curr Opin Biotechnol 2006, 17:653-658), Skerra (Engineered protein scaffolds for molecular recognition. J Mol Recognit 2000, 13:167-187), and Skerra (Alternative non-antibody scaffolds for molecular recognition. Curr Opin Biotechnol 2007, 18:295-304), and include without limitation affibodies, based on the Z-domain of staphylococcal protein A, a three-helix bundle of 58 residues providing an interface on two of its alpha-helices (Nygren, Alternative binding proteins: Affibody binding proteins developed from a small three-helix bundle scaffold. FEBS J 2008, 275:2668-2676); engineered Kunitz domains based on a small (ca. 58 residues) and robust, disulphide-crosslinked serine protease inhibitor, typically of human origin (e.g. LACI-D1), which can be engineered for different protease specificities (Nixon and Wood, Engineered protein inhibitors of proteases. Curr Opin Drug Discov Dev 2006, 9:261-268); monobodies or adnectins based on the 10th extracellular domain of human fibronectin III (10Fn3), which adopts an Ig-like beta-sandwich fold (94 residues) with 2-3 exposed loops, but lacks the central disulphide bridge (Koide and Koide, Monobodies: antibody mimics based on the scaffold of the fibronectin type III domain. Methods Mol Biol 2007, 352:95-109); anticalins derived from the lipocalins, a diverse family of eight-stranded beta-barrel proteins (ca. 180 residues) that naturally form binding sites for small ligands by means of four structurally variable loops at the open end, which are abundant in humans, insects, and many other organisms (Skerra, Alternative binding proteins: Anticalins—harnessing the structural plasticity of the lipocalin ligand pocket to engineer novel binding activities. FEBS J 2008, 275:2677-2683); DARPins, designed ankyrin repeat domains (166 residues), which provide a rigid interface arising from typically three repeated beta-turns (Stumpp et al., DARPins: a new generation of protein therapeutics. Drug Discov Today 2008, 13:695-701); avimers (multimerized LDLR-A module) (Silverman et al., Multivalent avimer proteins evolved by exon shuffling of a family of human receptor domains. Nat Biotechnol 2005, 23:1556-1561); and cysteine-rich knottin peptides (Kolmar, Alternative binding proteins: biological activity and therapeutic potential of cystine-knot miniproteins. FEBS J 2008, 275:2684-2690).

[0445] “Specific binding” of an antibody means that the antibody exhibits appreciable affinity for a particular antigen or epitope and, generally, does not exhibit significant cross reactivity. “Appreciable” binding includes binding with an affinity of at least 25 μM. Antibodies with affinities greater than 1×10⁷ M⁻¹ (or a dissociation coefficient of 1 μM or less or a dissociation coefficient of 1 nm or less) typically bind with correspondingly greater specificity. Values intermediate of those set forth herein are also intended to be within the scope of the present invention and antibodies of the invention bind with a range of affinities, for example, 100 nM or less, 75 nM or less, 50 nM or less, 25 nM or less, for example 10 nM or less, 5 nM or less, 1 nM or less, or in embodiments 500 pM or less, 100 pM or less, 50 pM or less or 25 pM or less. An antibody that “does not exhibit significant crossreactivity” is one that will not appreciably bind to an entity other than its target (e.g., a different epitope or a different molecule). For example, an antibody that specifically binds to a target molecule will appreciably bind the target molecule but will not significantly react with non-target molecules or peptides. An antibody specific for a particular epitope will, for example, not significantly crossreact with remote epitopes on the same protein or peptide. Specific binding can be determined according to any art-recognized means for determining such binding. Preferably, specific binding is determined according to Scatchard analysis and/or competitive binding assays.

[0446] As used herein, the term “affinity” refers to the strength of the binding of a single antigen-combining site with an antigenic determinant. Affinity depends on the closeness of stereochemical fit between antibody combining sites and antigen determinants, on the size of the area of contact between them, on the distribution of charged and hydrophobic groups, etc. Antibody affinity can be measured by equilibrium dialysis or by the kinetic BIACORE™ method. The dissociation constant, Kd, and the association constant, Ka, are quantitative measures of affinity.

[0447] As used herein, the term “monoclonal antibody” refers to an antibody derived from a clonal population of antibody-producing cells (e.g., B lymphocytes or B cells) which is homogeneous in structure and antigen specificity. The term “polyclonal antibody” refers to a plurality of antibodies originating from different clonal populations of antibody-producing cells which are heterogeneous in their structure and epitope specificity but which recognize a common antigen. Monoclonal and polyclonal antibodies may exist within bodily fluids, as crude preparations, or may be purified, as described herein.

[0448] The term “binding portion” of an antibody (or “antibody portion”) includes one or more complete domains, e.g., a pair of complete domains, as well as fragments of an antibody that retain the ability to specifically bind to a target molecule. It has been shown that the binding function of an antibody can be performed by fragments of a full-length antibody. Binding fragments are produced by recombinant DNA techniques, or by enzymatic or chemical cleavage of intact immunoglobulins. Binding fragments include Fab, Fab′, F(ab′)2, Fabc, Fd, dAb, Fv, single chains, single-chain antibodies, e.g., scFv, and single domain antibodies.

[0449] “Humanized” forms of non-human (e.g., murine) antibodies are chimeric antibodies that contain minimal sequence derived from non-human immunoglobulin. For the most part, humanized antibodies are human immunoglobulins (recipient antibody) in which residues from a hypervariable region of the recipient are replaced by residues from a hypervariable region of a non-human species (donor antibody) such as mouse, rat, rabbit or nonhuman primate having the desired specificity, affinity, and capacity. In some instances, FR residues of the human immunoglobulin are replaced by corresponding non-human residues. Furthermore, humanized antibodies may comprise residues that are not found in the recipient antibody or in the donor antibody. These modifications are made to further refine antibody performance. In general, the humanized antibody will comprise substantially all of at least one, and typically two, variable domains, in which all or substantially all of the hypervariable regions correspond to those of a non-human immunoglobulin and all or substantially all of the FR regions are those of a human immunoglobulin sequence. The humanized antibody optionally also will comprise at least a portion of an immunoglobulin constant region (Fc), typically that of a human immunoglobulin.

[0450] Examples of portions of antibodies or epitope-binding proteins encompassed by the present definition include: (i) the Fab fragment, having V_{L}, C_{L}, V_{H} and C_{H}1 domains; (ii) the Fab′ fragment, which is a Fab fragment having one or more cysteine residues at the C-terminus of the C_{H}1 domain; (iii) the Fd fragment having V_{H} and C_{H}1 domains; (iv) the Fd′ fragment having V_{H} and C_{H}1 domains and one or more cysteine residues at the C-terminus of the CHI domain; (v) the Fv fragment having the V_{L} and V_{H} domains of a single arm of an antibody; (vi) the dAb fragment (Ward et al., 341 Nature 544 (1989)) which consists of a V_{H} domain or a V_{L} domain that binds antigen; (vii) isolated CDR regions or isolated CDR regions presented in a functional framework; (viii) F(ab′)₂ fragments which are bivalent fragments including two Fab′ fragments linked by a disulphide bridge at the hinge region; (ix) single chain antibody molecules (e.g., single chain Fv; scFv) (Bird et al., 242 Science 423 (1988); and Huston et al., 85 PNAS 5879 (1988)); (x) “diabodies” with two antigen binding sites, comprising a heavy chain variable domain (V_{H}) connected to a light chain variable domain (V_{L}) in the same polypeptide chain (see, e.g., EP 404,097; WO 93/11161; Hollinger et al., 90 PNAS 6444 (1993)); (xi) “linear antibodies” comprising a pair of tandem Fd segments (V_{H}—Cₕ1-V_{H}-Cₕ1) which, together with complementary light chain polypeptides, form a pair of antigen binding regions (Zapata et al., Protein Eng. 8(10):1057-62 (1995); and U.S. Pat. No. 5,641,870).

[0451] As used herein, a “blocking” antibody or an antibody “antagonist” is one which inhibits or reduces biological activity of the antigen(s) it binds. In certain embodiments, the blocking antibodies or antagonist antibodies or portions thereof described herein completely inhibit the biological activity of the antigen(s).

[0452] Antibodies may act as agonists or antagonists of the recognized polypeptides. For example, the present invention includes antibodies which disrupt receptor/ligand interactions either partially or fully. The invention features both receptor-specific antibodies and ligand-specific antibodies. The invention also features receptor-specific antibodies which do not prevent ligand binding but prevent receptor activation. Receptor activation (i.e., signaling) may be determined by techniques described herein or otherwise known in the art. For example, receptor activation can be determined by detecting the phosphorylation (e.g., tyrosine or serine/threonine) of the receptor or of one of its down-stream substrates by immunoprecipitation followed by western blot analysis. In specific embodiments, antibodies are provided that inhibit ligand activity or receptor activity by at least 95%, at least 90%, at least 85%, at least 80%, at least 75%, at least 70%, at least 60%, or at least 50% of the activity in absence of the antibody.

[0453] The invention also features receptor-specific antibodies which both prevent ligand binding and receptor activation as well as antibodies that recognize the receptor-ligand complex. Likewise, encompassed by the invention are neutralizing antibodies which bind the ligand and prevent binding of the ligand to the receptor, as well as antibodies which bind the ligand, thereby preventing receptor activation, but do not prevent the ligand from binding the receptor. Further included in the invention are antibodies which activate the receptor. These antibodies may act as receptor agonists, i.e., potentiate or activate either all or a subset of the biological activities of the ligand-mediated receptor activation, for example, by inducing dimerization of the receptor. The antibodies may be specified as agonists, antagonists or inverse agonists for biological activities comprising the specific biological activities of the peptides disclosed herein. The antibody agonists and antagonists can be made using methods known in the art. See, e.g., PCT publication WO 96/40281; U.S. Pat. No. 5,811,097; Deng et al., Blood 92(6):1981-1988 (1998); Chen et al., Cancer Res. 58(16):3668-3678 (1998); Harrop et al., J. Immunol. 161(4):1786-1794 (1998); Zhu et al., Cancer Res. 58(15):3209-3214 (1998); Yoon et al., J. Immunol. 160(7):3170-3179 (1998); Prat et al., J. Cell. Sci. III (Pt2):237-247 (1998); Pitard et al., J. Immunol. Methods 205(2):177-190 (1997); Liautard et al., Cytokine 9(4):233-241 (1997); Carlson et al., J. Biol. Chem. 272(17):11295-11301 (1997); Taryman et al., Neuron 14(4):755-762 (1995); Muller et al., Structure 6(9):1153-1167 (1998); Bartunek et al., Cytokine 8(1):14-20 (1996).

[0454] The antibodies as defined for the present invention include derivatives that are modified, i.e., by the covalent attachment of any type of molecule to the antibody such that covalent attachment does not prevent the antibody from generating an anti-idiotypic response. For example, but not by way of limitation, the antibody derivatives include antibodies that have been modified, e.g., by glycosylation, acetylation, pegylation, phosphylation, amidation, derivatization by known protecting/blocking groups, proteolytic cleavage, linkage to a cellular ligand or other protein, etc. Any of numerous chemical modifications may be carried out by known techniques, including, but not limited to specific chemical cleavage, acetylation, formylation, metabolic synthesis of tunicamycin, etc. Additionally, the derivative may contain one or more non-classical amino acids.

[0455] Simple binding assays can be used to screen for or detect agents that bind to a target protein, or disrupt the interaction between proteins (e.g., a receptor and a ligand). Because certain targets of the present invention are transmembrane proteins, assays that use the soluble forms of these proteins rather than full-length protein can be used, in some embodiments. Soluble forms include, for example, those lacking the transmembrane domain and/or those comprising the IgV domain or fragments thereof which retain their ability to bind their cognate binding partners. Further, agents that inhibit or enhance protein interactions for use in the compositions and methods described herein, can include recombinant peptido-mimetics.

[0456] Detection methods useful in screening assays include antibody-based methods, detection of a reporter moiety, detection of cytokines as described herein, and detection of a gene signature as described herein.

[0457] Another variation of assays to determine binding of a receptor protein to a ligand protein is through the use of affinity biosensor methods. Such methods may be based on the piezoelectric effect, electrochemistry, or optical methods, such as ellipsometry, optical wave guidance, and surface plasmon resonance (SPR).

### Aptamers

[0458] In certain embodiments, the one or more agents is an aptamer. Nucleic acid aptamers are nucleic acid species that have been engineered through repeated rounds of in vitro selection or equivalently, SELEX (systematic evolution of ligands by exponential enrichment) to bind to various molecular targets such as small molecules, proteins, nucleic acids, cells, tissues and organisms. Nucleic acid aptamers have specific binding affinity to molecules through interactions other than classic Watson-Crick base pairing. Aptamers are useful in biotechnological and therapeutic applications as they offer molecular recognition properties similar to antibodies. In addition to their discriminate recognition, aptamers offer advantages over antibodies as they can be engineered completely in a test tube, are readily produced by chemical synthesis, possess desirable storage properties, and elicit little or no immunogenicity in therapeutic applications. In certain embodiments, RNA aptamers may be expressed from a DNA construct. In other embodiments, a nucleic acid aptamer may be linked to another polynucleotide sequence. The polynucleotide sequence may be a double stranded DNA polynucleotide sequence. The aptamer may be covalently linked to one strand of the polynucleotide sequence. The aptamer may be ligated to the polynucleotide sequence. The polynucleotide sequence may be configured, such that the polynucleotide sequence may be linked to a solid support or ligated to another polynucleotide sequence.

[0459] Aptamers, like peptides generated by phage display or monoclonal antibodies (“mAbs”), are capable of specifically binding to selected targets and modulating the target's activity, e.g., through binding, aptamers may block their target's ability to function. A typical aptamer is 10-15 kDa in size (30-45 nucleotides), binds its target with sub-nanomolar affinity, and discriminates against closely related targets (e.g., aptamers will typically not bind other proteins from the same gene family). Structural studies have shown that aptamers are capable of using the same types of binding interactions (e.g., hydrogen bonding, electrostatic complementarity, hydrophobic contacts, steric exclusion) that drives affinity and specificity in antibody-antigen complexes.

[0460] Aptamers have a number of desirable characteristics for use in research and as therapeutics and diagnostics including high specificity and affinity, biological efficacy, and excellent pharmacokinetic properties. In addition, they offer specific competitive advantages over antibodies and other protein biologics. Aptamers are chemically synthesized and are readily scaled as needed to meet production demand for research, diagnostic or therapeutic applications. Aptamers are chemically robust. They are intrinsically adapted to regain activity following exposure to factors such as heat and denaturants and can be stored for extended periods (>1 yr) at room temperature as lyophilized powders. Not being bound by a theory, aptamers bound to a solid support or beads may be stored for extended periods.

[0461] Oligonucleotides in their phosphodiester form may be quickly degraded by intracellular and extracellular enzymes such as endonucleases and exonucleases. Aptamers can include modified nucleotides conferring improved characteristics on the ligand, such as improved in vivo stability or improved delivery characteristics. Examples of such modifications include chemical substitutions at the ribose and/or phosphate and/or base positions. SELEX identified nucleic acid ligands containing modified nucleotides are described, e.g., in U.S. Pat. No. 5,660,985, which describes oligonucleotides containing nucleotide derivatives chemically modified at the 2′ position of ribose, 5 position of pyrimidines, and 8 position of purines, U.S. Pat. No. 5,756,703 which describes oligonucleotides containing various 2′-modified pyrimidines, and U.S. Pat. No. 5,580,737 which describes highly specific nucleic acid ligands containing one or more nucleotides modified with 2′-amino (2′-NH₂), 2′-fluoro (2′-F), and/or 2′-O-methyl (2′-OMe) substituents. Modifications of aptamers may also include, modifications at exocyclic amines, substitution of 4-thiouridine, substitution of 5-bromo or 5-iodo-uracil; backbone modifications, phosphorothioate or allyl phosphate modifications, methylations, and unusual base-pairing combinations such as the isobases isocytidine and isoguanosine. Modifications can also include 3′ and 5′ modifications such as capping. As used herein, the term phosphorothioate encompasses one or more non-bridging oxygen atoms in a phosphodiester bond replaced by one or more sulfur atoms. In further embodiments, the oligonucleotides comprise modified sugar groups, for example, one or more of the hydroxyl groups is replaced with halogen, aliphatic groups, or functionalized as ethers or amines. In one embodiment, the 2′-position of the furanose residue is substituted by any of an O-methyl, O-alkyl, O-allyl, S-alkyl, S-allyl, or halo group. Methods of synthesis of 2′-modified sugars are described, e.g., in Sproat, et al., Nucl. Acid Res. 19:733-738 (1991); Cotten, et al, Nucl. Acid Res. 19:2629-2635 (1991); and Hobbs, et al, Biochemistry 12:5138-5145 (1973). Other modifications are known to one of ordinary skill in the art. In certain embodiments, aptamers include aptamers with improved off-rates as described in International Patent Publication No. WO 2009012418, “Method for generating aptamers with improved off-rates,” incorporated herein by reference in its entirety. In certain embodiments aptamers are chosen from a library of aptamers. Such libraries include, but are not limited to those described in Rohloff et al., “Nucleic Acid Ligands With Protein-like Side Chains: Modified Aptamers and Their Use as Diagnostic and Therapeutic Agents,” Molecular Therapy Nucleic Acids (2014) 3, e201. Aptamers are also commercially available (see, e.g., SomaLogic, Inc., Boulder, Colo.). In certain embodiments, the present invention may utilize any aptamer containing any modification as described herein.

### Adoptive Cell Transfer

[0462] In certain embodiments, one or more agents targeting one or more combinations of targets identified by the screening platform described herein are used to modulate cells used for adoptive cell transfer. In certain embodiments, the one or more agents comprises BRD4. In certain embodiments, the one or more agents target the expression, activity, substrate or products of WDR77 and BRD4. As described herein, inhibitors of BRD4 are useful in enhancing T cell persistence and function in immunotherapy models (Kagoya et al., BET bromodomain inhibition enhances T cell persistence and function in adoptive immunotherapy models. J Clin Invest. 2016; 126(9):3479-3494). Applicants have identified for the first time that WDR77 and BRD4 interact genetically and thus the targeting of the combination may provide enhanced T cell persistence and function in adoptive cell transfer.

[0463] As used herein, “ACT”, “adoptive cell therapy” and “adoptive cell transfer” may be used interchangeably. In certain embodiments, Adoptive cell therapy (ACT) can refer to the transfer of cells to a patient with the goal of transferring the functionality and characteristics into the new host by engraftment of the cells (see, e.g., Mettananda et al., Editing an α-globin enhancer in primary human hematopoietic stem cells as a treatment for β-thalassemia, Nat Commun. 2017 Sep. 4; 8(1):424). As used herein, the term “engraft” or “engraftment” refers to the process of cell incorporation into a tissue of interest in vivo through contact with existing cells of the tissue. Adoptive cell therapy (ACT) can refer to the transfer of cells, most commonly immune-derived cells, back into the same patient or into a new recipient host with the goal of transferring the immunologic functionality and characteristics into the new host. If possible, use of autologous cells helps the recipient by minimizing GVHD issues. The adoptive transfer of autologous tumor infiltrating lymphocytes (TIL) (Besser et al., (2010) Clin. Cancer Res 16 (9) 2646-55; Dudley et al., (2002) Science 298 (5594): 850-4; and Dudley et al., (2005) Journal of Clinical Oncology 23 (10): 2346-57) or genetically re-directed peripheral blood mononuclear cells (Johnson et al., (2009) Blood 114 (3): 535-46; and Morgan et al., (2006) Science 314(5796) 126-9) has been used to successfully treat patients with advanced solid tumors, including melanoma and colorectal carcinoma, as well as patients with CD19-expressing hematologic malignancies (Kalos et al., (2011) Science Translational Medicine 3 (95): 95ra73). In certain embodiments, allogenic cells immune cells are transferred (see, e.g., Ren et al., (2017) Clin Cancer Res 23 (9) 2255-2266). As described further herein, allogenic cells can be edited to reduce alloreactivity and prevent graft-versus-host disease. Thus, use of allogenic cells allows for cells to be obtained from healthy donors and prepared for use in patients as opposed to preparing autologous cells from a patient after diagnosis.

[0464] Aspects of the invention involve the adoptive transfer of immune system cells, such as T cells, specific for selected antigens, such as tumor associated antigens or tumor specific neoantigens (see, e.g., Maus et al., 2014, Adoptive Immunotherapy for Cancer or Viruses, Annual Review of Immunology, Vol. 32: 189-225; Rosenberg and Restifo, 2015, Adoptive cell transfer as personalized immunotherapy for human cancer, Science Vol. 348 no. 6230 pp. 62-68; Restifo et al., 2015, Adoptive immunotherapy for cancer: harnessing the T cell response. Nat. Rev. Immunol. 12(4): 269-281; and Jenson and Riddell, 2014, Design and implementation of adoptive therapy with chimeric antigen receptor-modified T cells. Immunol Rev. 257(1): 127-144; and Rajasagi et al., 2014, Systematic identification of personal tumor-specific neoantigens in chronic lymphocytic leukemia. Blood. 2014 Jul. 17; 124(3):453-62).

[0465] In certain embodiments, an antigen (such as a tumor antigen) to be targeted in adoptive cell therapy (such as particularly CAR or TCR T-cell therapy) of a disease (such as particularly of tumor or cancer) may be selected from a group consisting of: B cell maturation antigen (BCMA) (see, e.g., Friedman et al., Effective Targeting of Multiple BCMA-Expressing Hematological Malignancies by Anti-BCMA CAR T Cells, Hum Gene Ther. 2018 Mar. 8; Berdeja J G, et al. Durable clinical responses in heavily pretreated patients with relapsed/refractory multiple myeloma: updated results from a multicenter study of bb2121 anti-Bcma CAR T cell therapy. Blood. 2017; 130:740; and Mouhieddine and Ghobrial, Immunotherapy in Multiple Myeloma: The Era of CAR T Cell Therapy, Hematologist, May-June 2018, Volume 15, issue 3); PSA (prostate-specific antigen); prostate-specific membrane antigen (PSMA); PSCA (Prostate stem cell antigen); Tyrosine-protein kinase transmembrane receptor ROR1; fibroblast activation protein (FAP); Tumor-associated glycoprotein 72 (TAG72); Carcinoembryonic antigen (CEA); Epithelial cell adhesion molecule (EPCAM); Mesothelin; Human Epidermal growth factor Receptor 2 (ERBB2 (Her2/neu)); Prostate; Prostatic acid phosphatase (PAP); elongation factor 2 mutant (ELF2M); Insulin-like growth factor 1 receptor (IGF-1R); gplOO; BCR-ABL (breakpoint cluster region-Abelson); tyrosinase; New York esophageal squamous cell carcinoma 1 (NY-ESO-1); κ-light chain, LAGE (L antigen); MAGE (melanoma antigen); Melanoma-associated antigen 1 (MAGE-A1); MAGE A3; MAGE A6; legumain; Human papillomavirus (HPV) E6; HPV E7; prostein; survivin; PCTA1 (Galectin 8); Melan-A/MART-1; Ras mutant; TRP-1 (tyrosinase related protein 1, or gp75); Tyrosinase-related Protein 2 (TRP2); TRP-2/INT2 (TRP-2/intron 2); RAGE (renal antigen); receptor for advanced glycation end products 1 (RAGE1); Renal ubiquitous 1, 2 (RU1, RU2); intestinal carboxyl esterase (iCE); Heat shock protein 70-2 (HSP70-2) mutant; thyroid stimulating hormone receptor (TSHR); CD123; CD171; CD19; CD20; CD22; CD26; CD30; CD33; CD44v7/8 (cluster of differentiation 44, exons 7/8); CD53; CD92; CD100; CD148; CD150; CD200; CD261; CD262; CD362; CS-1 (CD2 subset 1, CRACC, SLAMF7, CD319, and 19A24); C-type lectin-like molecule-1 (CLL-1); ganglioside GD3 (aNeu5Ac(2-8)aNeu5Ac(2-3)bDGalp(1-4)bDGlcp(1-1)Cer); Tn antigen (Tn Ag); Fms-Like Tyrosine Kinase 3 (FLT3); CD38; CD138; CD44v6; B7H3 (CD276); KIT (CD117); Interleukin-13 receptor subunit alpha-2 (IL-13Ra2); Interleukin 11 receptor alpha (IL-11Ra); prostate stem cell antigen (PSCA); Protease Serine 21 (PRSS21); vascular endothelial growth factor receptor 2 (VEGFR2); Lewis(Y) antigen; CD24; Platelet-derived growth factor receptor beta (PDGFR-beta); stage-specific embryonic antigen-4 (SSEA-4); Mucin 1, cell surface associated (MUC1); mucin 16 (MUC16); epidermal growth factor receptor (EGFR); epidermal growth factor receptor variant III (EGFRvIII); neural cell adhesion molecule (NCAM); carbonic anhydrase IX (CAIX); Proteasome (Prosome, Macropain) Subunit, Beta Type, 9 (LMP2); ephrin type-A receptor 2 (EphA2); Ephrin B2; Fucosyl GM1; sialyl Lewis adhesion molecule (sLe); ganglioside GM3 (aNeu5Ac(2-3)bDGalp(1-4)bDGlcp(1-1)Cer); TGSS; high molecular weight-melanoma-associated antigen (HMWMAA); o-acetyl-GD2 ganglioside (OAcGD2); Folate receptor alpha; Folate receptor beta; tumor endothelial marker 1 (TEM1/CD248); tumor endothelial marker 7-related (TEM7R); claudin 6 (CLDN6); G protein-coupled receptor class C group 5, member D (GPRCSD); chromosome X open reading frame 61 (CXORF61); CD97; CD179a; anaplastic lymphoma kinase (ALK); Polysialic acid; placenta-specific 1 (PLAC1); hexasaccharide portion of globoH glycoceramide (GloboH); mammary gland differentiation antigen (NY-BR-1); uroplakin 2 (UPK2); Hepatitis A virus cellular receptor 1 (HAVCR1); adrenoceptor beta 3 (ADRB3); pannexin 3 (PANX3); G protein-coupled receptor 20 (GPR20); lymphocyte antigen 6 complex, locus K 9 (LY6K); Olfactory receptor 51E2 (OR51E2); TCR Gamma Alternate Reading Frame Protein (TARP); Wilms tumor protein (WT1); ETS translocation-variant gene 6, located on chromosome 12p (ETV6-AML); sperm protein 17 (SPA17); X Antigen Family, Member 1A (XAGE1); angiopoietin-binding cell surface receptor 2 (Tie 2); CT (cancer/testis (antigen)); melanoma cancer testis antigen-1 (MAD-CT-1); melanoma cancer testis antigen-2 (MAD-CT-2); Fos-related antigen 1; p53; p53 mutant; human Telomerase reverse transcriptase (hTERT); sarcoma translocation breakpoints; melanoma inhibitor of apoptosis (ML-IAP); ERG (transmembrane protease, serine 2 (TMPRSS2) ETS fusion gene); N-Acetyl glucosaminyl-transferase V (NA17); paired box protein Pax-3 (PAX3); Androgen receptor; Cyclin B1; Cyclin D1; v-myc avian myelocytomatosis viral oncogene neuroblastoma derived homolog (MYCN); Ras Homolog Family Member C (RhoC); Cytochrome P450 1B1 (CYP1B1); CCCTC-Binding Factor (Zinc Finger Protein)-Like (BORIS); Squamous Cell Carcinoma Antigen Recognized By T Cells-1 or 3 (SART1, SART3); Paired box protein Pax-5 (PAXS); proacrosin binding protein sp32 (OY-TES1); lymphocyte-specific protein tyrosine kinase (LCK); A kinase anchor protein 4 (AKAP-4); synovial sarcoma, X breakpoint-1, -2, -3 or -4 (SSX1, SSX2, SSX3, SSX4); CD79a; CD79b; CD72; Leukocyte-associated immunoglobulin-like receptor 1 (LAIR1); Fc fragment of IgA receptor (FCAR); Leukocyte immunoglobulin-like receptor subfamily A member 2 (LILRA2); CD300 molecule-like family member f (CD300LF); C-type lectin domain family 12 member A (CLEC12A); bone marrow stromal cell antigen 2 (BST2); EGF-like module-containing mucin-like hormone receptor-like 2 (EMR2); lymphocyte antigen 75 (LY75); Glypican-3 (GPC3); Fc receptor-like 5 (FCRL5); mouse double minute 2 homolog (MDM2); livin; alphafetoprotein (AFP); transmembrane activator and CAML Interactor (TACI); B-cell activating factor receptor (BAFF-R); V-Ki-ras2 Kirsten rat sarcoma viral oncogene homolog (KRAS); immunoglobulin lambda-like polypeptide 1 (IGLL1); 707-AP (707 alanine proline); ART-4 (adenocarcinoma antigen recognized by T4 cells); BAGE (B antigen; b-catenin/m, b-catenin/mutated); CAMEL (CTL-recognized antigen on melanoma); CAP1 (carcinoembryonic antigen peptide 1); CASP-8 (caspase-8); CDCl27m (cell-division cycle 27 mutated); CDK4/m (cycline-dependent kinase 4 mutated); Cyp-B (cyclophilin B); DAM (differentiation antigen melanoma); EGP-2 (epithelial glycoprotein 2); EGP-40 (epithelial glycoprotein 40); Erbb2, 3, 4 (erythroblastic leukemia viral oncogene homolog-2, -3, 4); FBP (folate binding protein); fAchR (Fetal acetylcholine receptor); G250 (glycoprotein 250); GAGE (G antigen); GnT-V (N-acetylglucosaminyltransferase V); HAGE (helicose antigen); ULA-A (human leukocyte antigen-A); HST2 (human signet ring tumor 2); KIAA0205; KDR (kinase insert domain receptor); LDLR/FUT (low density lipid receptor/GDP L-fucose: b-D-galactosidase 2-a-L fucosyltransferase); L1CAM (L1 cell adhesion molecule); MC1R (melanocortin 1 receptor); Myosin/m (myosin mutated); MUM-1, -2, -3 (melanoma ubiquitous mutated 1, 2, 3); NA88-A (NA cDNA clone of patient M88); KG2D (Natural killer group 2, member D) ligands; oncofetal antigen (h5T4); p190 minor bcr-abl (protein of 190 KD bcr-abl); Pml/RARa (promyelocytic leukaemia/retinoic acid receptor a); PRAME (preferentially expressed antigen of melanoma); SAGE (sarcoma antigen); TEL/AML1 (translocation Ets-family leukemia/acute myeloid leukemia 1); TPI/m (triosephosphate isomerase mutated); CD70; and any combination thereof.

[0466] In certain embodiments, an antigen to be targeted in adoptive cell therapy (such as particularly CAR or TCR T-cell therapy) of a disease (such as particularly of tumor or cancer) is a tumor-specific antigen (TSA).

[0467] In certain embodiments, an antigen to be targeted in adoptive cell therapy (such as particularly CAR or TCR T-cell therapy) of a disease (such as particularly of tumor or cancer) is a neoantigen.

[0468] In certain embodiments, an antigen to be targeted in adoptive cell therapy (such as particularly CAR or TCR T-cell therapy) of a disease (such as particularly of tumor or cancer) is a tumor-associated antigen (TAA).

[0469] In certain embodiments, an antigen to be targeted in adoptive cell therapy (such as particularly CAR or TCR T-cell therapy) of a disease (such as particularly of tumor or cancer) is a universal tumor antigen. In certain preferred embodiments, the universal tumor antigen is selected from the group consisting of: a human telomerase reverse transcriptase (hTERT), survivin, mouse double minute 2 homolog (MDM2), cytochrome P450 1B 1 (CYP1B), HER2/neu, Wilms' tumor gene 1 (WT1), livin, alphafetoprotein (AFP), carcinoembryonic antigen (CEA), mucin 16 (MUC16), MUC1, prostate-specific membrane antigen (PSMA), p53, cyclin (Dl), and any combinations thereof.

[0470] In certain embodiments, an antigen (such as a tumor antigen) to be targeted in adoptive cell therapy (such as particularly CAR or TCR T-cell therapy) of a disease (such as particularly of tumor or cancer) may be selected from a group consisting of: CD19, BCMA, CD70, CLL-1, MAGE A3, MAGE A6, HPV E6, HPV E7, WT1, CD22, CD171, ROR1, MUC16, and SSX2. In certain preferred embodiments, the antigen may be CD19. For example, CD19 may be targeted in hematologic malignancies, such as in lymphomas, more particularly in B-cell lymphomas, such as without limitation in diffuse large B-cell lymphoma, primary mediastinal b-cell lymphoma, transformed follicular lymphoma, marginal zone lymphoma, mantle cell lymphoma, acute lymphoblastic leukemia including adult and pediatric ALL, non-Hodgkin lymphoma, indolent non-Hodgkin lymphoma, or chronic lymphocytic leukemia. For example, BCMA may be targeted in multiple myeloma or plasma cell leukemia (see, e.g., 2018 American Association for Cancer Research (AACR) Annual meeting Poster: Allogeneic Chimeric Antigen Receptor T Cells Targeting B Cell Maturation Antigen). For example, CLL1 may be targeted in acute myeloid leukemia. For example, MAGE A3, MAGE A6, SSX2, and/or KRAS may be targeted in solid tumors. For example, HPV E6 and/or HPV E7 may be targeted in cervical cancer or head and neck cancer. For example, WT1 may be targeted in acute myeloid leukemia (AML), myelodysplastic syndromes (MDS), chronic myeloid leukemia (CML), non-small cell lung cancer, breast, pancreatic, ovarian or colorectal cancers, or mesothelioma. For example, CD22 may be targeted in B cell malignancies, including non-Hodgkin lymphoma, diffuse large B-cell lymphoma, or acute lymphoblastic leukemia. For example, CD171 may be targeted in neuroblastoma, glioblastoma, or lung, pancreatic, or ovarian cancers. For example, ROR1 may be targeted in ROR1+ malignancies, including non-small cell lung cancer, triple negative breast cancer, pancreatic cancer, prostate cancer, ALL, chronic lymphocytic leukemia, or mantle cell lymphoma. For example, MUC16 may be targeted in MUC16ecto+ epithelial ovarian, fallopian tube or primary peritoneal cancer. For example, CD70 may be targeted in both hematologic malignancies as well as in solid cancers such as renal cell carcinoma (RCC), gliomas (e.g., GBM), and head and neck cancers (HNSCC). CD70 is expressed in both hematologic malignancies as well as in solid cancers, while its expression in normal tissues is restricted to a subset of lymphoid cell types (see, e.g., 2018 American Association for Cancer Research (AACR) Annual meeting Poster: Allogeneic CRISPR Engineered Anti-CD70 CAR-T Cells Demonstrate Potent Preclinical Activity Against Both Solid and Hematological Cancer Cells).

[0471] Various strategies may for example be employed to genetically modify T cells by altering the specificity of the T cell receptor (TCR) for example by introducing new TCR α and 13 chains with selected peptide specificity (see U.S. Pat. No. 8,697,854; PCT Patent Publications: WO2003020763, WO2004033685, WO2004044004, WO2005114215, WO2006000830, WO2008038002, WO2008039818, WO2004074322, WO2005113595, WO2006125962, WO2013166321, WO2013039889, WO2014018863, WO2014083173; U.S. Pat. No. 8,088,379).

[0472] As an alternative to, or addition to, TCR modifications, chimeric antigen receptors (CARs) may be used in order to generate immunoresponsive cells, such as T cells, specific for selected targets, such as malignant cells, with a wide variety of receptor chimera constructs having been described (see U.S. Pat. Nos. 5,843,728; 5,851,828; 5,912,170; 6,004,811; 6,284,240; 6,392,013; 6,410,014; 6,753,162; 8,211,422; and, PCT Publication WO9215322).

[0473] In general, CARs are comprised of an extracellular domain, a transmembrane domain, and an intracellular domain, wherein the extracellular domain comprises an antigen-binding domain that is specific for a predetermined target. While the antigen-binding domain of a CAR is often an antibody or antibody fragment (e.g., a single chain variable fragment, scFv), the binding domain is not particularly limited so long as it results in specific recognition of a target. For example, in some embodiments, the antigen-binding domain may comprise a receptor, such that the CAR is capable of binding to the ligand of the receptor. Alternatively, the antigen-binding domain may comprise a ligand, such that the CAR is capable of binding the endogenous receptor of that ligand.

[0474] The antigen-binding domain of a CAR is generally separated from the transmembrane domain by a hinge or spacer. The spacer is also not particularly limited, and it is designed to provide the CAR with flexibility. For example, a spacer domain may comprise a portion of a human Fc domain, including a portion of the CH3 domain, or the hinge region of any immunoglobulin, such as IgA, IgD, IgE, IgG, or IgM, or variants thereof. Furthermore, the hinge region may be modified so as to prevent off-target binding by FcRs or other potential interfering objects. For example, the hinge may comprise an IgG4 Fc domain with or without a S228P, L235E, and/or N297Q mutation (according to Kabat numbering) in order to decrease binding to FcRs. Additional spacers/hinges include, but are not limited to, CD4, CD8, and CD28 hinge regions.

[0475] The transmembrane domain of a CAR may be derived either from a natural or from a synthetic source. Where the source is natural, the domain may be derived from any membrane bound or transmembrane protein. Transmembrane regions of particular use in this disclosure may be derived from CD8, CD28, CD3, CD45, CD4, CD5, CDS, CD9, CD 16, CD22, CD33, CD37, CD64, CD80, CD86, CD 134, CD137, CD 154, TCR. Alternatively, the transmembrane domain may be synthetic, in which case it will comprise predominantly hydrophobic residues such as leucine and valine. Preferably a triplet of phenylalanine, tryptophan and valine will be found at each end of a synthetic transmembrane domain. Optionally, a short oligo- or polypeptide linker, preferably between 2 and 10 amino acids in length may form the linkage between the transmembrane domain and the cytoplasmic signaling domain of the CAR. A glycine-serine doublet provides a particularly suitable linker.

[0476] Alternative CAR constructs may be characterized as belonging to successive generations. First-generation CARs typically consist of a single-chain variable fragment of an antibody specific for an antigen, for example comprising a VL linked to a VH of a specific antibody, linked by a flexible linker, for example by a CD8a hinge domain and a CD8a transmembrane domain, to the transmembrane and intracellular signaling domains of either CD3ζ or FcRγ (scFv-CD3 or scFv-FcRγ; see U.S. Pat. Nos. 7,741,465; 5,912,172; 5,906,936). Second-generation CARs incorporate the intracellular domains of one or more costimulatory molecules, such as CD28, OX40 (CD134), or 4-1BB (CD137) within the endodomain (for example scFv-CD28/0X40/4-1BB-CD3; see U.S. Pat. Nos. 8,911,993; 8,916,381; 8,975,071; 9,101,584; 9,102,760; 9,102,761). Third-generation CARs include a combination of costimulatory endodomains, such a CD3-chain, CD97, GDI 1a-CD18, CD2, ICOS, CD27, CD154, CDS, 0X40, 4-1BB, CD2, CD7, LIGHT, LFA-1, NKG2C, B7-H3, CD30, CD40, PD-1, or CD28 signaling domains (for example scFv-CD28-4-1BB-CD3 or scFv-CD28-0X40-CD3; see U.S. Pat. Nos. 8,906,682; 8,399,645; 5,686,281; PCT Publication No. WO2014134165; PCT Publication No. WO2012079000). In certain embodiments, the primary signaling domain comprises a functional signaling domain of a protein selected from the group consisting of CD3 zeta, CD3 gamma, CD3 delta, CD3 epsilon, common FcR gamma (FCERIG), FcR beta (Fc Epsilon Rib), CD79a, CD79b, Fc gamma RIIa, DAP10, and DAP12. In certain preferred embodiments, the primary signaling domain comprises a functional signaling domain of CD3 or FcRγ. In certain embodiments, the one or more costimulatory signaling domains comprise a functional signaling domain of a protein selected, each independently, from the group consisting of: CD27, CD28, 4-1BB (CD137), 0X40, CD30, CD40, PD-1, ICOS, lymphocyte function-associated antigen-1 (LFA-1), CD2, CD7, LIGHT, NKG2C, B7-H3, a ligand that specifically binds with CD83, CDS, ICAM-1, GITR, BAFFR, HVEM (LIGHTR), SLAMF7, NKp80 (KLRF1), CD160, CD19, CD4, CD8 alpha, CD8 beta, IL2R beta, IL2R gamma, IL7R alpha, ITGA4, VLA1, CD49a, ITGA4, IA4, CD49D, ITGA6, VLA-6, CD49f, ITGAD, CD11d, ITGAE, CD103, ITGAL, CD11a, LFA-1, ITGAM, CD11b, ITGAX, CD11c, ITGB1, CD29, ITGB2, CD18, ITGB7, TNFR2, TRANCE/RANKL, DNAM1 (CD226), SLAMF4 (CD244, 2B4), CD84, CD96 (Tactile), CEACAM1, CRTAM, Ly9 (CD229), CD160 (BY55), PSGL1, CD100 (SEMA4D), CD69, SLAMF6 (NTB-A, Ly108), SLAM (SLAMF1, CD150, IPO-3), BLAME (SLAMF8), SELPLG (CD162), LTBR, LAT, GADS, SLP-76, PAG/Cbp, NKp44, NKp30, NKp46, and NKG2D. In certain embodiments, the one or more costimulatory signaling domains comprise a functional signaling domain of a protein selected, each independently, from the group consisting of: 4-1BB, CD27, and CD28. In certain embodiments, a chimeric antigen receptor may have the design as described in U.S. Pat. No. 7,446,190, comprising an intracellular domain of CD3 chain (such as amino acid residues 52-163 of the human CD3 zeta chain, as shown in SEQ ID NO: 14 of U.S. Pat. No. 7,446,190), a signaling region from CD28 and an antigen-binding element (or portion or domain; such as scFv). The CD28 portion, when between the zeta chain portion and the antigen-binding element, may suitably include the transmembrane and signaling domains of CD28 (such as amino acid residues 114-220 of SEQ ID NO: 10, full sequence shown in SEQ ID NO: 6 of U.S. Pat. No. 7,446,190; these can include the following portion of CD28 as set forth in Genbank identifier NM_006139 (sequence version 1, 2 or 3): IEVMYPPPYLDNEKSNGTIIHVKGKHLCPSPLFPGPSKPFWVLVVVGGVLACYSLLVT VAFIIFWVRSKRSRLLHSDYMNMTPRRPGPTRKHYQPYAPPRDFAAYRS) (SEQ ID NO:45,535)). Alternatively, when the zeta sequence lies between the CD28 sequence and the antigen-binding element, intracellular domain of CD28 can be used alone (such as amino sequence set forth in SEQ ID NO: 9 of U.S. Pat. No. 7,446,190). Hence, certain embodiments employ a CAR comprising (a) a zeta chain portion comprising the intracellular domain of human CD3 chain, (b) a costimulatory signaling region, and (c) an antigen-binding element (or portion or domain), wherein the costimulatory signaling region comprises the amino acid sequence encoded by SEQ ID NO: 6 of U.S. Pat. No. 7,446,190.

[0477] Alternatively, costimulation may be orchestrated by expressing CARs in antigen-specific T cells, chosen so as to be activated and expanded following engagement of their native αβTCR, for example by antigen on professional antigen-presenting cells, with attendant costimulation. In addition, additional engineered receptors may be provided on the immunoresponsive cells, for example to improve targeting of a T-cell attack and/or minimize side effects

[0478] By means of an example and without limitation, Kochenderfer et al., (2009) J Immunother. 32 (7): 689-702 described anti-CD19 chimeric antigen receptors (CAR). FMC63-28Z CAR contained a single chain variable region moiety (scFv) recognizing CD19 derived from the FMC63 mouse hybridoma (described in Nicholson et al., (1997) Molecular Immunology 34: 1157-1165), a portion of the human CD28 molecule, and the intracellular component of the human TCR-ζ molecule. FMC63-CD828BBZ CAR contained the FMC63 scFv, the hinge and transmembrane regions of the CD8 molecule, the cytoplasmic portions of CD28 and 4-1BB, and the cytoplasmic component of the TCR-ζ molecule. The exact sequence of the CD28 molecule included in the FMC63-28Z CAR corresponded to Genbank identifier NM_006139; the sequence included all amino acids starting with the amino acid sequence IEVMYPPPY (SEQ ID NO:45,536) and continuing all the way to the carboxy-terminus of the protein. To encode the anti-CD19 scFv component of the vector, the authors designed a DNA sequence which was based on a portion of a previously published CAR (Cooper et al., (2003) Blood 101: 1637-1644). This sequence encoded the following components in frame from the 5′ end to the 3′ end: an XhoI site, the human granulocyte-macrophage colony-stimulating factor (GM-CSF) receptor a-chain signal sequence, the FMC63 light chain variable region (as in Nicholson et al., supra), a linker peptide (as in Cooper et al., supra), the FMC63 heavy chain variable region (as in Nicholson et al., supra), and a NotI site. A plasmid encoding this sequence was digested with XhoI and NotI. To form the MSGV-FMC63-28Z retroviral vector, the XhoI and NotI-digested fragment encoding the FMC63 scFv was ligated into a second XhoI and NotI-digested fragment that encoded the MSGV retroviral backbone (as in Hughes et al., (2005) Human Gene Therapy 16: 457-472) as well as part of the extracellular portion of human CD28, the entire transmembrane and cytoplasmic portion of human CD28, and the cytoplasmic portion of the human TCR-molecule (as in Maher et al., 2002) Nature Biotechnology 20: 70-75). The FMC63-28Z CAR is included in the KTE-C19 (axicabtagene ciloleucel) anti-CD19 CAR-T therapy product in development by Kite Pharma, Inc. for the treatment of inter alia patients with relapsed/refractory aggressive B-cell non-Hodgkin lymphoma (NHL). Accordingly, in certain embodiments, cells intended for adoptive cell therapies, more particularly immunoresponsive cells such as T cells, may express the FMC63-28Z CAR as described by Kochenderfer et al. (supra). Hence, in certain embodiments, cells intended for adoptive cell therapies, more particularly immunoresponsive cells such as T cells, may comprise a CAR comprising an extracellular antigen-binding element (or portion or domain; such as scFv) that specifically binds to an antigen, an intracellular signaling domain comprising an intracellular domain of a CD3 chain, and a costimulatory signaling region comprising a signaling domain of CD28. Preferably, the CD28 amino acid sequence is as set forth in Genbank identifier NM_006139 (sequence version 1, 2 or 3) starting with the amino acid sequence IEVMYPPPY and continuing all the way to the carboxy-terminus of the protein. The sequence is reproduced herein: IEVMYPPPYLDNEKSNGTIIHVKGKHLCPSPLFPGPSKPFWVLVVVGGVLACYSLLVT VAFIIFWVRSKRSRLLHSDYMNMTPRRPGPTRKHYQPYAPPRDFAAYRS (SEQ ID NO:45,537). Preferably, the antigen is CD19, more preferably the antigen-binding element is an anti-CD19 scFv, even more preferably the anti-CD19 scFv as described by Kochenderfer et al. (supra).

[0479] Additional anti-CD19 CARs are further described in WO2015187528. More particularly Example 1 and Table 1 of WO2015187528, incorporated by reference herein, demonstrate the generation of anti-CD19 CARs based on a fully human anti-CD19 monoclonal antibody (47G4, as described in US20100104509) and murine anti-CD19 monoclonal antibody (as described in Nicholson et al. and explained above). Various combinations of a signal sequence (human CD8-alpha or GM-CSF receptor), extracellular and transmembrane regions (human CD8-alpha) and intracellular T-cell signalling domains (CD28-CD3ζ; 4-1BB-CD3ζ; CD27-CD3ζ; CD28-CD27-CD3ζ, 4-1BB-CD27-CD3ζ; CD27-4-1BB-CD3ζ; CD28-CD27-FcεRI gamma chain; or CD28-FcεRI gamma chain) were disclosed. Hence, in certain embodiments, cells intended for adoptive cell therapies, more particularly immunoresponsive cells such as T cells, may comprise a CAR comprising an extracellular antigen-binding element that specifically binds to an antigen, an extracellular and transmembrane region as set forth in Table 1 of WO2015187528 and an intracellular T-cell signalling domain as set forth in Table 1 of WO2015187528. Preferably, the antigen is CD19, more preferably the antigen-binding element is an anti-CD19 scFv, even more preferably the mouse or human anti-CD19 scFv as described in Example 1 of WO2015187528. In certain embodiments, the CAR comprises, consists essentially of or consists of an amino acid sequence of SEQ ID NO: 1, SEQ ID NO: 2, SEQ ID NO: 3, SEQ ID NO: 4, SEQ ID NO: 5, SEQ ID NO: 6, SEQ ID NO: 7, SEQ ID NO: 8, SEQ ID NO: 9, SEQ ID NO: 10, SEQ ID NO: 11, SEQ ID NO: 12, or SEQ ID NO: 13 as set forth in Table 1 of WO2015187528.

[0480] By means of an example and without limitation, chimeric antigen receptor that recognizes the CD70 antigen is described in WO2012058460A2 (see also, Park et al., CD70 as a target for chimeric antigen receptor T cells in head and neck squamous cell carcinoma, Oral Oncol. 2018 March; 78:145-150; and Jin et al., CD70, a novel target of CAR T-cell therapy for gliomas, Neuro Oncol. 2018 Jan. 10; 20(1):55-65). CD70 is expressed by diffuse large B-cell and follicular lymphoma and also by the malignant cells of Hodgkins lymphoma, Waldenstrom's macroglobulinemia and multiple myeloma, and by HTLV-1- and EBV-associated malignancies. (Agathanggelou et al. Am. J. Pathol. 1995; 147: 1152-1160; Hunter et al., Blood 2004; 104:4881. 26; Lens et al., J Immunol. 2005; 174:6212-6219; Baba et al., J Virol. 2008; 82:3843-3852.) In addition, CD70 is expressed by non-hematological malignancies such as renal cell carcinoma and glioblastoma. (Junker et al., J Urol. 2005; 173:2150-2153; Chahlavi et al., Cancer Res 2005; 65:5428-5438) Physiologically, CD70 expression is transient and restricted to a subset of highly activated T, B, and dendritic cells.

[0481] By means of an example and without limitation, chimeric antigen receptor that recognizes BCMA has been described (see, e.g., US20160046724A1; WO2016014789A2; WO2017211900A1; WO2015158671A1; US20180085444A1; WO2018028647A1; US20170283504A1; and WO2013154760A1).

[0482] In certain embodiments, the immune cell may, in addition to a CAR or exogenous TCR as described herein, further comprise a chimeric inhibitory receptor (inhibitory CAR) that specifically binds to a second target antigen and is capable of inducing an inhibitory or immunosuppressive or repressive signal to the cell upon recognition of the second target antigen. In certain embodiments, the chimeric inhibitory receptor comprises an extracellular antigen-binding element (or portion or domain) configured to specifically bind to a target antigen, a transmembrane domain, and an intracellular immunosuppressive or repressive signaling domain. In certain embodiments, the second target antigen is an antigen that is not expressed on the surface of a cancer cell or infected cell or the expression of which is downregulated on a cancer cell or an infected cell. In certain embodiments, the second target antigen is an MHC-class I molecule. In certain embodiments, the intracellular signaling domain comprises a functional signaling portion of an immune checkpoint molecule, such as for example PD-1 or CTLA4. Advantageously, the inclusion of such inhibitory CAR reduces the chance of the engineered immune cells attacking non-target (e.g., non-cancer) tissues.

[0483] Alternatively, T-cells expressing CARs may be further modified to reduce or eliminate expression of endogenous TCRs in order to reduce off-target effects. Reduction or elimination of endogenous TCRs can reduce off-target effects and increase the effectiveness of the T cells (U.S. Pat. No. 9,181,527). T cells stably lacking expression of a functional TCR may be produced using a variety of approaches. T cells internalize, sort, and degrade the entire T cell receptor as a complex, with a half-life of about 10 hours in resting T cells and 3 hours in stimulated T cells (von Essen, M. et al. 2004. J. Immunol. 173:384-393). Proper functioning of the TCR complex requires the proper stoichiometric ratio of the proteins that compose the TCR complex. TCR function also requires two functioning TCR zeta proteins with ITAM motifs. The activation of the TCR upon engagement of its MI-IC-peptide ligand requires the engagement of several TCRs on the same T cell, which all must signal properly. Thus, if a TCR complex is destabilized with proteins that do not associate properly or cannot signal optimally, the T cell will not become activated sufficiently to begin a cellular response.

[0484] Accordingly, in some embodiments, TCR expression may eliminated using RNA interference (e.g., shRNA, siRNA, miRNA, etc.), CRISPR, or other methods that target the nucleic acids encoding specific TCRs (e.g., TCR-α and TCR-β) and/or CD3 chains in primary T cells. By blocking expression of one or more of these proteins, the T cell will no longer produce one or more of the key components of the TCR complex, thereby destabilizing the TCR complex and preventing cell surface expression of a functional TCR.

[0485] In some instances, CAR may also comprise a switch mechanism for controlling expression and/or activation of the CAR. For example, a CAR may comprise an extracellular, transmembrane, and intracellular domain, in which the extracellular domain comprises a target-specific binding element that comprises a label, binding domain, or tag that is specific for a molecule other than the target antigen that is expressed on or by a target cell. In such embodiments, the specificity of the CAR is provided by a second construct that comprises a target antigen binding domain (e.g., an scFv or a bispecific antibody that is specific for both the target antigen and the label or tag on the CAR) and a domain that is recognized by or binds to the label, binding domain, or tag on the CAR. See, e.g., WO 2013/044225, WO 2016/000304, WO 2015/057834, WO 2015/057852, WO 2016/070061, U.S. Pat. No. 9,233,125, US 2016/0129109. In this way, a T-cell that expresses the CAR can be administered to a subject, but the CAR cannot bind its target antigen until the second composition comprising an antigen-specific binding domain is administered.

[0486] Alternative switch mechanisms include CARs that require multimerization in order to activate their signaling function (see, e.g., US 2015/0368342, US 2016/0175359, US 2015/0368360) and/or an exogenous signal, such as a small molecule drug (US 2016/0166613, Yung et al., Science, 2015), in order to elicit a T-cell response. Some CARs may also comprise a “suicide switch” to induce cell death of the CAR T-cells following treatment (Buddee et al., PLoS One, 2013) or to downregulate expression of the CAR following binding to the target antigen (WO 2016/011210).

[0487] Alternative techniques may be used to transform target immunoresponsive cells, such as protoplast fusion, lipofection, transfection or electroporation. A wide variety of vectors may be used, such as retroviral vectors, lentiviral vectors, adenoviral vectors, adeno-associated viral vectors, plasmids or transposons, such as a Sleeping Beauty transposon (see U.S. Pat. Nos. 6,489,458; 7,148,203; 7,160,682; 7,985,739; 8,227,432), may be used to introduce CARs, for example using 2nd generation antigen-specific CARs signaling through CD3 and either CD28 or CD137. Viral vectors may for example include vectors based on HIV, SV40, EBV, HSV or BPV.

[0488] Cells that are targeted for transformation may for example include T cells, Natural Killer (NK) cells, cytotoxic T lymphocytes (CTL), regulatory T cells, human embryonic stem cells, tumor-infiltrating lymphocytes (TIL) or a pluripotent stem cell from which lymphoid cells may be differentiated. T cells expressing a desired CAR may for example be selected through co-culture with y-irradiated activating and propagating cells (AaPC), which co-express the cancer antigen and co-stimulatory molecules. The engineered CAR T-cells may be expanded, for example by co-culture on AaPC in presence of soluble factors, such as IL-2 and IL-21. This expansion may for example be carried out so as to provide memory CAR+ T cells (which may for example be assayed by non-enzymatic digital array and/or multi-panel flow cytometry). In this way, CAR T cells may be provided that have specific cytotoxic activity against antigen-bearing tumors (optionally in conjunction with production of desired chemokines such as interferon-γ). CAR T cells of this kind may for example be used in animal models, for example to treat tumor xenografts.

[0489] In certain embodiments, ACT includes co-transferring CD4+Th1 cells and CD8+CTLs to induce a synergistic antitumour response (see, e.g., Li et al., Adoptive cell therapy with CD4+T helper 1 cells and CD8+ cytotoxic T cells enhances complete rejection of an established tumour, leading to generation of endogenous memory responses to non-targeted tumour epitopes. Clin Transl Immunology. 2017 October; 6(10): e160).

[0490] In certain embodiments, Th17 cells are transferred to a subject in need thereof. Th17 cells have been reported to directly eradicate melanoma tumors in mice to a greater extent than Th1 cells (Muranski P, et al., Tumor-specific Th17-polarized cells eradicate large established melanoma. Blood. 2008 Jul. 15; 112(2):362-73; and Martin-Orozco N, et al., T helper 17 cells promote cytotoxic T cell activation in tumor immunity. Immunity. 2009 Nov. 20; 31(5):787-98). Those studies involved an adoptive T cell transfer (ACT) therapy approach, which takes advantage of CD4⁺ T cells that express a TCR recognizing tyrosinase tumor antigen. Exploitation of the TCR leads to rapid expansion of Th17 populations to large numbers ex vivo for reinfusion into the autologous tumor-bearing hosts.

[0491] In certain embodiments, ACT may include autologous iPSC-based vaccines, such as irradiated iPSCs in autologous anti-tumor vaccines (see e.g., Kooreman, Nigel G. et al., Autologous iPSC-Based Vaccines Elicit Anti-tumor Responses In Vivo, Cell Stem Cell 22, 1-13, 2018, doi.org/10.1016/j.stem.2018.01.016).

[0492] Unlike T-cell receptors (TCRs) that are MHC restricted, CARs can potentially bind any cell surface-expressed antigen and can thus be more universally used to treat patients (see Irving et al., Engineering Chimeric Antigen Receptor T-Cells for Racing in Solid Tumors: Don't Forget the Fuel, Front. Immunol., 3 Apr. 2017, doi.org/10.3389/fimmu.2017.00267). In certain embodiments, in the absence of endogenous T-cell infiltrate (e.g., due to aberrant antigen processing and presentation), which precludes the use of TIL therapy and immune checkpoint blockade, the transfer of CAR T-cells may be used to treat patients (see, e.g., Hinrichs C S, Rosenberg S A. Exploiting the curative potential of adoptive T-cell therapy for cancer. Immunol Rev (2014) 257(1):56-71. doi:10.1111/imr.12132).

[0493] Approaches such as the foregoing may be adapted to provide methods of treating and/or increasing survival of a subject having a disease, such as a neoplasia, for example by administering an effective amount of an immunoresponsive cell comprising an antigen recognizing receptor that binds a selected antigen, wherein the binding activates the immunoresponsive cell, thereby treating or preventing the disease (such as a neoplasia, a pathogen infection, an autoimmune disorder, or an allogeneic transplant reaction).

[0494] In certain embodiments, the treatment can be administered after lymphodepleting pretreatment in the form of chemotherapy (typically a combination of cyclophosphamide and fludarabine) or radiation therapy. Initial studies in ACT had short lived responses and the transferred cells did not persist in vivo for very long (Houot et al., T-cell-based immunotherapy: adoptive cell transfer and checkpoint inhibition. Cancer Immunol Res (2015) 3(10):1115-22; and Kamta et al., Advancing Cancer Therapy with Present and Emerging Immuno-Oncology Approaches. Front. Oncol. (2017) 7:64). Immune suppressor cells like Tregs and MDSCs may attenuate the activity of transferred cells by outcompeting them for the necessary cytokines. Not being bound by a theory lymphodepleting pretreatment may eliminate the suppressor cells allowing the TILs to persist.

[0495] In one embodiment, the treatment can be administrated into patients undergoing an immunosuppressive treatment (e.g., glucocorticoid treatment). The cells or population of cells, may be made resistant to at least one immunosuppressive agent due to the inactivation of a gene encoding a receptor for such immunosuppressive agent. In certain embodiments, the immunosuppressive treatment provides for the selection and expansion of the immunoresponsive T cells within the patient.

[0496] In certain embodiments, the treatment can be administered before primary treatment (e.g., surgery or radiation therapy) to shrink a tumor before the primary treatment. In another embodiment, the treatment can be administered after primary treatment to remove any remaining cancer cells.

[0497] In certain embodiments, immunometabolic barriers can be targeted therapeutically prior to and/or during ACT to enhance responses to ACT or CAR T-cell therapy and to support endogenous immunity (see, e.g., Irving et al., Engineering Chimeric Antigen Receptor T-Cells for Racing in Solid Tumors: Don't Forget the Fuel, Front. Immunol., 3 Apr. 2017, doi.org/10.3389/fimmu.2017.00267).

[0498] The administration of cells or population of cells, such as immune system cells or cell populations, such as more particularly immunoresponsive cells or cell populations, as disclosed herein may be carried out in any convenient manner, including by aerosol inhalation, injection, ingestion, transfusion, implantation or transplantation. The cells or population of cells may be administered to a patient subcutaneously, intradermally, intratumorally, intranodally, intramedullary, intramuscularly, intrathecally, by intravenous or intralymphatic injection, or intraperitoneally. In some embodiments, the disclosed CARs may be delivered or administered into a cavity formed by the resection of tumor tissue (i.e. intracavity delivery) or directly into a tumor prior to resection (i.e. intratumoral delivery). In one embodiment, the cell compositions of the present invention are preferably administered by intravenous injection.

[0499] The administration of the cells or population of cells can consist of the administration of 10⁴-10⁹ cells per kg body weight, preferably 10⁵ to 10⁶ cells/kg body weight including all integer values of cell numbers within those ranges. Dosing in CAR T cell therapies may for example involve administration of from 10⁶ to 10⁹ cells/kg, with or without a course of lymphodepletion, for example with cyclophosphamide. The cells or population of cells can be administrated in one or more doses. In another embodiment, the effective amount of cells are administrated as a single dose. In another embodiment, the effective amount of cells are administrated as more than one dose over a period time. Timing of administration is within the judgment of managing physician and depends on the clinical condition of the patient. The cells or population of cells may be obtained from any source, such as a blood bank or a donor. While individual needs vary, determination of optimal ranges of effective amounts of a given cell type for a particular disease or conditions are within the skill of one in the art. An effective amount means an amount which provides a therapeutic or prophylactic benefit. The dosage administrated will be dependent upon the age, health and weight of the recipient, kind of concurrent treatment, if any, frequency of treatment and the nature of the effect desired.

[0500] In another embodiment, the effective amount of cells or composition comprising those cells are administrated parenterally. The administration can be an intravenous administration. The administration can be directly done by injection within a tumor.

[0501] To guard against possible adverse reactions, engineered immunoresponsive cells may be equipped with a transgenic safety switch, in the form of a transgene that renders the cells vulnerable to exposure to a specific signal. For example, the herpes simplex viral thymidine kinase (TK) gene may be used in this way, for example by introduction into allogeneic T lymphocytes used as donor lymphocyte infusions following stem cell transplantation (Greco, et al., Improving the safety of cell therapy with the TK-suicide gene. Front. Pharmacol. 2015; 6: 95). In such cells, administration of a nucleoside prodrug such as ganciclovir or acyclovir causes cell death. Alternative safety switch constructs include inducible caspase 9, for example triggered by administration of a small-molecule dimerizer that brings together two nonfunctional icasp9 molecules to form the active enzyme. A wide variety of alternative approaches to implementing cellular proliferation controls have been described (see U.S. Patent Publication No. 20130071414; PCT Patent Publication WO2011146862; PCT Patent Publication WO2014011987; PCT Patent Publication WO2013040371; Zhou et al. BLOOD, 2014, 123/25:3895-3905; Di Stasi et al., The New England Journal of Medicine 2011; 365:1673-1683; Sadelain M, The New England Journal of Medicine 2011; 365:1735-173; Ramos et al., Stem Cells 28(6):1107-15 (2010)).

[0502] In a further refinement of adoptive therapies, genome editing may be used to tailor immunoresponsive cells to alternative implementations, for example providing edited CAR T cells (see Poirot et al., 2015, Multiplex genome edited T-cell manufacturing platform for “off-the-shelf” adoptive T-cell immunotherapies, Cancer Res 75 (18): 3853; Ren et al., 2017, Multiplex genome editing to generate universal CAR T cells resistant to PD1 inhibition, Clin Cancer Res. 2017 May 1; 23(9):2255-2266. doi: 10.1158/1078-0432.CCR-16-1300. Epub 2016 Nov. 4; Qasim et al., 2017, Molecular remission of infant B-ALL after infusion of universal TALEN gene-edited CAR T cells, Sci Transl Med. 2017 Jan. 25; 9(374); Legut, et al., 2018, CRISPR-mediated TCR replacement generates superior anticancer transgenic T cells. Blood, 131(3), 311-322; and Georgiadis et al., Long Terminal Repeat CRISPR-CAR-Coupled “Universal” T Cells Mediate Potent Anti-leukemic Effects, Molecular Therapy, In Press, Corrected Proof, Available online 6 Mar. 2018). Cells may be edited using any CRISPR system and method of use thereof as described herein. CRISPR systems may be delivered to an immune cell by any method described herein. In preferred embodiments, cells are edited ex vivo and transferred to a subject in need thereof. Immunoresponsive cells, CAR T cells or any cells used for adoptive cell transfer may be edited. Editing may be performed for example to insert or knock-in an exogenous gene, such as an exogenous gene encoding a CAR or a TCR, at a preselected locus in a cell (e.g. TRAC locus); to eliminate potential alloreactive T-cell receptors (TCR) or to prevent inappropriate pairing between endogenous and exogenous TCR chains, such as to knock-out or knock-down expression of an endogenous TCR in a cell; to disrupt the target of a chemotherapeutic agent in a cell; to block an immune checkpoint, such as to knock-out or knock-down expression of an immune checkpoint protein or receptor in a cell; to knock-out or knock-down expression of other gene or genes in a cell, the reduced expression or lack of expression of which can enhance the efficacy of adoptive therapies using the cell; to knock-out or knock-down expression of an endogenous gene in a cell, said endogenous gene encoding an antigen targeted by an exogenous CAR or TCR; to knock-out or knock-down expression of one or more MHC constituent proteins in a cell; to activate a T cell; to modulate cells such that the cells are resistant to exhaustion or dysfunction; and/or increase the differentiation and/or proliferation of functionally exhausted or dysfunctional CD8+ T-cells (see PCT Patent Publications: WO2013176915, WO2014059173, WO2014172606, WO2014184744, and WO2014191128).

[0503] In certain embodiments, editing may result in inactivation of a gene. By inactivating a gene, it is intended that the gene of interest is not expressed in a functional protein form. In a particular embodiment, the CRISPR system specifically catalyzes cleavage in one targeted gene thereby inactivating said targeted gene. The nucleic acid strand breaks caused are commonly repaired through the distinct mechanisms of homologous recombination or non-homologous end joining (NHEJ). However, NHEJ is an imperfect repair process that often results in changes to the DNA sequence at the site of the cleavage. Repair via non-homologous end joining (NHEJ) often results in small insertions or deletions (Indel) and can be used for the creation of specific gene knockouts. Cells in which a cleavage induced mutagenesis event has occurred can be identified and/or selected by well-known methods in the art. In certain embodiments, homology directed repair (HDR) is used to concurrently inactivate a gene (e.g., TRAC) and insert an endogenous TCR or CAR into the inactivated locus.

[0504] Hence, in certain embodiments, editing of cells (such as by CRISPR/Cas), particularly cells intended for adoptive cell therapies, more particularly immunoresponsive cells such as T cells, may be performed to insert or knock-in an exogenous gene, such as an exogenous gene encoding a CAR or a TCR, at a preselected locus in a cell. Conventionally, nucleic acid molecules encoding CARs or TCRs are transfected or transduced to cells using randomly integrating vectors, which, depending on the site of integration, may lead to clonal expansion, oncogenic transformation, variegated transgene expression and/or transcriptional silencing of the transgene. Directing of transgene(s) to a specific locus in a cell can minimize or avoid such risks and advantageously provide for uniform expression of the transgene(s) by the cells. Without limitation, suitable ‘safe harbor’ loci for directed transgene integration include CCR5 or AAVS1. Homology-directed repair (HDR) strategies are known and described elsewhere in this specification allowing to insert transgenes into desired loci (e.g., TRAC locus).

[0505] Further suitable loci for insertion of transgenes, in particular CAR or exogenous TCR transgenes, include without limitation loci comprising genes coding for constituents of endogenous T-cell receptor, such as T-cell receptor alpha locus (TRA) or T-cell receptor beta locus (TRB), for example T-cell receptor alpha constant (TRAC) locus, T-cell receptor beta constant 1 (TRBC1) locus or T-cell receptor beta constant 2 (TRBC1) locus. Advantageously, insertion of a transgene into such locus can simultaneously achieve expression of the transgene, potentially controlled by the endogenous promoter, and knock-out expression of the endogenous TCR. This approach has been exemplified in Eyquem et al., (2017) Nature 543: 113-117, wherein the authors used CRISPR/Cas9 gene editing to knock-in a DNA molecule encoding a CD19-specific CAR into the TRAC locus downstream of the endogenous promoter; the CAR-T cells obtained by CRISPR were significantly superior in terms of reduced tonic CAR signaling and exhaustion.

[0506] T cell receptors (TCR) are cell surface receptors that participate in the activation of T cells in response to the presentation of antigen. The TCR is generally made from two chains, a and 13, which assemble to form a heterodimer and associates with the CD3-transducing subunits to form the T cell receptor complex present on the cell surface. Each a and 13 chain of the TCR consists of an immunoglobulin-like N-terminal variable (V) and constant (C) region, a hydrophobic transmembrane domain, and a short cytoplasmic region. As for immunoglobulin molecules, the variable region of the a and 13 chains are generated by V(D)J recombination, creating a large diversity of antigen specificities within the population of T cells. However, in contrast to immunoglobulins that recognize intact antigen, T cells are activated by processed peptide fragments in association with an MHC molecule, introducing an extra dimension to antigen recognition by T cells, known as MHC restriction. Recognition of MHC disparities between the donor and recipient through the T cell receptor leads to T cell proliferation and the potential development of graft versus host disease (GVHD). The inactivation of TCRα or TCRβ can result in the elimination of the TCR from the surface of T cells preventing recognition of alloantigen and thus GVHD. However, TCR disruption generally results in the elimination of the CD3 signaling component and alters the means of further T cell expansion.

[0507] Hence, in certain embodiments, editing of cells (such as by CRISPR/Cas), particularly cells intended for adoptive cell therapies, more particularly immunoresponsive cells such as T cells, may be performed to knock-out or knock-down expression of an endogenous TCR in a cell. For example, NHEJ-based or HDR-based gene editing approaches can be employed to disrupt the endogenous TCR alpha and/or beta chain genes. For example, gene editing system or systems, such as CRISPR/Cas system or systems, can be designed to target a sequence found within the TCR beta chain conserved between the beta 1 and beta 2 constant region genes (TRBC1 and TRBC2) and/or to target the constant region of the TCR alpha chain (TRAC) gene.

[0508] Allogeneic cells are rapidly rejected by the host immune system. It has been demonstrated that, allogeneic leukocytes present in non-irradiated blood products will persist for no more than 5 to 6 days (Boni, Muranski et al. 2008 Blood 1; 112(12):4746-54). Thus, to prevent rejection of allogeneic cells, the host's immune system usually has to be suppressed to some extent. However, in the case of adoptive cell transfer the use of immunosuppressive drugs also have a detrimental effect on the introduced therapeutic T cells. Therefore, to effectively use an adoptive immunotherapy approach in these conditions, the introduced cells would need to be resistant to the immunosuppressive treatment. Thus, in a particular embodiment, the present invention further comprises a step of modifying T cells to make them resistant to an immunosuppressive agent, preferably by inactivating at least one gene encoding a target for an immunosuppressive agent. An immunosuppressive agent is an agent that suppresses immune function by one of several mechanisms of action. An immunosuppressive agent can be, but is not limited to a calcineurin inhibitor, a target of rapamycin, an interleukin-2 receptor a-chain blocker, an inhibitor of inosine monophosphate dehydrogenase, an inhibitor of dihydrofolic acid reductase, a corticosteroid or an immunosuppressive antimetabolite. The present invention allows conferring immunosuppressive resistance to T cells for immunotherapy by inactivating the target of the immunosuppressive agent in T cells. As non-limiting examples, targets for an immunosuppressive agent can be a receptor for an immunosuppressive agent such as: CD52, glucocorticoid receptor (GR), a FKBP family gene member and a cyclophilin family gene member.

[0509] In certain embodiments, editing of cells (such as by CRISPR/Cas), particularly cells intended for adoptive cell therapies, more particularly immunoresponsive cells such as T cells, may be performed to block an immune checkpoint, such as to knock-out or knock-down expression of an immune checkpoint protein or receptor in a cell. Immune checkpoints are inhibitory pathways that slow down or stop immune reactions and prevent excessive tissue damage from uncontrolled activity of immune cells. In certain embodiments, the immune checkpoint targeted is the programmed death-1 (PD-1 or CD279) gene (PDCD1). In other embodiments, the immune checkpoint targeted is cytotoxic T-lymphocyte-associated antigen (CTLA-4). In additional embodiments, the immune checkpoint targeted is another member of the CD28 and CTLA4 Ig superfamily such as BTLA, LAG3, ICOS, PDL1 or MR. In further additional embodiments, the immune checkpoint targeted is a member of the TNFR superfamily such as CD40, OX40, CD137, GITR, CD27 or TIM-3.

[0510] Additional immune checkpoints include Src homology 2 domain-containing protein tyrosine phosphatase 1 (SHP-1) (Watson H A, et al., SHP-1: the next checkpoint target for cancer immunotherapy? Biochem Soc Trans. 2016 Apr. 15; 44(2):356-62). SHP-1 is a widely expressed inhibitory protein tyrosine phosphatase (PTP). In T-cells, it is a negative regulator of antigen-dependent activation and proliferation. It is a cytosolic protein, and therefore not amenable to antibody-mediated therapies, but its role in activation and proliferation makes it an attractive target for genetic manipulation in adoptive transfer strategies, such as chimeric antigen receptor (CAR) T cells. Immune checkpoints may also include T cell immunoreceptor with Ig and ITIM domains (TIGITNstm3/WUCAM/VSIG9) and VISTA (Le Mercier I, et al., (2015) Beyond CTLA-4 and PD-1, the generation Z of negative checkpoint regulators. Front. Immunol. 6:418).

[0511] WO2014172606 relates to the use of MT1 and/or MT2 inhibitors to increase proliferation and/or activity of exhausted CD8+ T-cells and to decrease CD8+ T-cell exhaustion (e.g., decrease functionally exhausted or unresponsive CD8+ immune cells). In certain embodiments, metallothioneins are targeted by gene editing in adoptively transferred T cells.

[0512] In certain embodiments, targets of gene editing may be at least one targeted locus involved in the expression of an immune checkpoint protein. Such targets may include, but are not limited to CTLA4, PPP2CA, PPP2CB, PTPN6, PTPN22, PDCD1, ICOS (CD278), PDL1, KIR, LAG3, HAVCR2, BTLA, CD160, TIGIT, CD96, CRTAM, LAIR1, SIGLEC7, SIGLEC9, CD244 (2B4), TNFRSF10B, TNFRSF10A, CASP8, CASP10, CASP3, CASP6, CASP7, FADD, FAS, TGFBRII, TGFRBRI, SMAD2, SMAD3, SMAD4, SMAD10, SKI, SKIL, TGIF1, IL10RA, IL10RB, HMOX2, IL6R, IL6ST, EIF2AK4, CSK, PAG1, SIT1, FOXP3, PRDM1, BATF, VISTA, GUCY1A2, GUCY1A3, GUCY1B2, GUCY1B3, MT1, MT2, CD40, OX40, CD137, GITR, CD27, SHP-1, TIM-3, CEACAM-1, CEACAM-3, or CEACAM-5. In preferred embodiments, the gene locus involved in the expression of PD-1 or CTLA-4 genes is targeted. In other preferred embodiments, combinations of genes are targeted, such as but not limited to PD-1 and TIGIT.

[0513] By means of an example and without limitation, WO2016196388 concerns an engineered T cell comprising (a) a genetically engineered antigen receptor that specifically binds to an antigen, which receptor may be a CAR; and (b) a disrupted gene encoding a PD-L1, an agent for disruption of a gene encoding a PD-L1, and/or disruption of a gene encoding PD-L1, wherein the disruption of the gene may be mediated by a gene editing nuclease, a zinc finger nuclease (ZFN), CRISPR/Cas9 and/or TALEN. WO2015142675 relates to immune effector cells comprising a CAR in combination with an agent (such as CRISPR, TALEN or ZFN) that increases the efficacy of the immune effector cells in the treatment of cancer, wherein the agent may inhibit an immune inhibitory molecule, such as PD1, PD-L1, CTLA-4, TIM-3, LAG-3, VISTA, BTLA, TIGIT, LAIR1, CD160, 2B4, TGFR beta, CEACAM-1, CEACAM-3, or CEACAM-5. Ren et al., (2017) Clin Cancer Res 23 (9) 2255-2266 performed lentiviral delivery of CAR and electro-transfer of Cas9 mRNA and gRNAs targeting endogenous TCR, β-2 microglobulin (B2M) and PD1 simultaneously, to generate gene-disrupted allogeneic CAR T cells deficient of TCR, HLA class I molecule and PD1.

[0514] In certain embodiments, cells may be engineered to express a CAR, wherein expression and/or function of methylcytosine dioxygenase genes (TET1, TET2 and/or TET3) in the cells has been reduced or eliminated, such as by CRISPR, ZNF or TALEN (for example, as described in WO201704916).

[0515] In certain embodiments, editing of cells (such as by CRISPR/Cas), particularly cells intended for adoptive cell therapies, more particularly immunoresponsive cells such as T cells, may be performed to knock-out or knock-down expression of an endogenous gene in a cell, said endogenous gene encoding an antigen targeted by an exogenous CAR or TCR, thereby reducing the likelihood of targeting of the engineered cells. In certain embodiments, the targeted antigen may be one or more antigen selected from the group consisting of CD38, CD138, CS-1, CD33, CD26, CD30, CD53, CD92, CD100, CD148, CD150, CD200, CD261, CD262, CD362, human telomerase reverse transcriptase (hTERT), survivin, mouse double minute 2 homolog (MDM2), cytochrome P450 1B1 (CYP1B), HER2/neu, Wilms' tumor gene 1 (WT1), livin, alphafetoprotein (AFP), carcinoembryonic antigen (CEA), mucin 16 (MUC16), MUC1, prostate-specific membrane antigen (PSMA), p53, cyclin (D1), B cell maturation antigen (BCMA), transmembrane activator and CAML Interactor (TACI), and B-cell activating factor receptor (BAFF-R) (for example, as described in WO2016011210 and WO2017011804).

[0516] In certain embodiments, editing of cells (such as by CRISPR/Cas), particularly cells intended for adoptive cell therapies, more particularly immunoresponsive cells such as T cells, may be performed to knock-out or knock-down expression of one or more MHC constituent proteins, such as one or more HLA proteins and/or beta-2 microglobulin (B2M), in a cell, whereby rejection of non-autologous (e.g., allogeneic) cells by the recipient's immune system can be reduced or avoided. In preferred embodiments, one or more HLA class I proteins, such as HLA-A, B and/or C, and/or B2M may be knocked-out or knocked-down. Preferably, B2M may be knocked-out or knocked-down. By means of an example, Ren et al., (2017) Clin Cancer Res 23 (9) 2255-2266 performed lentiviral delivery of CAR and electro-transfer of Cas9 mRNA and gRNAs targeting endogenous TCR, β-2 microglobulin (B2M) and PD1 simultaneously, to generate gene-disrupted allogeneic CAR T cells deficient of TCR, HLA class I molecule and PD1.

[0517] In other embodiments, at least two genes are edited. Pairs of genes may include, but are not limited to PD1 and TCRα, PD1 and TCRβ, CTLA-4 and TCRα, CTLA-4 and TCRβ, LAG3 and TCRα, LAG3 and TCRβ, Tim3 and TCRα, Tim3 and TCRβ, BTLA and TCRα, BTLA and TCRβ, BY55 and TCRα, BY55 and TCRβ, TIGIT and TCRα, TIGIT and TCRβ, B7H5 and TCRα, B7H5 and TCRβ, LAIR1 and TCRα, LAIR1 and TCRβ, SIGLEC10 and TCRα, SIGLEC10 and TCRβ, 2B4 and TCRα, 2B4 and TCRβ, B2M and TCRα, B2M and TCRβ.

[0518] In certain embodiments, a cell may be multiply edited (multiplex genome editing) as taught herein to (1) knock-out or knock-down expression of an endogenous TCR (for example, TRBC1, TRBC2 and/or TRAC), (2) knock-out or knock-down expression of an immune checkpoint protein or receptor (for example PD1, PD-L1 and/or CTLA4); and (3) knock-out or knock-down expression of one or more MHC constituent proteins (for example, HLA-A, B and/or C, and/or B2M, preferably B2M).

[0519] Whether prior to or after genetic modification of the T cells, the T cells can be activated and expanded generally using methods as described, for example, in U.S. Pat. Nos. 6,352,694; 6,534,055; 6,905,680; 5,858,358; 6,887,466; 6,905,681; 7,144,575; 7,232,566; 7,175,843; 5,883,223; 6,905,874; 6,797,514; 6,867,041; and 7,572,631. T cells can be expanded in vitro or in vivo.

[0520] Immune cells may be obtained using any method known in the art. In one embodiment, allogenic T cells may be obtained from healthy subjects. In one embodiment T cells that have infiltrated a tumor are isolated. T cells may be removed during surgery. T cells may be isolated after removal of tumor tissue by biopsy. T cells may be isolated by any means known in the art. In one embodiment, T cells are obtained by apheresis. In one embodiment, the method may comprise obtaining a bulk population of T cells from a tumor sample by any suitable method known in the art. For example, a bulk population of T cells can be obtained from a tumor sample by dissociating the tumor sample into a cell suspension from which specific cell populations can be selected. Suitable methods of obtaining a bulk population of T cells may include, but are not limited to, any one or more of mechanically dissociating (e.g., mincing) the tumor, enzymatically dissociating (e.g., digesting) the tumor, and aspiration (e.g., as with a needle).

[0521] The bulk population of T cells obtained from a tumor sample may comprise any suitable type of T cell. Preferably, the bulk population of T cells obtained from a tumor sample comprises tumor infiltrating lymphocytes (TILs).

[0522] The tumor sample may be obtained from any mammal. Unless stated otherwise, as used herein, the term “mammal” refers to any mammal including, but not limited to, mammals of the order Logomorpha, such as rabbits; the order Carnivora, including Felines (cats) and Canines (dogs); the order Artiodactyla, including Bovines (cows) and Swines (pigs); or of the order Perssodactyla, including Equines (horses). The mammals may be non-human primates, e.g., of the order Primates, Ceboids, or Simoids (monkeys) or of the order Anthropoids (humans and apes). In some embodiments, the mammal may be a mammal of the order Rodentia, such as mice and hamsters. Preferably, the mammal is a non-human primate or a human. An especially preferred mammal is the human.

[0523] T cells can be obtained from a number of sources, including peripheral blood mononuclear cells, bone marrow, lymph node tissue, spleen tissue, and tumors. In certain embodiments of the present invention, T cells can be obtained from a unit of blood collected from a subject using any number of techniques known to the skilled artisan, such as Ficoll separation. In one preferred embodiment, cells from the circulating blood of an individual are obtained by apheresis or leukapheresis. The apheresis product typically contains lymphocytes, including T cells, monocytes, granulocytes, B cells, other nucleated white blood cells, red blood cells, and platelets. In one embodiment, the cells collected by apheresis may be washed to remove the plasma fraction and to place the cells in an appropriate buffer or media for subsequent processing steps. In one embodiment of the invention, the cells are washed with phosphate buffered saline (PBS). In an alternative embodiment, the wash solution lacks calcium and may lack magnesium or may lack many if not all divalent cations. Initial activation steps in the absence of calcium lead to magnified activation. As those of ordinary skill in the art would readily appreciate a washing step may be accomplished by methods known to those in the art, such as by using a semi-automated “flow-through” centrifuge (for example, the Cobe 2991 cell processor) according to the manufacturer's instructions. After washing, the cells may be resuspended in a variety of biocompatible buffers, such as, for example, Ca-free, Mg-free PBS. Alternatively, the undesirable components of the apheresis sample may be removed and the cells directly resuspended in culture media.

[0524] In another embodiment, T cells are isolated from peripheral blood lymphocytes by lysing the red blood cells and depleting the monocytes, for example, by centrifugation through a PERCOLL™ gradient. A specific subpopulation of T cells, such as CD28+, CD4+, CDC, CD45RA+, and CD45RO+ T cells, can be further isolated by positive or negative selection techniques. For example, in one preferred embodiment, T cells are isolated by incubation with anti-CD3/anti-CD28 (i.e., 3X28)-conjugated beads, such as DYNABEADS® M-450 CD3/CD28 T, or XCYTE DYNABEADS™ for a time period sufficient for positive selection of the desired T cells. In one embodiment, the time period is about 30 minutes. In a further embodiment, the time period ranges from 30 minutes to 36 hours or longer and all integer values there between. In a further embodiment, the time period is at least 1, 2, 3, 4, 5, or 6 hours. In yet another preferred embodiment, the time period is 10 to 24 hours. In one preferred embodiment, the incubation time period is 24 hours. For isolation of T cells from patients with leukemia, use of longer incubation times, such as 24 hours, can increase cell yield. Longer incubation times may be used to isolate T cells in any situation where there are few T cells as compared to other cell types, such in isolating tumor infiltrating lymphocytes (TIL) from tumor tissue or from immunocompromised individuals. Further, use of longer incubation times can increase the efficiency of capture of CD8+ T cells.

[0525] Enrichment of a T cell population by negative selection can be accomplished with a combination of antibodies directed to surface markers unique to the negatively selected cells. A preferred method is cell sorting and/or selection via negative magnetic immunoadherence or flow cytometry that uses a cocktail of monoclonal antibodies directed to cell surface markers present on the cells negatively selected. For example, to enrich for CD4+ cells by negative selection, a monoclonal antibody cocktail typically includes antibodies to CD14, CD20, CD11b, CD16, HLA-DR, and CD8.

[0526] Further, monocyte populations (i.e., CD14+ cells) may be depleted from blood preparations by a variety of methodologies, including anti-CD14 coated beads or columns, or utilization of the phagocytotic activity of these cells to facilitate removal. Accordingly, in one embodiment, the invention uses paramagnetic particles of a size sufficient to be engulfed by phagocytotic monocytes. In certain embodiments, the paramagnetic particles are commercially available beads, for example, those produced by Life Technologies under the trade name Dynabeads™. In one embodiment, other non-specific cells are removed by coating the paramagnetic particles with “irrelevant” proteins (e.g., serum proteins or antibodies). Irrelevant proteins and antibodies include those proteins and antibodies or fragments thereof that do not specifically target the T cells to be isolated. In certain embodiments, the irrelevant beads include beads coated with sheep anti-mouse antibodies, goat anti-mouse antibodies, and human serum albumin.

[0527] In brief, such depletion of monocytes is performed by preincubating T cells isolated from whole blood, apheresed peripheral blood, or tumors with one or more varieties of irrelevant or non-antibody coupled paramagnetic particles at any amount that allows for removal of monocytes (approximately a 20:1 bead:cell ratio) for about 30 minutes to 2 hours at 22 to 37 degrees C., followed by magnetic removal of cells which have attached to or engulfed the paramagnetic particles. Such separation can be performed using standard methods available in the art. For example, any magnetic separation methodology may be used including a variety of which are commercially available, (e.g., DYNAL® Magnetic Particle Concentrator (DYNAL MPC®)). Assurance of requisite depletion can be monitored by a variety of methodologies known to those of ordinary skill in the art, including flow cytometric analysis of CD14 positive cells, before and after depletion.

[0528] For isolation of a desired population of cells by positive or negative selection, the concentration of cells and surface (e.g., particles such as beads) can be varied. In certain embodiments, it may be desirable to significantly decrease the volume in which beads and cells are mixed together (i.e., increase the concentration of cells), to ensure maximum contact of cells and beads. For example, in one embodiment, a concentration of 2 billion cells/ml is used. In one embodiment, a concentration of 1 billion cells/ml is used. In a further embodiment, greater than 100 million cells/ml is used. In a further embodiment, a concentration of cells of 10, 15, 20, 25, 30, 35, 40, 45, or 50 million cells/ml is used. In yet another embodiment, a concentration of cells from 75, 80, 85, 90, 95, or 100 million cells/ml is used. In further embodiments, concentrations of 125 or 150 million cells/ml can be used. Using high concentrations can result in increased cell yield, cell activation, and cell expansion. Further, use of high cell concentrations allows more efficient capture of cells that may weakly express target antigens of interest, such as CD28-negative T cells, or from samples where there are many tumor cells present (i.e., leukemic blood, tumor tissue, etc). Such populations of cells may have therapeutic value and would be desirable to obtain. For example, using high concentration of cells allows more efficient selection of CD8+ T cells that normally have weaker CD28 expression.

[0529] In a related embodiment, it may be desirable to use lower concentrations of cells. By significantly diluting the mixture of T cells and surface (e.g., particles such as beads), interactions between the particles and cells is minimized. This selects for cells that express high amounts of desired antigens to be bound to the particles. For example, CD4+ T cells express higher levels of CD28 and are more efficiently captured than CD8+ T cells in dilute concentrations. In one embodiment, the concentration of cells used is 5×10⁶/ml. In other embodiments, the concentration used can be from about 1×10⁵/ml to 1×10⁶/ml, and any integer value in between.

[0530] T cells can also be frozen. Wishing not to be bound by theory, the freeze and subsequent thaw step provides a more uniform product by removing granulocytes and to some extent monocytes in the cell population. After a washing step to remove plasma and platelets, the cells may be suspended in a freezing solution. While many freezing solutions and parameters are known in the art and will be useful in this context, one method involves using PBS containing 20% DMSO and 8% human serum albumin, or other suitable cell freezing media, the cells then are frozen to −80° C. at a rate of 1° per minute and stored in the vapor phase of a liquid nitrogen storage tank. Other methods of controlled freezing may be used as well as uncontrolled freezing immediately at −20° C. or in liquid nitrogen.

[0531] T cells for use in the present invention may also be antigen-specific T cells. For example, tumor-specific T cells can be used. In certain embodiments, antigen-specific T cells can be isolated from a patient of interest, such as a patient afflicted with a cancer or an infectious disease. In one embodiment, neoepitopes are determined for a subject and T cells specific to these antigens are isolated. Antigen-specific cells for use in expansion may also be generated in vitro using any number of methods known in the art, for example, as described in U.S. Patent Publication No. US 20040224402 entitled, Generation and Isolation of Antigen-Specific T Cells, or in U.S. Pat. No. 6,040,177. Antigen-specific cells for use in the present invention may also be generated using any number of methods known in the art, for example, as described in Current Protocols in Immunology, or Current Protocols in Cell Biology, both published by John Wiley & Sons, Inc., Boston, Mass.

[0532] In a related embodiment, it may be desirable to sort or otherwise positively select (e.g. via magnetic selection) the antigen specific cells prior to or following one or two rounds of expansion. Sorting or positively selecting antigen-specific cells can be carried out using peptide-MHC tetramers (Altman, et al., Science. 1996 Oct. 4; 274(5284):94-6). In another embodiment, the adaptable tetramer technology approach is used (Andersen et al., 2012 Nat Protoc. 7:891-902). Tetramers are limited by the need to utilize predicted binding peptides based on prior hypotheses, and the restriction to specific HLAs. Peptide-MHC tetramers can be generated using techniques known in the art and can be made with any MHC molecule of interest and any antigen of interest as described herein. Specific epitopes to be used in this context can be identified using numerous assays known in the art. For example, the ability of a polypeptide to bind to MHC class I may be evaluated indirectly by monitoring the ability to promote incorporation of ¹²⁵I labeled β2-microglobulin (β2m) into MHC class I/β2m/peptide heterotrimeric complexes (see Parker et al., J. Immunol. 152:163, 1994).

[0533] In one embodiment cells are directly labeled with an epitope-specific reagent for isolation by flow cytometry followed by characterization of phenotype and TCRs. In one embodiment, T cells are isolated by contacting with T cell specific antibodies. Sorting of antigen-specific T cells, or generally any cells of the present invention, can be carried out using any of a variety of commercially available cell sorters, including, but not limited to, MoFlo sorter (DakoCytomation, Fort Collins, Colo.), FACSAria™, FACSArray™ FACSVantage™, BD™ LSR II, and FACSCalibur™ (BD Biosciences, San Jose, Calif.).

[0534] In a preferred embodiment, the method comprises selecting cells that also express CD3. The method may comprise specifically selecting the cells in any suitable manner. Preferably, the selecting is carried out using flow cytometry. The flow cytometry may be carried out using any suitable method known in the art. The flow cytometry may employ any suitable antibodies and stains. Preferably, the antibody is chosen such that it specifically recognizes and binds to the particular biomarker being selected. For example, the specific selection of CD3, CD8, TIM-3, LAG-3, 4-1BB, or PD-1 may be carried out using anti-CD3, anti-CD8, anti-TIM-3, anti-LAG-3, anti-4-1BB, or anti-PD-1 antibodies, respectively. The antibody or antibodies may be conjugated to a bead (e.g., a magnetic bead) or to a fluorochrome. Preferably, the flow cytometry is fluorescence-activated cell sorting (FACS). TCRs expressed on T cells can be selected based on reactivity to autologous tumors. Additionally, T cells that are reactive to tumors can be selected for based on markers using the methods described in patent publication Nos. WO2014133567 and WO2014133568, herein incorporated by reference in their entirety. Additionally, activated T cells can be selected for based on surface expression of CD107a.

[0535] In one embodiment of the invention, the method further comprises expanding the numbers of T cells in the enriched cell population. Such methods are described in U.S. Pat. No. 8,637,307 and is herein incorporated by reference in its entirety. The numbers of T cells may be increased at least about 3-fold (or 4-, 5-, 6-, 7-, 8-, or 9-fold), more preferably at least about 10-fold (or 20-, 30-, 40-, 50-, 60-, 70-, 80-, or 90-fold), more preferably at least about 100-fold, more preferably at least about 1,000 fold, or most preferably at least about 100,000-fold. The numbers of T cells may be expanded using any suitable method known in the art. Exemplary methods of expanding the numbers of cells are described in patent publication No. WO 2003057171, U.S. Pat. No. 8,034,334, and U.S. Patent Application Publication No. 2012/0244133, each of which is incorporated herein by reference.

[0536] In one embodiment, ex vivo T cell expansion can be performed by isolation of T cells and subsequent stimulation or activation followed by further expansion. In one embodiment of the invention, the T cells may be stimulated or activated by a single agent. In another embodiment, T cells are stimulated or activated with two agents, one that induces a primary signal and a second that is a co-stimulatory signal. Ligands useful for stimulating a single signal or stimulating a primary signal and an accessory molecule that stimulates a second signal may be used in soluble form. Ligands may be attached to the surface of a cell, to an Engineered Multivalent Signaling Platform (EMSP), or immobilized on a surface. In a preferred embodiment both primary and secondary agents are co-immobilized on a surface, for example a bead or a cell. In one embodiment, the molecule providing the primary activation signal may be a CD3 ligand, and the co-stimulatory molecule may be a CD28 ligand or 4-1BB ligand.

[0537] In certain embodiments, T cells comprising a CAR or an exogenous TCR, may be manufactured as described in WO2015120096, by a method comprising: enriching a population of lymphocytes obtained from a donor subject; stimulating the population of lymphocytes with one or more T-cell stimulating agents to produce a population of activated T cells, wherein the stimulation is performed in a closed system using serum-free culture medium; transducing the population of activated T cells with a viral vector comprising a nucleic acid molecule which encodes the CAR or TCR, using a single cycle transduction to produce a population of transduced T cells, wherein the transduction is performed in a closed system using serum-free culture medium; and expanding the population of transduced T cells for a predetermined time to produce a population of engineered T cells, wherein the expansion is performed in a closed system using serum-free culture medium. In certain embodiments, T cells comprising a CAR or an exogenous TCR, may be manufactured as described in WO2015120096, by a method comprising: obtaining a population of lymphocytes; stimulating the population of lymphocytes with one or more stimulating agents to produce a population of activated T cells, wherein the stimulation is performed in a closed system using serum-free culture medium; transducing the population of activated T cells with a viral vector comprising a nucleic acid molecule which encodes the CAR or TCR, using at least one cycle transduction to produce a population of transduced T cells, wherein the transduction is performed in a closed system using serum-free culture medium; and expanding the population of transduced T cells to produce a population of engineered T cells, wherein the expansion is performed in a closed system using serum-free culture medium. The predetermined time for expanding the population of transduced T cells may be 3 days. The time from enriching the population of lymphocytes to producing the engineered T cells may be 6 days. The closed system may be a closed bag system. Further provided is population of T cells comprising a CAR or an exogenous TCR obtainable or obtained by said method, and a pharmaceutical composition comprising such cells.

[0538] In certain embodiments, T cell maturation or differentiation in vitro may be delayed or inhibited by the method as described in WO2017070395, comprising contacting one or more T cells from a subject in need of a T cell therapy with an AKT inhibitor (such as, e.g., one or a combination of two or more AKT inhibitors disclosed in claim 8 of WO2017070395) and at least one of exogenous Interleukin-7 (IL-7) and exogenous Interleukin-15 (IL-15), wherein the resulting T cells exhibit delayed maturation or differentiation, and/or wherein the resulting T cells exhibit improved T cell function (such as, e.g., increased T cell proliferation; increased cytokine production; and/or increased cytolytic activity) relative to a T cell function of a T cell cultured in the absence of an AKT inhibitor.

[0539] In certain embodiments, a patient in need of a T cell therapy may be conditioned by a method as described in WO2016191756 comprising administering to the patient a dose of cyclophosphamide between 200 mg/m2/day and 2000 mg/m2/day and a dose of fludarabine between 20 mg/m2/day and 900 mg/m²/day.

[0540] In certain embodiments, the combination therapies described herein are used in further combination with cancer therapies according to the standard of care for the particular cancer.

### Perturb-Seq

[0541] In certain embodiments, the combination screens described herein are compatible within single cell transcriptome studies. In certain embodiments, barcodes associated with combinations of guide sequences as described herein are transcribed into poly A tailed transcripts. In certain embodiments, single cell transcriptomes and transcripts comprising the guide sequence barcodes are labeled with cell of origin barcodes, thus allowing the combination perturbations to be associated with single cell gene expression. Methods and tools for genome-scale screening of perturbations in single cells using CRISPR-Cas9 have been described, herein referred to as perturb-seq (see e.g., Dixit et al., “Perturb-Seq: Dissecting Molecular Circuits with Scalable Single-Cell RNA Profiling of Pooled Genetic Screens” 2016, Cell 167, 1853-1866; Adamson et al., “A Multiplexed Single-Cell CRISPR Screening Platform Enables Systematic Dissection of the Unfolded Protein Response” 2016, Cell 167, 1867-1882; Feldman et al., Lentiviral co-packaging mitigates the effects of intermolecular recombination and multiple integrations in pooled genetic screens, bioRxiv 262121, doi: doi.org/10.1101/262121; Datlinger, et al., 2017, Pooled CRISPR screening with single-cell transcriptome readout. Nature Methods. Vol. 14 No. 3 DOI: 10.1038/nmeth.4177; Hill et al., On the design of CRISPR-based single cell molecular screens, Nat Methods. 2018 April; 15(4): 271-274; and International publication serial number WO/2017/075294). The present invention is compatible with perturb-seq, such that combinations of genes may be perturbed and the perturbation may be identified and assigned to the proteomic and gene expression readouts of single cells. In certain embodiments, signature genes may be perturbed in single cells and gene expression analyzed. Not being bound by a theory, networks of genes that are disrupted due to perturbation of a signature gene may be determined. Understanding the network of genes effected by a perturbation may allow for a gene to be linked to a specific pathway that may be targeted to modulate the signature and treat a cancer. Thus, in certain embodiments, perturb-seq is used to discover novel drug targets to allow treatment of specific cancer patients having the gene signature of the present invention. In certain embodiments, perturbation barcodes are transcribed from a RNA polymerase II promoter to produce a transcript that can be captured using single cell RNA-seq techniques, such as in CROP-seq (see, e.g., Datlinger, et al., 2017).

[0542] The perturbation methods and tools allow reconstructing of a cellular network or circuit. In one embodiment, the method comprises (1) introducing single-order or combinatorial perturbations to a population of cells, (2) measuring genomic, genetic, proteomic, epigenetic and/or phenotypic differences in single cells and (3) assigning a perturbation(s) to the single cells. Not being bound by a theory, a perturbation may be linked to a phenotypic change, preferably changes in gene or protein expression. In preferred embodiments, measured differences that are relevant to the perturbations are determined by applying a model accounting for co-variates to the measured differences. The model may include the capture rate of measured signals, whether the perturbation actually perturbed the cell (phenotypic impact), the presence of subpopulations of either different cells or cell states, and/or analysis of matched cells without any perturbation. In certain embodiments, the measuring of phenotypic differences and assigning a perturbation to a single cell is determined by performing single cell RNA sequencing (RNA-seq). In preferred embodiments, the single cell RNA-seq is performed by any method as described herein (e.g., Drop-seq, InDrop, 10× genomics). In certain embodiments, unique barcodes are used to perform Perturb-seq. In certain embodiments, a guide RNA is detected by RNA-seq using a transcript expressed from a vector encoding the guide RNA. The transcript may include a unique barcode specific to the guide RNA. Not being bound by a theory, a guide RNA and guide RNA barcode is expressed from the same vector and the barcode may be detected by RNA-seq. Not being bound by a theory, detection of a guide RNA barcode is more reliable than detecting a guide RNA sequence, reduces the chance of false guide RNA assignment and reduces the sequencing cost associated with executing these screens. Thus, a perturbation may be assigned to a single cell by detection of a guide RNA barcode in the cell. In certain embodiments, a cell barcode is added to the RNA in single cells, such that the RNA may be assigned to a single cell. Generating cell barcodes is described herein for single cell sequencing methods. In certain embodiments, a Unique Molecular Identifier (UMI) is added to each individual transcript and protein capture oligonucleotide. Not being bound by a theory, the UMI allows for determining the capture rate of measured signals, or preferably the binding events or the number of transcripts captured. Not being bound by a theory, the data is more significant if the signal observed is derived from more than one protein binding event or transcript. In preferred embodiments, Perturb-seq is performed using a guide RNA barcode expressed as a polyadenylated transcript, a cell barcode, and a UMI.

[0543] A CRISPR system may be delivered to primary mouse T-cells. Over 80% transduction efficiency may be achieved with Lenti-CRISPR constructs in CD4 and CD8 T-cells. Despite success with lentiviral delivery, recent work by Hendel et al, (Nature Biotechnology 33, 985-989 (2015) doi:10.1038/nbt.3290) showed the efficiency of editing human T-cells with chemically modified RNA, and direct RNA delivery to T-cells via electroporation. In certain embodiments, perturbation in mouse primary T-cells may use these methods.

[0544] In certain embodiments, whole genome screens can be used for understanding the phenotypic readout of perturbing potential target genes. In preferred embodiments, perturbations target expressed genes as defined by a gene signature using a focused sgRNA library. Libraries may be focused on expressed genes in specific networks or pathways. In other preferred embodiments, regulatory drivers are perturbed. In certain embodiments, Applicants perform systematic perturbation of key genes that regulate T-cell function in a high-throughput fashion. In certain embodiments, Applicants perform systematic perturbation of key genes that regulate cancer cell function in a high-throughput fashion (e.g., immune resistance or immunotherapy resistance). Applicants can use gene expression profiling data to define the target of interest and perform follow-up single-cell and population RNA-seq analysis. Not being bound by a theory, this approach will accelerate the development of therapeutics for human disorders, in particular cancer. Not being bound by a theory, this approach will enhance the understanding of the biology of T-cells and tumor immunity, and accelerate the development of therapeutics for human disorders, in particular cancer, as described herein.

[0545] Not being bound by a theory, perturbation studies targeting the genes and gene signatures described herein could (1) generate new insights regarding regulation and interaction of molecules within the system that contribute to suppression of an immune response, such as in the case within the tumor microenvironment, and (2) establish potential therapeutic targets or pathways that could be translated into clinical application.

[0546] In certain embodiments, after determining Perturb-seq effects in cancer cells and/or primary T-cells, the cells are infused back to the tumor xenograft models (melanoma, such as B16F10 and colon cancer, such as CT26) to observe the phenotypic effects of genome editing. Not being bound by a theory, detailed characterization can be performed based on (1) the phenotypes related to tumor progression, tumor growth, immune response, etc. (2) the TILs that have been genetically perturbed by CRISPR-Cas9 can be isolated from tumor samples, subject to cytokine profiling, qPCR/RNA-seq, and single-cell analysis to understand the biological effects of perturbing the key driver genes within the tumor-immune cell contexts. Not being bound by a theory, this will lead to validation of TILs biology as well as lead to therapeutic targets.

[0547] In certain embodiments, the invention involves single cell RNA sequencing (see, e.g., Kalisky, T., Blainey, P. & Quake, S. R. Genomic Analysis at the Single-Cell Level. Annual review of genetics 45, 431-445, (2011); Kalisky, T. & Quake, S. R. Single-cell genomics. Nature Methods 8, 311-314 (2011); Islam, S. et al. Characterization of the single-cell transcriptional landscape by highly multiplex RNA-seq. Genome Research, (2011); Tang, F. et al. RNA-Seq analysis to capture the transcriptome landscape of a single cell. Nature Protocols 5, 516-535, (2010); Tang, F. et al. mRNA-Seq whole-transcriptome analysis of a single cell. Nature Methods 6, 377-382, (2009); Ramskold, D. et al. Full-length mRNA-Seq from single-cell levels of RNA and individual circulating tumor cells. Nature Biotechnology 30, 777-782, (2012); and Hashimshony, T., Wagner, F., Sher, N. & Yanai, I. CEL-Seq: Single-Cell RNA-Seq by Multiplexed Linear Amplification. Cell Reports, Cell Reports, Volume 2, Issue 3, p666-673, 2012).

[0548] In certain embodiments, the invention involves plate based single cell RNA sequencing (see, e.g., Picelli, S. et al., 2014, “Full-length RNA-seq from single cells using Smart-seq2” Nature protocols 9, 171-181, doi:10.1038/nprot.2014.006).

[0549] In certain embodiments, the invention involves high-throughput single-cell RNA-seq. In this regard reference is made to Macosko et al., 2015, “Highly Parallel Genome-wide Expression Profiling of Individual Cells Using Nanoliter Droplets” Cell 161, 1202-1214; International patent application number PCT/US2015/049178, published as WO2016/040476 on Mar. 17, 2016; Klein et al., 2015, “Droplet Barcoding for Single-Cell Transcriptomics Applied to Embryonic Stem Cells” Cell 161, 1187-1201; International patent application number PCT/US2016/027734, published as WO2016168584A1 on Oct. 20, 2016; Zheng, et al., 2016, “Haplotyping germline and cancer genomes with high-throughput linked-read sequencing” Nature Biotechnology 34, 303-311; Zheng, et al., 2017, “Massively parallel digital transcriptional profiling of single cells” Nat. Commun. 8, 14049 doi: 10.1038/ncomms14049; International patent publication number WO2014210353A2; Zilionis, et al., 2017, “Single-cell barcoding and sequencing using droplet microfluidics” Nat Protoc. January; 12(1):44-73; Cao et al., 2017, “Comprehensive single cell transcriptional profiling of a multicellular organism by combinatorial indexing” bioRxiv preprint first posted online Feb. 2, 2017, doi: dx.doi.org/10.1101/104844; Rosenberg et al., 2017, “Scaling single cell transcriptomics through split pool barcoding” bioRxiv preprint first posted online Feb. 2, 2017, doi: dx.doi.org/10.1101/105163; Rosenberg et al., “Single-cell profiling of the developing mouse brain and spinal cord with split-pool barcoding” Science 15 Mar. 2018; Vitak, et al., “Sequencing thousands of single-cell genomes with combinatorial indexing” Nature Methods, 14(3):302-308, 2017; Cao, et al., Comprehensive single-cell transcriptional profiling of a multicellular organism. Science, 357(6352):661-667, 2017; Gierahn et al., “Seq-Well: portable, low-cost RNA sequencing of single cells at high throughput” Nature Methods 14, 395-398 (2017); and Hughes, et al., “Highly Efficient, Massively-Parallel Single-Cell RNA-Seq Reveals Cellular States and Molecular Features of Human Skin Pathology” bioRxiv 689273; doi: doi.org/10.1101/689273, all the contents and disclosure of each of which are herein incorporated by reference in their entirety.

[0550] In certain embodiments, the invention involves single nucleus RNA sequencing. In this regard reference is made to Swiech et al., 2014, “In vivo interrogation of gene function in the mammalian brain using CRISPR-Cas9” Nature Biotechnology Vol. 33, pp. 102-106; Habib et al., 2016, “Div-Seq: Single-nucleus RNA-Seq reveals dynamics of rare adult newborn neurons” Science, Vol. 353, Issue 6302, pp. 925-928; Habib et al., 2017, “Massively parallel single-nucleus RNA-seq with DroNc-seq” Nat Methods. 2017 October; 14(10):955-958; and International patent application number PCT/US2016/059239, published as WO2017164936 on Sep. 28, 2017, which are herein incorporated by reference in their entirety.

[0551] The present invention advantageously provides for screening platforms that can provide for diagnostic tools. The screening platform can be scaled up to be genome wide. The present invention can be used for chemical genomics by pairing the knockout with drug treatment dose dependence for combinations identified. The screening method can be used to knockout oncogenes and activate tumor suppressors in the same cell. The methods of the present invention can be used to identify drug resistance routes. For example, drug resistant clones can be screened for second mutations that can be used to treat the clones. Although the present invention and its advantages have been described in detail, it should be understood that various changes, substitutions and alterations can be made herein without departing from the spirit and scope of the invention as defined in the appended claims.

[0552] The invention is further described in the following examples, which do not limit the scope of the invention described in the claims.

### EXAMPLES

### Example 1—Generating Double Knockouts Using a Dual Cas9 System

[0553] Applicants aimed to develop a system with maximal on-target efficiency at two independent genomic sites, postulating that using two independent Cas9 enzymes would mitigate several sources of inefficiency (FIG. 8). Applicants designed a lentiviral construct, pPapi, to express SaCas9 and two sgRNAs from the U6 and H1 promoters (FIG. 1a). A flow cytometry assay assessed dual targeting of EGFP and endogenous CD81 in A375 cells engineered to stably express SpCas9 and EGFP, and Applicants measured the effect of varying the promoter and Cas9 ortholog employed by each sgRNA. Partnering SaCas9 and SpCas9 sgRNAs achieved dual knockout in 50-87% of cells with 4 different combinations of sgRNAs (FIG. 1b, FIG. 9), indicating a potential for high efficiency.

[0554] To enable efficient construction of pooled, multiplex libraries, Applicants developed a cloning scheme with synthesized oligonucleotides (˜140 nts), overlap extension, and a single transformation step into E. coli (FIG. 1a). A pool consisting of M SpCas9 sgRNAs and N SaCas9 sgRNAs, a total of M+N oligos, generates a pool comprising M×N pairwise combinations. Applicants generated a Synthetic Lethal (SynLet) library, described below, with 96 unique sgRNAs cloned into each position, totaling 962=9,216 dual-sgRNA elements. The proximity of the sgRNAs permits them to be amplified and sequenced together in a single NextGen sequencing read. The cumulative distribution function for the pool had an area-under-the-curve (AUC) of 0.62 (FIG. 1c), comparable to the previously-described Brunello genome-wide library (AUC of 0.64; AUC=0.5 for a perfectly uniform distribution)¹⁶. Applicants compared this SynLet library to four other published libraries^{6-8, 17}, which all rely on two transformation steps into E. coli; AUCs for these libraries ranged from 0.68-0.77. Likewise, for the SynLet library, 79% of sgRNA pairs were found in the top 90% of reads, whereas the other four libraries showed more attrition, capturing 53%-70% of elements at this threshold (FIG. 1c).

### Example 2—Optimizing sgRNA Design for SaCas9

[0555] Previously, Applicants determined rules to predict high-performing SpCas9 sgRNAs by coupling experimentation with machine learning^{16,18.} Applicants took a similar approach to optimize the design of SaCas9 sgRNAs. Applicants developed a SaCas9-version of lentiCRISPR-v2, replacing the SpCas9 and tracrRNA scaffold with their S. aureus counterparts. Applicants designed a pooled tiling library to compare SpCas9 and SaCas9 by targeting EEF2, a common essential gene, with all possible sgRNA sequences regardless of protospacer adjacent motif (PAM), and assayed activity by a viability screen in A375 cells. As expected for SpCas9, the set of sgRNAs utilizing an NGG PAM (n=449) were depleted compared to those using all other PAMs (n=4,087), with a median log₂-fold-change of ˜2.5 relative to the plasmid DNA (FIG. 2a). For SaCas9, some sgRNAs with an NNGRRV PAM (n=349; R=A or G; V=A, C, or G) were active, but as expected^{19, 20}, NNGRRT (n=47) was most active, with a median log₂-fold-change of ˜4.3. Applicants compared sgRNAs sharing a common cut site between SaCas9 and SpCas9, and observed that SaCas9 typically had higher activity (FIG. 2b).

[0556] Applicants designed a second tiling library with all sgRNAs with an NNGRR PAM that targeted 9 genes with known phenotypes in viability and drug resistance assays, a total of 5,327 sgRNAs, including controls (FIG. 10a). Applicants performed viability screens in three cell lines (A375, 293T, MOLM13), and screened relevant cell lines for 6-thioguanine (A375, 293T) and vemurafenib resistance (A375). Applicants observed the expected activities for sgRNAs targeting these nine genes (FIG. 10b, Najm et al., 2017 Supplementary Table 1), with consistent performance across the 3 cell lines (FIG. 2c), suggesting that predictive sequence features are likely to generalize across cell types.

[0557] Applicants first used a classification model to determine sequence features correlated with high activity, examining all single and dinucleotides¹⁶. The feature most predictive of high activity was thymine immediately 3′ of the core PAM sequence, NNGRR (FIG. 2d). However, thymine is neither necessary nor sufficient for high activity: of 1,805 sgRNAs targeting viability genes in A375 cells, a non-thymine nucleotide was present in 58% of the top quintile of most-active sgRNAs, whereas 14% of sgRNAs with thymine scored in the bottom half of activity. In the RR portion of the PAM, Applicants observed that AG is favored over other combinations of purines.

[0558] To improve predictions, Applicants used gradient boosted regression trees on the rank-transformed activity values¹⁶. Features included position-specific and position-independent single and dinucleotides, and thermodynamic properties; position-specific dinucleotides proved the most important for predicting activity (FIG. 2e). To illustrate performance, Applicants used a version of the model in which EEF2 sgRNAs were held out of the training set, and compared the predicted scores to the measured activities in A375 cells, observing a Spearman correlation of 0.64 (FIG. 2f). Whereas high-scoring sgRNAs (score >0.6) represent only 12% of all EEF2 sgRNAs, they are quite likely to be active, with 77% resulting in >4-fold decrease in viability (FIG. 2g). Downsampling the number of genes used for training indicated diminishing returns for model parameter estimation with 9 genes (FIG. 2h). The model developed here for SaCas9 sgRNA design, available online (portals.broadinstitute.org/gpp/publicianalysis-tools/sgrna-design) will enable more effective application of CRISPR technology.

### Example 3—Combinatorial Gene Targeting Using a Dual Cas9 System

[0559] Applicants first tested the Big Papi approach by screening for synthetic lethal gene combinations. As few such relationships have been validated across many cell lines, Applicants assembled an ad hoc list of target genes (Najm et al., 2017 Supplementary Table 2). BRCA and PARP genes have a clinically-appreciated synthetic lethal relationship^{21,22}. Likewise, for anti-apoptotic genes, the ability of expression of one to rescue inhibition of another is well-documented, necessitating combinatorial targeting²³. Applicants also selected gene families with known or potential redundancy in their function, including MAPKs, AKTs, and ubiquitins²⁴⁻²⁶. Finally, Applicants included several genes computationally predicted to engage in multiple synthetic lethal interactions²⁷. Applicants designed 3 sgRNAs against these 25 genes for both SaCas9 and SpCas9 (Najm et al., 2017 Supplementary Table 2). Each gene pair is assessed with 18 unique sgRNA combinations (2 Cas9s×3 gene A sgRNAs×3 gene B sgRNAs); an ineffective individual sgRNA affects 3 of the combinations, emphasizing the importance of effective design. Applicants targeted two control genes: EEF2 (3 sgRNAs), a core essential gene, and CD81 (10 sgRNAs), a cell surface marker with no known viability effect in most cells. Applicants added two sets of negative controls, sgRNAs that target introns of HPRT1 (5 sgRNAs), and 3 expression cassettes that terminate transcription due to a run of 6 thymidines (6T). The resulting 96×96=9,216 member SynLet library was packaged into lentivirus for use in six diverse tumor cell lines engineered to express SpCas9: A375 (skin); Meljuso (skin); HT29 (colon); A549 (lung); 7860 (kidney); and OVCAR8 (ovary).

[0560] Cells were transduced at low MOI (˜0.5) in biological duplicate, selected with puromycin, and cultured for 21 days; for some, an earlier time point was also collected (FIG. 3a). Applicants prepared genomic DNA, PCR-amplified the dual-sgRNA cassette, and quantitated library distribution by sequencing (Najm et al., 2017 Supplementary Table 3). Applicants compared abundance at day 21 to the starting abundance (plasmid DNA) to determine the effect of each sgRNA pair on viability. Biological replicates were well correlated for all six cell lines (Pearson correlations of 0.89-0.98, FIG. 3b). Applicants performed this same analysis for three other dual-knockout combinatorial studies, and found that replicate reproducibility was high for the CDKO screen (0.98) low for the CombiGem (0.2) and Shen-Mali (0.21-0.42) screens (FIG. 3b).

[0561] The orthologous Cas9 approach seeks to diminish competition between two sgRNAs, which may arise from differences in transcription, RNA stability, or binding affinity to Cas9 (FIG. 8). Applicants compared performance of individual targeting sgRNAs in one position when partnered with varying control sgRNAs in the second position (FIG. 3c). For targeting sgRNAs utilizing either Cas9, the average log 2-fold-changes were well-correlated regardless of the control sgRNA (FIG. 3d). In contrast, the effects of individual sgRNAs paired with different controls in the CombiGEM and Shen-Mali libraries were not well-correlated (FIG. 3d). The CDKO library, after removing 31% of sgRNA combinations (read counts below 50), showed much better correlation but the decreased consistency for sgRNAs driven from the mouse U6 promoter, evident in the unfiltered data, remained apparent in the filtered data (FIG. 3d). The Shen-Mali data showed the same trend, suggesting that lower expression from the mouse U6 promoter results in unequal competition for Cas9, an issue avoided by the dual-Cas9 approach.

[0562] Applicants next examined phenotypic consistency at the gene level between the two Cas9s and observed good agreement, with Pearson correlations of 0.80-0.89 across the 6 cell lines (FIG. 11a). Combining measurements from both Cas9s, single knockouts of EEF2, CHEK1, MTOR, and WEE1 consistently exhibited viability effects, with stronger depletion at day 21, consistent with their classification as fitness genes28; other genes showed cell line specific viability effects (FIG. 3e, FIG. 11b). Thus, SaCas9 and SpCas9 produced mutually consistent knockout phenotypes across cell lines.

[0563] Applicants next assessed synthetic lethal and buffering relationships. Applicants modeled the expected log 2-fold-change from sgRNA pairs as the sum of the log 2-fold-change (LFC) for each individual sgRNA when partnered with controls, and then calculated the difference (ΔLFC) by comparing this expectation to the measured value (FIG. 12a). A positive ΔLFC represents a buffering relationship and a negative ΔLFC represents synthetic lethality. The measured data matched the expectation of this model well (Pearson correlation=0.97), suggesting this is an effective metric for gene interaction (FIG. 4a). Applicants combined information for multiple sgRNA pairs targeting the same gene pairs, and performed the same calculations with randomized input data to generate a null distribution, allowing the calculation of a false discovery rate (FDR, FIG. 12b, FIG. 12c). Using this framework, Applicants analyzed all 6 cell lines harvested at the day 21 time point (FIG. 4b, Najm et al., 2017 Supplementary Table 4).

[0564] Examining interactions within the pre-defined gene groups, several expected synthetic lethal relationships emerge (FIG. 4c). For example, the anti-apoptotic genes BCL2L1 (Bcl-xL) and MCL1 scored strongly (FDR<0.01) in 5 of 6 cell lines, with 12 of the 18 sgRNA combinations depleted more than two standard deviations from the log 2-fold-change of the individual sgRNAs when paired with controls in Meljuso cells (FIG. 4d). The CDKO approach also found this interaction with strong statistical significance in the filtered data (FIG. 13)⁸. In the CombiGEM and Shen-Mali screens, few sgRNA pairs exceeded two standard deviations versus control pairings, and sets of all sgRNA pairings for the top hit gene pairs showed modest statistical significance across several examples (FIG. 13). From this analysis, Applicants conclude that the Big Papi approach can identify hits consistently across sgRNA pairs.

[0565] Although some gene pairs, such as MAPK1-MAPK3 and BCL2L1-MCL1, showed strong effects in most cell lines, other interactions scored strongly in one cell line but were modest or absent in others (FIG. 4c). Applicants hypothesized that combining information across cell lines could improve detection of weaker but generalizable interactions, minimizing technical and cell-line-specific sources of variation; this proved an effective strategy (Najm et al., 2017 Supplementary Table 4). For example, in OVCAR8 cells, BRCA1-PARP1 scored with an FDR of 0.18 and the other 5 individual lines ranged from 0.46-0.94, whereas combining those 5 lines gave an FDR of 0.22, and all 6 cell lines gave an FDR of 0.06. The three AKT isoforms had a similar pattern. Conversely, some interactions with modest FDRs in one cell line are not supported in other lines, such as BCL2A1 and BCL2L10, which has an FDR of 0.48 in A375 cells and 1.0 in the combination of the other 5 lines; such examples may be truly cell line specific or could represent false positives. Overall, conducting primary screens across multiple cell lines is an effective strategy for discovering generalizable interactions.

[0566] By making some conservative assumptions about the correctness of particular subsets of synthetic lethal or buffering interactions, Applicants were able to estimate in two independent ways true positive rates for the SynLet screens (Methods). Using these models, Applicants calculated the true positive rate at different FDR thresholds for data from both individual cell lines as well as all leave-one-out iterations and obtained similar estimates whether based on synthetic lethal effects or on buffering interactions, suggesting the independent assumptions made for each were reasonable (FIG. 4e). At an FDR threshold of 0.1, the empirically-determined true positive rate ranged from 72-85%, not far from the theoretical value of 90% (i.e. 10% false discoveries).

[0567] Similarly, Applicants modeled false negative rates based on conservative assumptions about same-gene buffering interactions (Methods). Applicants observed a lower false negative rate when combining information from multiple cell lines (FIG. 4f); for example, at an FDR of 0.1, Applicants determine a false negative rate of 57% when using individual cell lines, whereas combining 5 lines gives a false negative rate of 33%. Overall, the empirically determined true positive and false negative rates suggest that Big Papi is an efficient screening approach (FIG. 16), especially when assayed across multiple cell lines.

### Example 4—Genetic Interactions

[0568] Applicants examined synthetic lethal interactions within the pre-defined groups across the 6 cell lines (FIG. 4c). Applicants did not observe a relationship between the putatively-redundant genes UBB and UBC, despite analysis of buffering interactions indicating that the sgRNAs are active (FIG. 14b). Among the set of genes computationally predicted to engage in synthetic lethal interactions Applicants did not observe strong interactions²⁷. Applicants note that these genes generally performed poorly in the analysis of buffering interactions (FIG. 14b) and thus may represent false negative findings. Combining information from all cell lines, however, identified an interaction between CHEK1 and WEE1 (FDR=0.10), which has also been seen with small molecule inhibitors²⁹. The other 4 pre-defined groups revealed many interactions for further analysis and study.

### Anti-Apoptotic Genes

[0569] In addition to the interaction between BCL2L1 and MCL1, synthetic lethality between BCL2L1 and BCL2L2 (Bcl-w) was detected in Meljuso, OVCAR8, and A375 at an FDR<0.01, HT29 (0.03) and A549 (0.31). To the best of Applicants knowledge, this interaction has not previously been observed. BCL2L2 is less studied than BCL2L1, with ˜20-fold fewer publications indexed in PubMed. BCL2 is poorly expressed in these cells, but in Meljuso, with the highest expression, BCL2 interacted with BCL2L1 (FDR<0.01) and MCL1 (0.20) (FIG. 5a). Applicants did not observe any strong interactions involving the anti-apoptotic proteins BCL2L10 and BCL2A1, despite high expression of the latter in some lines (FIG. 5a).

[0570] Applicants confirmed these interactions with small molecule inhibitors. Meljuso, OVCAR8, and A549 cells were transduced with single SaCas9 sgRNAs targeting MCL1, BCL2L1, or BCL2L2, or controls. Cells were treated with various inhibitors of anti-apoptotic proteins: venetoclax, an FDA-approved BCL2 inhibitor³⁰; navitoclax, an extensively-characterized inhibitor of BCL2, BCL2L1, and BCL2L231, A-1331852 and WEHI-539, tool compounds described as BCL2L1 inhibitors³²′³³; and 563845, an MCL1 inhibitor in clinical development³⁴. Cells were dosed from 1 nM to 1 μM, and cell viability assessed (FIG. 5b, FIG. 15a). Both sgRNAs targeting MCL1 strongly synergized with navitoclax, A-1331852, and WEHI-539; conversely, sgRNAs targeting BCL2L1 synergized specifically with S63845. Dual small molecule treatment with A-1331852 and S63845 likewise synergized, with excess over Bliss independence scores of 85 or greater at combinations with 250 nM (FIG. 5c, FIG. 15b). Thus, small molecules confirmed the synthetic lethal interaction between MCL1 and BCL2L1.

### MAPK Genes

[0571] Applicants detected a strong interaction between MAPK1 (ERK2) and MAPK3 (ERK1) in A375 (FDR=0.04), A549 (<0.01), HT29 (<0.01), Meljuso (<0.01), and OVCAR8 (<0.01) (FIG. 4c), all lines with activating mutations in the MAPK pathway (BRAF V600E; KRAS G12S; BRAF V600E; NRAS Q61L and HRASG13D; and KRAS P121H, respectively). 7860 cells, with no known mutations in the MAPK pathway, showed a weaker interaction (FDR=0.57). MAP2K1 (MEK1) and MAP2K2 (MEK2) synergized in 4 of the 5 MAPK pathway mutant cell lines: HT29 (FDR=0.01), OVCAR8 (0.05), Meljuso (0.06), and A549 (0.11). The exception, A375 (FDR=1.0), was sensitive to loss of MAP2K1 individually (FIG. 3e).

### AKT Genes

[0572] Applicants saw a strong interaction for AKT1-AKT2 in HT29 cells (FDR<0.01), the only line with a known PIK3CA mutation (P449T); the CDKO library also detected this interaction8. In contrast to the other 5 lines, HT29 cells express low levels of AKT3, potentially explaining the strong interaction (FIG. 5a). Likewise, AKT1-AKT3 scored strongly in OVCAR8 cells (FDR=0.13), which express the lowest levels of AKT2. However, the interaction between AKT2-AKT3 in Meljuso cells (FDR=0.09) is not predicted based on AKT1 expression. Finally, Applicants observe relationships across all three AKT proteins in 7860 cells, with moderate FDRs ranging from 0.35-0.46. No AKT isoforms show low expression in this line; thus, expression of one may partially compensate for loss of the other two. The relationships between AKT proteins are well-studied and complex, and they have both redundant and unique activities dependent on cellular context^{35,36}. Despite these differences across cell lines, combining information across all 6 lines gave FDRs of 0.04-0.12 (FIG. 4c).

### BRCA & PARP Genes

[0573] Applicants observed a relationship between PARP1-PARP2 in four cell lines: OVCAR8 (FDR=0.06), A549 (0.07), A375 (0.12), and Meljuso (0.13), and across all cell lines (<0.01). Only OVCAR8 showed a strong interaction between BRCA2-PARP1 (FDR<0.01); BRCA1 expression is lowest in these cells (FIG. 5a). That the interactions across these genes was most pronounced in the ovarian line may have been anticipated, as PARP inhibitors have shown clinical efficacy in BRCA-deficient ovarian cancers²², although the dissimilar strength across cell lines for BRCA1-PARP1 may not have been expected. To further investigate, Applicants performed a competition assay in three cell types: one that originally scored strongly (OVCAR8, FDR=0.18), weakly (A375, 0.68), or was essentially null (Meljuso, 0.94). Here, EGFP+ cells have dual knockout, whereas EGFP-cells are single knockouts of the gene targeted by the SaCas9 sgRNA; the relative viability of these populations can be monitored over time with flow cytometry (FIG. 5d). In OVCAR8 and A375, double knockout cells were strongly depleted relative to single knockouts, however the viability effect on double knockout cells was notably weaker in Meljuso (FIG. 5e). This result validates the interaction originally detected with weaker significance in A375 and demonstrates that Meljuso are indeed less sensitive to combinatorial BRCA1-PARP1 loss. Consistent with this, Shen-Mali classified BRCA1-PARP1 as a “private” synthetic lethal interaction in 293T cells but not A549 or Hela cells7, and BRCA mutant cells show varying sensitivity to PARP inhibitors both in cell culture and clinical settings^{37,38}.

### Example 5—Apoptosis Screen

[0574] Interaction networks for pro- and anti-apoptotic genes have been assembled by biochemical approaches, and although some interactions are consistently detected, others show less consistent results³⁹. Because pro-apoptotic genes were robust and reproducible hits in the initial screen, Applicants investigated the apoptotic network further with a Big Papi screen. Applicants selected 32 genes implicated in apoptosis and targeted them each with 4 sgRNAs, for a total of 20,736 perturbations including controls (Najm et al., 2017 Supplementary Table 5); sequencing of plasmid DNA gave an AUC of 0.67, with 73% of combinations present in the top 90% of reads.

[0575] Applicants screened this library in Meljuso and OVCAR8 in duplicate for 21 days in standard growth conditions; further, in Meljuso Applicants challenged the population with various inhibitors of anti-apoptotic proteins (FIG. 6a, Najm et al., 2017 Supplementary Table 6). Knockout of some anti-apoptotic genes had minor growth effects, whereas knockout of pro-apoptotic genes did not decrease cell viability (FIG. 6b). Applicants analyzed these screens for synthetic lethal and buffering interactions, and confirmed a strong synthetic lethal interaction between BCL2L1 and both MCL1 and BCL2L2 (FIG. 16, Najm et al., 2017 Supplementary Table 7; this interaction was also observed above FIG. 4). In both cell lines, Applicants observed buffering interactions between pro- and anti-apoptotic genes (FIG. 6c). The strongest interactions were detected between BCL2L1 and both BAK1 and BAX (FDR<0.01 for combined data), multi-BH-domain proteins that direct mitochondrial outer membrane permeabilization (MOMP); interactions between these proteins have been detected biochemically³⁹. BOK did not engage in strong interactions, potentially expected based on its low expression (FIG. 6d).

[0576] Applicants next analyzed Meljuso cells screened with inhibitors, first examining single gene effects. As expected, navitoclax and 563845 synergized with MCL1 and BCL2L1 knockout, respectively (FIG. 6e). Knockout of BCL2A1, which did not show strong interactions when screened in standard growth conditions (FIG. 4c, FIG. 16), sensitized the cells to navitoclax. Conversely, knockout of BAX and PMAIP1 (Noxa) led to navitoclax resistance (FIG. 6d). Thus, these screening conditions identified both sensitization and resistance phenotypes.

[0577] To examine combinatorial phenotypes, Applicants combined data across the three BCL2L1 inhibitors, to minimize effects due to molecule-specific mechanism of action. Whereas BAX-PMAIP1 knockout showed a minimal buffering interaction in standard growth conditions (FDR=0.89), they synergized strongly to protect cells from death when treated with anti-apoptotic inhibitors (FDR<0.01) (FIG. 6f). Similarly, caspase—pro-apoptotic knockouts produced modest buffering interactions in standard growth conditions; only PMAIP1-CASP6 scored strongly (FDR=0.12) (FIG. 6g). However, inhibitors led to clearer detection of specific interactions. For example, the strongest initiator and effector caspases to interact with BAK1 were CASP8 (FDR=0.10) and CASP6 (FDR=0.01), respectively. These two caspases directly interact with each other⁴⁰. Although caspase interactions are complex, CASP8 is generally associated with the extrinsic cell death pathway⁴¹. Conversely, BAX interacted strongly with CASP9 (FDR<0.01) and CASP3 (FDR=0.04), caspases with a well-established relationship⁴², with CASP9 associated most strongly with the mitochondrial cell death pathway. Although BAK1 and BAX are generally considered functional redundant, differences in localization and binding partners have been documented^{43,44}; to Applicants knowledge this is the first report of differences in genetic interactions with downstream caspases in human cells.

### Example 6—Orthogonal Activities

[0578] The Big Papi approach is readily applied to concomitant screening of orthogonal modalities (FIG. 7a), for example repressing one gene while activating another. To test the ability to combine distinct gene-targeting activities, Applicants designed a Big Papi library to overexpress 38 annotated oncogenes with CRISPRa technology with 3 sgRNAs each, using a nuclease-dead SpCa9 (dCas9) fused to the “VPR” domain comprised of three transcriptional activators⁴⁵. Applicants employed SaCas9 to knockout 45 tumor suppressor genes, also with 3 sgRNAs each (Najm et al., 2017 Supplementary Table 8). With controls, the TsgOnco library totaled 19,250 constructs; pDNA sequencing gave an AUC of 0.63, and 77% of constructs were detected in the top 90% of reads. Applicants screened HAlE cells, a kidney line immortalized by large T antigen, which inactivates TP53. After infection, cells were grown in standard conditions and on low attachment culture plates (FIG. 7b); the latter are a surrogate for soft agar and select for transformation phenotypes⁴⁶. Applicants first examined performance of targeting sgRNAs paired with control sgRNAs, and observed good consistency, with overexpression of TP53 dramatically reducing viability with all three sgRNAs (FIG. 7c, Najm et al., 2017 Supplementary Table 9). Likewise, SaCas9-mediated knockout of EEF2, CDK12, and ERCC2 decreased cell viability with all three sgRNAs for each gene (FIG. 7d).

[0579] Applicants next examined the data for genetic interactions (FIG. 17). A strong interaction was observed between dSpCas9-VPR sgRNAs targeting TP53 for overexpression, which is lethal, and SaCas9 sgRNAs targeting TP53 for knockout, which buffered this lethality. This effect was stronger in low attachment conditions, and serves as technical validation that overexpression and knockout are co-active in cells (FIG. 7e). Several other interactions with TP53 overexpression were likewise more apparent in the stringent, low attachment conditions. Knockouts of both ZFHX3 (ATBF1) and CUX1, which had minimal effects on viability on their own, partially rescued the lethality caused by TP53 overexpression (FIG. 7f, FIG. 18). ZFHX3 directly interacts with TP53 to activate the CDKN1A promoter (p21^{Cip1}) leading to cell cycle arrest, and thus ZFHX3 loss buffers this TP53 activity47. Likewise, CUX1 deficiency activates PI3K signaling⁴⁸; consistent with this observation, knockout of PTEN increased proliferation, an effect that persisted in cells overexpressing TP53. Conversely, although KEAP1 knockout generally led to increased cell viability, this effect was muted upon TP53 overexpression (FIG. 7f), which is consistent with the opposing actions of KEAP1 and TP53 on the transcription factor NFE2L2 (Nrf2). Normally, KEAP1 degrades NFE2L2, so KEAP1 loss leads to NFE2L2 stabilization; TP53 suppresses the metabolic target genes of NFE2L2, thereby nullifying the effect of KEAP1 knockout⁴⁹. Notably, knockout of both CDKN2A (p16) and RB1 gave increased viability in the absence of TP53, but overexpression of TP53 reversed this phenotype. That these two genes are immediately upstream and downstream, respectively, of the cell cycle kinases CDK4 and CDK6 suggests this counterintuitive observation merits further exploration. These results serve as proof-of-principle that the Big Papi approach can combine multiple Cas9 activities in a single screen to reveal genetic interactions.

### Example 7—Discussion

[0580] Applicants developed a dual-Cas9 system to identify genetic interactions. This system is efficient, cost effective, and supports pooled library generation and screening. Synthetic lethal screens using the present system identified interactions within several groups of functionally related genes, including the MAPK pathway, AKT signaling, DNA damage repair, and apoptosis, with high statistical confidence. Applicants also applied this system to map buffering interactions between genes involved in apoptosis, both in standard growth conditions and in the presence of small molecules, which revealed additional genetic interactions. Finally, Applicants combined CRISPR-mediated knockout and overexpression to uncover interactions with TP53.

[0581] SaCas9 has been utilized previously for in vivo gene editing^{19,20} and in an orthologous, chemically induced CRISPRa and CRISPRi system, although it was noted to have lower efficiency than SpCas9 in that study, most likely due to suboptimal sgRNA selection⁵⁰. To increase SaCas9 utility, Applicants assessed the activity of thousands of sgRNAs to define rules enabling selection of highly-active sgRNAs. GUIDE-Seq results have shown that SaCas9 has fewer off-target effects than SpCas9, based on the modest sampling of sgRNAs assessed thus far by this technique⁵¹. These performance properties and the design rules provided here, coupled with its smaller size (˜1 kilobase shorter than SpCas9), highlight SaCas9 as an attractive genome editing tool.

[0582] The number of genes that can be screened is typically limited by the scale of cell culture, which dictates the size of the library; generally, genome-wide single-gene sgRNA libraries contain ˜100,000 perturbations and require 1,000 cells per perturbation. The Big Papi approach achieves reasonable performance with only 2 sgRNAs per gene (FIG. 19), and thus a screen to examine pairwise combinations of 158 genes with 2 sgRNAs per gene would have a similar number of perturbations: (158×2) x (158×2)=99,856.

[0583] The results highlight the importance of cell context in detecting interactions. With the SynLet library, no gene pair scored strongly (FDR<0.01) in all 6 cell lines, and some showed strong interactions in only one line. One outlier was 7860, a renal clear cell carcinoma line with VHL deletion, in which Applicants identified no synthetic lethal gene pairs at an FDR<0.01. Biological replicates of the 7860 screen were well-correlated, and Applicants also detected buffering interactions when targeting the same gene with both Cas9s, suggesting that the screen was well-executed and the reagents were active. Heterogeneity of small molecules on different cell lines is well-documented and it is reasonable to expect the same heterogeneity across cell lines for genetic interactions. Although mutation status and mRNA expression could be used post facto to rationalize why some interactions were detected more strongly in some lines compared to others, combining information across cell lines proved a useful strategy for detecting generalizable interactions with increased confidence.

[0584] In summary, the Big Papi approach described here for dual-gene perturbation screens represents a powerful means to map genetic interactions in mammalian cells that can be applied across many biological questions and model systems.

### Example 8—Methods

[0585] Vectors. Plasmids were cloned by synthesis and assembly (Genscript) and are available to the academic research community through Addgene:
[0586] pPapi (also known as pXPR_207): U6 and H1 promoters express two sgRNAs; short EF1a promoter (EFS) expresses SaCas9-2A-PuromycinR (Addgene 96921).
[0587] pXPR 034: U6 promoter expresses SaCas9 sgRNAs; EFS expresses SaCas9-2A-PuromycinR. An updated version of this plasmid with more convenient restriction sites, pXPR 206, has been deposited in Addgene (96920).
[0588] pLX_311-Cas9: SV40 promoter expresses blasticidin resistance; EFla promoter expresses SpCas9 (generated by Sefi Rosenbluh, Hahn lab, Addgene 96924). pXPR 120: EF1a promoter expresses dSpCas9-VPR-2A-BlasticidinR (Addgene 96917).

[0589] Library production. Pooled libraries for expression of single sgRNAs were made as previously described, with oligonucleotide pools obtained from CustomArray²⁷. For cloning of Big Papi pools, oligonucleotide inserts (Ultramers, IDT) were designed with 5′ BsmBI sites followed by 20 or 21 nt crRNA, 82 nt tracrRNA, 6 nt barcode, and 17 nt complementary sequence (FIG. 1a, FIG. 20). The oligonucleotides for SpCas9 sgRNAs and SaCas9 sgRNAs were separately mixed together at a concentration of 5 μM each. 10 μL, of each pool of oligonucleotides was then combined in a 100 μL, reaction and extended using NEBNext (New England Biolabs) with an annealing temperature of 48° C. The resulting dsDNA was purified by spin-column then ligated into the BsmBI-digested pPapi vector using 100 cycles of Golden Gate assembly with 100 ng insert and 500 ng vector using Esp3I and T7 ligase, as Applicants have done previously for single sgRNA pools²⁷. The DNA was isopropanol precipitated and electroporated into STBL4 cells. A zero-generation (G0) plasmid DNA pool was then amplified by a second electroporation into STBL4 cells to create the G1 plasmid DNA pool, which was then used for virus production. Applicants note that individual constructs to express two sgRNAs can be constructed either by the overlap-extension of individual oligonucleotides or by the use of gBlocks (IDT), which may be a more cost-effective option.

[0590] Virus production. For individual virus production: 24 hours before transfection, HEK293T cells were seeded in 6-well dishes at a density of 1.5×10⁶ cells per well in 2 mL of DMEM+10% FBS. Transfection was performed using TransIT-LT1 (Mirus) transfection reagent according to the manufacturer's protocol. In brief, one solution of Opti-MEM (Corning, 66.25 μL) and LT1 (8.75 μL) was combined with a DNA mixture of the packaging plasmid pCMV VSVG (Addgene 8454, 1250 ng), psPAX2 (Addgene 12260, 1250 ng), and the sgRNA-containing vector (e.g. pPapi, 1250 ng). The two solutions were incubated at room temperature for 20-30 minutes, during which time the HEK293T cells were replenished with fresh media. After this incubation, the transfection mixture was added dropwise to the surface of the HEK293T cells, and the plates were centrifuged at 1000×g for 30 minutes. Following centrifugation, plates were transferred to a 37° C. incubator for 6-8 hours, then the media was removed and replaced with media supplemented with 1% BSA. A larger-scale procedure was used for production of the sgRNA library; 24 hours before transfection, 18×10⁶ HEK293T cells were seeded in a 175 cm² tissue culture flask, with transfection performed as described above using 6 mL of Opti-MEM and 300 μL of LT1. Flasks were transferred to a 37° C. incubator for 6-8 hours, then media aspirated and replaced with BSA-supplemented media. Virus was harvested 36 hours after this media change.

[0591] Cell culture. A375, HT29, OVCAR8, 7860, A549, and Meljuso cells were obtained from the Cancer Cell Line Encyclopedia; HAlE cells were obtained from the Connectivity Map; HEK293T cells were obtained from ATCC (CRL-3216). All cell lines were routinely tested for mycoplasma contamination and maintained in a 37° C. humidity-controlled incubator with 5.0% CO₂ Cells were maintained in exponential phase growth by passaging every 2 or 3 days. Cell lines were maintained without antibiotics and supplemented with 1% penicillin/streptomycin during screens. Cas9 derivatives were made by transducing with the lentiviral vector pLX_311-Cas9, which expresses blasticidin resistance from the SV40 promoter and Cas9 from the EF1a promoter, as described previously²⁹. The following list includes, respectively, cell line, media, and concentration of puromycin, blasticidin, and polybrene:

[0592] A375; RPMI+10% FBS; 1 μg/ml; 5 μg/ml; 1 μg/ml.

[0593] HEK293T; DMEM+10% FBS; 1 μg/ml; 5 μg/ml; 1 μg/ml.

[0594] HT29; DMEM+10% FBS; 2 μg/ml; 5 μg/ml; 1 μg/ml.

[0595] MOLM13; RPMI+10% FBS; 2 μg/ml; 5 μg/ml; 4 μg/ml.

[0596] Meljuso; RPMI+10% FBS; 1 μg/mL; 2 μg/mL; 4 μg/mL

[0597] A549; DMEM+10% FBS; 1.5 μg/mL; 5 μg/mL; 1 μg/mL

[0598] OVCAR8; RPMI+10% FBS; 2 μg/mL; 3 μg/mL; 4 μg/mL

[0599] 7860; RPMI+10% FBS; 1 μg/mL; 2 μg/mL; 4 μg/mL

[0600] HA1E; MEM-alpha+10% FBS; 1 μg/mL; 8 μg/mL; 4 μg/mL

[0601] Flow Cytometry. For experiments carried out in FIG. 1 and FIG. 9, A375 cells stably expressing SpCas9 and GFP were transduced at an MOI of −1 in 12-well plates. Two days after transduction, cells were selected with puromycin (1 μg/mL) for five days. Cells were stained with APC-conjugated CD81 antibody (Biolegend 349510) diluted 1:100 in flow buffer (PBS, 2% FBS, 5 μM EDTA) for 30 minutes on ice. Residual antibody was removed with two flow buffer washes, and cells were re-suspended in flow buffer. Flow cytometry was performed on the BDAccuri C6 Sampler system or Live cell populations were gated using forward and side scatter to exclude debris. CD81+ and EGFP+gates were set using non-transduced A375-SpCas9-EGFP cells.

[0602] SaCas9 activity rules. Computational modeling for SaCas9 activity was done as previously for SpCas9²⁷. In contrast to the previous work, Applicants did not use the NGGX interaction feature (which is SpCas9 PAM-specific). Also, previously Applicants generated two models for SpCas9, one which used gene positional features (nucleotide cut, percent peptide), and one that omitted them. Applicants have since found the latter to be used more frequently, as it does not assume the target DNA encodes a protein, and thus Applicants did not use gene positional features for the derivation of the SaCas9 activity model.

[0603] SynLet library screening. To determine lentiviral titer, cell lines were transduced in 12-well plates with 150, 300, 500, and 800 μL virus with 3.0×10⁶ cells per well in the presence of polybrene. The plates were centrifuged at 640×g for 2 hours then transferred to a 37° C. incubator for 4-6 hours. Each well was then trypsinized, and an equal number of cells seeded into each of two wells of a 6-well dish. Two days post-transduction, puromycin was added to one well out of the pair. After 5 days, both wells were counted for viability by trypan exclusion. A viral dose resulting in 30-50% transduction efficiency, corresponding to an MOI of ˜0.35-0.70, was used for subsequent library screening. Prior to screening-scale transduction, Cas9-expressing cell lines were selected with blasticidin then transduced in two or three biological replicates; puromycin selection began two days post-transduction. Transductions were performed with enough cells to achieve a representation of at least 500 cells per sgRNA per replicate, taking into account a 30-50% transduction efficiency. Puromycin selection was maintained for 5-7 days. Throughout the screen, cells were split at a density to maintain a representation of at least 500 cells per sgRNA. Cell counts were taken at each passage to monitor growth. After this screen, cells were pelleted by centrifugation, resuspended in PBS, and frozen promptly for genomic DNA isolation.

[0604] Genomic DNA preparation and sequencing. Genomic DNA (gDNA) was isolated using the QIAamp DNA Blood Midi Kit (Qiagen) as per the manufacturer's instructions. The concentration of these preparations was determined by UV spectroscopy (Nanodrop). PCR of single sgRNA expressing vectors was as described²⁷. For the pPapi vector, dual sgRNA cassettes and plasmid DNA were PCR-amplified and barcoded with sequencing adaptors using ExTaq DNA Polymerase (Clontech), following the same procedure. Primer sequences (IDT) can be found in FIG. 21. Amplified samples were then purified with Agencourt AMPure XP SPRI beads (Beckman Coulter, A63880) according to manufacturer's instructions and sequenced on a NextSeq sequencer (Illumina) with 300 nt single-end reads, with a 10% spike-in of PhiX DNA. Deconvolution of single sgRNA expressing vectors was as described²⁷. For the pPapi vector, reads of the first sgRNA were counted by first searching in the sequencing read for CACCG, the part of the vector sequence that immediately precedes the 20-nucleotide U6 promoter-driven SpCas9 sgRNA. The sgRNA sequence following this search string was mapped to a reference file with all sgRNAs in the library. To find the H1 promoter-driven SaCas9 sgRNA, two 21-nucleotide sequences were compared: the sequence beginning 194 nucleotides after the SpCas9 sgRNA and the sequence following the S. aureus tracr sequence (CTTAAAC). If the sequences matched, the 21 nt sequence was then mapped to the reference file with all SaCas9 sgRNA. For some sequencing lanes with poorer quality, the reference file with the SaCas9 sgRNAs sequences was shortened, such that fewer than 21 nts were needed to match in order to determine the identity of the sgRNA in that position. See also FIG. 21. Reads were then assigned to the appropriate experimental condition based on the 8-nucleotide P7-appended barcode. The resulting matrix of read counts was normalized to reads per million (rpm) within each condition by the following formula: reads per sgRNA/total reads per condition x 10⁶. A pseudocount of 1 was added, and the rpm was then log₂-transformed.

[0605] Validation of Hits in the Apoptosis Pathway. Gene pairs associated with a synthetic lethal phenotype in the library screen were validated using combinatorial viability screening of sgRNA perturbations with 5 small molecule inhibitors: navitoclax (ABT-263, Active Biochem A-1001), A1331852 (Active Biochem A-6048); venetoclax (ABT-199, Active Biochem A-1231); WEHI539 (MedChem Express, HY-15607A); and the MCL1 inhibitor S63845 (a gift from Guo Wei, Golub lab). Meljuso cells were transduced in 12-well plates, as described above, with lentivirus containing a single sgRNA targeting one of the anti-apoptotic genes (BCL2L1, BCL2L2, MCL1) or a control sgRNA either targeting CD81 or containing a run of 6 thymidines. Two days after transduction, cells were selected using puromycin at 1 μg/mL for five days. After puromycin selection, 3,000 cells were seeded into 96-well plates. Across each row of the 96-well plate, a different small molecule was added at 11 log 2-dilutions ranging from 1 μM to approximately 1 nM in duplicate for each of the cell lines. The last well in the row did not receive small molecule. After 3 days in the presence of the small molecule, viability of the cell population was assayed by CellTiterGlo (Promega) according to the manufacturer's instructions.

[0606] BRCA1/PARP1 competition assay. A375, OVCAR8, and Meljuso cells were transduced with in a 24-well plate with 10 μA Cas9-2A-EGFP virus (Dharmacon, VCAS11862), with 2.0×10⁵ cells per well with 1 μg/mL of polybrene. The plates were centrifuged at 2250 rpm for 2 hours and then transferred to a 37° C. incubator for 4 hours before changing media. The day after transduction, each well was trypsinized and passaged into a T75 flask. The population was confirmed to be a mixture of EGFP+ and EGFP-cells (˜30% EGFP+ for each cell line) and then transduced with the pPapi BRCA1/PARP1 constructs. The vector p083 contains SpCas9 BRCA1 sgRNA B07 and SaCas9 PARP1 sgRNA F01; p092 contains SpCas9 PARP1 sgRNA F06 and SaCas9 BRCA1 sgRNA C02; sgRNAs sequences are listed in Supplementary Table 2. The plates were centrifuged at 2250 rpms for 2 hours and then transferred to a 37° C. incubator for 4-6 hours. Two days post-transduction, puromycin was added to wells for the duration of the assay. Cells were passaged and flow cytometry measurements were taken on the BDAccuri C6 Sampler system at days 0, 2, 4, 7, 9, 11, and 13 post-infection with the pPapi vector.

[0607] Apoptosis library screen. Infections were conducted as described above for the SynLet library. OVCAR8 cells were passaged in standard growth conditions for 21 days post-infection. In Meljuso cells, each of three biological replicates was split into five arms 7 days post-infection: Navitoclax, A-1331852, 563845, WEHI-539 and no drug (standard growth conditions). All small molecules were screened at 250 nM with an on/off dosing schedule, in which cells were treated with small-molecule for 4 days and then grown in standard growth conditions for 3 days, and then this cycle was repeated for an additional week. All arms were collected at 21 days post-infection. For Meljuso cells, all three replicates were prepared and sequenced separately. In OVCAR8 cells, one replicate was lost during genomic DNA preparation, and the remaining two replicates were combined prior to sequencing.

[0608] CRISPRa/CRISPRko Tsg/Onco screen. Oncogenes and tumor suppressors were selected for screening based on their high frequency of mutation in patient tumor samples⁶ and their annotation in the COSMIC database⁶⁶. HAlE cells were infected with pXPR 120 and selected with blasticidin. For the pooled screen, cells were seeded into 7 T175 flasks at 30% confluence and infected with the TSG/Onco library in biological replicate. After 48 hours, puromycin was added, and cells were maintained under puromycin for 5 days. Cells were then split into two conditions. For the High-Attachment conditions, cells were seeded into standard tissue culture treated T225 flasks; for the Low-Attachment conditions, cells were seeded into a 1-layer untreated low-attachment cell stacker (Costar 3303). The High-Attachment conditions was passaged and maintained, and the cells were harvested on Day 14. The Low-Attachment conditions received media changes until cells that adhered reached confluence, and the cells were harvested on Day 19.

### Example 9—Estimating False Positive and False Negative Rates

[0609] To estimate the specificity of the screening system and analytical approach, Applicants assumed that true positive synthetic lethal interactions occur only within the pre-defined gene groups, whereas interactions across pre-defined groups are false positives. Likewise, for buffering interactions, Applicants assumed that all true-positive interactions occur in the special case where both Cas9s are targeted to the same gene, which is expected from the model of independent gene action and has been observed previously in combinatorial screens^{16,20}. Both of these assumptions are conservative, in that true (but currently uncharacterized) synthetic lethal interactions across the pre-defined groups or buffering interactions between genes will be counted as false positives. Applicants calculated the true positive rate at different FDR thresholds for data from both individual cell lines as well as all leave-one-out iterations (FIG. 4e). Applicants see similar estimates for the true positive rate for both synthetic lethal and buffering interactions, suggesting the independent assumptions made for each were reasonable. At an FDR threshold of 0.1, the empirically-determined true positive rate ranged from 72-85%, not far from the theoretical value of 90% (i.e. 10% false discoveries), suggesting that the analysis approach is well-calibrated.

[0610] The false negative rate of a genetic screen is notoriously difficult to determine empirically, because for the majority of screens, there are not well-validated sets of true positive genes. For synthetic lethal interactions, there is no reference set of interactions validated to occur in all cell lines. False negatives arise when the reagents targeting the gene are ineffective; for genetic screens that target single genes, there is no data-driven way to determine which genes failed to score because of ineffective targeting purely on the basis of screening results. In these data, however, Applicants can use buffering interactions where both Cas9s are targeted to the same gene to validate the effectiveness of the sgRNAs. Buffering in this special case indicates that both the SaCas9 and SpCas9 sgRNAs must have effectively targeted the gene. Failure to detect a buffering interaction for an individual gene is evidence of failure to effectively target the gene with either or both Cas9s, and thus Applicants can empirically determine a false negative rate. This is a conservative assumption, as it assumes that a gene has a measurable viability effect in a cell, which will not always be true. Buffering interactions were detected with approximately equal prevalence across all cell lines, including 7860 cells, which were bereft of strong synthetic lethal interactions (FIG. 14a). Applicants observed a lower false negative rate when information from multiple cell lines was combined (FIG. 40. For example, at an FDR of 0.1, Applicants determine a false negative rate of 57% when using individual cell lines, whereas combining information from 5 lines gives a false negative rate of 33%. The empirically determined true positive and false negative rates of the Big Papi screening system suggest that this is an efficient screening approach, especially when assayed across multiple cell lines.

### Example 10—Combinatorial Screening of Chromatin Regulators in Cancer

[0611] Applicants sought to determine if the screening platform could be used to robustly identify synthetic lethal combinations of chromatin regulators and combinations that are therapeutically actionable. Synthetic lethal interactions in cancer have been previously found for chromatin regulators (see, e.g., Zhao et al., Synthetic essentiality of chromatin remodelling factor CHD1 in PTEN-deficient cancer, Nature. 2017 Feb. 23; 542(7642):484-488; and Helming et al., ARID1B is a specific vulnerability in ARID1A-mutant cancers. Nat Med. 2014 March; 20(3):251-4). Applicants used the chromatin regulator screening platform described herein to identify synthetic lethal interactions in cancer cell lines (300K platform). Indeed, using the chromatin 300K screening platform, Applicants identified ARID1B and ARID1A synthetic lethality in REH cells. The synthetic lethal pairs identified in REH cells included ASF1B and ASF1A, ARID1B and ARID1A, SMARCAL1 and ATRX, ING5 and ING4, HDAC2 and HDAC1, WDR77 and HDAC6, KAT6B and CHD8, WDR77 and KAT6B, KDM3B and ARID1A, KDM3B and CHD3, SETD2 and NSD1, ING2 and ING1, MTA1 and DOT1L, KDM3B and BRD1, KDM4A and KAT6A, INO80 and CBX1, HDAC6 and EZH2, SMARCAL1 and HDAC8, KAT5 and CHAF1B, SUV39H1 and HDAC6, KDM3B and BRD4, KMT2B and BRD8, PRMT5 and KAT5, SIRT4 and CBX1, KAT6A and CHD6, WDR77 and DOT1L, KAT2B and EHMT1, KMT2E and KAT6A, KDM3B and DOT1L, KDM3B and KDM3A, CHD8 and BRD1, HIRA and ATRX, KDM5C and KDM3B, PRDM6 and KDM3B, KAT6B and KAT6A, SMARCB1 and KDM6A, MECP2 and KDM4B, KAT2A and HDAC5, SETD2 and KDM3B, RFWD2 and CHD6, SMARCB1 and ARID3C, SETMAR and BRD1, HDAC2 and DIDO1, HDAC2 and DNMT3B, KDM4D and BRD1, PRDM1 and HDAC8, SMARCA5 and KAT6A, and KMT2D and ARID1A.

[0612] Applicants also identified 2STD genes in REH cells, including: SRCAP, WDR77, CHAF1B, TAF5, CSTF1, WDHD1, BRD4, DNMT1, WDR61, GTF3C2, PRMT5, RBBP5, HDAC3, TRIM24, CHD7, HIRA and SMC1A. Applicants also identified border 2STD genes in REH cells, including: SMC2, SMC3, TAF1, WDR92, KDM2B and HUWE1. Applicants used the 300K screening platform to screen for synthetic lethality and buffering in THP-1 and REH cell lines (Table 2). Comparison to lethality of single genes using the Achilles screening platform is also shown (see, e.g., portals.broadinstitute.org/achilles/about; and Cheung et al., Systematic investigation of genetic vulnerabilities across cancer cell lines reveals lineage-specific dependencies in ovarian cancer. Proc Natl Acad Sci USA. 2011 Jul. 26; 108(30): 12372-12377). “Synlet score” refers to the number of synthetic lethal combinations observed with that gene. Buffering is the same. “Amplified” refers to KOs that induced the cells to expand.

TABLE 2

| | THP-1 | THP-1 | | THP-1 | THP-1 | | Reh | | Reh | Reh |
|---|---|---|---|---|---|---|---|---|---|---|
| | ACHILLES | Lethal@ | THP-1 | Synlet | Buffer | Inhibitor | Lethal@ | Reh | Synlet | Buffer |
| Gene | lethal | 2STD | Amplified | Score | Score | available | 2STD | Amplified | Score | Score |
| BRD2 | 0 | 0 | 0 | 10 | 3 | 0 | 0 | 0 | 0 | 0 |
| WDR77 | 0 | 0 | 0 | 7 | 0 | 0 | 1 | 0 | 3 | 0 |
| KDM3B | 0 | 0 | 0 | 4 | 1 | 0 | 0 | 0 | 9 | 2 |
| KAT6A | 0 | 0 | 0 | 4 | 0 | 0 | 0 | 0 | 5 | 1 |
| CHD8 | 0 | 0 | 0 | 4 | 1 | 0 | 0 | 0 | 2 | 0 |
| ING1 | 0 | 0 | 1 | 4 | 1 | 0 | 0 | 0 | 1 | 0 |
| CHD6 | 0 | 0 | 0 | 3 | 0 | 0 | 0 | 0 | 2 | 1 |
| INO80 | 0 | 0 | 0 | 3 | 0 | 0 | 0 | 0 | 1 | 0 |
| HDAC2 | 0 | 0 | 0 | 2 | 0 | 1 | 0 | 0 | 3 | 0 |
| KAT6B | 0 | 0 | 0 | 2 | 0 | 0 | 0 | 0 | 3 | 0 |
| SMARCB1 | 1 | 0 | 0 | 2 | 0 | 0 | 0 | 0 | 2 | 0 |
| KAT5 | 1 | 0 | 0 | 2 | 1 | 0 | 0 | 0 | 2 | 0 |
| BRD4 | 1 | 1 | 0 | 2 | 0 | 1 | 1 | 0 | 1 | 1 |
| ING2 | 0 | 0 | 1 | 2 | 0 | 0 | 0 | 0 | 1 | 0 |
| HDAC3 | 1 | 1 | 0 | 2 | 2 | 1 | 1 | 0 | 0 | 2 |
| PHF23 | 0 | 0 | 1 | 2 | 0 | 0 | 0 | 0 | 0 | 0 |
| BRD3 | 0 | 0 | 0 | 2 | 0 | 0 | 0 | 0 | 0 | 5 |
| TAF1 | 0 | 0 | 0 | 2 | 0 | 0 | 0.5 | 0 | 0 | 0 |
| SUV39H2 | 0 | 0 | 0 | 2 | 1 | 0 | 0 | 0 | 0 | 3 |
| CHD7 | 0 | 0 | 0 | 2 | 4 | 0 | 1 | 0 | 0 | 0 |
| BRD1 | 0 | 0 | 0 | 1 | 0 | 0 | 0 | 0 | 4 | 0 |
| DOT1L | 0 | 0 | 0 | 1 | 0 | 1 | 0 | 0 | 3 | 0 |
| ARID1A | 0 | 0 | 0 | 1 | 0 | 0 | 0 | 0 | 3 | 0 |
| ATRX | 0 | 0 | 0 | 1 | 1 | 0 | 0 | 0 | 2 | 0 |
| SMARCAL1 | 0 | 0 | 0 | 1 | 2 | 0 | 0 | 0 | 2 | 2 |
| CHAF1B | 1 | 1 | 0 | 1 | 0 | 0 | 1 | 0 | 1 | 0 |
| HIRA | 1 | 1 | 0 | 1 | 2 | 0 | 1 | 0 | 1 | 0 |
| PRMT5 | 1 | 0.5 | 0 | 1 | 5 | 1 | 1 | 0 | 1 | 2 |
| EHMT1 | 0 | 0 | 0 | 1 | 0 | 1 | 0 | 0 | 1 | 1 |
| HDAC1 | 0 | 0 | 0 | 1 | 0 | 1 | 0 | 0 | 1 | 1 |
| KDM4A | 0 | 0 | 0 | 1 | 2 | 1 | 0 | 0 | 1 | 0 |
| ASF1A | 0 | 0 | 0 | 1 | 0 | 0 | 0 | 0 | 1 | 0 |
| ASF1B | 0 | 0 | 0 | 1 | 0 | 0 | 0 | 0 | 1 | 0 |
| CHD3 | 0 | 0 | 0 | 1 | 0 | 0 | 0 | 0 | 1 | 0 |
| DNMT3B | 0 | 0 | 0 | 1 | 0 | 0 | 0 | 0 | 1 | 0 |
| KAT2B | 0 | 0 | 0 | 1 | 0 | 0 | 0 | 0 | 1 | 0 |
| SETMAR | 0 | 0 | 0 | 1 | 0 | 0 | 0 | 1 | 1 | 0 |
| MTA1 | 0 | 0 | 0 | 1 | 1 | 0 | 0 | 0 | 1 | 0 |
| NSD1 | 0 | 0 | 0 | 1 | 1 | 0 | 0 | 0 | 1 | 2 |
| KMT2B | 0 | 0 | 0 | 1 | 2 | 0 | 0 | 0 | 1 | 1 |
| DNMT1 | 0 | 0.5 | 0 | 1 | 3 | 1 | 1 | 0 | 0 | 5 |
| KMT2A | 1 | 0.5 | 0 | 1 | 0 | 0 | 0 | 0 | 0 | 0 |
| MORF4L1 | 0 | 0 | 1 | 1 | 0 | 0 | 0 | 0 | 0 | 0 |
| KDM4E | 0 | 0 | 0 | 1 | 0 | 1 | 0 | 0 | 0 | 0 |
| SIRT6 | 0 | 0 | 0 | 1 | 0 | 1 | 0 | 0 | 0 | 0 |
| ARID2 | 0 | 0 | 0 | 1 | 0 | 0 | 0 | 0 | 0 | 1 |
| ARID4B | 0 | 0 | 0 | 1 | 0 | 0 | 0 | 0 | 0 | 0 |
| ASH1L | 0 | 0 | 0 | 1 | 0 | 0 | 0 | 0 | 0 | 0 |
| BPTF | 0 | 0 | 0 | 1 | 0 | 0 | 0 | 0 | 0 | 0 |
| CHD2 | 0 | 0 | 0 | 1 | 0 | 0 | 0 | 0 | 0 | 0 |
| CHD4 | 1 | 0 | 0 | 1 | 0 | 0 | 0 | 0 | 0 | 2 |
| CORO2A | 0 | 0 | 0 | 1 | 0 | 0 | 0 | 0 | 0 | 0 |
| INTS12 | 0 | 0 | 0 | 1 | 0 | 0 | 0 | 0 | 0 | 0 |
| PHF12 | 0 | 0 | 0 | 1 | 0 | 0 | 0 | 0 | 0 | 0 |
| SETD1A | 1 | 0 | 0 | 1 | 0 | 0 | 0 | 0 | 0 | 1 |
| SETD3 | 0 | 0 | 0 | 1 | 0 | 0 | 0 | 0 | 0 | 0 |
| SETD6 | 0 | 0 | 0 | 1 | 0 | 0 | 0 | 0 | 0 | 0 |
| SETDB1 | 1 | 0 | 0 | 1 | 0 | 0 | 0 | 0 | 0 | 0 |
| BRD9 | 0 | 0 | 0 | 1 | 1 | 0 | 0 | 0 | 0 | 0 |
| HDAC6 | 0 | 0 | 0 | 0 | 0 | 1 | 0 | 0 | 3 | 0 |
| HDAC8 | 0 | 0 | 1 | 0 | 0 | 1 | 0 | 1 | 2 | 0 |
| CBX1 | 0 | 0 | 0 | 0 | 0 | 0 | 0 | 0 | 2 | 1 |
| SETD2 | 0 | 0 | 0 | 0 | 0 | 0 | 0 | 0 | 2 | 1 |
| KMT2E | 0 | 0 | 1 | 0 | 0 | 0 | 0 | 0 | 1 | 0 |
| KDM4B | 0 | 0 | 0 | 0 | 0 | 1 | 0 | 0 | 1 | 0 |
| KDM4D | 0 | 0 | 0 | 0 | 0 | 1 | 0 | 0 | 1 | 0 |
| KDM5C | 0 | 0 | 0 | 0 | 0 | 1 | 0 | 1 | 1 | 0 |
| KDM6A | 0 | 0 | 0 | 0 | 0 | 1 | 0 | 1 | 1 | 0 |
| EZH2 | 0 | 0 | 0 | 0 | 2 | 1 | 0 | 0 | 1 | 2 |
| ARID3C | 0 | 0 | 0 | 0 | 0 | 0 | 0 | 0 | 1 | 0 |
| BRD8 | 0 | 0 | 0 | 0 | 0 | 0 | 0 | 0 | 1 | 0 |
| DIDO1 | 1 | 0 | 0 | 0 | 0 | 0 | 0 | 0 | 1 | 0 |
| HDAC5 | 0 | 0 | 0 | 0 | 0 | 0 | 0 | 0 | 1 | 2 |
| ING4 | 0 | 0 | 0 | 0 | 0 | 0 | 0 | 0 | 1 | 0 |
| ING5 | 0 | 0 | 0 | 0 | 0 | 0 | 0 | 0 | 1 | 0 |
| KDM3A | 0 | 0 | 0 | 0 | 0 | 0 | 0 | 0 | 1 | 0 |
| KMT2D | 0 | 0 | 0 | 0 | 0 | 0 | 0 | 0 | 1 | 0 |
| MECP2 | 0 | 0 | 0 | 0 | 0 | 0 | 0 | 0 | 1 | 0 |
| PRDM1 | 0 | 0 | 0 | 0 | 0 | 0 | 0 | 0 | 1 | 0 |
| PRDM6 | 0 | 0 | 0 | 0 | 0 | 0 | 0 | 0 | 1 | 1 |
| SIRT4 | 0 | 0 | 0 | 0 | 0 | 0 | 0 | 0 | 1 | 0 |
| SMARCA5 | 1 | 0 | 0 | 0 | 0 | 0 | 0 | 0 | 1 | 0 |
| SUV39H | 0 | 0 | 0 | 0 | 0 | 0 | 0 | 0 | 1 | 0 |
| ARID1B | 0 | 0 | 0 | 0 | 1 | 0 | 0 | 0 | 1 | 0 |
| RFWD2 | 0 | 0 | 0 | 0 | 3 | 0 | 0 | 0 | 1 | 0 |
| KAT2A | 0 | 0 | 0 | 0 | 9 | 0 | 0 | 1 | 1 | 5 |
| CREBBP | 0 | 1 | 0 | 0 | 0 | 0 | 0 | 0 | 0 | 0 |
| TAF5 | 1 | 1 | 0 | 0 | 0 | 0 | 1 | 0 | 0 | 1 |
| CHD1 | 0 | 1 | 0 | 0 | 1 | 0 | 0 | 0 | 0 | 0 |
| TAF5L | 0 | 1 | 0 | 0 | 1 | 0 | 0 | 0 | 0 | 0 |
| TRIM24 | 1 | 1 | 0 | 0 | 1 | 0 | 1 | 0 | 0 | 1 |
| CBX3 | 0 | 0.5 | 0 | 0 | 0 | 0 | 0 | 0 | 0 | 0 |
| CSTF1 | 1 | 0.5 | 0 | 0 | 0 | 0 | 1 | 0 | 0 | 0 |
| SMC1A | 0 | 0.5 | 0 | 0 | 0 | 0 | 1 | 0 | 0 | 0 |
| SMC2 | 1 | 0.5 | 0 | 0 | 0 | 0 | 0.5 | 0 | 0 | 0 |
| SRCAP | 1 | 0.5 | 0 | 0 | 0 | 0 | 1 | 0 | 0 | 0 |
| KDM2B | 0 | 0.5 | 0 | 0 | 1 | 0 | 0.5 | 0 | 0 | 0 |
| RBBP5 | 1 | 0.5 | 0 | 0 | 1 | 0 | 1 | 0 | 0 | 1 |
| WDHD1 | 0 | 0.5 | 0 | 0 | 1 | 0 | 1 | 0 | 0 | 1 |
| TAF3 | 0 | 0.5 | 0 | 0 | 3 | 0 | 0 | 0 | 0 | 0 |
| BRDT | 0 | 0 | 1 | 0 | 0 | 0 | 0 | 0 | 0 | 0 |
| JADE2 | 0 | 0 | 1 | 0 | 0 | 0 | 0 | 0 | 0 | 0 |
| RBBP7 | 0 | 0 | 1 | 0 | 0 | 0 | 0 | 0 | 0 | 0 |
| WHSC1 | 0 | 0 | 1 | 0 | 0 | 0 | 0 | 0 | 0 | 0 |
| BAZ2A | 0 | 0 | 0 | 0 | 0 | 1 | 0 | 0 | 0 | 0 |
| BAZ2B | 0 | 0 | 0 | 0 | 0 | 1 | 0 | 0 | 0 | 0 |
| BRPF1 | 1 | 0 | 0 | 0 | 0 | 1 | 0 | 0 | 0 | 0 |
| CECR2 | 0 | 0 | 0 | 0 | 0 | 1 | 0 | 0 | 0 | 0 |
| EED | 0 | 0 | 0 | 0 | 0 | 1 | 0 | 0 | 0 | 0 |
| KDM4C | 0 | 0 | 0 | 0 | 0 | 1 | 0 | 0 | 0 | 1 |
| KDM5A | 0 | 0 | 0 | 0 | 0 | 1 | 0 | 0 | 0 | 2 |
| KDM5B | 0 | 0 | 0 | 0 | 0 | 1 | 0 | 1 | 0 | 1 |
| KDM6B | 0 | 0 | 0 | 0 | 0 | 1 | 0 | 0 | 0 | 0 |
| PRMT1 | 1 | 0 | 0 | 0 | 0 | 1 | 0 | 0 | 0 | 2 |
| SETD7 | 0 | 0 | 0 | 0 | 0 | 1 | 0 | 0 | 0 | 1 |
| SIRT1 | 0 | 0 | 0 | 0 | 0 | 1 | 0 | 0 | 0 | 0 |
| SIRT2 | 0 | 0 | 0 | 0 | 0 | 1 | 0 | 0 | 0 | 0 |
| SMYD2 | 0 | 0 | 0 | 0 | 0 | 1 | 0 | 0 | 0 | 0 |
| SMYD3 | 0 | 0 | 0 | 0 | 0 | 1 | 0 | 0 | 0 | 0 |
| EHMT2 | 0 | 0 | 0 | 0 | 1 | 1 | 0 | 0 | 0 | 1 |
| EP300 | 1 | 0 | 0 | 0 | 1 | 1 | 0 | 0 | 0 | 0 |
| KDM5D | 0 | 0 | 0 | 0 | 1 | 1 | 0 | 0 | 0 | 1 |
| SMARCA4 | 0 | 0 | 0 | 0 | 2 | 1 | 0 | 0 | 0 | 2 |
| KDM1A | 0 | 0 | 0 | 0 | 10 | 1 | 0 | 0 | 0 | 5 |
| ARID3A | 0 | 0 | 0 | 0 | 0 | 0 | 0 | 0 | 0 | 0 |
| ARID3B | 0 | 0 | 0 | 0 | 0 | 0 | 0 | 0 | 0 | 2 |
| ARID4A | 0 | 0 | 0 | 0 | 0 | 0 | 0 | 0 | 0 | 1 |
| ARID5A | 0 | 0 | 0 | 0 | 0 | 0 | 0 | 0 | 0 | 0 |
| ARID5B | 0 | 0 | 0 | 0 | 0 | 0 | 0 | 0 | 0 | 1 |
| ATAD2 | 0 | 0 | 0 | 0 | 0 | 0 | 0 | 0 | 0 | 0 |
| ATAD2B | 0 | 0 | 0 | 0 | 0 | 0 | 0 | 0 | 0 | 0 |
| BAZ1A | 0 | 0 | 0 | 0 | 0 | 0 | 0 | 0 | 0 | 0 |
| BAZ1B | 0 | 0 | 0 | 0 | 0 | 0 | 0 | 0 | 0 | 0 |
| BRPF3 | 0 | 0 | 0 | 0 | 0 | 0 | 0 | 0 | 0 | 0 |
| BRVVD1 | 0 | 0 | 0 | 0 | 0 | 0 | 0 | 0 | 0 | 1 |
| BRWD3 | 0 | 0 | 0 | 0 | 0 | 0 | 0 | 0 | 0 | 0 |
| CBX2 | 0 | 0 | 0 | 0 | 0 | 0 | 0 | 0 | 0 | 0 |
| CBX4 | 0 | 0 | 0 | 0 | 0 | 0 | 0 | 0 | 0 | 0 |
| CBX5 | 0 | 0 | 0 | 0 | 0 | 0 | 0 | 0 | 0 | 0 |
| CBX6 | 0 | 0 | 0 | 0 | 0 | 0 | 0 | 0 | 0 | 0 |
| CBX7 | 0 | 0 | 0 | 0 | 0 | 0 | 0 | 0 | 0 | 0 |
| CBX8 | 0 | 0 | 0 | 0 | 0 | 0 | 0 | 0 | 0 | 0 |
| CDYL | 0 | 0 | 0 | 0 | 0 | 0 | 0 | 0 | 0 | 0 |
| CDYL2 | 0 | 0 | 0 | 0 | 0 | 0 | 0 | 0 | 0 | 0 |
| CHAF1A | 1 | 0 | 0 | 0 | 0 | 0 | 0 | 0 | 0 | 0 |
| CHD1L | 0 | 0 | 0 | 0 | 0 | 0 | 0 | 0 | 0 | 2 |
| CHD5 | 0 | 0 | 0 | 0 | 0 | 0 | 0 | 0 | 0 | 0 |
| CHD9 | 0 | 0 | 0 | 0 | 0 | 0 | 0 | 0 | 0 | 0 |
| DDB2 | 0 | 0 | 0 | 0 | 0 | 0 | 0 | 0 | 0 | 0 |
| DNMT3A | 0 | 0 | 0 | 0 | 0 | 0 | 0 | 0 | 0 | 1 |
| DPF1 | 0 | 0 | 0 | 0 | 0 | 0 | 0 | 0 | 0 | 1 |
| DPF2 | 0 | 0 | 0 | 0 | 0 | 0 | 0 | 0 | 0 | 0 |
| DPF3 | 0 | 0 | 0 | 0 | 0 | 0 | 0 | 0 | 0 | 0 |
| ELP2 | 0 | 0 | 0 | 0 | 0 | 0 | 0 | 0 | 0 | 0 |
| ELP3 | 0 | 0 | 0 | 0 | 0 | 0 | 0 | 0 | 0 | 0 |
| EPC1 | 0 | 0 | 0 | 0 | 0 | 0 | 0 | 0 | 0 | 0 |
| EPC2 | 0 | 0 | 0 | 0 | 0 | 0 | 0 | 0 | 0 | 0 |
| EZH1 | 0 | 0 | 0 | 0 | 0 | 0 | 0 | 1 | 0 | 1 |
| FBXL19 | 0 | 0 | 0 | 0 | 0 | 0 | 0 | 0 | 0 | 0 |
| FBXW9 | 0 | 0 | 0 | 0 | 0 | 0 | 0 | 0 | 0 | 0 |
| GTF3C2 | 1 | 0 | 0 | 0 | 0 | 0 | 1 | 0 | 0 | 0 |
| HAT1 | 0 | 0 | 0 | 0 | 0 | 0 | 0 | 0 | 0 | 0 |
| HDAC11 | 0 | 0 | 0 | 0 | 0 | 0 | 0 | 0 | 0 | 0 |
| HDAC4 | 0 | 0 | 0 | 0 | 0 | 0 | 0 | 0 | 0 | 0 |
| HDAC7 | 0 | 0 | 0 | 0 | 0 | 0 | 0 | 0 | 0 | 1 |
| HDAC9 | 0 | 0 | 0 | 0 | 0 | 0 | 0 | 0 | 0 | 0 |
| HR | 0 | 0 | 0 | 0 | 0 | 0 | 0 | 0 | 0 | 0 |
| IL4I1 | 0 | 0 | 0 | 0 | 0 | 0 | 0 | 0 | 0 | 0 |
| ING3 | 0 | 0 | 0 | 0 | 0 | 0 | 0 | 0 | 0 | 0 |
| JADE1 | 0 | 0 | 0 | 0 | 0 | 0 | 0 | 0 | 0 | 0 |
| JADE3 | 0 | 0 | 0 | 0 | 0 | 0 | 0 | 0 | 0 | 0 |
| JARID2 | 0 | 0 | 0 | 0 | 0 | 0 | 0 | 0 | 0 | 0 |
| JMJD1C | 0 | 0 | 0 | 0 | 0 | 0 | 0 | 0 | 0 | 1 |
| JMJD4 | 0 | 0 | 0 | 0 | 0 | 0 | 0 | 0 | 0 | 0 |
| JMJD6 | 0 | 0 | 0 | 0 | 0 | 0 | 0 | 0 | 0 | 0 |
| KAT8 | 1 | 0 | 0 | 0 | 0 | 0 | 0 | 0 | 0 | 0 |
| KDM1B | 0 | 0 | 0 | 0 | 0 | 0 | 0 | 0 | 0 | 2 |
| KDM7A | 0 | 0 | 0 | 0 | 0 | 0 | 0 | 0 | 0 | 0 |
| KMT2C | 0 | 0 | 0 | 0 | 0 | 0 | 0 | 0 | 0 | 3 |
| MBD1 | 0 | 0 | 0 | 0 | 0 | 0 | 0 | 1 | 0 | 0 |
| MBD3L1 | 0 | 0 | 0 | 0 | 0 | 0 | 0 | 0 | 0 | 0 |
| MBD4 | 0 | 0 | 0 | 0 | 0 | 0 | 0 | 0 | 0 | 0 |
| METTL13 | 0 | 0 | 0 | 0 | 0 | 0 | 0 | 0 | 0 | 0 |
| MGMT | 0 | 0 | 0 | 0 | 0 | 0 | 0 | 0 | 0 | 0 |
| MSL3 | 0 | 0 | 0 | 0 | 0 | 0 | 0 | 0 | 0 | 0 |
| MTA3 | 0 | 0 | 0 | 0 | 0 | 0 | 0 | 0 | 0 | 0 |
| MTF2 | 0 | 0 | 0 | 0 | 0 | 0 | 0 | 0 | 0 | 0 |
| PHF1 | 0 | 0 | 0 | 0 | 0 | 0 | 0 | 0 | 0 | 0 |
| PHF10 | 0 | 0 | 0 | 0 | 0 | 0 | 0 | 0 | 0 | 0 |
| PHF13 | 0 | 0 | 0 | 0 | 0 | 0 | 0 | 0 | 0 | 0 |
| PHF14 | 0 | 0 | 0 | 0 | 0 | 0 | 0 | 0 | 0 | 0 |
| PHF19 | 0 | 0 | 0 | 0 | 0 | 0 | 0 | 0 | 0 | 0 |
| PHF2 | 0 | 0 | 0 | 0 | 0 | 0 | 0 | 0 | 0 | 0 |
| PHF21A | 0 | 0 | 0 | 0 | 0 | 0 | 0 | 0 | 0 | 0 |
| PHF21B | 0 | 0 | 0 | 0 | 0 | 0 | 0 | 0 | 0 | 1 |
| PHF3 | 0 | 0 | 0 | 0 | 0 | 0 | 0 | 0 | 0 | 0 |
| PHF8 | 0 | 0 | 0 | 0 | 0 | 0 | 0 | 0 | 0 | 0 |
| PHRF1 | 0 | 0 | 0 | 0 | 0 | 0 | 0 | 0 | 0 | 1 |
| PRPM11 | 0 | 0 | 0 | 0 | 0 | 0 | 0 | 0 | 0 | 1 |
| PRDM14 | 0 | 0 | 0 | 0 | 0 | 0 | 0 | 0 | 0 | 0 |
| PRDM2 | 0 | 0 | 0 | 0 | 0 | 0 | 0 | 0 | 0 | 1 |
| PRDM9 | 0 | 0 | 0 | 0 | 0 | 0 | 0 | 0 | 0 | 0 |
| PRMT2 | 0 | 0 | 0 | 0 | 0 | 0 | 0 | 0 | 0 | 0 |
| PYGO1 | 0 | 0 | 0 | 0 | 0 | 0 | 0 | 0 | 0 | 0 |
| PYGO2 | 0 | 0 | 0 | 0 | 0 | 0 | 0 | 0 | 0 | 1 |
| RAD54L | 0 | 0 | 0 | 0 | 0 | 0 | 0 | 0 | 0 | 0 |
| RAD54L2 | 0 | 0 | 0 | 0 | 0 | 0 | 0 | 0 | 0 | 0 |
| RBBP4 | 1 | 0 | 0 | 0 | 0 | 0 | 0 | 0 | 0 | 0 |
| RSF1 | 0 | 0 | 0 | 0 | 0 | 0 | 0 | 0 | 0 | 0 |
| SAP30 | 0 | 0 | 0 | 0 | 0 | 0 | 0 | 0 | 0 | 0 |
| SAP30L | 0 | 0 | 0 | 0 | 0 | 0 | 0 | 0 | 0 | 0 |
| SET | 0 | 0 | 0 | 0 | 0 | 0 | 0 | 0 | 0 | 0 |
| SETD4 | 0 | 0 | 0 | 0 | 0 | 0 | 0 | 0 | 0 | 2 |
| SETD9 | 0 | 0 | 0 | 0 | 0 | 0 | 0 | 0 | 0 | 0 |
| SETDB2 | 0 | 0 | 0 | 0 | 0 | 0 | 0 | 0 | 0 | 0 |
| SHPRH | 0 | 0 | 0 | 0 | 0 | 0 | 0 | 0 | 0 | 0 |
| SIRT3 | 0 | 0 | 0 | 0 | 0 | 0 | 0 | 0 | 0 | 0 |
| SIRT5 | 0 | 0 | 0 | 0 | 0 | 0 | 0 | 0 | 0 | 0 |
| SLBP | 0 | 0 | 0 | 0 | 0 | 0 | 0 | 0 | 0 | 0 |
| SMARCA1 | 0 | 0 | 0 | 0 | 0 | 0 | 0 | 0 | 0 | 0 |
| SMARCA2 | 0 | 0 | 0 | 0 | 0 | 0 | 0 | 0 | 0 | 0 |
| SMARCAD1 | 0 | 0 | 0 | 0 | 0 | 0 | 0 | 0 | 0 | 0 |
| SMC1B | 0 | 0 | 0 | 0 | 0 | 0 | 0 | 0 | 0 | 0 |
| SMC3 | 1 | 0 | 0 | 0 | 0 | 0 | 0.5 | 0 | 0 | 0 |
| SMC4 | 1 | 0 | 0 | 0 | 0 | 0 | 0 | 0 | 0 | 0 |
| SMYD1 | 0 | 0 | 0 | 0 | 0 | 0 | 0 | 0 | 0 | 0 |
| SMYD4 | 0 | 0 | 0 | 0 | 0 | 0 | 0 | 0 | 0 | 0 |
| SMYD5 | 0 | 0 | 0 | 0 | 0 | 0 | 0 | 0 | 0 | 0 |
| SP100 | 0 | 0 | 0 | 0 | 0 | 0 | 0 | 0 | 0 | 0 |
| SP140 | 0 | 0 | 0 | 0 | 0 | 0 | 0 | 0 | 0 | 0 |
| SP140L | 0 | 0 | 0 | 0 | 0 | 0 | 0 | 0 | 0 | 0 |
| TAF1L | 0 | 0 | 0 | 0 | 0 | 0 | 0 | 1 | 0 | 0 |
| TET1 | 0 | 0 | 0 | 0 | 0 | 0 | 0 | 0 | 0 | 0 |
| TET2 | 0 | 0 | 0 | 0 | 0 | 0 | 0 | 0 | 0 | 0 |
| TET3 | 0 | 0 | 0 | 0 | 0 | 0 | 0 | 0 | 0 | 0 |
| TRIM28 | 0 | 0 | 0 | 0 | 0 | 0 | 0 | 0 | 0 | 0 |
| TRIM33 | 0 | 0 | 0 | 0 | 0 | 0 | 0 | 0 | 0 | 0 |
| TRIM66 | 0 | 0 | 0 | 0 | 0 | 0 | 0 | 0 | 0 | 0 |
| TSPYL2 | 0 | 0 | 0 | 0 | 0 | 0 | 0 | 0 | 0 | 0 |
| UHRF1 | 0 | 0 | 0 | 0 | 0 | 0 | 0 | 0 | 0 | 0 |
| UHRF2 | 0 | 0 | 0 | 0 | 0 | 0 | 0 | 0 | 0 | 0 |
| UTY | 0 | 0 | 0 | 0 | 0 | 0 | 0 | 0 | 0 | 0 |
| WDR48 | 0 | 0 | 0 | 0 | 0 | 0 | 0 | 0 | 0 | 0 |
| WDR5 | 0 | 0 | 0 | 0 | 0 | 0 | 0 | 0 | 0 | 0 |
| WDR61 | 0 | 0 | 0 | 0 | 0 | 0 | 1 | 0 | 0 | 1 |
| WDR82 | 0 | 0 | 0 | 0 | 0 | 0 | 0 | 0 | 0 | 0 |
| WDR92 | 0 | 0 | 0 | 0 | 0 | 0 | 0.5 | 0 | 0 | 0 |
| WHSC1L1 | 0 | 0 | 0 | 0 | 0 | 0 | 0 | 0 | 0 | 0 |
| ZMYND11 | 0 | 0 | 0 | 0 | 0 | 0 | 0 | 1 | 0 | 0 |
| AIRE | 0 | 0 | 0 | 0 | 1 | 0 | 0 | 0 | 0 | 1 |
| CARM1 | 0 | 0 | 0 | 0 | 1 | 0 | 0 | 0 | 0 | 0 |
| CXXC1 | 0 | 0 | 0 | 0 | 1 | 0 | 0 | 0 | 0 | 0 |
| EP400 | 1 | 0 | 0 | 0 | 1 | 0 | 0 | 0 | 0 | 0 |
| HDAC10 | 0 | 0 | 0 | 0 | 1 | 0 | 0 | 0 | 0 | 2 |
| HUWE1 | 0 | 0 | 0 | 0 | 1 | 0 | 0.5 | 0 | 0 | 0 |
| KDM2A | 0 | 0 | 0 | 0 | 1 | 0 | 0 | 0 | 0 | 3 |
| MBD2 | 0 | 0 | 0 | 0 | 1 | 0 | 0 | 0 | 0 | 0 |
| MEAF6 | 0 | 0 | 0 | 0 | 1 | 0 | 0 | 0 | 0 | 0 |
| PBRM1 | 0 | 0 | 0 | 0 | 1 | 0 | 0 | 0 | 0 | 0 |
| PHIP | 0 | 0 | 0 | 0 | 1 | 0 | 0 | 0 | 0 | 0 |
| SIRT7 | 0 | 0 | 0 | 0 | 1 | 0 | 0 | 0 | 0 | 0 |
| ZMYND8 | 0 | 0 | 0 | 0 | 1 | 0 | 0 | 0 | 0 | 0 |
| KAT7 | 0 | 0 | 0 | 0 | 2 | 0 | 0 | 0 | 0 | 2 |
| MBD3 | 0 | 0 | 0 | 0 | 2 | 0 | 0 | 0 | 0 | 1 |
| MTA2 | 0 | 0 | 0 | 0 | 2 | 0 | 0 | 0 | 0 | 0 |
| SETD5 | 1 | 0 | 0 | 0 | 2 | 0 | 0 | 0 | 0 | 0 |
| WBSCR22 | 0 | 0 | 0 | 0 | 2 | 0 | 0 | 0 | 0 | 0 |
| SETD1B | 0 | 0 | 0 | 0 | 6 | 0 | 0 | 0 | 0 | 1 |

[0613] The screening platform also allows for identifying synthetic combinations that are more lethal in comparison to the others. As described herein, the 300K screen utilizes the platform described in FIG. 1. The 300K Library Screen targets 274 chromatin regulator genes (DNMT1, KDM5A, KDM5B, KDM5C, KDM5D, SETDB1, SETDB2, BAZ2A, BAZ2B, ASH1L, KMT2A, KMT2B, SUV39H1, SUV39H2, JARID2, KAT2A, KAT2B, CHD3, CHD4, CHD5, CHAF1A, ZMYND8, BRPF1, BRPF3, BRD1, MBD2, MBD3, MBD1, HDAC4, HDAC5, HDAC9, BRWD1, BRWD3, KDM2A, PHIP, PBRM1, CXXC1, SETMAR, EHMT1, EHMT2, ATAD2, ATAD2B, KMT2C, KMT2D, KMT2E, MGMT, WBSCR22, CARM1, KDM4A, KDM4B, KDM4C, KDM4D, KDM4E, ARID4A, ARID4B, PHF2, PHF8, SP140L, BPTF, BAZ1A, BAZ1B, KDM7A, TRIM24, TRIM33, TRIM66, KAT5, KAT6A, KAT6B, KATE, CHD1, CHD2, CHD6, CHD7, CHD8, CHD9, SMARCA2, SMARCA4, SMARCA1, SMARCA5, EPC1, EPC2, KDM1A, KDM1B, DNMT3A, DNMT3B, WHSC1, WHSC1L1, NSD1, ZMYND11, SHPRH, MBD4, MBD3L1, MBD3L2, MECP2, ASF1A, ASF1B, ELP3, ING1, ING2, ING3, ING4, ING5, SLBP, SAP30L, SAP30, HAT1, HDAC1, HDAC10, HDAC11, HDAC2, HDAC3, HDAC6, HDAC7, HDAC8, DOT1L, MEAF6, FBXW9, FBXL19, TAF5L, TAF5, WDHD1, WDR48, WDR5, WDR61, WDR77, WDR82, WDR92, CHAF1B, CSTF1, CORO2A, DDB2, ELP2, EED, GTF3C2, HIRA, KDM2B, MTA2, MTA3, MTA1, RBBP4, RBBP5, RBBP7, RFWD2, TET1, TET3, CBX1, CBX2, CBX3, CBX4, CBX5, CBX6, CBX7, CBX8, CDYL2, CDYL, CDY1, CDY1B, CDY2A, CDY2B, SIRT1, SIRT2, SIRT3, SIRT4, SIRT5, SIRT6, SIRT7, SMC1A, SMC1B, SMC2, SMC3, SMC4, PRDM1, PRDM11, PRDM14, PRDM16, PRDM2, PRDM6, PRDM9, SMYD1, SMYD2, SMYD3, SMYD4, SETD1A, SETD1B, SETD2, SETD3, SETD4, SETD5, SETD6, SETD9, SETD7, SMYD5, EZH1, EZH2, ARID1A, ARID1B, ARID2, ARID3A, ARID3B, ARID3C, ARID5A, ARID5B, CREBBP, EP300, SP100, SP140, TAF1L, TAF1, BRD2, BRD3, BRD4, BRD7, BRD8, BRD9, BRDT, CECR2, HR, JMJD1C, JMJD4, JMJD6, KDM3A, KDM3B, KDM6A, KDM6B, UTY, PHRF1, PHF1, PHF10, PHF12, PHF13, PHF14, PHF19, PHF21A, PHF21B, PHF23, PHF3, TAF3, AIRE, DIDO1, DPF1, DPF2, DPF3, INTS12, KAT7, MSL3, MTF2, METTL13, MORF4L1, PRMT1, PRMT2, PRMT5, PYGO1, PYGO2, RSF1, TRIM28, UHRF1, UHRF2, EP400, INO80, RAD54L, RAD54L2, SET, SMARCAL1, SMARCB1, SMARCAD1, SRCAP, TBP, TSPYL2, ATRX, CHD1L, IL4I1, JADE1, JADE2 and JADE3). The screen includes 2 sgRNAs per gene for each CRISPR enzyme ortholog (Sa: SEQ ID NOS: 9-348 and 353-548; Sp: SEQ ID NOS: 561-900 and 905-1100). The screen includes 14 non-targeting sgRNAs for each ortholog (Sa: SEQ ID NOS: 2-8, 350-352 and 549-552; Sp: SEQ ID NOS: 554-560, 902-904 and 1101-1104), 2 EEF2 sgRNAs for each ortholog (Sa: SEQ ID NOS: 1 and 349; Sp: SEQ ID NOS: 553 and 901). The screen thus provides for 552 (S. aureus)×552 (S. pyogenes) sgRNAs=304,704 perturbations.

[0614] FIG. 23 shows a schematic of disease relevant screening in leukemia. Libraries targeting different epigenetic regulators (e.g., 40K library or 300K library) is transduced into a population of cells, such as REH or THP-1, cells transduced with the vectors are selected for with puromycin, genomic DNA is collected after day 21, the guide sequence cassettes are amplified by PCR, the sgRNAs sequenced, and the fold change as compared to the pool DNA is determined. FIG. 24 shows a flow diagram for selecting synthetic lethal genes and the top therapeutic actionable targets. This methodology can be performed using an algorithm to analyze data from large screens.

[0615] FIG. 25 shows results of the screening methodology for synthetic lethal combinations identified (ARID1A;ARID1B). Shown are each gene paired with a non-targeting sgRNA in both orthologous CRISPR enzyme orientations, as well as the combination of genes in both orthologous CRISPR enzyme orientations. Thus, the targeting by either orthologous CRISPR enzymes does not make a significant difference. The screening was performed in REH and THP-1 cell lines. In all combinations and in both cell lines there is a decrease in the sgRNA combinations as compared to the pooled library. Other examples of synthetic combinations identified were ASF1A;ASF1B, SMARCAL1;ATRX, ING4;ING5, and HDAC1;HDAC2.

[0616] FIG. 26 shows a flow diagram for follow-up validation of identified combinations of guide sequences. The vector for combinatorial screening further includes a sequence encoding for GFP. Each combination of guide sequences can be validated individually. The vector can also include a sequence encoding for SaCas9. A population of cells are transduced or provided with SpCas9. Cells expressing SpCas9 can be selected for (e.g., Blasticidin). The selected cells are transduced with the vector encoding the combination for validation. GFP positive cells are quantitated at specific time points of interest (e.g., 3 days, and 21 days). FIG. 27 shows validation experiments for the ARID1A;ARID1B combination in REH and THP-1 cells (EEF2 is an essential gene control).

[0617] FIG. 28 shows an example of a good synthetic lethal gene and an epistatic gene paired with 267 gene knock outs in THP-1 cells (selected genes are indicated). Synthetic lethal genes rarely buffer, while, epistatic genes have many buffers. This approach may be used to further screen genes identified as synthetic lethal genes for the amount of buffering when the single knockout is paired with a large number of other gene knockouts.

[0618] FIG. 29 shows an example of a pseudo-essential gene and buffering in THP-1 cells. HDAC3 is essential in certain backgrounds, but is not essential when knocked out in combination with the epistatic gene PHF23. Other examples showing buffering include BRD2;CHD1, BRD2;MTA2, and HDAC3;NSD1.

[0619] FIG. 30 shows examples of pseudo-essential genes and buffering in THP-1 cells. TAF3 is essential in certain backgrounds, but is not essential when knocked out in combination with NSD1/2. NSD1/2 are methyltransferases that generate H3K36mel/2 (monomethyl and demethylation) and recruit repressive complexes. FIG. 31 illustrates buffering as MLL knockout is partially rescued by NSD1/2.

[0620] FIG. 32 shows that candidate therapeutic targets were identified that can be used in a combination therapy to improve and/or predict response to existing drugs. For example, ARID1A knock out improves depletion by HDAC3 knockout. HDAC3 inhibitors are known in the art (e.g., RGFP966). KDM3B knock out improves depletion by DOT1L knockout. DOT1L inhibitors are known in the art (e.g., EPZ004777).

[0621] FIG. 33 shows that candidate therapeutic targets were identified that can be used in a combination therapy to improve and/or predict response to existing drugs. For example, WDR77 knock out improves depletion by BRD4 knockout. WDR77 is involved in repressive chromatin complexes (see, e.g., Migliori et al., Nat Struct Mol Biol. 2012 Jan. 8; 19(2):136-44). BRD4 inhibitors are known in the art (e.g., AZD5153, JQ1). FIG. 34 shows JQ1 dose response curves in THP-1 cells that are +/−WDR77 knock-out. The experiments were performed in octuplicate wells and repeated with two sgRNAs. FIGS. 35 and 36 show AZD5153 dose response curves in THP-1 and MV4-11 cells that are +/−WDR77 knock-out.

[0622] FIG. 37 shows that candidate therapeutic targets were identified that can be used in a combination therapy to improve and/or predict response to existing drugs. For example, SETD6 knock out improves depletion by INO80 knockout. FIG. 38 shows the results of follow-up experiments using the cell lines THP-1 and Nomo-1 (MLL-AF9 fusion AML) and REH (no MLL fusion). Cells were transduced with combo CRISPR GFP lentivirus and fluorescence analyzed at two time points (NT=non-targeting guide; EEF2 is an essential gene). SETD6 and INO80 may be suppressing transcription. Histone H2A.Z is found at active and poised promoters and are antagonized by both SETD6 and INO80, thus requiring both for the lethality observed (see, e.g., Surface et al., 2016, Cell Reports 14, 1142-1155; Subramanian, Fields, Boyer, F1000Prime Rep2015, 7:01; Brahma et al., 2017, Nature Communications volume 8, Article number: 15616; and Binda et al., Epigenetics. 2013 Feb. 1; 8(2): 177-183). Without the suppressors, the MLL fusion protein may bind to many sites in the genome resulting in death or differentiation.

[0623] FIG. 39 shows follow-up validation experiments where cells were transduced with combo CRISPR GFP lentivirus for the indicated combinations and fluorescence analyzed at two time points. The experiment also shows the synthetic lethality of the combinations of SETD6;INO80, KAT6B;CHD8, and ATRX;SMARCAL1.

[0624] FIG. 40 shows that PHF23 knockout buffers TAF3 essentiality. PHF23 and NSD1 each contain PHD domains that target highly expressed regions in the genome and suppress them. This suppression may induce TAF3 essentiality.

[0625] FIG. 41 shows essential genes in REH and THP-1 cells using a singleton gene knockout data library screen.

[0626] In summary, Applicants have shown that the screening platforms disclosed are a powerful tool for determining complex genetic interactions (e.g., epigenetic interactions). Applicants have validated a number of known synthetic lethal combinations including ARID1A;ARID1B and have discovered novel synthetic lethal interactions. Applicants also discovered reversible interactions (e.g., NSD1/2). Finally, Applicants findings inform small molecule treatments (e.g., BRD4 inhibitors; WDR77) and this was confirmed in multiple cell lines.

### Example 11—Combinatorial Screening of Chromatin Regulators in Cancer Using a Pi z-Score

[0627] Applicants have further used the combinatorial screening methods in additional cancer cell lines and have identified synthetic lethal interactions using a statistical analysis approach. Applicants have identified additional interactions that are applicable for therapeutic use in cancer subjects. The methods identified high confidence interactions.

[0628] Applicants selected 268 chromatin regulator genes for further screening (FIG. 42a). 50 PFAM domains were selected and used to filter chromatin regulator genes. The deletion frequency of the 268 genes was determined in 10,967 TCGA samples (The Cancer Genome Atlas). Around 25% of 10,967 TCGA samples have 1 or more mutations in these 268 genes (FIG. 42b). The relatively high rate of deletions in TCGA samples suggests opportunities for cancer specific synthetic lethal combinations where only a single gene would need to be targeted by a therapeutic agent. There is a broad representation of these 268 gene deletions across TCGA samples. Individual chromatin regulator genes deleted in TCGA samples were identified and chromatin regulation protein complex members are indicated (FIG. 42c). Applicants also used Gene Ontology and CCLE mutation data to characterize these genes (see, e.g., Barretina, J. et al., 2012. The Cancer Cell Line Encyclopedia enables predictive modelling of anticancer drug sensitivity. Nature 483, 603-607) (FIGS. 46 and 47).

[0629] A schematic representation of the experimental flow-through shows that guides were paired all by all (FIG. 42d). A 300 k library of 552×552=304,704 perturbations was generated and screened in two cell lines (FIG. 42d). Applicants also screened specific chromatin regulator combinations. A 40 k library, with a selection of 98 of these genes, was screened (FIGS. 48-50). Cas9 ortholog performance and experimental replicates were as expected for the 300 k library screen, as the results were consistent with targeting for SpCas9 and SaCas9 (FIGS. 51-52). Singleton knockout data from the 300 k library screen correlated with the Avana library (see, e.g., Doench et al., 2016. Optimized sgRNA design to maximize activity and minimize off-target effects of CRISPR-Cas9. Nat Biotechnol; 34(2):184-191), with Reh at 0.79 and THP-1 at 0.65 (FIG. 53). Thus, single knockouts with the 300 k screen guide sequences were consistent with another library screen. Singleton screening produced a distribution of knockout frequencies and essential genes were identified in both cell lines, showing the efficacy of the 300 k library (FIG. 43a,b).

[0630] Combinatorial data were generated using a Pi score method (see, e.g., Horn T, et al. Mapping of signaling networks through synthetic genetic interaction analysis by RNAi. Nature Methods. 2011; 8:341-346) and also a depletion score that measures the absolute decrease in a guide pair combination and averaged for all gene pairs tested. Presumed synthetic lethal pairs were identified (FIG. 43c,d). Pi score takes single gene effects into account and looks for synergies. Applicants used a Pi z-score to include more statistical confidence in the data as compared to fold change.

[0631] Validation screening identified vulnerabilities on repressive complexes. Thirty-nine combinatorial hits were selected to generate a new library (8K library). The 8 k library was used for screening in 8 leukemia cell lines (THP-1 (MLL-AF9), Reh (TEL-AML), MV4-11 (MLL-AF4), P31FUJ (MLLT10-PICALM), OCI-AML2 (MLL-AF6), Nomol (MLL-AF9), OCI-AML3, and SKM1) (FIG. 44a). No RNAseq or Avana data were available for the SKM1 cell line. Applicants also analyzed the tumor suppressor mutations in these lines (FIG. 54).

[0632] Applicants analyzed DepMap data (Cancer Dependency Map) with the combinatorial screening data (see, e.g., depmap.org; and Cancer Cell Line Encyclopedia Consortium, and Genomics of Drug Sensitivity in Cancer Consortium. 2015. Pharmacogenomic Agreement between Two Cancer Cell Line Data Sets. Nature 528 (7580):84-87). DepMap data complements the findings in the combinatorial screen. CHD4 and RBBP4 are strongly essential. CHD4 is well known in this context and RBBP4 is found in many complexes. In the combinatorial data Applicants see that TEL- and MLL-rearrangements (TEL-r, MLL-r) display a dependency on combinations of genes in the complex that alone are not essential. MTA1;MTA2 and HDAC1;HDAC2 appear to be targetable. Further, SKM1, a cell line without this rearrangement is susceptible to NuRD targeting, however through an alternate gene pair combination, CHD3;HDAC2. (FIG. 44b-e). Note that Pi score takes single gene effects into account and looks for synergies. Therefore, CHD4 paired with other genes does not score because it is lethal alone. SIN3A complex was targetable mostly through paralogs. Though ING1 is a lowly expressed gene, it is required with its paralog ING2. HDAC1 and HDAC2 appear to be synthetic lethal. Dependencies of these paralogs also seem to coincide with SIN3A dependency (FIG. 44f-i).

[0633] Validation screening also identified other dependent paralogs. ASF1A;ASF1B were the strongest pair in the screens. Typically many histone chaperones and related members are essential, though in this case it appears that ASF1A;ASF1B are quite redundant. It is interesting that in OCI-AML3 ASF1A is depleted and ASF1B is a dependency in the Avana library. Thus, the screening described herein provides for previously unknown therapeutic opportunities (FIG. 45a-c).

[0634] KAT7 complex screening identified that ING proteins may not be expressed highly, but result in strong effects. Furthermore, KAT7, which is the enzymatic member of the complex, is not as essential as either MEAF6 or the ING4;ING5 combination. Vulnerabilities related to MEAF6 have not been previously studied. (FIG. 45d-g).

[0635] Applicants further identified a trend that paralogs are more likely to be essential across cell lines, while gene pairs that appear to be unrelated or part of the same complex score in specific cell lines, or specific circumstances.

### REFERENCES

[0636] 1. Roguev A, et al. Quantitative genetic-interaction mapping in mammalian cells. Nature Methods. 2013; 10:432-437.
[0637] 2. Horn T, et al. Mapping of signaling networks through synthetic genetic interaction analysis by RNAi. Nature Methods. 2011; 8:341-346.
[0638] 3. Tong A H Y, et al. Global mapping of the yeast genetic interaction network. Science. 2004; 303:808-813.
[0639] 4. Costanzo M, et al. A global genetic interaction network maps a wiring diagram of cellular function. Science. 2016; 353:aaf1420-aaf1420.
[0640] 5. Bassik M C, et al. A systematic mammalian genetic interaction map reveals pathways underlying ricin susceptibility. Cell. 2013; 152:909-922.
[0641] 6. Wong A S L, et al. Multiplexed barcoded CRISPR-Cas9 screening enabled by CombiGEM. Proceedings of the National Academy of Sciences. 2016; 113:201517883-6.
[0642] 7. Shen J P, et al. Combinatorial CRISPR-Cas9 screens for de novo mapping of genetic interactions. Nature Methods. 2017; 17:10-9.
[0643] 8. Han K, et al. Synergistic drug combinations for cancer identified in a CRISPR screen for pairwise genetic interactions. Nat Biotechnol. 2017; 6:2781-15.
[0644] 9. terBrake O, et al. Lentiviral vector design for multiple shRNA expression and durable HIV-1 inhibition. Mol Ther. 2008; 16:557-564.
[0645] 10. Vidigal J A, Ventura A. Rapid and efficient one-step generation of paired gRNA CRISPR-Cas9 libraries. Nature Communications. 2015; 6:8083.
[0646] 11. Adamson B, et al. A Multiplexed Single-Cell CRISPR Screening Platform Enables Systematic Dissection of the Unfolded Protein Response. Cell. 2016; 167:1867-1882.e21.
[0647] 12. Zetsche B, et al. Multiplex gene editing by CRISPR-Cpf1 using a single crRNA array. Nat Biotechnol. 2016; 35:31-34.
[0648] 13. McIntyre G J, Arndt A J, Gillespie K M, Mak W M, Fanning G C. A comparison of multiple shRNA expression methods for combinatorial RNAi. Genet Vaccines Ther. 2011; 9:9.
[0649] 14. Stockman V B, et al. A High-Throughput Strategy for Dissecting Mammalian Genetic Interactions. PLoS ONE. 2016; 11:e0167617-13.
[0650] 15. Gilbert L A, et al. Genome-Scale CRISPR-Mediated Control of Gene Repression and Activation. Cell. 2014; 159:647-661.
[0651] 16. Doench J G, et al. Optimized sgRNA design to maximize activity and minimize off-target effects of CRISPR-Cas9. Nat Biotechnol. 2016; 34:184-191.
[0652] 17. Zhu S, et al. Genome-scale deletion screening of human long non-coding RNAs using a paired-guide RNA CRISPR-Cas9 library. Nat Biotechnol. 2016; 34:1279-1286.
[0653] 18. Doench J G, et al. Rational design of highly active sgRNAs for CRISPR-Cas9-mediated gene inactivation. Nat Biotechnol. 2014; 32:1262-1267.
[0654] 19. Ran F A, et al. In vivo genome editing using Staphylococcus aureus Cas9. Nature. 2015; 520:186-191.
[0655] 20. Friedland A E, et al. Characterization of Staphylococcus aureus Cas9: a smaller Cas9 for all-in-one adeno-associated virus delivery and paired nickase applications. Genome Biol. 2015; 16:1-10.
[0656] 21. Hanzlikova H, Gittens W, Krejcikova K, Zeng Z, Caldecott KW. Overlapping roles for PARP1 and PARP2 in the recruitment of endogenous XRCC1 and PNKP into oxidized chromatin. Nucleic Acids Research. 2017; 45:2546-2557.
[0657] 22. Farmer H, et al. Targeting the DNA repair defect in BRCA mutant cells as a therapeutic strategy. Nature. 2005; 434:917-921.
[0658] 23. van Delft M F, et al. The BH3 mimetic ABT-737 targets selective Bcl-2 proteins and efficiently induces apoptosis via Bak/Bax if Mcl-1 is neutralized. Cancer Cell. 2006; 10:389-399.
[0659] 24. Sun C, Bernards R. Feedback and redundancy in receptor tyrosine kinase signaling: relevance to cancer therapies. Trends Biochem Sci. 2014; 39:465-474.
[0660] 25. Buscà R, Pouysségur J, Lenormand P. ERK1 and ERK2 Map Kinases: Specific Roles or Functional Redundancy? Front Cell Dev Biol. 2016; 4:53.
[0661] 26. Uzgare A R, Isaacs J T. Enhanced redundancy in Akt and mitogen-activated protein kinase-induced survival of malignant versus normal prostate epithelial cells. Cancer Research. 2004; 64:6190-6199.
[0662] 27. Srivas R, et al. A Network of Conserved Synthetic Lethal Interactions for Exploration of Precision Cancer Therapy. Mol. Cell. 2016; 63:1-13.
[0663] 28. Hart T, et al. High-Resolution CRISPR Screens Reveal Fitness Genes and Genotype-Specific Cancer Liabilities. Cell. 2015; 163:1515-1526.
[0664] 29. Chaudhuri L, et al. CHK1 and WEE1 inhibition combine synergistically to enhance therapeutic efficacy in acute myeloid leukemia ex vivo. Haematologica. 2014; 99:688-696.
[0665] 30. Souers A J, et al. ABT-199, a potent and selective BCL-2 inhibitor, achieves antitumor activity while sparing platelets. Nat Med. 2013; 19:202-208.
[0666] 31. Oltersdorf T, et al. An inhibitor of Bcl-2 family proteins induces regression of solid tumours. Nature. 2005; 435:677-681.
[0667] 32. Leverson J D, et al. Exploiting selective BCL-2 family inhibitors to dissect cell survival dependencies and define improved strategies for cancer therapy. Sci Transl Med. 2015; 7: 279ra40-279ra40.
[0668] 33. Lessene G, et al. Structure-guided design of a selective BCL-X(L) inhibitor. Nat Chem Biol. 2013; 9:390-397.
[0669] 34. Kotschy A, et al. The MCL1 inhibitor 563845 is tolerable and effective in diverse cancer models. Nature. 2016; 538:477-482.
[0670] 35. Dummler B, et al. Life with a Single Isoform of Akt: Mice Lacking Akt2 and Akt3 Are Viable but Display Impaired Glucose Homeostasis and Growth Deficiencies. Molecular and Cellular Biology. 2006; 26:8042-8051.
[0671] 36. Nitulescu G M, et al. Akt inhibitors in cancer treatment: The long journey from drug discovery to clinical use (Review) Int J Oncol. 2016; 48:869-885.
[0672] 37. Stordal B, et al. BRCA1/2 mutation analysis in 41 ovarian cell lines reveals only one functionally deleterious BRCA1 mutation. Mol Oncol. 2013; 7:567-579.
[0673] 38. Helleday T. The underlying mechanism for the PARP and BRCA synthetic lethality: clearing up the misunderstandings. Mol Oncol. 2011; 5:387-393.
[0674] 39. Rooswinkel R W, et al. Antiapoptotic potency of Bcl-2 proteins primarily relies on their stability, not binding selectivity. Blood. 2014; 123:2806-2815.
[0675] 40. Cowling V, Downward J. Caspase-6 is the direct activator of caspase-8 in the cytochrome c-induced apoptosis pathway: absolute requirement for removal of caspase-6 prodomain. Cell Death Differ. 2002; 9:1046-1056.
[0676] 41. Kroemer G, Galluzzi L, Brenner C. Mitochondrial membrane permeabilization in cell death. Physiol Rev. 2007; 87:99-163.
[0677] 42. Li P, et al. Cytochrome c and dATP-dependent formation of Apaf-1/caspase-9 complex initiates an apoptotic protease cascade. Cell. 1997; 91:479-489.
[0678] 43. Ma S B, et al. Bax targets mitochondria by distinct mechanisms before or during apoptotic cell death: a requirement for VDAC2 or Bak for efficient Bax apoptotic function. Cell Death Differ. 2014; 21:1925-1935.
[0679] 44. Sarosiek K A, et al. BID preferentially activates BAK while BIM preferentially activates BAX, affecting chemotherapy response. Mol. Cell. 2013; 51:751-765.
[0680] 45. Chavez A, et al. Highly efficient Cas9-mediated transcriptional programming. Nature Methods. 2015; 12:326-328.
[0681] 46. Rotem A, et al. Alternative to the soft-agar assay that permits high-throughput drug and genetic screens for cellular transformation. Proceedings of the National Academy of Sciences. 2015; 112:5708-5713.
[0682] 47. Miura Y, et al. Susceptibility to killer T cells of gastric cancer cells enhanced by Mitomycin-C involves induction of ATBF1 and activation of p21 (Waf1/Cip1) promoter. Microbiol Immunol. 2004; 48:137-145.
[0683] 48. Wong C C, et al. Inactivating CUX1 mutations promote tumorigenesis. Nat Genet. 2014; 46:33-38.
[0684] 49. Faraonio R, et al. p53 suppresses the Nrf2-dependent transcription of antioxidant response genes. Journal of Biological Chemistry. 2006; 281:39776-39784.
[0685] 50. Gao Y, et al. Complex transcriptional modulation with orthogonal and inducible dCas9 regulators. Nature Methods. 2016; 13:1043-1049.
[0686] 51. Kleinstiver B P, et al. Broadening the targeting range of Staphylococcus aureus CRISPR-Cas9 by modifying PAM recognition. Nat Biotechnol. 2015; 33:1293-1298.

### METHODS-ONLY REFERENCES

[0687] 52. Lawrence M S, et al. Discovery and saturation analysis of cancer genes across 21 tumour types. Nature. 2014; 505:495-501.
[0688] 53. Forbes S A, et al. COSMIC: somatic cancer genetics at high-resolution. Nucleic Acids Research. 2017; 45:D777-D783.

[0689] The invention is further described by the following numbered paragraphs:

[0690] 1. A method for treating cancer in a subject in need thereof comprising administering to the subject a therapeutically effective amount of a combination therapy comprising one or more agents targeting the expression, activity, substrate or products of WDR77 and BRD4.

[0691] 2. The method of paragraph 1, wherein the cancer is Acute myeloid leukemia (AML) NUT (nuclear protein in testis) midline carcinoma, or multiple myeloma.

[0692] 3. A method for treating inflammation in a subject in need thereof comprising administering to the subject a therapeutically effective amount of a combination therapy comprising one or more agents targeting the expression, activity, substrate or products of WDR77 and BRD4.

[0693] 4. The method of paragraph 3, wherein the inflammation is caused by an autoimmune disease.

[0694] 5. The method of paragraph 3, wherein the inflammation is caused by a pathogen.

[0695] 6. A method for reactivation of HIV in a subject in need thereof comprising administering to the subject a therapeutically effective amount of a combination therapy comprising one or more agents targeting the expression, activity, substrate or products of WDR77 and BRD4.

[0696] 7. The method of any of paragraphs 1 to 6, wherein the one or more agents targeting BRD4 is selected from the group consisting of AZD5153, PFI-1, CPI-203, CPI-0610, RVX-208, OTX015, I-BET151, I-BET762, I-BET-726, dBET1, ARV-771, ARV-825, BETd-260/ZBC260 and MZ1.

[0697] 8. A CD8+ T cell for use in adoptive cell transfer comprising a CD8+ T cell treated with a combination of one or more agents targeting the expression, activity, substrate or products of WDR77 and BRD4.

[0698] 9. The CD8+ T cell of paragraph 8, wherein the CD8+ T cell is a CART cell.

[0699] 10. The CD8+ T cell of paragraph 9 or 10, wherein the one or more agents targeting BRD4 is selected from the group consisting of AZD5153, JQ1, PFI-1, CPI-203, CPI-0610, RVX-208, OTX015, I-BET151, I-BET762, I-BET-726, dBET1, ARV-771, ARV-825, BETd-260/ZBC260 and MZ1.

[0700] 11. A method for treating cancer in a subject in need thereof comprising administering to the subject a therapeutically effective amount of a combination therapy comprising one or more agents targeting the expression, activity, substrate or products of SETD6 and INO80.

[0701] 12. The method of paragraph 11, wherein the cancer comprises an MLL fusion, such as Acute myeloid leukemia (AML).

[0702] 13. A method for treating cancer in a subject in need thereof comprising administering to the subject a therapeutically effective amount of a combination therapy comprising one or more agents targeting the expression, activity, substrate or products of KAT6B and CHD8.

[0703] 14. The method of paragraph 13, wherein the cancer is Acute myeloid leukemia (AML).

[0704] 15. A method for treating cancer in a subject in need thereof comprising administering to the subject a therapeutically effective amount of a combination therapy comprising one or more agents targeting the expression, activity, substrate or products of ATRX and SMARCAL1.

[0705] 16. The method of paragraph 15, wherein the cancer is Acute myeloid leukemia (AML).

[0706] 17. A method for treating cancer in a subject in need thereof comprising administering to the subject a therapeutically effective amount of one or more agents targeting a first gene and one or more agents targeting a second gene, wherein said first and second genes are selected from the group consisting of ASF1B and ASF1A, ARID1B and ARID1A, ING5 and ING4, HDAC2 and HDAC1, WDR77 and HDAC6, WDR77 and KAT6B, KDM3B and ARID1A, KDM3B and CHD3, SETD2 and NSD1, ING2 and ING1, MTA1 and DOT1L, KDM3B and BRD1, KDM4A and KAT6A, INO80 and CBX1, HDAC6 and EZH2, SMARCAL1 and HDAC8, KAT5 and CHAF1B, SUV39H1 and HDAC6, KDM3B and BRD4, KMT2B and BRD8, PRMT5 and KAT5, SIRT4 and CBX1, KAT6A and CHD6, WDR77 and DOT1L, KAT2B and EHMT1, KMT2E and KAT6A, KDM3B and DOT1L, KDM3B and KDM3A, CHD8 and BRD1, HIRA and ATRX, KDM5C and KDM3B, PRDM6 and KDM3B, KAT6B and KAT6A, SMARCB1 and KDM6A, MECP2 and KDM4B, KAT2A and HDAC5, SETD2 and KDM3B, RFWD2 and CHD6, SMARCB1 and ARID3C, SETMAR and BRD1, HDAC2 and DIDO1, HDAC2 and DNMT3B, KDM4D and BRD1, PRDM1 and HDAC8, SMARCA5 and KAT6A, and KMT2D and ARID1A, and

[0707] wherein the one or more agents target the expression, activity, substrate or products of said first and second genes.

[0708] 18. A method for treating cancer in a subject in need thereof comprising administering to the subject a therapeutically effective amount of one or more agents targeting a gene selected from the group consisting of:

[0709] a) SRCAP, WDR77, CHAF1B, TAF5, CSTF1, WDHD1, BRD4, DNMT1, WDR61, GTF3C2, PRMT5, RBBP5, HDAC3, TRIM24, CHD7, HIRA and SMC1A; or

[0710] b) HDAC3, PRMT5, DNMT1 and TAF3; or

[0711] c) BRD4, KMT2A and CHD7; or

[0712] d) SMC2, SMC3, TAF1, WDR92, KDM2B and HUWE1,

[0713] wherein the one or more agents target the expression, activity, substrate or products of said gene.

[0714] 19. The method of paragraph any of paragraphs 1 to 18, wherein the one or more agents comprise a small molecule inhibitor, small molecule degrader, genetic modifying agent, antibody, antibody fragment, antibody-like protein scaffold, aptamer, protein, or any combination thereof.

[0715] 20. The method of paragraph 19, wherein the one or more agents comprise a histone acetylation inhibitor, histone deacetylase (HDAC) inhibitor, histone lysine methylation inhibitor, histone lysine demethylation inhibitor, DNA methyltransferase (DNMT) inhibitor, inhibitor of acetylated histone binding proteins, inhibitor of methylated histone binding proteins, sirtuin inhibitor, protein arginine methyltransferase inhibitor or kinase inhibitor.

[0716] 21. The method of paragraph 20, wherein the DNA methyltransferase (DNMT) inhibitor is selected from the group consisting of azacitidine (5-azacytidine), decitabine (5-aza-2′-deoxycytidine), EGCG (epigallocatechin-3-gallate), zebularine, hydralazine, and procainamide.

[0717] 22. The method of paragraph 20, wherein the histone acetylation inhibitor is C646.

[0718] 23. The method of paragraph 20, wherein the histone deacetylase (HDAC) inhibitor is selected from the group consisting of vorinostat, givinostat, panobinostat, belinostat, entinostat, CG-1521, romidepsin, ITF-A, ITF-B, valproic acid, OSU-HDAC-44, HC-toxin, magnesium valproate, plitidepsin, tasquinimod, sodium butyrate, mocetinostat, carbamazepine, SB939, CHR-2845, CHR-3996, JNJ-26481585, sodium phenylbutyrate, pivanex, abexinostat, resminostat, dacinostat, droxinostat, RGFP966, and trichostatin A (TSA).

[0719] 24. The method of paragraph 20, wherein the histone lysine demethylation inhibitor is selected from the group consisting of pargyline, clorgyline, bizine, GSK2879552, GSK-J4, KDM5-C70, JIB-04, and tranylcypromine.

[0720] 25. The method of paragraph 20, wherein the histone lysine methylation inhibitor is selected from the group consisting of EPZ004777, EPZ-6438, GSK126, CPI-360, CPI-1205, CPI-0209, DZNep, GSK343, EI1, BIX-01294, UNC0638, GSK343, UNC1999 and UNC0224.

[0721] 26. The method of paragraph 20, wherein the inhibitor of acetylated histone binding proteins is selected from the group consisting of AZD5153, PFI-1, CPI-203, CPI-0610, RVX-208, OTX015, I-BET151, I-BET762, I-BET-726, dBET1, ARV-771, ARV-825, BETd-260/ZBC260 and MZ1.

[0722] 27. The method of paragraph 20, wherein the inhibitor of methylated histone binding proteins is selected from the group consisting of UNC669 and UNC1215.

[0723] 28. The method of paragraph 20, wherein the sirtuin inhibitor comprises nicotinamide.

[0724] 29. The method of paragraph 19, wherein the genetic modifying agent comprises a CRISPR system, shRNA, a zinc finger nuclease system, a TALEN, or a meganuclease.

[0725] 30. The method of paragraph 29, wherein the CRISPR system comprises a Cas13 system.

[0726] 31. The method of paragraph 30, wherein the Cas13 system comprises Cas13-ADAR.

[0727] 32. The method of paragraph 19, wherein the one or more agents target an active site.

[0728] 33. The method of paragraph 17 or 18, wherein the cancer is Acute lymphoblastic leukemia (ALL) or Acute myeloid leukemia (AML).

[0729] 34. The method of any of paragraphs 1 to 33, wherein the agents are administered concurrently or sequentially.

[0730] 35. The method of any of paragraphs 1 to 34, wherein an additional cancer therapy is administered.

[0731] 36. A DNA construct comprising a sequence encoding two CRISPR guide sequences positioned in an inverted orientation to each other and flanked by convergent regulatory sequences, wherein each guide sequence is operably linked to the regulatory sequence flanking the guide sequence, wherein each guide sequences is specific for an orthogonal CRISPR enzyme, and wherein the regulatory sequences do not have 100% sequence identity to one another.

[0732] 37. The DNA construct according to paragraph 36, wherein each regulatory sequence is a RNA polymerase III (RNAP III) promoter.

[0733] 38. The DNA construct according to paragraph 37, wherein one RNAP III promoter comprises the U6 promoter and one RNAP III promoter comprises the H1 promoter.

[0734] 39. The DNA construct according to any of paragraphs 36 to 38, wherein the orthogonal CRISPR enzymes comprise S. aureus Cas9 and S. pyogenes Cas9.

[0735] 40. The DNA construct according to any of paragraphs 36 to 39, further comprising a sequence encoding a CRISPR enzyme operably linked to a separate regulatory sequence.

[0736] 41. The DNA construct according to paragraph 40, wherein the CRISPR enzyme is S. aureus Cas9.

[0737] 42. The DNA construct according to any of paragraphs 36 to 41, further comprising a sequence encoding at least one selectable marker.

[0738] 43. The DNA construct according to paragraph 42, wherein the at least one selectable marker is an antibiotic resistance gene.

[0739] 44. The DNA construct according to paragraph 42, wherein the at least one selectable marker is a fluorescent gene.

[0740] 45. The DNA construct according to any of paragraphs 36 to 44, wherein each guide sequence further comprises a barcode sequence.

[0741] 46. The DNA construct according to any of paragraphs 36 to 45, wherein one or more of the regulatory sequences are inducible.

[0742] 47. The DNA construct according to any of paragraphs 36 to 46, wherein one or both of the guide sequences comprise an aptamer sequence.

[0743] 48. The DNA construct according to paragraph 47, wherein the aptamer sequence comprises an MS2 aptamer.

[0744] 49. The DNA construct according to any of paragraphs 36 to 48, further comprising primer binding sequences flanking the guide sequences.

[0745] 50. A vector comprising a DNA construct according to any of paragraphs 36 to 49.

[0746] 51. The vector according to paragraph 50, wherein the vector is a viral vector.

[0747] 52. The vector according to paragraph 51, wherein the viral vector is a lentivirus, adeno associated virus (AAV) or adenovirus vector.

[0748] 53. A library for the combinatorial screening of phenotypic interactions between a set of target sequences comprising a plurality of vectors according to any of paragraphs 50 to 52, wherein the library comprises vectors comprising all possible pairwise combinations of guide sequences specific for the set of target sequences.

[0749] 54. The library according to paragraph 53, wherein the set of target sequences comprises sequences targeting expression of at least two protein coding genes.

[0750] 55. The library according to paragraph 54, wherein at least one protein coding gene is selected from the group consisting of:

[0751] a) genes in Table 1; or

[0752] b) DNMT1, KDM5A, KDM5B, KDM5C, KDM5D, SETDB1, SETDB2, BAZ2A, BAZ2B, ASH1L, KMT2A, KMT2B, SUV39H1, SUV39H2, JARID2, KAT2A, KAT2B, CHD3, CHD4, CHD5, CHAF1A, ZMYND8, BRPF1, BRPF3, BRD1, MBD2, MBD3, MBD1, HDAC4, HDAC5, HDAC9, BRWD1, BRWD3, KDM2A, PHIP, PBRM1, CXXC1, SETMAR, EHMT1, EHMT2, ATAD2, ATAD2B, KMT2C, KMT2D, KMT2E, MGMT, WBSCR22, CARM1, KDM4A, KDM4B, KDM4C, KDM4D, KDM4E, ARID4A, ARID4B, PHF2, PHF8, SP140L, BPTF, BAZ1A, BAZ1B, KDM7A, TRIM24, TRIM33, TRIM66, KAT5, KAT6A, KAT6B, KATE, CHD1, CHD2, CHD6, CHD7, CHD8, CHD9, SMARCA2, SMARCA4, SMARCA1, SMARCA5, EPC1, EPC2, KDM1A, KDM1B, DNMT3A, DNMT3B, WHSC1, WHSC1L1, NSD1, ZMYND11, SHPRH, MBD4, MBD3L1, MBD3L2, MECP2, ASF1A, ASF1B, ELP3, ING1, ING2, ING3, ING4, ING5, SLBP, SAP30L, SAP30, HAT1, HDAC1, HDAC10, HDAC11, HDAC2, HDAC3, HDAC6, HDAC7, HDAC8, DOT1L, MEAF6, FBXW9, FBXL19, TAF5L, TAF5, WDHD1, WDR48, WDR5, WDR61, WDR77, WDR82, WDR92, CHAF1B, CSTF1, CORO2A, DDB2, ELP2, EED, GTF3C2, HIRA, KDM2B, MTA2, MTA3, MTA1, RBBP4, RBBP5, RBBP7, RFWD2, TET1, TET3, CBX1, CBX2, CBX3, CBX4, CBX5, CBX6, CBX7, CBX8, CDYL2, CDYL, CDY1, CDY1B, CDY2A, CDY2B, SIRT1, SIRT2, SIRT3, SIRT4, SIRT5, SIRT6, SIRT7, SMC1A, SMC1B, SMC2, SMC3, SMC4, PRDM1, PRDM11, PRDM14, PRDM16, PRDM2, PRDM6, PRDM9, SMYD1, SMYD2, SMYD3, SMYD4, SETD1A, SETD1B, SETD2, SETD3, SETD4, SETD5, SETD6, SETD9, SETD7, SMYD5, EZH1, EZH2, ARID1A, ARID1B, ARID2, ARID3A, ARID3B, ARID3C, ARID5A, ARID5B, CREBBP, EP300, SP100, SP140, TAF1L, TAF1, BRD2, BRD3, BRD4, BRD7, BRD8, BRD9, BRDT, CECR2, HR, JMJD1C, JMJD4, JMJD6, KDM3A, KDM3B, KDM6A, KDM6B, UTY, PHRF1, PHF1, PHF10, PHF12, PHF13, PHF14, PHF19, PHF21A, PHF21B, PHF23, PHF3, TAF3, AIRE, DIDO1, DPF1, DPF2, DPF3, INTS12, KAT7, MSL3, MTF2, METTL13, MORF4L1, PRMT1, PRMT2, PRMT5, PYGO1, PYGO2, RSF1, TRIM28, UHRF1, UHRF2, EP400, INO80, RAD54L, RAD54L2, SET, SMARCAL1, SMARCB1, SMARCAD1, SRCAP, TBP, TSPYL2, ATRX, CHD1L, IL4I1, JADE1, JADE2 and JADE3; or

[0753] c) DOT1L, EZH2, EHMT1, EHMT2, SETD7, SMYD2, DNMT1, PRMT1, PRMT3, PRMT5, PRMT4, PRMT6, PRMT8, KDM1A, KDM6A, KDM6B, HDAC1, HDAC2, HDAC3, HDAC6, HDAC8, SIRT1, SIRT2, SIRT6, BAZ2A, BAZ2B, BRD4, BRD9/7, EP300, CECR2, SMARCA4, P300, CDK7, EED, SMYD3, BRPF1, KDM4A, KDM4B, KDM4C, KDM4D, KDM4E, KDM5A, KDM5B, KDM5C and KDM5D (Genes with inhibitors).

[0754] 56. The library according to paragraph 54, wherein at least one protein coding gene comprises a protein domain selected from the group consisting of PF00439:Bromodomain, PF00145:C-5 cytosine-specific DNA methylase, PF02373:JmjC domain, hydroxylase, PF00385:Chromo (CHRromatin Organisation MOdifier) domain, PF00850:Histone deacetylase domain, PF01388:ARID/BRIGHT DNA binding domain, PF02375:jmjN domain, PF00856:SET domain, PF13508:Acetyltransferase (GNAT) domain, PF06466:PCAF (P300/CBP-associated factor)N-terminal domain, PF01853:MOZ/SAS family, PF11717:RNA binding activity-knot of a chromodomain, PF08241:Methyltransferase domain, PF13847:Methyltransferase domain, PF05185:PRMT5 arginine-N-methyltransferase, PF12047:Cytosine specific DNA methyltransferase replication foci domain, PF11531:Coactivator-associated arginine methyltransferase 1 N terminal, PF12589:Methyltransferase involved in Williams-Beuren syndrome, PF01035:6-O-methylguanine DNA methyltransferase, DNA binding domain, PF02870:6-O-methylguanine DNA methyltransferase, ribonuclease-like domain, PF00628:PHD-finger, PF05033:Pre-SET motif, PF00004:ATPase family associated with various cellular activities (AAA), PF02463:RecF/RecN/SMC N terminal domain, PF02146:Sir2 family, PF01426:BAH domain, PF02008:CXXC zinc finger domain, PF06464:DMAP1-binding Domain, PF00400:WD domain, G-beta repeat, PF08123:Histone methylation protein DOT1, PF09340:Histone acetyltransferase subunit NuA4, PF10394:Histone acetyl transferase HAT1 N-terminus, PF13867:Sin3 binding region of histone deacetylase complex subunit SAP30, PF12203:Glutamine rich N terminal domain of histone deacetylase 4, PF04729:ASF1 like histone chaperone, PF12998:Inhibitor of growth proteins N-terminal histone-binding, PF15247:Histone RNA hairpin-binding protein RNA-binding domain, PF00583:Acetyltransferase (GNAT) family, PF01429:Methyl-CpG binding domain, PF14048:C-terminal domain of methyl-CpG binding protein 2 and 3, PF00956:Nucleosome assembly protein (NAP), PF01593:Flavin containing amine oxidoreductase, PF06752:Enhancer of Polycomb C-terminus, PF10513:Enhancer of polycomb-like, PF12253:Chromatin assembly factor 1 subunit A, PF15539:CAF1 complex subunit p150, region binding to CAF1-p60 at C-term, PF15557:CAF1 complex subunit p150, region

[0755] 57. The library according to paragraph 54, wherein each pairwise combination of guide sequences comprises a guide sequence selected from SEQ ID NOS: 1-552 (300K_oligos_All H1 Sa) and a guide sequence selected from SEQ ID NOS: 553-1104 (300K_oligos_All U6 Sp).

[0756] 58. The library according to paragraph 54, wherein each pairwise combination of guide sequences comprises a guide sequence selected from the group consisting of SEQ ID NOS: 1105-23903 (Bernstein_pfam_saureus_guides_20160722_flagged_v2) and a guide sequence selected from the group consisting of SEQ ID NOS: 23904-45515 (Bernstein_pfam_spyo_guides_20160722_flagged).

[0757] 59. A method of combinatorial screening of phenotypic interactions between a set of target sequences in a population of cells comprising:

[0758] a) introducing a library according to any of paragraphs 53 to 58 to a population of cells, wherein two orthogonal CRISPR enzymes are expressed in said cells;

[0759] b) selecting for cells comprising a vector of the library;

[0760] c) selecting for cells having a desired phenotype; and

[0761] d) determining in the cells having the desired phenotype the enrichment or depletion of combinations of guide sequences as compared to the representation in the library introduced.

[0762] 60. The method according to paragraph 59, wherein the phenotypic interaction is lethality, wherein combinations of guide sequences depleted in viable cells indicate lethal combinations.

[0763] 61. The method according to paragraph 59, further comprising treating the population of cells with a drug, wherein the phenotypic interaction is sensitivity or resistance to the drug.

[0764] 62. The method according to paragraph 59, wherein the phenotypic interaction is differentiation, wherein combinations of guide sequences are detected in cells expressing a differentiation marker.

[0765] 63. The method according to paragraph 59, wherein the phenotypic interaction is modulation of a cell state, wherein combinations of guide sequences are detected in cells expressing a marker of the cell state.

[0766] 64. The method according to any of paragraphs 59 to 63, wherein selecting for cells comprising a vector of the library comprises treating the population of cells with an antibiotic.

[0767] 65. The method according to any of paragraphs 59 to 64, wherein the population of cells is a population of cancer cells.

[0768] 66. The method according to any of paragraphs 59 to 64, wherein the population of cells is a population of stem cells.

[0769] 67. The method according to any of paragraphs 59 to 64, wherein the population of cells is a population of immune cells.

[0770] 68. The method according to paragraph 67, wherein the method comprises screening for combinations of targets capable of altering the cell state in the immune cells.

[0771] 69. The method according to paragraph 68, wherein the cell state is an effector or suppressive cell state.

[0772] 70. The method according to paragraph 68, wherein the combinations of targets identified are used to treat autoimmunity.

[0773] 71. The method according to paragraph 68, wherein the combinations of targets are used to treat cancer.

[0774] 72. The method according to paragraph 68, wherein the combinations of targets are used to modulate cells for adoptive cell transfer (ACT).

[0775] 73. The method according to paragraph 60, further comprising prioritizing candidate drug targets comprising determining epistatic genes, pseudo-essential genes, essential genes, pseudo-synthetic lethal genes and synthetic lethal genes, wherein candidate drug targets comprise synthetic lethal gene pairs.

[0776] 74. The method according to paragraph 73, wherein determining epistatic genes, pseudo-essential genes, essential genes, pseudo-synthetic lethal genes and synthetic lethal genes comprises applying an algorithm to the pair wise combinations identified.

[0777] 75. A method for generating a library for the combinatorial screening of phenotypic interactions between a set of target sequences comprising:

[0778] a) synthesizing a first set of oligonucleotides, each oligonucleotide comprising a guide sequence specific for a target sequence in the set of target sequences and specific for a first orthogonal CRISPR enzyme, wherein the oligonucleotides comprise a first non-palindromic hybridization sequence at the 3′ end and a site for cloning into a vector at the 5′end;

[0779] b) synthesizing a second set oligonucleotides, each oligonucleotide comprising a guide sequence specific for a target sequence in the set of target sequences and specific for a second orthogonal CRISPR enzyme, wherein the oligonucleotides comprise a second hybridization sequence at the 3′ end of the sequence that is complementary to the first hybridization sequence and a site for cloning into a vector at the 5′end;

[0780] c) hybridizing the first and second set of oligonucleotides;

[0781] d) performing DNA extension using the hybridization region as priming sequences to generate a pool of dsDNA oligonucleotides comprising pairs of inverted guide sequences specific for orthogonal CRISPR enzymes, wherein all pairwise combinations of guide sequences from the first and second set of oligonucleotides is represented in the pool;

[0782] e) joining the oligonucleotides from the pool of dsDNA oligonucleotides into a vector comprising two convergent regulatory sequences flanking a cloning site, wherein the two convergent regulatory sequences do not have 100% sequence identity to one another, and wherein the oligonucleotides are joined between the convergent regulatory sequences.

[0783] 76. The method according to paragraph 75, wherein the ends of the oligonucleotides comprise restriction enzyme sites and the vector comprises compatible restriction enzyme site(s) between the convergent regulatory sequences, whereby joining is by ligation of compatible restriction enzyme digested ends on the oligonucleotides and the vector.

[0784] 77. The method according to paragraph 75, wherein the ends of the oligonucleotides comprise homologous sequences configured for recombination and the vector comprises compatible homologous sequences between the convergent regulatory sequences, whereby joining is by recombination of the oligonucleotides into the vector.

[0785] 78. The method according to any of paragraphs 75 to 77, wherein the convergent regulatory sequences are RNA polymerase III (RNAP III) promoters.

[0786] 79. The method according to paragraph 78, wherein one RNAP III promoter comprises the U6 promoter and one RNAP III promoter comprises the H1 promoter.

[0787] 80. The method according to any of paragraphs 75 to 79, wherein the orthogonal CRISPR enzymes comprise S. aureus Cas9 and S. pyogenes Cas9.

[0788] 81. The method according to any of paragraphs 75 to 80, wherein the vector further comprises a sequence encoding a CRISPR enzyme operably linked to a regulatory sequence.

[0789] 82. The method according to paragraph 81, wherein the CRISPR enzyme is S. aureus Cas9.

[0790] 83. A method for treating cancer comprising a mutation in the MAPK pathway in a subject in need thereof, said method comprising administering to the subject a pharmaceutical composition capable of inhibiting the expression or activity of MAPK1 and MAPK3.

[0791] 84. A method for treating cancer comprising a mutation in the MAPK pathway in a subject in need thereof, said method comprising administering to the subject a pharmaceutical composition capable of inhibiting the expression or activity of ERK1 and ERK2.

[0792] 85. The method according to paragraph 83 or 84, wherein the mutation in the MAPK pathway comprises BRAF V600E, KRAS G12S or NRAS Q61L.

[0793] 86. A method for treating cancer comprising a mutation in PIK3CA in a subject in need thereof, said method comprising administering to the subject a pharmaceutical composition capable of inhibiting the expression or activity of AKT1 and AKT2.

[0794] 87. A kit comprising vectors according to any of paragraphs 50 to 52 or a library according to any of paragraphs 53 to 58 and instructions for use.

[0795] 88. A system for generating a library for combinatorial screening, comprising a vector comprising convergent RNA polymerase III (RNAP III) promoters flanking a cloning site configured for accepting an oligonucleotide comprising inverted CRISPR guide sequences, optionally, a restriction enzyme and buffers specific to the cloning site.

[0796] 89. A combination of one or more agents targeting a first gene and one or more agents targeting a second gene for use as a medicament, wherein said first and second genes are selected from the group consisting of WDR77 and BRD4, SETD6 and INO80, SMARCAL1 and ATRX, KAT6B and CHD8, ASF1B and ASF1A, ARID1B and ARID1A, ING5 and ING4, HDAC2 and HDAC1, WDR77 and HDAC6, WDR77 and KAT6B, KDM3B and ARID1A, KDM3B and CHD3, SETD2 and NSD1, ING2 and ING1, MTA1 and DOT1L, KDM3B and BRD1, KDM4A and KAT6A, INO80 and CBX1, HDAC6 and EZH2, SMARCAL1 and HDAC8, KAT5 and CHAF1B, SUV39H1 and HDAC6, KDM3B and BRD4, KMT2B and BRD8, PRMT5 and KAT5, SIRT4 and CBX1, KAT6A and CHD6, WDR77 and DOT1L, KAT2B and EHMT1, KMT2E and KAT6A, KDM3B and DOT1L, KDM3B and KDM3A, CHD8 and BRD1, HIRA and ATRX, KDM5C and KDM3B, PRDM6 and KDM3B, KAT6B and KAT6A, SMARCB1 and KDM6A, MECP2 and KDM4B, KAT2A and HDAC5, SETD2 and KDM3B, RFWD2 and CHD6, SMARCB1 and ARID3C, SETMAR and BRD1, HDAC2 and DIDO1, HDAC2 and DNMT3B, KDM4D and BRD1, PRDM1 and HDAC8, SMARCA5 and KAT6A, and KMT2D and ARID1A.

[0797] Various modifications and variations of the described methods, pharmaceutical compositions, and kits of the invention will be apparent to those skilled in the art without departing from the scope and spirit of the invention. Although the invention has been described in connection with specific embodiments, it will be understood that it is capable of further modifications and that the invention as claimed should not be unduly limited to such specific embodiments. Indeed, various modifications of the described modes for carrying out the invention that are obvious to those skilled in the art are intended to be within the scope of the invention. This application is intended to cover any variations, uses, or adaptations of the invention following, in general, the principles of the invention and including such departures from the present disclosure come within known customary practice within the art to which the invention pertains and may be applied to the essential features herein before set forth.

The application's sequence listing, which the Patent Office published only in electronic form, follows.

SEQUENCE LISTING (45548 sequences)

SEQ ID NO: 1 - DNA, 21 bp, Artificial Sequence
  Synthetic
ggcccaggccgcaccttcagc

SEQ ID NO: 2 - DNA, 21 bp, Artificial Sequence
  Synthetic
tcttctccgggaagctgtacc

SEQ ID NO: 3 - DNA, 21 bp, Artificial Sequence
  Synthetic
cgcctccctgccttaccgtcc

SEQ ID NO: 4 - DNA, 21 bp, Artificial Sequence
  Synthetic
tggccgccggcatctggggct

SEQ ID NO: 5 - DNA, 21 bp, Artificial Sequence
  Synthetic
tcttcaccacagccttggcgt

SEQ ID NO: 6 - DNA, 21 bp, Artificial Sequence
  Synthetic
cctcatcgctgtgggcgctgt

SEQ ID NO: 7 - DNA, 21 bp, Artificial Sequence
  Synthetic
gcagttctatgaccaggccct

SEQ ID NO: 8 - DNA, 21 bp, Artificial Sequence
  Synthetic
tggtctgcgggtcatggcgga

SEQ ID NO: 9 - DNA, 21 bp, Artificial Sequence
  Synthetic
cctgcctgtcccctccgctcc

SEQ ID NO: 10 - DNA, 21 bp, Artificial Sequence
  Synthetic
tccgctccgggagatccccag

SEQ ID NO: 11 - DNA, 21 bp, Artificial Sequence
  Synthetic
gagattggtggattgactcag

SEQ ID NO: 12 - DNA, 21 bp, Artificial Sequence
  Synthetic
atgtgtctgtgaaggagattg

SEQ ID NO: 13 - DNA, 21 bp, Artificial Sequence
  Synthetic
gaatgagccagagagaaagct

SEQ ID NO: 14 - DNA, 21 bp, Artificial Sequence
  Synthetic
ccgatctctttgacgcagacg

SEQ ID NO: 15 - DNA, 21 bp, Artificial Sequence
  Synthetic
tgcggcagttccaccacagca

SEQ ID NO: 16 - DNA, 21 bp, Artificial Sequence
  Synthetic
atcagtggggagaaattgttg

SEQ ID NO: 17 - DNA, 21 bp, Artificial Sequence
  Synthetic
agccttcaccctgcggaccca

SEQ ID NO: 18 - DNA, 21 bp, Artificial Sequence
  Synthetic
atgaagctgaacaagtcatcc

SEQ ID NO: 19 - DNA, 21 bp, Artificial Sequence
  Synthetic
tcgtctttatgcagaagaggg

SEQ ID NO: 20 - DNA, 21 bp, Artificial Sequence
  Synthetic
cgccttcaccctcaggacgca

SEQ ID NO: 21 - DNA, 21 bp, Artificial Sequence
  Synthetic
ttagcttcatgcaaaagaggg

SEQ ID NO: 22 - DNA, 21 bp, Artificial Sequence
  Synthetic
ctgtttagcttcatgcaaaag

SEQ ID NO: 23 - DNA, 21 bp, Artificial Sequence
  Synthetic
ccctgatgataaaccagtctg

SEQ ID NO: 24 - DNA, 21 bp, Artificial Sequence
  Synthetic
ggaagcagctgaattcaaaat

SEQ ID NO: 25 - DNA, 21 bp, Artificial Sequence
  Synthetic
gaaacaagtctaccaagatct

SEQ ID NO: 26 - DNA, 21 bp, Artificial Sequence
  Synthetic
tacttggtgcattactgcgga

SEQ ID NO: 27 - DNA, 21 bp, Artificial Sequence
  Synthetic
gtgccccatctcggcttcaag

SEQ ID NO: 28 - DNA, 21 bp, Artificial Sequence
  Synthetic
ggagcgacacacgcccatcga

SEQ ID NO: 29 - DNA, 21 bp, Artificial Sequence
  Synthetic
agaaaggaaaacgccgataga

SEQ ID NO: 30 - DNA, 21 bp, Artificial Sequence
  Synthetic
ttcaagctgctcaaaaactgg

SEQ ID NO: 31 - DNA, 21 bp, Artificial Sequence
  Synthetic
cgttccagttcgagatcacct

SEQ ID NO: 32 - DNA, 21 bp, Artificial Sequence
  Synthetic
cgaaggtgatctcgaactgga

SEQ ID NO: 33 - DNA, 21 bp, Artificial Sequence
  Synthetic
gagtgggctactacgtcaaca

SEQ ID NO: 34 - DNA, 21 bp, Artificial Sequence
  Synthetic
ctggcacagggcccaccagca

SEQ ID NO: 35 - DNA, 21 bp, Artificial Sequence
  Synthetic
tgagtgcagtcaaggggataa

SEQ ID NO: 36 - DNA, 21 bp, Artificial Sequence
  Synthetic
gcttgctattgacaagcgatt

SEQ ID NO: 37 - DNA, 21 bp, Artificial Sequence
  Synthetic
gtctcctgagtgcaggatcta

SEQ ID NO: 38 - DNA, 21 bp, Artificial Sequence
  Synthetic
tttaacatcttcagcaaaccg

SEQ ID NO: 39 - DNA, 21 bp, Artificial Sequence
  Synthetic
gtctagctgcaaacaccaagg

SEQ ID NO: 40 - DNA, 21 bp, Artificial Sequence
  Synthetic
cttgctcaaggaaggaatgtg

SEQ ID NO: 41 - DNA, 21 bp, Artificial Sequence
  Synthetic
tagctgagtttattgatgaca

SEQ ID NO: 42 - DNA, 21 bp, Artificial Sequence
  Synthetic
gttctttgtgatggctgtgat

SEQ ID NO: 43 - DNA, 21 bp, Artificial Sequence
  Synthetic
ccgcttcagctggcccttcag

SEQ ID NO: 44 - DNA, 21 bp, Artificial Sequence
  Synthetic
ccctctatgaagtaccagatg

SEQ ID NO: 45 - DNA, 21 bp, Artificial Sequence
  Synthetic
ctgtgaacccacgtttggtga

SEQ ID NO: 46 - DNA, 21 bp, Artificial Sequence
  Synthetic
aagttcgtcttcccctccaac

SEQ ID NO: 47 - DNA, 21 bp, Artificial Sequence
  Synthetic
tagaaaaggccatgcatcctc

SEQ ID NO: 48 - DNA, 21 bp, Artificial Sequence
  Synthetic
agcttcagtgcaaaaataaga

SEQ ID NO: 49 - DNA, 21 bp, Artificial Sequence
  Synthetic
cttctgcacactggtaaaatg

SEQ ID NO: 50 - DNA, 21 bp, Artificial Sequence
  Synthetic
ctcttgaggaggtgccagagg

SEQ ID NO: 51 - DNA, 21 bp, Artificial Sequence
  Synthetic
ttgacaacgtcatagtagtta

SEQ ID NO: 52 - DNA, 21 bp, Artificial Sequence
  Synthetic
tcacgaagttgtgacaatggc

SEQ ID NO: 53 - DNA, 21 bp, Artificial Sequence
  Synthetic
aacttggaggcttaccgctac

SEQ ID NO: 54 - DNA, 21 bp, Artificial Sequence
  Synthetic
acctaatggaccgactggaga

SEQ ID NO: 55 - DNA, 21 bp, Artificial Sequence
  Synthetic
cccacctgtaccgcaccttgg

SEQ ID NO: 56 - DNA, 21 bp, Artificial Sequence
  Synthetic
ggacatggtgaatgaaaaacg

SEQ ID NO: 57 - DNA, 21 bp, Artificial Sequence
  Synthetic
atgatgatgtccacctgctcg

SEQ ID NO: 58 - DNA, 21 bp, Artificial Sequence
  Synthetic
ggctgtagagggcgatgcccg

SEQ ID NO: 59 - DNA, 21 bp, Artificial Sequence
  Synthetic
tcctaaagtggaagggattct

SEQ ID NO: 60 - DNA, 21 bp, Artificial Sequence
  Synthetic
tgtgtcagtgaaacttactct

SEQ ID NO: 61 - DNA, 21 bp, Artificial Sequence
  Synthetic
gtggcgcggctggtcctccaa

SEQ ID NO: 62 - DNA, 21 bp, Artificial Sequence
  Synthetic
tctggaaggccaggagcagcc

SEQ ID NO: 63 - DNA, 21 bp, Artificial Sequence
  Synthetic
tcctgaagtggaagggattta

SEQ ID NO: 64 - DNA, 21 bp, Artificial Sequence
  Synthetic
agtggaagggatttacagagt

SEQ ID NO: 65 - DNA, 21 bp, Artificial Sequence
  Synthetic
tctggaaggcgatcagcagcc

SEQ ID NO: 66 - DNA, 21 bp, Artificial Sequence
  Synthetic
ggtggagagcatcgagaagaa

SEQ ID NO: 67 - DNA, 21 bp, Artificial Sequence
  Synthetic
ggttcccaagtattgtgctcc

SEQ ID NO: 68 - DNA, 21 bp, Artificial Sequence
  Synthetic
ggcgcgtggttaagggacaag

SEQ ID NO: 69 - DNA, 21 bp, Artificial Sequence
  Synthetic
gttcgaaggctgcaatgagcc

SEQ ID NO: 70 - DNA, 21 bp, Artificial Sequence
  Synthetic
cattgcagccttcgaacaaaa

SEQ ID NO: 71 - DNA, 21 bp, Artificial Sequence
  Synthetic
cctcgtaggccatgacgaggc

SEQ ID NO: 72 - DNA, 21 bp, Artificial Sequence
  Synthetic
tcgagtatctggtgaagtgga

SEQ ID NO: 73 - DNA, 21 bp, Artificial Sequence
  Synthetic
ggctgcgagcaagcgagcatc

SEQ ID NO: 74 - DNA, 21 bp, Artificial Sequence
  Synthetic
tggaatacctcgtgaaatgga

SEQ ID NO: 75 - DNA, 21 bp, Artificial Sequence
  Synthetic
aacagcacctcgtgaactgtg

SEQ ID NO: 76 - DNA, 21 bp, Artificial Sequence
  Synthetic
ttcggtggaaaggctatgaca

SEQ ID NO: 77 - DNA, 21 bp, Artificial Sequence
  Synthetic
ggaagaacaagaaaggaaaat

SEQ ID NO: 78 - DNA, 21 bp, Artificial Sequence
  Synthetic
agcaccacctcttgcactgtg

SEQ ID NO: 79 - DNA, 21 bp, Artificial Sequence
  Synthetic
atttccagcatggagaagaaa

SEQ ID NO: 80 - DNA, 21 bp, Artificial Sequence
  Synthetic
ccacaggttccaagaagggcc

SEQ ID NO: 81 - DNA, 21 bp, Artificial Sequence
  Synthetic
acgggagcaaggtcatcatcc

SEQ ID NO: 82 - DNA, 21 bp, Artificial Sequence
  Synthetic
agctccgtggcgaacattcct

SEQ ID NO: 83 - DNA, 21 bp, Artificial Sequence
  Synthetic
caccctcagtgacatttcatg

SEQ ID NO: 84 - DNA, 21 bp, Artificial Sequence
  Synthetic
tgccggcgtggacaccaatgt

SEQ ID NO: 85 - DNA, 21 bp, Artificial Sequence
  Synthetic
agtgctggctatgactacaag

SEQ ID NO: 86 - DNA, 21 bp, Artificial Sequence
  Synthetic
aggcgatctcaaaatcatcaa

SEQ ID NO: 87 - DNA, 21 bp, Artificial Sequence
  Synthetic
aagcactgtatcgacaggacc

SEQ ID NO: 88 - DNA, 21 bp, Artificial Sequence
  Synthetic
gctctataatcgcaagacatc

SEQ ID NO: 89 - DNA, 21 bp, Artificial Sequence
  Synthetic
tcatgaacccggggttggtgg

SEQ ID NO: 90 - DNA, 21 bp, Artificial Sequence
  Synthetic
tagtgcactcccccaccaacc

SEQ ID NO: 91 - DNA, 21 bp, Artificial Sequence
  Synthetic
agaagatggccaaggccatcc

SEQ ID NO: 92 - DNA, 21 bp, Artificial Sequence
  Synthetic
aacggtcagcccgcatgtgtg

SEQ ID NO: 93 - DNA, 21 bp, Artificial Sequence
  Synthetic
cacggaccagaagagcgagat

SEQ ID NO: 94 - DNA, 21 bp, Artificial Sequence
  Synthetic
tggaacccacagccacggtgc

SEQ ID NO: 95 - DNA, 21 bp, Artificial Sequence
  Synthetic
ccgccagcctcacaacaacag

SEQ ID NO: 96 - DNA, 21 bp, Artificial Sequence
  Synthetic
tgatttgctgtgaccgctgtg

SEQ ID NO: 97 - DNA, 21 bp, Artificial Sequence
  Synthetic
aaaaagcatgcagaatacaca

SEQ ID NO: 98 - DNA, 21 bp, Artificial Sequence
  Synthetic
tttccttccagaccatggacc

SEQ ID NO: 99 - DNA, 21 bp, Artificial Sequence
  Synthetic
tgcggaacctccgagaacgac

SEQ ID NO: 100 - DNA, 21 bp, Artificial Sequence
  Synthetic
cggggttaccacatgtactgc

SEQ ID NO: 101 - DNA, 21 bp, Artificial Sequence
  Synthetic
tgcaatatctgcggcacctcc

SEQ ID NO: 102 - DNA, 21 bp, Artificial Sequence
  Synthetic
tagccacgatcgcagtcatca

SEQ ID NO: 103 - DNA, 21 bp, Artificial Sequence
  Synthetic
cctcggtcacagtcatcgcag

SEQ ID NO: 104 - DNA, 21 bp, Artificial Sequence
  Synthetic
tgtgggacctcagagaatgat

SEQ ID NO: 105 - DNA, 21 bp, Artificial Sequence
  Synthetic
atttggaggcgtagaagggca

SEQ ID NO: 106 - DNA, 21 bp, Artificial Sequence
  Synthetic
caatgagctgaaattccatcc

SEQ ID NO: 107 - DNA, 21 bp, Artificial Sequence
  Synthetic
gacagcaagtatttcttcact

SEQ ID NO: 108 - DNA, 21 bp, Artificial Sequence
  Synthetic
gtgtcctgaaatgacaatctc

SEQ ID NO: 109 - DNA, 21 bp, Artificial Sequence
  Synthetic
aaagaatagctagagaagaac

SEQ ID NO: 110 - DNA, 21 bp, Artificial Sequence
  Synthetic
gaagaaactttccgtttcgaa

SEQ ID NO: 111 - DNA, 21 bp, Artificial Sequence
  Synthetic
gttatataaccggaaaacatc

SEQ ID NO: 112 - DNA, 21 bp, Artificial Sequence
  Synthetic
ttacagggattcctaaaagct

SEQ ID NO: 113 - DNA, 21 bp, Artificial Sequence
  Synthetic
ccaggaaggtattgtgcagcg

SEQ ID NO: 114 - DNA, 21 bp, Artificial Sequence
  Synthetic
ggacgttatcctgcaacctgg

SEQ ID NO: 115 - DNA, 21 bp, Artificial Sequence
  Synthetic
ctctgtagattcagttccaag

SEQ ID NO: 116 - DNA, 21 bp, Artificial Sequence
  Synthetic
ccaccggaatggagaaggaag

SEQ ID NO: 117 - DNA, 21 bp, Artificial Sequence
  Synthetic
atgcagcaaagtgggcgctgg

SEQ ID NO: 118 - DNA, 21 bp, Artificial Sequence
  Synthetic
tccagcgcccgcgctcggaag

SEQ ID NO: 119 - DNA, 21 bp, Artificial Sequence
  Synthetic
ccggatggggcaccttcataa

SEQ ID NO: 120 - DNA, 21 bp, Artificial Sequence
  Synthetic
atcccaactgttatgccaaag

SEQ ID NO: 121 - DNA, 21 bp, Artificial Sequence
  Synthetic
gctgccgggcctgtgtgcgaa

SEQ ID NO: 122 - DNA, 21 bp, Artificial Sequence
  Synthetic
acaggcccggcagcggcggca

SEQ ID NO: 123 - DNA, 21 bp, Artificial Sequence
  Synthetic
atgtggtgtacaaggctccca

SEQ ID NO: 124 - DNA, 21 bp, Artificial Sequence
  Synthetic
gtctcacctggagcagcagca

SEQ ID NO: 125 - DNA, 21 bp, Artificial Sequence
  Synthetic
cctgttagctttgcaccattg

SEQ ID NO: 126 - DNA, 21 bp, Artificial Sequence
  Synthetic
catgggctaggaaacactgga

SEQ ID NO: 127 - DNA, 21 bp, Artificial Sequence
  Synthetic
gaggtcattctggcttggtca

SEQ ID NO: 128 - DNA, 21 bp, Artificial Sequence
  Synthetic
tattccagatcacaaccttcc

SEQ ID NO: 129 - DNA, 21 bp, Artificial Sequence
  Synthetic
ggtctcaggggagaggaagtg

SEQ ID NO: 130 - DNA, 21 bp, Artificial Sequence
  Synthetic
cctcaccatctggagaaagcg

SEQ ID NO: 131 - DNA, 21 bp, Artificial Sequence
  Synthetic
ccagcaccatggagcaggcca

SEQ ID NO: 132 - DNA, 21 bp, Artificial Sequence
  Synthetic
aggtacggaacaaggcataca

SEQ ID NO: 133 - DNA, 21 bp, Artificial Sequence
  Synthetic
ccatctggtagatgtcttcgg

SEQ ID NO: 134 - DNA, 21 bp, Artificial Sequence
  Synthetic
gcacaccgcctacccgcacgg

SEQ ID NO: 135 - DNA, 21 bp, Artificial Sequence
  Synthetic
agatgatcggctgcgacaacg

SEQ ID NO: 136 - DNA, 21 bp, Artificial Sequence
  Synthetic
cagagatcctgaaggagctag

SEQ ID NO: 137 - DNA, 21 bp, Artificial Sequence
  Synthetic
gtgacaatgaacagtgtccaa

SEQ ID NO: 138 - DNA, 21 bp, Artificial Sequence
  Synthetic
tggaaaatcgggcaagacaaa

SEQ ID NO: 139 - DNA, 21 bp, Artificial Sequence
  Synthetic
aggtatcttatggtgagatgg

SEQ ID NO: 140 - DNA, 21 bp, Artificial Sequence
  Synthetic
tgcaatggatcaactagaaca

SEQ ID NO: 141 - DNA, 21 bp, Artificial Sequence
  Synthetic
acctggtgacaaaggcaatag

SEQ ID NO: 142 - DNA, 21 bp, Artificial Sequence
  Synthetic
agggacctagaccaaagaaca

SEQ ID NO: 143 - DNA, 21 bp, Artificial Sequence
  Synthetic
attggctgtgacaatccagac

SEQ ID NO: 144 - DNA, 21 bp, Artificial Sequence
  Synthetic
agctggaccagaggacggaag

SEQ ID NO: 145 - DNA, 21 bp, Artificial Sequence
  Synthetic
gcaggatgtaaagtatttcca

SEQ ID NO: 146 - DNA, 21 bp, Artificial Sequence
  Synthetic
agaaaagtcatcagaaggttc

SEQ ID NO: 147 - DNA, 21 bp, Artificial Sequence
  Synthetic
gggcacaataccacaccaggc

SEQ ID NO: 148 - DNA, 21 bp, Artificial Sequence
  Synthetic
ccccaggtgacagacaaggaa

SEQ ID NO: 149 - DNA, 21 bp, Artificial Sequence
  Synthetic
actagatgaatacaccatgga

SEQ ID NO: 150 - DNA, 21 bp, Artificial Sequence
  Synthetic
acaccatggagagggtcctag

SEQ ID NO: 151 - DNA, 21 bp, Artificial Sequence
  Synthetic
aacgaaaagaagccctccgag

SEQ ID NO: 152 - DNA, 21 bp, Artificial Sequence
  Synthetic
atcaactcggagcttaaggag

SEQ ID NO: 153 - DNA, 21 bp, Artificial Sequence
  Synthetic
agcctggctacatcaacatca

SEQ ID NO: 154 - DNA, 21 bp, Artificial Sequence
  Synthetic
ctggagcagtgaatatacttc

SEQ ID NO: 155 - DNA, 21 bp, Artificial Sequence
  Synthetic
tctggggacagggagtcgtag

SEQ ID NO: 156 - DNA, 21 bp, Artificial Sequence
  Synthetic
cactggtgctgactgcatttg

SEQ ID NO: 157 - DNA, 21 bp, Artificial Sequence
  Synthetic
ggaaagatgttgacaagataa

SEQ ID NO: 158 - DNA, 21 bp, Artificial Sequence
  Synthetic
agcatcaccaaggaactgaat

SEQ ID NO: 159 - DNA, 21 bp, Artificial Sequence
  Synthetic
gcgccgtgcaggaggaggtca

SEQ ID NO: 160 - DNA, 21 bp, Artificial Sequence
  Synthetic
caccatctccatcaaccacaa

SEQ ID NO: 161 - DNA, 21 bp, Artificial Sequence
  Synthetic
cattccaggcactggttccca

SEQ ID NO: 162 - DNA, 21 bp, Artificial Sequence
  Synthetic
ggtcactttgatgagttccct

SEQ ID NO: 163 - DNA, 21 bp, Artificial Sequence
  Synthetic
atcacacgcagggcccaggta

SEQ ID NO: 164 - DNA, 21 bp, Artificial Sequence
  Synthetic
acgctgcctccggattgtgga

SEQ ID NO: 165 - DNA, 21 bp, Artificial Sequence
  Synthetic
ccgggccacggagagcgggaa

SEQ ID NO: 166 - DNA, 21 bp, Artificial Sequence
  Synthetic
gagatgtgttaagccaaacag

SEQ ID NO: 167 - DNA, 21 bp, Artificial Sequence
  Synthetic
gcgcaatggagcggaagaggt

SEQ ID NO: 168 - DNA, 21 bp, Artificial Sequence
  Synthetic
gcgtggtgttgagccatacgc

SEQ ID NO: 169 - DNA, 21 bp, Artificial Sequence
  Synthetic
ggtggagataattcctgcaga

SEQ ID NO: 170 - DNA, 21 bp, Artificial Sequence
  Synthetic
gagataattcctgcagaggga

SEQ ID NO: 171 - DNA, 21 bp, Artificial Sequence
  Synthetic
gtctgtcccatgtggatggga

SEQ ID NO: 172 - DNA, 21 bp, Artificial Sequence
  Synthetic
aatgccgtaagtctgtcccat

SEQ ID NO: 173 - DNA, 21 bp, Artificial Sequence
  Synthetic
tcggtatctgaccaaccaaaa

SEQ ID NO: 174 - DNA, 21 bp, Artificial Sequence
  Synthetic
cacgagctccgccagctcccg

SEQ ID NO: 175 - DNA, 21 bp, Artificial Sequence
  Synthetic
cttccgtgtccagccttcagg

SEQ ID NO: 176 - DNA, 21 bp, Artificial Sequence
  Synthetic
ggcagggtggggtcatcatac

SEQ ID NO: 177 - DNA, 21 bp, Artificial Sequence
  Synthetic
attgggtgtggcaactcagaa

SEQ ID NO: 178 - DNA, 21 bp, Artificial Sequence
  Synthetic
tgaagatggacatgacgcaga

SEQ ID NO: 179 - DNA, 21 bp, Artificial Sequence
  Synthetic
aaaggcgcacactcaccctcc

SEQ ID NO: 180 - DNA, 21 bp, Artificial Sequence
  Synthetic
agttgggatgaatgggttccg

SEQ ID NO: 181 - DNA, 21 bp, Artificial Sequence
  Synthetic
cgaagcacagcactttctccc

SEQ ID NO: 182 - DNA, 21 bp, Artificial Sequence
  Synthetic
cgtacagcactcgcgccttgg

SEQ ID NO: 183 - DNA, 21 bp, Artificial Sequence
  Synthetic
gcgtcaccctgctcaacgaga

SEQ ID NO: 184 - DNA, 21 bp, Artificial Sequence
  Synthetic
ccctggccgacaagcacgcaa

SEQ ID NO: 185 - DNA, 21 bp, Artificial Sequence
  Synthetic
taaccaggtaaggattgctgg

SEQ ID NO: 186 - DNA, 21 bp, Artificial Sequence
  Synthetic
tctgcacggggtcaaacacca

SEQ ID NO: 187 - DNA, 21 bp, Artificial Sequence
  Synthetic
tcaatgaggggtcatagacca

SEQ ID NO: 188 - DNA, 21 bp, Artificial Sequence
  Synthetic
gattcatactggcgtgacaaa

SEQ ID NO: 189 - DNA, 21 bp, Artificial Sequence
  Synthetic
gttgcaaaaacacactgccga

SEQ ID NO: 190 - DNA, 21 bp, Artificial Sequence
  Synthetic
tttcatctgaatcaatcacac

SEQ ID NO: 191 - DNA, 21 bp, Artificial Sequence
  Synthetic
cacgatgaaaagcagcagggc

SEQ ID NO: 192 - DNA, 21 bp, Artificial Sequence
  Synthetic
acttagtgcaaaaaggcctac

SEQ ID NO: 193 - DNA, 21 bp, Artificial Sequence
  Synthetic
tcatgacaaagtcctcaacca

SEQ ID NO: 194 - DNA, 21 bp, Artificial Sequence
  Synthetic
gtctgtattgaaagactgtgg

SEQ ID NO: 195 - DNA, 21 bp, Artificial Sequence
  Synthetic
tcagagcgacagacacaacag

SEQ ID NO: 196 - DNA, 21 bp, Artificial Sequence
  Synthetic
tggagagggagagggcacatc

SEQ ID NO: 197 - DNA, 21 bp, Artificial Sequence
  Synthetic
aacatcatttcttcttcatgg

SEQ ID NO: 198 - DNA, 21 bp, Artificial Sequence
  Synthetic
cagtcacaaatccagcgacct

SEQ ID NO: 199 - DNA, 21 bp, Artificial Sequence
  Synthetic
gttccccacagtaaccctcca

SEQ ID NO: 200 - DNA, 21 bp, Artificial Sequence
  Synthetic
gcaacatttcttcactcagtg

SEQ ID NO: 201 - DNA, 21 bp, Artificial Sequence
  Synthetic
catttgccggccgccccatga

SEQ ID NO: 202 - DNA, 21 bp, Artificial Sequence
  Synthetic
gccgccccatgatcgagtgta

SEQ ID NO: 203 - DNA, 21 bp, Artificial Sequence
  Synthetic
tccaaacagccaaaatggtag

SEQ ID NO: 204 - DNA, 21 bp, Artificial Sequence
  Synthetic
tttcagaagctgaactcataa

SEQ ID NO: 205 - DNA, 21 bp, Artificial Sequence
  Synthetic
ctcatctgcgggaagtgtggc

SEQ ID NO: 206 - DNA, 21 bp, Artificial Sequence
  Synthetic
ctagggaagacatcagggccg

SEQ ID NO: 207 - DNA, 21 bp, Artificial Sequence
  Synthetic
ggtaccaggcagaggcgcccc

SEQ ID NO: 208 - DNA, 21 bp, Artificial Sequence
  Synthetic
aaggccaggcagtccacaggg

SEQ ID NO: 209 - DNA, 21 bp, Artificial Sequence
  Synthetic
gggacagatccacatgccctt

SEQ ID NO: 210 - DNA, 21 bp, Artificial Sequence
  Synthetic
gaaaacaattcccaagggcat

SEQ ID NO: 211 - DNA, 21 bp, Artificial Sequence
  Synthetic
caagacggcgcccaagggcgt

SEQ ID NO: 212 - DNA, 21 bp, Artificial Sequence
  Synthetic
ggcagctgaggtggtaggccc

SEQ ID NO: 213 - DNA, 21 bp, Artificial Sequence
  Synthetic
cctttgcagggcggcccatga

SEQ ID NO: 214 - DNA, 21 bp, Artificial Sequence
  Synthetic
cttaatcttagcacaggagag

SEQ ID NO: 215 - DNA, 21 bp, Artificial Sequence
  Synthetic
agcagatgggcgaggaagaca

SEQ ID NO: 216 - DNA, 21 bp, Artificial Sequence
  Synthetic
actggtttcatggtgattgtg

SEQ ID NO: 217 - DNA, 21 bp, Artificial Sequence
  Synthetic
acgatgtgacccgcttcatga

SEQ ID NO: 218 - DNA, 21 bp, Artificial Sequence
  Synthetic
ggaactgctccagcactcaaa

SEQ ID NO: 219 - DNA, 21 bp, Artificial Sequence
  Synthetic
aaaagagaactctaggatcga

SEQ ID NO: 220 - DNA, 21 bp, Artificial Sequence
  Synthetic
ctgggaattatgagtcaccaa

SEQ ID NO: 221 - DNA, 21 bp, Artificial Sequence
  Synthetic
ctctccaggaggtgccggtgg

SEQ ID NO: 222 - DNA, 21 bp, Artificial Sequence
  Synthetic
tgccgcacacctcacagaagg

SEQ ID NO: 223 - DNA, 21 bp, Artificial Sequence
  Synthetic
atggtttcatcggatctgtac

SEQ ID NO: 224 - DNA, 21 bp, Artificial Sequence
  Synthetic
cctcgtttgtacaaattccac

SEQ ID NO: 225 - DNA, 21 bp, Artificial Sequence
  Synthetic
cctgccagaaatggttccacc

SEQ ID NO: 226 - DNA, 21 bp, Artificial Sequence
  Synthetic
cctcactccgacaggcaccac

SEQ ID NO: 227 - DNA, 21 bp, Artificial Sequence
  Synthetic
ggacagcttgaacaccagccg

SEQ ID NO: 228 - DNA, 21 bp, Artificial Sequence
  Synthetic
tctagggagtgaaattcctgt

SEQ ID NO: 229 - DNA, 21 bp, Artificial Sequence
  Synthetic
gaagaatatccgctctcgccg

SEQ ID NO: 230 - DNA, 21 bp, Artificial Sequence
  Synthetic
cagacttccttggcacccggc

SEQ ID NO: 231 - DNA, 21 bp, Artificial Sequence
  Synthetic
tgtacatagactgttgccttg

SEQ ID NO: 232 - DNA, 21 bp, Artificial Sequence
  Synthetic
ttgtacatagactgttgcctt

SEQ ID NO: 233 - DNA, 21 bp, Artificial Sequence
  Synthetic
agccgagatggtcataaactc

SEQ ID NO: 234 - DNA, 21 bp, Artificial Sequence
  Synthetic
atgttatcagtggaagcactc

SEQ ID NO: 235 - DNA, 21 bp, Artificial Sequence
  Synthetic
atgtggcctggcacctgctgc

SEQ ID NO: 236 - DNA, 21 bp, Artificial Sequence
  Synthetic
aggccacatcctctacaacag

SEQ ID NO: 237 - DNA, 21 bp, Artificial Sequence
  Synthetic
gcatcatcagaacctgaagcc

SEQ ID NO: 238 - DNA, 21 bp, Artificial Sequence
  Synthetic
caggagcatgagaagaggtgt

SEQ ID NO: 239 - DNA, 21 bp, Artificial Sequence
  Synthetic
cagtatggtatccactatcgc

SEQ ID NO: 240 - DNA, 21 bp, Artificial Sequence
  Synthetic
actatcgcaagagtcacacag

SEQ ID NO: 241 - DNA, 21 bp, Artificial Sequence
  Synthetic
atttgttcttgtcattcttca

SEQ ID NO: 242 - DNA, 21 bp, Artificial Sequence
  Synthetic
acttcaagctaccaaccagac

SEQ ID NO: 243 - DNA, 21 bp, Artificial Sequence
  Synthetic
gcctacttcatctacatggtg

SEQ ID NO: 244 - DNA, 21 bp, Artificial Sequence
  Synthetic
cgacacttcaggaacatacct

SEQ ID NO: 245 - DNA, 21 bp, Artificial Sequence
  Synthetic
atttaggatttgacgaaacgt

SEQ ID NO: 246 - DNA, 21 bp, Artificial Sequence
  Synthetic
aacccattacagtactacttg

SEQ ID NO: 247 - DNA, 21 bp, Artificial Sequence
  Synthetic
ctgtcaattggatgctacaac

SEQ ID NO: 248 - DNA, 21 bp, Artificial Sequence
  Synthetic
agagcccagtcagaaatcttc

SEQ ID NO: 249 - DNA, 21 bp, Artificial Sequence
  Synthetic
aagttgacctcctcattgtta

SEQ ID NO: 250 - DNA, 21 bp, Artificial Sequence
  Synthetic
tgaagtttactaaccatgaca

SEQ ID NO: 251 - DNA, 21 bp, Artificial Sequence
  Synthetic
cctacctgcgtgtagcagcgc

SEQ ID NO: 252 - DNA, 21 bp, Artificial Sequence
  Synthetic
cctcacctttcatccagctta

SEQ ID NO: 253 - DNA, 21 bp, Artificial Sequence
  Synthetic
atgaagcagccggagaaagta

SEQ ID NO: 254 - DNA, 21 bp, Artificial Sequence
  Synthetic
ttcccaggggaggacattcgg

SEQ ID NO: 255 - DNA, 21 bp, Artificial Sequence
  Synthetic
aggatgatcccaccaccaaga

SEQ ID NO: 256 - DNA, 21 bp, Artificial Sequence
  Synthetic
gatgctttgcacaccaaggcg

SEQ ID NO: 257 - DNA, 21 bp, Artificial Sequence
  Synthetic
ggtagaactcccacacccggg

SEQ ID NO: 258 - DNA, 21 bp, Artificial Sequence
  Synthetic
acgccgggcaccgcgccatag

SEQ ID NO: 259 - DNA, 21 bp, Artificial Sequence
  Synthetic
tcagacctgctggcctcatcg

SEQ ID NO: 260 - DNA, 21 bp, Artificial Sequence
  Synthetic
tgccaccttcaggggtcccca

SEQ ID NO: 261 - DNA, 21 bp, Artificial Sequence
  Synthetic
gtacctcctgcgttcccaaca

SEQ ID NO: 262 - DNA, 21 bp, Artificial Sequence
  Synthetic
aactgtgacgggctccacctg

SEQ ID NO: 263 - DNA, 21 bp, Artificial Sequence
  Synthetic
caaaaatgcagagccaccttc

SEQ ID NO: 264 - DNA, 21 bp, Artificial Sequence
  Synthetic
aaatttattaggggtcttggg

SEQ ID NO: 265 - DNA, 21 bp, Artificial Sequence
  Synthetic
aaattctctgtgaaccactca

SEQ ID NO: 266 - DNA, 21 bp, Artificial Sequence
  Synthetic
attgagaactttaagtcgtac

SEQ ID NO: 267 - DNA, 21 bp, Artificial Sequence
  Synthetic
atagggatttgagtgtcaaaa

SEQ ID NO: 268 - DNA, 21 bp, Artificial Sequence
  Synthetic
tttccaatatgtgctccatga

SEQ ID NO: 269 - DNA, 21 bp, Artificial Sequence
  Synthetic
agatgctcttgcagaggctca

SEQ ID NO: 270 - DNA, 21 bp, Artificial Sequence
  Synthetic
aatgctatgcttgcaccacca

SEQ ID NO: 271 - DNA, 21 bp, Artificial Sequence
  Synthetic
gtcatatagcaacgtagctta

SEQ ID NO: 272 - DNA, 21 bp, Artificial Sequence
  Synthetic
agggcaaacgggaaaaaatca

SEQ ID NO: 273 - DNA, 21 bp, Artificial Sequence
  Synthetic
tttctttctctgtacgcaaga

SEQ ID NO: 274 - DNA, 21 bp, Artificial Sequence
  Synthetic
tgacaacttggatcaagccac

SEQ ID NO: 275 - DNA, 21 bp, Artificial Sequence
  Synthetic
gaaggggtctgaaggccacca

SEQ ID NO: 276 - DNA, 21 bp, Artificial Sequence
  Synthetic
ggaggaggagcagaaggacct

SEQ ID NO: 277 - DNA, 21 bp, Artificial Sequence
  Synthetic
gaaatcaagccgggagaggag

SEQ ID NO: 278 - DNA, 21 bp, Artificial Sequence
  Synthetic
ctgtacagctctgacttctgc

SEQ ID NO: 279 - DNA, 21 bp, Artificial Sequence
  Synthetic
agactccgttcgacttcttgg

SEQ ID NO: 280 - DNA, 21 bp, Artificial Sequence
  Synthetic
tacttgactccagatcataaa

SEQ ID NO: 281 - DNA, 21 bp, Artificial Sequence
  Synthetic
aacatcctcaaatcccaccaa

SEQ ID NO: 282 - DNA, 21 bp, Artificial Sequence
  Synthetic
gtgtcctgacgtgactatttg

SEQ ID NO: 283 - DNA, 21 bp, Artificial Sequence
  Synthetic
aaagagagaccggaatccatc

SEQ ID NO: 284 - DNA, 21 bp, Artificial Sequence
  Synthetic
gaagcttattgagaggatgca

SEQ ID NO: 285 - DNA, 21 bp, Artificial Sequence
  Synthetic
agcagatgtacacccgagtag

SEQ ID NO: 286 - DNA, 21 bp, Artificial Sequence
  Synthetic
gtcctgcacaaacccttctac

SEQ ID NO: 287 - DNA, 21 bp, Artificial Sequence
  Synthetic
ttacctctcagcttccacagg

SEQ ID NO: 288 - DNA, 21 bp, Artificial Sequence
  Synthetic
cttacctctcagcttccacag

SEQ ID NO: 289 - DNA, 21 bp, Artificial Sequence
  Synthetic
atttggccaaaatccttatac

SEQ ID NO: 290 - DNA, 21 bp, Artificial Sequence
  Synthetic
cttacttctcactttccacag

SEQ ID NO: 291 - DNA, 21 bp, Artificial Sequence
  Synthetic
gcgtgatgttgaactgggaga

SEQ ID NO: 292 - DNA, 21 bp, Artificial Sequence
  Synthetic
cccatgtcttccagtctcatc

SEQ ID NO: 293 - DNA, 21 bp, Artificial Sequence
  Synthetic
gacatgagagatcttccaaat

SEQ ID NO: 294 - DNA, 21 bp, Artificial Sequence
  Synthetic
aatagtgcaacctacaatggt

SEQ ID NO: 295 - DNA, 21 bp, Artificial Sequence
  Synthetic
agtgttaagtataatggacct

SEQ ID NO: 296 - DNA, 21 bp, Artificial Sequence
  Synthetic
taactgggtgatgaaatggcc

SEQ ID NO: 297 - DNA, 21 bp, Artificial Sequence
  Synthetic
ctgcgatgactggtaccactg

SEQ ID NO: 298 - DNA, 21 bp, Artificial Sequence
  Synthetic
gcaatcagatctggatctgcc

SEQ ID NO: 299 - DNA, 21 bp, Artificial Sequence
  Synthetic
ggctacaggagcaacagatgg

SEQ ID NO: 300 - DNA, 21 bp, Artificial Sequence
  Synthetic
ttaccgaccacactctgacag

SEQ ID NO: 301 - DNA, 21 bp, Artificial Sequence
  Synthetic
ggtggcctgtgaaaagcctca

SEQ ID NO: 302 - DNA, 21 bp, Artificial Sequence
  Synthetic
tcctgatgtcccagacgcgca

SEQ ID NO: 303 - DNA, 21 bp, Artificial Sequence
  Synthetic
ccacagttggtcttctgctgg

SEQ ID NO: 304 - DNA, 21 bp, Artificial Sequence
  Synthetic
gccagcagaagaccaactgtg

SEQ ID NO: 305 - DNA, 21 bp, Artificial Sequence
  Synthetic
gtggtagactgagcttagaca

SEQ ID NO: 306 - DNA, 21 bp, Artificial Sequence
  Synthetic
gaagctcaggaggagaaaaaa

SEQ ID NO: 307 - DNA, 21 bp, Artificial Sequence
  Synthetic
ggtggagatggtcgaaagaaa

SEQ ID NO: 308 - DNA, 21 bp, Artificial Sequence
  Synthetic
cgagggggtggagatggtcga

SEQ ID NO: 309 - DNA, 21 bp, Artificial Sequence
  Synthetic
ttataccagcattggctactt

SEQ ID NO: 310 - DNA, 21 bp, Artificial Sequence
  Synthetic
attgtcccctaacagtggaga

SEQ ID NO: 311 - DNA, 21 bp, Artificial Sequence
  Synthetic
ttcaggtcagggagcacatgg

SEQ ID NO: 312 - DNA, 21 bp, Artificial Sequence
  Synthetic
gtgagcagctccactcctccc

SEQ ID NO: 313 - DNA, 21 bp, Artificial Sequence
  Synthetic
caggagcctgttcctgcttcg

SEQ ID NO: 314 - DNA, 21 bp, Artificial Sequence
  Synthetic
gtgtgctgtctgccaaaacgg

SEQ ID NO: 315 - DNA, 21 bp, Artificial Sequence
  Synthetic
cacatctgataccacctcctc

SEQ ID NO: 316 - DNA, 21 bp, Artificial Sequence
  Synthetic
agccttgctcagcttcccagg

SEQ ID NO: 317 - DNA, 21 bp, Artificial Sequence
  Synthetic
atgaggtctctgcgctccagg

SEQ ID NO: 318 - DNA, 21 bp, Artificial Sequence
  Synthetic
tcacaaacatggtgattgtca

SEQ ID NO: 319 - DNA, 21 bp, Artificial Sequence
  Synthetic
tgttcccagcgaggacgagtg

SEQ ID NO: 320 - DNA, 21 bp, Artificial Sequence
  Synthetic
cccgacctcgcaggtactgcc

SEQ ID NO: 321 - DNA, 21 bp, Artificial Sequence
  Synthetic
cttctgggactttatccaaag

SEQ ID NO: 322 - DNA, 21 bp, Artificial Sequence
  Synthetic
gtggcttatcatatttactgt

SEQ ID NO: 323 - DNA, 21 bp, Artificial Sequence
  Synthetic
caactgtatatgaaagttcca

SEQ ID NO: 324 - DNA, 21 bp, Artificial Sequence
  Synthetic
taaatattggtccaggagatt

SEQ ID NO: 325 - DNA, 21 bp, Artificial Sequence
  Synthetic
tcttccagctgtggcactggg

SEQ ID NO: 326 - DNA, 21 bp, Artificial Sequence
  Synthetic
aatggtgaggaagagtcgggc

SEQ ID NO: 327 - DNA, 21 bp, Artificial Sequence
  Synthetic
agctagttgtgatggatctgt

SEQ ID NO: 328 - DNA, 21 bp, Artificial Sequence
  Synthetic
ttgtggaagtgatggtgatgt

SEQ ID NO: 329 - DNA, 21 bp, Artificial Sequence
  Synthetic
gcagagatgtatagcaacata

SEQ ID NO: 330 - DNA, 21 bp, Artificial Sequence
  Synthetic
atctatggaacaccatactga

SEQ ID NO: 331 - DNA, 21 bp, Artificial Sequence
  Synthetic
agtgcctgaagacgctcatcg

SEQ ID NO: 332 - DNA, 21 bp, Artificial Sequence
  Synthetic
agaacttcacaaaagacacgg

SEQ ID NO: 333 - DNA, 21 bp, Artificial Sequence
  Synthetic
cattaagtacctggaaacaaa

SEQ ID NO: 334 - DNA, 21 bp, Artificial Sequence
  Synthetic
ctgaagcagtgacaaggagct

SEQ ID NO: 335 - DNA, 21 bp, Artificial Sequence
  Synthetic
cctcgctgcatgaaagaaaca

SEQ ID NO: 336 - DNA, 21 bp, Artificial Sequence
  Synthetic
cagtggtagcaaagacatctg

SEQ ID NO: 337 - DNA, 21 bp, Artificial Sequence
  Synthetic
actcaccaatcataataaact

SEQ ID NO: 338 - DNA, 21 bp, Artificial Sequence
  Synthetic
actctcagtttattatgattg

SEQ ID NO: 339 - DNA, 21 bp, Artificial Sequence
  Synthetic
tagttcatttgaccaaacggt

SEQ ID NO: 340 - DNA, 21 bp, Artificial Sequence
  Synthetic
ttgtgactggcagccgagatg

SEQ ID NO: 341 - DNA, 21 bp, Artificial Sequence
  Synthetic
caggggggagccttctgtgct

SEQ ID NO: 342 - DNA, 21 bp, Artificial Sequence
  Synthetic
ttggggagctgatcgacgagg

SEQ ID NO: 343 - DNA, 21 bp, Artificial Sequence
  Synthetic
gtggacagtgaatggagatgt

SEQ ID NO: 344 - DNA, 21 bp, Artificial Sequence
  Synthetic
tgtgaaacacaaaagtggaca

SEQ ID NO: 345 - DNA, 21 bp, Artificial Sequence
  Synthetic
gaatggtgggaacgtccacag

SEQ ID NO: 346 - DNA, 21 bp, Artificial Sequence
  Synthetic
agtgcaccagcctcctgtaca

SEQ ID NO: 347 - DNA, 21 bp, Artificial Sequence
  Synthetic
cattcagaaaatgaaacagcc

SEQ ID NO: 348 - DNA, 21 bp, Artificial Sequence
  Synthetic
tggacggaatgatttctactg

SEQ ID NO: 349 - DNA, 21 bp, Artificial Sequence
  Synthetic
tgatgcccgccttgcacacca

SEQ ID NO: 350 - DNA, 21 bp, Artificial Sequence
  Synthetic
ctgcggggcctcagtacacgg

SEQ ID NO: 351 - DNA, 21 bp, Artificial Sequence
  Synthetic
tcctgggctgctacggggcca

SEQ ID NO: 352 - DNA, 21 bp, Artificial Sequence
  Synthetic
caggaggttggtggtctgcgg

SEQ ID NO: 353 - DNA, 21 bp, Artificial Sequence
  Synthetic
cacaaaggtagtgctccacat

SEQ ID NO: 354 - DNA, 21 bp, Artificial Sequence
  Synthetic
tggacccatagggagacccaa

SEQ ID NO: 355 - DNA, 21 bp, Artificial Sequence
  Synthetic
tcctgatggaccgcttcgaga

SEQ ID NO: 356 - DNA, 21 bp, Artificial Sequence
  Synthetic
cgggctgcgcaaatatcctgg

SEQ ID NO: 357 - DNA, 21 bp, Artificial Sequence
  Synthetic
gcataggcagcatgcttctta

SEQ ID NO: 358 - DNA, 21 bp, Artificial Sequence
  Synthetic
gctgtcaaactgggtctaccg

SEQ ID NO: 359 - DNA, 21 bp, Artificial Sequence
  Synthetic
tgcagaggaagatggatggcc

SEQ ID NO: 360 - DNA, 21 bp, Artificial Sequence
  Synthetic
gctactgcgacagcatcctca

SEQ ID NO: 361 - DNA, 21 bp, Artificial Sequence
  Synthetic
tccagtctaaactggaggccc

SEQ ID NO: 362 - DNA, 21 bp, Artificial Sequence
  Synthetic
gccgtcaagctgaacctccct

SEQ ID NO: 363 - DNA, 21 bp, Artificial Sequence
  Synthetic
agcctgaagagaaatctctct

SEQ ID NO: 364 - DNA, 21 bp, Artificial Sequence
  Synthetic
gagagctgcagctaatcatag

SEQ ID NO: 365 - DNA, 21 bp, Artificial Sequence
  Synthetic
tgaaagacaaaattgtagcta

SEQ ID NO: 366 - DNA, 21 bp, Artificial Sequence
  Synthetic
ttgctttcagaaaagatcccc

SEQ ID NO: 367 - DNA, 21 bp, Artificial Sequence
  Synthetic
gccagaacatttaacgaacct

SEQ ID NO: 368 - DNA, 21 bp, Artificial Sequence
  Synthetic
tcagatatggcagtaaactat

SEQ ID NO: 369 - DNA, 21 bp, Artificial Sequence
  Synthetic
gaatggccctgaaggactgca

SEQ ID NO: 370 - DNA, 21 bp, Artificial Sequence
  Synthetic
aagcaactacagtacaataca

SEQ ID NO: 371 - DNA, 21 bp, Artificial Sequence
  Synthetic
ggtctgatgatgcgtccattc

SEQ ID NO: 372 - DNA, 21 bp, Artificial Sequence
  Synthetic
cctcaagcagcagaatgttag

SEQ ID NO: 373 - DNA, 21 bp, Artificial Sequence
  Synthetic
caggctccacaaaactgagga

SEQ ID NO: 374 - DNA, 21 bp, Artificial Sequence
  Synthetic
cgcctcagcagaaatggctgc

SEQ ID NO: 375 - DNA, 21 bp, Artificial Sequence
  Synthetic
aaggggagagaaaatggctac

SEQ ID NO: 376 - DNA, 21 bp, Artificial Sequence
  Synthetic
tcttacatccacagcacatgg

SEQ ID NO: 377 - DNA, 21 bp, Artificial Sequence
  Synthetic
ccccacagtgtggataaaaag

SEQ ID NO: 378 - DNA, 21 bp, Artificial Sequence
  Synthetic
aaattctatgtggtgacatac

SEQ ID NO: 379 - DNA, 21 bp, Artificial Sequence
  Synthetic
tggctctgtccccgttgtacg

SEQ ID NO: 380 - DNA, 21 bp, Artificial Sequence
  Synthetic
ccttacgatcaggcttcttgg

SEQ ID NO: 381 - DNA, 21 bp, Artificial Sequence
  Synthetic
tcctgggtgaaggagctacag

SEQ ID NO: 382 - DNA, 21 bp, Artificial Sequence
  Synthetic
ggagctgagccagatgcagaa

SEQ ID NO: 383 - DNA, 21 bp, Artificial Sequence
  Synthetic
ggaacttgaagactcctgaaa

SEQ ID NO: 384 - DNA, 21 bp, Artificial Sequence
  Synthetic
gcacagaagatcaagcgattt

SEQ ID NO: 385 - DNA, 21 bp, Artificial Sequence
  Synthetic
acatagatcaagcaaagatcg

SEQ ID NO: 386 - DNA, 21 bp, Artificial Sequence
  Synthetic
aaagggaattccgaacctgga

SEQ ID NO: 387 - DNA, 21 bp, Artificial Sequence
  Synthetic
tagaggtggataggatattgg

SEQ ID NO: 388 - DNA, 21 bp, Artificial Sequence
  Synthetic
atgtactgcaaagattcacgg

SEQ ID NO: 389 - DNA, 21 bp, Artificial Sequence
  Synthetic
atgtagatcttgcaaaaatag

SEQ ID NO: 390 - DNA, 21 bp, Artificial Sequence
  Synthetic
taccaattgaacaagagccag

SEQ ID NO: 391 - DNA, 21 bp, Artificial Sequence
  Synthetic
acctgaggaaggaaaccacca

SEQ ID NO: 392 - DNA, 21 bp, Artificial Sequence
  Synthetic
tgttgatcaggtcctcatagg

SEQ ID NO: 393 - DNA, 21 bp, Artificial Sequence
  Synthetic
taccgtagaggcccttgcgag

SEQ ID NO: 394 - DNA, 21 bp, Artificial Sequence
  Synthetic
gccgcaccatgcccaccgtga

SEQ ID NO: 395 - DNA, 21 bp, Artificial Sequence
  Synthetic
acgtcgcttctgaagtgtgtg

SEQ ID NO: 396 - DNA, 21 bp, Artificial Sequence
  Synthetic
ggtcatcaccctccttggggc

SEQ ID NO: 397 - DNA, 21 bp, Artificial Sequence
  Synthetic
tcccaccaggcacctttgtct

SEQ ID NO: 398 - DNA, 21 bp, Artificial Sequence
  Synthetic
gtcgtcgatgcacacgcagta

SEQ ID NO: 399 - DNA, 21 bp, Artificial Sequence
  Synthetic
agacccggacgggaatgatgt

SEQ ID NO: 400 - DNA, 21 bp, Artificial Sequence
  Synthetic
cgcaacatcacccacctgcag

SEQ ID NO: 401 - DNA, 21 bp, Artificial Sequence
  Synthetic
tcaaagatcctgtgcagaaaa

SEQ ID NO: 402 - DNA, 21 bp, Artificial Sequence
  Synthetic
accatctgacgtggcaggctg

SEQ ID NO: 403 - DNA, 21 bp, Artificial Sequence
  Synthetic
taagttacttactcatcccca

SEQ ID NO: 404 - DNA, 21 bp, Artificial Sequence
  Synthetic
ctcctcctgttggactgagaa

SEQ ID NO: 405 - DNA, 21 bp, Artificial Sequence
  Synthetic
aagcagcagacggacatcgct

SEQ ID NO: 406 - DNA, 21 bp, Artificial Sequence
  Synthetic
aacctaaccgatccccagata

SEQ ID NO: 407 - DNA, 21 bp, Artificial Sequence
  Synthetic
tcacctcagggtccccgatgg

SEQ ID NO: 408 - DNA, 21 bp, Artificial Sequence
  Synthetic
aggggcaaatgcaggccacgc

SEQ ID NO: 409 - DNA, 21 bp, Artificial Sequence
  Synthetic
gaggctgggccatcaacgtgg

SEQ ID NO: 410 - DNA, 21 bp, Artificial Sequence
  Synthetic
attgatcttgatgcccatcag

SEQ ID NO: 411 - DNA, 21 bp, Artificial Sequence
  Synthetic
gttgagagctgacaaaactca

SEQ ID NO: 412 - DNA, 21 bp, Artificial Sequence
  Synthetic
caatgagagatggtatagatg

SEQ ID NO: 413 - DNA, 21 bp, Artificial Sequence
  Synthetic
gtataaccaccaccacccagc

SEQ ID NO: 414 - DNA, 21 bp, Artificial Sequence
  Synthetic
agcccaatcgatcacagccca

SEQ ID NO: 415 - DNA, 21 bp, Artificial Sequence
  Synthetic
cagctccacgagcacatcaag

SEQ ID NO: 416 - DNA, 21 bp, Artificial Sequence
  Synthetic
cggtggtcatgccgatcgcca

SEQ ID NO: 417 - DNA, 21 bp, Artificial Sequence
  Synthetic
caggcttacatctggcggtga

SEQ ID NO: 418 - DNA, 21 bp, Artificial Sequence
  Synthetic
tgcagaagcagctcctgttcg

SEQ ID NO: 419 - DNA, 21 bp, Artificial Sequence
  Synthetic
tcgtaggtgtctgctaggaca

SEQ ID NO: 420 - DNA, 21 bp, Artificial Sequence
  Synthetic
catggcgagcagccacagcca

SEQ ID NO: 421 - DNA, 21 bp, Artificial Sequence
  Synthetic
tagtcgtgatgcccatcgccc

SEQ ID NO: 422 - DNA, 21 bp, Artificial Sequence
  Synthetic
gctgccggcaggcgatggcca

SEQ ID NO: 423 - DNA, 21 bp, Artificial Sequence
  Synthetic
ctttacctagcccatattcta

SEQ ID NO: 424 - DNA, 21 bp, Artificial Sequence
  Synthetic
ttatactcacctcctcccaaa

SEQ ID NO: 425 - DNA, 21 bp, Artificial Sequence
  Synthetic
gggggttggtgccatacaaca

SEQ ID NO: 426 - DNA, 21 bp, Artificial Sequence
  Synthetic
tccagaagcagcttctgatag

SEQ ID NO: 427 - DNA, 21 bp, Artificial Sequence
  Synthetic
tctacttcctcacctacgccg

SEQ ID NO: 428 - DNA, 21 bp, Artificial Sequence
  Synthetic
gcgagtacaaccccccggaca

SEQ ID NO: 429 - DNA, 21 bp, Artificial Sequence
  Synthetic
agcgagtctttaccaattgca

SEQ ID NO: 430 - DNA, 21 bp, Artificial Sequence
  Synthetic
ggagttgtagccatgccctag

SEQ ID NO: 431 - DNA, 21 bp, Artificial Sequence
  Synthetic
ctttcctcttctacgtcatga

SEQ ID NO: 432 - DNA, 21 bp, Artificial Sequence
  Synthetic
ggcggaaccaggacaacgaag

SEQ ID NO: 433 - DNA, 21 bp, Artificial Sequence
  Synthetic
gctggacttccgtagtgacca

SEQ ID NO: 434 - DNA, 21 bp, Artificial Sequence
  Synthetic
ccatgtgaaaacctcggtcac

SEQ ID NO: 435 - DNA, 21 bp, Artificial Sequence
  Synthetic
gatcgacaagagagatggcag

SEQ ID NO: 436 - DNA, 21 bp, Artificial Sequence
  Synthetic
atgcaagacatgcagtgcctg

SEQ ID NO: 437 - DNA, 21 bp, Artificial Sequence
  Synthetic
cttctgtttcagaaatcagtc

SEQ ID NO: 438 - DNA, 21 bp, Artificial Sequence
  Synthetic
actgaggcatagtaaggatac

SEQ ID NO: 439 - DNA, 21 bp, Artificial Sequence
  Synthetic
ttctgctgaagtgatccagtc

SEQ ID NO: 440 - DNA, 21 bp, Artificial Sequence
  Synthetic
gttgatggcaaagaccataag

SEQ ID NO: 441 - DNA, 21 bp, Artificial Sequence
  Synthetic
ctgctaaagccacaggcacac

SEQ ID NO: 442 - DNA, 21 bp, Artificial Sequence
  Synthetic
gaaagctagaagaaaaacttc

SEQ ID NO: 443 - DNA, 21 bp, Artificial Sequence
  Synthetic
gtgaccacactctgctaactc

SEQ ID NO: 444 - DNA, 21 bp, Artificial Sequence
  Synthetic
gacattcaactcaaatctcca

SEQ ID NO: 445 - DNA, 21 bp, Artificial Sequence
  Synthetic
tgtgtcaggagccagacggag

SEQ ID NO: 446 - DNA, 21 bp, Artificial Sequence
  Synthetic
gggggatgagccagaagacct

SEQ ID NO: 447 - DNA, 21 bp, Artificial Sequence
  Synthetic
cctgcctgcggaccgagtgcg

SEQ ID NO: 448 - DNA, 21 bp, Artificial Sequence
  Synthetic
gagtgccacttctgcaaggac

SEQ ID NO: 449 - DNA, 21 bp, Artificial Sequence
  Synthetic
caaaggacacggagaagataa

SEQ ID NO: 450 - DNA, 21 bp, Artificial Sequence
  Synthetic
cattaagaaaacgtcttcatc

SEQ ID NO: 451 - DNA, 21 bp, Artificial Sequence
  Synthetic
ccttgcacgccatactcctca

SEQ ID NO: 452 - DNA, 21 bp, Artificial Sequence
  Synthetic
cctgctggagccccacaccag

SEQ ID NO: 453 - DNA, 21 bp, Artificial Sequence
  Synthetic
ttcaggtgactcaagaggctg

SEQ ID NO: 454 - DNA, 21 bp, Artificial Sequence
  Synthetic
ccacatgccaaagtacaggta

SEQ ID NO: 455 - DNA, 21 bp, Artificial Sequence
  Synthetic
caccgggcgggcctggccaag

SEQ ID NO: 456 - DNA, 21 bp, Artificial Sequence
  Synthetic
gctaccacgccggcttcaatc

SEQ ID NO: 457 - DNA, 21 bp, Artificial Sequence
  Synthetic
aactcccggaactcctccatg

SEQ ID NO: 458 - DNA, 21 bp, Artificial Sequence
  Synthetic
ccacatgccaaaatagagata

SEQ ID NO: 459 - DNA, 21 bp, Artificial Sequence
  Synthetic
tgatatttcatccaaccaaag

SEQ ID NO: 460 - DNA, 21 bp, Artificial Sequence
  Synthetic
gcaggaaggccccacaacccc

SEQ ID NO: 461 - DNA, 21 bp, Artificial Sequence
  Synthetic
cagccccgagaaatgtctggg

SEQ ID NO: 462 - DNA, 21 bp, Artificial Sequence
  Synthetic
ttcccttcaattgcatgactc

SEQ ID NO: 463 - DNA, 21 bp, Artificial Sequence
  Synthetic
aggtgatgagagagctggccc

SEQ ID NO: 464 - DNA, 21 bp, Artificial Sequence
  Synthetic
gatatctgccaggaaaaggaa

SEQ ID NO: 465 - DNA, 21 bp, Artificial Sequence
  Synthetic
gggtgagccaaaaacctggta

SEQ ID NO: 466 - DNA, 21 bp, Artificial Sequence
  Synthetic
ctggtgtggaaagcatccctg

SEQ ID NO: 467 - DNA, 21 bp, Artificial Sequence
  Synthetic
ctccattaactacctccactg

SEQ ID NO: 468 - DNA, 21 bp, Artificial Sequence
  Synthetic
atttcttcttcaggcccagac

SEQ ID NO: 469 - DNA, 21 bp, Artificial Sequence
  Synthetic
ctctctttcccaggcccaaac

SEQ ID NO: 470 - DNA, 21 bp, Artificial Sequence
  Synthetic
ctcaccaatgcagatagttaa

SEQ ID NO: 471 - DNA, 21 bp, Artificial Sequence
  Synthetic
ttgggccaccaagaacccatt

SEQ ID NO: 472 - DNA, 21 bp, Artificial Sequence
  Synthetic
agaaataatttgaatttccta

SEQ ID NO: 473 - DNA, 21 bp, Artificial Sequence
  Synthetic
aggcacggcgtggactacttg

SEQ ID NO: 474 - DNA, 21 bp, Artificial Sequence
  Synthetic
tcaacattggcccaggcgact

SEQ ID NO: 475 - DNA, 21 bp, Artificial Sequence
  Synthetic
acgacgtgaaccgcttcatga

SEQ ID NO: 476 - DNA, 21 bp, Artificial Sequence
  Synthetic
atctccaaagaacacctcact

SEQ ID NO: 477 - DNA, 21 bp, Artificial Sequence
  Synthetic
agtgccgaaacagctatcacc

SEQ ID NO: 478 - DNA, 21 bp, Artificial Sequence
  Synthetic
gcatggtggcatccactacct

SEQ ID NO: 479 - DNA, 21 bp, Artificial Sequence
  Synthetic
tcgacgcgggggagatggtca

SEQ ID NO: 480 - DNA, 21 bp, Artificial Sequence
  Synthetic
acggtccgcaggtgtacagca

SEQ ID NO: 481 - DNA, 21 bp, Artificial Sequence
  Synthetic
ttgagaaacacaccatggtca

SEQ ID NO: 482 - DNA, 21 bp, Artificial Sequence
  Synthetic
aaatcagtaccaaccaatggc

SEQ ID NO: 483 - DNA, 21 bp, Artificial Sequence
  Synthetic
ccttactgtgtcaacagcaag

SEQ ID NO: 484 - DNA, 21 bp, Artificial Sequence
  Synthetic
tagaaaagcacacaatggtta

SEQ ID NO: 485 - DNA, 21 bp, Artificial Sequence
  Synthetic
atttagagtagaataacacaa

SEQ ID NO: 486 - DNA, 21 bp, Artificial Sequence
  Synthetic
ttgggtgtacaagaccgcctg

SEQ ID NO: 487 - DNA, 21 bp, Artificial Sequence
  Synthetic
ggagcaatgagaggcaatcct

SEQ ID NO: 488 - DNA, 21 bp, Artificial Sequence
  Synthetic
tccaccagcccgaggctatcg

SEQ ID NO: 489 - DNA, 21 bp, Artificial Sequence
  Synthetic
aaaagcaactggatgcgctat

SEQ ID NO: 490 - DNA, 21 bp, Artificial Sequence
  Synthetic
ttggtgtagatttcacctatt

SEQ ID NO: 491 - DNA, 21 bp, Artificial Sequence
  Synthetic
ttcaccgcaacctggccagag

SEQ ID NO: 492 - DNA, 21 bp, Artificial Sequence
  Synthetic
gaagaagccagctgatttgtc

SEQ ID NO: 493 - DNA, 21 bp, Artificial Sequence
  Synthetic
acagatttacctcccacatca

SEQ ID NO: 494 - DNA, 21 bp, Artificial Sequence
  Synthetic
gagagctgcaaagagatccat

SEQ ID NO: 495 - DNA, 21 bp, Artificial Sequence
  Synthetic
aagggaaactggctgcgatat

SEQ ID NO: 496 - DNA, 21 bp, Artificial Sequence
  Synthetic
atcgcagccagtttcccttct

SEQ ID NO: 497 - DNA, 21 bp, Artificial Sequence
  Synthetic
gcagaggatccagcaaggcac

SEQ ID NO: 498 - DNA, 21 bp, Artificial Sequence
  Synthetic
tgtgcaaggcactgcggagaa

SEQ ID NO: 499 - DNA, 21 bp, Artificial Sequence
  Synthetic
aatgaggcatctgatctgccg

SEQ ID NO: 500 - DNA, 21 bp, Artificial Sequence
  Synthetic
ggcaggctcttcttaccagcc

SEQ ID NO: 501 - DNA, 21 bp, Artificial Sequence
  Synthetic
ggggcccgcaaggtcatcggg

SEQ ID NO: 502 - DNA, 21 bp, Artificial Sequence
  Synthetic
ggccttggcagcaaacatgca

SEQ ID NO: 503 - DNA, 21 bp, Artificial Sequence
  Synthetic
ctatgcagtttgagttcatga

SEQ ID NO: 504 - DNA, 21 bp, Artificial Sequence
  Synthetic
cactatgcgcggcctagagcg

SEQ ID NO: 505 - DNA, 21 bp, Artificial Sequence
  Synthetic
atagtaagaggattgcagtgg

SEQ ID NO: 506 - DNA, 21 bp, Artificial Sequence
  Synthetic
ggtaggagcagaactccttct

SEQ ID NO: 507 - DNA, 21 bp, Artificial Sequence
  Synthetic
gctacgccaaggtcatcacca

SEQ ID NO: 508 - DNA, 21 bp, Artificial Sequence
  Synthetic
ccttggcgtagcagttaggct

SEQ ID NO: 509 - DNA, 21 bp, Artificial Sequence
  Synthetic
tcgcggctgacgagatggtca

SEQ ID NO: 510 - DNA, 21 bp, Artificial Sequence
  Synthetic
gctatgccaaggtgatcacgg

SEQ ID NO: 511 - DNA, 21 bp, Artificial Sequence
  Synthetic
gtggagaggtactcgatcata

SEQ ID NO: 512 - DNA, 21 bp, Artificial Sequence
  Synthetic
aagagtttaaagctcgagtga

SEQ ID NO: 513 - DNA, 21 bp, Artificial Sequence
  Synthetic
agagcaacaagagatatcaag

SEQ ID NO: 514 - DNA, 21 bp, Artificial Sequence
  Synthetic
atcccataaaggaatcagagc

SEQ ID NO: 515 - DNA, 21 bp, Artificial Sequence
  Synthetic
ttcagcaggtccaggtacgga

SEQ ID NO: 516 - DNA, 21 bp, Artificial Sequence
  Synthetic
aagagcagagagcccacgtgc

SEQ ID NO: 517 - DNA, 21 bp, Artificial Sequence
  Synthetic
ttcaatggtgtagagatgtgt

SEQ ID NO: 518 - DNA, 21 bp, Artificial Sequence
  Synthetic
acatctctacaccattgaatt

SEQ ID NO: 519 - DNA, 21 bp, Artificial Sequence
  Synthetic
aggatttggccaacatccgca

SEQ ID NO: 520 - DNA, 21 bp, Artificial Sequence
  Synthetic
acaagggccaccagctggtgg

SEQ ID NO: 521 - DNA, 21 bp, Artificial Sequence
  Synthetic
gaccgtttcttcatcaaggga

SEQ ID NO: 522 - DNA, 21 bp, Artificial Sequence
  Synthetic
tgcatttgatgggcccaaaac

SEQ ID NO: 523 - DNA, 21 bp, Artificial Sequence
  Synthetic
atccctttgtcattcccatca

SEQ ID NO: 524 - DNA, 21 bp, Artificial Sequence
  Synthetic
tgacatactgtcccacagcca

SEQ ID NO: 525 - DNA, 21 bp, Artificial Sequence
  Synthetic
acagcggtacagaggaccctg

SEQ ID NO: 526 - DNA, 21 bp, Artificial Sequence
  Synthetic
gctaccagtacaagagactag

SEQ ID NO: 527 - DNA, 21 bp, Artificial Sequence
  Synthetic
taatcgacaattgtgtcaaaa

SEQ ID NO: 528 - DNA, 21 bp, Artificial Sequence
  Synthetic
actcaagttcaaaccatgttg

SEQ ID NO: 529 - DNA, 21 bp, Artificial Sequence
  Synthetic
cagatcctatatctctaaggc

SEQ ID NO: 530 - DNA, 21 bp, Artificial Sequence
  Synthetic
tttggctcacaagaatgatta

SEQ ID NO: 531 - DNA, 21 bp, Artificial Sequence
  Synthetic
cttactgcatgaagtctttcc

SEQ ID NO: 532 - DNA, 21 bp, Artificial Sequence
  Synthetic
agaagagcaaaaaaagattga

SEQ ID NO: 533 - DNA, 21 bp, Artificial Sequence
  Synthetic
aggaggaagttgaggagggcc

SEQ ID NO: 534 - DNA, 21 bp, Artificial Sequence
  Synthetic
tgtgataaactacaaagatag

SEQ ID NO: 535 - DNA, 21 bp, Artificial Sequence
  Synthetic
tgccctcgcgaaaggagctgc

SEQ ID NO: 536 - DNA, 21 bp, Artificial Sequence
  Synthetic
gtgcgacatgtctgcgctgca

SEQ ID NO: 537 - DNA, 21 bp, Artificial Sequence
  Synthetic
agtgaacctaaagcacccaag

SEQ ID NO: 538 - DNA, 21 bp, Artificial Sequence
  Synthetic
cccaagaagagaaattgtttg

SEQ ID NO: 539 - DNA, 21 bp, Artificial Sequence
  Synthetic
taccccccaagaaagatcgaa

SEQ ID NO: 540 - DNA, 21 bp, Artificial Sequence
  Synthetic
aatctgttgaaaagacccaaa

SEQ ID NO: 541 - DNA, 21 bp, Artificial Sequence
  Synthetic
acttcgctactgtgatgccaa

SEQ ID NO: 542 - DNA, 21 bp, Artificial Sequence
  Synthetic
gcagctatgccggtcctaaag

SEQ ID NO: 543 - DNA, 21 bp, Artificial Sequence
  Synthetic
cgatggctggcacaaacgtca

SEQ ID NO: 544 - DNA, 21 bp, Artificial Sequence
  Synthetic
tggcaatctccactgtgggca

SEQ ID NO: 545 - DNA, 21 bp, Artificial Sequence
  Synthetic
tgcgattacaagaagatccgc

SEQ ID NO: 546 - DNA, 21 bp, Artificial Sequence
  Synthetic
ttcgcaagaacagcttcgtca

SEQ ID NO: 547 - DNA, 21 bp, Artificial Sequence
  Synthetic
acccttgtgaagattaaaaga

SEQ ID NO: 548 - DNA, 21 bp, Artificial Sequence
  Synthetic
taacgaatacaaaccagctcc

SEQ ID NO: 549 - DNA, 21 bp, Artificial Sequence
  Synthetic
ccaggctcacctggtccttgt

SEQ ID NO: 550 - DNA, 21 bp, Artificial Sequence
  Synthetic
gcggggcctcagtacacggag

SEQ ID NO: 551 - DNA, 21 bp, Artificial Sequence
  Synthetic
cgggtcatggcggagccacag

SEQ ID NO: 552 - DNA, 21 bp, Artificial Sequence
  Synthetic
ccttgttgacaaagccccaga

SEQ ID NO: 553 - DNA, 20 bp, Artificial Sequence
  Synthetic
gtagaaccgacctttgtcgg

SEQ ID NO: 554 - DNA, 20 bp, Artificial Sequence
  Synthetic
atagcggatgtccttggaaa

SEQ ID NO: 555 - DNA, 20 bp, Artificial Sequence
  Synthetic
cacgaactcacaccgcgcga

SEQ ID NO: 556 - DNA, 20 bp, Artificial Sequence
  Synthetic
ccagaaagcctctccattac

SEQ ID NO: 557 - DNA, 20 bp, Artificial Sequence
  Synthetic
ccagagccttggtttatatc

SEQ ID NO: 558 - DNA, 20 bp, Artificial Sequence
  Synthetic
gatgtgatctatggttgcga

SEQ ID NO: 559 - DNA, 20 bp, Artificial Sequence
  Synthetic
gtgtcggattccgccgctta

SEQ ID NO: 560 - DNA, 20 bp, Artificial Sequence
  Synthetic
tcactttacacttgtagtgt

SEQ ID NO: 561 - DNA, 20 bp, Artificial Sequence
  Synthetic
acacgagcagtgggacctgg

SEQ ID NO: 562 - DNA, 20 bp, Artificial Sequence
  Synthetic
cacctggggatctcccggag

SEQ ID NO: 563 - DNA, 20 bp, Artificial Sequence
  Synthetic
tgagcctgagaggaagatgt

SEQ ID NO: 564 - DNA, 20 bp, Artificial Sequence
  Synthetic
gcctgagaggaagatgtggg

SEQ ID NO: 565 - DNA, 20 bp, Artificial Sequence
  Synthetic
gtctgcgtcaaagagatcgg

SEQ ID NO: 566 - DNA, 20 bp, Artificial Sequence
  Synthetic
ctggcaaccaacctaaacgt

SEQ ID NO: 567 - DNA, 20 bp, Artificial Sequence
  Synthetic
gtttctgagaagaatcagtg

SEQ ID NO: 568 - DNA, 20 bp, Artificial Sequence
  Synthetic
ggtttctgagaagaatcagt

SEQ ID NO: 569 - DNA, 20 bp, Artificial Sequence
  Synthetic
ccagtgcagccttcaccctg

SEQ ID NO: 570 - DNA, 20 bp, Artificial Sequence
  Synthetic
gtgctggtgacggagaaggg

SEQ ID NO: 571 - DNA, 20 bp, Artificial Sequence
  Synthetic
ctgcgtcctgagggtgaagg

SEQ ID NO: 572 - DNA, 20 bp, Artificial Sequence
  Synthetic
ttcgtctttatgcagaagag

SEQ ID NO: 573 - DNA, 20 bp, Artificial Sequence
  Synthetic
cctacccaccaccatcacct

SEQ ID NO: 574 - DNA, 20 bp, Artificial Sequence
  Synthetic
gcttcgccatgatgggcacg

SEQ ID NO: 575 - DNA, 20 bp, Artificial Sequence
  Synthetic
agactggtttatcatcaggg

SEQ ID NO: 576 - DNA, 20 bp, Artificial Sequence
  Synthetic
tgaaagtaaaatatggacga

SEQ ID NO: 577 - DNA, 20 bp, Artificial Sequence
  Synthetic
caggcatgaaagtccaagtg

SEQ ID NO: 578 - DNA, 20 bp, Artificial Sequence
  Synthetic
ctgcagctgaatttaagaca

SEQ ID NO: 579 - DNA, 20 bp, Artificial Sequence
  Synthetic
aacgtgtacgacgagctggg

SEQ ID NO: 580 - DNA, 20 bp, Artificial Sequence
  Synthetic
cagcctctacaagttcatga

SEQ ID NO: 581 - DNA, 20 bp, Artificial Sequence
  Synthetic
caagctgctcaaaaactggg

SEQ ID NO: 582 - DNA, 20 bp, Artificial Sequence
  Synthetic
aaatatgtttccactgacgg

SEQ ID NO: 583 - DNA, 20 bp, Artificial Sequence
  Synthetic
gatcaccttcgagtgcatcg

SEQ ID NO: 584 - DNA, 20 bp, Artificial Sequence
  Synthetic
ctaattacttgtacctatcg

SEQ ID NO: 585 - DNA, 20 bp, Artificial Sequence
  Synthetic
gaggaccacagtcacaccca

SEQ ID NO: 586 - DNA, 20 bp, Artificial Sequence
  Synthetic
gaagccagatttctcccagg

SEQ ID NO: 587 - DNA, 20 bp, Artificial Sequence
  Synthetic
atccataagagctagcaggg

SEQ ID NO: 588 - DNA, 20 bp, Artificial Sequence
  Synthetic
attaaactaatacctcatca

SEQ ID NO: 589 - DNA, 20 bp, Artificial Sequence
  Synthetic
aatccagataaggacccagg

SEQ ID NO: 590 - DNA, 20 bp, Artificial Sequence
  Synthetic
agataaagaaaaattacctg

SEQ ID NO: 591 - DNA, 20 bp, Artificial Sequence
  Synthetic
tgaattctatacgatcaagg

SEQ ID NO: 592 - DNA, 20 bp, Artificial Sequence
  Synthetic
tgacaaactggatttcagca

SEQ ID NO: 593 - DNA, 20 bp, Artificial Sequence
  Synthetic
tttgcttcacttgtgttacg

SEQ ID NO: 594 - DNA, 20 bp, Artificial Sequence
  Synthetic
ctgtgttcgaccaaagctca

SEQ ID NO: 595 - DNA, 20 bp, Artificial Sequence
  Synthetic
taagaaactcctgcacagag

SEQ ID NO: 596 - DNA, 20 bp, Artificial Sequence
  Synthetic
gccctctatgaagtaccaga

SEQ ID NO: 597 - DNA, 20 bp, Artificial Sequence
  Synthetic
ggtacccactcaccaaacgt

SEQ ID NO: 598 - DNA, 20 bp, Artificial Sequence
  Synthetic
ttagtacctgagccgcaacg

SEQ ID NO: 599 - DNA, 20 bp, Artificial Sequence
  Synthetic
caagaataagaaactttgga

SEQ ID NO: 600 - DNA, 20 bp, Artificial Sequence
  Synthetic
aagattacaacaatcccaga

SEQ ID NO: 601 - DNA, 20 bp, Artificial Sequence
  Synthetic
tgtgaagccacctcttgagg

SEQ ID NO: 602 - DNA, 20 bp, Artificial Sequence
  Synthetic
acgatattatgaaaagctga

SEQ ID NO: 603 - DNA, 20 bp, Artificial Sequence
  Synthetic
tgtagtttcacagcatccac

SEQ ID NO: 604 - DNA, 20 bp, Artificial Sequence
  Synthetic
tgacgttgtcaaaaatccga

SEQ ID NO: 605 - DNA, 20 bp, Artificial Sequence
  Synthetic
ggttgtcaaagatgctgatg

SEQ ID NO: 606 - DNA, 20 bp, Artificial Sequence
  Synthetic
attcggttacctcagacaga

SEQ ID NO: 607 - DNA, 20 bp, Artificial Sequence
  Synthetic
tgcagaggtagagtatgaca

SEQ ID NO: 608 - DNA, 20 bp, Artificial Sequence
  Synthetic
gcaggcggacagctgctcgg

SEQ ID NO: 609 - DNA, 20 bp, Artificial Sequence
  Synthetic
tggagcacggaaaatctacg

SEQ ID NO: 610 - DNA, 20 bp, Artificial Sequence
  Synthetic
gctgaacacagaccgctcca

SEQ ID NO: 611 - DNA, 20 bp, Artificial Sequence
  Synthetic
tttcagtgaggacaacacat

SEQ ID NO: 612 - DNA, 20 bp, Artificial Sequence
  Synthetic
gtttcagtgaggacaacaca

SEQ ID NO: 613 - DNA, 20 bp, Artificial Sequence
  Synthetic
cttgctcaggatgcactcgg

SEQ ID NO: 614 - DNA, 20 bp, Artificial Sequence
  Synthetic
gctttgcagacataacagct

SEQ ID NO: 615 - DNA, 20 bp, Artificial Sequence
  Synthetic
acacagtgctgacaatactt

SEQ ID NO: 616 - DNA, 20 bp, Artificial Sequence
  Synthetic
aacacagtgctgacaatact

SEQ ID NO: 617 - DNA, 20 bp, Artificial Sequence
  Synthetic
ccttgcaagatataacacgt

SEQ ID NO: 618 - DNA, 20 bp, Artificial Sequence
  Synthetic
gagtatctggtgaaatggag

SEQ ID NO: 619 - DNA, 20 bp, Artificial Sequence
  Synthetic
gaaggtgctagacaggcgcg

SEQ ID NO: 620 - DNA, 20 bp, Artificial Sequence
  Synthetic
ggatgaggaggagtatgttg

SEQ ID NO: 621 - DNA, 20 bp, Artificial Sequence
  Synthetic
ccgaatccatcatcaaacgg

SEQ ID NO: 622 - DNA, 20 bp, Artificial Sequence
  Synthetic
actcggcaggtacagcactt

SEQ ID NO: 623 - DNA, 20 bp, Artificial Sequence
  Synthetic
gacaccgtacttctcctcgt

SEQ ID NO: 624 - DNA, 20 bp, Artificial Sequence
  Synthetic
gcatccggaagaagcgcgtg

SEQ ID NO: 625 - DNA, 20 bp, Artificial Sequence
  Synthetic
gtacagcacatgggaaccgg

SEQ ID NO: 626 - DNA, 20 bp, Artificial Sequence
  Synthetic
tccctttaggtacagcacat

SEQ ID NO: 627 - DNA, 20 bp, Artificial Sequence
  Synthetic
gtggaaaggctatgacagcg

SEQ ID NO: 628 - DNA, 20 bp, Artificial Sequence
  Synthetic
acagcacctcgtgaactgtg

SEQ ID NO: 629 - DNA, 20 bp, Artificial Sequence
  Synthetic
gaaaggctacgggagcaccg

SEQ ID NO: 630 - DNA, 20 bp, Artificial Sequence
  Synthetic
cgggagcaccgaggacacgt

SEQ ID NO: 631 - DNA, 20 bp, Artificial Sequence
  Synthetic
aggtttatactgtaccaagg

SEQ ID NO: 632 - DNA, 20 bp, Artificial Sequence
  Synthetic
atggagaagaaactgaatgg

SEQ ID NO: 633 - DNA, 20 bp, Artificial Sequence
  Synthetic
ggactgctcagcaaccacac

SEQ ID NO: 634 - DNA, 20 bp, Artificial Sequence
  Synthetic
agtcatcattgatttgacag

SEQ ID NO: 635 - DNA, 20 bp, Artificial Sequence
  Synthetic
ctcaccatgaaatgtcactg

SEQ ID NO: 636 - DNA, 20 bp, Artificial Sequence
  Synthetic
ttggtattgacagatctgga

SEQ ID NO: 637 - DNA, 20 bp, Artificial Sequence
  Synthetic
tccatgtccttcaacaccaa

SEQ ID NO: 638 - DNA, 20 bp, Artificial Sequence
  Synthetic
cgcgcgcagagtaggcctgg

SEQ ID NO: 639 - DNA, 20 bp, Artificial Sequence
  Synthetic
tcaagcggaagctggacaca

SEQ ID NO: 640 - DNA, 20 bp, Artificial Sequence
  Synthetic
tgacatcgtaaagaatccca

SEQ ID NO: 641 - DNA, 20 bp, Artificial Sequence
  Synthetic
attaacggaacatatagcat

SEQ ID NO: 642 - DNA, 20 bp, Artificial Sequence
  Synthetic
gcagcgatgacttcagagcg

SEQ ID NO: 643 - DNA, 20 bp, Artificial Sequence
  Synthetic
ctgcaatgagtggttccatg

SEQ ID NO: 644 - DNA, 20 bp, Artificial Sequence
  Synthetic
tgaggcatgtcggcgcactg

SEQ ID NO: 645 - DNA, 20 bp, Artificial Sequence
  Synthetic
cccaactcaccccagcaccg

SEQ ID NO: 646 - DNA, 20 bp, Artificial Sequence
  Synthetic
caaaaagaaagtgacgcatg

SEQ ID NO: 647 - DNA, 20 bp, Artificial Sequence
  Synthetic
catgaaaccattcttcacag

SEQ ID NO: 648 - DNA, 20 bp, Artificial Sequence
  Synthetic
ccagcctcacaacaacaggt

SEQ ID NO: 649 - DNA, 20 bp, Artificial Sequence
  Synthetic
ataaacagtagaaacttgag

SEQ ID NO: 650 - DNA, 20 bp, Artificial Sequence
  Synthetic
ctacgagcccttctcccccg

SEQ ID NO: 651 - DNA, 20 bp, Artificial Sequence
  Synthetic
ctgcctgagtccccccatgg

SEQ ID NO: 652 - DNA, 20 bp, Artificial Sequence
  Synthetic
ggcactcacgtcgttctcgg

SEQ ID NO: 653 - DNA, 20 bp, Artificial Sequence
  Synthetic
gatacacacgtcattctcgg

SEQ ID NO: 654 - DNA, 20 bp, Artificial Sequence
  Synthetic
acggggtgagacagtacatg

SEQ ID NO: 655 - DNA, 20 bp, Artificial Sequence
  Synthetic
gtactgtttaaatcccccgg

SEQ ID NO: 656 - DNA, 20 bp, Artificial Sequence
  Synthetic
caaactcacatcattctctg

SEQ ID NO: 657 - DNA, 20 bp, Artificial Sequence
  Synthetic
aagagaatgatccataccac

SEQ ID NO: 658 - DNA, 20 bp, Artificial Sequence
  Synthetic
acaatgcagtgtataaaggt

SEQ ID NO: 659 - DNA, 20 bp, Artificial Sequence
  Synthetic
tctgcgtgactgtcaaactg

SEQ ID NO: 660 - DNA, 20 bp, Artificial Sequence
  Synthetic
ctgtatgcaattgactcggg

SEQ ID NO: 661 - DNA, 20 bp, Artificial Sequence
  Synthetic
agaatagctagagaagaaca

SEQ ID NO: 662 - DNA, 20 bp, Artificial Sequence
  Synthetic
actttccgtttcgaattggg

SEQ ID NO: 663 - DNA, 20 bp, Artificial Sequence
  Synthetic
taatggtagaaagatccatg

SEQ ID NO: 664 - DNA, 20 bp, Artificial Sequence
  Synthetic
gaagggattctggatcctga

SEQ ID NO: 665 - DNA, 20 bp, Artificial Sequence
  Synthetic
tgggaccaggaagtgcacca

SEQ ID NO: 666 - DNA, 20 bp, Artificial Sequence
  Synthetic
gccccggaagaactgagtgt

SEQ ID NO: 667 - DNA, 20 bp, Artificial Sequence
  Synthetic
ggtcgggcagatcctcacag

SEQ ID NO: 668 - DNA, 20 bp, Artificial Sequence
  Synthetic
cttgatgactcagtgcactg

SEQ ID NO: 669 - DNA, 20 bp, Artificial Sequence
  Synthetic
ccactgcagatgcagcaaag

SEQ ID NO: 670 - DNA, 20 bp, Artificial Sequence
  Synthetic
gatcaggcatgtccttgccg

SEQ ID NO: 671 - DNA, 20 bp, Artificial Sequence
  Synthetic
ggattgggatctttgccaag

SEQ ID NO: 672 - DNA, 20 bp, Artificial Sequence
  Synthetic
caggatgaggctgatcgacg

SEQ ID NO: 673 - DNA, 20 bp, Artificial Sequence
  Synthetic
cccgcactcagttcgcacac

SEQ ID NO: 674 - DNA, 20 bp, Artificial Sequence
  Synthetic
ccgagacatgaagaagttcg

SEQ ID NO: 675 - DNA, 20 bp, Artificial Sequence
  Synthetic
taagcgaaatagtacccatg

SEQ ID NO: 676 - DNA, 20 bp, Artificial Sequence
  Synthetic
ctgagtcaacggaagccacg

SEQ ID NO: 677 - DNA, 20 bp, Artificial Sequence
  Synthetic
atgggctaggaaacactgga

SEQ ID NO: 678 - DNA, 20 bp, Artificial Sequence
  Synthetic
gccatttccttgtctctgcg

SEQ ID NO: 679 - DNA, 20 bp, Artificial Sequence
  Synthetic
tgtgtgcggtggtcaaacag

SEQ ID NO: 680 - DNA, 20 bp, Artificial Sequence
  Synthetic
aagctatgtatttaccaaca

SEQ ID NO: 681 - DNA, 20 bp, Artificial Sequence
  Synthetic
tcaccatctggagaaagcgg

SEQ ID NO: 682 - DNA, 20 bp, Artificial Sequence
  Synthetic
gcagccaggtcagcactgtg

SEQ ID NO: 683 - DNA, 20 bp, Artificial Sequence
  Synthetic
tgacctcaccttcagcactg

SEQ ID NO: 684 - DNA, 20 bp, Artificial Sequence
  Synthetic
catggacatgggcttcacaa

SEQ ID NO: 685 - DNA, 20 bp, Artificial Sequence
  Synthetic
ccctcaggtcaccatcctgg

SEQ ID NO: 686 - DNA, 20 bp, Artificial Sequence
  Synthetic
gaaggtgctgaaggccgacg

SEQ ID NO: 687 - DNA, 20 bp, Artificial Sequence
  Synthetic
gtactgtcccaagtgccggg

SEQ ID NO: 688 - DNA, 20 bp, Artificial Sequence
  Synthetic
ccacctggtgaactatgtgg

SEQ ID NO: 689 - DNA, 20 bp, Artificial Sequence
  Synthetic
acgttcctctgcatgtcgtg

SEQ ID NO: 690 - DNA, 20 bp, Artificial Sequence
  Synthetic
atgcaaccaagtgtcttatg

SEQ ID NO: 691 - DNA, 20 bp, Artificial Sequence
  Synthetic
tggctgcgttggattgacag

SEQ ID NO: 692 - DNA, 20 bp, Artificial Sequence
  Synthetic
caaagaaaaataaacctgag

SEQ ID NO: 693 - DNA, 20 bp, Artificial Sequence
  Synthetic
ggacctagaccaaagaacag

SEQ ID NO: 694 - DNA, 20 bp, Artificial Sequence
  Synthetic
aggtggacaaacacattcgg

SEQ ID NO: 695 - DNA, 20 bp, Artificial Sequence
  Synthetic
atagtgctccaagtacatgg

SEQ ID NO: 696 - DNA, 20 bp, Artificial Sequence
  Synthetic
tttcgtggtaaggtccacgc

SEQ ID NO: 697 - DNA, 20 bp, Artificial Sequence
  Synthetic
aggatgtaaagtatttccag

SEQ ID NO: 698 - DNA, 20 bp, Artificial Sequence
  Synthetic
gaccccaattcagaacacca

SEQ ID NO: 699 - DNA, 20 bp, Artificial Sequence
  Synthetic
ggggtttatgacaatctcgg

SEQ ID NO: 700 - DNA, 20 bp, Artificial Sequence
  Synthetic
aacttacctacaaacaacgc

SEQ ID NO: 701 - DNA, 20 bp, Artificial Sequence
  Synthetic
tgaactagatgaatacacca

SEQ ID NO: 702 - DNA, 20 bp, Artificial Sequence
  Synthetic
tgaagatcgaaagccttcag

SEQ ID NO: 703 - DNA, 20 bp, Artificial Sequence
  Synthetic
gaacgaaaagaagccctccg

SEQ ID NO: 704 - DNA, 20 bp, Artificial Sequence
  Synthetic
ctcatcactacccacctcgg

SEQ ID NO: 705 - DNA, 20 bp, Artificial Sequence
  Synthetic
tgaacacaagaaacctgctg

SEQ ID NO: 706 - DNA, 20 bp, Artificial Sequence
  Synthetic
gagcagtgaatatacttccg

SEQ ID NO: 707 - DNA, 20 bp, Artificial Sequence
  Synthetic
ttggtctcgagaccagcatg

SEQ ID NO: 708 - DNA, 20 bp, Artificial Sequence
  Synthetic
caaatctcagggcatcacca

SEQ ID NO: 709 - DNA, 20 bp, Artificial Sequence
  Synthetic
gcaaaacaatagcatcacca

SEQ ID NO: 710 - DNA, 20 bp, Artificial Sequence
  Synthetic
gtgaaatacctggtgctctg

SEQ ID NO: 711 - DNA, 20 bp, Artificial Sequence
  Synthetic
ttaccaggttgtgcacctgg

SEQ ID NO: 712 - DNA, 20 bp, Artificial Sequence
  Synthetic
gagatggtgtttgtgcccag

SEQ ID NO: 713 - DNA, 20 bp, Artificial Sequence
  Synthetic
gtttcctaccagcactccca

SEQ ID NO: 714 - DNA, 20 bp, Artificial Sequence
  Synthetic
atcccagttccggagcgtgg

SEQ ID NO: 715 - DNA, 20 bp, Artificial Sequence
  Synthetic
gctcagacacctattaccag

SEQ ID NO: 716 - DNA, 20 bp, Artificial Sequence
  Synthetic
tgccccatgatgtggcatcg

SEQ ID NO: 717 - DNA, 20 bp, Artificial Sequence
  Synthetic
aaaaccatggaactacccaa

SEQ ID NO: 718 - DNA, 20 bp, Artificial Sequence
  Synthetic
ttactttcttctagtccaag

SEQ ID NO: 719 - DNA, 20 bp, Artificial Sequence
  Synthetic
tatagtaaaagacatccctg

SEQ ID NO: 720 - DNA, 20 bp, Artificial Sequence
  Synthetic
gccggggttcttctccacgg

SEQ ID NO: 721 - DNA, 20 bp, Artificial Sequence
  Synthetic
cttgtccctagttacacagg

SEQ ID NO: 722 - DNA, 20 bp, Artificial Sequence
  Synthetic
catctgaagagcaggcaagg

SEQ ID NO: 723 - DNA, 20 bp, Artificial Sequence
  Synthetic
tgccgtaagtctgtcccatg

SEQ ID NO: 724 - DNA, 20 bp, Artificial Sequence
  Synthetic
caactctttcccatccacat

SEQ ID NO: 725 - DNA, 20 bp, Artificial Sequence
  Synthetic
ggaagtttaaggaagctgag

SEQ ID NO: 726 - DNA, 20 bp, Artificial Sequence
  Synthetic
tacagctgctgaggtaaccg

SEQ ID NO: 727 - DNA, 20 bp, Artificial Sequence
  Synthetic
catcatacttcccagcagag

SEQ ID NO: 728 - DNA, 20 bp, Artificial Sequence
  Synthetic
ggacacggaagcttaagcaa

SEQ ID NO: 729 - DNA, 20 bp, Artificial Sequence
  Synthetic
agtgaacatcgacatcagtg

SEQ ID NO: 730 - DNA, 20 bp, Artificial Sequence
  Synthetic
aggaatgtaatgccacccga

SEQ ID NO: 731 - DNA, 20 bp, Artificial Sequence
  Synthetic
acctttgcttcataaagaag

SEQ ID NO: 732 - DNA, 20 bp, Artificial Sequence
  Synthetic
gcctcttctttatgaagcaa

SEQ ID NO: 733 - DNA, 20 bp, Artificial Sequence
  Synthetic
acagcactttctcccctgag

SEQ ID NO: 734 - DNA, 20 bp, Artificial Sequence
  Synthetic
gaaatttaaattccactcag

SEQ ID NO: 735 - DNA, 20 bp, Artificial Sequence
  Synthetic
atacctgatccggagaatcg

SEQ ID NO: 736 - DNA, 20 bp, Artificial Sequence
  Synthetic
catggccgccaacatgtaca

SEQ ID NO: 737 - DNA, 20 bp, Artificial Sequence
  Synthetic
agaggaatcaaagcagccag

SEQ ID NO: 738 - DNA, 20 bp, Artificial Sequence
  Synthetic
acggattgaggagctcaaca

SEQ ID NO: 739 - DNA, 20 bp, Artificial Sequence
  Synthetic
aaggatagaagaactcaaca

SEQ ID NO: 740 - DNA, 20 bp, Artificial Sequence
  Synthetic
ttagactgcaagtggcaacg

SEQ ID NO: 741 - DNA, 20 bp, Artificial Sequence
  Synthetic
atggttatatgtgacaagtg

SEQ ID NO: 742 - DNA, 20 bp, Artificial Sequence
  Synthetic
cagatgaaaaatggctctgt

SEQ ID NO: 743 - DNA, 20 bp, Artificial Sequence
  Synthetic
attcacgatgaaaagcagca

SEQ ID NO: 744 - DNA, 20 bp, Artificial Sequence
  Synthetic
gtgaatggagatacccgtgt

SEQ ID NO: 745 - DNA, 20 bp, Artificial Sequence
  Synthetic
atctcaagaccattgcccag

SEQ ID NO: 746 - DNA, 20 bp, Artificial Sequence
  Synthetic
taccgagaatacatgtcatg

SEQ ID NO: 747 - DNA, 20 bp, Artificial Sequence
  Synthetic
cgatcgcaaagacacactgg

SEQ ID NO: 748 - DNA, 20 bp, Artificial Sequence
  Synthetic
cagagcgacagacacaacag

SEQ ID NO: 749 - DNA, 20 bp, Artificial Sequence
  Synthetic
tacctgatggaatagcacca

SEQ ID NO: 750 - DNA, 20 bp, Artificial Sequence
  Synthetic
ggatttgtgactgttgtcag

SEQ ID NO: 751 - DNA, 20 bp, Artificial Sequence
  Synthetic
ggacacatccatctgcccag

SEQ ID NO: 752 - DNA, 20 bp, Artificial Sequence
  Synthetic
actggatgagaggagccaca

SEQ ID NO: 753 - DNA, 20 bp, Artificial Sequence
  Synthetic
cattacactcgatcatgggg

SEQ ID NO: 754 - DNA, 20 bp, Artificial Sequence
  Synthetic
aggacaggtgaatccaggtg

SEQ ID NO: 755 - DNA, 20 bp, Artificial Sequence
  Synthetic
ttacaggcatcacaaaacca

SEQ ID NO: 756 - DNA, 20 bp, Artificial Sequence
  Synthetic
ttgtctgggagataatagtg

SEQ ID NO: 757 - DNA, 20 bp, Artificial Sequence
  Synthetic
cagatgaggatctcattcag

SEQ ID NO: 758 - DNA, 20 bp, Artificial Sequence
  Synthetic
ccagtgcgaagatgcagcgt

SEQ ID NO: 759 - DNA, 20 bp, Artificial Sequence
  Synthetic
gaaggccaggcagtccacag

SEQ ID NO: 760 - DNA, 20 bp, Artificial Sequence
  Synthetic
tgaagcgggtaacgtcgtag

SEQ ID NO: 761 - DNA, 20 bp, Artificial Sequence
  Synthetic
cctctgaaaacaattcccaa

SEQ ID NO: 762 - DNA, 20 bp, Artificial Sequence
  Synthetic
gcagtccaaatgatatacac

SEQ ID NO: 763 - DNA, 20 bp, Artificial Sequence
  Synthetic
ttgggcgccgtcttgagggg

SEQ ID NO: 764 - DNA, 20 bp, Artificial Sequence
  Synthetic
ggggccaacctgcagccctg

SEQ ID NO: 765 - DNA, 20 bp, Artificial Sequence
  Synthetic
actgtcgaaagccctttgca

SEQ ID NO: 766 - DNA, 20 bp, Artificial Sequence
  Synthetic
tctggcaataaaagaagtcg

SEQ ID NO: 767 - DNA, 20 bp, Artificial Sequence
  Synthetic
cacacacacctgttgccatg

SEQ ID NO: 768 - DNA, 20 bp, Artificial Sequence
  Synthetic
ggactcccagcaagcagtgt

SEQ ID NO: 769 - DNA, 20 bp, Artificial Sequence
  Synthetic
gagtacatggtaccagacag

SEQ ID NO: 770 - DNA, 20 bp, Artificial Sequence
  Synthetic
gatgttctttggggaccagg

SEQ ID NO: 771 - DNA, 20 bp, Artificial Sequence
  Synthetic
ataggcttgcagatccacgg

SEQ ID NO: 772 - DNA, 20 bp, Artificial Sequence
  Synthetic
tgatggaaacgtgatagtgt

SEQ ID NO: 773 - DNA, 20 bp, Artificial Sequence
  Synthetic
gggggtccaagcattccatg

SEQ ID NO: 774 - DNA, 20 bp, Artificial Sequence
  Synthetic
ggaggacccgaccttctgtg

SEQ ID NO: 775 - DNA, 20 bp, Artificial Sequence
  Synthetic
tcgtttgtacaaattccaca

SEQ ID NO: 776 - DNA, 20 bp, Artificial Sequence
  Synthetic
tcaggatgccatcttatgtg

SEQ ID NO: 777 - DNA, 20 bp, Artificial Sequence
  Synthetic
cactccgacaggcaccacat

SEQ ID NO: 778 - DNA, 20 bp, Artificial Sequence
  Synthetic
tcatgcctgtgcactcacgg

SEQ ID NO: 779 - DNA, 20 bp, Artificial Sequence
  Synthetic
ggtgaagaactggtacaatg

SEQ ID NO: 780 - DNA, 20 bp, Artificial Sequence
  Synthetic
gaaggattcatgaaccagcg

SEQ ID NO: 781 - DNA, 20 bp, Artificial Sequence
  Synthetic
ccatgcaccagtactcaatg

SEQ ID NO: 782 - DNA, 20 bp, Artificial Sequence
  Synthetic
cattgagtactggtgcatgg

SEQ ID NO: 783 - DNA, 20 bp, Artificial Sequence
  Synthetic
gtacatagactgttgccttg

SEQ ID NO: 784 - DNA, 20 bp, Artificial Sequence
  Synthetic
atttaagaccatctgcctgt

SEQ ID NO: 785 - DNA, 20 bp, Artificial Sequence
  Synthetic
ctgataacatagtgtcacag

SEQ ID NO: 786 - DNA, 20 bp, Artificial Sequence
  Synthetic
tgataacatagtgtcacagt

SEQ ID NO: 787 - DNA, 20 bp, Artificial Sequence
  Synthetic
catcctctacaacagctgag

SEQ ID NO: 788 - DNA, 20 bp, Artificial Sequence
  Synthetic
aaatgacccaaggctcattg

SEQ ID NO: 789 - DNA, 20 bp, Artificial Sequence
  Synthetic
gcttccaggagcatgagaag

SEQ ID NO: 790 - DNA, 20 bp, Artificial Sequence
  Synthetic
tcaggttctgatgatgcaaa

SEQ ID NO: 791 - DNA, 20 bp, Artificial Sequence
  Synthetic
aggtacatactagctcagga

SEQ ID NO: 792 - DNA, 20 bp, Artificial Sequence
  Synthetic
ccatctgggatgatcatcag

SEQ ID NO: 793 - DNA, 20 bp, Artificial Sequence
  Synthetic
ttcaagctaccaaccagacc

SEQ ID NO: 794 - DNA, 20 bp, Artificial Sequence
  Synthetic
taataaagcacaacttgttg

SEQ ID NO: 795 - DNA, 20 bp, Artificial Sequence
  Synthetic
catgtagatgaagtaggcaa

SEQ ID NO: 796 - DNA, 20 bp, Artificial Sequence
  Synthetic
cttcaccatgtagatgaagt

SEQ ID NO: 797 - DNA, 20 bp, Artificial Sequence
  Synthetic
cctgtccaaaacataccttg

SEQ ID NO: 798 - DNA, 20 bp, Artificial Sequence
  Synthetic
acatttgtcaaccatccaca

SEQ ID NO: 799 - DNA, 20 bp, Artificial Sequence
  Synthetic
agtggcactccagtacagag

SEQ ID NO: 800 - DNA, 20 bp, Artificial Sequence
  Synthetic
gatgggtcttggaaagacag

SEQ ID NO: 801 - DNA, 20 bp, Artificial Sequence
  Synthetic
gggaagacccaataacaatg

SEQ ID NO: 802 - DNA, 20 bp, Artificial Sequence
  Synthetic
gatctgggaagtctacagca

SEQ ID NO: 803 - DNA, 20 bp, Artificial Sequence
  Synthetic
gtaccatcttccctacccag

SEQ ID NO: 804 - DNA, 20 bp, Artificial Sequence
  Synthetic
tggatggagagcgaaagtcg

SEQ ID NO: 805 - DNA, 20 bp, Artificial Sequence
  Synthetic
ctgccaaagacccttcccag

SEQ ID NO: 806 - DNA, 20 bp, Artificial Sequence
  Synthetic
acatgcagcaagaacctctg

SEQ ID NO: 807 - DNA, 20 bp, Artificial Sequence
  Synthetic
ggacacagtgaaccctgaca

SEQ ID NO: 808 - DNA, 20 bp, Artificial Sequence
  Synthetic
actacaggtcagaaaaagtg

SEQ ID NO: 809 - DNA, 20 bp, Artificial Sequence
  Synthetic
ccactagacataaatcacag

SEQ ID NO: 810 - DNA, 20 bp, Artificial Sequence
  Synthetic
ggctgctgggtacaccacag

SEQ ID NO: 811 - DNA, 20 bp, Artificial Sequence
  Synthetic
tcgctgcagatccggcccag

SEQ ID NO: 812 - DNA, 20 bp, Artificial Sequence
  Synthetic
tacgtccgagacacagtcgt

SEQ ID NO: 813 - DNA, 20 bp, Artificial Sequence
  Synthetic
cttcaatgtacatgttcccg

SEQ ID NO: 814 - DNA, 20 bp, Artificial Sequence
  Synthetic
cagacgggtgatgctcatgt

SEQ ID NO: 815 - DNA, 20 bp, Artificial Sequence
  Synthetic
gttatattaaagaagtccca

SEQ ID NO: 816 - DNA, 20 bp, Artificial Sequence
  Synthetic
gatgaatgccaggttgtcga

SEQ ID NO: 817 - DNA, 20 bp, Artificial Sequence
  Synthetic
ccaactacatgagtacagtg

SEQ ID NO: 818 - DNA, 20 bp, Artificial Sequence
  Synthetic
caaggaggagttctacacca

SEQ ID NO: 819 - DNA, 20 bp, Artificial Sequence
  Synthetic
acagcaagaggaaaccctag

SEQ ID NO: 820 - DNA, 20 bp, Artificial Sequence
  Synthetic
ttacctggtaaaaagcaaca

SEQ ID NO: 821 - DNA, 20 bp, Artificial Sequence
  Synthetic
attgaatatgaaacctccag

SEQ ID NO: 822 - DNA, 20 bp, Artificial Sequence
  Synthetic
cctgcatgatgagaaagtga

SEQ ID NO: 823 - DNA, 20 bp, Artificial Sequence
  Synthetic
ggatgcaagagataaaatgg

SEQ ID NO: 824 - DNA, 20 bp, Artificial Sequence
  Synthetic
acaaaagcagaaataacacg

SEQ ID NO: 825 - DNA, 20 bp, Artificial Sequence
  Synthetic
gatttcggttctaagcccag

SEQ ID NO: 826 - DNA, 20 bp, Artificial Sequence
  Synthetic
gaaatattaaatgaacacag

SEQ ID NO: 827 - DNA, 20 bp, Artificial Sequence
  Synthetic
atacctgtcaaaaaccactg

SEQ ID NO: 828 - DNA, 20 bp, Artificial Sequence
  Synthetic
tttactctcagtgatcagag

SEQ ID NO: 829 - DNA, 20 bp, Artificial Sequence
  Synthetic
cctgtgcaaagagtactacg

SEQ ID NO: 830 - DNA, 20 bp, Artificial Sequence
  Synthetic
agactgtaagactaacagca

SEQ ID NO: 831 - DNA, 20 bp, Artificial Sequence
  Synthetic
tgtacgccaagggatccgag

SEQ ID NO: 832 - DNA, 20 bp, Artificial Sequence
  Synthetic
agcggaagagtagctctccg

SEQ ID NO: 833 - DNA, 20 bp, Artificial Sequence
  Synthetic
cagaaacacagagagcacag

SEQ ID NO: 834 - DNA, 20 bp, Artificial Sequence
  Synthetic
ggacaccagagtcaccaatg

SEQ ID NO: 835 - DNA, 20 bp, Artificial Sequence
  Synthetic
aggcagaggagaatgcccag

SEQ ID NO: 836 - DNA, 20 bp, Artificial Sequence
  Synthetic
tctgcggagactcttcacag

SEQ ID NO: 837 - DNA, 20 bp, Artificial Sequence
  Synthetic
agggcccacagaagcccatg

SEQ ID NO: 838 - DNA, 20 bp, Artificial Sequence
  Synthetic
tcaccctgtaaaattccttg

SEQ ID NO: 839 - DNA, 20 bp, Artificial Sequence
  Synthetic
tcccgcctgtggaagctgag

SEQ ID NO: 840 - DNA, 20 bp, Artificial Sequence
  Synthetic
tacctctcagcttccacagg

SEQ ID NO: 841 - DNA, 20 bp, Artificial Sequence
  Synthetic
ggactgccacatcccacctg

SEQ ID NO: 842 - DNA, 20 bp, Artificial Sequence
  Synthetic
acttctcactttccacaggt

SEQ ID NO: 843 - DNA, 20 bp, Artificial Sequence
  Synthetic
gggagatggagttgaaacgg

SEQ ID NO: 844 - DNA, 20 bp, Artificial Sequence
  Synthetic
tcaaggaccacagctccatg

SEQ ID NO: 845 - DNA, 20 bp, Artificial Sequence
  Synthetic
acagtgttaagtataatggt

SEQ ID NO: 846 - DNA, 20 bp, Artificial Sequence
  Synthetic
acagacgttcacaatctcct

SEQ ID NO: 847 - DNA, 20 bp, Artificial Sequence
  Synthetic
caaaatgattgtcaatccag

SEQ ID NO: 848 - DNA, 20 bp, Artificial Sequence
  Synthetic
tgtcattgatgatagactcc

SEQ ID NO: 849 - DNA, 20 bp, Artificial Sequence
  Synthetic
gcagtcatgattccaacaca

SEQ ID NO: 850 - DNA, 20 bp, Artificial Sequence
  Synthetic
cgtcaggcttgttacaccca

SEQ ID NO: 851 - DNA, 20 bp, Artificial Sequence
  Synthetic
gctctgcagacagaactgtg

SEQ ID NO: 852 - DNA, 20 bp, Artificial Sequence
  Synthetic
gtgaacagactgtatcagtg

SEQ ID NO: 853 - DNA, 20 bp, Artificial Sequence
  Synthetic
gtacagcacgaggttcctcg

SEQ ID NO: 854 - DNA, 20 bp, Artificial Sequence
  Synthetic
ctcaccttcagtccagacag

SEQ ID NO: 855 - DNA, 20 bp, Artificial Sequence
  Synthetic
gaagaaaagaaagcgatgtg

SEQ ID NO: 856 - DNA, 20 bp, Artificial Sequence
  Synthetic
tgccagcagaagaccaactg

SEQ ID NO: 857 - DNA, 20 bp, Artificial Sequence
  Synthetic
agaactgcttgtgtccaagg

SEQ ID NO: 858 - DNA, 20 bp, Artificial Sequence
  Synthetic
ggaaggccgtccattctcag

SEQ ID NO: 859 - DNA, 20 bp, Artificial Sequence
  Synthetic
gtacttgtgagccctgccgg

SEQ ID NO: 860 - DNA, 20 bp, Artificial Sequence
  Synthetic
ctgcaaactgcgaaaatgtg

SEQ ID NO: 861 - DNA, 20 bp, Artificial Sequence
  Synthetic
aaactgtgctgaattcaatg

SEQ ID NO: 862 - DNA, 20 bp, Artificial Sequence
  Synthetic
tgtgcagtttgtcaaaacgg

SEQ ID NO: 863 - DNA, 20 bp, Artificial Sequence
  Synthetic
ccggcaggtgacagtccagg

SEQ ID NO: 864 - DNA, 20 bp, Artificial Sequence
  Synthetic
tcaccctggtacatcctgca

SEQ ID NO: 865 - DNA, 20 bp, Artificial Sequence
  Synthetic
tgtgctgtctgccaaaacgg

SEQ ID NO: 866 - DNA, 20 bp, Artificial Sequence
  Synthetic
cttgaagatcaaacggacat

SEQ ID NO: 867 - DNA, 20 bp, Artificial Sequence
  Synthetic
agctcactataccaccccag

SEQ ID NO: 868 - DNA, 20 bp, Artificial Sequence
  Synthetic
tggacctgtcaatcatccgg

SEQ ID NO: 869 - DNA, 20 bp, Artificial Sequence
  Synthetic
ctcaaaccatagcctcccag

SEQ ID NO: 870 - DNA, 20 bp, Artificial Sequence
  Synthetic
ggaaaatgtcttcatcacgt

SEQ ID NO: 871 - DNA, 20 bp, Artificial Sequence
  Synthetic
actcaccactcgtcctcgct

SEQ ID NO: 872 - DNA, 20 bp, Artificial Sequence
  Synthetic
gcaggtactgccctgagtgc

SEQ ID NO: 873 - DNA, 20 bp, Artificial Sequence
  Synthetic
tttcccaccacatacacgac

SEQ ID NO: 874 - DNA, 20 bp, Artificial Sequence
  Synthetic
gctcctgtcgtgtatgtggt

SEQ ID NO: 875 - DNA, 20 bp, Artificial Sequence
  Synthetic
gctgaataaatctatacaca

SEQ ID NO: 876 - DNA, 20 bp, Artificial Sequence
  Synthetic
aactgtatatgaaagttcca

SEQ ID NO: 877 - DNA, 20 bp, Artificial Sequence
  Synthetic
agtctgtgttcaccaatgag

SEQ ID NO: 878 - DNA, 20 bp, Artificial Sequence
  Synthetic
gggtgctggagaagaaggag

SEQ ID NO: 879 - DNA, 20 bp, Artificial Sequence
  Synthetic
gcatacagagggacacacgg

SEQ ID NO: 880 - DNA, 20 bp, Artificial Sequence
  Synthetic
aaaggaaagacttaaaacag

SEQ ID NO: 881 - DNA, 20 bp, Artificial Sequence
  Synthetic
ttagagtattcacatcccaa

SEQ ID NO: 882 - DNA, 20 bp, Artificial Sequence
  Synthetic
aaaggccttagcatatgcca

SEQ ID NO: 883 - DNA, 20 bp, Artificial Sequence
  Synthetic
gagacaataaggttggactg

SEQ ID NO: 884 - DNA, 20 bp, Artificial Sequence
  Synthetic
gaacttcacaaaagacacgg

SEQ ID NO: 885 - DNA, 20 bp, Artificial Sequence
  Synthetic
tgcaacgttcagcacccagg

SEQ ID NO: 886 - DNA, 20 bp, Artificial Sequence
  Synthetic
tgcttgggggacaaacaaga

SEQ ID NO: 887 - DNA, 20 bp, Artificial Sequence
  Synthetic
gtggtactgagttcataccg

SEQ ID NO: 888 - DNA, 20 bp, Artificial Sequence
  Synthetic
tggtagcaaagacatctggt

SEQ ID NO: 889 - DNA, 20 bp, Artificial Sequence
  Synthetic
aatatcctctttaggttcag

SEQ ID NO: 890 - DNA, 20 bp, Artificial Sequence
  Synthetic
taaggtgttccgcgaaaact

SEQ ID NO: 891 - DNA, 20 bp, Artificial Sequence
  Synthetic
caaacttgaaatgggctggg

SEQ ID NO: 892 - DNA, 20 bp, Artificial Sequence
  Synthetic
ggcaggaactgtgaaggtgt

SEQ ID NO: 893 - DNA, 20 bp, Artificial Sequence
  Synthetic
gtgctgtgagtcctgcccag

SEQ ID NO: 894 - DNA, 20 bp, Artificial Sequence
  Synthetic
gtgaatggggacactcgtgt

SEQ ID NO: 895 - DNA, 20 bp, Artificial Sequence
  Synthetic
gaatttgtaaatgaatacgt

SEQ ID NO: 896 - DNA, 20 bp, Artificial Sequence
  Synthetic
agtgaatggagatgttcgag

SEQ ID NO: 897 - DNA, 20 bp, Artificial Sequence
  Synthetic
ataaacacccgatgtacagg

SEQ ID NO: 898 - DNA, 20 bp, Artificial Sequence
  Synthetic
ggacgttcccaccattcaag

SEQ ID NO: 899 - DNA, 20 bp, Artificial Sequence
  Synthetic
taagtgtctgagactgacat

SEQ ID NO: 900 - DNA, 20 bp, Artificial Sequence
  Synthetic
tcagaaaatgaaacagccag

SEQ ID NO: 901 - DNA, 20 bp, Artificial Sequence
  Synthetic
ggagaagtcgacatgcccgg

SEQ ID NO: 902 - DNA, 20 bp, Artificial Sequence
  Synthetic
actgctgctgacatctctta

SEQ ID NO: 903 - DNA, 20 bp, Artificial Sequence
  Synthetic
catgagcgcattgaataata

SEQ ID NO: 904 - DNA, 20 bp, Artificial Sequence
  Synthetic
gctgaacgccgacaggacgg

SEQ ID NO: 905 - DNA, 20 bp, Artificial Sequence
  Synthetic
gttcatcattgaatacctag

SEQ ID NO: 906 - DNA, 20 bp, Artificial Sequence
  Synthetic
ctgtcttatagtaaccagtg

SEQ ID NO: 907 - DNA, 20 bp, Artificial Sequence
  Synthetic
ggaaacggttagaagctcaa

SEQ ID NO: 908 - DNA, 20 bp, Artificial Sequence
  Synthetic
cagagtcaaaaagaaaaacg

SEQ ID NO: 909 - DNA, 20 bp, Artificial Sequence
  Synthetic
aggtagtgatgaaggctctg

SEQ ID NO: 910 - DNA, 20 bp, Artificial Sequence
  Synthetic
tgacagtgctgaggtccatg

SEQ ID NO: 911 - DNA, 20 bp, Artificial Sequence
  Synthetic
gatgctatccaagaagcacg

SEQ ID NO: 912 - DNA, 20 bp, Artificial Sequence
  Synthetic
atacaatcccccagaccacg

SEQ ID NO: 913 - DNA, 20 bp, Artificial Sequence
  Synthetic
tgcccacactactcacaggg

SEQ ID NO: 914 - DNA, 20 bp, Artificial Sequence
  Synthetic
aaattgttacatctacaaca

SEQ ID NO: 915 - DNA, 20 bp, Artificial Sequence
  Synthetic
gctaccacagcattgtgcag

SEQ ID NO: 916 - DNA, 20 bp, Artificial Sequence
  Synthetic
tgtcagaaaggcaggcccca

SEQ ID NO: 917 - DNA, 20 bp, Artificial Sequence
  Synthetic
ggaaaagcaaaaaatccatg

SEQ ID NO: 918 - DNA, 20 bp, Artificial Sequence
  Synthetic
agataccgtgtactacaagt

SEQ ID NO: 919 - DNA, 20 bp, Artificial Sequence
  Synthetic
gaatgtgatagaattatcag

SEQ ID NO: 920 - DNA, 20 bp, Artificial Sequence
  Synthetic
gtagcagagatggaacagca

SEQ ID NO: 921 - DNA, 20 bp, Artificial Sequence
  Synthetic
ctgacctcaataccatcagg

SEQ ID NO: 922 - DNA, 20 bp, Artificial Sequence
  Synthetic
agatgcataagagaattctg

SEQ ID NO: 923 - DNA, 20 bp, Artificial Sequence
  Synthetic
acgccgagttaagaaagatg

SEQ ID NO: 924 - DNA, 20 bp, Artificial Sequence
  Synthetic
gtcccatatccacaacactt

SEQ ID NO: 925 - DNA, 20 bp, Artificial Sequence
  Synthetic
gctgaggcgagtgaaagctg

SEQ ID NO: 926 - DNA, 20 bp, Artificial Sequence
  Synthetic
ccacaacaagaacactccaa

SEQ ID NO: 927 - DNA, 20 bp, Artificial Sequence
  Synthetic
agtggaacagattctcaggg

SEQ ID NO: 928 - DNA, 20 bp, Artificial Sequence
  Synthetic
gaagctaatggcgaccctag

SEQ ID NO: 929 - DNA, 20 bp, Artificial Sequence
  Synthetic
ctaccacaagacaggcccag

SEQ ID NO: 930 - DNA, 20 bp, Artificial Sequence
  Synthetic
ggatcaccaggattactgtg

SEQ ID NO: 931 - DNA, 20 bp, Artificial Sequence
  Synthetic
cagtcactcaccgtacaacg

SEQ ID NO: 932 - DNA, 20 bp, Artificial Sequence
  Synthetic
gggcatgttcttgaacacat

SEQ ID NO: 933 - DNA, 20 bp, Artificial Sequence
  Synthetic
ctacgtggtcacctacacgg

SEQ ID NO: 934 - DNA, 20 bp, Artificial Sequence
  Synthetic
agaccaccaggattactgtg

SEQ ID NO: 935 - DNA, 20 bp, Artificial Sequence
  Synthetic
accatatgaagaaagcacgt

SEQ ID NO: 936 - DNA, 20 bp, Artificial Sequence
  Synthetic
ctggctgccgtggtacacaa

SEQ ID NO: 937 - DNA, 20 bp, Artificial Sequence
  Synthetic
aaccccactccagaacactg

SEQ ID NO: 938 - DNA, 20 bp, Artificial Sequence
  Synthetic
gcacgtagcacagatgaccg

SEQ ID NO: 939 - DNA, 20 bp, Artificial Sequence
  Synthetic
cagtattgacaaggacaatg

SEQ ID NO: 940 - DNA, 20 bp, Artificial Sequence
  Synthetic
ctttggggatctcaagacag

SEQ ID NO: 941 - DNA, 20 bp, Artificial Sequence
  Synthetic
taacttggtcaataccatga

SEQ ID NO: 942 - DNA, 20 bp, Artificial Sequence
  Synthetic
tgaagataaggatactggtg

SEQ ID NO: 943 - DNA, 20 bp, Artificial Sequence
  Synthetic
cggctccacagtgttcacag

SEQ ID NO: 944 - DNA, 20 bp, Artificial Sequence
  Synthetic
cacagccttgaagtccacca

SEQ ID NO: 945 - DNA, 20 bp, Artificial Sequence
  Synthetic
ggagtcctcacacacctccg

SEQ ID NO: 946 - DNA, 20 bp, Artificial Sequence
  Synthetic
acgatggagaggtcattgca

SEQ ID NO: 947 - DNA, 20 bp, Artificial Sequence
  Synthetic
gttggaaccgtgaagcacga

SEQ ID NO: 948 - DNA, 20 bp, Artificial Sequence
  Synthetic
gaattactcacgccccaagg

SEQ ID NO: 949 - DNA, 20 bp, Artificial Sequence
  Synthetic
cctgccagagttcaacatgg

SEQ ID NO: 950 - DNA, 20 bp, Artificial Sequence
  Synthetic
ccttattgtcgagatcaaag

SEQ ID NO: 951 - DNA, 20 bp, Artificial Sequence
  Synthetic
gttgcgatcgatgttcatgg

SEQ ID NO: 952 - DNA, 20 bp, Artificial Sequence
  Synthetic
aacagccaagatgggctggg

SEQ ID NO: 953 - DNA, 20 bp, Artificial Sequence
  Synthetic
gaattcatctcagaatactg

SEQ ID NO: 954 - DNA, 20 bp, Artificial Sequence
  Synthetic
catctcagaatactgtggag

SEQ ID NO: 955 - DNA, 20 bp, Artificial Sequence
  Synthetic
gtgtttgtgcaaaatccagg

SEQ ID NO: 956 - DNA, 20 bp, Artificial Sequence
  Synthetic
ctttagatgcatattcaaca

SEQ ID NO: 957 - DNA, 20 bp, Artificial Sequence
  Synthetic
ggaagaggccttctacacca

SEQ ID NO: 958 - DNA, 20 bp, Artificial Sequence
  Synthetic
catccgtccagataacatgt

SEQ ID NO: 959 - DNA, 20 bp, Artificial Sequence
  Synthetic
actccgccagtgactccagg

SEQ ID NO: 960 - DNA, 20 bp, Artificial Sequence
  Synthetic
gatgggaaacgctgactacg

SEQ ID NO: 961 - DNA, 20 bp, Artificial Sequence
  Synthetic
ccataaggatgggcacccgg

SEQ ID NO: 962 - DNA, 20 bp, Artificial Sequence
  Synthetic
tgtgatggtagcaacagcaa

SEQ ID NO: 963 - DNA, 20 bp, Artificial Sequence
  Synthetic
agtgctgtggtattacagtg

SEQ ID NO: 964 - DNA, 20 bp, Artificial Sequence
  Synthetic
tcaaagagtccatcaaacac

SEQ ID NO: 965 - DNA, 20 bp, Artificial Sequence
  Synthetic
acctggagcacaatgcacgt

SEQ ID NO: 966 - DNA, 20 bp, Artificial Sequence
  Synthetic
attgacattgacatccacca

SEQ ID NO: 967 - DNA, 20 bp, Artificial Sequence
  Synthetic
gttgacgttgaaacccacgc

SEQ ID NO: 968 - DNA, 20 bp, Artificial Sequence
  Synthetic
cgtgagcaagatcctcatcg

SEQ ID NO: 969 - DNA, 20 bp, Artificial Sequence
  Synthetic
ctacagcagaagttgaacgt

SEQ ID NO: 970 - DNA, 20 bp, Artificial Sequence
  Synthetic
gctctgtggaccccacactg

SEQ ID NO: 971 - DNA, 20 bp, Artificial Sequence
  Synthetic
gtggattgggatgtccacca

SEQ ID NO: 972 - DNA, 20 bp, Artificial Sequence
  Synthetic
gtagattgggatgtgcacca

SEQ ID NO: 973 - DNA, 20 bp, Artificial Sequence
  Synthetic
gggagatgtagagcacactg

SEQ ID NO: 974 - DNA, 20 bp, Artificial Sequence
  Synthetic
gaggtcagtgacactgccag

SEQ ID NO: 975 - DNA, 20 bp, Artificial Sequence
  Synthetic
atgctggacatacttgaccg

SEQ ID NO: 976 - DNA, 20 bp, Artificial Sequence
  Synthetic
gtggatttggatctgcacca

SEQ ID NO: 977 - DNA, 20 bp, Artificial Sequence
  Synthetic
acagacctaggagtatcctg

SEQ ID NO: 978 - DNA, 20 bp, Artificial Sequence
  Synthetic
acggacaacagggtccacca

SEQ ID NO: 979 - DNA, 20 bp, Artificial Sequence
  Synthetic
ggaggcccctgactactacg

SEQ ID NO: 980 - DNA, 20 bp, Artificial Sequence
  Synthetic
ccaaggggtgctcacaactg

SEQ ID NO: 981 - DNA, 20 bp, Artificial Sequence
  Synthetic
tttacaaagaggaaaacctg

SEQ ID NO: 982 - DNA, 20 bp, Artificial Sequence
  Synthetic
tgttaatggtattacccatg

SEQ ID NO: 983 - DNA, 20 bp, Artificial Sequence
  Synthetic
atcaacggaagactacaatg

SEQ ID NO: 984 - DNA, 20 bp, Artificial Sequence
  Synthetic
ctgagcgtgaaggacatcag

SEQ ID NO: 985 - DNA, 20 bp, Artificial Sequence
  Synthetic
tagaaaagtagccaacaagg

SEQ ID NO: 986 - DNA, 20 bp, Artificial Sequence
  Synthetic
tcgagatcaaggcaaaaatg

SEQ ID NO: 987 - DNA, 20 bp, Artificial Sequence
  Synthetic
catgtggaggtgctgcagag

SEQ ID NO: 988 - DNA, 20 bp, Artificial Sequence
  Synthetic
ccactttccagaatgccaaa

SEQ ID NO: 989 - DNA, 20 bp, Artificial Sequence
  Synthetic
agtggatggcaagaaaaaca

SEQ ID NO: 990 - DNA, 20 bp, Artificial Sequence
  Synthetic
cagatgctcaaatactggaa

SEQ ID NO: 991 - DNA, 20 bp, Artificial Sequence
  Synthetic
ccatacttacagttaaccgg

SEQ ID NO: 992 - DNA, 20 bp, Artificial Sequence
  Synthetic
gtccccggatggaaacaatg

SEQ ID NO: 993 - DNA, 20 bp, Artificial Sequence
  Synthetic
cccacctacctacttacctg

SEQ ID NO: 994 - DNA, 20 bp, Artificial Sequence
  Synthetic
ataccacaccttgcataggg

SEQ ID NO: 995 - DNA, 20 bp, Artificial Sequence
  Synthetic
actgggcaaagaattcattg

SEQ ID NO: 996 - DNA, 20 bp, Artificial Sequence
  Synthetic
ttaccactacagatggcaca

SEQ ID NO: 997 - DNA, 20 bp, Artificial Sequence
  Synthetic
atggatgtgataccaaacag

SEQ ID NO: 998 - DNA, 20 bp, Artificial Sequence
  Synthetic
tcactgccaagcactgtcgg

SEQ ID NO: 999 - DNA, 20 bp, Artificial Sequence
  Synthetic
aaggacatgaagaagttcgg

SEQ ID NO: 1000 - DNA, 20 bp, Artificial Sequence
  Synthetic
ggacaacggcaggagctcgg

SEQ ID NO: 1001 - DNA, 20 bp, Artificial Sequence
  Synthetic
tttgatcatgaataggatcg

SEQ ID NO: 1002 - DNA, 20 bp, Artificial Sequence
  Synthetic
attgaaggaaaagagaagcc

SEQ ID NO: 1003 - DNA, 20 bp, Artificial Sequence
  Synthetic
gaattgggtcatgatcaggg

SEQ ID NO: 1004 - DNA, 20 bp, Artificial Sequence
  Synthetic
ccgatgaggtgacgaagcag

SEQ ID NO: 1005 - DNA, 20 bp, Artificial Sequence
  Synthetic
aggaagtgctcaaagctgtg

SEQ ID NO: 1006 - DNA, 20 bp, Artificial Sequence
  Synthetic
actccgcacagttaaaacca

SEQ ID NO: 1007 - DNA, 20 bp, Artificial Sequence
  Synthetic
gtggcctacatagagtcgca

SEQ ID NO: 1008 - DNA, 20 bp, Artificial Sequence
  Synthetic
ttcatgatcacatttcccta

SEQ ID NO: 1009 - DNA, 20 bp, Artificial Sequence
  Synthetic
taccttgcagataacccagg

SEQ ID NO: 1010 - DNA, 20 bp, Artificial Sequence
  Synthetic
gaccttcagaccctccatgg

SEQ ID NO: 1011 - DNA, 20 bp, Artificial Sequence
  Synthetic
ccatggtttcaactgcgcag

SEQ ID NO: 1012 - DNA, 20 bp, Artificial Sequence
  Synthetic
attgcttacatggaatccca

SEQ ID NO: 1013 - DNA, 20 bp, Artificial Sequence
  Synthetic
cacgtttgcctggcacacag

SEQ ID NO: 1014 - DNA, 20 bp, Artificial Sequence
  Synthetic
acatcaagctggccttgcca

SEQ ID NO: 1015 - DNA, 20 bp, Artificial Sequence
  Synthetic
atctactctgaagatccctg

SEQ ID NO: 1016 - DNA, 20 bp, Artificial Sequence
  Synthetic
tatcactctggatttaacca

SEQ ID NO: 1017 - DNA, 20 bp, Artificial Sequence
  Synthetic
aaccctggttaaaaccactg

SEQ ID NO: 1018 - DNA, 20 bp, Artificial Sequence
  Synthetic
atgttcccaagggagactgg

SEQ ID NO: 1019 - DNA, 20 bp, Artificial Sequence
  Synthetic
agattcccaatgtagaacgg

SEQ ID NO: 1020 - DNA, 20 bp, Artificial Sequence
  Synthetic
agccgctgtggtaagcacgg

SEQ ID NO: 1021 - DNA, 20 bp, Artificial Sequence
  Synthetic
ccccttcctgaaatccccag

SEQ ID NO: 1022 - DNA, 20 bp, Artificial Sequence
  Synthetic
aaaccactgtggtaagcacg

SEQ ID NO: 1023 - DNA, 20 bp, Artificial Sequence
  Synthetic
aactatacatgaaagttcca

SEQ ID NO: 1024 - DNA, 20 bp, Artificial Sequence
  Synthetic
gttgttcctgaaggttactg

SEQ ID NO: 1025 - DNA, 20 bp, Artificial Sequence
  Synthetic
actacttgacgggttcctgg

SEQ ID NO: 1026 - DNA, 20 bp, Artificial Sequence
  Synthetic
cacggtgcagctgtacatga

SEQ ID NO: 1027 - DNA, 20 bp, Artificial Sequence
  Synthetic
aataccccaatcttacccag

SEQ ID NO: 1028 - DNA, 20 bp, Artificial Sequence
  Synthetic
gatcgagtgcgatatctgca

SEQ ID NO: 1029 - DNA, 20 bp, Artificial Sequence
  Synthetic
cttgtgtgaactgtactgag

SEQ ID NO: 1030 - DNA, 20 bp, Artificial Sequence
  Synthetic
agaaaggacgtcgatcgagg

SEQ ID NO: 1031 - DNA, 20 bp, Artificial Sequence
  Synthetic
acccacagtcctgcacacgt

SEQ ID NO: 1032 - DNA, 20 bp, Artificial Sequence
  Synthetic
aggccgggtggtatgcatgg

SEQ ID NO: 1033 - DNA, 20 bp, Artificial Sequence
  Synthetic
tgcggaacatgtacacacca

SEQ ID NO: 1034 - DNA, 20 bp, Artificial Sequence
  Synthetic
tcacatggtcgttatccatg

SEQ ID NO: 1035 - DNA, 20 bp, Artificial Sequence
  Synthetic
attgatgctacgttgaccgg

SEQ ID NO: 1036 - DNA, 20 bp, Artificial Sequence
  Synthetic
tcttctgccccagatcacca

SEQ ID NO: 1037 - DNA, 20 bp, Artificial Sequence
  Synthetic
tcaatgataagtgcatcagg

SEQ ID NO: 1038 - DNA, 20 bp, Artificial Sequence
  Synthetic
ggcaacatattgactgcatg

SEQ ID NO: 1039 - DNA, 20 bp, Artificial Sequence
  Synthetic
ggtgttatggaagctgctga

SEQ ID NO: 1040 - DNA, 20 bp, Artificial Sequence
  Synthetic
gatggtgaagagccggcacg

SEQ ID NO: 1041 - DNA, 20 bp, Artificial Sequence
  Synthetic
tggacagatctattccagag

SEQ ID NO: 1042 - DNA, 20 bp, Artificial Sequence
  Synthetic
ccaaccaggaacttcttgtg

SEQ ID NO: 1043 - DNA, 20 bp, Artificial Sequence
  Synthetic
gtacgtggtcatctcccggg

SEQ ID NO: 1044 - DNA, 20 bp, Artificial Sequence
  Synthetic
tgacgtgcgatgtgtaaacg

SEQ ID NO: 1045 - DNA, 20 bp, Artificial Sequence
  Synthetic
tagatggaaaaggaggtacg

SEQ ID NO: 1046 - DNA, 20 bp, Artificial Sequence
  Synthetic
agaaccaagagctccttgtg

SEQ ID NO: 1047 - DNA, 20 bp, Artificial Sequence
  Synthetic
gctcctggtctggtacaatg

SEQ ID NO: 1048 - DNA, 20 bp, Artificial Sequence
  Synthetic
tggctctgttgatttccagt

SEQ ID NO: 1049 - DNA, 20 bp, Artificial Sequence
  Synthetic
gaacacgcagcatctctggg

SEQ ID NO: 1050 - DNA, 20 bp, Artificial Sequence
  Synthetic
gcctgtatagatatccctag

SEQ ID NO: 1051 - DNA, 20 bp, Artificial Sequence
  Synthetic
aaagggtcatgcatacaaag

SEQ ID NO: 1052 - DNA, 20 bp, Artificial Sequence
  Synthetic
ggaacagcgtaaacaccaga

SEQ ID NO: 1053 - DNA, 20 bp, Artificial Sequence
  Synthetic
gcacctcttcaaggacaagg

SEQ ID NO: 1054 - DNA, 20 bp, Artificial Sequence
  Synthetic
aaagccaacaagttagacca

SEQ ID NO: 1055 - DNA, 20 bp, Artificial Sequence
  Synthetic
acacttacttcagagcgctg

SEQ ID NO: 1056 - DNA, 20 bp, Artificial Sequence
  Synthetic
gataaagtcatcctggacgt

SEQ ID NO: 1057 - DNA, 20 bp, Artificial Sequence
  Synthetic
ggtactgagagtatttgatg

SEQ ID NO: 1058 - DNA, 20 bp, Artificial Sequence
  Synthetic
tgatggtgtgagcatccccg

SEQ ID NO: 1059 - DNA, 20 bp, Artificial Sequence
  Synthetic
attcatcaaccactgctgca

SEQ ID NO: 1060 - DNA, 20 bp, Artificial Sequence
  Synthetic
cgagtggggtctgtttgcca

SEQ ID NO: 1061 - DNA, 20 bp, Artificial Sequence
  Synthetic
gagaagcgttatgaggacga

SEQ ID NO: 1062 - DNA, 20 bp, Artificial Sequence
  Synthetic
gttcgccatggagcccatcg

SEQ ID NO: 1063 - DNA, 20 bp, Artificial Sequence
  Synthetic
ggactgtgaacggacaactg

SEQ ID NO: 1064 - DNA, 20 bp, Artificial Sequence
  Synthetic
tgtcctagaatattgtggag

SEQ ID NO: 1065 - DNA, 20 bp, Artificial Sequence
  Synthetic
gaggagtgtcatattcactg

SEQ ID NO: 1066 - DNA, 20 bp, Artificial Sequence
  Synthetic
gcagagccacacactcacag

SEQ ID NO: 1067 - DNA, 20 bp, Artificial Sequence
  Synthetic
agcaaagaactcctgcacgt

SEQ ID NO: 1068 - DNA, 20 bp, Artificial Sequence
  Synthetic
aaattagaacgacttcacgt

SEQ ID NO: 1069 - DNA, 20 bp, Artificial Sequence
  Synthetic
aaagcaccggaagatcctga

SEQ ID NO: 1070 - DNA, 20 bp, Artificial Sequence
  Synthetic
tgctgtgtctgccatcacca

SEQ ID NO: 1071 - DNA, 20 bp, Artificial Sequence
  Synthetic
gttctagggagcgaaccctg

SEQ ID NO: 1072 - DNA, 20 bp, Artificial Sequence
  Synthetic
cgccaatctagaatactctg

SEQ ID NO: 1073 - DNA, 20 bp, Artificial Sequence
  Synthetic
aggcacagtacttggatacg

SEQ ID NO: 1074 - DNA, 20 bp, Artificial Sequence
  Synthetic
agttcgaattacacaccaag

SEQ ID NO: 1075 - DNA, 20 bp, Artificial Sequence
  Synthetic
caagaacaacacatcgaagt

SEQ ID NO: 1076 - DNA, 20 bp, Artificial Sequence
  Synthetic
cttgatgttcaactgccagt

SEQ ID NO: 1077 - DNA, 20 bp, Artificial Sequence
  Synthetic
cgttactatatgacttccgg

SEQ ID NO: 1078 - DNA, 20 bp, Artificial Sequence
  Synthetic
agagacacccaagaacaagg

SEQ ID NO: 1079 - DNA, 20 bp, Artificial Sequence
  Synthetic
atagagaagaaactccacca

SEQ ID NO: 1080 - DNA, 20 bp, Artificial Sequence
  Synthetic
ttaagtacagaaagactgtg

SEQ ID NO: 1081 - DNA, 20 bp, Artificial Sequence
  Synthetic
tgaccactgcagaaacagag

SEQ ID NO: 1082 - DNA, 20 bp, Artificial Sequence
  Synthetic
caattacattatagccatca

SEQ ID NO: 1083 - DNA, 20 bp, Artificial Sequence
  Synthetic
acgcaaagcaaactacgcag

SEQ ID NO: 1084 - DNA, 20 bp, Artificial Sequence
  Synthetic
agaataacctgcatgaactg

SEQ ID NO: 1085 - DNA, 20 bp, Artificial Sequence
  Synthetic
atcgccatatgcaagccaag

SEQ ID NO: 1086 - DNA, 20 bp, Artificial Sequence
  Synthetic
gctcagacgttcaacctgga

SEQ ID NO: 1087 - DNA, 20 bp, Artificial Sequence
  Synthetic
cttgtaagacaccttcacca

SEQ ID NO: 1088 - DNA, 20 bp, Artificial Sequence
  Synthetic
cagtggacgtcagctcagcg

SEQ ID NO: 1089 - DNA, 20 bp, Artificial Sequence
  Synthetic
tgatacaaacaactgccttg

SEQ ID NO: 1090 - DNA, 20 bp, Artificial Sequence
  Synthetic
tccagtaattcaaataaacg

SEQ ID NO: 1091 - DNA, 20 bp, Artificial Sequence
  Synthetic
tcagccgtcgaaacagacta

SEQ ID NO: 1092 - DNA, 20 bp, Artificial Sequence
  Synthetic
ctggcatacctctatcagga

SEQ ID NO: 1093 - DNA, 20 bp, Artificial Sequence
  Synthetic
gatctgcgtgtagagctctg

SEQ ID NO: 1094 - DNA, 20 bp, Artificial Sequence
  Synthetic
ctcccaggtgaagcgcacgg

SEQ ID NO: 1095 - DNA, 20 bp, Artificial Sequence
  Synthetic
gcctcagctgaacatccatg

SEQ ID NO: 1096 - DNA, 20 bp, Artificial Sequence
  Synthetic
tcaaatccagatcgtcacag

SEQ ID NO: 1097 - DNA, 20 bp, Artificial Sequence
  Synthetic
ttacctcagaggaggcagag

SEQ ID NO: 1098 - DNA, 20 bp, Artificial Sequence
  Synthetic
gtactcattgatgtacacga

SEQ ID NO: 1099 - DNA, 20 bp, Artificial Sequence
  Synthetic
tgcaactcaaggtgtcagtg

SEQ ID NO: 1100 - DNA, 20 bp, Artificial Sequence
  Synthetic
ttcggggaagacgagtatcg

SEQ ID NO: 1101 - DNA, 20 bp, Artificial Sequence
  Synthetic
actagagtcatgatcagcga

SEQ ID NO: 1102 - DNA, 20 bp, Artificial Sequence
  Synthetic
atcggtacctcttcacatat

SEQ ID NO: 1103 - DNA, 20 bp, Artificial Sequence
  Synthetic
caggctgcgcttcgcaagct

SEQ ID NO: 1104 - DNA, 20 bp, Artificial Sequence
  Synthetic
gacgagggcggcagagcagt

SEQ ID NO: 1105 - DNA, 21 bp, Artificial Sequence
  Synthetic
agggtgctccgttccttacag

SEQ ID NO: 1106 - DNA, 21 bp, Artificial Sequence
  Synthetic
aggggtctcacctgtaaggaa

SEQ ID NO: 1107 - DNA, 21 bp, Artificial Sequence
  Synthetic
gaggggtctcacctgtaagga

SEQ ID NO: 1108 - DNA, 21 bp, Artificial Sequence
  Synthetic
cacagaggggtctcacctgta

SEQ ID NO: 1109 - DNA, 21 bp, Artificial Sequence
  Synthetic
acacagaggggtctcacctgt

SEQ ID NO: 1110 - DNA, 21 bp, Artificial Sequence
  Synthetic
aaggaaaggccaggccatctt

SEQ ID NO: 1111 - DNA, 21 bp, Artificial Sequence
  Synthetic
ataagatggcctggcctttcc

SEQ ID NO: 1112 - DNA, 21 bp, Artificial Sequence
  Synthetic
tcattagggtctactggttca

SEQ ID NO: 1113 - DNA, 21 bp, Artificial Sequence
  Synthetic
atcattagggtctactggttc

SEQ ID NO: 1114 - DNA, 21 bp, Artificial Sequence
  Synthetic
cataataatctggtgcatcat

SEQ ID NO: 1115 - DNA, 21 bp, Artificial Sequence
  Synthetic
ccagattattatggtgttatt

SEQ ID NO: 1116 - DNA, 21 bp, Artificial Sequence
  Synthetic
cagattattatggtgttatta

SEQ ID NO: 1117 - DNA, 21 bp, Artificial Sequence
  Synthetic
tatggtgttattaaggaacct

SEQ ID NO: 1118 - DNA, 21 bp, Artificial Sequence
  Synthetic
tttaagaccttgccaccatgg

SEQ ID NO: 1119 - DNA, 21 bp, Artificial Sequence
  Synthetic
agaccttgccaccatggaaga

SEQ ID NO: 1120 - DNA, 21 bp, Artificial Sequence
  Synthetic
aaagagtacaaagacgatatt

SEQ ID NO: 1121 - DNA, 21 bp, Artificial Sequence
  Synthetic
agacgatattatgaaaagctg

SEQ ID NO: 1122 - DNA, 21 bp, Artificial Sequence
  Synthetic
gacgatattatgaaaagctga

SEQ ID NO: 1123 - DNA, 21 bp, Artificial Sequence
  Synthetic
actggtaaaatggggagtcac

SEQ ID NO: 1124 - DNA, 21 bp, Artificial Sequence
  Synthetic
cttctgcacactggtaaaatg

SEQ ID NO: 1125 - DNA, 21 bp, Artificial Sequence
  Synthetic
acttctgcacactggtaaaat

SEQ ID NO: 1126 - DNA, 21 bp, Artificial Sequence
  Synthetic
aacttctgcacactggtaaaa

SEQ ID NO: 1127 - DNA, 21 bp, Artificial Sequence
  Synthetic
gaacttctgcacactggtaaa

SEQ ID NO: 1128 - DNA, 21 bp, Artificial Sequence
  Synthetic
gtatctgtaaaacgccttatg

SEQ ID NO: 1129 - DNA, 21 bp, Artificial Sequence
  Synthetic
aacgccttatgatgaatctaa

SEQ ID NO: 1130 - DNA, 21 bp, Artificial Sequence
  Synthetic
tatattggctgtgatcggtgt

SEQ ID NO: 1131 - DNA, 21 bp, Artificial Sequence
  Synthetic
atcggtgtcagaattggtacc

SEQ ID NO: 1132 - DNA, 21 bp, Artificial Sequence
  Synthetic
gctgcgttggcatcttgcaaa

SEQ ID NO: 1133 - DNA, 21 bp, Artificial Sequence
  Synthetic
ttggcatcttgcaaagtgagg

SEQ ID NO: 1134 - DNA, 21 bp, Artificial Sequence
  Synthetic
aaagtgaggcagagctcattg

SEQ ID NO: 1135 - DNA, 21 bp, Artificial Sequence
  Synthetic
tgtggacagacatactcatca

SEQ ID NO: 1136 - DNA, 21 bp, Artificial Sequence
  Synthetic
tctgtccacagtgccagtcaa

SEQ ID NO: 1137 - DNA, 21 bp, Artificial Sequence
  Synthetic
catcctctgttgactggcact

SEQ ID NO: 1138 - DNA, 21 bp, Artificial Sequence
  Synthetic
attgtagggtttgtcacaaac

SEQ ID NO: 1139 - DNA, 21 bp, Artificial Sequence
  Synthetic
ttgtagggtttgtcacaaact

SEQ ID NO: 1140 - DNA, 21 bp, Artificial Sequence
  Synthetic
tgtagggtttgtcacaaactt

SEQ ID NO: 1141 - DNA, 21 bp, Artificial Sequence
  Synthetic
aacttggggatttgctttgct

SEQ ID NO: 1142 - DNA, 21 bp, Artificial Sequence
  Synthetic
acatgttcagcagtataccat

SEQ ID NO: 1143 - DNA, 21 bp, Artificial Sequence
  Synthetic
catgttcagcagtataccatt

SEQ ID NO: 1144 - DNA, 21 bp, Artificial Sequence
  Synthetic
cacattccaaatggtatactg

SEQ ID NO: 1145 - DNA, 21 bp, Artificial Sequence
  Synthetic
gcagtataccatttggaatgt

SEQ ID NO: 1146 - DNA, 21 bp, Artificial Sequence
  Synthetic
tggaatgtgtgaagccacctc

SEQ ID NO: 1147 - DNA, 21 bp, Artificial Sequence
  Synthetic
gaatgtgtgaagccacctctt

SEQ ID NO: 1148 - DNA, 21 bp, Artificial Sequence
  Synthetic
aatgtgtgaagccacctcttg

SEQ ID NO: 1149 - DNA, 21 bp, Artificial Sequence
  Synthetic
agccacctcttgaggaggtgc

SEQ ID NO: 1150 - DNA, 21 bp, Artificial Sequence
  Synthetic
ccacctcttgaggaggtgcca

SEQ ID NO: 1151 - DNA, 21 bp, Artificial Sequence
  Synthetic
ctcgtcctctggcacctcctc

SEQ ID NO: 1152 - DNA, 21 bp, Artificial Sequence
  Synthetic
ctcttgaggaggtgccagagg

SEQ ID NO: 1153 - DNA, 21 bp, Artificial Sequence
  Synthetic
tgccagaggacgagtggcagt

SEQ ID NO: 1154 - DNA, 21 bp, Artificial Sequence
  Synthetic
tattatggacaaggccaccca

SEQ ID NO: 1155 - DNA, 21 bp, Artificial Sequence
  Synthetic
aggccacccaatgaagcctca

SEQ ID NO: 1156 - DNA, 21 bp, Artificial Sequence
  Synthetic
tgcggattcggtgaggcttca

SEQ ID NO: 1157 - DNA, 21 bp, Artificial Sequence
  Synthetic
attatgagtcatgcggattcg

SEQ ID NO: 1158 - DNA, 21 bp, Artificial Sequence
  Synthetic
gagcagcaaattatgagtcat

SEQ ID NO: 1159 - DNA, 21 bp, Artificial Sequence
  Synthetic
accatagttgagcagcaaatt

SEQ ID NO: 1160 - DNA, 21 bp, Artificial Sequence
  Synthetic
gctgctcaactatggtctcta

SEQ ID NO: 1161 - DNA, 21 bp, Artificial Sequence
  Synthetic
aactatggtctctaccgaaaa

SEQ ID NO: 1162 - DNA, 21 bp, Artificial Sequence
  Synthetic
actatggtctctaccgaaaaa

SEQ ID NO: 1163 - DNA, 21 bp, Artificial Sequence
  Synthetic
taccgaaaaatggaaatctat

SEQ ID NO: 1164 - DNA, 21 bp, Artificial Sequence
  Synthetic
gcattggctttgtgagggcgc

SEQ ID NO: 1165 - DNA, 21 bp, Artificial Sequence
  Synthetic
agcgccctcacaaagccaatg

SEQ ID NO: 1166 - DNA, 21 bp, Artificial Sequence
  Synthetic
cgccctcacaaagccaatgct

SEQ ID NO: 1167 - DNA, 21 bp, Artificial Sequence
  Synthetic
gccctcacaaagccaatgctg

SEQ ID NO: 1168 - DNA, 21 bp, Artificial Sequence
  Synthetic
tctcctcagcattggctttgt

SEQ ID NO: 1169 - DNA, 21 bp, Artificial Sequence
  Synthetic
catctcctcagcattggcttt

SEQ ID NO: 1170 - DNA, 21 bp, Artificial Sequence
  Synthetic
ttatctggacggatggagcgc

SEQ ID NO: 1171 - DNA, 21 bp, Artificial Sequence
  Synthetic
ccgacatgttatctggacgga

SEQ ID NO: 1172 - DNA, 21 bp, Artificial Sequence
  Synthetic
tccgacatgttatctggacgg

SEQ ID NO: 1173 - DNA, 21 bp, Artificial Sequence
  Synthetic
tccatccgtccagataacatg

SEQ ID NO: 1174 - DNA, 21 bp, Artificial Sequence
  Synthetic
ccatccgtccagataacatgt

SEQ ID NO: 1175 - DNA, 21 bp, Artificial Sequence
  Synthetic
gtactccgacatgttatctgg

SEQ ID NO: 1176 - DNA, 21 bp, Artificial Sequence
  Synthetic
tgctgtactccgacatgttat

SEQ ID NO: 1177 - DNA, 21 bp, Artificial Sequence
  Synthetic
tcggagtacagcaagcagatg

SEQ ID NO: 1178 - DNA, 21 bp, Artificial Sequence
  Synthetic
atttctttcaagtcaacgttg

SEQ ID NO: 1179 - DNA, 21 bp, Artificial Sequence
  Synthetic
ttctttcaagtcaacgttggt

SEQ ID NO: 1180 - DNA, 21 bp, Artificial Sequence
  Synthetic
acagtcctcaccaacgttgac

SEQ ID NO: 1181 - DNA, 21 bp, Artificial Sequence
  Synthetic
gtccagtattcgatggcctgt

SEQ ID NO: 1182 - DNA, 21 bp, Artificial Sequence
  Synthetic
actcaaacaggccatcgaata

SEQ ID NO: 1183 - DNA, 21 bp, Artificial Sequence
  Synthetic
tgacagaactcaaacaggcca

SEQ ID NO: 1184 - DNA, 21 bp, Artificial Sequence
  Synthetic
gaaccaccagtagacaactga

SEQ ID NO: 1185 - DNA, 21 bp, Artificial Sequence
  Synthetic
cagttgtctactggtggttct

SEQ ID NO: 1186 - DNA, 21 bp, Artificial Sequence
  Synthetic
tctactggtggttctgtgggt

SEQ ID NO: 1187 - DNA, 21 bp, Artificial Sequence
  Synthetic
aagatgaatattccttaccca

SEQ ID NO: 1188 - DNA, 21 bp, Artificial Sequence
  Synthetic
ttctcatgcccagcaagtgct

SEQ ID NO: 1189 - DNA, 21 bp, Artificial Sequence
  Synthetic
tattaagtttcacagcacttg

SEQ ID NO: 1190 - DNA, 21 bp, Artificial Sequence
  Synthetic
gtgaaacttaataagcagcag

SEQ ID NO: 1191 - DNA, 21 bp, Artificial Sequence
  Synthetic
aagcagcagacggacatcgct

SEQ ID NO: 1192 - DNA, 21 bp, Artificial Sequence
  Synthetic
gcagacggacatcgctgtgaa

SEQ ID NO: 1193 - DNA, 21 bp, Artificial Sequence
  Synthetic
cggacatcgctgtgaattggg

SEQ ID NO: 1194 - DNA, 21 bp, Artificial Sequence
  Synthetic
ggacatcgctgtgaattgggc

SEQ ID NO: 1195 - DNA, 21 bp, Artificial Sequence
  Synthetic
gacatcgctgtgaattgggct

SEQ ID NO: 1196 - DNA, 21 bp, Artificial Sequence
  Synthetic
gctgggggcctgcaccatgca

SEQ ID NO: 1197 - DNA, 21 bp, Artificial Sequence
  Synthetic
gcctgcaccatgcaaagaagt

SEQ ID NO: 1198 - DNA, 21 bp, Artificial Sequence
  Synthetic
acgtaacagaagccagatgcc

SEQ ID NO: 1199 - DNA, 21 bp, Artificial Sequence
  Synthetic
aagacgatatcattgacgtaa

SEQ ID NO: 1200 - DNA, 21 bp, Artificial Sequence
  Synthetic
aatgatatcgtcttggccatc

SEQ ID NO: 1201 - DNA, 21 bp, Artificial Sequence
  Synthetic
atgatatcgtcttggccatcc

SEQ ID NO: 1202 - DNA, 21 bp, Artificial Sequence
  Synthetic
gcaggcatactttagcagttc

SEQ ID NO: 1203 - DNA, 21 bp, Artificial Sequence
  Synthetic
ccttctgatcctaggtatcac

SEQ ID NO: 1204 - DNA, 21 bp, Artificial Sequence
  Synthetic
ttctgatcctaggtatcacca

SEQ ID NO: 1205 - DNA, 21 bp, Artificial Sequence
  Synthetic
acagcaccctctggtgatacc

SEQ ID NO: 1206 - DNA, 21 bp, Artificial Sequence
  Synthetic
gatattcaccatggtgacggc

SEQ ID NO: 1207 - DNA, 21 bp, Artificial Sequence
  Synthetic
atattcaccatggtgacggcg

SEQ ID NO: 1208 - DNA, 21 bp, Artificial Sequence
  Synthetic
ctcttccacgccgtcaccatg

SEQ ID NO: 1209 - DNA, 21 bp, Artificial Sequence
  Synthetic
ttcaccatggtgacggcgtgg

SEQ ID NO: 1210 - DNA, 21 bp, Artificial Sequence
  Synthetic
gtggaagaggccttctacacc

SEQ ID NO: 1211 - DNA, 21 bp, Artificial Sequence
  Synthetic
agaggccttctacaccacgga

SEQ ID NO: 1212 - DNA, 21 bp, Artificial Sequence
  Synthetic
gtcatgacccggtccgtggtg

SEQ ID NO: 1213 - DNA, 21 bp, Artificial Sequence
  Synthetic
tgactgtgtcctttcataagt

SEQ ID NO: 1214 - DNA, 21 bp, Artificial Sequence
  Synthetic
gactgtgtcctttcataagta

SEQ ID NO: 1215 - DNA, 21 bp, Artificial Sequence
  Synthetic
ctgtgtcctttcataagtatg

SEQ ID NO: 1216 - DNA, 21 bp, Artificial Sequence
  Synthetic
aagtactctccatacttatga

SEQ ID NO: 1217 - DNA, 21 bp, Artificial Sequence
  Synthetic
tgggaagtactctccatactt

SEQ ID NO: 1218 - DNA, 21 bp, Artificial Sequence
  Synthetic
ataagtatggagagtacttcc

SEQ ID NO: 1219 - DNA, 21 bp, Artificial Sequence
  Synthetic
taagtatggagagtacttccc

SEQ ID NO: 1220 - DNA, 21 bp, Artificial Sequence
  Synthetic
atggagagtacttcccaggaa

SEQ ID NO: 1221 - DNA, 21 bp, Artificial Sequence
  Synthetic
tggagagtacttcccaggaac

SEQ ID NO: 1222 - DNA, 21 bp, Artificial Sequence
  Synthetic
ggagagtacttcccaggaact

SEQ ID NO: 1223 - DNA, 21 bp, Artificial Sequence
  Synthetic
cttcccaggaactggggacct

SEQ ID NO: 1224 - DNA, 21 bp, Artificial Sequence
  Synthetic
acccgtaggtccccagttcct

SEQ ID NO: 1225 - DNA, 21 bp, Artificial Sequence
  Synthetic
cacccgtaggtccccagttcc

SEQ ID NO: 1226 - DNA, 21 bp, Artificial Sequence
  Synthetic
tcacccgtaggtccccagttc

SEQ ID NO: 1227 - DNA, 21 bp, Artificial Sequence
  Synthetic
ccaggaactggggacctacgg

SEQ ID NO: 1228 - DNA, 21 bp, Artificial Sequence
  Synthetic
aggaactggggacctacgggt

SEQ ID NO: 1229 - DNA, 21 bp, Artificial Sequence
  Synthetic
ttatgctgttaactacccgct

SEQ ID NO: 1230 - DNA, 21 bp, Artificial Sequence
  Synthetic
ctgttaactacccgctccgag

SEQ ID NO: 1231 - DNA, 21 bp, Artificial Sequence
  Synthetic
tgttaactacccgctccgaga

SEQ ID NO: 1232 - DNA, 21 bp, Artificial Sequence
  Synthetic
cgtcatcaatcccgtctcgga

SEQ ID NO: 1233 - DNA, 21 bp, Artificial Sequence
  Synthetic
cgctccgagacgggattgatg

SEQ ID NO: 1234 - DNA, 21 bp, Artificial Sequence
  Synthetic
gactcgtcatcaatcccgtct

SEQ ID NO: 1235 - DNA, 21 bp, Artificial Sequence
  Synthetic
ggactcgtcatcaatcccgtc

SEQ ID NO: 1236 - DNA, 21 bp, Artificial Sequence
  Synthetic
acgggattgatgacgagtcct

SEQ ID NO: 1237 - DNA, 21 bp, Artificial Sequence
  Synthetic
accggcttgaaaatggcctca

SEQ ID NO: 1238 - DNA, 21 bp, Artificial Sequence
  Synthetic
tggataaagccacttaccggc

SEQ ID NO: 1239 - DNA, 21 bp, Artificial Sequence
  Synthetic
tttaggtcatgtccaaagtaa

SEQ ID NO: 1240 - DNA, 21 bp, Artificial Sequence
  Synthetic
ggctggaacatctccattact

SEQ ID NO: 1241 - DNA, 21 bp, Artificial Sequence
  Synthetic
tgtaagaccaccgcactaggc

SEQ ID NO: 1242 - DNA, 21 bp, Artificial Sequence
  Synthetic
ctgtaagaccaccgcactagg

SEQ ID NO: 1243 - DNA, 21 bp, Artificial Sequence
  Synthetic
agtgtggctcagactccctat

SEQ ID NO: 1244 - DNA, 21 bp, Artificial Sequence
  Synthetic
gtgtggctcagactccctatc

SEQ ID NO: 1245 - DNA, 21 bp, Artificial Sequence
  Synthetic
tgtggctcagactccctatct

SEQ ID NO: 1246 - DNA, 21 bp, Artificial Sequence
  Synthetic
accgatccccagatagggagt

SEQ ID NO: 1247 - DNA, 21 bp, Artificial Sequence
  Synthetic
aacctaaccgatccccagata

SEQ ID NO: 1248 - DNA, 21 bp, Artificial Sequence
  Synthetic
caacctaaccgatccccagat

SEQ ID NO: 1249 - DNA, 21 bp, Artificial Sequence
  Synthetic
gcaacctaaccgatccccaga

SEQ ID NO: 1250 - DNA, 21 bp, Artificial Sequence
  Synthetic
gcttcaatctaactatcaaag

SEQ ID NO: 1251 - DNA, 21 bp, Artificial Sequence
  Synthetic
gtctcacctttgatagttaga

SEQ ID NO: 1252 - DNA, 21 bp, Artificial Sequence
  Synthetic
accaaaggacacgccaagtgt

SEQ ID NO: 1253 - DNA, 21 bp, Artificial Sequence
  Synthetic
ccaaaggacacgccaagtgtg

SEQ ID NO: 1254 - DNA, 21 bp, Artificial Sequence
  Synthetic
gccaagtgtgtggaatttgtc

SEQ ID NO: 1255 - DNA, 21 bp, Artificial Sequence
  Synthetic
tttaacctgcctatgctgatg

SEQ ID NO: 1256 - DNA, 21 bp, Artificial Sequence
  Synthetic
ttaacctgcctatgctgatgc

SEQ ID NO: 1257 - DNA, 21 bp, Artificial Sequence
  Synthetic
taacctgcctatgctgatgct

SEQ ID NO: 1258 - DNA, 21 bp, Artificial Sequence
  Synthetic
cattcgtaacgttgcccggtg

SEQ ID NO: 1259 - DNA, 21 bp, Artificial Sequence
  Synthetic
tgtccagcaccgggcaacgtt

SEQ ID NO: 1260 - DNA, 21 bp, Artificial Sequence
  Synthetic
acgttgcccggtgctggacat

SEQ ID NO: 1261 - DNA, 21 bp, Artificial Sequence
  Synthetic
agctgtctcatatgtccagca

SEQ ID NO: 1262 - DNA, 21 bp, Artificial Sequence
  Synthetic
cctcaatagcttcttctttaa

SEQ ID NO: 1263 - DNA, 21 bp, Artificial Sequence
  Synthetic
ctcaatagcttcttctttaag

SEQ ID NO: 1264 - DNA, 21 bp, Artificial Sequence
  Synthetic
aatctttgtttccacttaaag

SEQ ID NO: 1265 - DNA, 21 bp, Artificial Sequence
  Synthetic
tggaatctttgtttccactta

SEQ ID NO: 1266 - DNA, 21 bp, Artificial Sequence
  Synthetic
gattccatttatagcctggcc

SEQ ID NO: 1267 - DNA, 21 bp, Artificial Sequence
  Synthetic
gattcatggccaggctataaa

SEQ ID NO: 1268 - DNA, 21 bp, Artificial Sequence
  Synthetic
tgattcatggccaggctataa

SEQ ID NO: 1269 - DNA, 21 bp, Artificial Sequence
  Synthetic
tatagcctggccatgaatcaa

SEQ ID NO: 1270 - DNA, 21 bp, Artificial Sequence
  Synthetic
atagcctggccatgaatcaac

SEQ ID NO: 1271 - DNA, 21 bp, Artificial Sequence
  Synthetic
tagcctggccatgaatcaact

SEQ ID NO: 1272 - DNA, 21 bp, Artificial Sequence
  Synthetic
aactgggaacaatcattgtat

SEQ ID NO: 1273 - DNA, 21 bp, Artificial Sequence
  Synthetic
caatcattgtatcagggtcca

SEQ ID NO: 1274 - DNA, 21 bp, Artificial Sequence
  Synthetic
atcagggtccactgaaaaggt

SEQ ID NO: 1275 - DNA, 21 bp, Artificial Sequence
  Synthetic
ctattaaaattcacaggtgtt

SEQ ID NO: 1276 - DNA, 21 bp, Artificial Sequence
  Synthetic
aaattcacaggtgttacgggt

SEQ ID NO: 1277 - DNA, 21 bp, Artificial Sequence
  Synthetic
aattcacaggtgttacgggta

SEQ ID NO: 1278 - DNA, 21 bp, Artificial Sequence
  Synthetic
gatcccatacccgtaacacct

SEQ ID NO: 1279 - DNA, 21 bp, Artificial Sequence
  Synthetic
ggtgttacgggtatgggatcc

SEQ ID NO: 1280 - DNA, 21 bp, Artificial Sequence
  Synthetic
gtaaaggccttagcatatgcc

SEQ ID NO: 1281 - DNA, 21 bp, Artificial Sequence
  Synthetic
ccttagcatatgccaaggata

SEQ ID NO: 1282 - DNA, 21 bp, Artificial Sequence
  Synthetic
ataaagaactagtagcatcag

SEQ ID NO: 1283 - DNA, 21 bp, Artificial Sequence
  Synthetic
gaactagtagcatcagctggg

SEQ ID NO: 1284 - DNA, 21 bp, Artificial Sequence
  Synthetic
gttggacagacaaatattcct

SEQ ID NO: 1285 - DNA, 21 bp, Artificial Sequence
  Synthetic
ttggacagacaaatattcctt

SEQ ID NO: 1286 - DNA, 21 bp, Artificial Sequence
  Synthetic
agacaaatattcctttgggat

SEQ ID NO: 1287 - DNA, 21 bp, Artificial Sequence
  Synthetic
gttagagtattcacatcccaa

SEQ ID NO: 1288 - DNA, 21 bp, Artificial Sequence
  Synthetic
tgttagagtattcacatccca

SEQ ID NO: 1289 - DNA, 21 bp, Artificial Sequence
  Synthetic
gtgcaaaactaatgaagctta

SEQ ID NO: 1290 - DNA, 21 bp, Artificial Sequence
  Synthetic
ctaatgaagcttaaagggcac

SEQ ID NO: 1291 - DNA, 21 bp, Artificial Sequence
  Synthetic
cttaaagggcacacggataat

SEQ ID NO: 1292 - DNA, 21 bp, Artificial Sequence
  Synthetic
tgtgaaggcattgctattaaa

SEQ ID NO: 1293 - DNA, 21 bp, Artificial Sequence
  Synthetic
agtgcctgtcaggcagttctg

SEQ ID NO: 1294 - DNA, 21 bp, Artificial Sequence
  Synthetic
gtgcctgtcaggcagttctga

SEQ ID NO: 1295 - DNA, 21 bp, Artificial Sequence
  Synthetic
accaaaggcgaattgtcccat

SEQ ID NO: 1296 - DNA, 21 bp, Artificial Sequence
  Synthetic
ctgctggccaagggaccaaag

SEQ ID NO: 1297 - DNA, 21 bp, Artificial Sequence
  Synthetic
aatggagtcaatgctctgcag

SEQ ID NO: 1298 - DNA, 21 bp, Artificial Sequence
  Synthetic
atttagtgctggatccagctg

SEQ ID NO: 1299 - DNA, 21 bp, Artificial Sequence
  Synthetic
ctgtgaaaagtctatttagtg

SEQ ID NO: 1300 - DNA, 21 bp, Artificial Sequence
  Synthetic
atgatagagtctcgaccggct

SEQ ID NO: 1301 - DNA, 21 bp, Artificial Sequence
  Synthetic
agccggtcgagactctatcat

SEQ ID NO: 1302 - DNA, 21 bp, Artificial Sequence
  Synthetic
tcgagactctatcataagaat

SEQ ID NO: 1303 - DNA, 21 bp, Artificial Sequence
  Synthetic
cgagactctatcataagaata

SEQ ID NO: 1304 - DNA, 21 bp, Artificial Sequence
  Synthetic
tgacactccatattcttatga

SEQ ID NO: 1305 - DNA, 21 bp, Artificial Sequence
  Synthetic
caagatccatatatagcatct

SEQ ID NO: 1306 - DNA, 21 bp, Artificial Sequence
  Synthetic
aagatccatatatagcatcta

SEQ ID NO: 1307 - DNA, 21 bp, Artificial Sequence
  Synthetic
atctatggaacaccatactga

SEQ ID NO: 1308 - DNA, 21 bp, Artificial Sequence
  Synthetic
acgacattgtactctgttgta

SEQ ID NO: 1309 - DNA, 21 bp, Artificial Sequence
  Synthetic
cgacattgtactctgttgtaa

SEQ ID NO: 1310 - DNA, 21 bp, Artificial Sequence
  Synthetic
gacattgtactctgttgtaat

SEQ ID NO: 1311 - DNA, 21 bp, Artificial Sequence
  Synthetic
gtcagaagaagcagatattac

SEQ ID NO: 1312 - DNA, 21 bp, Artificial Sequence
  Synthetic
ttctgacacgacagtaaaagt

SEQ ID NO: 1313 - DNA, 21 bp, Artificial Sequence
  Synthetic
tctgacacgacagtaaaagta

SEQ ID NO: 1314 - DNA, 21 bp, Artificial Sequence
  Synthetic
gcagagatgtatagcaacata

SEQ ID NO: 1315 - DNA, 21 bp, Artificial Sequence
  Synthetic
tagcaacataccgagtccatg

SEQ ID NO: 1316 - DNA, 21 bp, Artificial Sequence
  Synthetic
ccgagtccatgatgaaggtgt

SEQ ID NO: 1317 - DNA, 21 bp, Artificial Sequence
  Synthetic
cagcgcccaaacaccttcatc

SEQ ID NO: 1318 - DNA, 21 bp, Artificial Sequence
  Synthetic
ccttcacacatgtgtattctg

SEQ ID NO: 1319 - DNA, 21 bp, Artificial Sequence
  Synthetic
cttcacacatgtgtattctgg

SEQ ID NO: 1320 - DNA, 21 bp, Artificial Sequence
  Synthetic
cttccaccagaatacacatgt

SEQ ID NO: 1321 - DNA, 21 bp, Artificial Sequence
  Synthetic
cacacatgtgtattctggtgg

SEQ ID NO: 1322 - DNA, 21 bp, Artificial Sequence
  Synthetic
acacatgtgtattctggtgga

SEQ ID NO: 1323 - DNA, 21 bp, Artificial Sequence
  Synthetic
tgtgtattctggtggaaggga

SEQ ID NO: 1324 - DNA, 21 bp, Artificial Sequence
  Synthetic
gtgtattctggtggaagggac

SEQ ID NO: 1325 - DNA, 21 bp, Artificial Sequence
  Synthetic
aaatcttcctgtcccttccac

SEQ ID NO: 1326 - DNA, 21 bp, Artificial Sequence
  Synthetic
ctgctgccaagcctgagaccc

SEQ ID NO: 1327 - DNA, 21 bp, Artificial Sequence
  Synthetic
actgtcgagctgctgccaagc

SEQ ID NO: 1328 - DNA, 21 bp, Artificial Sequence
  Synthetic
cagctcgacagttacaaagtt

SEQ ID NO: 1329 - DNA, 21 bp, Artificial Sequence
  Synthetic
agctcgacagttacaaagttt

SEQ ID NO: 1330 - DNA, 21 bp, Artificial Sequence
  Synthetic
cattccaaaactttgtaactg

SEQ ID NO: 1331 - DNA, 21 bp, Artificial Sequence
  Synthetic
tttggaatggatgtcacactt

SEQ ID NO: 1332 - DNA, 21 bp, Artificial Sequence
  Synthetic
ttggaatggatgtcacacttt

SEQ ID NO: 1333 - DNA, 21 bp, Artificial Sequence
  Synthetic
taatttctgaaacaggatcgt

SEQ ID NO: 1334 - DNA, 21 bp, Artificial Sequence
  Synthetic
ttctgaaacaggatcgtgtgg

SEQ ID NO: 1335 - DNA, 21 bp, Artificial Sequence
  Synthetic
gaaacaggatcgtgtgggtgg

SEQ ID NO: 1336 - DNA, 21 bp, Artificial Sequence
  Synthetic
gacgagttgccacatttcgca

SEQ ID NO: 1337 - DNA, 21 bp, Artificial Sequence
  Synthetic
acgagttgccacatttcgcaa

SEQ ID NO: 1338 - DNA, 21 bp, Artificial Sequence
  Synthetic
atcagctacatagtttccttt

SEQ ID NO: 1339 - DNA, 21 bp, Artificial Sequence
  Synthetic
aaggaaactatgtagctgatc

SEQ ID NO: 1340 - DNA, 21 bp, Artificial Sequence
  Synthetic
aggaaactatgtagctgatct

SEQ ID NO: 1341 - DNA, 21 bp, Artificial Sequence
  Synthetic
cacagccataggattccctcc

SEQ ID NO: 1342 - DNA, 21 bp, Artificial Sequence
  Synthetic
cttgtttgctgaccacagcca

SEQ ID NO: 1343 - DNA, 21 bp, Artificial Sequence
  Synthetic
gtggtcagcaaacaagtaaat

SEQ ID NO: 1344 - DNA, 21 bp, Artificial Sequence
  Synthetic
tggtcagcaaacaagtaaata

SEQ ID NO: 1345 - DNA, 21 bp, Artificial Sequence
  Synthetic
tcaagcaaaaatgcccacttt

SEQ ID NO: 1346 - DNA, 21 bp, Artificial Sequence
  Synthetic
aatgcccactttatgaagcca

SEQ ID NO: 1347 - DNA, 21 bp, Artificial Sequence
  Synthetic
cttgtccgttggcttcataaa

SEQ ID NO: 1348 - DNA, 21 bp, Artificial Sequence
  Synthetic
ttcatctttctctttaggaac

SEQ ID NO: 1349 - DNA, 21 bp, Artificial Sequence
  Synthetic
ttcaggttcctaaagagaaag

SEQ ID NO: 1350 - DNA, 21 bp, Artificial Sequence
  Synthetic
taccatttcatctttctcttt

SEQ ID NO: 1351 - DNA, 21 bp, Artificial Sequence
  Synthetic
ctaccatttcatctttctctt

SEQ ID NO: 1352 - DNA, 21 bp, Artificial Sequence
  Synthetic
ctaaagagaaagatgaaatgg

SEQ ID NO: 1353 - DNA, 21 bp, Artificial Sequence
  Synthetic
agaaagatgaaatggtagagc

SEQ ID NO: 1354 - DNA, 21 bp, Artificial Sequence
  Synthetic
agcaagagtttaaccggttgc

SEQ ID NO: 1355 - DNA, 21 bp, Artificial Sequence
  Synthetic
acaggcttattattgaggaca

SEQ ID NO: 1356 - DNA, 21 bp, Artificial Sequence
  Synthetic
aagggacacaggcttattatt

SEQ ID NO: 1357 - DNA, 21 bp, Artificial Sequence
  Synthetic
ccaagggacacaggcttatta

SEQ ID NO: 1358 - DNA, 21 bp, Artificial Sequence
  Synthetic
cctgtgtcccttggccaggca

SEQ ID NO: 1359 - DNA, 21 bp, Artificial Sequence
  Synthetic
ctgtgtcccttggccaggcat

SEQ ID NO: 1360 - DNA, 21 bp, Artificial Sequence
  Synthetic
acaacttccaatgcctggcca

SEQ ID NO: 1361 - DNA, 21 bp, Artificial Sequence
  Synthetic
gacaacttccaatgcctggcc

SEQ ID NO: 1362 - DNA, 21 bp, Artificial Sequence
  Synthetic
atattgtctctcttaggttac

SEQ ID NO: 1363 - DNA, 21 bp, Artificial Sequence
  Synthetic
attgtctctcttaggttacaa

SEQ ID NO: 1364 - DNA, 21 bp, Artificial Sequence
  Synthetic
gacatgcttctcttgtaacct

SEQ ID NO: 1365 - DNA, 21 bp, Artificial Sequence
  Synthetic
tacaagagaagcatgtcaaag

SEQ ID NO: 1366 - DNA, 21 bp, Artificial Sequence
  Synthetic
agcatgtcaaagatgagcaga

SEQ ID NO: 1367 - DNA, 21 bp, Artificial Sequence
  Synthetic
caaagatgagcagattgaaca

SEQ ID NO: 1368 - DNA, 21 bp, Artificial Sequence
  Synthetic
aaagatgagcagattgaacat

SEQ ID NO: 1369 - DNA, 21 bp, Artificial Sequence
  Synthetic
gatgagcagattgaacattgg

SEQ ID NO: 1370 - DNA, 21 bp, Artificial Sequence
  Synthetic
attgaacattggaagaagata

SEQ ID NO: 1371 - DNA, 21 bp, Artificial Sequence
  Synthetic
tggaagaagatagtgaaaact

SEQ ID NO: 1372 - DNA, 21 bp, Artificial Sequence
  Synthetic
ggaagaagatagtgaaaactc

SEQ ID NO: 1373 - DNA, 21 bp, Artificial Sequence
  Synthetic
agaagatagtgaaaactcagg

SEQ ID NO: 1374 - DNA, 21 bp, Artificial Sequence
  Synthetic
atagtgaaaactcaggaagaa

SEQ ID NO: 1375 - DNA, 21 bp, Artificial Sequence
  Synthetic
tgaaaactcaggaagaattga

SEQ ID NO: 1376 - DNA, 21 bp, Artificial Sequence
  Synthetic
aagaagttctttcaattcttc

SEQ ID NO: 1377 - DNA, 21 bp, Artificial Sequence
  Synthetic
ttgaaagaacttcttaataag

SEQ ID NO: 1378 - DNA, 21 bp, Artificial Sequence
  Synthetic
aatacagaatttcaccttatt

SEQ ID NO: 1379 - DNA, 21 bp, Artificial Sequence
  Synthetic
tttccttcttagatggtaaat

SEQ ID NO: 1380 - DNA, 21 bp, Artificial Sequence
  Synthetic
cttcttagatggtaaatttga

SEQ ID NO: 1381 - DNA, 21 bp, Artificial Sequence
  Synthetic
tctctttcaaatttaccatct

SEQ ID NO: 1382 - DNA, 21 bp, Artificial Sequence
  Synthetic
tcttagatggtaaatttgaaa

SEQ ID NO: 1383 - DNA, 21 bp, Artificial Sequence
  Synthetic
taaatttgaaagagaaaatta

SEQ ID NO: 1384 - DNA, 21 bp, Artificial Sequence
  Synthetic
aagaactccatcagcaataca

SEQ ID NO: 1385 - DNA, 21 bp, Artificial Sequence
  Synthetic
gatgcttctttgtattgctga

SEQ ID NO: 1386 - DNA, 21 bp, Artificial Sequence
  Synthetic
agatgcttctttgtattgctg

SEQ ID NO: 1387 - DNA, 21 bp, Artificial Sequence
  Synthetic
atcagcaatacaaagaagcat

SEQ ID NO: 1388 - DNA, 21 bp, Artificial Sequence
  Synthetic
agcatctgaagtaaagccacc

SEQ ID NO: 1389 - DNA, 21 bp, Artificial Sequence
  Synthetic
agccacccagagatattactg

SEQ ID NO: 1390 - DNA, 21 bp, Artificial Sequence
  Synthetic
aagaactcggcagtaatatct

SEQ ID NO: 1391 - DNA, 21 bp, Artificial Sequence
  Synthetic
gatattactgccgagttctta

SEQ ID NO: 1392 - DNA, 21 bp, Artificial Sequence
  Synthetic
gttcttagtgaaaagcaaaca

SEQ ID NO: 1393 - DNA, 21 bp, Artificial Sequence
  Synthetic
ttcttagtgaaaagcaaacac

SEQ ID NO: 1394 - DNA, 21 bp, Artificial Sequence
  Synthetic
gtatgtataccacaccttgca

SEQ ID NO: 1395 - DNA, 21 bp, Artificial Sequence
  Synthetic
atcaggaatatgatgaattag

SEQ ID NO: 1396 - DNA, 21 bp, Artificial Sequence
  Synthetic
atgatgaattagctgaaacac

SEQ ID NO: 1397 - DNA, 21 bp, Artificial Sequence
  Synthetic
tgatgaattagctgaaacaca

SEQ ID NO: 1398 - DNA, 21 bp, Artificial Sequence
  Synthetic
tagctgaaacacaaggaaagc

SEQ ID NO: 1399 - DNA, 21 bp, Artificial Sequence
  Synthetic
ctgaaacacaaggaaagctag

SEQ ID NO: 1400 - DNA, 21 bp, Artificial Sequence
  Synthetic
ggaaagctagaagaaaaactt

SEQ ID NO: 1401 - DNA, 21 bp, Artificial Sequence
  Synthetic
gaaagctagaagaaaaacttc

SEQ ID NO: 1402 - DNA, 21 bp, Artificial Sequence
  Synthetic
ctagaagaaaaacttcaggag

SEQ ID NO: 1403 - DNA, 21 bp, Artificial Sequence
  Synthetic
tagaagaaaaacttcaggagt

SEQ ID NO: 1404 - DNA, 21 bp, Artificial Sequence
  Synthetic
gaaaaacttcaggagttggaa

SEQ ID NO: 1405 - DNA, 21 bp, Artificial Sequence
  Synthetic
tgggggattcgcttccaactc

SEQ ID NO: 1406 - DNA, 21 bp, Artificial Sequence
  Synthetic
tggaagcgaatcccccaaggt

SEQ ID NO: 1407 - DNA, 21 bp, Artificial Sequence
  Synthetic
cagtgatgtatatctctcatc

SEQ ID NO: 1408 - DNA, 21 bp, Artificial Sequence
  Synthetic
agtatttgtctgtctcttgat

SEQ ID NO: 1409 - DNA, 21 bp, Artificial Sequence
  Synthetic
caagtatttgtctgtctcttg

SEQ ID NO: 1410 - DNA, 21 bp, Artificial Sequence
  Synthetic
gtgcttaagggagagagttga

SEQ ID NO: 1411 - DNA, 21 bp, Artificial Sequence
  Synthetic
cagtgcttaagggagagagtt

SEQ ID NO: 1412 - DNA, 21 bp, Artificial Sequence
  Synthetic
cccagtgcttaagggagagag

SEQ ID NO: 1413 - DNA, 21 bp, Artificial Sequence
  Synthetic
ctcaactctctcccttaagca

SEQ ID NO: 1414 - DNA, 21 bp, Artificial Sequence
  Synthetic
tcaactctctcccttaagcac

SEQ ID NO: 1415 - DNA, 21 bp, Artificial Sequence
  Synthetic
ctgatcccagtgcttaaggga

SEQ ID NO: 1416 - DNA, 21 bp, Artificial Sequence
  Synthetic
acctgatcccagtgcttaagg

SEQ ID NO: 1417 - DNA, 21 bp, Artificial Sequence
  Synthetic
ttacctgatcccagtgcttaa

SEQ ID NO: 1418 - DNA, 21 bp, Artificial Sequence
  Synthetic
cttacctgatcccagtgctta

SEQ ID NO: 1419 - DNA, 21 bp, Artificial Sequence
  Synthetic
acttacctgatcccagtgctt

SEQ ID NO: 1420 - DNA, 21 bp, Artificial Sequence
  Synthetic
ctcctctttaggatgatgact

SEQ ID NO: 1421 - DNA, 21 bp, Artificial Sequence
  Synthetic
cttactgtcaggtggctgcca

SEQ ID NO: 1422 - DNA, 21 bp, Artificial Sequence
  Synthetic
cactggcagccacctgacagt

SEQ ID NO: 1423 - DNA, 21 bp, Artificial Sequence
  Synthetic
actggcagccacctgacagta

SEQ ID NO: 1424 - DNA, 21 bp, Artificial Sequence
  Synthetic
ctgctaaagccacaggcacac

SEQ ID NO: 1425 - DNA, 21 bp, Artificial Sequence
  Synthetic
cgtgtgtgcctgtggctttag

SEQ ID NO: 1426 - DNA, 21 bp, Artificial Sequence
  Synthetic
gcagaaggcctagacattaaa

SEQ ID NO: 1427 - DNA, 21 bp, Artificial Sequence
  Synthetic
tgacatacctgaagccgtgta

SEQ ID NO: 1428 - DNA, 21 bp, Artificial Sequence
  Synthetic
gcaggatgtgaagtgatagct

SEQ ID NO: 1429 - DNA, 21 bp, Artificial Sequence
  Synthetic
atagctgtgaatacccgctcc

SEQ ID NO: 1430 - DNA, 21 bp, Artificial Sequence
  Synthetic
aataaaggtttgactcgtgga

SEQ ID NO: 1431 - DNA, 21 bp, Artificial Sequence
  Synthetic
tataaataaaggtttgactcg

SEQ ID NO: 1432 - DNA, 21 bp, Artificial Sequence
  Synthetic
ttataaataaaggtttgactc

SEQ ID NO: 1433 - DNA, 21 bp, Artificial Sequence
  Synthetic
gcagttctctgtacccttccc

SEQ ID NO: 1434 - DNA, 21 bp, Artificial Sequence
  Synthetic
cacacccaggggaagggtaca

SEQ ID NO: 1435 - DNA, 21 bp, Artificial Sequence
  Synthetic
agcacacccaggggaagggta

SEQ ID NO: 1436 - DNA, 21 bp, Artificial Sequence
  Synthetic
tgtacccttcccctgggtgtg

SEQ ID NO: 1437 - DNA, 21 bp, Artificial Sequence
  Synthetic
ctgcttcagcacacccagggg

SEQ ID NO: 1438 - DNA, 21 bp, Artificial Sequence
  Synthetic
ctgctgcttcagcacacccag

SEQ ID NO: 1439 - DNA, 21 bp, Artificial Sequence
  Synthetic
gctgctgcttcagcacaccca

SEQ ID NO: 1440 - DNA, 21 bp, Artificial Sequence
  Synthetic
ggctgctgcttcagcacaccc

SEQ ID NO: 1441 - DNA, 21 bp, Artificial Sequence
  Synthetic
tggctgctgcttcagcacacc

SEQ ID NO: 1442 - DNA, 21 bp, Artificial Sequence
  Synthetic
ctcagggagaggtggcacaaa

SEQ ID NO: 1443 - DNA, 21 bp, Artificial Sequence
  Synthetic
ttcagtttgtgccacctctcc

SEQ ID NO: 1444 - DNA, 21 bp, Artificial Sequence
  Synthetic
gtttgtgccacctctccctga

SEQ ID NO: 1445 - DNA, 21 bp, Artificial Sequence
  Synthetic
tttgtgccacctctccctgag

SEQ ID NO: 1446 - DNA, 21 bp, Artificial Sequence
  Synthetic
gtggaaaacatctgcagtcca

SEQ ID NO: 1447 - DNA, 21 bp, Artificial Sequence
  Synthetic
aaaacatctgcagtccaaagg

SEQ ID NO: 1448 - DNA, 21 bp, Artificial Sequence
  Synthetic
aaacatctgcagtccaaagga

SEQ ID NO: 1449 - DNA, 21 bp, Artificial Sequence
  Synthetic
aaggttgccaaatcccatcct

SEQ ID NO: 1450 - DNA, 21 bp, Artificial Sequence
  Synthetic
aacaaattgacacttggatcc

SEQ ID NO: 1451 - DNA, 21 bp, Artificial Sequence
  Synthetic
gggatccaagtgtcaatttgt

SEQ ID NO: 1452 - DNA, 21 bp, Artificial Sequence
  Synthetic
catgcccgaacaaattgacac

SEQ ID NO: 1453 - DNA, 21 bp, Artificial Sequence
  Synthetic
gcagtcgtactgccaacatgc

SEQ ID NO: 1454 - DNA, 21 bp, Artificial Sequence
  Synthetic
tgttggcagtacgactgccag

SEQ ID NO: 1455 - DNA, 21 bp, Artificial Sequence
  Synthetic
gttggcagtacgactgccagc

SEQ ID NO: 1456 - DNA, 21 bp, Artificial Sequence
  Synthetic
gcagtacgactgccagcaggg

SEQ ID NO: 1457 - DNA, 21 bp, Artificial Sequence
  Synthetic
caggggtgagctcttcctctt

SEQ ID NO: 1458 - DNA, 21 bp, Artificial Sequence
  Synthetic
aggggtgagctcttcctcttc

SEQ ID NO: 1459 - DNA, 21 bp, Artificial Sequence
  Synthetic
ttatagaggttccagaagagg

SEQ ID NO: 1460 - DNA, 21 bp, Artificial Sequence
  Synthetic
cctttatagaggttccagaag

SEQ ID NO: 1461 - DNA, 21 bp, Artificial Sequence
  Synthetic
acctttatagaggttccagaa

SEQ ID NO: 1462 - DNA, 21 bp, Artificial Sequence
  Synthetic
ttacctttatagaggttccag

SEQ ID NO: 1463 - DNA, 21 bp, Artificial Sequence
  Synthetic
catttacctttatagaggttc

SEQ ID NO: 1464 - DNA, 21 bp, Artificial Sequence
  Synthetic
attagaaggcatttaccttta

SEQ ID NO: 1465 - DNA, 21 bp, Artificial Sequence
  Synthetic
agtgccaacagtattggagct

SEQ ID NO: 1466 - DNA, 21 bp, Artificial Sequence
  Synthetic
tagtgccaacagtattggagc

SEQ ID NO: 1467 - DNA, 21 bp, Artificial Sequence
  Synthetic
ctagtgccaacagtattggag

SEQ ID NO: 1468 - DNA, 21 bp, Artificial Sequence
  Synthetic
tgccactagtgccaacagtat

SEQ ID NO: 1469 - DNA, 21 bp, Artificial Sequence
  Synthetic
ctgccactagtgccaacagta

SEQ ID NO: 1470 - DNA, 21 bp, Artificial Sequence
  Synthetic
caatactgttggcactagtgg

SEQ ID NO: 1471 - DNA, 21 bp, Artificial Sequence
  Synthetic
aatactgttggcactagtggc

SEQ ID NO: 1472 - DNA, 21 bp, Artificial Sequence
  Synthetic
tactgttggcactagtggcag

SEQ ID NO: 1473 - DNA, 21 bp, Artificial Sequence
  Synthetic
gcaggagaagctgctggtatc

SEQ ID NO: 1474 - DNA, 21 bp, Artificial Sequence
  Synthetic
caggagaagctgctggtatca

SEQ ID NO: 1475 - DNA, 21 bp, Artificial Sequence
  Synthetic
gccgatgcctggccattctca

SEQ ID NO: 1476 - DNA, 21 bp, Artificial Sequence
  Synthetic
ccgatgcctggccattctcaa

SEQ ID NO: 1477 - DNA, 21 bp, Artificial Sequence
  Synthetic
actgctaccaaaaatcccttt

SEQ ID NO: 1478 - DNA, 21 bp, Artificial Sequence
  Synthetic
gcactgctaccaaaaatccct

SEQ ID NO: 1479 - DNA, 21 bp, Artificial Sequence
  Synthetic
caacgagacaccacagtttct

SEQ ID NO: 1480 - DNA, 21 bp, Artificial Sequence
  Synthetic
gtctcgttggcgtgctgatcc

SEQ ID NO: 1481 - DNA, 21 bp, Artificial Sequence
  Synthetic
agcccagggatcagcacgcca

SEQ ID NO: 1482 - DNA, 21 bp, Artificial Sequence
  Synthetic
ttggcgtgctgatccctgggc

SEQ ID NO: 1483 - DNA, 21 bp, Artificial Sequence
  Synthetic
tggcgtgctgatccctgggct

SEQ ID NO: 1484 - DNA, 21 bp, Artificial Sequence
  Synthetic
aggaataagagccccgagccc

SEQ ID NO: 1485 - DNA, 21 bp, Artificial Sequence
  Synthetic
taggaataagagccccgagcc

SEQ ID NO: 1486 - DNA, 21 bp, Artificial Sequence
  Synthetic
agcaacataggaataagagcc

SEQ ID NO: 1487 - DNA, 21 bp, Artificial Sequence
  Synthetic
gctcttattcctatgttgctg

SEQ ID NO: 1488 - DNA, 21 bp, Artificial Sequence
  Synthetic
atcctgcagcaacataggaat

SEQ ID NO: 1489 - DNA, 21 bp, Artificial Sequence
  Synthetic
cagatgatcctgcagcaacat

SEQ ID NO: 1490 - DNA, 21 bp, Artificial Sequence
  Synthetic
ccagatgatcctgcagcaaca

SEQ ID NO: 1491 - DNA, 21 bp, Artificial Sequence
  Synthetic
cctatgttgctgcaggatcat

SEQ ID NO: 1492 - DNA, 21 bp, Artificial Sequence
  Synthetic
ctatgttgctgcaggatcatc

SEQ ID NO: 1493 - DNA, 21 bp, Artificial Sequence
  Synthetic
cgaggggccaggagtgattgg

SEQ ID NO: 1494 - DNA, 21 bp, Artificial Sequence
  Synthetic
ggcacctggaatcgaggggcc

SEQ ID NO: 1495 - DNA, 21 bp, Artificial Sequence
  Synthetic
gggcacctggaatcgaggggc

SEQ ID NO: 1496 - DNA, 21 bp, Artificial Sequence
  Synthetic
cctgtggggcacctggaatcg

SEQ ID NO: 1497 - DNA, 21 bp, Artificial Sequence
  Synthetic
acctgtggggcacctggaatc

SEQ ID NO: 1498 - DNA, 21 bp, Artificial Sequence
  Synthetic
tcacctgtggggcacctggaa

SEQ ID NO: 1499 - DNA, 21 bp, Artificial Sequence
  Synthetic
tcgattccaggtgccccacag

SEQ ID NO: 1500 - DNA, 21 bp, Artificial Sequence
  Synthetic
gattccaggtgccccacaggt

SEQ ID NO: 1501 - DNA, 21 bp, Artificial Sequence
  Synthetic
gcttctcacctgtggggcacc

SEQ ID NO: 1502 - DNA, 21 bp, Artificial Sequence
  Synthetic
agcttctcacctgtggggcac

SEQ ID NO: 1503 - DNA, 21 bp, Artificial Sequence
  Synthetic
agtttgccagcttctcacctg

SEQ ID NO: 1504 - DNA, 21 bp, Artificial Sequence
  Synthetic
ccgattccacgactcttcttt

SEQ ID NO: 1505 - DNA, 21 bp, Artificial Sequence
  Synthetic
cgattccacgactcttctttg

SEQ ID NO: 1506 - DNA, 21 bp, Artificial Sequence
  Synthetic
gattccacgactcttctttgc

SEQ ID NO: 1507 - DNA, 21 bp, Artificial Sequence
  Synthetic
ttctcccgcaaagaagagtcg

SEQ ID NO: 1508 - DNA, 21 bp, Artificial Sequence
  Synthetic
ttccacgactcttctttgcgg

SEQ ID NO: 1509 - DNA, 21 bp, Artificial Sequence
  Synthetic
gttctcccgcaaagaagagtc

SEQ ID NO: 1510 - DNA, 21 bp, Artificial Sequence
  Synthetic
atcgtatgttctcccgcaaag

SEQ ID NO: 1511 - DNA, 21 bp, Artificial Sequence
  Synthetic
cggatcgtatgttctcccgca

SEQ ID NO: 1512 - DNA, 21 bp, Artificial Sequence
  Synthetic
atgcactgtggctgggtagtt

SEQ ID NO: 1513 - DNA, 21 bp, Artificial Sequence
  Synthetic
gcagagcaccatgcactgtgg

SEQ ID NO: 1514 - DNA, 21 bp, Artificial Sequence
  Synthetic
gccacagtgcatggtgctctg

SEQ ID NO: 1515 - DNA, 21 bp, Artificial Sequence
  Synthetic
cagtgcatggtgctctgctga

SEQ ID NO: 1516 - DNA, 21 bp, Artificial Sequence
  Synthetic
tggtgctctgctgagtgggct

SEQ ID NO: 1517 - DNA, 21 bp, Artificial Sequence
  Synthetic
gtgctctgctgagtgggctgc

SEQ ID NO: 1518 - DNA, 21 bp, Artificial Sequence
  Synthetic
cgcttctcgcagcccactcag

SEQ ID NO: 1519 - DNA, 21 bp, Artificial Sequence
  Synthetic
ctgctgagtgggctgcgagaa

SEQ ID NO: 1520 - DNA, 21 bp, Artificial Sequence
  Synthetic
tgctgagtgggctgcgagaag

SEQ ID NO: 1521 - DNA, 21 bp, Artificial Sequence
  Synthetic
gctgagtgggctgcgagaagc

SEQ ID NO: 1522 - DNA, 21 bp, Artificial Sequence
  Synthetic
gagtgggctgcgagaagcggg

SEQ ID NO: 1523 - DNA, 21 bp, Artificial Sequence
  Synthetic
gtagcattaatgtgtgaacaa

SEQ ID NO: 1524 - DNA, 21 bp, Artificial Sequence
  Synthetic
cccacgagcgagcagatacct

SEQ ID NO: 1525 - DNA, 21 bp, Artificial Sequence
  Synthetic
ttcccaggtatctgctcgctc

SEQ ID NO: 1526 - DNA, 21 bp, Artificial Sequence
  Synthetic
tcccacgagcgagcagatacc

SEQ ID NO: 1527 - DNA, 21 bp, Artificial Sequence
  Synthetic
tcccaggtatctgctcgctcg

SEQ ID NO: 1528 - DNA, 21 bp, Artificial Sequence
  Synthetic
gtcccacgagcgagcagatac

SEQ ID NO: 1529 - DNA, 21 bp, Artificial Sequence
  Synthetic
ctgctcgctcgtgggaccaca

SEQ ID NO: 1530 - DNA, 21 bp, Artificial Sequence
  Synthetic
gaattcattgtggtcccacga

SEQ ID NO: 1531 - DNA, 21 bp, Artificial Sequence
  Synthetic
caaagaattcattgtggtccc

SEQ ID NO: 1532 - DNA, 21 bp, Artificial Sequence
  Synthetic
tggtcaccagcaaactgggca

SEQ ID NO: 1533 - DNA, 21 bp, Artificial Sequence
  Synthetic
cagagtgtggtcaccagcaaa

SEQ ID NO: 1534 - DNA, 21 bp, Artificial Sequence
  Synthetic
gtgaccacactctgctaactc

SEQ ID NO: 1535 - DNA, 21 bp, Artificial Sequence
  Synthetic
caccgagtacccgggagttag

SEQ ID NO: 1536 - DNA, 21 bp, Artificial Sequence
  Synthetic
ttcaattatcaccgagtaccc

SEQ ID NO: 1537 - DNA, 21 bp, Artificial Sequence
  Synthetic
ctcccgggtactcggtgataa

SEQ ID NO: 1538 - DNA, 21 bp, Artificial Sequence
  Synthetic
tttcaattatcaccgagtacc

SEQ ID NO: 1539 - DNA, 21 bp, Artificial Sequence
  Synthetic
cggtgataattgaaaaactgg

SEQ ID NO: 1540 - DNA, 21 bp, Artificial Sequence
  Synthetic
tgataattgaaaaactggcag

SEQ ID NO: 1541 - DNA, 21 bp, Artificial Sequence
  Synthetic
gacattcaactcaaatctcca

SEQ ID NO: 1542 - DNA, 21 bp, Artificial Sequence
  Synthetic
gatactcactggagatttgag

SEQ ID NO: 1543 - DNA, 21 bp, Artificial Sequence
  Synthetic
cagttgatactcactggagat

SEQ ID NO: 1544 - DNA, 21 bp, Artificial Sequence
  Synthetic
aggtgcagtgtattgattatt

SEQ ID NO: 1545 - DNA, 21 bp, Artificial Sequence
  Synthetic
ggtgcagtgtattgattattc

SEQ ID NO: 1546 - DNA, 21 bp, Artificial Sequence
  Synthetic
agtgtattgattattctggag

SEQ ID NO: 1547 - DNA, 21 bp, Artificial Sequence
  Synthetic
tggtaacctgcacttcatctc

SEQ ID NO: 1548 - DNA, 21 bp, Artificial Sequence
  Synthetic
aggttaccactacagatggca

SEQ ID NO: 1549 - DNA, 21 bp, Artificial Sequence
  Synthetic
agggtattctgcacaaaaggt

SEQ ID NO: 1550 - DNA, 21 bp, Artificial Sequence
  Synthetic
gtggtacagtgactaatacct

SEQ ID NO: 1551 - DNA, 21 bp, Artificial Sequence
  Synthetic
actgtaccactggctttacta

SEQ ID NO: 1552 - DNA, 21 bp, Artificial Sequence
  Synthetic
ctctgacaacggtggattaaa

SEQ ID NO: 1553 - DNA, 21 bp, Artificial Sequence
  Synthetic
ttcagtttaatccaccgttgt

SEQ ID NO: 1554 - DNA, 21 bp, Artificial Sequence
  Synthetic
cagtttaatccaccgttgtca

SEQ ID NO: 1555 - DNA, 21 bp, Artificial Sequence
  Synthetic
tttaatccaccgttgtcagag

SEQ ID NO: 1556 - DNA, 21 bp, Artificial Sequence
  Synthetic
tcatcttcttctctgacaacg

SEQ ID NO: 1557 - DNA, 21 bp, Artificial Sequence
  Synthetic
ccaccgttgtcagagaagaag

SEQ ID NO: 1558 - DNA, 21 bp, Artificial Sequence
  Synthetic
acagcttaggcgcaggcatca

SEQ ID NO: 1559 - DNA, 21 bp, Artificial Sequence
  Synthetic
cttgcaatttccgtatagatt

SEQ ID NO: 1560 - DNA, 21 bp, Artificial Sequence
  Synthetic
ttgcaatttccgtatagattt

SEQ ID NO: 1561 - DNA, 21 bp, Artificial Sequence
  Synthetic
tttactgtcccaaaatctata

SEQ ID NO: 1562 - DNA, 21 bp, Artificial Sequence
  Synthetic
ctttactgtcccaaaatctat

SEQ ID NO: 1563 - DNA, 21 bp, Artificial Sequence
  Synthetic
cgttcctcccagtgccagcaa

SEQ ID NO: 1564 - DNA, 21 bp, Artificial Sequence
  Synthetic
ccctcgcttgctggcactggg

SEQ ID NO: 1565 - DNA, 21 bp, Artificial Sequence
  Synthetic
ttcctcccagtgccagcaagc

SEQ ID NO: 1566 - DNA, 21 bp, Artificial Sequence
  Synthetic
gccctcgcttgctggcactgg

SEQ ID NO: 1567 - DNA, 21 bp, Artificial Sequence
  Synthetic
aagccctcgcttgctggcact

SEQ ID NO: 1568 - DNA, 21 bp, Artificial Sequence
  Synthetic
aaagccctcgcttgctggcac

SEQ ID NO: 1569 - DNA, 21 bp, Artificial Sequence
  Synthetic
aaaagccctcgcttgctggca

SEQ ID NO: 1570 - DNA, 21 bp, Artificial Sequence
  Synthetic
tttacctggggatccatgtca

SEQ ID NO: 1571 - DNA, 21 bp, Artificial Sequence
  Synthetic
atcagcacgctgtgcttcttc

SEQ ID NO: 1572 - DNA, 21 bp, Artificial Sequence
  Synthetic
catcagcacgctgtgcttctt

SEQ ID NO: 1573 - DNA, 21 bp, Artificial Sequence
  Synthetic
gcgtgctgatgtctgtgattg

SEQ ID NO: 1574 - DNA, 21 bp, Artificial Sequence
  Synthetic
cgtgctgatgtctgtgattgc

SEQ ID NO: 1575 - DNA, 21 bp, Artificial Sequence
  Synthetic
gtgctgatgtctgtgattgcc

SEQ ID NO: 1576 - DNA, 21 bp, Artificial Sequence
  Synthetic
tgctgatgtctgtgattgccg

SEQ ID NO: 1577 - DNA, 21 bp, Artificial Sequence
  Synthetic
gccggggaggctgtcgcatcc

SEQ ID NO: 1578 - DNA, 21 bp, Artificial Sequence
  Synthetic
cggggaggctgtcgcatccgt

SEQ ID NO: 1579 - DNA, 21 bp, Artificial Sequence
  Synthetic
gctgtcgcatccgtgaggacc

SEQ ID NO: 1580 - DNA, 21 bp, Artificial Sequence
  Synthetic
tgtttgtcatccagggtcctc

SEQ ID NO: 1581 - DNA, 21 bp, Artificial Sequence
  Synthetic
ctgcagcacctgtttgtcatc

SEQ ID NO: 1582 - DNA, 21 bp, Artificial Sequence
  Synthetic
gcagcagtgcatggccacgct

SEQ ID NO: 1583 - DNA, 21 bp, Artificial Sequence
  Synthetic
cagcagtgcatggccacgctc

SEQ ID NO: 1584 - DNA, 21 bp, Artificial Sequence
  Synthetic
agcagtgcatggccacgctcc

SEQ ID NO: 1585 - DNA, 21 bp, Artificial Sequence
  Synthetic
gccacgctccgggagctgttc

SEQ ID NO: 1586 - DNA, 21 bp, Artificial Sequence
  Synthetic
ccacgctccgggagctgttca

SEQ ID NO: 1587 - DNA, 21 bp, Artificial Sequence
  Synthetic
acctgctccttgaacagctcc

SEQ ID NO: 1588 - DNA, 21 bp, Artificial Sequence
  Synthetic
cacctgctccttgaacagctc

SEQ ID NO: 1589 - DNA, 21 bp, Artificial Sequence
  Synthetic
cgggagctgttcaaggagcag

SEQ ID NO: 1590 - DNA, 21 bp, Artificial Sequence
  Synthetic
ggagctgttcaaggagcaggt

SEQ ID NO: 1591 - DNA, 21 bp, Artificial Sequence
  Synthetic
ttcctctctctcacctgctcc

SEQ ID NO: 1592 - DNA, 21 bp, Artificial Sequence
  Synthetic
gacaaaatactttgtgggatc

SEQ ID NO: 1593 - DNA, 21 bp, Artificial Sequence
  Synthetic
tgacaaaatactttgtgggat

SEQ ID NO: 1594 - DNA, 21 bp, Artificial Sequence
  Synthetic
accgagtgacaaaatactttg

SEQ ID NO: 1595 - DNA, 21 bp, Artificial Sequence
  Synthetic
caccgagtgacaaaatacttt

SEQ ID NO: 1596 - DNA, 21 bp, Artificial Sequence
  Synthetic
cactcggtggagcacagaccc

SEQ ID NO: 1597 - DNA, 21 bp, Artificial Sequence
  Synthetic
gatccatgggtctgtgctcca

SEQ ID NO: 1598 - DNA, 21 bp, Artificial Sequence
  Synthetic
aactgtatgccatctggatcc

SEQ ID NO: 1599 - DNA, 21 bp, Artificial Sequence
  Synthetic
cttcacaaaactgtatgccat

SEQ ID NO: 1600 - DNA, 21 bp, Artificial Sequence
  Synthetic
tttgtgaagacaggtggaagt

SEQ ID NO: 1601 - DNA, 21 bp, Artificial Sequence
  Synthetic
ttgtgaagacaggtggaagtg

SEQ ID NO: 1602 - DNA, 21 bp, Artificial Sequence
  Synthetic
gggaggcctacgatatcattg

SEQ ID NO: 1603 - DNA, 21 bp, Artificial Sequence
  Synthetic
atatcattgctgaagacattc

SEQ ID NO: 1604 - DNA, 21 bp, Artificial Sequence
  Synthetic
tatcattgctgaagacattca

SEQ ID NO: 1605 - DNA, 21 bp, Artificial Sequence
  Synthetic
accagcgaaaaagacggttcc

SEQ ID NO: 1606 - DNA, 21 bp, Artificial Sequence
  Synthetic
atcaagatccatacctcacca

SEQ ID NO: 1607 - DNA, 21 bp, Artificial Sequence
  Synthetic
ggcatttcccacaaactgtta

SEQ ID NO: 1608 - DNA, 21 bp, Artificial Sequence
  Synthetic
gcatttcccacaaactgttac

SEQ ID NO: 1609 - DNA, 21 bp, Artificial Sequence
  Synthetic
tatgcccctgtaacagtttgt

SEQ ID NO: 1610 - DNA, 21 bp, Artificial Sequence
  Synthetic
atatgcccctgtaacagtttg

SEQ ID NO: 1611 - DNA, 21 bp, Artificial Sequence
  Synthetic
aatatgcccctgtaacagttt

SEQ ID NO: 1612 - DNA, 21 bp, Artificial Sequence
  Synthetic
caaactgttacaggggcatat

SEQ ID NO: 1613 - DNA, 21 bp, Artificial Sequence
  Synthetic
aggggcatatttgagtggcgt

SEQ ID NO: 1614 - DNA, 21 bp, Artificial Sequence
  Synthetic
gggcatatttgagtggcgttc

SEQ ID NO: 1615 - DNA, 21 bp, Artificial Sequence
  Synthetic
tgctgcaatcttgcttgcttc

SEQ ID NO: 1616 - DNA, 21 bp, Artificial Sequence
  Synthetic
cttgctcctgtcgtgtatgtg

SEQ ID NO: 1617 - DNA, 21 bp, Artificial Sequence
  Synthetic
ttgctcctgtcgtgtatgtgg

SEQ ID NO: 1618 - DNA, 21 bp, Artificial Sequence
  Synthetic
tgctcctgtcgtgtatgtggt

SEQ ID NO: 1619 - DNA, 21 bp, Artificial Sequence
  Synthetic
gtttcccaccacatacacgac

SEQ ID NO: 1620 - DNA, 21 bp, Artificial Sequence
  Synthetic
tgtttcccaccacatacacga

SEQ ID NO: 1621 - DNA, 21 bp, Artificial Sequence
  Synthetic
gtcgtgtatgtggtgggaaac

SEQ ID NO: 1622 - DNA, 21 bp, Artificial Sequence
  Synthetic
tcatcacacagaagctgcatg

SEQ ID NO: 1623 - DNA, 21 bp, Artificial Sequence
  Synthetic
ccaacatgcagcttctgtgtg

SEQ ID NO: 1624 - DNA, 21 bp, Artificial Sequence
  Synthetic
agccacattacattcatcaca

SEQ ID NO: 1625 - DNA, 21 bp, Artificial Sequence
  Synthetic
gtggcttatcatatttactgt

SEQ ID NO: 1626 - DNA, 21 bp, Artificial Sequence
  Synthetic
atttactgtctgaatccacct

SEQ ID NO: 1627 - DNA, 21 bp, Artificial Sequence
  Synthetic
atccacctttggataaagtcc

SEQ ID NO: 1628 - DNA, 21 bp, Artificial Sequence
  Synthetic
cttctgggactttatccaaag

SEQ ID NO: 1629 - DNA, 21 bp, Artificial Sequence
  Synthetic
cacctttggataaagtcccag

SEQ ID NO: 1630 - DNA, 21 bp, Artificial Sequence
  Synthetic
cctttggataaagtcccagaa

SEQ ID NO: 1631 - DNA, 21 bp, Artificial Sequence
  Synthetic
ctttggataaagtcccagaag

SEQ ID NO: 1632 - DNA, 21 bp, Artificial Sequence
  Synthetic
atcataccagtattcctcttc

SEQ ID NO: 1633 - DNA, 21 bp, Artificial Sequence
  Synthetic
aatcataccagtattcctctt

SEQ ID NO: 1634 - DNA, 21 bp, Artificial Sequence
  Synthetic
cacgagtggggtctgtttgcc

SEQ ID NO: 1635 - DNA, 21 bp, Artificial Sequence
  Synthetic
acgagtggggtctgtttgcca

SEQ ID NO: 1636 - DNA, 21 bp, Artificial Sequence
  Synthetic
ccatggaacccattgctgctg

SEQ ID NO: 1637 - DNA, 21 bp, Artificial Sequence
  Synthetic
atgaccatctcgtcagcagca

SEQ ID NO: 1638 - DNA, 21 bp, Artificial Sequence
  Synthetic
ttgctgctgacgagatggtca

SEQ ID NO: 1639 - DNA, 21 bp, Artificial Sequence
  Synthetic
gacgagatggtcatcgaatac

SEQ ID NO: 1640 - DNA, 21 bp, Artificial Sequence
  Synthetic
atggtcatcgaatacgtgggt

SEQ ID NO: 1641 - DNA, 21 bp, Artificial Sequence
  Synthetic
gtgggtcagaacatccgtcag

SEQ ID NO: 1642 - DNA, 21 bp, Artificial Sequence
  Synthetic
ctgggagtgcagcctcacctg

SEQ ID NO: 1643 - DNA, 21 bp, Artificial Sequence
  Synthetic
ctggcagatggtggccgacat

SEQ ID NO: 1644 - DNA, 21 bp, Artificial Sequence
  Synthetic
tggcagatggtggccgacatg

SEQ ID NO: 1645 - DNA, 21 bp, Artificial Sequence
  Synthetic
ggcagatggtggccgacatgc

SEQ ID NO: 1646 - DNA, 21 bp, Artificial Sequence
  Synthetic
cagatggtggccgacatgcgg

SEQ ID NO: 1647 - DNA, 21 bp, Artificial Sequence
  Synthetic
atgcgggagaagcgctacgtg

SEQ ID NO: 1648 - DNA, 21 bp, Artificial Sequence
  Synthetic
tgcgggagaagcgctacgtgc

SEQ ID NO: 1649 - DNA, 21 bp, Artificial Sequence
  Synthetic
cgggagaagcgctacgtgcag

SEQ ID NO: 1650 - DNA, 21 bp, Artificial Sequence
  Synthetic
cattggcagcagctacctgtt

SEQ ID NO: 1651 - DNA, 21 bp, Artificial Sequence
  Synthetic
ggcagcagctacctgttccgg

SEQ ID NO: 1652 - DNA, 21 bp, Artificial Sequence
  Synthetic
atgatggtgtcgtggtccacc

SEQ ID NO: 1653 - DNA, 21 bp, Artificial Sequence
  Synthetic
gatgatggtgtcgtggtccac

SEQ ID NO: 1654 - DNA, 21 bp, Artificial Sequence
  Synthetic
cgcaccgtgcagcagtggttg

SEQ ID NO: 1655 - DNA, 21 bp, Artificial Sequence
  Synthetic
ccttggcgtagcagttaggct

SEQ ID NO: 1656 - DNA, 21 bp, Artificial Sequence
  Synthetic
gctacgccaaggtcatcacca

SEQ ID NO: 1657 - DNA, 21 bp, Artificial Sequence
  Synthetic
aaggtcatcaccatcgagtcc

SEQ ID NO: 1658 - DNA, 21 bp, Artificial Sequence
  Synthetic
gtcatcaccatcgagtcccag

SEQ ID NO: 1659 - DNA, 21 bp, Artificial Sequence
  Synthetic
gagtagatcacgatcttcttc

SEQ ID NO: 1660 - DNA, 21 bp, Artificial Sequence
  Synthetic
ggagtagatcacgatcttctt

SEQ ID NO: 1661 - DNA, 21 bp, Artificial Sequence
  Synthetic
tactccaagcagcccattggc

SEQ ID NO: 1662 - DNA, 21 bp, Artificial Sequence
  Synthetic
cgtccacgccaatgggctgct

SEQ ID NO: 1663 - DNA, 21 bp, Artificial Sequence
  Synthetic
tcgtccacgccaatgggctgc

SEQ ID NO: 1664 - DNA, 21 bp, Artificial Sequence
  Synthetic
ccaagcagcccattggcgtgg

SEQ ID NO: 1665 - DNA, 21 bp, Artificial Sequence
  Synthetic
aagcagcccattggcgtggac

SEQ ID NO: 1666 - DNA, 21 bp, Artificial Sequence
  Synthetic
agcagcccattggcgtggacg

SEQ ID NO: 1667 - DNA, 21 bp, Artificial Sequence
  Synthetic
gtgatctcctcgtccacgcca

SEQ ID NO: 1668 - DNA, 21 bp, Artificial Sequence
  Synthetic
ccaaatggcatcatcatgggc

SEQ ID NO: 1669 - DNA, 21 bp, Artificial Sequence
  Synthetic
aactgaccaaatggcatcatc

SEQ ID NO: 1670 - DNA, 21 bp, Artificial Sequence
  Synthetic
tgatgccatttggtcagttgc

SEQ ID NO: 1671 - DNA, 21 bp, Artificial Sequence
  Synthetic
gatgccatttggtcagttgct

SEQ ID NO: 1672 - DNA, 21 bp, Artificial Sequence
  Synthetic
atgccatttggtcagttgctt

SEQ ID NO: 1673 - DNA, 21 bp, Artificial Sequence
  Synthetic
tgccatttggtcagttgcttg

SEQ ID NO: 1674 - DNA, 21 bp, Artificial Sequence
  Synthetic
tcagttgcttgggggacaaac

SEQ ID NO: 1675 - DNA, 21 bp, Artificial Sequence
  Synthetic
gttgcttgggggacaaacaag

SEQ ID NO: 1676 - DNA, 21 bp, Artificial Sequence
  Synthetic
ttgcttgggggacaaacaaga

SEQ ID NO: 1677 - DNA, 21 bp, Artificial Sequence
  Synthetic
ggacaaacaagaaggaaaact

SEQ ID NO: 1678 - DNA, 21 bp, Artificial Sequence
  Synthetic
gggagcctgtgaccactgtct

SEQ ID NO: 1679 - DNA, 21 bp, Artificial Sequence
  Synthetic
acaggctccctagatgacctg

SEQ ID NO: 1680 - DNA, 21 bp, Artificial Sequence
  Synthetic
agaccttcaccaggtcatcta

SEQ ID NO: 1681 - DNA, 21 bp, Artificial Sequence
  Synthetic
cagaccttcaccaggtcatct

SEQ ID NO: 1682 - DNA, 21 bp, Artificial Sequence
  Synthetic
ccagaccttcaccaggtcatc

SEQ ID NO: 1683 - DNA, 21 bp, Artificial Sequence
  Synthetic
cctagatgacctggtgaaggt

SEQ ID NO: 1684 - DNA, 21 bp, Artificial Sequence
  Synthetic
ctagatgacctggtgaaggtc

SEQ ID NO: 1685 - DNA, 21 bp, Artificial Sequence
  Synthetic
cctggtgaaggtctggaaatg

SEQ ID NO: 1686 - DNA, 21 bp, Artificial Sequence
  Synthetic
actggaaaacttctgcatacc

SEQ ID NO: 1687 - DNA, 21 bp, Artificial Sequence
  Synthetic
ctggaaaacttctgcataccc

SEQ ID NO: 1688 - DNA, 21 bp, Artificial Sequence
  Synthetic
atatataccttccagggtatg

SEQ ID NO: 1689 - DNA, 21 bp, Artificial Sequence
  Synthetic
aagatgatgatatataccttc

SEQ ID NO: 1690 - DNA, 21 bp, Artificial Sequence
  Synthetic
agcgaatgggcatggcatggc

SEQ ID NO: 1691 - DNA, 21 bp, Artificial Sequence
  Synthetic
ggggaaaaggtcaaggagcga

SEQ ID NO: 1692 - DNA, 21 bp, Artificial Sequence
  Synthetic
gtccggggaaaaggtcaagga

SEQ ID NO: 1693 - DNA, 21 bp, Artificial Sequence
  Synthetic
gggagtccggggaaaaggtca

SEQ ID NO: 1694 - DNA, 21 bp, Artificial Sequence
  Synthetic
tgggagtccggggaaaaggtc

SEQ ID NO: 1695 - DNA, 21 bp, Artificial Sequence
  Synthetic
tgacaaggagctgggagtccg

SEQ ID NO: 1696 - DNA, 21 bp, Artificial Sequence
  Synthetic
gtgacaaggagctgggagtcc

SEQ ID NO: 1697 - DNA, 21 bp, Artificial Sequence
  Synthetic
agtgacaaggagctgggagtc

SEQ ID NO: 1698 - DNA, 21 bp, Artificial Sequence
  Synthetic
cagtgacaaggagctgggagt

SEQ ID NO: 1699 - DNA, 21 bp, Artificial Sequence
  Synthetic
ctgaagcagtgacaaggagct

SEQ ID NO: 1700 - DNA, 21 bp, Artificial Sequence
  Synthetic
tctgaagcagtgacaaggagc

SEQ ID NO: 1701 - DNA, 21 bp, Artificial Sequence
  Synthetic
atctgaagcagtgacaaggag

SEQ ID NO: 1702 - DNA, 21 bp, Artificial Sequence
  Synthetic
ccatcatctgaagcagtgaca

SEQ ID NO: 1703 - DNA, 21 bp, Artificial Sequence
  Synthetic
gccatcatctgaagcagtgac

SEQ ID NO: 1704 - DNA, 21 bp, Artificial Sequence
  Synthetic
agatcttgatgtagccatcat

SEQ ID NO: 1705 - DNA, 21 bp, Artificial Sequence
  Synthetic
agtgggaaaaaggaatattct

SEQ ID NO: 1706 - DNA, 21 bp, Artificial Sequence
  Synthetic
aaaaaggaatattctttggac

SEQ ID NO: 1707 - DNA, 21 bp, Artificial Sequence
  Synthetic
aaaggaatattctttggacac

SEQ ID NO: 1708 - DNA, 21 bp, Artificial Sequence
  Synthetic
aggaatattctttggacacga

SEQ ID NO: 1709 - DNA, 21 bp, Artificial Sequence
  Synthetic
ggaatattctttggacacgag

SEQ ID NO: 1710 - DNA, 21 bp, Artificial Sequence
  Synthetic
cttacatatgcaatactaaga

SEQ ID NO: 1711 - DNA, 21 bp, Artificial Sequence
  Synthetic
cattcttagtattgcatatgt

SEQ ID NO: 1712 - DNA, 21 bp, Artificial Sequence
  Synthetic
tttccttacatatgcaatact

SEQ ID NO: 1713 - DNA, 21 bp, Artificial Sequence
  Synthetic
tgttctctgaacagagtcctg

SEQ ID NO: 1714 - DNA, 21 bp, Artificial Sequence
  Synthetic
gttctctgaacagagtcctga

SEQ ID NO: 1715 - DNA, 21 bp, Artificial Sequence
  Synthetic
ttctctgaacagagtcctgat

SEQ ID NO: 1716 - DNA, 21 bp, Artificial Sequence
  Synthetic
cactggctaggtatttcccat

SEQ ID NO: 1717 - DNA, 21 bp, Artificial Sequence
  Synthetic
ctgatgggaaatacctagcca

SEQ ID NO: 1718 - DNA, 21 bp, Artificial Sequence
  Synthetic
tgatgggaaatacctagccag

SEQ ID NO: 1719 - DNA, 21 bp, Artificial Sequence
  Synthetic
acctagccagtggagccatag

SEQ ID NO: 1720 - DNA, 21 bp, Artificial Sequence
  Synthetic
cctagccagtggagccataga

SEQ ID NO: 1721 - DNA, 21 bp, Artificial Sequence
  Synthetic
catgccaatttggctggcacg

SEQ ID NO: 1722 - DNA, 21 bp, Artificial Sequence
  Synthetic
cacgctgagcggccatgcctc

SEQ ID NO: 1723 - DNA, 21 bp, Artificial Sequence
  Synthetic
agcggccatgcctcctgggtg

SEQ ID NO: 1724 - DNA, 21 bp, Artificial Sequence
  Synthetic
agaatgcaacgttcagcaccc

SEQ ID NO: 1725 - DNA, 21 bp, Artificial Sequence
  Synthetic
cagaatgcaacgttcagcacc

SEQ ID NO: 1726 - DNA, 21 bp, Artificial Sequence
  Synthetic
acaaagtgagtgtcatcagga

SEQ ID NO: 1727 - DNA, 21 bp, Artificial Sequence
  Synthetic
tggaaacaaagtgagtgtcat

SEQ ID NO: 1728 - DNA, 21 bp, Artificial Sequence
  Synthetic
cattaagtacctggaaacaaa

SEQ ID NO: 1729 - DNA, 21 bp, Artificial Sequence
  Synthetic
gtctgacaaaagtgtaaaagt

SEQ ID NO: 1730 - DNA, 21 bp, Artificial Sequence
  Synthetic
tctgacaaaagtgtaaaagtt

SEQ ID NO: 1731 - DNA, 21 bp, Artificial Sequence
  Synthetic
aaagtgtaaaagtttgggatg

SEQ ID NO: 1732 - DNA, 21 bp, Artificial Sequence
  Synthetic
aagtgtaaaagtttgggatgt

SEQ ID NO: 1733 - DNA, 21 bp, Artificial Sequence
  Synthetic
gttcacaccttctttgatcac

SEQ ID NO: 1734 - DNA, 21 bp, Artificial Sequence
  Synthetic
atcctggtgatcaaagaaggt

SEQ ID NO: 1735 - DNA, 21 bp, Artificial Sequence
  Synthetic
catacctgatcctggtgatca

SEQ ID NO: 1736 - DNA, 21 bp, Artificial Sequence
  Synthetic
aggtctggggagtaaaataca

SEQ ID NO: 1737 - DNA, 21 bp, Artificial Sequence
  Synthetic
ggtctggggagtaaaatacaa

SEQ ID NO: 1738 - DNA, 21 bp, Artificial Sequence
  Synthetic
atggttcaaaaattgtgtctg

SEQ ID NO: 1739 - DNA, 21 bp, Artificial Sequence
  Synthetic
tggttcaaaaattgtgtctgt

SEQ ID NO: 1740 - DNA, 21 bp, Artificial Sequence
  Synthetic
catctccaacagacacaattt

SEQ ID NO: 1741 - DNA, 21 bp, Artificial Sequence
  Synthetic
attgtgtctgttggagatgac

SEQ ID NO: 1742 - DNA, 21 bp, Artificial Sequence
  Synthetic
ttgtgtctgttggagatgacc

SEQ ID NO: 1743 - DNA, 21 bp, Artificial Sequence
  Synthetic
ttaaattggacaatcatagat

SEQ ID NO: 1744 - DNA, 21 bp, Artificial Sequence
  Synthetic
aggctggacctacagtggagt

SEQ ID NO: 1745 - DNA, 21 bp, Artificial Sequence
  Synthetic
ggctggacctacagtggagtc

SEQ ID NO: 1746 - DNA, 21 bp, Artificial Sequence
  Synthetic
ctggacctacagtggagtctg

SEQ ID NO: 1747 - DNA, 21 bp, Artificial Sequence
  Synthetic
tggacctacagtggagtctgg

SEQ ID NO: 1748 - DNA, 21 bp, Artificial Sequence
  Synthetic
tggagtctggagggacatcag

SEQ ID NO: 1749 - DNA, 21 bp, Artificial Sequence
  Synthetic
ggagtctggagggacatcagc

SEQ ID NO: 1750 - DNA, 21 bp, Artificial Sequence
  Synthetic
gagtctggagggacatcagct

SEQ ID NO: 1751 - DNA, 21 bp, Artificial Sequence
  Synthetic
catcagctgggagtggtgtct

SEQ ID NO: 1752 - DNA, 21 bp, Artificial Sequence
  Synthetic
agagctggatgcagcaatggg

SEQ ID NO: 1753 - DNA, 21 bp, Artificial Sequence
  Synthetic
tcaagagagctggatgcagca

SEQ ID NO: 1754 - DNA, 21 bp, Artificial Sequence
  Synthetic
cgaatatgagcatcaagagag

SEQ ID NO: 1755 - DNA, 21 bp, Artificial Sequence
  Synthetic
aaagacgaatatgagcatcaa

SEQ ID NO: 1756 - DNA, 21 bp, Artificial Sequence
  Synthetic
ccaaagacgaatatgagcatc

SEQ ID NO: 1757 - DNA, 21 bp, Artificial Sequence
  Synthetic
tcttgatgctcatattcgtct

SEQ ID NO: 1758 - DNA, 21 bp, Artificial Sequence
  Synthetic
cttgatgctcatattcgtctt

SEQ ID NO: 1759 - DNA, 21 bp, Artificial Sequence
  Synthetic
gctcatattcgtctttgggac

SEQ ID NO: 1760 - DNA, 21 bp, Artificial Sequence
  Synthetic
ttccaagtcccaaagacgaat

SEQ ID NO: 1761 - DNA, 21 bp, Artificial Sequence
  Synthetic
ctcatattcgtctttgggact

SEQ ID NO: 1762 - DNA, 21 bp, Artificial Sequence
  Synthetic
attggaaattattattatgga

SEQ ID NO: 1763 - DNA, 21 bp, Artificial Sequence
  Synthetic
tattatggacagggtcatccc

SEQ ID NO: 1764 - DNA, 21 bp, Artificial Sequence
  Synthetic
gggtcatcccatgaagcctca

SEQ ID NO: 1765 - DNA, 21 bp, Artificial Sequence
  Synthetic
tgcggattctatgaggcttca

SEQ ID NO: 1766 - DNA, 21 bp, Artificial Sequence
  Synthetic
atgcggattctatgaggcttc

SEQ ID NO: 1767 - DNA, 21 bp, Artificial Sequence
  Synthetic
gttatgggtcatgcggattct

SEQ ID NO: 1768 - DNA, 21 bp, Artificial Sequence
  Synthetic
taacagcaagttatgggtcat

SEQ ID NO: 1769 - DNA, 21 bp, Artificial Sequence
  Synthetic
gccataatttaacagcaagtt

SEQ ID NO: 1770 - DNA, 21 bp, Artificial Sequence
  Synthetic
gctgttaaattatggcttata

SEQ ID NO: 1771 - DNA, 21 bp, Artificial Sequence
  Synthetic
aattatggcttatacagaaaa

SEQ ID NO: 1772 - DNA, 21 bp, Artificial Sequence
  Synthetic
attatggcttatacagaaaaa

SEQ ID NO: 1773 - DNA, 21 bp, Artificial Sequence
  Synthetic
tacagaaaaatggaaatatat

SEQ ID NO: 1774 - DNA, 21 bp, Artificial Sequence
  Synthetic
cagtggctttatggggcctct

SEQ ID NO: 1775 - DNA, 21 bp, Artificial Sequence
  Synthetic
agaggccccataaagccactg

SEQ ID NO: 1776 - DNA, 21 bp, Artificial Sequence
  Synthetic
ggccccataaagccactgccg

SEQ ID NO: 1777 - DNA, 21 bp, Artificial Sequence
  Synthetic
atttcttcggcagtggcttta

SEQ ID NO: 1778 - DNA, 21 bp, Artificial Sequence
  Synthetic
catttcttcggcagtggcttt

SEQ ID NO: 1779 - DNA, 21 bp, Artificial Sequence
  Synthetic
aaatgacaaaatatcacagtg

SEQ ID NO: 1780 - DNA, 21 bp, Artificial Sequence
  Synthetic
gttatctggtcttattgaccg

SEQ ID NO: 1781 - DNA, 21 bp, Artificial Sequence
  Synthetic
caataagaccagataacatgt

SEQ ID NO: 1782 - DNA, 21 bp, Artificial Sequence
  Synthetic
tctgagtatagtaagcagatg

SEQ ID NO: 1783 - DNA, 21 bp, Artificial Sequence
  Synthetic
atccatcttccacagttaatg

SEQ ID NO: 1784 - DNA, 21 bp, Artificial Sequence
  Synthetic
tccatcttccacagttaatgt

SEQ ID NO: 1785 - DNA, 21 bp, Artificial Sequence
  Synthetic
catcttccacagttaatgttg

SEQ ID NO: 1786 - DNA, 21 bp, Artificial Sequence
  Synthetic
caatcttctccaacattaact

SEQ ID NO: 1787 - DNA, 21 bp, Artificial Sequence
  Synthetic
gagaagattgtccagtgtttg

SEQ ID NO: 1788 - DNA, 21 bp, Artificial Sequence
  Synthetic
gtccagtgtttgatggactct

SEQ ID NO: 1789 - DNA, 21 bp, Artificial Sequence
  Synthetic
actcaaagagtccatcaaaca

SEQ ID NO: 1790 - DNA, 21 bp, Artificial Sequence
  Synthetic
gttgagagctgacaaaactca

SEQ ID NO: 1791 - DNA, 21 bp, Artificial Sequence
  Synthetic
ttaccaactgaaccgccagtt

SEQ ID NO: 1792 - DNA, 21 bp, Artificial Sequence
  Synthetic
acttaccaactgaaccgccag

SEQ ID NO: 1793 - DNA, 21 bp, Artificial Sequence
  Synthetic
gattgcattagcacttaccaa

SEQ ID NO: 1794 - DNA, 21 bp, Artificial Sequence
  Synthetic
ttctacttcttagctggagct

SEQ ID NO: 1795 - DNA, 21 bp, Artificial Sequence
  Synthetic
tttaacttcacagctccagct

SEQ ID NO: 1796 - DNA, 21 bp, Artificial Sequence
  Synthetic
acagactgatatggctgttaa

SEQ ID NO: 1797 - DNA, 21 bp, Artificial Sequence
  Synthetic
ctgatatggctgttaattggg

SEQ ID NO: 1798 - DNA, 21 bp, Artificial Sequence
  Synthetic
tgatatggctgttaattgggc

SEQ ID NO: 1799 - DNA, 21 bp, Artificial Sequence
  Synthetic
atatggctgttaattgggctg

SEQ ID NO: 1800 - DNA, 21 bp, Artificial Sequence
  Synthetic
gctggaggattacatcatgct

SEQ ID NO: 1801 - DNA, 21 bp, Artificial Sequence
  Synthetic
gattacatcatgctaagaaat

SEQ ID NO: 1802 - DNA, 21 bp, Artificial Sequence
  Synthetic
atgctaagaaatcagaagcat

SEQ ID NO: 1803 - DNA, 21 bp, Artificial Sequence
  Synthetic
agcacaatatcattaacgtaa

SEQ ID NO: 1804 - DNA, 21 bp, Artificial Sequence
  Synthetic
atgatattgtgcttgccatcc

SEQ ID NO: 1805 - DNA, 21 bp, Artificial Sequence
  Synthetic
attaacatactttagtaattc

SEQ ID NO: 1806 - DNA, 21 bp, Artificial Sequence
  Synthetic
tataagactctctgatgatac

SEQ ID NO: 1807 - DNA, 21 bp, Artificial Sequence
  Synthetic
atattcatcatggtgatggtg

SEQ ID NO: 1808 - DNA, 21 bp, Artificial Sequence
  Synthetic
ttcttcaacaccatcaccatg

SEQ ID NO: 1809 - DNA, 21 bp, Artificial Sequence
  Synthetic
ttcatcatggtgatggtgttg

SEQ ID NO: 1810 - DNA, 21 bp, Artificial Sequence
  Synthetic
tgacggtatcattccataaat

SEQ ID NO: 1811 - DNA, 21 bp, Artificial Sequence
  Synthetic
gacggtatcattccataaata

SEQ ID NO: 1812 - DNA, 21 bp, Artificial Sequence
  Synthetic
acggtatcattccataaatat

SEQ ID NO: 1813 - DNA, 21 bp, Artificial Sequence
  Synthetic
cggtatcattccataaatatg

SEQ ID NO: 1814 - DNA, 21 bp, Artificial Sequence
  Synthetic
ggaaagtattccccatattta

SEQ ID NO: 1815 - DNA, 21 bp, Artificial Sequence
  Synthetic
aggaaagtattccccatattt

SEQ ID NO: 1816 - DNA, 21 bp, Artificial Sequence
  Synthetic
atggggaatactttcctggca

SEQ ID NO: 1817 - DNA, 21 bp, Artificial Sequence
  Synthetic
tggggaatactttcctggcac

SEQ ID NO: 1818 - DNA, 21 bp, Artificial Sequence
  Synthetic
tactttcctggcacaggagac

SEQ ID NO: 1819 - DNA, 21 bp, Artificial Sequence
  Synthetic
ctttcctggcacaggagactt

SEQ ID NO: 1820 - DNA, 21 bp, Artificial Sequence
  Synthetic
taccctcaagtctcctgtgcc

SEQ ID NO: 1821 - DNA, 21 bp, Artificial Sequence
  Synthetic
ttaccctcaagtctcctgtgc

SEQ ID NO: 1822 - DNA, 21 bp, Artificial Sequence
  Synthetic
atcatctataccatctctcat

SEQ ID NO: 1823 - DNA, 21 bp, Artificial Sequence
  Synthetic
catcatctataccatctctca

SEQ ID NO: 1824 - DNA, 21 bp, Artificial Sequence
  Synthetic
caatgagagatggtatagatg

SEQ ID NO: 1825 - DNA, 21 bp, Artificial Sequence
  Synthetic
atggtatagatgatgagtcat

SEQ ID NO: 1826 - DNA, 21 bp, Artificial Sequence
  Synthetic
gtgtagattatctcaaaggtg

SEQ ID NO: 1827 - DNA, 21 bp, Artificial Sequence
  Synthetic
tgtagattatctcaaaggtga

SEQ ID NO: 1828 - DNA, 21 bp, Artificial Sequence
  Synthetic
gttgatacatctccatcacct

SEQ ID NO: 1829 - DNA, 21 bp, Artificial Sequence
  Synthetic
gactcattatctggtgataga

SEQ ID NO: 1830 - DNA, 21 bp, Artificial Sequence
  Synthetic
aacccagtctatcaccagata

SEQ ID NO: 1831 - DNA, 21 bp, Artificial Sequence
  Synthetic
tgcttacctttgactgttaga

SEQ ID NO: 1832 - DNA, 21 bp, Artificial Sequence
  Synthetic
tcttaggtcatgctaaatgtg

SEQ ID NO: 1833 - DNA, 21 bp, Artificial Sequence
  Synthetic
ttaacttaccattactgatgc

SEQ ID NO: 1834 - DNA, 21 bp, Artificial Sequence
  Synthetic
taacttaccattactgatgct

SEQ ID NO: 1835 - DNA, 21 bp, Artificial Sequence
  Synthetic
acttaccattactgatgcttg

SEQ ID NO: 1836 - DNA, 21 bp, Artificial Sequence
  Synthetic
cttaccattactgatgcttgg

SEQ ID NO: 1837 - DNA, 21 bp, Artificial Sequence
  Synthetic
aatccgtaatgttgctcgatg

SEQ ID NO: 1838 - DNA, 21 bp, Artificial Sequence
  Synthetic
tgtccaacatcgagcaacatt

SEQ ID NO: 1839 - DNA, 21 bp, Artificial Sequence
  Synthetic
atgttgctcgatgttggacat

SEQ ID NO: 1840 - DNA, 21 bp, Artificial Sequence
  Synthetic
tgcagtctcatatgtccaaca

SEQ ID NO: 1841 - DNA, 21 bp, Artificial Sequence
  Synthetic
aaatggtatctggaagagggg

SEQ ID NO: 1842 - DNA, 21 bp, Artificial Sequence
  Synthetic
aagccaaatggtatctggaag

SEQ ID NO: 1843 - DNA, 21 bp, Artificial Sequence
  Synthetic
aaagccaaatggtatctggaa

SEQ ID NO: 1844 - DNA, 21 bp, Artificial Sequence
  Synthetic
cgaaagccaaatggtatctgg

SEQ ID NO: 1845 - DNA, 21 bp, Artificial Sequence
  Synthetic
agccgaaagccaaatggtatc

SEQ ID NO: 1846 - DNA, 21 bp, Artificial Sequence
  Synthetic
cagccgaaagccaaatggtat

SEQ ID NO: 1847 - DNA, 21 bp, Artificial Sequence
  Synthetic
ttggctttcggctgtgcaggt

SEQ ID NO: 1848 - DNA, 21 bp, Artificial Sequence
  Synthetic
tttcatttcttacctgcacag

SEQ ID NO: 1849 - DNA, 21 bp, Artificial Sequence
  Synthetic
agtgttacgaagatcatagta

SEQ ID NO: 1850 - DNA, 21 bp, Artificial Sequence
  Synthetic
cttctttctgcttccaggagc

SEQ ID NO: 1851 - DNA, 21 bp, Artificial Sequence
  Synthetic
tctttctgcttccaggagcat

SEQ ID NO: 1852 - DNA, 21 bp, Artificial Sequence
  Synthetic
ttctgcttccaggagcatgag

SEQ ID NO: 1853 - DNA, 21 bp, Artificial Sequence
  Synthetic
caacacctcttctcatgctcc

SEQ ID NO: 1854 - DNA, 21 bp, Artificial Sequence
  Synthetic
ccaacacctcttctcatgctc

SEQ ID NO: 1855 - DNA, 21 bp, Artificial Sequence
  Synthetic
ccaggagcatgagaagaggtg

SEQ ID NO: 1856 - DNA, 21 bp, Artificial Sequence
  Synthetic
caggagcatgagaagaggtgt

SEQ ID NO: 1857 - DNA, 21 bp, Artificial Sequence
  Synthetic
tggagtgttgactttaatttg

SEQ ID NO: 1858 - DNA, 21 bp, Artificial Sequence
  Synthetic
cagaacctgaagccaagagtt

SEQ ID NO: 1859 - DNA, 21 bp, Artificial Sequence
  Synthetic
gcatcatcagaacctgaagcc

SEQ ID NO: 1860 - DNA, 21 bp, Artificial Sequence
  Synthetic
ttggtagaccacagcttcact

SEQ ID NO: 1861 - DNA, 21 bp, Artificial Sequence
  Synthetic
aacagccaatcatggtattca

SEQ ID NO: 1862 - DNA, 21 bp, Artificial Sequence
  Synthetic
gagactgctttacggtgtcct

SEQ ID NO: 1863 - DNA, 21 bp, Artificial Sequence
  Synthetic
gcagtctcttatgcaaagttt

SEQ ID NO: 1864 - DNA, 21 bp, Artificial Sequence
  Synthetic
caccactcacaaactttgcat

SEQ ID NO: 1865 - DNA, 21 bp, Artificial Sequence
  Synthetic
cttatgcaaagtttgtgagtg

SEQ ID NO: 1866 - DNA, 21 bp, Artificial Sequence
  Synthetic
tatgcaaagtttgtgagtggt

SEQ ID NO: 1867 - DNA, 21 bp, Artificial Sequence
  Synthetic
atgcaaagtttgtgagtggtg

SEQ ID NO: 1868 - DNA, 21 bp, Artificial Sequence
  Synthetic
tggtgaggaaattgtctctgc

SEQ ID NO: 1869 - DNA, 21 bp, Artificial Sequence
  Synthetic
tagctgactgtctgttgagct

SEQ ID NO: 1870 - DNA, 21 bp, Artificial Sequence
  Synthetic
tttagctgactgtctgttgag

SEQ ID NO: 1871 - DNA, 21 bp, Artificial Sequence
  Synthetic
aacagacagtcagctaaaact

SEQ ID NO: 1872 - DNA, 21 bp, Artificial Sequence
  Synthetic
acagacagtcagctaaaactg

SEQ ID NO: 1873 - DNA, 21 bp, Artificial Sequence
  Synthetic
gtcagctaaaactgtggaatg

SEQ ID NO: 1874 - DNA, 21 bp, Artificial Sequence
  Synthetic
tcagctaaaactgtggaatgt

SEQ ID NO: 1875 - DNA, 21 bp, Artificial Sequence
  Synthetic
aataatgtaaatacctgattt

SEQ ID NO: 1876 - DNA, 21 bp, Artificial Sequence
  Synthetic
tatttctttcagctgtatcag

SEQ ID NO: 1877 - DNA, 21 bp, Artificial Sequence
  Synthetic
atttctttcagctgtatcagt

SEQ ID NO: 1878 - DNA, 21 bp, Artificial Sequence
  Synthetic
taactactccaactgatacag

SEQ ID NO: 1879 - DNA, 21 bp, Artificial Sequence
  Synthetic
atcagttggagtagttaccat

SEQ ID NO: 1880 - DNA, 21 bp, Artificial Sequence
  Synthetic
acctgttagctagcagtgatt

SEQ ID NO: 1881 - DNA, 21 bp, Artificial Sequence
  Synthetic
ccacatgccaaaatagagata

SEQ ID NO: 1882 - DNA, 21 bp, Artificial Sequence
  Synthetic
tccacatgccaaaatagagat

SEQ ID NO: 1883 - DNA, 21 bp, Artificial Sequence
  Synthetic
gtggtcttccacatgccaaaa

SEQ ID NO: 1884 - DNA, 21 bp, Artificial Sequence
  Synthetic
agaccacgtttgcatggcaca

SEQ ID NO: 1885 - DNA, 21 bp, Artificial Sequence
  Synthetic
tttgcatggcacaccgaagac

SEQ ID NO: 1886 - DNA, 21 bp, Artificial Sequence
  Synthetic
aagtggagataattaatgcta

SEQ ID NO: 1887 - DNA, 21 bp, Artificial Sequence
  Synthetic
atagcattaattatctccact

SEQ ID NO: 1888 - DNA, 21 bp, Artificial Sequence
  Synthetic
tagcattaattatctccactt

SEQ ID NO: 1889 - DNA, 21 bp, Artificial Sequence
  Synthetic
gcattaattatctccactttg

SEQ ID NO: 1890 - DNA, 21 bp, Artificial Sequence
  Synthetic
caagacttgggctctccaaag

SEQ ID NO: 1891 - DNA, 21 bp, Artificial Sequence
  Synthetic
ccaagacttgggctctccaaa

SEQ ID NO: 1892 - DNA, 21 bp, Artificial Sequence
  Synthetic
aaacaagtaacttgccaagac

SEQ ID NO: 1893 - DNA, 21 bp, Artificial Sequence
  Synthetic
ggtatgctatacctccggagc

SEQ ID NO: 1894 - DNA, 21 bp, Artificial Sequence
  Synthetic
gtatgctatacctccggagca

SEQ ID NO: 1895 - DNA, 21 bp, Artificial Sequence
  Synthetic
ctccggagcatggaaaacgac

SEQ ID NO: 1896 - DNA, 21 bp, Artificial Sequence
  Synthetic
tcacacccttgggagctgctt

SEQ ID NO: 1897 - DNA, 21 bp, Artificial Sequence
  Synthetic
atcacacccttgggagctgct

SEQ ID NO: 1898 - DNA, 21 bp, Artificial Sequence
  Synthetic
catcacacccttgggagctgc

SEQ ID NO: 1899 - DNA, 21 bp, Artificial Sequence
  Synthetic
gaagaaatgcatcacaccctt

SEQ ID NO: 1900 - DNA, 21 bp, Artificial Sequence
  Synthetic
cgaagaaatgcatcacaccct

SEQ ID NO: 1901 - DNA, 21 bp, Artificial Sequence
  Synthetic
gcgaagaaatgcatcacaccc

SEQ ID NO: 1902 - DNA, 21 bp, Artificial Sequence
  Synthetic
aatcaatgtcatcttgtggcg

SEQ ID NO: 1903 - DNA, 21 bp, Artificial Sequence
  Synthetic
agaaatcaatgtcatcttgtg

SEQ ID NO: 1904 - DNA, 21 bp, Artificial Sequence
  Synthetic
acattgatttctccatcagta

SEQ ID NO: 1905 - DNA, 21 bp, Artificial Sequence
  Synthetic
ttgatttctccatcagtattg

SEQ ID NO: 1906 - DNA, 21 bp, Artificial Sequence
  Synthetic
catatttcttcaatactgatg

SEQ ID NO: 1907 - DNA, 21 bp, Artificial Sequence
  Synthetic
accatatttcttcaatactga

SEQ ID NO: 1908 - DNA, 21 bp, Artificial Sequence
  Synthetic
taccatatttcttcaatactg

SEQ ID NO: 1909 - DNA, 21 bp, Artificial Sequence
  Synthetic
atactaacataccttgtcaaa

SEQ ID NO: 1910 - DNA, 21 bp, Artificial Sequence
  Synthetic
aatactaacataccttgtcaa

SEQ ID NO: 1911 - DNA, 21 bp, Artificial Sequence
  Synthetic
gaatactaacataccttgtca

SEQ ID NO: 1912 - DNA, 21 bp, Artificial Sequence
  Synthetic
tttcctaccttgcagataacc

SEQ ID NO: 1913 - DNA, 21 bp, Artificial Sequence
  Synthetic
ttcctaccttgcagataaccc

SEQ ID NO: 1914 - DNA, 21 bp, Artificial Sequence
  Synthetic
ccttgcagataacccaggagg

SEQ ID NO: 1915 - DNA, 21 bp, Artificial Sequence
  Synthetic
cttgcagataacccaggaggc

SEQ ID NO: 1916 - DNA, 21 bp, Artificial Sequence
  Synthetic
tgcagataacccaggaggctg

SEQ ID NO: 1917 - DNA, 21 bp, Artificial Sequence
  Synthetic
gatcatgaattctccagcctc

SEQ ID NO: 1918 - DNA, 21 bp, Artificial Sequence
  Synthetic
tagccatatgggaaagtgatc

SEQ ID NO: 1919 - DNA, 21 bp, Artificial Sequence
  Synthetic
aaaccagcatggtagccatat

SEQ ID NO: 1920 - DNA, 21 bp, Artificial Sequence
  Synthetic
aaaaccagcatggtagccata

SEQ ID NO: 1921 - DNA, 21 bp, Artificial Sequence
  Synthetic
taaaaccagcatggtagccat

SEQ ID NO: 1922 - DNA, 21 bp, Artificial Sequence
  Synthetic
ttaatcatggtttcaactgtg

SEQ ID NO: 1923 - DNA, 21 bp, Artificial Sequence
  Synthetic
aaatttgtagattctgcacag

SEQ ID NO: 1924 - DNA, 21 bp, Artificial Sequence
  Synthetic
ataatgaccttcagaccctcc

SEQ ID NO: 1925 - DNA, 21 bp, Artificial Sequence
  Synthetic
taatgaccttcagaccctcca

SEQ ID NO: 1926 - DNA, 21 bp, Artificial Sequence
  Synthetic
atgaccttcagaccctccatg

SEQ ID NO: 1927 - DNA, 21 bp, Artificial Sequence
  Synthetic
tgaccttcagaccctccatgg

SEQ ID NO: 1928 - DNA, 21 bp, Artificial Sequence
  Synthetic
cggaactcctccatggagggt

SEQ ID NO: 1929 - DNA, 21 bp, Artificial Sequence
  Synthetic
cagaccctccatggaggagtt

SEQ ID NO: 1930 - DNA, 21 bp, Artificial Sequence
  Synthetic
agaccctccatggaggagttc

SEQ ID NO: 1931 - DNA, 21 bp, Artificial Sequence
  Synthetic
gaccctccatggaggagttcc

SEQ ID NO: 1932 - DNA, 21 bp, Artificial Sequence
  Synthetic
aactcccggaactcctccatg

SEQ ID NO: 1933 - DNA, 21 bp, Artificial Sequence
  Synthetic
tgaactcccggaactcctcca

SEQ ID NO: 1934 - DNA, 21 bp, Artificial Sequence
  Synthetic
ttgaactcccggaactcctcc

SEQ ID NO: 1935 - DNA, 21 bp, Artificial Sequence
  Synthetic
gcaaggtatttgttgaactcc

SEQ ID NO: 1936 - DNA, 21 bp, Artificial Sequence
  Synthetic
tgcaaggtatttgttgaactc

SEQ ID NO: 1937 - DNA, 21 bp, Artificial Sequence
  Synthetic
tccatgtatgcaaggtatttg

SEQ ID NO: 1938 - DNA, 21 bp, Artificial Sequence
  Synthetic
ttcaacaaataccttgcatac

SEQ ID NO: 1939 - DNA, 21 bp, Artificial Sequence
  Synthetic
tcaacaaataccttgcataca

SEQ ID NO: 1940 - DNA, 21 bp, Artificial Sequence
  Synthetic
accttgcatacatggagtcta

SEQ ID NO: 1941 - DNA, 21 bp, Artificial Sequence
  Synthetic
ccttgcatacatggagtctaa

SEQ ID NO: 1942 - DNA, 21 bp, Artificial Sequence
  Synthetic
gagtctaaaggagcccatcgt

SEQ ID NO: 1943 - DNA, 21 bp, Artificial Sequence
  Synthetic
cacctttgcaagacccgcacg

SEQ ID NO: 1944 - DNA, 21 bp, Artificial Sequence
  Synthetic
atactcacagaaaagaaaggc

SEQ ID NO: 1945 - DNA, 21 bp, Artificial Sequence
  Synthetic
acagaaaagaaaggctggggc

SEQ ID NO: 1946 - DNA, 21 bp, Artificial Sequence
  Synthetic
agaaaagaaaggctggggctt

SEQ ID NO: 1947 - DNA, 21 bp, Artificial Sequence
  Synthetic
tttgcaggaacacctttgtcc

SEQ ID NO: 1948 - DNA, 21 bp, Artificial Sequence
  Synthetic
acacctttgtcctagaatatt

SEQ ID NO: 1949 - DNA, 21 bp, Artificial Sequence
  Synthetic
cacctttgtcctagaatattg

SEQ ID NO: 1950 - DNA, 21 bp, Artificial Sequence
  Synthetic
cctttgtcctagaatattgtg

SEQ ID NO: 1951 - DNA, 21 bp, Artificial Sequence
  Synthetic
gagtacctctccacaatattc

SEQ ID NO: 1952 - DNA, 21 bp, Artificial Sequence
  Synthetic
gtggagaggtactcgatcata

SEQ ID NO: 1953 - DNA, 21 bp, Artificial Sequence
  Synthetic
cgagctttaaactctttatga

SEQ ID NO: 1954 - DNA, 21 bp, Artificial Sequence
  Synthetic
cgatcataaagagtttaaagc

SEQ ID NO: 1955 - DNA, 21 bp, Artificial Sequence
  Synthetic
cataaagagtttaaagctcga

SEQ ID NO: 1956 - DNA, 21 bp, Artificial Sequence
  Synthetic
aaagagtttaaagctcgagtg

SEQ ID NO: 1957 - DNA, 21 bp, Artificial Sequence
  Synthetic
aagagtttaaagctcgagtga

SEQ ID NO: 1958 - DNA, 21 bp, Artificial Sequence
  Synthetic
agctcgagtgaaggagtatgc

SEQ ID NO: 1959 - DNA, 21 bp, Artificial Sequence
  Synthetic
gtttcgtgcatactccttcac

SEQ ID NO: 1960 - DNA, 21 bp, Artificial Sequence
  Synthetic
atccattactatttcatggcc

SEQ ID NO: 1961 - DNA, 21 bp, Artificial Sequence
  Synthetic
cttcagggccatgaaatagta

SEQ ID NO: 1962 - DNA, 21 bp, Artificial Sequence
  Synthetic
cattactatttcatggccctg

SEQ ID NO: 1963 - DNA, 21 bp, Artificial Sequence
  Synthetic
atttcatggccctgaagaatg

SEQ ID NO: 1964 - DNA, 21 bp, Artificial Sequence
  Synthetic
acctcatcattcttcagggcc

SEQ ID NO: 1965 - DNA, 21 bp, Artificial Sequence
  Synthetic
gctgcttacctcatcattctt

SEQ ID NO: 1966 - DNA, 21 bp, Artificial Sequence
  Synthetic
tttgagtggcatctattatct

SEQ ID NO: 1967 - DNA, 21 bp, Artificial Sequence
  Synthetic
agataatagatgccactcaaa

SEQ ID NO: 1968 - DNA, 21 bp, Artificial Sequence
  Synthetic
gataatagatgccactcaaaa

SEQ ID NO: 1969 - DNA, 21 bp, Artificial Sequence
  Synthetic
gaaacgagagcaatttccttt

SEQ ID NO: 1970 - DNA, 21 bp, Artificial Sequence
  Synthetic
aaaggaaattgctctcgtttc

SEQ ID NO: 1971 - DNA, 21 bp, Artificial Sequence
  Synthetic
cacagctgtgattcatgaaac

SEQ ID NO: 1972 - DNA, 21 bp, Artificial Sequence
  Synthetic
ttcacagctgtgattcatgaa

SEQ ID NO: 1973 - DNA, 21 bp, Artificial Sequence
  Synthetic
ctcgtttcatgaatcacagct

SEQ ID NO: 1974 - DNA, 21 bp, Artificial Sequence
  Synthetic
tttggttcacagctgtgattc

SEQ ID NO: 1975 - DNA, 21 bp, Artificial Sequence
  Synthetic
atcacagctgtgaaccaaatt

SEQ ID NO: 1976 - DNA, 21 bp, Artificial Sequence
  Synthetic
aaatccacctcaacttacttt

SEQ ID NO: 1977 - DNA, 21 bp, Artificial Sequence
  Synthetic
caaacatcatctcagtggact

SEQ ID NO: 1978 - DNA, 21 bp, Artificial Sequence
  Synthetic
catcatctcagtggactgtga

SEQ ID NO: 1979 - DNA, 21 bp, Artificial Sequence
  Synthetic
cagttgtccgttcacagtcca

SEQ ID NO: 1980 - DNA, 21 bp, Artificial Sequence
  Synthetic
cagtggactgtgaacggacaa

SEQ ID NO: 1981 - DNA, 21 bp, Artificial Sequence
  Synthetic
gtggactgtgaacggacaact

SEQ ID NO: 1982 - DNA, 21 bp, Artificial Sequence
  Synthetic
ctgtgaacggacaactgaggg

SEQ ID NO: 1983 - DNA, 21 bp, Artificial Sequence
  Synthetic
ccaaactggttccttcaggct

SEQ ID NO: 1984 - DNA, 21 bp, Artificial Sequence
  Synthetic
aaacgttaactctgagcctga

SEQ ID NO: 1985 - DNA, 21 bp, Artificial Sequence
  Synthetic
caaacgttaactctgagcctg

SEQ ID NO: 1986 - DNA, 21 bp, Artificial Sequence
  Synthetic
agtcaaacgttaactctgagc

SEQ ID NO: 1987 - DNA, 21 bp, Artificial Sequence
  Synthetic
actgatagtcaaacgttaact

SEQ ID NO: 1988 - DNA, 21 bp, Artificial Sequence
  Synthetic
agccctgttacctgctggata

SEQ ID NO: 1989 - DNA, 21 bp, Artificial Sequence
  Synthetic
ctgttacctgctggatattgg

SEQ ID NO: 1990 - DNA, 21 bp, Artificial Sequence
  Synthetic
tcatgtcttccagctgtggca

SEQ ID NO: 1991 - DNA, 21 bp, Artificial Sequence
  Synthetic
tcttccagctgtggcactggg

SEQ ID NO: 1992 - DNA, 21 bp, Artificial Sequence
  Synthetic
cactcagcccagtgccacagc

SEQ ID NO: 1993 - DNA, 21 bp, Artificial Sequence
  Synthetic
ccactcagcccagtgccacag

SEQ ID NO: 1994 - DNA, 21 bp, Artificial Sequence
  Synthetic
ccagctgtggcactgggctga

SEQ ID NO: 1995 - DNA, 21 bp, Artificial Sequence
  Synthetic
cagctgtggcactgggctgag

SEQ ID NO: 1996 - DNA, 21 bp, Artificial Sequence
  Synthetic
tgagtggaagttatctgtcag

SEQ ID NO: 1997 - DNA, 21 bp, Artificial Sequence
  Synthetic
gtggaagttatctgtcagatg

SEQ ID NO: 1998 - DNA, 21 bp, Artificial Sequence
  Synthetic
tctgtcagatgaagggcacta

SEQ ID NO: 1999 - DNA, 21 bp, Artificial Sequence
  Synthetic
tcagatgaagggcactattgg

SEQ ID NO: 2000 - DNA, 21 bp, Artificial Sequence
  Synthetic
gaagggcactattgggtgggc

SEQ ID NO: 2001 - DNA, 21 bp, Artificial Sequence
  Synthetic
ctggatatcagccctgccatg

SEQ ID NO: 2002 - DNA, 21 bp, Artificial Sequence
  Synthetic
ggacatacttacccagcatgg

SEQ ID NO: 2003 - DNA, 21 bp, Artificial Sequence
  Synthetic
ttctctaatgtagatgaggct

SEQ ID NO: 2004 - DNA, 21 bp, Artificial Sequence
  Synthetic
taatgtagatgaggctgtgga

SEQ ID NO: 2005 - DNA, 21 bp, Artificial Sequence
  Synthetic
atgtagatgaggctgtggacc

SEQ ID NO: 2006 - DNA, 21 bp, Artificial Sequence
  Synthetic
atgaggctgtggaccgagaga

SEQ ID NO: 2007 - DNA, 21 bp, Artificial Sequence
  Synthetic
gaggctgtggaccgagagata

SEQ ID NO: 2008 - DNA, 21 bp, Artificial Sequence
  Synthetic
aggctgtggaccgagagatag

SEQ ID NO: 2009 - DNA, 21 bp, Artificial Sequence
  Synthetic
ggctgtggaccgagagataga

SEQ ID NO: 2010 - DNA, 21 bp, Artificial Sequence
  Synthetic
gagatagagggagacctgctg

SEQ ID NO: 2011 - DNA, 21 bp, Artificial Sequence
  Synthetic
agatagagggagacctgctgc

SEQ ID NO: 2012 - DNA, 21 bp, Artificial Sequence
  Synthetic
gatagagggagacctgctgct

SEQ ID NO: 2013 - DNA, 21 bp, Artificial Sequence
  Synthetic
atagagggagacctgctgctg

SEQ ID NO: 2014 - DNA, 21 bp, Artificial Sequence
  Synthetic
ggagacctgctgctgggggat

SEQ ID NO: 2015 - DNA, 21 bp, Artificial Sequence
  Synthetic
ctgctgctgggggatatgggc

SEQ ID NO: 2016 - DNA, 21 bp, Artificial Sequence
  Synthetic
atcaaatgtgcctggcttgaa

SEQ ID NO: 2017 - DNA, 21 bp, Artificial Sequence
  Synthetic
catcaaatgtgcctggcttga

SEQ ID NO: 2018 - DNA, 21 bp, Artificial Sequence
  Synthetic
caaccatcaaatgtgcctggc

SEQ ID NO: 2019 - DNA, 21 bp, Artificial Sequence
  Synthetic
cacatttgatggttgcatcag

SEQ ID NO: 2020 - DNA, 21 bp, Artificial Sequence
  Synthetic
catttgatggttgcatcaggt

SEQ ID NO: 2021 - DNA, 21 bp, Artificial Sequence
  Synthetic
cattacagagccactgcacag

SEQ ID NO: 2022 - DNA, 21 bp, Artificial Sequence
  Synthetic
cagtggctctgtaatgctaac

SEQ ID NO: 2023 - DNA, 21 bp, Artificial Sequence
  Synthetic
tcagacttcttgttagcatta

SEQ ID NO: 2024 - DNA, 21 bp, Artificial Sequence
  Synthetic
ctggtataaaggtcgaaggcc

SEQ ID NO: 2025 - DNA, 21 bp, Artificial Sequence
  Synthetic
ctgggccttcgacctttatac

SEQ ID NO: 2026 - DNA, 21 bp, Artificial Sequence
  Synthetic
ccttcgacctttataccagag

SEQ ID NO: 2027 - DNA, 21 bp, Artificial Sequence
  Synthetic
ccctcacctctggtataaagg

SEQ ID NO: 2028 - DNA, 21 bp, Artificial Sequence
  Synthetic
ttcgacctttataccagaggt

SEQ ID NO: 2029 - DNA, 21 bp, Artificial Sequence
  Synthetic
tttggttcctgcaggggctga

SEQ ID NO: 2030 - DNA, 21 bp, Artificial Sequence
  Synthetic
ctgcaggggctgagtgaaaat

SEQ ID NO: 2031 - DNA, 21 bp, Artificial Sequence
  Synthetic
aggggctgagtgaaaatcagg

SEQ ID NO: 2032 - DNA, 21 bp, Artificial Sequence
  Synthetic
tgagtgaaaatcaggatgaag

SEQ ID NO: 2033 - DNA, 21 bp, Artificial Sequence
  Synthetic
aaatcaggatgaagttgaacc

SEQ ID NO: 2034 - DNA, 21 bp, Artificial Sequence
  Synthetic
aatcaggatgaagttgaaccc

SEQ ID NO: 2035 - DNA, 21 bp, Artificial Sequence
  Synthetic
atcaggatgaagttgaaccca

SEQ ID NO: 2036 - DNA, 21 bp, Artificial Sequence
  Synthetic
tcattggtgaacacagactcc

SEQ ID NO: 2037 - DNA, 21 bp, Artificial Sequence
  Synthetic
ccagggagtctgtgttcacca

SEQ ID NO: 2038 - DNA, 21 bp, Artificial Sequence
  Synthetic
agggagtctgtgttcaccaat

SEQ ID NO: 2039 - DNA, 21 bp, Artificial Sequence
  Synthetic
cagttgctttacctctcattg

SEQ ID NO: 2040 - DNA, 21 bp, Artificial Sequence
  Synthetic
tctccgccacaggttcccatt

SEQ ID NO: 2041 - DNA, 21 bp, Artificial Sequence
  Synthetic
cacaggttcccattaaggatg

SEQ ID NO: 2042 - DNA, 21 bp, Artificial Sequence
  Synthetic
gttcccattaaggatgtcgag

SEQ ID NO: 2043 - DNA, 21 bp, Artificial Sequence
  Synthetic
ccccgcctcgacatccttaat

SEQ ID NO: 2044 - DNA, 21 bp, Artificial Sequence
  Synthetic
ttcccattaaggatgtcgagg

SEQ ID NO: 2045 - DNA, 21 bp, Artificial Sequence
  Synthetic
tccccgcctcgacatccttaa

SEQ ID NO: 2046 - DNA, 21 bp, Artificial Sequence
  Synthetic
tcccattaaggatgtcgaggc

SEQ ID NO: 2047 - DNA, 21 bp, Artificial Sequence
  Synthetic
ttccccgcctcgacatcctta

SEQ ID NO: 2048 - DNA, 21 bp, Artificial Sequence
  Synthetic
cccattaaggatgtcgaggcg

SEQ ID NO: 2049 - DNA, 21 bp, Artificial Sequence
  Synthetic
aggatgtcgaggcggggaatg

SEQ ID NO: 2050 - DNA, 21 bp, Artificial Sequence
  Synthetic
gatgtcgaggcggggaatggt

SEQ ID NO: 2051 - DNA, 21 bp, Artificial Sequence
  Synthetic
atgtcgaggcggggaatggtg

SEQ ID NO: 2052 - DNA, 21 bp, Artificial Sequence
  Synthetic
tcgaggcggggaatggtgagg

SEQ ID NO: 2053 - DNA, 21 bp, Artificial Sequence
  Synthetic
gcggggaatggtgaggaagag

SEQ ID NO: 2054 - DNA, 21 bp, Artificial Sequence
  Synthetic
aatggtgaggaagagtcgggc

SEQ ID NO: 2055 - DNA, 21 bp, Artificial Sequence
  Synthetic
aggaagagtcgggcatgggtg

SEQ ID NO: 2056 - DNA, 21 bp, Artificial Sequence
  Synthetic
ggaagagtcgggcatgggtgc

SEQ ID NO: 2057 - DNA, 21 bp, Artificial Sequence
  Synthetic
aagagtcgggcatgggtgctg

SEQ ID NO: 2058 - DNA, 21 bp, Artificial Sequence
  Synthetic
agtcgggcatgggtgctggag

SEQ ID NO: 2059 - DNA, 21 bp, Artificial Sequence
  Synthetic
cgggcatgggtgctggagaag

SEQ ID NO: 2060 - DNA, 21 bp, Artificial Sequence
  Synthetic
gggcatgggtgctggagaaga

SEQ ID NO: 2061 - DNA, 21 bp, Artificial Sequence
  Synthetic
aagaaggagcggcacaggcgc

SEQ ID NO: 2062 - DNA, 21 bp, Artificial Sequence
  Synthetic
gcggcacaggcgccagggcag

SEQ ID NO: 2063 - DNA, 21 bp, Artificial Sequence
  Synthetic
cttgcgcttgcggccggtgta

SEQ ID NO: 2064 - DNA, 21 bp, Artificial Sequence
  Synthetic
agcccaagtgcaacatctgcc

SEQ ID NO: 2065 - DNA, 21 bp, Artificial Sequence
  Synthetic
gcccaagtgcaacatctgcct

SEQ ID NO: 2066 - DNA, 21 bp, Artificial Sequence
  Synthetic
ttccctaggcagatgttgcac

SEQ ID NO: 2067 - DNA, 21 bp, Artificial Sequence
  Synthetic
cccaagtgcaacatctgccta

SEQ ID NO: 2068 - DNA, 21 bp, Artificial Sequence
  Synthetic
acatctgcctagggaagacat

SEQ ID NO: 2069 - DNA, 21 bp, Artificial Sequence
  Synthetic
ctagggaagacatcagggccg

SEQ ID NO: 2070 - DNA, 21 bp, Artificial Sequence
  Synthetic
ggaagacatcagggccgctga

SEQ ID NO: 2071 - DNA, 21 bp, Artificial Sequence
  Synthetic
cgctgaatgagatcctcatct

SEQ ID NO: 2072 - DNA, 21 bp, Artificial Sequence
  Synthetic
gctgaatgagatcctcatctg

SEQ ID NO: 2073 - DNA, 21 bp, Artificial Sequence
  Synthetic
ctgaatgagatcctcatctgc

SEQ ID NO: 2074 - DNA, 21 bp, Artificial Sequence
  Synthetic
caggccacacttcccgcagat

SEQ ID NO: 2075 - DNA, 21 bp, Artificial Sequence
  Synthetic
cccaggccacacttcccgcag

SEQ ID NO: 2076 - DNA, 21 bp, Artificial Sequence
  Synthetic
ctcatctgcgggaagtgtggc

SEQ ID NO: 2077 - DNA, 21 bp, Artificial Sequence
  Synthetic
tctgcgggaagtgtggcctgg

SEQ ID NO: 2078 - DNA, 21 bp, Artificial Sequence
  Synthetic
cagcagtgccacatccccata

SEQ ID NO: 2079 - DNA, 21 bp, Artificial Sequence
  Synthetic
ctggtcagcactgcccgctat

SEQ ID NO: 2080 - DNA, 21 bp, Artificial Sequence
  Synthetic
gctggtcagcactgcccgcta

SEQ ID NO: 2081 - DNA, 21 bp, Artificial Sequence
  Synthetic
ggctggtcagcactgcccgct

SEQ ID NO: 2082 - DNA, 21 bp, Artificial Sequence
  Synthetic
cggcagaaccaaggtgtgagc

SEQ ID NO: 2083 - DNA, 21 bp, Artificial Sequence
  Synthetic
tcggcagaaccaaggtgtgag

SEQ ID NO: 2084 - DNA, 21 bp, Artificial Sequence
  Synthetic
cagcgtcggcagaaccaaggt

SEQ ID NO: 2085 - DNA, 21 bp, Artificial Sequence
  Synthetic
agtgcgaagatgcagcgtcgg

SEQ ID NO: 2086 - DNA, 21 bp, Artificial Sequence
  Synthetic
ttcacctgctggaggatgctc

SEQ ID NO: 2087 - DNA, 21 bp, Artificial Sequence
  Synthetic
ctcaagagcatcctccagcag

SEQ ID NO: 2088 - DNA, 21 bp, Artificial Sequence
  Synthetic
agcatcctccagcaggtgaag

SEQ ID NO: 2089 - DNA, 21 bp, Artificial Sequence
  Synthetic
gacacccaccttcacctgctg

SEQ ID NO: 2090 - DNA, 21 bp, Artificial Sequence
  Synthetic
aggacacccaccttcacctgc

SEQ ID NO: 2091 - DNA, 21 bp, Artificial Sequence
  Synthetic
gaggacacccaccttcacctg

SEQ ID NO: 2092 - DNA, 21 bp, Artificial Sequence
  Synthetic
ggccaagcgctttgatggctc

SEQ ID NO: 2093 - DNA, 21 bp, Artificial Sequence
  Synthetic
catcaaagcgcttggcccttc

SEQ ID NO: 2094 - DNA, 21 bp, Artificial Sequence
  Synthetic
atcaaagcgcttggcccttca

SEQ ID NO: 2095 - DNA, 21 bp, Artificial Sequence
  Synthetic
gcttggcccttcatggaacct

SEQ ID NO: 2096 - DNA, 21 bp, Artificial Sequence
  Synthetic
tggcccttcatggaacctgtg

SEQ ID NO: 2097 - DNA, 21 bp, Artificial Sequence
  Synthetic
gcccttcatggaacctgtgaa

SEQ ID NO: 2098 - DNA, 21 bp, Artificial Sequence
  Synthetic
gttctcttcacaggttccatg

SEQ ID NO: 2099 - DNA, 21 bp, Artificial Sequence
  Synthetic
tctgttctcttcacaggttcc

SEQ ID NO: 2100 - DNA, 21 bp, Artificial Sequence
  Synthetic
tcatggaacctgtgaagagaa

SEQ ID NO: 2101 - DNA, 21 bp, Artificial Sequence
  Synthetic
ctgtgaagagaacagaagctc

SEQ ID NO: 2102 - DNA, 21 bp, Artificial Sequence
  Synthetic
gaacagaagctccaggatatt

SEQ ID NO: 2103 - DNA, 21 bp, Artificial Sequence
  Synthetic
ccttataacttcataatatcc

SEQ ID NO: 2104 - DNA, 21 bp, Artificial Sequence
  Synthetic
accttataacttcataatatc

SEQ ID NO: 2105 - DNA, 21 bp, Artificial Sequence
  Synthetic
tatgaagttataaggttcccc

SEQ ID NO: 2106 - DNA, 21 bp, Artificial Sequence
  Synthetic
atgttaatggtattacccatg

SEQ ID NO: 2107 - DNA, 21 bp, Artificial Sequence
  Synthetic
aatgttaatggtattacccat

SEQ ID NO: 2108 - DNA, 21 bp, Artificial Sequence
  Synthetic
aaatgttaatggtattaccca

SEQ ID NO: 2109 - DNA, 21 bp, Artificial Sequence
  Synthetic
tcctgtgcagatctgaaaacc

SEQ ID NO: 2110 - DNA, 21 bp, Artificial Sequence
  Synthetic
gtgcagatctgaaaaccatga

SEQ ID NO: 2111 - DNA, 21 bp, Artificial Sequence
  Synthetic
aaaaccatgagtgaacgcctc

SEQ ID NO: 2112 - DNA, 21 bp, Artificial Sequence
  Synthetic
ttagacacgtagtacctattc

SEQ ID NO: 2113 - DNA, 21 bp, Artificial Sequence
  Synthetic
aagaataggtactacgtgtct

SEQ ID NO: 2114 - DNA, 21 bp, Artificial Sequence
  Synthetic
attattcatggcagacttaca

SEQ ID NO: 2115 - DNA, 21 bp, Artificial Sequence
  Synthetic
aagactcgctgtaagtctgcc

SEQ ID NO: 2116 - DNA, 21 bp, Artificial Sequence
  Synthetic
agcgagtctttaccaattgca

SEQ ID NO: 2117 - DNA, 21 bp, Artificial Sequence
  Synthetic
attgcaaagagtacaaccccc

SEQ ID NO: 2118 - DNA, 21 bp, Artificial Sequence
  Synthetic
tgcaaagagtacaacccccct

SEQ ID NO: 2119 - DNA, 21 bp, Artificial Sequence
  Synthetic
aagagtacaacccccctgaga

SEQ ID NO: 2120 - DNA, 21 bp, Artificial Sequence
  Synthetic
atttgtagtattcactctcag

SEQ ID NO: 2121 - DNA, 21 bp, Artificial Sequence
  Synthetic
catttgtagtattcactctca

SEQ ID NO: 2122 - DNA, 21 bp, Artificial Sequence
  Synthetic
acatttgtagtattcactctc

SEQ ID NO: 2123 - DNA, 21 bp, Artificial Sequence
  Synthetic
cacatttgtagtattcactct

SEQ ID NO: 2124 - DNA, 21 bp, Artificial Sequence
  Synthetic
ggtggctcggcccgaatcgcc

SEQ ID NO: 2125 - DNA, 21 bp, Artificial Sequence
  Synthetic
ggctcggcccgaatcgccgtg

SEQ ID NO: 2126 - DNA, 21 bp, Artificial Sequence
  Synthetic
ctttcttcacggcgattcggg

SEQ ID NO: 2127 - DNA, 21 bp, Artificial Sequence
  Synthetic
ttgcgctttcttcacggcgat

SEQ ID NO: 2128 - DNA, 21 bp, Artificial Sequence
  Synthetic
agcgcaactacgctccgctcc

SEQ ID NO: 2129 - DNA, 21 bp, Artificial Sequence
  Synthetic
ctacgctccgctccgcgggcc

SEQ ID NO: 2130 - DNA, 21 bp, Artificial Sequence
  Synthetic
ccagtttcttggcccgcggag

SEQ ID NO: 2131 - DNA, 21 bp, Artificial Sequence
  Synthetic
tccagtttcttggcccgcgga

SEQ ID NO: 2132 - DNA, 21 bp, Artificial Sequence
  Synthetic
tccgctccgcgggccaagaaa

SEQ ID NO: 2133 - DNA, 21 bp, Artificial Sequence
  Synthetic
ccgctccgcgggccaagaaac

SEQ ID NO: 2134 - DNA, 21 bp, Artificial Sequence
  Synthetic
gctccgcgggccaagaaactg

SEQ ID NO: 2135 - DNA, 21 bp, Artificial Sequence
  Synthetic
tttctccagtttcttggcccg

SEQ ID NO: 2136 - DNA, 21 bp, Artificial Sequence
  Synthetic
gtttctccagtttcttggccc

SEQ ID NO: 2137 - DNA, 21 bp, Artificial Sequence
  Synthetic
gggccaagaaactggagaaac

SEQ ID NO: 2138 - DNA, 21 bp, Artificial Sequence
  Synthetic
ggccaagaaactggagaaact

SEQ ID NO: 2139 - DNA, 21 bp, Artificial Sequence
  Synthetic
accttgcaggcggagtacact

SEQ ID NO: 2140 - DNA, 21 bp, Artificial Sequence
  Synthetic
ggcgagcgcgtaccttgcagg

SEQ ID NO: 2141 - DNA, 21 bp, Artificial Sequence
  Synthetic
cggcgagcgcgtaccttgcag

SEQ ID NO: 2142 - DNA, 21 bp, Artificial Sequence
  Synthetic
ggagtcttgtaaatgtaatgg

SEQ ID NO: 2143 - DNA, 21 bp, Artificial Sequence
  Synthetic
gagtcttgtaaatgtaatggc

SEQ ID NO: 2144 - DNA, 21 bp, Artificial Sequence
  Synthetic
tggggggagtgggtgaggggt

SEQ ID NO: 2145 - DNA, 21 bp, Artificial Sequence
  Synthetic
taacccctcacccactccccc

SEQ ID NO: 2146 - DNA, 21 bp, Artificial Sequence
  Synthetic
cggctctggggggagtgggtg

SEQ ID NO: 2147 - DNA, 21 bp, Artificial Sequence
  Synthetic
tcggctctggggggagtgggt

SEQ ID NO: 2148 - DNA, 21 bp, Artificial Sequence
  Synthetic
ggtcggctctggggggagtgg

SEQ ID NO: 2149 - DNA, 21 bp, Artificial Sequence
  Synthetic
tgcaggtcggctctgggggga

SEQ ID NO: 2150 - DNA, 21 bp, Artificial Sequence
  Synthetic
ttgctgcaggtcggctctggg

SEQ ID NO: 2151 - DNA, 21 bp, Artificial Sequence
  Synthetic
tttgctgcaggtcggctctgg

SEQ ID NO: 2152 - DNA, 21 bp, Artificial Sequence
  Synthetic
atttgctgcaggtcggctctg

SEQ ID NO: 2153 - DNA, 21 bp, Artificial Sequence
  Synthetic
tatttgctgcaggtcggctct

SEQ ID NO: 2154 - DNA, 21 bp, Artificial Sequence
  Synthetic
ttatttgctgcaggtcggctc

SEQ ID NO: 2155 - DNA, 21 bp, Artificial Sequence
  Synthetic
attatttgctgcaggtcggct

SEQ ID NO: 2156 - DNA, 21 bp, Artificial Sequence
  Synthetic
agcaaataattgtcagtctaa

SEQ ID NO: 2157 - DNA, 21 bp, Artificial Sequence
  Synthetic
tgtcagtctaacagaatcctg

SEQ ID NO: 2158 - DNA, 21 bp, Artificial Sequence
  Synthetic
gtcagtctaacagaatcctgt

SEQ ID NO: 2159 - DNA, 21 bp, Artificial Sequence
  Synthetic
agggcatggctacaactccga

SEQ ID NO: 2160 - DNA, 21 bp, Artificial Sequence
  Synthetic
ggagttgtagccatgccctag

SEQ ID NO: 2161 - DNA, 21 bp, Artificial Sequence
  Synthetic
taagctgctcatgtttcccac

SEQ ID NO: 2162 - DNA, 21 bp, Artificial Sequence
  Synthetic
aagctgctcatgtttcccacc

SEQ ID NO: 2163 - DNA, 21 bp, Artificial Sequence
  Synthetic
gctgctcatgtttcccacctg

SEQ ID NO: 2164 - DNA, 21 bp, Artificial Sequence
  Synthetic
cacattctccaggtgggaaac

SEQ ID NO: 2165 - DNA, 21 bp, Artificial Sequence
  Synthetic
tttcccacctggagaatgtgt

SEQ ID NO: 2166 - DNA, 21 bp, Artificial Sequence
  Synthetic
cctctgacacattctccaggt

SEQ ID NO: 2167 - DNA, 21 bp, Artificial Sequence
  Synthetic
tcctctgacacattctccagg

SEQ ID NO: 2168 - DNA, 21 bp, Artificial Sequence
  Synthetic
tcccacctggagaatgtgtca

SEQ ID NO: 2169 - DNA, 21 bp, Artificial Sequence
  Synthetic
ttcctctgacacattctccag

SEQ ID NO: 2170 - DNA, 21 bp, Artificial Sequence
  Synthetic
cccacctggagaatgtgtcag

SEQ ID NO: 2171 - DNA, 21 bp, Artificial Sequence
  Synthetic
acctggagaatgtgtcagagg

SEQ ID NO: 2172 - DNA, 21 bp, Artificial Sequence
  Synthetic
gagaatgtgtcagaggaagaa

SEQ ID NO: 2173 - DNA, 21 bp, Artificial Sequence
  Synthetic
gaggaagaaatgaacagactc

SEQ ID NO: 2174 - DNA, 21 bp, Artificial Sequence
  Synthetic
aggaagaaatgaacagactcc

SEQ ID NO: 2175 - DNA, 21 bp, Artificial Sequence
  Synthetic
ggaagaaatgaacagactcct

SEQ ID NO: 2176 - DNA, 21 bp, Artificial Sequence
  Synthetic
aacagactcctgggaatagta

SEQ ID NO: 2177 - DNA, 21 bp, Artificial Sequence
  Synthetic
tccacatccaatactattccc

SEQ ID NO: 2178 - DNA, 21 bp, Artificial Sequence
  Synthetic
ctcctgggaatagtattggat

SEQ ID NO: 2179 - DNA, 21 bp, Artificial Sequence
  Synthetic
ttccacatccaatactattcc

SEQ ID NO: 2180 - DNA, 21 bp, Artificial Sequence
  Synthetic
tcctgggaatagtattggatg

SEQ ID NO: 2181 - DNA, 21 bp, Artificial Sequence
  Synthetic
tatctctttacctgtgtccac

SEQ ID NO: 2182 - DNA, 21 bp, Artificial Sequence
  Synthetic
atctctttacctgtgtccaca

SEQ ID NO: 2183 - DNA, 21 bp, Artificial Sequence
  Synthetic
tcttccttgtggacacaggta

SEQ ID NO: 2184 - DNA, 21 bp, Artificial Sequence
  Synthetic
tctttacctgtgtccacaagg

SEQ ID NO: 2185 - DNA, 21 bp, Artificial Sequence
  Synthetic
ggtatctgcatcttcttcctt

SEQ ID NO: 2186 - DNA, 21 bp, Artificial Sequence
  Synthetic
gtttatttctatctatttaag

SEQ ID NO: 2187 - DNA, 21 bp, Artificial Sequence
  Synthetic
taaaatctcaccttaaataga

SEQ ID NO: 2188 - DNA, 21 bp, Artificial Sequence
  Synthetic
aatgatttctttgcagctctt

SEQ ID NO: 2189 - DNA, 21 bp, Artificial Sequence
  Synthetic
ctttgtaaaatagactttctc

SEQ ID NO: 2190 - DNA, 21 bp, Artificial Sequence
  Synthetic
tacaaagaggaaaacctgtgg

SEQ ID NO: 2191 - DNA, 21 bp, Artificial Sequence
  Synthetic
aaacctgtggttgaaggctct

SEQ ID NO: 2192 - DNA, 21 bp, Artificial Sequence
  Synthetic
aacctgtggttgaaggctctt

SEQ ID NO: 2193 - DNA, 21 bp, Artificial Sequence
  Synthetic
gtggttgaaggctctttggaa

SEQ ID NO: 2194 - DNA, 21 bp, Artificial Sequence
  Synthetic
ctttggaaaagaaacccccat

SEQ ID NO: 2195 - DNA, 21 bp, Artificial Sequence
  Synthetic
ccccatttgaaaaacctagca

SEQ ID NO: 2196 - DNA, 21 bp, Artificial Sequence
  Synthetic
aatttagtcacctgccagcaa

SEQ ID NO: 2197 - DNA, 21 bp, Artificial Sequence
  Synthetic
caaaagaaaggcaaacaatag

SEQ ID NO: 2198 - DNA, 21 bp, Artificial Sequence
  Synthetic
tgccaatagttgatgcggttt

SEQ ID NO: 2199 - DNA, 21 bp, Artificial Sequence
  Synthetic
atgccaatagttgatgcggtt

SEQ ID NO: 2200 - DNA, 21 bp, Artificial Sequence
  Synthetic
aaccgcatcaactattggcat

SEQ ID NO: 2201 - DNA, 21 bp, Artificial Sequence
  Synthetic
accgcatcaactattggcatc

SEQ ID NO: 2202 - DNA, 21 bp, Artificial Sequence
  Synthetic
gcatctggaggcaccatctca

SEQ ID NO: 2203 - DNA, 21 bp, Artificial Sequence
  Synthetic
attgggagatcgcagtcttcg

SEQ ID NO: 2204 - DNA, 21 bp, Artificial Sequence
  Synthetic
gatctcccaatgatgatattt

SEQ ID NO: 2205 - DNA, 21 bp, Artificial Sequence
  Synthetic
gtatccagaaatatcatcatt

SEQ ID NO: 2206 - DNA, 21 bp, Artificial Sequence
  Synthetic
tgtatccagaaatatcatcat

SEQ ID NO: 2207 - DNA, 21 bp, Artificial Sequence
  Synthetic
ttgtatccagaaatatcatca

SEQ ID NO: 2208 - DNA, 21 bp, Artificial Sequence
  Synthetic
atgatgatatttctggataca

SEQ ID NO: 2209 - DNA, 21 bp, Artificial Sequence
  Synthetic
gatgatatttctggatacaaa

SEQ ID NO: 2210 - DNA, 21 bp, Artificial Sequence
  Synthetic
ttgtgtagttctctttgtatc

SEQ ID NO: 2211 - DNA, 21 bp, Artificial Sequence
  Synthetic
tcgtaccgaggtagactgtcg

SEQ ID NO: 2212 - DNA, 21 bp, Artificial Sequence
  Synthetic
tctgcgacagtctacctcggt

SEQ ID NO: 2213 - DNA, 21 bp, Artificial Sequence
  Synthetic
aaacacctgtgtggtttcgta

SEQ ID NO: 2214 - DNA, 21 bp, Artificial Sequence
  Synthetic
ggtacgaaaccacacaggtgt

SEQ ID NO: 2215 - DNA, 21 bp, Artificial Sequence
  Synthetic
gtacgaaaccacacaggtgtt

SEQ ID NO: 2216 - DNA, 21 bp, Artificial Sequence
  Synthetic
tacgaaaccacacaggtgttt

SEQ ID NO: 2217 - DNA, 21 bp, Artificial Sequence
  Synthetic
cgaaaccacacaggtgtttgg

SEQ ID NO: 2218 - DNA, 21 bp, Artificial Sequence
  Synthetic
cttcgctcggtcttcactgtt

SEQ ID NO: 2219 - DNA, 21 bp, Artificial Sequence
  Synthetic
cctcataacagtgaagaccga

SEQ ID NO: 2220 - DNA, 21 bp, Artificial Sequence
  Synthetic
gtcgcctcataacagtgaaga

SEQ ID NO: 2221 - DNA, 21 bp, Artificial Sequence
  Synthetic
aggagttgtcgcctcataaca

SEQ ID NO: 2222 - DNA, 21 bp, Artificial Sequence
  Synthetic
actgttatgaggcgacaactc

SEQ ID NO: 2223 - DNA, 21 bp, Artificial Sequence
  Synthetic
ctgttatgaggcgacaactcc

SEQ ID NO: 2224 - DNA, 21 bp, Artificial Sequence
  Synthetic
acggccatctttaattaaagc

SEQ ID NO: 2225 - DNA, 21 bp, Artificial Sequence
  Synthetic
gtttccgtatgttcccatctc

SEQ ID NO: 2226 - DNA, 21 bp, Artificial Sequence
  Synthetic
aatccttgagatgggaacata

SEQ ID NO: 2227 - DNA, 21 bp, Artificial Sequence
  Synthetic
gaatccttgagatgggaacat

SEQ ID NO: 2228 - DNA, 21 bp, Artificial Sequence
  Synthetic
tgttcccatctcaaggattca

SEQ ID NO: 2229 - DNA, 21 bp, Artificial Sequence
  Synthetic
atctctgtgaatccttgagat

SEQ ID NO: 2230 - DNA, 21 bp, Artificial Sequence
  Synthetic
aatctctgtgaatccttgaga

SEQ ID NO: 2231 - DNA, 21 bp, Artificial Sequence
  Synthetic
caatctctgtgaatccttgag

SEQ ID NO: 2232 - DNA, 21 bp, Artificial Sequence
  Synthetic
gaagacaatctctgtgaatcc

SEQ ID NO: 2233 - DNA, 21 bp, Artificial Sequence
  Synthetic
acagcacagaagacaatctct

SEQ ID NO: 2234 - DNA, 21 bp, Artificial Sequence
  Synthetic
tcttctgtgctgtaacctcaa

SEQ ID NO: 2235 - DNA, 21 bp, Artificial Sequence
  Synthetic
tgctcatttgaggttacagca

SEQ ID NO: 2236 - DNA, 21 bp, Artificial Sequence
  Synthetic
cccttaccttgacttgctcat

SEQ ID NO: 2237 - DNA, 21 bp, Artificial Sequence
  Synthetic
ctcaaatgagcaagtcaaggt

SEQ ID NO: 2238 - DNA, 21 bp, Artificial Sequence
  Synthetic
tactaacttccacacagggct

SEQ ID NO: 2239 - DNA, 21 bp, Artificial Sequence
  Synthetic
actaacttccacacagggcta

SEQ ID NO: 2240 - DNA, 21 bp, Artificial Sequence
  Synthetic
cagggctatggaacacacctg

SEQ ID NO: 2241 - DNA, 21 bp, Artificial Sequence
  Synthetic
ggaacacacctgatgaatcat

SEQ ID NO: 2242 - DNA, 21 bp, Artificial Sequence
  Synthetic
cacacctgatgaatcatttga

SEQ ID NO: 2243 - DNA, 21 bp, Artificial Sequence
  Synthetic
tatcacataaagcatgacatc

SEQ ID NO: 2244 - DNA, 21 bp, Artificial Sequence
  Synthetic
atctgcatatgtgaggaagtt

SEQ ID NO: 2245 - DNA, 21 bp, Artificial Sequence
  Synthetic
tgaacttcctcacatatgcag

SEQ ID NO: 2246 - DNA, 21 bp, Artificial Sequence
  Synthetic
gcatattcatctgcatatgtg

SEQ ID NO: 2247 - DNA, 21 bp, Artificial Sequence
  Synthetic
tgcatattcatctgcatatgt

SEQ ID NO: 2248 - DNA, 21 bp, Artificial Sequence
  Synthetic
attgcatattcatctgcatat

SEQ ID NO: 2249 - DNA, 21 bp, Artificial Sequence
  Synthetic
catatgcagatgaatatgcaa

SEQ ID NO: 2250 - DNA, 21 bp, Artificial Sequence
  Synthetic
gaatatgcaattggatacttt

SEQ ID NO: 2251 - DNA, 21 bp, Artificial Sequence
  Synthetic
tttaatttctttggagaaacc

SEQ ID NO: 2252 - DNA, 21 bp, Artificial Sequence
  Synthetic
aagctgcccaagctgcggacc

SEQ ID NO: 2253 - DNA, 21 bp, Artificial Sequence
  Synthetic
cccgcagccagaaaacacatc

SEQ ID NO: 2254 - DNA, 21 bp, Artificial Sequence
  Synthetic
tttctggctgcggggggttgt

SEQ ID NO: 2255 - DNA, 21 bp, Artificial Sequence
  Synthetic
cctccgacaaccccccgcagc

SEQ ID NO: 2256 - DNA, 21 bp, Artificial Sequence
  Synthetic
tctggctgcggggggttgtcg

SEQ ID NO: 2257 - DNA, 21 bp, Artificial Sequence
  Synthetic
ctggctgcggggggttgtcgg

SEQ ID NO: 2258 - DNA, 21 bp, Artificial Sequence
  Synthetic
cggagggattccaccaagcag

SEQ ID NO: 2259 - DNA, 21 bp, Artificial Sequence
  Synthetic
tacgggcgctcacctgcttgg

SEQ ID NO: 2260 - DNA, 21 bp, Artificial Sequence
  Synthetic
ctacgggcgctcacctgcttg

SEQ ID NO: 2261 - DNA, 21 bp, Artificial Sequence
  Synthetic
gccaggcatctctgacacgct

SEQ ID NO: 2262 - DNA, 21 bp, Artificial Sequence
  Synthetic
tctctgacacgctgtgggcca

SEQ ID NO: 2263 - DNA, 21 bp, Artificial Sequence
  Synthetic
tctcgatggcccacagcgtgt

SEQ ID NO: 2264 - DNA, 21 bp, Artificial Sequence
  Synthetic
cacgctgtgggccatcgagat

SEQ ID NO: 2265 - DNA, 21 bp, Artificial Sequence
  Synthetic
acgctgtgggccatcgagatg

SEQ ID NO: 2266 - DNA, 21 bp, Artificial Sequence
  Synthetic
tcagccggaacgcctgggccg

SEQ ID NO: 2267 - DNA, 21 bp, Artificial Sequence
  Synthetic
cctgcggcccaggcgttccgg

SEQ ID NO: 2268 - DNA, 21 bp, Artificial Sequence
  Synthetic
ggggttgttcagccggaacgc

SEQ ID NO: 2269 - DNA, 21 bp, Artificial Sequence
  Synthetic
gtggagccggggttgttcagc

SEQ ID NO: 2270 - DNA, 21 bp, Artificial Sequence
  Synthetic
tgtggagccggggttgttcag

SEQ ID NO: 2271 - DNA, 21 bp, Artificial Sequence
  Synthetic
accccggctccacagtgttca

SEQ ID NO: 2272 - DNA, 21 bp, Artificial Sequence
  Synthetic
cctctgtgaacactgtggagc

SEQ ID NO: 2273 - DNA, 21 bp, Artificial Sequence
  Synthetic
tcctctgtgaacactgtggag

SEQ ID NO: 2274 - DNA, 21 bp, Artificial Sequence
  Synthetic
cccggctccacagtgttcaca

SEQ ID NO: 2275 - DNA, 21 bp, Artificial Sequence
  Synthetic
tgcagtcctctgtgaacactg

SEQ ID NO: 2276 - DNA, 21 bp, Artificial Sequence
  Synthetic
ttgcagtcctctgtgaacact

SEQ ID NO: 2277 - DNA, 21 bp, Artificial Sequence
  Synthetic
agcaggatgttgcagtcctct

SEQ ID NO: 2278 - DNA, 21 bp, Artificial Sequence
  Synthetic
acagaggactgcaacatcctg

SEQ ID NO: 2279 - DNA, 21 bp, Artificial Sequence
  Synthetic
cccagccatgaccagcttcag

SEQ ID NO: 2280 - DNA, 21 bp, Artificial Sequence
  Synthetic
tcctgctgaagctggtcatgg

SEQ ID NO: 2281 - DNA, 21 bp, Artificial Sequence
  Synthetic
cctgctgaagctggtcatggc

SEQ ID NO: 2282 - DNA, 21 bp, Artificial Sequence
  Synthetic
ctgctgaagctggtcatggct

SEQ ID NO: 2283 - DNA, 21 bp, Artificial Sequence
  Synthetic
tgctgaagctggtcatggctg

SEQ ID NO: 2284 - DNA, 21 bp, Artificial Sequence
  Synthetic
tctggggcagccgctggccgc

SEQ ID NO: 2285 - DNA, 21 bp, Artificial Sequence
  Synthetic
ttctggggcagccgctggccg

SEQ ID NO: 2286 - DNA, 21 bp, Artificial Sequence
  Synthetic
tcccgcggccagcggctgccc

SEQ ID NO: 2287 - DNA, 21 bp, Artificial Sequence
  Synthetic
cttctggggcagccgctggcc

SEQ ID NO: 2288 - DNA, 21 bp, Artificial Sequence
  Synthetic
cgcggccagcggctgccccag

SEQ ID NO: 2289 - DNA, 21 bp, Artificial Sequence
  Synthetic
gcggccagcggctgccccaga

SEQ ID NO: 2290 - DNA, 21 bp, Artificial Sequence
  Synthetic
cggccagcggctgccccagaa

SEQ ID NO: 2291 - DNA, 21 bp, Artificial Sequence
  Synthetic
cggctgccccagaagggagac

SEQ ID NO: 2292 - DNA, 21 bp, Artificial Sequence
  Synthetic
ggctgccccagaagggagacg

SEQ ID NO: 2293 - DNA, 21 bp, Artificial Sequence
  Synthetic
agcatctccacgtctcccttc

SEQ ID NO: 2294 - DNA, 21 bp, Artificial Sequence
  Synthetic
cagcatctccacgtctccctt

SEQ ID NO: 2295 - DNA, 21 bp, Artificial Sequence
  Synthetic
gagacgtggagatgctgtgcg

SEQ ID NO: 2296 - DNA, 21 bp, Artificial Sequence
  Synthetic
ctgtgcggcgggccgccctgc

SEQ ID NO: 2297 - DNA, 21 bp, Artificial Sequence
  Synthetic
ttcatgccgctgaagccctgg

SEQ ID NO: 2298 - DNA, 21 bp, Artificial Sequence
  Synthetic
ccctgccagggcttcagcggc

SEQ ID NO: 2299 - DNA, 21 bp, Artificial Sequence
  Synthetic
gaattgaagcggttcatgccg

SEQ ID NO: 2300 - DNA, 21 bp, Artificial Sequence
  Synthetic
aacttggagtaggtgcgcgaa

SEQ ID NO: 2301 - DNA, 21 bp, Artificial Sequence
  Synthetic
aaggaaaccaccagagagttt

SEQ ID NO: 2302 - DNA, 21 bp, Artificial Sequence
  Synthetic
acctgaggaaggaaaccacca

SEQ ID NO: 2303 - DNA, 21 bp, Artificial Sequence
  Synthetic
ttacctgaggaaggaaaccac

SEQ ID NO: 2304 - DNA, 21 bp, Artificial Sequence
  Synthetic
ttctacccgtttacctgagga

SEQ ID NO: 2305 - DNA, 21 bp, Artificial Sequence
  Synthetic
cttctacccgtttacctgagg

SEQ ID NO: 2306 - DNA, 21 bp, Artificial Sequence
  Synthetic
gggcttctacccgtttacctg

SEQ ID NO: 2307 - DNA, 21 bp, Artificial Sequence
  Synthetic
taccggccccggttcttcctc

SEQ ID NO: 2308 - DNA, 21 bp, Artificial Sequence
  Synthetic
accggccccggttcttcctcc

SEQ ID NO: 2309 - DNA, 21 bp, Artificial Sequence
  Synthetic
cggccccggttcttcctcctg

SEQ ID NO: 2310 - DNA, 21 bp, Artificial Sequence
  Synthetic
acattctccaggaggaagaac

SEQ ID NO: 2311 - DNA, 21 bp, Artificial Sequence
  Synthetic
gacattctccaggaggaagaa

SEQ ID NO: 2312 - DNA, 21 bp, Artificial Sequence
  Synthetic
gttcttcctcctggagaatgt

SEQ ID NO: 2313 - DNA, 21 bp, Artificial Sequence
  Synthetic
ttcctgacattctccaggagg

SEQ ID NO: 2314 - DNA, 21 bp, Artificial Sequence
  Synthetic
ttcttcctcctggagaatgtc

SEQ ID NO: 2315 - DNA, 21 bp, Artificial Sequence
  Synthetic
aagttcctgacattctccagg

SEQ ID NO: 2316 - DNA, 21 bp, Artificial Sequence
  Synthetic
aaagttcctgacattctccag

SEQ ID NO: 2317 - DNA, 21 bp, Artificial Sequence
  Synthetic
acaaagttcctgacattctcc

SEQ ID NO: 2318 - DNA, 21 bp, Artificial Sequence
  Synthetic
gacaaagttcctgacattctc

SEQ ID NO: 2319 - DNA, 21 bp, Artificial Sequence
  Synthetic
tcaggaccatggagcgcttga

SEQ ID NO: 2320 - DNA, 21 bp, Artificial Sequence
  Synthetic
ttcaggaccatggagcgcttg

SEQ ID NO: 2321 - DNA, 21 bp, Artificial Sequence
  Synthetic
tccttcaagcgctccatggtc

SEQ ID NO: 2322 - DNA, 21 bp, Artificial Sequence
  Synthetic
agcttcaggaccatggagcgc

SEQ ID NO: 2323 - DNA, 21 bp, Artificial Sequence
  Synthetic
ggagggtgagcttcaggacca

SEQ ID NO: 2324 - DNA, 21 bp, Artificial Sequence
  Synthetic
cggagggtgagcttcaggacc

SEQ ID NO: 2325 - DNA, 21 bp, Artificial Sequence
  Synthetic
caggcagcggagggtgagctt

SEQ ID NO: 2326 - DNA, 21 bp, Artificial Sequence
  Synthetic
atgcggaccaggcagcggagg

SEQ ID NO: 2327 - DNA, 21 bp, Artificial Sequence
  Synthetic
accctccgctgcctggtccgc

SEQ ID NO: 2328 - DNA, 21 bp, Artificial Sequence
  Synthetic
gcccatgcggaccaggcagcg

SEQ ID NO: 2329 - DNA, 21 bp, Artificial Sequence
  Synthetic
tagcccatgcggaccaggcag

SEQ ID NO: 2330 - DNA, 21 bp, Artificial Sequence
  Synthetic
atagcccatgcggaccaggca

SEQ ID NO: 2331 - DNA, 21 bp, Artificial Sequence
  Synthetic
gaaggtgcactgatagcccat

SEQ ID NO: 2332 - DNA, 21 bp, Artificial Sequence
  Synthetic
tgcaccttcggcgtgctgcag

SEQ ID NO: 2333 - DNA, 21 bp, Artificial Sequence
  Synthetic
ccagggcccacctgcagcacg

SEQ ID NO: 2334 - DNA, 21 bp, Artificial Sequence
  Synthetic
ccacgccgtactgaccggcct

SEQ ID NO: 2335 - DNA, 21 bp, Artificial Sequence
  Synthetic
tcagtacggcgtggcccagac

SEQ ID NO: 2336 - DNA, 21 bp, Artificial Sequence
  Synthetic
cagtacggcgtggcccagact

SEQ ID NO: 2337 - DNA, 21 bp, Artificial Sequence
  Synthetic
cggcgtggcccagactaggag

SEQ ID NO: 2338 - DNA, 21 bp, Artificial Sequence
  Synthetic
gatgatggcccgcctcctagt

SEQ ID NO: 2339 - DNA, 21 bp, Artificial Sequence
  Synthetic
ccatcatcctggccgcggccc

SEQ ID NO: 2340 - DNA, 21 bp, Artificial Sequence
  Synthetic
catcatcctggccgcggcccc

SEQ ID NO: 2341 - DNA, 21 bp, Artificial Sequence
  Synthetic
tcatcctggccgcggcccctg

SEQ ID NO: 2342 - DNA, 21 bp, Artificial Sequence
  Synthetic
atcctggccgcggcccctgga

SEQ ID NO: 2343 - DNA, 21 bp, Artificial Sequence
  Synthetic
cttctctccaggggccgcggc

SEQ ID NO: 2344 - DNA, 21 bp, Artificial Sequence
  Synthetic
gaacagagggagcttctctcc

SEQ ID NO: 2345 - DNA, 21 bp, Artificial Sequence
  Synthetic
ggaacagagggagcttctctc

SEQ ID NO: 2346 - DNA, 21 bp, Artificial Sequence
  Synthetic
ggagagaagctccctctgttc

SEQ ID NO: 2347 - DNA, 21 bp, Artificial Sequence
  Synthetic
gagagaagctccctctgttcc

SEQ ID NO: 2348 - DNA, 21 bp, Artificial Sequence
  Synthetic
tgcagtggctccgggaacaga

SEQ ID NO: 2349 - DNA, 21 bp, Artificial Sequence
  Synthetic
gtgcagtggctccgggaacag

SEQ ID NO: 2350 - DNA, 21 bp, Artificial Sequence
  Synthetic
cgtgcagtggctccgggaaca

SEQ ID NO: 2351 - DNA, 21 bp, Artificial Sequence
  Synthetic
cacgtgcagtggctccgggaa

SEQ ID NO: 2352 - DNA, 21 bp, Artificial Sequence
  Synthetic
gcaaacacgtgcagtggctcc

SEQ ID NO: 2353 - DNA, 21 bp, Artificial Sequence
  Synthetic
agcaaacacgtgcagtggctc

SEQ ID NO: 2354 - DNA, 21 bp, Artificial Sequence
  Synthetic
gagcaaacacgtgcagtggct

SEQ ID NO: 2355 - DNA, 21 bp, Artificial Sequence
  Synthetic
gccactgcacgtgtttgctcc

SEQ ID NO: 2356 - DNA, 21 bp, Artificial Sequence
  Synthetic
tttgctccccgggcctgccag

SEQ ID NO: 2357 - DNA, 21 bp, Artificial Sequence
  Synthetic
cacgctcagctggcaggcccg

SEQ ID NO: 2358 - DNA, 21 bp, Artificial Sequence
  Synthetic
ccacgctcagctggcaggccc

SEQ ID NO: 2359 - DNA, 21 bp, Artificial Sequence
  Synthetic
accacgctcagctggcaggcc

SEQ ID NO: 2360 - DNA, 21 bp, Artificial Sequence
  Synthetic
caccacgctcagctggcaggc

SEQ ID NO: 2361 - DNA, 21 bp, Artificial Sequence
  Synthetic
gcctgccagctgagcgtggtg

SEQ ID NO: 2362 - DNA, 21 bp, Artificial Sequence
  Synthetic
ctgagcgtggtggtggatgac

SEQ ID NO: 2363 - DNA, 21 bp, Artificial Sequence
  Synthetic
gtggtggatgacaagaagttt

SEQ ID NO: 2364 - DNA, 21 bp, Artificial Sequence
  Synthetic
ctcctctgttgcaggttgagc

SEQ ID NO: 2365 - DNA, 21 bp, Artificial Sequence
  Synthetic
caggttgagctcgggtccttt

SEQ ID NO: 2366 - DNA, 21 bp, Artificial Sequence
  Synthetic
ccgtgatggtccggaaaggac

SEQ ID NO: 2367 - DNA, 21 bp, Artificial Sequence
  Synthetic
ctcgcaccgtgatggtccgga

SEQ ID NO: 2368 - DNA, 21 bp, Artificial Sequence
  Synthetic
tcctttccggaccatcacggt

SEQ ID NO: 2369 - DNA, 21 bp, Artificial Sequence
  Synthetic
gtgtctcgcaccgtgatggtc

SEQ ID NO: 2370 - DNA, 21 bp, Artificial Sequence
  Synthetic
cgtgtctcgcaccgtgatggt

SEQ ID NO: 2371 - DNA, 21 bp, Artificial Sequence
  Synthetic
cgagacacgatgtccgacctg

SEQ ID NO: 2372 - DNA, 21 bp, Artificial Sequence
  Synthetic
gagacacgatgtccgacctgc

SEQ ID NO: 2373 - DNA, 21 bp, Artificial Sequence
  Synthetic
gatgtccgacctgccggaggt

SEQ ID NO: 2374 - DNA, 21 bp, Artificial Sequence
  Synthetic
atgtccgacctgccggaggtg

SEQ ID NO: 2375 - DNA, 21 bp, Artificial Sequence
  Synthetic
ccattccgcacctccggcagg

SEQ ID NO: 2376 - DNA, 21 bp, Artificial Sequence
  Synthetic
ccgacctgccggaggtgcgga

SEQ ID NO: 2377 - DNA, 21 bp, Artificial Sequence
  Synthetic
cgacctgccggaggtgcggaa

SEQ ID NO: 2378 - DNA, 21 bp, Artificial Sequence
  Synthetic
gtgcggaatggagcctcggca

SEQ ID NO: 2379 - DNA, 21 bp, Artificial Sequence
  Synthetic
tgcggaatggagcctcggcac

SEQ ID NO: 2380 - DNA, 21 bp, Artificial Sequence
  Synthetic
cgttgtaggagatctccagtg

SEQ ID NO: 2381 - DNA, 21 bp, Artificial Sequence
  Synthetic
cggcactggagatctcctaca

SEQ ID NO: 2382 - DNA, 21 bp, Artificial Sequence
  Synthetic
ggcactggagatctcctacaa

SEQ ID NO: 2383 - DNA, 21 bp, Artificial Sequence
  Synthetic
gcactggagatctcctacaac

SEQ ID NO: 2384 - DNA, 21 bp, Artificial Sequence
  Synthetic
cactggagatctcctacaacg

SEQ ID NO: 2385 - DNA, 21 bp, Artificial Sequence
  Synthetic
aggactgaggctccccgttgt

SEQ ID NO: 2386 - DNA, 21 bp, Artificial Sequence
  Synthetic
caggactgaggctccccgttg

SEQ ID NO: 2387 - DNA, 21 bp, Artificial Sequence
  Synthetic
ggggagcctcagtcctggttc

SEQ ID NO: 2388 - DNA, 21 bp, Artificial Sequence
  Synthetic
gagctgcctctggaaccagga

SEQ ID NO: 2389 - DNA, 21 bp, Artificial Sequence
  Synthetic
gtcctggttccagaggcagct

SEQ ID NO: 2390 - DNA, 21 bp, Artificial Sequence
  Synthetic
ccccggagctgcctctggaac

SEQ ID NO: 2391 - DNA, 21 bp, Artificial Sequence
  Synthetic
tcctggttccagaggcagctc

SEQ ID NO: 2392 - DNA, 21 bp, Artificial Sequence
  Synthetic
tgtgcgccccggagctgcctc

SEQ ID NO: 2393 - DNA, 21 bp, Artificial Sequence
  Synthetic
ctgtgcgccccggagctgcct

SEQ ID NO: 2394 - DNA, 21 bp, Artificial Sequence
  Synthetic
atgggctggtactgtgcgccc

SEQ ID NO: 2395 - DNA, 21 bp, Artificial Sequence
  Synthetic
gatgggctggtactgtgcgcc

SEQ ID NO: 2396 - DNA, 21 bp, Artificial Sequence
  Synthetic
cgcacagtaccagcccatcct

SEQ ID NO: 2397 - DNA, 21 bp, Artificial Sequence
  Synthetic
gcacagtaccagcccatcctc

SEQ ID NO: 2398 - DNA, 21 bp, Artificial Sequence
  Synthetic
ttacagatgtggtccctgagg

SEQ ID NO: 2399 - DNA, 21 bp, Artificial Sequence
  Synthetic
taccttacagatgtggtccct

SEQ ID NO: 2400 - DNA, 21 bp, Artificial Sequence
  Synthetic
attaccttacagatgtggtcc

SEQ ID NO: 2401 - DNA, 21 bp, Artificial Sequence
  Synthetic
agccaccaatgcactcatgtc

SEQ ID NO: 2402 - DNA, 21 bp, Artificial Sequence
  Synthetic
ggccaaggggatgtgccgcat

SEQ ID NO: 2403 - DNA, 21 bp, Artificial Sequence
  Synthetic
tgcggcacatccccttggccc

SEQ ID NO: 2404 - DNA, 21 bp, Artificial Sequence
  Synthetic
ccagtctgaccctggggccaa

SEQ ID NO: 2405 - DNA, 21 bp, Artificial Sequence
  Synthetic
gccagtctgaccctggggcca

SEQ ID NO: 2406 - DNA, 21 bp, Artificial Sequence
  Synthetic
cgccagtctgaccctggggcc

SEQ ID NO: 2407 - DNA, 21 bp, Artificial Sequence
  Synthetic
cagatcgcgccagtctgaccc

SEQ ID NO: 2408 - DNA, 21 bp, Artificial Sequence
  Synthetic
gcagatcgcgccagtctgacc

SEQ ID NO: 2409 - DNA, 21 bp, Artificial Sequence
  Synthetic
actggcgcgatctgcccaaca

SEQ ID NO: 2410 - DNA, 21 bp, Artificial Sequence
  Synthetic
tctgagagccgcacctcgatg

SEQ ID NO: 2411 - DNA, 21 bp, Artificial Sequence
  Synthetic
gctctcagacggcaccatggc

SEQ ID NO: 2412 - DNA, 21 bp, Artificial Sequence
  Synthetic
ttcctggccatggtgccgtct

SEQ ID NO: 2413 - DNA, 21 bp, Artificial Sequence
  Synthetic
ctctcagacggcaccatggcc

SEQ ID NO: 2414 - DNA, 21 bp, Artificial Sequence
  Synthetic
gcttcctggccatggtgccgt

SEQ ID NO: 2415 - DNA, 21 bp, Artificial Sequence
  Synthetic
gctgcggtatacccaccatga

SEQ ID NO: 2416 - DNA, 21 bp, Artificial Sequence
  Synthetic
ctgcggtatacccaccatgac

SEQ ID NO: 2417 - DNA, 21 bp, Artificial Sequence
  Synthetic
cggtatacccaccatgacagg

SEQ ID NO: 2418 - DNA, 21 bp, Artificial Sequence
  Synthetic
gcggccgttcttcctgtcatg

SEQ ID NO: 2419 - DNA, 21 bp, Artificial Sequence
  Synthetic
ggaagaacggccgcagcagct

SEQ ID NO: 2420 - DNA, 21 bp, Artificial Sequence
  Synthetic
gaagaacggccgcagcagctc

SEQ ID NO: 2421 - DNA, 21 bp, Artificial Sequence
  Synthetic
gcagcagctctggggccctcc

SEQ ID NO: 2422 - DNA, 21 bp, Artificial Sequence
  Synthetic
cagcagctctggggccctccg

SEQ ID NO: 2423 - DNA, 21 bp, Artificial Sequence
  Synthetic
agcagaccccacggagggccc

SEQ ID NO: 2424 - DNA, 21 bp, Artificial Sequence
  Synthetic
cacgcaggagcagaccccacg

SEQ ID NO: 2425 - DNA, 21 bp, Artificial Sequence
  Synthetic
tccacgcaggagcagacccca

SEQ ID NO: 2426 - DNA, 21 bp, Artificial Sequence
  Synthetic
ctccgtggggtctgctcctgc

SEQ ID NO: 2427 - DNA, 21 bp, Artificial Sequence
  Synthetic
ttccacgcaggagcagacccc

SEQ ID NO: 2428 - DNA, 21 bp, Artificial Sequence
  Synthetic
tccgtggggtctgctcctgcg

SEQ ID NO: 2429 - DNA, 21 bp, Artificial Sequence
  Synthetic
gggtctgctcctgcgtggaag

SEQ ID NO: 2430 - DNA, 21 bp, Artificial Sequence
  Synthetic
tacaggacccaccttccacgc

SEQ ID NO: 2431 - DNA, 21 bp, Artificial Sequence
  Synthetic
ttacaggacccaccttccacg

SEQ ID NO: 2432 - DNA, 21 bp, Artificial Sequence
  Synthetic
ggggtcgcaggctttgccggc

SEQ ID NO: 2433 - DNA, 21 bp, Artificial Sequence
  Synthetic
cggggtcgcaggctttgccgg

SEQ ID NO: 2434 - DNA, 21 bp, Artificial Sequence
  Synthetic
gggtgttgaactgcctggctg

SEQ ID NO: 2435 - DNA, 21 bp, Artificial Sequence
  Synthetic
agggtgttgaactgcctggct

SEQ ID NO: 2436 - DNA, 21 bp, Artificial Sequence
  Synthetic
aggcaccaggggatgagggtg

SEQ ID NO: 2437 - DNA, 21 bp, Artificial Sequence
  Synthetic
gtggggcaggcaccaggggat

SEQ ID NO: 2438 - DNA, 21 bp, Artificial Sequence
  Synthetic
gtgtggggcaggcaccagggg

SEQ ID NO: 2439 - DNA, 21 bp, Artificial Sequence
  Synthetic
cccggtgtggggcaggcacca

SEQ ID NO: 2440 - DNA, 21 bp, Artificial Sequence
  Synthetic
tcccctggtgcctgccccaca

SEQ ID NO: 2441 - DNA, 21 bp, Artificial Sequence
  Synthetic
tcccggtgtggggcaggcacc

SEQ ID NO: 2442 - DNA, 21 bp, Artificial Sequence
  Synthetic
cccctggtgcctgccccacac

SEQ ID NO: 2443 - DNA, 21 bp, Artificial Sequence
  Synthetic
ttcccggtgtggggcaggcac

SEQ ID NO: 2444 - DNA, 21 bp, Artificial Sequence
  Synthetic
ccctggtgcctgccccacacc

SEQ ID NO: 2445 - DNA, 21 bp, Artificial Sequence
  Synthetic
tggttgtgccggttcccggtg

SEQ ID NO: 2446 - DNA, 21 bp, Artificial Sequence
  Synthetic
gtggttgtgccggttcccggt

SEQ ID NO: 2447 - DNA, 21 bp, Artificial Sequence
  Synthetic
caccgggaaccggcacaacca

SEQ ID NO: 2448 - DNA, 21 bp, Artificial Sequence
  Synthetic
acaaccactgggctggcctct

SEQ ID NO: 2449 - DNA, 21 bp, Artificial Sequence
  Synthetic
caaccactgggctggcctcta

SEQ ID NO: 2450 - DNA, 21 bp, Artificial Sequence
  Synthetic
gggctggcctctatggaaggc

SEQ ID NO: 2451 - DNA, 21 bp, Artificial Sequence
  Synthetic
tggcctctatggaaggctcga

SEQ ID NO: 2452 - DNA, 21 bp, Artificial Sequence
  Synthetic
ggcctctatggaaggctcgag

SEQ ID NO: 2453 - DNA, 21 bp, Artificial Sequence
  Synthetic
ccgtcccactcgagccttcca

SEQ ID NO: 2454 - DNA, 21 bp, Artificial Sequence
  Synthetic
gtgctgaagaagccgtcccac

SEQ ID NO: 2455 - DNA, 21 bp, Artificial Sequence
  Synthetic
gggttggtgacggttgtgctg

SEQ ID NO: 2456 - DNA, 21 bp, Artificial Sequence
  Synthetic
tcggggttggtgacggttgtg

SEQ ID NO: 2457 - DNA, 21 bp, Artificial Sequence
  Synthetic
tcagcacaaccgtcaccaacc

SEQ ID NO: 2458 - DNA, 21 bp, Artificial Sequence
  Synthetic
accgtcaccaaccccgagccc

SEQ ID NO: 2459 - DNA, 21 bp, Artificial Sequence
  Synthetic
ctacctgcttgcccatgggct

SEQ ID NO: 2460 - DNA, 21 bp, Artificial Sequence
  Synthetic
cctacctgcttgcccatgggc

SEQ ID NO: 2461 - DNA, 21 bp, Artificial Sequence
  Synthetic
tccccacctacctgcttgccc

SEQ ID NO: 2462 - DNA, 21 bp, Artificial Sequence
  Synthetic
ctgggtggagcacgcggccct

SEQ ID NO: 2463 - DNA, 21 bp, Artificial Sequence
  Synthetic
tctgggtggagcacgcggccc

SEQ ID NO: 2464 - DNA, 21 bp, Artificial Sequence
  Synthetic
ctctgggtggagcacgcggcc

SEQ ID NO: 2465 - DNA, 21 bp, Artificial Sequence
  Synthetic
cccagggccgcgtgctccacc

SEQ ID NO: 2466 - DNA, 21 bp, Artificial Sequence
  Synthetic
accacacggtgctgctctggg

SEQ ID NO: 2467 - DNA, 21 bp, Artificial Sequence
  Synthetic
caccacacggtgctgctctgg

SEQ ID NO: 2468 - DNA, 21 bp, Artificial Sequence
  Synthetic
cacccagagcagcaccgtgtg

SEQ ID NO: 2469 - DNA, 21 bp, Artificial Sequence
  Synthetic
cgctcaccacacggtgctgct

SEQ ID NO: 2470 - DNA, 21 bp, Artificial Sequence
  Synthetic
gcagcaccgtgtggtgagcgt

SEQ ID NO: 2471 - DNA, 21 bp, Artificial Sequence
  Synthetic
cagcaccgtgtggtgagcgtg

SEQ ID NO: 2472 - DNA, 21 bp, Artificial Sequence
  Synthetic
agcaccgtgtggtgagcgtgc

SEQ ID NO: 2473 - DNA, 21 bp, Artificial Sequence
  Synthetic
gtgcgggagtgtgcccgctcc

SEQ ID NO: 2474 - DNA, 21 bp, Artificial Sequence
  Synthetic
ggtgtcagggaagccctggga

SEQ ID NO: 2475 - DNA, 21 bp, Artificial Sequence
  Synthetic
ggtaggtgtcagggaagccct

SEQ ID NO: 2476 - DNA, 21 bp, Artificial Sequence
  Synthetic
cggtaggtgtcagggaagccc

SEQ ID NO: 2477 - DNA, 21 bp, Artificial Sequence
  Synthetic
ccggtaggtgtcagggaagcc

SEQ ID NO: 2478 - DNA, 21 bp, Artificial Sequence
  Synthetic
ccgaagagccggtaggtgtca

SEQ ID NO: 2479 - DNA, 21 bp, Artificial Sequence
  Synthetic
gccgaagagccggtaggtgtc

SEQ ID NO: 2480 - DNA, 21 bp, Artificial Sequence
  Synthetic
tgccgaagagccggtaggtgt

SEQ ID NO: 2481 - DNA, 21 bp, Artificial Sequence
  Synthetic
taccggctcttcggcaacatc

SEQ ID NO: 2482 - DNA, 21 bp, Artificial Sequence
  Synthetic
tgcttgtccaggatgttgccg

SEQ ID NO: 2483 - DNA, 21 bp, Artificial Sequence
  Synthetic
cggtgcttgtccaggatgttg

SEQ ID NO: 2484 - DNA, 21 bp, Artificial Sequence
  Synthetic
actgacctgccggtgcttgtc

SEQ ID NO: 2485 - DNA, 21 bp, Artificial Sequence
  Synthetic
tccaagccaatggctttggcc

SEQ ID NO: 2486 - DNA, 21 bp, Artificial Sequence
  Synthetic
cccctggccaaagccattggc

SEQ ID NO: 2487 - DNA, 21 bp, Artificial Sequence
  Synthetic
ctccaagccaatggctttggc

SEQ ID NO: 2488 - DNA, 21 bp, Artificial Sequence
  Synthetic
ccctggccaaagccattggct

SEQ ID NO: 2489 - DNA, 21 bp, Artificial Sequence
  Synthetic
cacaccatcaccaactcggta

SEQ ID NO: 2490 - DNA, 21 bp, Artificial Sequence
  Synthetic
gtgatggtgtgtacctgcccc

SEQ ID NO: 2491 - DNA, 21 bp, Artificial Sequence
  Synthetic
tacttgaacgtgaaggcctca

SEQ ID NO: 2492 - DNA, 21 bp, Artificial Sequence
  Synthetic
ttacttgaacgtgaaggcctc

SEQ ID NO: 2493 - DNA, 21 bp, Artificial Sequence
  Synthetic
cttacttgaacgtgaaggcct

SEQ ID NO: 2494 - DNA, 21 bp, Artificial Sequence
  Synthetic
cgagggggcacttacttgaac

SEQ ID NO: 2495 - DNA, 21 bp, Artificial Sequence
  Synthetic
agcatcaagctgtccagtccc

SEQ ID NO: 2496 - DNA, 21 bp, Artificial Sequence
  Synthetic
gtccagtcccgtgaaacgccc

SEQ ID NO: 2497 - DNA, 21 bp, Artificial Sequence
  Synthetic
ttccgtgggcgtttcacggga

SEQ ID NO: 2498 - DNA, 21 bp, Artificial Sequence
  Synthetic
tccagtcccgtgaaacgccca

SEQ ID NO: 2499 - DNA, 21 bp, Artificial Sequence
  Synthetic
agtcccgtgaaacgcccacgg

SEQ ID NO: 2500 - DNA, 21 bp, Artificial Sequence
  Synthetic
gtcccgtgaaacgcccacgga

SEQ ID NO: 2501 - DNA, 21 bp, Artificial Sequence
  Synthetic
gctccttccgtgggcgtttca

SEQ ID NO: 2502 - DNA, 21 bp, Artificial Sequence
  Synthetic
ggctccttccgtgggcgtttc

SEQ ID NO: 2503 - DNA, 21 bp, Artificial Sequence
  Synthetic
aaacgcccacggaaggagccc

SEQ ID NO: 2504 - DNA, 21 bp, Artificial Sequence
  Synthetic
gcccacggaaggagcccgtgg

SEQ ID NO: 2505 - DNA, 21 bp, Artificial Sequence
  Synthetic
cctcatccacgggctccttcc

SEQ ID NO: 2506 - DNA, 21 bp, Artificial Sequence
  Synthetic
ccacggaaggagcccgtggat

SEQ ID NO: 2507 - DNA, 21 bp, Artificial Sequence
  Synthetic
tctgggtacaggtcctcatcc

SEQ ID NO: 2508 - DNA, 21 bp, Artificial Sequence
  Synthetic
ccgtggatgaggacctgtacc

SEQ ID NO: 2509 - DNA, 21 bp, Artificial Sequence
  Synthetic
ggacctgtacccagagcacta

SEQ ID NO: 2510 - DNA, 21 bp, Artificial Sequence
  Synthetic
gacctgtacccagagcactac

SEQ ID NO: 2511 - DNA, 21 bp, Artificial Sequence
  Synthetic
cggagtatttccggtagtgct

SEQ ID NO: 2512 - DNA, 21 bp, Artificial Sequence
  Synthetic
ggttgctgcctttgatgtagt

SEQ ID NO: 2513 - DNA, 21 bp, Artificial Sequence
  Synthetic
aggttgctgcctttgatgtag

SEQ ID NO: 2514 - DNA, 21 bp, Artificial Sequence
  Synthetic
gactacatcaaaggcagcaac

SEQ ID NO: 2515 - DNA, 21 bp, Artificial Sequence
  Synthetic
aaggcagcaacctggatgccc

SEQ ID NO: 2516 - DNA, 21 bp, Artificial Sequence
  Synthetic
cctggatgcccctgagcccta

SEQ ID NO: 2517 - DNA, 21 bp, Artificial Sequence
  Synthetic
ccggccaattcggtagggctc

SEQ ID NO: 2518 - DNA, 21 bp, Artificial Sequence
  Synthetic
tccggccaattcggtagggct

SEQ ID NO: 2519 - DNA, 21 bp, Artificial Sequence
  Synthetic
ccctgagccctaccgaattgg

SEQ ID NO: 2520 - DNA, 21 bp, Artificial Sequence
  Synthetic
tctttgatccggccaattcgg

SEQ ID NO: 2521 - DNA, 21 bp, Artificial Sequence
  Synthetic
cctaccgaattggccggatca

SEQ ID NO: 2522 - DNA, 21 bp, Artificial Sequence
  Synthetic
atcaaagagatcttctgtccc

SEQ ID NO: 2523 - DNA, 21 bp, Artificial Sequence
  Synthetic
aaagagatcttctgtcccaag

SEQ ID NO: 2524 - DNA, 21 bp, Artificial Sequence
  Synthetic
ctgccgttgctcttcttggga

SEQ ID NO: 2525 - DNA, 21 bp, Artificial Sequence
  Synthetic
tgggcctgccgttgctcttct

SEQ ID NO: 2526 - DNA, 21 bp, Artificial Sequence
  Synthetic
ttgggcctgccgttgctcttc

SEQ ID NO: 2527 - DNA, 21 bp, Artificial Sequence
  Synthetic
agaagagcaacggcaggccca

SEQ ID NO: 2528 - DNA, 21 bp, Artificial Sequence
  Synthetic
caatgagactgacatcaaaat

SEQ ID NO: 2529 - DNA, 21 bp, Artificial Sequence
  Synthetic
tgacctgtagaacttgttgac

SEQ ID NO: 2530 - DNA, 21 bp, Artificial Sequence
  Synthetic
acagaggcctctgctgacctg

SEQ ID NO: 2531 - DNA, 21 bp, Artificial Sequence
  Synthetic
gcctctcccgctcgcaggcct

SEQ ID NO: 2532 - DNA, 21 bp, Artificial Sequence
  Synthetic
cttgtgggtgttctcaggcct

SEQ ID NO: 2533 - DNA, 21 bp, Artificial Sequence
  Synthetic
aacacccacaagtccactcca

SEQ ID NO: 2534 - DNA, 21 bp, Artificial Sequence
  Synthetic
gtagctcgctggagtggactt

SEQ ID NO: 2535 - DNA, 21 bp, Artificial Sequence
  Synthetic
tctgcgtggtagctcgctgga

SEQ ID NO: 2536 - DNA, 21 bp, Artificial Sequence
  Synthetic
gatgtctgcgtggtagctcgc

SEQ ID NO: 2537 - DNA, 21 bp, Artificial Sequence
  Synthetic
tgatgtctgcgtggtagctcg

SEQ ID NO: 2538 - DNA, 21 bp, Artificial Sequence
  Synthetic
cgcagacatcaacctgctcta

SEQ ID NO: 2539 - DNA, 21 bp, Artificial Sequence
  Synthetic
gcagacatcaacctgctctac

SEQ ID NO: 2540 - DNA, 21 bp, Artificial Sequence
  Synthetic
tcaacctgctctactggagcg

SEQ ID NO: 2541 - DNA, 21 bp, Artificial Sequence
  Synthetic
aacctgctctactggagcgac

SEQ ID NO: 2542 - DNA, 21 bp, Artificial Sequence
  Synthetic
acctgctctactggagcgacg

SEQ ID NO: 2543 - DNA, 21 bp, Artificial Sequence
  Synthetic
acggcctcctcgtcgctccag

SEQ ID NO: 2544 - DNA, 21 bp, Artificial Sequence
  Synthetic
tggagcgacgaggaggccgtg

SEQ ID NO: 2545 - DNA, 21 bp, Artificial Sequence
  Synthetic
gtggtggacttcaaggctgtg

SEQ ID NO: 2546 - DNA, 21 bp, Artificial Sequence
  Synthetic
gtgcagcggccctgcacagcc

SEQ ID NO: 2547 - DNA, 21 bp, Artificial Sequence
  Synthetic
gctgtgcagggccgctgcacc

SEQ ID NO: 2548 - DNA, 21 bp, Artificial Sequence
  Synthetic
ctgtgcagggccgctgcaccg

SEQ ID NO: 2549 - DNA, 21 bp, Artificial Sequence
  Synthetic
agggccgctgcaccgtggagt

SEQ ID NO: 2550 - DNA, 21 bp, Artificial Sequence
  Synthetic
gggccgctgcaccgtggagta

SEQ ID NO: 2551 - DNA, 21 bp, Artificial Sequence
  Synthetic
ggccgctgcaccgtggagtat

SEQ ID NO: 2552 - DNA, 21 bp, Artificial Sequence
  Synthetic
gccgctgcaccgtggagtatg

SEQ ID NO: 2553 - DNA, 21 bp, Artificial Sequence
  Synthetic
cgctgcaccgtggagtatggg

SEQ ID NO: 2554 - DNA, 21 bp, Artificial Sequence
  Synthetic
tggagtatggggaggacctgc

SEQ ID NO: 2555 - DNA, 21 bp, Artificial Sequence
  Synthetic
atggagtacacctggacgcac

SEQ ID NO: 2556 - DNA, 21 bp, Artificial Sequence
  Synthetic
gagtgcgtccaggtgtactcc

SEQ ID NO: 2557 - DNA, 21 bp, Artificial Sequence
  Synthetic
ggggccgcccatggagtacac

SEQ ID NO: 2558 - DNA, 21 bp, Artificial Sequence
  Synthetic
agaagcggttggggccgccca

SEQ ID NO: 2559 - DNA, 21 bp, Artificial Sequence
  Synthetic
tagaagcggttggggccgccc

SEQ ID NO: 2560 - DNA, 21 bp, Artificial Sequence
  Synthetic
gccccaaccgcttctacttcc

SEQ ID NO: 2561 - DNA, 21 bp, Artificial Sequence
  Synthetic
cctcgaggaagtagaagcggt

SEQ ID NO: 2562 - DNA, 21 bp, Artificial Sequence
  Synthetic
acctcgaggaagtagaagcgg

SEQ ID NO: 2563 - DNA, 21 bp, Artificial Sequence
  Synthetic
aggggcaccacctcgaggaag

SEQ ID NO: 2564 - DNA, 21 bp, Artificial Sequence
  Synthetic
gcaagcaggggcaccacctcg

SEQ ID NO: 2565 - DNA, 21 bp, Artificial Sequence
  Synthetic
agcaagcaggggcaccacctc

SEQ ID NO: 2566 - DNA, 21 bp, Artificial Sequence
  Synthetic
tttgctctttgcattataggc

SEQ ID NO: 2567 - DNA, 21 bp, Artificial Sequence
  Synthetic
ataatgcaaagagcaaaagct

SEQ ID NO: 2568 - DNA, 21 bp, Artificial Sequence
  Synthetic
gtgtgcattgatgcggaaacc

SEQ ID NO: 2569 - DNA, 21 bp, Artificial Sequence
  Synthetic
tgtgcattgatgcggaaaccc

SEQ ID NO: 2570 - DNA, 21 bp, Artificial Sequence
  Synthetic
attgatgcggaaaccctggaa

SEQ ID NO: 2571 - DNA, 21 bp, Artificial Sequence
  Synthetic
ttgatgcggaaaccctggaag

SEQ ID NO: 2572 - DNA, 21 bp, Artificial Sequence
  Synthetic
tgatgcggaaaccctggaagt

SEQ ID NO: 2573 - DNA, 21 bp, Artificial Sequence
  Synthetic
gatgcggaaaccctggaagtg

SEQ ID NO: 2574 - DNA, 21 bp, Artificial Sequence
  Synthetic
agagacacagtcccccacttc

SEQ ID NO: 2575 - DNA, 21 bp, Artificial Sequence
  Synthetic
ttgaggaatcatctggaataa

SEQ ID NO: 2576 - DNA, 21 bp, Artificial Sequence
  Synthetic
accttgctagatacagcggtt

SEQ ID NO: 2577 - DNA, 21 bp, Artificial Sequence
  Synthetic
tgattccagggtcacggcgct

SEQ ID NO: 2578 - DNA, 21 bp, Artificial Sequence
  Synthetic
gattccagggtcacggcgctg

SEQ ID NO: 2579 - DNA, 21 bp, Artificial Sequence
  Synthetic
attccagggtcacggcgctgt

SEQ ID NO: 2580 - DNA, 21 bp, Artificial Sequence
  Synthetic
cctcccacagcgccgtgaccc

SEQ ID NO: 2581 - DNA, 21 bp, Artificial Sequence
  Synthetic
tcctcccacagcgccgtgacc

SEQ ID NO: 2582 - DNA, 21 bp, Artificial Sequence
  Synthetic
tccagggtcacggcgctgtgg

SEQ ID NO: 2583 - DNA, 21 bp, Artificial Sequence
  Synthetic
cgctgtgggaggacagcagca

SEQ ID NO: 2584 - DNA, 21 bp, Artificial Sequence
  Synthetic
cccagcgcagaaccagtgggc

SEQ ID NO: 2585 - DNA, 21 bp, Artificial Sequence
  Synthetic
ttcacgcccactggttctgcg

SEQ ID NO: 2586 - DNA, 21 bp, Artificial Sequence
  Synthetic
tcacgcccactggttctgcgc

SEQ ID NO: 2587 - DNA, 21 bp, Artificial Sequence
  Synthetic
gtctgtcccagcgcagaacca

SEQ ID NO: 2588 - DNA, 21 bp, Artificial Sequence
  Synthetic
aggactgtgtctgtcccagcg

SEQ ID NO: 2589 - DNA, 21 bp, Artificial Sequence
  Synthetic
gcgctgggacagacacagtcc

SEQ ID NO: 2590 - DNA, 21 bp, Artificial Sequence
  Synthetic
cgctgggacagacacagtcct

SEQ ID NO: 2591 - DNA, 21 bp, Artificial Sequence
  Synthetic
gacacagtcctcggggccacg

SEQ ID NO: 2592 - DNA, 21 bp, Artificial Sequence
  Synthetic
cagagggtccgacgtggcccc

SEQ ID NO: 2593 - DNA, 21 bp, Artificial Sequence
  Synthetic
tccagagggtccgacgtggcc

SEQ ID NO: 2594 - DNA, 21 bp, Artificial Sequence
  Synthetic
ctcggggccacgtcggaccct

SEQ ID NO: 2595 - DNA, 21 bp, Artificial Sequence
  Synthetic
tcggggccacgtcggaccctc

SEQ ID NO: 2596 - DNA, 21 bp, Artificial Sequence
  Synthetic
gaccctctggagctgttcttg

SEQ ID NO: 2597 - DNA, 21 bp, Artificial Sequence
  Synthetic
catccaccaagaacagctcca

SEQ ID NO: 2598 - DNA, 21 bp, Artificial Sequence
  Synthetic
ttcatccaccaagaacagctc

SEQ ID NO: 2599 - DNA, 21 bp, Artificial Sequence
  Synthetic
ctctggagctgttcttggtgg

SEQ ID NO: 2600 - DNA, 21 bp, Artificial Sequence
  Synthetic
agctgttcttggtggatgaat

SEQ ID NO: 2601 - DNA, 21 bp, Artificial Sequence
  Synthetic
ctgttcttggtggatgaatgt

SEQ ID NO: 2602 - DNA, 21 bp, Artificial Sequence
  Synthetic
atgtcctcacattcatccacc

SEQ ID NO: 2603 - DNA, 21 bp, Artificial Sequence
  Synthetic
ctttcatatatccacagcaaa

SEQ ID NO: 2604 - DNA, 21 bp, Artificial Sequence
  Synthetic
ctttcactttgctgtggatat

SEQ ID NO: 2605 - DNA, 21 bp, Artificial Sequence
  Synthetic
gtagatgactttcactttgct

SEQ ID NO: 2606 - DNA, 21 bp, Artificial Sequence
  Synthetic
aagtcatctacaaagccccct

SEQ ID NO: 2607 - DNA, 21 bp, Artificial Sequence
  Synthetic
ctacaaagccccctccgaaaa

SEQ ID NO: 2608 - DNA, 21 bp, Artificial Sequence
  Synthetic
gccccctccgaaaactgggcc

SEQ ID NO: 2609 - DNA, 21 bp, Artificial Sequence
  Synthetic
ccccctccgaaaactgggcca

SEQ ID NO: 2610 - DNA, 21 bp, Artificial Sequence
  Synthetic
ctcacctccatggcccagttt

SEQ ID NO: 2611 - DNA, 21 bp, Artificial Sequence
  Synthetic
tccgaaaactgggccatggag

SEQ ID NO: 2612 - DNA, 21 bp, Artificial Sequence
  Synthetic
ttcttatctcccaagggaggc

SEQ ID NO: 2613 - DNA, 21 bp, Artificial Sequence
  Synthetic
ctcccaagggaggcatggatc

SEQ ID NO: 2614 - DNA, 21 bp, Artificial Sequence
  Synthetic
actcgggatccatgcctccct

SEQ ID NO: 2615 - DNA, 21 bp, Artificial Sequence
  Synthetic
gactcgggatccatgcctccc

SEQ ID NO: 2616 - DNA, 21 bp, Artificial Sequence
  Synthetic
ggcatggatcccgagtccctg

SEQ ID NO: 2617 - DNA, 21 bp, Artificial Sequence
  Synthetic
gcatggatcccgagtccctgc

SEQ ID NO: 2618 - DNA, 21 bp, Artificial Sequence
  Synthetic
atggatcccgagtccctgctg

SEQ ID NO: 2619 - DNA, 21 bp, Artificial Sequence
  Synthetic
tggatcccgagtccctgctgg

SEQ ID NO: 2620 - DNA, 21 bp, Artificial Sequence
  Synthetic
ggatcccgagtccctgctgga

SEQ ID NO: 2621 - DNA, 21 bp, Artificial Sequence
  Synthetic
gatcccgagtccctgctggag

SEQ ID NO: 2622 - DNA, 21 bp, Artificial Sequence
  Synthetic
cgtccccctccagcagggact

SEQ ID NO: 2623 - DNA, 21 bp, Artificial Sequence
  Synthetic
tcgtccccctccagcagggac

SEQ ID NO: 2624 - DNA, 21 bp, Artificial Sequence
  Synthetic
agtccctgctggagggggacg

SEQ ID NO: 2625 - DNA, 21 bp, Artificial Sequence
  Synthetic
gtccctgctggagggggacga

SEQ ID NO: 2626 - DNA, 21 bp, Artificial Sequence
  Synthetic
ttcccgtcgtccccctccagc

SEQ ID NO: 2627 - DNA, 21 bp, Artificial Sequence
  Synthetic
tccctgctggagggggacgac

SEQ ID NO: 2628 - DNA, 21 bp, Artificial Sequence
  Synthetic
cttcccgtcgtccccctccag

SEQ ID NO: 2629 - DNA, 21 bp, Artificial Sequence
  Synthetic
tcttgatcataccacagctgg

SEQ ID NO: 2630 - DNA, 21 bp, Artificial Sequence
  Synthetic
ctgtggtatgatcaagactac

SEQ ID NO: 2631 - DNA, 21 bp, Artificial Sequence
  Synthetic
atgatcaagactacgcgagat

SEQ ID NO: 2632 - DNA, 21 bp, Artificial Sequence
  Synthetic
agcgccggcgatgtggcgtct

SEQ ID NO: 2633 - DNA, 21 bp, Artificial Sequence
  Synthetic
aggtgtgtcagcagcctgagt

SEQ ID NO: 2634 - DNA, 21 bp, Artificial Sequence
  Synthetic
ggtgtgtcagcagcctgagtg

SEQ ID NO: 2635 - DNA, 21 bp, Artificial Sequence
  Synthetic
gtgtgtcagcagcctgagtgt

SEQ ID NO: 2636 - DNA, 21 bp, Artificial Sequence
  Synthetic
tgtgggaaatgtaaagcctgc

SEQ ID NO: 2637 - DNA, 21 bp, Artificial Sequence
  Synthetic
acatggttaaatttggtggca

SEQ ID NO: 2638 - DNA, 21 bp, Artificial Sequence
  Synthetic
ggttaaatttggtggcagtgg

SEQ ID NO: 2639 - DNA, 21 bp, Artificial Sequence
  Synthetic
gttaaatttggtggcagtgga

SEQ ID NO: 2640 - DNA, 21 bp, Artificial Sequence
  Synthetic
gacggagcaagcaggcttgcc

SEQ ID NO: 2641 - DNA, 21 bp, Artificial Sequence
  Synthetic
gagcaagcaggcttgccaaga

SEQ ID NO: 2642 - DNA, 21 bp, Artificial Sequence
  Synthetic
agcaagcaggcttgccaagag

SEQ ID NO: 2643 - DNA, 21 bp, Artificial Sequence
  Synthetic
catcgtcgggcagcgagatgg

SEQ ID NO: 2644 - DNA, 21 bp, Artificial Sequence
  Synthetic
gcctgcggacatcgtcgggca

SEQ ID NO: 2645 - DNA, 21 bp, Artificial Sequence
  Synthetic
acctaccgcctgcggacatcg

SEQ ID NO: 2646 - DNA, 21 bp, Artificial Sequence
  Synthetic
cccccatggtacctaccgcct

SEQ ID NO: 2647 - DNA, 21 bp, Artificial Sequence
  Synthetic
cttcctcccaggctcaaagat

SEQ ID NO: 2648 - DNA, 21 bp, Artificial Sequence
  Synthetic
ttcctcccaggctcaaagatt

SEQ ID NO: 2649 - DNA, 21 bp, Artificial Sequence
  Synthetic
tctttccaaatctttgagcct

SEQ ID NO: 2650 - DNA, 21 bp, Artificial Sequence
  Synthetic
ctctttccaaatctttgagcc

SEQ ID NO: 2651 - DNA, 21 bp, Artificial Sequence
  Synthetic
tcccaggctcaaagatttgga

SEQ ID NO: 2652 - DNA, 21 bp, Artificial Sequence
  Synthetic
tctctttccaaatctttgagc

SEQ ID NO: 2653 - DNA, 21 bp, Artificial Sequence
  Synthetic
aagctgtctctttccaaatct

SEQ ID NO: 2654 - DNA, 21 bp, Artificial Sequence
  Synthetic
atttggaaagagacagcttaa

SEQ ID NO: 2655 - DNA, 21 bp, Artificial Sequence
  Synthetic
atatccttcccttaggaatgt

SEQ ID NO: 2656 - DNA, 21 bp, Artificial Sequence
  Synthetic
tccttcccttaggaatgtgtg

SEQ ID NO: 2657 - DNA, 21 bp, Artificial Sequence
  Synthetic
ccttcccttaggaatgtgtga

SEQ ID NO: 2658 - DNA, 21 bp, Artificial Sequence
  Synthetic
ttcccttaggaatgtgtgaag

SEQ ID NO: 2659 - DNA, 21 bp, Artificial Sequence
  Synthetic
atttctccttcacacattcct

SEQ ID NO: 2660 - DNA, 21 bp, Artificial Sequence
  Synthetic
taggaatgtgtgaaggagaaa

SEQ ID NO: 2661 - DNA, 21 bp, Artificial Sequence
  Synthetic
aggagaaattgaatctcttgc

SEQ ID NO: 2662 - DNA, 21 bp, Artificial Sequence
  Synthetic
tctgtttgcagaaattcgtgc

SEQ ID NO: 2663 - DNA, 21 bp, Artificial Sequence
  Synthetic
tcttgcacgaatttctgcaaa

SEQ ID NO: 2664 - DNA, 21 bp, Artificial Sequence
  Synthetic
gaatttctgcaaacagaaata

SEQ ID NO: 2665 - DNA, 21 bp, Artificial Sequence
  Synthetic
ctgattctttatttctgtttg

SEQ ID NO: 2666 - DNA, 21 bp, Artificial Sequence
  Synthetic
ataaagaatcagttatgtgac

SEQ ID NO: 2667 - DNA, 21 bp, Artificial Sequence
  Synthetic
taaagaatcagttatgtgact

SEQ ID NO: 2668 - DNA, 21 bp, Artificial Sequence
  Synthetic
acttggaaaccaaattacgta

SEQ ID NO: 2669 - DNA, 21 bp, Artificial Sequence
  Synthetic
tggaaaccaaattacgtaaag

SEQ ID NO: 2670 - DNA, 21 bp, Artificial Sequence
  Synthetic
aattacgtaaagaagaattat

SEQ ID NO: 2671 - DNA, 21 bp, Artificial Sequence
  Synthetic
aaggacaaatctttatttaaa

SEQ ID NO: 2672 - DNA, 21 bp, Artificial Sequence
  Synthetic
caaggacaaatctttatttaa

SEQ ID NO: 2673 - DNA, 21 bp, Artificial Sequence
  Synthetic
ttaaataaagatttgtccttg

SEQ ID NO: 2674 - DNA, 21 bp, Artificial Sequence
  Synthetic
taagcatgagcaccgttctcc

SEQ ID NO: 2675 - DNA, 21 bp, Artificial Sequence
  Synthetic
gaacggtgctcatgcttacaa

SEQ ID NO: 2676 - DNA, 21 bp, Artificial Sequence
  Synthetic
aacggtgctcatgcttacaac

SEQ ID NO: 2677 - DNA, 21 bp, Artificial Sequence
  Synthetic
acggtgctcatgcttacaacc

SEQ ID NO: 2678 - DNA, 21 bp, Artificial Sequence
  Synthetic
gctcatgcttacaaccgggaa

SEQ ID NO: 2679 - DNA, 21 bp, Artificial Sequence
  Synthetic
attcacttcccggttgtaagc

SEQ ID NO: 2680 - DNA, 21 bp, Artificial Sequence
  Synthetic
atgcttacaaccgggaagtga

SEQ ID NO: 2681 - DNA, 21 bp, Artificial Sequence
  Synthetic
gaagcaggtcagtttgtgctg

SEQ ID NO: 2682 - DNA, 21 bp, Artificial Sequence
  Synthetic
tgaagcaggtcagtttgtgct

SEQ ID NO: 2683 - DNA, 21 bp, Artificial Sequence
  Synthetic
ctgaagcaggtcagtttgtgc

SEQ ID NO: 2684 - DNA, 21 bp, Artificial Sequence
  Synthetic
cctgaagcaggtcagtttgtg

SEQ ID NO: 2685 - DNA, 21 bp, Artificial Sequence
  Synthetic
gtcccatcgacaccggcctca

SEQ ID NO: 2686 - DNA, 21 bp, Artificial Sequence
  Synthetic
tctcgatgaggccggtgtcga

SEQ ID NO: 2687 - DNA, 21 bp, Artificial Sequence
  Synthetic
ttctcgatgaggccggtgtcg

SEQ ID NO: 2688 - DNA, 21 bp, Artificial Sequence
  Synthetic
cccatcgacaccggcctcatc

SEQ ID NO: 2689 - DNA, 21 bp, Artificial Sequence
  Synthetic
atcgacaccggcctcatcgag

SEQ ID NO: 2690 - DNA, 21 bp, Artificial Sequence
  Synthetic
ccggcctcatcgagaagaata

SEQ ID NO: 2691 - DNA, 21 bp, Artificial Sequence
  Synthetic
aagagttcgatattcttctcg

SEQ ID NO: 2692 - DNA, 21 bp, Artificial Sequence
  Synthetic
tctatgatgatgacccatctc

SEQ ID NO: 2693 - DNA, 21 bp, Artificial Sequence
  Synthetic
gatgacccatctcttgaaggt

SEQ ID NO: 2694 - DNA, 21 bp, Artificial Sequence
  Synthetic
actattccttaccttcaagag

SEQ ID NO: 2695 - DNA, 21 bp, Artificial Sequence
  Synthetic
cccggactattccttaccttc

SEQ ID NO: 2696 - DNA, 21 bp, Artificial Sequence
  Synthetic
gcaaaaatcttggccccataa

SEQ ID NO: 2697 - DNA, 21 bp, Artificial Sequence
  Synthetic
tcttggccccataaatgaatg

SEQ ID NO: 2698 - DNA, 21 bp, Artificial Sequence
  Synthetic
cagtgatccaccattcattta

SEQ ID NO: 2699 - DNA, 21 bp, Artificial Sequence
  Synthetic
ccagtgatccaccattcattt

SEQ ID NO: 2700 - DNA, 21 bp, Artificial Sequence
  Synthetic
aatggtggatcactggctttg

SEQ ID NO: 2701 - DNA, 21 bp, Artificial Sequence
  Synthetic
atggtggatcactggctttga

SEQ ID NO: 2702 - DNA, 21 bp, Artificial Sequence
  Synthetic
ggatcactggctttgatggag

SEQ ID NO: 2703 - DNA, 21 bp, Artificial Sequence
  Synthetic
cttacaggtgctgaagccgat

SEQ ID NO: 2704 - DNA, 21 bp, Artificial Sequence
  Synthetic
cacttacaggtgctgaagccg

SEQ ID NO: 2705 - DNA, 21 bp, Artificial Sequence
  Synthetic
tgggccacacacttacaggtg

SEQ ID NO: 2706 - DNA, 21 bp, Artificial Sequence
  Synthetic
ctctgttcaccccagcatttg

SEQ ID NO: 2707 - DNA, 21 bp, Artificial Sequence
  Synthetic
cagaatgtattcggcaaatgc

SEQ ID NO: 2708 - DNA, 21 bp, Artificial Sequence
  Synthetic
tcagaatgtattcggcaaatg

SEQ ID NO: 2709 - DNA, 21 bp, Artificial Sequence
  Synthetic
gcatttgccgaatacattctg

SEQ ID NO: 2710 - DNA, 21 bp, Artificial Sequence
  Synthetic
acattctgatggatcccagtc

SEQ ID NO: 2711 - DNA, 21 bp, Artificial Sequence
  Synthetic
atactcgggactgggatccat

SEQ ID NO: 2712 - DNA, 21 bp, Artificial Sequence
  Synthetic
atatgggcgcatactcgggac

SEQ ID NO: 2713 - DNA, 21 bp, Artificial Sequence
  Synthetic
aatatgggcgcatactcggga

SEQ ID NO: 2714 - DNA, 21 bp, Artificial Sequence
  Synthetic
gtcccgagtatgcgcccatat

SEQ ID NO: 2715 - DNA, 21 bp, Artificial Sequence
  Synthetic
gcccaaatatgggcgcatact

SEQ ID NO: 2716 - DNA, 21 bp, Artificial Sequence
  Synthetic
agcccaaatatgggcgcatac

SEQ ID NO: 2717 - DNA, 21 bp, Artificial Sequence
  Synthetic
gcgcccatatttgggctgatg

SEQ ID NO: 2718 - DNA, 21 bp, Artificial Sequence
  Synthetic
cgcccatatttgggctgatgc

SEQ ID NO: 2719 - DNA, 21 bp, Artificial Sequence
  Synthetic
ttctcctgcatcagcccaaat

SEQ ID NO: 2720 - DNA, 21 bp, Artificial Sequence
  Synthetic
cccatatttgggctgatgcag

SEQ ID NO: 2721 - DNA, 21 bp, Artificial Sequence
  Synthetic
atctacatcagcaagattgtg

SEQ ID NO: 2722 - DNA, 21 bp, Artificial Sequence
  Synthetic
tctacatcagcaagattgtgg

SEQ ID NO: 2723 - DNA, 21 bp, Artificial Sequence
  Synthetic
aagattgtggtggagttcctg

SEQ ID NO: 2724 - DNA, 21 bp, Artificial Sequence
  Synthetic
gtcgagtcggaattgctctgc

SEQ ID NO: 2725 - DNA, 21 bp, Artificial Sequence
  Synthetic
ggtcgagtcggaattgctctg

SEQ ID NO: 2726 - DNA, 21 bp, Artificial Sequence
  Synthetic
agagcaattccgactcgacct

SEQ ID NO: 2727 - DNA, 21 bp, Artificial Sequence
  Synthetic
agcaattccgactcgacctat

SEQ ID NO: 2728 - DNA, 21 bp, Artificial Sequence
  Synthetic
tcaggtcctcataggtcgagt

SEQ ID NO: 2729 - DNA, 21 bp, Artificial Sequence
  Synthetic
atcaggtcctcataggtcgag

SEQ ID NO: 2730 - DNA, 21 bp, Artificial Sequence
  Synthetic
tgttgatcaggtcctcatagg

SEQ ID NO: 2731 - DNA, 21 bp, Artificial Sequence
  Synthetic
atgaggacctgatcaacaaga

SEQ ID NO: 2732 - DNA, 21 bp, Artificial Sequence
  Synthetic
cctgatcaacaagatcgaggt

SEQ ID NO: 2733 - DNA, 21 bp, Artificial Sequence
  Synthetic
ccagaaggaggaaccgtggtc

SEQ ID NO: 2734 - DNA, 21 bp, Artificial Sequence
  Synthetic
ctcatcctccttcgcaaaacc

SEQ ID NO: 2735 - DNA, 21 bp, Artificial Sequence
  Synthetic
tcatcctccttcgcaaaacct

SEQ ID NO: 2736 - DNA, 21 bp, Artificial Sequence
  Synthetic
gcaaaaccttggagcagctcc

SEQ ID NO: 2737 - DNA, 21 bp, Artificial Sequence
  Synthetic
aaaaccttggagcagctccaa

SEQ ID NO: 2738 - DNA, 21 bp, Artificial Sequence
  Synthetic
accttggagcagctccaagag

SEQ ID NO: 2739 - DNA, 21 bp, Artificial Sequence
  Synthetic
atgttgcctgtgtccttctct

SEQ ID NO: 2740 - DNA, 21 bp, Artificial Sequence
  Synthetic
gatgttgcctgtgtccttctc

SEQ ID NO: 2741 - DNA, 21 bp, Artificial Sequence
  Synthetic
aggacacaggcaacatcttca

SEQ ID NO: 2742 - DNA, 21 bp, Artificial Sequence
  Synthetic
tcagacagagggaccggctcg

SEQ ID NO: 2743 - DNA, 21 bp, Artificial Sequence
  Synthetic
tcagcgagccggtccctctgt

SEQ ID NO: 2744 - DNA, 21 bp, Artificial Sequence
  Synthetic
caattcggttacctcagacag

SEQ ID NO: 2745 - DNA, 21 bp, Artificial Sequence
  Synthetic
ccaattcggttacctcagaca

SEQ ID NO: 2746 - DNA, 21 bp, Artificial Sequence
  Synthetic
gtccaattcggttacctcaga

SEQ ID NO: 2747 - DNA, 21 bp, Artificial Sequence
  Synthetic
tggtctaggtagtcaggtacc

SEQ ID NO: 2748 - DNA, 21 bp, Artificial Sequence
  Synthetic
gtggtctaggtagtcaggtac

SEQ ID NO: 2749 - DNA, 21 bp, Artificial Sequence
  Synthetic
ctagaccacatcaaaaagccc

SEQ ID NO: 2750 - DNA, 21 bp, Artificial Sequence
  Synthetic
tgcttcatggtgaaaaagtcc

SEQ ID NO: 2751 - DNA, 21 bp, Artificial Sequence
  Synthetic
gcctccaagttctgcttcatg

SEQ ID NO: 2752 - DNA, 21 bp, Artificial Sequence
  Synthetic
aacttggaggcttaccgctac

SEQ ID NO: 2753 - DNA, 21 bp, Artificial Sequence
  Synthetic
aggcagttgctgacgatgagg

SEQ ID NO: 2754 - DNA, 21 bp, Artificial Sequence
  Synthetic
tacttgaggcagttgctgacg

SEQ ID NO: 2755 - DNA, 21 bp, Artificial Sequence
  Synthetic
aactgcctcaagtataacgcc

SEQ ID NO: 2756 - DNA, 21 bp, Artificial Sequence
  Synthetic
atggtgtccttggcgttatac

SEQ ID NO: 2757 - DNA, 21 bp, Artificial Sequence
  Synthetic
cgccaaggacaccatcttcta

SEQ ID NO: 2758 - DNA, 21 bp, Artificial Sequence
  Synthetic
cgaagccgcactgctgcccgg

SEQ ID NO: 2759 - DNA, 21 bp, Artificial Sequence
  Synthetic
gttgtcaaagatgctgatgcg

SEQ ID NO: 2760 - DNA, 21 bp, Artificial Sequence
  Synthetic
cgcatcagcatctttgacaac

SEQ ID NO: 2761 - DNA, 21 bp, Artificial Sequence
  Synthetic
ttgacaacctggatgtggtgt

SEQ ID NO: 2762 - DNA, 21 bp, Artificial Sequence
  Synthetic
gacaacctggatgtggtgtca

SEQ ID NO: 2763 - DNA, 21 bp, Artificial Sequence
  Synthetic
acctggatgtggtgtcagagg

SEQ ID NO: 2764 - DNA, 21 bp, Artificial Sequence
  Synthetic
ctggatgtggtgtcagaggat

SEQ ID NO: 2765 - DNA, 21 bp, Artificial Sequence
  Synthetic
tggatgtggtgtcagaggatg

SEQ ID NO: 2766 - DNA, 21 bp, Artificial Sequence
  Synthetic
tgtcagaggatgaggaagccc

SEQ ID NO: 2767 - DNA, 21 bp, Artificial Sequence
  Synthetic
tcagaggatgaggaagccccc

SEQ ID NO: 2768 - DNA, 21 bp, Artificial Sequence
  Synthetic
cagaggatgaggaagcccccg

SEQ ID NO: 2769 - DNA, 21 bp, Artificial Sequence
  Synthetic
aggaagcccccgaggaggccc

SEQ ID NO: 2770 - DNA, 21 bp, Artificial Sequence
  Synthetic
gaagcccccgaggaggcccct

SEQ ID NO: 2771 - DNA, 21 bp, Artificial Sequence
  Synthetic
gccattctcaggggcctcctc

SEQ ID NO: 2772 - DNA, 21 bp, Artificial Sequence
  Synthetic
tgccattctcaggggcctcct

SEQ ID NO: 2773 - DNA, 21 bp, Artificial Sequence
  Synthetic
ctgccattctcaggggcctcc

SEQ ID NO: 2774 - DNA, 21 bp, Artificial Sequence
  Synthetic
gcccctgagaatggcagcaac

SEQ ID NO: 2775 - DNA, 21 bp, Artificial Sequence
  Synthetic
ctccttgttgctgccattctc

SEQ ID NO: 2776 - DNA, 21 bp, Artificial Sequence
  Synthetic
cccctgagaatggcagcaaca

SEQ ID NO: 2777 - DNA, 21 bp, Artificial Sequence
  Synthetic
tctccttgttgctgccattct

SEQ ID NO: 2778 - DNA, 21 bp, Artificial Sequence
  Synthetic
cctgagaatggcagcaacaag

SEQ ID NO: 2779 - DNA, 21 bp, Artificial Sequence
  Synthetic
atggcagcaacaaggagaaca

SEQ ID NO: 2780 - DNA, 21 bp, Artificial Sequence
  Synthetic
actcccaagtcaggcaaacat

SEQ ID NO: 2781 - DNA, 21 bp, Artificial Sequence
  Synthetic
gttcttatgtttgcctgactt

SEQ ID NO: 2782 - DNA, 21 bp, Artificial Sequence
  Synthetic
tgttcttatgtttgcctgact

SEQ ID NO: 2783 - DNA, 21 bp, Artificial Sequence
  Synthetic
ttgttcttatgtttgcctgac

SEQ ID NO: 2784 - DNA, 21 bp, Artificial Sequence
  Synthetic
aagtcaggcaaacataagaac

SEQ ID NO: 2785 - DNA, 21 bp, Artificial Sequence
  Synthetic
agtcaggcaaacataagaaca

SEQ ID NO: 2786 - DNA, 21 bp, Artificial Sequence
  Synthetic
tcaggcaaacataagaacaag

SEQ ID NO: 2787 - DNA, 21 bp, Artificial Sequence
  Synthetic
cataagaacaaggagaagcgc

SEQ ID NO: 2788 - DNA, 21 bp, Artificial Sequence
  Synthetic
cattgtggtggtggtgatggt

SEQ ID NO: 2789 - DNA, 21 bp, Artificial Sequence
  Synthetic
acattgtggtggtggtgatgg

SEQ ID NO: 2790 - DNA, 21 bp, Artificial Sequence
  Synthetic
caccaccaccacaatgtttct

SEQ ID NO: 2791 - DNA, 21 bp, Artificial Sequence
  Synthetic
gcagcttgggagtggtgctcg

SEQ ID NO: 2792 - DNA, 21 bp, Artificial Sequence
  Synthetic
cgagcaccactcccaagctgc

SEQ ID NO: 2793 - DNA, 21 bp, Artificial Sequence
  Synthetic
atagaccacctctggcagctt

SEQ ID NO: 2794 - DNA, 21 bp, Artificial Sequence
  Synthetic
gatagaccacctctggcagct

SEQ ID NO: 2795 - DNA, 21 bp, Artificial Sequence
  Synthetic
cgatagaccacctctggcagc

SEQ ID NO: 2796 - DNA, 21 bp, Artificial Sequence
  Synthetic
caagctgccagaggtggtcta

SEQ ID NO: 2797 - DNA, 21 bp, Artificial Sequence
  Synthetic
aagctgccagaggtggtctat

SEQ ID NO: 2798 - DNA, 21 bp, Artificial Sequence
  Synthetic
agctgccagaggtggtctatc

SEQ ID NO: 2799 - DNA, 21 bp, Artificial Sequence
  Synthetic
ccagaggtggtctatcgggag

SEQ ID NO: 2800 - DNA, 21 bp, Artificial Sequence
  Synthetic
cagaggtggtctatcgggagc

SEQ ID NO: 2801 - DNA, 21 bp, Artificial Sequence
  Synthetic
gtggtctatcgggagctggaa

SEQ ID NO: 2802 - DNA, 21 bp, Artificial Sequence
  Synthetic
agttggccggggtggggcatc

SEQ ID NO: 2803 - DNA, 21 bp, Artificial Sequence
  Synthetic
aagttggccggggtggggcat

SEQ ID NO: 2804 - DNA, 21 bp, Artificial Sequence
  Synthetic
gtaataggaagttggccgggg

SEQ ID NO: 2805 - DNA, 21 bp, Artificial Sequence
  Synthetic
ggtaataggaagttggccggg

SEQ ID NO: 2806 - DNA, 21 bp, Artificial Sequence
  Synthetic
taccggtaataggaagttggc

SEQ ID NO: 2807 - DNA, 21 bp, Artificial Sequence
  Synthetic
ttaccggtaataggaagttgg

SEQ ID NO: 2808 - DNA, 21 bp, Artificial Sequence
  Synthetic
agaggtggccttaccggtaat

SEQ ID NO: 2809 - DNA, 21 bp, Artificial Sequence
  Synthetic
tagaggtggccttaccggtaa

SEQ ID NO: 2810 - DNA, 21 bp, Artificial Sequence
  Synthetic
cctgtttgtaccgtaggtaca

SEQ ID NO: 2811 - DNA, 21 bp, Artificial Sequence
  Synthetic
tgtttgtaccgtaggtacatc

SEQ ID NO: 2812 - DNA, 21 bp, Artificial Sequence
  Synthetic
gtaggtacatcgagaagtctg

SEQ ID NO: 2813 - DNA, 21 bp, Artificial Sequence
  Synthetic
aggtacatcgagaagtctgca

SEQ ID NO: 2814 - DNA, 21 bp, Artificial Sequence
  Synthetic
ggtacatcgagaagtctgcag

SEQ ID NO: 2815 - DNA, 21 bp, Artificial Sequence
  Synthetic
atcgagaagtctgcagaggag

SEQ ID NO: 2816 - DNA, 21 bp, Artificial Sequence
  Synthetic
agaagtctgcagaggagctgg

SEQ ID NO: 2817 - DNA, 21 bp, Artificial Sequence
  Synthetic
aagtctgcagaggagctggac

SEQ ID NO: 2818 - DNA, 21 bp, Artificial Sequence
  Synthetic
agtctgcagaggagctggacg

SEQ ID NO: 2819 - DNA, 21 bp, Artificial Sequence
  Synthetic
cagaggagctggacgaggaag

SEQ ID NO: 2820 - DNA, 21 bp, Artificial Sequence
  Synthetic
gacgaggaagtagagtatgac

SEQ ID NO: 2821 - DNA, 21 bp, Artificial Sequence
  Synthetic
aggaagtagagtatgacatgg

SEQ ID NO: 2822 - DNA, 21 bp, Artificial Sequence
  Synthetic
gaagtagagtatgacatggac

SEQ ID NO: 2823 - DNA, 21 bp, Artificial Sequence
  Synthetic
aagtagagtatgacatggacg

SEQ ID NO: 2824 - DNA, 21 bp, Artificial Sequence
  Synthetic
gtagagtatgacatggacgag

SEQ ID NO: 2825 - DNA, 21 bp, Artificial Sequence
  Synthetic
gacgaggaggactacatctgg

SEQ ID NO: 2826 - DNA, 21 bp, Artificial Sequence
  Synthetic
gactacatctggctggatatc

SEQ ID NO: 2827 - DNA, 21 bp, Artificial Sequence
  Synthetic
acatctggctggatatcatga

SEQ ID NO: 2828 - DNA, 21 bp, Artificial Sequence
  Synthetic
gctggatatcatgaatgagcg

SEQ ID NO: 2829 - DNA, 21 bp, Artificial Sequence
  Synthetic
ctggatatcatgaatgagcgt

SEQ ID NO: 2830 - DNA, 21 bp, Artificial Sequence
  Synthetic
tcatgaatgagcgtcggaaga

SEQ ID NO: 2831 - DNA, 21 bp, Artificial Sequence
  Synthetic
atgaatgagcgtcggaagaca

SEQ ID NO: 2832 - DNA, 21 bp, Artificial Sequence
  Synthetic
gagggtgtaagtcccatcccg

SEQ ID NO: 2833 - DNA, 21 bp, Artificial Sequence
  Synthetic
agggtgtaagtcccatcccgc

SEQ ID NO: 2834 - DNA, 21 bp, Artificial Sequence
  Synthetic
gtcccatcccgcaggagatct

SEQ ID NO: 2835 - DNA, 21 bp, Artificial Sequence
  Synthetic
actcaaagatctcctgcggga

SEQ ID NO: 2836 - DNA, 21 bp, Artificial Sequence
  Synthetic
tactcaaagatctcctgcggg

SEQ ID NO: 2837 - DNA, 21 bp, Artificial Sequence
  Synthetic
taggtactcaaagatctcctg

SEQ ID NO: 2838 - DNA, 21 bp, Artificial Sequence
  Synthetic
ttaggtactcaaagatctcct

SEQ ID NO: 2839 - DNA, 21 bp, Artificial Sequence
  Synthetic
caggagatctttgagtaccta

SEQ ID NO: 2840 - DNA, 21 bp, Artificial Sequence
  Synthetic
tttgagtacctaatggaccga

SEQ ID NO: 2841 - DNA, 21 bp, Artificial Sequence
  Synthetic
ttgagtacctaatggaccgac

SEQ ID NO: 2842 - DNA, 21 bp, Artificial Sequence
  Synthetic
gagtacctaatggaccgactg

SEQ ID NO: 2843 - DNA, 21 bp, Artificial Sequence
  Synthetic
tacctaatggaccgactggag

SEQ ID NO: 2844 - DNA, 21 bp, Artificial Sequence
  Synthetic
acctaatggaccgactggaga

SEQ ID NO: 2845 - DNA, 21 bp, Artificial Sequence
  Synthetic
atcaaaacggagcggagaggc

SEQ ID NO: 2846 - DNA, 21 bp, Artificial Sequence
  Synthetic
ggagcggagaggctggggcct

SEQ ID NO: 2847 - DNA, 21 bp, Artificial Sequence
  Synthetic
aggctggggcctcaggaccaa

SEQ ID NO: 2848 - DNA, 21 bp, Artificial Sequence
  Synthetic
ggctggggcctcaggaccaaa

SEQ ID NO: 2849 - DNA, 21 bp, Artificial Sequence
  Synthetic
ctcaggaccaaaaggagcatt

SEQ ID NO: 2850 - DNA, 21 bp, Artificial Sequence
  Synthetic
atctccagggtgaatttgtaa

SEQ ID NO: 2851 - DNA, 21 bp, Artificial Sequence
  Synthetic
tattcatttacaaattcaccc

SEQ ID NO: 2852 - DNA, 21 bp, Artificial Sequence
  Synthetic
gtattcatttacaaattcacc

SEQ ID NO: 2853 - DNA, 21 bp, Artificial Sequence
  Synthetic
aatttgtaaatgaatacgtcg

SEQ ID NO: 2854 - DNA, 21 bp, Artificial Sequence
  Synthetic
aatacgtcggtgaattaattg

SEQ ID NO: 2855 - DNA, 21 bp, Artificial Sequence
  Synthetic
acgtcggtgaattaattgatg

SEQ ID NO: 2856 - DNA, 21 bp, Artificial Sequence
  Synthetic
tcggtgaattaattgatgaag

SEQ ID NO: 2857 - DNA, 21 bp, Artificial Sequence
  Synthetic
tgatgaagaagaatgcagatt

SEQ ID NO: 2858 - DNA, 21 bp, Artificial Sequence
  Synthetic
agaatgcagattgcgaatcaa

SEQ ID NO: 2859 - DNA, 21 bp, Artificial Sequence
  Synthetic
gattgcgaatcaagcgagccc

SEQ ID NO: 2860 - DNA, 21 bp, Artificial Sequence
  Synthetic
ttgcgaatcaagcgagcccac

SEQ ID NO: 2861 - DNA, 21 bp, Artificial Sequence
  Synthetic
aaaattagttacactgttctc

SEQ ID NO: 2862 - DNA, 21 bp, Artificial Sequence
  Synthetic
gtataattgatgccggcccaa

SEQ ID NO: 2863 - DNA, 21 bp, Artificial Sequence
  Synthetic
tataattgatgccggcccaaa

SEQ ID NO: 2864 - DNA, 21 bp, Artificial Sequence
  Synthetic
tgaagcgagaataatttcctt

SEQ ID NO: 2865 - DNA, 21 bp, Artificial Sequence
  Synthetic
aaaggaaattattctcgcttc

SEQ ID NO: 2866 - DNA, 21 bp, Artificial Sequence
  Synthetic
tacaactgtggttcatgaagc

SEQ ID NO: 2867 - DNA, 21 bp, Artificial Sequence
  Synthetic
attacaactgtggttcatgaa

SEQ ID NO: 2868 - DNA, 21 bp, Artificial Sequence
  Synthetic
ttgggattacaactgtggttc

SEQ ID NO: 2869 - DNA, 21 bp, Artificial Sequence
  Synthetic
accacagttgtaatcccaact

SEQ ID NO: 2870 - DNA, 21 bp, Artificial Sequence
  Synthetic
tcccaactgtgaaacacaaaa

SEQ ID NO: 2871 - DNA, 21 bp, Artificial Sequence
  Synthetic
tgtgaaacacaaaagtggaca

SEQ ID NO: 2872 - DNA, 21 bp, Artificial Sequence
  Synthetic
aaacacaaaagtggacagtga

SEQ ID NO: 2873 - DNA, 21 bp, Artificial Sequence
  Synthetic
aacacaaaagtggacagtgaa

SEQ ID NO: 2874 - DNA, 21 bp, Artificial Sequence
  Synthetic
gtggacagtgaatggagatgt

SEQ ID NO: 2875 - DNA, 21 bp, Artificial Sequence
  Synthetic
acagtgaatggagatgttcga

SEQ ID NO: 2876 - DNA, 21 bp, Artificial Sequence
  Synthetic
cagtgaatggagatgttcgag

SEQ ID NO: 2877 - DNA, 21 bp, Artificial Sequence
  Synthetic
acagagagcaaatagtcccac

SEQ ID NO: 2878 - DNA, 21 bp, Artificial Sequence
  Synthetic
tttacctgcaggaatatcaca

SEQ ID NO: 2879 - DNA, 21 bp, Artificial Sequence
  Synthetic
aattaaatgttaactccatcc

SEQ ID NO: 2880 - DNA, 21 bp, Artificial Sequence
  Synthetic
ttgctttcctaggtacaggaa

SEQ ID NO: 2881 - DNA, 21 bp, Artificial Sequence
  Synthetic
ctaggtacaggaagagggctg

SEQ ID NO: 2882 - DNA, 21 bp, Artificial Sequence
  Synthetic
atgagtcaaacatccctgcag

SEQ ID NO: 2883 - DNA, 21 bp, Artificial Sequence
  Synthetic
gagtcaaacatccctgcaggt

SEQ ID NO: 2884 - DNA, 21 bp, Artificial Sequence
  Synthetic
caaagaacagttctcacctgc

SEQ ID NO: 2885 - DNA, 21 bp, Artificial Sequence
  Synthetic
tcaaagaacagttctcacctg

SEQ ID NO: 2886 - DNA, 21 bp, Artificial Sequence
  Synthetic
gacagatgattatttcgttgc

SEQ ID NO: 2887 - DNA, 21 bp, Artificial Sequence
  Synthetic
cagatgattatttcgttgcct

SEQ ID NO: 2888 - DNA, 21 bp, Artificial Sequence
  Synthetic
tgagcaggcaactctcaggca

SEQ ID NO: 2889 - DNA, 21 bp, Artificial Sequence
  Synthetic
cctgagagttgcctgctcacc

SEQ ID NO: 2890 - DNA, 21 bp, Artificial Sequence
  Synthetic
gctcaccacggacacagtgat

SEQ ID NO: 2891 - DNA, 21 bp, Artificial Sequence
  Synthetic
cttcgaatcactgtgtccgtg

SEQ ID NO: 2892 - DNA, 21 bp, Artificial Sequence
  Synthetic
acacagtgattcgaagctact

SEQ ID NO: 2893 - DNA, 21 bp, Artificial Sequence
  Synthetic
cacagtgattcgaagctactt

SEQ ID NO: 2894 - DNA, 21 bp, Artificial Sequence
  Synthetic
aatgtatgcccctaagtagct

SEQ ID NO: 2895 - DNA, 21 bp, Artificial Sequence
  Synthetic
agatggaggaggcttccacct

SEQ ID NO: 2896 - DNA, 21 bp, Artificial Sequence
  Synthetic
cagcgccagcagaggagatgg

SEQ ID NO: 2897 - DNA, 21 bp, Artificial Sequence
  Synthetic
acagcgccagcagaggagatg

SEQ ID NO: 2898 - DNA, 21 bp, Artificial Sequence
  Synthetic
gcacagcgccagcagaggaga

SEQ ID NO: 2899 - DNA, 21 bp, Artificial Sequence
  Synthetic
tgcacagcgccagcagaggag

SEQ ID NO: 2900 - DNA, 21 bp, Artificial Sequence
  Synthetic
aaaggtgcacagcgccagcag

SEQ ID NO: 2901 - DNA, 21 bp, Artificial Sequence
  Synthetic
aaaaggtgcacagcgccagca

SEQ ID NO: 2902 - DNA, 21 bp, Artificial Sequence
  Synthetic
taaaaaggtgcacagcgccag

SEQ ID NO: 2903 - DNA, 21 bp, Artificial Sequence
  Synthetic
gcatgctgggcaccgatctct

SEQ ID NO: 2904 - DNA, 21 bp, Artificial Sequence
  Synthetic
catgctgggcaccgatctctt

SEQ ID NO: 2905 - DNA, 21 bp, Artificial Sequence
  Synthetic
cgatctctttggaagccttac

SEQ ID NO: 2906 - DNA, 21 bp, Artificial Sequence
  Synthetic
gatctctttggaagccttacc

SEQ ID NO: 2907 - DNA, 21 bp, Artificial Sequence
  Synthetic
aatctccaggtaaggcttcca

SEQ ID NO: 2908 - DNA, 21 bp, Artificial Sequence
  Synthetic
caaacagggcaggtatacgcc

SEQ ID NO: 2909 - DNA, 21 bp, Artificial Sequence
  Synthetic
gcgtatacctgccctgtttgt

SEQ ID NO: 2910 - DNA, 21 bp, Artificial Sequence
  Synthetic
cgtatacctgccctgtttgtt

SEQ ID NO: 2911 - DNA, 21 bp, Artificial Sequence
  Synthetic
acctgccctgtttgtttggag

SEQ ID NO: 2912 - DNA, 21 bp, Artificial Sequence
  Synthetic
cctgccctgtttgtttggagc

SEQ ID NO: 2913 - DNA, 21 bp, Artificial Sequence
  Synthetic
ccacttccggctccaaacaaa

SEQ ID NO: 2914 - DNA, 21 bp, Artificial Sequence
  Synthetic
gtttgtttggagccggaagtg

SEQ ID NO: 2915 - DNA, 21 bp, Artificial Sequence
  Synthetic
ccaaatctttaaaagcaaagg

SEQ ID NO: 2916 - DNA, 21 bp, Artificial Sequence
  Synthetic
aatctttaaaagcaaaggctg

SEQ ID NO: 2917 - DNA, 21 bp, Artificial Sequence
  Synthetic
ttaaaagcaaaggctgaagag

SEQ ID NO: 2918 - DNA, 21 bp, Artificial Sequence
  Synthetic
aaaagcaaaggctgaagagca

SEQ ID NO: 2919 - DNA, 21 bp, Artificial Sequence
  Synthetic
gaagagcagagagcccacgtg

SEQ ID NO: 2920 - DNA, 21 bp, Artificial Sequence
  Synthetic
aagagcagagagcccacgtgc

SEQ ID NO: 2921 - DNA, 21 bp, Artificial Sequence
  Synthetic
ggaagcaaagaactcctgcac

SEQ ID NO: 2922 - DNA, 21 bp, Artificial Sequence
  Synthetic
gcaggagttctttgcttcctc

SEQ ID NO: 2923 - DNA, 21 bp, Artificial Sequence
  Synthetic
aaaaagtctctggaggaagca

SEQ ID NO: 2924 - DNA, 21 bp, Artificial Sequence
  Synthetic
gagaagagaaaaagtctctgg

SEQ ID NO: 2925 - DNA, 21 bp, Artificial Sequence
  Synthetic
agagaagagaaaaagtctctg

SEQ ID NO: 2926 - DNA, 21 bp, Artificial Sequence
  Synthetic
gcagagaagagaaaaagtctc

SEQ ID NO: 2927 - DNA, 21 bp, Artificial Sequence
  Synthetic
tgcagagaagagaaaaagtct

SEQ ID NO: 2928 - DNA, 21 bp, Artificial Sequence
  Synthetic
gcaaacagaggctgcagagaa

SEQ ID NO: 2929 - DNA, 21 bp, Artificial Sequence
  Synthetic
ccgcaaacagaggctgcagag

SEQ ID NO: 2930 - DNA, 21 bp, Artificial Sequence
  Synthetic
tcttctctgcagcctctgttt

SEQ ID NO: 2931 - DNA, 21 bp, Artificial Sequence
  Synthetic
cttctctgcagcctctgtttg

SEQ ID NO: 2932 - DNA, 21 bp, Artificial Sequence
  Synthetic
cctccgcaaacagaggctgca

SEQ ID NO: 2933 - DNA, 21 bp, Artificial Sequence
  Synthetic
agcctccgcaaacagaggctg

SEQ ID NO: 2934 - DNA, 21 bp, Artificial Sequence
  Synthetic
gctgtcaacagcctccgcaaa

SEQ ID NO: 2935 - DNA, 21 bp, Artificial Sequence
  Synthetic
cttcagctacagtgccctgct

SEQ ID NO: 2936 - DNA, 21 bp, Artificial Sequence
  Synthetic
gcccacagcagggcactgtag

SEQ ID NO: 2937 - DNA, 21 bp, Artificial Sequence
  Synthetic
gacggtgcaccaagcccacag

SEQ ID NO: 2938 - DNA, 21 bp, Artificial Sequence
  Synthetic
ggcttggtgcaccgtcaacac

SEQ ID NO: 2939 - DNA, 21 bp, Artificial Sequence
  Synthetic
gtcaacaccagagccgtgtac

SEQ ID NO: 2940 - DNA, 21 bp, Artificial Sequence
  Synthetic
cgtgtacctgaggcccaggca

SEQ ID NO: 2941 - DNA, 21 bp, Artificial Sequence
  Synthetic
gtgtacctgaggcccaggcag

SEQ ID NO: 2942 - DNA, 21 bp, Artificial Sequence
  Synthetic
tgtacctgaggcccaggcagc

SEQ ID NO: 2943 - DNA, 21 bp, Artificial Sequence
  Synthetic
gcagaaaggcattcccgctgc

SEQ ID NO: 2944 - DNA, 21 bp, Artificial Sequence
  Synthetic
ggcagcgggaatgcctttctg

SEQ ID NO: 2945 - DNA, 21 bp, Artificial Sequence
  Synthetic
cgggaatgcctttctgcagag

SEQ ID NO: 2946 - DNA, 21 bp, Artificial Sequence
  Synthetic
gtgcacaggtgtccggctctg

SEQ ID NO: 2947 - DNA, 21 bp, Artificial Sequence
  Synthetic
acctgtgcactcgctccgtac

SEQ ID NO: 2948 - DNA, 21 bp, Artificial Sequence
  Synthetic
ttcagcaggtccaggtacgga

SEQ ID NO: 2949 - DNA, 21 bp, Artificial Sequence
  Synthetic
ctcgctccgtacctggacctg

SEQ ID NO: 2950 - DNA, 21 bp, Artificial Sequence
  Synthetic
atgattcagcaggtccaggta

SEQ ID NO: 2951 - DNA, 21 bp, Artificial Sequence
  Synthetic
tatgattcagcaggtccaggt

SEQ ID NO: 2952 - DNA, 21 bp, Artificial Sequence
  Synthetic
aatcatagcccacatgtccag

SEQ ID NO: 2953 - DNA, 21 bp, Artificial Sequence
  Synthetic
tcatagcccacatgtccaggt

SEQ ID NO: 2954 - DNA, 21 bp, Artificial Sequence
  Synthetic
gtcagcttctcacctggacat

SEQ ID NO: 2955 - DNA, 21 bp, Artificial Sequence
  Synthetic
tctaggtaaaagcagcgttta

SEQ ID NO: 2956 - DNA, 21 bp, Artificial Sequence
  Synthetic
aggtaaaagcagcgtttaatg

SEQ ID NO: 2957 - DNA, 21 bp, Artificial Sequence
  Synthetic
ttaatgaagaaactcattctt

SEQ ID NO: 2958 - DNA, 21 bp, Artificial Sequence
  Synthetic
agaaactcattcttacgaaat

SEQ ID NO: 2959 - DNA, 21 bp, Artificial Sequence
  Synthetic
agtcgttctaatttcgtaaga

SEQ ID NO: 2960 - DNA, 21 bp, Artificial Sequence
  Synthetic
gtgaagtcgttctaatttcgt

SEQ ID NO: 2961 - DNA, 21 bp, Artificial Sequence
  Synthetic
cgaaattagaacgacttcacg

SEQ ID NO: 2962 - DNA, 21 bp, Artificial Sequence
  Synthetic
gaaattagaacgacttcacgt

SEQ ID NO: 2963 - DNA, 21 bp, Artificial Sequence
  Synthetic
aattagaacgacttcacgttg

SEQ ID NO: 2964 - DNA, 21 bp, Artificial Sequence
  Synthetic
cgacttcacgttggagaaagc

SEQ ID NO: 2965 - DNA, 21 bp, Artificial Sequence
  Synthetic
cttcacgttggagaaagcatg

SEQ ID NO: 2966 - DNA, 21 bp, Artificial Sequence
  Synthetic
cctcttcatgctttctccaac

SEQ ID NO: 2967 - DNA, 21 bp, Artificial Sequence
  Synthetic
ttatcgtgagggccgtaacag

SEQ ID NO: 2968 - DNA, 21 bp, Artificial Sequence
  Synthetic
tattaggtcccacagctacct

SEQ ID NO: 2969 - DNA, 21 bp, Artificial Sequence
  Synthetic
atggagttcgaattacacacc

SEQ ID NO: 2970 - DNA, 21 bp, Artificial Sequence
  Synthetic
gttcgaattacacaccaagag

SEQ ID NO: 2971 - DNA, 21 bp, Artificial Sequence
  Synthetic
actcacctcttggtgtgtaat

SEQ ID NO: 2972 - DNA, 21 bp, Artificial Sequence
  Synthetic
tctgcaggttgacagcaggga

SEQ ID NO: 2973 - DNA, 21 bp, Artificial Sequence
  Synthetic
acagcagggactgggccctta

SEQ ID NO: 2974 - DNA, 21 bp, Artificial Sequence
  Synthetic
cagcagggactgggcccttaa

SEQ ID NO: 2975 - DNA, 21 bp, Artificial Sequence
  Synthetic
agcagggactgggcccttaat

SEQ ID NO: 2976 - DNA, 21 bp, Artificial Sequence
  Synthetic
aagggagagggtgttcccatt

SEQ ID NO: 2977 - DNA, 21 bp, Artificial Sequence
  Synthetic
atgggaacaccctctcccttg

SEQ ID NO: 2978 - DNA, 21 bp, Artificial Sequence
  Synthetic
ggaacaccctctcccttgatg

SEQ ID NO: 2979 - DNA, 21 bp, Artificial Sequence
  Synthetic
gaccgtttcttcatcaaggga

SEQ ID NO: 2980 - DNA, 21 bp, Artificial Sequence
  Synthetic
atgaccgtttcttcatcaagg

SEQ ID NO: 2981 - DNA, 21 bp, Artificial Sequence
  Synthetic
caatgaccgtttcttcatcaa

SEQ ID NO: 2982 - DNA, 21 bp, Artificial Sequence
  Synthetic
tcaatgaccgtttcttcatca

SEQ ID NO: 2983 - DNA, 21 bp, Artificial Sequence
  Synthetic
atcaatgaccgtttcttcatc

SEQ ID NO: 2984 - DNA, 21 bp, Artificial Sequence
  Synthetic
aagaaacggtcattgatgtgc

SEQ ID NO: 2985 - DNA, 21 bp, Artificial Sequence
  Synthetic
cagtacttggatacgtggtta

SEQ ID NO: 2986 - DNA, 21 bp, Artificial Sequence
  Synthetic
gtatccaagtactgtgcctcc

SEQ ID NO: 2987 - DNA, 21 bp, Artificial Sequence
  Synthetic
tatccaagtactgtgcctcct

SEQ ID NO: 2988 - DNA, 21 bp, Artificial Sequence
  Synthetic
tgtcccaaggaggcacagtac

SEQ ID NO: 2989 - DNA, 21 bp, Artificial Sequence
  Synthetic
agtgatttgccttgtgtccca

SEQ ID NO: 2990 - DNA, 21 bp, Artificial Sequence
  Synthetic
gagtgatttgccttgtgtccc

SEQ ID NO: 2991 - DNA, 21 bp, Artificial Sequence
  Synthetic
cgtagatgcagtttggagtga

SEQ ID NO: 2992 - DNA, 21 bp, Artificial Sequence
  Synthetic
tcgtagatgcagtttggagtg

SEQ ID NO: 2993 - DNA, 21 bp, Artificial Sequence
  Synthetic
atatcgtagatgcagtttgga

SEQ ID NO: 2994 - DNA, 21 bp, Artificial Sequence
  Synthetic
ttacatatcgtagatgcagtt

SEQ ID NO: 2995 - DNA, 21 bp, Artificial Sequence
  Synthetic
cttacatatcgtagatgcagt

SEQ ID NO: 2996 - DNA, 21 bp, Artificial Sequence
  Synthetic
ttaggtttgtccacccccgtt

SEQ ID NO: 2997 - DNA, 21 bp, Artificial Sequence
  Synthetic
tttgatgggcccaaaacgggg

SEQ ID NO: 2998 - DNA, 21 bp, Artificial Sequence
  Synthetic
tgcatttgatgggcccaaaac

SEQ ID NO: 2999 - DNA, 21 bp, Artificial Sequence
  Synthetic
atgcatttgatgggcccaaaa

SEQ ID NO: 3000 - DNA, 21 bp, Artificial Sequence
  Synthetic
gatgcatttgatgggcccaaa

SEQ ID NO: 3001 - DNA, 21 bp, Artificial Sequence
  Synthetic
ctcagggtgcggatgcatttg

SEQ ID NO: 3002 - DNA, 21 bp, Artificial Sequence
  Synthetic
cccatcaaatgcatccgcacc

SEQ ID NO: 3003 - DNA, 21 bp, Artificial Sequence
  Synthetic
catcaaatgcatccgcaccct

SEQ ID NO: 3004 - DNA, 21 bp, Artificial Sequence
  Synthetic
tgcatccgcaccctgagagca

SEQ ID NO: 3005 - DNA, 21 bp, Artificial Sequence
  Synthetic
gcatccgcaccctgagagcag

SEQ ID NO: 3006 - DNA, 21 bp, Artificial Sequence
  Synthetic
ggcctccactgctctcagggt

SEQ ID NO: 3007 - DNA, 21 bp, Artificial Sequence
  Synthetic
ttcatcggcctccactgctct

SEQ ID NO: 3008 - DNA, 21 bp, Artificial Sequence
  Synthetic
ccctgagagcagtggaggccg

SEQ ID NO: 3009 - DNA, 21 bp, Artificial Sequence
  Synthetic
tgagagcagtggaggccgatg

SEQ ID NO: 3010 - DNA, 21 bp, Artificial Sequence
  Synthetic
tggtcatagccataggcaacg

SEQ ID NO: 3011 - DNA, 21 bp, Artificial Sequence
  Synthetic
tatctacaaaaagttgtccta

SEQ ID NO: 3012 - DNA, 21 bp, Artificial Sequence
  Synthetic
aaaagttgtcctaaaggattt

SEQ ID NO: 3013 - DNA, 21 bp, Artificial Sequence
  Synthetic
aaagttgtcctaaaggattta

SEQ ID NO: 3014 - DNA, 21 bp, Artificial Sequence
  Synthetic
actatgcttccataaatcctt

SEQ ID NO: 3015 - DNA, 21 bp, Artificial Sequence
  Synthetic
ccacaggacgttgaaagggcc

SEQ ID NO: 3016 - DNA, 21 bp, Artificial Sequence
  Synthetic
tcatggccctttcaacgtcct

SEQ ID NO: 3017 - DNA, 21 bp, Artificial Sequence
  Synthetic
acagcatccacaggacgttga

SEQ ID NO: 3018 - DNA, 21 bp, Artificial Sequence
  Synthetic
tttcaacgtcctgtggatgct

SEQ ID NO: 3019 - DNA, 21 bp, Artificial Sequence
  Synthetic
tttcacagcatccacaggacg

SEQ ID NO: 3020 - DNA, 21 bp, Artificial Sequence
  Synthetic
actgtagtttcacagcatcca

SEQ ID NO: 3021 - DNA, 21 bp, Artificial Sequence
  Synthetic
tataccattataaaaaaccca

SEQ ID NO: 3022 - DNA, 21 bp, Artificial Sequence
  Synthetic
tcttaattgtatttaaatcca

SEQ ID NO: 3023 - DNA, 21 bp, Artificial Sequence
  Synthetic
ccaatggatttaaatacaatt

SEQ ID NO: 3024 - DNA, 21 bp, Artificial Sequence
  Synthetic
ttaaatacaattaagaagcgc

SEQ ID NO: 3025 - DNA, 21 bp, Artificial Sequence
  Synthetic
taaatacaattaagaagcgct

SEQ ID NO: 3026 - DNA, 21 bp, Artificial Sequence
  Synthetic
aatacaattaagaagcgcttg

SEQ ID NO: 3027 - DNA, 21 bp, Artificial Sequence
  Synthetic
cgcttggagaataaatattat

SEQ ID NO: 3028 - DNA, 21 bp, Artificial Sequence
  Synthetic
ataaatattatgcgaaggctt

SEQ ID NO: 3029 - DNA, 21 bp, Artificial Sequence
  Synthetic
atgcgaaggcttcagaatgta

SEQ ID NO: 3030 - DNA, 21 bp, Artificial Sequence
  Synthetic
tattgaagtcttctatacatt

SEQ ID NO: 3031 - DNA, 21 bp, Artificial Sequence
  Synthetic
taacaatttgagaacattgta

SEQ ID NO: 3032 - DNA, 21 bp, Artificial Sequence
  Synthetic
ttgttatataaataacaattt

SEQ ID NO: 3033 - DNA, 21 bp, Artificial Sequence
  Synthetic
ccttgttatataaataacaat

SEQ ID NO: 3034 - DNA, 21 bp, Artificial Sequence
  Synthetic
cttctctagagcttgtgccat

SEQ ID NO: 3035 - DNA, 21 bp, Artificial Sequence
  Synthetic
ctgaacaattaaggcactgta

SEQ ID NO: 3036 - DNA, 21 bp, Artificial Sequence
  Synthetic
ggcactgtagtgagattctta

SEQ ID NO: 3037 - DNA, 21 bp, Artificial Sequence
  Synthetic
attcttaaagaaatgcttgca

SEQ ID NO: 3038 - DNA, 21 bp, Artificial Sequence
  Synthetic
tttctttgcaagcatttcttt

SEQ ID NO: 3039 - DNA, 21 bp, Artificial Sequence
  Synthetic
gattataaaagggccatgcat

SEQ ID NO: 3040 - DNA, 21 bp, Artificial Sequence
  Synthetic
ttaacgtcaacaggattataa

SEQ ID NO: 3041 - DNA, 21 bp, Artificial Sequence
  Synthetic
aatcctgttgacgttaatgct

SEQ ID NO: 3042 - DNA, 21 bp, Artificial Sequence
  Synthetic
atcctgttgacgttaatgctt

SEQ ID NO: 3043 - DNA, 21 bp, Artificial Sequence
  Synthetic
gtcccaaagcattaacgtcaa

SEQ ID NO: 3044 - DNA, 21 bp, Artificial Sequence
  Synthetic
ttgacaacgtcatagtagtta

SEQ ID NO: 3045 - DNA, 21 bp, Artificial Sequence
  Synthetic
tttgacaacgtcatagtagtt

SEQ ID NO: 3046 - DNA, 21 bp, Artificial Sequence
  Synthetic
tatgacgttgtcaaaaatccg

SEQ ID NO: 3047 - DNA, 21 bp, Artificial Sequence
  Synthetic
ttgtcaaaaatccgatggatc

SEQ ID NO: 3048 - DNA, 21 bp, Artificial Sequence
  Synthetic
tgtcaaaaatccgatggatct

SEQ ID NO: 3049 - DNA, 21 bp, Artificial Sequence
  Synthetic
ccttaatagttccaagatcca

SEQ ID NO: 3050 - DNA, 21 bp, Artificial Sequence
  Synthetic
tttaggagaaaatggataacc

SEQ ID NO: 3051 - DNA, 21 bp, Artificial Sequence
  Synthetic
aaaatggataaccaagaatat

SEQ ID NO: 3052 - DNA, 21 bp, Artificial Sequence
  Synthetic
gcagatgttagattaatgttc

SEQ ID NO: 3053 - DNA, 21 bp, Artificial Sequence
  Synthetic
ggattgtacttgtagcaattc

SEQ ID NO: 3054 - DNA, 21 bp, Artificial Sequence
  Synthetic
acaagtacaatcctccagatc

SEQ ID NO: 3055 - DNA, 21 bp, Artificial Sequence
  Synthetic
ttgtcacaacttcgtgatctg

SEQ ID NO: 3056 - DNA, 21 bp, Artificial Sequence
  Synthetic
cattgtcacaacttcgtgatc

SEQ ID NO: 3057 - DNA, 21 bp, Artificial Sequence
  Synthetic
ccattgtcacaacttcgtgat

SEQ ID NO: 3058 - DNA, 21 bp, Artificial Sequence
  Synthetic
tcacgaagttgtgacaatggc

SEQ ID NO: 3059 - DNA, 21 bp, Artificial Sequence
  Synthetic
tggtgattgggtgtggcaact

SEQ ID NO: 3060 - DNA, 21 bp, Artificial Sequence
  Synthetic
attgggtgtggcaactcagaa

SEQ ID NO: 3061 - DNA, 21 bp, Artificial Sequence
  Synthetic
ggtgtggcaactcagaactga

SEQ ID NO: 3062 - DNA, 21 bp, Artificial Sequence
  Synthetic
catacagttgctcactcagtt

SEQ ID NO: 3063 - DNA, 21 bp, Artificial Sequence
  Synthetic
ctgagtgagcaactgtatgat

SEQ ID NO: 3064 - DNA, 21 bp, Artificial Sequence
  Synthetic
gcaactgtatgatgtgggcta

SEQ ID NO: 3065 - DNA, 21 bp, Artificial Sequence
  Synthetic
caactgtatgatgtgggctat

SEQ ID NO: 3066 - DNA, 21 bp, Artificial Sequence
  Synthetic
gatgtgggctatcgggatata

SEQ ID NO: 3067 - DNA, 21 bp, Artificial Sequence
  Synthetic
atatagtgaacatcgacatca

SEQ ID NO: 3068 - DNA, 21 bp, Artificial Sequence
  Synthetic
agtgaggttgtcatcaagcaa

SEQ ID NO: 3069 - DNA, 21 bp, Artificial Sequence
  Synthetic
gaggttgtcatcaagcaaatg

SEQ ID NO: 3070 - DNA, 21 bp, Artificial Sequence
  Synthetic
aggttgtcatcaagcaaatga

SEQ ID NO: 3071 - DNA, 21 bp, Artificial Sequence
  Synthetic
aatgccacccgacggccccag

SEQ ID NO: 3072 - DNA, 21 bp, Artificial Sequence
  Synthetic
caagaagctcatctggggccg

SEQ ID NO: 3073 - DNA, 21 bp, Artificial Sequence
  Synthetic
cgacggccccagatgagcttc

SEQ ID NO: 3074 - DNA, 21 bp, Artificial Sequence
  Synthetic
tccatcttcaagaagctcatc

SEQ ID NO: 3075 - DNA, 21 bp, Artificial Sequence
  Synthetic
ccccagatgagcttcttgaag

SEQ ID NO: 3076 - DNA, 21 bp, Artificial Sequence
  Synthetic
gtccatcttcaagaagctcat

SEQ ID NO: 3077 - DNA, 21 bp, Artificial Sequence
  Synthetic
atctgcgtcatgtccatcttc

SEQ ID NO: 3078 - DNA, 21 bp, Artificial Sequence
  Synthetic
ttgaagatggacatgacgcag

SEQ ID NO: 3079 - DNA, 21 bp, Artificial Sequence
  Synthetic
tgaagatggacatgacgcaga

SEQ ID NO: 3080 - DNA, 21 bp, Artificial Sequence
  Synthetic
caccacctggaacgaggcatc

SEQ ID NO: 3081 - DNA, 21 bp, Artificial Sequence
  Synthetic
acaccacctggaacgaggcat

SEQ ID NO: 3082 - DNA, 21 bp, Artificial Sequence
  Synthetic
gatgcctcgttccaggtggtg

SEQ ID NO: 3083 - DNA, 21 bp, Artificial Sequence
  Synthetic
ccttgtccaacaccacctgga

SEQ ID NO: 3084 - DNA, 21 bp, Artificial Sequence
  Synthetic
tcgttccaggtggtgttggac

SEQ ID NO: 3085 - DNA, 21 bp, Artificial Sequence
  Synthetic
gtgcccttgtccaacaccacc

SEQ ID NO: 3086 - DNA, 21 bp, Artificial Sequence
  Synthetic
ggtgcccttgtccaacaccac

SEQ ID NO: 3087 - DNA, 21 bp, Artificial Sequence
  Synthetic
gtggtgttggacaagggcacc

SEQ ID NO: 3088 - DNA, 21 bp, Artificial Sequence
  Synthetic
ctcatctgtcaggacagcatc

SEQ ID NO: 3089 - DNA, 21 bp, Artificial Sequence
  Synthetic
ccctggatgctgtcctgacag

SEQ ID NO: 3090 - DNA, 21 bp, Artificial Sequence
  Synthetic
ctggatgctgtcctgacagat

SEQ ID NO: 3091 - DNA, 21 bp, Artificial Sequence
  Synthetic
tggatgctgtcctgacagatg

SEQ ID NO: 3092 - DNA, 21 bp, Artificial Sequence
  Synthetic
atgctgtcctgacagatgagg

SEQ ID NO: 3093 - DNA, 21 bp, Artificial Sequence
  Synthetic
gctgtcctgacagatgaggaa

SEQ ID NO: 3094 - DNA, 21 bp, Artificial Sequence
  Synthetic
ggtcttctcttcctcatctgt

SEQ ID NO: 3095 - DNA, 21 bp, Artificial Sequence
  Synthetic
gaagagaagaccttacaacag

SEQ ID NO: 3096 - DNA, 21 bp, Artificial Sequence
  Synthetic
gaagaccttacaacaggtgga

SEQ ID NO: 3097 - DNA, 21 bp, Artificial Sequence
  Synthetic
aacaggtggacaggatgctgg

SEQ ID NO: 3098 - DNA, 21 bp, Artificial Sequence
  Synthetic
gaggttggccgtgtcctgcag

SEQ ID NO: 3099 - DNA, 21 bp, Artificial Sequence
  Synthetic
gagatagcgaccgcccacctg

SEQ ID NO: 3100 - DNA, 21 bp, Artificial Sequence
  Synthetic
aacggcaggagctcggcggcg

SEQ ID NO: 3101 - DNA, 21 bp, Artificial Sequence
  Synthetic
gcggcatcgcgtccggcgccg

SEQ ID NO: 3102 - DNA, 21 bp, Artificial Sequence
  Synthetic
gccggacgcgatgccgcaagt

SEQ ID NO: 3103 - DNA, 21 bp, Artificial Sequence
  Synthetic
ccgcaagtgcgaggcctgcct

SEQ ID NO: 3104 - DNA, 21 bp, Artificial Sequence
  Synthetic
agtgcgaggcctgcctgcgga

SEQ ID NO: 3105 - DNA, 21 bp, Artificial Sequence
  Synthetic
aggcctgcctgcggaccgagt

SEQ ID NO: 3106 - DNA, 21 bp, Artificial Sequence
  Synthetic
ggcctgcctgcggaccgagtg

SEQ ID NO: 3107 - DNA, 21 bp, Artificial Sequence
  Synthetic
cctgcctgcggaccgagtgcg

SEQ ID NO: 3108 - DNA, 21 bp, Artificial Sequence
  Synthetic
tgcggagagtgccacttctgc

SEQ ID NO: 3109 - DNA, 21 bp, Artificial Sequence
  Synthetic
gagtgccacttctgcaaggac

SEQ ID NO: 3110 - DNA, 21 bp, Artificial Sequence
  Synthetic
tgccacttctgcaaggacatg

SEQ ID NO: 3111 - DNA, 21 bp, Artificial Sequence
  Synthetic
ccgaacttcttcatgtccttg

SEQ ID NO: 3112 - DNA, 21 bp, Artificial Sequence
  Synthetic
tctgcaaggacatgaagaagt

SEQ ID NO: 3113 - DNA, 21 bp, Artificial Sequence
  Synthetic
ctgcaaggacatgaagaagtt

SEQ ID NO: 3114 - DNA, 21 bp, Artificial Sequence
  Synthetic
tgcaaggacatgaagaagttc

SEQ ID NO: 3115 - DNA, 21 bp, Artificial Sequence
  Synthetic
acatgaagaagttcgggggcc

SEQ ID NO: 3116 - DNA, 21 bp, Artificial Sequence
  Synthetic
aagttcgggggccccgggcgc

SEQ ID NO: 3117 - DNA, 21 bp, Artificial Sequence
  Synthetic
tgcttcatgcgcccggggccc

SEQ ID NO: 3118 - DNA, 21 bp, Artificial Sequence
  Synthetic
gggggccccgggcgcatgaag

SEQ ID NO: 3119 - DNA, 21 bp, Artificial Sequence
  Synthetic
tgcagctctgcttcatgcgcc

SEQ ID NO: 3120 - DNA, 21 bp, Artificial Sequence
  Synthetic
atgcagctctgcttcatgcgc

SEQ ID NO: 3121 - DNA, 21 bp, Artificial Sequence
  Synthetic
ttcaagacacagaacaagggc

SEQ ID NO: 3122 - DNA, 21 bp, Artificial Sequence
  Synthetic
aagggctggggtatccgctgc

SEQ ID NO: 3123 - DNA, 21 bp, Artificial Sequence
  Synthetic
tttggcaatgtcatccaagca

SEQ ID NO: 3124 - DNA, 21 bp, Artificial Sequence
  Synthetic
aacctgcataaatacaaacaa

SEQ ID NO: 3125 - DNA, 21 bp, Artificial Sequence
  Synthetic
cttgtctgcaaagtcatctgt

SEQ ID NO: 3126 - DNA, 21 bp, Artificial Sequence
  Synthetic
ctgacagatgactttgcagac

SEQ ID NO: 3127 - DNA, 21 bp, Artificial Sequence
  Synthetic
tgacagatgactttgcagaca

SEQ ID NO: 3128 - DNA, 21 bp, Artificial Sequence
  Synthetic
acagatgactttgcagacaag

SEQ ID NO: 3129 - DNA, 21 bp, Artificial Sequence
  Synthetic
gactttgcagacaaggagggt

SEQ ID NO: 3130 - DNA, 21 bp, Artificial Sequence
  Synthetic
actttgcagacaaggagggtc

SEQ ID NO: 3131 - DNA, 21 bp, Artificial Sequence
  Synthetic
gcagacaaggagggtctggaa

SEQ ID NO: 3132 - DNA, 21 bp, Artificial Sequence
  Synthetic
aggagggtctggaaatgggtg

SEQ ID NO: 3133 - DNA, 21 bp, Artificial Sequence
  Synthetic
ggtgatgagtactttgcaaat

SEQ ID NO: 3134 - DNA, 21 bp, Artificial Sequence
  Synthetic
actttgcaaatctggaccata

SEQ ID NO: 3135 - DNA, 21 bp, Artificial Sequence
  Synthetic
tttgcaaatctggaccatatc

SEQ ID NO: 3136 - DNA, 21 bp, Artificial Sequence
  Synthetic
aatctggaccatatcgagagc

SEQ ID NO: 3137 - DNA, 21 bp, Artificial Sequence
  Synthetic
atctggaccatatcgagagcg

SEQ ID NO: 3138 - DNA, 21 bp, Artificial Sequence
  Synthetic
ctggaccatatcgagagcgtg

SEQ ID NO: 3139 - DNA, 21 bp, Artificial Sequence
  Synthetic
tcgagagcgtggagaacttca

SEQ ID NO: 3140 - DNA, 21 bp, Artificial Sequence
  Synthetic
agagcgtggagaacttcaaag

SEQ ID NO: 3141 - DNA, 21 bp, Artificial Sequence
  Synthetic
tggagaacttcaaagaaggat

SEQ ID NO: 3142 - DNA, 21 bp, Artificial Sequence
  Synthetic
gagaacttcaaagaaggatat

SEQ ID NO: 3143 - DNA, 21 bp, Artificial Sequence
  Synthetic
gcatcactctcatatccttct

SEQ ID NO: 3144 - DNA, 21 bp, Artificial Sequence
  Synthetic
accactgctgtcagaggaaca

SEQ ID NO: 3145 - DNA, 21 bp, Artificial Sequence
  Synthetic
caccactgctgtcagaggaac

SEQ ID NO: 3146 - DNA, 21 bp, Artificial Sequence
  Synthetic
acaccactgctgtcagaggaa

SEQ ID NO: 3147 - DNA, 21 bp, Artificial Sequence
  Synthetic
agtctacaccactgctgtcag

SEQ ID NO: 3148 - DNA, 21 bp, Artificial Sequence
  Synthetic
aagtctacaccactgctgtca

SEQ ID NO: 3149 - DNA, 21 bp, Artificial Sequence
  Synthetic
tcaagtctacaccactgctgt

SEQ ID NO: 3150 - DNA, 21 bp, Artificial Sequence
  Synthetic
tctgacagcagtggtgtagac

SEQ ID NO: 3151 - DNA, 21 bp, Artificial Sequence
  Synthetic
gacagcagtggtgtagacttg

SEQ ID NO: 3152 - DNA, 21 bp, Artificial Sequence
  Synthetic
agtggtgtagacttgaaggac

SEQ ID NO: 3153 - DNA, 21 bp, Artificial Sequence
  Synthetic
gtggtgtagacttgaaggacc

SEQ ID NO: 3154 - DNA, 21 bp, Artificial Sequence
  Synthetic
aggaagatggcaacagcggta

SEQ ID NO: 3155 - DNA, 21 bp, Artificial Sequence
  Synthetic
gaagatggcaacagcggtaca

SEQ ID NO: 3156 - DNA, 21 bp, Artificial Sequence
  Synthetic
gcaacagcggtacagaggacc

SEQ ID NO: 3157 - DNA, 21 bp, Artificial Sequence
  Synthetic
acagcggtacagaggaccctg

SEQ ID NO: 3158 - DNA, 21 bp, Artificial Sequence
  Synthetic
agctatcatcattggactctt

SEQ ID NO: 3159 - DNA, 21 bp, Artificial Sequence
  Synthetic
ttatcatctgagctatcatca

SEQ ID NO: 3160 - DNA, 21 bp, Artificial Sequence
  Synthetic
agctcagatgataacttctgt

SEQ ID NO: 3161 - DNA, 21 bp, Artificial Sequence
  Synthetic
catccttacagaagttatcat

SEQ ID NO: 3162 - DNA, 21 bp, Artificial Sequence
  Synthetic
cagatgataacttctgtaagg

SEQ ID NO: 3163 - DNA, 21 bp, Artificial Sequence
  Synthetic
gatgataacttctgtaaggat

SEQ ID NO: 3164 - DNA, 21 bp, Artificial Sequence
  Synthetic
gtgctgaagtcctcatcctta

SEQ ID NO: 3165 - DNA, 21 bp, Artificial Sequence
  Synthetic
cttcagcaccagttcagtgtg

SEQ ID NO: 3166 - DNA, 21 bp, Artificial Sequence
  Synthetic
ctccgccacactgaactggtg

SEQ ID NO: 3167 - DNA, 21 bp, Artificial Sequence
  Synthetic
ttcagcaccagttcagtgtgg

SEQ ID NO: 3168 - DNA, 21 bp, Artificial Sequence
  Synthetic
gggtagcatagctccgccaca

SEQ ID NO: 3169 - DNA, 21 bp, Artificial Sequence
  Synthetic
agtgtggcggagctatgctac

SEQ ID NO: 3170 - DNA, 21 bp, Artificial Sequence
  Synthetic
gtgtggcggagctatgctacc

SEQ ID NO: 3171 - DNA, 21 bp, Artificial Sequence
  Synthetic
ctatgctacccggaggcagac

SEQ ID NO: 3172 - DNA, 21 bp, Artificial Sequence
  Synthetic
tatgctacccggaggcagacc

SEQ ID NO: 3173 - DNA, 21 bp, Artificial Sequence
  Synthetic
acccggaggcagacccggggc

SEQ ID NO: 3174 - DNA, 21 bp, Artificial Sequence
  Synthetic
tttctggccccgggtctgcct

SEQ ID NO: 3175 - DNA, 21 bp, Artificial Sequence
  Synthetic
ggaggcagacccggggccaga

SEQ ID NO: 3176 - DNA, 21 bp, Artificial Sequence
  Synthetic
aggcagacccggggccagaaa

SEQ ID NO: 3177 - DNA, 21 bp, Artificial Sequence
  Synthetic
agacccggggccagaaagaga

SEQ ID NO: 3178 - DNA, 21 bp, Artificial Sequence
  Synthetic
gagtccgttctctttctggcc

SEQ ID NO: 3179 - DNA, 21 bp, Artificial Sequence
  Synthetic
gccagaaagagaacggactct

SEQ ID NO: 3180 - DNA, 21 bp, Artificial Sequence
  Synthetic
ggactctctgagacaacttcc

SEQ ID NO: 3181 - DNA, 21 bp, Artificial Sequence
  Synthetic
gagtccttggaagttgtctca

SEQ ID NO: 3182 - DNA, 21 bp, Artificial Sequence
  Synthetic
gggagtccttggaagttgtct

SEQ ID NO: 3183 - DNA, 21 bp, Artificial Sequence
  Synthetic
gatctggggggtgggagtcct

SEQ ID NO: 3184 - DNA, 21 bp, Artificial Sequence
  Synthetic
agatctggggggtgggagtcc

SEQ ID NO: 3185 - DNA, 21 bp, Artificial Sequence
  Synthetic
aggactcccaccccccagatc

SEQ ID NO: 3186 - DNA, 21 bp, Artificial Sequence
  Synthetic
ggggtccaagatctggggggt

SEQ ID NO: 3187 - DNA, 21 bp, Artificial Sequence
  Synthetic
gggggtccaagatctgggggg

SEQ ID NO: 3188 - DNA, 21 bp, Artificial Sequence
  Synthetic
tgggggtccaagatctggggg

SEQ ID NO: 3189 - DNA, 21 bp, Artificial Sequence
  Synthetic
tatgtgggggtccaagatctg

SEQ ID NO: 3190 - DNA, 21 bp, Artificial Sequence
  Synthetic
atatgtgggggtccaagatct

SEQ ID NO: 3191 - DNA, 21 bp, Artificial Sequence
  Synthetic
aatatgtgggggtccaagatc

SEQ ID NO: 3192 - DNA, 21 bp, Artificial Sequence
  Synthetic
gaatatgtgggggtccaagat

SEQ ID NO: 3193 - DNA, 21 bp, Artificial Sequence
  Synthetic
gagggaggaacaggaatatgt

SEQ ID NO: 3194 - DNA, 21 bp, Artificial Sequence
  Synthetic
tgagggaggaacaggaatatg

SEQ ID NO: 3195 - DNA, 21 bp, Artificial Sequence
  Synthetic
ttgagggaggaacaggaatat

SEQ ID NO: 3196 - DNA, 21 bp, Artificial Sequence
  Synthetic
tacagggattgagggaggaac

SEQ ID NO: 3197 - DNA, 21 bp, Artificial Sequence
  Synthetic
ctacagggattgagggaggaa

SEQ ID NO: 3198 - DNA, 21 bp, Artificial Sequence
  Synthetic
gccacctacagggattgaggg

SEQ ID NO: 3199 - DNA, 21 bp, Artificial Sequence
  Synthetic
agccacctacagggattgagg

SEQ ID NO: 3200 - DNA, 21 bp, Artificial Sequence
  Synthetic
gcagccacctacagggattga

SEQ ID NO: 3201 - DNA, 21 bp, Artificial Sequence
  Synthetic
tgcagccacctacagggattg

SEQ ID NO: 3202 - DNA, 21 bp, Artificial Sequence
  Synthetic
ttgcagccacctacagggatt

SEQ ID NO: 3203 - DNA, 21 bp, Artificial Sequence
  Synthetic
gattgcagccacctacaggga

SEQ ID NO: 3204 - DNA, 21 bp, Artificial Sequence
  Synthetic
aggtggattgcagccacctac

SEQ ID NO: 3205 - DNA, 21 bp, Artificial Sequence
  Synthetic
aaggtggattgcagccaccta

SEQ ID NO: 3206 - DNA, 21 bp, Artificial Sequence
  Synthetic
gtggctgcaatccaccttcct

SEQ ID NO: 3207 - DNA, 21 bp, Artificial Sequence
  Synthetic
gctgcaatccaccttcctccg

SEQ ID NO: 3208 - DNA, 21 bp, Artificial Sequence
  Synthetic
tgggtgtctcttcggaggaag

SEQ ID NO: 3209 - DNA, 21 bp, Artificial Sequence
  Synthetic
ccttcctccgaagagacaccc

SEQ ID NO: 3210 - DNA, 21 bp, Artificial Sequence
  Synthetic
tgttcttgggtgtctcttcgg

SEQ ID NO: 3211 - DNA, 21 bp, Artificial Sequence
  Synthetic
ttgttcttgggtgtctcttcg

SEQ ID NO: 3212 - DNA, 21 bp, Artificial Sequence
  Synthetic
ccttgttcttgggtgtctctt

SEQ ID NO: 3213 - DNA, 21 bp, Artificial Sequence
  Synthetic
accttgttcttgggtgtctct

SEQ ID NO: 3214 - DNA, 21 bp, Artificial Sequence
  Synthetic
aaccatgaggccaccttgttc

SEQ ID NO: 3215 - DNA, 21 bp, Artificial Sequence
  Synthetic
aagaacaaggtggcctcatgg

SEQ ID NO: 3216 - DNA, 21 bp, Artificial Sequence
  Synthetic
tgacactattgcagctcaacc

SEQ ID NO: 3217 - DNA, 21 bp, Artificial Sequence
  Synthetic
ggttgagctgcaatagtgtca

SEQ ID NO: 3218 - DNA, 21 bp, Artificial Sequence
  Synthetic
tcttgaaggatgaatggctat

SEQ ID NO: 3219 - DNA, 21 bp, Artificial Sequence
  Synthetic
gccattcatccttcaagacta

SEQ ID NO: 3220 - DNA, 21 bp, Artificial Sequence
  Synthetic
caccttcattagtcttgaagg

SEQ ID NO: 3221 - DNA, 21 bp, Artificial Sequence
  Synthetic
catccttcaagactaatgaag

SEQ ID NO: 3222 - DNA, 21 bp, Artificial Sequence
  Synthetic
atccttcaagactaatgaagg

SEQ ID NO: 3223 - DNA, 21 bp, Artificial Sequence
  Synthetic
tccccaccttcattagtcttg

SEQ ID NO: 3224 - DNA, 21 bp, Artificial Sequence
  Synthetic
tccttcaagactaatgaaggt

SEQ ID NO: 3225 - DNA, 21 bp, Artificial Sequence
  Synthetic
ccttcaagactaatgaaggtg

SEQ ID NO: 3226 - DNA, 21 bp, Artificial Sequence
  Synthetic
ccctccccaccttcattagtc

SEQ ID NO: 3227 - DNA, 21 bp, Artificial Sequence
  Synthetic
ttcaagactaatgaaggtggg

SEQ ID NO: 3228 - DNA, 21 bp, Artificial Sequence
  Synthetic
gactaatgaaggtggggaggg

SEQ ID NO: 3229 - DNA, 21 bp, Artificial Sequence
  Synthetic
atgaaggtggggagggccggg

SEQ ID NO: 3230 - DNA, 21 bp, Artificial Sequence
  Synthetic
tgaaggtggggagggccgggc

SEQ ID NO: 3231 - DNA, 21 bp, Artificial Sequence
  Synthetic
gaaggtggggagggccgggct

SEQ ID NO: 3232 - DNA, 21 bp, Artificial Sequence
  Synthetic
aaggtggggagggccgggctg

SEQ ID NO: 3233 - DNA, 21 bp, Artificial Sequence
  Synthetic
aggtggggagggccgggctgg

SEQ ID NO: 3234 - DNA, 21 bp, Artificial Sequence
  Synthetic
ggagggccgggctgggggaag

SEQ ID NO: 3235 - DNA, 21 bp, Artificial Sequence
  Synthetic
ggccgggctgggggaagccga

SEQ ID NO: 3236 - DNA, 21 bp, Artificial Sequence
  Synthetic
gccgggctgggggaagccgaa

SEQ ID NO: 3237 - DNA, 21 bp, Artificial Sequence
  Synthetic
ctgggggaagccgaatggagg

SEQ ID NO: 3238 - DNA, 21 bp, Artificial Sequence
  Synthetic
gggggaagccgaatggaggct

SEQ ID NO: 3239 - DNA, 21 bp, Artificial Sequence
  Synthetic
aggctgagaaggcctccacct

SEQ ID NO: 3240 - DNA, 21 bp, Artificial Sequence
  Synthetic
ccttgatgcctagtcctgagg

SEQ ID NO: 3241 - DNA, 21 bp, Artificial Sequence
  Synthetic
tccttgatgcctagtcctgag

SEQ ID NO: 3242 - DNA, 21 bp, Artificial Sequence
  Synthetic
tccacctcaggactaggcatc

SEQ ID NO: 3243 - DNA, 21 bp, Artificial Sequence
  Synthetic
cctcaggactaggcatcaagg

SEQ ID NO: 3244 - DNA, 21 bp, Artificial Sequence
  Synthetic
cctcatccttgatgcctagtc

SEQ ID NO: 3245 - DNA, 21 bp, Artificial Sequence
  Synthetic
tcaggactaggcatcaaggat

SEQ ID NO: 3246 - DNA, 21 bp, Artificial Sequence
  Synthetic
caggactaggcatcaaggatg

SEQ ID NO: 3247 - DNA, 21 bp, Artificial Sequence
  Synthetic
aggactaggcatcaaggatga

SEQ ID NO: 3248 - DNA, 21 bp, Artificial Sequence
  Synthetic
gagggagacatcaaacaggcc

SEQ ID NO: 3249 - DNA, 21 bp, Artificial Sequence
  Synthetic
gagacatcaaacaggccaaga

SEQ ID NO: 3250 - DNA, 21 bp, Artificial Sequence
  Synthetic
ttgtttcggtcgtcagtgtcc

SEQ ID NO: 3251 - DNA, 21 bp, Artificial Sequence
  Synthetic
cttgtttcggtcgtcagtgtc

SEQ ID NO: 3252 - DNA, 21 bp, Artificial Sequence
  Synthetic
cttcccctcccattagagtta

SEQ ID NO: 3253 - DNA, 21 bp, Artificial Sequence
  Synthetic
cattagagttactgaaagctc

SEQ ID NO: 3254 - DNA, 21 bp, Artificial Sequence
  Synthetic
aaggattgtaaccgtaatttc

SEQ ID NO: 3255 - DNA, 21 bp, Artificial Sequence
  Synthetic
agaaggattgtaaccgtaatt

SEQ ID NO: 3256 - DNA, 21 bp, Artificial Sequence
  Synthetic
tacggttacaatccttctcct

SEQ ID NO: 3257 - DNA, 21 bp, Artificial Sequence
  Synthetic
acaatccttctcctgtgaagc

SEQ ID NO: 3258 - DNA, 21 bp, Artificial Sequence
  Synthetic
atccttctcctgtgaagcctg

SEQ ID NO: 3259 - DNA, 21 bp, Artificial Sequence
  Synthetic
gtccttcaggcttcacaggag

SEQ ID NO: 3260 - DNA, 21 bp, Artificial Sequence
  Synthetic
gaagtccttcaggcttcacag

SEQ ID NO: 3261 - DNA, 21 bp, Artificial Sequence
  Synthetic
gcgaagtccttcaggcttcac

SEQ ID NO: 3262 - DNA, 21 bp, Artificial Sequence
  Synthetic
ggcgaagtccttcaggcttca

SEQ ID NO: 3263 - DNA, 21 bp, Artificial Sequence
  Synthetic
actagtcttactaggtgggcg

SEQ ID NO: 3264 - DNA, 21 bp, Artificial Sequence
  Synthetic
gatgcatactagtcttactag

SEQ ID NO: 3265 - DNA, 21 bp, Artificial Sequence
  Synthetic
taagactagtatgcatcaaag

SEQ ID NO: 3266 - DNA, 21 bp, Artificial Sequence
  Synthetic
gggttggactgagcagaagcc

SEQ ID NO: 3267 - DNA, 21 bp, Artificial Sequence
  Synthetic
ttacatcagggttggactgag

SEQ ID NO: 3268 - DNA, 21 bp, Artificial Sequence
  Synthetic
gtgacttacatcagggttgga

SEQ ID NO: 3269 - DNA, 21 bp, Artificial Sequence
  Synthetic
ttgaggtgacttacatcaggg

SEQ ID NO: 3270 - DNA, 21 bp, Artificial Sequence
  Synthetic
tggacagtgtcaggacatcct

SEQ ID NO: 3271 - DNA, 21 bp, Artificial Sequence
  Synthetic
ctggacagtgtcaggacatcc

SEQ ID NO: 3272 - DNA, 21 bp, Artificial Sequence
  Synthetic
gctggacagtgtcaggacatc

SEQ ID NO: 3273 - DNA, 21 bp, Artificial Sequence
  Synthetic
ttctgtgctgctggacagtgt

SEQ ID NO: 3274 - DNA, 21 bp, Artificial Sequence
  Synthetic
tcctgacactgtccagcagca

SEQ ID NO: 3275 - DNA, 21 bp, Artificial Sequence
  Synthetic
cactgtccagcagcacagaaa

SEQ ID NO: 3276 - DNA, 21 bp, Artificial Sequence
  Synthetic
ctgtccagcagcacagaaagt

SEQ ID NO: 3277 - DNA, 21 bp, Artificial Sequence
  Synthetic
tgtccagcagcacagaaagtg

SEQ ID NO: 3278 - DNA, 21 bp, Artificial Sequence
  Synthetic
gtccagcagcacagaaagtga

SEQ ID NO: 3279 - DNA, 21 bp, Artificial Sequence
  Synthetic
tccccctcactttctgtgctg

SEQ ID NO: 3280 - DNA, 21 bp, Artificial Sequence
  Synthetic
tccagcagcacagaaagtgag

SEQ ID NO: 3281 - DNA, 21 bp, Artificial Sequence
  Synthetic
ccagcagcacagaaagtgagg

SEQ ID NO: 3282 - DNA, 21 bp, Artificial Sequence
  Synthetic
gcacagaaagtgagggggaaa

SEQ ID NO: 3283 - DNA, 21 bp, Artificial Sequence
  Synthetic
cacagaaagtgagggggaaag

SEQ ID NO: 3284 - DNA, 21 bp, Artificial Sequence
  Synthetic
tgagggggaaagtgggaccag

SEQ ID NO: 3285 - DNA, 21 bp, Artificial Sequence
  Synthetic
gtagccgaagtctgaccagca

SEQ ID NO: 3286 - DNA, 21 bp, Artificial Sequence
  Synthetic
catcactgtcaaccgctgtag

SEQ ID NO: 3287 - DNA, 21 bp, Artificial Sequence
  Synthetic
ttcagagccagaggatatggt

SEQ ID NO: 3288 - DNA, 21 bp, Artificial Sequence
  Synthetic
tccagaccatatcctctggct

SEQ ID NO: 3289 - DNA, 21 bp, Artificial Sequence
  Synthetic
agaccatatcctctggctctg

SEQ ID NO: 3290 - DNA, 21 bp, Artificial Sequence
  Synthetic
gaccatatcctctggctctga

SEQ ID NO: 3291 - DNA, 21 bp, Artificial Sequence
  Synthetic
accatatcctctggctctgaa

SEQ ID NO: 3292 - DNA, 21 bp, Artificial Sequence
  Synthetic
aagtcatccccttcagagcca

SEQ ID NO: 3293 - DNA, 21 bp, Artificial Sequence
  Synthetic
caaagtcatccccttcagagc

SEQ ID NO: 3294 - DNA, 21 bp, Artificial Sequence
  Synthetic
ctggctctgaaggggatgact

SEQ ID NO: 3295 - DNA, 21 bp, Artificial Sequence
  Synthetic
ggctctgaaggggatgacttt

SEQ ID NO: 3296 - DNA, 21 bp, Artificial Sequence
  Synthetic
tgtcctcaaagtcatcccctt

SEQ ID NO: 3297 - DNA, 21 bp, Artificial Sequence
  Synthetic
gaaggggatgactttgaggac

SEQ ID NO: 3298 - DNA, 21 bp, Artificial Sequence
  Synthetic
ggggatgactttgaggacaag

SEQ ID NO: 3299 - DNA, 21 bp, Artificial Sequence
  Synthetic
tctccctcctgtccaggtcca

SEQ ID NO: 3300 - DNA, 21 bp, Artificial Sequence
  Synthetic
ccacttgacgcttcattggac

SEQ ID NO: 3301 - DNA, 21 bp, Artificial Sequence
  Synthetic
ttactgccacttgacgcttca

SEQ ID NO: 3302 - DNA, 21 bp, Artificial Sequence
  Synthetic
tcaagtggcagtaaaatcaac

SEQ ID NO: 3303 - DNA, 21 bp, Artificial Sequence
  Synthetic
ggttgatttaagagcaaagcc

SEQ ID NO: 3304 - DNA, 21 bp, Artificial Sequence
  Synthetic
gctttgctcttaaatcaaccc

SEQ ID NO: 3305 - DNA, 21 bp, Artificial Sequence
  Synthetic
ctttgctcttaaatcaaccca

SEQ ID NO: 3306 - DNA, 21 bp, Artificial Sequence
  Synthetic
tgcaatcccatgggttgattt

SEQ ID NO: 3307 - DNA, 21 bp, Artificial Sequence
  Synthetic
ggttgatttaattgcaatccc

SEQ ID NO: 3308 - DNA, 21 bp, Artificial Sequence
  Synthetic
aaatcaaccaacatggcctct

SEQ ID NO: 3309 - DNA, 21 bp, Artificial Sequence
  Synthetic
accaacatggcctctgtggac

SEQ ID NO: 3310 - DNA, 21 bp, Artificial Sequence
  Synthetic
ccaacatggcctctgtggaca

SEQ ID NO: 3311 - DNA, 21 bp, Artificial Sequence
  Synthetic
caacatggcctctgtggacaa

SEQ ID NO: 3312 - DNA, 21 bp, Artificial Sequence
  Synthetic
aacatggcctctgtggacaag

SEQ ID NO: 3313 - DNA, 21 bp, Artificial Sequence
  Synthetic
acatggcctctgtggacaagg

SEQ ID NO: 3314 - DNA, 21 bp, Artificial Sequence
  Synthetic
atggcctctgtggacaagggg

SEQ ID NO: 3315 - DNA, 21 bp, Artificial Sequence
  Synthetic
gtgcgctctcccccttgtcca

SEQ ID NO: 3316 - DNA, 21 bp, Artificial Sequence
  Synthetic
ggggagagcgcacctgttcgt

SEQ ID NO: 3317 - DNA, 21 bp, Artificial Sequence
  Synthetic
atagaattggcgtgtgttctt

SEQ ID NO: 3318 - DNA, 21 bp, Artificial Sequence
  Synthetic
acacacgccaattctatgatg

SEQ ID NO: 3319 - DNA, 21 bp, Artificial Sequence
  Synthetic
acacgccaattctatgatggc

SEQ ID NO: 3320 - DNA, 21 bp, Artificial Sequence
  Synthetic
cacgccaattctatgatggcg

SEQ ID NO: 3321 - DNA, 21 bp, Artificial Sequence
  Synthetic
tagcaagactcctcgccatca

SEQ ID NO: 3322 - DNA, 21 bp, Artificial Sequence
  Synthetic
gctacatcattgatgccaagc

SEQ ID NO: 3323 - DNA, 21 bp, Artificial Sequence
  Synthetic
gatgccaagcttgaaggcaac

SEQ ID NO: 3324 - DNA, 21 bp, Artificial Sequence
  Synthetic
aacctgggccgctacctcaac

SEQ ID NO: 3325 - DNA, 21 bp, Artificial Sequence
  Synthetic
tgcagccccaacctgtttgtc

SEQ ID NO: 3326 - DNA, 21 bp, Artificial Sequence
  Synthetic
agacattctggacaaacaggt

SEQ ID NO: 3327 - DNA, 21 bp, Artificial Sequence
  Synthetic
aagacattctggacaaacagg

SEQ ID NO: 3328 - DNA, 21 bp, Artificial Sequence
  Synthetic
ctgtttgtccagaatgtcttc

SEQ ID NO: 3329 - DNA, 21 bp, Artificial Sequence
  Synthetic
atgggtatccacgaagacatt

SEQ ID NO: 3330 - DNA, 21 bp, Artificial Sequence
  Synthetic
aagcgaagatcatgggtatcc

SEQ ID NO: 3331 - DNA, 21 bp, Artificial Sequence
  Synthetic
tacccatgatcttcgcttccc

SEQ ID NO: 3332 - DNA, 21 bp, Artificial Sequence
  Synthetic
cacccaggggaagcgaagatc

SEQ ID NO: 3333 - DNA, 21 bp, Artificial Sequence
  Synthetic
aaagaaggccacccaggggaa

SEQ ID NO: 3334 - DNA, 21 bp, Artificial Sequence
  Synthetic
ctggcaaagaaggccacccag

SEQ ID NO: 3335 - DNA, 21 bp, Artificial Sequence
  Synthetic
gctggcaaagaaggccaccca

SEQ ID NO: 3336 - DNA, 21 bp, Artificial Sequence
  Synthetic
tgctggcaaagaaggccaccc

SEQ ID NO: 3337 - DNA, 21 bp, Artificial Sequence
  Synthetic
ttgctggcaaagaaggccacc

SEQ ID NO: 3338 - DNA, 21 bp, Artificial Sequence
  Synthetic
tggccttctttgccagcaagt

SEQ ID NO: 3339 - DNA, 21 bp, Artificial Sequence
  Synthetic
ctgactccttacttgctggca

SEQ ID NO: 3340 - DNA, 21 bp, Artificial Sequence
  Synthetic
tcctcttcagaagaatccggg

SEQ ID NO: 3341 - DNA, 21 bp, Artificial Sequence
  Synthetic
cctcttcagaagaatccgggc

SEQ ID NO: 3342 - DNA, 21 bp, Artificial Sequence
  Synthetic
tcagaagaatccgggctggga

SEQ ID NO: 3343 - DNA, 21 bp, Artificial Sequence
  Synthetic
ccaagtaagttctgtcccagc

SEQ ID NO: 3344 - DNA, 21 bp, Artificial Sequence
  Synthetic
ccgggctgggacagaacttac

SEQ ID NO: 3345 - DNA, 21 bp, Artificial Sequence
  Synthetic
cgggctgggacagaacttact

SEQ ID NO: 3346 - DNA, 21 bp, Artificial Sequence
  Synthetic
aacttacttgggactacaact

SEQ ID NO: 3347 - DNA, 21 bp, Artificial Sequence
  Synthetic
atgttcccctatcctgtgtca

SEQ ID NO: 3348 - DNA, 21 bp, Artificial Sequence
  Synthetic
aatctcattgacacaggatag

SEQ ID NO: 3349 - DNA, 21 bp, Artificial Sequence
  Synthetic
caatctcattgacacaggata

SEQ ID NO: 3350 - DNA, 21 bp, Artificial Sequence
  Synthetic
tcaatctcattgacacaggat

SEQ ID NO: 3351 - DNA, 21 bp, Artificial Sequence
  Synthetic
gtcaatctcattgacacagga

SEQ ID NO: 3352 - DNA, 21 bp, Artificial Sequence
  Synthetic
gttgtgtcaatctcattgaca

SEQ ID NO: 3353 - DNA, 21 bp, Artificial Sequence
  Synthetic
gctgtaggccacctggggtgg

SEQ ID NO: 3354 - DNA, 21 bp, Artificial Sequence
  Synthetic
tgctgtaggccacctggggtg

SEQ ID NO: 3355 - DNA, 21 bp, Artificial Sequence
  Synthetic
cttgctgtaggccacctgggg

SEQ ID NO: 3356 - DNA, 21 bp, Artificial Sequence
  Synthetic
ccttgctgtaggccacctggg

SEQ ID NO: 3357 - DNA, 21 bp, Artificial Sequence
  Synthetic
ccaccccaggtggcctacagc

SEQ ID NO: 3358 - DNA, 21 bp, Artificial Sequence
  Synthetic
caccccaggtggcctacagca

SEQ ID NO: 3359 - DNA, 21 bp, Artificial Sequence
  Synthetic
cgttccttgctgtaggccacc

SEQ ID NO: 3360 - DNA, 21 bp, Artificial Sequence
  Synthetic
acgttccttgctgtaggccac

SEQ ID NO: 3361 - DNA, 21 bp, Artificial Sequence
  Synthetic
gcctacagcaaggaacgtatc

SEQ ID NO: 3362 - DNA, 21 bp, Artificial Sequence
  Synthetic
agcaaggaacgtatcccgggc

SEQ ID NO: 3363 - DNA, 21 bp, Artificial Sequence
  Synthetic
gttaatgaaaacacccttgcc

SEQ ID NO: 3364 - DNA, 21 bp, Artificial Sequence
  Synthetic
tgttaatgaaaacacccttgc

SEQ ID NO: 3365 - DNA, 21 bp, Artificial Sequence
  Synthetic
agaaattcagggcctgtgtta

SEQ ID NO: 3366 - DNA, 21 bp, Artificial Sequence
  Synthetic
agtcacagccaaccagaaatt

SEQ ID NO: 3367 - DNA, 21 bp, Artificial Sequence
  Synthetic
tttctggttggctgtgactgc

SEQ ID NO: 3368 - DNA, 21 bp, Artificial Sequence
  Synthetic
atccttgcagtcacagccaac

SEQ ID NO: 3369 - DNA, 21 bp, Artificial Sequence
  Synthetic
tggttggctgtgactgcaagg

SEQ ID NO: 3370 - DNA, 21 bp, Artificial Sequence
  Synthetic
ctgtgactgcaaggatgggtg

SEQ ID NO: 3371 - DNA, 21 bp, Artificial Sequence
  Synthetic
tgtgactgcaaggatgggtgt

SEQ ID NO: 3372 - DNA, 21 bp, Artificial Sequence
  Synthetic
caaggatgggtgtcgggacaa

SEQ ID NO: 3373 - DNA, 21 bp, Artificial Sequence
  Synthetic
gttagttgatggcaggcacac

SEQ ID NO: 3374 - DNA, 21 bp, Artificial Sequence
  Synthetic
tcctggggtacaggctgtagc

SEQ ID NO: 3375 - DNA, 21 bp, Artificial Sequence
  Synthetic
tccaggctacagcctgtaccc

SEQ ID NO: 3376 - DNA, 21 bp, Artificial Sequence
  Synthetic
ccaggctacagcctgtacccc

SEQ ID NO: 3377 - DNA, 21 bp, Artificial Sequence
  Synthetic
gttagggttgatttggcctcc

SEQ ID NO: 3378 - DNA, 21 bp, Artificial Sequence
  Synthetic
agttagggttgatttggcctc

SEQ ID NO: 3379 - DNA, 21 bp, Artificial Sequence
  Synthetic
tcttgtactggtagccagagt

SEQ ID NO: 3380 - DNA, 21 bp, Artificial Sequence
  Synthetic
cctaactctggctaccagtac

SEQ ID NO: 3381 - DNA, 21 bp, Artificial Sequence
  Synthetic
ctagtctcttgtactggtagc

SEQ ID NO: 3382 - DNA, 21 bp, Artificial Sequence
  Synthetic
ctggctaccagtacaagagac

SEQ ID NO: 3383 - DNA, 21 bp, Artificial Sequence
  Synthetic
gctaccagtacaagagactag

SEQ ID NO: 3384 - DNA, 21 bp, Artificial Sequence
  Synthetic
gactagaagagtgtctaccca

SEQ ID NO: 3385 - DNA, 21 bp, Artificial Sequence
  Synthetic
cattccttgaccacttaccct

SEQ ID NO: 3386 - DNA, 21 bp, Artificial Sequence
  Synthetic
tctaacctcctcccagggtat

SEQ ID NO: 3387 - DNA, 21 bp, Artificial Sequence
  Synthetic
tttgttacactcatataccct

SEQ ID NO: 3388 - DNA, 21 bp, Artificial Sequence
  Synthetic
gtttgttacactcatataccc

SEQ ID NO: 3389 - DNA, 21 bp, Artificial Sequence
  Synthetic
cgtttgttacactcatatacc

SEQ ID NO: 3390 - DNA, 21 bp, Artificial Sequence
  Synthetic
ccaaccggtttgtgcacatgt

SEQ ID NO: 3391 - DNA, 21 bp, Artificial Sequence
  Synthetic
aggaatgagcagtaccggggc

SEQ ID NO: 3392 - DNA, 21 bp, Artificial Sequence
  Synthetic
catatagtaacgggaccagca

SEQ ID NO: 3393 - DNA, 21 bp, Artificial Sequence
  Synthetic
gtcatatagtaacgggaccag

SEQ ID NO: 3394 - DNA, 21 bp, Artificial Sequence
  Synthetic
ccgccggaagtcatatagtaa

SEQ ID NO: 3395 - DNA, 21 bp, Artificial Sequence
  Synthetic
tccgccggaagtcatatagta

SEQ ID NO: 3396 - DNA, 21 bp, Artificial Sequence
  Synthetic
cccgttactatatgacttccg

SEQ ID NO: 3397 - DNA, 21 bp, Artificial Sequence
  Synthetic
cgacgccgggctgtcatccgc

SEQ ID NO: 3398 - DNA, 21 bp, Artificial Sequence
  Synthetic
tcgacgccgggctgtcatccg

SEQ ID NO: 3399 - DNA, 21 bp, Artificial Sequence
  Synthetic
ccggcggatgacagcccggcg

SEQ ID NO: 3400 - DNA, 21 bp, Artificial Sequence
  Synthetic
catcttgcggttaactcgacg

SEQ ID NO: 3401 - DNA, 21 bp, Artificial Sequence
  Synthetic
cggcgtcgagttaaccgcaag

SEQ ID NO: 3402 - DNA, 21 bp, Artificial Sequence
  Synthetic
acaaggtgtcttatagataac

SEQ ID NO: 3403 - DNA, 21 bp, Artificial Sequence
  Synthetic
gacaccttgtggtctctgcct

SEQ ID NO: 3404 - DNA, 21 bp, Artificial Sequence
  Synthetic
ggtctctgccttcggacaatg

SEQ ID NO: 3405 - DNA, 21 bp, Artificial Sequence
  Synthetic
gtctctgccttcggacaatgc

SEQ ID NO: 3406 - DNA, 21 bp, Artificial Sequence
  Synthetic
atctcctgcattgtccgaagg

SEQ ID NO: 3407 - DNA, 21 bp, Artificial Sequence
  Synthetic
gccttcggacaatgcaggaga

SEQ ID NO: 3408 - DNA, 21 bp, Artificial Sequence
  Synthetic
gcgttctatctcctgcattgt

SEQ ID NO: 3409 - DNA, 21 bp, Artificial Sequence
  Synthetic
aggagatagaacgctaccttt

SEQ ID NO: 3410 - DNA, 21 bp, Artificial Sequence
  Synthetic
aagaggaagtcacagccagtc

SEQ ID NO: 3411 - DNA, 21 bp, Artificial Sequence
  Synthetic
actggctgtgacttcctcttc

SEQ ID NO: 3412 - DNA, 21 bp, Artificial Sequence
  Synthetic
ctggctgtgacttcctcttcc

SEQ ID NO: 3413 - DNA, 21 bp, Artificial Sequence
  Synthetic
aaacagaacatctccaggaag

SEQ ID NO: 3414 - DNA, 21 bp, Artificial Sequence
  Synthetic
caaacagaacatctccaggaa

SEQ ID NO: 3415 - DNA, 21 bp, Artificial Sequence
  Synthetic
tccaaacagaacatctccagg

SEQ ID NO: 3416 - DNA, 21 bp, Artificial Sequence
  Synthetic
ctcttcctggagatgttctgt

SEQ ID NO: 3417 - DNA, 21 bp, Artificial Sequence
  Synthetic
ggatccaaacagaacatctcc

SEQ ID NO: 3418 - DNA, 21 bp, Artificial Sequence
  Synthetic
tggatccaaacagaacatctc

SEQ ID NO: 3419 - DNA, 21 bp, Artificial Sequence
  Synthetic
acaagaacatatggatccaaa

SEQ ID NO: 3420 - DNA, 21 bp, Artificial Sequence
  Synthetic
actttcggtccacaagaacat

SEQ ID NO: 3421 - DNA, 21 bp, Artificial Sequence
  Synthetic
ttcaaaactgagcagaaggga

SEQ ID NO: 3422 - DNA, 21 bp, Artificial Sequence
  Synthetic
acgctgtctagatgacattga

SEQ ID NO: 3423 - DNA, 21 bp, Artificial Sequence
  Synthetic
gctgtctagatgacattgaca

SEQ ID NO: 3424 - DNA, 21 bp, Artificial Sequence
  Synthetic
ctgtctagatgacattgacag

SEQ ID NO: 3425 - DNA, 21 bp, Artificial Sequence
  Synthetic
gattactaagcagagctaaca

SEQ ID NO: 3426 - DNA, 21 bp, Artificial Sequence
  Synthetic
ctgaaaaatcttatggtattg

SEQ ID NO: 3427 - DNA, 21 bp, Artificial Sequence
  Synthetic
aatcttatggtattgatgaaa

SEQ ID NO: 3428 - DNA, 21 bp, Artificial Sequence
  Synthetic
atcttatggtattgatgaaaa

SEQ ID NO: 3429 - DNA, 21 bp, Artificial Sequence
  Synthetic
tcttatggtattgatgaaaac

SEQ ID NO: 3430 - DNA, 21 bp, Artificial Sequence
  Synthetic
ttatggtattgatgaaaacgg

SEQ ID NO: 3431 - DNA, 21 bp, Artificial Sequence
  Synthetic
gtattgatgaaaacgggagag

SEQ ID NO: 3432 - DNA, 21 bp, Artificial Sequence
  Synthetic
attgatgaaaacgggagagat

SEQ ID NO: 3433 - DNA, 21 bp, Artificial Sequence
  Synthetic
aacgggagagatgagaatact

SEQ ID NO: 3434 - DNA, 21 bp, Artificial Sequence
  Synthetic
tagaagttgcatgttcagatt

SEQ ID NO: 3435 - DNA, 21 bp, Artificial Sequence
  Synthetic
ttgcatgttcagattgtgaag

SEQ ID NO: 3436 - DNA, 21 bp, Artificial Sequence
  Synthetic
ggagaacttcaacttcacaat

SEQ ID NO: 3437 - DNA, 21 bp, Artificial Sequence
  Synthetic
gtgaagttgaagttctcccat

SEQ ID NO: 3438 - DNA, 21 bp, Artificial Sequence
  Synthetic
gttgaagttctcccattagga

SEQ ID NO: 3439 - DNA, 21 bp, Artificial Sequence
  Synthetic
ttgaagttctcccattaggat

SEQ ID NO: 3440 - DNA, 21 bp, Artificial Sequence
  Synthetic
atgtgtttccaatcctaatgg

SEQ ID NO: 3441 - DNA, 21 bp, Artificial Sequence
  Synthetic
ggatgtgtttccaatcctaat

SEQ ID NO: 3442 - DNA, 21 bp, Artificial Sequence
  Synthetic
aggatgtgtttccaatcctaa

SEQ ID NO: 3443 - DNA, 21 bp, Artificial Sequence
  Synthetic
taggatgtgtttccaatccta

SEQ ID NO: 3444 - DNA, 21 bp, Artificial Sequence
  Synthetic
attaggattggaaacacatcc

SEQ ID NO: 3445 - DNA, 21 bp, Artificial Sequence
  Synthetic
cacatcctagaactgctaaaa

SEQ ID NO: 3446 - DNA, 21 bp, Artificial Sequence
  Synthetic
catcctagaactgctaaaact

SEQ ID NO: 3447 - DNA, 21 bp, Artificial Sequence
  Synthetic
tgggattattactgaactttg

SEQ ID NO: 3448 - DNA, 21 bp, Artificial Sequence
  Synthetic
ccaaagttcagtaataatccc

SEQ ID NO: 3449 - DNA, 21 bp, Artificial Sequence
  Synthetic
caaagttcagtaataatccca

SEQ ID NO: 3450 - DNA, 21 bp, Artificial Sequence
  Synthetic
gtaagctccttgggattatta

SEQ ID NO: 3451 - DNA, 21 bp, Artificial Sequence
  Synthetic
ttacttacacagtaagctcct

SEQ ID NO: 3452 - DNA, 21 bp, Artificial Sequence
  Synthetic
gttacttacacagtaagctcc

SEQ ID NO: 3453 - DNA, 21 bp, Artificial Sequence
  Synthetic
aacgaaatatgataatatttc

SEQ ID NO: 3454 - DNA, 21 bp, Artificial Sequence
  Synthetic
taactgaatgatattgaattc

SEQ ID NO: 3455 - DNA, 21 bp, Artificial Sequence
  Synthetic
aattcaatatcattcagttat

SEQ ID NO: 3456 - DNA, 21 bp, Artificial Sequence
  Synthetic
atctctaataactgaatgata

SEQ ID NO: 3457 - DNA, 21 bp, Artificial Sequence
  Synthetic
atcattcagttattagagatc

SEQ ID NO: 3458 - DNA, 21 bp, Artificial Sequence
  Synthetic
tggattcaggatctctaataa

SEQ ID NO: 3459 - DNA, 21 bp, Artificial Sequence
  Synthetic
gaaaaatggctgtcttggatt

SEQ ID NO: 3460 - DNA, 21 bp, Artificial Sequence
  Synthetic
ttgtgttgaaaaatggctgtc

SEQ ID NO: 3461 - DNA, 21 bp, Artificial Sequence
  Synthetic
tttcctcggagtctgtcactc

SEQ ID NO: 3462 - DNA, 21 bp, Artificial Sequence
  Synthetic
cttctggagtgacagactccg

SEQ ID NO: 3463 - DNA, 21 bp, Artificial Sequence
  Synthetic
tcttctggagtgacagactcc

SEQ ID NO: 3464 - DNA, 21 bp, Artificial Sequence
  Synthetic
tatcttctggagtgacagact

SEQ ID NO: 3465 - DNA, 21 bp, Artificial Sequence
  Synthetic
ctgtcactccagaagataatg

SEQ ID NO: 3466 - DNA, 21 bp, Artificial Sequence
  Synthetic
tttaaatccatcattatcttc

SEQ ID NO: 3467 - DNA, 21 bp, Artificial Sequence
  Synthetic
gtttaaatccatcattatctt

SEQ ID NO: 3468 - DNA, 21 bp, Artificial Sequence
  Synthetic
taatgatggatttaaaccacc

SEQ ID NO: 3469 - DNA, 21 bp, Artificial Sequence
  Synthetic
atgatggatttaaaccacccc

SEQ ID NO: 3470 - DNA, 21 bp, Artificial Sequence
  Synthetic
tttaaaccaccccgagagcat

SEQ ID NO: 3471 - DNA, 21 bp, Artificial Sequence
  Synthetic
gagcatctgaactctaaaacc

SEQ ID NO: 3472 - DNA, 21 bp, Artificial Sequence
  Synthetic
agcatctgaactctaaaacca

SEQ ID NO: 3473 - DNA, 21 bp, Artificial Sequence
  Synthetic
gcatctgaactctaaaaccaa

SEQ ID NO: 3474 - DNA, 21 bp, Artificial Sequence
  Synthetic
tactttgtgctcccttggttt

SEQ ID NO: 3475 - DNA, 21 bp, Artificial Sequence
  Synthetic
actcaagttcaaaccatgttg

SEQ ID NO: 3476 - DNA, 21 bp, Artificial Sequence
  Synthetic
actcatcaacatggtttgaac

SEQ ID NO: 3477 - DNA, 21 bp, Artificial Sequence
  Synthetic
gttcaaaccatgttgatgagt

SEQ ID NO: 3478 - DNA, 21 bp, Artificial Sequence
  Synthetic
cttcaaactcatcaacatggt

SEQ ID NO: 3479 - DNA, 21 bp, Artificial Sequence
  Synthetic
agtttgaagataatctgctga

SEQ ID NO: 3480 - DNA, 21 bp, Artificial Sequence
  Synthetic
tgtgatagatataactaaata

SEQ ID NO: 3481 - DNA, 21 bp, Artificial Sequence
  Synthetic
tgatagatataactaaatata

SEQ ID NO: 3482 - DNA, 21 bp, Artificial Sequence
  Synthetic
tagatataactaaatatagag

SEQ ID NO: 3483 - DNA, 21 bp, Artificial Sequence
  Synthetic
atatagagaagaaactccacc

SEQ ID NO: 3484 - DNA, 21 bp, Artificial Sequence
  Synthetic
tatagagaagaaactccacca

SEQ ID NO: 3485 - DNA, 21 bp, Artificial Sequence
  Synthetic
ctggttacatctgctccttgg

SEQ ID NO: 3486 - DNA, 21 bp, Artificial Sequence
  Synthetic
cctggttacatctgctccttg

SEQ ID NO: 3487 - DNA, 21 bp, Artificial Sequence
  Synthetic
agatgtaaccaggcgaccaca

SEQ ID NO: 3488 - DNA, 21 bp, Artificial Sequence
  Synthetic
caggcgaccacattggataat

SEQ ID NO: 3489 - DNA, 21 bp, Artificial Sequence
  Synthetic
atcagaatattaaaaaggcaa

SEQ ID NO: 3490 - DNA, 21 bp, Artificial Sequence
  Synthetic
aaggcaattgaggttcaaatt

SEQ ID NO: 3491 - DNA, 21 bp, Artificial Sequence
  Synthetic
aggttcaaattcagaaacccc

SEQ ID NO: 3492 - DNA, 21 bp, Artificial Sequence
  Synthetic
gttcaaattcagaaaccccaa

SEQ ID NO: 3493 - DNA, 21 bp, Artificial Sequence
  Synthetic
tccctcttggggtttctgaat

SEQ ID NO: 3494 - DNA, 21 bp, Artificial Sequence
  Synthetic
ttcaaattcagaaaccccaag

SEQ ID NO: 3495 - DNA, 21 bp, Artificial Sequence
  Synthetic
agatcgtccctcttggggttt

SEQ ID NO: 3496 - DNA, 21 bp, Artificial Sequence
  Synthetic
catgctgtagatcgtccctct

SEQ ID NO: 3497 - DNA, 21 bp, Artificial Sequence
  Synthetic
acatgctgtagatcgtccctc

SEQ ID NO: 3498 - DNA, 21 bp, Artificial Sequence
  Synthetic
tttgtgatgaagagttgctaa

SEQ ID NO: 3499 - DNA, 21 bp, Artificial Sequence
  Synthetic
gaagagttgctaagtgaaacc

SEQ ID NO: 3500 - DNA, 21 bp, Artificial Sequence
  Synthetic
tgaactttgttagagaatcag

SEQ ID NO: 3501 - DNA, 21 bp, Artificial Sequence
  Synthetic
attctctaacaaagttcaata

SEQ ID NO: 3502 - DNA, 21 bp, Artificial Sequence
  Synthetic
tccctttattgaactttgtta

SEQ ID NO: 3503 - DNA, 21 bp, Artificial Sequence
  Synthetic
ttctctaacaaagttcaataa

SEQ ID NO: 3504 - DNA, 21 bp, Artificial Sequence
  Synthetic
tctctaacaaagttcaataaa

SEQ ID NO: 3505 - DNA, 21 bp, Artificial Sequence
  Synthetic
attccctttattgaactttgt

SEQ ID NO: 3506 - DNA, 21 bp, Artificial Sequence
  Synthetic
aataaaaacacattcccttta

SEQ ID NO: 3507 - DNA, 21 bp, Artificial Sequence
  Synthetic
tttattggatgccacaaaaga

SEQ ID NO: 3508 - DNA, 21 bp, Artificial Sequence
  Synthetic
aatgtcggccgcttccttaat

SEQ ID NO: 3509 - DNA, 21 bp, Artificial Sequence
  Synthetic
tcagcccttatactcacatta

SEQ ID NO: 3510 - DNA, 21 bp, Artificial Sequence
  Synthetic
ctcagcccttatactcacatt

SEQ ID NO: 3511 - DNA, 21 bp, Artificial Sequence
  Synthetic
tgttgcccaaatctcttggta

SEQ ID NO: 3512 - DNA, 21 bp, Artificial Sequence
  Synthetic
aaacattctgtaccaagagat

SEQ ID NO: 3513 - DNA, 21 bp, Artificial Sequence
  Synthetic
tctacaaaaacattctgtacc

SEQ ID NO: 3514 - DNA, 21 bp, Artificial Sequence
  Synthetic
gttggtgaagaatgccaccaa

SEQ ID NO: 3515 - DNA, 21 bp, Artificial Sequence
  Synthetic
tgttggtgaagaatgccacca

SEQ ID NO: 3516 - DNA, 21 bp, Artificial Sequence
  Synthetic
tggcattcttcaccaacaggt

SEQ ID NO: 3517 - DNA, 21 bp, Artificial Sequence
  Synthetic
tcaatttcaaacctgttggtg

SEQ ID NO: 3518 - DNA, 21 bp, Artificial Sequence
  Synthetic
aaatcaatttcaaacctgttg

SEQ ID NO: 3519 - DNA, 21 bp, Artificial Sequence
  Synthetic
aaatttctactttctaggtat

SEQ ID NO: 3520 - DNA, 21 bp, Artificial Sequence
  Synthetic
actttctaggtatgtgaaagc

SEQ ID NO: 3521 - DNA, 21 bp, Artificial Sequence
  Synthetic
ctgttcttgctttcacatacc

SEQ ID NO: 3522 - DNA, 21 bp, Artificial Sequence
  Synthetic
ctaggtatgtgaaagcaagaa

SEQ ID NO: 3523 - DNA, 21 bp, Artificial Sequence
  Synthetic
gaaagcaagaacagagctaac

SEQ ID NO: 3524 - DNA, 21 bp, Artificial Sequence
  Synthetic
aaagcaagaacagagctaaca

SEQ ID NO: 3525 - DNA, 21 bp, Artificial Sequence
  Synthetic
agctaacatgggattatggct

SEQ ID NO: 3526 - DNA, 21 bp, Artificial Sequence
  Synthetic
tttctgatgtggatattagca

SEQ ID NO: 3527 - DNA, 21 bp, Artificial Sequence
  Synthetic
ttctgatgtggatattagcaa

SEQ ID NO: 3528 - DNA, 21 bp, Artificial Sequence
  Synthetic
gatgtggatattagcaatgga

SEQ ID NO: 3529 - DNA, 21 bp, Artificial Sequence
  Synthetic
atgtggatattagcaatggag

SEQ ID NO: 3530 - DNA, 21 bp, Artificial Sequence
  Synthetic
cagtgcccatttctttctgta

SEQ ID NO: 3531 - DNA, 21 bp, Artificial Sequence
  Synthetic
tcaatttcattacagaaagaa

SEQ ID NO: 3532 - DNA, 21 bp, Artificial Sequence
  Synthetic
tactgtcaatttcattacaga

SEQ ID NO: 3533 - DNA, 21 bp, Artificial Sequence
  Synthetic
tttctgtaatgaaattgacag

SEQ ID NO: 3534 - DNA, 21 bp, Artificial Sequence
  Synthetic
tttctactgtcaatttcatta

SEQ ID NO: 3535 - DNA, 21 bp, Artificial Sequence
  Synthetic
aaagctcccacagtttaagta

SEQ ID NO: 3536 - DNA, 21 bp, Artificial Sequence
  Synthetic
gtctttctgtacttaaactgt

SEQ ID NO: 3537 - DNA, 21 bp, Artificial Sequence
  Synthetic
agtctttctgtacttaaactg

SEQ ID NO: 3538 - DNA, 21 bp, Artificial Sequence
  Synthetic
cagtctttctgtacttaaact

SEQ ID NO: 3539 - DNA, 21 bp, Artificial Sequence
  Synthetic
gtacagaaagactgtgtggcc

SEQ ID NO: 3540 - DNA, 21 bp, Artificial Sequence
  Synthetic
aaagttggttagattatatgc

SEQ ID NO: 3541 - DNA, 21 bp, Artificial Sequence
  Synthetic
cacaggaatcagtaaacatgc

SEQ ID NO: 3542 - DNA, 21 bp, Artificial Sequence
  Synthetic
tcacaggaatcagtaaacatg

SEQ ID NO: 3543 - DNA, 21 bp, Artificial Sequence
  Synthetic
ttactgattcctgtgactgct

SEQ ID NO: 3544 - DNA, 21 bp, Artificial Sequence
  Synthetic
actgattcctgtgactgctct

SEQ ID NO: 3545 - DNA, 21 bp, Artificial Sequence
  Synthetic
tgcagccctcagagcagtcac

SEQ ID NO: 3546 - DNA, 21 bp, Artificial Sequence
  Synthetic
atgcagccctcagagcagtca

SEQ ID NO: 3547 - DNA, 21 bp, Artificial Sequence
  Synthetic
ctcacatgtctatgcagccct

SEQ ID NO: 3548 - DNA, 21 bp, Artificial Sequence
  Synthetic
ctctgagggctgcatagacat

SEQ ID NO: 3549 - DNA, 21 bp, Artificial Sequence
  Synthetic
tgcatgtcttcaactgacagc

SEQ ID NO: 3550 - DNA, 21 bp, Artificial Sequence
  Synthetic
gcatgtcttcaactgacagca

SEQ ID NO: 3551 - DNA, 21 bp, Artificial Sequence
  Synthetic
tttggcattccttgctgtcag

SEQ ID NO: 3552 - DNA, 21 bp, Artificial Sequence
  Synthetic
tgtcaagtgacaaaataacca

SEQ ID NO: 3553 - DNA, 21 bp, Artificial Sequence
  Synthetic
ggatataaatataaaagacta

SEQ ID NO: 3554 - DNA, 21 bp, Artificial Sequence
  Synthetic
gactacagagacagattccta

SEQ ID NO: 3555 - DNA, 21 bp, Artificial Sequence
  Synthetic
cctcaaggtaccttacccagt

SEQ ID NO: 3556 - DNA, 21 bp, Artificial Sequence
  Synthetic
tcctcaaggtaccttacccag

SEQ ID NO: 3557 - DNA, 21 bp, Artificial Sequence
  Synthetic
taatcgacaattgtgtcaaaa

SEQ ID NO: 3558 - DNA, 21 bp, Artificial Sequence
  Synthetic
gacatttgattggcagctgca

SEQ ID NO: 3559 - DNA, 21 bp, Artificial Sequence
  Synthetic
gtgacatttgattggcagctg

SEQ ID NO: 3560 - DNA, 21 bp, Artificial Sequence
  Synthetic
tttgtctttgcatgtcgtctt

SEQ ID NO: 3561 - DNA, 21 bp, Artificial Sequence
  Synthetic
gtttgtctttgcatgtcgtct

SEQ ID NO: 3562 - DNA, 21 bp, Artificial Sequence
  Synthetic
tcacgtggagtgctgaagaat

SEQ ID NO: 3563 - DNA, 21 bp, Artificial Sequence
  Synthetic
tctcattcttcagcactccac

SEQ ID NO: 3564 - DNA, 21 bp, Artificial Sequence
  Synthetic
actcacgtggagtgctgaaga

SEQ ID NO: 3565 - DNA, 21 bp, Artificial Sequence
  Synthetic
tataactcacgtggagtgctg

SEQ ID NO: 3566 - DNA, 21 bp, Artificial Sequence
  Synthetic
acgtgagttataaaacccctt

SEQ ID NO: 3567 - DNA, 21 bp, Artificial Sequence
  Synthetic
cgtgagttataaaaccccttg

SEQ ID NO: 3568 - DNA, 21 bp, Artificial Sequence
  Synthetic
gagttataaaaccccttgtgg

SEQ ID NO: 3569 - DNA, 21 bp, Artificial Sequence
  Synthetic
agttataaaaccccttgtgga

SEQ ID NO: 3570 - DNA, 21 bp, Artificial Sequence
  Synthetic
aaccccttgtggaaggagtct

SEQ ID NO: 3571 - DNA, 21 bp, Artificial Sequence
  Synthetic
gtttcgtagactccttccaca

SEQ ID NO: 3572 - DNA, 21 bp, Artificial Sequence
  Synthetic
cgtttcgtagactccttccac

SEQ ID NO: 3573 - DNA, 21 bp, Artificial Sequence
  Synthetic
tgtggaaggagtctacgaaac

SEQ ID NO: 3574 - DNA, 21 bp, Artificial Sequence
  Synthetic
gtggaaggagtctacgaaacg

SEQ ID NO: 3575 - DNA, 21 bp, Artificial Sequence
  Synthetic
ggaaggagtctacgaaacgtg

SEQ ID NO: 3576 - DNA, 21 bp, Artificial Sequence
  Synthetic
gaaggagtctacgaaacgtgg

SEQ ID NO: 3577 - DNA, 21 bp, Artificial Sequence
  Synthetic
acactctgtctcaagcaggta

SEQ ID NO: 3578 - DNA, 21 bp, Artificial Sequence
  Synthetic
ccaactgaacataggtattga

SEQ ID NO: 3579 - DNA, 21 bp, Artificial Sequence
  Synthetic
cgagccaactgaacataggta

SEQ ID NO: 3580 - DNA, 21 bp, Artificial Sequence
  Synthetic
tgggactacagcaaggggaag

SEQ ID NO: 3581 - DNA, 21 bp, Artificial Sequence
  Synthetic
gccagtgtacgtcttcaggca

SEQ ID NO: 3582 - DNA, 21 bp, Artificial Sequence
  Synthetic
ctgaagacgtacactggccac

SEQ ID NO: 3583 - DNA, 21 bp, Artificial Sequence
  Synthetic
agacgtacactggccacaaga

SEQ ID NO: 3584 - DNA, 21 bp, Artificial Sequence
  Synthetic
acgtacactggccacaagaat

SEQ ID NO: 3585 - DNA, 21 bp, Artificial Sequence
  Synthetic
ttgccaatttctctgttactg

SEQ ID NO: 3586 - DNA, 21 bp, Artificial Sequence
  Synthetic
tgccaatttctctgttactgg

SEQ ID NO: 3587 - DNA, 21 bp, Artificial Sequence
  Synthetic
gccaatttctctgttactggt

SEQ ID NO: 3588 - DNA, 21 bp, Artificial Sequence
  Synthetic
ctcaccttcccaccagtaaca

SEQ ID NO: 3589 - DNA, 21 bp, Artificial Sequence
  Synthetic
ttctctgttactggtgggaag

SEQ ID NO: 3590 - DNA, 21 bp, Artificial Sequence
  Synthetic
gactcaccttcccaccagtaa

SEQ ID NO: 3591 - DNA, 21 bp, Artificial Sequence
  Synthetic
cgtagtggattgtgtctggct

SEQ ID NO: 3592 - DNA, 21 bp, Artificial Sequence
  Synthetic
tagtggattgtgtctggctca

SEQ ID NO: 3593 - DNA, 21 bp, Artificial Sequence
  Synthetic
agatgtaaacaaggttatcct

SEQ ID NO: 3594 - DNA, 21 bp, Artificial Sequence
  Synthetic
agaggataaccttgtttacat

SEQ ID NO: 3595 - DNA, 21 bp, Artificial Sequence
  Synthetic
gaggataaccttgtttacatc

SEQ ID NO: 3596 - DNA, 21 bp, Artificial Sequence
  Synthetic
actctgttatagggcaagtgt

SEQ ID NO: 3597 - DNA, 21 bp, Artificial Sequence
  Synthetic
tagggcaagtgtctgaaaacc

SEQ ID NO: 3598 - DNA, 21 bp, Artificial Sequence
  Synthetic
ggcaagtgtctgaaaaccctg

SEQ ID NO: 3599 - DNA, 21 bp, Artificial Sequence
  Synthetic
gcaagtgtctgaaaaccctga

SEQ ID NO: 3600 - DNA, 21 bp, Artificial Sequence
  Synthetic
gacataattactgtgtccctt

SEQ ID NO: 3601 - DNA, 21 bp, Artificial Sequence
  Synthetic
acaataaggttggactgggga

SEQ ID NO: 3602 - DNA, 21 bp, Artificial Sequence
  Synthetic
ctgagacaataaggttggact

SEQ ID NO: 3603 - DNA, 21 bp, Artificial Sequence
  Synthetic
cctgagacaataaggttggac

SEQ ID NO: 3604 - DNA, 21 bp, Artificial Sequence
  Synthetic
tcctgagacaataaggttgga

SEQ ID NO: 3605 - DNA, 21 bp, Artificial Sequence
  Synthetic
cccagtccaaccttattgtct

SEQ ID NO: 3606 - DNA, 21 bp, Artificial Sequence
  Synthetic
acggatcctgagacaataagg

SEQ ID NO: 3607 - DNA, 21 bp, Artificial Sequence
  Synthetic
ccccagccacacttacggatc

SEQ ID NO: 3608 - DNA, 21 bp, Artificial Sequence
  Synthetic
tgtgttcagtttgacgaaagc

SEQ ID NO: 3609 - DNA, 21 bp, Artificial Sequence
  Synthetic
tgttcagtttgacgaaagcgt

SEQ ID NO: 3610 - DNA, 21 bp, Artificial Sequence
  Synthetic
tatcctcacgctttcgtcaaa

SEQ ID NO: 3611 - DNA, 21 bp, Artificial Sequence
  Synthetic
gtttgacgaaagcgtgaggat

SEQ ID NO: 3612 - DNA, 21 bp, Artificial Sequence
  Synthetic
tttgacgaaagcgtgaggata

SEQ ID NO: 3613 - DNA, 21 bp, Artificial Sequence
  Synthetic
gaaagcgtgaggatatgggat

SEQ ID NO: 3614 - DNA, 21 bp, Artificial Sequence
  Synthetic
ggggcgcgtatgatgggaaat

SEQ ID NO: 3615 - DNA, 21 bp, Artificial Sequence
  Synthetic
ggcgcgtatgatgggaaattt

SEQ ID NO: 3616 - DNA, 21 bp, Artificial Sequence
  Synthetic
aggctacatcggatattccct

SEQ ID NO: 3617 - DNA, 21 bp, Artificial Sequence
  Synthetic
caggctacatcggatattccc

SEQ ID NO: 3618 - DNA, 21 bp, Artificial Sequence
  Synthetic
gaatctgacgaccaggctaca

SEQ ID NO: 3619 - DNA, 21 bp, Artificial Sequence
  Synthetic
ctgaggcagaaacaagaaggt

SEQ ID NO: 3620 - DNA, 21 bp, Artificial Sequence
  Synthetic
tttgtcatctgaggcagaaac

SEQ ID NO: 3621 - DNA, 21 bp, Artificial Sequence
  Synthetic
tctgcctcagatgacaaaacc

SEQ ID NO: 3622 - DNA, 21 bp, Artificial Sequence
  Synthetic
agatgacaaaaccttgaagat

SEQ ID NO: 3623 - DNA, 21 bp, Artificial Sequence
  Synthetic
gatgacaaaaccttgaagata

SEQ ID NO: 3624 - DNA, 21 bp, Artificial Sequence
  Synthetic
aaaaccttgaagatatgggac

SEQ ID NO: 3625 - DNA, 21 bp, Artificial Sequence
  Synthetic
cttcagacgaaagagattgta

SEQ ID NO: 3626 - DNA, 21 bp, Artificial Sequence
  Synthetic
agaaactacaaggccacacag

SEQ ID NO: 3627 - DNA, 21 bp, Artificial Sequence
  Synthetic
aaactacaaggccacacaggt

SEQ ID NO: 3628 - DNA, 21 bp, Artificial Sequence
  Synthetic
aagctgttgagatcacgacat

SEQ ID NO: 3629 - DNA, 21 bp, Artificial Sequence
  Synthetic
tctcaacagcttgtcacccaa

SEQ ID NO: 3630 - DNA, 21 bp, Artificial Sequence
  Synthetic
tttctgttgggtgacaagctg

SEQ ID NO: 3631 - DNA, 21 bp, Artificial Sequence
  Synthetic
acatcatcgcctctgctgcgc

SEQ ID NO: 3632 - DNA, 21 bp, Artificial Sequence
  Synthetic
aaatgacaaaacaattaaact

SEQ ID NO: 3633 - DNA, 21 bp, Artificial Sequence
  Synthetic
aatgacaaaacaattaaactg

SEQ ID NO: 3634 - DNA, 21 bp, Artificial Sequence
  Synthetic
gacaaaacaattaaactgtgg

SEQ ID NO: 3635 - DNA, 21 bp, Artificial Sequence
  Synthetic
gacaccgcctcaggccagtgc

SEQ ID NO: 3636 - DNA, 21 bp, Artificial Sequence
  Synthetic
tgagcgtcttcaggcactggc

SEQ ID NO: 3637 - DNA, 21 bp, Artificial Sequence
  Synthetic
agtgcctgaagacgctcatcg

SEQ ID NO: 3638 - DNA, 21 bp, Artificial Sequence
  Synthetic
agaacttcacaaaagacacgg

SEQ ID NO: 3639 - DNA, 21 bp, Artificial Sequence
  Synthetic
gagaacttcacaaaagacacg

SEQ ID NO: 3640 - DNA, 21 bp, Artificial Sequence
  Synthetic
ggagaacttcacaaaagacac

SEQ ID NO: 3641 - DNA, 21 bp, Artificial Sequence
  Synthetic
gggagaacttcacaaaagaca

SEQ ID NO: 3642 - DNA, 21 bp, Artificial Sequence
  Synthetic
ggggagaacttcacaaaagac

SEQ ID NO: 3643 - DNA, 21 bp, Artificial Sequence
  Synthetic
aggatgtatttgccgttcggg

SEQ ID NO: 3644 - DNA, 21 bp, Artificial Sequence
  Synthetic
ccaggatgtatttgccgttcg

SEQ ID NO: 3645 - DNA, 21 bp, Artificial Sequence
  Synthetic
gccaggatgtatttgccgttc

SEQ ID NO: 3646 - DNA, 21 bp, Artificial Sequence
  Synthetic
ggccaggatgtatttgccgtt

SEQ ID NO: 3647 - DNA, 21 bp, Artificial Sequence
  Synthetic
cggccaggatgtatttgccgt

SEQ ID NO: 3648 - DNA, 21 bp, Artificial Sequence
  Synthetic
aaatacatcctggccgccacg

SEQ ID NO: 3649 - DNA, 21 bp, Artificial Sequence
  Synthetic
tcacttgtccagcgtggcggc

SEQ ID NO: 3650 - DNA, 21 bp, Artificial Sequence
  Synthetic
cctggccgccacgctggacaa

SEQ ID NO: 3651 - DNA, 21 bp, Artificial Sequence
  Synthetic
ctctctctgtcttgcagcact

SEQ ID NO: 3652 - DNA, 21 bp, Artificial Sequence
  Synthetic
gtcttgcagcactctgaagct

SEQ ID NO: 3653 - DNA, 21 bp, Artificial Sequence
  Synthetic
tcttgcagcactctgaagctc

SEQ ID NO: 3654 - DNA, 21 bp, Artificial Sequence
  Synthetic
cttgctgtagtcccagagctt

SEQ ID NO: 3655 - DNA, 21 bp, Artificial Sequence
  Synthetic
accttccccttgctgtagtcc

SEQ ID NO: 3656 - DNA, 21 bp, Artificial Sequence
  Synthetic
gtggccagcaagggtgaactt

SEQ ID NO: 3657 - DNA, 21 bp, Artificial Sequence
  Synthetic
gctttggtgtggccagcaagg

SEQ ID NO: 3658 - DNA, 21 bp, Artificial Sequence
  Synthetic
cactgctttggtgtggccagc

SEQ ID NO: 3659 - DNA, 21 bp, Artificial Sequence
  Synthetic
cacaccaaagcagtgtcctcc

SEQ ID NO: 3660 - DNA, 21 bp, Artificial Sequence
  Synthetic
gtgtcctccgtgaaattcagc

SEQ ID NO: 3661 - DNA, 21 bp, Artificial Sequence
  Synthetic
ccattcgggctgaatttcacg

SEQ ID NO: 3662 - DNA, 21 bp, Artificial Sequence
  Synthetic
cctccgtgaaattcagcccga

SEQ ID NO: 3663 - DNA, 21 bp, Artificial Sequence
  Synthetic
ctccattcgggctgaatttca

SEQ ID NO: 3664 - DNA, 21 bp, Artificial Sequence
  Synthetic
ctccgtgaaattcagcccgaa

SEQ ID NO: 3665 - DNA, 21 bp, Artificial Sequence
  Synthetic
tctccattcgggctgaatttc

SEQ ID NO: 3666 - DNA, 21 bp, Artificial Sequence
  Synthetic
ccgtgaaattcagcccgaatg

SEQ ID NO: 3667 - DNA, 21 bp, Artificial Sequence
  Synthetic
gccagccactctccattcggg

SEQ ID NO: 3668 - DNA, 21 bp, Artificial Sequence
  Synthetic
aacttgccagccactctccat

SEQ ID NO: 3669 - DNA, 21 bp, Artificial Sequence
  Synthetic
tgctgataaacttattaaaat

SEQ ID NO: 3670 - DNA, 21 bp, Artificial Sequence
  Synthetic
gctgataaacttattaaaatt

SEQ ID NO: 3671 - DNA, 21 bp, Artificial Sequence
  Synthetic
tccgagtgagctggcaaagtc

SEQ ID NO: 3672 - DNA, 21 bp, Artificial Sequence
  Synthetic
ctcaagactttgccagctcac

SEQ ID NO: 3673 - DNA, 21 bp, Artificial Sequence
  Synthetic
tacggccgagactggatccga

SEQ ID NO: 3674 - DNA, 21 bp, Artificial Sequence
  Synthetic
gacttacggccgagactggat

SEQ ID NO: 3675 - DNA, 21 bp, Artificial Sequence
  Synthetic
cagagggacttacggccgaga

SEQ ID NO: 3676 - DNA, 21 bp, Artificial Sequence
  Synthetic
catcacgattaaaatgaacct

SEQ ID NO: 3677 - DNA, 21 bp, Artificial Sequence
  Synthetic
ccatcacgattaaaatgaacc

SEQ ID NO: 3678 - DNA, 21 bp, Artificial Sequence
  Synthetic
caaggatccatcacgattaaa

SEQ ID NO: 3679 - DNA, 21 bp, Artificial Sequence
  Synthetic
tcatagctacttgaaactatc

SEQ ID NO: 3680 - DNA, 21 bp, Artificial Sequence
  Synthetic
accagagaccatcatagctac

SEQ ID NO: 3681 - DNA, 21 bp, Artificial Sequence
  Synthetic
ctctttgcttcgaagtcgcat

SEQ ID NO: 3682 - DNA, 21 bp, Artificial Sequence
  Synthetic
tctttgcttcgaagtcgcatc

SEQ ID NO: 3683 - DNA, 21 bp, Artificial Sequence
  Synthetic
ggcggtgtcccagatgcgact

SEQ ID NO: 3684 - DNA, 21 bp, Artificial Sequence
  Synthetic
gccaccatttgccgtgtctgc

SEQ ID NO: 3685 - DNA, 21 bp, Artificial Sequence
  Synthetic
atctggttatgtgcaaccagt

SEQ ID NO: 3686 - DNA, 21 bp, Artificial Sequence
  Synthetic
gccggcaggtgacagtccagg

SEQ ID NO: 3687 - DNA, 21 bp, Artificial Sequence
  Synthetic
ggccggcaggtgacagtccag

SEQ ID NO: 3688 - DNA, 21 bp, Artificial Sequence
  Synthetic
gactgtcacctgccggccctg

SEQ ID NO: 3689 - DNA, 21 bp, Artificial Sequence
  Synthetic
tgccggccctgcaggatgtac

SEQ ID NO: 3690 - DNA, 21 bp, Artificial Sequence
  Synthetic
ggccctgcaggatgtaccagg

SEQ ID NO: 3691 - DNA, 21 bp, Artificial Sequence
  Synthetic
cactcaccctggtacatcctg

SEQ ID NO: 3692 - DNA, 21 bp, Artificial Sequence
  Synthetic
tttcttcaccctagggaggag

SEQ ID NO: 3693 - DNA, 21 bp, Artificial Sequence
  Synthetic
gtgagcagctccactcctccc

SEQ ID NO: 3694 - DNA, 21 bp, Artificial Sequence
  Synthetic
ggtcagggagcacatggcaga

SEQ ID NO: 3695 - DNA, 21 bp, Artificial Sequence
  Synthetic
ttcaggtcagggagcacatgg

SEQ ID NO: 3696 - DNA, 21 bp, Artificial Sequence
  Synthetic
ctgcagaataaagaatccctg

SEQ ID NO: 3697 - DNA, 21 bp, Artificial Sequence
  Synthetic
tccaggatgactttatccgtc

SEQ ID NO: 3698 - DNA, 21 bp, Artificial Sequence
  Synthetic
tccctgacggataaagtcatc

SEQ ID NO: 3699 - DNA, 21 bp, Artificial Sequence
  Synthetic
gtccaggatgactttatccgt

SEQ ID NO: 3700 - DNA, 21 bp, Artificial Sequence
  Synthetic
acggataaagtcatcctggac

SEQ ID NO: 3701 - DNA, 21 bp, Artificial Sequence
  Synthetic
aagtcatcctggacgtgggct

SEQ ID NO: 3702 - DNA, 21 bp, Artificial Sequence
  Synthetic
agtcatcctggacgtgggctg

SEQ ID NO: 3703 - DNA, 21 bp, Artificial Sequence
  Synthetic
cccagtcccacagcccacgtc

SEQ ID NO: 3704 - DNA, 21 bp, Artificial Sequence
  Synthetic
tcctggacgtgggctgtggga

SEQ ID NO: 3705 - DNA, 21 bp, Artificial Sequence
  Synthetic
cctggacgtgggctgtgggac

SEQ ID NO: 3706 - DNA, 21 bp, Artificial Sequence
  Synthetic
ggccgcgcatagtgtgcacag

SEQ ID NO: 3707 - DNA, 21 bp, Artificial Sequence
  Synthetic
ctaggccgcgcatagtgtgca

SEQ ID NO: 3708 - DNA, 21 bp, Artificial Sequence
  Synthetic
ctgtgcacactatgcgcggcc

SEQ ID NO: 3709 - DNA, 21 bp, Artificial Sequence
  Synthetic
cactatgcgcggcctagagcg

SEQ ID NO: 3710 - DNA, 21 bp, Artificial Sequence
  Synthetic
ctgctgctgcaggtgtacgcg

SEQ ID NO: 3711 - DNA, 21 bp, Artificial Sequence
  Synthetic
tgctgctgcaggtgtacgcgg

SEQ ID NO: 3712 - DNA, 21 bp, Artificial Sequence
  Synthetic
aggtgtacgcggtggaggcca

SEQ ID NO: 3713 - DNA, 21 bp, Artificial Sequence
  Synthetic
gccagtgagatggcacagcac

SEQ ID NO: 3714 - DNA, 21 bp, Artificial Sequence
  Synthetic
ccagtgagatggcacagcaca

SEQ ID NO: 3715 - DNA, 21 bp, Artificial Sequence
  Synthetic
cacacggggcagctggtcctg

SEQ ID NO: 3716 - DNA, 21 bp, Artificial Sequence
  Synthetic
gatgtcagcaaagccgttctg

SEQ ID NO: 3717 - DNA, 21 bp, Artificial Sequence
  Synthetic
gacatcatcaccgtgtaccag

SEQ ID NO: 3718 - DNA, 21 bp, Artificial Sequence
  Synthetic
atcaccgtgtaccagcagaag

SEQ ID NO: 3719 - DNA, 21 bp, Artificial Sequence
  Synthetic
tcaccgtgtaccagcagaagg

SEQ ID NO: 3720 - DNA, 21 bp, Artificial Sequence
  Synthetic
accgtgtaccagcagaaggtg

SEQ ID NO: 3721 - DNA, 21 bp, Artificial Sequence
  Synthetic
aggtggaggatgtggtgctgc

SEQ ID NO: 3722 - DNA, 21 bp, Artificial Sequence
  Synthetic
gtggaggatgtggtgctgccc

SEQ ID NO: 3723 - DNA, 21 bp, Artificial Sequence
  Synthetic
gatgtggtgctgcccgagaag

SEQ ID NO: 3724 - DNA, 21 bp, Artificial Sequence
  Synthetic
gacaccagcacgtccaccttc

SEQ ID NO: 3725 - DNA, 21 bp, Artificial Sequence
  Synthetic
agaaggtggacgtgctggtgt

SEQ ID NO: 3726 - DNA, 21 bp, Artificial Sequence
  Synthetic
ggtggacgtgctggtgtctga

SEQ ID NO: 3727 - DNA, 21 bp, Artificial Sequence
  Synthetic
gacgtgctggtgtctgagtgg

SEQ ID NO: 3728 - DNA, 21 bp, Artificial Sequence
  Synthetic
acgtgctggtgtctgagtgga

SEQ ID NO: 3729 - DNA, 21 bp, Artificial Sequence
  Synthetic
cgtgctggtgtctgagtggat

SEQ ID NO: 3730 - DNA, 21 bp, Artificial Sequence
  Synthetic
tggatggggacctgcctgctg

SEQ ID NO: 3731 - DNA, 21 bp, Artificial Sequence
  Synthetic
gatggggacctgcctgctggt

SEQ ID NO: 3732 - DNA, 21 bp, Artificial Sequence
  Synthetic
ctatgcagtttgagttcatga

SEQ ID NO: 3733 - DNA, 21 bp, Artificial Sequence
  Synthetic
gcatacaggatggactcgatc

SEQ ID NO: 3734 - DNA, 21 bp, Artificial Sequence
  Synthetic
gatcgagtccatcctgtatgc

SEQ ID NO: 3735 - DNA, 21 bp, Artificial Sequence
  Synthetic
atcgagtccatcctgtatgcc

SEQ ID NO: 3736 - DNA, 21 bp, Artificial Sequence
  Synthetic
caggcatcccgggcatacagg

SEQ ID NO: 3737 - DNA, 21 bp, Artificial Sequence
  Synthetic
cagccaggcatcccgggcata

SEQ ID NO: 3738 - DNA, 21 bp, Artificial Sequence
  Synthetic
ctgtatgcccgggatgcctgg

SEQ ID NO: 3739 - DNA, 21 bp, Artificial Sequence
  Synthetic
tatgcccgggatgcctggctg

SEQ ID NO: 3740 - DNA, 21 bp, Artificial Sequence
  Synthetic
atgcccgggatgcctggctga

SEQ ID NO: 3741 - DNA, 21 bp, Artificial Sequence
  Synthetic
gcccgggatgcctggctgaag

SEQ ID NO: 3742 - DNA, 21 bp, Artificial Sequence
  Synthetic
gtcctccttcagccaggcatc

SEQ ID NO: 3743 - DNA, 21 bp, Artificial Sequence
  Synthetic
gggatgcctggctgaaggagg

SEQ ID NO: 3744 - DNA, 21 bp, Artificial Sequence
  Synthetic
ggatgcctggctgaaggagga

SEQ ID NO: 3745 - DNA, 21 bp, Artificial Sequence
  Synthetic
acaaggtgcaacgcagccatg

SEQ ID NO: 3746 - DNA, 21 bp, Artificial Sequence
  Synthetic
cttgtgccctgcagtgctgat

SEQ ID NO: 3747 - DNA, 21 bp, Artificial Sequence
  Synthetic
cgataatccttatcagcactg

SEQ ID NO: 3748 - DNA, 21 bp, Artificial Sequence
  Synthetic
ttatcgtagcaaggtgctctt

SEQ ID NO: 3749 - DNA, 21 bp, Artificial Sequence
  Synthetic
tatcgtagcaaggtgctcttc

SEQ ID NO: 3750 - DNA, 21 bp, Artificial Sequence
  Synthetic
tgctcttctgggacaacgcgt

SEQ ID NO: 3751 - DNA, 21 bp, Artificial Sequence
  Synthetic
aactcgtacgcgttgtcccag

SEQ ID NO: 3752 - DNA, 21 bp, Artificial Sequence
  Synthetic
ttgaactcgtacgcgttgtcc

SEQ ID NO: 3753 - DNA, 21 bp, Artificial Sequence
  Synthetic
tacgagttcaacctcagcgct

SEQ ID NO: 3754 - DNA, 21 bp, Artificial Sequence
  Synthetic
acttacttcagagcgctgagg

SEQ ID NO: 3755 - DNA, 21 bp, Artificial Sequence
  Synthetic
gtggacacttacttcagagcg

SEQ ID NO: 3756 - DNA, 21 bp, Artificial Sequence
  Synthetic
tcccctagatctttagcagtt

SEQ ID NO: 3757 - DNA, 21 bp, Artificial Sequence
  Synthetic
ctccttaactgctaaagatct

SEQ ID NO: 3758 - DNA, 21 bp, Artificial Sequence
  Synthetic
cccctagatctttagcagtta

SEQ ID NO: 3759 - DNA, 21 bp, Artificial Sequence
  Synthetic
actccttaactgctaaagatc

SEQ ID NO: 3760 - DNA, 21 bp, Artificial Sequence
  Synthetic
aaatgtggttatacttgggct

SEQ ID NO: 3761 - DNA, 21 bp, Artificial Sequence
  Synthetic
aagcccaagtataaccacatt

SEQ ID NO: 3762 - DNA, 21 bp, Artificial Sequence
  Synthetic
ggtttcaaaatgtggttatac

SEQ ID NO: 3763 - DNA, 21 bp, Artificial Sequence
  Synthetic
tgaaaccagaagactgtctct

SEQ ID NO: 3764 - DNA, 21 bp, Artificial Sequence
  Synthetic
tgcaatatagtgcacggttca

SEQ ID NO: 3765 - DNA, 21 bp, Artificial Sequence
  Synthetic
actgcaatatagtgcacggtt

SEQ ID NO: 3766 - DNA, 21 bp, Artificial Sequence
  Synthetic
gaaccgtgcactatattgcag

SEQ ID NO: 3767 - DNA, 21 bp, Artificial Sequence
  Synthetic
tgcactatattgcagttggac

SEQ ID NO: 3768 - DNA, 21 bp, Artificial Sequence
  Synthetic
cactatattgcagttggacat

SEQ ID NO: 3769 - DNA, 21 bp, Artificial Sequence
  Synthetic
gaaccgtgcaaatttctgatc

SEQ ID NO: 3770 - DNA, 21 bp, Artificial Sequence
  Synthetic
gtgcaaatttctgatctagag

SEQ ID NO: 3771 - DNA, 21 bp, Artificial Sequence
  Synthetic
gcaaatttctgatctagaggt

SEQ ID NO: 3772 - DNA, 21 bp, Artificial Sequence
  Synthetic
catctgcttgacccagaccct

SEQ ID NO: 3773 - DNA, 21 bp, Artificial Sequence
  Synthetic
atctgcttgacccagaccctg

SEQ ID NO: 3774 - DNA, 21 bp, Artificial Sequence
  Synthetic
gcttgacccagaccctgaggg

SEQ ID NO: 3775 - DNA, 21 bp, Artificial Sequence
  Synthetic
gcgcagctcgcccctcagggt

SEQ ID NO: 3776 - DNA, 21 bp, Artificial Sequence
  Synthetic
gtcgaagcgcagctcgcccct

SEQ ID NO: 3777 - DNA, 21 bp, Artificial Sequence
  Synthetic
gggcgagctgcgcttcgacat

SEQ ID NO: 3778 - DNA, 21 bp, Artificial Sequence
  Synthetic
ggcgagctgcgcttcgacatc

SEQ ID NO: 3779 - DNA, 21 bp, Artificial Sequence
  Synthetic
ctgcgcttcgacatcaggaag

SEQ ID NO: 3780 - DNA, 21 bp, Artificial Sequence
  Synthetic
tgcgcttcgacatcaggaagg

SEQ ID NO: 3781 - DNA, 21 bp, Artificial Sequence
  Synthetic
gcgcttcgacatcaggaaggc

SEQ ID NO: 3782 - DNA, 21 bp, Artificial Sequence
  Synthetic
agggtccccgccttcctgatg

SEQ ID NO: 3783 - DNA, 21 bp, Artificial Sequence
  Synthetic
aaaccaggccgtgaagccgtg

SEQ ID NO: 3784 - DNA, 21 bp, Artificial Sequence
  Synthetic
aagtggacgctaaaccaggcc

SEQ ID NO: 3785 - DNA, 21 bp, Artificial Sequence
  Synthetic
gcctggtttagcgtccacttc

SEQ ID NO: 3786 - DNA, 21 bp, Artificial Sequence
  Synthetic
agcgtccacttccagagcctg

SEQ ID NO: 3787 - DNA, 21 bp, Artificial Sequence
  Synthetic
gcgtccacttccagagcctgc

SEQ ID NO: 3788 - DNA, 21 bp, Artificial Sequence
  Synthetic
gtccacttccagagcctgcag

SEQ ID NO: 3789 - DNA, 21 bp, Artificial Sequence
  Synthetic
cccctcctgcaggctctggaa

SEQ ID NO: 3790 - DNA, 21 bp, Artificial Sequence
  Synthetic
tccacttccagagcctgcagg

SEQ ID NO: 3791 - DNA, 21 bp, Artificial Sequence
  Synthetic
ggctgcccctcctgcaggctc

SEQ ID NO: 3792 - DNA, 21 bp, Artificial Sequence
  Synthetic
cggctgcccctcctgcaggct

SEQ ID NO: 3793 - DNA, 21 bp, Artificial Sequence
  Synthetic
agccgccgcaggtgctcagca

SEQ ID NO: 3794 - DNA, 21 bp, Artificial Sequence
  Synthetic
cacgggtggaagggcccggtg

SEQ ID NO: 3795 - DNA, 21 bp, Artificial Sequence
  Synthetic
cagcaccgggcccttccaccc

SEQ ID NO: 3796 - DNA, 21 bp, Artificial Sequence
  Synthetic
gccccgcacactcacgggtgg

SEQ ID NO: 3797 - DNA, 21 bp, Artificial Sequence
  Synthetic
cgcgccccgcacactcacggg

SEQ ID NO: 3798 - DNA, 21 bp, Artificial Sequence
  Synthetic
cctgtcttgcagcaccacaca

SEQ ID NO: 3799 - DNA, 21 bp, Artificial Sequence
  Synthetic
ctgtcttgcagcaccacacac

SEQ ID NO: 3800 - DNA, 21 bp, Artificial Sequence
  Synthetic
tggaagcagacgctgttcatg

SEQ ID NO: 3801 - DNA, 21 bp, Artificial Sequence
  Synthetic
acagggactgggtcgtccatc

SEQ ID NO: 3802 - DNA, 21 bp, Artificial Sequence
  Synthetic
acgacccagtccctgtccata

SEQ ID NO: 3803 - DNA, 21 bp, Artificial Sequence
  Synthetic
cgacccagtccctgtccatac

SEQ ID NO: 3804 - DNA, 21 bp, Artificial Sequence
  Synthetic
cgtctcctgtatggacaggga

SEQ ID NO: 3805 - DNA, 21 bp, Artificial Sequence
  Synthetic
gaccacgtctcctgtatggac

SEQ ID NO: 3806 - DNA, 21 bp, Artificial Sequence
  Synthetic
tgaccacgtctcctgtatgga

SEQ ID NO: 3807 - DNA, 21 bp, Artificial Sequence
  Synthetic
gtccatacaggagacgtggtc

SEQ ID NO: 3808 - DNA, 21 bp, Artificial Sequence
  Synthetic
acccgtgaccacgtctcctgt

SEQ ID NO: 3809 - DNA, 21 bp, Artificial Sequence
  Synthetic
gtcacgggttcagttgtgttg

SEQ ID NO: 3810 - DNA, 21 bp, Artificial Sequence
  Synthetic
cacgggttcagttgtgttgca

SEQ ID NO: 3811 - DNA, 21 bp, Artificial Sequence
  Synthetic
ctgggtttctctgcaacacaa

SEQ ID NO: 3812 - DNA, 21 bp, Artificial Sequence
  Synthetic
tccagcaccaccttgtccttg

SEQ ID NO: 3813 - DNA, 21 bp, Artificial Sequence
  Synthetic
ctcttcaaggacaaggtggtg

SEQ ID NO: 3814 - DNA, 21 bp, Artificial Sequence
  Synthetic
acgtccagcaccaccttgtcc

SEQ ID NO: 3815 - DNA, 21 bp, Artificial Sequence
  Synthetic
aaggtggtgctggacgtcggc

SEQ ID NO: 3816 - DNA, 21 bp, Artificial Sequence
  Synthetic
acatgcagaggatgccggtgc

SEQ ID NO: 3817 - DNA, 21 bp, Artificial Sequence
  Synthetic
ggccttggcagcaaacatgca

SEQ ID NO: 3818 - DNA, 21 bp, Artificial Sequence
  Synthetic
ccggccttggcagcaaacatg

SEQ ID NO: 3819 - DNA, 21 bp, Artificial Sequence
  Synthetic
tctgcatgtttgctgccaagg

SEQ ID NO: 3820 - DNA, 21 bp, Artificial Sequence
  Synthetic
ctgcatgtttgctgccaaggc

SEQ ID NO: 3821 - DNA, 21 bp, Artificial Sequence
  Synthetic
aggccggggcccgcaaggtca

SEQ ID NO: 3822 - DNA, 21 bp, Artificial Sequence
  Synthetic
ggccggggcccgcaaggtcat

SEQ ID NO: 3823 - DNA, 21 bp, Artificial Sequence
  Synthetic
ggggcccgcaaggtcatcggg

SEQ ID NO: 3824 - DNA, 21 bp, Artificial Sequence
  Synthetic
gagactcaccccgatgacctt

SEQ ID NO: 3825 - DNA, 21 bp, Artificial Sequence
  Synthetic
agatactggaacactcgatct

SEQ ID NO: 3826 - DNA, 21 bp, Artificial Sequence
  Synthetic
agagatactggaacactcgat

SEQ ID NO: 3827 - DNA, 21 bp, Artificial Sequence
  Synthetic
tcaccgcataatcagagatac

SEQ ID NO: 3828 - DNA, 21 bp, Artificial Sequence
  Synthetic
ttcaccgcataatcagagata

SEQ ID NO: 3829 - DNA, 21 bp, Artificial Sequence
  Synthetic
tccagtatctctgattatgcg

SEQ ID NO: 3830 - DNA, 21 bp, Artificial Sequence
  Synthetic
tgacgatcttcaccgcataat

SEQ ID NO: 3831 - DNA, 21 bp, Artificial Sequence
  Synthetic
aagccaacaagttagaccacg

SEQ ID NO: 3832 - DNA, 21 bp, Artificial Sequence
  Synthetic
cccttgatgatggtcaccact

SEQ ID NO: 3833 - DNA, 21 bp, Artificial Sequence
  Synthetic
cccgcagtggtgaccatcatc

SEQ ID NO: 3834 - DNA, 21 bp, Artificial Sequence
  Synthetic
ccgcagtggtgaccatcatca

SEQ ID NO: 3835 - DNA, 21 bp, Artificial Sequence
  Synthetic
cgcagtggtgaccatcatcaa

SEQ ID NO: 3836 - DNA, 21 bp, Artificial Sequence
  Synthetic
gcagtggtgaccatcatcaag

SEQ ID NO: 3837 - DNA, 21 bp, Artificial Sequence
  Synthetic
gtgaccatcatcaaggggaag

SEQ ID NO: 3838 - DNA, 21 bp, Artificial Sequence
  Synthetic
tgaccatcatcaaggggaagg

SEQ ID NO: 3839 - DNA, 21 bp, Artificial Sequence
  Synthetic
accatcatcaaggggaaggtg

SEQ ID NO: 3840 - DNA, 21 bp, Artificial Sequence
  Synthetic
ccatcatcaaggggaaggtgg

SEQ ID NO: 3841 - DNA, 21 bp, Artificial Sequence
  Synthetic
atcaaggggaaggtggaggag

SEQ ID NO: 3842 - DNA, 21 bp, Artificial Sequence
  Synthetic
tcaaggggaaggtggaggagg

SEQ ID NO: 3843 - DNA, 21 bp, Artificial Sequence
  Synthetic
gtggaggaggtggagctccca

SEQ ID NO: 3844 - DNA, 21 bp, Artificial Sequence
  Synthetic
tggaggaggtggagctcccag

SEQ ID NO: 3845 - DNA, 21 bp, Artificial Sequence
  Synthetic
gaggaggtggagctcccagtg

SEQ ID NO: 3846 - DNA, 21 bp, Artificial Sequence
  Synthetic
gtggagctcccagtggagaag

SEQ ID NO: 3847 - DNA, 21 bp, Artificial Sequence
  Synthetic
atgatgtccaccttctccact

SEQ ID NO: 3848 - DNA, 21 bp, Artificial Sequence
  Synthetic
gatgatgtccaccttctccac

SEQ ID NO: 3849 - DNA, 21 bp, Artificial Sequence
  Synthetic
tgatgatgtccaccttctcca

SEQ ID NO: 3850 - DNA, 21 bp, Artificial Sequence
  Synthetic
agaaggtggacatcatcatca

SEQ ID NO: 3851 - DNA, 21 bp, Artificial Sequence
  Synthetic
ggtggacatcatcatcagcga

SEQ ID NO: 3852 - DNA, 21 bp, Artificial Sequence
  Synthetic
ttcatggcaatagaggtaaag

SEQ ID NO: 3853 - DNA, 21 bp, Artificial Sequence
  Synthetic
ttctgctttacctctattgcc

SEQ ID NO: 3854 - DNA, 21 bp, Artificial Sequence
  Synthetic
tcaatacttaattcatggcaa

SEQ ID NO: 3855 - DNA, 21 bp, Artificial Sequence
  Synthetic
tctattgccatgaattaagta

SEQ ID NO: 3856 - DNA, 21 bp, Artificial Sequence
  Synthetic
catgaattaagtattgaattc

SEQ ID NO: 3857 - DNA, 21 bp, Artificial Sequence
  Synthetic
atgaattaagtattgaattcc

SEQ ID NO: 3858 - DNA, 21 bp, Artificial Sequence
  Synthetic
accgaagcaggaacaggctcc

SEQ ID NO: 3859 - DNA, 21 bp, Artificial Sequence
  Synthetic
caccgaagcaggaacaggctc

SEQ ID NO: 3860 - DNA, 21 bp, Artificial Sequence
  Synthetic
caggagcctgttcctgcttcg

SEQ ID NO: 3861 - DNA, 21 bp, Artificial Sequence
  Synthetic
aggtaggcaactcaccgaagc

SEQ ID NO: 3862 - DNA, 21 bp, Artificial Sequence
  Synthetic
aaggtaggcaactcaccgaag

SEQ ID NO: 3863 - DNA, 21 bp, Artificial Sequence
  Synthetic
ccaaactactataaaattata

SEQ ID NO: 3864 - DNA, 21 bp, Artificial Sequence
  Synthetic
tataaaattataaagaaacca

SEQ ID NO: 3865 - DNA, 21 bp, Artificial Sequence
  Synthetic
aaaccaatggatttatccacc

SEQ ID NO: 3866 - DNA, 21 bp, Artificial Sequence
  Synthetic
atggatttatccaccgtgaaa

SEQ ID NO: 3867 - DNA, 21 bp, Artificial Sequence
  Synthetic
tccaccgtgaaaaagaagctt

SEQ ID NO: 3868 - DNA, 21 bp, Artificial Sequence
  Synthetic
cattcccaacactaccaaatc

SEQ ID NO: 3869 - DNA, 21 bp, Artificial Sequence
  Synthetic
catccgggatttggtagtgtt

SEQ ID NO: 3870 - DNA, 21 bp, Artificial Sequence
  Synthetic
tcatccgggatttggtagtgt

SEQ ID NO: 3871 - DNA, 21 bp, Artificial Sequence
  Synthetic
gtcatccgggatttggtagtg

SEQ ID NO: 3872 - DNA, 21 bp, Artificial Sequence
  Synthetic
gacatcggccacaaagtcatc

SEQ ID NO: 3873 - DNA, 21 bp, Artificial Sequence
  Synthetic
ggacatcggccacaaagtcat

SEQ ID NO: 3874 - DNA, 21 bp, Artificial Sequence
  Synthetic
gccgatgtccgtttgatcttc

SEQ ID NO: 3875 - DNA, 21 bp, Artificial Sequence
  Synthetic
ttcacagttcttgaagatcaa

SEQ ID NO: 3876 - DNA, 21 bp, Artificial Sequence
  Synthetic
tccgtttgatcttcaagaact

SEQ ID NO: 3877 - DNA, 21 bp, Artificial Sequence
  Synthetic
tcattaaacctttcacagttc

SEQ ID NO: 3878 - DNA, 21 bp, Artificial Sequence
  Synthetic
tcaagaactgtgaaaggttta

SEQ ID NO: 3879 - DNA, 21 bp, Artificial Sequence
  Synthetic
ctcttgtgtgtctgcataaac

SEQ ID NO: 3880 - DNA, 21 bp, Artificial Sequence
  Synthetic
actggtgtgctgtctgccaaa

SEQ ID NO: 3881 - DNA, 21 bp, Artificial Sequence
  Synthetic
ctggtgtgctgtctgccaaaa

SEQ ID NO: 3882 - DNA, 21 bp, Artificial Sequence
  Synthetic
ggtgtgctgtctgccaaaacg

SEQ ID NO: 3883 - DNA, 21 bp, Artificial Sequence
  Synthetic
gtgtgctgtctgccaaaacgg

SEQ ID NO: 3884 - DNA, 21 bp, Artificial Sequence
  Synthetic
acggaggagatctcttgtgct

SEQ ID NO: 3885 - DNA, 21 bp, Artificial Sequence
  Synthetic
gacaagttagatgaaagacct

SEQ ID NO: 3886 - DNA, 21 bp, Artificial Sequence
  Synthetic
tgttggaacatgacaagttag

SEQ ID NO: 3887 - DNA, 21 bp, Artificial Sequence
  Synthetic
ccttggaaagctaagtagtgt

SEQ ID NO: 3888 - DNA, 21 bp, Artificial Sequence
  Synthetic
accttggaaagctaagtagtg

SEQ ID NO: 3889 - DNA, 21 bp, Artificial Sequence
  Synthetic
tatttccctgtctagtgggga

SEQ ID NO: 3890 - DNA, 21 bp, Artificial Sequence
  Synthetic
atggagagcatcctgcaggca

SEQ ID NO: 3891 - DNA, 21 bp, Artificial Sequence
  Synthetic
tggagagcatcctgcaggcac

SEQ ID NO: 3892 - DNA, 21 bp, Artificial Sequence
  Synthetic
gagagcatcctgcaggcactg

SEQ ID NO: 3893 - DNA, 21 bp, Artificial Sequence
  Synthetic
ctgaatatcctccagtgcctg

SEQ ID NO: 3894 - DNA, 21 bp, Artificial Sequence
  Synthetic
caggcactggaggatattcag

SEQ ID NO: 3895 - DNA, 21 bp, Artificial Sequence
  Synthetic
ctggaggatattcagctggat

SEQ ID NO: 3896 - DNA, 21 bp, Artificial Sequence
  Synthetic
tggaggatattcagctggatc

SEQ ID NO: 3897 - DNA, 21 bp, Artificial Sequence
  Synthetic
attcagctggatctggaggca

SEQ ID NO: 3898 - DNA, 21 bp, Artificial Sequence
  Synthetic
gttcactgcctccagatccag

SEQ ID NO: 3899 - DNA, 21 bp, Artificial Sequence
  Synthetic
atgaacttgcgcttgagacgc

SEQ ID NO: 3900 - DNA, 21 bp, Artificial Sequence
  Synthetic
gatgaacttgcgcttgagacg

SEQ ID NO: 3901 - DNA, 21 bp, Artificial Sequence
  Synthetic
cgcatctggatgaacttgcgc

SEQ ID NO: 3902 - DNA, 21 bp, Artificial Sequence
  Synthetic
caagcgcaagttcatccagat

SEQ ID NO: 3903 - DNA, 21 bp, Artificial Sequence
  Synthetic
aggaagggtcttcgcatctgg

SEQ ID NO: 3904 - DNA, 21 bp, Artificial Sequence
  Synthetic
atccagatgcgaagacccttc

SEQ ID NO: 3905 - DNA, 21 bp, Artificial Sequence
  Synthetic
ctccaggaagggtcttcgcat

SEQ ID NO: 3906 - DNA, 21 bp, Artificial Sequence
  Synthetic
tccagatgcgaagacccttcc

SEQ ID NO: 3907 - DNA, 21 bp, Artificial Sequence
  Synthetic
gcgaagacccttcctggagcg

SEQ ID NO: 3908 - DNA, 21 bp, Artificial Sequence
  Synthetic
atgaggtctctgcgctccagg

SEQ ID NO: 3909 - DNA, 21 bp, Artificial Sequence
  Synthetic
atgatgaggtctctgcgctcc

SEQ ID NO: 3910 - DNA, 21 bp, Artificial Sequence
  Synthetic
gatgatgaggtctctgcgctc

SEQ ID NO: 3911 - DNA, 21 bp, Artificial Sequence
  Synthetic
aagcctgggatatgctggatg

SEQ ID NO: 3912 - DNA, 21 bp, Artificial Sequence
  Synthetic
catccagcatatcccaggctt

SEQ ID NO: 3913 - DNA, 21 bp, Artificial Sequence
  Synthetic
gacccagaagcctgggatatg

SEQ ID NO: 3914 - DNA, 21 bp, Artificial Sequence
  Synthetic
tactgctttgacccagaagcc

SEQ ID NO: 3915 - DNA, 21 bp, Artificial Sequence
  Synthetic
atactgctttgacccagaagc

SEQ ID NO: 3916 - DNA, 21 bp, Artificial Sequence
  Synthetic
tagaaggatactgctttgacc

SEQ ID NO: 3917 - DNA, 21 bp, Artificial Sequence
  Synthetic
tcatcagttcctcaaccaccc

SEQ ID NO: 3918 - DNA, 21 bp, Artificial Sequence
  Synthetic
attgaaattctggggtggttg

SEQ ID NO: 3919 - DNA, 21 bp, Artificial Sequence
  Synthetic
aattgaaattctggggtggtt

SEQ ID NO: 3920 - DNA, 21 bp, Artificial Sequence
  Synthetic
aaaattgaaattctggggtgg

SEQ ID NO: 3921 - DNA, 21 bp, Artificial Sequence
  Synthetic
ggttgatcaaaattgaaattc

SEQ ID NO: 3922 - DNA, 21 bp, Artificial Sequence
  Synthetic
cggttgatcaaaattgaaatt

SEQ ID NO: 3923 - DNA, 21 bp, Artificial Sequence
  Synthetic
catcacgtcggttgatcaaaa

SEQ ID NO: 3924 - DNA, 21 bp, Artificial Sequence
  Synthetic
acctgcagattggtcaagtag

SEQ ID NO: 3925 - DNA, 21 bp, Artificial Sequence
  Synthetic
gacctgcagattggtcaagta

SEQ ID NO: 3926 - DNA, 21 bp, Artificial Sequence
  Synthetic
caggatctcagacatatctcc

SEQ ID NO: 3927 - DNA, 21 bp, Artificial Sequence
  Synthetic
ttgtagcccatggagatatgt

SEQ ID NO: 3928 - DNA, 21 bp, Artificial Sequence
  Synthetic
catatctccatgggctacaaa

SEQ ID NO: 3929 - DNA, 21 bp, Artificial Sequence
  Synthetic
tttgtgaagtaggggttagtc

SEQ ID NO: 3930 - DNA, 21 bp, Artificial Sequence
  Synthetic
gtttgtgaagtaggggttagt

SEQ ID NO: 3931 - DNA, 21 bp, Artificial Sequence
  Synthetic
caatcaccatgtttgtgaagt

SEQ ID NO: 3932 - DNA, 21 bp, Artificial Sequence
  Synthetic
acaatcaccatgtttgtgaag

SEQ ID NO: 3933 - DNA, 21 bp, Artificial Sequence
  Synthetic
tccttgacaatcaccatgttt

SEQ ID NO: 3934 - DNA, 21 bp, Artificial Sequence
  Synthetic
ttcacaaacatggtgattgtc

SEQ ID NO: 3935 - DNA, 21 bp, Artificial Sequence
  Synthetic
tcacaaacatggtgattgtca

SEQ ID NO: 3936 - DNA, 21 bp, Artificial Sequence
  Synthetic
cacttacctgagcggttgcgc

SEQ ID NO: 3937 - DNA, 21 bp, Artificial Sequence
  Synthetic
ccacttacctgagcggttgcg

SEQ ID NO: 3938 - DNA, 21 bp, Artificial Sequence
  Synthetic
gagtgagacaccagccggcct

SEQ ID NO: 3939 - DNA, 21 bp, Artificial Sequence
  Synthetic
tgagtgagacaccagccggcc

SEQ ID NO: 3940 - DNA, 21 bp, Artificial Sequence
  Synthetic
gtgccagcggattggggttga

SEQ ID NO: 3941 - DNA, 21 bp, Artificial Sequence
  Synthetic
cccggtgccagcggattgggg

SEQ ID NO: 3942 - DNA, 21 bp, Artificial Sequence
  Synthetic
ctcaaccccaatccgctggca

SEQ ID NO: 3943 - DNA, 21 bp, Artificial Sequence
  Synthetic
tcaaccccaatccgctggcac

SEQ ID NO: 3944 - DNA, 21 bp, Artificial Sequence
  Synthetic
ctggccccggtgccagcggat

SEQ ID NO: 3945 - DNA, 21 bp, Artificial Sequence
  Synthetic
cctggccccggtgccagcgga

SEQ ID NO: 3946 - DNA, 21 bp, Artificial Sequence
  Synthetic
ccaatccgctggcaccggggc

SEQ ID NO: 3947 - DNA, 21 bp, Artificial Sequence
  Synthetic
caatccgctggcaccggggcc

SEQ ID NO: 3948 - DNA, 21 bp, Artificial Sequence
  Synthetic
gggttcctggccccggtgcca

SEQ ID NO: 3949 - DNA, 21 bp, Artificial Sequence
  Synthetic
aggaaccccaggcccgtcgtc

SEQ ID NO: 3950 - DNA, 21 bp, Artificial Sequence
  Synthetic
ggaaccccaggcccgtcgtca

SEQ ID NO: 3951 - DNA, 21 bp, Artificial Sequence
  Synthetic
gaaccccaggcccgtcgtcac

SEQ ID NO: 3952 - DNA, 21 bp, Artificial Sequence
  Synthetic
tggttcccgtgacgacgggcc

SEQ ID NO: 3953 - DNA, 21 bp, Artificial Sequence
  Synthetic
ctggttcccgtgacgacgggc

SEQ ID NO: 3954 - DNA, 21 bp, Artificial Sequence
  Synthetic
caggcccgtcgtcacgggaac

SEQ ID NO: 3955 - DNA, 21 bp, Artificial Sequence
  Synthetic
cgcatcctggttcccgtgacg

SEQ ID NO: 3956 - DNA, 21 bp, Artificial Sequence
  Synthetic
cgtcgtcacgggaaccaggat

SEQ ID NO: 3957 - DNA, 21 bp, Artificial Sequence
  Synthetic
aggctatggtttgagaaccag

SEQ ID NO: 3958 - DNA, 21 bp, Artificial Sequence
  Synthetic
ggttctcaaaccatagcctcc

SEQ ID NO: 3959 - DNA, 21 bp, Artificial Sequence
  Synthetic
gcctctgggaggctatggttt

SEQ ID NO: 3960 - DNA, 21 bp, Artificial Sequence
  Synthetic
cagcctctgggaggctatggt

SEQ ID NO: 3961 - DNA, 21 bp, Artificial Sequence
  Synthetic
ccatagcctcccagaggctga

SEQ ID NO: 3962 - DNA, 21 bp, Artificial Sequence
  Synthetic
tcagcaatcctgtcagcctct

SEQ ID NO: 3963 - DNA, 21 bp, Artificial Sequence
  Synthetic
ctcagcaatcctgtcagcctc

SEQ ID NO: 3964 - DNA, 21 bp, Artificial Sequence
  Synthetic
tcccagaggctgacaggattg

SEQ ID NO: 3965 - DNA, 21 bp, Artificial Sequence
  Synthetic
cctcagcaatcctgtcagcct

SEQ ID NO: 3966 - DNA, 21 bp, Artificial Sequence
  Synthetic
gaggctgacaggattgctgag

SEQ ID NO: 3967 - DNA, 21 bp, Artificial Sequence
  Synthetic
aggctgacaggattgctgagg

SEQ ID NO: 3968 - DNA, 21 bp, Artificial Sequence
  Synthetic
acagattatcaagaatgatct

SEQ ID NO: 3969 - DNA, 21 bp, Artificial Sequence
  Synthetic
gttaaccctctacgctactac

SEQ ID NO: 3970 - DNA, 21 bp, Artificial Sequence
  Synthetic
taaccctctacgctactacct

SEQ ID NO: 3971 - DNA, 21 bp, Artificial Sequence
  Synthetic
accctctacgctactacctga

SEQ ID NO: 3972 - DNA, 21 bp, Artificial Sequence
  Synthetic
tttctctcaggtagtagcgta

SEQ ID NO: 3973 - DNA, 21 bp, Artificial Sequence
  Synthetic
cctttctctcaggtagtagcg

SEQ ID NO: 3974 - DNA, 21 bp, Artificial Sequence
  Synthetic
tctacgctactacctgagaga

SEQ ID NO: 3975 - DNA, 21 bp, Artificial Sequence
  Synthetic
ctacgctactacctgagagaa

SEQ ID NO: 3976 - DNA, 21 bp, Artificial Sequence
  Synthetic
gtacagtggggaggagaaaac

SEQ ID NO: 3977 - DNA, 21 bp, Artificial Sequence
  Synthetic
actgaacaggtggcacaactt

SEQ ID NO: 3978 - DNA, 21 bp, Artificial Sequence
  Synthetic
ttactatagtcacacaaagtc

SEQ ID NO: 3979 - DNA, 21 bp, Artificial Sequence
  Synthetic
cttactatagtcacacaaagt

SEQ ID NO: 3980 - DNA, 21 bp, Artificial Sequence
  Synthetic
cggactttgtgtgactatagt

SEQ ID NO: 3981 - DNA, 21 bp, Artificial Sequence
  Synthetic
gactttgtgtgactatagtaa

SEQ ID NO: 3982 - DNA, 21 bp, Artificial Sequence
  Synthetic
gactatagtaagaggattgca

SEQ ID NO: 3983 - DNA, 21 bp, Artificial Sequence
  Synthetic
atagtaagaggattgcagtgg

SEQ ID NO: 3984 - DNA, 21 bp, Artificial Sequence
  Synthetic
tgcctcatgtagctcttgaaa

SEQ ID NO: 3985 - DNA, 21 bp, Artificial Sequence
  Synthetic
gcctcatgtagctcttgaaat

SEQ ID NO: 3986 - DNA, 21 bp, Artificial Sequence
  Synthetic
tgggaggtcagccccaatttc

SEQ ID NO: 3987 - DNA, 21 bp, Artificial Sequence
  Synthetic
cgatcaatgacatgattagat

SEQ ID NO: 3988 - DNA, 21 bp, Artificial Sequence
  Synthetic
gcgatcaatgacatgattaga

SEQ ID NO: 3989 - DNA, 21 bp, Artificial Sequence
  Synthetic
agcgatcaatgacatgattag

SEQ ID NO: 3990 - DNA, 21 bp, Artificial Sequence
  Synthetic
atcatgtcattgatcgctggc

SEQ ID NO: 3991 - DNA, 21 bp, Artificial Sequence
  Synthetic
tcatgtcattgatcgctggct

SEQ ID NO: 3992 - DNA, 21 bp, Artificial Sequence
  Synthetic
catgtcattgatcgctggctt

SEQ ID NO: 3993 - DNA, 21 bp, Artificial Sequence
  Synthetic
atgtcattgatcgctggcttg

SEQ ID NO: 3994 - DNA, 21 bp, Artificial Sequence
  Synthetic
gtggggagaatggctgctttg

SEQ ID NO: 3995 - DNA, 21 bp, Artificial Sequence
  Synthetic
ggtcaggaaaatgctagtggg

SEQ ID NO: 3996 - DNA, 21 bp, Artificial Sequence
  Synthetic
ttggtcaggaaaatgctagtg

SEQ ID NO: 3997 - DNA, 21 bp, Artificial Sequence
  Synthetic
attggtcaggaaaatgctagt

SEQ ID NO: 3998 - DNA, 21 bp, Artificial Sequence
  Synthetic
tattggtcaggaaaatgctag

SEQ ID NO: 3999 - DNA, 21 bp, Artificial Sequence
  Synthetic
ttattggtcaggaaaatgcta

SEQ ID NO: 4000 - DNA, 21 bp, Artificial Sequence
  Synthetic
ggaaatcccttcttattggtc

SEQ ID NO: 4001 - DNA, 21 bp, Artificial Sequence
  Synthetic
aggaaatcccttcttattggt

SEQ ID NO: 4002 - DNA, 21 bp, Artificial Sequence
  Synthetic
ctggtgcatcttagaaagaac

SEQ ID NO: 4003 - DNA, 21 bp, Artificial Sequence
  Synthetic
tctggtgcatcttagaaagaa

SEQ ID NO: 4004 - DNA, 21 bp, Artificial Sequence
  Synthetic
cctgttctttctaagatgcac

SEQ ID NO: 4005 - DNA, 21 bp, Artificial Sequence
  Synthetic
gagcctctggtgcatcttaga

SEQ ID NO: 4006 - DNA, 21 bp, Artificial Sequence
  Synthetic
agatgagcctctggtgcatct

SEQ ID NO: 4007 - DNA, 21 bp, Artificial Sequence
  Synthetic
ctcaccttgaggagccggaag

SEQ ID NO: 4008 - DNA, 21 bp, Artificial Sequence
  Synthetic
ctcatcttccggctcctcaag

SEQ ID NO: 4009 - DNA, 21 bp, Artificial Sequence
  Synthetic
ctaccactcaccttgaggagc

SEQ ID NO: 4010 - DNA, 21 bp, Artificial Sequence
  Synthetic
cctaccactcaccttgaggag

SEQ ID NO: 4011 - DNA, 21 bp, Artificial Sequence
  Synthetic
accctcctaccactcaccttg

SEQ ID NO: 4012 - DNA, 21 bp, Artificial Sequence
  Synthetic
aaccctcctaccactcacctt

SEQ ID NO: 4013 - DNA, 21 bp, Artificial Sequence
  Synthetic
tgatgaactgcacctccaact

SEQ ID NO: 4014 - DNA, 21 bp, Artificial Sequence
  Synthetic
tggtggttggtgcctgtgatg

SEQ ID NO: 4015 - DNA, 21 bp, Artificial Sequence
  Synthetic
tcacaggcaccaaccaccact

SEQ ID NO: 4016 - DNA, 21 bp, Artificial Sequence
  Synthetic
acaggcaccaaccaccactca

SEQ ID NO: 4017 - DNA, 21 bp, Artificial Sequence
  Synthetic
ggcaccaaccaccactcagag

SEQ ID NO: 4018 - DNA, 21 bp, Artificial Sequence
  Synthetic
gcaccaaccaccactcagaga

SEQ ID NO: 4019 - DNA, 21 bp, Artificial Sequence
  Synthetic
ggtaggagcagaactccttct

SEQ ID NO: 4020 - DNA, 21 bp, Artificial Sequence
  Synthetic
tccaggtattggaggtaggag

SEQ ID NO: 4021 - DNA, 21 bp, Artificial Sequence
  Synthetic
ttctgctcctacctccaatac

SEQ ID NO: 4022 - DNA, 21 bp, Artificial Sequence
  Synthetic
tctgctcctacctccaatacc

SEQ ID NO: 4023 - DNA, 21 bp, Artificial Sequence
  Synthetic
agtattccaggtattggaggt

SEQ ID NO: 4024 - DNA, 21 bp, Artificial Sequence
  Synthetic
aagtattccaggtattggagg

SEQ ID NO: 4025 - DNA, 21 bp, Artificial Sequence
  Synthetic
tggcttaagtattccaggtat

SEQ ID NO: 4026 - DNA, 21 bp, Artificial Sequence
  Synthetic
ctggcttaagtattccaggta

SEQ ID NO: 4027 - DNA, 21 bp, Artificial Sequence
  Synthetic
caatacctggaatacttaagc

SEQ ID NO: 4028 - DNA, 21 bp, Artificial Sequence
  Synthetic
accgtcctccacctaatgcct

SEQ ID NO: 4029 - DNA, 21 bp, Artificial Sequence
  Synthetic
agagttcataggcattaggtg

SEQ ID NO: 4030 - DNA, 21 bp, Artificial Sequence
  Synthetic
aaagagttcataggcattagg

SEQ ID NO: 4031 - DNA, 21 bp, Artificial Sequence
  Synthetic
caaagagttcataggcattag

SEQ ID NO: 4032 - DNA, 21 bp, Artificial Sequence
  Synthetic
aatgcctatgaactctttgcc

SEQ ID NO: 4033 - DNA, 21 bp, Artificial Sequence
  Synthetic
atgaactctttgccaagggct

SEQ ID NO: 4034 - DNA, 21 bp, Artificial Sequence
  Synthetic
tagtcttcatagcccttggca

SEQ ID NO: 4035 - DNA, 21 bp, Artificial Sequence
  Synthetic
tatctgcagtccccgcttcag

SEQ ID NO: 4036 - DNA, 21 bp, Artificial Sequence
  Synthetic
cactccagacccacctgaagc

SEQ ID NO: 4037 - DNA, 21 bp, Artificial Sequence
  Synthetic
gcactccagacccacctgaag

SEQ ID NO: 4038 - DNA, 21 bp, Artificial Sequence
  Synthetic
tgcactccagacccacctgaa

SEQ ID NO: 4039 - DNA, 21 bp, Artificial Sequence
  Synthetic
ttcctcattcatcagccactg

SEQ ID NO: 4040 - DNA, 21 bp, Artificial Sequence
  Synthetic
catcagccactgatggacaat

SEQ ID NO: 4041 - DNA, 21 bp, Artificial Sequence
  Synthetic
atcagccactgatggacaatc

SEQ ID NO: 4042 - DNA, 21 bp, Artificial Sequence
  Synthetic
acaatctggaatctcagacat

SEQ ID NO: 4043 - DNA, 21 bp, Artificial Sequence
  Synthetic
aatctcagacatatgaagtgt

SEQ ID NO: 4044 - DNA, 21 bp, Artificial Sequence
  Synthetic
cagacatatgaagtgtttgaa

SEQ ID NO: 4045 - DNA, 21 bp, Artificial Sequence
  Synthetic
gctggtactgagagtatttga

SEQ ID NO: 4046 - DNA, 21 bp, Artificial Sequence
  Synthetic
tgctggtactgagagtatttg

SEQ ID NO: 4047 - DNA, 21 bp, Artificial Sequence
  Synthetic
cacacagtacctgctggtact

SEQ ID NO: 4048 - DNA, 21 bp, Artificial Sequence
  Synthetic
accacacagtacctgctggta

SEQ ID NO: 4049 - DNA, 21 bp, Artificial Sequence
  Synthetic
agcagacatttatagatggcc

SEQ ID NO: 4050 - DNA, 21 bp, Artificial Sequence
  Synthetic
tagcagacatttatagatggc

SEQ ID NO: 4051 - DNA, 21 bp, Artificial Sequence
  Synthetic
catctataaatgtctgctaga

SEQ ID NO: 4052 - DNA, 21 bp, Artificial Sequence
  Synthetic
aatgtctgctagaccgagtac

SEQ ID NO: 4053 - DNA, 21 bp, Artificial Sequence
  Synthetic
gtctgctagaccgagtaccag

SEQ ID NO: 4054 - DNA, 21 bp, Artificial Sequence
  Synthetic
ctgctagaccgagtaccagaa

SEQ ID NO: 4055 - DNA, 21 bp, Artificial Sequence
  Synthetic
tgctagaccgagtaccagaag

SEQ ID NO: 4056 - DNA, 21 bp, Artificial Sequence
  Synthetic
ctagaccgagtaccagaagag

SEQ ID NO: 4057 - DNA, 21 bp, Artificial Sequence
  Synthetic
gaccgagtaccagaagaggag

SEQ ID NO: 4058 - DNA, 21 bp, Artificial Sequence
  Synthetic
ggagaaggataccaatgtcca

SEQ ID NO: 4059 - DNA, 21 bp, Artificial Sequence
  Synthetic
tttcttagggtactgatggtg

SEQ ID NO: 4060 - DNA, 21 bp, Artificial Sequence
  Synthetic
tcccagcaccatcagtaccct

SEQ ID NO: 4061 - DNA, 21 bp, Artificial Sequence
  Synthetic
ttcttagggtactgatggtgc

SEQ ID NO: 4062 - DNA, 21 bp, Artificial Sequence
  Synthetic
tcttagggtactgatggtgct

SEQ ID NO: 4063 - DNA, 21 bp, Artificial Sequence
  Synthetic
gggtactgatggtgctgggag

SEQ ID NO: 4064 - DNA, 21 bp, Artificial Sequence
  Synthetic
actgatggtgctgggagcagg

SEQ ID NO: 4065 - DNA, 21 bp, Artificial Sequence
  Synthetic
ctgatggtgctgggagcagga

SEQ ID NO: 4066 - DNA, 21 bp, Artificial Sequence
  Synthetic
tgatggtgctgggagcaggac

SEQ ID NO: 4067 - DNA, 21 bp, Artificial Sequence
  Synthetic
ggagcaggacggggacccctg

SEQ ID NO: 4068 - DNA, 21 bp, Artificial Sequence
  Synthetic
acccctggtgaacgcttccct

SEQ ID NO: 4069 - DNA, 21 bp, Artificial Sequence
  Synthetic
gcccgcagggaagcgttcacc

SEQ ID NO: 4070 - DNA, 21 bp, Artificial Sequence
  Synthetic
tgcccgcagggaagcgttcac

SEQ ID NO: 4071 - DNA, 21 bp, Artificial Sequence
  Synthetic
cggcctgcttggctgcccgca

SEQ ID NO: 4072 - DNA, 21 bp, Artificial Sequence
  Synthetic
tcggcctgcttggctgcccgc

SEQ ID NO: 4073 - DNA, 21 bp, Artificial Sequence
  Synthetic
gtcggcctgcttggctgcccg

SEQ ID NO: 4074 - DNA, 21 bp, Artificial Sequence
  Synthetic
ggcagccaagcaggccgaccg

SEQ ID NO: 4075 - DNA, 21 bp, Artificial Sequence
  Synthetic
cggcggataaagctgtatgct

SEQ ID NO: 4076 - DNA, 21 bp, Artificial Sequence
  Synthetic
ggcggataaagctgtatgctg

SEQ ID NO: 4077 - DNA, 21 bp, Artificial Sequence
  Synthetic
cggataaagctgtatgctgtg

SEQ ID NO: 4078 - DNA, 21 bp, Artificial Sequence
  Synthetic
aaacccaaatgccgtggtgac

SEQ ID NO: 4079 - DNA, 21 bp, Artificial Sequence
  Synthetic
ctactcacgtcaccacggcat

SEQ ID NO: 4080 - DNA, 21 bp, Artificial Sequence
  Synthetic
tattgtctctgtttcaggcta

SEQ ID NO: 4081 - DNA, 21 bp, Artificial Sequence
  Synthetic
tcaaactgccagttctctagc

SEQ ID NO: 4082 - DNA, 21 bp, Artificial Sequence
  Synthetic
tcaggctagagaactggcagt

SEQ ID NO: 4083 - DNA, 21 bp, Artificial Sequence
  Synthetic
ggctagagaactggcagtttg

SEQ ID NO: 4084 - DNA, 21 bp, Artificial Sequence
  Synthetic
agagaactggcagtttgaaga

SEQ ID NO: 4085 - DNA, 21 bp, Artificial Sequence
  Synthetic
gagaactggcagtttgaagaa

SEQ ID NO: 4086 - DNA, 21 bp, Artificial Sequence
  Synthetic
agaactggcagtttgaagaat

SEQ ID NO: 4087 - DNA, 21 bp, Artificial Sequence
  Synthetic
gaactggcagtttgaagaatg

SEQ ID NO: 4088 - DNA, 21 bp, Artificial Sequence
  Synthetic
gtgaccgtagtctcatcagac

SEQ ID NO: 4089 - DNA, 21 bp, Artificial Sequence
  Synthetic
gaccgtagtctcatcagacat

SEQ ID NO: 4090 - DNA, 21 bp, Artificial Sequence
  Synthetic
accgtagtctcatcagacatg

SEQ ID NO: 4091 - DNA, 21 bp, Artificial Sequence
  Synthetic
ccgtagtctcatcagacatga

SEQ ID NO: 4092 - DNA, 21 bp, Artificial Sequence
  Synthetic
agtctcatcagacatgaggga

SEQ ID NO: 4093 - DNA, 21 bp, Artificial Sequence
  Synthetic
ccacccattccctcatgtctg

SEQ ID NO: 4094 - DNA, 21 bp, Artificial Sequence
  Synthetic
acatgagggaatgggtggctc

SEQ ID NO: 4095 - DNA, 21 bp, Artificial Sequence
  Synthetic
atgagggaatgggtggctcca

SEQ ID NO: 4096 - DNA, 21 bp, Artificial Sequence
  Synthetic
gacaatgatgtctgctttctc

SEQ ID NO: 4097 - DNA, 21 bp, Artificial Sequence
  Synthetic
tgacaatgatgtctgctttct

SEQ ID NO: 4098 - DNA, 21 bp, Artificial Sequence
  Synthetic
agaaagcagacatcattgtca

SEQ ID NO: 4099 - DNA, 21 bp, Artificial Sequence
  Synthetic
gacatcattgtcagtgagctt

SEQ ID NO: 4100 - DNA, 21 bp, Artificial Sequence
  Synthetic
ttcattgtcagcaaatgagcc

SEQ ID NO: 4101 - DNA, 21 bp, Artificial Sequence
  Synthetic
ttctgggctcatttgctgaca

SEQ ID NO: 4102 - DNA, 21 bp, Artificial Sequence
  Synthetic
gcgacaattcattgtcagcaa

SEQ ID NO: 4103 - DNA, 21 bp, Artificial Sequence
  Synthetic
ttgctgacaatgaattgtcgc

SEQ ID NO: 4104 - DNA, 21 bp, Artificial Sequence
  Synthetic
aatgaattgtcgcctgagtgc

SEQ ID NO: 4105 - DNA, 21 bp, Artificial Sequence
  Synthetic
aattgtcgcctgagtgcctgg

SEQ ID NO: 4106 - DNA, 21 bp, Artificial Sequence
  Synthetic
attgtcgcctgagtgcctgga

SEQ ID NO: 4107 - DNA, 21 bp, Artificial Sequence
  Synthetic
ccccaacctgggggcaccttt

SEQ ID NO: 4108 - DNA, 21 bp, Artificial Sequence
  Synthetic
tcctgctgtgcagatgatggt

SEQ ID NO: 4109 - DNA, 21 bp, Artificial Sequence
  Synthetic
cagatgatggtgtgagcatcc

SEQ ID NO: 4110 - DNA, 21 bp, Artificial Sequence
  Synthetic
agatgatggtgtgagcatccc

SEQ ID NO: 4111 - DNA, 21 bp, Artificial Sequence
  Synthetic
gatgatggtgtgagcatcccc

SEQ ID NO: 4112 - DNA, 21 bp, Artificial Sequence
  Synthetic
atgatggtgtgagcatccccg

SEQ ID NO: 4113 - DNA, 21 bp, Artificial Sequence
  Synthetic
cagaaaggaagtgtactcccc

SEQ ID NO: 4114 - DNA, 21 bp, Artificial Sequence
  Synthetic
ccagaaaggaagtgtactccc

SEQ ID NO: 4115 - DNA, 21 bp, Artificial Sequence
  Synthetic
gccagaaaggaagtgtactcc

SEQ ID NO: 4116 - DNA, 21 bp, Artificial Sequence
  Synthetic
aggaagagatgggagccagaa

SEQ ID NO: 4117 - DNA, 21 bp, Artificial Sequence
  Synthetic
gaggaagagatgggagccaga

SEQ ID NO: 4118 - DNA, 21 bp, Artificial Sequence
  Synthetic
cttggaggaagagatgggagc

SEQ ID NO: 4119 - DNA, 21 bp, Artificial Sequence
  Synthetic
gtacagcttggaggaagagat

SEQ ID NO: 4120 - DNA, 21 bp, Artificial Sequence
  Synthetic
tgtacagcttggaggaagaga

SEQ ID NO: 4121 - DNA, 21 bp, Artificial Sequence
  Synthetic
ttgtacagcttggaggaagag

SEQ ID NO: 4122 - DNA, 21 bp, Artificial Sequence
  Synthetic
tctcttcctccaagctgtaca

SEQ ID NO: 4123 - DNA, 21 bp, Artificial Sequence
  Synthetic
cctcattgtacagcttggagg

SEQ ID NO: 4124 - DNA, 21 bp, Artificial Sequence
  Synthetic
ggacctcattgtacagcttgg

SEQ ID NO: 4125 - DNA, 21 bp, Artificial Sequence
  Synthetic
cggacctcattgtacagcttg

SEQ ID NO: 4126 - DNA, 21 bp, Artificial Sequence
  Synthetic
ctcggacctcattgtacagct

SEQ ID NO: 4127 - DNA, 21 bp, Artificial Sequence
  Synthetic
ctccaagctgtacaatgaggt

SEQ ID NO: 4128 - DNA, 21 bp, Artificial Sequence
  Synthetic
gctcggacctcattgtacagc

SEQ ID NO: 4129 - DNA, 21 bp, Artificial Sequence
  Synthetic
gtacaatgaggtccgagcctg

SEQ ID NO: 4130 - DNA, 21 bp, Artificial Sequence
  Synthetic
tacaatgaggtccgagcctgt

SEQ ID NO: 4131 - DNA, 21 bp, Artificial Sequence
  Synthetic
acaatgaggtccgagcctgta

SEQ ID NO: 4132 - DNA, 21 bp, Artificial Sequence
  Synthetic
aatgaggtccgagcctgtagg

SEQ ID NO: 4133 - DNA, 21 bp, Artificial Sequence
  Synthetic
gaggtccgagcctgtagggag

SEQ ID NO: 4134 - DNA, 21 bp, Artificial Sequence
  Synthetic
acggtccttctccctacaggc

SEQ ID NO: 4135 - DNA, 21 bp, Artificial Sequence
  Synthetic
gtagggagaaggaccgtgacc

SEQ ID NO: 4136 - DNA, 21 bp, Artificial Sequence
  Synthetic
tctgtctctgacaggcccagt

SEQ ID NO: 4137 - DNA, 21 bp, Artificial Sequence
  Synthetic
taccacataaggcatctcaaa

SEQ ID NO: 4138 - DNA, 21 bp, Artificial Sequence
  Synthetic
ggctggggtgcagagagctgg

SEQ ID NO: 4139 - DNA, 21 bp, Artificial Sequence
  Synthetic
gggctggggtgcagagagctg

SEQ ID NO: 4140 - DNA, 21 bp, Artificial Sequence
  Synthetic
gtgaaacagggctggggtgca

SEQ ID NO: 4141 - DNA, 21 bp, Artificial Sequence
  Synthetic
aggtgaaacagggctggggtg

SEQ ID NO: 4142 - DNA, 21 bp, Artificial Sequence
  Synthetic
tggctgaaggtgaaacagggc

SEQ ID NO: 4143 - DNA, 21 bp, Artificial Sequence
  Synthetic
atggctgaaggtgaaacaggg

SEQ ID NO: 4144 - DNA, 21 bp, Artificial Sequence
  Synthetic
ttgggatggctgaaggtgaaa

SEQ ID NO: 4145 - DNA, 21 bp, Artificial Sequence
  Synthetic
tttcaccttcagccatcccaa

SEQ ID NO: 4146 - DNA, 21 bp, Artificial Sequence
  Synthetic
cctctgttgggatggctgaag

SEQ ID NO: 4147 - DNA, 21 bp, Artificial Sequence
  Synthetic
aacctacctctgttgggatgg

SEQ ID NO: 4148 - DNA, 21 bp, Artificial Sequence
  Synthetic
cataaaagaacctacctctgt

SEQ ID NO: 4149 - DNA, 21 bp, Artificial Sequence
  Synthetic
ccataaaagaacctacctctg

SEQ ID NO: 4150 - DNA, 21 bp, Artificial Sequence
  Synthetic
aatagcggttgttgtcaatca

SEQ ID NO: 4151 - DNA, 21 bp, Artificial Sequence
  Synthetic
gacaacaaccgctattgcacc

SEQ ID NO: 4152 - DNA, 21 bp, Artificial Sequence
  Synthetic
acaacaaccgctattgcacct

SEQ ID NO: 4153 - DNA, 21 bp, Artificial Sequence
  Synthetic
tattgcaccttggaatttcct

SEQ ID NO: 4154 - DNA, 21 bp, Artificial Sequence
  Synthetic
attgcaccttggaatttcctg

SEQ ID NO: 4155 - DNA, 21 bp, Artificial Sequence
  Synthetic
accttggaatttcctgtggag

SEQ ID NO: 4156 - DNA, 21 bp, Artificial Sequence
  Synthetic
tagtactgtgttcacctccac

SEQ ID NO: 4157 - DNA, 21 bp, Artificial Sequence
  Synthetic
gtagtactgtgttcacctcca

SEQ ID NO: 4158 - DNA, 21 bp, Artificial Sequence
  Synthetic
tacatggctttgccggctact

SEQ ID NO: 4159 - DNA, 21 bp, Artificial Sequence
  Synthetic
tactttgagactgtgctttat

SEQ ID NO: 4160 - DNA, 21 bp, Artificial Sequence
  Synthetic
gtgctttatcaggacatcact

SEQ ID NO: 4161 - DNA, 21 bp, Artificial Sequence
  Synthetic
tttatcaggacatcactctga

SEQ ID NO: 4162 - DNA, 21 bp, Artificial Sequence
  Synthetic
ttgtccacacaggtatccgtc

SEQ ID NO: 4163 - DNA, 21 bp, Artificial Sequence
  Synthetic
cccaggagagtgagtctctgg

SEQ ID NO: 4164 - DNA, 21 bp, Artificial Sequence
  Synthetic
tccgtccagagactcactctc

SEQ ID NO: 4165 - DNA, 21 bp, Artificial Sequence
  Synthetic
ccgtccagagactcactctcc

SEQ ID NO: 4166 - DNA, 21 bp, Artificial Sequence
  Synthetic
acatcccaggagagtgagtct

SEQ ID NO: 4167 - DNA, 21 bp, Artificial Sequence
  Synthetic
ccatgagaacatcccaggaga

SEQ ID NO: 4168 - DNA, 21 bp, Artificial Sequence
  Synthetic
gaaaccatgagaacatcccag

SEQ ID NO: 4169 - DNA, 21 bp, Artificial Sequence
  Synthetic
gggaaaccatgagaacatccc

SEQ ID NO: 4170 - DNA, 21 bp, Artificial Sequence
  Synthetic
tgggaaaccatgagaacatcc

SEQ ID NO: 4171 - DNA, 21 bp, Artificial Sequence
  Synthetic
gggaagaggatgggaaaccat

SEQ ID NO: 4172 - DNA, 21 bp, Artificial Sequence
  Synthetic
tagggaagaggatgggaaacc

SEQ ID NO: 4173 - DNA, 21 bp, Artificial Sequence
  Synthetic
taccttaatagggaagaggat

SEQ ID NO: 4174 - DNA, 21 bp, Artificial Sequence
  Synthetic
ctaccttaatagggaagagga

SEQ ID NO: 4175 - DNA, 21 bp, Artificial Sequence
  Synthetic
cctaccttaatagggaagagg

SEQ ID NO: 4176 - DNA, 21 bp, Artificial Sequence
  Synthetic
ccatcctcttccctattaagg

SEQ ID NO: 4177 - DNA, 21 bp, Artificial Sequence
  Synthetic
catcctcttccctattaaggt

SEQ ID NO: 4178 - DNA, 21 bp, Artificial Sequence
  Synthetic
agttcctaccttaatagggaa

SEQ ID NO: 4179 - DNA, 21 bp, Artificial Sequence
  Synthetic
gcagttcctaccttaataggg

SEQ ID NO: 4180 - DNA, 21 bp, Artificial Sequence
  Synthetic
aaagcagttcctaccttaata

SEQ ID NO: 4181 - DNA, 21 bp, Artificial Sequence
  Synthetic
aaaagcagttcctaccttaat

SEQ ID NO: 4182 - DNA, 21 bp, Artificial Sequence
  Synthetic
taaaagcagttcctaccttaa

SEQ ID NO: 4183 - DNA, 21 bp, Artificial Sequence
  Synthetic
tacagcagcccataacggtac

SEQ ID NO: 4184 - DNA, 21 bp, Artificial Sequence
  Synthetic
gtttggccttcacgtaccgtt

SEQ ID NO: 4185 - DNA, 21 bp, Artificial Sequence
  Synthetic
ttcttggaattgctgcatcgc

SEQ ID NO: 4186 - DNA, 21 bp, Artificial Sequence
  Synthetic
ttctggcgatgcagcaattcc

SEQ ID NO: 4187 - DNA, 21 bp, Artificial Sequence
  Synthetic
gcaattccaagaaggtgtggt

SEQ ID NO: 4188 - DNA, 21 bp, Artificial Sequence
  Synthetic
cccactcataccacaccttct

SEQ ID NO: 4189 - DNA, 21 bp, Artificial Sequence
  Synthetic
ttccaagaaggtgtggtatga

SEQ ID NO: 4190 - DNA, 21 bp, Artificial Sequence
  Synthetic
gcccactcataccacaccttc

SEQ ID NO: 4191 - DNA, 21 bp, Artificial Sequence
  Synthetic
gtctagtaattacctggattt

SEQ ID NO: 4192 - DNA, 21 bp, Artificial Sequence
  Synthetic
tttgatgatgtcatagtagtc

SEQ ID NO: 4193 - DNA, 21 bp, Artificial Sequence
  Synthetic
tcacgaattatatttaaggca

SEQ ID NO: 4194 - DNA, 21 bp, Artificial Sequence
  Synthetic
ccattgccttaaatataattc

SEQ ID NO: 4195 - DNA, 21 bp, Artificial Sequence
  Synthetic
ttaaatataattcgtgaaaaa

SEQ ID NO: 4196 - DNA, 21 bp, Artificial Sequence
  Synthetic
ttcgtgaaaaagtgaataagt

SEQ ID NO: 4197 - DNA, 21 bp, Artificial Sequence
  Synthetic
aatgtcatcaataaactcagc

SEQ ID NO: 4198 - DNA, 21 bp, Artificial Sequence
  Synthetic
tagctgagtttattgatgaca

SEQ ID NO: 4199 - DNA, 21 bp, Artificial Sequence
  Synthetic
gatgacattgagttaatgttt

SEQ ID NO: 4200 - DNA, 21 bp, Artificial Sequence
  Synthetic
gagggttgtattcaaagcagt

SEQ ID NO: 4201 - DNA, 21 bp, Artificial Sequence
  Synthetic
aatacaaccctcgtaacacaa

SEQ ID NO: 4202 - DNA, 21 bp, Artificial Sequence
  Synthetic
gtaacacaagtgaagcaaaag

SEQ ID NO: 4203 - DNA, 21 bp, Artificial Sequence
  Synthetic
taacacaagtgaagcaaaagc

SEQ ID NO: 4204 - DNA, 21 bp, Artificial Sequence
  Synthetic
gaatgcgcgttgcaagatatg

SEQ ID NO: 4205 - DNA, 21 bp, Artificial Sequence
  Synthetic
gcgcgttgcaagatatgtcga

SEQ ID NO: 4206 - DNA, 21 bp, Artificial Sequence
  Synthetic
tatgtcgaaagaaaggcgatg

SEQ ID NO: 4207 - DNA, 21 bp, Artificial Sequence
  Synthetic
ggttctttgtgatggctgtga

SEQ ID NO: 4208 - DNA, 21 bp, Artificial Sequence
  Synthetic
gttctttgtgatggctgtgat

SEQ ID NO: 4209 - DNA, 21 bp, Artificial Sequence
  Synthetic
acccctatcacagccatcaca

SEQ ID NO: 4210 - DNA, 21 bp, Artificial Sequence
  Synthetic
aaaaaataccttgagctttgg

SEQ ID NO: 4211 - DNA, 21 bp, Artificial Sequence
  Synthetic
ccagtctccttcaggcacagt

SEQ ID NO: 4212 - DNA, 21 bp, Artificial Sequence
  Synthetic
aacgttgctttggtcgacatt

SEQ ID NO: 4213 - DNA, 21 bp, Artificial Sequence
  Synthetic
agtttgtcactcaagccctat

SEQ ID NO: 4214 - DNA, 21 bp, Artificial Sequence
  Synthetic
aagccctatcagaaggttggt

SEQ ID NO: 4215 - DNA, 21 bp, Artificial Sequence
  Synthetic
caattcaaaccaaccttctga

SEQ ID NO: 4216 - DNA, 21 bp, Artificial Sequence
  Synthetic
ggctggcattggtacataaac

SEQ ID NO: 4217 - DNA, 21 bp, Artificial Sequence
  Synthetic
gtatgccagaaatgcaatggc

SEQ ID NO: 4218 - DNA, 21 bp, Artificial Sequence
  Synthetic
gcatttctggcatacctctat

SEQ ID NO: 4219 - DNA, 21 bp, Artificial Sequence
  Synthetic
catttctggcatacctctatc

SEQ ID NO: 4220 - DNA, 21 bp, Artificial Sequence
  Synthetic
tttctggcatacctctatcag

SEQ ID NO: 4221 - DNA, 21 bp, Artificial Sequence
  Synthetic
accctcctgatagaggtatgc

SEQ ID NO: 4222 - DNA, 21 bp, Artificial Sequence
  Synthetic
ggaccattattaccctcctga

SEQ ID NO: 4223 - DNA, 21 bp, Artificial Sequence
  Synthetic
aagctggaacaacgatcaaat

SEQ ID NO: 4224 - DNA, 21 bp, Artificial Sequence
  Synthetic
tgaagctggaacaacgatcaa

SEQ ID NO: 4225 - DNA, 21 bp, Artificial Sequence
  Synthetic
ttacaaacctatagttgaagc

SEQ ID NO: 4226 - DNA, 21 bp, Artificial Sequence
  Synthetic
attacaaacctatagttgaag

SEQ ID NO: 4227 - DNA, 21 bp, Artificial Sequence
  Synthetic
tccagtattacaaacctatag

SEQ ID NO: 4228 - DNA, 21 bp, Artificial Sequence
  Synthetic
ctgttccatagataactggtt

SEQ ID NO: 4229 - DNA, 21 bp, Artificial Sequence
  Synthetic
tgttccatagataactggtta

SEQ ID NO: 4230 - DNA, 21 bp, Artificial Sequence
  Synthetic
gttccatagataactggttaa

SEQ ID NO: 4231 - DNA, 21 bp, Artificial Sequence
  Synthetic
acttcccttaaccagttatct

SEQ ID NO: 4232 - DNA, 21 bp, Artificial Sequence
  Synthetic
gttaatttatggtgccctact

SEQ ID NO: 4233 - DNA, 21 bp, Artificial Sequence
  Synthetic
agtaacagaggaccttcaaag

SEQ ID NO: 4234 - DNA, 21 bp, Artificial Sequence
  Synthetic
aaggtcctctgttactatggt

SEQ ID NO: 4235 - DNA, 21 bp, Artificial Sequence
  Synthetic
catattcttaccatagtaaca

SEQ ID NO: 4236 - DNA, 21 bp, Artificial Sequence
  Synthetic
gacatattcttaccatagtaa

SEQ ID NO: 4237 - DNA, 21 bp, Artificial Sequence
  Synthetic
tttaaattctaggttctcaag

SEQ ID NO: 4238 - DNA, 21 bp, Artificial Sequence
  Synthetic
tttacgttcttcttgagaacc

SEQ ID NO: 4239 - DNA, 21 bp, Artificial Sequence
  Synthetic
taatttgtttacgttcttctt

SEQ ID NO: 4240 - DNA, 21 bp, Artificial Sequence
  Synthetic
tctaatttgtttacgttcttc

SEQ ID NO: 4241 - DNA, 21 bp, Artificial Sequence
  Synthetic
gatttaacattcatagtagat

SEQ ID NO: 4242 - DNA, 21 bp, Artificial Sequence
  Synthetic
attgtaatcttcatatctact

SEQ ID NO: 4243 - DNA, 21 bp, Artificial Sequence
  Synthetic
gtcgaaacagactacggtcat

SEQ ID NO: 4244 - DNA, 21 bp, Artificial Sequence
  Synthetic
gaccgtagtctgtttcgacgg

SEQ ID NO: 4245 - DNA, 21 bp, Artificial Sequence
  Synthetic
tgcgtaattaagtttcagccg

SEQ ID NO: 4246 - DNA, 21 bp, Artificial Sequence
  Synthetic
tttgatgagggccatatgctg

SEQ ID NO: 4247 - DNA, 21 bp, Artificial Sequence
  Synthetic
gagggccatatgctgaagaat

SEQ ID NO: 4248 - DNA, 21 bp, Artificial Sequence
  Synthetic
tcataaggtgctggtagcgaa

SEQ ID NO: 4249 - DNA, 21 bp, Artificial Sequence
  Synthetic
gtcataaggtgctggtagcga

SEQ ID NO: 4250 - DNA, 21 bp, Artificial Sequence
  Synthetic
aattgtcataaggtgctggta

SEQ ID NO: 4251 - DNA, 21 bp, Artificial Sequence
  Synthetic
gcaccttatgacaattaatgt

SEQ ID NO: 4252 - DNA, 21 bp, Artificial Sequence
  Synthetic
gcagcaaacggttatttgcct

SEQ ID NO: 4253 - DNA, 21 bp, Artificial Sequence
  Synthetic
ctgctcacaggcacacctgta

SEQ ID NO: 4254 - DNA, 21 bp, Artificial Sequence
  Synthetic
ttgttctgtacaggtgtgcct

SEQ ID NO: 4255 - DNA, 21 bp, Artificial Sequence
  Synthetic
cacctgtacagaacaatctgt

SEQ ID NO: 4256 - DNA, 21 bp, Artificial Sequence
  Synthetic
ctgttagaactcatgtcgctg

SEQ ID NO: 4257 - DNA, 21 bp, Artificial Sequence
  Synthetic
ataacaaaattcaacagcgac

SEQ ID NO: 4258 - DNA, 21 bp, Artificial Sequence
  Synthetic
acatgtttagtagtagcacca

SEQ ID NO: 4259 - DNA, 21 bp, Artificial Sequence
  Synthetic
tagtagtagcaccagtgaaat

SEQ ID NO: 4260 - DNA, 21 bp, Artificial Sequence
  Synthetic
tagtagcaccagtgaaatacg

SEQ ID NO: 4261 - DNA, 21 bp, Artificial Sequence
  Synthetic
catttatgcttactgtcttag

SEQ ID NO: 4262 - DNA, 21 bp, Artificial Sequence
  Synthetic
gcatttatgcttactgtctta

SEQ ID NO: 4263 - DNA, 21 bp, Artificial Sequence
  Synthetic
atgcatttatgcttactgtct

SEQ ID NO: 4264 - DNA, 21 bp, Artificial Sequence
  Synthetic
gctttgctcatctgctgattt

SEQ ID NO: 4265 - DNA, 21 bp, Artificial Sequence
  Synthetic
cagcagatgagcaaagcatat

SEQ ID NO: 4266 - DNA, 21 bp, Artificial Sequence
  Synthetic
gatgagcaaagcatatatgaa

SEQ ID NO: 4267 - DNA, 21 bp, Artificial Sequence
  Synthetic
atgagcaaagcatatatgaaa

SEQ ID NO: 4268 - DNA, 21 bp, Artificial Sequence
  Synthetic
gagcaaagcatatatgaaaag

SEQ ID NO: 4269 - DNA, 21 bp, Artificial Sequence
  Synthetic
gcaaagcatatatgaaaagga

SEQ ID NO: 4270 - DNA, 21 bp, Artificial Sequence
  Synthetic
aattataaagccatttattct

SEQ ID NO: 4271 - DNA, 21 bp, Artificial Sequence
  Synthetic
tataaagccatttattctcag

SEQ ID NO: 4272 - DNA, 21 bp, Artificial Sequence
  Synthetic
catttattctcagaagagtaa

SEQ ID NO: 4273 - DNA, 21 bp, Artificial Sequence
  Synthetic
ttattctcagaagagtaaaag

SEQ ID NO: 4274 - DNA, 21 bp, Artificial Sequence
  Synthetic
ggggggtaactgcttgagaac

SEQ ID NO: 4275 - DNA, 21 bp, Artificial Sequence
  Synthetic
gttctcaagcagttacccccc

SEQ ID NO: 4276 - DNA, 21 bp, Artificial Sequence
  Synthetic
tttcttggggggtaactgctt

SEQ ID NO: 4277 - DNA, 21 bp, Artificial Sequence
  Synthetic
tctttcttggggggtaactgc

SEQ ID NO: 4278 - DNA, 21 bp, Artificial Sequence
  Synthetic
gcagttaccccccaagaaaga

SEQ ID NO: 4279 - DNA, 21 bp, Artificial Sequence
  Synthetic
taccccccaagaaagatcgaa

SEQ ID NO: 4280 - DNA, 21 bp, Artificial Sequence
  Synthetic
aactcaattcgatctttcttg

SEQ ID NO: 4281 - DNA, 21 bp, Artificial Sequence
  Synthetic
caactcaattcgatctttctt

SEQ ID NO: 4282 - DNA, 21 bp, Artificial Sequence
  Synthetic
acaactcaattcgatctttct

SEQ ID NO: 4283 - DNA, 21 bp, Artificial Sequence
  Synthetic
cacaactcaattcgatctttc

SEQ ID NO: 4284 - DNA, 21 bp, Artificial Sequence
  Synthetic
cgaattgagttgtgtgcaatg

SEQ ID NO: 4285 - DNA, 21 bp, Artificial Sequence
  Synthetic
gaattgagttgtgtgcaatgt

SEQ ID NO: 4286 - DNA, 21 bp, Artificial Sequence
  Synthetic
attgagttgtgtgcaatgtcg

SEQ ID NO: 4287 - DNA, 21 bp, Artificial Sequence
  Synthetic
ttgtgtgcaatgtcggagaag

SEQ ID NO: 4288 - DNA, 21 bp, Artificial Sequence
  Synthetic
tgtgtgcaatgtcggagaagc

SEQ ID NO: 4289 - DNA, 21 bp, Artificial Sequence
  Synthetic
gagaagcaggagcaactctat

SEQ ID NO: 4290 - DNA, 21 bp, Artificial Sequence
  Synthetic
aatctgttgaaaagacccaaa

SEQ ID NO: 4291 - DNA, 21 bp, Artificial Sequence
  Synthetic
ttgaaaaaatctatcaataac

SEQ ID NO: 4292 - DNA, 21 bp, Artificial Sequence
  Synthetic
tttgagtcacagaaaaaaaca

SEQ ID NO: 4293 - DNA, 21 bp, Artificial Sequence
  Synthetic
atgtgcaatgtcatgatgcag

SEQ ID NO: 4294 - DNA, 21 bp, Artificial Sequence
  Synthetic
gtgcaatgtcatgatgcagtt

SEQ ID NO: 4295 - DNA, 21 bp, Artificial Sequence
  Synthetic
tgcaatgtcatgatgcagttg

SEQ ID NO: 4296 - DNA, 21 bp, Artificial Sequence
  Synthetic
tgtaatattggcgatgtaata

SEQ ID NO: 4297 - DNA, 21 bp, Artificial Sequence
  Synthetic
gcctggagctgcagaagtgtg

SEQ ID NO: 4298 - DNA, 21 bp, Artificial Sequence
  Synthetic
gaagagatcctccacaagatc

SEQ ID NO: 4299 - DNA, 21 bp, Artificial Sequence
  Synthetic
gcggtacttcacgatcttgtg

SEQ ID NO: 4300 - DNA, 21 bp, Artificial Sequence
  Synthetic
aagcggtacttcacgatcttg

SEQ ID NO: 4301 - DNA, 21 bp, Artificial Sequence
  Synthetic
gaagcggtacttcacgatctt

SEQ ID NO: 4302 - DNA, 21 bp, Artificial Sequence
  Synthetic
ccgcttcagctggcccttcag

SEQ ID NO: 4303 - DNA, 21 bp, Artificial Sequence
  Synthetic
agcactcacctgaagggccag

SEQ ID NO: 4304 - DNA, 21 bp, Artificial Sequence
  Synthetic
tgagaacacagcactcacctg

SEQ ID NO: 4305 - DNA, 21 bp, Artificial Sequence
  Synthetic
tctccacagggagcctgtgac

SEQ ID NO: 4306 - DNA, 21 bp, Artificial Sequence
  Synthetic
atctctggtcacaggctccct

SEQ ID NO: 4307 - DNA, 21 bp, Artificial Sequence
  Synthetic
acagggagcctgtgaccagag

SEQ ID NO: 4308 - DNA, 21 bp, Artificial Sequence
  Synthetic
agcctgtgaccagagatgagg

SEQ ID NO: 4309 - DNA, 21 bp, Artificial Sequence
  Synthetic
cctgtgaccagagatgaggcc

SEQ ID NO: 4310 - DNA, 21 bp, Artificial Sequence
  Synthetic
tatgatgtgatcacgcacccc

SEQ ID NO: 4311 - DNA, 21 bp, Artificial Sequence
  Synthetic
tctgcactgtctgaaagtcca

SEQ ID NO: 4312 - DNA, 21 bp, Artificial Sequence
  Synthetic
ttctgcactgtctgaaagtcc

SEQ ID NO: 4313 - DNA, 21 bp, Artificial Sequence
  Synthetic
cccatggactttcagacagtg

SEQ ID NO: 4314 - DNA, 21 bp, Artificial Sequence
  Synthetic
ggaacatttgttctgcactgt

SEQ ID NO: 4315 - DNA, 21 bp, Artificial Sequence
  Synthetic
cagtgcagaacaaatgttcct

SEQ ID NO: 4316 - DNA, 21 bp, Artificial Sequence
  Synthetic
agtgcagaacaaatgttcctg

SEQ ID NO: 4317 - DNA, 21 bp, Artificial Sequence
  Synthetic
gtgcagaacaaatgttcctgt

SEQ ID NO: 4318 - DNA, 21 bp, Artificial Sequence
  Synthetic
gcacagagcggtagctcccac

SEQ ID NO: 4319 - DNA, 21 bp, Artificial Sequence
  Synthetic
tgcacagagcggtagctccca

SEQ ID NO: 4320 - DNA, 21 bp, Artificial Sequence
  Synthetic
tgtgggagctaccgctctgtg

SEQ ID NO: 4321 - DNA, 21 bp, Artificial Sequence
  Synthetic
gtgggagctaccgctctgtgc

SEQ ID NO: 4322 - DNA, 21 bp, Artificial Sequence
  Synthetic
tgtcagtaagaaactcctgca

SEQ ID NO: 4323 - DNA, 21 bp, Artificial Sequence
  Synthetic
gtgcaggagtttcttactgac

SEQ ID NO: 4324 - DNA, 21 bp, Artificial Sequence
  Synthetic
aaacacttgcttcatgtcagt

SEQ ID NO: 4325 - DNA, 21 bp, Artificial Sequence
  Synthetic
tgaagcaagtgtttaccaatg

SEQ ID NO: 4326 - DNA, 21 bp, Artificial Sequence
  Synthetic
aaatgctaggtgcaaagtttg

SEQ ID NO: 4327 - DNA, 21 bp, Artificial Sequence
  Synthetic
gctaggtgcaaagtttgtcga

SEQ ID NO: 4328 - DNA, 21 bp, Artificial Sequence
  Synthetic
atgacaaattgatcttgtgtg

SEQ ID NO: 4329 - DNA, 21 bp, Artificial Sequence
  Synthetic
gccggcctcagacaaaacagg

SEQ ID NO: 4330 - DNA, 21 bp, Artificial Sequence
  Synthetic
ggccggcctcagacaaaacag

SEQ ID NO: 4331 - DNA, 21 bp, Artificial Sequence
  Synthetic
tttgtctgaggccggccctct

SEQ ID NO: 4332 - DNA, 21 bp, Artificial Sequence
  Synthetic
ctcaccatctggtacttcata

SEQ ID NO: 4333 - DNA, 21 bp, Artificial Sequence
  Synthetic
ccctctatgaagtaccagatg

SEQ ID NO: 4334 - DNA, 21 bp, Artificial Sequence
  Synthetic
cactcaccatctggtacttca

SEQ ID NO: 4335 - DNA, 21 bp, Artificial Sequence
  Synthetic
tggcagtagcgggctggcaag

SEQ ID NO: 4336 - DNA, 21 bp, Artificial Sequence
  Synthetic
taagaagactctcctgccagt

SEQ ID NO: 4337 - DNA, 21 bp, Artificial Sequence
  Synthetic
aagaagactctcctgccagtc

SEQ ID NO: 4338 - DNA, 21 bp, Artificial Sequence
  Synthetic
gcaatcatcttccagactggc

SEQ ID NO: 4339 - DNA, 21 bp, Artificial Sequence
  Synthetic
ggcaatcatcttccagactgg

SEQ ID NO: 4340 - DNA, 21 bp, Artificial Sequence
  Synthetic
aacaggttcagcagtccattt

SEQ ID NO: 4341 - DNA, 21 bp, Artificial Sequence
  Synthetic
acaggcttcagaaatggactg

SEQ ID NO: 4342 - DNA, 21 bp, Artificial Sequence
  Synthetic
gtccatttctgaagcctgtgt

SEQ ID NO: 4343 - DNA, 21 bp, Artificial Sequence
  Synthetic
tttctgacacaggcttcagaa

SEQ ID NO: 4344 - DNA, 21 bp, Artificial Sequence
  Synthetic
ctgcctttctgacacaggctt

SEQ ID NO: 4345 - DNA, 21 bp, Artificial Sequence
  Synthetic
ctgtgtcagaaaggcaggccc

SEQ ID NO: 4346 - DNA, 21 bp, Artificial Sequence
  Synthetic
gaaaggcaggccccagggtac

SEQ ID NO: 4347 - DNA, 21 bp, Artificial Sequence
  Synthetic
gccccagggtacaaggatgtg

SEQ ID NO: 4348 - DNA, 21 bp, Artificial Sequence
  Synthetic
tttcaccacatccttgtaccc

SEQ ID NO: 4349 - DNA, 21 bp, Artificial Sequence
  Synthetic
ttcttggccacctgcagaccc

SEQ ID NO: 4350 - DNA, 21 bp, Artificial Sequence
  Synthetic
agacccatggacttaactagc

SEQ ID NO: 4351 - DNA, 21 bp, Artificial Sequence
  Synthetic
ctcttcaggctagttaagtcc

SEQ ID NO: 4352 - DNA, 21 bp, Artificial Sequence
  Synthetic
cccatggacttaactagcctg

SEQ ID NO: 4353 - DNA, 21 bp, Artificial Sequence
  Synthetic
catggacttaactagcctgaa

SEQ ID NO: 4354 - DNA, 21 bp, Artificial Sequence
  Synthetic
agcctgaagagaaatctctct

SEQ ID NO: 4355 - DNA, 21 bp, Artificial Sequence
  Synthetic
gaagagaaatctctctaaggg

SEQ ID NO: 4356 - DNA, 21 bp, Artificial Sequence
  Synthetic
atggtgcgaatccgaccctta

SEQ ID NO: 4357 - DNA, 21 bp, Artificial Sequence
  Synthetic
ccatggtgcgaatccgaccct

SEQ ID NO: 4358 - DNA, 21 bp, Artificial Sequence
  Synthetic
tcgcaggaattgggccatggt

SEQ ID NO: 4359 - DNA, 21 bp, Artificial Sequence
  Synthetic
tcgcaccatggcccaattcct

SEQ ID NO: 4360 - DNA, 21 bp, Artificial Sequence
  Synthetic
cagcatcaggtctcgcaggaa

SEQ ID NO: 4361 - DNA, 21 bp, Artificial Sequence
  Synthetic
aacatcagcatcaggtctcgc

SEQ ID NO: 4362 - DNA, 21 bp, Artificial Sequence
  Synthetic
gaacatcagcatcaggtctcg

SEQ ID NO: 4363 - DNA, 21 bp, Artificial Sequence
  Synthetic
tcattgtacattacagcattt

SEQ ID NO: 4364 - DNA, 21 bp, Artificial Sequence
  Synthetic
gtcattgtacattacagcatt

SEQ ID NO: 4365 - DNA, 21 bp, Artificial Sequence
  Synthetic
ccatatggtatacatgatgat

SEQ ID NO: 4366 - DNA, 21 bp, Artificial Sequence
  Synthetic
catcatgtataccatatggct

SEQ ID NO: 4367 - DNA, 21 bp, Artificial Sequence
  Synthetic
atcatgtataccatatggctg

SEQ ID NO: 4368 - DNA, 21 bp, Artificial Sequence
  Synthetic
gagagctgcagctaatcatag

SEQ ID NO: 4369 - DNA, 21 bp, Artificial Sequence
  Synthetic
atgtcatctgtaacaggctgc

SEQ ID NO: 4370 - DNA, 21 bp, Artificial Sequence
  Synthetic
tatgtcatctgtaacaggctg

SEQ ID NO: 4371 - DNA, 21 bp, Artificial Sequence
  Synthetic
cctggctaccacagcattgtg

SEQ ID NO: 4372 - DNA, 21 bp, Artificial Sequence
  Synthetic
ctaccacagcattgtgcagag

SEQ ID NO: 4373 - DNA, 21 bp, Artificial Sequence
  Synthetic
cctatggatttgtcaactatt

SEQ ID NO: 4374 - DNA, 21 bp, Artificial Sequence
  Synthetic
tgtcaactattaagaaaaaca

SEQ ID NO: 4375 - DNA, 21 bp, Artificial Sequence
  Synthetic
ctattaagaaaaacatagaaa

SEQ ID NO: 4376 - DNA, 21 bp, Artificial Sequence
  Synthetic
aaacatagaaaatggactgat

SEQ ID NO: 4377 - DNA, 21 bp, Artificial Sequence
  Synthetic
atggactgatccgaagcacag

SEQ ID NO: 4378 - DNA, 21 bp, Artificial Sequence
  Synthetic
acgctgaaattcagctgtgct

SEQ ID NO: 4379 - DNA, 21 bp, Artificial Sequence
  Synthetic
aaacatcagcataatgtcacg

SEQ ID NO: 4380 - DNA, 21 bp, Artificial Sequence
  Synthetic
cgtgacattatgctgatgttt

SEQ ID NO: 4381 - DNA, 21 bp, Artificial Sequence
  Synthetic
gctattgtacattacagcatt

SEQ ID NO: 4382 - DNA, 21 bp, Artificial Sequence
  Synthetic
ccatgtgatagacatcatggt

SEQ ID NO: 4383 - DNA, 21 bp, Artificial Sequence
  Synthetic
catgatgtctatcacatggca

SEQ ID NO: 4384 - DNA, 21 bp, Artificial Sequence
  Synthetic
atgatgtctatcacatggcag

SEQ ID NO: 4385 - DNA, 21 bp, Artificial Sequence
  Synthetic
gaacacttcctccgccagctt

SEQ ID NO: 4386 - DNA, 21 bp, Artificial Sequence
  Synthetic
gtttacctctgaagctggcgg

SEQ ID NO: 4387 - DNA, 21 bp, Artificial Sequence
  Synthetic
ggtttacctctgaagctggcg

SEQ ID NO: 4388 - DNA, 21 bp, Artificial Sequence
  Synthetic
ccggtttacctctgaagctgg

SEQ ID NO: 4389 - DNA, 21 bp, Artificial Sequence
  Synthetic
cccggtttacctctgaagctg

SEQ ID NO: 4390 - DNA, 21 bp, Artificial Sequence
  Synthetic
ttgctttcagaaaagatcccc

SEQ ID NO: 4391 - DNA, 21 bp, Artificial Sequence
  Synthetic
caggaaaagcaaaaaatccat

SEQ ID NO: 4392 - DNA, 21 bp, Artificial Sequence
  Synthetic
acaggaaaagcaaaaaatcca

SEQ ID NO: 4393 - DNA, 21 bp, Artificial Sequence
  Synthetic
gacaggaaaagcaaaaaatcc

SEQ ID NO: 4394 - DNA, 21 bp, Artificial Sequence
  Synthetic
aggagcaattgcatccgtgac

SEQ ID NO: 4395 - DNA, 21 bp, Artificial Sequence
  Synthetic
caggagcaattgcatccgtga

SEQ ID NO: 4396 - DNA, 21 bp, Artificial Sequence
  Synthetic
ctgtcacggatgcaattgctc

SEQ ID NO: 4397 - DNA, 21 bp, Artificial Sequence
  Synthetic
tcaatgataataaaacatccc

SEQ ID NO: 4398 - DNA, 21 bp, Artificial Sequence
  Synthetic
ctttcatggtgccaaaatcca

SEQ ID NO: 4399 - DNA, 21 bp, Artificial Sequence
  Synthetic
tctttcatggtgccaaaatcc

SEQ ID NO: 4400 - DNA, 21 bp, Artificial Sequence
  Synthetic
tgaaagacaaaattgtagcta

SEQ ID NO: 4401 - DNA, 21 bp, Artificial Sequence
  Synthetic
gctaatgaatacaagtcagtt

SEQ ID NO: 4402 - DNA, 21 bp, Artificial Sequence
  Synthetic
ctaatgaatacaagtcagtta

SEQ ID NO: 4403 - DNA, 21 bp, Artificial Sequence
  Synthetic
acacatcagcttgaaatctgc

SEQ ID NO: 4404 - DNA, 21 bp, Artificial Sequence
  Synthetic
attgcattatcacacatcagc

SEQ ID NO: 4405 - DNA, 21 bp, Artificial Sequence
  Synthetic
gataccgtgtactacaagttg

SEQ ID NO: 4406 - DNA, 21 bp, Artificial Sequence
  Synthetic
accgtgtactacaagttggcg

SEQ ID NO: 4407 - DNA, 21 bp, Artificial Sequence
  Synthetic
acacctgtctggtgaacgact

SEQ ID NO: 4408 - DNA, 21 bp, Artificial Sequence
  Synthetic
gtcgttcaccagacaggtgtt

SEQ ID NO: 4409 - DNA, 21 bp, Artificial Sequence
  Synthetic
tcgttcaccagacaggtgtta

SEQ ID NO: 4410 - DNA, 21 bp, Artificial Sequence
  Synthetic
agcttccataacacctgtctg

SEQ ID NO: 4411 - DNA, 21 bp, Artificial Sequence
  Synthetic
agacaggtgttatggaagctg

SEQ ID NO: 4412 - DNA, 21 bp, Artificial Sequence
  Synthetic
ttatggaagctgctgaaggtt

SEQ ID NO: 4413 - DNA, 21 bp, Artificial Sequence
  Synthetic
agctgctgaaggttgtgaaat

SEQ ID NO: 4414 - DNA, 21 bp, Artificial Sequence
  Synthetic
gctgctgaaggttgtgaaatt

SEQ ID NO: 4415 - DNA, 21 bp, Artificial Sequence
  Synthetic
tgctgaaggttgtgaaattcg

SEQ ID NO: 4416 - DNA, 21 bp, Artificial Sequence
  Synthetic
tgctggtaagaaatcacttct

SEQ ID NO: 4417 - DNA, 21 bp, Artificial Sequence
  Synthetic
ccagggctgctaattgctggt

SEQ ID NO: 4418 - DNA, 21 bp, Artificial Sequence
  Synthetic
cgcggctttggggttgcctgc

SEQ ID NO: 4419 - DNA, 21 bp, Artificial Sequence
  Synthetic
ggcaggcaaccccaaagccgc

SEQ ID NO: 4420 - DNA, 21 bp, Artificial Sequence
  Synthetic
aaccccaaagccgcgcgagca

SEQ ID NO: 4421 - DNA, 21 bp, Artificial Sequence
  Synthetic
accccaaagccgcgcgagcag

SEQ ID NO: 4422 - DNA, 21 bp, Artificial Sequence
  Synthetic
ctcccactgctcgcgcggctt

SEQ ID NO: 4423 - DNA, 21 bp, Artificial Sequence
  Synthetic
ccccaaagccgcgcgagcagt

SEQ ID NO: 4424 - DNA, 21 bp, Artificial Sequence
  Synthetic
cctcccactgctcgcgcggct

SEQ ID NO: 4425 - DNA, 21 bp, Artificial Sequence
  Synthetic
ccaaagccgcgcgagcagtgg

SEQ ID NO: 4426 - DNA, 21 bp, Artificial Sequence
  Synthetic
caaagccgcgcgagcagtggg

SEQ ID NO: 4427 - DNA, 21 bp, Artificial Sequence
  Synthetic
gcgcgagcagtgggaggagca

SEQ ID NO: 4428 - DNA, 21 bp, Artificial Sequence
  Synthetic
gcgagcagtgggaggagcaat

SEQ ID NO: 4429 - DNA, 21 bp, Artificial Sequence
  Synthetic
ggagcaatgagaggcaatcct

SEQ ID NO: 4430 - DNA, 21 bp, Artificial Sequence
  Synthetic
cacgggatgaggatggggacc

SEQ ID NO: 4431 - DNA, 21 bp, Artificial Sequence
  Synthetic
gcacgggatgaggatggggac

SEQ ID NO: 4432 - DNA, 21 bp, Artificial Sequence
  Synthetic
tctgtggcacgggatgaggat

SEQ ID NO: 4433 - DNA, 21 bp, Artificial Sequence
  Synthetic
ctctgtggcacgggatgagga

SEQ ID NO: 4434 - DNA, 21 bp, Artificial Sequence
  Synthetic
ccccatcctcatcccgtgcca

SEQ ID NO: 4435 - DNA, 21 bp, Artificial Sequence
  Synthetic
actctgtggcacgggatgagg

SEQ ID NO: 4436 - DNA, 21 bp, Artificial Sequence
  Synthetic
gaccactctgtggcacgggat

SEQ ID NO: 4437 - DNA, 21 bp, Artificial Sequence
  Synthetic
cagaccactctgtggcacggg

SEQ ID NO: 4438 - DNA, 21 bp, Artificial Sequence
  Synthetic
gctgcagaccactctgtggca

SEQ ID NO: 4439 - DNA, 21 bp, Artificial Sequence
  Synthetic
tgctgcagaccactctgtggc

SEQ ID NO: 4440 - DNA, 21 bp, Artificial Sequence
  Synthetic
gccacagagtggtctgcagca

SEQ ID NO: 4441 - DNA, 21 bp, Artificial Sequence
  Synthetic
ccacagagtggtctgcagcag

SEQ ID NO: 4442 - DNA, 21 bp, Artificial Sequence
  Synthetic
gtggtctgcagcagcggagcc

SEQ ID NO: 4443 - DNA, 21 bp, Artificial Sequence
  Synthetic
gcggagccgtgggcaactact

SEQ ID NO: 4444 - DNA, 21 bp, Artificial Sequence
  Synthetic
cggagccgtgggcaactactc

SEQ ID NO: 4445 - DNA, 21 bp, Artificial Sequence
  Synthetic
gagccgtgggcaactactccg

SEQ ID NO: 4446 - DNA, 21 bp, Artificial Sequence
  Synthetic
aactactccggaggactggcc

SEQ ID NO: 4447 - DNA, 21 bp, Artificial Sequence
  Synthetic
tactccggaggactggccgtg

SEQ ID NO: 4448 - DNA, 21 bp, Artificial Sequence
  Synthetic
actccggaggactggccgtga

SEQ ID NO: 4449 - DNA, 21 bp, Artificial Sequence
  Synthetic
attccttcacggccagtcctc

SEQ ID NO: 4450 - DNA, 21 bp, Artificial Sequence
  Synthetic
cattccttcacggccagtcct

SEQ ID NO: 4451 - DNA, 21 bp, Artificial Sequence
  Synthetic
tgaaggaatggcttctggccc

SEQ ID NO: 4452 - DNA, 21 bp, Artificial Sequence
  Synthetic
caaccggtggccttcatgggc

SEQ ID NO: 4453 - DNA, 21 bp, Artificial Sequence
  Synthetic
ctggcccatgaaggccaccgg

SEQ ID NO: 4454 - DNA, 21 bp, Artificial Sequence
  Synthetic
tggcccatgaaggccaccggt

SEQ ID NO: 4455 - DNA, 21 bp, Artificial Sequence
  Synthetic
ggcccatgaaggccaccggtt

SEQ ID NO: 4456 - DNA, 21 bp, Artificial Sequence
  Synthetic
cttccccaaccggtggccttc

SEQ ID NO: 4457 - DNA, 21 bp, Artificial Sequence
  Synthetic
aaaatggacaaggattgtgaa

SEQ ID NO: 4458 - DNA, 21 bp, Artificial Sequence
  Synthetic
tgtgaaatgaaacgcaccaca

SEQ ID NO: 4459 - DNA, 21 bp, Artificial Sequence
  Synthetic
cgcaccacactggacagccct

SEQ ID NO: 4460 - DNA, 21 bp, Artificial Sequence
  Synthetic
gcaccacactggacagccctt

SEQ ID NO: 4461 - DNA, 21 bp, Artificial Sequence
  Synthetic
caccacactggacagcccttt

SEQ ID NO: 4462 - DNA, 21 bp, Artificial Sequence
  Synthetic
accacactggacagccctttg

SEQ ID NO: 4463 - DNA, 21 bp, Artificial Sequence
  Synthetic
ctggacagccctttggggaag

SEQ ID NO: 4464 - DNA, 21 bp, Artificial Sequence
  Synthetic
tggacagccctttggggaagc

SEQ ID NO: 4465 - DNA, 21 bp, Artificial Sequence
  Synthetic
cagacagctccagcttcccca

SEQ ID NO: 4466 - DNA, 21 bp, Artificial Sequence
  Synthetic
ggaagctggagctgtctggtt

SEQ ID NO: 4467 - DNA, 21 bp, Artificial Sequence
  Synthetic
ctggagctgtctggttgtgag

SEQ ID NO: 4468 - DNA, 21 bp, Artificial Sequence
  Synthetic
ctggttgtgagcagggtctgc

SEQ ID NO: 4469 - DNA, 21 bp, Artificial Sequence
  Synthetic
ggtctgcacgaaataaagctc

SEQ ID NO: 4470 - DNA, 21 bp, Artificial Sequence
  Synthetic
cacgaaataaagctcctgggc

SEQ ID NO: 4471 - DNA, 21 bp, Artificial Sequence
  Synthetic
acgaaataaagctcctgggca

SEQ ID NO: 4472 - DNA, 21 bp, Artificial Sequence
  Synthetic
cgaaataaagctcctgggcaa

SEQ ID NO: 4473 - DNA, 21 bp, Artificial Sequence
  Synthetic
gctgcagacgtccccttgccc

SEQ ID NO: 4474 - DNA, 21 bp, Artificial Sequence
  Synthetic
agctgcagacgtccccttgcc

SEQ ID NO: 4475 - DNA, 21 bp, Artificial Sequence
  Synthetic
tgggcaaggggacgtctgcag

SEQ ID NO: 4476 - DNA, 21 bp, Artificial Sequence
  Synthetic
tccgagaaccgcagcgggggc

SEQ ID NO: 4477 - DNA, 21 bp, Artificial Sequence
  Synthetic
tcccagcccccgctgcggttc

SEQ ID NO: 4478 - DNA, 21 bp, Artificial Sequence
  Synthetic
ctccgagaaccgcagcggggg

SEQ ID NO: 4479 - DNA, 21 bp, Artificial Sequence
  Synthetic
cccagcccccgctgcggttct

SEQ ID NO: 4480 - DNA, 21 bp, Artificial Sequence
  Synthetic
cggacctccgagaaccgcagc

SEQ ID NO: 4481 - DNA, 21 bp, Artificial Sequence
  Synthetic
ccggacctccgagaaccgcag

SEQ ID NO: 4482 - DNA, 21 bp, Artificial Sequence
  Synthetic
tccggacctccgagaaccgca

SEQ ID NO: 4483 - DNA, 21 bp, Artificial Sequence
  Synthetic
cccgctgcggttctcggaggt

SEQ ID NO: 4484 - DNA, 21 bp, Artificial Sequence
  Synthetic
ccgctgcggttctcggaggtc

SEQ ID NO: 4485 - DNA, 21 bp, Artificial Sequence
  Synthetic
catcaggggctccggacctcc

SEQ ID NO: 4486 - DNA, 21 bp, Artificial Sequence
  Synthetic
tgcatcaggggctccggacct

SEQ ID NO: 4487 - DNA, 21 bp, Artificial Sequence
  Synthetic
ctgtgcactgcatcaggggct

SEQ ID NO: 4488 - DNA, 21 bp, Artificial Sequence
  Synthetic
agccaggctgtgcactgcatc

SEQ ID NO: 4489 - DNA, 21 bp, Artificial Sequence
  Synthetic
cagccaggctgtgcactgcat

SEQ ID NO: 4490 - DNA, 21 bp, Artificial Sequence
  Synthetic
ctgatgcagtgcacagcctgg

SEQ ID NO: 4491 - DNA, 21 bp, Artificial Sequence
  Synthetic
tgaatgcctatttccaccagc

SEQ ID NO: 4492 - DNA, 21 bp, Artificial Sequence
  Synthetic
atttccaccagcccgaggcta

SEQ ID NO: 4493 - DNA, 21 bp, Artificial Sequence
  Synthetic
tcttcgatagcctcgggctgg

SEQ ID NO: 4494 - DNA, 21 bp, Artificial Sequence
  Synthetic
ctcttcgatagcctcgggctg

SEQ ID NO: 4495 - DNA, 21 bp, Artificial Sequence
  Synthetic
tccaccagcccgaggctatcg

SEQ ID NO: 4496 - DNA, 21 bp, Artificial Sequence
  Synthetic
acggggaactcttcgatagcc

SEQ ID NO: 4497 - DNA, 21 bp, Artificial Sequence
  Synthetic
ggatggtgaagagccggcacg

SEQ ID NO: 4498 - DNA, 21 bp, Artificial Sequence
  Synthetic
gggatggtgaagagccggcac

SEQ ID NO: 4499 - DNA, 21 bp, Artificial Sequence
  Synthetic
cgggatggtgaagagccggca

SEQ ID NO: 4500 - DNA, 21 bp, Artificial Sequence
  Synthetic
acgggatggtgaagagccggc

SEQ ID NO: 4501 - DNA, 21 bp, Artificial Sequence
  Synthetic
ttgctggaaaacgggatggtg

SEQ ID NO: 4502 - DNA, 21 bp, Artificial Sequence
  Synthetic
accttgctggaaaacgggatg

SEQ ID NO: 4503 - DNA, 21 bp, Artificial Sequence
  Synthetic
gttaccgaccttgctggaaaa

SEQ ID NO: 4504 - DNA, 21 bp, Artificial Sequence
  Synthetic
agttaccgaccttgctggaaa

SEQ ID NO: 4505 - DNA, 21 bp, Artificial Sequence
  Synthetic
cagagtggtgctcaagacact

SEQ ID NO: 4506 - DNA, 21 bp, Artificial Sequence
  Synthetic
agagtggtgctcaagacacta

SEQ ID NO: 4507 - DNA, 21 bp, Artificial Sequence
  Synthetic
aactggtgtttccatagtgtc

SEQ ID NO: 4508 - DNA, 21 bp, Artificial Sequence
  Synthetic
gcatggcctttccagcagcct

SEQ ID NO: 4509 - DNA, 21 bp, Artificial Sequence
  Synthetic
ttgacggcatccacaggctgc

SEQ ID NO: 4510 - DNA, 21 bp, Artificial Sequence
  Synthetic
cttgacggcatccacaggctg

SEQ ID NO: 4511 - DNA, 21 bp, Artificial Sequence
  Synthetic
cagcctgtggatgccgtcaag

SEQ ID NO: 4512 - DNA, 21 bp, Artificial Sequence
  Synthetic
gccgtcaagctgaacctccct

SEQ ID NO: 4513 - DNA, 21 bp, Artificial Sequence
  Synthetic
ttaatgatcttatagtaatcc

SEQ ID NO: 4514 - DNA, 21 bp, Artificial Sequence
  Synthetic
tttaatgatcttatagtaatc

SEQ ID NO: 4515 - DNA, 21 bp, Artificial Sequence
  Synthetic
tataagatcattaaaacgcct

SEQ ID NO: 4516 - DNA, 21 bp, Artificial Sequence
  Synthetic
atcattaaaacgcctatggat

SEQ ID NO: 4517 - DNA, 21 bp, Artificial Sequence
  Synthetic
tcattaaaacgcctatggata

SEQ ID NO: 4518 - DNA, 21 bp, Artificial Sequence
  Synthetic
cattaaaacgcctatggatat

SEQ ID NO: 4519 - DNA, 21 bp, Artificial Sequence
  Synthetic
cctatggatatgggaacaata

SEQ ID NO: 4520 - DNA, 21 bp, Artificial Sequence
  Synthetic
atgggaacaataaagaagcgc

SEQ ID NO: 4521 - DNA, 21 bp, Artificial Sequence
  Synthetic
tgggaacaataaagaagcgct

SEQ ID NO: 4522 - DNA, 21 bp, Artificial Sequence
  Synthetic
gcgcttggaaaacaactatta

SEQ ID NO: 4523 - DNA, 21 bp, Artificial Sequence
  Synthetic
cgcttggaaaacaactattac

SEQ ID NO: 4524 - DNA, 21 bp, Artificial Sequence
  Synthetic
aacaactattactggaatgct

SEQ ID NO: 4525 - DNA, 21 bp, Artificial Sequence
  Synthetic
acaactattactggaatgctc

SEQ ID NO: 4526 - DNA, 21 bp, Artificial Sequence
  Synthetic
tggaatgctcaggaatgtatc

SEQ ID NO: 4527 - DNA, 21 bp, Artificial Sequence
  Synthetic
gttgaagtcctggatacattc

SEQ ID NO: 4528 - DNA, 21 bp, Artificial Sequence
  Synthetic
tgtaaacatagtgttgaagtc

SEQ ID NO: 4529 - DNA, 21 bp, Artificial Sequence
  Synthetic
taacaatttgtaaacatagtg

SEQ ID NO: 4530 - DNA, 21 bp, Artificial Sequence
  Synthetic
aattgttacatctacaacaag

SEQ ID NO: 4531 - DNA, 21 bp, Artificial Sequence
  Synthetic
taagactatgtcatctccagg

SEQ ID NO: 4532 - DNA, 21 bp, Artificial Sequence
  Synthetic
gagatgacatagtcttaatgg

SEQ ID NO: 4533 - DNA, 21 bp, Artificial Sequence
  Synthetic
aagtgctgcagcggcatcctc

SEQ ID NO: 4534 - DNA, 21 bp, Artificial Sequence
  Synthetic
agtgctgcagcggcatcctca

SEQ ID NO: 4535 - DNA, 21 bp, Artificial Sequence
  Synthetic
atcctcaaggagatgtttgcc

SEQ ID NO: 4536 - DNA, 21 bp, Artificial Sequence
  Synthetic
cttcttggcaaacatctcctt

SEQ ID NO: 4537 - DNA, 21 bp, Artificial Sequence
  Synthetic
tgcttcttggcaaacatctcc

SEQ ID NO: 4538 - DNA, 21 bp, Artificial Sequence
  Synthetic
gcctggcccttctacaagcct

SEQ ID NO: 4539 - DNA, 21 bp, Artificial Sequence
  Synthetic
tccacgtccacaggcttgtag

SEQ ID NO: 4540 - DNA, 21 bp, Artificial Sequence
  Synthetic
cccttctacaagcctgtggac

SEQ ID NO: 4541 - DNA, 21 bp, Artificial Sequence
  Synthetic
ccttctacaagcctgtggacg

SEQ ID NO: 4542 - DNA, 21 bp, Artificial Sequence
  Synthetic
gcctccacgtccacaggcttg

SEQ ID NO: 4543 - DNA, 21 bp, Artificial Sequence
  Synthetic
aagcctgtggacgtggaggca

SEQ ID NO: 4544 - DNA, 21 bp, Artificial Sequence
  Synthetic
tgtgacatcatcaagcacccc

SEQ ID NO: 4545 - DNA, 21 bp, Artificial Sequence
  Synthetic
atcatcaagcaccccatggac

SEQ ID NO: 4546 - DNA, 21 bp, Artificial Sequence
  Synthetic
ccttgattgtgctcatgtcca

SEQ ID NO: 4547 - DNA, 21 bp, Artificial Sequence
  Synthetic
accttgattgtgctcatgtcc

SEQ ID NO: 4548 - DNA, 21 bp, Artificial Sequence
  Synthetic
tcacgggcctccagtttagac

SEQ ID NO: 4549 - DNA, 21 bp, Artificial Sequence
  Synthetic
ctcacgggcctccagtttaga

SEQ ID NO: 4550 - DNA, 21 bp, Artificial Sequence
  Synthetic
tccagtctaaactggaggccc

SEQ ID NO: 4551 - DNA, 21 bp, Artificial Sequence
  Synthetic
gcccgtgagtaccgtgatgct

SEQ ID NO: 4552 - DNA, 21 bp, Artificial Sequence
  Synthetic
ctcctgagcatcacggtactc

SEQ ID NO: 4553 - DNA, 21 bp, Artificial Sequence
  Synthetic
cccgtgagtaccgtgatgctc

SEQ ID NO: 4554 - DNA, 21 bp, Artificial Sequence
  Synthetic
tcggacgtcagcaccaaactc

SEQ ID NO: 4555 - DNA, 21 bp, Artificial Sequence
  Synthetic
atagcagttggagaacatcaa

SEQ ID NO: 4556 - DNA, 21 bp, Artificial Sequence
  Synthetic
gggttgtacttatagcagttg

SEQ ID NO: 4557 - DNA, 21 bp, Artificial Sequence
  Synthetic
gagggttgtacttatagcagt

SEQ ID NO: 4558 - DNA, 21 bp, Artificial Sequence
  Synthetic
ggagggttgtacttatagcag

SEQ ID NO: 4559 - DNA, 21 bp, Artificial Sequence
  Synthetic
ataagtacaaccctcctgacc

SEQ ID NO: 4560 - DNA, 21 bp, Artificial Sequence
  Synthetic
tggccaccacctcatggtcag

SEQ ID NO: 4561 - DNA, 21 bp, Artificial Sequence
  Synthetic
catggccaccacctcatggtc

SEQ ID NO: 4562 - DNA, 21 bp, Artificial Sequence
  Synthetic
ccatggccaccacctcatggt

SEQ ID NO: 4563 - DNA, 21 bp, Artificial Sequence
  Synthetic
cccaagcctcacctggagctt

SEQ ID NO: 4564 - DNA, 21 bp, Artificial Sequence
  Synthetic
ttcaaagaagagggctttggt

SEQ ID NO: 4565 - DNA, 21 bp, Artificial Sequence
  Synthetic
caaagaagagggctttggttt

SEQ ID NO: 4566 - DNA, 21 bp, Artificial Sequence
  Synthetic
gggctttggtttgagagcaac

SEQ ID NO: 4567 - DNA, 21 bp, Artificial Sequence
  Synthetic
agagcaacaagagatatcaag

SEQ ID NO: 4568 - DNA, 21 bp, Artificial Sequence
  Synthetic
ataaaaacaattcttctgcct

SEQ ID NO: 4569 - DNA, 21 bp, Artificial Sequence
  Synthetic
cataaaaacaattcttctgcc

SEQ ID NO: 4570 - DNA, 21 bp, Artificial Sequence
  Synthetic
cacgaaaattgctaatgactg

SEQ ID NO: 4571 - DNA, 21 bp, Artificial Sequence
  Synthetic
gaatctgctaaaaattcagtg

SEQ ID NO: 4572 - DNA, 21 bp, Artificial Sequence
  Synthetic
ctgctaaaaattcagtgttgg

SEQ ID NO: 4573 - DNA, 21 bp, Artificial Sequence
  Synthetic
gctaaaaattcagtgttgggt

SEQ ID NO: 4574 - DNA, 21 bp, Artificial Sequence
  Synthetic
agaaattattctcacccaaca

SEQ ID NO: 4575 - DNA, 21 bp, Artificial Sequence
  Synthetic
ggtcttgagaatataagggcc

SEQ ID NO: 4576 - DNA, 21 bp, Artificial Sequence
  Synthetic
agggcccttatattctcaaga

SEQ ID NO: 4577 - DNA, 21 bp, Artificial Sequence
  Synthetic
aggattcggtcttgagaatat

SEQ ID NO: 4578 - DNA, 21 bp, Artificial Sequence
  Synthetic
tggcttgaaggattcggtctt

SEQ ID NO: 4579 - DNA, 21 bp, Artificial Sequence
  Synthetic
catggcttgaaggattcggtc

SEQ ID NO: 4580 - DNA, 21 bp, Artificial Sequence
  Synthetic
caagaccgaatccttcaagcc

SEQ ID NO: 4581 - DNA, 21 bp, Artificial Sequence
  Synthetic
aagaccgaatccttcaagcca

SEQ ID NO: 4582 - DNA, 21 bp, Artificial Sequence
  Synthetic
agaccgaatccttcaagccat

SEQ ID NO: 4583 - DNA, 21 bp, Artificial Sequence
  Synthetic
tgcgatgtttcccatggcttg

SEQ ID NO: 4584 - DNA, 21 bp, Artificial Sequence
  Synthetic
cagtgcgatgtttcccatggc

SEQ ID NO: 4585 - DNA, 21 bp, Artificial Sequence
  Synthetic
cactggcctttcatttgctgt

SEQ ID NO: 4586 - DNA, 21 bp, Artificial Sequence
  Synthetic
ggcctttcatttgctgtgtga

SEQ ID NO: 4587 - DNA, 21 bp, Artificial Sequence
  Synthetic
gctggctcgctcacacagcaa

SEQ ID NO: 4588 - DNA, 21 bp, Artificial Sequence
  Synthetic
tatagggctgccagaaggagt

SEQ ID NO: 4589 - DNA, 21 bp, Artificial Sequence
  Synthetic
tttgaatatagggctgccaga

SEQ ID NO: 4590 - DNA, 21 bp, Artificial Sequence
  Synthetic
gtttgaatatagggctgccag

SEQ ID NO: 4591 - DNA, 21 bp, Artificial Sequence
  Synthetic
agggtttgaatatagggctgc

SEQ ID NO: 4592 - DNA, 21 bp, Artificial Sequence
  Synthetic
tcactggggagggtttgaata

SEQ ID NO: 4593 - DNA, 21 bp, Artificial Sequence
  Synthetic
cctatattcaaaccctcccca

SEQ ID NO: 4594 - DNA, 21 bp, Artificial Sequence
  Synthetic
gtcatattcactggggagggt

SEQ ID NO: 4595 - DNA, 21 bp, Artificial Sequence
  Synthetic
aggagtgtcatattcactggg

SEQ ID NO: 4596 - DNA, 21 bp, Artificial Sequence
  Synthetic
agaggagtgtcatattcactg

SEQ ID NO: 4597 - DNA, 21 bp, Artificial Sequence
  Synthetic
gagaggagtgtcatattcact

SEQ ID NO: 4598 - DNA, 21 bp, Artificial Sequence
  Synthetic
agagaggagtgtcatattcac

SEQ ID NO: 4599 - DNA, 21 bp, Artificial Sequence
  Synthetic
tagagaggagtgtcatattca

SEQ ID NO: 4600 - DNA, 21 bp, Artificial Sequence
  Synthetic
aatatgacactcctctctact

SEQ ID NO: 4601 - DNA, 21 bp, Artificial Sequence
  Synthetic
atgacactcctctctactttg

SEQ ID NO: 4602 - DNA, 21 bp, Artificial Sequence
  Synthetic
ttcatcttcttcaaagtagag

SEQ ID NO: 4603 - DNA, 21 bp, Artificial Sequence
  Synthetic
ctcctctctactttgaagaag

SEQ ID NO: 4604 - DNA, 21 bp, Artificial Sequence
  Synthetic
cttcatcttcttcaaagtaga

SEQ ID NO: 4605 - DNA, 21 bp, Artificial Sequence
  Synthetic
aacttcatcttcttcaaagta

SEQ ID NO: 4606 - DNA, 21 bp, Artificial Sequence
  Synthetic
cgaacttcatcttcttcaaag

SEQ ID NO: 4607 - DNA, 21 bp, Artificial Sequence
  Synthetic
agcttgtgtggactgaagata

SEQ ID NO: 4608 - DNA, 21 bp, Artificial Sequence
  Synthetic
atcatgtatagcttgtgtgga

SEQ ID NO: 4609 - DNA, 21 bp, Artificial Sequence
  Synthetic
aagacatcatgtatagcttgt

SEQ ID NO: 4610 - DNA, 21 bp, Artificial Sequence
  Synthetic
tttatagaagtaggcgtactg

SEQ ID NO: 4611 - DNA, 21 bp, Artificial Sequence
  Synthetic
tacttctataaagtcatccag

SEQ ID NO: 4612 - DNA, 21 bp, Artificial Sequence
  Synthetic
ctgctcacctggatgacttta

SEQ ID NO: 4613 - DNA, 21 bp, Artificial Sequence
  Synthetic
tgttggcatgaggatgggtct

SEQ ID NO: 4614 - DNA, 21 bp, Artificial Sequence
  Synthetic
ttgttggcatgaggatgggtc

SEQ ID NO: 4615 - DNA, 21 bp, Artificial Sequence
  Synthetic
tttgttggcatgaggatgggt

SEQ ID NO: 4616 - DNA, 21 bp, Artificial Sequence
  Synthetic
gggtagtttgttggcatgagg

SEQ ID NO: 4617 - DNA, 21 bp, Artificial Sequence
  Synthetic
tcaagggtagtttgttggcat

SEQ ID NO: 4618 - DNA, 21 bp, Artificial Sequence
  Synthetic
cctcatgccaacaaactaccc

SEQ ID NO: 4619 - DNA, 21 bp, Artificial Sequence
  Synthetic
cttcaagggtagtttgttggc

SEQ ID NO: 4620 - DNA, 21 bp, Artificial Sequence
  Synthetic
catgccaacaaactacccttg

SEQ ID NO: 4621 - DNA, 21 bp, Artificial Sequence
  Synthetic
tcgtaagtgaaagaatccttc

SEQ ID NO: 4622 - DNA, 21 bp, Artificial Sequence
  Synthetic
ccttgaaggattctttcactt

SEQ ID NO: 4623 - DNA, 21 bp, Artificial Sequence
  Synthetic
ttgaaggattctttcacttac

SEQ ID NO: 4624 - DNA, 21 bp, Artificial Sequence
  Synthetic
acctgtagtcctcgtaagtga

SEQ ID NO: 4625 - DNA, 21 bp, Artificial Sequence
  Synthetic
accaacctgtagtcctcgtaa

SEQ ID NO: 4626 - DNA, 21 bp, Artificial Sequence
  Synthetic
tgggcagtctcttctgttatg

SEQ ID NO: 4627 - DNA, 21 bp, Artificial Sequence
  Synthetic
cgaggcaaaaccaaattccca

SEQ ID NO: 4628 - DNA, 21 bp, Artificial Sequence
  Synthetic
aggcaaaaccaaattcccaca

SEQ ID NO: 4629 - DNA, 21 bp, Artificial Sequence
  Synthetic
cacgcgggaaccatcctctgt

SEQ ID NO: 4630 - DNA, 21 bp, Artificial Sequence
  Synthetic
tcacgcgggaaccatcctctg

SEQ ID NO: 4631 - DNA, 21 bp, Artificial Sequence
  Synthetic
gtcacgcgggaaccatcctct

SEQ ID NO: 4632 - DNA, 21 bp, Artificial Sequence
  Synthetic
gaatcagagccagggtcacgc

SEQ ID NO: 4633 - DNA, 21 bp, Artificial Sequence
  Synthetic
ggaatcagagccagggtcacg

SEQ ID NO: 4634 - DNA, 21 bp, Artificial Sequence
  Synthetic
aggaatcagagccagggtcac

SEQ ID NO: 4635 - DNA, 21 bp, Artificial Sequence
  Synthetic
gaccctggctctgattccttt

SEQ ID NO: 4636 - DNA, 21 bp, Artificial Sequence
  Synthetic
accctggctctgattccttta

SEQ ID NO: 4637 - DNA, 21 bp, Artificial Sequence
  Synthetic
atcccataaaggaatcagagc

SEQ ID NO: 4638 - DNA, 21 bp, Artificial Sequence
  Synthetic
acacatatcccataaaggaat

SEQ ID NO: 4639 - DNA, 21 bp, Artificial Sequence
  Synthetic
gtggttacacatatcccataa

SEQ ID NO: 4640 - DNA, 21 bp, Artificial Sequence
  Synthetic
tgtggttacacatatcccata

SEQ ID NO: 4641 - DNA, 21 bp, Artificial Sequence
  Synthetic
tagatcactactggttacaac

SEQ ID NO: 4642 - DNA, 21 bp, Artificial Sequence
  Synthetic
agatcactactggttacaacc

SEQ ID NO: 4643 - DNA, 21 bp, Artificial Sequence
  Synthetic
acaacctggaagatgaccgct

SEQ ID NO: 4644 - DNA, 21 bp, Artificial Sequence
  Synthetic
cgctgtgagtgtgtggctctg

SEQ ID NO: 4645 - DNA, 21 bp, Artificial Sequence
  Synthetic
gtgtgtggctctgcaggattt

SEQ ID NO: 4646 - DNA, 21 bp, Artificial Sequence
  Synthetic
ctctccagcccgaaaatcctg

SEQ ID NO: 4647 - DNA, 21 bp, Artificial Sequence
  Synthetic
gagacccacctgctctccagc

SEQ ID NO: 4648 - DNA, 21 bp, Artificial Sequence
  Synthetic
agtgccataaaaaatgtaaat

SEQ ID NO: 4649 - DNA, 21 bp, Artificial Sequence
  Synthetic
caagaagctttgaatcaactg

SEQ ID NO: 4650 - DNA, 21 bp, Artificial Sequence
  Synthetic
aatcaactgatgagacaattg

SEQ ID NO: 4651 - DNA, 21 bp, Artificial Sequence
  Synthetic
caggaaatgaaaagaaagcac

SEQ ID NO: 4652 - DNA, 21 bp, Artificial Sequence
  Synthetic
aaatcagtcacaggaaatgaa

SEQ ID NO: 4653 - DNA, 21 bp, Artificial Sequence
  Synthetic
caataaaatcagtcacaggaa

SEQ ID NO: 4654 - DNA, 21 bp, Artificial Sequence
  Synthetic
aggagcaataaaatcagtcac

SEQ ID NO: 4655 - DNA, 21 bp, Artificial Sequence
  Synthetic
caggagcaataaaatcagtca

SEQ ID NO: 4656 - DNA, 21 bp, Artificial Sequence
  Synthetic
tttaatgatcatggagtagcc

SEQ ID NO: 4657 - DNA, 21 bp, Artificial Sequence
  Synthetic
gtttaatgatcatggagtagc

SEQ ID NO: 4658 - DNA, 21 bp, Artificial Sequence
  Synthetic
ccattgggtgtttaatgatca

SEQ ID NO: 4659 - DNA, 21 bp, Artificial Sequence
  Synthetic
tccattgggtgtttaatgatc

SEQ ID NO: 4660 - DNA, 21 bp, Artificial Sequence
  Synthetic
tccatgatcattaaacaccca

SEQ ID NO: 4661 - DNA, 21 bp, Artificial Sequence
  Synthetic
ctttcatggtactaaaatcca

SEQ ID NO: 4662 - DNA, 21 bp, Artificial Sequence
  Synthetic
agtaccatgaaagaaaagatc

SEQ ID NO: 4663 - DNA, 21 bp, Artificial Sequence
  Synthetic
agaacaatgactatcagtcca

SEQ ID NO: 4664 - DNA, 21 bp, Artificial Sequence
  Synthetic
acaatgactatcagtccatag

SEQ ID NO: 4665 - DNA, 21 bp, Artificial Sequence
  Synthetic
agagttacctttagttcttct

SEQ ID NO: 4666 - DNA, 21 bp, Artificial Sequence
  Synthetic
atggcattagtacacattagt

SEQ ID NO: 4667 - DNA, 21 bp, Artificial Sequence
  Synthetic
atgccatgatttacaataaac

SEQ ID NO: 4668 - DNA, 21 bp, Artificial Sequence
  Synthetic
accatttattataaagctgca

SEQ ID NO: 4669 - DNA, 21 bp, Artificial Sequence
  Synthetic
ccggaagatcctgagggctgc

SEQ ID NO: 4670 - DNA, 21 bp, Artificial Sequence
  Synthetic
agccaaatctcttgcagccct

SEQ ID NO: 4671 - DNA, 21 bp, Artificial Sequence
  Synthetic
agggctgcaagagatttggct

SEQ ID NO: 4672 - DNA, 21 bp, Artificial Sequence
  Synthetic
tggctttggacactcttataa

SEQ ID NO: 4673 - DNA, 21 bp, Artificial Sequence
  Synthetic
acactcttataatagagtatc

SEQ ID NO: 4674 - DNA, 21 bp, Artificial Sequence
  Synthetic
cactcttataatagagtatcg

SEQ ID NO: 4675 - DNA, 21 bp, Artificial Sequence
  Synthetic
actcttataatagagtatcgt

SEQ ID NO: 4676 - DNA, 21 bp, Artificial Sequence
  Synthetic
tttcccacgatactctattat

SEQ ID NO: 4677 - DNA, 21 bp, Artificial Sequence
  Synthetic
aagtcatgttacgacagcaat

SEQ ID NO: 4678 - DNA, 21 bp, Artificial Sequence
  Synthetic
tacgacagcaatttgaggtca

SEQ ID NO: 4679 - DNA, 21 bp, Artificial Sequence
  Synthetic
atgggcatttcttcaaaaagt

SEQ ID NO: 4680 - DNA, 21 bp, Artificial Sequence
  Synthetic
aatgaatgacgttcttacttt

SEQ ID NO: 4681 - DNA, 21 bp, Artificial Sequence
  Synthetic
gagcacaaaggggtatggtct

SEQ ID NO: 4682 - DNA, 21 bp, Artificial Sequence
  Synthetic
agagcacaaaggggtatggtc

SEQ ID NO: 4683 - DNA, 21 bp, Artificial Sequence
  Synthetic
tctactcaaaattcaatggtg

SEQ ID NO: 4684 - DNA, 21 bp, Artificial Sequence
  Synthetic
acatctctacaccattgaatt

SEQ ID NO: 4685 - DNA, 21 bp, Artificial Sequence
  Synthetic
tccacacacatctctacacca

SEQ ID NO: 4686 - DNA, 21 bp, Artificial Sequence
  Synthetic
ttcaatggtgtagagatgtgt

SEQ ID NO: 4687 - DNA, 21 bp, Artificial Sequence
  Synthetic
ccgagcatcattaccgaaagt

SEQ ID NO: 4688 - DNA, 21 bp, Artificial Sequence
  Synthetic
ctgatgaaccgagcatcatta

SEQ ID NO: 4689 - DNA, 21 bp, Artificial Sequence
  Synthetic
cggtaatgatgctcggttcat

SEQ ID NO: 4690 - DNA, 21 bp, Artificial Sequence
  Synthetic
tgtacatgatcttctgatgaa

SEQ ID NO: 4691 - DNA, 21 bp, Artificial Sequence
  Synthetic
tttggtgtacatgatcttctg

SEQ ID NO: 4692 - DNA, 21 bp, Artificial Sequence
  Synthetic
gaagatcatgtacaccaaatg

SEQ ID NO: 4693 - DNA, 21 bp, Artificial Sequence
  Synthetic
aggtgcgacacatgattgcag

SEQ ID NO: 4694 - DNA, 21 bp, Artificial Sequence
  Synthetic
ggtgcgacacatgattgcaga

SEQ ID NO: 4695 - DNA, 21 bp, Artificial Sequence
  Synthetic
agacacagcatagatgcacag

SEQ ID NO: 4696 - DNA, 21 bp, Artificial Sequence
  Synthetic
tatgctgtgtctgccatcacc

SEQ ID NO: 4697 - DNA, 21 bp, Artificial Sequence
  Synthetic
tgtctgccatcaccaaggatg

SEQ ID NO: 4698 - DNA, 21 bp, Artificial Sequence
  Synthetic
acggtgctgctgcgctcagtg

SEQ ID NO: 4699 - DNA, 21 bp, Artificial Sequence
  Synthetic
tgtcttgcagctggtccagca

SEQ ID NO: 4700 - DNA, 21 bp, Artificial Sequence
  Synthetic
gtgctggaccagctgcaagac

SEQ ID NO: 4701 - DNA, 21 bp, Artificial Sequence
  Synthetic
gctgcaagacaaggaccccgc

SEQ ID NO: 4702 - DNA, 21 bp, Artificial Sequence
  Synthetic
cgggctgcgcaaatatcctgg

SEQ ID NO: 4703 - DNA, 21 bp, Artificial Sequence
  Synthetic
acgggctgcgcaaatatcctg

SEQ ID NO: 4704 - DNA, 21 bp, Artificial Sequence
  Synthetic
gccaggatatttgcgcagccc

SEQ ID NO: 4705 - DNA, 21 bp, Artificial Sequence
  Synthetic
atatttgcgcagcccgtgagt

SEQ ID NO: 4706 - DNA, 21 bp, Artificial Sequence
  Synthetic
tttgcgcagcccgtgagtctg

SEQ ID NO: 4707 - DNA, 21 bp, Artificial Sequence
  Synthetic
ttgcgcagcccgtgagtctga

SEQ ID NO: 4708 - DNA, 21 bp, Artificial Sequence
  Synthetic
cagcccgtgagtctgaaggag

SEQ ID NO: 4709 - DNA, 21 bp, Artificial Sequence
  Synthetic
acacccacctccttcagactc

SEQ ID NO: 4710 - DNA, 21 bp, Artificial Sequence
  Synthetic
taaaattaggtaccagattat

SEQ ID NO: 4711 - DNA, 21 bp, Artificial Sequence
  Synthetic
ttggatcacattaaacatccc

SEQ ID NO: 4712 - DNA, 21 bp, Artificial Sequence
  Synthetic
catcccatggactttgccaca

SEQ ID NO: 4713 - DNA, 21 bp, Artificial Sequence
  Synthetic
tcctcattgtggcaaagtcca

SEQ ID NO: 4714 - DNA, 21 bp, Artificial Sequence
  Synthetic
tcccatggactttgccacaat

SEQ ID NO: 4715 - DNA, 21 bp, Artificial Sequence
  Synthetic
ttcctcattgtggcaaagtcc

SEQ ID NO: 4716 - DNA, 21 bp, Artificial Sequence
  Synthetic
cccatggactttgccacaatg

SEQ ID NO: 4717 - DNA, 21 bp, Artificial Sequence
  Synthetic
ttgccacaatgaggaaacggt

SEQ ID NO: 4718 - DNA, 21 bp, Artificial Sequence
  Synthetic
tgaggaaacggttagaagctc

SEQ ID NO: 4719 - DNA, 21 bp, Artificial Sequence
  Synthetic
ctcaagggtataaaaacctcc

SEQ ID NO: 4720 - DNA, 21 bp, Artificial Sequence
  Synthetic
ggtataaaaacctccatgagt

SEQ ID NO: 4721 - DNA, 21 bp, Artificial Sequence
  Synthetic
tataaaaacctccatgagttt

SEQ ID NO: 4722 - DNA, 21 bp, Artificial Sequence
  Synthetic
ataaaaacctccatgagtttg

SEQ ID NO: 4723 - DNA, 21 bp, Artificial Sequence
  Synthetic
aaaaacctccatgagtttgag

SEQ ID NO: 4724 - DNA, 21 bp, Artificial Sequence
  Synthetic
tcaaaatcctcctcaaactca

SEQ ID NO: 4725 - DNA, 21 bp, Artificial Sequence
  Synthetic
atcaaaatcctcctcaaactc

SEQ ID NO: 4726 - DNA, 21 bp, Artificial Sequence
  Synthetic
gatctcattatagataactgc

SEQ ID NO: 4727 - DNA, 21 bp, Artificial Sequence
  Synthetic
tacttcatgcagttatctata

SEQ ID NO: 4728 - DNA, 21 bp, Artificial Sequence
  Synthetic
taactgcatgaagtacaatgc

SEQ ID NO: 4729 - DNA, 21 bp, Artificial Sequence
  Synthetic
aactgcatgaagtacaatgcc

SEQ ID NO: 4730 - DNA, 21 bp, Artificial Sequence
  Synthetic
tgccagggacaccgtgttcta

SEQ ID NO: 4731 - DNA, 21 bp, Artificial Sequence
  Synthetic
accgtgttctatagagccgcg

SEQ ID NO: 4732 - DNA, 21 bp, Artificial Sequence
  Synthetic
cgcagcctcaccgcggctcta

SEQ ID NO: 4733 - DNA, 21 bp, Artificial Sequence
  Synthetic
agaaattgaagggcgcttgca

SEQ ID NO: 4734 - DNA, 21 bp, Artificial Sequence
  Synthetic
tttgatcccctggagatcata

SEQ ID NO: 4735 - DNA, 21 bp, Artificial Sequence
  Synthetic
ttgatcccctggagatcatat

SEQ ID NO: 4736 - DNA, 21 bp, Artificial Sequence
  Synthetic
catcttccaatatgatctcca

SEQ ID NO: 4737 - DNA, 21 bp, Artificial Sequence
  Synthetic
tcatcttccaatatgatctcc

SEQ ID NO: 4738 - DNA, 21 bp, Artificial Sequence
  Synthetic
gtcatcttccaatatgatctc

SEQ ID NO: 4739 - DNA, 21 bp, Artificial Sequence
  Synthetic
tggaagatgacctcactgctc

SEQ ID NO: 4740 - DNA, 21 bp, Artificial Sequence
  Synthetic
gatgacctcactgctcaagag

SEQ ID NO: 4741 - DNA, 21 bp, Artificial Sequence
  Synthetic
acctcactgctcaagagatga

SEQ ID NO: 4742 - DNA, 21 bp, Artificial Sequence
  Synthetic
cactcactcatctcttgagca

SEQ ID NO: 4743 - DNA, 21 bp, Artificial Sequence
  Synthetic
gctgttgcactcactcatctc

SEQ ID NO: 4744 - DNA, 21 bp, Artificial Sequence
  Synthetic
atgagtgagtgcaacagcaac

SEQ ID NO: 4745 - DNA, 21 bp, Artificial Sequence
  Synthetic
tgagtgagtgcaacagcaaca

SEQ ID NO: 4746 - DNA, 21 bp, Artificial Sequence
  Synthetic
gcaacagcaacaaggaaaaca

SEQ ID NO: 4747 - DNA, 21 bp, Artificial Sequence
  Synthetic
cgagcggcctcctgtctgctt

SEQ ID NO: 4748 - DNA, 21 bp, Artificial Sequence
  Synthetic
acgcttagttcttaagcagac

SEQ ID NO: 4749 - DNA, 21 bp, Artificial Sequence
  Synthetic
gacgcttagttcttaagcaga

SEQ ID NO: 4750 - DNA, 21 bp, Artificial Sequence
  Synthetic
aactaagcgtcacaaaaacaa

SEQ ID NO: 4751 - DNA, 21 bp, Artificial Sequence
  Synthetic
cacaaaaacaacagagtcaaa

SEQ ID NO: 4752 - DNA, 21 bp, Artificial Sequence
  Synthetic
acaacagagtcaaaaagaaaa

SEQ ID NO: 4753 - DNA, 21 bp, Artificial Sequence
  Synthetic
cggcgtgccgtgggcgctggg

SEQ ID NO: 4754 - DNA, 21 bp, Artificial Sequence
  Synthetic
gccggcgtgccgtgggcgctg

SEQ ID NO: 4755 - DNA, 21 bp, Artificial Sequence
  Synthetic
ggccggcgtgccgtgggcgct

SEQ ID NO: 4756 - DNA, 21 bp, Artificial Sequence
  Synthetic
aggccggcgtgccgtgggcgc

SEQ ID NO: 4757 - DNA, 21 bp, Artificial Sequence
  Synthetic
gaggccggcgtgccgtgggcg

SEQ ID NO: 4758 - DNA, 21 bp, Artificial Sequence
  Synthetic
actggccgaggccggcgtgcc

SEQ ID NO: 4759 - DNA, 21 bp, Artificial Sequence
  Synthetic
ccggcctcggccagtgccctc

SEQ ID NO: 4760 - DNA, 21 bp, Artificial Sequence
  Synthetic
cggcctcggccagtgccctcc

SEQ ID NO: 4761 - DNA, 21 bp, Artificial Sequence
  Synthetic
tgggctccgggagggcactgg

SEQ ID NO: 4762 - DNA, 21 bp, Artificial Sequence
  Synthetic
gatgcgcaccttgggctccgg

SEQ ID NO: 4763 - DNA, 21 bp, Artificial Sequence
  Synthetic
acgatgcgcaccttgggctcc

SEQ ID NO: 4764 - DNA, 21 bp, Artificial Sequence
  Synthetic
cacgatgcgcaccttgggctc

SEQ ID NO: 4765 - DNA, 21 bp, Artificial Sequence
  Synthetic
ccacgatgcgcaccttgggct

SEQ ID NO: 4766 - DNA, 21 bp, Artificial Sequence
  Synthetic
ccggagcccaaggtgcgcatc

SEQ ID NO: 4767 - DNA, 21 bp, Artificial Sequence
  Synthetic
cggagcccaaggtgcgcatcg

SEQ ID NO: 4768 - DNA, 21 bp, Artificial Sequence
  Synthetic
ctgtactccacgatgcgcacc

SEQ ID NO: 4769 - DNA, 21 bp, Artificial Sequence
  Synthetic
gtacagccctccgtccgcccc

SEQ ID NO: 4770 - DNA, 21 bp, Artificial Sequence
  Synthetic
tacagccctccgtccgccccc

SEQ ID NO: 4771 - DNA, 21 bp, Artificial Sequence
  Synthetic
gaggcctcctgggggcggacg

SEQ ID NO: 4772 - DNA, 21 bp, Artificial Sequence
  Synthetic
aggaggcctcctgggggcgga

SEQ ID NO: 4773 - DNA, 21 bp, Artificial Sequence
  Synthetic
caggaggcctcctgggggcgg

SEQ ID NO: 4774 - DNA, 21 bp, Artificial Sequence
  Synthetic
tacacaggaggcctcctgggg

SEQ ID NO: 4775 - DNA, 21 bp, Artificial Sequence
  Synthetic
gtagtacacaggaggcctcct

SEQ ID NO: 4776 - DNA, 21 bp, Artificial Sequence
  Synthetic
tgtagtacacaggaggcctcc

SEQ ID NO: 4777 - DNA, 21 bp, Artificial Sequence
  Synthetic
ttgtagtacacaggaggcctc

SEQ ID NO: 4778 - DNA, 21 bp, Artificial Sequence
  Synthetic
ctcgatgaacttgtagtacac

SEQ ID NO: 4779 - DNA, 21 bp, Artificial Sequence
  Synthetic
ctcctgtgtactacaagttca

SEQ ID NO: 4780 - DNA, 21 bp, Artificial Sequence
  Synthetic
tctcgatgaacttgtagtaca

SEQ ID NO: 4781 - DNA, 21 bp, Artificial Sequence
  Synthetic
cctgtgtactacaagttcatc

SEQ ID NO: 4782 - DNA, 21 bp, Artificial Sequence
  Synthetic
acaagttcatcgagaagtcgg

SEQ ID NO: 4783 - DNA, 21 bp, Artificial Sequence
  Synthetic
aagttcatcgagaagtcggcc

SEQ ID NO: 4784 - DNA, 21 bp, Artificial Sequence
  Synthetic
agttcatcgagaagtcggccg

SEQ ID NO: 4785 - DNA, 21 bp, Artificial Sequence
  Synthetic
agttcctcggccgacttctcg

SEQ ID NO: 4786 - DNA, 21 bp, Artificial Sequence
  Synthetic
atcgagaagtcggccgaggaa

SEQ ID NO: 4787 - DNA, 21 bp, Artificial Sequence
  Synthetic
agtcggccgaggaactggaca

SEQ ID NO: 4788 - DNA, 21 bp, Artificial Sequence
  Synthetic
gccgaggaactggacaacgag

SEQ ID NO: 4789 - DNA, 21 bp, Artificial Sequence
  Synthetic
ccgaggaactggacaacgagg

SEQ ID NO: 4790 - DNA, 21 bp, Artificial Sequence
  Synthetic
gacaacgaggtggagtatgac

SEQ ID NO: 4791 - DNA, 21 bp, Artificial Sequence
  Synthetic
acgaggtggagtatgacatgg

SEQ ID NO: 4792 - DNA, 21 bp, Artificial Sequence
  Synthetic
gaggtggagtatgacatggac

SEQ ID NO: 4793 - DNA, 21 bp, Artificial Sequence
  Synthetic
aggtggagtatgacatggacg

SEQ ID NO: 4794 - DNA, 21 bp, Artificial Sequence
  Synthetic
gtggagtatgacatggacgag

SEQ ID NO: 4795 - DNA, 21 bp, Artificial Sequence
  Synthetic
gacgaggaggactatgcctgg

SEQ ID NO: 4796 - DNA, 21 bp, Artificial Sequence
  Synthetic
acgaggaggactatgcctggc

SEQ ID NO: 4797 - DNA, 21 bp, Artificial Sequence
  Synthetic
atgcctggctggagatcgtca

SEQ ID NO: 4798 - DNA, 21 bp, Artificial Sequence
  Synthetic
gcctggctggagatcgtcaat

SEQ ID NO: 4799 - DNA, 21 bp, Artificial Sequence
  Synthetic
gagatcgtcaatgagaagcgc

SEQ ID NO: 4800 - DNA, 21 bp, Artificial Sequence
  Synthetic
gactgcgtccccgccgtgtcg

SEQ ID NO: 4801 - DNA, 21 bp, Artificial Sequence
  Synthetic
aaacatgctctgcgacacggc

SEQ ID NO: 4802 - DNA, 21 bp, Artificial Sequence
  Synthetic
caaacatgctctgcgacacgg

SEQ ID NO: 4803 - DNA, 21 bp, Artificial Sequence
  Synthetic
tcaaacatgctctgcgacacg

SEQ ID NO: 4804 - DNA, 21 bp, Artificial Sequence
  Synthetic
ccgccgtgtcgcagagcatgt

SEQ ID NO: 4805 - DNA, 21 bp, Artificial Sequence
  Synthetic
cagagcatgtttgagttcctg

SEQ ID NO: 4806 - DNA, 21 bp, Artificial Sequence
  Synthetic
ttgagttcctgatggaccgct

SEQ ID NO: 4807 - DNA, 21 bp, Artificial Sequence
  Synthetic
gagttcctgatggaccgcttc

SEQ ID NO: 4808 - DNA, 21 bp, Artificial Sequence
  Synthetic
tccttctcgaagcggtccatc

SEQ ID NO: 4809 - DNA, 21 bp, Artificial Sequence
  Synthetic
ttcctgatggaccgcttcgag

SEQ ID NO: 4810 - DNA, 21 bp, Artificial Sequence
  Synthetic
ctccttctcgaagcggtccat

SEQ ID NO: 4811 - DNA, 21 bp, Artificial Sequence
  Synthetic
tcctgatggaccgcttcgaga

SEQ ID NO: 4812 - DNA, 21 bp, Artificial Sequence
  Synthetic
ttctcgcagtgcgactccttc

SEQ ID NO: 4813 - DNA, 21 bp, Artificial Sequence
  Synthetic
ttaaaacattgcaatggcatt

SEQ ID NO: 4814 - DNA, 21 bp, Artificial Sequence
  Synthetic
gcataggcagcatgcttctta

SEQ ID NO: 4815 - DNA, 21 bp, Artificial Sequence
  Synthetic
aagcataggcagcatgcttct

SEQ ID NO: 4816 - DNA, 21 bp, Artificial Sequence
  Synthetic
gcttggcctttctataaacca

SEQ ID NO: 4817 - DNA, 21 bp, Artificial Sequence
  Synthetic
gcagaagcatccactggttta

SEQ ID NO: 4818 - DNA, 21 bp, Artificial Sequence
  Synthetic
ggtagtcatgcaggccaagtg

SEQ ID NO: 4819 - DNA, 21 bp, Artificial Sequence
  Synthetic
catgacatcattaagcacccc

SEQ ID NO: 4820 - DNA, 21 bp, Artificial Sequence
  Synthetic
ccttgacagtgctgaggtcca

SEQ ID NO: 4821 - DNA, 21 bp, Artificial Sequence
  Synthetic
accttgacagtgctgaggtcc

SEQ ID NO: 4822 - DNA, 21 bp, Artificial Sequence
  Synthetic
gcagtgggtaccttgacagtg

SEQ ID NO: 4823 - DNA, 21 bp, Artificial Sequence
  Synthetic
tgcctccttctgcagcggaag

SEQ ID NO: 4824 - DNA, 21 bp, Artificial Sequence
  Synthetic
gcctccttctgcagcggaaga

SEQ ID NO: 4825 - DNA, 21 bp, Artificial Sequence
  Synthetic
ctccttctgcagcggaagatg

SEQ ID NO: 4826 - DNA, 21 bp, Artificial Sequence
  Synthetic
gaagatggagaaccgtgatta

SEQ ID NO: 4827 - DNA, 21 bp, Artificial Sequence
  Synthetic
aagatggagaaccgtgattac

SEQ ID NO: 4828 - DNA, 21 bp, Artificial Sequence
  Synthetic
aaccgtgattaccgggatgca

SEQ ID NO: 4829 - DNA, 21 bp, Artificial Sequence
  Synthetic
accgtgattaccgggatgcac

SEQ ID NO: 4830 - DNA, 21 bp, Artificial Sequence
  Synthetic
ggattgtacttatagcagttg

SEQ ID NO: 4831 - DNA, 21 bp, Artificial Sequence
  Synthetic
ggggattgtacttatagcagt

SEQ ID NO: 4832 - DNA, 21 bp, Artificial Sequence
  Synthetic
gggggattgtacttatagcag

SEQ ID NO: 4833 - DNA, 21 bp, Artificial Sequence
  Synthetic
ttgccacaacatcgtgatctg

SEQ ID NO: 4834 - DNA, 21 bp, Artificial Sequence
  Synthetic
attgccacaacatcgtgatct

SEQ ID NO: 4835 - DNA, 21 bp, Artificial Sequence
  Synthetic
cattgccacaacatcgtgatc

SEQ ID NO: 4836 - DNA, 21 bp, Artificial Sequence
  Synthetic
ccattgccacaacatcgtgat

SEQ ID NO: 4837 - DNA, 21 bp, Artificial Sequence
  Synthetic
tcacgatgttgtggcaatggc

SEQ ID NO: 4838 - DNA, 21 bp, Artificial Sequence
  Synthetic
caatacctacacaaggtagtg

SEQ ID NO: 4839 - DNA, 21 bp, Artificial Sequence
  Synthetic
caaggtagtgatgaaggctct

SEQ ID NO: 4840 - DNA, 21 bp, Artificial Sequence
  Synthetic
aaggtagtgatgaaggctctg

SEQ ID NO: 4841 - DNA, 21 bp, Artificial Sequence
  Synthetic
ccatgcgaactgatgtttcca

SEQ ID NO: 4842 - DNA, 21 bp, Artificial Sequence
  Synthetic
acaggctgccggaatggccat

SEQ ID NO: 4843 - DNA, 21 bp, Artificial Sequence
  Synthetic
gcatggccattccggcagcct

SEQ ID NO: 4844 - DNA, 21 bp, Artificial Sequence
  Synthetic
ttgacagcatccacaggctgc

SEQ ID NO: 4845 - DNA, 21 bp, Artificial Sequence
  Synthetic
tttgacagcatccacaggctg

SEQ ID NO: 4846 - DNA, 21 bp, Artificial Sequence
  Synthetic
cagcctgtggatgctgtcaaa

SEQ ID NO: 4847 - DNA, 21 bp, Artificial Sequence
  Synthetic
gctgtcaaactgggtctaccg

SEQ ID NO: 4848 - DNA, 21 bp, Artificial Sequence
  Synthetic
cacaaaattataaaacagcct

SEQ ID NO: 4849 - DNA, 21 bp, Artificial Sequence
  Synthetic
attataaaacagcctatggac

SEQ ID NO: 4850 - DNA, 21 bp, Artificial Sequence
  Synthetic
cctatggacatgggtactatt

SEQ ID NO: 4851 - DNA, 21 bp, Artificial Sequence
  Synthetic
tatggacatgggtactattaa

SEQ ID NO: 4852 - DNA, 21 bp, Artificial Sequence
  Synthetic
atggacatgggtactattaag

SEQ ID NO: 4853 - DNA, 21 bp, Artificial Sequence
  Synthetic
tgggtactattaagaggagac

SEQ ID NO: 4854 - DNA, 21 bp, Artificial Sequence
  Synthetic
gagacttgaaaacaattatta

SEQ ID NO: 4855 - DNA, 21 bp, Artificial Sequence
  Synthetic
acaattattattgggctgctt

SEQ ID NO: 4856 - DNA, 21 bp, Artificial Sequence
  Synthetic
tattaaaatcttgcatacact

SEQ ID NO: 4857 - DNA, 21 bp, Artificial Sequence
  Synthetic
ttgttgtaaatgtaacagttg

SEQ ID NO: 4858 - DNA, 21 bp, Artificial Sequence
  Synthetic
aactgttacatttacaacaag

SEQ ID NO: 4859 - DNA, 21 bp, Artificial Sequence
  Synthetic
ggacaatatcatcagtgggct

SEQ ID NO: 4860 - DNA, 21 bp, Artificial Sequence
  Synthetic
gccattaggacaatatcatca

SEQ ID NO: 4861 - DNA, 21 bp, Artificial Sequence
  Synthetic
cagtacatgcagaatgtggtg

SEQ ID NO: 4862 - DNA, 21 bp, Artificial Sequence
  Synthetic
gaatgtggtggtgaagacgct

SEQ ID NO: 4863 - DNA, 21 bp, Artificial Sequence
  Synthetic
aatgtggtggtgaagacgctc

SEQ ID NO: 4864 - DNA, 21 bp, Artificial Sequence
  Synthetic
ggccaggcgaactggtgtttc

SEQ ID NO: 4865 - DNA, 21 bp, Artificial Sequence
  Synthetic
acgggctggtagaagggccag

SEQ ID NO: 4866 - DNA, 21 bp, Artificial Sequence
  Synthetic
gcctggcccttctaccagccc

SEQ ID NO: 4867 - DNA, 21 bp, Artificial Sequence
  Synthetic
attgcgtccacgggctggtag

SEQ ID NO: 4868 - DNA, 21 bp, Artificial Sequence
  Synthetic
ttgattgcgtccacgggctgg

SEQ ID NO: 4869 - DNA, 21 bp, Artificial Sequence
  Synthetic
cagcccgtggacgcaatcaaa

SEQ ID NO: 4870 - DNA, 21 bp, Artificial Sequence
  Synthetic
aggttcaatttgattgcgtcc

SEQ ID NO: 4871 - DNA, 21 bp, Artificial Sequence
  Synthetic
cataaaataattaaaaaccca

SEQ ID NO: 4872 - DNA, 21 bp, Artificial Sequence
  Synthetic
ataattaaaaacccaatggat

SEQ ID NO: 4873 - DNA, 21 bp, Artificial Sequence
  Synthetic
taattaaaaacccaatggata

SEQ ID NO: 4874 - DNA, 21 bp, Artificial Sequence
  Synthetic
aattaaaaacccaatggatat

SEQ ID NO: 4875 - DNA, 21 bp, Artificial Sequence
  Synthetic
tcttaatagtccccatatcca

SEQ ID NO: 4876 - DNA, 21 bp, Artificial Sequence
  Synthetic
ccaatggatatggggactatt

SEQ ID NO: 4877 - DNA, 21 bp, Artificial Sequence
  Synthetic
atggatatggggactattaag

SEQ ID NO: 4878 - DNA, 21 bp, Artificial Sequence
  Synthetic
tggggactattaagaagagac

SEQ ID NO: 4879 - DNA, 21 bp, Artificial Sequence
  Synthetic
gagactagaaaataattatta

SEQ ID NO: 4880 - DNA, 21 bp, Artificial Sequence
  Synthetic
agactagaaaataattattat

SEQ ID NO: 4881 - DNA, 21 bp, Artificial Sequence
  Synthetic
ataattattattggagtgcaa

SEQ ID NO: 4882 - DNA, 21 bp, Artificial Sequence
  Synthetic
tggagtgcaagcgaatgtatg

SEQ ID NO: 4883 - DNA, 21 bp, Artificial Sequence
  Synthetic
taacaatttgtaaacatggtg

SEQ ID NO: 4884 - DNA, 21 bp, Artificial Sequence
  Synthetic
ttgttacatttataacaaggt

SEQ ID NO: 4885 - DNA, 21 bp, Artificial Sequence
  Synthetic
tagcactatgtcatctgtggg

SEQ ID NO: 4886 - DNA, 21 bp, Artificial Sequence
  Synthetic
gccattagcactatgtcatct

SEQ ID NO: 4887 - DNA, 21 bp, Artificial Sequence
  Synthetic
acgctactgcgacagcatcct

SEQ ID NO: 4888 - DNA, 21 bp, Artificial Sequence
  Synthetic
cgctactgcgacagcatcctc

SEQ ID NO: 4889 - DNA, 21 bp, Artificial Sequence
  Synthetic
gctactgcgacagcatcctca

SEQ ID NO: 4890 - DNA, 21 bp, Artificial Sequence
  Synthetic
atcctcagggagatgctatcc

SEQ ID NO: 4891 - DNA, 21 bp, Artificial Sequence
  Synthetic
cttcttggatagcatctccct

SEQ ID NO: 4892 - DNA, 21 bp, Artificial Sequence
  Synthetic
tgcttcttggatagcatctcc

SEQ ID NO: 4893 - DNA, 21 bp, Artificial Sequence
  Synthetic
caggcgtaggccgcgtgcttc

SEQ ID NO: 4894 - DNA, 21 bp, Artificial Sequence
  Synthetic
gcctggcccttctacaagcca

SEQ ID NO: 4895 - DNA, 21 bp, Artificial Sequence
  Synthetic
tcggcatccactggcttgtag

SEQ ID NO: 4896 - DNA, 21 bp, Artificial Sequence
  Synthetic
ccttctacaagccagtggatg

SEQ ID NO: 4897 - DNA, 21 bp, Artificial Sequence
  Synthetic
gcctcggcatccactggcttg

SEQ ID NO: 4898 - DNA, 21 bp, Artificial Sequence
  Synthetic
aagccagtggatgccgaggcc

SEQ ID NO: 4899 - DNA, 21 bp, Artificial Sequence
  Synthetic
agccagtggatgccgaggccc

SEQ ID NO: 4900 - DNA, 21 bp, Artificial Sequence
  Synthetic
gtcgtggtagtcgtgcagctc

SEQ ID NO: 4901 - DNA, 21 bp, Artificial Sequence
  Synthetic
cacgacatcatcaagcacccg

SEQ ID NO: 4902 - DNA, 21 bp, Artificial Sequence
  Synthetic
cacccgatggacctcagcacc

SEQ ID NO: 4903 - DNA, 21 bp, Artificial Sequence
  Synthetic
ctttcacggtgctgaggtcca

SEQ ID NO: 4904 - DNA, 21 bp, Artificial Sequence
  Synthetic
cggccacgtactttcacggtg

SEQ ID NO: 4905 - DNA, 21 bp, Artificial Sequence
  Synthetic
cactgtgtgttgcagaggaag

SEQ ID NO: 4906 - DNA, 21 bp, Artificial Sequence
  Synthetic
gttgcagaggaagatggatgg

SEQ ID NO: 4907 - DNA, 21 bp, Artificial Sequence
  Synthetic
tgcagaggaagatggatggcc

SEQ ID NO: 4908 - DNA, 21 bp, Artificial Sequence
  Synthetic
ggccgagagtacccagacgca

SEQ ID NO: 4909 - DNA, 21 bp, Artificial Sequence
  Synthetic
cagcagcaaagccctgtgcgt

SEQ ID NO: 4910 - DNA, 21 bp, Artificial Sequence
  Synthetic
gctgatgtccggctgatgttc

SEQ ID NO: 4911 - DNA, 21 bp, Artificial Sequence
  Synthetic
gtagcaattcgagaacatcag

SEQ ID NO: 4912 - DNA, 21 bp, Artificial Sequence
  Synthetic
ggattgtatttgtagcaattc

SEQ ID NO: 4913 - DNA, 21 bp, Artificial Sequence
  Synthetic
ggggattgtatttgtagcaat

SEQ ID NO: 4914 - DNA, 21 bp, Artificial Sequence
  Synthetic
acaaatacaatcccccagacc

SEQ ID NO: 4915 - DNA, 21 bp, Artificial Sequence
  Synthetic
tggccacaacctcgtggtctg

SEQ ID NO: 4916 - DNA, 21 bp, Artificial Sequence
  Synthetic
atggccacaacctcgtggtct

SEQ ID NO: 4917 - DNA, 21 bp, Artificial Sequence
  Synthetic
catggccacaacctcgtggtc

SEQ ID NO: 4918 - DNA, 21 bp, Artificial Sequence
  Synthetic
ccatggccacaacctcgtggt

SEQ ID NO: 4919 - DNA, 21 bp, Artificial Sequence
  Synthetic
ccacgaggttgtggccatggc

SEQ ID NO: 4920 - DNA, 21 bp, Artificial Sequence
  Synthetic
cacgaggttgtggccatggcc

SEQ ID NO: 4921 - DNA, 21 bp, Artificial Sequence
  Synthetic
gcctcgggttacctggagctt

SEQ ID NO: 4922 - DNA, 21 bp, Artificial Sequence
  Synthetic
agtgccagtggcggcagcccc

SEQ ID NO: 4923 - DNA, 21 bp, Artificial Sequence
  Synthetic
gtgccagtggcggcagccccc

SEQ ID NO: 4924 - DNA, 21 bp, Artificial Sequence
  Synthetic
tgccagtggcggcagcccccc

SEQ ID NO: 4925 - DNA, 21 bp, Artificial Sequence
  Synthetic
agtggcggcagccccccggga

SEQ ID NO: 4926 - DNA, 21 bp, Artificial Sequence
  Synthetic
ttgcggtagatctctttcccg

SEQ ID NO: 4927 - DNA, 21 bp, Artificial Sequence
  Synthetic
cttgcggtagatctctttccc

SEQ ID NO: 4928 - DNA, 21 bp, Artificial Sequence
  Synthetic
tcttgcggtagatctctttcc

SEQ ID NO: 4929 - DNA, 21 bp, Artificial Sequence
  Synthetic
ctcttgcggtagatctctttc

SEQ ID NO: 4930 - DNA, 21 bp, Artificial Sequence
  Synthetic
cccgggaaagagatctaccgc

SEQ ID NO: 4931 - DNA, 21 bp, Artificial Sequence
  Synthetic
gcaagagcaacatctccgtgt

SEQ ID NO: 4932 - DNA, 21 bp, Artificial Sequence
  Synthetic
ctttgccatcaacttcgtaca

SEQ ID NO: 4933 - DNA, 21 bp, Artificial Sequence
  Synthetic
tctttgccatcaacttcgtac

SEQ ID NO: 4934 - DNA, 21 bp, Artificial Sequence
  Synthetic
gttgatggcaaagaccataag

SEQ ID NO: 4935 - DNA, 21 bp, Artificial Sequence
  Synthetic
cctcaaccctagatttactgt

SEQ ID NO: 4936 - DNA, 21 bp, Artificial Sequence
  Synthetic
cacaggttctgacagtaaatc

SEQ ID NO: 4937 - DNA, 21 bp, Artificial Sequence
  Synthetic
aagtacagtgtcttatggtcc

SEQ ID NO: 4938 - DNA, 21 bp, Artificial Sequence
  Synthetic
aaagtacagtgtcttatggtc

SEQ ID NO: 4939 - DNA, 21 bp, Artificial Sequence
  Synthetic
cataagacactgtactttgac

SEQ ID NO: 4940 - DNA, 21 bp, Artificial Sequence
  Synthetic
ataagacactgtactttgacg

SEQ ID NO: 4941 - DNA, 21 bp, Artificial Sequence
  Synthetic
acctcagtcaggatgtaaaag

SEQ ID NO: 4942 - DNA, 21 bp, Artificial Sequence
  Synthetic
atcctgactgaggtggaccgg

SEQ ID NO: 4943 - DNA, 21 bp, Artificial Sequence
  Synthetic
cccctgccggtccacctcagt

SEQ ID NO: 4944 - DNA, 21 bp, Artificial Sequence
  Synthetic
tcctgactgaggtggaccggc

SEQ ID NO: 4945 - DNA, 21 bp, Artificial Sequence
  Synthetic
cctgactgaggtggaccggca

SEQ ID NO: 4946 - DNA, 21 bp, Artificial Sequence
  Synthetic
cttggagaagtagccaacaat

SEQ ID NO: 4947 - DNA, 21 bp, Artificial Sequence
  Synthetic
gtttccagacccagcaccttg

SEQ ID NO: 4948 - DNA, 21 bp, Artificial Sequence
  Synthetic
gcacctgcctcctgcaggaga

SEQ ID NO: 4949 - DNA, 21 bp, Artificial Sequence
  Synthetic
ctcctgcaggagaaggagtcc

SEQ ID NO: 4950 - DNA, 21 bp, Artificial Sequence
  Synthetic
tgcaggagaaggagtccccgg

SEQ ID NO: 4951 - DNA, 21 bp, Artificial Sequence
  Synthetic
gcaggagaaggagtccccgga

SEQ ID NO: 4952 - DNA, 21 bp, Artificial Sequence
  Synthetic
caggccacattgtttccatcc

SEQ ID NO: 4953 - DNA, 21 bp, Artificial Sequence
  Synthetic
gcaggccacattgtttccatc

SEQ ID NO: 4954 - DNA, 21 bp, Artificial Sequence
  Synthetic
tgcaggccacattgtttccat

SEQ ID NO: 4955 - DNA, 21 bp, Artificial Sequence
  Synthetic
gcgttggtaggggggcaaggt

SEQ ID NO: 4956 - DNA, 21 bp, Artificial Sequence
  Synthetic
ccgtagccgcggcgttggtag

SEQ ID NO: 4957 - DNA, 21 bp, Artificial Sequence
  Synthetic
cccgtagccgcggcgttggta

SEQ ID NO: 4958 - DNA, 21 bp, Artificial Sequence
  Synthetic
ccccctaccaacgccgcggct

SEQ ID NO: 4959 - DNA, 21 bp, Artificial Sequence
  Synthetic
tcccgtagccgcggcgttggt

SEQ ID NO: 4960 - DNA, 21 bp, Artificial Sequence
  Synthetic
cccctaccaacgccgcggcta

SEQ ID NO: 4961 - DNA, 21 bp, Artificial Sequence
  Synthetic
ttcccgtagccgcggcgttgg

SEQ ID NO: 4962 - DNA, 21 bp, Artificial Sequence
  Synthetic
ccctaccaacgccgcggctac

SEQ ID NO: 4963 - DNA, 21 bp, Artificial Sequence
  Synthetic
ggaagttcctcatcgctttca

SEQ ID NO: 4964 - DNA, 21 bp, Artificial Sequence
  Synthetic
aaccactcactgaaagcgatg

SEQ ID NO: 4965 - DNA, 21 bp, Artificial Sequence
  Synthetic
gaaccactcactgaaagcgat

SEQ ID NO: 4966 - DNA, 21 bp, Artificial Sequence
  Synthetic
aggaaccactcactgaaagcg

SEQ ID NO: 4967 - DNA, 21 bp, Artificial Sequence
  Synthetic
ccaggttatgagctctccaag

SEQ ID NO: 4968 - DNA, 21 bp, Artificial Sequence
  Synthetic
caggttatgagctctccaagc

SEQ ID NO: 4969 - DNA, 21 bp, Artificial Sequence
  Synthetic
ggttatgagctctccaagctg

SEQ ID NO: 4970 - DNA, 21 bp, Artificial Sequence
  Synthetic
ccgactgtgctctccagcttg

SEQ ID NO: 4971 - DNA, 21 bp, Artificial Sequence
  Synthetic
agccgactgtgctctccagct

SEQ ID NO: 4972 - DNA, 21 bp, Artificial Sequence
  Synthetic
gagccgactgtgctctccagc

SEQ ID NO: 4973 - DNA, 21 bp, Artificial Sequence
  Synthetic
ctggagagcacagtcggctcc

SEQ ID NO: 4974 - DNA, 21 bp, Artificial Sequence
  Synthetic
tggagagcacagtcggctccc

SEQ ID NO: 4975 - DNA, 21 bp, Artificial Sequence
  Synthetic
gagagcacagtcggctccccg

SEQ ID NO: 4976 - DNA, 21 bp, Artificial Sequence
  Synthetic
ggtcagacagtggcttctccg

SEQ ID NO: 4977 - DNA, 21 bp, Artificial Sequence
  Synthetic
aggtcagacagtggcttctcc

SEQ ID NO: 4978 - DNA, 21 bp, Artificial Sequence
  Synthetic
caggtcagacagtggcttctc

SEQ ID NO: 4979 - DNA, 21 bp, Artificial Sequence
  Synthetic
ccaggtcagacagtggcttct

SEQ ID NO: 4980 - DNA, 21 bp, Artificial Sequence
  Synthetic
ccggagaagccactgtctgac

SEQ ID NO: 4981 - DNA, 21 bp, Artificial Sequence
  Synthetic
caggaccagtagctgcggtag

SEQ ID NO: 4982 - DNA, 21 bp, Artificial Sequence
  Synthetic
cagctaccgcagctactggtc

SEQ ID NO: 4983 - DNA, 21 bp, Artificial Sequence
  Synthetic
gctactggtcctgggtgctgc

SEQ ID NO: 4984 - DNA, 21 bp, Artificial Sequence
  Synthetic
cgcaggatctctagcagcacc

SEQ ID NO: 4985 - DNA, 21 bp, Artificial Sequence
  Synthetic
ctgggtgctgctagagatcct

SEQ ID NO: 4986 - DNA, 21 bp, Artificial Sequence
  Synthetic
tgggtgctgctagagatcctg

SEQ ID NO: 4987 - DNA, 21 bp, Artificial Sequence
  Synthetic
gctagagatcctgcgggactt

SEQ ID NO: 4988 - DNA, 21 bp, Artificial Sequence
  Synthetic
ctagagatcctgcgggacttc

SEQ ID NO: 4989 - DNA, 21 bp, Artificial Sequence
  Synthetic
cagtgtgccccggaagtcccg

SEQ ID NO: 4990 - DNA, 21 bp, Artificial Sequence
  Synthetic
tccttgatggacagtgtgccc

SEQ ID NO: 4991 - DNA, 21 bp, Artificial Sequence
  Synthetic
ttccggggcacactgtccatc

SEQ ID NO: 4992 - DNA, 21 bp, Artificial Sequence
  Synthetic
gtccttgatggacagtgtgcc

SEQ ID NO: 4993 - DNA, 21 bp, Artificial Sequence
  Synthetic
actgtccatcaaggacctcag

SEQ ID NO: 4994 - DNA, 21 bp, Artificial Sequence
  Synthetic
tgtccatcaaggacctcaggt

SEQ ID NO: 4995 - DNA, 21 bp, Artificial Sequence
  Synthetic
ccccctcacctgaggtccttg

SEQ ID NO: 4996 - DNA, 21 bp, Artificial Sequence
  Synthetic
cagggtactgatgatgtcatt

SEQ ID NO: 4997 - DNA, 21 bp, Artificial Sequence
  Synthetic
cttgaccatattgagggattg

SEQ ID NO: 4998 - DNA, 21 bp, Artificial Sequence
  Synthetic
atccctcaatatggtcaagta

SEQ ID NO: 4999 - DNA, 21 bp, Artificial Sequence
  Synthetic
ttccagtacttgaccatattg

SEQ ID NO: 5000 - DNA, 21 bp, Artificial Sequence
  Synthetic
tccctcaatatggtcaagtac

SEQ ID NO: 5001 - DNA, 21 bp, Artificial Sequence
  Synthetic
cttccagtacttgaccatatt

SEQ ID NO: 5002 - DNA, 21 bp, Artificial Sequence
  Synthetic
cccttccagtacttgaccata

SEQ ID NO: 5003 - DNA, 21 bp, Artificial Sequence
  Synthetic
ctcaatatggtcaagtactgg

SEQ ID NO: 5004 - DNA, 21 bp, Artificial Sequence
  Synthetic
agccggaagtcacggtggaga

SEQ ID NO: 5005 - DNA, 21 bp, Artificial Sequence
  Synthetic
gccggaagtcacggtggagat

SEQ ID NO: 5006 - DNA, 21 bp, Artificial Sequence
  Synthetic
cggaagtcacggtggagatcg

SEQ ID NO: 5007 - DNA, 21 bp, Artificial Sequence
  Synthetic
gaaacgtacctgtgccggcga

SEQ ID NO: 5008 - DNA, 21 bp, Artificial Sequence
  Synthetic
ggcgaccggatagcacctggc

SEQ ID NO: 5009 - DNA, 21 bp, Artificial Sequence
  Synthetic
cgaccggatagcacctggcgt

SEQ ID NO: 5010 - DNA, 21 bp, Artificial Sequence
  Synthetic
ctcgagactggatcacttcag

SEQ ID NO: 5011 - DNA, 21 bp, Artificial Sequence
  Synthetic
ttctgctgaagtgatccagtc

SEQ ID NO: 5012 - DNA, 21 bp, Artificial Sequence
  Synthetic
gctgaagtgatccagtctcga

SEQ ID NO: 5013 - DNA, 21 bp, Artificial Sequence
  Synthetic
atccagtctcgagtgaacgac

SEQ ID NO: 5014 - DNA, 21 bp, Artificial Sequence
  Synthetic
ctcctggtcgttcactcgaga

SEQ ID NO: 5015 - DNA, 21 bp, Artificial Sequence
  Synthetic
tccagtctcgagtgaacgacc

SEQ ID NO: 5016 - DNA, 21 bp, Artificial Sequence
  Synthetic
cagtctcgagtgaacgaccag

SEQ ID NO: 5017 - DNA, 21 bp, Artificial Sequence
  Synthetic
tcggccctcctggtcgttcac

SEQ ID NO: 5018 - DNA, 21 bp, Artificial Sequence
  Synthetic
tcgagtgaacgaccaggaggg

SEQ ID NO: 5019 - DNA, 21 bp, Artificial Sequence
  Synthetic
gagtgaacgaccaggagggcc

SEQ ID NO: 5020 - DNA, 21 bp, Artificial Sequence
  Synthetic
gtgaacgaccaggagggccga

SEQ ID NO: 5021 - DNA, 21 bp, Artificial Sequence
  Synthetic
tgaacgaccaggagggccgag

SEQ ID NO: 5022 - DNA, 21 bp, Artificial Sequence
  Synthetic
gaggaattctatgtacactac

SEQ ID NO: 5023 - DNA, 21 bp, Artificial Sequence
  Synthetic
tcacagcccacgtagtgtaca

SEQ ID NO: 5024 - DNA, 21 bp, Artificial Sequence
  Synthetic
tctatgtacactacgtgggct

SEQ ID NO: 5025 - DNA, 21 bp, Artificial Sequence
  Synthetic
atacttacagttaaccggcgg

SEQ ID NO: 5026 - DNA, 21 bp, Artificial Sequence
  Synthetic
ttacagttaaccggcggctgg

SEQ ID NO: 5027 - DNA, 21 bp, Artificial Sequence
  Synthetic
agttaaccggcggctggacga

SEQ ID NO: 5028 - DNA, 21 bp, Artificial Sequence
  Synthetic
cggctggacgagtgggtagac

SEQ ID NO: 5029 - DNA, 21 bp, Artificial Sequence
  Synthetic
gtggcggtgtgtctctatcct

SEQ ID NO: 5030 - DNA, 21 bp, Artificial Sequence
  Synthetic
tggcggtgtgtctctatcctc

SEQ ID NO: 5031 - DNA, 21 bp, Artificial Sequence
  Synthetic
cgcctgaatgattccggagga

SEQ ID NO: 5032 - DNA, 21 bp, Artificial Sequence
  Synthetic
ctcaccgcctgaatgattccg

SEQ ID NO: 5033 - DNA, 21 bp, Artificial Sequence
  Synthetic
tcctccggaatcattcaggcg

SEQ ID NO: 5034 - DNA, 21 bp, Artificial Sequence
  Synthetic
cactcaccgcctgaatgattc

SEQ ID NO: 5035 - DNA, 21 bp, Artificial Sequence
  Synthetic
ccactcaccgcctgaatgatt

SEQ ID NO: 5036 - DNA, 21 bp, Artificial Sequence
  Synthetic
acaggcagtcccactcaccgc

SEQ ID NO: 5037 - DNA, 21 bp, Artificial Sequence
  Synthetic
ctctgtcttctttcagatgtg

SEQ ID NO: 5038 - DNA, 21 bp, Artificial Sequence
  Synthetic
accatgctacatccatcacat

SEQ ID NO: 5039 - DNA, 21 bp, Artificial Sequence
  Synthetic
tgaggctagccaggcatcgtg

SEQ ID NO: 5040 - DNA, 21 bp, Artificial Sequence
  Synthetic
atgaggctagccaggcatcgt

SEQ ID NO: 5041 - DNA, 21 bp, Artificial Sequence
  Synthetic
catgaggctagccaggcatcg

SEQ ID NO: 5042 - DNA, 21 bp, Artificial Sequence
  Synthetic
gcatgaggctagccaggcatc

SEQ ID NO: 5043 - DNA, 21 bp, Artificial Sequence
  Synthetic
gcctggctagcctcatgcagc

SEQ ID NO: 5044 - DNA, 21 bp, Artificial Sequence
  Synthetic
cgacagtgttatccacgctgc

SEQ ID NO: 5045 - DNA, 21 bp, Artificial Sequence
  Synthetic
cgtggataacactgtcgtcat

SEQ ID NO: 5046 - DNA, 21 bp, Artificial Sequence
  Synthetic
gtggataacactgtcgtcatc

SEQ ID NO: 5047 - DNA, 21 bp, Artificial Sequence
  Synthetic
cgcacacagttcacacatgct

SEQ ID NO: 5048 - DNA, 21 bp, Artificial Sequence
  Synthetic
ccgcacacagttcacacatgc

SEQ ID NO: 5049 - DNA, 21 bp, Artificial Sequence
  Synthetic
accgcacacagttcacacatg

SEQ ID NO: 5050 - DNA, 21 bp, Artificial Sequence
  Synthetic
actgtgtgcggtggtcaaaca

SEQ ID NO: 5051 - DNA, 21 bp, Artificial Sequence
  Synthetic
ctgtgtgcggtggtcaaacag

SEQ ID NO: 5052 - DNA, 21 bp, Artificial Sequence
  Synthetic
acagtgggatgtatttagctt

SEQ ID NO: 5053 - DNA, 21 bp, Artificial Sequence
  Synthetic
cagtgggatgtatttagcttc

SEQ ID NO: 5054 - DNA, 21 bp, Artificial Sequence
  Synthetic
agtgggatgtatttagcttct

SEQ ID NO: 5055 - DNA, 21 bp, Artificial Sequence
  Synthetic
gtgggatgtatttagcttctg

SEQ ID NO: 5056 - DNA, 21 bp, Artificial Sequence
  Synthetic
tgggatgtatttagcttctgg

SEQ ID NO: 5057 - DNA, 21 bp, Artificial Sequence
  Synthetic
taatcagtttgtcatctcccc

SEQ ID NO: 5058 - DNA, 21 bp, Artificial Sequence
  Synthetic
agatgacaaactgattatggt

SEQ ID NO: 5059 - DNA, 21 bp, Artificial Sequence
  Synthetic
gatgacaaactgattatggtg

SEQ ID NO: 5060 - DNA, 21 bp, Artificial Sequence
  Synthetic
caaactgattatggtgtggaa

SEQ ID NO: 5061 - DNA, 21 bp, Artificial Sequence
  Synthetic
aatgctgtaaagttcccaggt

SEQ ID NO: 5062 - DNA, 21 bp, Artificial Sequence
  Synthetic
ctcagagtagctagaatttct

SEQ ID NO: 5063 - DNA, 21 bp, Artificial Sequence
  Synthetic
ttcacagaaattctagctact

SEQ ID NO: 5064 - DNA, 21 bp, Artificial Sequence
  Synthetic
cacagaaattctagctactct

SEQ ID NO: 5065 - DNA, 21 bp, Artificial Sequence
  Synthetic
agaatgacctctcagagtagc

SEQ ID NO: 5066 - DNA, 21 bp, Artificial Sequence
  Synthetic
gaccaagccagaatgacctct

SEQ ID NO: 5067 - DNA, 21 bp, Artificial Sequence
  Synthetic
gaggtcattctggcttggtca

SEQ ID NO: 5068 - DNA, 21 bp, Artificial Sequence
  Synthetic
atgtcaaccctttgaccaagc

SEQ ID NO: 5069 - DNA, 21 bp, Artificial Sequence
  Synthetic
tggcttggtcaaagggttgac

SEQ ID NO: 5070 - DNA, 21 bp, Artificial Sequence
  Synthetic
ggcttggtcaaagggttgaca

SEQ ID NO: 5071 - DNA, 21 bp, Artificial Sequence
  Synthetic
gagaagctatgtatttaccaa

SEQ ID NO: 5072 - DNA, 21 bp, Artificial Sequence
  Synthetic
ttaggctgcggtcatcagctt

SEQ ID NO: 5073 - DNA, 21 bp, Artificial Sequence
  Synthetic
ctttaggctgcggtcatcagc

SEQ ID NO: 5074 - DNA, 21 bp, Artificial Sequence
  Synthetic
tgatgaccgcagcctaaaggt

SEQ ID NO: 5075 - DNA, 21 bp, Artificial Sequence
  Synthetic
gatgaccgcagcctaaaggtg

SEQ ID NO: 5076 - DNA, 21 bp, Artificial Sequence
  Synthetic
tgaccgcagcctaaaggtgtg

SEQ ID NO: 5077 - DNA, 21 bp, Artificial Sequence
  Synthetic
aactgaaaaaatcggcttgcc

SEQ ID NO: 5078 - DNA, 21 bp, Artificial Sequence
  Synthetic
caactgaaaaaatcggcttgc

SEQ ID NO: 5079 - DNA, 21 bp, Artificial Sequence
  Synthetic
tttcagttgatattcaccctg

SEQ ID NO: 5080 - DNA, 21 bp, Artificial Sequence
  Synthetic
tcccgtcagggtgaatatcaa

SEQ ID NO: 5081 - DNA, 21 bp, Artificial Sequence
  Synthetic
ttcagttgatattcaccctga

SEQ ID NO: 5082 - DNA, 21 bp, Artificial Sequence
  Synthetic
tgcgaacttggtcccgtcagg

SEQ ID NO: 5083 - DNA, 21 bp, Artificial Sequence
  Synthetic
cagttgcgaacttggtcccgt

SEQ ID NO: 5084 - DNA, 21 bp, Artificial Sequence
  Synthetic
ctgacgggaccaagttcgcaa

SEQ ID NO: 5085 - DNA, 21 bp, Artificial Sequence
  Synthetic
tgacgggaccaagttcgcaac

SEQ ID NO: 5086 - DNA, 21 bp, Artificial Sequence
  Synthetic
acgggaccaagttcgcaactg

SEQ ID NO: 5087 - DNA, 21 bp, Artificial Sequence
  Synthetic
aacataccttgtcctccagtt

SEQ ID NO: 5088 - DNA, 21 bp, Artificial Sequence
  Synthetic
cctttgttccagggcaggatt

SEQ ID NO: 5089 - DNA, 21 bp, Artificial Sequence
  Synthetic
ctttgttccagggcaggattc

SEQ ID NO: 5090 - DNA, 21 bp, Artificial Sequence
  Synthetic
tttgttccagggcaggattct

SEQ ID NO: 5091 - DNA, 21 bp, Artificial Sequence
  Synthetic
aaccttcccagaatcctgccc

SEQ ID NO: 5092 - DNA, 21 bp, Artificial Sequence
  Synthetic
caaccttcccagaatcctgcc

SEQ ID NO: 5093 - DNA, 21 bp, Artificial Sequence
  Synthetic
ggattctgggaaggttgtgat

SEQ ID NO: 5094 - DNA, 21 bp, Artificial Sequence
  Synthetic
gattctgggaaggttgtgatc

SEQ ID NO: 5095 - DNA, 21 bp, Artificial Sequence
  Synthetic
tattccagatcacaaccttcc

SEQ ID NO: 5096 - DNA, 21 bp, Artificial Sequence
  Synthetic
ggaagaccaacatggactttg

SEQ ID NO: 5097 - DNA, 21 bp, Artificial Sequence
  Synthetic
caacatggactttgttgggca

SEQ ID NO: 5098 - DNA, 21 bp, Artificial Sequence
  Synthetic
aacatggactttgttgggcac

SEQ ID NO: 5099 - DNA, 21 bp, Artificial Sequence
  Synthetic
cggaaagctgtgactgtcgtg

SEQ ID NO: 5100 - DNA, 21 bp, Artificial Sequence
  Synthetic
ttcaacccaaaaatcttcaaa

SEQ ID NO: 5101 - DNA, 21 bp, Artificial Sequence
  Synthetic
ccaaaaatcttcaaaaagaag

SEQ ID NO: 5102 - DNA, 21 bp, Artificial Sequence
  Synthetic
aaaatcttcaaaaagaagcag

SEQ ID NO: 5103 - DNA, 21 bp, Artificial Sequence
  Synthetic
tcttcaaaaagaagcagaaga

SEQ ID NO: 5104 - DNA, 21 bp, Artificial Sequence
  Synthetic
cttcaaaaagaagcagaagaa

SEQ ID NO: 5105 - DNA, 21 bp, Artificial Sequence
  Synthetic
ctcccattcttctgcttcttt

SEQ ID NO: 5106 - DNA, 21 bp, Artificial Sequence
  Synthetic
ttcaaaaagaagcagaagaat

SEQ ID NO: 5107 - DNA, 21 bp, Artificial Sequence
  Synthetic
aagcagaagaatgggagttct

SEQ ID NO: 5108 - DNA, 21 bp, Artificial Sequence
  Synthetic
agtacgggcagctaggcttcg

SEQ ID NO: 5109 - DNA, 21 bp, Artificial Sequence
  Synthetic
tgccaacagcacagcagcagt

SEQ ID NO: 5110 - DNA, 21 bp, Artificial Sequence
  Synthetic
tgctgctgtgctgttggcagc

SEQ ID NO: 5111 - DNA, 21 bp, Artificial Sequence
  Synthetic
caaggaccgctcgctttctgt

SEQ ID NO: 5112 - DNA, 21 bp, Artificial Sequence
  Synthetic
gaccgctcgctttctgtctgg

SEQ ID NO: 5113 - DNA, 21 bp, Artificial Sequence
  Synthetic
gcaggctcacccagacagaaa

SEQ ID NO: 5114 - DNA, 21 bp, Artificial Sequence
  Synthetic
aggatagcaggctcacccaga

SEQ ID NO: 5115 - DNA, 21 bp, Artificial Sequence
  Synthetic
tggcttcccaggagtttgagg

SEQ ID NO: 5116 - DNA, 21 bp, Artificial Sequence
  Synthetic
gaagctattgttgacaaaaga

SEQ ID NO: 5117 - DNA, 21 bp, Artificial Sequence
  Synthetic
ttgacaaaagacaggataaaa

SEQ ID NO: 5118 - DNA, 21 bp, Artificial Sequence
  Synthetic
tgacaaaagacaggataaaaa

SEQ ID NO: 5119 - DNA, 21 bp, Artificial Sequence
  Synthetic
gacaaaagacaggataaaaat

SEQ ID NO: 5120 - DNA, 21 bp, Artificial Sequence
  Synthetic
gaatacacagtatttggttcg

SEQ ID NO: 5121 - DNA, 21 bp, Artificial Sequence
  Synthetic
aatacacagtatttggttcgg

SEQ ID NO: 5122 - DNA, 21 bp, Artificial Sequence
  Synthetic
ctgtttgtcataacctttcca

SEQ ID NO: 5123 - DNA, 21 bp, Artificial Sequence
  Synthetic
cggtggaaaggttatgacaaa

SEQ ID NO: 5124 - DNA, 21 bp, Artificial Sequence
  Synthetic
ttatgacaaacaggatgacac

SEQ ID NO: 5125 - DNA, 21 bp, Artificial Sequence
  Synthetic
tatgacaaacaggatgacact

SEQ ID NO: 5126 - DNA, 21 bp, Artificial Sequence
  Synthetic
atgacaaacaggatgacactt

SEQ ID NO: 5127 - DNA, 21 bp, Artificial Sequence
  Synthetic
aacaggatgacacttgggaac

SEQ ID NO: 5128 - DNA, 21 bp, Artificial Sequence
  Synthetic
tgggaaccagagcagcacctc

SEQ ID NO: 5129 - DNA, 21 bp, Artificial Sequence
  Synthetic
cagagcagcacctcatgaact

SEQ ID NO: 5130 - DNA, 21 bp, Artificial Sequence
  Synthetic
tgtacgagctggggaatgagc

SEQ ID NO: 5131 - DNA, 21 bp, Artificial Sequence
  Synthetic
tacgagctggggaatgagcca

SEQ ID NO: 5132 - DNA, 21 bp, Artificial Sequence
  Synthetic
cgagctggggaatgagccaga

SEQ ID NO: 5133 - DNA, 21 bp, Artificial Sequence
  Synthetic
gaatgagccagagagaaagct

SEQ ID NO: 5134 - DNA, 21 bp, Artificial Sequence
  Synthetic
aaggtgaggtatcggtcgacc

SEQ ID NO: 5135 - DNA, 21 bp, Artificial Sequence
  Synthetic
gtcgaccgatacctcaccttc

SEQ ID NO: 5136 - DNA, 21 bp, Artificial Sequence
  Synthetic
tcgaccgatacctcaccttca

SEQ ID NO: 5137 - DNA, 21 bp, Artificial Sequence
  Synthetic
accgatacctcaccttcatgg

SEQ ID NO: 5138 - DNA, 21 bp, Artificial Sequence
  Synthetic
cgatacctcaccttcatggaa

SEQ ID NO: 5139 - DNA, 21 bp, Artificial Sequence
  Synthetic
atacctcaccttcatggaaga

SEQ ID NO: 5140 - DNA, 21 bp, Artificial Sequence
  Synthetic
gagcctctctcttccatgaag

SEQ ID NO: 5141 - DNA, 21 bp, Artificial Sequence
  Synthetic
acaggagagcctctctcttcc

SEQ ID NO: 5142 - DNA, 21 bp, Artificial Sequence
  Synthetic
cggcaggcagacttgagacag

SEQ ID NO: 5143 - DNA, 21 bp, Artificial Sequence
  Synthetic
cacggcaggcagacttgagac

SEQ ID NO: 5144 - DNA, 21 bp, Artificial Sequence
  Synthetic
ccacggcaggcagacttgaga

SEQ ID NO: 5145 - DNA, 21 bp, Artificial Sequence
  Synthetic
cctgtctcaagtctgcctgcc

SEQ ID NO: 5146 - DNA, 21 bp, Artificial Sequence
  Synthetic
tcttgcccacggcaggcagac

SEQ ID NO: 5147 - DNA, 21 bp, Artificial Sequence
  Synthetic
tcaagtctgcctgccgtgggc

SEQ ID NO: 5148 - DNA, 21 bp, Artificial Sequence
  Synthetic
cctgccgtgggcaagaagccc

SEQ ID NO: 5149 - DNA, 21 bp, Artificial Sequence
  Synthetic
acgtagagtcggaacaggtcc

SEQ ID NO: 5150 - DNA, 21 bp, Artificial Sequence
  Synthetic
gacgtagagtcggaacaggtc

SEQ ID NO: 5151 - DNA, 21 bp, Artificial Sequence
  Synthetic
tctttgacgcagacgtagagt

SEQ ID NO: 5152 - DNA, 21 bp, Artificial Sequence
  Synthetic
ctctttgacgcagacgtagag

SEQ ID NO: 5153 - DNA, 21 bp, Artificial Sequence
  Synthetic
tccgactctacgtctgcgtca

SEQ ID NO: 5154 - DNA, 21 bp, Artificial Sequence
  Synthetic
ccgatctctttgacgcagacg

SEQ ID NO: 5155 - DNA, 21 bp, Artificial Sequence
  Synthetic
tctacgtctgcgtcaaagaga

SEQ ID NO: 5156 - DNA, 21 bp, Artificial Sequence
  Synthetic
ctacgtctgcgtcaaagagat

SEQ ID NO: 5157 - DNA, 21 bp, Artificial Sequence
  Synthetic
tacgtctgcgtcaaagagatc

SEQ ID NO: 5158 - DNA, 21 bp, Artificial Sequence
  Synthetic
gatcgggggtttggcccaggt

SEQ ID NO: 5159 - DNA, 21 bp, Artificial Sequence
  Synthetic
tttcactaggttaataaaaac

SEQ ID NO: 5160 - DNA, 21 bp, Artificial Sequence
  Synthetic
ttaataaaaacaagaagtggc

SEQ ID NO: 5161 - DNA, 21 bp, Artificial Sequence
  Synthetic
gttggcacctcaagcagtgca

SEQ ID NO: 5162 - DNA, 21 bp, Artificial Sequence
  Synthetic
tcagggagctcgctgcactgc

SEQ ID NO: 5163 - DNA, 21 bp, Artificial Sequence
  Synthetic
tcaagcagtgcagcgagctcc

SEQ ID NO: 5164 - DNA, 21 bp, Artificial Sequence
  Synthetic
atattcagtacctgtttgcct

SEQ ID NO: 5165 - DNA, 21 bp, Artificial Sequence
  Synthetic
gcactcaaaggcaaacaggta

SEQ ID NO: 5166 - DNA, 21 bp, Artificial Sequence
  Synthetic
tgtatgagctgggtggtgagc

SEQ ID NO: 5167 - DNA, 21 bp, Artificial Sequence
  Synthetic
tatgagctgggtggtgagcct

SEQ ID NO: 5168 - DNA, 21 bp, Artificial Sequence
  Synthetic
tgagctgggtggtgagcctga

SEQ ID NO: 5169 - DNA, 21 bp, Artificial Sequence
  Synthetic
gagctgggtggtgagcctgag

SEQ ID NO: 5170 - DNA, 21 bp, Artificial Sequence
  Synthetic
tggtgagcctgagaggaagat

SEQ ID NO: 5171 - DNA, 21 bp, Artificial Sequence
  Synthetic
gagcctgagaggaagatgtgg

SEQ ID NO: 5172 - DNA, 21 bp, Artificial Sequence
  Synthetic
tggaccgttatctggccttca

SEQ ID NO: 5173 - DNA, 21 bp, Artificial Sequence
  Synthetic
gaccgttatctggccttcact

SEQ ID NO: 5174 - DNA, 21 bp, Artificial Sequence
  Synthetic
accgttatctggccttcactg

SEQ ID NO: 5175 - DNA, 21 bp, Artificial Sequence
  Synthetic
cgttatctggccttcactgag

SEQ ID NO: 5176 - DNA, 21 bp, Artificial Sequence
  Synthetic
gccttcactgaggagaaggcc

SEQ ID NO: 5177 - DNA, 21 bp, Artificial Sequence
  Synthetic
atgcccatggccttctcctca

SEQ ID NO: 5178 - DNA, 21 bp, Artificial Sequence
  Synthetic
ggcatgacaaatctgcctgct

SEQ ID NO: 5179 - DNA, 21 bp, Artificial Sequence
  Synthetic
gacaaatctgcctgctgtggg

SEQ ID NO: 5180 - DNA, 21 bp, Artificial Sequence
  Synthetic
acaaatctgcctgctgtgggt

SEQ ID NO: 5181 - DNA, 21 bp, Artificial Sequence
  Synthetic
cctgctgtgggtaggaaacct

SEQ ID NO: 5182 - DNA, 21 bp, Artificial Sequence
  Synthetic
cacatagaggcgatagaggtc

SEQ ID NO: 5183 - DNA, 21 bp, Artificial Sequence
  Synthetic
ttcacagacacatagaggcga

SEQ ID NO: 5184 - DNA, 21 bp, Artificial Sequence
  Synthetic
ctctatcgcctctatgtgtct

SEQ ID NO: 5185 - DNA, 21 bp, Artificial Sequence
  Synthetic
tatcgcctctatgtgtctgtg

SEQ ID NO: 5186 - DNA, 21 bp, Artificial Sequence
  Synthetic
atcgcctctatgtgtctgtga

SEQ ID NO: 5187 - DNA, 21 bp, Artificial Sequence
  Synthetic
ccaatctccttcacagacaca

SEQ ID NO: 5188 - DNA, 21 bp, Artificial Sequence
  Synthetic
atgtgtctgtgaaggagattg

SEQ ID NO: 5189 - DNA, 21 bp, Artificial Sequence
  Synthetic
gagattggtggattgactcag

SEQ ID NO: 5190 - DNA, 21 bp, Artificial Sequence
  Synthetic
ggtttggttatacaggtcaac

SEQ ID NO: 5191 - DNA, 21 bp, Artificial Sequence
  Synthetic
ggtcaacaagaacaaaaaatg

SEQ ID NO: 5192 - DNA, 21 bp, Artificial Sequence
  Synthetic
gtcaacaagaacaaaaaatgg

SEQ ID NO: 5193 - DNA, 21 bp, Artificial Sequence
  Synthetic
tcaacaagaacaaaaaatggc

SEQ ID NO: 5194 - DNA, 21 bp, Artificial Sequence
  Synthetic
gaacttgcaaccaacctcaat

SEQ ID NO: 5195 - DNA, 21 bp, Artificial Sequence
  Synthetic
gcactgcttgatgtgcccaca

SEQ ID NO: 5196 - DNA, 21 bp, Artificial Sequence
  Synthetic
tcaagcagtgctgccagctcc

SEQ ID NO: 5197 - DNA, 21 bp, Artificial Sequence
  Synthetic
atatccagtgtctctatgcct

SEQ ID NO: 5198 - DNA, 21 bp, Artificial Sequence
  Synthetic
gcattcaaaggcatagagaca

SEQ ID NO: 5199 - DNA, 21 bp, Artificial Sequence
  Synthetic
tcaatcttgcattcaaaggca

SEQ ID NO: 5200 - DNA, 21 bp, Artificial Sequence
  Synthetic
ttactggccactcagctgttg

SEQ ID NO: 5201 - DNA, 21 bp, Artificial Sequence
  Synthetic
actggccactcagctgttgta

SEQ ID NO: 5202 - DNA, 21 bp, Artificial Sequence
  Synthetic
aggccacatcctctacaacag

SEQ ID NO: 5203 - DNA, 21 bp, Artificial Sequence
  Synthetic
atgtggcctggcacctgctgc

SEQ ID NO: 5204 - DNA, 21 bp, Artificial Sequence
  Synthetic
acctgctgcacgagtcattgt

SEQ ID NO: 5205 - DNA, 21 bp, Artificial Sequence
  Synthetic
tttggatctgttgctgatgat

SEQ ID NO: 5206 - DNA, 21 bp, Artificial Sequence
  Synthetic
atgtaatcctgatctcagatt

SEQ ID NO: 5207 - DNA, 21 bp, Artificial Sequence
  Synthetic
ggtgacctcttaatctgagat

SEQ ID NO: 5208 - DNA, 21 bp, Artificial Sequence
  Synthetic
gatctcagattaagaggtcac

SEQ ID NO: 5209 - DNA, 21 bp, Artificial Sequence
  Synthetic
tccttctggtgacctcttaat

SEQ ID NO: 5210 - DNA, 21 bp, Artificial Sequence
  Synthetic
ctcagattaagaggtcaccag

SEQ ID NO: 5211 - DNA, 21 bp, Artificial Sequence
  Synthetic
tcagattaagaggtcaccaga

SEQ ID NO: 5212 - DNA, 21 bp, Artificial Sequence
  Synthetic
gaaggaaggctatggtctctc

SEQ ID NO: 5213 - DNA, 21 bp, Artificial Sequence
  Synthetic
aaggaaggctatggtctctcc

SEQ ID NO: 5214 - DNA, 21 bp, Artificial Sequence
  Synthetic
ggtctctcctggaattcaaat

SEQ ID NO: 5215 - DNA, 21 bp, Artificial Sequence
  Synthetic
ccactcaaatttgaattccag

SEQ ID NO: 5216 - DNA, 21 bp, Artificial Sequence
  Synthetic
tctcctggaattcaaatttga

SEQ ID NO: 5217 - DNA, 21 bp, Artificial Sequence
  Synthetic
gtccactcaaatttgaattcc

SEQ ID NO: 5218 - DNA, 21 bp, Artificial Sequence
  Synthetic
tgtccactcaaatttgaattc

SEQ ID NO: 5219 - DNA, 21 bp, Artificial Sequence
  Synthetic
ttaggagatgtccactcaaat

SEQ ID NO: 5220 - DNA, 21 bp, Artificial Sequence
  Synthetic
acatggtcatcagatgcactt

SEQ ID NO: 5221 - DNA, 21 bp, Artificial Sequence
  Synthetic
cacatggtcatcagatgcact

SEQ ID NO: 5222 - DNA, 21 bp, Artificial Sequence
  Synthetic
ctaagtgcatctgatgaccat

SEQ ID NO: 5223 - DNA, 21 bp, Artificial Sequence
  Synthetic
aagtgcatctgatgaccatgt

SEQ ID NO: 5224 - DNA, 21 bp, Artificial Sequence
  Synthetic
tctctcttagactgtttgtct

SEQ ID NO: 5225 - DNA, 21 bp, Artificial Sequence
  Synthetic
ctctcttagactgtttgtctg

SEQ ID NO: 5226 - DNA, 21 bp, Artificial Sequence
  Synthetic
tatcccacagacaaacagtct

SEQ ID NO: 5227 - DNA, 21 bp, Artificial Sequence
  Synthetic
agccaatgcgtaccaggagtt

SEQ ID NO: 5228 - DNA, 21 bp, Artificial Sequence
  Synthetic
tgttcttgtaacagtttattc

SEQ ID NO: 5229 - DNA, 21 bp, Artificial Sequence
  Synthetic
gttcttgtaacagtttattca

SEQ ID NO: 5230 - DNA, 21 bp, Artificial Sequence
  Synthetic
tcttgtaacagtttattcatg

SEQ ID NO: 5231 - DNA, 21 bp, Artificial Sequence
  Synthetic
aatcttagcagtgtgtcctcc

SEQ ID NO: 5232 - DNA, 21 bp, Artificial Sequence
  Synthetic
cattggggttccagctaaaat

SEQ ID NO: 5233 - DNA, 21 bp, Artificial Sequence
  Synthetic
tagctggaaccccaatgagcc

SEQ ID NO: 5234 - DNA, 21 bp, Artificial Sequence
  Synthetic
agcaaatgacccaaggctcat

SEQ ID NO: 5235 - DNA, 21 bp, Artificial Sequence
  Synthetic
gagcaaatgacccaaggctca

SEQ ID NO: 5236 - DNA, 21 bp, Artificial Sequence
  Synthetic
cttgggtcatttgctcagtgt

SEQ ID NO: 5237 - DNA, 21 bp, Artificial Sequence
  Synthetic
tgggtcatttgctcagtgtct

SEQ ID NO: 5238 - DNA, 21 bp, Artificial Sequence
  Synthetic
gcatgatgttatcctcagaca

SEQ ID NO: 5239 - DNA, 21 bp, Artificial Sequence
  Synthetic
taaaattaaaactccatacct

SEQ ID NO: 5240 - DNA, 21 bp, Artificial Sequence
  Synthetic
tctttatgagattcgaaggta

SEQ ID NO: 5241 - DNA, 21 bp, Artificial Sequence
  Synthetic
atctttatgagattcgaaggt

SEQ ID NO: 5242 - DNA, 21 bp, Artificial Sequence
  Synthetic
ataccttcgaatctcataaag

SEQ ID NO: 5243 - DNA, 21 bp, Artificial Sequence
  Synthetic
aaaatttcatctttatgagat

SEQ ID NO: 5244 - DNA, 21 bp, Artificial Sequence
  Synthetic
tacctggaaaatttcatcttt

SEQ ID NO: 5245 - DNA, 21 bp, Artificial Sequence
  Synthetic
aggtccactggtctccacata

SEQ ID NO: 5246 - DNA, 21 bp, Artificial Sequence
  Synthetic
agtttcattatgtggagacca

SEQ ID NO: 5247 - DNA, 21 bp, Artificial Sequence
  Synthetic
agccagaatagtttcattatg

SEQ ID NO: 5248 - DNA, 21 bp, Artificial Sequence
  Synthetic
aagccagaatagtttcattat

SEQ ID NO: 5249 - DNA, 21 bp, Artificial Sequence
  Synthetic
gcggtcagtaccacttgaagc

SEQ ID NO: 5250 - DNA, 21 bp, Artificial Sequence
  Synthetic
tcaggcggcggtcagtaccac

SEQ ID NO: 5251 - DNA, 21 bp, Artificial Sequence
  Synthetic
tcaagtggtactgaccgccgc

SEQ ID NO: 5252 - DNA, 21 bp, Artificial Sequence
  Synthetic
tactgaccgccgcctgaatgt

SEQ ID NO: 5253 - DNA, 21 bp, Artificial Sequence
  Synthetic
actgaccgccgcctgaatgtg

SEQ ID NO: 5254 - DNA, 21 bp, Artificial Sequence
  Synthetic
acctccaagccgagtcacttg

SEQ ID NO: 5255 - DNA, 21 bp, Artificial Sequence
  Synthetic
catccaccaagtgactcggct

SEQ ID NO: 5256 - DNA, 21 bp, Artificial Sequence
  Synthetic
gcatccaccaagtgactcggc

SEQ ID NO: 5257 - DNA, 21 bp, Artificial Sequence
  Synthetic
acttggtggatgcgcacactg

SEQ ID NO: 5258 - DNA, 21 bp, Artificial Sequence
  Synthetic
gcctctcattcaatccctaca

SEQ ID NO: 5259 - DNA, 21 bp, Artificial Sequence
  Synthetic
aattcgctgtagggattgaat

SEQ ID NO: 5260 - DNA, 21 bp, Artificial Sequence
  Synthetic
taaattcgctgtagggattga

SEQ ID NO: 5261 - DNA, 21 bp, Artificial Sequence
  Synthetic
agaataaattcgctgtaggga

SEQ ID NO: 5262 - DNA, 21 bp, Artificial Sequence
  Synthetic
tggctagaataaattcgctgt

SEQ ID NO: 5263 - DNA, 21 bp, Artificial Sequence
  Synthetic
gtggctagaataaattcgctg

SEQ ID NO: 5264 - DNA, 21 bp, Artificial Sequence
  Synthetic
tttattctagccaccggctct

SEQ ID NO: 5265 - DNA, 21 bp, Artificial Sequence
  Synthetic
cttatccgcagagccggtggc

SEQ ID NO: 5266 - DNA, 21 bp, Artificial Sequence
  Synthetic
aaaacttcgaaaccttatccg

SEQ ID NO: 5267 - DNA, 21 bp, Artificial Sequence
  Synthetic
tttctttagaccgtagcttta

SEQ ID NO: 5268 - DNA, 21 bp, Artificial Sequence
  Synthetic
acctacgacatcctccaggca

SEQ ID NO: 5269 - DNA, 21 bp, Artificial Sequence
  Synthetic
tgcggtaaatctcattgcctg

SEQ ID NO: 5270 - DNA, 21 bp, Artificial Sequence
  Synthetic
cttgcggtaaatctcattgcc

SEQ ID NO: 5271 - DNA, 21 bp, Artificial Sequence
  Synthetic
ccttgcggtaaatctcattgc

SEQ ID NO: 5272 - DNA, 21 bp, Artificial Sequence
  Synthetic
ccaggcaatgagatttaccgc

SEQ ID NO: 5273 - DNA, 21 bp, Artificial Sequence
  Synthetic
gcaagggcaccatctccttct

SEQ ID NO: 5274 - DNA, 21 bp, Artificial Sequence
  Synthetic
ccatctccttctttgagattg

SEQ ID NO: 5275 - DNA, 21 bp, Artificial Sequence
  Synthetic
tacgtccatcaatctcaaaga

SEQ ID NO: 5276 - DNA, 21 bp, Artificial Sequence
  Synthetic
ttacgtccatcaatctcaaag

SEQ ID NO: 5277 - DNA, 21 bp, Artificial Sequence
  Synthetic
ttcttacgtccatcaatctca

SEQ ID NO: 5278 - DNA, 21 bp, Artificial Sequence
  Synthetic
ttctttgagattgatggacgt

SEQ ID NO: 5279 - DNA, 21 bp, Artificial Sequence
  Synthetic
tttctcttgcagagttattcc

SEQ ID NO: 5280 - DNA, 21 bp, Artificial Sequence
  Synthetic
tggccaaaagacacaggttct

SEQ ID NO: 5281 - DNA, 21 bp, Artificial Sequence
  Synthetic
ttggccaaaagacacaggttc

SEQ ID NO: 5282 - DNA, 21 bp, Artificial Sequence
  Synthetic
cttggccaaaagacacaggtt

SEQ ID NO: 5283 - DNA, 21 bp, Artificial Sequence
  Synthetic
tagtacagtgtcttatggtca

SEQ ID NO: 5284 - DNA, 21 bp, Artificial Sequence
  Synthetic
atagtacagtgtcttatggtc

SEQ ID NO: 5285 - DNA, 21 bp, Artificial Sequence
  Synthetic
ctgtcatgacgtagaagagga

SEQ ID NO: 5286 - DNA, 21 bp, Artificial Sequence
  Synthetic
ctttcctcttctacgtcatga

SEQ ID NO: 5287 - DNA, 21 bp, Artificial Sequence
  Synthetic
tactctgtcatgacgtagaag

SEQ ID NO: 5288 - DNA, 21 bp, Artificial Sequence
  Synthetic
atactctgtcatgacgtagaa

SEQ ID NO: 5289 - DNA, 21 bp, Artificial Sequence
  Synthetic
tcatactctgtcatgacgtag

SEQ ID NO: 5290 - DNA, 21 bp, Artificial Sequence
  Synthetic
cagtcatactctgtcatgacg

SEQ ID NO: 5291 - DNA, 21 bp, Artificial Sequence
  Synthetic
gtcatgacagagtatgactgt

SEQ ID NO: 5292 - DNA, 21 bp, Artificial Sequence
  Synthetic
gactgtaagggcttccacatc

SEQ ID NO: 5293 - DNA, 21 bp, Artificial Sequence
  Synthetic
ttggagaagtagcccacgatg

SEQ ID NO: 5294 - DNA, 21 bp, Artificial Sequence
  Synthetic
cttggagaagtagcccacgat

SEQ ID NO: 5295 - DNA, 21 bp, Artificial Sequence
  Synthetic
cttgggcaggcactgaccttg

SEQ ID NO: 5296 - DNA, 21 bp, Artificial Sequence
  Synthetic
ctgtcccccttctccaggaga

SEQ ID NO: 5297 - DNA, 21 bp, Artificial Sequence
  Synthetic
cttctccaggagaaagaatca

SEQ ID NO: 5298 - DNA, 21 bp, Artificial Sequence
  Synthetic
ttctccaggagaaagaatcaa

SEQ ID NO: 5299 - DNA, 21 bp, Artificial Sequence
  Synthetic
tcttccgttgattctttctcc

SEQ ID NO: 5300 - DNA, 21 bp, Artificial Sequence
  Synthetic
gtcttccgttgattctttctc

SEQ ID NO: 5301 - DNA, 21 bp, Artificial Sequence
  Synthetic
gcgctggtagggaggcagggt

SEQ ID NO: 5302 - DNA, 21 bp, Artificial Sequence
  Synthetic
aaccctgcctccctaccagcg

SEQ ID NO: 5303 - DNA, 21 bp, Artificial Sequence
  Synthetic
accctgcctccctaccagcgc

SEQ ID NO: 5304 - DNA, 21 bp, Artificial Sequence
  Synthetic
gccccggcgctggtagggagg

SEQ ID NO: 5305 - DNA, 21 bp, Artificial Sequence
  Synthetic
gccgtagccccggcgctggta

SEQ ID NO: 5306 - DNA, 21 bp, Artificial Sequence
  Synthetic
tgccgtagccccggcgctggt

SEQ ID NO: 5307 - DNA, 21 bp, Artificial Sequence
  Synthetic
ttgccgtagccccggcgctgg

SEQ ID NO: 5308 - DNA, 21 bp, Artificial Sequence
  Synthetic
ggggctacggcaagctgctga

SEQ ID NO: 5309 - DNA, 21 bp, Artificial Sequence
  Synthetic
gcaagctgctgatcgagttca

SEQ ID NO: 5310 - DNA, 21 bp, Artificial Sequence
  Synthetic
ttaggctatgaactctccaaa

SEQ ID NO: 5311 - DNA, 21 bp, Artificial Sequence
  Synthetic
taggctatgaactctccaaag

SEQ ID NO: 5312 - DNA, 21 bp, Artificial Sequence
  Synthetic
gctatgaactctccaaagtgg

SEQ ID NO: 5313 - DNA, 21 bp, Artificial Sequence
  Synthetic
ctatgaactctccaaagtgga

SEQ ID NO: 5314 - DNA, 21 bp, Artificial Sequence
  Synthetic
tatgaactctccaaagtggaa

SEQ ID NO: 5315 - DNA, 21 bp, Artificial Sequence
  Synthetic
tctccaaagtggaagggaaaa

SEQ ID NO: 5316 - DNA, 21 bp, Artificial Sequence
  Synthetic
ctccaaagtggaagggaaaac

SEQ ID NO: 5317 - DNA, 21 bp, Artificial Sequence
  Synthetic
tggaagggaaaacagggaccc

SEQ ID NO: 5318 - DNA, 21 bp, Artificial Sequence
  Synthetic
gaagggaaaacagggacccct

SEQ ID NO: 5319 - DNA, 21 bp, Artificial Sequence
  Synthetic
aaggtctgagaggggcttctc

SEQ ID NO: 5320 - DNA, 21 bp, Artificial Sequence
  Synthetic
caaggtctgagaggggcttct

SEQ ID NO: 5321 - DNA, 21 bp, Artificial Sequence
  Synthetic
gataggaggccaaggtctgag

SEQ ID NO: 5322 - DNA, 21 bp, Artificial Sequence
  Synthetic
ggataggaggccaaggtctga

SEQ ID NO: 5323 - DNA, 21 bp, Artificial Sequence
  Synthetic
taggataggaggccaaggtct

SEQ ID NO: 5324 - DNA, 21 bp, Artificial Sequence
  Synthetic
gataggataggaggccaaggt

SEQ ID NO: 5325 - DNA, 21 bp, Artificial Sequence
  Synthetic
agaccttggcctcctatccta

SEQ ID NO: 5326 - DNA, 21 bp, Artificial Sequence
  Synthetic
gaccagtagcttcgataggat

SEQ ID NO: 5327 - DNA, 21 bp, Artificial Sequence
  Synthetic
ggaccagtagcttcgatagga

SEQ ID NO: 5328 - DNA, 21 bp, Artificial Sequence
  Synthetic
gtctgggaccagtagcttcga

SEQ ID NO: 5329 - DNA, 21 bp, Artificial Sequence
  Synthetic
agctactggtcccagaccatc

SEQ ID NO: 5330 - DNA, 21 bp, Artificial Sequence
  Synthetic
gctactggtcccagaccatcc

SEQ ID NO: 5331 - DNA, 21 bp, Artificial Sequence
  Synthetic
atcaggatctccaggatggtc

SEQ ID NO: 5332 - DNA, 21 bp, Artificial Sequence
  Synthetic
catcaggatctccaggatggt

SEQ ID NO: 5333 - DNA, 21 bp, Artificial Sequence
  Synthetic
cagaccatcctggagatcctg

SEQ ID NO: 5334 - DNA, 21 bp, Artificial Sequence
  Synthetic
agaccatcctggagatcctga

SEQ ID NO: 5335 - DNA, 21 bp, Artificial Sequence
  Synthetic
atcctggagatcctgatgggg

SEQ ID NO: 5336 - DNA, 21 bp, Artificial Sequence
  Synthetic
cttcagccccatcaggatctc

SEQ ID NO: 5337 - DNA, 21 bp, Artificial Sequence
  Synthetic
gagatcctgatggggctgaag

SEQ ID NO: 5338 - DNA, 21 bp, Artificial Sequence
  Synthetic
agatcctgatggggctgaagt

SEQ ID NO: 5339 - DNA, 21 bp, Artificial Sequence
  Synthetic
atcctgatggggctgaagtcg

SEQ ID NO: 5340 - DNA, 21 bp, Artificial Sequence
  Synthetic
gctctccgacttcagccccat

SEQ ID NO: 5341 - DNA, 21 bp, Artificial Sequence
  Synthetic
tgatggggctgaagtcggaga

SEQ ID NO: 5342 - DNA, 21 bp, Artificial Sequence
  Synthetic
gatggggctgaagtcggagag

SEQ ID NO: 5343 - DNA, 21 bp, Artificial Sequence
  Synthetic
atggggctgaagtcggagagc

SEQ ID NO: 5344 - DNA, 21 bp, Artificial Sequence
  Synthetic
tggggctgaagtcggagagcg

SEQ ID NO: 5345 - DNA, 21 bp, Artificial Sequence
  Synthetic
gggctgaagtcggagagcggg

SEQ ID NO: 5346 - DNA, 21 bp, Artificial Sequence
  Synthetic
gaggccacagatcaccatcaa

SEQ ID NO: 5347 - DNA, 21 bp, Artificial Sequence
  Synthetic
tgctctcccacagtgagatta

SEQ ID NO: 5348 - DNA, 21 bp, Artificial Sequence
  Synthetic
ggtgatttcactaatctcact

SEQ ID NO: 5349 - DNA, 21 bp, Artificial Sequence
  Synthetic
attagtgaaatcaccagcatc

SEQ ID NO: 5350 - DNA, 21 bp, Artificial Sequence
  Synthetic
agtgaaatcaccagcatcaag

SEQ ID NO: 5351 - DNA, 21 bp, Artificial Sequence
  Synthetic
gtgaaatcaccagcatcaaga

SEQ ID NO: 5352 - DNA, 21 bp, Artificial Sequence
  Synthetic
gaaatcaccagcatcaagaag

SEQ ID NO: 5353 - DNA, 21 bp, Artificial Sequence
  Synthetic
tgagattgaggtactgcagag

SEQ ID NO: 5354 - DNA, 21 bp, Artificial Sequence
  Synthetic
atgagattgaggtactgcaga

SEQ ID NO: 5355 - DNA, 21 bp, Artificial Sequence
  Synthetic
gttgatgagattgaggtactg

SEQ ID NO: 5356 - DNA, 21 bp, Artificial Sequence
  Synthetic
accttgtagtagttgatgaga

SEQ ID NO: 5357 - DNA, 21 bp, Artificial Sequence
  Synthetic
atctcatcaactactacaagg

SEQ ID NO: 5358 - DNA, 21 bp, Artificial Sequence
  Synthetic
tctcatcaactactacaaggt

SEQ ID NO: 5359 - DNA, 21 bp, Artificial Sequence
  Synthetic
ctccctaccttgtagtagttg

SEQ ID NO: 5360 - DNA, 21 bp, Artificial Sequence
  Synthetic
cagtgtgaggatgtactggcc

SEQ ID NO: 5361 - DNA, 21 bp, Artificial Sequence
  Synthetic
cacgatgtcctctgacagtgt

SEQ ID NO: 5362 - DNA, 21 bp, Artificial Sequence
  Synthetic
tctccccagggggagataatc

SEQ ID NO: 5363 - DNA, 21 bp, Artificial Sequence
  Synthetic
ctgccgcctacccgtgctgcg

SEQ ID NO: 5364 - DNA, 21 bp, Artificial Sequence
  Synthetic
tgccgcctacccgtgctgcgg

SEQ ID NO: 5365 - DNA, 21 bp, Artificial Sequence
  Synthetic
ctacccgtgctgcggcggaac

SEQ ID NO: 5366 - DNA, 21 bp, Artificial Sequence
  Synthetic
ttgtcctggttccgccgcagc

SEQ ID NO: 5367 - DNA, 21 bp, Artificial Sequence
  Synthetic
tgctgcggcggaaccaggaca

SEQ ID NO: 5368 - DNA, 21 bp, Artificial Sequence
  Synthetic
ggcggaaccaggacaacgaag

SEQ ID NO: 5369 - DNA, 21 bp, Artificial Sequence
  Synthetic
aggacaacgaagatgagtggc

SEQ ID NO: 5370 - DNA, 21 bp, Artificial Sequence
  Synthetic
atgctattctcatagccctgg

SEQ ID NO: 5371 - DNA, 21 bp, Artificial Sequence
  Synthetic
ctcaggatctcggccagggct

SEQ ID NO: 5372 - DNA, 21 bp, Artificial Sequence
  Synthetic
ctcatagccctggccgagatc

SEQ ID NO: 5373 - DNA, 21 bp, Artificial Sequence
  Synthetic
gccctggccgagatcctgagc

SEQ ID NO: 5374 - DNA, 21 bp, Artificial Sequence
  Synthetic
cttcacgctcaggatctcggc

SEQ ID NO: 5375 - DNA, 21 bp, Artificial Sequence
  Synthetic
ctggccgagatcctgagcgtg

SEQ ID NO: 5376 - DNA, 21 bp, Artificial Sequence
  Synthetic
gccactgatgtccttcacgct

SEQ ID NO: 5377 - DNA, 21 bp, Artificial Sequence
  Synthetic
gagcgtgaaggacatcagtgg

SEQ ID NO: 5378 - DNA, 21 bp, Artificial Sequence
  Synthetic
agcgtgaaggacatcagtggc

SEQ ID NO: 5379 - DNA, 21 bp, Artificial Sequence
  Synthetic
tcacagtcaatgtaatggacg

SEQ ID NO: 5380 - DNA, 21 bp, Artificial Sequence
  Synthetic
tctacgtccattacattgact

SEQ ID NO: 5381 - DNA, 21 bp, Artificial Sequence
  Synthetic
ccagaactcacagtcaatgta

SEQ ID NO: 5382 - DNA, 21 bp, Artificial Sequence
  Synthetic
actgctacagtcaacaaacgt

SEQ ID NO: 5383 - DNA, 21 bp, Artificial Sequence
  Synthetic
ctacagtcaacaaacgtctgg

SEQ ID NO: 5384 - DNA, 21 bp, Artificial Sequence
  Synthetic
agtcaacaaacgtctggatga

SEQ ID NO: 5385 - DNA, 21 bp, Artificial Sequence
  Synthetic
gtctggatgaatgggtgacgc

SEQ ID NO: 5386 - DNA, 21 bp, Artificial Sequence
  Synthetic
gaatgggtgacgcatgagcgg

SEQ ID NO: 5387 - DNA, 21 bp, Artificial Sequence
  Synthetic
acgcatgagcggctggaccta

SEQ ID NO: 5388 - DNA, 21 bp, Artificial Sequence
  Synthetic
ttaccataaagaacacactgg

SEQ ID NO: 5389 - DNA, 21 bp, Artificial Sequence
  Synthetic
tgtcttaccataaagaacaca

SEQ ID NO: 5390 - DNA, 21 bp, Artificial Sequence
  Synthetic
attaaaaaatgtcttaccata

SEQ ID NO: 5391 - DNA, 21 bp, Artificial Sequence
  Synthetic
atgaccatctcggctccagct

SEQ ID NO: 5392 - DNA, 21 bp, Artificial Sequence
  Synthetic
ttatgaccatctcggctccag

SEQ ID NO: 5393 - DNA, 21 bp, Artificial Sequence
  Synthetic
agccgagatggtcataaactc

SEQ ID NO: 5394 - DNA, 21 bp, Artificial Sequence
  Synthetic
atgttatcagtggaagcactc

SEQ ID NO: 5395 - DNA, 21 bp, Artificial Sequence
  Synthetic
actgtgacactatgttatcag

SEQ ID NO: 5396 - DNA, 21 bp, Artificial Sequence
  Synthetic
cactgtgacactatgttatca

SEQ ID NO: 5397 - DNA, 21 bp, Artificial Sequence
  Synthetic
cactgataacatagtgtcaca

SEQ ID NO: 5398 - DNA, 21 bp, Artificial Sequence
  Synthetic
actgataacatagtgtcacag

SEQ ID NO: 5399 - DNA, 21 bp, Artificial Sequence
  Synthetic
tttgacttgcacctttaacag

SEQ ID NO: 5400 - DNA, 21 bp, Artificial Sequence
  Synthetic
ttgacttgcacctttaacagg

SEQ ID NO: 5401 - DNA, 21 bp, Artificial Sequence
  Synthetic
tgcagttggctgtaatgatgg

SEQ ID NO: 5402 - DNA, 21 bp, Artificial Sequence
  Synthetic
taatgatggccgaattgtcat

SEQ ID NO: 5403 - DNA, 21 bp, Artificial Sequence
  Synthetic
aatgatggccgaattgtcatc

SEQ ID NO: 5404 - DNA, 21 bp, Artificial Sequence
  Synthetic
tgtggaaacacccacctggtg

SEQ ID NO: 5405 - DNA, 21 bp, Artificial Sequence
  Synthetic
tgcgatatatctcatcaccag

SEQ ID NO: 5406 - DNA, 21 bp, Artificial Sequence
  Synthetic
gcaaaggttcaatctctgtgt

SEQ ID NO: 5407 - DNA, 21 bp, Artificial Sequence
  Synthetic
ggttcaatctctgtgtttgaa

SEQ ID NO: 5408 - DNA, 21 bp, Artificial Sequence
  Synthetic
catccacttcaaacacagaga

SEQ ID NO: 5409 - DNA, 21 bp, Artificial Sequence
  Synthetic
tcttgccatccacttcaaaca

SEQ ID NO: 5410 - DNA, 21 bp, Artificial Sequence
  Synthetic
tctgtgtttgaagtggatggc

SEQ ID NO: 5411 - DNA, 21 bp, Artificial Sequence
  Synthetic
ataatataatgtcttgtggtc

SEQ ID NO: 5412 - DNA, 21 bp, Artificial Sequence
  Synthetic
cacaagacattatattatgat

SEQ ID NO: 5413 - DNA, 21 bp, Artificial Sequence
  Synthetic
acaagacattatattatgatg

SEQ ID NO: 5414 - DNA, 21 bp, Artificial Sequence
  Synthetic
tctgtcataacatagaacagg

SEQ ID NO: 5415 - DNA, 21 bp, Artificial Sequence
  Synthetic
ccttcctgttctatgttatga

SEQ ID NO: 5416 - DNA, 21 bp, Artificial Sequence
  Synthetic
gcctctgtcataacatagaac

SEQ ID NO: 5417 - DNA, 21 bp, Artificial Sequence
  Synthetic
cgcctctgtcataacatagaa

SEQ ID NO: 5418 - DNA, 21 bp, Artificial Sequence
  Synthetic
ctgttctatgttatgacagag

SEQ ID NO: 5419 - DNA, 21 bp, Artificial Sequence
  Synthetic
ttgtccgcctctgtcataaca

SEQ ID NO: 5420 - DNA, 21 bp, Artificial Sequence
  Synthetic
acaacactggctgtcacctga

SEQ ID NO: 5421 - DNA, 21 bp, Artificial Sequence
  Synthetic
aggagacgttgtagttgagga

SEQ ID NO: 5422 - DNA, 21 bp, Artificial Sequence
  Synthetic
atacaggagacgttgtagttg

SEQ ID NO: 5423 - DNA, 21 bp, Artificial Sequence
  Synthetic
gatacaggagacgttgtagtt

SEQ ID NO: 5424 - DNA, 21 bp, Artificial Sequence
  Synthetic
aggatacaggagacgttgtag

SEQ ID NO: 5425 - DNA, 21 bp, Artificial Sequence
  Synthetic
actgaggcatagtaaggatac

SEQ ID NO: 5426 - DNA, 21 bp, Artificial Sequence
  Synthetic
tactgaggcatagtaaggata

SEQ ID NO: 5427 - DNA, 21 bp, Artificial Sequence
  Synthetic
atccttactatgcctcagtac

SEQ ID NO: 5428 - DNA, 21 bp, Artificial Sequence
  Synthetic
tctcatgtactgaggcatagt

SEQ ID NO: 5429 - DNA, 21 bp, Artificial Sequence
  Synthetic
actatgcctcagtacatgaga

SEQ ID NO: 5430 - DNA, 21 bp, Artificial Sequence
  Synthetic
gccatagccctgtctcatgta

SEQ ID NO: 5431 - DNA, 21 bp, Artificial Sequence
  Synthetic
caggttatttgctttccaaag

SEQ ID NO: 5432 - DNA, 21 bp, Artificial Sequence
  Synthetic
gttatttgctttccaaagtcg

SEQ ID NO: 5433 - DNA, 21 bp, Artificial Sequence
  Synthetic
tcgaagaaaaagttggctccc

SEQ ID NO: 5434 - DNA, 21 bp, Artificial Sequence
  Synthetic
gatctgagagtggacgttctg

SEQ ID NO: 5435 - DNA, 21 bp, Artificial Sequence
  Synthetic
agatctgagagtggacgttct

SEQ ID NO: 5436 - DNA, 21 bp, Artificial Sequence
  Synthetic
cagatctgagagtggacgttc

SEQ ID NO: 5437 - DNA, 21 bp, Artificial Sequence
  Synthetic
ccagatctgagagtggacgtt

SEQ ID NO: 5438 - DNA, 21 bp, Artificial Sequence
  Synthetic
ccagaacgtccactctcagat

SEQ ID NO: 5439 - DNA, 21 bp, Artificial Sequence
  Synthetic
cagaacgtccactctcagatc

SEQ ID NO: 5440 - DNA, 21 bp, Artificial Sequence
  Synthetic
ttataagccccagatctgaga

SEQ ID NO: 5441 - DNA, 21 bp, Artificial Sequence
  Synthetic
tagcttataagccccagatct

SEQ ID NO: 5442 - DNA, 21 bp, Artificial Sequence
  Synthetic
gatagcttataagccccagat

SEQ ID NO: 5443 - DNA, 21 bp, Artificial Sequence
  Synthetic
gcttataagctatcgcagtta

SEQ ID NO: 5444 - DNA, 21 bp, Artificial Sequence
  Synthetic
cttataagctatcgcagttac

SEQ ID NO: 5445 - DNA, 21 bp, Artificial Sequence
  Synthetic
taagctatcgcagttactgga

SEQ ID NO: 5446 - DNA, 21 bp, Artificial Sequence
  Synthetic
ttgaaaattatgcaggtagcg

SEQ ID NO: 5447 - DNA, 21 bp, Artificial Sequence
  Synthetic
ccttgaaaattatgcaggtag

SEQ ID NO: 5448 - DNA, 21 bp, Artificial Sequence
  Synthetic
gccttgaaaattatgcaggta

SEQ ID NO: 5449 - DNA, 21 bp, Artificial Sequence
  Synthetic
tttgatagaaatctctttgcc

SEQ ID NO: 5450 - DNA, 21 bp, Artificial Sequence
  Synthetic
gagtcaaaaaccaacctttga

SEQ ID NO: 5451 - DNA, 21 bp, Artificial Sequence
  Synthetic
tcttctgtttcagaaatcagt

SEQ ID NO: 5452 - DNA, 21 bp, Artificial Sequence
  Synthetic
cttctgtttcagaaatcagtc

SEQ ID NO: 5453 - DNA, 21 bp, Artificial Sequence
  Synthetic
cagccgtctcctgactgattt

SEQ ID NO: 5454 - DNA, 21 bp, Artificial Sequence
  Synthetic
gaaatcagtcaggagacggct

SEQ ID NO: 5455 - DNA, 21 bp, Artificial Sequence
  Synthetic
caggagacggctgtgaatcct

SEQ ID NO: 5456 - DNA, 21 bp, Artificial Sequence
  Synthetic
gcagagtgctgacaatgtcca

SEQ ID NO: 5457 - DNA, 21 bp, Artificial Sequence
  Synthetic
tttgagcatctgaagggcttg

SEQ ID NO: 5458 - DNA, 21 bp, Artificial Sequence
  Synthetic
agcccttcagatgctcaaata

SEQ ID NO: 5459 - DNA, 21 bp, Artificial Sequence
  Synthetic
gcccttcagatgctcaaatac

SEQ ID NO: 5460 - DNA, 21 bp, Artificial Sequence
  Synthetic
cttccagtatttgagcatctg

SEQ ID NO: 5461 - DNA, 21 bp, Artificial Sequence
  Synthetic
cttcagatgctcaaatactgg

SEQ ID NO: 5462 - DNA, 21 bp, Artificial Sequence
  Synthetic
tcccttccagtatttgagcat

SEQ ID NO: 5463 - DNA, 21 bp, Artificial Sequence
  Synthetic
ttcagatgctcaaatactgga

SEQ ID NO: 5464 - DNA, 21 bp, Artificial Sequence
  Synthetic
tcagatgctcaaatactggaa

SEQ ID NO: 5465 - DNA, 21 bp, Artificial Sequence
  Synthetic
cacgactggggcttgttcgcc

SEQ ID NO: 5466 - DNA, 21 bp, Artificial Sequence
  Synthetic
acgactggggcttgttcgcca

SEQ ID NO: 5467 - DNA, 21 bp, Artificial Sequence
  Synthetic
tcagccgcgatgggctccatg

SEQ ID NO: 5468 - DNA, 21 bp, Artificial Sequence
  Synthetic
ccatggagcccatcgcggctg

SEQ ID NO: 5469 - DNA, 21 bp, Artificial Sequence
  Synthetic
atgaccatctcgtcagccgcg

SEQ ID NO: 5470 - DNA, 21 bp, Artificial Sequence
  Synthetic
tcgcggctgacgagatggtca

SEQ ID NO: 5471 - DNA, 21 bp, Artificial Sequence
  Synthetic
gacgagatggtcatcgagtac

SEQ ID NO: 5472 - DNA, 21 bp, Artificial Sequence
  Synthetic
atggtcatcgagtacgtgggc

SEQ ID NO: 5473 - DNA, 21 bp, Artificial Sequence
  Synthetic
ctgccgggcggtgcctacctg

SEQ ID NO: 5474 - DNA, 21 bp, Artificial Sequence
  Synthetic
tggccaggtgatcgcagacat

SEQ ID NO: 5475 - DNA, 21 bp, Artificial Sequence
  Synthetic
ggccaggtgatcgcagacatg

SEQ ID NO: 5476 - DNA, 21 bp, Artificial Sequence
  Synthetic
gccaggtgatcgcagacatgc

SEQ ID NO: 5477 - DNA, 21 bp, Artificial Sequence
  Synthetic
caggtgatcgcagacatgcgg

SEQ ID NO: 5478 - DNA, 21 bp, Artificial Sequence
  Synthetic
cagacatgcgggagaagcgtt

SEQ ID NO: 5479 - DNA, 21 bp, Artificial Sequence
  Synthetic
gacatgcgggagaagcgttat

SEQ ID NO: 5480 - DNA, 21 bp, Artificial Sequence
  Synthetic
tgcgggagaagcgttatgagg

SEQ ID NO: 5481 - DNA, 21 bp, Artificial Sequence
  Synthetic
cgggagaagcgttatgaggac

SEQ ID NO: 5482 - DNA, 21 bp, Artificial Sequence
  Synthetic
agcgttatgaggacgagggca

SEQ ID NO: 5483 - DNA, 21 bp, Artificial Sequence
  Synthetic
gcgttatgaggacgagggcat

SEQ ID NO: 5484 - DNA, 21 bp, Artificial Sequence
  Synthetic
cgttatgaggacgagggcatc

SEQ ID NO: 5485 - DNA, 21 bp, Artificial Sequence
  Synthetic
catcgggagcagctacatgtt

SEQ ID NO: 5486 - DNA, 21 bp, Artificial Sequence
  Synthetic
gggagcagctacatgttccgg

SEQ ID NO: 5487 - DNA, 21 bp, Artificial Sequence
  Synthetic
atgatggtgtcatggtccacc

SEQ ID NO: 5488 - DNA, 21 bp, Artificial Sequence
  Synthetic
gatgatggtgtcatggtccac

SEQ ID NO: 5489 - DNA, 21 bp, Artificial Sequence
  Synthetic
cagctgtggttgatgaagcgc

SEQ ID NO: 5490 - DNA, 21 bp, Artificial Sequence
  Synthetic
ctcacgttgcagctgtggttg

SEQ ID NO: 5491 - DNA, 21 bp, Artificial Sequence
  Synthetic
ttcatcaaccacagctgcaac

SEQ ID NO: 5492 - DNA, 21 bp, Artificial Sequence
  Synthetic
gtgatcaccttggcatagcag

SEQ ID NO: 5493 - DNA, 21 bp, Artificial Sequence
  Synthetic
tgctatgccaaggtgatcacg

SEQ ID NO: 5494 - DNA, 21 bp, Artificial Sequence
  Synthetic
gctatgccaaggtgatcacgg

SEQ ID NO: 5495 - DNA, 21 bp, Artificial Sequence
  Synthetic
aaggtgatcacggtggagtca

SEQ ID NO: 5496 - DNA, 21 bp, Artificial Sequence
  Synthetic
gtgatcacggtggagtcacag

SEQ ID NO: 5497 - DNA, 21 bp, Artificial Sequence
  Synthetic
cagaagaagatagtcatctac

SEQ ID NO: 5498 - DNA, 21 bp, Artificial Sequence
  Synthetic
cattgacgttaatgtgctgct

SEQ ID NO: 5499 - DNA, 21 bp, Artificial Sequence
  Synthetic
cgaagcagcacattaacgtca

SEQ ID NO: 5500 - DNA, 21 bp, Artificial Sequence
  Synthetic
aagcagcacattaacgtcaat

SEQ ID NO: 5501 - DNA, 21 bp, Artificial Sequence
  Synthetic
agcagcacattaacgtcaatg

SEQ ID NO: 5502 - DNA, 21 bp, Artificial Sequence
  Synthetic
ggccatggcggccaacatgta

SEQ ID NO: 5503 - DNA, 21 bp, Artificial Sequence
  Synthetic
atggcggccaacatgtaccgg

SEQ ID NO: 5504 - DNA, 21 bp, Artificial Sequence
  Synthetic
tggcggccaacatgtaccggg

SEQ ID NO: 5505 - DNA, 21 bp, Artificial Sequence
  Synthetic
ggcggccaacatgtaccgggt

SEQ ID NO: 5506 - DNA, 21 bp, Artificial Sequence
  Synthetic
ccaacatgtaccgggtgggag

SEQ ID NO: 5507 - DNA, 21 bp, Artificial Sequence
  Synthetic
cccttacagattacgtctatt

SEQ ID NO: 5508 - DNA, 21 bp, Artificial Sequence
  Synthetic
taaccaggtaaggattgctgg

SEQ ID NO: 5509 - DNA, 21 bp, Artificial Sequence
  Synthetic
gtctaaccaggtaaggattgc

SEQ ID NO: 5510 - DNA, 21 bp, Artificial Sequence
  Synthetic
cgtctaaccaggtaaggattg

SEQ ID NO: 5511 - DNA, 21 bp, Artificial Sequence
  Synthetic
cagcaatccttacctggttag

SEQ ID NO: 5512 - DNA, 21 bp, Artificial Sequence
  Synthetic
atccttacctggttagacgga

SEQ ID NO: 5513 - DNA, 21 bp, Artificial Sequence
  Synthetic
cctcaatccgtctaaccaggt

SEQ ID NO: 5514 - DNA, 21 bp, Artificial Sequence
  Synthetic
ccttacctggttagacggatt

SEQ ID NO: 5515 - DNA, 21 bp, Artificial Sequence
  Synthetic
cttacctggttagacggattg

SEQ ID NO: 5516 - DNA, 21 bp, Artificial Sequence
  Synthetic
cggattgaggagctcaacaag

SEQ ID NO: 5517 - DNA, 21 bp, Artificial Sequence
  Synthetic
gattctgctccactcaccttg

SEQ ID NO: 5518 - DNA, 21 bp, Artificial Sequence
  Synthetic
tttcctccccttagactgcaa

SEQ ID NO: 5519 - DNA, 21 bp, Artificial Sequence
  Synthetic
ttcctccccttagactgcaaa

SEQ ID NO: 5520 - DNA, 21 bp, Artificial Sequence
  Synthetic
ccacatttccatttgcagtct

SEQ ID NO: 5521 - DNA, 21 bp, Artificial Sequence
  Synthetic
ccttagactgcaaatggaaat

SEQ ID NO: 5522 - DNA, 21 bp, Artificial Sequence
  Synthetic
cttagactgcaaatggaaatg

SEQ ID NO: 5523 - DNA, 21 bp, Artificial Sequence
  Synthetic
ctactagaaatgtccctgcgc

SEQ ID NO: 5524 - DNA, 21 bp, Artificial Sequence
  Synthetic
gctactagaaatgtccctgcg

SEQ ID NO: 5525 - DNA, 21 bp, Artificial Sequence
  Synthetic
cagccaggctgttgaggctac

SEQ ID NO: 5526 - DNA, 21 bp, Artificial Sequence
  Synthetic
gcattactatcagccaggctg

SEQ ID NO: 5527 - DNA, 21 bp, Artificial Sequence
  Synthetic
gcctggctgatagtaatgcca

SEQ ID NO: 5528 - DNA, 21 bp, Artificial Sequence
  Synthetic
tctttaatctcccaggggagt

SEQ ID NO: 5529 - DNA, 21 bp, Artificial Sequence
  Synthetic
ttaatctcccaggggagtttg

SEQ ID NO: 5530 - DNA, 21 bp, Artificial Sequence
  Synthetic
aatctcccaggggagtttgaa

SEQ ID NO: 5531 - DNA, 21 bp, Artificial Sequence
  Synthetic
atctcccaggggagtttgaag

SEQ ID NO: 5532 - DNA, 21 bp, Artificial Sequence
  Synthetic
gattcctcttcaaactcccct

SEQ ID NO: 5533 - DNA, 21 bp, Artificial Sequence
  Synthetic
tgattcctcttcaaactcccc

SEQ ID NO: 5534 - DNA, 21 bp, Artificial Sequence
  Synthetic
ttgattcctcttcaaactccc

SEQ ID NO: 5535 - DNA, 21 bp, Artificial Sequence
  Synthetic
ttgaagaggaatcaaagcagc

SEQ ID NO: 5536 - DNA, 21 bp, Artificial Sequence
  Synthetic
tgaagaggaatcaaagcagcc

SEQ ID NO: 5537 - DNA, 21 bp, Artificial Sequence
  Synthetic
aatcaaagcagccaggggtgt

SEQ ID NO: 5538 - DNA, 21 bp, Artificial Sequence
  Synthetic
tctgagcagcagcgccatcaa

SEQ ID NO: 5539 - DNA, 21 bp, Artificial Sequence
  Synthetic
gcagcgccatcaactgaagca

SEQ ID NO: 5540 - DNA, 21 bp, Artificial Sequence
  Synthetic
cagcgccatcaactgaagcac

SEQ ID NO: 5541 - DNA, 21 bp, Artificial Sequence
  Synthetic
agcgccatcaactgaagcacc

SEQ ID NO: 5542 - DNA, 21 bp, Artificial Sequence
  Synthetic
taatgattcaaattgccgaga

SEQ ID NO: 5543 - DNA, 21 bp, Artificial Sequence
  Synthetic
ctggtaatgattcaaattgcc

SEQ ID NO: 5544 - DNA, 21 bp, Artificial Sequence
  Synthetic
ggctggtaatgattcaaattg

SEQ ID NO: 5545 - DNA, 21 bp, Artificial Sequence
  Synthetic
cccagttgtcctgtaccgtat

SEQ ID NO: 5546 - DNA, 21 bp, Artificial Sequence
  Synthetic
gggaaatgcagtgtgaccctc

SEQ ID NO: 5547 - DNA, 21 bp, Artificial Sequence
  Synthetic
aatgcagtgtgaccctcttga

SEQ ID NO: 5548 - DNA, 21 bp, Artificial Sequence
  Synthetic
caagatatctgtctcattcaa

SEQ ID NO: 5549 - DNA, 21 bp, Artificial Sequence
  Synthetic
ctcaagatatctgtctcattc

SEQ ID NO: 5550 - DNA, 21 bp, Artificial Sequence
  Synthetic
ctcttgaatgagacagatatc

SEQ ID NO: 5551 - DNA, 21 bp, Artificial Sequence
  Synthetic
acagatatcttgagccagtac

SEQ ID NO: 5552 - DNA, 21 bp, Artificial Sequence
  Synthetic
cagatatcttgagccagtacc

SEQ ID NO: 5553 - DNA, 21 bp, Artificial Sequence
  Synthetic
atcttgagccagtacctggaa

SEQ ID NO: 5554 - DNA, 21 bp, Artificial Sequence
  Synthetic
tcttgagccagtacctggaaa

SEQ ID NO: 5555 - DNA, 21 bp, Artificial Sequence
  Synthetic
agccagtacctggaaaaggag

SEQ ID NO: 5556 - DNA, 21 bp, Artificial Sequence
  Synthetic
ccagtacctggaaaaggaggt

SEQ ID NO: 5557 - DNA, 21 bp, Artificial Sequence
  Synthetic
agtgagtaaaaaaagcagtcc

SEQ ID NO: 5558 - DNA, 21 bp, Artificial Sequence
  Synthetic
cagtgagtaaaaaaagcagtc

SEQ ID NO: 5559 - DNA, 21 bp, Artificial Sequence
  Synthetic
tctgcacggggtcaaacacca

SEQ ID NO: 5560 - DNA, 21 bp, Artificial Sequence
  Synthetic
tcactggtgtttgaccccgtg

SEQ ID NO: 5561 - DNA, 21 bp, Artificial Sequence
  Synthetic
cagcgagaagtgtcttctgca

SEQ ID NO: 5562 - DNA, 21 bp, Artificial Sequence
  Synthetic
tcagcgagaagtgtcttctgc

SEQ ID NO: 5563 - DNA, 21 bp, Artificial Sequence
  Synthetic
cagaagacacttctcgctgat

SEQ ID NO: 5564 - DNA, 21 bp, Artificial Sequence
  Synthetic
tctaatctcgccctgatcagc

SEQ ID NO: 5565 - DNA, 21 bp, Artificial Sequence
  Synthetic
actctaatctcgccctgatca

SEQ ID NO: 5566 - DNA, 21 bp, Artificial Sequence
  Synthetic
gttgatctgttccagctgcag

SEQ ID NO: 5567 - DNA, 21 bp, Artificial Sequence
  Synthetic
cgtagggtgttcacctgcagc

SEQ ID NO: 5568 - DNA, 21 bp, Artificial Sequence
  Synthetic
tcgtagggtgttcacctgcag

SEQ ID NO: 5569 - DNA, 21 bp, Artificial Sequence
  Synthetic
gtagtgtcgtttataacgtcg

SEQ ID NO: 5570 - DNA, 21 bp, Artificial Sequence
  Synthetic
gcttcaataaggcccagttag

SEQ ID NO: 5571 - DNA, 21 bp, Artificial Sequence
  Synthetic
acttctgctaactgggcctta

SEQ ID NO: 5572 - DNA, 21 bp, Artificial Sequence
  Synthetic
ttgtctacctacttctgctaa

SEQ ID NO: 5573 - DNA, 21 bp, Artificial Sequence
  Synthetic
atagactgtgagtcgacactt

SEQ ID NO: 5574 - DNA, 21 bp, Artificial Sequence
  Synthetic
tagactgtgagtcgacacttc

SEQ ID NO: 5575 - DNA, 21 bp, Artificial Sequence
  Synthetic
cgacacttcaggaacatacct

SEQ ID NO: 5576 - DNA, 21 bp, Artificial Sequence
  Synthetic
acttcaggaacatacctgtga

SEQ ID NO: 5577 - DNA, 21 bp, Artificial Sequence
  Synthetic
ggaacatacctgtgaatgaaa

SEQ ID NO: 5578 - DNA, 21 bp, Artificial Sequence
  Synthetic
caccatgtagatgaagtaggc

SEQ ID NO: 5579 - DNA, 21 bp, Artificial Sequence
  Synthetic
cttgcctacttcatctacatg

SEQ ID NO: 5580 - DNA, 21 bp, Artificial Sequence
  Synthetic
gcctacttcatctacatggtg

SEQ ID NO: 5581 - DNA, 21 bp, Artificial Sequence
  Synthetic
ttgttactcttcaccatgtag

SEQ ID NO: 5582 - DNA, 21 bp, Artificial Sequence
  Synthetic
tacaacatcaccttcatgggc

SEQ ID NO: 5583 - DNA, 21 bp, Artificial Sequence
  Synthetic
acaacatcaccttcatgggcc

SEQ ID NO: 5584 - DNA, 21 bp, Artificial Sequence
  Synthetic
aacatcaccttcatgggcctg

SEQ ID NO: 5585 - DNA, 21 bp, Artificial Sequence
  Synthetic
ggatgcagcttctccaggccc

SEQ ID NO: 5586 - DNA, 21 bp, Artificial Sequence
  Synthetic
agaagctgcatccctttgatg

SEQ ID NO: 5587 - DNA, 21 bp, Artificial Sequence
  Synthetic
gaagctgcatccctttgatgc

SEQ ID NO: 5588 - DNA, 21 bp, Artificial Sequence
  Synthetic
gcatccctttgatgccggaaa

SEQ ID NO: 5589 - DNA, 21 bp, Artificial Sequence
  Synthetic
catccctttgatgccggaaaa

SEQ ID NO: 5590 - DNA, 21 bp, Artificial Sequence
  Synthetic
gtgatcaatttcctaaaaggt

SEQ ID NO: 5591 - DNA, 21 bp, Artificial Sequence
  Synthetic
agggggaccttccataccttt

SEQ ID NO: 5592 - DNA, 21 bp, Artificial Sequence
  Synthetic
tgtcagacagaagcttctctt

SEQ ID NO: 5593 - DNA, 21 bp, Artificial Sequence
  Synthetic
cttctgtctgacagcatgctg

SEQ ID NO: 5594 - DNA, 21 bp, Artificial Sequence
  Synthetic
ctccaccagcatgctgtcaga

SEQ ID NO: 5595 - DNA, 21 bp, Artificial Sequence
  Synthetic
ttctgtctgacagcatgctgg

SEQ ID NO: 5596 - DNA, 21 bp, Artificial Sequence
  Synthetic
tgacagcatgctggtggaggc

SEQ ID NO: 5597 - DNA, 21 bp, Artificial Sequence
  Synthetic
gacagcatgctggtggaggcg

SEQ ID NO: 5598 - DNA, 21 bp, Artificial Sequence
  Synthetic
acagcatgctggtggaggcgc

SEQ ID NO: 5599 - DNA, 21 bp, Artificial Sequence
  Synthetic
ctggtggaggcgcgggaggcc

SEQ ID NO: 5600 - DNA, 21 bp, Artificial Sequence
  Synthetic
tggtggaggcgcgggaggcct

SEQ ID NO: 5601 - DNA, 21 bp, Artificial Sequence
  Synthetic
gtggaggcgcgggaggcctcg

SEQ ID NO: 5602 - DNA, 21 bp, Artificial Sequence
  Synthetic
tggaggcgcgggaggcctcgg

SEQ ID NO: 5603 - DNA, 21 bp, Artificial Sequence
  Synthetic
gaggcgcgggaggcctcggag

SEQ ID NO: 5604 - DNA, 21 bp, Artificial Sequence
  Synthetic
gcaccaccagcaggtcctcct

SEQ ID NO: 5605 - DNA, 21 bp, Artificial Sequence
  Synthetic
gaggacctgctggtggtgcac

SEQ ID NO: 5606 - DNA, 21 bp, Artificial Sequence
  Synthetic
tgcacacgaggcgctatctta

SEQ ID NO: 5607 - DNA, 21 bp, Artificial Sequence
  Synthetic
tagcaacagcaaaggaccact

SEQ ID NO: 5608 - DNA, 21 bp, Artificial Sequence
  Synthetic
tctgtgatggtagcaacagca

SEQ ID NO: 5609 - DNA, 21 bp, Artificial Sequence
  Synthetic
cctttgctgttgctaccatca

SEQ ID NO: 5610 - DNA, 21 bp, Artificial Sequence
  Synthetic
gttggggaggaagataacggg

SEQ ID NO: 5611 - DNA, 21 bp, Artificial Sequence
  Synthetic
agttggggaggaagataacgg

SEQ ID NO: 5612 - DNA, 21 bp, Artificial Sequence
  Synthetic
aagttggggaggaagataacg

SEQ ID NO: 5613 - DNA, 21 bp, Artificial Sequence
  Synthetic
gaagttggggaggaagataac

SEQ ID NO: 5614 - DNA, 21 bp, Artificial Sequence
  Synthetic
ggaagttggggaggaagataa

SEQ ID NO: 5615 - DNA, 21 bp, Artificial Sequence
  Synthetic
aggaagttggggaggaagata

SEQ ID NO: 5616 - DNA, 21 bp, Artificial Sequence
  Synthetic
ctctgcacaaggaagttgggg

SEQ ID NO: 5617 - DNA, 21 bp, Artificial Sequence
  Synthetic
ttcctccccaacttccttgtg

SEQ ID NO: 5618 - DNA, 21 bp, Artificial Sequence
  Synthetic
cctctgcacaaggaagttggg

SEQ ID NO: 5619 - DNA, 21 bp, Artificial Sequence
  Synthetic
cctccccaacttccttgtgca

SEQ ID NO: 5620 - DNA, 21 bp, Artificial Sequence
  Synthetic
ttcctctgcacaaggaagttg

SEQ ID NO: 5621 - DNA, 21 bp, Artificial Sequence
  Synthetic
ctccccaacttccttgtgcag

SEQ ID NO: 5622 - DNA, 21 bp, Artificial Sequence
  Synthetic
cttcctctgcacaaggaagtt

SEQ ID NO: 5623 - DNA, 21 bp, Artificial Sequence
  Synthetic
ccttcctctgcacaaggaagt

SEQ ID NO: 5624 - DNA, 21 bp, Artificial Sequence
  Synthetic
accttcctctgcacaaggaag

SEQ ID NO: 5625 - DNA, 21 bp, Artificial Sequence
  Synthetic
ctcagcaccttcctctgcaca

SEQ ID NO: 5626 - DNA, 21 bp, Artificial Sequence
  Synthetic
ttccttgtgcagaggaaggtg

SEQ ID NO: 5627 - DNA, 21 bp, Artificial Sequence
  Synthetic
cctcagcaccttcctctgcac

SEQ ID NO: 5628 - DNA, 21 bp, Artificial Sequence
  Synthetic
gaggaaggtgctgaggcccct

SEQ ID NO: 5629 - DNA, 21 bp, Artificial Sequence
  Synthetic
tgaggccccttcggacccaga

SEQ ID NO: 5630 - DNA, 21 bp, Artificial Sequence
  Synthetic
gaggccccttcggacccagac

SEQ ID NO: 5631 - DNA, 21 bp, Artificial Sequence
  Synthetic
ggccccttcggacccagacag

SEQ ID NO: 5632 - DNA, 21 bp, Artificial Sequence
  Synthetic
gccccttcggacccagacagg

SEQ ID NO: 5633 - DNA, 21 bp, Artificial Sequence
  Synthetic
gttcctcctgtctgggtccga

SEQ ID NO: 5634 - DNA, 21 bp, Artificial Sequence
  Synthetic
ggttcctcctgtctgggtccg

SEQ ID NO: 5635 - DNA, 21 bp, Artificial Sequence
  Synthetic
tatggttcctcctgtctgggt

SEQ ID NO: 5636 - DNA, 21 bp, Artificial Sequence
  Synthetic
taccattatggttcctcctgt

SEQ ID NO: 5637 - DNA, 21 bp, Artificial Sequence
  Synthetic
ccacagccagcttccccgcct

SEQ ID NO: 5638 - DNA, 21 bp, Artificial Sequence
  Synthetic
ccaaaggcggggaagctggct

SEQ ID NO: 5639 - DNA, 21 bp, Artificial Sequence
  Synthetic
caaaggcggggaagctggctg

SEQ ID NO: 5640 - DNA, 21 bp, Artificial Sequence
  Synthetic
ggcggggaagctggctgtgga

SEQ ID NO: 5641 - DNA, 21 bp, Artificial Sequence
  Synthetic
gaagctggctgtggagcgagg

SEQ ID NO: 5642 - DNA, 21 bp, Artificial Sequence
  Synthetic
gagcgaggctgggccatcaac

SEQ ID NO: 5643 - DNA, 21 bp, Artificial Sequence
  Synthetic
gaggctgggccatcaacgtgg

SEQ ID NO: 5644 - DNA, 21 bp, Artificial Sequence
  Synthetic
cagtggtggaagccaccccct

SEQ ID NO: 5645 - DNA, 21 bp, Artificial Sequence
  Synthetic
ccacggtcgctggagcagtgg

SEQ ID NO: 5646 - DNA, 21 bp, Artificial Sequence
  Synthetic
gccacggtcgctggagcagtg

SEQ ID NO: 5647 - DNA, 21 bp, Artificial Sequence
  Synthetic
accactgctccagcgaccgtg

SEQ ID NO: 5648 - DNA, 21 bp, Artificial Sequence
  Synthetic
ccactgctccagcgaccgtgg

SEQ ID NO: 5649 - DNA, 21 bp, Artificial Sequence
  Synthetic
cactgctccagcgaccgtggc

SEQ ID NO: 5650 - DNA, 21 bp, Artificial Sequence
  Synthetic
agaagcccccgccacggtcgc

SEQ ID NO: 5651 - DNA, 21 bp, Artificial Sequence
  Synthetic
cagaagcccccgccacggtcg

SEQ ID NO: 5652 - DNA, 21 bp, Artificial Sequence
  Synthetic
ggcgggggcttctgtgcctat

SEQ ID NO: 5653 - DNA, 21 bp, Artificial Sequence
  Synthetic
agcgtgatgtccgcataggca

SEQ ID NO: 5654 - DNA, 21 bp, Artificial Sequence
  Synthetic
gctcatagacacaccttgatg

SEQ ID NO: 5655 - DNA, 21 bp, Artificial Sequence
  Synthetic
ctcctccctggcagtttctgt

SEQ ID NO: 5656 - DNA, 21 bp, Artificial Sequence
  Synthetic
tggcagtttctgtttgagcgt

SEQ ID NO: 5657 - DNA, 21 bp, Artificial Sequence
  Synthetic
ggcagtttctgtttgagcgtg

SEQ ID NO: 5658 - DNA, 21 bp, Artificial Sequence
  Synthetic
cagtttctgtttgagcgtgtg

SEQ ID NO: 5659 - DNA, 21 bp, Artificial Sequence
  Synthetic
gatgccctccacacgctcaaa

SEQ ID NO: 5660 - DNA, 21 bp, Artificial Sequence
  Synthetic
tgagcgtgtggagggcatctc

SEQ ID NO: 5661 - DNA, 21 bp, Artificial Sequence
  Synthetic
caagatcaatgatggtagccc

SEQ ID NO: 5662 - DNA, 21 bp, Artificial Sequence
  Synthetic
tcaagatcaatgatggtagcc

SEQ ID NO: 5663 - DNA, 21 bp, Artificial Sequence
  Synthetic
attgatcttgatgcccatcag

SEQ ID NO: 5664 - DNA, 21 bp, Artificial Sequence
  Synthetic
cccctgcagggcactcacctg

SEQ ID NO: 5665 - DNA, 21 bp, Artificial Sequence
  Synthetic
ctgtgacctccccacagggca

SEQ ID NO: 5666 - DNA, 21 bp, Artificial Sequence
  Synthetic
cctccccacagggcaatgggc

SEQ ID NO: 5667 - DNA, 21 bp, Artificial Sequence
  Synthetic
ctcgctcatgcccattgccct

SEQ ID NO: 5668 - DNA, 21 bp, Artificial Sequence
  Synthetic
cccacagggcaatgggcatga

SEQ ID NO: 5669 - DNA, 21 bp, Artificial Sequence
  Synthetic
aatgggcatgagcgagacttc

SEQ ID NO: 5670 - DNA, 21 bp, Artificial Sequence
  Synthetic
atgtacacacgcttgtcgtcc

SEQ ID NO: 5671 - DNA, 21 bp, Artificial Sequence
  Synthetic
gacgacaagcgtgtgtacatc

SEQ ID NO: 5672 - DNA, 21 bp, Artificial Sequence
  Synthetic
tctacaaccgccacatctacc

SEQ ID NO: 5673 - DNA, 21 bp, Artificial Sequence
  Synthetic
ctacaaccgccacatctaccc

SEQ ID NO: 5674 - DNA, 21 bp, Artificial Sequence
  Synthetic
tacaaccgccacatctaccca

SEQ ID NO: 5675 - DNA, 21 bp, Artificial Sequence
  Synthetic
tacgcttggcaaagcggtccc

SEQ ID NO: 5676 - DNA, 21 bp, Artificial Sequence
  Synthetic
ctctctcccagaggccatcag

SEQ ID NO: 5677 - DNA, 21 bp, Artificial Sequence
  Synthetic
tctctcccagaggccatcagg

SEQ ID NO: 5678 - DNA, 21 bp, Artificial Sequence
  Synthetic
accttccgcctgatggcctct

SEQ ID NO: 5679 - DNA, 21 bp, Artificial Sequence
  Synthetic
caccttccgcctgatggcctc

SEQ ID NO: 5680 - DNA, 21 bp, Artificial Sequence
  Synthetic
ccaccttccgcctgatggcct

SEQ ID NO: 5681 - DNA, 21 bp, Artificial Sequence
  Synthetic
ccagaggccatcaggcggaag

SEQ ID NO: 5682 - DNA, 21 bp, Artificial Sequence
  Synthetic
cagaggccatcaggcggaagg

SEQ ID NO: 5683 - DNA, 21 bp, Artificial Sequence
  Synthetic
gccatcaggcggaaggtggag

SEQ ID NO: 5684 - DNA, 21 bp, Artificial Sequence
  Synthetic
ccatcaggcggaaggtggagc

SEQ ID NO: 5685 - DNA, 21 bp, Artificial Sequence
  Synthetic
caggcggaaggtggagctgga

SEQ ID NO: 5686 - DNA, 21 bp, Artificial Sequence
  Synthetic
aggcggaaggtggagctggag

SEQ ID NO: 5687 - DNA, 21 bp, Artificial Sequence
  Synthetic
aggtggagctggagtggggca

SEQ ID NO: 5688 - DNA, 21 bp, Artificial Sequence
  Synthetic
gtggagctggagtggggcaca

SEQ ID NO: 5689 - DNA, 21 bp, Artificial Sequence
  Synthetic
tggagtggggcacagaggatg

SEQ ID NO: 5690 - DNA, 21 bp, Artificial Sequence
  Synthetic
ggcacagaggatgatgagtac

SEQ ID NO: 5691 - DNA, 21 bp, Artificial Sequence
  Synthetic
gatgatgagtacctggataag

SEQ ID NO: 5692 - DNA, 21 bp, Artificial Sequence
  Synthetic
atgatgagtacctggataagg

SEQ ID NO: 5693 - DNA, 21 bp, Artificial Sequence
  Synthetic
gatgagtacctggataaggtg

SEQ ID NO: 5694 - DNA, 21 bp, Artificial Sequence
  Synthetic
tgagtacctggataaggtgga

SEQ ID NO: 5695 - DNA, 21 bp, Artificial Sequence
  Synthetic
gagtacctggataaggtggag

SEQ ID NO: 5696 - DNA, 21 bp, Artificial Sequence
  Synthetic
gataaggtggagaggaacatc

SEQ ID NO: 5697 - DNA, 21 bp, Artificial Sequence
  Synthetic
aggaacatcaagaaatccctc

SEQ ID NO: 5698 - DNA, 21 bp, Artificial Sequence
  Synthetic
ggaacatcaagaaatccctcc

SEQ ID NO: 5699 - DNA, 21 bp, Artificial Sequence
  Synthetic
acgtcgggcaggtgctcctgg

SEQ ID NO: 5700 - DNA, 21 bp, Artificial Sequence
  Synthetic
cacgtcgggcaggtgctcctg

SEQ ID NO: 5701 - DNA, 21 bp, Artificial Sequence
  Synthetic
accacgtcgggcaggtgctcc

SEQ ID NO: 5702 - DNA, 21 bp, Artificial Sequence
  Synthetic
caccacgtcgggcaggtgctc

SEQ ID NO: 5703 - DNA, 21 bp, Artificial Sequence
  Synthetic
cctgcattgtataccaccacg

SEQ ID NO: 5704 - DNA, 21 bp, Artificial Sequence
  Synthetic
acaatgcaggcaccgacatcc

SEQ ID NO: 5705 - DNA, 21 bp, Artificial Sequence
  Synthetic
aatgcaggcaccgacatcctc

SEQ ID NO: 5706 - DNA, 21 bp, Artificial Sequence
  Synthetic
atgcaggcaccgacatcctcg

SEQ ID NO: 5707 - DNA, 21 bp, Artificial Sequence
  Synthetic
tgcaggcaccgacatcctcga

SEQ ID NO: 5708 - DNA, 21 bp, Artificial Sequence
  Synthetic
gcaggcaccgacatcctcgag

SEQ ID NO: 5709 - DNA, 21 bp, Artificial Sequence
  Synthetic
acatcctcgagggggaccgcc

SEQ ID NO: 5710 - DNA, 21 bp, Artificial Sequence
  Synthetic
catcctcgagggggaccgcct

SEQ ID NO: 5711 - DNA, 21 bp, Artificial Sequence
  Synthetic
atcctcgagggggaccgcctt

SEQ ID NO: 5712 - DNA, 21 bp, Artificial Sequence
  Synthetic
ccccccaaggcggtccccctc

SEQ ID NO: 5713 - DNA, 21 bp, Artificial Sequence
  Synthetic
tcctcgagggggaccgccttg

SEQ ID NO: 5714 - DNA, 21 bp, Artificial Sequence
  Synthetic
agccccccaaggcggtccccc

SEQ ID NO: 5715 - DNA, 21 bp, Artificial Sequence
  Synthetic
tcaggacgtaccgctgggctg

SEQ ID NO: 5716 - DNA, 21 bp, Artificial Sequence
  Synthetic
ctcttcccctaacagggcatc

SEQ ID NO: 5717 - DNA, 21 bp, Artificial Sequence
  Synthetic
cccctaacagggcatcgtgaa

SEQ ID NO: 5718 - DNA, 21 bp, Artificial Sequence
  Synthetic
ccctaacagggcatcgtgaag

SEQ ID NO: 5719 - DNA, 21 bp, Artificial Sequence
  Synthetic
aacagggcatcgtgaagcggg

SEQ ID NO: 5720 - DNA, 21 bp, Artificial Sequence
  Synthetic
gaagcgggatgagctggtgtt

SEQ ID NO: 5721 - DNA, 21 bp, Artificial Sequence
  Synthetic
gttccggatggtccgtggccg

SEQ ID NO: 5722 - DNA, 21 bp, Artificial Sequence
  Synthetic
acccggcggccacggaccatc

SEQ ID NO: 5723 - DNA, 21 bp, Artificial Sequence
  Synthetic
cacccggcggccacggaccat

SEQ ID NO: 5724 - DNA, 21 bp, Artificial Sequence
  Synthetic
aaggatgggcacccggcggcc

SEQ ID NO: 5725 - DNA, 21 bp, Artificial Sequence
  Synthetic
ccgcctgaggtcaccataagg

SEQ ID NO: 5726 - DNA, 21 bp, Artificial Sequence
  Synthetic
ccatccttatggtgacctcag

SEQ ID NO: 5727 - DNA, 21 bp, Artificial Sequence
  Synthetic
gtacccgcctgaggtcaccat

SEQ ID NO: 5728 - DNA, 21 bp, Artificial Sequence
  Synthetic
atggtgacctcaggcgggtac

SEQ ID NO: 5729 - DNA, 21 bp, Artificial Sequence
  Synthetic
ctgtgcgcttctggtacccgc

SEQ ID NO: 5730 - DNA, 21 bp, Artificial Sequence
  Synthetic
aagtatggagtcagcaatgat

SEQ ID NO: 5731 - DNA, 21 bp, Artificial Sequence
  Synthetic
ccaggccaaacagattaagta

SEQ ID NO: 5732 - DNA, 21 bp, Artificial Sequence
  Synthetic
cccaggccaaacagattaagt

SEQ ID NO: 5733 - DNA, 21 bp, Artificial Sequence
  Synthetic
gccccagccccgagtgcgaga

SEQ ID NO: 5734 - DNA, 21 bp, Artificial Sequence
  Synthetic
caggacgctcgatctcgcact

SEQ ID NO: 5735 - DNA, 21 bp, Artificial Sequence
  Synthetic
tcaggacgctcgatctcgcac

SEQ ID NO: 5736 - DNA, 21 bp, Artificial Sequence
  Synthetic
ccgagtgcgagatcgagcgtc

SEQ ID NO: 5737 - DNA, 21 bp, Artificial Sequence
  Synthetic
ccagggctgcggtcaggcgct

SEQ ID NO: 5738 - DNA, 21 bp, Artificial Sequence
  Synthetic
cctgagcgcctgaccgcagcc

SEQ ID NO: 5739 - DNA, 21 bp, Artificial Sequence
  Synthetic
gccgcgctgccgcaggcgatc

SEQ ID NO: 5740 - DNA, 21 bp, Artificial Sequence
  Synthetic
gatcgcctgcggcagcgcggc

SEQ ID NO: 5741 - DNA, 21 bp, Artificial Sequence
  Synthetic
atcgcctgcggcagcgcggcc

SEQ ID NO: 5742 - DNA, 21 bp, Artificial Sequence
  Synthetic
ctgcggcagcgcggcctggaa

SEQ ID NO: 5743 - DNA, 21 bp, Artificial Sequence
  Synthetic
ggtgtctgcggttgtcagccc

SEQ ID NO: 5744 - DNA, 21 bp, Artificial Sequence
  Synthetic
cggttgtcagcccgcgaggcc

SEQ ID NO: 5745 - DNA, 21 bp, Artificial Sequence
  Synthetic
ggttgtcagcccgcgaggcct

SEQ ID NO: 5746 - DNA, 21 bp, Artificial Sequence
  Synthetic
tgtcagcccgcgaggcctcgg

SEQ ID NO: 5747 - DNA, 21 bp, Artificial Sequence
  Synthetic
tcagcccgcgaggcctcggaa

SEQ ID NO: 5748 - DNA, 21 bp, Artificial Sequence
  Synthetic
cagcccgcgaggcctcggaag

SEQ ID NO: 5749 - DNA, 21 bp, Artificial Sequence
  Synthetic
cagctcctcttccgaggcctc

SEQ ID NO: 5750 - DNA, 21 bp, Artificial Sequence
  Synthetic
cgcgaggcctcggaagaggag

SEQ ID NO: 5751 - DNA, 21 bp, Artificial Sequence
  Synthetic
gcaccaggcccagctcctctt

SEQ ID NO: 5752 - DNA, 21 bp, Artificial Sequence
  Synthetic
agctgggcctggtgcacaggt

SEQ ID NO: 5753 - DNA, 21 bp, Artificial Sequence
  Synthetic
ccctgaccagggatacatact

SEQ ID NO: 5754 - DNA, 21 bp, Artificial Sequence
  Synthetic
cccagagtatgtatccctggt

SEQ ID NO: 5755 - DNA, 21 bp, Artificial Sequence
  Synthetic
ccagagtatgtatccctggtc

SEQ ID NO: 5756 - DNA, 21 bp, Artificial Sequence
  Synthetic
cagagtatgtatccctggtca

SEQ ID NO: 5757 - DNA, 21 bp, Artificial Sequence
  Synthetic
aggacctgggtctccctgacc

SEQ ID NO: 5758 - DNA, 21 bp, Artificial Sequence
  Synthetic
taggacctgggtctccctgac

SEQ ID NO: 5759 - DNA, 21 bp, Artificial Sequence
  Synthetic
agggagacccaggtcctaggc

SEQ ID NO: 5760 - DNA, 21 bp, Artificial Sequence
  Synthetic
gggagacccaggtcctaggca

SEQ ID NO: 5761 - DNA, 21 bp, Artificial Sequence
  Synthetic
gagacccaggtcctaggcaag

SEQ ID NO: 5762 - DNA, 21 bp, Artificial Sequence
  Synthetic
agacccaggtcctaggcaagg

SEQ ID NO: 5763 - DNA, 21 bp, Artificial Sequence
  Synthetic
cagctcctccttgcctaggac

SEQ ID NO: 5764 - DNA, 21 bp, Artificial Sequence
  Synthetic
cgcctgcagctcctccttgcc

SEQ ID NO: 5765 - DNA, 21 bp, Artificial Sequence
  Synthetic
aggaggagctgcaggcgctgt

SEQ ID NO: 5766 - DNA, 21 bp, Artificial Sequence
  Synthetic
aagtagatggcgtcgaactgt

SEQ ID NO: 5767 - DNA, 21 bp, Artificial Sequence
  Synthetic
accgggtggaagtagatggcg

SEQ ID NO: 5768 - DNA, 21 bp, Artificial Sequence
  Synthetic
tgtccggggacacgcaccggg

SEQ ID NO: 5769 - DNA, 21 bp, Artificial Sequence
  Synthetic
gtgtccggggacacgcaccgg

SEQ ID NO: 5770 - DNA, 21 bp, Artificial Sequence
  Synthetic
gcgcgcagtgaaaggtactct

SEQ ID NO: 5771 - DNA, 21 bp, Artificial Sequence
  Synthetic
ccctgcggccagccgcgcgca

SEQ ID NO: 5772 - DNA, 21 bp, Artificial Sequence
  Synthetic
ttcactgcgcgcggctggccg

SEQ ID NO: 5773 - DNA, 21 bp, Artificial Sequence
  Synthetic
tcactgcgcgcggctggccgc

SEQ ID NO: 5774 - DNA, 21 bp, Artificial Sequence
  Synthetic
gcgcgcggctggccgcagggg

SEQ ID NO: 5775 - DNA, 21 bp, Artificial Sequence
  Synthetic
gcaggggctggactgcagctg

SEQ ID NO: 5776 - DNA, 21 bp, Artificial Sequence
  Synthetic
agctggtggacgctgtgctca

SEQ ID NO: 5777 - DNA, 21 bp, Artificial Sequence
  Synthetic
gctggtggacgctgtgctcac

SEQ ID NO: 5778 - DNA, 21 bp, Artificial Sequence
  Synthetic
tgctcactggagctgtgcaaa

SEQ ID NO: 5779 - DNA, 21 bp, Artificial Sequence
  Synthetic
gtgcaaaatgggcttgccctg

SEQ ID NO: 5780 - DNA, 21 bp, Artificial Sequence
  Synthetic
aaatgggcttgccctggtgag

SEQ ID NO: 5781 - DNA, 21 bp, Artificial Sequence
  Synthetic
atgggcttgccctggtgaggt

SEQ ID NO: 5782 - DNA, 21 bp, Artificial Sequence
  Synthetic
aaggggcagctctcacctcac

SEQ ID NO: 5783 - DNA, 21 bp, Artificial Sequence
  Synthetic
tactctcacgccgtaggcctc

SEQ ID NO: 5784 - DNA, 21 bp, Artificial Sequence
  Synthetic
aggcctcccgggcaccatggc

SEQ ID NO: 5785 - DNA, 21 bp, Artificial Sequence
  Synthetic
gcctcccgggcaccatggcca

SEQ ID NO: 5786 - DNA, 21 bp, Artificial Sequence
  Synthetic
cgccctctggccatggtgccc

SEQ ID NO: 5787 - DNA, 21 bp, Artificial Sequence
  Synthetic
ccgccctctggccatggtgcc

SEQ ID NO: 5788 - DNA, 21 bp, Artificial Sequence
  Synthetic
gccgccctctggccatggtgc

SEQ ID NO: 5789 - DNA, 21 bp, Artificial Sequence
  Synthetic
atggccagagggcggctgcca

SEQ ID NO: 5790 - DNA, 21 bp, Artificial Sequence
  Synthetic
atggccacgttgttgaacaca

SEQ ID NO: 5791 - DNA, 21 bp, Artificial Sequence
  Synthetic
gcagctgctatggccacgttg

SEQ ID NO: 5792 - DNA, 21 bp, Artificial Sequence
  Synthetic
atagcagctgcacatgccaag

SEQ ID NO: 5793 - DNA, 21 bp, Artificial Sequence
  Synthetic
ctgcacatgccaagcagaaac

SEQ ID NO: 5794 - DNA, 21 bp, Artificial Sequence
  Synthetic
tctgtacccaggatcctcgtc

SEQ ID NO: 5795 - DNA, 21 bp, Artificial Sequence
  Synthetic
acccaggatcctcgtcgtgga

SEQ ID NO: 5796 - DNA, 21 bp, Artificial Sequence
  Synthetic
tcccagtccacgacgaggatc

SEQ ID NO: 5797 - DNA, 21 bp, Artificial Sequence
  Synthetic
cccaggatcctcgtcgtggac

SEQ ID NO: 5798 - DNA, 21 bp, Artificial Sequence
  Synthetic
gtgcacatcccagtccacgac

SEQ ID NO: 5799 - DNA, 21 bp, Artificial Sequence
  Synthetic
tggtgcacatcccagtccacg

SEQ ID NO: 5800 - DNA, 21 bp, Artificial Sequence
  Synthetic
gactgggatgtgcaccatggc

SEQ ID NO: 5801 - DNA, 21 bp, Artificial Sequence
  Synthetic
actgggatgtgcaccatggcc

SEQ ID NO: 5802 - DNA, 21 bp, Artificial Sequence
  Synthetic
ctgggatgtgcaccatggcca

SEQ ID NO: 5803 - DNA, 21 bp, Artificial Sequence
  Synthetic
gccaggggatccagtatctct

SEQ ID NO: 5804 - DNA, 21 bp, Artificial Sequence
  Synthetic
caggggatccagtatctcttt

SEQ ID NO: 5805 - DNA, 21 bp, Artificial Sequence
  Synthetic
ggggtcatcctcaaagagata

SEQ ID NO: 5806 - DNA, 21 bp, Artificial Sequence
  Synthetic
tctctttgaggatgaccccag

SEQ ID NO: 5807 - DNA, 21 bp, Artificial Sequence
  Synthetic
gctcacctggggtcatcctca

SEQ ID NO: 5808 - DNA, 21 bp, Artificial Sequence
  Synthetic
atagcggtgccaggagaagta

SEQ ID NO: 5809 - DNA, 21 bp, Artificial Sequence
  Synthetic
tttacttctcctggcaccgct

SEQ ID NO: 5810 - DNA, 21 bp, Artificial Sequence
  Synthetic
ccatgctcatagcggtgccag

SEQ ID NO: 5811 - DNA, 21 bp, Artificial Sequence
  Synthetic
tctcctggcaccgctatgagc

SEQ ID NO: 5812 - DNA, 21 bp, Artificial Sequence
  Synthetic
gcccatgctcatagcggtgcc

SEQ ID NO: 5813 - DNA, 21 bp, Artificial Sequence
  Synthetic
cgcccatgctcatagcggtgc

SEQ ID NO: 5814 - DNA, 21 bp, Artificial Sequence
  Synthetic
tgggcgcttctggcctttcct

SEQ ID NO: 5815 - DNA, 21 bp, Artificial Sequence
  Synthetic
ggcgcttctggcctttcctgc

SEQ ID NO: 5816 - DNA, 21 bp, Artificial Sequence
  Synthetic
tctgactctcgcaggaaaggc

SEQ ID NO: 5817 - DNA, 21 bp, Artificial Sequence
  Synthetic
gcgtctgcatctgactctcgc

SEQ ID NO: 5818 - DNA, 21 bp, Artificial Sequence
  Synthetic
tgcgtctgcatctgactctcg

SEQ ID NO: 5819 - DNA, 21 bp, Artificial Sequence
  Synthetic
cgagagtcagatgcagacgca

SEQ ID NO: 5820 - DNA, 21 bp, Artificial Sequence
  Synthetic
gagagtcagatgcagacgcag

SEQ ID NO: 5821 - DNA, 21 bp, Artificial Sequence
  Synthetic
gtcagatgcagacgcagtggg

SEQ ID NO: 5822 - DNA, 21 bp, Artificial Sequence
  Synthetic
tcagatgcagacgcagtgggg

SEQ ID NO: 5823 - DNA, 21 bp, Artificial Sequence
  Synthetic
cagatgcagacgcagtggggc

SEQ ID NO: 5824 - DNA, 21 bp, Artificial Sequence
  Synthetic
gcagacgcagtggggcgggga

SEQ ID NO: 5825 - DNA, 21 bp, Artificial Sequence
  Synthetic
cagggcaggttgacagtgaag

SEQ ID NO: 5826 - DNA, 21 bp, Artificial Sequence
  Synthetic
cggcttcactgtcaacctgcc

SEQ ID NO: 5827 - DNA, 21 bp, Artificial Sequence
  Synthetic
ggcttcactgtcaacctgccc

SEQ ID NO: 5828 - DNA, 21 bp, Artificial Sequence
  Synthetic
tggttccagggcaggttgaca

SEQ ID NO: 5829 - DNA, 21 bp, Artificial Sequence
  Synthetic
ttgagggtgggcacctggttc

SEQ ID NO: 5830 - DNA, 21 bp, Artificial Sequence
  Synthetic
gggatgtcctgccaggttggg

SEQ ID NO: 5831 - DNA, 21 bp, Artificial Sequence
  Synthetic
ggatgtcctgccaggttggga

SEQ ID NO: 5832 - DNA, 21 bp, Artificial Sequence
  Synthetic
gatgtcctgccaggttgggat

SEQ ID NO: 5833 - DNA, 21 bp, Artificial Sequence
  Synthetic
gccagtgggagcagcaggtgc

SEQ ID NO: 5834 - DNA, 21 bp, Artificial Sequence
  Synthetic
ggccagtgggagcagcaggtg

SEQ ID NO: 5835 - DNA, 21 bp, Artificial Sequence
  Synthetic
acctgctgctcccactggcct

SEQ ID NO: 5836 - DNA, 21 bp, Artificial Sequence
  Synthetic
gcagtcacctcaaaggccagt

SEQ ID NO: 5837 - DNA, 21 bp, Artificial Sequence
  Synthetic
tgcagtcacctcaaaggccag

SEQ ID NO: 5838 - DNA, 21 bp, Artificial Sequence
  Synthetic
gtgcagtcacctcaaaggcca

SEQ ID NO: 5839 - DNA, 21 bp, Artificial Sequence
  Synthetic
ggcctggcctgtagtttgacc

SEQ ID NO: 5840 - DNA, 21 bp, Artificial Sequence
  Synthetic
ctgccgagaccagcaccagct

SEQ ID NO: 5841 - DNA, 21 bp, Artificial Sequence
  Synthetic
ctgagctggtgctggtctcgg

SEQ ID NO: 5842 - DNA, 21 bp, Artificial Sequence
  Synthetic
cgatggctgagtcaaatcctg

SEQ ID NO: 5843 - DNA, 21 bp, Artificial Sequence
  Synthetic
cggcaggatttgactcagcca

SEQ ID NO: 5844 - DNA, 21 bp, Artificial Sequence
  Synthetic
ggcaggatttgactcagccat

SEQ ID NO: 5845 - DNA, 21 bp, Artificial Sequence
  Synthetic
gcaggatttgactcagccatc

SEQ ID NO: 5846 - DNA, 21 bp, Artificial Sequence
  Synthetic
ttgactcagccatcggggacc

SEQ ID NO: 5847 - DNA, 21 bp, Artificial Sequence
  Synthetic
tcacctcagggtccccgatgg

SEQ ID NO: 5848 - DNA, 21 bp, Artificial Sequence
  Synthetic
tcagccatcggggaccctgag

SEQ ID NO: 5849 - DNA, 21 bp, Artificial Sequence
  Synthetic
agccatcggggaccctgaggt

SEQ ID NO: 5850 - DNA, 21 bp, Artificial Sequence
  Synthetic
ggcgtggcctgcatttgcccc

SEQ ID NO: 5851 - DNA, 21 bp, Artificial Sequence
  Synthetic
tggcgtggcctgcatttgccc

SEQ ID NO: 5852 - DNA, 21 bp, Artificial Sequence
  Synthetic
aggggcaaatgcaggccacgc

SEQ ID NO: 5853 - DNA, 21 bp, Artificial Sequence
  Synthetic
tgcagcagctgtgtgaggtgg

SEQ ID NO: 5854 - DNA, 21 bp, Artificial Sequence
  Synthetic
cacctgcagcagctgtgtgag

SEQ ID NO: 5855 - DNA, 21 bp, Artificial Sequence
  Synthetic
gccagcacctgcagcagctgt

SEQ ID NO: 5856 - DNA, 21 bp, Artificial Sequence
  Synthetic
gctgcaggtgctggccggcgg

SEQ ID NO: 5857 - DNA, 21 bp, Artificial Sequence
  Synthetic
ggcggccgggtctgtgccgtg

SEQ ID NO: 5858 - DNA, 21 bp, Artificial Sequence
  Synthetic
gcggccgggtctgtgccgtgc

SEQ ID NO: 5859 - DNA, 21 bp, Artificial Sequence
  Synthetic
tcctcccagggcggctaccac

SEQ ID NO: 5860 - DNA, 21 bp, Artificial Sequence
  Synthetic
cctcccagggcggctaccacc

SEQ ID NO: 5861 - DNA, 21 bp, Artificial Sequence
  Synthetic
actccaggtggtagccgccct

SEQ ID NO: 5862 - DNA, 21 bp, Artificial Sequence
  Synthetic
gactccaggtggtagccgccc

SEQ ID NO: 5863 - DNA, 21 bp, Artificial Sequence
  Synthetic
tgactccaggtggtagccgcc

SEQ ID NO: 5864 - DNA, 21 bp, Artificial Sequence
  Synthetic
ggctaccacctggagtcactg

SEQ ID NO: 5865 - DNA, 21 bp, Artificial Sequence
  Synthetic
gctaccacctggagtcactgg

SEQ ID NO: 5866 - DNA, 21 bp, Artificial Sequence
  Synthetic
tgcatgacagtacagacgctg

SEQ ID NO: 5867 - DNA, 21 bp, Artificial Sequence
  Synthetic
agtcaaggtttgctgtacctg

SEQ ID NO: 5868 - DNA, 21 bp, Artificial Sequence
  Synthetic
tctttgtcccttgtcagattg

SEQ ID NO: 5869 - DNA, 21 bp, Artificial Sequence
  Synthetic
ctttgtcccttgtcagattgg

SEQ ID NO: 5870 - DNA, 21 bp, Artificial Sequence
  Synthetic
cactaggttatcgtaaaggaa

SEQ ID NO: 5871 - DNA, 21 bp, Artificial Sequence
  Synthetic
cggttcctttacgataaccta

SEQ ID NO: 5872 - DNA, 21 bp, Artificial Sequence
  Synthetic
ggttcctttacgataacctag

SEQ ID NO: 5873 - DNA, 21 bp, Artificial Sequence
  Synthetic
gactccactaggttatcgtaa

SEQ ID NO: 5874 - DNA, 21 bp, Artificial Sequence
  Synthetic
agactccactaggttatcgta

SEQ ID NO: 5875 - DNA, 21 bp, Artificial Sequence
  Synthetic
tacgataacctagtggagtct

SEQ ID NO: 5876 - DNA, 21 bp, Artificial Sequence
  Synthetic
acgataacctagtggagtctc

SEQ ID NO: 5877 - DNA, 21 bp, Artificial Sequence
  Synthetic
gataacctagtggagtctctg

SEQ ID NO: 5878 - DNA, 21 bp, Artificial Sequence
  Synthetic
actgctggtcttaaacctctc

SEQ ID NO: 5879 - DNA, 21 bp, Artificial Sequence
  Synthetic
ggctgtattctggcccacagc

SEQ ID NO: 5880 - DNA, 21 bp, Artificial Sequence
  Synthetic
attctggcccacagcatgggt

SEQ ID NO: 5881 - DNA, 21 bp, Artificial Sequence
  Synthetic
ccccagacccatgctgtgggc

SEQ ID NO: 5882 - DNA, 21 bp, Artificial Sequence
  Synthetic
ttctggcccacagcatgggtc

SEQ ID NO: 5883 - DNA, 21 bp, Artificial Sequence
  Synthetic
tctggcccacagcatgggtct

SEQ ID NO: 5884 - DNA, 21 bp, Artificial Sequence
  Synthetic
ctggcccacagcatgggtctg

SEQ ID NO: 5885 - DNA, 21 bp, Artificial Sequence
  Synthetic
ggcggaagaggacgtcgatga

SEQ ID NO: 5886 - DNA, 21 bp, Artificial Sequence
  Synthetic
gtgtggcggaagaggacgtcg

SEQ ID NO: 5887 - DNA, 21 bp, Artificial Sequence
  Synthetic
tttggctggcgtgtggcggaa

SEQ ID NO: 5888 - DNA, 21 bp, Artificial Sequence
  Synthetic
agtccttgccattgtgccggt

SEQ ID NO: 5889 - DNA, 21 bp, Artificial Sequence
  Synthetic
aactcttaccggcacaatggc

SEQ ID NO: 5890 - DNA, 21 bp, Artificial Sequence
  Synthetic
ttctaataggttaatactctt

SEQ ID NO: 5891 - DNA, 21 bp, Artificial Sequence
  Synthetic
atactcttcagaattggctgg

SEQ ID NO: 5892 - DNA, 21 bp, Artificial Sequence
  Synthetic
gaactctgccagccaattctg

SEQ ID NO: 5893 - DNA, 21 bp, Artificial Sequence
  Synthetic
gttgaactctgccagccaatt

SEQ ID NO: 5894 - DNA, 21 bp, Artificial Sequence
  Synthetic
tcaggaggtggaagccacatg

SEQ ID NO: 5895 - DNA, 21 bp, Artificial Sequence
  Synthetic
tcaacatgtggcttccacctc

SEQ ID NO: 5896 - DNA, 21 bp, Artificial Sequence
  Synthetic
agccgggagggcttcaggagg

SEQ ID NO: 5897 - DNA, 21 bp, Artificial Sequence
  Synthetic
cagccgggagggcttcaggag

SEQ ID NO: 5898 - DNA, 21 bp, Artificial Sequence
  Synthetic
gttgtcagccgggagggcttc

SEQ ID NO: 5899 - DNA, 21 bp, Artificial Sequence
  Synthetic
tgttgtcagccgggagggctt

SEQ ID NO: 5900 - DNA, 21 bp, Artificial Sequence
  Synthetic
ttcaggcttgttgtcagccgg

SEQ ID NO: 5901 - DNA, 21 bp, Artificial Sequence
  Synthetic
ccctcccggctgacaacaagc

SEQ ID NO: 5902 - DNA, 21 bp, Artificial Sequence
  Synthetic
tcttcaggcttgttgtcagcc

SEQ ID NO: 5903 - DNA, 21 bp, Artificial Sequence
  Synthetic
ttcttcaggcttgttgtcagc

SEQ ID NO: 5904 - DNA, 21 bp, Artificial Sequence
  Synthetic
tcccggctgacaacaagcctg

SEQ ID NO: 5905 - DNA, 21 bp, Artificial Sequence
  Synthetic
cttcttcaggcttgttgtcag

SEQ ID NO: 5906 - DNA, 21 bp, Artificial Sequence
  Synthetic
gtgaactttaaagaaccgagg

SEQ ID NO: 5907 - DNA, 21 bp, Artificial Sequence
  Synthetic
caagatgtgaactttaaagaa

SEQ ID NO: 5908 - DNA, 21 bp, Artificial Sequence
  Synthetic
cggttctttaaagttcacatc

SEQ ID NO: 5909 - DNA, 21 bp, Artificial Sequence
  Synthetic
tcattcaagatgtgaacttta

SEQ ID NO: 5910 - DNA, 21 bp, Artificial Sequence
  Synthetic
ttaaagttcacatcttgaatg

SEQ ID NO: 5911 - DNA, 21 bp, Artificial Sequence
  Synthetic
cttgtgctcatcattcaagat

SEQ ID NO: 5912 - DNA, 21 bp, Artificial Sequence
  Synthetic
ccaatcagccatcactttagc

SEQ ID NO: 5913 - DNA, 21 bp, Artificial Sequence
  Synthetic
tcgtgctaaagtgatggctga

SEQ ID NO: 5914 - DNA, 21 bp, Artificial Sequence
  Synthetic
aagtgatggctgattgggtgt

SEQ ID NO: 5915 - DNA, 21 bp, Artificial Sequence
  Synthetic
gtgatggctgattgggtgtca

SEQ ID NO: 5916 - DNA, 21 bp, Artificial Sequence
  Synthetic
tcagagggtggcgtgctgctg

SEQ ID NO: 5917 - DNA, 21 bp, Artificial Sequence
  Synthetic
cagagggtggcgtgctgctga

SEQ ID NO: 5918 - DNA, 21 bp, Artificial Sequence
  Synthetic
gtggcgtgctgctgatggggt

SEQ ID NO: 5919 - DNA, 21 bp, Artificial Sequence
  Synthetic
gagatgtacagactcctcact

SEQ ID NO: 5920 - DNA, 21 bp, Artificial Sequence
  Synthetic
atgtacagactcctcactctg

SEQ ID NO: 5921 - DNA, 21 bp, Artificial Sequence
  Synthetic
gcaaatgatttcttcagagtg

SEQ ID NO: 5922 - DNA, 21 bp, Artificial Sequence
  Synthetic
ggcaaatgatttcttcagagt

SEQ ID NO: 5923 - DNA, 21 bp, Artificial Sequence
  Synthetic
gtggcaaatgatttcttcaga

SEQ ID NO: 5924 - DNA, 21 bp, Artificial Sequence
  Synthetic
acctgtggcaaatgatttctt

SEQ ID NO: 5925 - DNA, 21 bp, Artificial Sequence
  Synthetic
aaatcatttgccacaggtaga

SEQ ID NO: 5926 - DNA, 21 bp, Artificial Sequence
  Synthetic
tcatttgccacaggtagaccg

SEQ ID NO: 5927 - DNA, 21 bp, Artificial Sequence
  Synthetic
acaggtagaccgaagaaaacc

SEQ ID NO: 5928 - DNA, 21 bp, Artificial Sequence
  Synthetic
ctagatcaatgatgactgggt

SEQ ID NO: 5929 - DNA, 21 bp, Artificial Sequence
  Synthetic
atctagatcaatgatgactgg

SEQ ID NO: 5930 - DNA, 21 bp, Artificial Sequence
  Synthetic
acccagtcatcattgatctag

SEQ ID NO: 5931 - DNA, 21 bp, Artificial Sequence
  Synthetic
cctcatctagatcaatgatga

SEQ ID NO: 5932 - DNA, 21 bp, Artificial Sequence
  Synthetic
ccagtcatcattgatctagat

SEQ ID NO: 5933 - DNA, 21 bp, Artificial Sequence
  Synthetic
cagtcatcattgatctagatg

SEQ ID NO: 5934 - DNA, 21 bp, Artificial Sequence
  Synthetic
ctagatgaggaagatcggcag

SEQ ID NO: 5935 - DNA, 21 bp, Artificial Sequence
  Synthetic
tagatgaggaagatcggcagc

SEQ ID NO: 5936 - DNA, 21 bp, Artificial Sequence
  Synthetic
ggaagatcggcagcaggagtt

SEQ ID NO: 5937 - DNA, 21 bp, Artificial Sequence
  Synthetic
gaagatcggcagcaggagttt

SEQ ID NO: 5938 - DNA, 21 bp, Artificial Sequence
  Synthetic
agatcggcagcaggagtttcg

SEQ ID NO: 5939 - DNA, 21 bp, Artificial Sequence
  Synthetic
ggcagcaggagtttcggagag

SEQ ID NO: 5940 - DNA, 21 bp, Artificial Sequence
  Synthetic
tgggataggctgcccacctct

SEQ ID NO: 5941 - DNA, 21 bp, Artificial Sequence
  Synthetic
cctcttccctccctagagttt

SEQ ID NO: 5942 - DNA, 21 bp, Artificial Sequence
  Synthetic
cataaagccttctcaaactct

SEQ ID NO: 5943 - DNA, 21 bp, Artificial Sequence
  Synthetic
gcataaagccttctcaaactc

SEQ ID NO: 5944 - DNA, 21 bp, Artificial Sequence
  Synthetic
cacagattactacatcagggc

SEQ ID NO: 5945 - DNA, 21 bp, Artificial Sequence
  Synthetic
gccctgatgtagtaatctgtg

SEQ ID NO: 5946 - DNA, 21 bp, Artificial Sequence
  Synthetic
cctcatcacagattactacat

SEQ ID NO: 5947 - DNA, 21 bp, Artificial Sequence
  Synthetic
cctgatgtagtaatctgtgat

SEQ ID NO: 5948 - DNA, 21 bp, Artificial Sequence
  Synthetic
ctgatgtagtaatctgtgatg

SEQ ID NO: 5949 - DNA, 21 bp, Artificial Sequence
  Synthetic
caggccagcacctcacaggct

SEQ ID NO: 5950 - DNA, 21 bp, Artificial Sequence
  Synthetic
gccagcacctcacaggctctg

SEQ ID NO: 5951 - DNA, 21 bp, Artificial Sequence
  Synthetic
agcggatattcttcagagcct

SEQ ID NO: 5952 - DNA, 21 bp, Artificial Sequence
  Synthetic
gcggcgagagcggatattctt

SEQ ID NO: 5953 - DNA, 21 bp, Artificial Sequence
  Synthetic
gaagaatatccgctctcgccg

SEQ ID NO: 5954 - DNA, 21 bp, Artificial Sequence
  Synthetic
cagcaccacccggcggcgaga

SEQ ID NO: 5955 - DNA, 21 bp, Artificial Sequence
  Synthetic
cagtcagcaccacccggcggc

SEQ ID NO: 5956 - DNA, 21 bp, Artificial Sequence
  Synthetic
cccagtcagcaccacccggcg

SEQ ID NO: 5957 - DNA, 21 bp, Artificial Sequence
  Synthetic
ctcgccgccgggtggtgctga

SEQ ID NO: 5958 - DNA, 21 bp, Artificial Sequence
  Synthetic
accctctgcaaaacaacctca

SEQ ID NO: 5959 - DNA, 21 bp, Artificial Sequence
  Synthetic
tccaccatgcaccagtactca

SEQ ID NO: 5960 - DNA, 21 bp, Artificial Sequence
  Synthetic
ctcattgagtactggtgcatg

SEQ ID NO: 5961 - DNA, 21 bp, Artificial Sequence
  Synthetic
cctgccgggtgccaaggaagt

SEQ ID NO: 5962 - DNA, 21 bp, Artificial Sequence
  Synthetic
ccagacttccttggcacccgg

SEQ ID NO: 5963 - DNA, 21 bp, Artificial Sequence
  Synthetic
cagacttccttggcacccggc

SEQ ID NO: 5964 - DNA, 21 bp, Artificial Sequence
  Synthetic
ctgaactcctgccgggtgcca

SEQ ID NO: 5965 - DNA, 21 bp, Artificial Sequence
  Synthetic
gctgaactcctgccgggtgcc

SEQ ID NO: 5966 - DNA, 21 bp, Artificial Sequence
  Synthetic
aaacatgttgctgaactcctg

SEQ ID NO: 5967 - DNA, 21 bp, Artificial Sequence
  Synthetic
ggcaggagttcagcaacatgt

SEQ ID NO: 5968 - DNA, 21 bp, Artificial Sequence
  Synthetic
atagggcgttcaaacatgttg

SEQ ID NO: 5969 - DNA, 21 bp, Artificial Sequence
  Synthetic
aacatgtttgaacgccctatc

SEQ ID NO: 5970 - DNA, 21 bp, Artificial Sequence
  Synthetic
tgtttgaacgccctatcctga

SEQ ID NO: 5971 - DNA, 21 bp, Artificial Sequence
  Synthetic
caatacattgcccattcagga

SEQ ID NO: 5972 - DNA, 21 bp, Artificial Sequence
  Synthetic
gctgtcaatacattgcccatt

SEQ ID NO: 5973 - DNA, 21 bp, Artificial Sequence
  Synthetic
caatgtattgacagcacacct

SEQ ID NO: 5974 - DNA, 21 bp, Artificial Sequence
  Synthetic
gtaccgcatgaggcggacgtc

SEQ ID NO: 5975 - DNA, 21 bp, Artificial Sequence
  Synthetic
ggacgtccgcctcatgcggta

SEQ ID NO: 5976 - DNA, 21 bp, Artificial Sequence
  Synthetic
gacgtccgcctcatgcggtac

SEQ ID NO: 5977 - DNA, 21 bp, Artificial Sequence
  Synthetic
atggctccggtaccgcatgag

SEQ ID NO: 5978 - DNA, 21 bp, Artificial Sequence
  Synthetic
aggacatggctccggtaccgc

SEQ ID NO: 5979 - DNA, 21 bp, Artificial Sequence
  Synthetic
agccatgtcctgcacagtctt

SEQ ID NO: 5980 - DNA, 21 bp, Artificial Sequence
  Synthetic
gccatgtcctgcacagtcttc

SEQ ID NO: 5981 - DNA, 21 bp, Artificial Sequence
  Synthetic
catgtcctgcacagtcttctg

SEQ ID NO: 5982 - DNA, 21 bp, Artificial Sequence
  Synthetic
aaagccctccagaagactgtg

SEQ ID NO: 5983 - DNA, 21 bp, Artificial Sequence
  Synthetic
agtcttctggagggctttgtg

SEQ ID NO: 5984 - DNA, 21 bp, Artificial Sequence
  Synthetic
tcacctctgcacaaagccctc

SEQ ID NO: 5985 - DNA, 21 bp, Artificial Sequence
  Synthetic
tctggagggctttgtgcagag

SEQ ID NO: 5986 - DNA, 21 bp, Artificial Sequence
  Synthetic
cagcacagtgtggcctctcct

SEQ ID NO: 5987 - DNA, 21 bp, Artificial Sequence
  Synthetic
cataggagaggccacactgtg

SEQ ID NO: 5988 - DNA, 21 bp, Artificial Sequence
  Synthetic
ctgaagattcatctccctgcc

SEQ ID NO: 5989 - DNA, 21 bp, Artificial Sequence
  Synthetic
tgaagattcatctccctgcca

SEQ ID NO: 5990 - DNA, 21 bp, Artificial Sequence
  Synthetic
agattcatctccctgccaagg

SEQ ID NO: 5991 - DNA, 21 bp, Artificial Sequence
  Synthetic
ctggatcttggagagccgcac

SEQ ID NO: 5992 - DNA, 21 bp, Artificial Sequence
  Synthetic
tgtgcggctctccaagatcca

SEQ ID NO: 5993 - DNA, 21 bp, Artificial Sequence
  Synthetic
tacaaatctcgctggatcttg

SEQ ID NO: 5994 - DNA, 21 bp, Artificial Sequence
  Synthetic
tatacaaatctcgctggatct

SEQ ID NO: 5995 - DNA, 21 bp, Artificial Sequence
  Synthetic
gtatacaaatctcgctggatc

SEQ ID NO: 5996 - DNA, 21 bp, Artificial Sequence
  Synthetic
gaactgtgtatacaaatctcg

SEQ ID NO: 5997 - DNA, 21 bp, Artificial Sequence
  Synthetic
cgagatttgtatacacagttc

SEQ ID NO: 5998 - DNA, 21 bp, Artificial Sequence
  Synthetic
tacacagttcatggatcgctt

SEQ ID NO: 5999 - DNA, 21 bp, Artificial Sequence
  Synthetic
ccacagtcccggaagcgatcc

SEQ ID NO: 6000 - DNA, 21 bp, Artificial Sequence
  Synthetic
ggccaatcaaaatgtcttgat

SEQ ID NO: 6001 - DNA, 21 bp, Artificial Sequence
  Synthetic
tctgaacacttgcgtaatcgt

SEQ ID NO: 6002 - DNA, 21 bp, Artificial Sequence
  Synthetic
ttctgaacacttgcgtaatcg

SEQ ID NO: 6003 - DNA, 21 bp, Artificial Sequence
  Synthetic
tcctacgattacgcaagtgtt

SEQ ID NO: 6004 - DNA, 21 bp, Artificial Sequence
  Synthetic
tacgattacgcaagtgttcag

SEQ ID NO: 6005 - DNA, 21 bp, Artificial Sequence
  Synthetic
gttcagaagaaactttccgtt

SEQ ID NO: 6006 - DNA, 21 bp, Artificial Sequence
  Synthetic
attcgaaacggaaagtttctt

SEQ ID NO: 6007 - DNA, 21 bp, Artificial Sequence
  Synthetic
gaagaaactttccgtttcgaa

SEQ ID NO: 6008 - DNA, 21 bp, Artificial Sequence
  Synthetic
aaactttccgtttcgaattgg

SEQ ID NO: 6009 - DNA, 21 bp, Artificial Sequence
  Synthetic
aactttccgtttcgaattggg

SEQ ID NO: 6010 - DNA, 21 bp, Artificial Sequence
  Synthetic
acacctccacccaattcgaaa

SEQ ID NO: 6011 - DNA, 21 bp, Artificial Sequence
  Synthetic
gacacctccacccaattcgaa

SEQ ID NO: 6012 - DNA, 21 bp, Artificial Sequence
  Synthetic
atggagacacctccacccaat

SEQ ID NO: 6013 - DNA, 21 bp, Artificial Sequence
  Synthetic
gggtggaggtgtctccatagt

SEQ ID NO: 6014 - DNA, 21 bp, Artificial Sequence
  Synthetic
gtggaggtgtctccatagtac

SEQ ID NO: 6015 - DNA, 21 bp, Artificial Sequence
  Synthetic
acacatgcagctctcgtacta

SEQ ID NO: 6016 - DNA, 21 bp, Artificial Sequence
  Synthetic
tacacatgcagctctcgtact

SEQ ID NO: 6017 - DNA, 21 bp, Artificial Sequence
  Synthetic
tagtacgagagctgcatgtgt

SEQ ID NO: 6018 - DNA, 21 bp, Artificial Sequence
  Synthetic
agtacgagagctgcatgtgta

SEQ ID NO: 6019 - DNA, 21 bp, Artificial Sequence
  Synthetic
gtacgagagctgcatgtgtat

SEQ ID NO: 6020 - DNA, 21 bp, Artificial Sequence
  Synthetic
gtgtatgggagtgtggtccct

SEQ ID NO: 6021 - DNA, 21 bp, Artificial Sequence
  Synthetic
gagtgtggtccctgtgagcag

SEQ ID NO: 6022 - DNA, 21 bp, Artificial Sequence
  Synthetic
agtgtggtccctgtgagcagc

SEQ ID NO: 6023 - DNA, 21 bp, Artificial Sequence
  Synthetic
agtaggatcccggctgctcac

SEQ ID NO: 6024 - DNA, 21 bp, Artificial Sequence
  Synthetic
tagtaggatcccggctgctca

SEQ ID NO: 6025 - DNA, 21 bp, Artificial Sequence
  Synthetic
atacctgatgctgaaatttag

SEQ ID NO: 6026 - DNA, 21 bp, Artificial Sequence
  Synthetic
tggaatacaggatacctgatg

SEQ ID NO: 6027 - DNA, 21 bp, Artificial Sequence
  Synthetic
cagggatttggcatgctgctg

SEQ ID NO: 6028 - DNA, 21 bp, Artificial Sequence
  Synthetic
agggatttggcatgctgctga

SEQ ID NO: 6029 - DNA, 21 bp, Artificial Sequence
  Synthetic
ggatttggcatgctgctgatg

SEQ ID NO: 6030 - DNA, 21 bp, Artificial Sequence
  Synthetic
gatttggcatgctgctgatgg

SEQ ID NO: 6031 - DNA, 21 bp, Artificial Sequence
  Synthetic
gcatgctgctgatggaggaag

SEQ ID NO: 6032 - DNA, 21 bp, Artificial Sequence
  Synthetic
gctgctgatggaggaagcaga

SEQ ID NO: 6033 - DNA, 21 bp, Artificial Sequence
  Synthetic
ggaggaagcagaaagaatagc

SEQ ID NO: 6034 - DNA, 21 bp, Artificial Sequence
  Synthetic
aggaagcagaaagaatagcta

SEQ ID NO: 6035 - DNA, 21 bp, Artificial Sequence
  Synthetic
aagcagaaagaatagctagag

SEQ ID NO: 6036 - DNA, 21 bp, Artificial Sequence
  Synthetic
aaagaatagctagagaagaac

SEQ ID NO: 6037 - DNA, 21 bp, Artificial Sequence
  Synthetic
tagctagagaagaacatgggt

SEQ ID NO: 6038 - DNA, 21 bp, Artificial Sequence
  Synthetic
agctagagaagaacatgggtc

SEQ ID NO: 6039 - DNA, 21 bp, Artificial Sequence
  Synthetic
gctagagaagaacatgggtct

SEQ ID NO: 6040 - DNA, 21 bp, Artificial Sequence
  Synthetic
ggtcggcaccaggaattatta

SEQ ID NO: 6041 - DNA, 21 bp, Artificial Sequence
  Synthetic
caaaattacttctgtgcacag

SEQ ID NO: 6042 - DNA, 21 bp, Artificial Sequence
  Synthetic
accaaataattctactgtgca

SEQ ID NO: 6043 - DNA, 21 bp, Artificial Sequence
  Synthetic
tagaattatttggtcttgtga

SEQ ID NO: 6044 - DNA, 21 bp, Artificial Sequence
  Synthetic
agaattatttggtcttgtgat

SEQ ID NO: 6045 - DNA, 21 bp, Artificial Sequence
  Synthetic
cagtgaagaaatacttgctgt

SEQ ID NO: 6046 - DNA, 21 bp, Artificial Sequence
  Synthetic
ctgacagcaagtatttcttca

SEQ ID NO: 6047 - DNA, 21 bp, Artificial Sequence
  Synthetic
tgacagcaagtatttcttcac

SEQ ID NO: 6048 - DNA, 21 bp, Artificial Sequence
  Synthetic
gacagcaagtatttcttcact

SEQ ID NO: 6049 - DNA, 21 bp, Artificial Sequence
  Synthetic
caagtatttcttcactgggag

SEQ ID NO: 6050 - DNA, 21 bp, Artificial Sequence
  Synthetic
ctgtctgtattaggtggttgt

SEQ ID NO: 6051 - DNA, 21 bp, Artificial Sequence
  Synthetic
tgtctgtattaggtggttgtc

SEQ ID NO: 6052 - DNA, 21 bp, Artificial Sequence
  Synthetic
tgtattaggtggttgtctggg

SEQ ID NO: 6053 - DNA, 21 bp, Artificial Sequence
  Synthetic
cattgcagagagagtggactc

SEQ ID NO: 6054 - DNA, 21 bp, Artificial Sequence
  Synthetic
ggactccagagattgtcattt

SEQ ID NO: 6055 - DNA, 21 bp, Artificial Sequence
  Synthetic
gtgtcctgaaatgacaatctc

SEQ ID NO: 6056 - DNA, 21 bp, Artificial Sequence
  Synthetic
agtgtcctgaaatgacaatct

SEQ ID NO: 6057 - DNA, 21 bp, Artificial Sequence
  Synthetic
cttggacaccatcaaagtgtc

SEQ ID NO: 6058 - DNA, 21 bp, Artificial Sequence
  Synthetic
tgatggtgtccaagacctagt

SEQ ID NO: 6059 - DNA, 21 bp, Artificial Sequence
  Synthetic
gatggtgtccaagacctagtc

SEQ ID NO: 6060 - DNA, 21 bp, Artificial Sequence
  Synthetic
ttctggatcccagactaggtc

SEQ ID NO: 6061 - DNA, 21 bp, Artificial Sequence
  Synthetic
tccaagacctagtctgggatc

SEQ ID NO: 6062 - DNA, 21 bp, Artificial Sequence
  Synthetic
aagacctagtctgggatccag

SEQ ID NO: 6063 - DNA, 21 bp, Artificial Sequence
  Synthetic
agacctagtctgggatccaga

SEQ ID NO: 6064 - DNA, 21 bp, Artificial Sequence
  Synthetic
acctagtctgggatccagaag

SEQ ID NO: 6065 - DNA, 21 bp, Artificial Sequence
  Synthetic
cagtgataataaattctcctt

SEQ ID NO: 6066 - DNA, 21 bp, Artificial Sequence
  Synthetic
actacatcttggaaacaggtg

SEQ ID NO: 6067 - DNA, 21 bp, Artificial Sequence
  Synthetic
atctgcgtgactgtcaaactg

SEQ ID NO: 6068 - DNA, 21 bp, Artificial Sequence
  Synthetic
catctgcgtgactgtcaaact

SEQ ID NO: 6069 - DNA, 21 bp, Artificial Sequence
  Synthetic
cgcagatggccttctcaccta

SEQ ID NO: 6070 - DNA, 21 bp, Artificial Sequence
  Synthetic
cagatggccttctcacctaat

SEQ ID NO: 6071 - DNA, 21 bp, Artificial Sequence
  Synthetic
agtaagaacttctcattaggt

SEQ ID NO: 6072 - DNA, 21 bp, Artificial Sequence
  Synthetic
ctagtaagaacttctcattag

SEQ ID NO: 6073 - DNA, 21 bp, Artificial Sequence
  Synthetic
gaagttcttactagctgtttc

SEQ ID NO: 6074 - DNA, 21 bp, Artificial Sequence
  Synthetic
cgatctctggaaacagctagt

SEQ ID NO: 6075 - DNA, 21 bp, Artificial Sequence
  Synthetic
cttactagctgtttccagaga

SEQ ID NO: 6076 - DNA, 21 bp, Artificial Sequence
  Synthetic
acaatgaccaggttcgatctc

SEQ ID NO: 6077 - DNA, 21 bp, Artificial Sequence
  Synthetic
cacaatgaccaggttcgatct

SEQ ID NO: 6078 - DNA, 21 bp, Artificial Sequence
  Synthetic
cagagatcgaacctggtcatt

SEQ ID NO: 6079 - DNA, 21 bp, Artificial Sequence
  Synthetic
agagatcgaacctggtcattg

SEQ ID NO: 6080 - DNA, 21 bp, Artificial Sequence
  Synthetic
ttcagaaagtgctttctctct

SEQ ID NO: 6081 - DNA, 21 bp, Artificial Sequence
  Synthetic
aagtgctttctctctgtggac

SEQ ID NO: 6082 - DNA, 21 bp, Artificial Sequence
  Synthetic
gtgctttctctctgtggacat

SEQ ID NO: 6083 - DNA, 21 bp, Artificial Sequence
  Synthetic
tccaatcctcatgtccacaga

SEQ ID NO: 6084 - DNA, 21 bp, Artificial Sequence
  Synthetic
ttctctctgtggacatgagga

SEQ ID NO: 6085 - DNA, 21 bp, Artificial Sequence
  Synthetic
aatccaatcctcatgtccaca

SEQ ID NO: 6086 - DNA, 21 bp, Artificial Sequence
  Synthetic
ctaatccaatcctcatgtcca

SEQ ID NO: 6087 - DNA, 21 bp, Artificial Sequence
  Synthetic
ctgtggacatgaggattggat

SEQ ID NO: 6088 - DNA, 21 bp, Artificial Sequence
  Synthetic
gtggacatgaggattggatta

SEQ ID NO: 6089 - DNA, 21 bp, Artificial Sequence
  Synthetic
tggacatgaggattggattag

SEQ ID NO: 6090 - DNA, 21 bp, Artificial Sequence
  Synthetic
catgaggattggattagagga

SEQ ID NO: 6091 - DNA, 21 bp, Artificial Sequence
  Synthetic
atgaggattggattagaggag

SEQ ID NO: 6092 - DNA, 21 bp, Artificial Sequence
  Synthetic
ggattggattagaggagtgga

SEQ ID NO: 6093 - DNA, 21 bp, Artificial Sequence
  Synthetic
caatcttgtgaacagcttgct

SEQ ID NO: 6094 - DNA, 21 bp, Artificial Sequence
  Synthetic
gcaatcttgtgaacagcttgc

SEQ ID NO: 6095 - DNA, 21 bp, Artificial Sequence
  Synthetic
ctgttcacaagattgcctgat

SEQ ID NO: 6096 - DNA, 21 bp, Artificial Sequence
  Synthetic
atattcttatcaggcaatctt

SEQ ID NO: 6097 - DNA, 21 bp, Artificial Sequence
  Synthetic
acaagattgcctgataagaat

SEQ ID NO: 6098 - DNA, 21 bp, Artificial Sequence
  Synthetic
caagattgcctgataagaata

SEQ ID NO: 6099 - DNA, 21 bp, Artificial Sequence
  Synthetic
aaaagggttgttgttaccaac

SEQ ID NO: 6100 - DNA, 21 bp, Artificial Sequence
  Synthetic
caacttgaatggtcacaccgc

SEQ ID NO: 6101 - DNA, 21 bp, Artificial Sequence
  Synthetic
cgcccgagtcaattgcataca

SEQ ID NO: 6102 - DNA, 21 bp, Artificial Sequence
  Synthetic
aatccactgtatgcaattgac

SEQ ID NO: 6103 - DNA, 21 bp, Artificial Sequence
  Synthetic
tgcatacagtggatttgtaaa

SEQ ID NO: 6104 - DNA, 21 bp, Artificial Sequence
  Synthetic
aaactaattcagtagaagggg

SEQ ID NO: 6105 - DNA, 21 bp, Artificial Sequence
  Synthetic
tccagaaactaattcagtaga

SEQ ID NO: 6106 - DNA, 21 bp, Artificial Sequence
  Synthetic
ccccttctactgaattagttt

SEQ ID NO: 6107 - DNA, 21 bp, Artificial Sequence
  Synthetic
ctccagaaactaattcagtag

SEQ ID NO: 6108 - DNA, 21 bp, Artificial Sequence
  Synthetic
cccttctactgaattagtttc

SEQ ID NO: 6109 - DNA, 21 bp, Artificial Sequence
  Synthetic
cttctactgaattagtttctg

SEQ ID NO: 6110 - DNA, 21 bp, Artificial Sequence
  Synthetic
atcctccagaaactaattcag

SEQ ID NO: 6111 - DNA, 21 bp, Artificial Sequence
  Synthetic
tcacttgattatcagatcctc

SEQ ID NO: 6112 - DNA, 21 bp, Artificial Sequence
  Synthetic
atctgataatcaagtgattca

SEQ ID NO: 6113 - DNA, 21 bp, Artificial Sequence
  Synthetic
tctgataatcaagtgattcac

SEQ ID NO: 6114 - DNA, 21 bp, Artificial Sequence
  Synthetic
ctgataatcaagtgattcact

SEQ ID NO: 6115 - DNA, 21 bp, Artificial Sequence
  Synthetic
atcaagtgattcactgggaaa

SEQ ID NO: 6116 - DNA, 21 bp, Artificial Sequence
  Synthetic
ctgattatcctctatttccca

SEQ ID NO: 6117 - DNA, 21 bp, Artificial Sequence
  Synthetic
atacagtttaacttacagttt

SEQ ID NO: 6118 - DNA, 21 bp, Artificial Sequence
  Synthetic
aagctgaggcaagcagagtct

SEQ ID NO: 6119 - DNA, 21 bp, Artificial Sequence
  Synthetic
taccttacaagctgaggcaag

SEQ ID NO: 6120 - DNA, 21 bp, Artificial Sequence
  Synthetic
taaacttccctaccttacaag

SEQ ID NO: 6121 - DNA, 21 bp, Artificial Sequence
  Synthetic
aagcagtgcatcttcaaggcc

SEQ ID NO: 6122 - DNA, 21 bp, Artificial Sequence
  Synthetic
cagtgcatcttcaaggccatg

SEQ ID NO: 6123 - DNA, 21 bp, Artificial Sequence
  Synthetic
ataaacaggtccttcatggcc

SEQ ID NO: 6124 - DNA, 21 bp, Artificial Sequence
  Synthetic
tatgcggtgcatgctgtttac

SEQ ID NO: 6125 - DNA, 21 bp, Artificial Sequence
  Synthetic
tgcggtgcatgctgtttacca

SEQ ID NO: 6126 - DNA, 21 bp, Artificial Sequence
  Synthetic
gcggtgcatgctgtttaccag

SEQ ID NO: 6127 - DNA, 21 bp, Artificial Sequence
  Synthetic
ggtgcatgctgtttaccagag

SEQ ID NO: 6128 - DNA, 21 bp, Artificial Sequence
  Synthetic
aaacgatcagtgtacataatg

SEQ ID NO: 6129 - DNA, 21 bp, Artificial Sequence
  Synthetic
gaacagcagaatctgcagctg

SEQ ID NO: 6130 - DNA, 21 bp, Artificial Sequence
  Synthetic
atgaccggctagcactgtctc

SEQ ID NO: 6131 - DNA, 21 bp, Artificial Sequence
  Synthetic
tggagacagtgctagccggtc

SEQ ID NO: 6132 - DNA, 21 bp, Artificial Sequence
  Synthetic
agtgctagccggtcatgaaaa

SEQ ID NO: 6133 - DNA, 21 bp, Artificial Sequence
  Synthetic
tttgtaaaacacaggttgcca

SEQ ID NO: 6134 - DNA, 21 bp, Artificial Sequence
  Synthetic
gatggtgtcctacagcagcca

SEQ ID NO: 6135 - DNA, 21 bp, Artificial Sequence
  Synthetic
taataatctcactggctgctg

SEQ ID NO: 6136 - DNA, 21 bp, Artificial Sequence
  Synthetic
gtgagattattatctgcttcc

SEQ ID NO: 6137 - DNA, 21 bp, Artificial Sequence
  Synthetic
catggataaaaccatgattct

SEQ ID NO: 6138 - DNA, 21 bp, Artificial Sequence
  Synthetic
tgactcttcatctggagccca

SEQ ID NO: 6139 - DNA, 21 bp, Artificial Sequence
  Synthetic
cagctgtgagctgcctgcagc

SEQ ID NO: 6140 - DNA, 21 bp, Artificial Sequence
  Synthetic
ctgtgagctgcctgcagccag

SEQ ID NO: 6141 - DNA, 21 bp, Artificial Sequence
  Synthetic
tgtgagctgcctgcagccaga

SEQ ID NO: 6142 - DNA, 21 bp, Artificial Sequence
  Synthetic
gctgcctgcagccagaaggag

SEQ ID NO: 6143 - DNA, 21 bp, Artificial Sequence
  Synthetic
tgctctttgtaaccaggtgga

SEQ ID NO: 6144 - DNA, 21 bp, Artificial Sequence
  Synthetic
ctgattgcagctgccatcaca

SEQ ID NO: 6145 - DNA, 21 bp, Artificial Sequence
  Synthetic
ggagacaccaacacagacctg

SEQ ID NO: 6146 - DNA, 21 bp, Artificial Sequence
  Synthetic
aggtctgtgttggtgtctccc

SEQ ID NO: 6147 - DNA, 21 bp, Artificial Sequence
  Synthetic
ttggtgtctccccagagatgg

SEQ ID NO: 6148 - DNA, 21 bp, Artificial Sequence
  Synthetic
ggtgtctccccagagatggca

SEQ ID NO: 6149 - DNA, 21 bp, Artificial Sequence
  Synthetic
tctccccagagatggcagaga

SEQ ID NO: 6150 - DNA, 21 bp, Artificial Sequence
  Synthetic
cttctttctctgccatctctg

SEQ ID NO: 6151 - DNA, 21 bp, Artificial Sequence
  Synthetic
tcttctttctctgccatctct

SEQ ID NO: 6152 - DNA, 21 bp, Artificial Sequence
  Synthetic
gtcttctttctctgccatctc

SEQ ID NO: 6153 - DNA, 21 bp, Artificial Sequence
  Synthetic
agtcttctttctctgccatct

SEQ ID NO: 6154 - DNA, 21 bp, Artificial Sequence
  Synthetic
tacatctgtgtgcgctgtact

SEQ ID NO: 6155 - DNA, 21 bp, Artificial Sequence
  Synthetic
atctgtgtgcgctgtactgtg

SEQ ID NO: 6156 - DNA, 21 bp, Artificial Sequence
  Synthetic
gatataaaaatctgcctatgt

SEQ ID NO: 6157 - DNA, 21 bp, Artificial Sequence
  Synthetic
acattgaatcataggggcagc

SEQ ID NO: 6158 - DNA, 21 bp, Artificial Sequence
  Synthetic
cacattgaatcataggggcag

SEQ ID NO: 6159 - DNA, 21 bp, Artificial Sequence
  Synthetic
cagctgcccctatgattcaat

SEQ ID NO: 6160 - DNA, 21 bp, Artificial Sequence
  Synthetic
gcagagttcacattgaatcat

SEQ ID NO: 6161 - DNA, 21 bp, Artificial Sequence
  Synthetic
tgcagagttcacattgaatca

SEQ ID NO: 6162 - DNA, 21 bp, Artificial Sequence
  Synthetic
tatgattcaatgtgaactctg

SEQ ID NO: 6163 - DNA, 21 bp, Artificial Sequence
  Synthetic
atgattcaatgtgaactctgc

SEQ ID NO: 6164 - DNA, 21 bp, Artificial Sequence
  Synthetic
agcatccctgcagagttcaca

SEQ ID NO: 6165 - DNA, 21 bp, Artificial Sequence
  Synthetic
ctggtgtggaaagcatccctg

SEQ ID NO: 6166 - DNA, 21 bp, Artificial Sequence
  Synthetic
ggtaccgccacacaactggtg

SEQ ID NO: 6167 - DNA, 21 bp, Artificial Sequence
  Synthetic
gggtaccgccacacaactggt

SEQ ID NO: 6168 - DNA, 21 bp, Artificial Sequence
  Synthetic
gtggcggtacccagtatttca

SEQ ID NO: 6169 - DNA, 21 bp, Artificial Sequence
  Synthetic
acccagtatttcacagggcct

SEQ ID NO: 6170 - DNA, 21 bp, Artificial Sequence
  Synthetic
attcgcaggccctgtgaaata

SEQ ID NO: 6171 - DNA, 21 bp, Artificial Sequence
  Synthetic
aaagccagattcgcaggccct

SEQ ID NO: 6172 - DNA, 21 bp, Artificial Sequence
  Synthetic
aatctggctttgtccccattg

SEQ ID NO: 6173 - DNA, 21 bp, Artificial Sequence
  Synthetic
atctggctttgtccccattgt

SEQ ID NO: 6174 - DNA, 21 bp, Artificial Sequence
  Synthetic
tttgtccccattgtcggaggt

SEQ ID NO: 6175 - DNA, 21 bp, Artificial Sequence
  Synthetic
gtttctctgacctccgacaat

SEQ ID NO: 6176 - DNA, 21 bp, Artificial Sequence
  Synthetic
ggtttctctgacctccgacaa

SEQ ID NO: 6177 - DNA, 21 bp, Artificial Sequence
  Synthetic
aggtttctctgacctccgaca

SEQ ID NO: 6178 - DNA, 21 bp, Artificial Sequence
  Synthetic
cttgggaacatcatggagagg

SEQ ID NO: 6179 - DNA, 21 bp, Artificial Sequence
  Synthetic
ccttgggaacatcatggagag

SEQ ID NO: 6180 - DNA, 21 bp, Artificial Sequence
  Synthetic
ccacctctccatgatgttccc

SEQ ID NO: 6181 - DNA, 21 bp, Artificial Sequence
  Synthetic
cacctctccatgatgttccca

SEQ ID NO: 6182 - DNA, 21 bp, Artificial Sequence
  Synthetic
acctctccatgatgttcccaa

SEQ ID NO: 6183 - DNA, 21 bp, Artificial Sequence
  Synthetic
gtctcccttgggaacatcatg

SEQ ID NO: 6184 - DNA, 21 bp, Artificial Sequence
  Synthetic
cagtctcccttgggaacatca

SEQ ID NO: 6185 - DNA, 21 bp, Artificial Sequence
  Synthetic
ccagtctcccttgggaacatc

SEQ ID NO: 6186 - DNA, 21 bp, Artificial Sequence
  Synthetic
ccatgatgttcccaagggaga

SEQ ID NO: 6187 - DNA, 21 bp, Artificial Sequence
  Synthetic
catgatgttcccaagggagac

SEQ ID NO: 6188 - DNA, 21 bp, Artificial Sequence
  Synthetic
aggacacctccagtctccctt

SEQ ID NO: 6189 - DNA, 21 bp, Artificial Sequence
  Synthetic
taggacacctccagtctccct

SEQ ID NO: 6190 - DNA, 21 bp, Artificial Sequence
  Synthetic
ttaggacacctccagtctccc

SEQ ID NO: 6191 - DNA, 21 bp, Artificial Sequence
  Synthetic
ttattacctgagccaaacact

SEQ ID NO: 6192 - DNA, 21 bp, Artificial Sequence
  Synthetic
atgaaacttccttggttgtat

SEQ ID NO: 6193 - DNA, 21 bp, Artificial Sequence
  Synthetic
tgaaacttccttggttgtatg

SEQ ID NO: 6194 - DNA, 21 bp, Artificial Sequence
  Synthetic
gaaacttccttggttgtatgt

SEQ ID NO: 6195 - DNA, 21 bp, Artificial Sequence
  Synthetic
gcacattcccacatacaacca

SEQ ID NO: 6196 - DNA, 21 bp, Artificial Sequence
  Synthetic
agcacattcccacatacaacc

SEQ ID NO: 6197 - DNA, 21 bp, Artificial Sequence
  Synthetic
tttcttcattctgttggcaca

SEQ ID NO: 6198 - DNA, 21 bp, Artificial Sequence
  Synthetic
cttcaatgtgccaacagaatg

SEQ ID NO: 6199 - DNA, 21 bp, Artificial Sequence
  Synthetic
ggtcttcaatgtgccaacaga

SEQ ID NO: 6200 - DNA, 21 bp, Artificial Sequence
  Synthetic
cagtggtcttcaatgtgccaa

SEQ ID NO: 6201 - DNA, 21 bp, Artificial Sequence
  Synthetic
ctgttggcacattgaagacca

SEQ ID NO: 6202 - DNA, 21 bp, Artificial Sequence
  Synthetic
tgttggcacattgaagaccac

SEQ ID NO: 6203 - DNA, 21 bp, Artificial Sequence
  Synthetic
ctcaccagtgcaagtagttaa

SEQ ID NO: 6204 - DNA, 21 bp, Artificial Sequence
  Synthetic
ttcaattaactacttgcactg

SEQ ID NO: 6205 - DNA, 21 bp, Artificial Sequence
  Synthetic
caattaactacttgcactggt

SEQ ID NO: 6206 - DNA, 21 bp, Artificial Sequence
  Synthetic
ggggtgagccaaaaacctggt

SEQ ID NO: 6207 - DNA, 21 bp, Artificial Sequence
  Synthetic
gggtgagccaaaaacctggta

SEQ ID NO: 6208 - DNA, 21 bp, Artificial Sequence
  Synthetic
caaaaacctggtatggagtcc

SEQ ID NO: 6209 - DNA, 21 bp, Artificial Sequence
  Synthetic
atggagtcccagggtatgctg

SEQ ID NO: 6210 - DNA, 21 bp, Artificial Sequence
  Synthetic
tagctgctcagcagcataccc

SEQ ID NO: 6211 - DNA, 21 bp, Artificial Sequence
  Synthetic
ctagctgctcagcagcatacc

SEQ ID NO: 6212 - DNA, 21 bp, Artificial Sequence
  Synthetic
cagggtatgctgctgagcagc

SEQ ID NO: 6213 - DNA, 21 bp, Artificial Sequence
  Synthetic
gctgagcagctagaaaatgta

SEQ ID NO: 6214 - DNA, 21 bp, Artificial Sequence
  Synthetic
gagcagctagaaaatgtaatg

SEQ ID NO: 6215 - DNA, 21 bp, Artificial Sequence
  Synthetic
atgtaatgaagaaactagctc

SEQ ID NO: 6216 - DNA, 21 bp, Artificial Sequence
  Synthetic
cggctgggacacaaagagttc

SEQ ID NO: 6217 - DNA, 21 bp, Artificial Sequence
  Synthetic
ccggctgggacacaaagagtt

SEQ ID NO: 6218 - DNA, 21 bp, Artificial Sequence
  Synthetic
ccagaactctttgtgtcccag

SEQ ID NO: 6219 - DNA, 21 bp, Artificial Sequence
  Synthetic
aggagatccggctgggacaca

SEQ ID NO: 6220 - DNA, 21 bp, Artificial Sequence
  Synthetic
agctgatggaggagatccggc

SEQ ID NO: 6221 - DNA, 21 bp, Artificial Sequence
  Synthetic
aagctgatggaggagatccgg

SEQ ID NO: 6222 - DNA, 21 bp, Artificial Sequence
  Synthetic
atgatggtcacaagctgatgg

SEQ ID NO: 6223 - DNA, 21 bp, Artificial Sequence
  Synthetic
catgatggtcacaagctgatg

SEQ ID NO: 6224 - DNA, 21 bp, Artificial Sequence
  Synthetic
ttcatgatggtcacaagctga

SEQ ID NO: 6225 - DNA, 21 bp, Artificial Sequence
  Synthetic
ctccatcagcttgtgaccatc

SEQ ID NO: 6226 - DNA, 21 bp, Artificial Sequence
  Synthetic
gttcatgatggtcacaagctg

SEQ ID NO: 6227 - DNA, 21 bp, Artificial Sequence
  Synthetic
accccaataccctgatgactc

SEQ ID NO: 6228 - DNA, 21 bp, Artificial Sequence
  Synthetic
cttcatgagtcatcagggtat

SEQ ID NO: 6229 - DNA, 21 bp, Artificial Sequence
  Synthetic
acttcatgagtcatcagggta

SEQ ID NO: 6230 - DNA, 21 bp, Artificial Sequence
  Synthetic
tacaggcacttcatgagtcat

SEQ ID NO: 6231 - DNA, 21 bp, Artificial Sequence
  Synthetic
cccagaacatacaggcacttc

SEQ ID NO: 6232 - DNA, 21 bp, Artificial Sequence
  Synthetic
atttctgtctctttaggttta

SEQ ID NO: 6233 - DNA, 21 bp, Artificial Sequence
  Synthetic
tttaccgaactaatcagtgtg

SEQ ID NO: 6234 - DNA, 21 bp, Artificial Sequence
  Synthetic
ttaccgaactaatcagtgtgc

SEQ ID NO: 6235 - DNA, 21 bp, Artificial Sequence
  Synthetic
taccgaactaatcagtgtgct

SEQ ID NO: 6236 - DNA, 21 bp, Artificial Sequence
  Synthetic
accgaactaatcagtgtgctg

SEQ ID NO: 6237 - DNA, 21 bp, Artificial Sequence
  Synthetic
ggagtttgtgattacatttcc

SEQ ID NO: 6238 - DNA, 21 bp, Artificial Sequence
  Synthetic
aaaaccactgtggtaggctct

SEQ ID NO: 6239 - DNA, 21 bp, Artificial Sequence
  Synthetic
taaaaccactgtggtaggctc

SEQ ID NO: 6240 - DNA, 21 bp, Artificial Sequence
  Synthetic
taggcccaaactcgtgtaaaa

SEQ ID NO: 6241 - DNA, 21 bp, Artificial Sequence
  Synthetic
actcgtgtaaaattgaatttc

SEQ ID NO: 6242 - DNA, 21 bp, Artificial Sequence
  Synthetic
cagtactttgcaatctggtcc

SEQ ID NO: 6243 - DNA, 21 bp, Artificial Sequence
  Synthetic
cttggaccagattgcaaagta

SEQ ID NO: 6244 - DNA, 21 bp, Artificial Sequence
  Synthetic
ttggaccagattgcaaagtac

SEQ ID NO: 6245 - DNA, 21 bp, Artificial Sequence
  Synthetic
tggaccagattgcaaagtact

SEQ ID NO: 6246 - DNA, 21 bp, Artificial Sequence
  Synthetic
attgcaaagtactgggagtta

SEQ ID NO: 6247 - DNA, 21 bp, Artificial Sequence
  Synthetic
ttgcaaagtactgggagttac

SEQ ID NO: 6248 - DNA, 21 bp, Artificial Sequence
  Synthetic
tgcaaagtactgggagttaca

SEQ ID NO: 6249 - DNA, 21 bp, Artificial Sequence
  Synthetic
tgggagttacagggaagtact

SEQ ID NO: 6250 - DNA, 21 bp, Artificial Sequence
  Synthetic
agtactctgaaaattccacat

SEQ ID NO: 6251 - DNA, 21 bp, Artificial Sequence
  Synthetic
gtactctgaaaattccacatg

SEQ ID NO: 6252 - DNA, 21 bp, Artificial Sequence
  Synthetic
actctgaaaattccacatgtg

SEQ ID NO: 6253 - DNA, 21 bp, Artificial Sequence
  Synthetic
tctgaaaattccacatgtgga

SEQ ID NO: 6254 - DNA, 21 bp, Artificial Sequence
  Synthetic
ctgaaaattccacatgtggag

SEQ ID NO: 6255 - DNA, 21 bp, Artificial Sequence
  Synthetic
caagatcttcctctccacatg

SEQ ID NO: 6256 - DNA, 21 bp, Artificial Sequence
  Synthetic
ccaagatcttcctctccacat

SEQ ID NO: 6257 - DNA, 21 bp, Artificial Sequence
  Synthetic
ccacatgtggagaggaagatc

SEQ ID NO: 6258 - DNA, 21 bp, Artificial Sequence
  Synthetic
ttagctctttaccttattaag

SEQ ID NO: 6259 - DNA, 21 bp, Artificial Sequence
  Synthetic
aacagttagttgcagaagaag

SEQ ID NO: 6260 - DNA, 21 bp, Artificial Sequence
  Synthetic
ggtggatttgcagttgtttgc

SEQ ID NO: 6261 - DNA, 21 bp, Artificial Sequence
  Synthetic
atttgcagttgtttgcaagga

SEQ ID NO: 6262 - DNA, 21 bp, Artificial Sequence
  Synthetic
agttgtttgcaaggatagaaa

SEQ ID NO: 6263 - DNA, 21 bp, Artificial Sequence
  Synthetic
tggaccaaaattgctaccaag

SEQ ID NO: 6264 - DNA, 21 bp, Artificial Sequence
  Synthetic
ggaccaaaattgctaccaaga

SEQ ID NO: 6265 - DNA, 21 bp, Artificial Sequence
  Synthetic
gggtttgctcctggcaaagca

SEQ ID NO: 6266 - DNA, 21 bp, Artificial Sequence
  Synthetic
atgtgagcccactgctttgcc

SEQ ID NO: 6267 - DNA, 21 bp, Artificial Sequence
  Synthetic
tatgtgagcccactgctttgc

SEQ ID NO: 6268 - DNA, 21 bp, Artificial Sequence
  Synthetic
caaagcagtgggctcacatat

SEQ ID NO: 6269 - DNA, 21 bp, Artificial Sequence
  Synthetic
aagcagtgggctcacatatca

SEQ ID NO: 6270 - DNA, 21 bp, Artificial Sequence
  Synthetic
gctcacatatcagagggcatt

SEQ ID NO: 6271 - DNA, 21 bp, Artificial Sequence
  Synthetic
gttcataatgccctctgatat

SEQ ID NO: 6272 - DNA, 21 bp, Artificial Sequence
  Synthetic
acatatcagagggcattatga

SEQ ID NO: 6273 - DNA, 21 bp, Artificial Sequence
  Synthetic
caggaataagttgtaggggtt

SEQ ID NO: 6274 - DNA, 21 bp, Artificial Sequence
  Synthetic
gacaggaataagttgtagggg

SEQ ID NO: 6275 - DNA, 21 bp, Artificial Sequence
  Synthetic
ctccggacaggaataagttgt

SEQ ID NO: 6276 - DNA, 21 bp, Artificial Sequence
  Synthetic
tctccggacaggaataagttg

SEQ ID NO: 6277 - DNA, 21 bp, Artificial Sequence
  Synthetic
ctccacccgagtgcccggtct

SEQ ID NO: 6278 - DNA, 21 bp, Artificial Sequence
  Synthetic
gtgcccggtcttcgaacccag

SEQ ID NO: 6279 - DNA, 21 bp, Artificial Sequence
  Synthetic
tgcccggtcttcgaacccagc

SEQ ID NO: 6280 - DNA, 21 bp, Artificial Sequence
  Synthetic
gcccggtcttcgaacccagct

SEQ ID NO: 6281 - DNA, 21 bp, Artificial Sequence
  Synthetic
cttcccagctgggttcgaaga

SEQ ID NO: 6282 - DNA, 21 bp, Artificial Sequence
  Synthetic
cggtcttcgaacccagctggg

SEQ ID NO: 6283 - DNA, 21 bp, Artificial Sequence
  Synthetic
gcgaactcttcccagctgggt

SEQ ID NO: 6284 - DNA, 21 bp, Artificial Sequence
  Synthetic
gaacccagctgggaagagttc

SEQ ID NO: 6285 - DNA, 21 bp, Artificial Sequence
  Synthetic
gggtccgcgaactcttcccag

SEQ ID NO: 6286 - DNA, 21 bp, Artificial Sequence
  Synthetic
tggatgaaagcgaaggggtcc

SEQ ID NO: 6287 - DNA, 21 bp, Artificial Sequence
  Synthetic
ggatcttgtggatgaaagcga

SEQ ID NO: 6288 - DNA, 21 bp, Artificial Sequence
  Synthetic
cggatcttgtggatgaaagcg

SEQ ID NO: 6289 - DNA, 21 bp, Artificial Sequence
  Synthetic
ggccggatcttgtggatgaaa

SEQ ID NO: 6290 - DNA, 21 bp, Artificial Sequence
  Synthetic
gctatgggccggatcttgtgg

SEQ ID NO: 6291 - DNA, 21 bp, Artificial Sequence
  Synthetic
ctcggctatgggccggatctt

SEQ ID NO: 6292 - DNA, 21 bp, Artificial Sequence
  Synthetic
tccacaagatccggcccatag

SEQ ID NO: 6293 - DNA, 21 bp, Artificial Sequence
  Synthetic
gccagtctgctcggctatggg

SEQ ID NO: 6294 - DNA, 21 bp, Artificial Sequence
  Synthetic
cagatgccagtctgctcggct

SEQ ID NO: 6295 - DNA, 21 bp, Artificial Sequence
  Synthetic
gcagattgagtcatatgtctg

SEQ ID NO: 6296 - DNA, 21 bp, Artificial Sequence
  Synthetic
atatgtctgccggatgtgttc

SEQ ID NO: 6297 - DNA, 21 bp, Artificial Sequence
  Synthetic
atgtctgccggatgtgttctc

SEQ ID NO: 6298 - DNA, 21 bp, Artificial Sequence
  Synthetic
tgtctgccggatgtgttctcg

SEQ ID NO: 6299 - DNA, 21 bp, Artificial Sequence
  Synthetic
gtctgccggatgtgttctcga

SEQ ID NO: 6300 - DNA, 21 bp, Artificial Sequence
  Synthetic
gccggatgtgttctcgagggg

SEQ ID NO: 6301 - DNA, 21 bp, Artificial Sequence
  Synthetic
cggatgtgttctcgaggggat

SEQ ID NO: 6302 - DNA, 21 bp, Artificial Sequence
  Synthetic
gcttgtcatcctcatcccctc

SEQ ID NO: 6303 - DNA, 21 bp, Artificial Sequence
  Synthetic
gagcttgtcatcctcatcccc

SEQ ID NO: 6304 - DNA, 21 bp, Artificial Sequence
  Synthetic
tcatcacagccatcacacagc

SEQ ID NO: 6305 - DNA, 21 bp, Artificial Sequence
  Synthetic
gtcatcacagccatcacacag

SEQ ID NO: 6306 - DNA, 21 bp, Artificial Sequence
  Synthetic
tcaggcagaggaggcagcagg

SEQ ID NO: 6307 - DNA, 21 bp, Artificial Sequence
  Synthetic
tctgcctgctgcctcctctgc

SEQ ID NO: 6308 - DNA, 21 bp, Artificial Sequence
  Synthetic
cctcctctgcctgagatcccc

SEQ ID NO: 6309 - DNA, 21 bp, Artificial Sequence
  Synthetic
acccttggggatctcaggcag

SEQ ID NO: 6310 - DNA, 21 bp, Artificial Sequence
  Synthetic
cacccttggggatctcaggca

SEQ ID NO: 6311 - DNA, 21 bp, Artificial Sequence
  Synthetic
gacacccttggggatctcagg

SEQ ID NO: 6312 - DNA, 21 bp, Artificial Sequence
  Synthetic
tgggcaccgccagacaccctt

SEQ ID NO: 6313 - DNA, 21 bp, Artificial Sequence
  Synthetic
ttgggcaccgccagacaccct

SEQ ID NO: 6314 - DNA, 21 bp, Artificial Sequence
  Synthetic
tttgggcaccgccagacaccc

SEQ ID NO: 6315 - DNA, 21 bp, Artificial Sequence
  Synthetic
gccttaccgccatgacacact

SEQ ID NO: 6316 - DNA, 21 bp, Artificial Sequence
  Synthetic
ctacaacctctatctgtgtgt

SEQ ID NO: 6317 - DNA, 21 bp, Artificial Sequence
  Synthetic
gcacctgcccacacacacaga

SEQ ID NO: 6318 - DNA, 21 bp, Artificial Sequence
  Synthetic
gtgtgtgtgggcaggtgctgg

SEQ ID NO: 6319 - DNA, 21 bp, Artificial Sequence
  Synthetic
tgtgtgtgggcaggtgctggc

SEQ ID NO: 6320 - DNA, 21 bp, Artificial Sequence
  Synthetic
tgtgggcaggtgctggctggg

SEQ ID NO: 6321 - DNA, 21 bp, Artificial Sequence
  Synthetic
gtgggcaggtgctggctgggg

SEQ ID NO: 6322 - DNA, 21 bp, Artificial Sequence
  Synthetic
tgggcaggtgctggctggggc

SEQ ID NO: 6323 - DNA, 21 bp, Artificial Sequence
  Synthetic
gctctgcagtgtgacctgtgt

SEQ ID NO: 6324 - DNA, 21 bp, Artificial Sequence
  Synthetic
gtcctgacacaggtcacactg

SEQ ID NO: 6325 - DNA, 21 bp, Artificial Sequence
  Synthetic
acctgtgtcaggactggttcc

SEQ ID NO: 6326 - DNA, 21 bp, Artificial Sequence
  Synthetic
ggcactgacacacaccgccca

SEQ ID NO: 6327 - DNA, 21 bp, Artificial Sequence
  Synthetic
aggcactgacacacaccgccc

SEQ ID NO: 6328 - DNA, 21 bp, Artificial Sequence
  Synthetic
gtgcctcgcctcctcagctct

SEQ ID NO: 6329 - DNA, 21 bp, Artificial Sequence
  Synthetic
gggcctcggagagctgaggag

SEQ ID NO: 6330 - DNA, 21 bp, Artificial Sequence
  Synthetic
ggattgggcctcggagagctg

SEQ ID NO: 6331 - DNA, 21 bp, Artificial Sequence
  Synthetic
gggattgggcctcggagagct

SEQ ID NO: 6332 - DNA, 21 bp, Artificial Sequence
  Synthetic
gtgggattgggcctcggagag

SEQ ID NO: 6333 - DNA, 21 bp, Artificial Sequence
  Synthetic
atgaggtgggattgggcctcg

SEQ ID NO: 6334 - DNA, 21 bp, Artificial Sequence
  Synthetic
ggatgaggtgggattgggcct

SEQ ID NO: 6335 - DNA, 21 bp, Artificial Sequence
  Synthetic
gggatgaggtgggattgggcc

SEQ ID NO: 6336 - DNA, 21 bp, Artificial Sequence
  Synthetic
agcagtggggatgaggtggga

SEQ ID NO: 6337 - DNA, 21 bp, Artificial Sequence
  Synthetic
aggccagcagtggggatgagg

SEQ ID NO: 6338 - DNA, 21 bp, Artificial Sequence
  Synthetic
caggccagcagtggggatgag

SEQ ID NO: 6339 - DNA, 21 bp, Artificial Sequence
  Synthetic
cccaccaggccagcagtgggg

SEQ ID NO: 6340 - DNA, 21 bp, Artificial Sequence
  Synthetic
ctcatccccactgctggcctg

SEQ ID NO: 6341 - DNA, 21 bp, Artificial Sequence
  Synthetic
tcatccccactgctggcctgg

SEQ ID NO: 6342 - DNA, 21 bp, Artificial Sequence
  Synthetic
catccccactgctggcctggt

SEQ ID NO: 6343 - DNA, 21 bp, Artificial Sequence
  Synthetic
cattcccaccaggccagcagt

SEQ ID NO: 6344 - DNA, 21 bp, Artificial Sequence
  Synthetic
ccattcccaccaggccagcag

SEQ ID NO: 6345 - DNA, 21 bp, Artificial Sequence
  Synthetic
cccattcccaccaggccagca

SEQ ID NO: 6346 - DNA, 21 bp, Artificial Sequence
  Synthetic
cccactgctggcctggtggga

SEQ ID NO: 6347 - DNA, 21 bp, Artificial Sequence
  Synthetic
ccactgctggcctggtgggaa

SEQ ID NO: 6348 - DNA, 21 bp, Artificial Sequence
  Synthetic
gagcgcatacacagtggacac

SEQ ID NO: 6349 - DNA, 21 bp, Artificial Sequence
  Synthetic
tgagcgcatacacagtggaca

SEQ ID NO: 6350 - DNA, 21 bp, Artificial Sequence
  Synthetic
ggcgccttgagcgcatacaca

SEQ ID NO: 6351 - DNA, 21 bp, Artificial Sequence
  Synthetic
atgaaggtgccctggctctac

SEQ ID NO: 6352 - DNA, 21 bp, Artificial Sequence
  Synthetic
aagaccatgcccacgtagagc

SEQ ID NO: 6353 - DNA, 21 bp, Artificial Sequence
  Synthetic
gctgagaagaccatgcccacg

SEQ ID NO: 6354 - DNA, 21 bp, Artificial Sequence
  Synthetic
tcaatatgccagcaaaaggct

SEQ ID NO: 6355 - DNA, 21 bp, Artificial Sequence
  Synthetic
cctcaatatgccagcaaaagg

SEQ ID NO: 6356 - DNA, 21 bp, Artificial Sequence
  Synthetic
ttgctggcatattgaggatca

SEQ ID NO: 6357 - DNA, 21 bp, Artificial Sequence
  Synthetic
tgctggcatattgaggatcac

SEQ ID NO: 6358 - DNA, 21 bp, Artificial Sequence
  Synthetic
ctcaccagtggaggtagttaa

SEQ ID NO: 6359 - DNA, 21 bp, Artificial Sequence
  Synthetic
ctccattaactacctccactg

SEQ ID NO: 6360 - DNA, 21 bp, Artificial Sequence
  Synthetic
actcaccagtggaggtagtta

SEQ ID NO: 6361 - DNA, 21 bp, Artificial Sequence
  Synthetic
ccccagggtcccactcaccag

SEQ ID NO: 6362 - DNA, 21 bp, Artificial Sequence
  Synthetic
ttccacttgtgcaggggtgag

SEQ ID NO: 6363 - DNA, 21 bp, Artificial Sequence
  Synthetic
ggggtgagccgaagacctggt

SEQ ID NO: 6364 - DNA, 21 bp, Artificial Sequence
  Synthetic
gggtgagccgaagacctggta

SEQ ID NO: 6365 - DNA, 21 bp, Artificial Sequence
  Synthetic
atggggtgccctcacttgcag

SEQ ID NO: 6366 - DNA, 21 bp, Artificial Sequence
  Synthetic
tccaaatgttctgctgcaagt

SEQ ID NO: 6367 - DNA, 21 bp, Artificial Sequence
  Synthetic
ccctcacttgcagcagaacat

SEQ ID NO: 6368 - DNA, 21 bp, Artificial Sequence
  Synthetic
cctcacttgcagcagaacatt

SEQ ID NO: 6369 - DNA, 21 bp, Artificial Sequence
  Synthetic
cttccaaatgttctgctgcaa

SEQ ID NO: 6370 - DNA, 21 bp, Artificial Sequence
  Synthetic
cacttgcagcagaacatttgg

SEQ ID NO: 6371 - DNA, 21 bp, Artificial Sequence
  Synthetic
gcagaacatttggaagaagtg

SEQ ID NO: 6372 - DNA, 21 bp, Artificial Sequence
  Synthetic
gaacatttggaagaagtgatg

SEQ ID NO: 6373 - DNA, 21 bp, Artificial Sequence
  Synthetic
aagtgatgaagaagctgacac

SEQ ID NO: 6374 - DNA, 21 bp, Artificial Sequence
  Synthetic
atgagggtgacaagttggtgc

SEQ ID NO: 6375 - DNA, 21 bp, Artificial Sequence
  Synthetic
catgagggtgacaagttggtg

SEQ ID NO: 6376 - DNA, 21 bp, Artificial Sequence
  Synthetic
ctgcaccaacttgtcaccctc

SEQ ID NO: 6377 - DNA, 21 bp, Artificial Sequence
  Synthetic
catgagggtgttgggattcat

SEQ ID NO: 6378 - DNA, 21 bp, Artificial Sequence
  Synthetic
gacatgagggtgttgggattc

SEQ ID NO: 6379 - DNA, 21 bp, Artificial Sequence
  Synthetic
caccatgggacatgagggtgt

SEQ ID NO: 6380 - DNA, 21 bp, Artificial Sequence
  Synthetic
acaccatgggacatgagggtg

SEQ ID NO: 6381 - DNA, 21 bp, Artificial Sequence
  Synthetic
cactggcacaccatgggacat

SEQ ID NO: 6382 - DNA, 21 bp, Artificial Sequence
  Synthetic
ctcactggcacaccatgggac

SEQ ID NO: 6383 - DNA, 21 bp, Artificial Sequence
  Synthetic
ctcatgtcccatggtgtgcca

SEQ ID NO: 6384 - DNA, 21 bp, Artificial Sequence
  Synthetic
tgggtactcactggcacacca

SEQ ID NO: 6385 - DNA, 21 bp, Artificial Sequence
  Synthetic
ctgggtactcactggcacacc

SEQ ID NO: 6386 - DNA, 21 bp, Artificial Sequence
  Synthetic
acactggtttgtgcggacaac

SEQ ID NO: 6387 - DNA, 21 bp, Artificial Sequence
  Synthetic
ttgtccgcacaaaccagtgtg

SEQ ID NO: 6388 - DNA, 21 bp, Artificial Sequence
  Synthetic
tgtccgcacaaaccagtgtgc

SEQ ID NO: 6389 - DNA, 21 bp, Artificial Sequence
  Synthetic
ctctcctgcacactggtttgt

SEQ ID NO: 6390 - DNA, 21 bp, Artificial Sequence
  Synthetic
tccgcacaaaccagtgtgcag

SEQ ID NO: 6391 - DNA, 21 bp, Artificial Sequence
  Synthetic
aagccgctgtggtaagcacgg

SEQ ID NO: 6392 - DNA, 21 bp, Artificial Sequence
  Synthetic
gaagccgctgtggtaagcacg

SEQ ID NO: 6393 - DNA, 21 bp, Artificial Sequence
  Synthetic
tgaagccgctgtggtaagcac

SEQ ID NO: 6394 - DNA, 21 bp, Artificial Sequence
  Synthetic
ttgaagccgctgtggtaagca

SEQ ID NO: 6395 - DNA, 21 bp, Artificial Sequence
  Synthetic
gttgaagccgctgtggtaagc

SEQ ID NO: 6396 - DNA, 21 bp, Artificial Sequence
  Synthetic
tcggcaaagttgtagccttgg

SEQ ID NO: 6397 - DNA, 21 bp, Artificial Sequence
  Synthetic
tcaaccaaggctacaactttg

SEQ ID NO: 6398 - DNA, 21 bp, Artificial Sequence
  Synthetic
ccatttcttcttcaggcccag

SEQ ID NO: 6399 - DNA, 21 bp, Artificial Sequence
  Synthetic
atttcttcttcaggcccagac

SEQ ID NO: 6400 - DNA, 21 bp, Artificial Sequence
  Synthetic
cttcttcaggcccagacgaga

SEQ ID NO: 6401 - DNA, 21 bp, Artificial Sequence
  Synthetic
cagtttcactctcgtctgggc

SEQ ID NO: 6402 - DNA, 21 bp, Artificial Sequence
  Synthetic
caggcccagacgagagtgaaa

SEQ ID NO: 6403 - DNA, 21 bp, Artificial Sequence
  Synthetic
gtagttcagtttcactctcgt

SEQ ID NO: 6404 - DNA, 21 bp, Artificial Sequence
  Synthetic
acgagagtgaaactgaactac

SEQ ID NO: 6405 - DNA, 21 bp, Artificial Sequence
  Synthetic
cttggaccagattgccaaatt

SEQ ID NO: 6406 - DNA, 21 bp, Artificial Sequence
  Synthetic
ttggaccagattgccaaattc

SEQ ID NO: 6407 - DNA, 21 bp, Artificial Sequence
  Synthetic
tggaccagattgccaaattct

SEQ ID NO: 6408 - DNA, 21 bp, Artificial Sequence
  Synthetic
attgccaaattctgggaaatc

SEQ ID NO: 6409 - DNA, 21 bp, Artificial Sequence
  Synthetic
aaggaggagccctggatttcc

SEQ ID NO: 6410 - DNA, 21 bp, Artificial Sequence
  Synthetic
gggaatctttaaggaggagcc

SEQ ID NO: 6411 - DNA, 21 bp, Artificial Sequence
  Synthetic
ctacattgggaatctttaagg

SEQ ID NO: 6412 - DNA, 21 bp, Artificial Sequence
  Synthetic
tctacattgggaatctttaag

SEQ ID NO: 6413 - DNA, 21 bp, Artificial Sequence
  Synthetic
cctccttaaagattcccaatg

SEQ ID NO: 6414 - DNA, 21 bp, Artificial Sequence
  Synthetic
gttctacattgggaatcttta

SEQ ID NO: 6415 - DNA, 21 bp, Artificial Sequence
  Synthetic
cgttctacattgggaatcttt

SEQ ID NO: 6416 - DNA, 21 bp, Artificial Sequence
  Synthetic
aaagattcccaatgtagaacg

SEQ ID NO: 6417 - DNA, 21 bp, Artificial Sequence
  Synthetic
caagatccgccgttctacatt

SEQ ID NO: 6418 - DNA, 21 bp, Artificial Sequence
  Synthetic
ccaagatccgccgttctacat

SEQ ID NO: 6419 - DNA, 21 bp, Artificial Sequence
  Synthetic
tccaagatccgccgttctaca

SEQ ID NO: 6420 - DNA, 21 bp, Artificial Sequence
  Synthetic
cccaatgtagaacggcggatc

SEQ ID NO: 6421 - DNA, 21 bp, Artificial Sequence
  Synthetic
cctctacagtctcagcaaagt

SEQ ID NO: 6422 - DNA, 21 bp, Artificial Sequence
  Synthetic
gttcttactttgctgagactg

SEQ ID NO: 6423 - DNA, 21 bp, Artificial Sequence
  Synthetic
caaaaacctgttcttactttg

SEQ ID NO: 6424 - DNA, 21 bp, Artificial Sequence
  Synthetic
accaccttcctccaccacaat

SEQ ID NO: 6425 - DNA, 21 bp, Artificial Sequence
  Synthetic
ttgtggtggaggaaggtggtt

SEQ ID NO: 6426 - DNA, 21 bp, Artificial Sequence
  Synthetic
ggtggttatgaagctatctgc

SEQ ID NO: 6427 - DNA, 21 bp, Artificial Sequence
  Synthetic
agctatctgcaaggaccgtcg

SEQ ID NO: 6428 - DNA, 21 bp, Artificial Sequence
  Synthetic
ctgcaaggaccgtcggtgggc

SEQ ID NO: 6429 - DNA, 21 bp, Artificial Sequence
  Synthetic
atagttgaggcgctgggctac

SEQ ID NO: 6430 - DNA, 21 bp, Artificial Sequence
  Synthetic
gcctggtggatagttgaggcg

SEQ ID NO: 6431 - DNA, 21 bp, Artificial Sequence
  Synthetic
gctccttgctacgctcccact

SEQ ID NO: 6432 - DNA, 21 bp, Artificial Sequence
  Synthetic
gttcgtagtgggagcgtagca

SEQ ID NO: 6433 - DNA, 21 bp, Artificial Sequence
  Synthetic
cgttcgtagtgggagcgtagc

SEQ ID NO: 6434 - DNA, 21 bp, Artificial Sequence
  Synthetic
gataaacaatgcgttcgtagt

SEQ ID NO: 6435 - DNA, 21 bp, Artificial Sequence
  Synthetic
ggataaacaatgcgttcgtag

SEQ ID NO: 6436 - DNA, 21 bp, Artificial Sequence
  Synthetic
gggataaacaatgcgttcgta

SEQ ID NO: 6437 - DNA, 21 bp, Artificial Sequence
  Synthetic
acgaacgcattgtttatccct

SEQ ID NO: 6438 - DNA, 21 bp, Artificial Sequence
  Synthetic
ctccagactggtacatttcat

SEQ ID NO: 6439 - DNA, 21 bp, Artificial Sequence
  Synthetic
gctccagactggtacatttca

SEQ ID NO: 6440 - DNA, 21 bp, Artificial Sequence
  Synthetic
cgccaccggagtgcccggtgt

SEQ ID NO: 6441 - DNA, 21 bp, Artificial Sequence
  Synthetic
gtgcccggtgttcgagcctag

SEQ ID NO: 6442 - DNA, 21 bp, Artificial Sequence
  Synthetic
cggcccagctaggctcgaaca

SEQ ID NO: 6443 - DNA, 21 bp, Artificial Sequence
  Synthetic
cggtgttcgagcctagctggg

SEQ ID NO: 6444 - DNA, 21 bp, Artificial Sequence
  Synthetic
cggaactcggcccagctaggc

SEQ ID NO: 6445 - DNA, 21 bp, Artificial Sequence
  Synthetic
cgagcctagctgggccgagtt

SEQ ID NO: 6446 - DNA, 21 bp, Artificial Sequence
  Synthetic
gcgatgtagccaagagggtct

SEQ ID NO: 6447 - DNA, 21 bp, Artificial Sequence
  Synthetic
cgcgatgtagccaagagggtc

SEQ ID NO: 6448 - DNA, 21 bp, Artificial Sequence
  Synthetic
cgagaccctcttggctacatc

SEQ ID NO: 6449 - DNA, 21 bp, Artificial Sequence
  Synthetic
tcgcgaaaatcaggcccatcg

SEQ ID NO: 6450 - DNA, 21 bp, Artificial Sequence
  Synthetic
gcgaaaatcaggcccatcgca

SEQ ID NO: 6451 - DNA, 21 bp, Artificial Sequence
  Synthetic
atcaggcccatcgcagagaaa

SEQ ID NO: 6452 - DNA, 21 bp, Artificial Sequence
  Synthetic
caaatgcccgatttctctgcg

SEQ ID NO: 6453 - DNA, 21 bp, Artificial Sequence
  Synthetic
cccggggcttaccgcgggtgg

SEQ ID NO: 6454 - DNA, 21 bp, Artificial Sequence
  Synthetic
ggggctgggcctgtatgctgc

SEQ ID NO: 6455 - DNA, 21 bp, Artificial Sequence
  Synthetic
gcctgtatgctgctcgagaca

SEQ ID NO: 6456 - DNA, 21 bp, Artificial Sequence
  Synthetic
ctgtatgctgctcgagacatt

SEQ ID NO: 6457 - DNA, 21 bp, Artificial Sequence
  Synthetic
catggtgtgtttctcaatgtc

SEQ ID NO: 6458 - DNA, 21 bp, Artificial Sequence
  Synthetic
ttgagaaacacaccatggtca

SEQ ID NO: 6459 - DNA, 21 bp, Artificial Sequence
  Synthetic
acaccatggtcattgagtaca

SEQ ID NO: 6460 - DNA, 21 bp, Artificial Sequence
  Synthetic
caccatggtcattgagtacat

SEQ ID NO: 6461 - DNA, 21 bp, Artificial Sequence
  Synthetic
tgagtacatcgggactatcat

SEQ ID NO: 6462 - DNA, 21 bp, Artificial Sequence
  Synthetic
acatcgggactatcattcgaa

SEQ ID NO: 6463 - DNA, 21 bp, Artificial Sequence
  Synthetic
cattcgaaacgaagtagccaa

SEQ ID NO: 6464 - DNA, 21 bp, Artificial Sequence
  Synthetic
attcgaaacgaagtagccaac

SEQ ID NO: 6465 - DNA, 21 bp, Artificial Sequence
  Synthetic
tttcctgttggctacttcgtt

SEQ ID NO: 6466 - DNA, 21 bp, Artificial Sequence
  Synthetic
gaaacgaagtagccaacagga

SEQ ID NO: 6467 - DNA, 21 bp, Artificial Sequence
  Synthetic
aacgaagtagccaacaggaaa

SEQ ID NO: 6468 - DNA, 21 bp, Artificial Sequence
  Synthetic
ccaacaggaaagagaagcttt

SEQ ID NO: 6469 - DNA, 21 bp, Artificial Sequence
  Synthetic
acatgtacacaccacggttct

SEQ ID NO: 6470 - DNA, 21 bp, Artificial Sequence
  Synthetic
gaacatgtacacaccacggtt

SEQ ID NO: 6471 - DNA, 21 bp, Artificial Sequence
  Synthetic
cgtggtgtgtacatgttccgc

SEQ ID NO: 6472 - DNA, 21 bp, Artificial Sequence
  Synthetic
atcacatggtcgttatccatg

SEQ ID NO: 6473 - DNA, 21 bp, Artificial Sequence
  Synthetic
aatcacatggtcgttatccat

SEQ ID NO: 6474 - DNA, 21 bp, Artificial Sequence
  Synthetic
atgtgattgacgcgacgctca

SEQ ID NO: 6475 - DNA, 21 bp, Artificial Sequence
  Synthetic
tgtgattgacgcgacgctcac

SEQ ID NO: 6476 - DNA, 21 bp, Artificial Sequence
  Synthetic
tgattgacgcgacgctcacag

SEQ ID NO: 6477 - DNA, 21 bp, Artificial Sequence
  Synthetic
gctcacaggagggcccgcaag

SEQ ID NO: 6478 - DNA, 21 bp, Artificial Sequence
  Synthetic
tctcaccttgcgggccctcct

SEQ ID NO: 6479 - DNA, 21 bp, Artificial Sequence
  Synthetic
ggttcctcgctgtctcacctt

SEQ ID NO: 6480 - DNA, 21 bp, Artificial Sequence
  Synthetic
cagccacacaattaggtgcac

SEQ ID NO: 6481 - DNA, 21 bp, Artificial Sequence
  Synthetic
cgtgtgcacctaattgtgtgg

SEQ ID NO: 6482 - DNA, 21 bp, Artificial Sequence
  Synthetic
gtgtggctgaagtggtgactt

SEQ ID NO: 6483 - DNA, 21 bp, Artificial Sequence
  Synthetic
caaaattatcatcagctccag

SEQ ID NO: 6484 - DNA, 21 bp, Artificial Sequence
  Synthetic
aaaattatcatcagctccagt

SEQ ID NO: 6485 - DNA, 21 bp, Artificial Sequence
  Synthetic
aattatcatcagctccagtcg

SEQ ID NO: 6486 - DNA, 21 bp, Artificial Sequence
  Synthetic
atcagctccagtcggagaatc

SEQ ID NO: 6487 - DNA, 21 bp, Artificial Sequence
  Synthetic
gctccagtcggagaatccaga

SEQ ID NO: 6488 - DNA, 21 bp, Artificial Sequence
  Synthetic
ctcctttctggattctccgac

SEQ ID NO: 6489 - DNA, 21 bp, Artificial Sequence
  Synthetic
ctccagtcggagaatccagaa

SEQ ID NO: 6490 - DNA, 21 bp, Artificial Sequence
  Synthetic
tctcctttctggattctccga

SEQ ID NO: 6491 - DNA, 21 bp, Artificial Sequence
  Synthetic
ccagtcggagaatccagaaag

SEQ ID NO: 6492 - DNA, 21 bp, Artificial Sequence
  Synthetic
gtcggagaatccagaaaggag

SEQ ID NO: 6493 - DNA, 21 bp, Artificial Sequence
  Synthetic
aatccagaaaggagaagaggt

SEQ ID NO: 6494 - DNA, 21 bp, Artificial Sequence
  Synthetic
cactcttacctcttctccttt

SEQ ID NO: 6495 - DNA, 21 bp, Artificial Sequence
  Synthetic
aagtcaaacttatagtcatag

SEQ ID NO: 6496 - DNA, 21 bp, Artificial Sequence
  Synthetic
tgtcctgagtgcaaagtgtgc

SEQ ID NO: 6497 - DNA, 21 bp, Artificial Sequence
  Synthetic
tagtgtgtgatacgtgtgaca

SEQ ID NO: 6498 - DNA, 21 bp, Artificial Sequence
  Synthetic
tggtactgatttcataactgg

SEQ ID NO: 6499 - DNA, 21 bp, Artificial Sequence
  Synthetic
gaaatcagtaccaaccaatgg

SEQ ID NO: 6500 - DNA, 21 bp, Artificial Sequence
  Synthetic
aaatcagtaccaaccaatggc

SEQ ID NO: 6501 - DNA, 21 bp, Artificial Sequence
  Synthetic
ggtgtcttgagtgcactgtgt

SEQ ID NO: 6502 - DNA, 21 bp, Artificial Sequence
  Synthetic
agtgcactgtgtgtgaggcct

SEQ ID NO: 6503 - DNA, 21 bp, Artificial Sequence
  Synthetic
gtgcactgtgtgtgaggcctg

SEQ ID NO: 6504 - DNA, 21 bp, Artificial Sequence
  Synthetic
tgcactgtgtgtgaggcctgt

SEQ ID NO: 6505 - DNA, 21 bp, Artificial Sequence
  Synthetic
cctgtgggaaggcaactgacc

SEQ ID NO: 6506 - DNA, 21 bp, Artificial Sequence
  Synthetic
ctgtgggaaggcaactgaccc

SEQ ID NO: 6507 - DNA, 21 bp, Artificial Sequence
  Synthetic
catcacacagcaggagtcttc

SEQ ID NO: 6508 - DNA, 21 bp, Artificial Sequence
  Synthetic
atgtcacagtcatcacacagc

SEQ ID NO: 6509 - DNA, 21 bp, Artificial Sequence
  Synthetic
tatgtcacagtcatcacacag

SEQ ID NO: 6510 - DNA, 21 bp, Artificial Sequence
  Synthetic
ctttgggaactgtctgcaatg

SEQ ID NO: 6511 - DNA, 21 bp, Artificial Sequence
  Synthetic
tcctttgggaactgtctgcaa

SEQ ID NO: 6512 - DNA, 21 bp, Artificial Sequence
  Synthetic
ctccattgcagacagttccca

SEQ ID NO: 6513 - DNA, 21 bp, Artificial Sequence
  Synthetic
ctcctttgggaactgtctgca

SEQ ID NO: 6514 - DNA, 21 bp, Artificial Sequence
  Synthetic
tccattgcagacagttcccaa

SEQ ID NO: 6515 - DNA, 21 bp, Artificial Sequence
  Synthetic
gcagacagttcccaaaggagg

SEQ ID NO: 6516 - DNA, 21 bp, Artificial Sequence
  Synthetic
cagacagttcccaaaggaggc

SEQ ID NO: 6517 - DNA, 21 bp, Artificial Sequence
  Synthetic
tttgcacttccagcctccttt

SEQ ID NO: 6518 - DNA, 21 bp, Artificial Sequence
  Synthetic
atttgcacttccagcctcctt

SEQ ID NO: 6519 - DNA, 21 bp, Artificial Sequence
  Synthetic
catttgcacttccagcctcct

SEQ ID NO: 6520 - DNA, 21 bp, Artificial Sequence
  Synthetic
cagtgtctgcaccaaacacac

SEQ ID NO: 6521 - DNA, 21 bp, Artificial Sequence
  Synthetic
tgccggctgactttgagacag

SEQ ID NO: 6522 - DNA, 21 bp, Artificial Sequence
  Synthetic
gagacagatgaaagtgtccta

SEQ ID NO: 6523 - DNA, 21 bp, Artificial Sequence
  Synthetic
gacagatgaaagtgtcctaat

SEQ ID NO: 6524 - DNA, 21 bp, Artificial Sequence
  Synthetic
acagatgaaagtgtcctaatg

SEQ ID NO: 6525 - DNA, 21 bp, Artificial Sequence
  Synthetic
gaaagtgtcctaatgaggaga

SEQ ID NO: 6526 - DNA, 21 bp, Artificial Sequence
  Synthetic
gatctgcttctgtctcctcat

SEQ ID NO: 6527 - DNA, 21 bp, Artificial Sequence
  Synthetic
ggagacagaagcagatcaact

SEQ ID NO: 6528 - DNA, 21 bp, Artificial Sequence
  Synthetic
gagacagaagcagatcaacta

SEQ ID NO: 6529 - DNA, 21 bp, Artificial Sequence
  Synthetic
agacagaagcagatcaactat

SEQ ID NO: 6530 - DNA, 21 bp, Artificial Sequence
  Synthetic
cagaagcagatcaactatggg

SEQ ID NO: 6531 - DNA, 21 bp, Artificial Sequence
  Synthetic
ttgcctacgatcgttatatta

SEQ ID NO: 6532 - DNA, 21 bp, Artificial Sequence
  Synthetic
cttgggatgaatgccaggttg

SEQ ID NO: 6533 - DNA, 21 bp, Artificial Sequence
  Synthetic
aaatttattaggggtcttggg

SEQ ID NO: 6534 - DNA, 21 bp, Artificial Sequence
  Synthetic
tcttaaatttattaggggtct

SEQ ID NO: 6535 - DNA, 21 bp, Artificial Sequence
  Synthetic
ttcttaaatttattaggggtc

SEQ ID NO: 6536 - DNA, 21 bp, Artificial Sequence
  Synthetic
cccaagacccctaataaattt

SEQ ID NO: 6537 - DNA, 21 bp, Artificial Sequence
  Synthetic
actatacttcttaaatttatt

SEQ ID NO: 6538 - DNA, 21 bp, Artificial Sequence
  Synthetic
gactatacttcttaaatttat

SEQ ID NO: 6539 - DNA, 21 bp, Artificial Sequence
  Synthetic
taagaagtatagtcgacgttc

SEQ ID NO: 6540 - DNA, 21 bp, Artificial Sequence
  Synthetic
aagaagtatagtcgacgttca

SEQ ID NO: 6541 - DNA, 21 bp, Artificial Sequence
  Synthetic
agagtttgatttgctggtccc

SEQ ID NO: 6542 - DNA, 21 bp, Artificial Sequence
  Synthetic
atgggaccagcaaatcaaact

SEQ ID NO: 6543 - DNA, 21 bp, Artificial Sequence
  Synthetic
tgggaccagcaaatcaaactc

SEQ ID NO: 6544 - DNA, 21 bp, Artificial Sequence
  Synthetic
caaaaatgcagagccaccttc

SEQ ID NO: 6545 - DNA, 21 bp, Artificial Sequence
  Synthetic
ctggaaggtggctctgcattt

SEQ ID NO: 6546 - DNA, 21 bp, Artificial Sequence
  Synthetic
cgctggaggatcccaaaaatg

SEQ ID NO: 6547 - DNA, 21 bp, Artificial Sequence
  Synthetic
atgaaatttaaattccactca

SEQ ID NO: 6548 - DNA, 21 bp, Artificial Sequence
  Synthetic
tgaaatttaaattccactcag

SEQ ID NO: 6549 - DNA, 21 bp, Artificial Sequence
  Synthetic
aaatttaaattccactcaggg

SEQ ID NO: 6550 - DNA, 21 bp, Artificial Sequence
  Synthetic
cacagcactttctcccctgag

SEQ ID NO: 6551 - DNA, 21 bp, Artificial Sequence
  Synthetic
gcacagcactttctcccctga

SEQ ID NO: 6552 - DNA, 21 bp, Artificial Sequence
  Synthetic
cgaagcacagcactttctccc

SEQ ID NO: 6553 - DNA, 21 bp, Artificial Sequence
  Synthetic
caggggagaaagtgctgtgct

SEQ ID NO: 6554 - DNA, 21 bp, Artificial Sequence
  Synthetic
cgcgccttggtggggtcaggc

SEQ ID NO: 6555 - DNA, 21 bp, Artificial Sequence
  Synthetic
cgagcctgaccccaccaaggc

SEQ ID NO: 6556 - DNA, 21 bp, Artificial Sequence
  Synthetic
cgtacagcactcgcgccttgg

SEQ ID NO: 6557 - DNA, 21 bp, Artificial Sequence
  Synthetic
tcgtacagcactcgcgccttg

SEQ ID NO: 6558 - DNA, 21 bp, Artificial Sequence
  Synthetic
cccaacaataacatcaacaat

SEQ ID NO: 6559 - DNA, 21 bp, Artificial Sequence
  Synthetic
ttcagattgttgatgttattg

SEQ ID NO: 6560 - DNA, 21 bp, Artificial Sequence
  Synthetic
tcagattgttgatgttattgt

SEQ ID NO: 6561 - DNA, 21 bp, Artificial Sequence
  Synthetic
cagattgttgatgttattgtt

SEQ ID NO: 6562 - DNA, 21 bp, Artificial Sequence
  Synthetic
ttgatgttattgttgggaaag

SEQ ID NO: 6563 - DNA, 21 bp, Artificial Sequence
  Synthetic
tgttgggaaagacgaaaaagg

SEQ ID NO: 6564 - DNA, 21 bp, Artificial Sequence
  Synthetic
acgaaaaaggcagaaagatcc

SEQ ID NO: 6565 - DNA, 21 bp, Artificial Sequence
  Synthetic
attaaaatggatcagatattc

SEQ ID NO: 6566 - DNA, 21 bp, Artificial Sequence
  Synthetic
cattaaaatggatcagatatt

SEQ ID NO: 6567 - DNA, 21 bp, Artificial Sequence
  Synthetic
ccttctgttccaaccattaaa

SEQ ID NO: 6568 - DNA, 21 bp, Artificial Sequence
  Synthetic
ttgttcaattagctgggatag

SEQ ID NO: 6569 - DNA, 21 bp, Artificial Sequence
  Synthetic
ttagctgggatagatgggcag

SEQ ID NO: 6570 - DNA, 21 bp, Artificial Sequence
  Synthetic
cagcactgtgtggcacgtgtt

SEQ ID NO: 6571 - DNA, 21 bp, Artificial Sequence
  Synthetic
gtgtggcacgtgttccgggca

SEQ ID NO: 6572 - DNA, 21 bp, Artificial Sequence
  Synthetic
atgcgctgggcgtcctgtgcc

SEQ ID NO: 6573 - DNA, 21 bp, Artificial Sequence
  Synthetic
gatgcgctgggcgtcctgtgc

SEQ ID NO: 6574 - DNA, 21 bp, Artificial Sequence
  Synthetic
ctggagaaagcggcggatgcg

SEQ ID NO: 6575 - DNA, 21 bp, Artificial Sequence
  Synthetic
atccgccgctttctccagatg

SEQ ID NO: 6576 - DNA, 21 bp, Artificial Sequence
  Synthetic
cctcaccatctggagaaagcg

SEQ ID NO: 6577 - DNA, 21 bp, Artificial Sequence
  Synthetic
ccgccgctttctccagatggt

SEQ ID NO: 6578 - DNA, 21 bp, Artificial Sequence
  Synthetic
cggctgcctcctcaccatctg

SEQ ID NO: 6579 - DNA, 21 bp, Artificial Sequence
  Synthetic
cccggctgcctcctcaccatc

SEQ ID NO: 6580 - DNA, 21 bp, Artificial Sequence
  Synthetic
tcccggctgcctcctcaccat

SEQ ID NO: 6581 - DNA, 21 bp, Artificial Sequence
  Synthetic
tcttctttgaggtgtgcccgg

SEQ ID NO: 6582 - DNA, 21 bp, Artificial Sequence
  Synthetic
cttctttgaggtgtgcccggc

SEQ ID NO: 6583 - DNA, 21 bp, Artificial Sequence
  Synthetic
tgcccggccggggcaggcgcc

SEQ ID NO: 6584 - DNA, 21 bp, Artificial Sequence
  Synthetic
gcccggccggggcaggcgccc

SEQ ID NO: 6585 - DNA, 21 bp, Artificial Sequence
  Synthetic
gctccagggcgcctgccccgg

SEQ ID NO: 6586 - DNA, 21 bp, Artificial Sequence
  Synthetic
gctgcctggggcgccaggctc

SEQ ID NO: 6587 - DNA, 21 bp, Artificial Sequence
  Synthetic
ggcgccccaggcagctgctac

SEQ ID NO: 6588 - DNA, 21 bp, Artificial Sequence
  Synthetic
tgcatccaggtagcagctgcc

SEQ ID NO: 6589 - DNA, 21 bp, Artificial Sequence
  Synthetic
ctgcatccaggtagcagctgc

SEQ ID NO: 6590 - DNA, 21 bp, Artificial Sequence
  Synthetic
caggcagctgctacctggatg

SEQ ID NO: 6591 - DNA, 21 bp, Artificial Sequence
  Synthetic
tgcagggctgcggcggcgcct

SEQ ID NO: 6592 - DNA, 21 bp, Artificial Sequence
  Synthetic
gcagggctgcggcggcgcctg

SEQ ID NO: 6593 - DNA, 21 bp, Artificial Sequence
  Synthetic
cagggctgcggcggcgcctgc

SEQ ID NO: 6594 - DNA, 21 bp, Artificial Sequence
  Synthetic
gggctgcggcggcgcctgcgg

SEQ ID NO: 6595 - DNA, 21 bp, Artificial Sequence
  Synthetic
ggctgcggcggcgcctgcggg

SEQ ID NO: 6596 - DNA, 21 bp, Artificial Sequence
  Synthetic
gcggcggcgcctgcgggagga

SEQ ID NO: 6597 - DNA, 21 bp, Artificial Sequence
  Synthetic
cggcggcgcctgcgggaggag

SEQ ID NO: 6598 - DNA, 21 bp, Artificial Sequence
  Synthetic
cgcctgcgggaggagtggggc

SEQ ID NO: 6599 - DNA, 21 bp, Artificial Sequence
  Synthetic
ggaggagtggggcgtgagctg

SEQ ID NO: 6600 - DNA, 21 bp, Artificial Sequence
  Synthetic
gctggaccctgctccaggccc

SEQ ID NO: 6601 - DNA, 21 bp, Artificial Sequence
  Synthetic
ctggaccctgctccaggcccc

SEQ ID NO: 6602 - DNA, 21 bp, Artificial Sequence
  Synthetic
ggaccctgctccaggcccccg

SEQ ID NO: 6603 - DNA, 21 bp, Artificial Sequence
  Synthetic
ggcctctccgggggcctggag

SEQ ID NO: 6604 - DNA, 21 bp, Artificial Sequence
  Synthetic
agcacggcctctccgggggcc

SEQ ID NO: 6605 - DNA, 21 bp, Artificial Sequence
  Synthetic
cagcacggcctctccgggggc

SEQ ID NO: 6606 - DNA, 21 bp, Artificial Sequence
  Synthetic
aggcaccagcacggcctctcc

SEQ ID NO: 6607 - DNA, 21 bp, Artificial Sequence
  Synthetic
caggcaccagcacggcctctc

SEQ ID NO: 6608 - DNA, 21 bp, Artificial Sequence
  Synthetic
gcaggcaccagcacggcctct

SEQ ID NO: 6609 - DNA, 21 bp, Artificial Sequence
  Synthetic
gagaggccgtgctggtgcctg

SEQ ID NO: 6610 - DNA, 21 bp, Artificial Sequence
  Synthetic
agaggccgtgctggtgcctgc

SEQ ID NO: 6611 - DNA, 21 bp, Artificial Sequence
  Synthetic
cccgctgggaagcacctggtg

SEQ ID NO: 6612 - DNA, 21 bp, Artificial Sequence
  Synthetic
gcccgctgggaagcacctggt

SEQ ID NO: 6613 - DNA, 21 bp, Artificial Sequence
  Synthetic
tgcccgctgggaagcacctgg

SEQ ID NO: 6614 - DNA, 21 bp, Artificial Sequence
  Synthetic
ctgcccgctgggaagcacctg

SEQ ID NO: 6615 - DNA, 21 bp, Artificial Sequence
  Synthetic
ccgacacaggtgcagggcctg

SEQ ID NO: 6616 - DNA, 21 bp, Artificial Sequence
  Synthetic
ggtctcaggggagaggaagtg

SEQ ID NO: 6617 - DNA, 21 bp, Artificial Sequence
  Synthetic
ggccggctacggcatggtggc

SEQ ID NO: 6618 - DNA, 21 bp, Artificial Sequence
  Synthetic
gccggctacggcatggtggcc

SEQ ID NO: 6619 - DNA, 21 bp, Artificial Sequence
  Synthetic
ccggctacggcatggtggccc

SEQ ID NO: 6620 - DNA, 21 bp, Artificial Sequence
  Synthetic
ggctacggcatggtggcccgg

SEQ ID NO: 6621 - DNA, 21 bp, Artificial Sequence
  Synthetic
tggcccgggagagcgtgcagg

SEQ ID NO: 6622 - DNA, 21 bp, Artificial Sequence
  Synthetic
ggcccgggagagcgtgcaggc

SEQ ID NO: 6623 - DNA, 21 bp, Artificial Sequence
  Synthetic
ctctccggcctgcacgctctc

SEQ ID NO: 6624 - DNA, 21 bp, Artificial Sequence
  Synthetic
cccgggagagcgtgcaggccg

SEQ ID NO: 6625 - DNA, 21 bp, Artificial Sequence
  Synthetic
agagctgttgttcgtggtgcc

SEQ ID NO: 6626 - DNA, 21 bp, Artificial Sequence
  Synthetic
aggagcgcggcccgcggcacc

SEQ ID NO: 6627 - DNA, 21 bp, Artificial Sequence
  Synthetic
atggagcaggtgtgctgcgac

SEQ ID NO: 6628 - DNA, 21 bp, Artificial Sequence
  Synthetic
gatggagcaggtgtgctgcga

SEQ ID NO: 6629 - DNA, 21 bp, Artificial Sequence
  Synthetic
acctgctccatcggcggcctg

SEQ ID NO: 6630 - DNA, 21 bp, Artificial Sequence
  Synthetic
cctgctccatcggcggcctgc

SEQ ID NO: 6631 - DNA, 21 bp, Artificial Sequence
  Synthetic
ctcgctccagcaggccgccga

SEQ ID NO: 6632 - DNA, 21 bp, Artificial Sequence
  Synthetic
ctccatcggcggcctgctgga

SEQ ID NO: 6633 - DNA, 21 bp, Artificial Sequence
  Synthetic
cctcgctccagcaggccgccg

SEQ ID NO: 6634 - DNA, 21 bp, Artificial Sequence
  Synthetic
tcggcggcctgctggagcgag

SEQ ID NO: 6635 - DNA, 21 bp, Artificial Sequence
  Synthetic
ctctgcagcgcaactcgctct

SEQ ID NO: 6636 - DNA, 21 bp, Artificial Sequence
  Synthetic
tcctcagagcgagttgcgctg

SEQ ID NO: 6637 - DNA, 21 bp, Artificial Sequence
  Synthetic
ggctctgcagcgcaactcgct

SEQ ID NO: 6638 - DNA, 21 bp, Artificial Sequence
  Synthetic
cgagttgcgctgcagagccag

SEQ ID NO: 6639 - DNA, 21 bp, Artificial Sequence
  Synthetic
tgcgctgcagagccagtcggg

SEQ ID NO: 6640 - DNA, 21 bp, Artificial Sequence
  Synthetic
cactgctgctggcgctgctcc

SEQ ID NO: 6641 - DNA, 21 bp, Artificial Sequence
  Synthetic
gaggccggggcctgcagctcg

SEQ ID NO: 6642 - DNA, 21 bp, Artificial Sequence
  Synthetic
tgaggccggggcctgcagctc

SEQ ID NO: 6643 - DNA, 21 bp, Artificial Sequence
  Synthetic
gctgcaggccccggcctcacg

SEQ ID NO: 6644 - DNA, 21 bp, Artificial Sequence
  Synthetic
ctgcaggccccggcctcacgc

SEQ ID NO: 6645 - DNA, 21 bp, Artificial Sequence
  Synthetic
gtagggcctccagcgtgaggc

SEQ ID NO: 6646 - DNA, 21 bp, Artificial Sequence
  Synthetic
agtagggcctccagcgtgagg

SEQ ID NO: 6647 - DNA, 21 bp, Artificial Sequence
  Synthetic
gcgcaaagtagggcctccagc

SEQ ID NO: 6648 - DNA, 21 bp, Artificial Sequence
  Synthetic
ggccctactttgcgctctggc

SEQ ID NO: 6649 - DNA, 21 bp, Artificial Sequence
  Synthetic
agctcgggccagagcgcaaag

SEQ ID NO: 6650 - DNA, 21 bp, Artificial Sequence
  Synthetic
tactttgcgctctggcccgag

SEQ ID NO: 6651 - DNA, 21 bp, Artificial Sequence
  Synthetic
tccaagcggcccagctcgggc

SEQ ID NO: 6652 - DNA, 21 bp, Artificial Sequence
  Synthetic
ctctggcccgagctgggccgc

SEQ ID NO: 6653 - DNA, 21 bp, Artificial Sequence
  Synthetic
tctggcccgagctgggccgct

SEQ ID NO: 6654 - DNA, 21 bp, Artificial Sequence
  Synthetic
gggtgctccaagcggcccagc

SEQ ID NO: 6655 - DNA, 21 bp, Artificial Sequence
  Synthetic
cttggagcacccgatgttctg

SEQ ID NO: 6656 - DNA, 21 bp, Artificial Sequence
  Synthetic
tggagcacccgatgttctggt

SEQ ID NO: 6657 - DNA, 21 bp, Artificial Sequence
  Synthetic
cccaaggctctcaccagaaca

SEQ ID NO: 6658 - DNA, 21 bp, Artificial Sequence
  Synthetic
tgtgggtgtccctgcaggcca

SEQ ID NO: 6659 - DNA, 21 bp, Artificial Sequence
  Synthetic
gtgggtgtccctgcaggccag

SEQ ID NO: 6660 - DNA, 21 bp, Artificial Sequence
  Synthetic
gggtgtccctgcaggccagag

SEQ ID NO: 6661 - DNA, 21 bp, Artificial Sequence
  Synthetic
ggtgtccctgcaggccagagg

SEQ ID NO: 6662 - DNA, 21 bp, Artificial Sequence
  Synthetic
gaggagcgccggtgcctgctc

SEQ ID NO: 6663 - DNA, 21 bp, Artificial Sequence
  Synthetic
tgctccagggcacaggcgtac

SEQ ID NO: 6664 - DNA, 21 bp, Artificial Sequence
  Synthetic
gcctcaggtacgcctgtgccc

SEQ ID NO: 6665 - DNA, 21 bp, Artificial Sequence
  Synthetic
ggcctcaggtacgcctgtgcc

SEQ ID NO: 6666 - DNA, 21 bp, Artificial Sequence
  Synthetic
ggcacaggcgtacctgaggcc

SEQ ID NO: 6667 - DNA, 21 bp, Artificial Sequence
  Synthetic
gcacaggcgtacctgaggccg

SEQ ID NO: 6668 - DNA, 21 bp, Artificial Sequence
  Synthetic
acaggcgtacctgaggccgtg

SEQ ID NO: 6669 - DNA, 21 bp, Artificial Sequence
  Synthetic
ggcgtacctgaggccgtggag

SEQ ID NO: 6670 - DNA, 21 bp, Artificial Sequence
  Synthetic
aggatttggccaacatccgca

SEQ ID NO: 6671 - DNA, 21 bp, Artificial Sequence
  Synthetic
cacgatggactggtactcgct

SEQ ID NO: 6672 - DNA, 21 bp, Artificial Sequence
  Synthetic
cagtccatcgtgctgcccttc

SEQ ID NO: 6673 - DNA, 21 bp, Artificial Sequence
  Synthetic
agtccatcgtgctgcccttca

SEQ ID NO: 6674 - DNA, 21 bp, Artificial Sequence
  Synthetic
gcttccatgaagggcagcacg

SEQ ID NO: 6675 - DNA, 21 bp, Artificial Sequence
  Synthetic
agatcggggtgggcttccatg

SEQ ID NO: 6676 - DNA, 21 bp, Artificial Sequence
  Synthetic
aagagatcggggtgggcttcc

SEQ ID NO: 6677 - DNA, 21 bp, Artificial Sequence
  Synthetic
cctgaggctgaagagatcggg

SEQ ID NO: 6678 - DNA, 21 bp, Artificial Sequence
  Synthetic
ccaccccgatctcttcagcct

SEQ ID NO: 6679 - DNA, 21 bp, Artificial Sequence
  Synthetic
gaaccctgaggctgaagagat

SEQ ID NO: 6680 - DNA, 21 bp, Artificial Sequence
  Synthetic
cgaaccctgaggctgaagaga

SEQ ID NO: 6681 - DNA, 21 bp, Artificial Sequence
  Synthetic
agggagcgaaccctgaggctg

SEQ ID NO: 6682 - DNA, 21 bp, Artificial Sequence
  Synthetic
tctagggagcgaaccctgagg

SEQ ID NO: 6683 - DNA, 21 bp, Artificial Sequence
  Synthetic
tcagcctcagggttcgctccc

SEQ ID NO: 6684 - DNA, 21 bp, Artificial Sequence
  Synthetic
tagagttctagggagcgaacc

SEQ ID NO: 6685 - DNA, 21 bp, Artificial Sequence
  Synthetic
ctggtggtagagttctaggga

SEQ ID NO: 6686 - DNA, 21 bp, Artificial Sequence
  Synthetic
ccagctggtggtagagttcta

SEQ ID NO: 6687 - DNA, 21 bp, Artificial Sequence
  Synthetic
accagctggtggtagagttct

SEQ ID NO: 6688 - DNA, 21 bp, Artificial Sequence
  Synthetic
caccagctggtggtagagttc

SEQ ID NO: 6689 - DNA, 21 bp, Artificial Sequence
  Synthetic
acaagggccaccagctggtgg

SEQ ID NO: 6690 - DNA, 21 bp, Artificial Sequence
  Synthetic
cactgacctataggccatcac

SEQ ID NO: 6691 - DNA, 21 bp, Artificial Sequence
  Synthetic
ggttctgtcaatggcagcttt

SEQ ID NO: 6692 - DNA, 21 bp, Artificial Sequence
  Synthetic
gttctgtcaatggcagctttc

SEQ ID NO: 6693 - DNA, 21 bp, Artificial Sequence
  Synthetic
aatggcagctttcaggaacca

SEQ ID NO: 6694 - DNA, 21 bp, Artificial Sequence
  Synthetic
atggcagctttcaggaaccac

SEQ ID NO: 6695 - DNA, 21 bp, Artificial Sequence
  Synthetic
ggcagctttcaggaaccactg

SEQ ID NO: 6696 - DNA, 21 bp, Artificial Sequence
  Synthetic
gcagctttcaggaaccactgg

SEQ ID NO: 6697 - DNA, 21 bp, Artificial Sequence
  Synthetic
gctttcaggaaccactggagg

SEQ ID NO: 6698 - DNA, 21 bp, Artificial Sequence
  Synthetic
ctcttcttcctccagtggttc

SEQ ID NO: 6699 - DNA, 21 bp, Artificial Sequence
  Synthetic
ttcaggaaccactggaggaag

SEQ ID NO: 6700 - DNA, 21 bp, Artificial Sequence
  Synthetic
caggaaccactggaggaagaa

SEQ ID NO: 6701 - DNA, 21 bp, Artificial Sequence
  Synthetic
aaccactggaggaagaagagg

SEQ ID NO: 6702 - DNA, 21 bp, Artificial Sequence
  Synthetic
ctggaggaagaagaggatgaa

SEQ ID NO: 6703 - DNA, 21 bp, Artificial Sequence
  Synthetic
tggaggaagaagaggatgaaa

SEQ ID NO: 6704 - DNA, 21 bp, Artificial Sequence
  Synthetic
gcaggcaccatcacgggggag

SEQ ID NO: 6705 - DNA, 21 bp, Artificial Sequence
  Synthetic
ctgcagcaggcaccatcacgg

SEQ ID NO: 6706 - DNA, 21 bp, Artificial Sequence
  Synthetic
tctgcagcaggcaccatcacg

SEQ ID NO: 6707 - DNA, 21 bp, Artificial Sequence
  Synthetic
gtctgcagcaggcaccatcac

SEQ ID NO: 6708 - DNA, 21 bp, Artificial Sequence
  Synthetic
tgtctgcagcaggcaccatca

SEQ ID NO: 6709 - DNA, 21 bp, Artificial Sequence
  Synthetic
atgtctgcagcaggcaccatc

SEQ ID NO: 6710 - DNA, 21 bp, Artificial Sequence
  Synthetic
tagccaatcacaacgccaatc

SEQ ID NO: 6711 - DNA, 21 bp, Artificial Sequence
  Synthetic
gccaatctagaatactctgcg

SEQ ID NO: 6712 - DNA, 21 bp, Artificial Sequence
  Synthetic
cctttcacctcagaattgtct

SEQ ID NO: 6713 - DNA, 21 bp, Artificial Sequence
  Synthetic
ggctaccatccgaagacaatt

SEQ ID NO: 6714 - DNA, 21 bp, Artificial Sequence
  Synthetic
aatgggctgagtggctaccat

SEQ ID NO: 6715 - DNA, 21 bp, Artificial Sequence
  Synthetic
ctcatggcctttaggaatggg

SEQ ID NO: 6716 - DNA, 21 bp, Artificial Sequence
  Synthetic
ctcagcccattcctaaaggcc

SEQ ID NO: 6717 - DNA, 21 bp, Artificial Sequence
  Synthetic
aaaatctcatggcctttagga

SEQ ID NO: 6718 - DNA, 21 bp, Artificial Sequence
  Synthetic
gttgaaaatctcatggccttt

SEQ ID NO: 6719 - DNA, 21 bp, Artificial Sequence
  Synthetic
tgttgaaaatctcatggcctt

SEQ ID NO: 6720 - DNA, 21 bp, Artificial Sequence
  Synthetic
ttagccatttgcccataagtg

SEQ ID NO: 6721 - DNA, 21 bp, Artificial Sequence
  Synthetic
attagagaggcgtgtcaaggc

SEQ ID NO: 6722 - DNA, 21 bp, Artificial Sequence
  Synthetic
agagaggcgtgtcaaggcctg

SEQ ID NO: 6723 - DNA, 21 bp, Artificial Sequence
  Synthetic
gagaggcgtgtcaaggcctga

SEQ ID NO: 6724 - DNA, 21 bp, Artificial Sequence
  Synthetic
ggcctgaaggagcccatgtgg

SEQ ID NO: 6725 - DNA, 21 bp, Artificial Sequence
  Synthetic
cccatgtggttggataaaatc

SEQ ID NO: 6726 - DNA, 21 bp, Artificial Sequence
  Synthetic
ttggataaaatcaagaaaagg

SEQ ID NO: 6727 - DNA, 21 bp, Artificial Sequence
  Synthetic
ataaaatcaagaaaaggctga

SEQ ID NO: 6728 - DNA, 21 bp, Artificial Sequence
  Synthetic
aatgagcacggttacccccaa

SEQ ID NO: 6729 - DNA, 21 bp, Artificial Sequence
  Synthetic
atgagcacggttacccccaag

SEQ ID NO: 6730 - DNA, 21 bp, Artificial Sequence
  Synthetic
gagcacggttacccccaagtg

SEQ ID NO: 6731 - DNA, 21 bp, Artificial Sequence
  Synthetic
agcacggttacccccaagtgg

SEQ ID NO: 6732 - DNA, 21 bp, Artificial Sequence
  Synthetic
cttgtacaaacccctccactt

SEQ ID NO: 6733 - DNA, 21 bp, Artificial Sequence
  Synthetic
tcttgtacaaacccctccact

SEQ ID NO: 6734 - DNA, 21 bp, Artificial Sequence
  Synthetic
gtcttgtacaaacccctccac

SEQ ID NO: 6735 - DNA, 21 bp, Artificial Sequence
  Synthetic
caagacatgcgcctcatcttc

SEQ ID NO: 6736 - DNA, 21 bp, Artificial Sequence
  Synthetic
gcgcctcatcttccagaacca

SEQ ID NO: 6737 - DNA, 21 bp, Artificial Sequence
  Synthetic
gaggccctgtggttctggaag

SEQ ID NO: 6738 - DNA, 21 bp, Artificial Sequence
  Synthetic
ttgtaagaggccctgtggttc

SEQ ID NO: 6739 - DNA, 21 bp, Artificial Sequence
  Synthetic
cttgtaagaggccctgtggtt

SEQ ID NO: 6740 - DNA, 21 bp, Artificial Sequence
  Synthetic
aggaagagccacctaccttgt

SEQ ID NO: 6741 - DNA, 21 bp, Artificial Sequence
  Synthetic
catttggccaaaatccttgta

SEQ ID NO: 6742 - DNA, 21 bp, Artificial Sequence
  Synthetic
cctggatgagtgtgaggtgtg

SEQ ID NO: 6743 - DNA, 21 bp, Artificial Sequence
  Synthetic
ctggatgagtgtgaggtgtgc

SEQ ID NO: 6744 - DNA, 21 bp, Artificial Sequence
  Synthetic
atgagtgtgaggtgtgccggg

SEQ ID NO: 6745 - DNA, 21 bp, Artificial Sequence
  Synthetic
tgagtgtgaggtgtgccggga

SEQ ID NO: 6746 - DNA, 21 bp, Artificial Sequence
  Synthetic
agtgtgaggtgtgccgggacg

SEQ ID NO: 6747 - DNA, 21 bp, Artificial Sequence
  Synthetic
gtgtgaggtgtgccgggacgg

SEQ ID NO: 6748 - DNA, 21 bp, Artificial Sequence
  Synthetic
tgtgaggtgtgccgggacgga

SEQ ID NO: 6749 - DNA, 21 bp, Artificial Sequence
  Synthetic
gtgaggtgtgccgggacggag

SEQ ID NO: 6750 - DNA, 21 bp, Artificial Sequence
  Synthetic
gttctgttgcgacacttgttc

SEQ ID NO: 6751 - DNA, 21 bp, Artificial Sequence
  Synthetic
actcttgaacaagtgtcgcaa

SEQ ID NO: 6752 - DNA, 21 bp, Artificial Sequence
  Synthetic
acacttgttcaagagtcttcc

SEQ ID NO: 6753 - DNA, 21 bp, Artificial Sequence
  Synthetic
acttgttcaagagtcttccat

SEQ ID NO: 6754 - DNA, 21 bp, Artificial Sequence
  Synthetic
gacagtcctcatggaagactc

SEQ ID NO: 6755 - DNA, 21 bp, Artificial Sequence
  Synthetic
ggcgggatgtgacagtcctca

SEQ ID NO: 6756 - DNA, 21 bp, Artificial Sequence
  Synthetic
aggcgggatgtgacagtcctc

SEQ ID NO: 6757 - DNA, 21 bp, Artificial Sequence
  Synthetic
gaggactgtcacatcccgcct

SEQ ID NO: 6758 - DNA, 21 bp, Artificial Sequence
  Synthetic
aggactgtcacatcccgcctg

SEQ ID NO: 6759 - DNA, 21 bp, Artificial Sequence
  Synthetic
gtcacatcccgcctgtggaag

SEQ ID NO: 6760 - DNA, 21 bp, Artificial Sequence
  Synthetic
cacatcccgcctgtggaagct

SEQ ID NO: 6761 - DNA, 21 bp, Artificial Sequence
  Synthetic
ttacctctcagcttccacagg

SEQ ID NO: 6762 - DNA, 21 bp, Artificial Sequence
  Synthetic
cttacctctcagcttccacag

SEQ ID NO: 6763 - DNA, 21 bp, Artificial Sequence
  Synthetic
tgtccaatctctcaggacccc

SEQ ID NO: 6764 - DNA, 21 bp, Artificial Sequence
  Synthetic
gtccaatctctcaggaccccg

SEQ ID NO: 6765 - DNA, 21 bp, Artificial Sequence
  Synthetic
gatgcaattccacggggtcct

SEQ ID NO: 6766 - DNA, 21 bp, Artificial Sequence
  Synthetic
aagatgcaattccacggggtc

SEQ ID NO: 6767 - DNA, 21 bp, Artificial Sequence
  Synthetic
cctgcagaagatgcaattcca

SEQ ID NO: 6768 - DNA, 21 bp, Artificial Sequence
  Synthetic
tcctgcagaagatgcaattcc

SEQ ID NO: 6769 - DNA, 21 bp, Artificial Sequence
  Synthetic
cccgtggaattgcatcttctg

SEQ ID NO: 6770 - DNA, 21 bp, Artificial Sequence
  Synthetic
tggaattgcatcttctgcagg

SEQ ID NO: 6771 - DNA, 21 bp, Artificial Sequence
  Synthetic
aattgcatcttctgcaggatg

SEQ ID NO: 6772 - DNA, 21 bp, Artificial Sequence
  Synthetic
attgcatcttctgcaggatga

SEQ ID NO: 6773 - DNA, 21 bp, Artificial Sequence
  Synthetic
cccggagactccttcatcctg

SEQ ID NO: 6774 - DNA, 21 bp, Artificial Sequence
  Synthetic
acatgttcccgtgtatatcat

SEQ ID NO: 6775 - DNA, 21 bp, Artificial Sequence
  Synthetic
agcagtccaaatgatatacac

SEQ ID NO: 6776 - DNA, 21 bp, Artificial Sequence
  Synthetic
aagcagtccaaatgatataca

SEQ ID NO: 6777 - DNA, 21 bp, Artificial Sequence
  Synthetic
taagcagtccaaatgatatac

SEQ ID NO: 6778 - DNA, 21 bp, Artificial Sequence
  Synthetic
ttggactgcttagacccccct

SEQ ID NO: 6779 - DNA, 21 bp, Artificial Sequence
  Synthetic
ccccctctgaaaacaattccc

SEQ ID NO: 6780 - DNA, 21 bp, Artificial Sequence
  Synthetic
gaaaacaattcccaagggcat

SEQ ID NO: 6781 - DNA, 21 bp, Artificial Sequence
  Synthetic
gggacagatccacatgccctt

SEQ ID NO: 6782 - DNA, 21 bp, Artificial Sequence
  Synthetic
tgggacagatccacatgccct

SEQ ID NO: 6783 - DNA, 21 bp, Artificial Sequence
  Synthetic
ctgggacagatccacatgccc

SEQ ID NO: 6784 - DNA, 21 bp, Artificial Sequence
  Synthetic
atgtggatctgtcccagatgt

SEQ ID NO: 6785 - DNA, 21 bp, Artificial Sequence
  Synthetic
acagtacctggtcctgacatc

SEQ ID NO: 6786 - DNA, 21 bp, Artificial Sequence
  Synthetic
cacagtacctggtcctgacat

SEQ ID NO: 6787 - DNA, 21 bp, Artificial Sequence
  Synthetic
cacaccgacttcaaggacaag

SEQ ID NO: 6788 - DNA, 21 bp, Artificial Sequence
  Synthetic
cgcgggccactcaccttgtcc

SEQ ID NO: 6789 - DNA, 21 bp, Artificial Sequence
  Synthetic
agccaacatcaagaacgatct

SEQ ID NO: 6790 - DNA, 21 bp, Artificial Sequence
  Synthetic
acagccaacatcaagaacgat

SEQ ID NO: 6791 - DNA, 21 bp, Artificial Sequence
  Synthetic
cccagagccacagccaacatc

SEQ ID NO: 6792 - DNA, 21 bp, Artificial Sequence
  Synthetic
ttcttgatgttggctgtggct

SEQ ID NO: 6793 - DNA, 21 bp, Artificial Sequence
  Synthetic
tcttgatgttggctgtggctc

SEQ ID NO: 6794 - DNA, 21 bp, Artificial Sequence
  Synthetic
cggcaaaaaacgacaggatcc

SEQ ID NO: 6795 - DNA, 21 bp, Artificial Sequence
  Synthetic
agcttgggcggcaaaaaacga

SEQ ID NO: 6796 - DNA, 21 bp, Artificial Sequence
  Synthetic
tttgccgcccaagctggagca

SEQ ID NO: 6797 - DNA, 21 bp, Artificial Sequence
  Synthetic
ggagcacggaaaatctacgcg

SEQ ID NO: 6798 - DNA, 21 bp, Artificial Sequence
  Synthetic
gagcacggaaaatctacgcgg

SEQ ID NO: 6799 - DNA, 21 bp, Artificial Sequence
  Synthetic
ccagcaccatggcccagcacg

SEQ ID NO: 6800 - DNA, 21 bp, Artificial Sequence
  Synthetic
cgggccactgacctcagcgtg

SEQ ID NO: 6801 - DNA, 21 bp, Artificial Sequence
  Synthetic
cctgcccgcctgcaggtcttg

SEQ ID NO: 6802 - DNA, 21 bp, Artificial Sequence
  Synthetic
gcccgcctgcaggtcttggtg

SEQ ID NO: 6803 - DNA, 21 bp, Artificial Sequence
  Synthetic
ttggtgaagagtaacaacctg

SEQ ID NO: 6804 - DNA, 21 bp, Artificial Sequence
  Synthetic
acggaccgcatcgtggtcatc

SEQ ID NO: 6805 - DNA, 21 bp, Artificial Sequence
  Synthetic
atcgtggtcatcccgggcaag

SEQ ID NO: 6806 - DNA, 21 bp, Artificial Sequence
  Synthetic
tcgtggtcatcccgggcaagg

SEQ ID NO: 6807 - DNA, 21 bp, Artificial Sequence
  Synthetic
gtggtcatcccgggcaaggtg

SEQ ID NO: 6808 - DNA, 21 bp, Artificial Sequence
  Synthetic
tggtcatcccgggcaaggtgg

SEQ ID NO: 6809 - DNA, 21 bp, Artificial Sequence
  Synthetic
tgacacctcctccaccttgcc

SEQ ID NO: 6810 - DNA, 21 bp, Artificial Sequence
  Synthetic
gtgacacctcctccaccttgc

SEQ ID NO: 6811 - DNA, 21 bp, Artificial Sequence
  Synthetic
aggtggaggaggtgtcactcc

SEQ ID NO: 6812 - DNA, 21 bp, Artificial Sequence
  Synthetic
gaggtgtcactccccgagcag

SEQ ID NO: 6813 - DNA, 21 bp, Artificial Sequence
  Synthetic
atgatgatgtccacctgctcg

SEQ ID NO: 6814 - DNA, 21 bp, Artificial Sequence
  Synthetic
gatgatgatgtccacctgctc

SEQ ID NO: 6815 - DNA, 21 bp, Artificial Sequence
  Synthetic
agatgatgatgtccacctgct

SEQ ID NO: 6816 - DNA, 21 bp, Artificial Sequence
  Synthetic
gagatgatgatgtccacctgc

SEQ ID NO: 6817 - DNA, 21 bp, Artificial Sequence
  Synthetic
gagcaggtggacatcatcatc

SEQ ID NO: 6818 - DNA, 21 bp, Artificial Sequence
  Synthetic
agcaggtggacatcatcatct

SEQ ID NO: 6819 - DNA, 21 bp, Artificial Sequence
  Synthetic
gacatcatcatctcggagccc

SEQ ID NO: 6820 - DNA, 21 bp, Artificial Sequence
  Synthetic
agagcatgtagcccatgggct

SEQ ID NO: 6821 - DNA, 21 bp, Artificial Sequence
  Synthetic
tcgttgaagagcatgtagccc

SEQ ID NO: 6822 - DNA, 21 bp, Artificial Sequence
  Synthetic
ccatgggctacatgctcttca

SEQ ID NO: 6823 - DNA, 21 bp, Artificial Sequence
  Synthetic
atgctcttcaacgagcgcatg

SEQ ID NO: 6824 - DNA, 21 bp, Artificial Sequence
  Synthetic
tgctcttcaacgagcgcatgc

SEQ ID NO: 6825 - DNA, 21 bp, Artificial Sequence
  Synthetic
ctctccagcatgcgctcgttg

SEQ ID NO: 6826 - DNA, 21 bp, Artificial Sequence
  Synthetic
ctcttcaacgagcgcatgctg

SEQ ID NO: 6827 - DNA, 21 bp, Artificial Sequence
  Synthetic
tagctctccagcatgcgctcg

SEQ ID NO: 6828 - DNA, 21 bp, Artificial Sequence
  Synthetic
ctggagagctacctccacgcc

SEQ ID NO: 6829 - DNA, 21 bp, Artificial Sequence
  Synthetic
tacctccacgccaagaagtac

SEQ ID NO: 6830 - DNA, 21 bp, Artificial Sequence
  Synthetic
ggcttcaggtacttcttggcg

SEQ ID NO: 6831 - DNA, 21 bp, Artificial Sequence
  Synthetic
gggcttcaggtacttcttggc

SEQ ID NO: 6832 - DNA, 21 bp, Artificial Sequence
  Synthetic
agaagtacctgaagcccagcg

SEQ ID NO: 6833 - DNA, 21 bp, Artificial Sequence
  Synthetic
atggtaggaaacatgtttcct

SEQ ID NO: 6834 - DNA, 21 bp, Artificial Sequence
  Synthetic
aatggtaggaaacatgtttcc

SEQ ID NO: 6835 - DNA, 21 bp, Artificial Sequence
  Synthetic
caatggtaggaaacatgtttc

SEQ ID NO: 6836 - DNA, 21 bp, Artificial Sequence
  Synthetic
aaggtggacgtcaccaatggt

SEQ ID NO: 6837 - DNA, 21 bp, Artificial Sequence
  Synthetic
caaggtggacgtcaccaatgg

SEQ ID NO: 6838 - DNA, 21 bp, Artificial Sequence
  Synthetic
gacgtccaccttgcacccttc

SEQ ID NO: 6839 - DNA, 21 bp, Artificial Sequence
  Synthetic
ttcatccgtgaagggtgcaag

SEQ ID NO: 6840 - DNA, 21 bp, Artificial Sequence
  Synthetic
tccaccttgcacccttcacgg

SEQ ID NO: 6841 - DNA, 21 bp, Artificial Sequence
  Synthetic
atgtagagctgttcatccgtg

SEQ ID NO: 6842 - DNA, 21 bp, Artificial Sequence
  Synthetic
tccatgtagagctgttcatcc

SEQ ID NO: 6843 - DNA, 21 bp, Artificial Sequence
  Synthetic
ttcacggatgaacagctctac

SEQ ID NO: 6844 - DNA, 21 bp, Artificial Sequence
  Synthetic
tcacggatgaacagctctaca

SEQ ID NO: 6845 - DNA, 21 bp, Artificial Sequence
  Synthetic
gccttggtgaactgctccatg

SEQ ID NO: 6846 - DNA, 21 bp, Artificial Sequence
  Synthetic
gttcaccaaggccaacttctg

SEQ ID NO: 6847 - DNA, 21 bp, Artificial Sequence
  Synthetic
actcaccagaagttggccttg

SEQ ID NO: 6848 - DNA, 21 bp, Artificial Sequence
  Synthetic
atggaaagatggctggtacct

SEQ ID NO: 6849 - DNA, 21 bp, Artificial Sequence
  Synthetic
acaggtaccagccatctttcc

SEQ ID NO: 6850 - DNA, 21 bp, Artificial Sequence
  Synthetic
caggtaccagccatctttcca

SEQ ID NO: 6851 - DNA, 21 bp, Artificial Sequence
  Synthetic
taccagccatctttccatgga

SEQ ID NO: 6852 - DNA, 21 bp, Artificial Sequence
  Synthetic
agggccgacaggtccactcca

SEQ ID NO: 6853 - DNA, 21 bp, Artificial Sequence
  Synthetic
gagggccgacaggtccactcc

SEQ ID NO: 6854 - DNA, 21 bp, Artificial Sequence
  Synthetic
tggagtggacctgtcggccct

SEQ ID NO: 6855 - DNA, 21 bp, Artificial Sequence
  Synthetic
tcggccctccgaggtgccgcg

SEQ ID NO: 6856 - DNA, 21 bp, Artificial Sequence
  Synthetic
ctcatccaccgcggcacctcg

SEQ ID NO: 6857 - DNA, 21 bp, Artificial Sequence
  Synthetic
ccctccgaggtgccgcggtgg

SEQ ID NO: 6858 - DNA, 21 bp, Artificial Sequence
  Synthetic
tactcatccaccgcggcacct

SEQ ID NO: 6859 - DNA, 21 bp, Artificial Sequence
  Synthetic
atactcatccaccgcggcacc

SEQ ID NO: 6860 - DNA, 21 bp, Artificial Sequence
  Synthetic
tatttccggcagcctgtggtg

SEQ ID NO: 6861 - DNA, 21 bp, Artificial Sequence
  Synthetic
ctactcaccaccacaggctgc

SEQ ID NO: 6862 - DNA, 21 bp, Artificial Sequence
  Synthetic
cctactcaccaccacaggctg

SEQ ID NO: 6863 - DNA, 21 bp, Artificial Sequence
  Synthetic
tccggatgtcaaatgtgtcct

SEQ ID NO: 6864 - DNA, 21 bp, Artificial Sequence
  Synthetic
ctcccaggacacatttgacat

SEQ ID NO: 6865 - DNA, 21 bp, Artificial Sequence
  Synthetic
atccggatgtcaaatgtgtcc

SEQ ID NO: 6866 - DNA, 21 bp, Artificial Sequence
  Synthetic
gatccggatgtcaaatgtgtc

SEQ ID NO: 6867 - DNA, 21 bp, Artificial Sequence
  Synthetic
gacagacttggccatcaggat

SEQ ID NO: 6868 - DNA, 21 bp, Artificial Sequence
  Synthetic
gtacttgacagacttggccat

SEQ ID NO: 6869 - DNA, 21 bp, Artificial Sequence
  Synthetic
gccaagtctgtcaagtacacg

SEQ ID NO: 6870 - DNA, 21 bp, Artificial Sequence
  Synthetic
tcaagtacacggtgaacttct

SEQ ID NO: 6871 - DNA, 21 bp, Artificial Sequence
  Synthetic
cggtgaacttcttagaagcca

SEQ ID NO: 6872 - DNA, 21 bp, Artificial Sequence
  Synthetic
tgaacttcttagaagccaaag

SEQ ID NO: 6873 - DNA, 21 bp, Artificial Sequence
  Synthetic
gaacttcttagaagccaaaga

SEQ ID NO: 6874 - DNA, 21 bp, Artificial Sequence
  Synthetic
aaatctccttctttggcttct

SEQ ID NO: 6875 - DNA, 21 bp, Artificial Sequence
  Synthetic
atttgaatgggatttctatcc

SEQ ID NO: 6876 - DNA, 21 bp, Artificial Sequence
  Synthetic
aatttgaatgggatttctatc

SEQ ID NO: 6877 - DNA, 21 bp, Artificial Sequence
  Synthetic
atgcagcatgtggaatttgaa

SEQ ID NO: 6878 - DNA, 21 bp, Artificial Sequence
  Synthetic
aatgcagcatgtggaatttga

SEQ ID NO: 6879 - DNA, 21 bp, Artificial Sequence
  Synthetic
cctgaatgcagcatgtggaat

SEQ ID NO: 6880 - DNA, 21 bp, Artificial Sequence
  Synthetic
tcaaattccacatgctgcatt

SEQ ID NO: 6881 - DNA, 21 bp, Artificial Sequence
  Synthetic
accagccctgaatgcagcatg

SEQ ID NO: 6882 - DNA, 21 bp, Artificial Sequence
  Synthetic
gaccagccctgaatgcagcat

SEQ ID NO: 6883 - DNA, 21 bp, Artificial Sequence
  Synthetic
aagccaggccgtggaccagcc

SEQ ID NO: 6884 - DNA, 21 bp, Artificial Sequence
  Synthetic
gtcaaaccagaaagccaggcc

SEQ ID NO: 6885 - DNA, 21 bp, Artificial Sequence
  Synthetic
ccgatgaaagcaacgtcaaac

SEQ ID NO: 6886 - DNA, 21 bp, Artificial Sequence
  Synthetic
cgttgctttcatcggctccat

SEQ ID NO: 6887 - DNA, 21 bp, Artificial Sequence
  Synthetic
tgcggcactcacatggagccg

SEQ ID NO: 6888 - DNA, 21 bp, Artificial Sequence
  Synthetic
ggacagccacacggtcattct

SEQ ID NO: 6889 - DNA, 21 bp, Artificial Sequence
  Synthetic
tgtggctgtccacagccccga

SEQ ID NO: 6890 - DNA, 21 bp, Artificial Sequence
  Synthetic
gtcaggggctctgtcggggct

SEQ ID NO: 6891 - DNA, 21 bp, Artificial Sequence
  Synthetic
ccagtgggtcaggggctctgt

SEQ ID NO: 6892 - DNA, 21 bp, Artificial Sequence
  Synthetic
accagtgggtcaggggctctg

SEQ ID NO: 6893 - DNA, 21 bp, Artificial Sequence
  Synthetic
cgcacctggtaccagtgggtc

SEQ ID NO: 6894 - DNA, 21 bp, Artificial Sequence
  Synthetic
ccgcacctggtaccagtgggt

SEQ ID NO: 6895 - DNA, 21 bp, Artificial Sequence
  Synthetic
caggcaccgcacctggtacca

SEQ ID NO: 6896 - DNA, 21 bp, Artificial Sequence
  Synthetic
gccttggcgaacagtggtgac

SEQ ID NO: 6897 - DNA, 21 bp, Artificial Sequence
  Synthetic
tgccttggcgaacagtggtga

SEQ ID NO: 6898 - DNA, 21 bp, Artificial Sequence
  Synthetic
agtcaccactgttcgccaagg

SEQ ID NO: 6899 - DNA, 21 bp, Artificial Sequence
  Synthetic
gtcaccactgttcgccaaggc

SEQ ID NO: 6900 - DNA, 21 bp, Artificial Sequence
  Synthetic
tcaccactgttcgccaaggca

SEQ ID NO: 6901 - DNA, 21 bp, Artificial Sequence
  Synthetic
gagagcgtgtcccctgccttg

SEQ ID NO: 6902 - DNA, 21 bp, Artificial Sequence
  Synthetic
ccaaggcaggggacacgctct

SEQ ID NO: 6903 - DNA, 21 bp, Artificial Sequence
  Synthetic
caaggcaggggacacgctctc

SEQ ID NO: 6904 - DNA, 21 bp, Artificial Sequence
  Synthetic
gggaacaccgacacggtagcg

SEQ ID NO: 6905 - DNA, 21 bp, Artificial Sequence
  Synthetic
atggtgaggaggcgggcgccg

SEQ ID NO: 6906 - DNA, 21 bp, Artificial Sequence
  Synthetic
gatggtgaggaggcgggcgcc

SEQ ID NO: 6907 - DNA, 21 bp, Artificial Sequence
  Synthetic
cgatggtgaggaggcgggcgc

SEQ ID NO: 6908 - DNA, 21 bp, Artificial Sequence
  Synthetic
ccgatggtgaggaggcgggcg

SEQ ID NO: 6909 - DNA, 21 bp, Artificial Sequence
  Synthetic
cgcgtcgccgatggtgaggag

SEQ ID NO: 6910 - DNA, 21 bp, Artificial Sequence
  Synthetic
cgcctcctcaccatcggcgac

SEQ ID NO: 6911 - DNA, 21 bp, Artificial Sequence
  Synthetic
ccgttcgcgtcgccgatggtg

SEQ ID NO: 6912 - DNA, 21 bp, Artificial Sequence
  Synthetic
gccgttcgcgtcgccgatggt

SEQ ID NO: 6913 - DNA, 21 bp, Artificial Sequence
  Synthetic
tcgccgttcgcgtcgccgatg

SEQ ID NO: 6914 - DNA, 21 bp, Artificial Sequence
  Synthetic
tcaccatcggcgacgcgaacg

SEQ ID NO: 6915 - DNA, 21 bp, Artificial Sequence
  Synthetic
aacggcgagatccagcggcac

SEQ ID NO: 6916 - DNA, 21 bp, Artificial Sequence
  Synthetic
acggcgagatccagcggcacg

SEQ ID NO: 6917 - DNA, 21 bp, Artificial Sequence
  Synthetic
cgcctgctgctccgcgtgccg

SEQ ID NO: 6918 - DNA, 21 bp, Artificial Sequence
  Synthetic
cggagcagcaggcgctgcgcc

SEQ ID NO: 6919 - DNA, 21 bp, Artificial Sequence
  Synthetic
cgcctcgaggtgcgcgccggc

SEQ ID NO: 6920 - DNA, 21 bp, Artificial Sequence
  Synthetic
gagtccgggccggcgcgcacc

SEQ ID NO: 6921 - DNA, 21 bp, Artificial Sequence
  Synthetic
gtgcgcgccggcccggactcg

SEQ ID NO: 6922 - DNA, 21 bp, Artificial Sequence
  Synthetic
agagggcgatgcccgccgagt

SEQ ID NO: 6923 - DNA, 21 bp, Artificial Sequence
  Synthetic
ggctgtagagggcgatgcccg

SEQ ID NO: 6924 - DNA, 21 bp, Artificial Sequence
  Synthetic
cgggcatcgccctctacagcc

SEQ ID NO: 6925 - DNA, 21 bp, Artificial Sequence
  Synthetic
ggccccgtactcacggctgta

SEQ ID NO: 6926 - DNA, 21 bp, Artificial Sequence
  Synthetic
ggggccccgtactcacggctg

SEQ ID NO: 6927 - DNA, 21 bp, Artificial Sequence
  Synthetic
aagacacacacatcttcatct

SEQ ID NO: 6928 - DNA, 21 bp, Artificial Sequence
  Synthetic
tgtctttaagtgctcagtgtc

SEQ ID NO: 6929 - DNA, 21 bp, Artificial Sequence
  Synthetic
tctttaagtgctcagtgtccc

SEQ ID NO: 6930 - DNA, 21 bp, Artificial Sequence
  Synthetic
agtgctcagtgtcccgagaga

SEQ ID NO: 6931 - DNA, 21 bp, Artificial Sequence
  Synthetic
tgcactctgtctctcgggaca

SEQ ID NO: 6932 - DNA, 21 bp, Artificial Sequence
  Synthetic
acacggctgcactctgtctct

SEQ ID NO: 6933 - DNA, 21 bp, Artificial Sequence
  Synthetic
cacacggctgcactctgtctc

SEQ ID NO: 6934 - DNA, 21 bp, Artificial Sequence
  Synthetic
cgagagacagagtgcagccgt

SEQ ID NO: 6935 - DNA, 21 bp, Artificial Sequence
  Synthetic
aagcagtccttcatcatcacc

SEQ ID NO: 6936 - DNA, 21 bp, Artificial Sequence
  Synthetic
ttgcagcccagggtgatgatg

SEQ ID NO: 6937 - DNA, 21 bp, Artificial Sequence
  Synthetic
ctgttgcagcccagggtgatg

SEQ ID NO: 6938 - DNA, 21 bp, Artificial Sequence
  Synthetic
gatgaggacgctgttgcagcc

SEQ ID NO: 6939 - DNA, 21 bp, Artificial Sequence
  Synthetic
gttgggtgtggcgaactggat

SEQ ID NO: 6940 - DNA, 21 bp, Artificial Sequence
  Synthetic
ccgttgggtgtggcgaactgg

SEQ ID NO: 6941 - DNA, 21 bp, Artificial Sequence
  Synthetic
cgtaccgttgggtgtggcgaa

SEQ ID NO: 6942 - DNA, 21 bp, Artificial Sequence
  Synthetic
ggccacgtaccgttgggtgtg

SEQ ID NO: 6943 - DNA, 21 bp, Artificial Sequence
  Synthetic
gttgtagaaggaacagaaatc

SEQ ID NO: 6944 - DNA, 21 bp, Artificial Sequence
  Synthetic
tgttgtagaaggaacagaaat

SEQ ID NO: 6945 - DNA, 21 bp, Artificial Sequence
  Synthetic
ttcaggatgttgtagaaggaa

SEQ ID NO: 6946 - DNA, 21 bp, Artificial Sequence
  Synthetic
ttctgttccttctacaacatc

SEQ ID NO: 6947 - DNA, 21 bp, Artificial Sequence
  Synthetic
ctacaacatcctgaaaacctg

SEQ ID NO: 6948 - DNA, 21 bp, Artificial Sequence
  Synthetic
tacaacatcctgaaaacctgc

SEQ ID NO: 6949 - DNA, 21 bp, Artificial Sequence
  Synthetic
aaaacctgccggggccacacc

SEQ ID NO: 6950 - DNA, 21 bp, Artificial Sequence
  Synthetic
aaacctgccggggccacaccc

SEQ ID NO: 6951 - DNA, 21 bp, Artificial Sequence
  Synthetic
ctcgctgaacacagaccgctc

SEQ ID NO: 6952 - DNA, 21 bp, Artificial Sequence
  Synthetic
ccctggagcggtctgtgttca

SEQ ID NO: 6953 - DNA, 21 bp, Artificial Sequence
  Synthetic
ggagcggtctgtgttcagcga

SEQ ID NO: 6954 - DNA, 21 bp, Artificial Sequence
  Synthetic
gaagactcctccgtccgctcg

SEQ ID NO: 6955 - DNA, 21 bp, Artificial Sequence
  Synthetic
ttgatttgggccagcaggttt

SEQ ID NO: 6956 - DNA, 21 bp, Artificial Sequence
  Synthetic
aacctgctggcccaaatcaag

SEQ ID NO: 6957 - DNA, 21 bp, Artificial Sequence
  Synthetic
acctgctggcccaaatcaagg

SEQ ID NO: 6958 - DNA, 21 bp, Artificial Sequence
  Synthetic
cctgctggcccaaatcaaggt

SEQ ID NO: 6959 - DNA, 21 bp, Artificial Sequence
  Synthetic
acctggtctccccaccttgat

SEQ ID NO: 6960 - DNA, 21 bp, Artificial Sequence
  Synthetic
ggccaggcactggggtgagac

SEQ ID NO: 6961 - DNA, 21 bp, Artificial Sequence
  Synthetic
gggccaggcactggggtgaga

SEQ ID NO: 6962 - DNA, 21 bp, Artificial Sequence
  Synthetic
catgaagggccaggcactggg

SEQ ID NO: 6963 - DNA, 21 bp, Artificial Sequence
  Synthetic
caccccagtgcctggcccttc

SEQ ID NO: 6964 - DNA, 21 bp, Artificial Sequence
  Synthetic
accccagtgcctggcccttca

SEQ ID NO: 6965 - DNA, 21 bp, Artificial Sequence
  Synthetic
gctccatgaagggccaggcac

SEQ ID NO: 6966 - DNA, 21 bp, Artificial Sequence
  Synthetic
ggctccatgaagggccaggca

SEQ ID NO: 6967 - DNA, 21 bp, Artificial Sequence
  Synthetic
gcctggcccttcatggagcct

SEQ ID NO: 6968 - DNA, 21 bp, Artificial Sequence
  Synthetic
tggcccttcatggagcctgtg

SEQ ID NO: 6969 - DNA, 21 bp, Artificial Sequence
  Synthetic
gacttcttcacaggctccatg

SEQ ID NO: 6970 - DNA, 21 bp, Artificial Sequence
  Synthetic
tccgacttcttcacaggctcc

SEQ ID NO: 6971 - DNA, 21 bp, Artificial Sequence
  Synthetic
ttcatggagcctgtgaagaag

SEQ ID NO: 6972 - DNA, 21 bp, Artificial Sequence
  Synthetic
tcatggagcctgtgaagaagt

SEQ ID NO: 6973 - DNA, 21 bp, Artificial Sequence
  Synthetic
agtcggaggcccctgactact

SEQ ID NO: 6974 - DNA, 21 bp, Artificial Sequence
  Synthetic
gcggatgacctcgtagtagtc

SEQ ID NO: 6975 - DNA, 21 bp, Artificial Sequence
  Synthetic
agcggatgacctcgtagtagt

SEQ ID NO: 6976 - DNA, 21 bp, Artificial Sequence
  Synthetic
aggtcatccgcttccccattg

SEQ ID NO: 6977 - DNA, 21 bp, Artificial Sequence
  Synthetic
gtcatccgcttccccattggt

SEQ ID NO: 6978 - DNA, 21 bp, Artificial Sequence
  Synthetic
aaggtcctcaccaatggggaa

SEQ ID NO: 6979 - DNA, 21 bp, Artificial Sequence
  Synthetic
aatggaaggtcctcaccaatg

SEQ ID NO: 6980 - DNA, 21 bp, Artificial Sequence
  Synthetic
gaatggaaggtcctcaccaat

SEQ ID NO: 6981 - DNA, 21 bp, Artificial Sequence
  Synthetic
ggaatggaaggtcctcaccaa

SEQ ID NO: 6982 - DNA, 21 bp, Artificial Sequence
  Synthetic
ctcagtcatggtcttcaggtc

SEQ ID NO: 6983 - DNA, 21 bp, Artificial Sequence
  Synthetic
ccccagacctgaagaccatga

SEQ ID NO: 6984 - DNA, 21 bp, Artificial Sequence
  Synthetic
gctcagtcatggtcttcaggt

SEQ ID NO: 6985 - DNA, 21 bp, Artificial Sequence
  Synthetic
gaagaccatgactgagcggct

SEQ ID NO: 6986 - DNA, 21 bp, Artificial Sequence
  Synthetic
gcgaagccgctactacgtgac

SEQ ID NO: 6987 - DNA, 21 bp, Artificial Sequence
  Synthetic
cgaagccgctactacgtgacc

SEQ ID NO: 6988 - DNA, 21 bp, Artificial Sequence
  Synthetic
caggtcggccacaaagagctt

SEQ ID NO: 6989 - DNA, 21 bp, Artificial Sequence
  Synthetic
gctctttgtggccgacctgca

SEQ ID NO: 6990 - DNA, 21 bp, Artificial Sequence
  Synthetic
acccgctgcaggtcggccaca

SEQ ID NO: 6991 - DNA, 21 bp, Artificial Sequence
  Synthetic
agcgggtcatcgccaactgtc

SEQ ID NO: 6992 - DNA, 21 bp, Artificial Sequence
  Synthetic
aactgtcgcgagtacaacccc

SEQ ID NO: 6993 - DNA, 21 bp, Artificial Sequence
  Synthetic
gcgagtacaaccccccggaca

SEQ ID NO: 6994 - DNA, 21 bp, Artificial Sequence
  Synthetic
agcggcagtactcgctgtccg

SEQ ID NO: 6995 - DNA, 21 bp, Artificial Sequence
  Synthetic
cagcggcagtactcgctgtcc

SEQ ID NO: 6996 - DNA, 21 bp, Artificial Sequence
  Synthetic
acagcggcagtactcgctgtc

SEQ ID NO: 6997 - DNA, 21 bp, Artificial Sequence
  Synthetic
cacagcggcagtactcgctgt

SEQ ID NO: 6998 - DNA, 21 bp, Artificial Sequence
  Synthetic
agccagcagcagcgcgccagt

SEQ ID NO: 6999 - DNA, 21 bp, Artificial Sequence
  Synthetic
ccagcagcagcgcgccagtca

SEQ ID NO: 7000 - DNA, 21 bp, Artificial Sequence
  Synthetic
cagcagcagcgcgccagtcag

SEQ ID NO: 7001 - DNA, 21 bp, Artificial Sequence
  Synthetic
cagtcagaggaaggcgcaagt

SEQ ID NO: 7002 - DNA, 21 bp, Artificial Sequence
  Synthetic
agtcagaggaaggcgcaagtc

SEQ ID NO: 7003 - DNA, 21 bp, Artificial Sequence
  Synthetic
gtcagaggaaggcgcaagtcc

SEQ ID NO: 7004 - DNA, 21 bp, Artificial Sequence
  Synthetic
gtccgggggctgccgcgcgcc

SEQ ID NO: 7005 - DNA, 21 bp, Artificial Sequence
  Synthetic
cttcttggcgcgcggcagccc

SEQ ID NO: 7006 - DNA, 21 bp, Artificial Sequence
  Synthetic
ggctgccgcgcgccaagaagc

SEQ ID NO: 7007 - DNA, 21 bp, Artificial Sequence
  Synthetic
ctgccgcgcgccaagaagctt

SEQ ID NO: 7008 - DNA, 21 bp, Artificial Sequence
  Synthetic
gcgccaagaagcttgagaagc

SEQ ID NO: 7009 - DNA, 21 bp, Artificial Sequence
  Synthetic
cgccaagaagcttgagaagct

SEQ ID NO: 7010 - DNA, 21 bp, Artificial Sequence
  Synthetic
ggggtcttctcggcttgcaag

SEQ ID NO: 7011 - DNA, 21 bp, Artificial Sequence
  Synthetic
gggtcttctcggcttgcaagg

SEQ ID NO: 7012 - DNA, 21 bp, Artificial Sequence
  Synthetic
ggtcttctcggcttgcaaggt

SEQ ID NO: 7013 - DNA, 21 bp, Artificial Sequence
  Synthetic
cccgcccccaccttgcaagcc

SEQ ID NO: 7014 - DNA, 21 bp, Artificial Sequence
  Synthetic
gccccgcccccaccttgcaag

SEQ ID NO: 7015 - DNA, 21 bp, Artificial Sequence
  Synthetic
gatccttccacctccaggcca

SEQ ID NO: 7016 - DNA, 21 bp, Artificial Sequence
  Synthetic
cacttacaggtttcattggcc

SEQ ID NO: 7017 - DNA, 21 bp, Artificial Sequence
  Synthetic
acacttacaggtttcattggc

SEQ ID NO: 7018 - DNA, 21 bp, Artificial Sequence
  Synthetic
tgaaacctgtaagtgtaatgg

SEQ ID NO: 7019 - DNA, 21 bp, Artificial Sequence
  Synthetic
gaaacctgtaagtgtaatggc

SEQ ID NO: 7020 - DNA, 21 bp, Artificial Sequence
  Synthetic
tgcggggtgcagtggggggct

SEQ ID NO: 7021 - DNA, 21 bp, Artificial Sequence
  Synthetic
atgcggggtgcagtggggggc

SEQ ID NO: 7022 - DNA, 21 bp, Artificial Sequence
  Synthetic
aagccccccactgcaccccgc

SEQ ID NO: 7023 - DNA, 21 bp, Artificial Sequence
  Synthetic
agatccatgcggggtgcagtg

SEQ ID NO: 7024 - DNA, 21 bp, Artificial Sequence
  Synthetic
cagatccatgcggggtgcagt

SEQ ID NO: 7025 - DNA, 21 bp, Artificial Sequence
  Synthetic
gcagatccatgcggggtgcag

SEQ ID NO: 7026 - DNA, 21 bp, Artificial Sequence
  Synthetic
tgcagatccatgcggggtgca

SEQ ID NO: 7027 - DNA, 21 bp, Artificial Sequence
  Synthetic
gctggctgctgcagatccatg

SEQ ID NO: 7028 - DNA, 21 bp, Artificial Sequence
  Synthetic
agctggctgctgcagatccat

SEQ ID NO: 7029 - DNA, 21 bp, Artificial Sequence
  Synthetic
ctgcagcagccagctgccaac

SEQ ID NO: 7030 - DNA, 21 bp, Artificial Sequence
  Synthetic
agcagccagctgccaacctga

SEQ ID NO: 7031 - DNA, 21 bp, Artificial Sequence
  Synthetic
tgagtgagctgtgccgcagtt

SEQ ID NO: 7032 - DNA, 21 bp, Artificial Sequence
  Synthetic
tgccgcagttgtgagcacccc

SEQ ID NO: 7033 - DNA, 21 bp, Artificial Sequence
  Synthetic
gggcgctgcctgccttaccca

SEQ ID NO: 7034 - DNA, 21 bp, Artificial Sequence
  Synthetic
gcagctgaccacgtatcccac

SEQ ID NO: 7035 - DNA, 21 bp, Artificial Sequence
  Synthetic
cagctgaccacgtatcccact

SEQ ID NO: 7036 - DNA, 21 bp, Artificial Sequence
  Synthetic
gctgaccacgtatcccacttg

SEQ ID NO: 7037 - DNA, 21 bp, Artificial Sequence
  Synthetic
tatcccacttggagaatgtgt

SEQ ID NO: 7038 - DNA, 21 bp, Artificial Sequence
  Synthetic
tcctctgacacattctccaag

SEQ ID NO: 7039 - DNA, 21 bp, Artificial Sequence
  Synthetic
tcccacttggagaatgtgtca

SEQ ID NO: 7040 - DNA, 21 bp, Artificial Sequence
  Synthetic
atcctctgacacattctccaa

SEQ ID NO: 7041 - DNA, 21 bp, Artificial Sequence
  Synthetic
acttggagaatgtgtcagagg

SEQ ID NO: 7042 - DNA, 21 bp, Artificial Sequence
  Synthetic
gaggatgagataaaccgactg

SEQ ID NO: 7043 - DNA, 21 bp, Artificial Sequence
  Synthetic
aggatgagataaaccgactgc

SEQ ID NO: 7044 - DNA, 21 bp, Artificial Sequence
  Synthetic
ggatgagataaaccgactgct

SEQ ID NO: 7045 - DNA, 21 bp, Artificial Sequence
  Synthetic
aaccgactgctggggatggtg

SEQ ID NO: 7046 - DNA, 21 bp, Artificial Sequence
  Synthetic
ctgctggggatggtggtggat

SEQ ID NO: 7047 - DNA, 21 bp, Artificial Sequence
  Synthetic
tgctggggatggtggtggatg

SEQ ID NO: 7048 - DNA, 21 bp, Artificial Sequence
  Synthetic
ctggggatggtggtggatgtg

SEQ ID NO: 7049 - DNA, 21 bp, Artificial Sequence
  Synthetic
aatctcttcatgtctgttcac

SEQ ID NO: 7050 - DNA, 21 bp, Artificial Sequence
  Synthetic
atctcttcatgtctgttcaca

SEQ ID NO: 7051 - DNA, 21 bp, Artificial Sequence
  Synthetic
tcttccttgtgaacagacatg

SEQ ID NO: 7052 - DNA, 21 bp, Artificial Sequence
  Synthetic
tcttcatgtctgttcacaagg

SEQ ID NO: 7053 - DNA, 21 bp, Artificial Sequence
  Synthetic
tcctcttccttgtgaacagac

SEQ ID NO: 7054 - DNA, 21 bp, Artificial Sequence
  Synthetic
ttcatgtctgttcacaaggaa

SEQ ID NO: 7055 - DNA, 21 bp, Artificial Sequence
  Synthetic
ggtgtctgtgtcctcttcctt

SEQ ID NO: 7056 - DNA, 21 bp, Artificial Sequence
  Synthetic
gtctatttctacctcttcaag

SEQ ID NO: 7057 - DNA, 21 bp, Artificial Sequence
  Synthetic
tggaagctcaccttgaagagg

SEQ ID NO: 7058 - DNA, 21 bp, Artificial Sequence
  Synthetic
ctttagtggaagctcaccttg

SEQ ID NO: 7059 - DNA, 21 bp, Artificial Sequence
  Synthetic
ttcctcttctctctagctact

SEQ ID NO: 7060 - DNA, 21 bp, Artificial Sequence
  Synthetic
tcctcttctctctagctactg

SEQ ID NO: 7061 - DNA, 21 bp, Artificial Sequence
  Synthetic
aggatgcatttccgcagtagc

SEQ ID NO: 7062 - DNA, 21 bp, Artificial Sequence
  Synthetic
caccacaggccgggtcatctg

SEQ ID NO: 7063 - DNA, 21 bp, Artificial Sequence
  Synthetic
ctgcagatgacccggcctgtg

SEQ ID NO: 7064 - DNA, 21 bp, Artificial Sequence
  Synthetic
tgcagatgacccggcctgtgg

SEQ ID NO: 7065 - DNA, 21 bp, Artificial Sequence
  Synthetic
cagatgacccggcctgtggtg

SEQ ID NO: 7066 - DNA, 21 bp, Artificial Sequence
  Synthetic
agatgacccggcctgtggtgg

SEQ ID NO: 7067 - DNA, 21 bp, Artificial Sequence
  Synthetic
cagggacccctccaccacagg

SEQ ID NO: 7068 - DNA, 21 bp, Artificial Sequence
  Synthetic
cggcctgtggtggaggggtcc

SEQ ID NO: 7069 - DNA, 21 bp, Artificial Sequence
  Synthetic
ggtccctgggcagccctccat

SEQ ID NO: 7070 - DNA, 21 bp, Artificial Sequence
  Synthetic
ttctcaaatggagggctgccc

SEQ ID NO: 7071 - DNA, 21 bp, Artificial Sequence
  Synthetic
tccctgggcagccctccattt

SEQ ID NO: 7072 - DNA, 21 bp, Artificial Sequence
  Synthetic
tttctcaaatggagggctgcc

SEQ ID NO: 7073 - DNA, 21 bp, Artificial Sequence
  Synthetic
caatattaggtttctcaaatg

SEQ ID NO: 7074 - DNA, 21 bp, Artificial Sequence
  Synthetic
ctcaatattaggtttctcaaa

SEQ ID NO: 7075 - DNA, 21 bp, Artificial Sequence
  Synthetic
ctccatttgagaaacctaata

SEQ ID NO: 7076 - DNA, 21 bp, Artificial Sequence
  Synthetic
gctcaatattaggtttctcaa

SEQ ID NO: 7077 - DNA, 21 bp, Artificial Sequence
  Synthetic
gagaaacctaatattgagcag

SEQ ID NO: 7078 - DNA, 21 bp, Artificial Sequence
  Synthetic
cccaccccttctcagggtgtg

SEQ ID NO: 7079 - DNA, 21 bp, Artificial Sequence
  Synthetic
gcacaaagttcagcacaccct

SEQ ID NO: 7080 - DNA, 21 bp, Artificial Sequence
  Synthetic
ctgcacaaagttcagcacacc

SEQ ID NO: 7081 - DNA, 21 bp, Artificial Sequence
  Synthetic
caagtttagtcacctggctcc

SEQ ID NO: 7082 - DNA, 21 bp, Artificial Sequence
  Synthetic
aagtttagtcacctggctccc

SEQ ID NO: 7083 - DNA, 21 bp, Artificial Sequence
  Synthetic
agtttagtcacctggctcccc

SEQ ID NO: 7084 - DNA, 21 bp, Artificial Sequence
  Synthetic
gaacatcgtctgccgctcccg

SEQ ID NO: 7085 - DNA, 21 bp, Artificial Sequence
  Synthetic
cgaacatcgtctgccgctccc

SEQ ID NO: 7086 - DNA, 21 bp, Artificial Sequence
  Synthetic
tcgaacatcgtctgccgctcc

SEQ ID NO: 7087 - DNA, 21 bp, Artificial Sequence
  Synthetic
ctcgaacatcgtctgccgctc

SEQ ID NO: 7088 - DNA, 21 bp, Artificial Sequence
  Synthetic
cccgggagcggcagacgatgt

SEQ ID NO: 7089 - DNA, 21 bp, Artificial Sequence
  Synthetic
agcaagaacatctttgagagc

SEQ ID NO: 7090 - DNA, 21 bp, Artificial Sequence
  Synthetic
aggcagagcaagaacatcttt

SEQ ID NO: 7091 - DNA, 21 bp, Artificial Sequence
  Synthetic
taaggcagagcaagaacatct

SEQ ID NO: 7092 - DNA, 21 bp, Artificial Sequence
  Synthetic
gttcttgctctgccttaacta

SEQ ID NO: 7093 - DNA, 21 bp, Artificial Sequence
  Synthetic
ttccagtagttaaggcagagc

SEQ ID NO: 7094 - DNA, 21 bp, Artificial Sequence
  Synthetic
ttcttgctctgccttaactac

SEQ ID NO: 7095 - DNA, 21 bp, Artificial Sequence
  Synthetic
tcaagcttccagtagttaagg

SEQ ID NO: 7096 - DNA, 21 bp, Artificial Sequence
  Synthetic
tctgccttaactactggaagc

SEQ ID NO: 7097 - DNA, 21 bp, Artificial Sequence
  Synthetic
gagacacctgcccagtttcgg

SEQ ID NO: 7098 - DNA, 21 bp, Artificial Sequence
  Synthetic
agcctgagacctctgccgaaa

SEQ ID NO: 7099 - DNA, 21 bp, Artificial Sequence
  Synthetic
agtttcggcagaggtctcagg

SEQ ID NO: 7100 - DNA, 21 bp, Artificial Sequence
  Synthetic
tttcggcagaggtctcaggct

SEQ ID NO: 7101 - DNA, 21 bp, Artificial Sequence
  Synthetic
gtcctcagcctgagacctctg

SEQ ID NO: 7102 - DNA, 21 bp, Artificial Sequence
  Synthetic
gtaggtagccacgtcctcagc

SEQ ID NO: 7103 - DNA, 21 bp, Artificial Sequence
  Synthetic
cgtggcagtaacagagccatc

SEQ ID NO: 7104 - DNA, 21 bp, Artificial Sequence
  Synthetic
acgtggcagtaacagagccat

SEQ ID NO: 7105 - DNA, 21 bp, Artificial Sequence
  Synthetic
ctctggggcacgtggcagtaa

SEQ ID NO: 7106 - DNA, 21 bp, Artificial Sequence
  Synthetic
ctctgttactgccacgtgccc

SEQ ID NO: 7107 - DNA, 21 bp, Artificial Sequence
  Synthetic
cgggggaggctatcacagctc

SEQ ID NO: 7108 - DNA, 21 bp, Artificial Sequence
  Synthetic
gcgggggaggctatcacagct

SEQ ID NO: 7109 - DNA, 21 bp, Artificial Sequence
  Synthetic
gctgtgatagcctcccccgct

SEQ ID NO: 7110 - DNA, 21 bp, Artificial Sequence
  Synthetic
acatgagtggtttcgtagcgg

SEQ ID NO: 7111 - DNA, 21 bp, Artificial Sequence
  Synthetic
gacatgagtggtttcgtagcg

SEQ ID NO: 7112 - DNA, 21 bp, Artificial Sequence
  Synthetic
agacatgagtggtttcgtagc

SEQ ID NO: 7113 - DNA, 21 bp, Artificial Sequence
  Synthetic
aagacatgagtggtttcgtag

SEQ ID NO: 7114 - DNA, 21 bp, Artificial Sequence
  Synthetic
aaagacatgagtggtttcgta

SEQ ID NO: 7115 - DNA, 21 bp, Artificial Sequence
  Synthetic
gctacgaaaccactcatgtct

SEQ ID NO: 7116 - DNA, 21 bp, Artificial Sequence
  Synthetic
cgaaaccactcatgtctttgg

SEQ ID NO: 7117 - DNA, 21 bp, Artificial Sequence
  Synthetic
gagaaggcttcgcccaaagac

SEQ ID NO: 7118 - DNA, 21 bp, Artificial Sequence
  Synthetic
ggtaacggtgaaaatggaccg

SEQ ID NO: 7119 - DNA, 21 bp, Artificial Sequence
  Synthetic
cgggtaacggtgaaaatggac

SEQ ID NO: 7120 - DNA, 21 bp, Artificial Sequence
  Synthetic
gcgggtaacggtgaaaatgga

SEQ ID NO: 7121 - DNA, 21 bp, Artificial Sequence
  Synthetic
tgccggcgggtaacggtgaaa

SEQ ID NO: 7122 - DNA, 21 bp, Artificial Sequence
  Synthetic
agcagctgccggcgggtaacg

SEQ ID NO: 7123 - DNA, 21 bp, Artificial Sequence
  Synthetic
accgttacccgccggcagctg

SEQ ID NO: 7124 - DNA, 21 bp, Artificial Sequence
  Synthetic
ccgttacccgccggcagctgc

SEQ ID NO: 7125 - DNA, 21 bp, Artificial Sequence
  Synthetic
ccggcagctgctggaaaagtt

SEQ ID NO: 7126 - DNA, 21 bp, Artificial Sequence
  Synthetic
cacaagactctggccttgatc

SEQ ID NO: 7127 - DNA, 21 bp, Artificial Sequence
  Synthetic
agactctggccttgatcaagg

SEQ ID NO: 7128 - DNA, 21 bp, Artificial Sequence
  Synthetic
ccgcccatccttgatcaaggc

SEQ ID NO: 7129 - DNA, 21 bp, Artificial Sequence
  Synthetic
tctggccttgatcaaggatgg

SEQ ID NO: 7130 - DNA, 21 bp, Artificial Sequence
  Synthetic
tgcttccgcatgtttcccacc

SEQ ID NO: 7131 - DNA, 21 bp, Artificial Sequence
  Synthetic
aagccctgggtgggaaacatg

SEQ ID NO: 7132 - DNA, 21 bp, Artificial Sequence
  Synthetic
gaagccctgggtgggaaacat

SEQ ID NO: 7133 - DNA, 21 bp, Artificial Sequence
  Synthetic
atgtttcccacccagggcttc

SEQ ID NO: 7134 - DNA, 21 bp, Artificial Sequence
  Synthetic
tgtttcccacccagggcttca

SEQ ID NO: 7135 - DNA, 21 bp, Artificial Sequence
  Synthetic
aatctccgtgaagccctgggt

SEQ ID NO: 7136 - DNA, 21 bp, Artificial Sequence
  Synthetic
caatctccgtgaagccctggg

SEQ ID NO: 7137 - DNA, 21 bp, Artificial Sequence
  Synthetic
acaatctccgtgaagccctgg

SEQ ID NO: 7138 - DNA, 21 bp, Artificial Sequence
  Synthetic
gaagacaatctccgtgaagcc

SEQ ID NO: 7139 - DNA, 21 bp, Artificial Sequence
  Synthetic
acagcacagaagacaatctcc

SEQ ID NO: 7140 - DNA, 21 bp, Artificial Sequence
  Synthetic
attgtcttctgtgctgtcacc

SEQ ID NO: 7141 - DNA, 21 bp, Artificial Sequence
  Synthetic
tcttctgtgctgtcacctcga

SEQ ID NO: 7142 - DNA, 21 bp, Artificial Sequence
  Synthetic
tgctcattcgaggtgacagca

SEQ ID NO: 7143 - DNA, 21 bp, Artificial Sequence
  Synthetic
acctcgaatgagcaggtcaag

SEQ ID NO: 7144 - DNA, 21 bp, Artificial Sequence
  Synthetic
cgctcaccttgacctgctcat

SEQ ID NO: 7145 - DNA, 21 bp, Artificial Sequence
  Synthetic
gcttccctcccccgcagggtt

SEQ ID NO: 7146 - DNA, 21 bp, Artificial Sequence
  Synthetic
cttccctcccccgcagggtta

SEQ ID NO: 7147 - DNA, 21 bp, Artificial Sequence
  Synthetic
tcaggtgggtcccataaccct

SEQ ID NO: 7148 - DNA, 21 bp, Artificial Sequence
  Synthetic
cagggttatgggacccacctg

SEQ ID NO: 7149 - DNA, 21 bp, Artificial Sequence
  Synthetic
gggacccacctgatgaaccac

SEQ ID NO: 7150 - DNA, 21 bp, Artificial Sequence
  Synthetic
acccacctgatgaaccacctg

SEQ ID NO: 7151 - DNA, 21 bp, Artificial Sequence
  Synthetic
ctccttcaggtggttcatcag

SEQ ID NO: 7152 - DNA, 21 bp, Artificial Sequence
  Synthetic
cccacctgatgaaccacctga

SEQ ID NO: 7153 - DNA, 21 bp, Artificial Sequence
  Synthetic
gtcggcgtaggtgaggaagta

SEQ ID NO: 7154 - DNA, 21 bp, Artificial Sequence
  Synthetic
tcgtcggcgtaggtgaggaag

SEQ ID NO: 7155 - DNA, 21 bp, Artificial Sequence
  Synthetic
tctacttcctcacctacgccg

SEQ ID NO: 7156 - DNA, 21 bp, Artificial Sequence
  Synthetic
gcgtactcgtcggcgtaggtg

SEQ ID NO: 7157 - DNA, 21 bp, Artificial Sequence
  Synthetic
ggcgtactcgtcggcgtaggt

SEQ ID NO: 7158 - DNA, 21 bp, Artificial Sequence
  Synthetic
atggcgtactcgtcggcgtag

SEQ ID NO: 7159 - DNA, 21 bp, Artificial Sequence
  Synthetic
aggctacgggtcacctgcttt

SEQ ID NO: 7160 - DNA, 21 bp, Artificial Sequence
  Synthetic
tccaccccccagggtttctcc

SEQ ID NO: 7161 - DNA, 21 bp, Artificial Sequence
  Synthetic
tgatgtccttggagaaaccct

SEQ ID NO: 7162 - DNA, 21 bp, Artificial Sequence
  Synthetic
ttgatgtccttggagaaaccc

SEQ ID NO: 7163 - DNA, 21 bp, Artificial Sequence
  Synthetic
cttgatgtccttggagaaacc

SEQ ID NO: 7164 - DNA, 21 bp, Artificial Sequence
  Synthetic
tgagcactgtgccgcctgcaa

SEQ ID NO: 7165 - DNA, 21 bp, Artificial Sequence
  Synthetic
agcactgtgccgcctgcaagc

SEQ ID NO: 7166 - DNA, 21 bp, Artificial Sequence
  Synthetic
gcactgtgccgcctgcaagcg

SEQ ID NO: 7167 - DNA, 21 bp, Artificial Sequence
  Synthetic
ctgcagccctgcggcacctgc

SEQ ID NO: 7168 - DNA, 21 bp, Artificial Sequence
  Synthetic
tgcagccctgcggcacctgcc

SEQ ID NO: 7169 - DNA, 21 bp, Artificial Sequence
  Synthetic
gcagccctgcggcacctgccc

SEQ ID NO: 7170 - DNA, 21 bp, Artificial Sequence
  Synthetic
taggcccccgggcaggtgccg

SEQ ID NO: 7171 - DNA, 21 bp, Artificial Sequence
  Synthetic
ggcagctgaggtggtaggccc

SEQ ID NO: 7172 - DNA, 21 bp, Artificial Sequence
  Synthetic
ggggcctaccacctcagctgc

SEQ ID NO: 7173 - DNA, 21 bp, Artificial Sequence
  Synthetic
gggcctaccacctcagctgcc

SEQ ID NO: 7174 - DNA, 21 bp, Artificial Sequence
  Synthetic
ttgaggggcggctccaggcag

SEQ ID NO: 7175 - DNA, 21 bp, Artificial Sequence
  Synthetic
ccgcccctcaagacggcgccc

SEQ ID NO: 7176 - DNA, 21 bp, Artificial Sequence
  Synthetic
acgcccttgggcgccgtcttg

SEQ ID NO: 7177 - DNA, 21 bp, Artificial Sequence
  Synthetic
cacgcccttgggcgccgtctt

SEQ ID NO: 7178 - DNA, 21 bp, Artificial Sequence
  Synthetic
cacacgcccttgggcgccgtc

SEQ ID NO: 7179 - DNA, 21 bp, Artificial Sequence
  Synthetic
caagacggcgcccaagggcgt

SEQ ID NO: 7180 - DNA, 21 bp, Artificial Sequence
  Synthetic
ctggggcacacccacacgccc

SEQ ID NO: 7181 - DNA, 21 bp, Artificial Sequence
  Synthetic
tgggtgtgccccaggtgccag

SEQ ID NO: 7182 - DNA, 21 bp, Artificial Sequence
  Synthetic
cctgtaccttctgctggcacc

SEQ ID NO: 7183 - DNA, 21 bp, Artificial Sequence
  Synthetic
tcctgtaccttctgctggcac

SEQ ID NO: 7184 - DNA, 21 bp, Artificial Sequence
  Synthetic
catgggctaggaaacactgga

SEQ ID NO: 7185 - DNA, 21 bp, Artificial Sequence
  Synthetic
tcatgggctaggaaacactgg

SEQ ID NO: 7186 - DNA, 21 bp, Artificial Sequence
  Synthetic
tggtcatgggctaggaaacac

SEQ ID NO: 7187 - DNA, 21 bp, Artificial Sequence
  Synthetic
ctggtcatgggctaggaaaca

SEQ ID NO: 7188 - DNA, 21 bp, Artificial Sequence
  Synthetic
cgcacagcctggtcatgggct

SEQ ID NO: 7189 - DNA, 21 bp, Artificial Sequence
  Synthetic
acgcacagcctggtcatgggc

SEQ ID NO: 7190 - DNA, 21 bp, Artificial Sequence
  Synthetic
aagggtacgcacagcctggtc

SEQ ID NO: 7191 - DNA, 21 bp, Artificial Sequence
  Synthetic
cctgttagctttgcaccattg

SEQ ID NO: 7192 - DNA, 21 bp, Artificial Sequence
  Synthetic
atacctgttagctttgcacca

SEQ ID NO: 7193 - DNA, 21 bp, Artificial Sequence
  Synthetic
aatggtgcaaagctaacaggt

SEQ ID NO: 7194 - DNA, 21 bp, Artificial Sequence
  Synthetic
tacagccatttccttgtctct

SEQ ID NO: 7195 - DNA, 21 bp, Artificial Sequence
  Synthetic
acagccatttccttgtctctg

SEQ ID NO: 7196 - DNA, 21 bp, Artificial Sequence
  Synthetic
cagccatttccttgtctctgc

SEQ ID NO: 7197 - DNA, 21 bp, Artificial Sequence
  Synthetic
agccatttccttgtctctgcg

SEQ ID NO: 7198 - DNA, 21 bp, Artificial Sequence
  Synthetic
cggtcactccccgcagagaca

SEQ ID NO: 7199 - DNA, 21 bp, Artificial Sequence
  Synthetic
ccggtcactccccgcagagac

SEQ ID NO: 7200 - DNA, 21 bp, Artificial Sequence
  Synthetic
ccttgtctctgcggggagtga

SEQ ID NO: 7201 - DNA, 21 bp, Artificial Sequence
  Synthetic
cttgtctctgcggggagtgac

SEQ ID NO: 7202 - DNA, 21 bp, Artificial Sequence
  Synthetic
gagtgaccggaaaatcaaatt

SEQ ID NO: 7203 - DNA, 21 bp, Artificial Sequence
  Synthetic
agtgaccggaaaatcaaattc

SEQ ID NO: 7204 - DNA, 21 bp, Artificial Sequence
  Synthetic
tcgtaaggacgtcgaaggtcc

SEQ ID NO: 7205 - DNA, 21 bp, Artificial Sequence
  Synthetic
tatggggctctcagagattat

SEQ ID NO: 7206 - DNA, 21 bp, Artificial Sequence
  Synthetic
agagattatcagaagattggc

SEQ ID NO: 7207 - DNA, 21 bp, Artificial Sequence
  Synthetic
ggactggctggccaaacttta

SEQ ID NO: 7208 - DNA, 21 bp, Artificial Sequence
  Synthetic
gactggctggccaaactttac

SEQ ID NO: 7209 - DNA, 21 bp, Artificial Sequence
  Synthetic
tggctggccaaactttacagg

SEQ ID NO: 7210 - DNA, 21 bp, Artificial Sequence
  Synthetic
atctcaatggcatattggcag

SEQ ID NO: 7211 - DNA, 21 bp, Artificial Sequence
  Synthetic
gcttcatctgccaatatgcca

SEQ ID NO: 7212 - DNA, 21 bp, Artificial Sequence
  Synthetic
atggcatattggcagatgaag

SEQ ID NO: 7213 - DNA, 21 bp, Artificial Sequence
  Synthetic
atattggcagatgaagctggg

SEQ ID NO: 7214 - DNA, 21 bp, Artificial Sequence
  Synthetic
cttaccttcgttacaagctag

SEQ ID NO: 7215 - DNA, 21 bp, Artificial Sequence
  Synthetic
cacctagcttgtaacgaaggt

SEQ ID NO: 7216 - DNA, 21 bp, Artificial Sequence
  Synthetic
tggggcccccatcttgttgtt

SEQ ID NO: 7217 - DNA, 21 bp, Artificial Sequence
  Synthetic
gggcccccatcttgttgttgt

SEQ ID NO: 7218 - DNA, 21 bp, Artificial Sequence
  Synthetic
aacttctcacaacaacaagat

SEQ ID NO: 7219 - DNA, 21 bp, Artificial Sequence
  Synthetic
caacttctcacaacaacaaga

SEQ ID NO: 7220 - DNA, 21 bp, Artificial Sequence
  Synthetic
acaacttctcacaacaacaag

SEQ ID NO: 7221 - DNA, 21 bp, Artificial Sequence
  Synthetic
gagaagttgtaacatactcaa

SEQ ID NO: 7222 - DNA, 21 bp, Artificial Sequence
  Synthetic
agaagttgtaacatactcaag

SEQ ID NO: 7223 - DNA, 21 bp, Artificial Sequence
  Synthetic
gaagttgtaacatactcaagt

SEQ ID NO: 7224 - DNA, 21 bp, Artificial Sequence
  Synthetic
gtaacatactcaagtgggagc

SEQ ID NO: 7225 - DNA, 21 bp, Artificial Sequence
  Synthetic
atactcaagtgggagcttgaa

SEQ ID NO: 7226 - DNA, 21 bp, Artificial Sequence
  Synthetic
cgtttcaattcaagctcccac

SEQ ID NO: 7227 - DNA, 21 bp, Artificial Sequence
  Synthetic
ttgaattgaaacgttggtgtc

SEQ ID NO: 7228 - DNA, 21 bp, Artificial Sequence
  Synthetic
ctgccaatatatgagaggatt

SEQ ID NO: 7229 - DNA, 21 bp, Artificial Sequence
  Synthetic
tctgtggctgccaatatatga

SEQ ID NO: 7230 - DNA, 21 bp, Artificial Sequence
  Synthetic
cctctcatatattggcagcca

SEQ ID NO: 7231 - DNA, 21 bp, Artificial Sequence
  Synthetic
tctctgtggctgccaatatat

SEQ ID NO: 7232 - DNA, 21 bp, Artificial Sequence
  Synthetic
tctcatatattggcagccaca

SEQ ID NO: 7233 - DNA, 21 bp, Artificial Sequence
  Synthetic
gttctctgtggctgccaatat

SEQ ID NO: 7234 - DNA, 21 bp, Artificial Sequence
  Synthetic
agccacagagaactcaaagca

SEQ ID NO: 7235 - DNA, 21 bp, Artificial Sequence
  Synthetic
aaaaatacctgtctctttgct

SEQ ID NO: 7236 - DNA, 21 bp, Artificial Sequence
  Synthetic
tctctgtgctgcaggagtggg

SEQ ID NO: 7237 - DNA, 21 bp, Artificial Sequence
  Synthetic
gtgatgcagacgtggaagctg

SEQ ID NO: 7238 - DNA, 21 bp, Artificial Sequence
  Synthetic
gtgtaggacgtgatgcagacg

SEQ ID NO: 7239 - DNA, 21 bp, Artificial Sequence
  Synthetic
agtgtaggacgtgatgcagac

SEQ ID NO: 7240 - DNA, 21 bp, Artificial Sequence
  Synthetic
cacgtcctacactcagttctt

SEQ ID NO: 7241 - DNA, 21 bp, Artificial Sequence
  Synthetic
acgtcctacactcagttcttc

SEQ ID NO: 7242 - DNA, 21 bp, Artificial Sequence
  Synthetic
aggccccggaagaactgagtg

SEQ ID NO: 7243 - DNA, 21 bp, Artificial Sequence
  Synthetic
ggcggtgaggccccggaagaa

SEQ ID NO: 7244 - DNA, 21 bp, Artificial Sequence
  Synthetic
gtgaaggcggtgaggccccgg

SEQ ID NO: 7245 - DNA, 21 bp, Artificial Sequence
  Synthetic
cgtgtgaaggcggtgaggccc

SEQ ID NO: 7246 - DNA, 21 bp, Artificial Sequence
  Synthetic
tcgtgtgaaggcggtgaggcc

SEQ ID NO: 7247 - DNA, 21 bp, Artificial Sequence
  Synthetic
ccggggcctcaccgccttcac

SEQ ID NO: 7248 - DNA, 21 bp, Artificial Sequence
  Synthetic
cagcgcactcgtgtgaaggcg

SEQ ID NO: 7249 - DNA, 21 bp, Artificial Sequence
  Synthetic
caccgccttcacacgagtgcg

SEQ ID NO: 7250 - DNA, 21 bp, Artificial Sequence
  Synthetic
accgccttcacacgagtgcgc

SEQ ID NO: 7251 - DNA, 21 bp, Artificial Sequence
  Synthetic
aggcacttccagcgcactcgt

SEQ ID NO: 7252 - DNA, 21 bp, Artificial Sequence
  Synthetic
gctggaagtgcctggtcattg

SEQ ID NO: 7253 - DNA, 21 bp, Artificial Sequence
  Synthetic
gtcattgatgagatgcagcgc

SEQ ID NO: 7254 - DNA, 21 bp, Artificial Sequence
  Synthetic
attgatgagatgcagcgcgtg

SEQ ID NO: 7255 - DNA, 21 bp, Artificial Sequence
  Synthetic
tgcagcgcgtgaagggcatga

SEQ ID NO: 7256 - DNA, 21 bp, Artificial Sequence
  Synthetic
cagcgcgtgaagggcatgacc

SEQ ID NO: 7257 - DNA, 21 bp, Artificial Sequence
  Synthetic
gaagggcatgaccgagaggca

SEQ ID NO: 7258 - DNA, 21 bp, Artificial Sequence
  Synthetic
aagggcatgaccgagaggcac

SEQ ID NO: 7259 - DNA, 21 bp, Artificial Sequence
  Synthetic
agggcatgaccgagaggcact

SEQ ID NO: 7260 - DNA, 21 bp, Artificial Sequence
  Synthetic
taacacacagacctctgcagg

SEQ ID NO: 7261 - DNA, 21 bp, Artificial Sequence
  Synthetic
cgcgtaacacacagacctctg

SEQ ID NO: 7262 - DNA, 21 bp, Artificial Sequence
  Synthetic
attgtgcagcggcgagtcgat

SEQ ID NO: 7263 - DNA, 21 bp, Artificial Sequence
  Synthetic
ccaggaaggtattgtgcagcg

SEQ ID NO: 7264 - DNA, 21 bp, Artificial Sequence
  Synthetic
tcgccgctgcacaataccttc

SEQ ID NO: 7265 - DNA, 21 bp, Artificial Sequence
  Synthetic
cgccgctgcacaataccttcc

SEQ ID NO: 7266 - DNA, 21 bp, Artificial Sequence
  Synthetic
gcacaataccttcctggagct

SEQ ID NO: 7267 - DNA, 21 bp, Artificial Sequence
  Synthetic
tgcaccatggtccagagctcc

SEQ ID NO: 7268 - DNA, 21 bp, Artificial Sequence
  Synthetic
gtgcaccatggtccagagctc

SEQ ID NO: 7269 - DNA, 21 bp, Artificial Sequence
  Synthetic
accaggaagtgcaccatggtc

SEQ ID NO: 7270 - DNA, 21 bp, Artificial Sequence
  Synthetic
ccatggtgcacttcctggtcc

SEQ ID NO: 7271 - DNA, 21 bp, Artificial Sequence
  Synthetic
catggtgcacttcctggtccc

SEQ ID NO: 7272 - DNA, 21 bp, Artificial Sequence
  Synthetic
ggcctggagatccctgggacc

SEQ ID NO: 7273 - DNA, 21 bp, Artificial Sequence
  Synthetic
gggcctggagatccctgggac

SEQ ID NO: 7274 - DNA, 21 bp, Artificial Sequence
  Synthetic
caggtagggcctggagatccc

SEQ ID NO: 7275 - DNA, 21 bp, Artificial Sequence
  Synthetic
tcaggtagggcctggagatcc

SEQ ID NO: 7276 - DNA, 21 bp, Artificial Sequence
  Synthetic
ccagggatctccaggccctac

SEQ ID NO: 7277 - DNA, 21 bp, Artificial Sequence
  Synthetic
gaggggagctcaggtagggcc

SEQ ID NO: 7278 - DNA, 21 bp, Artificial Sequence
  Synthetic
agaggggagctcaggtagggc

SEQ ID NO: 7279 - DNA, 21 bp, Artificial Sequence
  Synthetic
aggccctacctgagctcccct

SEQ ID NO: 7280 - DNA, 21 bp, Artificial Sequence
  Synthetic
gccctacctgagctcccctct

SEQ ID NO: 7281 - DNA, 21 bp, Artificial Sequence
  Synthetic
gccctcagaggggagctcagg

SEQ ID NO: 7282 - DNA, 21 bp, Artificial Sequence
  Synthetic
gctcccctctgagggccccca

SEQ ID NO: 7283 - DNA, 21 bp, Artificial Sequence
  Synthetic
cttcactgggggccctcagag

SEQ ID NO: 7284 - DNA, 21 bp, Artificial Sequence
  Synthetic
tcttcactgggggccctcaga

SEQ ID NO: 7285 - DNA, 21 bp, Artificial Sequence
  Synthetic
ctcttcactgggggccctcag

SEQ ID NO: 7286 - DNA, 21 bp, Artificial Sequence
  Synthetic
cccctctgagggcccccagtg

SEQ ID NO: 7287 - DNA, 21 bp, Artificial Sequence
  Synthetic
tctcttcactgggggccctca

SEQ ID NO: 7288 - DNA, 21 bp, Artificial Sequence
  Synthetic
cctctgagggcccccagtgaa

SEQ ID NO: 7289 - DNA, 21 bp, Artificial Sequence
  Synthetic
gctctcttcactgggggccct

SEQ ID NO: 7290 - DNA, 21 bp, Artificial Sequence
  Synthetic
agggcccccagtgaagagagc

SEQ ID NO: 7291 - DNA, 21 bp, Artificial Sequence
  Synthetic
gtaatcctggctctcttcact

SEQ ID NO: 7292 - DNA, 21 bp, Artificial Sequence
  Synthetic
agtaatcctggctctcttcac

SEQ ID NO: 7293 - DNA, 21 bp, Artificial Sequence
  Synthetic
tagtaatcctggctctcttca

SEQ ID NO: 7294 - DNA, 21 bp, Artificial Sequence
  Synthetic
taaagtggtcataaggttaca

SEQ ID NO: 7295 - DNA, 21 bp, Artificial Sequence
  Synthetic
caaaataaatggctgtgtcac

SEQ ID NO: 7296 - DNA, 21 bp, Artificial Sequence
  Synthetic
caggtgacacagccatttatt

SEQ ID NO: 7297 - DNA, 21 bp, Artificial Sequence
  Synthetic
ttgaggagaactaagagagat

SEQ ID NO: 7298 - DNA, 21 bp, Artificial Sequence
  Synthetic
tgaggagaactaagagagatg

SEQ ID NO: 7299 - DNA, 21 bp, Artificial Sequence
  Synthetic
gatgtggaaaagcaactaaca

SEQ ID NO: 7300 - DNA, 21 bp, Artificial Sequence
  Synthetic
aaaagcaactaacaaagaaat

SEQ ID NO: 7301 - DNA, 21 bp, Artificial Sequence
  Synthetic
acaaagaaatatgagcatgtt

SEQ ID NO: 7302 - DNA, 21 bp, Artificial Sequence
  Synthetic
ctaaccgacaaaaagccttat

SEQ ID NO: 7303 - DNA, 21 bp, Artificial Sequence
  Synthetic
aaccgacaaaaagccttatac

SEQ ID NO: 7304 - DNA, 21 bp, Artificial Sequence
  Synthetic
acgaggacgttatcctgcaac

SEQ ID NO: 7305 - DNA, 21 bp, Artificial Sequence
  Synthetic
ggacgttatcctgcaacctgg

SEQ ID NO: 7306 - DNA, 21 bp, Artificial Sequence
  Synthetic
agcccacactcacccaggttg

SEQ ID NO: 7307 - DNA, 21 bp, Artificial Sequence
  Synthetic
tctttctccacgggcagcact

SEQ ID NO: 7308 - DNA, 21 bp, Artificial Sequence
  Synthetic
ctttctccacgggcagcactc

SEQ ID NO: 7309 - DNA, 21 bp, Artificial Sequence
  Synthetic
acgggcagcactcaggaggcc

SEQ ID NO: 7310 - DNA, 21 bp, Artificial Sequence
  Synthetic
ggcagcactcaggaggccttg

SEQ ID NO: 7311 - DNA, 21 bp, Artificial Sequence
  Synthetic
gcactcaggaggccttgaaga

SEQ ID NO: 7312 - DNA, 21 bp, Artificial Sequence
  Synthetic
gtgcccgctcttcaaggcctc

SEQ ID NO: 7313 - DNA, 21 bp, Artificial Sequence
  Synthetic
agcgggcactttgtcaacgtc

SEQ ID NO: 7314 - DNA, 21 bp, Artificial Sequence
  Synthetic
ctgcagccgcacaaggatgct

SEQ ID NO: 7315 - DNA, 21 bp, Artificial Sequence
  Synthetic
gcagatgcgctgcagccgcac

SEQ ID NO: 7316 - DNA, 21 bp, Artificial Sequence
  Synthetic
tgcagcgcatctgcaaccacc

SEQ ID NO: 7317 - DNA, 21 bp, Artificial Sequence
  Synthetic
tctgcaaccaccctgggctcg

SEQ ID NO: 7318 - DNA, 21 bp, Artificial Sequence
  Synthetic
ggtgccggggctcgacgagcc

SEQ ID NO: 7319 - DNA, 21 bp, Artificial Sequence
  Synthetic
ttctggggacctttacgaggt

SEQ ID NO: 7320 - DNA, 21 bp, Artificial Sequence
  Synthetic
tcatcttgtatcgcaggttga

SEQ ID NO: 7321 - DNA, 21 bp, Artificial Sequence
  Synthetic
caggttgaaaggattgtagac

SEQ ID NO: 7322 - DNA, 21 bp, Artificial Sequence
  Synthetic
ggttgaaaggattgtagacaa

SEQ ID NO: 7323 - DNA, 21 bp, Artificial Sequence
  Synthetic
gttgaaaggattgtagacaag

SEQ ID NO: 7324 - DNA, 21 bp, Artificial Sequence
  Synthetic
gaaaggattgtagacaagagg

SEQ ID NO: 7325 - DNA, 21 bp, Artificial Sequence
  Synthetic
attgtagacaagaggaagaac

SEQ ID NO: 7326 - DNA, 21 bp, Artificial Sequence
  Synthetic
tagacaagaggaagaacaaga

SEQ ID NO: 7327 - DNA, 21 bp, Artificial Sequence
  Synthetic
agacaagaggaagaacaagaa

SEQ ID NO: 7328 - DNA, 21 bp, Artificial Sequence
  Synthetic
gaggaagaacaagaaaggaaa

SEQ ID NO: 7329 - DNA, 21 bp, Artificial Sequence
  Synthetic
aggaagaacaagaaaggaaaa

SEQ ID NO: 7330 - DNA, 21 bp, Artificial Sequence
  Synthetic
ggaagaacaagaaaggaaaat

SEQ ID NO: 7331 - DNA, 21 bp, Artificial Sequence
  Synthetic
aaaatgggagtatcttatccg

SEQ ID NO: 7332 - DNA, 21 bp, Artificial Sequence
  Synthetic
aaatgggagtatcttatccga

SEQ ID NO: 7333 - DNA, 21 bp, Artificial Sequence
  Synthetic
atcttatccgatggaaaggct

SEQ ID NO: 7334 - DNA, 21 bp, Artificial Sequence
  Synthetic
tcttatccgatggaaaggcta

SEQ ID NO: 7335 - DNA, 21 bp, Artificial Sequence
  Synthetic
cttatccgatggaaaggctac

SEQ ID NO: 7336 - DNA, 21 bp, Artificial Sequence
  Synthetic
ggtgctcccgtagcctttcca

SEQ ID NO: 7337 - DNA, 21 bp, Artificial Sequence
  Synthetic
gatggaaaggctacgggagca

SEQ ID NO: 7338 - DNA, 21 bp, Artificial Sequence
  Synthetic
tggaaaggctacgggagcacc

SEQ ID NO: 7339 - DNA, 21 bp, Artificial Sequence
  Synthetic
ctacgggagcaccgaggacac

SEQ ID NO: 7340 - DNA, 21 bp, Artificial Sequence
  Synthetic
tacgggagcaccgaggacacg

SEQ ID NO: 7341 - DNA, 21 bp, Artificial Sequence
  Synthetic
acgggagcaccgaggacacgt

SEQ ID NO: 7342 - DNA, 21 bp, Artificial Sequence
  Synthetic
agcaccgaggacacgtgggag

SEQ ID NO: 7343 - DNA, 21 bp, Artificial Sequence
  Synthetic
gcaccgaggacacgtgggagc

SEQ ID NO: 7344 - DNA, 21 bp, Artificial Sequence
  Synthetic
cggagcaccacctcttgcact

SEQ ID NO: 7345 - DNA, 21 bp, Artificial Sequence
  Synthetic
gagcaccacctcttgcactgt

SEQ ID NO: 7346 - DNA, 21 bp, Artificial Sequence
  Synthetic
agcaccacctcttgcactgtg

SEQ ID NO: 7347 - DNA, 21 bp, Artificial Sequence
  Synthetic
tcaataaactcctcacagtgc

SEQ ID NO: 7348 - DNA, 21 bp, Artificial Sequence
  Synthetic
tgcactgtgaggagtttattg

SEQ ID NO: 7349 - DNA, 21 bp, Artificial Sequence
  Synthetic
aggagtttattgatgaattca

SEQ ID NO: 7350 - DNA, 21 bp, Artificial Sequence
  Synthetic
ctgaggaagaacttgatcctg

SEQ ID NO: 7351 - DNA, 21 bp, Artificial Sequence
  Synthetic
gaggaagaacttgatcctgaa

SEQ ID NO: 7352 - DNA, 21 bp, Artificial Sequence
  Synthetic
ggaagaacttgatcctgaaga

SEQ ID NO: 7353 - DNA, 21 bp, Artificial Sequence
  Synthetic
gaagaacttgatcctgaagag

SEQ ID NO: 7354 - DNA, 21 bp, Artificial Sequence
  Synthetic
ggaggaagttgtccctctctt

SEQ ID NO: 7355 - DNA, 21 bp, Artificial Sequence
  Synthetic
ataaacttataaagctgctgg

SEQ ID NO: 7356 - DNA, 21 bp, Artificial Sequence
  Synthetic
cataaacttataaagctgctg

SEQ ID NO: 7357 - DNA, 21 bp, Artificial Sequence
  Synthetic
tccataaacttataaagctgc

SEQ ID NO: 7358 - DNA, 21 bp, Artificial Sequence
  Synthetic
ctccagcagctttataagttt

SEQ ID NO: 7359 - DNA, 21 bp, Artificial Sequence
  Synthetic
ttccataaacttataaagctg

SEQ ID NO: 7360 - DNA, 21 bp, Artificial Sequence
  Synthetic
tccagcagctttataagttta

SEQ ID NO: 7361 - DNA, 21 bp, Artificial Sequence
  Synthetic
gctttataagtttatggaaga

SEQ ID NO: 7362 - DNA, 21 bp, Artificial Sequence
  Synthetic
caaaacaggtggtttgttgat

SEQ ID NO: 7363 - DNA, 21 bp, Artificial Sequence
  Synthetic
ccaaaacaggtggtttgttga

SEQ ID NO: 7364 - DNA, 21 bp, Artificial Sequence
  Synthetic
ccaatcaacaaaccacctgtt

SEQ ID NO: 7365 - DNA, 21 bp, Artificial Sequence
  Synthetic
agtctgaagagtttgaagaga

SEQ ID NO: 7366 - DNA, 21 bp, Artificial Sequence
  Synthetic
taaaccagtctgaagagtttg

SEQ ID NO: 7367 - DNA, 21 bp, Artificial Sequence
  Synthetic
tgataaaccagtctgaagagt

SEQ ID NO: 7368 - DNA, 21 bp, Artificial Sequence
  Synthetic
ccctgatgataaaccagtctg

SEQ ID NO: 7369 - DNA, 21 bp, Artificial Sequence
  Synthetic
ctcttcagactggtttatcat

SEQ ID NO: 7370 - DNA, 21 bp, Artificial Sequence
  Synthetic
ccaccctgatgataaaccagt

SEQ ID NO: 7371 - DNA, 21 bp, Artificial Sequence
  Synthetic
tcagactggtttatcatcagg

SEQ ID NO: 7372 - DNA, 21 bp, Artificial Sequence
  Synthetic
catacagcaccactatcaatc

SEQ ID NO: 7373 - DNA, 21 bp, Artificial Sequence
  Synthetic
ccatacagcaccactatcaat

SEQ ID NO: 7374 - DNA, 21 bp, Artificial Sequence
  Synthetic
ccagattgatagtggtgctgt

SEQ ID NO: 7375 - DNA, 21 bp, Artificial Sequence
  Synthetic
cagattgatagtggtgctgta

SEQ ID NO: 7376 - DNA, 21 bp, Artificial Sequence
  Synthetic
gctgtatggaagcaaatttat

SEQ ID NO: 7377 - DNA, 21 bp, Artificial Sequence
  Synthetic
atggaccttggcattcctatt

SEQ ID NO: 7378 - DNA, 21 bp, Artificial Sequence
  Synthetic
ggaagcagctgaattcaaaat

SEQ ID NO: 7379 - DNA, 21 bp, Artificial Sequence
  Synthetic
aggaagcagctgaattcaaaa

SEQ ID NO: 7380 - DNA, 21 bp, Artificial Sequence
  Synthetic
ctacaatgtaaaaactgctta

SEQ ID NO: 7381 - DNA, 21 bp, Artificial Sequence
  Synthetic
tgtttaggtatctctatggtt

SEQ ID NO: 7382 - DNA, 21 bp, Artificial Sequence
  Synthetic
cggcagtactcctcaaaacca

SEQ ID NO: 7383 - DNA, 21 bp, Artificial Sequence
  Synthetic
ccctgcctaacaggaaccaaa

SEQ ID NO: 7384 - DNA, 21 bp, Artificial Sequence
  Synthetic
gaaccaaagtgaaagtaaaat

SEQ ID NO: 7385 - DNA, 21 bp, Artificial Sequence
  Synthetic
caaagtgaaagtaaaatatgg

SEQ ID NO: 7386 - DNA, 21 bp, Artificial Sequence
  Synthetic
aagtgaaagtaaaatatggac

SEQ ID NO: 7387 - DNA, 21 bp, Artificial Sequence
  Synthetic
agtgaaagtaaaatatggacg

SEQ ID NO: 7388 - DNA, 21 bp, Artificial Sequence
  Synthetic
gtgaaagtaaaatatggacga

SEQ ID NO: 7389 - DNA, 21 bp, Artificial Sequence
  Synthetic
aaatatggacgagggaagact

SEQ ID NO: 7390 - DNA, 21 bp, Artificial Sequence
  Synthetic
gagggaagactcagaaaattt

SEQ ID NO: 7391 - DNA, 21 bp, Artificial Sequence
  Synthetic
atgaagccagtattaaaagca

SEQ ID NO: 7392 - DNA, 21 bp, Artificial Sequence
  Synthetic
ttaaaagcactgaaattgatg

SEQ ID NO: 7393 - DNA, 21 bp, Artificial Sequence
  Synthetic
taaaagcactgaaattgatga

SEQ ID NO: 7394 - DNA, 21 bp, Artificial Sequence
  Synthetic
aaagcactgaaattgatgacg

SEQ ID NO: 7395 - DNA, 21 bp, Artificial Sequence
  Synthetic
atatttggtacattactatgg

SEQ ID NO: 7396 - DNA, 21 bp, Artificial Sequence
  Synthetic
tatttggtacattactatgga

SEQ ID NO: 7397 - DNA, 21 bp, Artificial Sequence
  Synthetic
tgatgagtgggtgaaggctga

SEQ ID NO: 7398 - DNA, 21 bp, Artificial Sequence
  Synthetic
aaaacggaaataatacctgca

SEQ ID NO: 7399 - DNA, 21 bp, Artificial Sequence
  Synthetic
tttagtatgattctgactgaa

SEQ ID NO: 7400 - DNA, 21 bp, Artificial Sequence
  Synthetic
ttagtatgattctgactgaaa

SEQ ID NO: 7401 - DNA, 21 bp, Artificial Sequence
  Synthetic
ctcatgagtttccatttcagt

SEQ ID NO: 7402 - DNA, 21 bp, Artificial Sequence
  Synthetic
ttctgactgaaatggaaactc

SEQ ID NO: 7403 - DNA, 21 bp, Artificial Sequence
  Synthetic
ctgactgaaatggaaactcat

SEQ ID NO: 7404 - DNA, 21 bp, Artificial Sequence
  Synthetic
tagaaaaggccatgcatcctc

SEQ ID NO: 7405 - DNA, 21 bp, Artificial Sequence
  Synthetic
aagtttcaagtttacaggaag

SEQ ID NO: 7406 - DNA, 21 bp, Artificial Sequence
  Synthetic
aggaacaagtttcaagtttac

SEQ ID NO: 7407 - DNA, 21 bp, Artificial Sequence
  Synthetic
caggaacaagtttcaagttta

SEQ ID NO: 7408 - DNA, 21 bp, Artificial Sequence
  Synthetic
ttgaaacttgttcctggttat

SEQ ID NO: 7409 - DNA, 21 bp, Artificial Sequence
  Synthetic
cttaataactttcttataacc

SEQ ID NO: 7410 - DNA, 21 bp, Artificial Sequence
  Synthetic
tcttaataactttcttataac

SEQ ID NO: 7411 - DNA, 21 bp, Artificial Sequence
  Synthetic
cctggttataagaaagttatt

SEQ ID NO: 7412 - DNA, 21 bp, Artificial Sequence
  Synthetic
aagaaagttattaagaagcct

SEQ ID NO: 7413 - DNA, 21 bp, Artificial Sequence
  Synthetic
tacttagtttctctctaattg

SEQ ID NO: 7414 - DNA, 21 bp, Artificial Sequence
  Synthetic
ctacttagtttctctctaatt

SEQ ID NO: 7415 - DNA, 21 bp, Artificial Sequence
  Synthetic
caattagagagaaactaagta

SEQ ID NO: 7416 - DNA, 21 bp, Artificial Sequence
  Synthetic
tttctttcaggtatccaaacc

SEQ ID NO: 7417 - DNA, 21 bp, Artificial Sequence
  Synthetic
aaggtttcaaggtttggatac

SEQ ID NO: 7418 - DNA, 21 bp, Artificial Sequence
  Synthetic
ctagagcaaaggtttcaaggt

SEQ ID NO: 7419 - DNA, 21 bp, Artificial Sequence
  Synthetic
gtcaaaaacaagcctgacatc

SEQ ID NO: 7420 - DNA, 21 bp, Artificial Sequence
  Synthetic
ttgacaactgtgaaacattta

SEQ ID NO: 7421 - DNA, 21 bp, Artificial Sequence
  Synthetic
tgaagatgattctgatatagg

SEQ ID NO: 7422 - DNA, 21 bp, Artificial Sequence
  Synthetic
tgtggccagctctgcctatat

SEQ ID NO: 7423 - DNA, 21 bp, Artificial Sequence
  Synthetic
attatagtactgccaaatctg

SEQ ID NO: 7424 - DNA, 21 bp, Artificial Sequence
  Synthetic
tagtactgccaaatctgtcga

SEQ ID NO: 7425 - DNA, 21 bp, Artificial Sequence
  Synthetic
agtactgccaaatctgtcgaa

SEQ ID NO: 7426 - DNA, 21 bp, Artificial Sequence
  Synthetic
gtactgccaaatctgtcgaaa

SEQ ID NO: 7427 - DNA, 21 bp, Artificial Sequence
  Synthetic
aaatctgtcgaaagggagata

SEQ ID NO: 7428 - DNA, 21 bp, Artificial Sequence
  Synthetic
tctgtcgaaagggagataatg

SEQ ID NO: 7429 - DNA, 21 bp, Artificial Sequence
  Synthetic
tttgtcacagccatcacaaag

SEQ ID NO: 7430 - DNA, 21 bp, Artificial Sequence
  Synthetic
gcctttgtcacagccatcaca

SEQ ID NO: 7431 - DNA, 21 bp, Artificial Sequence
  Synthetic
ccatctgggattgttgtaatc

SEQ ID NO: 7432 - DNA, 21 bp, Artificial Sequence
  Synthetic
ccaagattacaacaatcccag

SEQ ID NO: 7433 - DNA, 21 bp, Artificial Sequence
  Synthetic
caagattacaacaatcccaga

SEQ ID NO: 7434 - DNA, 21 bp, Artificial Sequence
  Synthetic
tggacaaaaccagtctccatc

SEQ ID NO: 7435 - DNA, 21 bp, Artificial Sequence
  Synthetic
ctggacaaaaccagtctccat

SEQ ID NO: 7436 - DNA, 21 bp, Artificial Sequence
  Synthetic
gtcttaccttagcaatgcaag

SEQ ID NO: 7437 - DNA, 21 bp, Artificial Sequence
  Synthetic
gaagaagagtaacagatgaac

SEQ ID NO: 7438 - DNA, 21 bp, Artificial Sequence
  Synthetic
gaacgtgaactgcgtattcca

SEQ ID NO: 7439 - DNA, 21 bp, Artificial Sequence
  Synthetic
aacgtgaactgcgtattccat

SEQ ID NO: 7440 - DNA, 21 bp, Artificial Sequence
  Synthetic
aactgcgtattccattggaat

SEQ ID NO: 7441 - DNA, 21 bp, Artificial Sequence
  Synthetic
atttctgttatgtgtagctgg

SEQ ID NO: 7442 - DNA, 21 bp, Artificial Sequence
  Synthetic
ttctgttatgtgtagctggca

SEQ ID NO: 7443 - DNA, 21 bp, Artificial Sequence
  Synthetic
ctgttatgtgtagctggcaga

SEQ ID NO: 7444 - DNA, 21 bp, Artificial Sequence
  Synthetic
gtgtagctggcagagagagac

SEQ ID NO: 7445 - DNA, 21 bp, Artificial Sequence
  Synthetic
ctggcagagagagacaagaat

SEQ ID NO: 7446 - DNA, 21 bp, Artificial Sequence
  Synthetic
gagagacaagaataagaaact

SEQ ID NO: 7447 - DNA, 21 bp, Artificial Sequence
  Synthetic
agagacaagaataagaaactt

SEQ ID NO: 7448 - DNA, 21 bp, Artificial Sequence
  Synthetic
agacaagaataagaaactttg

SEQ ID NO: 7449 - DNA, 21 bp, Artificial Sequence
  Synthetic
gaaactttggagggcgccttc

SEQ ID NO: 7450 - DNA, 21 bp, Artificial Sequence
  Synthetic
aaactttggagggcgccttca

SEQ ID NO: 7451 - DNA, 21 bp, Artificial Sequence
  Synthetic
actttggagggcgccttcaag

SEQ ID NO: 7452 - DNA, 21 bp, Artificial Sequence
  Synthetic
agcataatatgctacttctcc

SEQ ID NO: 7453 - DNA, 21 bp, Artificial Sequence
  Synthetic
aagtagcatattatgctccat

SEQ ID NO: 7454 - DNA, 21 bp, Artificial Sequence
  Synthetic
agtagcatattatgctccatg

SEQ ID NO: 7455 - DNA, 21 bp, Artificial Sequence
  Synthetic
gcatattatgctccatgtgga

SEQ ID NO: 7456 - DNA, 21 bp, Artificial Sequence
  Synthetic
ctgcctaagtttctttccaca

SEQ ID NO: 7457 - DNA, 21 bp, Artificial Sequence
  Synthetic
actgcctaagtttctttccac

SEQ ID NO: 7458 - DNA, 21 bp, Artificial Sequence
  Synthetic
gaaagaaacttaggcagtacc

SEQ ID NO: 7459 - DNA, 21 bp, Artificial Sequence
  Synthetic
aagtatgtacctttattactt

SEQ ID NO: 7460 - DNA, 21 bp, Artificial Sequence
  Synthetic
tattccatttctgctgagata

SEQ ID NO: 7461 - DNA, 21 bp, Artificial Sequence
  Synthetic
tatctcagcagaaatggaata

SEQ ID NO: 7462 - DNA, 21 bp, Artificial Sequence
  Synthetic
atatccattattccatttctg

SEQ ID NO: 7463 - DNA, 21 bp, Artificial Sequence
  Synthetic
aaatggaataatggatatctc

SEQ ID NO: 7464 - DNA, 21 bp, Artificial Sequence
  Synthetic
aatggaataatggatatctca

SEQ ID NO: 7465 - DNA, 21 bp, Artificial Sequence
  Synthetic
cactgaagctgaaattgtccc

SEQ ID NO: 7466 - DNA, 21 bp, Artificial Sequence
  Synthetic
tttcagcttcagtgcaaaaat

SEQ ID NO: 7467 - DNA, 21 bp, Artificial Sequence
  Synthetic
agcttcagtgcaaaaataaga

SEQ ID NO: 7468 - DNA, 21 bp, Artificial Sequence
  Synthetic
tagatgcgaagaccatcttta

SEQ ID NO: 7469 - DNA, 21 bp, Artificial Sequence
  Synthetic
ttacagggcatacggcagtag

SEQ ID NO: 7470 - DNA, 21 bp, Artificial Sequence
  Synthetic
atgtttcctggcatctactcc

SEQ ID NO: 7471 - DNA, 21 bp, Artificial Sequence
  Synthetic
gagactcatggagtagatgcc

SEQ ID NO: 7472 - DNA, 21 bp, Artificial Sequence
  Synthetic
agagactcatggagtagatgc

SEQ ID NO: 7473 - DNA, 21 bp, Artificial Sequence
  Synthetic
atctactccatgagtctctgt

SEQ ID NO: 7474 - DNA, 21 bp, Artificial Sequence
  Synthetic
actgacccaaacagagactca

SEQ ID NO: 7475 - DNA, 21 bp, Artificial Sequence
  Synthetic
aactgacccaaacagagactc

SEQ ID NO: 7476 - DNA, 21 bp, Artificial Sequence
  Synthetic
atcatcagcaactgacccaaa

SEQ ID NO: 7477 - DNA, 21 bp, Artificial Sequence
  Synthetic
tttgggtcagttgctgatgat

SEQ ID NO: 7478 - DNA, 21 bp, Artificial Sequence
  Synthetic
tgatgatcagaaacttatgat

SEQ ID NO: 7479 - DNA, 21 bp, Artificial Sequence
  Synthetic
tgaaacttaagttgcattcct

SEQ ID NO: 7480 - DNA, 21 bp, Artificial Sequence
  Synthetic
ttgcattcctttgagtcacat

SEQ ID NO: 7481 - DNA, 21 bp, Artificial Sequence
  Synthetic
attcctttgagtcacataagg

SEQ ID NO: 7482 - DNA, 21 bp, Artificial Sequence
  Synthetic
tttcatccttatgtgactcaa

SEQ ID NO: 7483 - DNA, 21 bp, Artificial Sequence
  Synthetic
atttcatccttatgtgactca

SEQ ID NO: 7484 - DNA, 21 bp, Artificial Sequence
  Synthetic
taaggatgaaatattccaggt

SEQ ID NO: 7485 - DNA, 21 bp, Artificial Sequence
  Synthetic
aggttcagtggtcacctcaca

SEQ ID NO: 7486 - DNA, 21 bp, Artificial Sequence
  Synthetic
agtctcattgtgaggtgacca

SEQ ID NO: 7487 - DNA, 21 bp, Artificial Sequence
  Synthetic
ggaagctaaaatagtctcatt

SEQ ID NO: 7488 - DNA, 21 bp, Artificial Sequence
  Synthetic
tcagtctgcgatcagtaccac

SEQ ID NO: 7489 - DNA, 21 bp, Artificial Sequence
  Synthetic
ttcagtctgcgatcagtacca

SEQ ID NO: 7490 - DNA, 21 bp, Artificial Sequence
  Synthetic
tccagtggtactgatcgcaga

SEQ ID NO: 7491 - DNA, 21 bp, Artificial Sequence
  Synthetic
tactgatcgcagactgaatgt

SEQ ID NO: 7492 - DNA, 21 bp, Artificial Sequence
  Synthetic
actgatcgcagactgaatgtc

SEQ ID NO: 7493 - DNA, 21 bp, Artificial Sequence
  Synthetic
agtatgaccaccatgaataaa

SEQ ID NO: 7494 - DNA, 21 bp, Artificial Sequence
  Synthetic
tatcttggcagtatgaccacc

SEQ ID NO: 7495 - DNA, 21 bp, Artificial Sequence
  Synthetic
tgccaagatatctgatttctc

SEQ ID NO: 7496 - DNA, 21 bp, Artificial Sequence
  Synthetic
gccaagatatctgatttctcc

SEQ ID NO: 7497 - DNA, 21 bp, Artificial Sequence
  Synthetic
ctgatttctcctggaatccca

SEQ ID NO: 7498 - DNA, 21 bp, Artificial Sequence
  Synthetic
caaggttcattgggattccag

SEQ ID NO: 7499 - DNA, 21 bp, Artificial Sequence
  Synthetic
cccaaggttcattgggattcc

SEQ ID NO: 7500 - DNA, 21 bp, Artificial Sequence
  Synthetic
ctcctggaatcccaatgaacc

SEQ ID NO: 7501 - DNA, 21 bp, Artificial Sequence
  Synthetic
acccaaggttcattgggattc

SEQ ID NO: 7502 - DNA, 21 bp, Artificial Sequence
  Synthetic
aacaaatcacccaaggttcat

SEQ ID NO: 7503 - DNA, 21 bp, Artificial Sequence
  Synthetic
gaacaaatcacccaaggttca

SEQ ID NO: 7504 - DNA, 21 bp, Artificial Sequence
  Synthetic
cttgggtgatttgttctgtat

SEQ ID NO: 7505 - DNA, 21 bp, Artificial Sequence
  Synthetic
gcatgatattgtcttctgata

SEQ ID NO: 7506 - DNA, 21 bp, Artificial Sequence
  Synthetic
catcaactgagtggcttggtt

SEQ ID NO: 7507 - DNA, 21 bp, Artificial Sequence
  Synthetic
gcatcaactgagtggcttggt

SEQ ID NO: 7508 - DNA, 21 bp, Artificial Sequence
  Synthetic
actcagttgatgctcacactg

SEQ ID NO: 7509 - DNA, 21 bp, Artificial Sequence
  Synthetic
cttcagcagtgtgagcatcaa

SEQ ID NO: 7510 - DNA, 21 bp, Artificial Sequence
  Synthetic
gttgatgctcacactgctgaa

SEQ ID NO: 7511 - DNA, 21 bp, Artificial Sequence
  Synthetic
aaggcagttcacttcagcagt

SEQ ID NO: 7512 - DNA, 21 bp, Artificial Sequence
  Synthetic
gcctttctttcaatccttata

SEQ ID NO: 7513 - DNA, 21 bp, Artificial Sequence
  Synthetic
tgaactcactataaggattga

SEQ ID NO: 7514 - DNA, 21 bp, Artificial Sequence
  Synthetic
agaatgaactcactataagga

SEQ ID NO: 7515 - DNA, 21 bp, Artificial Sequence
  Synthetic
tggcaagaatgaactcactat

SEQ ID NO: 7516 - DNA, 21 bp, Artificial Sequence
  Synthetic
atagtgagttcattcttgcca

SEQ ID NO: 7517 - DNA, 21 bp, Artificial Sequence
  Synthetic
tcagctgatcctgtggcaaga

SEQ ID NO: 7518 - DNA, 21 bp, Artificial Sequence
  Synthetic
cttgtcagctgatcctgtggc

SEQ ID NO: 7519 - DNA, 21 bp, Artificial Sequence
  Synthetic
ttgtacatagactgttgcctt

SEQ ID NO: 7520 - DNA, 21 bp, Artificial Sequence
  Synthetic
tgtacatagactgttgccttg

SEQ ID NO: 7521 - DNA, 21 bp, Artificial Sequence
  Synthetic
tagactgttgccttgtgggat

SEQ ID NO: 7522 - DNA, 21 bp, Artificial Sequence
  Synthetic
gactgttgccttgtgggatct

SEQ ID NO: 7523 - DNA, 21 bp, Artificial Sequence
  Synthetic
gcaacccagacttgcgtctcc

SEQ ID NO: 7524 - DNA, 21 bp, Artificial Sequence
  Synthetic
gatgtccacggagacgcaagt

SEQ ID NO: 7525 - DNA, 21 bp, Artificial Sequence
  Synthetic
gacttgcgtctccgtggacat

SEQ ID NO: 7526 - DNA, 21 bp, Artificial Sequence
  Synthetic
ttgcgtctccgtggacatcag

SEQ ID NO: 7527 - DNA, 21 bp, Artificial Sequence
  Synthetic
tgcgtctccgtggacatcaga

SEQ ID NO: 7528 - DNA, 21 bp, Artificial Sequence
  Synthetic
tagccttccttctgatgtcca

SEQ ID NO: 7529 - DNA, 21 bp, Artificial Sequence
  Synthetic
atagccttccttctgatgtcc

SEQ ID NO: 7530 - DNA, 21 bp, Artificial Sequence
  Synthetic
gtggacatcagaaggaaggct

SEQ ID NO: 7531 - DNA, 21 bp, Artificial Sequence
  Synthetic
gaaggaaggctatgggctttc

SEQ ID NO: 7532 - DNA, 21 bp, Artificial Sequence
  Synthetic
aaggaaggctatgggctttct

SEQ ID NO: 7533 - DNA, 21 bp, Artificial Sequence
  Synthetic
tttcttggaacccaaatctca

SEQ ID NO: 7534 - DNA, 21 bp, Artificial Sequence
  Synthetic
gcccactgagatttgggttcc

SEQ ID NO: 7535 - DNA, 21 bp, Artificial Sequence
  Synthetic
taagtaagtgcccactgagat

SEQ ID NO: 7536 - DNA, 21 bp, Artificial Sequence
  Synthetic
gaagcactaagtaagtgccca

SEQ ID NO: 7537 - DNA, 21 bp, Artificial Sequence
  Synthetic
gaaggatacacacatggtcat

SEQ ID NO: 7538 - DNA, 21 bp, Artificial Sequence
  Synthetic
tacatttaagaccatctgcct

SEQ ID NO: 7539 - DNA, 21 bp, Artificial Sequence
  Synthetic
acatttaagaccatctgcctg

SEQ ID NO: 7540 - DNA, 21 bp, Artificial Sequence
  Synthetic
tcaaaaattccaaatgaacac

SEQ ID NO: 7541 - DNA, 21 bp, Artificial Sequence
  Synthetic
caaatgaacacaagaaacctg

SEQ ID NO: 7542 - DNA, 21 bp, Artificial Sequence
  Synthetic
gaacacaagaaacctgctgag

SEQ ID NO: 7543 - DNA, 21 bp, Artificial Sequence
  Synthetic
tgcaatatctttccaggtatt

SEQ ID NO: 7544 - DNA, 21 bp, Artificial Sequence
  Synthetic
gcaatatctttccaggtattc

SEQ ID NO: 7545 - DNA, 21 bp, Artificial Sequence
  Synthetic
atatctttccaggtattccgg

SEQ ID NO: 7546 - DNA, 21 bp, Artificial Sequence
  Synthetic
atgaggtccttccggaatacc

SEQ ID NO: 7547 - DNA, 21 bp, Artificial Sequence
  Synthetic
gatgaggtccttccggaatac

SEQ ID NO: 7548 - DNA, 21 bp, Artificial Sequence
  Synthetic
atggcactgatgaggtccttc

SEQ ID NO: 7549 - DNA, 21 bp, Artificial Sequence
  Synthetic
catggcactgatgaggtcctt

SEQ ID NO: 7550 - DNA, 21 bp, Artificial Sequence
  Synthetic
cggaaggacctcatcagtgcc

SEQ ID NO: 7551 - DNA, 21 bp, Artificial Sequence
  Synthetic
tctggaagtttcatggcactg

SEQ ID NO: 7552 - DNA, 21 bp, Artificial Sequence
  Synthetic
aggattaatgtggtgagaatc

SEQ ID NO: 7553 - DNA, 21 bp, Artificial Sequence
  Synthetic
caggattaatgtggtgagaat

SEQ ID NO: 7554 - DNA, 21 bp, Artificial Sequence
  Synthetic
agctatcaggattaatgtggt

SEQ ID NO: 7555 - DNA, 21 bp, Artificial Sequence
  Synthetic
atagctatcaggattaatgtg

SEQ ID NO: 7556 - DNA, 21 bp, Artificial Sequence
  Synthetic
cagcaaagaggtaatagctat

SEQ ID NO: 7557 - DNA, 21 bp, Artificial Sequence
  Synthetic
ctattacctctttgctgatac

SEQ ID NO: 7558 - DNA, 21 bp, Artificial Sequence
  Synthetic
tattacctctttgctgataca

SEQ ID NO: 7559 - DNA, 21 bp, Artificial Sequence
  Synthetic
tacctctttgctgatacatgg

SEQ ID NO: 7560 - DNA, 21 bp, Artificial Sequence
  Synthetic
acctctttgctgatacatgga

SEQ ID NO: 7561 - DNA, 21 bp, Artificial Sequence
  Synthetic
tcttccttccatgtatcagca

SEQ ID NO: 7562 - DNA, 21 bp, Artificial Sequence
  Synthetic
tctttgctgatacatggaagg

SEQ ID NO: 7563 - DNA, 21 bp, Artificial Sequence
  Synthetic
tgctgatacatggaaggaaga

SEQ ID NO: 7564 - DNA, 21 bp, Artificial Sequence
  Synthetic
gctgatacatggaaggaagaa

SEQ ID NO: 7565 - DNA, 21 bp, Artificial Sequence
  Synthetic
ctgatacatggaaggaagaat

SEQ ID NO: 7566 - DNA, 21 bp, Artificial Sequence
  Synthetic
acatggaaggaagaatgggaa

SEQ ID NO: 7567 - DNA, 21 bp, Artificial Sequence
  Synthetic
catggaaggaagaatgggaaa

SEQ ID NO: 7568 - DNA, 21 bp, Artificial Sequence
  Synthetic
atggaaggaagaatgggaaaa

SEQ ID NO: 7569 - DNA, 21 bp, Artificial Sequence
  Synthetic
ggtgtctggactggctggtac

SEQ ID NO: 7570 - DNA, 21 bp, Artificial Sequence
  Synthetic
gagaaggctgtggaacggtgt

SEQ ID NO: 7571 - DNA, 21 bp, Artificial Sequence
  Synthetic
caaatacctgagagaaggctg

SEQ ID NO: 7572 - DNA, 21 bp, Artificial Sequence
  Synthetic
gcaaatacctgagagaaggct

SEQ ID NO: 7573 - DNA, 21 bp, Artificial Sequence
  Synthetic
tgcaagcatgcaaatacctga

SEQ ID NO: 7574 - DNA, 21 bp, Artificial Sequence
  Synthetic
ttaccttctcagctataatcc

SEQ ID NO: 7575 - DNA, 21 bp, Artificial Sequence
  Synthetic
aggattatagctgagaaggta

SEQ ID NO: 7576 - DNA, 21 bp, Artificial Sequence
  Synthetic
ggacgttctgtttatccgacc

SEQ ID NO: 7577 - DNA, 21 bp, Artificial Sequence
  Synthetic
gacgttctgtttatccgaccc

SEQ ID NO: 7578 - DNA, 21 bp, Artificial Sequence
  Synthetic
atacttccggggtcggataaa

SEQ ID NO: 7579 - DNA, 21 bp, Artificial Sequence
  Synthetic
gcagtgaatatacttccgggg

SEQ ID NO: 7580 - DNA, 21 bp, Artificial Sequence
  Synthetic
ctggagcagtgaatatacttc

SEQ ID NO: 7581 - DNA, 21 bp, Artificial Sequence
  Synthetic
gctggagcagtgaatatactt

SEQ ID NO: 7582 - DNA, 21 bp, Artificial Sequence
  Synthetic
tgtggtgtctgggctggagca

SEQ ID NO: 7583 - DNA, 21 bp, Artificial Sequence
  Synthetic
actgctccagcccagacacca

SEQ ID NO: 7584 - DNA, 21 bp, Artificial Sequence
  Synthetic
caggctctgtggtgtctgggc

SEQ ID NO: 7585 - DNA, 21 bp, Artificial Sequence
  Synthetic
ccaggctctgtggtgtctggg

SEQ ID NO: 7586 - DNA, 21 bp, Artificial Sequence
  Synthetic
tgtagccaggctctgtggtgt

SEQ ID NO: 7587 - DNA, 21 bp, Artificial Sequence
  Synthetic
gagcctggctacatcaacatc

SEQ ID NO: 7588 - DNA, 21 bp, Artificial Sequence
  Synthetic
agcctggctacatcaacatca

SEQ ID NO: 7589 - DNA, 21 bp, Artificial Sequence
  Synthetic
tgccgctatgacctagatgac

SEQ ID NO: 7590 - DNA, 21 bp, Artificial Sequence
  Synthetic
gacatggacatcttctggctt

SEQ ID NO: 7591 - DNA, 21 bp, Artificial Sequence
  Synthetic
acatggacatcttctggcttc

SEQ ID NO: 7592 - DNA, 21 bp, Artificial Sequence
  Synthetic
tcttctggcttcaggaactca

SEQ ID NO: 7593 - DNA, 21 bp, Artificial Sequence
  Synthetic
tcttcattgagttcctgaagc

SEQ ID NO: 7594 - DNA, 21 bp, Artificial Sequence
  Synthetic
tgcaaggtcttcattgagttc

SEQ ID NO: 7595 - DNA, 21 bp, Artificial Sequence
  Synthetic
aggaactcaatgaagaccttg

SEQ ID NO: 7596 - DNA, 21 bp, Artificial Sequence
  Synthetic
cccatttctgcaaggtcttca

SEQ ID NO: 7597 - DNA, 21 bp, Artificial Sequence
  Synthetic
ctcaatgaagaccttgcagaa

SEQ ID NO: 7598 - DNA, 21 bp, Artificial Sequence
  Synthetic
gtgcaggttgtgggccagttg

SEQ ID NO: 7599 - DNA, 21 bp, Artificial Sequence
  Synthetic
gcaggttgtgggccagttgat

SEQ ID NO: 7600 - DNA, 21 bp, Artificial Sequence
  Synthetic
gggccagttgatgagaatctt

SEQ ID NO: 7601 - DNA, 21 bp, Artificial Sequence
  Synthetic
ggccagttgatgagaatctta

SEQ ID NO: 7602 - DNA, 21 bp, Artificial Sequence
  Synthetic
agaatcttatggaaaagacag

SEQ ID NO: 7603 - DNA, 21 bp, Artificial Sequence
  Synthetic
atggaaaagacagtagaagtc

SEQ ID NO: 7604 - DNA, 21 bp, Artificial Sequence
  Synthetic
tggaaaagacagtagaagtcc

SEQ ID NO: 7605 - DNA, 21 bp, Artificial Sequence
  Synthetic
accaagtcgggctggccccga

SEQ ID NO: 7606 - DNA, 21 bp, Artificial Sequence
  Synthetic
agtcgggctggccccgacaga

SEQ ID NO: 7607 - DNA, 21 bp, Artificial Sequence
  Synthetic
ggctggccccgacagaacgaa

SEQ ID NO: 7608 - DNA, 21 bp, Artificial Sequence
  Synthetic
gacagaacgaaaagaagccct

SEQ ID NO: 7609 - DNA, 21 bp, Artificial Sequence
  Synthetic
aacgaaaagaagccctccgag

SEQ ID NO: 7610 - DNA, 21 bp, Artificial Sequence
  Synthetic
agctcatcactacccacctcg

SEQ ID NO: 7611 - DNA, 21 bp, Artificial Sequence
  Synthetic
tcaagtctgtccggaaaacct

SEQ ID NO: 7612 - DNA, 21 bp, Artificial Sequence
  Synthetic
atggctgtgatcaagtctgtc

SEQ ID NO: 7613 - DNA, 21 bp, Artificial Sequence
  Synthetic
catggctgtgatcaagtctgt

SEQ ID NO: 7614 - DNA, 21 bp, Artificial Sequence
  Synthetic
cggacagacttgatcacagcc

SEQ ID NO: 7615 - DNA, 21 bp, Artificial Sequence
  Synthetic
ttgatcacagccatgaagatc

SEQ ID NO: 7616 - DNA, 21 bp, Artificial Sequence
  Synthetic
cgggctgagctggtatgagtc

SEQ ID NO: 7617 - DNA, 21 bp, Artificial Sequence
  Synthetic
ccgggctgagctggtatgagt

SEQ ID NO: 7618 - DNA, 21 bp, Artificial Sequence
  Synthetic
ccggactcataccagctcagc

SEQ ID NO: 7619 - DNA, 21 bp, Artificial Sequence
  Synthetic
agtcatccgggctgagctggt

SEQ ID NO: 7620 - DNA, 21 bp, Artificial Sequence
  Synthetic
aggatgtagtagtcatccggg

SEQ ID NO: 7621 - DNA, 21 bp, Artificial Sequence
  Synthetic
ctgccaggatgtagtagtcat

SEQ ID NO: 7622 - DNA, 21 bp, Artificial Sequence
  Synthetic
atcctggcagacccatggcga

SEQ ID NO: 7623 - DNA, 21 bp, Artificial Sequence
  Synthetic
ttcctgtcgccatgggtctgc

SEQ ID NO: 7624 - DNA, 21 bp, Artificial Sequence
  Synthetic
tcctggcagacccatggcgac

SEQ ID NO: 7625 - DNA, 21 bp, Artificial Sequence
  Synthetic
ggcagacccatggcgacagga

SEQ ID NO: 7626 - DNA, 21 bp, Artificial Sequence
  Synthetic
gcagacccatggcgacaggaa

SEQ ID NO: 7627 - DNA, 21 bp, Artificial Sequence
  Synthetic
cagacccatggcgacaggaat

SEQ ID NO: 7628 - DNA, 21 bp, Artificial Sequence
  Synthetic
gacccatggcgacaggaatgg

SEQ ID NO: 7629 - DNA, 21 bp, Artificial Sequence
  Synthetic
ctttctcccattcctgtcgcc

SEQ ID NO: 7630 - DNA, 21 bp, Artificial Sequence
  Synthetic
agaaaggtgtgcaggtgcctg

SEQ ID NO: 7631 - DNA, 21 bp, Artificial Sequence
  Synthetic
gaaaggtgtgcaggtgcctgc

SEQ ID NO: 7632 - DNA, 21 bp, Artificial Sequence
  Synthetic
gtgtgcaggtgcctgccgggg

SEQ ID NO: 7633 - DNA, 21 bp, Artificial Sequence
  Synthetic
ctgccggggcagaggccatcc

SEQ ID NO: 7634 - DNA, 21 bp, Artificial Sequence
  Synthetic
gaggccatcccagagcccgtg

SEQ ID NO: 7635 - DNA, 21 bp, Artificial Sequence
  Synthetic
catcccagagcccgtggtgag

SEQ ID NO: 7636 - DNA, 21 bp, Artificial Sequence
  Synthetic
ggctcacctcaccacgggctc

SEQ ID NO: 7637 - DNA, 21 bp, Artificial Sequence
  Synthetic
tggctcacctcaccacgggct

SEQ ID NO: 7638 - DNA, 21 bp, Artificial Sequence
  Synthetic
ggctgcctggctcacctcacc

SEQ ID NO: 7639 - DNA, 21 bp, Artificial Sequence
  Synthetic
tttctaggatcctcccaccac

SEQ ID NO: 7640 - DNA, 21 bp, Artificial Sequence
  Synthetic
cttccagtggtgggaggatcc

SEQ ID NO: 7641 - DNA, 21 bp, Artificial Sequence
  Synthetic
aggggggccttccagtggtgg

SEQ ID NO: 7642 - DNA, 21 bp, Artificial Sequence
  Synthetic
gcaggggggccttccagtggt

SEQ ID NO: 7643 - DNA, 21 bp, Artificial Sequence
  Synthetic
ggcaggggggccttccagtgg

SEQ ID NO: 7644 - DNA, 21 bp, Artificial Sequence
  Synthetic
gggcaggggggccttccagtg

SEQ ID NO: 7645 - DNA, 21 bp, Artificial Sequence
  Synthetic
ggcccccctgcccaggcatcc

SEQ ID NO: 7646 - DNA, 21 bp, Artificial Sequence
  Synthetic
tgctcggggatgcctgggcag

SEQ ID NO: 7647 - DNA, 21 bp, Artificial Sequence
  Synthetic
ctgctcggggatgcctgggca

SEQ ID NO: 7648 - DNA, 21 bp, Artificial Sequence
  Synthetic
gctgctcggggatgcctgggc

SEQ ID NO: 7649 - DNA, 21 bp, Artificial Sequence
  Synthetic
tgctgctcggggatgcctggg

SEQ ID NO: 7650 - DNA, 21 bp, Artificial Sequence
  Synthetic
catggtgctgctcggggatgc

SEQ ID NO: 7651 - DNA, 21 bp, Artificial Sequence
  Synthetic
tcaccaagcatggtgctgctc

SEQ ID NO: 7652 - DNA, 21 bp, Artificial Sequence
  Synthetic
ctcaccaagcatggtgctgct

SEQ ID NO: 7653 - DNA, 21 bp, Artificial Sequence
  Synthetic
ccccgagcagcaccatgcttg

SEQ ID NO: 7654 - DNA, 21 bp, Artificial Sequence
  Synthetic
cctcaccaagcatggtgctgc

SEQ ID NO: 7655 - DNA, 21 bp, Artificial Sequence
  Synthetic
ccgagcagcaccatgcttggt

SEQ ID NO: 7656 - DNA, 21 bp, Artificial Sequence
  Synthetic
agggctcccagcctgattggc

SEQ ID NO: 7657 - DNA, 21 bp, Artificial Sequence
  Synthetic
gggctcccagcctgattggcc

SEQ ID NO: 7658 - DNA, 21 bp, Artificial Sequence
  Synthetic
ggctcccagcctgattggcca

SEQ ID NO: 7659 - DNA, 21 bp, Artificial Sequence
  Synthetic
tgccccctggccaatcaggct

SEQ ID NO: 7660 - DNA, 21 bp, Artificial Sequence
  Synthetic
ctgccccctggccaatcaggc

SEQ ID NO: 7661 - DNA, 21 bp, Artificial Sequence
  Synthetic
gctgccccctggccaatcagg

SEQ ID NO: 7662 - DNA, 21 bp, Artificial Sequence
  Synthetic
ccagggggcagccgctatgac

SEQ ID NO: 7663 - DNA, 21 bp, Artificial Sequence
  Synthetic
ggggcagccgctatgacttgg

SEQ ID NO: 7664 - DNA, 21 bp, Artificial Sequence
  Synthetic
gacgagattgatgcctactgg

SEQ ID NO: 7665 - DNA, 21 bp, Artificial Sequence
  Synthetic
acgagattgatgcctactggc

SEQ ID NO: 7666 - DNA, 21 bp, Artificial Sequence
  Synthetic
tactggctggagctcatcaac

SEQ ID NO: 7667 - DNA, 21 bp, Artificial Sequence
  Synthetic
actggctggagctcatcaact

SEQ ID NO: 7668 - DNA, 21 bp, Artificial Sequence
  Synthetic
gagctcatcaactcggagctt

SEQ ID NO: 7669 - DNA, 21 bp, Artificial Sequence
  Synthetic
agctcatcaactcggagctta

SEQ ID NO: 7670 - DNA, 21 bp, Artificial Sequence
  Synthetic
atctccttaagctccgagttg

SEQ ID NO: 7671 - DNA, 21 bp, Artificial Sequence
  Synthetic
atcaactcggagcttaaggag

SEQ ID NO: 7672 - DNA, 21 bp, Artificial Sequence
  Synthetic
acctacccatctccttaagct

SEQ ID NO: 7673 - DNA, 21 bp, Artificial Sequence
  Synthetic
gctgtcctcctcacagagagg

SEQ ID NO: 7674 - DNA, 21 bp, Artificial Sequence
  Synthetic
ctgtcctcctcacagagaggc

SEQ ID NO: 7675 - DNA, 21 bp, Artificial Sequence
  Synthetic
ctcctcacagagaggccggag

SEQ ID NO: 7676 - DNA, 21 bp, Artificial Sequence
  Synthetic
tcgtccagctccggcctctct

SEQ ID NO: 7677 - DNA, 21 bp, Artificial Sequence
  Synthetic
tcacagagaggccggagctgg

SEQ ID NO: 7678 - DNA, 21 bp, Artificial Sequence
  Synthetic
cggagctggacgagctgacat

SEQ ID NO: 7679 - DNA, 21 bp, Artificial Sequence
  Synthetic
gagctgacattagagcgtgtg

SEQ ID NO: 7680 - DNA, 21 bp, Artificial Sequence
  Synthetic
agctgacattagagcgtgtgc

SEQ ID NO: 7681 - DNA, 21 bp, Artificial Sequence
  Synthetic
ctgacattagagcgtgtgctg

SEQ ID NO: 7682 - DNA, 21 bp, Artificial Sequence
  Synthetic
tgacattagagcgtgtgctgg

SEQ ID NO: 7683 - DNA, 21 bp, Artificial Sequence
  Synthetic
ttagagcgtgtgctggaggag

SEQ ID NO: 7684 - DNA, 21 bp, Artificial Sequence
  Synthetic
tagagcgtgtgctggaggagc

SEQ ID NO: 7685 - DNA, 21 bp, Artificial Sequence
  Synthetic
ctcctgctccagacatgaaga

SEQ ID NO: 7686 - DNA, 21 bp, Artificial Sequence
  Synthetic
aaggctttcgatcttcatgtc

SEQ ID NO: 7687 - DNA, 21 bp, Artificial Sequence
  Synthetic
gaaggctttcgatcttcatgt

SEQ ID NO: 7688 - DNA, 21 bp, Artificial Sequence
  Synthetic
gacatgaagatcgaaagcctt

SEQ ID NO: 7689 - DNA, 21 bp, Artificial Sequence
  Synthetic
ttctcttcctttccaggtgtt

SEQ ID NO: 7690 - DNA, 21 bp, Artificial Sequence
  Synthetic
atcaggtctgtcctaaacacc

SEQ ID NO: 7691 - DNA, 21 bp, Artificial Sequence
  Synthetic
gatcaggtctgtcctaaacac

SEQ ID NO: 7692 - DNA, 21 bp, Artificial Sequence
  Synthetic
aggacagacctgatcactgcc

SEQ ID NO: 7693 - DNA, 21 bp, Artificial Sequence
  Synthetic
aagttgcatgactcctaccag

SEQ ID NO: 7694 - DNA, 21 bp, Artificial Sequence
  Synthetic
catgactcctaccagctgaat

SEQ ID NO: 7695 - DNA, 21 bp, Artificial Sequence
  Synthetic
actcctaccagctgaatccgg

SEQ ID NO: 7696 - DNA, 21 bp, Artificial Sequence
  Synthetic
actcatccggattcagctggt

SEQ ID NO: 7697 - DNA, 21 bp, Artificial Sequence
  Synthetic
tactcatccggattcagctgg

SEQ ID NO: 7698 - DNA, 21 bp, Artificial Sequence
  Synthetic
ctgccaacacatagtactcat

SEQ ID NO: 7699 - DNA, 21 bp, Artificial Sequence
  Synthetic
gtactatgtgttggcagatcc

SEQ ID NO: 7700 - DNA, 21 bp, Artificial Sequence
  Synthetic
tactatgtgttggcagatccc

SEQ ID NO: 7701 - DNA, 21 bp, Artificial Sequence
  Synthetic
gtgttggcagatccctggaga

SEQ ID NO: 7702 - DNA, 21 bp, Artificial Sequence
  Synthetic
tgttggcagatccctggagac

SEQ ID NO: 7703 - DNA, 21 bp, Artificial Sequence
  Synthetic
ggcagatccctggagacagga

SEQ ID NO: 7704 - DNA, 21 bp, Artificial Sequence
  Synthetic
gcagatccctggagacaggaa

SEQ ID NO: 7705 - DNA, 21 bp, Artificial Sequence
  Synthetic
cagatccctggagacaggaat

SEQ ID NO: 7706 - DNA, 21 bp, Artificial Sequence
  Synthetic
gatccctggagacaggaatgg

SEQ ID NO: 7707 - DNA, 21 bp, Artificial Sequence
  Synthetic
ctttctcccattcctgtctcc

SEQ ID NO: 7708 - DNA, 21 bp, Artificial Sequence
  Synthetic
cctttctcccattcctgtctc

SEQ ID NO: 7709 - DNA, 21 bp, Artificial Sequence
  Synthetic
cctggagacaggaatgggaga

SEQ ID NO: 7710 - DNA, 21 bp, Artificial Sequence
  Synthetic
ctggagacaggaatgggagaa

SEQ ID NO: 7711 - DNA, 21 bp, Artificial Sequence
  Synthetic
gagaaaggggtccaggtgcct

SEQ ID NO: 7712 - DNA, 21 bp, Artificial Sequence
  Synthetic
ggggtccaggtgcctgtgagc

SEQ ID NO: 7713 - DNA, 21 bp, Artificial Sequence
  Synthetic
gggtccaggtgcctgtgagcc

SEQ ID NO: 7714 - DNA, 21 bp, Artificial Sequence
  Synthetic
ggtccaggtgcctgtgagccc

SEQ ID NO: 7715 - DNA, 21 bp, Artificial Sequence
  Synthetic
ggtccccgggctcacaggcac

SEQ ID NO: 7716 - DNA, 21 bp, Artificial Sequence
  Synthetic
ccacaggctgagggatggtcc

SEQ ID NO: 7717 - DNA, 21 bp, Artificial Sequence
  Synthetic
atccctcagcctgtggccagg

SEQ ID NO: 7718 - DNA, 21 bp, Artificial Sequence
  Synthetic
tctctacctggccacaggctg

SEQ ID NO: 7719 - DNA, 21 bp, Artificial Sequence
  Synthetic
atctctacctggccacaggct

SEQ ID NO: 7720 - DNA, 21 bp, Artificial Sequence
  Synthetic
gcatctctacctggccacagg

SEQ ID NO: 7721 - DNA, 21 bp, Artificial Sequence
  Synthetic
tattatccagggttgtgtctg

SEQ ID NO: 7722 - DNA, 21 bp, Artificial Sequence
  Synthetic
ttatccagggttgtgtctgaa

SEQ ID NO: 7723 - DNA, 21 bp, Artificial Sequence
  Synthetic
gatttctcttcagacacaacc

SEQ ID NO: 7724 - DNA, 21 bp, Artificial Sequence
  Synthetic
ttcttgggcctgatgaacatg

SEQ ID NO: 7725 - DNA, 21 bp, Artificial Sequence
  Synthetic
tccctcatgttcatcaggccc

SEQ ID NO: 7726 - DNA, 21 bp, Artificial Sequence
  Synthetic
cttcttgggcctgatgaacat

SEQ ID NO: 7727 - DNA, 21 bp, Artificial Sequence
  Synthetic
tacttcttgggcctgatgaac

SEQ ID NO: 7728 - DNA, 21 bp, Artificial Sequence
  Synthetic
acgatgtacttcttgggcctg

SEQ ID NO: 7729 - DNA, 21 bp, Artificial Sequence
  Synthetic
cctgatgacacgatgtacttc

SEQ ID NO: 7730 - DNA, 21 bp, Artificial Sequence
  Synthetic
agtacatcgtgtcatcaggct

SEQ ID NO: 7731 - DNA, 21 bp, Artificial Sequence
  Synthetic
tgtcatcaggctctgagcctc

SEQ ID NO: 7732 - DNA, 21 bp, Artificial Sequence
  Synthetic
tcaggctctgagcctcccgag

SEQ ID NO: 7733 - DNA, 21 bp, Artificial Sequence
  Synthetic
catagcccaactcgggaggct

SEQ ID NO: 7734 - DNA, 21 bp, Artificial Sequence
  Synthetic
gagcctcccgagttgggctat

SEQ ID NO: 7735 - DNA, 21 bp, Artificial Sequence
  Synthetic
gatgtccacatagcccaactc

SEQ ID NO: 7736 - DNA, 21 bp, Artificial Sequence
  Synthetic
ggatgtccacatagcccaact

SEQ ID NO: 7737 - DNA, 21 bp, Artificial Sequence
  Synthetic
cggatgtccacatagcccaac

SEQ ID NO: 7738 - DNA, 21 bp, Artificial Sequence
  Synthetic
cgagttgggctatgtggacat

SEQ ID NO: 7739 - DNA, 21 bp, Artificial Sequence
  Synthetic
acacacgctgtcagccagcgt

SEQ ID NO: 7740 - DNA, 21 bp, Artificial Sequence
  Synthetic
tgtcgctatgacctcaatgac

SEQ ID NO: 7741 - DNA, 21 bp, Artificial Sequence
  Synthetic
agccatgcagcatccatgtca

SEQ ID NO: 7742 - DNA, 21 bp, Artificial Sequence
  Synthetic
aatgacatggatgctgcatgg

SEQ ID NO: 7743 - DNA, 21 bp, Artificial Sequence
  Synthetic
atgacatggatgctgcatggc

SEQ ID NO: 7744 - DNA, 21 bp, Artificial Sequence
  Synthetic
ctgcatggctggaactgacca

SEQ ID NO: 7745 - DNA, 21 bp, Artificial Sequence
  Synthetic
catggctggaactgaccaatg

SEQ ID NO: 7746 - DNA, 21 bp, Artificial Sequence
  Synthetic
gaactgaccaatgaagaattt

SEQ ID NO: 7747 - DNA, 21 bp, Artificial Sequence
  Synthetic
aactgaccaatgaagaattta

SEQ ID NO: 7748 - DNA, 21 bp, Artificial Sequence
  Synthetic
accaatgaagaatttaaggag

SEQ ID NO: 7749 - DNA, 21 bp, Artificial Sequence
  Synthetic
atgaagaatttaaggagatgg

SEQ ID NO: 7750 - DNA, 21 bp, Artificial Sequence
  Synthetic
gaagaatttaaggagatgggt

SEQ ID NO: 7751 - DNA, 21 bp, Artificial Sequence
  Synthetic
cttcaggaatgcctgaactag

SEQ ID NO: 7752 - DNA, 21 bp, Artificial Sequence
  Synthetic
attcatctagttcaggcattc

SEQ ID NO: 7753 - DNA, 21 bp, Artificial Sequence
  Synthetic
cctgaactagatgaatacacc

SEQ ID NO: 7754 - DNA, 21 bp, Artificial Sequence
  Synthetic
ctgaactagatgaatacacca

SEQ ID NO: 7755 - DNA, 21 bp, Artificial Sequence
  Synthetic
gaactagatgaatacaccatg

SEQ ID NO: 7756 - DNA, 21 bp, Artificial Sequence
  Synthetic
actagatgaatacaccatgga

SEQ ID NO: 7757 - DNA, 21 bp, Artificial Sequence
  Synthetic
aatacaccatggagagggtcc

SEQ ID NO: 7758 - DNA, 21 bp, Artificial Sequence
  Synthetic
tacaccatggagagggtccta

SEQ ID NO: 7759 - DNA, 21 bp, Artificial Sequence
  Synthetic
acaccatggagagggtcctag

SEQ ID NO: 7760 - DNA, 21 bp, Artificial Sequence
  Synthetic
tggagagggtcctagaggaat

SEQ ID NO: 7761 - DNA, 21 bp, Artificial Sequence
  Synthetic
gcatcgctgctcaaattcctc

SEQ ID NO: 7762 - DNA, 21 bp, Artificial Sequence
  Synthetic
gcatttgccgcaagacagcca

SEQ ID NO: 7763 - DNA, 21 bp, Artificial Sequence
  Synthetic
ccagtgggtttatgctacagt

SEQ ID NO: 7764 - DNA, 21 bp, Artificial Sequence
  Synthetic
ctgttatggaaccagtctttg

SEQ ID NO: 7765 - DNA, 21 bp, Artificial Sequence
  Synthetic
ggaagaggaacacagctgtta

SEQ ID NO: 7766 - DNA, 21 bp, Artificial Sequence
  Synthetic
aggaagaggaacacagctgtt

SEQ ID NO: 7767 - DNA, 21 bp, Artificial Sequence
  Synthetic
ttgggaacttgatttaggaag

SEQ ID NO: 7768 - DNA, 21 bp, Artificial Sequence
  Synthetic
tttgggaacttgatttaggaa

SEQ ID NO: 7769 - DNA, 21 bp, Artificial Sequence
  Synthetic
ctaaatcaagttcccaaaaaa

SEQ ID NO: 7770 - DNA, 21 bp, Artificial Sequence
  Synthetic
aaggatccagctggcaagcta

SEQ ID NO: 7771 - DNA, 21 bp, Artificial Sequence
  Synthetic
tttacttctttagcttgccag

SEQ ID NO: 7772 - DNA, 21 bp, Artificial Sequence
  Synthetic
gaccgcatacaaagagggcaa

SEQ ID NO: 7773 - DNA, 21 bp, Artificial Sequence
  Synthetic
agaccgcatacaaagagggca

SEQ ID NO: 7774 - DNA, 21 bp, Artificial Sequence
  Synthetic
ttgccctctttgtatgcggtc

SEQ ID NO: 7775 - DNA, 21 bp, Artificial Sequence
  Synthetic
gccttcgagaccgcatacaaa

SEQ ID NO: 7776 - DNA, 21 bp, Artificial Sequence
  Synthetic
gggccttcgagaccgcataca

SEQ ID NO: 7777 - DNA, 21 bp, Artificial Sequence
  Synthetic
cgaccacaaaacatacaaaca

SEQ ID NO: 7778 - DNA, 21 bp, Artificial Sequence
  Synthetic
tttgggcacatcaggtagtgg

SEQ ID NO: 7779 - DNA, 21 bp, Artificial Sequence
  Synthetic
ctttgggcacatcaggtagtg

SEQ ID NO: 7780 - DNA, 21 bp, Artificial Sequence
  Synthetic
tcctttgggcacatcaggtag

SEQ ID NO: 7781 - DNA, 21 bp, Artificial Sequence
  Synthetic
ctccactacctgatgtgccca

SEQ ID NO: 7782 - DNA, 21 bp, Artificial Sequence
  Synthetic
ctcctttgggcacatcaggta

SEQ ID NO: 7783 - DNA, 21 bp, Artificial Sequence
  Synthetic
tccactacctgatgtgcccaa

SEQ ID NO: 7784 - DNA, 21 bp, Artificial Sequence
  Synthetic
acctgatgtgcccaaaggaga

SEQ ID NO: 7785 - DNA, 21 bp, Artificial Sequence
  Synthetic
cctgatgtgcccaaaggagac

SEQ ID NO: 7786 - DNA, 21 bp, Artificial Sequence
  Synthetic
ttaggacacctccagtctcct

SEQ ID NO: 7787 - DNA, 21 bp, Artificial Sequence
  Synthetic
ggaggtgtcctaaatgtgtcg

SEQ ID NO: 7788 - DNA, 21 bp, Artificial Sequence
  Synthetic
cgtgtacctcggcgacacatt

SEQ ID NO: 7789 - DNA, 21 bp, Artificial Sequence
  Synthetic
atgaaagtgccgtggctctat

SEQ ID NO: 7790 - DNA, 21 bp, Artificial Sequence
  Synthetic
tgaaagtgccgtggctctatg

SEQ ID NO: 7791 - DNA, 21 bp, Artificial Sequence
  Synthetic
gaaagtgccgtggctctatgt

SEQ ID NO: 7792 - DNA, 21 bp, Artificial Sequence
  Synthetic
gaagagaagcacattcccaca

SEQ ID NO: 7793 - DNA, 21 bp, Artificial Sequence
  Synthetic
tcaatgtgccagcaaaaagaa

SEQ ID NO: 7794 - DNA, 21 bp, Artificial Sequence
  Synthetic
cctcaatgtgccagcaaaaag

SEQ ID NO: 7795 - DNA, 21 bp, Artificial Sequence
  Synthetic
gatcctcaatgtgccagcaaa

SEQ ID NO: 7796 - DNA, 21 bp, Artificial Sequence
  Synthetic
ttgctggcacattgaggatca

SEQ ID NO: 7797 - DNA, 21 bp, Artificial Sequence
  Synthetic
tgctggcacattgaggatcac

SEQ ID NO: 7798 - DNA, 21 bp, Artificial Sequence
  Synthetic
cataccagtgcaagtagttga

SEQ ID NO: 7799 - DNA, 21 bp, Artificial Sequence
  Synthetic
acataccagtgcaagtagttg

SEQ ID NO: 7800 - DNA, 21 bp, Artificial Sequence
  Synthetic
atggtgtgccatctcatgctg

SEQ ID NO: 7801 - DNA, 21 bp, Artificial Sequence
  Synthetic
ccatctcatgctgcagagcaa

SEQ ID NO: 7802 - DNA, 21 bp, Artificial Sequence
  Synthetic
catctcatgctgcagagcaac

SEQ ID NO: 7803 - DNA, 21 bp, Artificial Sequence
  Synthetic
tctcatgctgcagagcaactg

SEQ ID NO: 7804 - DNA, 21 bp, Artificial Sequence
  Synthetic
ctcctccagttgctctgcagc

SEQ ID NO: 7805 - DNA, 21 bp, Artificial Sequence
  Synthetic
ctcatgctgcagagcaactgg

SEQ ID NO: 7806 - DNA, 21 bp, Artificial Sequence
  Synthetic
gcagagcaactggaggaggtg

SEQ ID NO: 7807 - DNA, 21 bp, Artificial Sequence
  Synthetic
agagcaactggaggaggtgat

SEQ ID NO: 7808 - DNA, 21 bp, Artificial Sequence
  Synthetic
agcaactggaggaggtgatga

SEQ ID NO: 7809 - DNA, 21 bp, Artificial Sequence
  Synthetic
aggtgatgagagagctggccc

SEQ ID NO: 7810 - DNA, 21 bp, Artificial Sequence
  Synthetic
gagagctggcccccgagttat

SEQ ID NO: 7811 - DNA, 21 bp, Artificial Sequence
  Synthetic
aggctgggattcaaataactc

SEQ ID NO: 7812 - DNA, 21 bp, Artificial Sequence
  Synthetic
caggctgggattcaaataact

SEQ ID NO: 7813 - DNA, 21 bp, Artificial Sequence
  Synthetic
tcaggctgggattcaaataac

SEQ ID NO: 7814 - DNA, 21 bp, Artificial Sequence
  Synthetic
aactgatgcagaagatcaggc

SEQ ID NO: 7815 - DNA, 21 bp, Artificial Sequence
  Synthetic
taactgatgcagaagatcagg

SEQ ID NO: 7816 - DNA, 21 bp, Artificial Sequence
  Synthetic
catgatggtaactaactgatg

SEQ ID NO: 7817 - DNA, 21 bp, Artificial Sequence
  Synthetic
ctgcatcagttagttaccatc

SEQ ID NO: 7818 - DNA, 21 bp, Artificial Sequence
  Synthetic
atcatgaaccccaacgtgcta

SEQ ID NO: 7819 - DNA, 21 bp, Artificial Sequence
  Synthetic
tcatgaaccccaacgtgctaa

SEQ ID NO: 7820 - DNA, 21 bp, Artificial Sequence
  Synthetic
caccatgctccattagcacgt

SEQ ID NO: 7821 - DNA, 21 bp, Artificial Sequence
  Synthetic
acaccatgctccattagcacg

SEQ ID NO: 7822 - DNA, 21 bp, Artificial Sequence
  Synthetic
ctaatggagcatggtgtgcct

SEQ ID NO: 7823 - DNA, 21 bp, Artificial Sequence
  Synthetic
cccaatttgcatttaggtgta

SEQ ID NO: 7824 - DNA, 21 bp, Artificial Sequence
  Synthetic
acaggaccaatcagtgtgctg

SEQ ID NO: 7825 - DNA, 21 bp, Artificial Sequence
  Synthetic
catttcctcgtgcctatcact

SEQ ID NO: 7826 - DNA, 21 bp, Artificial Sequence
  Synthetic
aaatccagagtgataggcacg

SEQ ID NO: 7827 - DNA, 21 bp, Artificial Sequence
  Synthetic
taaatccagagtgataggcac

SEQ ID NO: 7828 - DNA, 21 bp, Artificial Sequence
  Synthetic
gttaaatccagagtgataggc

SEQ ID NO: 7829 - DNA, 21 bp, Artificial Sequence
  Synthetic
gcctatcactctggatttaac

SEQ ID NO: 7830 - DNA, 21 bp, Artificial Sequence
  Synthetic
agttgtagccctggttaaatc

SEQ ID NO: 7831 - DNA, 21 bp, Artificial Sequence
  Synthetic
ttaaccagggctacaactttg

SEQ ID NO: 7832 - DNA, 21 bp, Artificial Sequence
  Synthetic
ggctacaactttgctgaagct

SEQ ID NO: 7833 - DNA, 21 bp, Artificial Sequence
  Synthetic
ttaataatcttaggcaatgac

SEQ ID NO: 7834 - DNA, 21 bp, Artificial Sequence
  Synthetic
taatcttaggcaatgaccaga

SEQ ID NO: 7835 - DNA, 21 bp, Artificial Sequence
  Synthetic
taggcaatgaccagagtgaga

SEQ ID NO: 7836 - DNA, 21 bp, Artificial Sequence
  Synthetic
accagagtgagattggatttc

SEQ ID NO: 7837 - DNA, 21 bp, Artificial Sequence
  Synthetic
cttggatcaactagcaaaatt

SEQ ID NO: 7838 - DNA, 21 bp, Artificial Sequence
  Synthetic
ttggatcaactagcaaaattt

SEQ ID NO: 7839 - DNA, 21 bp, Artificial Sequence
  Synthetic
tgggaacttcaaggatctact

SEQ ID NO: 7840 - DNA, 21 bp, Artificial Sequence
  Synthetic
agggatcttcagagtagatcc

SEQ ID NO: 7841 - DNA, 21 bp, Artificial Sequence
  Synthetic
ctactctgaagatccctgtgg

SEQ ID NO: 7842 - DNA, 21 bp, Artificial Sequence
  Synthetic
actctgaagatccctgtggta

SEQ ID NO: 7843 - DNA, 21 bp, Artificial Sequence
  Synthetic
tctctctaccacagggatctt

SEQ ID NO: 7844 - DNA, 21 bp, Artificial Sequence
  Synthetic
tctgaagatccctgtggtaga

SEQ ID NO: 7845 - DNA, 21 bp, Artificial Sequence
  Synthetic
cctgtggtagagagaaaaatc

SEQ ID NO: 7846 - DNA, 21 bp, Artificial Sequence
  Synthetic
aaaatcctggatctgtatgct

SEQ ID NO: 7847 - DNA, 21 bp, Artificial Sequence
  Synthetic
cttgctcaaagcatacagatc

SEQ ID NO: 7848 - DNA, 21 bp, Artificial Sequence
  Synthetic
gatctgtatgctttgagcaag

SEQ ID NO: 7849 - DNA, 21 bp, Artificial Sequence
  Synthetic
acctcctttgctggcaacaat

SEQ ID NO: 7850 - DNA, 21 bp, Artificial Sequence
  Synthetic
ttgttgccagcaaaggaggtt

SEQ ID NO: 7851 - DNA, 21 bp, Artificial Sequence
  Synthetic
tttgaaatggtcaccaaagag

SEQ ID NO: 7852 - DNA, 21 bp, Artificial Sequence
  Synthetic
aaagagaagaaatggtctaaa

SEQ ID NO: 7853 - DNA, 21 bp, Artificial Sequence
  Synthetic
tggtctaaagtgggtagtcgc

SEQ ID NO: 7854 - DNA, 21 bp, Artificial Sequence
  Synthetic
ggtctaaagtgggtagtcgct

SEQ ID NO: 7855 - DNA, 21 bp, Artificial Sequence
  Synthetic
gtagtcgcttgggatatctgc

SEQ ID NO: 7856 - DNA, 21 bp, Artificial Sequence
  Synthetic
tagtcgcttgggatatctgcc

SEQ ID NO: 7857 - DNA, 21 bp, Artificial Sequence
  Synthetic
gcttgggatatctgccaggaa

SEQ ID NO: 7858 - DNA, 21 bp, Artificial Sequence
  Synthetic
cttgggatatctgccaggaaa

SEQ ID NO: 7859 - DNA, 21 bp, Artificial Sequence
  Synthetic
gatatctgccaggaaaaggaa

SEQ ID NO: 7860 - DNA, 21 bp, Artificial Sequence
  Synthetic
ggaaaaggaactgggtctctt

SEQ ID NO: 7861 - DNA, 21 bp, Artificial Sequence
  Synthetic
tctttcataatgtgacttcaa

SEQ ID NO: 7862 - DNA, 21 bp, Artificial Sequence
  Synthetic
atgaaagaattctctacccat

SEQ ID NO: 7863 - DNA, 21 bp, Artificial Sequence
  Synthetic
ctggaaaagctcatatgggta

SEQ ID NO: 7864 - DNA, 21 bp, Artificial Sequence
  Synthetic
gactggaaaagctcatatggg

SEQ ID NO: 7865 - DNA, 21 bp, Artificial Sequence
  Synthetic
caccagactggaaaagctcat

SEQ ID NO: 7866 - DNA, 21 bp, Artificial Sequence
  Synthetic
caccgccagagtgccccgtct

SEQ ID NO: 7867 - DNA, 21 bp, Artificial Sequence
  Synthetic
ccagagtgccccgtctttgag

SEQ ID NO: 7868 - DNA, 21 bp, Artificial Sequence
  Synthetic
gtgccccgtctttgagccgag

SEQ ID NO: 7869 - DNA, 21 bp, Artificial Sequence
  Synthetic
tgccccgtctttgagccgagt

SEQ ID NO: 7870 - DNA, 21 bp, Artificial Sequence
  Synthetic
gccccgtctttgagccgagtt

SEQ ID NO: 7871 - DNA, 21 bp, Artificial Sequence
  Synthetic
cctcccaactcggctcaaaga

SEQ ID NO: 7872 - DNA, 21 bp, Artificial Sequence
  Synthetic
tcctcccaactcggctcaaag

SEQ ID NO: 7873 - DNA, 21 bp, Artificial Sequence
  Synthetic
cccgtctttgagccgagttgg

SEQ ID NO: 7874 - DNA, 21 bp, Artificial Sequence
  Synthetic
ccgtctttgagccgagttggg

SEQ ID NO: 7875 - DNA, 21 bp, Artificial Sequence
  Synthetic
ccgataaagctgagcggatct

SEQ ID NO: 7876 - DNA, 21 bp, Artificial Sequence
  Synthetic
ggatgcggccgataaagctga

SEQ ID NO: 7877 - DNA, 21 bp, Artificial Sequence
  Synthetic
ggccggatgcggccgataaag

SEQ ID NO: 7878 - DNA, 21 bp, Artificial Sequence
  Synthetic
atcggccgcatccggcctttg

SEQ ID NO: 7879 - DNA, 21 bp, Artificial Sequence
  Synthetic
tcggccgcatccggcctttgg

SEQ ID NO: 7880 - DNA, 21 bp, Artificial Sequence
  Synthetic
ggccgcatccggcctttggcg

SEQ ID NO: 7881 - DNA, 21 bp, Artificial Sequence
  Synthetic
agactgaggtaccttgggcgg

SEQ ID NO: 7882 - DNA, 21 bp, Artificial Sequence
  Synthetic
ttagaattaagagattatcaa

SEQ ID NO: 7883 - DNA, 21 bp, Artificial Sequence
  Synthetic
atatacttacttgcaccaaga

SEQ ID NO: 7884 - DNA, 21 bp, Artificial Sequence
  Synthetic
caaaatatacttacttgcacc

SEQ ID NO: 7885 - DNA, 21 bp, Artificial Sequence
  Synthetic
gaaatagttgcatactcgctg

SEQ ID NO: 7886 - DNA, 21 bp, Artificial Sequence
  Synthetic
agttgcatactcgctgatgaa

SEQ ID NO: 7887 - DNA, 21 bp, Artificial Sequence
  Synthetic
tactcgctgatgaaatgggcc

SEQ ID NO: 7888 - DNA, 21 bp, Artificial Sequence
  Synthetic
actcgctgatgaaatgggcct

SEQ ID NO: 7889 - DNA, 21 bp, Artificial Sequence
  Synthetic
tttccaaggcccatttcatca

SEQ ID NO: 7890 - DNA, 21 bp, Artificial Sequence
  Synthetic
acaatacagacgatctcattt

SEQ ID NO: 7891 - DNA, 21 bp, Artificial Sequence
  Synthetic
catgaaacaaataattcagaa

SEQ ID NO: 7892 - DNA, 21 bp, Artificial Sequence
  Synthetic
catttctgaattatttgtttc

SEQ ID NO: 7893 - DNA, 21 bp, Artificial Sequence
  Synthetic
atgttcatgaaacaaataatt

SEQ ID NO: 7894 - DNA, 21 bp, Artificial Sequence
  Synthetic
tgtttcatgaacatcaattat

SEQ ID NO: 7895 - DNA, 21 bp, Artificial Sequence
  Synthetic
aggtccatataattgatgttc

SEQ ID NO: 7896 - DNA, 21 bp, Artificial Sequence
  Synthetic
ctttgccaggaagtaagagtg

SEQ ID NO: 7897 - DNA, 21 bp, Artificial Sequence
  Synthetic
ccctttgccaggaagtaagag

SEQ ID NO: 7898 - DNA, 21 bp, Artificial Sequence
  Synthetic
ctccactcttacttcctggca

SEQ ID NO: 7899 - DNA, 21 bp, Artificial Sequence
  Synthetic
tccctttgccaggaagtaaga

SEQ ID NO: 7900 - DNA, 21 bp, Artificial Sequence
  Synthetic
tccactcttacttcctggcaa

SEQ ID NO: 7901 - DNA, 21 bp, Artificial Sequence
  Synthetic
ccactcttacttcctggcaaa

SEQ ID NO: 7902 - DNA, 21 bp, Artificial Sequence
  Synthetic
aatttccctttgccaggaagt

SEQ ID NO: 7903 - DNA, 21 bp, Artificial Sequence
  Synthetic
aagtctgaatttccctttgcc

SEQ ID NO: 7904 - DNA, 21 bp, Artificial Sequence
  Synthetic
caagtctgaatttccctttgc

SEQ ID NO: 7905 - DNA, 21 bp, Artificial Sequence
  Synthetic
ctggcaaagggaaattcagac

SEQ ID NO: 7906 - DNA, 21 bp, Artificial Sequence
  Synthetic
attcagacttgggcttctcaa

SEQ ID NO: 7907 - DNA, 21 bp, Artificial Sequence
  Synthetic
attcatttgagaagcccaagt

SEQ ID NO: 7908 - DNA, 21 bp, Artificial Sequence
  Synthetic
aataaaccacagcattcattt

SEQ ID NO: 7909 - DNA, 21 bp, Artificial Sequence
  Synthetic
taaataaaccacagcattcat

SEQ ID NO: 7910 - DNA, 21 bp, Artificial Sequence
  Synthetic
ttatttaggtgacattaacag

SEQ ID NO: 7911 - DNA, 21 bp, Artificial Sequence
  Synthetic
tttcttaatagataagaactc

SEQ ID NO: 7912 - DNA, 21 bp, Artificial Sequence
  Synthetic
ttaatagataagaactcatga

SEQ ID NO: 7913 - DNA, 21 bp, Artificial Sequence
  Synthetic
ggtctgatgatgcgtccattc

SEQ ID NO: 7914 - DNA, 21 bp, Artificial Sequence
  Synthetic
ttaatatattgttaacaactt

SEQ ID NO: 7915 - DNA, 21 bp, Artificial Sequence
  Synthetic
ggcattccttggaggtctaaa

SEQ ID NO: 7916 - DNA, 21 bp, Artificial Sequence
  Synthetic
aatgcccaatttagacctcca

SEQ ID NO: 7917 - DNA, 21 bp, Artificial Sequence
  Synthetic
aaatgcccaatttagacctcc

SEQ ID NO: 7918 - DNA, 21 bp, Artificial Sequence
  Synthetic
attgggcatttataggtgttg

SEQ ID NO: 7919 - DNA, 21 bp, Artificial Sequence
  Synthetic
gttgatgaagcacaccgatta

SEQ ID NO: 7920 - DNA, 21 bp, Artificial Sequence
  Synthetic
ccagtgataaggagacgatga

SEQ ID NO: 7921 - DNA, 21 bp, Artificial Sequence
  Synthetic
ccaatcatcgtctccttatca

SEQ ID NO: 7922 - DNA, 21 bp, Artificial Sequence
  Synthetic
caatcatcgtctccttatcac

SEQ ID NO: 7923 - DNA, 21 bp, Artificial Sequence
  Synthetic
tgtagaggagttccagtgata

SEQ ID NO: 7924 - DNA, 21 bp, Artificial Sequence
  Synthetic
ctgtagaggagttccagtgat

SEQ ID NO: 7925 - DNA, 21 bp, Artificial Sequence
  Synthetic
cttatcactggaactcctcta

SEQ ID NO: 7926 - DNA, 21 bp, Artificial Sequence
  Synthetic
ctctttgagggaattctgtag

SEQ ID NO: 7927 - DNA, 21 bp, Artificial Sequence
  Synthetic
ctcctctacagaattccctca

SEQ ID NO: 7928 - DNA, 21 bp, Artificial Sequence
  Synthetic
gctctttgagggaattctgta

SEQ ID NO: 7929 - DNA, 21 bp, Artificial Sequence
  Synthetic
gagctctttgagggaattctg

SEQ ID NO: 7930 - DNA, 21 bp, Artificial Sequence
  Synthetic
gcaaagaccagagctctttga

SEQ ID NO: 7931 - DNA, 21 bp, Artificial Sequence
  Synthetic
agcaaagaccagagctctttg

SEQ ID NO: 7932 - DNA, 21 bp, Artificial Sequence
  Synthetic
tagcaaagaccagagctcttt

SEQ ID NO: 7933 - DNA, 21 bp, Artificial Sequence
  Synthetic
tgtagcaaagaccagagctct

SEQ ID NO: 7934 - DNA, 21 bp, Artificial Sequence
  Synthetic
ataatgaaatgtagcaaagac

SEQ ID NO: 7935 - DNA, 21 bp, Artificial Sequence
  Synthetic
ctttgctacatttcattatgc

SEQ ID NO: 7936 - DNA, 21 bp, Artificial Sequence
  Synthetic
cttcttcaaaatcttcccagg

SEQ ID NO: 7937 - DNA, 21 bp, Artificial Sequence
  Synthetic
gttcttcttcaaaatcttccc

SEQ ID NO: 7938 - DNA, 21 bp, Artificial Sequence
  Synthetic
tgttcttcttcaaaatcttcc

SEQ ID NO: 7939 - DNA, 21 bp, Artificial Sequence
  Synthetic
tttgaagaagaacatggcaaa

SEQ ID NO: 7940 - DNA, 21 bp, Artificial Sequence
  Synthetic
tgaagaagaacatggcaaagg

SEQ ID NO: 7941 - DNA, 21 bp, Artificial Sequence
  Synthetic
aagaagaacatggcaaaggga

SEQ ID NO: 7942 - DNA, 21 bp, Artificial Sequence
  Synthetic
tatggttatgcaagccttcac

SEQ ID NO: 7943 - DNA, 21 bp, Artificial Sequence
  Synthetic
atggttatgcaagccttcaca

SEQ ID NO: 7944 - DNA, 21 bp, Artificial Sequence
  Synthetic
atgcaagccttcacaaggagc

SEQ ID NO: 7945 - DNA, 21 bp, Artificial Sequence
  Synthetic
cagaaatggctcaagctcctt

SEQ ID NO: 7946 - DNA, 21 bp, Artificial Sequence
  Synthetic
gcttgagccatttctgttacg

SEQ ID NO: 7947 - DNA, 21 bp, Artificial Sequence
  Synthetic
ccatttctgttacgccgagtt

SEQ ID NO: 7948 - DNA, 21 bp, Artificial Sequence
  Synthetic
atctttcttaactcggcgtaa

SEQ ID NO: 7949 - DNA, 21 bp, Artificial Sequence
  Synthetic
ttacgccgagttaagaaagat

SEQ ID NO: 7950 - DNA, 21 bp, Artificial Sequence
  Synthetic
tacgccgagttaagaaagatg

SEQ ID NO: 7951 - DNA, 21 bp, Artificial Sequence
  Synthetic
aaaaatctcttcctgccaagg

SEQ ID NO: 7952 - DNA, 21 bp, Artificial Sequence
  Synthetic
aatctgctcaaccttggcagg

SEQ ID NO: 7953 - DNA, 21 bp, Artificial Sequence
  Synthetic
taaaatctgctcaaccttggc

SEQ ID NO: 7954 - DNA, 21 bp, Artificial Sequence
  Synthetic
ttaaaatctgctcaaccttgg

SEQ ID NO: 7955 - DNA, 21 bp, Artificial Sequence
  Synthetic
agaatggaaatgagtgcttta

SEQ ID NO: 7956 - DNA, 21 bp, Artificial Sequence
  Synthetic
aaagccctcagcaaaggttcc

SEQ ID NO: 7957 - DNA, 21 bp, Artificial Sequence
  Synthetic
actgcccttggaacctttgct

SEQ ID NO: 7958 - DNA, 21 bp, Artificial Sequence
  Synthetic
gtactgcccttggaacctttg

SEQ ID NO: 7959 - DNA, 21 bp, Artificial Sequence
  Synthetic
aaaagcctgaggtactgccct

SEQ ID NO: 7960 - DNA, 21 bp, Artificial Sequence
  Synthetic
aaaaagcctgaggtactgccc

SEQ ID NO: 7961 - DNA, 21 bp, Artificial Sequence
  Synthetic
aagggcagtacctcaggcttt

SEQ ID NO: 7962 - DNA, 21 bp, Artificial Sequence
  Synthetic
ccatcataatgttcaaaaagc

SEQ ID NO: 7963 - DNA, 21 bp, Artificial Sequence
  Synthetic
ttgaacattatgatggagcta

SEQ ID NO: 7964 - DNA, 21 bp, Artificial Sequence
  Synthetic
ctacataaacagtatcaaata

SEQ ID NO: 7965 - DNA, 21 bp, Artificial Sequence
  Synthetic
tacataaacagtatcaaatag

SEQ ID NO: 7966 - DNA, 21 bp, Artificial Sequence
  Synthetic
cctgccatttgcagtaataat

SEQ ID NO: 7967 - DNA, 21 bp, Artificial Sequence
  Synthetic
cctgattattactgcaaatgg

SEQ ID NO: 7968 - DNA, 21 bp, Artificial Sequence
  Synthetic
aatggcagggccttccatact

SEQ ID NO: 7969 - DNA, 21 bp, Artificial Sequence
  Synthetic
ccttccatactcagagtgcag

SEQ ID NO: 7970 - DNA, 21 bp, Artificial Sequence
  Synthetic
cttccatactcagagtgcagc

SEQ ID NO: 7971 - DNA, 21 bp, Artificial Sequence
  Synthetic
ttcccagctgcactctgagta

SEQ ID NO: 7972 - DNA, 21 bp, Artificial Sequence
  Synthetic
ttccatactcagagtgcagct

SEQ ID NO: 7973 - DNA, 21 bp, Artificial Sequence
  Synthetic
cttcccagctgcactctgagt

SEQ ID NO: 7974 - DNA, 21 bp, Artificial Sequence
  Synthetic
actcagagtgcagctgggaag

SEQ ID NO: 7975 - DNA, 21 bp, Artificial Sequence
  Synthetic
ctccatcttcccagctgcact

SEQ ID NO: 7976 - DNA, 21 bp, Artificial Sequence
  Synthetic
ctcagagtgcagctgggaaga

SEQ ID NO: 7977 - DNA, 21 bp, Artificial Sequence
  Synthetic
tcaatgcatgcttgaaacttt

SEQ ID NO: 7978 - DNA, 21 bp, Artificial Sequence
  Synthetic
aaaagtttcaagcatgcattg

SEQ ID NO: 7979 - DNA, 21 bp, Artificial Sequence
  Synthetic
aaaatactcatcaatgcatgc

SEQ ID NO: 7980 - DNA, 21 bp, Artificial Sequence
  Synthetic
atgcaggctttgaaaaaaaca

SEQ ID NO: 7981 - DNA, 21 bp, Artificial Sequence
  Synthetic
gctttgaaaaaaacaaagaac

SEQ ID NO: 7982 - DNA, 21 bp, Artificial Sequence
  Synthetic
ctttgaaaaaaacaaagaacc

SEQ ID NO: 7983 - DNA, 21 bp, Artificial Sequence
  Synthetic
ttgaaaaaaacaaagaaccag

SEQ ID NO: 7984 - DNA, 21 bp, Artificial Sequence
  Synthetic
agagattcagtatttaattaa

SEQ ID NO: 7985 - DNA, 21 bp, Artificial Sequence
  Synthetic
gagattcagtatttaattaaa

SEQ ID NO: 7986 - DNA, 21 bp, Artificial Sequence
  Synthetic
tcctttccatttaattaaata

SEQ ID NO: 7987 - DNA, 21 bp, Artificial Sequence
  Synthetic
ttcagtatttaattaaatgga

SEQ ID NO: 7988 - DNA, 21 bp, Artificial Sequence
  Synthetic
atggtcccatatccacaacac

SEQ ID NO: 7989 - DNA, 21 bp, Artificial Sequence
  Synthetic
tggtcccatatccacaacact

SEQ ID NO: 7990 - DNA, 21 bp, Artificial Sequence
  Synthetic
ggtcccatatccacaacactt

SEQ ID NO: 7991 - DNA, 21 bp, Artificial Sequence
  Synthetic
gtctcccaagtgttgtggata

SEQ ID NO: 7992 - DNA, 21 bp, Artificial Sequence
  Synthetic
tgtctcccaagtgttgtggat

SEQ ID NO: 7993 - DNA, 21 bp, Artificial Sequence
  Synthetic
atatccacaacacttgggaga

SEQ ID NO: 7994 - DNA, 21 bp, Artificial Sequence
  Synthetic
ttcttctgtctcccaagtgtt

SEQ ID NO: 7995 - DNA, 21 bp, Artificial Sequence
  Synthetic
tccacaacacttgggagacag

SEQ ID NO: 7996 - DNA, 21 bp, Artificial Sequence
  Synthetic
acagaagaaaccctcaagcag

SEQ ID NO: 7997 - DNA, 21 bp, Artificial Sequence
  Synthetic
aaccctcaagcagcagaatgt

SEQ ID NO: 7998 - DNA, 21 bp, Artificial Sequence
  Synthetic
tcctctaacattctgctgctt

SEQ ID NO: 7999 - DNA, 21 bp, Artificial Sequence
  Synthetic
ccctcaagcagcagaatgtta

SEQ ID NO: 8000 - DNA, 21 bp, Artificial Sequence
  Synthetic
cctcaagcagcagaatgttag

SEQ ID NO: 8001 - DNA, 21 bp, Artificial Sequence
  Synthetic
attcctctaacattctgctgc

SEQ ID NO: 8002 - DNA, 21 bp, Artificial Sequence
  Synthetic
aagcagcagaatgttagagga

SEQ ID NO: 8003 - DNA, 21 bp, Artificial Sequence
  Synthetic
aatgttagaggaatgaaaaaa

SEQ ID NO: 8004 - DNA, 21 bp, Artificial Sequence
  Synthetic
atgaaaaaattggataattat

SEQ ID NO: 8005 - DNA, 21 bp, Artificial Sequence
  Synthetic
ggcaccctgcacatgtatcag

SEQ ID NO: 8006 - DNA, 21 bp, Artificial Sequence
  Synthetic
gcaccctgcacatgtatcagt

SEQ ID NO: 8007 - DNA, 21 bp, Artificial Sequence
  Synthetic
ccctgcacatgtatcagttgg

SEQ ID NO: 8008 - DNA, 21 bp, Artificial Sequence
  Synthetic
cacatgtatcagttggaaggg

SEQ ID NO: 8009 - DNA, 21 bp, Artificial Sequence
  Synthetic
gctgaactggctacgcttctc

SEQ ID NO: 8010 - DNA, 21 bp, Artificial Sequence
  Synthetic
tggctacgcttctcctgggcc

SEQ ID NO: 8011 - DNA, 21 bp, Artificial Sequence
  Synthetic
gtgtcagtgccctgggcccag

SEQ ID NO: 8012 - DNA, 21 bp, Artificial Sequence
  Synthetic
tggtgtcagtgccctgggccc

SEQ ID NO: 8013 - DNA, 21 bp, Artificial Sequence
  Synthetic
atggtgtcagtgccctgggcc

SEQ ID NO: 8014 - DNA, 21 bp, Artificial Sequence
  Synthetic
agctagaatggtgtcagtgcc

SEQ ID NO: 8015 - DNA, 21 bp, Artificial Sequence
  Synthetic
gcactgacaccattctagctg

SEQ ID NO: 8016 - DNA, 21 bp, Artificial Sequence
  Synthetic
gacaccattctagctgatgag

SEQ ID NO: 8017 - DNA, 21 bp, Artificial Sequence
  Synthetic
acaccattctagctgatgaga

SEQ ID NO: 8018 - DNA, 21 bp, Artificial Sequence
  Synthetic
gcctagccccatctcatcagc

SEQ ID NO: 8019 - DNA, 21 bp, Artificial Sequence
  Synthetic
gtcttcctctactcactctac

SEQ ID NO: 8020 - DNA, 21 bp, Artificial Sequence
  Synthetic
tcttcctctactcactctaca

SEQ ID NO: 8021 - DNA, 21 bp, Artificial Sequence
  Synthetic
acctccttgtagagtgagtag

SEQ ID NO: 8022 - DNA, 21 bp, Artificial Sequence
  Synthetic
cacctccttgtagagtgagta

SEQ ID NO: 8023 - DNA, 21 bp, Artificial Sequence
  Synthetic
agcacctccttgtagagtgag

SEQ ID NO: 8024 - DNA, 21 bp, Artificial Sequence
  Synthetic
aatccagcacctccttgtaga

SEQ ID NO: 8025 - DNA, 21 bp, Artificial Sequence
  Synthetic
ctagaatccagcacctccttg

SEQ ID NO: 8026 - DNA, 21 bp, Artificial Sequence
  Synthetic
cacacaaaaggtcccttcctg

SEQ ID NO: 8027 - DNA, 21 bp, Artificial Sequence
  Synthetic
agagtggggcactcaccagga

SEQ ID NO: 8028 - DNA, 21 bp, Artificial Sequence
  Synthetic
gagagtggggcactcaccagg

SEQ ID NO: 8029 - DNA, 21 bp, Artificial Sequence
  Synthetic
gtagagagtggggcactcacc

SEQ ID NO: 8030 - DNA, 21 bp, Artificial Sequence
  Synthetic
ggtagagagtggggcactcac

SEQ ID NO: 8031 - DNA, 21 bp, Artificial Sequence
  Synthetic
ccagttaatgatggtagagag

SEQ ID NO: 8032 - DNA, 21 bp, Artificial Sequence
  Synthetic
cccagttaatgatggtagaga

SEQ ID NO: 8033 - DNA, 21 bp, Artificial Sequence
  Synthetic
cccactctctaccatcattaa

SEQ ID NO: 8034 - DNA, 21 bp, Artificial Sequence
  Synthetic
ccactctctaccatcattaac

SEQ ID NO: 8035 - DNA, 21 bp, Artificial Sequence
  Synthetic
cactctctaccatcattaact

SEQ ID NO: 8036 - DNA, 21 bp, Artificial Sequence
  Synthetic
cgctcccagttaatgatggta

SEQ ID NO: 8037 - DNA, 21 bp, Artificial Sequence
  Synthetic
cccgctcccagttaatgatgg

SEQ ID NO: 8038 - DNA, 21 bp, Artificial Sequence
  Synthetic
ctctaccatcattaactggga

SEQ ID NO: 8039 - DNA, 21 bp, Artificial Sequence
  Synthetic
tctaccatcattaactgggag

SEQ ID NO: 8040 - DNA, 21 bp, Artificial Sequence
  Synthetic
ctaccatcattaactgggagc

SEQ ID NO: 8041 - DNA, 21 bp, Artificial Sequence
  Synthetic
ctgggagcgggagttccagat

SEQ ID NO: 8042 - DNA, 21 bp, Artificial Sequence
  Synthetic
tagaatttgggtgcccacatc

SEQ ID NO: 8043 - DNA, 21 bp, Artificial Sequence
  Synthetic
atagaatttgggtgcccacat

SEQ ID NO: 8044 - DNA, 21 bp, Artificial Sequence
  Synthetic
gtgtatgtcaccacatagaat

SEQ ID NO: 8045 - DNA, 21 bp, Artificial Sequence
  Synthetic
aaattctatgtggtgacatac

SEQ ID NO: 8046 - DNA, 21 bp, Artificial Sequence
  Synthetic
tcacccgtgtatgtcaccaca

SEQ ID NO: 8047 - DNA, 21 bp, Artificial Sequence
  Synthetic
gtggtgacatacacgggtgac

SEQ ID NO: 8048 - DNA, 21 bp, Artificial Sequence
  Synthetic
atacacgggtgacaaggacag

SEQ ID NO: 8049 - DNA, 21 bp, Artificial Sequence
  Synthetic
aggacagccgggccatcattc

SEQ ID NO: 8050 - DNA, 21 bp, Artificial Sequence
  Synthetic
gacagccgggccatcattcgt

SEQ ID NO: 8051 - DNA, 21 bp, Artificial Sequence
  Synthetic
gccgggccatcattcgtgaga

SEQ ID NO: 8052 - DNA, 21 bp, Artificial Sequence
  Synthetic
ctcaaaggagaattcattctc

SEQ ID NO: 8053 - DNA, 21 bp, Artificial Sequence
  Synthetic
ttcgtgagaatgaattctcct

SEQ ID NO: 8054 - DNA, 21 bp, Artificial Sequence
  Synthetic
cgtgagaatgaattctccttt

SEQ ID NO: 8055 - DNA, 21 bp, Artificial Sequence
  Synthetic
ttgatggcattgtcctcaaag

SEQ ID NO: 8056 - DNA, 21 bp, Artificial Sequence
  Synthetic
ctttgatggcattgtcctcaa

SEQ ID NO: 8057 - DNA, 21 bp, Artificial Sequence
  Synthetic
cctttgatggcattgtcctca

SEQ ID NO: 8058 - DNA, 21 bp, Artificial Sequence
  Synthetic
cctttgaggacaatgccatca

SEQ ID NO: 8059 - DNA, 21 bp, Artificial Sequence
  Synthetic
ctttgaggacaatgccatcaa

SEQ ID NO: 8060 - DNA, 21 bp, Artificial Sequence
  Synthetic
tttgaggacaatgccatcaaa

SEQ ID NO: 8061 - DNA, 21 bp, Artificial Sequence
  Synthetic
gacaatgccatcaaagggggc

SEQ ID NO: 8062 - DNA, 21 bp, Artificial Sequence
  Synthetic
tgttggcagagggaggcacag

SEQ ID NO: 8063 - DNA, 21 bp, Artificial Sequence
  Synthetic
tcatacgatgtcaggagaaca

SEQ ID NO: 8064 - DNA, 21 bp, Artificial Sequence
  Synthetic
ctcatacgatgtcaggagaac

SEQ ID NO: 8065 - DNA, 21 bp, Artificial Sequence
  Synthetic
tccatgttctcctgacatcgt

SEQ ID NO: 8066 - DNA, 21 bp, Artificial Sequence
  Synthetic
gatcagctcatacgatgtcag

SEQ ID NO: 8067 - DNA, 21 bp, Artificial Sequence
  Synthetic
gtgatcagctcatacgatgtc

SEQ ID NO: 8068 - DNA, 21 bp, Artificial Sequence
  Synthetic
ggtgatcagctcatacgatgt

SEQ ID NO: 8069 - DNA, 21 bp, Artificial Sequence
  Synthetic
ggcagcacttggttccatccg

SEQ ID NO: 8070 - DNA, 21 bp, Artificial Sequence
  Synthetic
ccacaagacaggcccagcgga

SEQ ID NO: 8071 - DNA, 21 bp, Artificial Sequence
  Synthetic
accacaagacaggcccagcgg

SEQ ID NO: 8072 - DNA, 21 bp, Artificial Sequence
  Synthetic
atctaccacaagacaggccca

SEQ ID NO: 8073 - DNA, 21 bp, Artificial Sequence
  Synthetic
gctgggcctgtcttgtggtag

SEQ ID NO: 8074 - DNA, 21 bp, Artificial Sequence
  Synthetic
gtagatgaggcccatcgactc

SEQ ID NO: 8075 - DNA, 21 bp, Artificial Sequence
  Synthetic
ggactggttgttcttgagtcg

SEQ ID NO: 8076 - DNA, 21 bp, Artificial Sequence
  Synthetic
ctcaccttggactggttgttc

SEQ ID NO: 8077 - DNA, 21 bp, Artificial Sequence
  Synthetic
ctcaagaacaaccagtccaag

SEQ ID NO: 8078 - DNA, 21 bp, Artificial Sequence
  Synthetic
atcttgtaaccattgagaacc

SEQ ID NO: 8079 - DNA, 21 bp, Artificial Sequence
  Synthetic
atgatctatcttgtaaccatt

SEQ ID NO: 8080 - DNA, 21 bp, Artificial Sequence
  Synthetic
ttatgatctatcttgtaacca

SEQ ID NO: 8081 - DNA, 21 bp, Artificial Sequence
  Synthetic
tagatcataagttgctgctga

SEQ ID NO: 8082 - DNA, 21 bp, Artificial Sequence
  Synthetic
agatcataagttgctgctgac

SEQ ID NO: 8083 - DNA, 21 bp, Artificial Sequence
  Synthetic
ctgctgacaggaaccccattg

SEQ ID NO: 8084 - DNA, 21 bp, Artificial Sequence
  Synthetic
ggaaccccattgcagaataat

SEQ ID NO: 8085 - DNA, 21 bp, Artificial Sequence
  Synthetic
gaaccccattgcagaataatc

SEQ ID NO: 8086 - DNA, 21 bp, Artificial Sequence
  Synthetic
accccattgcagaataatctg

SEQ ID NO: 8087 - DNA, 21 bp, Artificial Sequence
  Synthetic
ctcctccagattattctgcaa

SEQ ID NO: 8088 - DNA, 21 bp, Artificial Sequence
  Synthetic
ccccattgcagaataatctgg

SEQ ID NO: 8089 - DNA, 21 bp, Artificial Sequence
  Synthetic
gctcctccagattattctgca

SEQ ID NO: 8090 - DNA, 21 bp, Artificial Sequence
  Synthetic
ctggaggagctcttccatctc

SEQ ID NO: 8091 - DNA, 21 bp, Artificial Sequence
  Synthetic
gtgaggaagttcaggagatgg

SEQ ID NO: 8092 - DNA, 21 bp, Artificial Sequence
  Synthetic
ggggtgaggaagttcaggaga

SEQ ID NO: 8093 - DNA, 21 bp, Artificial Sequence
  Synthetic
tggggtgaggaagttcaggag

SEQ ID NO: 8094 - DNA, 21 bp, Artificial Sequence
  Synthetic
atctcctgaacttcctcaccc

SEQ ID NO: 8095 - DNA, 21 bp, Artificial Sequence
  Synthetic
ctctctggggtgaggaagttc

SEQ ID NO: 8096 - DNA, 21 bp, Artificial Sequence
  Synthetic
ctcctgaacttcctcacccca

SEQ ID NO: 8097 - DNA, 21 bp, Artificial Sequence
  Synthetic
tctctctggggtgaggaagtt

SEQ ID NO: 8098 - DNA, 21 bp, Artificial Sequence
  Synthetic
tacttaaatctctctggggtg

SEQ ID NO: 8099 - DNA, 21 bp, Artificial Sequence
  Synthetic
ttacttaaatctctctggggt

SEQ ID NO: 8100 - DNA, 21 bp, Artificial Sequence
  Synthetic
acttacttaaatctctctggg

SEQ ID NO: 8101 - DNA, 21 bp, Artificial Sequence
  Synthetic
aaccacttacttaaatctctc

SEQ ID NO: 8102 - DNA, 21 bp, Artificial Sequence
  Synthetic
gaaccacttacttaaatctct

SEQ ID NO: 8103 - DNA, 21 bp, Artificial Sequence
  Synthetic
tctcttctggctcttagcaac

SEQ ID NO: 8104 - DNA, 21 bp, Artificial Sequence
  Synthetic
ctcttctggctcttagcaact

SEQ ID NO: 8105 - DNA, 21 bp, Artificial Sequence
  Synthetic
cttctggctcttagcaacttg

SEQ ID NO: 8106 - DNA, 21 bp, Artificial Sequence
  Synthetic
caggaagccctccaagttgct

SEQ ID NO: 8107 - DNA, 21 bp, Artificial Sequence
  Synthetic
cttagcaacttggagggcttc

SEQ ID NO: 8108 - DNA, 21 bp, Artificial Sequence
  Synthetic
ttagcaacttggagggcttcc

SEQ ID NO: 8109 - DNA, 21 bp, Artificial Sequence
  Synthetic
agcaacttggagggcttcctg

SEQ ID NO: 8110 - DNA, 21 bp, Artificial Sequence
  Synthetic
gcaacttggagggcttcctgg

SEQ ID NO: 8111 - DNA, 21 bp, Artificial Sequence
  Synthetic
gatatgtcagcaaactcctcc

SEQ ID NO: 8112 - DNA, 21 bp, Artificial Sequence
  Synthetic
ggatatgtcagcaaactcctc

SEQ ID NO: 8113 - DNA, 21 bp, Artificial Sequence
  Synthetic
aggagtttgctgacatatcca

SEQ ID NO: 8114 - DNA, 21 bp, Artificial Sequence
  Synthetic
gagtttgctgacatatccaaa

SEQ ID NO: 8115 - DNA, 21 bp, Artificial Sequence
  Synthetic
atatccaaagaggaccagatc

SEQ ID NO: 8116 - DNA, 21 bp, Artificial Sequence
  Synthetic
agtttcttgatctggtcctct

SEQ ID NO: 8117 - DNA, 21 bp, Artificial Sequence
  Synthetic
atcaagaaactgcatgatttg

SEQ ID NO: 8118 - DNA, 21 bp, Artificial Sequence
  Synthetic
tcaagaaactgcatgatttgc

SEQ ID NO: 8119 - DNA, 21 bp, Artificial Sequence
  Synthetic
tttgctggggccacacatgct

SEQ ID NO: 8120 - DNA, 21 bp, Artificial Sequence
  Synthetic
ttgctggggccacacatgctg

SEQ ID NO: 8121 - DNA, 21 bp, Artificial Sequence
  Synthetic
agactcaaggcagatgtcttt

SEQ ID NO: 8122 - DNA, 21 bp, Artificial Sequence
  Synthetic
atgttcttaaagacatctgcc

SEQ ID NO: 8123 - DNA, 21 bp, Artificial Sequence
  Synthetic
ttaagaacatgccagccaaga

SEQ ID NO: 8124 - DNA, 21 bp, Artificial Sequence
  Synthetic
agccaagacagagctcatcgt

SEQ ID NO: 8125 - DNA, 21 bp, Artificial Sequence
  Synthetic
aagacagagctcatcgttcgg

SEQ ID NO: 8126 - DNA, 21 bp, Artificial Sequence
  Synthetic
agacagagctcatcgttcggg

SEQ ID NO: 8127 - DNA, 21 bp, Artificial Sequence
  Synthetic
gggcttagctccacccgaacg

SEQ ID NO: 8128 - DNA, 21 bp, Artificial Sequence
  Synthetic
ctgcatggggcttagctccac

SEQ ID NO: 8129 - DNA, 21 bp, Artificial Sequence
  Synthetic
cgggtggagctaagccccatg

SEQ ID NO: 8130 - DNA, 21 bp, Artificial Sequence
  Synthetic
gtcttgcatcttacttctgca

SEQ ID NO: 8131 - DNA, 21 bp, Artificial Sequence
  Synthetic
cgtcttgcatcttacttctgc

SEQ ID NO: 8132 - DNA, 21 bp, Artificial Sequence
  Synthetic
atactacaaatacatcctgac

SEQ ID NO: 8133 - DNA, 21 bp, Artificial Sequence
  Synthetic
aatacatcctgactcgaaatt

SEQ ID NO: 8134 - DNA, 21 bp, Artificial Sequence
  Synthetic
caaggcctcaaaatttcgagt

SEQ ID NO: 8135 - DNA, 21 bp, Artificial Sequence
  Synthetic
tgaattcaaggcctcaaaatt

SEQ ID NO: 8136 - DNA, 21 bp, Artificial Sequence
  Synthetic
aggccttgaattcacgaggtg

SEQ ID NO: 8137 - DNA, 21 bp, Artificial Sequence
  Synthetic
ggccttgaattcacgaggtgg

SEQ ID NO: 8138 - DNA, 21 bp, Artificial Sequence
  Synthetic
gccttgaattcacgaggtggt

SEQ ID NO: 8139 - DNA, 21 bp, Artificial Sequence
  Synthetic
acacctggttcccaccacctc

SEQ ID NO: 8140 - DNA, 21 bp, Artificial Sequence
  Synthetic
gtgtcgctgcttaatatcatg

SEQ ID NO: 8141 - DNA, 21 bp, Artificial Sequence
  Synthetic
cttaatatcatgatggatctt

SEQ ID NO: 8142 - DNA, 21 bp, Artificial Sequence
  Synthetic
tagcagccacgggaaaaaggt

SEQ ID NO: 8143 - DNA, 21 bp, Artificial Sequence
  Synthetic
tcacctgtggttgatgatgcg

SEQ ID NO: 8144 - DNA, 21 bp, Artificial Sequence
  Synthetic
ccaccgcatcatcaaccacag

SEQ ID NO: 8145 - DNA, 21 bp, Artificial Sequence
  Synthetic
ctgccccacagtgtggataaa

SEQ ID NO: 8146 - DNA, 21 bp, Artificial Sequence
  Synthetic
tgccccacagtgtggataaaa

SEQ ID NO: 8147 - DNA, 21 bp, Artificial Sequence
  Synthetic
gccccacagtgtggataaaaa

SEQ ID NO: 8148 - DNA, 21 bp, Artificial Sequence
  Synthetic
ccccacagtgtggataaaaag

SEQ ID NO: 8149 - DNA, 21 bp, Artificial Sequence
  Synthetic
gaattaccactatctagtaaa

SEQ ID NO: 8150 - DNA, 21 bp, Artificial Sequence
  Synthetic
aattaccactatctagtaaaa

SEQ ID NO: 8151 - DNA, 21 bp, Artificial Sequence
  Synthetic
ttaccactatctagtaaaatg

SEQ ID NO: 8152 - DNA, 21 bp, Artificial Sequence
  Synthetic
taccactatctagtaaaatgg

SEQ ID NO: 8153 - DNA, 21 bp, Artificial Sequence
  Synthetic
cttaccatatgaccagtccac

SEQ ID NO: 8154 - DNA, 21 bp, Artificial Sequence
  Synthetic
ttaccatatgaccagtccacg

SEQ ID NO: 8155 - DNA, 21 bp, Artificial Sequence
  Synthetic
taccatatgaccagtccacgt

SEQ ID NO: 8156 - DNA, 21 bp, Artificial Sequence
  Synthetic
ccatatgaccagtccacgtgg

SEQ ID NO: 8157 - DNA, 21 bp, Artificial Sequence
  Synthetic
catatgaccagtccacgtggg

SEQ ID NO: 8158 - DNA, 21 bp, Artificial Sequence
  Synthetic
accagtccacgtgggaggaag

SEQ ID NO: 8159 - DNA, 21 bp, Artificial Sequence
  Synthetic
ttcatttcatcttcctcccac

SEQ ID NO: 8160 - DNA, 21 bp, Artificial Sequence
  Synthetic
tccacgtgggaggaagatgaa

SEQ ID NO: 8161 - DNA, 21 bp, Artificial Sequence
  Synthetic
aggaagatgaaatgaatatcc

SEQ ID NO: 8162 - DNA, 21 bp, Artificial Sequence
  Synthetic
atgaaatgaatatccctgaat

SEQ ID NO: 8163 - DNA, 21 bp, Artificial Sequence
  Synthetic
aaatgaatatccctgaatacg

SEQ ID NO: 8164 - DNA, 21 bp, Artificial Sequence
  Synthetic
ttgcttatgttcttcgtattc

SEQ ID NO: 8165 - DNA, 21 bp, Artificial Sequence
  Synthetic
tttgcttatgttcttcgtatt

SEQ ID NO: 8166 - DNA, 21 bp, Artificial Sequence
  Synthetic
cgaagaacataagcaaagcta

SEQ ID NO: 8167 - DNA, 21 bp, Artificial Sequence
  Synthetic
gaagaacataagcaaagctac

SEQ ID NO: 8168 - DNA, 21 bp, Artificial Sequence
  Synthetic
ctcttcaaggcagatcagagc

SEQ ID NO: 8169 - DNA, 21 bp, Artificial Sequence
  Synthetic
agagcgagagttctttgtcaa

SEQ ID NO: 8170 - DNA, 21 bp, Artificial Sequence
  Synthetic
gagagttctttgtcaagtggg

SEQ ID NO: 8171 - DNA, 21 bp, Artificial Sequence
  Synthetic
gatagtcctacccacttgaca

SEQ ID NO: 8172 - DNA, 21 bp, Artificial Sequence
  Synthetic
actatcctactggcactgctc

SEQ ID NO: 8173 - DNA, 21 bp, Artificial Sequence
  Synthetic
ttggcccaggagcagtgccag

SEQ ID NO: 8174 - DNA, 21 bp, Artificial Sequence
  Synthetic
tactggcactgctcctgggcc

SEQ ID NO: 8175 - DNA, 21 bp, Artificial Sequence
  Synthetic
actggcactgctcctgggcca

SEQ ID NO: 8176 - DNA, 21 bp, Artificial Sequence
  Synthetic
gtacctgaagctccttggccc

SEQ ID NO: 8177 - DNA, 21 bp, Artificial Sequence
  Synthetic
agtacctgaagctccttggcc

SEQ ID NO: 8178 - DNA, 21 bp, Artificial Sequence
  Synthetic
agacggatcaccaggattact

SEQ ID NO: 8179 - DNA, 21 bp, Artificial Sequence
  Synthetic
gattactgtgaggtgtgccag

SEQ ID NO: 8180 - DNA, 21 bp, Artificial Sequence
  Synthetic
actgtgaggtgtgccagcagg

SEQ ID NO: 8181 - DNA, 21 bp, Artificial Sequence
  Synthetic
ctgtgaggtgtgccagcaggg

SEQ ID NO: 8182 - DNA, 21 bp, Artificial Sequence
  Synthetic
tgtgaggtgtgccagcagggt

SEQ ID NO: 8183 - DNA, 21 bp, Artificial Sequence
  Synthetic
gtgaggtgtgccagcagggtg

SEQ ID NO: 8184 - DNA, 21 bp, Artificial Sequence
  Synthetic
ggcacgagggcaggtgtcaca

SEQ ID NO: 8185 - DNA, 21 bp, Artificial Sequence
  Synthetic
ggcagacgaggtggtaggcac

SEQ ID NO: 8186 - DNA, 21 bp, Artificial Sequence
  Synthetic
aaggcagacgaggtggtaggc

SEQ ID NO: 8187 - DNA, 21 bp, Artificial Sequence
  Synthetic
accacctcgtctgccttgatc

SEQ ID NO: 8188 - DNA, 21 bp, Artificial Sequence
  Synthetic
tcaagctcaggatcaaggcag

SEQ ID NO: 8189 - DNA, 21 bp, Artificial Sequence
  Synthetic
ctgccttgatcctgagcttga

SEQ ID NO: 8190 - DNA, 21 bp, Artificial Sequence
  Synthetic
atcctgagcttgaccgggctc

SEQ ID NO: 8191 - DNA, 21 bp, Artificial Sequence
  Synthetic
cctctggagcccggtcaagct

SEQ ID NO: 8192 - DNA, 21 bp, Artificial Sequence
  Synthetic
cctgagcttgaccgggctcca

SEQ ID NO: 8193 - DNA, 21 bp, Artificial Sequence
  Synthetic
tgaccgggctccagagggcaa

SEQ ID NO: 8194 - DNA, 21 bp, Artificial Sequence
  Synthetic
gaccgggctccagagggcaaa

SEQ ID NO: 8195 - DNA, 21 bp, Artificial Sequence
  Synthetic
agggcagctccatttgccctc

SEQ ID NO: 8196 - DNA, 21 bp, Artificial Sequence
  Synthetic
gagggcagctccatttgccct

SEQ ID NO: 8197 - DNA, 21 bp, Artificial Sequence
  Synthetic
aaatggagctgccctcactgt

SEQ ID NO: 8198 - DNA, 21 bp, Artificial Sequence
  Synthetic
ggcattaggtactcacacagt

SEQ ID NO: 8199 - DNA, 21 bp, Artificial Sequence
  Synthetic
ctggcattaggtactcacaca

SEQ ID NO: 8200 - DNA, 21 bp, Artificial Sequence
  Synthetic
tatccttggccccctaggaga

SEQ ID NO: 8201 - DNA, 21 bp, Artificial Sequence
  Synthetic
tccttggccccctaggagaag

SEQ ID NO: 8202 - DNA, 21 bp, Artificial Sequence
  Synthetic
ccttggccccctaggagaagg

SEQ ID NO: 8203 - DNA, 21 bp, Artificial Sequence
  Synthetic
cttggccccctaggagaagga

SEQ ID NO: 8204 - DNA, 21 bp, Artificial Sequence
  Synthetic
actggaccccctccttctcct

SEQ ID NO: 8205 - DNA, 21 bp, Artificial Sequence
  Synthetic
cactggaccccctccttctcc

SEQ ID NO: 8206 - DNA, 21 bp, Artificial Sequence
  Synthetic
atggagtactgccgcgtatgc

SEQ ID NO: 8207 - DNA, 21 bp, Artificial Sequence
  Synthetic
actgccgcgtatgcaaggacg

SEQ ID NO: 8208 - DNA, 21 bp, Artificial Sequence
  Synthetic
ctgccgcgtatgcaaggacgg

SEQ ID NO: 8209 - DNA, 21 bp, Artificial Sequence
  Synthetic
tgccgcgtatgcaaggacggc

SEQ ID NO: 8210 - DNA, 21 bp, Artificial Sequence
  Synthetic
gccgcgtatgcaaggacggcg

SEQ ID NO: 8211 - DNA, 21 bp, Artificial Sequence
  Synthetic
gagatgcacgcgtcacagcac

SEQ ID NO: 8212 - DNA, 21 bp, Artificial Sequence
  Synthetic
ggagatgcacgcgtcacagca

SEQ ID NO: 8213 - DNA, 21 bp, Artificial Sequence
  Synthetic
ttagacaatgaatgtggtagg

SEQ ID NO: 8214 - DNA, 21 bp, Artificial Sequence
  Synthetic
tttagacaatgaatgtggtag

SEQ ID NO: 8215 - DNA, 21 bp, Artificial Sequence
  Synthetic
ggtttagacaatgaatgtggt

SEQ ID NO: 8216 - DNA, 21 bp, Artificial Sequence
  Synthetic
gggtttagacaatgaatgtgg

SEQ ID NO: 8217 - DNA, 21 bp, Artificial Sequence
  Synthetic
aggcaggggagggtttagaca

SEQ ID NO: 8218 - DNA, 21 bp, Artificial Sequence
  Synthetic
cattgggaatgtcaggcaggg

SEQ ID NO: 8219 - DNA, 21 bp, Artificial Sequence
  Synthetic
accattgggaatgtcaggcag

SEQ ID NO: 8220 - DNA, 21 bp, Artificial Sequence
  Synthetic
caccattgggaatgtcaggca

SEQ ID NO: 8221 - DNA, 21 bp, Artificial Sequence
  Synthetic
tcaccattgggaatgtcaggc

SEQ ID NO: 8222 - DNA, 21 bp, Artificial Sequence
  Synthetic
ttcaccattgggaatgtcagg

SEQ ID NO: 8223 - DNA, 21 bp, Artificial Sequence
  Synthetic
ccctgcctgacattcccaatg

SEQ ID NO: 8224 - DNA, 21 bp, Artificial Sequence
  Synthetic
gggacacagccattcaccatt

SEQ ID NO: 8225 - DNA, 21 bp, Artificial Sequence
  Synthetic
ggggacacagccattcaccat

SEQ ID NO: 8226 - DNA, 21 bp, Artificial Sequence
  Synthetic
cggggacacagccattcacca

SEQ ID NO: 8227 - DNA, 21 bp, Artificial Sequence
  Synthetic
tggctgtgtccccgatgcaca

SEQ ID NO: 8228 - DNA, 21 bp, Artificial Sequence
  Synthetic
tgtttccactcactgtgcatc

SEQ ID NO: 8229 - DNA, 21 bp, Artificial Sequence
  Synthetic
atgtttccactcactgtgcat

SEQ ID NO: 8230 - DNA, 21 bp, Artificial Sequence
  Synthetic
gatgtttccactcactgtgca

SEQ ID NO: 8231 - DNA, 21 bp, Artificial Sequence
  Synthetic
gacccttcagcacggggcact

SEQ ID NO: 8232 - DNA, 21 bp, Artificial Sequence
  Synthetic
tggaacttcgagattatcagc

SEQ ID NO: 8233 - DNA, 21 bp, Artificial Sequence
  Synthetic
ttctacctacttgcaccagga

SEQ ID NO: 8234 - DNA, 21 bp, Artificial Sequence
  Synthetic
ataatagtgtaatccttgctg

SEQ ID NO: 8235 - DNA, 21 bp, Artificial Sequence
  Synthetic
agtgtaatccttgctgatgaa

SEQ ID NO: 8236 - DNA, 21 bp, Artificial Sequence
  Synthetic
tcctaggcccatttcatcagc

SEQ ID NO: 8237 - DNA, 21 bp, Artificial Sequence
  Synthetic
tccttgctgatgaaatgggcc

SEQ ID NO: 8238 - DNA, 21 bp, Artificial Sequence
  Synthetic
ccttgctgatgaaatgggcct

SEQ ID NO: 8239 - DNA, 21 bp, Artificial Sequence
  Synthetic
gtaggagaggaatgatatggt

SEQ ID NO: 8240 - DNA, 21 bp, Artificial Sequence
  Synthetic
tgttggtggaacaggtaggag

SEQ ID NO: 8241 - DNA, 21 bp, Artificial Sequence
  Synthetic
gtgttggtggaacaggtagga

SEQ ID NO: 8242 - DNA, 21 bp, Artificial Sequence
  Synthetic
tggtgttggtggaacaggtag

SEQ ID NO: 8243 - DNA, 21 bp, Artificial Sequence
  Synthetic
gctggtgttggtggaacaggt

SEQ ID NO: 8244 - DNA, 21 bp, Artificial Sequence
  Synthetic
agctggtgttggtggaacagg

SEQ ID NO: 8245 - DNA, 21 bp, Artificial Sequence
  Synthetic
gggccatacagctggtgttgg

SEQ ID NO: 8246 - DNA, 21 bp, Artificial Sequence
  Synthetic
ggggccatacagctggtgttg

SEQ ID NO: 8247 - DNA, 21 bp, Artificial Sequence
  Synthetic
ataaagggacgactataagaa

SEQ ID NO: 8248 - DNA, 21 bp, Artificial Sequence
  Synthetic
gataaagggacgactataaga

SEQ ID NO: 8249 - DNA, 21 bp, Artificial Sequence
  Synthetic
ggtggataaagggacgactat

SEQ ID NO: 8250 - DNA, 21 bp, Artificial Sequence
  Synthetic
ccatgaggtgagggtggataa

SEQ ID NO: 8251 - DNA, 21 bp, Artificial Sequence
  Synthetic
gccatgaggtgagggtggata

SEQ ID NO: 8252 - DNA, 21 bp, Artificial Sequence
  Synthetic
ttatccaccctcacctcatgg

SEQ ID NO: 8253 - DNA, 21 bp, Artificial Sequence
  Synthetic
atccaccctcacctcatggca

SEQ ID NO: 8254 - DNA, 21 bp, Artificial Sequence
  Synthetic
tctctctgccatgaggtgagg

SEQ ID NO: 8255 - DNA, 21 bp, Artificial Sequence
  Synthetic
ccaccctcacctcatggcaga

SEQ ID NO: 8256 - DNA, 21 bp, Artificial Sequence
  Synthetic
aaactctctctgccatgaggt

SEQ ID NO: 8257 - DNA, 21 bp, Artificial Sequence
  Synthetic
tcaaactctctctgccatgag

SEQ ID NO: 8258 - DNA, 21 bp, Artificial Sequence
  Synthetic
tcacctcatggcagagagagt

SEQ ID NO: 8259 - DNA, 21 bp, Artificial Sequence
  Synthetic
agatttcaaactctctctgcc

SEQ ID NO: 8260 - DNA, 21 bp, Artificial Sequence
  Synthetic
atggcagagagagtttgaaat

SEQ ID NO: 8261 - DNA, 21 bp, Artificial Sequence
  Synthetic
gagagtttgaaatctgggcac

SEQ ID NO: 8262 - DNA, 21 bp, Artificial Sequence
  Synthetic
gtggtttacataggtgacctg

SEQ ID NO: 8263 - DNA, 21 bp, Artificial Sequence
  Synthetic
ttacataggtgacctgatgag

SEQ ID NO: 8264 - DNA, 21 bp, Artificial Sequence
  Synthetic
cttatagatacgggaatatga

SEQ ID NO: 8265 - DNA, 21 bp, Artificial Sequence
  Synthetic
attcattcccaaaccaaaaga

SEQ ID NO: 8266 - DNA, 21 bp, Artificial Sequence
  Synthetic
tcatatgttgttataagtgcg

SEQ ID NO: 8267 - DNA, 21 bp, Artificial Sequence
  Synthetic
tcaacgcacttataacaacat

SEQ ID NO: 8268 - DNA, 21 bp, Artificial Sequence
  Synthetic
ataacaacatatgagatcctc

SEQ ID NO: 8269 - DNA, 21 bp, Artificial Sequence
  Synthetic
attacacaccttatctttcaa

SEQ ID NO: 8270 - DNA, 21 bp, Artificial Sequence
  Synthetic
taattacacaccttatctttc

SEQ ID NO: 8271 - DNA, 21 bp, Artificial Sequence
  Synthetic
gactgtgctgggcagtattaa

SEQ ID NO: 8272 - DNA, 21 bp, Artificial Sequence
  Synthetic
ggcagtattaactgggccttt

SEQ ID NO: 8273 - DNA, 21 bp, Artificial Sequence
  Synthetic
gcagtattaactgggcctttc

SEQ ID NO: 8274 - DNA, 21 bp, Artificial Sequence
  Synthetic
cagtattaactgggcctttct

SEQ ID NO: 8275 - DNA, 21 bp, Artificial Sequence
  Synthetic
attaactgggcctttctggga

SEQ ID NO: 8276 - DNA, 21 bp, Artificial Sequence
  Synthetic
actgggcctttctgggagtgg

SEQ ID NO: 8277 - DNA, 21 bp, Artificial Sequence
  Synthetic
ccgatgggcttcatccactcc

SEQ ID NO: 8278 - DNA, 21 bp, Artificial Sequence
  Synthetic
ggagtggatgaagcccatcgg

SEQ ID NO: 8279 - DNA, 21 bp, Artificial Sequence
  Synthetic
gtggatgaagcccatcggttg

SEQ ID NO: 8280 - DNA, 21 bp, Artificial Sequence
  Synthetic
agagtcatcattcttcaaccg

SEQ ID NO: 8281 - DNA, 21 bp, Artificial Sequence
  Synthetic
atggttggacttgaaatcaat

SEQ ID NO: 8282 - DNA, 21 bp, Artificial Sequence
  Synthetic
atcaggagcctatggttggac

SEQ ID NO: 8283 - DNA, 21 bp, Artificial Sequence
  Synthetic
cccgtaatcaggagcctatgg

SEQ ID NO: 8284 - DNA, 21 bp, Artificial Sequence
  Synthetic
tccaaccataggctcctgatt

SEQ ID NO: 8285 - DNA, 21 bp, Artificial Sequence
  Synthetic
ccaaccataggctcctgatta

SEQ ID NO: 8286 - DNA, 21 bp, Artificial Sequence
  Synthetic
caaccataggctcctgattac

SEQ ID NO: 8287 - DNA, 21 bp, Artificial Sequence
  Synthetic
tgaagaggggtccccgtaatc

SEQ ID NO: 8288 - DNA, 21 bp, Artificial Sequence
  Synthetic
ctgaagaggggtccccgtaat

SEQ ID NO: 8289 - DNA, 21 bp, Artificial Sequence
  Synthetic
ctgattacggggacccctctt

SEQ ID NO: 8290 - DNA, 21 bp, Artificial Sequence
  Synthetic
ctctttgagggaattctgaag

SEQ ID NO: 8291 - DNA, 21 bp, Artificial Sequence
  Synthetic
cccctcttcagaattccctca

SEQ ID NO: 8292 - DNA, 21 bp, Artificial Sequence
  Synthetic
gctctttgagggaattctgaa

SEQ ID NO: 8293 - DNA, 21 bp, Artificial Sequence
  Synthetic
gagctctttgagggaattctg

SEQ ID NO: 8294 - DNA, 21 bp, Artificial Sequence
  Synthetic
ccagagctctttgagggaatt

SEQ ID NO: 8295 - DNA, 21 bp, Artificial Sequence
  Synthetic
gcaaggaccagagctctttga

SEQ ID NO: 8296 - DNA, 21 bp, Artificial Sequence
  Synthetic
agcaaggaccagagctctttg

SEQ ID NO: 8297 - DNA, 21 bp, Artificial Sequence
  Synthetic
cagcaaggaccagagctcttt

SEQ ID NO: 8298 - DNA, 21 bp, Artificial Sequence
  Synthetic
tgcagcaaggaccagagctct

SEQ ID NO: 8299 - DNA, 21 bp, Artificial Sequence
  Synthetic
ataataaagtgcagcaaggac

SEQ ID NO: 8300 - DNA, 21 bp, Artificial Sequence
  Synthetic
tccggcataataaagtgcagc

SEQ ID NO: 8301 - DNA, 21 bp, Artificial Sequence
  Synthetic
tccttgctgcactttattatg

SEQ ID NO: 8302 - DNA, 21 bp, Artificial Sequence
  Synthetic
ccttgctgcactttattatgc

SEQ ID NO: 8303 - DNA, 21 bp, Artificial Sequence
  Synthetic
ttgctgcactttattatgccg

SEQ ID NO: 8304 - DNA, 21 bp, Artificial Sequence
  Synthetic
tttcttccctaggtttgaatt

SEQ ID NO: 8305 - DNA, 21 bp, Artificial Sequence
  Synthetic
ttcttccctaggtttgaattt

SEQ ID NO: 8306 - DNA, 21 bp, Artificial Sequence
  Synthetic
atcttcccaaaattcaaacct

SEQ ID NO: 8307 - DNA, 21 bp, Artificial Sequence
  Synthetic
aatcttcccaaaattcaaacc

SEQ ID NO: 8308 - DNA, 21 bp, Artificial Sequence
  Synthetic
tttgaagaagaccatgggaag

SEQ ID NO: 8309 - DNA, 21 bp, Artificial Sequence
  Synthetic
tgaagaagaccatgggaaggg

SEQ ID NO: 8310 - DNA, 21 bp, Artificial Sequence
  Synthetic
aagaagaccatgggaagggga

SEQ ID NO: 8311 - DNA, 21 bp, Artificial Sequence
  Synthetic
aaggggagagaaaatggctac

SEQ ID NO: 8312 - DNA, 21 bp, Artificial Sequence
  Synthetic
accagagtcttcataaggtgc

SEQ ID NO: 8313 - DNA, 21 bp, Artificial Sequence
  Synthetic
aaggaaaggctctagcacctt

SEQ ID NO: 8314 - DNA, 21 bp, Artificial Sequence
  Synthetic
ggtgctagagcctttccttct

SEQ ID NO: 8315 - DNA, 21 bp, Artificial Sequence
  Synthetic
gtgctagagcctttccttctc

SEQ ID NO: 8316 - DNA, 21 bp, Artificial Sequence
  Synthetic
gctagagcctttccttctccg

SEQ ID NO: 8317 - DNA, 21 bp, Artificial Sequence
  Synthetic
ctccggagagtcaaaaaagat

SEQ ID NO: 8318 - DNA, 21 bp, Artificial Sequence
  Synthetic
tccggagagtcaaaaaagatg

SEQ ID NO: 8319 - DNA, 21 bp, Artificial Sequence
  Synthetic
cggagagtcaaaaaagatgtg

SEQ ID NO: 8320 - DNA, 21 bp, Artificial Sequence
  Synthetic
gagaaatcccttcctgctaaa

SEQ ID NO: 8321 - DNA, 21 bp, Artificial Sequence
  Synthetic
agaaatcccttcctgctaaag

SEQ ID NO: 8322 - DNA, 21 bp, Artificial Sequence
  Synthetic
atctgttccactttagcagga

SEQ ID NO: 8323 - DNA, 21 bp, Artificial Sequence
  Synthetic
aatctgttccactttagcagg

SEQ ID NO: 8324 - DNA, 21 bp, Artificial Sequence
  Synthetic
gagaatctgttccactttagc

SEQ ID NO: 8325 - DNA, 21 bp, Artificial Sequence
  Synthetic
tgagaatctgttccactttag

SEQ ID NO: 8326 - DNA, 21 bp, Artificial Sequence
  Synthetic
tgctaaagtggaacagattct

SEQ ID NO: 8327 - DNA, 21 bp, Artificial Sequence
  Synthetic
aaagtggaacagattctcagg

SEQ ID NO: 8328 - DNA, 21 bp, Artificial Sequence
  Synthetic
aagtggaacagattctcaggg

SEQ ID NO: 8329 - DNA, 21 bp, Artificial Sequence
  Synthetic
aagggctgacatctccaccct

SEQ ID NO: 8330 - DNA, 21 bp, Artificial Sequence
  Synthetic
tgaagggctgacatctccacc

SEQ ID NO: 8331 - DNA, 21 bp, Artificial Sequence
  Synthetic
agggtggagatgtcagccctt

SEQ ID NO: 8332 - DNA, 21 bp, Artificial Sequence
  Synthetic
ttacttgtaatactgtttctg

SEQ ID NO: 8333 - DNA, 21 bp, Artificial Sequence
  Synthetic
aacttacttgtaatactgttt

SEQ ID NO: 8334 - DNA, 21 bp, Artificial Sequence
  Synthetic
aatttgcaggtggattctgac

SEQ ID NO: 8335 - DNA, 21 bp, Artificial Sequence
  Synthetic
atttgcaggtggattctgacc

SEQ ID NO: 8336 - DNA, 21 bp, Artificial Sequence
  Synthetic
aagagccttgtaattcctggt

SEQ ID NO: 8337 - DNA, 21 bp, Artificial Sequence
  Synthetic
ggaattacaaggctcttgcca

SEQ ID NO: 8338 - DNA, 21 bp, Artificial Sequence
  Synthetic
gaattacaaggctcttgccaa

SEQ ID NO: 8339 - DNA, 21 bp, Artificial Sequence
  Synthetic
caaggctcttgccaaaggaac

SEQ ID NO: 8340 - DNA, 21 bp, Artificial Sequence
  Synthetic
gctgcctcttgttcctttggc

SEQ ID NO: 8341 - DNA, 21 bp, Artificial Sequence
  Synthetic
tttcttaatattgtgatggaa

SEQ ID NO: 8342 - DNA, 21 bp, Artificial Sequence
  Synthetic
tttcagttccatcacaatatt

SEQ ID NO: 8343 - DNA, 21 bp, Artificial Sequence
  Synthetic
tgaataaacagtatcagatag

SEQ ID NO: 8344 - DNA, 21 bp, Artificial Sequence
  Synthetic
taaacagtatcagatagtaga

SEQ ID NO: 8345 - DNA, 21 bp, Artificial Sequence
  Synthetic
gtgaagacaagtaaatctaca

SEQ ID NO: 8346 - DNA, 21 bp, Artificial Sequence
  Synthetic
tttatatgaaatagctcatag

SEQ ID NO: 8347 - DNA, 21 bp, Artificial Sequence
  Synthetic
ttatatgaaatagctcatagt

SEQ ID NO: 8348 - DNA, 21 bp, Artificial Sequence
  Synthetic
tgagggtgccggcttccgact

SEQ ID NO: 8349 - DNA, 21 bp, Artificial Sequence
  Synthetic
gtcggaagccggcaccctcaa

SEQ ID NO: 8350 - DNA, 21 bp, Artificial Sequence
  Synthetic
agccggcaccctcaaatgagc

SEQ ID NO: 8351 - DNA, 21 bp, Artificial Sequence
  Synthetic
catagatattcgggctcattt

SEQ ID NO: 8352 - DNA, 21 bp, Artificial Sequence
  Synthetic
tacatagatattcgggctcat

SEQ ID NO: 8353 - DNA, 21 bp, Artificial Sequence
  Synthetic
tgagcccgaatatctatgtaa

SEQ ID NO: 8354 - DNA, 21 bp, Artificial Sequence
  Synthetic
cccatccatttacatagatat

SEQ ID NO: 8355 - DNA, 21 bp, Artificial Sequence
  Synthetic
cccgaatatctatgtaaatgg

SEQ ID NO: 8356 - DNA, 21 bp, Artificial Sequence
  Synthetic
ccgaatatctatgtaaatgga

SEQ ID NO: 8357 - DNA, 21 bp, Artificial Sequence
  Synthetic
aatggatgggactcccctatt

SEQ ID NO: 8358 - DNA, 21 bp, Artificial Sequence
  Synthetic
actcccctattcagagtgtag

SEQ ID NO: 8359 - DNA, 21 bp, Artificial Sequence
  Synthetic
tcccagctacactctgaatag

SEQ ID NO: 8360 - DNA, 21 bp, Artificial Sequence
  Synthetic
ctcccctattcagagtgtagc

SEQ ID NO: 8361 - DNA, 21 bp, Artificial Sequence
  Synthetic
ttcccagctacactctgaata

SEQ ID NO: 8362 - DNA, 21 bp, Artificial Sequence
  Synthetic
tcccctattcagagtgtagct

SEQ ID NO: 8363 - DNA, 21 bp, Artificial Sequence
  Synthetic
cttcccagctacactctgaat

SEQ ID NO: 8364 - DNA, 21 bp, Artificial Sequence
  Synthetic
tcttcccagctacactctgaa

SEQ ID NO: 8365 - DNA, 21 bp, Artificial Sequence
  Synthetic
attcagagtgtagctgggaag

SEQ ID NO: 8366 - DNA, 21 bp, Artificial Sequence
  Synthetic
cttcatcttcccagctacact

SEQ ID NO: 8367 - DNA, 21 bp, Artificial Sequence
  Synthetic
gctgggaagatgaagccctca

SEQ ID NO: 8368 - DNA, 21 bp, Artificial Sequence
  Synthetic
ctgggaagatgaagccctcat

SEQ ID NO: 8369 - DNA, 21 bp, Artificial Sequence
  Synthetic
gaagatgaagccctcattgga

SEQ ID NO: 8370 - DNA, 21 bp, Artificial Sequence
  Synthetic
gccctcattggaaagaaattc

SEQ ID NO: 8371 - DNA, 21 bp, Artificial Sequence
  Synthetic
attctggaatttctttccaat

SEQ ID NO: 8372 - DNA, 21 bp, Artificial Sequence
  Synthetic
caattctggaatttctttcca

SEQ ID NO: 8373 - DNA, 21 bp, Artificial Sequence
  Synthetic
tggaagctgtcaatgcaattc

SEQ ID NO: 8374 - DNA, 21 bp, Artificial Sequence
  Synthetic
gtggaagctgtcaatgcaatt

SEQ ID NO: 8375 - DNA, 21 bp, Artificial Sequence
  Synthetic
ttgcattgacagcttccacag

SEQ ID NO: 8376 - DNA, 21 bp, Artificial Sequence
  Synthetic
tgcattgacagcttccacagt

SEQ ID NO: 8377 - DNA, 21 bp, Artificial Sequence
  Synthetic
gaaaaggtcttagattcaaga

SEQ ID NO: 8378 - DNA, 21 bp, Artificial Sequence
  Synthetic
aaaaggtcttagattcaagac

SEQ ID NO: 8379 - DNA, 21 bp, Artificial Sequence
  Synthetic
aaaggtcttagattcaagact

SEQ ID NO: 8380 - DNA, 21 bp, Artificial Sequence
  Synthetic
gtcttagattcaagactggga

SEQ ID NO: 8381 - DNA, 21 bp, Artificial Sequence
  Synthetic
tagattcaagactgggaaaga

SEQ ID NO: 8382 - DNA, 21 bp, Artificial Sequence
  Synthetic
agattcaagactgggaaagaa

SEQ ID NO: 8383 - DNA, 21 bp, Artificial Sequence
  Synthetic
tacctcctttctttcccagtc

SEQ ID NO: 8384 - DNA, 21 bp, Artificial Sequence
  Synthetic
catctactactgtatatgcga

SEQ ID NO: 8385 - DNA, 21 bp, Artificial Sequence
  Synthetic
accctagtggtgactttgaca

SEQ ID NO: 8386 - DNA, 21 bp, Artificial Sequence
  Synthetic
tttcagtgtcaaagtcaccac

SEQ ID NO: 8387 - DNA, 21 bp, Artificial Sequence
  Synthetic
agtggtgactttgacactgaa

SEQ ID NO: 8388 - DNA, 21 bp, Artificial Sequence
  Synthetic
gtgactttgacactgaaaagg

SEQ ID NO: 8389 - DNA, 21 bp, Artificial Sequence
  Synthetic
ttgacactgaaaaggatgaag

SEQ ID NO: 8390 - DNA, 21 bp, Artificial Sequence
  Synthetic
tgaaatccagtacctcatcaa

SEQ ID NO: 8391 - DNA, 21 bp, Artificial Sequence
  Synthetic
gaaatccagtacctcatcaag

SEQ ID NO: 8392 - DNA, 21 bp, Artificial Sequence
  Synthetic
atccagtacctcatcaagtgg

SEQ ID NO: 8393 - DNA, 21 bp, Artificial Sequence
  Synthetic
acccttccacttgatgaggta

SEQ ID NO: 8394 - DNA, 21 bp, Artificial Sequence
  Synthetic
taagaccaacccttccacttg

SEQ ID NO: 8395 - DNA, 21 bp, Artificial Sequence
  Synthetic
ttggtcttacatccacagcac

SEQ ID NO: 8396 - DNA, 21 bp, Artificial Sequence
  Synthetic
tggtcttacatccacagcaca

SEQ ID NO: 8397 - DNA, 21 bp, Artificial Sequence
  Synthetic
ggtcttacatccacagcacat

SEQ ID NO: 8398 - DNA, 21 bp, Artificial Sequence
  Synthetic
tcttacatccacagcacatgg

SEQ ID NO: 8399 - DNA, 21 bp, Artificial Sequence
  Synthetic
acatccacagcacatgggaga

SEQ ID NO: 8400 - DNA, 21 bp, Artificial Sequence
  Synthetic
ttcttcactctcccatgtgct

SEQ ID NO: 8401 - DNA, 21 bp, Artificial Sequence
  Synthetic
tccacagcacatgggagagtg

SEQ ID NO: 8402 - DNA, 21 bp, Artificial Sequence
  Synthetic
agtgaagaatccttacagcaa

SEQ ID NO: 8403 - DNA, 21 bp, Artificial Sequence
  Synthetic
cccttcactttctgttgctgt

SEQ ID NO: 8404 - DNA, 21 bp, Artificial Sequence
  Synthetic
ggcacactgcacccgtaccag

SEQ ID NO: 8405 - DNA, 21 bp, Artificial Sequence
  Synthetic
gcacactgcacccgtaccagc

SEQ ID NO: 8406 - DNA, 21 bp, Artificial Sequence
  Synthetic
acactgcacccgtaccagctg

SEQ ID NO: 8407 - DNA, 21 bp, Artificial Sequence
  Synthetic
agttgaggccctccagctggt

SEQ ID NO: 8408 - DNA, 21 bp, Artificial Sequence
  Synthetic
cctcaactggctgcgcttctc

SEQ ID NO: 8409 - DNA, 21 bp, Artificial Sequence
  Synthetic
gcccaagagaagcgcagccag

SEQ ID NO: 8410 - DNA, 21 bp, Artificial Sequence
  Synthetic
tggctgcgcttctcttgggcc

SEQ ID NO: 8411 - DNA, 21 bp, Artificial Sequence
  Synthetic
gtgtcagtgccctgggcccaa

SEQ ID NO: 8412 - DNA, 21 bp, Artificial Sequence
  Synthetic
tggtgtcagtgccctgggccc

SEQ ID NO: 8413 - DNA, 21 bp, Artificial Sequence
  Synthetic
ggccaggatggtgtcagtgcc

SEQ ID NO: 8414 - DNA, 21 bp, Artificial Sequence
  Synthetic
gcactgacaccatcctggccg

SEQ ID NO: 8415 - DNA, 21 bp, Artificial Sequence
  Synthetic
gacaccatcctggccgatgag

SEQ ID NO: 8416 - DNA, 21 bp, Artificial Sequence
  Synthetic
atcctggccgatgagatgggt

SEQ ID NO: 8417 - DNA, 21 bp, Artificial Sequence
  Synthetic
gcccagacccatctcatcggc

SEQ ID NO: 8418 - DNA, 21 bp, Artificial Sequence
  Synthetic
gtgttcctttactccctctac

SEQ ID NO: 8419 - DNA, 21 bp, Artificial Sequence
  Synthetic
tgttcctttactccctctaca

SEQ ID NO: 8420 - DNA, 21 bp, Artificial Sequence
  Synthetic
acctccttgtagagggagtaa

SEQ ID NO: 8421 - DNA, 21 bp, Artificial Sequence
  Synthetic
cacctccttgtagagggagta

SEQ ID NO: 8422 - DNA, 21 bp, Artificial Sequence
  Synthetic
ctttactccctctacaaggag

SEQ ID NO: 8423 - DNA, 21 bp, Artificial Sequence
  Synthetic
gcctgcccacctccttgtaga

SEQ ID NO: 8424 - DNA, 21 bp, Artificial Sequence
  Synthetic
cgcctgcccacctccttgtag

SEQ ID NO: 8425 - DNA, 21 bp, Artificial Sequence
  Synthetic
ccgcctgcccacctccttgta

SEQ ID NO: 8426 - DNA, 21 bp, Artificial Sequence
  Synthetic
ccccgcctgcccacctccttg

SEQ ID NO: 8427 - DNA, 21 bp, Artificial Sequence
  Synthetic
tctctctccagggccactcca

SEQ ID NO: 8428 - DNA, 21 bp, Artificial Sequence
  Synthetic
tagggccctttggagtggccc

SEQ ID NO: 8429 - DNA, 21 bp, Artificial Sequence
  Synthetic
gtagggccctttggagtggcc

SEQ ID NO: 8430 - DNA, 21 bp, Artificial Sequence
  Synthetic
cgctaaccaggtagggccctt

SEQ ID NO: 8431 - DNA, 21 bp, Artificial Sequence
  Synthetic
gcgctaaccaggtagggccct

SEQ ID NO: 8432 - DNA, 21 bp, Artificial Sequence
  Synthetic
gagaggggcgcgctaaccagg

SEQ ID NO: 8433 - DNA, 21 bp, Artificial Sequence
  Synthetic
gcccctctccaccatcatcaa

SEQ ID NO: 8434 - DNA, 21 bp, Artificial Sequence
  Synthetic
tcccagttgatgatggtggag

SEQ ID NO: 8435 - DNA, 21 bp, Artificial Sequence
  Synthetic
cccctctccaccatcatcaac

SEQ ID NO: 8436 - DNA, 21 bp, Artificial Sequence
  Synthetic
ttcccagttgatgatggtgga

SEQ ID NO: 8437 - DNA, 21 bp, Artificial Sequence
  Synthetic
ccctctccaccatcatcaact

SEQ ID NO: 8438 - DNA, 21 bp, Artificial Sequence
  Synthetic
cgttcccagttgatgatggtg

SEQ ID NO: 8439 - DNA, 21 bp, Artificial Sequence
  Synthetic
cgcgttcccagttgatgatgg

SEQ ID NO: 8440 - DNA, 21 bp, Artificial Sequence
  Synthetic
tcgcgttcccagttgatgatg

SEQ ID NO: 8441 - DNA, 21 bp, Artificial Sequence
  Synthetic
ccaccatcatcaactgggaac

SEQ ID NO: 8442 - DNA, 21 bp, Artificial Sequence
  Synthetic
tcatcaactgggaacgcgagt

SEQ ID NO: 8443 - DNA, 21 bp, Artificial Sequence
  Synthetic
ctgggaacgcgagtttgagat

SEQ ID NO: 8444 - DNA, 21 bp, Artificial Sequence
  Synthetic
gtgtaggtgaccacgtagaag

SEQ ID NO: 8445 - DNA, 21 bp, Artificial Sequence
  Synthetic
gacttctacgtggtcacctac

SEQ ID NO: 8446 - DNA, 21 bp, Artificial Sequence
  Synthetic
acttctacgtggtcacctaca

SEQ ID NO: 8447 - DNA, 21 bp, Artificial Sequence
  Synthetic
cttctacgtggtcacctacac

SEQ ID NO: 8448 - DNA, 21 bp, Artificial Sequence
  Synthetic
tcccccgtgtaggtgaccacg

SEQ ID NO: 8449 - DNA, 21 bp, Artificial Sequence
  Synthetic
ttctacgtggtcacctacacg

SEQ ID NO: 8450 - DNA, 21 bp, Artificial Sequence
  Synthetic
gtggtcacctacacgggggac

SEQ ID NO: 8451 - DNA, 21 bp, Artificial Sequence
  Synthetic
tggtcacctacacgggggaca

SEQ ID NO: 8452 - DNA, 21 bp, Artificial Sequence
  Synthetic
gtcacctacacgggggacaag

SEQ ID NO: 8453 - DNA, 21 bp, Artificial Sequence
  Synthetic
caaggagagccgctcggtgat

SEQ ID NO: 8454 - DNA, 21 bp, Artificial Sequence
  Synthetic
aaggagagccgctcggtgatt

SEQ ID NO: 8455 - DNA, 21 bp, Artificial Sequence
  Synthetic
aggagagccgctcggtgattc

SEQ ID NO: 8456 - DNA, 21 bp, Artificial Sequence
  Synthetic
gagagccgctcggtgattcgg

SEQ ID NO: 8457 - DNA, 21 bp, Artificial Sequence
  Synthetic
gccgctcggtgattcgggaga

SEQ ID NO: 8458 - DNA, 21 bp, Artificial Sequence
  Synthetic
aaaactcgttctcccgaatca

SEQ ID NO: 8459 - DNA, 21 bp, Artificial Sequence
  Synthetic
ctcaaaggaaaactcgttctc

SEQ ID NO: 8460 - DNA, 21 bp, Artificial Sequence
  Synthetic
tccgaatggcgttgtcctcaa

SEQ ID NO: 8461 - DNA, 21 bp, Artificial Sequence
  Synthetic
ttcctttgaggacaacgccat

SEQ ID NO: 8462 - DNA, 21 bp, Artificial Sequence
  Synthetic
ctccgaatggcgttgtcctca

SEQ ID NO: 8463 - DNA, 21 bp, Artificial Sequence
  Synthetic
tcctttgaggacaacgccatt

SEQ ID NO: 8464 - DNA, 21 bp, Artificial Sequence
  Synthetic
ttgaggacaacgccattcgga

SEQ ID NO: 8465 - DNA, 21 bp, Artificial Sequence
  Synthetic
tgaggacaacgccattcggag

SEQ ID NO: 8466 - DNA, 21 bp, Artificial Sequence
  Synthetic
gaggacaacgccattcggagt

SEQ ID NO: 8467 - DNA, 21 bp, Artificial Sequence
  Synthetic
gacaacgccattcggagtggg

SEQ ID NO: 8468 - DNA, 21 bp, Artificial Sequence
  Synthetic
acggaataccttcttcccact

SEQ ID NO: 8469 - DNA, 21 bp, Artificial Sequence
  Synthetic
agtgggaagaaggtattccgt

SEQ ID NO: 8470 - DNA, 21 bp, Artificial Sequence
  Synthetic
aagaaggtattccgtatgaag

SEQ ID NO: 8471 - DNA, 21 bp, Artificial Sequence
  Synthetic
gaaggtattccgtatgaaggt

SEQ ID NO: 8472 - DNA, 21 bp, Artificial Sequence
  Synthetic
tagcgagccctcaccttcata

SEQ ID NO: 8473 - DNA, 21 bp, Artificial Sequence
  Synthetic
atagcgagccctcaccttcat

SEQ ID NO: 8474 - DNA, 21 bp, Artificial Sequence
  Synthetic
aatttgatctgcacttctttc

SEQ ID NO: 8475 - DNA, 21 bp, Artificial Sequence
  Synthetic
gaatttgatctgcacttcttt

SEQ ID NO: 8476 - DNA, 21 bp, Artificial Sequence
  Synthetic
tcataggaggtgagcagcacg

SEQ ID NO: 8477 - DNA, 21 bp, Artificial Sequence
  Synthetic
ctcataggaggtgagcagcac

SEQ ID NO: 8478 - DNA, 21 bp, Artificial Sequence
  Synthetic
tccacgtgctgctcacctcct

SEQ ID NO: 8479 - DNA, 21 bp, Artificial Sequence
  Synthetic
atggtgatgagctcataggag

SEQ ID NO: 8480 - DNA, 21 bp, Artificial Sequence
  Synthetic
ggtcaatggtgatgagctcat

SEQ ID NO: 8481 - DNA, 21 bp, Artificial Sequence
  Synthetic
tggtcaatggtgatgagctca

SEQ ID NO: 8482 - DNA, 21 bp, Artificial Sequence
  Synthetic
aggatggcctggtcaatggtg

SEQ ID NO: 8483 - DNA, 21 bp, Artificial Sequence
  Synthetic
atcaccattgaccaggccatc

SEQ ID NO: 8484 - DNA, 21 bp, Artificial Sequence
  Synthetic
accaggccatcctgggctcca

SEQ ID NO: 8485 - DNA, 21 bp, Artificial Sequence
  Synthetic
ggccatcctgggctccatcga

SEQ ID NO: 8486 - DNA, 21 bp, Artificial Sequence
  Synthetic
gcaggcccactcgatggagcc

SEQ ID NO: 8487 - DNA, 21 bp, Artificial Sequence
  Synthetic
ccaccaggcaggcccactcga

SEQ ID NO: 8488 - DNA, 21 bp, Artificial Sequence
  Synthetic
accaccaggcaggcccactcg

SEQ ID NO: 8489 - DNA, 21 bp, Artificial Sequence
  Synthetic
agtgggcctgcctggtggtag

SEQ ID NO: 8490 - DNA, 21 bp, Artificial Sequence
  Synthetic
gtagatgaggcccaccgcctc

SEQ ID NO: 8491 - DNA, 21 bp, Artificial Sequence
  Synthetic
ggactggttgttcttgaggcg

SEQ ID NO: 8492 - DNA, 21 bp, Artificial Sequence
  Synthetic
cctaccttggactggttgttc

SEQ ID NO: 8493 - DNA, 21 bp, Artificial Sequence
  Synthetic
tgtttaagaccctaaaaaact

SEQ ID NO: 8494 - DNA, 21 bp, Artificial Sequence
  Synthetic
gctgtttaagaccctaaaaaa

SEQ ID NO: 8495 - DNA, 21 bp, Artificial Sequence
  Synthetic
ttgattacaagctgctgctga

SEQ ID NO: 8496 - DNA, 21 bp, Artificial Sequence
  Synthetic
tgattacaagctgctgctgac

SEQ ID NO: 8497 - DNA, 21 bp, Artificial Sequence
  Synthetic
ctgctgacagggacccccctt

SEQ ID NO: 8498 - DNA, 21 bp, Artificial Sequence
  Synthetic
gggaccccccttcagaacaac

SEQ ID NO: 8499 - DNA, 21 bp, Artificial Sequence
  Synthetic
ggaccccccttcagaacaacc

SEQ ID NO: 8500 - DNA, 21 bp, Artificial Sequence
  Synthetic
accccccttcagaacaacctg

SEQ ID NO: 8501 - DNA, 21 bp, Artificial Sequence
  Synthetic
ctcctccaggttgttctgaag

SEQ ID NO: 8502 - DNA, 21 bp, Artificial Sequence
  Synthetic
ccccccttcagaacaacctgg

SEQ ID NO: 8503 - DNA, 21 bp, Artificial Sequence
  Synthetic
gctcctccaggttgttctgaa

SEQ ID NO: 8504 - DNA, 21 bp, Artificial Sequence
  Synthetic
agctcctccaggttgttctga

SEQ ID NO: 8505 - DNA, 21 bp, Artificial Sequence
  Synthetic
cagctcctccaggttgttctg

SEQ ID NO: 8506 - DNA, 21 bp, Artificial Sequence
  Synthetic
gaacagctcctccaggttgtt

SEQ ID NO: 8507 - DNA, 21 bp, Artificial Sequence
  Synthetic
ggagtcaggaagttgaggaga

SEQ ID NO: 8508 - DNA, 21 bp, Artificial Sequence
  Synthetic
tggagtcaggaagttgaggag

SEQ ID NO: 8509 - DNA, 21 bp, Artificial Sequence
  Synthetic
atctcctcaacttcctgactc

SEQ ID NO: 8510 - DNA, 21 bp, Artificial Sequence
  Synthetic
ctctctggagtcaggaagttg

SEQ ID NO: 8511 - DNA, 21 bp, Artificial Sequence
  Synthetic
ctcctcaacttcctgactcca

SEQ ID NO: 8512 - DNA, 21 bp, Artificial Sequence
  Synthetic
cctctctggagtcaggaagtt

SEQ ID NO: 8513 - DNA, 21 bp, Artificial Sequence
  Synthetic
aacctctctggagtcaggaag

SEQ ID NO: 8514 - DNA, 21 bp, Artificial Sequence
  Synthetic
cacttgaacctctctggagtc

SEQ ID NO: 8515 - DNA, 21 bp, Artificial Sequence
  Synthetic
tcacttgaacctctctggagt

SEQ ID NO: 8516 - DNA, 21 bp, Artificial Sequence
  Synthetic
cctgactccagagaggttcaa

SEQ ID NO: 8517 - DNA, 21 bp, Artificial Sequence
  Synthetic
ggtgactcacttgaacctctc

SEQ ID NO: 8518 - DNA, 21 bp, Artificial Sequence
  Synthetic
aggtgactcacttgaacctct

SEQ ID NO: 8519 - DNA, 21 bp, Artificial Sequence
  Synthetic
tgcagcaacctggagggcttc

SEQ ID NO: 8520 - DNA, 21 bp, Artificial Sequence
  Synthetic
gcagcaacctggagggcttcc

SEQ ID NO: 8521 - DNA, 21 bp, Artificial Sequence
  Synthetic
agcaacctggagggcttcctg

SEQ ID NO: 8522 - DNA, 21 bp, Artificial Sequence
  Synthetic
gcaacctggagggcttcctgg

SEQ ID NO: 8523 - DNA, 21 bp, Artificial Sequence
  Synthetic
gagatgtcagcaaactcctcc

SEQ ID NO: 8524 - DNA, 21 bp, Artificial Sequence
  Synthetic
ggagatgtcagcaaactcctc

SEQ ID NO: 8525 - DNA, 21 bp, Artificial Sequence
  Synthetic
gaggagtttgctgacatctcc

SEQ ID NO: 8526 - DNA, 21 bp, Artificial Sequence
  Synthetic
aggagtttgctgacatctcca

SEQ ID NO: 8527 - DNA, 21 bp, Artificial Sequence
  Synthetic
atctccaaggaagaccagatc

SEQ ID NO: 8528 - DNA, 21 bp, Artificial Sequence
  Synthetic
gcttcttgatctggtcttcct

SEQ ID NO: 8529 - DNA, 21 bp, Artificial Sequence
  Synthetic
agcttcttgatctggtcttcc

SEQ ID NO: 8530 - DNA, 21 bp, Artificial Sequence
  Synthetic
atcaagaagctgcatgacctg

SEQ ID NO: 8531 - DNA, 21 bp, Artificial Sequence
  Synthetic
tcaagaagctgcatgacctgc

SEQ ID NO: 8532 - DNA, 21 bp, Artificial Sequence
  Synthetic
aacacgtcagccttgagccgc

SEQ ID NO: 8533 - DNA, 21 bp, Artificial Sequence
  Synthetic
cggctcaaggctgacgtgttc

SEQ ID NO: 8534 - DNA, 21 bp, Artificial Sequence
  Synthetic
atgttcttgaacacgtcagcc

SEQ ID NO: 8535 - DNA, 21 bp, Artificial Sequence
  Synthetic
tcggtcttggccggcatgttc

SEQ ID NO: 8536 - DNA, 21 bp, Artificial Sequence
  Synthetic
tcaagaacatgccggccaaga

SEQ ID NO: 8537 - DNA, 21 bp, Artificial Sequence
  Synthetic
ggccaagaccgagctcattgt

SEQ ID NO: 8538 - DNA, 21 bp, Artificial Sequence
  Synthetic
aagaccgagctcattgtccgg

SEQ ID NO: 8539 - DNA, 21 bp, Artificial Sequence
  Synthetic
agaccgagctcattgtccggg

SEQ ID NO: 8540 - DNA, 21 bp, Artificial Sequence
  Synthetic
gagctcattgtccgggtggag

SEQ ID NO: 8541 - DNA, 21 bp, Artificial Sequence
  Synthetic
tggctcagctccacccggaca

SEQ ID NO: 8542 - DNA, 21 bp, Artificial Sequence
  Synthetic
ctgcatctggctcagctccac

SEQ ID NO: 8543 - DNA, 21 bp, Artificial Sequence
  Synthetic
cgggtggagctgagccagatg

SEQ ID NO: 8544 - DNA, 21 bp, Artificial Sequence
  Synthetic
ggagctgagccagatgcagaa

SEQ ID NO: 8545 - DNA, 21 bp, Artificial Sequence
  Synthetic
gtactacaagttcatcctcac

SEQ ID NO: 8546 - DNA, 21 bp, Artificial Sequence
  Synthetic
tactacaagttcatcctcaca

SEQ ID NO: 8547 - DNA, 21 bp, Artificial Sequence
  Synthetic
agttcatcctcacacggaact

SEQ ID NO: 8548 - DNA, 21 bp, Artificial Sequence
  Synthetic
gcctcaaagttccgtgtgagg

SEQ ID NO: 8549 - DNA, 21 bp, Artificial Sequence
  Synthetic
cagtgcctcaaagttccgtgt

SEQ ID NO: 8550 - DNA, 21 bp, Artificial Sequence
  Synthetic
ttcagtgcctcaaagttccgt

SEQ ID NO: 8551 - DNA, 21 bp, Artificial Sequence
  Synthetic
ctcacacggaactttgaggca

SEQ ID NO: 8552 - DNA, 21 bp, Artificial Sequence
  Synthetic
aactttgaggcactgaactcc

SEQ ID NO: 8553 - DNA, 21 bp, Artificial Sequence
  Synthetic
actttgaggcactgaactcca

SEQ ID NO: 8554 - DNA, 21 bp, Artificial Sequence
  Synthetic
ctttgaggcactgaactccaa

SEQ ID NO: 8555 - DNA, 21 bp, Artificial Sequence
  Synthetic
tttgaggcactgaactccaag

SEQ ID NO: 8556 - DNA, 21 bp, Artificial Sequence
  Synthetic
aggcactgaactccaaggggg

SEQ ID NO: 8557 - DNA, 21 bp, Artificial Sequence
  Synthetic
ggcactgaactccaagggggg

SEQ ID NO: 8558 - DNA, 21 bp, Artificial Sequence
  Synthetic
gcactgaactccaaggggggc

SEQ ID NO: 8559 - DNA, 21 bp, Artificial Sequence
  Synthetic
atacttggttcccgcccccct

SEQ ID NO: 8560 - DNA, 21 bp, Artificial Sequence
  Synthetic
gatacttggttcccgcccccc

SEQ ID NO: 8561 - DNA, 21 bp, Artificial Sequence
  Synthetic
gtatcgctgctcaacatcatg

SEQ ID NO: 8562 - DNA, 21 bp, Artificial Sequence
  Synthetic
ctgctcaacatcatgatggac

SEQ ID NO: 8563 - DNA, 21 bp, Artificial Sequence
  Synthetic
cggcagccacagggaagaggt

SEQ ID NO: 8564 - DNA, 21 bp, Artificial Sequence
  Synthetic
acggcagccacagggaagagg

SEQ ID NO: 8565 - DNA, 21 bp, Artificial Sequence
  Synthetic
gccagagtggatgatgattca

SEQ ID NO: 8566 - DNA, 21 bp, Artificial Sequence
  Synthetic
tggatgatgattcaccgaatc

SEQ ID NO: 8567 - DNA, 21 bp, Artificial Sequence
  Synthetic
acacctatggttcaggattcg

SEQ ID NO: 8568 - DNA, 21 bp, Artificial Sequence
  Synthetic
tgcaggcacacacctatggtt

SEQ ID NO: 8569 - DNA, 21 bp, Artificial Sequence
  Synthetic
tcaccgtgttgcagctttgac

SEQ ID NO: 8570 - DNA, 21 bp, Artificial Sequence
  Synthetic
ccgtgttgcagctttgacaag

SEQ ID NO: 8571 - DNA, 21 bp, Artificial Sequence
  Synthetic
cgtgttgcagctttgacaaga

SEQ ID NO: 8572 - DNA, 21 bp, Artificial Sequence
  Synthetic
gtgttgcagctttgacaagaa

SEQ ID NO: 8573 - DNA, 21 bp, Artificial Sequence
  Synthetic
tgttgcagctttgacaagaag

SEQ ID NO: 8574 - DNA, 21 bp, Artificial Sequence
  Synthetic
ggatgtgcactacctgatcaa

SEQ ID NO: 8575 - DNA, 21 bp, Artificial Sequence
  Synthetic
gatgtgcactacctgatcaag

SEQ ID NO: 8576 - DNA, 21 bp, Artificial Sequence
  Synthetic
cctgccctacgaccagtgcac

SEQ ID NO: 8577 - DNA, 21 bp, Artificial Sequence
  Synthetic
ctgccctacgaccagtgcacc

SEQ ID NO: 8578 - DNA, 21 bp, Artificial Sequence
  Synthetic
tgccctacgaccagtgcacct

SEQ ID NO: 8579 - DNA, 21 bp, Artificial Sequence
  Synthetic
atctcccaggtgcactggtcg

SEQ ID NO: 8580 - DNA, 21 bp, Artificial Sequence
  Synthetic
ccctggagggcatccctgaga

SEQ ID NO: 8581 - DNA, 21 bp, Artificial Sequence
  Synthetic
cttgacaaagaactctctctc

SEQ ID NO: 8582 - DNA, 21 bp, Artificial Sequence
  Synthetic
acttgacaaagaactctctct

SEQ ID NO: 8583 - DNA, 21 bp, Artificial Sequence
  Synthetic
tgagagagagttctttgtcaa

SEQ ID NO: 8584 - DNA, 21 bp, Artificial Sequence
  Synthetic
gagagttctttgtcaagtggg

SEQ ID NO: 8585 - DNA, 21 bp, Artificial Sequence
  Synthetic
gacagccctgcccacttgaca

SEQ ID NO: 8586 - DNA, 21 bp, Artificial Sequence
  Synthetic
gctgtcctactggcattgctc

SEQ ID NO: 8587 - DNA, 21 bp, Artificial Sequence
  Synthetic
ttcacccaggagcaatgccag

SEQ ID NO: 8588 - DNA, 21 bp, Artificial Sequence
  Synthetic
tcctactggcattgctcctgg

SEQ ID NO: 8589 - DNA, 21 bp, Artificial Sequence
  Synthetic
tactggcattgctcctgggtg

SEQ ID NO: 8590 - DNA, 21 bp, Artificial Sequence
  Synthetic
actggcattgctcctgggtga

SEQ ID NO: 8591 - DNA, 21 bp, Artificial Sequence
  Synthetic
tcacctgtagctccttcaccc

SEQ ID NO: 8592 - DNA, 21 bp, Artificial Sequence
  Synthetic
ctcacctgtagctccttcacc

SEQ ID NO: 8593 - DNA, 21 bp, Artificial Sequence
  Synthetic
tcctgggtgaaggagctacag

SEQ ID NO: 8594 - DNA, 21 bp, Artificial Sequence
  Synthetic
agacagaccaccaggattact

SEQ ID NO: 8595 - DNA, 21 bp, Artificial Sequence
  Synthetic
gattactgtgaggtgtgccag

SEQ ID NO: 8596 - DNA, 21 bp, Artificial Sequence
  Synthetic
actgtgaggtgtgccagcagg

SEQ ID NO: 8597 - DNA, 21 bp, Artificial Sequence
  Synthetic
ctgtgaggtgtgccagcaggg

SEQ ID NO: 8598 - DNA, 21 bp, Artificial Sequence
  Synthetic
tgtgaggtgtgccagcagggt

SEQ ID NO: 8599 - DNA, 21 bp, Artificial Sequence
  Synthetic
gtgaggtgtgccagcagggtg

SEQ ID NO: 8600 - DNA, 21 bp, Artificial Sequence
  Synthetic
atcatcctgtgcgacacctgc

SEQ ID NO: 8601 - DNA, 21 bp, Artificial Sequence
  Synthetic
catcctgtgcgacacctgccc

SEQ ID NO: 8602 - DNA, 21 bp, Artificial Sequence
  Synthetic
ggccctcgggcaggtgtcgca

SEQ ID NO: 8603 - DNA, 21 bp, Artificial Sequence
  Synthetic
ggcatacgagatggtaggccc

SEQ ID NO: 8604 - DNA, 21 bp, Artificial Sequence
  Synthetic
agggcctaccatctcgtatgc

SEQ ID NO: 8605 - DNA, 21 bp, Artificial Sequence
  Synthetic
accatctcgtatgcctggacc

SEQ ID NO: 8606 - DNA, 21 bp, Artificial Sequence
  Synthetic
tccagctctgggtccaggcat

SEQ ID NO: 8607 - DNA, 21 bp, Artificial Sequence
  Synthetic
ctcgtatgcctggacccagag

SEQ ID NO: 8608 - DNA, 21 bp, Artificial Sequence
  Synthetic
tcgtatgcctggacccagagc

SEQ ID NO: 8609 - DNA, 21 bp, Artificial Sequence
  Synthetic
gtatgcctggacccagagctg

SEQ ID NO: 8610 - DNA, 21 bp, Artificial Sequence
  Synthetic
acccagagctggagaaggctc

SEQ ID NO: 8611 - DNA, 21 bp, Artificial Sequence
  Synthetic
cctcgggagccttctccagct

SEQ ID NO: 8612 - DNA, 21 bp, Artificial Sequence
  Synthetic
ccagagctggagaaggctccc

SEQ ID NO: 8613 - DNA, 21 bp, Artificial Sequence
  Synthetic
ggagaaggctcccgagggcaa

SEQ ID NO: 8614 - DNA, 21 bp, Artificial Sequence
  Synthetic
gagaaggctcccgagggcaag

SEQ ID NO: 8615 - DNA, 21 bp, Artificial Sequence
  Synthetic
ggggcagctccacttgccctc

SEQ ID NO: 8616 - DNA, 21 bp, Artificial Sequence
  Synthetic
gggggcagctccacttgccct

SEQ ID NO: 8617 - DNA, 21 bp, Artificial Sequence
  Synthetic
tgggggcagctccacttgccc

SEQ ID NO: 8618 - DNA, 21 bp, Artificial Sequence
  Synthetic
ctctgccaaggcttacacagt

SEQ ID NO: 8619 - DNA, 21 bp, Artificial Sequence
  Synthetic
gctctgccaaggcttacacag

SEQ ID NO: 8620 - DNA, 21 bp, Artificial Sequence
  Synthetic
ggctctgccaaggcttacaca

SEQ ID NO: 8621 - DNA, 21 bp, Artificial Sequence
  Synthetic
ctggcctcctcccccaggaga

SEQ ID NO: 8622 - DNA, 21 bp, Artificial Sequence
  Synthetic
ggcctcctcccccaggagaag

SEQ ID NO: 8623 - DNA, 21 bp, Artificial Sequence
  Synthetic
gcctcctcccccaggagaagg

SEQ ID NO: 8624 - DNA, 21 bp, Artificial Sequence
  Synthetic
cctcctcccccaggagaagga

SEQ ID NO: 8625 - DNA, 21 bp, Artificial Sequence
  Synthetic
actggatcccctccttctcct

SEQ ID NO: 8626 - DNA, 21 bp, Artificial Sequence
  Synthetic
cactggatcccctccttctcc

SEQ ID NO: 8627 - DNA, 21 bp, Artificial Sequence
  Synthetic
ccactggatcccctccttctc

SEQ ID NO: 8628 - DNA, 21 bp, Artificial Sequence
  Synthetic
atggagttctgccgcgtgtgc

SEQ ID NO: 8629 - DNA, 21 bp, Artificial Sequence
  Synthetic
agttctgccgcgtgtgcaagg

SEQ ID NO: 8630 - DNA, 21 bp, Artificial Sequence
  Synthetic
gttctgccgcgtgtgcaagga

SEQ ID NO: 8631 - DNA, 21 bp, Artificial Sequence
  Synthetic
cccccgtccttgcacacgcgg

SEQ ID NO: 8632 - DNA, 21 bp, Artificial Sequence
  Synthetic
ttctgccgcgtgtgcaaggac

SEQ ID NO: 8633 - DNA, 21 bp, Artificial Sequence
  Synthetic
gccgcgtgtgcaaggacgggg

SEQ ID NO: 8634 - DNA, 21 bp, Artificial Sequence
  Synthetic
gaggaggggcaggcgtcgcag

SEQ ID NO: 8635 - DNA, 21 bp, Artificial Sequence
  Synthetic
ggcaatgcaggtggtaggagg

SEQ ID NO: 8636 - DNA, 21 bp, Artificial Sequence
  Synthetic
aggcaatgcaggtggtaggag

SEQ ID NO: 8637 - DNA, 21 bp, Artificial Sequence
  Synthetic
tgaggcaatgcaggtggtagg

SEQ ID NO: 8638 - DNA, 21 bp, Artificial Sequence
  Synthetic
ttgaggcaatgcaggtggtag

SEQ ID NO: 8639 - DNA, 21 bp, Artificial Sequence
  Synthetic
ggttgaggcaatgcaggtggt

SEQ ID NO: 8640 - DNA, 21 bp, Artificial Sequence
  Synthetic
gggttgaggcaatgcaggtgg

SEQ ID NO: 8641 - DNA, 21 bp, Artificial Sequence
  Synthetic
attgcctcaacccgccgctgc

SEQ ID NO: 8642 - DNA, 21 bp, Artificial Sequence
  Synthetic
gggatctcgggcagcggcggg

SEQ ID NO: 8643 - DNA, 21 bp, Artificial Sequence
  Synthetic
cgtttgggatctcgggcagcg

SEQ ID NO: 8644 - DNA, 21 bp, Artificial Sequence
  Synthetic
cgctgcccgagatcccaaacg

SEQ ID NO: 8645 - DNA, 21 bp, Artificial Sequence
  Synthetic
agccattcaccgtttgggatc

SEQ ID NO: 8646 - DNA, 21 bp, Artificial Sequence
  Synthetic
cgggcagagccattcaccgtt

SEQ ID NO: 8647 - DNA, 21 bp, Artificial Sequence
  Synthetic
gcgggcagagccattcaccgt

SEQ ID NO: 8648 - DNA, 21 bp, Artificial Sequence
  Synthetic
tggctctgcccgcgctgtact

SEQ ID NO: 8649 - DNA, 21 bp, Artificial Sequence
  Synthetic
acactcacagtacagcgcggg

SEQ ID NO: 8650 - DNA, 21 bp, Artificial Sequence
  Synthetic
gcggaacactcacagtacagc

SEQ ID NO: 8651 - DNA, 21 bp, Artificial Sequence
  Synthetic
tgcccttcagtggggggcact

SEQ ID NO: 8652 - DNA, 21 bp, Artificial Sequence
  Synthetic
ggaaccctgcacccctatcaa

SEQ ID NO: 8653 - DNA, 21 bp, Artificial Sequence
  Synthetic
gaaccctgcacccctatcaaa

SEQ ID NO: 8654 - DNA, 21 bp, Artificial Sequence
  Synthetic
accctgcacccctatcaaatg

SEQ ID NO: 8655 - DNA, 21 bp, Artificial Sequence
  Synthetic
cacccctatcaaatggagggc

SEQ ID NO: 8656 - DNA, 21 bp, Artificial Sequence
  Synthetic
aattcaggccctccatttgat

SEQ ID NO: 8657 - DNA, 21 bp, Artificial Sequence
  Synthetic
caattcaggccctccatttga

SEQ ID NO: 8658 - DNA, 21 bp, Artificial Sequence
  Synthetic
cctgaattggttgcgcttctc

SEQ ID NO: 8659 - DNA, 21 bp, Artificial Sequence
  Synthetic
tggttgcgcttctcctgggct

SEQ ID NO: 8660 - DNA, 21 bp, Artificial Sequence
  Synthetic
gtgtcagtgccctgagcccag

SEQ ID NO: 8661 - DNA, 21 bp, Artificial Sequence
  Synthetic
tggtgtcagtgccctgagccc

SEQ ID NO: 8662 - DNA, 21 bp, Artificial Sequence
  Synthetic
atggtgtcagtgccctgagcc

SEQ ID NO: 8663 - DNA, 21 bp, Artificial Sequence
  Synthetic
agccaagatggtgtcagtgcc

SEQ ID NO: 8664 - DNA, 21 bp, Artificial Sequence
  Synthetic
gcactgacaccatcttggctg

SEQ ID NO: 8665 - DNA, 21 bp, Artificial Sequence
  Synthetic
gacaccatcttggctgatgag

SEQ ID NO: 8666 - DNA, 21 bp, Artificial Sequence
  Synthetic
tcttggctgatgagatgggcc

SEQ ID NO: 8667 - DNA, 21 bp, Artificial Sequence
  Synthetic
cttggctgatgagatgggcct

SEQ ID NO: 8668 - DNA, 21 bp, Artificial Sequence
  Synthetic
ttggctgatgagatgggcctt

SEQ ID NO: 8669 - DNA, 21 bp, Artificial Sequence
  Synthetic
gtcttcctgtattccctttac

SEQ ID NO: 8670 - DNA, 21 bp, Artificial Sequence
  Synthetic
tcttcctgtattccctttaca

SEQ ID NO: 8671 - DNA, 21 bp, Artificial Sequence
  Synthetic
acctccttgtaaagggaatac

SEQ ID NO: 8672 - DNA, 21 bp, Artificial Sequence
  Synthetic
tacctccttgtaaagggaata

SEQ ID NO: 8673 - DNA, 21 bp, Artificial Sequence
  Synthetic
gtattccctttacaaggaggt

SEQ ID NO: 8674 - DNA, 21 bp, Artificial Sequence
  Synthetic
atttccttacctccttgtaaa

SEQ ID NO: 8675 - DNA, 21 bp, Artificial Sequence
  Synthetic
gatttccttacctccttgtaa

SEQ ID NO: 8676 - DNA, 21 bp, Artificial Sequence
  Synthetic
agatttccttacctccttgta

SEQ ID NO: 8677 - DNA, 21 bp, Artificial Sequence
  Synthetic
aggggcctttggaatgaccct

SEQ ID NO: 8678 - DNA, 21 bp, Artificial Sequence
  Synthetic
cattccaaaggccccttccta

SEQ ID NO: 8679 - DNA, 21 bp, Artificial Sequence
  Synthetic
cgctcactaggaaggggcctt

SEQ ID NO: 8680 - DNA, 21 bp, Artificial Sequence
  Synthetic
gcgctcactaggaaggggcct

SEQ ID NO: 8681 - DNA, 21 bp, Artificial Sequence
  Synthetic
aaagaggggcgctcactagga

SEQ ID NO: 8682 - DNA, 21 bp, Artificial Sequence
  Synthetic
gaaagaggggcgctcactagg

SEQ ID NO: 8683 - DNA, 21 bp, Artificial Sequence
  Synthetic
gtagaaagaggggcgctcact

SEQ ID NO: 8684 - DNA, 21 bp, Artificial Sequence
  Synthetic
ggtagaaagaggggcgctcac

SEQ ID NO: 8685 - DNA, 21 bp, Artificial Sequence
  Synthetic
ccagttgatgatggtagaaag

SEQ ID NO: 8686 - DNA, 21 bp, Artificial Sequence
  Synthetic
cccagttgatgatggtagaaa

SEQ ID NO: 8687 - DNA, 21 bp, Artificial Sequence
  Synthetic
ccctctttctaccatcatcaa

SEQ ID NO: 8688 - DNA, 21 bp, Artificial Sequence
  Synthetic
cctctttctaccatcatcaac

SEQ ID NO: 8689 - DNA, 21 bp, Artificial Sequence
  Synthetic
ctcccagttgatgatggtaga

SEQ ID NO: 8690 - DNA, 21 bp, Artificial Sequence
  Synthetic
ctctttctaccatcatcaact

SEQ ID NO: 8691 - DNA, 21 bp, Artificial Sequence
  Synthetic
cccgctcccagttgatgatgg

SEQ ID NO: 8692 - DNA, 21 bp, Artificial Sequence
  Synthetic
ttctaccatcatcaactggga

SEQ ID NO: 8693 - DNA, 21 bp, Artificial Sequence
  Synthetic
tctaccatcatcaactgggag

SEQ ID NO: 8694 - DNA, 21 bp, Artificial Sequence
  Synthetic
ctaccatcatcaactgggagc

SEQ ID NO: 8695 - DNA, 21 bp, Artificial Sequence
  Synthetic
tcatcaactgggagcgggagt

SEQ ID NO: 8696 - DNA, 21 bp, Artificial Sequence
  Synthetic
ctgggagcgggagtttgaaat

SEQ ID NO: 8697 - DNA, 21 bp, Artificial Sequence
  Synthetic
ataggttacgacatacatgtc

SEQ ID NO: 8698 - DNA, 21 bp, Artificial Sequence
  Synthetic
cataggttacgacatacatgt

SEQ ID NO: 8699 - DNA, 21 bp, Artificial Sequence
  Synthetic
gacatgtatgtcgtaacctat

SEQ ID NO: 8700 - DNA, 21 bp, Artificial Sequence
  Synthetic
gtcgtaacctatgtgggtgac

SEQ ID NO: 8701 - DNA, 21 bp, Artificial Sequence
  Synthetic
caaggacagccgtgccatcat

SEQ ID NO: 8702 - DNA, 21 bp, Artificial Sequence
  Synthetic
aggacagccgtgccatcatcc

SEQ ID NO: 8703 - DNA, 21 bp, Artificial Sequence
  Synthetic
gacagccgtgccatcatccga

SEQ ID NO: 8704 - DNA, 21 bp, Artificial Sequence
  Synthetic
gccgtgccatcatccgagaga

SEQ ID NO: 8705 - DNA, 21 bp, Artificial Sequence
  Synthetic
ttcaaaggagaactcattctc

SEQ ID NO: 8706 - DNA, 21 bp, Artificial Sequence
  Synthetic
tccgagagaatgagttctcct

SEQ ID NO: 8707 - DNA, 21 bp, Artificial Sequence
  Synthetic
cgaatggcattgtcttcaaag

SEQ ID NO: 8708 - DNA, 21 bp, Artificial Sequence
  Synthetic
cacgaatggcattgtcttcaa

SEQ ID NO: 8709 - DNA, 21 bp, Artificial Sequence
  Synthetic
ccacgaatggcattgtcttca

SEQ ID NO: 8710 - DNA, 21 bp, Artificial Sequence
  Synthetic
gacaatgccattcgtggtggc

SEQ ID NO: 8711 - DNA, 21 bp, Artificial Sequence
  Synthetic
gcgggaggccttcttgccacc

SEQ ID NO: 8712 - DNA, 21 bp, Artificial Sequence
  Synthetic
ggtggcaagaaggcctcccgc

SEQ ID NO: 8713 - DNA, 21 bp, Artificial Sequence
  Synthetic
tcccctgagataccttcatgc

SEQ ID NO: 8714 - DNA, 21 bp, Artificial Sequence
  Synthetic
ctcccctgagataccttcatg

SEQ ID NO: 8715 - DNA, 21 bp, Artificial Sequence
  Synthetic
cctcccctgagataccttcat

SEQ ID NO: 8716 - DNA, 21 bp, Artificial Sequence
  Synthetic
catgtgcagaaagaggcatct

SEQ ID NO: 8717 - DNA, 21 bp, Artificial Sequence
  Synthetic
tcataggatgtcagcagcaca

SEQ ID NO: 8718 - DNA, 21 bp, Artificial Sequence
  Synthetic
ttcataggatgtcagcagcac

SEQ ID NO: 8719 - DNA, 21 bp, Artificial Sequence
  Synthetic
tccatgtgctgctgacatcct

SEQ ID NO: 8720 - DNA, 21 bp, Artificial Sequence
  Synthetic
atgtcaatggtgatcaattca

SEQ ID NO: 8721 - DNA, 21 bp, Artificial Sequence
  Synthetic
atcaccattgacatggctatt

SEQ ID NO: 8722 - DNA, 21 bp, Artificial Sequence
  Synthetic
cgatgaggcaggcccaatcaa

SEQ ID NO: 8723 - DNA, 21 bp, Artificial Sequence
  Synthetic
attgattgggcctgcctcatc

SEQ ID NO: 8724 - DNA, 21 bp, Artificial Sequence
  Synthetic
attgggcctgcctcatcgtgg

SEQ ID NO: 8725 - DNA, 21 bp, Artificial Sequence
  Synthetic
agccgatgggcttcatccacg

SEQ ID NO: 8726 - DNA, 21 bp, Artificial Sequence
  Synthetic
atcgtggatgaagcccatcgg

SEQ ID NO: 8727 - DNA, 21 bp, Artificial Sequence
  Synthetic
gtggatgaagcccatcggctg

SEQ ID NO: 8728 - DNA, 21 bp, Artificial Sequence
  Synthetic
agactgattgttcttcagccg

SEQ ID NO: 8729 - DNA, 21 bp, Artificial Sequence
  Synthetic
ctgaagaacaatcagtctaag

SEQ ID NO: 8730 - DNA, 21 bp, Artificial Sequence
  Synthetic
gaagaacaatcagtctaaggt

SEQ ID NO: 8731 - DNA, 21 bp, Artificial Sequence
  Synthetic
ccatctgcttcaccagttctt

SEQ ID NO: 8732 - DNA, 21 bp, Artificial Sequence
  Synthetic
cttcaccagttcttccgggta

SEQ ID NO: 8733 - DNA, 21 bp, Artificial Sequence
  Synthetic
gagtaaccattcaatacccgg

SEQ ID NO: 8734 - DNA, 21 bp, Artificial Sequence
  Synthetic
agtgagtaaccattcaatacc

SEQ ID NO: 8735 - DNA, 21 bp, Artificial Sequence
  Synthetic
gagtgagtaaccattcaatac

SEQ ID NO: 8736 - DNA, 21 bp, Artificial Sequence
  Synthetic
tcagcaacagcttgtgctgga

SEQ ID NO: 8737 - DNA, 21 bp, Artificial Sequence
  Synthetic
ccagtcagcaacagcttgtgc

SEQ ID NO: 8738 - DNA, 21 bp, Artificial Sequence
  Synthetic
cccagtcagcaacagcttgtg

SEQ ID NO: 8739 - DNA, 21 bp, Artificial Sequence
  Synthetic
tccagcacaagctgttgctga

SEQ ID NO: 8740 - DNA, 21 bp, Artificial Sequence
  Synthetic
ccagcacaagctgttgctgac

SEQ ID NO: 8741 - DNA, 21 bp, Artificial Sequence
  Synthetic
gggacaccattacaaaacaat

SEQ ID NO: 8742 - DNA, 21 bp, Artificial Sequence
  Synthetic
ggacaccattacaaaacaatc

SEQ ID NO: 8743 - DNA, 21 bp, Artificial Sequence
  Synthetic
caccattacaaaacaatctgg

SEQ ID NO: 8744 - DNA, 21 bp, Artificial Sequence
  Synthetic
gggggtgagaaagttgagcag

SEQ ID NO: 8745 - DNA, 21 bp, Artificial Sequence
  Synthetic
atctgctcaactttctcaccc

SEQ ID NO: 8746 - DNA, 21 bp, Artificial Sequence
  Synthetic
ctgctcaactttctcaccccc

SEQ ID NO: 8747 - DNA, 21 bp, Artificial Sequence
  Synthetic
aacctctcgggggtgagaaag

SEQ ID NO: 8748 - DNA, 21 bp, Artificial Sequence
  Synthetic
ttactggaacctctcgggggt

SEQ ID NO: 8749 - DNA, 21 bp, Artificial Sequence
  Synthetic
acttactggaacctctcgggg

SEQ ID NO: 8750 - DNA, 21 bp, Artificial Sequence
  Synthetic
acatacttactggaacctctc

SEQ ID NO: 8751 - DNA, 21 bp, Artificial Sequence
  Synthetic
cacatacttactggaacctct

SEQ ID NO: 8752 - DNA, 21 bp, Artificial Sequence
  Synthetic
acacatacttactggaacctc

SEQ ID NO: 8753 - DNA, 21 bp, Artificial Sequence
  Synthetic
gaggagtttgctgacattgcc

SEQ ID NO: 8754 - DNA, 21 bp, Artificial Sequence
  Synthetic
aggagtttgctgacattgcca

SEQ ID NO: 8755 - DNA, 21 bp, Artificial Sequence
  Synthetic
gagtttgctgacattgccaag

SEQ ID NO: 8756 - DNA, 21 bp, Artificial Sequence
  Synthetic
ataaaaaaactgcatgacatg

SEQ ID NO: 8757 - DNA, 21 bp, Artificial Sequence
  Synthetic
taaaaaaactgcatgacatgc

SEQ ID NO: 8758 - DNA, 21 bp, Artificial Sequence
  Synthetic
cggctcaaagccgatgtgttc

SEQ ID NO: 8759 - DNA, 21 bp, Artificial Sequence
  Synthetic
atgttcttgaacacatcggct

SEQ ID NO: 8760 - DNA, 21 bp, Artificial Sequence
  Synthetic
tctgtcttggagggcatgttc

SEQ ID NO: 8761 - DNA, 21 bp, Artificial Sequence
  Synthetic
tcaagaacatgccctccaaga

SEQ ID NO: 8762 - DNA, 21 bp, Artificial Sequence
  Synthetic
cgcacaattagttctgtcttg

SEQ ID NO: 8763 - DNA, 21 bp, Artificial Sequence
  Synthetic
cacgcacaattagttctgtct

SEQ ID NO: 8764 - DNA, 21 bp, Artificial Sequence
  Synthetic
acacgcacaattagttctgtc

SEQ ID NO: 8765 - DNA, 21 bp, Artificial Sequence
  Synthetic
aagacagaactaattgtgcgt

SEQ ID NO: 8766 - DNA, 21 bp, Artificial Sequence
  Synthetic
agacagaactaattgtgcgtg

SEQ ID NO: 8767 - DNA, 21 bp, Artificial Sequence
  Synthetic
gaactaattgtgcgtgtggag

SEQ ID NO: 8768 - DNA, 21 bp, Artificial Sequence
  Synthetic
cgtgtggagctgagccctatg

SEQ ID NO: 8769 - DNA, 21 bp, Artificial Sequence
  Synthetic
ggagctgagccctatgcagaa

SEQ ID NO: 8770 - DNA, 21 bp, Artificial Sequence
  Synthetic
ccctcccaactcacttctgca

SEQ ID NO: 8771 - DNA, 21 bp, Artificial Sequence
  Synthetic
atactacaagtacatcctcac

SEQ ID NO: 8772 - DNA, 21 bp, Artificial Sequence
  Synthetic
agtacatcctcactcgaaatt

SEQ ID NO: 8773 - DNA, 21 bp, Artificial Sequence
  Synthetic
gagtgcttcaaaatttcgagt

SEQ ID NO: 8774 - DNA, 21 bp, Artificial Sequence
  Synthetic
ttgagtgcttcaaaatttcga

SEQ ID NO: 8775 - DNA, 21 bp, Artificial Sequence
  Synthetic
ggcattgagtgcttcaaaatt

SEQ ID NO: 8776 - DNA, 21 bp, Artificial Sequence
  Synthetic
tggttgccaccacctcgggca

SEQ ID NO: 8777 - DNA, 21 bp, Artificial Sequence
  Synthetic
agacacctggttgccaccacc

SEQ ID NO: 8778 - DNA, 21 bp, Artificial Sequence
  Synthetic
ggtggcaaccaggtgtctctg

SEQ ID NO: 8779 - DNA, 21 bp, Artificial Sequence
  Synthetic
gtgtctctgctgaatgtggtg

SEQ ID NO: 8780 - DNA, 21 bp, Artificial Sequence
  Synthetic
aagatccatcaccacattcag

SEQ ID NO: 8781 - DNA, 21 bp, Artificial Sequence
  Synthetic
ctgaatgtggtgatggatctt

SEQ ID NO: 8782 - DNA, 21 bp, Artificial Sequence
  Synthetic
ttgcagccacagggaagaggt

SEQ ID NO: 8783 - DNA, 21 bp, Artificial Sequence
  Synthetic
acccgagtggatgatgatcca

SEQ ID NO: 8784 - DNA, 21 bp, Artificial Sequence
  Synthetic
gtacctgtggttgaggattcg

SEQ ID NO: 8785 - DNA, 21 bp, Artificial Sequence
  Synthetic
gctcagctggtacctgtggtt

SEQ ID NO: 8786 - DNA, 21 bp, Artificial Sequence
  Synthetic
gtgctcagctggtacctgtgg

SEQ ID NO: 8787 - DNA, 21 bp, Artificial Sequence
  Synthetic
tcctggacttgcagtgtggac

SEQ ID NO: 8788 - DNA, 21 bp, Artificial Sequence
  Synthetic
tggacttgcagtgtggacaag

SEQ ID NO: 8789 - DNA, 21 bp, Artificial Sequence
  Synthetic
cgtccactacttgatcaagtg

SEQ ID NO: 8790 - DNA, 21 bp, Artificial Sequence
  Synthetic
gtccactacttgatcaagtgg

SEQ ID NO: 8791 - DNA, 21 bp, Artificial Sequence
  Synthetic
gtcccgccacttgatcaagta

SEQ ID NO: 8792 - DNA, 21 bp, Artificial Sequence
  Synthetic
cttaccttacgatcaggcttc

SEQ ID NO: 8793 - DNA, 21 bp, Artificial Sequence
  Synthetic
ttaccttacgatcaggcttct

SEQ ID NO: 8794 - DNA, 21 bp, Artificial Sequence
  Synthetic
taccttacgatcaggcttctt

SEQ ID NO: 8795 - DNA, 21 bp, Artificial Sequence
  Synthetic
ccttacgatcaggcttcttgg

SEQ ID NO: 8796 - DNA, 21 bp, Artificial Sequence
  Synthetic
acgatcaggcttcttgggaga

SEQ ID NO: 8797 - DNA, 21 bp, Artificial Sequence
  Synthetic
gatcaggcttcttgggagagt

SEQ ID NO: 8798 - DNA, 21 bp, Artificial Sequence
  Synthetic
gcttcttgggagagtgaggat

SEQ ID NO: 8799 - DNA, 21 bp, Artificial Sequence
  Synthetic
cttcttgggagagtgaggatg

SEQ ID NO: 8800 - DNA, 21 bp, Artificial Sequence
  Synthetic
tctccacatcctcactctccc

SEQ ID NO: 8801 - DNA, 21 bp, Artificial Sequence
  Synthetic
gagagtgaggatgtggagatc

SEQ ID NO: 8802 - DNA, 21 bp, Artificial Sequence
  Synthetic
ctgcttgaacaggtcgtaatc

SEQ ID NO: 8803 - DNA, 21 bp, Artificial Sequence
  Synthetic
caggattacgacctgttcaag

SEQ ID NO: 8804 - DNA, 21 bp, Artificial Sequence
  Synthetic
cgacctgttcaagcagagcta

SEQ ID NO: 8805 - DNA, 21 bp, Artificial Sequence
  Synthetic
ctgtgattccaatagctctgc

SEQ ID NO: 8806 - DNA, 21 bp, Artificial Sequence
  Synthetic
cggccagagcggcagttcttt

SEQ ID NO: 8807 - DNA, 21 bp, Artificial Sequence
  Synthetic
gacatgccttgccatttcaca

SEQ ID NO: 8808 - DNA, 21 bp, Artificial Sequence
  Synthetic
catgtcttactggcactgctc

SEQ ID NO: 8809 - DNA, 21 bp, Artificial Sequence
  Synthetic
actggcactgctcctgggttt

SEQ ID NO: 8810 - DNA, 21 bp, Artificial Sequence
  Synthetic
ttacctgcagttcagaaaccc

SEQ ID NO: 8811 - DNA, 21 bp, Artificial Sequence
  Synthetic
cttacctgcagttcagaaacc

SEQ ID NO: 8812 - DNA, 21 bp, Artificial Sequence
  Synthetic
atcctaaacttacctgcagtt

SEQ ID NO: 8813 - DNA, 21 bp, Artificial Sequence
  Synthetic
cctgacagtgcagctccagct

SEQ ID NO: 8814 - DNA, 21 bp, Artificial Sequence
  Synthetic
gctgcactgtcaggtgatgtt

SEQ ID NO: 8815 - DNA, 21 bp, Artificial Sequence
  Synthetic
ggtgatgttccgaaactatca

SEQ ID NO: 8816 - DNA, 21 bp, Artificial Sequence
  Synthetic
tcattcttccgctgatagttt

SEQ ID NO: 8817 - DNA, 21 bp, Artificial Sequence
  Synthetic
atcattcttccgctgatagtt

SEQ ID NO: 8818 - DNA, 21 bp, Artificial Sequence
  Synthetic
tgaccaccatatggaattctg

SEQ ID NO: 8819 - DNA, 21 bp, Artificial Sequence
  Synthetic
atggaattctgtcgggtctgc

SEQ ID NO: 8820 - DNA, 21 bp, Artificial Sequence
  Synthetic
ccaccatccttgcagacccga

SEQ ID NO: 8821 - DNA, 21 bp, Artificial Sequence
  Synthetic
tctgtcgggtctgcaaggatg

SEQ ID NO: 8822 - DNA, 21 bp, Artificial Sequence
  Synthetic
ctgtcgggtctgcaaggatgg

SEQ ID NO: 8823 - DNA, 21 bp, Artificial Sequence
  Synthetic
tgtcgggtctgcaaggatggt

SEQ ID NO: 8824 - DNA, 21 bp, Artificial Sequence
  Synthetic
gtcgggtctgcaaggatggtg

SEQ ID NO: 8825 - DNA, 21 bp, Artificial Sequence
  Synthetic
gaagaaggacaggtatcacag

SEQ ID NO: 8826 - DNA, 21 bp, Artificial Sequence
  Synthetic
ggcagtggatgtggtaggaag

SEQ ID NO: 8827 - DNA, 21 bp, Artificial Sequence
  Synthetic
tcaggcagtggatgtggtagg

SEQ ID NO: 8828 - DNA, 21 bp, Artificial Sequence
  Synthetic
tcttcctaccacatccactgc

SEQ ID NO: 8829 - DNA, 21 bp, Artificial Sequence
  Synthetic
gattcaggcagtggatgtggt

SEQ ID NO: 8830 - DNA, 21 bp, Artificial Sequence
  Synthetic
ggattcaggcagtggatgtgg

SEQ ID NO: 8831 - DNA, 21 bp, Artificial Sequence
  Synthetic
tggaagtgggggattcaggca

SEQ ID NO: 8832 - DNA, 21 bp, Artificial Sequence
  Synthetic
actgcctgaatcccccacttc

SEQ ID NO: 8833 - DNA, 21 bp, Artificial Sequence
  Synthetic
cgttggggatctctggaagtg

SEQ ID NO: 8834 - DNA, 21 bp, Artificial Sequence
  Synthetic
ccgttggggatctctggaagt

SEQ ID NO: 8835 - DNA, 21 bp, Artificial Sequence
  Synthetic
accgttggggatctctggaag

SEQ ID NO: 8836 - DNA, 21 bp, Artificial Sequence
  Synthetic
caccgttggggatctctggaa

SEQ ID NO: 8837 - DNA, 21 bp, Artificial Sequence
  Synthetic
cacttccagagatccccaacg

SEQ ID NO: 8838 - DNA, 21 bp, Artificial Sequence
  Synthetic
ccattcaccgttggggatctc

SEQ ID NO: 8839 - DNA, 21 bp, Artificial Sequence
  Synthetic
gccattcaccgttggggatct

SEQ ID NO: 8840 - DNA, 21 bp, Artificial Sequence
  Synthetic
gggacagagccattcaccgtt

SEQ ID NO: 8841 - DNA, 21 bp, Artificial Sequence
  Synthetic
ggggacagagccattcaccgt

SEQ ID NO: 8842 - DNA, 21 bp, Artificial Sequence
  Synthetic
cggggacagagccattcaccg

SEQ ID NO: 8843 - DNA, 21 bp, Artificial Sequence
  Synthetic
tggctctgtccccgttgtacg

SEQ ID NO: 8844 - DNA, 21 bp, Artificial Sequence
  Synthetic
tcactcaccgtacaacgggga

SEQ ID NO: 8845 - DNA, 21 bp, Artificial Sequence
  Synthetic
atcagtcactcaccgtacaac

SEQ ID NO: 8846 - DNA, 21 bp, Artificial Sequence
  Synthetic
gatcagtcactcaccgtacaa

SEQ ID NO: 8847 - DNA, 21 bp, Artificial Sequence
  Synthetic
agatcagtcactcaccgtaca

SEQ ID NO: 8848 - DNA, 21 bp, Artificial Sequence
  Synthetic
tgcccttcagagctggacact

SEQ ID NO: 8849 - DNA, 21 bp, Artificial Sequence
  Synthetic
tttgcccttcagagctggaca

SEQ ID NO: 8850 - DNA, 21 bp, Artificial Sequence
  Synthetic
agacagaccaccaggactatt

SEQ ID NO: 8851 - DNA, 21 bp, Artificial Sequence
  Synthetic
gcgaggtgtgccagcaaggcg

SEQ ID NO: 8852 - DNA, 21 bp, Artificial Sequence
  Synthetic
agcacggggacaggtatcaca

SEQ ID NO: 8853 - DNA, 21 bp, Artificial Sequence
  Synthetic
ggcagaccatgtggtaagcac

SEQ ID NO: 8854 - DNA, 21 bp, Artificial Sequence
  Synthetic
aggcagaccatgtggtaagca

SEQ ID NO: 8855 - DNA, 21 bp, Artificial Sequence
  Synthetic
caggcagaccatgtggtaagc

SEQ ID NO: 8856 - DNA, 21 bp, Artificial Sequence
  Synthetic
cgtgcttaccacatggtctgc

SEQ ID NO: 8857 - DNA, 21 bp, Artificial Sequence
  Synthetic
atggtctgcctggatcccgac

SEQ ID NO: 8858 - DNA, 21 bp, Artificial Sequence
  Synthetic
tggtctgcctggatcccgaca

SEQ ID NO: 8859 - DNA, 21 bp, Artificial Sequence
  Synthetic
gtctgcctggatcccgacatg

SEQ ID NO: 8860 - DNA, 21 bp, Artificial Sequence
  Synthetic
atcccgacatggagaaggctc

SEQ ID NO: 8861 - DNA, 21 bp, Artificial Sequence
  Synthetic
cctcgggagccttctccatgt

SEQ ID NO: 8862 - DNA, 21 bp, Artificial Sequence
  Synthetic
ccctcgggagccttctccatg

SEQ ID NO: 8863 - DNA, 21 bp, Artificial Sequence
  Synthetic
cccgacatggagaaggctccc

SEQ ID NO: 8864 - DNA, 21 bp, Artificial Sequence
  Synthetic
ggagaaggctcccgagggcaa

SEQ ID NO: 8865 - DNA, 21 bp, Artificial Sequence
  Synthetic
gagaaggctcccgagggcaag

SEQ ID NO: 8866 - DNA, 21 bp, Artificial Sequence
  Synthetic
tgggcagctccacttgccctc

SEQ ID NO: 8867 - DNA, 21 bp, Artificial Sequence
  Synthetic
gtgggcagctccacttgccct

SEQ ID NO: 8868 - DNA, 21 bp, Artificial Sequence
  Synthetic
tgtgggcagctccacttgccc

SEQ ID NO: 8869 - DNA, 21 bp, Artificial Sequence
  Synthetic
aagtggagctgcccacactgc

SEQ ID NO: 8870 - DNA, 21 bp, Artificial Sequence
  Synthetic
atggccagacactcacgcagt

SEQ ID NO: 8871 - DNA, 21 bp, Artificial Sequence
  Synthetic
gtggtcctttactgcaggaga

SEQ ID NO: 8872 - DNA, 21 bp, Artificial Sequence
  Synthetic
aacaaactcagggaataccag

SEQ ID NO: 8873 - DNA, 21 bp, Artificial Sequence
  Synthetic
acaaactcagggaataccagt

SEQ ID NO: 8874 - DNA, 21 bp, Artificial Sequence
  Synthetic
aaactcagggaataccagttg

SEQ ID NO: 8875 - DNA, 21 bp, Artificial Sequence
  Synthetic
aactcagggaataccagttgg

SEQ ID NO: 8876 - DNA, 21 bp, Artificial Sequence
  Synthetic
actcagggaataccagttgga

SEQ ID NO: 8877 - DNA, 21 bp, Artificial Sequence
  Synthetic
tttacatacatgttgtaccaa

SEQ ID NO: 8878 - DNA, 21 bp, Artificial Sequence
  Synthetic
tttagcagatgaaatgggttt

SEQ ID NO: 8879 - DNA, 21 bp, Artificial Sequence
  Synthetic
ctcatagagaaatgtaatgga

SEQ ID NO: 8880 - DNA, 21 bp, Artificial Sequence
  Synthetic
tccagtccattacatttctct

SEQ ID NO: 8881 - DNA, 21 bp, Artificial Sequence
  Synthetic
tatatctcatagagaaatgta

SEQ ID NO: 8882 - DNA, 21 bp, Artificial Sequence
  Synthetic
acatttctctatgagatatat

SEQ ID NO: 8883 - DNA, 21 bp, Artificial Sequence
  Synthetic
tcctttcaaatatatctcata

SEQ ID NO: 8884 - DNA, 21 bp, Artificial Sequence
  Synthetic
ttctctatgagatatatttga

SEQ ID NO: 8885 - DNA, 21 bp, Artificial Sequence
  Synthetic
tctctatgagatatatttgaa

SEQ ID NO: 8886 - DNA, 21 bp, Artificial Sequence
  Synthetic
attcctttcaaatatatctca

SEQ ID NO: 8887 - DNA, 21 bp, Artificial Sequence
  Synthetic
ggcaattactaaaaaagggcc

SEQ ID NO: 8888 - DNA, 21 bp, Artificial Sequence
  Synthetic
acaatggggcaattactaaaa

SEQ ID NO: 8889 - DNA, 21 bp, Artificial Sequence
  Synthetic
ccagttggggattgtggacaa

SEQ ID NO: 8890 - DNA, 21 bp, Artificial Sequence
  Synthetic
cccagttggggattgtggaca

SEQ ID NO: 8891 - DNA, 21 bp, Artificial Sequence
  Synthetic
cccattgtccacaatccccaa

SEQ ID NO: 8892 - DNA, 21 bp, Artificial Sequence
  Synthetic
ccattgtccacaatccccaac

SEQ ID NO: 8893 - DNA, 21 bp, Artificial Sequence
  Synthetic
cattgtccacaatccccaact

SEQ ID NO: 8894 - DNA, 21 bp, Artificial Sequence
  Synthetic
gtccacaatccccaactggga

SEQ ID NO: 8895 - DNA, 21 bp, Artificial Sequence
  Synthetic
tccctttcccagttggggatt

SEQ ID NO: 8896 - DNA, 21 bp, Artificial Sequence
  Synthetic
tccacaatccccaactgggaa

SEQ ID NO: 8897 - DNA, 21 bp, Artificial Sequence
  Synthetic
ccacaatccccaactgggaaa

SEQ ID NO: 8898 - DNA, 21 bp, Artificial Sequence
  Synthetic
tcggaattccctttcccagtt

SEQ ID NO: 8899 - DNA, 21 bp, Artificial Sequence
  Synthetic
ttcggaattccctttcccagt

SEQ ID NO: 8900 - DNA, 21 bp, Artificial Sequence
  Synthetic
ccccaactgggaaagggaatt

SEQ ID NO: 8901 - DNA, 21 bp, Artificial Sequence
  Synthetic
gttcggaattccctttcccag

SEQ ID NO: 8902 - DNA, 21 bp, Artificial Sequence
  Synthetic
ctgggaaagggaattccgaac

SEQ ID NO: 8903 - DNA, 21 bp, Artificial Sequence
  Synthetic
aaagggaattccgaacctgga

SEQ ID NO: 8904 - DNA, 21 bp, Artificial Sequence
  Synthetic
gaattccgaacctggacagag

SEQ ID NO: 8905 - DNA, 21 bp, Artificial Sequence
  Synthetic
acgttcaactctgtccaggtt

SEQ ID NO: 8906 - DNA, 21 bp, Artificial Sequence
  Synthetic
cacgttcaactctgtccaggt

SEQ ID NO: 8907 - DNA, 21 bp, Artificial Sequence
  Synthetic
agttgaacgtggttgtgtatc

SEQ ID NO: 8908 - DNA, 21 bp, Artificial Sequence
  Synthetic
gttgaacgtggttgtgtatca

SEQ ID NO: 8909 - DNA, 21 bp, Artificial Sequence
  Synthetic
ttgaacgtggttgtgtatcat

SEQ ID NO: 8910 - DNA, 21 bp, Artificial Sequence
  Synthetic
tcatgggagtcaagctagtcg

SEQ ID NO: 8911 - DNA, 21 bp, Artificial Sequence
  Synthetic
gtcgtcggaccattcagttgt

SEQ ID NO: 8912 - DNA, 21 bp, Artificial Sequence
  Synthetic
tttgaagtacatttcatacaa

SEQ ID NO: 8913 - DNA, 21 bp, Artificial Sequence
  Synthetic
tgaaggtttacctggggatct

SEQ ID NO: 8914 - DNA, 21 bp, Artificial Sequence
  Synthetic
ttcttatagggtcgagtgata

SEQ ID NO: 8915 - DNA, 21 bp, Artificial Sequence
  Synthetic
tcttatagggtcgagtgataa

SEQ ID NO: 8916 - DNA, 21 bp, Artificial Sequence
  Synthetic
gtgatgatggcatgaaactta

SEQ ID NO: 8917 - DNA, 21 bp, Artificial Sequence
  Synthetic
ctcaaatgtagtgatgatggc

SEQ ID NO: 8918 - DNA, 21 bp, Artificial Sequence
  Synthetic
ttcatgccatcatcactacat

SEQ ID NO: 8919 - DNA, 21 bp, Artificial Sequence
  Synthetic
tttgactgattgtcctgagct

SEQ ID NO: 8920 - DNA, 21 bp, Artificial Sequence
  Synthetic
ttgactgattgtcctgagctg

SEQ ID NO: 8921 - DNA, 21 bp, Artificial Sequence
  Synthetic
gccatggaatattccgcagct

SEQ ID NO: 8922 - DNA, 21 bp, Artificial Sequence
  Synthetic
atcaatgactacacagcgcca

SEQ ID NO: 8923 - DNA, 21 bp, Artificial Sequence
  Synthetic
catcaatgactacacagcgcc

SEQ ID NO: 8924 - DNA, 21 bp, Artificial Sequence
  Synthetic
catggcgctgtgtagtcattg

SEQ ID NO: 8925 - DNA, 21 bp, Artificial Sequence
  Synthetic
gtcattgatgaagcccacagg

SEQ ID NO: 8926 - DNA, 21 bp, Artificial Sequence
  Synthetic
attgatgaagcccacaggctg

SEQ ID NO: 8927 - DNA, 21 bp, Artificial Sequence
  Synthetic
tgaagcccacaggctgaagaa

SEQ ID NO: 8928 - DNA, 21 bp, Artificial Sequence
  Synthetic
gaagcccacaggctgaagaac

SEQ ID NO: 8929 - DNA, 21 bp, Artificial Sequence
  Synthetic
gcagttcctgttcttcagcct

SEQ ID NO: 8930 - DNA, 21 bp, Artificial Sequence
  Synthetic
aagaacaggaactgcaagctg

SEQ ID NO: 8931 - DNA, 21 bp, Artificial Sequence
  Synthetic
agaacaggaactgcaagctgt

SEQ ID NO: 8932 - DNA, 21 bp, Artificial Sequence
  Synthetic
aacaggaactgcaagctgttg

SEQ ID NO: 8933 - DNA, 21 bp, Artificial Sequence
  Synthetic
acaggaactgcaagctgttgg

SEQ ID NO: 8934 - DNA, 21 bp, Artificial Sequence
  Synthetic
ctgttggagggactcaagatg

SEQ ID NO: 8935 - DNA, 21 bp, Artificial Sequence
  Synthetic
tcactgaccaagtccatcatc

SEQ ID NO: 8936 - DNA, 21 bp, Artificial Sequence
  Synthetic
cgtcagcagcactttgtgttc

SEQ ID NO: 8937 - DNA, 21 bp, Artificial Sequence
  Synthetic
caggaacacaaagtgctgctg

SEQ ID NO: 8938 - DNA, 21 bp, Artificial Sequence
  Synthetic
aggaacacaaagtgctgctga

SEQ ID NO: 8939 - DNA, 21 bp, Artificial Sequence
  Synthetic
ggaacacaaagtgctgctgac

SEQ ID NO: 8940 - DNA, 21 bp, Artificial Sequence
  Synthetic
ctgctgacgggaaccccactc

SEQ ID NO: 8941 - DNA, 21 bp, Artificial Sequence
  Synthetic
ggaaccccactccagaacact

SEQ ID NO: 8942 - DNA, 21 bp, Artificial Sequence
  Synthetic
gaaccccactccagaacactg

SEQ ID NO: 8943 - DNA, 21 bp, Artificial Sequence
  Synthetic
ttcttccacagtgttctggag

SEQ ID NO: 8944 - DNA, 21 bp, Artificial Sequence
  Synthetic
ccccactccagaacactgtgg

SEQ ID NO: 8945 - DNA, 21 bp, Artificial Sequence
  Synthetic
gttcttccacagtgttctgga

SEQ ID NO: 8946 - DNA, 21 bp, Artificial Sequence
  Synthetic
aagagttcttccacagtgttc

SEQ ID NO: 8947 - DNA, 21 bp, Artificial Sequence
  Synthetic
gaagagttcttccacagtgtt

SEQ ID NO: 8948 - DNA, 21 bp, Artificial Sequence
  Synthetic
tccaagaaatgaagcaagctg

SEQ ID NO: 8949 - DNA, 21 bp, Artificial Sequence
  Synthetic
ctcttcagcttgcttcatttc

SEQ ID NO: 8950 - DNA, 21 bp, Artificial Sequence
  Synthetic
tcttcagcttgcttcatttct

SEQ ID NO: 8951 - DNA, 21 bp, Artificial Sequence
  Synthetic
ggttccaagaaatgaagcaag

SEQ ID NO: 8952 - DNA, 21 bp, Artificial Sequence
  Synthetic
gaagcgacttggttccaagaa

SEQ ID NO: 8953 - DNA, 21 bp, Artificial Sequence
  Synthetic
gaagggaagcgacttggttcc

SEQ ID NO: 8954 - DNA, 21 bp, Artificial Sequence
  Synthetic
tggaaccaagtcgcttccctt

SEQ ID NO: 8955 - DNA, 21 bp, Artificial Sequence
  Synthetic
tgcataaatgtggtttctgaa

SEQ ID NO: 8956 - DNA, 21 bp, Artificial Sequence
  Synthetic
ttgcataaatgtggtttctga

SEQ ID NO: 8957 - DNA, 21 bp, Artificial Sequence
  Synthetic
cttgcataaatgtggtttctg

SEQ ID NO: 8958 - DNA, 21 bp, Artificial Sequence
  Synthetic
cttcagaaaccacatttatgc

SEQ ID NO: 8959 - DNA, 21 bp, Artificial Sequence
  Synthetic
attcttgcataaatgtggttt

SEQ ID NO: 8960 - DNA, 21 bp, Artificial Sequence
  Synthetic
aagaatttggtgatctaaaaa

SEQ ID NO: 8961 - DNA, 21 bp, Artificial Sequence
  Synthetic
aatttggtgatctaaaaacag

SEQ ID NO: 8962 - DNA, 21 bp, Artificial Sequence
  Synthetic
catcattggctttagaatagc

SEQ ID NO: 8963 - DNA, 21 bp, Artificial Sequence
  Synthetic
gctattctaaagccaatgatg

SEQ ID NO: 8964 - DNA, 21 bp, Artificial Sequence
  Synthetic
acgtctcaacatcattggctt

SEQ ID NO: 8965 - DNA, 21 bp, Artificial Sequence
  Synthetic
caatgatgttgagacgtctca

SEQ ID NO: 8966 - DNA, 21 bp, Artificial Sequence
  Synthetic
atgatgttgagacgtctcaaa

SEQ ID NO: 8967 - DNA, 21 bp, Artificial Sequence
  Synthetic
tgagacgtctcaaagaggatg

SEQ ID NO: 8968 - DNA, 21 bp, Artificial Sequence
  Synthetic
cgtctcaaagaggatgtagaa

SEQ ID NO: 8969 - DNA, 21 bp, Artificial Sequence
  Synthetic
tagaaaagaacttggccccca

SEQ ID NO: 8970 - DNA, 21 bp, Artificial Sequence
  Synthetic
aaaagaacttggcccccaaag

SEQ ID NO: 8971 - DNA, 21 bp, Artificial Sequence
  Synthetic
ttcaataatagtttcttcttt

SEQ ID NO: 8972 - DNA, 21 bp, Artificial Sequence
  Synthetic
cccccaaagaagaaactatta

SEQ ID NO: 8973 - DNA, 21 bp, Artificial Sequence
  Synthetic
cttcaataatagtttcttctt

SEQ ID NO: 8974 - DNA, 21 bp, Artificial Sequence
  Synthetic
acttcaataatagtttcttct

SEQ ID NO: 8975 - DNA, 21 bp, Artificial Sequence
  Synthetic
aagaagaaactattattgaag

SEQ ID NO: 8976 - DNA, 21 bp, Artificial Sequence
  Synthetic
gaagttgagctaacaaacatt

SEQ ID NO: 8977 - DNA, 21 bp, Artificial Sequence
  Synthetic
gttgagctaacaaacattcag

SEQ ID NO: 8978 - DNA, 21 bp, Artificial Sequence
  Synthetic
aaacattcagaagaaatatta

SEQ ID NO: 8979 - DNA, 21 bp, Artificial Sequence
  Synthetic
gatggctcggtaatatttctt

SEQ ID NO: 8980 - DNA, 21 bp, Artificial Sequence
  Synthetic
agaaatattaccgagccatcc

SEQ ID NO: 8981 - DNA, 21 bp, Artificial Sequence
  Synthetic
aaatattaccgagccatcctt

SEQ ID NO: 8982 - DNA, 21 bp, Artificial Sequence
  Synthetic
tattaccgagccatccttgag

SEQ ID NO: 8983 - DNA, 21 bp, Artificial Sequence
  Synthetic
aagaaatgtgaaattcttctc

SEQ ID NO: 8984 - DNA, 21 bp, Artificial Sequence
  Synthetic
ccaccgcctttggaaagaaat

SEQ ID NO: 8985 - DNA, 21 bp, Artificial Sequence
  Synthetic
agcttgaccaccgcctttgga

SEQ ID NO: 8986 - DNA, 21 bp, Artificial Sequence
  Synthetic
cgttagcttgaccaccgcctt

SEQ ID NO: 8987 - DNA, 21 bp, Artificial Sequence
  Synthetic
acgttagcttgaccaccgcct

SEQ ID NO: 8988 - DNA, 21 bp, Artificial Sequence
  Synthetic
cctaacctattaaacactatg

SEQ ID NO: 8989 - DNA, 21 bp, Artificial Sequence
  Synthetic
ctaacctattaaacactatga

SEQ ID NO: 8990 - DNA, 21 bp, Artificial Sequence
  Synthetic
attaaacactatgatggaatt

SEQ ID NO: 8991 - DNA, 21 bp, Artificial Sequence
  Synthetic
ttaaacactatgatggaattg

SEQ ID NO: 8992 - DNA, 21 bp, Artificial Sequence
  Synthetic
cagccttaccattgataaggt

SEQ ID NO: 8993 - DNA, 21 bp, Artificial Sequence
  Synthetic
ttgatgcagaaggcccagtgg

SEQ ID NO: 8994 - DNA, 21 bp, Artificial Sequence
  Synthetic
ggcccagtggtagaaaaaatt

SEQ ID NO: 8995 - DNA, 21 bp, Artificial Sequence
  Synthetic
agtcgttcagtaaaaaagcag

SEQ ID NO: 8996 - DNA, 21 bp, Artificial Sequence
  Synthetic
ttgttgcagaaggaatctgga

SEQ ID NO: 8997 - DNA, 21 bp, Artificial Sequence
  Synthetic
tgttgcagaaggaatctggag

SEQ ID NO: 8998 - DNA, 21 bp, Artificial Sequence
  Synthetic
agaaggaatctggagaggagg

SEQ ID NO: 8999 - DNA, 21 bp, Artificial Sequence
  Synthetic
aatctggagaggaggtagaaa

SEQ ID NO: 9000 - DNA, 21 bp, Artificial Sequence
  Synthetic
tctggagaggaggtagaaatt

SEQ ID NO: 9001 - DNA, 21 bp, Artificial Sequence
  Synthetic
ctggagaggaggtagaaattg

SEQ ID NO: 9002 - DNA, 21 bp, Artificial Sequence
  Synthetic
gtagaaattgaggaattctat

SEQ ID NO: 9003 - DNA, 21 bp, Artificial Sequence
  Synthetic
cactgacaatgaagataagag

SEQ ID NO: 9004 - DNA, 21 bp, Artificial Sequence
  Synthetic
cagctcttatcttcattgtca

SEQ ID NO: 9005 - DNA, 21 bp, Artificial Sequence
  Synthetic
atgcccactgacaatgaagat

SEQ ID NO: 9006 - DNA, 21 bp, Artificial Sequence
  Synthetic
ttctatagatgcccactgaca

SEQ ID NO: 9007 - DNA, 21 bp, Artificial Sequence
  Synthetic
ttcattgtcagtgggcatcta

SEQ ID NO: 9008 - DNA, 21 bp, Artificial Sequence
  Synthetic
cagtgggcatctatagaagat

SEQ ID NO: 9009 - DNA, 21 bp, Artificial Sequence
  Synthetic
agtgggcatctatagaagatc

SEQ ID NO: 9010 - DNA, 21 bp, Artificial Sequence
  Synthetic
atagaagatctggaaaaagat

SEQ ID NO: 9011 - DNA, 21 bp, Artificial Sequence
  Synthetic
agaagatctggaaaaagataa

SEQ ID NO: 9012 - DNA, 21 bp, Artificial Sequence
  Synthetic
tccagattatgtggaggttga

SEQ ID NO: 9013 - DNA, 21 bp, Artificial Sequence
  Synthetic
tatgtggaggttgaccggata

SEQ ID NO: 9014 - DNA, 21 bp, Artificial Sequence
  Synthetic
ctttgcacgtagcacagatga

SEQ ID NO: 9015 - DNA, 21 bp, Artificial Sequence
  Synthetic
tttgcacgtagcacagatgac

SEQ ID NO: 9016 - DNA, 21 bp, Artificial Sequence
  Synthetic
ttgcacgtagcacagatgacc

SEQ ID NO: 9017 - DNA, 21 bp, Artificial Sequence
  Synthetic
tgcacgtagcacagatgaccg

SEQ ID NO: 9018 - DNA, 21 bp, Artificial Sequence
  Synthetic
cacgtagcacagatgaccggg

SEQ ID NO: 9019 - DNA, 21 bp, Artificial Sequence
  Synthetic
caccagatagtgagtcacagg

SEQ ID NO: 9020 - DNA, 21 bp, Artificial Sequence
  Synthetic
cagcctgtgactcactatctg

SEQ ID NO: 9021 - DNA, 21 bp, Artificial Sequence
  Synthetic
tgaacaccacttcaccagata

SEQ ID NO: 9022 - DNA, 21 bp, Artificial Sequence
  Synthetic
tgaagtggtgttcacttcctt

SEQ ID NO: 9023 - DNA, 21 bp, Artificial Sequence
  Synthetic
acgtgctgtcttcataaggaa

SEQ ID NO: 9024 - DNA, 21 bp, Artificial Sequence
  Synthetic
acttccttatgaagacagcac

SEQ ID NO: 9025 - DNA, 21 bp, Artificial Sequence
  Synthetic
cttccttatgaagacagcacg

SEQ ID NO: 9026 - DNA, 21 bp, Artificial Sequence
  Synthetic
ctcccacgtgctgtcttcata

SEQ ID NO: 9027 - DNA, 21 bp, Artificial Sequence
  Synthetic
ttccttatgaagacagcacgt

SEQ ID NO: 9028 - DNA, 21 bp, Artificial Sequence
  Synthetic
gctcccacgtgctgtcttcat

SEQ ID NO: 9029 - DNA, 21 bp, Artificial Sequence
  Synthetic
ttatgaagacagcacgtggga

SEQ ID NO: 9030 - DNA, 21 bp, Artificial Sequence
  Synthetic
tatgaagacagcacgtgggag

SEQ ID NO: 9031 - DNA, 21 bp, Artificial Sequence
  Synthetic
gacagcacgtgggagcggagg

SEQ ID NO: 9032 - DNA, 21 bp, Artificial Sequence
  Synthetic
aggacatagatcaagcaaaga

SEQ ID NO: 9033 - DNA, 21 bp, Artificial Sequence
  Synthetic
gacatagatcaagcaaagatc

SEQ ID NO: 9034 - DNA, 21 bp, Artificial Sequence
  Synthetic
acatagatcaagcaaagatcg

SEQ ID NO: 9035 - DNA, 21 bp, Artificial Sequence
  Synthetic
atcaagcaaagatcgaggagt

SEQ ID NO: 9036 - DNA, 21 bp, Artificial Sequence
  Synthetic
caagcaaagatcgaggagttt

SEQ ID NO: 9037 - DNA, 21 bp, Artificial Sequence
  Synthetic
aaccagctccgggagtaccag

SEQ ID NO: 9038 - DNA, 21 bp, Artificial Sequence
  Synthetic
accagctccgggagtaccagc

SEQ ID NO: 9039 - DNA, 21 bp, Artificial Sequence
  Synthetic
agctccgggagtaccagctgg

SEQ ID NO: 9040 - DNA, 21 bp, Artificial Sequence
  Synthetic
gctccgggagtaccagctgga

SEQ ID NO: 9041 - DNA, 21 bp, Artificial Sequence
  Synthetic
cgggagtaccagctggaaggg

SEQ ID NO: 9042 - DNA, 21 bp, Artificial Sequence
  Synthetic
ttacctgttataccagttaaa

SEQ ID NO: 9043 - DNA, 21 bp, Artificial Sequence
  Synthetic
tttggctgatgagatgggcct

SEQ ID NO: 9044 - DNA, 21 bp, Artificial Sequence
  Synthetic
ttggctgatgagatgggccta

SEQ ID NO: 9045 - DNA, 21 bp, Artificial Sequence
  Synthetic
ttctgaaaggaatgtgatgga

SEQ ID NO: 9046 - DNA, 21 bp, Artificial Sequence
  Synthetic
tccagtccatcacattccttt

SEQ ID NO: 9047 - DNA, 21 bp, Artificial Sequence
  Synthetic
aatatttctgaaaggaatgtg

SEQ ID NO: 9048 - DNA, 21 bp, Artificial Sequence
  Synthetic
acattcctttcagaaatattt

SEQ ID NO: 9049 - DNA, 21 bp, Artificial Sequence
  Synthetic
attcctttcagaaatatttct

SEQ ID NO: 9050 - DNA, 21 bp, Artificial Sequence
  Synthetic
cctctcagaaatatttctgaa

SEQ ID NO: 9051 - DNA, 21 bp, Artificial Sequence
  Synthetic
tcctctcagaaatatttctga

SEQ ID NO: 9052 - DNA, 21 bp, Artificial Sequence
  Synthetic
tcctttcagaaatatttctga

SEQ ID NO: 9053 - DNA, 21 bp, Artificial Sequence
  Synthetic
cctttcagaaatatttctgag

SEQ ID NO: 9054 - DNA, 21 bp, Artificial Sequence
  Synthetic
ggattcctctcagaaatattt

SEQ ID NO: 9055 - DNA, 21 bp, Artificial Sequence
  Synthetic
aaaagggccgtggattcctct

SEQ ID NO: 9056 - DNA, 21 bp, Artificial Sequence
  Synthetic
ggcgataatgagaaaagggcc

SEQ ID NO: 9057 - DNA, 21 bp, Artificial Sequence
  Synthetic
agagaggggcgataatgagaa

SEQ ID NO: 9058 - DNA, 21 bp, Artificial Sequence
  Synthetic
ggtggagagaggggcgataat

SEQ ID NO: 9059 - DNA, 21 bp, Artificial Sequence
  Synthetic
atggtggagagaggggcgata

SEQ ID NO: 9060 - DNA, 21 bp, Artificial Sequence
  Synthetic
ccagttagtgatggtggagag

SEQ ID NO: 9061 - DNA, 21 bp, Artificial Sequence
  Synthetic
cccagttagtgatggtggaga

SEQ ID NO: 9062 - DNA, 21 bp, Artificial Sequence
  Synthetic
ccctctctccaccatcactaa

SEQ ID NO: 9063 - DNA, 21 bp, Artificial Sequence
  Synthetic
cctctctccaccatcactaac

SEQ ID NO: 9064 - DNA, 21 bp, Artificial Sequence
  Synthetic
ctcccagttagtgatggtgga

SEQ ID NO: 9065 - DNA, 21 bp, Artificial Sequence
  Synthetic
ctctctccaccatcactaact

SEQ ID NO: 9066 - DNA, 21 bp, Artificial Sequence
  Synthetic
cgctcccagttagtgatggtg

SEQ ID NO: 9067 - DNA, 21 bp, Artificial Sequence
  Synthetic
cccgctcccagttagtgatgg

SEQ ID NO: 9068 - DNA, 21 bp, Artificial Sequence
  Synthetic
ctccaccatcactaactggga

SEQ ID NO: 9069 - DNA, 21 bp, Artificial Sequence
  Synthetic
tcccgctcccagttagtgatg

SEQ ID NO: 9070 - DNA, 21 bp, Artificial Sequence
  Synthetic
tccaccatcactaactgggag

SEQ ID NO: 9071 - DNA, 21 bp, Artificial Sequence
  Synthetic
ccaccatcactaactgggagc

SEQ ID NO: 9072 - DNA, 21 bp, Artificial Sequence
  Synthetic
cactaactgggagcgggagtt

SEQ ID NO: 9073 - DNA, 21 bp, Artificial Sequence
  Synthetic
ctgggagcgggagttccggac

SEQ ID NO: 9074 - DNA, 21 bp, Artificial Sequence
  Synthetic
agcgggagttccggacatgga

SEQ ID NO: 9075 - DNA, 21 bp, Artificial Sequence
  Synthetic
gagttccggacatggacagag

SEQ ID NO: 9076 - DNA, 21 bp, Artificial Sequence
  Synthetic
gcattcatctctgtccatgtc

SEQ ID NO: 9077 - DNA, 21 bp, Artificial Sequence
  Synthetic
ggcattcatctctgtccatgt

SEQ ID NO: 9078 - DNA, 21 bp, Artificial Sequence
  Synthetic
gcaggcagatgatccagcagt

SEQ ID NO: 9079 - DNA, 21 bp, Artificial Sequence
  Synthetic
tctgtacaccatttcatactg

SEQ ID NO: 9080 - DNA, 21 bp, Artificial Sequence
  Synthetic
ccagcagtatgaaatggtgta

SEQ ID NO: 9081 - DNA, 21 bp, Artificial Sequence
  Synthetic
atggtgtacagagacgcccag

SEQ ID NO: 9082 - DNA, 21 bp, Artificial Sequence
  Synthetic
atcctcagggaaacccccttt

SEQ ID NO: 9083 - DNA, 21 bp, Artificial Sequence
  Synthetic
ctcctgaaagggggtttccct

SEQ ID NO: 9084 - DNA, 21 bp, Artificial Sequence
  Synthetic
tcctcagggaaaccccctttc

SEQ ID NO: 9085 - DNA, 21 bp, Artificial Sequence
  Synthetic
gactcctgaaagggggtttcc

SEQ ID NO: 9086 - DNA, 21 bp, Artificial Sequence
  Synthetic
ggaacttgaagactcctgaaa

SEQ ID NO: 9087 - DNA, 21 bp, Artificial Sequence
  Synthetic
tggaacttgaagactcctgaa

SEQ ID NO: 9088 - DNA, 21 bp, Artificial Sequence
  Synthetic
gtggaacttgaagactcctga

SEQ ID NO: 9089 - DNA, 21 bp, Artificial Sequence
  Synthetic
cgacgtggaacttgaagactc

SEQ ID NO: 9090 - DNA, 21 bp, Artificial Sequence
  Synthetic
gttgtgatgacgacgtggaac

SEQ ID NO: 9091 - DNA, 21 bp, Artificial Sequence
  Synthetic
tcaaatgttgtgatgacgacg

SEQ ID NO: 9092 - DNA, 21 bp, Artificial Sequence
  Synthetic
ttcaaatgttgtgatgacgac

SEQ ID NO: 9093 - DNA, 21 bp, Artificial Sequence
  Synthetic
tccacgtcgtcatcacaacat

SEQ ID NO: 9094 - DNA, 21 bp, Artificial Sequence
  Synthetic
aaatgatcctagcagactgcc

SEQ ID NO: 9095 - DNA, 21 bp, Artificial Sequence
  Synthetic
atcctagcagactgcccagag

SEQ ID NO: 9096 - DNA, 21 bp, Artificial Sequence
  Synthetic
cttcaactctgggcagtctgc

SEQ ID NO: 9097 - DNA, 21 bp, Artificial Sequence
  Synthetic
ctagcagactgcccagagttg

SEQ ID NO: 9098 - DNA, 21 bp, Artificial Sequence
  Synthetic
tccagtgaatcttcttcaact

SEQ ID NO: 9099 - DNA, 21 bp, Artificial Sequence
  Synthetic
cccagagttgaagaagattca

SEQ ID NO: 9100 - DNA, 21 bp, Artificial Sequence
  Synthetic
ccagagttgaagaagattcac

SEQ ID NO: 9101 - DNA, 21 bp, Artificial Sequence
  Synthetic
atcaattatcacacagctcca

SEQ ID NO: 9102 - DNA, 21 bp, Artificial Sequence
  Synthetic
actggagctgtgtgataattg

SEQ ID NO: 9103 - DNA, 21 bp, Artificial Sequence
  Synthetic
ataattgatgaagcccacaga

SEQ ID NO: 9104 - DNA, 21 bp, Artificial Sequence
  Synthetic
attgatgaagcccacagactg

SEQ ID NO: 9105 - DNA, 21 bp, Artificial Sequence
  Synthetic
tgaagcccacagactgaagaa

SEQ ID NO: 9106 - DNA, 21 bp, Artificial Sequence
  Synthetic
gaagcccacagactgaagaat

SEQ ID NO: 9107 - DNA, 21 bp, Artificial Sequence
  Synthetic
gcagttcctattcttcagtct

SEQ ID NO: 9108 - DNA, 21 bp, Artificial Sequence
  Synthetic
aagaataggaactgcaaactt

SEQ ID NO: 9109 - DNA, 21 bp, Artificial Sequence
  Synthetic
agaataggaactgcaaacttc

SEQ ID NO: 9110 - DNA, 21 bp, Artificial Sequence
  Synthetic
aataggaactgcaaacttctg

SEQ ID NO: 9111 - DNA, 21 bp, Artificial Sequence
  Synthetic
ggccataagctttagaccctc

SEQ ID NO: 9112 - DNA, 21 bp, Artificial Sequence
  Synthetic
ggtctaaagcttatggccctg

SEQ ID NO: 9113 - DNA, 21 bp, Artificial Sequence
  Synthetic
tctaaagcttatggccctggt

SEQ ID NO: 9114 - DNA, 21 bp, Artificial Sequence
  Synthetic
aggaacataaagtgcttctca

SEQ ID NO: 9115 - DNA, 21 bp, Artificial Sequence
  Synthetic
ggaacataaagtgcttctcac

SEQ ID NO: 9116 - DNA, 21 bp, Artificial Sequence
  Synthetic
cttctcactggaacacccttg

SEQ ID NO: 9117 - DNA, 21 bp, Artificial Sequence
  Synthetic
gttctgcaagggtgttccagt

SEQ ID NO: 9118 - DNA, 21 bp, Artificial Sequence
  Synthetic
gagttctgcaagggtgttcca

SEQ ID NO: 9119 - DNA, 21 bp, Artificial Sequence
  Synthetic
ggaacacccttgcagaactct

SEQ ID NO: 9120 - DNA, 21 bp, Artificial Sequence
  Synthetic
gaacacccttgcagaactctg

SEQ ID NO: 9121 - DNA, 21 bp, Artificial Sequence
  Synthetic
acacccttgcagaactctgtg

SEQ ID NO: 9122 - DNA, 21 bp, Artificial Sequence
  Synthetic
cacccttgcagaactctgtgg

SEQ ID NO: 9123 - DNA, 21 bp, Artificial Sequence
  Synthetic
agctcctccacagagttctgc

SEQ ID NO: 9124 - DNA, 21 bp, Artificial Sequence
  Synthetic
acaaactgaagagctcctcca

SEQ ID NO: 9125 - DNA, 21 bp, Artificial Sequence
  Synthetic
tccagaaaatttaacaaactg

SEQ ID NO: 9126 - DNA, 21 bp, Artificial Sequence
  Synthetic
ggctccagaaaatttaacaaa

SEQ ID NO: 9127 - DNA, 21 bp, Artificial Sequence
  Synthetic
tgaaggaaactgtgatggctc

SEQ ID NO: 9128 - DNA, 21 bp, Artificial Sequence
  Synthetic
tggagccatcacagtttcctt

SEQ ID NO: 9129 - DNA, 21 bp, Artificial Sequence
  Synthetic
tttccttcagagaccgctttc

SEQ ID NO: 9130 - DNA, 21 bp, Artificial Sequence
  Synthetic
ctccaagaaagcggtctctga

SEQ ID NO: 9131 - DNA, 21 bp, Artificial Sequence
  Synthetic
ttccttcagagaccgctttct

SEQ ID NO: 9132 - DNA, 21 bp, Artificial Sequence
  Synthetic
cctccaagaaagcggtctctg

SEQ ID NO: 9133 - DNA, 21 bp, Artificial Sequence
  Synthetic
ccttcagagaccgctttcttg

SEQ ID NO: 9134 - DNA, 21 bp, Artificial Sequence
  Synthetic
cttcagagaccgctttcttgg

SEQ ID NO: 9135 - DNA, 21 bp, Artificial Sequence
  Synthetic
attcctccaagaaagcggtct

SEQ ID NO: 9136 - DNA, 21 bp, Artificial Sequence
  Synthetic
agaccgctttcttggaggaat

SEQ ID NO: 9137 - DNA, 21 bp, Artificial Sequence
  Synthetic
gaccgctttcttggaggaatt

SEQ ID NO: 9138 - DNA, 21 bp, Artificial Sequence
  Synthetic
ttcagatctccaaattcctcc

SEQ ID NO: 9139 - DNA, 21 bp, Artificial Sequence
  Synthetic
ttcttggaggaatttggagat

SEQ ID NO: 9140 - DNA, 21 bp, Artificial Sequence
  Synthetic
aggaatttggagatctgaaaa

SEQ ID NO: 9141 - DNA, 21 bp, Artificial Sequence
  Synthetic
gaatttggagatctgaaaaca

SEQ ID NO: 9142 - DNA, 21 bp, Artificial Sequence
  Synthetic
aatttggagatctgaaaacag

SEQ ID NO: 9143 - DNA, 21 bp, Artificial Sequence
  Synthetic
ccgccgaagcatcattggttt

SEQ ID NO: 9144 - DNA, 21 bp, Artificial Sequence
  Synthetic
aaaccaatgatgcttcggcgg

SEQ ID NO: 9145 - DNA, 21 bp, Artificial Sequence
  Synthetic
cttcggcggctgaaagatgat

SEQ ID NO: 9146 - DNA, 21 bp, Artificial Sequence
  Synthetic
ttccacatcatctttcagccg

SEQ ID NO: 9147 - DNA, 21 bp, Artificial Sequence
  Synthetic
ttcggcggctgaaagatgatg

SEQ ID NO: 9148 - DNA, 21 bp, Artificial Sequence
  Synthetic
cggctgaaagatgatgtggaa

SEQ ID NO: 9149 - DNA, 21 bp, Artificial Sequence
  Synthetic
aaaagaaccttgctcccaaac

SEQ ID NO: 9150 - DNA, 21 bp, Artificial Sequence
  Synthetic
ctcaatgatcgtctcttgttt

SEQ ID NO: 9151 - DNA, 21 bp, Artificial Sequence
  Synthetic
ctcccaaacaagagacgatca

SEQ ID NO: 9152 - DNA, 21 bp, Artificial Sequence
  Synthetic
cctcaatgatcgtctcttgtt

SEQ ID NO: 9153 - DNA, 21 bp, Artificial Sequence
  Synthetic
acctcaatgatcgtctcttgt

SEQ ID NO: 9154 - DNA, 21 bp, Artificial Sequence
  Synthetic
aaacaagagacgatcattgag

SEQ ID NO: 9155 - DNA, 21 bp, Artificial Sequence
  Synthetic
aacaagagacgatcattgagg

SEQ ID NO: 9156 - DNA, 21 bp, Artificial Sequence
  Synthetic
gaggtggaactgaccaatatc

SEQ ID NO: 9157 - DNA, 21 bp, Artificial Sequence
  Synthetic
aaaagtactaccgtgccatcc

SEQ ID NO: 9158 - DNA, 21 bp, Artificial Sequence
  Synthetic
aagtactaccgtgccatcctc

SEQ ID NO: 9159 - DNA, 21 bp, Artificial Sequence
  Synthetic
tactaccgtgccatcctcgag

SEQ ID NO: 9160 - DNA, 21 bp, Artificial Sequence
  Synthetic
caggaaggaaaagttcttctc

SEQ ID NO: 9161 - DNA, 21 bp, Artificial Sequence
  Synthetic
gtcaggaaggaaaagttcttc

SEQ ID NO: 9162 - DNA, 21 bp, Artificial Sequence
  Synthetic
gatttgcccccttggtcagga

SEQ ID NO: 9163 - DNA, 21 bp, Artificial Sequence
  Synthetic
tgatttgcccccttggtcagg

SEQ ID NO: 9164 - DNA, 21 bp, Artificial Sequence
  Synthetic
tgctgatttgcccccttggtc

SEQ ID NO: 9165 - DNA, 21 bp, Artificial Sequence
  Synthetic
gtgctgatttgcccccttggt

SEQ ID NO: 9166 - DNA, 21 bp, Artificial Sequence
  Synthetic
tccatcatggtgttgatgaga

SEQ ID NO: 9167 - DNA, 21 bp, Artificial Sequence
  Synthetic
cccaatctcatcaacaccatg

SEQ ID NO: 9168 - DNA, 21 bp, Artificial Sequence
  Synthetic
ccaatctcatcaacaccatga

SEQ ID NO: 9169 - DNA, 21 bp, Artificial Sequence
  Synthetic
ctcagctccatcatggtgttg

SEQ ID NO: 9170 - DNA, 21 bp, Artificial Sequence
  Synthetic
ctcatcaacaccatgatggag

SEQ ID NO: 9171 - DNA, 21 bp, Artificial Sequence
  Synthetic
catcaacaccatgatggagct

SEQ ID NO: 9172 - DNA, 21 bp, Artificial Sequence
  Synthetic
atcaacaccatgatggagctg

SEQ ID NO: 9173 - DNA, 21 bp, Artificial Sequence
  Synthetic
ctgactcaccattgatcaggt

SEQ ID NO: 9174 - DNA, 21 bp, Artificial Sequence
  Synthetic
cctgactcaccattgatcagg

SEQ ID NO: 9175 - DNA, 21 bp, Artificial Sequence
  Synthetic
tatgtagaagttgatcgcatc

SEQ ID NO: 9176 - DNA, 21 bp, Artificial Sequence
  Synthetic
atgtagaagttgatcgcatct

SEQ ID NO: 9177 - DNA, 21 bp, Artificial Sequence
  Synthetic
atcttggaggtggcccacacc

SEQ ID NO: 9178 - DNA, 21 bp, Artificial Sequence
  Synthetic
aggtggcccacaccaaggatg

SEQ ID NO: 9179 - DNA, 21 bp, Artificial Sequence
  Synthetic
ccctgtttctgcatccttggt

SEQ ID NO: 9180 - DNA, 21 bp, Artificial Sequence
  Synthetic
cccacaccaaggatgcagaaa

SEQ ID NO: 9181 - DNA, 21 bp, Artificial Sequence
  Synthetic
ccacaccaaggatgcagaaac

SEQ ID NO: 9182 - DNA, 21 bp, Artificial Sequence
  Synthetic
cacaccaaggatgcagaaaca

SEQ ID NO: 9183 - DNA, 21 bp, Artificial Sequence
  Synthetic
acaccaaggatgcagaaacag

SEQ ID NO: 9184 - DNA, 21 bp, Artificial Sequence
  Synthetic
aaggatgcagaaacaggggag

SEQ ID NO: 9185 - DNA, 21 bp, Artificial Sequence
  Synthetic
caggaggtaacacattacctg

SEQ ID NO: 9186 - DNA, 21 bp, Artificial Sequence
  Synthetic
tgaagtggtgctcactaccat

SEQ ID NO: 9187 - DNA, 21 bp, Artificial Sequence
  Synthetic
agtggtgctcactaccatatg

SEQ ID NO: 9188 - DNA, 21 bp, Artificial Sequence
  Synthetic
acgtgctttcttcatatggta

SEQ ID NO: 9189 - DNA, 21 bp, Artificial Sequence
  Synthetic
actaccatatgaagaaagcac

SEQ ID NO: 9190 - DNA, 21 bp, Artificial Sequence
  Synthetic
ctaccatatgaagaaagcacg

SEQ ID NO: 9191 - DNA, 21 bp, Artificial Sequence
  Synthetic
taccatatgaagaaagcacgt

SEQ ID NO: 9192 - DNA, 21 bp, Artificial Sequence
  Synthetic
atgaagaaagcacgtgggagc

SEQ ID NO: 9193 - DNA, 21 bp, Artificial Sequence
  Synthetic
gaagaaagcacgtgggagcta

SEQ ID NO: 9194 - DNA, 21 bp, Artificial Sequence
  Synthetic
aagaaagcacgtgggagctag

SEQ ID NO: 9195 - DNA, 21 bp, Artificial Sequence
  Synthetic
atgtagatcctgcaaaagtta

SEQ ID NO: 9196 - DNA, 21 bp, Artificial Sequence
  Synthetic
atcctgcaaaagttaaagaat

SEQ ID NO: 9197 - DNA, 21 bp, Artificial Sequence
  Synthetic
cagaagatgatgcaaacatca

SEQ ID NO: 9198 - DNA, 21 bp, Artificial Sequence
  Synthetic
gaagatgatgcaaacatcatt

SEQ ID NO: 9199 - DNA, 21 bp, Artificial Sequence
  Synthetic
atcctggcatctaagactgtc

SEQ ID NO: 9200 - DNA, 21 bp, Artificial Sequence
  Synthetic
ctcctggacagtcttagatgc

SEQ ID NO: 9201 - DNA, 21 bp, Artificial Sequence
  Synthetic
tcctggcatctaagactgtcc

SEQ ID NO: 9202 - DNA, 21 bp, Artificial Sequence
  Synthetic
gaaacatgagccaccaacctc

SEQ ID NO: 9203 - DNA, 21 bp, Artificial Sequence
  Synthetic
gctgtttgttacaggttcacc

SEQ ID NO: 9204 - DNA, 21 bp, Artificial Sequence
  Synthetic
ctgtttgttacaggttcaccc

SEQ ID NO: 9205 - DNA, 21 bp, Artificial Sequence
  Synthetic
gtttgttacaggttcacccag

SEQ ID NO: 9206 - DNA, 21 bp, Artificial Sequence
  Synthetic
gtcgaacggaggttctcctgg

SEQ ID NO: 9207 - DNA, 21 bp, Artificial Sequence
  Synthetic
ccaagtcgaacggaggttctc

SEQ ID NO: 9208 - DNA, 21 bp, Artificial Sequence
  Synthetic
ccaggagaacctccgttcgac

SEQ ID NO: 9209 - DNA, 21 bp, Artificial Sequence
  Synthetic
caggagaacctccgttcgact

SEQ ID NO: 9210 - DNA, 21 bp, Artificial Sequence
  Synthetic
gtagaacagctccaagtcgaa

SEQ ID NO: 9211 - DNA, 21 bp, Artificial Sequence
  Synthetic
cgtagaacagctccaagtcga

SEQ ID NO: 9212 - DNA, 21 bp, Artificial Sequence
  Synthetic
ttaacgtagaacagctccaag

SEQ ID NO: 9213 - DNA, 21 bp, Artificial Sequence
  Synthetic
ggagctgttctacgttaagta

SEQ ID NO: 9214 - DNA, 21 bp, Artificial Sequence
  Synthetic
tacaaatttctatacttaacg

SEQ ID NO: 9215 - DNA, 21 bp, Artificial Sequence
  Synthetic
tagttcctacttacattgtaa

SEQ ID NO: 9216 - DNA, 21 bp, Artificial Sequence
  Synthetic
tggcccatttacaatgtaagt

SEQ ID NO: 9217 - DNA, 21 bp, Artificial Sequence
  Synthetic
gtggcccatttacaatgtaag

SEQ ID NO: 9218 - DNA, 21 bp, Artificial Sequence
  Synthetic
ttacattgtaaatgggccaca

SEQ ID NO: 9219 - DNA, 21 bp, Artificial Sequence
  Synthetic
tacattgtaaatgggccacaa

SEQ ID NO: 9220 - DNA, 21 bp, Artificial Sequence
  Synthetic
attgtaaatgggccacaatgg

SEQ ID NO: 9221 - DNA, 21 bp, Artificial Sequence
  Synthetic
aatgggccacaatggaagagc

SEQ ID NO: 9222 - DNA, 21 bp, Artificial Sequence
  Synthetic
gccacaatggaagagctcgaa

SEQ ID NO: 9223 - DNA, 21 bp, Artificial Sequence
  Synthetic
tgtgcgatgcgaggatccttt

SEQ ID NO: 9224 - DNA, 21 bp, Artificial Sequence
  Synthetic
gaaaaggatcctcgcatcgca

SEQ ID NO: 9225 - DNA, 21 bp, Artificial Sequence
  Synthetic
gcttgatcttctgtgcgatgc

SEQ ID NO: 9226 - DNA, 21 bp, Artificial Sequence
  Synthetic
tcgcttgatcttctgtgcgat

SEQ ID NO: 9227 - DNA, 21 bp, Artificial Sequence
  Synthetic
cgcacagaagatcaagcgatt

SEQ ID NO: 9228 - DNA, 21 bp, Artificial Sequence
  Synthetic
gcacagaagatcaagcgattt

SEQ ID NO: 9229 - DNA, 21 bp, Artificial Sequence
  Synthetic
aatcaactcagggaatatcaa

SEQ ID NO: 9230 - DNA, 21 bp, Artificial Sequence
  Synthetic
atcaactcagggaatatcaac

SEQ ID NO: 9231 - DNA, 21 bp, Artificial Sequence
  Synthetic
aactcagggaatatcaactgg

SEQ ID NO: 9232 - DNA, 21 bp, Artificial Sequence
  Synthetic
taccaattgaacaagagccag

SEQ ID NO: 9233 - DNA, 21 bp, Artificial Sequence
  Synthetic
tacctattgtaccaattgaac

SEQ ID NO: 9234 - DNA, 21 bp, Artificial Sequence
  Synthetic
actacatacctattgtaccaa

SEQ ID NO: 9235 - DNA, 21 bp, Artificial Sequence
  Synthetic
tctgctaagatgcagtttcgt

SEQ ID NO: 9236 - DNA, 21 bp, Artificial Sequence
  Synthetic
gacgaaactgcatcttagcag

SEQ ID NO: 9237 - DNA, 21 bp, Artificial Sequence
  Synthetic
aactgcatcttagcagatgaa

SEQ ID NO: 9238 - DNA, 21 bp, Artificial Sequence
  Synthetic
ttcatagaggaatgtaattga

SEQ ID NO: 9239 - DNA, 21 bp, Artificial Sequence
  Synthetic
ttcaatcaattacattcctct

SEQ ID NO: 9240 - DNA, 21 bp, Artificial Sequence
  Synthetic
ccagtcagaaggatttcatag

SEQ ID NO: 9241 - DNA, 21 bp, Artificial Sequence
  Synthetic
accagtcagaaggatttcata

SEQ ID NO: 9242 - DNA, 21 bp, Artificial Sequence
  Synthetic
ataccagtcagaaggatttca

SEQ ID NO: 9243 - DNA, 21 bp, Artificial Sequence
  Synthetic
tgaaatccttctgactggtat

SEQ ID NO: 9244 - DNA, 21 bp, Artificial Sequence
  Synthetic
aaatccttctgactggtataa

SEQ ID NO: 9245 - DNA, 21 bp, Artificial Sequence
  Synthetic
aggtcctcttataccagtcag

SEQ ID NO: 9246 - DNA, 21 bp, Artificial Sequence
  Synthetic
gaaaggtcctcttataccagt

SEQ ID NO: 9247 - DNA, 21 bp, Artificial Sequence
  Synthetic
gtagaaagtggagcaataatc

SEQ ID NO: 9248 - DNA, 21 bp, Artificial Sequence
  Synthetic
agtagaaagtggagcaataat

SEQ ID NO: 9249 - DNA, 21 bp, Artificial Sequence
  Synthetic
ccagtttgcaatagtagaaag

SEQ ID NO: 9250 - DNA, 21 bp, Artificial Sequence
  Synthetic
cccagtttgcaatagtagaaa

SEQ ID NO: 9251 - DNA, 21 bp, Artificial Sequence
  Synthetic
tccactttctactattgcaaa

SEQ ID NO: 9252 - DNA, 21 bp, Artificial Sequence
  Synthetic
ccactttctactattgcaaac

SEQ ID NO: 9253 - DNA, 21 bp, Artificial Sequence
  Synthetic
cactttctactattgcaaact

SEQ ID NO: 9254 - DNA, 21 bp, Artificial Sequence
  Synthetic
ctttctactattgcaaactgg

SEQ ID NO: 9255 - DNA, 21 bp, Artificial Sequence
  Synthetic
ctctctcccagtttgcaatag

SEQ ID NO: 9256 - DNA, 21 bp, Artificial Sequence
  Synthetic
ttctactattgcaaactggga

SEQ ID NO: 9257 - DNA, 21 bp, Artificial Sequence
  Synthetic
ctactattgcaaactgggaga

SEQ ID NO: 9258 - DNA, 21 bp, Artificial Sequence
  Synthetic
ctgggagagagaatttcgtac

SEQ ID NO: 9259 - DNA, 21 bp, Artificial Sequence
  Synthetic
aacgttaatatcagtccacgt

SEQ ID NO: 9260 - DNA, 21 bp, Artificial Sequence
  Synthetic
atattaacgttgtggtttatc

SEQ ID NO: 9261 - DNA, 21 bp, Artificial Sequence
  Synthetic
tattaacgttgtggtttatca

SEQ ID NO: 9262 - DNA, 21 bp, Artificial Sequence
  Synthetic
attaacgttgtggtttatcat

SEQ ID NO: 9263 - DNA, 21 bp, Artificial Sequence
  Synthetic
gcagacaaatgatacagcaat

SEQ ID NO: 9264 - DNA, 21 bp, Artificial Sequence
  Synthetic
acagcaatacgagatgtactt

SEQ ID NO: 9265 - DNA, 21 bp, Artificial Sequence
  Synthetic
cagcaatacgagatgtacttc

SEQ ID NO: 9266 - DNA, 21 bp, Artificial Sequence
  Synthetic
caataacacacctgtgaatcc

SEQ ID NO: 9267 - DNA, 21 bp, Artificial Sequence
  Synthetic
tcatttctaggggcgtatcat

SEQ ID NO: 9268 - DNA, 21 bp, Artificial Sequence
  Synthetic
atttctaggggcgtatcattc

SEQ ID NO: 9269 - DNA, 21 bp, Artificial Sequence
  Synthetic
tttctaggggcgtatcattcg

SEQ ID NO: 9270 - DNA, 21 bp, Artificial Sequence
  Synthetic
gctcctcgaatgatacgcccc

SEQ ID NO: 9271 - DNA, 21 bp, Artificial Sequence
  Synthetic
ggcttggaatctgtaagctcc

SEQ ID NO: 9272 - DNA, 21 bp, Artificial Sequence
  Synthetic
tcaaaagtggtgatgatggct

SEQ ID NO: 9273 - DNA, 21 bp, Artificial Sequence
  Synthetic
ttcaaaagtggtgatgatggc

SEQ ID NO: 9274 - DNA, 21 bp, Artificial Sequence
  Synthetic
tccaagccatcatcaccactt

SEQ ID NO: 9275 - DNA, 21 bp, Artificial Sequence
  Synthetic
ttgaaatgattcttggaggct

SEQ ID NO: 9276 - DNA, 21 bp, Artificial Sequence
  Synthetic
tgaaatgattcttggaggctg

SEQ ID NO: 9277 - DNA, 21 bp, Artificial Sequence
  Synthetic
aaatgattcttggaggctgtg

SEQ ID NO: 9278 - DNA, 21 bp, Artificial Sequence
  Synthetic
attaagctctccacagcctcc

SEQ ID NO: 9279 - DNA, 21 bp, Artificial Sequence
  Synthetic
gctgtggagagcttaatgcaa

SEQ ID NO: 9280 - DNA, 21 bp, Artificial Sequence
  Synthetic
aatggcgatgtgtgattattg

SEQ ID NO: 9281 - DNA, 21 bp, Artificial Sequence
  Synthetic
aaaataaaaattgtaaactct

SEQ ID NO: 9282 - DNA, 21 bp, Artificial Sequence
  Synthetic
aataaaaattgtaaactctta

SEQ ID NO: 9283 - DNA, 21 bp, Artificial Sequence
  Synthetic
aattgtaaactcttagagggc

SEQ ID NO: 9284 - DNA, 21 bp, Artificial Sequence
  Synthetic
ttcatgagtttcaggccctct

SEQ ID NO: 9285 - DNA, 21 bp, Artificial Sequence
  Synthetic
ctcttagagggcctgaaactc

SEQ ID NO: 9286 - DNA, 21 bp, Artificial Sequence
  Synthetic
attaagttacttaccagattc

SEQ ID NO: 9287 - DNA, 21 bp, Artificial Sequence
  Synthetic
gcacccctctccaaaatacag

SEQ ID NO: 9288 - DNA, 21 bp, Artificial Sequence
  Synthetic
cccctctccaaaatacagttg

SEQ ID NO: 9289 - DNA, 21 bp, Artificial Sequence
  Synthetic
aatagttcttcaactgtattt

SEQ ID NO: 9290 - DNA, 21 bp, Artificial Sequence
  Synthetic
aaatagttcttcaactgtatt

SEQ ID NO: 9291 - DNA, 21 bp, Artificial Sequence
  Synthetic
tatttagtcttcttcactttc

SEQ ID NO: 9292 - DNA, 21 bp, Artificial Sequence
  Synthetic
ccttaagggttcaagaaagtg

SEQ ID NO: 9293 - DNA, 21 bp, Artificial Sequence
  Synthetic
aaaccttaagggttcaagaaa

SEQ ID NO: 9294 - DNA, 21 bp, Artificial Sequence
  Synthetic
agaaggaaaccttaagggttc

SEQ ID NO: 9295 - DNA, 21 bp, Artificial Sequence
  Synthetic
ttgaacccttaaggtttcctt

SEQ ID NO: 9296 - DNA, 21 bp, Artificial Sequence
  Synthetic
gttgattcagaaggaaacctt

SEQ ID NO: 9297 - DNA, 21 bp, Artificial Sequence
  Synthetic
ttgcataaatgttgattcaga

SEQ ID NO: 9298 - DNA, 21 bp, Artificial Sequence
  Synthetic
cttgcataaatgttgattcag

SEQ ID NO: 9299 - DNA, 21 bp, Artificial Sequence
  Synthetic
cttctgaatcaacatttatgc

SEQ ID NO: 9300 - DNA, 21 bp, Artificial Sequence
  Synthetic
attcttgcataaatgttgatt

SEQ ID NO: 9301 - DNA, 21 bp, Artificial Sequence
  Synthetic
aatcaacatttatgcaagaat

SEQ ID NO: 9302 - DNA, 21 bp, Artificial Sequence
  Synthetic
atcaacatttatgcaagaatt

SEQ ID NO: 9303 - DNA, 21 bp, Artificial Sequence
  Synthetic
tcaacatttatgcaagaattt

SEQ ID NO: 9304 - DNA, 21 bp, Artificial Sequence
  Synthetic
tttatgcaagaatttggggat

SEQ ID NO: 9305 - DNA, 21 bp, Artificial Sequence
  Synthetic
aagaatttggggatctgaaaa

SEQ ID NO: 9306 - DNA, 21 bp, Artificial Sequence
  Synthetic
gaatttggggatctgaaaaca

SEQ ID NO: 9307 - DNA, 21 bp, Artificial Sequence
  Synthetic
aatttggggatctgaaaacag

SEQ ID NO: 9308 - DNA, 21 bp, Artificial Sequence
  Synthetic
gatagcctgaagtttctgtac

SEQ ID NO: 9309 - DNA, 21 bp, Artificial Sequence
  Synthetic
gtacagaaacttcaggctatc

SEQ ID NO: 9310 - DNA, 21 bp, Artificial Sequence
  Synthetic
catcattggtttcaggatagc

SEQ ID NO: 9311 - DNA, 21 bp, Artificial Sequence
  Synthetic
gctatcctgaaaccaatgatg

SEQ ID NO: 9312 - DNA, 21 bp, Artificial Sequence
  Synthetic
tcgtctcaacatcattggttt

SEQ ID NO: 9313 - DNA, 21 bp, Artificial Sequence
  Synthetic
caatgatgttgagacgattaa

SEQ ID NO: 9314 - DNA, 21 bp, Artificial Sequence
  Synthetic
ttgagacgattaaaagaagat

SEQ ID NO: 9315 - DNA, 21 bp, Artificial Sequence
  Synthetic
tgagacgattaaaagaagatg

SEQ ID NO: 9316 - DNA, 21 bp, Artificial Sequence
  Synthetic
cgattaaaagaagatgtggaa

SEQ ID NO: 9317 - DNA, 21 bp, Artificial Sequence
  Synthetic
tggaaaagaagttggcaccta

SEQ ID NO: 9318 - DNA, 21 bp, Artificial Sequence
  Synthetic
aaaagaagttggcacctaaag

SEQ ID NO: 9319 - DNA, 21 bp, Artificial Sequence
  Synthetic
cacctaaagaagaaaccatca

SEQ ID NO: 9320 - DNA, 21 bp, Artificial Sequence
  Synthetic
aagaagaaaccatcattgaag

SEQ ID NO: 9321 - DNA, 21 bp, Artificial Sequence
  Synthetic
gtagaacttactaatattcaa

SEQ ID NO: 9322 - DNA, 21 bp, Artificial Sequence
  Synthetic
taatattcaaaagaaatacta

SEQ ID NO: 9323 - DNA, 21 bp, Artificial Sequence
  Synthetic
gatagcccggtagtatttctt

SEQ ID NO: 9324 - DNA, 21 bp, Artificial Sequence
  Synthetic
aagaaatactaccgggctatc

SEQ ID NO: 9325 - DNA, 21 bp, Artificial Sequence
  Synthetic
agaaatactaccgggctatct

SEQ ID NO: 9326 - DNA, 21 bp, Artificial Sequence
  Synthetic
tactaccgggctatcttggaa

SEQ ID NO: 9327 - DNA, 21 bp, Artificial Sequence
  Synthetic
gtcctgctcctttggataaaa

SEQ ID NO: 9328 - DNA, 21 bp, Artificial Sequence
  Synthetic
acattagtttgtcctgctcct

SEQ ID NO: 9329 - DNA, 21 bp, Artificial Sequence
  Synthetic
cctaacttggtcaataccatg

SEQ ID NO: 9330 - DNA, 21 bp, Artificial Sequence
  Synthetic
ctaacttggtcaataccatga

SEQ ID NO: 9331 - DNA, 21 bp, Artificial Sequence
  Synthetic
ggtcaataccatgatggagct

SEQ ID NO: 9332 - DNA, 21 bp, Artificial Sequence
  Synthetic
gtcaataccatgatggagctc

SEQ ID NO: 9333 - DNA, 21 bp, Artificial Sequence
  Synthetic
tatggatgattacaacatttc

SEQ ID NO: 9334 - DNA, 21 bp, Artificial Sequence
  Synthetic
cccagactacgttgaagtaga

SEQ ID NO: 9335 - DNA, 21 bp, Artificial Sequence
  Synthetic
acgttgaagtagacagagtat

SEQ ID NO: 9336 - DNA, 21 bp, Artificial Sequence
  Synthetic
cagtatccttatcttcacaaa

SEQ ID NO: 9337 - DNA, 21 bp, Artificial Sequence
  Synthetic
tttgtgaagataaggatactg

SEQ ID NO: 9338 - DNA, 21 bp, Artificial Sequence
  Synthetic
taaaatggtgctcattgccat

SEQ ID NO: 9339 - DNA, 21 bp, Artificial Sequence
  Synthetic
aagtactatcttcatatggca

SEQ ID NO: 9340 - DNA, 21 bp, Artificial Sequence
  Synthetic
attgccatatgaagatagtac

SEQ ID NO: 9341 - DNA, 21 bp, Artificial Sequence
  Synthetic
ttgccatatgaagatagtact

SEQ ID NO: 9342 - DNA, 21 bp, Artificial Sequence
  Synthetic
tgccatatgaagatagtactt

SEQ ID NO: 9343 - DNA, 21 bp, Artificial Sequence
  Synthetic
aagatagtacttgggaactaa

SEQ ID NO: 9344 - DNA, 21 bp, Artificial Sequence
  Synthetic
aagatgtagatcttgcaaaaa

SEQ ID NO: 9345 - DNA, 21 bp, Artificial Sequence
  Synthetic
atgtagatcttgcaaaaatag

SEQ ID NO: 9346 - DNA, 21 bp, Artificial Sequence
  Synthetic
atcttgcaaaaatagaagagt

SEQ ID NO: 9347 - DNA, 21 bp, Artificial Sequence
  Synthetic
tgtagacaaaattctatcttc

SEQ ID NO: 9348 - DNA, 21 bp, Artificial Sequence
  Synthetic
ctatcttctagaaccgtaaaa

SEQ ID NO: 9349 - DNA, 21 bp, Artificial Sequence
  Synthetic
tatcttctagaaccgtaaaaa

SEQ ID NO: 9350 - DNA, 21 bp, Artificial Sequence
  Synthetic
tcatcactccaggtgatatct

SEQ ID NO: 9351 - DNA, 21 bp, Artificial Sequence
  Synthetic
cacctggagtgatgattgata

SEQ ID NO: 9352 - DNA, 21 bp, Artificial Sequence
  Synthetic
ctggagtgatgattgatacag

SEQ ID NO: 9353 - DNA, 21 bp, Artificial Sequence
  Synthetic
tagctcctatcttcactgtga

SEQ ID NO: 9354 - DNA, 21 bp, Artificial Sequence
  Synthetic
tggcccactcacagtgaagat

SEQ ID NO: 9355 - DNA, 21 bp, Artificial Sequence
  Synthetic
gtggcccactcacagtgaaga

SEQ ID NO: 9356 - DNA, 21 bp, Artificial Sequence
  Synthetic
atcttcactgtgagtgggcca

SEQ ID NO: 9357 - DNA, 21 bp, Artificial Sequence
  Synthetic
ctcttctgtggcccactcaca

SEQ ID NO: 9358 - DNA, 21 bp, Artificial Sequence
  Synthetic
ttcactgtgagtgggccacag

SEQ ID NO: 9359 - DNA, 21 bp, Artificial Sequence
  Synthetic
tgggccacagaagagcagctt

SEQ ID NO: 9360 - DNA, 21 bp, Artificial Sequence
  Synthetic
ttgaaagataaaaggatccag

SEQ ID NO: 9361 - DNA, 21 bp, Artificial Sequence
  Synthetic
cagaaaatcaaacgattcaaa

SEQ ID NO: 9362 - DNA, 21 bp, Artificial Sequence
  Synthetic
tggcttcccaggagtttgagg

SEQ ID NO: 9363 - DNA, 21 bp, Artificial Sequence
  Synthetic
gaagctattgttgacaaaaga

SEQ ID NO: 9364 - DNA, 21 bp, Artificial Sequence
  Synthetic
ttgacaaaagacaggataaaa

SEQ ID NO: 9365 - DNA, 21 bp, Artificial Sequence
  Synthetic
tgacaaaagacaggataaaaa

SEQ ID NO: 9366 - DNA, 21 bp, Artificial Sequence
  Synthetic
gacaaaagacaggataaaaat

SEQ ID NO: 9367 - DNA, 21 bp, Artificial Sequence
  Synthetic
gaatacacagtatttggttcg

SEQ ID NO: 9368 - DNA, 21 bp, Artificial Sequence
  Synthetic
aatacacagtatttggttcgg

SEQ ID NO: 9369 - DNA, 21 bp, Artificial Sequence
  Synthetic
ctgtttgtcataacctttcca

SEQ ID NO: 9370 - DNA, 21 bp, Artificial Sequence
  Synthetic
cggtggaaaggttatgacaaa

SEQ ID NO: 9371 - DNA, 21 bp, Artificial Sequence
  Synthetic
ttatgacaaacaggatgacac

SEQ ID NO: 9372 - DNA, 21 bp, Artificial Sequence
  Synthetic
tatgacaaacaggatgacact

SEQ ID NO: 9373 - DNA, 21 bp, Artificial Sequence
  Synthetic
atgacaaacaggatgacactt

SEQ ID NO: 9374 - DNA, 21 bp, Artificial Sequence
  Synthetic
aacaggatgacacttgggaac

SEQ ID NO: 9375 - DNA, 21 bp, Artificial Sequence
  Synthetic
tgggaaccagagcagcacctc

SEQ ID NO: 9376 - DNA, 21 bp, Artificial Sequence
  Synthetic
cagagcagcacctcatgaact

SEQ ID NO: 9377 - DNA, 21 bp, Artificial Sequence
  Synthetic
agctccgggagtaccagcaca

SEQ ID NO: 9378 - DNA, 21 bp, Artificial Sequence
  Synthetic
tagactggctggttaccatgt

SEQ ID NO: 9379 - DNA, 21 bp, Artificial Sequence
  Synthetic
gactggctggttaccatgtat

SEQ ID NO: 9380 - DNA, 21 bp, Artificial Sequence
  Synthetic
tggctggttaccatgtatgag

SEQ ID NO: 9381 - DNA, 21 bp, Artificial Sequence
  Synthetic
agcttaatggcattcttgctg

SEQ ID NO: 9382 - DNA, 21 bp, Artificial Sequence
  Synthetic
aatggcattcttgctgatgag

SEQ ID NO: 9383 - DNA, 21 bp, Artificial Sequence
  Synthetic
atggcattcttgctgatgaga

SEQ ID NO: 9384 - DNA, 21 bp, Artificial Sequence
  Synthetic
cccaagccccatctcatcagc

SEQ ID NO: 9385 - DNA, 21 bp, Artificial Sequence
  Synthetic
ttcttgctgatgagatggggc

SEQ ID NO: 9386 - DNA, 21 bp, Artificial Sequence
  Synthetic
tcttgctgatgagatggggct

SEQ ID NO: 9387 - DNA, 21 bp, Artificial Sequence
  Synthetic
cttgctgatgagatggggctt

SEQ ID NO: 9388 - DNA, 21 bp, Artificial Sequence
  Synthetic
gtgggcaagcagagagatggt

SEQ ID NO: 9389 - DNA, 21 bp, Artificial Sequence
  Synthetic
cacaagccaagtgggcaagca

SEQ ID NO: 9390 - DNA, 21 bp, Artificial Sequence
  Synthetic
ctcacaagccaagtgggcaag

SEQ ID NO: 9391 - DNA, 21 bp, Artificial Sequence
  Synthetic
ctctgcttgcccacttggctt

SEQ ID NO: 9392 - DNA, 21 bp, Artificial Sequence
  Synthetic
ctgcttgcccacttggcttgt

SEQ ID NO: 9393 - DNA, 21 bp, Artificial Sequence
  Synthetic
cttacctttctcacaagccaa

SEQ ID NO: 9394 - DNA, 21 bp, Artificial Sequence
  Synthetic
tggtgggaacaatgattaaat

SEQ ID NO: 9395 - DNA, 21 bp, Artificial Sequence
  Synthetic
ctggtgggaacaatgattaaa

SEQ ID NO: 9396 - DNA, 21 bp, Artificial Sequence
  Synthetic
gctggtgggaacaatgattaa

SEQ ID NO: 9397 - DNA, 21 bp, Artificial Sequence
  Synthetic
attgttcccaccagcgtgatg

SEQ ID NO: 9398 - DNA, 21 bp, Artificial Sequence
  Synthetic
ccagttcaacatcacgctggt

SEQ ID NO: 9399 - DNA, 21 bp, Artificial Sequence
  Synthetic
cccagttcaacatcacgctgg

SEQ ID NO: 9400 - DNA, 21 bp, Artificial Sequence
  Synthetic
tcccaccagcgtgatgttgaa

SEQ ID NO: 9401 - DNA, 21 bp, Artificial Sequence
  Synthetic
tcccagttcaacatcacgctg

SEQ ID NO: 9402 - DNA, 21 bp, Artificial Sequence
  Synthetic
cccaccagcgtgatgttgaac

SEQ ID NO: 9403 - DNA, 21 bp, Artificial Sequence
  Synthetic
ccaccagcgtgatgttgaact

SEQ ID NO: 9404 - DNA, 21 bp, Artificial Sequence
  Synthetic
agcgtgatgttgaactgggag

SEQ ID NO: 9405 - DNA, 21 bp, Artificial Sequence
  Synthetic
gcgtgatgttgaactgggaga

SEQ ID NO: 9406 - DNA, 21 bp, Artificial Sequence
  Synthetic
atgttgaactgggagatggag

SEQ ID NO: 9407 - DNA, 21 bp, Artificial Sequence
  Synthetic
gctttaaaatcctcacttact

SEQ ID NO: 9408 - DNA, 21 bp, Artificial Sequence
  Synthetic
ctttaaaatcctcacttacta

SEQ ID NO: 9409 - DNA, 21 bp, Artificial Sequence
  Synthetic
atcctcacttactatggagcc

SEQ ID NO: 9410 - DNA, 21 bp, Artificial Sequence
  Synthetic
tttctgggctccatagtaagt

SEQ ID NO: 9411 - DNA, 21 bp, Artificial Sequence
  Synthetic
tctttctgggctccatagtaa

SEQ ID NO: 9412 - DNA, 21 bp, Artificial Sequence
  Synthetic
tcacttactatggagcccaga

SEQ ID NO: 9413 - DNA, 21 bp, Artificial Sequence
  Synthetic
acttactatggagcccagaaa

SEQ ID NO: 9414 - DNA, 21 bp, Artificial Sequence
  Synthetic
ttactatggagcccagaaaga

SEQ ID NO: 9415 - DNA, 21 bp, Artificial Sequence
  Synthetic
tactatggagcccagaaagag

SEQ ID NO: 9416 - DNA, 21 bp, Artificial Sequence
  Synthetic
ccgcttgagcttcctctcttt

SEQ ID NO: 9417 - DNA, 21 bp, Artificial Sequence
  Synthetic
atgaaacatcgaacctgccgc

SEQ ID NO: 9418 - DNA, 21 bp, Artificial Sequence
  Synthetic
cattgggcttggtccagccct

SEQ ID NO: 9419 - DNA, 21 bp, Artificial Sequence
  Synthetic
ggcattgggcttggtccagcc

SEQ ID NO: 9420 - DNA, 21 bp, Artificial Sequence
  Synthetic
gtgatacacacatgaaaggca

SEQ ID NO: 9421 - DNA, 21 bp, Artificial Sequence
  Synthetic
cttgtaagatgtgatacacac

SEQ ID NO: 9422 - DNA, 21 bp, Artificial Sequence
  Synthetic
acatcttacaagctggtgctg

SEQ ID NO: 9423 - DNA, 21 bp, Artificial Sequence
  Synthetic
gaccaccaggccttccgtcgc

SEQ ID NO: 9424 - DNA, 21 bp, Artificial Sequence
  Synthetic
agatagcgccagttcttgcga

SEQ ID NO: 9425 - DNA, 21 bp, Artificial Sequence
  Synthetic
gagatagcgccagttcttgcg

SEQ ID NO: 9426 - DNA, 21 bp, Artificial Sequence
  Synthetic
aagaactggcgctatctcatt

SEQ ID NO: 9427 - DNA, 21 bp, Artificial Sequence
  Synthetic
actggcgctatctcattctgg

SEQ ID NO: 9428 - DNA, 21 bp, Artificial Sequence
  Synthetic
tatctcattctggatgaggcg

SEQ ID NO: 9429 - DNA, 21 bp, Artificial Sequence
  Synthetic
atgttctgcgcctcatccaga

SEQ ID NO: 9430 - DNA, 21 bp, Artificial Sequence
  Synthetic
cttgatgttctgcgcctcatc

SEQ ID NO: 9431 - DNA, 21 bp, Artificial Sequence
  Synthetic
ctggatgaggcgcagaacatc

SEQ ID NO: 9432 - DNA, 21 bp, Artificial Sequence
  Synthetic
agtgactgccagcgctgtgac

SEQ ID NO: 9433 - DNA, 21 bp, Artificial Sequence
  Synthetic
gtcactcctcaacttcaacag

SEQ ID NO: 9434 - DNA, 21 bp, Artificial Sequence
  Synthetic
tcactcctcaacttcaacagg

SEQ ID NO: 9435 - DNA, 21 bp, Artificial Sequence
  Synthetic
catctccacctgttgaagttg

SEQ ID NO: 9436 - DNA, 21 bp, Artificial Sequence
  Synthetic
ccatctccacctgttgaagtt

SEQ ID NO: 9437 - DNA, 21 bp, Artificial Sequence
  Synthetic
ctccatctccacctgttgaag

SEQ ID NO: 9438 - DNA, 21 bp, Artificial Sequence
  Synthetic
ccccatctccatctccacctg

SEQ ID NO: 9439 - DNA, 21 bp, Artificial Sequence
  Synthetic
gccagagacgcctgctcctga

SEQ ID NO: 9440 - DNA, 21 bp, Artificial Sequence
  Synthetic
ccagagacgcctgctcctgac

SEQ ID NO: 9441 - DNA, 21 bp, Artificial Sequence
  Synthetic
ttctgcaagggagttcctgtc

SEQ ID NO: 9442 - DNA, 21 bp, Artificial Sequence
  Synthetic
ctcctgacaggaactcccttg

SEQ ID NO: 9443 - DNA, 21 bp, Artificial Sequence
  Synthetic
gttctgcaagggagttcctgt

SEQ ID NO: 9444 - DNA, 21 bp, Artificial Sequence
  Synthetic
actcccttgcagaacagcctc

SEQ ID NO: 9445 - DNA, 21 bp, Artificial Sequence
  Synthetic
ctccatgaggctgttctgcaa

SEQ ID NO: 9446 - DNA, 21 bp, Artificial Sequence
  Synthetic
ctcccttgcagaacagcctca

SEQ ID NO: 9447 - DNA, 21 bp, Artificial Sequence
  Synthetic
gctccatgaggctgttctgca

SEQ ID NO: 9448 - DNA, 21 bp, Artificial Sequence
  Synthetic
agctccatgaggctgttctgc

SEQ ID NO: 9449 - DNA, 21 bp, Artificial Sequence
  Synthetic
tgcatcaaggaccacagctcc

SEQ ID NO: 9450 - DNA, 21 bp, Artificial Sequence
  Synthetic
tggggcatcaaaaagtgcatc

SEQ ID NO: 9451 - DNA, 21 bp, Artificial Sequence
  Synthetic
tcgcgatgagactggaagaca

SEQ ID NO: 9452 - DNA, 21 bp, Artificial Sequence
  Synthetic
ctcgcgatgagactggaagac

SEQ ID NO: 9453 - DNA, 21 bp, Artificial Sequence
  Synthetic
cccatgtcttccagtctcatc

SEQ ID NO: 9454 - DNA, 21 bp, Artificial Sequence
  Synthetic
tccttgaactcgcgatgagac

SEQ ID NO: 9455 - DNA, 21 bp, Artificial Sequence
  Synthetic
ttccagtctcatcgcgagttc

SEQ ID NO: 9456 - DNA, 21 bp, Artificial Sequence
  Synthetic
ctccttgaactcgcgatgaga

SEQ ID NO: 9457 - DNA, 21 bp, Artificial Sequence
  Synthetic
tccagtctcatcgcgagttca

SEQ ID NO: 9458 - DNA, 21 bp, Artificial Sequence
  Synthetic
gaaccactccttgaactcgcg

SEQ ID NO: 9459 - DNA, 21 bp, Artificial Sequence
  Synthetic
aggggattagagaaccactcc

SEQ ID NO: 9460 - DNA, 21 bp, Artificial Sequence
  Synthetic
atcatgccagttaggggatta

SEQ ID NO: 9461 - DNA, 21 bp, Artificial Sequence
  Synthetic
caatcatgccagttaggggat

SEQ ID NO: 9462 - DNA, 21 bp, Artificial Sequence
  Synthetic
ctaatcccctaactggcatga

SEQ ID NO: 9463 - DNA, 21 bp, Artificial Sequence
  Synthetic
aatcccctaactggcatgatt

SEQ ID NO: 9464 - DNA, 21 bp, Artificial Sequence
  Synthetic
tgccctcaatcatgccagtta

SEQ ID NO: 9465 - DNA, 21 bp, Artificial Sequence
  Synthetic
ctgccctcaatcatgccagtt

SEQ ID NO: 9466 - DNA, 21 bp, Artificial Sequence
  Synthetic
gctgccctcaatcatgccagt

SEQ ID NO: 9467 - DNA, 21 bp, Artificial Sequence
  Synthetic
ctggcatgattgagggcagcc

SEQ ID NO: 9468 - DNA, 21 bp, Artificial Sequence
  Synthetic
ttgagggcagccaagagtata

SEQ ID NO: 9469 - DNA, 21 bp, Artificial Sequence
  Synthetic
tagtcaaacgcctccacaagg

SEQ ID NO: 9470 - DNA, 21 bp, Artificial Sequence
  Synthetic
actgttgcaggccctaccttg

SEQ ID NO: 9471 - DNA, 21 bp, Artificial Sequence
  Synthetic
aactgttgcaggccctacctt

SEQ ID NO: 9472 - DNA, 21 bp, Artificial Sequence
  Synthetic
tgcgccgagttaaggtggatg

SEQ ID NO: 9473 - DNA, 21 bp, Artificial Sequence
  Synthetic
cgccgagttaaggtggatgtt

SEQ ID NO: 9474 - DNA, 21 bp, Artificial Sequence
  Synthetic
agaagcagatgcccaaaaagt

SEQ ID NO: 9475 - DNA, 21 bp, Artificial Sequence
  Synthetic
cggataacatgctcgtacttt

SEQ ID NO: 9476 - DNA, 21 bp, Artificial Sequence
  Synthetic
ttgacgcttggagagcctgca

SEQ ID NO: 9477 - DNA, 21 bp, Artificial Sequence
  Synthetic
tagagacagcgttgacgcttg

SEQ ID NO: 9478 - DNA, 21 bp, Artificial Sequence
  Synthetic
catagagacagcgttgacgct

SEQ ID NO: 9479 - DNA, 21 bp, Artificial Sequence
  Synthetic
tcatagagacagcgttgacgc

SEQ ID NO: 9480 - DNA, 21 bp, Artificial Sequence
  Synthetic
gtctgtgccatgaagtcatca

SEQ ID NO: 9481 - DNA, 21 bp, Artificial Sequence
  Synthetic
acttcatggcacagaccacgt

SEQ ID NO: 9482 - DNA, 21 bp, Artificial Sequence
  Synthetic
ctcccttacgtggtctgtgcc

SEQ ID NO: 9483 - DNA, 21 bp, Artificial Sequence
  Synthetic
tttcctctttccccagaacta

SEQ ID NO: 9484 - DNA, 21 bp, Artificial Sequence
  Synthetic
ggctagtgtctccttagttct

SEQ ID NO: 9485 - DNA, 21 bp, Artificial Sequence
  Synthetic
tggctagtgtctccttagttc

SEQ ID NO: 9486 - DNA, 21 bp, Artificial Sequence
  Synthetic
gtggctagtgtctccttagtt

SEQ ID NO: 9487 - DNA, 21 bp, Artificial Sequence
  Synthetic
acactagccacaggccatttc

SEQ ID NO: 9488 - DNA, 21 bp, Artificial Sequence
  Synthetic
atcaaaatgttgatgacgctc

SEQ ID NO: 9489 - DNA, 21 bp, Artificial Sequence
  Synthetic
ccggtcgagggtcgaacagat

SEQ ID NO: 9490 - DNA, 21 bp, Artificial Sequence
  Synthetic
ggaaaagattgaaggactcaa

SEQ ID NO: 9491 - DNA, 21 bp, Artificial Sequence
  Synthetic
acagagcaccaggtatttcac

SEQ ID NO: 9492 - DNA, 21 bp, Artificial Sequence
  Synthetic
gtgctctgtggcatatttatg

SEQ ID NO: 9493 - DNA, 21 bp, Artificial Sequence
  Synthetic
tgctctgtggcatatttatgc

SEQ ID NO: 9494 - DNA, 21 bp, Artificial Sequence
  Synthetic
gctctgtggcatatttatgct

SEQ ID NO: 9495 - DNA, 21 bp, Artificial Sequence
  Synthetic
tttcccagcataaatatgcca

SEQ ID NO: 9496 - DNA, 21 bp, Artificial Sequence
  Synthetic
tgggaaagatgttgacaagat

SEQ ID NO: 9497 - DNA, 21 bp, Artificial Sequence
  Synthetic
gggaaagatgttgacaagata

SEQ ID NO: 9498 - DNA, 21 bp, Artificial Sequence
  Synthetic
ggaaagatgttgacaagataa

SEQ ID NO: 9499 - DNA, 21 bp, Artificial Sequence
  Synthetic
ttgcaaactaacttatacctt

SEQ ID NO: 9500 - DNA, 21 bp, Artificial Sequence
  Synthetic
aattcatatttcagatttcaa

SEQ ID NO: 9501 - DNA, 21 bp, Artificial Sequence
  Synthetic
agatttcaaaagaacaaggcc

SEQ ID NO: 9502 - DNA, 21 bp, Artificial Sequence
  Synthetic
gaacttcaaggccttgttctt

SEQ ID NO: 9503 - DNA, 21 bp, Artificial Sequence
  Synthetic
aacaaggccttgaagttctac

SEQ ID NO: 9504 - DNA, 21 bp, Artificial Sequence
  Synthetic
acgtattggatcatgttctgg

SEQ ID NO: 9505 - DNA, 21 bp, Artificial Sequence
  Synthetic
cataccaactttggtcacgta

SEQ ID NO: 9506 - DNA, 21 bp, Artificial Sequence
  Synthetic
atacgtgaccaaagttggtat

SEQ ID NO: 9507 - DNA, 21 bp, Artificial Sequence
  Synthetic
aaaagctccgtcaaaggctgc

SEQ ID NO: 9508 - DNA, 21 bp, Artificial Sequence
  Synthetic
agctccgtcaaaggctgcttg

SEQ ID NO: 9509 - DNA, 21 bp, Artificial Sequence
  Synthetic
tattcttcaagcagcctttga

SEQ ID NO: 9510 - DNA, 21 bp, Artificial Sequence
  Synthetic
atattcttcaagcagcctttg

SEQ ID NO: 9511 - DNA, 21 bp, Artificial Sequence
  Synthetic
gtcaaaggctgcttgaagaat

SEQ ID NO: 9512 - DNA, 21 bp, Artificial Sequence
  Synthetic
tcaaaggctgcttgaagaata

SEQ ID NO: 9513 - DNA, 21 bp, Artificial Sequence
  Synthetic
gctgcttgaagaatatggagt

SEQ ID NO: 9514 - DNA, 21 bp, Artificial Sequence
  Synthetic
agcatcaccaaggaactgaat

SEQ ID NO: 9515 - DNA, 21 bp, Artificial Sequence
  Synthetic
aacaatagcatcaccaaggaa

SEQ ID NO: 9516 - DNA, 21 bp, Artificial Sequence
  Synthetic
ggcaaaacaatagcatcacca

SEQ ID NO: 9517 - DNA, 21 bp, Artificial Sequence
  Synthetic
tggcaaaacaatagcatcacc

SEQ ID NO: 9518 - DNA, 21 bp, Artificial Sequence
  Synthetic
aaataagtttgtatatacctg

SEQ ID NO: 9519 - DNA, 21 bp, Artificial Sequence
  Synthetic
ctgaatacagctgtgaaaatt

SEQ ID NO: 9520 - DNA, 21 bp, Artificial Sequence
  Synthetic
ttcagttacctgaatacagct

SEQ ID NO: 9521 - DNA, 21 bp, Artificial Sequence
  Synthetic
ttcacagctgtattcaggtaa

SEQ ID NO: 9522 - DNA, 21 bp, Artificial Sequence
  Synthetic
agacacaaaatcttcagttac

SEQ ID NO: 9523 - DNA, 21 bp, Artificial Sequence
  Synthetic
gggggccggagcgcgccgacg

SEQ ID NO: 9524 - DNA, 21 bp, Artificial Sequence
  Synthetic
ccgaacccgctgccgccgctg

SEQ ID NO: 9525 - DNA, 21 bp, Artificial Sequence
  Synthetic
acaggcccggcagcggcggca

SEQ ID NO: 9526 - DNA, 21 bp, Artificial Sequence
  Synthetic
ccgccgctgccgggcctgtgt

SEQ ID NO: 9527 - DNA, 21 bp, Artificial Sequence
  Synthetic
gctgccgggcctgtgtgcgaa

SEQ ID NO: 9528 - DNA, 21 bp, Artificial Sequence
  Synthetic
gggcctgtgtgcgaactgagt

SEQ ID NO: 9529 - DNA, 21 bp, Artificial Sequence
  Synthetic
ggcctgtgtgcgaactgagtg

SEQ ID NO: 9530 - DNA, 21 bp, Artificial Sequence
  Synthetic
gcctgtgtgcgaactgagtgc

SEQ ID NO: 9531 - DNA, 21 bp, Artificial Sequence
  Synthetic
gtgcggggattgccacttctg

SEQ ID NO: 9532 - DNA, 21 bp, Artificial Sequence
  Synthetic
gattgccacttctgccgagac

SEQ ID NO: 9533 - DNA, 21 bp, Artificial Sequence
  Synthetic
tgccacttctgccgagacatg

SEQ ID NO: 9534 - DNA, 21 bp, Artificial Sequence
  Synthetic
ccgaacttcttcatgtctcgg

SEQ ID NO: 9535 - DNA, 21 bp, Artificial Sequence
  Synthetic
tctgccgagacatgaagaagt

SEQ ID NO: 9536 - DNA, 21 bp, Artificial Sequence
  Synthetic
ctgccgagacatgaagaagtt

SEQ ID NO: 9537 - DNA, 21 bp, Artificial Sequence
  Synthetic
tgccgagacatgaagaagttc

SEQ ID NO: 9538 - DNA, 21 bp, Artificial Sequence
  Synthetic
gccgagacatgaagaagttcg

SEQ ID NO: 9539 - DNA, 21 bp, Artificial Sequence
  Synthetic
acatgaagaagttcggggggc

SEQ ID NO: 9540 - DNA, 21 bp, Artificial Sequence
  Synthetic
aagttcggggggcccgggcgc

SEQ ID NO: 9541 - DNA, 21 bp, Artificial Sequence
  Synthetic
tgcttcatgcgcccgggcccc

SEQ ID NO: 9542 - DNA, 21 bp, Artificial Sequence
  Synthetic
aggcacgactgcttcatgcgc

SEQ ID NO: 9543 - DNA, 21 bp, Artificial Sequence
  Synthetic
gaactcacggcagtgcactgc

SEQ ID NO: 9544 - DNA, 21 bp, Artificial Sequence
  Synthetic
agaactcacggcagtgcactg

SEQ ID NO: 9545 - DNA, 21 bp, Artificial Sequence
  Synthetic
cgaactagcaatggacgtggc

SEQ ID NO: 9546 - DNA, 21 bp, Artificial Sequence
  Synthetic
ggctggggtgtaaagaccctt

SEQ ID NO: 9547 - DNA, 21 bp, Artificial Sequence
  Synthetic
aaagacccttgtgaagattaa

SEQ ID NO: 9548 - DNA, 21 bp, Artificial Sequence
  Synthetic
acccttgtgaagattaaaaga

SEQ ID NO: 9549 - DNA, 21 bp, Artificial Sequence
  Synthetic
tttctgtttaggtaatcacaa

SEQ ID NO: 9550 - DNA, 21 bp, Artificial Sequence
  Synthetic
ctgtttaggtaatcacaagtg

SEQ ID NO: 9551 - DNA, 21 bp, Artificial Sequence
  Synthetic
aggtaatcacaagtgaagaag

SEQ ID NO: 9552 - DNA, 21 bp, Artificial Sequence
  Synthetic
cacaagtgaagaagctgaaag

SEQ ID NO: 9553 - DNA, 21 bp, Artificial Sequence
  Synthetic
caagtgaagaagctgaaagac

SEQ ID NO: 9554 - DNA, 21 bp, Artificial Sequence
  Synthetic
cgaggacagttctatgacaac

SEQ ID NO: 9555 - DNA, 21 bp, Artificial Sequence
  Synthetic
gaggacagttctatgacaaca

SEQ ID NO: 9556 - DNA, 21 bp, Artificial Sequence
  Synthetic
aggacagttctatgacaacaa

SEQ ID NO: 9557 - DNA, 21 bp, Artificial Sequence
  Synthetic
tacgtgattcccttgttgtca

SEQ ID NO: 9558 - DNA, 21 bp, Artificial Sequence
  Synthetic
ggaatcacgtatctctttgat

SEQ ID NO: 9559 - DNA, 21 bp, Artificial Sequence
  Synthetic
cgtatctctttgatctggact

SEQ ID NO: 9560 - DNA, 21 bp, Artificial Sequence
  Synthetic
tcagactcatagtccagatca

SEQ ID NO: 9561 - DNA, 21 bp, Artificial Sequence
  Synthetic
ttgatctggactatgagtctg

SEQ ID NO: 9562 - DNA, 21 bp, Artificial Sequence
  Synthetic
tatgagtctgatgaattcaca

SEQ ID NO: 9563 - DNA, 21 bp, Artificial Sequence
  Synthetic
ccgtatcgagccgcatccact

SEQ ID NO: 9564 - DNA, 21 bp, Artificial Sequence
  Synthetic
aaaatgagacacattgccgta

SEQ ID NO: 9565 - DNA, 21 bp, Artificial Sequence
  Synthetic
tcttacgctgtgattcacaaa

SEQ ID NO: 9566 - DNA, 21 bp, Artificial Sequence
  Synthetic
aaacattgaacacctgaagat

SEQ ID NO: 9567 - DNA, 21 bp, Artificial Sequence
  Synthetic
atcaatgaaaacattgaacac

SEQ ID NO: 9568 - DNA, 21 bp, Artificial Sequence
  Synthetic
tcgaggttatcaatgaaaaca

SEQ ID NO: 9569 - DNA, 21 bp, Artificial Sequence
  Synthetic
agacgagtatcgaggttatca

SEQ ID NO: 9570 - DNA, 21 bp, Artificial Sequence
  Synthetic
taacctcgatactcgtcttcc

SEQ ID NO: 9571 - DNA, 21 bp, Artificial Sequence
  Synthetic
gctattcggggaagacgagta

SEQ ID NO: 9572 - DNA, 21 bp, Artificial Sequence
  Synthetic
aaacaatgctattcggggaag

SEQ ID NO: 9573 - DNA, 21 bp, Artificial Sequence
  Synthetic
tgtggaaaacaatgctattcg

SEQ ID NO: 9574 - DNA, 21 bp, Artificial Sequence
  Synthetic
ttgtggaaaacaatgctattc

SEQ ID NO: 9575 - DNA, 21 bp, Artificial Sequence
  Synthetic
cttgtggaaaacaatgctatt

SEQ ID NO: 9576 - DNA, 21 bp, Artificial Sequence
  Synthetic
tcttgtggaaaacaatgctat

SEQ ID NO: 9577 - DNA, 21 bp, Artificial Sequence
  Synthetic
tttccacaagaaccataaatg

SEQ ID NO: 9578 - DNA, 21 bp, Artificial Sequence
  Synthetic
ctccagcatttatggttcttg

SEQ ID NO: 9579 - DNA, 21 bp, Artificial Sequence
  Synthetic
ttccacaagaaccataaatgc

SEQ ID NO: 9580 - DNA, 21 bp, Artificial Sequence
  Synthetic
tctccagcatttatggttctt

SEQ ID NO: 9581 - DNA, 21 bp, Artificial Sequence
  Synthetic
ccacaagaaccataaatgctg

SEQ ID NO: 9582 - DNA, 21 bp, Artificial Sequence
  Synthetic
caagaaccataaatgctggag

SEQ ID NO: 9583 - DNA, 21 bp, Artificial Sequence
  Synthetic
aggaatctaaacaattatgag

SEQ ID NO: 9584 - DNA, 21 bp, Artificial Sequence
  Synthetic
ggaatctaaacaattatgagg

SEQ ID NO: 9585 - DNA, 21 bp, Artificial Sequence
  Synthetic
tatggaatattatcttgtaaa

SEQ ID NO: 9586 - DNA, 21 bp, Artificial Sequence
  Synthetic
atggaatattatcttgtaaaa

SEQ ID NO: 9587 - DNA, 21 bp, Artificial Sequence
  Synthetic
aatattatcttgtaaaatgga

SEQ ID NO: 9588 - DNA, 21 bp, Artificial Sequence
  Synthetic
atggccagattctacaaatac

SEQ ID NO: 9589 - DNA, 21 bp, Artificial Sequence
  Synthetic
tggccagattctacaaatact

SEQ ID NO: 9590 - DNA, 21 bp, Artificial Sequence
  Synthetic
ggccagattctacaaatactt

SEQ ID NO: 9591 - DNA, 21 bp, Artificial Sequence
  Synthetic
gcaaaggttcccaagtatttg

SEQ ID NO: 9592 - DNA, 21 bp, Artificial Sequence
  Synthetic
acttgggaacctttgcaaaat

SEQ ID NO: 9593 - DNA, 21 bp, Artificial Sequence
  Synthetic
tagagaattgctgaagcagta

SEQ ID NO: 9594 - DNA, 21 bp, Artificial Sequence
  Synthetic
atgcttgtcattagagaattg

SEQ ID NO: 9595 - DNA, 21 bp, Artificial Sequence
  Synthetic
caagatgaactcaacagaaga

SEQ ID NO: 9596 - DNA, 21 bp, Artificial Sequence
  Synthetic
tcaacagaagaaagaatcata

SEQ ID NO: 9597 - DNA, 21 bp, Artificial Sequence
  Synthetic
caacagaagaaagaatcataa

SEQ ID NO: 9598 - DNA, 21 bp, Artificial Sequence
  Synthetic
atcataaaggaatgatatttg

SEQ ID NO: 9599 - DNA, 21 bp, Artificial Sequence
  Synthetic
ttgttgaaaatactgttgatt

SEQ ID NO: 9600 - DNA, 21 bp, Artificial Sequence
  Synthetic
gttgaaaatactgttgattta

SEQ ID NO: 9601 - DNA, 21 bp, Artificial Sequence
  Synthetic
taatgtaatagaagtctgaag

SEQ ID NO: 9602 - DNA, 21 bp, Artificial Sequence
  Synthetic
cttcagacttctattacatta

SEQ ID NO: 9603 - DNA, 21 bp, Artificial Sequence
  Synthetic
attcgttaatgtaatagaagt

SEQ ID NO: 9604 - DNA, 21 bp, Artificial Sequence
  Synthetic
ggtttgtattcgttaatgtaa

SEQ ID NO: 9605 - DNA, 21 bp, Artificial Sequence
  Synthetic
ttaacgaatacaaaccagctc

SEQ ID NO: 9606 - DNA, 21 bp, Artificial Sequence
  Synthetic
taacgaatacaaaccagctcc

SEQ ID NO: 9607 - DNA, 21 bp, Artificial Sequence
  Synthetic
ttcattgactaagctgattcc

SEQ ID NO: 9608 - DNA, 21 bp, Artificial Sequence
  Synthetic
ctcctggaatcagcttagtca

SEQ ID NO: 9609 - DNA, 21 bp, Artificial Sequence
  Synthetic
cttcattgactaagctgattc

SEQ ID NO: 9610 - DNA, 21 bp, Artificial Sequence
  Synthetic
tttgaaagaagcaatctgtgc

SEQ ID NO: 9611 - DNA, 21 bp, Artificial Sequence
  Synthetic
tctttcaaaaatgttgtcctg

SEQ ID NO: 9612 - DNA, 21 bp, Artificial Sequence
  Synthetic
agcttcagcaggacaacattt

SEQ ID NO: 9613 - DNA, 21 bp, Artificial Sequence
  Synthetic
aaaaatgttgtcctgctgaag

SEQ ID NO: 9614 - DNA, 21 bp, Artificial Sequence
  Synthetic
aaaatgttgtcctgctgaagc

SEQ ID NO: 9615 - DNA, 21 bp, Artificial Sequence
  Synthetic
ccaaaagaactccagcttcag

SEQ ID NO: 9616 - DNA, 21 bp, Artificial Sequence
  Synthetic
ttcatagatgggagtaccagg

SEQ ID NO: 9617 - DNA, 21 bp, Artificial Sequence
  Synthetic
tcccacctggtactcccatct

SEQ ID NO: 9618 - DNA, 21 bp, Artificial Sequence
  Synthetic
attcatagatgggagtaccag

SEQ ID NO: 9619 - DNA, 21 bp, Artificial Sequence
  Synthetic
ccttgagttgcattcatagat

SEQ ID NO: 9620 - DNA, 21 bp, Artificial Sequence
  Synthetic
accttgagttgcattcataga

SEQ ID NO: 9621 - DNA, 21 bp, Artificial Sequence
  Synthetic
caccttgagttgcattcatag

SEQ ID NO: 9622 - DNA, 21 bp, Artificial Sequence
  Synthetic
aatcaggaccacactgacacc

SEQ ID NO: 9623 - DNA, 21 bp, Artificial Sequence
  Synthetic
gtgtggtcctgattgtcccaa

SEQ ID NO: 9624 - DNA, 21 bp, Artificial Sequence
  Synthetic
gtacaatcctattgggacaat

SEQ ID NO: 9625 - DNA, 21 bp, Artificial Sequence
  Synthetic
ccacatgccaaagtacaggta

SEQ ID NO: 9626 - DNA, 21 bp, Artificial Sequence
  Synthetic
tccacatgccaaagtacaggt

SEQ ID NO: 9627 - DNA, 21 bp, Artificial Sequence
  Synthetic
cccatacctgtactttggcat

SEQ ID NO: 9628 - DNA, 21 bp, Artificial Sequence
  Synthetic
ccatacctgtactttggcatg

SEQ ID NO: 9629 - DNA, 21 bp, Artificial Sequence
  Synthetic
agacatcctttgcttggcaca

SEQ ID NO: 9630 - DNA, 21 bp, Artificial Sequence
  Synthetic
atgtcttcagtgtgccaagca

SEQ ID NO: 9631 - DNA, 21 bp, Artificial Sequence
  Synthetic
tttgcttggcacactgaagac

SEQ ID NO: 9632 - DNA, 21 bp, Artificial Sequence
  Synthetic
aagtgcaggtagttgatgctg

SEQ ID NO: 9633 - DNA, 21 bp, Artificial Sequence
  Synthetic
acagcatcaactacctgcact

SEQ ID NO: 9634 - DNA, 21 bp, Artificial Sequence
  Synthetic
cagcatcaactacctgcactt

SEQ ID NO: 9635 - DNA, 21 bp, Artificial Sequence
  Synthetic
gcatcaactacctgcactttg

SEQ ID NO: 9636 - DNA, 21 bp, Artificial Sequence
  Synthetic
attgcaggtactctgttccac

SEQ ID NO: 9637 - DNA, 21 bp, Artificial Sequence
  Synthetic
ggtactctgttccacctgagc

SEQ ID NO: 9638 - DNA, 21 bp, Artificial Sequence
  Synthetic
gtactctgttccacctgagca

SEQ ID NO: 9639 - DNA, 21 bp, Artificial Sequence
  Synthetic
gctttccatgctcaggtggaa

SEQ ID NO: 9640 - DNA, 21 bp, Artificial Sequence
  Synthetic
caaccgctttccatgctcagg

SEQ ID NO: 9641 - DNA, 21 bp, Artificial Sequence
  Synthetic
ccaaccgctttccatgctcag

SEQ ID NO: 9642 - DNA, 21 bp, Artificial Sequence
  Synthetic
ccacctgagcatggaaagcgg

SEQ ID NO: 9643 - DNA, 21 bp, Artificial Sequence
  Synthetic
cacctgagcatggaaagcggt

SEQ ID NO: 9644 - DNA, 21 bp, Artificial Sequence
  Synthetic
agaagagacacagtacctttg

SEQ ID NO: 9645 - DNA, 21 bp, Artificial Sequence
  Synthetic
tcacagctttgagcacttcct

SEQ ID NO: 9646 - DNA, 21 bp, Artificial Sequence
  Synthetic
ctcacagctttgagcacttcc

SEQ ID NO: 9647 - DNA, 21 bp, Artificial Sequence
  Synthetic
tcccaggaagtgctcaaagct

SEQ ID NO: 9648 - DNA, 21 bp, Artificial Sequence
  Synthetic
cctcacagctttgagcacttc

SEQ ID NO: 9649 - DNA, 21 bp, Artificial Sequence
  Synthetic
gcggagaaatgcctcacagct

SEQ ID NO: 9650 - DNA, 21 bp, Artificial Sequence
  Synthetic
aatcagggtcatcttgtggcg

SEQ ID NO: 9651 - DNA, 21 bp, Artificial Sequence
  Synthetic
gaaatcagggtcatcttgtgg

SEQ ID NO: 9652 - DNA, 21 bp, Artificial Sequence
  Synthetic
ggaaatcagggtcatcttgtg

SEQ ID NO: 9653 - DNA, 21 bp, Artificial Sequence
  Synthetic
accctgatttccccgttaatg

SEQ ID NO: 9654 - DNA, 21 bp, Artificial Sequence
  Synthetic
cttcagcattaacggggaaat

SEQ ID NO: 9655 - DNA, 21 bp, Artificial Sequence
  Synthetic
ctgatttccccgttaatgctg

SEQ ID NO: 9656 - DNA, 21 bp, Artificial Sequence
  Synthetic
catatttcttcagcattaacg

SEQ ID NO: 9657 - DNA, 21 bp, Artificial Sequence
  Synthetic
ccatatttcttcagcattaac

SEQ ID NO: 9658 - DNA, 21 bp, Artificial Sequence
  Synthetic
tccatatttcttcagcattaa

SEQ ID NO: 9659 - DNA, 21 bp, Artificial Sequence
  Synthetic
ccccgttaatgctgaagaaat

SEQ ID NO: 9660 - DNA, 21 bp, Artificial Sequence
  Synthetic
ttccatatttcttcagcatta

SEQ ID NO: 9661 - DNA, 21 bp, Artificial Sequence
  Synthetic
cccgttaatgctgaagaaata

SEQ ID NO: 9662 - DNA, 21 bp, Artificial Sequence
  Synthetic
tatggaattccctttgacaag

SEQ ID NO: 9663 - DNA, 21 bp, Artificial Sequence
  Synthetic
acatcagctcaccttgtcaaa

SEQ ID NO: 9664 - DNA, 21 bp, Artificial Sequence
  Synthetic
aacatcagctcaccttgtcaa

SEQ ID NO: 9665 - DNA, 21 bp, Artificial Sequence
  Synthetic
taacatcagctcaccttgtca

SEQ ID NO: 9666 - DNA, 21 bp, Artificial Sequence
  Synthetic
ctgctcttgttcaggtgactc

SEQ ID NO: 9667 - DNA, 21 bp, Artificial Sequence
  Synthetic
ttgttcaggtgactcaagagg

SEQ ID NO: 9668 - DNA, 21 bp, Artificial Sequence
  Synthetic
tgttcaggtgactcaagaggc

SEQ ID NO: 9669 - DNA, 21 bp, Artificial Sequence
  Synthetic
ctctccagcctcttgagtcac

SEQ ID NO: 9670 - DNA, 21 bp, Artificial Sequence
  Synthetic
ttcaggtgactcaagaggctg

SEQ ID NO: 9671 - DNA, 21 bp, Artificial Sequence
  Synthetic
gatcataaactctccagcctc

SEQ ID NO: 9672 - DNA, 21 bp, Artificial Sequence
  Synthetic
aagccggcatggtaaccataa

SEQ ID NO: 9673 - DNA, 21 bp, Artificial Sequence
  Synthetic
aaagccggcatggtaaccata

SEQ ID NO: 9674 - DNA, 21 bp, Artificial Sequence
  Synthetic
taaagccggcatggtaaccat

SEQ ID NO: 9675 - DNA, 21 bp, Artificial Sequence
  Synthetic
ttatccaactatggaagagtt

SEQ ID NO: 9676 - DNA, 21 bp, Artificial Sequence
  Synthetic
agtttcggaactcttccatag

SEQ ID NO: 9677 - DNA, 21 bp, Artificial Sequence
  Synthetic
gcaatgtatctactgaagttt

SEQ ID NO: 9678 - DNA, 21 bp, Artificial Sequence
  Synthetic
ggcaatgtatctactgaagtt

SEQ ID NO: 9679 - DNA, 21 bp, Artificial Sequence
  Synthetic
tcaatgtaggcaatgtatcta

SEQ ID NO: 9680 - DNA, 21 bp, Artificial Sequence
  Synthetic
tcagtagatacattgcctaca

SEQ ID NO: 9681 - DNA, 21 bp, Artificial Sequence
  Synthetic
acattgcctacattgaatccc

SEQ ID NO: 9682 - DNA, 21 bp, Artificial Sequence
  Synthetic
cattgcctacattgaatccca

SEQ ID NO: 9683 - DNA, 21 bp, Artificial Sequence
  Synthetic
cattgaatcccaaggagctca

SEQ ID NO: 9684 - DNA, 21 bp, Artificial Sequence
  Synthetic
aatcccaaggagctcatcggg

SEQ ID NO: 9685 - DNA, 21 bp, Artificial Sequence
  Synthetic
agccctgcccgatgagctcct

SEQ ID NO: 9686 - DNA, 21 bp, Artificial Sequence
  Synthetic
tagccctgcccgatgagctcc

SEQ ID NO: 9687 - DNA, 21 bp, Artificial Sequence
  Synthetic
taccttggctagccctgcccg

SEQ ID NO: 9688 - DNA, 21 bp, Artificial Sequence
  Synthetic
tcgggcagggctagccaaggt

SEQ ID NO: 9689 - DNA, 21 bp, Artificial Sequence
  Synthetic
tacctgaagtctggaatgcca

SEQ ID NO: 9690 - DNA, 21 bp, Artificial Sequence
  Synthetic
ctgtgggcagtacctgaagtc

SEQ ID NO: 9691 - DNA, 21 bp, Artificial Sequence
  Synthetic
actgtgggcagtacctgaagt

SEQ ID NO: 9692 - DNA, 21 bp, Artificial Sequence
  Synthetic
ttcttctctccctgcagatcg

SEQ ID NO: 9693 - DNA, 21 bp, Artificial Sequence
  Synthetic
tcttctctccctgcagatcgc

SEQ ID NO: 9694 - DNA, 21 bp, Artificial Sequence
  Synthetic
cttctctccctgcagatcgcc

SEQ ID NO: 9695 - DNA, 21 bp, Artificial Sequence
  Synthetic
ttctctccctgcagatcgccg

SEQ ID NO: 9696 - DNA, 21 bp, Artificial Sequence
  Synthetic
gggtacgggagatcgtactgc

SEQ ID NO: 9697 - DNA, 21 bp, Artificial Sequence
  Synthetic
ggggtacgggagatcgtactg

SEQ ID NO: 9698 - DNA, 21 bp, Artificial Sequence
  Synthetic
agcagtacgatctcccgtacc

SEQ ID NO: 9699 - DNA, 21 bp, Artificial Sequence
  Synthetic
tcaaaaatggcctcggggtac

SEQ ID NO: 9700 - DNA, 21 bp, Artificial Sequence
  Synthetic
ttcaaaaatggcctcggggta

SEQ ID NO: 9701 - DNA, 21 bp, Artificial Sequence
  Synthetic
tcccgtaccccgaggccattt

SEQ ID NO: 9702 - DNA, 21 bp, Artificial Sequence
  Synthetic
gttcaaaaatggcctcggggt

SEQ ID NO: 9703 - DNA, 21 bp, Artificial Sequence
  Synthetic
atgggagttcaaaaatggcct

SEQ ID NO: 9704 - DNA, 21 bp, Artificial Sequence
  Synthetic
aatgggagttcaaaaatggcc

SEQ ID NO: 9705 - DNA, 21 bp, Artificial Sequence
  Synthetic
ttggggttgtgaaagaagaat

SEQ ID NO: 9706 - DNA, 21 bp, Artificial Sequence
  Synthetic
cttggggttgtgaaagaagaa

SEQ ID NO: 9707 - DNA, 21 bp, Artificial Sequence
  Synthetic
gcttggggttgtgaaagaaga

SEQ ID NO: 9708 - DNA, 21 bp, Artificial Sequence
  Synthetic
aagggcttggggttgtgaaag

SEQ ID NO: 9709 - DNA, 21 bp, Artificial Sequence
  Synthetic
aaaaagggcttggggttgtga

SEQ ID NO: 9710 - DNA, 21 bp, Artificial Sequence
  Synthetic
agtgaaaaagggcttggggtt

SEQ ID NO: 9711 - DNA, 21 bp, Artificial Sequence
  Synthetic
tggccaaagtgaaaaagggct

SEQ ID NO: 9712 - DNA, 21 bp, Artificial Sequence
  Synthetic
ttggccaaagtgaaaaagggc

SEQ ID NO: 9713 - DNA, 21 bp, Artificial Sequence
  Synthetic
agctccttggccaaagtgaaa

SEQ ID NO: 9714 - DNA, 21 bp, Artificial Sequence
  Synthetic
gggtacagctccttggccaaa

SEQ ID NO: 9715 - DNA, 21 bp, Artificial Sequence
  Synthetic
ctttggccaaggagctgtacc

SEQ ID NO: 9716 - DNA, 21 bp, Artificial Sequence
  Synthetic
tttggccaaggagctgtaccc

SEQ ID NO: 9717 - DNA, 21 bp, Artificial Sequence
  Synthetic
tgacgttgggcttgtagtttc

SEQ ID NO: 9718 - DNA, 21 bp, Artificial Sequence
  Synthetic
cggagaaagtagtgagtgacg

SEQ ID NO: 9719 - DNA, 21 bp, Artificial Sequence
  Synthetic
atgaagcagccggagaaagta

SEQ ID NO: 9720 - DNA, 21 bp, Artificial Sequence
  Synthetic
tttctccggctgcttcatgac

SEQ ID NO: 9721 - DNA, 21 bp, Artificial Sequence
  Synthetic
ccccttgtcatgaagcagccg

SEQ ID NO: 9722 - DNA, 21 bp, Artificial Sequence
  Synthetic
ttctccggctgcttcatgaca

SEQ ID NO: 9723 - DNA, 21 bp, Artificial Sequence
  Synthetic
agccccttgtcatgaagcagc

SEQ ID NO: 9724 - DNA, 21 bp, Artificial Sequence
  Synthetic
cagccccttgtcatgaagcag

SEQ ID NO: 9725 - DNA, 21 bp, Artificial Sequence
  Synthetic
ccgcagaagcagccccttgtc

SEQ ID NO: 9726 - DNA, 21 bp, Artificial Sequence
  Synthetic
ctgcttctgcggctctacacg

SEQ ID NO: 9727 - DNA, 21 bp, Artificial Sequence
  Synthetic
gatgttctgcgtgtagagccg

SEQ ID NO: 9728 - DNA, 21 bp, Artificial Sequence
  Synthetic
ggctctacacgcagaacatcg

SEQ ID NO: 9729 - DNA, 21 bp, Artificial Sequence
  Synthetic
agcccatcgatgttctgcgtg

SEQ ID NO: 9730 - DNA, 21 bp, Artificial Sequence
  Synthetic
acacgcagaacatcgatgggc

SEQ ID NO: 9731 - DNA, 21 bp, Artificial Sequence
  Synthetic
acgcagaacatcgatgggctt

SEQ ID NO: 9732 - DNA, 21 bp, Artificial Sequence
  Synthetic
gcagaacatcgatgggcttga

SEQ ID NO: 9733 - DNA, 21 bp, Artificial Sequence
  Synthetic
acatcgatgggcttgagagag

SEQ ID NO: 9734 - DNA, 21 bp, Artificial Sequence
  Synthetic
ttgaggcagggatgcccgaca

SEQ ID NO: 9735 - DNA, 21 bp, Artificial Sequence
  Synthetic
gcatccctgcctcaaagctgg

SEQ ID NO: 9736 - DNA, 21 bp, Artificial Sequence
  Synthetic
agcttcaaccagctttgaggc

SEQ ID NO: 9737 - DNA, 21 bp, Artificial Sequence
  Synthetic
gagcttcaaccagctttgagg

SEQ ID NO: 9738 - DNA, 21 bp, Artificial Sequence
  Synthetic
cctcaaagctggttgaagctc

SEQ ID NO: 9739 - DNA, 21 bp, Artificial Sequence
  Synthetic
ttccatgagcttcaaccagct

SEQ ID NO: 9740 - DNA, 21 bp, Artificial Sequence
  Synthetic
ctcaaagctggttgaagctca

SEQ ID NO: 9741 - DNA, 21 bp, Artificial Sequence
  Synthetic
ggtggcagaggcaaaggttcc

SEQ ID NO: 9742 - DNA, 21 bp, Artificial Sequence
  Synthetic
tttggcagactgtgcaggtgg

SEQ ID NO: 9743 - DNA, 21 bp, Artificial Sequence
  Synthetic
cagtctgccaaagacccttcc

SEQ ID NO: 9744 - DNA, 21 bp, Artificial Sequence
  Synthetic
agtctgccaaagacccttccc

SEQ ID NO: 9745 - DNA, 21 bp, Artificial Sequence
  Synthetic
gtctgccaaagacccttccca

SEQ ID NO: 9746 - DNA, 21 bp, Artificial Sequence
  Synthetic
tctgccaaagacccttcccag

SEQ ID NO: 9747 - DNA, 21 bp, Artificial Sequence
  Synthetic
tgccaaagacccttcccaggg

SEQ ID NO: 9748 - DNA, 21 bp, Artificial Sequence
  Synthetic
acccttcccaggggaggacat

SEQ ID NO: 9749 - DNA, 21 bp, Artificial Sequence
  Synthetic
acccgaatgtcctcccctggg

SEQ ID NO: 9750 - DNA, 21 bp, Artificial Sequence
  Synthetic
ctcacccgaatgtcctcccct

SEQ ID NO: 9751 - DNA, 21 bp, Artificial Sequence
  Synthetic
ttcccaggggaggacattcgg

SEQ ID NO: 9752 - DNA, 21 bp, Artificial Sequence
  Synthetic
actcacccgaatgtcctcccc

SEQ ID NO: 9753 - DNA, 21 bp, Artificial Sequence
  Synthetic
aactcacccgaatgtcctccc

SEQ ID NO: 9754 - DNA, 21 bp, Artificial Sequence
  Synthetic
ctgtctgccatcacgtcagcc

SEQ ID NO: 9755 - DNA, 21 bp, Artificial Sequence
  Synthetic
cctgtctgccatcacgtcagc

SEQ ID NO: 9756 - DNA, 21 bp, Artificial Sequence
  Synthetic
ccaggctgacgtgatggcaga

SEQ ID NO: 9757 - DNA, 21 bp, Artificial Sequence
  Synthetic
gccggtgcagaccgggcagcg

SEQ ID NO: 9758 - DNA, 21 bp, Artificial Sequence
  Synthetic
cgccggtgcagaccgggcagc

SEQ ID NO: 9759 - DNA, 21 bp, Artificial Sequence
  Synthetic
acgccggtgcagaccgggcag

SEQ ID NO: 9760 - DNA, 21 bp, Artificial Sequence
  Synthetic
aacgccggtgcagaccgggca

SEQ ID NO: 9761 - DNA, 21 bp, Artificial Sequence
  Synthetic
tgcccggtctgcaccggcgtt

SEQ ID NO: 9762 - DNA, 21 bp, Artificial Sequence
  Synthetic
gcttcacaacgccggtgcaga

SEQ ID NO: 9763 - DNA, 21 bp, Artificial Sequence
  Synthetic
tgaagcccgacattgtgttct

SEQ ID NO: 9764 - DNA, 21 bp, Artificial Sequence
  Synthetic
gaagcccgacattgtgttctt

SEQ ID NO: 9765 - DNA, 21 bp, Artificial Sequence
  Synthetic
aagcccgacattgtgttcttt

SEQ ID NO: 9766 - DNA, 21 bp, Artificial Sequence
  Synthetic
agcccgacattgtgttctttg

SEQ ID NO: 9767 - DNA, 21 bp, Artificial Sequence
  Synthetic
ggctccccaaagaacacaatg

SEQ ID NO: 9768 - DNA, 21 bp, Artificial Sequence
  Synthetic
ctctggggcagcggctcccca

SEQ ID NO: 9769 - DNA, 21 bp, Artificial Sequence
  Synthetic
ttctttggggagccgctgccc

SEQ ID NO: 9770 - DNA, 21 bp, Artificial Sequence
  Synthetic
accacatgcagcaagaacctc

SEQ ID NO: 9771 - DNA, 21 bp, Artificial Sequence
  Synthetic
aaccacatgcagcaagaacct

SEQ ID NO: 9772 - DNA, 21 bp, Artificial Sequence
  Synthetic
gggaaatcaaccacatgcagc

SEQ ID NO: 9773 - DNA, 21 bp, Artificial Sequence
  Synthetic
atgagcagcagatctgccatg

SEQ ID NO: 9774 - DNA, 21 bp, Artificial Sequence
  Synthetic
gatgagcagcagatctgccat

SEQ ID NO: 9775 - DNA, 21 bp, Artificial Sequence
  Synthetic
ggatgagcagcagatctgcca

SEQ ID NO: 9776 - DNA, 21 bp, Artificial Sequence
  Synthetic
aggatgagcagcagatctgcc

SEQ ID NO: 9777 - DNA, 21 bp, Artificial Sequence
  Synthetic
tggcagatctgctgctcatcc

SEQ ID NO: 9778 - DNA, 21 bp, Artificial Sequence
  Synthetic
ggcagatctgctgctcatcct

SEQ ID NO: 9779 - DNA, 21 bp, Artificial Sequence
  Synthetic
ctgctcatccttgggacctcc

SEQ ID NO: 9780 - DNA, 21 bp, Artificial Sequence
  Synthetic
tgctcatccttgggacctccc

SEQ ID NO: 9781 - DNA, 21 bp, Artificial Sequence
  Synthetic
acctccagggaggtcccaagg

SEQ ID NO: 9782 - DNA, 21 bp, Artificial Sequence
  Synthetic
acaaacctccagggaggtccc

SEQ ID NO: 9783 - DNA, 21 bp, Artificial Sequence
  Synthetic
aggcctgctgacaaacctcca

SEQ ID NO: 9784 - DNA, 21 bp, Artificial Sequence
  Synthetic
caggcctgctgacaaacctcc

SEQ ID NO: 9785 - DNA, 21 bp, Artificial Sequence
  Synthetic
acaggcctgctgacaaacctc

SEQ ID NO: 9786 - DNA, 21 bp, Artificial Sequence
  Synthetic
caagctggcaaaaggctccac

SEQ ID NO: 9787 - DNA, 21 bp, Artificial Sequence
  Synthetic
gagtcatctgtttggtgggag

SEQ ID NO: 9788 - DNA, 21 bp, Artificial Sequence
  Synthetic
agtcatctgtttggtgggagc

SEQ ID NO: 9789 - DNA, 21 bp, Artificial Sequence
  Synthetic
gggagaagggttacttacatg

SEQ ID NO: 9790 - DNA, 21 bp, Artificial Sequence
  Synthetic
aagtcggggatgcctgcggct

SEQ ID NO: 9791 - DNA, 21 bp, Artificial Sequence
  Synthetic
aaagtcggggatgcctgcggc

SEQ ID NO: 9792 - DNA, 21 bp, Artificial Sequence
  Synthetic
ggtggatggagagcgaaagtc

SEQ ID NO: 9793 - DNA, 21 bp, Artificial Sequence
  Synthetic
cggtggatggagagcgaaagt

SEQ ID NO: 9794 - DNA, 21 bp, Artificial Sequence
  Synthetic
ccggtggatggagagcgaaag

SEQ ID NO: 9795 - DNA, 21 bp, Artificial Sequence
  Synthetic
atagaggccggtggatggaga

SEQ ID NO: 9796 - DNA, 21 bp, Artificial Sequence
  Synthetic
tgtcatagaggccggtggatg

SEQ ID NO: 9797 - DNA, 21 bp, Artificial Sequence
  Synthetic
gttgtcatagaggccggtgga

SEQ ID NO: 9798 - DNA, 21 bp, Artificial Sequence
  Synthetic
ggttgtcatagaggccggtgg

SEQ ID NO: 9799 - DNA, 21 bp, Artificial Sequence
  Synthetic
tctaggttgtcatagaggccg

SEQ ID NO: 9800 - DNA, 21 bp, Artificial Sequence
  Synthetic
ccaccggcctctatgacaacc

SEQ ID NO: 9801 - DNA, 21 bp, Artificial Sequence
  Synthetic
accggcctctatgacaaccta

SEQ ID NO: 9802 - DNA, 21 bp, Artificial Sequence
  Synthetic
tggtacttctctaggttgtca

SEQ ID NO: 9803 - DNA, 21 bp, Artificial Sequence
  Synthetic
agaagtaccatcttccctacc

SEQ ID NO: 9804 - DNA, 21 bp, Artificial Sequence
  Synthetic
ctcaaagatggcctctgggta

SEQ ID NO: 9805 - DNA, 21 bp, Artificial Sequence
  Synthetic
ttccctacccagaggccatct

SEQ ID NO: 9806 - DNA, 21 bp, Artificial Sequence
  Synthetic
tctcaaagatggcctctgggt

SEQ ID NO: 9807 - DNA, 21 bp, Artificial Sequence
  Synthetic
atctcaaagatggcctctggg

SEQ ID NO: 9808 - DNA, 21 bp, Artificial Sequence
  Synthetic
agctgatctcaaagatggcct

SEQ ID NO: 9809 - DNA, 21 bp, Artificial Sequence
  Synthetic
ctgtctctcctacagaaacat

SEQ ID NO: 9810 - DNA, 21 bp, Artificial Sequence
  Synthetic
tgtctctcctacagaaacatc

SEQ ID NO: 9811 - DNA, 21 bp, Artificial Sequence
  Synthetic
tggcgagggcgaagaagggtt

SEQ ID NO: 9812 - DNA, 21 bp, Artificial Sequence
  Synthetic
gaacccttcttcgccctcgcc

SEQ ID NO: 9813 - DNA, 21 bp, Artificial Sequence
  Synthetic
aacccttcttcgccctcgcca

SEQ ID NO: 9814 - DNA, 21 bp, Artificial Sequence
  Synthetic
agttccttggcgagggcgaag

SEQ ID NO: 9815 - DNA, 21 bp, Artificial Sequence
  Synthetic
tagagttccttggcgagggcg

SEQ ID NO: 9816 - DNA, 21 bp, Artificial Sequence
  Synthetic
ggatagagttccttggcgagg

SEQ ID NO: 9817 - DNA, 21 bp, Artificial Sequence
  Synthetic
cccaggatagagttccttggc

SEQ ID NO: 9818 - DNA, 21 bp, Artificial Sequence
  Synthetic
ccctcgccaaggaactctatc

SEQ ID NO: 9819 - DNA, 21 bp, Artificial Sequence
  Synthetic
tgcccaggatagagttccttg

SEQ ID NO: 9820 - DNA, 21 bp, Artificial Sequence
  Synthetic
ctcaccttgaactgcccagga

SEQ ID NO: 9821 - DNA, 21 bp, Artificial Sequence
  Synthetic
ctctatcctgggcagttcaag

SEQ ID NO: 9822 - DNA, 21 bp, Artificial Sequence
  Synthetic
aagatctcaccttgaactgcc

SEQ ID NO: 9823 - DNA, 21 bp, Artificial Sequence
  Synthetic
tgtcactacttcatgcgcctg

SEQ ID NO: 9824 - DNA, 21 bp, Artificial Sequence
  Synthetic
cactacttcatgcgcctgctg

SEQ ID NO: 9825 - DNA, 21 bp, Artificial Sequence
  Synthetic
cccttgtccttcagcaggcgc

SEQ ID NO: 9826 - DNA, 21 bp, Artificial Sequence
  Synthetic
ttcatgcgcctgctgaaggac

SEQ ID NO: 9827 - DNA, 21 bp, Artificial Sequence
  Synthetic
tcatgcgcctgctgaaggaca

SEQ ID NO: 9828 - DNA, 21 bp, Artificial Sequence
  Synthetic
cctacctgcgtgtagcagcgc

SEQ ID NO: 9829 - DNA, 21 bp, Artificial Sequence
  Synthetic
gcctacctgcgtgtagcagcg

SEQ ID NO: 9830 - DNA, 21 bp, Artificial Sequence
  Synthetic
tccctctagaacatagatacc

SEQ ID NO: 9831 - DNA, 21 bp, Artificial Sequence
  Synthetic
ccctctagaacatagataccc

SEQ ID NO: 9832 - DNA, 21 bp, Artificial Sequence
  Synthetic
cgctccagggtatctatgttc

SEQ ID NO: 9833 - DNA, 21 bp, Artificial Sequence
  Synthetic
ctagaacatagataccctgga

SEQ ID NO: 9834 - DNA, 21 bp, Artificial Sequence
  Synthetic
tagataccctggagcgaatag

SEQ ID NO: 9835 - DNA, 21 bp, Artificial Sequence
  Synthetic
accctggagcgaatagccggg

SEQ ID NO: 9836 - DNA, 21 bp, Artificial Sequence
  Synthetic
ttccagcccggctattcgctc

SEQ ID NO: 9837 - DNA, 21 bp, Artificial Sequence
  Synthetic
ccctggagcgaatagccgggc

SEQ ID NO: 9838 - DNA, 21 bp, Artificial Sequence
  Synthetic
gagcgaatagccgggctggaa

SEQ ID NO: 9839 - DNA, 21 bp, Artificial Sequence
  Synthetic
agcgaatagccgggctggaac

SEQ ID NO: 9840 - DNA, 21 bp, Artificial Sequence
  Synthetic
cgaatagccgggctggaacag

SEQ ID NO: 9841 - DNA, 21 bp, Artificial Sequence
  Synthetic
gggctggaacaggaggacttg

SEQ ID NO: 9842 - DNA, 21 bp, Artificial Sequence
  Synthetic
ggctggaacaggaggacttgg

SEQ ID NO: 9843 - DNA, 21 bp, Artificial Sequence
  Synthetic
gcgctgacgcagtgtgatgtg

SEQ ID NO: 9844 - DNA, 21 bp, Artificial Sequence
  Synthetic
gcgtcagcgccagctgccggc

SEQ ID NO: 9845 - DNA, 21 bp, Artificial Sequence
  Synthetic
ccggcacgaatacccgctaag

SEQ ID NO: 9846 - DNA, 21 bp, Artificial Sequence
  Synthetic
cacgaatacccgctaagctgg

SEQ ID NO: 9847 - DNA, 21 bp, Artificial Sequence
  Synthetic
acccgctaagctggatgaaag

SEQ ID NO: 9848 - DNA, 21 bp, Artificial Sequence
  Synthetic
cctcacctttcatccagctta

SEQ ID NO: 9849 - DNA, 21 bp, Artificial Sequence
  Synthetic
catacccagagaagatcttct

SEQ ID NO: 9850 - DNA, 21 bp, Artificial Sequence
  Synthetic
tcacctcagagaagatcttct

SEQ ID NO: 9851 - DNA, 21 bp, Artificial Sequence
  Synthetic
tcacacttgggcgtcacctca

SEQ ID NO: 9852 - DNA, 21 bp, Artificial Sequence
  Synthetic
tctctgaggtgacgcccaagt

SEQ ID NO: 9853 - DNA, 21 bp, Artificial Sequence
  Synthetic
cttcacacttgggcgtcacct

SEQ ID NO: 9854 - DNA, 21 bp, Artificial Sequence
  Synthetic
acgcccaagtgtgaagactgt

SEQ ID NO: 9855 - DNA, 21 bp, Artificial Sequence
  Synthetic
aggctctgacagtcttcacac

SEQ ID NO: 9856 - DNA, 21 bp, Artificial Sequence
  Synthetic
tgtgaagactgtcagagcctg

SEQ ID NO: 9857 - DNA, 21 bp, Artificial Sequence
  Synthetic
gtcagagcctggtgaagcctg

SEQ ID NO: 9858 - DNA, 21 bp, Artificial Sequence
  Synthetic
tctcaccaaaaaagacgatat

SEQ ID NO: 9859 - DNA, 21 bp, Artificial Sequence
  Synthetic
atacaggagaagaaacgcgct

SEQ ID NO: 9860 - DNA, 21 bp, Artificial Sequence
  Synthetic
catacaggagaagaaacgcgc

SEQ ID NO: 9861 - DNA, 21 bp, Artificial Sequence
  Synthetic
gcatacaggagaagaaacgcg

SEQ ID NO: 9862 - DNA, 21 bp, Artificial Sequence
  Synthetic
cttactgactgcatacaggag

SEQ ID NO: 9863 - DNA, 21 bp, Artificial Sequence
  Synthetic
ccacttactgactgcatacag

SEQ ID NO: 9864 - DNA, 21 bp, Artificial Sequence
  Synthetic
ggccacttactgactgcatac

SEQ ID NO: 9865 - DNA, 21 bp, Artificial Sequence
  Synthetic
gggccacttactgactgcata

SEQ ID NO: 9866 - DNA, 21 bp, Artificial Sequence
  Synthetic
cgcccctccccgcaggacttc

SEQ ID NO: 9867 - DNA, 21 bp, Artificial Sequence
  Synthetic
tccccgcaggacttcctgaag

SEQ ID NO: 9868 - DNA, 21 bp, Artificial Sequence
  Synthetic
ggtccaccttcaggaagtcct

SEQ ID NO: 9869 - DNA, 21 bp, Artificial Sequence
  Synthetic
accaggaggaggtccaccttc

SEQ ID NO: 9870 - DNA, 21 bp, Artificial Sequence
  Synthetic
gaccaggaggaggtccacctt

SEQ ID NO: 9871 - DNA, 21 bp, Artificial Sequence
  Synthetic
aaggtggacctcctcctggtc

SEQ ID NO: 9872 - DNA, 21 bp, Artificial Sequence
  Synthetic
aaggaggtacccatgaccagg

SEQ ID NO: 9873 - DNA, 21 bp, Artificial Sequence
  Synthetic
caaggaggtacccatgaccag

SEQ ID NO: 9874 - DNA, 21 bp, Artificial Sequence
  Synthetic
tgcaaggaggtacccatgacc

SEQ ID NO: 9875 - DNA, 21 bp, Artificial Sequence
  Synthetic
ctgcaaggaggtacccatgac

SEQ ID NO: 9876 - DNA, 21 bp, Artificial Sequence
  Synthetic
aggcaaagggctgcacctgca

SEQ ID NO: 9877 - DNA, 21 bp, Artificial Sequence
  Synthetic
gaggcaaagggctgcacctgc

SEQ ID NO: 9878 - DNA, 21 bp, Artificial Sequence
  Synthetic
aaattatagttctaactggag

SEQ ID NO: 9879 - DNA, 21 bp, Artificial Sequence
  Synthetic
aattatagttctaactggagc

SEQ ID NO: 9880 - DNA, 21 bp, Artificial Sequence
  Synthetic
acctgaagtcaggtattccac

SEQ ID NO: 9881 - DNA, 21 bp, Artificial Sequence
  Synthetic
tggaatacctgacttcaggtc

SEQ ID NO: 9882 - DNA, 21 bp, Artificial Sequence
  Synthetic
ggaatacctgacttcaggtca

SEQ ID NO: 9883 - DNA, 21 bp, Artificial Sequence
  Synthetic
gcataaataccatcccttgac

SEQ ID NO: 9884 - DNA, 21 bp, Artificial Sequence
  Synthetic
atctgggaagtctacagcaag

SEQ ID NO: 9885 - DNA, 21 bp, Artificial Sequence
  Synthetic
gcttgaggatctggaagatct

SEQ ID NO: 9886 - DNA, 21 bp, Artificial Sequence
  Synthetic
cgcttgaggatctggaagatc

SEQ ID NO: 9887 - DNA, 21 bp, Artificial Sequence
  Synthetic
tcgcttgaggatctggaagat

SEQ ID NO: 9888 - DNA, 21 bp, Artificial Sequence
  Synthetic
atcaaacatcgcttgaggatc

SEQ ID NO: 9889 - DNA, 21 bp, Artificial Sequence
  Synthetic
tatcaaacatcgcttgaggat

SEQ ID NO: 9890 - DNA, 21 bp, Artificial Sequence
  Synthetic
atcctcaagcgatgtttgata

SEQ ID NO: 9891 - DNA, 21 bp, Artificial Sequence
  Synthetic
attcaatatcaaacatcgctt

SEQ ID NO: 9892 - DNA, 21 bp, Artificial Sequence
  Synthetic
atattcaatatcaaacatcgc

SEQ ID NO: 9893 - DNA, 21 bp, Artificial Sequence
  Synthetic
gatgtttgatattgaatattt

SEQ ID NO: 9894 - DNA, 21 bp, Artificial Sequence
  Synthetic
ttgcaaacttgaagaatggtc

SEQ ID NO: 9895 - DNA, 21 bp, Artificial Sequence
  Synthetic
catagtacctttgcaaacttg

SEQ ID NO: 9896 - DNA, 21 bp, Artificial Sequence
  Synthetic
gttcatagtacctttgcaaac

SEQ ID NO: 9897 - DNA, 21 bp, Artificial Sequence
  Synthetic
gcttgatacaggaaatatatc

SEQ ID NO: 9898 - DNA, 21 bp, Artificial Sequence
  Synthetic
agagagatggctggaattgtc

SEQ ID NO: 9899 - DNA, 21 bp, Artificial Sequence
  Synthetic
aatttgtgacagagagatggc

SEQ ID NO: 9900 - DNA, 21 bp, Artificial Sequence
  Synthetic
gaatttgtgacagagagatgg

SEQ ID NO: 9901 - DNA, 21 bp, Artificial Sequence
  Synthetic
caaggctatgaatttgtgaca

SEQ ID NO: 9902 - DNA, 21 bp, Artificial Sequence
  Synthetic
gacaaggctatgaatttgtga

SEQ ID NO: 9903 - DNA, 21 bp, Artificial Sequence
  Synthetic
aaattcatagccttgtcagat

SEQ ID NO: 9904 - DNA, 21 bp, Artificial Sequence
  Synthetic
aattcatagccttgtcagata

SEQ ID NO: 9905 - DNA, 21 bp, Artificial Sequence
  Synthetic
ccttccttatctgacaaggct

SEQ ID NO: 9906 - DNA, 21 bp, Artificial Sequence
  Synthetic
tcatagccttgtcagataagg

SEQ ID NO: 9907 - DNA, 21 bp, Artificial Sequence
  Synthetic
catagccttgtcagataagga

SEQ ID NO: 9908 - DNA, 21 bp, Artificial Sequence
  Synthetic
aaactacttcgcaactatacc

SEQ ID NO: 9909 - DNA, 21 bp, Artificial Sequence
  Synthetic
gtctatgttctgggtatagtt

SEQ ID NO: 9910 - DNA, 21 bp, Artificial Sequence
  Synthetic
tatacccagaacatagacacg

SEQ ID NO: 9911 - DNA, 21 bp, Artificial Sequence
  Synthetic
atacccagaacatagacacgc

SEQ ID NO: 9912 - DNA, 21 bp, Artificial Sequence
  Synthetic
ctgttccagcgtgtctatgtt

SEQ ID NO: 9913 - DNA, 21 bp, Artificial Sequence
  Synthetic
atagacacgctggaacaggtt

SEQ ID NO: 9914 - DNA, 21 bp, Artificial Sequence
  Synthetic
tagacacgctggaacaggttg

SEQ ID NO: 9915 - DNA, 21 bp, Artificial Sequence
  Synthetic
agacacgctggaacaggttgc

SEQ ID NO: 9916 - DNA, 21 bp, Artificial Sequence
  Synthetic
ggaacaggttgcgggaatcca

SEQ ID NO: 9917 - DNA, 21 bp, Artificial Sequence
  Synthetic
accatgacactgaattatcct

SEQ ID NO: 9918 - DNA, 21 bp, Artificial Sequence
  Synthetic
tgaagtttactaaccatgaca

SEQ ID NO: 9919 - DNA, 21 bp, Artificial Sequence
  Synthetic
tcaggcaagatgctgttgcaa

SEQ ID NO: 9920 - DNA, 21 bp, Artificial Sequence
  Synthetic
atcaggcaagatgctgttgca

SEQ ID NO: 9921 - DNA, 21 bp, Artificial Sequence
  Synthetic
tttgtaaatacaaagttgact

SEQ ID NO: 9922 - DNA, 21 bp, Artificial Sequence
  Synthetic
caaagttgactgtgaagctgt

SEQ ID NO: 9923 - DNA, 21 bp, Artificial Sequence
  Synthetic
aagttgactgtgaagctgtac

SEQ ID NO: 9924 - DNA, 21 bp, Artificial Sequence
  Synthetic
agttgactgtgaagctgtacg

SEQ ID NO: 9925 - DNA, 21 bp, Artificial Sequence
  Synthetic
agctgggcacctaggacatcg

SEQ ID NO: 9926 - DNA, 21 bp, Artificial Sequence
  Synthetic
cagctgggcacctaggacatc

SEQ ID NO: 9927 - DNA, 21 bp, Artificial Sequence
  Synthetic
atcagctgggcacctaggaca

SEQ ID NO: 9928 - DNA, 21 bp, Artificial Sequence
  Synthetic
gatgtcctaggtgcccagctg

SEQ ID NO: 9929 - DNA, 21 bp, Artificial Sequence
  Synthetic
gcggttcatcagctgggcacc

SEQ ID NO: 9930 - DNA, 21 bp, Artificial Sequence
  Synthetic
tgatagcaagcggttcatcag

SEQ ID NO: 9931 - DNA, 21 bp, Artificial Sequence
  Synthetic
gctgatgaaccgcttgctatc

SEQ ID NO: 9932 - DNA, 21 bp, Artificial Sequence
  Synthetic
aaccgcttgctatcatgaaac

SEQ ID NO: 9933 - DNA, 21 bp, Artificial Sequence
  Synthetic
aaatttaccagaacagtttca

SEQ ID NO: 9934 - DNA, 21 bp, Artificial Sequence
  Synthetic
ccagaacagtttcatagagcc

SEQ ID NO: 9935 - DNA, 21 bp, Artificial Sequence
  Synthetic
tttgtcatacttcatggctct

SEQ ID NO: 9936 - DNA, 21 bp, Artificial Sequence
  Synthetic
gagccatgaagtatgacaaag

SEQ ID NO: 9937 - DNA, 21 bp, Artificial Sequence
  Synthetic
aagttgacctcctcattgtta

SEQ ID NO: 9938 - DNA, 21 bp, Artificial Sequence
  Synthetic
agggaagacccaataacaatg

SEQ ID NO: 9939 - DNA, 21 bp, Artificial Sequence
  Synthetic
gagggaagacccaataacaat

SEQ ID NO: 9940 - DNA, 21 bp, Artificial Sequence
  Synthetic
ttgagggaagacccaataaca

SEQ ID NO: 9941 - DNA, 21 bp, Artificial Sequence
  Synthetic
gtgctactggtcttactttga

SEQ ID NO: 9942 - DNA, 21 bp, Artificial Sequence
  Synthetic
agtgctactggtcttactttg

SEQ ID NO: 9943 - DNA, 21 bp, Artificial Sequence
  Synthetic
tagtgctactggtcttacttt

SEQ ID NO: 9944 - DNA, 21 bp, Artificial Sequence
  Synthetic
attagtgctactggtcttact

SEQ ID NO: 9945 - DNA, 21 bp, Artificial Sequence
  Synthetic
gcccacctggagctgctgctt

SEQ ID NO: 9946 - DNA, 21 bp, Artificial Sequence
  Synthetic
ttccacaagcagcagctccag

SEQ ID NO: 9947 - DNA, 21 bp, Artificial Sequence
  Synthetic
cccacctggagctgctgcttg

SEQ ID NO: 9948 - DNA, 21 bp, Artificial Sequence
  Synthetic
tgtggaaaatttcaagtcgtg

SEQ ID NO: 9949 - DNA, 21 bp, Artificial Sequence
  Synthetic
gtggaaaatttcaagtcgtgg

SEQ ID NO: 9950 - DNA, 21 bp, Artificial Sequence
  Synthetic
acctggcggccccgccacgac

SEQ ID NO: 9951 - DNA, 21 bp, Artificial Sequence
  Synthetic
ccgccaggtcattggcccctt

SEQ ID NO: 9952 - DNA, 21 bp, Artificial Sequence
  Synthetic
cgccaggtcattggccccttc

SEQ ID NO: 9953 - DNA, 21 bp, Artificial Sequence
  Synthetic
tgatgcaggtgaacctccgga

SEQ ID NO: 9954 - DNA, 21 bp, Artificial Sequence
  Synthetic
atgatgcaggtgaacctccgg

SEQ ID NO: 9955 - DNA, 21 bp, Artificial Sequence
  Synthetic
ccgatgatgcaggtgaacctc

SEQ ID NO: 9956 - DNA, 21 bp, Artificial Sequence
  Synthetic
gccgatgatgcaggtgaacct

SEQ ID NO: 9957 - DNA, 21 bp, Artificial Sequence
  Synthetic
ccgttggggccgatgatgcag

SEQ ID NO: 9958 - DNA, 21 bp, Artificial Sequence
  Synthetic
ctgctcagttaccagagccgt

SEQ ID NO: 9959 - DNA, 21 bp, Artificial Sequence
  Synthetic
gctgctcagttaccagagccg

SEQ ID NO: 9960 - DNA, 21 bp, Artificial Sequence
  Synthetic
tccccaggaaaatctaatgta

SEQ ID NO: 9961 - DNA, 21 bp, Artificial Sequence
  Synthetic
gggagagaaaatagctaattt

SEQ ID NO: 9962 - DNA, 21 bp, Artificial Sequence
  Synthetic
gagaaaatagctaatttaaga

SEQ ID NO: 9963 - DNA, 21 bp, Artificial Sequence
  Synthetic
atttaagagtgaaaaatattc

SEQ ID NO: 9964 - DNA, 21 bp, Artificial Sequence
  Synthetic
aaaatattcaagaactcattc

SEQ ID NO: 9965 - DNA, 21 bp, Artificial Sequence
  Synthetic
aaatattcaagaactcattca

SEQ ID NO: 9966 - DNA, 21 bp, Artificial Sequence
  Synthetic
atgtgctccatgaatgagttc

SEQ ID NO: 9967 - DNA, 21 bp, Artificial Sequence
  Synthetic
aactcattcatggagcacata

SEQ ID NO: 9968 - DNA, 21 bp, Artificial Sequence
  Synthetic
actcattcatggagcacatat

SEQ ID NO: 9969 - DNA, 21 bp, Artificial Sequence
  Synthetic
tttccaatatgtgctccatga

SEQ ID NO: 9970 - DNA, 21 bp, Artificial Sequence
  Synthetic
gcaagtgtaaaaattatatat

SEQ ID NO: 9971 - DNA, 21 bp, Artificial Sequence
  Synthetic
caagtgtaaaaattatatatg

SEQ ID NO: 9972 - DNA, 21 bp, Artificial Sequence
  Synthetic
agtgtaaaaattatatatgtg

SEQ ID NO: 9973 - DNA, 21 bp, Artificial Sequence
  Synthetic
gtgtaaaaattatatatgtgg

SEQ ID NO: 9974 - DNA, 21 bp, Artificial Sequence
  Synthetic
ttatatatgtggaggaaagtg

SEQ ID NO: 9975 - DNA, 21 bp, Artificial Sequence
  Synthetic
tatatgtggaggaaagtggcg

SEQ ID NO: 9976 - DNA, 21 bp, Artificial Sequence
  Synthetic
tatgtggaggaaagtggcgaa

SEQ ID NO: 9977 - DNA, 21 bp, Artificial Sequence
  Synthetic
tggcgaagagaaaacatttgc

SEQ ID NO: 9978 - DNA, 21 bp, Artificial Sequence
  Synthetic
gaaaacatttgcaaggattat

SEQ ID NO: 9979 - DNA, 21 bp, Artificial Sequence
  Synthetic
gattatcattaaagcgaaatt

SEQ ID NO: 9980 - DNA, 21 bp, Artificial Sequence
  Synthetic
tttcgctttaatgataatctt

SEQ ID NO: 9981 - DNA, 21 bp, Artificial Sequence
  Synthetic
actcacaagattatcattaaa

SEQ ID NO: 9982 - DNA, 21 bp, Artificial Sequence
  Synthetic
tgagtcgttctgtttacattg

SEQ ID NO: 9983 - DNA, 21 bp, Artificial Sequence
  Synthetic
cgttctgtttacattgcagag

SEQ ID NO: 9984 - DNA, 21 bp, Artificial Sequence
  Synthetic
gttctgtttacattgcagagt

SEQ ID NO: 9985 - DNA, 21 bp, Artificial Sequence
  Synthetic
tttccaactctgcaatgtaaa

SEQ ID NO: 9986 - DNA, 21 bp, Artificial Sequence
  Synthetic
ggaactgtagagtcaatttca

SEQ ID NO: 9987 - DNA, 21 bp, Artificial Sequence
  Synthetic
actgtagagtcaatttcagtg

SEQ ID NO: 9988 - DNA, 21 bp, Artificial Sequence
  Synthetic
caatttcagtgaagaaaccca

SEQ ID NO: 9989 - DNA, 21 bp, Artificial Sequence
  Synthetic
tcctttctttgggtttcttca

SEQ ID NO: 9990 - DNA, 21 bp, Artificial Sequence
  Synthetic
ttcagtgaagaaacccaaaga

SEQ ID NO: 9991 - DNA, 21 bp, Artificial Sequence
  Synthetic
tcaaaaaactgggtcctttct

SEQ ID NO: 9992 - DNA, 21 bp, Artificial Sequence
  Synthetic
agtgctgatttcctcaaaaaa

SEQ ID NO: 9993 - DNA, 21 bp, Artificial Sequence
  Synthetic
ttgaggaaatcagcacttcag

SEQ ID NO: 9994 - DNA, 21 bp, Artificial Sequence
  Synthetic
tcagcacttcaggagagctta

SEQ ID NO: 9995 - DNA, 21 bp, Artificial Sequence
  Synthetic
cagcacttcaggagagcttat

SEQ ID NO: 9996 - DNA, 21 bp, Artificial Sequence
  Synthetic
gcacttcaggagagcttatag

SEQ ID NO: 9997 - DNA, 21 bp, Artificial Sequence
  Synthetic
catattctcctataagctctc

SEQ ID NO: 9998 - DNA, 21 bp, Artificial Sequence
  Synthetic
caggagagcttataggagaat

SEQ ID NO: 9999 - DNA, 21 bp, Artificial Sequence
  Synthetic
gagagcttataggagaatatg

SEQ ID NO: 10000 - DNA, 21 bp, Artificial Sequence
  Synthetic
cttataggagaatatgaagaa

SEQ ID NO: 10001 - DNA, 21 bp, Artificial Sequence
  Synthetic
aggagaatatgaagaaaagaa

SEQ ID NO: 10002 - DNA, 21 bp, Artificial Sequence
  Synthetic
agaaaagaaagttacaaaaag

SEQ ID NO: 10003 - DNA, 21 bp, Artificial Sequence
  Synthetic
aaagaaagttacaaaaagccg

SEQ ID NO: 10004 - DNA, 21 bp, Artificial Sequence
  Synthetic
agaaagttacaaaaagccgaa

SEQ ID NO: 10005 - DNA, 21 bp, Artificial Sequence
  Synthetic
gatgcacagtttaactttaat

SEQ ID NO: 10006 - DNA, 21 bp, Artificial Sequence
  Synthetic
ataagaaaaaaaatatagcgg

SEQ ID NO: 10007 - DNA, 21 bp, Artificial Sequence
  Synthetic
cagagcgcagacaagcaaaat

SEQ ID NO: 10008 - DNA, 21 bp, Artificial Sequence
  Synthetic
gagcgcagacaagcaaaatta

SEQ ID NO: 10009 - DNA, 21 bp, Artificial Sequence
  Synthetic
cgcagacaagcaaaattagag

SEQ ID NO: 10010 - DNA, 21 bp, Artificial Sequence
  Synthetic
gcagacaagcaaaattagaga

SEQ ID NO: 10011 - DNA, 21 bp, Artificial Sequence
  Synthetic
gacaagcaaaattagagaagg

SEQ ID NO: 10012 - DNA, 21 bp, Artificial Sequence
  Synthetic
cagaacgttaccagagtctcc

SEQ ID NO: 10013 - DNA, 21 bp, Artificial Sequence
  Synthetic
aacgttaccagagtctccttg

SEQ ID NO: 10014 - DNA, 21 bp, Artificial Sequence
  Synthetic
taccagagtctccttgaagaa

SEQ ID NO: 10015 - DNA, 21 bp, Artificial Sequence
  Synthetic
agtctccttgaagaactgaaa

SEQ ID NO: 10016 - DNA, 21 bp, Artificial Sequence
  Synthetic
aatgagaaaaagattcatctc

SEQ ID NO: 10017 - DNA, 21 bp, Artificial Sequence
  Synthetic
ctctaacttggtgttcaggag

SEQ ID NO: 10018 - DNA, 21 bp, Artificial Sequence
  Synthetic
ttcatctcctgaacaccaagt

SEQ ID NO: 10019 - DNA, 21 bp, Artificial Sequence
  Synthetic
acatgctctaacttggtgttc

SEQ ID NO: 10020 - DNA, 21 bp, Artificial Sequence
  Synthetic
cacatgctctaacttggtgtt

SEQ ID NO: 10021 - DNA, 21 bp, Artificial Sequence
  Synthetic
ctgaacaccaagttagagcat

SEQ ID NO: 10022 - DNA, 21 bp, Artificial Sequence
  Synthetic
caccaagttagagcatgtgaa

SEQ ID NO: 10023 - DNA, 21 bp, Artificial Sequence
  Synthetic
accaagttagagcatgtgaat

SEQ ID NO: 10024 - DNA, 21 bp, Artificial Sequence
  Synthetic
ttagagcatgtgaatagggat

SEQ ID NO: 10025 - DNA, 21 bp, Artificial Sequence
  Synthetic
gaatagggatttgagtgtcaa

SEQ ID NO: 10026 - DNA, 21 bp, Artificial Sequence
  Synthetic
atagggatttgagtgtcaaaa

SEQ ID NO: 10027 - DNA, 21 bp, Artificial Sequence
  Synthetic
aaagagagtctttgtctcatc

SEQ ID NO: 10028 - DNA, 21 bp, Artificial Sequence
  Synthetic
tcatgaaaacatagttaaagc

SEQ ID NO: 10029 - DNA, 21 bp, Artificial Sequence
  Synthetic
catgaaaacatagttaaagcc

SEQ ID NO: 10030 - DNA, 21 bp, Artificial Sequence
  Synthetic
aacatagttaaagccaggaaa

SEQ ID NO: 10031 - DNA, 21 bp, Artificial Sequence
  Synthetic
acatagttaaagccaggaaaa

SEQ ID NO: 10032 - DNA, 21 bp, Artificial Sequence
  Synthetic
ttaaagccaggaaaaaggaac

SEQ ID NO: 10033 - DNA, 21 bp, Artificial Sequence
  Synthetic
taaagccaggaaaaaggaaca

SEQ ID NO: 10034 - DNA, 21 bp, Artificial Sequence
  Synthetic
taactagacaactacaacaaa

SEQ ID NO: 10035 - DNA, 21 bp, Artificial Sequence
  Synthetic
gacaactacaacaaacagaaa

SEQ ID NO: 10036 - DNA, 21 bp, Artificial Sequence
  Synthetic
acaaacagaaaaagaattaaa

SEQ ID NO: 10037 - DNA, 21 bp, Artificial Sequence
  Synthetic
tttaaaagggtttcaaccgat

SEQ ID NO: 10038 - DNA, 21 bp, Artificial Sequence
  Synthetic
ctgaggcctcttctgatttaa

SEQ ID NO: 10039 - DNA, 21 bp, Artificial Sequence
  Synthetic
ggcctcagtacattaaagcca

SEQ ID NO: 10040 - DNA, 21 bp, Artificial Sequence
  Synthetic
gaaaacacttctcaccacctt

SEQ ID NO: 10041 - DNA, 21 bp, Artificial Sequence
  Synthetic
catctaatttcttaaggtggt

SEQ ID NO: 10042 - DNA, 21 bp, Artificial Sequence
  Synthetic
cacatctaatttcttaaggtg

SEQ ID NO: 10043 - DNA, 21 bp, Artificial Sequence
  Synthetic
cttaagaaattagatgtggct

SEQ ID NO: 10044 - DNA, 21 bp, Artificial Sequence
  Synthetic
gatgtggctaagaaatcaata

SEQ ID NO: 10045 - DNA, 21 bp, Artificial Sequence
  Synthetic
ctaagaaatcaataaaggaca

SEQ ID NO: 10046 - DNA, 21 bp, Artificial Sequence
  Synthetic
agcgaaaaacaatgttctaaa

SEQ ID NO: 10047 - DNA, 21 bp, Artificial Sequence
  Synthetic
gcgaaaaacaatgttctaaac

SEQ ID NO: 10048 - DNA, 21 bp, Artificial Sequence
  Synthetic
caggaagatgatataaaagcc

SEQ ID NO: 10049 - DNA, 21 bp, Artificial Sequence
  Synthetic
aggaagatgatataaaagccc

SEQ ID NO: 10050 - DNA, 21 bp, Artificial Sequence
  Synthetic
atgatataaaagccctggaga

SEQ ID NO: 10051 - DNA, 21 bp, Artificial Sequence
  Synthetic
taaatcagccagctctgtctc

SEQ ID NO: 10052 - DNA, 21 bp, Artificial Sequence
  Synthetic
gctggctgatttagatgctgc

SEQ ID NO: 10053 - DNA, 21 bp, Artificial Sequence
  Synthetic
ctggctgatttagatgctgca

SEQ ID NO: 10054 - DNA, 21 bp, Artificial Sequence
  Synthetic
ggctgatttagatgctgcatg

SEQ ID NO: 10055 - DNA, 21 bp, Artificial Sequence
  Synthetic
tagatgctgcatggagaagtt

SEQ ID NO: 10056 - DNA, 21 bp, Artificial Sequence
  Synthetic
cataaaaagcgagacattgaa

SEQ ID NO: 10057 - DNA, 21 bp, Artificial Sequence
  Synthetic
ataaaaagcgagacattgaac

SEQ ID NO: 10058 - DNA, 21 bp, Artificial Sequence
  Synthetic
ttatgcagctggatcgttata

SEQ ID NO: 10059 - DNA, 21 bp, Artificial Sequence
  Synthetic
ctggatcgttataaagaactt

SEQ ID NO: 10060 - DNA, 21 bp, Artificial Sequence
  Synthetic
tggatcgttataaagaactta

SEQ ID NO: 10061 - DNA, 21 bp, Artificial Sequence
  Synthetic
taaagaacttaaggaacaagt

SEQ ID NO: 10062 - DNA, 21 bp, Artificial Sequence
  Synthetic
gaacttaaggaacaagtaaga

SEQ ID NO: 10063 - DNA, 21 bp, Artificial Sequence
  Synthetic
gtagctacaatgactcaacaa

SEQ ID NO: 10064 - DNA, 21 bp, Artificial Sequence
  Synthetic
tagctacaatgactcaacaac

SEQ ID NO: 10065 - DNA, 21 bp, Artificial Sequence
  Synthetic
tcaacaactggaaaaactgca

SEQ ID NO: 10066 - DNA, 21 bp, Artificial Sequence
  Synthetic
caacaactggaaaaactgcag

SEQ ID NO: 10067 - DNA, 21 bp, Artificial Sequence
  Synthetic
aacaactggaaaaactgcagt

SEQ ID NO: 10068 - DNA, 21 bp, Artificial Sequence
  Synthetic
ctggaaaaactgcagtgggaa

SEQ ID NO: 10069 - DNA, 21 bp, Artificial Sequence
  Synthetic
tgcagtgggaacagaagacag

SEQ ID NO: 10070 - DNA, 21 bp, Artificial Sequence
  Synthetic
agtgggaacagaagacagatg

SEQ ID NO: 10071 - DNA, 21 bp, Artificial Sequence
  Synthetic
cagatgaagaaagactggcat

SEQ ID NO: 10072 - DNA, 21 bp, Artificial Sequence
  Synthetic
gaagaaagactggcatttgaa

SEQ ID NO: 10073 - DNA, 21 bp, Artificial Sequence
  Synthetic
agaaagactggcatttgaaaa

SEQ ID NO: 10074 - DNA, 21 bp, Artificial Sequence
  Synthetic
gaaagactggcatttgaaaag

SEQ ID NO: 10075 - DNA, 21 bp, Artificial Sequence
  Synthetic
tggcatttgaaaagaggaggc

SEQ ID NO: 10076 - DNA, 21 bp, Artificial Sequence
  Synthetic
ggcatttgaaaagaggaggca

SEQ ID NO: 10077 - DNA, 21 bp, Artificial Sequence
  Synthetic
catttgaaaagaggaggcatg

SEQ ID NO: 10078 - DNA, 21 bp, Artificial Sequence
  Synthetic
agggaaatctaaaacaaataa

SEQ ID NO: 10079 - DNA, 21 bp, Artificial Sequence
  Synthetic
taaaacaaataaaagaacaaa

SEQ ID NO: 10080 - DNA, 21 bp, Artificial Sequence
  Synthetic
acaaatagaagatcataaaaa

SEQ ID NO: 10081 - DNA, 21 bp, Artificial Sequence
  Synthetic
tagaagatcataaaaaacgaa

SEQ ID NO: 10082 - DNA, 21 bp, Artificial Sequence
  Synthetic
gaagatcataaaaaacgaata

SEQ ID NO: 10083 - DNA, 21 bp, Artificial Sequence
  Synthetic
ataaaaaacgaatagagaagt

SEQ ID NO: 10084 - DNA, 21 bp, Artificial Sequence
  Synthetic
aaaaaacgaatagagaagtta

SEQ ID NO: 10085 - DNA, 21 bp, Artificial Sequence
  Synthetic
aaaaacgaatagagaagttag

SEQ ID NO: 10086 - DNA, 21 bp, Artificial Sequence
  Synthetic
gcttgaaagagaaaaaacagc

SEQ ID NO: 10087 - DNA, 21 bp, Artificial Sequence
  Synthetic
ttgaaagagaaaaaacagcaa

SEQ ID NO: 10088 - DNA, 21 bp, Artificial Sequence
  Synthetic
tgaaagagaaaaaacagcaag

SEQ ID NO: 10089 - DNA, 21 bp, Artificial Sequence
  Synthetic
aaacagcaagaggaaacccta

SEQ ID NO: 10090 - DNA, 21 bp, Artificial Sequence
  Synthetic
agcaagaggaaaccctagtgg

SEQ ID NO: 10091 - DNA, 21 bp, Artificial Sequence
  Synthetic
aggaaaccctagtggatgaaa

SEQ ID NO: 10092 - DNA, 21 bp, Artificial Sequence
  Synthetic
tgaaattgaaaaaacaaaatc

SEQ ID NO: 10093 - DNA, 21 bp, Artificial Sequence
  Synthetic
aaaaaacaaaatcaagaatgt

SEQ ID NO: 10094 - DNA, 21 bp, Artificial Sequence
  Synthetic
aatcaagaatgtctgaagtta

SEQ ID NO: 10095 - DNA, 21 bp, Artificial Sequence
  Synthetic
caagaatgtctgaagttaatg

SEQ ID NO: 10096 - DNA, 21 bp, Artificial Sequence
  Synthetic
atgtctgaagttaatgaagaa

SEQ ID NO: 10097 - DNA, 21 bp, Artificial Sequence
  Synthetic
taatgaagaattgaatcttat

SEQ ID NO: 10098 - DNA, 21 bp, Artificial Sequence
  Synthetic
aagaattgaatcttattagaa

SEQ ID NO: 10099 - DNA, 21 bp, Artificial Sequence
  Synthetic
aatcttattagaagtgaattg

SEQ ID NO: 10100 - DNA, 21 bp, Artificial Sequence
  Synthetic
ttagaagtgaattgcagaatg

SEQ ID NO: 10101 - DNA, 21 bp, Artificial Sequence
  Synthetic
tagaagtgaattgcagaatgc

SEQ ID NO: 10102 - DNA, 21 bp, Artificial Sequence
  Synthetic
agaatgctgggattgataccc

SEQ ID NO: 10103 - DNA, 21 bp, Artificial Sequence
  Synthetic
aatgctgggattgatacccat

SEQ ID NO: 10104 - DNA, 21 bp, Artificial Sequence
  Synthetic
atgctgggattgatacccatg

SEQ ID NO: 10105 - DNA, 21 bp, Artificial Sequence
  Synthetic
tgctgggattgatacccatga

SEQ ID NO: 10106 - DNA, 21 bp, Artificial Sequence
  Synthetic
catgagggaaaacgtcagcaa

SEQ ID NO: 10107 - DNA, 21 bp, Artificial Sequence
  Synthetic
tgagggaaaacgtcagcaaaa

SEQ ID NO: 10108 - DNA, 21 bp, Artificial Sequence
  Synthetic
gaaaacgtcagcaaaagagag

SEQ ID NO: 10109 - DNA, 21 bp, Artificial Sequence
  Synthetic
cagcaaaagagagcagaggtt

SEQ ID NO: 10110 - DNA, 21 bp, Artificial Sequence
  Synthetic
agcaaaagagagcagaggttc

SEQ ID NO: 10111 - DNA, 21 bp, Artificial Sequence
  Synthetic
tcattctcattaccacagaat

SEQ ID NO: 10112 - DNA, 21 bp, Artificial Sequence
  Synthetic
gacctgtgtcatcctattcat

SEQ ID NO: 10113 - DNA, 21 bp, Artificial Sequence
  Synthetic
ccagctggtatttcttatgaa

SEQ ID NO: 10114 - DNA, 21 bp, Artificial Sequence
  Synthetic
aacagccagctggtatttctt

SEQ ID NO: 10115 - DNA, 21 bp, Artificial Sequence
  Synthetic
gaggctacaacaatggcagtg

SEQ ID NO: 10116 - DNA, 21 bp, Artificial Sequence
  Synthetic
tcactgccattgttgtagcct

SEQ ID NO: 10117 - DNA, 21 bp, Artificial Sequence
  Synthetic
gcaaaagattgtattcgattt

SEQ ID NO: 10118 - DNA, 21 bp, Artificial Sequence
  Synthetic
aaagattgtattcgatttctg

SEQ ID NO: 10119 - DNA, 21 bp, Artificial Sequence
  Synthetic
aagattgtattcgatttctga

SEQ ID NO: 10120 - DNA, 21 bp, Artificial Sequence
  Synthetic
gattgtattcgatttctgaag

SEQ ID NO: 10121 - DNA, 21 bp, Artificial Sequence
  Synthetic
attgtattcgatttctgaagg

SEQ ID NO: 10122 - DNA, 21 bp, Artificial Sequence
  Synthetic
tattcgatttctgaaggagga

SEQ ID NO: 10123 - DNA, 21 bp, Artificial Sequence
  Synthetic
agctctttcctccttcagaaa

SEQ ID NO: 10124 - DNA, 21 bp, Artificial Sequence
  Synthetic
gatttctgaaggaggaaagag

SEQ ID NO: 10125 - DNA, 21 bp, Artificial Sequence
  Synthetic
aggttcagctctttcctcctt

SEQ ID NO: 10126 - DNA, 21 bp, Artificial Sequence
  Synthetic
tgaaggaggaaagagctgaac

SEQ ID NO: 10127 - DNA, 21 bp, Artificial Sequence
  Synthetic
acatcaaggtaatctagagcg

SEQ ID NO: 10128 - DNA, 21 bp, Artificial Sequence
  Synthetic
tacatcaaggtaatctagagc

SEQ ID NO: 10129 - DNA, 21 bp, Artificial Sequence
  Synthetic
cttacatcaaggtaatctaga

SEQ ID NO: 10130 - DNA, 21 bp, Artificial Sequence
  Synthetic
cgctctagattaccttgatgt

SEQ ID NO: 10131 - DNA, 21 bp, Artificial Sequence
  Synthetic
agttcttacatcaaggtaatc

SEQ ID NO: 10132 - DNA, 21 bp, Artificial Sequence
  Synthetic
ccctttagatcaagccaatca

SEQ ID NO: 10133 - DNA, 21 bp, Artificial Sequence
  Synthetic
caagccaatcaatgaaagact

SEQ ID NO: 10134 - DNA, 21 bp, Artificial Sequence
  Synthetic
aagccaatcaatgaaagacta

SEQ ID NO: 10135 - DNA, 21 bp, Artificial Sequence
  Synthetic
agccaatcaatgaaagactaa

SEQ ID NO: 10136 - DNA, 21 bp, Artificial Sequence
  Synthetic
ataaagactcagtttcctcag

SEQ ID NO: 10137 - DNA, 21 bp, Artificial Sequence
  Synthetic
aagactcagtttcctcagctg

SEQ ID NO: 10138 - DNA, 21 bp, Artificial Sequence
  Synthetic
cactttcttcagctgaggaaa

SEQ ID NO: 10139 - DNA, 21 bp, Artificial Sequence
  Synthetic
ctgaatcactttcttcagctg

SEQ ID NO: 10140 - DNA, 21 bp, Artificial Sequence
  Synthetic
actgaatcactttcttcagct

SEQ ID NO: 10141 - DNA, 21 bp, Artificial Sequence
  Synthetic
aaactgaatcactttcttcag

SEQ ID NO: 10142 - DNA, 21 bp, Artificial Sequence
  Synthetic
agaaagtgattcagtttgtgt

SEQ ID NO: 10143 - DNA, 21 bp, Artificial Sequence
  Synthetic
gaaagtgattcagtttgtgtg

SEQ ID NO: 10144 - DNA, 21 bp, Artificial Sequence
  Synthetic
aagaccatttccacacacaaa

SEQ ID NO: 10145 - DNA, 21 bp, Artificial Sequence
  Synthetic
tgtgtggaaatggtcttgttt

SEQ ID NO: 10146 - DNA, 21 bp, Artificial Sequence
  Synthetic
aatggtcttgtttgtgagact

SEQ ID NO: 10147 - DNA, 21 bp, Artificial Sequence
  Synthetic
atggtcttgtttgtgagacta

SEQ ID NO: 10148 - DNA, 21 bp, Artificial Sequence
  Synthetic
gtcttgtttgtgagactatgg

SEQ ID NO: 10149 - DNA, 21 bp, Artificial Sequence
  Synthetic
aagcaaggcatattgcactca

SEQ ID NO: 10150 - DNA, 21 bp, Artificial Sequence
  Synthetic
ggcatattgcactcagtggac

SEQ ID NO: 10151 - DNA, 21 bp, Artificial Sequence
  Synthetic
gcactcagtggacctgaaaga

SEQ ID NO: 10152 - DNA, 21 bp, Artificial Sequence
  Synthetic
actttctgtctttcaggtcca

SEQ ID NO: 10153 - DNA, 21 bp, Artificial Sequence
  Synthetic
tggacctgaaagacagaaagt

SEQ ID NO: 10154 - DNA, 21 bp, Artificial Sequence
  Synthetic
tttacagacagtagctcttga

SEQ ID NO: 10155 - DNA, 21 bp, Artificial Sequence
  Synthetic
tttaaaatctggagtgatctc

SEQ ID NO: 10156 - DNA, 21 bp, Artificial Sequence
  Synthetic
taaaatctggagtgatctctg

SEQ ID NO: 10157 - DNA, 21 bp, Artificial Sequence
  Synthetic
cttaaaatacaaggctagatg

SEQ ID NO: 10158 - DNA, 21 bp, Artificial Sequence
  Synthetic
ttaaaatacaaggctagatgc

SEQ ID NO: 10159 - DNA, 21 bp, Artificial Sequence
  Synthetic
aatacaaggctagatgctggg

SEQ ID NO: 10160 - DNA, 21 bp, Artificial Sequence
  Synthetic
tacaaggctagatgctgggat

SEQ ID NO: 10161 - DNA, 21 bp, Artificial Sequence
  Synthetic
aggctagatgctgggatgaga

SEQ ID NO: 10162 - DNA, 21 bp, Artificial Sequence
  Synthetic
tgctgggatgagaaagagtta

SEQ ID NO: 10163 - DNA, 21 bp, Artificial Sequence
  Synthetic
tgagaaagagttaaagaatct

SEQ ID NO: 10164 - DNA, 21 bp, Artificial Sequence
  Synthetic
gttaaagaatctaagagacag

SEQ ID NO: 10165 - DNA, 21 bp, Artificial Sequence
  Synthetic
aatctaagagacagacgaagc

SEQ ID NO: 10166 - DNA, 21 bp, Artificial Sequence
  Synthetic
acagacgaagccagaaaatcc

SEQ ID NO: 10167 - DNA, 21 bp, Artificial Sequence
  Synthetic
acatggatttacctttagctc

SEQ ID NO: 10168 - DNA, 21 bp, Artificial Sequence
  Synthetic
gtttaatgaagacactccgca

SEQ ID NO: 10169 - DNA, 21 bp, Artificial Sequence
  Synthetic
acactccgcaaagaaacagat

SEQ ID NO: 10170 - DNA, 21 bp, Artificial Sequence
  Synthetic
tgtttcaaatctgtttctttg

SEQ ID NO: 10171 - DNA, 21 bp, Artificial Sequence
  Synthetic
ttgtttcaaatctgtttcttt

SEQ ID NO: 10172 - DNA, 21 bp, Artificial Sequence
  Synthetic
aaacaaatacagaccctgata

SEQ ID NO: 10173 - DNA, 21 bp, Artificial Sequence
  Synthetic
aacaaatacagaccctgatac

SEQ ID NO: 10174 - DNA, 21 bp, Artificial Sequence
  Synthetic
acaaatacagaccctgataca

SEQ ID NO: 10175 - DNA, 21 bp, Artificial Sequence
  Synthetic
tcgtgtttgagttccctgtat

SEQ ID NO: 10176 - DNA, 21 bp, Artificial Sequence
  Synthetic
ttgtgaatatttgagtcgtgt

SEQ ID NO: 10177 - DNA, 21 bp, Artificial Sequence
  Synthetic
cacgactcaaatattcacaaa

SEQ ID NO: 10178 - DNA, 21 bp, Artificial Sequence
  Synthetic
tcaaatattcacaaaatgaac

SEQ ID NO: 10179 - DNA, 21 bp, Artificial Sequence
  Synthetic
caaaatgaactagagatgatt

SEQ ID NO: 10180 - DNA, 21 bp, Artificial Sequence
  Synthetic
aatgaactagagatgattaag

SEQ ID NO: 10181 - DNA, 21 bp, Artificial Sequence
  Synthetic
aggaacaatctcagttacaaa

SEQ ID NO: 10182 - DNA, 21 bp, Artificial Sequence
  Synthetic
atttagtagttcactttgtaa

SEQ ID NO: 10183 - DNA, 21 bp, Artificial Sequence
  Synthetic
tacaaagtgaactactaaata

SEQ ID NO: 10184 - DNA, 21 bp, Artificial Sequence
  Synthetic
attgagtctcaatgtattatg

SEQ ID NO: 10185 - DNA, 21 bp, Artificial Sequence
  Synthetic
agtctcaatgtattatgttga

SEQ ID NO: 10186 - DNA, 21 bp, Artificial Sequence
  Synthetic
tccttcactcaacataataca

SEQ ID NO: 10187 - DNA, 21 bp, Artificial Sequence
  Synthetic
ctcaatgtattatgttgagtg

SEQ ID NO: 10188 - DNA, 21 bp, Artificial Sequence
  Synthetic
tcaatgtattatgttgagtga

SEQ ID NO: 10189 - DNA, 21 bp, Artificial Sequence
  Synthetic
attatgttgagtgaaggaatc

SEQ ID NO: 10190 - DNA, 21 bp, Artificial Sequence
  Synthetic
ttatgttgagtgaaggaatca

SEQ ID NO: 10191 - DNA, 21 bp, Artificial Sequence
  Synthetic
tgaaggaatcaaggaacgaca

SEQ ID NO: 10192 - DNA, 21 bp, Artificial Sequence
  Synthetic
aggaatcaaggaacgacaacg

SEQ ID NO: 10193 - DNA, 21 bp, Artificial Sequence
  Synthetic
aggaacgacaacgaagaatta

SEQ ID NO: 10194 - DNA, 21 bp, Artificial Sequence
  Synthetic
aacgaagaattaaagaatttc

SEQ ID NO: 10195 - DNA, 21 bp, Artificial Sequence
  Synthetic
acgatatcttccaacacttct

SEQ ID NO: 10196 - DNA, 21 bp, Artificial Sequence
  Synthetic
atatcttccaacacttctgtg

SEQ ID NO: 10197 - DNA, 21 bp, Artificial Sequence
  Synthetic
ccaatttcttcacagaagtgt

SEQ ID NO: 10198 - DNA, 21 bp, Artificial Sequence
  Synthetic
gccaatttcttcacagaagtg

SEQ ID NO: 10199 - DNA, 21 bp, Artificial Sequence
  Synthetic
cacttctgtgaagaaattggc

SEQ ID NO: 10200 - DNA, 21 bp, Artificial Sequence
  Synthetic
acttctgtgaagaaattggcg

SEQ ID NO: 10201 - DNA, 21 bp, Artificial Sequence
  Synthetic
aaattggcgtggaaaatattc

SEQ ID NO: 10202 - DNA, 21 bp, Artificial Sequence
  Synthetic
gcgtggaaaatattcgtgaat

SEQ ID NO: 10203 - DNA, 21 bp, Artificial Sequence
  Synthetic
gtggaaaatattcgtgaattt

SEQ ID NO: 10204 - DNA, 21 bp, Artificial Sequence
  Synthetic
aacatgtttgttctcaaattc

SEQ ID NO: 10205 - DNA, 21 bp, Artificial Sequence
  Synthetic
acaaacatgttaaacggcaac

SEQ ID NO: 10206 - DNA, 21 bp, Artificial Sequence
  Synthetic
tttattatactagattagaat

SEQ ID NO: 10207 - DNA, 21 bp, Artificial Sequence
  Synthetic
aaactcggcttaatgttcaac

SEQ ID NO: 10208 - DNA, 21 bp, Artificial Sequence
  Synthetic
atactcaagttgaacattaag

SEQ ID NO: 10209 - DNA, 21 bp, Artificial Sequence
  Synthetic
gtgactgcgactatactcaag

SEQ ID NO: 10210 - DNA, 21 bp, Artificial Sequence
  Synthetic
gagtatagtcgcagtcacctt

SEQ ID NO: 10211 - DNA, 21 bp, Artificial Sequence
  Synthetic
tatagtcgcagtcaccttaag

SEQ ID NO: 10212 - DNA, 21 bp, Artificial Sequence
  Synthetic
cgcagtcaccttaagaagaaa

SEQ ID NO: 10213 - DNA, 21 bp, Artificial Sequence
  Synthetic
tgaataagatcaacacattaa

SEQ ID NO: 10214 - DNA, 21 bp, Artificial Sequence
  Synthetic
aacacattaaaagaaactatc

SEQ ID NO: 10215 - DNA, 21 bp, Artificial Sequence
  Synthetic
aagaaactatccagaaaggta

SEQ ID NO: 10216 - DNA, 21 bp, Artificial Sequence
  Synthetic
atcaatatcttcactaccttt

SEQ ID NO: 10217 - DNA, 21 bp, Artificial Sequence
  Synthetic
agtgaagatattgatcaccta

SEQ ID NO: 10218 - DNA, 21 bp, Artificial Sequence
  Synthetic
agatcctctctgttcaggctg

SEQ ID NO: 10219 - DNA, 21 bp, Artificial Sequence
  Synthetic
gaagaaaactgtctgcagaca

SEQ ID NO: 10220 - DNA, 21 bp, Artificial Sequence
  Synthetic
aaaactgtctgcagacagtga

SEQ ID NO: 10221 - DNA, 21 bp, Artificial Sequence
  Synthetic
ttaagttgctgctgctttgcc

SEQ ID NO: 10222 - DNA, 21 bp, Artificial Sequence
  Synthetic
atggcaaagcagcagcaactt

SEQ ID NO: 10223 - DNA, 21 bp, Artificial Sequence
  Synthetic
cttaaggacatacgtgtcact

SEQ ID NO: 10224 - DNA, 21 bp, Artificial Sequence
  Synthetic
gtgtcactcagaactccagtg

SEQ ID NO: 10225 - DNA, 21 bp, Artificial Sequence
  Synthetic
gtcactcagaactccagtgcc

SEQ ID NO: 10226 - DNA, 21 bp, Artificial Sequence
  Synthetic
aactttctcggcactggagtt

SEQ ID NO: 10227 - DNA, 21 bp, Artificial Sequence
  Synthetic
gagtttgaactttctcggcac

SEQ ID NO: 10228 - DNA, 21 bp, Artificial Sequence
  Synthetic
tgagtttgaactttctcggca

SEQ ID NO: 10229 - DNA, 21 bp, Artificial Sequence
  Synthetic
ccgagaaagttcaaactcaaa

SEQ ID NO: 10230 - DNA, 21 bp, Artificial Sequence
  Synthetic
agaaagttcaaactcaaattg

SEQ ID NO: 10231 - DNA, 21 bp, Artificial Sequence
  Synthetic
aaagttcaaactcaaattgaa

SEQ ID NO: 10232 - DNA, 21 bp, Artificial Sequence
  Synthetic
aagttcaaactcaaattgaag

SEQ ID NO: 10233 - DNA, 21 bp, Artificial Sequence
  Synthetic
ccgttcctcttcaatttgagt

SEQ ID NO: 10234 - DNA, 21 bp, Artificial Sequence
  Synthetic
tcaaactcaaattgaagagga

SEQ ID NO: 10235 - DNA, 21 bp, Artificial Sequence
  Synthetic
caaactcaaattgaagaggaa

SEQ ID NO: 10236 - DNA, 21 bp, Artificial Sequence
  Synthetic
actcaaattgaagaggaacgg

SEQ ID NO: 10237 - DNA, 21 bp, Artificial Sequence
  Synthetic
cttcttccgttcctcttcaat

SEQ ID NO: 10238 - DNA, 21 bp, Artificial Sequence
  Synthetic
tcttaattacctatcaacagc

SEQ ID NO: 10239 - DNA, 21 bp, Artificial Sequence
  Synthetic
tatctgtgtaattacagggaa

SEQ ID NO: 10240 - DNA, 21 bp, Artificial Sequence
  Synthetic
atctgtgtaattacagggaag

SEQ ID NO: 10241 - DNA, 21 bp, Artificial Sequence
  Synthetic
tctgtgtaattacagggaagt

SEQ ID NO: 10242 - DNA, 21 bp, Artificial Sequence
  Synthetic
ctgtgtaattacagggaagtg

SEQ ID NO: 10243 - DNA, 21 bp, Artificial Sequence
  Synthetic
gggaagtggggaaattgcaaa

SEQ ID NO: 10244 - DNA, 21 bp, Artificial Sequence
  Synthetic
gttgtaagtattcaaacttct

SEQ ID NO: 10245 - DNA, 21 bp, Artificial Sequence
  Synthetic
ttgtaagtattcaaacttctc

SEQ ID NO: 10246 - DNA, 21 bp, Artificial Sequence
  Synthetic
agtattcaaacttctctggaa

SEQ ID NO: 10247 - DNA, 21 bp, Artificial Sequence
  Synthetic
tcgtttctgttccagagaagt

SEQ ID NO: 10248 - DNA, 21 bp, Artificial Sequence
  Synthetic
cttctctggaacagaaacgat

SEQ ID NO: 10249 - DNA, 21 bp, Artificial Sequence
  Synthetic
tctctaatcgtttctgttcca

SEQ ID NO: 10250 - DNA, 21 bp, Artificial Sequence
  Synthetic
tctctggaacagaaacgatta

SEQ ID NO: 10251 - DNA, 21 bp, Artificial Sequence
  Synthetic
cttctctaatcgtttctgttc

SEQ ID NO: 10252 - DNA, 21 bp, Artificial Sequence
  Synthetic
ttgattgcaaagtgcaagaca

SEQ ID NO: 10253 - DNA, 21 bp, Artificial Sequence
  Synthetic
gtcatccagtgaccccgacaa

SEQ ID NO: 10254 - DNA, 21 bp, Artificial Sequence
  Synthetic
cggggtcactggatgacatca

SEQ ID NO: 10255 - DNA, 21 bp, Artificial Sequence
  Synthetic
tcactggatgacatcattgaa

SEQ ID NO: 10256 - DNA, 21 bp, Artificial Sequence
  Synthetic
cactggatgacatcattgaag

SEQ ID NO: 10257 - DNA, 21 bp, Artificial Sequence
  Synthetic
actttctgcttcagttcccat

SEQ ID NO: 10258 - DNA, 21 bp, Artificial Sequence
  Synthetic
ttcatagatatcaattgttgc

SEQ ID NO: 10259 - DNA, 21 bp, Artificial Sequence
  Synthetic
cccaggcaacaattgatatct

SEQ ID NO: 10260 - DNA, 21 bp, Artificial Sequence
  Synthetic
caacaattgatatctatgaaa

SEQ ID NO: 10261 - DNA, 21 bp, Artificial Sequence
  Synthetic
caattgatatctatgaaaaag

SEQ ID NO: 10262 - DNA, 21 bp, Artificial Sequence
  Synthetic
tctatgaaaaagaagaagcct

SEQ ID NO: 10263 - DNA, 21 bp, Artificial Sequence
  Synthetic
aaatagactacagctctctaa

SEQ ID NO: 10264 - DNA, 21 bp, Artificial Sequence
  Synthetic
atagactacagctctctaaaa

SEQ ID NO: 10265 - DNA, 21 bp, Artificial Sequence
  Synthetic
tacagctctctaaaagaggat

SEQ ID NO: 10266 - DNA, 21 bp, Artificial Sequence
  Synthetic
cattaccttcaaatcctcttt

SEQ ID NO: 10267 - DNA, 21 bp, Artificial Sequence
  Synthetic
aataggctctacagtctgatc

SEQ ID NO: 10268 - DNA, 21 bp, Artificial Sequence
  Synthetic
ctcgatttcttgatcagactg

SEQ ID NO: 10269 - DNA, 21 bp, Artificial Sequence
  Synthetic
ctctacagtctgatcaagaaa

SEQ ID NO: 10270 - DNA, 21 bp, Artificial Sequence
  Synthetic
ttgctgcaataagagcctaag

SEQ ID NO: 10271 - DNA, 21 bp, Artificial Sequence
  Synthetic
tgggatgctacttgctgcaat

SEQ ID NO: 10272 - DNA, 21 bp, Artificial Sequence
  Synthetic
ttattgcagcaagtagcatcc

SEQ ID NO: 10273 - DNA, 21 bp, Artificial Sequence
  Synthetic
tattgcagcaagtagcatccc

SEQ ID NO: 10274 - DNA, 21 bp, Artificial Sequence
  Synthetic
gcatcccaggaagatatctta

SEQ ID NO: 10275 - DNA, 21 bp, Artificial Sequence
  Synthetic
gaaaacagcagccccaaacct

SEQ ID NO: 10276 - DNA, 21 bp, Artificial Sequence
  Synthetic
gcagccccaaacctacgagca

SEQ ID NO: 10277 - DNA, 21 bp, Artificial Sequence
  Synthetic
cagccccaaacctacgagcac

SEQ ID NO: 10278 - DNA, 21 bp, Artificial Sequence
  Synthetic
gccccaaacctacgagcactg

SEQ ID NO: 10279 - DNA, 21 bp, Artificial Sequence
  Synthetic
gttctccagtgctcgtaggtt

SEQ ID NO: 10280 - DNA, 21 bp, Artificial Sequence
  Synthetic
agttctccagtgctcgtaggt

SEQ ID NO: 10281 - DNA, 21 bp, Artificial Sequence
  Synthetic
actggagaacttaaagactgt

SEQ ID NO: 10282 - DNA, 21 bp, Artificial Sequence
  Synthetic
agactgtcagagacaagtttc

SEQ ID NO: 10283 - DNA, 21 bp, Artificial Sequence
  Synthetic
tttctgctggcctcaaaagct

SEQ ID NO: 10284 - DNA, 21 bp, Artificial Sequence
  Synthetic
aggaagccagactgtgtaggc

SEQ ID NO: 10285 - DNA, 21 bp, Artificial Sequence
  Synthetic
ccagactgtgtaggcaagagt

SEQ ID NO: 10286 - DNA, 21 bp, Artificial Sequence
  Synthetic
tgtaggcaagagttcgagcaa

SEQ ID NO: 10287 - DNA, 21 bp, Artificial Sequence
  Synthetic
agagttcgagcaagtgaaaaa

SEQ ID NO: 10288 - DNA, 21 bp, Artificial Sequence
  Synthetic
gagttcgagcaagtgaaaaaa

SEQ ID NO: 10289 - DNA, 21 bp, Artificial Sequence
  Synthetic
gagacatgctcaaaacactgg

SEQ ID NO: 10290 - DNA, 21 bp, Artificial Sequence
  Synthetic
gattgagacatgctcaaaaca

SEQ ID NO: 10291 - DNA, 21 bp, Artificial Sequence
  Synthetic
tgtagatttgatcaattgaga

SEQ ID NO: 10292 - DNA, 21 bp, Artificial Sequence
  Synthetic
atctcaattgatcaaatctac

SEQ ID NO: 10293 - DNA, 21 bp, Artificial Sequence
  Synthetic
gcttcttgtagatttgatcaa

SEQ ID NO: 10294 - DNA, 21 bp, Artificial Sequence
  Synthetic
tcaaatctacaagaagctctg

SEQ ID NO: 10295 - DNA, 21 bp, Artificial Sequence
  Synthetic
acttgggcgctgttgtttctg

SEQ ID NO: 10296 - DNA, 21 bp, Artificial Sequence
  Synthetic
cgtttcaggcatttcttagcc

SEQ ID NO: 10297 - DNA, 21 bp, Artificial Sequence
  Synthetic
tttcaggcatttcttagccca

SEQ ID NO: 10298 - DNA, 21 bp, Artificial Sequence
  Synthetic
gttctctgggctaagaaatgc

SEQ ID NO: 10299 - DNA, 21 bp, Artificial Sequence
  Synthetic
catttcttagcccagagaacc

SEQ ID NO: 10300 - DNA, 21 bp, Artificial Sequence
  Synthetic
ttcttcagggttctctgggct

SEQ ID NO: 10301 - DNA, 21 bp, Artificial Sequence
  Synthetic
ttcttagcccagagaaccctg

SEQ ID NO: 10302 - DNA, 21 bp, Artificial Sequence
  Synthetic
agtaaggttcttcagggttct

SEQ ID NO: 10303 - DNA, 21 bp, Artificial Sequence
  Synthetic
gagaaccctgaagaaccttac

SEQ ID NO: 10304 - DNA, 21 bp, Artificial Sequence
  Synthetic
agaaccctgaagaaccttact

SEQ ID NO: 10305 - DNA, 21 bp, Artificial Sequence
  Synthetic
aaccctgaagaaccttacttg

SEQ ID NO: 10306 - DNA, 21 bp, Artificial Sequence
  Synthetic
accctgaagaaccttacttgg

SEQ ID NO: 10307 - DNA, 21 bp, Artificial Sequence
  Synthetic
ttccctccaagtaaggttctt

SEQ ID NO: 10308 - DNA, 21 bp, Artificial Sequence
  Synthetic
ccctgaagaaccttacttgga

SEQ ID NO: 10309 - DNA, 21 bp, Artificial Sequence
  Synthetic
cattggcataaaccgtttgcc

SEQ ID NO: 10310 - DNA, 21 bp, Artificial Sequence
  Synthetic
ccattggcataaaccgtttgc

SEQ ID NO: 10311 - DNA, 21 bp, Artificial Sequence
  Synthetic
ccaggcaaacggtttatgcca

SEQ ID NO: 10312 - DNA, 21 bp, Artificial Sequence
  Synthetic
ttatgccaatggacaatttgt

SEQ ID NO: 10313 - DNA, 21 bp, Artificial Sequence
  Synthetic
tatgccaatggacaatttgtc

SEQ ID NO: 10314 - DNA, 21 bp, Artificial Sequence
  Synthetic
atgccaatggacaatttgtca

SEQ ID NO: 10315 - DNA, 21 bp, Artificial Sequence
  Synthetic
tgccaatggacaatttgtcag

SEQ ID NO: 10316 - DNA, 21 bp, Artificial Sequence
  Synthetic
gccaatggacaatttgtcagg

SEQ ID NO: 10317 - DNA, 21 bp, Artificial Sequence
  Synthetic
caatggacaatttgtcagggg

SEQ ID NO: 10318 - DNA, 21 bp, Artificial Sequence
  Synthetic
ttacctgtgcacagcaaacag

SEQ ID NO: 10319 - DNA, 21 bp, Artificial Sequence
  Synthetic
ccttacctgtgcacagcaaac

SEQ ID NO: 10320 - DNA, 21 bp, Artificial Sequence
  Synthetic
accttacctgtgcacagcaaa

SEQ ID NO: 10321 - DNA, 21 bp, Artificial Sequence
  Synthetic
agaatggggcaggacgaaaac

SEQ ID NO: 10322 - DNA, 21 bp, Artificial Sequence
  Synthetic
taaaacaaagaatggggcagg

SEQ ID NO: 10323 - DNA, 21 bp, Artificial Sequence
  Synthetic
catctaaaacaaagaatgggg

SEQ ID NO: 10324 - DNA, 21 bp, Artificial Sequence
  Synthetic
cacttcatctaaaacaaagaa

SEQ ID NO: 10325 - DNA, 21 bp, Artificial Sequence
  Synthetic
ccacttcatctaaaacaaaga

SEQ ID NO: 10326 - DNA, 21 bp, Artificial Sequence
  Synthetic
gcatccacttcatctaaaaca

SEQ ID NO: 10327 - DNA, 21 bp, Artificial Sequence
  Synthetic
tttgcctatgttagtattgtc

SEQ ID NO: 10328 - DNA, 21 bp, Artificial Sequence
  Synthetic
tctttgatgtaacttgacacc

SEQ ID NO: 10329 - DNA, 21 bp, Artificial Sequence
  Synthetic
ctctttgatgtaacttgacac

SEQ ID NO: 10330 - DNA, 21 bp, Artificial Sequence
  Synthetic
tccaggtgtcaagttacatca

SEQ ID NO: 10331 - DNA, 21 bp, Artificial Sequence
  Synthetic
gactatcatctgaaactggtc

SEQ ID NO: 10332 - DNA, 21 bp, Artificial Sequence
  Synthetic
agatgatagtcatctccctaa

SEQ ID NO: 10333 - DNA, 21 bp, Artificial Sequence
  Synthetic
tgatagtcatctccctaaaag

SEQ ID NO: 10334 - DNA, 21 bp, Artificial Sequence
  Synthetic
tctggaatagaactcttcttt

SEQ ID NO: 10335 - DNA, 21 bp, Artificial Sequence
  Synthetic
cctaaaagaagagttctattc

SEQ ID NO: 10336 - DNA, 21 bp, Artificial Sequence
  Synthetic
atcagcgcgtcggctctggaa

SEQ ID NO: 10337 - DNA, 21 bp, Artificial Sequence
  Synthetic
tgccgatcagcgcgtcggctc

SEQ ID NO: 10338 - DNA, 21 bp, Artificial Sequence
  Synthetic
atgccgatcagcgcgtcggct

SEQ ID NO: 10339 - DNA, 21 bp, Artificial Sequence
  Synthetic
acgcgctgatcggcatctatc

SEQ ID NO: 10340 - DNA, 21 bp, Artificial Sequence
  Synthetic
gtgctgccgacctgagcgagg

SEQ ID NO: 10341 - DNA, 21 bp, Artificial Sequence
  Synthetic
gccgagccaaccctcacccac

SEQ ID NO: 10342 - DNA, 21 bp, Artificial Sequence
  Synthetic
acgggtgatgctcatgtgggt

SEQ ID NO: 10343 - DNA, 21 bp, Artificial Sequence
  Synthetic
agacgggtgatgctcatgtgg

SEQ ID NO: 10344 - DNA, 21 bp, Artificial Sequence
  Synthetic
atgcagacgggtgatgctcat

SEQ ID NO: 10345 - DNA, 21 bp, Artificial Sequence
  Synthetic
acatgagcatcacccgtctgc

SEQ ID NO: 10346 - DNA, 21 bp, Artificial Sequence
  Synthetic
agcatcacccgtctgcatgag

SEQ ID NO: 10347 - DNA, 21 bp, Artificial Sequence
  Synthetic
taccagcttctgctcatgcag

SEQ ID NO: 10348 - DNA, 21 bp, Artificial Sequence
  Synthetic
tctgcatgagcagaagctggt

SEQ ID NO: 10349 - DNA, 21 bp, Artificial Sequence
  Synthetic
tgagacaccacatgctgcacc

SEQ ID NO: 10350 - DNA, 21 bp, Artificial Sequence
  Synthetic
ctgagacaccacatgctgcac

SEQ ID NO: 10351 - DNA, 21 bp, Artificial Sequence
  Synthetic
caggtgcagcatgtggtgtct

SEQ ID NO: 10352 - DNA, 21 bp, Artificial Sequence
  Synthetic
atgtggtgtctcagaactgtg

SEQ ID NO: 10353 - DNA, 21 bp, Artificial Sequence
  Synthetic
caggtggagcccgtcacagtt

SEQ ID NO: 10354 - DNA, 21 bp, Artificial Sequence
  Synthetic
cagaactgtgacgggctccac

SEQ ID NO: 10355 - DNA, 21 bp, Artificial Sequence
  Synthetic
gaactgtgacgggctccacct

SEQ ID NO: 10356 - DNA, 21 bp, Artificial Sequence
  Synthetic
aactgtgacgggctccacctg

SEQ ID NO: 10357 - DNA, 21 bp, Artificial Sequence
  Synthetic
gtgacgggctccacctgagga

SEQ ID NO: 10358 - DNA, 21 bp, Artificial Sequence
  Synthetic
cgcggcagcccactcctcagg

SEQ ID NO: 10359 - DNA, 21 bp, Artificial Sequence
  Synthetic
gcgcggcagcccactcctcag

SEQ ID NO: 10360 - DNA, 21 bp, Artificial Sequence
  Synthetic
ggctgccgcgcacggccatct

SEQ ID NO: 10361 - DNA, 21 bp, Artificial Sequence
  Synthetic
gcacggccatctccgagctcc

SEQ ID NO: 10362 - DNA, 21 bp, Artificial Sequence
  Synthetic
cacggccatctccgagctcca

SEQ ID NO: 10363 - DNA, 21 bp, Artificial Sequence
  Synthetic
acggccatctccgagctccac

SEQ ID NO: 10364 - DNA, 21 bp, Artificial Sequence
  Synthetic
tgtacatgttcccgtggagct

SEQ ID NO: 10365 - DNA, 21 bp, Artificial Sequence
  Synthetic
atgtacatgttcccgtggagc

SEQ ID NO: 10366 - DNA, 21 bp, Artificial Sequence
  Synthetic
agctccacgggaacatgtaca

SEQ ID NO: 10367 - DNA, 21 bp, Artificial Sequence
  Synthetic
acttcaatgtacatgttcccg

SEQ ID NO: 10368 - DNA, 21 bp, Artificial Sequence
  Synthetic
cacttcaatgtacatgttccc

SEQ ID NO: 10369 - DNA, 21 bp, Artificial Sequence
  Synthetic
cacgggaacatgtacattgaa

SEQ ID NO: 10370 - DNA, 21 bp, Artificial Sequence
  Synthetic
ggaacgcaggaggtacagacc

SEQ ID NO: 10371 - DNA, 21 bp, Artificial Sequence
  Synthetic
ctgtacctcctgcgttcccaa

SEQ ID NO: 10372 - DNA, 21 bp, Artificial Sequence
  Synthetic
tgtacctcctgcgttcccaac

SEQ ID NO: 10373 - DNA, 21 bp, Artificial Sequence
  Synthetic
gtacctcctgcgttcccaaca

SEQ ID NO: 10374 - DNA, 21 bp, Artificial Sequence
  Synthetic
cgtactccctgttgggaacgc

SEQ ID NO: 10375 - DNA, 21 bp, Artificial Sequence
  Synthetic
acgtactccctgttgggaacg

SEQ ID NO: 10376 - DNA, 21 bp, Artificial Sequence
  Synthetic
cgttcccaacagggagtacgt

SEQ ID NO: 10377 - DNA, 21 bp, Artificial Sequence
  Synthetic
cacccgcacgtactccctgtt

SEQ ID NO: 10378 - DNA, 21 bp, Artificial Sequence
  Synthetic
acacccgcacgtactccctgt

SEQ ID NO: 10379 - DNA, 21 bp, Artificial Sequence
  Synthetic
aacacccgcacgtactccctg

SEQ ID NO: 10380 - DNA, 21 bp, Artificial Sequence
  Synthetic
tacgtgcgggtgttcgatgtg

SEQ ID NO: 10381 - DNA, 21 bp, Artificial Sequence
  Synthetic
acgtgcgggtgttcgatgtga

SEQ ID NO: 10382 - DNA, 21 bp, Artificial Sequence
  Synthetic
agggcagtgcgctccgtcaca

SEQ ID NO: 10383 - DNA, 21 bp, Artificial Sequence
  Synthetic
ccggcctgtctggtgtctgtg

SEQ ID NO: 10384 - DNA, 21 bp, Artificial Sequence
  Synthetic
cctccacagacaccagacagg

SEQ ID NO: 10385 - DNA, 21 bp, Artificial Sequence
  Synthetic
gtccggcctgtctggtgtctg

SEQ ID NO: 10386 - DNA, 21 bp, Artificial Sequence
  Synthetic
ggtccggcctgtctggtgtct

SEQ ID NO: 10387 - DNA, 21 bp, Artificial Sequence
  Synthetic
caggccggacctgccacaagt

SEQ ID NO: 10388 - DNA, 21 bp, Artificial Sequence
  Synthetic
aggccggacctgccacaagtg

SEQ ID NO: 10389 - DNA, 21 bp, Artificial Sequence
  Synthetic
ccacaagtgtgggacccagct

SEQ ID NO: 10390 - DNA, 21 bp, Artificial Sequence
  Synthetic
cacaagtgtgggacccagctg

SEQ ID NO: 10391 - DNA, 21 bp, Artificial Sequence
  Synthetic
gtgcacaatggtgtcccgcag

SEQ ID NO: 10392 - DNA, 21 bp, Artificial Sequence
  Synthetic
tgcgggacaccattgtgcact

SEQ ID NO: 10393 - DNA, 21 bp, Artificial Sequence
  Synthetic
gcgggacaccattgtgcactt

SEQ ID NO: 10394 - DNA, 21 bp, Artificial Sequence
  Synthetic
cgggacaccattgtgcacttt

SEQ ID NO: 10395 - DNA, 21 bp, Artificial Sequence
  Synthetic
gggacaccattgtgcactttg

SEQ ID NO: 10396 - DNA, 21 bp, Artificial Sequence
  Synthetic
gacaccattgtgcactttggg

SEQ ID NO: 10397 - DNA, 21 bp, Artificial Sequence
  Synthetic
caccattgtgcactttgggga

SEQ ID NO: 10398 - DNA, 21 bp, Artificial Sequence
  Synthetic
accattgtgcactttggggag

SEQ ID NO: 10399 - DNA, 21 bp, Artificial Sequence
  Synthetic
ccattgtgcactttggggaga

SEQ ID NO: 10400 - DNA, 21 bp, Artificial Sequence
  Synthetic
cattgtgcactttggggagag

SEQ ID NO: 10401 - DNA, 21 bp, Artificial Sequence
  Synthetic
cactttggggagagggggacg

SEQ ID NO: 10402 - DNA, 21 bp, Artificial Sequence
  Synthetic
actttggggagagggggacgt

SEQ ID NO: 10403 - DNA, 21 bp, Artificial Sequence
  Synthetic
agggggacgttggggcagcct

SEQ ID NO: 10404 - DNA, 21 bp, Artificial Sequence
  Synthetic
gacgttggggcagcctttgaa

SEQ ID NO: 10405 - DNA, 21 bp, Artificial Sequence
  Synthetic
acgttggggcagcctttgaac

SEQ ID NO: 10406 - DNA, 21 bp, Artificial Sequence
  Synthetic
cgttggggcagcctttgaact

SEQ ID NO: 10407 - DNA, 21 bp, Artificial Sequence
  Synthetic
ctttgaactgggaagcggcga

SEQ ID NO: 10408 - DNA, 21 bp, Artificial Sequence
  Synthetic
agcggcgaccgaggctgccag

SEQ ID NO: 10409 - DNA, 21 bp, Artificial Sequence
  Synthetic
gagcagacaccatcctgtgtc

SEQ ID NO: 10410 - DNA, 21 bp, Artificial Sequence
  Synthetic
atcctgtgtctagggtccagc

SEQ ID NO: 10411 - DNA, 21 bp, Artificial Sequence
  Synthetic
cttcaggctggaccctagaca

SEQ ID NO: 10412 - DNA, 21 bp, Artificial Sequence
  Synthetic
tcatcggcacgtaccttcagg

SEQ ID NO: 10413 - DNA, 21 bp, Artificial Sequence
  Synthetic
tgtctgcttccacaggttcta

SEQ ID NO: 10414 - DNA, 21 bp, Artificial Sequence
  Synthetic
gtgggtacttctttagaacct

SEQ ID NO: 10415 - DNA, 21 bp, Artificial Sequence
  Synthetic
cccaagttcgacaccaccttt

SEQ ID NO: 10416 - DNA, 21 bp, Artificial Sequence
  Synthetic
accagcgccatgtgggtctgc

SEQ ID NO: 10417 - DNA, 21 bp, Artificial Sequence
  Synthetic
acccacatggcgctggtgcag

SEQ ID NO: 10418 - DNA, 21 bp, Artificial Sequence
  Synthetic
ctccagctgcaccagcgccat

SEQ ID NO: 10419 - DNA, 21 bp, Artificial Sequence
  Synthetic
cccacatggcgctggtgcagc

SEQ ID NO: 10420 - DNA, 21 bp, Artificial Sequence
  Synthetic
gcgctggtgcagctggagcgc

SEQ ID NO: 10421 - DNA, 21 bp, Artificial Sequence
  Synthetic
ttctggctgaccaggaagcgg

SEQ ID NO: 10422 - DNA, 21 bp, Artificial Sequence
  Synthetic
ctcctccgcttcctggtcagc

SEQ ID NO: 10423 - DNA, 21 bp, Artificial Sequence
  Synthetic
gttctggctgaccaggaagcg

SEQ ID NO: 10424 - DNA, 21 bp, Artificial Sequence
  Synthetic
acgttctggctgaccaggaag

SEQ ID NO: 10425 - DNA, 21 bp, Artificial Sequence
  Synthetic
cacgttctggctgaccaggaa

SEQ ID NO: 10426 - DNA, 21 bp, Artificial Sequence
  Synthetic
cgcttcctggtcagccagaac

SEQ ID NO: 10427 - DNA, 21 bp, Artificial Sequence
  Synthetic
ccgtccacgttctggctgacc

SEQ ID NO: 10428 - DNA, 21 bp, Artificial Sequence
  Synthetic
cccgtccacgttctggctgac

SEQ ID NO: 10429 - DNA, 21 bp, Artificial Sequence
  Synthetic
tcctggtcagccagaacgtgg

SEQ ID NO: 10430 - DNA, 21 bp, Artificial Sequence
  Synthetic
ctggggaagcctgagcgcaca

SEQ ID NO: 10431 - DNA, 21 bp, Artificial Sequence
  Synthetic
cctggggaagcctgagcgcac

SEQ ID NO: 10432 - DNA, 21 bp, Artificial Sequence
  Synthetic
cagggtgttacctggggaagc

SEQ ID NO: 10433 - DNA, 21 bp, Artificial Sequence
  Synthetic
gcggggccagggtgttacctg

SEQ ID NO: 10434 - DNA, 21 bp, Artificial Sequence
  Synthetic
cttcccacagggacaaactgg

SEQ ID NO: 10435 - DNA, 21 bp, Artificial Sequence
  Synthetic
gagctctgccagtttgtccct

SEQ ID NO: 10436 - DNA, 21 bp, Artificial Sequence
  Synthetic
gggacaaactggcagagctcc

SEQ ID NO: 10437 - DNA, 21 bp, Artificial Sequence
  Synthetic
ggacaaactggcagagctcca

SEQ ID NO: 10438 - DNA, 21 bp, Artificial Sequence
  Synthetic
gacaaactggcagagctccac

SEQ ID NO: 10439 - DNA, 21 bp, Artificial Sequence
  Synthetic
gagctccacgggaacatgttt

SEQ ID NO: 10440 - DNA, 21 bp, Artificial Sequence
  Synthetic
agctccacgggaacatgtttg

SEQ ID NO: 10441 - DNA, 21 bp, Artificial Sequence
  Synthetic
tcttccacaaacatgttcccg

SEQ ID NO: 10442 - DNA, 21 bp, Artificial Sequence
  Synthetic
ttcttccacaaacatgttccc

SEQ ID NO: 10443 - DNA, 21 bp, Artificial Sequence
  Synthetic
tccacgggaacatgtttgtgg

SEQ ID NO: 10444 - DNA, 21 bp, Artificial Sequence
  Synthetic
agaatgtgccaagtgtaagac

SEQ ID NO: 10445 - DNA, 21 bp, Artificial Sequence
  Synthetic
tccctgacacaggcagtacgt

SEQ ID NO: 10446 - DNA, 21 bp, Artificial Sequence
  Synthetic
cagtacgtccgagacacagtc

SEQ ID NO: 10447 - DNA, 21 bp, Artificial Sequence
  Synthetic
catggtgcccacgactgtgtc

SEQ ID NO: 10448 - DNA, 21 bp, Artificial Sequence
  Synthetic
cgagacacagtcgtgggcacc

SEQ ID NO: 10449 - DNA, 21 bp, Artificial Sequence
  Synthetic
acagtcgtgggcaccatgggc

SEQ ID NO: 10450 - DNA, 21 bp, Artificial Sequence
  Synthetic
ggcaccatgggcctgaaggcc

SEQ ID NO: 10451 - DNA, 21 bp, Artificial Sequence
  Synthetic
gctctgcaccgtggctaaggc

SEQ ID NO: 10452 - DNA, 21 bp, Artificial Sequence
  Synthetic
ccccttgccttagccacggtg

SEQ ID NO: 10453 - DNA, 21 bp, Artificial Sequence
  Synthetic
ctctgcaccgtggctaaggca

SEQ ID NO: 10454 - DNA, 21 bp, Artificial Sequence
  Synthetic
tctgcaccgtggctaaggcaa

SEQ ID NO: 10455 - DNA, 21 bp, Artificial Sequence
  Synthetic
cgtggctaaggcaagggggct

SEQ ID NO: 10456 - DNA, 21 bp, Artificial Sequence
  Synthetic
aagggggctgcgagcctgcag

SEQ ID NO: 10457 - DNA, 21 bp, Artificial Sequence
  Synthetic
cttcctcattgcaggggagag

SEQ ID NO: 10458 - DNA, 21 bp, Artificial Sequence
  Synthetic
tcctcattgcaggggagagct

SEQ ID NO: 10459 - DNA, 21 bp, Artificial Sequence
  Synthetic
cctcattgcaggggagagctg

SEQ ID NO: 10460 - DNA, 21 bp, Artificial Sequence
  Synthetic
gctgagggacaccatcctaga

SEQ ID NO: 10461 - DNA, 21 bp, Artificial Sequence
  Synthetic
ctgagggacaccatcctagac

SEQ ID NO: 10462 - DNA, 21 bp, Artificial Sequence
  Synthetic
tgagggacaccatcctagact

SEQ ID NO: 10463 - DNA, 21 bp, Artificial Sequence
  Synthetic
agggacaccatcctagactgg

SEQ ID NO: 10464 - DNA, 21 bp, Artificial Sequence
  Synthetic
gggcagggagtcctcccagtc

SEQ ID NO: 10465 - DNA, 21 bp, Artificial Sequence
  Synthetic
ctgggaggactccctgcccga

SEQ ID NO: 10466 - DNA, 21 bp, Artificial Sequence
  Synthetic
tgggaggactccctgcccgac

SEQ ID NO: 10467 - DNA, 21 bp, Artificial Sequence
  Synthetic
gtgccaggtcccggtcgggca

SEQ ID NO: 10468 - DNA, 21 bp, Artificial Sequence
  Synthetic
agtgccaggtcccggtcgggc

SEQ ID NO: 10469 - DNA, 21 bp, Artificial Sequence
  Synthetic
gagtgccaggtcccggtcggg

SEQ ID NO: 10470 - DNA, 21 bp, Artificial Sequence
  Synthetic
tcggcgagtgccaggtcccgg

SEQ ID NO: 10471 - DNA, 21 bp, Artificial Sequence
  Synthetic
accgggacctggcactcgccg

SEQ ID NO: 10472 - DNA, 21 bp, Artificial Sequence
  Synthetic
tcagacctgctggcctcatcg

SEQ ID NO: 10473 - DNA, 21 bp, Artificial Sequence
  Synthetic
tgatggacaggtcggcgttcc

SEQ ID NO: 10474 - DNA, 21 bp, Artificial Sequence
  Synthetic
gtgatggacaggtcggcgttc

SEQ ID NO: 10475 - DNA, 21 bp, Artificial Sequence
  Synthetic
aacgccgacctgtccatcacg

SEQ ID NO: 10476 - DNA, 21 bp, Artificial Sequence
  Synthetic
tgcagcgatgtacccagcgtg

SEQ ID NO: 10477 - DNA, 21 bp, Artificial Sequence
  Synthetic
catcgctgcagatccggccca

SEQ ID NO: 10478 - DNA, 21 bp, Artificial Sequence
  Synthetic
atcgctgcagatccggcccag

SEQ ID NO: 10479 - DNA, 21 bp, Artificial Sequence
  Synthetic
cagcggcaggttcccgctggg

SEQ ID NO: 10480 - DNA, 21 bp, Artificial Sequence
  Synthetic
cagacctgaagtcggggatgc

SEQ ID NO: 10481 - DNA, 21 bp, Artificial Sequence
  Synthetic
cacaatcacagacctgaagtc

SEQ ID NO: 10482 - DNA, 21 bp, Artificial Sequence
  Synthetic
gcacaatcacagacctgaagt

SEQ ID NO: 10483 - DNA, 21 bp, Artificial Sequence
  Synthetic
tgcacaatcacagacctgaag

SEQ ID NO: 10484 - DNA, 21 bp, Artificial Sequence
  Synthetic
ctgccaccttcaggggtcccc

SEQ ID NO: 10485 - DNA, 21 bp, Artificial Sequence
  Synthetic
tgccaccttcaggggtcccca

SEQ ID NO: 10486 - DNA, 21 bp, Artificial Sequence
  Synthetic
cttcaggggtccccacggagt

SEQ ID NO: 10487 - DNA, 21 bp, Artificial Sequence
  Synthetic
gtccagactccgtggggaccc

SEQ ID NO: 10488 - DNA, 21 bp, Artificial Sequence
  Synthetic
ggtccccacggagtctggacc

SEQ ID NO: 10489 - DNA, 21 bp, Artificial Sequence
  Synthetic
gtccccacggagtctggacca

SEQ ID NO: 10490 - DNA, 21 bp, Artificial Sequence
  Synthetic
cctccatggtccagactccgt

SEQ ID NO: 10491 - DNA, 21 bp, Artificial Sequence
  Synthetic
tcctccatggtccagactccg

SEQ ID NO: 10492 - DNA, 21 bp, Artificial Sequence
  Synthetic
ccccacggagtctggaccatg

SEQ ID NO: 10493 - DNA, 21 bp, Artificial Sequence
  Synthetic
ctcctccatggtccagactcc

SEQ ID NO: 10494 - DNA, 21 bp, Artificial Sequence
  Synthetic
cccacggagtctggaccatgg

SEQ ID NO: 10495 - DNA, 21 bp, Artificial Sequence
  Synthetic
cggagtctggaccatggagga

SEQ ID NO: 10496 - DNA, 21 bp, Artificial Sequence
  Synthetic
tctcaggagctggtgttagtg

SEQ ID NO: 10497 - DNA, 21 bp, Artificial Sequence
  Synthetic
tttctgcactaacaccagctc

SEQ ID NO: 10498 - DNA, 21 bp, Artificial Sequence
  Synthetic
agaaagtggtgttccgacctt

SEQ ID NO: 10499 - DNA, 21 bp, Artificial Sequence
  Synthetic
aaagtggtgttccgaccttca

SEQ ID NO: 10500 - DNA, 21 bp, Artificial Sequence
  Synthetic
aagtggtgttccgaccttcag

SEQ ID NO: 10501 - DNA, 21 bp, Artificial Sequence
  Synthetic
gtgttccgaccttcagaggag

SEQ ID NO: 10502 - DNA, 21 bp, Artificial Sequence
  Synthetic
tgttccgaccttcagaggagc

SEQ ID NO: 10503 - DNA, 21 bp, Artificial Sequence
  Synthetic
acctccagctcctctgaaggt

SEQ ID NO: 10504 - DNA, 21 bp, Artificial Sequence
  Synthetic
aacctccagctcctctgaagg

SEQ ID NO: 10505 - DNA, 21 bp, Artificial Sequence
  Synthetic
cttcagaggagctggaggtta

SEQ ID NO: 10506 - DNA, 21 bp, Artificial Sequence
  Synthetic
ctccaataacctccagctcct

SEQ ID NO: 10507 - DNA, 21 bp, Artificial Sequence
  Synthetic
ttcagaggagctggaggttat

SEQ ID NO: 10508 - DNA, 21 bp, Artificial Sequence
  Synthetic
cagaggagctggaggttattg

SEQ ID NO: 10509 - DNA, 21 bp, Artificial Sequence
  Synthetic
ccaggggagtcgccaggtcct

SEQ ID NO: 10510 - DNA, 21 bp, Artificial Sequence
  Synthetic
gccaggggagtcgccaggtcc

SEQ ID NO: 10511 - DNA, 21 bp, Artificial Sequence
  Synthetic
ggccaggggagtcgccaggtc

SEQ ID NO: 10512 - DNA, 21 bp, Artificial Sequence
  Synthetic
cgggttgtgggcaaaggccag

SEQ ID NO: 10513 - DNA, 21 bp, Artificial Sequence
  Synthetic
acgggttgtgggcaaaggcca

SEQ ID NO: 10514 - DNA, 21 bp, Artificial Sequence
  Synthetic
gacgggttgtgggcaaaggcc

SEQ ID NO: 10515 - DNA, 21 bp, Artificial Sequence
  Synthetic
ggacgggttgtgggcaaaggc

SEQ ID NO: 10516 - DNA, 21 bp, Artificial Sequence
  Synthetic
ggcctttgcccacaacccgtc

SEQ ID NO: 10517 - DNA, 21 bp, Artificial Sequence
  Synthetic
tgcccacaacccgtcccgggt

SEQ ID NO: 10518 - DNA, 21 bp, Artificial Sequence
  Synthetic
gcccacaacccgtcccgggtg

SEQ ID NO: 10519 - DNA, 21 bp, Artificial Sequence
  Synthetic
ctcccacacccgggacgggtt

SEQ ID NO: 10520 - DNA, 21 bp, Artificial Sequence
  Synthetic
cccacaacccgtcccgggtgt

SEQ ID NO: 10521 - DNA, 21 bp, Artificial Sequence
  Synthetic
ggtagaactcccacacccggg

SEQ ID NO: 10522 - DNA, 21 bp, Artificial Sequence
  Synthetic
tagtggtagaactcccacacc

SEQ ID NO: 10523 - DNA, 21 bp, Artificial Sequence
  Synthetic
gtagtggtagaactcccacac

SEQ ID NO: 10524 - DNA, 21 bp, Artificial Sequence
  Synthetic
gtgggagttctaccactaccg

SEQ ID NO: 10525 - DNA, 21 bp, Artificial Sequence
  Synthetic
tgggagttctaccactaccgg

SEQ ID NO: 10526 - DNA, 21 bp, Artificial Sequence
  Synthetic
gggagttctaccactaccggc

SEQ ID NO: 10527 - DNA, 21 bp, Artificial Sequence
  Synthetic
atgacctcccgccggtagtgg

SEQ ID NO: 10528 - DNA, 21 bp, Artificial Sequence
  Synthetic
taccactaccggcgggaggtc

SEQ ID NO: 10529 - DNA, 21 bp, Artificial Sequence
  Synthetic
accactaccggcgggaggtca

SEQ ID NO: 10530 - DNA, 21 bp, Artificial Sequence
  Synthetic
ccactaccggcgggaggtcat

SEQ ID NO: 10531 - DNA, 21 bp, Artificial Sequence
  Synthetic
cactaccggcgggaggtcatg

SEQ ID NO: 10532 - DNA, 21 bp, Artificial Sequence
  Synthetic
cggcgggaggtcatggggagc

SEQ ID NO: 10533 - DNA, 21 bp, Artificial Sequence
  Synthetic
ggcgggaggtcatggggagca

SEQ ID NO: 10534 - DNA, 21 bp, Artificial Sequence
  Synthetic
tggggagcaaggagcccaacg

SEQ ID NO: 10535 - DNA, 21 bp, Artificial Sequence
  Synthetic
gctatggcgcggtgcccggcg

SEQ ID NO: 10536 - DNA, 21 bp, Artificial Sequence
  Synthetic
acgccgggcaccgcgccatag

SEQ ID NO: 10537 - DNA, 21 bp, Artificial Sequence
  Synthetic
ggcaccgcgccatagccgagt

SEQ ID NO: 10538 - DNA, 21 bp, Artificial Sequence
  Synthetic
atagccgagtgtgagacccgg

SEQ ID NO: 10539 - DNA, 21 bp, Artificial Sequence
  Synthetic
tgtgagacccggctgggcaag

SEQ ID NO: 10540 - DNA, 21 bp, Artificial Sequence
  Synthetic
tcgccggccctgcttgcccag

SEQ ID NO: 10541 - DNA, 21 bp, Artificial Sequence
  Synthetic
ccggctgggcaagcagggccg

SEQ ID NO: 10542 - DNA, 21 bp, Artificial Sequence
  Synthetic
cggcgagtcgtggtcatcacc

SEQ ID NO: 10543 - DNA, 21 bp, Artificial Sequence
  Synthetic
tggtcatcacccagaacatcg

SEQ ID NO: 10544 - DNA, 21 bp, Artificial Sequence
  Synthetic
gcggtgcagctcatcgatgtt

SEQ ID NO: 10545 - DNA, 21 bp, Artificial Sequence
  Synthetic
ctgcaccgcaaggctggcacc

SEQ ID NO: 10546 - DNA, 21 bp, Artificial Sequence
  Synthetic
aaggctggcaccaagaacctt

SEQ ID NO: 10547 - DNA, 21 bp, Artificial Sequence
  Synthetic
aggctggcaccaagaaccttc

SEQ ID NO: 10548 - DNA, 21 bp, Artificial Sequence
  Synthetic
agaaccttctggagatccatg

SEQ ID NO: 10549 - DNA, 21 bp, Artificial Sequence
  Synthetic
aaccttctggagatccatggt

SEQ ID NO: 10550 - DNA, 21 bp, Artificial Sequence
  Synthetic
gggtctctcaccatggatctc

SEQ ID NO: 10551 - DNA, 21 bp, Artificial Sequence
  Synthetic
ttaaaactcgatgtacctctt

SEQ ID NO: 10552 - DNA, 21 bp, Artificial Sequence
  Synthetic
taaaactcgatgtacctcttg

SEQ ID NO: 10553 - DNA, 21 bp, Artificial Sequence
  Synthetic
cacaactccacaagaggtaca

SEQ ID NO: 10554 - DNA, 21 bp, Artificial Sequence
  Synthetic
gtacctcttgtggagttgtgg

SEQ ID NO: 10555 - DNA, 21 bp, Artificial Sequence
  Synthetic
acctcttgtggagttgtggct

SEQ ID NO: 10556 - DNA, 21 bp, Artificial Sequence
  Synthetic
aattctcagccacaactccac

SEQ ID NO: 10557 - DNA, 21 bp, Artificial Sequence
  Synthetic
ggagttgtggctgagaattac

SEQ ID NO: 10558 - DNA, 21 bp, Artificial Sequence
  Synthetic
gtccaatttgtccagctttat

SEQ ID NO: 10559 - DNA, 21 bp, Artificial Sequence
  Synthetic
ttcctgataaagctggacaaa

SEQ ID NO: 10560 - DNA, 21 bp, Artificial Sequence
  Synthetic
tccaatttgtccagctttatc

SEQ ID NO: 10561 - DNA, 21 bp, Artificial Sequence
  Synthetic
tttgtccagctttatcaggaa

SEQ ID NO: 10562 - DNA, 21 bp, Artificial Sequence
  Synthetic
atattatttacttcagtgctc

SEQ ID NO: 10563 - DNA, 21 bp, Artificial Sequence
  Synthetic
tttacttcagtgctccagaac

SEQ ID NO: 10564 - DNA, 21 bp, Artificial Sequence
  Synthetic
ttacttcagtgctccagaacc

SEQ ID NO: 10565 - DNA, 21 bp, Artificial Sequence
  Synthetic
tgagttccaggttctggagca

SEQ ID NO: 10566 - DNA, 21 bp, Artificial Sequence
  Synthetic
ggcatcttgagttccaggttc

SEQ ID NO: 10567 - DNA, 21 bp, Artificial Sequence
  Synthetic
tggcatcttgagttccaggtt

SEQ ID NO: 10568 - DNA, 21 bp, Artificial Sequence
  Synthetic
ctcaactgggatgctggcatc

SEQ ID NO: 10569 - DNA, 21 bp, Artificial Sequence
  Synthetic
ctcaagatgccagcatcccag

SEQ ID NO: 10570 - DNA, 21 bp, Artificial Sequence
  Synthetic
caagatgccagcatcccagtt

SEQ ID NO: 10571 - DNA, 21 bp, Artificial Sequence
  Synthetic
ctaccggggaagtttctcaac

SEQ ID NO: 10572 - DNA, 21 bp, Artificial Sequence
  Synthetic
cctaccggggaagtttctcaa

SEQ ID NO: 10573 - DNA, 21 bp, Artificial Sequence
  Synthetic
gatcccattcttccaggtgtg

SEQ ID NO: 10574 - DNA, 21 bp, Artificial Sequence
  Synthetic
cgcagcctgcctcttcacacc

SEQ ID NO: 10575 - DNA, 21 bp, Artificial Sequence
  Synthetic
ccgcagcctgcctcttcacac

SEQ ID NO: 10576 - DNA, 21 bp, Artificial Sequence
  Synthetic
ccaggtgtgaagaggcaggct

SEQ ID NO: 10577 - DNA, 21 bp, Artificial Sequence
  Synthetic
caggtgtgaagaggcaggctg

SEQ ID NO: 10578 - DNA, 21 bp, Artificial Sequence
  Synthetic
aggtgtgaagaggcaggctgc

SEQ ID NO: 10579 - DNA, 21 bp, Artificial Sequence
  Synthetic
tgcgacctcacgtcgtgtggt

SEQ ID NO: 10580 - DNA, 21 bp, Artificial Sequence
  Synthetic
gcgacctcacgtcgtgtggtt

SEQ ID NO: 10581 - DNA, 21 bp, Artificial Sequence
  Synthetic
gacctcacgtcgtgtggtttg

SEQ ID NO: 10582 - DNA, 21 bp, Artificial Sequence
  Synthetic
gtcgtgtggtttggagaaaac

SEQ ID NO: 10583 - DNA, 21 bp, Artificial Sequence
  Synthetic
gaaaacctggatcctgccatt

SEQ ID NO: 10584 - DNA, 21 bp, Artificial Sequence
  Synthetic
aaaacctggatcctgccattc

SEQ ID NO: 10585 - DNA, 21 bp, Artificial Sequence
  Synthetic
aacctggatcctgccattctg

SEQ ID NO: 10586 - DNA, 21 bp, Artificial Sequence
  Synthetic
acctggatcctgccattctgg

SEQ ID NO: 10587 - DNA, 21 bp, Artificial Sequence
  Synthetic
tgtcaacctcctccagaatgg

SEQ ID NO: 10588 - DNA, 21 bp, Artificial Sequence
  Synthetic
tgccattctggaggaggttga

SEQ ID NO: 10589 - DNA, 21 bp, Artificial Sequence
  Synthetic
ccattctggaggaggttgaca

SEQ ID NO: 10590 - DNA, 21 bp, Artificial Sequence
  Synthetic
gagctctctgtcaacctcctc

SEQ ID NO: 10591 - DNA, 21 bp, Artificial Sequence
  Synthetic
actagacataaatcacagtgg

SEQ ID NO: 10592 - DNA, 21 bp, Artificial Sequence
  Synthetic
caccactagacataaatcaca

SEQ ID NO: 10593 - DNA, 21 bp, Artificial Sequence
  Synthetic
cactgtgatttatgtctagtg

SEQ ID NO: 10594 - DNA, 21 bp, Artificial Sequence
  Synthetic
tggctgctgggtacaccacag

SEQ ID NO: 10595 - DNA, 21 bp, Artificial Sequence
  Synthetic
atggctgctgggtacaccaca

SEQ ID NO: 10596 - DNA, 21 bp, Artificial Sequence
  Synthetic
acatggctgctgggtacacca

SEQ ID NO: 10597 - DNA, 21 bp, Artificial Sequence
  Synthetic
gactccttgtgatgactgggg

SEQ ID NO: 10598 - DNA, 21 bp, Artificial Sequence
  Synthetic
actccttgtgatgactggggc

SEQ ID NO: 10599 - DNA, 21 bp, Artificial Sequence
  Synthetic
tgactggggcaggaatctcca

SEQ ID NO: 10600 - DNA, 21 bp, Artificial Sequence
  Synthetic
ggggcaggaatctccaccgaa

SEQ ID NO: 10601 - DNA, 21 bp, Artificial Sequence
  Synthetic
gggcaggaatctccaccgaat

SEQ ID NO: 10602 - DNA, 21 bp, Artificial Sequence
  Synthetic
ggcaggaatctccaccgaatc

SEQ ID NO: 10603 - DNA, 21 bp, Artificial Sequence
  Synthetic
agtctggtatccccgattcgg

SEQ ID NO: 10604 - DNA, 21 bp, Artificial Sequence
  Synthetic
tagtctggtatccccgattcg

SEQ ID NO: 10605 - DNA, 21 bp, Artificial Sequence
  Synthetic
cggggataccagactacaggt

SEQ ID NO: 10606 - DNA, 21 bp, Artificial Sequence
  Synthetic
ccagactacaggtcagaaaaa

SEQ ID NO: 10607 - DNA, 21 bp, Artificial Sequence
  Synthetic
cagactacaggtcagaaaaag

SEQ ID NO: 10608 - DNA, 21 bp, Artificial Sequence
  Synthetic
ctggatgggcctgcggtcagt

SEQ ID NO: 10609 - DNA, 21 bp, Artificial Sequence
  Synthetic
cggacaaaatcaccatgctgg

SEQ ID NO: 10610 - DNA, 21 bp, Artificial Sequence
  Synthetic
actccggacaaaatcaccatg

SEQ ID NO: 10611 - DNA, 21 bp, Artificial Sequence
  Synthetic
ccgctggcggattggggcact

SEQ ID NO: 10612 - DNA, 21 bp, Artificial Sequence
  Synthetic
tgccccaatccgccagcggta

SEQ ID NO: 10613 - DNA, 21 bp, Artificial Sequence
  Synthetic
cgcccagtaccgctggcggat

SEQ ID NO: 10614 - DNA, 21 bp, Artificial Sequence
  Synthetic
tcgcccagtaccgctggcgga

SEQ ID NO: 10615 - DNA, 21 bp, Artificial Sequence
  Synthetic
ccaatccgccagcggtactgg

SEQ ID NO: 10616 - DNA, 21 bp, Artificial Sequence
  Synthetic
aatccgccagcggtactgggc

SEQ ID NO: 10617 - DNA, 21 bp, Artificial Sequence
  Synthetic
gtttctcgcccagtaccgctg

SEQ ID NO: 10618 - DNA, 21 bp, Artificial Sequence
  Synthetic
gaggagaattgaggccagcct

SEQ ID NO: 10619 - DNA, 21 bp, Artificial Sequence
  Synthetic
gttaggctggtgggaggagaa

SEQ ID NO: 10620 - DNA, 21 bp, Artificial Sequence
  Synthetic
gcagggttaggctggtgggag

SEQ ID NO: 10621 - DNA, 21 bp, Artificial Sequence
  Synthetic
gtgcagggttaggctggtggg

SEQ ID NO: 10622 - DNA, 21 bp, Artificial Sequence
  Synthetic
tgtgcagggttaggctggtgg

SEQ ID NO: 10623 - DNA, 21 bp, Artificial Sequence
  Synthetic
agtgtgcagggttaggctggt

SEQ ID NO: 10624 - DNA, 21 bp, Artificial Sequence
  Synthetic
cagtgtgcagggttaggctgg

SEQ ID NO: 10625 - DNA, 21 bp, Artificial Sequence
  Synthetic
ccagtgtgcagggttaggctg

SEQ ID NO: 10626 - DNA, 21 bp, Artificial Sequence
  Synthetic
ccaccagcctaaccctgcaca

SEQ ID NO: 10627 - DNA, 21 bp, Artificial Sequence
  Synthetic
cctaaccctgcacactgggct

SEQ ID NO: 10628 - DNA, 21 bp, Artificial Sequence
  Synthetic
aggtgctcaaagcccagtgtg

SEQ ID NO: 10629 - DNA, 21 bp, Artificial Sequence
  Synthetic
tgcacactgggctttgagcac

SEQ ID NO: 10630 - DNA, 21 bp, Artificial Sequence
  Synthetic
gcacactgggctttgagcacc

SEQ ID NO: 10631 - DNA, 21 bp, Artificial Sequence
  Synthetic
cacactgggctttgagcacct

SEQ ID NO: 10632 - DNA, 21 bp, Artificial Sequence
  Synthetic
cactgggctttgagcacctgg

SEQ ID NO: 10633 - DNA, 21 bp, Artificial Sequence
  Synthetic
ctttgagcacctgggagaaac

SEQ ID NO: 10634 - DNA, 21 bp, Artificial Sequence
  Synthetic
tttgagcacctgggagaaact

SEQ ID NO: 10635 - DNA, 21 bp, Artificial Sequence
  Synthetic
gtcaccaaccagtacagcttt

SEQ ID NO: 10636 - DNA, 21 bp, Artificial Sequence
  Synthetic
tactggttggtgacccaaaat

SEQ ID NO: 10637 - DNA, 21 bp, Artificial Sequence
  Synthetic
ggtgtgcaaagcatccacatt

SEQ ID NO: 10638 - DNA, 21 bp, Artificial Sequence
  Synthetic
gtggatgctttgcacaccaag

SEQ ID NO: 10639 - DNA, 21 bp, Artificial Sequence
  Synthetic
tggatgctttgcacaccaagg

SEQ ID NO: 10640 - DNA, 21 bp, Artificial Sequence
  Synthetic
ggatgctttgcacaccaaggc

SEQ ID NO: 10641 - DNA, 21 bp, Artificial Sequence
  Synthetic
gatgctttgcacaccaaggcg

SEQ ID NO: 10642 - DNA, 21 bp, Artificial Sequence
  Synthetic
aggcggggagtcggcgcctga

SEQ ID NO: 10643 - DNA, 21 bp, Artificial Sequence
  Synthetic
gtcggcgcctgacagagctcc

SEQ ID NO: 10644 - DNA, 21 bp, Artificial Sequence
  Synthetic
ctgacagagctccacggatgc

SEQ ID NO: 10645 - DNA, 21 bp, Artificial Sequence
  Synthetic
ctgcacctgtccatgcatccg

SEQ ID NO: 10646 - DNA, 21 bp, Artificial Sequence
  Synthetic
cctgcacctgtccatgcatcc

SEQ ID NO: 10647 - DNA, 21 bp, Artificial Sequence
  Synthetic
cttggttccagggtcctgtgc

SEQ ID NO: 10648 - DNA, 21 bp, Artificial Sequence
  Synthetic
cacaatccaagcacaggaccc

SEQ ID NO: 10649 - DNA, 21 bp, Artificial Sequence
  Synthetic
ccacaatccaagcacaggacc

SEQ ID NO: 10650 - DNA, 21 bp, Artificial Sequence
  Synthetic
ccagggtcctgtgcttggatt

SEQ ID NO: 10651 - DNA, 21 bp, Artificial Sequence
  Synthetic
cagggtcctgtgcttggattg

SEQ ID NO: 10652 - DNA, 21 bp, Artificial Sequence
  Synthetic
agggtcctgtgcttggattgt

SEQ ID NO: 10653 - DNA, 21 bp, Artificial Sequence
  Synthetic
gggtcctgtgcttggattgtg

SEQ ID NO: 10654 - DNA, 21 bp, Artificial Sequence
  Synthetic
ctgttccccacaatccaagca

SEQ ID NO: 10655 - DNA, 21 bp, Artificial Sequence
  Synthetic
ggattgtggggaacagactcc

SEQ ID NO: 10656 - DNA, 21 bp, Artificial Sequence
  Synthetic
gattgtggggaacagactccc

SEQ ID NO: 10657 - DNA, 21 bp, Artificial Sequence
  Synthetic
attgtggggaacagactcccc

SEQ ID NO: 10658 - DNA, 21 bp, Artificial Sequence
  Synthetic
ttgtggggaacagactccccg

SEQ ID NO: 10659 - DNA, 21 bp, Artificial Sequence
  Synthetic
agactccccggggggtgctgc

SEQ ID NO: 10660 - DNA, 21 bp, Artificial Sequence
  Synthetic
acgctcttgcagcaccccccg

SEQ ID NO: 10661 - DNA, 21 bp, Artificial Sequence
  Synthetic
aacgctcttgcagcacccccc

SEQ ID NO: 10662 - DNA, 21 bp, Artificial Sequence
  Synthetic
aaacgctcttgcagcaccccc

SEQ ID NO: 10663 - DNA, 21 bp, Artificial Sequence
  Synthetic
gaaacgctcttgcagcacccc

SEQ ID NO: 10664 - DNA, 21 bp, Artificial Sequence
  Synthetic
ctgcaagagcgtttccaagtc

SEQ ID NO: 10665 - DNA, 21 bp, Artificial Sequence
  Synthetic
tttccaagtcctgaaccccac

SEQ ID NO: 10666 - DNA, 21 bp, Artificial Sequence
  Synthetic
ctccaggtggggttcaggact

SEQ ID NO: 10667 - DNA, 21 bp, Artificial Sequence
  Synthetic
ttccaagtcctgaaccccacc

SEQ ID NO: 10668 - DNA, 21 bp, Artificial Sequence
  Synthetic
actccaggtggggttcaggac

SEQ ID NO: 10669 - DNA, 21 bp, Artificial Sequence
  Synthetic
ctcagcactccaggtggggtt

SEQ ID NO: 10670 - DNA, 21 bp, Artificial Sequence
  Synthetic
tcctgaaccccacctggagtg

SEQ ID NO: 10671 - DNA, 21 bp, Artificial Sequence
  Synthetic
catgggcctcagcactccagg

SEQ ID NO: 10672 - DNA, 21 bp, Artificial Sequence
  Synthetic
ccatgggcctcagcactccag

SEQ ID NO: 10673 - DNA, 21 bp, Artificial Sequence
  Synthetic
gtcaccatcaggagccaggcc

SEQ ID NO: 10674 - DNA, 21 bp, Artificial Sequence
  Synthetic
tgagagaaagacgtcaccatc

SEQ ID NO: 10675 - DNA, 21 bp, Artificial Sequence
  Synthetic
ctgagagaaagacgtcaccat

SEQ ID NO: 10676 - DNA, 21 bp, Artificial Sequence
  Synthetic
ctgatggtgacgtctttctct

SEQ ID NO: 10677 - DNA, 21 bp, Artificial Sequence
  Synthetic
gatggtgacgtctttctctca

SEQ ID NO: 10678 - DNA, 21 bp, Artificial Sequence
  Synthetic
atggtgacgtctttctctcag

SEQ ID NO: 10679 - DNA, 21 bp, Artificial Sequence
  Synthetic
ctttctctcagaggagcaagt

SEQ ID NO: 10680 - DNA, 21 bp, Artificial Sequence
  Synthetic
tttctctcagaggagcaagtc

SEQ ID NO: 10681 - DNA, 21 bp, Artificial Sequence
  Synthetic
gctccggacttgctcctctga

SEQ ID NO: 10682 - DNA, 21 bp, Artificial Sequence
  Synthetic
aagctccggacttgctcctct

SEQ ID NO: 10683 - DNA, 21 bp, Artificial Sequence
  Synthetic
gaaagctccggacttgctcct

SEQ ID NO: 10684 - DNA, 21 bp, Artificial Sequence
  Synthetic
gcaggttgggacctgaaagct

SEQ ID NO: 10685 - DNA, 21 bp, Artificial Sequence
  Synthetic
acattgaacgcaggttgggac

SEQ ID NO: 10686 - DNA, 21 bp, Artificial Sequence
  Synthetic
aggtcccaacctgcgttcaat

SEQ ID NO: 10687 - DNA, 21 bp, Artificial Sequence
  Synthetic
ggtcccaacctgcgttcaatg

SEQ ID NO: 10688 - DNA, 21 bp, Artificial Sequence
  Synthetic
gcctccacattgaacgcaggt

SEQ ID NO: 10689 - DNA, 21 bp, Artificial Sequence
  Synthetic
ggcctccacattgaacgcagg

SEQ ID NO: 10690 - DNA, 21 bp, Artificial Sequence
  Synthetic
tgcgttcaatgtggaggccat

SEQ ID NO: 10691 - DNA, 21 bp, Artificial Sequence
  Synthetic
tggtttcagatggcctccaca

SEQ ID NO: 10692 - DNA, 21 bp, Artificial Sequence
  Synthetic
tcagggttcactgtgtccccg

SEQ ID NO: 10693 - DNA, 21 bp, Artificial Sequence
  Synthetic
ttgtcagggttcactgtgtcc

SEQ ID NO: 10694 - DNA, 21 bp, Artificial Sequence
  Synthetic
tgtgcacaaaatcaaccttgt

SEQ ID NO: 10695 - DNA, 21 bp, Artificial Sequence
  Synthetic
gaagccgactccctcttggtg

SEQ ID NO: 10696 - DNA, 21 bp, Artificial Sequence
  Synthetic
aagccgactccctcttggtgg

SEQ ID NO: 10697 - DNA, 21 bp, Artificial Sequence
  Synthetic
aggatgatcccaccaccaaga

SEQ ID NO: 10698 - DNA, 21 bp, Artificial Sequence
  Synthetic
aaggatgatcccaccaccaag

SEQ ID NO: 10699 - DNA, 21 bp, Artificial Sequence
  Synthetic
caaggatgatcccaccaccaa

SEQ ID NO: 10700 - DNA, 21 bp, Artificial Sequence
  Synthetic
tgcaaggatgatcccaccacc

SEQ ID NO: 10701 - DNA, 21 bp, Artificial Sequence
  Synthetic
cttgccaagtcagatacctgc

SEQ ID NO: 10702 - DNA, 21 bp, Artificial Sequence
  Synthetic
gcgcctccggacgagcggaga

SEQ ID NO: 10703 - DNA, 21 bp, Artificial Sequence
  Synthetic
cgcctccggacgagcggagaa

SEQ ID NO: 10704 - DNA, 21 bp, Artificial Sequence
  Synthetic
cggagaaagggactcgctttc

SEQ ID NO: 10705 - DNA, 21 bp, Artificial Sequence
  Synthetic
gaaagggactcgctttcctgg

SEQ ID NO: 10706 - DNA, 21 bp, Artificial Sequence
  Synthetic
tgccgcagctcgtccaggaaa

SEQ ID NO: 10707 - DNA, 21 bp, Artificial Sequence
  Synthetic
tggaactgccgcagctcgtcc

SEQ ID NO: 10708 - DNA, 21 bp, Artificial Sequence
  Synthetic
gtggaactgccgcagctcgtc

SEQ ID NO: 10709 - DNA, 21 bp, Artificial Sequence
  Synthetic
gctgcggcagttccaccacag

SEQ ID NO: 10710 - DNA, 21 bp, Artificial Sequence
  Synthetic
tgcggcagttccaccacagca

SEQ ID NO: 10711 - DNA, 21 bp, Artificial Sequence
  Synthetic
gcagttccaccacagcagagg

SEQ ID NO: 10712 - DNA, 21 bp, Artificial Sequence
  Synthetic
agttccaccacagcagagggt

SEQ ID NO: 10713 - DNA, 21 bp, Artificial Sequence
  Synthetic
tgctctcaccctctgctgtgg

SEQ ID NO: 10714 - DNA, 21 bp, Artificial Sequence
  Synthetic
ctgctctcaccctctgctgtg

SEQ ID NO: 10715 - DNA, 21 bp, Artificial Sequence
  Synthetic
ttaaaaaaatccctgcggtgg

SEQ ID NO: 10716 - DNA, 21 bp, Artificial Sequence
  Synthetic
taaaaaaatccctgcggtggg

SEQ ID NO: 10717 - DNA, 21 bp, Artificial Sequence
  Synthetic
aaaaaaatccctgcggtgggt

SEQ ID NO: 10718 - DNA, 21 bp, Artificial Sequence
  Synthetic
aaaatccctgcggtgggtggg

SEQ ID NO: 10719 - DNA, 21 bp, Artificial Sequence
  Synthetic
aaatccctgcggtgggtggga

SEQ ID NO: 10720 - DNA, 21 bp, Artificial Sequence
  Synthetic
cagctccttcccacccaccgc

SEQ ID NO: 10721 - DNA, 21 bp, Artificial Sequence
  Synthetic
ccagctccttcccacccaccg

SEQ ID NO: 10722 - DNA, 21 bp, Artificial Sequence
  Synthetic
cctgcggtgggtgggaaggag

SEQ ID NO: 10723 - DNA, 21 bp, Artificial Sequence
  Synthetic
ggatcttcacggtctctacac

SEQ ID NO: 10724 - DNA, 21 bp, Artificial Sequence
  Synthetic
agtgactctggtgtagagacc

SEQ ID NO: 10725 - DNA, 21 bp, Artificial Sequence
  Synthetic
cctaaagtagtgactctggtg

SEQ ID NO: 10726 - DNA, 21 bp, Artificial Sequence
  Synthetic
acaccagagtcactactttag

SEQ ID NO: 10727 - DNA, 21 bp, Artificial Sequence
  Synthetic
gtcactactttaggcggattc

SEQ ID NO: 10728 - DNA, 21 bp, Artificial Sequence
  Synthetic
actttaggcggattcgcgaag

SEQ ID NO: 10729 - DNA, 21 bp, Artificial Sequence
  Synthetic
ttaaaacttccactcaccttc

SEQ ID NO: 10730 - DNA, 21 bp, Artificial Sequence
  Synthetic
ccaggtttctgagaagaatca

SEQ ID NO: 10731 - DNA, 21 bp, Artificial Sequence
  Synthetic
caggtttctgagaagaatcag

SEQ ID NO: 10732 - DNA, 21 bp, Artificial Sequence
  Synthetic
aggtttctgagaagaatcagt

SEQ ID NO: 10733 - DNA, 21 bp, Artificial Sequence
  Synthetic
ggtttctgagaagaatcagtg

SEQ ID NO: 10734 - DNA, 21 bp, Artificial Sequence
  Synthetic
tttctgagaagaatcagtggg

SEQ ID NO: 10735 - DNA, 21 bp, Artificial Sequence
  Synthetic
tttctccccactgattcttct

SEQ ID NO: 10736 - DNA, 21 bp, Artificial Sequence
  Synthetic
agaatcagtggggagaaattg

SEQ ID NO: 10737 - DNA, 21 bp, Artificial Sequence
  Synthetic
atcagtggggagaaattgttg

SEQ ID NO: 10738 - DNA, 21 bp, Artificial Sequence
  Synthetic
tgttgaagagttcaactttcc

SEQ ID NO: 10739 - DNA, 21 bp, Artificial Sequence
  Synthetic
ttagaacaacttctgggaaag

SEQ ID NO: 10740 - DNA, 21 bp, Artificial Sequence
  Synthetic
ggcagcgttagaacaacttct

SEQ ID NO: 10741 - DNA, 21 bp, Artificial Sequence
  Synthetic
aggcagcgttagaacaacttc

SEQ ID NO: 10742 - DNA, 21 bp, Artificial Sequence
  Synthetic
aaggcagcgttagaacaactt

SEQ ID NO: 10743 - DNA, 21 bp, Artificial Sequence
  Synthetic
tttaaaacagtattacttgcg

SEQ ID NO: 10744 - DNA, 21 bp, Artificial Sequence
  Synthetic
gtttcagttacctagaaaagt

SEQ ID NO: 10745 - DNA, 21 bp, Artificial Sequence
  Synthetic
ttcagttacctagaaaagtac

SEQ ID NO: 10746 - DNA, 21 bp, Artificial Sequence
  Synthetic
aggaggaggacccgaccttct

SEQ ID NO: 10747 - DNA, 21 bp, Artificial Sequence
  Synthetic
tgccgcacacctcacagaagg

SEQ ID NO: 10748 - DNA, 21 bp, Artificial Sequence
  Synthetic
gaccttctgtgaggtgtgcgg

SEQ ID NO: 10749 - DNA, 21 bp, Artificial Sequence
  Synthetic
accttctgtgaggtgtgcggc

SEQ ID NO: 10750 - DNA, 21 bp, Artificial Sequence
  Synthetic
tcgctcctgccgcacacctca

SEQ ID NO: 10751 - DNA, 21 bp, Artificial Sequence
  Synthetic
aggtgtgcggcaggagcgacc

SEQ ID NO: 10752 - DNA, 21 bp, Artificial Sequence
  Synthetic
gtgtgcggcaggagcgaccgt

SEQ ID NO: 10753 - DNA, 21 bp, Artificial Sequence
  Synthetic
ttgctctgcgacggctgcgat

SEQ ID NO: 10754 - DNA, 21 bp, Artificial Sequence
  Synthetic
tgctctgcgacggctgcgatg

SEQ ID NO: 10755 - DNA, 21 bp, Artificial Sequence
  Synthetic
taccccgcatcgcagccgtcg

SEQ ID NO: 10756 - DNA, 21 bp, Artificial Sequence
  Synthetic
gcgacggctgcgatgcggggt

SEQ ID NO: 10757 - DNA, 21 bp, Artificial Sequence
  Synthetic
gctctctcctgtaggtaccac

SEQ ID NO: 10758 - DNA, 21 bp, Artificial Sequence
  Synthetic
ctctctcctgtaggtaccaca

SEQ ID NO: 10759 - DNA, 21 bp, Artificial Sequence
  Synthetic
tgtaggtaccacatggaatgc

SEQ ID NO: 10760 - DNA, 21 bp, Artificial Sequence
  Synthetic
gaatgcttggacccccctctc

SEQ ID NO: 10761 - DNA, 21 bp, Artificial Sequence
  Synthetic
aatgcttggacccccctctcc

SEQ ID NO: 10762 - DNA, 21 bp, Artificial Sequence
  Synthetic
ccaccggcacctcctggagag

SEQ ID NO: 10763 - DNA, 21 bp, Artificial Sequence
  Synthetic
tccaccggcacctcctggaga

SEQ ID NO: 10764 - DNA, 21 bp, Artificial Sequence
  Synthetic
ccccctctccaggaggtgccg

SEQ ID NO: 10765 - DNA, 21 bp, Artificial Sequence
  Synthetic
gtccaccggcacctcctggag

SEQ ID NO: 10766 - DNA, 21 bp, Artificial Sequence
  Synthetic
cgtccaccggcacctcctgga

SEQ ID NO: 10767 - DNA, 21 bp, Artificial Sequence
  Synthetic
ctcgtccaccggcacctcctg

SEQ ID NO: 10768 - DNA, 21 bp, Artificial Sequence
  Synthetic
ctctccaggaggtgccggtgg

SEQ ID NO: 10769 - DNA, 21 bp, Artificial Sequence
  Synthetic
cactcgtccaccggcacctcc

SEQ ID NO: 10770 - DNA, 21 bp, Artificial Sequence
  Synthetic
ccactcgtccaccggcacctc

SEQ ID NO: 10771 - DNA, 21 bp, Artificial Sequence
  Synthetic
ccggtggacgagtggttctgc

SEQ ID NO: 10772 - DNA, 21 bp, Artificial Sequence
  Synthetic
cggtggacgagtggttctgcc

SEQ ID NO: 10773 - DNA, 21 bp, Artificial Sequence
  Synthetic
ccaggcgcagcacattccggg

SEQ ID NO: 10774 - DNA, 21 bp, Artificial Sequence
  Synthetic
caacaccaggcgcagcacatt

SEQ ID NO: 10775 - DNA, 21 bp, Artificial Sequence
  Synthetic
ttgccacaaaagatattctcc

SEQ ID NO: 10776 - DNA, 21 bp, Artificial Sequence
  Synthetic
tgccacaaaagatattctccc

SEQ ID NO: 10777 - DNA, 21 bp, Artificial Sequence
  Synthetic
ccacaaaagatattctcccag

SEQ ID NO: 10778 - DNA, 21 bp, Artificial Sequence
  Synthetic
ctgcaccaggagctctcctgg

SEQ ID NO: 10779 - DNA, 21 bp, Artificial Sequence
  Synthetic
tcctgcaccaggagctctcct

SEQ ID NO: 10780 - DNA, 21 bp, Artificial Sequence
  Synthetic
ctcccaggagagctcctggtg

SEQ ID NO: 10781 - DNA, 21 bp, Artificial Sequence
  Synthetic
ctcctgcaccaggagctctcc

SEQ ID NO: 10782 - DNA, 21 bp, Artificial Sequence
  Synthetic
tcccaggagagctcctggtgc

SEQ ID NO: 10783 - DNA, 21 bp, Artificial Sequence
  Synthetic
cctcctgcaccaggagctctc

SEQ ID NO: 10784 - DNA, 21 bp, Artificial Sequence
  Synthetic
ccaggagagctcctggtgcag

SEQ ID NO: 10785 - DNA, 21 bp, Artificial Sequence
  Synthetic
acaaaagcatcctcctgcacc

SEQ ID NO: 10786 - DNA, 21 bp, Artificial Sequence
  Synthetic
cacaaaagcatcctcctgcac

SEQ ID NO: 10787 - DNA, 21 bp, Artificial Sequence
  Synthetic
ttgtgagtgttctcaacccag

SEQ ID NO: 10788 - DNA, 21 bp, Artificial Sequence
  Synthetic
tggtggcagttctcctgggtt

SEQ ID NO: 10789 - DNA, 21 bp, Artificial Sequence
  Synthetic
ggtggtggcagttctcctggg

SEQ ID NO: 10790 - DNA, 21 bp, Artificial Sequence
  Synthetic
gatgcggtggtggcagttctc

SEQ ID NO: 10791 - DNA, 21 bp, Artificial Sequence
  Synthetic
gcatcacggcctagacagcaa

SEQ ID NO: 10792 - DNA, 21 bp, Artificial Sequence
  Synthetic
catcacggcctagacagcaaa

SEQ ID NO: 10793 - DNA, 21 bp, Artificial Sequence
  Synthetic
cctagacagcaaatgggacac

SEQ ID NO: 10794 - DNA, 21 bp, Artificial Sequence
  Synthetic
aatgggacaccagagtcacca

SEQ ID NO: 10795 - DNA, 21 bp, Artificial Sequence
  Synthetic
atgggacaccagagtcaccaa

SEQ ID NO: 10796 - DNA, 21 bp, Artificial Sequence
  Synthetic
tgggacaccagagtcaccaat

SEQ ID NO: 10797 - DNA, 21 bp, Artificial Sequence
  Synthetic
gacctctattgtcaccgatgt

SEQ ID NO: 10798 - DNA, 21 bp, Artificial Sequence
  Synthetic
tgcttcaaacatcggtgacaa

SEQ ID NO: 10799 - DNA, 21 bp, Artificial Sequence
  Synthetic
ctttggccacagttccgtgtg

SEQ ID NO: 10800 - DNA, 21 bp, Artificial Sequence
  Synthetic
ggcataactgcatccgtcaca

SEQ ID NO: 10801 - DNA, 21 bp, Artificial Sequence
  Synthetic
tggcataactgcatccgtcac

SEQ ID NO: 10802 - DNA, 21 bp, Artificial Sequence
  Synthetic
agttatgccaagtattgcagc

SEQ ID NO: 10803 - DNA, 21 bp, Artificial Sequence
  Synthetic
gttatgccaagtattgcagcc

SEQ ID NO: 10804 - DNA, 21 bp, Artificial Sequence
  Synthetic
ccaggagtgtttgcagcaggc

SEQ ID NO: 10805 - DNA, 21 bp, Artificial Sequence
  Synthetic
caggagtgtttgcagcaggcc

SEQ ID NO: 10806 - DNA, 21 bp, Artificial Sequence
  Synthetic
aggagtgtttgcagcaggcct

SEQ ID NO: 10807 - DNA, 21 bp, Artificial Sequence
  Synthetic
gcaggcctgggagctctacca

SEQ ID NO: 10808 - DNA, 21 bp, Artificial Sequence
  Synthetic
cctgggagctctaccacagga

SEQ ID NO: 10809 - DNA, 21 bp, Artificial Sequence
  Synthetic
agaggacattctgtcctgtgg

SEQ ID NO: 10810 - DNA, 21 bp, Artificial Sequence
  Synthetic
taccacaggacagaatgtcct

SEQ ID NO: 10811 - DNA, 21 bp, Artificial Sequence
  Synthetic
accacaggacagaatgtcctc

SEQ ID NO: 10812 - DNA, 21 bp, Artificial Sequence
  Synthetic
ccacaggacagaatgtcctct

SEQ ID NO: 10813 - DNA, 21 bp, Artificial Sequence
  Synthetic
acaggacagaatgtcctctgg

SEQ ID NO: 10814 - DNA, 21 bp, Artificial Sequence
  Synthetic
gtgtgagaagcagccctccca

SEQ ID NO: 10815 - DNA, 21 bp, Artificial Sequence
  Synthetic
cagtgtgagaagcagccctcc

SEQ ID NO: 10816 - DNA, 21 bp, Artificial Sequence
  Synthetic
ctgggagggctgcttctcaca

SEQ ID NO: 10817 - DNA, 21 bp, Artificial Sequence
  Synthetic
gtggcaaaagacacccagtgt

SEQ ID NO: 10818 - DNA, 21 bp, Artificial Sequence
  Synthetic
atgtggcaaaagacacccagt

SEQ ID NO: 10819 - DNA, 21 bp, Artificial Sequence
  Synthetic
tcccaccaaaagagtcaacct

SEQ ID NO: 10820 - DNA, 21 bp, Artificial Sequence
  Synthetic
aacatcctcaaatcccaccaa

SEQ ID NO: 10821 - DNA, 21 bp, Artificial Sequence
  Synthetic
gaggatgttcgcaaaatcata

SEQ ID NO: 10822 - DNA, 21 bp, Artificial Sequence
  Synthetic
ctttgtgataagattagtaac

SEQ ID NO: 10823 - DNA, 21 bp, Artificial Sequence
  Synthetic
gtaacaaggacatctgtttac

SEQ ID NO: 10824 - DNA, 21 bp, Artificial Sequence
  Synthetic
tcaagacacttaattatggcc

SEQ ID NO: 10825 - DNA, 21 bp, Artificial Sequence
  Synthetic
caagacacttaattatggcct

SEQ ID NO: 10826 - DNA, 21 bp, Artificial Sequence
  Synthetic
aagacacttaattatggccta

SEQ ID NO: 10827 - DNA, 21 bp, Artificial Sequence
  Synthetic
agacacttaattatggcctag

SEQ ID NO: 10828 - DNA, 21 bp, Artificial Sequence
  Synthetic
acacttaattatggcctaggg

SEQ ID NO: 10829 - DNA, 21 bp, Artificial Sequence
  Synthetic
ttaattatggcctaggggaga

SEQ ID NO: 10830 - DNA, 21 bp, Artificial Sequence
  Synthetic
aattatggcctaggggagagt

SEQ ID NO: 10831 - DNA, 21 bp, Artificial Sequence
  Synthetic
gtgagaaaaatggcaacatcg

SEQ ID NO: 10832 - DNA, 21 bp, Artificial Sequence
  Synthetic
acatcgttgagaccccaattc

SEQ ID NO: 10833 - DNA, 21 bp, Artificial Sequence
  Synthetic
attaatatcgcatccaggaat

SEQ ID NO: 10834 - DNA, 21 bp, Artificial Sequence
  Synthetic
cattaatatcgcatccaggaa

SEQ ID NO: 10835 - DNA, 21 bp, Artificial Sequence
  Synthetic
caattcctggatgcgatatta

SEQ ID NO: 10836 - DNA, 21 bp, Artificial Sequence
  Synthetic
aattcctggatgcgatattaa

SEQ ID NO: 10837 - DNA, 21 bp, Artificial Sequence
  Synthetic
attcctggatgcgatattaat

SEQ ID NO: 10838 - DNA, 21 bp, Artificial Sequence
  Synthetic
cttcccattaatatcgcatcc

SEQ ID NO: 10839 - DNA, 21 bp, Artificial Sequence
  Synthetic
acttcccattaatatcgcatc

SEQ ID NO: 10840 - DNA, 21 bp, Artificial Sequence
  Synthetic
gatgcgatattaatgggaagt

SEQ ID NO: 10841 - DNA, 21 bp, Artificial Sequence
  Synthetic
cccacactgaaaaccatagcc

SEQ ID NO: 10842 - DNA, 21 bp, Artificial Sequence
  Synthetic
gagcacagaggaatttgtgct

SEQ ID NO: 10843 - DNA, 21 bp, Artificial Sequence
  Synthetic
gcagaaacacagagagcacag

SEQ ID NO: 10844 - DNA, 21 bp, Artificial Sequence
  Synthetic
tgcagaaacacagagagcaca

SEQ ID NO: 10845 - DNA, 21 bp, Artificial Sequence
  Synthetic
agtgcagaaacacagagagca

SEQ ID NO: 10846 - DNA, 21 bp, Artificial Sequence
  Synthetic
tctgcacagtgcagaaacaca

SEQ ID NO: 10847 - DNA, 21 bp, Artificial Sequence
  Synthetic
tgtctgcacagtgcagaaaca

SEQ ID NO: 10848 - DNA, 21 bp, Artificial Sequence
  Synthetic
tttctgcactgtgcagacagc

SEQ ID NO: 10849 - DNA, 21 bp, Artificial Sequence
  Synthetic
cttctagctgtctgcacagtg

SEQ ID NO: 10850 - DNA, 21 bp, Artificial Sequence
  Synthetic
ccagtttacaggccatcccaa

SEQ ID NO: 10851 - DNA, 21 bp, Artificial Sequence
  Synthetic
agtttacaggccatcccaact

SEQ ID NO: 10852 - DNA, 21 bp, Artificial Sequence
  Synthetic
tttacaggccatcccaactga

SEQ ID NO: 10853 - DNA, 21 bp, Artificial Sequence
  Synthetic
gccatcccaactgagaggatt

SEQ ID NO: 10854 - DNA, 21 bp, Artificial Sequence
  Synthetic
ggagttcacaatcctctcagt

SEQ ID NO: 10855 - DNA, 21 bp, Artificial Sequence
  Synthetic
aggagttcacaatcctctcag

SEQ ID NO: 10856 - DNA, 21 bp, Artificial Sequence
  Synthetic
tcactgctgctttaagctgag

SEQ ID NO: 10857 - DNA, 21 bp, Artificial Sequence
  Synthetic
gtcactgctgctttaagctga

SEQ ID NO: 10858 - DNA, 21 bp, Artificial Sequence
  Synthetic
gtgtcactgctgctttaagct

SEQ ID NO: 10859 - DNA, 21 bp, Artificial Sequence
  Synthetic
aggtgtcactgctgctttaag

SEQ ID NO: 10860 - DNA, 21 bp, Artificial Sequence
  Synthetic
agcttaaagcagcagtgacac

SEQ ID NO: 10861 - DNA, 21 bp, Artificial Sequence
  Synthetic
attgtgtcctgacgtgactat

SEQ ID NO: 10862 - DNA, 21 bp, Artificial Sequence
  Synthetic
ttgtgtcctgacgtgactatt

SEQ ID NO: 10863 - DNA, 21 bp, Artificial Sequence
  Synthetic
tgtgtcctgacgtgactattt

SEQ ID NO: 10864 - DNA, 21 bp, Artificial Sequence
  Synthetic
gtgtcctgacgtgactatttg

SEQ ID NO: 10865 - DNA, 21 bp, Artificial Sequence
  Synthetic
ccactccccaaatagtcacgt

SEQ ID NO: 10866 - DNA, 21 bp, Artificial Sequence
  Synthetic
actatttggggagtggcgatg

SEQ ID NO: 10867 - DNA, 21 bp, Artificial Sequence
  Synthetic
ggtcatcgcctgagcgttaca

SEQ ID NO: 10868 - DNA, 21 bp, Artificial Sequence
  Synthetic
gtgttgtatggtggtcatcgc

SEQ ID NO: 10869 - DNA, 21 bp, Artificial Sequence
  Synthetic
accaccatacaacacacaggt

SEQ ID NO: 10870 - DNA, 21 bp, Artificial Sequence
  Synthetic
ctcttgccctttcaggaccta

SEQ ID NO: 10871 - DNA, 21 bp, Artificial Sequence
  Synthetic
tcttgccctttcaggacctaa

SEQ ID NO: 10872 - DNA, 21 bp, Artificial Sequence
  Synthetic
cttgccctttcaggacctaaa

SEQ ID NO: 10873 - DNA, 21 bp, Artificial Sequence
  Synthetic
taacgatgctccctttaggtc

SEQ ID NO: 10874 - DNA, 21 bp, Artificial Sequence
  Synthetic
atcttccctgttatcagcctc

SEQ ID NO: 10875 - DNA, 21 bp, Artificial Sequence
  Synthetic
tggttcaggaggctgataaca

SEQ ID NO: 10876 - DNA, 21 bp, Artificial Sequence
  Synthetic
gtggttcaggaggctgataac

SEQ ID NO: 10877 - DNA, 21 bp, Artificial Sequence
  Synthetic
agtggttcaggaggctgataa

SEQ ID NO: 10878 - DNA, 21 bp, Artificial Sequence
  Synthetic
ttggggctacaggagtggttc

SEQ ID NO: 10879 - DNA, 21 bp, Artificial Sequence
  Synthetic
gttggggctacaggagtggtt

SEQ ID NO: 10880 - DNA, 21 bp, Artificial Sequence
  Synthetic
acacgctggtgttggggctac

SEQ ID NO: 10881 - DNA, 21 bp, Artificial Sequence
  Synthetic
gacacgctggtgttggggcta

SEQ ID NO: 10882 - DNA, 21 bp, Artificial Sequence
  Synthetic
taatgaaggacacgctggtgt

SEQ ID NO: 10883 - DNA, 21 bp, Artificial Sequence
  Synthetic
ctaatgaaggacacgctggtg

SEQ ID NO: 10884 - DNA, 21 bp, Artificial Sequence
  Synthetic
atggtggcgacagtgctaatg

SEQ ID NO: 10885 - DNA, 21 bp, Artificial Sequence
  Synthetic
cggatggtggcgacagtgcta

SEQ ID NO: 10886 - DNA, 21 bp, Artificial Sequence
  Synthetic
cattagcactgtcgccaccat

SEQ ID NO: 10887 - DNA, 21 bp, Artificial Sequence
  Synthetic
cgccaccatccgggcgtcaca

SEQ ID NO: 10888 - DNA, 21 bp, Artificial Sequence
  Synthetic
catccgggcgtcacagcggat

SEQ ID NO: 10889 - DNA, 21 bp, Artificial Sequence
  Synthetic
ctttctaatccgctgtgacgc

SEQ ID NO: 10890 - DNA, 21 bp, Artificial Sequence
  Synthetic
cgggcgtcacagcggattaga

SEQ ID NO: 10891 - DNA, 21 bp, Artificial Sequence
  Synthetic
gggcgtcacagcggattagaa

SEQ ID NO: 10892 - DNA, 21 bp, Artificial Sequence
  Synthetic
cacagcggattagaaaggggc

SEQ ID NO: 10893 - DNA, 21 bp, Artificial Sequence
  Synthetic
aagagattctccactgctatg

SEQ ID NO: 10894 - DNA, 21 bp, Artificial Sequence
  Synthetic
ggatggctcaccatagcagtg

SEQ ID NO: 10895 - DNA, 21 bp, Artificial Sequence
  Synthetic
agggatggctcaccatagcag

SEQ ID NO: 10896 - DNA, 21 bp, Artificial Sequence
  Synthetic
gagggatggctcaccatagca

SEQ ID NO: 10897 - DNA, 21 bp, Artificial Sequence
  Synthetic
catccggctcttgtgaggccc

SEQ ID NO: 10898 - DNA, 21 bp, Artificial Sequence
  Synthetic
ctccgacttctatctgtgtgt

SEQ ID NO: 10899 - DNA, 21 bp, Artificial Sequence
  Synthetic
gcacctgcccacacacacaga

SEQ ID NO: 10900 - DNA, 21 bp, Artificial Sequence
  Synthetic
gtgtgtgtgggcaggtgccag

SEQ ID NO: 10901 - DNA, 21 bp, Artificial Sequence
  Synthetic
tgtgtgtgggcaggtgccagc

SEQ ID NO: 10902 - DNA, 21 bp, Artificial Sequence
  Synthetic
tgtgggcaggtgccagctggg

SEQ ID NO: 10903 - DNA, 21 bp, Artificial Sequence
  Synthetic
gtgggcaggtgccagctgggg

SEQ ID NO: 10904 - DNA, 21 bp, Artificial Sequence
  Synthetic
tgggcaggtgccagctggggt

SEQ ID NO: 10905 - DNA, 21 bp, Artificial Sequence
  Synthetic
gttctgcagtgtgacctgtgt

SEQ ID NO: 10906 - DNA, 21 bp, Artificial Sequence
  Synthetic
gtcctgacacaggtcacactg

SEQ ID NO: 10907 - DNA, 21 bp, Artificial Sequence
  Synthetic
acctgtgtcaggactggttcc

SEQ ID NO: 10908 - DNA, 21 bp, Artificial Sequence
  Synthetic
ggcactgacacacactgccca

SEQ ID NO: 10909 - DNA, 21 bp, Artificial Sequence
  Synthetic
gggcactgacacacactgccc

SEQ ID NO: 10910 - DNA, 21 bp, Artificial Sequence
  Synthetic
ggctttggagaggtgaggaga

SEQ ID NO: 10911 - DNA, 21 bp, Artificial Sequence
  Synthetic
gggctttggagaggtgaggag

SEQ ID NO: 10912 - DNA, 21 bp, Artificial Sequence
  Synthetic
agactgggctttggagaggtg

SEQ ID NO: 10913 - DNA, 21 bp, Artificial Sequence
  Synthetic
gagactgggctttggagaggt

SEQ ID NO: 10914 - DNA, 21 bp, Artificial Sequence
  Synthetic
gtgagactgggctttggagag

SEQ ID NO: 10915 - DNA, 21 bp, Artificial Sequence
  Synthetic
atgaagtgagactgggctttg

SEQ ID NO: 10916 - DNA, 21 bp, Artificial Sequence
  Synthetic
agatgaagtgagactgggctt

SEQ ID NO: 10917 - DNA, 21 bp, Artificial Sequence
  Synthetic
gagatgaagtgagactgggct

SEQ ID NO: 10918 - DNA, 21 bp, Artificial Sequence
  Synthetic
agcagtggagatgaagtgaga

SEQ ID NO: 10919 - DNA, 21 bp, Artificial Sequence
  Synthetic
caggctagcagtggagatgaa

SEQ ID NO: 10920 - DNA, 21 bp, Artificial Sequence
  Synthetic
cccaccaggctagcagtggag

SEQ ID NO: 10921 - DNA, 21 bp, Artificial Sequence
  Synthetic
ttcatctccactgctagcctg

SEQ ID NO: 10922 - DNA, 21 bp, Artificial Sequence
  Synthetic
tcatctccactgctagcctgg

SEQ ID NO: 10923 - DNA, 21 bp, Artificial Sequence
  Synthetic
catctccactgctagcctggt

SEQ ID NO: 10924 - DNA, 21 bp, Artificial Sequence
  Synthetic
ccattcccaccaggctagcag

SEQ ID NO: 10925 - DNA, 21 bp, Artificial Sequence
  Synthetic
cccattcccaccaggctagca

SEQ ID NO: 10926 - DNA, 21 bp, Artificial Sequence
  Synthetic
tccactgctagcctggtggga

SEQ ID NO: 10927 - DNA, 21 bp, Artificial Sequence
  Synthetic
ccactgctagcctggtgggaa

SEQ ID NO: 10928 - DNA, 21 bp, Artificial Sequence
  Synthetic
gagcgcatacacagtggacac

SEQ ID NO: 10929 - DNA, 21 bp, Artificial Sequence
  Synthetic
tgagcgcatacacagtggaca

SEQ ID NO: 10930 - DNA, 21 bp, Artificial Sequence
  Synthetic
gccgtcgtgagcgcatacaca

SEQ ID NO: 10931 - DNA, 21 bp, Artificial Sequence
  Synthetic
gggagcatacttggcaaatat

SEQ ID NO: 10932 - DNA, 21 bp, Artificial Sequence
  Synthetic
atatttgccaagtatgctccc

SEQ ID NO: 10933 - DNA, 21 bp, Artificial Sequence
  Synthetic
tatttgccaagtatgctcccg

SEQ ID NO: 10934 - DNA, 21 bp, Artificial Sequence
  Synthetic
atttgccaagtatgctcccgt

SEQ ID NO: 10935 - DNA, 21 bp, Artificial Sequence
  Synthetic
gccaagtatgctcccgtgggg

SEQ ID NO: 10936 - DNA, 21 bp, Artificial Sequence
  Synthetic
gcttatcatcttcatccccac

SEQ ID NO: 10937 - DNA, 21 bp, Artificial Sequence
  Synthetic
agcttatcatcttcatcccca

SEQ ID NO: 10938 - DNA, 21 bp, Artificial Sequence
  Synthetic
aagcttatcatcttcatcccc

SEQ ID NO: 10939 - DNA, 21 bp, Artificial Sequence
  Synthetic
gtcatcacagccatcacagaa

SEQ ID NO: 10940 - DNA, 21 bp, Artificial Sequence
  Synthetic
taattgtcatcacagccatca

SEQ ID NO: 10941 - DNA, 21 bp, Artificial Sequence
  Synthetic
tcaggaaggggtggtaacaag

SEQ ID NO: 10942 - DNA, 21 bp, Artificial Sequence
  Synthetic
tctgcttgttaccaccccttc

SEQ ID NO: 10943 - DNA, 21 bp, Artificial Sequence
  Synthetic
accaccccttcctgaaatccc

SEQ ID NO: 10944 - DNA, 21 bp, Artificial Sequence
  Synthetic
atgcctctggggatttcagga

SEQ ID NO: 10945 - DNA, 21 bp, Artificial Sequence
  Synthetic
gatgcctctggggatttcagg

SEQ ID NO: 10946 - DNA, 21 bp, Artificial Sequence
  Synthetic
ccagatgcctctggggatttc

SEQ ID NO: 10947 - DNA, 21 bp, Artificial Sequence
  Synthetic
tccagatgcctctggggattt

SEQ ID NO: 10948 - DNA, 21 bp, Artificial Sequence
  Synthetic
tcctgaaatccccagaggcat

SEQ ID NO: 10949 - DNA, 21 bp, Artificial Sequence
  Synthetic
cctgaaatccccagaggcatc

SEQ ID NO: 10950 - DNA, 21 bp, Artificial Sequence
  Synthetic
tgggcacctccagatgcctct

SEQ ID NO: 10951 - DNA, 21 bp, Artificial Sequence
  Synthetic
ttgggcacctccagatgcctc

SEQ ID NO: 10952 - DNA, 21 bp, Artificial Sequence
  Synthetic
tttgggcacctccagatgcct

SEQ ID NO: 10953 - DNA, 21 bp, Artificial Sequence
  Synthetic
atcttaccgccaagatacatt

SEQ ID NO: 10954 - DNA, 21 bp, Artificial Sequence
  Synthetic
atgaaggtgccctggctgtac

SEQ ID NO: 10955 - DNA, 21 bp, Artificial Sequence
  Synthetic
aaaaccatgcccacgtacagc

SEQ ID NO: 10956 - DNA, 21 bp, Artificial Sequence
  Synthetic
tcaatatgccaacaaaatgct

SEQ ID NO: 10957 - DNA, 21 bp, Artificial Sequence
  Synthetic
cctcaatatgccaacaaaatg

SEQ ID NO: 10958 - DNA, 21 bp, Artificial Sequence
  Synthetic
ttgttggcatattgaggatca

SEQ ID NO: 10959 - DNA, 21 bp, Artificial Sequence
  Synthetic
tgttggcatattgaggatcac

SEQ ID NO: 10960 - DNA, 21 bp, Artificial Sequence
  Synthetic
ctcaccaatgcagatagttaa

SEQ ID NO: 10961 - DNA, 21 bp, Artificial Sequence
  Synthetic
ctctattaactatctgcattg

SEQ ID NO: 10962 - DNA, 21 bp, Artificial Sequence
  Synthetic
gtctacgtgagcaggggtgag

SEQ ID NO: 10963 - DNA, 21 bp, Artificial Sequence
  Synthetic
atggtgtaccctccctggcag

SEQ ID NO: 10964 - DNA, 21 bp, Artificial Sequence
  Synthetic
tccaaatgctctgctgccagg

SEQ ID NO: 10965 - DNA, 21 bp, Artificial Sequence
  Synthetic
ccctccctggcagcagagcat

SEQ ID NO: 10966 - DNA, 21 bp, Artificial Sequence
  Synthetic
cctccctggcagcagagcatt

SEQ ID NO: 10967 - DNA, 21 bp, Artificial Sequence
  Synthetic
cctccaaatgctctgctgcca

SEQ ID NO: 10968 - DNA, 21 bp, Artificial Sequence
  Synthetic
tcctccaaatgctctgctgcc

SEQ ID NO: 10969 - DNA, 21 bp, Artificial Sequence
  Synthetic
tccctggcagcagagcatttg

SEQ ID NO: 10970 - DNA, 21 bp, Artificial Sequence
  Synthetic
ctcctccaaatgctctgctgc

SEQ ID NO: 10971 - DNA, 21 bp, Artificial Sequence
  Synthetic
ccctggcagcagagcatttgg

SEQ ID NO: 10972 - DNA, 21 bp, Artificial Sequence
  Synthetic
gcagagcatttggaggaggtg

SEQ ID NO: 10973 - DNA, 21 bp, Artificial Sequence
  Synthetic
aggtgatgaagatgctgacac

SEQ ID NO: 10974 - DNA, 21 bp, Artificial Sequence
  Synthetic
atgagagtgacaagctggtgt

SEQ ID NO: 10975 - DNA, 21 bp, Artificial Sequence
  Synthetic
catgagagtgacaagctggtg

SEQ ID NO: 10976 - DNA, 21 bp, Artificial Sequence
  Synthetic
ctacaccagcttgtcactctc

SEQ ID NO: 10977 - DNA, 21 bp, Artificial Sequence
  Synthetic
catcaaagtgttgggattcat

SEQ ID NO: 10978 - DNA, 21 bp, Artificial Sequence
  Synthetic
gacatcaaagtgttgggattc

SEQ ID NO: 10979 - DNA, 21 bp, Artificial Sequence
  Synthetic
caccatgggacatcaaagtgt

SEQ ID NO: 10980 - DNA, 21 bp, Artificial Sequence
  Synthetic
acaccatgggacatcaaagtg

SEQ ID NO: 10981 - DNA, 21 bp, Artificial Sequence
  Synthetic
ttggtacttactggcacacca

SEQ ID NO: 10982 - DNA, 21 bp, Artificial Sequence
  Synthetic
cttggtacttactggcacacc

SEQ ID NO: 10983 - DNA, 21 bp, Artificial Sequence
  Synthetic
ttgtccgcacaaaccagtgtg

SEQ ID NO: 10984 - DNA, 21 bp, Artificial Sequence
  Synthetic
tgtccgcacaaaccagtgtgc

SEQ ID NO: 10985 - DNA, 21 bp, Artificial Sequence
  Synthetic
gtccgcacaaaccagtgtgca

SEQ ID NO: 10986 - DNA, 21 bp, Artificial Sequence
  Synthetic
ctcccctgcacactggtttgt

SEQ ID NO: 10987 - DNA, 21 bp, Artificial Sequence
  Synthetic
tccgcacaaaccagtgtgcag

SEQ ID NO: 10988 - DNA, 21 bp, Artificial Sequence
  Synthetic
aaaaccactgtggtaagcacg

SEQ ID NO: 10989 - DNA, 21 bp, Artificial Sequence
  Synthetic
taaaaccactgtggtaagcac

SEQ ID NO: 10990 - DNA, 21 bp, Artificial Sequence
  Synthetic
gttaaaaccactgtggtaagc

SEQ ID NO: 10991 - DNA, 21 bp, Artificial Sequence
  Synthetic
ctctctttcccaggcccaaac

SEQ ID NO: 10992 - DNA, 21 bp, Artificial Sequence
  Synthetic
ctttcccaggcccaaactaga

SEQ ID NO: 10993 - DNA, 21 bp, Artificial Sequence
  Synthetic
atttcactctagtttgggcct

SEQ ID NO: 10994 - DNA, 21 bp, Artificial Sequence
  Synthetic
aatttcactctagtttgggcc

SEQ ID NO: 10995 - DNA, 21 bp, Artificial Sequence
  Synthetic
caatttcactctagtttgggc

SEQ ID NO: 10996 - DNA, 21 bp, Artificial Sequence
  Synthetic
caggcccaaactagagtgaaa

SEQ ID NO: 10997 - DNA, 21 bp, Artificial Sequence
  Synthetic
atagttcaatttcactctagt

SEQ ID NO: 10998 - DNA, 21 bp, Artificial Sequence
  Synthetic
actagagtgaaattgaactat

SEQ ID NO: 10999 - DNA, 21 bp, Artificial Sequence
  Synthetic
tttggatcagattgcaaaatt

SEQ ID NO: 11000 - DNA, 21 bp, Artificial Sequence
  Synthetic
ttggatcagattgcaaaattc

SEQ ID NO: 11001 - DNA, 21 bp, Artificial Sequence
  Synthetic
tggatcagattgcaaaattct

SEQ ID NO: 11002 - DNA, 21 bp, Artificial Sequence
  Synthetic
aaagaggagccttgaatttcc

SEQ ID NO: 11003 - DNA, 21 bp, Artificial Sequence
  Synthetic
gggaatctttaaagaggagcc

SEQ ID NO: 11004 - DNA, 21 bp, Artificial Sequence
  Synthetic
ccacattgggaatctttaaag

SEQ ID NO: 11005 - DNA, 21 bp, Artificial Sequence
  Synthetic
tccacattgggaatctttaaa

SEQ ID NO: 11006 - DNA, 21 bp, Artificial Sequence
  Synthetic
tcctctttaaagattcccaat

SEQ ID NO: 11007 - DNA, 21 bp, Artificial Sequence
  Synthetic
cctctttaaagattcccaatg

SEQ ID NO: 11008 - DNA, 21 bp, Artificial Sequence
  Synthetic
gctccacattgggaatcttta

SEQ ID NO: 11009 - DNA, 21 bp, Artificial Sequence
  Synthetic
tttaaagattcccaatgtgga

SEQ ID NO: 11010 - DNA, 21 bp, Artificial Sequence
  Synthetic
ttaaagattcccaatgtggag

SEQ ID NO: 11011 - DNA, 21 bp, Artificial Sequence
  Synthetic
caagatcttccgctccacatt

SEQ ID NO: 11012 - DNA, 21 bp, Artificial Sequence
  Synthetic
ccaagatcttccgctccacat

SEQ ID NO: 11013 - DNA, 21 bp, Artificial Sequence
  Synthetic
tccaagatcttccgctccaca

SEQ ID NO: 11014 - DNA, 21 bp, Artificial Sequence
  Synthetic
cccaatgtggagcggaagatc

SEQ ID NO: 11015 - DNA, 21 bp, Artificial Sequence
  Synthetic
cctctacagccttagtaaggt

SEQ ID NO: 11016 - DNA, 21 bp, Artificial Sequence
  Synthetic
actcttaccttactaaggctg

SEQ ID NO: 11017 - DNA, 21 bp, Artificial Sequence
  Synthetic
tcttatactttcagattgtga

SEQ ID NO: 11018 - DNA, 21 bp, Artificial Sequence
  Synthetic
ttatactttcagattgtgatt

SEQ ID NO: 11019 - DNA, 21 bp, Artificial Sequence
  Synthetic
tatactttcagattgtgattg

SEQ ID NO: 11020 - DNA, 21 bp, Artificial Sequence
  Synthetic
gccaccttcctcaatcacaat

SEQ ID NO: 11021 - DNA, 21 bp, Artificial Sequence
  Synthetic
ttgtgattgaggaaggtggct

SEQ ID NO: 11022 - DNA, 21 bp, Artificial Sequence
  Synthetic
ggtggctatgaagccatctgc

SEQ ID NO: 11023 - DNA, 21 bp, Artificial Sequence
  Synthetic
agccatctgcaaggatcgtcg

SEQ ID NO: 11024 - DNA, 21 bp, Artificial Sequence
  Synthetic
ctgcaaggatcgtcggtgggc

SEQ ID NO: 11025 - DNA, 21 bp, Artificial Sequence
  Synthetic
gtagtggagacgctgggcaac

SEQ ID NO: 11026 - DNA, 21 bp, Artificial Sequence
  Synthetic
gcctggtgggtagtggagacg

SEQ ID NO: 11027 - DNA, 21 bp, Artificial Sequence
  Synthetic
gctccctgctacgatcacatt

SEQ ID NO: 11028 - DNA, 21 bp, Artificial Sequence
  Synthetic
gttcgtaatgtgatcgtagca

SEQ ID NO: 11029 - DNA, 21 bp, Artificial Sequence
  Synthetic
cgttcgtaatgtgatcgtagc

SEQ ID NO: 11030 - DNA, 21 bp, Artificial Sequence
  Synthetic
gcgttcgtaatgtgatcgtag

SEQ ID NO: 11031 - DNA, 21 bp, Artificial Sequence
  Synthetic
acgaacgcattatttacccct

SEQ ID NO: 11032 - DNA, 21 bp, Artificial Sequence
  Synthetic
ctccagactgaaacatttcat

SEQ ID NO: 11033 - DNA, 21 bp, Artificial Sequence
  Synthetic
gctccagactgaaacatttca

SEQ ID NO: 11034 - DNA, 21 bp, Artificial Sequence
  Synthetic
cgccaccggagtgcccggttt

SEQ ID NO: 11035 - DNA, 21 bp, Artificial Sequence
  Synthetic
cagcccagctaggctcaaaaa

SEQ ID NO: 11036 - DNA, 21 bp, Artificial Sequence
  Synthetic
gcaatgtagccaagcgggtct

SEQ ID NO: 11037 - DNA, 21 bp, Artificial Sequence
  Synthetic
cgcaatgtagccaagcgggtc

SEQ ID NO: 11038 - DNA, 21 bp, Artificial Sequence
  Synthetic
caagacccgcttggctacatt

SEQ ID NO: 11039 - DNA, 21 bp, Artificial Sequence
  Synthetic
ttgcgaaaataaggcccatag

SEQ ID NO: 11040 - DNA, 21 bp, Artificial Sequence
  Synthetic
gcgaaaataaggcccatagca

SEQ ID NO: 11041 - DNA, 21 bp, Artificial Sequence
  Synthetic
cagatgccagacttctctgct

SEQ ID NO: 11042 - DNA, 21 bp, Artificial Sequence
  Synthetic
tcaaagacttaccgcgggtgg

SEQ ID NO: 11043 - DNA, 21 bp, Artificial Sequence
  Synthetic
aaaaagaacagcaagaagcga

SEQ ID NO: 11044 - DNA, 21 bp, Artificial Sequence
  Synthetic
aagaagcgattgaacacattg

SEQ ID NO: 11045 - DNA, 21 bp, Artificial Sequence
  Synthetic
aacacattgatgaagtacaaa

SEQ ID NO: 11046 - DNA, 21 bp, Artificial Sequence
  Synthetic
tcactggcttgttcattaagt

SEQ ID NO: 11047 - DNA, 21 bp, Artificial Sequence
  Synthetic
tcagacttaatgaacaagcca

SEQ ID NO: 11048 - DNA, 21 bp, Artificial Sequence
  Synthetic
agacttaatgaacaagccagt

SEQ ID NO: 11049 - DNA, 21 bp, Artificial Sequence
  Synthetic
gacttaatgaacaagccagtg

SEQ ID NO: 11050 - DNA, 21 bp, Artificial Sequence
  Synthetic
gaacaagccagtgaggagatt

SEQ ID NO: 11051 - DNA, 21 bp, Artificial Sequence
  Synthetic
ctcttctgaaaaaatggttgg

SEQ ID NO: 11052 - DNA, 21 bp, Artificial Sequence
  Synthetic
cctcttctgaaaaaatggttg

SEQ ID NO: 11053 - DNA, 21 bp, Artificial Sequence
  Synthetic
ggcgatcaattctgacctctt

SEQ ID NO: 11054 - DNA, 21 bp, Artificial Sequence
  Synthetic
gatcgccaaaatcccaaattt

SEQ ID NO: 11055 - DNA, 21 bp, Artificial Sequence
  Synthetic
aaatgttgttacccaaaaatt

SEQ ID NO: 11056 - DNA, 21 bp, Artificial Sequence
  Synthetic
caaatgttgttacccaaaaat

SEQ ID NO: 11057 - DNA, 21 bp, Artificial Sequence
  Synthetic
gccctgtccaaaacatacctt

SEQ ID NO: 11058 - DNA, 21 bp, Artificial Sequence
  Synthetic
ctggcctagtgtctgcactgc

SEQ ID NO: 11059 - DNA, 21 bp, Artificial Sequence
  Synthetic
tggcctagtgtctgcactgct

SEQ ID NO: 11060 - DNA, 21 bp, Artificial Sequence
  Synthetic
ggcctagtgtctgcactgctt

SEQ ID NO: 11061 - DNA, 21 bp, Artificial Sequence
  Synthetic
gcctagtgtctgcactgcttg

SEQ ID NO: 11062 - DNA, 21 bp, Artificial Sequence
  Synthetic
ctagtgtctgcactgcttggg

SEQ ID NO: 11063 - DNA, 21 bp, Artificial Sequence
  Synthetic
tagtgtctgcactgcttgggg

SEQ ID NO: 11064 - DNA, 21 bp, Artificial Sequence
  Synthetic
ctgcactgcttggggaggaag

SEQ ID NO: 11065 - DNA, 21 bp, Artificial Sequence
  Synthetic
cactgcttggggaggaagatg

SEQ ID NO: 11066 - DNA, 21 bp, Artificial Sequence
  Synthetic
agaggcactgcattatttgac

SEQ ID NO: 11067 - DNA, 21 bp, Artificial Sequence
  Synthetic
cactgcattatttgaccagag

SEQ ID NO: 11068 - DNA, 21 bp, Artificial Sequence
  Synthetic
atttgaccagagttgaagtga

SEQ ID NO: 11069 - DNA, 21 bp, Artificial Sequence
  Synthetic
ccagagttgaagtgacagaat

SEQ ID NO: 11070 - DNA, 21 bp, Artificial Sequence
  Synthetic
tgaagatattaaatcaggtta

SEQ ID NO: 11071 - DNA, 21 bp, Artificial Sequence
  Synthetic
ttgaaaataaagttctctcca

SEQ ID NO: 11072 - DNA, 21 bp, Artificial Sequence
  Synthetic
gttctctccaaagaatttcat

SEQ ID NO: 11073 - DNA, 21 bp, Artificial Sequence
  Synthetic
attcagatgaaattctttgga

SEQ ID NO: 11074 - DNA, 21 bp, Artificial Sequence
  Synthetic
tcattcagatgaaattctttg

SEQ ID NO: 11075 - DNA, 21 bp, Artificial Sequence
  Synthetic
tctccaaagaatttcatctga

SEQ ID NO: 11076 - DNA, 21 bp, Artificial Sequence
  Synthetic
tctcattcagatgaaattctt

SEQ ID NO: 11077 - DNA, 21 bp, Artificial Sequence
  Synthetic
ctctcattcagatgaaattct

SEQ ID NO: 11078 - DNA, 21 bp, Artificial Sequence
  Synthetic
tccaaagaatttcatctgaat

SEQ ID NO: 11079 - DNA, 21 bp, Artificial Sequence
  Synthetic
tggatcaccactctcattcag

SEQ ID NO: 11080 - DNA, 21 bp, Artificial Sequence
  Synthetic
aatgagagtggtgatccatct

SEQ ID NO: 11081 - DNA, 21 bp, Artificial Sequence
  Synthetic
gtgatccatcttcgaagtcca

SEQ ID NO: 11082 - DNA, 21 bp, Artificial Sequence
  Synthetic
tgatttcggtggacttcgaag

SEQ ID NO: 11083 - DNA, 21 bp, Artificial Sequence
  Synthetic
tccatttgatttcggtggact

SEQ ID NO: 11084 - DNA, 21 bp, Artificial Sequence
  Synthetic
ttcgaagtccaccgaaatcaa

SEQ ID NO: 11085 - DNA, 21 bp, Artificial Sequence
  Synthetic
tcgaagtccaccgaaatcaaa

SEQ ID NO: 11086 - DNA, 21 bp, Artificial Sequence
  Synthetic
ccagatttccatttgatttcg

SEQ ID NO: 11087 - DNA, 21 bp, Artificial Sequence
  Synthetic
ccaccgaaatcaaatggaaat

SEQ ID NO: 11088 - DNA, 21 bp, Artificial Sequence
  Synthetic
caccgaaatcaaatggaaatc

SEQ ID NO: 11089 - DNA, 21 bp, Artificial Sequence
  Synthetic
ccggtattcatttaggatttg

SEQ ID NO: 11090 - DNA, 21 bp, Artificial Sequence
  Synthetic
atttaggatttgacgaaacgt

SEQ ID NO: 11091 - DNA, 21 bp, Artificial Sequence
  Synthetic
acgaaacgttcgagtcaaacg

SEQ ID NO: 11092 - DNA, 21 bp, Artificial Sequence
  Synthetic
tggctttattctgcgtttgac

SEQ ID NO: 11093 - DNA, 21 bp, Artificial Sequence
  Synthetic
tcaaacgcagaataaagccag

SEQ ID NO: 11094 - DNA, 21 bp, Artificial Sequence
  Synthetic
caaacgcagaataaagccagc

SEQ ID NO: 11095 - DNA, 21 bp, Artificial Sequence
  Synthetic
acgcagaataaagccagcagg

SEQ ID NO: 11096 - DNA, 21 bp, Artificial Sequence
  Synthetic
aagccagcaggaagaggcagc

SEQ ID NO: 11097 - DNA, 21 bp, Artificial Sequence
  Synthetic
gccagcaggaagaggcagcat

SEQ ID NO: 11098 - DNA, 21 bp, Artificial Sequence
  Synthetic
ccagcaggaagaggcagcatg

SEQ ID NO: 11099 - DNA, 21 bp, Artificial Sequence
  Synthetic
ggaagaggcagcatgaggaac

SEQ ID NO: 11100 - DNA, 21 bp, Artificial Sequence
  Synthetic
aagaggcagcatgaggaacca

SEQ ID NO: 11101 - DNA, 21 bp, Artificial Sequence
  Synthetic
gaatggtcagtaaaccaggta

SEQ ID NO: 11102 - DNA, 21 bp, Artificial Sequence
  Synthetic
accattctgatgcaggtgctg

SEQ ID NO: 11103 - DNA, 21 bp, Artificial Sequence
  Synthetic
ctaactcatcagcacctgcat

SEQ ID NO: 11104 - DNA, 21 bp, Artificial Sequence
  Synthetic
ctgatgcaggtgctgatgagt

SEQ ID NO: 11105 - DNA, 21 bp, Artificial Sequence
  Synthetic
tgatgcaggtgctgatgagtt

SEQ ID NO: 11106 - DNA, 21 bp, Artificial Sequence
  Synthetic
atgcaggtgctgatgagttag

SEQ ID NO: 11107 - DNA, 21 bp, Artificial Sequence
  Synthetic
aacccattacagtactacttg

SEQ ID NO: 11108 - DNA, 21 bp, Artificial Sequence
  Synthetic
aactcaccaagtagtactgta

SEQ ID NO: 11109 - DNA, 21 bp, Artificial Sequence
  Synthetic
ttcaccgctgagggcaaagga

SEQ ID NO: 11110 - DNA, 21 bp, Artificial Sequence
  Synthetic
gctgagggcaaaggaaggggt

SEQ ID NO: 11111 - DNA, 21 bp, Artificial Sequence
  Synthetic
ggaaggggtctgaaggccacc

SEQ ID NO: 11112 - DNA, 21 bp, Artificial Sequence
  Synthetic
gaaggggtctgaaggccacca

SEQ ID NO: 11113 - DNA, 21 bp, Artificial Sequence
  Synthetic
tctgaaggccaccaaggagtt

SEQ ID NO: 11114 - DNA, 21 bp, Artificial Sequence
  Synthetic
gcaaagatgatatctgcagcc

SEQ ID NO: 11115 - DNA, 21 bp, Artificial Sequence
  Synthetic
gggctgcagatatcatctttg

SEQ ID NO: 11116 - DNA, 21 bp, Artificial Sequence
  Synthetic
tgcagatatcatctttgctga

SEQ ID NO: 11117 - DNA, 21 bp, Artificial Sequence
  Synthetic
catacctgtcaaaaaccactg

SEQ ID NO: 11118 - DNA, 21 bp, Artificial Sequence
  Synthetic
tcatacctgtcaaaaaccact

SEQ ID NO: 11119 - DNA, 21 bp, Artificial Sequence
  Synthetic
ggcacacaaaattaacaaggc

SEQ ID NO: 11120 - DNA, 21 bp, Artificial Sequence
  Synthetic
tggcacacaaaattaacaagg

SEQ ID NO: 11121 - DNA, 21 bp, Artificial Sequence
  Synthetic
tttgtgtgccacacctgcttc

SEQ ID NO: 11122 - DNA, 21 bp, Artificial Sequence
  Synthetic
tgccacacctgcttcaagagg

SEQ ID NO: 11123 - DNA, 21 bp, Artificial Sequence
  Synthetic
gccacacctgcttcaagaggc

SEQ ID NO: 11124 - DNA, 21 bp, Artificial Sequence
  Synthetic
cacacctgcttcaagaggcag

SEQ ID NO: 11125 - DNA, 21 bp, Artificial Sequence
  Synthetic
cgatggagcttctcctgcctc

SEQ ID NO: 11126 - DNA, 21 bp, Artificial Sequence
  Synthetic
ggcaggagaagctccatcgct

SEQ ID NO: 11127 - DNA, 21 bp, Artificial Sequence
  Synthetic
aacttgcactgcccacagcga

SEQ ID NO: 11128 - DNA, 21 bp, Artificial Sequence
  Synthetic
aaacttgcactgcccacagcg

SEQ ID NO: 11129 - DNA, 21 bp, Artificial Sequence
  Synthetic
ctggcaggtgcggtcgcagta

SEQ ID NO: 11130 - DNA, 21 bp, Artificial Sequence
  Synthetic
cattactgcgaccgcacctgc

SEQ ID NO: 11131 - DNA, 21 bp, Artificial Sequence
  Synthetic
tactgcgaccgcacctgccag

SEQ ID NO: 11132 - DNA, 21 bp, Artificial Sequence
  Synthetic
acctgccagaaggatgcttgg

SEQ ID NO: 11133 - DNA, 21 bp, Artificial Sequence
  Synthetic
aaggatgcttggctgaaccac

SEQ ID NO: 11134 - DNA, 21 bp, Artificial Sequence
  Synthetic
atgcttggctgaaccacaaga

SEQ ID NO: 11135 - DNA, 21 bp, Artificial Sequence
  Synthetic
aagaatgaatgttcggccatc

SEQ ID NO: 11136 - DNA, 21 bp, Artificial Sequence
  Synthetic
aatgttcggccatcaagagat

SEQ ID NO: 11137 - DNA, 21 bp, Artificial Sequence
  Synthetic
atgttcggccatcaagagata

SEQ ID NO: 11138 - DNA, 21 bp, Artificial Sequence
  Synthetic
tgttcggccatcaagagatat

SEQ ID NO: 11139 - DNA, 21 bp, Artificial Sequence
  Synthetic
ccttcccatatctcttgatgg

SEQ ID NO: 11140 - DNA, 21 bp, Artificial Sequence
  Synthetic
agagatatgggaaggtgccca

SEQ ID NO: 11141 - DNA, 21 bp, Artificial Sequence
  Synthetic
agatatgggaaggtgcccaat

SEQ ID NO: 11142 - DNA, 21 bp, Artificial Sequence
  Synthetic
ggtgcccaatgagaacatcag

SEQ ID NO: 11143 - DNA, 21 bp, Artificial Sequence
  Synthetic
tgcccaatgagaacatcaggt

SEQ ID NO: 11144 - DNA, 21 bp, Artificial Sequence
  Synthetic
agctctcacctgatgttctca

SEQ ID NO: 11145 - DNA, 21 bp, Artificial Sequence
  Synthetic
catgatgcgcgccgccagcct

SEQ ID NO: 11146 - DNA, 21 bp, Artificial Sequence
  Synthetic
gctggcggcgcgcatcatgtg

SEQ ID NO: 11147 - DNA, 21 bp, Artificial Sequence
  Synthetic
gcggcgcgcatcatgtggcgg

SEQ ID NO: 11148 - DNA, 21 bp, Artificial Sequence
  Synthetic
cggcgcgcatcatgtggcggg

SEQ ID NO: 11149 - DNA, 21 bp, Artificial Sequence
  Synthetic
gcgcgcatcatgtggcgggtg

SEQ ID NO: 11150 - DNA, 21 bp, Artificial Sequence
  Synthetic
gcgcatcatgtggcgggtgga

SEQ ID NO: 11151 - DNA, 21 bp, Artificial Sequence
  Synthetic
gcatcatgtggcgggtggaga

SEQ ID NO: 11152 - DNA, 21 bp, Artificial Sequence
  Synthetic
ggcgggtggagagagaaggca

SEQ ID NO: 11153 - DNA, 21 bp, Artificial Sequence
  Synthetic
gagagagaaggcaccgggctc

SEQ ID NO: 11154 - DNA, 21 bp, Artificial Sequence
  Synthetic
agagagaaggcaccgggctca

SEQ ID NO: 11155 - DNA, 21 bp, Artificial Sequence
  Synthetic
agagaaggcaccgggctcacg

SEQ ID NO: 11156 - DNA, 21 bp, Artificial Sequence
  Synthetic
acggacaccaggcagccctcc

SEQ ID NO: 11157 - DNA, 21 bp, Artificial Sequence
  Synthetic
acggagggctgcctggtgtcc

SEQ ID NO: 11158 - DNA, 21 bp, Artificial Sequence
  Synthetic
ctggtgtccgtggacgacttg

SEQ ID NO: 11159 - DNA, 21 bp, Artificial Sequence
  Synthetic
acgtggttctgcaagtcgtcc

SEQ ID NO: 11160 - DNA, 21 bp, Artificial Sequence
  Synthetic
gtggacgacttgcagaaccac

SEQ ID NO: 11161 - DNA, 21 bp, Artificial Sequence
  Synthetic
tggacgacttgcagaaccacg

SEQ ID NO: 11162 - DNA, 21 bp, Artificial Sequence
  Synthetic
tgcagaaccacgtggagcact

SEQ ID NO: 11163 - DNA, 21 bp, Artificial Sequence
  Synthetic
gcagaaccacgtggagcactt

SEQ ID NO: 11164 - DNA, 21 bp, Artificial Sequence
  Synthetic
cagaaccacgtggagcacttt

SEQ ID NO: 11165 - DNA, 21 bp, Artificial Sequence
  Synthetic
agaaccacgtggagcactttg

SEQ ID NO: 11166 - DNA, 21 bp, Artificial Sequence
  Synthetic
aaccacgtggagcactttggg

SEQ ID NO: 11167 - DNA, 21 bp, Artificial Sequence
  Synthetic
accacgtggagcactttgggg

SEQ ID NO: 11168 - DNA, 21 bp, Artificial Sequence
  Synthetic
cacgtggagcactttggggag

SEQ ID NO: 11169 - DNA, 21 bp, Artificial Sequence
  Synthetic
acgtggagcactttggggagg

SEQ ID NO: 11170 - DNA, 21 bp, Artificial Sequence
  Synthetic
gagcactttggggaggaggag

SEQ ID NO: 11171 - DNA, 21 bp, Artificial Sequence
  Synthetic
cactttggggaggaggagcag

SEQ ID NO: 11172 - DNA, 21 bp, Artificial Sequence
  Synthetic
ggaggaggagcagaaggacct

SEQ ID NO: 11173 - DNA, 21 bp, Artificial Sequence
  Synthetic
gaggagcagaaggacctgcgg

SEQ ID NO: 11174 - DNA, 21 bp, Artificial Sequence
  Synthetic
cagaaggacctgcgggtggac

SEQ ID NO: 11175 - DNA, 21 bp, Artificial Sequence
  Synthetic
ctctgcggcggccagtactgc

SEQ ID NO: 11176 - DNA, 21 bp, Artificial Sequence
  Synthetic
ttcttgcagtactggccgccg

SEQ ID NO: 11177 - DNA, 21 bp, Artificial Sequence
  Synthetic
atgtgcgagatgtactgcatg

SEQ ID NO: 11178 - DNA, 21 bp, Artificial Sequence
  Synthetic
tgcagtacatctcgcacatct

SEQ ID NO: 11179 - DNA, 21 bp, Artificial Sequence
  Synthetic
gcagtacatctcgcacatctt

SEQ ID NO: 11180 - DNA, 21 bp, Artificial Sequence
  Synthetic
ggcctaccactccgaagatgt

SEQ ID NO: 11181 - DNA, 21 bp, Artificial Sequence
  Synthetic
ggacgcagggggcctaccact

SEQ ID NO: 11182 - DNA, 21 bp, Artificial Sequence
  Synthetic
ctgcaggcctctctgatcact

SEQ ID NO: 11183 - DNA, 21 bp, Artificial Sequence
  Synthetic
gcctgcaggcctctctgatca

SEQ ID NO: 11184 - DNA, 21 bp, Artificial Sequence
  Synthetic
gatcagagaggcctgcaggcc

SEQ ID NO: 11185 - DNA, 21 bp, Artificial Sequence
  Synthetic
ggcgtaggcatcttccccaac

SEQ ID NO: 11186 - DNA, 21 bp, Artificial Sequence
  Synthetic
atcttccccaacctgggcctg

SEQ ID NO: 11187 - DNA, 21 bp, Artificial Sequence
  Synthetic
tggttcaccaggcccaggttg

SEQ ID NO: 11188 - DNA, 21 bp, Artificial Sequence
  Synthetic
atggttcaccaggcccaggtt

SEQ ID NO: 11189 - DNA, 21 bp, Artificial Sequence
  Synthetic
catggttcaccaggcccaggt

SEQ ID NO: 11190 - DNA, 21 bp, Artificial Sequence
  Synthetic
tcatggttcaccaggcccagg

SEQ ID NO: 11191 - DNA, 21 bp, Artificial Sequence
  Synthetic
ttgttaaatatgacagtacag

SEQ ID NO: 11192 - DNA, 21 bp, Artificial Sequence
  Synthetic
tgtcatatttaacaatggcaa

SEQ ID NO: 11193 - DNA, 21 bp, Artificial Sequence
  Synthetic
ttgtctttcagtcatgaggca

SEQ ID NO: 11194 - DNA, 21 bp, Artificial Sequence
  Synthetic
atggatttcactgcctcatga

SEQ ID NO: 11195 - DNA, 21 bp, Artificial Sequence
  Synthetic
aaatccatgtttcatacccag

SEQ ID NO: 11196 - DNA, 21 bp, Artificial Sequence
  Synthetic
cacctcatctgggtatgaaac

SEQ ID NO: 11197 - DNA, 21 bp, Artificial Sequence
  Synthetic
catgtttcatacccagatgag

SEQ ID NO: 11198 - DNA, 21 bp, Artificial Sequence
  Synthetic
actgacccacctcatctgggt

SEQ ID NO: 11199 - DNA, 21 bp, Artificial Sequence
  Synthetic
gaaaggactgacccacctcat

SEQ ID NO: 11200 - DNA, 21 bp, Artificial Sequence
  Synthetic
accctgcttcagaattgagct

SEQ ID NO: 11201 - DNA, 21 bp, Artificial Sequence
  Synthetic
cctagggcccggagctcaatt

SEQ ID NO: 11202 - DNA, 21 bp, Artificial Sequence
  Synthetic
tctgagatcttgcctagggcc

SEQ ID NO: 11203 - DNA, 21 bp, Artificial Sequence
  Synthetic
ttctgagatcttgcctagggc

SEQ ID NO: 11204 - DNA, 21 bp, Artificial Sequence
  Synthetic
tccgggccctaggcaagatct

SEQ ID NO: 11205 - DNA, 21 bp, Artificial Sequence
  Synthetic
gggccctaggcaagatctcag

SEQ ID NO: 11206 - DNA, 21 bp, Artificial Sequence
  Synthetic
ggccctaggcaagatctcaga

SEQ ID NO: 11207 - DNA, 21 bp, Artificial Sequence
  Synthetic
ctctccttctgagatcttgcc

SEQ ID NO: 11208 - DNA, 21 bp, Artificial Sequence
  Synthetic
ccctaggcaagatctcagaag

SEQ ID NO: 11209 - DNA, 21 bp, Artificial Sequence
  Synthetic
ctaggcaagatctcagaagga

SEQ ID NO: 11210 - DNA, 21 bp, Artificial Sequence
  Synthetic
taggcaagatctcagaaggag

SEQ ID NO: 11211 - DNA, 21 bp, Artificial Sequence
  Synthetic
acacagtcagctcctctcctt

SEQ ID NO: 11212 - DNA, 21 bp, Artificial Sequence
  Synthetic
ttctgcagcccgggcaaaggc

SEQ ID NO: 11213 - DNA, 21 bp, Artificial Sequence
  Synthetic
tctgcagcccgggcaaaggcc

SEQ ID NO: 11214 - DNA, 21 bp, Artificial Sequence
  Synthetic
cccgggcaaaggccgggggct

SEQ ID NO: 11215 - DNA, 21 bp, Artificial Sequence
  Synthetic
cgggctctgcagcccttccag

SEQ ID NO: 11216 - DNA, 21 bp, Artificial Sequence
  Synthetic
gggctctgcagcccttccagg

SEQ ID NO: 11217 - DNA, 21 bp, Artificial Sequence
  Synthetic
ggctctgcagcccttccaggt

SEQ ID NO: 11218 - DNA, 21 bp, Artificial Sequence
  Synthetic
gctctgcagcccttccaggtg

SEQ ID NO: 11219 - DNA, 21 bp, Artificial Sequence
  Synthetic
gtcccccacctggaagggctg

SEQ ID NO: 11220 - DNA, 21 bp, Artificial Sequence
  Synthetic
aacagcaagtcccccacctgg

SEQ ID NO: 11221 - DNA, 21 bp, Artificial Sequence
  Synthetic
gagaacagcaagtcccccacc

SEQ ID NO: 11222 - DNA, 21 bp, Artificial Sequence
  Synthetic
ggagaacagcaagtcccccac

SEQ ID NO: 11223 - DNA, 21 bp, Artificial Sequence
  Synthetic
acgtaggcataggccgggcag

SEQ ID NO: 11224 - DNA, 21 bp, Artificial Sequence
  Synthetic
gcacgtaggcataggccgggc

SEQ ID NO: 11225 - DNA, 21 bp, Artificial Sequence
  Synthetic
agcacgtaggcataggccggg

SEQ ID NO: 11226 - DNA, 21 bp, Artificial Sequence
  Synthetic
ccgtgagcacgtaggcatagg

SEQ ID NO: 11227 - DNA, 21 bp, Artificial Sequence
  Synthetic
atgcctacgtgctcacggtca

SEQ ID NO: 11228 - DNA, 21 bp, Artificial Sequence
  Synthetic
ctacgtgctcacggtcaacga

SEQ ID NO: 11229 - DNA, 21 bp, Artificial Sequence
  Synthetic
tacgtgctcacggtcaacgag

SEQ ID NO: 11230 - DNA, 21 bp, Artificial Sequence
  Synthetic
tggttgccccgctcgttgacc

SEQ ID NO: 11231 - DNA, 21 bp, Artificial Sequence
  Synthetic
tcaacgagcggggcaaccact

SEQ ID NO: 11232 - DNA, 21 bp, Artificial Sequence
  Synthetic
tgcgagtactgcttcaccagg

SEQ ID NO: 11233 - DNA, 21 bp, Artificial Sequence
  Synthetic
ccgccgccgccgccctacctg

SEQ ID NO: 11234 - DNA, 21 bp, Artificial Sequence
  Synthetic
ggaaagaaggattgtccaaat

SEQ ID NO: 11235 - DNA, 21 bp, Artificial Sequence
  Synthetic
gaaagaaggattgtccaaatg

SEQ ID NO: 11236 - DNA, 21 bp, Artificial Sequence
  Synthetic
gcctgcttgcatcttccacat

SEQ ID NO: 11237 - DNA, 21 bp, Artificial Sequence
  Synthetic
gcatgggccaatcttctttct

SEQ ID NO: 11238 - DNA, 21 bp, Artificial Sequence
  Synthetic
tgcatgggccaatcttctttc

SEQ ID NO: 11239 - DNA, 21 bp, Artificial Sequence
  Synthetic
gtgcatgggccaatcttcttt

SEQ ID NO: 11240 - DNA, 21 bp, Artificial Sequence
  Synthetic
gaagattggcccatgcacaag

SEQ ID NO: 11241 - DNA, 21 bp, Artificial Sequence
  Synthetic
aagattggcccatgcacaagc

SEQ ID NO: 11242 - DNA, 21 bp, Artificial Sequence
  Synthetic
ggagaacattccagcttgtgc

SEQ ID NO: 11243 - DNA, 21 bp, Artificial Sequence
  Synthetic
aatgttctcccatggttgttt

SEQ ID NO: 11244 - DNA, 21 bp, Artificial Sequence
  Synthetic
tttccccaaaaacaaccatgg

SEQ ID NO: 11245 - DNA, 21 bp, Artificial Sequence
  Synthetic
tttggggaaaactggaatccc

SEQ ID NO: 11246 - DNA, 21 bp, Artificial Sequence
  Synthetic
ttggggaaaactggaatccct

SEQ ID NO: 11247 - DNA, 21 bp, Artificial Sequence
  Synthetic
ctgttagtcttacagtctccg

SEQ ID NO: 11248 - DNA, 21 bp, Artificial Sequence
  Synthetic
gctgttagtcttacagtctcc

SEQ ID NO: 11249 - DNA, 21 bp, Artificial Sequence
  Synthetic
ttgctgttagtcttacagtct

SEQ ID NO: 11250 - DNA, 21 bp, Artificial Sequence
  Synthetic
ggagactgtaagactaacagc

SEQ ID NO: 11251 - DNA, 21 bp, Artificial Sequence
  Synthetic
gcaaggattctggccaaacag

SEQ ID NO: 11252 - DNA, 21 bp, Artificial Sequence
  Synthetic
aaggattctggccaaacaggt

SEQ ID NO: 11253 - DNA, 21 bp, Artificial Sequence
  Synthetic
ccatttcctcacctgtttggc

SEQ ID NO: 11254 - DNA, 21 bp, Artificial Sequence
  Synthetic
ccaattgctagaaaatccacc

SEQ ID NO: 11255 - DNA, 21 bp, Artificial Sequence
  Synthetic
aattgctagaaaatccaccca

SEQ ID NO: 11256 - DNA, 21 bp, Artificial Sequence
  Synthetic
ttgctagaaaatccacccaga

SEQ ID NO: 11257 - DNA, 21 bp, Artificial Sequence
  Synthetic
atccacccagagagaacacct

SEQ ID NO: 11258 - DNA, 21 bp, Artificial Sequence
  Synthetic
ttccgaaggtgttctctctgg

SEQ ID NO: 11259 - DNA, 21 bp, Artificial Sequence
  Synthetic
tccacccagagagaacacctt

SEQ ID NO: 11260 - DNA, 21 bp, Artificial Sequence
  Synthetic
ccttcggaaaaattgttagct

SEQ ID NO: 11261 - DNA, 21 bp, Artificial Sequence
  Synthetic
tcggaaaaattgttagctgtg

SEQ ID NO: 11262 - DNA, 21 bp, Artificial Sequence
  Synthetic
cggaaaaattgttagctgtga

SEQ ID NO: 11263 - DNA, 21 bp, Artificial Sequence
  Synthetic
aattgttagctgtgaaggagt

SEQ ID NO: 11264 - DNA, 21 bp, Artificial Sequence
  Synthetic
ttgtctaacttatccagatct

SEQ ID NO: 11265 - DNA, 21 bp, Artificial Sequence
  Synthetic
cagatctggataagttagaca

SEQ ID NO: 11266 - DNA, 21 bp, Artificial Sequence
  Synthetic
gatctggataagttagacaat

SEQ ID NO: 11267 - DNA, 21 bp, Artificial Sequence
  Synthetic
ctggataagttagacaatgag

SEQ ID NO: 11268 - DNA, 21 bp, Artificial Sequence
  Synthetic
gataagttagacaatgagaag

SEQ ID NO: 11269 - DNA, 21 bp, Artificial Sequence
  Synthetic
aatgagaagaaggatttgatt

SEQ ID NO: 11270 - DNA, 21 bp, Artificial Sequence
  Synthetic
atggagagcagctatgtcact

SEQ ID NO: 11271 - DNA, 21 bp, Artificial Sequence
  Synthetic
atgcttggagtaaaagtgatg

SEQ ID NO: 11272 - DNA, 21 bp, Artificial Sequence
  Synthetic
agatgcttggagtaaaagtga

SEQ ID NO: 11273 - DNA, 21 bp, Artificial Sequence
  Synthetic
gagatgcttggagtaaaagtg

SEQ ID NO: 11274 - DNA, 21 bp, Artificial Sequence
  Synthetic
tgtcagggaatccgagatgct

SEQ ID NO: 11275 - DNA, 21 bp, Artificial Sequence
  Synthetic
ttgtcagggaatccgagatgc

SEQ ID NO: 11276 - DNA, 21 bp, Artificial Sequence
  Synthetic
aggctatcattgtcagggaat

SEQ ID NO: 11277 - DNA, 21 bp, Artificial Sequence
  Synthetic
actacgaggctatcattgtca

SEQ ID NO: 11278 - DNA, 21 bp, Artificial Sequence
  Synthetic
tactacgaggctatcattgtc

SEQ ID NO: 11279 - DNA, 21 bp, Artificial Sequence
  Synthetic
gtactacgaggctatcattgt

SEQ ID NO: 11280 - DNA, 21 bp, Artificial Sequence
  Synthetic
cttacctgtgcaaagagtact

SEQ ID NO: 11281 - DNA, 21 bp, Artificial Sequence
  Synthetic
cgtagtactctttgcacaggt

SEQ ID NO: 11282 - DNA, 21 bp, Artificial Sequence
  Synthetic
gccagcgtccttacctgtgca

SEQ ID NO: 11283 - DNA, 21 bp, Artificial Sequence
  Synthetic
ttaactgtaatggcttcacaa

SEQ ID NO: 11284 - DNA, 21 bp, Artificial Sequence
  Synthetic
gtaatggcttcacaattgaag

SEQ ID NO: 11285 - DNA, 21 bp, Artificial Sequence
  Synthetic
atggcttcacaattgaagatg

SEQ ID NO: 11286 - DNA, 21 bp, Artificial Sequence
  Synthetic
gaaagttcttcatcttcaatt

SEQ ID NO: 11287 - DNA, 21 bp, Artificial Sequence
  Synthetic
gaagatgaagaactttctcat

SEQ ID NO: 11288 - DNA, 21 bp, Artificial Sequence
  Synthetic
aagatgaagaactttctcatt

SEQ ID NO: 11289 - DNA, 21 bp, Artificial Sequence
  Synthetic
gaaatatcgctgatcccaaat

SEQ ID NO: 11290 - DNA, 21 bp, Artificial Sequence
  Synthetic
aggaaatatcgctgatcccaa

SEQ ID NO: 11291 - DNA, 21 bp, Artificial Sequence
  Synthetic
atttgggatcagcgatatttc

SEQ ID NO: 11292 - DNA, 21 bp, Artificial Sequence
  Synthetic
ctgactgacagtgttgcattg

SEQ ID NO: 11293 - DNA, 21 bp, Artificial Sequence
  Synthetic
ctttgtaggtcacaatgacat

SEQ ID NO: 11294 - DNA, 21 bp, Artificial Sequence
  Synthetic
cctttgtaggtcacaatgaca

SEQ ID NO: 11295 - DNA, 21 bp, Artificial Sequence
  Synthetic
ccaatgtcattgtgacctaca

SEQ ID NO: 11296 - DNA, 21 bp, Artificial Sequence
  Synthetic
caatgtcattgtgacctacaa

SEQ ID NO: 11297 - DNA, 21 bp, Artificial Sequence
  Synthetic
tgacctacaaagggaccctgg

SEQ ID NO: 11298 - DNA, 21 bp, Artificial Sequence
  Synthetic
caaagggaccctggcagaagt

SEQ ID NO: 11299 - DNA, 21 bp, Artificial Sequence
  Synthetic
ctgtacagctctgacttctgc

SEQ ID NO: 11300 - DNA, 21 bp, Artificial Sequence
  Synthetic
ctggcagaagtcagagctgta

SEQ ID NO: 11301 - DNA, 21 bp, Artificial Sequence
  Synthetic
tggcagaagtcagagctgtac

SEQ ID NO: 11302 - DNA, 21 bp, Artificial Sequence
  Synthetic
agagctgtacaggaaatcaag

SEQ ID NO: 11303 - DNA, 21 bp, Artificial Sequence
  Synthetic
gagctgtacaggaaatcaagc

SEQ ID NO: 11304 - DNA, 21 bp, Artificial Sequence
  Synthetic
agctgtacaggaaatcaagcc

SEQ ID NO: 11305 - DNA, 21 bp, Artificial Sequence
  Synthetic
ctgtacaggaaatcaagccgg

SEQ ID NO: 11306 - DNA, 21 bp, Artificial Sequence
  Synthetic
gtacaggaaatcaagccggga

SEQ ID NO: 11307 - DNA, 21 bp, Artificial Sequence
  Synthetic
tacaggaaatcaagccgggag

SEQ ID NO: 11308 - DNA, 21 bp, Artificial Sequence
  Synthetic
gaaatcaagccgggagaggag

SEQ ID NO: 11309 - DNA, 21 bp, Artificial Sequence
  Synthetic
caatatagctggtaaaaacct

SEQ ID NO: 11310 - DNA, 21 bp, Artificial Sequence
  Synthetic
tcgcaaccgccaagaggggaa

SEQ ID NO: 11311 - DNA, 21 bp, Artificial Sequence
  Synthetic
gcgccgtgaccccgctgcgcc

SEQ ID NO: 11312 - DNA, 21 bp, Artificial Sequence
  Synthetic
cgccgtgaccccgctgcgccc

SEQ ID NO: 11313 - DNA, 21 bp, Artificial Sequence
  Synthetic
ccgtgaccccgctgcgccccg

SEQ ID NO: 11314 - DNA, 21 bp, Artificial Sequence
  Synthetic
gagtagctctccggggcgcag

SEQ ID NO: 11315 - DNA, 21 bp, Artificial Sequence
  Synthetic
agagtagctctccggggcgca

SEQ ID NO: 11316 - DNA, 21 bp, Artificial Sequence
  Synthetic
ccgagcggaagagtagctctc

SEQ ID NO: 11317 - DNA, 21 bp, Artificial Sequence
  Synthetic
tccgagcggaagagtagctct

SEQ ID NO: 11318 - DNA, 21 bp, Artificial Sequence
  Synthetic
cccggagagctactcttccgc

SEQ ID NO: 11319 - DNA, 21 bp, Artificial Sequence
  Synthetic
tacgccaagggatccgagcgg

SEQ ID NO: 11320 - DNA, 21 bp, Artificial Sequence
  Synthetic
gtgtacgccaagggatccgag

SEQ ID NO: 11321 - DNA, 21 bp, Artificial Sequence
  Synthetic
cgtgtacgccaagggatccga

SEQ ID NO: 11322 - DNA, 21 bp, Artificial Sequence
  Synthetic
acaccgtgtacgccaagggat

SEQ ID NO: 11323 - DNA, 21 bp, Artificial Sequence
  Synthetic
ccttgcacaccgtgtacgcca

SEQ ID NO: 11324 - DNA, 21 bp, Artificial Sequence
  Synthetic
cccttgcacaccgtgtacgcc

SEQ ID NO: 11325 - DNA, 21 bp, Artificial Sequence
  Synthetic
cccttggcgtacacggtgtgc

SEQ ID NO: 11326 - DNA, 21 bp, Artificial Sequence
  Synthetic
ccttggcgtacacggtgtgca

SEQ ID NO: 11327 - DNA, 21 bp, Artificial Sequence
  Synthetic
cttggcgtacacggtgtgcaa

SEQ ID NO: 11328 - DNA, 21 bp, Artificial Sequence
  Synthetic
ttggcgtacacggtgtgcaag

SEQ ID NO: 11329 - DNA, 21 bp, Artificial Sequence
  Synthetic
tcgtctgcgaccgctgccttc

SEQ ID NO: 11330 - DNA, 21 bp, Artificial Sequence
  Synthetic
agtatttggcgacgcggcact

SEQ ID NO: 11331 - DNA, 21 bp, Artificial Sequence
  Synthetic
acagtatttggcgacgcggca

SEQ ID NO: 11332 - DNA, 21 bp, Artificial Sequence
  Synthetic
aaaagcttggccagaccacaa

SEQ ID NO: 11333 - DNA, 21 bp, Artificial Sequence
  Synthetic
aaagcttggccagaccacaag

SEQ ID NO: 11334 - DNA, 21 bp, Artificial Sequence
  Synthetic
aagcttggccagaccacaagc

SEQ ID NO: 11335 - DNA, 21 bp, Artificial Sequence
  Synthetic
cgaacggagtctggaggatat

SEQ ID NO: 11336 - DNA, 21 bp, Artificial Sequence
  Synthetic
caagaagtcgaacggagtctg

SEQ ID NO: 11337 - DNA, 21 bp, Artificial Sequence
  Synthetic
gccaagaagtcgaacggagtc

SEQ ID NO: 11338 - DNA, 21 bp, Artificial Sequence
  Synthetic
tgccaagaagtcgaacggagt

SEQ ID NO: 11339 - DNA, 21 bp, Artificial Sequence
  Synthetic
agactccgttcgacttcttgg

SEQ ID NO: 11340 - DNA, 21 bp, Artificial Sequence
  Synthetic
caactctgccaagaagtcgaa

SEQ ID NO: 11341 - DNA, 21 bp, Artificial Sequence
  Synthetic
acaactctgccaagaagtcga

SEQ ID NO: 11342 - DNA, 21 bp, Artificial Sequence
  Synthetic
gaagacaactctgccaagaag

SEQ ID NO: 11343 - DNA, 21 bp, Artificial Sequence
  Synthetic
aagtttgaagacaactctgcc

SEQ ID NO: 11344 - DNA, 21 bp, Artificial Sequence
  Synthetic
ggcagagttgtcttcaaactt

SEQ ID NO: 11345 - DNA, 21 bp, Artificial Sequence
  Synthetic
ctgaaggtgctccatccatct

SEQ ID NO: 11346 - DNA, 21 bp, Artificial Sequence
  Synthetic
cacagatggatggagcacctt

SEQ ID NO: 11347 - DNA, 21 bp, Artificial Sequence
  Synthetic
tggatggagcaccttcagaat

SEQ ID NO: 11348 - DNA, 21 bp, Artificial Sequence
  Synthetic
gatggagcaccttcagaatca

SEQ ID NO: 11349 - DNA, 21 bp, Artificial Sequence
  Synthetic
atgagtaaagcttctctgatt

SEQ ID NO: 11350 - DNA, 21 bp, Artificial Sequence
  Synthetic
tacttgactccagatcataaa

SEQ ID NO: 11351 - DNA, 21 bp, Artificial Sequence
  Synthetic
aaaaagatattaacaaactga

SEQ ID NO: 11352 - DNA, 21 bp, Artificial Sequence
  Synthetic
attaacaaactgactgaagat

SEQ ID NO: 11353 - DNA, 21 bp, Artificial Sequence
  Synthetic
acaaactgactgaagataaga

SEQ ID NO: 11354 - DNA, 21 bp, Artificial Sequence
  Synthetic
aaactgactgaagataagaaa

SEQ ID NO: 11355 - DNA, 21 bp, Artificial Sequence
  Synthetic
tgaaatgtcattacgagttgc

SEQ ID NO: 11356 - DNA, 21 bp, Artificial Sequence
  Synthetic
atgaaatgttgaaatgtcatt

SEQ ID NO: 11357 - DNA, 21 bp, Artificial Sequence
  Synthetic
gtaatgacatttcaacatttc

SEQ ID NO: 11358 - DNA, 21 bp, Artificial Sequence
  Synthetic
aatgacatttcaacatttcat

SEQ ID NO: 11359 - DNA, 21 bp, Artificial Sequence
  Synthetic
tgacatttcaacatttcatga

SEQ ID NO: 11360 - DNA, 21 bp, Artificial Sequence
  Synthetic
catttcaacatttcatgagag

SEQ ID NO: 11361 - DNA, 21 bp, Artificial Sequence
  Synthetic
tatttcttctctcatgaaatg

SEQ ID NO: 11362 - DNA, 21 bp, Artificial Sequence
  Synthetic
catttcatgagagaagaaata

SEQ ID NO: 11363 - DNA, 21 bp, Artificial Sequence
  Synthetic
gcatcctgtatttcttctctc

SEQ ID NO: 11364 - DNA, 21 bp, Artificial Sequence
  Synthetic
ggtcaaaggcaggtggcagct

SEQ ID NO: 11365 - DNA, 21 bp, Artificial Sequence
  Synthetic
aaggtcaaaggcaggtggcag

SEQ ID NO: 11366 - DNA, 21 bp, Artificial Sequence
  Synthetic
tgccacctgcctttgaccttt

SEQ ID NO: 11367 - DNA, 21 bp, Artificial Sequence
  Synthetic
aactctttcaccatctgtaat

SEQ ID NO: 11368 - DNA, 21 bp, Artificial Sequence
  Synthetic
actctttcaccatctgtaatg

SEQ ID NO: 11369 - DNA, 21 bp, Artificial Sequence
  Synthetic
tctccgcattacagatggtga

SEQ ID NO: 11370 - DNA, 21 bp, Artificial Sequence
  Synthetic
tgcatctccgcattacagatg

SEQ ID NO: 11371 - DNA, 21 bp, Artificial Sequence
  Synthetic
accatctgtaatgcggagatg

SEQ ID NO: 11372 - DNA, 21 bp, Artificial Sequence
  Synthetic
ccatctgtaatgcggagatgc

SEQ ID NO: 11373 - DNA, 21 bp, Artificial Sequence
  Synthetic
tgtgattgagcaaagagatac

SEQ ID NO: 11374 - DNA, 21 bp, Artificial Sequence
  Synthetic
ctgtgattgagcaaagagata

SEQ ID NO: 11375 - DNA, 21 bp, Artificial Sequence
  Synthetic
ggtcacagctgtgattgagca

SEQ ID NO: 11376 - DNA, 21 bp, Artificial Sequence
  Synthetic
cagttggggtcacagctgtga

SEQ ID NO: 11377 - DNA, 21 bp, Artificial Sequence
  Synthetic
cattgaacacaatcgaacagt

SEQ ID NO: 11378 - DNA, 21 bp, Artificial Sequence
  Synthetic
ccattgaacacaatcgaacag

SEQ ID NO: 11379 - DNA, 21 bp, Artificial Sequence
  Synthetic
ccaactgttcgattgtgttca

SEQ ID NO: 11380 - DNA, 21 bp, Artificial Sequence
  Synthetic
ggtggggcccattgaacacaa

SEQ ID NO: 11381 - DNA, 21 bp, Artificial Sequence
  Synthetic
cgcagtaagaggtggggccca

SEQ ID NO: 11382 - DNA, 21 bp, Artificial Sequence
  Synthetic
caatgggccccacctcttact

SEQ ID NO: 11383 - DNA, 21 bp, Artificial Sequence
  Synthetic
cggactgctcgcagtaagagg

SEQ ID NO: 11384 - DNA, 21 bp, Artificial Sequence
  Synthetic
tcggactgctcgcagtaagag

SEQ ID NO: 11385 - DNA, 21 bp, Artificial Sequence
  Synthetic
ccacctcttactgcgagcagt

SEQ ID NO: 11386 - DNA, 21 bp, Artificial Sequence
  Synthetic
atgtctcggactgctcgcagt

SEQ ID NO: 11387 - DNA, 21 bp, Artificial Sequence
  Synthetic
tactgcgagcagtccgagaca

SEQ ID NO: 11388 - DNA, 21 bp, Artificial Sequence
  Synthetic
cgagcagtccgagacatcgag

SEQ ID NO: 11389 - DNA, 21 bp, Artificial Sequence
  Synthetic
gagcagtccgagacatcgagg

SEQ ID NO: 11390 - DNA, 21 bp, Artificial Sequence
  Synthetic
agcagtccgagacatcgaggt

SEQ ID NO: 11391 - DNA, 21 bp, Artificial Sequence
  Synthetic
cagtccgagacatcgaggtgg

SEQ ID NO: 11392 - DNA, 21 bp, Artificial Sequence
  Synthetic
gtccgagacatcgaggtggga

SEQ ID NO: 11393 - DNA, 21 bp, Artificial Sequence
  Synthetic
ctcctctcccacctcgatgtc

SEQ ID NO: 11394 - DNA, 21 bp, Artificial Sequence
  Synthetic
tccgagacatcgaggtgggag

SEQ ID NO: 11395 - DNA, 21 bp, Artificial Sequence
  Synthetic
catcgaggtgggagaggaggt

SEQ ID NO: 11396 - DNA, 21 bp, Artificial Sequence
  Synthetic
gcacagctcaccatctgctac

SEQ ID NO: 11397 - DNA, 21 bp, Artificial Sequence
  Synthetic
agcatatccaggtagcagatg

SEQ ID NO: 11398 - DNA, 21 bp, Artificial Sequence
  Synthetic
acctggtgacaaaggcaatag

SEQ ID NO: 11399 - DNA, 21 bp, Artificial Sequence
  Synthetic
gcctttgtcaccaggtctcct

SEQ ID NO: 11400 - DNA, 21 bp, Artificial Sequence
  Synthetic
cctttgtcaccaggtctccta

SEQ ID NO: 11401 - DNA, 21 bp, Artificial Sequence
  Synthetic
tttgtcaccaggtctcctatg

SEQ ID NO: 11402 - DNA, 21 bp, Artificial Sequence
  Synthetic
cacagccaatcatctctccat

SEQ ID NO: 11403 - DNA, 21 bp, Artificial Sequence
  Synthetic
tcacagccaatcatctctcca

SEQ ID NO: 11404 - DNA, 21 bp, Artificial Sequence
  Synthetic
attggctgtgacaaccctgat

SEQ ID NO: 11405 - DNA, 21 bp, Artificial Sequence
  Synthetic
tggctgtgacaaccctgatgt

SEQ ID NO: 11406 - DNA, 21 bp, Artificial Sequence
  Synthetic
tcttcctcttccagtgttcca

SEQ ID NO: 11407 - DNA, 21 bp, Artificial Sequence
  Synthetic
tggaaccactcaatggaacac

SEQ ID NO: 11408 - DNA, 21 bp, Artificial Sequence
  Synthetic
atggaaccactcaatggaaca

SEQ ID NO: 11409 - DNA, 21 bp, Artificial Sequence
  Synthetic
aggcaaaatggaaccactcaa

SEQ ID NO: 11410 - DNA, 21 bp, Artificial Sequence
  Synthetic
caggcaaaatggaaccactca

SEQ ID NO: 11411 - DNA, 21 bp, Artificial Sequence
  Synthetic
gtcagccccacacaggcaaaa

SEQ ID NO: 11412 - DNA, 21 bp, Artificial Sequence
  Synthetic
tgtcagccccacacaggcaaa

SEQ ID NO: 11413 - DNA, 21 bp, Artificial Sequence
  Synthetic
tgtggggctgacaaccaagcc

SEQ ID NO: 11414 - DNA, 21 bp, Artificial Sequence
  Synthetic
gtggggctgacaaccaagcct

SEQ ID NO: 11415 - DNA, 21 bp, Artificial Sequence
  Synthetic
tggggctgacaaccaagcctc

SEQ ID NO: 11416 - DNA, 21 bp, Artificial Sequence
  Synthetic
ggggctgacaaccaagcctcg

SEQ ID NO: 11417 - DNA, 21 bp, Artificial Sequence
  Synthetic
gggctgacaaccaagcctcgg

SEQ ID NO: 11418 - DNA, 21 bp, Artificial Sequence
  Synthetic
tcctgccacttaccatttccc

SEQ ID NO: 11419 - DNA, 21 bp, Artificial Sequence
  Synthetic
tgggagcagcgtgggcaaaac

SEQ ID NO: 11420 - DNA, 21 bp, Artificial Sequence
  Synthetic
ttgcccacgctgctcccaaga

SEQ ID NO: 11421 - DNA, 21 bp, Artificial Sequence
  Synthetic
tcttccgttcttgggagcagc

SEQ ID NO: 11422 - DNA, 21 bp, Artificial Sequence
  Synthetic
gagatggctgcggggatgtat

SEQ ID NO: 11423 - DNA, 21 bp, Artificial Sequence
  Synthetic
agatggctgcggggatgtatt

SEQ ID NO: 11424 - DNA, 21 bp, Artificial Sequence
  Synthetic
gggatgtatttggaacattat

SEQ ID NO: 11425 - DNA, 21 bp, Artificial Sequence
  Synthetic
ttggaacattatctggacagt

SEQ ID NO: 11426 - DNA, 21 bp, Artificial Sequence
  Synthetic
taggtattgaaaaccttccct

SEQ ID NO: 11427 - DNA, 21 bp, Artificial Sequence
  Synthetic
gaaaaccttccctttgaatta

SEQ ID NO: 11428 - DNA, 21 bp, Artificial Sequence
  Synthetic
aaaccttccctttgaattaca

SEQ ID NO: 11429 - DNA, 21 bp, Artificial Sequence
  Synthetic
aaagtttctctgtaattcaaa

SEQ ID NO: 11430 - DNA, 21 bp, Artificial Sequence
  Synthetic
gaaagtttctctgtaattcaa

SEQ ID NO: 11431 - DNA, 21 bp, Artificial Sequence
  Synthetic
tgaaagtttctctgtaattca

SEQ ID NO: 11432 - DNA, 21 bp, Artificial Sequence
  Synthetic
ttacagagaaactttcagctc

SEQ ID NO: 11433 - DNA, 21 bp, Artificial Sequence
  Synthetic
acagagaaactttcagctcat

SEQ ID NO: 11434 - DNA, 21 bp, Artificial Sequence
  Synthetic
cagagaaactttcagctcatg

SEQ ID NO: 11435 - DNA, 21 bp, Artificial Sequence
  Synthetic
ttggtctaggtccctcatgag

SEQ ID NO: 11436 - DNA, 21 bp, Artificial Sequence
  Synthetic
gctcatgagggacctagacca

SEQ ID NO: 11437 - DNA, 21 bp, Artificial Sequence
  Synthetic
gttctttggtctaggtccctc

SEQ ID NO: 11438 - DNA, 21 bp, Artificial Sequence
  Synthetic
tgagggacctagaccaaagaa

SEQ ID NO: 11439 - DNA, 21 bp, Artificial Sequence
  Synthetic
agggacctagaccaaagaaca

SEQ ID NO: 11440 - DNA, 21 bp, Artificial Sequence
  Synthetic
tctctgttgtagacctgaagg

SEQ ID NO: 11441 - DNA, 21 bp, Artificial Sequence
  Synthetic
ctgaaattgacaagttggcca

SEQ ID NO: 11442 - DNA, 21 bp, Artificial Sequence
  Synthetic
gacaagttggccactgagtat

SEQ ID NO: 11443 - DNA, 21 bp, Artificial Sequence
  Synthetic
tatatgagtagtgcccgcagc

SEQ ID NO: 11444 - DNA, 21 bp, Artificial Sequence
  Synthetic
gtagtgcccgcagcctgagct

SEQ ID NO: 11445 - DNA, 21 bp, Artificial Sequence
  Synthetic
agtgcccgcagcctgagctcc

SEQ ID NO: 11446 - DNA, 21 bp, Artificial Sequence
  Synthetic
gtgcccgcagcctgagctccg

SEQ ID NO: 11447 - DNA, 21 bp, Artificial Sequence
  Synthetic
ttggcccttctcaaacagatc

SEQ ID NO: 11448 - DNA, 21 bp, Artificial Sequence
  Synthetic
tggcccttctcaaacagatcc

SEQ ID NO: 11449 - DNA, 21 bp, Artificial Sequence
  Synthetic
ggcttcctggatctgtttgag

SEQ ID NO: 11450 - DNA, 21 bp, Artificial Sequence
  Synthetic
ataggcttcctggatctgttt

SEQ ID NO: 11451 - DNA, 21 bp, Artificial Sequence
  Synthetic
ccataggcttcctggatctgt

SEQ ID NO: 11452 - DNA, 21 bp, Artificial Sequence
  Synthetic
cttgcacttgccataggcttc

SEQ ID NO: 11453 - DNA, 21 bp, Artificial Sequence
  Synthetic
caggaagcctatggcaagtgc

SEQ ID NO: 11454 - DNA, 21 bp, Artificial Sequence
  Synthetic
aggaagcctatggcaagtgca

SEQ ID NO: 11455 - DNA, 21 bp, Artificial Sequence
  Synthetic
tgcagcttgccatgcagacct

SEQ ID NO: 11456 - DNA, 21 bp, Artificial Sequence
  Synthetic
ccgccgaatgtgtttgtccac

SEQ ID NO: 11457 - DNA, 21 bp, Artificial Sequence
  Synthetic
gtggacaaacacattcggcgg

SEQ ID NO: 11458 - DNA, 21 bp, Artificial Sequence
  Synthetic
ggccaggtctgtgtccagccg

SEQ ID NO: 11459 - DNA, 21 bp, Artificial Sequence
  Synthetic
tggacacagacctggcccgtt

SEQ ID NO: 11460 - DNA, 21 bp, Artificial Sequence
  Synthetic
ctccttgagatcagcctcaaa

SEQ ID NO: 11461 - DNA, 21 bp, Artificial Sequence
  Synthetic
acctggtggcacaggcagtac

SEQ ID NO: 11462 - DNA, 21 bp, Artificial Sequence
  Synthetic
gcctgtgccaccaggtctcct

SEQ ID NO: 11463 - DNA, 21 bp, Artificial Sequence
  Synthetic
cctgtgccaccaggtctccta

SEQ ID NO: 11464 - DNA, 21 bp, Artificial Sequence
  Synthetic
ctgtgccaccaggtctcctat

SEQ ID NO: 11465 - DNA, 21 bp, Artificial Sequence
  Synthetic
tgtgccaccaggtctcctatg

SEQ ID NO: 11466 - DNA, 21 bp, Artificial Sequence
  Synthetic
cacagccaatcatctccccat

SEQ ID NO: 11467 - DNA, 21 bp, Artificial Sequence
  Synthetic
tcacagccaatcatctcccca

SEQ ID NO: 11468 - DNA, 21 bp, Artificial Sequence
  Synthetic
attggctgtgacaatccagac

SEQ ID NO: 11469 - DNA, 21 bp, Artificial Sequence
  Synthetic
cctttactttgcagtgtccaa

SEQ ID NO: 11470 - DNA, 21 bp, Artificial Sequence
  Synthetic
aggcaaagtgaaaccactcaa

SEQ ID NO: 11471 - DNA, 21 bp, Artificial Sequence
  Synthetic
gagtggtttcactttgcctgc

SEQ ID NO: 11472 - DNA, 21 bp, Artificial Sequence
  Synthetic
ggtaaggtccacgcaggcaaa

SEQ ID NO: 11473 - DNA, 21 bp, Artificial Sequence
  Synthetic
tttgcctgcgtggaccttacc

SEQ ID NO: 11474 - DNA, 21 bp, Artificial Sequence
  Synthetic
tggaccttaccacgaaaccca

SEQ ID NO: 11475 - DNA, 21 bp, Artificial Sequence
  Synthetic
ggaccttaccacgaaacccaa

SEQ ID NO: 11476 - DNA, 21 bp, Artificial Sequence
  Synthetic
cacgaaacccaaaggaaaatg

SEQ ID NO: 11477 - DNA, 21 bp, Artificial Sequence
  Synthetic
aggttctgtccacggtgtgtc

SEQ ID NO: 11478 - DNA, 21 bp, Artificial Sequence
  Synthetic
ggttctgtccacggtgtgtcc

SEQ ID NO: 11479 - DNA, 21 bp, Artificial Sequence
  Synthetic
aagatggcgaccgccatgtac

SEQ ID NO: 11480 - DNA, 21 bp, Artificial Sequence
  Synthetic
agatggcgaccgccatgtact

SEQ ID NO: 11481 - DNA, 21 bp, Artificial Sequence
  Synthetic
gccatgtacttggagcactat

SEQ ID NO: 11482 - DNA, 21 bp, Artificial Sequence
  Synthetic
cgcagggaaggttctcgatac

SEQ ID NO: 11483 - DNA, 21 bp, Artificial Sequence
  Synthetic
caggtatcgagaaccttccct

SEQ ID NO: 11484 - DNA, 21 bp, Artificial Sequence
  Synthetic
gagaaccttccctgcgaactt

SEQ ID NO: 11485 - DNA, 21 bp, Artificial Sequence
  Synthetic
gaaccttccctgcgaacttca

SEQ ID NO: 11486 - DNA, 21 bp, Artificial Sequence
  Synthetic
aaccttccctgcgaacttcag

SEQ ID NO: 11487 - DNA, 21 bp, Artificial Sequence
  Synthetic
gaagttcctctgaagttcgca

SEQ ID NO: 11488 - DNA, 21 bp, Artificial Sequence
  Synthetic
ggaagttcctctgaagttcgc

SEQ ID NO: 11489 - DNA, 21 bp, Artificial Sequence
  Synthetic
tggaagttcctctgaagttcg

SEQ ID NO: 11490 - DNA, 21 bp, Artificial Sequence
  Synthetic
tcgcatcagctggaagttcct

SEQ ID NO: 11491 - DNA, 21 bp, Artificial Sequence
  Synthetic
tcagaggaacttccagctgat

SEQ ID NO: 11492 - DNA, 21 bp, Artificial Sequence
  Synthetic
agaggaacttccagctgatgc

SEQ ID NO: 11493 - DNA, 21 bp, Artificial Sequence
  Synthetic
aacttccagctgatgcgagag

SEQ ID NO: 11494 - DNA, 21 bp, Artificial Sequence
  Synthetic
tggtccagctctcgcatcagc

SEQ ID NO: 11495 - DNA, 21 bp, Artificial Sequence
  Synthetic
ctggtccagctctcgcatcag

SEQ ID NO: 11496 - DNA, 21 bp, Artificial Sequence
  Synthetic
cagctgatgcgagagctggac

SEQ ID NO: 11497 - DNA, 21 bp, Artificial Sequence
  Synthetic
gctgatgcgagagctggacca

SEQ ID NO: 11498 - DNA, 21 bp, Artificial Sequence
  Synthetic
atgcgagagctggaccagagg

SEQ ID NO: 11499 - DNA, 21 bp, Artificial Sequence
  Synthetic
tgcgagagctggaccagagga

SEQ ID NO: 11500 - DNA, 21 bp, Artificial Sequence
  Synthetic
agctggaccagaggacggaag

SEQ ID NO: 11501 - DNA, 21 bp, Artificial Sequence
  Synthetic
tttctccatcagataagaaag

SEQ ID NO: 11502 - DNA, 21 bp, Artificial Sequence
  Synthetic
cagagattgacatcctggctg

SEQ ID NO: 11503 - DNA, 21 bp, Artificial Sequence
  Synthetic
cgtggagatgtactctgcagc

SEQ ID NO: 11504 - DNA, 21 bp, Artificial Sequence
  Synthetic
gctgcagagtacatctccacg

SEQ ID NO: 11505 - DNA, 21 bp, Artificial Sequence
  Synthetic
ctggagacagcgtcttcaccg

SEQ ID NO: 11506 - DNA, 21 bp, Artificial Sequence
  Synthetic
tctggagacagcgtcttcacc

SEQ ID NO: 11507 - DNA, 21 bp, Artificial Sequence
  Synthetic
acgctgtctccagaccagcgc

SEQ ID NO: 11508 - DNA, 21 bp, Artificial Sequence
  Synthetic
cgctgtctccagaccagcgcg

SEQ ID NO: 11509 - DNA, 21 bp, Artificial Sequence
  Synthetic
caggcgctccacgcgctggtc

SEQ ID NO: 11510 - DNA, 21 bp, Artificial Sequence
  Synthetic
gcaggcgctccacgcgctggt

SEQ ID NO: 11511 - DNA, 21 bp, Artificial Sequence
  Synthetic
gaccagcgcgtggagcgcctg

SEQ ID NO: 11512 - DNA, 21 bp, Artificial Sequence
  Synthetic
gtggagcgcctgcagaagatc

SEQ ID NO: 11513 - DNA, 21 bp, Artificial Sequence
  Synthetic
cttgcacttgctgtaggcgtt

SEQ ID NO: 11514 - DNA, 21 bp, Artificial Sequence
  Synthetic
cagaacgcctacagcaagtgc

SEQ ID NO: 11515 - DNA, 21 bp, Artificial Sequence
  Synthetic
agaacgcctacagcaagtgca

SEQ ID NO: 11516 - DNA, 21 bp, Artificial Sequence
  Synthetic
tgcagctggccatgcagacct

SEQ ID NO: 11517 - DNA, 21 bp, Artificial Sequence
  Synthetic
gccatgcagacctacgagatg

SEQ ID NO: 11518 - DNA, 21 bp, Artificial Sequence
  Synthetic
catgcagacctacgagatggt

SEQ ID NO: 11519 - DNA, 21 bp, Artificial Sequence
  Synthetic
tttgtaggtggataaacacat

SEQ ID NO: 11520 - DNA, 21 bp, Artificial Sequence
  Synthetic
cgccaggtctgcatcaagcct

SEQ ID NO: 11521 - DNA, 21 bp, Artificial Sequence
  Synthetic
ttgatgcagacctggcgcgct

SEQ ID NO: 11522 - DNA, 21 bp, Artificial Sequence
  Synthetic
gagtctgtcatcacaagcccc

SEQ ID NO: 11523 - DNA, 21 bp, Artificial Sequence
  Synthetic
ggtgacagctaatcgtactca

SEQ ID NO: 11524 - DNA, 21 bp, Artificial Sequence
  Synthetic
tggtgacagctaatcgtactc

SEQ ID NO: 11525 - DNA, 21 bp, Artificial Sequence
  Synthetic
gttggtgttgaaggacatgga

SEQ ID NO: 11526 - DNA, 21 bp, Artificial Sequence
  Synthetic
ccgttggtgttgaaggacatg

SEQ ID NO: 11527 - DNA, 21 bp, Artificial Sequence
  Synthetic
tgccgttggtgttgaaggaca

SEQ ID NO: 11528 - DNA, 21 bp, Artificial Sequence
  Synthetic
ctgccgttggtgttgaaggac

SEQ ID NO: 11529 - DNA, 21 bp, Artificial Sequence
  Synthetic
aacaggctgccgttggtgttg

SEQ ID NO: 11530 - DNA, 21 bp, Artificial Sequence
  Synthetic
gccaacaggctgccgttggtg

SEQ ID NO: 11531 - DNA, 21 bp, Artificial Sequence
  Synthetic
cacctgcaaagaccgcaagat

SEQ ID NO: 11532 - DNA, 21 bp, Artificial Sequence
  Synthetic
caagattcgggttattgaccc

SEQ ID NO: 11533 - DNA, 21 bp, Artificial Sequence
  Synthetic
ccctgctcgggggtcaataac

SEQ ID NO: 11534 - DNA, 21 bp, Artificial Sequence
  Synthetic
acggcctacaggaaggaactc

SEQ ID NO: 11535 - DNA, 21 bp, Artificial Sequence
  Synthetic
ggaactcgtgggccacgcgcg

SEQ ID NO: 11536 - DNA, 21 bp, Artificial Sequence
  Synthetic
cctactctgcgcgcgtggccc

SEQ ID NO: 11537 - DNA, 21 bp, Artificial Sequence
  Synthetic
cacgcgcgcagagtaggcctg

SEQ ID NO: 11538 - DNA, 21 bp, Artificial Sequence
  Synthetic
acgcgcgcagagtaggcctgg

SEQ ID NO: 11539 - DNA, 21 bp, Artificial Sequence
  Synthetic
tgaagaggatgttggcggccg

SEQ ID NO: 11540 - DNA, 21 bp, Artificial Sequence
  Synthetic
ctgaagaggatgttggcggcc

SEQ ID NO: 11541 - DNA, 21 bp, Artificial Sequence
  Synthetic
gtagtcatagccagcactgaa

SEQ ID NO: 11542 - DNA, 21 bp, Artificial Sequence
  Synthetic
ttgtagtcatagccagcactg

SEQ ID NO: 11543 - DNA, 21 bp, Artificial Sequence
  Synthetic
accttgtagtcatagccagca

SEQ ID NO: 11544 - DNA, 21 bp, Artificial Sequence
  Synthetic
agtgctggctatgactacaag

SEQ ID NO: 11545 - DNA, 21 bp, Artificial Sequence
  Synthetic
ctctgccatgcaggtgatgat

SEQ ID NO: 11546 - DNA, 21 bp, Artificial Sequence
  Synthetic
tctgccatgcaggtgatgatc

SEQ ID NO: 11547 - DNA, 21 bp, Artificial Sequence
  Synthetic
atgcaggtgatgatctggaac

SEQ ID NO: 11548 - DNA, 21 bp, Artificial Sequence
  Synthetic
ctacccaaaagtctgcgggca

SEQ ID NO: 11549 - DNA, 21 bp, Artificial Sequence
  Synthetic
tgcgggcacagaggcaacgtt

SEQ ID NO: 11550 - DNA, 21 bp, Artificial Sequence
  Synthetic
aggcgatctcaaaatcatcaa

SEQ ID NO: 11551 - DNA, 21 bp, Artificial Sequence
  Synthetic
tcactgtggcatcttcagaac

SEQ ID NO: 11552 - DNA, 21 bp, Artificial Sequence
  Synthetic
ctcactgtggcatcttcagaa

SEQ ID NO: 11553 - DNA, 21 bp, Artificial Sequence
  Synthetic
tcctgttctgaagatgccaca

SEQ ID NO: 11554 - DNA, 21 bp, Artificial Sequence
  Synthetic
tgacactcactgtggcatctt

SEQ ID NO: 11555 - DNA, 21 bp, Artificial Sequence
  Synthetic
tctcccctgccagattaagat

SEQ ID NO: 11556 - DNA, 21 bp, Artificial Sequence
  Synthetic
ctcccctgccagattaagatc

SEQ ID NO: 11557 - DNA, 21 bp, Artificial Sequence
  Synthetic
ggacaataaacacccgatgta

SEQ ID NO: 11558 - DNA, 21 bp, Artificial Sequence
  Synthetic
gacaataaacacccgatgtac

SEQ ID NO: 11559 - DNA, 21 bp, Artificial Sequence
  Synthetic
agtgcaccagcctcctgtaca

SEQ ID NO: 11560 - DNA, 21 bp, Artificial Sequence
  Synthetic
aggaggctggtgcactcagct

SEQ ID NO: 11561 - DNA, 21 bp, Artificial Sequence
  Synthetic
gaatggtgggaacgtccacag

SEQ ID NO: 11562 - DNA, 21 bp, Artificial Sequence
  Synthetic
ctgtggacgttcccaccattc

SEQ ID NO: 11563 - DNA, 21 bp, Artificial Sequence
  Synthetic
cgactttacctcttgaatggt

SEQ ID NO: 11564 - DNA, 21 bp, Artificial Sequence
  Synthetic
ccgactttacctcttgaatgg

SEQ ID NO: 11565 - DNA, 21 bp, Artificial Sequence
  Synthetic
accgactttacctcttgaatg

SEQ ID NO: 11566 - DNA, 21 bp, Artificial Sequence
  Synthetic
aaaagaaaccgactttacctc

SEQ ID NO: 11567 - DNA, 21 bp, Artificial Sequence
  Synthetic
tttgccctctgcagaaagtga

SEQ ID NO: 11568 - DNA, 21 bp, Artificial Sequence
  Synthetic
gccctctgcagaaagtgaatg

SEQ ID NO: 11569 - DNA, 21 bp, Artificial Sequence
  Synthetic
ccctctgcagaaagtgaatga

SEQ ID NO: 11570 - DNA, 21 bp, Artificial Sequence
  Synthetic
cctctgcagaaagtgaatgaa

SEQ ID NO: 11571 - DNA, 21 bp, Artificial Sequence
  Synthetic
gaaagtgaatgaagggaaata

SEQ ID NO: 11572 - DNA, 21 bp, Artificial Sequence
  Synthetic
atgaagggaaataccgaagtt

SEQ ID NO: 11573 - DNA, 21 bp, Artificial Sequence
  Synthetic
aagggaaataccgaagttatg

SEQ ID NO: 11574 - DNA, 21 bp, Artificial Sequence
  Synthetic
agaagcaattgggcatcagct

SEQ ID NO: 11575 - DNA, 21 bp, Artificial Sequence
  Synthetic
cacggtattgtggagaagcaa

SEQ ID NO: 11576 - DNA, 21 bp, Artificial Sequence
  Synthetic
atagaaaatcacggtattgtg

SEQ ID NO: 11577 - DNA, 21 bp, Artificial Sequence
  Synthetic
ccatagaaaatcacggtattg

SEQ ID NO: 11578 - DNA, 21 bp, Artificial Sequence
  Synthetic
tccatagaaaatcacggtatt

SEQ ID NO: 11579 - DNA, 21 bp, Artificial Sequence
  Synthetic
aacaaaaatattcaacctcca

SEQ ID NO: 11580 - DNA, 21 bp, Artificial Sequence
  Synthetic
gacagtgagcaagctgacatt

SEQ ID NO: 11581 - DNA, 21 bp, Artificial Sequence
  Synthetic
cagtgagcaagctgacattgc

SEQ ID NO: 11582 - DNA, 21 bp, Artificial Sequence
  Synthetic
acctggttgcacagacagtac

SEQ ID NO: 11583 - DNA, 21 bp, Artificial Sequence
  Synthetic
gtctgtgcaaccaggtctcct

SEQ ID NO: 11584 - DNA, 21 bp, Artificial Sequence
  Synthetic
tctgtgcaaccaggtctccta

SEQ ID NO: 11585 - DNA, 21 bp, Artificial Sequence
  Synthetic
ctgtgcaaccaggtctcctat

SEQ ID NO: 11586 - DNA, 21 bp, Artificial Sequence
  Synthetic
tgtgcaaccaggtctcctatg

SEQ ID NO: 11587 - DNA, 21 bp, Artificial Sequence
  Synthetic
cgcagccgatcatctccccat

SEQ ID NO: 11588 - DNA, 21 bp, Artificial Sequence
  Synthetic
tcgcagccgatcatctcccca

SEQ ID NO: 11589 - DNA, 21 bp, Artificial Sequence
  Synthetic
agatgatcggctgcgacaacg

SEQ ID NO: 11590 - DNA, 21 bp, Artificial Sequence
  Synthetic
gcgacaacgacgagtgcccca

SEQ ID NO: 11591 - DNA, 21 bp, Artificial Sequence
  Synthetic
acgagaagtggaaccactcga

SEQ ID NO: 11592 - DNA, 21 bp, Artificial Sequence
  Synthetic
cacgagaagtggaaccactcg

SEQ ID NO: 11593 - DNA, 21 bp, Artificial Sequence
  Synthetic
gagtggttccacttctcgtgc

SEQ ID NO: 11594 - DNA, 21 bp, Artificial Sequence
  Synthetic
agtggttccacttctcgtgcg

SEQ ID NO: 11595 - DNA, 21 bp, Artificial Sequence
  Synthetic
ttgagccccacgcacgagaag

SEQ ID NO: 11596 - DNA, 21 bp, Artificial Sequence
  Synthetic
attgagccccacgcacgagaa

SEQ ID NO: 11597 - DNA, 21 bp, Artificial Sequence
  Synthetic
ttatgattgagccccacgcac

SEQ ID NO: 11598 - DNA, 21 bp, Artificial Sequence
  Synthetic
gtttatgattgagccccacgc

SEQ ID NO: 11599 - DNA, 21 bp, Artificial Sequence
  Synthetic
gtggggctcaatcataaaccc

SEQ ID NO: 11600 - DNA, 21 bp, Artificial Sequence
  Synthetic
cacttgcccttgggtttatga

SEQ ID NO: 11601 - DNA, 21 bp, Artificial Sequence
  Synthetic
ttgggacagtaccacttgccc

SEQ ID NO: 11602 - DNA, 21 bp, Artificial Sequence
  Synthetic
caagtggtactgtcccaagtg

SEQ ID NO: 11603 - DNA, 21 bp, Artificial Sequence
  Synthetic
aagtggtactgtcccaagtgc

SEQ ID NO: 11604 - DNA, 21 bp, Artificial Sequence
  Synthetic
agtggtactgtcccaagtgcc

SEQ ID NO: 11605 - DNA, 21 bp, Artificial Sequence
  Synthetic
gtggtactgtcccaagtgccg

SEQ ID NO: 11606 - DNA, 21 bp, Artificial Sequence
  Synthetic
tggtactgtcccaagtgccgg

SEQ ID NO: 11607 - DNA, 21 bp, Artificial Sequence
  Synthetic
ggtactgtcccaagtgccggg

SEQ ID NO: 11608 - DNA, 21 bp, Artificial Sequence
  Synthetic
tctcgttctccccccggcact

SEQ ID NO: 11609 - DNA, 21 bp, Artificial Sequence
  Synthetic
ttctcgttctccccccggcac

SEQ ID NO: 11610 - DNA, 21 bp, Artificial Sequence
  Synthetic
cagctccacctggtgaactat

SEQ ID NO: 11611 - DNA, 21 bp, Artificial Sequence
  Synthetic
agctccacctggtgaactatg

SEQ ID NO: 11612 - DNA, 21 bp, Artificial Sequence
  Synthetic
ctccacctggtgaactatgtg

SEQ ID NO: 11613 - DNA, 21 bp, Artificial Sequence
  Synthetic
gtgaactatgtggaggactac

SEQ ID NO: 11614 - DNA, 21 bp, Artificial Sequence
  Synthetic
tggaggactacctggactcca

SEQ ID NO: 11615 - DNA, 21 bp, Artificial Sequence
  Synthetic
agtcgaaaggcagggactcga

SEQ ID NO: 11616 - DNA, 21 bp, Artificial Sequence
  Synthetic
aagtcgaaaggcagggactcg

SEQ ID NO: 11617 - DNA, 21 bp, Artificial Sequence
  Synthetic
gagtccctgcctttcgacttg

SEQ ID NO: 11618 - DNA, 21 bp, Artificial Sequence
  Synthetic
gtccctgcctttcgacttgca

SEQ ID NO: 11619 - DNA, 21 bp, Artificial Sequence
  Synthetic
tttctctgcaagtcgaaaggc

SEQ ID NO: 11620 - DNA, 21 bp, Artificial Sequence
  Synthetic
atttctctgcaagtcgaaagg

SEQ ID NO: 11621 - DNA, 21 bp, Artificial Sequence
  Synthetic
agcgagacatttctctgcaag

SEQ ID NO: 11622 - DNA, 21 bp, Artificial Sequence
  Synthetic
gcagagaaatgtctcgctgat

SEQ ID NO: 11623 - DNA, 21 bp, Artificial Sequence
  Synthetic
cagagaaatgtctcgctgatg

SEQ ID NO: 11624 - DNA, 21 bp, Artificial Sequence
  Synthetic
agagaaatgtctcgctgatgc

SEQ ID NO: 11625 - DNA, 21 bp, Artificial Sequence
  Synthetic
tcgcgtcgatctcccgcatca

SEQ ID NO: 11626 - DNA, 21 bp, Artificial Sequence
  Synthetic
tcgctgatgcgggagatcgac

SEQ ID NO: 11627 - DNA, 21 bp, Artificial Sequence
  Synthetic
tccttcttgcccccagagatc

SEQ ID NO: 11628 - DNA, 21 bp, Artificial Sequence
  Synthetic
ttcttgcccccagagatcctg

SEQ ID NO: 11629 - DNA, 21 bp, Artificial Sequence
  Synthetic
tcttgcccccagagatcctga

SEQ ID NO: 11630 - DNA, 21 bp, Artificial Sequence
  Synthetic
tctagctccttcaggatctct

SEQ ID NO: 11631 - DNA, 21 bp, Artificial Sequence
  Synthetic
gtctagctccttcaggatctc

SEQ ID NO: 11632 - DNA, 21 bp, Artificial Sequence
  Synthetic
cgtctagctccttcaggatct

SEQ ID NO: 11633 - DNA, 21 bp, Artificial Sequence
  Synthetic
cagagatcctgaaggagctag

SEQ ID NO: 11634 - DNA, 21 bp, Artificial Sequence
  Synthetic
gtagcactcgtctagctcctt

SEQ ID NO: 11635 - DNA, 21 bp, Artificial Sequence
  Synthetic
tgaaggagctagacgagtgct

SEQ ID NO: 11636 - DNA, 21 bp, Artificial Sequence
  Synthetic
agtgctacgagcgcttcagtc

SEQ ID NO: 11637 - DNA, 21 bp, Artificial Sequence
  Synthetic
agcgcttcagtcgcgagacag

SEQ ID NO: 11638 - DNA, 21 bp, Artificial Sequence
  Synthetic
gcgcttcagtcgcgagacaga

SEQ ID NO: 11639 - DNA, 21 bp, Artificial Sequence
  Synthetic
tgcgccccgtctgtctcgcga

SEQ ID NO: 11640 - DNA, 21 bp, Artificial Sequence
  Synthetic
agtcgcgagacagacggggcg

SEQ ID NO: 11641 - DNA, 21 bp, Artificial Sequence
  Synthetic
gacagacggggcgcagaagcg

SEQ ID NO: 11642 - DNA, 21 bp, Artificial Sequence
  Synthetic
cagcgcgcgctgatccgcagc

SEQ ID NO: 11643 - DNA, 21 bp, Artificial Sequence
  Synthetic
agcgcgcgctgatccgcagcc

SEQ ID NO: 11644 - DNA, 21 bp, Artificial Sequence
  Synthetic
gcgctgatccgcagccaggag

SEQ ID NO: 11645 - DNA, 21 bp, Artificial Sequence
  Synthetic
ctcgtcgcccagctcctggct

SEQ ID NO: 11646 - DNA, 21 bp, Artificial Sequence
  Synthetic
tccgcagccaggagctgggcg

SEQ ID NO: 11647 - DNA, 21 bp, Artificial Sequence
  Synthetic
cgcagccaggagctgggcgac

SEQ ID NO: 11648 - DNA, 21 bp, Artificial Sequence
  Synthetic
ggcgacgagaagatccagatc

SEQ ID NO: 11649 - DNA, 21 bp, Artificial Sequence
  Synthetic
atccagatcgtgagccagatg

SEQ ID NO: 11650 - DNA, 21 bp, Artificial Sequence
  Synthetic
ctccaccatctggctcacgat

SEQ ID NO: 11651 - DNA, 21 bp, Artificial Sequence
  Synthetic
tccagatcgtgagccagatgg

SEQ ID NO: 11652 - DNA, 21 bp, Artificial Sequence
  Synthetic
gtgagccagatggtggagctg

SEQ ID NO: 11653 - DNA, 21 bp, Artificial Sequence
  Synthetic
tgagccagatggtggagctgg

SEQ ID NO: 11654 - DNA, 21 bp, Artificial Sequence
  Synthetic
agccagatggtggagctggtg

SEQ ID NO: 11655 - DNA, 21 bp, Artificial Sequence
  Synthetic
gtggagaaccgcacgcggcag

SEQ ID NO: 11656 - DNA, 21 bp, Artificial Sequence
  Synthetic
acgcggcaggtggacagccac

SEQ ID NO: 11657 - DNA, 21 bp, Artificial Sequence
  Synthetic
cgcggcaggtggacagccacg

SEQ ID NO: 11658 - DNA, 21 bp, Artificial Sequence
  Synthetic
tggacagccacgtggagctgt

SEQ ID NO: 11659 - DNA, 21 bp, Artificial Sequence
  Synthetic
gcttatgcaaccaagtgtctt

SEQ ID NO: 11660 - DNA, 21 bp, Artificial Sequence
  Synthetic
cttatgcaaccaagtgtctta

SEQ ID NO: 11661 - DNA, 21 bp, Artificial Sequence
  Synthetic
ttatgcaaccaagtgtcttat

SEQ ID NO: 11662 - DNA, 21 bp, Artificial Sequence
  Synthetic
tatgcaaccaagtgtcttatg

SEQ ID NO: 11663 - DNA, 21 bp, Artificial Sequence
  Synthetic
aagtgtcttatggggagatga

SEQ ID NO: 11664 - DNA, 21 bp, Artificial Sequence
  Synthetic
gggagatgataggatgtgaca

SEQ ID NO: 11665 - DNA, 21 bp, Artificial Sequence
  Synthetic
gtgacaatgaacagtgtccaa

SEQ ID NO: 11666 - DNA, 21 bp, Artificial Sequence
  Synthetic
atgaaaagtgaaaccattcaa

SEQ ID NO: 11667 - DNA, 21 bp, Artificial Sequence
  Synthetic
ggtaagtgaaacacatgaaaa

SEQ ID NO: 11668 - DNA, 21 bp, Artificial Sequence
  Synthetic
gtttataggtaagtgaaacac

SEQ ID NO: 11669 - DNA, 21 bp, Artificial Sequence
  Synthetic
gtttcacttacctataaacca

SEQ ID NO: 11670 - DNA, 21 bp, Artificial Sequence
  Synthetic
tttcacttacctataaaccaa

SEQ ID NO: 11671 - DNA, 21 bp, Artificial Sequence
  Synthetic
tcccctttggtttataggtaa

SEQ ID NO: 11672 - DNA, 21 bp, Artificial Sequence
  Synthetic
ttcacttacctataaaccaaa

SEQ ID NO: 11673 - DNA, 21 bp, Artificial Sequence
  Synthetic
tcacttacctataaaccaaag

SEQ ID NO: 11674 - DNA, 21 bp, Artificial Sequence
  Synthetic
gaaatggtattgcccaaagtg

SEQ ID NO: 11675 - DNA, 21 bp, Artificial Sequence
  Synthetic
aaatggtattgcccaaagtgc

SEQ ID NO: 11676 - DNA, 21 bp, Artificial Sequence
  Synthetic
aatggtattgcccaaagtgca

SEQ ID NO: 11677 - DNA, 21 bp, Artificial Sequence
  Synthetic
atggtattgcccaaagtgcag

SEQ ID NO: 11678 - DNA, 21 bp, Artificial Sequence
  Synthetic
tctcattatctcccctgcact

SEQ ID NO: 11679 - DNA, 21 bp, Artificial Sequence
  Synthetic
cggctgctcacctgctacgtg

SEQ ID NO: 11680 - DNA, 21 bp, Artificial Sequence
  Synthetic
cctgctacgtgcaggactacc

SEQ ID NO: 11681 - DNA, 21 bp, Artificial Sequence
  Synthetic
gtgcaggactaccttgagtgc

SEQ ID NO: 11682 - DNA, 21 bp, Artificial Sequence
  Synthetic
tgcaggactaccttgagtgcg

SEQ ID NO: 11683 - DNA, 21 bp, Artificial Sequence
  Synthetic
gagtcgctgccccacgacatg

SEQ ID NO: 11684 - DNA, 21 bp, Artificial Sequence
  Synthetic
gtcgctgccccacgacatgca

SEQ ID NO: 11685 - DNA, 21 bp, Artificial Sequence
  Synthetic
tcgctgccccacgacatgcag

SEQ ID NO: 11686 - DNA, 21 bp, Artificial Sequence
  Synthetic
gacacgttcctctgcatgtcg

SEQ ID NO: 11687 - DNA, 21 bp, Artificial Sequence
  Synthetic
agacacgttcctctgcatgtc

SEQ ID NO: 11688 - DNA, 21 bp, Artificial Sequence
  Synthetic
gcagaggaacgtgtctgtgct

SEQ ID NO: 11689 - DNA, 21 bp, Artificial Sequence
  Synthetic
agaggaacgtgtctgtgctgc

SEQ ID NO: 11690 - DNA, 21 bp, Artificial Sequence
  Synthetic
aacgtgtctgtgctgcgagag

SEQ ID NO: 11691 - DNA, 21 bp, Artificial Sequence
  Synthetic
gctggacaacaaatatcaagg

SEQ ID NO: 11692 - DNA, 21 bp, Artificial Sequence
  Synthetic
ctggacaacaaatatcaaggt

SEQ ID NO: 11693 - DNA, 21 bp, Artificial Sequence
  Synthetic
taaaggaaattgatgatgtct

SEQ ID NO: 11694 - DNA, 21 bp, Artificial Sequence
  Synthetic
gatgatgtctacgaaaaatat

SEQ ID NO: 11695 - DNA, 21 bp, Artificial Sequence
  Synthetic
atgtctacgaaaaatataaga

SEQ ID NO: 11696 - DNA, 21 bp, Artificial Sequence
  Synthetic
aagaaagaagatgatttaaac

SEQ ID NO: 11697 - DNA, 21 bp, Artificial Sequence
  Synthetic
aaagaagatgatttaaaccag

SEQ ID NO: 11698 - DNA, 21 bp, Artificial Sequence
  Synthetic
aaacgtctacagcagcttctc

SEQ ID NO: 11699 - DNA, 21 bp, Artificial Sequence
  Synthetic
acgtctacagcagcttctcca

SEQ ID NO: 11700 - DNA, 21 bp, Artificial Sequence
  Synthetic
actattaattagtgctctctg

SEQ ID NO: 11701 - DNA, 21 bp, Artificial Sequence
  Synthetic
tgactattaattagtgctctc

SEQ ID NO: 11702 - DNA, 21 bp, Artificial Sequence
  Synthetic
ttgactattaattagtgctct

SEQ ID NO: 11703 - DNA, 21 bp, Artificial Sequence
  Synthetic
agagagcactaattaatagtc

SEQ ID NO: 11704 - DNA, 21 bp, Artificial Sequence
  Synthetic
gcactaattaatagtcaagaa

SEQ ID NO: 11705 - DNA, 21 bp, Artificial Sequence
  Synthetic
cactaattaatagtcaagaat

SEQ ID NO: 11706 - DNA, 21 bp, Artificial Sequence
  Synthetic
actaattaatagtcaagaatt

SEQ ID NO: 11707 - DNA, 21 bp, Artificial Sequence
  Synthetic
ttaatagtcaagaattgggag

SEQ ID NO: 11708 - DNA, 21 bp, Artificial Sequence
  Synthetic
tacagattgttacacaaatgc

SEQ ID NO: 11709 - DNA, 21 bp, Artificial Sequence
  Synthetic
gttacacaaatgctcgaattg

SEQ ID NO: 11710 - DNA, 21 bp, Artificial Sequence
  Synthetic
ttacacaaatgctcgaattgg

SEQ ID NO: 11711 - DNA, 21 bp, Artificial Sequence
  Synthetic
aatgctcgaattggtggaaaa

SEQ ID NO: 11712 - DNA, 21 bp, Artificial Sequence
  Synthetic
gtggaaaatcgggcaagacaa

SEQ ID NO: 11713 - DNA, 21 bp, Artificial Sequence
  Synthetic
tggaaaatcgggcaagacaaa

SEQ ID NO: 11714 - DNA, 21 bp, Artificial Sequence
  Synthetic
cagcaggatcttggaaacact

SEQ ID NO: 11715 - DNA, 21 bp, Artificial Sequence
  Synthetic
tacctgattacaaatgcagta

SEQ ID NO: 11716 - DNA, 21 bp, Artificial Sequence
  Synthetic
taggtatcttatggtgagatg

SEQ ID NO: 11717 - DNA, 21 bp, Artificial Sequence
  Synthetic
aggtatcttatggtgagatgg

SEQ ID NO: 11718 - DNA, 21 bp, Artificial Sequence
  Synthetic
tggaaccattctatagggcac

SEQ ID NO: 11719 - DNA, 21 bp, Artificial Sequence
  Synthetic
agccataatggaaccattcta

SEQ ID NO: 11720 - DNA, 21 bp, Artificial Sequence
  Synthetic
aatggttccattatggctgcg

SEQ ID NO: 11721 - DNA, 21 bp, Artificial Sequence
  Synthetic
gtcaatccaacgcagccataa

SEQ ID NO: 11722 - DNA, 21 bp, Artificial Sequence
  Synthetic
tgtcaatccaacgcagccata

SEQ ID NO: 11723 - DNA, 21 bp, Artificial Sequence
  Synthetic
attatggctgcgttggattga

SEQ ID NO: 11724 - DNA, 21 bp, Artificial Sequence
  Synthetic
tcttcattgcagcagtgcact

SEQ ID NO: 11725 - DNA, 21 bp, Artificial Sequence
  Synthetic
taagggccgcgatgttgtacc

SEQ ID NO: 11726 - DNA, 21 bp, Artificial Sequence
  Synthetic
atgttgtacctagaagactat

SEQ ID NO: 11727 - DNA, 21 bp, Artificial Sequence
  Synthetic
tgttgtacctagaagactatc

SEQ ID NO: 11728 - DNA, 21 bp, Artificial Sequence
  Synthetic
acctagaagactatctggaaa

SEQ ID NO: 11729 - DNA, 21 bp, Artificial Sequence
  Synthetic
acagtgattgagcagcttcct

SEQ ID NO: 11730 - DNA, 21 bp, Artificial Sequence
  Synthetic
tgagcagcttcctatggatct

SEQ ID NO: 11731 - DNA, 21 bp, Artificial Sequence
  Synthetic
gagcagcttcctatggatctg

SEQ ID NO: 11732 - DNA, 21 bp, Artificial Sequence
  Synthetic
gaagcggtcccgcagatccat

SEQ ID NO: 11733 - DNA, 21 bp, Artificial Sequence
  Synthetic
tgaagcggtcccgcagatcca

SEQ ID NO: 11734 - DNA, 21 bp, Artificial Sequence
  Synthetic
atggatctgcgggaccgcttc

SEQ ID NO: 11735 - DNA, 21 bp, Artificial Sequence
  Synthetic
tggatctgcgggaccgcttca

SEQ ID NO: 11736 - DNA, 21 bp, Artificial Sequence
  Synthetic
gggaccgcttcacggaaatgc

SEQ ID NO: 11737 - DNA, 21 bp, Artificial Sequence
  Synthetic
cgcttcacggaaatgcgcgag

SEQ ID NO: 11738 - DNA, 21 bp, Artificial Sequence
  Synthetic
aggtccatctcgcgcatttcc

SEQ ID NO: 11739 - DNA, 21 bp, Artificial Sequence
  Synthetic
cgcgagatggacctgcaggtg

SEQ ID NO: 11740 - DNA, 21 bp, Artificial Sequence
  Synthetic
tcatagatgcaatggatcaac

SEQ ID NO: 11741 - DNA, 21 bp, Artificial Sequence
  Synthetic
tgcaatggatcaactagaaca

SEQ ID NO: 11742 - DNA, 21 bp, Artificial Sequence
  Synthetic
atcaactagaacaaagagtca

SEQ ID NO: 11743 - DNA, 21 bp, Artificial Sequence
  Synthetic
caaagagtcagtgaattcttt

SEQ ID NO: 11744 - DNA, 21 bp, Artificial Sequence
  Synthetic
agtgaattctttatgaatgca

SEQ ID NO: 11745 - DNA, 21 bp, Artificial Sequence
  Synthetic
tgaatgcaaagaaaaataaac

SEQ ID NO: 11746 - DNA, 21 bp, Artificial Sequence
  Synthetic
tgcaaagaaaaataaacctga

SEQ ID NO: 11747 - DNA, 21 bp, Artificial Sequence
  Synthetic
gcaaagaaaaataaacctgag

SEQ ID NO: 11748 - DNA, 21 bp, Artificial Sequence
  Synthetic
aaagaaaaataaacctgagtg

SEQ ID NO: 11749 - DNA, 21 bp, Artificial Sequence
  Synthetic
aagaaaaataaacctgagtgg

SEQ ID NO: 11750 - DNA, 21 bp, Artificial Sequence
  Synthetic
agaaaaataaacctgagtgga

SEQ ID NO: 11751 - DNA, 21 bp, Artificial Sequence
  Synthetic
aaaataaacctgagtggaggg

SEQ ID NO: 11752 - DNA, 21 bp, Artificial Sequence
  Synthetic
attcaggactactataaagct

SEQ ID NO: 11753 - DNA, 21 bp, Artificial Sequence
  Synthetic
ttccaaagctttatagtagtc

SEQ ID NO: 11754 - DNA, 21 bp, Artificial Sequence
  Synthetic
ttcaggactactataaagctt

SEQ ID NO: 11755 - DNA, 21 bp, Artificial Sequence
  Synthetic
ataaagctttggaagatgcag

SEQ ID NO: 11756 - DNA, 21 bp, Artificial Sequence
  Synthetic
aaagctttggaagatgcagat

SEQ ID NO: 11757 - DNA, 21 bp, Artificial Sequence
  Synthetic
gtcatatatctggtttgccaa

SEQ ID NO: 11758 - DNA, 21 bp, Artificial Sequence
  Synthetic
ttgaaacaggtagatcgacac

SEQ ID NO: 11759 - DNA, 21 bp, Artificial Sequence
  Synthetic
gaaacaggtagatcgacactt

SEQ ID NO: 11760 - DNA, 21 bp, Artificial Sequence
  Synthetic
gtagatcgacacttgagaaag

SEQ ID NO: 11761 - DNA, 21 bp, Artificial Sequence
  Synthetic
cgacacttgagaaagctggat

SEQ ID NO: 11762 - DNA, 21 bp, Artificial Sequence
  Synthetic
gacacttgagaaagctggatc

SEQ ID NO: 11763 - DNA, 21 bp, Artificial Sequence
  Synthetic
tactgcagaacacaccaaaat

SEQ ID NO: 11764 - DNA, 21 bp, Artificial Sequence
  Synthetic
cctttggcgataaaactactg

SEQ ID NO: 11765 - DNA, 21 bp, Artificial Sequence
  Synthetic
ttatcgccaaaggagtcaggt

SEQ ID NO: 11766 - DNA, 21 bp, Artificial Sequence
  Synthetic
gcattgaccactttaccttga

SEQ ID NO: 11767 - DNA, 21 bp, Artificial Sequence
  Synthetic
actggcattgaccactttacc

SEQ ID NO: 11768 - DNA, 21 bp, Artificial Sequence
  Synthetic
aaggtaaagtggtcaatgcca

SEQ ID NO: 11769 - DNA, 21 bp, Artificial Sequence
  Synthetic
aaagtggtcaatgccagtgaa

SEQ ID NO: 11770 - DNA, 21 bp, Artificial Sequence
  Synthetic
atgccagtgaagtgaagacct

SEQ ID NO: 11771 - DNA, 21 bp, Artificial Sequence
  Synthetic
tgccagtgaagtgaagaccta

SEQ ID NO: 11772 - DNA, 21 bp, Artificial Sequence
  Synthetic
ctacggagacaattctgtgat

SEQ ID NO: 11773 - DNA, 21 bp, Artificial Sequence
  Synthetic
tacggagacaattctgtgatg

SEQ ID NO: 11774 - DNA, 21 bp, Artificial Sequence
  Synthetic
acggagacaattctgtgatgt

SEQ ID NO: 11775 - DNA, 21 bp, Artificial Sequence
  Synthetic
acagatttacctcccacatca

SEQ ID NO: 11776 - DNA, 21 bp, Artificial Sequence
  Synthetic
tgtcttatttcatttagatct

SEQ ID NO: 11777 - DNA, 21 bp, Artificial Sequence
  Synthetic
tagatctttgaagatggtcat

SEQ ID NO: 11778 - DNA, 21 bp, Artificial Sequence
  Synthetic
gtcatttgagccactttatag

SEQ ID NO: 11779 - DNA, 21 bp, Artificial Sequence
  Synthetic
tcatttgagccactttataga

SEQ ID NO: 11780 - DNA, 21 bp, Artificial Sequence
  Synthetic
tgagccactttatagatggaa

SEQ ID NO: 11781 - DNA, 21 bp, Artificial Sequence
  Synthetic
gagccactttatagatggaaa

SEQ ID NO: 11782 - DNA, 21 bp, Artificial Sequence
  Synthetic
tttatagatggaaaaggaggt

SEQ ID NO: 11783 - DNA, 21 bp, Artificial Sequence
  Synthetic
ttatagatggaaaaggaggta

SEQ ID NO: 11784 - DNA, 21 bp, Artificial Sequence
  Synthetic
tatagatggaaaaggaggtac

SEQ ID NO: 11785 - DNA, 21 bp, Artificial Sequence
  Synthetic
atagatggaaaaggaggtacg

SEQ ID NO: 11786 - DNA, 21 bp, Artificial Sequence
  Synthetic
tggaaaaggaggtacggggaa

SEQ ID NO: 11787 - DNA, 21 bp, Artificial Sequence
  Synthetic
gggaagcgggcacagttgaca

SEQ ID NO: 11788 - DNA, 21 bp, Artificial Sequence
  Synthetic
gtcaactgtgcccgcttcccc

SEQ ID NO: 11789 - DNA, 21 bp, Artificial Sequence
  Synthetic
tcaactgtgcccgcttcccca

SEQ ID NO: 11790 - DNA, 21 bp, Artificial Sequence
  Synthetic
tgtgcccgcttccccaaggag

SEQ ID NO: 11791 - DNA, 21 bp, Artificial Sequence
  Synthetic
taggttctgctccttggggaa

SEQ ID NO: 11792 - DNA, 21 bp, Artificial Sequence
  Synthetic
gcaactaggttctgctccttg

SEQ ID NO: 11793 - DNA, 21 bp, Artificial Sequence
  Synthetic
agcaactaggttctgctcctt

SEQ ID NO: 11794 - DNA, 21 bp, Artificial Sequence
  Synthetic
cagcaactaggttctgctcct

SEQ ID NO: 11795 - DNA, 21 bp, Artificial Sequence
  Synthetic
acagcaactaggttctgctcc

SEQ ID NO: 11796 - DNA, 21 bp, Artificial Sequence
  Synthetic
acctagttgctgtgcagtgtc

SEQ ID NO: 11797 - DNA, 21 bp, Artificial Sequence
  Synthetic
gagagctgcaaagagatccat

SEQ ID NO: 11798 - DNA, 21 bp, Artificial Sequence
  Synthetic
gcaaagagatccatcagaacc

SEQ ID NO: 11799 - DNA, 21 bp, Artificial Sequence
  Synthetic
cacaaggagctcttggttctg

SEQ ID NO: 11800 - DNA, 21 bp, Artificial Sequence
  Synthetic
accaagagctccttgtgtggt

SEQ ID NO: 11801 - DNA, 21 bp, Artificial Sequence
  Synthetic
ccaagagctccttgtgtggta

SEQ ID NO: 11802 - DNA, 21 bp, Artificial Sequence
  Synthetic
tagcagtctccataccacaca

SEQ ID NO: 11803 - DNA, 21 bp, Artificial Sequence
  Synthetic
atagcagtctccataccacac

SEQ ID NO: 11804 - DNA, 21 bp, Artificial Sequence
  Synthetic
tggcctctgggaccctttata

SEQ ID NO: 11805 - DNA, 21 bp, Artificial Sequence
  Synthetic
tctgggaccctttataaagag

SEQ ID NO: 11806 - DNA, 21 bp, Artificial Sequence
  Synthetic
tgggaccctttataaagagtt

SEQ ID NO: 11807 - DNA, 21 bp, Artificial Sequence
  Synthetic
gtggcctctcaactctttata

SEQ ID NO: 11808 - DNA, 21 bp, Artificial Sequence
  Synthetic
aagccgctgtctggactgaag

SEQ ID NO: 11809 - DNA, 21 bp, Artificial Sequence
  Synthetic
gcaatcaagccgctgtctgga

SEQ ID NO: 11810 - DNA, 21 bp, Artificial Sequence
  Synthetic
cagaggcaatcaagccgctgt

SEQ ID NO: 11811 - DNA, 21 bp, Artificial Sequence
  Synthetic
ggcttgattgcctctgcctcc

SEQ ID NO: 11812 - DNA, 21 bp, Artificial Sequence
  Synthetic
gcaccgagttgtccatggagg

SEQ ID NO: 11813 - DNA, 21 bp, Artificial Sequence
  Synthetic
agacgcgcaccgagttgtcca

SEQ ID NO: 11814 - DNA, 21 bp, Artificial Sequence
  Synthetic
cagacgcgcaccgagttgtcc

SEQ ID NO: 11815 - DNA, 21 bp, Artificial Sequence
  Synthetic
catggacaactcggtgcgcgt

SEQ ID NO: 11816 - DNA, 21 bp, Artificial Sequence
  Synthetic
atggacaactcggtgcgcgtc

SEQ ID NO: 11817 - DNA, 21 bp, Artificial Sequence
  Synthetic
tcctgatgtcccagacgcgca

SEQ ID NO: 11818 - DNA, 21 bp, Artificial Sequence
  Synthetic
ctcggtgcgcgtctgggacat

SEQ ID NO: 11819 - DNA, 21 bp, Artificial Sequence
  Synthetic
gatgataatgcaggcacggag

SEQ ID NO: 11820 - DNA, 21 bp, Artificial Sequence
  Synthetic
aggcacggagatgaagatact

SEQ ID NO: 11821 - DNA, 21 bp, Artificial Sequence
  Synthetic
ggcacggagatgaagatactg

SEQ ID NO: 11822 - DNA, 21 bp, Artificial Sequence
  Synthetic
tgaagatactgcggggccact

SEQ ID NO: 11823 - DNA, 21 bp, Artificial Sequence
  Synthetic
cactgcggaccagtgtacagc

SEQ ID NO: 11824 - DNA, 21 bp, Artificial Sequence
  Synthetic
gtgtacagcacgaggttcctc

SEQ ID NO: 11825 - DNA, 21 bp, Artificial Sequence
  Synthetic
cgaggttcctcgcggacagct

SEQ ID NO: 11826 - DNA, 21 bp, Artificial Sequence
  Synthetic
agcaaccctgagctgtccgcg

SEQ ID NO: 11827 - DNA, 21 bp, Artificial Sequence
  Synthetic
gagcaaccctgagctgtccgc

SEQ ID NO: 11828 - DNA, 21 bp, Artificial Sequence
  Synthetic
gagagcaaccctgagctgtcc

SEQ ID NO: 11829 - DNA, 21 bp, Artificial Sequence
  Synthetic
gctcagggttgctctcttgtt

SEQ ID NO: 11830 - DNA, 21 bp, Artificial Sequence
  Synthetic
cttcagaacaagagagcaacc

SEQ ID NO: 11831 - DNA, 21 bp, Artificial Sequence
  Synthetic
atggacatgtcttcagaacaa

SEQ ID NO: 11832 - DNA, 21 bp, Artificial Sequence
  Synthetic
tgatggacatgtcttcagaac

SEQ ID NO: 11833 - DNA, 21 bp, Artificial Sequence
  Synthetic
agtatctgatggacatgtctt

SEQ ID NO: 11834 - DNA, 21 bp, Artificial Sequence
  Synthetic
tgaagacatgtccatcagata

SEQ ID NO: 11835 - DNA, 21 bp, Artificial Sequence
  Synthetic
gaagacatgtccatcagatac

SEQ ID NO: 11836 - DNA, 21 bp, Artificial Sequence
  Synthetic
atgtccatcagatactgggat

SEQ ID NO: 11837 - DNA, 21 bp, Artificial Sequence
  Synthetic
tgtccatcagatactgggatc

SEQ ID NO: 11838 - DNA, 21 bp, Artificial Sequence
  Synthetic
gtccatcagatactgggatct

SEQ ID NO: 11839 - DNA, 21 bp, Artificial Sequence
  Synthetic
ctccccagatcccagtatctg

SEQ ID NO: 11840 - DNA, 21 bp, Artificial Sequence
  Synthetic
tcaccaacactgtgttgtacc

SEQ ID NO: 11841 - DNA, 21 bp, Artificial Sequence
  Synthetic
ccaaggacatgcctatcctgt

SEQ ID NO: 11842 - DNA, 21 bp, Artificial Sequence
  Synthetic
caaggacatgcctatcctgtg

SEQ ID NO: 11843 - DNA, 21 bp, Artificial Sequence
  Synthetic
catgcctatcctgtgtgggat

SEQ ID NO: 11844 - DNA, 21 bp, Artificial Sequence
  Synthetic
gactgatgtccagatcccaca

SEQ ID NO: 11845 - DNA, 21 bp, Artificial Sequence
  Synthetic
cgctggcgaagtacaggctat

SEQ ID NO: 11846 - DNA, 21 bp, Artificial Sequence
  Synthetic
catatagcctgtacttcgcca

SEQ ID NO: 11847 - DNA, 21 bp, Artificial Sequence
  Synthetic
gtgcggtcgtgggacccgctg

SEQ ID NO: 11848 - DNA, 21 bp, Artificial Sequence
  Synthetic
cacagcctggcggtgcggtcg

SEQ ID NO: 11849 - DNA, 21 bp, Artificial Sequence
  Synthetic
ccacagcctggcggtgcggtc

SEQ ID NO: 11850 - DNA, 21 bp, Artificial Sequence
  Synthetic
agcgctcagcaggggaactcg

SEQ ID NO: 11851 - DNA, 21 bp, Artificial Sequence
  Synthetic
ggtggcctgtgaaaagcctca

SEQ ID NO: 11852 - DNA, 21 bp, Artificial Sequence
  Synthetic
agcacggggccacggtggcct

SEQ ID NO: 11853 - DNA, 21 bp, Artificial Sequence
  Synthetic
gagaaaaggcgagagaaagca

SEQ ID NO: 11854 - DNA, 21 bp, Artificial Sequence
  Synthetic
ggagaaaaggcgagagaaagc

SEQ ID NO: 11855 - DNA, 21 bp, Artificial Sequence
  Synthetic
taccgttgggagaaaaggcga

SEQ ID NO: 11856 - DNA, 21 bp, Artificial Sequence
  Synthetic
cttaccgttgggagaaaaggc

SEQ ID NO: 11857 - DNA, 21 bp, Artificial Sequence
  Synthetic
tacttaccgttgggagaaaag

SEQ ID NO: 11858 - DNA, 21 bp, Artificial Sequence
  Synthetic
acgccaagtacttaccgttgg

SEQ ID NO: 11859 - DNA, 21 bp, Artificial Sequence
  Synthetic
agacgccaagtacttaccgtt

SEQ ID NO: 11860 - DNA, 21 bp, Artificial Sequence
  Synthetic
cagacgccaagtacttaccgt

SEQ ID NO: 11861 - DNA, 21 bp, Artificial Sequence
  Synthetic
gcagacgccaagtacttaccg

SEQ ID NO: 11862 - DNA, 21 bp, Artificial Sequence
  Synthetic
gtaagtacttggcgtctgctg

SEQ ID NO: 11863 - DNA, 21 bp, Artificial Sequence
  Synthetic
aagtacttggcgtctgctggc

SEQ ID NO: 11864 - DNA, 21 bp, Artificial Sequence
  Synthetic
tctgctggcgaggaccagcgg

SEQ ID NO: 11865 - DNA, 21 bp, Artificial Sequence
  Synthetic
cgaggaccagcggttgaagct

SEQ ID NO: 11866 - DNA, 21 bp, Artificial Sequence
  Synthetic
gaggaccagcggttgaagctg

SEQ ID NO: 11867 - DNA, 21 bp, Artificial Sequence
  Synthetic
tcatttgatcggacgtacccg

SEQ ID NO: 11868 - DNA, 21 bp, Artificial Sequence
  Synthetic
atttgatcggacgtacccgct

SEQ ID NO: 11869 - DNA, 21 bp, Artificial Sequence
  Synthetic
cgtacccgctgaggatatatg

SEQ ID NO: 11870 - DNA, 21 bp, Artificial Sequence
  Synthetic
ggtgtcctgcatatatcctca

SEQ ID NO: 11871 - DNA, 21 bp, Artificial Sequence
  Synthetic
tatgcaggacacctggcagat

SEQ ID NO: 11872 - DNA, 21 bp, Artificial Sequence
  Synthetic
gccaagtagtttgaattaggg

SEQ ID NO: 11873 - DNA, 21 bp, Artificial Sequence
  Synthetic
ggccaagtagtttgaattagg

SEQ ID NO: 11874 - DNA, 21 bp, Artificial Sequence
  Synthetic
ccgtggccaagtagtttgaat

SEQ ID NO: 11875 - DNA, 21 bp, Artificial Sequence
  Synthetic
cctaattcaaactacttggcc

SEQ ID NO: 11876 - DNA, 21 bp, Artificial Sequence
  Synthetic
ttgagcccgtggccaagtagt

SEQ ID NO: 11877 - DNA, 21 bp, Artificial Sequence
  Synthetic
acagccggacggtcttgtcgg

SEQ ID NO: 11878 - DNA, 21 bp, Artificial Sequence
  Synthetic
aaccgacaagaccgtccggct

SEQ ID NO: 11879 - DNA, 21 bp, Artificial Sequence
  Synthetic
accgacaagaccgtccggctg

SEQ ID NO: 11880 - DNA, 21 bp, Artificial Sequence
  Synthetic
cccctgctgagcgctccacag

SEQ ID NO: 11881 - DNA, 21 bp, Artificial Sequence
  Synthetic
cagagcagctgttgaacactg

SEQ ID NO: 11882 - DNA, 21 bp, Artificial Sequence
  Synthetic
cagcaagcagcttgctatcgg

SEQ ID NO: 11883 - DNA, 21 bp, Artificial Sequence
  Synthetic
gcagcaagcagcttgctatcg

SEQ ID NO: 11884 - DNA, 21 bp, Artificial Sequence
  Synthetic
agcagcaagcagcttgctatc

SEQ ID NO: 11885 - DNA, 21 bp, Artificial Sequence
  Synthetic
cagcagcaagcagcttgctat

SEQ ID NO: 11886 - DNA, 21 bp, Artificial Sequence
  Synthetic
ccagcagcaagcagcttgcta

SEQ ID NO: 11887 - DNA, 21 bp, Artificial Sequence
  Synthetic
ccgatagcaagctgcttgctg

SEQ ID NO: 11888 - DNA, 21 bp, Artificial Sequence
  Synthetic
tgacaactcctgtataaaact

SEQ ID NO: 11889 - DNA, 21 bp, Artificial Sequence
  Synthetic
gacaactcctgtataaaactt

SEQ ID NO: 11890 - DNA, 21 bp, Artificial Sequence
  Synthetic
gcaatcagatctggatctgcc

SEQ ID NO: 11891 - DNA, 21 bp, Artificial Sequence
  Synthetic
catcgtcaggcttgttacacc

SEQ ID NO: 11892 - DNA, 21 bp, Artificial Sequence
  Synthetic
ctgggtgtaacaagcctgacg

SEQ ID NO: 11893 - DNA, 21 bp, Artificial Sequence
  Synthetic
tgggtgtaacaagcctgacga

SEQ ID NO: 11894 - DNA, 21 bp, Artificial Sequence
  Synthetic
gggtgtaacaagcctgacgat

SEQ ID NO: 11895 - DNA, 21 bp, Artificial Sequence
  Synthetic
ctgacgatgggagtcccatga

SEQ ID NO: 11896 - DNA, 21 bp, Artificial Sequence
  Synthetic
cgcagtcgtcacacccaatca

SEQ ID NO: 11897 - DNA, 21 bp, Artificial Sequence
  Synthetic
tcgcagtcgtcacacccaatc

SEQ ID NO: 11898 - DNA, 21 bp, Artificial Sequence
  Synthetic
ctgcgatgactggtaccactg

SEQ ID NO: 11899 - DNA, 21 bp, Artificial Sequence
  Synthetic
tttcacgtgcaggccctgtgt

SEQ ID NO: 11900 - DNA, 21 bp, Artificial Sequence
  Synthetic
ggtgcagtcatgattccaaca

SEQ ID NO: 11901 - DNA, 21 bp, Artificial Sequence
  Synthetic
ttggaatcatgactgcacccc

SEQ ID NO: 11902 - DNA, 21 bp, Artificial Sequence
  Synthetic
gaatcatgactgcacccccag

SEQ ID NO: 11903 - DNA, 21 bp, Artificial Sequence
  Synthetic
cagaaccactgcatctcttct

SEQ ID NO: 11904 - DNA, 21 bp, Artificial Sequence
  Synthetic
gcagaaccactgcatctcttc

SEQ ID NO: 11905 - DNA, 21 bp, Artificial Sequence
  Synthetic
ggcagaaccactgcatctctt

SEQ ID NO: 11906 - DNA, 21 bp, Artificial Sequence
  Synthetic
cagtggttctgccccaagtgt

SEQ ID NO: 11907 - DNA, 21 bp, Artificial Sequence
  Synthetic
ttcttgttcgcacacttgggg

SEQ ID NO: 11908 - DNA, 21 bp, Artificial Sequence
  Synthetic
ttctgccccaagtgtgcgaac

SEQ ID NO: 11909 - DNA, 21 bp, Artificial Sequence
  Synthetic
ccttcttcttgttcgcacact

SEQ ID NO: 11910 - DNA, 21 bp, Artificial Sequence
  Synthetic
tccttcttcttgttcgcacac

SEQ ID NO: 11911 - DNA, 21 bp, Artificial Sequence
  Synthetic
ttggagtctatcatcaatgac

SEQ ID NO: 11912 - DNA, 21 bp, Artificial Sequence
  Synthetic
ggagtctatcatcaatgacat

SEQ ID NO: 11913 - DNA, 21 bp, Artificial Sequence
  Synthetic
gacatgagagatcttccaaat

SEQ ID NO: 11914 - DNA, 21 bp, Artificial Sequence
  Synthetic
ccaatgcaatgaactcacatt

SEQ ID NO: 11915 - DNA, 21 bp, Artificial Sequence
  Synthetic
ttgcattgactggagtgtgga

SEQ ID NO: 11916 - DNA, 21 bp, Artificial Sequence
  Synthetic
acctttgcattgactggagtg

SEQ ID NO: 11917 - DNA, 21 bp, Artificial Sequence
  Synthetic
aacctttgcattgactggagt

SEQ ID NO: 11918 - DNA, 21 bp, Artificial Sequence
  Synthetic
ctttacaacctttgcattgac

SEQ ID NO: 11919 - DNA, 21 bp, Artificial Sequence
  Synthetic
cctttacaacctttgcattga

SEQ ID NO: 11920 - DNA, 21 bp, Artificial Sequence
  Synthetic
ccagtcaatgcaaaggttgta

SEQ ID NO: 11921 - DNA, 21 bp, Artificial Sequence
  Synthetic
tacaaaatcatcactcggcca

SEQ ID NO: 11922 - DNA, 21 bp, Artificial Sequence
  Synthetic
gagtgtttgtaggtccattgg

SEQ ID NO: 11923 - DNA, 21 bp, Artificial Sequence
  Synthetic
caatggacctacaaacactcc

SEQ ID NO: 11924 - DNA, 21 bp, Artificial Sequence
  Synthetic
gcgtaaacgcctctacccatc

SEQ ID NO: 11925 - DNA, 21 bp, Artificial Sequence
  Synthetic
cgtaaacgcctctacccatct

SEQ ID NO: 11926 - DNA, 21 bp, Artificial Sequence
  Synthetic
gtaaacgcctctacccatctc

SEQ ID NO: 11927 - DNA, 21 bp, Artificial Sequence
  Synthetic
aacgcctctacccatctcggg

SEQ ID NO: 11928 - DNA, 21 bp, Artificial Sequence
  Synthetic
ctgaactcttcccgagatggg

SEQ ID NO: 11929 - DNA, 21 bp, Artificial Sequence
  Synthetic
ctacccatctcgggaagagtt

SEQ ID NO: 11930 - DNA, 21 bp, Artificial Sequence
  Synthetic
acccatctcgggaagagttca

SEQ ID NO: 11931 - DNA, 21 bp, Artificial Sequence
  Synthetic
gctctctgaactcttcccgag

SEQ ID NO: 11932 - DNA, 21 bp, Artificial Sequence
  Synthetic
cagatgctctctgaactcttc

SEQ ID NO: 11933 - DNA, 21 bp, Artificial Sequence
  Synthetic
cgggaagagttcagagagcat

SEQ ID NO: 11934 - DNA, 21 bp, Artificial Sequence
  Synthetic
gggaagagttcagagagcatc

SEQ ID NO: 11935 - DNA, 21 bp, Artificial Sequence
  Synthetic
acaattagctccagatgctct

SEQ ID NO: 11936 - DNA, 21 bp, Artificial Sequence
  Synthetic
agagagcatctggagctaatt

SEQ ID NO: 11937 - DNA, 21 bp, Artificial Sequence
  Synthetic
aatagtgcaacctacaatggt

SEQ ID NO: 11938 - DNA, 21 bp, Artificial Sequence
  Synthetic
tggattgagagatctgagtca

SEQ ID NO: 11939 - DNA, 21 bp, Artificial Sequence
  Synthetic
atccagcatggattgagagat

SEQ ID NO: 11940 - DNA, 21 bp, Artificial Sequence
  Synthetic
attctggacaacattgtcacc

SEQ ID NO: 11941 - DNA, 21 bp, Artificial Sequence
  Synthetic
ggcacagagacagcttacatc

SEQ ID NO: 11942 - DNA, 21 bp, Artificial Sequence
  Synthetic
ccatttcatcacccagttaat

SEQ ID NO: 11943 - DNA, 21 bp, Artificial Sequence
  Synthetic
aaatttcttattaactgggtg

SEQ ID NO: 11944 - DNA, 21 bp, Artificial Sequence
  Synthetic
ctggaacaaatttcttattaa

SEQ ID NO: 11945 - DNA, 21 bp, Artificial Sequence
  Synthetic
gacaatcactttgtaataatc

SEQ ID NO: 11946 - DNA, 21 bp, Artificial Sequence
  Synthetic
tgacaatcactttgtaataat

SEQ ID NO: 11947 - DNA, 21 bp, Artificial Sequence
  Synthetic
tacaaagtgattgtcaatcca

SEQ ID NO: 11948 - DNA, 21 bp, Artificial Sequence
  Synthetic
tgattgtcaatccaatggatt

SEQ ID NO: 11949 - DNA, 21 bp, Artificial Sequence
  Synthetic
tacgtatggtctctaaatcca

SEQ ID NO: 11950 - DNA, 21 bp, Artificial Sequence
  Synthetic
gatttagagaccatacgtaag

SEQ ID NO: 11951 - DNA, 21 bp, Artificial Sequence
  Synthetic
aacatctccaagcacaagtat

SEQ ID NO: 11952 - DNA, 21 bp, Artificial Sequence
  Synthetic
cccgactctgatacttgtgct

SEQ ID NO: 11953 - DNA, 21 bp, Artificial Sequence
  Synthetic
ctccaagcacaagtatcagag

SEQ ID NO: 11954 - DNA, 21 bp, Artificial Sequence
  Synthetic
tcccgactctgatacttgtgc

SEQ ID NO: 11955 - DNA, 21 bp, Artificial Sequence
  Synthetic
tccaagcacaagtatcagagt

SEQ ID NO: 11956 - DNA, 21 bp, Artificial Sequence
  Synthetic
ccaagcacaagtatcagagtc

SEQ ID NO: 11957 - DNA, 21 bp, Artificial Sequence
  Synthetic
aagcacaagtatcagagtcgg

SEQ ID NO: 11958 - DNA, 21 bp, Artificial Sequence
  Synthetic
tatcagagtcgggagagcttt

SEQ ID NO: 11959 - DNA, 21 bp, Artificial Sequence
  Synthetic
cagaataaggtttacatcatc

SEQ ID NO: 11960 - DNA, 21 bp, Artificial Sequence
  Synthetic
attatacttaacactgttggc

SEQ ID NO: 11961 - DNA, 21 bp, Artificial Sequence
  Synthetic
ccaacagtgttaagtataatg

SEQ ID NO: 11962 - DNA, 21 bp, Artificial Sequence
  Synthetic
agtcagtatactaagactgcc

SEQ ID NO: 11963 - DNA, 21 bp, Artificial Sequence
  Synthetic
gtcagtatactaagactgccc

SEQ ID NO: 11964 - DNA, 21 bp, Artificial Sequence
  Synthetic
gtaacagacgttcacaatctc

SEQ ID NO: 11965 - DNA, 21 bp, Artificial Sequence
  Synthetic
tccctctgccctctcagggaa

SEQ ID NO: 11966 - DNA, 21 bp, Artificial Sequence
  Synthetic
tggcaaacagcccctttccct

SEQ ID NO: 11967 - DNA, 21 bp, Artificial Sequence
  Synthetic
tgtggcaaacagcccctttcc

SEQ ID NO: 11968 - DNA, 21 bp, Artificial Sequence
  Synthetic
gctgtttgccacacagctcat

SEQ ID NO: 11969 - DNA, 21 bp, Artificial Sequence
  Synthetic
ctgtttgccacacagctcatc

SEQ ID NO: 11970 - DNA, 21 bp, Artificial Sequence
  Synthetic
tttgccacacagctcatccgg

SEQ ID NO: 11971 - DNA, 21 bp, Artificial Sequence
  Synthetic
ttgccacacagctcatccgga

SEQ ID NO: 11972 - DNA, 21 bp, Artificial Sequence
  Synthetic
tgccacacagctcatccggaa

SEQ ID NO: 11973 - DNA, 21 bp, Artificial Sequence
  Synthetic
gccacacagctcatccggaag

SEQ ID NO: 11974 - DNA, 21 bp, Artificial Sequence
  Synthetic
ccacacagctcatccggaagg

SEQ ID NO: 11975 - DNA, 21 bp, Artificial Sequence
  Synthetic
aagatggtctcccccttccgg

SEQ ID NO: 11976 - DNA, 21 bp, Artificial Sequence
  Synthetic
tacgaagatggtctccccctt

SEQ ID NO: 11977 - DNA, 21 bp, Artificial Sequence
  Synthetic
ggaagggggagaccatcttcg

SEQ ID NO: 11978 - DNA, 21 bp, Artificial Sequence
  Synthetic
gcagccaccaggggccgttct

SEQ ID NO: 11979 - DNA, 21 bp, Artificial Sequence
  Synthetic
cagagaaactgtgcagccacc

SEQ ID NO: 11980 - DNA, 21 bp, Artificial Sequence
  Synthetic
ccagagaaactgtgcagccac

SEQ ID NO: 11981 - DNA, 21 bp, Artificial Sequence
  Synthetic
cctggtggctgcacagtttct

SEQ ID NO: 11982 - DNA, 21 bp, Artificial Sequence
  Synthetic
ctggtggctgcacagtttctc

SEQ ID NO: 11983 - DNA, 21 bp, Artificial Sequence
  Synthetic
gtagcgataaagtgcattcca

SEQ ID NO: 11984 - DNA, 21 bp, Artificial Sequence
  Synthetic
cggtagcgataaagtgcattc

SEQ ID NO: 11985 - DNA, 21 bp, Artificial Sequence
  Synthetic
ctggaatgcactttatcgcta

SEQ ID NO: 11986 - DNA, 21 bp, Artificial Sequence
  Synthetic
atgcactttatcgctaccgag

SEQ ID NO: 11987 - DNA, 21 bp, Artificial Sequence
  Synthetic
gtcagcctgtgaccactgcct

SEQ ID NO: 11988 - DNA, 21 bp, Artificial Sequence
  Synthetic
gtgaccactgccttagggcac

SEQ ID NO: 11989 - DNA, 21 bp, Artificial Sequence
  Synthetic
gaccactgccttagggcacta

SEQ ID NO: 11990 - DNA, 21 bp, Artificial Sequence
  Synthetic
gccttagggcactagagaagg

SEQ ID NO: 11991 - DNA, 21 bp, Artificial Sequence
  Synthetic
cttagggcactagagaaggca

SEQ ID NO: 11992 - DNA, 21 bp, Artificial Sequence
  Synthetic
ttagggcactagagaaggcag

SEQ ID NO: 11993 - DNA, 21 bp, Artificial Sequence
  Synthetic
agggcactagagaaggcagag

SEQ ID NO: 11994 - DNA, 21 bp, Artificial Sequence
  Synthetic
gagaaggcagaggagaatgcc

SEQ ID NO: 11995 - DNA, 21 bp, Artificial Sequence
  Synthetic
aggagaatgcccagaggctga

SEQ ID NO: 11996 - DNA, 21 bp, Artificial Sequence
  Synthetic
ggagaatgcccagaggctgac

SEQ ID NO: 11997 - DNA, 21 bp, Artificial Sequence
  Synthetic
gagaatgcccagaggctgacc

SEQ ID NO: 11998 - DNA, 21 bp, Artificial Sequence
  Synthetic
gcctggtttcccggtcagcct

SEQ ID NO: 11999 - DNA, 21 bp, Artificial Sequence
  Synthetic
caggccaggttctgcctcacc

SEQ ID NO: 12000 - DNA, 21 bp, Artificial Sequence
  Synthetic
agtgcacagctctgggtgagg

SEQ ID NO: 12001 - DNA, 21 bp, Artificial Sequence
  Synthetic
gcgcacagtgcacagctctgg

SEQ ID NO: 12002 - DNA, 21 bp, Artificial Sequence
  Synthetic
ctttgcgcacagtgcacagct

SEQ ID NO: 12003 - DNA, 21 bp, Artificial Sequence
  Synthetic
actgtgcgcaaagacctccac

SEQ ID NO: 12004 - DNA, 21 bp, Artificial Sequence
  Synthetic
tggcaatggggacagttctgg

SEQ ID NO: 12005 - DNA, 21 bp, Artificial Sequence
  Synthetic
ttggcaatggggacagttctg

SEQ ID NO: 12006 - DNA, 21 bp, Artificial Sequence
  Synthetic
cagaactgtccccattgccaa

SEQ ID NO: 12007 - DNA, 21 bp, Artificial Sequence
  Synthetic
caagaatactcacttggcaat

SEQ ID NO: 12008 - DNA, 21 bp, Artificial Sequence
  Synthetic
ccaagaatactcacttggcaa

SEQ ID NO: 12009 - DNA, 21 bp, Artificial Sequence
  Synthetic
cccaagaatactcacttggca

SEQ ID NO: 12010 - DNA, 21 bp, Artificial Sequence
  Synthetic
aacaggtgatgtactgcagtg

SEQ ID NO: 12011 - DNA, 21 bp, Artificial Sequence
  Synthetic
cagaatgtcggttggcagcca

SEQ ID NO: 12012 - DNA, 21 bp, Artificial Sequence
  Synthetic
gtcctgtgcccaggcccctcc

SEQ ID NO: 12013 - DNA, 21 bp, Artificial Sequence
  Synthetic
atcctgggaggggcctgggca

SEQ ID NO: 12014 - DNA, 21 bp, Artificial Sequence
  Synthetic
aggggtcatcctgggaggggc

SEQ ID NO: 12015 - DNA, 21 bp, Artificial Sequence
  Synthetic
gatgcaaggggtcatcctggg

SEQ ID NO: 12016 - DNA, 21 bp, Artificial Sequence
  Synthetic
ggatgcaaggggtcatcctgg

SEQ ID NO: 12017 - DNA, 21 bp, Artificial Sequence
  Synthetic
gaggatgcaaggggtcatcct

SEQ ID NO: 12018 - DNA, 21 bp, Artificial Sequence
  Synthetic
agaggatgcaaggggtcatcc

SEQ ID NO: 12019 - DNA, 21 bp, Artificial Sequence
  Synthetic
gagaggatgcaaggggtcatc

SEQ ID NO: 12020 - DNA, 21 bp, Artificial Sequence
  Synthetic
gaagcttattgagaggatgca

SEQ ID NO: 12021 - DNA, 21 bp, Artificial Sequence
  Synthetic
tgaagcttattgagaggatgc

SEQ ID NO: 12022 - DNA, 21 bp, Artificial Sequence
  Synthetic
ttgcatcctctcaataagctt

SEQ ID NO: 12023 - DNA, 21 bp, Artificial Sequence
  Synthetic
tgcatcctctcaataagcttc

SEQ ID NO: 12024 - DNA, 21 bp, Artificial Sequence
  Synthetic
atgcctcctgaagcttattga

SEQ ID NO: 12025 - DNA, 21 bp, Artificial Sequence
  Synthetic
ccatgcctcctgaagcttatt

SEQ ID NO: 12026 - DNA, 21 bp, Artificial Sequence
  Synthetic
tctcaataagcttcaggaggc

SEQ ID NO: 12027 - DNA, 21 bp, Artificial Sequence
  Synthetic
ctccatgcctcctgaagctta

SEQ ID NO: 12028 - DNA, 21 bp, Artificial Sequence
  Synthetic
ctcaataagcttcaggaggca

SEQ ID NO: 12029 - DNA, 21 bp, Artificial Sequence
  Synthetic
agaaacctacctccatgcctc

SEQ ID NO: 12030 - DNA, 21 bp, Artificial Sequence
  Synthetic
aggtgggtagtgaatactcct

SEQ ID NO: 12031 - DNA, 21 bp, Artificial Sequence
  Synthetic
caggtgggtagtgaatactcc

SEQ ID NO: 12032 - DNA, 21 bp, Artificial Sequence
  Synthetic
tcaggtgggtagtgaatactc

SEQ ID NO: 12033 - DNA, 21 bp, Artificial Sequence
  Synthetic
ccaggagtattcactacccac

SEQ ID NO: 12034 - DNA, 21 bp, Artificial Sequence
  Synthetic
gcttgcagtctcaggtgggta

SEQ ID NO: 12035 - DNA, 21 bp, Artificial Sequence
  Synthetic
acatgatgcttgcagtctcag

SEQ ID NO: 12036 - DNA, 21 bp, Artificial Sequence
  Synthetic
tgcaagcatcatgttgatggc

SEQ ID NO: 12037 - DNA, 21 bp, Artificial Sequence
  Synthetic
atggctaggatggtggccaca

SEQ ID NO: 12038 - DNA, 21 bp, Artificial Sequence
  Synthetic
atggtggccacagtgaagcag

SEQ ID NO: 12039 - DNA, 21 bp, Artificial Sequence
  Synthetic
tgttcactgcaggcgaaggac

SEQ ID NO: 12040 - DNA, 21 bp, Artificial Sequence
  Synthetic
gcaggcgaaggacaaggaccg

SEQ ID NO: 12041 - DNA, 21 bp, Artificial Sequence
  Synthetic
tttgtaacaaaacagccaatg

SEQ ID NO: 12042 - DNA, 21 bp, Artificial Sequence
  Synthetic
tgtaacaaaacagccaatgaa

SEQ ID NO: 12043 - DNA, 21 bp, Artificial Sequence
  Synthetic
gtaacaaaacagccaatgaag

SEQ ID NO: 12044 - DNA, 21 bp, Artificial Sequence
  Synthetic
aacaaaacagccaatgaagag

SEQ ID NO: 12045 - DNA, 21 bp, Artificial Sequence
  Synthetic
acaaaacagccaatgaagagg

SEQ ID NO: 12046 - DNA, 21 bp, Artificial Sequence
  Synthetic
gaggaaattgtccataaactt

SEQ ID NO: 12047 - DNA, 21 bp, Artificial Sequence
  Synthetic
aggaaattgtccataaacttc

SEQ ID NO: 12048 - DNA, 21 bp, Artificial Sequence
  Synthetic
ggaaattgtccataaacttct

SEQ ID NO: 12049 - DNA, 21 bp, Artificial Sequence
  Synthetic
gaatttgtctcccagaagttt

SEQ ID NO: 12050 - DNA, 21 bp, Artificial Sequence
  Synthetic
aataaccttgaatttgtctcc

SEQ ID NO: 12051 - DNA, 21 bp, Artificial Sequence
  Synthetic
cttcctctaatccagggccaa

SEQ ID NO: 12052 - DNA, 21 bp, Artificial Sequence
  Synthetic
ttcctctaatccagggccaac

SEQ ID NO: 12053 - DNA, 21 bp, Artificial Sequence
  Synthetic
ccgcagaagttccagttggcc

SEQ ID NO: 12054 - DNA, 21 bp, Artificial Sequence
  Synthetic
ccagggccaactggaacttct

SEQ ID NO: 12055 - DNA, 21 bp, Artificial Sequence
  Synthetic
cagggccaactggaacttctg

SEQ ID NO: 12056 - DNA, 21 bp, Artificial Sequence
  Synthetic
aacttctgcggagactcttca

SEQ ID NO: 12057 - DNA, 21 bp, Artificial Sequence
  Synthetic
ggcctctgtgaagagtctccg

SEQ ID NO: 12058 - DNA, 21 bp, Artificial Sequence
  Synthetic
gactcttcacagaggccctct

SEQ ID NO: 12059 - DNA, 21 bp, Artificial Sequence
  Synthetic
tcctcatagagggcctctgtg

SEQ ID NO: 12060 - DNA, 21 bp, Artificial Sequence
  Synthetic
ctcttcacagaggccctctat

SEQ ID NO: 12061 - DNA, 21 bp, Artificial Sequence
  Synthetic
tcttcacagaggccctctatg

SEQ ID NO: 12062 - DNA, 21 bp, Artificial Sequence
  Synthetic
gcttcctcatagagggcctct

SEQ ID NO: 12063 - DNA, 21 bp, Artificial Sequence
  Synthetic
ctggctgactgcttcctcata

SEQ ID NO: 12064 - DNA, 21 bp, Artificial Sequence
  Synthetic
acctggctgactgcttcctca

SEQ ID NO: 12065 - DNA, 21 bp, Artificial Sequence
  Synthetic
tatgaggaagcagtcagccag

SEQ ID NO: 12066 - DNA, 21 bp, Artificial Sequence
  Synthetic
ccccacagtggttcactccag

SEQ ID NO: 12067 - DNA, 21 bp, Artificial Sequence
  Synthetic
atccatctggagtgaaccact

SEQ ID NO: 12068 - DNA, 21 bp, Artificial Sequence
  Synthetic
agagaccggaatccatctgga

SEQ ID NO: 12069 - DNA, 21 bp, Artificial Sequence
  Synthetic
aaagagagaccggaatccatc

SEQ ID NO: 12070 - DNA, 21 bp, Artificial Sequence
  Synthetic
caaagagagaccggaatccat

SEQ ID NO: 12071 - DNA, 21 bp, Artificial Sequence
  Synthetic
ccaacaagagcaaagagagac

SEQ ID NO: 12072 - DNA, 21 bp, Artificial Sequence
  Synthetic
cccaacaagagcaaagagaga

SEQ ID NO: 12073 - DNA, 21 bp, Artificial Sequence
  Synthetic
tccggtctctctttgctcttg

SEQ ID NO: 12074 - DNA, 21 bp, Artificial Sequence
  Synthetic
ccggtctctctttgctcttgt

SEQ ID NO: 12075 - DNA, 21 bp, Artificial Sequence
  Synthetic
attggtcccaacaagagcaaa

SEQ ID NO: 12076 - DNA, 21 bp, Artificial Sequence
  Synthetic
ccattggtcccaacaagagca

SEQ ID NO: 12077 - DNA, 21 bp, Artificial Sequence
  Synthetic
tccttggccattggtcccaac

SEQ ID NO: 12078 - DNA, 21 bp, Artificial Sequence
  Synthetic
ctcttgttgggaccaatggcc

SEQ ID NO: 12079 - DNA, 21 bp, Artificial Sequence
  Synthetic
tcttgttgggaccaatggcca

SEQ ID NO: 12080 - DNA, 21 bp, Artificial Sequence
  Synthetic
ttgggaccaatggccaaggaa

SEQ ID NO: 12081 - DNA, 21 bp, Artificial Sequence
  Synthetic
tgggaccaatggccaaggaat

SEQ ID NO: 12082 - DNA, 21 bp, Artificial Sequence
  Synthetic
gccaaggaatcgggaccaggt

SEQ ID NO: 12083 - DNA, 21 bp, Artificial Sequence
  Synthetic
accccccagctccctaagcca

SEQ ID NO: 12084 - DNA, 21 bp, Artificial Sequence
  Synthetic
gacccactggcttagggagct

SEQ ID NO: 12085 - DNA, 21 bp, Artificial Sequence
  Synthetic
ggacccactggcttagggagc

SEQ ID NO: 12086 - DNA, 21 bp, Artificial Sequence
  Synthetic
tggacccactggcttagggag

SEQ ID NO: 12087 - DNA, 21 bp, Artificial Sequence
  Synthetic
aggcatggacccactggctta

SEQ ID NO: 12088 - DNA, 21 bp, Artificial Sequence
  Synthetic
caggcatggacccactggctt

SEQ ID NO: 12089 - DNA, 21 bp, Artificial Sequence
  Synthetic
acaggcatggacccactggct

SEQ ID NO: 12090 - DNA, 21 bp, Artificial Sequence
  Synthetic
tgggtccatgcctgtgacact

SEQ ID NO: 12091 - DNA, 21 bp, Artificial Sequence
  Synthetic
gggtccatgcctgtgacactc

SEQ ID NO: 12092 - DNA, 21 bp, Artificial Sequence
  Synthetic
caactccagagtgtcacaggc

SEQ ID NO: 12093 - DNA, 21 bp, Artificial Sequence
  Synthetic
catgcctgtgacactctggag

SEQ ID NO: 12094 - DNA, 21 bp, Artificial Sequence
  Synthetic
gacactctggagttgaagcct

SEQ ID NO: 12095 - DNA, 21 bp, Artificial Sequence
  Synthetic
acggtcctgaggcttcaactc

SEQ ID NO: 12096 - DNA, 21 bp, Artificial Sequence
  Synthetic
tggagttgaagcctcaggacc

SEQ ID NO: 12097 - DNA, 21 bp, Artificial Sequence
  Synthetic
ggcgtcaagctgctcacggtc

SEQ ID NO: 12098 - DNA, 21 bp, Artificial Sequence
  Synthetic
gccttcattgaccagctatac

SEQ ID NO: 12099 - DNA, 21 bp, Artificial Sequence
  Synthetic
atgtccttgtatagctggtca

SEQ ID NO: 12100 - DNA, 21 bp, Artificial Sequence
  Synthetic
ttgaccagctatacaaggaca

SEQ ID NO: 12101 - DNA, 21 bp, Artificial Sequence
  Synthetic
gtattactgtcttacagcaac

SEQ ID NO: 12102 - DNA, 21 bp, Artificial Sequence
  Synthetic
attactgtcttacagcaactg

SEQ ID NO: 12103 - DNA, 21 bp, Artificial Sequence
  Synthetic
caactggagagtttcttaact

SEQ ID NO: 12104 - DNA, 21 bp, Artificial Sequence
  Synthetic
ctggagagtttcttaactgtg

SEQ ID NO: 12105 - DNA, 21 bp, Artificial Sequence
  Synthetic
gaggccagatccttcacagtt

SEQ ID NO: 12106 - DNA, 21 bp, Artificial Sequence
  Synthetic
ggatctggcctctttgtgctt

SEQ ID NO: 12107 - DNA, 21 bp, Artificial Sequence
  Synthetic
tcacagcagctctgaagcaca

SEQ ID NO: 12108 - DNA, 21 bp, Artificial Sequence
  Synthetic
tctttgtgcttcagagctgct

SEQ ID NO: 12109 - DNA, 21 bp, Artificial Sequence
  Synthetic
acgccatgactcacagcagct

SEQ ID NO: 12110 - DNA, 21 bp, Artificial Sequence
  Synthetic
tgggcacacaactgtggttgc

SEQ ID NO: 12111 - DNA, 21 bp, Artificial Sequence
  Synthetic
accacagttgtgtgcccaatg

SEQ ID NO: 12112 - DNA, 21 bp, Artificial Sequence
  Synthetic
tctggaaaggaggtctctgca

SEQ ID NO: 12113 - DNA, 21 bp, Artificial Sequence
  Synthetic
ccaatgcagagacctcctttc

SEQ ID NO: 12114 - DNA, 21 bp, Artificial Sequence
  Synthetic
tccagagcagtgacatgcaaa

SEQ ID NO: 12115 - DNA, 21 bp, Artificial Sequence
  Synthetic
ctccagagcagtgacatgcaa

SEQ ID NO: 12116 - DNA, 21 bp, Artificial Sequence
  Synthetic
ctgctctggaggatattaagc

SEQ ID NO: 12117 - DNA, 21 bp, Artificial Sequence
  Synthetic
tgctctggaggatattaagcc

SEQ ID NO: 12118 - DNA, 21 bp, Artificial Sequence
  Synthetic
ctctcctggcttaatatcctc

SEQ ID NO: 12119 - DNA, 21 bp, Artificial Sequence
  Synthetic
ctctggaggatattaagccag

SEQ ID NO: 12120 - DNA, 21 bp, Artificial Sequence
  Synthetic
gaggatattaagccaggagag

SEQ ID NO: 12121 - DNA, 21 bp, Artificial Sequence
  Synthetic
ggatattaagccaggagaggt

SEQ ID NO: 12122 - DNA, 21 bp, Artificial Sequence
  Synthetic
caggaaatttgtatcagctac

SEQ ID NO: 12123 - DNA, 21 bp, Artificial Sequence
  Synthetic
aatgtaacaccaacacagcaa

SEQ ID NO: 12124 - DNA, 21 bp, Artificial Sequence
  Synthetic
tgaagatcttgaaaatgacat

SEQ ID NO: 12125 - DNA, 21 bp, Artificial Sequence
  Synthetic
atgacattagaactttctttc

SEQ ID NO: 12126 - DNA, 21 bp, Artificial Sequence
  Synthetic
agttgatgggtatactcagga

SEQ ID NO: 12127 - DNA, 21 bp, Artificial Sequence
  Synthetic
aaagagttgatgggtatactc

SEQ ID NO: 12128 - DNA, 21 bp, Artificial Sequence
  Synthetic
caaagagttgatgggtatact

SEQ ID NO: 12129 - DNA, 21 bp, Artificial Sequence
  Synthetic
ctgagtatacccatcaactct

SEQ ID NO: 12130 - DNA, 21 bp, Artificial Sequence
  Synthetic
tgagtatacccatcaactctt

SEQ ID NO: 12131 - DNA, 21 bp, Artificial Sequence
  Synthetic
gagtatacccatcaactcttt

SEQ ID NO: 12132 - DNA, 21 bp, Artificial Sequence
  Synthetic
atacccatcaactctttgggg

SEQ ID NO: 12133 - DNA, 21 bp, Artificial Sequence
  Synthetic
ttactcatccccaaagagttg

SEQ ID NO: 12134 - DNA, 21 bp, Artificial Sequence
  Synthetic
taagttacttactcatcccca

SEQ ID NO: 12135 - DNA, 21 bp, Artificial Sequence
  Synthetic
ttgtaaccaaaagcagtttca

SEQ ID NO: 12136 - DNA, 21 bp, Artificial Sequence
  Synthetic
gctaccagcaatatagtataa

SEQ ID NO: 12137 - DNA, 21 bp, Artificial Sequence
  Synthetic
gcctgtcaacaatgttccgtg

SEQ ID NO: 12138 - DNA, 21 bp, Artificial Sequence
  Synthetic
actttagatgcatattcaaca

SEQ ID NO: 12139 - DNA, 21 bp, Artificial Sequence
  Synthetic
aactttagatgcatattcaac

SEQ ID NO: 12140 - DNA, 21 bp, Artificial Sequence
  Synthetic
ttgaatatgcatctaaagttg

SEQ ID NO: 12141 - DNA, 21 bp, Artificial Sequence
  Synthetic
gaatatgcatctaaagttgat

SEQ ID NO: 12142 - DNA, 21 bp, Artificial Sequence
  Synthetic
ttgatgagaactttgactgtg

SEQ ID NO: 12143 - DNA, 21 bp, Artificial Sequence
  Synthetic
gaactttgactgtgtagaggt

SEQ ID NO: 12144 - DNA, 21 bp, Artificial Sequence
  Synthetic
ttattctttaggcagatgatg

SEQ ID NO: 12145 - DNA, 21 bp, Artificial Sequence
  Synthetic
attctttaggcagatgatgtt

SEQ ID NO: 12146 - DNA, 21 bp, Artificial Sequence
  Synthetic
aaattagacaaatcattccac

SEQ ID NO: 12147 - DNA, 21 bp, Artificial Sequence
  Synthetic
cgtgtttgtgcaaaatccagg

SEQ ID NO: 12148 - DNA, 21 bp, Artificial Sequence
  Synthetic
tcgtgtttgtgcaaaatccag

SEQ ID NO: 12149 - DNA, 21 bp, Artificial Sequence
  Synthetic
acgaatgatttcctttcttta

SEQ ID NO: 12150 - DNA, 21 bp, Artificial Sequence
  Synthetic
cgaatgatttcctttctttac

SEQ ID NO: 12151 - DNA, 21 bp, Artificial Sequence
  Synthetic
gatttcctttctttactggaa

SEQ ID NO: 12152 - DNA, 21 bp, Artificial Sequence
  Synthetic
atttcctttctttactggaaa

SEQ ID NO: 12153 - DNA, 21 bp, Artificial Sequence
  Synthetic
aggaagttgatttcaagccat

SEQ ID NO: 12154 - DNA, 21 bp, Artificial Sequence
  Synthetic
ggaagttgatttcaagccatt

SEQ ID NO: 12155 - DNA, 21 bp, Artificial Sequence
  Synthetic
tgaagtaaggttccgaatggc

SEQ ID NO: 12156 - DNA, 21 bp, Artificial Sequence
  Synthetic
gagtaggtatgaagtaaggtt

SEQ ID NO: 12157 - DNA, 21 bp, Artificial Sequence
  Synthetic
tggactgagaactgagtaggt

SEQ ID NO: 12158 - DNA, 21 bp, Artificial Sequence
  Synthetic
cctactcagttctcagtccaa

SEQ ID NO: 12159 - DNA, 21 bp, Artificial Sequence
  Synthetic
ctactcagttctcagtccaac

SEQ ID NO: 12160 - DNA, 21 bp, Artificial Sequence
  Synthetic
actcagttctcagtccaacag

SEQ ID NO: 12161 - DNA, 21 bp, Artificial Sequence
  Synthetic
ctcctcctgttggactgagaa

SEQ ID NO: 12162 - DNA, 21 bp, Artificial Sequence
  Synthetic
ctcagttctcagtccaacagg

SEQ ID NO: 12163 - DNA, 21 bp, Artificial Sequence
  Synthetic
cagttctcagtccaacaggag

SEQ ID NO: 12164 - DNA, 21 bp, Artificial Sequence
  Synthetic
atttatctttaccttatatat

SEQ ID NO: 12165 - DNA, 21 bp, Artificial Sequence
  Synthetic
ctctacatgtcatgtcagcct

SEQ ID NO: 12166 - DNA, 21 bp, Artificial Sequence
  Synthetic
tccctaggctgacatgacatg

SEQ ID NO: 12167 - DNA, 21 bp, Artificial Sequence
  Synthetic
cctctacatgtcatgtcagcc

SEQ ID NO: 12168 - DNA, 21 bp, Artificial Sequence
  Synthetic
tgacatgacatgtagaggctt

SEQ ID NO: 12169 - DNA, 21 bp, Artificial Sequence
  Synthetic
acatgacatgtagaggctttc

SEQ ID NO: 12170 - DNA, 21 bp, Artificial Sequence
  Synthetic
gtagaggctttcgagaatatc

SEQ ID NO: 12171 - DNA, 21 bp, Artificial Sequence
  Synthetic
ctgaagcctttcatgatattc

SEQ ID NO: 12172 - DNA, 21 bp, Artificial Sequence
  Synthetic
aataaaccacatcaaaaaggt

SEQ ID NO: 12173 - DNA, 21 bp, Artificial Sequence
  Synthetic
aactggaaagactctggttgc

SEQ ID NO: 12174 - DNA, 21 bp, Artificial Sequence
  Synthetic
attggcaagtgctctggcaac

SEQ ID NO: 12175 - DNA, 21 bp, Artificial Sequence
  Synthetic
tggttgccagagcacttgcca

SEQ ID NO: 12176 - DNA, 21 bp, Artificial Sequence
  Synthetic
cacttgccaatgagtgcagtc

SEQ ID NO: 12177 - DNA, 21 bp, Artificial Sequence
  Synthetic
acttgccaatgagtgcagtca

SEQ ID NO: 12178 - DNA, 21 bp, Artificial Sequence
  Synthetic
cttgccaatgagtgcagtcaa

SEQ ID NO: 12179 - DNA, 21 bp, Artificial Sequence
  Synthetic
tgagtgcagtcaaggggataa

SEQ ID NO: 12180 - DNA, 21 bp, Artificial Sequence
  Synthetic
agacaatcagcacctttcctc

SEQ ID NO: 12181 - DNA, 21 bp, Artificial Sequence
  Synthetic
aggtgctgattgtctaagtaa

SEQ ID NO: 12182 - DNA, 21 bp, Artificial Sequence
  Synthetic
ctgattgtctaagtaaatggg

SEQ ID NO: 12183 - DNA, 21 bp, Artificial Sequence
  Synthetic
tgattgtctaagtaaatgggt

SEQ ID NO: 12184 - DNA, 21 bp, Artificial Sequence
  Synthetic
attgtctaagtaaatgggtag

SEQ ID NO: 12185 - DNA, 21 bp, Artificial Sequence
  Synthetic
taagtaaatgggtaggagaat

SEQ ID NO: 12186 - DNA, 21 bp, Artificial Sequence
  Synthetic
gatgggcgcatctgataggcc

SEQ ID NO: 12187 - DNA, 21 bp, Artificial Sequence
  Synthetic
tttcgtcaaaaaaaataattg

SEQ ID NO: 12188 - DNA, 21 bp, Artificial Sequence
  Synthetic
atcttgcctgcttgaccgtac

SEQ ID NO: 12189 - DNA, 21 bp, Artificial Sequence
  Synthetic
gatcttgcctgcttgaccgta

SEQ ID NO: 12190 - DNA, 21 bp, Artificial Sequence
  Synthetic
gagctagcagggtggaaacaa

SEQ ID NO: 12191 - DNA, 21 bp, Artificial Sequence
  Synthetic
gtttccaccctgctagctctt

SEQ ID NO: 12192 - DNA, 21 bp, Artificial Sequence
  Synthetic
catccataagagctagcaggg

SEQ ID NO: 12193 - DNA, 21 bp, Artificial Sequence
  Synthetic
ccatccataagagctagcagg

SEQ ID NO: 12194 - DNA, 21 bp, Artificial Sequence
  Synthetic
ccaccctgctagctcttatgg

SEQ ID NO: 12195 - DNA, 21 bp, Artificial Sequence
  Synthetic
caatccatccataagagctag

SEQ ID NO: 12196 - DNA, 21 bp, Artificial Sequence
  Synthetic
ctgctagctcttatggatgga

SEQ ID NO: 12197 - DNA, 21 bp, Artificial Sequence
  Synthetic
tctgctgtccaatccatccat

SEQ ID NO: 12198 - DNA, 21 bp, Artificial Sequence
  Synthetic
tcttatggatggattggacag

SEQ ID NO: 12199 - DNA, 21 bp, Artificial Sequence
  Synthetic
ttatggatggattggacagca

SEQ ID NO: 12200 - DNA, 21 bp, Artificial Sequence
  Synthetic
tatggatggattggacagcag

SEQ ID NO: 12201 - DNA, 21 bp, Artificial Sequence
  Synthetic
atggatggattggacagcaga

SEQ ID NO: 12202 - DNA, 21 bp, Artificial Sequence
  Synthetic
tggatggattggacagcagag

SEQ ID NO: 12203 - DNA, 21 bp, Artificial Sequence
  Synthetic
gaaattgtggtcattggtgct

SEQ ID NO: 12204 - DNA, 21 bp, Artificial Sequence
  Synthetic
agattctatagatcctgcttt

SEQ ID NO: 12205 - DNA, 21 bp, Artificial Sequence
  Synthetic
gccttcgtaaagcaggatcta

SEQ ID NO: 12206 - DNA, 21 bp, Artificial Sequence
  Synthetic
agcgaccaggccttcgtaaag

SEQ ID NO: 12207 - DNA, 21 bp, Artificial Sequence
  Synthetic
acgaaggcctggtcgctttga

SEQ ID NO: 12208 - DNA, 21 bp, Artificial Sequence
  Synthetic
gaaggcctggtcgctttgata

SEQ ID NO: 12209 - DNA, 21 bp, Artificial Sequence
  Synthetic
tctttatcaggcaggctaaag

SEQ ID NO: 12210 - DNA, 21 bp, Artificial Sequence
  Synthetic
ctctttatcaggcaggctaaa

SEQ ID NO: 12211 - DNA, 21 bp, Artificial Sequence
  Synthetic
acctctttatcaggcaggcta

SEQ ID NO: 12212 - DNA, 21 bp, Artificial Sequence
  Synthetic
gcttgctattgacaagcgatt

SEQ ID NO: 12213 - DNA, 21 bp, Artificial Sequence
  Synthetic
tcaacaggcttagtaaacact

SEQ ID NO: 12214 - DNA, 21 bp, Artificial Sequence
  Synthetic
gtcaacaggcttagtaaacac

SEQ ID NO: 12215 - DNA, 21 bp, Artificial Sequence
  Synthetic
ttactaagcctgttgaccctg

SEQ ID NO: 12216 - DNA, 21 bp, Artificial Sequence
  Synthetic
aagattaaactaatacctcat

SEQ ID NO: 12217 - DNA, 21 bp, Artificial Sequence
  Synthetic
ctttattacagtgacataatc

SEQ ID NO: 12218 - DNA, 21 bp, Artificial Sequence
  Synthetic
gctttattacagtgacataat

SEQ ID NO: 12219 - DNA, 21 bp, Artificial Sequence
  Synthetic
gtcactgtaataaagcaacca

SEQ ID NO: 12220 - DNA, 21 bp, Artificial Sequence
  Synthetic
gatctacacaagtatctgact

SEQ ID NO: 12221 - DNA, 21 bp, Artificial Sequence
  Synthetic
tatctgactgtgaaagactat

SEQ ID NO: 12222 - DNA, 21 bp, Artificial Sequence
  Synthetic
tctgactgtgaaagactattt

SEQ ID NO: 12223 - DNA, 21 bp, Artificial Sequence
  Synthetic
atctaatctgtagtaatgcct

SEQ ID NO: 12224 - DNA, 21 bp, Artificial Sequence
  Synthetic
tgccttagaatacaatccaga

SEQ ID NO: 12225 - DNA, 21 bp, Artificial Sequence
  Synthetic
aatacaatccagatagagatc

SEQ ID NO: 12226 - DNA, 21 bp, Artificial Sequence
  Synthetic
atacaatccagatagagatcc

SEQ ID NO: 12227 - DNA, 21 bp, Artificial Sequence
  Synthetic
gctcacctccaggatctctat

SEQ ID NO: 12228 - DNA, 21 bp, Artificial Sequence
  Synthetic
gcctacggcatctgcgcggcg

SEQ ID NO: 12229 - DNA, 21 bp, Artificial Sequence
  Synthetic
ctacggcatctgcgcggcgca

SEQ ID NO: 12230 - DNA, 21 bp, Artificial Sequence
  Synthetic
gcagaggatccagcaaggcac

SEQ ID NO: 12231 - DNA, 21 bp, Artificial Sequence
  Synthetic
ggatccagcaaggcacctgga

SEQ ID NO: 12232 - DNA, 21 bp, Artificial Sequence
  Synthetic
aggtccaatccaggtgccttg

SEQ ID NO: 12233 - DNA, 21 bp, Artificial Sequence
  Synthetic
tctgggggcagaagcacgcct

SEQ ID NO: 12234 - DNA, 21 bp, Artificial Sequence
  Synthetic
ctctgggggcagaagcacgcc

SEQ ID NO: 12235 - DNA, 21 bp, Artificial Sequence
  Synthetic
tccaaggcgtgcttctgcccc

SEQ ID NO: 12236 - DNA, 21 bp, Artificial Sequence
  Synthetic
caaggcgtgcttctgccccca

SEQ ID NO: 12237 - DNA, 21 bp, Artificial Sequence
  Synthetic
tgcctgcaccttctctggggg

SEQ ID NO: 12238 - DNA, 21 bp, Artificial Sequence
  Synthetic
gcgcctgcctgcaccttctct

SEQ ID NO: 12239 - DNA, 21 bp, Artificial Sequence
  Synthetic
ggcgcctgcctgcaccttctc

SEQ ID NO: 12240 - DNA, 21 bp, Artificial Sequence
  Synthetic
cggcgcctgcctgcaccttct

SEQ ID NO: 12241 - DNA, 21 bp, Artificial Sequence
  Synthetic
gagaaggtgcaggcaggcgcc

SEQ ID NO: 12242 - DNA, 21 bp, Artificial Sequence
  Synthetic
gaaggtgcaggcaggcgccgt

SEQ ID NO: 12243 - DNA, 21 bp, Artificial Sequence
  Synthetic
aaggtgcaggcaggcgccgtg

SEQ ID NO: 12244 - DNA, 21 bp, Artificial Sequence
  Synthetic
cgtgaggaacacgcagcatct

SEQ ID NO: 12245 - DNA, 21 bp, Artificial Sequence
  Synthetic
gtgaggaacacgcagcatctc

SEQ ID NO: 12246 - DNA, 21 bp, Artificial Sequence
  Synthetic
tgaggaacacgcagcatctct

SEQ ID NO: 12247 - DNA, 21 bp, Artificial Sequence
  Synthetic
tgcagccggccacttacctcc

SEQ ID NO: 12248 - DNA, 21 bp, Artificial Sequence
  Synthetic
cctcttctccagatatatgac

SEQ ID NO: 12249 - DNA, 21 bp, Artificial Sequence
  Synthetic
ttctccagatatatgaccagg

SEQ ID NO: 12250 - DNA, 21 bp, Artificial Sequence
  Synthetic
tctccagatatatgaccagga

SEQ ID NO: 12251 - DNA, 21 bp, Artificial Sequence
  Synthetic
gtcccatcctggtcatatatc

SEQ ID NO: 12252 - DNA, 21 bp, Artificial Sequence
  Synthetic
tgtcccatcctggtcatatat

SEQ ID NO: 12253 - DNA, 21 bp, Artificial Sequence
  Synthetic
cactacagcactttattgatg

SEQ ID NO: 12254 - DNA, 21 bp, Artificial Sequence
  Synthetic
actacagcactttattgatgg

SEQ ID NO: 12255 - DNA, 21 bp, Artificial Sequence
  Synthetic
ctacagcactttattgatggt

SEQ ID NO: 12256 - DNA, 21 bp, Artificial Sequence
  Synthetic
tacagcactttattgatggtg

SEQ ID NO: 12257 - DNA, 21 bp, Artificial Sequence
  Synthetic
gatggtggggaacctagtaag

SEQ ID NO: 12258 - DNA, 21 bp, Artificial Sequence
  Synthetic
tggggaacctagtaagtcgag

SEQ ID NO: 12259 - DNA, 21 bp, Artificial Sequence
  Synthetic
gaacctagtaagtcgagctgg

SEQ ID NO: 12260 - DNA, 21 bp, Artificial Sequence
  Synthetic
atatccgatgtgcaaggcact

SEQ ID NO: 12261 - DNA, 21 bp, Artificial Sequence
  Synthetic
tatccgatgtgcaaggcactg

SEQ ID NO: 12262 - DNA, 21 bp, Artificial Sequence
  Synthetic
ttctccgcagtgccttgcaca

SEQ ID NO: 12263 - DNA, 21 bp, Artificial Sequence
  Synthetic
tccgatgtgcaaggcactgcg

SEQ ID NO: 12264 - DNA, 21 bp, Artificial Sequence
  Synthetic
tgtgcaaggcactgcggagaa

SEQ ID NO: 12265 - DNA, 21 bp, Artificial Sequence
  Synthetic
tcaagatatactttacctgta

SEQ ID NO: 12266 - DNA, 21 bp, Artificial Sequence
  Synthetic
gaataggtcgaatatattcta

SEQ ID NO: 12267 - DNA, 21 bp, Artificial Sequence
  Synthetic
gggatatctatacaggctcgg

SEQ ID NO: 12268 - DNA, 21 bp, Artificial Sequence
  Synthetic
ccgagcctgtatagatatccc

SEQ ID NO: 12269 - DNA, 21 bp, Artificial Sequence
  Synthetic
cgagcctgtatagatatccct

SEQ ID NO: 12270 - DNA, 21 bp, Artificial Sequence
  Synthetic
gtatagatatccctaggggca

SEQ ID NO: 12271 - DNA, 21 bp, Artificial Sequence
  Synthetic
caccagaagctcggtgcccct

SEQ ID NO: 12272 - DNA, 21 bp, Artificial Sequence
  Synthetic
acaccagaagctcggtgcccc

SEQ ID NO: 12273 - DNA, 21 bp, Artificial Sequence
  Synthetic
atagctgtcattgtaccacac

SEQ ID NO: 12274 - DNA, 21 bp, Artificial Sequence
  Synthetic
cctgtttaggttattggagtg

SEQ ID NO: 12275 - DNA, 21 bp, Artificial Sequence
  Synthetic
aggttattggagtgatgagta

SEQ ID NO: 12276 - DNA, 21 bp, Artificial Sequence
  Synthetic
atgagtaaagaatacatacca

SEQ ID NO: 12277 - DNA, 21 bp, Artificial Sequence
  Synthetic
acataccaaagggcacacgtt

SEQ ID NO: 12278 - DNA, 21 bp, Artificial Sequence
  Synthetic
ttggtgtagatttcacctatt

SEQ ID NO: 12279 - DNA, 21 bp, Artificial Sequence
  Synthetic
attggtgtagatttcacctat

SEQ ID NO: 12280 - DNA, 21 bp, Artificial Sequence
  Synthetic
tacaccaatgacacagttcct

SEQ ID NO: 12281 - DNA, 21 bp, Artificial Sequence
  Synthetic
cacagttcctaagaacgccaa

SEQ ID NO: 12282 - DNA, 21 bp, Artificial Sequence
  Synthetic
acagttcctaagaacgccaac

SEQ ID NO: 12283 - DNA, 21 bp, Artificial Sequence
  Synthetic
atatttcctgttggcgttctt

SEQ ID NO: 12284 - DNA, 21 bp, Artificial Sequence
  Synthetic
aatatttcctgttggcgttct

SEQ ID NO: 12285 - DNA, 21 bp, Artificial Sequence
  Synthetic
gaacgccaacaggaaatattt

SEQ ID NO: 12286 - DNA, 21 bp, Artificial Sequence
  Synthetic
tttggacagatctattccaga

SEQ ID NO: 12287 - DNA, 21 bp, Artificial Sequence
  Synthetic
ttggacagatctattccagag

SEQ ID NO: 12288 - DNA, 21 bp, Artificial Sequence
  Synthetic
tgaagtggtgaagctcccctc

SEQ ID NO: 12289 - DNA, 21 bp, Artificial Sequence
  Synthetic
atgaagtggtgaagctcccct

SEQ ID NO: 12290 - DNA, 21 bp, Artificial Sequence
  Synthetic
attaaagccgtcaatgaagtg

SEQ ID NO: 12291 - DNA, 21 bp, Artificial Sequence
  Synthetic
accacttcattgacggcttta

SEQ ID NO: 12292 - DNA, 21 bp, Artificial Sequence
  Synthetic
acttcattgacggctttaatg

SEQ ID NO: 12293 - DNA, 21 bp, Artificial Sequence
  Synthetic
ttctcttcattaaagccgtca

SEQ ID NO: 12294 - DNA, 21 bp, Artificial Sequence
  Synthetic
ttcattgacggctttaatgaa

SEQ ID NO: 12295 - DNA, 21 bp, Artificial Sequence
  Synthetic
ctttaatgaagagaaaagcaa

SEQ ID NO: 12296 - DNA, 21 bp, Artificial Sequence
  Synthetic
aaaagcaactggatgcgctat

SEQ ID NO: 12297 - DNA, 21 bp, Artificial Sequence
  Synthetic
tgtgaatccagcacactctcc

SEQ ID NO: 12298 - DNA, 21 bp, Artificial Sequence
  Synthetic
gtgaatccagcacactctccc

SEQ ID NO: 12299 - DNA, 21 bp, Artificial Sequence
  Synthetic
tgaatccagcacactctcccc

SEQ ID NO: 12300 - DNA, 21 bp, Artificial Sequence
  Synthetic
tttgctcccggggagagtgtg

SEQ ID NO: 12301 - DNA, 21 bp, Artificial Sequence
  Synthetic
gagcaaaacctggctgcgtgt

SEQ ID NO: 12302 - DNA, 21 bp, Artificial Sequence
  Synthetic
aaaacctggctgcgtgtcaga

SEQ ID NO: 12303 - DNA, 21 bp, Artificial Sequence
  Synthetic
aaacctggctgcgtgtcagaa

SEQ ID NO: 12304 - DNA, 21 bp, Artificial Sequence
  Synthetic
ctggctgcgtgtcagaacggg

SEQ ID NO: 12305 - DNA, 21 bp, Artificial Sequence
  Synthetic
gcagggatgggcttaatggtg

SEQ ID NO: 12306 - DNA, 21 bp, Artificial Sequence
  Synthetic
attaagcccatccctgccaac

SEQ ID NO: 12307 - DNA, 21 bp, Artificial Sequence
  Synthetic
ttaagcccatccctgccaacc

SEQ ID NO: 12308 - DNA, 21 bp, Artificial Sequence
  Synthetic
agaagttcctggttggcaggg

SEQ ID NO: 12309 - DNA, 21 bp, Artificial Sequence
  Synthetic
cacaagaagttcctggttggc

SEQ ID NO: 12310 - DNA, 21 bp, Artificial Sequence
  Synthetic
acacaagaagttcctggttgg

SEQ ID NO: 12311 - DNA, 21 bp, Artificial Sequence
  Synthetic
ggaacttcttgtgtggtattg

SEQ ID NO: 12312 - DNA, 21 bp, Artificial Sequence
  Synthetic
aaagtcccgacaataccacac

SEQ ID NO: 12313 - DNA, 21 bp, Artificial Sequence
  Synthetic
gtcacatcgtaaggcagccgg

SEQ ID NO: 12314 - DNA, 21 bp, Artificial Sequence
  Synthetic
acgatgtgacccgcttcatga

SEQ ID NO: 12315 - DNA, 21 bp, Artificial Sequence
  Synthetic
catgtcacactcgatcatgaa

SEQ ID NO: 12316 - DNA, 21 bp, Artificial Sequence
  Synthetic
tggcacatgtcacactcgatc

SEQ ID NO: 12317 - DNA, 21 bp, Artificial Sequence
  Synthetic
atgatcgagtgtgacatgtgc

SEQ ID NO: 12318 - DNA, 21 bp, Artificial Sequence
  Synthetic
aggactggtttcatggcaggt

SEQ ID NO: 12319 - DNA, 21 bp, Artificial Sequence
  Synthetic
ggcctgccctccttacctgcc

SEQ ID NO: 12320 - DNA, 21 bp, Artificial Sequence
  Synthetic
tcctcttcaacaccaacacaa

SEQ ID NO: 12321 - DNA, 21 bp, Artificial Sequence
  Synthetic
ttcagttgtgttggtgttgaa

SEQ ID NO: 12322 - DNA, 21 bp, Artificial Sequence
  Synthetic
tcagttgtgttggtgttgaag

SEQ ID NO: 12323 - DNA, 21 bp, Artificial Sequence
  Synthetic
agttgtgttggtgttgaagag

SEQ ID NO: 12324 - DNA, 21 bp, Artificial Sequence
  Synthetic
acctctaccactgccccaact

SEQ ID NO: 12325 - DNA, 21 bp, Artificial Sequence
  Synthetic
acttcacagttggggcagtgg

SEQ ID NO: 12326 - DNA, 21 bp, Artificial Sequence
  Synthetic
gcccatgcaagacttcacagt

SEQ ID NO: 12327 - DNA, 21 bp, Artificial Sequence
  Synthetic
ggcccatgcaagacttcacag

SEQ ID NO: 12328 - DNA, 21 bp, Artificial Sequence
  Synthetic
aatgtacagaagtactgcctc

SEQ ID NO: 12329 - DNA, 21 bp, Artificial Sequence
  Synthetic
gaagtactgcctcatgagtgt

SEQ ID NO: 12330 - DNA, 21 bp, Artificial Sequence
  Synthetic
gtatagctatctcgcacactc

SEQ ID NO: 12331 - DNA, 21 bp, Artificial Sequence
  Synthetic
agaggtgccaccaaagtcaat

SEQ ID NO: 12332 - DNA, 21 bp, Artificial Sequence
  Synthetic
ccttgagtacatggtaccaga

SEQ ID NO: 12333 - DNA, 21 bp, Artificial Sequence
  Synthetic
tctggtaccatgtactcaagg

SEQ ID NO: 12334 - DNA, 21 bp, Artificial Sequence
  Synthetic
ctggtaccatgtactcaaggt

SEQ ID NO: 12335 - DNA, 21 bp, Artificial Sequence
  Synthetic
gcatttgttgggcggatcagg

SEQ ID NO: 12336 - DNA, 21 bp, Artificial Sequence
  Synthetic
agtcagattggcatttgttgg

SEQ ID NO: 12337 - DNA, 21 bp, Artificial Sequence
  Synthetic
agagagtcagattggcatttg

SEQ ID NO: 12338 - DNA, 21 bp, Artificial Sequence
  Synthetic
caaatgccaatctgactctct

SEQ ID NO: 12339 - DNA, 21 bp, Artificial Sequence
  Synthetic
caatctgactctctttgagtg

SEQ ID NO: 12340 - DNA, 21 bp, Artificial Sequence
  Synthetic
aatctgactctctttgagtgc

SEQ ID NO: 12341 - DNA, 21 bp, Artificial Sequence
  Synthetic
ggaactgctccagcactcaaa

SEQ ID NO: 12342 - DNA, 21 bp, Artificial Sequence
  Synthetic
gaggaactgctccagcactca

SEQ ID NO: 12343 - DNA, 21 bp, Artificial Sequence
  Synthetic
tgctggagcagttcctctaat

SEQ ID NO: 12344 - DNA, 21 bp, Artificial Sequence
  Synthetic
ggagcagttcctctaatcaga

SEQ ID NO: 12345 - DNA, 21 bp, Artificial Sequence
  Synthetic
agaacatctcattctgattag

SEQ ID NO: 12346 - DNA, 21 bp, Artificial Sequence
  Synthetic
aagaacatctcattctgatta

SEQ ID NO: 12347 - DNA, 21 bp, Artificial Sequence
  Synthetic
caaagaacatctcattctgat

SEQ ID NO: 12348 - DNA, 21 bp, Artificial Sequence
  Synthetic
ctaatcagaatgagatgttct

SEQ ID NO: 12349 - DNA, 21 bp, Artificial Sequence
  Synthetic
taatcagaatgagatgttctt

SEQ ID NO: 12350 - DNA, 21 bp, Artificial Sequence
  Synthetic
aatcagaatgagatgttcttt

SEQ ID NO: 12351 - DNA, 21 bp, Artificial Sequence
  Synthetic
gagatgttctttggggaccag

SEQ ID NO: 12352 - DNA, 21 bp, Artificial Sequence
  Synthetic
cacttgtccacctggtcccca

SEQ ID NO: 12353 - DNA, 21 bp, Artificial Sequence
  Synthetic
gacaagtgctacaagtgttcc

SEQ ID NO: 12354 - DNA, 21 bp, Artificial Sequence
  Synthetic
gctacaagtgttccgtgaagc

SEQ ID NO: 12355 - DNA, 21 bp, Artificial Sequence
  Synthetic
aaagtgtctgtccttgcttca

SEQ ID NO: 12356 - DNA, 21 bp, Artificial Sequence
  Synthetic
aaaagtgtctgtccttgcttc

SEQ ID NO: 12357 - DNA, 21 bp, Artificial Sequence
  Synthetic
cccaagggaagacctgtggga

SEQ ID NO: 12358 - DNA, 21 bp, Artificial Sequence
  Synthetic
agcacccaagggaagacctgt

SEQ ID NO: 12359 - DNA, 21 bp, Artificial Sequence
  Synthetic
aagcacccaagggaagacctg

SEQ ID NO: 12360 - DNA, 21 bp, Artificial Sequence
  Synthetic
atccatgctgtgctgacgcct

SEQ ID NO: 12361 - DNA, 21 bp, Artificial Sequence
  Synthetic
gtccacaggcgtcagcacagc

SEQ ID NO: 12362 - DNA, 21 bp, Artificial Sequence
  Synthetic
cgcctgtggactgccttgcct

SEQ ID NO: 12363 - DNA, 21 bp, Artificial Sequence
  Synthetic
gcctgtggactgccttgcctt

SEQ ID NO: 12364 - DNA, 21 bp, Artificial Sequence
  Synthetic
ctgtggactgccttgcctttg

SEQ ID NO: 12365 - DNA, 21 bp, Artificial Sequence
  Synthetic
tgtggactgccttgcctttgg

SEQ ID NO: 12366 - DNA, 21 bp, Artificial Sequence
  Synthetic
gtggactgccttgcctttgga

SEQ ID NO: 12367 - DNA, 21 bp, Artificial Sequence
  Synthetic
gatgccgatgaggtgacgaag

SEQ ID NO: 12368 - DNA, 21 bp, Artificial Sequence
  Synthetic
tgccgatgaggtgacgaagca

SEQ ID NO: 12369 - DNA, 21 bp, Artificial Sequence
  Synthetic
tgacgaagcagaggattcatg

SEQ ID NO: 12370 - DNA, 21 bp, Artificial Sequence
  Synthetic
gacgaagcagaggattcatga

SEQ ID NO: 12371 - DNA, 21 bp, Artificial Sequence
  Synthetic
agcagaggattcatgatggaa

SEQ ID NO: 12372 - DNA, 21 bp, Artificial Sequence
  Synthetic
cagaggattcatgatggaaaa

SEQ ID NO: 12373 - DNA, 21 bp, Artificial Sequence
  Synthetic
ttatggcacatctatgcagcc

SEQ ID NO: 12374 - DNA, 21 bp, Artificial Sequence
  Synthetic
acatctatgcagccaaggatg

SEQ ID NO: 12375 - DNA, 21 bp, Artificial Sequence
  Synthetic
atctatgcagccaaggatgca

SEQ ID NO: 12376 - DNA, 21 bp, Artificial Sequence
  Synthetic
agccaaggatgcagagaagat

SEQ ID NO: 12377 - DNA, 21 bp, Artificial Sequence
  Synthetic
gccaaggatgcagagaagatc

SEQ ID NO: 12378 - DNA, 21 bp, Artificial Sequence
  Synthetic
ccaaggatgcagagaagatcc

SEQ ID NO: 12379 - DNA, 21 bp, Artificial Sequence
  Synthetic
agagaagatccgggagctgct

SEQ ID NO: 12380 - DNA, 21 bp, Artificial Sequence
  Synthetic
gcgtacctttcggagcagctc

SEQ ID NO: 12381 - DNA, 21 bp, Artificial Sequence
  Synthetic
cccacccaggggcgtaccttt

SEQ ID NO: 12382 - DNA, 21 bp, Artificial Sequence
  Synthetic
gcccacccaggggcgtacctt

SEQ ID NO: 12383 - DNA, 21 bp, Artificial Sequence
  Synthetic
tttgattatggcttcaggttg

SEQ ID NO: 12384 - DNA, 21 bp, Artificial Sequence
  Synthetic
gattatggcttcaggttggag

SEQ ID NO: 12385 - DNA, 21 bp, Artificial Sequence
  Synthetic
ttggccttgttcttctccaac

SEQ ID NO: 12386 - DNA, 21 bp, Artificial Sequence
  Synthetic
aggttggagaagaacaaggcc

SEQ ID NO: 12387 - DNA, 21 bp, Artificial Sequence
  Synthetic
gttggagaagaacaaggccaa

SEQ ID NO: 12388 - DNA, 21 bp, Artificial Sequence
  Synthetic
catgaattgggtcatgatcag

SEQ ID NO: 12389 - DNA, 21 bp, Artificial Sequence
  Synthetic
tcatgaattgggtcatgatca

SEQ ID NO: 12390 - DNA, 21 bp, Artificial Sequence
  Synthetic
gtcatgaattgggtcatgatc

SEQ ID NO: 12391 - DNA, 21 bp, Artificial Sequence
  Synthetic
ggtcatgaattgggtcatgat

SEQ ID NO: 12392 - DNA, 21 bp, Artificial Sequence
  Synthetic
ggtaccaactttggtcatgaa

SEQ ID NO: 12393 - DNA, 21 bp, Artificial Sequence
  Synthetic
attcatgaccaaagttggtac

SEQ ID NO: 12394 - DNA, 21 bp, Artificial Sequence
  Synthetic
gtccaggtaccaactttggtc

SEQ ID NO: 12395 - DNA, 21 bp, Artificial Sequence
  Synthetic
agaccctccgtaagcgactct

SEQ ID NO: 12396 - DNA, 21 bp, Artificial Sequence
  Synthetic
accctccgtaagcgactctat

SEQ ID NO: 12397 - DNA, 21 bp, Artificial Sequence
  Synthetic
ctcctcatagagtcgcttacg

SEQ ID NO: 12398 - DNA, 21 bp, Artificial Sequence
  Synthetic
ccctccgtaagcgactctatg

SEQ ID NO: 12399 - DNA, 21 bp, Artificial Sequence
  Synthetic
tactcctcatagagtcgctta

SEQ ID NO: 12400 - DNA, 21 bp, Artificial Sequence
  Synthetic
atactcctcatagagtcgctt

SEQ ID NO: 12401 - DNA, 21 bp, Artificial Sequence
  Synthetic
ccttgcacgccatactcctca

SEQ ID NO: 12402 - DNA, 21 bp, Artificial Sequence
  Synthetic
tgaggagtatggcgtgcaagg

SEQ ID NO: 12403 - DNA, 21 bp, Artificial Sequence
  Synthetic
ggtatgaaaacagcatcacct

SEQ ID NO: 12404 - DNA, 21 bp, Artificial Sequence
  Synthetic
aggtatgaaaacagcatcacc

SEQ ID NO: 12405 - DNA, 21 bp, Artificial Sequence
  Synthetic
tggtgtggggctccagcaggt

SEQ ID NO: 12406 - DNA, 21 bp, Artificial Sequence
  Synthetic
cctgctggagccccacaccag

SEQ ID NO: 12407 - DNA, 21 bp, Artificial Sequence
  Synthetic
caagcaggaacccacctggtg

SEQ ID NO: 12408 - DNA, 21 bp, Artificial Sequence
  Synthetic
ccaagcaggaacccacctggt

SEQ ID NO: 12409 - DNA, 21 bp, Artificial Sequence
  Synthetic
aactgtatagattgtgaacct

SEQ ID NO: 12410 - DNA, 21 bp, Artificial Sequence
  Synthetic
gcaactgtatagattgtgaac

SEQ ID NO: 12411 - DNA, 21 bp, Artificial Sequence
  Synthetic
tatacagttgcataaaagtag

SEQ ID NO: 12412 - DNA, 21 bp, Artificial Sequence
  Synthetic
gactccaggcttacagcagtg

SEQ ID NO: 12413 - DNA, 21 bp, Artificial Sequence
  Synthetic
actccaggcttacagcagtgc

SEQ ID NO: 12414 - DNA, 21 bp, Artificial Sequence
  Synthetic
tccaggcttacagcagtgcag

SEQ ID NO: 12415 - DNA, 21 bp, Artificial Sequence
  Synthetic
gcaggagaactttcaagcact

SEQ ID NO: 12416 - DNA, 21 bp, Artificial Sequence
  Synthetic
tattggcaagatccaaagtgc

SEQ ID NO: 12417 - DNA, 21 bp, Artificial Sequence
  Synthetic
aacttgtccctagttacacag

SEQ ID NO: 12418 - DNA, 21 bp, Artificial Sequence
  Synthetic
cagagatccacctgtgtaact

SEQ ID NO: 12419 - DNA, 21 bp, Artificial Sequence
  Synthetic
gcagagatccacctgtgtaac

SEQ ID NO: 12420 - DNA, 21 bp, Artificial Sequence
  Synthetic
agttacacaggtggatctctg

SEQ ID NO: 12421 - DNA, 21 bp, Artificial Sequence
  Synthetic
gttacacaggtggatctctgc

SEQ ID NO: 12422 - DNA, 21 bp, Artificial Sequence
  Synthetic
tacacaggtggatctctgctg

SEQ ID NO: 12423 - DNA, 21 bp, Artificial Sequence
  Synthetic
accactggcaagatcctccag

SEQ ID NO: 12424 - DNA, 21 bp, Artificial Sequence
  Synthetic
ctggaggatcttgccagtggt

SEQ ID NO: 12425 - DNA, 21 bp, Artificial Sequence
  Synthetic
tggaggatcttgccagtggtc

SEQ ID NO: 12426 - DNA, 21 bp, Artificial Sequence
  Synthetic
aggcaaggtggggcatggggc

SEQ ID NO: 12427 - DNA, 21 bp, Artificial Sequence
  Synthetic
caggcaaggtggggcatgggg

SEQ ID NO: 12428 - DNA, 21 bp, Artificial Sequence
  Synthetic
aagagcaggcaaggtggggca

SEQ ID NO: 12429 - DNA, 21 bp, Artificial Sequence
  Synthetic
gaagagcaggcaaggtggggc

SEQ ID NO: 12430 - DNA, 21 bp, Artificial Sequence
  Synthetic
gcatctgaagagcaggcaagg

SEQ ID NO: 12431 - DNA, 21 bp, Artificial Sequence
  Synthetic
cgcatctgaagagcaggcaag

SEQ ID NO: 12432 - DNA, 21 bp, Artificial Sequence
  Synthetic
cttgcctgctcttcagatgcg

SEQ ID NO: 12433 - DNA, 21 bp, Artificial Sequence
  Synthetic
ttgcctgctcttcagatgcgg

SEQ ID NO: 12434 - DNA, 21 bp, Artificial Sequence
  Synthetic
gaattatctccaccgcatctg

SEQ ID NO: 12435 - DNA, 21 bp, Artificial Sequence
  Synthetic
caggaattatctccaccgcat

SEQ ID NO: 12436 - DNA, 21 bp, Artificial Sequence
  Synthetic
atgcggtggagataattcctg

SEQ ID NO: 12437 - DNA, 21 bp, Artificial Sequence
  Synthetic
gcggtggagataattcctgca

SEQ ID NO: 12438 - DNA, 21 bp, Artificial Sequence
  Synthetic
cggtggagataattcctgcag

SEQ ID NO: 12439 - DNA, 21 bp, Artificial Sequence
  Synthetic
ggtggagataattcctgcaga

SEQ ID NO: 12440 - DNA, 21 bp, Artificial Sequence
  Synthetic
gagataattcctgcagaggga

SEQ ID NO: 12441 - DNA, 21 bp, Artificial Sequence
  Synthetic
cgagatacccactccctctgc

SEQ ID NO: 12442 - DNA, 21 bp, Artificial Sequence
  Synthetic
gcgagatacccactccctctg

SEQ ID NO: 12443 - DNA, 21 bp, Artificial Sequence
  Synthetic
gaaattgtttgcagaggagct

SEQ ID NO: 12444 - DNA, 21 bp, Artificial Sequence
  Synthetic
gtaaccagaaattgtttgcag

SEQ ID NO: 12445 - DNA, 21 bp, Artificial Sequence
  Synthetic
agtaaccagaaattgtttgca

SEQ ID NO: 12446 - DNA, 21 bp, Artificial Sequence
  Synthetic
tcagtaaccagaaattgtttg

SEQ ID NO: 12447 - DNA, 21 bp, Artificial Sequence
  Synthetic
tctgcaaacaatttctggtta

SEQ ID NO: 12448 - DNA, 21 bp, Artificial Sequence
  Synthetic
tgcaaacaatttctggttact

SEQ ID NO: 12449 - DNA, 21 bp, Artificial Sequence
  Synthetic
gcaaacaatttctggttactg

SEQ ID NO: 12450 - DNA, 21 bp, Artificial Sequence
  Synthetic
cctgatatcttcctcagtaac

SEQ ID NO: 12451 - DNA, 21 bp, Artificial Sequence
  Synthetic
tctggttactgaggaagatat

SEQ ID NO: 12452 - DNA, 21 bp, Artificial Sequence
  Synthetic
ctggttactgaggaagatatc

SEQ ID NO: 12453 - DNA, 21 bp, Artificial Sequence
  Synthetic
actgaggaagatatcaggaaa

SEQ ID NO: 12454 - DNA, 21 bp, Artificial Sequence
  Synthetic
ctgaggaagatatcaggaaac

SEQ ID NO: 12455 - DNA, 21 bp, Artificial Sequence
  Synthetic
aggaagatatcaggaaacagg

SEQ ID NO: 12456 - DNA, 21 bp, Artificial Sequence
  Synthetic
ggaagatatcaggaaacagga

SEQ ID NO: 12457 - DNA, 21 bp, Artificial Sequence
  Synthetic
gaagatatcaggaaacaggaa

SEQ ID NO: 12458 - DNA, 21 bp, Artificial Sequence
  Synthetic
atcaggaaacaggaagggaaa

SEQ ID NO: 12459 - DNA, 21 bp, Artificial Sequence
  Synthetic
ggaagggaaagtgaagacagt

SEQ ID NO: 12460 - DNA, 21 bp, Artificial Sequence
  Synthetic
aagggaaagtgaagacagtca

SEQ ID NO: 12461 - DNA, 21 bp, Artificial Sequence
  Synthetic
gggaaagtgaagacagtcaga

SEQ ID NO: 12462 - DNA, 21 bp, Artificial Sequence
  Synthetic
ccatccgcaatcagtgctatt

SEQ ID NO: 12463 - DNA, 21 bp, Artificial Sequence
  Synthetic
ccctgcagccctgcagcagcc

SEQ ID NO: 12464 - DNA, 21 bp, Artificial Sequence
  Synthetic
cctgcagccctgcagcagcca

SEQ ID NO: 12465 - DNA, 21 bp, Artificial Sequence
  Synthetic
tgcagccctgcagcagccaag

SEQ ID NO: 12466 - DNA, 21 bp, Artificial Sequence
  Synthetic
gaaggttcaagtccactgcat

SEQ ID NO: 12467 - DNA, 21 bp, Artificial Sequence
  Synthetic
aaggttcaagtccactgcatt

SEQ ID NO: 12468 - DNA, 21 bp, Artificial Sequence
  Synthetic
ggttcaagtccactgcatttg

SEQ ID NO: 12469 - DNA, 21 bp, Artificial Sequence
  Synthetic
cgctctccaaatgcagtggac

SEQ ID NO: 12470 - DNA, 21 bp, Artificial Sequence
  Synthetic
ttaagacgctctccaaatgca

SEQ ID NO: 12471 - DNA, 21 bp, Artificial Sequence
  Synthetic
agcgtcttaagtatccttgca

SEQ ID NO: 12472 - DNA, 21 bp, Artificial Sequence
  Synthetic
gcgtcttaagtatccttgcac

SEQ ID NO: 12473 - DNA, 21 bp, Artificial Sequence
  Synthetic
cgtcttaagtatccttgcacc

SEQ ID NO: 12474 - DNA, 21 bp, Artificial Sequence
  Synthetic
ttcaccggccgtccccggtgc

SEQ ID NO: 12475 - DNA, 21 bp, Artificial Sequence
  Synthetic
tccttgcaccggggacggccg

SEQ ID NO: 12476 - DNA, 21 bp, Artificial Sequence
  Synthetic
ccggggacggccggtgaatct

SEQ ID NO: 12477 - DNA, 21 bp, Artificial Sequence
  Synthetic
gacggccggtgaatctctgga

SEQ ID NO: 12478 - DNA, 21 bp, Artificial Sequence
  Synthetic
aatctctggacagagctggtg

SEQ ID NO: 12479 - DNA, 21 bp, Artificial Sequence
  Synthetic
acgctcagcaccagctctgtc

SEQ ID NO: 12480 - DNA, 21 bp, Artificial Sequence
  Synthetic
ctgagcgtgtgcgcagcccgc

SEQ ID NO: 12481 - DNA, 21 bp, Artificial Sequence
  Synthetic
gcagcccgcttgagcccaccc

SEQ ID NO: 12482 - DNA, 21 bp, Artificial Sequence
  Synthetic
accgcccaggggtgggctcaa

SEQ ID NO: 12483 - DNA, 21 bp, Artificial Sequence
  Synthetic
acagctggaaaccgcccaggg

SEQ ID NO: 12484 - DNA, 21 bp, Artificial Sequence
  Synthetic
tgccacagctggaaaccgccc

SEQ ID NO: 12485 - DNA, 21 bp, Artificial Sequence
  Synthetic
ctgccacagctggaaaccgcc

SEQ ID NO: 12486 - DNA, 21 bp, Artificial Sequence
  Synthetic
ctgggcggtttccagctgtgg

SEQ ID NO: 12487 - DNA, 21 bp, Artificial Sequence
  Synthetic
tgggcggtttccagctgtggc

SEQ ID NO: 12488 - DNA, 21 bp, Artificial Sequence
  Synthetic
gggcggtttccagctgtggca

SEQ ID NO: 12489 - DNA, 21 bp, Artificial Sequence
  Synthetic
ggcggtttccagctgtggcag

SEQ ID NO: 12490 - DNA, 21 bp, Artificial Sequence
  Synthetic
ggttggcccccctgccacagc

SEQ ID NO: 12491 - DNA, 21 bp, Artificial Sequence
  Synthetic
gggttggcccccctgccacag

SEQ ID NO: 12492 - DNA, 21 bp, Artificial Sequence
  Synthetic
ctgtggcaggggggccaaccc

SEQ ID NO: 12493 - DNA, 21 bp, Artificial Sequence
  Synthetic
tgtggcaggggggccaacccc

SEQ ID NO: 12494 - DNA, 21 bp, Artificial Sequence
  Synthetic
gcaggggggccaaccccagga

SEQ ID NO: 12495 - DNA, 21 bp, Artificial Sequence
  Synthetic
tgggagctgacaacccattcc

SEQ ID NO: 12496 - DNA, 21 bp, Artificial Sequence
  Synthetic
gtgggagctgacaacccattc

SEQ ID NO: 12497 - DNA, 21 bp, Artificial Sequence
  Synthetic
aattggccagagaggggcggt

SEQ ID NO: 12498 - DNA, 21 bp, Artificial Sequence
  Synthetic
caattggccagagaggggcgg

SEQ ID NO: 12499 - DNA, 21 bp, Artificial Sequence
  Synthetic
ccaattggccagagaggggcg

SEQ ID NO: 12500 - DNA, 21 bp, Artificial Sequence
  Synthetic
ggagtcaccaattggccagag

SEQ ID NO: 12501 - DNA, 21 bp, Artificial Sequence
  Synthetic
aggagtcaccaattggccaga

SEQ ID NO: 12502 - DNA, 21 bp, Artificial Sequence
  Synthetic
gcaggagtcaccaattggcca

SEQ ID NO: 12503 - DNA, 21 bp, Artificial Sequence
  Synthetic
ctgcaggagtcaccaattggc

SEQ ID NO: 12504 - DNA, 21 bp, Artificial Sequence
  Synthetic
attggtgactcctgcagatat

SEQ ID NO: 12505 - DNA, 21 bp, Artificial Sequence
  Synthetic
ttggtgactcctgcagatatc

SEQ ID NO: 12506 - DNA, 21 bp, Artificial Sequence
  Synthetic
ggcctgtctccggatatctgc

SEQ ID NO: 12507 - DNA, 21 bp, Artificial Sequence
  Synthetic
tggcctgtctccggatatctg

SEQ ID NO: 12508 - DNA, 21 bp, Artificial Sequence
  Synthetic
tgcagatatccggagacaggc

SEQ ID NO: 12509 - DNA, 21 bp, Artificial Sequence
  Synthetic
gcagatatccggagacaggcc

SEQ ID NO: 12510 - DNA, 21 bp, Artificial Sequence
  Synthetic
agatatccggagacaggccag

SEQ ID NO: 12511 - DNA, 21 bp, Artificial Sequence
  Synthetic
atccggagacaggccaggagg

SEQ ID NO: 12512 - DNA, 21 bp, Artificial Sequence
  Synthetic
cttcaccctcctggcctgtct

SEQ ID NO: 12513 - DNA, 21 bp, Artificial Sequence
  Synthetic
cggagacaggccaggagggtg

SEQ ID NO: 12514 - DNA, 21 bp, Artificial Sequence
  Synthetic
ggccaggagggtgaagaaagc

SEQ ID NO: 12515 - DNA, 21 bp, Artificial Sequence
  Synthetic
gccaggagggtgaagaaagcc

SEQ ID NO: 12516 - DNA, 21 bp, Artificial Sequence
  Synthetic
ccaggagggtgaagaaagcca

SEQ ID NO: 12517 - DNA, 21 bp, Artificial Sequence
  Synthetic
aggagggtgaagaaagccagg

SEQ ID NO: 12518 - DNA, 21 bp, Artificial Sequence
  Synthetic
ccatccaagatggagattctg

SEQ ID NO: 12519 - DNA, 21 bp, Artificial Sequence
  Synthetic
atcgctttattgtgagttcgt

SEQ ID NO: 12520 - DNA, 21 bp, Artificial Sequence
  Synthetic
aactcacaataaagcgattta

SEQ ID NO: 12521 - DNA, 21 bp, Artificial Sequence
  Synthetic
ccttcaataaatcgctttatt

SEQ ID NO: 12522 - DNA, 21 bp, Artificial Sequence
  Synthetic
tcacaataaagcgatttattg

SEQ ID NO: 12523 - DNA, 21 bp, Artificial Sequence
  Synthetic
cacaataaagcgatttattga

SEQ ID NO: 12524 - DNA, 21 bp, Artificial Sequence
  Synthetic
taaagcgatttattgaaggaa

SEQ ID NO: 12525 - DNA, 21 bp, Artificial Sequence
  Synthetic
aagcgatttattgaaggaaaa

SEQ ID NO: 12526 - DNA, 21 bp, Artificial Sequence
  Synthetic
ttattgaaggaaaagagaagc

SEQ ID NO: 12527 - DNA, 21 bp, Artificial Sequence
  Synthetic
tattgaaggaaaagagaagcc

SEQ ID NO: 12528 - DNA, 21 bp, Artificial Sequence
  Synthetic
ctgtggcacatatatgctgca

SEQ ID NO: 12529 - DNA, 21 bp, Artificial Sequence
  Synthetic
cacatatatgctgcaaaggac

SEQ ID NO: 12530 - DNA, 21 bp, Artificial Sequence
  Synthetic
acatatatgctgcaaaggaca

SEQ ID NO: 12531 - DNA, 21 bp, Artificial Sequence
  Synthetic
atatatgctgcaaaggacacg

SEQ ID NO: 12532 - DNA, 21 bp, Artificial Sequence
  Synthetic
tgcaaaggacacggagaagat

SEQ ID NO: 12533 - DNA, 21 bp, Artificial Sequence
  Synthetic
gcaaaggacacggagaagata

SEQ ID NO: 12534 - DNA, 21 bp, Artificial Sequence
  Synthetic
caaaggacacggagaagataa

SEQ ID NO: 12535 - DNA, 21 bp, Artificial Sequence
  Synthetic
tgaatgtattctaggtatcag

SEQ ID NO: 12536 - DNA, 21 bp, Artificial Sequence
  Synthetic
tgaccttgctcttctgatacc

SEQ ID NO: 12537 - DNA, 21 bp, Artificial Sequence
  Synthetic
aggtatcagaagagcaaggtc

SEQ ID NO: 12538 - DNA, 21 bp, Artificial Sequence
  Synthetic
catgaataggatcgtggtctg

SEQ ID NO: 12539 - DNA, 21 bp, Artificial Sequence
  Synthetic
aataccagctttgatcatgaa

SEQ ID NO: 12540 - DNA, 21 bp, Artificial Sequence
  Synthetic
gtctaaataccagctttgatc

SEQ ID NO: 12541 - DNA, 21 bp, Artificial Sequence
  Synthetic
ctggtatttagaccgatcatt

SEQ ID NO: 12542 - DNA, 21 bp, Artificial Sequence
  Synthetic
cattaagaaaacgtcttcatc

SEQ ID NO: 12543 - DNA, 21 bp, Artificial Sequence
  Synthetic
gaaaacgtcttcatcaagagt

SEQ ID NO: 12544 - DNA, 21 bp, Artificial Sequence
  Synthetic
aaaacgtcttcatcaagagta

SEQ ID NO: 12545 - DNA, 21 bp, Artificial Sequence
  Synthetic
gccttgaactccatactcttg

SEQ ID NO: 12546 - DNA, 21 bp, Artificial Sequence
  Synthetic
tcaagagtatggagttcaagg

SEQ ID NO: 12547 - DNA, 21 bp, Artificial Sequence
  Synthetic
aaactgtacaatagcccagcc

SEQ ID NO: 12548 - DNA, 21 bp, Artificial Sequence
  Synthetic
gctgggctattgtacagtttc

SEQ ID NO: 12549 - DNA, 21 bp, Artificial Sequence
  Synthetic
ctgggctattgtacagtttct

SEQ ID NO: 12550 - DNA, 21 bp, Artificial Sequence
  Synthetic
tgggctattgtacagtttctt

SEQ ID NO: 12551 - DNA, 21 bp, Artificial Sequence
  Synthetic
cgggataaacaccacatcccc

SEQ ID NO: 12552 - DNA, 21 bp, Artificial Sequence
  Synthetic
gggatgtggtgtttatcccgg

SEQ ID NO: 12553 - DNA, 21 bp, Artificial Sequence
  Synthetic
ggatgtggtgtttatcccggc

SEQ ID NO: 12554 - DNA, 21 bp, Artificial Sequence
  Synthetic
tgcctgatgtggagctcctgc

SEQ ID NO: 12555 - DNA, 21 bp, Artificial Sequence
  Synthetic
ttgcctgatgtggagctcctg

SEQ ID NO: 12556 - DNA, 21 bp, Artificial Sequence
  Synthetic
ggcaggagctccacatcaggc

SEQ ID NO: 12557 - DNA, 21 bp, Artificial Sequence
  Synthetic
agtaatgattcttgcctgatg

SEQ ID NO: 12558 - DNA, 21 bp, Artificial Sequence
  Synthetic
aagtaatgattcttgcctgat

SEQ ID NO: 12559 - DNA, 21 bp, Artificial Sequence
  Synthetic
gcagctatataagttatgaac

SEQ ID NO: 12560 - DNA, 21 bp, Artificial Sequence
  Synthetic
tttgatgcagctatataagtt

SEQ ID NO: 12561 - DNA, 21 bp, Artificial Sequence
  Synthetic
tatatagctgcatcaaagtgg

SEQ ID NO: 12562 - DNA, 21 bp, Artificial Sequence
  Synthetic
gggagccggcagacgcagtac

SEQ ID NO: 12563 - DNA, 21 bp, Artificial Sequence
  Synthetic
atgaagcgggtaacgtcgtag

SEQ ID NO: 12564 - DNA, 21 bp, Artificial Sequence
  Synthetic
catgaagcgggtaacgtcgta

SEQ ID NO: 12565 - DNA, 21 bp, Artificial Sequence
  Synthetic
tcatgaagcgggtaacgtcgt

SEQ ID NO: 12566 - DNA, 21 bp, Artificial Sequence
  Synthetic
atcatgaagcgggtaacgtcg

SEQ ID NO: 12567 - DNA, 21 bp, Artificial Sequence
  Synthetic
acgacgttacccgcttcatga

SEQ ID NO: 12568 - DNA, 21 bp, Artificial Sequence
  Synthetic
ggcgtcgcactcgatcatgaa

SEQ ID NO: 12569 - DNA, 21 bp, Artificial Sequence
  Synthetic
ttgcaggcgtcgcactcgatc

SEQ ID NO: 12570 - DNA, 21 bp, Artificial Sequence
  Synthetic
atgatcgagtgcgacgcctgc

SEQ ID NO: 12571 - DNA, 21 bp, Artificial Sequence
  Synthetic
caaggactggttccacggcag

SEQ ID NO: 12572 - DNA, 21 bp, Artificial Sequence
  Synthetic
ccgccgcgcgctcacctgccg

SEQ ID NO: 12573 - DNA, 21 bp, Artificial Sequence
  Synthetic
gccgccgcgcgctcacctgcc

SEQ ID NO: 12574 - DNA, 21 bp, Artificial Sequence
  Synthetic
tttcgtctcgtttcagctgtg

SEQ ID NO: 12575 - DNA, 21 bp, Artificial Sequence
  Synthetic
ttcgtctcgtttcagctgtgt

SEQ ID NO: 12576 - DNA, 21 bp, Artificial Sequence
  Synthetic
tctcgtttcagctgtgttggg

SEQ ID NO: 12577 - DNA, 21 bp, Artificial Sequence
  Synthetic
ctcgtttcagctgtgttgggg

SEQ ID NO: 12578 - DNA, 21 bp, Artificial Sequence
  Synthetic
gtttcagctgtgttggggtgg

SEQ ID NO: 12579 - DNA, 21 bp, Artificial Sequence
  Synthetic
tcctcttccaccccaacacag

SEQ ID NO: 12580 - DNA, 21 bp, Artificial Sequence
  Synthetic
ttcagctgtgttggggtggaa

SEQ ID NO: 12581 - DNA, 21 bp, Artificial Sequence
  Synthetic
tcagctgtgttggggtggaag

SEQ ID NO: 12582 - DNA, 21 bp, Artificial Sequence
  Synthetic
agctgtgttggggtggaagag

SEQ ID NO: 12583 - DNA, 21 bp, Artificial Sequence
  Synthetic
gctgtgttggggtggaagagg

SEQ ID NO: 12584 - DNA, 21 bp, Artificial Sequence
  Synthetic
gggcagtggtatatgtcgatg

SEQ ID NO: 12585 - DNA, 21 bp, Artificial Sequence
  Synthetic
acatataccactgcccaaact

SEQ ID NO: 12586 - DNA, 21 bp, Artificial Sequence
  Synthetic
atataccactgcccaaactgt

SEQ ID NO: 12587 - DNA, 21 bp, Artificial Sequence
  Synthetic
accaagtactgcctaatctgc

SEQ ID NO: 12588 - DNA, 21 bp, Artificial Sequence
  Synthetic
aagtactgcctaatctgcgtg

SEQ ID NO: 12589 - DNA, 21 bp, Artificial Sequence
  Synthetic
acaccgacttccacatcgact

SEQ ID NO: 12590 - DNA, 21 bp, Artificial Sequence
  Synthetic
caccgacttccacatcgactc

SEQ ID NO: 12591 - DNA, 21 bp, Artificial Sequence
  Synthetic
accgacttccacatcgactct

SEQ ID NO: 12592 - DNA, 21 bp, Artificial Sequence
  Synthetic
gaggcgcccccagagtcgatg

SEQ ID NO: 12593 - DNA, 21 bp, Artificial Sequence
  Synthetic
agaggcgcccccagagtcgat

SEQ ID NO: 12594 - DNA, 21 bp, Artificial Sequence
  Synthetic
ggtaccaggcagaggcgcccc

SEQ ID NO: 12595 - DNA, 21 bp, Artificial Sequence
  Synthetic
ccttgagcacgtggtaccagg

SEQ ID NO: 12596 - DNA, 21 bp, Artificial Sequence
  Synthetic
gcctggtaccacgtgctcaag

SEQ ID NO: 12597 - DNA, 21 bp, Artificial Sequence
  Synthetic
gccgaggccggcctgatgaga

SEQ ID NO: 12598 - DNA, 21 bp, Artificial Sequence
  Synthetic
atgttggccgaggccggcctg

SEQ ID NO: 12599 - DNA, 21 bp, Artificial Sequence
  Synthetic
cctcggccaacatctccctgt

SEQ ID NO: 12600 - DNA, 21 bp, Artificial Sequence
  Synthetic
gctcatacagggagatgttgg

SEQ ID NO: 12601 - DNA, 21 bp, Artificial Sequence
  Synthetic
cagaccgccagcgctcataca

SEQ ID NO: 12602 - DNA, 21 bp, Artificial Sequence
  Synthetic
gcagaccgccagcgctcatac

SEQ ID NO: 12603 - DNA, 21 bp, Artificial Sequence
  Synthetic
ggcagaccgccagcgctcata

SEQ ID NO: 12604 - DNA, 21 bp, Artificial Sequence
  Synthetic
ggcggtctgcctctaaccaca

SEQ ID NO: 12605 - DNA, 21 bp, Artificial Sequence
  Synthetic
caaagaacatctcgctgtggt

SEQ ID NO: 12606 - DNA, 21 bp, Artificial Sequence
  Synthetic
catttgtcgacctggtcagca

SEQ ID NO: 12607 - DNA, 21 bp, Artificial Sequence
  Synthetic
tgctacaagtgcatcgtcaag

SEQ ID NO: 12608 - DNA, 21 bp, Artificial Sequence
  Synthetic
agaccctcttcatcccctcag

SEQ ID NO: 12609 - DNA, 21 bp, Artificial Sequence
  Synthetic
gcactcacctgaggggatgaa

SEQ ID NO: 12610 - DNA, 21 bp, Artificial Sequence
  Synthetic
ccgcactcacctgaggggatg

SEQ ID NO: 12611 - DNA, 21 bp, Artificial Sequence
  Synthetic
tgcccgcactcacctgagggg

SEQ ID NO: 12612 - DNA, 21 bp, Artificial Sequence
  Synthetic
aagctgcccgcactcacctga

SEQ ID NO: 12613 - DNA, 21 bp, Artificial Sequence
  Synthetic
aaagctgcccgcactcacctg

SEQ ID NO: 12614 - DNA, 21 bp, Artificial Sequence
  Synthetic
agtgtggcgtagatccagcct

SEQ ID NO: 12615 - DNA, 21 bp, Artificial Sequence
  Synthetic
gagtgtggcgtagatccagcc

SEQ ID NO: 12616 - DNA, 21 bp, Artificial Sequence
  Synthetic
tgagtgtggcgtagatccagc

SEQ ID NO: 12617 - DNA, 21 bp, Artificial Sequence
  Synthetic
atctacgccacactcacccct

SEQ ID NO: 12618 - DNA, 21 bp, Artificial Sequence
  Synthetic
aaggccaggcagtccacaggg

SEQ ID NO: 12619 - DNA, 21 bp, Artificial Sequence
  Synthetic
cgcgaaggccaggcagtccac

SEQ ID NO: 12620 - DNA, 21 bp, Artificial Sequence
  Synthetic
ccgcgaaggccaggcagtcca

SEQ ID NO: 12621 - DNA, 21 bp, Artificial Sequence
  Synthetic
cctgtggactgcctggccttc

SEQ ID NO: 12622 - DNA, 21 bp, Artificial Sequence
  Synthetic
ctgtggactgcctggccttcg

SEQ ID NO: 12623 - DNA, 21 bp, Artificial Sequence
  Synthetic
aggctgtggaggaaatgtccc

SEQ ID NO: 12624 - DNA, 21 bp, Artificial Sequence
  Synthetic
tttccaggtttatggttggct

SEQ ID NO: 12625 - DNA, 21 bp, Artificial Sequence
  Synthetic
tcccacagccaaccataaacc

SEQ ID NO: 12626 - DNA, 21 bp, Artificial Sequence
  Synthetic
ttccaggtttatggttggctg

SEQ ID NO: 12627 - DNA, 21 bp, Artificial Sequence
  Synthetic
ctcccacagccaaccataaac

SEQ ID NO: 12628 - DNA, 21 bp, Artificial Sequence
  Synthetic
tccaggtttatggttggctgt

SEQ ID NO: 12629 - DNA, 21 bp, Artificial Sequence
  Synthetic
actggtttcatggtgattgtg

SEQ ID NO: 12630 - DNA, 21 bp, Artificial Sequence
  Synthetic
acttaacccaacacaatcacc

SEQ ID NO: 12631 - DNA, 21 bp, Artificial Sequence
  Synthetic
agtctttctcaagcacagcag

SEQ ID NO: 12632 - DNA, 21 bp, Artificial Sequence
  Synthetic
tttctcaagcacagcagatgg

SEQ ID NO: 12633 - DNA, 21 bp, Artificial Sequence
  Synthetic
cctcgcccatctgctgtgctt

SEQ ID NO: 12634 - DNA, 21 bp, Artificial Sequence
  Synthetic
tctcaagcacagcagatgggc

SEQ ID NO: 12635 - DNA, 21 bp, Artificial Sequence
  Synthetic
ttcctcgcccatctgctgtgc

SEQ ID NO: 12636 - DNA, 21 bp, Artificial Sequence
  Synthetic
ctcaagcacagcagatgggcg

SEQ ID NO: 12637 - DNA, 21 bp, Artificial Sequence
  Synthetic
agcagatgggcgaggaagaca

SEQ ID NO: 12638 - DNA, 21 bp, Artificial Sequence
  Synthetic
atgtctgtgtaaaatgttgtg

SEQ ID NO: 12639 - DNA, 21 bp, Artificial Sequence
  Synthetic
aagcactgtatcgacaggacc

SEQ ID NO: 12640 - DNA, 21 bp, Artificial Sequence
  Synthetic
gctgccggaaaggtaatgact

SEQ ID NO: 12641 - DNA, 21 bp, Artificial Sequence
  Synthetic
agctggggatctacaggctgc

SEQ ID NO: 12642 - DNA, 21 bp, Artificial Sequence
  Synthetic
gagctggggatctacaggctg

SEQ ID NO: 12643 - DNA, 21 bp, Artificial Sequence
  Synthetic
agcctgtagatccccagctcc

SEQ ID NO: 12644 - DNA, 21 bp, Artificial Sequence
  Synthetic
gcctgtagatccccagctcct

SEQ ID NO: 12645 - DNA, 21 bp, Artificial Sequence
  Synthetic
ttactggaattccgaggagct

SEQ ID NO: 12646 - DNA, 21 bp, Artificial Sequence
  Synthetic
cttactggaattccgaggagc

SEQ ID NO: 12647 - DNA, 21 bp, Artificial Sequence
  Synthetic
acttactggaattccgaggag

SEQ ID NO: 12648 - DNA, 21 bp, Artificial Sequence
  Synthetic
aattaacttactggaattccg

SEQ ID NO: 12649 - DNA, 21 bp, Artificial Sequence
  Synthetic
gaattaacttactggaattcc

SEQ ID NO: 12650 - DNA, 21 bp, Artificial Sequence
  Synthetic
atgaattaacttactggaatt

SEQ ID NO: 12651 - DNA, 21 bp, Artificial Sequence
  Synthetic
tttgacatcgtaaagaatccc

SEQ ID NO: 12652 - DNA, 21 bp, Artificial Sequence
  Synthetic
gcttgatggtggagaggtcca

SEQ ID NO: 12653 - DNA, 21 bp, Artificial Sequence
  Synthetic
cgcttgatggtggagaggtcc

SEQ ID NO: 12654 - DNA, 21 bp, Artificial Sequence
  Synthetic
catggacctctccaccatcaa

SEQ ID NO: 12655 - DNA, 21 bp, Artificial Sequence
  Synthetic
atggacctctccaccatcaag

SEQ ID NO: 12656 - DNA, 21 bp, Artificial Sequence
  Synthetic
tccagcttccgcttgatggtg

SEQ ID NO: 12657 - DNA, 21 bp, Artificial Sequence
  Synthetic
ctctccaccatcaagcggaag

SEQ ID NO: 12658 - DNA, 21 bp, Artificial Sequence
  Synthetic
tgtccagcttccgcttgatgg

SEQ ID NO: 12659 - DNA, 21 bp, Artificial Sequence
  Synthetic
gtgtccagcttccgcttgatg

SEQ ID NO: 12660 - DNA, 21 bp, Artificial Sequence
  Synthetic
ccatcaagcggaagctggaca

SEQ ID NO: 12661 - DNA, 21 bp, Artificial Sequence
  Synthetic
agctggacacagggcaatacc

SEQ ID NO: 12662 - DNA, 21 bp, Artificial Sequence
  Synthetic
taccaagagccctggcagtac

SEQ ID NO: 12663 - DNA, 21 bp, Artificial Sequence
  Synthetic
cagacgtcgtccacgtactgc

SEQ ID NO: 12664 - DNA, 21 bp, Artificial Sequence
  Synthetic
tagagccaggcattgttgaac

SEQ ID NO: 12665 - DNA, 21 bp, Artificial Sequence
  Synthetic
cgattatagagccaggcattg

SEQ ID NO: 12666 - DNA, 21 bp, Artificial Sequence
  Synthetic
gctctataatcgcaagacatc

SEQ ID NO: 12667 - DNA, 21 bp, Artificial Sequence
  Synthetic
actcgggatgtcttgcgatta

SEQ ID NO: 12668 - DNA, 21 bp, Artificial Sequence
  Synthetic
ttactgcaaaacttatagact

SEQ ID NO: 12669 - DNA, 21 bp, Artificial Sequence
  Synthetic
cttactgcaaaacttatagac

SEQ ID NO: 12670 - DNA, 21 bp, Artificial Sequence
  Synthetic
tcagagcgacagacacaacag

SEQ ID NO: 12671 - DNA, 21 bp, Artificial Sequence
  Synthetic
ctcagagcgacagacacaaca

SEQ ID NO: 12672 - DNA, 21 bp, Artificial Sequence
  Synthetic
tcctctgttgtgtctgtcgct

SEQ ID NO: 12673 - DNA, 21 bp, Artificial Sequence
  Synthetic
gtctcagagcgacagacacaa

SEQ ID NO: 12674 - DNA, 21 bp, Artificial Sequence
  Synthetic
gtcgctctgagactgtggtcc

SEQ ID NO: 12675 - DNA, 21 bp, Artificial Sequence
  Synthetic
tcgctctgagactgtggtccc

SEQ ID NO: 12676 - DNA, 21 bp, Artificial Sequence
  Synthetic
cgctctgagactgtggtccct

SEQ ID NO: 12677 - DNA, 21 bp, Artificial Sequence
  Synthetic
ggttcccagggaccacagtct

SEQ ID NO: 12678 - DNA, 21 bp, Artificial Sequence
  Synthetic
acagctgaccagccggttccc

SEQ ID NO: 12679 - DNA, 21 bp, Artificial Sequence
  Synthetic
cacagctgaccagccggttcc

SEQ ID NO: 12680 - DNA, 21 bp, Artificial Sequence
  Synthetic
ctgggaaccggctggtcagct

SEQ ID NO: 12681 - DNA, 21 bp, Artificial Sequence
  Synthetic
gggaaccggctggtcagctgt

SEQ ID NO: 12682 - DNA, 21 bp, Artificial Sequence
  Synthetic
gctgtgagaagtgtcgccatg

SEQ ID NO: 12683 - DNA, 21 bp, Artificial Sequence
  Synthetic
tgtgagaagtgtcgccatggt

SEQ ID NO: 12684 - DNA, 21 bp, Artificial Sequence
  Synthetic
attatcactgcagcttatcac

SEQ ID NO: 12685 - DNA, 21 bp, Artificial Sequence
  Synthetic
tcaccaggactgccatgttcc

SEQ ID NO: 12686 - DNA, 21 bp, Artificial Sequence
  Synthetic
atgttcccagggctccagccc

SEQ ID NO: 12687 - DNA, 21 bp, Artificial Sequence
  Synthetic
tgttcccagggctccagcccc

SEQ ID NO: 12688 - DNA, 21 bp, Artificial Sequence
  Synthetic
ctctccaggggctggagccct

SEQ ID NO: 12689 - DNA, 21 bp, Artificial Sequence
  Synthetic
ttcccagggctccagcccctg

SEQ ID NO: 12690 - DNA, 21 bp, Artificial Sequence
  Synthetic
cctctccaggggctggagccc

SEQ ID NO: 12691 - DNA, 21 bp, Artificial Sequence
  Synthetic
ccctctccaggggctggagcc

SEQ ID NO: 12692 - DNA, 21 bp, Artificial Sequence
  Synthetic
cccagggctccagcccctgga

SEQ ID NO: 12693 - DNA, 21 bp, Artificial Sequence
  Synthetic
ccagggctccagcccctggag

SEQ ID NO: 12694 - DNA, 21 bp, Artificial Sequence
  Synthetic
cagggctccagcccctggaga

SEQ ID NO: 12695 - DNA, 21 bp, Artificial Sequence
  Synthetic
gggctccagcccctggagagg

SEQ ID NO: 12696 - DNA, 21 bp, Artificial Sequence
  Synthetic
gctccagcccctggagaggga

SEQ ID NO: 12697 - DNA, 21 bp, Artificial Sequence
  Synthetic
gccctctccctctccaggggc

SEQ ID NO: 12698 - DNA, 21 bp, Artificial Sequence
  Synthetic
tgccctctccctctccagggg

SEQ ID NO: 12699 - DNA, 21 bp, Artificial Sequence
  Synthetic
ggatgtgccctctccctctcc

SEQ ID NO: 12700 - DNA, 21 bp, Artificial Sequence
  Synthetic
aggatgtgccctctccctctc

SEQ ID NO: 12701 - DNA, 21 bp, Artificial Sequence
  Synthetic
tggagagggagagggcacatc

SEQ ID NO: 12702 - DNA, 21 bp, Artificial Sequence
  Synthetic
aagacacactggcggcatacc

SEQ ID NO: 12703 - DNA, 21 bp, Artificial Sequence
  Synthetic
gttgcaatatctgcggcacct

SEQ ID NO: 12704 - DNA, 21 bp, Artificial Sequence
  Synthetic
tgcaatatctgcggcacctcc

SEQ ID NO: 12705 - DNA, 21 bp, Artificial Sequence
  Synthetic
cggggatacacacgtcattct

SEQ ID NO: 12706 - DNA, 21 bp, Artificial Sequence
  Synthetic
gcggggatacacacgtcattc

SEQ ID NO: 12707 - DNA, 21 bp, Artificial Sequence
  Synthetic
atcacagaagagcaactggtc

SEQ ID NO: 12708 - DNA, 21 bp, Artificial Sequence
  Synthetic
ccacgatcgcagtcatcacag

SEQ ID NO: 12709 - DNA, 21 bp, Artificial Sequence
  Synthetic
tagccacgatcgcagtcatca

SEQ ID NO: 12710 - DNA, 21 bp, Artificial Sequence
  Synthetic
actgtctcaccccgtccatgt

SEQ ID NO: 12711 - DNA, 21 bp, Artificial Sequence
  Synthetic
gggggctcagacatggacggg

SEQ ID NO: 12712 - DNA, 21 bp, Artificial Sequence
  Synthetic
ttcagggggctcagacatgga

SEQ ID NO: 12713 - DNA, 21 bp, Artificial Sequence
  Synthetic
ccccgtccatgtctgagcccc

SEQ ID NO: 12714 - DNA, 21 bp, Artificial Sequence
  Synthetic
cttcagggggctcagacatgg

SEQ ID NO: 12715 - DNA, 21 bp, Artificial Sequence
  Synthetic
ttaccttcagggggctcagac

SEQ ID NO: 12716 - DNA, 21 bp, Artificial Sequence
  Synthetic
gatctgggcaacttaccttca

SEQ ID NO: 12717 - DNA, 21 bp, Artificial Sequence
  Synthetic
agatctgggcaacttaccttc

SEQ ID NO: 12718 - DNA, 21 bp, Artificial Sequence
  Synthetic
aagatctgggcaacttacctt

SEQ ID NO: 12719 - DNA, 21 bp, Artificial Sequence
  Synthetic
agttggagctgccacctgtgt

SEQ ID NO: 12720 - DNA, 21 bp, Artificial Sequence
  Synthetic
agtgcaaatcctgtatcctct

SEQ ID NO: 12721 - DNA, 21 bp, Artificial Sequence
  Synthetic
gtgcaaatcctgtatcctctg

SEQ ID NO: 12722 - DNA, 21 bp, Artificial Sequence
  Synthetic
tctgaggtcccacagaggata

SEQ ID NO: 12723 - DNA, 21 bp, Artificial Sequence
  Synthetic
cctgtatcctctgtgggacct

SEQ ID NO: 12724 - DNA, 21 bp, Artificial Sequence
  Synthetic
tgtatcctctgtgggacctca

SEQ ID NO: 12725 - DNA, 21 bp, Artificial Sequence
  Synthetic
atcattctctgaggtcccaca

SEQ ID NO: 12726 - DNA, 21 bp, Artificial Sequence
  Synthetic
acatcattctctgaggtccca

SEQ ID NO: 12727 - DNA, 21 bp, Artificial Sequence
  Synthetic
tgtgggacctcagagaatgat

SEQ ID NO: 12728 - DNA, 21 bp, Artificial Sequence
  Synthetic
gccccaaactcacatcattct

SEQ ID NO: 12729 - DNA, 21 bp, Artificial Sequence
  Synthetic
actcttctgcgatgactgtga

SEQ ID NO: 12730 - DNA, 21 bp, Artificial Sequence
  Synthetic
cctcggtcacagtcatcgcag

SEQ ID NO: 12731 - DNA, 21 bp, Artificial Sequence
  Synthetic
tagcctcggtcacagtcatcg

SEQ ID NO: 12732 - DNA, 21 bp, Artificial Sequence
  Synthetic
actgtttaaatcccccggtgg

SEQ ID NO: 12733 - DNA, 21 bp, Artificial Sequence
  Synthetic
atcccccggtggctgagcccc

SEQ ID NO: 12734 - DNA, 21 bp, Artificial Sequence
  Synthetic
cttctgggggctcagccaccg

SEQ ID NO: 12735 - DNA, 21 bp, Artificial Sequence
  Synthetic
ccttctgggggctcagccacc

SEQ ID NO: 12736 - DNA, 21 bp, Artificial Sequence
  Synthetic
accttctgggggctcagccac

SEQ ID NO: 12737 - DNA, 21 bp, Artificial Sequence
  Synthetic
taccttctgggggctcagcca

SEQ ID NO: 12738 - DNA, 21 bp, Artificial Sequence
  Synthetic
acttcatcatcattaccttct

SEQ ID NO: 12739 - DNA, 21 bp, Artificial Sequence
  Synthetic
gacttcatcatcattaccttc

SEQ ID NO: 12740 - DNA, 21 bp, Artificial Sequence
  Synthetic
tgacttcatcatcattacctt

SEQ ID NO: 12741 - DNA, 21 bp, Artificial Sequence
  Synthetic
cgtctcatttcttgcaggaag

SEQ ID NO: 12742 - DNA, 21 bp, Artificial Sequence
  Synthetic
gtctcatttcttgcaggaagc

SEQ ID NO: 12743 - DNA, 21 bp, Artificial Sequence
  Synthetic
aagctggagctgccacttatg

SEQ ID NO: 12744 - DNA, 21 bp, Artificial Sequence
  Synthetic
agctggagctgccacttatgc

SEQ ID NO: 12745 - DNA, 21 bp, Artificial Sequence
  Synthetic
gctggagctgccacttatgct

SEQ ID NO: 12746 - DNA, 21 bp, Artificial Sequence
  Synthetic
acgtgggcaacttccactacg

SEQ ID NO: 12747 - DNA, 21 bp, Artificial Sequence
  Synthetic
gtgggcaacttccactacggt

SEQ ID NO: 12748 - DNA, 21 bp, Artificial Sequence
  Synthetic
atccctgtttcctcaccgtag

SEQ ID NO: 12749 - DNA, 21 bp, Artificial Sequence
  Synthetic
tatccctgtttcctcaccgta

SEQ ID NO: 12750 - DNA, 21 bp, Artificial Sequence
  Synthetic
ttcatagggtgtccagctcct

SEQ ID NO: 12751 - DNA, 21 bp, Artificial Sequence
  Synthetic
cccccaggagctggacaccct

SEQ ID NO: 12752 - DNA, 21 bp, Artificial Sequence
  Synthetic
cttcatagggtgtccagctcc

SEQ ID NO: 12753 - DNA, 21 bp, Artificial Sequence
  Synthetic
gcttcatagggtgtccagctc

SEQ ID NO: 12754 - DNA, 21 bp, Artificial Sequence
  Synthetic
atgccaggcgatggggcttca

SEQ ID NO: 12755 - DNA, 21 bp, Artificial Sequence
  Synthetic
ctatgggtcaatgccaggcga

SEQ ID NO: 12756 - DNA, 21 bp, Artificial Sequence
  Synthetic
gctatgggtcaatgccaggcg

SEQ ID NO: 12757 - DNA, 21 bp, Artificial Sequence
  Synthetic
accgtaatgcaggaccaggct

SEQ ID NO: 12758 - DNA, 21 bp, Artificial Sequence
  Synthetic
gtcctgcattacggtctctat

SEQ ID NO: 12759 - DNA, 21 bp, Artificial Sequence
  Synthetic
cttcttatagagaccgtaatg

SEQ ID NO: 12760 - DNA, 21 bp, Artificial Sequence
  Synthetic
ggtctctataagaagatgatc

SEQ ID NO: 12761 - DNA, 21 bp, Artificial Sequence
  Synthetic
gaactcacgatcatcttctta

SEQ ID NO: 12762 - DNA, 21 bp, Artificial Sequence
  Synthetic
cctggtatggcttgaagacct

SEQ ID NO: 12763 - DNA, 21 bp, Artificial Sequence
  Synthetic
gcctggtatggcttgaagacc

SEQ ID NO: 12764 - DNA, 21 bp, Artificial Sequence
  Synthetic
tgttgggaggcctggtatggc

SEQ ID NO: 12765 - DNA, 21 bp, Artificial Sequence
  Synthetic
ggaagcggcacatgtcatgtt

SEQ ID NO: 12766 - DNA, 21 bp, Artificial Sequence
  Synthetic
tggaagcggcacatgtcatgt

SEQ ID NO: 12767 - DNA, 21 bp, Artificial Sequence
  Synthetic
gtggaagcggcacatgtcatg

SEQ ID NO: 12768 - DNA, 21 bp, Artificial Sequence
  Synthetic
atgacatgtgccgcttccact

SEQ ID NO: 12769 - DNA, 21 bp, Artificial Sequence
  Synthetic
gacatgtgccgcttccactcc

SEQ ID NO: 12770 - DNA, 21 bp, Artificial Sequence
  Synthetic
aagtcaatgtagtcctcggag

SEQ ID NO: 12771 - DNA, 21 bp, Artificial Sequence
  Synthetic
gaagtcaatgtagtcctcgga

SEQ ID NO: 12772 - DNA, 21 bp, Artificial Sequence
  Synthetic
gcaggaagtcaatgtagtcct

SEQ ID NO: 12773 - DNA, 21 bp, Artificial Sequence
  Synthetic
tgcaggaagtcaatgtagtcc

SEQ ID NO: 12774 - DNA, 21 bp, Artificial Sequence
  Synthetic
gaggactacattgacttcctg

SEQ ID NO: 12775 - DNA, 21 bp, Artificial Sequence
  Synthetic
ggactacattgacttcctgca

SEQ ID NO: 12776 - DNA, 21 bp, Artificial Sequence
  Synthetic
ttggtggggctgactctctgc

SEQ ID NO: 12777 - DNA, 21 bp, Artificial Sequence
  Synthetic
attggtggggctgactctctg

SEQ ID NO: 12778 - DNA, 21 bp, Artificial Sequence
  Synthetic
tggtgaagccttgcatattgg

SEQ ID NO: 12779 - DNA, 21 bp, Artificial Sequence
  Synthetic
ttggtgaagccttgcatattg

SEQ ID NO: 12780 - DNA, 21 bp, Artificial Sequence
  Synthetic
accaatatgcaaggcttcacc

SEQ ID NO: 12781 - DNA, 21 bp, Artificial Sequence
  Synthetic
ttgaaggcattaagactcttg

SEQ ID NO: 12782 - DNA, 21 bp, Artificial Sequence
  Synthetic
cttcaacgtaggcgatgactg

SEQ ID NO: 12783 - DNA, 21 bp, Artificial Sequence
  Synthetic
cctcaccagtcatcgcctacg

SEQ ID NO: 12784 - DNA, 21 bp, Artificial Sequence
  Synthetic
tcaacgtaggcgatgactggt

SEQ ID NO: 12785 - DNA, 21 bp, Artificial Sequence
  Synthetic
ttccctgcagcccagtgtttc

SEQ ID NO: 12786 - DNA, 21 bp, Artificial Sequence
  Synthetic
gcccagtgtttcccgggctct

SEQ ID NO: 12787 - DNA, 21 bp, Artificial Sequence
  Synthetic
actcaaagagcccgggaaaca

SEQ ID NO: 12788 - DNA, 21 bp, Artificial Sequence
  Synthetic
cgagcagaactcaaagagccc

SEQ ID NO: 12789 - DNA, 21 bp, Artificial Sequence
  Synthetic
gcgagcagaactcaaagagcc

SEQ ID NO: 12790 - DNA, 21 bp, Artificial Sequence
  Synthetic
cgcgagcagaactcaaagagc

SEQ ID NO: 12791 - DNA, 21 bp, Artificial Sequence
  Synthetic
gtgtaacgcgagcagaactca

SEQ ID NO: 12792 - DNA, 21 bp, Artificial Sequence
  Synthetic
gatgcgcctgtgtaacgcgag

SEQ ID NO: 12793 - DNA, 21 bp, Artificial Sequence
  Synthetic
gcagagatgcgcctgtgtaac

SEQ ID NO: 12794 - DNA, 21 bp, Artificial Sequence
  Synthetic
gttacacaggcgcatctctgc

SEQ ID NO: 12795 - DNA, 21 bp, Artificial Sequence
  Synthetic
ttacacaggcgcatctctgca

SEQ ID NO: 12796 - DNA, 21 bp, Artificial Sequence
  Synthetic
tctctgcaaggagcaacccag

SEQ ID NO: 12797 - DNA, 21 bp, Artificial Sequence
  Synthetic
gttcagctgggttgctccttg

SEQ ID NO: 12798 - DNA, 21 bp, Artificial Sequence
  Synthetic
ctatgtcaccttgttgttcag

SEQ ID NO: 12799 - DNA, 21 bp, Artificial Sequence
  Synthetic
gttaatggcaatatcacagat

SEQ ID NO: 12800 - DNA, 21 bp, Artificial Sequence
  Synthetic
gatctgtgatattgccattaa

SEQ ID NO: 12801 - DNA, 21 bp, Artificial Sequence
  Synthetic
gctggtggtctgcaccatgcc

SEQ ID NO: 12802 - DNA, 21 bp, Artificial Sequence
  Synthetic
gtctgcaccatgccaagaagt

SEQ ID NO: 12803 - DNA, 21 bp, Artificial Sequence
  Synthetic
caccatgccaagaagtttgag

SEQ ID NO: 12804 - DNA, 21 bp, Artificial Sequence
  Synthetic
tgtcgttgacatagcagaagc

SEQ ID NO: 12805 - DNA, 21 bp, Artificial Sequence
  Synthetic
atcacaatgtcgttgacatag

SEQ ID NO: 12806 - DNA, 21 bp, Artificial Sequence
  Synthetic
aacgacattgtgattggcatc

SEQ ID NO: 12807 - DNA, 21 bp, Artificial Sequence
  Synthetic
acgacattgtgattggcatcc

SEQ ID NO: 12808 - DNA, 21 bp, Artificial Sequence
  Synthetic
ggctacttacttgagcagctc

SEQ ID NO: 12809 - DNA, 21 bp, Artificial Sequence
  Synthetic
gcttccctctaggtaccaccc

SEQ ID NO: 12810 - DNA, 21 bp, Artificial Sequence
  Synthetic
agagcacccgagggtggtacc

SEQ ID NO: 12811 - DNA, 21 bp, Artificial Sequence
  Synthetic
caatgtcaatgtagagcaccc

SEQ ID NO: 12812 - DNA, 21 bp, Artificial Sequence
  Synthetic
gtcaatgtcaatgtagagcac

SEQ ID NO: 12813 - DNA, 21 bp, Artificial Sequence
  Synthetic
tggtggatgtcaatgtcaatg

SEQ ID NO: 12814 - DNA, 21 bp, Artificial Sequence
  Synthetic
acattgacatccaccatggtg

SEQ ID NO: 12815 - DNA, 21 bp, Artificial Sequence
  Synthetic
cattgacatccaccatggtga

SEQ ID NO: 12816 - DNA, 21 bp, Artificial Sequence
  Synthetic
ttcttgaaccccgtcaccatg

SEQ ID NO: 12817 - DNA, 21 bp, Artificial Sequence
  Synthetic
tccaccatggtgacggggttc

SEQ ID NO: 12818 - DNA, 21 bp, Artificial Sequence
  Synthetic
gtcagtgaggtagaaagcttc

SEQ ID NO: 12819 - DNA, 21 bp, Artificial Sequence
  Synthetic
agaagctttctacctcactga

SEQ ID NO: 12820 - DNA, 21 bp, Artificial Sequence
  Synthetic
gtcatgacccggtcagtgagg

SEQ ID NO: 12821 - DNA, 21 bp, Artificial Sequence
  Synthetic
gacaccgtcatgacccggtca

SEQ ID NO: 12822 - DNA, 21 bp, Artificial Sequence
  Synthetic
tgacggtgtccttccacaaat

SEQ ID NO: 12823 - DNA, 21 bp, Artificial Sequence
  Synthetic
gacggtgtccttccacaaata

SEQ ID NO: 12824 - DNA, 21 bp, Artificial Sequence
  Synthetic
aagtaatttccgtatttgtgg

SEQ ID NO: 12825 - DNA, 21 bp, Artificial Sequence
  Synthetic
aagaagtaatttccgtatttg

SEQ ID NO: 12826 - DNA, 21 bp, Artificial Sequence
  Synthetic
gaagaagtaatttccgtattt

SEQ ID NO: 12827 - DNA, 21 bp, Artificial Sequence
  Synthetic
tacttcttccctggcacaggt

SEQ ID NO: 12828 - DNA, 21 bp, Artificial Sequence
  Synthetic
attcccatacctgtgccaggg

SEQ ID NO: 12829 - DNA, 21 bp, Artificial Sequence
  Synthetic
cctattcccatacctgtgcca

SEQ ID NO: 12830 - DNA, 21 bp, Artificial Sequence
  Synthetic
ccctattcccatacctgtgcc

SEQ ID NO: 12831 - DNA, 21 bp, Artificial Sequence
  Synthetic
tccctattcccatacctgtgc

SEQ ID NO: 12832 - DNA, 21 bp, Artificial Sequence
  Synthetic
acttccctacaggtgacatgt

SEQ ID NO: 12833 - DNA, 21 bp, Artificial Sequence
  Synthetic
ctacaggtgacatgtatgaag

SEQ ID NO: 12834 - DNA, 21 bp, Artificial Sequence
  Synthetic
tacaggtgacatgtatgaagt

SEQ ID NO: 12835 - DNA, 21 bp, Artificial Sequence
  Synthetic
gtgacatgtatgaagtcgggg

SEQ ID NO: 12836 - DNA, 21 bp, Artificial Sequence
  Synthetic
gacatgtatgaagtcggggca

SEQ ID NO: 12837 - DNA, 21 bp, Artificial Sequence
  Synthetic
gagagtggccgctactactgt

SEQ ID NO: 12838 - DNA, 21 bp, Artificial Sequence
  Synthetic
ctactgtctgaacgtgcccct

SEQ ID NO: 12839 - DNA, 21 bp, Artificial Sequence
  Synthetic
tactgtctgaacgtgcccctg

SEQ ID NO: 12840 - DNA, 21 bp, Artificial Sequence
  Synthetic
tggtcatcaatgccatcccgc

SEQ ID NO: 12841 - DNA, 21 bp, Artificial Sequence
  Synthetic
ctggtcatcaatgccatcccg

SEQ ID NO: 12842 - DNA, 21 bp, Artificial Sequence
  Synthetic
ctgcgggatggcattgatgac

SEQ ID NO: 12843 - DNA, 21 bp, Artificial Sequence
  Synthetic
tggaaaaggtgcttgtaacct

SEQ ID NO: 12844 - DNA, 21 bp, Artificial Sequence
  Synthetic
ctggaaaaggtgcttgtaacc

SEQ ID NO: 12845 - DNA, 21 bp, Artificial Sequence
  Synthetic
gctggaaaaggtgcttgtaac

SEQ ID NO: 12846 - DNA, 21 bp, Artificial Sequence
  Synthetic
actacctggttgataaccggc

SEQ ID NO: 12847 - DNA, 21 bp, Artificial Sequence
  Synthetic
cactacctggttgataaccgg

SEQ ID NO: 12848 - DNA, 21 bp, Artificial Sequence
  Synthetic
cagccggttatcaaccaggta

SEQ ID NO: 12849 - DNA, 21 bp, Artificial Sequence
  Synthetic
agcacaatgcacgtgggttgg

SEQ ID NO: 12850 - DNA, 21 bp, Artificial Sequence
  Synthetic
attacctggagcacaatgcac

SEQ ID NO: 12851 - DNA, 21 bp, Artificial Sequence
  Synthetic
ttgcagtgtggagctgactct

SEQ ID NO: 12852 - DNA, 21 bp, Artificial Sequence
  Synthetic
gactctctgggctgtgatcga

SEQ ID NO: 12853 - DNA, 21 bp, Artificial Sequence
  Synthetic
agcccaatcgatcacagccca

SEQ ID NO: 12854 - DNA, 21 bp, Artificial Sequence
  Synthetic
gcagcccaatcgatcacagcc

SEQ ID NO: 12855 - DNA, 21 bp, Artificial Sequence
  Synthetic
gggctgctttaacctcagcat

SEQ ID NO: 12856 - DNA, 21 bp, Artificial Sequence
  Synthetic
gctgctttaacctcagcatcc

SEQ ID NO: 12857 - DNA, 21 bp, Artificial Sequence
  Synthetic
ttaacctcagcatccgagggc

SEQ ID NO: 12858 - DNA, 21 bp, Artificial Sequence
  Synthetic
cctcagcatccgagggcatgg

SEQ ID NO: 12859 - DNA, 21 bp, Artificial Sequence
  Synthetic
tctcacccatgccctcggatg

SEQ ID NO: 12860 - DNA, 21 bp, Artificial Sequence
  Synthetic
gagcaagtctcacccatgccc

SEQ ID NO: 12861 - DNA, 21 bp, Artificial Sequence
  Synthetic
agggaatgcgttgaatatgtc

SEQ ID NO: 12862 - DNA, 21 bp, Artificial Sequence
  Synthetic
cccagcacgagtagagggata

SEQ ID NO: 12863 - DNA, 21 bp, Artificial Sequence
  Synthetic
ttcaatatccctctactcgtg

SEQ ID NO: 12864 - DNA, 21 bp, Artificial Sequence
  Synthetic
accaccacccagcacgagtag

SEQ ID NO: 12865 - DNA, 21 bp, Artificial Sequence
  Synthetic
caccaccacccagcacgagta

SEQ ID NO: 12866 - DNA, 21 bp, Artificial Sequence
  Synthetic
accaccaccacccagcacgag

SEQ ID NO: 12867 - DNA, 21 bp, Artificial Sequence
  Synthetic
gtataaccaccaccacccagc

SEQ ID NO: 12868 - DNA, 21 bp, Artificial Sequence
  Synthetic
gggtggtggtggttatactgt

SEQ ID NO: 12869 - DNA, 21 bp, Artificial Sequence
  Synthetic
tcaccagcagcgggcaacatt

SEQ ID NO: 12870 - DNA, 21 bp, Artificial Sequence
  Synthetic
ccgaaatgttgcccgctgctg

SEQ ID NO: 12871 - DNA, 21 bp, Artificial Sequence
  Synthetic
tcaggagagtgctcaccagca

SEQ ID NO: 12872 - DNA, 21 bp, Artificial Sequence
  Synthetic
tgctggttggtttcaggacat

SEQ ID NO: 12873 - DNA, 21 bp, Artificial Sequence
  Synthetic
agcagcgatgtctcatatgtc

SEQ ID NO: 12874 - DNA, 21 bp, Artificial Sequence
  Synthetic
catatgagacatcgctgctgg

SEQ ID NO: 12875 - DNA, 21 bp, Artificial Sequence
  Synthetic
agtgcaaatcctgcagcctgt

SEQ ID NO: 12876 - DNA, 21 bp, Artificial Sequence
  Synthetic
gtgcaaatcctgcagcctgtg

SEQ ID NO: 12877 - DNA, 21 bp, Artificial Sequence
  Synthetic
tcggaggttccgcacaggctg

SEQ ID NO: 12878 - DNA, 21 bp, Artificial Sequence
  Synthetic
cctgcagcctgtgcggaacct

SEQ ID NO: 12879 - DNA, 21 bp, Artificial Sequence
  Synthetic
tgcagcctgtgcggaacctcc

SEQ ID NO: 12880 - DNA, 21 bp, Artificial Sequence
  Synthetic
tgcggaacctccgagaacgac

SEQ ID NO: 12881 - DNA, 21 bp, Artificial Sequence
  Synthetic
gggcggcactcacgtcgttct

SEQ ID NO: 12882 - DNA, 21 bp, Artificial Sequence
  Synthetic
cgggcggcactcacgtcgttc

SEQ ID NO: 12883 - DNA, 21 bp, Artificial Sequence
  Synthetic
cacaaaacagcagctggtcct

SEQ ID NO: 12884 - DNA, 21 bp, Artificial Sequence
  Synthetic
tcacaaaacagcagctggtcc

SEQ ID NO: 12885 - DNA, 21 bp, Artificial Sequence
  Synthetic
atcacaaaacagcagctggtc

SEQ ID NO: 12886 - DNA, 21 bp, Artificial Sequence
  Synthetic
cggggttaccacatgtactgc

SEQ ID NO: 12887 - DNA, 21 bp, Artificial Sequence
  Synthetic
tactgcctgagtccccccatg

SEQ ID NO: 12888 - DNA, 21 bp, Artificial Sequence
  Synthetic
actgcctgagtccccccatgg

SEQ ID NO: 12889 - DNA, 21 bp, Artificial Sequence
  Synthetic
agtccccccatggcggagccc

SEQ ID NO: 12890 - DNA, 21 bp, Artificial Sequence
  Synthetic
gtccccccatggcggagcccc

SEQ ID NO: 12891 - DNA, 21 bp, Artificial Sequence
  Synthetic
cttccgggggctccgccatgg

SEQ ID NO: 12892 - DNA, 21 bp, Artificial Sequence
  Synthetic
ccttccgggggctccgccatg

SEQ ID NO: 12893 - DNA, 21 bp, Artificial Sequence
  Synthetic
accttccgggggctccgccat

SEQ ID NO: 12894 - DNA, 21 bp, Artificial Sequence
  Synthetic
caccttccgggggctccgcca

SEQ ID NO: 12895 - DNA, 21 bp, Artificial Sequence
  Synthetic
tcaccttccgggggctccgcc

SEQ ID NO: 12896 - DNA, 21 bp, Artificial Sequence
  Synthetic
ccatggcggagcccccggaag

SEQ ID NO: 12897 - DNA, 21 bp, Artificial Sequence
  Synthetic
atggcggagcccccggaaggt

SEQ ID NO: 12898 - DNA, 21 bp, Artificial Sequence
  Synthetic
ccacctctcctctcaccttcc

SEQ ID NO: 12899 - DNA, 21 bp, Artificial Sequence
  Synthetic
cccacctctcctctcaccttc

SEQ ID NO: 12900 - DNA, 21 bp, Artificial Sequence
  Synthetic
gcccacctctcctctcacctt

SEQ ID NO: 12901 - DNA, 21 bp, Artificial Sequence
  Synthetic
ttcggctgcccccgcagggag

SEQ ID NO: 12902 - DNA, 21 bp, Artificial Sequence
  Synthetic
tcggctgcccccgcagggagc

SEQ ID NO: 12903 - DNA, 21 bp, Artificial Sequence
  Synthetic
aggtgacagctccagctccct

SEQ ID NO: 12904 - DNA, 21 bp, Artificial Sequence
  Synthetic
gcgggaacacacacgtgcacc

SEQ ID NO: 12905 - DNA, 21 bp, Artificial Sequence
  Synthetic
cgtgcaccctgagcatgctgg

SEQ ID NO: 12906 - DNA, 21 bp, Artificial Sequence
  Synthetic
tctggatccggccagcatgct

SEQ ID NO: 12907 - DNA, 21 bp, Artificial Sequence
  Synthetic
cctgagcatgctggccggatc

SEQ ID NO: 12908 - DNA, 21 bp, Artificial Sequence
  Synthetic
ctgcagccgggaccagatgct

SEQ ID NO: 12909 - DNA, 21 bp, Artificial Sequence
  Synthetic
cagagcatctggtcccggctg

SEQ ID NO: 12910 - DNA, 21 bp, Artificial Sequence
  Synthetic
agagcatctggtcccggctgc

SEQ ID NO: 12911 - DNA, 21 bp, Artificial Sequence
  Synthetic
agcaggcctgtctcctgcagc

SEQ ID NO: 12912 - DNA, 21 bp, Artificial Sequence
  Synthetic
aagcaggcctgtctcctgcag

SEQ ID NO: 12913 - DNA, 21 bp, Artificial Sequence
  Synthetic
agacaggcctgcttagcaagt

SEQ ID NO: 12914 - DNA, 21 bp, Artificial Sequence
  Synthetic
cctgcttagcaagtgcgaggt

SEQ ID NO: 12915 - DNA, 21 bp, Artificial Sequence
  Synthetic
ctgatcctcctggcagcggat

SEQ ID NO: 12916 - DNA, 21 bp, Artificial Sequence
  Synthetic
atctagcgtggctttgcgacc

SEQ ID NO: 12917 - DNA, 21 bp, Artificial Sequence
  Synthetic
gaggtcgcaaagccacgctag

SEQ ID NO: 12918 - DNA, 21 bp, Artificial Sequence
  Synthetic
atgagatccagacagtgcact

SEQ ID NO: 12919 - DNA, 21 bp, Artificial Sequence
  Synthetic
gtggtattcagagtgcactgt

SEQ ID NO: 12920 - DNA, 21 bp, Artificial Sequence
  Synthetic
catagagcagggtgtggtatt

SEQ ID NO: 12921 - DNA, 21 bp, Artificial Sequence
  Synthetic
ctgaataccacaccctgctct

SEQ ID NO: 12922 - DNA, 21 bp, Artificial Sequence
  Synthetic
tgaataccacaccctgctcta

SEQ ID NO: 12923 - DNA, 21 bp, Artificial Sequence
  Synthetic
gaggggactggtcccatagag

SEQ ID NO: 12924 - DNA, 21 bp, Artificial Sequence
  Synthetic
cggttgaggggactggtccca

SEQ ID NO: 12925 - DNA, 21 bp, Artificial Sequence
  Synthetic
gggaccagtcccctcaaccgg

SEQ ID NO: 12926 - DNA, 21 bp, Artificial Sequence
  Synthetic
tgtctagcttctgccggttga

SEQ ID NO: 12927 - DNA, 21 bp, Artificial Sequence
  Synthetic
ctgtctagcttctgccggttg

SEQ ID NO: 12928 - DNA, 21 bp, Artificial Sequence
  Synthetic
gctgtctagcttctgccggtt

SEQ ID NO: 12929 - DNA, 21 bp, Artificial Sequence
  Synthetic
ttgctgtctagcttctgccgg

SEQ ID NO: 12930 - DNA, 21 bp, Artificial Sequence
  Synthetic
aaccggcagaagctagacagc

SEQ ID NO: 12931 - DNA, 21 bp, Artificial Sequence
  Synthetic
tagacagcaagaagttgctcg

SEQ ID NO: 12932 - DNA, 21 bp, Artificial Sequence
  Synthetic
ttccatgcaggccccatcagc

SEQ ID NO: 12933 - DNA, 21 bp, Artificial Sequence
  Synthetic
cagcatacatcttctggctga

SEQ ID NO: 12934 - DNA, 21 bp, Artificial Sequence
  Synthetic
acagcatacatcttctggctg

SEQ ID NO: 12935 - DNA, 21 bp, Artificial Sequence
  Synthetic
agatgtatgctgtgctgcctt

SEQ ID NO: 12936 - DNA, 21 bp, Artificial Sequence
  Synthetic
gatgtatgctgtgctgccttg

SEQ ID NO: 12937 - DNA, 21 bp, Artificial Sequence
  Synthetic
atgtatgctgtgctgccttgt

SEQ ID NO: 12938 - DNA, 21 bp, Artificial Sequence
  Synthetic
ctgtgctgccttgtgggggca

SEQ ID NO: 12939 - DNA, 21 bp, Artificial Sequence
  Synthetic
tgtgctgccttgtgggggcat

SEQ ID NO: 12940 - DNA, 21 bp, Artificial Sequence
  Synthetic
ctgccttgtgggggcatcggg

SEQ ID NO: 12941 - DNA, 21 bp, Artificial Sequence
  Synthetic
gcaggtggacagtgacaccgt

SEQ ID NO: 12942 - DNA, 21 bp, Artificial Sequence
  Synthetic
caggtggacagtgacaccgtg

SEQ ID NO: 12943 - DNA, 21 bp, Artificial Sequence
  Synthetic
tggacagtgacaccgtgtgga

SEQ ID NO: 12944 - DNA, 21 bp, Artificial Sequence
  Synthetic
ctgccatgcgcacagcactgg

SEQ ID NO: 12945 - DNA, 21 bp, Artificial Sequence
  Synthetic
actgccatgcgcacagcactg

SEQ ID NO: 12946 - DNA, 21 bp, Artificial Sequence
  Synthetic
ccactgccatgcgcacagcac

SEQ ID NO: 12947 - DNA, 21 bp, Artificial Sequence
  Synthetic
cccactgccatgcgcacagca

SEQ ID NO: 12948 - DNA, 21 bp, Artificial Sequence
  Synthetic
tccagtgctgtgcgcatggca

SEQ ID NO: 12949 - DNA, 21 bp, Artificial Sequence
  Synthetic
cgcatggcagtgggctgcctg

SEQ ID NO: 12950 - DNA, 21 bp, Artificial Sequence
  Synthetic
gcatggcagtgggctgcctgc

SEQ ID NO: 12951 - DNA, 21 bp, Artificial Sequence
  Synthetic
agctggccttcaaggtggctg

SEQ ID NO: 12952 - DNA, 21 bp, Artificial Sequence
  Synthetic
gctggccttcaaggtggctgc

SEQ ID NO: 12953 - DNA, 21 bp, Artificial Sequence
  Synthetic
tggccttcaaggtggctgcag

SEQ ID NO: 12954 - DNA, 21 bp, Artificial Sequence
  Synthetic
ttgagctctcctgcagccacc

SEQ ID NO: 12955 - DNA, 21 bp, Artificial Sequence
  Synthetic
gtggctgcaggagagctcaag

SEQ ID NO: 12956 - DNA, 21 bp, Artificial Sequence
  Synthetic
ccggatgatggcaaatccatt

SEQ ID NO: 12957 - DNA, 21 bp, Artificial Sequence
  Synthetic
gatttgccatcatccggcccc

SEQ ID NO: 12958 - DNA, 21 bp, Artificial Sequence
  Synthetic
ctcggcgtggtgtcctggggg

SEQ ID NO: 12959 - DNA, 21 bp, Artificial Sequence
  Synthetic
tccggcccccaggacaccacg

SEQ ID NO: 12960 - DNA, 21 bp, Artificial Sequence
  Synthetic
cggcccccaggacaccacgcc

SEQ ID NO: 12961 - DNA, 21 bp, Artificial Sequence
  Synthetic
ggcccccaggacaccacgccg

SEQ ID NO: 12962 - DNA, 21 bp, Artificial Sequence
  Synthetic
gattcctcggcgtggtgtcct

SEQ ID NO: 12963 - DNA, 21 bp, Artificial Sequence
  Synthetic
ggattcctcggcgtggtgtcc

SEQ ID NO: 12964 - DNA, 21 bp, Artificial Sequence
  Synthetic
tggattcctcggcgtggtgtc

SEQ ID NO: 12965 - DNA, 21 bp, Artificial Sequence
  Synthetic
cgccgaggaatccacagccat

SEQ ID NO: 12966 - DNA, 21 bp, Artificial Sequence
  Synthetic
atctagggcactcacatggct

SEQ ID NO: 12967 - DNA, 21 bp, Artificial Sequence
  Synthetic
gttgaagaagcagaatcccct

SEQ ID NO: 12968 - DNA, 21 bp, Artificial Sequence
  Synthetic
gagttgaagaagcagaatccc

SEQ ID NO: 12969 - DNA, 21 bp, Artificial Sequence
  Synthetic
atggctacagagttgaagaag

SEQ ID NO: 12970 - DNA, 21 bp, Artificial Sequence
  Synthetic
gcggtgatggctacagagttg

SEQ ID NO: 12971 - DNA, 21 bp, Artificial Sequence
  Synthetic
tttgcggtgatggctacagag

SEQ ID NO: 12972 - DNA, 21 bp, Artificial Sequence
  Synthetic
atcaccgcaaaactcctacag

SEQ ID NO: 12973 - DNA, 21 bp, Artificial Sequence
  Synthetic
gcaaaactcctacagcagaag

SEQ ID NO: 12974 - DNA, 21 bp, Artificial Sequence
  Synthetic
cccacgttcaacttctgctgt

SEQ ID NO: 12975 - DNA, 21 bp, Artificial Sequence
  Synthetic
ctcctacagcagaagttgaac

SEQ ID NO: 12976 - DNA, 21 bp, Artificial Sequence
  Synthetic
gcccacgttcaacttctgctg

SEQ ID NO: 12977 - DNA, 21 bp, Artificial Sequence
  Synthetic
aacgtgggcaaggtcctcatc

SEQ ID NO: 12978 - DNA, 21 bp, Artificial Sequence
  Synthetic
gggcaaggtcctcatcgtgga

SEQ ID NO: 12979 - DNA, 21 bp, Artificial Sequence
  Synthetic
actgcctacccagtccacgat

SEQ ID NO: 12980 - DNA, 21 bp, Artificial Sequence
  Synthetic
tcactgcctacccagtccacg

SEQ ID NO: 12981 - DNA, 21 bp, Artificial Sequence
  Synthetic
cattgccatggtgaatgtcct

SEQ ID NO: 12982 - DNA, 21 bp, Artificial Sequence
  Synthetic
ctgctgggtgccattgccatg

SEQ ID NO: 12983 - DNA, 21 bp, Artificial Sequence
  Synthetic
ggggtcattgtagaacgcctg

SEQ ID NO: 12984 - DNA, 21 bp, Artificial Sequence
  Synthetic
tagagcacagaggggtcattg

SEQ ID NO: 12985 - DNA, 21 bp, Artificial Sequence
  Synthetic
gcagagagatgtagagcacag

SEQ ID NO: 12986 - DNA, 21 bp, Artificial Sequence
  Synthetic
tgcagagagatgtagagcaca

SEQ ID NO: 12987 - DNA, 21 bp, Artificial Sequence
  Synthetic
gatgcagagagatgtagagca

SEQ ID NO: 12988 - DNA, 21 bp, Artificial Sequence
  Synthetic
tcatagcgatgcagagagatg

SEQ ID NO: 12989 - DNA, 21 bp, Artificial Sequence
  Synthetic
tctctctgcatcgctatgaca

SEQ ID NO: 12990 - DNA, 21 bp, Artificial Sequence
  Synthetic
tcccgttgtcatagcgatgca

SEQ ID NO: 12991 - DNA, 21 bp, Artificial Sequence
  Synthetic
ctctctgcatcgctatgacaa

SEQ ID NO: 12992 - DNA, 21 bp, Artificial Sequence
  Synthetic
tctctgcatcgctatgacaac

SEQ ID NO: 12993 - DNA, 21 bp, Artificial Sequence
  Synthetic
gttcccgttgtcatagcgatg

SEQ ID NO: 12994 - DNA, 21 bp, Artificial Sequence
  Synthetic
acgggaacttctttccaggct

SEQ ID NO: 12995 - DNA, 21 bp, Artificial Sequence
  Synthetic
cgggaacttctttccaggctc

SEQ ID NO: 12996 - DNA, 21 bp, Artificial Sequence
  Synthetic
tcaggagccccagagcctgga

SEQ ID NO: 12997 - DNA, 21 bp, Artificial Sequence
  Synthetic
tctttccaggctctggggctc

SEQ ID NO: 12998 - DNA, 21 bp, Artificial Sequence
  Synthetic
ctcttcaggagccccagagcc

SEQ ID NO: 12999 - DNA, 21 bp, Artificial Sequence
  Synthetic
ttccaggctctggggctcctg

SEQ ID NO: 13000 - DNA, 21 bp, Artificial Sequence
  Synthetic
cctcttcaggagccccagagc

SEQ ID NO: 13001 - DNA, 21 bp, Artificial Sequence
  Synthetic
gctgtacctcttcaggagccc

SEQ ID NO: 13002 - DNA, 21 bp, Artificial Sequence
  Synthetic
gcccaggagctgtacctcttc

SEQ ID NO: 13003 - DNA, 21 bp, Artificial Sequence
  Synthetic
cgcccaggagctgtacctctt

SEQ ID NO: 13004 - DNA, 21 bp, Artificial Sequence
  Synthetic
cccaactctggtgccaggttg

SEQ ID NO: 13005 - DNA, 21 bp, Artificial Sequence
  Synthetic
ccaactctggtgccaggttgg

SEQ ID NO: 13006 - DNA, 21 bp, Artificial Sequence
  Synthetic
aactctggtgccaggttggtg

SEQ ID NO: 13007 - DNA, 21 bp, Artificial Sequence
  Synthetic
caggttggtggaggaccaggc

SEQ ID NO: 13008 - DNA, 21 bp, Artificial Sequence
  Synthetic
aggttggtggaggaccaggcg

SEQ ID NO: 13009 - DNA, 21 bp, Artificial Sequence
  Synthetic
ggaccaggcgtggggtacaat

SEQ ID NO: 13010 - DNA, 21 bp, Artificial Sequence
  Synthetic
ggggtacaatgtgaacgtggc

SEQ ID NO: 13011 - DNA, 21 bp, Artificial Sequence
  Synthetic
acaatgtgaacgtggcatgga

SEQ ID NO: 13012 - DNA, 21 bp, Artificial Sequence
  Synthetic
caatgtgaacgtggcatggac

SEQ ID NO: 13013 - DNA, 21 bp, Artificial Sequence
  Synthetic
aacgtggcatggacaggaggt

SEQ ID NO: 13014 - DNA, 21 bp, Artificial Sequence
  Synthetic
caggaggtgtggaccccccca

SEQ ID NO: 13015 - DNA, 21 bp, Artificial Sequence
  Synthetic
aggaggtgtggacccccccat

SEQ ID NO: 13016 - DNA, 21 bp, Artificial Sequence
  Synthetic
gtggacccccccattggagac

SEQ ID NO: 13017 - DNA, 21 bp, Artificial Sequence
  Synthetic
tggacccccccattggagacg

SEQ ID NO: 13018 - DNA, 21 bp, Artificial Sequence
  Synthetic
ggtactccacgtctccaatgg

SEQ ID NO: 13019 - DNA, 21 bp, Artificial Sequence
  Synthetic
aggtactccacgtctccaatg

SEQ ID NO: 13020 - DNA, 21 bp, Artificial Sequence
  Synthetic
aaggtactccacgtctccaat

SEQ ID NO: 13021 - DNA, 21 bp, Artificial Sequence
  Synthetic
taaggtactccacgtctccaa

SEQ ID NO: 13022 - DNA, 21 bp, Artificial Sequence
  Synthetic
gtaaggtactccacgtctcca

SEQ ID NO: 13023 - DNA, 21 bp, Artificial Sequence
  Synthetic
gagtaccttacagccttcagg

SEQ ID NO: 13024 - DNA, 21 bp, Artificial Sequence
  Synthetic
agtaccttacagccttcaggt

SEQ ID NO: 13025 - DNA, 21 bp, Artificial Sequence
  Synthetic
cagtggtgatgcccattgccc

SEQ ID NO: 13026 - DNA, 21 bp, Artificial Sequence
  Synthetic
tcaggtgagaactcgtgggca

SEQ ID NO: 13027 - DNA, 21 bp, Artificial Sequence
  Synthetic
gaccacatcaggtgagaactc

SEQ ID NO: 13028 - DNA, 21 bp, Artificial Sequence
  Synthetic
gagactaggaccacatcaggt

SEQ ID NO: 13029 - DNA, 21 bp, Artificial Sequence
  Synthetic
cggagactaggaccacatcag

SEQ ID NO: 13030 - DNA, 21 bp, Artificial Sequence
  Synthetic
ctgatgtggtcctagtctccg

SEQ ID NO: 13031 - DNA, 21 bp, Artificial Sequence
  Synthetic
agcatcaaacccggcggagac

SEQ ID NO: 13032 - DNA, 21 bp, Artificial Sequence
  Synthetic
tctccgccgggtttgatgctg

SEQ ID NO: 13033 - DNA, 21 bp, Artificial Sequence
  Synthetic
cttcaacagcatcaaacccgg

SEQ ID NO: 13034 - DNA, 21 bp, Artificial Sequence
  Synthetic
ccttcaacagcatcaaacccg

SEQ ID NO: 13035 - DNA, 21 bp, Artificial Sequence
  Synthetic
ccgccgggtttgatgctgttg

SEQ ID NO: 13036 - DNA, 21 bp, Artificial Sequence
  Synthetic
gttgaaggacatctgtctcct

SEQ ID NO: 13037 - DNA, 21 bp, Artificial Sequence
  Synthetic
ggtgacagagtagccacccag

SEQ ID NO: 13038 - DNA, 21 bp, Artificial Sequence
  Synthetic
cggtgacagagtagccaccca

SEQ ID NO: 13039 - DNA, 21 bp, Artificial Sequence
  Synthetic
ggcggtgacagagtagccacc

SEQ ID NO: 13040 - DNA, 21 bp, Artificial Sequence
  Synthetic
caggcttacatctggcggtga

SEQ ID NO: 13041 - DNA, 21 bp, Artificial Sequence
  Synthetic
ctggtcaagtggccaaaacct

SEQ ID NO: 13042 - DNA, 21 bp, Artificial Sequence
  Synthetic
ccaggcagctgatgaccctgg

SEQ ID NO: 13043 - DNA, 21 bp, Artificial Sequence
  Synthetic
caggcagctgatgaccctggc

SEQ ID NO: 13044 - DNA, 21 bp, Artificial Sequence
  Synthetic
aggcagctgatgaccctggca

SEQ ID NO: 13045 - DNA, 21 bp, Artificial Sequence
  Synthetic
gctgatgaccctggcaggggg

SEQ ID NO: 13046 - DNA, 21 bp, Artificial Sequence
  Synthetic
cagcaccacccggccccctgc

SEQ ID NO: 13047 - DNA, 21 bp, Artificial Sequence
  Synthetic
gggggccgggtggtgctggcc

SEQ ID NO: 13048 - DNA, 21 bp, Artificial Sequence
  Synthetic
ggggccgggtggtgctggccc

SEQ ID NO: 13049 - DNA, 21 bp, Artificial Sequence
  Synthetic
ggccgggtggtgctggccctg

SEQ ID NO: 13050 - DNA, 21 bp, Artificial Sequence
  Synthetic
gccgggtggtgctggccctgg

SEQ ID NO: 13051 - DNA, 21 bp, Artificial Sequence
  Synthetic
ccgggtggtgctggccctgga

SEQ ID NO: 13052 - DNA, 21 bp, Artificial Sequence
  Synthetic
ggtcaagtcatggcctccctc

SEQ ID NO: 13053 - DNA, 21 bp, Artificial Sequence
  Synthetic
tgaccgccatctgtgatgcct

SEQ ID NO: 13054 - DNA, 21 bp, Artificial Sequence
  Synthetic
gcagagccgagacacaagcct

SEQ ID NO: 13055 - DNA, 21 bp, Artificial Sequence
  Synthetic
ttacctctacactgagcagag

SEQ ID NO: 13056 - DNA, 21 bp, Artificial Sequence
  Synthetic
gggctctgtggaccccacact

SEQ ID NO: 13057 - DNA, 21 bp, Artificial Sequence
  Synthetic
ggctctgtggaccccacactg

SEQ ID NO: 13058 - DNA, 21 bp, Artificial Sequence
  Synthetic
gctctgtggaccccacactgc

SEQ ID NO: 13059 - DNA, 21 bp, Artificial Sequence
  Synthetic
gctcccgcagtgtggggtcca

SEQ ID NO: 13060 - DNA, 21 bp, Artificial Sequence
  Synthetic
gcagttgctgctcccgcagtg

SEQ ID NO: 13061 - DNA, 21 bp, Artificial Sequence
  Synthetic
tgcagttgctgctcccgcagt

SEQ ID NO: 13062 - DNA, 21 bp, Artificial Sequence
  Synthetic
ctgcgggagcagcaactgcag

SEQ ID NO: 13063 - DNA, 21 bp, Artificial Sequence
  Synthetic
tgcgggagcagcaactgcagc

SEQ ID NO: 13064 - DNA, 21 bp, Artificial Sequence
  Synthetic
tgctgctgctgcttgagcgcc

SEQ ID NO: 13065 - DNA, 21 bp, Artificial Sequence
  Synthetic
ctgctgctgctgcttgagcgc

SEQ ID NO: 13066 - DNA, 21 bp, Artificial Sequence
  Synthetic
ttctgcagctgctgctgctgc

SEQ ID NO: 13067 - DNA, 21 bp, Artificial Sequence
  Synthetic
ctcaagcagcagcagcagctg

SEQ ID NO: 13068 - DNA, 21 bp, Artificial Sequence
  Synthetic
tgcagaagcagctcctgttcg

SEQ ID NO: 13069 - DNA, 21 bp, Artificial Sequence
  Synthetic
cagctcctgttcgctgagttc

SEQ ID NO: 13070 - DNA, 21 bp, Artificial Sequence
  Synthetic
tgtttctggaactcagcgaac

SEQ ID NO: 13071 - DNA, 21 bp, Artificial Sequence
  Synthetic
ctgtttctggaactcagcgaa

SEQ ID NO: 13072 - DNA, 21 bp, Artificial Sequence
  Synthetic
tcatgctgtttctggaactca

SEQ ID NO: 13073 - DNA, 21 bp, Artificial Sequence
  Synthetic
gtcaggtggtcatgctgtttc

SEQ ID NO: 13074 - DNA, 21 bp, Artificial Sequence
  Synthetic
tgtcaggtggtcatgctgttt

SEQ ID NO: 13075 - DNA, 21 bp, Artificial Sequence
  Synthetic
atgaccacctgacaaggcagc

SEQ ID NO: 13076 - DNA, 21 bp, Artificial Sequence
  Synthetic
aggcagcatgaggtccagctg

SEQ ID NO: 13077 - DNA, 21 bp, Artificial Sequence
  Synthetic
caccttgaggtgcttctgcag

SEQ ID NO: 13078 - DNA, 21 bp, Artificial Sequence
  Synthetic
cagctgcagaagcacctcaag

SEQ ID NO: 13079 - DNA, 21 bp, Artificial Sequence
  Synthetic
cccatgcccctgcagcagcag

SEQ ID NO: 13080 - DNA, 21 bp, Artificial Sequence
  Synthetic
ccatgcccctgcagcagcagc

SEQ ID NO: 13081 - DNA, 21 bp, Artificial Sequence
  Synthetic
atgctggcagccaagcagcag

SEQ ID NO: 13082 - DNA, 21 bp, Artificial Sequence
  Synthetic
tgctggcagccaagcagcagc

SEQ ID NO: 13083 - DNA, 21 bp, Artificial Sequence
  Synthetic
tgctgaagcaccagtgcacct

SEQ ID NO: 13084 - DNA, 21 bp, Artificial Sequence
  Synthetic
gctgaagcaccagtgcacctg

SEQ ID NO: 13085 - DNA, 21 bp, Artificial Sequence
  Synthetic
ctgaagcaccagtgcacctgc

SEQ ID NO: 13086 - DNA, 21 bp, Artificial Sequence
  Synthetic
gcgggagtagcagcagccacc

SEQ ID NO: 13087 - DNA, 21 bp, Artificial Sequence
  Synthetic
gcagcagccaccccgagcacg

SEQ ID NO: 13088 - DNA, 21 bp, Artificial Sequence
  Synthetic
cagcagccaccccgagcacgc

SEQ ID NO: 13089 - DNA, 21 bp, Artificial Sequence
  Synthetic
agcagccaccccgagcacgcc

SEQ ID NO: 13090 - DNA, 21 bp, Artificial Sequence
  Synthetic
cagccaccccgagcacgccgg

SEQ ID NO: 13091 - DNA, 21 bp, Artificial Sequence
  Synthetic
tctggatcctcccggcgtgct

SEQ ID NO: 13092 - DNA, 21 bp, Artificial Sequence
  Synthetic
ctctggatcctcccggcgtgc

SEQ ID NO: 13093 - DNA, 21 bp, Artificial Sequence
  Synthetic
cccgagcacgccgggaggatc

SEQ ID NO: 13094 - DNA, 21 bp, Artificial Sequence
  Synthetic
ctgcaggcgggaccagatgct

SEQ ID NO: 13095 - DNA, 21 bp, Artificial Sequence
  Synthetic
cagagcatctggtcccgcctg

SEQ ID NO: 13096 - DNA, 21 bp, Artificial Sequence
  Synthetic
agagcatctggtcccgcctgc

SEQ ID NO: 13097 - DNA, 21 bp, Artificial Sequence
  Synthetic
atctggtcccgcctgcaggag

SEQ ID NO: 13098 - DNA, 21 bp, Artificial Sequence
  Synthetic
cggaggcccgtctcctgcagg

SEQ ID NO: 13099 - DNA, 21 bp, Artificial Sequence
  Synthetic
ccggaggcccgtctcctgcag

SEQ ID NO: 13100 - DNA, 21 bp, Artificial Sequence
  Synthetic
ccgcctgcaggagacgggcct

SEQ ID NO: 13101 - DNA, 21 bp, Artificial Sequence
  Synthetic
cgcctgcaggagacgggcctc

SEQ ID NO: 13102 - DNA, 21 bp, Artificial Sequence
  Synthetic
agacgggcctccggggcaaat

SEQ ID NO: 13103 - DNA, 21 bp, Artificial Sequence
  Synthetic
ggcgttacctcgcatttgccc

SEQ ID NO: 13104 - DNA, 21 bp, Artificial Sequence
  Synthetic
cggcgttacctcgcatttgcc

SEQ ID NO: 13105 - DNA, 21 bp, Artificial Sequence
  Synthetic
gcctgtccccacagtgcatcc

SEQ ID NO: 13106 - DNA, 21 bp, Artificial Sequence
  Synthetic
ccttgcgtccgcggatgcact

SEQ ID NO: 13107 - DNA, 21 bp, Artificial Sequence
  Synthetic
atccgcggacgcaaggccacc

SEQ ID NO: 13108 - DNA, 21 bp, Artificial Sequence
  Synthetic
ctccagggtggccttgcgtcc

SEQ ID NO: 13109 - DNA, 21 bp, Artificial Sequence
  Synthetic
tccgcggacgcaaggccaccc

SEQ ID NO: 13110 - DNA, 21 bp, Artificial Sequence
  Synthetic
cgcggacgcaaggccaccctg

SEQ ID NO: 13111 - DNA, 21 bp, Artificial Sequence
  Synthetic
gcggacgcaaggccaccctgg

SEQ ID NO: 13112 - DNA, 21 bp, Artificial Sequence
  Synthetic
gtgcaccgtctgtagctcctc

SEQ ID NO: 13113 - DNA, 21 bp, Artificial Sequence
  Synthetic
gaggagctacagacggtgcac

SEQ ID NO: 13114 - DNA, 21 bp, Artificial Sequence
  Synthetic
aggagctacagacggtgcact

SEQ ID NO: 13115 - DNA, 21 bp, Artificial Sequence
  Synthetic
catacaggagggtgtgggctt

SEQ ID NO: 13116 - DNA, 21 bp, Artificial Sequence
  Synthetic
gcccacaccctcctgtatggc

SEQ ID NO: 13117 - DNA, 21 bp, Artificial Sequence
  Synthetic
gttcgtgccatacaggagggt

SEQ ID NO: 13118 - DNA, 21 bp, Artificial Sequence
  Synthetic
gagggggttcgtgccatacag

SEQ ID NO: 13119 - DNA, 21 bp, Artificial Sequence
  Synthetic
ttgagggggttcgtgccatac

SEQ ID NO: 13120 - DNA, 21 bp, Artificial Sequence
  Synthetic
gttgagggggttcgtgccata

SEQ ID NO: 13121 - DNA, 21 bp, Artificial Sequence
  Synthetic
ggcacgaaccccctcaaccgg

SEQ ID NO: 13122 - DNA, 21 bp, Artificial Sequence
  Synthetic
aaccccctcaaccggcagaaa

SEQ ID NO: 13123 - DNA, 21 bp, Artificial Sequence
  Synthetic
tgtccagtttctgccggttga

SEQ ID NO: 13124 - DNA, 21 bp, Artificial Sequence
  Synthetic
ctgtccagtttctgccggttg

SEQ ID NO: 13125 - DNA, 21 bp, Artificial Sequence
  Synthetic
actgtccagtttctgccggtt

SEQ ID NO: 13126 - DNA, 21 bp, Artificial Sequence
  Synthetic
ttactgtccagtttctgccgg

SEQ ID NO: 13127 - DNA, 21 bp, Artificial Sequence
  Synthetic
aaccggcagaaactggacagt

SEQ ID NO: 13128 - DNA, 21 bp, Artificial Sequence
  Synthetic
aacacggaggcgagcgagcct

SEQ ID NO: 13129 - DNA, 21 bp, Artificial Sequence
  Synthetic
gccggacgaacacggaggcga

SEQ ID NO: 13130 - DNA, 21 bp, Artificial Sequence
  Synthetic
gggagccggacgaacacggag

SEQ ID NO: 13131 - DNA, 21 bp, Artificial Sequence
  Synthetic
cgcaagggagccggacgaaca

SEQ ID NO: 13132 - DNA, 21 bp, Artificial Sequence
  Synthetic
ccgcaagggagccggacgaac

SEQ ID NO: 13133 - DNA, 21 bp, Artificial Sequence
  Synthetic
acaccaccgcaagggagccgg

SEQ ID NO: 13134 - DNA, 21 bp, Artificial Sequence
  Synthetic
cccaacaccaccgcaagggag

SEQ ID NO: 13135 - DNA, 21 bp, Artificial Sequence
  Synthetic
tccggctcccttgcggtggtg

SEQ ID NO: 13136 - DNA, 21 bp, Artificial Sequence
  Synthetic
ccggctcccttgcggtggtgt

SEQ ID NO: 13137 - DNA, 21 bp, Artificial Sequence
  Synthetic
cttaccccaacaccaccgcaa

SEQ ID NO: 13138 - DNA, 21 bp, Artificial Sequence
  Synthetic
acttaccccaacaccaccgca

SEQ ID NO: 13139 - DNA, 21 bp, Artificial Sequence
  Synthetic
cacttaccccaacaccaccgc

SEQ ID NO: 13140 - DNA, 21 bp, Artificial Sequence
  Synthetic
atatggtgtcactgtccacct

SEQ ID NO: 13141 - DNA, 21 bp, Artificial Sequence
  Synthetic
acaggtggacagtgacaccat

SEQ ID NO: 13142 - DNA, 21 bp, Artificial Sequence
  Synthetic
caggtggacagtgacaccata

SEQ ID NO: 13143 - DNA, 21 bp, Artificial Sequence
  Synthetic
tggacagtgacaccatatgga

SEQ ID NO: 13144 - DNA, 21 bp, Artificial Sequence
  Synthetic
atatggaacgaggtgcactcg

SEQ ID NO: 13145 - DNA, 21 bp, Artificial Sequence
  Synthetic
tatggaacgaggtgcactcgg

SEQ ID NO: 13146 - DNA, 21 bp, Artificial Sequence
  Synthetic
atggaacgaggtgcactcggc

SEQ ID NO: 13147 - DNA, 21 bp, Artificial Sequence
  Synthetic
cagccaggcgggctgcccccg

SEQ ID NO: 13148 - DNA, 21 bp, Artificial Sequence
  Synthetic
gcgggggcagcccgcctggct

SEQ ID NO: 13149 - DNA, 21 bp, Artificial Sequence
  Synthetic
taccacgcagcccacagccag

SEQ ID NO: 13150 - DNA, 21 bp, Artificial Sequence
  Synthetic
gcctggctgtgggctgcgtgg

SEQ ID NO: 13151 - DNA, 21 bp, Artificial Sequence
  Synthetic
agctggtcttcaaggtggcca

SEQ ID NO: 13152 - DNA, 21 bp, Artificial Sequence
  Synthetic
gctggtcttcaaggtggccac

SEQ ID NO: 13153 - DNA, 21 bp, Artificial Sequence
  Synthetic
ctggtcttcaaggtggccaca

SEQ ID NO: 13154 - DNA, 21 bp, Artificial Sequence
  Synthetic
tggtcttcaaggtggccacag

SEQ ID NO: 13155 - DNA, 21 bp, Artificial Sequence
  Synthetic
ttcagctcccctgtggccacc

SEQ ID NO: 13156 - DNA, 21 bp, Artificial Sequence
  Synthetic
ttcaaggtggccacaggggag

SEQ ID NO: 13157 - DNA, 21 bp, Artificial Sequence
  Synthetic
gctttgctgtggtccgccccc

SEQ ID NO: 13158 - DNA, 21 bp, Artificial Sequence
  Synthetic
gtccgcccccctggacaccat

SEQ ID NO: 13159 - DNA, 21 bp, Artificial Sequence
  Synthetic
ctccgcatggtgtccaggggg

SEQ ID NO: 13160 - DNA, 21 bp, Artificial Sequence
  Synthetic
tccgcccccctggacaccatg

SEQ ID NO: 13161 - DNA, 21 bp, Artificial Sequence
  Synthetic
cgcccccctggacaccatgcg

SEQ ID NO: 13162 - DNA, 21 bp, Artificial Sequence
  Synthetic
gcccccctggacaccatgcgg

SEQ ID NO: 13163 - DNA, 21 bp, Artificial Sequence
  Synthetic
tctcctccgcatggtgtccag

SEQ ID NO: 13164 - DNA, 21 bp, Artificial Sequence
  Synthetic
ctctcctccgcatggtgtcca

SEQ ID NO: 13165 - DNA, 21 bp, Artificial Sequence
  Synthetic
ccccctggacaccatgcggag

SEQ ID NO: 13166 - DNA, 21 bp, Artificial Sequence
  Synthetic
gctctcctccgcatggtgtcc

SEQ ID NO: 13167 - DNA, 21 bp, Artificial Sequence
  Synthetic
tgctctcctccgcatggtgtc

SEQ ID NO: 13168 - DNA, 21 bp, Artificial Sequence
  Synthetic
tgcggaggagagcacgcccat

SEQ ID NO: 13169 - DNA, 21 bp, Artificial Sequence
  Synthetic
gttgaagtagcaaaagcccct

SEQ ID NO: 13170 - DNA, 21 bp, Artificial Sequence
  Synthetic
ttggctgccacggccacggag

SEQ ID NO: 13171 - DNA, 21 bp, Artificial Sequence
  Synthetic
gaagcttggctgccacggcca

SEQ ID NO: 13172 - DNA, 21 bp, Artificial Sequence
  Synthetic
agaagcttggctgccacggcc

SEQ ID NO: 13173 - DNA, 21 bp, Artificial Sequence
  Synthetic
gtggcagccaagcttctgcag

SEQ ID NO: 13174 - DNA, 21 bp, Artificial Sequence
  Synthetic
gccaagcttctgcagcagagg

SEQ ID NO: 13175 - DNA, 21 bp, Artificial Sequence
  Synthetic
cttctgcagcagaggttgagc

SEQ ID NO: 13176 - DNA, 21 bp, Artificial Sequence
  Synthetic
gctcacgctcaacctctgctg

SEQ ID NO: 13177 - DNA, 21 bp, Artificial Sequence
  Synthetic
agcgtgagcaagatcctcatc

SEQ ID NO: 13178 - DNA, 21 bp, Artificial Sequence
  Synthetic
gagcaagatcctcatcgtgga

SEQ ID NO: 13179 - DNA, 21 bp, Artificial Sequence
  Synthetic
tctgcttacccagtccacgat

SEQ ID NO: 13180 - DNA, 21 bp, Artificial Sequence
  Synthetic
gctctgcttacccagtccacg

SEQ ID NO: 13181 - DNA, 21 bp, Artificial Sequence
  Synthetic
tgctctttaaggacgtgcacc

SEQ ID NO: 13182 - DNA, 21 bp, Artificial Sequence
  Synthetic
gctctttaaggacgtgcacca

SEQ ID NO: 13183 - DNA, 21 bp, Artificial Sequence
  Synthetic
ttaaggacgtgcaccatggaa

SEQ ID NO: 13184 - DNA, 21 bp, Artificial Sequence
  Synthetic
taaggacgtgcaccatggaaa

SEQ ID NO: 13185 - DNA, 21 bp, Artificial Sequence
  Synthetic
ggggtcgctgtagaaagcctg

SEQ ID NO: 13186 - DNA, 21 bp, Artificial Sequence
  Synthetic
tacaggacgctggggtcgctg

SEQ ID NO: 13187 - DNA, 21 bp, Artificial Sequence
  Synthetic
ggagggacatgtacaggacgc

SEQ ID NO: 13188 - DNA, 21 bp, Artificial Sequence
  Synthetic
tggagggacatgtacaggacg

SEQ ID NO: 13189 - DNA, 21 bp, Artificial Sequence
  Synthetic
gtagcggtggagggacatgta

SEQ ID NO: 13190 - DNA, 21 bp, Artificial Sequence
  Synthetic
tgtccctccaccgctacgacg

SEQ ID NO: 13191 - DNA, 21 bp, Artificial Sequence
  Synthetic
gtccctccaccgctacgacga

SEQ ID NO: 13192 - DNA, 21 bp, Artificial Sequence
  Synthetic
ttcccatcgtcgtagcggtgg

SEQ ID NO: 13193 - DNA, 21 bp, Artificial Sequence
  Synthetic
tccctccaccgctacgacgat

SEQ ID NO: 13194 - DNA, 21 bp, Artificial Sequence
  Synthetic
gttcccatcgtcgtagcggtg

SEQ ID NO: 13195 - DNA, 21 bp, Artificial Sequence
  Synthetic
aagttcccatcgtcgtagcgg

SEQ ID NO: 13196 - DNA, 21 bp, Artificial Sequence
  Synthetic
gaagttcccatcgtcgtagcg

SEQ ID NO: 13197 - DNA, 21 bp, Artificial Sequence
  Synthetic
atgggaacttcttcccaggca

SEQ ID NO: 13198 - DNA, 21 bp, Artificial Sequence
  Synthetic
tgggaacttcttcccaggcag

SEQ ID NO: 13199 - DNA, 21 bp, Artificial Sequence
  Synthetic
tcaggagccccgctgcctggg

SEQ ID NO: 13200 - DNA, 21 bp, Artificial Sequence
  Synthetic
tcatcaggagccccgctgcct

SEQ ID NO: 13201 - DNA, 21 bp, Artificial Sequence
  Synthetic
ctcatcaggagccccgctgcc

SEQ ID NO: 13202 - DNA, 21 bp, Artificial Sequence
  Synthetic
tcccaggcagcggggctcctg

SEQ ID NO: 13203 - DNA, 21 bp, Artificial Sequence
  Synthetic
cctcatcaggagccccgctgc

SEQ ID NO: 13204 - DNA, 21 bp, Artificial Sequence
  Synthetic
atataccccacctacctcatc

SEQ ID NO: 13205 - DNA, 21 bp, Artificial Sequence
  Synthetic
tatataccccacctacctcat

SEQ ID NO: 13206 - DNA, 21 bp, Artificial Sequence
  Synthetic
ccttctggccacaggtgggca

SEQ ID NO: 13207 - DNA, 21 bp, Artificial Sequence
  Synthetic
caggtgggcacagggcccggc

SEQ ID NO: 13208 - DNA, 21 bp, Artificial Sequence
  Synthetic
atgttgacgttgaaacccacg

SEQ ID NO: 13209 - DNA, 21 bp, Artificial Sequence
  Synthetic
ccggtgaaagccatgttgacg

SEQ ID NO: 13210 - DNA, 21 bp, Artificial Sequence
  Synthetic
aacatggctttcaccggcggc

SEQ ID NO: 13211 - DNA, 21 bp, Artificial Sequence
  Synthetic
atgggggggtccaggccgccg

SEQ ID NO: 13212 - DNA, 21 bp, Artificial Sequence
  Synthetic
accggcggcctggaccccccc

SEQ ID NO: 13213 - DNA, 21 bp, Artificial Sequence
  Synthetic
ccggcggcctggaccccccca

SEQ ID NO: 13214 - DNA, 21 bp, Artificial Sequence
  Synthetic
cggcggcctggacccccccat

SEQ ID NO: 13215 - DNA, 21 bp, Artificial Sequence
  Synthetic
tggacccccccatgggagacg

SEQ ID NO: 13216 - DNA, 21 bp, Artificial Sequence
  Synthetic
agtactcagcgtctcccatgg

SEQ ID NO: 13217 - DNA, 21 bp, Artificial Sequence
  Synthetic
aagtactcagcgtctcccatg

SEQ ID NO: 13218 - DNA, 21 bp, Artificial Sequence
  Synthetic
caagtactcagcgtctcccat

SEQ ID NO: 13219 - DNA, 21 bp, Artificial Sequence
  Synthetic
ccaagtactcagcgtctccca

SEQ ID NO: 13220 - DNA, 21 bp, Artificial Sequence
  Synthetic
gccaagtactcagcgtctccc

SEQ ID NO: 13221 - DNA, 21 bp, Artificial Sequence
  Synthetic
tgagtacttggcggccttcag

SEQ ID NO: 13222 - DNA, 21 bp, Artificial Sequence
  Synthetic
cggtggtcatgccgatcgcca

SEQ ID NO: 13223 - DNA, 21 bp, Artificial Sequence
  Synthetic
ccgatcgccagcgagtttgcc

SEQ ID NO: 13224 - DNA, 21 bp, Artificial Sequence
  Synthetic
tgatgacaccagcaccacatc

SEQ ID NO: 13225 - DNA, 21 bp, Artificial Sequence
  Synthetic
ctgatgacaccagcaccacat

SEQ ID NO: 13226 - DNA, 21 bp, Artificial Sequence
  Synthetic
gtgtcatcaggcttcgatgcc

SEQ ID NO: 13227 - DNA, 21 bp, Artificial Sequence
  Synthetic
tgtcatcaggcttcgatgccg

SEQ ID NO: 13228 - DNA, 21 bp, Artificial Sequence
  Synthetic
tcatcaggcttcgatgccgtg

SEQ ID NO: 13229 - DNA, 21 bp, Artificial Sequence
  Synthetic
gtggggtggccctccacggca

SEQ ID NO: 13230 - DNA, 21 bp, Artificial Sequence
  Synthetic
tggagggccaccccacccctc

SEQ ID NO: 13231 - DNA, 21 bp, Artificial Sequence
  Synthetic
ggagggccaccccacccctct

SEQ ID NO: 13232 - DNA, 21 bp, Artificial Sequence
  Synthetic
gagggccaccccacccctctt

SEQ ID NO: 13233 - DNA, 21 bp, Artificial Sequence
  Synthetic
ggttgtagcccccaagagggg

SEQ ID NO: 13234 - DNA, 21 bp, Artificial Sequence
  Synthetic
aggttgtagcccccaagaggg

SEQ ID NO: 13235 - DNA, 21 bp, Artificial Sequence
  Synthetic
ggagaggttgtagcccccaag

SEQ ID NO: 13236 - DNA, 21 bp, Artificial Sequence
  Synthetic
cggagaggttgtagcccccaa

SEQ ID NO: 13237 - DNA, 21 bp, Artificial Sequence
  Synthetic
ggcggagaggttgtagccccc

SEQ ID NO: 13238 - DNA, 21 bp, Artificial Sequence
  Synthetic
cagaaccacttacatctggcg

SEQ ID NO: 13239 - DNA, 21 bp, Artificial Sequence
  Synthetic
tgcagaaccacttacatctgg

SEQ ID NO: 13240 - DNA, 21 bp, Artificial Sequence
  Synthetic
atgcagaaccacttacatctg

SEQ ID NO: 13241 - DNA, 21 bp, Artificial Sequence
  Synthetic
gttgcaggcttcgggtacctg

SEQ ID NO: 13242 - DNA, 21 bp, Artificial Sequence
  Synthetic
atcagctgcttcgtcaggtac

SEQ ID NO: 13243 - DNA, 21 bp, Artificial Sequence
  Synthetic
gggtacctgacgaagcagctg

SEQ ID NO: 13244 - DNA, 21 bp, Artificial Sequence
  Synthetic
gctgatgggcctggctggcgg

SEQ ID NO: 13245 - DNA, 21 bp, Artificial Sequence
  Synthetic
gcggccggattgtcctggccc

SEQ ID NO: 13246 - DNA, 21 bp, Artificial Sequence
  Synthetic
ggccggattgtcctggccctc

SEQ ID NO: 13247 - DNA, 21 bp, Artificial Sequence
  Synthetic
gccggattgtcctggccctcg

SEQ ID NO: 13248 - DNA, 21 bp, Artificial Sequence
  Synthetic
ccggattgtcctggccctcga

SEQ ID NO: 13249 - DNA, 21 bp, Artificial Sequence
  Synthetic
gtcgtggcctccctcgagggc

SEQ ID NO: 13250 - DNA, 21 bp, Artificial Sequence
  Synthetic
ggtcaggtcgtggcctccctc

SEQ ID NO: 13251 - DNA, 21 bp, Artificial Sequence
  Synthetic
gcggtcaggtcgtggcctccc

SEQ ID NO: 13252 - DNA, 21 bp, Artificial Sequence
  Synthetic
ctgaccgccatttgcgacgcc

SEQ ID NO: 13253 - DNA, 21 bp, Artificial Sequence
  Synthetic
tgaccgccatttgcgacgcct

SEQ ID NO: 13254 - DNA, 21 bp, Artificial Sequence
  Synthetic
gcaaggcagaaacacatgctt

SEQ ID NO: 13255 - DNA, 21 bp, Artificial Sequence
  Synthetic
gaagcatgtgtttctgccttg

SEQ ID NO: 13256 - DNA, 21 bp, Artificial Sequence
  Synthetic
aagcatgtgtttctgccttgc

SEQ ID NO: 13257 - DNA, 21 bp, Artificial Sequence
  Synthetic
agcatgtgtttctgccttgct

SEQ ID NO: 13258 - DNA, 21 bp, Artificial Sequence
  Synthetic
ctacctcgtttcccagcaagg

SEQ ID NO: 13259 - DNA, 21 bp, Artificial Sequence
  Synthetic
accagttctcactgcctgtgg

SEQ ID NO: 13260 - DNA, 21 bp, Artificial Sequence
  Synthetic
gcctgtggcagagccggccct

SEQ ID NO: 13261 - DNA, 21 bp, Artificial Sequence
  Synthetic
cctgtggcagagccggccctg

SEQ ID NO: 13262 - DNA, 21 bp, Artificial Sequence
  Synthetic
ctgtggcagagccggccctgc

SEQ ID NO: 13263 - DNA, 21 bp, Artificial Sequence
  Synthetic
ctgctgcagctgctgctcccg

SEQ ID NO: 13264 - DNA, 21 bp, Artificial Sequence
  Synthetic
ctgcgggagcagcagctgcag

SEQ ID NO: 13265 - DNA, 21 bp, Artificial Sequence
  Synthetic
tgcgggagcagcagctgcagc

SEQ ID NO: 13266 - DNA, 21 bp, Artificial Sequence
  Synthetic
caggagctcctggcgctcaag

SEQ ID NO: 13267 - DNA, 21 bp, Artificial Sequence
  Synthetic
tgctgcttctgcttgagcgcc

SEQ ID NO: 13268 - DNA, 21 bp, Artificial Sequence
  Synthetic
ctgctgcttctgcttgagcgc

SEQ ID NO: 13269 - DNA, 21 bp, Artificial Sequence
  Synthetic
ctctggatctgctgcttctgc

SEQ ID NO: 13270 - DNA, 21 bp, Artificial Sequence
  Synthetic
ctcaagcagaagcagcagatc

SEQ ID NO: 13271 - DNA, 21 bp, Artificial Sequence
  Synthetic
ctcagcgatgaggatctgcct

SEQ ID NO: 13272 - DNA, 21 bp, Artificial Sequence
  Synthetic
tccagaggcagatcctcatcg

SEQ ID NO: 13273 - DNA, 21 bp, Artificial Sequence
  Synthetic
cagatcctcatcgctgagttc

SEQ ID NO: 13274 - DNA, 21 bp, Artificial Sequence
  Synthetic
ctgcctctggaactcagcgat

SEQ ID NO: 13275 - DNA, 21 bp, Artificial Sequence
  Synthetic
tgctgcctctggaactcagcg

SEQ ID NO: 13276 - DNA, 21 bp, Artificial Sequence
  Synthetic
tcgctgagttccagaggcagc

SEQ ID NO: 13277 - DNA, 21 bp, Artificial Sequence
  Synthetic
gagagctgctcgtgctgcctc

SEQ ID NO: 13278 - DNA, 21 bp, Artificial Sequence
  Synthetic
ggagagctgctcgtgctgcct

SEQ ID NO: 13279 - DNA, 21 bp, Artificial Sequence
  Synthetic
acgagcagctctcccggcagc

SEQ ID NO: 13280 - DNA, 21 bp, Artificial Sequence
  Synthetic
agctgcgcctcgtgctgccgg

SEQ ID NO: 13281 - DNA, 21 bp, Artificial Sequence
  Synthetic
ggagctgcgcctcgtgctgcc

SEQ ID NO: 13282 - DNA, 21 bp, Artificial Sequence
  Synthetic
tggagctgcgcctcgtgctgc

SEQ ID NO: 13283 - DNA, 21 bp, Artificial Sequence
  Synthetic
gtggagctgcgcctcgtgctg

SEQ ID NO: 13284 - DNA, 21 bp, Artificial Sequence
  Synthetic
ggcagcacgaggcgcagctcc

SEQ ID NO: 13285 - DNA, 21 bp, Artificial Sequence
  Synthetic
cagctccacgagcacatcaag

SEQ ID NO: 13286 - DNA, 21 bp, Artificial Sequence
  Synthetic
cgcctcaccttgatgtgctcg

SEQ ID NO: 13287 - DNA, 21 bp, Artificial Sequence
  Synthetic
gcgcctcaccttgatgtgctc

SEQ ID NO: 13288 - DNA, 21 bp, Artificial Sequence
  Synthetic
tccttccacttgcagcaacaa

SEQ ID NO: 13289 - DNA, 21 bp, Artificial Sequence
  Synthetic
ccttccacttgcagcaacaac

SEQ ID NO: 13290 - DNA, 21 bp, Artificial Sequence
  Synthetic
caacaacaggagatgctggcc

SEQ ID NO: 13291 - DNA, 21 bp, Artificial Sequence
  Synthetic
atgctggccatgaagcaccag

SEQ ID NO: 13292 - DNA, 21 bp, Artificial Sequence
  Synthetic
tgctggccatgaagcaccagc

SEQ ID NO: 13293 - DNA, 21 bp, Artificial Sequence
  Synthetic
atgaagcaccagcaggagctg

SEQ ID NO: 13294 - DNA, 21 bp, Artificial Sequence
  Synthetic
tgaagcaccagcaggagctgc

SEQ ID NO: 13295 - DNA, 21 bp, Artificial Sequence
  Synthetic
gcaggagctgctggaacacca

SEQ ID NO: 13296 - DNA, 21 bp, Artificial Sequence
  Synthetic
caggagctgctggaacaccag

SEQ ID NO: 13297 - DNA, 21 bp, Artificial Sequence
  Synthetic
ctgctggaacaccagcggaag

SEQ ID NO: 13298 - DNA, 21 bp, Artificial Sequence
  Synthetic
tgctggaacaccagcggaagc

SEQ ID NO: 13299 - DNA, 21 bp, Artificial Sequence
  Synthetic
ctggaacaccagcggaagctg

SEQ ID NO: 13300 - DNA, 21 bp, Artificial Sequence
  Synthetic
cggaagctggagaggcaccgc

SEQ ID NO: 13301 - DNA, 21 bp, Artificial Sequence
  Synthetic
ggaagctggagaggcaccgcc

SEQ ID NO: 13302 - DNA, 21 bp, Artificial Sequence
  Synthetic
ctggagaggcaccgccaggag

SEQ ID NO: 13303 - DNA, 21 bp, Artificial Sequence
  Synthetic
tggagaggcaccgccaggagc

SEQ ID NO: 13304 - DNA, 21 bp, Artificial Sequence
  Synthetic
aggcaccgccaggagcaggag

SEQ ID NO: 13305 - DNA, 21 bp, Artificial Sequence
  Synthetic
ggcaccgccaggagcaggagc

SEQ ID NO: 13306 - DNA, 21 bp, Artificial Sequence
  Synthetic
caccgccaggagcaggagctg

SEQ ID NO: 13307 - DNA, 21 bp, Artificial Sequence
  Synthetic
gcaggagctggagaagcagca

SEQ ID NO: 13308 - DNA, 21 bp, Artificial Sequence
  Synthetic
caggagctggagaagcagcac

SEQ ID NO: 13309 - DNA, 21 bp, Artificial Sequence
  Synthetic
aggagctggagaagcagcacc

SEQ ID NO: 13310 - DNA, 21 bp, Artificial Sequence
  Synthetic
ctggagaagcagcaccgggag

SEQ ID NO: 13311 - DNA, 21 bp, Artificial Sequence
  Synthetic
ggtgcctgctgttgtcaccgc

SEQ ID NO: 13312 - DNA, 21 bp, Artificial Sequence
  Synthetic
gggtgcctgctgttgtcaccg

SEQ ID NO: 13313 - DNA, 21 bp, Artificial Sequence
  Synthetic
tgcggtgacaacagcaggcac

SEQ ID NO: 13314 - DNA, 21 bp, Artificial Sequence
  Synthetic
gcggtgacaacagcaggcacc

SEQ ID NO: 13315 - DNA, 21 bp, Artificial Sequence
  Synthetic
tctggatgcggccggcgtgct

SEQ ID NO: 13316 - DNA, 21 bp, Artificial Sequence
  Synthetic
ccggagcacgccggccgcatc

SEQ ID NO: 13317 - DNA, 21 bp, Artificial Sequence
  Synthetic
ctgcagccgggaccagatgct

SEQ ID NO: 13318 - DNA, 21 bp, Artificial Sequence
  Synthetic
cagagcatctggtcccggctg

SEQ ID NO: 13319 - DNA, 21 bp, Artificial Sequence
  Synthetic
agagcatctggtcccggctgc

SEQ ID NO: 13320 - DNA, 21 bp, Artificial Sequence
  Synthetic
catctggtcccggctgcagga

SEQ ID NO: 13321 - DNA, 21 bp, Artificial Sequence
  Synthetic
atctggtcccggctgcaggag

SEQ ID NO: 13322 - DNA, 21 bp, Artificial Sequence
  Synthetic
tctggtcccggctgcaggagc

SEQ ID NO: 13323 - DNA, 21 bp, Artificial Sequence
  Synthetic
cggagcccccgctcctgcagc

SEQ ID NO: 13324 - DNA, 21 bp, Artificial Sequence
  Synthetic
ccggagcccccgctcctgcag

SEQ ID NO: 13325 - DNA, 21 bp, Artificial Sequence
  Synthetic
ccggctgcaggagcgggggct

SEQ ID NO: 13326 - DNA, 21 bp, Artificial Sequence
  Synthetic
cggctgcaggagcgggggctc

SEQ ID NO: 13327 - DNA, 21 bp, Artificial Sequence
  Synthetic
agcgggggctccggagccagt

SEQ ID NO: 13328 - DNA, 21 bp, Artificial Sequence
  Synthetic
gggctccggagccagtgtgag

SEQ ID NO: 13329 - DNA, 21 bp, Artificial Sequence
  Synthetic
gctccggagccagtgtgaggt

SEQ ID NO: 13330 - DNA, 21 bp, Artificial Sequence
  Synthetic
ctcctcacctcacactggctc

SEQ ID NO: 13331 - DNA, 21 bp, Artificial Sequence
  Synthetic
cctcctcacctcacactggct

SEQ ID NO: 13332 - DNA, 21 bp, Artificial Sequence
  Synthetic
ggccttccggcctcggagaca

SEQ ID NO: 13333 - DNA, 21 bp, Artificial Sequence
  Synthetic
tccagggaggccttccggcct

SEQ ID NO: 13334 - DNA, 21 bp, Artificial Sequence
  Synthetic
ctccgaggccggaaggcctcc

SEQ ID NO: 13335 - DNA, 21 bp, Artificial Sequence
  Synthetic
ttccagggaggccttccggcc

SEQ ID NO: 13336 - DNA, 21 bp, Artificial Sequence
  Synthetic
tccgaggccggaaggcctccc

SEQ ID NO: 13337 - DNA, 21 bp, Artificial Sequence
  Synthetic
gaggccggaaggcctccctgg

SEQ ID NO: 13338 - DNA, 21 bp, Artificial Sequence
  Synthetic
ggaccgactgcagctcttcca

SEQ ID NO: 13339 - DNA, 21 bp, Artificial Sequence
  Synthetic
tggaccgactgcagctcttcc

SEQ ID NO: 13340 - DNA, 21 bp, Artificial Sequence
  Synthetic
gtggaccgactgcagctcttc

SEQ ID NO: 13341 - DNA, 21 bp, Artificial Sequence
  Synthetic
aagagctgcagtcggtccact

SEQ ID NO: 13342 - DNA, 21 bp, Artificial Sequence
  Synthetic
gaggagcacgtgccgctcaga

SEQ ID NO: 13343 - DNA, 21 bp, Artificial Sequence
  Synthetic
cgtagaggagcacgtgccgct

SEQ ID NO: 13344 - DNA, 21 bp, Artificial Sequence
  Synthetic
ctgagcgggttggtgccgtag

SEQ ID NO: 13345 - DNA, 21 bp, Artificial Sequence
  Synthetic
gctgagcgggttggtgccgta

SEQ ID NO: 13346 - DNA, 21 bp, Artificial Sequence
  Synthetic
cggctgagcgggttggtgccg

SEQ ID NO: 13347 - DNA, 21 bp, Artificial Sequence
  Synthetic
aacccgctcagccgcctcaaa

SEQ ID NO: 13348 - DNA, 21 bp, Artificial Sequence
  Synthetic
tgtccagtttgaggcggctga

SEQ ID NO: 13349 - DNA, 21 bp, Artificial Sequence
  Synthetic
ccgttgtccagtttgaggcgg

SEQ ID NO: 13350 - DNA, 21 bp, Artificial Sequence
  Synthetic
tcagccgcctcaaactggaca

SEQ ID NO: 13351 - DNA, 21 bp, Artificial Sequence
  Synthetic
cagccgcctcaaactggacaa

SEQ ID NO: 13352 - DNA, 21 bp, Artificial Sequence
  Synthetic
agccgcctcaaactggacaac

SEQ ID NO: 13353 - DNA, 21 bp, Artificial Sequence
  Synthetic
gccagcttcccgttgtccagt

SEQ ID NO: 13354 - DNA, 21 bp, Artificial Sequence
  Synthetic
ccccgcagggctcctggcaca

SEQ ID NO: 13355 - DNA, 21 bp, Artificial Sequence
  Synthetic
atccgctgtgccaggagccct

SEQ ID NO: 13356 - DNA, 21 bp, Artificial Sequence
  Synthetic
atcacaaacatccgctgtgcc

SEQ ID NO: 13357 - DNA, 21 bp, Artificial Sequence
  Synthetic
catcacaaacatccgctgtgc

SEQ ID NO: 13358 - DNA, 21 bp, Artificial Sequence
  Synthetic
tgtttgtgatgctgccctgtg

SEQ ID NO: 13359 - DNA, 21 bp, Artificial Sequence
  Synthetic
gtttgtgatgctgccctgtgg

SEQ ID NO: 13360 - DNA, 21 bp, Artificial Sequence
  Synthetic
tgatgctgccctgtggtgggg

SEQ ID NO: 13361 - DNA, 21 bp, Artificial Sequence
  Synthetic
gatgctgccctgtggtggggt

SEQ ID NO: 13362 - DNA, 21 bp, Artificial Sequence
  Synthetic
acacttaccccaaccccacca

SEQ ID NO: 13363 - DNA, 21 bp, Artificial Sequence
  Synthetic
agatggtgtcagtgtccacct

SEQ ID NO: 13364 - DNA, 21 bp, Artificial Sequence
  Synthetic
gcaggtggacactgacaccat

SEQ ID NO: 13365 - DNA, 21 bp, Artificial Sequence
  Synthetic
caggtggacactgacaccatc

SEQ ID NO: 13366 - DNA, 21 bp, Artificial Sequence
  Synthetic
tggacactgacaccatctgga

SEQ ID NO: 13367 - DNA, 21 bp, Artificial Sequence
  Synthetic
ccagcgggctgcattggagga

SEQ ID NO: 13368 - DNA, 21 bp, Artificial Sequence
  Synthetic
tcattcctccaatgcagcccg

SEQ ID NO: 13369 - DNA, 21 bp, Artificial Sequence
  Synthetic
cggcccagcgggctgcattgg

SEQ ID NO: 13370 - DNA, 21 bp, Artificial Sequence
  Synthetic
gcggcccagcgggctgcattg

SEQ ID NO: 13371 - DNA, 21 bp, Artificial Sequence
  Synthetic
cagcggcccagcgggctgcat

SEQ ID NO: 13372 - DNA, 21 bp, Artificial Sequence
  Synthetic
ccagcggcccagcgggctgca

SEQ ID NO: 13373 - DNA, 21 bp, Artificial Sequence
  Synthetic
agtgacactgccagcggccca

SEQ ID NO: 13374 - DNA, 21 bp, Artificial Sequence
  Synthetic
tcacgagaagccactttgaag

SEQ ID NO: 13375 - DNA, 21 bp, Artificial Sequence
  Synthetic
tcgccttcaaagtggcttctc

SEQ ID NO: 13376 - DNA, 21 bp, Artificial Sequence
  Synthetic
tttagctcacgagaagccact

SEQ ID NO: 13377 - DNA, 21 bp, Artificial Sequence
  Synthetic
tggcttctcgtgagctaaagg

SEQ ID NO: 13378 - DNA, 21 bp, Artificial Sequence
  Synthetic
ggcttctcgtgagctaaaggt

SEQ ID NO: 13379 - DNA, 21 bp, Artificial Sequence
  Synthetic
aacctcctacctttagctcac

SEQ ID NO: 13380 - DNA, 21 bp, Artificial Sequence
  Synthetic
caaacctcctacctttagctc

SEQ ID NO: 13381 - DNA, 21 bp, Artificial Sequence
  Synthetic
cgcaccacagcgaaaccattc

SEQ ID NO: 13382 - DNA, 21 bp, Artificial Sequence
  Synthetic
ccgcaccacagcgaaaccatt

SEQ ID NO: 13383 - DNA, 21 bp, Artificial Sequence
  Synthetic
gtttcgctgtggtgcggcccc

SEQ ID NO: 13384 - DNA, 21 bp, Artificial Sequence
  Synthetic
tgtcctgggggccgcaccaca

SEQ ID NO: 13385 - DNA, 21 bp, Artificial Sequence
  Synthetic
gaatgatctgcatggtgtcct

SEQ ID NO: 13386 - DNA, 21 bp, Artificial Sequence
  Synthetic
tgaatgatctgcatggtgtcc

SEQ ID NO: 13387 - DNA, 21 bp, Artificial Sequence
  Synthetic
ttgaatgatctgcatggtgtc

SEQ ID NO: 13388 - DNA, 21 bp, Artificial Sequence
  Synthetic
tcccttagccttacatggctg

SEQ ID NO: 13389 - DNA, 21 bp, Artificial Sequence
  Synthetic
agttgaagaagcagaagcccc

SEQ ID NO: 13390 - DNA, 21 bp, Artificial Sequence
  Synthetic
gagttgaagaagcagaagccc

SEQ ID NO: 13391 - DNA, 21 bp, Artificial Sequence
  Synthetic
atggccactgagttgaagaag

SEQ ID NO: 13392 - DNA, 21 bp, Artificial Sequence
  Synthetic
caggcgatggccactgagttg

SEQ ID NO: 13393 - DNA, 21 bp, Artificial Sequence
  Synthetic
cggcaggcgatggccactgag

SEQ ID NO: 13394 - DNA, 21 bp, Artificial Sequence
  Synthetic
gctgccggcaggcgatggcca

SEQ ID NO: 13395 - DNA, 21 bp, Artificial Sequence
  Synthetic
gcctgccggcagctgcaacag

SEQ ID NO: 13396 - DNA, 21 bp, Artificial Sequence
  Synthetic
cagcaagatcctcattgtaga

SEQ ID NO: 13397 - DNA, 21 bp, Artificial Sequence
  Synthetic
ggcacctacccagtctacaat

SEQ ID NO: 13398 - DNA, 21 bp, Artificial Sequence
  Synthetic
caggcacctacccagtctaca

SEQ ID NO: 13399 - DNA, 21 bp, Artificial Sequence
  Synthetic
ggggtcttggtagaaggtttg

SEQ ID NO: 13400 - DNA, 21 bp, Artificial Sequence
  Synthetic
tagagcacactggggtcttgg

SEQ ID NO: 13401 - DNA, 21 bp, Artificial Sequence
  Synthetic
gcagggagatgtagagcacac

SEQ ID NO: 13402 - DNA, 21 bp, Artificial Sequence
  Synthetic
tgcagggagatgtagagcaca

SEQ ID NO: 13403 - DNA, 21 bp, Artificial Sequence
  Synthetic
tcatggcgatgcagggagatg

SEQ ID NO: 13404 - DNA, 21 bp, Artificial Sequence
  Synthetic
tgccgtcgtcatggcgatgca

SEQ ID NO: 13405 - DNA, 21 bp, Artificial Sequence
  Synthetic
ttgccgtcgtcatggcgatgc

SEQ ID NO: 13406 - DNA, 21 bp, Artificial Sequence
  Synthetic
gttgccgtcgtcatggcgatg

SEQ ID NO: 13407 - DNA, 21 bp, Artificial Sequence
  Synthetic
catgacgacggcaacttcttc

SEQ ID NO: 13408 - DNA, 21 bp, Artificial Sequence
  Synthetic
atgacgacggcaacttcttcc

SEQ ID NO: 13409 - DNA, 21 bp, Artificial Sequence
  Synthetic
tgacgacggcaacttcttccc

SEQ ID NO: 13410 - DNA, 21 bp, Artificial Sequence
  Synthetic
gacgacggcaacttcttcccg

SEQ ID NO: 13411 - DNA, 21 bp, Artificial Sequence
  Synthetic
acggcaacttcttcccgggga

SEQ ID NO: 13412 - DNA, 21 bp, Artificial Sequence
  Synthetic
cggcaacttcttcccggggag

SEQ ID NO: 13413 - DNA, 21 bp, Artificial Sequence
  Synthetic
tccacagccccactccccggg

SEQ ID NO: 13414 - DNA, 21 bp, Artificial Sequence
  Synthetic
ttcttcccggggagtggggct

SEQ ID NO: 13415 - DNA, 21 bp, Artificial Sequence
  Synthetic
tcatccacagccccactcccc

SEQ ID NO: 13416 - DNA, 21 bp, Artificial Sequence
  Synthetic
ctcatccacagccccactccc

SEQ ID NO: 13417 - DNA, 21 bp, Artificial Sequence
  Synthetic
tcccggggagtggggctgtgg

SEQ ID NO: 13418 - DNA, 21 bp, Artificial Sequence
  Synthetic
cctcatccacagccccactcc

SEQ ID NO: 13419 - DNA, 21 bp, Artificial Sequence
  Synthetic
tcaccgctgccagcccctacc

SEQ ID NO: 13420 - DNA, 21 bp, Artificial Sequence
  Synthetic
ctcaccgctgccagcccctac

SEQ ID NO: 13421 - DNA, 21 bp, Artificial Sequence
  Synthetic
tccaggtaggggctggcagcg

SEQ ID NO: 13422 - DNA, 21 bp, Artificial Sequence
  Synthetic
caggtaggggctggcagcggt

SEQ ID NO: 13423 - DNA, 21 bp, Artificial Sequence
  Synthetic
gggcttcaatgtcaatgtggc

SEQ ID NO: 13424 - DNA, 21 bp, Artificial Sequence
  Synthetic
ccagcccaggccacattgaca

SEQ ID NO: 13425 - DNA, 21 bp, Artificial Sequence
  Synthetic
tcaatgtcaatgtggcctggg

SEQ ID NO: 13426 - DNA, 21 bp, Artificial Sequence
  Synthetic
caatgtcaatgtggcctgggc

SEQ ID NO: 13427 - DNA, 21 bp, Artificial Sequence
  Synthetic
aatgtggcctgggctggaggt

SEQ ID NO: 13428 - DNA, 21 bp, Artificial Sequence
  Synthetic
gctggaggtctggaccccccc

SEQ ID NO: 13429 - DNA, 21 bp, Artificial Sequence
  Synthetic
ctggaggtctggaccccccca

SEQ ID NO: 13430 - DNA, 21 bp, Artificial Sequence
  Synthetic
tggaggtctggacccccccat

SEQ ID NO: 13431 - DNA, 21 bp, Artificial Sequence
  Synthetic
ggaggtctggacccccccatg

SEQ ID NO: 13432 - DNA, 21 bp, Artificial Sequence
  Synthetic
tggacccccccatgggggatc

SEQ ID NO: 13433 - DNA, 21 bp, Artificial Sequence
  Synthetic
ggtactcaggatcccccatgg

SEQ ID NO: 13434 - DNA, 21 bp, Artificial Sequence
  Synthetic
aggtactcaggatcccccatg

SEQ ID NO: 13435 - DNA, 21 bp, Artificial Sequence
  Synthetic
caggtactcaggatcccccat

SEQ ID NO: 13436 - DNA, 21 bp, Artificial Sequence
  Synthetic
ccaggtactcaggatccccca

SEQ ID NO: 13437 - DNA, 21 bp, Artificial Sequence
  Synthetic
gccaggtactcaggatccccc

SEQ ID NO: 13438 - DNA, 21 bp, Artificial Sequence
  Synthetic
acctgaaagcagccaggtact

SEQ ID NO: 13439 - DNA, 21 bp, Artificial Sequence
  Synthetic
gatgggcatcacgactatcct

SEQ ID NO: 13440 - DNA, 21 bp, Artificial Sequence
  Synthetic
gatagtcgtgatgcccatcgc

SEQ ID NO: 13441 - DNA, 21 bp, Artificial Sequence
  Synthetic
tagtcgtgatgcccatcgccc

SEQ ID NO: 13442 - DNA, 21 bp, Artificial Sequence
  Synthetic
tctggagagaactctcgggcg

SEQ ID NO: 13443 - DNA, 21 bp, Artificial Sequence
  Synthetic
gactaggtctggagagaactc

SEQ ID NO: 13444 - DNA, 21 bp, Artificial Sequence
  Synthetic
gacaccaggactaggtctgga

SEQ ID NO: 13445 - DNA, 21 bp, Artificial Sequence
  Synthetic
cagacaccaggactaggtctg

SEQ ID NO: 13446 - DNA, 21 bp, Artificial Sequence
  Synthetic
agcagacaccaggactaggtc

SEQ ID NO: 13447 - DNA, 21 bp, Artificial Sequence
  Synthetic
cagcagacaccaggactaggt

SEQ ID NO: 13448 - DNA, 21 bp, Artificial Sequence
  Synthetic
cagacctagtcctggtgtctg

SEQ ID NO: 13449 - DNA, 21 bp, Artificial Sequence
  Synthetic
agcatcaaatccagcagacac

SEQ ID NO: 13450 - DNA, 21 bp, Artificial Sequence
  Synthetic
tgtctgctggatttgatgctg

SEQ ID NO: 13451 - DNA, 21 bp, Artificial Sequence
  Synthetic
tctgctggatttgatgctgct

SEQ ID NO: 13452 - DNA, 21 bp, Artificial Sequence
  Synthetic
gctgagggtcacccggcccca

SEQ ID NO: 13453 - DNA, 21 bp, Artificial Sequence
  Synthetic
catggtagccacccagtgggg

SEQ ID NO: 13454 - DNA, 21 bp, Artificial Sequence
  Synthetic
agaaacatggtagccacccag

SEQ ID NO: 13455 - DNA, 21 bp, Artificial Sequence
  Synthetic
cagaaacatggtagccaccca

SEQ ID NO: 13456 - DNA, 21 bp, Artificial Sequence
  Synthetic
taccatgtttctgccaaatgt

SEQ ID NO: 13457 - DNA, 21 bp, Artificial Sequence
  Synthetic
ctgaggctcccttacatttgg

SEQ ID NO: 13458 - DNA, 21 bp, Artificial Sequence
  Synthetic
ctgcgtcatgtatccaaaacc

SEQ ID NO: 13459 - DNA, 21 bp, Artificial Sequence
  Synthetic
ggatacatgacgcagcaactg

SEQ ID NO: 13460 - DNA, 21 bp, Artificial Sequence
  Synthetic
cgcagcaactgatgaacctgg

SEQ ID NO: 13461 - DNA, 21 bp, Artificial Sequence
  Synthetic
gcagcaactgatgaacctggc

SEQ ID NO: 13462 - DNA, 21 bp, Artificial Sequence
  Synthetic
ggaggcgcagtggtgctggcc

SEQ ID NO: 13463 - DNA, 21 bp, Artificial Sequence
  Synthetic
gaggcgcagtggtgctggcct

SEQ ID NO: 13464 - DNA, 21 bp, Artificial Sequence
  Synthetic
ggcgcagtggtgctggccttg

SEQ ID NO: 13465 - DNA, 21 bp, Artificial Sequence
  Synthetic
tcagaggcgtcacagatggct

SEQ ID NO: 13466 - DNA, 21 bp, Artificial Sequence
  Synthetic
tcacagccatctgtgacgcct

SEQ ID NO: 13467 - DNA, 21 bp, Artificial Sequence
  Synthetic
gaagagcagccacacaggcct

SEQ ID NO: 13468 - DNA, 21 bp, Artificial Sequence
  Synthetic
gaggcctgtgtggctgctctt

SEQ ID NO: 13469 - DNA, 21 bp, Artificial Sequence
  Synthetic
tccccactgctagccaccacc

SEQ ID NO: 13470 - DNA, 21 bp, Artificial Sequence
  Synthetic
gcaagatgcgctggggtacct

SEQ ID NO: 13471 - DNA, 21 bp, Artificial Sequence
  Synthetic
tgaggtaccccagcgcatctt

SEQ ID NO: 13472 - DNA, 21 bp, Artificial Sequence
  Synthetic
cacatgatccgcaagatgcgc

SEQ ID NO: 13473 - DNA, 21 bp, Artificial Sequence
  Synthetic
gcacatgatccgcaagatgcg

SEQ ID NO: 13474 - DNA, 21 bp, Artificial Sequence
  Synthetic
atcttgcggatcatgtgccgt

SEQ ID NO: 13475 - DNA, 21 bp, Artificial Sequence
  Synthetic
tcttgcggatcatgtgccgtc

SEQ ID NO: 13476 - DNA, 21 bp, Artificial Sequence
  Synthetic
ttgcggatcatgtgccgtctg

SEQ ID NO: 13477 - DNA, 21 bp, Artificial Sequence
  Synthetic
tgcggatcatgtgccgtctgg

SEQ ID NO: 13478 - DNA, 21 bp, Artificial Sequence
  Synthetic
atcatgtgccgtctggaggag

SEQ ID NO: 13479 - DNA, 21 bp, Artificial Sequence
  Synthetic
gtctggaggagctgggccttg

SEQ ID NO: 13480 - DNA, 21 bp, Artificial Sequence
  Synthetic
gtggcagggcgcggtgtcagg

SEQ ID NO: 13481 - DNA, 21 bp, Artificial Sequence
  Synthetic
ctctgtggcagggcgcggtgt

SEQ ID NO: 13482 - DNA, 21 bp, Artificial Sequence
  Synthetic
ccctgacaccgcgccctgcca

SEQ ID NO: 13483 - DNA, 21 bp, Artificial Sequence
  Synthetic
caccgcgccctgccacagagg

SEQ ID NO: 13484 - DNA, 21 bp, Artificial Sequence
  Synthetic
tgagcagctcagcctctgtgg

SEQ ID NO: 13485 - DNA, 21 bp, Artificial Sequence
  Synthetic
ccggggtctgacctgtgacag

SEQ ID NO: 13486 - DNA, 21 bp, Artificial Sequence
  Synthetic
tgtgcttccagtgctgagtac

SEQ ID NO: 13487 - DNA, 21 bp, Artificial Sequence
  Synthetic
gatgacccacgtactcagcac

SEQ ID NO: 13488 - DNA, 21 bp, Artificial Sequence
  Synthetic
agatgacccacgtactcagca

SEQ ID NO: 13489 - DNA, 21 bp, Artificial Sequence
  Synthetic
tgctgagtacgtgggtcatct

SEQ ID NO: 13490 - DNA, 21 bp, Artificial Sequence
  Synthetic
acgtgggtcatctccgggcca

SEQ ID NO: 13491 - DNA, 21 bp, Artificial Sequence
  Synthetic
gtgggtcatctccgggccaca

SEQ ID NO: 13492 - DNA, 21 bp, Artificial Sequence
  Synthetic
catctccgggccacagagaaa

SEQ ID NO: 13493 - DNA, 21 bp, Artificial Sequence
  Synthetic
ggccacagagaaaatgaaaac

SEQ ID NO: 13494 - DNA, 21 bp, Artificial Sequence
  Synthetic
gccacagagaaaatgaaaacc

SEQ ID NO: 13495 - DNA, 21 bp, Artificial Sequence
  Synthetic
ccacagagaaaatgaaaaccc

SEQ ID NO: 13496 - DNA, 21 bp, Artificial Sequence
  Synthetic
tgaaaacccgggagctgcacc

SEQ ID NO: 13497 - DNA, 21 bp, Artificial Sequence
  Synthetic
aaaacccgggagctgcaccgt

SEQ ID NO: 13498 - DNA, 21 bp, Artificial Sequence
  Synthetic
ggaactctcacggtgcagctc

SEQ ID NO: 13499 - DNA, 21 bp, Artificial Sequence
  Synthetic
agatatagatggagtcaaagt

SEQ ID NO: 13500 - DNA, 21 bp, Artificial Sequence
  Synthetic
cagatatagatggagtcaaag

SEQ ID NO: 13501 - DNA, 21 bp, Artificial Sequence
  Synthetic
aggtactggggcagatataga

SEQ ID NO: 13502 - DNA, 21 bp, Artificial Sequence
  Synthetic
aaggtactggggcagatatag

SEQ ID NO: 13503 - DNA, 21 bp, Artificial Sequence
  Synthetic
gctgtgcacaggcgaaggtac

SEQ ID NO: 13504 - DNA, 21 bp, Artificial Sequence
  Synthetic
agctgtgcacaggcgaaggta

SEQ ID NO: 13505 - DNA, 21 bp, Artificial Sequence
  Synthetic
ccagtggcaagctgtgcacag

SEQ ID NO: 13506 - DNA, 21 bp, Artificial Sequence
  Synthetic
actggcgctgcctgccgcctg

SEQ ID NO: 13507 - DNA, 21 bp, Artificial Sequence
  Synthetic
ctggcgctgcctgccgcctgg

SEQ ID NO: 13508 - DNA, 21 bp, Artificial Sequence
  Synthetic
gcctggtggaggctgtgctct

SEQ ID NO: 13509 - DNA, 21 bp, Artificial Sequence
  Synthetic
cctggtggaggctgtgctctc

SEQ ID NO: 13510 - DNA, 21 bp, Artificial Sequence
  Synthetic
tggtggaggctgtgctctcag

SEQ ID NO: 13511 - DNA, 21 bp, Artificial Sequence
  Synthetic
cacagaggacacacctctcct

SEQ ID NO: 13512 - DNA, 21 bp, Artificial Sequence
  Synthetic
cccacagaggacacacctctc

SEQ ID NO: 13513 - DNA, 21 bp, Artificial Sequence
  Synthetic
cagcagcaccattcagaacct

SEQ ID NO: 13514 - DNA, 21 bp, Artificial Sequence
  Synthetic
acagcagcaccattcagaacc

SEQ ID NO: 13515 - DNA, 21 bp, Artificial Sequence
  Synthetic
cacagcagcaccattcagaac

SEQ ID NO: 13516 - DNA, 21 bp, Artificial Sequence
  Synthetic
acgcaccacagcagcaccatt

SEQ ID NO: 13517 - DNA, 21 bp, Artificial Sequence
  Synthetic
gtgctgctgtggtgcgtcccc

SEQ ID NO: 13518 - DNA, 21 bp, Artificial Sequence
  Synthetic
tgcgtcccccaggacaccacg

SEQ ID NO: 13519 - DNA, 21 bp, Artificial Sequence
  Synthetic
cctgctctgcgtggtgtcctg

SEQ ID NO: 13520 - DNA, 21 bp, Artificial Sequence
  Synthetic
tcctgctctgcgtggtgtcct

SEQ ID NO: 13521 - DNA, 21 bp, Artificial Sequence
  Synthetic
cccccaggacaccacgcagag

SEQ ID NO: 13522 - DNA, 21 bp, Artificial Sequence
  Synthetic
atcctgctctgcgtggtgtcc

SEQ ID NO: 13523 - DNA, 21 bp, Artificial Sequence
  Synthetic
catcctgctctgcgtggtgtc

SEQ ID NO: 13524 - DNA, 21 bp, Artificial Sequence
  Synthetic
cgagcagccacagccacagag

SEQ ID NO: 13525 - DNA, 21 bp, Artificial Sequence
  Synthetic
catggcgagcagccacagcca

SEQ ID NO: 13526 - DNA, 21 bp, Artificial Sequence
  Synthetic
cccactgatagtctgggcatg

SEQ ID NO: 13527 - DNA, 21 bp, Artificial Sequence
  Synthetic
ctcgccatgcccagactatca

SEQ ID NO: 13528 - DNA, 21 bp, Artificial Sequence
  Synthetic
tagggcatgcccactgatagt

SEQ ID NO: 13529 - DNA, 21 bp, Artificial Sequence
  Synthetic
tcagtgggcatgccctacggt

SEQ ID NO: 13530 - DNA, 21 bp, Artificial Sequence
  Synthetic
ctcctccccaggatcctgatt

SEQ ID NO: 13531 - DNA, 21 bp, Artificial Sequence
  Synthetic
ccaatccacaatcaggatcct

SEQ ID NO: 13532 - DNA, 21 bp, Artificial Sequence
  Synthetic
cccaatccacaatcaggatcc

SEQ ID NO: 13533 - DNA, 21 bp, Artificial Sequence
  Synthetic
ccccaggatcctgattgtgga

SEQ ID NO: 13534 - DNA, 21 bp, Artificial Sequence
  Synthetic
tcccaatccacaatcaggatc

SEQ ID NO: 13535 - DNA, 21 bp, Artificial Sequence
  Synthetic
cccaggatcctgattgtggat

SEQ ID NO: 13536 - DNA, 21 bp, Artificial Sequence
  Synthetic
gtggacatcccaatccacaat

SEQ ID NO: 13537 - DNA, 21 bp, Artificial Sequence
  Synthetic
attgggatgtccaccacggta

SEQ ID NO: 13538 - DNA, 21 bp, Artificial Sequence
  Synthetic
ttgggatgtccaccacggtaa

SEQ ID NO: 13539 - DNA, 21 bp, Artificial Sequence
  Synthetic
gtgctgagttccattaccgtg

SEQ ID NO: 13540 - DNA, 21 bp, Artificial Sequence
  Synthetic
gtaatggaactcagcacatgt

SEQ ID NO: 13541 - DNA, 21 bp, Artificial Sequence
  Synthetic
aatggaactcagcacatgttt

SEQ ID NO: 13542 - DNA, 21 bp, Artificial Sequence
  Synthetic
ggggtcatcctcaaacatgtg

SEQ ID NO: 13543 - DNA, 21 bp, Artificial Sequence
  Synthetic
tgtttgaggatgaccccaggt

SEQ ID NO: 13544 - DNA, 21 bp, Artificial Sequence
  Synthetic
gtgccatgatcatagcggtgc

SEQ ID NO: 13545 - DNA, 21 bp, Artificial Sequence
  Synthetic
ggtgccatgatcatagcggtg

SEQ ID NO: 13546 - DNA, 21 bp, Artificial Sequence
  Synthetic
gatcatggcaccttcttcccc

SEQ ID NO: 13547 - DNA, 21 bp, Artificial Sequence
  Synthetic
atcatggcaccttcttcccca

SEQ ID NO: 13548 - DNA, 21 bp, Artificial Sequence
  Synthetic
tcatggcaccttcttccccat

SEQ ID NO: 13549 - DNA, 21 bp, Artificial Sequence
  Synthetic
catggcaccttcttccccatg

SEQ ID NO: 13550 - DNA, 21 bp, Artificial Sequence
  Synthetic
gcaccttcttccccatggggg

SEQ ID NO: 13551 - DNA, 21 bp, Artificial Sequence
  Synthetic
accttcttccccatgggggat

SEQ ID NO: 13552 - DNA, 21 bp, Artificial Sequence
  Synthetic
gcaccctcatcccccatgggg

SEQ ID NO: 13553 - DNA, 21 bp, Artificial Sequence
  Synthetic
ctggcaccctcatcccccatg

SEQ ID NO: 13554 - DNA, 21 bp, Artificial Sequence
  Synthetic
gctggcaccctcatcccccat

SEQ ID NO: 13555 - DNA, 21 bp, Artificial Sequence
  Synthetic
tgctggcaccctcatccccca

SEQ ID NO: 13556 - DNA, 21 bp, Artificial Sequence
  Synthetic
ctgctggcaccctcatccccc

SEQ ID NO: 13557 - DNA, 21 bp, Artificial Sequence
  Synthetic
gggtgccagcagccagatcgg

SEQ ID NO: 13558 - DNA, 21 bp, Artificial Sequence
  Synthetic
agcagccagatcggccgggct

SEQ ID NO: 13559 - DNA, 21 bp, Artificial Sequence
  Synthetic
aggcttcaccgtcaacgtggc

SEQ ID NO: 13560 - DNA, 21 bp, Artificial Sequence
  Synthetic
ggcttcaccgtcaacgtggca

SEQ ID NO: 13561 - DNA, 21 bp, Artificial Sequence
  Synthetic
ccgttccatgccacgttgacg

SEQ ID NO: 13562 - DNA, 21 bp, Artificial Sequence
  Synthetic
tcaccgtcaacgtggcatgga

SEQ ID NO: 13563 - DNA, 21 bp, Artificial Sequence
  Synthetic
gtggcatggaacgggccccgc

SEQ ID NO: 13564 - DNA, 21 bp, Artificial Sequence
  Synthetic
aggtagtcagcatcacccatg

SEQ ID NO: 13565 - DNA, 21 bp, Artificial Sequence
  Synthetic
taggtagtcagcatcacccat

SEQ ID NO: 13566 - DNA, 21 bp, Artificial Sequence
  Synthetic
gcctggtgcttcccattgcct

SEQ ID NO: 13567 - DNA, 21 bp, Artificial Sequence
  Synthetic
gagctgtacctcgtaggcaat

SEQ ID NO: 13568 - DNA, 21 bp, Artificial Sequence
  Synthetic
tgagctgtacctcgtaggcaa

SEQ ID NO: 13569 - DNA, 21 bp, Artificial Sequence
  Synthetic
ctgagctgtacctcgtaggca

SEQ ID NO: 13570 - DNA, 21 bp, Artificial Sequence
  Synthetic
tctccctgcctcagtttaacc

SEQ ID NO: 13571 - DNA, 21 bp, Artificial Sequence
  Synthetic
cagcaccagttctgggttaaa

SEQ ID NO: 13572 - DNA, 21 bp, Artificial Sequence
  Synthetic
cagctgagaccagcaccagtt

SEQ ID NO: 13573 - DNA, 21 bp, Artificial Sequence
  Synthetic
cccgtgcagcatcaaagccag

SEQ ID NO: 13574 - DNA, 21 bp, Artificial Sequence
  Synthetic
ctcagctggctttgatgctgc

SEQ ID NO: 13575 - DNA, 21 bp, Artificial Sequence
  Synthetic
tcagctggctttgatgctgca

SEQ ID NO: 13576 - DNA, 21 bp, Artificial Sequence
  Synthetic
cagctggctttgatgctgcac

SEQ ID NO: 13577 - DNA, 21 bp, Artificial Sequence
  Synthetic
agctggctttgatgctgcacg

SEQ ID NO: 13578 - DNA, 21 bp, Artificial Sequence
  Synthetic
gctggctttgatgctgcacgg

SEQ ID NO: 13579 - DNA, 21 bp, Artificial Sequence
  Synthetic
gatgctgcacggggggatccg

SEQ ID NO: 13580 - DNA, 21 bp, Artificial Sequence
  Synthetic
atgctgcacggggggatccgc

SEQ ID NO: 13581 - DNA, 21 bp, Artificial Sequence
  Synthetic
tgctgcacggggggatccgct

SEQ ID NO: 13582 - DNA, 21 bp, Artificial Sequence
  Synthetic
gctgcacggggggatccgctg

SEQ ID NO: 13583 - DNA, 21 bp, Artificial Sequence
  Synthetic
gtgacacctggcagcccccca

SEQ ID NO: 13584 - DNA, 21 bp, Artificial Sequence
  Synthetic
tggggggctgccaggtgtcac

SEQ ID NO: 13585 - DNA, 21 bp, Artificial Sequence
  Synthetic
gggggctgccaggtgtcacct

SEQ ID NO: 13586 - DNA, 21 bp, Artificial Sequence
  Synthetic
gcccacctcacccacctgctg

SEQ ID NO: 13587 - DNA, 21 bp, Artificial Sequence
  Synthetic
gcccatcagcaggtgggtgag

SEQ ID NO: 13588 - DNA, 21 bp, Artificial Sequence
  Synthetic
gcaaggcccatcagcaggtgg

SEQ ID NO: 13589 - DNA, 21 bp, Artificial Sequence
  Synthetic
actggcaaggcccatcagcag

SEQ ID NO: 13590 - DNA, 21 bp, Artificial Sequence
  Synthetic
gtggccgcattatccttatcc

SEQ ID NO: 13591 - DNA, 21 bp, Artificial Sequence
  Synthetic
agagaaagttacctctaggat

SEQ ID NO: 13592 - DNA, 21 bp, Artificial Sequence
  Synthetic
ggaccaagagaaagttacctc

SEQ ID NO: 13593 - DNA, 21 bp, Artificial Sequence
  Synthetic
gctataacctgacatccatct

SEQ ID NO: 13594 - DNA, 21 bp, Artificial Sequence
  Synthetic
caggcagccatggactctgag

SEQ ID NO: 13595 - DNA, 21 bp, Artificial Sequence
  Synthetic
gagtgcaggcagccatggact

SEQ ID NO: 13596 - DNA, 21 bp, Artificial Sequence
  Synthetic
agggagcgagtgcaggcagcc

SEQ ID NO: 13597 - DNA, 21 bp, Artificial Sequence
  Synthetic
ctgcctgcactcgctccctcc

SEQ ID NO: 13598 - DNA, 21 bp, Artificial Sequence
  Synthetic
tgcctgcactcgctccctcct

SEQ ID NO: 13599 - DNA, 21 bp, Artificial Sequence
  Synthetic
tggtgggtctccaaggaggga

SEQ ID NO: 13600 - DNA, 21 bp, Artificial Sequence
  Synthetic
ccattgcctctgggatgacag

SEQ ID NO: 13601 - DNA, 21 bp, Artificial Sequence
  Synthetic
acccagcctcacctgtcatcc

SEQ ID NO: 13602 - DNA, 21 bp, Artificial Sequence
  Synthetic
tgactccatctccccagcttc

SEQ ID NO: 13603 - DNA, 21 bp, Artificial Sequence
  Synthetic
gactccatctccccagcttcc

SEQ ID NO: 13604 - DNA, 21 bp, Artificial Sequence
  Synthetic
ctcagggccttccgggaagct

SEQ ID NO: 13605 - DNA, 21 bp, Artificial Sequence
  Synthetic
tccccagcttcccggaaggcc

SEQ ID NO: 13606 - DNA, 21 bp, Artificial Sequence
  Synthetic
gctcagggccttccgggaagc

SEQ ID NO: 13607 - DNA, 21 bp, Artificial Sequence
  Synthetic
cgctcagggccttccgggaag

SEQ ID NO: 13608 - DNA, 21 bp, Artificial Sequence
  Synthetic
tggagccgctcagggccttcc

SEQ ID NO: 13609 - DNA, 21 bp, Artificial Sequence
  Synthetic
atggagccgctcagggccttc

SEQ ID NO: 13610 - DNA, 21 bp, Artificial Sequence
  Synthetic
catggagccgctcagggcctt

SEQ ID NO: 13611 - DNA, 21 bp, Artificial Sequence
  Synthetic
ccttgatggcatggagccgct

SEQ ID NO: 13612 - DNA, 21 bp, Artificial Sequence
  Synthetic
cctgagcggctccatgccatc

SEQ ID NO: 13613 - DNA, 21 bp, Artificial Sequence
  Synthetic
ctgagcggctccatgccatca

SEQ ID NO: 13614 - DNA, 21 bp, Artificial Sequence
  Synthetic
atcagttgctccttgatggca

SEQ ID NO: 13615 - DNA, 21 bp, Artificial Sequence
  Synthetic
gatcagttgctccttgatggc

SEQ ID NO: 13616 - DNA, 21 bp, Artificial Sequence
  Synthetic
gccatcaaggagcaactgatc

SEQ ID NO: 13617 - DNA, 21 bp, Artificial Sequence
  Synthetic
ccatcaaggagcaactgatcc

SEQ ID NO: 13618 - DNA, 21 bp, Artificial Sequence
  Synthetic
atcaaggagcaactgatccag

SEQ ID NO: 13619 - DNA, 21 bp, Artificial Sequence
  Synthetic
gcagcgatctaggaggccctc

SEQ ID NO: 13620 - DNA, 21 bp, Artificial Sequence
  Synthetic
tgaaaggacacgcagcgatct

SEQ ID NO: 13621 - DNA, 21 bp, Artificial Sequence
  Synthetic
ctgaaaggacacgcagcgatc

SEQ ID NO: 13622 - DNA, 21 bp, Artificial Sequence
  Synthetic
tggcttgggggccttacctga

SEQ ID NO: 13623 - DNA, 21 bp, Artificial Sequence
  Synthetic
tctctccccaggcccggtttg

SEQ ID NO: 13624 - DNA, 21 bp, Artificial Sequence
  Synthetic
ccccaggcccggtttgctgaa

SEQ ID NO: 13625 - DNA, 21 bp, Artificial Sequence
  Synthetic
cccaggcccggtttgctgaaa

SEQ ID NO: 13626 - DNA, 21 bp, Artificial Sequence
  Synthetic
aggcccggtttgctgaaaagg

SEQ ID NO: 13627 - DNA, 21 bp, Artificial Sequence
  Synthetic
agagctgatgttggttcacag

SEQ ID NO: 13628 - DNA, 21 bp, Artificial Sequence
  Synthetic
agcctagaatatattgatctg

SEQ ID NO: 13629 - DNA, 21 bp, Artificial Sequence
  Synthetic
gcctagaatatattgatctga

SEQ ID NO: 13630 - DNA, 21 bp, Artificial Sequence
  Synthetic
ctgatggaaacaacccagtac

SEQ ID NO: 13631 - DNA, 21 bp, Artificial Sequence
  Synthetic
tggaaacaacccagtacatga

SEQ ID NO: 13632 - DNA, 21 bp, Artificial Sequence
  Synthetic
gaaacaacccagtacatgaat

SEQ ID NO: 13633 - DNA, 21 bp, Artificial Sequence
  Synthetic
aaacaacccagtacatgaatg

SEQ ID NO: 13634 - DNA, 21 bp, Artificial Sequence
  Synthetic
aacaacccagtacatgaatga

SEQ ID NO: 13635 - DNA, 21 bp, Artificial Sequence
  Synthetic
caacccagtacatgaatgagg

SEQ ID NO: 13636 - DNA, 21 bp, Artificial Sequence
  Synthetic
gagttctccctcattcatgta

SEQ ID NO: 13637 - DNA, 21 bp, Artificial Sequence
  Synthetic
tcgtaggtgtctgctaggaca

SEQ ID NO: 13638 - DNA, 21 bp, Artificial Sequence
  Synthetic
gtcgtaggtgtctgctaggac

SEQ ID NO: 13639 - DNA, 21 bp, Artificial Sequence
  Synthetic
aactgagtcgtaggtgtctgc

SEQ ID NO: 13640 - DNA, 21 bp, Artificial Sequence
  Synthetic
tccataccggatgcagataaa

SEQ ID NO: 13641 - DNA, 21 bp, Artificial Sequence
  Synthetic
ctcagtttatctgcatccggt

SEQ ID NO: 13642 - DNA, 21 bp, Artificial Sequence
  Synthetic
caggcacaggagtatgagttc

SEQ ID NO: 13643 - DNA, 21 bp, Artificial Sequence
  Synthetic
gcaggcacaggagtatgagtt

SEQ ID NO: 13644 - DNA, 21 bp, Artificial Sequence
  Synthetic
aggccaggcaggcacaggagt

SEQ ID NO: 13645 - DNA, 21 bp, Artificial Sequence
  Synthetic
agcctgaggccaggcaggcac

SEQ ID NO: 13646 - DNA, 21 bp, Artificial Sequence
  Synthetic
gagcctgaggccaggcaggca

SEQ ID NO: 13647 - DNA, 21 bp, Artificial Sequence
  Synthetic
ccaccagcctgaggacagagc

SEQ ID NO: 13648 - DNA, 21 bp, Artificial Sequence
  Synthetic
tcaggctctgtcctcaggctg

SEQ ID NO: 13649 - DNA, 21 bp, Artificial Sequence
  Synthetic
ccgcatccaccagcctgagga

SEQ ID NO: 13650 - DNA, 21 bp, Artificial Sequence
  Synthetic
caggaccgcatccaccagcct

SEQ ID NO: 13651 - DNA, 21 bp, Artificial Sequence
  Synthetic
cccaggaccgcatccaccagc

SEQ ID NO: 13652 - DNA, 21 bp, Artificial Sequence
  Synthetic
ctcaggctggtggatgcggtc

SEQ ID NO: 13653 - DNA, 21 bp, Artificial Sequence
  Synthetic
tcaggctggtggatgcggtcc

SEQ ID NO: 13654 - DNA, 21 bp, Artificial Sequence
  Synthetic
caggctggtggatgcggtcct

SEQ ID NO: 13655 - DNA, 21 bp, Artificial Sequence
  Synthetic
tggtggatgcggtcctggggg

SEQ ID NO: 13656 - DNA, 21 bp, Artificial Sequence
  Synthetic
tgcggtcctgggggctgagat

SEQ ID NO: 13657 - DNA, 21 bp, Artificial Sequence
  Synthetic
gcggtcctgggggctgagatc

SEQ ID NO: 13658 - DNA, 21 bp, Artificial Sequence
  Synthetic
gccattccggatctcagcccc

SEQ ID NO: 13659 - DNA, 21 bp, Artificial Sequence
  Synthetic
cctaatgatggccatgccatt

SEQ ID NO: 13660 - DNA, 21 bp, Artificial Sequence
  Synthetic
aatggcatggccatcattagg

SEQ ID NO: 13661 - DNA, 21 bp, Artificial Sequence
  Synthetic
tccttgtcttgcccaggcctc

SEQ ID NO: 13662 - DNA, 21 bp, Artificial Sequence
  Synthetic
tgggcgtgatgtccaggaggc

SEQ ID NO: 13663 - DNA, 21 bp, Artificial Sequence
  Synthetic
actgtgctgggcgtgatgtcc

SEQ ID NO: 13664 - DNA, 21 bp, Artificial Sequence
  Synthetic
gactgtgctgggcgtgatgtc

SEQ ID NO: 13665 - DNA, 21 bp, Artificial Sequence
  Synthetic
catcacgcccagcacagtctt

SEQ ID NO: 13666 - DNA, 21 bp, Artificial Sequence
  Synthetic
atagccatccataagactgtg

SEQ ID NO: 13667 - DNA, 21 bp, Artificial Sequence
  Synthetic
cgggctgccacagccacgtgg

SEQ ID NO: 13668 - DNA, 21 bp, Artificial Sequence
  Synthetic
gtggcagcccgctatgctcaa

SEQ ID NO: 13669 - DNA, 21 bp, Artificial Sequence
  Synthetic
gcggtgtttctgttgagcata

SEQ ID NO: 13670 - DNA, 21 bp, Artificial Sequence
  Synthetic
tgctcaacagaaacaccgcat

SEQ ID NO: 13671 - DNA, 21 bp, Artificial Sequence
  Synthetic
gctcaacagaaacaccgcatc

SEQ ID NO: 13672 - DNA, 21 bp, Artificial Sequence
  Synthetic
cctccggatgcggtgtttctg

SEQ ID NO: 13673 - DNA, 21 bp, Artificial Sequence
  Synthetic
ccaatctacgataaggaccct

SEQ ID NO: 13674 - DNA, 21 bp, Artificial Sequence
  Synthetic
cccaatctacgataaggaccc

SEQ ID NO: 13675 - DNA, 21 bp, Artificial Sequence
  Synthetic
tcctagggtccttatcgtaga

SEQ ID NO: 13676 - DNA, 21 bp, Artificial Sequence
  Synthetic
cctagggtccttatcgtagat

SEQ ID NO: 13677 - DNA, 21 bp, Artificial Sequence
  Synthetic
gtgcacatcccaatctacgat

SEQ ID NO: 13678 - DNA, 21 bp, Artificial Sequence
  Synthetic
attgggatgtgcaccacggtc

SEQ ID NO: 13679 - DNA, 21 bp, Artificial Sequence
  Synthetic
ttgggatgtgcaccacggtca

SEQ ID NO: 13680 - DNA, 21 bp, Artificial Sequence
  Synthetic
ggaacacagttcaccttcgac

SEQ ID NO: 13681 - DNA, 21 bp, Artificial Sequence
  Synthetic
tacctggggtcctggtcgaag

SEQ ID NO: 13682 - DNA, 21 bp, Artificial Sequence
  Synthetic
ggggtatacctggggtcctgg

SEQ ID NO: 13683 - DNA, 21 bp, Artificial Sequence
  Synthetic
gatggagaaatagaggacact

SEQ ID NO: 13684 - DNA, 21 bp, Artificial Sequence
  Synthetic
ggatggagaaatagaggacac

SEQ ID NO: 13685 - DNA, 21 bp, Artificial Sequence
  Synthetic
tggatggagaaatagaggaca

SEQ ID NO: 13686 - DNA, 21 bp, Artificial Sequence
  Synthetic
gtagcggtggatggagaaata

SEQ ID NO: 13687 - DNA, 21 bp, Artificial Sequence
  Synthetic
tcgtagcggtggatggagaaa

SEQ ID NO: 13688 - DNA, 21 bp, Artificial Sequence
  Synthetic
tctatttctccatccaccgct

SEQ ID NO: 13689 - DNA, 21 bp, Artificial Sequence
  Synthetic
ccctgctcgtagcggtggatg

SEQ ID NO: 13690 - DNA, 21 bp, Artificial Sequence
  Synthetic
ttctccatccaccgctacgag

SEQ ID NO: 13691 - DNA, 21 bp, Artificial Sequence
  Synthetic
taccctgctcgtagcggtgga

SEQ ID NO: 13692 - DNA, 21 bp, Artificial Sequence
  Synthetic
ctaccctgctcgtagcggtgg

SEQ ID NO: 13693 - DNA, 21 bp, Artificial Sequence
  Synthetic
gaacctaccctgctcgtagcg

SEQ ID NO: 13694 - DNA, 21 bp, Artificial Sequence
  Synthetic
cagggtaggttctggccccac

SEQ ID NO: 13695 - DNA, 21 bp, Artificial Sequence
  Synthetic
ttagaggccttcaggtggggc

SEQ ID NO: 13696 - DNA, 21 bp, Artificial Sequence
  Synthetic
gaccagttagaggccttcagg

SEQ ID NO: 13697 - DNA, 21 bp, Artificial Sequence
  Synthetic
ggaccagttagaggccttcag

SEQ ID NO: 13698 - DNA, 21 bp, Artificial Sequence
  Synthetic
cgaaacctgtggtggaccagt

SEQ ID NO: 13699 - DNA, 21 bp, Artificial Sequence
  Synthetic
tggccttggccgaaacctgtg

SEQ ID NO: 13700 - DNA, 21 bp, Artificial Sequence
  Synthetic
ccacaggtttcggccaaggcc

SEQ ID NO: 13701 - DNA, 21 bp, Artificial Sequence
  Synthetic
atggtatatccttggccttgg

SEQ ID NO: 13702 - DNA, 21 bp, Artificial Sequence
  Synthetic
aggatataccatcaatgtgcc

SEQ ID NO: 13703 - DNA, 21 bp, Artificial Sequence
  Synthetic
ggatataccatcaatgtgcct

SEQ ID NO: 13704 - DNA, 21 bp, Artificial Sequence
  Synthetic
cctgtgtctgcaggtggggat

SEQ ID NO: 13705 - DNA, 21 bp, Artificial Sequence
  Synthetic
ctgtgtctgcaggtggggatg

SEQ ID NO: 13706 - DNA, 21 bp, Artificial Sequence
  Synthetic
gcgactggcagcaggacgtgc

SEQ ID NO: 13707 - DNA, 21 bp, Artificial Sequence
  Synthetic
ggcgactggcagcaggacgtg

SEQ ID NO: 13708 - DNA, 21 bp, Artificial Sequence
  Synthetic
acgtcctgctgccagtcgccc

SEQ ID NO: 13709 - DNA, 21 bp, Artificial Sequence
  Synthetic
gacctcgagggcgactggcag

SEQ ID NO: 13710 - DNA, 21 bp, Artificial Sequence
  Synthetic
accccagatccccaggacctc

SEQ ID NO: 13711 - DNA, 21 bp, Artificial Sequence
  Synthetic
caggaccagctgaggctggaa

SEQ ID NO: 13712 - DNA, 21 bp, Artificial Sequence
  Synthetic
gccaccaggaccagctgaggc

SEQ ID NO: 13713 - DNA, 21 bp, Artificial Sequence
  Synthetic
agccaccaggaccagctgagg

SEQ ID NO: 13714 - DNA, 21 bp, Artificial Sequence
  Synthetic
tccagcagccaccaggaccag

SEQ ID NO: 13715 - DNA, 21 bp, Artificial Sequence
  Synthetic
ctcagctggtcctggtggctg

SEQ ID NO: 13716 - DNA, 21 bp, Artificial Sequence
  Synthetic
ggcatcaaatccagcagccac

SEQ ID NO: 13717 - DNA, 21 bp, Artificial Sequence
  Synthetic
ctgctggatttgatgccctgc

SEQ ID NO: 13718 - DNA, 21 bp, Artificial Sequence
  Synthetic
tgctggatttgatgccctgca

SEQ ID NO: 13719 - DNA, 21 bp, Artificial Sequence
  Synthetic
gctggatttgatgccctgcaa

SEQ ID NO: 13720 - DNA, 21 bp, Artificial Sequence
  Synthetic
ccttaccttggggtccccttg

SEQ ID NO: 13721 - DNA, 21 bp, Artificial Sequence
  Synthetic
gagtggcggccatctcaccct

SEQ ID NO: 13722 - DNA, 21 bp, Artificial Sequence
  Synthetic
ggagtggcggccatctcaccc

SEQ ID NO: 13723 - DNA, 21 bp, Artificial Sequence
  Synthetic
cggagtggcggccatctcacc

SEQ ID NO: 13724 - DNA, 21 bp, Artificial Sequence
  Synthetic
gtgagatggccgccactccgg

SEQ ID NO: 13725 - DNA, 21 bp, Artificial Sequence
  Synthetic
ggttagctgggcgaaccctgc

SEQ ID NO: 13726 - DNA, 21 bp, Artificial Sequence
  Synthetic
gggttagctgggcgaaccctg

SEQ ID NO: 13727 - DNA, 21 bp, Artificial Sequence
  Synthetic
atgagcaggtgggttagctgg

SEQ ID NO: 13728 - DNA, 21 bp, Artificial Sequence
  Synthetic
gcccagctaacccacctgctc

SEQ ID NO: 13729 - DNA, 21 bp, Artificial Sequence
  Synthetic
acccatgagcaggtgggttag

SEQ ID NO: 13730 - DNA, 21 bp, Artificial Sequence
  Synthetic
tcctgccagacccatgagcag

SEQ ID NO: 13731 - DNA, 21 bp, Artificial Sequence
  Synthetic
cccacctgctcatgggtctgg

SEQ ID NO: 13732 - DNA, 21 bp, Artificial Sequence
  Synthetic
ccacctgctcatgggtctggc

SEQ ID NO: 13733 - DNA, 21 bp, Artificial Sequence
  Synthetic
agcttgcctcctgccagaccc

SEQ ID NO: 13734 - DNA, 21 bp, Artificial Sequence
  Synthetic
ggaggcaagctgatcctgtct

SEQ ID NO: 13735 - DNA, 21 bp, Artificial Sequence
  Synthetic
gaggcaagctgatcctgtctc

SEQ ID NO: 13736 - DNA, 21 bp, Artificial Sequence
  Synthetic
aagctgatcctgtctctggag

SEQ ID NO: 13737 - DNA, 21 bp, Artificial Sequence
  Synthetic
tgagtcactcacctccagaga

SEQ ID NO: 13738 - DNA, 21 bp, Artificial Sequence
  Synthetic
cgaaggtgagtcactcacctc

SEQ ID NO: 13739 - DNA, 21 bp, Artificial Sequence
  Synthetic
gcgcggaggttgtagccaccc

SEQ ID NO: 13740 - DNA, 21 bp, Artificial Sequence
  Synthetic
ggcgcggaggttgtagccacc

SEQ ID NO: 13741 - DNA, 21 bp, Artificial Sequence
  Synthetic
gctacaacctccgcgccctgg

SEQ ID NO: 13742 - DNA, 21 bp, Artificial Sequence
  Synthetic
ctgacgccttcagccagggcg

SEQ ID NO: 13743 - DNA, 21 bp, Artificial Sequence
  Synthetic
actgacgccttcagccagggc

SEQ ID NO: 13744 - DNA, 21 bp, Artificial Sequence
  Synthetic
cgaagcactgacgccttcagc

SEQ ID NO: 13745 - DNA, 21 bp, Artificial Sequence
  Synthetic
agtgcttcgctccacaccctt

SEQ ID NO: 13746 - DNA, 21 bp, Artificial Sequence
  Synthetic
gtgcttcgctccacacccttc

SEQ ID NO: 13747 - DNA, 21 bp, Artificial Sequence
  Synthetic
tgcttcgctccacacccttct

SEQ ID NO: 13748 - DNA, 21 bp, Artificial Sequence
  Synthetic
ggtctcccagaagggtgtgga

SEQ ID NO: 13749 - DNA, 21 bp, Artificial Sequence
  Synthetic
caagggtctcccagaagggtg

SEQ ID NO: 13750 - DNA, 21 bp, Artificial Sequence
  Synthetic
gcaagggtctcccagaagggt

SEQ ID NO: 13751 - DNA, 21 bp, Artificial Sequence
  Synthetic
tcacggacaacagggtccacc

SEQ ID NO: 13752 - DNA, 21 bp, Artificial Sequence
  Synthetic
ccgtggtggaccctgttgtcc

SEQ ID NO: 13753 - DNA, 21 bp, Artificial Sequence
  Synthetic
gtggtggaccctgttgtccgt

SEQ ID NO: 13754 - DNA, 21 bp, Artificial Sequence
  Synthetic
gcaattgcttctcacggacaa

SEQ ID NO: 13755 - DNA, 21 bp, Artificial Sequence
  Synthetic
gtccgtgagaagcaattgcag

SEQ ID NO: 13756 - DNA, 21 bp, Artificial Sequence
  Synthetic
ttcctgctgcaattgcttctc

SEQ ID NO: 13757 - DNA, 21 bp, Artificial Sequence
  Synthetic
tccgtgagaagcaattgcagc

SEQ ID NO: 13758 - DNA, 21 bp, Artificial Sequence
  Synthetic
gatttgttgctgctgctggat

SEQ ID NO: 13759 - DNA, 21 bp, Artificial Sequence
  Synthetic
atccagcagcagcaacaaatc

SEQ ID NO: 13760 - DNA, 21 bp, Artificial Sequence
  Synthetic
cttctggatttgttgctgctg

SEQ ID NO: 13761 - DNA, 21 bp, Artificial Sequence
  Synthetic
ctctgctatcagaagctgctt

SEQ ID NO: 13762 - DNA, 21 bp, Artificial Sequence
  Synthetic
tccagaagcagcttctgatag

SEQ ID NO: 13763 - DNA, 21 bp, Artificial Sequence
  Synthetic
cagcttctgatagcagagttt

SEQ ID NO: 13764 - DNA, 21 bp, Artificial Sequence
  Synthetic
ctgtttctgaaactctgctat

SEQ ID NO: 13765 - DNA, 21 bp, Artificial Sequence
  Synthetic
tagcagagtttcagaaacagc

SEQ ID NO: 13766 - DNA, 21 bp, Artificial Sequence
  Synthetic
gcagagtttcagaaacagcat

SEQ ID NO: 13767 - DNA, 21 bp, Artificial Sequence
  Synthetic
tgtcaagttctcatgctgttt

SEQ ID NO: 13768 - DNA, 21 bp, Artificial Sequence
  Synthetic
cggcagcaccaggctcagctt

SEQ ID NO: 13769 - DNA, 21 bp, Artificial Sequence
  Synthetic
ggcagcaccaggctcagcttc

SEQ ID NO: 13770 - DNA, 21 bp, Artificial Sequence
  Synthetic
taccttgatatgctcctgaag

SEQ ID NO: 13771 - DNA, 21 bp, Artificial Sequence
  Synthetic
atttgctaccttgatatgctc

SEQ ID NO: 13772 - DNA, 21 bp, Artificial Sequence
  Synthetic
ttctcttctcgcaagttgcaa

SEQ ID NO: 13773 - DNA, 21 bp, Artificial Sequence
  Synthetic
tctcttctcgcaagttgcaac

SEQ ID NO: 13774 - DNA, 21 bp, Artificial Sequence
  Synthetic
ttctagccataaaacagcaac

SEQ ID NO: 13775 - DNA, 21 bp, Artificial Sequence
  Synthetic
taaaacagcaacaagaactcc

SEQ ID NO: 13776 - DNA, 21 bp, Artificial Sequence
  Synthetic
cagcaacaagaactcctagaa

SEQ ID NO: 13777 - DNA, 21 bp, Artificial Sequence
  Synthetic
agcaacaagaactcctagaaa

SEQ ID NO: 13778 - DNA, 21 bp, Artificial Sequence
  Synthetic
caagaactcctagaaaaggag

SEQ ID NO: 13779 - DNA, 21 bp, Artificial Sequence
  Synthetic
ctcctagaaaaggagcagaaa

SEQ ID NO: 13780 - DNA, 21 bp, Artificial Sequence
  Synthetic
tcctagaaaaggagcagaaac

SEQ ID NO: 13781 - DNA, 21 bp, Artificial Sequence
  Synthetic
aaggagcagaaactggagcag

SEQ ID NO: 13782 - DNA, 21 bp, Artificial Sequence
  Synthetic
agaaactggagcagcagaggc

SEQ ID NO: 13783 - DNA, 21 bp, Artificial Sequence
  Synthetic
ctggagcagcagaggcaagaa

SEQ ID NO: 13784 - DNA, 21 bp, Artificial Sequence
  Synthetic
tggagcagcagaggcaagaac

SEQ ID NO: 13785 - DNA, 21 bp, Artificial Sequence
  Synthetic
agcagaggcaagaacaggaag

SEQ ID NO: 13786 - DNA, 21 bp, Artificial Sequence
  Synthetic
cagaggcaagaacaggaagta

SEQ ID NO: 13787 - DNA, 21 bp, Artificial Sequence
  Synthetic
acaggaagtagagaggcatcg

SEQ ID NO: 13788 - DNA, 21 bp, Artificial Sequence
  Synthetic
aggaagtagagaggcatcgca

SEQ ID NO: 13789 - DNA, 21 bp, Artificial Sequence
  Synthetic
cccgtttggggatcttggcca

SEQ ID NO: 13790 - DNA, 21 bp, Artificial Sequence
  Synthetic
ctccctggccaagatccccaa

SEQ ID NO: 13791 - DNA, 21 bp, Artificial Sequence
  Synthetic
acccgtttggggatcttggcc

SEQ ID NO: 13792 - DNA, 21 bp, Artificial Sequence
  Synthetic
tacccgtttggggatcttggc

SEQ ID NO: 13793 - DNA, 21 bp, Artificial Sequence
  Synthetic
ggccaagatccccaaacgggt

SEQ ID NO: 13794 - DNA, 21 bp, Artificial Sequence
  Synthetic
cccgacttcccttacccgttt

SEQ ID NO: 13795 - DNA, 21 bp, Artificial Sequence
  Synthetic
tcccgacttcccttacccgtt

SEQ ID NO: 13796 - DNA, 21 bp, Artificial Sequence
  Synthetic
atcccgacttcccttacccgt

SEQ ID NO: 13797 - DNA, 21 bp, Artificial Sequence
  Synthetic
ccagtatggtgcattctttga

SEQ ID NO: 13798 - DNA, 21 bp, Artificial Sequence
  Synthetic
gcagtgcatatgcttcaatca

SEQ ID NO: 13799 - DNA, 21 bp, Artificial Sequence
  Synthetic
gcatatgcactgcataagcag

SEQ ID NO: 13800 - DNA, 21 bp, Artificial Sequence
  Synthetic
gttaagcctaaagtggcctcc

SEQ ID NO: 13801 - DNA, 21 bp, Artificial Sequence
  Synthetic
ttaagcctaaagtggcctcca

SEQ ID NO: 13802 - DNA, 21 bp, Artificial Sequence
  Synthetic
aagcctaaagtggcctccatg

SEQ ID NO: 13803 - DNA, 21 bp, Artificial Sequence
  Synthetic
agcctaaagtggcctccatgg

SEQ ID NO: 13804 - DNA, 21 bp, Artificial Sequence
  Synthetic
ggaaggtggccatctcctcca

SEQ ID NO: 13805 - DNA, 21 bp, Artificial Sequence
  Synthetic
tggaaggtggccatctcctcc

SEQ ID NO: 13806 - DNA, 21 bp, Artificial Sequence
  Synthetic
tgctgcagataagcatcagtg

SEQ ID NO: 13807 - DNA, 21 bp, Artificial Sequence
  Synthetic
atgctgcagataagcatcagt

SEQ ID NO: 13808 - DNA, 21 bp, Artificial Sequence
  Synthetic
gatgcttatctgcagcatctc

SEQ ID NO: 13809 - DNA, 21 bp, Artificial Sequence
  Synthetic
agcatctccagaaggtcagcc

SEQ ID NO: 13810 - DNA, 21 bp, Artificial Sequence
  Synthetic
catctccagaaggtcagccaa

SEQ ID NO: 13811 - DNA, 21 bp, Artificial Sequence
  Synthetic
tcgccctcttggctgaccttc

SEQ ID NO: 13812 - DNA, 21 bp, Artificial Sequence
  Synthetic
atcgccctcttggctgacctt

SEQ ID NO: 13813 - DNA, 21 bp, Artificial Sequence
  Synthetic
caagagggcgatgatgatcat

SEQ ID NO: 13814 - DNA, 21 bp, Artificial Sequence
  Synthetic
atgatgatcatccggactcca

SEQ ID NO: 13815 - DNA, 21 bp, Artificial Sequence
  Synthetic
atcatccggactccatagaat

SEQ ID NO: 13816 - DNA, 21 bp, Artificial Sequence
  Synthetic
ctagcccatattctatggagt

SEQ ID NO: 13817 - DNA, 21 bp, Artificial Sequence
  Synthetic
ctttacctagcccatattcta

SEQ ID NO: 13818 - DNA, 21 bp, Artificial Sequence
  Synthetic
actttacctagcccatattct

SEQ ID NO: 13819 - DNA, 21 bp, Artificial Sequence
  Synthetic
gtggctgggcagtcataacct

SEQ ID NO: 13820 - DNA, 21 bp, Artificial Sequence
  Synthetic
aaggttatgactgcccagcca

SEQ ID NO: 13821 - DNA, 21 bp, Artificial Sequence
  Synthetic
gttatgactgcccagccactg

SEQ ID NO: 13822 - DNA, 21 bp, Artificial Sequence
  Synthetic
ttatgactgcccagccactga

SEQ ID NO: 13823 - DNA, 21 bp, Artificial Sequence
  Synthetic
agtcaaatatcccttcagtgg

SEQ ID NO: 13824 - DNA, 21 bp, Artificial Sequence
  Synthetic
tatttgactatgcagcagcta

SEQ ID NO: 13825 - DNA, 21 bp, Artificial Sequence
  Synthetic
atttgactatgcagcagctat

SEQ ID NO: 13826 - DNA, 21 bp, Artificial Sequence
  Synthetic
ttgactatgcagcagctatag

SEQ ID NO: 13827 - DNA, 21 bp, Artificial Sequence
  Synthetic
tgactatgcagcagctatagg

SEQ ID NO: 13828 - DNA, 21 bp, Artificial Sequence
  Synthetic
cagctgcccaatgcctgattg

SEQ ID NO: 13829 - DNA, 21 bp, Artificial Sequence
  Synthetic
agctgcccaatgcctgattga

SEQ ID NO: 13830 - DNA, 21 bp, Artificial Sequence
  Synthetic
gcacattccgtcaatcaggca

SEQ ID NO: 13831 - DNA, 21 bp, Artificial Sequence
  Synthetic
gcaaagtagcaattaactggt

SEQ ID NO: 13832 - DNA, 21 bp, Artificial Sequence
  Synthetic
caaagtagcaattaactggtc

SEQ ID NO: 13833 - DNA, 21 bp, Artificial Sequence
  Synthetic
aagtagcaattaactggtctg

SEQ ID NO: 13834 - DNA, 21 bp, Artificial Sequence
  Synthetic
tctggagggtggcatcatgca

SEQ ID NO: 13835 - DNA, 21 bp, Artificial Sequence
  Synthetic
ggtggcatcatgcaaagaagt

SEQ ID NO: 13836 - DNA, 21 bp, Artificial Sequence
  Synthetic
tgttatctcaatgatgctgtc

SEQ ID NO: 13837 - DNA, 21 bp, Artificial Sequence
  Synthetic
gttatctcaatgatgctgtcc

SEQ ID NO: 13838 - DNA, 21 bp, Artificial Sequence
  Synthetic
ttatctcaatgatgctgtcct

SEQ ID NO: 13839 - DNA, 21 bp, Artificial Sequence
  Synthetic
aatattcccaggacagcatca

SEQ ID NO: 13840 - DNA, 21 bp, Artificial Sequence
  Synthetic
ccgtcgcaatcgtaatattcc

SEQ ID NO: 13841 - DNA, 21 bp, Artificial Sequence
  Synthetic
cctgggaatattacgattgcg

SEQ ID NO: 13842 - DNA, 21 bp, Artificial Sequence
  Synthetic
ctgggaatattacgattgcga

SEQ ID NO: 13843 - DNA, 21 bp, Artificial Sequence
  Synthetic
tattacgattgcgacggaaat

SEQ ID NO: 13844 - DNA, 21 bp, Artificial Sequence
  Synthetic
aaatttgagcgtattctctac

SEQ ID NO: 13845 - DNA, 21 bp, Artificial Sequence
  Synthetic
gagcgtattctctacgtggat

SEQ ID NO: 13846 - DNA, 21 bp, Artificial Sequence
  Synthetic
gtgcagatccaaatccacgta

SEQ ID NO: 13847 - DNA, 21 bp, Artificial Sequence
  Synthetic
tggtgcagatccaaatccacg

SEQ ID NO: 13848 - DNA, 21 bp, Artificial Sequence
  Synthetic
acgtggatttggatctgcacc

SEQ ID NO: 13849 - DNA, 21 bp, Artificial Sequence
  Synthetic
cgtggatttggatctgcacca

SEQ ID NO: 13850 - DNA, 21 bp, Artificial Sequence
  Synthetic
gtcatgactttggaggtgaaa

SEQ ID NO: 13851 - DNA, 21 bp, Artificial Sequence
  Synthetic
gacacggtcatgactttggag

SEQ ID NO: 13852 - DNA, 21 bp, Artificial Sequence
  Synthetic
gcagggacacggtcatgactt

SEQ ID NO: 13853 - DNA, 21 bp, Artificial Sequence
  Synthetic
tgcagggacacggtcatgact

SEQ ID NO: 13854 - DNA, 21 bp, Artificial Sequence
  Synthetic
tgtccctgcacaaattctccc

SEQ ID NO: 13855 - DNA, 21 bp, Artificial Sequence
  Synthetic
aatcctggggagaatttgtgc

SEQ ID NO: 13856 - DNA, 21 bp, Artificial Sequence
  Synthetic
aaatcctggggagaatttgtg

SEQ ID NO: 13857 - DNA, 21 bp, Artificial Sequence
  Synthetic
ttgcctgggaaaaatcctggg

SEQ ID NO: 13858 - DNA, 21 bp, Artificial Sequence
  Synthetic
acttgcctgggaaaaatcctg

SEQ ID NO: 13859 - DNA, 21 bp, Artificial Sequence
  Synthetic
cacttgcctgggaaaaatcct

SEQ ID NO: 13860 - DNA, 21 bp, Artificial Sequence
  Synthetic
tcacttgcctgggaaaaatcc

SEQ ID NO: 13861 - DNA, 21 bp, Artificial Sequence
  Synthetic
atcacttgcctgggaaaaatc

SEQ ID NO: 13862 - DNA, 21 bp, Artificial Sequence
  Synthetic
gtgacgtgtctgatgttggcc

SEQ ID NO: 13863 - DNA, 21 bp, Artificial Sequence
  Synthetic
tgacgtgtctgatgttggcct

SEQ ID NO: 13864 - DNA, 21 bp, Artificial Sequence
  Synthetic
gacgtgtctgatgttggccta

SEQ ID NO: 13865 - DNA, 21 bp, Artificial Sequence
  Synthetic
gtgtctgatgttggcctaggg

SEQ ID NO: 13866 - DNA, 21 bp, Artificial Sequence
  Synthetic
tgtctgatgttggcctaggga

SEQ ID NO: 13867 - DNA, 21 bp, Artificial Sequence
  Synthetic
tacagtgtaaatgtgcccatt

SEQ ID NO: 13868 - DNA, 21 bp, Artificial Sequence
  Synthetic
tcatcttgtatgccatcctga

SEQ ID NO: 13869 - DNA, 21 bp, Artificial Sequence
  Synthetic
ccattcaggatggcatacaag

SEQ ID NO: 13870 - DNA, 21 bp, Artificial Sequence
  Synthetic
atgaaaaatattaccagatct

SEQ ID NO: 13871 - DNA, 21 bp, Artificial Sequence
  Synthetic
ccagctgtaagaccactgctt

SEQ ID NO: 13872 - DNA, 21 bp, Artificial Sequence
  Synthetic
cccagctgtaagaccactgct

SEQ ID NO: 13873 - DNA, 21 bp, Artificial Sequence
  Synthetic
cccaaagcagtggtcttacag

SEQ ID NO: 13874 - DNA, 21 bp, Artificial Sequence
  Synthetic
ccaaagcagtggtcttacagc

SEQ ID NO: 13875 - DNA, 21 bp, Artificial Sequence
  Synthetic
caaagcagtggtcttacagct

SEQ ID NO: 13876 - DNA, 21 bp, Artificial Sequence
  Synthetic
agctgggagctgacacaatag

SEQ ID NO: 13877 - DNA, 21 bp, Artificial Sequence
  Synthetic
gctgggagctgacacaatagc

SEQ ID NO: 13878 - DNA, 21 bp, Artificial Sequence
  Synthetic
ctgggagctgacacaatagct

SEQ ID NO: 13879 - DNA, 21 bp, Artificial Sequence
  Synthetic
gagtcatgttaaaggagcaca

SEQ ID NO: 13880 - DNA, 21 bp, Artificial Sequence
  Synthetic
ggagtcatgttaaaggagcac

SEQ ID NO: 13881 - DNA, 21 bp, Artificial Sequence
  Synthetic
tgctcctttaacatgactcca

SEQ ID NO: 13882 - DNA, 21 bp, Artificial Sequence
  Synthetic
gctcctttaacatgactccag

SEQ ID NO: 13883 - DNA, 21 bp, Artificial Sequence
  Synthetic
ttcccactggagtcatgttaa

SEQ ID NO: 13884 - DNA, 21 bp, Artificial Sequence
  Synthetic
ctcctttaacatgactccagt

SEQ ID NO: 13885 - DNA, 21 bp, Artificial Sequence
  Synthetic
attcccactggagtcatgtta

SEQ ID NO: 13886 - DNA, 21 bp, Artificial Sequence
  Synthetic
aagacacttgccaattcccac

SEQ ID NO: 13887 - DNA, 21 bp, Artificial Sequence
  Synthetic
taagacacttgccaattccca

SEQ ID NO: 13888 - DNA, 21 bp, Artificial Sequence
  Synthetic
gagtgttgccaactgccattg

SEQ ID NO: 13889 - DNA, 21 bp, Artificial Sequence
  Synthetic
aatgagtgttgccaactgcca

SEQ ID NO: 13890 - DNA, 21 bp, Artificial Sequence
  Synthetic
tggcagttggcaacactcatt

SEQ ID NO: 13891 - DNA, 21 bp, Artificial Sequence
  Synthetic
ggcagttggcaacactcattt

SEQ ID NO: 13892 - DNA, 21 bp, Artificial Sequence
  Synthetic
ttatactcacctcctcccaaa

SEQ ID NO: 13893 - DNA, 21 bp, Artificial Sequence
  Synthetic
ccttgccaacacggctcgatg

SEQ ID NO: 13894 - DNA, 21 bp, Artificial Sequence
  Synthetic
cccggtcaagtatgtccagca

SEQ ID NO: 13895 - DNA, 21 bp, Artificial Sequence
  Synthetic
ctcgatgctggacatacttga

SEQ ID NO: 13896 - DNA, 21 bp, Artificial Sequence
  Synthetic
tcgatgctggacatacttgac

SEQ ID NO: 13897 - DNA, 21 bp, Artificial Sequence
  Synthetic
catacttgaccggggtcatcc

SEQ ID NO: 13898 - DNA, 21 bp, Artificial Sequence
  Synthetic
atacttgaccggggtcatcct

SEQ ID NO: 13899 - DNA, 21 bp, Artificial Sequence
  Synthetic
gtgttcgcggccgaagccctc

SEQ ID NO: 13900 - DNA, 21 bp, Artificial Sequence
  Synthetic
cgcttcaggagggcttcggcc

SEQ ID NO: 13901 - DNA, 21 bp, Artificial Sequence
  Synthetic
agccctcctgaagcggcgcat

SEQ ID NO: 13902 - DNA, 21 bp, Artificial Sequence
  Synthetic
gccctcctgaagcggcgcata

SEQ ID NO: 13903 - DNA, 21 bp, Artificial Sequence
  Synthetic
tttccgtatgcgccgcttcag

SEQ ID NO: 13904 - DNA, 21 bp, Artificial Sequence
  Synthetic
actttccgtatgcgccgcttc

SEQ ID NO: 13905 - DNA, 21 bp, Artificial Sequence
  Synthetic
tactttccgtatgcgccgctt

SEQ ID NO: 13906 - DNA, 21 bp, Artificial Sequence
  Synthetic
cctttgcacccgcagggacgc

SEQ ID NO: 13907 - DNA, 21 bp, Artificial Sequence
  Synthetic
ctttgcacccgcagggacgca

SEQ ID NO: 13908 - DNA, 21 bp, Artificial Sequence
  Synthetic
cgaggtattccatgcgtccct

SEQ ID NO: 13909 - DNA, 21 bp, Artificial Sequence
  Synthetic
cagggacgcatggaatacctc

SEQ ID NO: 13910 - DNA, 21 bp, Artificial Sequence
  Synthetic
acgcatggaatacctcgtgaa

SEQ ID NO: 13911 - DNA, 21 bp, Artificial Sequence
  Synthetic
cgcatggaatacctcgtgaaa

SEQ ID NO: 13912 - DNA, 21 bp, Artificial Sequence
  Synthetic
atggaatacctcgtgaaatgg

SEQ ID NO: 13913 - DNA, 21 bp, Artificial Sequence
  Synthetic
tggaatacctcgtgaaatgga

SEQ ID NO: 13914 - DNA, 21 bp, Artificial Sequence
  Synthetic
tgcgaccatcccttccatttc

SEQ ID NO: 13915 - DNA, 21 bp, Artificial Sequence
  Synthetic
gtgaaatggaagggatggtcg

SEQ ID NO: 13916 - DNA, 21 bp, Artificial Sequence
  Synthetic
gattccctttaggtacagcac

SEQ ID NO: 13917 - DNA, 21 bp, Artificial Sequence
  Synthetic
attccctttaggtacagcaca

SEQ ID NO: 13918 - DNA, 21 bp, Artificial Sequence
  Synthetic
ttccctttaggtacagcacat

SEQ ID NO: 13919 - DNA, 21 bp, Artificial Sequence
  Synthetic
tttaggtacagcacatgggaa

SEQ ID NO: 13920 - DNA, 21 bp, Artificial Sequence
  Synthetic
ttaggtacagcacatgggaac

SEQ ID NO: 13921 - DNA, 21 bp, Artificial Sequence
  Synthetic
aggtacagcacatgggaaccg

SEQ ID NO: 13922 - DNA, 21 bp, Artificial Sequence
  Synthetic
ggtacagcacatgggaaccgg

SEQ ID NO: 13923 - DNA, 21 bp, Artificial Sequence
  Synthetic
tgggaaccggaggaaaacatc

SEQ ID NO: 13924 - DNA, 21 bp, Artificial Sequence
  Synthetic
ggctgcgagcaagcgagcatc

SEQ ID NO: 13925 - DNA, 21 bp, Artificial Sequence
  Synthetic
atgctcgcttgctcgcagcct

SEQ ID NO: 13926 - DNA, 21 bp, Artificial Sequence
  Synthetic
gctcgcttgctcgcagccttt

SEQ ID NO: 13927 - DNA, 21 bp, Artificial Sequence
  Synthetic
ttcctcaaaggctgcgagcaa

SEQ ID NO: 13928 - DNA, 21 bp, Artificial Sequence
  Synthetic
ctcgcttgctcgcagcctttg

SEQ ID NO: 13929 - DNA, 21 bp, Artificial Sequence
  Synthetic
ctgtacctttcctcaaaggct

SEQ ID NO: 13930 - DNA, 21 bp, Artificial Sequence
  Synthetic
atcggcgagcaggtgttcgcc

SEQ ID NO: 13931 - DNA, 21 bp, Artificial Sequence
  Synthetic
tcggcgagcaggtgttcgccg

SEQ ID NO: 13932 - DNA, 21 bp, Artificial Sequence
  Synthetic
ggcgagcaggtgttcgccgtg

SEQ ID NO: 13933 - DNA, 21 bp, Artificial Sequence
  Synthetic
ggtgttcgccgtggagagcat

SEQ ID NO: 13934 - DNA, 21 bp, Artificial Sequence
  Synthetic
gtgttcgccgtggagagcatc

SEQ ID NO: 13935 - DNA, 21 bp, Artificial Sequence
  Synthetic
ttcttccggatgctctccacg

SEQ ID NO: 13936 - DNA, 21 bp, Artificial Sequence
  Synthetic
ttcgccgtggagagcatccgg

SEQ ID NO: 13937 - DNA, 21 bp, Artificial Sequence
  Synthetic
gagcatccggaagaagcgcgt

SEQ ID NO: 13938 - DNA, 21 bp, Artificial Sequence
  Synthetic
agcatccggaagaagcgcgtg

SEQ ID NO: 13939 - DNA, 21 bp, Artificial Sequence
  Synthetic
caccttccgcacgcgcttctt

SEQ ID NO: 13940 - DNA, 21 bp, Artificial Sequence
  Synthetic
cggaagaagcgcgtgcggaag

SEQ ID NO: 13941 - DNA, 21 bp, Artificial Sequence
  Synthetic
ctctctcttctcagggtaaag

SEQ ID NO: 13942 - DNA, 21 bp, Artificial Sequence
  Synthetic
ccagatactcgactttaccct

SEQ ID NO: 13943 - DNA, 21 bp, Artificial Sequence
  Synthetic
caccagatactcgactttacc

SEQ ID NO: 13944 - DNA, 21 bp, Artificial Sequence
  Synthetic
cagggtaaagtcgagtatctg

SEQ ID NO: 13945 - DNA, 21 bp, Artificial Sequence
  Synthetic
taaagtcgagtatctggtgaa

SEQ ID NO: 13946 - DNA, 21 bp, Artificial Sequence
  Synthetic
aaagtcgagtatctggtgaag

SEQ ID NO: 13947 - DNA, 21 bp, Artificial Sequence
  Synthetic
tcgagtatctggtgaagtgga

SEQ ID NO: 13948 - DNA, 21 bp, Artificial Sequence
  Synthetic
acacatgaaggagcttacttt

SEQ ID NO: 13949 - DNA, 21 bp, Artificial Sequence
  Synthetic
tcctctccccaggtacagcac

SEQ ID NO: 13950 - DNA, 21 bp, Artificial Sequence
  Synthetic
cctctccccaggtacagcacg

SEQ ID NO: 13951 - DNA, 21 bp, Artificial Sequence
  Synthetic
ctctccccaggtacagcacgt

SEQ ID NO: 13952 - DNA, 21 bp, Artificial Sequence
  Synthetic
tggctcccacgtgctgtacct

SEQ ID NO: 13953 - DNA, 21 bp, Artificial Sequence
  Synthetic
ctggctcccacgtgctgtacc

SEQ ID NO: 13954 - DNA, 21 bp, Artificial Sequence
  Synthetic
tctggctcccacgtgctgtac

SEQ ID NO: 13955 - DNA, 21 bp, Artificial Sequence
  Synthetic
ccaggtacagcacgtgggagc

SEQ ID NO: 13956 - DNA, 21 bp, Artificial Sequence
  Synthetic
ggtacagcacgtgggagccag

SEQ ID NO: 13957 - DNA, 21 bp, Artificial Sequence
  Synthetic
tgggagccagaagagcacatc

SEQ ID NO: 13958 - DNA, 21 bp, Artificial Sequence
  Synthetic
acccccgcctcgtcatggcct

SEQ ID NO: 13959 - DNA, 21 bp, Artificial Sequence
  Synthetic
cctcgtaggccatgacgaggc

SEQ ID NO: 13960 - DNA, 21 bp, Artificial Sequence
  Synthetic
tcctcgtaggccatgacgagg

SEQ ID NO: 13961 - DNA, 21 bp, Artificial Sequence
  Synthetic
ccccgcctcgtcatggcctac

SEQ ID NO: 13962 - DNA, 21 bp, Artificial Sequence
  Synthetic
ctcctcgtaggccatgacgag

SEQ ID NO: 13963 - DNA, 21 bp, Artificial Sequence
  Synthetic
cccgcctcgtcatggcctacg

SEQ ID NO: 13964 - DNA, 21 bp, Artificial Sequence
  Synthetic
cgcctcgtcatggcctacgag

SEQ ID NO: 13965 - DNA, 21 bp, Artificial Sequence
  Synthetic
tacttctcctcgtaggccatg

SEQ ID NO: 13966 - DNA, 21 bp, Artificial Sequence
  Synthetic
cgtttgatgatggattcggcc

SEQ ID NO: 13967 - DNA, 21 bp, Artificial Sequence
  Synthetic
ggccgaatccatcatcaaacg

SEQ ID NO: 13968 - DNA, 21 bp, Artificial Sequence
  Synthetic
atccatcatcaaacggcggat

SEQ ID NO: 13969 - DNA, 21 bp, Artificial Sequence
  Synthetic
tttcggatccgccgtttgatg

SEQ ID NO: 13970 - DNA, 21 bp, Artificial Sequence
  Synthetic
atcaaacggcggatccgaaag

SEQ ID NO: 13971 - DNA, 21 bp, Artificial Sequence
  Synthetic
ccccgggcggcggctcacctt

SEQ ID NO: 13972 - DNA, 21 bp, Artificial Sequence
  Synthetic
caccaggtactcgatgcgtcc

SEQ ID NO: 13973 - DNA, 21 bp, Artificial Sequence
  Synthetic
cagggacgcatcgagtacctg

SEQ ID NO: 13974 - DNA, 21 bp, Artificial Sequence
  Synthetic
acgcatcgagtacctggtgaa

SEQ ID NO: 13975 - DNA, 21 bp, Artificial Sequence
  Synthetic
cgcatcgagtacctggtgaaa

SEQ ID NO: 13976 - DNA, 21 bp, Artificial Sequence
  Synthetic
atcgagtacctggtgaaatgg

SEQ ID NO: 13977 - DNA, 21 bp, Artificial Sequence
  Synthetic
tcgagtacctggtgaaatgga

SEQ ID NO: 13978 - DNA, 21 bp, Artificial Sequence
  Synthetic
gtacctggtgaaatggaaggg

SEQ ID NO: 13979 - DNA, 21 bp, Artificial Sequence
  Synthetic
atggaaggggtgggcgatcaa

SEQ ID NO: 13980 - DNA, 21 bp, Artificial Sequence
  Synthetic
gtgactcggcaggtacagcac

SEQ ID NO: 13981 - DNA, 21 bp, Artificial Sequence
  Synthetic
tgactcggcaggtacagcact

SEQ ID NO: 13982 - DNA, 21 bp, Artificial Sequence
  Synthetic
gactcggcaggtacagcactt

SEQ ID NO: 13983 - DNA, 21 bp, Artificial Sequence
  Synthetic
gcaggtacagcacttgggagc

SEQ ID NO: 13984 - DNA, 21 bp, Artificial Sequence
  Synthetic
aggtacagcacttgggagccc

SEQ ID NO: 13985 - DNA, 21 bp, Artificial Sequence
  Synthetic
ggtacagcacttgggagcccg

SEQ ID NO: 13986 - DNA, 21 bp, Artificial Sequence
  Synthetic
tacagcacttgggagcccgag

SEQ ID NO: 13987 - DNA, 21 bp, Artificial Sequence
  Synthetic
tgggagcccgaggagaacatc

SEQ ID NO: 13988 - DNA, 21 bp, Artificial Sequence
  Synthetic
cgcgagtccaggatgttctcc

SEQ ID NO: 13989 - DNA, 21 bp, Artificial Sequence
  Synthetic
ggctgcaatgagccgcgagtc

SEQ ID NO: 13990 - DNA, 21 bp, Artificial Sequence
  Synthetic
actcgcggctcattgcagcct

SEQ ID NO: 13991 - DNA, 21 bp, Artificial Sequence
  Synthetic
gttcgaaggctgcaatgagcc

SEQ ID NO: 13992 - DNA, 21 bp, Artificial Sequence
  Synthetic
cattgcagccttcgaacaaaa

SEQ ID NO: 13993 - DNA, 21 bp, Artificial Sequence
  Synthetic
gaggatgaggaggagtatgtt

SEQ ID NO: 13994 - DNA, 21 bp, Artificial Sequence
  Synthetic
aggatgaggaggagtatgttg

SEQ ID NO: 13995 - DNA, 21 bp, Artificial Sequence
  Synthetic
gatgaggaggagtatgttgtg

SEQ ID NO: 13996 - DNA, 21 bp, Artificial Sequence
  Synthetic
gtgctagacaggcgcgtggtt

SEQ ID NO: 13997 - DNA, 21 bp, Artificial Sequence
  Synthetic
tgctagacaggcgcgtggtta

SEQ ID NO: 13998 - DNA, 21 bp, Artificial Sequence
  Synthetic
aggcgcgtggttaagggacaa

SEQ ID NO: 13999 - DNA, 21 bp, Artificial Sequence
  Synthetic
ggcgcgtggttaagggacaag

SEQ ID NO: 14000 - DNA, 21 bp, Artificial Sequence
  Synthetic
aagggacaagtggaatatcta

SEQ ID NO: 14001 - DNA, 21 bp, Artificial Sequence
  Synthetic
acaagtggaatatctactgaa

SEQ ID NO: 14002 - DNA, 21 bp, Artificial Sequence
  Synthetic
caagtggaatatctactgaag

SEQ ID NO: 14003 - DNA, 21 bp, Artificial Sequence
  Synthetic
cttacccagggagcacaatac

SEQ ID NO: 14004 - DNA, 21 bp, Artificial Sequence
  Synthetic
ttacccagggagcacaatact

SEQ ID NO: 14005 - DNA, 21 bp, Artificial Sequence
  Synthetic
tacccagggagcacaatactt

SEQ ID NO: 14006 - DNA, 21 bp, Artificial Sequence
  Synthetic
ggttcccaagtattgtgctcc

SEQ ID NO: 14007 - DNA, 21 bp, Artificial Sequence
  Synthetic
gggagcacaatacttgggaac

SEQ ID NO: 14008 - DNA, 21 bp, Artificial Sequence
  Synthetic
gagcacaatacttgggaacct

SEQ ID NO: 14009 - DNA, 21 bp, Artificial Sequence
  Synthetic
acttgggaacctgagaaaaac

SEQ ID NO: 14010 - DNA, 21 bp, Artificial Sequence
  Synthetic
ctgagaaaaacttggattgcc

SEQ ID NO: 14011 - DNA, 21 bp, Artificial Sequence
  Synthetic
tggattgccctgagctaattt

SEQ ID NO: 14012 - DNA, 21 bp, Artificial Sequence
  Synthetic
tcataaattcagaaattagct

SEQ ID NO: 14013 - DNA, 21 bp, Artificial Sequence
  Synthetic
cctgagctaatttctgaattt

SEQ ID NO: 14014 - DNA, 21 bp, Artificial Sequence
  Synthetic
gttggcgagcacgtcttcgcg

SEQ ID NO: 14015 - DNA, 21 bp, Artificial Sequence
  Synthetic
ttggcgagcacgtcttcgcgg

SEQ ID NO: 14016 - DNA, 21 bp, Artificial Sequence
  Synthetic
ggcgagcacgtcttcgcggtg

SEQ ID NO: 14017 - DNA, 21 bp, Artificial Sequence
  Synthetic
acgtcttcgcggtggagagca

SEQ ID NO: 14018 - DNA, 21 bp, Artificial Sequence
  Synthetic
gtcttcgcggtggagagcatc

SEQ ID NO: 14019 - DNA, 21 bp, Artificial Sequence
  Synthetic
ttcttctcgatgctctccacc

SEQ ID NO: 14020 - DNA, 21 bp, Artificial Sequence
  Synthetic
ttcgcggtggagagcatcgag

SEQ ID NO: 14021 - DNA, 21 bp, Artificial Sequence
  Synthetic
ggtggagagcatcgagaagaa

SEQ ID NO: 14022 - DNA, 21 bp, Artificial Sequence
  Synthetic
agaagaagcggatccgcaagg

SEQ ID NO: 14023 - DNA, 21 bp, Artificial Sequence
  Synthetic
gcccccgcgccgccctacctt

SEQ ID NO: 14024 - DNA, 21 bp, Artificial Sequence
  Synthetic
gtctcttccccccagggcaga

SEQ ID NO: 14025 - DNA, 21 bp, Artificial Sequence
  Synthetic
tctcttccccccagggcagag

SEQ ID NO: 14026 - DNA, 21 bp, Artificial Sequence
  Synthetic
ccagatactccactctgccct

SEQ ID NO: 14027 - DNA, 21 bp, Artificial Sequence
  Synthetic
accagatactccactctgccc

SEQ ID NO: 14028 - DNA, 21 bp, Artificial Sequence
  Synthetic
caccagatactccactctgcc

SEQ ID NO: 14029 - DNA, 21 bp, Artificial Sequence
  Synthetic
cagggcagagtggagtatctg

SEQ ID NO: 14030 - DNA, 21 bp, Artificial Sequence
  Synthetic
cagagtggagtatctggtgaa

SEQ ID NO: 14031 - DNA, 21 bp, Artificial Sequence
  Synthetic
agagtggagtatctggtgaaa

SEQ ID NO: 14032 - DNA, 21 bp, Artificial Sequence
  Synthetic
agtggagtatctggtgaaatg

SEQ ID NO: 14033 - DNA, 21 bp, Artificial Sequence
  Synthetic
ttcccttgcaagatataacac

SEQ ID NO: 14034 - DNA, 21 bp, Artificial Sequence
  Synthetic
tcccttgcaagatataacacg

SEQ ID NO: 14035 - DNA, 21 bp, Artificial Sequence
  Synthetic
cccttgcaagatataacacgt

SEQ ID NO: 14036 - DNA, 21 bp, Artificial Sequence
  Synthetic
gcaagatataacacgtgggaa

SEQ ID NO: 14037 - DNA, 21 bp, Artificial Sequence
  Synthetic
caagatataacacgtgggaac

SEQ ID NO: 14038 - DNA, 21 bp, Artificial Sequence
  Synthetic
agatataacacgtgggaaccg

SEQ ID NO: 14039 - DNA, 21 bp, Artificial Sequence
  Synthetic
gatataacacgtgggaaccgg

SEQ ID NO: 14040 - DNA, 21 bp, Artificial Sequence
  Synthetic
tataacacgtgggaaccggag

SEQ ID NO: 14041 - DNA, 21 bp, Artificial Sequence
  Synthetic
tgggaaccggaggagaacatc

SEQ ID NO: 14042 - DNA, 21 bp, Artificial Sequence
  Synthetic
ggcgatcagcagcctggggtc

SEQ ID NO: 14043 - DNA, 21 bp, Artificial Sequence
  Synthetic
tctggaaggcgatcagcagcc

SEQ ID NO: 14044 - DNA, 21 bp, Artificial Sequence
  Synthetic
ttctggaaggcgatcagcagc

SEQ ID NO: 14045 - DNA, 21 bp, Artificial Sequence
  Synthetic
cccaggctgctgatcgccttc

SEQ ID NO: 14046 - DNA, 21 bp, Artificial Sequence
  Synthetic
gctgatcgccttccagaacag

SEQ ID NO: 14047 - DNA, 21 bp, Artificial Sequence
  Synthetic
gtgggggacgctcacctgttc

SEQ ID NO: 14048 - DNA, 21 bp, Artificial Sequence
  Synthetic
cgtgggggacgctcacctgtt

SEQ ID NO: 14049 - DNA, 21 bp, Artificial Sequence
  Synthetic
gcagagcctgaagaatttgtc

SEQ ID NO: 14050 - DNA, 21 bp, Artificial Sequence
  Synthetic
cagagcctgaagaatttgtcg

SEQ ID NO: 14051 - DNA, 21 bp, Artificial Sequence
  Synthetic
aaagtactagatcgacgtgta

SEQ ID NO: 14052 - DNA, 21 bp, Artificial Sequence
  Synthetic
tactagatcgacgtgtagtga

SEQ ID NO: 14053 - DNA, 21 bp, Artificial Sequence
  Synthetic
actagatcgacgtgtagtgaa

SEQ ID NO: 14054 - DNA, 21 bp, Artificial Sequence
  Synthetic
ctagatcgacgtgtagtgaat

SEQ ID NO: 14055 - DNA, 21 bp, Artificial Sequence
  Synthetic
cgacgtgtagtgaatgggaaa

SEQ ID NO: 14056 - DNA, 21 bp, Artificial Sequence
  Synthetic
gacgtgtagtgaatgggaaag

SEQ ID NO: 14057 - DNA, 21 bp, Artificial Sequence
  Synthetic
aatgggaaagtggaatatttc

SEQ ID NO: 14058 - DNA, 21 bp, Artificial Sequence
  Synthetic
gaaagtggaatatttcctgaa

SEQ ID NO: 14059 - DNA, 21 bp, Artificial Sequence
  Synthetic
aaagtggaatatttcctgaag

SEQ ID NO: 14060 - DNA, 21 bp, Artificial Sequence
  Synthetic
gtggaatatttcctgaagtgg

SEQ ID NO: 14061 - DNA, 21 bp, Artificial Sequence
  Synthetic
tggaatatttcctgaagtgga

SEQ ID NO: 14062 - DNA, 21 bp, Artificial Sequence
  Synthetic
tctgtaaatcccttccacttc

SEQ ID NO: 14063 - DNA, 21 bp, Artificial Sequence
  Synthetic
ctctgtaaatcccttccactt

SEQ ID NO: 14064 - DNA, 21 bp, Artificial Sequence
  Synthetic
tcctgaagtggaagggattta

SEQ ID NO: 14065 - DNA, 21 bp, Artificial Sequence
  Synthetic
agtggaagggatttacagagt

SEQ ID NO: 14066 - DNA, 21 bp, Artificial Sequence
  Synthetic
taaacacagtgctgacaatac

SEQ ID NO: 14067 - DNA, 21 bp, Artificial Sequence
  Synthetic
aaacacagtgctgacaatact

SEQ ID NO: 14068 - DNA, 21 bp, Artificial Sequence
  Synthetic
aacacagtgctgacaatactt

SEQ ID NO: 14069 - DNA, 21 bp, Artificial Sequence
  Synthetic
gtgctgacaatacttgggaac

SEQ ID NO: 14070 - DNA, 21 bp, Artificial Sequence
  Synthetic
ctgacaatacttgggaacctg

SEQ ID NO: 14071 - DNA, 21 bp, Artificial Sequence
  Synthetic
ctgaagaaaatttagattgtc

SEQ ID NO: 14072 - DNA, 21 bp, Artificial Sequence
  Synthetic
atttagattgtccagaattga

SEQ ID NO: 14073 - DNA, 21 bp, Artificial Sequence
  Synthetic
taagaaacgcttcaatcaatt

SEQ ID NO: 14074 - DNA, 21 bp, Artificial Sequence
  Synthetic
tttgccagctttctgagagtt

SEQ ID NO: 14075 - DNA, 21 bp, Artificial Sequence
  Synthetic
gtcttcgccgccgagtgcatc

SEQ ID NO: 14076 - DNA, 21 bp, Artificial Sequence
  Synthetic
ttgctcaggatgcactcggcg

SEQ ID NO: 14077 - DNA, 21 bp, Artificial Sequence
  Synthetic
caccttgcggagccgcttgct

SEQ ID NO: 14078 - DNA, 21 bp, Artificial Sequence
  Synthetic
cggcgggccgcacgcaccttg

SEQ ID NO: 14079 - DNA, 21 bp, Artificial Sequence
  Synthetic
ccggcgggccgcacgcacctt

SEQ ID NO: 14080 - DNA, 21 bp, Artificial Sequence
  Synthetic
cttctctccccgcagggcaag

SEQ ID NO: 14081 - DNA, 21 bp, Artificial Sequence
  Synthetic
ttctctccccgcagggcaagc

SEQ ID NO: 14082 - DNA, 21 bp, Artificial Sequence
  Synthetic
ccaggtactccagcttgccct

SEQ ID NO: 14083 - DNA, 21 bp, Artificial Sequence
  Synthetic
gtggcgcggctggtcctccaa

SEQ ID NO: 14084 - DNA, 21 bp, Artificial Sequence
  Synthetic
gcgtcgcgggggactcacttg

SEQ ID NO: 14085 - DNA, 21 bp, Artificial Sequence
  Synthetic
tctgctttgcagacataacag

SEQ ID NO: 14086 - DNA, 21 bp, Artificial Sequence
  Synthetic
ctgctttgcagacataacagc

SEQ ID NO: 14087 - DNA, 21 bp, Artificial Sequence
  Synthetic
tgctttgcagacataacagct

SEQ ID NO: 14088 - DNA, 21 bp, Artificial Sequence
  Synthetic
tgcagacataacagctgggag

SEQ ID NO: 14089 - DNA, 21 bp, Artificial Sequence
  Synthetic
gcagacataacagctgggagc

SEQ ID NO: 14090 - DNA, 21 bp, Artificial Sequence
  Synthetic
agacataacagctgggagccg

SEQ ID NO: 14091 - DNA, 21 bp, Artificial Sequence
  Synthetic
gacataacagctgggagccgg

SEQ ID NO: 14092 - DNA, 21 bp, Artificial Sequence
  Synthetic
cataacagctgggagccggag

SEQ ID NO: 14093 - DNA, 21 bp, Artificial Sequence
  Synthetic
tgggagccggaggagaacatc

SEQ ID NO: 14094 - DNA, 21 bp, Artificial Sequence
  Synthetic
ccggaggagaacatcctggac

SEQ ID NO: 14095 - DNA, 21 bp, Artificial Sequence
  Synthetic
ggccaggagcagcctcgggtc

SEQ ID NO: 14096 - DNA, 21 bp, Artificial Sequence
  Synthetic
tctggaaggccaggagcagcc

SEQ ID NO: 14097 - DNA, 21 bp, Artificial Sequence
  Synthetic
ccgaggctgctcctggccttc

SEQ ID NO: 14098 - DNA, 21 bp, Artificial Sequence
  Synthetic
aggctgctcctggccttccag

SEQ ID NO: 14099 - DNA, 21 bp, Artificial Sequence
  Synthetic
gctcctggccttccagaagaa

SEQ ID NO: 14100 - DNA, 21 bp, Artificial Sequence
  Synthetic
cctcacttcttctggaaggcc

SEQ ID NO: 14101 - DNA, 21 bp, Artificial Sequence
  Synthetic
tcctcacttcttctggaaggc

SEQ ID NO: 14102 - DNA, 21 bp, Artificial Sequence
  Synthetic
tcctggccttccagaagaagt

SEQ ID NO: 14103 - DNA, 21 bp, Artificial Sequence
  Synthetic
tgtcagcgtcctcacttcttc

SEQ ID NO: 14104 - DNA, 21 bp, Artificial Sequence
  Synthetic
ctgtcagcgtcctcacttctt

SEQ ID NO: 14105 - DNA, 21 bp, Artificial Sequence
  Synthetic
gaggaggaagaggaatatgtg

SEQ ID NO: 14106 - DNA, 21 bp, Artificial Sequence
  Synthetic
aggaggaagaggaatatgtgg

SEQ ID NO: 14107 - DNA, 21 bp, Artificial Sequence
  Synthetic
ggtggaaaaagttctcgaccg

SEQ ID NO: 14108 - DNA, 21 bp, Artificial Sequence
  Synthetic
gttctcgaccgtcgagtggta

SEQ ID NO: 14109 - DNA, 21 bp, Artificial Sequence
  Synthetic
gccctttaccactcgacggtc

SEQ ID NO: 14110 - DNA, 21 bp, Artificial Sequence
  Synthetic
ttgccctttaccactcgacgg

SEQ ID NO: 14111 - DNA, 21 bp, Artificial Sequence
  Synthetic
cgtcgagtggtaaagggcaaa

SEQ ID NO: 14112 - DNA, 21 bp, Artificial Sequence
  Synthetic
gtcgagtggtaaagggcaaag

SEQ ID NO: 14113 - DNA, 21 bp, Artificial Sequence
  Synthetic
caaagtggagtacctcctaaa

SEQ ID NO: 14114 - DNA, 21 bp, Artificial Sequence
  Synthetic
aaagtggagtacctcctaaag

SEQ ID NO: 14115 - DNA, 21 bp, Artificial Sequence
  Synthetic
gtggagtacctcctaaagtgg

SEQ ID NO: 14116 - DNA, 21 bp, Artificial Sequence
  Synthetic
tggagtacctcctaaagtgga

SEQ ID NO: 14117 - DNA, 21 bp, Artificial Sequence
  Synthetic
tctgagaatcccttccacttt

SEQ ID NO: 14118 - DNA, 21 bp, Artificial Sequence
  Synthetic
ctctgagaatcccttccactt

SEQ ID NO: 14119 - DNA, 21 bp, Artificial Sequence
  Synthetic
tcctaaagtggaagggattct

SEQ ID NO: 14120 - DNA, 21 bp, Artificial Sequence
  Synthetic
tgtgtcagtgaaacttactct

SEQ ID NO: 14121 - DNA, 21 bp, Artificial Sequence
  Synthetic
tggtttcagtgaggacaacac

SEQ ID NO: 14122 - DNA, 21 bp, Artificial Sequence
  Synthetic
ggtttcagtgaggacaacaca

SEQ ID NO: 14123 - DNA, 21 bp, Artificial Sequence
  Synthetic
gtttcagtgaggacaacacat

SEQ ID NO: 14124 - DNA, 21 bp, Artificial Sequence
  Synthetic
ggctcccatgtgttgtcctca

SEQ ID NO: 14125 - DNA, 21 bp, Artificial Sequence
  Synthetic
gtgaggacaacacatgggagc

SEQ ID NO: 14126 - DNA, 21 bp, Artificial Sequence
  Synthetic
aggacaacacatgggagccag

SEQ ID NO: 14127 - DNA, 21 bp, Artificial Sequence
  Synthetic
gacaacacatgggagccagaa

SEQ ID NO: 14128 - DNA, 21 bp, Artificial Sequence
  Synthetic
acatgggagccagaagagaac

SEQ ID NO: 14129 - DNA, 21 bp, Artificial Sequence
  Synthetic
tggattgccccgacctcattg

SEQ ID NO: 14130 - DNA, 21 bp, Artificial Sequence
  Synthetic
gcagaaactcagcaatgaggt

SEQ ID NO: 14131 - DNA, 21 bp, Artificial Sequence
  Synthetic
tgcagaaactcagcaatgagg

SEQ ID NO: 14132 - DNA, 21 bp, Artificial Sequence
  Synthetic
tgtgactgcagaaactcagca

SEQ ID NO: 14133 - DNA, 21 bp, Artificial Sequence
  Synthetic
tggcttcccaggagtttgagg

SEQ ID NO: 14134 - DNA, 21 bp, Artificial Sequence
  Synthetic
gaagctattgttgacaaaaga

SEQ ID NO: 14135 - DNA, 21 bp, Artificial Sequence
  Synthetic
ttgacaaaagacaggataaaa

SEQ ID NO: 14136 - DNA, 21 bp, Artificial Sequence
  Synthetic
tgacaaaagacaggataaaaa

SEQ ID NO: 14137 - DNA, 21 bp, Artificial Sequence
  Synthetic
gacaaaagacaggataaaaat

SEQ ID NO: 14138 - DNA, 21 bp, Artificial Sequence
  Synthetic
gaatacacagtatttggttcg

SEQ ID NO: 14139 - DNA, 21 bp, Artificial Sequence
  Synthetic
aatacacagtatttggttcgg

SEQ ID NO: 14140 - DNA, 21 bp, Artificial Sequence
  Synthetic
ctgtttgtcataacctttcca

SEQ ID NO: 14141 - DNA, 21 bp, Artificial Sequence
  Synthetic
cggtggaaaggttatgacaaa

SEQ ID NO: 14142 - DNA, 21 bp, Artificial Sequence
  Synthetic
ttatgacaaacaggatgacac

SEQ ID NO: 14143 - DNA, 21 bp, Artificial Sequence
  Synthetic
tatgacaaacaggatgacact

SEQ ID NO: 14144 - DNA, 21 bp, Artificial Sequence
  Synthetic
atgacaaacaggatgacactt

SEQ ID NO: 14145 - DNA, 21 bp, Artificial Sequence
  Synthetic
aacaggatgacacttgggaac

SEQ ID NO: 14146 - DNA, 21 bp, Artificial Sequence
  Synthetic
tgggaaccagagcagcacctc

SEQ ID NO: 14147 - DNA, 21 bp, Artificial Sequence
  Synthetic
cagagcagcacctcatgaact

SEQ ID NO: 14148 - DNA, 21 bp, Artificial Sequence
  Synthetic
taccggacgcgggacatgggc

SEQ ID NO: 14149 - DNA, 21 bp, Artificial Sequence
  Synthetic
ggctggggcgtgcggtccctg

SEQ ID NO: 14150 - DNA, 21 bp, Artificial Sequence
  Synthetic
gtgcctggtgggatgtcctgc

SEQ ID NO: 14151 - DNA, 21 bp, Artificial Sequence
  Synthetic
ggtgcctggtgggatgtcctg

SEQ ID NO: 14152 - DNA, 21 bp, Artificial Sequence
  Synthetic
ctcgcagacaaaggtgcctgg

SEQ ID NO: 14153 - DNA, 21 bp, Artificial Sequence
  Synthetic
tcccaccaggcacctttgtct

SEQ ID NO: 14154 - DNA, 21 bp, Artificial Sequence
  Synthetic
actcgcagacaaaggtgcctg

SEQ ID NO: 14155 - DNA, 21 bp, Artificial Sequence
  Synthetic
accaggcacctttgtctgcga

SEQ ID NO: 14156 - DNA, 21 bp, Artificial Sequence
  Synthetic
accgcaccctctgcaggtatg

SEQ ID NO: 14157 - DNA, 21 bp, Artificial Sequence
  Synthetic
ccgcaccctctgcaggtatgt

SEQ ID NO: 14158 - DNA, 21 bp, Artificial Sequence
  Synthetic
cgcaccctctgcaggtatgtt

SEQ ID NO: 14159 - DNA, 21 bp, Artificial Sequence
  Synthetic
gcaccctctgcaggtatgttg

SEQ ID NO: 14160 - DNA, 21 bp, Artificial Sequence
  Synthetic
ttggggagctgatttcagact

SEQ ID NO: 14161 - DNA, 21 bp, Artificial Sequence
  Synthetic
ctcgaacgtcggcttctgagt

SEQ ID NO: 14162 - DNA, 21 bp, Artificial Sequence
  Synthetic
ttcagactcagaagccgacgt

SEQ ID NO: 14163 - DNA, 21 bp, Artificial Sequence
  Synthetic
cagactcagaagccgacgttc

SEQ ID NO: 14164 - DNA, 21 bp, Artificial Sequence
  Synthetic
gactcagaagccgacgttcga

SEQ ID NO: 14165 - DNA, 21 bp, Artificial Sequence
  Synthetic
actcagaagccgacgttcgag

SEQ ID NO: 14166 - DNA, 21 bp, Artificial Sequence
  Synthetic
cttcctctcgaacgtcggctt

SEQ ID NO: 14167 - DNA, 21 bp, Artificial Sequence
  Synthetic
aaagaggtaagaatcttcctc

SEQ ID NO: 14168 - DNA, 21 bp, Artificial Sequence
  Synthetic
tattgtcgagatcaaagaggt

SEQ ID NO: 14169 - DNA, 21 bp, Artificial Sequence
  Synthetic
attaccttattgtcgagatca

SEQ ID NO: 14170 - DNA, 21 bp, Artificial Sequence
  Synthetic
acaaaacacattaccttattg

SEQ ID NO: 14171 - DNA, 21 bp, Artificial Sequence
  Synthetic
ggcttctcgccctgcaggacg

SEQ ID NO: 14172 - DNA, 21 bp, Artificial Sequence
  Synthetic
actgcatcgacgcgcggttct

SEQ ID NO: 14173 - DNA, 21 bp, Artificial Sequence
  Synthetic
ctgcatcgacgcgcggttcta

SEQ ID NO: 14174 - DNA, 21 bp, Artificial Sequence
  Synthetic
tgcatcgacgcgcggttctac

SEQ ID NO: 14175 - DNA, 21 bp, Artificial Sequence
  Synthetic
atgaaccggctgacgttcccg

SEQ ID NO: 14176 - DNA, 21 bp, Artificial Sequence
  Synthetic
gccggttcatcaaccaccact

SEQ ID NO: 14177 - DNA, 21 bp, Artificial Sequence
  Synthetic
ttgggctcgcagtggtggttg

SEQ ID NO: 14178 - DNA, 21 bp, Artificial Sequence
  Synthetic
aacacgcgcacgggcaccagg

SEQ ID NO: 14179 - DNA, 21 bp, Artificial Sequence
  Synthetic
tggtgggccatgaacacgcgc

SEQ ID NO: 14180 - DNA, 21 bp, Artificial Sequence
  Synthetic
gtgcgcgtgttcatggcccac

SEQ ID NO: 14181 - DNA, 21 bp, Artificial Sequence
  Synthetic
aaccgcaggtcctggtgggcc

SEQ ID NO: 14182 - DNA, 21 bp, Artificial Sequence
  Synthetic
ccgggggaaccgcaggtcctg

SEQ ID NO: 14183 - DNA, 21 bp, Artificial Sequence
  Synthetic
ccaccaggacctgcggttccc

SEQ ID NO: 14184 - DNA, 21 bp, Artificial Sequence
  Synthetic
gtgctgaagaaggcgatccgg

SEQ ID NO: 14185 - DNA, 21 bp, Artificial Sequence
  Synthetic
ggtgctgaagaaggcgatccg

SEQ ID NO: 14186 - DNA, 21 bp, Artificial Sequence
  Synthetic
gggtgctgaagaaggcgatcc

SEQ ID NO: 14187 - DNA, 21 bp, Artificial Sequence
  Synthetic
cgggtgctgaagaaggcgatc

SEQ ID NO: 14188 - DNA, 21 bp, Artificial Sequence
  Synthetic
gcgggtgctgaagaaggcgat

SEQ ID NO: 14189 - DNA, 21 bp, Artificial Sequence
  Synthetic
ccttcttcagcacccgcctga

SEQ ID NO: 14190 - DNA, 21 bp, Artificial Sequence
  Synthetic
gcctcgatcaggcgggtgctg

SEQ ID NO: 14191 - DNA, 21 bp, Artificial Sequence
  Synthetic
ccggcctcgatcaggcgggtg

SEQ ID NO: 14192 - DNA, 21 bp, Artificial Sequence
  Synthetic
gcacccgcctgatcgaggccg

SEQ ID NO: 14193 - DNA, 21 bp, Artificial Sequence
  Synthetic
ctgctcgccggcctcgatcag

SEQ ID NO: 14194 - DNA, 21 bp, Artificial Sequence
  Synthetic
tgatcgaggccggcgagcagc

SEQ ID NO: 14195 - DNA, 21 bp, Artificial Sequence
  Synthetic
gttccctccccaggtttgact

SEQ ID NO: 14196 - DNA, 21 bp, Artificial Sequence
  Synthetic
ttccctccccaggtttgacta

SEQ ID NO: 14197 - DNA, 21 bp, Artificial Sequence
  Synthetic
ccctccccaggtttgactatg

SEQ ID NO: 14198 - DNA, 21 bp, Artificial Sequence
  Synthetic
gcgctctccatagtcaaacct

SEQ ID NO: 14199 - DNA, 21 bp, Artificial Sequence
  Synthetic
agcgctctccatagtcaaacc

SEQ ID NO: 14200 - DNA, 21 bp, Artificial Sequence
  Synthetic
aagcgctctccatagtcaaac

SEQ ID NO: 14201 - DNA, 21 bp, Artificial Sequence
  Synthetic
tttccatggcagggacatcgc

SEQ ID NO: 14202 - DNA, 21 bp, Artificial Sequence
  Synthetic
gcagggacatcgctcgaggct

SEQ ID NO: 14203 - DNA, 21 bp, Artificial Sequence
  Synthetic
gatggggatgcgctcgtagcc

SEQ ID NO: 14204 - DNA, 21 bp, Artificial Sequence
  Synthetic
cacggcgttgacacaggggat

SEQ ID NO: 14205 - DNA, 21 bp, Artificial Sequence
  Synthetic
ccacggcgttgacacagggga

SEQ ID NO: 14206 - DNA, 21 bp, Artificial Sequence
  Synthetic
tccacggcgttgacacagggg

SEQ ID NO: 14207 - DNA, 21 bp, Artificial Sequence
  Synthetic
cccatcccctgtgtcaacgcc

SEQ ID NO: 14208 - DNA, 21 bp, Artificial Sequence
  Synthetic
gctgtccacggcgttgacaca

SEQ ID NO: 14209 - DNA, 21 bp, Artificial Sequence
  Synthetic
cgctgtccacggcgttgacac

SEQ ID NO: 14210 - DNA, 21 bp, Artificial Sequence
  Synthetic
tcgctgtccacggcgttgaca

SEQ ID NO: 14211 - DNA, 21 bp, Artificial Sequence
  Synthetic
cctgtgtcaacgccgtggaca

SEQ ID NO: 14212 - DNA, 21 bp, Artificial Sequence
  Synthetic
gagagacgtacttgtagttgc

SEQ ID NO: 14213 - DNA, 21 bp, Artificial Sequence
  Synthetic
tgagagacgtacttgtagttg

SEQ ID NO: 14214 - DNA, 21 bp, Artificial Sequence
  Synthetic
agcaactacaagtacgtctct

SEQ ID NO: 14215 - DNA, 21 bp, Artificial Sequence
  Synthetic
tgggggacgtcacgcagttct

SEQ ID NO: 14216 - DNA, 21 bp, Artificial Sequence
  Synthetic
catgggggacgtcacgcagtt

SEQ ID NO: 14217 - DNA, 21 bp, Artificial Sequence
  Synthetic
cagaactgcgtgacgtccccc

SEQ ID NO: 14218 - DNA, 21 bp, Artificial Sequence
  Synthetic
gacgtcccccatgaacatcga

SEQ ID NO: 14219 - DNA, 21 bp, Artificial Sequence
  Synthetic
atatttctgtcgatgttcatg

SEQ ID NO: 14220 - DNA, 21 bp, Artificial Sequence
  Synthetic
gatatttctgtcgatgttcat

SEQ ID NO: 14221 - DNA, 21 bp, Artificial Sequence
  Synthetic
tgatatttctgtcgatgttca

SEQ ID NO: 14222 - DNA, 21 bp, Artificial Sequence
  Synthetic
gtgatatttctgtcgatgttc

SEQ ID NO: 14223 - DNA, 21 bp, Artificial Sequence
  Synthetic
agaaatatcactcatctgcag

SEQ ID NO: 14224 - DNA, 21 bp, Artificial Sequence
  Synthetic
tctgccgtcactcacctgcag

SEQ ID NO: 14225 - DNA, 21 bp, Artificial Sequence
  Synthetic
cgtcgatgcacacgcagtact

SEQ ID NO: 14226 - DNA, 21 bp, Artificial Sequence
  Synthetic
gtcgtcgatgcacacgcagta

SEQ ID NO: 14227 - DNA, 21 bp, Artificial Sequence
  Synthetic
ggccgcacatgcagttgctgg

SEQ ID NO: 14228 - DNA, 21 bp, Artificial Sequence
  Synthetic
tggccgcacatgcagttgctg

SEQ ID NO: 14229 - DNA, 21 bp, Artificial Sequence
  Synthetic
gctggccgcacatgcagttgc

SEQ ID NO: 14230 - DNA, 21 bp, Artificial Sequence
  Synthetic
agctggccgcacatgcagttg

SEQ ID NO: 14231 - DNA, 21 bp, Artificial Sequence
  Synthetic
ttgtcgtaccagcagcgcatg

SEQ ID NO: 14232 - DNA, 21 bp, Artificial Sequence
  Synthetic
atgcgctgctggtacgacaag

SEQ ID NO: 14233 - DNA, 21 bp, Artificial Sequence
  Synthetic
gcgctgctggtacgacaaggt

SEQ ID NO: 14234 - DNA, 21 bp, Artificial Sequence
  Synthetic
ctggcaggagccggccatcct

SEQ ID NO: 14235 - DNA, 21 bp, Artificial Sequence
  Synthetic
cacaggatggccggctcctgc

SEQ ID NO: 14236 - DNA, 21 bp, Artificial Sequence
  Synthetic
tccgccatgttgaactctggc

SEQ ID NO: 14237 - DNA, 21 bp, Artificial Sequence
  Synthetic
ctcctgccagagttcaacatg

SEQ ID NO: 14238 - DNA, 21 bp, Artificial Sequence
  Synthetic
ctccgccatgttgaactctgg

SEQ ID NO: 14239 - DNA, 21 bp, Artificial Sequence
  Synthetic
tcctgccagagttcaacatgg

SEQ ID NO: 14240 - DNA, 21 bp, Artificial Sequence
  Synthetic
atcaagggaggctccgccatg

SEQ ID NO: 14241 - DNA, 21 bp, Artificial Sequence
  Synthetic
tggcggagcctcccttgatct

SEQ ID NO: 14242 - DNA, 21 bp, Artificial Sequence
  Synthetic
gtggttgcattcgaagatcaa

SEQ ID NO: 14243 - DNA, 21 bp, Artificial Sequence
  Synthetic
cgtggttgcattcgaagatca

SEQ ID NO: 14244 - DNA, 21 bp, Artificial Sequence
  Synthetic
gcgtggttgcattcgaagatc

SEQ ID NO: 14245 - DNA, 21 bp, Artificial Sequence
  Synthetic
caggagcacgcgtggttgcat

SEQ ID NO: 14246 - DNA, 21 bp, Artificial Sequence
  Synthetic
atgcaaccacgcgtgctcctg

SEQ ID NO: 14247 - DNA, 21 bp, Artificial Sequence
  Synthetic
tgcaaccacgcgtgctcctgc

SEQ ID NO: 14248 - DNA, 21 bp, Artificial Sequence
  Synthetic
caaccacgcgtgctcctgctg

SEQ ID NO: 14249 - DNA, 21 bp, Artificial Sequence
  Synthetic
aaccacgcgtgctcctgctgg

SEQ ID NO: 14250 - DNA, 21 bp, Artificial Sequence
  Synthetic
gtgctcctgctggaggaactg

SEQ ID NO: 14251 - DNA, 21 bp, Artificial Sequence
  Synthetic
gatttcggcagttcctccagc

SEQ ID NO: 14252 - DNA, 21 bp, Artificial Sequence
  Synthetic
cgatttcggcagttcctccag

SEQ ID NO: 14253 - DNA, 21 bp, Artificial Sequence
  Synthetic
agatgccaccatcatttgcct

SEQ ID NO: 14254 - DNA, 21 bp, Artificial Sequence
  Synthetic
tggcatctggcaatcaattag

SEQ ID NO: 14255 - DNA, 21 bp, Artificial Sequence
  Synthetic
ggcaatcaattagtagaatgt

SEQ ID NO: 14256 - DNA, 21 bp, Artificial Sequence
  Synthetic
gcaatcaattagtagaatgtc

SEQ ID NO: 14257 - DNA, 21 bp, Artificial Sequence
  Synthetic
ggagtgccataatctctacca

SEQ ID NO: 14258 - DNA, 21 bp, Artificial Sequence
  Synthetic
ggtttatgacaatctcggtgg

SEQ ID NO: 14259 - DNA, 21 bp, Artificial Sequence
  Synthetic
cataaaccccaggtgacagac

SEQ ID NO: 14260 - DNA, 21 bp, Artificial Sequence
  Synthetic
ataaaccccaggtgacagaca

SEQ ID NO: 14261 - DNA, 21 bp, Artificial Sequence
  Synthetic
ttcgcttccttgtctgtcacc

SEQ ID NO: 14262 - DNA, 21 bp, Artificial Sequence
  Synthetic
ccccaggtgacagacaaggaa

SEQ ID NO: 14263 - DNA, 21 bp, Artificial Sequence
  Synthetic
attcgcttccttgtctgtcac

SEQ ID NO: 14264 - DNA, 21 bp, Artificial Sequence
  Synthetic
gggcacaataccacaccaggc

SEQ ID NO: 14265 - DNA, 21 bp, Artificial Sequence
  Synthetic
tcgggcacaataccacaccag

SEQ ID NO: 14266 - DNA, 21 bp, Artificial Sequence
  Synthetic
taccgaacagccaagatgggc

SEQ ID NO: 14267 - DNA, 21 bp, Artificial Sequence
  Synthetic
accgaacagccaagatgggct

SEQ ID NO: 14268 - DNA, 21 bp, Artificial Sequence
  Synthetic
ccgaacagccaagatgggctg

SEQ ID NO: 14269 - DNA, 21 bp, Artificial Sequence
  Synthetic
ctgtgggatggtctgcagggc

SEQ ID NO: 14270 - DNA, 21 bp, Artificial Sequence
  Synthetic
cgcgccctgcagaccatccca

SEQ ID NO: 14271 - DNA, 21 bp, Artificial Sequence
  Synthetic
gcgccctgcagaccatcccac

SEQ ID NO: 14272 - DNA, 21 bp, Artificial Sequence
  Synthetic
cgccctgcagaccatcccaca

SEQ ID NO: 14273 - DNA, 21 bp, Artificial Sequence
  Synthetic
ggtcccctgtgggatggtctg

SEQ ID NO: 14274 - DNA, 21 bp, Artificial Sequence
  Synthetic
ctcgcagatgaaggtcccctg

SEQ ID NO: 14275 - DNA, 21 bp, Artificial Sequence
  Synthetic
tcccacaggggaccttcatct

SEQ ID NO: 14276 - DNA, 21 bp, Artificial Sequence
  Synthetic
actcgcagatgaaggtcccct

SEQ ID NO: 14277 - DNA, 21 bp, Artificial Sequence
  Synthetic
ctcccggtgacttactcgcag

SEQ ID NO: 14278 - DNA, 21 bp, Artificial Sequence
  Synthetic
gattcctgtcccacaggtatg

SEQ ID NO: 14279 - DNA, 21 bp, Artificial Sequence
  Synthetic
attcctgtcccacaggtatgt

SEQ ID NO: 14280 - DNA, 21 bp, Artificial Sequence
  Synthetic
ttcctgtcccacaggtatgtc

SEQ ID NO: 14281 - DNA, 21 bp, Artificial Sequence
  Synthetic
tcctgtcccacaggtatgtcg

SEQ ID NO: 14282 - DNA, 21 bp, Artificial Sequence
  Synthetic
gatcagctccccgacatacct

SEQ ID NO: 14283 - DNA, 21 bp, Artificial Sequence
  Synthetic
tcggggagctgatctctgatg

SEQ ID NO: 14284 - DNA, 21 bp, Artificial Sequence
  Synthetic
atctctgatgctgaggctgat

SEQ ID NO: 14285 - DNA, 21 bp, Artificial Sequence
  Synthetic
ctctcacatcagcctcagcat

SEQ ID NO: 14286 - DNA, 21 bp, Artificial Sequence
  Synthetic
ctctgatgctgaggctgatgt

SEQ ID NO: 14287 - DNA, 21 bp, Artificial Sequence
  Synthetic
ctgatgctgaggctgatgtga

SEQ ID NO: 14288 - DNA, 21 bp, Artificial Sequence
  Synthetic
gatgctgaggctgatgtgaga

SEQ ID NO: 14289 - DNA, 21 bp, Artificial Sequence
  Synthetic
tgttgtctaagtcgaagaggt

SEQ ID NO: 14290 - DNA, 21 bp, Artificial Sequence
  Synthetic
ctcaccttgttgtctaagtcg

SEQ ID NO: 14291 - DNA, 21 bp, Artificial Sequence
  Synthetic
ctcttcgacttagacaacaag

SEQ ID NO: 14292 - DNA, 21 bp, Artificial Sequence
  Synthetic
ctgctcaccttgttgtctaag

SEQ ID NO: 14293 - DNA, 21 bp, Artificial Sequence
  Synthetic
ccatccccctgccccaggatg

SEQ ID NO: 14294 - DNA, 21 bp, Artificial Sequence
  Synthetic
atgcagtacacctctccatcc

SEQ ID NO: 14295 - DNA, 21 bp, Artificial Sequence
  Synthetic
tatgcagtacacctctccatc

SEQ ID NO: 14296 - DNA, 21 bp, Artificial Sequence
  Synthetic
gcggctgatgttgccatagta

SEQ ID NO: 14297 - DNA, 21 bp, Artificial Sequence
  Synthetic
ttggggtcacacaggtggttg

SEQ ID NO: 14298 - DNA, 21 bp, Artificial Sequence
  Synthetic
tgaccccaacatcattcccgt

SEQ ID NO: 14299 - DNA, 21 bp, Artificial Sequence
  Synthetic
agacccggacgggaatgatgt

SEQ ID NO: 14300 - DNA, 21 bp, Artificial Sequence
  Synthetic
aagacccggacgggaatgatg

SEQ ID NO: 14301 - DNA, 21 bp, Artificial Sequence
  Synthetic
gtgcagcatgaagacccggac

SEQ ID NO: 14302 - DNA, 21 bp, Artificial Sequence
  Synthetic
ggtgcagcatgaagacccgga

SEQ ID NO: 14303 - DNA, 21 bp, Artificial Sequence
  Synthetic
tggtgcagcatgaagacccgg

SEQ ID NO: 14304 - DNA, 21 bp, Artificial Sequence
  Synthetic
gtcttggtgcagcatgaagac

SEQ ID NO: 14305 - DNA, 21 bp, Artificial Sequence
  Synthetic
aatcgcaggtcttggtgcagc

SEQ ID NO: 14306 - DNA, 21 bp, Artificial Sequence
  Synthetic
ggaactgaagaaggcgatgcg

SEQ ID NO: 14307 - DNA, 21 bp, Artificial Sequence
  Synthetic
gggaactgaagaaggcgatgc

SEQ ID NO: 14308 - DNA, 21 bp, Artificial Sequence
  Synthetic
acgcatcgccttcttcagttc

SEQ ID NO: 14309 - DNA, 21 bp, Artificial Sequence
  Synthetic
cttcttcagttcccgagacat

SEQ ID NO: 14310 - DNA, 21 bp, Artificial Sequence
  Synthetic
gtccggatgtctcgggaactg

SEQ ID NO: 14311 - DNA, 21 bp, Artificial Sequence
  Synthetic
ccagtccggatgtctcgggaa

SEQ ID NO: 14312 - DNA, 21 bp, Artificial Sequence
  Synthetic
tcagttcccgagacatccgga

SEQ ID NO: 14313 - DNA, 21 bp, Artificial Sequence
  Synthetic
cagttcccgagacatccggac

SEQ ID NO: 14314 - DNA, 21 bp, Artificial Sequence
  Synthetic
agttcccgagacatccggact

SEQ ID NO: 14315 - DNA, 21 bp, Artificial Sequence
  Synthetic
gttcccgagacatccggactg

SEQ ID NO: 14316 - DNA, 21 bp, Artificial Sequence
  Synthetic
cctccccagtccggatgtctc

SEQ ID NO: 14317 - DNA, 21 bp, Artificial Sequence
  Synthetic
tcctccccagtccggatgtct

SEQ ID NO: 14318 - DNA, 21 bp, Artificial Sequence
  Synthetic
tcccgagacatccggactggg

SEQ ID NO: 14319 - DNA, 21 bp, Artificial Sequence
  Synthetic
ctcctccccagtccggatgtc

SEQ ID NO: 14320 - DNA, 21 bp, Artificial Sequence
  Synthetic
cccgagacatccggactgggg

SEQ ID NO: 14321 - DNA, 21 bp, Artificial Sequence
  Synthetic
acatccggactggggaggagc

SEQ ID NO: 14322 - DNA, 21 bp, Artificial Sequence
  Synthetic
tcaccctagctcctccccagt

SEQ ID NO: 14323 - DNA, 21 bp, Artificial Sequence
  Synthetic
ccggactggggaggagctagg

SEQ ID NO: 14324 - DNA, 21 bp, Artificial Sequence
  Synthetic
cgtcttctgcagggacgtggc

SEQ ID NO: 14325 - DNA, 21 bp, Artificial Sequence
  Synthetic
gtcttctgcagggacgtggct

SEQ ID NO: 14326 - DNA, 21 bp, Artificial Sequence
  Synthetic
gcagggacgtggctcggggct

SEQ ID NO: 14327 - DNA, 21 bp, Artificial Sequence
  Synthetic
agggacgtggctcggggctat

SEQ ID NO: 14328 - DNA, 21 bp, Artificial Sequence
  Synthetic
aatgggcacgttctcatagcc

SEQ ID NO: 14329 - DNA, 21 bp, Artificial Sequence
  Synthetic
tccacaccgttgacacaggga

SEQ ID NO: 14330 - DNA, 21 bp, Artificial Sequence
  Synthetic
cccattccctgtgtcaacggt

SEQ ID NO: 14331 - DNA, 21 bp, Artificial Sequence
  Synthetic
cccatccacaccgttgacaca

SEQ ID NO: 14332 - DNA, 21 bp, Artificial Sequence
  Synthetic
ttccctgtgtcaacggtgtgg

SEQ ID NO: 14333 - DNA, 21 bp, Artificial Sequence
  Synthetic
ccccatccacaccgttgacac

SEQ ID NO: 14334 - DNA, 21 bp, Artificial Sequence
  Synthetic
tccctgtgtcaacggtgtgga

SEQ ID NO: 14335 - DNA, 21 bp, Artificial Sequence
  Synthetic
tccccatccacaccgttgaca

SEQ ID NO: 14336 - DNA, 21 bp, Artificial Sequence
  Synthetic
ccctgtgtcaacggtgtggat

SEQ ID NO: 14337 - DNA, 21 bp, Artificial Sequence
  Synthetic
cctgtgtcaacggtgtggatg

SEQ ID NO: 14338 - DNA, 21 bp, Artificial Sequence
  Synthetic
gtgtggatggggagccctgcc

SEQ ID NO: 14339 - DNA, 21 bp, Artificial Sequence
  Synthetic
gtggatggggagccctgccct

SEQ ID NO: 14340 - DNA, 21 bp, Artificial Sequence
  Synthetic
atgtacttgtaatcctcaggg

SEQ ID NO: 14341 - DNA, 21 bp, Artificial Sequence
  Synthetic
ctgagatgtacttgtaatcct

SEQ ID NO: 14342 - DNA, 21 bp, Artificial Sequence
  Synthetic
ctgaggattacaagtacatct

SEQ ID NO: 14343 - DNA, 21 bp, Artificial Sequence
  Synthetic
gaggattacaagtacatctca

SEQ ID NO: 14344 - DNA, 21 bp, Artificial Sequence
  Synthetic
acaagtacatctcagagaact

SEQ ID NO: 14345 - DNA, 21 bp, Artificial Sequence
  Synthetic
tggtggacgtctcgcagttct

SEQ ID NO: 14346 - DNA, 21 bp, Artificial Sequence
  Synthetic
gagaactgcgagacgtccacc

SEQ ID NO: 14347 - DNA, 21 bp, Artificial Sequence
  Synthetic
atgttgcgatcgatgttcatg

SEQ ID NO: 14348 - DNA, 21 bp, Artificial Sequence
  Synthetic
cgcaacatcacccacctgcag

SEQ ID NO: 14349 - DNA, 21 bp, Artificial Sequence
  Synthetic
gggccccctactcacctgcag

SEQ ID NO: 14350 - DNA, 21 bp, Artificial Sequence
  Synthetic
tcgccccagcactgcacgtgt

SEQ ID NO: 14351 - DNA, 21 bp, Artificial Sequence
  Synthetic
tcgtccacacacgtgcagtgc

SEQ ID NO: 14352 - DNA, 21 bp, Artificial Sequence
  Synthetic
gtcgtccacacacgtgcagtg

SEQ ID NO: 14353 - DNA, 21 bp, Artificial Sequence
  Synthetic
ggccgcacaggcagttggagc

SEQ ID NO: 14354 - DNA, 21 bp, Artificial Sequence
  Synthetic
tgagctggccgcacaggcagt

SEQ ID NO: 14355 - DNA, 21 bp, Artificial Sequence
  Synthetic
ctgagctggccgcacaggcag

SEQ ID NO: 14356 - DNA, 21 bp, Artificial Sequence
  Synthetic
ttgtcataccagcaccggatg

SEQ ID NO: 14357 - DNA, 21 bp, Artificial Sequence
  Synthetic
acgcaccttgtcataccagca

SEQ ID NO: 14358 - DNA, 21 bp, Artificial Sequence
  Synthetic
tcctggagcaatcgcccatcc

SEQ ID NO: 14359 - DNA, 21 bp, Artificial Sequence
  Synthetic
ccctaggatgggcgattgctc

SEQ ID NO: 14360 - DNA, 21 bp, Artificial Sequence
  Synthetic
cctaggatgggcgattgctcc

SEQ ID NO: 14361 - DNA, 21 bp, Artificial Sequence
  Synthetic
tgctccaggaatttaacaaga

SEQ ID NO: 14362 - DNA, 21 bp, Artificial Sequence
  Synthetic
ggctcaatcttgttaaattcc

SEQ ID NO: 14363 - DNA, 21 bp, Artificial Sequence
  Synthetic
aggctcaatcttgttaaattc

SEQ ID NO: 14364 - DNA, 21 bp, Artificial Sequence
  Synthetic
agattgagcctccgctgattt

SEQ ID NO: 14365 - DNA, 21 bp, Artificial Sequence
  Synthetic
ctggttacactcgaaaatcag

SEQ ID NO: 14366 - DNA, 21 bp, Artificial Sequence
  Synthetic
cctggttacactcgaaaatca

SEQ ID NO: 14367 - DNA, 21 bp, Artificial Sequence
  Synthetic
catgagcacgcctggttacac

SEQ ID NO: 14368 - DNA, 21 bp, Artificial Sequence
  Synthetic
gtgtaaccaggcgtgctcatg

SEQ ID NO: 14369 - DNA, 21 bp, Artificial Sequence
  Synthetic
tgtaaccaggcgtgctcatgc

SEQ ID NO: 14370 - DNA, 21 bp, Artificial Sequence
  Synthetic
taaccaggcgtgctcatgctg

SEQ ID NO: 14371 - DNA, 21 bp, Artificial Sequence
  Synthetic
tgctcatgctggagaaactgc

SEQ ID NO: 14372 - DNA, 21 bp, Artificial Sequence
  Synthetic
ggttcttgcagtttctccagc

SEQ ID NO: 14373 - DNA, 21 bp, Artificial Sequence
  Synthetic
atgctggagaaactgcaagaa

SEQ ID NO: 14374 - DNA, 21 bp, Artificial Sequence
  Synthetic
ccattctgtaggtggtttgtg

SEQ ID NO: 14375 - DNA, 21 bp, Artificial Sequence
  Synthetic
cattctgtaggtggtttgtga

SEQ ID NO: 14376 - DNA, 21 bp, Artificial Sequence
  Synthetic
ttgtgatggggccaccacgct

SEQ ID NO: 14377 - DNA, 21 bp, Artificial Sequence
  Synthetic
tgtgatggggccaccacgctc

SEQ ID NO: 14378 - DNA, 21 bp, Artificial Sequence
  Synthetic
tggggccaccacgctccggaa

SEQ ID NO: 14379 - DNA, 21 bp, Artificial Sequence
  Synthetic
ggggccaccacgctccggaac

SEQ ID NO: 14380 - DNA, 21 bp, Artificial Sequence
  Synthetic
ggtcgatgtgaatcccagttc

SEQ ID NO: 14381 - DNA, 21 bp, Artificial Sequence
  Synthetic
gggtcgatgtgaatcccagtt

SEQ ID NO: 14382 - DNA, 21 bp, Artificial Sequence
  Synthetic
actgggattcacatcgaccct

SEQ ID NO: 14383 - DNA, 21 bp, Artificial Sequence
  Synthetic
ctgggattcacatcgaccctc

SEQ ID NO: 14384 - DNA, 21 bp, Artificial Sequence
  Synthetic
tgggattcacatcgaccctct

SEQ ID NO: 14385 - DNA, 21 bp, Artificial Sequence
  Synthetic
actggttcccagagggtcgat

SEQ ID NO: 14386 - DNA, 21 bp, Artificial Sequence
  Synthetic
cgaccctctgggaaccagtgc

SEQ ID NO: 14387 - DNA, 21 bp, Artificial Sequence
  Synthetic
gaccctctgggaaccagtgcc

SEQ ID NO: 14388 - DNA, 21 bp, Artificial Sequence
  Synthetic
cattccaggcactggttccca

SEQ ID NO: 14389 - DNA, 21 bp, Artificial Sequence
  Synthetic
ggcattccaggcactggttcc

SEQ ID NO: 14390 - DNA, 21 bp, Artificial Sequence
  Synthetic
agtgcctggaatgccttagtt

SEQ ID NO: 14391 - DNA, 21 bp, Artificial Sequence
  Synthetic
caggcaccagcgcttgtggcc

SEQ ID NO: 14392 - DNA, 21 bp, Artificial Sequence
  Synthetic
cctgtttcctaccagcactcc

SEQ ID NO: 14393 - DNA, 21 bp, Artificial Sequence
  Synthetic
ctgtttcctaccagcactccc

SEQ ID NO: 14394 - DNA, 21 bp, Artificial Sequence
  Synthetic
tgtttcctaccagcactccca

SEQ ID NO: 14395 - DNA, 21 bp, Artificial Sequence
  Synthetic
gagttccctgggagtgctggt

SEQ ID NO: 14396 - DNA, 21 bp, Artificial Sequence
  Synthetic
tgagttccctgggagtgctgg

SEQ ID NO: 14397 - DNA, 21 bp, Artificial Sequence
  Synthetic
ggtcactttgatgagttccct

SEQ ID NO: 14398 - DNA, 21 bp, Artificial Sequence
  Synthetic
gggtcactttgatgagttccc

SEQ ID NO: 14399 - DNA, 21 bp, Artificial Sequence
  Synthetic
cgggtcactttgatgagttcc

SEQ ID NO: 14400 - DNA, 21 bp, Artificial Sequence
  Synthetic
cagggaactcatcaaagtgac

SEQ ID NO: 14401 - DNA, 21 bp, Artificial Sequence
  Synthetic
aactcatcaaagtgacccgag

SEQ ID NO: 14402 - DNA, 21 bp, Artificial Sequence
  Synthetic
ccttcgtctcgggtcactttg

SEQ ID NO: 14403 - DNA, 21 bp, Artificial Sequence
  Synthetic
tcatcaaagtgacccgagacg

SEQ ID NO: 14404 - DNA, 21 bp, Artificial Sequence
  Synthetic
catcaaagtgacccgagacga

SEQ ID NO: 14405 - DNA, 21 bp, Artificial Sequence
  Synthetic
tcaaagtgacccgagacgaag

SEQ ID NO: 14406 - DNA, 21 bp, Artificial Sequence
  Synthetic
caaagtgacccgagacgaagg

SEQ ID NO: 14407 - DNA, 21 bp, Artificial Sequence
  Synthetic
aaagtgacccgagacgaagga

SEQ ID NO: 14408 - DNA, 21 bp, Artificial Sequence
  Synthetic
ttgctggttccctccttcgtc

SEQ ID NO: 14409 - DNA, 21 bp, Artificial Sequence
  Synthetic
acgaaggagggaaccagcaag

SEQ ID NO: 14410 - DNA, 21 bp, Artificial Sequence
  Synthetic
ctggtttaatgttatttatcc

SEQ ID NO: 14411 - DNA, 21 bp, Artificial Sequence
  Synthetic
gccaggttggaagctgtgtcc

SEQ ID NO: 14412 - DNA, 21 bp, Artificial Sequence
  Synthetic
ggccaggttggaagctgtgtc

SEQ ID NO: 14413 - DNA, 21 bp, Artificial Sequence
  Synthetic
tggccaggttggaagctgtgt

SEQ ID NO: 14414 - DNA, 21 bp, Artificial Sequence
  Synthetic
cacagcttccaacctggccac

SEQ ID NO: 14415 - DNA, 21 bp, Artificial Sequence
  Synthetic
tttgaattcaggtggccaggt

SEQ ID NO: 14416 - DNA, 21 bp, Artificial Sequence
  Synthetic
gtttgaattcaggtggccagg

SEQ ID NO: 14417 - DNA, 21 bp, Artificial Sequence
  Synthetic
tggccacctgaattcaaaccc

SEQ ID NO: 14418 - DNA, 21 bp, Artificial Sequence
  Synthetic
ggccacctgaattcaaacccc

SEQ ID NO: 14419 - DNA, 21 bp, Artificial Sequence
  Synthetic
ccctggaaatcttacaaaaac

SEQ ID NO: 14420 - DNA, 21 bp, Artificial Sequence
  Synthetic
cctggaaatcttacaaaaacc

SEQ ID NO: 14421 - DNA, 21 bp, Artificial Sequence
  Synthetic
tggaaatcttacaaaaaccag

SEQ ID NO: 14422 - DNA, 21 bp, Artificial Sequence
  Synthetic
ggacaacatgccaccagcctc

SEQ ID NO: 14423 - DNA, 21 bp, Artificial Sequence
  Synthetic
ggcgatagtagtgtcgagatt

SEQ ID NO: 14424 - DNA, 21 bp, Artificial Sequence
  Synthetic
atggcgatagtagtgtcgaga

SEQ ID NO: 14425 - DNA, 21 bp, Artificial Sequence
  Synthetic
tgggtgatggcgatagtagtg

SEQ ID NO: 14426 - DNA, 21 bp, Artificial Sequence
  Synthetic
gttggtgctgctggcaaaatt

SEQ ID NO: 14427 - DNA, 21 bp, Artificial Sequence
  Synthetic
ggacatggccgccaacatgta

SEQ ID NO: 14428 - DNA, 21 bp, Artificial Sequence
  Synthetic
tggccgccaacatgtacaggg

SEQ ID NO: 14429 - DNA, 21 bp, Artificial Sequence
  Synthetic
ggccgccaacatgtacagggt

SEQ ID NO: 14430 - DNA, 21 bp, Artificial Sequence
  Synthetic
tgtttgcagactacgtctact

SEQ ID NO: 14431 - DNA, 21 bp, Artificial Sequence
  Synthetic
tttgcagactacgtctacttt

SEQ ID NO: 14432 - DNA, 21 bp, Artificial Sequence
  Synthetic
ggatcaggtatgggttgctgg

SEQ ID NO: 14433 - DNA, 21 bp, Artificial Sequence
  Synthetic
cggatcaggtatgggttgctg

SEQ ID NO: 14434 - DNA, 21 bp, Artificial Sequence
  Synthetic
tccggatcaggtatgggttgc

SEQ ID NO: 14435 - DNA, 21 bp, Artificial Sequence
  Synthetic
ctccagcaacccatacctgat

SEQ ID NO: 14436 - DNA, 21 bp, Artificial Sequence
  Synthetic
ctccggatcaggtatgggttg

SEQ ID NO: 14437 - DNA, 21 bp, Artificial Sequence
  Synthetic
tccagcaacccatacctgatc

SEQ ID NO: 14438 - DNA, 21 bp, Artificial Sequence
  Synthetic
cagcaacccatacctgatccg

SEQ ID NO: 14439 - DNA, 21 bp, Artificial Sequence
  Synthetic
acccatacctgatccggagaa

SEQ ID NO: 14440 - DNA, 21 bp, Artificial Sequence
  Synthetic
cctcgattctccggatcaggt

SEQ ID NO: 14441 - DNA, 21 bp, Artificial Sequence
  Synthetic
ccatacctgatccggagaatc

SEQ ID NO: 14442 - DNA, 21 bp, Artificial Sequence
  Synthetic
catacctgatccggagaatcg

SEQ ID NO: 14443 - DNA, 21 bp, Artificial Sequence
  Synthetic
cttgttgagctcctcgattct

SEQ ID NO: 14444 - DNA, 21 bp, Artificial Sequence
  Synthetic
ccagggccccccagtaccttg

SEQ ID NO: 14445 - DNA, 21 bp, Artificial Sequence
  Synthetic
ccttgctgttacagacggcca

SEQ ID NO: 14446 - DNA, 21 bp, Artificial Sequence
  Synthetic
cttgctgttacagacggccaa

SEQ ID NO: 14447 - DNA, 21 bp, Artificial Sequence
  Synthetic
ttgctgttacagacggccaat

SEQ ID NO: 14448 - DNA, 21 bp, Artificial Sequence
  Synthetic
ttacagacggccaatgggaac

SEQ ID NO: 14449 - DNA, 21 bp, Artificial Sequence
  Synthetic
tacagacggccaatgggaacg

SEQ ID NO: 14450 - DNA, 21 bp, Artificial Sequence
  Synthetic
ggccaaagtggtgtgcttcta

SEQ ID NO: 14451 - DNA, 21 bp, Artificial Sequence
  Synthetic
gccaaagtggtgtgcttctac

SEQ ID NO: 14452 - DNA, 21 bp, Artificial Sequence
  Synthetic
agtggtgtgcttctaccggag

SEQ ID NO: 14453 - DNA, 21 bp, Artificial Sequence
  Synthetic
gtggtgtgcttctaccggagg

SEQ ID NO: 14454 - DNA, 21 bp, Artificial Sequence
  Synthetic
ctggagatgtcccgcctccgg

SEQ ID NO: 14455 - DNA, 21 bp, Artificial Sequence
  Synthetic
cggccagggcgatgagggtgc

SEQ ID NO: 14456 - DNA, 21 bp, Artificial Sequence
  Synthetic
tcggccagggcgatgagggtg

SEQ ID NO: 14457 - DNA, 21 bp, Artificial Sequence
  Synthetic
gtgcttgtcggccagggcgat

SEQ ID NO: 14458 - DNA, 21 bp, Artificial Sequence
  Synthetic
gcgtgcttgtcggccagggcg

SEQ ID NO: 14459 - DNA, 21 bp, Artificial Sequence
  Synthetic
ctcacttgcgtgcttgtcggc

SEQ ID NO: 14460 - DNA, 21 bp, Artificial Sequence
  Synthetic
ccctggccgacaagcacgcaa

SEQ ID NO: 14461 - DNA, 21 bp, Artificial Sequence
  Synthetic
tccggccttatagcagactga

SEQ ID NO: 14462 - DNA, 21 bp, Artificial Sequence
  Synthetic
ccctgtcagtctgctataagg

SEQ ID NO: 14463 - DNA, 21 bp, Artificial Sequence
  Synthetic
tcagtctgctataaggccgga

SEQ ID NO: 14464 - DNA, 21 bp, Artificial Sequence
  Synthetic
cagtctgctataaggccggac

SEQ ID NO: 14465 - DNA, 21 bp, Artificial Sequence
  Synthetic
agtctgctataaggccggacc

SEQ ID NO: 14466 - DNA, 21 bp, Artificial Sequence
  Synthetic
tgctataaggccggaccgggg

SEQ ID NO: 14467 - DNA, 21 bp, Artificial Sequence
  Synthetic
ccggaccgggggcggacaacg

SEQ ID NO: 14468 - DNA, 21 bp, Artificial Sequence
  Synthetic
ggaccgggggcggacaacggc

SEQ ID NO: 14469 - DNA, 21 bp, Artificial Sequence
  Synthetic
gaccgggggcggacaacggcg

SEQ ID NO: 14470 - DNA, 21 bp, Artificial Sequence
  Synthetic
gcggacaacggcgaggaaggt

SEQ ID NO: 14471 - DNA, 21 bp, Artificial Sequence
  Synthetic
ctccttgtccttcaggggaaa

SEQ ID NO: 14472 - DNA, 21 bp, Artificial Sequence
  Synthetic
cttgtccttcaggggaaatag

SEQ ID NO: 14473 - DNA, 21 bp, Artificial Sequence
  Synthetic
tgtccttcaggggaaatagaa

SEQ ID NO: 14474 - DNA, 21 bp, Artificial Sequence
  Synthetic
gtccttcaggggaaatagaag

SEQ ID NO: 14475 - DNA, 21 bp, Artificial Sequence
  Synthetic
ccatttcctcttctatttccc

SEQ ID NO: 14476 - DNA, 21 bp, Artificial Sequence
  Synthetic
tcaggggaaatagaagaggaa

SEQ ID NO: 14477 - DNA, 21 bp, Artificial Sequence
  Synthetic
caggggaaatagaagaggaaa

SEQ ID NO: 14478 - DNA, 21 bp, Artificial Sequence
  Synthetic
ggggaaatagaagaggaaatg

SEQ ID NO: 14479 - DNA, 21 bp, Artificial Sequence
  Synthetic
atagaagaggaaatggagaac

SEQ ID NO: 14480 - DNA, 21 bp, Artificial Sequence
  Synthetic
tagaagaggaaatggagaacc

SEQ ID NO: 14481 - DNA, 21 bp, Artificial Sequence
  Synthetic
gaaatggagaacccggaaatg

SEQ ID NO: 14482 - DNA, 21 bp, Artificial Sequence
  Synthetic
acccggaaatggtggacctgc

SEQ ID NO: 14483 - DNA, 21 bp, Artificial Sequence
  Synthetic
tctcgggcaggtccaccattt

SEQ ID NO: 14484 - DNA, 21 bp, Artificial Sequence
  Synthetic
ccggaaatggtggacctgccc

SEQ ID NO: 14485 - DNA, 21 bp, Artificial Sequence
  Synthetic
cgcagctggtgctttagtttc

SEQ ID NO: 14486 - DNA, 21 bp, Artificial Sequence
  Synthetic
actaaagcaccagctgcggca

SEQ ID NO: 14487 - DNA, 21 bp, Artificial Sequence
  Synthetic
ctaaagcaccagctgcggcat

SEQ ID NO: 14488 - DNA, 21 bp, Artificial Sequence
  Synthetic
taaagcaccagctgcggcatc

SEQ ID NO: 14489 - DNA, 21 bp, Artificial Sequence
  Synthetic
gagctgttcctctcccggcag

SEQ ID NO: 14490 - DNA, 21 bp, Artificial Sequence
  Synthetic
agctgttcctctcccggcagc

SEQ ID NO: 14491 - DNA, 21 bp, Artificial Sequence
  Synthetic
agagactccagctgccgggag

SEQ ID NO: 14492 - DNA, 21 bp, Artificial Sequence
  Synthetic
cagagactccagctgccggga

SEQ ID NO: 14493 - DNA, 21 bp, Artificial Sequence
  Synthetic
ggcagagactccagctgccgg

SEQ ID NO: 14494 - DNA, 21 bp, Artificial Sequence
  Synthetic
cgggcagagactccagctgcc

SEQ ID NO: 14495 - DNA, 21 bp, Artificial Sequence
  Synthetic
gcgggcagagactccagctgc

SEQ ID NO: 14496 - DNA, 21 bp, Artificial Sequence
  Synthetic
ggcgggcagagactccagctg

SEQ ID NO: 14497 - DNA, 21 bp, Artificial Sequence
  Synthetic
ctacctgatgtgcgtggcggg

SEQ ID NO: 14498 - DNA, 21 bp, Artificial Sequence
  Synthetic
gggggctacctgatgtgcgtg

SEQ ID NO: 14499 - DNA, 21 bp, Artificial Sequence
  Synthetic
gggtgacgctgcacttgcccc

SEQ ID NO: 14500 - DNA, 21 bp, Artificial Sequence
  Synthetic
agggtgacgctgcacttgccc

SEQ ID NO: 14501 - DNA, 21 bp, Artificial Sequence
  Synthetic
agtgcagcgtcaccctgctca

SEQ ID NO: 14502 - DNA, 21 bp, Artificial Sequence
  Synthetic
gcgtcaccctgctcaacgaga

SEQ ID NO: 14503 - DNA, 21 bp, Artificial Sequence
  Synthetic
gagcgactcggtctcgttgag

SEQ ID NO: 14504 - DNA, 21 bp, Artificial Sequence
  Synthetic
gacttgagcgactcggtctcg

SEQ ID NO: 14505 - DNA, 21 bp, Artificial Sequence
  Synthetic
accgagtcgctcaagtcctac

SEQ ID NO: 14506 - DNA, 21 bp, Artificial Sequence
  Synthetic
ccgagtcgctcaagtcctacc

SEQ ID NO: 14507 - DNA, 21 bp, Artificial Sequence
  Synthetic
gtcgctcaagtcctacctgga

SEQ ID NO: 14508 - DNA, 21 bp, Artificial Sequence
  Synthetic
tcgctcaagtcctacctggag

SEQ ID NO: 14509 - DNA, 21 bp, Artificial Sequence
  Synthetic
cgctcaagtcctacctggagc

SEQ ID NO: 14510 - DNA, 21 bp, Artificial Sequence
  Synthetic
acctcccgctccaggtaggac

SEQ ID NO: 14511 - DNA, 21 bp, Artificial Sequence
  Synthetic
aagtcctacctggagcgggag

SEQ ID NO: 14512 - DNA, 21 bp, Artificial Sequence
  Synthetic
ggcctcacctcccgctccagg

SEQ ID NO: 14513 - DNA, 21 bp, Artificial Sequence
  Synthetic
agagaatagaagaagaaatcc

SEQ ID NO: 14514 - DNA, 21 bp, Artificial Sequence
  Synthetic
tagagaatagaagaagaaatc

SEQ ID NO: 14515 - DNA, 21 bp, Artificial Sequence
  Synthetic
tcgtagactagagaatagaag

SEQ ID NO: 14516 - DNA, 21 bp, Artificial Sequence
  Synthetic
gggtcgtagactagagaatag

SEQ ID NO: 14517 - DNA, 21 bp, Artificial Sequence
  Synthetic
tgtgggtcgtagactagagaa

SEQ ID NO: 14518 - DNA, 21 bp, Artificial Sequence
  Synthetic
tctgctgtgggtcgtagacta

SEQ ID NO: 14519 - DNA, 21 bp, Artificial Sequence
  Synthetic
tctctagtctacgacccacag

SEQ ID NO: 14520 - DNA, 21 bp, Artificial Sequence
  Synthetic
cttctgctgtgggtcgtagac

SEQ ID NO: 14521 - DNA, 21 bp, Artificial Sequence
  Synthetic
ctgccagcagggtcttctgct

SEQ ID NO: 14522 - DNA, 21 bp, Artificial Sequence
  Synthetic
agaagaccctgctggcagata

SEQ ID NO: 14523 - DNA, 21 bp, Artificial Sequence
  Synthetic
gaagaccctgctggcagataa

SEQ ID NO: 14524 - DNA, 21 bp, Artificial Sequence
  Synthetic
agaccctgctggcagataaag

SEQ ID NO: 14525 - DNA, 21 bp, Artificial Sequence
  Synthetic
aatctctcctttatctgccag

SEQ ID NO: 14526 - DNA, 21 bp, Artificial Sequence
  Synthetic
tttatttactaggtgattatc

SEQ ID NO: 14527 - DNA, 21 bp, Artificial Sequence
  Synthetic
ctaggtgattatccagggttt

SEQ ID NO: 14528 - DNA, 21 bp, Artificial Sequence
  Synthetic
atctctgtaacttcgaaaacc

SEQ ID NO: 14529 - DNA, 21 bp, Artificial Sequence
  Synthetic
aattgtttgatctctgtaact

SEQ ID NO: 14530 - DNA, 21 bp, Artificial Sequence
  Synthetic
acttaccaatcacattatgtt

SEQ ID NO: 14531 - DNA, 21 bp, Artificial Sequence
  Synthetic
tccagatccatttctgcccac

SEQ ID NO: 14532 - DNA, 21 bp, Artificial Sequence
  Synthetic
ttccagtgggcagaaatggat

SEQ ID NO: 14533 - DNA, 21 bp, Artificial Sequence
  Synthetic
ttccagatccatttctgccca

SEQ ID NO: 14534 - DNA, 21 bp, Artificial Sequence
  Synthetic
tccagtgggcagaaatggatc

SEQ ID NO: 14535 - DNA, 21 bp, Artificial Sequence
  Synthetic
actgagaacaaactgaattgc

SEQ ID NO: 14536 - DNA, 21 bp, Artificial Sequence
  Synthetic
cactgagaacaaactgaattg

SEQ ID NO: 14537 - DNA, 21 bp, Artificial Sequence
  Synthetic
caattcagtttgttctcagtg

SEQ ID NO: 14538 - DNA, 21 bp, Artificial Sequence
  Synthetic
aaactcatcactgagaacaaa

SEQ ID NO: 14539 - DNA, 21 bp, Artificial Sequence
  Synthetic
aagatgactaaactcatcact

SEQ ID NO: 14540 - DNA, 21 bp, Artificial Sequence
  Synthetic
cgaagatgactaaactcatca

SEQ ID NO: 14541 - DNA, 21 bp, Artificial Sequence
  Synthetic
atgagtttagtcatcttcgtc

SEQ ID NO: 14542 - DNA, 21 bp, Artificial Sequence
  Synthetic
taaagccaaccgctgttctgg

SEQ ID NO: 14543 - DNA, 21 bp, Artificial Sequence
  Synthetic
gcaataaagccaaccgctgtt

SEQ ID NO: 14544 - DNA, 21 bp, Artificial Sequence
  Synthetic
cagcggttggctttattgcat

SEQ ID NO: 14545 - DNA, 21 bp, Artificial Sequence
  Synthetic
ccacaaaagcagaaataacac

SEQ ID NO: 14546 - DNA, 21 bp, Artificial Sequence
  Synthetic
ctccacaaaagcagaaataac

SEQ ID NO: 14547 - DNA, 21 bp, Artificial Sequence
  Synthetic
caaaaataatctccacaaaag

SEQ ID NO: 14548 - DNA, 21 bp, Artificial Sequence
  Synthetic
tacttactggtaaccggttgt

SEQ ID NO: 14549 - DNA, 21 bp, Artificial Sequence
  Synthetic
aaacttcctctttatcgatct

SEQ ID NO: 14550 - DNA, 21 bp, Artificial Sequence
  Synthetic
cgataaagaggaagtttcact

SEQ ID NO: 14551 - DNA, 21 bp, Artificial Sequence
  Synthetic
taaagaggaagtttcacttcg

SEQ ID NO: 14552 - DNA, 21 bp, Artificial Sequence
  Synthetic
tggcaccaataactcttcgaa

SEQ ID NO: 14553 - DNA, 21 bp, Artificial Sequence
  Synthetic
cgaagagttattggtgccaaa

SEQ ID NO: 14554 - DNA, 21 bp, Artificial Sequence
  Synthetic
aaggatcagtatttcttagac

SEQ ID NO: 14555 - DNA, 21 bp, Artificial Sequence
  Synthetic
tacgtgaccatcttcttgtct

SEQ ID NO: 14556 - DNA, 21 bp, Artificial Sequence
  Synthetic
gtcaacaggaaaaatgatgtg

SEQ ID NO: 14557 - DNA, 21 bp, Artificial Sequence
  Synthetic
aaaatgatgtgatgaacctcc

SEQ ID NO: 14558 - DNA, 21 bp, Artificial Sequence
  Synthetic
cgagaaaaaccagcgctttca

SEQ ID NO: 14559 - DNA, 21 bp, Artificial Sequence
  Synthetic
tcgagaaaaaccagcgctttc

SEQ ID NO: 14560 - DNA, 21 bp, Artificial Sequence
  Synthetic
caatataataaggattgcttc

SEQ ID NO: 14561 - DNA, 21 bp, Artificial Sequence
  Synthetic
aacaatataataaggattgct

SEQ ID NO: 14562 - DNA, 21 bp, Artificial Sequence
  Synthetic
atccttattatattgttaaac

SEQ ID NO: 14563 - DNA, 21 bp, Artificial Sequence
  Synthetic
ttccttgtttaacaatataat

SEQ ID NO: 14564 - DNA, 21 bp, Artificial Sequence
  Synthetic
tccttattatattgttaaaca

SEQ ID NO: 14565 - DNA, 21 bp, Artificial Sequence
  Synthetic
atggcaacagcaccagattct

SEQ ID NO: 14566 - DNA, 21 bp, Artificial Sequence
  Synthetic
ctcttaatagctttaatctct

SEQ ID NO: 14567 - DNA, 21 bp, Artificial Sequence
  Synthetic
ttctcagagattaaagctatt

SEQ ID NO: 14568 - DNA, 21 bp, Artificial Sequence
  Synthetic
ttctcttaatagctttaatct

SEQ ID NO: 14569 - DNA, 21 bp, Artificial Sequence
  Synthetic
ctcagagattaaagctattaa

SEQ ID NO: 14570 - DNA, 21 bp, Artificial Sequence
  Synthetic
attaagagaagtagctggtac

SEQ ID NO: 14571 - DNA, 21 bp, Artificial Sequence
  Synthetic
tagctggtactagagtgtatg

SEQ ID NO: 14572 - DNA, 21 bp, Artificial Sequence
  Synthetic
tggtactagagtgtatgacga

SEQ ID NO: 14573 - DNA, 21 bp, Artificial Sequence
  Synthetic
actagagtgtatgacgaacga

SEQ ID NO: 14574 - DNA, 21 bp, Artificial Sequence
  Synthetic
ctagagtgtatgacgaacgaa

SEQ ID NO: 14575 - DNA, 21 bp, Artificial Sequence
  Synthetic
gagtgtatgacgaacgaaagg

SEQ ID NO: 14576 - DNA, 21 bp, Artificial Sequence
  Synthetic
aaggaagaaagcatctcctta

SEQ ID NO: 14577 - DNA, 21 bp, Artificial Sequence
  Synthetic
aagaaagcatctccttaatga

SEQ ID NO: 14578 - DNA, 21 bp, Artificial Sequence
  Synthetic
agggcaaacgggaaaaaatca

SEQ ID NO: 14579 - DNA, 21 bp, Artificial Sequence
  Synthetic
tcaatgagttgttaaaataca

SEQ ID NO: 14580 - DNA, 21 bp, Artificial Sequence
  Synthetic
atgagttgttaaaatacattg

SEQ ID NO: 14581 - DNA, 21 bp, Artificial Sequence
  Synthetic
gagttgttaaaatacattgaa

SEQ ID NO: 14582 - DNA, 21 bp, Artificial Sequence
  Synthetic
ttgaagagagattacatactc

SEQ ID NO: 14583 - DNA, 21 bp, Artificial Sequence
  Synthetic
gaagagagattacatactcta

SEQ ID NO: 14584 - DNA, 21 bp, Artificial Sequence
  Synthetic
aagagagattacatactctag

SEQ ID NO: 14585 - DNA, 21 bp, Artificial Sequence
  Synthetic
agagattacatactctagagg

SEQ ID NO: 14586 - DNA, 21 bp, Artificial Sequence
  Synthetic
ttacatactctagaggaagaa

SEQ ID NO: 14587 - DNA, 21 bp, Artificial Sequence
  Synthetic
tacatactctagaggaagaaa

SEQ ID NO: 14588 - DNA, 21 bp, Artificial Sequence
  Synthetic
atactctagaggaagaaaagg

SEQ ID NO: 14589 - DNA, 21 bp, Artificial Sequence
  Synthetic
aaggaagaactagctcagtat

SEQ ID NO: 14590 - DNA, 21 bp, Artificial Sequence
  Synthetic
agaactagctcagtatcagaa

SEQ ID NO: 14591 - DNA, 21 bp, Artificial Sequence
  Synthetic
gaactagctcagtatcagaag

SEQ ID NO: 14592 - DNA, 21 bp, Artificial Sequence
  Synthetic
cagtatcagaagtgggataaa

SEQ ID NO: 14593 - DNA, 21 bp, Artificial Sequence
  Synthetic
tcagaagtgggataaaatgag

SEQ ID NO: 14594 - DNA, 21 bp, Artificial Sequence
  Synthetic
tgggataaaatgagacgagcc

SEQ ID NO: 14595 - DNA, 21 bp, Artificial Sequence
  Synthetic
gggataaaatgagacgagccc

SEQ ID NO: 14596 - DNA, 21 bp, Artificial Sequence
  Synthetic
ctgattgtaaatggtatattc

SEQ ID NO: 14597 - DNA, 21 bp, Artificial Sequence
  Synthetic
ctggaatataccatttacaat

SEQ ID NO: 14598 - DNA, 21 bp, Artificial Sequence
  Synthetic
tggaatataccatttacaatc

SEQ ID NO: 14599 - DNA, 21 bp, Artificial Sequence
  Synthetic
ccatttacaatcaggaactta

SEQ ID NO: 14600 - DNA, 21 bp, Artificial Sequence
  Synthetic
acgagactcgtgccaaacttg

SEQ ID NO: 14601 - DNA, 21 bp, Artificial Sequence
  Synthetic
tttcttagctttctgctaagc

SEQ ID NO: 14602 - DNA, 21 bp, Artificial Sequence
  Synthetic
tctctcgcttagcagaaagct

SEQ ID NO: 14603 - DNA, 21 bp, Artificial Sequence
  Synthetic
tttctgctaagcgagagacta

SEQ ID NO: 14604 - DNA, 21 bp, Artificial Sequence
  Synthetic
ctccactagtctctcgcttag

SEQ ID NO: 14605 - DNA, 21 bp, Artificial Sequence
  Synthetic
ttctgctaagcgagagactag

SEQ ID NO: 14606 - DNA, 21 bp, Artificial Sequence
  Synthetic
ctgctaagcgagagactagtg

SEQ ID NO: 14607 - DNA, 21 bp, Artificial Sequence
  Synthetic
tggagaaaaatccagacaatt

SEQ ID NO: 14608 - DNA, 21 bp, Artificial Sequence
  Synthetic
tgctgagcatctcttaattgt

SEQ ID NO: 14609 - DNA, 21 bp, Artificial Sequence
  Synthetic
agacaattaagagatgctcag

SEQ ID NO: 14610 - DNA, 21 bp, Artificial Sequence
  Synthetic
aagagatgctcagcaggatgc

SEQ ID NO: 14611 - DNA, 21 bp, Artificial Sequence
  Synthetic
cagcaggatgcaagagataaa

SEQ ID NO: 14612 - DNA, 21 bp, Artificial Sequence
  Synthetic
agcaggatgcaagagataaaa

SEQ ID NO: 14613 - DNA, 21 bp, Artificial Sequence
  Synthetic
ataggatatcgaacgccaagt

SEQ ID NO: 14614 - DNA, 21 bp, Artificial Sequence
  Synthetic
aggatatcgaacgccaagtta

SEQ ID NO: 14615 - DNA, 21 bp, Artificial Sequence
  Synthetic
atcgaacgccaagttagagaa

SEQ ID NO: 14616 - DNA, 21 bp, Artificial Sequence
  Synthetic
ttgaaaacaaaaatttcagct

SEQ ID NO: 14617 - DNA, 21 bp, Artificial Sequence
  Synthetic
aaacaaaaatttcagctatga

SEQ ID NO: 14618 - DNA, 21 bp, Artificial Sequence
  Synthetic
caaaaatttcagctatgaaag

SEQ ID NO: 14619 - DNA, 21 bp, Artificial Sequence
  Synthetic
tttcagctatgaaagaagaaa

SEQ ID NO: 14620 - DNA, 21 bp, Artificial Sequence
  Synthetic
aagaaaaagaacagcttagtg

SEQ ID NO: 14621 - DNA, 21 bp, Artificial Sequence
  Synthetic
aacagcttagtgctgaaagac

SEQ ID NO: 14622 - DNA, 21 bp, Artificial Sequence
  Synthetic
gaaagacaagagcagattaag

SEQ ID NO: 14623 - DNA, 21 bp, Artificial Sequence
  Synthetic
aagacaagagcagattaagca

SEQ ID NO: 14624 - DNA, 21 bp, Artificial Sequence
  Synthetic
cagattaagcagaggactaag

SEQ ID NO: 14625 - DNA, 21 bp, Artificial Sequence
  Synthetic
agattaagcagaggactaagt

SEQ ID NO: 14626 - DNA, 21 bp, Artificial Sequence
  Synthetic
actaagttggagcttaaagcc

SEQ ID NO: 14627 - DNA, 21 bp, Artificial Sequence
  Synthetic
ttaaagccaaggatttacaag

SEQ ID NO: 14628 - DNA, 21 bp, Artificial Sequence
  Synthetic
aagatgaactagcaggcaata

SEQ ID NO: 14629 - DNA, 21 bp, Artificial Sequence
  Synthetic
actagcaggcaatagtgaaca

SEQ ID NO: 14630 - DNA, 21 bp, Artificial Sequence
  Synthetic
gtttacagaaacgtttattaa

SEQ ID NO: 14631 - DNA, 21 bp, Artificial Sequence
  Synthetic
ttacagaaacgtttattaaaa

SEQ ID NO: 14632 - DNA, 21 bp, Artificial Sequence
  Synthetic
aaacgtttattaaaagagagg

SEQ ID NO: 14633 - DNA, 21 bp, Artificial Sequence
  Synthetic
taaaagagaggcagaagctgc

SEQ ID NO: 14634 - DNA, 21 bp, Artificial Sequence
  Synthetic
ggcagaagctgcttgaaaaaa

SEQ ID NO: 14635 - DNA, 21 bp, Artificial Sequence
  Synthetic
agaagctgcttgaaaaaatag

SEQ ID NO: 14636 - DNA, 21 bp, Artificial Sequence
  Synthetic
cttgaaaaaatagaagaaaag

SEQ ID NO: 14637 - DNA, 21 bp, Artificial Sequence
  Synthetic
aaaaaatagaagaaaagcaga

SEQ ID NO: 14638 - DNA, 21 bp, Artificial Sequence
  Synthetic
aagaaaagcagaaagaactgg

SEQ ID NO: 14639 - DNA, 21 bp, Artificial Sequence
  Synthetic
agcagaaagaactggcagaaa

SEQ ID NO: 14640 - DNA, 21 bp, Artificial Sequence
  Synthetic
acagaacccaaattcaacagt

SEQ ID NO: 14641 - DNA, 21 bp, Artificial Sequence
  Synthetic
aacccaaattcaacagtgtga

SEQ ID NO: 14642 - DNA, 21 bp, Artificial Sequence
  Synthetic
ttctctttcacactgttgaat

SEQ ID NO: 14643 - DNA, 21 bp, Artificial Sequence
  Synthetic
cccaaattcaacagtgtgaaa

SEQ ID NO: 14644 - DNA, 21 bp, Artificial Sequence
  Synthetic
aattcaacagtgtgaaagaga

SEQ ID NO: 14645 - DNA, 21 bp, Artificial Sequence
  Synthetic
tcttctttctctttcacactg

SEQ ID NO: 14646 - DNA, 21 bp, Artificial Sequence
  Synthetic
tcaacagtgtgaaagagaaag

SEQ ID NO: 14647 - DNA, 21 bp, Artificial Sequence
  Synthetic
cagtgtgaaagagaaagaaga

SEQ ID NO: 14648 - DNA, 21 bp, Artificial Sequence
  Synthetic
gtgtgaaagagaaagaagaac

SEQ ID NO: 14649 - DNA, 21 bp, Artificial Sequence
  Synthetic
tgtgaaagagaaagaagaacg

SEQ ID NO: 14650 - DNA, 21 bp, Artificial Sequence
  Synthetic
aagaacgaggaattgctaggt

SEQ ID NO: 14651 - DNA, 21 bp, Artificial Sequence
  Synthetic
tgtagattggctcaagctacc

SEQ ID NO: 14652 - DNA, 21 bp, Artificial Sequence
  Synthetic
gtagattggctcaagctaccc

SEQ ID NO: 14653 - DNA, 21 bp, Artificial Sequence
  Synthetic
attggctcaagctacccagga

SEQ ID NO: 14654 - DNA, 21 bp, Artificial Sequence
  Synthetic
gctcaagctacccaggaaaga

SEQ ID NO: 14655 - DNA, 21 bp, Artificial Sequence
  Synthetic
atccgttctttcctgggtagc

SEQ ID NO: 14656 - DNA, 21 bp, Artificial Sequence
  Synthetic
tgcataaagatccgttctttc

SEQ ID NO: 14657 - DNA, 21 bp, Artificial Sequence
  Synthetic
agaacggatctttatgcaaag

SEQ ID NO: 14658 - DNA, 21 bp, Artificial Sequence
  Synthetic
ggatctttatgcaaagcaggg

SEQ ID NO: 14659 - DNA, 21 bp, Artificial Sequence
  Synthetic
atctttatgcaaagcagggtc

SEQ ID NO: 14660 - DNA, 21 bp, Artificial Sequence
  Synthetic
tctttatgcaaagcagggtcg

SEQ ID NO: 14661 - DNA, 21 bp, Artificial Sequence
  Synthetic
gaggaagccagtttacatcaa

SEQ ID NO: 14662 - DNA, 21 bp, Artificial Sequence
  Synthetic
gaagccagtttacatcaaaag

SEQ ID NO: 14663 - DNA, 21 bp, Artificial Sequence
  Synthetic
ccagtttacatcaaaagaaga

SEQ ID NO: 14664 - DNA, 21 bp, Artificial Sequence
  Synthetic
cagtttacatcaaaagaagaa

SEQ ID NO: 14665 - DNA, 21 bp, Artificial Sequence
  Synthetic
atcaaaagaagaaagggataa

SEQ ID NO: 14666 - DNA, 21 bp, Artificial Sequence
  Synthetic
gaaagggataagtggattaaa

SEQ ID NO: 14667 - DNA, 21 bp, Artificial Sequence
  Synthetic
aaagggataagtggattaaaa

SEQ ID NO: 14668 - DNA, 21 bp, Artificial Sequence
  Synthetic
ttaatagcctgatctaaagac

SEQ ID NO: 14669 - DNA, 21 bp, Artificial Sequence
  Synthetic
ttagatcaggctattaatgac

SEQ ID NO: 14670 - DNA, 21 bp, Artificial Sequence
  Synthetic
agacagattgctgctatacat

SEQ ID NO: 14671 - DNA, 21 bp, Artificial Sequence
  Synthetic
attgctgctatacataaggat

SEQ ID NO: 14672 - DNA, 21 bp, Artificial Sequence
  Synthetic
ttgctgctatacataaggatt

SEQ ID NO: 14673 - DNA, 21 bp, Artificial Sequence
  Synthetic
tacataaggatttggaagaca

SEQ ID NO: 14674 - DNA, 21 bp, Artificial Sequence
  Synthetic
tggaagacactgaagcaaata

SEQ ID NO: 14675 - DNA, 21 bp, Artificial Sequence
  Synthetic
gaagacactgaagcaaataaa

SEQ ID NO: 14676 - DNA, 21 bp, Artificial Sequence
  Synthetic
gaagcaaataaagagaaaaat

SEQ ID NO: 14677 - DNA, 21 bp, Artificial Sequence
  Synthetic
aagcaaataaagagaaaaatc

SEQ ID NO: 14678 - DNA, 21 bp, Artificial Sequence
  Synthetic
aaatctggagcagtataatgt

SEQ ID NO: 14679 - DNA, 21 bp, Artificial Sequence
  Synthetic
ttatttccatagaaactggac

SEQ ID NO: 14680 - DNA, 21 bp, Artificial Sequence
  Synthetic
taagatcctggtccagtttct

SEQ ID NO: 14681 - DNA, 21 bp, Artificial Sequence
  Synthetic
agaaactggaccaggatctta

SEQ ID NO: 14682 - DNA, 21 bp, Artificial Sequence
  Synthetic
ggatcttaatgaagtcaaagc

SEQ ID NO: 14683 - DNA, 21 bp, Artificial Sequence
  Synthetic
ttaatgaagtcaaagctcgag

SEQ ID NO: 14684 - DNA, 21 bp, Artificial Sequence
  Synthetic
atgaagtcaaagctcgagtag

SEQ ID NO: 14685 - DNA, 21 bp, Artificial Sequence
  Synthetic
gtcaaagctcgagtagaagaa

SEQ ID NO: 14686 - DNA, 21 bp, Artificial Sequence
  Synthetic
agctcgagtagaagaactgga

SEQ ID NO: 14687 - DNA, 21 bp, Artificial Sequence
  Synthetic
aagaactggacagaaaatatt

SEQ ID NO: 14688 - DNA, 21 bp, Artificial Sequence
  Synthetic
aaatattacgaagtaaaaaat

SEQ ID NO: 14689 - DNA, 21 bp, Artificial Sequence
  Synthetic
acgaagtaaaaaataagaaag

SEQ ID NO: 14690 - DNA, 21 bp, Artificial Sequence
  Synthetic
ataagaaagatgaactacaaa

SEQ ID NO: 14691 - DNA, 21 bp, Artificial Sequence
  Synthetic
gaaagatgaactacaaagtga

SEQ ID NO: 14692 - DNA, 21 bp, Artificial Sequence
  Synthetic
tttatttattagctacttgtg

SEQ ID NO: 14693 - DNA, 21 bp, Artificial Sequence
  Synthetic
tatttattagctacttgtgga

SEQ ID NO: 14694 - DNA, 21 bp, Artificial Sequence
  Synthetic
ttattagctacttgtggagag

SEQ ID NO: 14695 - DNA, 21 bp, Artificial Sequence
  Synthetic
attagctacttgtggagagaa

SEQ ID NO: 14696 - DNA, 21 bp, Artificial Sequence
  Synthetic
acttgtggagagaagagaatg

SEQ ID NO: 14697 - DNA, 21 bp, Artificial Sequence
  Synthetic
acagcaagcacttgctgctaa

SEQ ID NO: 14698 - DNA, 21 bp, Artificial Sequence
  Synthetic
agcaagcacttgctgctaaaa

SEQ ID NO: 14699 - DNA, 21 bp, Artificial Sequence
  Synthetic
ttgctgctaaaagagaagatc

SEQ ID NO: 14700 - DNA, 21 bp, Artificial Sequence
  Synthetic
gctaaaagagaagatcttgaa

SEQ ID NO: 14701 - DNA, 21 bp, Artificial Sequence
  Synthetic
tgaaaagaagcaacaacttct

SEQ ID NO: 14702 - DNA, 21 bp, Artificial Sequence
  Synthetic
aacaacttcttagagcagcaa

SEQ ID NO: 14703 - DNA, 21 bp, Artificial Sequence
  Synthetic
acaacttcttagagcagcaac

SEQ ID NO: 14704 - DNA, 21 bp, Artificial Sequence
  Synthetic
cacctttcctgttgctgctct

SEQ ID NO: 14705 - DNA, 21 bp, Artificial Sequence
  Synthetic
cttagagcagcaacaggaaag

SEQ ID NO: 14706 - DNA, 21 bp, Artificial Sequence
  Synthetic
caaagtgctagaccacttccg

SEQ ID NO: 14707 - DNA, 21 bp, Artificial Sequence
  Synthetic
tgctagaccacttccgtcgaa

SEQ ID NO: 14708 - DNA, 21 bp, Artificial Sequence
  Synthetic
gctagaccacttccgtcgaaa

SEQ ID NO: 14709 - DNA, 21 bp, Artificial Sequence
  Synthetic
tacaataccatgatagccatt

SEQ ID NO: 14710 - DNA, 21 bp, Artificial Sequence
  Synthetic
aatggctatcatggtattgta

SEQ ID NO: 14711 - DNA, 21 bp, Artificial Sequence
  Synthetic
atggtattgtaatgaataact

SEQ ID NO: 14712 - DNA, 21 bp, Artificial Sequence
  Synthetic
ttgtaatgaataactttgaat

SEQ ID NO: 14713 - DNA, 21 bp, Artificial Sequence
  Synthetic
gaaccagctttctacacatgc

SEQ ID NO: 14714 - DNA, 21 bp, Artificial Sequence
  Synthetic
aaccagctttctacacatgcg

SEQ ID NO: 14715 - DNA, 21 bp, Artificial Sequence
  Synthetic
gcagtgacttccacgcatgtg

SEQ ID NO: 14716 - DNA, 21 bp, Artificial Sequence
  Synthetic
acacatgcgtggaagtcactg

SEQ ID NO: 14717 - DNA, 21 bp, Artificial Sequence
  Synthetic
cacatgcgtggaagtcactgc

SEQ ID NO: 14718 - DNA, 21 bp, Artificial Sequence
  Synthetic
tttatcacattgttgattcag

SEQ ID NO: 14719 - DNA, 21 bp, Artificial Sequence
  Synthetic
gttgattcagatgaagtcagc

SEQ ID NO: 14720 - DNA, 21 bp, Artificial Sequence
  Synthetic
aaatcttcgtgctgacttcat

SEQ ID NO: 14721 - DNA, 21 bp, Artificial Sequence
  Synthetic
agtttaataaaatgaatcttc

SEQ ID NO: 14722 - DNA, 21 bp, Artificial Sequence
  Synthetic
gtttaataaaatgaatcttcc

SEQ ID NO: 14723 - DNA, 21 bp, Artificial Sequence
  Synthetic
ttaataaaatgaatcttcctg

SEQ ID NO: 14724 - DNA, 21 bp, Artificial Sequence
  Synthetic
aggcagaaaagtaacctctcc

SEQ ID NO: 14725 - DNA, 21 bp, Artificial Sequence
  Synthetic
gaggcagaaaagtaacctctc

SEQ ID NO: 14726 - DNA, 21 bp, Artificial Sequence
  Synthetic
gacatctaacttgttaagagg

SEQ ID NO: 14727 - DNA, 21 bp, Artificial Sequence
  Synthetic
gcctcttaacaagttagatgt

SEQ ID NO: 14728 - DNA, 21 bp, Artificial Sequence
  Synthetic
cctcttaacaagttagatgtc

SEQ ID NO: 14729 - DNA, 21 bp, Artificial Sequence
  Synthetic
atccctgacatctaacttgtt

SEQ ID NO: 14730 - DNA, 21 bp, Artificial Sequence
  Synthetic
atgtcagggatacagcctatc

SEQ ID NO: 14731 - DNA, 21 bp, Artificial Sequence
  Synthetic
acagcctatcctgaaaccaat

SEQ ID NO: 14732 - DNA, 21 bp, Artificial Sequence
  Synthetic
cacaatgactcacattggttt

SEQ ID NO: 14733 - DNA, 21 bp, Artificial Sequence
  Synthetic
gctattcctatgatcagcaaa

SEQ ID NO: 14734 - DNA, 21 bp, Artificial Sequence
  Synthetic
gtacctcagtttgctgatcat

SEQ ID NO: 14735 - DNA, 21 bp, Artificial Sequence
  Synthetic
tgtacctcagtttgctgatca

SEQ ID NO: 14736 - DNA, 21 bp, Artificial Sequence
  Synthetic
gtttgaaagctttgtcaaatc

SEQ ID NO: 14737 - DNA, 21 bp, Artificial Sequence
  Synthetic
tgtttgaaagctttgtcaaat

SEQ ID NO: 14738 - DNA, 21 bp, Artificial Sequence
  Synthetic
acaaagctttcaaacatgtgt

SEQ ID NO: 14739 - DNA, 21 bp, Artificial Sequence
  Synthetic
caaagctttcaaacatgtgtt

SEQ ID NO: 14740 - DNA, 21 bp, Artificial Sequence
  Synthetic
agagtctttccaaacacatgt

SEQ ID NO: 14741 - DNA, 21 bp, Artificial Sequence
  Synthetic
aagactcttatttgtcgtagc

SEQ ID NO: 14742 - DNA, 21 bp, Artificial Sequence
  Synthetic
agactcttatttgtcgtagca

SEQ ID NO: 14743 - DNA, 21 bp, Artificial Sequence
  Synthetic
aacttccatgctacgacaaat

SEQ ID NO: 14744 - DNA, 21 bp, Artificial Sequence
  Synthetic
tgaaagcacgggccagctggg

SEQ ID NO: 14745 - DNA, 21 bp, Artificial Sequence
  Synthetic
catagtgaaagcacgggccag

SEQ ID NO: 14746 - DNA, 21 bp, Artificial Sequence
  Synthetic
cagctggcccgtgctttcact

SEQ ID NO: 14747 - DNA, 21 bp, Artificial Sequence
  Synthetic
aatacagtccatagtgaaagc

SEQ ID NO: 14748 - DNA, 21 bp, Artificial Sequence
  Synthetic
tccaaagtaatacagtccata

SEQ ID NO: 14749 - DNA, 21 bp, Artificial Sequence
  Synthetic
ttcactatggactgtattact

SEQ ID NO: 14750 - DNA, 21 bp, Artificial Sequence
  Synthetic
tcactatggactgtattactt

SEQ ID NO: 14751 - DNA, 21 bp, Artificial Sequence
  Synthetic
tataggtgaccaagtcagcca

SEQ ID NO: 14752 - DNA, 21 bp, Artificial Sequence
  Synthetic
ataggtgaccaagtcagccat

SEQ ID NO: 14753 - DNA, 21 bp, Artificial Sequence
  Synthetic
tcagccatcggggtgctctaa

SEQ ID NO: 14754 - DNA, 21 bp, Artificial Sequence
  Synthetic
cagccatcggggtgctctaac

SEQ ID NO: 14755 - DNA, 21 bp, Artificial Sequence
  Synthetic
agccatcggggtgctctaact

SEQ ID NO: 14756 - DNA, 21 bp, Artificial Sequence
  Synthetic
tgtgtcataataacccccagt

SEQ ID NO: 14757 - DNA, 21 bp, Artificial Sequence
  Synthetic
aactgggggttattatgacac

SEQ ID NO: 14758 - DNA, 21 bp, Artificial Sequence
  Synthetic
actgggggttattatgacaca

SEQ ID NO: 14759 - DNA, 21 bp, Artificial Sequence
  Synthetic
atgacacaaggaagtctcgac

SEQ ID NO: 14760 - DNA, 21 bp, Artificial Sequence
  Synthetic
acttgaattgcaaaaagatgt

SEQ ID NO: 14761 - DNA, 21 bp, Artificial Sequence
  Synthetic
tgcaaaaagatgttagaaaag

SEQ ID NO: 14762 - DNA, 21 bp, Artificial Sequence
  Synthetic
aaaaagatgttagaaaagcag

SEQ ID NO: 14763 - DNA, 21 bp, Artificial Sequence
  Synthetic
aagatgttagaaaagcagaag

SEQ ID NO: 14764 - DNA, 21 bp, Artificial Sequence
  Synthetic
gaaaagcagaagaagaactag

SEQ ID NO: 14765 - DNA, 21 bp, Artificial Sequence
  Synthetic
cagaagaagaactaggtgaac

SEQ ID NO: 14766 - DNA, 21 bp, Artificial Sequence
  Synthetic
gtgaacttgaagcaaagctca

SEQ ID NO: 14767 - DNA, 21 bp, Artificial Sequence
  Synthetic
aaagctcaatgaaaacctgcg

SEQ ID NO: 14768 - DNA, 21 bp, Artificial Sequence
  Synthetic
atgaaaacctgcgcagaaata

SEQ ID NO: 14769 - DNA, 21 bp, Artificial Sequence
  Synthetic
agccttgtatatggattaata

SEQ ID NO: 14770 - DNA, 21 bp, Artificial Sequence
  Synthetic
aataatgaaattgatcagttg

SEQ ID NO: 14771 - DNA, 21 bp, Artificial Sequence
  Synthetic
tgatgaaccaaatgcaacaga

SEQ ID NO: 14772 - DNA, 21 bp, Artificial Sequence
  Synthetic
gcaacagatcgagacccagca

SEQ ID NO: 14773 - DNA, 21 bp, Artificial Sequence
  Synthetic
caacagatcgagacccagcaa

SEQ ID NO: 14774 - DNA, 21 bp, Artificial Sequence
  Synthetic
agatgctttaaatttcctttg

SEQ ID NO: 14775 - DNA, 21 bp, Artificial Sequence
  Synthetic
gcaaaggaaatttaaagcatc

SEQ ID NO: 14776 - DNA, 21 bp, Artificial Sequence
  Synthetic
catctagagatagcatattat

SEQ ID NO: 14777 - DNA, 21 bp, Artificial Sequence
  Synthetic
agagatagcatattatcagaa

SEQ ID NO: 14778 - DNA, 21 bp, Artificial Sequence
  Synthetic
tatcagaaatgaagatgctaa

SEQ ID NO: 14779 - DNA, 21 bp, Artificial Sequence
  Synthetic
tcagaaatgaagatgctaaaa

SEQ ID NO: 14780 - DNA, 21 bp, Artificial Sequence
  Synthetic
gaaatgaagatgctaaaagag

SEQ ID NO: 14781 - DNA, 21 bp, Artificial Sequence
  Synthetic
taaaagagaagaggcagcagt

SEQ ID NO: 14782 - DNA, 21 bp, Artificial Sequence
  Synthetic
aaagagaagaggcagcagtca

SEQ ID NO: 14783 - DNA, 21 bp, Artificial Sequence
  Synthetic
atatacttacgaaccttaggc

SEQ ID NO: 14784 - DNA, 21 bp, Artificial Sequence
  Synthetic
gtcatatagcaacgtagctta

SEQ ID NO: 14785 - DNA, 21 bp, Artificial Sequence
  Synthetic
tagcaacgtagcttacagagt

SEQ ID NO: 14786 - DNA, 21 bp, Artificial Sequence
  Synthetic
agcaacgtagcttacagagtt

SEQ ID NO: 14787 - DNA, 21 bp, Artificial Sequence
  Synthetic
ttggaggcaagcttgcatgct

SEQ ID NO: 14788 - DNA, 21 bp, Artificial Sequence
  Synthetic
tggaggcaagcttgcatgcta

SEQ ID NO: 14789 - DNA, 21 bp, Artificial Sequence
  Synthetic
cttgcatgctatggagtctac

SEQ ID NO: 14790 - DNA, 21 bp, Artificial Sequence
  Synthetic
tgcatgctatggagtctacca

SEQ ID NO: 14791 - DNA, 21 bp, Artificial Sequence
  Synthetic
atggagtctaccagagagtca

SEQ ID NO: 14792 - DNA, 21 bp, Artificial Sequence
  Synthetic
ctaccagagagtcattgaaag

SEQ ID NO: 14793 - DNA, 21 bp, Artificial Sequence
  Synthetic
agagagtcattgaaagcagaa

SEQ ID NO: 14794 - DNA, 21 bp, Artificial Sequence
  Synthetic
gagagtcattgaaagcagaac

SEQ ID NO: 14795 - DNA, 21 bp, Artificial Sequence
  Synthetic
agagtcattgaaagcagaact

SEQ ID NO: 14796 - DNA, 21 bp, Artificial Sequence
  Synthetic
ggaactgatttgctttctcaa

SEQ ID NO: 14797 - DNA, 21 bp, Artificial Sequence
  Synthetic
gatttgctttctcaactgagt

SEQ ID NO: 14798 - DNA, 21 bp, Artificial Sequence
  Synthetic
atttgctttctcaactgagtt

SEQ ID NO: 14799 - DNA, 21 bp, Artificial Sequence
  Synthetic
tctgatcttccaaactcagtt

SEQ ID NO: 14800 - DNA, 21 bp, Artificial Sequence
  Synthetic
tctcaactgagtttggaagat

SEQ ID NO: 14801 - DNA, 21 bp, Artificial Sequence
  Synthetic
cttctgatcttccaaactcag

SEQ ID NO: 14802 - DNA, 21 bp, Artificial Sequence
  Synthetic
caactgagtttggaagatcag

SEQ ID NO: 14803 - DNA, 21 bp, Artificial Sequence
  Synthetic
actgagtttggaagatcagaa

SEQ ID NO: 14804 - DNA, 21 bp, Artificial Sequence
  Synthetic
gatcagaagagagtagatgca

SEQ ID NO: 14805 - DNA, 21 bp, Artificial Sequence
  Synthetic
agagagtagatgcactgaatg

SEQ ID NO: 14806 - DNA, 21 bp, Artificial Sequence
  Synthetic
tctacttacctgctgaagttg

SEQ ID NO: 14807 - DNA, 21 bp, Artificial Sequence
  Synthetic
agtcagctgtctacttacctg

SEQ ID NO: 14808 - DNA, 21 bp, Artificial Sequence
  Synthetic
aggaaaacagacagttgctaa

SEQ ID NO: 14809 - DNA, 21 bp, Artificial Sequence
  Synthetic
aaacagacagttgctaaatga

SEQ ID NO: 14810 - DNA, 21 bp, Artificial Sequence
  Synthetic
tgctaaatgaaagaattaaat

SEQ ID NO: 14811 - DNA, 21 bp, Artificial Sequence
  Synthetic
taaattagaaggtattattac

SEQ ID NO: 14812 - DNA, 21 bp, Artificial Sequence
  Synthetic
tagaaggtattattactcgag

SEQ ID NO: 14813 - DNA, 21 bp, Artificial Sequence
  Synthetic
ctcattgagataagtctctac

SEQ ID NO: 14814 - DNA, 21 bp, Artificial Sequence
  Synthetic
ctcgagtagagacttatctca

SEQ ID NO: 14815 - DNA, 21 bp, Artificial Sequence
  Synthetic
cgagtagagacttatctcaat

SEQ ID NO: 14816 - DNA, 21 bp, Artificial Sequence
  Synthetic
gagacttatctcaatgagaat

SEQ ID NO: 14817 - DNA, 21 bp, Artificial Sequence
  Synthetic
gacttatctcaatgagaatct

SEQ ID NO: 14818 - DNA, 21 bp, Artificial Sequence
  Synthetic
aatgagaatctgagaaaacgc

SEQ ID NO: 14819 - DNA, 21 bp, Artificial Sequence
  Synthetic
tgagaaaacgcttggaccaag

SEQ ID NO: 14820 - DNA, 21 bp, Artificial Sequence
  Synthetic
ttgttacaggaacttaatgag

SEQ ID NO: 14821 - DNA, 21 bp, Artificial Sequence
  Synthetic
gttacaggaacttaatgagct

SEQ ID NO: 14822 - DNA, 21 bp, Artificial Sequence
  Synthetic
tacaggaacttaatgagctga

SEQ ID NO: 14823 - DNA, 21 bp, Artificial Sequence
  Synthetic
aacttaatgagctgagagaga

SEQ ID NO: 14824 - DNA, 21 bp, Artificial Sequence
  Synthetic
ttaatgagctgagagagacag

SEQ ID NO: 14825 - DNA, 21 bp, Artificial Sequence
  Synthetic
taatgagctgagagagacaga

SEQ ID NO: 14826 - DNA, 21 bp, Artificial Sequence
  Synthetic
aatgagctgagagagacagaa

SEQ ID NO: 14827 - DNA, 21 bp, Artificial Sequence
  Synthetic
ctgttctcacagccacaacat

SEQ ID NO: 14828 - DNA, 21 bp, Artificial Sequence
  Synthetic
aagttctgatgttgtggctgt

SEQ ID NO: 14829 - DNA, 21 bp, Artificial Sequence
  Synthetic
tcaagttctgatgttgtggct

SEQ ID NO: 14830 - DNA, 21 bp, Artificial Sequence
  Synthetic
tcacagccacaacatcagaac

SEQ ID NO: 14831 - DNA, 21 bp, Artificial Sequence
  Synthetic
agaacttgaagccatcaataa

SEQ ID NO: 14832 - DNA, 21 bp, Artificial Sequence
  Synthetic
taaaagacactatggcacgat

SEQ ID NO: 14833 - DNA, 21 bp, Artificial Sequence
  Synthetic
acactatggcacgatcagaag

SEQ ID NO: 14834 - DNA, 21 bp, Artificial Sequence
  Synthetic
tggacaattccattgataaaa

SEQ ID NO: 14835 - DNA, 21 bp, Artificial Sequence
  Synthetic
attccattgataaaacagaag

SEQ ID NO: 14836 - DNA, 21 bp, Artificial Sequence
  Synthetic
ttccattgataaaacagaagc

SEQ ID NO: 14837 - DNA, 21 bp, Artificial Sequence
  Synthetic
gataaaacagaagctggaatt

SEQ ID NO: 14838 - DNA, 21 bp, Artificial Sequence
  Synthetic
ataaaacagaagctggaatta

SEQ ID NO: 14839 - DNA, 21 bp, Artificial Sequence
  Synthetic
gaagctggaattaaggagctt

SEQ ID NO: 14840 - DNA, 21 bp, Artificial Sequence
  Synthetic
gctggaattaaggagcttcag

SEQ ID NO: 14841 - DNA, 21 bp, Artificial Sequence
  Synthetic
attaaggagcttcagaagagt

SEQ ID NO: 14842 - DNA, 21 bp, Artificial Sequence
  Synthetic
ttaaggagcttcagaagagta

SEQ ID NO: 14843 - DNA, 21 bp, Artificial Sequence
  Synthetic
gcttcagaagagtatggagcg

SEQ ID NO: 14844 - DNA, 21 bp, Artificial Sequence
  Synthetic
cttcagaagagtatggagcgc

SEQ ID NO: 14845 - DNA, 21 bp, Artificial Sequence
  Synthetic
tttccagcgctccatactctt

SEQ ID NO: 14846 - DNA, 21 bp, Artificial Sequence
  Synthetic
agtatggagcgctggaaaaat

SEQ ID NO: 14847 - DNA, 21 bp, Artificial Sequence
  Synthetic
gtatggagcgctggaaaaata

SEQ ID NO: 14848 - DNA, 21 bp, Artificial Sequence
  Synthetic
agcgctggaaaaatatggaaa

SEQ ID NO: 14849 - DNA, 21 bp, Artificial Sequence
  Synthetic
aaaaatatggaaaaagaacat

SEQ ID NO: 14850 - DNA, 21 bp, Artificial Sequence
  Synthetic
atgctataaatcatgatacta

SEQ ID NO: 14851 - DNA, 21 bp, Artificial Sequence
  Synthetic
ataaatcatgatactaaagaa

SEQ ID NO: 14852 - DNA, 21 bp, Artificial Sequence
  Synthetic
taaatcatgatactaaagaac

SEQ ID NO: 14853 - DNA, 21 bp, Artificial Sequence
  Synthetic
acaaatcggcaaggcatgcta

SEQ ID NO: 14854 - DNA, 21 bp, Artificial Sequence
  Synthetic
aatcggcaaggcatgctattg

SEQ ID NO: 14855 - DNA, 21 bp, Artificial Sequence
  Synthetic
cggcaaggcatgctattgaag

SEQ ID NO: 14856 - DNA, 21 bp, Artificial Sequence
  Synthetic
aaggcatgctattgaagaaga

SEQ ID NO: 14857 - DNA, 21 bp, Artificial Sequence
  Synthetic
gcatgctattgaagaagaaag

SEQ ID NO: 14858 - DNA, 21 bp, Artificial Sequence
  Synthetic
ttgaagaagaaagaagagtgt

SEQ ID NO: 14859 - DNA, 21 bp, Artificial Sequence
  Synthetic
aagaagaaagaagagtgtatg

SEQ ID NO: 14860 - DNA, 21 bp, Artificial Sequence
  Synthetic
agaagagtgtatgaagaaaat

SEQ ID NO: 14861 - DNA, 21 bp, Artificial Sequence
  Synthetic
aagagtgtatgaagaaaattc

SEQ ID NO: 14862 - DNA, 21 bp, Artificial Sequence
  Synthetic
gtatgaagaaaattcgagaac

SEQ ID NO: 14863 - DNA, 21 bp, Artificial Sequence
  Synthetic
ctggggaagtgatccaagttc

SEQ ID NO: 14864 - DNA, 21 bp, Artificial Sequence
  Synthetic
cgagaacttggatcacttccc

SEQ ID NO: 14865 - DNA, 21 bp, Artificial Sequence
  Synthetic
gagaacttggatcacttcccc

SEQ ID NO: 14866 - DNA, 21 bp, Artificial Sequence
  Synthetic
gatcacttccccaggaagcat

SEQ ID NO: 14867 - DNA, 21 bp, Artificial Sequence
  Synthetic
gcatttgaaaagtaccagaca

SEQ ID NO: 14868 - DNA, 21 bp, Artificial Sequence
  Synthetic
tcaaatttaaaaccaacctgt

SEQ ID NO: 14869 - DNA, 21 bp, Artificial Sequence
  Synthetic
ctttatagttgtttcgaaaac

SEQ ID NO: 14870 - DNA, 21 bp, Artificial Sequence
  Synthetic
tgtgttgcactgctcaagttt

SEQ ID NO: 14871 - DNA, 21 bp, Artificial Sequence
  Synthetic
gaaaacttgagcagtgcaaca

SEQ ID NO: 14872 - DNA, 21 bp, Artificial Sequence
  Synthetic
gagcagtgcaacacagaatta

SEQ ID NO: 14873 - DNA, 21 bp, Artificial Sequence
  Synthetic
agccatgttaacaaaaaggct

SEQ ID NO: 14874 - DNA, 21 bp, Artificial Sequence
  Synthetic
tggatcagtttgtaaatttct

SEQ ID NO: 14875 - DNA, 21 bp, Artificial Sequence
  Synthetic
cagtttgtaaatttctccgag

SEQ ID NO: 14876 - DNA, 21 bp, Artificial Sequence
  Synthetic
ttgtaaatttctccgagcaga

SEQ ID NO: 14877 - DNA, 21 bp, Artificial Sequence
  Synthetic
aagaaaagttaataaagcgtc

SEQ ID NO: 14878 - DNA, 21 bp, Artificial Sequence
  Synthetic
aaaagttaataaagcgtcaag

SEQ ID NO: 14879 - DNA, 21 bp, Artificial Sequence
  Synthetic
aaagcgtcaagaagagttaga

SEQ ID NO: 14880 - DNA, 21 bp, Artificial Sequence
  Synthetic
aagcgtcaagaagagttagat

SEQ ID NO: 14881 - DNA, 21 bp, Artificial Sequence
  Synthetic
gataggggttacaaatcaatc

SEQ ID NO: 14882 - DNA, 21 bp, Artificial Sequence
  Synthetic
ataggggttacaaatcaatca

SEQ ID NO: 14883 - DNA, 21 bp, Artificial Sequence
  Synthetic
tacaaatcaatcatggaactg

SEQ ID NO: 14884 - DNA, 21 bp, Artificial Sequence
  Synthetic
tcatggaactgatgaatgtac

SEQ ID NO: 14885 - DNA, 21 bp, Artificial Sequence
  Synthetic
actgatgaatgtacttgaact

SEQ ID NO: 14886 - DNA, 21 bp, Artificial Sequence
  Synthetic
ctgatgaatgtacttgaactt

SEQ ID NO: 14887 - DNA, 21 bp, Artificial Sequence
  Synthetic
atgtacttgaacttcggaaat

SEQ ID NO: 14888 - DNA, 21 bp, Artificial Sequence
  Synthetic
taactgaatagcttcatattt

SEQ ID NO: 14889 - DNA, 21 bp, Artificial Sequence
  Synthetic
acatacctgtttgaaagttaa

SEQ ID NO: 14890 - DNA, 21 bp, Artificial Sequence
  Synthetic
tacaaagcgaaacatacctgt

SEQ ID NO: 14891 - DNA, 21 bp, Artificial Sequence
  Synthetic
ttaaggtatctaagaacttca

SEQ ID NO: 14892 - DNA, 21 bp, Artificial Sequence
  Synthetic
aagaacttcagtgaagtattc

SEQ ID NO: 14893 - DNA, 21 bp, Artificial Sequence
  Synthetic
actaacttctggaatacttca

SEQ ID NO: 14894 - DNA, 21 bp, Artificial Sequence
  Synthetic
ttgccaccaggtactaacttc

SEQ ID NO: 14895 - DNA, 21 bp, Artificial Sequence
  Synthetic
tttgccaccaggtactaactt

SEQ ID NO: 14896 - DNA, 21 bp, Artificial Sequence
  Synthetic
ggtggcaaagctactttggtg

SEQ ID NO: 14897 - DNA, 21 bp, Artificial Sequence
  Synthetic
ggcaaagctactttggtgatg

SEQ ID NO: 14898 - DNA, 21 bp, Artificial Sequence
  Synthetic
aagctactttggtgatgaaga

SEQ ID NO: 14899 - DNA, 21 bp, Artificial Sequence
  Synthetic
agctactttggtgatgaagaa

SEQ ID NO: 14900 - DNA, 21 bp, Artificial Sequence
  Synthetic
ttggtgatgaagaaaggagat

SEQ ID NO: 14901 - DNA, 21 bp, Artificial Sequence
  Synthetic
tggtgatgaagaaaggagatg

SEQ ID NO: 14902 - DNA, 21 bp, Artificial Sequence
  Synthetic
gtgatgaagaaaggagatgtg

SEQ ID NO: 14903 - DNA, 21 bp, Artificial Sequence
  Synthetic
tggagggcagtcagtctcaag

SEQ ID NO: 14904 - DNA, 21 bp, Artificial Sequence
  Synthetic
agggcagtcagtctcaagatg

SEQ ID NO: 14905 - DNA, 21 bp, Artificial Sequence
  Synthetic
gggcagtcagtctcaagatga

SEQ ID NO: 14906 - DNA, 21 bp, Artificial Sequence
  Synthetic
gcagtcagtctcaagatgaag

SEQ ID NO: 14907 - DNA, 21 bp, Artificial Sequence
  Synthetic
gtcagtctcaagatgaaggag

SEQ ID NO: 14908 - DNA, 21 bp, Artificial Sequence
  Synthetic
tcagtctcaagatgaaggaga

SEQ ID NO: 14909 - DNA, 21 bp, Artificial Sequence
  Synthetic
cagtctcaagatgaaggagaa

SEQ ID NO: 14910 - DNA, 21 bp, Artificial Sequence
  Synthetic
accactcccttctccttcatc

SEQ ID NO: 14911 - DNA, 21 bp, Artificial Sequence
  Synthetic
aagatgaaggagaagggagtg

SEQ ID NO: 14912 - DNA, 21 bp, Artificial Sequence
  Synthetic
gatgaaggagaagggagtggt

SEQ ID NO: 14913 - DNA, 21 bp, Artificial Sequence
  Synthetic
aaggagaagggagtggtgaga

SEQ ID NO: 14914 - DNA, 21 bp, Artificial Sequence
  Synthetic
ggagaagggagtggtgagagt

SEQ ID NO: 14915 - DNA, 21 bp, Artificial Sequence
  Synthetic
agaagggagtggtgagagtga

SEQ ID NO: 14916 - DNA, 21 bp, Artificial Sequence
  Synthetic
gaagggagtggtgagagtgag

SEQ ID NO: 14917 - DNA, 21 bp, Artificial Sequence
  Synthetic
atgggacactgctttgtgagc

SEQ ID NO: 14918 - DNA, 21 bp, Artificial Sequence
  Synthetic
caactgatgggacactgcttt

SEQ ID NO: 14919 - DNA, 21 bp, Artificial Sequence
  Synthetic
tccagtaaactggtcaactga

SEQ ID NO: 14920 - DNA, 21 bp, Artificial Sequence
  Synthetic
tcccatcagttgaccagttta

SEQ ID NO: 14921 - DNA, 21 bp, Artificial Sequence
  Synthetic
ctccagtaaactggtcaactg

SEQ ID NO: 14922 - DNA, 21 bp, Artificial Sequence
  Synthetic
cccatcagttgaccagtttac

SEQ ID NO: 14923 - DNA, 21 bp, Artificial Sequence
  Synthetic
cagttgaccagtttactggag

SEQ ID NO: 14924 - DNA, 21 bp, Artificial Sequence
  Synthetic
agttgaccagtttactggagt

SEQ ID NO: 14925 - DNA, 21 bp, Artificial Sequence
  Synthetic
ccagtttactggagttggaat

SEQ ID NO: 14926 - DNA, 21 bp, Artificial Sequence
  Synthetic
tgtcatttacaggaaaacaag

SEQ ID NO: 14927 - DNA, 21 bp, Artificial Sequence
  Synthetic
tttacaggaaaacaaggtgaa

SEQ ID NO: 14928 - DNA, 21 bp, Artificial Sequence
  Synthetic
tacaggaaaacaaggtgaaat

SEQ ID NO: 14929 - DNA, 21 bp, Artificial Sequence
  Synthetic
caggaaaacaaggtgaaatga

SEQ ID NO: 14930 - DNA, 21 bp, Artificial Sequence
  Synthetic
gagaaatgcaacagctttcag

SEQ ID NO: 14931 - DNA, 21 bp, Artificial Sequence
  Synthetic
atgcaacagctttcaggtgga

SEQ ID NO: 14932 - DNA, 21 bp, Artificial Sequence
  Synthetic
ctaccaaggatttctgtccac

SEQ ID NO: 14933 - DNA, 21 bp, Artificial Sequence
  Synthetic
aaaatcagagcaagggctacc

SEQ ID NO: 14934 - DNA, 21 bp, Artificial Sequence
  Synthetic
ctgaatggcaaaaatcagagc

SEQ ID NO: 14935 - DNA, 21 bp, Artificial Sequence
  Synthetic
acatttctgaatggcaaaaat

SEQ ID NO: 14936 - DNA, 21 bp, Artificial Sequence
  Synthetic
aaatggagccgggtcacattt

SEQ ID NO: 14937 - DNA, 21 bp, Artificial Sequence
  Synthetic
catcaaacaagtaaaatggag

SEQ ID NO: 14938 - DNA, 21 bp, Artificial Sequence
  Synthetic
aatttcatcaaacaagtaaaa

SEQ ID NO: 14939 - DNA, 21 bp, Artificial Sequence
  Synthetic
caatttcatcaaacaagtaaa

SEQ ID NO: 14940 - DNA, 21 bp, Artificial Sequence
  Synthetic
tttgatgaaattgaccaggct

SEQ ID NO: 14941 - DNA, 21 bp, Artificial Sequence
  Synthetic
ccaggctctggatgctcagca

SEQ ID NO: 14942 - DNA, 21 bp, Artificial Sequence
  Synthetic
agcctttctgtgctgagcatc

SEQ ID NO: 14943 - DNA, 21 bp, Artificial Sequence
  Synthetic
acctgacacagcctttctgtg

SEQ ID NO: 14944 - DNA, 21 bp, Artificial Sequence
  Synthetic
cctaaaagtagttgtaataaa

SEQ ID NO: 14945 - DNA, 21 bp, Artificial Sequence
  Synthetic
caaattctatggtgtaaagtt

SEQ ID NO: 14946 - DNA, 21 bp, Artificial Sequence
  Synthetic
ttatttctgaactttacacca

SEQ ID NO: 14947 - DNA, 21 bp, Artificial Sequence
  Synthetic
taaaataaaattaccttattt

SEQ ID NO: 14948 - DNA, 21 bp, Artificial Sequence
  Synthetic
gatcacatcaatatgactaac

SEQ ID NO: 14949 - DNA, 21 bp, Artificial Sequence
  Synthetic
tgcatattaagtcaattattc

SEQ ID NO: 14950 - DNA, 21 bp, Artificial Sequence
  Synthetic
catattaagtcaattattcta

SEQ ID NO: 14951 - DNA, 21 bp, Artificial Sequence
  Synthetic
atattaagtcaattattctag

SEQ ID NO: 14952 - DNA, 21 bp, Artificial Sequence
  Synthetic
agcataggacttgaatccctc

SEQ ID NO: 14953 - DNA, 21 bp, Artificial Sequence
  Synthetic
gagggattcaagtcctatgct

SEQ ID NO: 14954 - DNA, 21 bp, Artificial Sequence
  Synthetic
gggattcaagtcctatgctca

SEQ ID NO: 14955 - DNA, 21 bp, Artificial Sequence
  Synthetic
tcggtcctctgagcataggac

SEQ ID NO: 14956 - DNA, 21 bp, Artificial Sequence
  Synthetic
tcaagtcctatgctcagagga

SEQ ID NO: 14957 - DNA, 21 bp, Artificial Sequence
  Synthetic
ttgacttcggtcctctgagca

SEQ ID NO: 14958 - DNA, 21 bp, Artificial Sequence
  Synthetic
aaaaccattgacttcggtcct

SEQ ID NO: 14959 - DNA, 21 bp, Artificial Sequence
  Synthetic
agccagtgatagcattgaaga

SEQ ID NO: 14960 - DNA, 21 bp, Artificial Sequence
  Synthetic
aagccagtgatagcattgaag

SEQ ID NO: 14961 - DNA, 21 bp, Artificial Sequence
  Synthetic
taagccagtgatagcattgaa

SEQ ID NO: 14962 - DNA, 21 bp, Artificial Sequence
  Synthetic
tttaagccagtgatagcattg

SEQ ID NO: 14963 - DNA, 21 bp, Artificial Sequence
  Synthetic
ccatttaagccagtgatagca

SEQ ID NO: 14964 - DNA, 21 bp, Artificial Sequence
  Synthetic
ctatcactggcttaaatggta

SEQ ID NO: 14965 - DNA, 21 bp, Artificial Sequence
  Synthetic
tatcactggcttaaatggtag

SEQ ID NO: 14966 - DNA, 21 bp, Artificial Sequence
  Synthetic
atcactggcttaaatggtagt

SEQ ID NO: 14967 - DNA, 21 bp, Artificial Sequence
  Synthetic
ggtagtgggaaatccaacata

SEQ ID NO: 14968 - DNA, 21 bp, Artificial Sequence
  Synthetic
aagcagatggagtccaatatg

SEQ ID NO: 14969 - DNA, 21 bp, Artificial Sequence
  Synthetic
agatgcccagcaaaaagcaga

SEQ ID NO: 14970 - DNA, 21 bp, Artificial Sequence
  Synthetic
gagatgcccagcaaaaagcag

SEQ ID NO: 14971 - DNA, 21 bp, Artificial Sequence
  Synthetic
tacactttacctgagacaggt

SEQ ID NO: 14972 - DNA, 21 bp, Artificial Sequence
  Synthetic
ttacactttacctgagacagg

SEQ ID NO: 14973 - DNA, 21 bp, Artificial Sequence
  Synthetic
taaatcttgtaaattagaagc

SEQ ID NO: 14974 - DNA, 21 bp, Artificial Sequence
  Synthetic
tgtaaactaaatcttgtaaat

SEQ ID NO: 14975 - DNA, 21 bp, Artificial Sequence
  Synthetic
tacaagatttagtttacaaaa

SEQ ID NO: 14976 - DNA, 21 bp, Artificial Sequence
  Synthetic
aattatcaaaagtgattgaca

SEQ ID NO: 14977 - DNA, 21 bp, Artificial Sequence
  Synthetic
ctgacaaaaagcaaagtcctt

SEQ ID NO: 14978 - DNA, 21 bp, Artificial Sequence
  Synthetic
aaaagcaaagtcctttaggat

SEQ ID NO: 14979 - DNA, 21 bp, Artificial Sequence
  Synthetic
catcatgaacctcaaatccta

SEQ ID NO: 14980 - DNA, 21 bp, Artificial Sequence
  Synthetic
ctttaggatttgaggttcatg

SEQ ID NO: 14981 - DNA, 21 bp, Artificial Sequence
  Synthetic
ccttgttactgtgatttcatc

SEQ ID NO: 14982 - DNA, 21 bp, Artificial Sequence
  Synthetic
gaaatcacagtaacaaggcag

SEQ ID NO: 14983 - DNA, 21 bp, Artificial Sequence
  Synthetic
tttataggtggttattggtgg

SEQ ID NO: 14984 - DNA, 21 bp, Artificial Sequence
  Synthetic
gtagaaataaatatttaatca

SEQ ID NO: 14985 - DNA, 21 bp, Artificial Sequence
  Synthetic
tagaaataaatatttaatcaa

SEQ ID NO: 14986 - DNA, 21 bp, Artificial Sequence
  Synthetic
tggagtcaatgccaacaacac

SEQ ID NO: 14987 - DNA, 21 bp, Artificial Sequence
  Synthetic
aatgccaacaacaccagagta

SEQ ID NO: 14988 - DNA, 21 bp, Artificial Sequence
  Synthetic
acattaaggccaacagaacag

SEQ ID NO: 14989 - DNA, 21 bp, Artificial Sequence
  Synthetic
ttaacattaaggccaacagaa

SEQ ID NO: 14990 - DNA, 21 bp, Artificial Sequence
  Synthetic
ggttgttaacattaaggccaa

SEQ ID NO: 14991 - DNA, 21 bp, Artificial Sequence
  Synthetic
atacctgcatgatgagaaagt

SEQ ID NO: 14992 - DNA, 21 bp, Artificial Sequence
  Synthetic
aaatacctgcatgatgagaaa

SEQ ID NO: 14993 - DNA, 21 bp, Artificial Sequence
  Synthetic
caaacgaaatacctgcatgat

SEQ ID NO: 14994 - DNA, 21 bp, Artificial Sequence
  Synthetic
ctcaaacgaaatacctgcatg

SEQ ID NO: 14995 - DNA, 21 bp, Artificial Sequence
  Synthetic
cagggccgaattacaaaagta

SEQ ID NO: 14996 - DNA, 21 bp, Artificial Sequence
  Synthetic
cgaattacaaaagtattgaat

SEQ ID NO: 14997 - DNA, 21 bp, Artificial Sequence
  Synthetic
aagtattgaatatgaaacctc

SEQ ID NO: 14998 - DNA, 21 bp, Artificial Sequence
  Synthetic
gaatatgaaacctccagaggt

SEQ ID NO: 14999 - DNA, 21 bp, Artificial Sequence
  Synthetic
cataaatagtactcttacctc

SEQ ID NO: 15000 - DNA, 21 bp, Artificial Sequence
  Synthetic
tcttctatcatggataaaatc

SEQ ID NO: 15001 - DNA, 21 bp, Artificial Sequence
  Synthetic
ttcttctatcatggataaaat

SEQ ID NO: 15002 - DNA, 21 bp, Artificial Sequence
  Synthetic
tatccatgatagaagaagcag

SEQ ID NO: 15003 - DNA, 21 bp, Artificial Sequence
  Synthetic
atccatgatagaagaagcagc

SEQ ID NO: 15004 - DNA, 21 bp, Artificial Sequence
  Synthetic
gttccagctgcttcttctatc

SEQ ID NO: 15005 - DNA, 21 bp, Artificial Sequence
  Synthetic
gatagaagaagcagctggaac

SEQ ID NO: 15006 - DNA, 21 bp, Artificial Sequence
  Synthetic
aagcagctggaaccaggatgt

SEQ ID NO: 15007 - DNA, 21 bp, Artificial Sequence
  Synthetic
gaatacaaaaaaatagctgca

SEQ ID NO: 15008 - DNA, 21 bp, Artificial Sequence
  Synthetic
aaatagctgcacagaaaacta

SEQ ID NO: 15009 - DNA, 21 bp, Artificial Sequence
  Synthetic
gcacagaaaactatagaaaaa

SEQ ID NO: 15010 - DNA, 21 bp, Artificial Sequence
  Synthetic
cacagaaaactatagaaaaaa

SEQ ID NO: 15011 - DNA, 21 bp, Artificial Sequence
  Synthetic
atagaaaaaaaggaggctaag

SEQ ID NO: 15012 - DNA, 21 bp, Artificial Sequence
  Synthetic
aaaaaaaggaggctaagctga

SEQ ID NO: 15013 - DNA, 21 bp, Artificial Sequence
  Synthetic
gtaatctcttcttcaagtatc

SEQ ID NO: 15014 - DNA, 21 bp, Artificial Sequence
  Synthetic
agtaatctcttcttcaagtat

SEQ ID NO: 15015 - DNA, 21 bp, Artificial Sequence
  Synthetic
ctccaaccattcaaaaattaa

SEQ ID NO: 15016 - DNA, 21 bp, Artificial Sequence
  Synthetic
tttcaggaaagatcgtcctac

SEQ ID NO: 15017 - DNA, 21 bp, Artificial Sequence
  Synthetic
ctccaagtaggacgatctttc

SEQ ID NO: 15018 - DNA, 21 bp, Artificial Sequence
  Synthetic
ttcaggaaagatcgtcctact

SEQ ID NO: 15019 - DNA, 21 bp, Artificial Sequence
  Synthetic
tacttggagtaccaaaaagta

SEQ ID NO: 15020 - DNA, 21 bp, Artificial Sequence
  Synthetic
cttggagtaccaaaaagtaat

SEQ ID NO: 15021 - DNA, 21 bp, Artificial Sequence
  Synthetic
tggagtaccaaaaagtaatga

SEQ ID NO: 15022 - DNA, 21 bp, Artificial Sequence
  Synthetic
accaaaaagtaatgagagaaa

SEQ ID NO: 15023 - DNA, 21 bp, Artificial Sequence
  Synthetic
gtaatgagagaaatagaacat

SEQ ID NO: 15024 - DNA, 21 bp, Artificial Sequence
  Synthetic
aagataccaaagtacgctcag

SEQ ID NO: 15025 - DNA, 21 bp, Artificial Sequence
  Synthetic
gataccaaagtacgctcagct

SEQ ID NO: 15026 - DNA, 21 bp, Artificial Sequence
  Synthetic
ataccaaagtacgctcagctg

SEQ ID NO: 15027 - DNA, 21 bp, Artificial Sequence
  Synthetic
tacgctcagctgaggaattaa

SEQ ID NO: 15028 - DNA, 21 bp, Artificial Sequence
  Synthetic
caagataaagttataaagctt

SEQ ID NO: 15029 - DNA, 21 bp, Artificial Sequence
  Synthetic
aagataaagttataaagcttc

SEQ ID NO: 15030 - DNA, 21 bp, Artificial Sequence
  Synthetic
ataaagttataaagcttcagg

SEQ ID NO: 15031 - DNA, 21 bp, Artificial Sequence
  Synthetic
taaagcttcaggaagaattgt

SEQ ID NO: 15032 - DNA, 21 bp, Artificial Sequence
  Synthetic
aagcttcaggaagaattgtct

SEQ ID NO: 15033 - DNA, 21 bp, Artificial Sequence
  Synthetic
atcattctcagacaattcttc

SEQ ID NO: 15034 - DNA, 21 bp, Artificial Sequence
  Synthetic
aaaaaataaaagcacttaatc

SEQ ID NO: 15035 - DNA, 21 bp, Artificial Sequence
  Synthetic
taaaagcacttaatcatgaaa

SEQ ID NO: 15036 - DNA, 21 bp, Artificial Sequence
  Synthetic
aagcacttaatcatgaaatag

SEQ ID NO: 15037 - DNA, 21 bp, Artificial Sequence
  Synthetic
cttaatcatgaaatagaagaa

SEQ ID NO: 15038 - DNA, 21 bp, Artificial Sequence
  Synthetic
ttaatcatgaaatagaagaat

SEQ ID NO: 15039 - DNA, 21 bp, Artificial Sequence
  Synthetic
tgaaatagaagaattggaaaa

SEQ ID NO: 15040 - DNA, 21 bp, Artificial Sequence
  Synthetic
ggaaaaaagaaaagataaggt

SEQ ID NO: 15041 - DNA, 21 bp, Artificial Sequence
  Synthetic
ctggaggtatacttcgatctt

SEQ ID NO: 15042 - DNA, 21 bp, Artificial Sequence
  Synthetic
tgcaagagcatcttctaaaga

SEQ ID NO: 15043 - DNA, 21 bp, Artificial Sequence
  Synthetic
gatctttagaagatgctcttg

SEQ ID NO: 15044 - DNA, 21 bp, Artificial Sequence
  Synthetic
agatgctcttgcagaggctca

SEQ ID NO: 15045 - DNA, 21 bp, Artificial Sequence
  Synthetic
attaactcgctgagcctctgc

SEQ ID NO: 15046 - DNA, 21 bp, Artificial Sequence
  Synthetic
ttgagatttagtattaactcg

SEQ ID NO: 15047 - DNA, 21 bp, Artificial Sequence
  Synthetic
tctcaaagcgcatttgatctc

SEQ ID NO: 15048 - DNA, 21 bp, Artificial Sequence
  Synthetic
cttcttgagatcaaatgcgct

SEQ ID NO: 15049 - DNA, 21 bp, Artificial Sequence
  Synthetic
caaagcgcatttgatctcaag

SEQ ID NO: 15050 - DNA, 21 bp, Artificial Sequence
  Synthetic
tcaagaagaaaaatctggcat

SEQ ID NO: 15051 - DNA, 21 bp, Artificial Sequence
  Synthetic
aagaagaaaaatctggcatgt

SEQ ID NO: 15052 - DNA, 21 bp, Artificial Sequence
  Synthetic
agaagaaaaatctggcatgtg

SEQ ID NO: 15053 - DNA, 21 bp, Artificial Sequence
  Synthetic
catgtgaggaaagcaaacgca

SEQ ID NO: 15054 - DNA, 21 bp, Artificial Sequence
  Synthetic
gaggaaagcaaacgcaaagag

SEQ ID NO: 15055 - DNA, 21 bp, Artificial Sequence
  Synthetic
aggaaagcaaacgcaaagagc

SEQ ID NO: 15056 - DNA, 21 bp, Artificial Sequence
  Synthetic
aagagctggaaaaaaatatgg

SEQ ID NO: 15057 - DNA, 21 bp, Artificial Sequence
  Synthetic
gactcaaaaactttagcagca

SEQ ID NO: 15058 - DNA, 21 bp, Artificial Sequence
  Synthetic
actcaaaaactttagcagcaa

SEQ ID NO: 15059 - DNA, 21 bp, Artificial Sequence
  Synthetic
tttcctttgctgctaaagttt

SEQ ID NO: 15060 - DNA, 21 bp, Artificial Sequence
  Synthetic
aaactttagcagcaaaggaaa

SEQ ID NO: 15061 - DNA, 21 bp, Artificial Sequence
  Synthetic
aagaggttaaaaagataacag

SEQ ID NO: 15062 - DNA, 21 bp, Artificial Sequence
  Synthetic
cagatggactgcatgcccttc

SEQ ID NO: 15063 - DNA, 21 bp, Artificial Sequence
  Synthetic
atctttattacttgcttcttg

SEQ ID NO: 15064 - DNA, 21 bp, Artificial Sequence
  Synthetic
agcatctttattacttgcttc

SEQ ID NO: 15065 - DNA, 21 bp, Artificial Sequence
  Synthetic
aagaagcaagtaataaagatg

SEQ ID NO: 15066 - DNA, 21 bp, Artificial Sequence
  Synthetic
gaagtgctgctgtgcagctgc

SEQ ID NO: 15067 - DNA, 21 bp, Artificial Sequence
  Synthetic
gacaggccagcggaaacagca

SEQ ID NO: 15068 - DNA, 21 bp, Artificial Sequence
  Synthetic
tttccgctggcctgtccagta

SEQ ID NO: 15069 - DNA, 21 bp, Artificial Sequence
  Synthetic
cttcattactggacaggccag

SEQ ID NO: 15070 - DNA, 21 bp, Artificial Sequence
  Synthetic
tcttcattactggacaggcca

SEQ ID NO: 15071 - DNA, 21 bp, Artificial Sequence
  Synthetic
ctggcctgtccagtaatgaag

SEQ ID NO: 15072 - DNA, 21 bp, Artificial Sequence
  Synthetic
tggcctgtccagtaatgaaga

SEQ ID NO: 15073 - DNA, 21 bp, Artificial Sequence
  Synthetic
tgtccagtaatgaagatggag

SEQ ID NO: 15074 - DNA, 21 bp, Artificial Sequence
  Synthetic
gcttctgctccatcttcatta

SEQ ID NO: 15075 - DNA, 21 bp, Artificial Sequence
  Synthetic
acaggccatcatttgaccagc

SEQ ID NO: 15076 - DNA, 21 bp, Artificial Sequence
  Synthetic
atgatataagtaaagctcaga

SEQ ID NO: 15077 - DNA, 21 bp, Artificial Sequence
  Synthetic
atttacctgtttggcttctgt

SEQ ID NO: 15078 - DNA, 21 bp, Artificial Sequence
  Synthetic
ctgccacaggctcagatgaag

SEQ ID NO: 15079 - DNA, 21 bp, Artificial Sequence
  Synthetic
ttgagcatgcttcaacttcat

SEQ ID NO: 15080 - DNA, 21 bp, Artificial Sequence
  Synthetic
atgaagttgaagcatgctcaa

SEQ ID NO: 15081 - DNA, 21 bp, Artificial Sequence
  Synthetic
tgaagttgaagcatgctcaac

SEQ ID NO: 15082 - DNA, 21 bp, Artificial Sequence
  Synthetic
aagcatgctcaacaggaatta

SEQ ID NO: 15083 - DNA, 21 bp, Artificial Sequence
  Synthetic
ttgtttattctttaattcctg

SEQ ID NO: 15084 - DNA, 21 bp, Artificial Sequence
  Synthetic
aggaattaaagaataaacaag

SEQ ID NO: 15085 - DNA, 21 bp, Artificial Sequence
  Synthetic
aagaataaacaagctgaagtt

SEQ ID NO: 15086 - DNA, 21 bp, Artificial Sequence
  Synthetic
aaacaagctgaagttaagaag

SEQ ID NO: 15087 - DNA, 21 bp, Artificial Sequence
  Synthetic
taagaagatggatagtggcta

SEQ ID NO: 15088 - DNA, 21 bp, Artificial Sequence
  Synthetic
aagaagatggatagtggctac

SEQ ID NO: 15089 - DNA, 21 bp, Artificial Sequence
  Synthetic
aagatggatagtggctacagg

SEQ ID NO: 15090 - DNA, 21 bp, Artificial Sequence
  Synthetic
atagtggctacaggaaggatc

SEQ ID NO: 15091 - DNA, 21 bp, Artificial Sequence
  Synthetic
acaggaaggatcaagaagctc

SEQ ID NO: 15092 - DNA, 21 bp, Artificial Sequence
  Synthetic
tagaagctgtaaaaagactta

SEQ ID NO: 15093 - DNA, 21 bp, Artificial Sequence
  Synthetic
taaaaagacttaaagaaaaac

SEQ ID NO: 15094 - DNA, 21 bp, Artificial Sequence
  Synthetic
gacttaaagaaaaacttgaag

SEQ ID NO: 15095 - DNA, 21 bp, Artificial Sequence
  Synthetic
aaagaaaaacttgaagctgaa

SEQ ID NO: 15096 - DNA, 21 bp, Artificial Sequence
  Synthetic
ctgaaatgaaaaagctaaatt

SEQ ID NO: 15097 - DNA, 21 bp, Artificial Sequence
  Synthetic
tgatttatccttcagaaaata

SEQ ID NO: 15098 - DNA, 21 bp, Artificial Sequence
  Synthetic
atttatccttcagaaaataaa

SEQ ID NO: 15099 - DNA, 21 bp, Artificial Sequence
  Synthetic
tttatccttcagaaaataaag

SEQ ID NO: 15100 - DNA, 21 bp, Artificial Sequence
  Synthetic
gaaaataaagaggaaagcctt

SEQ ID NO: 15101 - DNA, 21 bp, Artificial Sequence
  Synthetic
aaaataaagaggaaagccttt

SEQ ID NO: 15102 - DNA, 21 bp, Artificial Sequence
  Synthetic
ctgtctcgtgatattggtaga

SEQ ID NO: 15103 - DNA, 21 bp, Artificial Sequence
  Synthetic
ttctttcaatctaccaatatc

SEQ ID NO: 15104 - DNA, 21 bp, Artificial Sequence
  Synthetic
ctcgtgatattggtagattga

SEQ ID NO: 15105 - DNA, 21 bp, Artificial Sequence
  Synthetic
ttggtagattgaaagaaacat

SEQ ID NO: 15106 - DNA, 21 bp, Artificial Sequence
  Synthetic
aagattgggaaatctggctaa

SEQ ID NO: 15107 - DNA, 21 bp, Artificial Sequence
  Synthetic
cttgtatgcaaatcgaagatt

SEQ ID NO: 15108 - DNA, 21 bp, Artificial Sequence
  Synthetic
acttgtatgcaaatcgaagat

SEQ ID NO: 15109 - DNA, 21 bp, Artificial Sequence
  Synthetic
tacttgtatgcaaatcgaaga

SEQ ID NO: 15110 - DNA, 21 bp, Artificial Sequence
  Synthetic
atcttcgatttgcatacaagt

SEQ ID NO: 15111 - DNA, 21 bp, Artificial Sequence
  Synthetic
agtctcttacttgtatgcaaa

SEQ ID NO: 15112 - DNA, 21 bp, Artificial Sequence
  Synthetic
ttgtatttcagggatccagag

SEQ ID NO: 15113 - DNA, 21 bp, Artificial Sequence
  Synthetic
tttcagggatccagagaagaa

SEQ ID NO: 15114 - DNA, 21 bp, Artificial Sequence
  Synthetic
ttccagttcttctctggatcc

SEQ ID NO: 15115 - DNA, 21 bp, Artificial Sequence
  Synthetic
ttcagggatccagagaagaac

SEQ ID NO: 15116 - DNA, 21 bp, Artificial Sequence
  Synthetic
ggatccagagaagaactggaa

SEQ ID NO: 15117 - DNA, 21 bp, Artificial Sequence
  Synthetic
aatttctattccagttcttct

SEQ ID NO: 15118 - DNA, 21 bp, Artificial Sequence
  Synthetic
aagaactggaatagaaattgt

SEQ ID NO: 15119 - DNA, 21 bp, Artificial Sequence
  Synthetic
actggaatagaaattgtgtga

SEQ ID NO: 15120 - DNA, 21 bp, Artificial Sequence
  Synthetic
cttgtggcttctctgattagt

SEQ ID NO: 15121 - DNA, 21 bp, Artificial Sequence
  Synthetic
aagtgtctttcacactaatca

SEQ ID NO: 15122 - DNA, 21 bp, Artificial Sequence
  Synthetic
agaagtgtctttcacactaat

SEQ ID NO: 15123 - DNA, 21 bp, Artificial Sequence
  Synthetic
acacttctgcaaccacagctt

SEQ ID NO: 15124 - DNA, 21 bp, Artificial Sequence
  Synthetic
ctaattctaaagctgtggttg

SEQ ID NO: 15125 - DNA, 21 bp, Artificial Sequence
  Synthetic
ccacagctttagaattagtgg

SEQ ID NO: 15126 - DNA, 21 bp, Artificial Sequence
  Synthetic
cacagctttagaattagtggc

SEQ ID NO: 15127 - DNA, 21 bp, Artificial Sequence
  Synthetic
cagctttagaattagtggctg

SEQ ID NO: 15128 - DNA, 21 bp, Artificial Sequence
  Synthetic
tctgtgtctactacaacattg

SEQ ID NO: 15129 - DNA, 21 bp, Artificial Sequence
  Synthetic
tctacaatgttgtagtagaca

SEQ ID NO: 15130 - DNA, 21 bp, Artificial Sequence
  Synthetic
aggttactggtaaaaagctac

SEQ ID NO: 15131 - DNA, 21 bp, Artificial Sequence
  Synthetic
tactggtaaaaagctactaga

SEQ ID NO: 15132 - DNA, 21 bp, Artificial Sequence
  Synthetic
actggtaaaaagctactagaa

SEQ ID NO: 15133 - DNA, 21 bp, Artificial Sequence
  Synthetic
ctggtaaaaagctactagaaa

SEQ ID NO: 15134 - DNA, 21 bp, Artificial Sequence
  Synthetic
tggtaaaaagctactagaaag

SEQ ID NO: 15135 - DNA, 21 bp, Artificial Sequence
  Synthetic
ggtaaaaagctactagaaagg

SEQ ID NO: 15136 - DNA, 21 bp, Artificial Sequence
  Synthetic
gtaaaaagctactagaaaggg

SEQ ID NO: 15137 - DNA, 21 bp, Artificial Sequence
  Synthetic
aagctactagaaaggggggaa

SEQ ID NO: 15138 - DNA, 21 bp, Artificial Sequence
  Synthetic
tttcagccagatgtattgcac

SEQ ID NO: 15139 - DNA, 21 bp, Artificial Sequence
  Synthetic
tttctggtgcaatacatctgg

SEQ ID NO: 15140 - DNA, 21 bp, Artificial Sequence
  Synthetic
agatgtattgcaccagaaact

SEQ ID NO: 15141 - DNA, 21 bp, Artificial Sequence
  Synthetic
atgtattgcaccagaaactct

SEQ ID NO: 15142 - DNA, 21 bp, Artificial Sequence
  Synthetic
ccagaaactctgagagttgct

SEQ ID NO: 15143 - DNA, 21 bp, Artificial Sequence
  Synthetic
tacaagattctgagcaactct

SEQ ID NO: 15144 - DNA, 21 bp, Artificial Sequence
  Synthetic
caaaatgagacttacaagatt

SEQ ID NO: 15145 - DNA, 21 bp, Artificial Sequence
  Synthetic
gaacgttgtcagggccaacct

SEQ ID NO: 15146 - DNA, 21 bp, Artificial Sequence
  Synthetic
aaagagccacatgaacgttgt

SEQ ID NO: 15147 - DNA, 21 bp, Artificial Sequence
  Synthetic
ttcaaccaaggaaagagccac

SEQ ID NO: 15148 - DNA, 21 bp, Artificial Sequence
  Synthetic
ttcatgtggctctttccttgg

SEQ ID NO: 15149 - DNA, 21 bp, Artificial Sequence
  Synthetic
tggtttatattcaaccaagga

SEQ ID NO: 15150 - DNA, 21 bp, Artificial Sequence
  Synthetic
tttccttggttgaatataaac

SEQ ID NO: 15151 - DNA, 21 bp, Artificial Sequence
  Synthetic
gttctggtttatattcaacca

SEQ ID NO: 15152 - DNA, 21 bp, Artificial Sequence
  Synthetic
agttctggtttatattcaacc

SEQ ID NO: 15153 - DNA, 21 bp, Artificial Sequence
  Synthetic
gttgaatataaaccagaactt

SEQ ID NO: 15154 - DNA, 21 bp, Artificial Sequence
  Synthetic
aaaccagaacttcagaaagca

SEQ ID NO: 15155 - DNA, 21 bp, Artificial Sequence
  Synthetic
aaccagaacttcagaaagcaa

SEQ ID NO: 15156 - DNA, 21 bp, Artificial Sequence
  Synthetic
aaagacaaactccattgcttt

SEQ ID NO: 15157 - DNA, 21 bp, Artificial Sequence
  Synthetic
agaaagcaatggagtttgtct

SEQ ID NO: 15158 - DNA, 21 bp, Artificial Sequence
  Synthetic
gaaagcaatggagtttgtctt

SEQ ID NO: 15159 - DNA, 21 bp, Artificial Sequence
  Synthetic
acaacatttgtttgtgacaat

SEQ ID NO: 15160 - DNA, 21 bp, Artificial Sequence
  Synthetic
gccaaaaaagtggcctttgat

SEQ ID NO: 15161 - DNA, 21 bp, Artificial Sequence
  Synthetic
caaaaaagtggcctttgataa

SEQ ID NO: 15162 - DNA, 21 bp, Artificial Sequence
  Synthetic
ctttgataagaggataatgac

SEQ ID NO: 15163 - DNA, 21 bp, Artificial Sequence
  Synthetic
taatgactagaactgtaactc

SEQ ID NO: 15164 - DNA, 21 bp, Artificial Sequence
  Synthetic
aatgactagaactgtaactct

SEQ ID NO: 15165 - DNA, 21 bp, Artificial Sequence
  Synthetic
aggatcaaacacatcacctcc

SEQ ID NO: 15166 - DNA, 21 bp, Artificial Sequence
  Synthetic
tgaggatcaaacacatcacct

SEQ ID NO: 15167 - DNA, 21 bp, Artificial Sequence
  Synthetic
gaggtgatgtgtttgatcctc

SEQ ID NO: 15168 - DNA, 21 bp, Artificial Sequence
  Synthetic
aggtgatgtgtttgatcctca

SEQ ID NO: 15169 - DNA, 21 bp, Artificial Sequence
  Synthetic
gtgtttgatcctcatgggaca

SEQ ID NO: 15170 - DNA, 21 bp, Artificial Sequence
  Synthetic
ttgatcctcatgggacattga

SEQ ID NO: 15171 - DNA, 21 bp, Artificial Sequence
  Synthetic
tgatcctcatgggacattgag

SEQ ID NO: 15172 - DNA, 21 bp, Artificial Sequence
  Synthetic
tacctccactcaatgtcccat

SEQ ID NO: 15173 - DNA, 21 bp, Artificial Sequence
  Synthetic
cttacctccactcaatgtccc

SEQ ID NO: 15174 - DNA, 21 bp, Artificial Sequence
  Synthetic
taaaatggaagctgcctggga

SEQ ID NO: 15175 - DNA, 21 bp, Artificial Sequence
  Synthetic
ttggttaaaatggaagctgcc

SEQ ID NO: 15176 - DNA, 21 bp, Artificial Sequence
  Synthetic
cttggttaaaatggaagctgc

SEQ ID NO: 15177 - DNA, 21 bp, Artificial Sequence
  Synthetic
ctgaggtggctaaaaataagg

SEQ ID NO: 15178 - DNA, 21 bp, Artificial Sequence
  Synthetic
aggagtcagtaaataaagctc

SEQ ID NO: 15179 - DNA, 21 bp, Artificial Sequence
  Synthetic
agtcagtaaataaagctcaag

SEQ ID NO: 15180 - DNA, 21 bp, Artificial Sequence
  Synthetic
aagaagaggtgaccaagcaaa

SEQ ID NO: 15181 - DNA, 21 bp, Artificial Sequence
  Synthetic
tttagctttaattacagtgtc

SEQ ID NO: 15182 - DNA, 21 bp, Artificial Sequence
  Synthetic
ctgtaattaaagctaaatatg

SEQ ID NO: 15183 - DNA, 21 bp, Artificial Sequence
  Synthetic
tatgcagaagtggcaaaacac

SEQ ID NO: 15184 - DNA, 21 bp, Artificial Sequence
  Synthetic
atgcagaagtggcaaaacaca

SEQ ID NO: 15185 - DNA, 21 bp, Artificial Sequence
  Synthetic
aatgattctcagcttaaaatt

SEQ ID NO: 15186 - DNA, 21 bp, Artificial Sequence
  Synthetic
atgattctcagcttaaaatta

SEQ ID NO: 15187 - DNA, 21 bp, Artificial Sequence
  Synthetic
ccacaacatcagcaaacataa

SEQ ID NO: 15188 - DNA, 21 bp, Artificial Sequence
  Synthetic
cacaacatcagcaaacataaa

SEQ ID NO: 15189 - DNA, 21 bp, Artificial Sequence
  Synthetic
acaacatcagcaaacataaac

SEQ ID NO: 15190 - DNA, 21 bp, Artificial Sequence
  Synthetic
tcagcaaacataaacgggagg

SEQ ID NO: 15191 - DNA, 21 bp, Artificial Sequence
  Synthetic
tgtggctaggtatccaaaatg

SEQ ID NO: 15192 - DNA, 21 bp, Artificial Sequence
  Synthetic
cagtcataatctttcaacatt

SEQ ID NO: 15193 - DNA, 21 bp, Artificial Sequence
  Synthetic
caaaatgttgaaagattatga

SEQ ID NO: 15194 - DNA, 21 bp, Artificial Sequence
  Synthetic
aagattatgactggattaatg

SEQ ID NO: 15195 - DNA, 21 bp, Artificial Sequence
  Synthetic
gattatgactggattaatgca

SEQ ID NO: 15196 - DNA, 21 bp, Artificial Sequence
  Synthetic
taggcactattgggttggcca

SEQ ID NO: 15197 - DNA, 21 bp, Artificial Sequence
  Synthetic
atttcaaaactaacaacccta

SEQ ID NO: 15198 - DNA, 21 bp, Artificial Sequence
  Synthetic
gcttctttagggttgttagtt

SEQ ID NO: 15199 - DNA, 21 bp, Artificial Sequence
  Synthetic
aacaaccctaaagaagctggt

SEQ ID NO: 15200 - DNA, 21 bp, Artificial Sequence
  Synthetic
gaagtctctgaccagcttctt

SEQ ID NO: 15201 - DNA, 21 bp, Artificial Sequence
  Synthetic
aaagaagctggtcagagactt

SEQ ID NO: 15202 - DNA, 21 bp, Artificial Sequence
  Synthetic
gtcagagacttcagaagttgc

SEQ ID NO: 15203 - DNA, 21 bp, Artificial Sequence
  Synthetic
agacttcagaagttgcaagaa

SEQ ID NO: 15204 - DNA, 21 bp, Artificial Sequence
  Synthetic
cttcagaagttgcaagaaatg

SEQ ID NO: 15205 - DNA, 21 bp, Artificial Sequence
  Synthetic
ctccttcatttcttgcaactt

SEQ ID NO: 15206 - DNA, 21 bp, Artificial Sequence
  Synthetic
ttcagaagttgcaagaaatga

SEQ ID NO: 15207 - DNA, 21 bp, Artificial Sequence
  Synthetic
cagaagttgcaagaaatgaag

SEQ ID NO: 15208 - DNA, 21 bp, Artificial Sequence
  Synthetic
tgcaagaaatgaaggagaaac

SEQ ID NO: 15209 - DNA, 21 bp, Artificial Sequence
  Synthetic
gcaagaaatgaaggagaaact

SEQ ID NO: 15210 - DNA, 21 bp, Artificial Sequence
  Synthetic
agaaatgaaggagaaactagg

SEQ ID NO: 15211 - DNA, 21 bp, Artificial Sequence
  Synthetic
aaactaggaagaaatgtcaat

SEQ ID NO: 15212 - DNA, 21 bp, Artificial Sequence
  Synthetic
actaggaagaaatgtcaatat

SEQ ID NO: 15213 - DNA, 21 bp, Artificial Sequence
  Synthetic
agaaatgtcaatatgagagct

SEQ ID NO: 15214 - DNA, 21 bp, Artificial Sequence
  Synthetic
tgagagctatgaatgtattga

SEQ ID NO: 15215 - DNA, 21 bp, Artificial Sequence
  Synthetic
ctatgaatgtattgacagaag

SEQ ID NO: 15216 - DNA, 21 bp, Artificial Sequence
  Synthetic
tgaatgtattgacagaagctg

SEQ ID NO: 15217 - DNA, 21 bp, Artificial Sequence
  Synthetic
tgtattgacagaagctgaaga

SEQ ID NO: 15218 - DNA, 21 bp, Artificial Sequence
  Synthetic
atctcatagtacaatgacttg

SEQ ID NO: 15219 - DNA, 21 bp, Artificial Sequence
  Synthetic
tcttcatcaagtcattgtact

SEQ ID NO: 15220 - DNA, 21 bp, Artificial Sequence
  Synthetic
tcatagtacaatgacttgatg

SEQ ID NO: 15221 - DNA, 21 bp, Artificial Sequence
  Synthetic
tagtacaatgacttgatgaag

SEQ ID NO: 15222 - DNA, 21 bp, Artificial Sequence
  Synthetic
tacaatgacttgatgaagaag

SEQ ID NO: 15223 - DNA, 21 bp, Artificial Sequence
  Synthetic
caatgacttgatgaagaagaa

SEQ ID NO: 15224 - DNA, 21 bp, Artificial Sequence
  Synthetic
tgatgaagaagaagagaattg

SEQ ID NO: 15225 - DNA, 21 bp, Artificial Sequence
  Synthetic
aatccaaaattcttacaacta

SEQ ID NO: 15226 - DNA, 21 bp, Artificial Sequence
  Synthetic
tcttctatagttgtaagaatt

SEQ ID NO: 15227 - DNA, 21 bp, Artificial Sequence
  Synthetic
gtcaaggtcttctatagttgt

SEQ ID NO: 15228 - DNA, 21 bp, Artificial Sequence
  Synthetic
acaactatagaagaccttgac

SEQ ID NO: 15229 - DNA, 21 bp, Artificial Sequence
  Synthetic
actatagaagaccttgaccag

SEQ ID NO: 15230 - DNA, 21 bp, Artificial Sequence
  Synthetic
aaatccaggtgaacaaggact

SEQ ID NO: 15231 - DNA, 21 bp, Artificial Sequence
  Synthetic
agacccaaagtccttgttcac

SEQ ID NO: 15232 - DNA, 21 bp, Artificial Sequence
  Synthetic
cattagcaccaggcaaaagag

SEQ ID NO: 15233 - DNA, 21 bp, Artificial Sequence
  Synthetic
catagcattagcaccaggcaa

SEQ ID NO: 15234 - DNA, 21 bp, Artificial Sequence
  Synthetic
ctaatgctatgcttgcaccac

SEQ ID NO: 15235 - DNA, 21 bp, Artificial Sequence
  Synthetic
aatgctatgcttgcaccacca

SEQ ID NO: 15236 - DNA, 21 bp, Artificial Sequence
  Synthetic
ccaccagagggtcaaactgtt

SEQ ID NO: 15237 - DNA, 21 bp, Artificial Sequence
  Synthetic
ggtctggagttcaaggttgcc

SEQ ID NO: 15238 - DNA, 21 bp, Artificial Sequence
  Synthetic
gtctggagttcaaggttgcct

SEQ ID NO: 15239 - DNA, 21 bp, Artificial Sequence
  Synthetic
tctggagttcaaggttgcctt

SEQ ID NO: 15240 - DNA, 21 bp, Artificial Sequence
  Synthetic
caggtatttcccaaggcaacc

SEQ ID NO: 15241 - DNA, 21 bp, Artificial Sequence
  Synthetic
caaggttgccttgggaaatac

SEQ ID NO: 15242 - DNA, 21 bp, Artificial Sequence
  Synthetic
aaggttgccttgggaaatacc

SEQ ID NO: 15243 - DNA, 21 bp, Artificial Sequence
  Synthetic
ttgccttgggaaatacctgga

SEQ ID NO: 15244 - DNA, 21 bp, Artificial Sequence
  Synthetic
atacctggaaagaaaacctaa

SEQ ID NO: 15245 - DNA, 21 bp, Artificial Sequence
  Synthetic
ctaactgaacttagtggtggt

SEQ ID NO: 15246 - DNA, 21 bp, Artificial Sequence
  Synthetic
tgaacttagtggtggtcagag

SEQ ID NO: 15247 - DNA, 21 bp, Artificial Sequence
  Synthetic
aacttagtggtggtcagaggt

SEQ ID NO: 15248 - DNA, 21 bp, Artificial Sequence
  Synthetic
tgacaaggccactaaagacct

SEQ ID NO: 15249 - DNA, 21 bp, Artificial Sequence
  Synthetic
ggagcaggtttgaagagaagc

SEQ ID NO: 15250 - DNA, 21 bp, Artificial Sequence
  Synthetic
ataaattggagcaggtttgaa

SEQ ID NO: 15251 - DNA, 21 bp, Artificial Sequence
  Synthetic
atataaattggagcaggtttg

SEQ ID NO: 15252 - DNA, 21 bp, Artificial Sequence
  Synthetic
aggatataaattggagcaggt

SEQ ID NO: 15253 - DNA, 21 bp, Artificial Sequence
  Synthetic
ctgctccaatttatatccttg

SEQ ID NO: 15254 - DNA, 21 bp, Artificial Sequence
  Synthetic
tacctcatcaaggatataaat

SEQ ID NO: 15255 - DNA, 21 bp, Artificial Sequence
  Synthetic
ctacctcatcaaggatataaa

SEQ ID NO: 15256 - DNA, 21 bp, Artificial Sequence
  Synthetic
caaggctgcatctacctcatc

SEQ ID NO: 15257 - DNA, 21 bp, Artificial Sequence
  Synthetic
cttgatgaggtagatgcagcc

SEQ ID NO: 15258 - DNA, 21 bp, Artificial Sequence
  Synthetic
atctttctcatacccaaaaca

SEQ ID NO: 15259 - DNA, 21 bp, Artificial Sequence
  Synthetic
acgcagcatctgtccaatgtt

SEQ ID NO: 15260 - DNA, 21 bp, Artificial Sequence
  Synthetic
tcttacctgagaatgtgtgaa

SEQ ID NO: 15261 - DNA, 21 bp, Artificial Sequence
  Synthetic
tcatttcacacattctcaggt

SEQ ID NO: 15262 - DNA, 21 bp, Artificial Sequence
  Synthetic
ctggttcttacctgagaatgt

SEQ ID NO: 15263 - DNA, 21 bp, Artificial Sequence
  Synthetic
agttcattgtggtgtcactaa

SEQ ID NO: 15264 - DNA, 21 bp, Artificial Sequence
  Synthetic
ttgaaaagaacgtttgcattg

SEQ ID NO: 15265 - DNA, 21 bp, Artificial Sequence
  Synthetic
acaccatccacaaacttggtt

SEQ ID NO: 15266 - DNA, 21 bp, Artificial Sequence
  Synthetic
atgataactcatattgtaaac

SEQ ID NO: 15267 - DNA, 21 bp, Artificial Sequence
  Synthetic
tttgaagttctggtttacaat

SEQ ID NO: 15268 - DNA, 21 bp, Artificial Sequence
  Synthetic
accagaacttcaaatcctatg

SEQ ID NO: 15269 - DNA, 21 bp, Artificial Sequence
  Synthetic
ccagaacttcaaatcctatgc

SEQ ID NO: 15270 - DNA, 21 bp, Artificial Sequence
  Synthetic
cagaacttcaaatcctatgct

SEQ ID NO: 15271 - DNA, 21 bp, Artificial Sequence
  Synthetic
agaacttcaaatcctatgctg

SEQ ID NO: 15272 - DNA, 21 bp, Artificial Sequence
  Synthetic
aacttcaaatcctatgctggg

SEQ ID NO: 15273 - DNA, 21 bp, Artificial Sequence
  Synthetic
tcctatgctggggagaaaatt

SEQ ID NO: 15274 - DNA, 21 bp, Artificial Sequence
  Synthetic
cctatgctggggagaaaattc

SEQ ID NO: 15275 - DNA, 21 bp, Artificial Sequence
  Synthetic
aaataccttatggaaaggtcc

SEQ ID NO: 15276 - DNA, 21 bp, Artificial Sequence
  Synthetic
tatttccatacaaatacctta

SEQ ID NO: 15277 - DNA, 21 bp, Artificial Sequence
  Synthetic
ttatttccatacaaatacctt

SEQ ID NO: 15278 - DNA, 21 bp, Artificial Sequence
  Synthetic
tgccatttggcccgataatac

SEQ ID NO: 15279 - DNA, 21 bp, Artificial Sequence
  Synthetic
ctgccatttggcccgataata

SEQ ID NO: 15280 - DNA, 21 bp, Artificial Sequence
  Synthetic
aaaagcatagaatcaataaca

SEQ ID NO: 15281 - DNA, 21 bp, Artificial Sequence
  Synthetic
gatagccaaacacaaaaagca

SEQ ID NO: 15282 - DNA, 21 bp, Artificial Sequence
  Synthetic
tcagaattatgtattaatact

SEQ ID NO: 15283 - DNA, 21 bp, Artificial Sequence
  Synthetic
catcagaattatgtattaata

SEQ ID NO: 15284 - DNA, 21 bp, Artificial Sequence
  Synthetic
cagtattaatacataattctg

SEQ ID NO: 15285 - DNA, 21 bp, Artificial Sequence
  Synthetic
atacataattctgatgaacac

SEQ ID NO: 15286 - DNA, 21 bp, Artificial Sequence
  Synthetic
tctgaatgtccttgtgttcat

SEQ ID NO: 15287 - DNA, 21 bp, Artificial Sequence
  Synthetic
tctgatgaacacaaggacatt

SEQ ID NO: 15288 - DNA, 21 bp, Artificial Sequence
  Synthetic
aggacattcagagttgtacag

SEQ ID NO: 15289 - DNA, 21 bp, Artificial Sequence
  Synthetic
atgaacttctactgtacaact

SEQ ID NO: 15290 - DNA, 21 bp, Artificial Sequence
  Synthetic
ccttaccttatcaattatctt

SEQ ID NO: 15291 - DNA, 21 bp, Artificial Sequence
  Synthetic
tcaaaagataattgataaggt

SEQ ID NO: 15292 - DNA, 21 bp, Artificial Sequence
  Synthetic
caaaacaggaaggggatgatt

SEQ ID NO: 15293 - DNA, 21 bp, Artificial Sequence
  Synthetic
ggatacatagaaattactgtt

SEQ ID NO: 15294 - DNA, 21 bp, Artificial Sequence
  Synthetic
tggatacatagaaattactgt

SEQ ID NO: 15295 - DNA, 21 bp, Artificial Sequence
  Synthetic
taacagtaatttctatgtatc

SEQ ID NO: 15296 - DNA, 21 bp, Artificial Sequence
  Synthetic
ctgcaggccgttctggataca

SEQ ID NO: 15297 - DNA, 21 bp, Artificial Sequence
  Synthetic
ctatgtatccagaacggcctg

SEQ ID NO: 15298 - DNA, 21 bp, Artificial Sequence
  Synthetic
gtattatctctgcaggccgtt

SEQ ID NO: 15299 - DNA, 21 bp, Artificial Sequence
  Synthetic
atacttctgtctatcacataa

SEQ ID NO: 15300 - DNA, 21 bp, Artificial Sequence
  Synthetic
tacttctgtctatcacataag

SEQ ID NO: 15301 - DNA, 21 bp, Artificial Sequence
  Synthetic
tctttccacttatgtgataga

SEQ ID NO: 15302 - DNA, 21 bp, Artificial Sequence
  Synthetic
tctgtctatcacataagtgga

SEQ ID NO: 15303 - DNA, 21 bp, Artificial Sequence
  Synthetic
agtggaaagaaaaagacattt

SEQ ID NO: 15304 - DNA, 21 bp, Artificial Sequence
  Synthetic
agaaaaagacatttaaggatg

SEQ ID NO: 15305 - DNA, 21 bp, Artificial Sequence
  Synthetic
gaaaaagacatttaaggatgt

SEQ ID NO: 15306 - DNA, 21 bp, Artificial Sequence
  Synthetic
taaggatgttggaaatcttct

SEQ ID NO: 15307 - DNA, 21 bp, Artificial Sequence
  Synthetic
ttggaaatcttcttcgaagcc

SEQ ID NO: 15308 - DNA, 21 bp, Artificial Sequence
  Synthetic
tggaaatcttcttcgaagcca

SEQ ID NO: 15309 - DNA, 21 bp, Artificial Sequence
  Synthetic
caagtcaattccatggcttcg

SEQ ID NO: 15310 - DNA, 21 bp, Artificial Sequence
  Synthetic
cttcgaagccatggaattgac

SEQ ID NO: 15311 - DNA, 21 bp, Artificial Sequence
  Synthetic
gtccaagtcaattccatggct

SEQ ID NO: 15312 - DNA, 21 bp, Artificial Sequence
  Synthetic
gaagttgaacaaattgctatg

SEQ ID NO: 15313 - DNA, 21 bp, Artificial Sequence
  Synthetic
tgatgaaaccaaaaggccaga

SEQ ID NO: 15314 - DNA, 21 bp, Artificial Sequence
  Synthetic
caaaaggccagactgaacacg

SEQ ID NO: 15315 - DNA, 21 bp, Artificial Sequence
  Synthetic
aaaggccagactgaacacgat

SEQ ID NO: 15316 - DNA, 21 bp, Artificial Sequence
  Synthetic
ctgaacacgatgagggtatgc

SEQ ID NO: 15317 - DNA, 21 bp, Artificial Sequence
  Synthetic
atgagggtatgcttgaatatt

SEQ ID NO: 15318 - DNA, 21 bp, Artificial Sequence
  Synthetic
atttagaagatataattggtt

SEQ ID NO: 15319 - DNA, 21 bp, Artificial Sequence
  Synthetic
taattggttgtggacggctaa

SEQ ID NO: 15320 - DNA, 21 bp, Artificial Sequence
  Synthetic
tgaacctattaaagtcttgtg

SEQ ID NO: 15321 - DNA, 21 bp, Artificial Sequence
  Synthetic
gaacctattaaagtcttgtgt

SEQ ID NO: 15322 - DNA, 21 bp, Artificial Sequence
  Synthetic
acctattaaagtcttgtgtcg

SEQ ID NO: 15323 - DNA, 21 bp, Artificial Sequence
  Synthetic
ttaaagtcttgtgtcggagag

SEQ ID NO: 15324 - DNA, 21 bp, Artificial Sequence
  Synthetic
gtcggagagttgaaatattaa

SEQ ID NO: 15325 - DNA, 21 bp, Artificial Sequence
  Synthetic
agttgaaatattaaatgaaca

SEQ ID NO: 15326 - DNA, 21 bp, Artificial Sequence
  Synthetic
ttgaaatattaaatgaacaca

SEQ ID NO: 15327 - DNA, 21 bp, Artificial Sequence
  Synthetic
tgaaatattaaatgaacacag

SEQ ID NO: 15328 - DNA, 21 bp, Artificial Sequence
  Synthetic
aaatattaaatgaacacagag

SEQ ID NO: 15329 - DNA, 21 bp, Artificial Sequence
  Synthetic
atattaaatgaacacagagga

SEQ ID NO: 15330 - DNA, 21 bp, Artificial Sequence
  Synthetic
aatgaacacagaggagagaag

SEQ ID NO: 15331 - DNA, 21 bp, Artificial Sequence
  Synthetic
tagttaaacagggtaaagatg

SEQ ID NO: 15332 - DNA, 21 bp, Artificial Sequence
  Synthetic
agttaaacagggtaaagatgg

SEQ ID NO: 15333 - DNA, 21 bp, Artificial Sequence
  Synthetic
aacagggtaaagatggtggaa

SEQ ID NO: 15334 - DNA, 21 bp, Artificial Sequence
  Synthetic
acagggtaaagatggtggaaa

SEQ ID NO: 15335 - DNA, 21 bp, Artificial Sequence
  Synthetic
gtaaagatggtggaaaaggaa

SEQ ID NO: 15336 - DNA, 21 bp, Artificial Sequence
  Synthetic
tggaaaaggaaaaggatgcct

SEQ ID NO: 15337 - DNA, 21 bp, Artificial Sequence
  Synthetic
aaaaggaaaaggatgccttag

SEQ ID NO: 15338 - DNA, 21 bp, Artificial Sequence
  Synthetic
aaaggaaaaggatgccttaga

SEQ ID NO: 15339 - DNA, 21 bp, Artificial Sequence
  Synthetic
aggaaaaggatgccttagaag

SEQ ID NO: 15340 - DNA, 21 bp, Artificial Sequence
  Synthetic
gaaaaggatgccttagaagga

SEQ ID NO: 15341 - DNA, 21 bp, Artificial Sequence
  Synthetic
aaggagagaaaaacatagcta

SEQ ID NO: 15342 - DNA, 21 bp, Artificial Sequence
  Synthetic
atagctatcgaatttcttacc

SEQ ID NO: 15343 - DNA, 21 bp, Artificial Sequence
  Synthetic
tagctatcgaatttcttacct

SEQ ID NO: 15344 - DNA, 21 bp, Artificial Sequence
  Synthetic
tcgaatttcttaccttggaaa

SEQ ID NO: 15345 - DNA, 21 bp, Artificial Sequence
  Synthetic
taccttggaaaatgaaatatt

SEQ ID NO: 15346 - DNA, 21 bp, Artificial Sequence
  Synthetic
gaaaatgaaatatttagaaaa

SEQ ID NO: 15347 - DNA, 21 bp, Artificial Sequence
  Synthetic
cctccctatagttatgagttg

SEQ ID NO: 15348 - DNA, 21 bp, Artificial Sequence
  Synthetic
ctatagttatgagttgcagaa

SEQ ID NO: 15349 - DNA, 21 bp, Artificial Sequence
  Synthetic
atgagttgcagaaacgaattg

SEQ ID NO: 15350 - DNA, 21 bp, Artificial Sequence
  Synthetic
ttgcagaaacgaattgctgaa

SEQ ID NO: 15351 - DNA, 21 bp, Artificial Sequence
  Synthetic
tgcagaaacgaattgctgaaa

SEQ ID NO: 15352 - DNA, 21 bp, Artificial Sequence
  Synthetic
attgctgaaatggaaactcaa

SEQ ID NO: 15353 - DNA, 21 bp, Artificial Sequence
  Synthetic
ttgctgaaatggaaactcaaa

SEQ ID NO: 15354 - DNA, 21 bp, Artificial Sequence
  Synthetic
aaactcaaaaggaaaaaattc

SEQ ID NO: 15355 - DNA, 21 bp, Artificial Sequence
  Synthetic
aaaaaattcatgaagatacca

SEQ ID NO: 15356 - DNA, 21 bp, Artificial Sequence
  Synthetic
attaatttctttggtatcttc

SEQ ID NO: 15357 - DNA, 21 bp, Artificial Sequence
  Synthetic
atgaagataccaaagaaatta

SEQ ID NO: 15358 - DNA, 21 bp, Artificial Sequence
  Synthetic
gaagataccaaagaaattaat

SEQ ID NO: 15359 - DNA, 21 bp, Artificial Sequence
  Synthetic
gataccaaagaaattaatgag

SEQ ID NO: 15360 - DNA, 21 bp, Artificial Sequence
  Synthetic
agaagagcaatatactatcaa

SEQ ID NO: 15361 - DNA, 21 bp, Artificial Sequence
  Synthetic
agcaatatactatcaaatgaa

SEQ ID NO: 15362 - DNA, 21 bp, Artificial Sequence
  Synthetic
ctatcaaatgaaatgaaagct

SEQ ID NO: 15363 - DNA, 21 bp, Artificial Sequence
  Synthetic
agaataaagatgtaaaagata

SEQ ID NO: 15364 - DNA, 21 bp, Artificial Sequence
  Synthetic
tatacttgctttgctaggaaa

SEQ ID NO: 15365 - DNA, 21 bp, Artificial Sequence
  Synthetic
tgaataaaattacaaaattta

SEQ ID NO: 15366 - DNA, 21 bp, Artificial Sequence
  Synthetic
aataaaattacaaaatttatt

SEQ ID NO: 15367 - DNA, 21 bp, Artificial Sequence
  Synthetic
ataaaattacaaaatttattg

SEQ ID NO: 15368 - DNA, 21 bp, Artificial Sequence
  Synthetic
aaaattacaaaatttattgag

SEQ ID NO: 15369 - DNA, 21 bp, Artificial Sequence
  Synthetic
caaaatttattgaggagaata

SEQ ID NO: 15370 - DNA, 21 bp, Artificial Sequence
  Synthetic
gaaaaatttacacagctagat

SEQ ID NO: 15371 - DNA, 21 bp, Artificial Sequence
  Synthetic
aaaaatttacacagctagatt

SEQ ID NO: 15372 - DNA, 21 bp, Artificial Sequence
  Synthetic
agatttggaagatgttcaagt

SEQ ID NO: 15373 - DNA, 21 bp, Artificial Sequence
  Synthetic
atttggaagatgttcaagtta

SEQ ID NO: 15374 - DNA, 21 bp, Artificial Sequence
  Synthetic
agagaaaagttaaaacatgcc

SEQ ID NO: 15375 - DNA, 21 bp, Artificial Sequence
  Synthetic
gccacgagtaaagccaaaaaa

SEQ ID NO: 15376 - DNA, 21 bp, Artificial Sequence
  Synthetic
ccacgagtaaagccaaaaaac

SEQ ID NO: 15377 - DNA, 21 bp, Artificial Sequence
  Synthetic
acgagtaaagccaaaaaactg

SEQ ID NO: 15378 - DNA, 21 bp, Artificial Sequence
  Synthetic
agaaacaacttcaaaaagata

SEQ ID NO: 15379 - DNA, 21 bp, Artificial Sequence
  Synthetic
gaatttaaaagtatacctgcc

SEQ ID NO: 15380 - DNA, 21 bp, Artificial Sequence
  Synthetic
ccaagagtaacaatatcatta

SEQ ID NO: 15381 - DNA, 21 bp, Artificial Sequence
  Synthetic
tatcattaatgaaacaacaac

SEQ ID NO: 15382 - DNA, 21 bp, Artificial Sequence
  Synthetic
caacaaccagaaacaatgccc

SEQ ID NO: 15383 - DNA, 21 bp, Artificial Sequence
  Synthetic
acaaccagaaacaatgccctc

SEQ ID NO: 15384 - DNA, 21 bp, Artificial Sequence
  Synthetic
accagaaacaatgccctcgag

SEQ ID NO: 15385 - DNA, 21 bp, Artificial Sequence
  Synthetic
ccagaaacaatgccctcgaga

SEQ ID NO: 15386 - DNA, 21 bp, Artificial Sequence
  Synthetic
acaatgccctcgagaaggaaa

SEQ ID NO: 15387 - DNA, 21 bp, Artificial Sequence
  Synthetic
aatgccctcgagaaggaaaaa

SEQ ID NO: 15388 - DNA, 21 bp, Artificial Sequence
  Synthetic
ccctcgagaaggaaaaagaga

SEQ ID NO: 15389 - DNA, 21 bp, Artificial Sequence
  Synthetic
tcgagaaggaaaaagagaaag

SEQ ID NO: 15390 - DNA, 21 bp, Artificial Sequence
  Synthetic
gagaaagaagaaaaaaaatta

SEQ ID NO: 15391 - DNA, 21 bp, Artificial Sequence
  Synthetic
agaaagaagaaaaaaaattaa

SEQ ID NO: 15392 - DNA, 21 bp, Artificial Sequence
  Synthetic
gaaaaaaaattaaaggaagtt

SEQ ID NO: 15393 - DNA, 21 bp, Artificial Sequence
  Synthetic
gaagttatggatagccttaaa

SEQ ID NO: 15394 - DNA, 21 bp, Artificial Sequence
  Synthetic
aagttatggatagccttaaac

SEQ ID NO: 15395 - DNA, 21 bp, Artificial Sequence
  Synthetic
atagccttaaacaggaaacac

SEQ ID NO: 15396 - DNA, 21 bp, Artificial Sequence
  Synthetic
aaacaggaaacacaagggctt

SEQ ID NO: 15397 - DNA, 21 bp, Artificial Sequence
  Synthetic
aggaaacacaagggcttcaga

SEQ ID NO: 15398 - DNA, 21 bp, Artificial Sequence
  Synthetic
cacaagggcttcagaaagaaa

SEQ ID NO: 15399 - DNA, 21 bp, Artificial Sequence
  Synthetic
cagagtcgagagaaagaactt

SEQ ID NO: 15400 - DNA, 21 bp, Artificial Sequence
  Synthetic
tgggtttcagcaaatcggtaa

SEQ ID NO: 15401 - DNA, 21 bp, Artificial Sequence
  Synthetic
cgtgcttcatttaccgatttg

SEQ ID NO: 15402 - DNA, 21 bp, Artificial Sequence
  Synthetic
gtaaatgaagcacgttcaaag

SEQ ID NO: 15403 - DNA, 21 bp, Artificial Sequence
  Synthetic
ctgactgggctacatccatct

SEQ ID NO: 15404 - DNA, 21 bp, Artificial Sequence
  Synthetic
caaagatggatgtagcccagt

SEQ ID NO: 15405 - DNA, 21 bp, Artificial Sequence
  Synthetic
gagatagatatcaagttctga

SEQ ID NO: 15406 - DNA, 21 bp, Artificial Sequence
  Synthetic
gacactgcagtattatgacga

SEQ ID NO: 15407 - DNA, 21 bp, Artificial Sequence
  Synthetic
gtgtctcaattaactaaggct

SEQ ID NO: 15408 - DNA, 21 bp, Artificial Sequence
  Synthetic
tgtctcaattaactaaggcta

SEQ ID NO: 15409 - DNA, 21 bp, Artificial Sequence
  Synthetic
agcttccttagccttagttaa

SEQ ID NO: 15410 - DNA, 21 bp, Artificial Sequence
  Synthetic
aggaagctctaattgcagctt

SEQ ID NO: 15411 - DNA, 21 bp, Artificial Sequence
  Synthetic
gagagtctcagaagctgcaat

SEQ ID NO: 15412 - DNA, 21 bp, Artificial Sequence
  Synthetic
ttgcagcttctgagactctca

SEQ ID NO: 15413 - DNA, 21 bp, Artificial Sequence
  Synthetic
agcttctgagactctcaaaga

SEQ ID NO: 15414 - DNA, 21 bp, Artificial Sequence
  Synthetic
gcttctgagactctcaaagaa

SEQ ID NO: 15415 - DNA, 21 bp, Artificial Sequence
  Synthetic
ctttcctttctttgagagtct

SEQ ID NO: 15416 - DNA, 21 bp, Artificial Sequence
  Synthetic
gattgcagctttcctttcttt

SEQ ID NO: 15417 - DNA, 21 bp, Artificial Sequence
  Synthetic
ctgattgcagctttcctttct

SEQ ID NO: 15418 - DNA, 21 bp, Artificial Sequence
  Synthetic
caaagaaaggaaagctgcaat

SEQ ID NO: 15419 - DNA, 21 bp, Artificial Sequence
  Synthetic
ggaaagctgcaatcagagata

SEQ ID NO: 15420 - DNA, 21 bp, Artificial Sequence
  Synthetic
aagctgcaatcagagatatag

SEQ ID NO: 15421 - DNA, 21 bp, Artificial Sequence
  Synthetic
agctgcaatcagagatataga

SEQ ID NO: 15422 - DNA, 21 bp, Artificial Sequence
  Synthetic
tagaaggaaaactccctcaaa

SEQ ID NO: 15423 - DNA, 21 bp, Artificial Sequence
  Synthetic
gaaaactccctcaaactgaac

SEQ ID NO: 15424 - DNA, 21 bp, Artificial Sequence
  Synthetic
tttaattcttgttcagtttga

SEQ ID NO: 15425 - DNA, 21 bp, Artificial Sequence
  Synthetic
ctttaattcttgttcagtttg

SEQ ID NO: 15426 - DNA, 21 bp, Artificial Sequence
  Synthetic
cctttaattcttgttcagttt

SEQ ID NO: 15427 - DNA, 21 bp, Artificial Sequence
  Synthetic
cctcaaactgaacaagaatta

SEQ ID NO: 15428 - DNA, 21 bp, Artificial Sequence
  Synthetic
ctcctttaattcttgttcagt

SEQ ID NO: 15429 - DNA, 21 bp, Artificial Sequence
  Synthetic
ctcaaactgaacaagaattaa

SEQ ID NO: 15430 - DNA, 21 bp, Artificial Sequence
  Synthetic
aagaacttcaaaaacttacac

SEQ ID NO: 15431 - DNA, 21 bp, Artificial Sequence
  Synthetic
aacttcaaaaacttacacaag

SEQ ID NO: 15432 - DNA, 21 bp, Artificial Sequence
  Synthetic
tgtttcttcttgtgtaagttt

SEQ ID NO: 15433 - DNA, 21 bp, Artificial Sequence
  Synthetic
ttcatgatctctttcaaaaag

SEQ ID NO: 15434 - DNA, 21 bp, Artificial Sequence
  Synthetic
atgatctctttcaaaaagttg

SEQ ID NO: 15435 - DNA, 21 bp, Artificial Sequence
  Synthetic
tttcaaaaagttgaagaagca

SEQ ID NO: 15436 - DNA, 21 bp, Artificial Sequence
  Synthetic
gctctttgcttcttcaacttt

SEQ ID NO: 15437 - DNA, 21 bp, Artificial Sequence
  Synthetic
gaagcaaagagctcattagca

SEQ ID NO: 15438 - DNA, 21 bp, Artificial Sequence
  Synthetic
aaagagctcattagcaatgaa

SEQ ID NO: 15439 - DNA, 21 bp, Artificial Sequence
  Synthetic
ccctacttcgattcattgcta

SEQ ID NO: 15440 - DNA, 21 bp, Artificial Sequence
  Synthetic
ctcattagcaatgaatcgaag

SEQ ID NO: 15441 - DNA, 21 bp, Artificial Sequence
  Synthetic
tcattagcaatgaatcgaagt

SEQ ID NO: 15442 - DNA, 21 bp, Artificial Sequence
  Synthetic
cattagcaatgaatcgaagta

SEQ ID NO: 15443 - DNA, 21 bp, Artificial Sequence
  Synthetic
attagcaatgaatcgaagtag

SEQ ID NO: 15444 - DNA, 21 bp, Artificial Sequence
  Synthetic
ttagcaatgaatcgaagtagg

SEQ ID NO: 15445 - DNA, 21 bp, Artificial Sequence
  Synthetic
aagtccttgatgcaataattc

SEQ ID NO: 15446 - DNA, 21 bp, Artificial Sequence
  Synthetic
aattcaagaaaaaaaatctgg

SEQ ID NO: 15447 - DNA, 21 bp, Artificial Sequence
  Synthetic
aaaaaaaatctggcaggattc

SEQ ID NO: 15448 - DNA, 21 bp, Artificial Sequence
  Synthetic
aaaaaaatctggcaggattcc

SEQ ID NO: 15449 - DNA, 21 bp, Artificial Sequence
  Synthetic
ctggcaggattccaggaatat

SEQ ID NO: 15450 - DNA, 21 bp, Artificial Sequence
  Synthetic
tggcaggattccaggaatata

SEQ ID NO: 15451 - DNA, 21 bp, Artificial Sequence
  Synthetic
taccaatcttccatatattcc

SEQ ID NO: 15452 - DNA, 21 bp, Artificial Sequence
  Synthetic
ttaccaatcttccatatattc

SEQ ID NO: 15453 - DNA, 21 bp, Artificial Sequence
  Synthetic
ctcttcattattagggggact

SEQ ID NO: 15454 - DNA, 21 bp, Artificial Sequence
  Synthetic
tcttcattattagggggactt

SEQ ID NO: 15455 - DNA, 21 bp, Artificial Sequence
  Synthetic
agggggacttaggagccattg

SEQ ID NO: 15456 - DNA, 21 bp, Artificial Sequence
  Synthetic
atatcatcctgttgtcatgca

SEQ ID NO: 15457 - DNA, 21 bp, Artificial Sequence
  Synthetic
atgtagtccagtgcatgacaa

SEQ ID NO: 15458 - DNA, 21 bp, Artificial Sequence
  Synthetic
ttgattctattgatatagccc

SEQ ID NO: 15459 - DNA, 21 bp, Artificial Sequence
  Synthetic
cacattcttgggctatatcaa

SEQ ID NO: 15460 - DNA, 21 bp, Artificial Sequence
  Synthetic
tttaaggaagtttacacattc

SEQ ID NO: 15461 - DNA, 21 bp, Artificial Sequence
  Synthetic
acttccttaaaagacaaaata

SEQ ID NO: 15462 - DNA, 21 bp, Artificial Sequence
  Synthetic
cttccttaaaagacaaaatat

SEQ ID NO: 15463 - DNA, 21 bp, Artificial Sequence
  Synthetic
acctttataggtttagataag

SEQ ID NO: 15464 - DNA, 21 bp, Artificial Sequence
  Synthetic
ctgtatgggcgaaaaagatga

SEQ ID NO: 15465 - DNA, 21 bp, Artificial Sequence
  Synthetic
agatgaccgaaattcaaactc

SEQ ID NO: 15466 - DNA, 21 bp, Artificial Sequence
  Synthetic
ttgatttagtaaaagtaaaag

SEQ ID NO: 15467 - DNA, 21 bp, Artificial Sequence
  Synthetic
gatttagtaaaagtaaaagat

SEQ ID NO: 15468 - DNA, 21 bp, Artificial Sequence
  Synthetic
taaagcaaaataaaaagcttg

SEQ ID NO: 15469 - DNA, 21 bp, Artificial Sequence
  Synthetic
gataccttagtagctgacaac

SEQ ID NO: 15470 - DNA, 21 bp, Artificial Sequence
  Synthetic
tgacaacttggatcaagccac

SEQ ID NO: 15471 - DNA, 21 bp, Artificial Sequence
  Synthetic
aagagtagcatatcaaaaaga

SEQ ID NO: 15472 - DNA, 21 bp, Artificial Sequence
  Synthetic
agcatatcaaaaagatagaag

SEQ ID NO: 15473 - DNA, 21 bp, Artificial Sequence
  Synthetic
gcatatcaaaaagatagaaga

SEQ ID NO: 15474 - DNA, 21 bp, Artificial Sequence
  Synthetic
atatcaaaaagatagaagatg

SEQ ID NO: 15475 - DNA, 21 bp, Artificial Sequence
  Synthetic
agatggagagtggtaacttta

SEQ ID NO: 15476 - DNA, 21 bp, Artificial Sequence
  Synthetic
gatggagagtggtaactttac

SEQ ID NO: 15477 - DNA, 21 bp, Artificial Sequence
  Synthetic
taactttacagggacaaatca

SEQ ID NO: 15478 - DNA, 21 bp, Artificial Sequence
  Synthetic
tccaccaccagtcattgtacc

SEQ ID NO: 15479 - DNA, 21 bp, Artificial Sequence
  Synthetic
ttccaggtacaatgactggtg

SEQ ID NO: 15480 - DNA, 21 bp, Artificial Sequence
  Synthetic
ttccaccaccagtcattgtac

SEQ ID NO: 15481 - DNA, 21 bp, Artificial Sequence
  Synthetic
tccaggtacaatgactggtgg

SEQ ID NO: 15482 - DNA, 21 bp, Artificial Sequence
  Synthetic
actggtggtggaagcaaagta

SEQ ID NO: 15483 - DNA, 21 bp, Artificial Sequence
  Synthetic
gtggtggaagcaaagtaatga

SEQ ID NO: 15484 - DNA, 21 bp, Artificial Sequence
  Synthetic
tggtggaagcaaagtaatgaa

SEQ ID NO: 15485 - DNA, 21 bp, Artificial Sequence
  Synthetic
tggaagcaaagtaatgaaagg

SEQ ID NO: 15486 - DNA, 21 bp, Artificial Sequence
  Synthetic
agcaaagtaatgaaaggaaga

SEQ ID NO: 15487 - DNA, 21 bp, Artificial Sequence
  Synthetic
gaatgggttcctcacttgtta

SEQ ID NO: 15488 - DNA, 21 bp, Artificial Sequence
  Synthetic
cagagatttcaataacaagtg

SEQ ID NO: 15489 - DNA, 21 bp, Artificial Sequence
  Synthetic
tcagagatttcaataacaagt

SEQ ID NO: 15490 - DNA, 21 bp, Artificial Sequence
  Synthetic
cctcacttgttattgaaatct

SEQ ID NO: 15491 - DNA, 21 bp, Artificial Sequence
  Synthetic
cttcagagatttcaataacaa

SEQ ID NO: 15492 - DNA, 21 bp, Artificial Sequence
  Synthetic
cacttgttattgaaatctctg

SEQ ID NO: 15493 - DNA, 21 bp, Artificial Sequence
  Synthetic
ttgttattgaaatctctgaag

SEQ ID NO: 15494 - DNA, 21 bp, Artificial Sequence
  Synthetic
tagatatgctgacctcttctt

SEQ ID NO: 15495 - DNA, 21 bp, Artificial Sequence
  Synthetic
ctttctttgtaggtaaacaaa

SEQ ID NO: 15496 - DNA, 21 bp, Artificial Sequence
  Synthetic
tttctttgtaggtaaacaaaa

SEQ ID NO: 15497 - DNA, 21 bp, Artificial Sequence
  Synthetic
ctaaaaaagcaatgcaaatcc

SEQ ID NO: 15498 - DNA, 21 bp, Artificial Sequence
  Synthetic
aaagcaatgcaaatccaagaa

SEQ ID NO: 15499 - DNA, 21 bp, Artificial Sequence
  Synthetic
ttcaagttgtactttctgttc

SEQ ID NO: 15500 - DNA, 21 bp, Artificial Sequence
  Synthetic
tccaagaacagaaagtacaac

SEQ ID NO: 15501 - DNA, 21 bp, Artificial Sequence
  Synthetic
aagaacagaaagtacaacttg

SEQ ID NO: 15502 - DNA, 21 bp, Artificial Sequence
  Synthetic
acagaaagtacaacttgaaga

SEQ ID NO: 15503 - DNA, 21 bp, Artificial Sequence
  Synthetic
gagtagttaagttacggcata

SEQ ID NO: 15504 - DNA, 21 bp, Artificial Sequence
  Synthetic
agttaagttacggcatagtga

SEQ ID NO: 15505 - DNA, 21 bp, Artificial Sequence
  Synthetic
ttaagttacggcatagtgaac

SEQ ID NO: 15506 - DNA, 21 bp, Artificial Sequence
  Synthetic
ttacggcatagtgaacgagaa

SEQ ID NO: 15507 - DNA, 21 bp, Artificial Sequence
  Synthetic
acggcatagtgaacgagaaat

SEQ ID NO: 15508 - DNA, 21 bp, Artificial Sequence
  Synthetic
cggcatagtgaacgagaaatg

SEQ ID NO: 15509 - DNA, 21 bp, Artificial Sequence
  Synthetic
aacgagaaatgaggaacacac

SEQ ID NO: 15510 - DNA, 21 bp, Artificial Sequence
  Synthetic
tgtagcgtttaatagagcaag

SEQ ID NO: 15511 - DNA, 21 bp, Artificial Sequence
  Synthetic
ttaatagagcaagaagaatat

SEQ ID NO: 15512 - DNA, 21 bp, Artificial Sequence
  Synthetic
gaatatttgaatgtccaagtt

SEQ ID NO: 15513 - DNA, 21 bp, Artificial Sequence
  Synthetic
aatatttgaatgtccaagtta

SEQ ID NO: 15514 - DNA, 21 bp, Artificial Sequence
  Synthetic
tgaatgtccaagttaaggaac

SEQ ID NO: 15515 - DNA, 21 bp, Artificial Sequence
  Synthetic
attagcttcaagttccttaac

SEQ ID NO: 15516 - DNA, 21 bp, Artificial Sequence
  Synthetic
acagcccctgacaaaaaaaag

SEQ ID NO: 15517 - DNA, 21 bp, Artificial Sequence
  Synthetic
acaaaaaaaagcagaaattgc

SEQ ID NO: 15518 - DNA, 21 bp, Artificial Sequence
  Synthetic
aaaaaaagcagaaattgctag

SEQ ID NO: 15519 - DNA, 21 bp, Artificial Sequence
  Synthetic
ctatctctaaacatacctgtt

SEQ ID NO: 15520 - DNA, 21 bp, Artificial Sequence
  Synthetic
tttcagaatatgatgctgtgg

SEQ ID NO: 15521 - DNA, 21 bp, Artificial Sequence
  Synthetic
tctcagccacagcatcatatt

SEQ ID NO: 15522 - DNA, 21 bp, Artificial Sequence
  Synthetic
tcagaatatgatgctgtggct

SEQ ID NO: 15523 - DNA, 21 bp, Artificial Sequence
  Synthetic
tggctgagaaagctggtaaag

SEQ ID NO: 15524 - DNA, 21 bp, Artificial Sequence
  Synthetic
agaaagctggtaaagtagaag

SEQ ID NO: 15525 - DNA, 21 bp, Artificial Sequence
  Synthetic
aacgcttacacaataccatcg

SEQ ID NO: 15526 - DNA, 21 bp, Artificial Sequence
  Synthetic
tcaagtttgtcttgttgggcc

SEQ ID NO: 15527 - DNA, 21 bp, Artificial Sequence
  Synthetic
ataaaataaataagcaattag

SEQ ID NO: 15528 - DNA, 21 bp, Artificial Sequence
  Synthetic
ctacttgggctttagtaatag

SEQ ID NO: 15529 - DNA, 21 bp, Artificial Sequence
  Synthetic
gtcagcagtcttgattgctac

SEQ ID NO: 15530 - DNA, 21 bp, Artificial Sequence
  Synthetic
gcaatcaagactgctgacagg

SEQ ID NO: 15531 - DNA, 21 bp, Artificial Sequence
  Synthetic
caagacagagtcttgtgcctt

SEQ ID NO: 15532 - DNA, 21 bp, Artificial Sequence
  Synthetic
cacaagactctgtcttgcgta

SEQ ID NO: 15533 - DNA, 21 bp, Artificial Sequence
  Synthetic
caagactctgtcttgcgtaca

SEQ ID NO: 15534 - DNA, 21 bp, Artificial Sequence
  Synthetic
actctgtcttgcgtacagaga

SEQ ID NO: 15535 - DNA, 21 bp, Artificial Sequence
  Synthetic
tttctttctctgtacgcaaga

SEQ ID NO: 15536 - DNA, 21 bp, Artificial Sequence
  Synthetic
cagagaaagaaataaaagata

SEQ ID NO: 15537 - DNA, 21 bp, Artificial Sequence
  Synthetic
gagaaagaaataaaagatact

SEQ ID NO: 15538 - DNA, 21 bp, Artificial Sequence
  Synthetic
aagaaataaaagatactgaga

SEQ ID NO: 15539 - DNA, 21 bp, Artificial Sequence
  Synthetic
ataaaagatactgagaaagag

SEQ ID NO: 15540 - DNA, 21 bp, Artificial Sequence
  Synthetic
aagaggtggatgacctaacag

SEQ ID NO: 15541 - DNA, 21 bp, Artificial Sequence
  Synthetic
gtggatgacctaacagcagag

SEQ ID NO: 15542 - DNA, 21 bp, Artificial Sequence
  Synthetic
taacagcagagctgaaaagtc

SEQ ID NO: 15543 - DNA, 21 bp, Artificial Sequence
  Synthetic
acagcagagctgaaaagtctt

SEQ ID NO: 15544 - DNA, 21 bp, Artificial Sequence
  Synthetic
aaagtcttgaggacaaagcag

SEQ ID NO: 15545 - DNA, 21 bp, Artificial Sequence
  Synthetic
gacaaagcagcagaggtcgta

SEQ ID NO: 15546 - DNA, 21 bp, Artificial Sequence
  Synthetic
tcgtaaagaatacaaatgctg

SEQ ID NO: 15547 - DNA, 21 bp, Artificial Sequence
  Synthetic
gaatacaaatgctgcagaggt

SEQ ID NO: 15548 - DNA, 21 bp, Artificial Sequence
  Synthetic
tcggtgtttaggaatccttac

SEQ ID NO: 15549 - DNA, 21 bp, Artificial Sequence
  Synthetic
taggaatccttaccagagatc

SEQ ID NO: 15550 - DNA, 21 bp, Artificial Sequence
  Synthetic
aatccttaccagagatccaga

SEQ ID NO: 15551 - DNA, 21 bp, Artificial Sequence
  Synthetic
tgttctttctggatctctggt

SEQ ID NO: 15552 - DNA, 21 bp, Artificial Sequence
  Synthetic
aagcagattgcgatgttcttt

SEQ ID NO: 15553 - DNA, 21 bp, Artificial Sequence
  Synthetic
aagaacatcgcaatctgcttc

SEQ ID NO: 15554 - DNA, 21 bp, Artificial Sequence
  Synthetic
ttcaagaattaaaagttattc

SEQ ID NO: 15555 - DNA, 21 bp, Artificial Sequence
  Synthetic
aattaaaagttattcaagaaa

SEQ ID NO: 15556 - DNA, 21 bp, Artificial Sequence
  Synthetic
cttaatactaagtgcatcttt

SEQ ID NO: 15557 - DNA, 21 bp, Artificial Sequence
  Synthetic
aaagatgcacttagtattaag

SEQ ID NO: 15558 - DNA, 21 bp, Artificial Sequence
  Synthetic
cacttagtattaagttgaaac

SEQ ID NO: 15559 - DNA, 21 bp, Artificial Sequence
  Synthetic
aacaaatagatggtcacattg

SEQ ID NO: 15560 - DNA, 21 bp, Artificial Sequence
  Synthetic
ctaaaataaaatattggcaca

SEQ ID NO: 15561 - DNA, 21 bp, Artificial Sequence
  Synthetic
ataaaatattggcacaaagag

SEQ ID NO: 15562 - DNA, 21 bp, Artificial Sequence
  Synthetic
ctataggatgcagtgatattt

SEQ ID NO: 15563 - DNA, 21 bp, Artificial Sequence
  Synthetic
caaaaatatcactgcatccta

SEQ ID NO: 15564 - DNA, 21 bp, Artificial Sequence
  Synthetic
atcctatagaagataatccta

SEQ ID NO: 15565 - DNA, 21 bp, Artificial Sequence
  Synthetic
cttcaataggattatcttcta

SEQ ID NO: 15566 - DNA, 21 bp, Artificial Sequence
  Synthetic
ctatagaagataatcctattg

SEQ ID NO: 15567 - DNA, 21 bp, Artificial Sequence
  Synthetic
ttagaaccgaaatctcttcaa

SEQ ID NO: 15568 - DNA, 21 bp, Artificial Sequence
  Synthetic
aagagatttcggttctaagcc

SEQ ID NO: 15569 - DNA, 21 bp, Artificial Sequence
  Synthetic
gagatttcggttctaagccca

SEQ ID NO: 15570 - DNA, 21 bp, Artificial Sequence
  Synthetic
caagatcctctgggcttagaa

SEQ ID NO: 15571 - DNA, 21 bp, Artificial Sequence
  Synthetic
cggttctaagcccagaggatc

SEQ ID NO: 15572 - DNA, 21 bp, Artificial Sequence
  Synthetic
cgcttcaagatcctctgggct

SEQ ID NO: 15573 - DNA, 21 bp, Artificial Sequence
  Synthetic
tcttgatcgcttcaagatcct

SEQ ID NO: 15574 - DNA, 21 bp, Artificial Sequence
  Synthetic
ccagaggatcttgaagcgatc

SEQ ID NO: 15575 - DNA, 21 bp, Artificial Sequence
  Synthetic
caatttgatttgttatagaat

SEQ ID NO: 15576 - DNA, 21 bp, Artificial Sequence
  Synthetic
aaagtgcaatttgatttgtta

SEQ ID NO: 15577 - DNA, 21 bp, Artificial Sequence
  Synthetic
ataacaaatcaaattgcactt

SEQ ID NO: 15578 - DNA, 21 bp, Artificial Sequence
  Synthetic
taacaaatcaaattgcacttt

SEQ ID NO: 15579 - DNA, 21 bp, Artificial Sequence
  Synthetic
ttggaagcccggtgtcatgaa

SEQ ID NO: 15580 - DNA, 21 bp, Artificial Sequence
  Synthetic
gtttggtttcatttcatgaca

SEQ ID NO: 15581 - DNA, 21 bp, Artificial Sequence
  Synthetic
aaccaaacctcggtgccatcg

SEQ ID NO: 15582 - DNA, 21 bp, Artificial Sequence
  Synthetic
ggtgccatcgcagagtataaa

SEQ ID NO: 15583 - DNA, 21 bp, Artificial Sequence
  Synthetic
cgcagagtataaaaagaaggt

SEQ ID NO: 15584 - DNA, 21 bp, Artificial Sequence
  Synthetic
gttgcaaatacaattcttcct

SEQ ID NO: 15585 - DNA, 21 bp, Artificial Sequence
  Synthetic
acaggaagaattgtatttgca

SEQ ID NO: 15586 - DNA, 21 bp, Artificial Sequence
  Synthetic
aattgtatttgcaacgggtag

SEQ ID NO: 15587 - DNA, 21 bp, Artificial Sequence
  Synthetic
tatttgcaacgggtagcagaa

SEQ ID NO: 15588 - DNA, 21 bp, Artificial Sequence
  Synthetic
cagaattggacaaaattactt

SEQ ID NO: 15589 - DNA, 21 bp, Artificial Sequence
  Synthetic
attggacaaaattacttatga

SEQ ID NO: 15590 - DNA, 21 bp, Artificial Sequence
  Synthetic
tagacaggcatatgaagatct

SEQ ID NO: 15591 - DNA, 21 bp, Artificial Sequence
  Synthetic
agacaggcatatgaagatctt

SEQ ID NO: 15592 - DNA, 21 bp, Artificial Sequence
  Synthetic
atcttcggaaacaaaggctta

SEQ ID NO: 15593 - DNA, 21 bp, Artificial Sequence
  Synthetic
aaattcattaagcctttgttt

SEQ ID NO: 15594 - DNA, 21 bp, Artificial Sequence
  Synthetic
tatataataacaaataaatta

SEQ ID NO: 15595 - DNA, 21 bp, Artificial Sequence
  Synthetic
atataataacaaataaattaa

SEQ ID NO: 15596 - DNA, 21 bp, Artificial Sequence
  Synthetic
gaaaattaccaaatgcttact

SEQ ID NO: 15597 - DNA, 21 bp, Artificial Sequence
  Synthetic
aaaattaccaaatgcttactt

SEQ ID NO: 15598 - DNA, 21 bp, Artificial Sequence
  Synthetic
aaattaccaaatgcttacttt

SEQ ID NO: 15599 - DNA, 21 bp, Artificial Sequence
  Synthetic
attaccaaatgcttactttgg

SEQ ID NO: 15600 - DNA, 21 bp, Artificial Sequence
  Synthetic
ttaccaaatgcttactttggg

SEQ ID NO: 15601 - DNA, 21 bp, Artificial Sequence
  Synthetic
taccaaatgcttactttggga

SEQ ID NO: 15602 - DNA, 21 bp, Artificial Sequence
  Synthetic
tgcttactttgggaggggacg

SEQ ID NO: 15603 - DNA, 21 bp, Artificial Sequence
  Synthetic
ctttgggaggggacgccgaac

SEQ ID NO: 15604 - DNA, 21 bp, Artificial Sequence
  Synthetic
gaactcgagcttgtagacagc

SEQ ID NO: 15605 - DNA, 21 bp, Artificial Sequence
  Synthetic
ggatccaagctgtctacaagc

SEQ ID NO: 15606 - DNA, 21 bp, Artificial Sequence
  Synthetic
tagacagcttggatcctttct

SEQ ID NO: 15607 - DNA, 21 bp, Artificial Sequence
  Synthetic
acagcttggatcctttctctg

SEQ ID NO: 15608 - DNA, 21 bp, Artificial Sequence
  Synthetic
cagcttggatcctttctctga

SEQ ID NO: 15609 - DNA, 21 bp, Artificial Sequence
  Synthetic
tgaacatgattccttcagaga

SEQ ID NO: 15610 - DNA, 21 bp, Artificial Sequence
  Synthetic
cacctgaacatgattccttca

SEQ ID NO: 15611 - DNA, 21 bp, Artificial Sequence
  Synthetic
cacacctgaacatgattcctt

SEQ ID NO: 15612 - DNA, 21 bp, Artificial Sequence
  Synthetic
catttcagtgttcgaccacct

SEQ ID NO: 15613 - DNA, 21 bp, Artificial Sequence
  Synthetic
tgttcgaccacctaagaaaag

SEQ ID NO: 15614 - DNA, 21 bp, Artificial Sequence
  Synthetic
gttcgaccacctaagaaaagt

SEQ ID NO: 15615 - DNA, 21 bp, Artificial Sequence
  Synthetic
tggaaaaagatcttcaacctt

SEQ ID NO: 15616 - DNA, 21 bp, Artificial Sequence
  Synthetic
ggaaaaagatcttcaaccttt

SEQ ID NO: 15617 - DNA, 21 bp, Artificial Sequence
  Synthetic
gaaaaagatcttcaacctttc

SEQ ID NO: 15618 - DNA, 21 bp, Artificial Sequence
  Synthetic
aaaagatcttcaacctttcgg

SEQ ID NO: 15619 - DNA, 21 bp, Artificial Sequence
  Synthetic
aaagatcttcaacctttcggg

SEQ ID NO: 15620 - DNA, 21 bp, Artificial Sequence
  Synthetic
agatcttcaacctttcgggag

SEQ ID NO: 15621 - DNA, 21 bp, Artificial Sequence
  Synthetic
atcttcaacctttcgggagga

SEQ ID NO: 15622 - DNA, 21 bp, Artificial Sequence
  Synthetic
gaagagcaaatactaaagcca

SEQ ID NO: 15623 - DNA, 21 bp, Artificial Sequence
  Synthetic
gggagtgggcttgtagtggtg

SEQ ID NO: 15624 - DNA, 21 bp, Artificial Sequence
  Synthetic
aaggggagtgggcttgtagtg

SEQ ID NO: 15625 - DNA, 21 bp, Artificial Sequence
  Synthetic
aagcccactcccctttacttc

SEQ ID NO: 15626 - DNA, 21 bp, Artificial Sequence
  Synthetic
tcatccatgaagtaaagggga

SEQ ID NO: 15627 - DNA, 21 bp, Artificial Sequence
  Synthetic
ccactcccctttacttcatgg

SEQ ID NO: 15628 - DNA, 21 bp, Artificial Sequence
  Synthetic
aatctcatccatgaagtaaag

SEQ ID NO: 15629 - DNA, 21 bp, Artificial Sequence
  Synthetic
caatctcatccatgaagtaaa

SEQ ID NO: 15630 - DNA, 21 bp, Artificial Sequence
  Synthetic
tcaatctcatccatgaagtaa

SEQ ID NO: 15631 - DNA, 21 bp, Artificial Sequence
  Synthetic
atcaatctcatccatgaagta

SEQ ID NO: 15632 - DNA, 21 bp, Artificial Sequence
  Synthetic
agggctgcatcaatctcatcc

SEQ ID NO: 15633 - DNA, 21 bp, Artificial Sequence
  Synthetic
acatatatataaaatgcaaca

SEQ ID NO: 15634 - DNA, 21 bp, Artificial Sequence
  Synthetic
acagttcataataatttctct

SEQ ID NO: 15635 - DNA, 21 bp, Artificial Sequence
  Synthetic
ttatttcgaagagaaattatt

SEQ ID NO: 15636 - DNA, 21 bp, Artificial Sequence
  Synthetic
tttctcttcgaaataatatgt

SEQ ID NO: 15637 - DNA, 21 bp, Artificial Sequence
  Synthetic
tctcaaacatattatttcgaa

SEQ ID NO: 15638 - DNA, 21 bp, Artificial Sequence
  Synthetic
aatctcaaacatattatttcg

SEQ ID NO: 15639 - DNA, 21 bp, Artificial Sequence
  Synthetic
cgaaatctcaaacatattatt

SEQ ID NO: 15640 - DNA, 21 bp, Artificial Sequence
  Synthetic
cgaaataatatgtttgagatt

SEQ ID NO: 15641 - DNA, 21 bp, Artificial Sequence
  Synthetic
ttgagatttcggatagactta

SEQ ID NO: 15642 - DNA, 21 bp, Artificial Sequence
  Synthetic
tgagatttcggatagacttat

SEQ ID NO: 15643 - DNA, 21 bp, Artificial Sequence
  Synthetic
tgtaaattccaataagtctat

SEQ ID NO: 15644 - DNA, 21 bp, Artificial Sequence
  Synthetic
ggtaggagaggcacagcacgg

SEQ ID NO: 15645 - DNA, 21 bp, Artificial Sequence
  Synthetic
accaggatgtcaggcaggtag

SEQ ID NO: 15646 - DNA, 21 bp, Artificial Sequence
  Synthetic
tcaccaggatgtcaggcaggt

SEQ ID NO: 15647 - DNA, 21 bp, Artificial Sequence
  Synthetic
gtcaccaggatgtcaggcagg

SEQ ID NO: 15648 - DNA, 21 bp, Artificial Sequence
  Synthetic
cttgtcataggtgccagtcac

SEQ ID NO: 15649 - DNA, 21 bp, Artificial Sequence
  Synthetic
ctggtgactggcacctatgac

SEQ ID NO: 15650 - DNA, 21 bp, Artificial Sequence
  Synthetic
gaaggtgaccatctacgaccc

SEQ ID NO: 15651 - DNA, 21 bp, Artificial Sequence
  Synthetic
tgggccacagctttcccatca

SEQ ID NO: 15652 - DNA, 21 bp, Artificial Sequence
  Synthetic
gggccacagctttcccatcac

SEQ ID NO: 15653 - DNA, 21 bp, Artificial Sequence
  Synthetic
ggagtactggatcccagtgat

SEQ ID NO: 15654 - DNA, 21 bp, Artificial Sequence
  Synthetic
cggagtactggatcccagtga

SEQ ID NO: 15655 - DNA, 21 bp, Artificial Sequence
  Synthetic
acggagtactggatcccagtg

SEQ ID NO: 15656 - DNA, 21 bp, Artificial Sequence
  Synthetic
atcactgggatccagtactcc

SEQ ID NO: 15657 - DNA, 21 bp, Artificial Sequence
  Synthetic
tcactgggatccagtactccg

SEQ ID NO: 15658 - DNA, 21 bp, Artificial Sequence
  Synthetic
cactgggatccagtactccgt

SEQ ID NO: 15659 - DNA, 21 bp, Artificial Sequence
  Synthetic
gtacaaggctcccacggagta

SEQ ID NO: 15660 - DNA, 21 bp, Artificial Sequence
  Synthetic
atgtggtgtacaaggctccca

SEQ ID NO: 15661 - DNA, 21 bp, Artificial Sequence
  Synthetic
gatgtggtgtacaaggctccc

SEQ ID NO: 15662 - DNA, 21 bp, Artificial Sequence
  Synthetic
cacatccactgacaagaccat

SEQ ID NO: 15663 - DNA, 21 bp, Artificial Sequence
  Synthetic
ctcacccggatggtcttgtca

SEQ ID NO: 15664 - DNA, 21 bp, Artificial Sequence
  Synthetic
tccactgacaagaccatccgg

SEQ ID NO: 15665 - DNA, 21 bp, Artificial Sequence
  Synthetic
gcactaagcgaaatagtaccc

SEQ ID NO: 15666 - DNA, 21 bp, Artificial Sequence
  Synthetic
aagcgaaatagtacccatgag

SEQ ID NO: 15667 - DNA, 21 bp, Artificial Sequence
  Synthetic
gcgaaatagtacccatgaggt

SEQ ID NO: 15668 - DNA, 21 bp, Artificial Sequence
  Synthetic
ccccacctgactcctcacctc

SEQ ID NO: 15669 - DNA, 21 bp, Artificial Sequence
  Synthetic
tgggtgtggtcactggcagcg

SEQ ID NO: 15670 - DNA, 21 bp, Artificial Sequence
  Synthetic
ccaccgcgtgtgctccggctc

SEQ ID NO: 15671 - DNA, 21 bp, Artificial Sequence
  Synthetic
caccgcgtgtgctccggctcc

SEQ ID NO: 15672 - DNA, 21 bp, Artificial Sequence
  Synthetic
tcactgtgctgtcccaggagc

SEQ ID NO: 15673 - DNA, 21 bp, Artificial Sequence
  Synthetic
ttcactgtgctgtcccaggag

SEQ ID NO: 15674 - DNA, 21 bp, Artificial Sequence
  Synthetic
tccggctcctgggacagcaca

SEQ ID NO: 15675 - DNA, 21 bp, Artificial Sequence
  Synthetic
agagcttcactgtgctgtccc

SEQ ID NO: 15676 - DNA, 21 bp, Artificial Sequence
  Synthetic
cagagcttcactgtgctgtcc

SEQ ID NO: 15677 - DNA, 21 bp, Artificial Sequence
  Synthetic
ctgggacagcacagtgaagct

SEQ ID NO: 15678 - DNA, 21 bp, Artificial Sequence
  Synthetic
tgggacagcacagtgaagctc

SEQ ID NO: 15679 - DNA, 21 bp, Artificial Sequence
  Synthetic
tgcccatccgctgccatgtcc

SEQ ID NO: 15680 - DNA, 21 bp, Artificial Sequence
  Synthetic
ggagcagcagcactgagtcaa

SEQ ID NO: 15681 - DNA, 21 bp, Artificial Sequence
  Synthetic
tggagcagcagcactgagtca

SEQ ID NO: 15682 - DNA, 21 bp, Artificial Sequence
  Synthetic
gactcagtgctgctgctccag

SEQ ID NO: 15683 - DNA, 21 bp, Artificial Sequence
  Synthetic
gtctcacctggagcagcagca

SEQ ID NO: 15684 - DNA, 21 bp, Artificial Sequence
  Synthetic
gacagacagagtgacccaccc

SEQ ID NO: 15685 - DNA, 21 bp, Artificial Sequence
  Synthetic
cgacagacagagtgacccacc

SEQ ID NO: 15686 - DNA, 21 bp, Artificial Sequence
  Synthetic
cagggtgggtcactctgtctg

SEQ ID NO: 15687 - DNA, 21 bp, Artificial Sequence
  Synthetic
gtcactctgtctgtcgggctc

SEQ ID NO: 15688 - DNA, 21 bp, Artificial Sequence
  Synthetic
cgatctcgggagcccgacaga

SEQ ID NO: 15689 - DNA, 21 bp, Artificial Sequence
  Synthetic
acaagttgacgttgcgatctc

SEQ ID NO: 15690 - DNA, 21 bp, Artificial Sequence
  Synthetic
cacaagttgacgttgcgatct

SEQ ID NO: 15691 - DNA, 21 bp, Artificial Sequence
  Synthetic
ccacaagttgacgttgcgatc

SEQ ID NO: 15692 - DNA, 21 bp, Artificial Sequence
  Synthetic
ccgagatcgcaacgtcaactt

SEQ ID NO: 15693 - DNA, 21 bp, Artificial Sequence
  Synthetic
cgagatcgcaacgtcaacttg

SEQ ID NO: 15694 - DNA, 21 bp, Artificial Sequence
  Synthetic
atgaacacagttcaactatac

SEQ ID NO: 15695 - DNA, 21 bp, Artificial Sequence
  Synthetic
ccctggaactttcatgtatag

SEQ ID NO: 15696 - DNA, 21 bp, Artificial Sequence
  Synthetic
ttcaactatacatgaaagttc

SEQ ID NO: 15697 - DNA, 21 bp, Artificial Sequence
  Synthetic
tcaactatacatgaaagttcc

SEQ ID NO: 15698 - DNA, 21 bp, Artificial Sequence
  Synthetic
caactatacatgaaagttcca

SEQ ID NO: 15699 - DNA, 21 bp, Artificial Sequence
  Synthetic
atacatgaaagttccagggag

SEQ ID NO: 15700 - DNA, 21 bp, Artificial Sequence
  Synthetic
attacctggtgttctgctccc

SEQ ID NO: 15701 - DNA, 21 bp, Artificial Sequence
  Synthetic
aattacctggtgttctgctcc

SEQ ID NO: 15702 - DNA, 21 bp, Artificial Sequence
  Synthetic
ccaatatttatgttaactgaa

SEQ ID NO: 15703 - DNA, 21 bp, Artificial Sequence
  Synthetic
ctgggccaatatttatgttaa

SEQ ID NO: 15704 - DNA, 21 bp, Artificial Sequence
  Synthetic
taaatattggcccaggtgact

SEQ ID NO: 15705 - DNA, 21 bp, Artificial Sequence
  Synthetic
caacaaaccattcacagtcac

SEQ ID NO: 15706 - DNA, 21 bp, Artificial Sequence
  Synthetic
actgtgaatggtttgttgttc

SEQ ID NO: 15707 - DNA, 21 bp, Artificial Sequence
  Synthetic
gtttgttgttcctgaaggtta

SEQ ID NO: 15708 - DNA, 21 bp, Artificial Sequence
  Synthetic
tttgttgttcctgaaggttac

SEQ ID NO: 15709 - DNA, 21 bp, Artificial Sequence
  Synthetic
cagaacaccccagtaaccttc

SEQ ID NO: 15710 - DNA, 21 bp, Artificial Sequence
  Synthetic
tcagaacaccccagtaacctt

SEQ ID NO: 15711 - DNA, 21 bp, Artificial Sequence
  Synthetic
cctgaaggttactggggtgtt

SEQ ID NO: 15712 - DNA, 21 bp, Artificial Sequence
  Synthetic
ggggtgttctgaatgacttct

SEQ ID NO: 15713 - DNA, 21 bp, Artificial Sequence
  Synthetic
attaggaaattcaaattattt

SEQ ID NO: 15714 - DNA, 21 bp, Artificial Sequence
  Synthetic
agaaataatttgaatttccta

SEQ ID NO: 15715 - DNA, 21 bp, Artificial Sequence
  Synthetic
ttgggccaccaagaacccatt

SEQ ID NO: 15716 - DNA, 21 bp, Artificial Sequence
  Synthetic
attgggccaccaagaacccat

SEQ ID NO: 15717 - DNA, 21 bp, Artificial Sequence
  Synthetic
tgggttcttggtggcccaatc

SEQ ID NO: 15718 - DNA, 21 bp, Artificial Sequence
  Synthetic
gatcttcaagattgggccacc

SEQ ID NO: 15719 - DNA, 21 bp, Artificial Sequence
  Synthetic
ggcccaatcttgaagatcttt

SEQ ID NO: 15720 - DNA, 21 bp, Artificial Sequence
  Synthetic
gcttcataaagatcttcaaga

SEQ ID NO: 15721 - DNA, 21 bp, Artificial Sequence
  Synthetic
tcgctgaataaacctatacac

SEQ ID NO: 15722 - DNA, 21 bp, Artificial Sequence
  Synthetic
gtcgctgaataaacctataca

SEQ ID NO: 15723 - DNA, 21 bp, Artificial Sequence
  Synthetic
tgtataggtttattcagcgac

SEQ ID NO: 15724 - DNA, 21 bp, Artificial Sequence
  Synthetic
gtataggtttattcagcgacc

SEQ ID NO: 15725 - DNA, 21 bp, Artificial Sequence
  Synthetic
ccagaccaaatctccaggtcg

SEQ ID NO: 15726 - DNA, 21 bp, Artificial Sequence
  Synthetic
tcagcgacctggagatttggt

SEQ ID NO: 15727 - DNA, 21 bp, Artificial Sequence
  Synthetic
gataaatgcaggcactgttca

SEQ ID NO: 15728 - DNA, 21 bp, Artificial Sequence
  Synthetic
ccagccaatagcctgaaccca

SEQ ID NO: 15729 - DNA, 21 bp, Artificial Sequence
  Synthetic
gttgttgcaccagccaatagc

SEQ ID NO: 15730 - DNA, 21 bp, Artificial Sequence
  Synthetic
tggctggtgcaacaacattgc

SEQ ID NO: 15731 - DNA, 21 bp, Artificial Sequence
  Synthetic
ggctggtgcaacaacattgct

SEQ ID NO: 15732 - DNA, 21 bp, Artificial Sequence
  Synthetic
ggatctgatcacatgttactg

SEQ ID NO: 15733 - DNA, 21 bp, Artificial Sequence
  Synthetic
gttactgtcgaaagccctttg

SEQ ID NO: 15734 - DNA, 21 bp, Artificial Sequence
  Synthetic
tcaatcatgggccgccctgca

SEQ ID NO: 15735 - DNA, 21 bp, Artificial Sequence
  Synthetic
cctttgcagggcggcccatga

SEQ ID NO: 15736 - DNA, 21 bp, Artificial Sequence
  Synthetic
ccacacaggctgcactcaatc

SEQ ID NO: 15737 - DNA, 21 bp, Artificial Sequence
  Synthetic
ccatgattgagtgcagcctgt

SEQ ID NO: 15738 - DNA, 21 bp, Artificial Sequence
  Synthetic
catgattgagtgcagcctgtg

SEQ ID NO: 15739 - DNA, 21 bp, Artificial Sequence
  Synthetic
tgagtgcagcctgtgtgggac

SEQ ID NO: 15740 - DNA, 21 bp, Artificial Sequence
  Synthetic
cttaatcttagcacaggagag

SEQ ID NO: 15741 - DNA, 21 bp, Artificial Sequence
  Synthetic
cacctctcctgtgctaagatt

SEQ ID NO: 15742 - DNA, 21 bp, Artificial Sequence
  Synthetic
gtcttcttaatcttagcacag

SEQ ID NO: 15743 - DNA, 21 bp, Artificial Sequence
  Synthetic
tggtcttcttaatcttagcac

SEQ ID NO: 15744 - DNA, 21 bp, Artificial Sequence
  Synthetic
ttggtcttcttaatcttagca

SEQ ID NO: 15745 - DNA, 21 bp, Artificial Sequence
  Synthetic
tttctggcaataaaagaagtc

SEQ ID NO: 15746 - DNA, 21 bp, Artificial Sequence
  Synthetic
atttctggcaataaaagaagt

SEQ ID NO: 15747 - DNA, 21 bp, Artificial Sequence
  Synthetic
catttctggcaataaaagaag

SEQ ID NO: 15748 - DNA, 21 bp, Artificial Sequence
  Synthetic
tccttgcatttctggcaataa

SEQ ID NO: 15749 - DNA, 21 bp, Artificial Sequence
  Synthetic
tattgccagaaatgcaaggaa

SEQ ID NO: 15750 - DNA, 21 bp, Artificial Sequence
  Synthetic
atgaacacggtgcagctgtac

SEQ ID NO: 15751 - DNA, 21 bp, Artificial Sequence
  Synthetic
gtacatgaaggtgcccggcag

SEQ ID NO: 15752 - DNA, 21 bp, Artificial Sequence
  Synthetic
agcgcacctggcgttcggctg

SEQ ID NO: 15753 - DNA, 21 bp, Artificial Sequence
  Synthetic
ctgtcgacccctgcaggccac

SEQ ID NO: 15754 - DNA, 21 bp, Artificial Sequence
  Synthetic
tgtcgacccctgcaggccacc

SEQ ID NO: 15755 - DNA, 21 bp, Artificial Sequence
  Synthetic
tcgacccctgcaggccaccag

SEQ ID NO: 15756 - DNA, 21 bp, Artificial Sequence
  Synthetic
ccaatgttgatgttgacggag

SEQ ID NO: 15757 - DNA, 21 bp, Artificial Sequence
  Synthetic
ctgggccaatgttgatgttga

SEQ ID NO: 15758 - DNA, 21 bp, Artificial Sequence
  Synthetic
cctgggccaatgttgatgttg

SEQ ID NO: 15759 - DNA, 21 bp, Artificial Sequence
  Synthetic
tcaacattggcccaggcgact

SEQ ID NO: 15760 - DNA, 21 bp, Artificial Sequence
  Synthetic
ccgcgaaccactcgcagtcgc

SEQ ID NO: 15761 - DNA, 21 bp, Artificial Sequence
  Synthetic
actgcgagtggttcgcggtgc

SEQ ID NO: 15762 - DNA, 21 bp, Artificial Sequence
  Synthetic
gttcgcggtgcacgagcacta

SEQ ID NO: 15763 - DNA, 21 bp, Artificial Sequence
  Synthetic
tcccagtagtgctcgtgcacc

SEQ ID NO: 15764 - DNA, 21 bp, Artificial Sequence
  Synthetic
ttcgcggtgcacgagcactac

SEQ ID NO: 15765 - DNA, 21 bp, Artificial Sequence
  Synthetic
tcgcggtgcacgagcactact

SEQ ID NO: 15766 - DNA, 21 bp, Artificial Sequence
  Synthetic
caggacggcacgcaccgatca

SEQ ID NO: 15767 - DNA, 21 bp, Artificial Sequence
  Synthetic
tggccaccccgcaggcacggc

SEQ ID NO: 15768 - DNA, 21 bp, Artificial Sequence
  Synthetic
caagtagtccacgccgtgcct

SEQ ID NO: 15769 - DNA, 21 bp, Artificial Sequence
  Synthetic
aggcacggcgtggactacttg

SEQ ID NO: 15770 - DNA, 21 bp, Artificial Sequence
  Synthetic
acgggttcctggtggccaatc

SEQ ID NO: 15771 - DNA, 21 bp, Artificial Sequence
  Synthetic
gatcatccaggattggccacc

SEQ ID NO: 15772 - DNA, 21 bp, Artificial Sequence
  Synthetic
agatcatccaggattggccac

SEQ ID NO: 15773 - DNA, 21 bp, Artificial Sequence
  Synthetic
attggatgcatagagatcatc

SEQ ID NO: 15774 - DNA, 21 bp, Artificial Sequence
  Synthetic
tacacaggaatattggatgca

SEQ ID NO: 15775 - DNA, 21 bp, Artificial Sequence
  Synthetic
acgaagcggtacacaggaata

SEQ ID NO: 15776 - DNA, 21 bp, Artificial Sequence
  Synthetic
tcgctgcacgaagcggtacac

SEQ ID NO: 15777 - DNA, 21 bp, Artificial Sequence
  Synthetic
gtcgctgcacgaagcggtaca

SEQ ID NO: 15778 - DNA, 21 bp, Artificial Sequence
  Synthetic
tgtaccgcttcgtgcagcgac

SEQ ID NO: 15779 - DNA, 21 bp, Artificial Sequence
  Synthetic
gtaccgcttcgtgcagcgacc

SEQ ID NO: 15780 - DNA, 21 bp, Artificial Sequence
  Synthetic
acgaggtctccgggtcgctgc

SEQ ID NO: 15781 - DNA, 21 bp, Artificial Sequence
  Synthetic
gcagcgacccggagacctcgt

SEQ ID NO: 15782 - DNA, 21 bp, Artificial Sequence
  Synthetic
gcattaatccacacgaggtct

SEQ ID NO: 15783 - DNA, 21 bp, Artificial Sequence
  Synthetic
ggagacctcgtgtggattaat

SEQ ID NO: 15784 - DNA, 21 bp, Artificial Sequence
  Synthetic
gagacctcgtgtggattaatg

SEQ ID NO: 15785 - DNA, 21 bp, Artificial Sequence
  Synthetic
agacctcgtgtggattaatgc

SEQ ID NO: 15786 - DNA, 21 bp, Artificial Sequence
  Synthetic
acagtccccgcattaatccac

SEQ ID NO: 15787 - DNA, 21 bp, Artificial Sequence
  Synthetic
gattaatgcggggactgtgca

SEQ ID NO: 15788 - DNA, 21 bp, Artificial Sequence
  Synthetic
cggctggtgcaacaacattgc

SEQ ID NO: 15789 - DNA, 21 bp, Artificial Sequence
  Synthetic
ggctggtgcaacaacattgcc

SEQ ID NO: 15790 - DNA, 21 bp, Artificial Sequence
  Synthetic
tgcaacaacattgcctggaac

SEQ ID NO: 15791 - DNA, 21 bp, Artificial Sequence
  Synthetic
gcaacaacattgcctggaacg

SEQ ID NO: 15792 - DNA, 21 bp, Artificial Sequence
  Synthetic
gggatatcacacctgcgttga

SEQ ID NO: 15793 - DNA, 21 bp, Artificial Sequence
  Synthetic
tgccagcttgtttcagtcccg

SEQ ID NO: 15794 - DNA, 21 bp, Artificial Sequence
  Synthetic
gccagcttgtttcagtcccga

SEQ ID NO: 15795 - DNA, 21 bp, Artificial Sequence
  Synthetic
aggagccgggctccatcggga

SEQ ID NO: 15796 - DNA, 21 bp, Artificial Sequence
  Synthetic
tggtcaggagccgggctccat

SEQ ID NO: 15797 - DNA, 21 bp, Artificial Sequence
  Synthetic
gtggtcaggagccgggctcca

SEQ ID NO: 15798 - DNA, 21 bp, Artificial Sequence
  Synthetic
gatggagcccggctcctgacc

SEQ ID NO: 15799 - DNA, 21 bp, Artificial Sequence
  Synthetic
gcccggctcctgaccacggac

SEQ ID NO: 15800 - DNA, 21 bp, Artificial Sequence
  Synthetic
cttctggtccgtggtcaggag

SEQ ID NO: 15801 - DNA, 21 bp, Artificial Sequence
  Synthetic
cggctcctgaccacggaccag

SEQ ID NO: 15802 - DNA, 21 bp, Artificial Sequence
  Synthetic
tcgctcttctggtccgtggtc

SEQ ID NO: 15803 - DNA, 21 bp, Artificial Sequence
  Synthetic
ctcgctcttctggtccgtggt

SEQ ID NO: 15804 - DNA, 21 bp, Artificial Sequence
  Synthetic
tcctgaccacggaccagaaga

SEQ ID NO: 15805 - DNA, 21 bp, Artificial Sequence
  Synthetic
cacggaccagaagagcgagat

SEQ ID NO: 15806 - DNA, 21 bp, Artificial Sequence
  Synthetic
ccactgggaagcagagtaaac

SEQ ID NO: 15807 - DNA, 21 bp, Artificial Sequence
  Synthetic
ttctctgcagctttggaatct

SEQ ID NO: 15808 - DNA, 21 bp, Artificial Sequence
  Synthetic
tggaatctcagaatgcacaaa

SEQ ID NO: 15809 - DNA, 21 bp, Artificial Sequence
  Synthetic
aagaaagtgacgcatgtggcc

SEQ ID NO: 15810 - DNA, 21 bp, Artificial Sequence
  Synthetic
gaaccaatcacagcatgggtt

SEQ ID NO: 15811 - DNA, 21 bp, Artificial Sequence
  Synthetic
tggccaggaaccaatcacagc

SEQ ID NO: 15812 - DNA, 21 bp, Artificial Sequence
  Synthetic
tgatctacggaggctgtggcc

SEQ ID NO: 15813 - DNA, 21 bp, Artificial Sequence
  Synthetic
ttgatctacggaggctgtggc

SEQ ID NO: 15814 - DNA, 21 bp, Artificial Sequence
  Synthetic
acagcctccgtagatcaaaca

SEQ ID NO: 15815 - DNA, 21 bp, Artificial Sequence
  Synthetic
cgtagatcaaacagtgaaaat

SEQ ID NO: 15816 - DNA, 21 bp, Artificial Sequence
  Synthetic
gtagatcaaacagtgaaaatt

SEQ ID NO: 15817 - DNA, 21 bp, Artificial Sequence
  Synthetic
gggtgagttgggtgccacgcc

SEQ ID NO: 15818 - DNA, 21 bp, Artificial Sequence
  Synthetic
cagccacggtgctggggtgag

SEQ ID NO: 15819 - DNA, 21 bp, Artificial Sequence
  Synthetic
actcaccccagcaccgtggct

SEQ ID NO: 15820 - DNA, 21 bp, Artificial Sequence
  Synthetic
acccacagccacggtgctggg

SEQ ID NO: 15821 - DNA, 21 bp, Artificial Sequence
  Synthetic
tggaacccacagccacggtgc

SEQ ID NO: 15822 - DNA, 21 bp, Artificial Sequence
  Synthetic
ttggaacccacagccacggtg

SEQ ID NO: 15823 - DNA, 21 bp, Artificial Sequence
  Synthetic
gcaccgtggctgtgggttcca

SEQ ID NO: 15824 - DNA, 21 bp, Artificial Sequence
  Synthetic
caccgtggctgtgggttccaa

SEQ ID NO: 15825 - DNA, 21 bp, Artificial Sequence
  Synthetic
accgtggctgtgggttccaaa

SEQ ID NO: 15826 - DNA, 21 bp, Artificial Sequence
  Synthetic
ccgtggctgtgggttccaaag

SEQ ID NO: 15827 - DNA, 21 bp, Artificial Sequence
  Synthetic
cgtggctgtgggttccaaagg

SEQ ID NO: 15828 - DNA, 21 bp, Artificial Sequence
  Synthetic
agagcatgatatctccccctt

SEQ ID NO: 15829 - DNA, 21 bp, Artificial Sequence
  Synthetic
cagagcatgatatctccccct

SEQ ID NO: 15830 - DNA, 21 bp, Artificial Sequence
  Synthetic
caaagggggagatatcatgct

SEQ ID NO: 15831 - DNA, 21 bp, Artificial Sequence
  Synthetic
aaagggggagatatcatgctc

SEQ ID NO: 15832 - DNA, 21 bp, Artificial Sequence
  Synthetic
ttgtccttgatgccaaaattc

SEQ ID NO: 15833 - DNA, 21 bp, Artificial Sequence
  Synthetic
ggcatcaaccaccttctttcc

SEQ ID NO: 15834 - DNA, 21 bp, Artificial Sequence
  Synthetic
cacattcatcatacccaggga

SEQ ID NO: 15835 - DNA, 21 bp, Artificial Sequence
  Synthetic
tgagatccactggaacagcaa

SEQ ID NO: 15836 - DNA, 21 bp, Artificial Sequence
  Synthetic
ggggtaggcactgagatccac

SEQ ID NO: 15837 - DNA, 21 bp, Artificial Sequence
  Synthetic
aggggtaggcactgagatcca

SEQ ID NO: 15838 - DNA, 21 bp, Artificial Sequence
  Synthetic
gtacaatacaaggggtaggca

SEQ ID NO: 15839 - DNA, 21 bp, Artificial Sequence
  Synthetic
aagcaactacagtacaataca

SEQ ID NO: 15840 - DNA, 21 bp, Artificial Sequence
  Synthetic
taagcaactacagtacaatac

SEQ ID NO: 15841 - DNA, 21 bp, Artificial Sequence
  Synthetic
gcctgatggtattgaggtcag

SEQ ID NO: 15842 - DNA, 21 bp, Artificial Sequence
  Synthetic
aactgacctcaataccatcag

SEQ ID NO: 15843 - DNA, 21 bp, Artificial Sequence
  Synthetic
actgacctcaataccatcagg

SEQ ID NO: 15844 - DNA, 21 bp, Artificial Sequence
  Synthetic
tcaagtctccgcctgatggta

SEQ ID NO: 15845 - DNA, 21 bp, Artificial Sequence
  Synthetic
tcaataccatcaggcggagac

SEQ ID NO: 15846 - DNA, 21 bp, Artificial Sequence
  Synthetic
cattaatgctgatattctcct

SEQ ID NO: 15847 - DNA, 21 bp, Artificial Sequence
  Synthetic
caggagaatatcagcattaat

SEQ ID NO: 15848 - DNA, 21 bp, Artificial Sequence
  Synthetic
aggagaatatcagcattaatg

SEQ ID NO: 15849 - DNA, 21 bp, Artificial Sequence
  Synthetic
ggagaatatcagcattaatgt

SEQ ID NO: 15850 - DNA, 21 bp, Artificial Sequence
  Synthetic
taatgtgggaggtacgctata

SEQ ID NO: 15851 - DNA, 21 bp, Artificial Sequence
  Synthetic
acgctatattgaacataatgc

SEQ ID NO: 15852 - DNA, 21 bp, Artificial Sequence
  Synthetic
aacataatgccaggactttca

SEQ ID NO: 15853 - DNA, 21 bp, Artificial Sequence
  Synthetic
actataggactgtctggctca

SEQ ID NO: 15854 - DNA, 21 bp, Artificial Sequence
  Synthetic
gactaccaggcctacctcaga

SEQ ID NO: 15855 - DNA, 21 bp, Artificial Sequence
  Synthetic
caagatgttatagatactcct

SEQ ID NO: 15856 - DNA, 21 bp, Artificial Sequence
  Synthetic
actcctgtggacttcagcact

SEQ ID NO: 15857 - DNA, 21 bp, Artificial Sequence
  Synthetic
tttcacagtgctgaagtccac

SEQ ID NO: 15858 - DNA, 21 bp, Artificial Sequence
  Synthetic
ctttcacagtgctgaagtcca

SEQ ID NO: 15859 - DNA, 21 bp, Artificial Sequence
  Synthetic
ctgtggacttcagcactgtga

SEQ ID NO: 15860 - DNA, 21 bp, Artificial Sequence
  Synthetic
tccaaagtttctttcacagtg

SEQ ID NO: 15861 - DNA, 21 bp, Artificial Sequence
  Synthetic
ttcagcactgtgaaagaaact

SEQ ID NO: 15862 - DNA, 21 bp, Artificial Sequence
  Synthetic
tcagcactgtgaaagaaactt

SEQ ID NO: 15863 - DNA, 21 bp, Artificial Sequence
  Synthetic
ctgtgaaagaaactttggaag

SEQ ID NO: 15864 - DNA, 21 bp, Artificial Sequence
  Synthetic
tgtgaaagaaactttggaagc

SEQ ID NO: 15865 - DNA, 21 bp, Artificial Sequence
  Synthetic
gcaggaaactatggtagtcct

SEQ ID NO: 15866 - DNA, 21 bp, Artificial Sequence
  Synthetic
caggaaactatggtagtcctc

SEQ ID NO: 15867 - DNA, 21 bp, Artificial Sequence
  Synthetic
gaacatccttataaaattcca

SEQ ID NO: 15868 - DNA, 21 bp, Artificial Sequence
  Synthetic
gcgaacatccttataaaattc

SEQ ID NO: 15869 - DNA, 21 bp, Artificial Sequence
  Synthetic
tttggagttgttgaatatttg

SEQ ID NO: 15870 - DNA, 21 bp, Artificial Sequence
  Synthetic
gaggtataagctttggagttg

SEQ ID NO: 15871 - DNA, 21 bp, Artificial Sequence
  Synthetic
ttatacctctaataaaaagtc

SEQ ID NO: 15872 - DNA, 21 bp, Artificial Sequence
  Synthetic
gcagcatcatgctatagatct

SEQ ID NO: 15873 - DNA, 21 bp, Artificial Sequence
  Synthetic
tcgcagcatcatgctatagat

SEQ ID NO: 15874 - DNA, 21 bp, Artificial Sequence
  Synthetic
ctgaggttcctgagaaaattg

SEQ ID NO: 15875 - DNA, 21 bp, Artificial Sequence
  Synthetic
ttcctgagaaaattgctgaat

SEQ ID NO: 15876 - DNA, 21 bp, Artificial Sequence
  Synthetic
tgaattagagtcacatacggt

SEQ ID NO: 15877 - DNA, 21 bp, Artificial Sequence
  Synthetic
ttgctgttcagttctgtaaca

SEQ ID NO: 15878 - DNA, 21 bp, Artificial Sequence
  Synthetic
tgctgttcagttctgtaacaa

SEQ ID NO: 15879 - DNA, 21 bp, Artificial Sequence
  Synthetic
cctgtctccattgttacagaa

SEQ ID NO: 15880 - DNA, 21 bp, Artificial Sequence
  Synthetic
aattacctgtctccattgtta

SEQ ID NO: 15881 - DNA, 21 bp, Artificial Sequence
  Synthetic
tttctagtttaagatttgtta

SEQ ID NO: 15882 - DNA, 21 bp, Artificial Sequence
  Synthetic
ttccactaacaaatcttaaac

SEQ ID NO: 15883 - DNA, 21 bp, Artificial Sequence
  Synthetic
ttctagtttaagatttgttag

SEQ ID NO: 15884 - DNA, 21 bp, Artificial Sequence
  Synthetic
tttaagatttgttagtggaag

SEQ ID NO: 15885 - DNA, 21 bp, Artificial Sequence
  Synthetic
gatttgttagtggaagtcgag

SEQ ID NO: 15886 - DNA, 21 bp, Artificial Sequence
  Synthetic
atttgttagtggaagtcgaga

SEQ ID NO: 15887 - DNA, 21 bp, Artificial Sequence
  Synthetic
tggaagtcgagatggaacggc

SEQ ID NO: 15888 - DNA, 21 bp, Artificial Sequence
  Synthetic
tgtgcacccgttgcagtcctt

SEQ ID NO: 15889 - DNA, 21 bp, Artificial Sequence
  Synthetic
gaatggccctgaaggactgca

SEQ ID NO: 15890 - DNA, 21 bp, Artificial Sequence
  Synthetic
aatagaagctgaatggccctg

SEQ ID NO: 15891 - DNA, 21 bp, Artificial Sequence
  Synthetic
agtaatagaagctgaatggcc

SEQ ID NO: 15892 - DNA, 21 bp, Artificial Sequence
  Synthetic
cctgtatggaagtaatagaag

SEQ ID NO: 15893 - DNA, 21 bp, Artificial Sequence
  Synthetic
ttcttacctgtatggaagtaa

SEQ ID NO: 15894 - DNA, 21 bp, Artificial Sequence
  Synthetic
ttctattacttccatacaggt

SEQ ID NO: 15895 - DNA, 21 bp, Artificial Sequence
  Synthetic
atctgtttgtgcctttagttg

SEQ ID NO: 15896 - DNA, 21 bp, Artificial Sequence
  Synthetic
acctcacttctactggtgctg

SEQ ID NO: 15897 - DNA, 21 bp, Artificial Sequence
  Synthetic
cctcacttctactggtgctga

SEQ ID NO: 15898 - DNA, 21 bp, Artificial Sequence
  Synthetic
gttccatcagcaccagtagaa

SEQ ID NO: 15899 - DNA, 21 bp, Artificial Sequence
  Synthetic
agattgttccatcagcaccag

SEQ ID NO: 15900 - DNA, 21 bp, Artificial Sequence
  Synthetic
attaagatgcataagagaatt

SEQ ID NO: 15901 - DNA, 21 bp, Artificial Sequence
  Synthetic
ttaagatgcataagagaattc

SEQ ID NO: 15902 - DNA, 21 bp, Artificial Sequence
  Synthetic
gtagacagatgacaagtgccc

SEQ ID NO: 15903 - DNA, 21 bp, Artificial Sequence
  Synthetic
tgtctactgtgtagcatttga

SEQ ID NO: 15904 - DNA, 21 bp, Artificial Sequence
  Synthetic
actgtgtagcatttgaccgaa

SEQ ID NO: 15905 - DNA, 21 bp, Artificial Sequence
  Synthetic
ctgtgtagcatttgaccgaag

SEQ ID NO: 15906 - DNA, 21 bp, Artificial Sequence
  Synthetic
tgtgtagcatttgaccgaagc

SEQ ID NO: 15907 - DNA, 21 bp, Artificial Sequence
  Synthetic
tgtagcatttgaccgaagcgg

SEQ ID NO: 15908 - DNA, 21 bp, Artificial Sequence
  Synthetic
agcatttgaccgaagcgggag

SEQ ID NO: 15909 - DNA, 21 bp, Artificial Sequence
  Synthetic
agatgactgtttagtaaaaat

SEQ ID NO: 15910 - DNA, 21 bp, Artificial Sequence
  Synthetic
gacgccttcttgctacacttc

SEQ ID NO: 15911 - DNA, 21 bp, Artificial Sequence
  Synthetic
agagtgtccacgaagtgtagc

SEQ ID NO: 15912 - DNA, 21 bp, Artificial Sequence
  Synthetic
ctacacttcgtggacactctg

SEQ ID NO: 15913 - DNA, 21 bp, Artificial Sequence
  Synthetic
agaaatttcagcagagtgtcc

SEQ ID NO: 15914 - DNA, 21 bp, Artificial Sequence
  Synthetic
cagccatgtcagaaatttcag

SEQ ID NO: 15915 - DNA, 21 bp, Artificial Sequence
  Synthetic
tttctgacatggctgttaact

SEQ ID NO: 15916 - DNA, 21 bp, Artificial Sequence
  Synthetic
tttcatagttaacagccatgt

SEQ ID NO: 15917 - DNA, 21 bp, Artificial Sequence
  Synthetic
atcacagctgcctgcagcaat

SEQ ID NO: 15918 - DNA, 21 bp, Artificial Sequence
  Synthetic
aggcagctgtgataaggtagt

SEQ ID NO: 15919 - DNA, 21 bp, Artificial Sequence
  Synthetic
aatacttacagataatgtatg

SEQ ID NO: 15920 - DNA, 21 bp, Artificial Sequence
  Synthetic
taaaatacttacagataatgt

SEQ ID NO: 15921 - DNA, 21 bp, Artificial Sequence
  Synthetic
atgatgatgaagtattcgttc

SEQ ID NO: 15922 - DNA, 21 bp, Artificial Sequence
  Synthetic
tcaaatggatgggcttctaga

SEQ ID NO: 15923 - DNA, 21 bp, Artificial Sequence
  Synthetic
ttgatcaaatggatgggcttc

SEQ ID NO: 15924 - DNA, 21 bp, Artificial Sequence
  Synthetic
agaagcccatccatttgatca

SEQ ID NO: 15925 - DNA, 21 bp, Artificial Sequence
  Synthetic
tatgatcctttgatcaaatgg

SEQ ID NO: 15926 - DNA, 21 bp, Artificial Sequence
  Synthetic
aaagtatgatcctttgatcaa

SEQ ID NO: 15927 - DNA, 21 bp, Artificial Sequence
  Synthetic
tcatactttcagcaggtcatg

SEQ ID NO: 15928 - DNA, 21 bp, Artificial Sequence
  Synthetic
catactttcagcaggtcatga

SEQ ID NO: 15929 - DNA, 21 bp, Artificial Sequence
  Synthetic
atactttcagcaggtcatgat

SEQ ID NO: 15930 - DNA, 21 bp, Artificial Sequence
  Synthetic
aaatgttcccatcatgacctg

SEQ ID NO: 15931 - DNA, 21 bp, Artificial Sequence
  Synthetic
ttgtggttggcgctggtgtgg

SEQ ID NO: 15932 - DNA, 21 bp, Artificial Sequence
  Synthetic
ccgccaaggtgctcagcgatg

SEQ ID NO: 15933 - DNA, 21 bp, Artificial Sequence
  Synthetic
cccaccttgtgtccagcatcg

SEQ ID NO: 15934 - DNA, 21 bp, Artificial Sequence
  Synthetic
ctcagcgatgctggacacaag

SEQ ID NO: 15935 - DNA, 21 bp, Artificial Sequence
  Synthetic
tcagcgatgctggacacaagg

SEQ ID NO: 15936 - DNA, 21 bp, Artificial Sequence
  Synthetic
cagcgatgctggacacaaggt

SEQ ID NO: 15937 - DNA, 21 bp, Artificial Sequence
  Synthetic
ggactccctcaggtcaccatc

SEQ ID NO: 15938 - DNA, 21 bp, Artificial Sequence
  Synthetic
gactccctcaggtcaccatcc

SEQ ID NO: 15939 - DNA, 21 bp, Artificial Sequence
  Synthetic
ctgcctccaggatggtgacct

SEQ ID NO: 15940 - DNA, 21 bp, Artificial Sequence
  Synthetic
atctgcctccaggatggtgac

SEQ ID NO: 15941 - DNA, 21 bp, Artificial Sequence
  Synthetic
caccatcctggaggcagataa

SEQ ID NO: 15942 - DNA, 21 bp, Artificial Sequence
  Synthetic
cccgatcctgttatctgcctc

SEQ ID NO: 15943 - DNA, 21 bp, Artificial Sequence
  Synthetic
tcctggaggcagataacagga

SEQ ID NO: 15944 - DNA, 21 bp, Artificial Sequence
  Synthetic
cctggaggcagataacaggat

SEQ ID NO: 15945 - DNA, 21 bp, Artificial Sequence
  Synthetic
ctggaggcagataacaggatc

SEQ ID NO: 15946 - DNA, 21 bp, Artificial Sequence
  Synthetic
cgggggccgcatcttcaccta

SEQ ID NO: 15947 - DNA, 21 bp, Artificial Sequence
  Synthetic
gggggccgcatcttcacctac

SEQ ID NO: 15948 - DNA, 21 bp, Artificial Sequence
  Synthetic
cgcatcttcacctaccgggac

SEQ ID NO: 15949 - DNA, 21 bp, Artificial Sequence
  Synthetic
cccgtgttctggtcccggtag

SEQ ID NO: 15950 - DNA, 21 bp, Artificial Sequence
  Synthetic
ttcacctaccgggaccagaac

SEQ ID NO: 15951 - DNA, 21 bp, Artificial Sequence
  Synthetic
ctaccgggaccagaacacggg

SEQ ID NO: 15952 - DNA, 21 bp, Artificial Sequence
  Synthetic
gggaccagaacacgggctgga

SEQ ID NO: 15953 - DNA, 21 bp, Artificial Sequence
  Synthetic
ggaccagaacacgggctggat

SEQ ID NO: 15954 - DNA, 21 bp, Artificial Sequence
  Synthetic
gaccagaacacgggctggatt

SEQ ID NO: 15955 - DNA, 21 bp, Artificial Sequence
  Synthetic
accagaacacgggctggattg

SEQ ID NO: 15956 - DNA, 21 bp, Artificial Sequence
  Synthetic
aacacgggctggattggggag

SEQ ID NO: 15957 - DNA, 21 bp, Artificial Sequence
  Synthetic
acacgggctggattggggagc

SEQ ID NO: 15958 - DNA, 21 bp, Artificial Sequence
  Synthetic
cacgggctggattggggagct

SEQ ID NO: 15959 - DNA, 21 bp, Artificial Sequence
  Synthetic
ttgctaggtcacctgtgagag

SEQ ID NO: 15960 - DNA, 21 bp, Artificial Sequence
  Synthetic
gtgggttgctaggtcacctgt

SEQ ID NO: 15961 - DNA, 21 bp, Artificial Sequence
  Synthetic
aggatcctccacaagctctgc

SEQ ID NO: 15962 - DNA, 21 bp, Artificial Sequence
  Synthetic
caggccctggcagagcttgtg

SEQ ID NO: 15963 - DNA, 21 bp, Artificial Sequence
  Synthetic
cccaggccctggcagagcttg

SEQ ID NO: 15964 - DNA, 21 bp, Artificial Sequence
  Synthetic
ctccacaagctctgccagggc

SEQ ID NO: 15965 - DNA, 21 bp, Artificial Sequence
  Synthetic
ccccaggccctggcagagctt

SEQ ID NO: 15966 - DNA, 21 bp, Artificial Sequence
  Synthetic
tccacaagctctgccagggcc

SEQ ID NO: 15967 - DNA, 21 bp, Artificial Sequence
  Synthetic
aggttgagccccaggccctgg

SEQ ID NO: 15968 - DNA, 21 bp, Artificial Sequence
  Synthetic
tactgggtgaacttggtcagg

SEQ ID NO: 15969 - DNA, 21 bp, Artificial Sequence
  Synthetic
accaagttcacccagtacgac

SEQ ID NO: 15970 - DNA, 21 bp, Artificial Sequence
  Synthetic
cacgtgttcttgtcgtactgg

SEQ ID NO: 15971 - DNA, 21 bp, Artificial Sequence
  Synthetic
cacccagtacgacaagaacac

SEQ ID NO: 15972 - DNA, 21 bp, Artificial Sequence
  Synthetic
cgtccacgtgttcttgtcgta

SEQ ID NO: 15973 - DNA, 21 bp, Artificial Sequence
  Synthetic
cagtacgacaagaacacgtgg

SEQ ID NO: 15974 - DNA, 21 bp, Artificial Sequence
  Synthetic
agtacgacaagaacacgtgga

SEQ ID NO: 15975 - DNA, 21 bp, Artificial Sequence
  Synthetic
agaacacgtggacggaggtgc

SEQ ID NO: 15976 - DNA, 21 bp, Artificial Sequence
  Synthetic
acgtggacggaggtgcacgaa

SEQ ID NO: 15977 - DNA, 21 bp, Artificial Sequence
  Synthetic
gtgaagctgcgcaactatgtg

SEQ ID NO: 15978 - DNA, 21 bp, Artificial Sequence
  Synthetic
tgaagctgcgcaactatgtgg

SEQ ID NO: 15979 - DNA, 21 bp, Artificial Sequence
  Synthetic
aagctgcgcaactatgtggtg

SEQ ID NO: 15980 - DNA, 21 bp, Artificial Sequence
  Synthetic
actatgtggtggagaaggtgc

SEQ ID NO: 15981 - DNA, 21 bp, Artificial Sequence
  Synthetic
tatgtggtggagaaggtgccc

SEQ ID NO: 15982 - DNA, 21 bp, Artificial Sequence
  Synthetic
gtggagaaggtgcccgagaag

SEQ ID NO: 15983 - DNA, 21 bp, Artificial Sequence
  Synthetic
cgcaaggcgtagcccagcttc

SEQ ID NO: 15984 - DNA, 21 bp, Artificial Sequence
  Synthetic
ctgggctacgccttgcgtccc

SEQ ID NO: 15985 - DNA, 21 bp, Artificial Sequence
  Synthetic
tgggctacgccttgcgtcccc

SEQ ID NO: 15986 - DNA, 21 bp, Artificial Sequence
  Synthetic
tacgccttgcgtccccaggaa

SEQ ID NO: 15987 - DNA, 21 bp, Artificial Sequence
  Synthetic
cccaggaaaagggccactcgc

SEQ ID NO: 15988 - DNA, 21 bp, Artificial Sequence
  Synthetic
ccatctggtagatgtcttcgg

SEQ ID NO: 15989 - DNA, 21 bp, Artificial Sequence
  Synthetic
agagccatctggtagatgtct

SEQ ID NO: 15990 - DNA, 21 bp, Artificial Sequence
  Synthetic
taccagatggctctcaaccag

SEQ ID NO: 15991 - DNA, 21 bp, Artificial Sequence
  Synthetic
gcaggcggtacccacctggtt

SEQ ID NO: 15992 - DNA, 21 bp, Artificial Sequence
  Synthetic
gtgcaggcggtacccacctgg

SEQ ID NO: 15993 - DNA, 21 bp, Artificial Sequence
  Synthetic
gccctcaaagacctcaaggca

SEQ ID NO: 15994 - DNA, 21 bp, Artificial Sequence
  Synthetic
gcccagtgccttgaggtcttt

SEQ ID NO: 15995 - DNA, 21 bp, Artificial Sequence
  Synthetic
cagcccagtgccttgaggtct

SEQ ID NO: 15996 - DNA, 21 bp, Artificial Sequence
  Synthetic
agacctcaaggcactgggctg

SEQ ID NO: 15997 - DNA, 21 bp, Artificial Sequence
  Synthetic
gcctttctgcagcccagtgcc

SEQ ID NO: 15998 - DNA, 21 bp, Artificial Sequence
  Synthetic
gcactgggctgcagaaaggcg

SEQ ID NO: 15999 - DNA, 21 bp, Artificial Sequence
  Synthetic
ctgggctgcagaaaggcgatg

SEQ ID NO: 16000 - DNA, 21 bp, Artificial Sequence
  Synthetic
gcagaaaggcgatgaagaagt

SEQ ID NO: 16001 - DNA, 21 bp, Artificial Sequence
  Synthetic
ccaacctgcaggaatatcttc

SEQ ID NO: 16002 - DNA, 21 bp, Artificial Sequence
  Synthetic
caacctgcaggaatatcttct

SEQ ID NO: 16003 - DNA, 21 bp, Artificial Sequence
  Synthetic
aacctgcaggaatatcttctc

SEQ ID NO: 16004 - DNA, 21 bp, Artificial Sequence
  Synthetic
acctgcaggaatatcttctcg

SEQ ID NO: 16005 - DNA, 21 bp, Artificial Sequence
  Synthetic
ctgcaggaatatcttctcggg

SEQ ID NO: 16006 - DNA, 21 bp, Artificial Sequence
  Synthetic
tgcaggaatatcttctcgggg

SEQ ID NO: 16007 - DNA, 21 bp, Artificial Sequence
  Synthetic
gcaggaatatcttctcgggga

SEQ ID NO: 16008 - DNA, 21 bp, Artificial Sequence
  Synthetic
caggaatatcttctcggggag

SEQ ID NO: 16009 - DNA, 21 bp, Artificial Sequence
  Synthetic
tatcttctcggggaggggaac

SEQ ID NO: 16010 - DNA, 21 bp, Artificial Sequence
  Synthetic
ccggctcaggttcccctcccc

SEQ ID NO: 16011 - DNA, 21 bp, Artificial Sequence
  Synthetic
ggccggctcaggttcccctcc

SEQ ID NO: 16012 - DNA, 21 bp, Artificial Sequence
  Synthetic
agccggccggccgtgcagctt

SEQ ID NO: 16013 - DNA, 21 bp, Artificial Sequence
  Synthetic
gccggccggccgtgcagcttc

SEQ ID NO: 16014 - DNA, 21 bp, Artificial Sequence
  Synthetic
ccggccggccgtgcagcttct

SEQ ID NO: 16015 - DNA, 21 bp, Artificial Sequence
  Synthetic
agcttctgggagacgtgatgt

SEQ ID NO: 16016 - DNA, 21 bp, Artificial Sequence
  Synthetic
cttctgggagacgtgatgtcc

SEQ ID NO: 16017 - DNA, 21 bp, Artificial Sequence
  Synthetic
atcctcggacatcacgtctcc

SEQ ID NO: 16018 - DNA, 21 bp, Artificial Sequence
  Synthetic
ctgagatagaagaagccatcc

SEQ ID NO: 16019 - DNA, 21 bp, Artificial Sequence
  Synthetic
gcttcttctatctcagcttcg

SEQ ID NO: 16020 - DNA, 21 bp, Artificial Sequence
  Synthetic
gcctcggcgaagctgagatag

SEQ ID NO: 16021 - DNA, 21 bp, Artificial Sequence
  Synthetic
agggcctcggcgaagctgaga

SEQ ID NO: 16022 - DNA, 21 bp, Artificial Sequence
  Synthetic
tctcagcttcgccgaggccct

SEQ ID NO: 16023 - DNA, 21 bp, Artificial Sequence
  Synthetic
gcccggagggcctcggcgaag

SEQ ID NO: 16024 - DNA, 21 bp, Artificial Sequence
  Synthetic
ctgtgggcccggagggcctcg

SEQ ID NO: 16025 - DNA, 21 bp, Artificial Sequence
  Synthetic
gctgaggcagctgtgggcccg

SEQ ID NO: 16026 - DNA, 21 bp, Artificial Sequence
  Synthetic
tcgctgaggcagctgtgggcc

SEQ ID NO: 16027 - DNA, 21 bp, Artificial Sequence
  Synthetic
gtcgctgaggcagctgtgggc

SEQ ID NO: 16028 - DNA, 21 bp, Artificial Sequence
  Synthetic
gagtctgtcgctgaggcagct

SEQ ID NO: 16029 - DNA, 21 bp, Artificial Sequence
  Synthetic
gcctcagcgacagactccagt

SEQ ID NO: 16030 - DNA, 21 bp, Artificial Sequence
  Synthetic
gccccttactggagtctgtcg

SEQ ID NO: 16031 - DNA, 21 bp, Artificial Sequence
  Synthetic
gcctgcaggtacagccgcatc

SEQ ID NO: 16032 - DNA, 21 bp, Artificial Sequence
  Synthetic
gtacagccgcatcgtgggtgg

SEQ ID NO: 16033 - DNA, 21 bp, Artificial Sequence
  Synthetic
tacagccgcatcgtgggtggc

SEQ ID NO: 16034 - DNA, 21 bp, Artificial Sequence
  Synthetic
gacctgctgccgcgcgcgctg

SEQ ID NO: 16035 - DNA, 21 bp, Artificial Sequence
  Synthetic
gcgcgctgctgagctcgctgt

SEQ ID NO: 16036 - DNA, 21 bp, Artificial Sequence
  Synthetic
tcaacagcacaagcccggaca

SEQ ID NO: 16037 - DNA, 21 bp, Artificial Sequence
  Synthetic
tcgctgtccgggcttgtgctg

SEQ ID NO: 16038 - DNA, 21 bp, Artificial Sequence
  Synthetic
ggcgcgttcaacagcacaagc

SEQ ID NO: 16039 - DNA, 21 bp, Artificial Sequence
  Synthetic
gcgcccgtggtggcgatgacc

SEQ ID NO: 16040 - DNA, 21 bp, Artificial Sequence
  Synthetic
cgcccgtggtggcgatgaccc

SEQ ID NO: 16041 - DNA, 21 bp, Artificial Sequence
  Synthetic
ggtccctgggtcatcgccacc

SEQ ID NO: 16042 - DNA, 21 bp, Artificial Sequence
  Synthetic
cacgtgcacatcgtgcggtcc

SEQ ID NO: 16043 - DNA, 21 bp, Artificial Sequence
  Synthetic
cgcacgatgtgcacgtgcaga

SEQ ID NO: 16044 - DNA, 21 bp, Artificial Sequence
  Synthetic
gatcgagacctctcccccggc

SEQ ID NO: 16045 - DNA, 21 bp, Artificial Sequence
  Synthetic
atcgagacctctcccccggcg

SEQ ID NO: 16046 - DNA, 21 bp, Artificial Sequence
  Synthetic
acctctcccccggcgcggaat

SEQ ID NO: 16047 - DNA, 21 bp, Artificial Sequence
  Synthetic
ccttcagattccgcgccgggg

SEQ ID NO: 16048 - DNA, 21 bp, Artificial Sequence
  Synthetic
caccttcagattccgcgccgg

SEQ ID NO: 16049 - DNA, 21 bp, Artificial Sequence
  Synthetic
gcaccttcagattccgcgccg

SEQ ID NO: 16050 - DNA, 21 bp, Artificial Sequence
  Synthetic
agcaccttcagattccgcgcc

SEQ ID NO: 16051 - DNA, 21 bp, Artificial Sequence
  Synthetic
cagcaccttcagattccgcgc

SEQ ID NO: 16052 - DNA, 21 bp, Artificial Sequence
  Synthetic
tcagcaccttcagattccgcg

SEQ ID NO: 16053 - DNA, 21 bp, Artificial Sequence
  Synthetic
ccggcgcggaatctgaaggtg

SEQ ID NO: 16054 - DNA, 21 bp, Artificial Sequence
  Synthetic
gccgacgtggtgctgctgacg

SEQ ID NO: 16055 - DNA, 21 bp, Artificial Sequence
  Synthetic
acgtggtgctgctgacggcga

SEQ ID NO: 16056 - DNA, 21 bp, Artificial Sequence
  Synthetic
ctgacggcgagcggaccggcg

SEQ ID NO: 16057 - DNA, 21 bp, Artificial Sequence
  Synthetic
atgtggcggggcagcggcggc

SEQ ID NO: 16058 - DNA, 21 bp, Artificial Sequence
  Synthetic
gcatgtggcggggcagcggcg

SEQ ID NO: 16059 - DNA, 21 bp, Artificial Sequence
  Synthetic
ccgccgctgccccgccacatg

SEQ ID NO: 16060 - DNA, 21 bp, Artificial Sequence
  Synthetic
cgccgctgccccgccacatgc

SEQ ID NO: 16061 - DNA, 21 bp, Artificial Sequence
  Synthetic
cgcagcgcctcctgcatgtgg

SEQ ID NO: 16062 - DNA, 21 bp, Artificial Sequence
  Synthetic
ccgcagcgcctcctgcatgtg

SEQ ID NO: 16063 - DNA, 21 bp, Artificial Sequence
  Synthetic
ccgccacatgcaggaggcgct

SEQ ID NO: 16064 - DNA, 21 bp, Artificial Sequence
  Synthetic
cgccacatgcaggaggcgctg

SEQ ID NO: 16065 - DNA, 21 bp, Artificial Sequence
  Synthetic
cagaagggcctgcggaagctt

SEQ ID NO: 16066 - DNA, 21 bp, Artificial Sequence
  Synthetic
ccagaagggcctgcggaagct

SEQ ID NO: 16067 - DNA, 21 bp, Artificial Sequence
  Synthetic
gcttccgcaggcccttctggc

SEQ ID NO: 16068 - DNA, 21 bp, Artificial Sequence
  Synthetic
tcctcgcgccagaagggcctg

SEQ ID NO: 16069 - DNA, 21 bp, Artificial Sequence
  Synthetic
ttccgcaggcccttctggcgc

SEQ ID NO: 16070 - DNA, 21 bp, Artificial Sequence
  Synthetic
ctcctcgcgccagaagggcct

SEQ ID NO: 16071 - DNA, 21 bp, Artificial Sequence
  Synthetic
tccgcaggcccttctggcgcg

SEQ ID NO: 16072 - DNA, 21 bp, Artificial Sequence
  Synthetic
tcaatgtgctcctcgcgccag

SEQ ID NO: 16073 - DNA, 21 bp, Artificial Sequence
  Synthetic
ccttctggcgcgaggagcaca

SEQ ID NO: 16074 - DNA, 21 bp, Artificial Sequence
  Synthetic
ccttcaatgtgctcctcgcgc

SEQ ID NO: 16075 - DNA, 21 bp, Artificial Sequence
  Synthetic
tgcgcgacgggcgatcggtgt

SEQ ID NO: 16076 - DNA, 21 bp, Artificial Sequence
  Synthetic
gcgggtagaaaatcatgcgcg

SEQ ID NO: 16077 - DNA, 21 bp, Artificial Sequence
  Synthetic
gcgccctcgcgcggcggcggg

SEQ ID NO: 16078 - DNA, 21 bp, Artificial Sequence
  Synthetic
gcagcgcgccctcgcgcggcg

SEQ ID NO: 16079 - DNA, 21 bp, Artificial Sequence
  Synthetic
ctgctggcctcgtacacgtgg

SEQ ID NO: 16080 - DNA, 21 bp, Artificial Sequence
  Synthetic
ccgccgcgtccgaccacgtgt

SEQ ID NO: 16081 - DNA, 21 bp, Artificial Sequence
  Synthetic
gcggcggcagcgttcgccggc

SEQ ID NO: 16082 - DNA, 21 bp, Artificial Sequence
  Synthetic
ggcagcgttcgccggcttgag

SEQ ID NO: 16083 - DNA, 21 bp, Artificial Sequence
  Synthetic
gcagcgttcgccggcttgagc

SEQ ID NO: 16084 - DNA, 21 bp, Artificial Sequence
  Synthetic
cagcgttcgccggcttgagcc

SEQ ID NO: 16085 - DNA, 21 bp, Artificial Sequence
  Synthetic
cgttcgccggcttgagccggg

SEQ ID NO: 16086 - DNA, 21 bp, Artificial Sequence
  Synthetic
gcctcttcccggctcaagccg

SEQ ID NO: 16087 - DNA, 21 bp, Artificial Sequence
  Synthetic
ccgtgcaatgccgccacgtcg

SEQ ID NO: 16088 - DNA, 21 bp, Artificial Sequence
  Synthetic
tcgacgacgtggcggcattgc

SEQ ID NO: 16089 - DNA, 21 bp, Artificial Sequence
  Synthetic
cgggcctgtcgtgcgccagct

SEQ ID NO: 16090 - DNA, 21 bp, Artificial Sequence
  Synthetic
gggcctgtcgtgcgccagctc

SEQ ID NO: 16091 - DNA, 21 bp, Artificial Sequence
  Synthetic
ttgacgacgccggtgccgtcc

SEQ ID NO: 16092 - DNA, 21 bp, Artificial Sequence
  Synthetic
cggcaccggcgtcgtcaagcg

SEQ ID NO: 16093 - DNA, 21 bp, Artificial Sequence
  Synthetic
accggcgtcgtcaagcgttgg

SEQ ID NO: 16094 - DNA, 21 bp, Artificial Sequence
  Synthetic
ccggcgtcgtcaagcgttggg

SEQ ID NO: 16095 - DNA, 21 bp, Artificial Sequence
  Synthetic
ggcgtcgtcaagcgttgggcg

SEQ ID NO: 16096 - DNA, 21 bp, Artificial Sequence
  Synthetic
tgggcggaggaccagcacagc

SEQ ID NO: 16097 - DNA, 21 bp, Artificial Sequence
  Synthetic
agccgccggcgctctggcaaa

SEQ ID NO: 16098 - DNA, 21 bp, Artificial Sequence
  Synthetic
ccggcgctctggcaaaccgaa

SEQ ID NO: 16099 - DNA, 21 bp, Artificial Sequence
  Synthetic
ctggcaaaccgaaaaggatga

SEQ ID NO: 16100 - DNA, 21 bp, Artificial Sequence
  Synthetic
ggcaaagtagatgcggccata

SEQ ID NO: 16101 - DNA, 21 bp, Artificial Sequence
  Synthetic
cggcaaagtagatgcggccat

SEQ ID NO: 16102 - DNA, 21 bp, Artificial Sequence
  Synthetic
atggccgcatctactttgccg

SEQ ID NO: 16103 - DNA, 21 bp, Artificial Sequence
  Synthetic
gcacaccgcctacccgcacgg

SEQ ID NO: 16104 - DNA, 21 bp, Artificial Sequence
  Synthetic
accgcctacccgcacggctgg

SEQ ID NO: 16105 - DNA, 21 bp, Artificial Sequence
  Synthetic
ccgcctacccgcacggctggg

SEQ ID NO: 16106 - DNA, 21 bp, Artificial Sequence
  Synthetic
ccgccgtctccacccagccgt

SEQ ID NO: 16107 - DNA, 21 bp, Artificial Sequence
  Synthetic
acaaccactcggtgaccgacc

SEQ ID NO: 16108 - DNA, 21 bp, Artificial Sequence
  Synthetic
aaccactcggtgaccgacccc

SEQ ID NO: 16109 - DNA, 21 bp, Artificial Sequence
  Synthetic
tgagcttctcggggtcggtca

SEQ ID NO: 16110 - DNA, 21 bp, Artificial Sequence
  Synthetic
accccgagaagctcaacaact

SEQ ID NO: 16111 - DNA, 21 bp, Artificial Sequence
  Synthetic
gctcgtagttgttgagcttct

SEQ ID NO: 16112 - DNA, 21 bp, Artificial Sequence
  Synthetic
ggctcgtagttgttgagcttc

SEQ ID NO: 16113 - DNA, 21 bp, Artificial Sequence
  Synthetic
ggggagaagggctcgtagttg

SEQ ID NO: 16114 - DNA, 21 bp, Artificial Sequence
  Synthetic
acaactacgagcccttctccc

SEQ ID NO: 16115 - DNA, 21 bp, Artificial Sequence
  Synthetic
agcccttctcccccgaggtgt

SEQ ID NO: 16116 - DNA, 21 bp, Artificial Sequence
  Synthetic
gcccttctcccccgaggtgta

SEQ ID NO: 16117 - DNA, 21 bp, Artificial Sequence
  Synthetic
tccccgtacacctcgggggag

SEQ ID NO: 16118 - DNA, 21 bp, Artificial Sequence
  Synthetic
cccttctcccccgaggtgtac

SEQ ID NO: 16119 - DNA, 21 bp, Artificial Sequence
  Synthetic
ccttctcccccgaggtgtacg

SEQ ID NO: 16120 - DNA, 21 bp, Artificial Sequence
  Synthetic
gtctccccgtacacctcgggg

SEQ ID NO: 16121 - DNA, 21 bp, Artificial Sequence
  Synthetic
aggtctccccgtacacctcgg

SEQ ID NO: 16122 - DNA, 21 bp, Artificial Sequence
  Synthetic
gaggtctccccgtacacctcg

SEQ ID NO: 16123 - DNA, 21 bp, Artificial Sequence
  Synthetic
ggaggtctccccgtacacctc

SEQ ID NO: 16124 - DNA, 21 bp, Artificial Sequence
  Synthetic
aggaggtctccccgtacacct

SEQ ID NO: 16125 - DNA, 21 bp, Artificial Sequence
  Synthetic
aaggaggtctccccgtacacc

SEQ ID NO: 16126 - DNA, 21 bp, Artificial Sequence
  Synthetic
tcatctgggccaccaggtcga

SEQ ID NO: 16127 - DNA, 21 bp, Artificial Sequence
  Synthetic
atcatctgggccaccaggtcg

SEQ ID NO: 16128 - DNA, 21 bp, Artificial Sequence
  Synthetic
tcaatcatctgggccaccagg

SEQ ID NO: 16129 - DNA, 21 bp, Artificial Sequence
  Synthetic
acctggtggcccagatgattg

SEQ ID NO: 16130 - DNA, 21 bp, Artificial Sequence
  Synthetic
catcttgatctcatcaatcat

SEQ ID NO: 16131 - DNA, 21 bp, Artificial Sequence
  Synthetic
atgaccgacgacgacctgttt

SEQ ID NO: 16132 - DNA, 21 bp, Artificial Sequence
  Synthetic
gacgacgacctgtttgtggac

SEQ ID NO: 16133 - DNA, 21 bp, Artificial Sequence
  Synthetic
acgacgacctgtttgtggact

SEQ ID NO: 16134 - DNA, 21 bp, Artificial Sequence
  Synthetic
cgacgacctgtttgtggactt

SEQ ID NO: 16135 - DNA, 21 bp, Artificial Sequence
  Synthetic
gacgacctgtttgtggacttg

SEQ ID NO: 16136 - DNA, 21 bp, Artificial Sequence
  Synthetic
tgtttgtggacttggggagcg

SEQ ID NO: 16137 - DNA, 21 bp, Artificial Sequence
  Synthetic
cagttggtggcagcagcaacc

SEQ ID NO: 16138 - DNA, 21 bp, Artificial Sequence
  Synthetic
gcagttggtggcagcagcaac

SEQ ID NO: 16139 - DNA, 21 bp, Artificial Sequence
  Synthetic
actgcaaacatcactatggcg

SEQ ID NO: 16140 - DNA, 21 bp, Artificial Sequence
  Synthetic
tgcaaacatcactatggcgtc

SEQ ID NO: 16141 - DNA, 21 bp, Artificial Sequence
  Synthetic
gcagacatcccggccaagtat

SEQ ID NO: 16142 - DNA, 21 bp, Artificial Sequence
  Synthetic
cagacatcccggccaagtatg

SEQ ID NO: 16143 - DNA, 21 bp, Artificial Sequence
  Synthetic
atcccggccaagtatgcggag

SEQ ID NO: 16144 - DNA, 21 bp, Artificial Sequence
  Synthetic
gctcacctccgcatacttggc

SEQ ID NO: 16145 - DNA, 21 bp, Artificial Sequence
  Synthetic
cgctcacctccgcatacttgg

SEQ ID NO: 16146 - DNA, 21 bp, Artificial Sequence
  Synthetic
tttccttccagaccatggacc

SEQ ID NO: 16147 - DNA, 21 bp, Artificial Sequence
  Synthetic
ctgaactcgcggtccatggtc

SEQ ID NO: 16148 - DNA, 21 bp, Artificial Sequence
  Synthetic
cctgaactcgcggtccatggt

SEQ ID NO: 16149 - DNA, 21 bp, Artificial Sequence
  Synthetic
ccagaccatggaccgcgagtt

SEQ ID NO: 16150 - DNA, 21 bp, Artificial Sequence
  Synthetic
cagaccatggaccgcgagttc

SEQ ID NO: 16151 - DNA, 21 bp, Artificial Sequence
  Synthetic
catggaccgcgagttcaggaa

SEQ ID NO: 16152 - DNA, 21 bp, Artificial Sequence
  Synthetic
gaccgcgagttcaggaagtgg

SEQ ID NO: 16153 - DNA, 21 bp, Artificial Sequence
  Synthetic
ccataccatttcatccacttc

SEQ ID NO: 16154 - DNA, 21 bp, Artificial Sequence
  Synthetic
tcaggaagtggatgaaatggt

SEQ ID NO: 16155 - DNA, 21 bp, Artificial Sequence
  Synthetic
caggaagtggatgaaatggta

SEQ ID NO: 16156 - DNA, 21 bp, Artificial Sequence
  Synthetic
aatggtatggaaaaaagcatg

SEQ ID NO: 16157 - DNA, 21 bp, Artificial Sequence
  Synthetic
aaaaagcatgcagaatacaca

SEQ ID NO: 16158 - DNA, 21 bp, Artificial Sequence
  Synthetic
gaggaaatcgcctctctccaa

SEQ ID NO: 16159 - DNA, 21 bp, Artificial Sequence
  Synthetic
tggagagaggcgatttcctct

SEQ ID NO: 16160 - DNA, 21 bp, Artificial Sequence
  Synthetic
agagaggcgatttcctctcag

SEQ ID NO: 16161 - DNA, 21 bp, Artificial Sequence
  Synthetic
aggcgatttcctctcagaaga

SEQ ID NO: 16162 - DNA, 21 bp, Artificial Sequence
  Synthetic
ggcgatttcctctcagaagag

SEQ ID NO: 16163 - DNA, 21 bp, Artificial Sequence
  Synthetic
cgatttcctctcagaagagtg

SEQ ID NO: 16164 - DNA, 21 bp, Artificial Sequence
  Synthetic
gatttcctctcagaagagtgg

SEQ ID NO: 16165 - DNA, 21 bp, Artificial Sequence
  Synthetic
atttcctctcagaagagtgga

SEQ ID NO: 16166 - DNA, 21 bp, Artificial Sequence
  Synthetic
cgctccctccactcttctgag

SEQ ID NO: 16167 - DNA, 21 bp, Artificial Sequence
  Synthetic
tcgctccctccactcttctga

SEQ ID NO: 16168 - DNA, 21 bp, Artificial Sequence
  Synthetic
cctctcagaagagtggaggga

SEQ ID NO: 16169 - DNA, 21 bp, Artificial Sequence
  Synthetic
attcgctccctccactcttct

SEQ ID NO: 16170 - DNA, 21 bp, Artificial Sequence
  Synthetic
cgattcgctccctccactctt

SEQ ID NO: 16171 - DNA, 21 bp, Artificial Sequence
  Synthetic
tggagggagcgaatcgccaac

SEQ ID NO: 16172 - DNA, 21 bp, Artificial Sequence
  Synthetic
ggtcctgaggtggatcaccag

SEQ ID NO: 16173 - DNA, 21 bp, Artificial Sequence
  Synthetic
ccttcagctggtgatccacct

SEQ ID NO: 16174 - DNA, 21 bp, Artificial Sequence
  Synthetic
cctgaggtggatcaccagctg

SEQ ID NO: 16175 - DNA, 21 bp, Artificial Sequence
  Synthetic
ctgaggtggatcaccagctga

SEQ ID NO: 16176 - DNA, 21 bp, Artificial Sequence
  Synthetic
ctgaaggagcggtttgcaaac

SEQ ID NO: 16177 - DNA, 21 bp, Artificial Sequence
  Synthetic
aaggagcggtttgcaaacatg

SEQ ID NO: 16178 - DNA, 21 bp, Artificial Sequence
  Synthetic
aggagcggtttgcaaacatga

SEQ ID NO: 16179 - DNA, 21 bp, Artificial Sequence
  Synthetic
cagtgtctgtgtttcaggtgg

SEQ ID NO: 16180 - DNA, 21 bp, Artificial Sequence
  Synthetic
tcgaggacacgattctgccac

SEQ ID NO: 16181 - DNA, 21 bp, Artificial Sequence
  Synthetic
tcaggtggcagaatcgtgtcc

SEQ ID NO: 16182 - DNA, 21 bp, Artificial Sequence
  Synthetic
ttcagaggtgcaaagggtttc

SEQ ID NO: 16183 - DNA, 21 bp, Artificial Sequence
  Synthetic
tcctcgaaaccctttgcacct

SEQ ID NO: 16184 - DNA, 21 bp, Artificial Sequence
  Synthetic
agttcagaggtgcaaagggtt

SEQ ID NO: 16185 - DNA, 21 bp, Artificial Sequence
  Synthetic
accctttgcacctctgaactt

SEQ ID NO: 16186 - DNA, 21 bp, Artificial Sequence
  Synthetic
attctgaagttcagaggtgca

SEQ ID NO: 16187 - DNA, 21 bp, Artificial Sequence
  Synthetic
tctactgtttattctgaagtt

SEQ ID NO: 16188 - DNA, 21 bp, Artificial Sequence
  Synthetic
tctgaacttcagaataaacag

SEQ ID NO: 16189 - DNA, 21 bp, Artificial Sequence
  Synthetic
ctcaagtttctactgtttatt

SEQ ID NO: 16190 - DNA, 21 bp, Artificial Sequence
  Synthetic
ttcagaataaacagtagaaac

SEQ ID NO: 16191 - DNA, 21 bp, Artificial Sequence
  Synthetic
aacagtagaaacttgagtggt

SEQ ID NO: 16192 - DNA, 21 bp, Artificial Sequence
  Synthetic
atcggcaccatcatgcgcgtg

SEQ ID NO: 16193 - DNA, 21 bp, Artificial Sequence
  Synthetic
tcggcaccatcatgcgcgtgg

SEQ ID NO: 16194 - DNA, 21 bp, Artificial Sequence
  Synthetic
cgcgtggtggagctctcgccc

SEQ ID NO: 16195 - DNA, 21 bp, Artificial Sequence
  Synthetic
gtggtggagctctcgcccctg

SEQ ID NO: 16196 - DNA, 21 bp, Artificial Sequence
  Synthetic
gacaccgagcccttcaggggc

SEQ ID NO: 16197 - DNA, 21 bp, Artificial Sequence
  Synthetic
acgacaccgagcccttcaggg

SEQ ID NO: 16198 - DNA, 21 bp, Artificial Sequence
  Synthetic
gcccctgaagggctcggtgtc

SEQ ID NO: 16199 - DNA, 21 bp, Artificial Sequence
  Synthetic
gtccacgacaccgagcccttc

SEQ ID NO: 16200 - DNA, 21 bp, Artificial Sequence
  Synthetic
cgtccacgacaccgagccctt

SEQ ID NO: 16201 - DNA, 21 bp, Artificial Sequence
  Synthetic
ctgaagggctcggtgtcgtgg

SEQ ID NO: 16202 - DNA, 21 bp, Artificial Sequence
  Synthetic
tgaagggctcggtgtcgtgga

SEQ ID NO: 16203 - DNA, 21 bp, Artificial Sequence
  Synthetic
gaagggctcggtgtcgtggac

SEQ ID NO: 16204 - DNA, 21 bp, Artificial Sequence
  Synthetic
aagggctcggtgtcgtggacg

SEQ ID NO: 16205 - DNA, 21 bp, Artificial Sequence
  Synthetic
ctggcttccccgtccacgaca

SEQ ID NO: 16206 - DNA, 21 bp, Artificial Sequence
  Synthetic
ggtcgatagtgtgcaggtagt

SEQ ID NO: 16207 - DNA, 21 bp, Artificial Sequence
  Synthetic
cggtcgatagtgtgcaggtag

SEQ ID NO: 16208 - DNA, 21 bp, Artificial Sequence
  Synthetic
gccgcggccgtcatggggttc

SEQ ID NO: 16209 - DNA, 21 bp, Artificial Sequence
  Synthetic
tcatggggttcctgaaactga

SEQ ID NO: 16210 - DNA, 21 bp, Artificial Sequence
  Synthetic
ggttcctgaaactgattgaga

SEQ ID NO: 16211 - DNA, 21 bp, Artificial Sequence
  Synthetic
ttctcaatctcaatcagtttc

SEQ ID NO: 16212 - DNA, 21 bp, Artificial Sequence
  Synthetic
ttcctgaaactgattgagatt

SEQ ID NO: 16213 - DNA, 21 bp, Artificial Sequence
  Synthetic
gttctcaatctcaatcagttt

SEQ ID NO: 16214 - DNA, 21 bp, Artificial Sequence
  Synthetic
attgagaactttaagtcgtac

SEQ ID NO: 16215 - DNA, 21 bp, Artificial Sequence
  Synthetic
cgtacaagggtcgacagatta

SEQ ID NO: 16216 - DNA, 21 bp, Artificial Sequence
  Synthetic
cgacagattatcggaccattt

SEQ ID NO: 16217 - DNA, 21 bp, Artificial Sequence
  Synthetic
tccaatgatggcggtgaacct

SEQ ID NO: 16218 - DNA, 21 bp, Artificial Sequence
  Synthetic
ttcagaggttcaccgccatca

SEQ ID NO: 16219 - DNA, 21 bp, Artificial Sequence
  Synthetic
ccattgggtccaatgatggcg

SEQ ID NO: 16220 - DNA, 21 bp, Artificial Sequence
  Synthetic
tcattggacccaatggctctg

SEQ ID NO: 16221 - DNA, 21 bp, Artificial Sequence
  Synthetic
aggtttatctcaccagagcca

SEQ ID NO: 16222 - DNA, 21 bp, Artificial Sequence
  Synthetic
tccatgagatttgacttacct

SEQ ID NO: 16223 - DNA, 21 bp, Artificial Sequence
  Synthetic
cccttaggtaagtcaaatctc

SEQ ID NO: 16224 - DNA, 21 bp, Artificial Sequence
  Synthetic
agcacaaagctgatggcatcc

SEQ ID NO: 16225 - DNA, 21 bp, Artificial Sequence
  Synthetic
atgccatcagctttgtgctag

SEQ ID NO: 16226 - DNA, 21 bp, Artificial Sequence
  Synthetic
aggtgaaaaaaccagcaacct

SEQ ID NO: 16227 - DNA, 21 bp, Artificial Sequence
  Synthetic
caacctgcgggtaaagaccct

SEQ ID NO: 16228 - DNA, 21 bp, Artificial Sequence
  Synthetic
aacctgcgggtaaagaccctg

SEQ ID NO: 16229 - DNA, 21 bp, Artificial Sequence
  Synthetic
agaccctgcgggacctgatcc

SEQ ID NO: 16230 - DNA, 21 bp, Artificial Sequence
  Synthetic
gaccctgcgggacctgatcca

SEQ ID NO: 16231 - DNA, 21 bp, Artificial Sequence
  Synthetic
agctccatggatcaggtcccg

SEQ ID NO: 16232 - DNA, 21 bp, Artificial Sequence
  Synthetic
gacctgatccatggagctcct

SEQ ID NO: 16233 - DNA, 21 bp, Artificial Sequence
  Synthetic
tggcttgcccacaggagctcc

SEQ ID NO: 16234 - DNA, 21 bp, Artificial Sequence
  Synthetic
gttggcagctggcttgcccac

SEQ ID NO: 16235 - DNA, 21 bp, Artificial Sequence
  Synthetic
ggttggcagctggcttgccca

SEQ ID NO: 16236 - DNA, 21 bp, Artificial Sequence
  Synthetic
tgtgggcaagccagctgccaa

SEQ ID NO: 16237 - DNA, 21 bp, Artificial Sequence
  Synthetic
cctttgtcagcatggtctact

SEQ ID NO: 16238 - DNA, 21 bp, Artificial Sequence
  Synthetic
tttgtcagcatggtctactct

SEQ ID NO: 16239 - DNA, 21 bp, Artificial Sequence
  Synthetic
ttgtcagcatggtctactctg

SEQ ID NO: 16240 - DNA, 21 bp, Artificial Sequence
  Synthetic
gtcagcatggtctactctgag

SEQ ID NO: 16241 - DNA, 21 bp, Artificial Sequence
  Synthetic
tggtctactctgaggagggtg

SEQ ID NO: 16242 - DNA, 21 bp, Artificial Sequence
  Synthetic
gtctactctgaggagggtgct

SEQ ID NO: 16243 - DNA, 21 bp, Artificial Sequence
  Synthetic
tacggtcctcagcaccctcct

SEQ ID NO: 16244 - DNA, 21 bp, Artificial Sequence
  Synthetic
cctttgcccgtgtcattgtag

SEQ ID NO: 16245 - DNA, 21 bp, Artificial Sequence
  Synthetic
gcctcacccacctacaatgac

SEQ ID NO: 16246 - DNA, 21 bp, Artificial Sequence
  Synthetic
attgtcttgtaggaggttctt

SEQ ID NO: 16247 - DNA, 21 bp, Artificial Sequence
  Synthetic
tgttgttgatcttgtactcag

SEQ ID NO: 16248 - DNA, 21 bp, Artificial Sequence
  Synthetic
ctttgttgttgatcttgtact

SEQ ID NO: 16249 - DNA, 21 bp, Artificial Sequence
  Synthetic
acaacaaagtggtccaactac

SEQ ID NO: 16250 - DNA, 21 bp, Artificial Sequence
  Synthetic
tggtccaactacatgagtaca

SEQ ID NO: 16251 - DNA, 21 bp, Artificial Sequence
  Synthetic
gtccaactacatgagtacagt

SEQ ID NO: 16252 - DNA, 21 bp, Artificial Sequence
  Synthetic
ttcctcactgtactcatgtag

SEQ ID NO: 16253 - DNA, 21 bp, Artificial Sequence
  Synthetic
tccaactacatgagtacagtg

SEQ ID NO: 16254 - DNA, 21 bp, Artificial Sequence
  Synthetic
tacatgagtacagtgaggaat

SEQ ID NO: 16255 - DNA, 21 bp, Artificial Sequence
  Synthetic
catgagtacagtgaggaatta

SEQ ID NO: 16256 - DNA, 21 bp, Artificial Sequence
  Synthetic
tacagtgaggaattagagaag

SEQ ID NO: 16257 - DNA, 21 bp, Artificial Sequence
  Synthetic
gaggaagttacgagctttgat

SEQ ID NO: 16258 - DNA, 21 bp, Artificial Sequence
  Synthetic
acgaggaagttacgagctttg

SEQ ID NO: 16259 - DNA, 21 bp, Artificial Sequence
  Synthetic
cacctggaaaacgaggaagtt

SEQ ID NO: 16260 - DNA, 21 bp, Artificial Sequence
  Synthetic
aaaacgcccacctggaaaacg

SEQ ID NO: 16261 - DNA, 21 bp, Artificial Sequence
  Synthetic
aaaaacgcccacctggaaaac

SEQ ID NO: 16262 - DNA, 21 bp, Artificial Sequence
  Synthetic
ttaaaaacgcccacctggaaa

SEQ ID NO: 16263 - DNA, 21 bp, Artificial Sequence
  Synthetic
ttcgacctttactagggtgct

SEQ ID NO: 16264 - DNA, 21 bp, Artificial Sequence
  Synthetic
tcgacctttactagggtgctg

SEQ ID NO: 16265 - DNA, 21 bp, Artificial Sequence
  Synthetic
ggtgctgtggaatctattgcc

SEQ ID NO: 16266 - DNA, 21 bp, Artificial Sequence
  Synthetic
gctgtggaatctattgccatg

SEQ ID NO: 16267 - DNA, 21 bp, Artificial Sequence
  Synthetic
ctattgccatgaagaacccca

SEQ ID NO: 16268 - DNA, 21 bp, Artificial Sequence
  Synthetic
attgccatgaagaaccccaaa

SEQ ID NO: 16269 - DNA, 21 bp, Artificial Sequence
  Synthetic
tgccatgaagaaccccaaaga

SEQ ID NO: 16270 - DNA, 21 bp, Artificial Sequence
  Synthetic
caaatagagctgtcctctctt

SEQ ID NO: 16271 - DNA, 21 bp, Artificial Sequence
  Synthetic
tcaaatagagctgtcctctct

SEQ ID NO: 16272 - DNA, 21 bp, Artificial Sequence
  Synthetic
ccaaagagaggacagctctat

SEQ ID NO: 16273 - DNA, 21 bp, Artificial Sequence
  Synthetic
aagagaggacagctctatttg

SEQ ID NO: 16274 - DNA, 21 bp, Artificial Sequence
  Synthetic
agaacgactaatctcttcaaa

SEQ ID NO: 16275 - DNA, 21 bp, Artificial Sequence
  Synthetic
tatttgaagagattagtcgtt

SEQ ID NO: 16276 - DNA, 21 bp, Artificial Sequence
  Synthetic
atttgaagagattagtcgttc

SEQ ID NO: 16277 - DNA, 21 bp, Artificial Sequence
  Synthetic
tttgaagagattagtcgttct

SEQ ID NO: 16278 - DNA, 21 bp, Artificial Sequence
  Synthetic
ttgaagagattagtcgttctg

SEQ ID NO: 16279 - DNA, 21 bp, Artificial Sequence
  Synthetic
agtcgttctggggagctggcg

SEQ ID NO: 16280 - DNA, 21 bp, Artificial Sequence
  Synthetic
gtcgttctggggagctggcgc

SEQ ID NO: 16281 - DNA, 21 bp, Artificial Sequence
  Synthetic
catactcctgcgccagctccc

SEQ ID NO: 16282 - DNA, 21 bp, Artificial Sequence
  Synthetic
gctggcgcaggagtatgacaa

SEQ ID NO: 16283 - DNA, 21 bp, Artificial Sequence
  Synthetic
gcgcaggagtatgacaagcga

SEQ ID NO: 16284 - DNA, 21 bp, Artificial Sequence
  Synthetic
caggagtatgacaagcgaaag

SEQ ID NO: 16285 - DNA, 21 bp, Artificial Sequence
  Synthetic
aggagtatgacaagcgaaaga

SEQ ID NO: 16286 - DNA, 21 bp, Artificial Sequence
  Synthetic
gacaagcgaaagaaggaaatg

SEQ ID NO: 16287 - DNA, 21 bp, Artificial Sequence
  Synthetic
gaaagaaggaaatggtgaagg

SEQ ID NO: 16288 - DNA, 21 bp, Artificial Sequence
  Synthetic
agaaggaaatggtgaaggctg

SEQ ID NO: 16289 - DNA, 21 bp, Artificial Sequence
  Synthetic
aaggaaatggtgaaggctgaa

SEQ ID NO: 16290 - DNA, 21 bp, Artificial Sequence
  Synthetic
acacagtttaattaccatcgc

SEQ ID NO: 16291 - DNA, 21 bp, Artificial Sequence
  Synthetic
atcgcaagaaaaatattgcgg

SEQ ID NO: 16292 - DNA, 21 bp, Artificial Sequence
  Synthetic
aaaaatattgcggctgaacgc

SEQ ID NO: 16293 - DNA, 21 bp, Artificial Sequence
  Synthetic
aaaatattgcggctgaacgca

SEQ ID NO: 16294 - DNA, 21 bp, Artificial Sequence
  Synthetic
gctgaacgcaaggaagcaaag

SEQ ID NO: 16295 - DNA, 21 bp, Artificial Sequence
  Synthetic
ctgaacgcaaggaagcaaagc

SEQ ID NO: 16296 - DNA, 21 bp, Artificial Sequence
  Synthetic
gaacgcaaggaagcaaagcag

SEQ ID NO: 16297 - DNA, 21 bp, Artificial Sequence
  Synthetic
gcaaggaagcaaagcaggaga

SEQ ID NO: 16298 - DNA, 21 bp, Artificial Sequence
  Synthetic
aggaagcaaagcaggagaaag

SEQ ID NO: 16299 - DNA, 21 bp, Artificial Sequence
  Synthetic
caggctgaccggtaccagcgc

SEQ ID NO: 16300 - DNA, 21 bp, Artificial Sequence
  Synthetic
gctgaccggtaccagcgcctg

SEQ ID NO: 16301 - DNA, 21 bp, Artificial Sequence
  Synthetic
accggtaccagcgcctgaagg

SEQ ID NO: 16302 - DNA, 21 bp, Artificial Sequence
  Synthetic
gcgcctgaaggatgaggtagt

SEQ ID NO: 16303 - DNA, 21 bp, Artificial Sequence
  Synthetic
cttaaagagctgcagctgtac

SEQ ID NO: 16304 - DNA, 21 bp, Artificial Sequence
  Synthetic
agctctttaagctttaccata

SEQ ID NO: 16305 - DNA, 21 bp, Artificial Sequence
  Synthetic
acttcattatggtaaagctta

SEQ ID NO: 16306 - DNA, 21 bp, Artificial Sequence
  Synthetic
tttaagctttaccataatgaa

SEQ ID NO: 16307 - DNA, 21 bp, Artificial Sequence
  Synthetic
ttaagctttaccataatgaag

SEQ ID NO: 16308 - DNA, 21 bp, Artificial Sequence
  Synthetic
tttaccataatgaagtggaaa

SEQ ID NO: 16309 - DNA, 21 bp, Artificial Sequence
  Synthetic
taccataatgaagtggaaatt

SEQ ID NO: 16310 - DNA, 21 bp, Artificial Sequence
  Synthetic
gtggaaattgagaagctcaac

SEQ ID NO: 16311 - DNA, 21 bp, Artificial Sequence
  Synthetic
tggaaattgagaagctcaaca

SEQ ID NO: 16312 - DNA, 21 bp, Artificial Sequence
  Synthetic
ttctttgaggccagttccttg

SEQ ID NO: 16313 - DNA, 21 bp, Artificial Sequence
  Synthetic
ctcaacaaggaactggcctca

SEQ ID NO: 16314 - DNA, 21 bp, Artificial Sequence
  Synthetic
aaggaactggcctcaaagaac

SEQ ID NO: 16315 - DNA, 21 bp, Artificial Sequence
  Synthetic
aggaactggcctcaaagaaca

SEQ ID NO: 16316 - DNA, 21 bp, Artificial Sequence
  Synthetic
tggcctcaaagaacaaggaga

SEQ ID NO: 16317 - DNA, 21 bp, Artificial Sequence
  Synthetic
gcctcaaagaacaaggagatc

SEQ ID NO: 16318 - DNA, 21 bp, Artificial Sequence
  Synthetic
ccttctcgatctccttgttct

SEQ ID NO: 16319 - DNA, 21 bp, Artificial Sequence
  Synthetic
tcaaagaacaaggagatcgag

SEQ ID NO: 16320 - DNA, 21 bp, Artificial Sequence
  Synthetic
aacaaggagatcgagaaggac

SEQ ID NO: 16321 - DNA, 21 bp, Artificial Sequence
  Synthetic
atcgagaaggacaagaagcgt

SEQ ID NO: 16322 - DNA, 21 bp, Artificial Sequence
  Synthetic
gacaagaagcgtatggacaag

SEQ ID NO: 16323 - DNA, 21 bp, Artificial Sequence
  Synthetic
acaagaagcgtatggacaagg

SEQ ID NO: 16324 - DNA, 21 bp, Artificial Sequence
  Synthetic
aagaagcgtatggacaaggtg

SEQ ID NO: 16325 - DNA, 21 bp, Artificial Sequence
  Synthetic
agcgtatggacaaggtggagg

SEQ ID NO: 16326 - DNA, 21 bp, Artificial Sequence
  Synthetic
atggacaaggtggaggatgaa

SEQ ID NO: 16327 - DNA, 21 bp, Artificial Sequence
  Synthetic
gacaaggtggaggatgaactg

SEQ ID NO: 16328 - DNA, 21 bp, Artificial Sequence
  Synthetic
acaaggtggaggatgaactga

SEQ ID NO: 16329 - DNA, 21 bp, Artificial Sequence
  Synthetic
aaggtggaggatgaactgaag

SEQ ID NO: 16330 - DNA, 21 bp, Artificial Sequence
  Synthetic
gtggaggatgaactgaaggag

SEQ ID NO: 16331 - DNA, 21 bp, Artificial Sequence
  Synthetic
gaggatgaactgaaggagaag

SEQ ID NO: 16332 - DNA, 21 bp, Artificial Sequence
  Synthetic
gatgaactgaaggagaagaag

SEQ ID NO: 16333 - DNA, 21 bp, Artificial Sequence
  Synthetic
atgaactgaaggagaagaaga

SEQ ID NO: 16334 - DNA, 21 bp, Artificial Sequence
  Synthetic
ctgaaggagaagaagaaggag

SEQ ID NO: 16335 - DNA, 21 bp, Artificial Sequence
  Synthetic
gaaggagctgggcaaaatgat

SEQ ID NO: 16336 - DNA, 21 bp, Artificial Sequence
  Synthetic
aaggagctgggcaaaatgatg

SEQ ID NO: 16337 - DNA, 21 bp, Artificial Sequence
  Synthetic
aggagctgggcaaaatgatgc

SEQ ID NO: 16338 - DNA, 21 bp, Artificial Sequence
  Synthetic
tgatgcgggagcagcagcaga

SEQ ID NO: 16339 - DNA, 21 bp, Artificial Sequence
  Synthetic
atgcgggagcagcagcagatt

SEQ ID NO: 16340 - DNA, 21 bp, Artificial Sequence
  Synthetic
cgggagcagcagcagattgag

SEQ ID NO: 16341 - DNA, 21 bp, Artificial Sequence
  Synthetic
gggagcagcagcagattgaga

SEQ ID NO: 16342 - DNA, 21 bp, Artificial Sequence
  Synthetic
agattgagaaggagatcaagt

SEQ ID NO: 16343 - DNA, 21 bp, Artificial Sequence
  Synthetic
cacccctctggcaaaagggag

SEQ ID NO: 16344 - DNA, 21 bp, Artificial Sequence
  Synthetic
ctggcaaaagggagaaggact

SEQ ID NO: 16345 - DNA, 21 bp, Artificial Sequence
  Synthetic
aaaagggagaaggactcagaa

SEQ ID NO: 16346 - DNA, 21 bp, Artificial Sequence
  Synthetic
gagaaggactcagaattgaac

SEQ ID NO: 16347 - DNA, 21 bp, Artificial Sequence
  Synthetic
gaggccgcttctggttcaatt

SEQ ID NO: 16348 - DNA, 21 bp, Artificial Sequence
  Synthetic
cggcctcagtacatcaaagcc

SEQ ID NO: 16349 - DNA, 21 bp, Artificial Sequence
  Synthetic
ggcctcagtacatcaaagcca

SEQ ID NO: 16350 - DNA, 21 bp, Artificial Sequence
  Synthetic
cctcagtacatcaaagccaag

SEQ ID NO: 16351 - DNA, 21 bp, Artificial Sequence
  Synthetic
gttctccttggctttgatgta

SEQ ID NO: 16352 - DNA, 21 bp, Artificial Sequence
  Synthetic
gagaacacctcccacaaaatc

SEQ ID NO: 16353 - DNA, 21 bp, Artificial Sequence
  Synthetic
acctcccacaaaatcaagaag

SEQ ID NO: 16354 - DNA, 21 bp, Artificial Sequence
  Synthetic
cctcccacaaaatcaagaagc

SEQ ID NO: 16355 - DNA, 21 bp, Artificial Sequence
  Synthetic
atcaagaagctggaagcagcc

SEQ ID NO: 16356 - DNA, 21 bp, Artificial Sequence
  Synthetic
gaagcagccaagaagtctctg

SEQ ID NO: 16357 - DNA, 21 bp, Artificial Sequence
  Synthetic
aagaagtctctgcagaatgct

SEQ ID NO: 16358 - DNA, 21 bp, Artificial Sequence
  Synthetic
gtagtgcttctgagcattctg

SEQ ID NO: 16359 - DNA, 21 bp, Artificial Sequence
  Synthetic
cagaatgctcagaagcactac

SEQ ID NO: 16360 - DNA, 21 bp, Artificial Sequence
  Synthetic
tttacgcttcttgtagtgctt

SEQ ID NO: 16361 - DNA, 21 bp, Artificial Sequence
  Synthetic
tacaagaagcgtaaaggtgac

SEQ ID NO: 16362 - DNA, 21 bp, Artificial Sequence
  Synthetic
agaagcgtaaaggtgacatgg

SEQ ID NO: 16363 - DNA, 21 bp, Artificial Sequence
  Synthetic
cgtaaaggtgacatggatgag

SEQ ID NO: 16364 - DNA, 21 bp, Artificial Sequence
  Synthetic
gtaaaggtgacatggatgagc

SEQ ID NO: 16365 - DNA, 21 bp, Artificial Sequence
  Synthetic
aaaggtgacatggatgagctg

SEQ ID NO: 16366 - DNA, 21 bp, Artificial Sequence
  Synthetic
ggtgacatggatgagctggag

SEQ ID NO: 16367 - DNA, 21 bp, Artificial Sequence
  Synthetic
gtgacatggatgagctggaga

SEQ ID NO: 16368 - DNA, 21 bp, Artificial Sequence
  Synthetic
ctggagaaggagatgctgtca

SEQ ID NO: 16369 - DNA, 21 bp, Artificial Sequence
  Synthetic
tggagaaggagatgctgtcag

SEQ ID NO: 16370 - DNA, 21 bp, Artificial Sequence
  Synthetic
gagaaggagatgctgtcagtg

SEQ ID NO: 16371 - DNA, 21 bp, Artificial Sequence
  Synthetic
ctgtcagtggagaaggctcgg

SEQ ID NO: 16372 - DNA, 21 bp, Artificial Sequence
  Synthetic
tgtcagtggagaaggctcggc

SEQ ID NO: 16373 - DNA, 21 bp, Artificial Sequence
  Synthetic
tggagaaggctcggcaggagt

SEQ ID NO: 16374 - DNA, 21 bp, Artificial Sequence
  Synthetic
agaaggctcggcaggagtttg

SEQ ID NO: 16375 - DNA, 21 bp, Artificial Sequence
  Synthetic
ggctcggcaggagtttgaaga

SEQ ID NO: 16376 - DNA, 21 bp, Artificial Sequence
  Synthetic
catccgttcttcaaactcctg

SEQ ID NO: 16377 - DNA, 21 bp, Artificial Sequence
  Synthetic
cggcaggagtttgaagaacgg

SEQ ID NO: 16378 - DNA, 21 bp, Artificial Sequence
  Synthetic
ggcaggagtttgaagaacgga

SEQ ID NO: 16379 - DNA, 21 bp, Artificial Sequence
  Synthetic
aggagtttgaagaacggatgg

SEQ ID NO: 16380 - DNA, 21 bp, Artificial Sequence
  Synthetic
agtttgaagaacggatggaag

SEQ ID NO: 16381 - DNA, 21 bp, Artificial Sequence
  Synthetic
tttgaagaacggatggaagaa

SEQ ID NO: 16382 - DNA, 21 bp, Artificial Sequence
  Synthetic
gaacggatggaagaagagagt

SEQ ID NO: 16383 - DNA, 21 bp, Artificial Sequence
  Synthetic
atggaagaagagagtcagagt

SEQ ID NO: 16384 - DNA, 21 bp, Artificial Sequence
  Synthetic
agaagagagtcagagtcaggg

SEQ ID NO: 16385 - DNA, 21 bp, Artificial Sequence
  Synthetic
agtcagggcagagatttgacg

SEQ ID NO: 16386 - DNA, 21 bp, Artificial Sequence
  Synthetic
gtcagggcagagatttgacgt

SEQ ID NO: 16387 - DNA, 21 bp, Artificial Sequence
  Synthetic
cagggcagagatttgacgttg

SEQ ID NO: 16388 - DNA, 21 bp, Artificial Sequence
  Synthetic
agggcagagatttgacgttgg

SEQ ID NO: 16389 - DNA, 21 bp, Artificial Sequence
  Synthetic
ggcagagatttgacgttggag

SEQ ID NO: 16390 - DNA, 21 bp, Artificial Sequence
  Synthetic
caggtgaagaaataccaccgg

SEQ ID NO: 16391 - DNA, 21 bp, Artificial Sequence
  Synthetic
tgaagaaataccaccggttga

SEQ ID NO: 16392 - DNA, 21 bp, Artificial Sequence
  Synthetic
agaaataccaccggttgaaag

SEQ ID NO: 16393 - DNA, 21 bp, Artificial Sequence
  Synthetic
cggttgaaagaagaagccagc

SEQ ID NO: 16394 - DNA, 21 bp, Artificial Sequence
  Synthetic
gttgaaagaagaagccagcaa

SEQ ID NO: 16395 - DNA, 21 bp, Artificial Sequence
  Synthetic
aagagagcagctaccctggcc

SEQ ID NO: 16396 - DNA, 21 bp, Artificial Sequence
  Synthetic
agagagcagctaccctggccc

SEQ ID NO: 16397 - DNA, 21 bp, Artificial Sequence
  Synthetic
gcagctaccctggcccaggag

SEQ ID NO: 16398 - DNA, 21 bp, Artificial Sequence
  Synthetic
cagctaccctggcccaggagc

SEQ ID NO: 16399 - DNA, 21 bp, Artificial Sequence
  Synthetic
gctaccctggcccaggagctg

SEQ ID NO: 16400 - DNA, 21 bp, Artificial Sequence
  Synthetic
gaatttctccagctcctgggc

SEQ ID NO: 16401 - DNA, 21 bp, Artificial Sequence
  Synthetic
tcgattgaatttctccagctc

SEQ ID NO: 16402 - DNA, 21 bp, Artificial Sequence
  Synthetic
ccaggagctggagaaattcaa

SEQ ID NO: 16403 - DNA, 21 bp, Artificial Sequence
  Synthetic
ctggagaaattcaatcgagac

SEQ ID NO: 16404 - DNA, 21 bp, Artificial Sequence
  Synthetic
tggtcagctttctggtctcga

SEQ ID NO: 16405 - DNA, 21 bp, Artificial Sequence
  Synthetic
aatcgagaccagaaagctgac

SEQ ID NO: 16406 - DNA, 21 bp, Artificial Sequence
  Synthetic
cagaaagctgaccaggaccgt

SEQ ID NO: 16407 - DNA, 21 bp, Artificial Sequence
  Synthetic
gctgaccaggaccgtctggat

SEQ ID NO: 16408 - DNA, 21 bp, Artificial Sequence
  Synthetic
ctgaccaggaccgtctggatc

SEQ ID NO: 16409 - DNA, 21 bp, Artificial Sequence
  Synthetic
accaggaccgtctggatctgg

SEQ ID NO: 16410 - DNA, 21 bp, Artificial Sequence
  Synthetic
ggaccgtctggatctggaaga

SEQ ID NO: 16411 - DNA, 21 bp, Artificial Sequence
  Synthetic
gaccgtctggatctggaagaa

SEQ ID NO: 16412 - DNA, 21 bp, Artificial Sequence
  Synthetic
cgtctggatctggaagaacgg

SEQ ID NO: 16413 - DNA, 21 bp, Artificial Sequence
  Synthetic
atctggaagaacggaagaaag

SEQ ID NO: 16414 - DNA, 21 bp, Artificial Sequence
  Synthetic
aagaacggaagaaagtagaga

SEQ ID NO: 16415 - DNA, 21 bp, Artificial Sequence
  Synthetic
cggaagaaagtagagacagag

SEQ ID NO: 16416 - DNA, 21 bp, Artificial Sequence
  Synthetic
ggccaagatcaagcaaaagct

SEQ ID NO: 16417 - DNA, 21 bp, Artificial Sequence
  Synthetic
gccaagatcaagcaaaagctg

SEQ ID NO: 16418 - DNA, 21 bp, Artificial Sequence
  Synthetic
ccaagatcaagcaaaagctgc

SEQ ID NO: 16419 - DNA, 21 bp, Artificial Sequence
  Synthetic
tcaagcaaaagctgcgggaaa

SEQ ID NO: 16420 - DNA, 21 bp, Artificial Sequence
  Synthetic
agcaaaagctgcgggaaattg

SEQ ID NO: 16421 - DNA, 21 bp, Artificial Sequence
  Synthetic
caaaagctgcgggaaattgaa

SEQ ID NO: 16422 - DNA, 21 bp, Artificial Sequence
  Synthetic
ctgcgggaaattgaagagaat

SEQ ID NO: 16423 - DNA, 21 bp, Artificial Sequence
  Synthetic
ggaaattgaagagaatcagaa

SEQ ID NO: 16424 - DNA, 21 bp, Artificial Sequence
  Synthetic
ttgaagagaatcagaagcgga

SEQ ID NO: 16425 - DNA, 21 bp, Artificial Sequence
  Synthetic
gaagagaatcagaagcggatt

SEQ ID NO: 16426 - DNA, 21 bp, Artificial Sequence
  Synthetic
aatcagaagcggattgagaaa

SEQ ID NO: 16427 - DNA, 21 bp, Artificial Sequence
  Synthetic
atcagaagcggattgagaaac

SEQ ID NO: 16428 - DNA, 21 bp, Artificial Sequence
  Synthetic
cagaagcggattgagaaactg

SEQ ID NO: 16429 - DNA, 21 bp, Artificial Sequence
  Synthetic
agaagcggattgagaaactgg

SEQ ID NO: 16430 - DNA, 21 bp, Artificial Sequence
  Synthetic
cctcactttgtaggcagtccc

SEQ ID NO: 16431 - DNA, 21 bp, Artificial Sequence
  Synthetic
cactttgtaggcagtccctag

SEQ ID NO: 16432 - DNA, 21 bp, Artificial Sequence
  Synthetic
tgtaggcagtccctagaagag

SEQ ID NO: 16433 - DNA, 21 bp, Artificial Sequence
  Synthetic
aggcagtccctagaagagcag

SEQ ID NO: 16434 - DNA, 21 bp, Artificial Sequence
  Synthetic
tctagcttcttctgctcttct

SEQ ID NO: 16435 - DNA, 21 bp, Artificial Sequence
  Synthetic
ctctagcttcttctgctcttc

SEQ ID NO: 16436 - DNA, 21 bp, Artificial Sequence
  Synthetic
ccctagaagagcagaagaagc

SEQ ID NO: 16437 - DNA, 21 bp, Artificial Sequence
  Synthetic
ctagaagagcagaagaagcta

SEQ ID NO: 16438 - DNA, 21 bp, Artificial Sequence
  Synthetic
tagaagagcagaagaagctag

SEQ ID NO: 16439 - DNA, 21 bp, Artificial Sequence
  Synthetic
agaagagcagaagaagctaga

SEQ ID NO: 16440 - DNA, 21 bp, Artificial Sequence
  Synthetic
gaagagcagaagaagctagag

SEQ ID NO: 16441 - DNA, 21 bp, Artificial Sequence
  Synthetic
aagagcagaagaagctagagg

SEQ ID NO: 16442 - DNA, 21 bp, Artificial Sequence
  Synthetic
agaagctagagggggagctga

SEQ ID NO: 16443 - DNA, 21 bp, Artificial Sequence
  Synthetic
aagctagagggggagctgaca

SEQ ID NO: 16444 - DNA, 21 bp, Artificial Sequence
  Synthetic
agctagagggggagctgacag

SEQ ID NO: 16445 - DNA, 21 bp, Artificial Sequence
  Synthetic
gagggggagctgacagaggag

SEQ ID NO: 16446 - DNA, 21 bp, Artificial Sequence
  Synthetic
agggggagctgacagaggagg

SEQ ID NO: 16447 - DNA, 21 bp, Artificial Sequence
  Synthetic
agatggccaagcggcgtattg

SEQ ID NO: 16448 - DNA, 21 bp, Artificial Sequence
  Synthetic
cggcgtattgatgaaatcaat

SEQ ID NO: 16449 - DNA, 21 bp, Artificial Sequence
  Synthetic
ggcgtattgatgaaatcaata

SEQ ID NO: 16450 - DNA, 21 bp, Artificial Sequence
  Synthetic
attgatgaaatcaataaggag

SEQ ID NO: 16451 - DNA, 21 bp, Artificial Sequence
  Synthetic
aataaggagctgaaccaggtg

SEQ ID NO: 16452 - DNA, 21 bp, Artificial Sequence
  Synthetic
ataaggagctgaaccaggtga

SEQ ID NO: 16453 - DNA, 21 bp, Artificial Sequence
  Synthetic
tgaaccaggtgatggagcagc

SEQ ID NO: 16454 - DNA, 21 bp, Artificial Sequence
  Synthetic
gaaccaggtgatggagcagct

SEQ ID NO: 16455 - DNA, 21 bp, Artificial Sequence
  Synthetic
aaccaggtgatggagcagcta

SEQ ID NO: 16456 - DNA, 21 bp, Artificial Sequence
  Synthetic
ggggatgcccgcatcgaccgc

SEQ ID NO: 16457 - DNA, 21 bp, Artificial Sequence
  Synthetic
gggatgcccgcatcgaccgcc

SEQ ID NO: 16458 - DNA, 21 bp, Artificial Sequence
  Synthetic
gatgcccgcatcgaccgccag

SEQ ID NO: 16459 - DNA, 21 bp, Artificial Sequence
  Synthetic
gctgctctcctggcggtcgat

SEQ ID NO: 16460 - DNA, 21 bp, Artificial Sequence
  Synthetic
ccaggagagcagccgccagca

SEQ ID NO: 16461 - DNA, 21 bp, Artificial Sequence
  Synthetic
gcagccgccagcagcgaaagg

SEQ ID NO: 16462 - DNA, 21 bp, Artificial Sequence
  Synthetic
cagcagcgaaaggcagagata

SEQ ID NO: 16463 - DNA, 21 bp, Artificial Sequence
  Synthetic
agcagcgaaaggcagagataa

SEQ ID NO: 16464 - DNA, 21 bp, Artificial Sequence
  Synthetic
cctttaccctggctctgtggt

SEQ ID NO: 16465 - DNA, 21 bp, Artificial Sequence
  Synthetic
tctctgctcttaccacagagc

SEQ ID NO: 16466 - DNA, 21 bp, Artificial Sequence
  Synthetic
taggtcaatgaggcggccgta

SEQ ID NO: 16467 - DNA, 21 bp, Artificial Sequence
  Synthetic
tgtgtgggctggcataggtca

SEQ ID NO: 16468 - DNA, 21 bp, Artificial Sequence
  Synthetic
gacctatgccagcccacacaa

SEQ ID NO: 16469 - DNA, 21 bp, Artificial Sequence
  Synthetic
cagattgctgtaaccaaggtt

SEQ ID NO: 16470 - DNA, 21 bp, Artificial Sequence
  Synthetic
aagaacatggatgccattatt

SEQ ID NO: 16471 - DNA, 21 bp, Artificial Sequence
  Synthetic
atggatgccattattgtggac

SEQ ID NO: 16472 - DNA, 21 bp, Artificial Sequence
  Synthetic
tggatgccattattgtggact

SEQ ID NO: 16473 - DNA, 21 bp, Artificial Sequence
  Synthetic
gatgccattattgtggactcg

SEQ ID NO: 16474 - DNA, 21 bp, Artificial Sequence
  Synthetic
tgtggactcggagaagacagg

SEQ ID NO: 16475 - DNA, 21 bp, Artificial Sequence
  Synthetic
gtggactcggagaagacaggc

SEQ ID NO: 16476 - DNA, 21 bp, Artificial Sequence
  Synthetic
tacagtcccggcctgtcttct

SEQ ID NO: 16477 - DNA, 21 bp, Artificial Sequence
  Synthetic
cgggactgtattcagtatatc

SEQ ID NO: 16478 - DNA, 21 bp, Artificial Sequence
  Synthetic
gggactgtattcagtatatca

SEQ ID NO: 16479 - DNA, 21 bp, Artificial Sequence
  Synthetic
cccacgctgctccttgatata

SEQ ID NO: 16480 - DNA, 21 bp, Artificial Sequence
  Synthetic
ttcagtatatcaaggagcagc

SEQ ID NO: 16481 - DNA, 21 bp, Artificial Sequence
  Synthetic
tcagtatatcaaggagcagcg

SEQ ID NO: 16482 - DNA, 21 bp, Artificial Sequence
  Synthetic
cagtatatcaaggagcagcgt

SEQ ID NO: 16483 - DNA, 21 bp, Artificial Sequence
  Synthetic
agtatatcaaggagcagcgtg

SEQ ID NO: 16484 - DNA, 21 bp, Artificial Sequence
  Synthetic
tcaaggagcagcgtggggagc

SEQ ID NO: 16485 - DNA, 21 bp, Artificial Sequence
  Synthetic
accttcttgcctcttgactac

SEQ ID NO: 16486 - DNA, 21 bp, Artificial Sequence
  Synthetic
ccttcttgcctcttgactacc

SEQ ID NO: 16487 - DNA, 21 bp, Artificial Sequence
  Synthetic
acctccaggtagtcaagaggc

SEQ ID NO: 16488 - DNA, 21 bp, Artificial Sequence
  Synthetic
ttgcctcttgactacctggag

SEQ ID NO: 16489 - DNA, 21 bp, Artificial Sequence
  Synthetic
aagcctcacctccaggtagtc

SEQ ID NO: 16490 - DNA, 21 bp, Artificial Sequence
  Synthetic
ccccacaggtgaagcctacag

SEQ ID NO: 16491 - DNA, 21 bp, Artificial Sequence
  Synthetic
tctcatctgtaggcttcacct

SEQ ID NO: 16492 - DNA, 21 bp, Artificial Sequence
  Synthetic
ccacaggtgaagcctacagat

SEQ ID NO: 16493 - DNA, 21 bp, Artificial Sequence
  Synthetic
gaagcctacagatgagaaact

SEQ ID NO: 16494 - DNA, 21 bp, Artificial Sequence
  Synthetic
aagcctacagatgagaaactc

SEQ ID NO: 16495 - DNA, 21 bp, Artificial Sequence
  Synthetic
agcctacagatgagaaactcc

SEQ ID NO: 16496 - DNA, 21 bp, Artificial Sequence
  Synthetic
acagatgagaaactccgggag

SEQ ID NO: 16497 - DNA, 21 bp, Artificial Sequence
  Synthetic
gatgagaaactccgggagctg

SEQ ID NO: 16498 - DNA, 21 bp, Artificial Sequence
  Synthetic
atgagaaactccgggagctga

SEQ ID NO: 16499 - DNA, 21 bp, Artificial Sequence
  Synthetic
tgagaaactccgggagctgaa

SEQ ID NO: 16500 - DNA, 21 bp, Artificial Sequence
  Synthetic
agcttggcccccttcagctcc

SEQ ID NO: 16501 - DNA, 21 bp, Artificial Sequence
  Synthetic
tagcttggcccccttcagctc

SEQ ID NO: 16502 - DNA, 21 bp, Artificial Sequence
  Synthetic
tagtgattgatgtgattcgct

SEQ ID NO: 16503 - DNA, 21 bp, Artificial Sequence
  Synthetic
tttgatatgaggtggctcata

SEQ ID NO: 16504 - DNA, 21 bp, Artificial Sequence
  Synthetic
ggcattgccacaagcatactg

SEQ ID NO: 16505 - DNA, 21 bp, Artificial Sequence
  Synthetic
aatgcccttgtctgtgacaac

SEQ ID NO: 16506 - DNA, 21 bp, Artificial Sequence
  Synthetic
atgcccttgtctgtgacaacg

SEQ ID NO: 16507 - DNA, 21 bp, Artificial Sequence
  Synthetic
atcttccacgttgtcacagac

SEQ ID NO: 16508 - DNA, 21 bp, Artificial Sequence
  Synthetic
aagatgcccgccgcattgcct

SEQ ID NO: 16509 - DNA, 21 bp, Artificial Sequence
  Synthetic
agatgcccgccgcattgcctt

SEQ ID NO: 16510 - DNA, 21 bp, Artificial Sequence
  Synthetic
gtggcctccaaaggcaatgcg

SEQ ID NO: 16511 - DNA, 21 bp, Artificial Sequence
  Synthetic
aggccaccagcgccacaaggt

SEQ ID NO: 16512 - DNA, 21 bp, Artificial Sequence
  Synthetic
tgctgtgtgtagacagtggca

SEQ ID NO: 16513 - DNA, 21 bp, Artificial Sequence
  Synthetic
gtgtgtagacagtggcactgg

SEQ ID NO: 16514 - DNA, 21 bp, Artificial Sequence
  Synthetic
tgtgtagacagtggcactgga

SEQ ID NO: 16515 - DNA, 21 bp, Artificial Sequence
  Synthetic
gcactggatggaaccctattc

SEQ ID NO: 16516 - DNA, 21 bp, Artificial Sequence
  Synthetic
atggaaccctattccagaagt

SEQ ID NO: 16517 - DNA, 21 bp, Artificial Sequence
  Synthetic
tggaaccctattccagaagtc

SEQ ID NO: 16518 - DNA, 21 bp, Artificial Sequence
  Synthetic
gatcactcctgacttctggaa

SEQ ID NO: 16519 - DNA, 21 bp, Artificial Sequence
  Synthetic
ccagagatcactcctgacttc

SEQ ID NO: 16520 - DNA, 21 bp, Artificial Sequence
  Synthetic
accagagatcactcctgactt

SEQ ID NO: 16521 - DNA, 21 bp, Artificial Sequence
  Synthetic
agaagtcaggagtgatctctg

SEQ ID NO: 16522 - DNA, 21 bp, Artificial Sequence
  Synthetic
gaagtcaggagtgatctctgg

SEQ ID NO: 16523 - DNA, 21 bp, Artificial Sequence
  Synthetic
atctctggtggggccagtgac

SEQ ID NO: 16524 - DNA, 21 bp, Artificial Sequence
  Synthetic
ccttcaggtcactggccccac

SEQ ID NO: 16525 - DNA, 21 bp, Artificial Sequence
  Synthetic
cctgaaggccaaggcacggcg

SEQ ID NO: 16526 - DNA, 21 bp, Artificial Sequence
  Synthetic
ctgaaggccaaggcacggcgc

SEQ ID NO: 16527 - DNA, 21 bp, Artificial Sequence
  Synthetic
aggccaaggcacggcgctggg

SEQ ID NO: 16528 - DNA, 21 bp, Artificial Sequence
  Synthetic
gccaaggcacggcgctgggat

SEQ ID NO: 16529 - DNA, 21 bp, Artificial Sequence
  Synthetic
gatgagaaagcagtagacaag

SEQ ID NO: 16530 - DNA, 21 bp, Artificial Sequence
  Synthetic
agaaagcagtagacaagttga

SEQ ID NO: 16531 - DNA, 21 bp, Artificial Sequence
  Synthetic
aaagcagtagacaagttgaaa

SEQ ID NO: 16532 - DNA, 21 bp, Artificial Sequence
  Synthetic
gcagtagacaagttgaaagag

SEQ ID NO: 16533 - DNA, 21 bp, Artificial Sequence
  Synthetic
gtagacaagttgaaagagaag

SEQ ID NO: 16534 - DNA, 21 bp, Artificial Sequence
  Synthetic
tagacaagttgaaagagaaga

SEQ ID NO: 16535 - DNA, 21 bp, Artificial Sequence
  Synthetic
aagagaagaaggagcgcttga

SEQ ID NO: 16536 - DNA, 21 bp, Artificial Sequence
  Synthetic
gagaagaaggagcgcttgaca

SEQ ID NO: 16537 - DNA, 21 bp, Artificial Sequence
  Synthetic
agaagaaggagcgcttgacag

SEQ ID NO: 16538 - DNA, 21 bp, Artificial Sequence
  Synthetic
aaggagcgcttgacagaggag

SEQ ID NO: 16539 - DNA, 21 bp, Artificial Sequence
  Synthetic
tcttgttcccttcaggagcag

SEQ ID NO: 16540 - DNA, 21 bp, Artificial Sequence
  Synthetic
tcaggagcagatgaaggcaaa

SEQ ID NO: 16541 - DNA, 21 bp, Artificial Sequence
  Synthetic
caggagcagatgaaggcaaaa

SEQ ID NO: 16542 - DNA, 21 bp, Artificial Sequence
  Synthetic
agcagatgaaggcaaaacgga

SEQ ID NO: 16543 - DNA, 21 bp, Artificial Sequence
  Synthetic
tgaaggcaaaacggaaagagg

SEQ ID NO: 16544 - DNA, 21 bp, Artificial Sequence
  Synthetic
gtcaggtgcagtctcaggccc

SEQ ID NO: 16545 - DNA, 21 bp, Artificial Sequence
  Synthetic
ccgcatctgcagtccatgggc

SEQ ID NO: 16546 - DNA, 21 bp, Artificial Sequence
  Synthetic
cttgagccgcatctgcagtcc

SEQ ID NO: 16547 - DNA, 21 bp, Artificial Sequence
  Synthetic
cagatgcggctcaagtactcc

SEQ ID NO: 16548 - DNA, 21 bp, Artificial Sequence
  Synthetic
tctaggtcactctgggagtac

SEQ ID NO: 16549 - DNA, 21 bp, Artificial Sequence
  Synthetic
tcaagtactcccagagtgacc

SEQ ID NO: 16550 - DNA, 21 bp, Artificial Sequence
  Synthetic
tggtctgttctaggtcactct

SEQ ID NO: 16551 - DNA, 21 bp, Artificial Sequence
  Synthetic
ttggtctgttctaggtcactc

SEQ ID NO: 16552 - DNA, 21 bp, Artificial Sequence
  Synthetic
cttggtctgttctaggtcact

SEQ ID NO: 16553 - DNA, 21 bp, Artificial Sequence
  Synthetic
accaagacacgacatctagcc

SEQ ID NO: 16554 - DNA, 21 bp, Artificial Sequence
  Synthetic
catctagccctgaatctgcag

SEQ ID NO: 16555 - DNA, 21 bp, Artificial Sequence
  Synthetic
atctagccctgaatctgcagg

SEQ ID NO: 16556 - DNA, 21 bp, Artificial Sequence
  Synthetic
gccaggccccacctgcagatt

SEQ ID NO: 16557 - DNA, 21 bp, Artificial Sequence
  Synthetic
tgcctgtaggaaaaatccaag

SEQ ID NO: 16558 - DNA, 21 bp, Artificial Sequence
  Synthetic
gcctgtaggaaaaatccaagc

SEQ ID NO: 16559 - DNA, 21 bp, Artificial Sequence
  Synthetic
ctgtaggaaaaatccaagctg

SEQ ID NO: 16560 - DNA, 21 bp, Artificial Sequence
  Synthetic
aggaaaaatccaagctggaga

SEQ ID NO: 16561 - DNA, 21 bp, Artificial Sequence
  Synthetic
ttggctagctcactctccagc

SEQ ID NO: 16562 - DNA, 21 bp, Artificial Sequence
  Synthetic
tggagagtgagctagccaact

SEQ ID NO: 16563 - DNA, 21 bp, Artificial Sequence
  Synthetic
gggcctcgcattaatgatatc

SEQ ID NO: 16564 - DNA, 21 bp, Artificial Sequence
  Synthetic
gcctcgcattaatgatatcaa

SEQ ID NO: 16565 - DNA, 21 bp, Artificial Sequence
  Synthetic
gatcctcttgatatcattaat

SEQ ID NO: 16566 - DNA, 21 bp, Artificial Sequence
  Synthetic
aatgatatcaagaggatcatt

SEQ ID NO: 16567 - DNA, 21 bp, Artificial Sequence
  Synthetic
tatcaagaggatcattcagag

SEQ ID NO: 16568 - DNA, 21 bp, Artificial Sequence
  Synthetic
tcaagaggatcattcagagcc

SEQ ID NO: 16569 - DNA, 21 bp, Artificial Sequence
  Synthetic
aagaggatcattcagagccga

SEQ ID NO: 16570 - DNA, 21 bp, Artificial Sequence
  Synthetic
gaggatcattcagagccgaga

SEQ ID NO: 16571 - DNA, 21 bp, Artificial Sequence
  Synthetic
aggatcattcagagccgagag

SEQ ID NO: 16572 - DNA, 21 bp, Artificial Sequence
  Synthetic
ggatcattcagagccgagaga

SEQ ID NO: 16573 - DNA, 21 bp, Artificial Sequence
  Synthetic
attcagagccgagagagggaa

SEQ ID NO: 16574 - DNA, 21 bp, Artificial Sequence
  Synthetic
tttcatttccctctctcggct

SEQ ID NO: 16575 - DNA, 21 bp, Artificial Sequence
  Synthetic
cgagagagggaaatgaaagac

SEQ ID NO: 16576 - DNA, 21 bp, Artificial Sequence
  Synthetic
gagagggaaatgaaagacttg

SEQ ID NO: 16577 - DNA, 21 bp, Artificial Sequence
  Synthetic
agagggaaatgaaagacttga

SEQ ID NO: 16578 - DNA, 21 bp, Artificial Sequence
  Synthetic
agggaaatgaaagacttgaag

SEQ ID NO: 16579 - DNA, 21 bp, Artificial Sequence
  Synthetic
atgaaagacttgaaggagaag

SEQ ID NO: 16580 - DNA, 21 bp, Artificial Sequence
  Synthetic
gcttctcttctcaggtagagg

SEQ ID NO: 16581 - DNA, 21 bp, Artificial Sequence
  Synthetic
caaacacctcatcctctacct

SEQ ID NO: 16582 - DNA, 21 bp, Artificial Sequence
  Synthetic
ttcaaacacctcatcctctac

SEQ ID NO: 16583 - DNA, 21 bp, Artificial Sequence
  Synthetic
ctcaggtagaggatgaggtgt

SEQ ID NO: 16584 - DNA, 21 bp, Artificial Sequence
  Synthetic
aggtagaggatgaggtgtttg

SEQ ID NO: 16585 - DNA, 21 bp, Artificial Sequence
  Synthetic
ggagattggtgtgcgcaacat

SEQ ID NO: 16586 - DNA, 21 bp, Artificial Sequence
  Synthetic
gagattggtgtgcgcaacatc

SEQ ID NO: 16587 - DNA, 21 bp, Artificial Sequence
  Synthetic
agattggtgtgcgcaacatcc

SEQ ID NO: 16588 - DNA, 21 bp, Artificial Sequence
  Synthetic
gtgtgcgcaacatccgggagt

SEQ ID NO: 16589 - DNA, 21 bp, Artificial Sequence
  Synthetic
gtgcgcaacatccgggagttt

SEQ ID NO: 16590 - DNA, 21 bp, Artificial Sequence
  Synthetic
tgcgcaacatccgggagtttg

SEQ ID NO: 16591 - DNA, 21 bp, Artificial Sequence
  Synthetic
gcaacatccgggagtttgagg

SEQ ID NO: 16592 - DNA, 21 bp, Artificial Sequence
  Synthetic
cgggagtttgaggaagaaaag

SEQ ID NO: 16593 - DNA, 21 bp, Artificial Sequence
  Synthetic
gaggaagaaaaggtgaaacgg

SEQ ID NO: 16594 - DNA, 21 bp, Artificial Sequence
  Synthetic
aagaaaaggtgaaacggcaga

SEQ ID NO: 16595 - DNA, 21 bp, Artificial Sequence
  Synthetic
aaacggcagaatgaaatcgcc

SEQ ID NO: 16596 - DNA, 21 bp, Artificial Sequence
  Synthetic
cctttatacacagtttggagt

SEQ ID NO: 16597 - DNA, 21 bp, Artificial Sequence
  Synthetic
tttatacacagtttggagttt

SEQ ID NO: 16598 - DNA, 21 bp, Artificial Sequence
  Synthetic
cacagtttggagtttgagaat

SEQ ID NO: 16599 - DNA, 21 bp, Artificial Sequence
  Synthetic
tttgagaatcagaagactcgc

SEQ ID NO: 16600 - DNA, 21 bp, Artificial Sequence
  Synthetic
aagactcgcttgggcattcag

SEQ ID NO: 16601 - DNA, 21 bp, Artificial Sequence
  Synthetic
aaaatccaactgaatgcccaa

SEQ ID NO: 16602 - DNA, 21 bp, Artificial Sequence
  Synthetic
gcttgggcattcagttggatt

SEQ ID NO: 16603 - DNA, 21 bp, Artificial Sequence
  Synthetic
tttgaaaagaaccaactgaag

SEQ ID NO: 16604 - DNA, 21 bp, Artificial Sequence
  Synthetic
ggaccaagataaagtacacat

SEQ ID NO: 16605 - DNA, 21 bp, Artificial Sequence
  Synthetic
gaccaagataaagtacacatg

SEQ ID NO: 16606 - DNA, 21 bp, Artificial Sequence
  Synthetic
accaagataaagtacacatgt

SEQ ID NO: 16607 - DNA, 21 bp, Artificial Sequence
  Synthetic
gtacacatgtgggagcagaca

SEQ ID NO: 16608 - DNA, 21 bp, Artificial Sequence
  Synthetic
gggagcagacagtgaaaaaag

SEQ ID NO: 16609 - DNA, 21 bp, Artificial Sequence
  Synthetic
agacagtgaaaaaagatgaaa

SEQ ID NO: 16610 - DNA, 21 bp, Artificial Sequence
  Synthetic
tgaaaaaagatgaaaatgaga

SEQ ID NO: 16611 - DNA, 21 bp, Artificial Sequence
  Synthetic
gatagaaaagctcaaaaaggt

SEQ ID NO: 16612 - DNA, 21 bp, Artificial Sequence
  Synthetic
attctttccttccttaccttt

SEQ ID NO: 16613 - DNA, 21 bp, Artificial Sequence
  Synthetic
gaccaggaggaacaaagacac

SEQ ID NO: 16614 - DNA, 21 bp, Artificial Sequence
  Synthetic
aaagacacatgaagatcatag

SEQ ID NO: 16615 - DNA, 21 bp, Artificial Sequence
  Synthetic
accatggctcagctacaagac

SEQ ID NO: 16616 - DNA, 21 bp, Artificial Sequence
  Synthetic
atggctcagctacaagacctg

SEQ ID NO: 16617 - DNA, 21 bp, Artificial Sequence
  Synthetic
ctgattcttcaggtcttgtag

SEQ ID NO: 16618 - DNA, 21 bp, Artificial Sequence
  Synthetic
ctgaagaatcagcatctggcc

SEQ ID NO: 16619 - DNA, 21 bp, Artificial Sequence
  Synthetic
aatcagcatctggccaagaag

SEQ ID NO: 16620 - DNA, 21 bp, Artificial Sequence
  Synthetic
atcagcatctggccaagaagt

SEQ ID NO: 16621 - DNA, 21 bp, Artificial Sequence
  Synthetic
catctggccaagaagtcggaa

SEQ ID NO: 16622 - DNA, 21 bp, Artificial Sequence
  Synthetic
aagaagtcggaagtgaatgac

SEQ ID NO: 16623 - DNA, 21 bp, Artificial Sequence
  Synthetic
cggaagtgaatgacaagaatc

SEQ ID NO: 16624 - DNA, 21 bp, Artificial Sequence
  Synthetic
gtgaatgacaagaatcatgag

SEQ ID NO: 16625 - DNA, 21 bp, Artificial Sequence
  Synthetic
tgaatgacaagaatcatgaga

SEQ ID NO: 16626 - DNA, 21 bp, Artificial Sequence
  Synthetic
aatgacaagaatcatgagatg

SEQ ID NO: 16627 - DNA, 21 bp, Artificial Sequence
  Synthetic
atgacaagaatcatgagatgg

SEQ ID NO: 16628 - DNA, 21 bp, Artificial Sequence
  Synthetic
catgagatggaggagattcgt

SEQ ID NO: 16629 - DNA, 21 bp, Artificial Sequence
  Synthetic
tggaggagattcgtaagaaac

SEQ ID NO: 16630 - DNA, 21 bp, Artificial Sequence
  Synthetic
ggaggagattcgtaagaaact

SEQ ID NO: 16631 - DNA, 21 bp, Artificial Sequence
  Synthetic
gaggagattcgtaagaaactc

SEQ ID NO: 16632 - DNA, 21 bp, Artificial Sequence
  Synthetic
gttggcgcccccgagtttctt

SEQ ID NO: 16633 - DNA, 21 bp, Artificial Sequence
  Synthetic
gaaactcgggggcgccaacaa

SEQ ID NO: 16634 - DNA, 21 bp, Artificial Sequence
  Synthetic
cccactcacttgttggcgccc

SEQ ID NO: 16635 - DNA, 21 bp, Artificial Sequence
  Synthetic
tttagggaaatgacccattta

SEQ ID NO: 16636 - DNA, 21 bp, Artificial Sequence
  Synthetic
agggaaatgacccatttacag

SEQ ID NO: 16637 - DNA, 21 bp, Artificial Sequence
  Synthetic
gggaaatgacccatttacaga

SEQ ID NO: 16638 - DNA, 21 bp, Artificial Sequence
  Synthetic
ggctgtcacctccttctgtaa

SEQ ID NO: 16639 - DNA, 21 bp, Artificial Sequence
  Synthetic
tacagaaggaggtgacagcca

SEQ ID NO: 16640 - DNA, 21 bp, Artificial Sequence
  Synthetic
tgacagccattgagaccaagc

SEQ ID NO: 16641 - DNA, 21 bp, Artificial Sequence
  Synthetic
gccattgagaccaagcttgaa

SEQ ID NO: 16642 - DNA, 21 bp, Artificial Sequence
  Synthetic
ttgctacaggcctgtaagatg

SEQ ID NO: 16643 - DNA, 21 bp, Artificial Sequence
  Synthetic
ttgccactgtcaaaaggcacc

SEQ ID NO: 16644 - DNA, 21 bp, Artificial Sequence
  Synthetic
ggcaccatggatgatattagt

SEQ ID NO: 16645 - DNA, 21 bp, Artificial Sequence
  Synthetic
gcaccatggatgatattagtc

SEQ ID NO: 16646 - DNA, 21 bp, Artificial Sequence
  Synthetic
ccatggatgatattagtcagg

SEQ ID NO: 16647 - DNA, 21 bp, Artificial Sequence
  Synthetic
gatgatattagtcaggaagag

SEQ ID NO: 16648 - DNA, 21 bp, Artificial Sequence
  Synthetic
ttgccattgcagggtagctcc

SEQ ID NO: 16649 - DNA, 21 bp, Artificial Sequence
  Synthetic
tgccattgcagggtagctccc

SEQ ID NO: 16650 - DNA, 21 bp, Artificial Sequence
  Synthetic
gccattgcagggtagctccca

SEQ ID NO: 16651 - DNA, 21 bp, Artificial Sequence
  Synthetic
ccattgcagggtagctcccag

SEQ ID NO: 16652 - DNA, 21 bp, Artificial Sequence
  Synthetic
cattgcagggtagctcccagg

SEQ ID NO: 16653 - DNA, 21 bp, Artificial Sequence
  Synthetic
ttgcagggtagctcccagggg

SEQ ID NO: 16654 - DNA, 21 bp, Artificial Sequence
  Synthetic
agctcccagggggaggactca

SEQ ID NO: 16655 - DNA, 21 bp, Artificial Sequence
  Synthetic
cactcactgagtcctccccct

SEQ ID NO: 16656 - DNA, 21 bp, Artificial Sequence
  Synthetic
ccactcactgagtcctccccc

SEQ ID NO: 16657 - DNA, 21 bp, Artificial Sequence
  Synthetic
accactcactgagtcctcccc

SEQ ID NO: 16658 - DNA, 21 bp, Artificial Sequence
  Synthetic
gaggactcagtgagtggttca

SEQ ID NO: 16659 - DNA, 21 bp, Artificial Sequence
  Synthetic
ggactcagtgagtggttcaca

SEQ ID NO: 16660 - DNA, 21 bp, Artificial Sequence
  Synthetic
aaattctctgtgaaccactca

SEQ ID NO: 16661 - DNA, 21 bp, Artificial Sequence
  Synthetic
catagatactggaaattctct

SEQ ID NO: 16662 - DNA, 21 bp, Artificial Sequence
  Synthetic
gagaatttccagtatctatgc

SEQ ID NO: 16663 - DNA, 21 bp, Artificial Sequence
  Synthetic
gaatttccagtatctatgcac

SEQ ID NO: 16664 - DNA, 21 bp, Artificial Sequence
  Synthetic
gggcctctcgtgcatagatac

SEQ ID NO: 16665 - DNA, 21 bp, Artificial Sequence
  Synthetic
agggcctctcgtgcatagata

SEQ ID NO: 16666 - DNA, 21 bp, Artificial Sequence
  Synthetic
tctatgcacgagaggccctca

SEQ ID NO: 16667 - DNA, 21 bp, Artificial Sequence
  Synthetic
atcaccgtagtcaatctcaat

SEQ ID NO: 16668 - DNA, 21 bp, Artificial Sequence
  Synthetic
agatcaccgtagtcaatctca

SEQ ID NO: 16669 - DNA, 21 bp, Artificial Sequence
  Synthetic
agattgactacggtgatctgt

SEQ ID NO: 16670 - DNA, 21 bp, Artificial Sequence
  Synthetic
attgactacggtgatctgtgt

SEQ ID NO: 16671 - DNA, 21 bp, Artificial Sequence
  Synthetic
tacggtgatctgtgtgaggat

SEQ ID NO: 16672 - DNA, 21 bp, Artificial Sequence
  Synthetic
gatctgtgtgaggatctgaag

SEQ ID NO: 16673 - DNA, 21 bp, Artificial Sequence
  Synthetic
tctgtgtgaggatctgaaggt

SEQ ID NO: 16674 - DNA, 21 bp, Artificial Sequence
  Synthetic
ggggcttacaggatgcccagg

SEQ ID NO: 16675 - DNA, 21 bp, Artificial Sequence
  Synthetic
ggcttacaggatgcccaggct

SEQ ID NO: 16676 - DNA, 21 bp, Artificial Sequence
  Synthetic
gcttacaggatgcccaggctg

SEQ ID NO: 16677 - DNA, 21 bp, Artificial Sequence
  Synthetic
tacaggatgcccaggctgagg

SEQ ID NO: 16678 - DNA, 21 bp, Artificial Sequence
  Synthetic
ttgcttgatctcttcctcagc

SEQ ID NO: 16679 - DNA, 21 bp, Artificial Sequence
  Synthetic
aggctgaggaagagatcaagc

SEQ ID NO: 16680 - DNA, 21 bp, Artificial Sequence
  Synthetic
gaggaagagatcaagcaagag

SEQ ID NO: 16681 - DNA, 21 bp, Artificial Sequence
  Synthetic
caagagatgaacacactgcag

SEQ ID NO: 16682 - DNA, 21 bp, Artificial Sequence
  Synthetic
atgaacacactgcagcagaag

SEQ ID NO: 16683 - DNA, 21 bp, Artificial Sequence
  Synthetic
acacactgcagcagaagctga

SEQ ID NO: 16684 - DNA, 21 bp, Artificial Sequence
  Synthetic
cagcagaagctgaatgagcag

SEQ ID NO: 16685 - DNA, 21 bp, Artificial Sequence
  Synthetic
catgttgggggcggcaatacg

SEQ ID NO: 16686 - DNA, 21 bp, Artificial Sequence
  Synthetic
cagcgtattgccgcccccaac

SEQ ID NO: 16687 - DNA, 21 bp, Artificial Sequence
  Synthetic
gccgcccccaacatgaaggcc

SEQ ID NO: 16688 - DNA, 21 bp, Artificial Sequence
  Synthetic
ccgcccccaacatgaaggcca

SEQ ID NO: 16689 - DNA, 21 bp, Artificial Sequence
  Synthetic
aacatgaaggccatggaaaag

SEQ ID NO: 16690 - DNA, 21 bp, Artificial Sequence
  Synthetic
acatgaaggccatggaaaagc

SEQ ID NO: 16691 - DNA, 21 bp, Artificial Sequence
  Synthetic
catggaaaagctggaaagtgt

SEQ ID NO: 16692 - DNA, 21 bp, Artificial Sequence
  Synthetic
gaaagtgtccgagacaagttc

SEQ ID NO: 16693 - DNA, 21 bp, Artificial Sequence
  Synthetic
aaagtgtccgagacaagttcc

SEQ ID NO: 16694 - DNA, 21 bp, Artificial Sequence
  Synthetic
tgaggtctcctggaacttgtc

SEQ ID NO: 16695 - DNA, 21 bp, Artificial Sequence
  Synthetic
atcttaccatctgaggtctcc

SEQ ID NO: 16696 - DNA, 21 bp, Artificial Sequence
  Synthetic
aatcttaccatctgaggtctc

SEQ ID NO: 16697 - DNA, 21 bp, Artificial Sequence
  Synthetic
tagaagggtaaatcttaccat

SEQ ID NO: 16698 - DNA, 21 bp, Artificial Sequence
  Synthetic
tctggcagagtttgaagcagc

SEQ ID NO: 16699 - DNA, 21 bp, Artificial Sequence
  Synthetic
agagtttgaagcagcccgaaa

SEQ ID NO: 16700 - DNA, 21 bp, Artificial Sequence
  Synthetic
gaagcagcccgaaagcgagca

SEQ ID NO: 16701 - DNA, 21 bp, Artificial Sequence
  Synthetic
cttggccttctttgctcgctt

SEQ ID NO: 16702 - DNA, 21 bp, Artificial Sequence
  Synthetic
caaagaaggccaagcaggcat

SEQ ID NO: 16703 - DNA, 21 bp, Artificial Sequence
  Synthetic
aagcaggcattcgaacagatc

SEQ ID NO: 16704 - DNA, 21 bp, Artificial Sequence
  Synthetic
caggcattcgaacagatcaag

SEQ ID NO: 16705 - DNA, 21 bp, Artificial Sequence
  Synthetic
aggcattcgaacagatcaaga

SEQ ID NO: 16706 - DNA, 21 bp, Artificial Sequence
  Synthetic
aagcgctccttcttgatctgt

SEQ ID NO: 16707 - DNA, 21 bp, Artificial Sequence
  Synthetic
ttgaccgcttcaatgcttgtt

SEQ ID NO: 16708 - DNA, 21 bp, Artificial Sequence
  Synthetic
gccacagattcaaaacaagca

SEQ ID NO: 16709 - DNA, 21 bp, Artificial Sequence
  Synthetic
aatctgtggctaccaacattg

SEQ ID NO: 16710 - DNA, 21 bp, Artificial Sequence
  Synthetic
ctgggcactgctattgcggga

SEQ ID NO: 16711 - DNA, 21 bp, Artificial Sequence
  Synthetic
cctacctgggcactgctattg

SEQ ID NO: 16712 - DNA, 21 bp, Artificial Sequence
  Synthetic
gcctacctgggcactgctatt

SEQ ID NO: 16713 - DNA, 21 bp, Artificial Sequence
  Synthetic
tctgccttcccctaggcattc

SEQ ID NO: 16714 - DNA, 21 bp, Artificial Sequence
  Synthetic
tcccctaggcattcctgggcc

SEQ ID NO: 16715 - DNA, 21 bp, Artificial Sequence
  Synthetic
tctcagggcccaggaatgcct

SEQ ID NO: 16716 - DNA, 21 bp, Artificial Sequence
  Synthetic
ttctcagggcccaggaatgcc

SEQ ID NO: 16717 - DNA, 21 bp, Artificial Sequence
  Synthetic
ccctaggcattcctgggccct

SEQ ID NO: 16718 - DNA, 21 bp, Artificial Sequence
  Synthetic
cattcctgggccctgagaacc

SEQ ID NO: 16719 - DNA, 21 bp, Artificial Sequence
  Synthetic
tcttcagggttctcagggccc

SEQ ID NO: 16720 - DNA, 21 bp, Artificial Sequence
  Synthetic
ctcttcagggttctcagggcc

SEQ ID NO: 16721 - DNA, 21 bp, Artificial Sequence
  Synthetic
tcctgggccctgagaaccctg

SEQ ID NO: 16722 - DNA, 21 bp, Artificial Sequence
  Synthetic
agtagggctcttcagggttct

SEQ ID NO: 16723 - DNA, 21 bp, Artificial Sequence
  Synthetic
gagaaccctgaagagccctac

SEQ ID NO: 16724 - DNA, 21 bp, Artificial Sequence
  Synthetic
tgccatccaagtagggctctt

SEQ ID NO: 16725 - DNA, 21 bp, Artificial Sequence
  Synthetic
ttgtagttgatgccatccaag

SEQ ID NO: 16726 - DNA, 21 bp, Artificial Sequence
  Synthetic
tcaactacaactgtgtggctc

SEQ ID NO: 16727 - DNA, 21 bp, Artificial Sequence
  Synthetic
caactacaactgtgtggctcc

SEQ ID NO: 16728 - DNA, 21 bp, Artificial Sequence
  Synthetic
aactacaactgtgtggctcct

SEQ ID NO: 16729 - DNA, 21 bp, Artificial Sequence
  Synthetic
cataggccggaagcgtttccc

SEQ ID NO: 16730 - DNA, 21 bp, Artificial Sequence
  Synthetic
ccataggccggaagcgtttcc

SEQ ID NO: 16731 - DNA, 21 bp, Artificial Sequence
  Synthetic
cctgggaaacgcttccggcct

SEQ ID NO: 16732 - DNA, 21 bp, Artificial Sequence
  Synthetic
cctgacaagttgtccataggc

SEQ ID NO: 16733 - DNA, 21 bp, Artificial Sequence
  Synthetic
gcctgacaagttgtccatagg

SEQ ID NO: 16734 - DNA, 21 bp, Artificial Sequence
  Synthetic
ggcctatggacaacttgtcag

SEQ ID NO: 16735 - DNA, 21 bp, Artificial Sequence
  Synthetic
gcctatggacaacttgtcagg

SEQ ID NO: 16736 - DNA, 21 bp, Artificial Sequence
  Synthetic
cctatggacaacttgtcaggc

SEQ ID NO: 16737 - DNA, 21 bp, Artificial Sequence
  Synthetic
ctatggacaacttgtcaggcg

SEQ ID NO: 16738 - DNA, 21 bp, Artificial Sequence
  Synthetic
atggacaacttgtcaggcggg

SEQ ID NO: 16739 - DNA, 21 bp, Artificial Sequence
  Synthetic
gtggatggcaaagagcagggc

SEQ ID NO: 16740 - DNA, 21 bp, Artificial Sequence
  Synthetic
ttacctgtggatggcaaagag

SEQ ID NO: 16741 - DNA, 21 bp, Artificial Sequence
  Synthetic
cagccttacctgtggatggca

SEQ ID NO: 16742 - DNA, 21 bp, Artificial Sequence
  Synthetic
gaagggggctggcttgtagct

SEQ ID NO: 16743 - DNA, 21 bp, Artificial Sequence
  Synthetic
agaagggggctggcttgtagc

SEQ ID NO: 16744 - DNA, 21 bp, Artificial Sequence
  Synthetic
aagaagggggctggcttgtag

SEQ ID NO: 16745 - DNA, 21 bp, Artificial Sequence
  Synthetic
aagccagcccccttcttcgtc

SEQ ID NO: 16746 - DNA, 21 bp, Artificial Sequence
  Synthetic
cagcccccttcttcgtcctgg

SEQ ID NO: 16747 - DNA, 21 bp, Artificial Sequence
  Synthetic
aatctcatccaggacgaagaa

SEQ ID NO: 16748 - DNA, 21 bp, Artificial Sequence
  Synthetic
caatctcatccaggacgaaga

SEQ ID NO: 16749 - DNA, 21 bp, Artificial Sequence
  Synthetic
tcaatctcatccaggacgaag

SEQ ID NO: 16750 - DNA, 21 bp, Artificial Sequence
  Synthetic
gcatcaatctcatccaggacg

SEQ ID NO: 16751 - DNA, 21 bp, Artificial Sequence
  Synthetic
gcagcatcaatctcatccagg

SEQ ID NO: 16752 - DNA, 21 bp, Artificial Sequence
  Synthetic
caaggcagcatcaatctcatc

SEQ ID NO: 16753 - DNA, 21 bp, Artificial Sequence
  Synthetic
ctggatgagattgatgctgcc

SEQ ID NO: 16754 - DNA, 21 bp, Artificial Sequence
  Synthetic
gataacaccaacattggcaag

SEQ ID NO: 16755 - DNA, 21 bp, Artificial Sequence
  Synthetic
ccttgatgtaatttgccacct

SEQ ID NO: 16756 - DNA, 21 bp, Artificial Sequence
  Synthetic
ccacaggtggcaaattacatc

SEQ ID NO: 16757 - DNA, 21 bp, Artificial Sequence
  Synthetic
cacaggtggcaaattacatca

SEQ ID NO: 16758 - DNA, 21 bp, Artificial Sequence
  Synthetic
ttgagagagatgacgatggcc

SEQ ID NO: 16759 - DNA, 21 bp, Artificial Sequence
  Synthetic
cttgagagagatgacgatggc

SEQ ID NO: 16760 - DNA, 21 bp, Artificial Sequence
  Synthetic
caggccatcgtcatctctctc

SEQ ID NO: 16761 - DNA, 21 bp, Artificial Sequence
  Synthetic
aggccatcgtcatctctctca

SEQ ID NO: 16762 - DNA, 21 bp, Artificial Sequence
  Synthetic
gccatcgtcatctctctcaag

SEQ ID NO: 16763 - DNA, 21 bp, Artificial Sequence
  Synthetic
ccatcgtcatctctctcaagg

SEQ ID NO: 16764 - DNA, 21 bp, Artificial Sequence
  Synthetic
tggtgtagaactcctccttga

SEQ ID NO: 16765 - DNA, 21 bp, Artificial Sequence
  Synthetic
cttggtgtagaactcctcctt

SEQ ID NO: 16766 - DNA, 21 bp, Artificial Sequence
  Synthetic
gccttggtgtagaactcctcc

SEQ ID NO: 16767 - DNA, 21 bp, Artificial Sequence
  Synthetic
aggaggagttctacaccaagg

SEQ ID NO: 16768 - DNA, 21 bp, Artificial Sequence
  Synthetic
gaggagttctacaccaaggcc

SEQ ID NO: 16769 - DNA, 21 bp, Artificial Sequence
  Synthetic
atgaggctctcggccttggtg

SEQ ID NO: 16770 - DNA, 21 bp, Artificial Sequence
  Synthetic
acaccaaggccgagagcctca

SEQ ID NO: 16771 - DNA, 21 bp, Artificial Sequence
  Synthetic
caccaaggccgagagcctcat

SEQ ID NO: 16772 - DNA, 21 bp, Artificial Sequence
  Synthetic
agagcctcattggagtctatc

SEQ ID NO: 16773 - DNA, 21 bp, Artificial Sequence
  Synthetic
cctacctcaggatagactcca

SEQ ID NO: 16774 - DNA, 21 bp, Artificial Sequence
  Synthetic
tcattggagtctatcctgagg

SEQ ID NO: 16775 - DNA, 21 bp, Artificial Sequence
  Synthetic
gctgatcacacagtccccttg

SEQ ID NO: 16776 - DNA, 21 bp, Artificial Sequence
  Synthetic
aggctggcggcaaatgcaata

SEQ ID NO: 16777 - DNA, 21 bp, Artificial Sequence
  Synthetic
ccgccagcctcacaacaacag

SEQ ID NO: 16778 - DNA, 21 bp, Artificial Sequence
  Synthetic
acacatgacccacctgttgtt

SEQ ID NO: 16779 - DNA, 21 bp, Artificial Sequence
  Synthetic
cggtcacagcaaatcataaac

SEQ ID NO: 16780 - DNA, 21 bp, Artificial Sequence
  Synthetic
ttatgatttgctgtgaccgct

SEQ ID NO: 16781 - DNA, 21 bp, Artificial Sequence
  Synthetic
tgatttgctgtgaccgctgtg

SEQ ID NO: 16782 - DNA, 21 bp, Artificial Sequence
  Synthetic
gaatggtttcatggcgattgt

SEQ ID NO: 16783 - DNA, 21 bp, Artificial Sequence
  Synthetic
agaaatgcccacacaatcgcc

SEQ ID NO: 16784 - DNA, 21 bp, Artificial Sequence
  Synthetic
atggcgattgtgtgggcattt

SEQ ID NO: 16785 - DNA, 21 bp, Artificial Sequence
  Synthetic
ttgtgtgggcatttctgaggc

SEQ ID NO: 16786 - DNA, 21 bp, Artificial Sequence
  Synthetic
gtgtgggcatttctgaggctc

SEQ ID NO: 16787 - DNA, 21 bp, Artificial Sequence
  Synthetic
tgtgggcatttctgaggctcg

SEQ ID NO: 16788 - DNA, 21 bp, Artificial Sequence
  Synthetic
gtgggcatttctgaggctcga

SEQ ID NO: 16789 - DNA, 21 bp, Artificial Sequence
  Synthetic
ccaaaagcctccctcgagcct

SEQ ID NO: 16790 - DNA, 21 bp, Artificial Sequence
  Synthetic
tctgaggctcgagggaggctt

SEQ ID NO: 16791 - DNA, 21 bp, Artificial Sequence
  Synthetic
ctgaggctcgagggaggcttt

SEQ ID NO: 16792 - DNA, 21 bp, Artificial Sequence
  Synthetic
attcctttccaaaagcctccc

SEQ ID NO: 16793 - DNA, 21 bp, Artificial Sequence
  Synthetic
gcacttgcagaatggtgcagt

SEQ ID NO: 16794 - DNA, 21 bp, Artificial Sequence
  Synthetic
gagcctttaccacgtctagaa

SEQ ID NO: 16795 - DNA, 21 bp, Artificial Sequence
  Synthetic
cttgtgagcctttaccacgtc

SEQ ID NO: 16796 - DNA, 21 bp, Artificial Sequence
  Synthetic
ctagacgtggtaaaggctcac

SEQ ID NO: 16797 - DNA, 21 bp, Artificial Sequence
  Synthetic
caagaagggccaggaatcctt

SEQ ID NO: 16798 - DNA, 21 bp, Artificial Sequence
  Synthetic
cacaaggattcctggcccttc

SEQ ID NO: 16799 - DNA, 21 bp, Artificial Sequence
  Synthetic
acaaggattcctggcccttct

SEQ ID NO: 16800 - DNA, 21 bp, Artificial Sequence
  Synthetic
ccacaggttccaagaagggcc

SEQ ID NO: 16801 - DNA, 21 bp, Artificial Sequence
  Synthetic
tccacaggttccaagaagggc

SEQ ID NO: 16802 - DNA, 21 bp, Artificial Sequence
  Synthetic
tcctggcccttcttggaacct

SEQ ID NO: 16803 - DNA, 21 bp, Artificial Sequence
  Synthetic
ggcccttcttggaacctgtgg

SEQ ID NO: 16804 - DNA, 21 bp, Artificial Sequence
  Synthetic
gattcatccacaggttccaag

SEQ ID NO: 16805 - DNA, 21 bp, Artificial Sequence
  Synthetic
taagattcatccacaggttcc

SEQ ID NO: 16806 - DNA, 21 bp, Artificial Sequence
  Synthetic
cttaataatctgataatagtt

SEQ ID NO: 16807 - DNA, 21 bp, Artificial Sequence
  Synthetic
ccttaataatctgataatagt

SEQ ID NO: 16808 - DNA, 21 bp, Artificial Sequence
  Synthetic
actattatcagattattaagg

SEQ ID NO: 16809 - DNA, 21 bp, Artificial Sequence
  Synthetic
atgtgtctcgtttaggccccc

SEQ ID NO: 16810 - DNA, 21 bp, Artificial Sequence
  Synthetic
gcccccatggatatttccagc

SEQ ID NO: 16811 - DNA, 21 bp, Artificial Sequence
  Synthetic
ctccatgctggaaatatccat

SEQ ID NO: 16812 - DNA, 21 bp, Artificial Sequence
  Synthetic
cccccatggatatttccagca

SEQ ID NO: 16813 - DNA, 21 bp, Artificial Sequence
  Synthetic
tctccatgctggaaatatcca

SEQ ID NO: 16814 - DNA, 21 bp, Artificial Sequence
  Synthetic
ttctccatgctggaaatatcc

SEQ ID NO: 16815 - DNA, 21 bp, Artificial Sequence
  Synthetic
cccatggatatttccagcatg

SEQ ID NO: 16816 - DNA, 21 bp, Artificial Sequence
  Synthetic
atggatatttccagcatggag

SEQ ID NO: 16817 - DNA, 21 bp, Artificial Sequence
  Synthetic
atttccagcatggagaagaaa

SEQ ID NO: 16818 - DNA, 21 bp, Artificial Sequence
  Synthetic
cattcagtttcttctccatgc

SEQ ID NO: 16819 - DNA, 21 bp, Artificial Sequence
  Synthetic
ccattcagtttcttctccatg

SEQ ID NO: 16820 - DNA, 21 bp, Artificial Sequence
  Synthetic
ccagcatggagaagaaactga

SEQ ID NO: 16821 - DNA, 21 bp, Artificial Sequence
  Synthetic
cagcatggagaagaaactgaa

SEQ ID NO: 16822 - DNA, 21 bp, Artificial Sequence
  Synthetic
aatggaggtttatactgtacc

SEQ ID NO: 16823 - DNA, 21 bp, Artificial Sequence
  Synthetic
atggaggtttatactgtacca

SEQ ID NO: 16824 - DNA, 21 bp, Artificial Sequence
  Synthetic
ggaggtttatactgtaccaag

SEQ ID NO: 16825 - DNA, 21 bp, Artificial Sequence
  Synthetic
gaggtttatactgtaccaagg

SEQ ID NO: 16826 - DNA, 21 bp, Artificial Sequence
  Synthetic
aaggaggaatttgtaaatgac

SEQ ID NO: 16827 - DNA, 21 bp, Artificial Sequence
  Synthetic
aaatgacatgaagaccatgtt

SEQ ID NO: 16828 - DNA, 21 bp, Artificial Sequence
  Synthetic
aatgacatgaagaccatgttc

SEQ ID NO: 16829 - DNA, 21 bp, Artificial Sequence
  Synthetic
gaagaccatgttcaggaattg

SEQ ID NO: 16830 - DNA, 21 bp, Artificial Sequence
  Synthetic
ccattatactttcgacaattc

SEQ ID NO: 16831 - DNA, 21 bp, Artificial Sequence
  Synthetic
tcaggaattgtcgaaagtata

SEQ ID NO: 16832 - DNA, 21 bp, Artificial Sequence
  Synthetic
caggaattgtcgaaagtataa

SEQ ID NO: 16833 - DNA, 21 bp, Artificial Sequence
  Synthetic
aggaattgtcgaaagtataat

SEQ ID NO: 16834 - DNA, 21 bp, Artificial Sequence
  Synthetic
ggaattgtcgaaagtataatg

SEQ ID NO: 16835 - DNA, 21 bp, Artificial Sequence
  Synthetic
atccttgtggaatttgtacaa

SEQ ID NO: 16836 - DNA, 21 bp, Artificial Sequence
  Synthetic
cctcgtttgtacaaattccac

SEQ ID NO: 16837 - DNA, 21 bp, Artificial Sequence
  Synthetic
tgtggaatttgtacaaacgag

SEQ ID NO: 16838 - DNA, 21 bp, Artificial Sequence
  Synthetic
acaaacgaggtgaacgatgat

SEQ ID NO: 16839 - DNA, 21 bp, Artificial Sequence
  Synthetic
atgatcaggatgccatcttat

SEQ ID NO: 16840 - DNA, 21 bp, Artificial Sequence
  Synthetic
atcttatgtgaggcctcttgt

SEQ ID NO: 16841 - DNA, 21 bp, Artificial Sequence
  Synthetic
tccgatgaaaccatttctgac

SEQ ID NO: 16842 - DNA, 21 bp, Artificial Sequence
  Synthetic
ctcttgtcagaaatggtttca

SEQ ID NO: 16843 - DNA, 21 bp, Artificial Sequence
  Synthetic
aatggtttcatcggatctgta

SEQ ID NO: 16844 - DNA, 21 bp, Artificial Sequence
  Synthetic
atggtttcatcggatctgtac

SEQ ID NO: 16845 - DNA, 21 bp, Artificial Sequence
  Synthetic
agtcattccagtacagatccg

SEQ ID NO: 16846 - DNA, 21 bp, Artificial Sequence
  Synthetic
atcggatctgtactggaatga

SEQ ID NO: 16847 - DNA, 21 bp, Artificial Sequence
  Synthetic
cagcttatggcctcttaactg

SEQ ID NO: 16848 - DNA, 21 bp, Artificial Sequence
  Synthetic
actgcagatgcttctgcagtt

SEQ ID NO: 16849 - DNA, 21 bp, Artificial Sequence
  Synthetic
aactgcagaagcatctgcagt

SEQ ID NO: 16850 - DNA, 21 bp, Artificial Sequence
  Synthetic
actgcagaagcatctgcagta

SEQ ID NO: 16851 - DNA, 21 bp, Artificial Sequence
  Synthetic
ggtgtacccatgtggtgcctg

SEQ ID NO: 16852 - DNA, 21 bp, Artificial Sequence
  Synthetic
gtgtacccatgtggtgcctgt

SEQ ID NO: 16853 - DNA, 21 bp, Artificial Sequence
  Synthetic
acccatgtggtgcctgtcgga

SEQ ID NO: 16854 - DNA, 21 bp, Artificial Sequence
  Synthetic
cctcactccgacaggcaccac

SEQ ID NO: 16855 - DNA, 21 bp, Artificial Sequence
  Synthetic
tgtggtgcctgtcggagtgag

SEQ ID NO: 16856 - DNA, 21 bp, Artificial Sequence
  Synthetic
cggagtgaggtgaacgatgac

SEQ ID NO: 16857 - DNA, 21 bp, Artificial Sequence
  Synthetic
atgaccaggatgccattctgt

SEQ ID NO: 16858 - DNA, 21 bp, Artificial Sequence
  Synthetic
attctgtgtgaggcctcctgc

SEQ ID NO: 16859 - DNA, 21 bp, Artificial Sequence
  Synthetic
tttctggcaggaggcctcaca

SEQ ID NO: 16860 - DNA, 21 bp, Artificial Sequence
  Synthetic
cacggtggaaccatttctggc

SEQ ID NO: 16861 - DNA, 21 bp, Artificial Sequence
  Synthetic
tcacggtggaaccatttctgg

SEQ ID NO: 16862 - DNA, 21 bp, Artificial Sequence
  Synthetic
cctgccagaaatggttccacc

SEQ ID NO: 16863 - DNA, 21 bp, Artificial Sequence
  Synthetic
gtcatgcctgtgcactcacgg

SEQ ID NO: 16864 - DNA, 21 bp, Artificial Sequence
  Synthetic
agtcatgcctgtgcactcacg

SEQ ID NO: 16865 - DNA, 21 bp, Artificial Sequence
  Synthetic
accgtgagtgcacaggcatga

SEQ ID NO: 16866 - DNA, 21 bp, Artificial Sequence
  Synthetic
cgtgagtgcacaggcatgact

SEQ ID NO: 16867 - DNA, 21 bp, Artificial Sequence
  Synthetic
caggcatgactgagagcgcct

SEQ ID NO: 16868 - DNA, 21 bp, Artificial Sequence
  Synthetic
gcgcctatgggctgctgacca

SEQ ID NO: 16869 - DNA, 21 bp, Artificial Sequence
  Synthetic
gaccactgaagcttctgccgt

SEQ ID NO: 16870 - DNA, 21 bp, Artificial Sequence
  Synthetic
agagatcgcaggcccagacgg

SEQ ID NO: 16871 - DNA, 21 bp, Artificial Sequence
  Synthetic
tggatctccttggtcttgagg

SEQ ID NO: 16872 - DNA, 21 bp, Artificial Sequence
  Synthetic
ttgctaccgactttggaaaag

SEQ ID NO: 16873 - DNA, 21 bp, Artificial Sequence
  Synthetic
accgactttggaaaagaagaa

SEQ ID NO: 16874 - DNA, 21 bp, Artificial Sequence
  Synthetic
aaaagaagaaaagaaagcgat

SEQ ID NO: 16875 - DNA, 21 bp, Artificial Sequence
  Synthetic
aaagaagaaaagaaagcgatg

SEQ ID NO: 16876 - DNA, 21 bp, Artificial Sequence
  Synthetic
aaagaaagcgatgtggggtct

SEQ ID NO: 16877 - DNA, 21 bp, Artificial Sequence
  Synthetic
ggggtctgtgaaccctgccag

SEQ ID NO: 16878 - DNA, 21 bp, Artificial Sequence
  Synthetic
ccacagttggtcttctgctgg

SEQ ID NO: 16879 - DNA, 21 bp, Artificial Sequence
  Synthetic
gccagcagaagaccaactgtg

SEQ ID NO: 16880 - DNA, 21 bp, Artificial Sequence
  Synthetic
tgtggtgaatgcacttactgc

SEQ ID NO: 16881 - DNA, 21 bp, Artificial Sequence
  Synthetic
tgaatgcacttactgcaagaa

SEQ ID NO: 16882 - DNA, 21 bp, Artificial Sequence
  Synthetic
tgcacttactgcaagaacaga

SEQ ID NO: 16883 - DNA, 21 bp, Artificial Sequence
  Synthetic
aagaacagccatcagatctgt

SEQ ID NO: 16884 - DNA, 21 bp, Artificial Sequence
  Synthetic
cagccatcagatctgtaagaa

SEQ ID NO: 16885 - DNA, 21 bp, Artificial Sequence
  Synthetic
agatctgtaagaaaagaaaat

SEQ ID NO: 16886 - DNA, 21 bp, Artificial Sequence
  Synthetic
atctgtaagaaaagaaaatgt

SEQ ID NO: 16887 - DNA, 21 bp, Artificial Sequence
  Synthetic
tctgtaagaaaagaaaatgtg

SEQ ID NO: 16888 - DNA, 21 bp, Artificial Sequence
  Synthetic
ggcagggtggggtcatcatac

SEQ ID NO: 16889 - DNA, 21 bp, Artificial Sequence
  Synthetic
tgtatgatgaccccaccctgc

SEQ ID NO: 16890 - DNA, 21 bp, Artificial Sequence
  Synthetic
tgaccccaccctgcctgaagg

SEQ ID NO: 16891 - DNA, 21 bp, Artificial Sequence
  Synthetic
gtgtccagccttcaggcaggg

SEQ ID NO: 16892 - DNA, 21 bp, Artificial Sequence
  Synthetic
cgtgtccagccttcaggcagg

SEQ ID NO: 16893 - DNA, 21 bp, Artificial Sequence
  Synthetic
caccctgcctgaaggctggac

SEQ ID NO: 16894 - DNA, 21 bp, Artificial Sequence
  Synthetic
accctgcctgaaggctggaca

SEQ ID NO: 16895 - DNA, 21 bp, Artificial Sequence
  Synthetic
cttccgtgtccagccttcagg

SEQ ID NO: 16896 - DNA, 21 bp, Artificial Sequence
  Synthetic
ctggacacggaagcttaagca

SEQ ID NO: 16897 - DNA, 21 bp, Artificial Sequence
  Synthetic
tggacacggaagcttaagcaa

SEQ ID NO: 16898 - DNA, 21 bp, Artificial Sequence
  Synthetic
aaaggaaatctggccgctctg

SEQ ID NO: 16899 - DNA, 21 bp, Artificial Sequence
  Synthetic
aaggaaatctggccgctctgc

SEQ ID NO: 16900 - DNA, 21 bp, Artificial Sequence
  Synthetic
aggaaatctggccgctctgct

SEQ ID NO: 16901 - DNA, 21 bp, Artificial Sequence
  Synthetic
aatacacatcatacttcccag

SEQ ID NO: 16902 - DNA, 21 bp, Artificial Sequence
  Synthetic
tctgtttgtccccacagtccc

SEQ ID NO: 16903 - DNA, 21 bp, Artificial Sequence
  Synthetic
ctgtttgtccccacagtcccc

SEQ ID NO: 16904 - DNA, 21 bp, Artificial Sequence
  Synthetic
tgtttgtccccacagtcccca

SEQ ID NO: 16905 - DNA, 21 bp, Artificial Sequence
  Synthetic
ggaaaagcctttcgctctaaa

SEQ ID NO: 16906 - DNA, 21 bp, Artificial Sequence
  Synthetic
gaaaagcctttcgctctaaag

SEQ ID NO: 16907 - DNA, 21 bp, Artificial Sequence
  Synthetic
cgcaatcaactccactttaga

SEQ ID NO: 16908 - DNA, 21 bp, Artificial Sequence
  Synthetic
agtacgcaatcaactccactt

SEQ ID NO: 16909 - DNA, 21 bp, Artificial Sequence
  Synthetic
aagtggagttgattgcgtact

SEQ ID NO: 16910 - DNA, 21 bp, Artificial Sequence
  Synthetic
agggatgtgtcgcctaccttt

SEQ ID NO: 16911 - DNA, 21 bp, Artificial Sequence
  Synthetic
gaaaaggtaggcgacacatcc

SEQ ID NO: 16912 - DNA, 21 bp, Artificial Sequence
  Synthetic
aagtcaaaatcattagggtcc

SEQ ID NO: 16913 - DNA, 21 bp, Artificial Sequence
  Synthetic
gaagtcaaaatcattagggtc

SEQ ID NO: 16914 - DNA, 21 bp, Artificial Sequence
  Synthetic
ttaccgtgaagtcaaaatcat

SEQ ID NO: 16915 - DNA, 21 bp, Artificial Sequence
  Synthetic
gggctccctctcccagttacc

SEQ ID NO: 16916 - DNA, 21 bp, Artificial Sequence
  Synthetic
aagcatggaagaaacagtgtg

SEQ ID NO: 16917 - DNA, 21 bp, Artificial Sequence
  Synthetic
tgttaaatctcatatttcaat

SEQ ID NO: 16918 - DNA, 21 bp, Artificial Sequence
  Synthetic
tctgaatcttcacattgaaat

SEQ ID NO: 16919 - DNA, 21 bp, Artificial Sequence
  Synthetic
tcatatttcaatgtgaagatt

SEQ ID NO: 16920 - DNA, 21 bp, Artificial Sequence
  Synthetic
gaaaggctctgaatcttcaca

SEQ ID NO: 16921 - DNA, 21 bp, Artificial Sequence
  Synthetic
ctaccggctgacggaaaggct

SEQ ID NO: 16922 - DNA, 21 bp, Artificial Sequence
  Synthetic
tcaaggagatctaccggctga

SEQ ID NO: 16923 - DNA, 21 bp, Artificial Sequence
  Synthetic
ttcaaggagatctaccggctg

SEQ ID NO: 16924 - DNA, 21 bp, Artificial Sequence
  Synthetic
tccgtcagccggtagatctcc

SEQ ID NO: 16925 - DNA, 21 bp, Artificial Sequence
  Synthetic
aaaatacttactggatattca

SEQ ID NO: 16926 - DNA, 21 bp, Artificial Sequence
  Synthetic
aaaaatacttactggatattc

SEQ ID NO: 16927 - DNA, 21 bp, Artificial Sequence
  Synthetic
caatgatgtctctgtagtcct

SEQ ID NO: 16928 - DNA, 21 bp, Artificial Sequence
  Synthetic
tcaatgatgtctctgtagtcc

SEQ ID NO: 16929 - DNA, 21 bp, Artificial Sequence
  Synthetic
agagacatcattgacactcca

SEQ ID NO: 16930 - DNA, 21 bp, Artificial Sequence
  Synthetic
tctaacggtagcaaaatccat

SEQ ID NO: 16931 - DNA, 21 bp, Artificial Sequence
  Synthetic
ctctaacggtagcaaaatcca

SEQ ID NO: 16932 - DNA, 21 bp, Artificial Sequence
  Synthetic
ttgctaccgttagagaaactt

SEQ ID NO: 16933 - DNA, 21 bp, Artificial Sequence
  Synthetic
ccgttagagaaactttagagg

SEQ ID NO: 16934 - DNA, 21 bp, Artificial Sequence
  Synthetic
cgttagagaaactttagaggc

SEQ ID NO: 16935 - DNA, 21 bp, Artificial Sequence
  Synthetic
gttagagaaactttagaggct

SEQ ID NO: 16936 - DNA, 21 bp, Artificial Sequence
  Synthetic
aaactttagaggctgggaatt

SEQ ID NO: 16937 - DNA, 21 bp, Artificial Sequence
  Synthetic
gctgggaattatgagtcacca

SEQ ID NO: 16938 - DNA, 21 bp, Artificial Sequence
  Synthetic
ctgggaattatgagtcaccaa

SEQ ID NO: 16939 - DNA, 21 bp, Artificial Sequence
  Synthetic
ggtgtatatgctttggaatta

SEQ ID NO: 16940 - DNA, 21 bp, Artificial Sequence
  Synthetic
atatacaccaagcaaaagatc

SEQ ID NO: 16941 - DNA, 21 bp, Artificial Sequence
  Synthetic
tttccctcacagatttacagc

SEQ ID NO: 16942 - DNA, 21 bp, Artificial Sequence
  Synthetic
gcaaactcatgctgtaaatct

SEQ ID NO: 16943 - DNA, 21 bp, Artificial Sequence
  Synthetic
aagaatgtgaaagaattgtgg

SEQ ID NO: 16944 - DNA, 21 bp, Artificial Sequence
  Synthetic
agaatgtgaaagaattgtggc

SEQ ID NO: 16945 - DNA, 21 bp, Artificial Sequence
  Synthetic
gcctcagcatttgtggccccc

SEQ ID NO: 16946 - DNA, 21 bp, Artificial Sequence
  Synthetic
gatccacgggggccacaaatg

SEQ ID NO: 16947 - DNA, 21 bp, Artificial Sequence
  Synthetic
gggataggcttgcagatccac

SEQ ID NO: 16948 - DNA, 21 bp, Artificial Sequence
  Synthetic
tgggataggcttgcagatcca

SEQ ID NO: 16949 - DNA, 21 bp, Artificial Sequence
  Synthetic
atgggataggcttgcagatcc

SEQ ID NO: 16950 - DNA, 21 bp, Artificial Sequence
  Synthetic
atgccactactgtgcaataca

SEQ ID NO: 16951 - DNA, 21 bp, Artificial Sequence
  Synthetic
tatgccactactgtgcaatac

SEQ ID NO: 16952 - DNA, 21 bp, Artificial Sequence
  Synthetic
tgcacagtagtggcatatcca

SEQ ID NO: 16953 - DNA, 21 bp, Artificial Sequence
  Synthetic
gtttaattgtacttagatccg

SEQ ID NO: 16954 - DNA, 21 bp, Artificial Sequence
  Synthetic
ctaagtacaattaaacaaaga

SEQ ID NO: 16955 - DNA, 21 bp, Artificial Sequence
  Synthetic
taagtacaattaaacaaagac

SEQ ID NO: 16956 - DNA, 21 bp, Artificial Sequence
  Synthetic
aaggcgggtttcttccctaat

SEQ ID NO: 16957 - DNA, 21 bp, Artificial Sequence
  Synthetic
aggcgggtttcttccctaatg

SEQ ID NO: 16958 - DNA, 21 bp, Artificial Sequence
  Synthetic
ggcgggtttcttccctaatgt

SEQ ID NO: 16959 - DNA, 21 bp, Artificial Sequence
  Synthetic
atcgaacttcccacattaggg

SEQ ID NO: 16960 - DNA, 21 bp, Artificial Sequence
  Synthetic
tatatcgaacttcccacatta

SEQ ID NO: 16961 - DNA, 21 bp, Artificial Sequence
  Synthetic
atatatcgaacttcccacatt

SEQ ID NO: 16962 - DNA, 21 bp, Artificial Sequence
  Synthetic
tatatatcgaacttcccacat

SEQ ID NO: 16963 - DNA, 21 bp, Artificial Sequence
  Synthetic
taatgtgggaagttcgatata

SEQ ID NO: 16964 - DNA, 21 bp, Artificial Sequence
  Synthetic
tcgtgtattatgctctatata

SEQ ID NO: 16965 - DNA, 21 bp, Artificial Sequence
  Synthetic
tcgatatatagagcataatac

SEQ ID NO: 16966 - DNA, 21 bp, Artificial Sequence
  Synthetic
agcataatacacgaacattta

SEQ ID NO: 16967 - DNA, 21 bp, Artificial Sequence
  Synthetic
atacacgaacatttaatgagc

SEQ ID NO: 16968 - DNA, 21 bp, Artificial Sequence
  Synthetic
tacacgaacatttaatgagcc

SEQ ID NO: 16969 - DNA, 21 bp, Artificial Sequence
  Synthetic
aatgagcctggaagccctatt

SEQ ID NO: 16970 - DNA, 21 bp, Artificial Sequence
  Synthetic
cgaatttagcagatttcacaa

SEQ ID NO: 16971 - DNA, 21 bp, Artificial Sequence
  Synthetic
tgggaggttgttagctacctt

SEQ ID NO: 16972 - DNA, 21 bp, Artificial Sequence
  Synthetic
ggaggttgttagctaccttaa

SEQ ID NO: 16973 - DNA, 21 bp, Artificial Sequence
  Synthetic
ctaccttaagaggacatgctg

SEQ ID NO: 16974 - DNA, 21 bp, Artificial Sequence
  Synthetic
tatcagacatggctgtaaact

SEQ ID NO: 16975 - DNA, 21 bp, Artificial Sequence
  Synthetic
tcagacatggctgtaaactat

SEQ ID NO: 16976 - DNA, 21 bp, Artificial Sequence
  Synthetic
atgagaataccatgatagcag

SEQ ID NO: 16977 - DNA, 21 bp, Artificial Sequence
  Synthetic
tgagaataccatgatagcagc

SEQ ID NO: 16978 - DNA, 21 bp, Artificial Sequence
  Synthetic
tggaagttgtgataaaatgat

SEQ ID NO: 16979 - DNA, 21 bp, Artificial Sequence
  Synthetic
acaggttcgaagacaccagac

SEQ ID NO: 16980 - DNA, 21 bp, Artificial Sequence
  Synthetic
caggtcagccagagaaaatat

SEQ ID NO: 16981 - DNA, 21 bp, Artificial Sequence
  Synthetic
cagccagagaaaatatcagaa

SEQ ID NO: 16982 - DNA, 21 bp, Artificial Sequence
  Synthetic
agccagagaaaatatcagaat

SEQ ID NO: 16983 - DNA, 21 bp, Artificial Sequence
  Synthetic
cctgttactagtgttggaaaa

SEQ ID NO: 16984 - DNA, 21 bp, Artificial Sequence
  Synthetic
ggtttgtaagtggcagtcgtg

SEQ ID NO: 16985 - DNA, 21 bp, Artificial Sequence
  Synthetic
gtttgtaagtggcagtcgtga

SEQ ID NO: 16986 - DNA, 21 bp, Artificial Sequence
  Synthetic
tgaaaatgcataaacgaattc

SEQ ID NO: 16987 - DNA, 21 bp, Artificial Sequence
  Synthetic
gtacacagatgacaagtgtcc

SEQ ID NO: 16988 - DNA, 21 bp, Artificial Sequence
  Synthetic
aagggttctgatgactgtctt

SEQ ID NO: 16989 - DNA, 21 bp, Artificial Sequence
  Synthetic
tgatgactgtcttgtgaaaat

SEQ ID NO: 16990 - DNA, 21 bp, Artificial Sequence
  Synthetic
caactaattcatgtcctgatg

SEQ ID NO: 16991 - DNA, 21 bp, Artificial Sequence
  Synthetic
actaattcatgtcctgatggt

SEQ ID NO: 16992 - DNA, 21 bp, Artificial Sequence
  Synthetic
cttcaaaaatatttcagggtc

SEQ ID NO: 16993 - DNA, 21 bp, Artificial Sequence
  Synthetic
aaatatttcagggtcatgaag

SEQ ID NO: 16994 - DNA, 21 bp, Artificial Sequence
  Synthetic
aaatacctcatcttcatgacc

SEQ ID NO: 16995 - DNA, 21 bp, Artificial Sequence
  Synthetic
atgaagatgaggtatttgttc

SEQ ID NO: 16996 - DNA, 21 bp, Artificial Sequence
  Synthetic
aggatcgaacgggtgtggttc

SEQ ID NO: 16997 - DNA, 21 bp, Artificial Sequence
  Synthetic
tgaaccacacccgttcgatcc

SEQ ID NO: 16998 - DNA, 21 bp, Artificial Sequence
  Synthetic
aaaagagaactctaggatcga

SEQ ID NO: 16999 - DNA, 21 bp, Artificial Sequence
  Synthetic
gcagaaaagagaactctagga

SEQ ID NO: 17000 - DNA, 21 bp, Artificial Sequence
  Synthetic
gaccagcagaaaagagaactc

SEQ ID NO: 17001 - DNA, 21 bp, Artificial Sequence
  Synthetic
tccatcatgaccagcagaaaa

SEQ ID NO: 17002 - DNA, 21 bp, Artificial Sequence
  Synthetic
tttccatcatgaccagcagaa

SEQ ID NO: 17003 - DNA, 21 bp, Artificial Sequence
  Synthetic
tcacgtttccatcatgaccag

SEQ ID NO: 17004 - DNA, 21 bp, Artificial Sequence
  Synthetic
tcatgatggaaacgtgatagt

SEQ ID NO: 17005 - DNA, 21 bp, Artificial Sequence
  Synthetic
catgatggaaacgtgatagtg

SEQ ID NO: 17006 - DNA, 21 bp, Artificial Sequence
  Synthetic
tgtgcacctttggctgttctt

SEQ ID NO: 17007 - DNA, 21 bp, Artificial Sequence
  Synthetic
aatagatgcactatggccctg

SEQ ID NO: 17008 - DNA, 21 bp, Artificial Sequence
  Synthetic
tgtaatagatgcactatggcc

SEQ ID NO: 17009 - DNA, 21 bp, Artificial Sequence
  Synthetic
gccactgcacaatggtgagaa

SEQ ID NO: 17010 - DNA, 21 bp, Artificial Sequence
  Synthetic
tttgagccactgcacaatggt

SEQ ID NO: 17011 - DNA, 21 bp, Artificial Sequence
  Synthetic
tctttgagccactgcacaatg

SEQ ID NO: 17012 - DNA, 21 bp, Artificial Sequence
  Synthetic
tcaccattgtgcagtggctca

SEQ ID NO: 17013 - DNA, 21 bp, Artificial Sequence
  Synthetic
cagtagaagatagatatctct

SEQ ID NO: 17014 - DNA, 21 bp, Artificial Sequence
  Synthetic
caaagagatatctatcttcta

SEQ ID NO: 17015 - DNA, 21 bp, Artificial Sequence
  Synthetic
aaagagatatctatcttctac

SEQ ID NO: 17016 - DNA, 21 bp, Artificial Sequence
  Synthetic
aaatagtgccatctgccccag

SEQ ID NO: 17017 - DNA, 21 bp, Artificial Sequence
  Synthetic
atggtcacagtgggcctgtct

SEQ ID NO: 17018 - DNA, 21 bp, Artificial Sequence
  Synthetic
tggtcacagtgggcctgtcta

SEQ ID NO: 17019 - DNA, 21 bp, Artificial Sequence
  Synthetic
gtctacggagccagcttcagt

SEQ ID NO: 17020 - DNA, 21 bp, Artificial Sequence
  Synthetic
agaggaaagcagatagttcct

SEQ ID NO: 17021 - DNA, 21 bp, Artificial Sequence
  Synthetic
gaagaggaaagcagatagttc

SEQ ID NO: 17022 - DNA, 21 bp, Artificial Sequence
  Synthetic
ggaactatctgctttcctctt

SEQ ID NO: 17023 - DNA, 21 bp, Artificial Sequence
  Synthetic
aactatctgctttcctcttca

SEQ ID NO: 17024 - DNA, 21 bp, Artificial Sequence
  Synthetic
atctgctttcctcttcagagg

SEQ ID NO: 17025 - DNA, 21 bp, Artificial Sequence
  Synthetic
tctgctttcctcttcagagga

SEQ ID NO: 17026 - DNA, 21 bp, Artificial Sequence
  Synthetic
taacagttccgtcctctgaag

SEQ ID NO: 17027 - DNA, 21 bp, Artificial Sequence
  Synthetic
ctaacagttccgtcctctgaa

SEQ ID NO: 17028 - DNA, 21 bp, Artificial Sequence
  Synthetic
atctaacagttccgtcctctg

SEQ ID NO: 17029 - DNA, 21 bp, Artificial Sequence
  Synthetic
acaatctaacagttccgtcct

SEQ ID NO: 17030 - DNA, 21 bp, Artificial Sequence
  Synthetic
agaggacggaactgttagatt

SEQ ID NO: 17031 - DNA, 21 bp, Artificial Sequence
  Synthetic
gaggacggaactgttagattg

SEQ ID NO: 17032 - DNA, 21 bp, Artificial Sequence
  Synthetic
ttggacatggtttgatggttg

SEQ ID NO: 17033 - DNA, 21 bp, Artificial Sequence
  Synthetic
agtctgttcacttaggtttag

SEQ ID NO: 17034 - DNA, 21 bp, Artificial Sequence
  Synthetic
caccatctctactaaacctaa

SEQ ID NO: 17035 - DNA, 21 bp, Artificial Sequence
  Synthetic
cacttaggtttagtagagatg

SEQ ID NO: 17036 - DNA, 21 bp, Artificial Sequence
  Synthetic
tttgacttccccttaggttca

SEQ ID NO: 17037 - DNA, 21 bp, Artificial Sequence
  Synthetic
actgtattatccattgaacct

SEQ ID NO: 17038 - DNA, 21 bp, Artificial Sequence
  Synthetic
ataatcgaactgtattatcca

SEQ ID NO: 17039 - DNA, 21 bp, Artificial Sequence
  Synthetic
aatggataatacagttcgatt

SEQ ID NO: 17040 - DNA, 21 bp, Artificial Sequence
  Synthetic
atggataatacagttcgatta

SEQ ID NO: 17041 - DNA, 21 bp, Artificial Sequence
  Synthetic
ggctttgatagcatcccataa

SEQ ID NO: 17042 - DNA, 21 bp, Artificial Sequence
  Synthetic
tattggcagggtctcactgca

SEQ ID NO: 17043 - DNA, 21 bp, Artificial Sequence
  Synthetic
tcatcagtgacatccactgca

SEQ ID NO: 17044 - DNA, 21 bp, Artificial Sequence
  Synthetic
ctgatgattctagtctgattg

SEQ ID NO: 17045 - DNA, 21 bp, Artificial Sequence
  Synthetic
tgatgattctagtctgattgc

SEQ ID NO: 17046 - DNA, 21 bp, Artificial Sequence
  Synthetic
caaaacctccagcaatcagac

SEQ ID NO: 17047 - DNA, 21 bp, Artificial Sequence
  Synthetic
ttaccgaccacactctgacag

SEQ ID NO: 17048 - DNA, 21 bp, Artificial Sequence
  Synthetic
tacagaccactatcagccttt

SEQ ID NO: 17049 - DNA, 21 bp, Artificial Sequence
  Synthetic
tttgccggccatcttgctgat

SEQ ID NO: 17050 - DNA, 21 bp, Artificial Sequence
  Synthetic
gcaacataattagaatttgga

SEQ ID NO: 17051 - DNA, 21 bp, Artificial Sequence
  Synthetic
agcaacataattagaatttgg

SEQ ID NO: 17052 - DNA, 21 bp, Artificial Sequence
  Synthetic
ccgtagcaacataattagaat

SEQ ID NO: 17053 - DNA, 21 bp, Artificial Sequence
  Synthetic
ccaaattctaattatgttgct

SEQ ID NO: 17054 - DNA, 21 bp, Artificial Sequence
  Synthetic
cagagcccgtagcaacataat

SEQ ID NO: 17055 - DNA, 21 bp, Artificial Sequence
  Synthetic
tgttgctacgggctctgcaga

SEQ ID NO: 17056 - DNA, 21 bp, Artificial Sequence
  Synthetic
agagccgcacagttctgtctg

SEQ ID NO: 17057 - DNA, 21 bp, Artificial Sequence
  Synthetic
tgcagacagaactgtgcggct

SEQ ID NO: 17058 - DNA, 21 bp, Artificial Sequence
  Synthetic
gcagacagaactgtgcggctc

SEQ ID NO: 17059 - DNA, 21 bp, Artificial Sequence
  Synthetic
cagttaccattcaggacgtcc

SEQ ID NO: 17060 - DNA, 21 bp, Artificial Sequence
  Synthetic
cgtcctgaatggtaactgtgt

SEQ ID NO: 17061 - DNA, 21 bp, Artificial Sequence
  Synthetic
gtaactgtgtaaggatcttca

SEQ ID NO: 17062 - DNA, 21 bp, Artificial Sequence
  Synthetic
gtgtaaaataccttgtgtcca

SEQ ID NO: 17063 - DNA, 21 bp, Artificial Sequence
  Synthetic
gtcaaggaatgaattggtccc

SEQ ID NO: 17064 - DNA, 21 bp, Artificial Sequence
  Synthetic
attgggagaaaatgtcaagga

SEQ ID NO: 17065 - DNA, 21 bp, Artificial Sequence
  Synthetic
tcccattgggagaaaatgtca

SEQ ID NO: 17066 - DNA, 21 bp, Artificial Sequence
  Synthetic
ctcccattgggagaaaatgtc

SEQ ID NO: 17067 - DNA, 21 bp, Artificial Sequence
  Synthetic
tagccaggaatctcccattgg

SEQ ID NO: 17068 - DNA, 21 bp, Artificial Sequence
  Synthetic
tgtagccaggaatctcccatt

SEQ ID NO: 17069 - DNA, 21 bp, Artificial Sequence
  Synthetic
ctgtagccaggaatctcccat

SEQ ID NO: 17070 - DNA, 21 bp, Artificial Sequence
  Synthetic
cctgtagccaggaatctccca

SEQ ID NO: 17071 - DNA, 21 bp, Artificial Sequence
  Synthetic
ccaatgggagattcctggcta

SEQ ID NO: 17072 - DNA, 21 bp, Artificial Sequence
  Synthetic
caatgggagattcctggctac

SEQ ID NO: 17073 - DNA, 21 bp, Artificial Sequence
  Synthetic
ccatctgttgctcctgtagcc

SEQ ID NO: 17074 - DNA, 21 bp, Artificial Sequence
  Synthetic
gccatctgttgctcctgtagc

SEQ ID NO: 17075 - DNA, 21 bp, Artificial Sequence
  Synthetic
ggctacaggagcaacagatgg

SEQ ID NO: 17076 - DNA, 21 bp, Artificial Sequence
  Synthetic
aacagatggcagagtgcttct

SEQ ID NO: 17077 - DNA, 21 bp, Artificial Sequence
  Synthetic
acagatggcagagtgcttctt

SEQ ID NO: 17078 - DNA, 21 bp, Artificial Sequence
  Synthetic
gcagagtgcttctttgggata

SEQ ID NO: 17079 - DNA, 21 bp, Artificial Sequence
  Synthetic
caaaccatgtccaatatccca

SEQ ID NO: 17080 - DNA, 21 bp, Artificial Sequence
  Synthetic
cttcaaacatttacttgtttg

SEQ ID NO: 17081 - DNA, 21 bp, Artificial Sequence
  Synthetic
ttcaaacatttacttgtttgg

SEQ ID NO: 17082 - DNA, 21 bp, Artificial Sequence
  Synthetic
ttacttgtttggtgggatata

SEQ ID NO: 17083 - DNA, 21 bp, Artificial Sequence
  Synthetic
taaaggacacaactatccagt

SEQ ID NO: 17084 - DNA, 21 bp, Artificial Sequence
  Synthetic
aaaggacacaactatccagta

SEQ ID NO: 17085 - DNA, 21 bp, Artificial Sequence
  Synthetic
gagaaaattgtgtgtcccata

SEQ ID NO: 17086 - DNA, 21 bp, Artificial Sequence
  Synthetic
acacaaaataatatccatatg

SEQ ID NO: 17087 - DNA, 21 bp, Artificial Sequence
  Synthetic
tgacacaaaataatatccata

SEQ ID NO: 17088 - DNA, 21 bp, Artificial Sequence
  Synthetic
ctgacacaaaataatatccat

SEQ ID NO: 17089 - DNA, 21 bp, Artificial Sequence
  Synthetic
gccatgaccgagtagctcggt

SEQ ID NO: 17090 - DNA, 21 bp, Artificial Sequence
  Synthetic
ggcaaattgaaaggttatcaa

SEQ ID NO: 17091 - DNA, 21 bp, Artificial Sequence
  Synthetic
aaaggttatcaactgaaaggc

SEQ ID NO: 17092 - DNA, 21 bp, Artificial Sequence
  Synthetic
tgaattggttggccaatctat

SEQ ID NO: 17093 - DNA, 21 bp, Artificial Sequence
  Synthetic
ttggccaatctatatgaacag

SEQ ID NO: 17094 - DNA, 21 bp, Artificial Sequence
  Synthetic
caagaatgccattaataccct

SEQ ID NO: 17095 - DNA, 21 bp, Artificial Sequence
  Synthetic
gcaagaatgccattaataccc

SEQ ID NO: 17096 - DNA, 21 bp, Artificial Sequence
  Synthetic
agcaagaatgccattaatacc

SEQ ID NO: 17097 - DNA, 21 bp, Artificial Sequence
  Synthetic
gtattaatggcattcttgctg

SEQ ID NO: 17098 - DNA, 21 bp, Artificial Sequence
  Synthetic
aatggcattcttgctgatgaa

SEQ ID NO: 17099 - DNA, 21 bp, Artificial Sequence
  Synthetic
accaaggcccatttcatcagc

SEQ ID NO: 17100 - DNA, 21 bp, Artificial Sequence
  Synthetic
atgggccttggtaaaacagta

SEQ ID NO: 17101 - DNA, 21 bp, Artificial Sequence
  Synthetic
ttgcccttctggcccatctgg

SEQ ID NO: 17102 - DNA, 21 bp, Artificial Sequence
  Synthetic
cacctcagccagatgggccag

SEQ ID NO: 17103 - DNA, 21 bp, Artificial Sequence
  Synthetic
cttctggcccatctggctgag

SEQ ID NO: 17104 - DNA, 21 bp, Artificial Sequence
  Synthetic
acccacctcagccagatgggc

SEQ ID NO: 17105 - DNA, 21 bp, Artificial Sequence
  Synthetic
gcatctacccacctcagccag

SEQ ID NO: 17106 - DNA, 21 bp, Artificial Sequence
  Synthetic
tctgttgcagagagagaacat

SEQ ID NO: 17107 - DNA, 21 bp, Artificial Sequence
  Synthetic
ctgttgcagagagagaacatt

SEQ ID NO: 17108 - DNA, 21 bp, Artificial Sequence
  Synthetic
tgttgcagagagagaacattt

SEQ ID NO: 17109 - DNA, 21 bp, Artificial Sequence
  Synthetic
gtagacgcaggtgaaattatt

SEQ ID NO: 17110 - DNA, 21 bp, Artificial Sequence
  Synthetic
aattgttaagtgtagacgcag

SEQ ID NO: 17111 - DNA, 21 bp, Artificial Sequence
  Synthetic
tctacacttaacaattggcac

SEQ ID NO: 17112 - DNA, 21 bp, Artificial Sequence
  Synthetic
ctacacttaacaattggcacc

SEQ ID NO: 17113 - DNA, 21 bp, Artificial Sequence
  Synthetic
actgatatttaccttaaattt

SEQ ID NO: 17114 - DNA, 21 bp, Artificial Sequence
  Synthetic
gactgatatttaccttaaatt

SEQ ID NO: 17115 - DNA, 21 bp, Artificial Sequence
  Synthetic
tttctaggtgctaccatattg

SEQ ID NO: 17116 - DNA, 21 bp, Artificial Sequence
  Synthetic
tttccccaatatggtagcacc

SEQ ID NO: 17117 - DNA, 21 bp, Artificial Sequence
  Synthetic
atattggggaaatcctcatga

SEQ ID NO: 17118 - DNA, 21 bp, Artificial Sequence
  Synthetic
tcctcatgatagaaaagtcat

SEQ ID NO: 17119 - DNA, 21 bp, Artificial Sequence
  Synthetic
tagaaaagtcatcagaaggtt

SEQ ID NO: 17120 - DNA, 21 bp, Artificial Sequence
  Synthetic
agaaaagtcatcagaaggttc

SEQ ID NO: 17121 - DNA, 21 bp, Artificial Sequence
  Synthetic
aagtagaatgttacctgactc

SEQ ID NO: 17122 - DNA, 21 bp, Artificial Sequence
  Synthetic
ttacagaagaccctctacact

SEQ ID NO: 17123 - DNA, 21 bp, Artificial Sequence
  Synthetic
gaagggggcatcctgagtgta

SEQ ID NO: 17124 - DNA, 21 bp, Artificial Sequence
  Synthetic
tggaagggggcatcctgagtg

SEQ ID NO: 17125 - DNA, 21 bp, Artificial Sequence
  Synthetic
aaccacatggaagggggcatc

SEQ ID NO: 17126 - DNA, 21 bp, Artificial Sequence
  Synthetic
gctggtaataaccacatggaa

SEQ ID NO: 17127 - DNA, 21 bp, Artificial Sequence
  Synthetic
agctggtaataaccacatgga

SEQ ID NO: 17128 - DNA, 21 bp, Artificial Sequence
  Synthetic
tagctggtaataaccacatgg

SEQ ID NO: 17129 - DNA, 21 bp, Artificial Sequence
  Synthetic
tgatagctggtaataaccaca

SEQ ID NO: 17130 - DNA, 21 bp, Artificial Sequence
  Synthetic
ctgatagctggtaataaccac

SEQ ID NO: 17131 - DNA, 21 bp, Artificial Sequence
  Synthetic
accagctatcagctggtggtg

SEQ ID NO: 17132 - DNA, 21 bp, Artificial Sequence
  Synthetic
gcaggatgtaaagtatttcca

SEQ ID NO: 17133 - DNA, 21 bp, Artificial Sequence
  Synthetic
atgtattgccacttgacccgc

SEQ ID NO: 17134 - DNA, 21 bp, Artificial Sequence
  Synthetic
catgtattgccacttgacccg

SEQ ID NO: 17135 - DNA, 21 bp, Artificial Sequence
  Synthetic
gtcaagtggcaatacatggta

SEQ ID NO: 17136 - DNA, 21 bp, Artificial Sequence
  Synthetic
agtggcaatacatggtactgg

SEQ ID NO: 17137 - DNA, 21 bp, Artificial Sequence
  Synthetic
ctggatgaggctcaggcgctc

SEQ ID NO: 17138 - DNA, 21 bp, Artificial Sequence
  Synthetic
cctggaactactcttgagcgc

SEQ ID NO: 17139 - DNA, 21 bp, Artificial Sequence
  Synthetic
tcatgttacctggaactactc

SEQ ID NO: 17140 - DNA, 21 bp, Artificial Sequence
  Synthetic
gaactgtaagaggatcttcca

SEQ ID NO: 17141 - DNA, 21 bp, Artificial Sequence
  Synthetic
gatcctcttacagttccagtg

SEQ ID NO: 17142 - DNA, 21 bp, Artificial Sequence
  Synthetic
atcctcttacagttccagtgt

SEQ ID NO: 17143 - DNA, 21 bp, Artificial Sequence
  Synthetic
attccgacactggaactgtaa

SEQ ID NO: 17144 - DNA, 21 bp, Artificial Sequence
  Synthetic
cgattccgacactggaactgt

SEQ ID NO: 17145 - DNA, 21 bp, Artificial Sequence
  Synthetic
agcaaaagccgattccgacac

SEQ ID NO: 17146 - DNA, 21 bp, Artificial Sequence
  Synthetic
tagcaaaagccgattccgaca

SEQ ID NO: 17147 - DNA, 21 bp, Artificial Sequence
  Synthetic
ttgctaaccgggaccccaatt

SEQ ID NO: 17148 - DNA, 21 bp, Artificial Sequence
  Synthetic
ctctgccatggtgttctgaat

SEQ ID NO: 17149 - DNA, 21 bp, Artificial Sequence
  Synthetic
ccccaattcagaacaccatgg

SEQ ID NO: 17150 - DNA, 21 bp, Artificial Sequence
  Synthetic
cctctgccatggtgttctgaa

SEQ ID NO: 17151 - DNA, 21 bp, Artificial Sequence
  Synthetic
gcctacctctgccatggtgtt

SEQ ID NO: 17152 - DNA, 21 bp, Artificial Sequence
  Synthetic
tgttggcataatgaaatgcag

SEQ ID NO: 17153 - DNA, 21 bp, Artificial Sequence
  Synthetic
gaatcaaataatgttggcata

SEQ ID NO: 17154 - DNA, 21 bp, Artificial Sequence
  Synthetic
tgccaacattatttgattcac

SEQ ID NO: 17155 - DNA, 21 bp, Artificial Sequence
  Synthetic
ccaacattatttgattcacat

SEQ ID NO: 17156 - DNA, 21 bp, Artificial Sequence
  Synthetic
caacattatttgattcacatg

SEQ ID NO: 17157 - DNA, 21 bp, Artificial Sequence
  Synthetic
ttgattcacatgaggaattta

SEQ ID NO: 17158 - DNA, 21 bp, Artificial Sequence
  Synthetic
accattcattaaattcctcat

SEQ ID NO: 17159 - DNA, 21 bp, Artificial Sequence
  Synthetic
cggcatggctctcaatgtcct

SEQ ID NO: 17160 - DNA, 21 bp, Artificial Sequence
  Synthetic
tcggcatggctctcaatgtcc

SEQ ID NO: 17161 - DNA, 21 bp, Artificial Sequence
  Synthetic
ccaaggacattgagagccatg

SEQ ID NO: 17162 - DNA, 21 bp, Artificial Sequence
  Synthetic
ccgaaaacaaatctgctattg

SEQ ID NO: 17163 - DNA, 21 bp, Artificial Sequence
  Synthetic
gaaaacaaatctgctattgat

SEQ ID NO: 17164 - DNA, 21 bp, Artificial Sequence
  Synthetic
acaaatctgctattgatgaga

SEQ ID NO: 17165 - DNA, 21 bp, Artificial Sequence
  Synthetic
tgtgtaagcgagaaagttgat

SEQ ID NO: 17166 - DNA, 21 bp, Artificial Sequence
  Synthetic
ctttctcgcttacacatgatt

SEQ ID NO: 17167 - DNA, 21 bp, Artificial Sequence
  Synthetic
gcttcaaaatcatgtgtaagc

SEQ ID NO: 17168 - DNA, 21 bp, Artificial Sequence
  Synthetic
tggcttcaaaatcatgtgtaa

SEQ ID NO: 17169 - DNA, 21 bp, Artificial Sequence
  Synthetic
tttgaagccatttatgctgag

SEQ ID NO: 17170 - DNA, 21 bp, Artificial Sequence
  Synthetic
ccatttatgctgaggagaatc

SEQ ID NO: 17171 - DNA, 21 bp, Artificial Sequence
  Synthetic
ctgaggagaatcaagaaagat

SEQ ID NO: 17172 - DNA, 21 bp, Artificial Sequence
  Synthetic
tgaggagaatcaagaaagatg

SEQ ID NO: 17173 - DNA, 21 bp, Artificial Sequence
  Synthetic
gaatcaagaaagatgtggaaa

SEQ ID NO: 17174 - DNA, 21 bp, Artificial Sequence
  Synthetic
gctggtcagttggcaatacat

SEQ ID NO: 17175 - DNA, 21 bp, Artificial Sequence
  Synthetic
tattgccaactgaccagccga

SEQ ID NO: 17176 - DNA, 21 bp, Artificial Sequence
  Synthetic
aagctgctatatcaggcacta

SEQ ID NO: 17177 - DNA, 21 bp, Artificial Sequence
  Synthetic
cactaaagaacaaaatttcca

SEQ ID NO: 17178 - DNA, 21 bp, Artificial Sequence
  Synthetic
ctaaagaacaaaatttccatt

SEQ ID NO: 17179 - DNA, 21 bp, Artificial Sequence
  Synthetic
aagactgcaataaatcctcaa

SEQ ID NO: 17180 - DNA, 21 bp, Artificial Sequence
  Synthetic
gaagactgcaataaatcctca

SEQ ID NO: 17181 - DNA, 21 bp, Artificial Sequence
  Synthetic
gaggatttattgcagtcttct

SEQ ID NO: 17182 - DNA, 21 bp, Artificial Sequence
  Synthetic
gtgcttgttgggtagagccca

SEQ ID NO: 17183 - DNA, 21 bp, Artificial Sequence
  Synthetic
atgggctctacccaacaagca

SEQ ID NO: 17184 - DNA, 21 bp, Artificial Sequence
  Synthetic
tggtgttctgtgcttgttggg

SEQ ID NO: 17185 - DNA, 21 bp, Artificial Sequence
  Synthetic
gctggtggtgttctgtgcttg

SEQ ID NO: 17186 - DNA, 21 bp, Artificial Sequence
  Synthetic
cagaacaccaccagcagcctc

SEQ ID NO: 17187 - DNA, 21 bp, Artificial Sequence
  Synthetic
ctaaactgcatgaccagattc

SEQ ID NO: 17188 - DNA, 21 bp, Artificial Sequence
  Synthetic
catgaatctggtcatgcagtt

SEQ ID NO: 17189 - DNA, 21 bp, Artificial Sequence
  Synthetic
atgaatctggtcatgcagttt

SEQ ID NO: 17190 - DNA, 21 bp, Artificial Sequence
  Synthetic
ggtcatgcagtttaggaaggt

SEQ ID NO: 17191 - DNA, 21 bp, Artificial Sequence
  Synthetic
tgtgtaatcacccggagttat

SEQ ID NO: 17192 - DNA, 21 bp, Artificial Sequence
  Synthetic
tttcttgccgttcaaataact

SEQ ID NO: 17193 - DNA, 21 bp, Artificial Sequence
  Synthetic
ctcaagtttgccattcagaaa

SEQ ID NO: 17194 - DNA, 21 bp, Artificial Sequence
  Synthetic
ccattcagaaaatgaaacagc

SEQ ID NO: 17195 - DNA, 21 bp, Artificial Sequence
  Synthetic
cattcagaaaatgaaacagcc

SEQ ID NO: 17196 - DNA, 21 bp, Artificial Sequence
  Synthetic
gaaaatgaaacagccaggggt

SEQ ID NO: 17197 - DNA, 21 bp, Artificial Sequence
  Synthetic
gcattccagaagcccgttcca

SEQ ID NO: 17198 - DNA, 21 bp, Artificial Sequence
  Synthetic
cattccagaagcccgttccat

SEQ ID NO: 17199 - DNA, 21 bp, Artificial Sequence
  Synthetic
tgttccaatggaacgggcttc

SEQ ID NO: 17200 - DNA, 21 bp, Artificial Sequence
  Synthetic
ctgttccaatggaacgggctt

SEQ ID NO: 17201 - DNA, 21 bp, Artificial Sequence
  Synthetic
tcagggtgctgttccaatgga

SEQ ID NO: 17202 - DNA, 21 bp, Artificial Sequence
  Synthetic
atagtcagggtgctgttccaa

SEQ ID NO: 17203 - DNA, 21 bp, Artificial Sequence
  Synthetic
catagtcagggtgctgttcca

SEQ ID NO: 17204 - DNA, 21 bp, Artificial Sequence
  Synthetic
ttggaacagcaccctgactat

SEQ ID NO: 17205 - DNA, 21 bp, Artificial Sequence
  Synthetic
tggaacagcaccctgactatg

SEQ ID NO: 17206 - DNA, 21 bp, Artificial Sequence
  Synthetic
ggaagatgtattccgcatagt

SEQ ID NO: 17207 - DNA, 21 bp, Artificial Sequence
  Synthetic
gcggaatacatcttccatcca

SEQ ID NO: 17208 - DNA, 21 bp, Artificial Sequence
  Synthetic
aatgtacaaaggtccattgga

SEQ ID NO: 17209 - DNA, 21 bp, Artificial Sequence
  Synthetic
caatgtacaaaggtccattgg

SEQ ID NO: 17210 - DNA, 21 bp, Artificial Sequence
  Synthetic
catccaatggacctttgtaca

SEQ ID NO: 17211 - DNA, 21 bp, Artificial Sequence
  Synthetic
atccaatggacctttgtacat

SEQ ID NO: 17212 - DNA, 21 bp, Artificial Sequence
  Synthetic
tttccaatgtacaaaggtcca

SEQ ID NO: 17213 - DNA, 21 bp, Artificial Sequence
  Synthetic
aaaagaaaatgtatggctgca

SEQ ID NO: 17214 - DNA, 21 bp, Artificial Sequence
  Synthetic
agccttcctggctgatgcaaa

SEQ ID NO: 17215 - DNA, 21 bp, Artificial Sequence
  Synthetic
aaaatccactttgcatcagcc

SEQ ID NO: 17216 - DNA, 21 bp, Artificial Sequence
  Synthetic
caaaatccactttgcatcagc

SEQ ID NO: 17217 - DNA, 21 bp, Artificial Sequence
  Synthetic
tgcacaactgcatcatttata

SEQ ID NO: 17218 - DNA, 21 bp, Artificial Sequence
  Synthetic
gcacaactgcatcatttataa

SEQ ID NO: 17219 - DNA, 21 bp, Artificial Sequence
  Synthetic
cacaactgcatcatttataat

SEQ ID NO: 17220 - DNA, 21 bp, Artificial Sequence
  Synthetic
actgcatcatttataatgggg

SEQ ID NO: 17221 - DNA, 21 bp, Artificial Sequence
  Synthetic
tgcgtcaatttgtgatttcct

SEQ ID NO: 17222 - DNA, 21 bp, Artificial Sequence
  Synthetic
aatcacaaattgacgcaaata

SEQ ID NO: 17223 - DNA, 21 bp, Artificial Sequence
  Synthetic
tggacggaatgatttctactg

SEQ ID NO: 17224 - DNA, 21 bp, Artificial Sequence
  Synthetic
tttctactgctgggtttgtca

SEQ ID NO: 17225 - DNA, 21 bp, Artificial Sequence
  Synthetic
tcccggtgacaaacccagcag

SEQ ID NO: 17226 - DNA, 21 bp, Artificial Sequence
  Synthetic
ttctactgctgggtttgtcac

SEQ ID NO: 17227 - DNA, 21 bp, Artificial Sequence
  Synthetic
tctactgctgggtttgtcacc

SEQ ID NO: 17228 - DNA, 21 bp, Artificial Sequence
  Synthetic
gggaaggccaagtcctttgct

SEQ ID NO: 17229 - DNA, 21 bp, Artificial Sequence
  Synthetic
ccggggacagagctcacagca

SEQ ID NO: 17230 - DNA, 21 bp, Artificial Sequence
  Synthetic
cctttgctgtgagctctgtcc

SEQ ID NO: 17231 - DNA, 21 bp, Artificial Sequence
  Synthetic
ttagcgtgataaacccgggga

SEQ ID NO: 17232 - DNA, 21 bp, Artificial Sequence
  Synthetic
gacacttagcgtgataaaccc

SEQ ID NO: 17233 - DNA, 21 bp, Artificial Sequence
  Synthetic
agacacttagcgtgataaacc

SEQ ID NO: 17234 - DNA, 21 bp, Artificial Sequence
  Synthetic
cagacacttagcgtgataaac

SEQ ID NO: 17235 - DNA, 21 bp, Artificial Sequence
  Synthetic
cgggtttatcacgctaagtgt

SEQ ID NO: 17236 - DNA, 21 bp, Artificial Sequence
  Synthetic
gctaagtgtctgagactgaca

SEQ ID NO: 17237 - DNA, 21 bp, Artificial Sequence
  Synthetic
ctaagtgtctgagactgacat

SEQ ID NO: 17238 - DNA, 21 bp, Artificial Sequence
  Synthetic
gtctgagactgacatcggaac

SEQ ID NO: 17239 - DNA, 21 bp, Artificial Sequence
  Synthetic
ctgagactgacatcggaacca

SEQ ID NO: 17240 - DNA, 21 bp, Artificial Sequence
  Synthetic
tgagactgacatcggaaccag

SEQ ID NO: 17241 - DNA, 21 bp, Artificial Sequence
  Synthetic
gagactgacatcggaaccaga

SEQ ID NO: 17242 - DNA, 21 bp, Artificial Sequence
  Synthetic
agactgacatcggaaccagag

SEQ ID NO: 17243 - DNA, 21 bp, Artificial Sequence
  Synthetic
atcaggaactaacctcacatt

SEQ ID NO: 17244 - DNA, 21 bp, Artificial Sequence
  Synthetic
ccgattgtgtcaggagccaga

SEQ ID NO: 17245 - DNA, 21 bp, Artificial Sequence
  Synthetic
tgtgtcaggagccagacggag

SEQ ID NO: 17246 - DNA, 21 bp, Artificial Sequence
  Synthetic
cagacggagacgagtgcgatg

SEQ ID NO: 17247 - DNA, 21 bp, Artificial Sequence
  Synthetic
gaaaatgcaaagcctgtgtgc

SEQ ID NO: 17248 - DNA, 21 bp, Artificial Sequence
  Synthetic
aaaatgcaaagcctgtgtgca

SEQ ID NO: 17249 - DNA, 21 bp, Artificial Sequence
  Synthetic
aatgcaaagcctgtgtgcaag

SEQ ID NO: 17250 - DNA, 21 bp, Artificial Sequence
  Synthetic
gtgtggtgtttgccactactg

SEQ ID NO: 17251 - DNA, 21 bp, Artificial Sequence
  Synthetic
gtttgccactactgcagagac

SEQ ID NO: 17252 - DNA, 21 bp, Artificial Sequence
  Synthetic
tgccactactgcagagacatg

SEQ ID NO: 17253 - DNA, 21 bp, Artificial Sequence
  Synthetic
actgcagagacatgaagaagt

SEQ ID NO: 17254 - DNA, 21 bp, Artificial Sequence
  Synthetic
ctgcagagacatgaagaagtt

SEQ ID NO: 17255 - DNA, 21 bp, Artificial Sequence
  Synthetic
tgcagagacatgaagaagttt

SEQ ID NO: 17256 - DNA, 21 bp, Artificial Sequence
  Synthetic
gcagagacatgaagaagtttg

SEQ ID NO: 17257 - DNA, 21 bp, Artificial Sequence
  Synthetic
acatgaagaagtttggggggc

SEQ ID NO: 17258 - DNA, 21 bp, Artificial Sequence
  Synthetic
aagtttggggggcctggacgc

SEQ ID NO: 17259 - DNA, 21 bp, Artificial Sequence
  Synthetic
gccaagcactgtcggaggaca

SEQ ID NO: 17260 - DNA, 21 bp, Artificial Sequence
  Synthetic
actcactgccaagcactgtcg

SEQ ID NO: 17261 - DNA, 21 bp, Artificial Sequence
  Synthetic
tcactcactgccaagcactgt

SEQ ID NO: 17262 - DNA, 21 bp, Artificial Sequence
  Synthetic
atcactcactgccaagcactg

SEQ ID NO: 17263 - DNA, 21 bp, Artificial Sequence
  Synthetic
caggtactgtctaatgagtgt

SEQ ID NO: 17264 - DNA, 21 bp, Artificial Sequence
  Synthetic
atggaagtcagtatagcagcc

SEQ ID NO: 17265 - DNA, 21 bp, Artificial Sequence
  Synthetic
ggctgctatactgacttccat

SEQ ID NO: 17266 - DNA, 21 bp, Artificial Sequence
  Synthetic
gaggtaccaccaaagtccaca

SEQ ID NO: 17267 - DNA, 21 bp, Artificial Sequence
  Synthetic
agaggtaccaccaaagtccac

SEQ ID NO: 17268 - DNA, 21 bp, Artificial Sequence
  Synthetic
cttgatggatgtgataccaaa

SEQ ID NO: 17269 - DNA, 21 bp, Artificial Sequence
  Synthetic
ctgtttggtatcacatccatc

SEQ ID NO: 17270 - DNA, 21 bp, Artificial Sequence
  Synthetic
tgtttggtatcacatccatca

SEQ ID NO: 17271 - DNA, 21 bp, Artificial Sequence
  Synthetic
gtttggtatcacatccatcaa

SEQ ID NO: 17272 - DNA, 21 bp, Artificial Sequence
  Synthetic
tttggtatcacatccatcaag

SEQ ID NO: 17273 - DNA, 21 bp, Artificial Sequence
  Synthetic
ttggtatcacatccatcaagg

SEQ ID NO: 17274 - DNA, 21 bp, Artificial Sequence
  Synthetic
tgaccatacctttcccccttg

SEQ ID NO: 17275 - DNA, 21 bp, Artificial Sequence
  Synthetic
gggggatgagccagaagacct

SEQ ID NO: 17276 - DNA, 21 bp, Artificial Sequence
  Synthetic
tgggctgtaggggggatgagc

SEQ ID NO: 17277 - DNA, 21 bp, Artificial Sequence
  Synthetic
aggttgtgggctgtagggggg

SEQ ID NO: 17278 - DNA, 21 bp, Artificial Sequence
  Synthetic
atcccccctacagcccacaac

SEQ ID NO: 17279 - DNA, 21 bp, Artificial Sequence
  Synthetic
ctccaggttgtgggctgtagg

SEQ ID NO: 17280 - DNA, 21 bp, Artificial Sequence
  Synthetic
tcccccctacagcccacaacc

SEQ ID NO: 17281 - DNA, 21 bp, Artificial Sequence
  Synthetic
gctccaggttgtgggctgtag

SEQ ID NO: 17282 - DNA, 21 bp, Artificial Sequence
  Synthetic
agctccaggttgtgggctgta

SEQ ID NO: 17283 - DNA, 21 bp, Artificial Sequence
  Synthetic
cagctccaggttgtgggctgt

SEQ ID NO: 17284 - DNA, 21 bp, Artificial Sequence
  Synthetic
acagctccaggttgtgggctg

SEQ ID NO: 17285 - DNA, 21 bp, Artificial Sequence
  Synthetic
cagcccacaacctggagctgt

SEQ ID NO: 17286 - DNA, 21 bp, Artificial Sequence
  Synthetic
gcccacaacctggagctgtac

SEQ ID NO: 17287 - DNA, 21 bp, Artificial Sequence
  Synthetic
attctcgtacagctccaggtt

SEQ ID NO: 17288 - DNA, 21 bp, Artificial Sequence
  Synthetic
tgtacgagaattggctgctgt

SEQ ID NO: 17289 - DNA, 21 bp, Artificial Sequence
  Synthetic
gtacgagaattggctgctgtc

SEQ ID NO: 17290 - DNA, 21 bp, Artificial Sequence
  Synthetic
tacgagaattggctgctgtca

SEQ ID NO: 17291 - DNA, 21 bp, Artificial Sequence
  Synthetic
aattggctgctgtcagggaaa

SEQ ID NO: 17292 - DNA, 21 bp, Artificial Sequence
  Synthetic
attggctgctgtcagggaaac

SEQ ID NO: 17293 - DNA, 21 bp, Artificial Sequence
  Synthetic
ttggctgctgtcagggaaaca

SEQ ID NO: 17294 - DNA, 21 bp, Artificial Sequence
  Synthetic
gggaaacagggagacatcttt

SEQ ID NO: 17295 - DNA, 21 bp, Artificial Sequence
  Synthetic
gggagacatctttctgggtga

SEQ ID NO: 17296 - DNA, 21 bp, Artificial Sequence
  Synthetic
acaatctgatacccggtcacc

SEQ ID NO: 17297 - DNA, 21 bp, Artificial Sequence
  Synthetic
gggtatcagattgtcagcgca

SEQ ID NO: 17298 - DNA, 21 bp, Artificial Sequence
  Synthetic
tgtcagcgcattgagctcaag

SEQ ID NO: 17299 - DNA, 21 bp, Artificial Sequence
  Synthetic
atgacgaaggtatagccctgc

SEQ ID NO: 17300 - DNA, 21 bp, Artificial Sequence
  Synthetic
tacacagcatgaatccagcct

SEQ ID NO: 17301 - DNA, 21 bp, Artificial Sequence
  Synthetic
atacacagcatgaatccagcc

SEQ ID NO: 17302 - DNA, 21 bp, Artificial Sequence
  Synthetic
gtctgtaggagtatacacagc

SEQ ID NO: 17303 - DNA, 21 bp, Artificial Sequence
  Synthetic
cccaaacactaatgtgtctgt

SEQ ID NO: 17304 - DNA, 21 bp, Artificial Sequence
  Synthetic
ctcctacagacacattagtgt

SEQ ID NO: 17305 - DNA, 21 bp, Artificial Sequence
  Synthetic
ccccaaacactaatgtgtctg

SEQ ID NO: 17306 - DNA, 21 bp, Artificial Sequence
  Synthetic
tcctacagacacattagtgtt

SEQ ID NO: 17307 - DNA, 21 bp, Artificial Sequence
  Synthetic
cctacagacacattagtgttt

SEQ ID NO: 17308 - DNA, 21 bp, Artificial Sequence
  Synthetic
atcaagacagatggcaaaggg

SEQ ID NO: 17309 - DNA, 21 bp, Artificial Sequence
  Synthetic
aaagggtggggcctggtcgcc

SEQ ID NO: 17310 - DNA, 21 bp, Artificial Sequence
  Synthetic
agggtggggcctggtcgccaa

SEQ ID NO: 17311 - DNA, 21 bp, Artificial Sequence
  Synthetic
gggtggggcctggtcgccaag

SEQ ID NO: 17312 - DNA, 21 bp, Artificial Sequence
  Synthetic
cctggtcgccaagagggacat

SEQ ID NO: 17313 - DNA, 21 bp, Artificial Sequence
  Synthetic
atttccagggagaatttgtta

SEQ ID NO: 17314 - DNA, 21 bp, Artificial Sequence
  Synthetic
tactcgttaacaaattctccc

SEQ ID NO: 17315 - DNA, 21 bp, Artificial Sequence
  Synthetic
gtactcgttaacaaattctcc

SEQ ID NO: 17316 - DNA, 21 bp, Artificial Sequence
  Synthetic
gagaatttgttaacgagtacg

SEQ ID NO: 17317 - DNA, 21 bp, Artificial Sequence
  Synthetic
agaatttgttaacgagtacgt

SEQ ID NO: 17318 - DNA, 21 bp, Artificial Sequence
  Synthetic
gaatttgttaacgagtacgtt

SEQ ID NO: 17319 - DNA, 21 bp, Artificial Sequence
  Synthetic
aatttgttaacgagtacgttg

SEQ ID NO: 17320 - DNA, 21 bp, Artificial Sequence
  Synthetic
agtacgttggggagctgatcg

SEQ ID NO: 17321 - DNA, 21 bp, Artificial Sequence
  Synthetic
tacgttggggagctgatcgac

SEQ ID NO: 17322 - DNA, 21 bp, Artificial Sequence
  Synthetic
acgttggggagctgatcgacg

SEQ ID NO: 17323 - DNA, 21 bp, Artificial Sequence
  Synthetic
gttggggagctgatcgacgag

SEQ ID NO: 17324 - DNA, 21 bp, Artificial Sequence
  Synthetic
ttggggagctgatcgacgagg

SEQ ID NO: 17325 - DNA, 21 bp, Artificial Sequence
  Synthetic
atcgacgaggaggagtgcatg

SEQ ID NO: 17326 - DNA, 21 bp, Artificial Sequence
  Synthetic
cgacgaggaggagtgcatggc

SEQ ID NO: 17327 - DNA, 21 bp, Artificial Sequence
  Synthetic
tggcgagaatcaagcacgcac

SEQ ID NO: 17328 - DNA, 21 bp, Artificial Sequence
  Synthetic
gcgagaatcaagcacgcacac

SEQ ID NO: 17329 - DNA, 21 bp, Artificial Sequence
  Synthetic
gtctatagtgagcatgtagaa

SEQ ID NO: 17330 - DNA, 21 bp, Artificial Sequence
  Synthetic
accttgtctatagtgagcatg

SEQ ID NO: 17331 - DNA, 21 bp, Artificial Sequence
  Synthetic
ttccgcattaccttgtctata

SEQ ID NO: 17332 - DNA, 21 bp, Artificial Sequence
  Synthetic
gtataatagacgctggcccca

SEQ ID NO: 17333 - DNA, 21 bp, Artificial Sequence
  Synthetic
tataatagacgctggccccaa

SEQ ID NO: 17334 - DNA, 21 bp, Artificial Sequence
  Synthetic
taaatcgagagtagtttcctt

SEQ ID NO: 17335 - DNA, 21 bp, Artificial Sequence
  Synthetic
ataaatcgagagtagtttcct

SEQ ID NO: 17336 - DNA, 21 bp, Artificial Sequence
  Synthetic
aaaggaaactactctcgattt

SEQ ID NO: 17337 - DNA, 21 bp, Artificial Sequence
  Synthetic
ggcagctgtgattcataaatc

SEQ ID NO: 17338 - DNA, 21 bp, Artificial Sequence
  Synthetic
ctggcagctgtgattcataaa

SEQ ID NO: 17339 - DNA, 21 bp, Artificial Sequence
  Synthetic
atcacagctgccagcccaact

SEQ ID NO: 17340 - DNA, 21 bp, Artificial Sequence
  Synthetic
gcccaactgtgagaccctcaa

SEQ ID NO: 17341 - DNA, 21 bp, Artificial Sequence
  Synthetic
gtccacttgagggtctcacag

SEQ ID NO: 17342 - DNA, 21 bp, Artificial Sequence
  Synthetic
tgtgagaccctcaagtggaca

SEQ ID NO: 17343 - DNA, 21 bp, Artificial Sequence
  Synthetic
agaccctcaagtggacagtga

SEQ ID NO: 17344 - DNA, 21 bp, Artificial Sequence
  Synthetic
gaccctcaagtggacagtgaa

SEQ ID NO: 17345 - DNA, 21 bp, Artificial Sequence
  Synthetic
accctcaagtggacagtgaat

SEQ ID NO: 17346 - DNA, 21 bp, Artificial Sequence
  Synthetic
gtccccattcactgtccactt

SEQ ID NO: 17347 - DNA, 21 bp, Artificial Sequence
  Synthetic
gtgtccccattcactgtccac

SEQ ID NO: 17348 - DNA, 21 bp, Artificial Sequence
  Synthetic
acagtgaatggggacactcgt

SEQ ID NO: 17349 - DNA, 21 bp, Artificial Sequence
  Synthetic
acagacggcaaacaggcccac

SEQ ID NO: 17350 - DNA, 21 bp, Artificial Sequence
  Synthetic
gtccccagagcttgtacctgc

SEQ ID NO: 17351 - DNA, 21 bp, Artificial Sequence
  Synthetic
ggtccccagagcttgtacctg

SEQ ID NO: 17352 - DNA, 21 bp, Artificial Sequence
  Synthetic
ttaaaagtcagctccgtccct

SEQ ID NO: 17353 - DNA, 21 bp, Artificial Sequence
  Synthetic
gttaaaagtcagctccgtccc

SEQ ID NO: 17354 - DNA, 21 bp, Artificial Sequence
  Synthetic
agttaaaagtcagctccgtcc

SEQ ID NO: 17355 - DNA, 21 bp, Artificial Sequence
  Synthetic
ggtgcttcgtgtgctccaaag

SEQ ID NO: 17356 - DNA, 21 bp, Artificial Sequence
  Synthetic
tgcttcgtgtgctccaaaggt

SEQ ID NO: 17357 - DNA, 21 bp, Artificial Sequence
  Synthetic
ggcccctcacctttggagcac

SEQ ID NO: 17358 - DNA, 21 bp, Artificial Sequence
  Synthetic
cacccccaggcccctcacctt

SEQ ID NO: 17359 - DNA, 21 bp, Artificial Sequence
  Synthetic
caggggggagccttctgtgct

SEQ ID NO: 17360 - DNA, 21 bp, Artificial Sequence
  Synthetic
cgctgggcaggactcacagca

SEQ ID NO: 17361 - DNA, 21 bp, Artificial Sequence
  Synthetic
tcagggtggaaggccgctggg

SEQ ID NO: 17362 - DNA, 21 bp, Artificial Sequence
  Synthetic
ggcagtcagggtggaaggccg

SEQ ID NO: 17363 - DNA, 21 bp, Artificial Sequence
  Synthetic
gcggccttccaccctgactgc

SEQ ID NO: 17364 - DNA, 21 bp, Artificial Sequence
  Synthetic
tcgatgttcaggcagtcaggg

SEQ ID NO: 17365 - DNA, 21 bp, Artificial Sequence
  Synthetic
ctcgatgttcaggcagtcagg

SEQ ID NO: 17366 - DNA, 21 bp, Artificial Sequence
  Synthetic
tccaccctgactgcctgaaca

SEQ ID NO: 17367 - DNA, 21 bp, Artificial Sequence
  Synthetic
gcatctcgatgttcaggcagt

SEQ ID NO: 17368 - DNA, 21 bp, Artificial Sequence
  Synthetic
cagctggttctgcaatgactg

SEQ ID NO: 17369 - DNA, 21 bp, Artificial Sequence
  Synthetic
ggttctgcaatgactgcaggg

SEQ ID NO: 17370 - DNA, 21 bp, Artificial Sequence
  Synthetic
gttctgcaatgactgcagggc

SEQ ID NO: 17371 - DNA, 21 bp, Artificial Sequence
  Synthetic
ttcccagccctgcagtcattg

SEQ ID NO: 17372 - DNA, 21 bp, Artificial Sequence
  Synthetic
ttctgcaatgactgcagggct

SEQ ID NO: 17373 - DNA, 21 bp, Artificial Sequence
  Synthetic
aaaccccatcaagtagatggt

SEQ ID NO: 17374 - DNA, 21 bp, Artificial Sequence
  Synthetic
agtttcttaccatctacttga

SEQ ID NO: 17375 - DNA, 21 bp, Artificial Sequence
  Synthetic
tagtttcttaccatctacttg

SEQ ID NO: 17376 - DNA, 21 bp, Artificial Sequence
  Synthetic
acagcagcaatcccacataaa

SEQ ID NO: 17377 - DNA, 21 bp, Artificial Sequence
  Synthetic
agtttatgtgggattgctgct

SEQ ID NO: 17378 - DNA, 21 bp, Artificial Sequence
  Synthetic
tgggattgctgctgtgagtct

SEQ ID NO: 17379 - DNA, 21 bp, Artificial Sequence
  Synthetic
tgtgagtctgtgaaaaaaaca

SEQ ID NO: 17380 - DNA, 21 bp, Artificial Sequence
  Synthetic
aaacaaagaaatctccaggtt

SEQ ID NO: 17381 - DNA, 21 bp, Artificial Sequence
  Synthetic
ggcaagaatgcatcctgaacc

SEQ ID NO: 17382 - DNA, 21 bp, Artificial Sequence
  Synthetic
gggcaagaatgcatcctgaac

SEQ ID NO: 17383 - DNA, 21 bp, Artificial Sequence
  Synthetic
tacagtgggcaagaatgcatc

SEQ ID NO: 17384 - DNA, 21 bp, Artificial Sequence
  Synthetic
ggatgcattcttgcccactgt

SEQ ID NO: 17385 - DNA, 21 bp, Artificial Sequence
  Synthetic
accaaggcccatacagtgggc

SEQ ID NO: 17386 - DNA, 21 bp, Artificial Sequence
  Synthetic
agtcttaccaaggcccataca

SEQ ID NO: 17387 - DNA, 21 bp, Artificial Sequence
  Synthetic
ccttggtaagactttacaggt

SEQ ID NO: 17388 - DNA, 21 bp, Artificial Sequence
  Synthetic
gtcacacaaaagaactgtatg

SEQ ID NO: 17389 - DNA, 21 bp, Artificial Sequence
  Synthetic
tttgtcacacaaaagaactgt

SEQ ID NO: 17390 - DNA, 21 bp, Artificial Sequence
  Synthetic
gaaatccagtttgtcacacaa

SEQ ID NO: 17391 - DNA, 21 bp, Artificial Sequence
  Synthetic
ggacaaaccactaacgccgtg

SEQ ID NO: 17392 - DNA, 21 bp, Artificial Sequence
  Synthetic
gtttgtcctcttaatactgct

SEQ ID NO: 17393 - DNA, 21 bp, Artificial Sequence
  Synthetic
tccaattcaaagcagtattaa

SEQ ID NO: 17394 - DNA, 21 bp, Artificial Sequence
  Synthetic
tcctcttaatactgctttgaa

SEQ ID NO: 17395 - DNA, 21 bp, Artificial Sequence
  Synthetic
catccaattcaaagcagtatt

SEQ ID NO: 17396 - DNA, 21 bp, Artificial Sequence
  Synthetic
cttaatactgctttgaattgg

SEQ ID NO: 17397 - DNA, 21 bp, Artificial Sequence
  Synthetic
atactgctttgaattggatga

SEQ ID NO: 17398 - DNA, 21 bp, Artificial Sequence
  Synthetic
ctttgaattggatgaatgaat

SEQ ID NO: 17399 - DNA, 21 bp, Artificial Sequence
  Synthetic
ttgaattggatgaatgaattt

SEQ ID NO: 17400 - DNA, 21 bp, Artificial Sequence
  Synthetic
tgaatgaatttgagaagtggc

SEQ ID NO: 17401 - DNA, 21 bp, Artificial Sequence
  Synthetic
aatgaatttgagaagtggcaa

SEQ ID NO: 17402 - DNA, 21 bp, Artificial Sequence
  Synthetic
atgaatttgagaagtggcaag

SEQ ID NO: 17403 - DNA, 21 bp, Artificial Sequence
  Synthetic
ggcaagagggattaaaagatg

SEQ ID NO: 17404 - DNA, 21 bp, Artificial Sequence
  Synthetic
caagagggattaaaagatgat

SEQ ID NO: 17405 - DNA, 21 bp, Artificial Sequence
  Synthetic
gattaaaagatgatgagaagc

SEQ ID NO: 17406 - DNA, 21 bp, Artificial Sequence
  Synthetic
ttatttccccacaaaaggttt

SEQ ID NO: 17407 - DNA, 21 bp, Artificial Sequence
  Synthetic
aaggtttctgaattagcaact

SEQ ID NO: 17408 - DNA, 21 bp, Artificial Sequence
  Synthetic
gacgtttcacagttgctaatt

SEQ ID NO: 17409 - DNA, 21 bp, Artificial Sequence
  Synthetic
ttagcaactgtgaaacgtcct

SEQ ID NO: 17410 - DNA, 21 bp, Artificial Sequence
  Synthetic
tagcaactgtgaaacgtcctc

SEQ ID NO: 17411 - DNA, 21 bp, Artificial Sequence
  Synthetic
gcaactgtgaaacgtcctcag

SEQ ID NO: 17412 - DNA, 21 bp, Artificial Sequence
  Synthetic
aactgtgaaacgtcctcagga

SEQ ID NO: 17413 - DNA, 21 bp, Artificial Sequence
  Synthetic
gcagcatgtagcttctctcct

SEQ ID NO: 17414 - DNA, 21 bp, Artificial Sequence
  Synthetic
ctgcagcatgtagcttctctc

SEQ ID NO: 17415 - DNA, 21 bp, Artificial Sequence
  Synthetic
caggagagaagctacatgctg

SEQ ID NO: 17416 - DNA, 21 bp, Artificial Sequence
  Synthetic
gctacatgctgcagaggtggc

SEQ ID NO: 17417 - DNA, 21 bp, Artificial Sequence
  Synthetic
gtggtgttatgatcataggct

SEQ ID NO: 17418 - DNA, 21 bp, Artificial Sequence
  Synthetic
gatcataggctatgagatgta

SEQ ID NO: 17419 - DNA, 21 bp, Artificial Sequence
  Synthetic
agatgtatagaaatcttgctc

SEQ ID NO: 17420 - DNA, 21 bp, Artificial Sequence
  Synthetic
gatgtatagaaatcttgctca

SEQ ID NO: 17421 - DNA, 21 bp, Artificial Sequence
  Synthetic
gtatagaaatcttgctcaagg

SEQ ID NO: 17422 - DNA, 21 bp, Artificial Sequence
  Synthetic
tatagaaatcttgctcaagga

SEQ ID NO: 17423 - DNA, 21 bp, Artificial Sequence
  Synthetic
aatcttgctcaaggaaggaat

SEQ ID NO: 17424 - DNA, 21 bp, Artificial Sequence
  Synthetic
cttgctcaaggaaggaatgtg

SEQ ID NO: 17425 - DNA, 21 bp, Artificial Sequence
  Synthetic
ccgactcttcacattccttcc

SEQ ID NO: 17426 - DNA, 21 bp, Artificial Sequence
  Synthetic
tcaaggaaggaatgtgaagag

SEQ ID NO: 17427 - DNA, 21 bp, Artificial Sequence
  Synthetic
caaggaaggaatgtgaagagt

SEQ ID NO: 17428 - DNA, 21 bp, Artificial Sequence
  Synthetic
atgtgaagagtcggaaactta

SEQ ID NO: 17429 - DNA, 21 bp, Artificial Sequence
  Synthetic
cttcatcacaaacaacaaaat

SEQ ID NO: 17430 - DNA, 21 bp, Artificial Sequence
  Synthetic
atgaaggccatattctaaaaa

SEQ ID NO: 17431 - DNA, 21 bp, Artificial Sequence
  Synthetic
gcatctgctgtttctaaagct

SEQ ID NO: 17432 - DNA, 21 bp, Artificial Sequence
  Synthetic
atcgtatagaattcatagctt

SEQ ID NO: 17433 - DNA, 21 bp, Artificial Sequence
  Synthetic
agctatgaattctatacgatc

SEQ ID NO: 17434 - DNA, 21 bp, Artificial Sequence
  Synthetic
gctatgaattctatacgatca

SEQ ID NO: 17435 - DNA, 21 bp, Artificial Sequence
  Synthetic
tatgaattctatacgatcaag

SEQ ID NO: 17436 - DNA, 21 bp, Artificial Sequence
  Synthetic
atgaattctatacgatcaagg

SEQ ID NO: 17437 - DNA, 21 bp, Artificial Sequence
  Synthetic
gaattctatacgatcaaggag

SEQ ID NO: 17438 - DNA, 21 bp, Artificial Sequence
  Synthetic
taatcctcctccttgatcgta

SEQ ID NO: 17439 - DNA, 21 bp, Artificial Sequence
  Synthetic
caccacttcaaaataacctaa

SEQ ID NO: 17440 - DNA, 21 bp, Artificial Sequence
  Synthetic
ctcacactcaattaggttatt

SEQ ID NO: 17441 - DNA, 21 bp, Artificial Sequence
  Synthetic
ttcaaaataacctaattgagt

SEQ ID NO: 17442 - DNA, 21 bp, Artificial Sequence
  Synthetic
aaattaaccatacaatgatct

SEQ ID NO: 17443 - DNA, 21 bp, Artificial Sequence
  Synthetic
gaaaatttacttggatccatt

SEQ ID NO: 17444 - DNA, 21 bp, Artificial Sequence
  Synthetic
aaaatttacttggatccatta

SEQ ID NO: 17445 - DNA, 21 bp, Artificial Sequence
  Synthetic
acttggatccattaaggagtt

SEQ ID NO: 17446 - DNA, 21 bp, Artificial Sequence
  Synthetic
cttggatccattaaggagttc

SEQ ID NO: 17447 - DNA, 21 bp, Artificial Sequence
  Synthetic
aatctattcctgaactcctta

SEQ ID NO: 17448 - DNA, 21 bp, Artificial Sequence
  Synthetic
attggatttataaatctattc

SEQ ID NO: 17449 - DNA, 21 bp, Artificial Sequence
  Synthetic
agaatctgcacactgaccatt

SEQ ID NO: 17450 - DNA, 21 bp, Artificial Sequence
  Synthetic
agattctaccatggtagatgt

SEQ ID NO: 17451 - DNA, 21 bp, Artificial Sequence
  Synthetic
tcactctgacatctaccatgg

SEQ ID NO: 17452 - DNA, 21 bp, Artificial Sequence
  Synthetic
accatggtagatgtcagagtg

SEQ ID NO: 17453 - DNA, 21 bp, Artificial Sequence
  Synthetic
aaaaacgtgctcacattctct

SEQ ID NO: 17454 - DNA, 21 bp, Artificial Sequence
  Synthetic
agctaacatctcatagagaat

SEQ ID NO: 17455 - DNA, 21 bp, Artificial Sequence
  Synthetic
acattctctatgagatgttag

SEQ ID NO: 17456 - DNA, 21 bp, Artificial Sequence
  Synthetic
acatccagctaacatctcata

SEQ ID NO: 17457 - DNA, 21 bp, Artificial Sequence
  Synthetic
acacatccagctaacatctca

SEQ ID NO: 17458 - DNA, 21 bp, Artificial Sequence
  Synthetic
caaaattcttgcctccaaaac

SEQ ID NO: 17459 - DNA, 21 bp, Artificial Sequence
  Synthetic
agctaacacatattcgtgttt

SEQ ID NO: 17460 - DNA, 21 bp, Artificial Sequence
  Synthetic
cagctaacacatattcgtgtt

SEQ ID NO: 17461 - DNA, 21 bp, Artificial Sequence
  Synthetic
aaacacgaatatgtgttagct

SEQ ID NO: 17462 - DNA, 21 bp, Artificial Sequence
  Synthetic
acacgaatatgtgttagctgt

SEQ ID NO: 17463 - DNA, 21 bp, Artificial Sequence
  Synthetic
actgatagagcttgcactgaa

SEQ ID NO: 17464 - DNA, 21 bp, Artificial Sequence
  Synthetic
gtagtactgatagagcttgca

SEQ ID NO: 17465 - DNA, 21 bp, Artificial Sequence
  Synthetic
aagtgatctaagtagtactga

SEQ ID NO: 17466 - DNA, 21 bp, Artificial Sequence
  Synthetic
gatcaggtgtgggcaataata

SEQ ID NO: 17467 - DNA, 21 bp, Artificial Sequence
  Synthetic
gtgtgggcaataatagtgaag

SEQ ID NO: 17468 - DNA, 21 bp, Artificial Sequence
  Synthetic
tgtgggcaataatagtgaagg

SEQ ID NO: 17469 - DNA, 21 bp, Artificial Sequence
  Synthetic
gggcaataatagtgaaggtgg

SEQ ID NO: 17470 - DNA, 21 bp, Artificial Sequence
  Synthetic
gcaataatagtgaaggtggaa

SEQ ID NO: 17471 - DNA, 21 bp, Artificial Sequence
  Synthetic
caataatagtgaaggtggaag

SEQ ID NO: 17472 - DNA, 21 bp, Artificial Sequence
  Synthetic
ctacttaacatctgaaaatct

SEQ ID NO: 17473 - DNA, 21 bp, Artificial Sequence
  Synthetic
tctacttaacatctgaaaatc

SEQ ID NO: 17474 - DNA, 21 bp, Artificial Sequence
  Synthetic
agtccatattctacttaacat

SEQ ID NO: 17475 - DNA, 21 bp, Artificial Sequence
  Synthetic
gtctagctgcaaacaccaagg

SEQ ID NO: 17476 - DNA, 21 bp, Artificial Sequence
  Synthetic
tgtagtctagctgcaaacacc

SEQ ID NO: 17477 - DNA, 21 bp, Artificial Sequence
  Synthetic
aggcactttaccgtcaggatc

SEQ ID NO: 17478 - DNA, 21 bp, Artificial Sequence
  Synthetic
gttgacgaaagggaagggatt

SEQ ID NO: 17479 - DNA, 21 bp, Artificial Sequence
  Synthetic
tccacaggttgacgaaaggga

SEQ ID NO: 17480 - DNA, 21 bp, Artificial Sequence
  Synthetic
tcccttccctttcgtcaacct

SEQ ID NO: 17481 - DNA, 21 bp, Artificial Sequence
  Synthetic
gtccacaggttgacgaaaggg

SEQ ID NO: 17482 - DNA, 21 bp, Artificial Sequence
  Synthetic
agggtccacaggttgacgaaa

SEQ ID NO: 17483 - DNA, 21 bp, Artificial Sequence
  Synthetic
gagggtccacaggttgacgaa

SEQ ID NO: 17484 - DNA, 21 bp, Artificial Sequence
  Synthetic
tgagggtccacaggttgacga

SEQ ID NO: 17485 - DNA, 21 bp, Artificial Sequence
  Synthetic
aagctgagggtccacaggttg

SEQ ID NO: 17486 - DNA, 21 bp, Artificial Sequence
  Synthetic
aacctgtggaccctcagcttt

SEQ ID NO: 17487 - DNA, 21 bp, Artificial Sequence
  Synthetic
ttacagggattcctaaaagct

SEQ ID NO: 17488 - DNA, 21 bp, Artificial Sequence
  Synthetic
acttacagggattcctaaaag

SEQ ID NO: 17489 - DNA, 21 bp, Artificial Sequence
  Synthetic
ttcacaatatcaaagtaatcc

SEQ ID NO: 17490 - DNA, 21 bp, Artificial Sequence
  Synthetic
ttctaggattactttgatatt

SEQ ID NO: 17491 - DNA, 21 bp, Artificial Sequence
  Synthetic
taggattactttgatattgtg

SEQ ID NO: 17492 - DNA, 21 bp, Artificial Sequence
  Synthetic
tttgatattgtgaagagcccc

SEQ ID NO: 17493 - DNA, 21 bp, Artificial Sequence
  Synthetic
tcttaatggtagaaagatcca

SEQ ID NO: 17494 - DNA, 21 bp, Artificial Sequence
  Synthetic
ctcttaatggtagaaagatcc

SEQ ID NO: 17495 - DNA, 21 bp, Artificial Sequence
  Synthetic
cccatggatctttctaccatt

SEQ ID NO: 17496 - DNA, 21 bp, Artificial Sequence
  Synthetic
catggatctttctaccattaa

SEQ ID NO: 17497 - DNA, 21 bp, Artificial Sequence
  Synthetic
atggatctttctaccattaag

SEQ ID NO: 17498 - DNA, 21 bp, Artificial Sequence
  Synthetic
tgtctaacttcctcttaatgg

SEQ ID NO: 17499 - DNA, 21 bp, Artificial Sequence
  Synthetic
ccattaagaggaagttagaca

SEQ ID NO: 17500 - DNA, 21 bp, Artificial Sequence
  Synthetic
aagttagacactggacagtat

SEQ ID NO: 17501 - DNA, 21 bp, Artificial Sequence
  Synthetic
agttagacactggacagtatc

SEQ ID NO: 17502 - DNA, 21 bp, Artificial Sequence
  Synthetic
caaatatcatcgacatactgc

SEQ ID NO: 17503 - DNA, 21 bp, Artificial Sequence
  Synthetic
cggttatataaccaggcatta

SEQ ID NO: 17504 - DNA, 21 bp, Artificial Sequence
  Synthetic
caataatgcctggttatataa

SEQ ID NO: 17505 - DNA, 21 bp, Artificial Sequence
  Synthetic
aataatgcctggttatataac

SEQ ID NO: 17506 - DNA, 21 bp, Artificial Sequence
  Synthetic
gttatataaccggaaaacatc

SEQ ID NO: 17507 - DNA, 21 bp, Artificial Sequence
  Synthetic
gggtctgcgcctgccacctgt

SEQ ID NO: 17508 - DNA, 21 bp, Artificial Sequence
  Synthetic
ggtctgcgcctgccacctgtg

SEQ ID NO: 17509 - DNA, 21 bp, Artificial Sequence
  Synthetic
gtctgcgcctgccacctgtgc

SEQ ID NO: 17510 - DNA, 21 bp, Artificial Sequence
  Synthetic
tgccacctgtgcgggggccgg

SEQ ID NO: 17511 - DNA, 21 bp, Artificial Sequence
  Synthetic
catcgcacatgagctgcttgt

SEQ ID NO: 17512 - DNA, 21 bp, Artificial Sequence
  Synthetic
tcatcgcacatgagctgcttg

SEQ ID NO: 17513 - DNA, 21 bp, Artificial Sequence
  Synthetic
ccgacaagcagctcatgtgcg

SEQ ID NO: 17514 - DNA, 21 bp, Artificial Sequence
  Synthetic
gccatgtcgcactcatcgcac

SEQ ID NO: 17515 - DNA, 21 bp, Artificial Sequence
  Synthetic
atggccttccacatctactgc

SEQ ID NO: 17516 - DNA, 21 bp, Artificial Sequence
  Synthetic
ggcgggtccaggcagtagatg

SEQ ID NO: 17517 - DNA, 21 bp, Artificial Sequence
  Synthetic
gggcgggtccaggcagtagat

SEQ ID NO: 17518 - DNA, 21 bp, Artificial Sequence
  Synthetic
cgctgggaacactgctgaggg

SEQ ID NO: 17519 - DNA, 21 bp, Artificial Sequence
  Synthetic
cgcccctcagcagtgttccca

SEQ ID NO: 17520 - DNA, 21 bp, Artificial Sequence
  Synthetic
tcctcgctgggaacactgctg

SEQ ID NO: 17521 - DNA, 21 bp, Artificial Sequence
  Synthetic
cccctcagcagtgttcccagc

SEQ ID NO: 17522 - DNA, 21 bp, Artificial Sequence
  Synthetic
gtcctcgctgggaacactgct

SEQ ID NO: 17523 - DNA, 21 bp, Artificial Sequence
  Synthetic
tcgtcctcgctgggaacactg

SEQ ID NO: 17524 - DNA, 21 bp, Artificial Sequence
  Synthetic
tcagcagtgttcccagcgagg

SEQ ID NO: 17525 - DNA, 21 bp, Artificial Sequence
  Synthetic
tgttcccagcgaggacgagtg

SEQ ID NO: 17526 - DNA, 21 bp, Artificial Sequence
  Synthetic
cactcaccactcgtcctcgct

SEQ ID NO: 17527 - DNA, 21 bp, Artificial Sequence
  Synthetic
gcactcaccactcgtcctcgc

SEQ ID NO: 17528 - DNA, 21 bp, Artificial Sequence
  Synthetic
cgcactcaccactcgtcctcg

SEQ ID NO: 17529 - DNA, 21 bp, Artificial Sequence
  Synthetic
cccgacctcgcaggtactgcc

SEQ ID NO: 17530 - DNA, 21 bp, Artificial Sequence
  Synthetic
ccggcactcagggcagtacct

SEQ ID NO: 17531 - DNA, 21 bp, Artificial Sequence
  Synthetic
tcgcaggtactgccctgagtg

SEQ ID NO: 17532 - DNA, 21 bp, Artificial Sequence
  Synthetic
cgcaggtactgccctgagtgc

SEQ ID NO: 17533 - DNA, 21 bp, Artificial Sequence
  Synthetic
cgctggcatcattccggcact

SEQ ID NO: 17534 - DNA, 21 bp, Artificial Sequence
  Synthetic
aggctgaggttattgcagcac

SEQ ID NO: 17535 - DNA, 21 bp, Artificial Sequence
  Synthetic
ataacctcagcctgcccttcc

SEQ ID NO: 17536 - DNA, 21 bp, Artificial Sequence
  Synthetic
acaggttcatggaagggcagg

SEQ ID NO: 17537 - DNA, 21 bp, Artificial Sequence
  Synthetic
agggggctgacaggttcatgg

SEQ ID NO: 17538 - DNA, 21 bp, Artificial Sequence
  Synthetic
accagggggctgacaggttca

SEQ ID NO: 17539 - DNA, 21 bp, Artificial Sequence
  Synthetic
taccagggggctgacaggttc

SEQ ID NO: 17540 - DNA, 21 bp, Artificial Sequence
  Synthetic
tgaacctgtcagccccctggt

SEQ ID NO: 17541 - DNA, 21 bp, Artificial Sequence
  Synthetic
tctggtaataatgccgggcct

SEQ ID NO: 17542 - DNA, 21 bp, Artificial Sequence
  Synthetic
atctggtaataatgccgggcc

SEQ ID NO: 17543 - DNA, 21 bp, Artificial Sequence
  Synthetic
cttgataatctggtaataatg

SEQ ID NO: 17544 - DNA, 21 bp, Artificial Sequence
  Synthetic
cggcattattaccagattatc

SEQ ID NO: 17545 - DNA, 21 bp, Artificial Sequence
  Synthetic
taccagattatcaagaggccc

SEQ ID NO: 17546 - DNA, 21 bp, Artificial Sequence
  Synthetic
gcccatggacctgtcaatcat

SEQ ID NO: 17547 - DNA, 21 bp, Artificial Sequence
  Synthetic
ctccggatgattgacaggtcc

SEQ ID NO: 17548 - DNA, 21 bp, Artificial Sequence
  Synthetic
cccatggacctgtcaatcatc

SEQ ID NO: 17549 - DNA, 21 bp, Artificial Sequence
  Synthetic
catggacctgtcaatcatccg

SEQ ID NO: 17550 - DNA, 21 bp, Artificial Sequence
  Synthetic
atggacctgtcaatcatccgg

SEQ ID NO: 17551 - DNA, 21 bp, Artificial Sequence
  Synthetic
atcatccggaggaagctgcaa

SEQ ID NO: 17552 - DNA, 21 bp, Artificial Sequence
  Synthetic
atccggaggaagctgcaaaag

SEQ ID NO: 17553 - DNA, 21 bp, Artificial Sequence
  Synthetic
acccagctcactataccaccc

SEQ ID NO: 17554 - DNA, 21 bp, Artificial Sequence
  Synthetic
cctctggggtggtatagtgag

SEQ ID NO: 17555 - DNA, 21 bp, Artificial Sequence
  Synthetic
ccagctcactataccacccca

SEQ ID NO: 17556 - DNA, 21 bp, Artificial Sequence
  Synthetic
cagctcactataccaccccag

SEQ ID NO: 17557 - DNA, 21 bp, Artificial Sequence
  Synthetic
cacctcctctggggtggtata

SEQ ID NO: 17558 - DNA, 21 bp, Artificial Sequence
  Synthetic
cacatctgataccacctcctc

SEQ ID NO: 17559 - DNA, 21 bp, Artificial Sequence
  Synthetic
gcacatctgataccacctcct

SEQ ID NO: 17560 - DNA, 21 bp, Artificial Sequence
  Synthetic
atcagatgtgcgcctcatgtt

SEQ ID NO: 17561 - DNA, 21 bp, Artificial Sequence
  Synthetic
tcagatgtgcgcctcatgttc

SEQ ID NO: 17562 - DNA, 21 bp, Artificial Sequence
  Synthetic
aacttagcacagttccagaac

SEQ ID NO: 17563 - DNA, 21 bp, Artificial Sequence
  Synthetic
taattgaacttagcacagttc

SEQ ID NO: 17564 - DNA, 21 bp, Artificial Sequence
  Synthetic
aaacaggcaagacatacataa

SEQ ID NO: 17565 - DNA, 21 bp, Artificial Sequence
  Synthetic
tcctcccccatcagcctgact

SEQ ID NO: 17566 - DNA, 21 bp, Artificial Sequence
  Synthetic
atcagcctgactccgaggttg

SEQ ID NO: 17567 - DNA, 21 bp, Artificial Sequence
  Synthetic
agcggccagcctctgcaacct

SEQ ID NO: 17568 - DNA, 21 bp, Artificial Sequence
  Synthetic
cagcggccagcctctgcaacc

SEQ ID NO: 17569 - DNA, 21 bp, Artificial Sequence
  Synthetic
ccgccattgaggcaaacagca

SEQ ID NO: 17570 - DNA, 21 bp, Artificial Sequence
  Synthetic
tctgtgctgtttgcctcaatg

SEQ ID NO: 17571 - DNA, 21 bp, Artificial Sequence
  Synthetic
ctgtgctgtttgcctcaatgg

SEQ ID NO: 17572 - DNA, 21 bp, Artificial Sequence
  Synthetic
gtgctgtttgcctcaatggcg

SEQ ID NO: 17573 - DNA, 21 bp, Artificial Sequence
  Synthetic
cagcacagtaactctccgcca

SEQ ID NO: 17574 - DNA, 21 bp, Artificial Sequence
  Synthetic
ggcaggagaggtggaacactt

SEQ ID NO: 17575 - DNA, 21 bp, Artificial Sequence
  Synthetic
tggcaggagaggtggaacact

SEQ ID NO: 17576 - DNA, 21 bp, Artificial Sequence
  Synthetic
gctggcacatggcaggagagg

SEQ ID NO: 17577 - DNA, 21 bp, Artificial Sequence
  Synthetic
ggctggcacatggcaggagag

SEQ ID NO: 17578 - DNA, 21 bp, Artificial Sequence
  Synthetic
agcaaggctggcacatggcag

SEQ ID NO: 17579 - DNA, 21 bp, Artificial Sequence
  Synthetic
tgagcaaggctggcacatggc

SEQ ID NO: 17580 - DNA, 21 bp, Artificial Sequence
  Synthetic
ctgagcaaggctggcacatgg

SEQ ID NO: 17581 - DNA, 21 bp, Artificial Sequence
  Synthetic
tgccagccttgctcagcttcc

SEQ ID NO: 17582 - DNA, 21 bp, Artificial Sequence
  Synthetic
agccttgctcagcttcccagg

SEQ ID NO: 17583 - DNA, 21 bp, Artificial Sequence
  Synthetic
ggcatgactcaccctgggaag

SEQ ID NO: 17584 - DNA, 21 bp, Artificial Sequence
  Synthetic
tggactggcatgactcaccct

SEQ ID NO: 17585 - DNA, 21 bp, Artificial Sequence
  Synthetic
cacctgcccctgcaggggaga

SEQ ID NO: 17586 - DNA, 21 bp, Artificial Sequence
  Synthetic
attagagaggcgtgtcaaggc

SEQ ID NO: 17587 - DNA, 21 bp, Artificial Sequence
  Synthetic
agagaggcgtgtcaaggcctg

SEQ ID NO: 17588 - DNA, 21 bp, Artificial Sequence
  Synthetic
gagaggcgtgtcaaggcctga

SEQ ID NO: 17589 - DNA, 21 bp, Artificial Sequence
  Synthetic
ggcctgaaggagcccatgtgg

SEQ ID NO: 17590 - DNA, 21 bp, Artificial Sequence
  Synthetic
cccatgtggttggataaaatc

SEQ ID NO: 17591 - DNA, 21 bp, Artificial Sequence
  Synthetic
ttggataaaatcaagaaaagg

SEQ ID NO: 17592 - DNA, 21 bp, Artificial Sequence
  Synthetic
ataaaatcaagaaaaggctga

SEQ ID NO: 17593 - DNA, 21 bp, Artificial Sequence
  Synthetic
aatgagcacggttacccccaa

SEQ ID NO: 17594 - DNA, 21 bp, Artificial Sequence
  Synthetic
atgagcacggttacccccaag

SEQ ID NO: 17595 - DNA, 21 bp, Artificial Sequence
  Synthetic
gagcacggttacccccaagtg

SEQ ID NO: 17596 - DNA, 21 bp, Artificial Sequence
  Synthetic
agcacggttacccccaagtgg

SEQ ID NO: 17597 - DNA, 21 bp, Artificial Sequence
  Synthetic
cttgtacaaacccctccactt

SEQ ID NO: 17598 - DNA, 21 bp, Artificial Sequence
  Synthetic
tcttgtacaaacccctccact

SEQ ID NO: 17599 - DNA, 21 bp, Artificial Sequence
  Synthetic
gtcttgtacaaacccctccac

SEQ ID NO: 17600 - DNA, 21 bp, Artificial Sequence
  Synthetic
caagacatgcgcctcatcttc

SEQ ID NO: 17601 - DNA, 21 bp, Artificial Sequence
  Synthetic
gcgcctcatcttccagaacca

SEQ ID NO: 17602 - DNA, 21 bp, Artificial Sequence
  Synthetic
gaggccctgtggttctggaag

SEQ ID NO: 17603 - DNA, 21 bp, Artificial Sequence
  Synthetic
ttgtaagaggccctgtggttc

SEQ ID NO: 17604 - DNA, 21 bp, Artificial Sequence
  Synthetic
cttgtaagaggccctgtggtt

SEQ ID NO: 17605 - DNA, 21 bp, Artificial Sequence
  Synthetic
aggaagagccacctaccttgt

SEQ ID NO: 17606 - DNA, 21 bp, Artificial Sequence
  Synthetic
atttggccaaaatccttatac

SEQ ID NO: 17607 - DNA, 21 bp, Artificial Sequence
  Synthetic
catttggccaaaatccttata

SEQ ID NO: 17608 - DNA, 21 bp, Artificial Sequence
  Synthetic
cttggatgagtgtgaggtgtg

SEQ ID NO: 17609 - DNA, 21 bp, Artificial Sequence
  Synthetic
ttggatgagtgtgaggtgtgc

SEQ ID NO: 17610 - DNA, 21 bp, Artificial Sequence
  Synthetic
atgagtgtgaggtgtgccggg

SEQ ID NO: 17611 - DNA, 21 bp, Artificial Sequence
  Synthetic
tgagtgtgaggtgtgccggga

SEQ ID NO: 17612 - DNA, 21 bp, Artificial Sequence
  Synthetic
agtgtgaggtgtgccgggacg

SEQ ID NO: 17613 - DNA, 21 bp, Artificial Sequence
  Synthetic
gtgtgaggtgtgccgggacgg

SEQ ID NO: 17614 - DNA, 21 bp, Artificial Sequence
  Synthetic
tgtgaggtgtgccgggacgga

SEQ ID NO: 17615 - DNA, 21 bp, Artificial Sequence
  Synthetic
gtgaggtgtgccgggacggag

SEQ ID NO: 17616 - DNA, 21 bp, Artificial Sequence
  Synthetic
gttctgttgcgacacttgttc

SEQ ID NO: 17617 - DNA, 21 bp, Artificial Sequence
  Synthetic
actcttgaacaagtgtcgcaa

SEQ ID NO: 17618 - DNA, 21 bp, Artificial Sequence
  Synthetic
acacttgttcaagagtcttcc

SEQ ID NO: 17619 - DNA, 21 bp, Artificial Sequence
  Synthetic
acttgttcaagagtcttccat

SEQ ID NO: 17620 - DNA, 21 bp, Artificial Sequence
  Synthetic
ggcagtcctcatggaagactc

SEQ ID NO: 17621 - DNA, 21 bp, Artificial Sequence
  Synthetic
ggtgggatgtggcagtcctca

SEQ ID NO: 17622 - DNA, 21 bp, Artificial Sequence
  Synthetic
aggtgggatgtggcagtcctc

SEQ ID NO: 17623 - DNA, 21 bp, Artificial Sequence
  Synthetic
gaggactgccacatcccacct

SEQ ID NO: 17624 - DNA, 21 bp, Artificial Sequence
  Synthetic
aggactgccacatcccacctg

SEQ ID NO: 17625 - DNA, 21 bp, Artificial Sequence
  Synthetic
gccacatcccacctgtggaaa

SEQ ID NO: 17626 - DNA, 21 bp, Artificial Sequence
  Synthetic
cacatcccacctgtggaaagt

SEQ ID NO: 17627 - DNA, 21 bp, Artificial Sequence
  Synthetic
ttacttctcactttccacagg

SEQ ID NO: 17628 - DNA, 21 bp, Artificial Sequence
  Synthetic
cttacttctcactttccacag

SEQ ID NO: 17629 - DNA, 21 bp, Artificial Sequence
  Synthetic
tgtccaatctctcaggacccc

SEQ ID NO: 17630 - DNA, 21 bp, Artificial Sequence
  Synthetic
gtccaatctctcaggaccccg

SEQ ID NO: 17631 - DNA, 21 bp, Artificial Sequence
  Synthetic
gatgcaattccacggggtcct

SEQ ID NO: 17632 - DNA, 21 bp, Artificial Sequence
  Synthetic
aagatgcaattccacggggtc

SEQ ID NO: 17633 - DNA, 21 bp, Artificial Sequence
  Synthetic
cctgcagaagatgcaattcca

SEQ ID NO: 17634 - DNA, 21 bp, Artificial Sequence
  Synthetic
tcctgcagaagatgcaattcc

SEQ ID NO: 17635 - DNA, 21 bp, Artificial Sequence
  Synthetic
cccgtggaattgcatcttctg

SEQ ID NO: 17636 - DNA, 21 bp, Artificial Sequence
  Synthetic
tggaattgcatcttctgcagg

SEQ ID NO: 17637 - DNA, 21 bp, Artificial Sequence
  Synthetic
aattgcatcttctgcaggatg

SEQ ID NO: 17638 - DNA, 21 bp, Artificial Sequence
  Synthetic
attgcatcttctgcaggatga

SEQ ID NO: 17639 - DNA, 21 bp, Artificial Sequence
  Synthetic
cccggagactccttcatcctg

SEQ ID NO: 17640 - DNA, 21 bp, Artificial Sequence
  Synthetic
agcaactggaagaaacagtgt

SEQ ID NO: 17641 - DNA, 21 bp, Artificial Sequence
  Synthetic
gcaactggaagaaacagtgta

SEQ ID NO: 17642 - DNA, 21 bp, Artificial Sequence
  Synthetic
aagaaacagtgtaaggaacta

SEQ ID NO: 17643 - DNA, 21 bp, Artificial Sequence
  Synthetic
aaatggttcagaatcttcaca

SEQ ID NO: 17644 - DNA, 21 bp, Artificial Sequence
  Synthetic
caacaggttgtctaaatggtt

SEQ ID NO: 17645 - DNA, 21 bp, Artificial Sequence
  Synthetic
ttagacaacctgttgatttgg

SEQ ID NO: 17646 - DNA, 21 bp, Artificial Sequence
  Synthetic
tgtgtttaaaacctaggacta

SEQ ID NO: 17647 - DNA, 21 bp, Artificial Sequence
  Synthetic
agagatattatagatacccca

SEQ ID NO: 17648 - DNA, 21 bp, Artificial Sequence
  Synthetic
ttatagataccccaatggatt

SEQ ID NO: 17649 - DNA, 21 bp, Artificial Sequence
  Synthetic
tatagataccccaatggattt

SEQ ID NO: 17650 - DNA, 21 bp, Artificial Sequence
  Synthetic
ccttactgttccaaaatccat

SEQ ID NO: 17651 - DNA, 21 bp, Artificial Sequence
  Synthetic
cccttactgttccaaaatcca

SEQ ID NO: 17652 - DNA, 21 bp, Artificial Sequence
  Synthetic
acagtaagggaaactctagat

SEQ ID NO: 17653 - DNA, 21 bp, Artificial Sequence
  Synthetic
cagtaagggaaactctagatg

SEQ ID NO: 17654 - DNA, 21 bp, Artificial Sequence
  Synthetic
agtaagggaaactctagatgc

SEQ ID NO: 17655 - DNA, 21 bp, Artificial Sequence
  Synthetic
gctgtcataatttcccgcatc

SEQ ID NO: 17656 - DNA, 21 bp, Artificial Sequence
  Synthetic
gcgggaaattatgacagccct

SEQ ID NO: 17657 - DNA, 21 bp, Artificial Sequence
  Synthetic
cgggaaattatgacagccctt

SEQ ID NO: 17658 - DNA, 21 bp, Artificial Sequence
  Synthetic
ggatgtctttgcaaaactcca

SEQ ID NO: 17659 - DNA, 21 bp, Artificial Sequence
  Synthetic
atcaagagatgaagaatgtga

SEQ ID NO: 17660 - DNA, 21 bp, Artificial Sequence
  Synthetic
atcagtggtatagatcaactt

SEQ ID NO: 17661 - DNA, 21 bp, Artificial Sequence
  Synthetic
tcgggtatgtacacaaatcaa

SEQ ID NO: 17662 - DNA, 21 bp, Artificial Sequence
  Synthetic
cctgttgatttgtgtacatac

SEQ ID NO: 17663 - DNA, 21 bp, Artificial Sequence
  Synthetic
aagctactacagtacagtact

SEQ ID NO: 17664 - DNA, 21 bp, Artificial Sequence
  Synthetic
ttcgaattgtgtaaagatcgg

SEQ ID NO: 17665 - DNA, 21 bp, Artificial Sequence
  Synthetic
tccaaccgatctttacacaat

SEQ ID NO: 17666 - DNA, 21 bp, Artificial Sequence
  Synthetic
accgatctttacacaattcga

SEQ ID NO: 17667 - DNA, 21 bp, Artificial Sequence
  Synthetic
aaatcgattaacaagtctcat

SEQ ID NO: 17668 - DNA, 21 bp, Artificial Sequence
  Synthetic
aaggaggctgtctgcgttagt

SEQ ID NO: 17669 - DNA, 21 bp, Artificial Sequence
  Synthetic
aggaggctgtctgcgttagtt

SEQ ID NO: 17670 - DNA, 21 bp, Artificial Sequence
  Synthetic
ggaggctgtctgcgttagttt

SEQ ID NO: 17671 - DNA, 21 bp, Artificial Sequence
  Synthetic
tagtttgggaagtcagatata

SEQ ID NO: 17672 - DNA, 21 bp, Artificial Sequence
  Synthetic
cagatatatagaacataatgc

SEQ ID NO: 17673 - DNA, 21 bp, Artificial Sequence
  Synthetic
aacataatgccagaacattta

SEQ ID NO: 17674 - DNA, 21 bp, Artificial Sequence
  Synthetic
atgccagaacatttaacgaac

SEQ ID NO: 17675 - DNA, 21 bp, Artificial Sequence
  Synthetic
gccagaacatttaacgaacct

SEQ ID NO: 17676 - DNA, 21 bp, Artificial Sequence
  Synthetic
taaaaatgcacagaaggattc

SEQ ID NO: 17677 - DNA, 21 bp, Artificial Sequence
  Synthetic
gtaaacagcagatagatgtcc

SEQ ID NO: 17678 - DNA, 21 bp, Artificial Sequence
  Synthetic
cagtaaacagcagatagatgt

SEQ ID NO: 17679 - DNA, 21 bp, Artificial Sequence
  Synthetic
tgtttactgtgtagcatttga

SEQ ID NO: 17680 - DNA, 21 bp, Artificial Sequence
  Synthetic
actgtgtagcatttgatagga

SEQ ID NO: 17681 - DNA, 21 bp, Artificial Sequence
  Synthetic
agcatttgataggacaggaca

SEQ ID NO: 17682 - DNA, 21 bp, Artificial Sequence
  Synthetic
acaggacatagaatctttaca

SEQ ID NO: 17683 - DNA, 21 bp, Artificial Sequence
  Synthetic
ccaaacagtcatctgaaccct

SEQ ID NO: 17684 - DNA, 21 bp, Artificial Sequence
  Synthetic
aaatctttaccaaacagtcat

SEQ ID NO: 17685 - DNA, 21 bp, Artificial Sequence
  Synthetic
tggccgcttgttatctacatt

SEQ ID NO: 17686 - DNA, 21 bp, Artificial Sequence
  Synthetic
ctacattaagaggtcattctg

SEQ ID NO: 17687 - DNA, 21 bp, Artificial Sequence
  Synthetic
ctgccatatctgaaatttctg

SEQ ID NO: 17688 - DNA, 21 bp, Artificial Sequence
  Synthetic
tttcagatatggcagtaaact

SEQ ID NO: 17689 - DNA, 21 bp, Artificial Sequence
  Synthetic
tctcatagtttactgccatat

SEQ ID NO: 17690 - DNA, 21 bp, Artificial Sequence
  Synthetic
tcagatatggcagtaaactat

SEQ ID NO: 17691 - DNA, 21 bp, Artificial Sequence
  Synthetic
tatgagaatacaatgattgct

SEQ ID NO: 17692 - DNA, 21 bp, Artificial Sequence
  Synthetic
atgagaatacaatgattgctg

SEQ ID NO: 17693 - DNA, 21 bp, Artificial Sequence
  Synthetic
tgagaatacaatgattgctgc

SEQ ID NO: 17694 - DNA, 21 bp, Artificial Sequence
  Synthetic
gagaatacaatgattgctgcg

SEQ ID NO: 17695 - DNA, 21 bp, Artificial Sequence
  Synthetic
ggggagctgtgataaaattat

SEQ ID NO: 17696 - DNA, 21 bp, Artificial Sequence
  Synthetic
gtgccccagttgctgtgctcc

SEQ ID NO: 17697 - DNA, 21 bp, Artificial Sequence
  Synthetic
gtgtccttggagcacagcaac

SEQ ID NO: 17698 - DNA, 21 bp, Artificial Sequence
  Synthetic
tgtgtccttggagcacagcaa

SEQ ID NO: 17699 - DNA, 21 bp, Artificial Sequence
  Synthetic
ttgctgtgctccaaggacaca

SEQ ID NO: 17700 - DNA, 21 bp, Artificial Sequence
  Synthetic
gtaattgatcctgtgtgtcct

SEQ ID NO: 17701 - DNA, 21 bp, Artificial Sequence
  Synthetic
tgtaattgatcctgtgtgtcc

SEQ ID NO: 17702 - DNA, 21 bp, Artificial Sequence
  Synthetic
atctttgagagcctttggcca

SEQ ID NO: 17703 - DNA, 21 bp, Artificial Sequence
  Synthetic
cagtggaaaccatgtatcttt

SEQ ID NO: 17704 - DNA, 21 bp, Artificial Sequence
  Synthetic
accagtggaaaccatgtatct

SEQ ID NO: 17705 - DNA, 21 bp, Artificial Sequence
  Synthetic
acatggtttccactggtgctg

SEQ ID NO: 17706 - DNA, 21 bp, Artificial Sequence
  Synthetic
catggtttccactggtgctga

SEQ ID NO: 17707 - DNA, 21 bp, Artificial Sequence
  Synthetic
aaactgtcccatcagcaccag

SEQ ID NO: 17708 - DNA, 21 bp, Artificial Sequence
  Synthetic
caaactgtcccatcagcacca

SEQ ID NO: 17709 - DNA, 21 bp, Artificial Sequence
  Synthetic
gaaattacctaccattaagtt

SEQ ID NO: 17710 - DNA, 21 bp, Artificial Sequence
  Synthetic
gttaaataaagggacatgctg

SEQ ID NO: 17711 - DNA, 21 bp, Artificial Sequence
  Synthetic
catgctgatgaagtatttgtt

SEQ ID NO: 17712 - DNA, 21 bp, Artificial Sequence
  Synthetic
atgctgatgaagtatttgttc

SEQ ID NO: 17713 - DNA, 21 bp, Artificial Sequence
  Synthetic
ggaatcaaagggatgtgtctc

SEQ ID NO: 17714 - DNA, 21 bp, Artificial Sequence
  Synthetic
ggagacacatccctttgattc

SEQ ID NO: 17715 - DNA, 21 bp, Artificial Sequence
  Synthetic
ataacataattctggaatcaa

SEQ ID NO: 17716 - DNA, 21 bp, Artificial Sequence
  Synthetic
gataacataattctggaatca

SEQ ID NO: 17717 - DNA, 21 bp, Artificial Sequence
  Synthetic
attccagaattatgttatctg

SEQ ID NO: 17718 - DNA, 21 bp, Artificial Sequence
  Synthetic
gtcctgcagataacataattc

SEQ ID NO: 17719 - DNA, 21 bp, Artificial Sequence
  Synthetic
tgtcctgcagataacataatt

SEQ ID NO: 17720 - DNA, 21 bp, Artificial Sequence
  Synthetic
acatgatggcagcatatttat

SEQ ID NO: 17721 - DNA, 21 bp, Artificial Sequence
  Synthetic
catgatggcagcatatttata

SEQ ID NO: 17722 - DNA, 21 bp, Artificial Sequence
  Synthetic
ttgaagcacccgaaaaaatcg

SEQ ID NO: 17723 - DNA, 21 bp, Artificial Sequence
  Synthetic
cacccgaaaaaatcgcagaac

SEQ ID NO: 17724 - DNA, 21 bp, Artificial Sequence
  Synthetic
ccgatcaccattgttacaaaa

SEQ ID NO: 17725 - DNA, 21 bp, Artificial Sequence
  Synthetic
tttaaggttcctaagtggtag

SEQ ID NO: 17726 - DNA, 21 bp, Artificial Sequence
  Synthetic
ggttcctaagtggtagcagag

SEQ ID NO: 17727 - DNA, 21 bp, Artificial Sequence
  Synthetic
gttcctaagtggtagcagaga

SEQ ID NO: 17728 - DNA, 21 bp, Artificial Sequence
  Synthetic
gttccatctctgctaccactt

SEQ ID NO: 17729 - DNA, 21 bp, Artificial Sequence
  Synthetic
tgttccatctctgctaccact

SEQ ID NO: 17730 - DNA, 21 bp, Artificial Sequence
  Synthetic
tggtagcagagatggaacagc

SEQ ID NO: 17731 - DNA, 21 bp, Artificial Sequence
  Synthetic
cagagatggaacagcacggat

SEQ ID NO: 17732 - DNA, 21 bp, Artificial Sequence
  Synthetic
agagatggaacagcacggatt

SEQ ID NO: 17733 - DNA, 21 bp, Artificial Sequence
  Synthetic
ttggtgaagagtgcagggcag

SEQ ID NO: 17734 - DNA, 21 bp, Artificial Sequence
  Synthetic
atgtatttataaagtgccacc

SEQ ID NO: 17735 - DNA, 21 bp, Artificial Sequence
  Synthetic
ttggtggcactttataaatac

SEQ ID NO: 17736 - DNA, 21 bp, Artificial Sequence
  Synthetic
tggcactttataaatacatga

SEQ ID NO: 17737 - DNA, 21 bp, Artificial Sequence
  Synthetic
actttataaatacatgaaaga

SEQ ID NO: 17738 - DNA, 21 bp, Artificial Sequence
  Synthetic
ctttataaatacatgaaagaa

SEQ ID NO: 17739 - DNA, 21 bp, Artificial Sequence
  Synthetic
tgaaagaaaggaaaacgccga

SEQ ID NO: 17740 - DNA, 21 bp, Artificial Sequence
  Synthetic
agaaaggaaaacgccgataga

SEQ ID NO: 17741 - DNA, 21 bp, Artificial Sequence
  Synthetic
tcactctgtttaaaacctaaa

SEQ ID NO: 17742 - DNA, 21 bp, Artificial Sequence
  Synthetic
tgtccctctaacagttaacct

SEQ ID NO: 17743 - DNA, 21 bp, Artificial Sequence
  Synthetic
atgtttcaagctgctcaaaaa

SEQ ID NO: 17744 - DNA, 21 bp, Artificial Sequence
  Synthetic
tgtttcaagctgctcaaaaac

SEQ ID NO: 17745 - DNA, 21 bp, Artificial Sequence
  Synthetic
gtttcaagctgctcaaaaact

SEQ ID NO: 17746 - DNA, 21 bp, Artificial Sequence
  Synthetic
ttcaagctgctcaaaaactgg

SEQ ID NO: 17747 - DNA, 21 bp, Artificial Sequence
  Synthetic
ctgctcaaaaactgggaggat

SEQ ID NO: 17748 - DNA, 21 bp, Artificial Sequence
  Synthetic
tgtttcatatcctcccagttt

SEQ ID NO: 17749 - DNA, 21 bp, Artificial Sequence
  Synthetic
ccactgacggcgggctgttat

SEQ ID NO: 17750 - DNA, 21 bp, Artificial Sequence
  Synthetic
tcagataacagcccgccgtca

SEQ ID NO: 17751 - DNA, 21 bp, Artificial Sequence
  Synthetic
cagataacagcccgccgtcag

SEQ ID NO: 17752 - DNA, 21 bp, Artificial Sequence
  Synthetic
ataaatatgtttccactgacg

SEQ ID NO: 17753 - DNA, 21 bp, Artificial Sequence
  Synthetic
gtcagtggaaacatatttatg

SEQ ID NO: 17754 - DNA, 21 bp, Artificial Sequence
  Synthetic
atgatgaattaggcggtaatc

SEQ ID NO: 17755 - DNA, 21 bp, Artificial Sequence
  Synthetic
tgatgaattaggcggtaatcc

SEQ ID NO: 17756 - DNA, 21 bp, Artificial Sequence
  Synthetic
gatgaattaggcggtaatcct

SEQ ID NO: 17757 - DNA, 21 bp, Artificial Sequence
  Synthetic
aagtggcagcgctggtgctcc

SEQ ID NO: 17758 - DNA, 21 bp, Artificial Sequence
  Synthetic
ccacttgtacccgcagacatt

SEQ ID NO: 17759 - DNA, 21 bp, Artificial Sequence
  Synthetic
ttcttacctttcataatgtct

SEQ ID NO: 17760 - DNA, 21 bp, Artificial Sequence
  Synthetic
cccgcagacattatgaaaggt

SEQ ID NO: 17761 - DNA, 21 bp, Artificial Sequence
  Synthetic
tttaataaatctttcatatgg

SEQ ID NO: 17762 - DNA, 21 bp, Artificial Sequence
  Synthetic
ggagcgggaggaggagcagga

SEQ ID NO: 17763 - DNA, 21 bp, Artificial Sequence
  Synthetic
gagcgggaggaggagcaggag

SEQ ID NO: 17764 - DNA, 21 bp, Artificial Sequence
  Synthetic
agcgggaggaggagcaggagc

SEQ ID NO: 17765 - DNA, 21 bp, Artificial Sequence
  Synthetic
cgggaggaggagcaggagcgg

SEQ ID NO: 17766 - DNA, 21 bp, Artificial Sequence
  Synthetic
gggaggaggagcaggagcggg

SEQ ID NO: 17767 - DNA, 21 bp, Artificial Sequence
  Synthetic
gaggaggagcaggagcgggag

SEQ ID NO: 17768 - DNA, 21 bp, Artificial Sequence
  Synthetic
aggaggagcaggagcgggagg

SEQ ID NO: 17769 - DNA, 21 bp, Artificial Sequence
  Synthetic
atgaacttgtagaggctgacc

SEQ ID NO: 17770 - DNA, 21 bp, Artificial Sequence
  Synthetic
catgaacttgtagaggctgac

SEQ ID NO: 17771 - DNA, 21 bp, Artificial Sequence
  Synthetic
ctggtcagcctctacaagttc

SEQ ID NO: 17772 - DNA, 21 bp, Artificial Sequence
  Synthetic
gtcagcctctacaagttcatg

SEQ ID NO: 17773 - DNA, 21 bp, Artificial Sequence
  Synthetic
tcagcctctacaagttcatga

SEQ ID NO: 17774 - DNA, 21 bp, Artificial Sequence
  Synthetic
tgtcgctccttcatgaacttg

SEQ ID NO: 17775 - DNA, 21 bp, Artificial Sequence
  Synthetic
atgggcgtgtgtcgctccttc

SEQ ID NO: 17776 - DNA, 21 bp, Artificial Sequence
  Synthetic
tgaaggagcgacacacgccca

SEQ ID NO: 17777 - DNA, 21 bp, Artificial Sequence
  Synthetic
aaggagcgacacacgcccatc

SEQ ID NO: 17778 - DNA, 21 bp, Artificial Sequence
  Synthetic
ggagcgacacacgcccatcga

SEQ ID NO: 17779 - DNA, 21 bp, Artificial Sequence
  Synthetic
ccgagatggggcaccctctcg

SEQ ID NO: 17780 - DNA, 21 bp, Artificial Sequence
  Synthetic
gtgccccatctcggcttcaag

SEQ ID NO: 17781 - DNA, 21 bp, Artificial Sequence
  Synthetic
gcactctgcttgaagccgaga

SEQ ID NO: 17782 - DNA, 21 bp, Artificial Sequence
  Synthetic
cgcactctgcttgaagccgag

SEQ ID NO: 17783 - DNA, 21 bp, Artificial Sequence
  Synthetic
agggacgcactctgcttgaag

SEQ ID NO: 17784 - DNA, 21 bp, Artificial Sequence
  Synthetic
caccccagggacgcactctgc

SEQ ID NO: 17785 - DNA, 21 bp, Artificial Sequence
  Synthetic
cttctctcccccagttaacct

SEQ ID NO: 17786 - DNA, 21 bp, Artificial Sequence
  Synthetic
ttctctcccccagttaacctg

SEQ ID NO: 17787 - DNA, 21 bp, Artificial Sequence
  Synthetic
tagatcttccacaggttaact

SEQ ID NO: 17788 - DNA, 21 bp, Artificial Sequence
  Synthetic
gtagatcttccacaggttaac

SEQ ID NO: 17789 - DNA, 21 bp, Artificial Sequence
  Synthetic
tgtagatcttccacaggttaa

SEQ ID NO: 17790 - DNA, 21 bp, Artificial Sequence
  Synthetic
ctgtggaagatctacaaagca

SEQ ID NO: 17791 - DNA, 21 bp, Artificial Sequence
  Synthetic
tgtggaagatctacaaagcag

SEQ ID NO: 17792 - DNA, 21 bp, Artificial Sequence
  Synthetic
tggaagatctacaaagcagtg

SEQ ID NO: 17793 - DNA, 21 bp, Artificial Sequence
  Synthetic
atctacaaagcagtggagaag

SEQ ID NO: 17794 - DNA, 21 bp, Artificial Sequence
  Synthetic
tctacaaagcagtggagaagc

SEQ ID NO: 17795 - DNA, 21 bp, Artificial Sequence
  Synthetic
ctacaaagcagtggagaagct

SEQ ID NO: 17796 - DNA, 21 bp, Artificial Sequence
  Synthetic
cagtggagaagctgggggcct

SEQ ID NO: 17797 - DNA, 21 bp, Artificial Sequence
  Synthetic
gctgggggcctatgagctggt

SEQ ID NO: 17798 - DNA, 21 bp, Artificial Sequence
  Synthetic
acgaggtgcccttgcaggtga

SEQ ID NO: 17799 - DNA, 21 bp, Artificial Sequence
  Synthetic
gcaggtgaccgggcgccgcct

SEQ ID NO: 17800 - DNA, 21 bp, Artificial Sequence
  Synthetic
caggtgaccgggcgccgcctc

SEQ ID NO: 17801 - DNA, 21 bp, Artificial Sequence
  Synthetic
gtgaccgggcgccgcctctgg

SEQ ID NO: 17802 - DNA, 21 bp, Artificial Sequence
  Synthetic
gcctctggaagaacgtgtacg

SEQ ID NO: 17803 - DNA, 21 bp, Artificial Sequence
  Synthetic
agctcgtcgtacacgttcttc

SEQ ID NO: 17804 - DNA, 21 bp, Artificial Sequence
  Synthetic
tggaagaacgtgtacgacgag

SEQ ID NO: 17805 - DNA, 21 bp, Artificial Sequence
  Synthetic
ggaagaacgtgtacgacgagc

SEQ ID NO: 17806 - DNA, 21 bp, Artificial Sequence
  Synthetic
gaagaacgtgtacgacgagct

SEQ ID NO: 17807 - DNA, 21 bp, Artificial Sequence
  Synthetic
aagaacgtgtacgacgagctg

SEQ ID NO: 17808 - DNA, 21 bp, Artificial Sequence
  Synthetic
acgtggccgcgctggtgctgc

SEQ ID NO: 17809 - DNA, 21 bp, Artificial Sequence
  Synthetic
ccacgtgcacgcgccgccact

SEQ ID NO: 17810 - DNA, 21 bp, Artificial Sequence
  Synthetic
acgtgcacgcgccgccactac

SEQ ID NO: 17811 - DNA, 21 bp, Artificial Sequence
  Synthetic
cttcaggtgccgcacgtatgg

SEQ ID NO: 17812 - DNA, 21 bp, Artificial Sequence
  Synthetic
tccaaacttgaaatgggctgg

SEQ ID NO: 17813 - DNA, 21 bp, Artificial Sequence
  Synthetic
tccacccagcccatttcaagt

SEQ ID NO: 17814 - DNA, 21 bp, Artificial Sequence
  Synthetic
ccaatccaaacttgaaatggg

SEQ ID NO: 17815 - DNA, 21 bp, Artificial Sequence
  Synthetic
ccagcccatttcaagtttgga

SEQ ID NO: 17816 - DNA, 21 bp, Artificial Sequence
  Synthetic
cagcccatttcaagtttggat

SEQ ID NO: 17817 - DNA, 21 bp, Artificial Sequence
  Synthetic
ggactccaatccaaacttgaa

SEQ ID NO: 17818 - DNA, 21 bp, Artificial Sequence
  Synthetic
tatctggactccaatccaaac

SEQ ID NO: 17819 - DNA, 21 bp, Artificial Sequence
  Synthetic
tttggattggagtccagataa

SEQ ID NO: 17820 - DNA, 21 bp, Artificial Sequence
  Synthetic
ttggattggagtccagataaa

SEQ ID NO: 17821 - DNA, 21 bp, Artificial Sequence
  Synthetic
tggtcaaatgaactacagacg

SEQ ID NO: 17822 - DNA, 21 bp, Artificial Sequence
  Synthetic
tgtagttcatttgaccaaacg

SEQ ID NO: 17823 - DNA, 21 bp, Artificial Sequence
  Synthetic
tagttcatttgaccaaacggt

SEQ ID NO: 17824 - DNA, 21 bp, Artificial Sequence
  Synthetic
gtactctcaccgtttggtcaa

SEQ ID NO: 17825 - DNA, 21 bp, Artificial Sequence
  Synthetic
gagatgccagtatattctgta

SEQ ID NO: 17826 - DNA, 21 bp, Artificial Sequence
  Synthetic
tatattctgtaaagggccata

SEQ ID NO: 17827 - DNA, 21 bp, Artificial Sequence
  Synthetic
taatttctttatggcccttta

SEQ ID NO: 17828 - DNA, 21 bp, Artificial Sequence
  Synthetic
taaatgccatagatggcatag

SEQ ID NO: 17829 - DNA, 21 bp, Artificial Sequence
  Synthetic
ccatagatggcataggtggac

SEQ ID NO: 17830 - DNA, 21 bp, Artificial Sequence
  Synthetic
catagatggcataggtggact

SEQ ID NO: 17831 - DNA, 21 bp, Artificial Sequence
  Synthetic
atggcataggtggactaggaa

SEQ ID NO: 17832 - DNA, 21 bp, Artificial Sequence
  Synthetic
tggcataggtggactaggaat

SEQ ID NO: 17833 - DNA, 21 bp, Artificial Sequence
  Synthetic
gcataggtggactaggaattg

SEQ ID NO: 17834 - DNA, 21 bp, Artificial Sequence
  Synthetic
taggtggactaggaattggag

SEQ ID NO: 17835 - DNA, 21 bp, Artificial Sequence
  Synthetic
aggtggactaggaattggaga

SEQ ID NO: 17836 - DNA, 21 bp, Artificial Sequence
  Synthetic
taggaattggagaaggagcac

SEQ ID NO: 17837 - DNA, 21 bp, Artificial Sequence
  Synthetic
acctgaaattgtgactggcag

SEQ ID NO: 17838 - DNA, 21 bp, Artificial Sequence
  Synthetic
ttgtgactggcagccgagatg

SEQ ID NO: 17839 - DNA, 21 bp, Artificial Sequence
  Synthetic
catggcaggaactgtgaaggt

SEQ ID NO: 17840 - DNA, 21 bp, Artificial Sequence
  Synthetic
atggcaggaactgtgaaggtg

SEQ ID NO: 17841 - DNA, 21 bp, Artificial Sequence
  Synthetic
aaatggtctgtacaatatgtc

SEQ ID NO: 17842 - DNA, 21 bp, Artificial Sequence
  Synthetic
tggtctgtacaatatgtcaag

SEQ ID NO: 17843 - DNA, 21 bp, Artificial Sequence
  Synthetic
caatatgtcaagaagagtatt

SEQ ID NO: 17844 - DNA, 21 bp, Artificial Sequence
  Synthetic
aagagtattcagaagctccca

SEQ ID NO: 17845 - DNA, 21 bp, Artificial Sequence
  Synthetic
taaccatttcattgggagctt

SEQ ID NO: 17846 - DNA, 21 bp, Artificial Sequence
  Synthetic
gtcacatataaccatttcatt

SEQ ID NO: 17847 - DNA, 21 bp, Artificial Sequence
  Synthetic
tgtcacatataaccatttcat

SEQ ID NO: 17848 - DNA, 21 bp, Artificial Sequence
  Synthetic
ttgtcacatataaccatttca

SEQ ID NO: 17849 - DNA, 21 bp, Artificial Sequence
  Synthetic
atcaatcacactggaatcaat

SEQ ID NO: 17850 - DNA, 21 bp, Artificial Sequence
  Synthetic
attccagtgtgattgattcag

SEQ ID NO: 17851 - DNA, 21 bp, Artificial Sequence
  Synthetic
tttcatctgaatcaatcacac

SEQ ID NO: 17852 - DNA, 21 bp, Artificial Sequence
  Synthetic
gttgcaaaaacacactgccga

SEQ ID NO: 17853 - DNA, 21 bp, Artificial Sequence
  Synthetic
attctggacaacattgtcacc

SEQ ID NO: 17854 - DNA, 21 bp, Artificial Sequence
  Synthetic
gtgatgaaatggccaagaatc

SEQ ID NO: 17855 - DNA, 21 bp, Artificial Sequence
  Synthetic
ggtgatgaaatggccaagaat

SEQ ID NO: 17856 - DNA, 21 bp, Artificial Sequence
  Synthetic
taactgggtgatgaaatggcc

SEQ ID NO: 17857 - DNA, 21 bp, Artificial Sequence
  Synthetic
ccatttcatcacccagttaat

SEQ ID NO: 17858 - DNA, 21 bp, Artificial Sequence
  Synthetic
aaacttcttattaactgggtg

SEQ ID NO: 17859 - DNA, 21 bp, Artificial Sequence
  Synthetic
ctggaacaaacttcttattaa

SEQ ID NO: 17860 - DNA, 21 bp, Artificial Sequence
  Synthetic
tacaaaatgattgtcaatcca

SEQ ID NO: 17861 - DNA, 21 bp, Artificial Sequence
  Synthetic
tgattgtcaatccagtggatt

SEQ ID NO: 17862 - DNA, 21 bp, Artificial Sequence
  Synthetic
tacgtatggtctctaaatcca

SEQ ID NO: 17863 - DNA, 21 bp, Artificial Sequence
  Synthetic
gtggatttagagaccatacgt

SEQ ID NO: 17864 - DNA, 21 bp, Artificial Sequence
  Synthetic
aacatctccaagcacaagtat

SEQ ID NO: 17865 - DNA, 21 bp, Artificial Sequence
  Synthetic
cccgactctgatacttgtgct

SEQ ID NO: 17866 - DNA, 21 bp, Artificial Sequence
  Synthetic
ctccaagcacaagtatcagag

SEQ ID NO: 17867 - DNA, 21 bp, Artificial Sequence
  Synthetic
tcccgactctgatacttgtgc

SEQ ID NO: 17868 - DNA, 21 bp, Artificial Sequence
  Synthetic
tccaagcacaagtatcagagt

SEQ ID NO: 17869 - DNA, 21 bp, Artificial Sequence
  Synthetic
ccaagcacaagtatcagagtc

SEQ ID NO: 17870 - DNA, 21 bp, Artificial Sequence
  Synthetic
aagcacaagtatcagagtcgg

SEQ ID NO: 17871 - DNA, 21 bp, Artificial Sequence
  Synthetic
aagaataaggtttacatcatc

SEQ ID NO: 17872 - DNA, 21 bp, Artificial Sequence
  Synthetic
attatacttaacactgttggc

SEQ ID NO: 17873 - DNA, 21 bp, Artificial Sequence
  Synthetic
ttgccaacagtgttaagtata

SEQ ID NO: 17874 - DNA, 21 bp, Artificial Sequence
  Synthetic
acagtgttaagtataatggac

SEQ ID NO: 17875 - DNA, 21 bp, Artificial Sequence
  Synthetic
agtgttaagtataatggacct

SEQ ID NO: 17876 - DNA, 21 bp, Artificial Sequence
  Synthetic
agtcagtacactaagactgct

SEQ ID NO: 17877 - DNA, 21 bp, Artificial Sequence
  Synthetic
gtcagtacactaagactgctc

SEQ ID NO: 17878 - DNA, 21 bp, Artificial Sequence
  Synthetic
gtaacagatgttcacaatctc

SEQ ID NO: 17879 - DNA, 21 bp, Artificial Sequence
  Synthetic
catgtcattgatgatagactc

SEQ ID NO: 17880 - DNA, 21 bp, Artificial Sequence
  Synthetic
ctggagtctatcatcaatgac

SEQ ID NO: 17881 - DNA, 21 bp, Artificial Sequence
  Synthetic
ggagtctatcatcaatgacat

SEQ ID NO: 17882 - DNA, 21 bp, Artificial Sequence
  Synthetic
agtgtggaaagggtgtgtatt

SEQ ID NO: 17883 - DNA, 21 bp, Artificial Sequence
  Synthetic
gagtgtggaaagggtgtgtat

SEQ ID NO: 17884 - DNA, 21 bp, Artificial Sequence
  Synthetic
ttgcattgactggagtgtgga

SEQ ID NO: 17885 - DNA, 21 bp, Artificial Sequence
  Synthetic
acctttgcattgactggagtg

SEQ ID NO: 17886 - DNA, 21 bp, Artificial Sequence
  Synthetic
aacctttgcattgactggagt

SEQ ID NO: 17887 - DNA, 21 bp, Artificial Sequence
  Synthetic
ctttacaacctttgcattgac

SEQ ID NO: 17888 - DNA, 21 bp, Artificial Sequence
  Synthetic
cctttacaacctttgcattga

SEQ ID NO: 17889 - DNA, 21 bp, Artificial Sequence
  Synthetic
ccagtcaatgcaaaggttgta

SEQ ID NO: 17890 - DNA, 21 bp, Artificial Sequence
  Synthetic
tacaaaatcatcactcggcca

SEQ ID NO: 17891 - DNA, 21 bp, Artificial Sequence
  Synthetic
gagtgtttgtaggtccattgg

SEQ ID NO: 17892 - DNA, 21 bp, Artificial Sequence
  Synthetic
caatggacctacaaacactcc

SEQ ID NO: 17893 - DNA, 21 bp, Artificial Sequence
  Synthetic
gcgtaaatgcctctacccatc

SEQ ID NO: 17894 - DNA, 21 bp, Artificial Sequence
  Synthetic
cgtaaatgcctctacccatct

SEQ ID NO: 17895 - DNA, 21 bp, Artificial Sequence
  Synthetic
gtaaatgcctctacccatctc

SEQ ID NO: 17896 - DNA, 21 bp, Artificial Sequence
  Synthetic
aatgcctctacccatctcggg

SEQ ID NO: 17897 - DNA, 21 bp, Artificial Sequence
  Synthetic
ctgaactcttcccgagatggg

SEQ ID NO: 17898 - DNA, 21 bp, Artificial Sequence
  Synthetic
ctacccatctcgggaagagtt

SEQ ID NO: 17899 - DNA, 21 bp, Artificial Sequence
  Synthetic
acccatctcgggaagagttca

SEQ ID NO: 17900 - DNA, 21 bp, Artificial Sequence
  Synthetic
gctctctgaactcttcccgag

SEQ ID NO: 17901 - DNA, 21 bp, Artificial Sequence
  Synthetic
cagatgctctctgaactcttc

SEQ ID NO: 17902 - DNA, 21 bp, Artificial Sequence
  Synthetic
cgggaagagttcagagagcat

SEQ ID NO: 17903 - DNA, 21 bp, Artificial Sequence
  Synthetic
gggaagagttcagagagcatc

SEQ ID NO: 17904 - DNA, 21 bp, Artificial Sequence
  Synthetic
acaattagctccagatgctct

SEQ ID NO: 17905 - DNA, 21 bp, Artificial Sequence
  Synthetic
agagagcatctggagctaatt

SEQ ID NO: 17906 - DNA, 21 bp, Artificial Sequence
  Synthetic
tgaaaaacagtgcgacctaca

SEQ ID NO: 17907 - DNA, 21 bp, Artificial Sequence
  Synthetic
tggattgagagatctgagtca

SEQ ID NO: 17908 - DNA, 21 bp, Artificial Sequence
  Synthetic
atccagcatggattgagagat

SEQ ID NO: 17909 - DNA, 21 bp, Artificial Sequence
  Synthetic
aacggtcagcccgcatgtgtg

SEQ ID NO: 17910 - DNA, 21 bp, Artificial Sequence
  Synthetic
cagcccgcatgtgtggtgagt

SEQ ID NO: 17911 - DNA, 21 bp, Artificial Sequence
  Synthetic
tgcctcacactcaccacacat

SEQ ID NO: 17912 - DNA, 21 bp, Artificial Sequence
  Synthetic
agtgtgaggcatgtcggcgca

SEQ ID NO: 17913 - DNA, 21 bp, Artificial Sequence
  Synthetic
tgtgaggcatgtcggcgcact

SEQ ID NO: 17914 - DNA, 21 bp, Artificial Sequence
  Synthetic
ctgtggtcactgtgatttctg

SEQ ID NO: 17915 - DNA, 21 bp, Artificial Sequence
  Synthetic
tgtggtcactgtgatttctgt

SEQ ID NO: 17916 - DNA, 21 bp, Artificial Sequence
  Synthetic
cactgtgatttctgtcgggac

SEQ ID NO: 17917 - DNA, 21 bp, Artificial Sequence
  Synthetic
tgtgatttctgtcgggacatg

SEQ ID NO: 17918 - DNA, 21 bp, Artificial Sequence
  Synthetic
ccgaacttcttcatgtcccga

SEQ ID NO: 17919 - DNA, 21 bp, Artificial Sequence
  Synthetic
tctgtcgggacatgaagaagt

SEQ ID NO: 17920 - DNA, 21 bp, Artificial Sequence
  Synthetic
ctgtcgggacatgaagaagtt

SEQ ID NO: 17921 - DNA, 21 bp, Artificial Sequence
  Synthetic
tgtcgggacatgaagaagttc

SEQ ID NO: 17922 - DNA, 21 bp, Artificial Sequence
  Synthetic
tgccggatcttgttggggccc

SEQ ID NO: 17923 - DNA, 21 bp, Artificial Sequence
  Synthetic
gggggccccaacaagatccgg

SEQ ID NO: 17924 - DNA, 21 bp, Artificial Sequence
  Synthetic
ggcacttctgccggatcttgt

SEQ ID NO: 17925 - DNA, 21 bp, Artificial Sequence
  Synthetic
cggcacttctgccggatcttg

SEQ ID NO: 17926 - DNA, 21 bp, Artificial Sequence
  Synthetic
ctggcgcagccggcacttctg

SEQ ID NO: 17927 - DNA, 21 bp, Artificial Sequence
  Synthetic
ggtttgcggcagatgcagtag

SEQ ID NO: 17928 - DNA, 21 bp, Artificial Sequence
  Synthetic
atctactgcatctgccgcaaa

SEQ ID NO: 17929 - DNA, 21 bp, Artificial Sequence
  Synthetic
ggacatcaactgcttcatgat

SEQ ID NO: 17930 - DNA, 21 bp, Artificial Sequence
  Synthetic
catctctcccgcgctcacatc

SEQ ID NO: 17931 - DNA, 21 bp, Artificial Sequence
  Synthetic
gcagcgggtgtgacaactgca

SEQ ID NO: 17932 - DNA, 21 bp, Artificial Sequence
  Synthetic
acaactgcaatgagtggttcc

SEQ ID NO: 17933 - DNA, 21 bp, Artificial Sequence
  Synthetic
caactgcaatgagtggttcca

SEQ ID NO: 17934 - DNA, 21 bp, Artificial Sequence
  Synthetic
aactgcaatgagtggttccat

SEQ ID NO: 17935 - DNA, 21 bp, Artificial Sequence
  Synthetic
gtggttccatggggactgcat

SEQ ID NO: 17936 - DNA, 21 bp, Artificial Sequence
  Synthetic
gtgatccggatgcagtcccca

SEQ ID NO: 17937 - DNA, 21 bp, Artificial Sequence
  Synthetic
agtgatccggatgcagtcccc

SEQ ID NO: 17938 - DNA, 21 bp, Artificial Sequence
  Synthetic
atggggactgcatccggatca

SEQ ID NO: 17939 - DNA, 21 bp, Artificial Sequence
  Synthetic
ggggactgcatccggatcact

SEQ ID NO: 17940 - DNA, 21 bp, Artificial Sequence
  Synthetic
cttggccatcttctcagtgat

SEQ ID NO: 17941 - DNA, 21 bp, Artificial Sequence
  Synthetic
tgagaagatggccaaggccat

SEQ ID NO: 17942 - DNA, 21 bp, Artificial Sequence
  Synthetic
gagaagatggccaaggccatc

SEQ ID NO: 17943 - DNA, 21 bp, Artificial Sequence
  Synthetic
agaagatggccaaggccatcc

SEQ ID NO: 17944 - DNA, 21 bp, Artificial Sequence
  Synthetic
ggccatccgggagtggtactg

SEQ ID NO: 17945 - DNA, 21 bp, Artificial Sequence
  Synthetic
gccatccgggagtggtactgt

SEQ ID NO: 17946 - DNA, 21 bp, Artificial Sequence
  Synthetic
ccatccgggagtggtactgtc

SEQ ID NO: 17947 - DNA, 21 bp, Artificial Sequence
  Synthetic
gcactcccgacagtaccactc

SEQ ID NO: 17948 - DNA, 21 bp, Artificial Sequence
  Synthetic
ggagtggtactgtcgggagtg

SEQ ID NO: 17949 - DNA, 21 bp, Artificial Sequence
  Synthetic
ggtactgtcgggagtgcagag

SEQ ID NO: 17950 - DNA, 21 bp, Artificial Sequence
  Synthetic
tactgtcgggagtgcagaggt

SEQ ID NO: 17951 - DNA, 21 bp, Artificial Sequence
  Synthetic
tctagcttggggtctttctct

SEQ ID NO: 17952 - DNA, 21 bp, Artificial Sequence
  Synthetic
gacccgaagcctaaattccag

SEQ ID NO: 17953 - DNA, 21 bp, Artificial Sequence
  Synthetic
cgaagcctaaattccaggagg

SEQ ID NO: 17954 - DNA, 21 bp, Artificial Sequence
  Synthetic
aaaggcgcacactcaccctcc

SEQ ID NO: 17955 - DNA, 21 bp, Artificial Sequence
  Synthetic
caaaggcgcacactcaccctc

SEQ ID NO: 17956 - DNA, 21 bp, Artificial Sequence
  Synthetic
gtgagcgagtgctgtgctttc

SEQ ID NO: 17957 - DNA, 21 bp, Artificial Sequence
  Synthetic
gctttcatgggcctcttcttt

SEQ ID NO: 17958 - DNA, 21 bp, Artificial Sequence
  Synthetic
tgcttcataaagaagaggccc

SEQ ID NO: 17959 - DNA, 21 bp, Artificial Sequence
  Synthetic
tcatacctttgcttcataaag

SEQ ID NO: 17960 - DNA, 21 bp, Artificial Sequence
  Synthetic
tcttctttatgaagcaaaggt

SEQ ID NO: 17961 - DNA, 21 bp, Artificial Sequence
  Synthetic
gtttcatacctttgcttcata

SEQ ID NO: 17962 - DNA, 21 bp, Artificial Sequence
  Synthetic
ctttatggcaacctttacaca

SEQ ID NO: 17963 - DNA, 21 bp, Artificial Sequence
  Synthetic
cagtgtgtaaaggttgccata

SEQ ID NO: 17964 - DNA, 21 bp, Artificial Sequence
  Synthetic
gttgccataaaggacaaacaa

SEQ ID NO: 17965 - DNA, 21 bp, Artificial Sequence
  Synthetic
atacttcatacattacagtgg

SEQ ID NO: 17966 - DNA, 21 bp, Artificial Sequence
  Synthetic
tacttcatacattacagtggt

SEQ ID NO: 17967 - DNA, 21 bp, Artificial Sequence
  Synthetic
ttattccaaccactgtaatgt

SEQ ID NO: 17968 - DNA, 21 bp, Artificial Sequence
  Synthetic
ttacagtggttggaataaaaa

SEQ ID NO: 17969 - DNA, 21 bp, Artificial Sequence
  Synthetic
tccggaacccattcatcccaa

SEQ ID NO: 17970 - DNA, 21 bp, Artificial Sequence
  Synthetic
ttcagttgggatgaatgggtt

SEQ ID NO: 17971 - DNA, 21 bp, Artificial Sequence
  Synthetic
tcagttgggatgaatgggttc

SEQ ID NO: 17972 - DNA, 21 bp, Artificial Sequence
  Synthetic
agttgggatgaatgggttccg

SEQ ID NO: 17973 - DNA, 21 bp, Artificial Sequence
  Synthetic
ggatgaatgggttccggagag

SEQ ID NO: 17974 - DNA, 21 bp, Artificial Sequence
  Synthetic
gtatttgagtactctgctctc

SEQ ID NO: 17975 - DNA, 21 bp, Artificial Sequence
  Synthetic
cgtatttgagtactctgctct

SEQ ID NO: 17976 - DNA, 21 bp, Artificial Sequence
  Synthetic
tagttgtagctacaaatccat

SEQ ID NO: 17977 - DNA, 21 bp, Artificial Sequence
  Synthetic
atccatcaggacgtctcatta

SEQ ID NO: 17978 - DNA, 21 bp, Artificial Sequence
  Synthetic
gttcgctaatgagacgtcctg

SEQ ID NO: 17979 - DNA, 21 bp, Artificial Sequence
  Synthetic
agtttctgaaaaagttcgcta

SEQ ID NO: 17980 - DNA, 21 bp, Artificial Sequence
  Synthetic
taccactttagaaggcagttt

SEQ ID NO: 17981 - DNA, 21 bp, Artificial Sequence
  Synthetic
taactgcatcacttaccactt

SEQ ID NO: 17982 - DNA, 21 bp, Artificial Sequence
  Synthetic
gcataataatctggatattgc

SEQ ID NO: 17983 - DNA, 21 bp, Artificial Sequence
  Synthetic
tgcataataatctggatattg

SEQ ID NO: 17984 - DNA, 21 bp, Artificial Sequence
  Synthetic
ccttaattattgcataataat

SEQ ID NO: 17985 - DNA, 21 bp, Artificial Sequence
  Synthetic
ccagattattatgcaataatt

SEQ ID NO: 17986 - DNA, 21 bp, Artificial Sequence
  Synthetic
cagattattatgcaataatta

SEQ ID NO: 17987 - DNA, 21 bp, Artificial Sequence
  Synthetic
atagatctcaagaccattgcc

SEQ ID NO: 17988 - DNA, 21 bp, Artificial Sequence
  Synthetic
agatctcaagaccattgccca

SEQ ID NO: 17989 - DNA, 21 bp, Artificial Sequence
  Synthetic
tgtatcctctgggcaatggtc

SEQ ID NO: 17990 - DNA, 21 bp, Artificial Sequence
  Synthetic
cattgcccagaggatacaggt

SEQ ID NO: 17991 - DNA, 21 bp, Artificial Sequence
  Synthetic
tcatcttcatacctgtatcct

SEQ ID NO: 17992 - DNA, 21 bp, Artificial Sequence
  Synthetic
atctatatctttggccattgc

SEQ ID NO: 17993 - DNA, 21 bp, Artificial Sequence
  Synthetic
caaaaaatgccaaaacttata

SEQ ID NO: 17994 - DNA, 21 bp, Artificial Sequence
  Synthetic
caaaactaaccttgaatactt

SEQ ID NO: 17995 - DNA, 21 bp, Artificial Sequence
  Synthetic
aacaaaactaaccttgaatac

SEQ ID NO: 17996 - DNA, 21 bp, Artificial Sequence
  Synthetic
ataaccaagggcagctaatag

SEQ ID NO: 17997 - DNA, 21 bp, Artificial Sequence
  Synthetic
taccggatctgttgtagtgat

SEQ ID NO: 17998 - DNA, 21 bp, Artificial Sequence
  Synthetic
tttgtctttcacagaacaaaa

SEQ ID NO: 17999 - DNA, 21 bp, Artificial Sequence
  Synthetic
gtctttcacagaacaaaactg

SEQ ID NO: 18000 - DNA, 21 bp, Artificial Sequence
  Synthetic
acagaacaaaactgaagaatc

SEQ ID NO: 18001 - DNA, 21 bp, Artificial Sequence
  Synthetic
caaaactgaagaatcaagaat

SEQ ID NO: 18002 - DNA, 21 bp, Artificial Sequence
  Synthetic
gaatatgaaactttagatcat

SEQ ID NO: 18003 - DNA, 21 bp, Artificial Sequence
  Synthetic
aatatgaaactttagatcatt

SEQ ID NO: 18004 - DNA, 21 bp, Artificial Sequence
  Synthetic
ttagatcatttggagtgtgat

SEQ ID NO: 18005 - DNA, 21 bp, Artificial Sequence
  Synthetic
agtgtgatctgaatttaatgt

SEQ ID NO: 18006 - DNA, 21 bp, Artificial Sequence
  Synthetic
gcccaattcagccatctacaa

SEQ ID NO: 18007 - DNA, 21 bp, Artificial Sequence
  Synthetic
actcgcttgtagatggctgaa

SEQ ID NO: 18008 - DNA, 21 bp, Artificial Sequence
  Synthetic
ttagaactcgcttgtagatgg

SEQ ID NO: 18009 - DNA, 21 bp, Artificial Sequence
  Synthetic
atgaacagggcagacttctct

SEQ ID NO: 18010 - DNA, 21 bp, Artificial Sequence
  Synthetic
acttctctgtgagctcttcat

SEQ ID NO: 18011 - DNA, 21 bp, Artificial Sequence
  Synthetic
tgccctaatgaagagctcaca

SEQ ID NO: 18012 - DNA, 21 bp, Artificial Sequence
  Synthetic
ggtgccctaatgaagagctca

SEQ ID NO: 18013 - DNA, 21 bp, Artificial Sequence
  Synthetic
gctcttcattagggcaccaaa

SEQ ID NO: 18014 - DNA, 21 bp, Artificial Sequence
  Synthetic
cttcgctttggtgccctaatg

SEQ ID NO: 18015 - DNA, 21 bp, Artificial Sequence
  Synthetic
caccttcgctttggtgcccta

SEQ ID NO: 18016 - DNA, 21 bp, Artificial Sequence
  Synthetic
cattagggcaccaaagcgaag

SEQ ID NO: 18017 - DNA, 21 bp, Artificial Sequence
  Synthetic
acagaaatcaaccagactatt

SEQ ID NO: 18018 - DNA, 21 bp, Artificial Sequence
  Synthetic
gtttctcagcccattgacttg

SEQ ID NO: 18019 - DNA, 21 bp, Artificial Sequence
  Synthetic
attgacttgatgaaaatccaa

SEQ ID NO: 18020 - DNA, 21 bp, Artificial Sequence
  Synthetic
aaaatccaacagaaactaaaa

SEQ ID NO: 18021 - DNA, 21 bp, Artificial Sequence
  Synthetic
aaatccaacagaaactaaaaa

SEQ ID NO: 18022 - DNA, 21 bp, Artificial Sequence
  Synthetic
tccaacagaaactaaaaatgg

SEQ ID NO: 18023 - DNA, 21 bp, Artificial Sequence
  Synthetic
tttgcattgttaaaaagaagc

SEQ ID NO: 18024 - DNA, 21 bp, Artificial Sequence
  Synthetic
ctttgcattgttaaaaagaag

SEQ ID NO: 18025 - DNA, 21 bp, Artificial Sequence
  Synthetic
ataggactttgcattgttaaa

SEQ ID NO: 18026 - DNA, 21 bp, Artificial Sequence
  Synthetic
tgcaaagtcctattataaggt

SEQ ID NO: 18027 - DNA, 21 bp, Artificial Sequence
  Synthetic
tcataatttcttaccttataa

SEQ ID NO: 18028 - DNA, 21 bp, Artificial Sequence
  Synthetic
ctaacatacagccagattctc

SEQ ID NO: 18029 - DNA, 21 bp, Artificial Sequence
  Synthetic
tgcaagcggctttatattcag

SEQ ID NO: 18030 - DNA, 21 bp, Artificial Sequence
  Synthetic
tttgcaagcggctttatattc

SEQ ID NO: 18031 - DNA, 21 bp, Artificial Sequence
  Synthetic
gtttgcaagcggctttatatt

SEQ ID NO: 18032 - DNA, 21 bp, Artificial Sequence
  Synthetic
cgccgcctcagtgccatattt

SEQ ID NO: 18033 - DNA, 21 bp, Artificial Sequence
  Synthetic
ggaagcctcagaaatatggca

SEQ ID NO: 18034 - DNA, 21 bp, Artificial Sequence
  Synthetic
ctcagatctagagggaagcct

SEQ ID NO: 18035 - DNA, 21 bp, Artificial Sequence
  Synthetic
ttctgaggcttccctctagat

SEQ ID NO: 18036 - DNA, 21 bp, Artificial Sequence
  Synthetic
gtcaggcaactcagatctaga

SEQ ID NO: 18037 - DNA, 21 bp, Artificial Sequence
  Synthetic
agtcaggcaactcagatctag

SEQ ID NO: 18038 - DNA, 21 bp, Artificial Sequence
  Synthetic
tagtcaggcaactcagatcta

SEQ ID NO: 18039 - DNA, 21 bp, Artificial Sequence
  Synthetic
agtagtcaggcaactcagatc

SEQ ID NO: 18040 - DNA, 21 bp, Artificial Sequence
  Synthetic
tatctgactattaaaaagccc

SEQ ID NO: 18041 - DNA, 21 bp, Artificial Sequence
  Synthetic
actattaaaaagcccatggac

SEQ ID NO: 18042 - DNA, 21 bp, Artificial Sequence
  Synthetic
ctattaaaaagcccatggaca

SEQ ID NO: 18043 - DNA, 21 bp, Artificial Sequence
  Synthetic
gcccatggacatggaaaaaat

SEQ ID NO: 18044 - DNA, 21 bp, Artificial Sequence
  Synthetic
cttgttggccatcatgtgact

SEQ ID NO: 18045 - DNA, 21 bp, Artificial Sequence
  Synthetic
accaagatattgactctatgg

SEQ ID NO: 18046 - DNA, 21 bp, Artificial Sequence
  Synthetic
caagatattgactctatggtt

SEQ ID NO: 18047 - DNA, 21 bp, Artificial Sequence
  Synthetic
tcatgacaaagtcctcaacca

SEQ ID NO: 18048 - DNA, 21 bp, Artificial Sequence
  Synthetic
ttaataatgcctgtacataca

SEQ ID NO: 18049 - DNA, 21 bp, Artificial Sequence
  Synthetic
aatgcctgtacatacaatgag

SEQ ID NO: 18050 - DNA, 21 bp, Artificial Sequence
  Synthetic
atgcctgtacatacaatgagc

SEQ ID NO: 18051 - DNA, 21 bp, Artificial Sequence
  Synthetic
gatgctacagcgattctttag

SEQ ID NO: 18052 - DNA, 21 bp, Artificial Sequence
  Synthetic
ccacagcaggaatttctgcta

SEQ ID NO: 18053 - DNA, 21 bp, Artificial Sequence
  Synthetic
tctttagcagaaattcctgct

SEQ ID NO: 18054 - DNA, 21 bp, Artificial Sequence
  Synthetic
aggaaagttgggatccacagc

SEQ ID NO: 18055 - DNA, 21 bp, Artificial Sequence
  Synthetic
taggaaagttgggatccacag

SEQ ID NO: 18056 - DNA, 21 bp, Artificial Sequence
  Synthetic
ggggtggtttgttaggaaagt

SEQ ID NO: 18057 - DNA, 21 bp, Artificial Sequence
  Synthetic
aggggtggtttgttaggaaag

SEQ ID NO: 18058 - DNA, 21 bp, Artificial Sequence
  Synthetic
aaatgtaaggggtggtttgtt

SEQ ID NO: 18059 - DNA, 21 bp, Artificial Sequence
  Synthetic
caaatgtaaggggtggtttgt

SEQ ID NO: 18060 - DNA, 21 bp, Artificial Sequence
  Synthetic
accccttacatttgacataat

SEQ ID NO: 18061 - DNA, 21 bp, Artificial Sequence
  Synthetic
ttcctaattatgtcaaatgta

SEQ ID NO: 18062 - DNA, 21 bp, Artificial Sequence
  Synthetic
ccccttacatttgacataatt

SEQ ID NO: 18063 - DNA, 21 bp, Artificial Sequence
  Synthetic
cttcctaattatgtcaaatgt

SEQ ID NO: 18064 - DNA, 21 bp, Artificial Sequence
  Synthetic
cttacatttgacataattagg

SEQ ID NO: 18065 - DNA, 21 bp, Artificial Sequence
  Synthetic
ttgacataattaggaagaatg

SEQ ID NO: 18066 - DNA, 21 bp, Artificial Sequence
  Synthetic
accgtcggcttgatttatttc

SEQ ID NO: 18067 - DNA, 21 bp, Artificial Sequence
  Synthetic
atttatttcaagagcatatgt

SEQ ID NO: 18068 - DNA, 21 bp, Artificial Sequence
  Synthetic
caatacttcaaacatatgctc

SEQ ID NO: 18069 - DNA, 21 bp, Artificial Sequence
  Synthetic
caagagcatatgtttgaagta

SEQ ID NO: 18070 - DNA, 21 bp, Artificial Sequence
  Synthetic
aagagcatatgtttgaagtat

SEQ ID NO: 18071 - DNA, 21 bp, Artificial Sequence
  Synthetic
gcatatgtttgaagtattgga

SEQ ID NO: 18072 - DNA, 21 bp, Artificial Sequence
  Synthetic
gtttgaagtattggaacgagc

SEQ ID NO: 18073 - DNA, 21 bp, Artificial Sequence
  Synthetic
tgaagtattggaacgagcaag

SEQ ID NO: 18074 - DNA, 21 bp, Artificial Sequence
  Synthetic
gtattggaacgagcaagaagg

SEQ ID NO: 18075 - DNA, 21 bp, Artificial Sequence
  Synthetic
gatgctgttataggacagatt

SEQ ID NO: 18076 - DNA, 21 bp, Artificial Sequence
  Synthetic
ataggacagattcagaaatat

SEQ ID NO: 18077 - DNA, 21 bp, Artificial Sequence
  Synthetic
ctactgcatcttcatatattt

SEQ ID NO: 18078 - DNA, 21 bp, Artificial Sequence
  Synthetic
cagaaatatatgaagatgcag

SEQ ID NO: 18079 - DNA, 21 bp, Artificial Sequence
  Synthetic
tttatggttaaaccatccaaa

SEQ ID NO: 18080 - DNA, 21 bp, Artificial Sequence
  Synthetic
taataatcaggatagtccttt

SEQ ID NO: 18081 - DNA, 21 bp, Artificial Sequence
  Synthetic
cctgattattataaaatcatc

SEQ ID NO: 18082 - DNA, 21 bp, Artificial Sequence
  Synthetic
ctgattattataaaatcatct

SEQ ID NO: 18083 - DNA, 21 bp, Artificial Sequence
  Synthetic
tataaaatcatcttggagcca

SEQ ID NO: 18084 - DNA, 21 bp, Artificial Sequence
  Synthetic
atcatcttggagccaatggac

SEQ ID NO: 18085 - DNA, 21 bp, Artificial Sequence
  Synthetic
agccaatggacttgaaaataa

SEQ ID NO: 18086 - DNA, 21 bp, Artificial Sequence
  Synthetic
ttcaccagcatatttgtcatt

SEQ ID NO: 18087 - DNA, 21 bp, Artificial Sequence
  Synthetic
tccgcaatgacaaatatgctg

SEQ ID NO: 18088 - DNA, 21 bp, Artificial Sequence
  Synthetic
gcaatgacaaatatgctggtg

SEQ ID NO: 18089 - DNA, 21 bp, Artificial Sequence
  Synthetic
aatgacaaatatgctggtgaa

SEQ ID NO: 18090 - DNA, 21 bp, Artificial Sequence
  Synthetic
atgacaaatatgctggtgaag

SEQ ID NO: 18091 - DNA, 21 bp, Artificial Sequence
  Synthetic
tgacaaatatgctggtgaaga

SEQ ID NO: 18092 - DNA, 21 bp, Artificial Sequence
  Synthetic
atgctggtgaagagggaatga

SEQ ID NO: 18093 - DNA, 21 bp, Artificial Sequence
  Synthetic
gaagagggaatgatagaagac

SEQ ID NO: 18094 - DNA, 21 bp, Artificial Sequence
  Synthetic
agaagacatgaagctgatgtt

SEQ ID NO: 18095 - DNA, 21 bp, Artificial Sequence
  Synthetic
gaagacatgaagctgatgttc

SEQ ID NO: 18096 - DNA, 21 bp, Artificial Sequence
  Synthetic
tcattatagtgcctggcattc

SEQ ID NO: 18097 - DNA, 21 bp, Artificial Sequence
  Synthetic
ctcattatagtgcctggcatt

SEQ ID NO: 18098 - DNA, 21 bp, Artificial Sequence
  Synthetic
tccggaatgccaggcactata

SEQ ID NO: 18099 - DNA, 21 bp, Artificial Sequence
  Synthetic
cggaatgccaggcactataat

SEQ ID NO: 18100 - DNA, 21 bp, Artificial Sequence
  Synthetic
ggaatgccaggcactataatg

SEQ ID NO: 18101 - DNA, 21 bp, Artificial Sequence
  Synthetic
aatgccaggcactataatgag

SEQ ID NO: 18102 - DNA, 21 bp, Artificial Sequence
  Synthetic
taatgaggagggctcccaggt

SEQ ID NO: 18103 - DNA, 21 bp, Artificial Sequence
  Synthetic
ttaaaaacagcatgtaccatg

SEQ ID NO: 18104 - DNA, 21 bp, Artificial Sequence
  Synthetic
taaaaacagcatgtaccatgt

SEQ ID NO: 18105 - DNA, 21 bp, Artificial Sequence
  Synthetic
catgttggagattacgtctat

SEQ ID NO: 18106 - DNA, 21 bp, Artificial Sequence
  Synthetic
atgttggagattacgtctatg

SEQ ID NO: 18107 - DNA, 21 bp, Artificial Sequence
  Synthetic
attacgtctatgtggaacctg

SEQ ID NO: 18108 - DNA, 21 bp, Artificial Sequence
  Synthetic
tacaaccacatatcgtctgta

SEQ ID NO: 18109 - DNA, 21 bp, Artificial Sequence
  Synthetic
tatcgtctgtattgaaagact

SEQ ID NO: 18110 - DNA, 21 bp, Artificial Sequence
  Synthetic
atcgtctgtattgaaagactg

SEQ ID NO: 18111 - DNA, 21 bp, Artificial Sequence
  Synthetic
tcgtctgtattgaaagactgt

SEQ ID NO: 18112 - DNA, 21 bp, Artificial Sequence
  Synthetic
gtctgtattgaaagactgtgg

SEQ ID NO: 18113 - DNA, 21 bp, Artificial Sequence
  Synthetic
gatttaaaacaaacttaccag

SEQ ID NO: 18114 - DNA, 21 bp, Artificial Sequence
  Synthetic
tgaaacattccacctggctac

SEQ ID NO: 18115 - DNA, 21 bp, Artificial Sequence
  Synthetic
acctggctacacgaaaatttc

SEQ ID NO: 18116 - DNA, 21 bp, Artificial Sequence
  Synthetic
ctacacgaaaatttctagaaa

SEQ ID NO: 18117 - DNA, 21 bp, Artificial Sequence
  Synthetic
aaacatgaccacacacttgcc

SEQ ID NO: 18118 - DNA, 21 bp, Artificial Sequence
  Synthetic
tgtggtcatgtttgtcaaggt

SEQ ID NO: 18119 - DNA, 21 bp, Artificial Sequence
  Synthetic
ggcataacttaaagtattcct

SEQ ID NO: 18120 - DNA, 21 bp, Artificial Sequence
  Synthetic
gggcataacttaaagtattcc

SEQ ID NO: 18121 - DNA, 21 bp, Artificial Sequence
  Synthetic
tgggcataacttaaagtattc

SEQ ID NO: 18122 - DNA, 21 bp, Artificial Sequence
  Synthetic
aggaatactttaagttatgcc

SEQ ID NO: 18123 - DNA, 21 bp, Artificial Sequence
  Synthetic
taagttatgcccagaaaactt

SEQ ID NO: 18124 - DNA, 21 bp, Artificial Sequence
  Synthetic
tatgcccagaaaacttccgag

SEQ ID NO: 18125 - DNA, 21 bp, Artificial Sequence
  Synthetic
tgcccagaaaacttccgagat

SEQ ID NO: 18126 - DNA, 21 bp, Artificial Sequence
  Synthetic
cagacaaaaacatcctcatct

SEQ ID NO: 18127 - DNA, 21 bp, Artificial Sequence
  Synthetic
acagacaaaaacatcctcatc

SEQ ID NO: 18128 - DNA, 21 bp, Artificial Sequence
  Synthetic
cgcaccaggccatgggacttg

SEQ ID NO: 18129 - DNA, 21 bp, Artificial Sequence
  Synthetic
acacgaggacgcaccaggcca

SEQ ID NO: 18130 - DNA, 21 bp, Artificial Sequence
  Synthetic
cacacgaggacgcaccaggcc

SEQ ID NO: 18131 - DNA, 21 bp, Artificial Sequence
  Synthetic
catggcctggtgcgtcctcgt

SEQ ID NO: 18132 - DNA, 21 bp, Artificial Sequence
  Synthetic
ggtgcgtcctcgtgtgggcag

SEQ ID NO: 18133 - DNA, 21 bp, Artificial Sequence
  Synthetic
atgacactcacctgcccacac

SEQ ID NO: 18134 - DNA, 21 bp, Artificial Sequence
  Synthetic
caatgacactcacctgcccac

SEQ ID NO: 18135 - DNA, 21 bp, Artificial Sequence
  Synthetic
ctccccaagaattgaaaaagt

SEQ ID NO: 18136 - DNA, 21 bp, Artificial Sequence
  Synthetic
aagaattgaaaaagtatgggt

SEQ ID NO: 18137 - DNA, 21 bp, Artificial Sequence
  Synthetic
ttgaaaaagtatgggttcgag

SEQ ID NO: 18138 - DNA, 21 bp, Artificial Sequence
  Synthetic
tgaaaaagtatgggttcgaga

SEQ ID NO: 18139 - DNA, 21 bp, Artificial Sequence
  Synthetic
ataaaaatatgcagctccatc

SEQ ID NO: 18140 - DNA, 21 bp, Artificial Sequence
  Synthetic
atggccccatcttcattcacc

SEQ ID NO: 18141 - DNA, 21 bp, Artificial Sequence
  Synthetic
gccccatcttcattcacccag

SEQ ID NO: 18142 - DNA, 21 bp, Artificial Sequence
  Synthetic
tttcttctgggtgaatgaaga

SEQ ID NO: 18143 - DNA, 21 bp, Artificial Sequence
  Synthetic
gtttcttctgggtgaatgaag

SEQ ID NO: 18144 - DNA, 21 bp, Artificial Sequence
  Synthetic
tcttcattcacccagaagaaa

SEQ ID NO: 18145 - DNA, 21 bp, Artificial Sequence
  Synthetic
tgctctgtttcttctgggtga

SEQ ID NO: 18146 - DNA, 21 bp, Artificial Sequence
  Synthetic
ctcatgctctgtttcttctgg

SEQ ID NO: 18147 - DNA, 21 bp, Artificial Sequence
  Synthetic
ttcacccagaagaaacagagc

SEQ ID NO: 18148 - DNA, 21 bp, Artificial Sequence
  Synthetic
tgggctcatgctctgtttctt

SEQ ID NO: 18149 - DNA, 21 bp, Artificial Sequence
  Synthetic
ccacaaaaatgttctacaaaa

SEQ ID NO: 18150 - DNA, 21 bp, Artificial Sequence
  Synthetic
ttctacaaaaaagaagtattt

SEQ ID NO: 18151 - DNA, 21 bp, Artificial Sequence
  Synthetic
aaagaagtatttctgagtaat

SEQ ID NO: 18152 - DNA, 21 bp, Artificial Sequence
  Synthetic
aagaagtatttctgagtaatc

SEQ ID NO: 18153 - DNA, 21 bp, Artificial Sequence
  Synthetic
aagtatttctgagtaatctgg

SEQ ID NO: 18154 - DNA, 21 bp, Artificial Sequence
  Synthetic
gcaggtttcttccagattact

SEQ ID NO: 18155 - DNA, 21 bp, Artificial Sequence
  Synthetic
acctaccgagaatacatgtca

SEQ ID NO: 18156 - DNA, 21 bp, Artificial Sequence
  Synthetic
tacctaccgagaatacatgtc

SEQ ID NO: 18157 - DNA, 21 bp, Artificial Sequence
  Synthetic
atgacaacacagcacactttc

SEQ ID NO: 18158 - DNA, 21 bp, Artificial Sequence
  Synthetic
aagtgtgctgtgttgtcattc

SEQ ID NO: 18159 - DNA, 21 bp, Artificial Sequence
  Synthetic
ggcctgcaggagaggaagtcc

SEQ ID NO: 18160 - DNA, 21 bp, Artificial Sequence
  Synthetic
acttcctctcctgcaggccaa

SEQ ID NO: 18161 - DNA, 21 bp, Artificial Sequence
  Synthetic
atttcagttggcctgcaggag

SEQ ID NO: 18162 - DNA, 21 bp, Artificial Sequence
  Synthetic
tatttcagttggcctgcagga

SEQ ID NO: 18163 - DNA, 21 bp, Artificial Sequence
  Synthetic
ggtatttcagttggcctgcag

SEQ ID NO: 18164 - DNA, 21 bp, Artificial Sequence
  Synthetic
ctggtatttcagttggcctgc

SEQ ID NO: 18165 - DNA, 21 bp, Artificial Sequence
  Synthetic
tctggtatttcagttggcctg

SEQ ID NO: 18166 - DNA, 21 bp, Artificial Sequence
  Synthetic
cctgcaggccaactgaaatac

SEQ ID NO: 18167 - DNA, 21 bp, Artificial Sequence
  Synthetic
cagaaaatgacattctgcttt

SEQ ID NO: 18168 - DNA, 21 bp, Artificial Sequence
  Synthetic
gaaaatgacattctgctttgt

SEQ ID NO: 18169 - DNA, 21 bp, Artificial Sequence
  Synthetic
attgtagcggctctcacaaag

SEQ ID NO: 18170 - DNA, 21 bp, Artificial Sequence
  Synthetic
tgctttgtgagagccgctaca

SEQ ID NO: 18171 - DNA, 21 bp, Artificial Sequence
  Synthetic
ctttgtgagagccgctacaat

SEQ ID NO: 18172 - DNA, 21 bp, Artificial Sequence
  Synthetic
tacaatgagagcgacaagcag

SEQ ID NO: 18173 - DNA, 21 bp, Artificial Sequence
  Synthetic
aatgagagcgacaagcagatg

SEQ ID NO: 18174 - DNA, 21 bp, Artificial Sequence
  Synthetic
acaagcagatgaagaaattca

SEQ ID NO: 18175 - DNA, 21 bp, Artificial Sequence
  Synthetic
cacaggtaaaaccttggttgc

SEQ ID NO: 18176 - DNA, 21 bp, Artificial Sequence
  Synthetic
tggttgccagagcattagcta

SEQ ID NO: 18177 - DNA, 21 bp, Artificial Sequence
  Synthetic
cattagctaatgaatgcagcc

SEQ ID NO: 18178 - DNA, 21 bp, Artificial Sequence
  Synthetic
attagctaatgaatgcagcca

SEQ ID NO: 18179 - DNA, 21 bp, Artificial Sequence
  Synthetic
atgcgaaaaggagcagattgt

SEQ ID NO: 18180 - DNA, 21 bp, Artificial Sequence
  Synthetic
aggagcagattgtttgagcaa

SEQ ID NO: 18181 - DNA, 21 bp, Artificial Sequence
  Synthetic
attgtttgagcaagtgggttg

SEQ ID NO: 18182 - DNA, 21 bp, Artificial Sequence
  Synthetic
tgagcaagtgggttggtgaat

SEQ ID NO: 18183 - DNA, 21 bp, Artificial Sequence
  Synthetic
gatttctcttacctgatcaaa

SEQ ID NO: 18184 - DNA, 21 bp, Artificial Sequence
  Synthetic
tcttcttactaggcatatttg

SEQ ID NO: 18185 - DNA, 21 bp, Artificial Sequence
  Synthetic
ctatttcatcaaaaaatatta

SEQ ID NO: 18186 - DNA, 21 bp, Artificial Sequence
  Synthetic
atcttgtctgctagagcgaac

SEQ ID NO: 18187 - DNA, 21 bp, Artificial Sequence
  Synthetic
gatcttgtctgctagagcgaa

SEQ ID NO: 18188 - DNA, 21 bp, Artificial Sequence
  Synthetic
gatctgatcttgtctgctaga

SEQ ID NO: 18189 - DNA, 21 bp, Artificial Sequence
  Synthetic
tgtggatctgatcttgtctgc

SEQ ID NO: 18190 - DNA, 21 bp, Artificial Sequence
  Synthetic
gagcaaggagggttgatacta

SEQ ID NO: 18191 - DNA, 21 bp, Artificial Sequence
  Synthetic
gtatcaaccctccttgctctt

SEQ ID NO: 18192 - DNA, 21 bp, Artificial Sequence
  Synthetic
caaccctccttgctcttatgg

SEQ ID NO: 18193 - DNA, 21 bp, Artificial Sequence
  Synthetic
taatccatccataagagcaag

SEQ ID NO: 18194 - DNA, 21 bp, Artificial Sequence
  Synthetic
tctaatccatccataagagca

SEQ ID NO: 18195 - DNA, 21 bp, Artificial Sequence
  Synthetic
atctaatccatccataagagc

SEQ ID NO: 18196 - DNA, 21 bp, Artificial Sequence
  Synthetic
cctattatctaatccatccat

SEQ ID NO: 18197 - DNA, 21 bp, Artificial Sequence
  Synthetic
tcttatggatggattagataa

SEQ ID NO: 18198 - DNA, 21 bp, Artificial Sequence
  Synthetic
cttatggatggattagataat

SEQ ID NO: 18199 - DNA, 21 bp, Artificial Sequence
  Synthetic
tggatggattagataataggg

SEQ ID NO: 18200 - DNA, 21 bp, Artificial Sequence
  Synthetic
tgactctatagatcctgcact

SEQ ID NO: 18201 - DNA, 21 bp, Artificial Sequence
  Synthetic
gactctatagatcctgcactc

SEQ ID NO: 18202 - DNA, 21 bp, Artificial Sequence
  Synthetic
gtctcctgagtgcaggatcta

SEQ ID NO: 18203 - DNA, 21 bp, Artificial Sequence
  Synthetic
aacgaccaggtctcctgagtg

SEQ ID NO: 18204 - DNA, 21 bp, Artificial Sequence
  Synthetic
ctgtcaaaacgaccaggtctc

SEQ ID NO: 18205 - DNA, 21 bp, Artificial Sequence
  Synthetic
tttaacatcttcagcaaaccg

SEQ ID NO: 18206 - DNA, 21 bp, Artificial Sequence
  Synthetic
tcttcagcaaaccggtggata

SEQ ID NO: 18207 - DNA, 21 bp, Artificial Sequence
  Synthetic
tcttcaatatccaccggtttg

SEQ ID NO: 18208 - DNA, 21 bp, Artificial Sequence
  Synthetic
tcagcaaaccggtggatattg

SEQ ID NO: 18209 - DNA, 21 bp, Artificial Sequence
  Synthetic
ccttgattacttcaagataat

SEQ ID NO: 18210 - DNA, 21 bp, Artificial Sequence
  Synthetic
tcagattatcttgaagtaatc

SEQ ID NO: 18211 - DNA, 21 bp, Artificial Sequence
  Synthetic
cagattatcttgaagtaatca

SEQ ID NO: 18212 - DNA, 21 bp, Artificial Sequence
  Synthetic
cttgaagtaatcaaggaacca

SEQ ID NO: 18213 - DNA, 21 bp, Artificial Sequence
  Synthetic
aaacataattacctgactgca

SEQ ID NO: 18214 - DNA, 21 bp, Artificial Sequence
  Synthetic
tacctgactgcaaaggatttc

SEQ ID NO: 18215 - DNA, 21 bp, Artificial Sequence
  Synthetic
cagatgaggtcaatatctttc

SEQ ID NO: 18216 - DNA, 21 bp, Artificial Sequence
  Synthetic
acagatgaggtcaatatcttt

SEQ ID NO: 18217 - DNA, 21 bp, Artificial Sequence
  Synthetic
acctcatctgtagcaatgctt

SEQ ID NO: 18218 - DNA, 21 bp, Artificial Sequence
  Synthetic
tactctaaagcattgctacag

SEQ ID NO: 18219 - DNA, 21 bp, Artificial Sequence
  Synthetic
gctttagagtataatccagat

SEQ ID NO: 18220 - DNA, 21 bp, Artificial Sequence
  Synthetic
agtataatccagataaggacc

SEQ ID NO: 18221 - DNA, 21 bp, Artificial Sequence
  Synthetic
gtataatccagataaggaccc

SEQ ID NO: 18222 - DNA, 21 bp, Artificial Sequence
  Synthetic
ccttacctcctgggtccttat

SEQ ID NO: 18223 - DNA, 21 bp, Artificial Sequence
  Synthetic
agaactgaatgtgcaacttgc

SEQ ID NO: 18224 - DNA, 21 bp, Artificial Sequence
  Synthetic
gaactgaatgtgcaacttgca

SEQ ID NO: 18225 - DNA, 21 bp, Artificial Sequence
  Synthetic
aactgaatgtgcaacttgcaa

SEQ ID NO: 18226 - DNA, 21 bp, Artificial Sequence
  Synthetic
aatgtgcaacttgcaagggaa

SEQ ID NO: 18227 - DNA, 21 bp, Artificial Sequence
  Synthetic
atgtgcaacttgcaagggaac

SEQ ID NO: 18228 - DNA, 21 bp, Artificial Sequence
  Synthetic
cttgcaagggaactggagaca

SEQ ID NO: 18229 - DNA, 21 bp, Artificial Sequence
  Synthetic
tctgtttaccctgcaggtgtg

SEQ ID NO: 18230 - DNA, 21 bp, Artificial Sequence
  Synthetic
tccaaacagccaaaatggtag

SEQ ID NO: 18231 - DNA, 21 bp, Artificial Sequence
  Synthetic
tttggctgtttggatcctcct

SEQ ID NO: 18232 - DNA, 21 bp, Artificial Sequence
  Synthetic
agtctcctaaacagacaggct

SEQ ID NO: 18233 - DNA, 21 bp, Artificial Sequence
  Synthetic
ccatccgtagcctgtctgttt

SEQ ID NO: 18234 - DNA, 21 bp, Artificial Sequence
  Synthetic
tccatccgtagcctgtctgtt

SEQ ID NO: 18235 - DNA, 21 bp, Artificial Sequence
  Synthetic
tcctaaacagacaggctacgg

SEQ ID NO: 18236 - DNA, 21 bp, Artificial Sequence
  Synthetic
acaggctacggatggatatgt

SEQ ID NO: 18237 - DNA, 21 bp, Artificial Sequence
  Synthetic
caggctacggatggatatgtc

SEQ ID NO: 18238 - DNA, 21 bp, Artificial Sequence
  Synthetic
attctgatttgctgtgtttgt

SEQ ID NO: 18239 - DNA, 21 bp, Artificial Sequence
  Synthetic
tcccagacaaacacagcaaat

SEQ ID NO: 18240 - DNA, 21 bp, Artificial Sequence
  Synthetic
ttctgatttgctgtgtttgtc

SEQ ID NO: 18241 - DNA, 21 bp, Artificial Sequence
  Synthetic
tctgatttgctgtgtttgtct

SEQ ID NO: 18242 - DNA, 21 bp, Artificial Sequence
  Synthetic
gtgtttgtctgggagataata

SEQ ID NO: 18243 - DNA, 21 bp, Artificial Sequence
  Synthetic
gtttgtctgggagataatagt

SEQ ID NO: 18244 - DNA, 21 bp, Artificial Sequence
  Synthetic
gagataatagtgaggacgctg

SEQ ID NO: 18245 - DNA, 21 bp, Artificial Sequence
  Synthetic
tgtaatgccacaattgtcaca

SEQ ID NO: 18246 - DNA, 21 bp, Artificial Sequence
  Synthetic
acaattgtggcattacagtcc

SEQ ID NO: 18247 - DNA, 21 bp, Artificial Sequence
  Synthetic
aaagaaagcaacattaccttc

SEQ ID NO: 18248 - DNA, 21 bp, Artificial Sequence
  Synthetic
tttaggttgttatggagttga

SEQ ID NO: 18249 - DNA, 21 bp, Artificial Sequence
  Synthetic
taggttgttatggagttgatg

SEQ ID NO: 18250 - DNA, 21 bp, Artificial Sequence
  Synthetic
ggttgttatggagttgatgga

SEQ ID NO: 18251 - DNA, 21 bp, Artificial Sequence
  Synthetic
gatggagagagtgactctatt

SEQ ID NO: 18252 - DNA, 21 bp, Artificial Sequence
  Synthetic
actctattatgagttcagctt

SEQ ID NO: 18253 - DNA, 21 bp, Artificial Sequence
  Synthetic
tttcagaagctgaactcataa

SEQ ID NO: 18254 - DNA, 21 bp, Artificial Sequence
  Synthetic
gttcagcttctgaaaactcca

SEQ ID NO: 18255 - DNA, 21 bp, Artificial Sequence
  Synthetic
catcacaaaaccaaggttcag

SEQ ID NO: 18256 - DNA, 21 bp, Artificial Sequence
  Synthetic
gcatcacaaaaccaaggttca

SEQ ID NO: 18257 - DNA, 21 bp, Artificial Sequence
  Synthetic
attaaaagttgtgggatttgt

SEQ ID NO: 18258 - DNA, 21 bp, Artificial Sequence
  Synthetic
aaaagttgtgggatttgtaag

SEQ ID NO: 18259 - DNA, 21 bp, Artificial Sequence
  Synthetic
tttacaggtatcacacaataa

SEQ ID NO: 18260 - DNA, 21 bp, Artificial Sequence
  Synthetic
cctgtaaactacattaccatc

SEQ ID NO: 18261 - DNA, 21 bp, Artificial Sequence
  Synthetic
ctacattaccatcttggatgt

SEQ ID NO: 18262 - DNA, 21 bp, Artificial Sequence
  Synthetic
atgtctggatcctcctcttac

SEQ ID NO: 18263 - DNA, 21 bp, Artificial Sequence
  Synthetic
ttcttggcatccttgtaagag

SEQ ID NO: 18264 - DNA, 21 bp, Artificial Sequence
  Synthetic
tcctcctcttacaaggatgcc

SEQ ID NO: 18265 - DNA, 21 bp, Artificial Sequence
  Synthetic
ctttcttggcatccttgtaag

SEQ ID NO: 18266 - DNA, 21 bp, Artificial Sequence
  Synthetic
tctttcttggcatccttgtaa

SEQ ID NO: 18267 - DNA, 21 bp, Artificial Sequence
  Synthetic
ggtctttcttggcatccttgt

SEQ ID NO: 18268 - DNA, 21 bp, Artificial Sequence
  Synthetic
aaagaccaaaaacagttattg

SEQ ID NO: 18269 - DNA, 21 bp, Artificial Sequence
  Synthetic
tcccctttatgtaggcagtgc

SEQ ID NO: 18270 - DNA, 21 bp, Artificial Sequence
  Synthetic
cccctttatgtaggcagtgct

SEQ ID NO: 18271 - DNA, 21 bp, Artificial Sequence
  Synthetic
agtgctcggaatgtgaccagg

SEQ ID NO: 18272 - DNA, 21 bp, Artificial Sequence
  Synthetic
gtgctcggaatgtgaccaggc

SEQ ID NO: 18273 - DNA, 21 bp, Artificial Sequence
  Synthetic
tgctccctgcctggtcacatt

SEQ ID NO: 18274 - DNA, 21 bp, Artificial Sequence
  Synthetic
aatgtaaaacatgcattatat

SEQ ID NO: 18275 - DNA, 21 bp, Artificial Sequence
  Synthetic
ttatatgtggacaaccccacc

SEQ ID NO: 18276 - DNA, 21 bp, Artificial Sequence
  Synthetic
tatgtggacaaccccaccatg

SEQ ID NO: 18277 - DNA, 21 bp, Artificial Sequence
  Synthetic
gtggacaaccccaccatgaag

SEQ ID NO: 18278 - DNA, 21 bp, Artificial Sequence
  Synthetic
aacatcatttcttcttcatgg

SEQ ID NO: 18279 - DNA, 21 bp, Artificial Sequence
  Synthetic
gaacatcatttcttcttcatg

SEQ ID NO: 18280 - DNA, 21 bp, Artificial Sequence
  Synthetic
gatgttctgtgatatgtgtga

SEQ ID NO: 18281 - DNA, 21 bp, Artificial Sequence
  Synthetic
taacctctgtcacacatatca

SEQ ID NO: 18282 - DNA, 21 bp, Artificial Sequence
  Synthetic
cagtcacaaatccagcgacct

SEQ ID NO: 18283 - DNA, 21 bp, Artificial Sequence
  Synthetic
acagtcacaaatccagcgacc

SEQ ID NO: 18284 - DNA, 21 bp, Artificial Sequence
  Synthetic
ctggatttgtgactgttgtca

SEQ ID NO: 18285 - DNA, 21 bp, Artificial Sequence
  Synthetic
cacgacagctgcgatagctgc

SEQ ID NO: 18286 - DNA, 21 bp, Artificial Sequence
  Synthetic
acgacagctgcgatagctgca

SEQ ID NO: 18287 - DNA, 21 bp, Artificial Sequence
  Synthetic
gctgcgatagctgcaaggaag

SEQ ID NO: 18288 - DNA, 21 bp, Artificial Sequence
  Synthetic
ctgcgatagctgcaaggaagg

SEQ ID NO: 18289 - DNA, 21 bp, Artificial Sequence
  Synthetic
gccgggcagtggtcgcagcac

SEQ ID NO: 18290 - DNA, 21 bp, Artificial Sequence
  Synthetic
agccgggcagtggtcgcagca

SEQ ID NO: 18291 - DNA, 21 bp, Artificial Sequence
  Synthetic
agcactggaggtggaaggcag

SEQ ID NO: 18292 - DNA, 21 bp, Artificial Sequence
  Synthetic
agaccttaccagcactggagg

SEQ ID NO: 18293 - DNA, 21 bp, Artificial Sequence
  Synthetic
cagaccttaccagcactggag

SEQ ID NO: 18294 - DNA, 21 bp, Artificial Sequence
  Synthetic
gtccccagaccttaccagcac

SEQ ID NO: 18295 - DNA, 21 bp, Artificial Sequence
  Synthetic
ggtccccagaccttaccagca

SEQ ID NO: 18296 - DNA, 21 bp, Artificial Sequence
  Synthetic
gttccccacagtaaccctcca

SEQ ID NO: 18297 - DNA, 21 bp, Artificial Sequence
  Synthetic
ttcactcagtggagggttact

SEQ ID NO: 18298 - DNA, 21 bp, Artificial Sequence
  Synthetic
cccacagtaaccctccactga

SEQ ID NO: 18299 - DNA, 21 bp, Artificial Sequence
  Synthetic
acagtaaccctccactgagtg

SEQ ID NO: 18300 - DNA, 21 bp, Artificial Sequence
  Synthetic
gcaacatttcttcactcagtg

SEQ ID NO: 18301 - DNA, 21 bp, Artificial Sequence
  Synthetic
aggcaacatttcttcactcag

SEQ ID NO: 18302 - DNA, 21 bp, Artificial Sequence
  Synthetic
gaggcaacatttcttcactca

SEQ ID NO: 18303 - DNA, 21 bp, Artificial Sequence
  Synthetic
tgagtgaagaaatgttgcctc

SEQ ID NO: 18304 - DNA, 21 bp, Artificial Sequence
  Synthetic
gagtgaagaaatgttgcctcc

SEQ ID NO: 18305 - DNA, 21 bp, Artificial Sequence
  Synthetic
gtgaagaaatgttgcctcctg

SEQ ID NO: 18306 - DNA, 21 bp, Artificial Sequence
  Synthetic
agaaatgttgcctcctggaga

SEQ ID NO: 18307 - DNA, 21 bp, Artificial Sequence
  Synthetic
ccggtgacacatccactctcc

SEQ ID NO: 18308 - DNA, 21 bp, Artificial Sequence
  Synthetic
accggtgacacatccactctc

SEQ ID NO: 18309 - DNA, 21 bp, Artificial Sequence
  Synthetic
gtgtcaccggtgcactgttcg

SEQ ID NO: 18310 - DNA, 21 bp, Artificial Sequence
  Synthetic
gaaagaaaatacctgttacac

SEQ ID NO: 18311 - DNA, 21 bp, Artificial Sequence
  Synthetic
gcaatagtcacactggatgag

SEQ ID NO: 18312 - DNA, 21 bp, Artificial Sequence
  Synthetic
ggcaatagtcacactggatga

SEQ ID NO: 18313 - DNA, 21 bp, Artificial Sequence
  Synthetic
agggcaatagtcacactggat

SEQ ID NO: 18314 - DNA, 21 bp, Artificial Sequence
  Synthetic
agagggcaatagtcacactgg

SEQ ID NO: 18315 - DNA, 21 bp, Artificial Sequence
  Synthetic
caggagagggcaatagtcaca

SEQ ID NO: 18316 - DNA, 21 bp, Artificial Sequence
  Synthetic
tattgccctctcctgtttcac

SEQ ID NO: 18317 - DNA, 21 bp, Artificial Sequence
  Synthetic
ggcaatccatgtgaaacagga

SEQ ID NO: 18318 - DNA, 21 bp, Artificial Sequence
  Synthetic
gaggcaatccatgtgaaacag

SEQ ID NO: 18319 - DNA, 21 bp, Artificial Sequence
  Synthetic
tcgaggcaatccatgtgaaac

SEQ ID NO: 18320 - DNA, 21 bp, Artificial Sequence
  Synthetic
ctcgaggcaatccatgtgaaa

SEQ ID NO: 18321 - DNA, 21 bp, Artificial Sequence
  Synthetic
tcctgtttcacatggattgcc

SEQ ID NO: 18322 - DNA, 21 bp, Artificial Sequence
  Synthetic
cggcggctcgaggcaatccat

SEQ ID NO: 18323 - DNA, 21 bp, Artificial Sequence
  Synthetic
ggcatggcagtgagcggcggc

SEQ ID NO: 18324 - DNA, 21 bp, Artificial Sequence
  Synthetic
ccgccgctcactgccatgccc

SEQ ID NO: 18325 - DNA, 21 bp, Artificial Sequence
  Synthetic
catctgcccaggggcatggca

SEQ ID NO: 18326 - DNA, 21 bp, Artificial Sequence
  Synthetic
cactgccatgcccctgggcag

SEQ ID NO: 18327 - DNA, 21 bp, Artificial Sequence
  Synthetic
ttcggacacatccatctgccc

SEQ ID NO: 18328 - DNA, 21 bp, Artificial Sequence
  Synthetic
cccctgggcagatggatgtgt

SEQ ID NO: 18329 - DNA, 21 bp, Artificial Sequence
  Synthetic
attcggacacatccatctgcc

SEQ ID NO: 18330 - DNA, 21 bp, Artificial Sequence
  Synthetic
gacctcgtgacctgcttctgc

SEQ ID NO: 18331 - DNA, 21 bp, Artificial Sequence
  Synthetic
cggccggcaaatggcttcatg

SEQ ID NO: 18332 - DNA, 21 bp, Artificial Sequence
  Synthetic
catttgccggccgccccatga

SEQ ID NO: 18333 - DNA, 21 bp, Artificial Sequence
  Synthetic
gccgccccatgatcgagtgta

SEQ ID NO: 18334 - DNA, 21 bp, Artificial Sequence
  Synthetic
ggcactcattacactcgatca

SEQ ID NO: 18335 - DNA, 21 bp, Artificial Sequence
  Synthetic
tggcactcattacactcgatc

SEQ ID NO: 18336 - DNA, 21 bp, Artificial Sequence
  Synthetic
cgagtgtaatgagtgccacac

SEQ ID NO: 18337 - DNA, 21 bp, Artificial Sequence
  Synthetic
acctggattcacctgtcctgt

SEQ ID NO: 18338 - DNA, 21 bp, Artificial Sequence
  Synthetic
tcacctgtcctgtgcgaaaat

SEQ ID NO: 18339 - DNA, 21 bp, Artificial Sequence
  Synthetic
cacctgtcctgtgcgaaaatc

SEQ ID NO: 18340 - DNA, 21 bp, Artificial Sequence
  Synthetic
aaatccggaaatccaatgttc

SEQ ID NO: 18341 - DNA, 21 bp, Artificial Sequence
  Synthetic
cacttctggaacattggattt

SEQ ID NO: 18342 - DNA, 21 bp, Artificial Sequence
  Synthetic
cagacaaacacttctggaaca

SEQ ID NO: 18343 - DNA, 21 bp, Artificial Sequence
  Synthetic
agtgtttgtctgccaaaagtg

SEQ ID NO: 18344 - DNA, 21 bp, Artificial Sequence
  Synthetic
gtgtttgtctgccaaaagtgc

SEQ ID NO: 18345 - DNA, 21 bp, Artificial Sequence
  Synthetic
ggtcataaagagttcgaatca

SEQ ID NO: 18346 - DNA, 21 bp, Artificial Sequence
  Synthetic
attcgaactctttatgaccat

SEQ ID NO: 18347 - DNA, 21 bp, Artificial Sequence
  Synthetic
atccacatggtcataaagagt

SEQ ID NO: 18348 - DNA, 21 bp, Artificial Sequence
  Synthetic
gaactctttatgaccatgtgg

SEQ ID NO: 18349 - DNA, 21 bp, Artificial Sequence
  Synthetic
gacttcatccacatggtcata

SEQ ID NO: 18350 - DNA, 21 bp, Artificial Sequence
  Synthetic
cgtgccttgctttccacccaa

SEQ ID NO: 18351 - DNA, 21 bp, Artificial Sequence
  Synthetic
gccaggatctgttctgttggg

SEQ ID NO: 18352 - DNA, 21 bp, Artificial Sequence
  Synthetic
agccaggatctgttctgttgg

SEQ ID NO: 18353 - DNA, 21 bp, Artificial Sequence
  Synthetic
cagaagccaggatctgttctg

SEQ ID NO: 18354 - DNA, 21 bp, Artificial Sequence
  Synthetic
acagatcctggcttctggttc

SEQ ID NO: 18355 - DNA, 21 bp, Artificial Sequence
  Synthetic
cagatcctggcttctggttca

SEQ ID NO: 18356 - DNA, 21 bp, Artificial Sequence
  Synthetic
ataatcccttgaaccagaagc

SEQ ID NO: 18357 - DNA, 21 bp, Artificial Sequence
  Synthetic
taagagtataatcccttgaac

SEQ ID NO: 18358 - DNA, 21 bp, Artificial Sequence
  Synthetic
ataatttaagagtataatccc

SEQ ID NO: 18359 - DNA, 21 bp, Artificial Sequence
  Synthetic
tttggaataatcaaataattt

SEQ ID NO: 18360 - DNA, 21 bp, Artificial Sequence
  Synthetic
tagtgcactcccccaccaacc

SEQ ID NO: 18361 - DNA, 21 bp, Artificial Sequence
  Synthetic
tcatgaacccggggttggtgg

SEQ ID NO: 18362 - DNA, 21 bp, Artificial Sequence
  Synthetic
gtcatgaacccggggttggtg

SEQ ID NO: 18363 - DNA, 21 bp, Artificial Sequence
  Synthetic
cgtcatgaacccggggttggt

SEQ ID NO: 18364 - DNA, 21 bp, Artificial Sequence
  Synthetic
acgtcatgaacccggggttgg

SEQ ID NO: 18365 - DNA, 21 bp, Artificial Sequence
  Synthetic
cacgtcatgaacccggggttg

SEQ ID NO: 18366 - DNA, 21 bp, Artificial Sequence
  Synthetic
catcgctgcacgtcatgaacc

SEQ ID NO: 18367 - DNA, 21 bp, Artificial Sequence
  Synthetic
tcatcgctgcacgtcatgaac

SEQ ID NO: 18368 - DNA, 21 bp, Artificial Sequence
  Synthetic
ctgaagtcatcgctgcacgtc

SEQ ID NO: 18369 - DNA, 21 bp, Artificial Sequence
  Synthetic
catgacgtgcagcgatgactt

SEQ ID NO: 18370 - DNA, 21 bp, Artificial Sequence
  Synthetic
ctccggtaccaaaaccgcgct

SEQ ID NO: 18371 - DNA, 21 bp, Artificial Sequence
  Synthetic
catgctatgtcacatcacata

SEQ ID NO: 18372 - DNA, 21 bp, Artificial Sequence
  Synthetic
atgccgtgtagctacctatag

SEQ ID NO: 18373 - DNA, 21 bp, Artificial Sequence
  Synthetic
gtgtagctacctatagtagag

SEQ ID NO: 18374 - DNA, 21 bp, Artificial Sequence
  Synthetic
gagatggacagttaatagcta

SEQ ID NO: 18375 - DNA, 21 bp, Artificial Sequence
  Synthetic
tctctgtgtcaagtatcttta

SEQ ID NO: 18376 - DNA, 21 bp, Artificial Sequence
  Synthetic
gagagaatgtatttagaattt

SEQ ID NO: 18377 - DNA, 21 bp, Artificial Sequence
  Synthetic
attctaaatacattctctcaa

SEQ ID NO: 18378 - DNA, 21 bp, Artificial Sequence
  Synthetic
ttccacttgagagaatgtatt

SEQ ID NO: 18379 - DNA, 21 bp, Artificial Sequence
  Synthetic
ttctaaatacattctctcaag

SEQ ID NO: 18380 - DNA, 21 bp, Artificial Sequence
  Synthetic
aaaagactctgtagctaaact

SEQ ID NO: 18381 - DNA, 21 bp, Artificial Sequence
  Synthetic
aaagactctgtagctaaactt

SEQ ID NO: 18382 - DNA, 21 bp, Artificial Sequence
  Synthetic
aagactctgtagctaaacttt

SEQ ID NO: 18383 - DNA, 21 bp, Artificial Sequence
  Synthetic
atatttcccaaagtttagcta

SEQ ID NO: 18384 - DNA, 21 bp, Artificial Sequence
  Synthetic
tggcactagaattgtaattaa

SEQ ID NO: 18385 - DNA, 21 bp, Artificial Sequence
  Synthetic
ttggcactagaattgtaatta

SEQ ID NO: 18386 - DNA, 21 bp, Artificial Sequence
  Synthetic
cagttacgtacatattggcac

SEQ ID NO: 18387 - DNA, 21 bp, Artificial Sequence
  Synthetic
ctagtgccaatatgtacgtaa

SEQ ID NO: 18388 - DNA, 21 bp, Artificial Sequence
  Synthetic
tagtgccaatatgtacgtaac

SEQ ID NO: 18389 - DNA, 21 bp, Artificial Sequence
  Synthetic
aatatgtacgtaactggaagc

SEQ ID NO: 18390 - DNA, 21 bp, Artificial Sequence
  Synthetic
caaggacggctgcatcaaatt

SEQ ID NO: 18391 - DNA, 21 bp, Artificial Sequence
  Synthetic
aaggacggctgcatcaaatta

SEQ ID NO: 18392 - DNA, 21 bp, Artificial Sequence
  Synthetic
aacaaggagaactggacggtt

SEQ ID NO: 18393 - DNA, 21 bp, Artificial Sequence
  Synthetic
acacatcttctaagtggcccc

SEQ ID NO: 18394 - DNA, 21 bp, Artificial Sequence
  Synthetic
agaagatgtgtatgatatttg

SEQ ID NO: 18395 - DNA, 21 bp, Artificial Sequence
  Synthetic
atgatatttgctgggcaactg

SEQ ID NO: 18396 - DNA, 21 bp, Artificial Sequence
  Synthetic
tgatatttgctgggcaactga

SEQ ID NO: 18397 - DNA, 21 bp, Artificial Sequence
  Synthetic
gatatttgctgggcaactgat

SEQ ID NO: 18398 - DNA, 21 bp, Artificial Sequence
  Synthetic
aatttaatggcttctgcctct

SEQ ID NO: 18399 - DNA, 21 bp, Artificial Sequence
  Synthetic
tggctgtgttatccacagagg

SEQ ID NO: 18400 - DNA, 21 bp, Artificial Sequence
  Synthetic
atatgatggctgtgttatcca

SEQ ID NO: 18401 - DNA, 21 bp, Artificial Sequence
  Synthetic
tgtggataacacagccatcat

SEQ ID NO: 18402 - DNA, 21 bp, Artificial Sequence
  Synthetic
gtggataacacagccatcata

SEQ ID NO: 18403 - DNA, 21 bp, Artificial Sequence
  Synthetic
atgaacataaaagttatgtcc

SEQ ID NO: 18404 - DNA, 21 bp, Artificial Sequence
  Synthetic
tgaacataaaagttatgtcca

SEQ ID NO: 18405 - DNA, 21 bp, Artificial Sequence
  Synthetic
aagttatgtccaaggagtaac

SEQ ID NO: 18406 - DNA, 21 bp, Artificial Sequence
  Synthetic
agttatgtccaaggagtaacc

SEQ ID NO: 18407 - DNA, 21 bp, Artificial Sequence
  Synthetic
caaagggtcccaggttactcc

SEQ ID NO: 18408 - DNA, 21 bp, Artificial Sequence
  Synthetic
caaggagtaacctgggaccct

SEQ ID NO: 18409 - DNA, 21 bp, Artificial Sequence
  Synthetic
gagtagcaacatattgaccca

SEQ ID NO: 18410 - DNA, 21 bp, Artificial Sequence
  Synthetic
ttgggtcaatatgttgctact

SEQ ID NO: 18411 - DNA, 21 bp, Artificial Sequence
  Synthetic
ctgaatttacctgtcacagct

SEQ ID NO: 18412 - DNA, 21 bp, Artificial Sequence
  Synthetic
atgttctttcttcagggtgct

SEQ ID NO: 18413 - DNA, 21 bp, Artificial Sequence
  Synthetic
atactgtatactcgcagcacc

SEQ ID NO: 18414 - DNA, 21 bp, Artificial Sequence
  Synthetic
gctttggtatgacgagcaaga

SEQ ID NO: 18415 - DNA, 21 bp, Artificial Sequence
  Synthetic
aacattgacggctttggtatg

SEQ ID NO: 18416 - DNA, 21 bp, Artificial Sequence
  Synthetic
atgctaaaatttccccagttg

SEQ ID NO: 18417 - DNA, 21 bp, Artificial Sequence
  Synthetic
cgatgctaaaatttccccagt

SEQ ID NO: 18418 - DNA, 21 bp, Artificial Sequence
  Synthetic
ccgatgctaaaatttccccag

SEQ ID NO: 18419 - DNA, 21 bp, Artificial Sequence
  Synthetic
tgcagatgctgtcatcctatt

SEQ ID NO: 18420 - DNA, 21 bp, Artificial Sequence
  Synthetic
gcagatgctgtcatcctattg

SEQ ID NO: 18421 - DNA, 21 bp, Artificial Sequence
  Synthetic
gctgtcatcctattgtggaag

SEQ ID NO: 18422 - DNA, 21 bp, Artificial Sequence
  Synthetic
gttatcattcaccttccacaa

SEQ ID NO: 18423 - DNA, 21 bp, Artificial Sequence
  Synthetic
caccctcagtgacatttcatg

SEQ ID NO: 18424 - DNA, 21 bp, Artificial Sequence
  Synthetic
cactcaccatgaaatgtcact

SEQ ID NO: 18425 - DNA, 21 bp, Artificial Sequence
  Synthetic
gccactcaccatgaaatgtca

SEQ ID NO: 18426 - DNA, 21 bp, Artificial Sequence
  Synthetic
atggccaggaaggcaccatcg

SEQ ID NO: 18427 - DNA, 21 bp, Artificial Sequence
  Synthetic
gccttcctggccatttcttcc

SEQ ID NO: 18428 - DNA, 21 bp, Artificial Sequence
  Synthetic
ccgtccgtggaagaaatggcc

SEQ ID NO: 18429 - DNA, 21 bp, Artificial Sequence
  Synthetic
accgtccgtggaagaaatggc

SEQ ID NO: 18430 - DNA, 21 bp, Artificial Sequence
  Synthetic
atgagcagtaaccgtccgtgg

SEQ ID NO: 18431 - DNA, 21 bp, Artificial Sequence
  Synthetic
caaatgagcagtaaccgtccg

SEQ ID NO: 18432 - DNA, 21 bp, Artificial Sequence
  Synthetic
acaaatgagcagtaaccgtcc

SEQ ID NO: 18433 - DNA, 21 bp, Artificial Sequence
  Synthetic
aacaaggagcccgtgtacagc

SEQ ID NO: 18434 - DNA, 21 bp, Artificial Sequence
  Synthetic
tgctggaagtccaggctgtac

SEQ ID NO: 18435 - DNA, 21 bp, Artificial Sequence
  Synthetic
tgtacagcctggacttccagc

SEQ ID NO: 18436 - DNA, 21 bp, Artificial Sequence
  Synthetic
gtacagcctggacttccagca

SEQ ID NO: 18437 - DNA, 21 bp, Artificial Sequence
  Synthetic
tggacttccagcatgggacgg

SEQ ID NO: 18438 - DNA, 21 bp, Artificial Sequence
  Synthetic
ggacttccagcatgggacggc

SEQ ID NO: 18439 - DNA, 21 bp, Artificial Sequence
  Synthetic
gacttccagcatgggacggct

SEQ ID NO: 18440 - DNA, 21 bp, Artificial Sequence
  Synthetic
cttccagcatgggacggctgg

SEQ ID NO: 18441 - DNA, 21 bp, Artificial Sequence
  Synthetic
atcctcccagccgtcccatgc

SEQ ID NO: 18442 - DNA, 21 bp, Artificial Sequence
  Synthetic
gatcctcccagccgtcccatg

SEQ ID NO: 18443 - DNA, 21 bp, Artificial Sequence
  Synthetic
cacgccggcagacgccagtct

SEQ ID NO: 18444 - DNA, 21 bp, Artificial Sequence
  Synthetic
cacagactggcgtctgccggc

SEQ ID NO: 18445 - DNA, 21 bp, Artificial Sequence
  Synthetic
tgccggcgtggacaccaatgt

SEQ ID NO: 18446 - DNA, 21 bp, Artificial Sequence
  Synthetic
ggtattgacagatctggaagg

SEQ ID NO: 18447 - DNA, 21 bp, Artificial Sequence
  Synthetic
gaccatgccaatatttagcca

SEQ ID NO: 18448 - DNA, 21 bp, Artificial Sequence
  Synthetic
agaccatgccaatatttagcc

SEQ ID NO: 18449 - DNA, 21 bp, Artificial Sequence
  Synthetic
aagaccatgccaatatttagc

SEQ ID NO: 18450 - DNA, 21 bp, Artificial Sequence
  Synthetic
ggtctcgagaccagcatgagg

SEQ ID NO: 18451 - DNA, 21 bp, Artificial Sequence
  Synthetic
agtgtgtaagtagtcaatgta

SEQ ID NO: 18452 - DNA, 21 bp, Artificial Sequence
  Synthetic
cagtgtgtaagtagtcaatgt

SEQ ID NO: 18453 - DNA, 21 bp, Artificial Sequence
  Synthetic
cactggtgctgactgcatttg

SEQ ID NO: 18454 - DNA, 21 bp, Artificial Sequence
  Synthetic
gacccaggtattgcattcctg

SEQ ID NO: 18455 - DNA, 21 bp, Artificial Sequence
  Synthetic
tcctcagcaggaatgcaatac

SEQ ID NO: 18456 - DNA, 21 bp, Artificial Sequence
  Synthetic
cccaggtattgcattcctgct

SEQ ID NO: 18457 - DNA, 21 bp, Artificial Sequence
  Synthetic
ccaggtattgcattcctgctg

SEQ ID NO: 18458 - DNA, 21 bp, Artificial Sequence
  Synthetic
aggtattgcattcctgctgag

SEQ ID NO: 18459 - DNA, 21 bp, Artificial Sequence
  Synthetic
ggtattgcattcctgctgagg

SEQ ID NO: 18460 - DNA, 21 bp, Artificial Sequence
  Synthetic
tattgcattcctgctgaggag

SEQ ID NO: 18461 - DNA, 21 bp, Artificial Sequence
  Synthetic
cagcttgttctcctcctcagc

SEQ ID NO: 18462 - DNA, 21 bp, Artificial Sequence
  Synthetic
ccagcttgttctcctcctcag

SEQ ID NO: 18463 - DNA, 21 bp, Artificial Sequence
  Synthetic
cctgctgaggaggagaacaag

SEQ ID NO: 18464 - DNA, 21 bp, Artificial Sequence
  Synthetic
ctgctgaggaggagaacaagc

SEQ ID NO: 18465 - DNA, 21 bp, Artificial Sequence
  Synthetic
gccattggcttgcagcagggt

SEQ ID NO: 18466 - DNA, 21 bp, Artificial Sequence
  Synthetic
tggggtgccattggcttgcag

SEQ ID NO: 18467 - DNA, 21 bp, Artificial Sequence
  Synthetic
tgctgcaagccaatggcaccc

SEQ ID NO: 18468 - DNA, 21 bp, Artificial Sequence
  Synthetic
ggcaccccagggctgcagatg

SEQ ID NO: 18469 - DNA, 21 bp, Artificial Sequence
  Synthetic
gcaccccagggctgcagatgc

SEQ ID NO: 18470 - DNA, 21 bp, Artificial Sequence
  Synthetic
gctttccagcatctgcagccc

SEQ ID NO: 18471 - DNA, 21 bp, Artificial Sequence
  Synthetic
tgctttccagcatctgcagcc

SEQ ID NO: 18472 - DNA, 21 bp, Artificial Sequence
  Synthetic
gccctgtctccccagatctcc

SEQ ID NO: 18473 - DNA, 21 bp, Artificial Sequence
  Synthetic
ccctgtctccccagatctccc

SEQ ID NO: 18474 - DNA, 21 bp, Artificial Sequence
  Synthetic
acagcacctccggggagatct

SEQ ID NO: 18475 - DNA, 21 bp, Artificial Sequence
  Synthetic
cacagcacctccggggagatc

SEQ ID NO: 18476 - DNA, 21 bp, Artificial Sequence
  Synthetic
gcacagcacctccggggagat

SEQ ID NO: 18477 - DNA, 21 bp, Artificial Sequence
  Synthetic
tctccccggaggtgctgtgca

SEQ ID NO: 18478 - DNA, 21 bp, Artificial Sequence
  Synthetic
cctctttgcacagcacctccg

SEQ ID NO: 18479 - DNA, 21 bp, Artificial Sequence
  Synthetic
ccctctttgcacagcacctcc

SEQ ID NO: 18480 - DNA, 21 bp, Artificial Sequence
  Synthetic
tccccggaggtgctgtgcaaa

SEQ ID NO: 18481 - DNA, 21 bp, Artificial Sequence
  Synthetic
cccctctttgcacagcacctc

SEQ ID NO: 18482 - DNA, 21 bp, Artificial Sequence
  Synthetic
ccccggaggtgctgtgcaaag

SEQ ID NO: 18483 - DNA, 21 bp, Artificial Sequence
  Synthetic
tcccctctttgcacagcacct

SEQ ID NO: 18484 - DNA, 21 bp, Artificial Sequence
  Synthetic
cccggaggtgctgtgcaaaga

SEQ ID NO: 18485 - DNA, 21 bp, Artificial Sequence
  Synthetic
caaagaggggatcaaggtgca

SEQ ID NO: 18486 - DNA, 21 bp, Artificial Sequence
  Synthetic
aaggtgcacaggaccgtgcag

SEQ ID NO: 18487 - DNA, 21 bp, Artificial Sequence
  Synthetic
ggccagtttgtcgtctgcttc

SEQ ID NO: 18488 - DNA, 21 bp, Artificial Sequence
  Synthetic
gccagtttgtcgtctgcttcc

SEQ ID NO: 18489 - DNA, 21 bp, Artificial Sequence
  Synthetic
actttggacacaaaggatccc

SEQ ID NO: 18490 - DNA, 21 bp, Artificial Sequence
  Synthetic
cactttggacacaaaggatcc

SEQ ID NO: 18491 - DNA, 21 bp, Artificial Sequence
  Synthetic
acactttggacacaaaggatc

SEQ ID NO: 18492 - DNA, 21 bp, Artificial Sequence
  Synthetic
ccacagcacactttggacaca

SEQ ID NO: 18493 - DNA, 21 bp, Artificial Sequence
  Synthetic
cctttgtgtccaaagtgtgct

SEQ ID NO: 18494 - DNA, 21 bp, Artificial Sequence
  Synthetic
acgctgtacccacagcacact

SEQ ID NO: 18495 - DNA, 21 bp, Artificial Sequence
  Synthetic
tgtgctgtgggtacagcgtgt

SEQ ID NO: 18496 - DNA, 21 bp, Artificial Sequence
  Synthetic
catccacaagctgggccggcg

SEQ ID NO: 18497 - DNA, 21 bp, Artificial Sequence
  Synthetic
atccacaagctgggccggcgc

SEQ ID NO: 18498 - DNA, 21 bp, Artificial Sequence
  Synthetic
tgcaggccagccgctgcacgt

SEQ ID NO: 18499 - DNA, 21 bp, Artificial Sequence
  Synthetic
atgcaggccagccgctgcacg

SEQ ID NO: 18500 - DNA, 21 bp, Artificial Sequence
  Synthetic
gtgcagcggctggcctgcatc

SEQ ID NO: 18501 - DNA, 21 bp, Artificial Sequence
  Synthetic
atcaagaagcacctcaaatct

SEQ ID NO: 18502 - DNA, 21 bp, Artificial Sequence
  Synthetic
tccatggtgatgccctgagat

SEQ ID NO: 18503 - DNA, 21 bp, Artificial Sequence
  Synthetic
ctcaaatctcagggcatcacc

SEQ ID NO: 18504 - DNA, 21 bp, Artificial Sequence
  Synthetic
aatctcagggcatcaccatgg

SEQ ID NO: 18505 - DNA, 21 bp, Artificial Sequence
  Synthetic
gagctcgtccatggtgatgcc

SEQ ID NO: 18506 - DNA, 21 bp, Artificial Sequence
  Synthetic
cgcccagacctacctatgagc

SEQ ID NO: 18507 - DNA, 21 bp, Artificial Sequence
  Synthetic
ccgcccagacctacctatgag

SEQ ID NO: 18508 - DNA, 21 bp, Artificial Sequence
  Synthetic
cccgcccagacctacctatga

SEQ ID NO: 18509 - DNA, 21 bp, Artificial Sequence
  Synthetic
ccttcgctgtcccagggggct

SEQ ID NO: 18510 - DNA, 21 bp, Artificial Sequence
  Synthetic
caggtcgagctcacagccccc

SEQ ID NO: 18511 - DNA, 21 bp, Artificial Sequence
  Synthetic
ccaggtcgagctcacagcccc

SEQ ID NO: 18512 - DNA, 21 bp, Artificial Sequence
  Synthetic
agccggaaaaagcaggccagg

SEQ ID NO: 18513 - DNA, 21 bp, Artificial Sequence
  Synthetic
ccgcccatctcattaatcagc

SEQ ID NO: 18514 - DNA, 21 bp, Artificial Sequence
  Synthetic
gccgcccatctcattaatcag

SEQ ID NO: 18515 - DNA, 21 bp, Artificial Sequence
  Synthetic
gcaagtgactgacctcaaaaa

SEQ ID NO: 18516 - DNA, 21 bp, Artificial Sequence
  Synthetic
caagtgactgacctcaaaaaa

SEQ ID NO: 18517 - DNA, 21 bp, Artificial Sequence
  Synthetic
agcagacatgctgcgcatccc

SEQ ID NO: 18518 - DNA, 21 bp, Artificial Sequence
  Synthetic
ctgcgcatccccagaactgcc

SEQ ID NO: 18519 - DNA, 21 bp, Artificial Sequence
  Synthetic
cagccggtcctgggcagttct

SEQ ID NO: 18520 - DNA, 21 bp, Artificial Sequence
  Synthetic
ccagccggtcctgggcagttc

SEQ ID NO: 18521 - DNA, 21 bp, Artificial Sequence
  Synthetic
gccagccggtcctgggcagtt

SEQ ID NO: 18522 - DNA, 21 bp, Artificial Sequence
  Synthetic
ctgcagcttggccagccggtc

SEQ ID NO: 18523 - DNA, 21 bp, Artificial Sequence
  Synthetic
caggaccggctggccaagctg

SEQ ID NO: 18524 - DNA, 21 bp, Artificial Sequence
  Synthetic
aggaccggctggccaagctgc

SEQ ID NO: 18525 - DNA, 21 bp, Artificial Sequence
  Synthetic
tctggggacagggagtcgtag

SEQ ID NO: 18526 - DNA, 21 bp, Artificial Sequence
  Synthetic
cctctggggacagggagtcgt

SEQ ID NO: 18527 - DNA, 21 bp, Artificial Sequence
  Synthetic
tcctctggggacagggagtcg

SEQ ID NO: 18528 - DNA, 21 bp, Artificial Sequence
  Synthetic
cttggcggagggcctgaggac

SEQ ID NO: 18529 - DNA, 21 bp, Artificial Sequence
  Synthetic
ccttggcggagggcctgagga

SEQ ID NO: 18530 - DNA, 21 bp, Artificial Sequence
  Synthetic
tccttggcggagggcctgagg

SEQ ID NO: 18531 - DNA, 21 bp, Artificial Sequence
  Synthetic
cccgtcctcaggccctccgcc

SEQ ID NO: 18532 - DNA, 21 bp, Artificial Sequence
  Synthetic
ccgtcctcaggccctccgcca

SEQ ID NO: 18533 - DNA, 21 bp, Artificial Sequence
  Synthetic
gaactccttggcggagggcct

SEQ ID NO: 18534 - DNA, 21 bp, Artificial Sequence
  Synthetic
tggaactccttggcggagggc

SEQ ID NO: 18535 - DNA, 21 bp, Artificial Sequence
  Synthetic
ggatcgtggaactccttggcg

SEQ ID NO: 18536 - DNA, 21 bp, Artificial Sequence
  Synthetic
gcggatcgtggaactccttgg

SEQ ID NO: 18537 - DNA, 21 bp, Artificial Sequence
  Synthetic
agcggatcgtggaactccttg

SEQ ID NO: 18538 - DNA, 21 bp, Artificial Sequence
  Synthetic
tcgatgtagatgagcggatcg

SEQ ID NO: 18539 - DNA, 21 bp, Artificial Sequence
  Synthetic
ctcgatgtagatgagcggatc

SEQ ID NO: 18540 - DNA, 21 bp, Artificial Sequence
  Synthetic
tccacgatccgctcatctaca

SEQ ID NO: 18541 - DNA, 21 bp, Artificial Sequence
  Synthetic
ggaccgactcgatgtagatga

SEQ ID NO: 18542 - DNA, 21 bp, Artificial Sequence
  Synthetic
gcgcggaccgactcgatgtag

SEQ ID NO: 18543 - DNA, 21 bp, Artificial Sequence
  Synthetic
atcgagtcggtccgcgctcag

SEQ ID NO: 18544 - DNA, 21 bp, Artificial Sequence
  Synthetic
tcgagtcggtccgcgctcagg

SEQ ID NO: 18545 - DNA, 21 bp, Artificial Sequence
  Synthetic
gagtcggtccgcgctcaggtg

SEQ ID NO: 18546 - DNA, 21 bp, Artificial Sequence
  Synthetic
cccgaacttctccacctgagc

SEQ ID NO: 18547 - DNA, 21 bp, Artificial Sequence
  Synthetic
tccgcgctcaggtggagaagt

SEQ ID NO: 18548 - DNA, 21 bp, Artificial Sequence
  Synthetic
ccgcgctcaggtggagaagtt

SEQ ID NO: 18549 - DNA, 21 bp, Artificial Sequence
  Synthetic
gcacatcccgaacttctccac

SEQ ID NO: 18550 - DNA, 21 bp, Artificial Sequence
  Synthetic
ggtggagaagttcgggatgtg

SEQ ID NO: 18551 - DNA, 21 bp, Artificial Sequence
  Synthetic
ggggggatcaccctgcacatc

SEQ ID NO: 18552 - DNA, 21 bp, Artificial Sequence
  Synthetic
ggtggttatagtcacctttat

SEQ ID NO: 18553 - DNA, 21 bp, Artificial Sequence
  Synthetic
gagctgccagtgcttgccggg

SEQ ID NO: 18554 - DNA, 21 bp, Artificial Sequence
  Synthetic
gtggagctgccagtgcttgcc

SEQ ID NO: 18555 - DNA, 21 bp, Artificial Sequence
  Synthetic
agtggagctgccagtgcttgc

SEQ ID NO: 18556 - DNA, 21 bp, Artificial Sequence
  Synthetic
aagtggagctgccagtgcttg

SEQ ID NO: 18557 - DNA, 21 bp, Artificial Sequence
  Synthetic
caagcactggcagctccactt

SEQ ID NO: 18558 - DNA, 21 bp, Artificial Sequence
  Synthetic
ctttgggggaaggttcaaaag

SEQ ID NO: 18559 - DNA, 21 bp, Artificial Sequence
  Synthetic
tctttgggggaaggttcaaaa

SEQ ID NO: 18560 - DNA, 21 bp, Artificial Sequence
  Synthetic
gttccaggaatgctgattatt

SEQ ID NO: 18561 - DNA, 21 bp, Artificial Sequence
  Synthetic
tctcataataatcagcattcc

SEQ ID NO: 18562 - DNA, 21 bp, Artificial Sequence
  Synthetic
ttctcataataatcagcattc

SEQ ID NO: 18563 - DNA, 21 bp, Artificial Sequence
  Synthetic
tccaggaatgctgattattat

SEQ ID NO: 18564 - DNA, 21 bp, Artificial Sequence
  Synthetic
tggtgataagatctaggggat

SEQ ID NO: 18565 - DNA, 21 bp, Artificial Sequence
  Synthetic
atcccctagatcttatcacca

SEQ ID NO: 18566 - DNA, 21 bp, Artificial Sequence
  Synthetic
tctctatggtgataagatcta

SEQ ID NO: 18567 - DNA, 21 bp, Artificial Sequence
  Synthetic
ttctctatggtgataagatct

SEQ ID NO: 18568 - DNA, 21 bp, Artificial Sequence
  Synthetic
cccctagatcttatcaccata

SEQ ID NO: 18569 - DNA, 21 bp, Artificial Sequence
  Synthetic
cttctctatggtgataagatc

SEQ ID NO: 18570 - DNA, 21 bp, Artificial Sequence
  Synthetic
cactgtcttatagtaaccagt

SEQ ID NO: 18571 - DNA, 21 bp, Artificial Sequence
  Synthetic
tccactgtcttatagtaacca

SEQ ID NO: 18572 - DNA, 21 bp, Artificial Sequence
  Synthetic
ctcactggttactataagaca

SEQ ID NO: 18573 - DNA, 21 bp, Artificial Sequence
  Synthetic
tcactggttactataagacag

SEQ ID NO: 18574 - DNA, 21 bp, Artificial Sequence
  Synthetic
tgctgacatgctcaaagtctt

SEQ ID NO: 18575 - DNA, 21 bp, Artificial Sequence
  Synthetic
gctgacatgctcaaagtcttt

SEQ ID NO: 18576 - DNA, 21 bp, Artificial Sequence
  Synthetic
tgctcaaagtctttcggaatg

SEQ ID NO: 18577 - DNA, 21 bp, Artificial Sequence
  Synthetic
acctcagcattccgaaagact

SEQ ID NO: 18578 - DNA, 21 bp, Artificial Sequence
  Synthetic
agtgaaaaatacctcagcatt

SEQ ID NO: 18579 - DNA, 21 bp, Artificial Sequence
  Synthetic
tttgctttcttcagaagtact

SEQ ID NO: 18580 - DNA, 21 bp, Artificial Sequence
  Synthetic
ggatttacgcccatagtactt

SEQ ID NO: 18581 - DNA, 21 bp, Artificial Sequence
  Synthetic
actatgggcgtaaatccccag

SEQ ID NO: 18582 - DNA, 21 bp, Artificial Sequence
  Synthetic
ctatgggcgtaaatccccagt

SEQ ID NO: 18583 - DNA, 21 bp, Artificial Sequence
  Synthetic
tatgggcgtaaatccccagtt

SEQ ID NO: 18584 - DNA, 21 bp, Artificial Sequence
  Synthetic
tgggcgtaaatccccagttgg

SEQ ID NO: 18585 - DNA, 21 bp, Artificial Sequence
  Synthetic
cgacaaacatctctcccaact

SEQ ID NO: 18586 - DNA, 21 bp, Artificial Sequence
  Synthetic
acgacaaacatctctcccaac

SEQ ID NO: 18587 - DNA, 21 bp, Artificial Sequence
  Synthetic
gacgacaaacatctctcccaa

SEQ ID NO: 18588 - DNA, 21 bp, Artificial Sequence
  Synthetic
tttcgagctgaggaaaaaggt

SEQ ID NO: 18589 - DNA, 21 bp, Artificial Sequence
  Synthetic
ttcgagctgaggaaaaaggtt

SEQ ID NO: 18590 - DNA, 21 bp, Artificial Sequence
  Synthetic
tcgagctgaggaaaaaggttg

SEQ ID NO: 18591 - DNA, 21 bp, Artificial Sequence
  Synthetic
tgaggaaaaaggttggggaat

SEQ ID NO: 18592 - DNA, 21 bp, Artificial Sequence
  Synthetic
aaggttggggaatcagaacca

SEQ ID NO: 18593 - DNA, 21 bp, Artificial Sequence
  Synthetic
gaaccaaagagcccctaaaag

SEQ ID NO: 18594 - DNA, 21 bp, Artificial Sequence
  Synthetic
aatgatgaactgcccagcttt

SEQ ID NO: 18595 - DNA, 21 bp, Artificial Sequence
  Synthetic
taaaagctgggcagttcatca

SEQ ID NO: 18596 - DNA, 21 bp, Artificial Sequence
  Synthetic
ggcagttcatcattgaatacc

SEQ ID NO: 18597 - DNA, 21 bp, Artificial Sequence
  Synthetic
gcagttcatcattgaatacct

SEQ ID NO: 18598 - DNA, 21 bp, Artificial Sequence
  Synthetic
cagttcatcattgaataccta

SEQ ID NO: 18599 - DNA, 21 bp, Artificial Sequence
  Synthetic
agttcatcattgaatacctag

SEQ ID NO: 18600 - DNA, 21 bp, Artificial Sequence
  Synthetic
acctcccctaggtattcaatg

SEQ ID NO: 18601 - DNA, 21 bp, Artificial Sequence
  Synthetic
aatacctaggggaggtcgtca

SEQ ID NO: 18602 - DNA, 21 bp, Artificial Sequence
  Synthetic
ctaggggaggtcgtcagtgaa

SEQ ID NO: 18603 - DNA, 21 bp, Artificial Sequence
  Synthetic
taggggaggtcgtcagtgaac

SEQ ID NO: 18604 - DNA, 21 bp, Artificial Sequence
  Synthetic
ttctctttaggaacaggatga

SEQ ID NO: 18605 - DNA, 21 bp, Artificial Sequence
  Synthetic
aatcacagtgaccactactgc

SEQ ID NO: 18606 - DNA, 21 bp, Artificial Sequence
  Synthetic
agtgaccactactgcctgaac

SEQ ID NO: 18607 - DNA, 21 bp, Artificial Sequence
  Synthetic
actactgcctgaacctggata

SEQ ID NO: 18608 - DNA, 21 bp, Artificial Sequence
  Synthetic
ctactgcctgaacctggatag

SEQ ID NO: 18609 - DNA, 21 bp, Artificial Sequence
  Synthetic
atggtgattgacagttaccgc

SEQ ID NO: 18610 - DNA, 21 bp, Artificial Sequence
  Synthetic
tggtgattgacagttaccgca

SEQ ID NO: 18611 - DNA, 21 bp, Artificial Sequence
  Synthetic
ggtgattgacagttaccgcat

SEQ ID NO: 18612 - DNA, 21 bp, Artificial Sequence
  Synthetic
ttgacagttaccgcatgggaa

SEQ ID NO: 18613 - DNA, 21 bp, Artificial Sequence
  Synthetic
gtcacagctatggttgatgaa

SEQ ID NO: 18614 - DNA, 21 bp, Artificial Sequence
  Synthetic
tttgggtcacagctatggttg

SEQ ID NO: 18615 - DNA, 21 bp, Artificial Sequence
  Synthetic
accatagctgtgacccaaatt

SEQ ID NO: 18616 - DNA, 21 bp, Artificial Sequence
  Synthetic
tgtgacccaaattgtgaaatg

SEQ ID NO: 18617 - DNA, 21 bp, Artificial Sequence
  Synthetic
accatttctgcatttcacaat

SEQ ID NO: 18618 - DNA, 21 bp, Artificial Sequence
  Synthetic
attgtgaaatgcagaaatggt

SEQ ID NO: 18619 - DNA, 21 bp, Artificial Sequence
  Synthetic
tctctctttacaggtctgtta

SEQ ID NO: 18620 - DNA, 21 bp, Artificial Sequence
  Synthetic
ctctctttacaggtctgttaa

SEQ ID NO: 18621 - DNA, 21 bp, Artificial Sequence
  Synthetic
caggtctgttaatggagtata

SEQ ID NO: 18622 - DNA, 21 bp, Artificial Sequence
  Synthetic
ctgttaatggagtataccgga

SEQ ID NO: 18623 - DNA, 21 bp, Artificial Sequence
  Synthetic
gctggcatgtctttaagagca

SEQ ID NO: 18624 - DNA, 21 bp, Artificial Sequence
  Synthetic
atgctcttaaagacatgccag

SEQ ID NO: 18625 - DNA, 21 bp, Artificial Sequence
  Synthetic
tgctcttaaagacatgccagc

SEQ ID NO: 18626 - DNA, 21 bp, Artificial Sequence
  Synthetic
agtcccagctggcatgtcttt

SEQ ID NO: 18627 - DNA, 21 bp, Artificial Sequence
  Synthetic
ttaaagacatgccagctggga

SEQ ID NO: 18628 - DNA, 21 bp, Artificial Sequence
  Synthetic
gaatgaaagttataatcataa

SEQ ID NO: 18629 - DNA, 21 bp, Artificial Sequence
  Synthetic
cgagatgacttgctgcttcgt

SEQ ID NO: 18630 - DNA, 21 bp, Artificial Sequence
  Synthetic
agctcctgtatacataccctg

SEQ ID NO: 18631 - DNA, 21 bp, Artificial Sequence
  Synthetic
atcagatacacacagtcacct

SEQ ID NO: 18632 - DNA, 21 bp, Artificial Sequence
  Synthetic
catcagatacacacagtcacc

SEQ ID NO: 18633 - DNA, 21 bp, Artificial Sequence
  Synthetic
ctaggtgactgtgtgtatctg

SEQ ID NO: 18634 - DNA, 21 bp, Artificial Sequence
  Synthetic
aggtgactgtgtgtatctgat

SEQ ID NO: 18635 - DNA, 21 bp, Artificial Sequence
  Synthetic
ggtgactgtgtgtatctgatg

SEQ ID NO: 18636 - DNA, 21 bp, Artificial Sequence
  Synthetic
ctgacggaccgggtggccatc

SEQ ID NO: 18637 - DNA, 21 bp, Artificial Sequence
  Synthetic
actgacggaccgggtggccat

SEQ ID NO: 18638 - DNA, 21 bp, Artificial Sequence
  Synthetic
acagtcgataggactgacgga

SEQ ID NO: 18639 - DNA, 21 bp, Artificial Sequence
  Synthetic
agataacagtcgataggactg

SEQ ID NO: 18640 - DNA, 21 bp, Artificial Sequence
  Synthetic
ttaatgtgagataacagtcga

SEQ ID NO: 18641 - DNA, 21 bp, Artificial Sequence
  Synthetic
tcgactgttatctcacattaa

SEQ ID NO: 18642 - DNA, 21 bp, Artificial Sequence
  Synthetic
gtcaagtttatctcggttaat

SEQ ID NO: 18643 - DNA, 21 bp, Artificial Sequence
  Synthetic
ataaacttgacatctttcgca

SEQ ID NO: 18644 - DNA, 21 bp, Artificial Sequence
  Synthetic
aaacttgacatctttcgcatt

SEQ ID NO: 18645 - DNA, 21 bp, Artificial Sequence
  Synthetic
catctttcgcattgagaagct

SEQ ID NO: 18646 - DNA, 21 bp, Artificial Sequence
  Synthetic
atctttcgcattgagaagctt

SEQ ID NO: 18647 - DNA, 21 bp, Artificial Sequence
  Synthetic
tttcgcattgagaagctttgg

SEQ ID NO: 18648 - DNA, 21 bp, Artificial Sequence
  Synthetic
attcttccaaagcttctcaat

SEQ ID NO: 18649 - DNA, 21 bp, Artificial Sequence
  Synthetic
gcattgagaagctttggaaga

SEQ ID NO: 18650 - DNA, 21 bp, Artificial Sequence
  Synthetic
gtcaccattatttccgtcccc

SEQ ID NO: 18651 - DNA, 21 bp, Artificial Sequence
  Synthetic
gagtggtgtgtttcgtgggga

SEQ ID NO: 18652 - DNA, 21 bp, Artificial Sequence
  Synthetic
agagtggtgtgtttcgtgggg

SEQ ID NO: 18653 - DNA, 21 bp, Artificial Sequence
  Synthetic
atggagagtggtgtgtttcgt

SEQ ID NO: 18654 - DNA, 21 bp, Artificial Sequence
  Synthetic
gatggagagtggtgtgtttcg

SEQ ID NO: 18655 - DNA, 21 bp, Artificial Sequence
  Synthetic
ggatggagagtggtgtgtttc

SEQ ID NO: 18656 - DNA, 21 bp, Artificial Sequence
  Synthetic
tatgatagaaccgacgggatg

SEQ ID NO: 18657 - DNA, 21 bp, Artificial Sequence
  Synthetic
attatgatagaaccgacggga

SEQ ID NO: 18658 - DNA, 21 bp, Artificial Sequence
  Synthetic
cattatgatagaaccgacggg

SEQ ID NO: 18659 - DNA, 21 bp, Artificial Sequence
  Synthetic
catcccgtcggttctatcata

SEQ ID NO: 18660 - DNA, 21 bp, Artificial Sequence
  Synthetic
agttcattatgatagaaccga

SEQ ID NO: 18661 - DNA, 21 bp, Artificial Sequence
  Synthetic
tagttcattatgatagaaccg

SEQ ID NO: 18662 - DNA, 21 bp, Artificial Sequence
  Synthetic
gttctatcataatgaactatt

SEQ ID NO: 18663 - DNA, 21 bp, Artificial Sequence
  Synthetic
acccgaaatagttcattatga

SEQ ID NO: 18664 - DNA, 21 bp, Artificial Sequence
  Synthetic
aactatttcgggtgccactct

SEQ ID NO: 18665 - DNA, 21 bp, Artificial Sequence
  Synthetic
aatgatctcatagagtggcac

SEQ ID NO: 18666 - DNA, 21 bp, Artificial Sequence
  Synthetic
ccactctatgagatcattccc

SEQ ID NO: 18667 - DNA, 21 bp, Artificial Sequence
  Synthetic
cactctatgagatcattccct

SEQ ID NO: 18668 - DNA, 21 bp, Artificial Sequence
  Synthetic
gcctccaagggaatgatctca

SEQ ID NO: 18669 - DNA, 21 bp, Artificial Sequence
  Synthetic
atcattcccttggaggctgta

SEQ ID NO: 18670 - DNA, 21 bp, Artificial Sequence
  Synthetic
tcattcccttggaggctgtag

SEQ ID NO: 18671 - DNA, 21 bp, Artificial Sequence
  Synthetic
cattcccttggaggctgtagt

SEQ ID NO: 18672 - DNA, 21 bp, Artificial Sequence
  Synthetic
ggtccccactacagcctccaa

SEQ ID NO: 18673 - DNA, 21 bp, Artificial Sequence
  Synthetic
aggtccccactacagcctcca

SEQ ID NO: 18674 - DNA, 21 bp, Artificial Sequence
  Synthetic
caggtccccactacagcctcc

SEQ ID NO: 18675 - DNA, 21 bp, Artificial Sequence
  Synthetic
gtagtggggacctgctgtgtg

SEQ ID NO: 18676 - DNA, 21 bp, Artificial Sequence
  Synthetic
ttggacccatagggagaccca

SEQ ID NO: 18677 - DNA, 21 bp, Artificial Sequence
  Synthetic
tggacccatagggagacccaa

SEQ ID NO: 18678 - DNA, 21 bp, Artificial Sequence
  Synthetic
tttactcctttgggtctccct

SEQ ID NO: 18679 - DNA, 21 bp, Artificial Sequence
  Synthetic
atagggagacccaaaggagta

SEQ ID NO: 18680 - DNA, 21 bp, Artificial Sequence
  Synthetic
tagggagacccaaaggagtaa

SEQ ID NO: 18681 - DNA, 21 bp, Artificial Sequence
  Synthetic
acatcttgctcctttactcct

SEQ ID NO: 18682 - DNA, 21 bp, Artificial Sequence
  Synthetic
cttgtagaggccacagataca

SEQ ID NO: 18683 - DNA, 21 bp, Artificial Sequence
  Synthetic
cgctgtatctgtggcctctac

SEQ ID NO: 18684 - DNA, 21 bp, Artificial Sequence
  Synthetic
gtatctgtggcctctacaagg

SEQ ID NO: 18685 - DNA, 21 bp, Artificial Sequence
  Synthetic
atcatgagaccttcatccttg

SEQ ID NO: 18686 - DNA, 21 bp, Artificial Sequence
  Synthetic
atgcacttgtcacactggatc

SEQ ID NO: 18687 - DNA, 21 bp, Artificial Sequence
  Synthetic
atccagtgtgacaagtgcatg

SEQ ID NO: 18688 - DNA, 21 bp, Artificial Sequence
  Synthetic
cctcaccatgcacttgtcaca

SEQ ID NO: 18689 - DNA, 21 bp, Artificial Sequence
  Synthetic
ccagtgtgacaagtgcatggt

SEQ ID NO: 18690 - DNA, 21 bp, Artificial Sequence
  Synthetic
gtatggcagcactgtgattgt

SEQ ID NO: 18691 - DNA, 21 bp, Artificial Sequence
  Synthetic
tatggcagcactgtgattgta

SEQ ID NO: 18692 - DNA, 21 bp, Artificial Sequence
  Synthetic
atggcagcactgtgattgtat

SEQ ID NO: 18693 - DNA, 21 bp, Artificial Sequence
  Synthetic
cagcactgtgattgtatggga

SEQ ID NO: 18694 - DNA, 21 bp, Artificial Sequence
  Synthetic
tgtatgggagtgaactcagat

SEQ ID NO: 18695 - DNA, 21 bp, Artificial Sequence
  Synthetic
gtatgggagtgaactcagatg

SEQ ID NO: 18696 - DNA, 21 bp, Artificial Sequence
  Synthetic
cacaaaggtagtgctccacat

SEQ ID NO: 18697 - DNA, 21 bp, Artificial Sequence
  Synthetic
cagatgtggagcactaccttt

SEQ ID NO: 18698 - DNA, 21 bp, Artificial Sequence
  Synthetic
gccccctctgatgtggccgga

SEQ ID NO: 18699 - DNA, 21 bp, Artificial Sequence
  Synthetic
gccggatggggcaccttcata

SEQ ID NO: 18700 - DNA, 21 bp, Artificial Sequence
  Synthetic
ccggatggggcaccttcataa

SEQ ID NO: 18701 - DNA, 21 bp, Artificial Sequence
  Synthetic
accttcataaaggagtctgtg

SEQ ID NO: 18702 - DNA, 21 bp, Artificial Sequence
  Synthetic
ttcttctgcacagactccttt

SEQ ID NO: 18703 - DNA, 21 bp, Artificial Sequence
  Synthetic
ttcataaaggagtctgtgcag

SEQ ID NO: 18704 - DNA, 21 bp, Artificial Sequence
  Synthetic
taaaggagtctgtgcagaaga

SEQ ID NO: 18705 - DNA, 21 bp, Artificial Sequence
  Synthetic
tgcagaagaacgaattcattt

SEQ ID NO: 18706 - DNA, 21 bp, Artificial Sequence
  Synthetic
aattcatttctgaatactgtg

SEQ ID NO: 18707 - DNA, 21 bp, Artificial Sequence
  Synthetic
acctcaccacagtattcagaa

SEQ ID NO: 18708 - DNA, 21 bp, Artificial Sequence
  Synthetic
atttctgaatactgtggtgag

SEQ ID NO: 18709 - DNA, 21 bp, Artificial Sequence
  Synthetic
cactcacctcaccacagtatt

SEQ ID NO: 18710 - DNA, 21 bp, Artificial Sequence
  Synthetic
ctatctctctagctcatctct

SEQ ID NO: 18711 - DNA, 21 bp, Artificial Sequence
  Synthetic
ctctctagctcatctctcagg

SEQ ID NO: 18712 - DNA, 21 bp, Artificial Sequence
  Synthetic
gcctcatcctgagagatgagc

SEQ ID NO: 18713 - DNA, 21 bp, Artificial Sequence
  Synthetic
cgatcagcctcatcctgagag

SEQ ID NO: 18714 - DNA, 21 bp, Artificial Sequence
  Synthetic
cgcgtcgatcagcctcatcct

SEQ ID NO: 18715 - DNA, 21 bp, Artificial Sequence
  Synthetic
tccgcgtcgatcagcctcatc

SEQ ID NO: 18716 - DNA, 21 bp, Artificial Sequence
  Synthetic
ctcaggatgaggctgatcgac

SEQ ID NO: 18717 - DNA, 21 bp, Artificial Sequence
  Synthetic
tcaggatgaggctgatcgacg

SEQ ID NO: 18718 - DNA, 21 bp, Artificial Sequence
  Synthetic
ttattgaggttgaagaggaag

SEQ ID NO: 18719 - DNA, 21 bp, Artificial Sequence
  Synthetic
ataccattattgaggttgaag

SEQ ID NO: 18720 - DNA, 21 bp, Artificial Sequence
  Synthetic
cataccattattgaggttgaa

SEQ ID NO: 18721 - DNA, 21 bp, Artificial Sequence
  Synthetic
ttcataccattattgaggttg

SEQ ID NO: 18722 - DNA, 21 bp, Artificial Sequence
  Synthetic
ctcttcaacctcaataatggt

SEQ ID NO: 18723 - DNA, 21 bp, Artificial Sequence
  Synthetic
gacttcataccattattgagg

SEQ ID NO: 18724 - DNA, 21 bp, Artificial Sequence
  Synthetic
caaagtgacttcataccatta

SEQ ID NO: 18725 - DNA, 21 bp, Artificial Sequence
  Synthetic
ttgtagtggatgctactcgga

SEQ ID NO: 18726 - DNA, 21 bp, Artificial Sequence
  Synthetic
tgtagtggatgctactcggaa

SEQ ID NO: 18727 - DNA, 21 bp, Artificial Sequence
  Synthetic
attcgatttgcaaatcattca

SEQ ID NO: 18728 - DNA, 21 bp, Artificial Sequence
  Synthetic
attcactgaatgatttgcaaa

SEQ ID NO: 18729 - DNA, 21 bp, Artificial Sequence
  Synthetic
tggcataacagttgggattca

SEQ ID NO: 18730 - DNA, 21 bp, Artificial Sequence
  Synthetic
atcccaactgttatgccaaag

SEQ ID NO: 18731 - DNA, 21 bp, Artificial Sequence
  Synthetic
actcacctttggcataacagt

SEQ ID NO: 18732 - DNA, 21 bp, Artificial Sequence
  Synthetic
gactcacctttggcataacag

SEQ ID NO: 18733 - DNA, 21 bp, Artificial Sequence
  Synthetic
atcctgcttgcagtggtcatg

SEQ ID NO: 18734 - DNA, 21 bp, Artificial Sequence
  Synthetic
tgcttgcagtggtcatggtga

SEQ ID NO: 18735 - DNA, 21 bp, Artificial Sequence
  Synthetic
gcttgcagtggtcatggtgaa

SEQ ID NO: 18736 - DNA, 21 bp, Artificial Sequence
  Synthetic
ggtcatggtgaatggagacca

SEQ ID NO: 18737 - DNA, 21 bp, Artificial Sequence
  Synthetic
tggtgaatggagaccatcgga

SEQ ID NO: 18738 - DNA, 21 bp, Artificial Sequence
  Synthetic
ggtgaatggagaccatcggat

SEQ ID NO: 18739 - DNA, 21 bp, Artificial Sequence
  Synthetic
catcggattgggatctttgcc

SEQ ID NO: 18740 - DNA, 21 bp, Artificial Sequence
  Synthetic
tcggattgggatctttgccaa

SEQ ID NO: 18741 - DNA, 21 bp, Artificial Sequence
  Synthetic
ccaagagggcaattcaagctg

SEQ ID NO: 18742 - DNA, 21 bp, Artificial Sequence
  Synthetic
agagggcaattcaagctggcg

SEQ ID NO: 18743 - DNA, 21 bp, Artificial Sequence
  Synthetic
aaagaagagctcttcgccagc

SEQ ID NO: 18744 - DNA, 21 bp, Artificial Sequence
  Synthetic
agagctcttctttgattacag

SEQ ID NO: 18745 - DNA, 21 bp, Artificial Sequence
  Synthetic
gcacctcacctgtaatcaaag

SEQ ID NO: 18746 - DNA, 21 bp, Artificial Sequence
  Synthetic
ctggcacctcacctgtaatca

SEQ ID NO: 18747 - DNA, 21 bp, Artificial Sequence
  Synthetic
gcaccatctgacgtggcaggc

SEQ ID NO: 18748 - DNA, 21 bp, Artificial Sequence
  Synthetic
caccatctgacgtggcaggct

SEQ ID NO: 18749 - DNA, 21 bp, Artificial Sequence
  Synthetic
accatctgacgtggcaggctg

SEQ ID NO: 18750 - DNA, 21 bp, Artificial Sequence
  Synthetic
tcaaagatcctgtgcagaaaa

SEQ ID NO: 18751 - DNA, 21 bp, Artificial Sequence
  Synthetic
tgcagaaaaatgaattcatct

SEQ ID NO: 18752 - DNA, 21 bp, Artificial Sequence
  Synthetic
atgaattcatctcagaatact

SEQ ID NO: 18753 - DNA, 21 bp, Artificial Sequence
  Synthetic
tgaattcatctcagaatactg

SEQ ID NO: 18754 - DNA, 21 bp, Artificial Sequence
  Synthetic
aattcatctcagaatactgtg

SEQ ID NO: 18755 - DNA, 21 bp, Artificial Sequence
  Synthetic
acctctccacagtattctgag

SEQ ID NO: 18756 - DNA, 21 bp, Artificial Sequence
  Synthetic
gccttacctctccacagtatt

SEQ ID NO: 18757 - DNA, 21 bp, Artificial Sequence
  Synthetic
tatttctcaagatgaagctga

SEQ ID NO: 18758 - DNA, 21 bp, Artificial Sequence
  Synthetic
ctcttctgtcagcttcatctt

SEQ ID NO: 18759 - DNA, 21 bp, Artificial Sequence
  Synthetic
ttctcaagatgaagctgacag

SEQ ID NO: 18760 - DNA, 21 bp, Artificial Sequence
  Synthetic
ccctcttctgtcagcttcatc

SEQ ID NO: 18761 - DNA, 21 bp, Artificial Sequence
  Synthetic
ctcaagatgaagctgacagaa

SEQ ID NO: 18762 - DNA, 21 bp, Artificial Sequence
  Synthetic
tcaagatgaagctgacagaag

SEQ ID NO: 18763 - DNA, 21 bp, Artificial Sequence
  Synthetic
caagatgaagctgacagaaga

SEQ ID NO: 18764 - DNA, 21 bp, Artificial Sequence
  Synthetic
atgtgcagctttctgttcaac

SEQ ID NO: 18765 - DNA, 21 bp, Artificial Sequence
  Synthetic
cataccattgttcaagttgaa

SEQ ID NO: 18766 - DNA, 21 bp, Artificial Sequence
  Synthetic
tgaaacataccattgttcaag

SEQ ID NO: 18767 - DNA, 21 bp, Artificial Sequence
  Synthetic
tttgtggtggatgcaacccgc

SEQ ID NO: 18768 - DNA, 21 bp, Artificial Sequence
  Synthetic
atttaccgaatgatttgcaaa

SEQ ID NO: 18769 - DNA, 21 bp, Artificial Sequence
  Synthetic
ttgcatagcagtttggattta

SEQ ID NO: 18770 - DNA, 21 bp, Artificial Sequence
  Synthetic
tatgatggttaacggtgatca

SEQ ID NO: 18771 - DNA, 21 bp, Artificial Sequence
  Synthetic
ccaagagagccatccagactg

SEQ ID NO: 18772 - DNA, 21 bp, Artificial Sequence
  Synthetic
agagagccatccagactggcg

SEQ ID NO: 18773 - DNA, 21 bp, Artificial Sequence
  Synthetic
aaaaaacagctcttcgccagt

SEQ ID NO: 18774 - DNA, 21 bp, Artificial Sequence
  Synthetic
ggatgaagctcctgcagttct

SEQ ID NO: 18775 - DNA, 21 bp, Artificial Sequence
  Synthetic
atgaagctcctgcagttctgt

SEQ ID NO: 18776 - DNA, 21 bp, Artificial Sequence
  Synthetic
cggtggttctcacagaactgc

SEQ ID NO: 18777 - DNA, 21 bp, Artificial Sequence
  Synthetic
ccggtggttctcacagaactg

SEQ ID NO: 18778 - DNA, 21 bp, Artificial Sequence
  Synthetic
taggcaggccggtggttctca

SEQ ID NO: 18779 - DNA, 21 bp, Artificial Sequence
  Synthetic
tgagaaccaccggcctgccta

SEQ ID NO: 18780 - DNA, 21 bp, Artificial Sequence
  Synthetic
gagaaccaccggcctgcctac

SEQ ID NO: 18781 - DNA, 21 bp, Artificial Sequence
  Synthetic
ccggcctgcctactggggtac

SEQ ID NO: 18782 - DNA, 21 bp, Artificial Sequence
  Synthetic
cggcctgcctactggggtacc

SEQ ID NO: 18783 - DNA, 21 bp, Artificial Sequence
  Synthetic
gcctactggggtacctggaat

SEQ ID NO: 18784 - DNA, 21 bp, Artificial Sequence
  Synthetic
gaagacggcactcatccgcgc

SEQ ID NO: 18785 - DNA, 21 bp, Artificial Sequence
  Synthetic
actcatccgcgcgcgagaccc

SEQ ID NO: 18786 - DNA, 21 bp, Artificial Sequence
  Synthetic
gcccaggggtctcgcgcgcgg

SEQ ID NO: 18787 - DNA, 21 bp, Artificial Sequence
  Synthetic
ctgggcccaggggtctcgcgc

SEQ ID NO: 18788 - DNA, 21 bp, Artificial Sequence
  Synthetic
cgcgcgcgagacccctgggcc

SEQ ID NO: 18789 - DNA, 21 bp, Artificial Sequence
  Synthetic
gacccctgggcccaggacacg

SEQ ID NO: 18790 - DNA, 21 bp, Artificial Sequence
  Synthetic
agctcaccgtgtcctgggccc

SEQ ID NO: 18791 - DNA, 21 bp, Artificial Sequence
  Synthetic
tagctcaccgtgtcctgggcc

SEQ ID NO: 18792 - DNA, 21 bp, Artificial Sequence
  Synthetic
ctggggctagctcaccgtgtc

SEQ ID NO: 18793 - DNA, 21 bp, Artificial Sequence
  Synthetic
tttctcagaagctcctggact

SEQ ID NO: 18794 - DNA, 21 bp, Artificial Sequence
  Synthetic
cctcatagtccaggagcttct

SEQ ID NO: 18795 - DNA, 21 bp, Artificial Sequence
  Synthetic
cacctcatagtccaggagctt

SEQ ID NO: 18796 - DNA, 21 bp, Artificial Sequence
  Synthetic
cagaagctcctggactatgag

SEQ ID NO: 18797 - DNA, 21 bp, Artificial Sequence
  Synthetic
tcactgtccacctcatagtcc

SEQ ID NO: 18798 - DNA, 21 bp, Artificial Sequence
  Synthetic
atcactgtccacctcatagtc

SEQ ID NO: 18799 - DNA, 21 bp, Artificial Sequence
  Synthetic
tggactatgaggtggacagtg

SEQ ID NO: 18800 - DNA, 21 bp, Artificial Sequence
  Synthetic
gactatgaggtggacagtgat

SEQ ID NO: 18801 - DNA, 21 bp, Artificial Sequence
  Synthetic
actatgaggtggacagtgatg

SEQ ID NO: 18802 - DNA, 21 bp, Artificial Sequence
  Synthetic
tgaggtggacagtgatgagga

SEQ ID NO: 18803 - DNA, 21 bp, Artificial Sequence
  Synthetic
gaggtggacagtgatgaggag

SEQ ID NO: 18804 - DNA, 21 bp, Artificial Sequence
  Synthetic
aggtggacagtgatgaggagt

SEQ ID NO: 18805 - DNA, 21 bp, Artificial Sequence
  Synthetic
tggacagtgatgaggagtggg

SEQ ID NO: 18806 - DNA, 21 bp, Artificial Sequence
  Synthetic
acagtgatgaggagtgggaag

SEQ ID NO: 18807 - DNA, 21 bp, Artificial Sequence
  Synthetic
agtgatgaggagtgggaagaa

SEQ ID NO: 18808 - DNA, 21 bp, Artificial Sequence
  Synthetic
gtgatgaggagtgggaagaag

SEQ ID NO: 18809 - DNA, 21 bp, Artificial Sequence
  Synthetic
aggagtgggaagaagaggagc

SEQ ID NO: 18810 - DNA, 21 bp, Artificial Sequence
  Synthetic
ggagtgggaagaagaggagcc

SEQ ID NO: 18811 - DNA, 21 bp, Artificial Sequence
  Synthetic
gagtgggaagaagaggagcct

SEQ ID NO: 18812 - DNA, 21 bp, Artificial Sequence
  Synthetic
agtgggaagaagaggagcctg

SEQ ID NO: 18813 - DNA, 21 bp, Artificial Sequence
  Synthetic
ctggggagtccctgtcccaca

SEQ ID NO: 18814 - DNA, 21 bp, Artificial Sequence
  Synthetic
ggggagtccctgtcccacagt

SEQ ID NO: 18815 - DNA, 21 bp, Artificial Sequence
  Synthetic
gggagtccctgtcccacagtg

SEQ ID NO: 18816 - DNA, 21 bp, Artificial Sequence
  Synthetic
ggagtccctgtcccacagtga

SEQ ID NO: 18817 - DNA, 21 bp, Artificial Sequence
  Synthetic
cttaccccctcactgtgggac

SEQ ID NO: 18818 - DNA, 21 bp, Artificial Sequence
  Synthetic
ccttaccccctcactgtggga

SEQ ID NO: 18819 - DNA, 21 bp, Artificial Sequence
  Synthetic
cctgtcccacagtgagggggt

SEQ ID NO: 18820 - DNA, 21 bp, Artificial Sequence
  Synthetic
cacatccttaccccctcactg

SEQ ID NO: 18821 - DNA, 21 bp, Artificial Sequence
  Synthetic
gcacatccttaccccctcact

SEQ ID NO: 18822 - DNA, 21 bp, Artificial Sequence
  Synthetic
tttgaggatgatgatgacgac

SEQ ID NO: 18823 - DNA, 21 bp, Artificial Sequence
  Synthetic
ttgaggatgatgatgacgaca

SEQ ID NO: 18824 - DNA, 21 bp, Artificial Sequence
  Synthetic
tgaggatgatgatgacgacat

SEQ ID NO: 18825 - DNA, 21 bp, Artificial Sequence
  Synthetic
aggatgatgatgacgacatgg

SEQ ID NO: 18826 - DNA, 21 bp, Artificial Sequence
  Synthetic
gatgatgatgacgacatggga

SEQ ID NO: 18827 - DNA, 21 bp, Artificial Sequence
  Synthetic
atgatgacgacatgggagagg

SEQ ID NO: 18828 - DNA, 21 bp, Artificial Sequence
  Synthetic
acgacatgggagaggatgaag

SEQ ID NO: 18829 - DNA, 21 bp, Artificial Sequence
  Synthetic
gacatgggagaggatgaagat

SEQ ID NO: 18830 - DNA, 21 bp, Artificial Sequence
  Synthetic
gtccgccagaaactgaaggcc

SEQ ID NO: 18831 - DNA, 21 bp, Artificial Sequence
  Synthetic
tccgccagaaactgaaggcca

SEQ ID NO: 18832 - DNA, 21 bp, Artificial Sequence
  Synthetic
ccagaaactgaaggccaagga

SEQ ID NO: 18833 - DNA, 21 bp, Artificial Sequence
  Synthetic
cagaaactgaaggccaaggag

SEQ ID NO: 18834 - DNA, 21 bp, Artificial Sequence
  Synthetic
aactgaaggccaaggagtggg

SEQ ID NO: 18835 - DNA, 21 bp, Artificial Sequence
  Synthetic
gagtgggacgagttcctggct

SEQ ID NO: 18836 - DNA, 21 bp, Artificial Sequence
  Synthetic
agtgggacgagttcctggcta

SEQ ID NO: 18837 - DNA, 21 bp, Artificial Sequence
  Synthetic
gtgggacgagttcctggctaa

SEQ ID NO: 18838 - DNA, 21 bp, Artificial Sequence
  Synthetic
tgggacgagttcctggctaag

SEQ ID NO: 18839 - DNA, 21 bp, Artificial Sequence
  Synthetic
cgaaagcgcttccccttagcc

SEQ ID NO: 18840 - DNA, 21 bp, Artificial Sequence
  Synthetic
gcgaaagcgcttccccttagc

SEQ ID NO: 18841 - DNA, 21 bp, Artificial Sequence
  Synthetic
cgctttcgcgtcctgcaacct

SEQ ID NO: 18842 - DNA, 21 bp, Artificial Sequence
  Synthetic
gatcttcacaggttgcaggac

SEQ ID NO: 18843 - DNA, 21 bp, Artificial Sequence
  Synthetic
gcagccgatcttcacaggttg

SEQ ID NO: 18844 - DNA, 21 bp, Artificial Sequence
  Synthetic
acctgtgaagatcggctgcgt

SEQ ID NO: 18845 - DNA, 21 bp, Artificial Sequence
  Synthetic
cggctgcgtgtgggcggctga

SEQ ID NO: 18846 - DNA, 21 bp, Artificial Sequence
  Synthetic
agagactgcgcaggcgatgac

SEQ ID NO: 18847 - DNA, 21 bp, Artificial Sequence
  Synthetic
cagcagttcgcagcctgcttc

SEQ ID NO: 18848 - DNA, 21 bp, Artificial Sequence
  Synthetic
agcagttcgcagcctgcttcc

SEQ ID NO: 18849 - DNA, 21 bp, Artificial Sequence
  Synthetic
agggtctccaggaagcaggct

SEQ ID NO: 18850 - DNA, 21 bp, Artificial Sequence
  Synthetic
tcctgggccggcagggtctcc

SEQ ID NO: 18851 - DNA, 21 bp, Artificial Sequence
  Synthetic
ttcctggagaccctgccggcc

SEQ ID NO: 18852 - DNA, 21 bp, Artificial Sequence
  Synthetic
ctcctgggccggcagggtctc

SEQ ID NO: 18853 - DNA, 21 bp, Artificial Sequence
  Synthetic
tcctggagaccctgccggccc

SEQ ID NO: 18854 - DNA, 21 bp, Artificial Sequence
  Synthetic
ctggagaccctgccggcccag

SEQ ID NO: 18855 - DNA, 21 bp, Artificial Sequence
  Synthetic
tggagaccctgccggcccagg

SEQ ID NO: 18856 - DNA, 21 bp, Artificial Sequence
  Synthetic
cgtctgctcctcctgggccgg

SEQ ID NO: 18857 - DNA, 21 bp, Artificial Sequence
  Synthetic
ggccttgggcgtctgctcctc

SEQ ID NO: 18858 - DNA, 21 bp, Artificial Sequence
  Synthetic
gcagacgcccaaggcctccaa

SEQ ID NO: 18859 - DNA, 21 bp, Artificial Sequence
  Synthetic
cagacgcccaaggcctccaag

SEQ ID NO: 18860 - DNA, 21 bp, Artificial Sequence
  Synthetic
agacgcccaaggcctccaagc

SEQ ID NO: 18861 - DNA, 21 bp, Artificial Sequence
  Synthetic
acgcccaaggcctccaagcgg

SEQ ID NO: 18862 - DNA, 21 bp, Artificial Sequence
  Synthetic
gcccaaggcctccaagcggga

SEQ ID NO: 18863 - DNA, 21 bp, Artificial Sequence
  Synthetic
ctcctctcccgcttggaggcc

SEQ ID NO: 18864 - DNA, 21 bp, Artificial Sequence
  Synthetic
cccaaggcctccaagcgggag

SEQ ID NO: 18865 - DNA, 21 bp, Artificial Sequence
  Synthetic
caaggcctccaagcgggagag

SEQ ID NO: 18866 - DNA, 21 bp, Artificial Sequence
  Synthetic
cctccaagcgggagaggagag

SEQ ID NO: 18867 - DNA, 21 bp, Artificial Sequence
  Synthetic
gctcgtctctcctctcccgct

SEQ ID NO: 18868 - DNA, 21 bp, Artificial Sequence
  Synthetic
tgctcgtctctcctctcccgc

SEQ ID NO: 18869 - DNA, 21 bp, Artificial Sequence
  Synthetic
aagcgggagaggagagacgag

SEQ ID NO: 18870 - DNA, 21 bp, Artificial Sequence
  Synthetic
gggagaggagagacgagcaga

SEQ ID NO: 18871 - DNA, 21 bp, Artificial Sequence
  Synthetic
caggagcggcagcagctgggc

SEQ ID NO: 18872 - DNA, 21 bp, Artificial Sequence
  Synthetic
gccgtgcaggagcggcagcag

SEQ ID NO: 18873 - DNA, 21 bp, Artificial Sequence
  Synthetic
ctgccgctcctgcacggcaat

SEQ ID NO: 18874 - DNA, 21 bp, Artificial Sequence
  Synthetic
cgctcctgcacggcaatgtga

SEQ ID NO: 18875 - DNA, 21 bp, Artificial Sequence
  Synthetic
gctcctgcacggcaatgtgaa

SEQ ID NO: 18876 - DNA, 21 bp, Artificial Sequence
  Synthetic
ctcccgttcacattgccgtgc

SEQ ID NO: 18877 - DNA, 21 bp, Artificial Sequence
  Synthetic
ctcctgcacggcaatgtgaac

SEQ ID NO: 18878 - DNA, 21 bp, Artificial Sequence
  Synthetic
gctcccgttcacattgccgtg

SEQ ID NO: 18879 - DNA, 21 bp, Artificial Sequence
  Synthetic
gaacgggagcaaggtcatcat

SEQ ID NO: 18880 - DNA, 21 bp, Artificial Sequence
  Synthetic
aacgggagcaaggtcatcatc

SEQ ID NO: 18881 - DNA, 21 bp, Artificial Sequence
  Synthetic
acgggagcaaggtcatcatcc

SEQ ID NO: 18882 - DNA, 21 bp, Artificial Sequence
  Synthetic
aaggtcatcatccgggagttc

SEQ ID NO: 18883 - DNA, 21 bp, Artificial Sequence
  Synthetic
aggtcatcatccgggagttcc

SEQ ID NO: 18884 - DNA, 21 bp, Artificial Sequence
  Synthetic
gcggcagtgctcctggaactc

SEQ ID NO: 18885 - DNA, 21 bp, Artificial Sequence
  Synthetic
ggagttccaggagcactgccg

SEQ ID NO: 18886 - DNA, 21 bp, Artificial Sequence
  Synthetic
gagttccaggagcactgccgc

SEQ ID NO: 18887 - DNA, 21 bp, Artificial Sequence
  Synthetic
agttccaggagcactgccgcc

SEQ ID NO: 18888 - DNA, 21 bp, Artificial Sequence
  Synthetic
agtccccggcggcagtgctcc

SEQ ID NO: 18889 - DNA, 21 bp, Artificial Sequence
  Synthetic
cagtccccggcggcagtgctc

SEQ ID NO: 18890 - DNA, 21 bp, Artificial Sequence
  Synthetic
cgcgggctgccggtgtggttg

SEQ ID NO: 18891 - DNA, 21 bp, Artificial Sequence
  Synthetic
cagcaaccacaccggcagccc

SEQ ID NO: 18892 - DNA, 21 bp, Artificial Sequence
  Synthetic
agcaaccacaccggcagcccg

SEQ ID NO: 18893 - DNA, 21 bp, Artificial Sequence
  Synthetic
ggtaggtggtggaggggctcc

SEQ ID NO: 18894 - DNA, 21 bp, Artificial Sequence
  Synthetic
gggtgtgcaggtaggtggtgg

SEQ ID NO: 18895 - DNA, 21 bp, Artificial Sequence
  Synthetic
ggggtgtgcaggtaggtggtg

SEQ ID NO: 18896 - DNA, 21 bp, Artificial Sequence
  Synthetic
tgggggtgtgcaggtaggtgg

SEQ ID NO: 18897 - DNA, 21 bp, Artificial Sequence
  Synthetic
gtgggggtgtgcaggtaggtg

SEQ ID NO: 18898 - DNA, 21 bp, Artificial Sequence
  Synthetic
acctgcacacccccaccccca

SEQ ID NO: 18899 - DNA, 21 bp, Artificial Sequence
  Synthetic
ctgcacacccccacccccagc

SEQ ID NO: 18900 - DNA, 21 bp, Artificial Sequence
  Synthetic
ggcggcatcctcgctgggggt

SEQ ID NO: 18901 - DNA, 21 bp, Artificial Sequence
  Synthetic
tggcggcatcctcgctggggg

SEQ ID NO: 18902 - DNA, 21 bp, Artificial Sequence
  Synthetic
atggcggcatcctcgctgggg

SEQ ID NO: 18903 - DNA, 21 bp, Artificial Sequence
  Synthetic
ggggatggcggcatcctcgct

SEQ ID NO: 18904 - DNA, 21 bp, Artificial Sequence
  Synthetic
aggggatggcggcatcctcgc

SEQ ID NO: 18905 - DNA, 21 bp, Artificial Sequence
  Synthetic
gaggggatggcggcatcctcg

SEQ ID NO: 18906 - DNA, 21 bp, Artificial Sequence
  Synthetic
ccgcttgagccgggacttaga

SEQ ID NO: 18907 - DNA, 21 bp, Artificial Sequence
  Synthetic
gccgcttgagccgggacttag

SEQ ID NO: 18908 - DNA, 21 bp, Artificial Sequence
  Synthetic
agccgcttgagccgggactta

SEQ ID NO: 18909 - DNA, 21 bp, Artificial Sequence
  Synthetic
tgagccgcttgagccgggact

SEQ ID NO: 18910 - DNA, 21 bp, Artificial Sequence
  Synthetic
tcggaaatgagccgcttgagc

SEQ ID NO: 18911 - DNA, 21 bp, Artificial Sequence
  Synthetic
ctcggaaatgagccgcttgag

SEQ ID NO: 18912 - DNA, 21 bp, Artificial Sequence
  Synthetic
cccggctcaagcggctcattt

SEQ ID NO: 18913 - DNA, 21 bp, Artificial Sequence
  Synthetic
cggctcaagcggctcatttcc

SEQ ID NO: 18914 - DNA, 21 bp, Artificial Sequence
  Synthetic
gagttctcggaaatgagccgc

SEQ ID NO: 18915 - DNA, 21 bp, Artificial Sequence
  Synthetic
tcatacactgagttctcggaa

SEQ ID NO: 18916 - DNA, 21 bp, Artificial Sequence
  Synthetic
tcatttccgagaactcagtgt

SEQ ID NO: 18917 - DNA, 21 bp, Artificial Sequence
  Synthetic
atttccgagaactcagtgtat

SEQ ID NO: 18918 - DNA, 21 bp, Artificial Sequence
  Synthetic
gcttctcatacactgagttct

SEQ ID NO: 18919 - DNA, 21 bp, Artificial Sequence
  Synthetic
cgcttctcatacactgagttc

SEQ ID NO: 18920 - DNA, 21 bp, Artificial Sequence
  Synthetic
agtcaggccgcttctcataca

SEQ ID NO: 18921 - DNA, 21 bp, Artificial Sequence
  Synthetic
gtatgagaagcggcctgactt

SEQ ID NO: 18922 - DNA, 21 bp, Artificial Sequence
  Synthetic
gggtgcacgtaccagcacatc

SEQ ID NO: 18923 - DNA, 21 bp, Artificial Sequence
  Synthetic
tacgtgcacccgcaggtgcta

SEQ ID NO: 18924 - DNA, 21 bp, Artificial Sequence
  Synthetic
gctggaagctctgtagcacct

SEQ ID NO: 18925 - DNA, 21 bp, Artificial Sequence
  Synthetic
caggtgctacagagcttccag

SEQ ID NO: 18926 - DNA, 21 bp, Artificial Sequence
  Synthetic
aggtgctacagagcttccagc

SEQ ID NO: 18927 - DNA, 21 bp, Artificial Sequence
  Synthetic
ggcacgggcaggtgctcctgc

SEQ ID NO: 18928 - DNA, 21 bp, Artificial Sequence
  Synthetic
cggcacgggcaggtgctcctg

SEQ ID NO: 18929 - DNA, 21 bp, Artificial Sequence
  Synthetic
gcacctgcccgtgccgtgcca

SEQ ID NO: 18930 - DNA, 21 bp, Artificial Sequence
  Synthetic
cacctgcccgtgccgtgccag

SEQ ID NO: 18931 - DNA, 21 bp, Artificial Sequence
  Synthetic
acatagctccactggcacggc

SEQ ID NO: 18932 - DNA, 21 bp, Artificial Sequence
  Synthetic
catcggtgccctcggccccca

SEQ ID NO: 18933 - DNA, 21 bp, Artificial Sequence
  Synthetic
tcggtgccctcggcccccaaa

SEQ ID NO: 18934 - DNA, 21 bp, Artificial Sequence
  Synthetic
ccactgtcctctttgggggcc

SEQ ID NO: 18935 - DNA, 21 bp, Artificial Sequence
  Synthetic
tgccactgtcctctttggggg

SEQ ID NO: 18936 - DNA, 21 bp, Artificial Sequence
  Synthetic
gacgctgccactgtcctcttt

SEQ ID NO: 18937 - DNA, 21 bp, Artificial Sequence
  Synthetic
ggacgctgccactgtcctctt

SEQ ID NO: 18938 - DNA, 21 bp, Artificial Sequence
  Synthetic
gggacgctgccactgtcctct

SEQ ID NO: 18939 - DNA, 21 bp, Artificial Sequence
  Synthetic
gacagtggcagcgtcccctcc

SEQ ID NO: 18940 - DNA, 21 bp, Artificial Sequence
  Synthetic
acagtggcagcgtcccctcca

SEQ ID NO: 18941 - DNA, 21 bp, Artificial Sequence
  Synthetic
gtcccctccacggggcccagc

SEQ ID NO: 18942 - DNA, 21 bp, Artificial Sequence
  Synthetic
gccctggctgggccccgtgga

SEQ ID NO: 18943 - DNA, 21 bp, Artificial Sequence
  Synthetic
tgccctggctgggccccgtgg

SEQ ID NO: 18944 - DNA, 21 bp, Artificial Sequence
  Synthetic
gtgccctggctgggccccgtg

SEQ ID NO: 18945 - DNA, 21 bp, Artificial Sequence
  Synthetic
gagtgccctggctgggccccg

SEQ ID NO: 18946 - DNA, 21 bp, Artificial Sequence
  Synthetic
ggagtgccctggctgggcccc

SEQ ID NO: 18947 - DNA, 21 bp, Artificial Sequence
  Synthetic
agcgagatgggagtgccctgg

SEQ ID NO: 18948 - DNA, 21 bp, Artificial Sequence
  Synthetic
agccagggcactcccatctcg

SEQ ID NO: 18949 - DNA, 21 bp, Artificial Sequence
  Synthetic
cagggcactcccatctcgctg

SEQ ID NO: 18950 - DNA, 21 bp, Artificial Sequence
  Synthetic
gggcactcccatctcgctgaa

SEQ ID NO: 18951 - DNA, 21 bp, Artificial Sequence
  Synthetic
ggcactcccatctcgctgaag

SEQ ID NO: 18952 - DNA, 21 bp, Artificial Sequence
  Synthetic
tgacttcctcttcagcgagat

SEQ ID NO: 18953 - DNA, 21 bp, Artificial Sequence
  Synthetic
ctgacttcctcttcagcgaga

SEQ ID NO: 18954 - DNA, 21 bp, Artificial Sequence
  Synthetic
gctgacttcctcttcagcgag

SEQ ID NO: 18955 - DNA, 21 bp, Artificial Sequence
  Synthetic
atctcgctgaagaggaagtca

SEQ ID NO: 18956 - DNA, 21 bp, Artificial Sequence
  Synthetic
tgcccgctgacttcctcttca

SEQ ID NO: 18957 - DNA, 21 bp, Artificial Sequence
  Synthetic
agcatgtgcatcacccaattc

SEQ ID NO: 18958 - DNA, 21 bp, Artificial Sequence
  Synthetic
atgtgcatcacccaattcatg

SEQ ID NO: 18959 - DNA, 21 bp, Artificial Sequence
  Synthetic
gtgcctgcgcttcttcatgaa

SEQ ID NO: 18960 - DNA, 21 bp, Artificial Sequence
  Synthetic
ccgtcgtgcctgcgcttcttc

SEQ ID NO: 18961 - DNA, 21 bp, Artificial Sequence
  Synthetic
aagcgcaggcacgacggccag

SEQ ID NO: 18962 - DNA, 21 bp, Artificial Sequence
  Synthetic
ccctgtctgtccagattggtg

SEQ ID NO: 18963 - DNA, 21 bp, Artificial Sequence
  Synthetic
gtccagattggtgctgaagac

SEQ ID NO: 18964 - DNA, 21 bp, Artificial Sequence
  Synthetic
gtccatgtcttcagcaccaat

SEQ ID NO: 18965 - DNA, 21 bp, Artificial Sequence
  Synthetic
atggacggcttccaggcagac

SEQ ID NO: 18966 - DNA, 21 bp, Artificial Sequence
  Synthetic
tggacggcttccaggcagaca

SEQ ID NO: 18967 - DNA, 21 bp, Artificial Sequence
  Synthetic
gacggcttccaggcagacacg

SEQ ID NO: 18968 - DNA, 21 bp, Artificial Sequence
  Synthetic
acggcttccaggcagacacgg

SEQ ID NO: 18969 - DNA, 21 bp, Artificial Sequence
  Synthetic
ggcttccaggcagacacggag

SEQ ID NO: 18970 - DNA, 21 bp, Artificial Sequence
  Synthetic
gcttccaggcagacacggagg

SEQ ID NO: 18971 - DNA, 21 bp, Artificial Sequence
  Synthetic
tcctcctcctccgtgtctgcc

SEQ ID NO: 18972 - DNA, 21 bp, Artificial Sequence
  Synthetic
ttccaggcagacacggaggag

SEQ ID NO: 18973 - DNA, 21 bp, Artificial Sequence
  Synthetic
ttcctcctcctccgtgtctgc

SEQ ID NO: 18974 - DNA, 21 bp, Artificial Sequence
  Synthetic
tccaggcagacacggaggagg

SEQ ID NO: 18975 - DNA, 21 bp, Artificial Sequence
  Synthetic
aggcagacacggaggaggagg

SEQ ID NO: 18976 - DNA, 21 bp, Artificial Sequence
  Synthetic
gcagacacggaggaggaggaa

SEQ ID NO: 18977 - DNA, 21 bp, Artificial Sequence
  Synthetic
cagacacggaggaggaggaag

SEQ ID NO: 18978 - DNA, 21 bp, Artificial Sequence
  Synthetic
gacacggaggaggaggaagag

SEQ ID NO: 18979 - DNA, 21 bp, Artificial Sequence
  Synthetic
acacggaggaggaggaagagg

SEQ ID NO: 18980 - DNA, 21 bp, Artificial Sequence
  Synthetic
acggaggaggaggaagaggag

SEQ ID NO: 18981 - DNA, 21 bp, Artificial Sequence
  Synthetic
gaggagggcgactgtatgatc

SEQ ID NO: 18982 - DNA, 21 bp, Artificial Sequence
  Synthetic
gactgtatgatcgtggatgtc

SEQ ID NO: 18983 - DNA, 21 bp, Artificial Sequence
  Synthetic
atcgtggatgtcccggatgct

SEQ ID NO: 18984 - DNA, 21 bp, Artificial Sequence
  Synthetic
tggatgtcccggatgctgcgg

SEQ ID NO: 18985 - DNA, 21 bp, Artificial Sequence
  Synthetic
gatgtcccggatgctgcgggt

SEQ ID NO: 18986 - DNA, 21 bp, Artificial Sequence
  Synthetic
gcccttctcacccgcagcatc

SEQ ID NO: 18987 - DNA, 21 bp, Artificial Sequence
  Synthetic
agcccttctcacccgcagcat

SEQ ID NO: 18988 - DNA, 21 bp, Artificial Sequence
  Synthetic
ctgcagaggtccaagccccgt

SEQ ID NO: 18989 - DNA, 21 bp, Artificial Sequence
  Synthetic
tgcagaggtccaagccccgtg

SEQ ID NO: 18990 - DNA, 21 bp, Artificial Sequence
  Synthetic
ggaagcggctccacacggggc

SEQ ID NO: 18991 - DNA, 21 bp, Artificial Sequence
  Synthetic
aagccccgtgtggagccgctt

SEQ ID NO: 18992 - DNA, 21 bp, Artificial Sequence
  Synthetic
agccccgtgtggagccgcttc

SEQ ID NO: 18993 - DNA, 21 bp, Artificial Sequence
  Synthetic
agctccggaagcggctccaca

SEQ ID NO: 18994 - DNA, 21 bp, Artificial Sequence
  Synthetic
cagctccggaagcggctccac

SEQ ID NO: 18995 - DNA, 21 bp, Artificial Sequence
  Synthetic
cgtgtggagccgcttccggag

SEQ ID NO: 18996 - DNA, 21 bp, Artificial Sequence
  Synthetic
gtgtggagccgcttccggagc

SEQ ID NO: 18997 - DNA, 21 bp, Artificial Sequence
  Synthetic
tgtggagccgcttccggagct

SEQ ID NO: 18998 - DNA, 21 bp, Artificial Sequence
  Synthetic
gcttccggagctgggggtggt

SEQ ID NO: 18999 - DNA, 21 bp, Artificial Sequence
  Synthetic
cttccggagctgggggtggtg

SEQ ID NO: 19000 - DNA, 21 bp, Artificial Sequence
  Synthetic
cccccacaccacccccagctc

SEQ ID NO: 19001 - DNA, 21 bp, Artificial Sequence
  Synthetic
ttccggagctgggggtggtgt

SEQ ID NO: 19002 - DNA, 21 bp, Artificial Sequence
  Synthetic
acccccacaccacccccagct

SEQ ID NO: 19003 - DNA, 21 bp, Artificial Sequence
  Synthetic
ggagctgggggtggtgtgggg

SEQ ID NO: 19004 - DNA, 21 bp, Artificial Sequence
  Synthetic
accggcaaggccaccctgacc

SEQ ID NO: 19005 - DNA, 21 bp, Artificial Sequence
  Synthetic
gccaccctgaccgcgagccca

SEQ ID NO: 19006 - DNA, 21 bp, Artificial Sequence
  Synthetic
tgcacccagtgggctcgcggt

SEQ ID NO: 19007 - DNA, 21 bp, Artificial Sequence
  Synthetic
cgcgagcccactgggtgcatc

SEQ ID NO: 19008 - DNA, 21 bp, Artificial Sequence
  Synthetic
cgagcccactgggtgcatcct

SEQ ID NO: 19009 - DNA, 21 bp, Artificial Sequence
  Synthetic
cctgctctcaggatgcaccca

SEQ ID NO: 19010 - DNA, 21 bp, Artificial Sequence
  Synthetic
gagctgccgccggggcgatgc

SEQ ID NO: 19011 - DNA, 21 bp, Artificial Sequence
  Synthetic
gctgccgccggggcgatgctg

SEQ ID NO: 19012 - DNA, 21 bp, Artificial Sequence
  Synthetic
ctgccgccggggcgatgctgg

SEQ ID NO: 19013 - DNA, 21 bp, Artificial Sequence
  Synthetic
gccggggcgatgctggaggag

SEQ ID NO: 19014 - DNA, 21 bp, Artificial Sequence
  Synthetic
ccggggcgatgctggaggagc

SEQ ID NO: 19015 - DNA, 21 bp, Artificial Sequence
  Synthetic
cgatgctggaggagctggagt

SEQ ID NO: 19016 - DNA, 21 bp, Artificial Sequence
  Synthetic
gatgctggaggagctggagtg

SEQ ID NO: 19017 - DNA, 21 bp, Artificial Sequence
  Synthetic
ggagtgcggggcgcccggcgc

SEQ ID NO: 19018 - DNA, 21 bp, Artificial Sequence
  Synthetic
gagtgcggggcgcccggcgcc

SEQ ID NO: 19019 - DNA, 21 bp, Artificial Sequence
  Synthetic
agtgcggggcgcccggcgcca

SEQ ID NO: 19020 - DNA, 21 bp, Artificial Sequence
  Synthetic
gtgcggggcgcccggcgccag

SEQ ID NO: 19021 - DNA, 21 bp, Artificial Sequence
  Synthetic
cctgtggcggctcccctggcg

SEQ ID NO: 19022 - DNA, 21 bp, Artificial Sequence
  Synthetic
accttgtattaacttcttaac

SEQ ID NO: 19023 - DNA, 21 bp, Artificial Sequence
  Synthetic
taccttgtattaacttcttaa

SEQ ID NO: 19024 - DNA, 21 bp, Artificial Sequence
  Synthetic
ggcgcttaaacggcagacggg

SEQ ID NO: 19025 - DNA, 21 bp, Artificial Sequence
  Synthetic
gcccgtctgccgtttaagcgc

SEQ ID NO: 19026 - DNA, 21 bp, Artificial Sequence
  Synthetic
attcaggcgcttaaacggcag

SEQ ID NO: 19027 - DNA, 21 bp, Artificial Sequence
  Synthetic
aagcgcctgaatcttgtccca

SEQ ID NO: 19028 - DNA, 21 bp, Artificial Sequence
  Synthetic
agcgcctgaatcttgtcccaa

SEQ ID NO: 19029 - DNA, 21 bp, Artificial Sequence
  Synthetic
gcgcctgaatcttgtcccaaa

SEQ ID NO: 19030 - DNA, 21 bp, Artificial Sequence
  Synthetic
cgcctgaatcttgtcccaaag

SEQ ID NO: 19031 - DNA, 21 bp, Artificial Sequence
  Synthetic
catgtcatcggctttcccctt

SEQ ID NO: 19032 - DNA, 21 bp, Artificial Sequence
  Synthetic
acatgtcatcggctttcccct

SEQ ID NO: 19033 - DNA, 21 bp, Artificial Sequence
  Synthetic
gccgatgacatgtcagacgat

SEQ ID NO: 19034 - DNA, 21 bp, Artificial Sequence
  Synthetic
tgcaaagtaaaagccccgatt

SEQ ID NO: 19035 - DNA, 21 bp, Artificial Sequence
  Synthetic
agccccgatttagaggcctct

SEQ ID NO: 19036 - DNA, 21 bp, Artificial Sequence
  Synthetic
tgtccaaagaggcctctaaat

SEQ ID NO: 19037 - DNA, 21 bp, Artificial Sequence
  Synthetic
gtgtccaaagaggcctctaaa

SEQ ID NO: 19038 - DNA, 21 bp, Artificial Sequence
  Synthetic
ttagaggcctctttggacacc

SEQ ID NO: 19039 - DNA, 21 bp, Artificial Sequence
  Synthetic
tagaggcctctttggacacct

SEQ ID NO: 19040 - DNA, 21 bp, Artificial Sequence
  Synthetic
accttggaaaacaactgtcat

SEQ ID NO: 19041 - DNA, 21 bp, Artificial Sequence
  Synthetic
ggttctgacatagactttaga

SEQ ID NO: 19042 - DNA, 21 bp, Artificial Sequence
  Synthetic
gtttcggtctaaagtctatgt

SEQ ID NO: 19043 - DNA, 21 bp, Artificial Sequence
  Synthetic
actttagaccgaaacttgtca

SEQ ID NO: 19044 - DNA, 21 bp, Artificial Sequence
  Synthetic
ctttagaccgaaacttgtcaa

SEQ ID NO: 19045 - DNA, 21 bp, Artificial Sequence
  Synthetic
tttagaccgaaacttgtcaac

SEQ ID NO: 19046 - DNA, 21 bp, Artificial Sequence
  Synthetic
agaccgaaacttgtcaacggg

SEQ ID NO: 19047 - DNA, 21 bp, Artificial Sequence
  Synthetic
tatttcttaaaaagttatcta

SEQ ID NO: 19048 - DNA, 21 bp, Artificial Sequence
  Synthetic
ctatttcttaaaaagttatct

SEQ ID NO: 19049 - DNA, 21 bp, Artificial Sequence
  Synthetic
agaatcgaaaccagtattggc

SEQ ID NO: 19050 - DNA, 21 bp, Artificial Sequence
  Synthetic
gcacagtcatcattgatttga

SEQ ID NO: 19051 - DNA, 21 bp, Artificial Sequence
  Synthetic
acagtcatcattgatttgaca

SEQ ID NO: 19052 - DNA, 21 bp, Artificial Sequence
  Synthetic
atcattgatttgacagaggac

SEQ ID NO: 19053 - DNA, 21 bp, Artificial Sequence
  Synthetic
ttgatttgacagaggactcga

SEQ ID NO: 19054 - DNA, 21 bp, Artificial Sequence
  Synthetic
caagactgtctggctgctcat

SEQ ID NO: 19055 - DNA, 21 bp, Artificial Sequence
  Synthetic
aatgagcagccagacagtctt

SEQ ID NO: 19056 - DNA, 21 bp, Artificial Sequence
  Synthetic
tggaccacaataaactaaatt

SEQ ID NO: 19057 - DNA, 21 bp, Artificial Sequence
  Synthetic
aaattctgaagcctctccctc

SEQ ID NO: 19058 - DNA, 21 bp, Artificial Sequence
  Synthetic
aattctgaagcctctccctcc

SEQ ID NO: 19059 - DNA, 21 bp, Artificial Sequence
  Synthetic
attctgaagcctctccctcca

SEQ ID NO: 19060 - DNA, 21 bp, Artificial Sequence
  Synthetic
cctccctggagggagaggctt

SEQ ID NO: 19061 - DNA, 21 bp, Artificial Sequence
  Synthetic
catttattgcctccctggagg

SEQ ID NO: 19062 - DNA, 21 bp, Artificial Sequence
  Synthetic
gccatttattgcctccctgga

SEQ ID NO: 19063 - DNA, 21 bp, Artificial Sequence
  Synthetic
ggccatttattgcctccctgg

SEQ ID NO: 19064 - DNA, 21 bp, Artificial Sequence
  Synthetic
tggccatttattgcctccctg

SEQ ID NO: 19065 - DNA, 21 bp, Artificial Sequence
  Synthetic
gctggccatttattgcctccc

SEQ ID NO: 19066 - DNA, 21 bp, Artificial Sequence
  Synthetic
cgctggccatttattgcctcc

SEQ ID NO: 19067 - DNA, 21 bp, Artificial Sequence
  Synthetic
cagggaggcaataaatggcca

SEQ ID NO: 19068 - DNA, 21 bp, Artificial Sequence
  Synthetic
gggaggcaataaatggccagc

SEQ ID NO: 19069 - DNA, 21 bp, Artificial Sequence
  Synthetic
taaatggccagcgagaagaca

SEQ ID NO: 19070 - DNA, 21 bp, Artificial Sequence
  Synthetic
aaatggccagcgagaagacac

SEQ ID NO: 19071 - DNA, 21 bp, Artificial Sequence
  Synthetic
aatggccagcgagaagacact

SEQ ID NO: 19072 - DNA, 21 bp, Artificial Sequence
  Synthetic
cgagaagacactggggatcag

SEQ ID NO: 19073 - DNA, 21 bp, Artificial Sequence
  Synthetic
gagaagacactggggatcagc

SEQ ID NO: 19074 - DNA, 21 bp, Artificial Sequence
  Synthetic
actggggatcagcaggggttg

SEQ ID NO: 19075 - DNA, 21 bp, Artificial Sequence
  Synthetic
caggggttgttgaaggccatt

SEQ ID NO: 19076 - DNA, 21 bp, Artificial Sequence
  Synthetic
aggaaatgccaacttgtcgtt

SEQ ID NO: 19077 - DNA, 21 bp, Artificial Sequence
  Synthetic
agaacgacaagttggcatttc

SEQ ID NO: 19078 - DNA, 21 bp, Artificial Sequence
  Synthetic
gaacgacaagttggcatttcc

SEQ ID NO: 19079 - DNA, 21 bp, Artificial Sequence
  Synthetic
acgacaagttggcatttcctg

SEQ ID NO: 19080 - DNA, 21 bp, Artificial Sequence
  Synthetic
aatgtctgaaagggtctctcc

SEQ ID NO: 19081 - DNA, 21 bp, Artificial Sequence
  Synthetic
gaatgtctgaaagggtctctc

SEQ ID NO: 19082 - DNA, 21 bp, Artificial Sequence
  Synthetic
tttcagacattccttgcaaaa

SEQ ID NO: 19083 - DNA, 21 bp, Artificial Sequence
  Synthetic
tcagacattccttgcaaaaca

SEQ ID NO: 19084 - DNA, 21 bp, Artificial Sequence
  Synthetic
cagacattccttgcaaaacag

SEQ ID NO: 19085 - DNA, 21 bp, Artificial Sequence
  Synthetic
gacattccttgcaaaacagag

SEQ ID NO: 19086 - DNA, 21 bp, Artificial Sequence
  Synthetic
acattccttgcaaaacagagg

SEQ ID NO: 19087 - DNA, 21 bp, Artificial Sequence
  Synthetic
attccttgcaaaacagaggag

SEQ ID NO: 19088 - DNA, 21 bp, Artificial Sequence
  Synthetic
cagaggaggagggtgttggct

SEQ ID NO: 19089 - DNA, 21 bp, Artificial Sequence
  Synthetic
agaggaggagggtgttggctg

SEQ ID NO: 19090 - DNA, 21 bp, Artificial Sequence
  Synthetic
agggtgttggctgtggaggtg

SEQ ID NO: 19091 - DNA, 21 bp, Artificial Sequence
  Synthetic
gggtgttggctgtggaggtgc

SEQ ID NO: 19092 - DNA, 21 bp, Artificial Sequence
  Synthetic
ggtgttggctgtggaggtgca

SEQ ID NO: 19093 - DNA, 21 bp, Artificial Sequence
  Synthetic
tgttggctgtggaggtgcagg

SEQ ID NO: 19094 - DNA, 21 bp, Artificial Sequence
  Synthetic
gttggctgtggaggtgcaggg

SEQ ID NO: 19095 - DNA, 21 bp, Artificial Sequence
  Synthetic
tggctgtggaggtgcagggag

SEQ ID NO: 19096 - DNA, 21 bp, Artificial Sequence
  Synthetic
gcagggaggagaggcgactcc

SEQ ID NO: 19097 - DNA, 21 bp, Artificial Sequence
  Synthetic
cagggaggagaggcgactccc

SEQ ID NO: 19098 - DNA, 21 bp, Artificial Sequence
  Synthetic
cgactcccaggaatgttcgcc

SEQ ID NO: 19099 - DNA, 21 bp, Artificial Sequence
  Synthetic
gactcccaggaatgttcgcca

SEQ ID NO: 19100 - DNA, 21 bp, Artificial Sequence
  Synthetic
agctccgtggcgaacattcct

SEQ ID NO: 19101 - DNA, 21 bp, Artificial Sequence
  Synthetic
cagctccgtggcgaacattcc

SEQ ID NO: 19102 - DNA, 21 bp, Artificial Sequence
  Synthetic
gcagctccgtggcgaacattc

SEQ ID NO: 19103 - DNA, 21 bp, Artificial Sequence
  Synthetic
gaatgttcgccacggagctgc

SEQ ID NO: 19104 - DNA, 21 bp, Artificial Sequence
  Synthetic
aatgttcgccacggagctgcc

SEQ ID NO: 19105 - DNA, 21 bp, Artificial Sequence
  Synthetic
tcagctccgggcagctccgtg

SEQ ID NO: 19106 - DNA, 21 bp, Artificial Sequence
  Synthetic
ccacggagctgcccggagctg

SEQ ID NO: 19107 - DNA, 21 bp, Artificial Sequence
  Synthetic
tgcccggagctgacgagtggc

SEQ ID NO: 19108 - DNA, 21 bp, Artificial Sequence
  Synthetic
ttctcgggccactcgtcagct

SEQ ID NO: 19109 - DNA, 21 bp, Artificial Sequence
  Synthetic
cccggagctgacgagtggccc

SEQ ID NO: 19110 - DNA, 21 bp, Artificial Sequence
  Synthetic
gagtggcccgagaatgtgccc

SEQ ID NO: 19111 - DNA, 21 bp, Artificial Sequence
  Synthetic
ggcccgagaatgtgccccaga

SEQ ID NO: 19112 - DNA, 21 bp, Artificial Sequence
  Synthetic
gcccgagaatgtgccccagaa

SEQ ID NO: 19113 - DNA, 21 bp, Artificial Sequence
  Synthetic
gctcctttctggggcacattc

SEQ ID NO: 19114 - DNA, 21 bp, Artificial Sequence
  Synthetic
agaatgtgccccagaaaggag

SEQ ID NO: 19115 - DNA, 21 bp, Artificial Sequence
  Synthetic
tccaactgtcctgctcctttc

SEQ ID NO: 19116 - DNA, 21 bp, Artificial Sequence
  Synthetic
ccccagaaaggagcaggacag

SEQ ID NO: 19117 - DNA, 21 bp, Artificial Sequence
  Synthetic
ctccaactgtcctgctccttt

SEQ ID NO: 19118 - DNA, 21 bp, Artificial Sequence
  Synthetic
cccagaaaggagcaggacagt

SEQ ID NO: 19119 - DNA, 21 bp, Artificial Sequence
  Synthetic
gaaaggagcaggacagttgga

SEQ ID NO: 19120 - DNA, 21 bp, Artificial Sequence
  Synthetic
agcaggacagttggagtgaag

SEQ ID NO: 19121 - DNA, 21 bp, Artificial Sequence
  Synthetic
gcaggacagttggagtgaagc

SEQ ID NO: 19122 - DNA, 21 bp, Artificial Sequence
  Synthetic
caggacagttggagtgaagct

SEQ ID NO: 19123 - DNA, 21 bp, Artificial Sequence
  Synthetic
taaactgagagtctggagtaa

SEQ ID NO: 19124 - DNA, 21 bp, Artificial Sequence
  Synthetic
aatcataataaactgagagtc

SEQ ID NO: 19125 - DNA, 21 bp, Artificial Sequence
  Synthetic
caatcataataaactgagagt

SEQ ID NO: 19126 - DNA, 21 bp, Artificial Sequence
  Synthetic
actctcagtttattatgattg

SEQ ID NO: 19127 - DNA, 21 bp, Artificial Sequence
  Synthetic
actcaccaatcataataaact

SEQ ID NO: 19128 - DNA, 21 bp, Artificial Sequence
  Synthetic
aaactcaccaatcataataaa

SEQ ID NO: 19129 - DNA, 21 bp, Artificial Sequence
  Synthetic
tgaatatcctctttaggttca

SEQ ID NO: 19130 - DNA, 21 bp, Artificial Sequence
  Synthetic
agacatggatcttgccatcct

SEQ ID NO: 19131 - DNA, 21 bp, Artificial Sequence
  Synthetic
agaggatggcaagatccatgt

SEQ ID NO: 19132 - DNA, 21 bp, Artificial Sequence
  Synthetic
gaggatggcaagatccatgtc

SEQ ID NO: 19133 - DNA, 21 bp, Artificial Sequence
  Synthetic
atggcaagatccatgtctgga

SEQ ID NO: 19134 - DNA, 21 bp, Artificial Sequence
  Synthetic
tggcaagatccatgtctggaa

SEQ ID NO: 19135 - DNA, 21 bp, Artificial Sequence
  Synthetic
gcaagatccatgtctggaatg

SEQ ID NO: 19136 - DNA, 21 bp, Artificial Sequence
  Synthetic
accgctctctccattccagac

SEQ ID NO: 19137 - DNA, 21 bp, Artificial Sequence
  Synthetic
tccgcgtcgctaaggtgttcc

SEQ ID NO: 19138 - DNA, 21 bp, Artificial Sequence
  Synthetic
gctaaggtgttccgcgaaaac

SEQ ID NO: 19139 - DNA, 21 bp, Artificial Sequence
  Synthetic
aatcgaagcagttaatcttgt

SEQ ID NO: 19140 - DNA, 21 bp, Artificial Sequence
  Synthetic
gcttcgatttcagccccaacg

SEQ ID NO: 19141 - DNA, 21 bp, Artificial Sequence
  Synthetic
gtctcgccgttggggctgaaa

SEQ ID NO: 19142 - DNA, 21 bp, Artificial Sequence
  Synthetic
atgaccgtctcgccgttgggg

SEQ ID NO: 19143 - DNA, 21 bp, Artificial Sequence
  Synthetic
tcgagatgaccgtctcgccgt

SEQ ID NO: 19144 - DNA, 21 bp, Artificial Sequence
  Synthetic
ctcgagatgaccgtctcgccg

SEQ ID NO: 19145 - DNA, 21 bp, Artificial Sequence
  Synthetic
cccaacggcgagacggtcatc

SEQ ID NO: 19146 - DNA, 21 bp, Artificial Sequence
  Synthetic
cgatggagtcgtcgtcgctac

SEQ ID NO: 19147 - DNA, 21 bp, Artificial Sequence
  Synthetic
cctggcagtcatagagcacga

SEQ ID NO: 19148 - DNA, 21 bp, Artificial Sequence
  Synthetic
tcctggcagtcatagagcacg

SEQ ID NO: 19149 - DNA, 21 bp, Artificial Sequence
  Synthetic
cacttgccctcctggcagtca

SEQ ID NO: 19150 - DNA, 21 bp, Artificial Sequence
  Synthetic
ggttgaattgcaaacaggtaa

SEQ ID NO: 19151 - DNA, 21 bp, Artificial Sequence
  Synthetic
gcaaaagtcatgaacttgggg

SEQ ID NO: 19152 - DNA, 21 bp, Artificial Sequence
  Synthetic
cactggcaaaagtcatgaact

SEQ ID NO: 19153 - DNA, 21 bp, Artificial Sequence
  Synthetic
gcactggcaaaagtcatgaac

SEQ ID NO: 19154 - DNA, 21 bp, Artificial Sequence
  Synthetic
gaacacgcactggcaaaagtc

SEQ ID NO: 19155 - DNA, 21 bp, Artificial Sequence
  Synthetic
acaaatacatcagatactttc

SEQ ID NO: 19156 - DNA, 21 bp, Artificial Sequence
  Synthetic
gtggccttgtccatgtcacct

SEQ ID NO: 19157 - DNA, 21 bp, Artificial Sequence
  Synthetic
aaagtgtcatccacaggtgac

SEQ ID NO: 19158 - DNA, 21 bp, Artificial Sequence
  Synthetic
ctgtggatgacactttcattt

SEQ ID NO: 19159 - DNA, 21 bp, Artificial Sequence
  Synthetic
gtcttatcaagagacccagaa

SEQ ID NO: 19160 - DNA, 21 bp, Artificial Sequence
  Synthetic
gaatggtcttatcaagagacc

SEQ ID NO: 19161 - DNA, 21 bp, Artificial Sequence
  Synthetic
ccagagtcgaatggtcttatc

SEQ ID NO: 19162 - DNA, 21 bp, Artificial Sequence
  Synthetic
tcttgataagaccattcgact

SEQ ID NO: 19163 - DNA, 21 bp, Artificial Sequence
  Synthetic
cttgataagaccattcgactc

SEQ ID NO: 19164 - DNA, 21 bp, Artificial Sequence
  Synthetic
aggagaccggagatcccagag

SEQ ID NO: 19165 - DNA, 21 bp, Artificial Sequence
  Synthetic
cagttaggagaccggagatcc

SEQ ID NO: 19166 - DNA, 21 bp, Artificial Sequence
  Synthetic
tctaatgataggattatcctg

SEQ ID NO: 19167 - DNA, 21 bp, Artificial Sequence
  Synthetic
ctaatgataggattatcctga

SEQ ID NO: 19168 - DNA, 21 bp, Artificial Sequence
  Synthetic
gataggattatcctgatggag

SEQ ID NO: 19169 - DNA, 21 bp, Artificial Sequence
  Synthetic
ataggattatcctgatggaga

SEQ ID NO: 19170 - DNA, 21 bp, Artificial Sequence
  Synthetic
atcatgggactccatctccat

SEQ ID NO: 19171 - DNA, 21 bp, Artificial Sequence
  Synthetic
aggaaaggccaggctgcatca

SEQ ID NO: 19172 - DNA, 21 bp, Artificial Sequence
  Synthetic
taggaaaggccaggctgcatc

SEQ ID NO: 19173 - DNA, 21 bp, Artificial Sequence
  Synthetic
atgatgcagcctggcctttcc

SEQ ID NO: 19174 - DNA, 21 bp, Artificial Sequence
  Synthetic
gcctggcctttcctagagcct

SEQ ID NO: 19175 - DNA, 21 bp, Artificial Sequence
  Synthetic
aaacgtgggttcacaggctct

SEQ ID NO: 19176 - DNA, 21 bp, Artificial Sequence
  Synthetic
caaacgtgggttcacaggctc

SEQ ID NO: 19177 - DNA, 21 bp, Artificial Sequence
  Synthetic
gagcctgtgaacccacgtttg

SEQ ID NO: 19178 - DNA, 21 bp, Artificial Sequence
  Synthetic
ctgtgaacccacgtttggtga

SEQ ID NO: 19179 - DNA, 21 bp, Artificial Sequence
  Synthetic
gccggtacccactcaccaaac

SEQ ID NO: 19180 - DNA, 21 bp, Artificial Sequence
  Synthetic
cggcgcatcatcaaaaatcct

SEQ ID NO: 19181 - DNA, 21 bp, Artificial Sequence
  Synthetic
cccgcatggtggaaaaatcca

SEQ ID NO: 19182 - DNA, 21 bp, Artificial Sequence
  Synthetic
tgagcagccgctcccgcatgg

SEQ ID NO: 19183 - DNA, 21 bp, Artificial Sequence
  Synthetic
ctgagcagccgctcccgcatg

SEQ ID NO: 19184 - DNA, 21 bp, Artificial Sequence
  Synthetic
caccatgcgggagcggctgct

SEQ ID NO: 19185 - DNA, 21 bp, Artificial Sequence
  Synthetic
accatgcgggagcggctgctc

SEQ ID NO: 19186 - DNA, 21 bp, Artificial Sequence
  Synthetic
ccatgcgggagcggctgctca

SEQ ID NO: 19187 - DNA, 21 bp, Artificial Sequence
  Synthetic
catgcgggagcggctgctcag

SEQ ID NO: 19188 - DNA, 21 bp, Artificial Sequence
  Synthetic
tgcgggagcggctgctcaggg

SEQ ID NO: 19189 - DNA, 21 bp, Artificial Sequence
  Synthetic
cccacatctacttaccctccc

SEQ ID NO: 19190 - DNA, 21 bp, Artificial Sequence
  Synthetic
ccctgtccaggtacaccagct

SEQ ID NO: 19191 - DNA, 21 bp, Artificial Sequence
  Synthetic
ctgtccaggtacaccagctca

SEQ ID NO: 19192 - DNA, 21 bp, Artificial Sequence
  Synthetic
tgtccaggtacaccagctcag

SEQ ID NO: 19193 - DNA, 21 bp, Artificial Sequence
  Synthetic
aactcctctgagctggtgtac

SEQ ID NO: 19194 - DNA, 21 bp, Artificial Sequence
  Synthetic
gggcatcagccgcaaactcct

SEQ ID NO: 19195 - DNA, 21 bp, Artificial Sequence
  Synthetic
ctggcagttgtcaaataccag

SEQ ID NO: 19196 - DNA, 21 bp, Artificial Sequence
  Synthetic
gtctggcagttgtcaaatacc

SEQ ID NO: 19197 - DNA, 21 bp, Artificial Sequence
  Synthetic
agtctggcagttgtcaaatac

SEQ ID NO: 19198 - DNA, 21 bp, Artificial Sequence
  Synthetic
ttgacaactgccagactttca

SEQ ID NO: 19199 - DNA, 21 bp, Artificial Sequence
  Synthetic
gacaactgccagactttcaac

SEQ ID NO: 19200 - DNA, 21 bp, Artificial Sequence
  Synthetic
agactttcaacgaggatgact

SEQ ID NO: 19201 - DNA, 21 bp, Artificial Sequence
  Synthetic
cctacttcagagtcatcctcg

SEQ ID NO: 19202 - DNA, 21 bp, Artificial Sequence
  Synthetic
atgactctgaagtaggcaagg

SEQ ID NO: 19203 - DNA, 21 bp, Artificial Sequence
  Synthetic
tgtgcccagccttgcctactt

SEQ ID NO: 19204 - DNA, 21 bp, Artificial Sequence
  Synthetic
ggtccagacatgtctagtctg

SEQ ID NO: 19205 - DNA, 21 bp, Artificial Sequence
  Synthetic
gtccagacatgtctagtctgc

SEQ ID NO: 19206 - DNA, 21 bp, Artificial Sequence
  Synthetic
cagacatgtctagtctgccgg

SEQ ID NO: 19207 - DNA, 21 bp, Artificial Sequence
  Synthetic
tctgccggaagggtgacaatg

SEQ ID NO: 19208 - DNA, 21 bp, Artificial Sequence
  Synthetic
atgagtttcttctgctttgtg

SEQ ID NO: 19209 - DNA, 21 bp, Artificial Sequence
  Synthetic
gtcacacccatcacaaagcag

SEQ ID NO: 19210 - DNA, 21 bp, Artificial Sequence
  Synthetic
acggtcacacccatcacaaag

SEQ ID NO: 19211 - DNA, 21 bp, Artificial Sequence
  Synthetic
atttactgccatcgtcccaag

SEQ ID NO: 19212 - DNA, 21 bp, Artificial Sequence
  Synthetic
tttactgccatcgtcccaaga

SEQ ID NO: 19213 - DNA, 21 bp, Artificial Sequence
  Synthetic
gtcccaagatggaggctgtcc

SEQ ID NO: 19214 - DNA, 21 bp, Artificial Sequence
  Synthetic
cttctgggacagcctccatct

SEQ ID NO: 19215 - DNA, 21 bp, Artificial Sequence
  Synthetic
ccttctgggacagcctccatc

SEQ ID NO: 19216 - DNA, 21 bp, Artificial Sequence
  Synthetic
ccaagatggaggctgtcccag

SEQ ID NO: 19217 - DNA, 21 bp, Artificial Sequence
  Synthetic
caagatggaggctgtcccaga

SEQ ID NO: 19218 - DNA, 21 bp, Artificial Sequence
  Synthetic
agtacagaaccaatctccttc

SEQ ID NO: 19219 - DNA, 21 bp, Artificial Sequence
  Synthetic
cagtacagaaccaatctcctt

SEQ ID NO: 19220 - DNA, 21 bp, Artificial Sequence
  Synthetic
acctgagccaaacagacagta

SEQ ID NO: 19221 - DNA, 21 bp, Artificial Sequence
  Synthetic
tgaggagacgtattgctaccc

SEQ ID NO: 19222 - DNA, 21 bp, Artificial Sequence
  Synthetic
ggagacgtattgctaccccag

SEQ ID NO: 19223 - DNA, 21 bp, Artificial Sequence
  Synthetic
gaggggaagacgaacttcttc

SEQ ID NO: 19224 - DNA, 21 bp, Artificial Sequence
  Synthetic
ggaggggaagacgaacttctt

SEQ ID NO: 19225 - DNA, 21 bp, Artificial Sequence
  Synthetic
aagttcgtcttcccctccaac

SEQ ID NO: 19226 - DNA, 21 bp, Artificial Sequence
  Synthetic
ttacccatgttggaggggaag

SEQ ID NO: 19227 - DNA, 21 bp, Artificial Sequence
  Synthetic
gagcatttacccatgttggag

SEQ ID NO: 19228 - DNA, 21 bp, Artificial Sequence
  Synthetic
agagcatttacccatgttgga

SEQ ID NO: 19229 - DNA, 21 bp, Artificial Sequence
  Synthetic
tagagcatttacccatgttgg

SEQ ID NO: 19230 - DNA, 21 bp, Artificial Sequence
  Synthetic
ctagagcatttacccatgttg

SEQ ID NO: 19231 - DNA, 21 bp, Artificial Sequence
  Synthetic
aactagagcatttacccatgt

SEQ ID NO: 19232 - DNA, 21 bp, Artificial Sequence
  Synthetic
aaactagagcatttacccatg

SEQ ID NO: 19233 - DNA, 21 bp, Artificial Sequence
  Synthetic
atgtgcttctctggcaggtgg

SEQ ID NO: 19234 - DNA, 21 bp, Artificial Sequence
  Synthetic
gtgcttctctggcaggtggcg

SEQ ID NO: 19235 - DNA, 21 bp, Artificial Sequence
  Synthetic
gcttctctggcaggtggcgga

SEQ ID NO: 19236 - DNA, 21 bp, Artificial Sequence
  Synthetic
tggcggagagaggtgcgcatc

SEQ ID NO: 19237 - DNA, 21 bp, Artificial Sequence
  Synthetic
cggagagaggtgcgcatcaag

SEQ ID NO: 19238 - DNA, 21 bp, Artificial Sequence
  Synthetic
aagaagggcagccaccgatgg

SEQ ID NO: 19239 - DNA, 21 bp, Artificial Sequence
  Synthetic
agaagggcagccaccgatggc

SEQ ID NO: 19240 - DNA, 21 bp, Artificial Sequence
  Synthetic
gaagggcagccaccgatggca

SEQ ID NO: 19241 - DNA, 21 bp, Artificial Sequence
  Synthetic
aagggcagccaccgatggcag

SEQ ID NO: 19242 - DNA, 21 bp, Artificial Sequence
  Synthetic
agggcagccaccgatggcagg

SEQ ID NO: 19243 - DNA, 21 bp, Artificial Sequence
  Synthetic
agacctggtattatggcccct

SEQ ID NO: 19244 - DNA, 21 bp, Artificial Sequence
  Synthetic
gacctggtattatggcccctg

SEQ ID NO: 19245 - DNA, 21 bp, Artificial Sequence
  Synthetic
acctggtattatggcccctgt

SEQ ID NO: 19246 - DNA, 21 bp, Artificial Sequence
  Synthetic
tggtattatggcccctgtggg

SEQ ID NO: 19247 - DNA, 21 bp, Artificial Sequence
  Synthetic
gtattatggcccctgtgggaa

SEQ ID NO: 19248 - DNA, 21 bp, Artificial Sequence
  Synthetic
tatggcccctgtgggaagagg

SEQ ID NO: 19249 - DNA, 21 bp, Artificial Sequence
  Synthetic
attgcttcatcctcttcccac

SEQ ID NO: 19250 - DNA, 21 bp, Artificial Sequence
  Synthetic
aattgcttcatcctcttccca

SEQ ID NO: 19251 - DNA, 21 bp, Artificial Sequence
  Synthetic
ggaagaggatgaagcaatttc

SEQ ID NO: 19252 - DNA, 21 bp, Artificial Sequence
  Synthetic
ctacattaccttgatcacttc

SEQ ID NO: 19253 - DNA, 21 bp, Artificial Sequence
  Synthetic
gctacattaccttgatcactt

SEQ ID NO: 19254 - DNA, 21 bp, Artificial Sequence
  Synthetic
ccacgttgcggctcaggtact

SEQ ID NO: 19255 - DNA, 21 bp, Artificial Sequence
  Synthetic
caacgtggtacacagtgtccg

SEQ ID NO: 19256 - DNA, 21 bp, Artificial Sequence
  Synthetic
acgtggtacacagtgtccgcc

SEQ ID NO: 19257 - DNA, 21 bp, Artificial Sequence
  Synthetic
actgaagctgaagtgctctcg

SEQ ID NO: 19258 - DNA, 21 bp, Artificial Sequence
  Synthetic
acaggcatacggggactgaag

SEQ ID NO: 19259 - DNA, 21 bp, Artificial Sequence
  Synthetic
gcttcagtccccgtatgcctg

SEQ ID NO: 19260 - DNA, 21 bp, Artificial Sequence
  Synthetic
cttcagtccccgtatgcctgt

SEQ ID NO: 19261 - DNA, 21 bp, Artificial Sequence
  Synthetic
tctccaacaggcatacgggga

SEQ ID NO: 19262 - DNA, 21 bp, Artificial Sequence
  Synthetic
agaaatctccaacaggcatac

SEQ ID NO: 19263 - DNA, 21 bp, Artificial Sequence
  Synthetic
aagaaatctccaacaggcata

SEQ ID NO: 19264 - DNA, 21 bp, Artificial Sequence
  Synthetic
aaagaaatctccaacaggcat

SEQ ID NO: 19265 - DNA, 21 bp, Artificial Sequence
  Synthetic
ttatttctttactgccatgaa

SEQ ID NO: 19266 - DNA, 21 bp, Artificial Sequence
  Synthetic
caggctcatttcatggcagta

SEQ ID NO: 19267 - DNA, 21 bp, Artificial Sequence
  Synthetic
tacagttagaggaacagggtc

SEQ ID NO: 19268 - DNA, 21 bp, Artificial Sequence
  Synthetic
taatacttacagttagaggaa

SEQ ID NO: 19269 - DNA, 21 bp, Artificial Sequence
  Synthetic
gacattaatacttacagttag

SEQ ID NO: 19270 - DNA, 21 bp, Artificial Sequence
  Synthetic
tgacattaatacttacagtta

SEQ ID NO: 19271 - DNA, 21 bp, Artificial Sequence
  Synthetic
aatgacattaatacttacagt

SEQ ID NO: 19272 - DNA, 21 bp, Artificial Sequence
  Synthetic
tacaaaataattaaaaatcca

SEQ ID NO: 19273 - DNA, 21 bp, Artificial Sequence
  Synthetic
tcttgatggttgacaaatcca

SEQ ID NO: 19274 - DNA, 21 bp, Artificial Sequence
  Synthetic
ccaatggatttgtcaaccatc

SEQ ID NO: 19275 - DNA, 21 bp, Artificial Sequence
  Synthetic
caaccatcaagaaaagactac

SEQ ID NO: 19276 - DNA, 21 bp, Artificial Sequence
  Synthetic
attattccatgtactcaaaac

SEQ ID NO: 19277 - DNA, 21 bp, Artificial Sequence
  Synthetic
cagctacaaaatcttcaggtt

SEQ ID NO: 19278 - DNA, 21 bp, Artificial Sequence
  Synthetic
gattgatctttcaaaactgtg

SEQ ID NO: 19279 - DNA, 21 bp, Artificial Sequence
  Synthetic
ctcattgaattcagcacagtt

SEQ ID NO: 19280 - DNA, 21 bp, Artificial Sequence
  Synthetic
ttcaaaactgtgctgaattca

SEQ ID NO: 19281 - DNA, 21 bp, Artificial Sequence
  Synthetic
aactgtgctgaattcaatgag

SEQ ID NO: 19282 - DNA, 21 bp, Artificial Sequence
  Synthetic
ccctcccctagcctcacctca

SEQ ID NO: 19283 - DNA, 21 bp, Artificial Sequence
  Synthetic
tggctacttctgaatcaggct

SEQ ID NO: 19284 - DNA, 21 bp, Artificial Sequence
  Synthetic
ttataccagcattggctactt

SEQ ID NO: 19285 - DNA, 21 bp, Artificial Sequence
  Synthetic
actggtgtgcagtttgtcaaa

SEQ ID NO: 19286 - DNA, 21 bp, Artificial Sequence
  Synthetic
ctggtgtgcagtttgtcaaaa

SEQ ID NO: 19287 - DNA, 21 bp, Artificial Sequence
  Synthetic
ggtgtgcagtttgtcaaaacg

SEQ ID NO: 19288 - DNA, 21 bp, Artificial Sequence
  Synthetic
gtgtgcagtttgtcaaaacgg

SEQ ID NO: 19289 - DNA, 21 bp, Artificial Sequence
  Synthetic
tgtgcagtttgtcaaaacgga

SEQ ID NO: 19290 - DNA, 21 bp, Artificial Sequence
  Synthetic
gtgcagtttgtcaaaacggag

SEQ ID NO: 19291 - DNA, 21 bp, Artificial Sequence
  Synthetic
acggaggggaactcctctgct

SEQ ID NO: 19292 - DNA, 21 bp, Artificial Sequence
  Synthetic
gacaagaaagatggaatactt

SEQ ID NO: 19293 - DNA, 21 bp, Artificial Sequence
  Synthetic
tgacaagaaagatggaatact

SEQ ID NO: 19294 - DNA, 21 bp, Artificial Sequence
  Synthetic
gtgggcacatgacaagaaaga

SEQ ID NO: 19295 - DNA, 21 bp, Artificial Sequence
  Synthetic
tgtgggcacatgacaagaaag

SEQ ID NO: 19296 - DNA, 21 bp, Artificial Sequence
  Synthetic
ttgtcaatgtgggcacatgac

SEQ ID NO: 19297 - DNA, 21 bp, Artificial Sequence
  Synthetic
taccttggaaaatttgtcaat

SEQ ID NO: 19298 - DNA, 21 bp, Artificial Sequence
  Synthetic
attgtcccctaacagtggaga

SEQ ID NO: 19299 - DNA, 21 bp, Artificial Sequence
  Synthetic
agagtggatttgcactttctg

SEQ ID NO: 19300 - DNA, 21 bp, Artificial Sequence
  Synthetic
tctggtttagataagtctcgg

SEQ ID NO: 19301 - DNA, 21 bp, Artificial Sequence
  Synthetic
gccactgagagattatcagat

SEQ ID NO: 19302 - DNA, 21 bp, Artificial Sequence
  Synthetic
cactgagagattatcagattc

SEQ ID NO: 19303 - DNA, 21 bp, Artificial Sequence
  Synthetic
agagattatcagattcgagga

SEQ ID NO: 19304 - DNA, 21 bp, Artificial Sequence
  Synthetic
agagatcaaccaattcagtcc

SEQ ID NO: 19305 - DNA, 21 bp, Artificial Sequence
  Synthetic
tgaattggttgatctctttat

SEQ ID NO: 19306 - DNA, 21 bp, Artificial Sequence
  Synthetic
ggttgatctctttatatgaaa

SEQ ID NO: 19307 - DNA, 21 bp, Artificial Sequence
  Synthetic
gttgatctctttatatgaaaa

SEQ ID NO: 19308 - DNA, 21 bp, Artificial Sequence
  Synthetic
ttgtgatgataatgcagggcc

SEQ ID NO: 19309 - DNA, 21 bp, Artificial Sequence
  Synthetic
tgtgatgataatgcagggcct

SEQ ID NO: 19310 - DNA, 21 bp, Artificial Sequence
  Synthetic
gtgatgataatgcagggcctt

SEQ ID NO: 19311 - DNA, 21 bp, Artificial Sequence
  Synthetic
acaattgctttgcttggttac

SEQ ID NO: 19312 - DNA, 21 bp, Artificial Sequence
  Synthetic
gcttggttacctgaaacacta

SEQ ID NO: 19313 - DNA, 21 bp, Artificial Sequence
  Synthetic
tgaaacactaccgaaatattc

SEQ ID NO: 19314 - DNA, 21 bp, Artificial Sequence
  Synthetic
aactaaaaccatgtgaggtcc

SEQ ID NO: 19315 - DNA, 21 bp, Artificial Sequence
  Synthetic
gaactaaaaccatgtgaggtc

SEQ ID NO: 19316 - DNA, 21 bp, Artificial Sequence
  Synthetic
agactttggaactaaaaccat

SEQ ID NO: 19317 - DNA, 21 bp, Artificial Sequence
  Synthetic
ccagttgtgtaaagtagactt

SEQ ID NO: 19318 - DNA, 21 bp, Artificial Sequence
  Synthetic
tccagttgtgtaaagtagact

SEQ ID NO: 19319 - DNA, 21 bp, Artificial Sequence
  Synthetic
tccaaagtctactttacacaa

SEQ ID NO: 19320 - DNA, 21 bp, Artificial Sequence
  Synthetic
aagtctactttacacaactgg

SEQ ID NO: 19321 - DNA, 21 bp, Artificial Sequence
  Synthetic
ctactttacacaactggatga

SEQ ID NO: 19322 - DNA, 21 bp, Artificial Sequence
  Synthetic
ctggatgaatgaatttaaacg

SEQ ID NO: 19323 - DNA, 21 bp, Artificial Sequence
  Synthetic
aaaacaaatgacacggagaga

SEQ ID NO: 19324 - DNA, 21 bp, Artificial Sequence
  Synthetic
caaaacaaatgacacggagag

SEQ ID NO: 19325 - DNA, 21 bp, Artificial Sequence
  Synthetic
tccgacaaaacaaatgacacg

SEQ ID NO: 19326 - DNA, 21 bp, Artificial Sequence
  Synthetic
tctccgacaaaacaaatgaca

SEQ ID NO: 19327 - DNA, 21 bp, Artificial Sequence
  Synthetic
gtctccgacaaaacaaatgac

SEQ ID NO: 19328 - DNA, 21 bp, Artificial Sequence
  Synthetic
ttattcgtgatgaaatgatgc

SEQ ID NO: 19329 - DNA, 21 bp, Artificial Sequence
  Synthetic
tattcgtgatgaaatgatgcc

SEQ ID NO: 19330 - DNA, 21 bp, Artificial Sequence
  Synthetic
ctctcctggcatcatttcatc

SEQ ID NO: 19331 - DNA, 21 bp, Artificial Sequence
  Synthetic
ttcgtgatgaaatgatgccag

SEQ ID NO: 19332 - DNA, 21 bp, Artificial Sequence
  Synthetic
tgatgaaatgatgccaggaga

SEQ ID NO: 19333 - DNA, 21 bp, Artificial Sequence
  Synthetic
gatgaaatgatgccaggagag

SEQ ID NO: 19334 - DNA, 21 bp, Artificial Sequence
  Synthetic
gggatgtttgcgttacttctt

SEQ ID NO: 19335 - DNA, 21 bp, Artificial Sequence
  Synthetic
cttcttatgagatggtaatta

SEQ ID NO: 19336 - DNA, 21 bp, Artificial Sequence
  Synthetic
tttctttaattaccatctcat

SEQ ID NO: 19337 - DNA, 21 bp, Artificial Sequence
  Synthetic
aggtatcgccagtgaaacttt

SEQ ID NO: 19338 - DNA, 21 bp, Artificial Sequence
  Synthetic
atcaatgaccaggtatcgcca

SEQ ID NO: 19339 - DNA, 21 bp, Artificial Sequence
  Synthetic
actggcgatacctggtcattg

SEQ ID NO: 19340 - DNA, 21 bp, Artificial Sequence
  Synthetic
cctggtcattgatgaagctca

SEQ ID NO: 19341 - DNA, 21 bp, Artificial Sequence
  Synthetic
attgatgaagctcacagaata

SEQ ID NO: 19342 - DNA, 21 bp, Artificial Sequence
  Synthetic
atgaagctcacagaataaaga

SEQ ID NO: 19343 - DNA, 21 bp, Artificial Sequence
  Synthetic
tcacgaacaatctctgaaagc

SEQ ID NO: 19344 - DNA, 21 bp, Artificial Sequence
  Synthetic
tctagctttcagagattgttc

SEQ ID NO: 19345 - DNA, 21 bp, Artificial Sequence
  Synthetic
acttgaactcacgaacaatct

SEQ ID NO: 19346 - DNA, 21 bp, Artificial Sequence
  Synthetic
gcggttagtcgacttgaactc

SEQ ID NO: 19347 - DNA, 21 bp, Artificial Sequence
  Synthetic
aggagcaagcggttagtcgac

SEQ ID NO: 19348 - DNA, 21 bp, Artificial Sequence
  Synthetic
cgactaaccgcttgctcctaa

SEQ ID NO: 19349 - DNA, 21 bp, Artificial Sequence
  Synthetic
gactaaccgcttgctcctaac

SEQ ID NO: 19350 - DNA, 21 bp, Artificial Sequence
  Synthetic
ttctgcaaaggtgttccagtt

SEQ ID NO: 19351 - DNA, 21 bp, Artificial Sequence
  Synthetic
ctcctaactggaacacctttg

SEQ ID NO: 19352 - DNA, 21 bp, Artificial Sequence
  Synthetic
attctgcaaaggtgttccagt

SEQ ID NO: 19353 - DNA, 21 bp, Artificial Sequence
  Synthetic
cacctttgcagaataacctgc

SEQ ID NO: 19354 - DNA, 21 bp, Artificial Sequence
  Synthetic
gcagaataacctgcatgaact

SEQ ID NO: 19355 - DNA, 21 bp, Artificial Sequence
  Synthetic
aagacatcaggcaataaaaag

SEQ ID NO: 19356 - DNA, 21 bp, Artificial Sequence
  Synthetic
tatggcttaaacttacatctg

SEQ ID NO: 19357 - DNA, 21 bp, Artificial Sequence
  Synthetic
tgtcttggtgatcaaaaactc

SEQ ID NO: 19358 - DNA, 21 bp, Artificial Sequence
  Synthetic
gtcttggtgatcaaaaactcg

SEQ ID NO: 19359 - DNA, 21 bp, Artificial Sequence
  Synthetic
cttactgcatgaagtctttcc

SEQ ID NO: 19360 - DNA, 21 bp, Artificial Sequence
  Synthetic
ttgtctgctattacttactgc

SEQ ID NO: 19361 - DNA, 21 bp, Artificial Sequence
  Synthetic
tacgccgtataaaaactgatg

SEQ ID NO: 19362 - DNA, 21 bp, Artificial Sequence
  Synthetic
cgccgtataaaaactgatgta

SEQ ID NO: 19363 - DNA, 21 bp, Artificial Sequence
  Synthetic
cgtataaaaactgatgtagag

SEQ ID NO: 19364 - DNA, 21 bp, Artificial Sequence
  Synthetic
gagaagagtctgccacctaaa

SEQ ID NO: 19365 - DNA, 21 bp, Artificial Sequence
  Synthetic
agaagagtctgccacctaaaa

SEQ ID NO: 19366 - DNA, 21 bp, Artificial Sequence
  Synthetic
aaaaaggaaataaagatttac

SEQ ID NO: 19367 - DNA, 21 bp, Artificial Sequence
  Synthetic
aaaaggaaataaagatttact

SEQ ID NO: 19368 - DNA, 21 bp, Artificial Sequence
  Synthetic
gaaataaagatttacttgggg

SEQ ID NO: 19369 - DNA, 21 bp, Artificial Sequence
  Synthetic
cttggggctgagtaagatgca

SEQ ID NO: 19370 - DNA, 21 bp, Artificial Sequence
  Synthetic
tggggctgagtaagatgcaac

SEQ ID NO: 19371 - DNA, 21 bp, Artificial Sequence
  Synthetic
gagtaagatgcaacgagaatg

SEQ ID NO: 19372 - DNA, 21 bp, Artificial Sequence
  Synthetic
tttaggtatacaaaaatcctg

SEQ ID NO: 19373 - DNA, 21 bp, Artificial Sequence
  Synthetic
taaaacatcaatatctttcat

SEQ ID NO: 19374 - DNA, 21 bp, Artificial Sequence
  Synthetic
gcatcttgtccatcttgccag

SEQ ID NO: 19375 - DNA, 21 bp, Artificial Sequence
  Synthetic
gtcgcatcttgtccatcttgc

SEQ ID NO: 19376 - DNA, 21 bp, Artificial Sequence
  Synthetic
cgaagctgcatcagaatgttt

SEQ ID NO: 19377 - DNA, 21 bp, Artificial Sequence
  Synthetic
cttaaacattctgatgcagct

SEQ ID NO: 19378 - DNA, 21 bp, Artificial Sequence
  Synthetic
acaacactttcgaagctgcat

SEQ ID NO: 19379 - DNA, 21 bp, Artificial Sequence
  Synthetic
atatggatgattacaacactt

SEQ ID NO: 19380 - DNA, 21 bp, Artificial Sequence
  Synthetic
gttcagcaccatcaaacagat

SEQ ID NO: 19381 - DNA, 21 bp, Artificial Sequence
  Synthetic
gaacgcaaagcaaactacgca

SEQ ID NO: 19382 - DNA, 21 bp, Artificial Sequence
  Synthetic
ctacgcagtggatgcctactt

SEQ ID NO: 19383 - DNA, 21 bp, Artificial Sequence
  Synthetic
acgcagtggatgcctacttta

SEQ ID NO: 19384 - DNA, 21 bp, Artificial Sequence
  Synthetic
ttagagaggctttgcgtgtca

SEQ ID NO: 19385 - DNA, 21 bp, Artificial Sequence
  Synthetic
cctccaaaacagccaaatgtt

SEQ ID NO: 19386 - DNA, 21 bp, Artificial Sequence
  Synthetic
atcctgaacatttggctgttt

SEQ ID NO: 19387 - DNA, 21 bp, Artificial Sequence
  Synthetic
aatcctgaacatttggctgtt

SEQ ID NO: 19388 - DNA, 21 bp, Artificial Sequence
  Synthetic
tggtgggaaaaattgaaaatc

SEQ ID NO: 19389 - DNA, 21 bp, Artificial Sequence
  Synthetic
aaataagcgtggtgggaaaaa

SEQ ID NO: 19390 - DNA, 21 bp, Artificial Sequence
  Synthetic
aggagctcaaataagcgtggt

SEQ ID NO: 19391 - DNA, 21 bp, Artificial Sequence
  Synthetic
caggagctcaaataagcgtgg

SEQ ID NO: 19392 - DNA, 21 bp, Artificial Sequence
  Synthetic
ccaggagctcaaataagcgtg

SEQ ID NO: 19393 - DNA, 21 bp, Artificial Sequence
  Synthetic
ccaccacgcttatttgagctc

SEQ ID NO: 19394 - DNA, 21 bp, Artificial Sequence
  Synthetic
caccacgcttatttgagctcc

SEQ ID NO: 19395 - DNA, 21 bp, Artificial Sequence
  Synthetic
cgcttatttgagctcctggaa

SEQ ID NO: 19396 - DNA, 21 bp, Artificial Sequence
  Synthetic
gcttatttgagctcctggaaa

SEQ ID NO: 19397 - DNA, 21 bp, Artificial Sequence
  Synthetic
ggaaaaggaaattctttatta

SEQ ID NO: 19398 - DNA, 21 bp, Artificial Sequence
  Synthetic
gaaaaggaaattctttattat

SEQ ID NO: 19399 - DNA, 21 bp, Artificial Sequence
  Synthetic
gcctattgtcttccgataata

SEQ ID NO: 19400 - DNA, 21 bp, Artificial Sequence
  Synthetic
atctcttgatttataggttcc

SEQ ID NO: 19401 - DNA, 21 bp, Artificial Sequence
  Synthetic
tctcttgatttataggttcca

SEQ ID NO: 19402 - DNA, 21 bp, Artificial Sequence
  Synthetic
atttgggatatcaggattcct

SEQ ID NO: 19403 - DNA, 21 bp, Artificial Sequence
  Synthetic
gatttgggatatcaggattcc

SEQ ID NO: 19404 - DNA, 21 bp, Artificial Sequence
  Synthetic
ccagagctggatttgggatat

SEQ ID NO: 19405 - DNA, 21 bp, Artificial Sequence
  Synthetic
tctttgagccagagctggatt

SEQ ID NO: 19406 - DNA, 21 bp, Artificial Sequence
  Synthetic
ctctttgagccagagctggat

SEQ ID NO: 19407 - DNA, 21 bp, Artificial Sequence
  Synthetic
cccaaatccagctctggctca

SEQ ID NO: 19408 - DNA, 21 bp, Artificial Sequence
  Synthetic
caaatccagctctggctcaaa

SEQ ID NO: 19409 - DNA, 21 bp, Artificial Sequence
  Synthetic
atccagctctggctcaaagag

SEQ ID NO: 19410 - DNA, 21 bp, Artificial Sequence
  Synthetic
gctcttctctttgagccagag

SEQ ID NO: 19411 - DNA, 21 bp, Artificial Sequence
  Synthetic
gagaagagcaaaaaaagattg

SEQ ID NO: 19412 - DNA, 21 bp, Artificial Sequence
  Synthetic
agaagagcaaaaaaagattga

SEQ ID NO: 19413 - DNA, 21 bp, Artificial Sequence
  Synthetic
agcaaaaaaagattgatggag

SEQ ID NO: 19414 - DNA, 21 bp, Artificial Sequence
  Synthetic
atggagctgaacctcttacac

SEQ ID NO: 19415 - DNA, 21 bp, Artificial Sequence
  Synthetic
gagctgaacctcttacaccag

SEQ ID NO: 19416 - DNA, 21 bp, Artificial Sequence
  Synthetic
aacctcttacaccagaagaga

SEQ ID NO: 19417 - DNA, 21 bp, Artificial Sequence
  Synthetic
ttcttcagtctcttctggtgt

SEQ ID NO: 19418 - DNA, 21 bp, Artificial Sequence
  Synthetic
ctcttacaccagaagagactg

SEQ ID NO: 19419 - DNA, 21 bp, Artificial Sequence
  Synthetic
acaccagaagagactgaagaa

SEQ ID NO: 19420 - DNA, 21 bp, Artificial Sequence
  Synthetic
caccagaagagactgaagaaa

SEQ ID NO: 19421 - DNA, 21 bp, Artificial Sequence
  Synthetic
tagtccagtttgtgaaaccct

SEQ ID NO: 19422 - DNA, 21 bp, Artificial Sequence
  Synthetic
tgtgataaactacaaagatag

SEQ ID NO: 19423 - DNA, 21 bp, Artificial Sequence
  Synthetic
acagttcagggcgacagctca

SEQ ID NO: 19424 - DNA, 21 bp, Artificial Sequence
  Synthetic
agacttcactgagctgtcgcc

SEQ ID NO: 19425 - DNA, 21 bp, Artificial Sequence
  Synthetic
ggtaactgaatgaagacttca

SEQ ID NO: 19426 - DNA, 21 bp, Artificial Sequence
  Synthetic
agtcttcattcagttaccttc

SEQ ID NO: 19427 - DNA, 21 bp, Artificial Sequence
  Synthetic
gtcttcattcagttaccttca

SEQ ID NO: 19428 - DNA, 21 bp, Artificial Sequence
  Synthetic
tctttccttgaaggtaactga

SEQ ID NO: 19429 - DNA, 21 bp, Artificial Sequence
  Synthetic
tcattcagttaccttcaagga

SEQ ID NO: 19430 - DNA, 21 bp, Artificial Sequence
  Synthetic
taattctttccttgaaggtaa

SEQ ID NO: 19431 - DNA, 21 bp, Artificial Sequence
  Synthetic
taccttcaaggaaagaattac

SEQ ID NO: 19432 - DNA, 21 bp, Artificial Sequence
  Synthetic
agtattctggtaattctttcc

SEQ ID NO: 19433 - DNA, 21 bp, Artificial Sequence
  Synthetic
ggaaagaattaccagaatact

SEQ ID NO: 19434 - DNA, 21 bp, Artificial Sequence
  Synthetic
accagaatactatgaattaat

SEQ ID NO: 19435 - DNA, 21 bp, Artificial Sequence
  Synthetic
ccagaatactatgaattaatt

SEQ ID NO: 19436 - DNA, 21 bp, Artificial Sequence
  Synthetic
tatgaattaattaggaagcca

SEQ ID NO: 19437 - DNA, 21 bp, Artificial Sequence
  Synthetic
aaggattcgtaatcataagta

SEQ ID NO: 19438 - DNA, 21 bp, Artificial Sequence
  Synthetic
aggattcgtaatcataagtac

SEQ ID NO: 19439 - DNA, 21 bp, Artificial Sequence
  Synthetic
taggctccggtacttatgatt

SEQ ID NO: 19440 - DNA, 21 bp, Artificial Sequence
  Synthetic
aagtaccggagcctaggcgac

SEQ ID NO: 19441 - DNA, 21 bp, Artificial Sequence
  Synthetic
agtaccggagcctaggcgacc

SEQ ID NO: 19442 - DNA, 21 bp, Artificial Sequence
  Synthetic
taccggagcctaggcgacctg

SEQ ID NO: 19443 - DNA, 21 bp, Artificial Sequence
  Synthetic
cggagcctaggcgacctggag

SEQ ID NO: 19444 - DNA, 21 bp, Artificial Sequence
  Synthetic
gaacgtctgagcgttgtgaca

SEQ ID NO: 19445 - DNA, 21 bp, Artificial Sequence
  Synthetic
ttgaacgtctgagcgttgtga

SEQ ID NO: 19446 - DNA, 21 bp, Artificial Sequence
  Synthetic
cacaacgctcagacgttcaac

SEQ ID NO: 19447 - DNA, 21 bp, Artificial Sequence
  Synthetic
acaacgctcagacgttcaacc

SEQ ID NO: 19448 - DNA, 21 bp, Artificial Sequence
  Synthetic
aacgctcagacgttcaacctg

SEQ ID NO: 19449 - DNA, 21 bp, Artificial Sequence
  Synthetic
acgctcagacgttcaacctgg

SEQ ID NO: 19450 - DNA, 21 bp, Artificial Sequence
  Synthetic
ggatccctccaggttgaacgt

SEQ ID NO: 19451 - DNA, 21 bp, Artificial Sequence
  Synthetic
cagacctgggatccctccagg

SEQ ID NO: 19452 - DNA, 21 bp, Artificial Sequence
  Synthetic
cccctttgaccatttagatct

SEQ ID NO: 19453 - DNA, 21 bp, Artificial Sequence
  Synthetic
tcttcatttcagctccagggc

SEQ ID NO: 19454 - DNA, 21 bp, Artificial Sequence
  Synthetic
cttcatttcagctccagggcc

SEQ ID NO: 19455 - DNA, 21 bp, Artificial Sequence
  Synthetic
atttcagctccagggcctgga

SEQ ID NO: 19456 - DNA, 21 bp, Artificial Sequence
  Synthetic
catccattccaggccctggag

SEQ ID NO: 19457 - DNA, 21 bp, Artificial Sequence
  Synthetic
gaaaccatccattccaggccc

SEQ ID NO: 19458 - DNA, 21 bp, Artificial Sequence
  Synthetic
ggaaaccatccattccaggcc

SEQ ID NO: 19459 - DNA, 21 bp, Artificial Sequence
  Synthetic
gtttccctgtataataacaac

SEQ ID NO: 19460 - DNA, 21 bp, Artificial Sequence
  Synthetic
cgttcaagttgttattataca

SEQ ID NO: 19461 - DNA, 21 bp, Artificial Sequence
  Synthetic
ccgttcaagttgttattatac

SEQ ID NO: 19462 - DNA, 21 bp, Artificial Sequence
  Synthetic
tccgttcaagttgttattata

SEQ ID NO: 19463 - DNA, 21 bp, Artificial Sequence
  Synthetic
ccctgtataataacaacttga

SEQ ID NO: 19464 - DNA, 21 bp, Artificial Sequence
  Synthetic
cctgtataataacaacttgaa

SEQ ID NO: 19465 - DNA, 21 bp, Artificial Sequence
  Synthetic
acttgaacggaatcttagccg

SEQ ID NO: 19466 - DNA, 21 bp, Artificial Sequence
  Synthetic
aacggaatcttagccgatgaa

SEQ ID NO: 19467 - DNA, 21 bp, Artificial Sequence
  Synthetic
acggaatcttagccgatgaaa

SEQ ID NO: 19468 - DNA, 21 bp, Artificial Sequence
  Synthetic
tcttagccgatgaaatggggc

SEQ ID NO: 19469 - DNA, 21 bp, Artificial Sequence
  Synthetic
cttagccgatgaaatggggct

SEQ ID NO: 19470 - DNA, 21 bp, Artificial Sequence
  Synthetic
attgcactcatcacttatctg

SEQ ID NO: 19471 - DNA, 21 bp, Artificial Sequence
  Synthetic
ttgcactcatcacttatctga

SEQ ID NO: 19472 - DNA, 21 bp, Artificial Sequence
  Synthetic
ttgtgctccatcagataagtg

SEQ ID NO: 19473 - DNA, 21 bp, Artificial Sequence
  Synthetic
acaatgatgagataggggcca

SEQ ID NO: 19474 - DNA, 21 bp, Artificial Sequence
  Synthetic
aaaggggaacaatgatgagat

SEQ ID NO: 19475 - DNA, 21 bp, Artificial Sequence
  Synthetic
gaaaggggaacaatgatgaga

SEQ ID NO: 19476 - DNA, 21 bp, Artificial Sequence
  Synthetic
acttacgaaaggggaacaatg

SEQ ID NO: 19477 - DNA, 21 bp, Artificial Sequence
  Synthetic
aaatgactttacttacgaaag

SEQ ID NO: 19478 - DNA, 21 bp, Artificial Sequence
  Synthetic
taaatgactttacttacgaaa

SEQ ID NO: 19479 - DNA, 21 bp, Artificial Sequence
  Synthetic
ataaatgactttacttacgaa

SEQ ID NO: 19480 - DNA, 21 bp, Artificial Sequence
  Synthetic
gttccataggactctatctaa

SEQ ID NO: 19481 - DNA, 21 bp, Artificial Sequence
  Synthetic
tgtccagttagatagagtcct

SEQ ID NO: 19482 - DNA, 21 bp, Artificial Sequence
  Synthetic
ggactctatctaactggacat

SEQ ID NO: 19483 - DNA, 21 bp, Artificial Sequence
  Synthetic
aaattcatatgtccagttaga

SEQ ID NO: 19484 - DNA, 21 bp, Artificial Sequence
  Synthetic
ctggacatatgaatttgacaa

SEQ ID NO: 19485 - DNA, 21 bp, Artificial Sequence
  Synthetic
gacaaatgggctccttctgtg

SEQ ID NO: 19486 - DNA, 21 bp, Artificial Sequence
  Synthetic
gtaagaaatcttcaccacaga

SEQ ID NO: 19487 - DNA, 21 bp, Artificial Sequence
  Synthetic
tgtaagaaatcttcaccacag

SEQ ID NO: 19488 - DNA, 21 bp, Artificial Sequence
  Synthetic
ccttgtaagaaatcttcacca

SEQ ID NO: 19489 - DNA, 21 bp, Artificial Sequence
  Synthetic
ggtgaagatttcttacaaggt

SEQ ID NO: 19490 - DNA, 21 bp, Artificial Sequence
  Synthetic
atacagcattccaaaccttgt

SEQ ID NO: 19491 - DNA, 21 bp, Artificial Sequence
  Synthetic
gcgacgcatggcaggagtacc

SEQ ID NO: 19492 - DNA, 21 bp, Artificial Sequence
  Synthetic
gacaagggagcgacgcatggc

SEQ ID NO: 19493 - DNA, 21 bp, Artificial Sequence
  Synthetic
ggacaagggagcgacgcatgg

SEQ ID NO: 19494 - DNA, 21 bp, Artificial Sequence
  Synthetic
tcgctcccttgtcccccagct

SEQ ID NO: 19495 - DNA, 21 bp, Artificial Sequence
  Synthetic
cgctcccttgtcccccagcta

SEQ ID NO: 19496 - DNA, 21 bp, Artificial Sequence
  Synthetic
cactccgtagctgggggacaa

SEQ ID NO: 19497 - DNA, 21 bp, Artificial Sequence
  Synthetic
ccactccgtagctgggggaca

SEQ ID NO: 19498 - DNA, 21 bp, Artificial Sequence
  Synthetic
gccactccgtagctgggggac

SEQ ID NO: 19499 - DNA, 21 bp, Artificial Sequence
  Synthetic
gaatttgccactccgtagctg

SEQ ID NO: 19500 - DNA, 21 bp, Artificial Sequence
  Synthetic
tgaatttgccactccgtagct

SEQ ID NO: 19501 - DNA, 21 bp, Artificial Sequence
  Synthetic
ttgaatttgccactccgtagc

SEQ ID NO: 19502 - DNA, 21 bp, Artificial Sequence
  Synthetic
attgaatttgccactccgtag

SEQ ID NO: 19503 - DNA, 21 bp, Artificial Sequence
  Synthetic
tcataagtagtcaagaggaca

SEQ ID NO: 19504 - DNA, 21 bp, Artificial Sequence
  Synthetic
tcaatgtcctcttgactactt

SEQ ID NO: 19505 - DNA, 21 bp, Artificial Sequence
  Synthetic
aatatactcataagtagtcaa

SEQ ID NO: 19506 - DNA, 21 bp, Artificial Sequence
  Synthetic
ataatatactcataagtagtc

SEQ ID NO: 19507 - DNA, 21 bp, Artificial Sequence
  Synthetic
tcctcttgtgttatagattcg

SEQ ID NO: 19508 - DNA, 21 bp, Artificial Sequence
  Synthetic
cctcttgtgttatagattcgg

SEQ ID NO: 19509 - DNA, 21 bp, Artificial Sequence
  Synthetic
attcggtggaaatacatgata

SEQ ID NO: 19510 - DNA, 21 bp, Artificial Sequence
  Synthetic
gtccactatcatgtatttcca

SEQ ID NO: 19511 - DNA, 21 bp, Artificial Sequence
  Synthetic
ggtggaaatacatgatagtgg

SEQ ID NO: 19512 - DNA, 21 bp, Artificial Sequence
  Synthetic
catgatagtggacgaaggcca

SEQ ID NO: 19513 - DNA, 21 bp, Artificial Sequence
  Synthetic
atagtggacgaaggccaccga

SEQ ID NO: 19514 - DNA, 21 bp, Artificial Sequence
  Synthetic
gtggacgaaggccaccgaatg

SEQ ID NO: 19515 - DNA, 21 bp, Artificial Sequence
  Synthetic
cactgcaagctgactcaggtc

SEQ ID NO: 19516 - DNA, 21 bp, Artificial Sequence
  Synthetic
cacatagtgagtgttcaagac

SEQ ID NO: 19517 - DNA, 21 bp, Artificial Sequence
  Synthetic
gaacactcactatgtggcccc

SEQ ID NO: 19518 - DNA, 21 bp, Artificial Sequence
  Synthetic
cactcactatgtggcccccag

SEQ ID NO: 19519 - DNA, 21 bp, Artificial Sequence
  Synthetic
gatccttctgggggccacata

SEQ ID NO: 19520 - DNA, 21 bp, Artificial Sequence
  Synthetic
cccagtcaagaggatccttct

SEQ ID NO: 19521 - DNA, 21 bp, Artificial Sequence
  Synthetic
cccccagaaggatcctcttga

SEQ ID NO: 19522 - DNA, 21 bp, Artificial Sequence
  Synthetic
tcccagtcaagaggatccttc

SEQ ID NO: 19523 - DNA, 21 bp, Artificial Sequence
  Synthetic
ccccagaaggatcctcttgac

SEQ ID NO: 19524 - DNA, 21 bp, Artificial Sequence
  Synthetic
gtcccagtcaagaggatcctt

SEQ ID NO: 19525 - DNA, 21 bp, Artificial Sequence
  Synthetic
ctgcagcggggtcccagtcaa

SEQ ID NO: 19526 - DNA, 21 bp, Artificial Sequence
  Synthetic
ttctgcagcggggtcccagtc

SEQ ID NO: 19527 - DNA, 21 bp, Artificial Sequence
  Synthetic
ctcttgactgggaccccgctg

SEQ ID NO: 19528 - DNA, 21 bp, Artificial Sequence
  Synthetic
ttcagggagcttattctgcag

SEQ ID NO: 19529 - DNA, 21 bp, Artificial Sequence
  Synthetic
ccccgctgcagaataagctcc

SEQ ID NO: 19530 - DNA, 21 bp, Artificial Sequence
  Synthetic
gttcagggagcttattctgca

SEQ ID NO: 19531 - DNA, 21 bp, Artificial Sequence
  Synthetic
gcagaataagctccctgaact

SEQ ID NO: 19532 - DNA, 21 bp, Artificial Sequence
  Synthetic
ttgaggagggcccagagttca

SEQ ID NO: 19533 - DNA, 21 bp, Artificial Sequence
  Synthetic
gttgaggagggcccagagttc

SEQ ID NO: 19534 - DNA, 21 bp, Artificial Sequence
  Synthetic
agttgaggagggcccagagtt

SEQ ID NO: 19535 - DNA, 21 bp, Artificial Sequence
  Synthetic
aggaggaagttgaggagggcc

SEQ ID NO: 19536 - DNA, 21 bp, Artificial Sequence
  Synthetic
tgttgggaggaggaagttgag

SEQ ID NO: 19537 - DNA, 21 bp, Artificial Sequence
  Synthetic
attgttgggaggaggaagttg

SEQ ID NO: 19538 - DNA, 21 bp, Artificial Sequence
  Synthetic
aattgttgggaggaggaagtt

SEQ ID NO: 19539 - DNA, 21 bp, Artificial Sequence
  Synthetic
aaaattgttgggaggaggaag

SEQ ID NO: 19540 - DNA, 21 bp, Artificial Sequence
  Synthetic
ctcttaaaaattgttgggagg

SEQ ID NO: 19541 - DNA, 21 bp, Artificial Sequence
  Synthetic
gctcttaaaaattgttgggag

SEQ ID NO: 19542 - DNA, 21 bp, Artificial Sequence
  Synthetic
cagctcttaaaaattgttggg

SEQ ID NO: 19543 - DNA, 21 bp, Artificial Sequence
  Synthetic
gcagctcttaaaaattgttgg

SEQ ID NO: 19544 - DNA, 21 bp, Artificial Sequence
  Synthetic
ctgcagctcttaaaaattgtt

SEQ ID NO: 19545 - DNA, 21 bp, Artificial Sequence
  Synthetic
gctgcagctcttaaaaattgt

SEQ ID NO: 19546 - DNA, 21 bp, Artificial Sequence
  Synthetic
tgctgcagctcttaaaaattg

SEQ ID NO: 19547 - DNA, 21 bp, Artificial Sequence
  Synthetic
ccagtcatggcaaatggagca

SEQ ID NO: 19548 - DNA, 21 bp, Artificial Sequence
  Synthetic
atgctccatttgccatgactg

SEQ ID NO: 19549 - DNA, 21 bp, Artificial Sequence
  Synthetic
cctttcaccagtcatggcaaa

SEQ ID NO: 19550 - DNA, 21 bp, Artificial Sequence
  Synthetic
ccctttcaccagtcatggcaa

SEQ ID NO: 19551 - DNA, 21 bp, Artificial Sequence
  Synthetic
tccatttgccatgactggtga

SEQ ID NO: 19552 - DNA, 21 bp, Artificial Sequence
  Synthetic
ctctcttacaggtggacttaa

SEQ ID NO: 19553 - DNA, 21 bp, Artificial Sequence
  Synthetic
tcttacaggtggacttaaatg

SEQ ID NO: 19554 - DNA, 21 bp, Artificial Sequence
  Synthetic
tacaggtggacttaaatgaag

SEQ ID NO: 19555 - DNA, 21 bp, Artificial Sequence
  Synthetic
taaggagactgaagaaagaag

SEQ ID NO: 19556 - DNA, 21 bp, Artificial Sequence
  Synthetic
aagaagttgaatcccagcttc

SEQ ID NO: 19557 - DNA, 21 bp, Artificial Sequence
  Synthetic
aagtgtgacatgtcagctctg

SEQ ID NO: 19558 - DNA, 21 bp, Artificial Sequence
  Synthetic
atggcgatacagaatcttctg

SEQ ID NO: 19559 - DNA, 21 bp, Artificial Sequence
  Synthetic
cttggcttgcatatggcgata

SEQ ID NO: 19560 - DNA, 21 bp, Artificial Sequence
  Synthetic
ctgtatcgccatatgcaagcc

SEQ ID NO: 19561 - DNA, 21 bp, Artificial Sequence
  Synthetic
tgtatcgccatatgcaagcca

SEQ ID NO: 19562 - DNA, 21 bp, Artificial Sequence
  Synthetic
gtatcgccatatgcaagccaa

SEQ ID NO: 19563 - DNA, 21 bp, Artificial Sequence
  Synthetic
ggatccttctcacagatggtt

SEQ ID NO: 19564 - DNA, 21 bp, Artificial Sequence
  Synthetic
atccttctcacagatggttct

SEQ ID NO: 19565 - DNA, 21 bp, Artificial Sequence
  Synthetic
tttctcagaaccatctgtgag

SEQ ID NO: 19566 - DNA, 21 bp, Artificial Sequence
  Synthetic
atctttctcagaaccatctgt

SEQ ID NO: 19567 - DNA, 21 bp, Artificial Sequence
  Synthetic
ttatctttctcagaaccatct

SEQ ID NO: 19568 - DNA, 21 bp, Artificial Sequence
  Synthetic
acagatggttctgagaaagat

SEQ ID NO: 19569 - DNA, 21 bp, Artificial Sequence
  Synthetic
aacgtaccttcttatctttct

SEQ ID NO: 19570 - DNA, 21 bp, Artificial Sequence
  Synthetic
tttccactggttcttagggga

SEQ ID NO: 19571 - DNA, 21 bp, Artificial Sequence
  Synthetic
ttccactggttcttaggggaa

SEQ ID NO: 19572 - DNA, 21 bp, Artificial Sequence
  Synthetic
tcttagcacctcctttcccct

SEQ ID NO: 19573 - DNA, 21 bp, Artificial Sequence
  Synthetic
aaaggaggtgctaagacactt

SEQ ID NO: 19574 - DNA, 21 bp, Artificial Sequence
  Synthetic
cttatgaacactattatgcag

SEQ ID NO: 19575 - DNA, 21 bp, Artificial Sequence
  Synthetic
tatgaacactattatgcagtt

SEQ ID NO: 19576 - DNA, 21 bp, Artificial Sequence
  Synthetic
cctcaatgtgctgaaacatat

SEQ ID NO: 19577 - DNA, 21 bp, Artificial Sequence
  Synthetic
gcagcagtggacgtcagctca

SEQ ID NO: 19578 - DNA, 21 bp, Artificial Sequence
  Synthetic
ggcagctggatgaagacctcg

SEQ ID NO: 19579 - DNA, 21 bp, Artificial Sequence
  Synthetic
ggtcttcatccagctgccctc

SEQ ID NO: 19580 - DNA, 21 bp, Artificial Sequence
  Synthetic
tcctttcgcgagggcagctgg

SEQ ID NO: 19581 - DNA, 21 bp, Artificial Sequence
  Synthetic
ttcatccagctgccctcgcga

SEQ ID NO: 19582 - DNA, 21 bp, Artificial Sequence
  Synthetic
tcatccagctgccctcgcgaa

SEQ ID NO: 19583 - DNA, 21 bp, Artificial Sequence
  Synthetic
cagctcctttcgcgagggcag

SEQ ID NO: 19584 - DNA, 21 bp, Artificial Sequence
  Synthetic
tgccctcgcgaaaggagctgc

SEQ ID NO: 19585 - DNA, 21 bp, Artificial Sequence
  Synthetic
tactcgggcagctcctttcgc

SEQ ID NO: 19586 - DNA, 21 bp, Artificial Sequence
  Synthetic
agtactcgggcagctcctttc

SEQ ID NO: 19587 - DNA, 21 bp, Artificial Sequence
  Synthetic
gaaaggagctgcccgagtact

SEQ ID NO: 19588 - DNA, 21 bp, Artificial Sequence
  Synthetic
ttgcggatgagctcgtagtac

SEQ ID NO: 19589 - DNA, 21 bp, Artificial Sequence
  Synthetic
tacgagctcatccgcaagccc

SEQ ID NO: 19590 - DNA, 21 bp, Artificial Sequence
  Synthetic
ttgaagtccacgggcttgcgg

SEQ ID NO: 19591 - DNA, 21 bp, Artificial Sequence
  Synthetic
atccgcaagcccgtggacttc

SEQ ID NO: 19592 - DNA, 21 bp, Artificial Sequence
  Synthetic
cttcttgaagtccacgggctt

SEQ ID NO: 19593 - DNA, 21 bp, Artificial Sequence
  Synthetic
acctttatcttcttgaagtcc

SEQ ID NO: 19594 - DNA, 21 bp, Artificial Sequence
  Synthetic
gtcagggttacctttatcttc

SEQ ID NO: 19595 - DNA, 21 bp, Artificial Sequence
  Synthetic
gaggctgcggtacttgtggtt

SEQ ID NO: 19596 - DNA, 21 bp, Artificial Sequence
  Synthetic
agtaccgcagcctcaacgacc

SEQ ID NO: 19597 - DNA, 21 bp, Artificial Sequence
  Synthetic
taccgcagcctcaacgaccta

SEQ ID NO: 19598 - DNA, 21 bp, Artificial Sequence
  Synthetic
cgcagcctcaacgacctagag

SEQ ID NO: 19599 - DNA, 21 bp, Artificial Sequence
  Synthetic
atgacgtccttctctaggtcg

SEQ ID NO: 19600 - DNA, 21 bp, Artificial Sequence
  Synthetic
aaggacgtcatgctcctgtgc

SEQ ID NO: 19601 - DNA, 21 bp, Artificial Sequence
  Synthetic
aaggtctgtgcgttctggcac

SEQ ID NO: 19602 - DNA, 21 bp, Artificial Sequence
  Synthetic
gaaggtctgtgcgttctggca

SEQ ID NO: 19603 - DNA, 21 bp, Artificial Sequence
  Synthetic
cagaacgcacagaccttcaac

SEQ ID NO: 19604 - DNA, 21 bp, Artificial Sequence
  Synthetic
agaacgcacagaccttcaacc

SEQ ID NO: 19605 - DNA, 21 bp, Artificial Sequence
  Synthetic
aacgcacagaccttcaacctg

SEQ ID NO: 19606 - DNA, 21 bp, Artificial Sequence
  Synthetic
ctcaccagggagccctccagg

SEQ ID NO: 19607 - DNA, 21 bp, Artificial Sequence
  Synthetic
ttcaacctggagggctccctg

SEQ ID NO: 19608 - DNA, 21 bp, Artificial Sequence
  Synthetic
caacctggagggctccctggt

SEQ ID NO: 19609 - DNA, 21 bp, Artificial Sequence
  Synthetic
ctggtgtctctgcccagatct

SEQ ID NO: 19610 - DNA, 21 bp, Artificial Sequence
  Synthetic
gacgatggagtcttcatagat

SEQ ID NO: 19611 - DNA, 21 bp, Artificial Sequence
  Synthetic
ggtgtcctcaaacagtaccag

SEQ ID NO: 19612 - DNA, 21 bp, Artificial Sequence
  Synthetic
ctgtccttgcagatcaaaggt

SEQ ID NO: 19613 - DNA, 21 bp, Artificial Sequence
  Synthetic
tgtccttgcagatcaaaggtt

SEQ ID NO: 19614 - DNA, 21 bp, Artificial Sequence
  Synthetic
gtgtccctgtacaacaacaac

SEQ ID NO: 19615 - DNA, 21 bp, Artificial Sequence
  Synthetic
ccgttcaggttgttgttgtac

SEQ ID NO: 19616 - DNA, 21 bp, Artificial Sequence
  Synthetic
gccgttcaggttgttgttgta

SEQ ID NO: 19617 - DNA, 21 bp, Artificial Sequence
  Synthetic
acctgaacggcatcctggccg

SEQ ID NO: 19618 - DNA, 21 bp, Artificial Sequence
  Synthetic
aacggcatcctggccgacgag

SEQ ID NO: 19619 - DNA, 21 bp, Artificial Sequence
  Synthetic
atcctggccgacgagatgggc

SEQ ID NO: 19620 - DNA, 21 bp, Artificial Sequence
  Synthetic
ccccaggcccatctcgtcggc

SEQ ID NO: 19621 - DNA, 21 bp, Artificial Sequence
  Synthetic
tcctggccgacgagatgggcc

SEQ ID NO: 19622 - DNA, 21 bp, Artificial Sequence
  Synthetic
cctggccgacgagatgggcct

SEQ ID NO: 19623 - DNA, 21 bp, Artificial Sequence
  Synthetic
ctggccgacgagatgggcctg

SEQ ID NO: 19624 - DNA, 21 bp, Artificial Sequence
  Synthetic
gtacgtgatgagcgcgatggt

SEQ ID NO: 19625 - DNA, 21 bp, Artificial Sequence
  Synthetic
atcgcgctcatcacgtacctc

SEQ ID NO: 19626 - DNA, 21 bp, Artificial Sequence
  Synthetic
tcgcgctcatcacgtacctca

SEQ ID NO: 19627 - DNA, 21 bp, Artificial Sequence
  Synthetic
ttgtgctccatgaggtacgtg

SEQ ID NO: 19628 - DNA, 21 bp, Artificial Sequence
  Synthetic
ccattgatgcgtttgtgctcc

SEQ ID NO: 19629 - DNA, 21 bp, Artificial Sequence
  Synthetic
tcatggagcacaaacgcatca

SEQ ID NO: 19630 - DNA, 21 bp, Artificial Sequence
  Synthetic
gagagaggcacgatgatgagg

SEQ ID NO: 19631 - DNA, 21 bp, Artificial Sequence
  Synthetic
cacgagagaggcacgatgatg

SEQ ID NO: 19632 - DNA, 21 bp, Artificial Sequence
  Synthetic
tcacgagagaggcacgatgat

SEQ ID NO: 19633 - DNA, 21 bp, Artificial Sequence
  Synthetic
cctcatcatcgtgcctctctc

SEQ ID NO: 19634 - DNA, 21 bp, Artificial Sequence
  Synthetic
actcacgagagaggcacgatg

SEQ ID NO: 19635 - DNA, 21 bp, Artificial Sequence
  Synthetic
ttccatcagaacgctgtccaa

SEQ ID NO: 19636 - DNA, 21 bp, Artificial Sequence
  Synthetic
gaacgctgtccaactgggcgt

SEQ ID NO: 19637 - DNA, 21 bp, Artificial Sequence
  Synthetic
ttgtcaaactcgtacgcccag

SEQ ID NO: 19638 - DNA, 21 bp, Artificial Sequence
  Synthetic
ctgggcgtacgagtttgacaa

SEQ ID NO: 19639 - DNA, 21 bp, Artificial Sequence
  Synthetic
gacaagtgggccccctccgtg

SEQ ID NO: 19640 - DNA, 21 bp, Artificial Sequence
  Synthetic
gtaagacaccttcaccacgga

SEQ ID NO: 19641 - DNA, 21 bp, Artificial Sequence
  Synthetic
tgtaagacaccttcaccacgg

SEQ ID NO: 19642 - DNA, 21 bp, Artificial Sequence
  Synthetic
ttgtaagacaccttcaccacg

SEQ ID NO: 19643 - DNA, 21 bp, Artificial Sequence
  Synthetic
ccttgtaagacaccttcacca

SEQ ID NO: 19644 - DNA, 21 bp, Artificial Sequence
  Synthetic
accttgtaagacaccttcacc

SEQ ID NO: 19645 - DNA, 21 bp, Artificial Sequence
  Synthetic
gcagggatccccagcagcaag

SEQ ID NO: 19646 - DNA, 21 bp, Artificial Sequence
  Synthetic
acaaaggcccgtcttgctgct

SEQ ID NO: 19647 - DNA, 21 bp, Artificial Sequence
  Synthetic
gacaaaggcccgtcttgctgc

SEQ ID NO: 19648 - DNA, 21 bp, Artificial Sequence
  Synthetic
ggacaaaggcccgtcttgctg

SEQ ID NO: 19649 - DNA, 21 bp, Artificial Sequence
  Synthetic
acgggcctttgtcccccagct

SEQ ID NO: 19650 - DNA, 21 bp, Artificial Sequence
  Synthetic
cgggcctttgtcccccagctc

SEQ ID NO: 19651 - DNA, 21 bp, Artificial Sequence
  Synthetic
cctttgtcccccagctccgga

SEQ ID NO: 19652 - DNA, 21 bp, Artificial Sequence
  Synthetic
ctttgtcccccagctccggag

SEQ ID NO: 19653 - DNA, 21 bp, Artificial Sequence
  Synthetic
tttgtcccccagctccggagt

SEQ ID NO: 19654 - DNA, 21 bp, Artificial Sequence
  Synthetic
gaacttcccactccggagctg

SEQ ID NO: 19655 - DNA, 21 bp, Artificial Sequence
  Synthetic
tgaacttcccactccggagct

SEQ ID NO: 19656 - DNA, 21 bp, Artificial Sequence
  Synthetic
ttgaacttcccactccggagc

SEQ ID NO: 19657 - DNA, 21 bp, Artificial Sequence
  Synthetic
gttgaacttcccactccggag

SEQ ID NO: 19658 - DNA, 21 bp, Artificial Sequence
  Synthetic
aagacgttgaacttcccactc

SEQ ID NO: 19659 - DNA, 21 bp, Artificial Sequence
  Synthetic
caagacgttgaacttcccact

SEQ ID NO: 19660 - DNA, 21 bp, Artificial Sequence
  Synthetic
tcgtacgtcgtcagcaagacg

SEQ ID NO: 19661 - DNA, 21 bp, Artificial Sequence
  Synthetic
tcaacgtcttgctgacgacgt

SEQ ID NO: 19662 - DNA, 21 bp, Artificial Sequence
  Synthetic
acagggacacgttaccttggc

SEQ ID NO: 19663 - DNA, 21 bp, Artificial Sequence
  Synthetic
ccacagggacacgttaccttg

SEQ ID NO: 19664 - DNA, 21 bp, Artificial Sequence
  Synthetic
actctggggcccgcagatccg

SEQ ID NO: 19665 - DNA, 21 bp, Artificial Sequence
  Synthetic
ctctggggcccgcagatccgt

SEQ ID NO: 19666 - DNA, 21 bp, Artificial Sequence
  Synthetic
tcatgtacttccaacggatct

SEQ ID NO: 19667 - DNA, 21 bp, Artificial Sequence
  Synthetic
atccgttggaagtacatgatt

SEQ ID NO: 19668 - DNA, 21 bp, Artificial Sequence
  Synthetic
gtccacaatcatgtacttcca

SEQ ID NO: 19669 - DNA, 21 bp, Artificial Sequence
  Synthetic
gttggaagtacatgattgtgg

SEQ ID NO: 19670 - DNA, 21 bp, Artificial Sequence
  Synthetic
attgtggacgaaggtcaccgc

SEQ ID NO: 19671 - DNA, 21 bp, Artificial Sequence
  Synthetic
gtggacgaaggtcaccgcatg

SEQ ID NO: 19672 - DNA, 21 bp, Artificial Sequence
  Synthetic
cggggtgccacatagtgcgtg

SEQ ID NO: 19673 - DNA, 21 bp, Artificial Sequence
  Synthetic
gcaccccgccgcctgctgctg

SEQ ID NO: 19674 - DNA, 21 bp, Artificial Sequence
  Synthetic
gtgcccgtcagcagcaggcgg

SEQ ID NO: 19675 - DNA, 21 bp, Artificial Sequence
  Synthetic
tgtgcccgtcagcagcaggcg

SEQ ID NO: 19676 - DNA, 21 bp, Artificial Sequence
  Synthetic
ctgctgacgggcacaccgctg

SEQ ID NO: 19677 - DNA, 21 bp, Artificial Sequence
  Synthetic
caccgctgcagaacaagcttc

SEQ ID NO: 19678 - DNA, 21 bp, Artificial Sequence
  Synthetic
gcagaacaagcttcccgagct

SEQ ID NO: 19679 - DNA, 21 bp, Artificial Sequence
  Synthetic
gttgagcagcgcccagagctc

SEQ ID NO: 19680 - DNA, 21 bp, Artificial Sequence
  Synthetic
agttgagcagcgcccagagct

SEQ ID NO: 19681 - DNA, 21 bp, Artificial Sequence
  Synthetic
aagttgagcagcgcccagagc

SEQ ID NO: 19682 - DNA, 21 bp, Artificial Sequence
  Synthetic
agcaggaagttgagcagcgcc

SEQ ID NO: 19683 - DNA, 21 bp, Artificial Sequence
  Synthetic
aagatggtgggcagcaggaag

SEQ ID NO: 19684 - DNA, 21 bp, Artificial Sequence
  Synthetic
ctcttgaagatggtgggcagc

SEQ ID NO: 19685 - DNA, 21 bp, Artificial Sequence
  Synthetic
ttcctgctgcccaccatcttc

SEQ ID NO: 19686 - DNA, 21 bp, Artificial Sequence
  Synthetic
gctcttgaagatggtgggcag

SEQ ID NO: 19687 - DNA, 21 bp, Artificial Sequence
  Synthetic
gtgctgcagctcttgaagatg

SEQ ID NO: 19688 - DNA, 21 bp, Artificial Sequence
  Synthetic
tcttcaagagctgcagcacct

SEQ ID NO: 19689 - DNA, 21 bp, Artificial Sequence
  Synthetic
tgctcgaaggtgctgcagctc

SEQ ID NO: 19690 - DNA, 21 bp, Artificial Sequence
  Synthetic
aagggtgcgttaaaccactgc

SEQ ID NO: 19691 - DNA, 21 bp, Artificial Sequence
  Synthetic
ttaacgcaccctttgccatga

SEQ ID NO: 19692 - DNA, 21 bp, Artificial Sequence
  Synthetic
taacgcaccctttgccatgac

SEQ ID NO: 19693 - DNA, 21 bp, Artificial Sequence
  Synthetic
aacgcaccctttgccatgacc

SEQ ID NO: 19694 - DNA, 21 bp, Artificial Sequence
  Synthetic
acgcaccctttgccatgaccg

SEQ ID NO: 19695 - DNA, 21 bp, Artificial Sequence
  Synthetic
tttgccatgaccggggaaaag

SEQ ID NO: 19696 - DNA, 21 bp, Artificial Sequence
  Synthetic
cttgggggcttccaggtggac

SEQ ID NO: 19697 - DNA, 21 bp, Artificial Sequence
  Synthetic
ggggcttccaggtggacctga

SEQ ID NO: 19698 - DNA, 21 bp, Artificial Sequence
  Synthetic
ggcttccaggtggacctgaat

SEQ ID NO: 19699 - DNA, 21 bp, Artificial Sequence
  Synthetic
gcttccaggtggacctgaatg

SEQ ID NO: 19700 - DNA, 21 bp, Artificial Sequence
  Synthetic
tcctcctcattcaggtccacc

SEQ ID NO: 19701 - DNA, 21 bp, Artificial Sequence
  Synthetic
ttccaggtggacctgaatgag

SEQ ID NO: 19702 - DNA, 21 bp, Artificial Sequence
  Synthetic
ttcctcctcattcaggtccac

SEQ ID NO: 19703 - DNA, 21 bp, Artificial Sequence
  Synthetic
tccaggtggacctgaatgagg

SEQ ID NO: 19704 - DNA, 21 bp, Artificial Sequence
  Synthetic
tttgtggagacgccggatgat

SEQ ID NO: 19705 - DNA, 21 bp, Artificial Sequence
  Synthetic
actttgtggagacgccggatg

SEQ ID NO: 19706 - DNA, 21 bp, Artificial Sequence
  Synthetic
ccgcagcactttgtggagacg

SEQ ID NO: 19707 - DNA, 21 bp, Artificial Sequence
  Synthetic
aagaagggccgcagcactttg

SEQ ID NO: 19708 - DNA, 21 bp, Artificial Sequence
  Synthetic
caagaagggccgcagcacttt

SEQ ID NO: 19709 - DNA, 21 bp, Artificial Sequence
  Synthetic
ttcttgagtcgtcggagcaag

SEQ ID NO: 19710 - DNA, 21 bp, Artificial Sequence
  Synthetic
cccttcttgctccgacgactc

SEQ ID NO: 19711 - DNA, 21 bp, Artificial Sequence
  Synthetic
tccttcttgagtcgtcggagc

SEQ ID NO: 19712 - DNA, 21 bp, Artificial Sequence
  Synthetic
ttcttgctccgacgactcaag

SEQ ID NO: 19713 - DNA, 21 bp, Artificial Sequence
  Synthetic
tcttgctccgacgactcaaga

SEQ ID NO: 19714 - DNA, 21 bp, Artificial Sequence
  Synthetic
tcgacttccttcttgagtcgt

SEQ ID NO: 19715 - DNA, 21 bp, Artificial Sequence
  Synthetic
ctcgacttccttcttgagtcg

SEQ ID NO: 19716 - DNA, 21 bp, Artificial Sequence
  Synthetic
tccgacgactcaagaaggaag

SEQ ID NO: 19717 - DNA, 21 bp, Artificial Sequence
  Synthetic
aactgggcctcgacttccttc

SEQ ID NO: 19718 - DNA, 21 bp, Artificial Sequence
  Synthetic
aggaagtcgaggcccagttgc

SEQ ID NO: 19719 - DNA, 21 bp, Artificial Sequence
  Synthetic
cctcaaaactccatcaccttt

SEQ ID NO: 19720 - DNA, 21 bp, Artificial Sequence
  Synthetic
gtgcgacatgtctgcgctgca

SEQ ID NO: 19721 - DNA, 21 bp, Artificial Sequence
  Synthetic
cccttggcctgcatgtggcgg

SEQ ID NO: 19722 - DNA, 21 bp, Artificial Sequence
  Synthetic
ctctaccgccacatgcaggcc

SEQ ID NO: 19723 - DNA, 21 bp, Artificial Sequence
  Synthetic
gcgtgctgctgactgatggct

SEQ ID NO: 19724 - DNA, 21 bp, Artificial Sequence
  Synthetic
gtgctgctgactgatggctcc

SEQ ID NO: 19725 - DNA, 21 bp, Artificial Sequence
  Synthetic
ctgctgactgatggctccgag

SEQ ID NO: 19726 - DNA, 21 bp, Artificial Sequence
  Synthetic
actgatggctccgagaaggac

SEQ ID NO: 19727 - DNA, 21 bp, Artificial Sequence
  Synthetic
ggctccgagaaggacaagaag

SEQ ID NO: 19728 - DNA, 21 bp, Artificial Sequence
  Synthetic
ggcccaccttcttgtccttct

SEQ ID NO: 19729 - DNA, 21 bp, Artificial Sequence
  Synthetic
gggcccaccttcttgtccttc

SEQ ID NO: 19730 - DNA, 21 bp, Artificial Sequence
  Synthetic
gtcttggtgccgcctttgccc

SEQ ID NO: 19731 - DNA, 21 bp, Artificial Sequence
  Synthetic
ggtcttggtgccgcctttgcc

SEQ ID NO: 19732 - DNA, 21 bp, Artificial Sequence
  Synthetic
aaaggcggcaccaagaccctg

SEQ ID NO: 19733 - DNA, 21 bp, Artificial Sequence
  Synthetic
cagctgcatgatggtgttcat

SEQ ID NO: 19734 - DNA, 21 bp, Artificial Sequence
  Synthetic
gatgaacaccatcatgcagct

SEQ ID NO: 19735 - DNA, 21 bp, Artificial Sequence
  Synthetic
atgaacaccatcatgcagctg

SEQ ID NO: 19736 - DNA, 21 bp, Artificial Sequence
  Synthetic
cctcgatgtgctggaacatgt

SEQ ID NO: 19737 - DNA, 21 bp, Artificial Sequence
  Synthetic
acctcgatgtgctggaacatg

SEQ ID NO: 19738 - DNA, 21 bp, Artificial Sequence
  Synthetic
aatagaaccatttccagaaga

SEQ ID NO: 19739 - DNA, 21 bp, Artificial Sequence
  Synthetic
atagaaccatttccagaagaa

SEQ ID NO: 19740 - DNA, 21 bp, Artificial Sequence
  Synthetic
tagaaccatttccagaagaaa

SEQ ID NO: 19741 - DNA, 21 bp, Artificial Sequence
  Synthetic
gaaccatttccagaagaaagg

SEQ ID NO: 19742 - DNA, 21 bp, Artificial Sequence
  Synthetic
aagaaagttctccctttcttc

SEQ ID NO: 19743 - DNA, 21 bp, Artificial Sequence
  Synthetic
gaagaaagttctccctttctt

SEQ ID NO: 19744 - DNA, 21 bp, Artificial Sequence
  Synthetic
cataaatttgtacaattgctg

SEQ ID NO: 19745 - DNA, 21 bp, Artificial Sequence
  Synthetic
cttcagcaattgtacaaattt

SEQ ID NO: 19746 - DNA, 21 bp, Artificial Sequence
  Synthetic
ttccataaatttgtacaattg

SEQ ID NO: 19747 - DNA, 21 bp, Artificial Sequence
  Synthetic
ttcagcaattgtacaaattta

SEQ ID NO: 19748 - DNA, 21 bp, Artificial Sequence
  Synthetic
attgtacaaatttatggaaga

SEQ ID NO: 19749 - DNA, 21 bp, Artificial Sequence
  Synthetic
acaaatttatggaagatagag

SEQ ID NO: 19750 - DNA, 21 bp, Artificial Sequence
  Synthetic
ctattaacaaacgacctgtac

SEQ ID NO: 19751 - DNA, 21 bp, Artificial Sequence
  Synthetic
caaacgacctgtacttggata

SEQ ID NO: 19752 - DNA, 21 bp, Artificial Sequence
  Synthetic
cctgtacttggatatcgaaat

SEQ ID NO: 19753 - DNA, 21 bp, Artificial Sequence
  Synthetic
tgtacaagtctgaataactta

SEQ ID NO: 19754 - DNA, 21 bp, Artificial Sequence
  Synthetic
tattcagacttgtacacaaac

SEQ ID NO: 19755 - DNA, 21 bp, Artificial Sequence
  Synthetic
attcagacttgtacacaaact

SEQ ID NO: 19756 - DNA, 21 bp, Artificial Sequence
  Synthetic
cctccaagtttgtgtacaagt

SEQ ID NO: 19757 - DNA, 21 bp, Artificial Sequence
  Synthetic
tcagacttgtacacaaacttg

SEQ ID NO: 19758 - DNA, 21 bp, Artificial Sequence
  Synthetic
aaacttggaggatttgataat

SEQ ID NO: 19759 - DNA, 21 bp, Artificial Sequence
  Synthetic
actttgtccattagattgaaa

SEQ ID NO: 19760 - DNA, 21 bp, Artificial Sequence
  Synthetic
ctttgtccattagattgaaag

SEQ ID NO: 19761 - DNA, 21 bp, Artificial Sequence
  Synthetic
ttagattgaaagtggagctgt

SEQ ID NO: 19762 - DNA, 21 bp, Artificial Sequence
  Synthetic
tagattgaaagtggagctgtt

SEQ ID NO: 19763 - DNA, 21 bp, Artificial Sequence
  Synthetic
ggaaacaagtctaccaagatc

SEQ ID NO: 19764 - DNA, 21 bp, Artificial Sequence
  Synthetic
gaaacaagtctaccaagatct

SEQ ID NO: 19765 - DNA, 21 bp, Artificial Sequence
  Synthetic
tcctgcagctgaatttaagac

SEQ ID NO: 19766 - DNA, 21 bp, Artificial Sequence
  Synthetic
tccctgtcttaaattcagctg

SEQ ID NO: 19767 - DNA, 21 bp, Artificial Sequence
  Synthetic
atcctgcagctgaatttaaga

SEQ ID NO: 19768 - DNA, 21 bp, Artificial Sequence
  Synthetic
atttaacattgtatcctgcag

SEQ ID NO: 19769 - DNA, 21 bp, Artificial Sequence
  Synthetic
tttccagatacttatatggtt

SEQ ID NO: 19770 - DNA, 21 bp, Artificial Sequence
  Synthetic
cctcaaaaccatataagtatc

SEQ ID NO: 19771 - DNA, 21 bp, Artificial Sequence
  Synthetic
tcctcaaaaccatataagtat

SEQ ID NO: 19772 - DNA, 21 bp, Artificial Sequence
  Synthetic
tttgagtgctatccaccaggc

SEQ ID NO: 19773 - DNA, 21 bp, Artificial Sequence
  Synthetic
gcacttggactttcatgcctg

SEQ ID NO: 19774 - DNA, 21 bp, Artificial Sequence
  Synthetic
gcatgaaagtccaagtgcggt

SEQ ID NO: 19775 - DNA, 21 bp, Artificial Sequence
  Synthetic
gaaagtccaagtgcggtatgg

SEQ ID NO: 19776 - DNA, 21 bp, Artificial Sequence
  Synthetic
aagtccaagtgcggtatggac

SEQ ID NO: 19777 - DNA, 21 bp, Artificial Sequence
  Synthetic
agtccaagtgcggtatggacg

SEQ ID NO: 19778 - DNA, 21 bp, Artificial Sequence
  Synthetic
gtccaagtgcggtatggacga

SEQ ID NO: 19779 - DNA, 21 bp, Artificial Sequence
  Synthetic
tttccctcgtccataccgcac

SEQ ID NO: 19780 - DNA, 21 bp, Artificial Sequence
  Synthetic
gagggaaaaatcaaaaaatgt

SEQ ID NO: 19781 - DNA, 21 bp, Artificial Sequence
  Synthetic
ctagtattaaagattctgatg

SEQ ID NO: 19782 - DNA, 21 bp, Artificial Sequence
  Synthetic
ttaaagattctgatgtcgaag

SEQ ID NO: 19783 - DNA, 21 bp, Artificial Sequence
  Synthetic
taaagattctgatgtcgaagg

SEQ ID NO: 19784 - DNA, 21 bp, Artificial Sequence
  Synthetic
aagattctgatgtcgaaggtg

SEQ ID NO: 19785 - DNA, 21 bp, Artificial Sequence
  Synthetic
ggacctctccaccttcgacat

SEQ ID NO: 19786 - DNA, 21 bp, Artificial Sequence
  Synthetic
tccgcagtaatgcaccaagta

SEQ ID NO: 19787 - DNA, 21 bp, Artificial Sequence
  Synthetic
tcctttacttggtgcattact

SEQ ID NO: 19788 - DNA, 21 bp, Artificial Sequence
  Synthetic
ttacttggtgcattactgcgg

SEQ ID NO: 19789 - DNA, 21 bp, Artificial Sequence
  Synthetic
tacttggtgcattactgcgga

SEQ ID NO: 19790 - DNA, 21 bp, Artificial Sequence
  Synthetic
gtgcattactgcggatggaat

SEQ ID NO: 19791 - DNA, 21 bp, Artificial Sequence
  Synthetic
ttcaagacgcataaaaaaggc

SEQ ID NO: 19792 - DNA, 21 bp, Artificial Sequence
  Synthetic
tcaagacgcataaaaaaggct

SEQ ID NO: 19793 - DNA, 21 bp, Artificial Sequence
  Synthetic
aaaggctggggacttcgtacc

SEQ ID NO: 19794 - DNA, 21 bp, Artificial Sequence
  Synthetic
aaggctggggacttcgtacct

SEQ ID NO: 19795 - DNA, 21 bp, Artificial Sequence
  Synthetic
cttcgtaccttggaatttata

SEQ ID NO: 19796 - DNA, 21 bp, Artificial Sequence
  Synthetic
tttcggtataaattccaaggt

SEQ ID NO: 19797 - DNA, 21 bp, Artificial Sequence
  Synthetic
gtaccttggaatttataccga

SEQ ID NO: 19798 - DNA, 21 bp, Artificial Sequence
  Synthetic
taccttggaatttataccgaa

SEQ ID NO: 19799 - DNA, 21 bp, Artificial Sequence
  Synthetic
taccgaaaggaaggtttgtct

SEQ ID NO: 19800 - DNA, 21 bp, Artificial Sequence
  Synthetic
ggtttgtctgtgaatatgctg

SEQ ID NO: 19801 - DNA, 21 bp, Artificial Sequence
  Synthetic
gtgaatatgctggtgaggttt

SEQ ID NO: 19802 - DNA, 21 bp, Artificial Sequence
  Synthetic
tttaggattctctgaagttca

SEQ ID NO: 19803 - DNA, 21 bp, Artificial Sequence
  Synthetic
aggattctctgaagttcagag

SEQ ID NO: 19804 - DNA, 21 bp, Artificial Sequence
  Synthetic
tgaattcttctctgaacttca

SEQ ID NO: 19805 - DNA, 21 bp, Artificial Sequence
  Synthetic
agtgaattcttctctgaactt

SEQ ID NO: 19806 - DNA, 21 bp, Artificial Sequence
  Synthetic
tgtttgtaagtgaattcttct

SEQ ID NO: 19807 - DNA, 21 bp, Artificial Sequence
  Synthetic
atggctataatgtaattggag

SEQ ID NO: 19808 - DNA, 21 bp, Artificial Sequence
  Synthetic
ccctgatggctataatgtaat

SEQ ID NO: 19809 - DNA, 21 bp, Artificial Sequence
  Synthetic
ctccaattacattatagccat

SEQ ID NO: 19810 - DNA, 21 bp, Artificial Sequence
  Synthetic
tccctgatggctataatgtaa

SEQ ID NO: 19811 - DNA, 21 bp, Artificial Sequence
  Synthetic
tccaattacattatagccatc

SEQ ID NO: 19812 - DNA, 21 bp, Artificial Sequence
  Synthetic
ccaattacattatagccatca

SEQ ID NO: 19813 - DNA, 21 bp, Artificial Sequence
  Synthetic
ccatcagggaacatgtttata

SEQ ID NO: 19814 - DNA, 21 bp, Artificial Sequence
  Synthetic
catgtttataatgggcaggta

SEQ ID NO: 19815 - DNA, 21 bp, Artificial Sequence
  Synthetic
atgtttataatgggcaggtaa

SEQ ID NO: 19816 - DNA, 21 bp, Artificial Sequence
  Synthetic
catttgttgaccctacttata

SEQ ID NO: 19817 - DNA, 21 bp, Artificial Sequence
  Synthetic
atttgttgaccctacttatat

SEQ ID NO: 19818 - DNA, 21 bp, Artificial Sequence
  Synthetic
accctacttatataggaaata

SEQ ID NO: 19819 - DNA, 21 bp, Artificial Sequence
  Synthetic
ttccaatatttcctatataag

SEQ ID NO: 19820 - DNA, 21 bp, Artificial Sequence
  Synthetic
ccctacttatataggaaatat

SEQ ID NO: 19821 - DNA, 21 bp, Artificial Sequence
  Synthetic
gaagattccttaatcattctt

SEQ ID NO: 19822 - DNA, 21 bp, Artificial Sequence
  Synthetic
tttggctcacaagaatgatta

SEQ ID NO: 19823 - DNA, 21 bp, Artificial Sequence
  Synthetic
gtttggctcacaagaatgatt

SEQ ID NO: 19824 - DNA, 21 bp, Artificial Sequence
  Synthetic
tcatcaaaaggtttggctcac

SEQ ID NO: 19825 - DNA, 21 bp, Artificial Sequence
  Synthetic
taccattgagtcaattcggac

SEQ ID NO: 19826 - DNA, 21 bp, Artificial Sequence
  Synthetic
gtaccattgagtcaattcgga

SEQ ID NO: 19827 - DNA, 21 bp, Artificial Sequence
  Synthetic
cttaggtaccattgagtcaat

SEQ ID NO: 19828 - DNA, 21 bp, Artificial Sequence
  Synthetic
aaagtgccaacttaggtacca

SEQ ID NO: 19829 - DNA, 21 bp, Artificial Sequence
  Synthetic
ttgcagccaaagatattgtgc

SEQ ID NO: 19830 - DNA, 21 bp, Artificial Sequence
  Synthetic
cagccaaagatattgtgccag

SEQ ID NO: 19831 - DNA, 21 bp, Artificial Sequence
  Synthetic
ccaaagatattgtgccagaag

SEQ ID NO: 19832 - DNA, 21 bp, Artificial Sequence
  Synthetic
aagaactctcttatgattatt

SEQ ID NO: 19833 - DNA, 21 bp, Artificial Sequence
  Synthetic
agaactctcttatgattattc

SEQ ID NO: 19834 - DNA, 21 bp, Artificial Sequence
  Synthetic
tatcttcctgaataatcataa

SEQ ID NO: 19835 - DNA, 21 bp, Artificial Sequence
  Synthetic
gatatcttcctgaataatcat

SEQ ID NO: 19836 - DNA, 21 bp, Artificial Sequence
  Synthetic
ccgcgccggcgcccttccagg

SEQ ID NO: 19837 - DNA, 21 bp, Artificial Sequence
  Synthetic
cgcgccggcgcccttccaggt

SEQ ID NO: 19838 - DNA, 21 bp, Artificial Sequence
  Synthetic
cctggccccgcccctacctgg

SEQ ID NO: 19839 - DNA, 21 bp, Artificial Sequence
  Synthetic
agtacactcctgatcatgtag

SEQ ID NO: 19840 - DNA, 21 bp, Artificial Sequence
  Synthetic
tccaggtccaactacatgatc

SEQ ID NO: 19841 - DNA, 21 bp, Artificial Sequence
  Synthetic
ctcctgatcatgtagttggac

SEQ ID NO: 19842 - DNA, 21 bp, Artificial Sequence
  Synthetic
ctccaggtccaactacatgat

SEQ ID NO: 19843 - DNA, 21 bp, Artificial Sequence
  Synthetic
tcctgatcatgtagttggacc

SEQ ID NO: 19844 - DNA, 21 bp, Artificial Sequence
  Synthetic
atcccactcaaataacctttc

SEQ ID NO: 19845 - DNA, 21 bp, Artificial Sequence
  Synthetic
atccgggaaaggttatttgag

SEQ ID NO: 19846 - DNA, 21 bp, Artificial Sequence
  Synthetic
catccgggaaaggttatttga

SEQ ID NO: 19847 - DNA, 21 bp, Artificial Sequence
  Synthetic
aatgcatccgggaaaggttat

SEQ ID NO: 19848 - DNA, 21 bp, Artificial Sequence
  Synthetic
ggagcaagtgccagggaggca

SEQ ID NO: 19849 - DNA, 21 bp, Artificial Sequence
  Synthetic
aggagcaagtgccagggaggc

SEQ ID NO: 19850 - DNA, 21 bp, Artificial Sequence
  Synthetic
caggagcaagtgccagggagg

SEQ ID NO: 19851 - DNA, 21 bp, Artificial Sequence
  Synthetic
cggagacaggagcaagtgcca

SEQ ID NO: 19852 - DNA, 21 bp, Artificial Sequence
  Synthetic
gcggagacaggagcaagtgcc

SEQ ID NO: 19853 - DNA, 21 bp, Artificial Sequence
  Synthetic
ggcggagacaggagcaagtgc

SEQ ID NO: 19854 - DNA, 21 bp, Artificial Sequence
  Synthetic
gcacttgctcctgtctccgcc

SEQ ID NO: 19855 - DNA, 21 bp, Artificial Sequence
  Synthetic
cacttgctcctgtctccgcca

SEQ ID NO: 19856 - DNA, 21 bp, Artificial Sequence
  Synthetic
cttgctcctgtctccgccatg

SEQ ID NO: 19857 - DNA, 21 bp, Artificial Sequence
  Synthetic
tgctcctgtctccgccatgga

SEQ ID NO: 19858 - DNA, 21 bp, Artificial Sequence
  Synthetic
agttctctccatggcggagac

SEQ ID NO: 19859 - DNA, 21 bp, Artificial Sequence
  Synthetic
tagttctctccatggcggaga

SEQ ID NO: 19860 - DNA, 21 bp, Artificial Sequence
  Synthetic
tcatcatagttctctccatgg

SEQ ID NO: 19861 - DNA, 21 bp, Artificial Sequence
  Synthetic
atcatcatagttctctccatg

SEQ ID NO: 19862 - DNA, 21 bp, Artificial Sequence
  Synthetic
ctatgatgataactcatgcct

SEQ ID NO: 19863 - DNA, 21 bp, Artificial Sequence
  Synthetic
ataactcatgccttagagata

SEQ ID NO: 19864 - DNA, 21 bp, Artificial Sequence
  Synthetic
cagatcctatatctctaaggc

SEQ ID NO: 19865 - DNA, 21 bp, Artificial Sequence
  Synthetic
catgccttagagatataggat

SEQ ID NO: 19866 - DNA, 21 bp, Artificial Sequence
  Synthetic
atgccttagagatataggatc

SEQ ID NO: 19867 - DNA, 21 bp, Artificial Sequence
  Synthetic
gccttagagatataggatctg

SEQ ID NO: 19868 - DNA, 21 bp, Artificial Sequence
  Synthetic
ccttagagatataggatctgg

SEQ ID NO: 19869 - DNA, 21 bp, Artificial Sequence
  Synthetic
taggatctggaggaaagtatg

SEQ ID NO: 19870 - DNA, 21 bp, Artificial Sequence
  Synthetic
gaaagtatgcagagcctgttt

SEQ ID NO: 19871 - DNA, 21 bp, Artificial Sequence
  Synthetic
gcagtggtcactgcatcggca

SEQ ID NO: 19872 - DNA, 21 bp, Artificial Sequence
  Synthetic
gtgccgatgcagtgaccactg

SEQ ID NO: 19873 - DNA, 21 bp, Artificial Sequence
  Synthetic
atgcagtgaccactgcagaaa

SEQ ID NO: 19874 - DNA, 21 bp, Artificial Sequence
  Synthetic
accctcatttacctctctctg

SEQ ID NO: 19875 - DNA, 21 bp, Artificial Sequence
  Synthetic
tctctagggagtgaaattcct

SEQ ID NO: 19876 - DNA, 21 bp, Artificial Sequence
  Synthetic
tcccacaggaatttcactccc

SEQ ID NO: 19877 - DNA, 21 bp, Artificial Sequence
  Synthetic
ctctagggagtgaaattcctg

SEQ ID NO: 19878 - DNA, 21 bp, Artificial Sequence
  Synthetic
tctagggagtgaaattcctgt

SEQ ID NO: 19879 - DNA, 21 bp, Artificial Sequence
  Synthetic
cgactggtgacacactcccac

SEQ ID NO: 19880 - DNA, 21 bp, Artificial Sequence
  Synthetic
ccgactggtgacacactccca

SEQ ID NO: 19881 - DNA, 21 bp, Artificial Sequence
  Synthetic
catgatgcagccatggctgcc

SEQ ID NO: 19882 - DNA, 21 bp, Artificial Sequence
  Synthetic
ccatgatgcagccatggctgc

SEQ ID NO: 19883 - DNA, 21 bp, Artificial Sequence
  Synthetic
gccatggctgcatcatggctg

SEQ ID NO: 19884 - DNA, 21 bp, Artificial Sequence
  Synthetic
ggctgcatcatggctgatgag

SEQ ID NO: 19885 - DNA, 21 bp, Artificial Sequence
  Synthetic
tcatggctgatgagatgggcc

SEQ ID NO: 19886 - DNA, 21 bp, Artificial Sequence
  Synthetic
catggctgatgagatgggcct

SEQ ID NO: 19887 - DNA, 21 bp, Artificial Sequence
  Synthetic
gctgcagtgcatcacattgat

SEQ ID NO: 19888 - DNA, 21 bp, Artificial Sequence
  Synthetic
gccagagtccagagtgcaagc

SEQ ID NO: 19889 - DNA, 21 bp, Artificial Sequence
  Synthetic
tgtcaatttctggcttgcact

SEQ ID NO: 19890 - DNA, 21 bp, Artificial Sequence
  Synthetic
gtggtgtcgccttccagcctg

SEQ ID NO: 19891 - DNA, 21 bp, Artificial Sequence
  Synthetic
gtgtcgccttccagcctggtg

SEQ ID NO: 19892 - DNA, 21 bp, Artificial Sequence
  Synthetic
tgtaccagttcttcaccaggc

SEQ ID NO: 19893 - DNA, 21 bp, Artificial Sequence
  Synthetic
ttgtaccagttcttcaccagg

SEQ ID NO: 19894 - DNA, 21 bp, Artificial Sequence
  Synthetic
gcctggtgaagaactggtaca

SEQ ID NO: 19895 - DNA, 21 bp, Artificial Sequence
  Synthetic
tgaagaactggtacaatgagg

SEQ ID NO: 19896 - DNA, 21 bp, Artificial Sequence
  Synthetic
gaagaactggtacaatgaggt

SEQ ID NO: 19897 - DNA, 21 bp, Artificial Sequence
  Synthetic
aagaactggtacaatgaggtt

SEQ ID NO: 19898 - DNA, 21 bp, Artificial Sequence
  Synthetic
acaatgaggttgggaaatggc

SEQ ID NO: 19899 - DNA, 21 bp, Artificial Sequence
  Synthetic
caatgaggttgggaaatggct

SEQ ID NO: 19900 - DNA, 21 bp, Artificial Sequence
  Synthetic
atgaggttgggaaatggctcg

SEQ ID NO: 19901 - DNA, 21 bp, Artificial Sequence
  Synthetic
tgaggttgggaaatggctcgg

SEQ ID NO: 19902 - DNA, 21 bp, Artificial Sequence
  Synthetic
gaggttgggaaatggctcgga

SEQ ID NO: 19903 - DNA, 21 bp, Artificial Sequence
  Synthetic
ggttgggaaatggctcggagg

SEQ ID NO: 19904 - DNA, 21 bp, Artificial Sequence
  Synthetic
gccagaggttggatcctccct

SEQ ID NO: 19905 - DNA, 21 bp, Artificial Sequence
  Synthetic
ggatccaacctctggccatcg

SEQ ID NO: 19906 - DNA, 21 bp, Artificial Sequence
  Synthetic
gatccaacctctggccatcga

SEQ ID NO: 19907 - DNA, 21 bp, Artificial Sequence
  Synthetic
tcctccatcgatggccagagg

SEQ ID NO: 19908 - DNA, 21 bp, Artificial Sequence
  Synthetic
tccaacctctggccatcgatg

SEQ ID NO: 19909 - DNA, 21 bp, Artificial Sequence
  Synthetic
cttagatcctccatcgatggc

SEQ ID NO: 19910 - DNA, 21 bp, Artificial Sequence
  Synthetic
ctggccatcgatggaggatct

SEQ ID NO: 19911 - DNA, 21 bp, Artificial Sequence
  Synthetic
ccatcgatggaggatctaagg

SEQ ID NO: 19912 - DNA, 21 bp, Artificial Sequence
  Synthetic
aaggatgaaatagaccaaaag

SEQ ID NO: 19913 - DNA, 21 bp, Artificial Sequence
  Synthetic
gaaatagaccaaaagctgggt

SEQ ID NO: 19914 - DNA, 21 bp, Artificial Sequence
  Synthetic
tagaaggattcatgaaccagc

SEQ ID NO: 19915 - DNA, 21 bp, Artificial Sequence
  Synthetic
agaaggattcatgaaccagcg

SEQ ID NO: 19916 - DNA, 21 bp, Artificial Sequence
  Synthetic
attcatgaaccagcgtggagc

SEQ ID NO: 19917 - DNA, 21 bp, Artificial Sequence
  Synthetic
accctggctccacgctggttc

SEQ ID NO: 19918 - DNA, 21 bp, Artificial Sequence
  Synthetic
cataggaaatgatgaggatgg

SEQ ID NO: 19919 - DNA, 21 bp, Artificial Sequence
  Synthetic
ctcataggaaatgatgaggat

SEQ ID NO: 19920 - DNA, 21 bp, Artificial Sequence
  Synthetic
ctcccatcctcatcatttcct

SEQ ID NO: 19921 - DNA, 21 bp, Artificial Sequence
  Synthetic
tctcataggaaatgatgagga

SEQ ID NO: 19922 - DNA, 21 bp, Artificial Sequence
  Synthetic
gtctcataggaaatgatgagg

SEQ ID NO: 19923 - DNA, 21 bp, Artificial Sequence
  Synthetic
gaaggtctcataggaaatgat

SEQ ID NO: 19924 - DNA, 21 bp, Artificial Sequence
  Synthetic
cggaaggtctcataggaaatg

SEQ ID NO: 19925 - DNA, 21 bp, Artificial Sequence
  Synthetic
catgaaggcggaaggtctcat

SEQ ID NO: 19926 - DNA, 21 bp, Artificial Sequence
  Synthetic
acatgaaggcggaaggtctca

SEQ ID NO: 19927 - DNA, 21 bp, Artificial Sequence
  Synthetic
atgagaccttccgccttcatg

SEQ ID NO: 19928 - DNA, 21 bp, Artificial Sequence
  Synthetic
tgagaccttccgccttcatgt

SEQ ID NO: 19929 - DNA, 21 bp, Artificial Sequence
  Synthetic
tggaggactccaacatgaagg

SEQ ID NO: 19930 - DNA, 21 bp, Artificial Sequence
  Synthetic
ctggaggactccaacatgaag

SEQ ID NO: 19931 - DNA, 21 bp, Artificial Sequence
  Synthetic
cgccttcatgttggagtcctc

SEQ ID NO: 19932 - DNA, 21 bp, Artificial Sequence
  Synthetic
tcctttctggaggactccaac

SEQ ID NO: 19933 - DNA, 21 bp, Artificial Sequence
  Synthetic
ttcatgttggagtcctccaga

SEQ ID NO: 19934 - DNA, 21 bp, Artificial Sequence
  Synthetic
tcatgttggagtcctccagaa

SEQ ID NO: 19935 - DNA, 21 bp, Artificial Sequence
  Synthetic
cagaccaacacttcctttctg

SEQ ID NO: 19936 - DNA, 21 bp, Artificial Sequence
  Synthetic
accagaccaacacttcctttc

SEQ ID NO: 19937 - DNA, 21 bp, Artificial Sequence
  Synthetic
gaccagaccaacacttccttt

SEQ ID NO: 19938 - DNA, 21 bp, Artificial Sequence
  Synthetic
gtgttggtctggtcatatgtg

SEQ ID NO: 19939 - DNA, 21 bp, Artificial Sequence
  Synthetic
ctcttgcagggacacaggctc

SEQ ID NO: 19940 - DNA, 21 bp, Artificial Sequence
  Synthetic
agggacacaggctcaagaact

SEQ ID NO: 19941 - DNA, 21 bp, Artificial Sequence
  Synthetic
ggacacaggctcaagaactct

SEQ ID NO: 19942 - DNA, 21 bp, Artificial Sequence
  Synthetic
taagtctgattctcagagttc

SEQ ID NO: 19943 - DNA, 21 bp, Artificial Sequence
  Synthetic
gggcttggtaagtctgattct

SEQ ID NO: 19944 - DNA, 21 bp, Artificial Sequence
  Synthetic
gagaatcagacttaccaagcc

SEQ ID NO: 19945 - DNA, 21 bp, Artificial Sequence
  Synthetic
acttaccaagccctggacagc

SEQ ID NO: 19946 - DNA, 21 bp, Artificial Sequence
  Synthetic
ccggctggtgttcaagctgtc

SEQ ID NO: 19947 - DNA, 21 bp, Artificial Sequence
  Synthetic
ggacagcttgaacaccagccg

SEQ ID NO: 19948 - DNA, 21 bp, Artificial Sequence
  Synthetic
ccagccggcgggtgctcatct

SEQ ID NO: 19949 - DNA, 21 bp, Artificial Sequence
  Synthetic
cagccggcgggtgctcatctc

SEQ ID NO: 19950 - DNA, 21 bp, Artificial Sequence
  Synthetic
ttctggatgggagttccggag

SEQ ID NO: 19951 - DNA, 21 bp, Artificial Sequence
  Synthetic
ctcatctccggaactcccatc

SEQ ID NO: 19952 - DNA, 21 bp, Artificial Sequence
  Synthetic
gatcattctggatgggagttc

SEQ ID NO: 19953 - DNA, 21 bp, Artificial Sequence
  Synthetic
agatcattctggatgggagtt

SEQ ID NO: 19954 - DNA, 21 bp, Artificial Sequence
  Synthetic
ctcaagcagatcattctggat

SEQ ID NO: 19955 - DNA, 21 bp, Artificial Sequence
  Synthetic
ctcccatccagaatgatctgc

SEQ ID NO: 19956 - DNA, 21 bp, Artificial Sequence
  Synthetic
actcaagcagatcattctgga

SEQ ID NO: 19957 - DNA, 21 bp, Artificial Sequence
  Synthetic
tactcaagcagatcattctgg

SEQ ID NO: 19958 - DNA, 21 bp, Artificial Sequence
  Synthetic
gaaatactcaagcagatcatt

SEQ ID NO: 19959 - DNA, 21 bp, Artificial Sequence
  Synthetic
gaattaacaaaatgtaccaag

SEQ ID NO: 19960 - DNA, 21 bp, Artificial Sequence
  Synthetic
gttaattccggcatcctaggt

SEQ ID NO: 19961 - DNA, 21 bp, Artificial Sequence
  Synthetic
ctagattcttacctaggatgc

SEQ ID NO: 19962 - DNA, 21 bp, Artificial Sequence
  Synthetic
gctagattcttacctaggatg

SEQ ID NO: 19963 - DNA, 21 bp, Artificial Sequence
  Synthetic
tcctgtgtttagggactgccc

SEQ ID NO: 19964 - DNA, 21 bp, Artificial Sequence
  Synthetic
ttagggactgcccatgaattc

SEQ ID NO: 19965 - DNA, 21 bp, Artificial Sequence
  Synthetic
ttcaaaatgcttcttgaattc

SEQ ID NO: 19966 - DNA, 21 bp, Artificial Sequence
  Synthetic
cccatgaattcaagaagcatt

SEQ ID NO: 19967 - DNA, 21 bp, Artificial Sequence
  Synthetic
attggcaattcaaaatgcttc

SEQ ID NO: 19968 - DNA, 21 bp, Artificial Sequence
  Synthetic
agggtcgagacgctgctgcta

SEQ ID NO: 19969 - DNA, 21 bp, Artificial Sequence
  Synthetic
ctagtgaggcagacaggcagc

SEQ ID NO: 19970 - DNA, 21 bp, Artificial Sequence
  Synthetic
tagtgaggcagacaggcagct

SEQ ID NO: 19971 - DNA, 21 bp, Artificial Sequence
  Synthetic
gtgaggcagacaggcagctag

SEQ ID NO: 19972 - DNA, 21 bp, Artificial Sequence
  Synthetic
gaggcagacaggcagctagga

SEQ ID NO: 19973 - DNA, 21 bp, Artificial Sequence
  Synthetic
aggcagacaggcagctaggag

SEQ ID NO: 19974 - DNA, 21 bp, Artificial Sequence
  Synthetic
gcagctaggagaggagcggct

SEQ ID NO: 19975 - DNA, 21 bp, Artificial Sequence
  Synthetic
cagctaggagaggagcggctg

SEQ ID NO: 19976 - DNA, 21 bp, Artificial Sequence
  Synthetic
agctaggagaggagcggctgc

SEQ ID NO: 19977 - DNA, 21 bp, Artificial Sequence
  Synthetic
ctgcgggagctcaccagcatt

SEQ ID NO: 19978 - DNA, 21 bp, Artificial Sequence
  Synthetic
cattacctattcacaatgctg

SEQ ID NO: 19979 - DNA, 21 bp, Artificial Sequence
  Synthetic
tttctctagatgcctgatacg

SEQ ID NO: 19980 - DNA, 21 bp, Artificial Sequence
  Synthetic
aagtcctccgtatcaggcatc

SEQ ID NO: 19981 - DNA, 21 bp, Artificial Sequence
  Synthetic
gcagatatttagaaaggatat

SEQ ID NO: 19982 - DNA, 21 bp, Artificial Sequence
  Synthetic
atcctttctaaatatctgcct

SEQ ID NO: 19983 - DNA, 21 bp, Artificial Sequence
  Synthetic
cttcacaggcagatatttaga

SEQ ID NO: 19984 - DNA, 21 bp, Artificial Sequence
  Synthetic
caatcttcacaggcagatatt

SEQ ID NO: 19985 - DNA, 21 bp, Artificial Sequence
  Synthetic
ctaaatatctgcctgtgaaga

SEQ ID NO: 19986 - DNA, 21 bp, Artificial Sequence
  Synthetic
ttaggctgacaccccttcaga

SEQ ID NO: 19987 - DNA, 21 bp, Artificial Sequence
  Synthetic
ctcttgtataactcagtctga

SEQ ID NO: 19988 - DNA, 21 bp, Artificial Sequence
  Synthetic
ccccttcagactgagttatac

SEQ ID NO: 19989 - DNA, 21 bp, Artificial Sequence
  Synthetic
cctcttgtataactcagtctg

SEQ ID NO: 19990 - DNA, 21 bp, Artificial Sequence
  Synthetic
aaacctcttgtataactcagt

SEQ ID NO: 19991 - DNA, 21 bp, Artificial Sequence
  Synthetic
actgagttatacaagaggttt

SEQ ID NO: 19992 - DNA, 21 bp, Artificial Sequence
  Synthetic
ttctgccggtttggcttgtct

SEQ ID NO: 19993 - DNA, 21 bp, Artificial Sequence
  Synthetic
ttctgagacaagccaaaccgg

SEQ ID NO: 19994 - DNA, 21 bp, Artificial Sequence
  Synthetic
tgagacaagccaaaccggcag

SEQ ID NO: 19995 - DNA, 21 bp, Artificial Sequence
  Synthetic
ccaaaccggcagaagaattgc

SEQ ID NO: 19996 - DNA, 21 bp, Artificial Sequence
  Synthetic
aaaccggcagaagaattgctt

SEQ ID NO: 19997 - DNA, 21 bp, Artificial Sequence
  Synthetic
gaagaattgcttgagggcaag

SEQ ID NO: 19998 - DNA, 21 bp, Artificial Sequence
  Synthetic
ttagcgaggtgatggaagaaa

SEQ ID NO: 19999 - DNA, 21 bp, Artificial Sequence
  Synthetic
tttagcgaggtgatggaagaa

SEQ ID NO: 20000 - DNA, 21 bp, Artificial Sequence
  Synthetic
ctttagcgaggtgatggaaga

SEQ ID NO: 20001 - DNA, 21 bp, Artificial Sequence
  Synthetic
ctttcttccatcacctcgcta

SEQ ID NO: 20002 - DNA, 21 bp, Artificial Sequence
  Synthetic
gcttctttagcgaggtgatgg

SEQ ID NO: 20003 - DNA, 21 bp, Artificial Sequence
  Synthetic
aaagcttctttagcgaggtga

SEQ ID NO: 20004 - DNA, 21 bp, Artificial Sequence
  Synthetic
caaagcttctttagcgaggtg

SEQ ID NO: 20005 - DNA, 21 bp, Artificial Sequence
  Synthetic
cacgattacaaagcttcttta

SEQ ID NO: 20006 - DNA, 21 bp, Artificial Sequence
  Synthetic
cgctaaagaagctttgtaatc

SEQ ID NO: 20007 - DNA, 21 bp, Artificial Sequence
  Synthetic
tcatagattagagctggatct

SEQ ID NO: 20008 - DNA, 21 bp, Artificial Sequence
  Synthetic
atcatagattagagctggatc

SEQ ID NO: 20009 - DNA, 21 bp, Artificial Sequence
  Synthetic
tatcatagattagagctggat

SEQ ID NO: 20010 - DNA, 21 bp, Artificial Sequence
  Synthetic
cacacttatcatagattagag

SEQ ID NO: 20011 - DNA, 21 bp, Artificial Sequence
  Synthetic
ttccacacacttatcatagat

SEQ ID NO: 20012 - DNA, 21 bp, Artificial Sequence
  Synthetic
ccctgtgttgagaccctacca

SEQ ID NO: 20013 - DNA, 21 bp, Artificial Sequence
  Synthetic
ctgtgttgagaccctaccaaa

SEQ ID NO: 20014 - DNA, 21 bp, Artificial Sequence
  Synthetic
caattgacagcctctctttgg

SEQ ID NO: 20015 - DNA, 21 bp, Artificial Sequence
  Synthetic
ctaccaaagagaggctgtcaa

SEQ ID NO: 20016 - DNA, 21 bp, Artificial Sequence
  Synthetic
ctgtcaattggatgctacaac

SEQ ID NO: 20017 - DNA, 21 bp, Artificial Sequence
  Synthetic
gatgctacaacaagagtgttt

SEQ ID NO: 20018 - DNA, 21 bp, Artificial Sequence
  Synthetic
ttaccagtagcaggactgctt

SEQ ID NO: 20019 - DNA, 21 bp, Artificial Sequence
  Synthetic
agaagcagtcctgctactggt

SEQ ID NO: 20020 - DNA, 21 bp, Artificial Sequence
  Synthetic
acatcttattcttaccagtag

SEQ ID NO: 20021 - DNA, 21 bp, Artificial Sequence
  Synthetic
aagtgccctgcacttcttatg

SEQ ID NO: 20022 - DNA, 21 bp, Artificial Sequence
  Synthetic
gtgccctgcacttcttatggc

SEQ ID NO: 20023 - DNA, 21 bp, Artificial Sequence
  Synthetic
aatctctcgccataagaagtg

SEQ ID NO: 20024 - DNA, 21 bp, Artificial Sequence
  Synthetic
gatgtaacaatctctcgccat

SEQ ID NO: 20025 - DNA, 21 bp, Artificial Sequence
  Synthetic
tatggcgagagattgttacat

SEQ ID NO: 20026 - DNA, 21 bp, Artificial Sequence
  Synthetic
tggcgagagattgttacatct

SEQ ID NO: 20027 - DNA, 21 bp, Artificial Sequence
  Synthetic
gagattgttacatctgagggt

SEQ ID NO: 20028 - DNA, 21 bp, Artificial Sequence
  Synthetic
cagcctgtatatggattatag

SEQ ID NO: 20029 - DNA, 21 bp, Artificial Sequence
  Synthetic
tgggtactcacgaatgatgct

SEQ ID NO: 20030 - DNA, 21 bp, Artificial Sequence
  Synthetic
tttgggtactcacgaatgatg

SEQ ID NO: 20031 - DNA, 21 bp, Artificial Sequence
  Synthetic
tcattcgtgagtacccaaatt

SEQ ID NO: 20032 - DNA, 21 bp, Artificial Sequence
  Synthetic
cggcccagaatttgggtactc

SEQ ID NO: 20033 - DNA, 21 bp, Artificial Sequence
  Synthetic
caagcaactgcggcccagaat

SEQ ID NO: 20034 - DNA, 21 bp, Artificial Sequence
  Synthetic
attctgggccgcagttgcttg

SEQ ID NO: 20035 - DNA, 21 bp, Artificial Sequence
  Synthetic
ttccaccaagcaactgcggcc

SEQ ID NO: 20036 - DNA, 21 bp, Artificial Sequence
  Synthetic
ttctgggccgcagttgcttgg

SEQ ID NO: 20037 - DNA, 21 bp, Artificial Sequence
  Synthetic
tttagcagatgagatgggtct

SEQ ID NO: 20038 - DNA, 21 bp, Artificial Sequence
  Synthetic
gagatgggtcttggaaagaca

SEQ ID NO: 20039 - DNA, 21 bp, Artificial Sequence
  Synthetic
agatgggtcttggaaagacag

SEQ ID NO: 20040 - DNA, 21 bp, Artificial Sequence
  Synthetic
ttgtcgagtatgtgtcagaat

SEQ ID NO: 20041 - DNA, 21 bp, Artificial Sequence
  Synthetic
gacatcttgtcgagtatgtgt

SEQ ID NO: 20042 - DNA, 21 bp, Artificial Sequence
  Synthetic
agcatcttgcttgacatcttg

SEQ ID NO: 20043 - DNA, 21 bp, Artificial Sequence
  Synthetic
agcaagatgctctcactcttc

SEQ ID NO: 20044 - DNA, 21 bp, Artificial Sequence
  Synthetic
atgctctcactcttcccgagg

SEQ ID NO: 20045 - DNA, 21 bp, Artificial Sequence
  Synthetic
tgctctcactcttcccgaggt

SEQ ID NO: 20046 - DNA, 21 bp, Artificial Sequence
  Synthetic
ccctcctacctcgggaagagt

SEQ ID NO: 20047 - DNA, 21 bp, Artificial Sequence
  Synthetic
taccctcctacctcgggaaga

SEQ ID NO: 20048 - DNA, 21 bp, Artificial Sequence
  Synthetic
actataccctcctacctcggg

SEQ ID NO: 20049 - DNA, 21 bp, Artificial Sequence
  Synthetic
cctactataccctcctacctc

SEQ ID NO: 20050 - DNA, 21 bp, Artificial Sequence
  Synthetic
tgtttgtatcagggaaaagtg

SEQ ID NO: 20051 - DNA, 21 bp, Artificial Sequence
  Synthetic
ttggaggaaaactgaaaaaga

SEQ ID NO: 20052 - DNA, 21 bp, Artificial Sequence
  Synthetic
aaactgaaaaagacagaaatc

SEQ ID NO: 20053 - DNA, 21 bp, Artificial Sequence
  Synthetic
aaaagacagaaatccagaata

SEQ ID NO: 20054 - DNA, 21 bp, Artificial Sequence
  Synthetic
cagaaatccagaatatcgaat

SEQ ID NO: 20055 - DNA, 21 bp, Artificial Sequence
  Synthetic
agaatatcgaatttgaaccaa

SEQ ID NO: 20056 - DNA, 21 bp, Artificial Sequence
  Synthetic
gatgtcttacttacgagggca

SEQ ID NO: 20057 - DNA, 21 bp, Artificial Sequence
  Synthetic
cgtgtgatgatactgacagct

SEQ ID NO: 20058 - DNA, 21 bp, Artificial Sequence
  Synthetic
tgatgatactgacagctgtga

SEQ ID NO: 20059 - DNA, 21 bp, Artificial Sequence
  Synthetic
atactgacagctgtgaaagaa

SEQ ID NO: 20060 - DNA, 21 bp, Artificial Sequence
  Synthetic
tgacagctgtgaaagaaatga

SEQ ID NO: 20061 - DNA, 21 bp, Artificial Sequence
  Synthetic
gacagctgtgaaagaaatgaa

SEQ ID NO: 20062 - DNA, 21 bp, Artificial Sequence
  Synthetic
tgaaagaaatgaatggaaaaa

SEQ ID NO: 20063 - DNA, 21 bp, Artificial Sequence
  Synthetic
gaaagaaatgaatggaaaaaa

SEQ ID NO: 20064 - DNA, 21 bp, Artificial Sequence
  Synthetic
acatacttatagatggaaagg

SEQ ID NO: 20065 - DNA, 21 bp, Artificial Sequence
  Synthetic
actgacatacttatagatgga

SEQ ID NO: 20066 - DNA, 21 bp, Artificial Sequence
  Synthetic
tagaactgacatacttataga

SEQ ID NO: 20067 - DNA, 21 bp, Artificial Sequence
  Synthetic
atagaactgacatacttatag

SEQ ID NO: 20068 - DNA, 21 bp, Artificial Sequence
  Synthetic
gttgaacatcgtatctatata

SEQ ID NO: 20069 - DNA, 21 bp, Artificial Sequence
  Synthetic
tatatatagatacgatgttca

SEQ ID NO: 20070 - DNA, 21 bp, Artificial Sequence
  Synthetic
atatatagatacgatgttcaa

SEQ ID NO: 20071 - DNA, 21 bp, Artificial Sequence
  Synthetic
tagatacgatgttcaacggaa

SEQ ID NO: 20072 - DNA, 21 bp, Artificial Sequence
  Synthetic
agatacgatgttcaacggaac

SEQ ID NO: 20073 - DNA, 21 bp, Artificial Sequence
  Synthetic
gttcaacggaacaggagtctt

SEQ ID NO: 20074 - DNA, 21 bp, Artificial Sequence
  Synthetic
tttcaaaagactcctgttccg

SEQ ID NO: 20075 - DNA, 21 bp, Artificial Sequence
  Synthetic
ggatgctgaaatgtttaattt

SEQ ID NO: 20076 - DNA, 21 bp, Artificial Sequence
  Synthetic
ccatggcctttgatctgtttc

SEQ ID NO: 20077 - DNA, 21 bp, Artificial Sequence
  Synthetic
tctttcccaatgtaaaagtcc

SEQ ID NO: 20078 - DNA, 21 bp, Artificial Sequence
  Synthetic
tttacattgggaaagaattac

SEQ ID NO: 20079 - DNA, 21 bp, Artificial Sequence
  Synthetic
ttacattgggaaagaattaca

SEQ ID NO: 20080 - DNA, 21 bp, Artificial Sequence
  Synthetic
cattgggaaagaattacaagg

SEQ ID NO: 20081 - DNA, 21 bp, Artificial Sequence
  Synthetic
ttgggaaagaattacaaggaa

SEQ ID NO: 20082 - DNA, 21 bp, Artificial Sequence
  Synthetic
tccttggactccctactgcct

SEQ ID NO: 20083 - DNA, 21 bp, Artificial Sequence
  Synthetic
ttcataggcagtagggagtcc

SEQ ID NO: 20084 - DNA, 21 bp, Artificial Sequence
  Synthetic
tcataggcagtagggagtcca

SEQ ID NO: 20085 - DNA, 21 bp, Artificial Sequence
  Synthetic
gtagggagtccaaggaaaatt

SEQ ID NO: 20086 - DNA, 21 bp, Artificial Sequence
  Synthetic
ggagtccaaggaaaattcaga

SEQ ID NO: 20087 - DNA, 21 bp, Artificial Sequence
  Synthetic
aaggaaaattcagaaagaaac

SEQ ID NO: 20088 - DNA, 21 bp, Artificial Sequence
  Synthetic
ttcagaaagaaactagaaaat

SEQ ID NO: 20089 - DNA, 21 bp, Artificial Sequence
  Synthetic
tcagaaagaaactagaaaatc

SEQ ID NO: 20090 - DNA, 21 bp, Artificial Sequence
  Synthetic
cagaaagaaactagaaaatca

SEQ ID NO: 20091 - DNA, 21 bp, Artificial Sequence
  Synthetic
gaaactagaaaatcagggaac

SEQ ID NO: 20092 - DNA, 21 bp, Artificial Sequence
  Synthetic
cagggaacaaggacacagatt

SEQ ID NO: 20093 - DNA, 21 bp, Artificial Sequence
  Synthetic
aggtgtctgatggcaagtatt

SEQ ID NO: 20094 - DNA, 21 bp, Artificial Sequence
  Synthetic
agtaaggatcatcatcatcat

SEQ ID NO: 20095 - DNA, 21 bp, Artificial Sequence
  Synthetic
tggacttataataataatagt

SEQ ID NO: 20096 - DNA, 21 bp, Artificial Sequence
  Synthetic
ttactattattattataagtc

SEQ ID NO: 20097 - DNA, 21 bp, Artificial Sequence
  Synthetic
tactattattattataagtcc

SEQ ID NO: 20098 - DNA, 21 bp, Artificial Sequence
  Synthetic
ctattattattataagtccag

SEQ ID NO: 20099 - DNA, 21 bp, Artificial Sequence
  Synthetic
ctcaatttactgcgatttctc

SEQ ID NO: 20100 - DNA, 21 bp, Artificial Sequence
  Synthetic
tccaggagaaatcgcagtaaa

SEQ ID NO: 20101 - DNA, 21 bp, Artificial Sequence
  Synthetic
caggagaaatcgcagtaaatt

SEQ ID NO: 20102 - DNA, 21 bp, Artificial Sequence
  Synthetic
aggagaaatcgcagtaaattg

SEQ ID NO: 20103 - DNA, 21 bp, Artificial Sequence
  Synthetic
agcttgttccatccacaaaaa

SEQ ID NO: 20104 - DNA, 21 bp, Artificial Sequence
  Synthetic
gcttgttccatccacaaaaaa

SEQ ID NO: 20105 - DNA, 21 bp, Artificial Sequence
  Synthetic
ctggacagtgaccttgtgaat

SEQ ID NO: 20106 - DNA, 21 bp, Artificial Sequence
  Synthetic
gctggacagtgaccttgtgaa

SEQ ID NO: 20107 - DNA, 21 bp, Artificial Sequence
  Synthetic
tagtagctggacagtgacctt

SEQ ID NO: 20108 - DNA, 21 bp, Artificial Sequence
  Synthetic
actgtccagctactagcgact

SEQ ID NO: 20109 - DNA, 21 bp, Artificial Sequence
  Synthetic
ctgtccagctactagcgactc

SEQ ID NO: 20110 - DNA, 21 bp, Artificial Sequence
  Synthetic
ttattccagagtcgctagtag

SEQ ID NO: 20111 - DNA, 21 bp, Artificial Sequence
  Synthetic
acatagcaacatcagttattc

SEQ ID NO: 20112 - DNA, 21 bp, Artificial Sequence
  Synthetic
tgtctaaaagtacatgtatct

SEQ ID NO: 20113 - DNA, 21 bp, Artificial Sequence
  Synthetic
catgtatctctgaattcaacc

SEQ ID NO: 20114 - DNA, 21 bp, Artificial Sequence
  Synthetic
tctctgaattcaaccaagaac

SEQ ID NO: 20115 - DNA, 21 bp, Artificial Sequence
  Synthetic
tttcatgttcttggttgaatt

SEQ ID NO: 20116 - DNA, 21 bp, Artificial Sequence
  Synthetic
aattcaaccaagaacatgaaa

SEQ ID NO: 20117 - DNA, 21 bp, Artificial Sequence
  Synthetic
tcctctgtttcatgttcttgg

SEQ ID NO: 20118 - DNA, 21 bp, Artificial Sequence
  Synthetic
ttcaaccaagaacatgaaaca

SEQ ID NO: 20119 - DNA, 21 bp, Artificial Sequence
  Synthetic
aacatgaaacagaggactgtg

SEQ ID NO: 20120 - DNA, 21 bp, Artificial Sequence
  Synthetic
tacatcactatcagcatgatt

SEQ ID NO: 20121 - DNA, 21 bp, Artificial Sequence
  Synthetic
gatgtaccaccttctaatacc

SEQ ID NO: 20122 - DNA, 21 bp, Artificial Sequence
  Synthetic
tgttaaagggactcatggtat

SEQ ID NO: 20123 - DNA, 21 bp, Artificial Sequence
  Synthetic
agcggtaatcagaggtgttaa

SEQ ID NO: 20124 - DNA, 21 bp, Artificial Sequence
  Synthetic
aagcggtaatcagaggtgtta

SEQ ID NO: 20125 - DNA, 21 bp, Artificial Sequence
  Synthetic
ttaacacctctgattaccgct

SEQ ID NO: 20126 - DNA, 21 bp, Artificial Sequence
  Synthetic
atatacactcaaagcggtaat

SEQ ID NO: 20127 - DNA, 21 bp, Artificial Sequence
  Synthetic
accgctttgagtgtatatgtg

SEQ ID NO: 20128 - DNA, 21 bp, Artificial Sequence
  Synthetic
cgtaagcctcgtgttcaatgc

SEQ ID NO: 20129 - DNA, 21 bp, Artificial Sequence
  Synthetic
gtgacacttcaggcattgaac

SEQ ID NO: 20130 - DNA, 21 bp, Artificial Sequence
  Synthetic
ccacaggtgacacttcaggca

SEQ ID NO: 20131 - DNA, 21 bp, Artificial Sequence
  Synthetic
ctgtggcaacatgcaaagtgt

SEQ ID NO: 20132 - DNA, 21 bp, Artificial Sequence
  Synthetic
atgcaaagtgtgtgaattatg

SEQ ID NO: 20133 - DNA, 21 bp, Artificial Sequence
  Synthetic
gcaaagtgtgtgaattatgat

SEQ ID NO: 20134 - DNA, 21 bp, Artificial Sequence
  Synthetic
gtgaattatgatgagaaaaat

SEQ ID NO: 20135 - DNA, 21 bp, Artificial Sequence
  Synthetic
tgcccccactgccttgttgca

SEQ ID NO: 20136 - DNA, 21 bp, Artificial Sequence
  Synthetic
gcccccactgccttgttgcaa

SEQ ID NO: 20137 - DNA, 21 bp, Artificial Sequence
  Synthetic
gttccattgcaacaaggcagt

SEQ ID NO: 20138 - DNA, 21 bp, Artificial Sequence
  Synthetic
ggttccattgcaacaaggcag

SEQ ID NO: 20139 - DNA, 21 bp, Artificial Sequence
  Synthetic
tggttccattgcaacaaggca

SEQ ID NO: 20140 - DNA, 21 bp, Artificial Sequence
  Synthetic
tgcaatggaaccagtgtcaac

SEQ ID NO: 20141 - DNA, 21 bp, Artificial Sequence
  Synthetic
gatggaacttggagagatgat

SEQ ID NO: 20142 - DNA, 21 bp, Artificial Sequence
  Synthetic
actggtgacagatggaacttg

SEQ ID NO: 20143 - DNA, 21 bp, Artificial Sequence
  Synthetic
ccactggtgacagatggaact

SEQ ID NO: 20144 - DNA, 21 bp, Artificial Sequence
  Synthetic
cccactggtgacagatggaac

SEQ ID NO: 20145 - DNA, 21 bp, Artificial Sequence
  Synthetic
tccaagttccatctgtcacca

SEQ ID NO: 20146 - DNA, 21 bp, Artificial Sequence
  Synthetic
agttccatctgtcaccagtgg

SEQ ID NO: 20147 - DNA, 21 bp, Artificial Sequence
  Synthetic
catccacccactggtgacaga

SEQ ID NO: 20148 - DNA, 21 bp, Artificial Sequence
  Synthetic
tcatccacccactggtgacag

SEQ ID NO: 20149 - DNA, 21 bp, Artificial Sequence
  Synthetic
ccatctgtcaccagtgggtgg

SEQ ID NO: 20150 - DNA, 21 bp, Artificial Sequence
  Synthetic
gtggatgagatcaacaggcat

SEQ ID NO: 20151 - DNA, 21 bp, Artificial Sequence
  Synthetic
gcatgtgaggtcgtcatctct

SEQ ID NO: 20152 - DNA, 21 bp, Artificial Sequence
  Synthetic
aagtggccttaccaagactcg

SEQ ID NO: 20153 - DNA, 21 bp, Artificial Sequence
  Synthetic
tccaagtggccttaccaagac

SEQ ID NO: 20154 - DNA, 21 bp, Artificial Sequence
  Synthetic
tgattatttcctaggtatatc

SEQ ID NO: 20155 - DNA, 21 bp, Artificial Sequence
  Synthetic
gattatttcctaggtatatca

SEQ ID NO: 20156 - DNA, 21 bp, Artificial Sequence
  Synthetic
atttcctaggtatatcaagga

SEQ ID NO: 20157 - DNA, 21 bp, Artificial Sequence
  Synthetic
tcttcactccttgatatacct

SEQ ID NO: 20158 - DNA, 21 bp, Artificial Sequence
  Synthetic
ttcttcactccttgatatacc

SEQ ID NO: 20159 - DNA, 21 bp, Artificial Sequence
  Synthetic
tcctaggtatatcaaggagtg

SEQ ID NO: 20160 - DNA, 21 bp, Artificial Sequence
  Synthetic
tatatcctgttctgccaaaaa

SEQ ID NO: 20161 - DNA, 21 bp, Artificial Sequence
  Synthetic
ttacctatgatgtactgcgtt

SEQ ID NO: 20162 - DNA, 21 bp, Artificial Sequence
  Synthetic
ggatatcgacataatttaatt

SEQ ID NO: 20163 - DNA, 21 bp, Artificial Sequence
  Synthetic
tcgatatcccacatagcaata

SEQ ID NO: 20164 - DNA, 21 bp, Artificial Sequence
  Synthetic
gatatcccacatagcaatagt

SEQ ID NO: 20165 - DNA, 21 bp, Artificial Sequence
  Synthetic
cccatcctcactattgctatg

SEQ ID NO: 20166 - DNA, 21 bp, Artificial Sequence
  Synthetic
tcccacatagcaatagtgagg

SEQ ID NO: 20167 - DNA, 21 bp, Artificial Sequence
  Synthetic
gcccatcctcactattgctat

SEQ ID NO: 20168 - DNA, 21 bp, Artificial Sequence
  Synthetic
tagtgaggatgggcgtcgcct

SEQ ID NO: 20169 - DNA, 21 bp, Artificial Sequence
  Synthetic
agtgaggatgggcgtcgccta

SEQ ID NO: 20170 - DNA, 21 bp, Artificial Sequence
  Synthetic
gatgggcgtcgcctacggaac

SEQ ID NO: 20171 - DNA, 21 bp, Artificial Sequence
  Synthetic
cagaagcgctatatggctatc

SEQ ID NO: 20172 - DNA, 21 bp, Artificial Sequence
  Synthetic
atcccgagccccctggtagct

SEQ ID NO: 20173 - DNA, 21 bp, Artificial Sequence
  Synthetic
ctccacagctaccagggggct

SEQ ID NO: 20174 - DNA, 21 bp, Artificial Sequence
  Synthetic
tcccgagccccctggtagctg

SEQ ID NO: 20175 - DNA, 21 bp, Artificial Sequence
  Synthetic
actccacagctaccagggggc

SEQ ID NO: 20176 - DNA, 21 bp, Artificial Sequence
  Synthetic
tccaccactccacagctacca

SEQ ID NO: 20177 - DNA, 21 bp, Artificial Sequence
  Synthetic
ccccctggtagctgtggagtg

SEQ ID NO: 20178 - DNA, 21 bp, Artificial Sequence
  Synthetic
ctccaccactccacagctacc

SEQ ID NO: 20179 - DNA, 21 bp, Artificial Sequence
  Synthetic
cccctggtagctgtggagtgg

SEQ ID NO: 20180 - DNA, 21 bp, Artificial Sequence
  Synthetic
cctccaccactccacagctac

SEQ ID NO: 20181 - DNA, 21 bp, Artificial Sequence
  Synthetic
cctggtagctgtggagtggtg

SEQ ID NO: 20182 - DNA, 21 bp, Artificial Sequence
  Synthetic
agtggtggaggatctgccttg

SEQ ID NO: 20183 - DNA, 21 bp, Artificial Sequence
  Synthetic
gccttgatgaagctcagatgg

SEQ ID NO: 20184 - DNA, 21 bp, Artificial Sequence
  Synthetic
tactgtgggacactcaaccat

SEQ ID NO: 20185 - DNA, 21 bp, Artificial Sequence
  Synthetic
gttgagtgtcccacagtaaaa

SEQ ID NO: 20186 - DNA, 21 bp, Artificial Sequence
  Synthetic
tgagtgtcccacagtaaaagt

SEQ ID NO: 20187 - DNA, 21 bp, Artificial Sequence
  Synthetic
gctgcagaaatggcccagcgt

SEQ ID NO: 20188 - DNA, 21 bp, Artificial Sequence
  Synthetic
cagaaatggcccagcgtttga

SEQ ID NO: 20189 - DNA, 21 bp, Artificial Sequence
  Synthetic
agaaatggcccagcgtttgag

SEQ ID NO: 20190 - DNA, 21 bp, Artificial Sequence
  Synthetic
tcgattaatcccactcaaacg

SEQ ID NO: 20191 - DNA, 21 bp, Artificial Sequence
  Synthetic
tgtatcagtggcactccagta

SEQ ID NO: 20192 - DNA, 21 bp, Artificial Sequence
  Synthetic
tatcagtggcactccagtaca

SEQ ID NO: 20193 - DNA, 21 bp, Artificial Sequence
  Synthetic
tcagtggcactccagtacaga

SEQ ID NO: 20194 - DNA, 21 bp, Artificial Sequence
  Synthetic
gcactccagtacagagaggat

SEQ ID NO: 20195 - DNA, 21 bp, Artificial Sequence
  Synthetic
actccagtacagagaggatta

SEQ ID NO: 20196 - DNA, 21 bp, Artificial Sequence
  Synthetic
accctctaatcctctctgtac

SEQ ID NO: 20197 - DNA, 21 bp, Artificial Sequence
  Synthetic
taccctctaatcctctctgta

SEQ ID NO: 20198 - DNA, 21 bp, Artificial Sequence
  Synthetic
agaccactaacccaaaaagat

SEQ ID NO: 20199 - DNA, 21 bp, Artificial Sequence
  Synthetic
ggttagtggtctttcttggta

SEQ ID NO: 20200 - DNA, 21 bp, Artificial Sequence
  Synthetic
gacacagtaaggttcaatacc

SEQ ID NO: 20201 - DNA, 21 bp, Artificial Sequence
  Synthetic
accttactgtgtcaaacactg

SEQ ID NO: 20202 - DNA, 21 bp, Artificial Sequence
  Synthetic
gcagtaaggccgatagagaag

SEQ ID NO: 20203 - DNA, 21 bp, Artificial Sequence
  Synthetic
cttctctatcggccttactgc

SEQ ID NO: 20204 - DNA, 21 bp, Artificial Sequence
  Synthetic
cttcttgcagtaaggccgata

SEQ ID NO: 20205 - DNA, 21 bp, Artificial Sequence
  Synthetic
ttcttcttgcagtaaggccga

SEQ ID NO: 20206 - DNA, 21 bp, Artificial Sequence
  Synthetic
ctctatcggccttactgcaag

SEQ ID NO: 20207 - DNA, 21 bp, Artificial Sequence
  Synthetic
caataaagctgtagagatgct

SEQ ID NO: 20208 - DNA, 21 bp, Artificial Sequence
  Synthetic
ggcaataaagctgtagagatg

SEQ ID NO: 20209 - DNA, 21 bp, Artificial Sequence
  Synthetic
agtatcttggcaataaagctg

SEQ ID NO: 20210 - DNA, 21 bp, Artificial Sequence
  Synthetic
cagctttattgccaagatact

SEQ ID NO: 20211 - DNA, 21 bp, Artificial Sequence
  Synthetic
agctttattgccaagatactg

SEQ ID NO: 20212 - DNA, 21 bp, Artificial Sequence
  Synthetic
aagatactgtggaggtctgca

SEQ ID NO: 20213 - DNA, 21 bp, Artificial Sequence
  Synthetic
tttgtggtggtatttggatct

SEQ ID NO: 20214 - DNA, 21 bp, Artificial Sequence
  Synthetic
agatccaaataccaccacaaa

SEQ ID NO: 20215 - DNA, 21 bp, Artificial Sequence
  Synthetic
ttcttcggtttgtggtggtat

SEQ ID NO: 20216 - DNA, 21 bp, Artificial Sequence
  Synthetic
tccaaataccaccacaaaccg

SEQ ID NO: 20217 - DNA, 21 bp, Artificial Sequence
  Synthetic
tgcctttccactggagaaaag

SEQ ID NO: 20218 - DNA, 21 bp, Artificial Sequence
  Synthetic
atgcctttccactggagaaaa

SEQ ID NO: 20219 - DNA, 21 bp, Artificial Sequence
  Synthetic
gatagaaatgcctttccactg

SEQ ID NO: 20220 - DNA, 21 bp, Artificial Sequence
  Synthetic
gtgatagaaatgcctttccac

SEQ ID NO: 20221 - DNA, 21 bp, Artificial Sequence
  Synthetic
ggtgatagaaatgcctttcca

SEQ ID NO: 20222 - DNA, 21 bp, Artificial Sequence
  Synthetic
ggcatttctatcaccgtcagc

SEQ ID NO: 20223 - DNA, 21 bp, Artificial Sequence
  Synthetic
cacacctcatgctgacggtga

SEQ ID NO: 20224 - DNA, 21 bp, Artificial Sequence
  Synthetic
cgtcagcatgaggtgtgctgc

SEQ ID NO: 20225 - DNA, 21 bp, Artificial Sequence
  Synthetic
ccaggatgtggtggtaaaact

SEQ ID NO: 20226 - DNA, 21 bp, Artificial Sequence
  Synthetic
caggatgtggtggtaaaactc

SEQ ID NO: 20227 - DNA, 21 bp, Artificial Sequence
  Synthetic
aaaactcaggaagatttctga

SEQ ID NO: 20228 - DNA, 21 bp, Artificial Sequence
  Synthetic
agagcccagtcagaaatcttc

SEQ ID NO: 20229 - DNA, 21 bp, Artificial Sequence
  Synthetic
aggaagatttctgactgggct

SEQ ID NO: 20230 - DNA, 21 bp, Artificial Sequence
  Synthetic
tgctgagcttcagagcccagt

SEQ ID NO: 20231 - DNA, 21 bp, Artificial Sequence
  Synthetic
tctgtctaggctgctgagctt

SEQ ID NO: 20232 - DNA, 21 bp, Artificial Sequence
  Synthetic
tctgaagctcagcagcctaga

SEQ ID NO: 20233 - DNA, 21 bp, Artificial Sequence
  Synthetic
gaagctcagcagcctagacag

SEQ ID NO: 20234 - DNA, 21 bp, Artificial Sequence
  Synthetic
acagtccttctgtctaggctg

SEQ ID NO: 20235 - DNA, 21 bp, Artificial Sequence
  Synthetic
acctctatcctgtatccattg

SEQ ID NO: 20236 - DNA, 21 bp, Artificial Sequence
  Synthetic
gcctcagcaatggatacagga

SEQ ID NO: 20237 - DNA, 21 bp, Artificial Sequence
  Synthetic
tctgagcctcagcaatggata

SEQ ID NO: 20238 - DNA, 21 bp, Artificial Sequence
  Synthetic
aggcctgtctgagcctcagca

SEQ ID NO: 20239 - DNA, 21 bp, Artificial Sequence
  Synthetic
tgtgggtgacagcaggcctgt

SEQ ID NO: 20240 - DNA, 21 bp, Artificial Sequence
  Synthetic
gctgtcacccacaggctgttc

SEQ ID NO: 20241 - DNA, 21 bp, Artificial Sequence
  Synthetic
ctgtcacccacaggctgttcg

SEQ ID NO: 20242 - DNA, 21 bp, Artificial Sequence
  Synthetic
agaactctccacgaacagcct

SEQ ID NO: 20243 - DNA, 21 bp, Artificial Sequence
  Synthetic
taaactgagagattatcaggt

SEQ ID NO: 20244 - DNA, 21 bp, Artificial Sequence
  Synthetic
aactgagagattatcaggtcc

SEQ ID NO: 20245 - DNA, 21 bp, Artificial Sequence
  Synthetic
agaaatgagccagtttaatcc

SEQ ID NO: 20246 - DNA, 21 bp, Artificial Sequence
  Synthetic
taaactggctcatttctttgt

SEQ ID NO: 20247 - DNA, 21 bp, Artificial Sequence
  Synthetic
aactggctcatttctttgtat

SEQ ID NO: 20248 - DNA, 21 bp, Artificial Sequence
  Synthetic
atgccattctcatacaaagaa

SEQ ID NO: 20249 - DNA, 21 bp, Artificial Sequence
  Synthetic
cattgatgccattctcataca

SEQ ID NO: 20250 - DNA, 21 bp, Artificial Sequence
  Synthetic
gcatcaatggtatccttgcag

SEQ ID NO: 20251 - DNA, 21 bp, Artificial Sequence
  Synthetic
aacacataccatttcatctgc

SEQ ID NO: 20252 - DNA, 21 bp, Artificial Sequence
  Synthetic
ttgaagagtctttcctaggcc

SEQ ID NO: 20253 - DNA, 21 bp, Artificial Sequence
  Synthetic
cccaagaagagaaattgtttg

SEQ ID NO: 20254 - DNA, 21 bp, Artificial Sequence
  Synthetic
ctcttcaaacaatttctcttc

SEQ ID NO: 20255 - DNA, 21 bp, Artificial Sequence
  Synthetic
gtacccaagaagagaaattgt

SEQ ID NO: 20256 - DNA, 21 bp, Artificial Sequence
  Synthetic
acaatttctcttcttgggtac

SEQ ID NO: 20257 - DNA, 21 bp, Artificial Sequence
  Synthetic
aatgtttcatgtacccaagaa

SEQ ID NO: 20258 - DNA, 21 bp, Artificial Sequence
  Synthetic
ataatgtttcatgtacccaag

SEQ ID NO: 20259 - DNA, 21 bp, Artificial Sequence
  Synthetic
tctataatgtttcatgtaccc

SEQ ID NO: 20260 - DNA, 21 bp, Artificial Sequence
  Synthetic
tcttgggtacatgaaacatta

SEQ ID NO: 20261 - DNA, 21 bp, Artificial Sequence
  Synthetic
tgaaacattatagaaacattc

SEQ ID NO: 20262 - DNA, 21 bp, Artificial Sequence
  Synthetic
aaccaaaaccatatgaggccc

SEQ ID NO: 20263 - DNA, 21 bp, Artificial Sequence
  Synthetic
gaaccaaaaccatatgaggcc

SEQ ID NO: 20264 - DNA, 21 bp, Artificial Sequence
  Synthetic
agacttaggaaccaaaaccat

SEQ ID NO: 20265 - DNA, 21 bp, Artificial Sequence
  Synthetic
ccagttgtgtaatgtagactt

SEQ ID NO: 20266 - DNA, 21 bp, Artificial Sequence
  Synthetic
tccagttgtgtaatgtagact

SEQ ID NO: 20267 - DNA, 21 bp, Artificial Sequence
  Synthetic
tcctaagtctacattacacaa

SEQ ID NO: 20268 - DNA, 21 bp, Artificial Sequence
  Synthetic
aagtctacattacacaactgg

SEQ ID NO: 20269 - DNA, 21 bp, Artificial Sequence
  Synthetic
ctacattacacaactggatga

SEQ ID NO: 20270 - DNA, 21 bp, Artificial Sequence
  Synthetic
cacaactggatgagtgaattc

SEQ ID NO: 20271 - DNA, 21 bp, Artificial Sequence
  Synthetic
ctggatgagtgaattcaagag

SEQ ID NO: 20272 - DNA, 21 bp, Artificial Sequence
  Synthetic
ctaagtgttggtacccatctc

SEQ ID NO: 20273 - DNA, 21 bp, Artificial Sequence
  Synthetic
cacttagatctgtttgtttga

SEQ ID NO: 20274 - DNA, 21 bp, Artificial Sequence
  Synthetic
acttagatctgtttgtttgat

SEQ ID NO: 20275 - DNA, 21 bp, Artificial Sequence
  Synthetic
ctgtttgtttgataggagata

SEQ ID NO: 20276 - DNA, 21 bp, Artificial Sequence
  Synthetic
tttgataggagataaagaaca

SEQ ID NO: 20277 - DNA, 21 bp, Artificial Sequence
  Synthetic
gggatgtatgtgtaacatctt

SEQ ID NO: 20278 - DNA, 21 bp, Artificial Sequence
  Synthetic
catcttatgaaatgcttatta

SEQ ID NO: 20279 - DNA, 21 bp, Artificial Sequence
  Synthetic
tcttatgaaatgcttattaaa

SEQ ID NO: 20280 - DNA, 21 bp, Artificial Sequence
  Synthetic
gtctgtgttcaaaaaatttaa

SEQ ID NO: 20281 - DNA, 21 bp, Artificial Sequence
  Synthetic
tctgtgttcaaaaaatttaat

SEQ ID NO: 20282 - DNA, 21 bp, Artificial Sequence
  Synthetic
attggagatacttagtaatag

SEQ ID NO: 20283 - DNA, 21 bp, Artificial Sequence
  Synthetic
cttagtaatagatgaagctca

SEQ ID NO: 20284 - DNA, 21 bp, Artificial Sequence
  Synthetic
atgaagctcacaggatcaaaa

SEQ ID NO: 20285 - DNA, 21 bp, Artificial Sequence
  Synthetic
ttctttcagttgtcagaaata

SEQ ID NO: 20286 - DNA, 21 bp, Artificial Sequence
  Synthetic
ctttcagttgtcagaaatagt

SEQ ID NO: 20287 - DNA, 21 bp, Artificial Sequence
  Synthetic
tttcagttgtcagaaatagtg

SEQ ID NO: 20288 - DNA, 21 bp, Artificial Sequence
  Synthetic
ttccctcactatttctgacaa

SEQ ID NO: 20289 - DNA, 21 bp, Artificial Sequence
  Synthetic
ttcagttgtcagaaatagtga

SEQ ID NO: 20290 - DNA, 21 bp, Artificial Sequence
  Synthetic
aataatagtctatttgtagtc

SEQ ID NO: 20291 - DNA, 21 bp, Artificial Sequence
  Synthetic
ctacaaatagactattattaa

SEQ ID NO: 20292 - DNA, 21 bp, Artificial Sequence
  Synthetic
tacaaatagactattattaac

SEQ ID NO: 20293 - DNA, 21 bp, Artificial Sequence
  Synthetic
ttattaactggaacacctctt

SEQ ID NO: 20294 - DNA, 21 bp, Artificial Sequence
  Synthetic
cacctcttcagaacaacttgc

SEQ ID NO: 20295 - DNA, 21 bp, Artificial Sequence
  Synthetic
cagctcatgcaagttgttctg

SEQ ID NO: 20296 - DNA, 21 bp, Artificial Sequence
  Synthetic
ccacagctcatgcaagttgtt

SEQ ID NO: 20297 - DNA, 21 bp, Artificial Sequence
  Synthetic
cacatctggcaacagaaagtt

SEQ ID NO: 20298 - DNA, 21 bp, Artificial Sequence
  Synthetic
tgaattaaacacatctggcaa

SEQ ID NO: 20299 - DNA, 21 bp, Artificial Sequence
  Synthetic
accaggaaatacttacatctg

SEQ ID NO: 20300 - DNA, 21 bp, Artificial Sequence
  Synthetic
ggcagttgtttgtatcaaacc

SEQ ID NO: 20301 - DNA, 21 bp, Artificial Sequence
  Synthetic
aggcagttgtttgtatcaaac

SEQ ID NO: 20302 - DNA, 21 bp, Artificial Sequence
  Synthetic
ggtttgatacaaacaactgcc

SEQ ID NO: 20303 - DNA, 21 bp, Artificial Sequence
  Synthetic
gtttgatacaaacaactgcct

SEQ ID NO: 20304 - DNA, 21 bp, Artificial Sequence
  Synthetic
tttgatacaaacaactgcctt

SEQ ID NO: 20305 - DNA, 21 bp, Artificial Sequence
  Synthetic
gccttggggatcaaaaactag

SEQ ID NO: 20306 - DNA, 21 bp, Artificial Sequence
  Synthetic
cttggggatcaaaaactagtt

SEQ ID NO: 20307 - DNA, 21 bp, Artificial Sequence
  Synthetic
ctactccaaaatacttaccat

SEQ ID NO: 20308 - DNA, 21 bp, Artificial Sequence
  Synthetic
tttgcgtccattcctccttcg

SEQ ID NO: 20309 - DNA, 21 bp, Artificial Sequence
  Synthetic
ccttaattcgacgaaggagga

SEQ ID NO: 20310 - DNA, 21 bp, Artificial Sequence
  Synthetic
tcagccttaattcgacgaagg

SEQ ID NO: 20311 - DNA, 21 bp, Artificial Sequence
  Synthetic
atcagccttaattcgacgaag

SEQ ID NO: 20312 - DNA, 21 bp, Artificial Sequence
  Synthetic
acatcagccttaattcgacga

SEQ ID NO: 20313 - DNA, 21 bp, Artificial Sequence
  Synthetic
aacatcagccttaattcgacg

SEQ ID NO: 20314 - DNA, 21 bp, Artificial Sequence
  Synthetic
ttcaacatcagccttaattcg

SEQ ID NO: 20315 - DNA, 21 bp, Artificial Sequence
  Synthetic
ttcgtcgaattaaggctgatg

SEQ ID NO: 20316 - DNA, 21 bp, Artificial Sequence
  Synthetic
cgaattaaggctgatgttgaa

SEQ ID NO: 20317 - DNA, 21 bp, Artificial Sequence
  Synthetic
gttgaaaagagtttgcctcca

SEQ ID NO: 20318 - DNA, 21 bp, Artificial Sequence
  Synthetic
gaaaagagtttgcctccaaag

SEQ ID NO: 20319 - DNA, 21 bp, Artificial Sequence
  Synthetic
aaaagagtttgcctccaaaga

SEQ ID NO: 20320 - DNA, 21 bp, Artificial Sequence
  Synthetic
aagaaggaagtaaaaatctat

SEQ ID NO: 20321 - DNA, 21 bp, Artificial Sequence
  Synthetic
tgtgggcctcagcaaaatgca

SEQ ID NO: 20322 - DNA, 21 bp, Artificial Sequence
  Synthetic
gtgggcctcagcaaaatgcaa

SEQ ID NO: 20323 - DNA, 21 bp, Artificial Sequence
  Synthetic
tgggcctcagcaaaatgcaaa

SEQ ID NO: 20324 - DNA, 21 bp, Artificial Sequence
  Synthetic
ttcttctttgaataggtatac

SEQ ID NO: 20325 - DNA, 21 bp, Artificial Sequence
  Synthetic
aataggtatactcggatatta

SEQ ID NO: 20326 - DNA, 21 bp, Artificial Sequence
  Synthetic
aggtatactcggatattaatg

SEQ ID NO: 20327 - DNA, 21 bp, Artificial Sequence
  Synthetic
atctatatccttcattaatat

SEQ ID NO: 20328 - DNA, 21 bp, Artificial Sequence
  Synthetic
atactcaactcagcaggcaag

SEQ ID NO: 20329 - DNA, 21 bp, Artificial Sequence
  Synthetic
ttgtccatcttgcctgctgag

SEQ ID NO: 20330 - DNA, 21 bp, Artificial Sequence
  Synthetic
tcagcaggcaagatggacaaa

SEQ ID NO: 20331 - DNA, 21 bp, Artificial Sequence
  Synthetic
aagatggacaaaatgaggtta

SEQ ID NO: 20332 - DNA, 21 bp, Artificial Sequence
  Synthetic
ttattgaacatcctaatgcag

SEQ ID NO: 20333 - DNA, 21 bp, Artificial Sequence
  Synthetic
attgaacatcctaatgcagtt

SEQ ID NO: 20334 - DNA, 21 bp, Artificial Sequence
  Synthetic
gtaatcatccatatctctttg

SEQ ID NO: 20335 - DNA, 21 bp, Artificial Sequence
  Synthetic
taatcatccatatctctttga

SEQ ID NO: 20336 - DNA, 21 bp, Artificial Sequence
  Synthetic
gttctgctccatcaaagagat

SEQ ID NO: 20337 - DNA, 21 bp, Artificial Sequence
  Synthetic
ctatgccgttgatgcatattt

SEQ ID NO: 20338 - DNA, 21 bp, Artificial Sequence
  Synthetic
tatgccgttgatgcatatttc

SEQ ID NO: 20339 - DNA, 21 bp, Artificial Sequence
  Synthetic
atgccgttgatgcatatttca

SEQ ID NO: 20340 - DNA, 21 bp, Artificial Sequence
  Synthetic
tcactaacacgaagagcttcc

SEQ ID NO: 20341 - DNA, 21 bp, Artificial Sequence
  Synthetic
tcagggaagctcttcgtgtta

SEQ ID NO: 20342 - DNA, 21 bp, Artificial Sequence
  Synthetic
tgctttaggttcactaacacg

SEQ ID NO: 20343 - DNA, 21 bp, Artificial Sequence
  Synthetic
gggtgctttaggttcactaac

SEQ ID NO: 20344 - DNA, 21 bp, Artificial Sequence
  Synthetic
agtgaacctaaagcacccaag

SEQ ID NO: 20345 - DNA, 21 bp, Artificial Sequence
  Synthetic
cctccaaaacaacccaatgtt

SEQ ID NO: 20346 - DNA, 21 bp, Artificial Sequence
  Synthetic
atcctgaacattgggttgttt

SEQ ID NO: 20347 - DNA, 21 bp, Artificial Sequence
  Synthetic
aatcctgaacattgggttgtt

SEQ ID NO: 20348 - DNA, 21 bp, Artificial Sequence
  Synthetic
aagaactggaaatcctgaaca

SEQ ID NO: 20349 - DNA, 21 bp, Artificial Sequence
  Synthetic
tggaggaaagaactggaaatc

SEQ ID NO: 20350 - DNA, 21 bp, Artificial Sequence
  Synthetic
aataaacgtggaggaaagaac

SEQ ID NO: 20351 - DNA, 21 bp, Artificial Sequence
  Synthetic
aaataaacgtggaggaaagaa

SEQ ID NO: 20352 - DNA, 21 bp, Artificial Sequence
  Synthetic
agttctttcctccacgtttat

SEQ ID NO: 20353 - DNA, 21 bp, Artificial Sequence
  Synthetic
aattcaaataaacgtggagga

SEQ ID NO: 20354 - DNA, 21 bp, Artificial Sequence
  Synthetic
cagtaattcaaataaacgtgg

SEQ ID NO: 20355 - DNA, 21 bp, Artificial Sequence
  Synthetic
ccagtaattcaaataaacgtg

SEQ ID NO: 20356 - DNA, 21 bp, Artificial Sequence
  Synthetic
cctccacgtttatttgaatta

SEQ ID NO: 20357 - DNA, 21 bp, Artificial Sequence
  Synthetic
ttccagtaattcaaataaacg

SEQ ID NO: 20358 - DNA, 21 bp, Artificial Sequence
  Synthetic
ctccacgtttatttgaattac

SEQ ID NO: 20359 - DNA, 21 bp, Artificial Sequence
  Synthetic
tttccagtaattcaaataaac

SEQ ID NO: 20360 - DNA, 21 bp, Artificial Sequence
  Synthetic
gtttatttgaattactggaaa

SEQ ID NO: 20361 - DNA, 21 bp, Artificial Sequence
  Synthetic
tgcattaggcagctcaggatt

SEQ ID NO: 20362 - DNA, 21 bp, Artificial Sequence
  Synthetic
cctgtgctgcattaggcagct

SEQ ID NO: 20363 - DNA, 21 bp, Artificial Sequence
  Synthetic
ctaatgcagcacaggcacaaa

SEQ ID NO: 20364 - DNA, 21 bp, Artificial Sequence
  Synthetic
atgcagcacaggcacaaaaag

SEQ ID NO: 20365 - DNA, 21 bp, Artificial Sequence
  Synthetic
aagaagaacagcttaaaattg

SEQ ID NO: 20366 - DNA, 21 bp, Artificial Sequence
  Synthetic
aacagcttaaaattgatgaag

SEQ ID NO: 20367 - DNA, 21 bp, Artificial Sequence
  Synthetic
atgaagctgaatcccttaatg

SEQ ID NO: 20368 - DNA, 21 bp, Artificial Sequence
  Synthetic
aagctgaatcccttaatgatg

SEQ ID NO: 20369 - DNA, 21 bp, Artificial Sequence
  Synthetic
aatcccttaatgatgaagagt

SEQ ID NO: 20370 - DNA, 21 bp, Artificial Sequence
  Synthetic
tcctctaactcttcatcatta

SEQ ID NO: 20371 - DNA, 21 bp, Artificial Sequence
  Synthetic
tcccttaatgatgaagagtta

SEQ ID NO: 20372 - DNA, 21 bp, Artificial Sequence
  Synthetic
ttcctctaactcttcatcatt

SEQ ID NO: 20373 - DNA, 21 bp, Artificial Sequence
  Synthetic
cccttaatgatgaagagttag

SEQ ID NO: 20374 - DNA, 21 bp, Artificial Sequence
  Synthetic
atgatgaagagttagaggaaa

SEQ ID NO: 20375 - DNA, 21 bp, Artificial Sequence
  Synthetic
gatgaagagttagaggaaaaa

SEQ ID NO: 20376 - DNA, 21 bp, Artificial Sequence
  Synthetic
gattaaaggctatacctgtgt

SEQ ID NO: 20377 - DNA, 21 bp, Artificial Sequence
  Synthetic
aatgttctgttgaggacaaca

SEQ ID NO: 20378 - DNA, 21 bp, Artificial Sequence
  Synthetic
aggacaacactggacctgctg

SEQ ID NO: 20379 - DNA, 21 bp, Artificial Sequence
  Synthetic
ggacaacactggacctgctgc

SEQ ID NO: 20380 - DNA, 21 bp, Artificial Sequence
  Synthetic
acaacactggacctgctgcag

SEQ ID NO: 20381 - DNA, 21 bp, Artificial Sequence
  Synthetic
acactggacctgctgcaggag

SEQ ID NO: 20382 - DNA, 21 bp, Artificial Sequence
  Synthetic
aggatcctgcacacatcttcg

SEQ ID NO: 20383 - DNA, 21 bp, Artificial Sequence
  Synthetic
ctggttctgcgaagatgtgtg

SEQ ID NO: 20384 - DNA, 21 bp, Artificial Sequence
  Synthetic
atcttcgcagaaccagtcaac

SEQ ID NO: 20385 - DNA, 21 bp, Artificial Sequence
  Synthetic
tcactcaagttgactggttct

SEQ ID NO: 20386 - DNA, 21 bp, Artificial Sequence
  Synthetic
tcgcagaaccagtcaacttga

SEQ ID NO: 20387 - DNA, 21 bp, Artificial Sequence
  Synthetic
tatgtttaggttccagattac

SEQ ID NO: 20388 - DNA, 21 bp, Artificial Sequence
  Synthetic
atgtttaggttccagattacc

SEQ ID NO: 20389 - DNA, 21 bp, Artificial Sequence
  Synthetic
ggatatgaattccaggtaatc

SEQ ID NO: 20390 - DNA, 21 bp, Artificial Sequence
  Synthetic
tggatatgaattccaggtaat

SEQ ID NO: 20391 - DNA, 21 bp, Artificial Sequence
  Synthetic
ctggaattcatatccaagcca

SEQ ID NO: 20392 - DNA, 21 bp, Artificial Sequence
  Synthetic
gaaaaatccattggcttggat

SEQ ID NO: 20393 - DNA, 21 bp, Artificial Sequence
  Synthetic
atagtagaaaaatccattggc

SEQ ID NO: 20394 - DNA, 21 bp, Artificial Sequence
  Synthetic
tttctactatgaggcggaagc

SEQ ID NO: 20395 - DNA, 21 bp, Artificial Sequence
  Synthetic
actccagcttccgcctcatag

SEQ ID NO: 20396 - DNA, 21 bp, Artificial Sequence
  Synthetic
gagtcccacctgtaccgcacc

SEQ ID NO: 20397 - DNA, 21 bp, Artificial Sequence
  Synthetic
agtcccacctgtaccgcacct

SEQ ID NO: 20398 - DNA, 21 bp, Artificial Sequence
  Synthetic
tcctccaaggtgcggtacagg

SEQ ID NO: 20399 - DNA, 21 bp, Artificial Sequence
  Synthetic
tcccacctgtaccgcaccttg

SEQ ID NO: 20400 - DNA, 21 bp, Artificial Sequence
  Synthetic
ctcctccaaggtgcggtacag

SEQ ID NO: 20401 - DNA, 21 bp, Artificial Sequence
  Synthetic
cccacctgtaccgcaccttgg

SEQ ID NO: 20402 - DNA, 21 bp, Artificial Sequence
  Synthetic
tgtaccgcaccttggaggagt

SEQ ID NO: 20403 - DNA, 21 bp, Artificial Sequence
  Synthetic
taccgcaccttggaggagttt

SEQ ID NO: 20404 - DNA, 21 bp, Artificial Sequence
  Synthetic
accgcaccttggaggagtttg

SEQ ID NO: 20405 - DNA, 21 bp, Artificial Sequence
  Synthetic
cgcaccttggaggagtttgag

SEQ ID NO: 20406 - DNA, 21 bp, Artificial Sequence
  Synthetic
aaccttatagttaccaactgc

SEQ ID NO: 20407 - DNA, 21 bp, Artificial Sequence
  Synthetic
cgcaggcggacagctgctcgg

SEQ ID NO: 20408 - DNA, 21 bp, Artificial Sequence
  Synthetic
ccgcaggcggacagctgctcg

SEQ ID NO: 20409 - DNA, 21 bp, Artificial Sequence
  Synthetic
atgacccactcaaaatcatta

SEQ ID NO: 20410 - DNA, 21 bp, Artificial Sequence
  Synthetic
cactcaaaatcattactgaag

SEQ ID NO: 20411 - DNA, 21 bp, Artificial Sequence
  Synthetic
agctcatcttcagtaatgatt

SEQ ID NO: 20412 - DNA, 21 bp, Artificial Sequence
  Synthetic
actgaagatgagctaactgcc

SEQ ID NO: 20413 - DNA, 21 bp, Artificial Sequence
  Synthetic
agctaactgcccaggatatca

SEQ ID NO: 20414 - DNA, 21 bp, Artificial Sequence
  Synthetic
actattgcattcggtgatatc

SEQ ID NO: 20415 - DNA, 21 bp, Artificial Sequence
  Synthetic
atcaccgaatgcaatagtaac

SEQ ID NO: 20416 - DNA, 21 bp, Artificial Sequence
  Synthetic
tcaccgaatgcaatagtaaca

SEQ ID NO: 20417 - DNA, 21 bp, Artificial Sequence
  Synthetic
gcaatagtaacaaggaaaaca

SEQ ID NO: 20418 - DNA, 21 bp, Artificial Sequence
  Synthetic
cctcagttccctggcaagtcc

SEQ ID NO: 20419 - DNA, 21 bp, Artificial Sequence
  Synthetic
tttcttggacttgccagggaa

SEQ ID NO: 20420 - DNA, 21 bp, Artificial Sequence
  Synthetic
gagggtttcttggacttgcca

SEQ ID NO: 20421 - DNA, 21 bp, Artificial Sequence
  Synthetic
tgagggtttcttggacttgcc

SEQ ID NO: 20422 - DNA, 21 bp, Artificial Sequence
  Synthetic
atgagggtttcttggacttgc

SEQ ID NO: 20423 - DNA, 21 bp, Artificial Sequence
  Synthetic
aagtccaagaaaccctcatcc

SEQ ID NO: 20424 - DNA, 21 bp, Artificial Sequence
  Synthetic
ttgcccttggatgagggtttc

SEQ ID NO: 20425 - DNA, 21 bp, Artificial Sequence
  Synthetic
aaaccctcatccaagggcaaa

SEQ ID NO: 20426 - DNA, 21 bp, Artificial Sequence
  Synthetic
ccctcatccaagggcaaaaag

SEQ ID NO: 20427 - DNA, 21 bp, Artificial Sequence
  Synthetic
cctcatccaagggcaaaaaga

SEQ ID NO: 20428 - DNA, 21 bp, Artificial Sequence
  Synthetic
gtaccagatgcatgcttggag

SEQ ID NO: 20429 - DNA, 21 bp, Artificial Sequence
  Synthetic
aggaagtaccagatgcatgct

SEQ ID NO: 20430 - DNA, 21 bp, Artificial Sequence
  Synthetic
aaggaagtaccagatgcatgc

SEQ ID NO: 20431 - DNA, 21 bp, Artificial Sequence
  Synthetic
agctgggctgtgggaggtgga

SEQ ID NO: 20432 - DNA, 21 bp, Artificial Sequence
  Synthetic
aagctgggctgtgggaggtgg

SEQ ID NO: 20433 - DNA, 21 bp, Artificial Sequence
  Synthetic
cggaagctgggctgtgggagg

SEQ ID NO: 20434 - DNA, 21 bp, Artificial Sequence
  Synthetic
acggaagctgggctgtgggag

SEQ ID NO: 20435 - DNA, 21 bp, Artificial Sequence
  Synthetic
accatacggaagctgggctgt

SEQ ID NO: 20436 - DNA, 21 bp, Artificial Sequence
  Synthetic
caccatacggaagctgggctg

SEQ ID NO: 20437 - DNA, 21 bp, Artificial Sequence
  Synthetic
ccaccatacggaagctgggct

SEQ ID NO: 20438 - DNA, 21 bp, Artificial Sequence
  Synthetic
ccacagcccagcttccgtatg

SEQ ID NO: 20439 - DNA, 21 bp, Artificial Sequence
  Synthetic
cctgagtccaccatacggaag

SEQ ID NO: 20440 - DNA, 21 bp, Artificial Sequence
  Synthetic
tggatgcctgagtccaccata

SEQ ID NO: 20441 - DNA, 21 bp, Artificial Sequence
  Synthetic
ctggatgcctgagtccaccat

SEQ ID NO: 20442 - DNA, 21 bp, Artificial Sequence
  Synthetic
tggtggactcaggcatccagc

SEQ ID NO: 20443 - DNA, 21 bp, Artificial Sequence
  Synthetic
ggggtgcttctggctggatgc

SEQ ID NO: 20444 - DNA, 21 bp, Artificial Sequence
  Synthetic
aggcagcgggggtgcttctgg

SEQ ID NO: 20445 - DNA, 21 bp, Artificial Sequence
  Synthetic
cggtagtaggcagcaggcagc

SEQ ID NO: 20446 - DNA, 21 bp, Artificial Sequence
  Synthetic
gcggtagtaggcagcaggcag

SEQ ID NO: 20447 - DNA, 21 bp, Artificial Sequence
  Synthetic
agcggtagtaggcagcaggca

SEQ ID NO: 20448 - DNA, 21 bp, Artificial Sequence
  Synthetic
ctgctgcctactaccgctaca

SEQ ID NO: 20449 - DNA, 21 bp, Artificial Sequence
  Synthetic
gctgcctactaccgctacatt

SEQ ID NO: 20450 - DNA, 21 bp, Artificial Sequence
  Synthetic
accgctacattgagaagccac

SEQ ID NO: 20451 - DNA, 21 bp, Artificial Sequence
  Synthetic
attgagaagccacctgaagac

SEQ ID NO: 20452 - DNA, 21 bp, Artificial Sequence
  Synthetic
agccacctgaagacctggatg

SEQ ID NO: 20453 - DNA, 21 bp, Artificial Sequence
  Synthetic
ctgaagacctggatgcagagg

SEQ ID NO: 20454 - DNA, 21 bp, Artificial Sequence
  Synthetic
gatgcagaggtagagtatgac

SEQ ID NO: 20455 - DNA, 21 bp, Artificial Sequence
  Synthetic
cagaggtagagtatgacatgg

SEQ ID NO: 20456 - DNA, 21 bp, Artificial Sequence
  Synthetic
gaggtagagtatgacatggat

SEQ ID NO: 20457 - DNA, 21 bp, Artificial Sequence
  Synthetic
aggtagagtatgacatggatg

SEQ ID NO: 20458 - DNA, 21 bp, Artificial Sequence
  Synthetic
gtagagtatgacatggatgag

SEQ ID NO: 20459 - DNA, 21 bp, Artificial Sequence
  Synthetic
gatgaggaggaccttgcctgg

SEQ ID NO: 20460 - DNA, 21 bp, Artificial Sequence
  Synthetic
gaccttgcctggctggacatg

SEQ ID NO: 20461 - DNA, 21 bp, Artificial Sequence
  Synthetic
ttgcctggctggacatggtga

SEQ ID NO: 20462 - DNA, 21 bp, Artificial Sequence
  Synthetic
ggacatggtgaatgaaaaacg

SEQ ID NO: 20463 - DNA, 21 bp, Artificial Sequence
  Synthetic
tgaatgaaaaacggcgagtag

SEQ ID NO: 20464 - DNA, 21 bp, Artificial Sequence
  Synthetic
gtttggtgtctgcagatacct

SEQ ID NO: 20465 - DNA, 21 bp, Artificial Sequence
  Synthetic
ttgagctgctggtagaccggc

SEQ ID NO: 20466 - DNA, 21 bp, Artificial Sequence
  Synthetic
gagctgctggtagaccggctt

SEQ ID NO: 20467 - DNA, 21 bp, Artificial Sequence
  Synthetic
tgctggtagaccggcttgaga

SEQ ID NO: 20468 - DNA, 21 bp, Artificial Sequence
  Synthetic
gccctacctgtacttcggcat

SEQ ID NO: 20469 - DNA, 21 bp, Artificial Sequence
  Synthetic
ttccacatgccgaagtacagg

SEQ ID NO: 20470 - DNA, 21 bp, Artificial Sequence
  Synthetic
ccctacctgtacttcggcatg

SEQ ID NO: 20471 - DNA, 21 bp, Artificial Sequence
  Synthetic
gcgaaggtggtcttccacatg

SEQ ID NO: 20472 - DNA, 21 bp, Artificial Sequence
  Synthetic
agaccaccttcgcctggcaca

SEQ ID NO: 20473 - DNA, 21 bp, Artificial Sequence
  Synthetic
accaccttcgcctggcacacc

SEQ ID NO: 20474 - DNA, 21 bp, Artificial Sequence
  Synthetic
tccatgtcctcggtgtgccag

SEQ ID NO: 20475 - DNA, 21 bp, Artificial Sequence
  Synthetic
ttcgcctggcacaccgaggac

SEQ ID NO: 20476 - DNA, 21 bp, Artificial Sequence
  Synthetic
acagcatcaactacctgcact

SEQ ID NO: 20477 - DNA, 21 bp, Artificial Sequence
  Synthetic
cagcatcaactacctgcactt

SEQ ID NO: 20478 - DNA, 21 bp, Artificial Sequence
  Synthetic
agcatcaactacctgcacttt

SEQ ID NO: 20479 - DNA, 21 bp, Artificial Sequence
  Synthetic
gcatcaactacctgcactttg

SEQ ID NO: 20480 - DNA, 21 bp, Artificial Sequence
  Synthetic
ctttggggagcctaagtcctg

SEQ ID NO: 20481 - DNA, 21 bp, Artificial Sequence
  Synthetic
ctctggtgggatggcgtacct

SEQ ID NO: 20482 - DNA, 21 bp, Artificial Sequence
  Synthetic
ctcgcaggtacgccatcccac

SEQ ID NO: 20483 - DNA, 21 bp, Artificial Sequence
  Synthetic
caggcgcttgccgtgctctgg

SEQ ID NO: 20484 - DNA, 21 bp, Artificial Sequence
  Synthetic
ccaggcgcttgccgtgctctg

SEQ ID NO: 20485 - DNA, 21 bp, Artificial Sequence
  Synthetic
ccaccagagcacggcaagcgc

SEQ ID NO: 20486 - DNA, 21 bp, Artificial Sequence
  Synthetic
caccagagcacggcaagcgcc

SEQ ID NO: 20487 - DNA, 21 bp, Artificial Sequence
  Synthetic
tttcggccctaggcttcttcc

SEQ ID NO: 20488 - DNA, 21 bp, Artificial Sequence
  Synthetic
ttcggccctaggcttcttccc

SEQ ID NO: 20489 - DNA, 21 bp, Artificial Sequence
  Synthetic
tcggccctaggcttcttcccc

SEQ ID NO: 20490 - DNA, 21 bp, Artificial Sequence
  Synthetic
cgagctcccggggaagaagcc

SEQ ID NO: 20491 - DNA, 21 bp, Artificial Sequence
  Synthetic
ggcttcttccccgggagctcg

SEQ ID NO: 20492 - DNA, 21 bp, Artificial Sequence
  Synthetic
cagccctgcgagctcccgggg

SEQ ID NO: 20493 - DNA, 21 bp, Artificial Sequence
  Synthetic
tcgcagccctgcgagctcccg

SEQ ID NO: 20494 - DNA, 21 bp, Artificial Sequence
  Synthetic
gtcgcagccctgcgagctccc

SEQ ID NO: 20495 - DNA, 21 bp, Artificial Sequence
  Synthetic
cgtcgcagccctgcgagctcc

SEQ ID NO: 20496 - DNA, 21 bp, Artificial Sequence
  Synthetic
gcgtcgcagccctgcgagctc

SEQ ID NO: 20497 - DNA, 21 bp, Artificial Sequence
  Synthetic
gcaggaaggcgtcgcagccct

SEQ ID NO: 20498 - DNA, 21 bp, Artificial Sequence
  Synthetic
atgagggtcatcttatgccgc

SEQ ID NO: 20499 - DNA, 21 bp, Artificial Sequence
  Synthetic
gatgagggtcatcttatgccg

SEQ ID NO: 20500 - DNA, 21 bp, Artificial Sequence
  Synthetic
accctcatctcgcccatcatc

SEQ ID NO: 20501 - DNA, 21 bp, Artificial Sequence
  Synthetic
cttcaggatgatgggcgagat

SEQ ID NO: 20502 - DNA, 21 bp, Artificial Sequence
  Synthetic
ttcttcaggatgatgggcgag

SEQ ID NO: 20503 - DNA, 21 bp, Artificial Sequence
  Synthetic
ctcatctcgcccatcatcctg

SEQ ID NO: 20504 - DNA, 21 bp, Artificial Sequence
  Synthetic
cgtacttcttcaggatgatgg

SEQ ID NO: 20505 - DNA, 21 bp, Artificial Sequence
  Synthetic
cgcccatcatcctgaagaagt

SEQ ID NO: 20506 - DNA, 21 bp, Artificial Sequence
  Synthetic
gcccatcatcctgaagaagta

SEQ ID NO: 20507 - DNA, 21 bp, Artificial Sequence
  Synthetic
atcccgtacttcttcaggatg

SEQ ID NO: 20508 - DNA, 21 bp, Artificial Sequence
  Synthetic
gaaggggatcccgtacttctt

SEQ ID NO: 20509 - DNA, 21 bp, Artificial Sequence
  Synthetic
gaagtacgggatccccttcag

SEQ ID NO: 20510 - DNA, 21 bp, Artificial Sequence
  Synthetic
acccgtacgcacccggctgaa

SEQ ID NO: 20511 - DNA, 21 bp, Artificial Sequence
  Synthetic
cacccgtacgcacccggctga

SEQ ID NO: 20512 - DNA, 21 bp, Artificial Sequence
  Synthetic
ccacccgtacgcacccggctg

SEQ ID NO: 20513 - DNA, 21 bp, Artificial Sequence
  Synthetic
gccccacccgtacgcacccgg

SEQ ID NO: 20514 - DNA, 21 bp, Artificial Sequence
  Synthetic
cctttccctctgcagatcacg

SEQ ID NO: 20515 - DNA, 21 bp, Artificial Sequence
  Synthetic
ctttccctctgcagatcacgc

SEQ ID NO: 20516 - DNA, 21 bp, Artificial Sequence
  Synthetic
ctctgcagatcacgcaggagg

SEQ ID NO: 20517 - DNA, 21 bp, Artificial Sequence
  Synthetic
tctgcagatcacgcaggaggc

SEQ ID NO: 20518 - DNA, 21 bp, Artificial Sequence
  Synthetic
ctgcagatcacgcaggaggcc

SEQ ID NO: 20519 - DNA, 21 bp, Artificial Sequence
  Synthetic
tgcagatcacgcaggaggccg

SEQ ID NO: 20520 - DNA, 21 bp, Artificial Sequence
  Synthetic
tagccgtagggaaatgtgatc

SEQ ID NO: 20521 - DNA, 21 bp, Artificial Sequence
  Synthetic
gaagccggcgtggtagccgta

SEQ ID NO: 20522 - DNA, 21 bp, Artificial Sequence
  Synthetic
tgaagccggcgtggtagccgt

SEQ ID NO: 20523 - DNA, 21 bp, Artificial Sequence
  Synthetic
ttgaagccggcgtggtagccg

SEQ ID NO: 20524 - DNA, 21 bp, Artificial Sequence
  Synthetic
gctaccacgccggcttcaatc

SEQ ID NO: 20525 - DNA, 21 bp, Artificial Sequence
  Synthetic
tctgcgcagttgaacccgtga

SEQ ID NO: 20526 - DNA, 21 bp, Artificial Sequence
  Synthetic
tcaatcacgggttcaactgcg

SEQ ID NO: 20527 - DNA, 21 bp, Artificial Sequence
  Synthetic
aagttggtagattctgcgcag

SEQ ID NO: 20528 - DNA, 21 bp, Artificial Sequence
  Synthetic
atcatgacgtttcgcccaacc

SEQ ID NO: 20529 - DNA, 21 bp, Artificial Sequence
  Synthetic
tcatgacgtttcgcccaacca

SEQ ID NO: 20530 - DNA, 21 bp, Artificial Sequence
  Synthetic
tgacgtttcgcccaaccatgg

SEQ ID NO: 20531 - DNA, 21 bp, Artificial Sequence
  Synthetic
tttaaattcttccatggttgg

SEQ ID NO: 20532 - DNA, 21 bp, Artificial Sequence
  Synthetic
agtctttaaattcttccatgg

SEQ ID NO: 20533 - DNA, 21 bp, Artificial Sequence
  Synthetic
tctatgtaggccacgtatttg

SEQ ID NO: 20534 - DNA, 21 bp, Artificial Sequence
  Synthetic
tcaacaaatacgtggcctaca

SEQ ID NO: 20535 - DNA, 21 bp, Artificial Sequence
  Synthetic
tacgtggcctacatagagtcg

SEQ ID NO: 20536 - DNA, 21 bp, Artificial Sequence
  Synthetic
acgtggcctacatagagtcgc

SEQ ID NO: 20537 - DNA, 21 bp, Artificial Sequence
  Synthetic
cgtggcctacatagagtcgca

SEQ ID NO: 20538 - DNA, 21 bp, Artificial Sequence
  Synthetic
catagagtcgcagggagccca

SEQ ID NO: 20539 - DNA, 21 bp, Artificial Sequence
  Synthetic
gagtcgcagggagcccaccgg

SEQ ID NO: 20540 - DNA, 21 bp, Artificial Sequence
  Synthetic
caccttggccaggcccgcccg

SEQ ID NO: 20541 - DNA, 21 bp, Artificial Sequence
  Synthetic
caccgggcgggcctggccaag

SEQ ID NO: 20542 - DNA, 21 bp, Artificial Sequence
  Synthetic
ttggtcttgcagatcatcccc

SEQ ID NO: 20543 - DNA, 21 bp, Artificial Sequence
  Synthetic
ggttgaaaggattgttgacaa

SEQ ID NO: 20544 - DNA, 21 bp, Artificial Sequence
  Synthetic
gttgaaaggattgttgacaaa

SEQ ID NO: 20545 - DNA, 21 bp, Artificial Sequence
  Synthetic
ttgacaaaaggaaaaataaaa

SEQ ID NO: 20546 - DNA, 21 bp, Artificial Sequence
  Synthetic
tgacaaaaggaaaaataaaaa

SEQ ID NO: 20547 - DNA, 21 bp, Artificial Sequence
  Synthetic
gacaaaaggaaaaataaaaaa

SEQ ID NO: 20548 - DNA, 21 bp, Artificial Sequence
  Synthetic
ggaaaaataaaaaagggaaga

SEQ ID NO: 20549 - DNA, 21 bp, Artificial Sequence
  Synthetic
gaagacagagtatttggttcg

SEQ ID NO: 20550 - DNA, 21 bp, Artificial Sequence
  Synthetic
aagacagagtatttggttcgg

SEQ ID NO: 20551 - DNA, 21 bp, Artificial Sequence
  Synthetic
ctcgctgtcatagcctttcca

SEQ ID NO: 20552 - DNA, 21 bp, Artificial Sequence
  Synthetic
ttcggtggaaaggctatgaca

SEQ ID NO: 20553 - DNA, 21 bp, Artificial Sequence
  Synthetic
cggtggaaaggctatgacagc

SEQ ID NO: 20554 - DNA, 21 bp, Artificial Sequence
  Synthetic
ctatgacagcgaggacgacac

SEQ ID NO: 20555 - DNA, 21 bp, Artificial Sequence
  Synthetic
tatgacagcgaggacgacact

SEQ ID NO: 20556 - DNA, 21 bp, Artificial Sequence
  Synthetic
atgacagcgaggacgacactt

SEQ ID NO: 20557 - DNA, 21 bp, Artificial Sequence
  Synthetic
agcgaggacgacacttgggag

SEQ ID NO: 20558 - DNA, 21 bp, Artificial Sequence
  Synthetic
gcgaggacgacacttgggagc

SEQ ID NO: 20559 - DNA, 21 bp, Artificial Sequence
  Synthetic
tgggagccggaacagcacctc

SEQ ID NO: 20560 - DNA, 21 bp, Artificial Sequence
  Synthetic
cggaacagcacctcgtgaact

SEQ ID NO: 20561 - DNA, 21 bp, Artificial Sequence
  Synthetic
gaacagcacctcgtgaactgt

SEQ ID NO: 20562 - DNA, 21 bp, Artificial Sequence
  Synthetic
aacagcacctcgtgaactgtg

SEQ ID NO: 20563 - DNA, 21 bp, Artificial Sequence
  Synthetic
tggatgtattcctcacagttc

SEQ ID NO: 20564 - DNA, 21 bp, Artificial Sequence
  Synthetic
cgtgtggcgtctgttgaagtc

SEQ ID NO: 20565 - DNA, 21 bp, Artificial Sequence
  Synthetic
tgcttctccgtgtggcgtctg

SEQ ID NO: 20566 - DNA, 21 bp, Artificial Sequence
  Synthetic
accctacctgtactttggcat

SEQ ID NO: 20567 - DNA, 21 bp, Artificial Sequence
  Synthetic
ttccacatgccaaagtacagg

SEQ ID NO: 20568 - DNA, 21 bp, Artificial Sequence
  Synthetic
ccctacctgtactttggcatg

SEQ ID NO: 20569 - DNA, 21 bp, Artificial Sequence
  Synthetic
agaccacgtttgcctggcaca

SEQ ID NO: 20570 - DNA, 21 bp, Artificial Sequence
  Synthetic
accacgtttgcctggcacaca

SEQ ID NO: 20571 - DNA, 21 bp, Artificial Sequence
  Synthetic
tttgcctggcacacagaggac

SEQ ID NO: 20572 - DNA, 21 bp, Artificial Sequence
  Synthetic
acagcatcaactacctgcact

SEQ ID NO: 20573 - DNA, 21 bp, Artificial Sequence
  Synthetic
cagcatcaactacctgcactt

SEQ ID NO: 20574 - DNA, 21 bp, Artificial Sequence
  Synthetic
agcatcaactacctgcacttt

SEQ ID NO: 20575 - DNA, 21 bp, Artificial Sequence
  Synthetic
gcatcaactacctgcactttg

SEQ ID NO: 20576 - DNA, 21 bp, Artificial Sequence
  Synthetic
gggggcaccacgtaccaagtt

SEQ ID NO: 20577 - DNA, 21 bp, Artificial Sequence
  Synthetic
aaacttggtacgtggtgcccc

SEQ ID NO: 20578 - DNA, 21 bp, Artificial Sequence
  Synthetic
tccaggtgctgaccatgttct

SEQ ID NO: 20579 - DNA, 21 bp, Artificial Sequence
  Synthetic
cccccagaacatggtcagcac

SEQ ID NO: 20580 - DNA, 21 bp, Artificial Sequence
  Synthetic
ttccaggtgctgaccatgttc

SEQ ID NO: 20581 - DNA, 21 bp, Artificial Sequence
  Synthetic
ccccagaacatggtcagcacc

SEQ ID NO: 20582 - DNA, 21 bp, Artificial Sequence
  Synthetic
gttccaggtgctgaccatgtt

SEQ ID NO: 20583 - DNA, 21 bp, Artificial Sequence
  Synthetic
tcagcacctggaacgcctggc

SEQ ID NO: 20584 - DNA, 21 bp, Artificial Sequence
  Synthetic
cagcacctggaacgcctggcc

SEQ ID NO: 20585 - DNA, 21 bp, Artificial Sequence
  Synthetic
agcacctggaacgcctggcca

SEQ ID NO: 20586 - DNA, 21 bp, Artificial Sequence
  Synthetic
ggagctcttcccagacatttc

SEQ ID NO: 20587 - DNA, 21 bp, Artificial Sequence
  Synthetic
gagctcttcccagacatttct

SEQ ID NO: 20588 - DNA, 21 bp, Artificial Sequence
  Synthetic
cagccccgagaaatgtctggg

SEQ ID NO: 20589 - DNA, 21 bp, Artificial Sequence
  Synthetic
tcacagccccgagaaatgtct

SEQ ID NO: 20590 - DNA, 21 bp, Artificial Sequence
  Synthetic
ctcacagccccgagaaatgtc

SEQ ID NO: 20591 - DNA, 21 bp, Artificial Sequence
  Synthetic
tcccagacatttctcggggct

SEQ ID NO: 20592 - DNA, 21 bp, Artificial Sequence
  Synthetic
cctcacagccccgagaaatgt

SEQ ID NO: 20593 - DNA, 21 bp, Artificial Sequence
  Synthetic
gcaggaaggcctcacagcccc

SEQ ID NO: 20594 - DNA, 21 bp, Artificial Sequence
  Synthetic
ccgcaggaaggcctcacagcc

SEQ ID NO: 20595 - DNA, 21 bp, Artificial Sequence
  Synthetic
atgagggccactttgtgccgc

SEQ ID NO: 20596 - DNA, 21 bp, Artificial Sequence
  Synthetic
gatgagggccactttgtgccg

SEQ ID NO: 20597 - DNA, 21 bp, Artificial Sequence
  Synthetic
cttgagaactgtaggcgagat

SEQ ID NO: 20598 - DNA, 21 bp, Artificial Sequence
  Synthetic
tccttgagaactgtaggcgag

SEQ ID NO: 20599 - DNA, 21 bp, Artificial Sequence
  Synthetic
ctcatctcgcctacagttctc

SEQ ID NO: 20600 - DNA, 21 bp, Artificial Sequence
  Synthetic
tcatctcgcctacagttctca

SEQ ID NO: 20601 - DNA, 21 bp, Artificial Sequence
  Synthetic
cgcctacagttctcaaggaaa

SEQ ID NO: 20602 - DNA, 21 bp, Artificial Sequence
  Synthetic
gcctacagttctcaaggaaaa

SEQ ID NO: 20603 - DNA, 21 bp, Artificial Sequence
  Synthetic
attcccttcaattgcatgact

SEQ ID NO: 20604 - DNA, 21 bp, Artificial Sequence
  Synthetic
ctcctgagtcatgcaattgaa

SEQ ID NO: 20605 - DNA, 21 bp, Artificial Sequence
  Synthetic
ttcccttcaattgcatgactc

SEQ ID NO: 20606 - DNA, 21 bp, Artificial Sequence
  Synthetic
cctcctgagtcatgcaattga

SEQ ID NO: 20607 - DNA, 21 bp, Artificial Sequence
  Synthetic
gcctcctgagtcatgcaattg

SEQ ID NO: 20608 - DNA, 21 bp, Artificial Sequence
  Synthetic
ccagcctcctgagtcatgcaa

SEQ ID NO: 20609 - DNA, 21 bp, Artificial Sequence
  Synthetic
tcaattgcatgactcaggagg

SEQ ID NO: 20610 - DNA, 21 bp, Artificial Sequence
  Synthetic
caattgcatgactcaggaggc

SEQ ID NO: 20611 - DNA, 21 bp, Artificial Sequence
  Synthetic
aattgcatgactcaggaggct

SEQ ID NO: 20612 - DNA, 21 bp, Artificial Sequence
  Synthetic
attgcatgactcaggaggctg

SEQ ID NO: 20613 - DNA, 21 bp, Artificial Sequence
  Synthetic
caccatgaactccccagcctc

SEQ ID NO: 20614 - DNA, 21 bp, Artificial Sequence
  Synthetic
tagccatagggaaaggtcacc

SEQ ID NO: 20615 - DNA, 21 bp, Artificial Sequence
  Synthetic
gaagccagcatggtagccata

SEQ ID NO: 20616 - DNA, 21 bp, Artificial Sequence
  Synthetic
tgaagccagcatggtagccat

SEQ ID NO: 20617 - DNA, 21 bp, Artificial Sequence
  Synthetic
ttgaagccagcatggtagcca

SEQ ID NO: 20618 - DNA, 21 bp, Artificial Sequence
  Synthetic
tctgcgcagttgaagccgtga

SEQ ID NO: 20619 - DNA, 21 bp, Artificial Sequence
  Synthetic
tcaatcacggcttcaactgcg

SEQ ID NO: 20620 - DNA, 21 bp, Artificial Sequence
  Synthetic
aaattaatggcttctgcgcag

SEQ ID NO: 20621 - DNA, 21 bp, Artificial Sequence
  Synthetic
aatctgcaaattcttccatgg

SEQ ID NO: 20622 - DNA, 21 bp, Artificial Sequence
  Synthetic
tccatgtaagcaacatatgtg

SEQ ID NO: 20623 - DNA, 21 bp, Artificial Sequence
  Synthetic
ttcaacacatatgttgcttac

SEQ ID NO: 20624 - DNA, 21 bp, Artificial Sequence
  Synthetic
tcaacacatatgttgcttaca

SEQ ID NO: 20625 - DNA, 21 bp, Artificial Sequence
  Synthetic
aggccagcttgatgtgcgcct

SEQ ID NO: 20626 - DNA, 21 bp, Artificial Sequence
  Synthetic
aaggccagcttgatgtgcgcc

SEQ ID NO: 20627 - DNA, 21 bp, Artificial Sequence
  Synthetic
accctacttgtactttggcat

SEQ ID NO: 20628 - DNA, 21 bp, Artificial Sequence
  Synthetic
ttccacatgccaaagtacaag

SEQ ID NO: 20629 - DNA, 21 bp, Artificial Sequence
  Synthetic
ccctacttgtactttggcatg

SEQ ID NO: 20630 - DNA, 21 bp, Artificial Sequence
  Synthetic
aaaccacgtttgcttggcata

SEQ ID NO: 20631 - DNA, 21 bp, Artificial Sequence
  Synthetic
accacgtttgcttggcataca

SEQ ID NO: 20632 - DNA, 21 bp, Artificial Sequence
  Synthetic
tttgcttggcatacagaggac

SEQ ID NO: 20633 - DNA, 21 bp, Artificial Sequence
  Synthetic
acagcatcaactacctgcacc

SEQ ID NO: 20634 - DNA, 21 bp, Artificial Sequence
  Synthetic
cagcatcaactacctgcacct

SEQ ID NO: 20635 - DNA, 21 bp, Artificial Sequence
  Synthetic
agcatcaactacctgcacctt

SEQ ID NO: 20636 - DNA, 21 bp, Artificial Sequence
  Synthetic
gcatcaactacctgcaccttg

SEQ ID NO: 20637 - DNA, 21 bp, Artificial Sequence
  Synthetic
gggggcaccacataccaagtt

SEQ ID NO: 20638 - DNA, 21 bp, Artificial Sequence
  Synthetic
aaacttggtatgtggtgcccc

SEQ ID NO: 20639 - DNA, 21 bp, Artificial Sequence
  Synthetic
tccaggcgctggccatgttct

SEQ ID NO: 20640 - DNA, 21 bp, Artificial Sequence
  Synthetic
cccccagaacatggccagcgc

SEQ ID NO: 20641 - DNA, 21 bp, Artificial Sequence
  Synthetic
ttccaggcgctggccatgttc

SEQ ID NO: 20642 - DNA, 21 bp, Artificial Sequence
  Synthetic
ccccagaacatggccagcgcc

SEQ ID NO: 20643 - DNA, 21 bp, Artificial Sequence
  Synthetic
gttccaggcgctggccatgtt

SEQ ID NO: 20644 - DNA, 21 bp, Artificial Sequence
  Synthetic
ccagcgcctggaacgcctggc

SEQ ID NO: 20645 - DNA, 21 bp, Artificial Sequence
  Synthetic
cagcgcctggaacgcctggcc

SEQ ID NO: 20646 - DNA, 21 bp, Artificial Sequence
  Synthetic
agcgcctggaacgcctggcca

SEQ ID NO: 20647 - DNA, 21 bp, Artificial Sequence
  Synthetic
ggagctcttcccaggcagttc

SEQ ID NO: 20648 - DNA, 21 bp, Artificial Sequence
  Synthetic
gagctcttcccaggcagttcc

SEQ ID NO: 20649 - DNA, 21 bp, Artificial Sequence
  Synthetic
caaccccgggaactgcctggg

SEQ ID NO: 20650 - DNA, 21 bp, Artificial Sequence
  Synthetic
ccacaaccccgggaactgcct

SEQ ID NO: 20651 - DNA, 21 bp, Artificial Sequence
  Synthetic
cccacaaccccgggaactgcc

SEQ ID NO: 20652 - DNA, 21 bp, Artificial Sequence
  Synthetic
tcccaggcagttcccggggtt

SEQ ID NO: 20653 - DNA, 21 bp, Artificial Sequence
  Synthetic
ccccacaaccccgggaactgc

SEQ ID NO: 20654 - DNA, 21 bp, Artificial Sequence
  Synthetic
cccaggcagttcccggggttg

SEQ ID NO: 20655 - DNA, 21 bp, Artificial Sequence
  Synthetic
gcaggaaggccccacaacccc

SEQ ID NO: 20656 - DNA, 21 bp, Artificial Sequence
  Synthetic
cgcaggaaggccccacaaccc

SEQ ID NO: 20657 - DNA, 21 bp, Artificial Sequence
  Synthetic
ccgcaggaaggccccacaacc

SEQ ID NO: 20658 - DNA, 21 bp, Artificial Sequence
  Synthetic
atgagggccaccttgtgccgc

SEQ ID NO: 20659 - DNA, 21 bp, Artificial Sequence
  Synthetic
gatgagggccaccttgtgccg

SEQ ID NO: 20660 - DNA, 21 bp, Artificial Sequence
  Synthetic
cttgagaactgtaggcgagat

SEQ ID NO: 20661 - DNA, 21 bp, Artificial Sequence
  Synthetic
tccttgagaactgtaggcgag

SEQ ID NO: 20662 - DNA, 21 bp, Artificial Sequence
  Synthetic
ctcatctcgcctacagttctc

SEQ ID NO: 20663 - DNA, 21 bp, Artificial Sequence
  Synthetic
tcatctcgcctacagttctca

SEQ ID NO: 20664 - DNA, 21 bp, Artificial Sequence
  Synthetic
cgcctacagttctcaaggaaa

SEQ ID NO: 20665 - DNA, 21 bp, Artificial Sequence
  Synthetic
gcctacagttctcaaggaaaa

SEQ ID NO: 20666 - DNA, 21 bp, Artificial Sequence
  Synthetic
attcccttcaatcgcataact

SEQ ID NO: 20667 - DNA, 21 bp, Artificial Sequence
  Synthetic
ctcctgagttatgcgattgaa

SEQ ID NO: 20668 - DNA, 21 bp, Artificial Sequence
  Synthetic
ttcccttcaatcgcataactc

SEQ ID NO: 20669 - DNA, 21 bp, Artificial Sequence
  Synthetic
cctcctgagttatgcgattga

SEQ ID NO: 20670 - DNA, 21 bp, Artificial Sequence
  Synthetic
gcctcctgagttatgcgattg

SEQ ID NO: 20671 - DNA, 21 bp, Artificial Sequence
  Synthetic
ccagcctcctgagttatgcga

SEQ ID NO: 20672 - DNA, 21 bp, Artificial Sequence
  Synthetic
tcaatcgcataactcaggagg

SEQ ID NO: 20673 - DNA, 21 bp, Artificial Sequence
  Synthetic
caatcgcataactcaggaggc

SEQ ID NO: 20674 - DNA, 21 bp, Artificial Sequence
  Synthetic
atcgcataactcaggaggctg

SEQ ID NO: 20675 - DNA, 21 bp, Artificial Sequence
  Synthetic
caccatgaactctccagcctc

SEQ ID NO: 20676 - DNA, 21 bp, Artificial Sequence
  Synthetic
tagccatagggaaaggtcacc

SEQ ID NO: 20677 - DNA, 21 bp, Artificial Sequence
  Synthetic
gaagccagcatggtagccata

SEQ ID NO: 20678 - DNA, 21 bp, Artificial Sequence
  Synthetic
tgaagccagcatggtagccat

SEQ ID NO: 20679 - DNA, 21 bp, Artificial Sequence
  Synthetic
ttgaagccagcatggtagcca

SEQ ID NO: 20680 - DNA, 21 bp, Artificial Sequence
  Synthetic
tctgcgcagttgaaaccatgg

SEQ ID NO: 20681 - DNA, 21 bp, Artificial Sequence
  Synthetic
tcaaccatggtttcaactgcg

SEQ ID NO: 20682 - DNA, 21 bp, Artificial Sequence
  Synthetic
aaattgatggcctctgcgcag

SEQ ID NO: 20683 - DNA, 21 bp, Artificial Sequence
  Synthetic
taatgatatttcatccaacca

SEQ ID NO: 20684 - DNA, 21 bp, Artificial Sequence
  Synthetic
tgatatttcatccaaccaaag

SEQ ID NO: 20685 - DNA, 21 bp, Artificial Sequence
  Synthetic
attaaactcttctttggttgg

SEQ ID NO: 20686 - DNA, 21 bp, Artificial Sequence
  Synthetic
aatcattaaactcttctttgg

SEQ ID NO: 20687 - DNA, 21 bp, Artificial Sequence
  Synthetic
tttgataaatatattgcttac

SEQ ID NO: 20688 - DNA, 21 bp, Artificial Sequence
  Synthetic
ttgataaatatattgcttaca

SEQ ID NO: 20689 - DNA, 21 bp, Artificial Sequence
  Synthetic
catggaatcccaaggtgcaca

SEQ ID NO: 20690 - DNA, 21 bp, Artificial Sequence
  Synthetic
aagccagctctgtgtgcacct

SEQ ID NO: 20691 - DNA, 21 bp, Artificial Sequence
  Synthetic
caagccagctctgtgtgcacc

SEQ ID NO: 20692 - DNA, 21 bp, Artificial Sequence
  Synthetic
caaaatatggcaaaggttcag

SEQ ID NO: 20693 - DNA, 21 bp, Artificial Sequence
  Synthetic
cagcaccactacattgttcac

SEQ ID NO: 20694 - DNA, 21 bp, Artificial Sequence
  Synthetic
caggtgaacaatgtagtggtg

SEQ ID NO: 20695 - DNA, 21 bp, Artificial Sequence
  Synthetic
ggaacgggttgtagaaaggag

SEQ ID NO: 20696 - DNA, 21 bp, Artificial Sequence
  Synthetic
actggaacgggttgtagaaag

SEQ ID NO: 20697 - DNA, 21 bp, Artificial Sequence
  Synthetic
gaactggaacgggttgtagaa

SEQ ID NO: 20698 - DNA, 21 bp, Artificial Sequence
  Synthetic
cgaactggaacgggttgtaga

SEQ ID NO: 20699 - DNA, 21 bp, Artificial Sequence
  Synthetic
ctttctacaacccgttccagt

SEQ ID NO: 20700 - DNA, 21 bp, Artificial Sequence
  Synthetic
atctcgaactggaacgggttg

SEQ ID NO: 20701 - DNA, 21 bp, Artificial Sequence
  Synthetic
cgaaggtgatctcgaactgga

SEQ ID NO: 20702 - DNA, 21 bp, Artificial Sequence
  Synthetic
cgttccagttcgagatcacct

SEQ ID NO: 20703 - DNA, 21 bp, Artificial Sequence
  Synthetic
cactcgaaggtgatctcgaac

SEQ ID NO: 20704 - DNA, 21 bp, Artificial Sequence
  Synthetic
gcactcgaaggtgatctcgaa

SEQ ID NO: 20705 - DNA, 21 bp, Artificial Sequence
  Synthetic
tcgatgcactcgaaggtgatc

SEQ ID NO: 20706 - DNA, 21 bp, Artificial Sequence
  Synthetic
tcgagatcaccttcgagtgca

SEQ ID NO: 20707 - DNA, 21 bp, Artificial Sequence
  Synthetic
gagatcaccttcgagtgcatc

SEQ ID NO: 20708 - DNA, 21 bp, Artificial Sequence
  Synthetic
tcagacaggtcctcgatgcac

SEQ ID NO: 20709 - DNA, 21 bp, Artificial Sequence
  Synthetic
tcgagtgcatcgaggacctgt

SEQ ID NO: 20710 - DNA, 21 bp, Artificial Sequence
  Synthetic
gcatcgaggacctgtctgaag

SEQ ID NO: 20711 - DNA, 21 bp, Artificial Sequence
  Synthetic
ttggaatggaaaattatctat

SEQ ID NO: 20712 - DNA, 21 bp, Artificial Sequence
  Synthetic
aaattatctatgtgggctctg

SEQ ID NO: 20713 - DNA, 21 bp, Artificial Sequence
  Synthetic
tctatgtgggctctgcagaaa

SEQ ID NO: 20714 - DNA, 21 bp, Artificial Sequence
  Synthetic
atgtgggctctgcagaaagtg

SEQ ID NO: 20715 - DNA, 21 bp, Artificial Sequence
  Synthetic
gatcgtattcttcactttctg

SEQ ID NO: 20716 - DNA, 21 bp, Artificial Sequence
  Synthetic
cgggaacaggacccactaaaa

SEQ ID NO: 20717 - DNA, 21 bp, Artificial Sequence
  Synthetic
tttagtgggtcctgttcccgc

SEQ ID NO: 20718 - DNA, 21 bp, Artificial Sequence
  Synthetic
acatatgccttcctgcgggaa

SEQ ID NO: 20719 - DNA, 21 bp, Artificial Sequence
  Synthetic
tacaaacatatgccttcctgc

SEQ ID NO: 20720 - DNA, 21 bp, Artificial Sequence
  Synthetic
atacaaacatatgccttcctg

SEQ ID NO: 20721 - DNA, 21 bp, Artificial Sequence
  Synthetic
aatacaaacatatgccttcct

SEQ ID NO: 20722 - DNA, 21 bp, Artificial Sequence
  Synthetic
cctggattaggtgcatcagcc

SEQ ID NO: 20723 - DNA, 21 bp, Artificial Sequence
  Synthetic
tctaggctgatgcacctaatc

SEQ ID NO: 20724 - DNA, 21 bp, Artificial Sequence
  Synthetic
catctgcatctggaatgagtc

SEQ ID NO: 20725 - DNA, 21 bp, Artificial Sequence
  Synthetic
cctactgcatctgcatctgga

SEQ ID NO: 20726 - DNA, 21 bp, Artificial Sequence
  Synthetic
tacgcctactgcatctgcatc

SEQ ID NO: 20727 - DNA, 21 bp, Artificial Sequence
  Synthetic
ttacgcctactgcatctgcat

SEQ ID NO: 20728 - DNA, 21 bp, Artificial Sequence
  Synthetic
tgtgctaattacttgtaccta

SEQ ID NO: 20729 - DNA, 21 bp, Artificial Sequence
  Synthetic
tgctaattacttgtacctatc

SEQ ID NO: 20730 - DNA, 21 bp, Artificial Sequence
  Synthetic
ttacttgtacctatcgaggac

SEQ ID NO: 20731 - DNA, 21 bp, Artificial Sequence
  Synthetic
ctatcgaggacaagaatttat

SEQ ID NO: 20732 - DNA, 21 bp, Artificial Sequence
  Synthetic
gagttggctattatgtaaata

SEQ ID NO: 20733 - DNA, 21 bp, Artificial Sequence
  Synthetic
attatgtaaataatgaatata

SEQ ID NO: 20734 - DNA, 21 bp, Artificial Sequence
  Synthetic
taaataatgaatatactgaga

SEQ ID NO: 20735 - DNA, 21 bp, Artificial Sequence
  Synthetic
tgaatatactgagacagaatt

SEQ ID NO: 20736 - DNA, 21 bp, Artificial Sequence
  Synthetic
gaatatactgagacagaatta

SEQ ID NO: 20737 - DNA, 21 bp, Artificial Sequence
  Synthetic
aatatactgagacagaattaa

SEQ ID NO: 20738 - DNA, 21 bp, Artificial Sequence
  Synthetic
gccaaaatattcctttgaagc

SEQ ID NO: 20739 - DNA, 21 bp, Artificial Sequence
  Synthetic
attagatgccaaaatattcct

SEQ ID NO: 20740 - DNA, 21 bp, Artificial Sequence
  Synthetic
taatgtggaatcttgtgaccc

SEQ ID NO: 20741 - DNA, 21 bp, Artificial Sequence
  Synthetic
ttaatgtggaatcttgtgacc

SEQ ID NO: 20742 - DNA, 21 bp, Artificial Sequence
  Synthetic
ggtcacaagattccacattaa

SEQ ID NO: 20743 - DNA, 21 bp, Artificial Sequence
  Synthetic
gtcacaagattccacattaat

SEQ ID NO: 20744 - DNA, 21 bp, Artificial Sequence
  Synthetic
tcacaagattccacattaatt

SEQ ID NO: 20745 - DNA, 21 bp, Artificial Sequence
  Synthetic
gtgttatcttcccaattaatg

SEQ ID NO: 20746 - DNA, 21 bp, Artificial Sequence
  Synthetic
tgtgttatcttcccaattaat

SEQ ID NO: 20747 - DNA, 21 bp, Artificial Sequence
  Synthetic
gcgatggccaaggtgtcggtg

SEQ ID NO: 20748 - DNA, 21 bp, Artificial Sequence
  Synthetic
tcggtgctgaacgtggcggtc

SEQ ID NO: 20749 - DNA, 21 bp, Artificial Sequence
  Synthetic
cggtgctgaacgtggcggtcc

SEQ ID NO: 20750 - DNA, 21 bp, Artificial Sequence
  Synthetic
gtgctgaacgtggcggtcctg

SEQ ID NO: 20751 - DNA, 21 bp, Artificial Sequence
  Synthetic
aacgtggcggtcctggagaac

SEQ ID NO: 20752 - DNA, 21 bp, Artificial Sequence
  Synthetic
gtggaaagggctcgggttctc

SEQ ID NO: 20753 - DNA, 21 bp, Artificial Sequence
  Synthetic
ggaaggggctgtggaaagggc

SEQ ID NO: 20754 - DNA, 21 bp, Artificial Sequence
  Synthetic
cgaaccggaaggggctgtgga

SEQ ID NO: 20755 - DNA, 21 bp, Artificial Sequence
  Synthetic
ctttccacagccccttccggt

SEQ ID NO: 20756 - DNA, 21 bp, Artificial Sequence
  Synthetic
atctcgaaccggaaggggctg

SEQ ID NO: 20757 - DNA, 21 bp, Artificial Sequence
  Synthetic
gatctcgaaccggaaggggct

SEQ ID NO: 20758 - DNA, 21 bp, Artificial Sequence
  Synthetic
cgaagctgatctcgaaccgga

SEQ ID NO: 20759 - DNA, 21 bp, Artificial Sequence
  Synthetic
tcgaagctgatctcgaaccgg

SEQ ID NO: 20760 - DNA, 21 bp, Artificial Sequence
  Synthetic
ccttccggttcgagatcagct

SEQ ID NO: 20761 - DNA, 21 bp, Artificial Sequence
  Synthetic
cactcgaagctgatctcgaac

SEQ ID NO: 20762 - DNA, 21 bp, Artificial Sequence
  Synthetic
gcactcgaagctgatctcgaa

SEQ ID NO: 20763 - DNA, 21 bp, Artificial Sequence
  Synthetic
tcactgcactcgaagctgatc

SEQ ID NO: 20764 - DNA, 21 bp, Artificial Sequence
  Synthetic
tcgagatcagcttcgagtgca

SEQ ID NO: 20765 - DNA, 21 bp, Artificial Sequence
  Synthetic
tccgccagggcttcactgcac

SEQ ID NO: 20766 - DNA, 21 bp, Artificial Sequence
  Synthetic
ttcgagtgcagtgaagccctg

SEQ ID NO: 20767 - DNA, 21 bp, Artificial Sequence
  Synthetic
gcagtgaagccctggcggacg

SEQ ID NO: 20768 - DNA, 21 bp, Artificial Sequence
  Synthetic
aggcccagcctcaccgtccgc

SEQ ID NO: 20769 - DNA, 21 bp, Artificial Sequence
  Synthetic
ctatatctttgcagacctgga

SEQ ID NO: 20770 - DNA, 21 bp, Artificial Sequence
  Synthetic
tatatctttgcagacctggag

SEQ ID NO: 20771 - DNA, 21 bp, Artificial Sequence
  Synthetic
agatcatttatgttggctcgg

SEQ ID NO: 20772 - DNA, 21 bp, Artificial Sequence
  Synthetic
atcatttatgttggctcggct

SEQ ID NO: 20773 - DNA, 21 bp, Artificial Sequence
  Synthetic
tttatgttggctcggctgaga

SEQ ID NO: 20774 - DNA, 21 bp, Artificial Sequence
  Synthetic
tatgttggctcggctgagagt

SEQ ID NO: 20775 - DNA, 21 bp, Artificial Sequence
  Synthetic
atgttggctcggctgagagtg

SEQ ID NO: 20776 - DNA, 21 bp, Artificial Sequence
  Synthetic
gatcaaattcctcactctcag

SEQ ID NO: 20777 - DNA, 21 bp, Artificial Sequence
  Synthetic
cagatcctagactcggtgctg

SEQ ID NO: 20778 - DNA, 21 bp, Artificial Sequence
  Synthetic
agggcccaccagcaccgagtc

SEQ ID NO: 20779 - DNA, 21 bp, Artificial Sequence
  Synthetic
ctggcacagggcccaccagca

SEQ ID NO: 20780 - DNA, 21 bp, Artificial Sequence
  Synthetic
tgctggtgggccctgtgccag

SEQ ID NO: 20781 - DNA, 21 bp, Artificial Sequence
  Synthetic
gctggtgggccctgtgccagc

SEQ ID NO: 20782 - DNA, 21 bp, Artificial Sequence
  Synthetic
ctggtgggccctgtgccagca

SEQ ID NO: 20783 - DNA, 21 bp, Artificial Sequence
  Synthetic
acatgtgtctccctgctggca

SEQ ID NO: 20784 - DNA, 21 bp, Artificial Sequence
  Synthetic
acacatgtttgtctttcaggt

SEQ ID NO: 20785 - DNA, 21 bp, Artificial Sequence
  Synthetic
atgggttgggggcgtcggcct

SEQ ID NO: 20786 - DNA, 21 bp, Artificial Sequence
  Synthetic
gatgggttgggggcgtcggcc

SEQ ID NO: 20787 - DNA, 21 bp, Artificial Sequence
  Synthetic
ctctgggatgagggatgggtt

SEQ ID NO: 20788 - DNA, 21 bp, Artificial Sequence
  Synthetic
cccccaacccatccctcatcc

SEQ ID NO: 20789 - DNA, 21 bp, Artificial Sequence
  Synthetic
tctctgggatgagggatgggt

SEQ ID NO: 20790 - DNA, 21 bp, Artificial Sequence
  Synthetic
gtctctgggatgagggatggg

SEQ ID NO: 20791 - DNA, 21 bp, Artificial Sequence
  Synthetic
catcagtctctgggatgaggg

SEQ ID NO: 20792 - DNA, 21 bp, Artificial Sequence
  Synthetic
acggcatcagtctctgggatg

SEQ ID NO: 20793 - DNA, 21 bp, Artificial Sequence
  Synthetic
cacggcatcagtctctgggat

SEQ ID NO: 20794 - DNA, 21 bp, Artificial Sequence
  Synthetic
cccacggcatcagtctctggg

SEQ ID NO: 20795 - DNA, 21 bp, Artificial Sequence
  Synthetic
ctcatcccagagactgatgcc

SEQ ID NO: 20796 - DNA, 21 bp, Artificial Sequence
  Synthetic
cacacccacggcatcagtctc

SEQ ID NO: 20797 - DNA, 21 bp, Artificial Sequence
  Synthetic
tcacacccacggcatcagtct

SEQ ID NO: 20798 - DNA, 21 bp, Artificial Sequence
  Synthetic
tccatggtaggtgcaggtgat

SEQ ID NO: 20799 - DNA, 21 bp, Artificial Sequence
  Synthetic
tcctcatcacctgcacctacc

SEQ ID NO: 20800 - DNA, 21 bp, Artificial Sequence
  Synthetic
tgtccatggtaggtgcaggtg

SEQ ID NO: 20801 - DNA, 21 bp, Artificial Sequence
  Synthetic
atcacctgcacctaccatgga

SEQ ID NO: 20802 - DNA, 21 bp, Artificial Sequence
  Synthetic
tcacctgcacctaccatggac

SEQ ID NO: 20803 - DNA, 21 bp, Artificial Sequence
  Synthetic
ctaccatggacaggagttcat

SEQ ID NO: 20804 - DNA, 21 bp, Artificial Sequence
  Synthetic
catggacaggagttcatccga

SEQ ID NO: 20805 - DNA, 21 bp, Artificial Sequence
  Synthetic
ttgacgtagtagcccactcgg

SEQ ID NO: 20806 - DNA, 21 bp, Artificial Sequence
  Synthetic
gttgttgacgtagtagcccac

SEQ ID NO: 20807 - DNA, 21 bp, Artificial Sequence
  Synthetic
gagtgggctactacgtcaaca

SEQ ID NO: 20808 - DNA, 21 bp, Artificial Sequence
  Synthetic
tcaacaacgagtacctcaacc

SEQ ID NO: 20809 - DNA, 21 bp, Artificial Sequence
  Synthetic
agtacctcaaccctgagctgc

SEQ ID NO: 20810 - DNA, 21 bp, Artificial Sequence
  Synthetic
tacctcaaccctgagctgcgt

SEQ ID NO: 20811 - DNA, 21 bp, Artificial Sequence
  Synthetic
gggttctcacgcagctcaggg

SEQ ID NO: 20812 - DNA, 21 bp, Artificial Sequence
  Synthetic
tgggcgggttctcacgcagct

SEQ ID NO: 20813 - DNA, 21 bp, Artificial Sequence
  Synthetic
gagctgcgtgagaacccgccc

SEQ ID NO: 20814 - DNA, 21 bp, Artificial Sequence
  Synthetic
gggagaaatctggcttcatgg

SEQ ID NO: 20815 - DNA, 21 bp, Artificial Sequence
  Synthetic
acctgggagaaatctggcttc

SEQ ID NO: 20816 - DNA, 21 bp, Artificial Sequence
  Synthetic
atgaagccagatttctcccag

SEQ ID NO: 20817 - DNA, 21 bp, Artificial Sequence
  Synthetic
tgaagccagatttctcccagg

SEQ ID NO: 20818 - DNA, 21 bp, Artificial Sequence
  Synthetic
gtggaaacaggccccacctgg

SEQ ID NO: 20819 - DNA, 21 bp, Artificial Sequence
  Synthetic
cctcttcctgccccagctcca

SEQ ID NO: 20820 - DNA, 21 bp, Artificial Sequence
  Synthetic
ctcttcctgccccagctccag

SEQ ID NO: 20821 - DNA, 21 bp, Artificial Sequence
  Synthetic
gccaagatgttccgctggagc

SEQ ID NO: 20822 - DNA, 21 bp, Artificial Sequence
  Synthetic
ggccaagatgttccgctggag

SEQ ID NO: 20823 - DNA, 21 bp, Artificial Sequence
  Synthetic
ttcgaggccaagatgttccgc

SEQ ID NO: 20824 - DNA, 21 bp, Artificial Sequence
  Synthetic
ctccagcggaacatcttggcc

SEQ ID NO: 20825 - DNA, 21 bp, Artificial Sequence
  Synthetic
gttcgaggccaagatgttccg

SEQ ID NO: 20826 - DNA, 21 bp, Artificial Sequence
  Synthetic
gaacatcttggcctcgaaccc

SEQ ID NO: 20827 - DNA, 21 bp, Artificial Sequence
  Synthetic
ggaagcgggtcacccgggggt

SEQ ID NO: 20828 - DNA, 21 bp, Artificial Sequence
  Synthetic
tgatatggaagcgggtcaccc

SEQ ID NO: 20829 - DNA, 21 bp, Artificial Sequence
  Synthetic
ttgatatggaagcgggtcacc

SEQ ID NO: 20830 - DNA, 21 bp, Artificial Sequence
  Synthetic
gttgatatggaagcgggtcac

SEQ ID NO: 20831 - DNA, 21 bp, Artificial Sequence
  Synthetic
ggtgacccgcttccatatcaa

SEQ ID NO: 20832 - DNA, 21 bp, Artificial Sequence
  Synthetic
gtgacccgcttccatatcaac

SEQ ID NO: 20833 - DNA, 21 bp, Artificial Sequence
  Synthetic
gttgtcccagttgatatggaa

SEQ ID NO: 20834 - DNA, 21 bp, Artificial Sequence
  Synthetic
atgttgttgtcccagttgata

SEQ ID NO: 20835 - DNA, 21 bp, Artificial Sequence
  Synthetic
catgttgttgtcccagttgat

SEQ ID NO: 20836 - DNA, 21 bp, Artificial Sequence
  Synthetic
ggacatggcggccaacatgta

SEQ ID NO: 20837 - DNA, 21 bp, Artificial Sequence
  Synthetic
tggcggccaacatgtaccggg

SEQ ID NO: 20838 - DNA, 21 bp, Artificial Sequence
  Synthetic
ggcggccaacatgtaccgggt

SEQ ID NO: 20839 - DNA, 21 bp, Artificial Sequence
  Synthetic
taattacagattatgtctact

SEQ ID NO: 20840 - DNA, 21 bp, Artificial Sequence
  Synthetic
attacagattatgtctacttt

SEQ ID NO: 20841 - DNA, 21 bp, Artificial Sequence
  Synthetic
ttattaggtatgggttgctgg

SEQ ID NO: 20842 - DNA, 21 bp, Artificial Sequence
  Synthetic
cttattaggtatgggttgctg

SEQ ID NO: 20843 - DNA, 21 bp, Artificial Sequence
  Synthetic
ttcttattaggtatgggttgc

SEQ ID NO: 20844 - DNA, 21 bp, Artificial Sequence
  Synthetic
ctccagcaacccatacctaat

SEQ ID NO: 20845 - DNA, 21 bp, Artificial Sequence
  Synthetic
cttcttattaggtatgggttg

SEQ ID NO: 20846 - DNA, 21 bp, Artificial Sequence
  Synthetic
cagcaacccatacctaataag

SEQ ID NO: 20847 - DNA, 21 bp, Artificial Sequence
  Synthetic
acccatacctaataagaagga

SEQ ID NO: 20848 - DNA, 21 bp, Artificial Sequence
  Synthetic
cttctatccttcttattaggt

SEQ ID NO: 20849 - DNA, 21 bp, Artificial Sequence
  Synthetic
catacctaataagaaggatag

SEQ ID NO: 20850 - DNA, 21 bp, Artificial Sequence
  Synthetic
gaacactcagtgtataccttg

SEQ ID NO: 20851 - DNA, 21 bp, Artificial Sequence
  Synthetic
ccacgttgccacttgcagtct

SEQ ID NO: 20852 - DNA, 21 bp, Artificial Sequence
  Synthetic
tcttagactgcaagtggcaac

SEQ ID NO: 20853 - DNA, 21 bp, Artificial Sequence
  Synthetic
cttagactgcaagtggcaacg

SEQ ID NO: 20854 - DNA, 21 bp, Artificial Sequence
  Synthetic
ctgcgagcattataagtgtgt

SEQ ID NO: 20855 - DNA, 21 bp, Artificial Sequence
  Synthetic
tctgcgagcattataagtgtg

SEQ ID NO: 20856 - DNA, 21 bp, Artificial Sequence
  Synthetic
aacttactagcatgcttatct

SEQ ID NO: 20857 - DNA, 21 bp, Artificial Sequence
  Synthetic
tttatttgtgtagaagaaatt

SEQ ID NO: 20858 - DNA, 21 bp, Artificial Sequence
  Synthetic
ttatttgtgtagaagaaattg

SEQ ID NO: 20859 - DNA, 21 bp, Artificial Sequence
  Synthetic
tttgtgtagaagaaattgagg

SEQ ID NO: 20860 - DNA, 21 bp, Artificial Sequence
  Synthetic
tagaagaaattgaggaagaat

SEQ ID NO: 20861 - DNA, 21 bp, Artificial Sequence
  Synthetic
aggaagaatctgaaacaacag

SEQ ID NO: 20862 - DNA, 21 bp, Artificial Sequence
  Synthetic
gaggctgacttgaccgataag

SEQ ID NO: 20863 - DNA, 21 bp, Artificial Sequence
  Synthetic
accgataagcagaaacatcag

SEQ ID NO: 20864 - DNA, 21 bp, Artificial Sequence
  Synthetic
gcagaaacatcagttgaaaca

SEQ ID NO: 20865 - DNA, 21 bp, Artificial Sequence
  Synthetic
cagaaacatcagttgaaacat

SEQ ID NO: 20866 - DNA, 21 bp, Artificial Sequence
  Synthetic
agaaacatcagttgaaacata

SEQ ID NO: 20867 - DNA, 21 bp, Artificial Sequence
  Synthetic
gattcatactggcgtgacaaa

SEQ ID NO: 20868 - DNA, 21 bp, Artificial Sequence
  Synthetic
ttacctgatatgtgttgcggg

SEQ ID NO: 20869 - DNA, 21 bp, Artificial Sequence
  Synthetic
tgcccgcaacacatatcaggt

SEQ ID NO: 20870 - DNA, 21 bp, Artificial Sequence
  Synthetic
agttcttacctgatatgtgtt

SEQ ID NO: 20871 - DNA, 21 bp, Artificial Sequence
  Synthetic
ggaaagtgcagtgttgccctt

SEQ ID NO: 20872 - DNA, 21 bp, Artificial Sequence
  Synthetic
agtgcagtgttgcccttctga

SEQ ID NO: 20873 - DNA, 21 bp, Artificial Sequence
  Synthetic
gtgttgcccttctgaatgaga

SEQ ID NO: 20874 - DNA, 21 bp, Artificial Sequence
  Synthetic
tactgattctgtctcattcag

SEQ ID NO: 20875 - DNA, 21 bp, Artificial Sequence
  Synthetic
caatactgattctgtctcatt

SEQ ID NO: 20876 - DNA, 21 bp, Artificial Sequence
  Synthetic
tcagtattgtcatatcttgat

SEQ ID NO: 20877 - DNA, 21 bp, Artificial Sequence
  Synthetic
cagtattgtcatatcttgata

SEQ ID NO: 20878 - DNA, 21 bp, Artificial Sequence
  Synthetic
caatgagtagaagaaggtatc

SEQ ID NO: 20879 - DNA, 21 bp, Artificial Sequence
  Synthetic
gggtcatagaccaatgagtag

SEQ ID NO: 20880 - DNA, 21 bp, Artificial Sequence
  Synthetic
gaggggtcatagaccaatgag

SEQ ID NO: 20881 - DNA, 21 bp, Artificial Sequence
  Synthetic
tcaatgaggggtcatagacca

SEQ ID NO: 20882 - DNA, 21 bp, Artificial Sequence
  Synthetic
tcattggtctatgacccctca

SEQ ID NO: 20883 - DNA, 21 bp, Artificial Sequence
  Synthetic
aaacactattagctgacaaag

SEQ ID NO: 20884 - DNA, 21 bp, Artificial Sequence
  Synthetic
tcaaacaatgacaggactcga

SEQ ID NO: 20885 - DNA, 21 bp, Artificial Sequence
  Synthetic
gccatcaaacaatgacaggac

SEQ ID NO: 20886 - DNA, 21 bp, Artificial Sequence
  Synthetic
cgcgatgccatcaaacaatga

SEQ ID NO: 20887 - DNA, 21 bp, Artificial Sequence
  Synthetic
tgtttgatggcatcgcgacag

SEQ ID NO: 20888 - DNA, 21 bp, Artificial Sequence
  Synthetic
tctttgaggactaggtagcct

SEQ ID NO: 20889 - DNA, 21 bp, Artificial Sequence
  Synthetic
ccacaggctacctagtcctca

SEQ ID NO: 20890 - DNA, 21 bp, Artificial Sequence
  Synthetic
ggctacctagtcctcaaagag

SEQ ID NO: 20891 - DNA, 21 bp, Artificial Sequence
  Synthetic
tacctttatgcccaactcttt

SEQ ID NO: 20892 - DNA, 21 bp, Artificial Sequence
  Synthetic
cctacctttatgcccaactct

SEQ ID NO: 20893 - DNA, 21 bp, Artificial Sequence
  Synthetic
tcaaagagttgggcataaagg

SEQ ID NO: 20894 - DNA, 21 bp, Artificial Sequence
  Synthetic
caaagagttgggcataaaggt

SEQ ID NO: 20895 - DNA, 21 bp, Artificial Sequence
  Synthetic
aggtaggaaagtacgtcgctt

SEQ ID NO: 20896 - DNA, 21 bp, Artificial Sequence
  Synthetic
agtacgtcgcttctgaagtgt

SEQ ID NO: 20897 - DNA, 21 bp, Artificial Sequence
  Synthetic
tacgtcgcttctgaagtgtgt

SEQ ID NO: 20898 - DNA, 21 bp, Artificial Sequence
  Synthetic
acgtcgcttctgaagtgtgtg

SEQ ID NO: 20899 - DNA, 21 bp, Artificial Sequence
  Synthetic
caatggactcctcacacactt

SEQ ID NO: 20900 - DNA, 21 bp, Artificial Sequence
  Synthetic
tgtgtgaggagtccattgctg

SEQ ID NO: 20901 - DNA, 21 bp, Artificial Sequence
  Synthetic
gtgtgaggagtccattgctgt

SEQ ID NO: 20902 - DNA, 21 bp, Artificial Sequence
  Synthetic
gagtccattgctgttggaacc

SEQ ID NO: 20903 - DNA, 21 bp, Artificial Sequence
  Synthetic
tgcttcacggttccaacagca

SEQ ID NO: 20904 - DNA, 21 bp, Artificial Sequence
  Synthetic
ttgctgttggaaccgtgaagc

SEQ ID NO: 20905 - DNA, 21 bp, Artificial Sequence
  Synthetic
gctgttggaaccgtgaagcac

SEQ ID NO: 20906 - DNA, 21 bp, Artificial Sequence
  Synthetic
ctgttggaaccgtgaagcacg

SEQ ID NO: 20907 - DNA, 21 bp, Artificial Sequence
  Synthetic
tgttggaaccgtgaagcacga

SEQ ID NO: 20908 - DNA, 21 bp, Artificial Sequence
  Synthetic
gttggaaccgtgaagcacgag

SEQ ID NO: 20909 - DNA, 21 bp, Artificial Sequence
  Synthetic
cacgaggggaatatcaaatac

SEQ ID NO: 20910 - DNA, 21 bp, Artificial Sequence
  Synthetic
aatatcaaatacgtgaacgac

SEQ ID NO: 20911 - DNA, 21 bp, Artificial Sequence
  Synthetic
tatcaaatacgtgaacgacgt

SEQ ID NO: 20912 - DNA, 21 bp, Artificial Sequence
  Synthetic
atcaaatacgtgaacgacgtg

SEQ ID NO: 20913 - DNA, 21 bp, Artificial Sequence
  Synthetic
aacgacgtgaggaacatcaca

SEQ ID NO: 20914 - DNA, 21 bp, Artificial Sequence
  Synthetic
aggaacatcacaaagaaaaat

SEQ ID NO: 20915 - DNA, 21 bp, Artificial Sequence
  Synthetic
gaacatcacaaagaaaaatgt

SEQ ID NO: 20916 - DNA, 21 bp, Artificial Sequence
  Synthetic
ctgtctctctctttcagattg

SEQ ID NO: 20917 - DNA, 21 bp, Artificial Sequence
  Synthetic
ctctctctttcagattgaaga

SEQ ID NO: 20918 - DNA, 21 bp, Artificial Sequence
  Synthetic
tctctctttcagattgaagaa

SEQ ID NO: 20919 - DNA, 21 bp, Artificial Sequence
  Synthetic
aaatgggccccattcttcaat

SEQ ID NO: 20920 - DNA, 21 bp, Artificial Sequence
  Synthetic
gcccatttgacttggtgattg

SEQ ID NO: 20921 - DNA, 21 bp, Artificial Sequence
  Synthetic
ttccgccaatcaccaagtcaa

SEQ ID NO: 20922 - DNA, 21 bp, Artificial Sequence
  Synthetic
cccatttgacttggtgattgg

SEQ ID NO: 20923 - DNA, 21 bp, Artificial Sequence
  Synthetic
tcacatttgagagatcgttgc

SEQ ID NO: 20924 - DNA, 21 bp, Artificial Sequence
  Synthetic
ccatgcaacgatctctcaaat

SEQ ID NO: 20925 - DNA, 21 bp, Artificial Sequence
  Synthetic
tctctcaaatgtgaatccagc

SEQ ID NO: 20926 - DNA, 21 bp, Artificial Sequence
  Synthetic
ttcctggctggattcacattt

SEQ ID NO: 20927 - DNA, 21 bp, Artificial Sequence
  Synthetic
ctctcaaatgtgaatccagcc

SEQ ID NO: 20928 - DNA, 21 bp, Artificial Sequence
  Synthetic
ctttcctggctggattcacat

SEQ ID NO: 20929 - DNA, 21 bp, Artificial Sequence
  Synthetic
caccatacaggcctttcctgg

SEQ ID NO: 20930 - DNA, 21 bp, Artificial Sequence
  Synthetic
cagccaggaaaggcctgtatg

SEQ ID NO: 20931 - DNA, 21 bp, Artificial Sequence
  Synthetic
agggtacaggccggctcttct

SEQ ID NO: 20932 - DNA, 21 bp, Artificial Sequence
  Synthetic
agcaggtggtaaaattcgaag

SEQ ID NO: 20933 - DNA, 21 bp, Artificial Sequence
  Synthetic
ttcagcaggtggtaaaattcg

SEQ ID NO: 20934 - DNA, 21 bp, Artificial Sequence
  Synthetic
taattcagcaggtggtaaaat

SEQ ID NO: 20935 - DNA, 21 bp, Artificial Sequence
  Synthetic
ctgctgaattactcacgcccc

SEQ ID NO: 20936 - DNA, 21 bp, Artificial Sequence
  Synthetic
tgctgaattactcacgcccca

SEQ ID NO: 20937 - DNA, 21 bp, Artificial Sequence
  Synthetic
ctgaattactcacgccccaag

SEQ ID NO: 20938 - DNA, 21 bp, Artificial Sequence
  Synthetic
ggtcatcaccctccttggggc

SEQ ID NO: 20939 - DNA, 21 bp, Artificial Sequence
  Synthetic
acggccggtcatcaccctcct

SEQ ID NO: 20940 - DNA, 21 bp, Artificial Sequence
  Synthetic
aacggccggtcatcaccctcc

SEQ ID NO: 20941 - DNA, 21 bp, Artificial Sequence
  Synthetic
gggtgatgaccggccgttctt

SEQ ID NO: 20942 - DNA, 21 bp, Artificial Sequence
  Synthetic
accggccgttcttctggatgt

SEQ ID NO: 20943 - DNA, 21 bp, Artificial Sequence
  Synthetic
cggccgttcttctggatgttt

SEQ ID NO: 20944 - DNA, 21 bp, Artificial Sequence
  Synthetic
acaacattctcaaacatccag

SEQ ID NO: 20945 - DNA, 21 bp, Artificial Sequence
  Synthetic
gctacaacattctcaaacatc

SEQ ID NO: 20946 - DNA, 21 bp, Artificial Sequence
  Synthetic
atgtttgagaatgttgtagcc

SEQ ID NO: 20947 - DNA, 21 bp, Artificial Sequence
  Synthetic
gtagccatgaaggttggcgac

SEQ ID NO: 20948 - DNA, 21 bp, Artificial Sequence
  Synthetic
agccatgaaggttggcgacaa

SEQ ID NO: 20949 - DNA, 21 bp, Artificial Sequence
  Synthetic
gccatgaaggttggcgacaag

SEQ ID NO: 20950 - DNA, 21 bp, Artificial Sequence
  Synthetic
cttacagaacaggcctcgccc

SEQ ID NO: 20951 - DNA, 21 bp, Artificial Sequence
  Synthetic
cccgcgtcgatgttgcgctta

SEQ ID NO: 20952 - DNA, 21 bp, Artificial Sequence
  Synthetic
ttctgtaagcgcaacatcgac

SEQ ID NO: 20953 - DNA, 21 bp, Artificial Sequence
  Synthetic
tctgtaagcgcaacatcgacg

SEQ ID NO: 20954 - DNA, 21 bp, Artificial Sequence
  Synthetic
ctgtaagcgcaacatcgacgc

SEQ ID NO: 20955 - DNA, 21 bp, Artificial Sequence
  Synthetic
tgtaagcgcaacatcgacgcg

SEQ ID NO: 20956 - DNA, 21 bp, Artificial Sequence
  Synthetic
gtaagcgcaacatcgacgcgg

SEQ ID NO: 20957 - DNA, 21 bp, Artificial Sequence
  Synthetic
tcgacgcgggggagatggtca

SEQ ID NO: 20958 - DNA, 21 bp, Artificial Sequence
  Synthetic
acaccgagcggatgacaatgc

SEQ ID NO: 20959 - DNA, 21 bp, Artificial Sequence
  Synthetic
ccgcttgtcagtcaacaccga

SEQ ID NO: 20960 - DNA, 21 bp, Artificial Sequence
  Synthetic
ccgctcggtgttgactgacaa

SEQ ID NO: 20961 - DNA, 21 bp, Artificial Sequence
  Synthetic
cgctcggtgttgactgacaag

SEQ ID NO: 20962 - DNA, 21 bp, Artificial Sequence
  Synthetic
gctcggtgttgactgacaagc

SEQ ID NO: 20963 - DNA, 21 bp, Artificial Sequence
  Synthetic
tctcccgcttgtcagtcaaca

SEQ ID NO: 20964 - DNA, 21 bp, Artificial Sequence
  Synthetic
tcggtgttgactgacaagcgg

SEQ ID NO: 20965 - DNA, 21 bp, Artificial Sequence
  Synthetic
acaagcgggagaagttctacg

SEQ ID NO: 20966 - DNA, 21 bp, Artificial Sequence
  Synthetic
caagcgggagaagttctacga

SEQ ID NO: 20967 - DNA, 21 bp, Artificial Sequence
  Synthetic
aagcgggagaagttctacgat

SEQ ID NO: 20968 - DNA, 21 bp, Artificial Sequence
  Synthetic
gagaagttctacgatgggaag

SEQ ID NO: 20969 - DNA, 21 bp, Artificial Sequence
  Synthetic
tgggagcccaccttcccatcg

SEQ ID NO: 20970 - DNA, 21 bp, Artificial Sequence
  Synthetic
ccacctcatccctgcagggca

SEQ ID NO: 20971 - DNA, 21 bp, Artificial Sequence
  Synthetic
atcgggtgctatatgttccgc

SEQ ID NO: 20972 - DNA, 21 bp, Artificial Sequence
  Synthetic
actacatcaaagtcatccatg

SEQ ID NO: 20973 - DNA, 21 bp, Artificial Sequence
  Synthetic
cactacatcaaagtcatccat

SEQ ID NO: 20974 - DNA, 21 bp, Artificial Sequence
  Synthetic
cgcatggatgactttgatgta

SEQ ID NO: 20975 - DNA, 21 bp, Artificial Sequence
  Synthetic
ctcacaggagtggttgatgaa

SEQ ID NO: 20976 - DNA, 21 bp, Artificial Sequence
  Synthetic
cccgcttcatcaaccactcct

SEQ ID NO: 20977 - DNA, 21 bp, Artificial Sequence
  Synthetic
ttgggctcacaggagtggttg

SEQ ID NO: 20978 - DNA, 21 bp, Artificial Sequence
  Synthetic
gagagaagcagttgggctcac

SEQ ID NO: 20979 - DNA, 21 bp, Artificial Sequence
  Synthetic
cgagagaagcagttgggctca

SEQ ID NO: 20980 - DNA, 21 bp, Artificial Sequence
  Synthetic
ctgtgagcccaactgcttctc

SEQ ID NO: 20981 - DNA, 21 bp, Artificial Sequence
  Synthetic
tggatgacccgagagaagcag

SEQ ID NO: 20982 - DNA, 21 bp, Artificial Sequence
  Synthetic
tgcttctctcgggtcatccac

SEQ ID NO: 20983 - DNA, 21 bp, Artificial Sequence
  Synthetic
gcttctctcgggtcatccacg

SEQ ID NO: 20984 - DNA, 21 bp, Artificial Sequence
  Synthetic
ccctccacgtggatgacccga

SEQ ID NO: 20985 - DNA, 21 bp, Artificial Sequence
  Synthetic
ttctctcgggtcatccacgtg

SEQ ID NO: 20986 - DNA, 21 bp, Artificial Sequence
  Synthetic
ggccctccacgtggatgaccc

SEQ ID NO: 20987 - DNA, 21 bp, Artificial Sequence
  Synthetic
ctggccctccacgtggatgac

SEQ ID NO: 20988 - DNA, 21 bp, Artificial Sequence
  Synthetic
cgggtcatccacgtggagggc

SEQ ID NO: 20989 - DNA, 21 bp, Artificial Sequence
  Synthetic
aatgtgtttctggccctccac

SEQ ID NO: 20990 - DNA, 21 bp, Artificial Sequence
  Synthetic
ccacgcaggatgcggcgcagg

SEQ ID NO: 20991 - DNA, 21 bp, Artificial Sequence
  Synthetic
ctcaccacgcaggatgcggcg

SEQ ID NO: 20992 - DNA, 21 bp, Artificial Sequence
  Synthetic
ccctgcgccgcatcctgcgtg

SEQ ID NO: 20993 - DNA, 21 bp, Artificial Sequence
  Synthetic
ctgcgccgcatcctgcgtggt

SEQ ID NO: 20994 - DNA, 21 bp, Artificial Sequence
  Synthetic
tgcgccgcatcctgcgtggtg

SEQ ID NO: 20995 - DNA, 21 bp, Artificial Sequence
  Synthetic
gtaggtgagctcctcaccacg

SEQ ID NO: 20996 - DNA, 21 bp, Artificial Sequence
  Synthetic
atggggaacttgtagtcgtag

SEQ ID NO: 20997 - DNA, 21 bp, Artificial Sequence
  Synthetic
agaagatgcgcatggctcgat

SEQ ID NO: 20998 - DNA, 21 bp, Artificial Sequence
  Synthetic
catggctcgatgtggacactg

SEQ ID NO: 20999 - DNA, 21 bp, Artificial Sequence
  Synthetic
atggctcgatgtggacactgt

SEQ ID NO: 21000 - DNA, 21 bp, Artificial Sequence
  Synthetic
gcagccccgacagtgtccaca

SEQ ID NO: 21001 - DNA, 21 bp, Artificial Sequence
  Synthetic
tgtcggggctgcctacgtgtg

SEQ ID NO: 21002 - DNA, 21 bp, Artificial Sequence
  Synthetic
gctgcctacgtgtgcaggact

SEQ ID NO: 21003 - DNA, 21 bp, Artificial Sequence
  Synthetic
ggcttgtctaggcagttgaca

SEQ ID NO: 21004 - DNA, 21 bp, Artificial Sequence
  Synthetic
actgcctagacaagcccaagt

SEQ ID NO: 21005 - DNA, 21 bp, Artificial Sequence
  Synthetic
ctgcctagacaagcccaagtt

SEQ ID NO: 21006 - DNA, 21 bp, Artificial Sequence
  Synthetic
tgcctagacaagcccaagttt

SEQ ID NO: 21007 - DNA, 21 bp, Artificial Sequence
  Synthetic
ttggtgttagggcccccaaac

SEQ ID NO: 21008 - DNA, 21 bp, Artificial Sequence
  Synthetic
aagtttgggggccctaacacc

SEQ ID NO: 21009 - DNA, 21 bp, Artificial Sequence
  Synthetic
cacagcactgcttcttggtgt

SEQ ID NO: 21010 - DNA, 21 bp, Artificial Sequence
  Synthetic
caccaagaagcagtgctgtgt

SEQ ID NO: 21011 - DNA, 21 bp, Artificial Sequence
  Synthetic
gctgctcccctccccagatac

SEQ ID NO: 21012 - DNA, 21 bp, Artificial Sequence
  Synthetic
tttgtcacacttccggtatct

SEQ ID NO: 21013 - DNA, 21 bp, Artificial Sequence
  Synthetic
gctgcaaattctgccacgtct

SEQ ID NO: 21014 - DNA, 21 bp, Artificial Sequence
  Synthetic
cctttgcgtccacagacgtgg

SEQ ID NO: 21015 - DNA, 21 bp, Artificial Sequence
  Synthetic
acgtctgtggacgcaaaggtc

SEQ ID NO: 21016 - DNA, 21 bp, Artificial Sequence
  Synthetic
caaaggtcgtggatccaaggt

SEQ ID NO: 21017 - DNA, 21 bp, Artificial Sequence
  Synthetic
ctccacatccaacagcacctc

SEQ ID NO: 21018 - DNA, 21 bp, Artificial Sequence
  Synthetic
tccacatccaacagcacctcc

SEQ ID NO: 21019 - DNA, 21 bp, Artificial Sequence
  Synthetic
tccaacagcacctcctggagt

SEQ ID NO: 21020 - DNA, 21 bp, Artificial Sequence
  Synthetic
tggcggcagcgctcgcactcc

SEQ ID NO: 21021 - DNA, 21 bp, Artificial Sequence
  Synthetic
atggcggcagcgctcgcactc

SEQ ID NO: 21022 - DNA, 21 bp, Artificial Sequence
  Synthetic
catgcataccacccggcctgt

SEQ ID NO: 21023 - DNA, 21 bp, Artificial Sequence
  Synthetic
atgcataccacccggcctgtc

SEQ ID NO: 21024 - DNA, 21 bp, Artificial Sequence
  Synthetic
gatagctgggccccagacagg

SEQ ID NO: 21025 - DNA, 21 bp, Artificial Sequence
  Synthetic
tctggggcccagctatccaac

SEQ ID NO: 21026 - DNA, 21 bp, Artificial Sequence
  Synthetic
cgcgtggcccgggttggatag

SEQ ID NO: 21027 - DNA, 21 bp, Artificial Sequence
  Synthetic
gccgtttgcgcgtggcccggg

SEQ ID NO: 21028 - DNA, 21 bp, Artificial Sequence
  Synthetic
gtggcgccgtttgcgcgtggc

SEQ ID NO: 21029 - DNA, 21 bp, Artificial Sequence
  Synthetic
ggccacgcgcaaacggcgcca

SEQ ID NO: 21030 - DNA, 21 bp, Artificial Sequence
  Synthetic
acgcgcaaacggcgccactgg

SEQ ID NO: 21031 - DNA, 21 bp, Artificial Sequence
  Synthetic
gcgcaaacggcgccactgggt

SEQ ID NO: 21032 - DNA, 21 bp, Artificial Sequence
  Synthetic
gcacacaggctgaacagatct

SEQ ID NO: 21033 - DNA, 21 bp, Artificial Sequence
  Synthetic
cgcacacaggctgaacagatc

SEQ ID NO: 21034 - DNA, 21 bp, Artificial Sequence
  Synthetic
gcgcacacaggctgaacagat

SEQ ID NO: 21035 - DNA, 21 bp, Artificial Sequence
  Synthetic
agctcttacagcgcacacagg

SEQ ID NO: 21036 - DNA, 21 bp, Artificial Sequence
  Synthetic
gcccgatctgtacacgctgct

SEQ ID NO: 21037 - DNA, 21 bp, Artificial Sequence
  Synthetic
cttcatagcagcgtgtacaga

SEQ ID NO: 21038 - DNA, 21 bp, Artificial Sequence
  Synthetic
gctgctatgaagacaacgact

SEQ ID NO: 21039 - DNA, 21 bp, Artificial Sequence
  Synthetic
tgctatgaagacaacgactat

SEQ ID NO: 21040 - DNA, 21 bp, Artificial Sequence
  Synthetic
gcagtgcgcacagtgcgatca

SEQ ID NO: 21041 - DNA, 21 bp, Artificial Sequence
  Synthetic
atcactgggtgcatgccaagt

SEQ ID NO: 21042 - DNA, 21 bp, Artificial Sequence
  Synthetic
cactgggtgcatgccaagtgc

SEQ ID NO: 21043 - DNA, 21 bp, Artificial Sequence
  Synthetic
actgggtgcatgccaagtgcg

SEQ ID NO: 21044 - DNA, 21 bp, Artificial Sequence
  Synthetic
ccaagtgcgaggggctctcag

SEQ ID NO: 21045 - DNA, 21 bp, Artificial Sequence
  Synthetic
tggctatcctagatgaagact

SEQ ID NO: 21046 - DNA, 21 bp, Artificial Sequence
  Synthetic
aaggatctcgtagtcttcatc

SEQ ID NO: 21047 - DNA, 21 bp, Artificial Sequence
  Synthetic
atgaagactacgagatccttt

SEQ ID NO: 21048 - DNA, 21 bp, Artificial Sequence
  Synthetic
caccgagtctggcagtcctga

SEQ ID NO: 21049 - DNA, 21 bp, Artificial Sequence
  Synthetic
acagcaccgagtctggcagtc

SEQ ID NO: 21050 - DNA, 21 bp, Artificial Sequence
  Synthetic
cagactcggtgctgtacacct

SEQ ID NO: 21051 - DNA, 21 bp, Artificial Sequence
  Synthetic
acggtccgcaggtgtacagca

SEQ ID NO: 21052 - DNA, 21 bp, Artificial Sequence
  Synthetic
tgtacacctgcggaccgtgtg

SEQ ID NO: 21053 - DNA, 21 bp, Artificial Sequence
  Synthetic
gtacacctgcggaccgtgtgc

SEQ ID NO: 21054 - DNA, 21 bp, Artificial Sequence
  Synthetic
cctaggtctcccatccatggc

SEQ ID NO: 21055 - DNA, 21 bp, Artificial Sequence
  Synthetic
cttacagaaaagaccccggcc

SEQ ID NO: 21056 - DNA, 21 bp, Artificial Sequence
  Synthetic
cctgcatcaatgtttctctta

SEQ ID NO: 21057 - DNA, 21 bp, Artificial Sequence
  Synthetic
gtaagagaaacattgatgcag

SEQ ID NO: 21058 - DNA, 21 bp, Artificial Sequence
  Synthetic
ttgatgcaggtgagatggtga

SEQ ID NO: 21059 - DNA, 21 bp, Artificial Sequence
  Synthetic
ccgcttgtcagtctggatgga

SEQ ID NO: 21060 - DNA, 21 bp, Artificial Sequence
  Synthetic
ccgctccatccagactgacaa

SEQ ID NO: 21061 - DNA, 21 bp, Artificial Sequence
  Synthetic
cgctccatccagactgacaag

SEQ ID NO: 21062 - DNA, 21 bp, Artificial Sequence
  Synthetic
gctccatccagactgacaagc

SEQ ID NO: 21063 - DNA, 21 bp, Artificial Sequence
  Synthetic
tttcccgcttgtcagtctgga

SEQ ID NO: 21064 - DNA, 21 bp, Artificial Sequence
  Synthetic
gggcattggttgctatatgtt

SEQ ID NO: 21065 - DNA, 21 bp, Artificial Sequence
  Synthetic
atatgttccgaattgatgact

SEQ ID NO: 21066 - DNA, 21 bp, Artificial Sequence
  Synthetic
actacctctgagtcatcaatt

SEQ ID NO: 21067 - DNA, 21 bp, Artificial Sequence
  Synthetic
cactacctctgagtcatcaat

SEQ ID NO: 21068 - DNA, 21 bp, Artificial Sequence
  Synthetic
cgaattgatgactcagaggta

SEQ ID NO: 21069 - DNA, 21 bp, Artificial Sequence
  Synthetic
gcatggtggcatccactacct

SEQ ID NO: 21070 - DNA, 21 bp, Artificial Sequence
  Synthetic
aggtagtggatgccaccatgc

SEQ ID NO: 21071 - DNA, 21 bp, Artificial Sequence
  Synthetic
ggtagtggatgccaccatgca

SEQ ID NO: 21072 - DNA, 21 bp, Artificial Sequence
  Synthetic
cacgcttcatcaatcactcgt

SEQ ID NO: 21073 - DNA, 21 bp, Artificial Sequence
  Synthetic
ttaggctcacacgagtgattg

SEQ ID NO: 21074 - DNA, 21 bp, Artificial Sequence
  Synthetic
gagaatagcagttaggctcac

SEQ ID NO: 21075 - DNA, 21 bp, Artificial Sequence
  Synthetic
gtgtgagcctaactgctattc

SEQ ID NO: 21076 - DNA, 21 bp, Artificial Sequence
  Synthetic
attctcgggtcatcaatattg

SEQ ID NO: 21077 - DNA, 21 bp, Artificial Sequence
  Synthetic
gcccatcaatattgatgaccc

SEQ ID NO: 21078 - DNA, 21 bp, Artificial Sequence
  Synthetic
ctgcccatcaatattgatgac

SEQ ID NO: 21079 - DNA, 21 bp, Artificial Sequence
  Synthetic
cgggtcatcaatattgatggg

SEQ ID NO: 21080 - DNA, 21 bp, Artificial Sequence
  Synthetic
ctttgccatgcgtaagatcta

SEQ ID NO: 21081 - DNA, 21 bp, Artificial Sequence
  Synthetic
ttgccatgcgtaagatctacc

SEQ ID NO: 21082 - DNA, 21 bp, Artificial Sequence
  Synthetic
tgccatgcgtaagatctaccg

SEQ ID NO: 21083 - DNA, 21 bp, Artificial Sequence
  Synthetic
ccatgcgtaagatctaccgag

SEQ ID NO: 21084 - DNA, 21 bp, Artificial Sequence
  Synthetic
atgcgtaagatctaccgagga

SEQ ID NO: 21085 - DNA, 21 bp, Artificial Sequence
  Synthetic
tgcgtaagatctaccgaggag

SEQ ID NO: 21086 - DNA, 21 bp, Artificial Sequence
  Synthetic
atggggaacttatagtcgtaa

SEQ ID NO: 21087 - DNA, 21 bp, Artificial Sequence
  Synthetic
ccagtaaagaaaggacgtcga

SEQ ID NO: 21088 - DNA, 21 bp, Artificial Sequence
  Synthetic
aaggacgtcgatcgaggcggt

SEQ ID NO: 21089 - DNA, 21 bp, Artificial Sequence
  Synthetic
agtgtcccggctgccaggtgc

SEQ ID NO: 21090 - DNA, 21 bp, Artificial Sequence
  Synthetic
tgtcccggctgccaggtgcct

SEQ ID NO: 21091 - DNA, 21 bp, Artificial Sequence
  Synthetic
agtcctcaggcacctggcagc

SEQ ID NO: 21092 - DNA, 21 bp, Artificial Sequence
  Synthetic
cagtcctcaggcacctggcag

SEQ ID NO: 21093 - DNA, 21 bp, Artificial Sequence
  Synthetic
tttatattgcgaccaccaaac

SEQ ID NO: 21094 - DNA, 21 bp, Artificial Sequence
  Synthetic
aagtttggtggtcgcaatata

SEQ ID NO: 21095 - DNA, 21 bp, Artificial Sequence
  Synthetic
tttcctaggatgagaaaatgt

SEQ ID NO: 21096 - DNA, 21 bp, Artificial Sequence
  Synthetic
taacatttgtcacagagaggg

SEQ ID NO: 21097 - DNA, 21 bp, Artificial Sequence
  Synthetic
catcataacatttgtcacaga

SEQ ID NO: 21098 - DNA, 21 bp, Artificial Sequence
  Synthetic
atcatcataacatttgtcaca

SEQ ID NO: 21099 - DNA, 21 bp, Artificial Sequence
  Synthetic
tcatcatcataacatttgtca

SEQ ID NO: 21100 - DNA, 21 bp, Artificial Sequence
  Synthetic
aatgttatgatgatgatgact

SEQ ID NO: 21101 - DNA, 21 bp, Artificial Sequence
  Synthetic
tgttatgatgatgatgactat

SEQ ID NO: 21102 - DNA, 21 bp, Artificial Sequence
  Synthetic
atgagagtaagatgatgcaat

SEQ ID NO: 21103 - DNA, 21 bp, Artificial Sequence
  Synthetic
tgagagtaagatgatgcaatg

SEQ ID NO: 21104 - DNA, 21 bp, Artificial Sequence
  Synthetic
gcaatgtggaaagtgtgatcg

SEQ ID NO: 21105 - DNA, 21 bp, Artificial Sequence
  Synthetic
atcgctgggtccattccaaat

SEQ ID NO: 21106 - DNA, 21 bp, Artificial Sequence
  Synthetic
cgctgggtccattccaaatgt

SEQ ID NO: 21107 - DNA, 21 bp, Artificial Sequence
  Synthetic
tgaaagattctcacatttgga

SEQ ID NO: 21108 - DNA, 21 bp, Artificial Sequence
  Synthetic
tacctgaaagattctcacatt

SEQ ID NO: 21109 - DNA, 21 bp, Artificial Sequence
  Synthetic
gtacctgaaagattctcacat

SEQ ID NO: 21110 - DNA, 21 bp, Artificial Sequence
  Synthetic
agaatctcatacatctcatct

SEQ ID NO: 21111 - DNA, 21 bp, Artificial Sequence
  Synthetic
atgagattctatctaatctgc

SEQ ID NO: 21112 - DNA, 21 bp, Artificial Sequence
  Synthetic
cacactttctggcagattaga

SEQ ID NO: 21113 - DNA, 21 bp, Artificial Sequence
  Synthetic
gaaagtgtggcctacacttgt

SEQ ID NO: 21114 - DNA, 21 bp, Artificial Sequence
  Synthetic
cctacacttgtgtgaactgta

SEQ ID NO: 21115 - DNA, 21 bp, Artificial Sequence
  Synthetic
gttgcaaattctgtcacgttt

SEQ ID NO: 21116 - DNA, 21 bp, Artificial Sequence
  Synthetic
ttgcaaattctgtcacgtttg

SEQ ID NO: 21117 - DNA, 21 bp, Artificial Sequence
  Synthetic
tgttgccttccacaaacgtga

SEQ ID NO: 21118 - DNA, 21 bp, Artificial Sequence
  Synthetic
gctgctggagtgtaataagtg

SEQ ID NO: 21119 - DNA, 21 bp, Artificial Sequence
  Synthetic
agtgccgaaacagctatcacc

SEQ ID NO: 21120 - DNA, 21 bp, Artificial Sequence
  Synthetic
aacagctatcaccctgagtgc

SEQ ID NO: 21121 - DNA, 21 bp, Artificial Sequence
  Synthetic
acagctatcaccctgagtgcc

SEQ ID NO: 21122 - DNA, 21 bp, Artificial Sequence
  Synthetic
ggtagtttggtcccaggcact

SEQ ID NO: 21123 - DNA, 21 bp, Artificial Sequence
  Synthetic
aactaccccaccaaacccaca

SEQ ID NO: 21124 - DNA, 21 bp, Artificial Sequence
  Synthetic
taccccaccaaacccacaaag

SEQ ID NO: 21125 - DNA, 21 bp, Artificial Sequence
  Synthetic
tcttcttctttgtgggtttgg

SEQ ID NO: 21126 - DNA, 21 bp, Artificial Sequence
  Synthetic
ttcttcttctttgtgggtttg

SEQ ID NO: 21127 - DNA, 21 bp, Artificial Sequence
  Synthetic
cccaccaaacccacaaagaag

SEQ ID NO: 21128 - DNA, 21 bp, Artificial Sequence
  Synthetic
acccacaaagaagaagaaagt

SEQ ID NO: 21129 - DNA, 21 bp, Artificial Sequence
  Synthetic
acccagactttcttcttcttt

SEQ ID NO: 21130 - DNA, 21 bp, Artificial Sequence
  Synthetic
acaaagaagaagaaagtctgg

SEQ ID NO: 21131 - DNA, 21 bp, Artificial Sequence
  Synthetic
cgaacacacttggtacagatc

SEQ ID NO: 21132 - DNA, 21 bp, Artificial Sequence
  Synthetic
tcaaagagagacagcacccgg

SEQ ID NO: 21133 - DNA, 21 bp, Artificial Sequence
  Synthetic
tccatcaaagagagacagcac

SEQ ID NO: 21134 - DNA, 21 bp, Artificial Sequence
  Synthetic
tccgggtgctgtctctctttg

SEQ ID NO: 21135 - DNA, 21 bp, Artificial Sequence
  Synthetic
ccgggtgctgtctctctttga

SEQ ID NO: 21136 - DNA, 21 bp, Artificial Sequence
  Synthetic
acctgtagcgattccatcaaa

SEQ ID NO: 21137 - DNA, 21 bp, Artificial Sequence
  Synthetic
tcacctgtagcgattccatca

SEQ ID NO: 21138 - DNA, 21 bp, Artificial Sequence
  Synthetic
tctttgatggaatcgctacag

SEQ ID NO: 21139 - DNA, 21 bp, Artificial Sequence
  Synthetic
tttgatggaatcgctacaggt

SEQ ID NO: 21140 - DNA, 21 bp, Artificial Sequence
  Synthetic
gctggtgcagggctcctggtg

SEQ ID NO: 21141 - DNA, 21 bp, Artificial Sequence
  Synthetic
ggtgcagggctcctggtgctg

SEQ ID NO: 21142 - DNA, 21 bp, Artificial Sequence
  Synthetic
gggctcctggtgctgaaggac

SEQ ID NO: 21143 - DNA, 21 bp, Artificial Sequence
  Synthetic
atgcccaagtccttcagcacc

SEQ ID NO: 21144 - DNA, 21 bp, Artificial Sequence
  Synthetic
aatgcccaagtccttcagcac

SEQ ID NO: 21145 - DNA, 21 bp, Artificial Sequence
  Synthetic
ctgaaggacttgggcattcag

SEQ ID NO: 21146 - DNA, 21 bp, Artificial Sequence
  Synthetic
cgaggcaatgtagcggtccac

SEQ ID NO: 21147 - DNA, 21 bp, Artificial Sequence
  Synthetic
caggtggaccgctacattgcc

SEQ ID NO: 21148 - DNA, 21 bp, Artificial Sequence
  Synthetic
aggtggaccgctacattgcct

SEQ ID NO: 21149 - DNA, 21 bp, Artificial Sequence
  Synthetic
gctacattgcctcggaggtgt

SEQ ID NO: 21150 - DNA, 21 bp, Artificial Sequence
  Synthetic
tacattgcctcggaggtgtgt

SEQ ID NO: 21151 - DNA, 21 bp, Artificial Sequence
  Synthetic
tgatggagtcctcacacacct

SEQ ID NO: 21152 - DNA, 21 bp, Artificial Sequence
  Synthetic
gtgtgtgaggactccatcacg

SEQ ID NO: 21153 - DNA, 21 bp, Artificial Sequence
  Synthetic
gccgcaccatgcccaccgtga

SEQ ID NO: 21154 - DNA, 21 bp, Artificial Sequence
  Synthetic
tgccgcaccatgcccaccgtg

SEQ ID NO: 21155 - DNA, 21 bp, Artificial Sequence
  Synthetic
acggtgggcatggtgcggcac

SEQ ID NO: 21156 - DNA, 21 bp, Artificial Sequence
  Synthetic
cggtgggcatggtgcggcacc

SEQ ID NO: 21157 - DNA, 21 bp, Artificial Sequence
  Synthetic
ggtgggcatggtgcggcacca

SEQ ID NO: 21158 - DNA, 21 bp, Artificial Sequence
  Synthetic
gtgggcatggtgcggcaccag

SEQ ID NO: 21159 - DNA, 21 bp, Artificial Sequence
  Synthetic
accaggggaagatcatgtacg

SEQ ID NO: 21160 - DNA, 21 bp, Artificial Sequence
  Synthetic
ccaggggaagatcatgtacgt

SEQ ID NO: 21161 - DNA, 21 bp, Artificial Sequence
  Synthetic
caggggaagatcatgtacgtc

SEQ ID NO: 21162 - DNA, 21 bp, Artificial Sequence
  Synthetic
ggggacgtccgcagcgtcaca

SEQ ID NO: 21163 - DNA, 21 bp, Artificial Sequence
  Synthetic
tacatgcttctgtgtgacgct

SEQ ID NO: 21164 - DNA, 21 bp, Artificial Sequence
  Synthetic
tgcctttatcctcccagatcc

SEQ ID NO: 21165 - DNA, 21 bp, Artificial Sequence
  Synthetic
tttatcctcccagatccagga

SEQ ID NO: 21166 - DNA, 21 bp, Artificial Sequence
  Synthetic
ttatcctcccagatccaggag

SEQ ID NO: 21167 - DNA, 21 bp, Artificial Sequence
  Synthetic
atgggccccactcctggatct

SEQ ID NO: 21168 - DNA, 21 bp, Artificial Sequence
  Synthetic
aatgggccccactcctggatc

SEQ ID NO: 21169 - DNA, 21 bp, Artificial Sequence
  Synthetic
gaatgggccccactcctggat

SEQ ID NO: 21170 - DNA, 21 bp, Artificial Sequence
  Synthetic
cagatcgaatgggccccactc

SEQ ID NO: 21171 - DNA, 21 bp, Artificial Sequence
  Synthetic
ggggcccattcgatctggtga

SEQ ID NO: 21172 - DNA, 21 bp, Artificial Sequence
  Synthetic
gggcccattcgatctggtgat

SEQ ID NO: 21173 - DNA, 21 bp, Artificial Sequence
  Synthetic
ggcccattcgatctggtgatt

SEQ ID NO: 21174 - DNA, 21 bp, Artificial Sequence
  Synthetic
tgcccccaatcaccagatcga

SEQ ID NO: 21175 - DNA, 21 bp, Artificial Sequence
  Synthetic
ggactgcccccaatcaccaga

SEQ ID NO: 21176 - DNA, 21 bp, Artificial Sequence
  Synthetic
tgacgatggagaggtcattgc

SEQ ID NO: 21177 - DNA, 21 bp, Artificial Sequence
  Synthetic
ttgacgatggagaggtcattg

SEQ ID NO: 21178 - DNA, 21 bp, Artificial Sequence
  Synthetic
ttgcgagcagggttgacgatg

SEQ ID NO: 21179 - DNA, 21 bp, Artificial Sequence
  Synthetic
ccttgcgagcagggttgacga

SEQ ID NO: 21180 - DNA, 21 bp, Artificial Sequence
  Synthetic
cccttgcgagcagggttgacg

SEQ ID NO: 21181 - DNA, 21 bp, Artificial Sequence
  Synthetic
tccatcgtcaaccctgctcgc

SEQ ID NO: 21182 - DNA, 21 bp, Artificial Sequence
  Synthetic
taccgtagaggcccttgcgag

SEQ ID NO: 21183 - DNA, 21 bp, Artificial Sequence
  Synthetic
gtacctaccgtagaggccctt

SEQ ID NO: 21184 - DNA, 21 bp, Artificial Sequence
  Synthetic
aagagccggccagtgccctct

SEQ ID NO: 21185 - DNA, 21 bp, Artificial Sequence
  Synthetic
agaagagccggccagtgccct

SEQ ID NO: 21186 - DNA, 21 bp, Artificial Sequence
  Synthetic
agggcactggccggctcttct

SEQ ID NO: 21187 - DNA, 21 bp, Artificial Sequence
  Synthetic
aggaggcggtagaactcaaag

SEQ ID NO: 21188 - DNA, 21 bp, Artificial Sequence
  Synthetic
tgcaggaggcggtagaactca

SEQ ID NO: 21189 - DNA, 21 bp, Artificial Sequence
  Synthetic
cgcgcatcatgcaggaggcgg

SEQ ID NO: 21190 - DNA, 21 bp, Artificial Sequence
  Synthetic
tccttgggccgcgcatcatgc

SEQ ID NO: 21191 - DNA, 21 bp, Artificial Sequence
  Synthetic
ctcctgcatgatgcgcggccc

SEQ ID NO: 21192 - DNA, 21 bp, Artificial Sequence
  Synthetic
ctccttgggccgcgcatcatg

SEQ ID NO: 21193 - DNA, 21 bp, Artificial Sequence
  Synthetic
tcctgcatgatgcgcggccca

SEQ ID NO: 21194 - DNA, 21 bp, Artificial Sequence
  Synthetic
ctgcatgatgcgcggcccaag

SEQ ID NO: 21195 - DNA, 21 bp, Artificial Sequence
  Synthetic
tgcatgatgcgcggcccaagg

SEQ ID NO: 21196 - DNA, 21 bp, Artificial Sequence
  Synthetic
gcatgatgcgcggcccaagga

SEQ ID NO: 21197 - DNA, 21 bp, Artificial Sequence
  Synthetic
aaggggcgatcatctccctcc

SEQ ID NO: 21198 - DNA, 21 bp, Artificial Sequence
  Synthetic
atcgccccttcttctggctct

SEQ ID NO: 21199 - DNA, 21 bp, Artificial Sequence
  Synthetic
cgccccttcttctggctcttt

SEQ ID NO: 21200 - DNA, 21 bp, Artificial Sequence
  Synthetic
cattctcaaagagccagaaga

SEQ ID NO: 21201 - DNA, 21 bp, Artificial Sequence
  Synthetic
acattctcaaagagccagaag

SEQ ID NO: 21202 - DNA, 21 bp, Artificial Sequence
  Synthetic
accacattctcaaagagccag

SEQ ID NO: 21203 - DNA, 21 bp, Artificial Sequence
  Synthetic
gccaccacattctcaaagagc

SEQ ID NO: 21204 - DNA, 21 bp, Artificial Sequence
  Synthetic
cccatggccaccacattctca

SEQ ID NO: 21205 - DNA, 21 bp, Artificial Sequence
  Synthetic
ctctttgagaatgtggtggcc

SEQ ID NO: 21206 - DNA, 21 bp, Artificial Sequence
  Synthetic
gtggccatgggcgttagtgac

SEQ ID NO: 21207 - DNA, 21 bp, Artificial Sequence
  Synthetic
ggccatgggcgttagtgacaa

SEQ ID NO: 21208 - DNA, 21 bp, Artificial Sequence
  Synthetic
gccatgggcgttagtgacaag

SEQ ID NO: 21209 - DNA, 21 bp, Artificial Sequence
  Synthetic
tccatgagaacgcatctcagc

SEQ ID NO: 21210 - DNA, 21 bp, Artificial Sequence
  Synthetic
gatggggaccagcacctcggg

SEQ ID NO: 21211 - DNA, 21 bp, Artificial Sequence
  Synthetic
agccggatggggaccagcacc

SEQ ID NO: 21212 - DNA, 21 bp, Artificial Sequence
  Synthetic
gaggtgctggtccccatccgg

SEQ ID NO: 21213 - DNA, 21 bp, Artificial Sequence
  Synthetic
ctggtccccatccggctggac

SEQ ID NO: 21214 - DNA, 21 bp, Artificial Sequence
  Synthetic
tggtccccatccggctggaca

SEQ ID NO: 21215 - DNA, 21 bp, Artificial Sequence
  Synthetic
gatctccatgtccagccggat

SEQ ID NO: 21216 - DNA, 21 bp, Artificial Sequence
  Synthetic
cgatctccatgtccagccgga

SEQ ID NO: 21217 - DNA, 21 bp, Artificial Sequence
  Synthetic
tcgatctccatgtccagccgg

SEQ ID NO: 21218 - DNA, 21 bp, Artificial Sequence
  Synthetic
cccatcgatctccatgtccag

SEQ ID NO: 21219 - DNA, 21 bp, Artificial Sequence
  Synthetic
tccggctggacatggagatcg

SEQ ID NO: 21220 - DNA, 21 bp, Artificial Sequence
  Synthetic
ctggacatggagatcgatggg

SEQ ID NO: 21221 - DNA, 21 bp, Artificial Sequence
  Synthetic
ggagatcgatgggcagaagct

SEQ ID NO: 21222 - DNA, 21 bp, Artificial Sequence
  Synthetic
gaagctgcgagacgccttcac

SEQ ID NO: 21223 - DNA, 21 bp, Artificial Sequence
  Synthetic
aagctgcgagacgccttcacc

SEQ ID NO: 21224 - DNA, 21 bp, Artificial Sequence
  Synthetic
cgagacgccttcacctggaac

SEQ ID NO: 21225 - DNA, 21 bp, Artificial Sequence
  Synthetic
cttgtaccattcatgttccag

SEQ ID NO: 21226 - DNA, 21 bp, Artificial Sequence
  Synthetic
tttcagagaagttgatgacgc

SEQ ID NO: 21227 - DNA, 21 bp, Artificial Sequence
  Synthetic
tctcaggcgtcatcaacttct

SEQ ID NO: 21228 - DNA, 21 bp, Artificial Sequence
  Synthetic
ccagatcgtcacagaggattt

SEQ ID NO: 21229 - DNA, 21 bp, Artificial Sequence
  Synthetic
tcagaaatcctctgtgacgat

SEQ ID NO: 21230 - DNA, 21 bp, Artificial Sequence
  Synthetic
atcctctgtgacgatctggat

SEQ ID NO: 21231 - DNA, 21 bp, Artificial Sequence
  Synthetic
gttcaaatccagatcgtcaca

SEQ ID NO: 21232 - DNA, 21 bp, Artificial Sequence
  Synthetic
gggttcaaatccagatcgtca

SEQ ID NO: 21233 - DNA, 21 bp, Artificial Sequence
  Synthetic
cgatggctggcacaaacgtca

SEQ ID NO: 21234 - DNA, 21 bp, Artificial Sequence
  Synthetic
cctctgccatcagacagcaga

SEQ ID NO: 21235 - DNA, 21 bp, Artificial Sequence
  Synthetic
actcgatctgctgtctgatgg

SEQ ID NO: 21236 - DNA, 21 bp, Artificial Sequence
  Synthetic
cagcagatcgagtcctacccc

SEQ ID NO: 21237 - DNA, 21 bp, Artificial Sequence
  Synthetic
tccaggatgctgtccgtgggg

SEQ ID NO: 21238 - DNA, 21 bp, Artificial Sequence
  Synthetic
tcctaccccacggacagcatc

SEQ ID NO: 21239 - DNA, 21 bp, Artificial Sequence
  Synthetic
cctaccccacggacagcatcc

SEQ ID NO: 21240 - DNA, 21 bp, Artificial Sequence
  Synthetic
taccccacggacagcatcctg

SEQ ID NO: 21241 - DNA, 21 bp, Artificial Sequence
  Synthetic
ggtcctccaggatgctgtccg

SEQ ID NO: 21242 - DNA, 21 bp, Artificial Sequence
  Synthetic
tggtcctccaggatgctgtcc

SEQ ID NO: 21243 - DNA, 21 bp, Artificial Sequence
  Synthetic
gcgctggtctgactggtcctc

SEQ ID NO: 21244 - DNA, 21 bp, Artificial Sequence
  Synthetic
ttgcctcagctgaacatccat

SEQ ID NO: 21245 - DNA, 21 bp, Artificial Sequence
  Synthetic
tgcctcagctgaacatccatg

SEQ ID NO: 21246 - DNA, 21 bp, Artificial Sequence
  Synthetic
gcctcagctgaacatccatgt

SEQ ID NO: 21247 - DNA, 21 bp, Artificial Sequence
  Synthetic
gtttcccacatggatgttcag

SEQ ID NO: 21248 - DNA, 21 bp, Artificial Sequence
  Synthetic
caccagggaaatgtttcccac

SEQ ID NO: 21249 - DNA, 21 bp, Artificial Sequence
  Synthetic
catgtgggaaacatttccctg

SEQ ID NO: 21250 - DNA, 21 bp, Artificial Sequence
  Synthetic
acatttccctggtggaccagt

SEQ ID NO: 21251 - DNA, 21 bp, Artificial Sequence
  Synthetic
cccactcaaactggtccacca

SEQ ID NO: 21252 - DNA, 21 bp, Artificial Sequence
  Synthetic
ttccctggtggaccagtttga

SEQ ID NO: 21253 - DNA, 21 bp, Artificial Sequence
  Synthetic
tcccactcaaactggtccacc

SEQ ID NO: 21254 - DNA, 21 bp, Artificial Sequence
  Synthetic
tccctggtggaccagtttgag

SEQ ID NO: 21255 - DNA, 21 bp, Artificial Sequence
  Synthetic
gtcccactcaaactggtccac

SEQ ID NO: 21256 - DNA, 21 bp, Artificial Sequence
  Synthetic
accagtttgagtgggacatgt

SEQ ID NO: 21257 - DNA, 21 bp, Artificial Sequence
  Synthetic
cagtttgagtgggacatgtca

SEQ ID NO: 21258 - DNA, 21 bp, Artificial Sequence
  Synthetic
tttgagtgggacatgtcagag

SEQ ID NO: 21259 - DNA, 21 bp, Artificial Sequence
  Synthetic
ttgagtgggacatgtcagaga

SEQ ID NO: 21260 - DNA, 21 bp, Artificial Sequence
  Synthetic
gagtgggacatgtcagagaag

SEQ ID NO: 21261 - DNA, 21 bp, Artificial Sequence
  Synthetic
tgtcagagaaggagaactcac

SEQ ID NO: 21262 - DNA, 21 bp, Artificial Sequence
  Synthetic
tcagagaaggagaactcacca

SEQ ID NO: 21263 - DNA, 21 bp, Artificial Sequence
  Synthetic
aactcaccagagaagtttgcc

SEQ ID NO: 21264 - DNA, 21 bp, Artificial Sequence
  Synthetic
gcttcagggcaaacttctctg

SEQ ID NO: 21265 - DNA, 21 bp, Artificial Sequence
  Synthetic
aagtttgccctgaagctgtgc

SEQ ID NO: 21266 - DNA, 21 bp, Artificial Sequence
  Synthetic
agtttgccctgaagctgtgct

SEQ ID NO: 21267 - DNA, 21 bp, Artificial Sequence
  Synthetic
gccctgaagctgtgctcggag

SEQ ID NO: 21268 - DNA, 21 bp, Artificial Sequence
  Synthetic
ccccagctccgagcacagctt

SEQ ID NO: 21269 - DNA, 21 bp, Artificial Sequence
  Synthetic
ccctgaagctgtgctcggagc

SEQ ID NO: 21270 - DNA, 21 bp, Artificial Sequence
  Synthetic
aagctgtgctcggagctgggg

SEQ ID NO: 21271 - DNA, 21 bp, Artificial Sequence
  Synthetic
tgtgctcggagctggggttgg

SEQ ID NO: 21272 - DNA, 21 bp, Artificial Sequence
  Synthetic
gtgctcggagctggggttggg

SEQ ID NO: 21273 - DNA, 21 bp, Artificial Sequence
  Synthetic
tgctcggagctggggttgggc

SEQ ID NO: 21274 - DNA, 21 bp, Artificial Sequence
  Synthetic
gctcggagctggggttgggcg

SEQ ID NO: 21275 - DNA, 21 bp, Artificial Sequence
  Synthetic
actccccgcccaaccccagct

SEQ ID NO: 21276 - DNA, 21 bp, Artificial Sequence
  Synthetic
caccaccatcgcatacagcat

SEQ ID NO: 21277 - DNA, 21 bp, Artificial Sequence
  Synthetic
accaccatcgcatacagcatc

SEQ ID NO: 21278 - DNA, 21 bp, Artificial Sequence
  Synthetic
ccaccatcgcatacagcatcc

SEQ ID NO: 21279 - DNA, 21 bp, Artificial Sequence
  Synthetic
gcatacagcatccggggacag

SEQ ID NO: 21280 - DNA, 21 bp, Artificial Sequence
  Synthetic
ctgatgccagctcagctgtcc

SEQ ID NO: 21281 - DNA, 21 bp, Artificial Sequence
  Synthetic
cggggacagctgagctggcat

SEQ ID NO: 21282 - DNA, 21 bp, Artificial Sequence
  Synthetic
cagaagacctacgccttcagg

SEQ ID NO: 21283 - DNA, 21 bp, Artificial Sequence
  Synthetic
tgtgggcagagggttctcgct

SEQ ID NO: 21284 - DNA, 21 bp, Artificial Sequence
  Synthetic
agcgagaaccctctgcccaca

SEQ ID NO: 21285 - DNA, 21 bp, Artificial Sequence
  Synthetic
gcgagaaccctctgcccacag

SEQ ID NO: 21286 - DNA, 21 bp, Artificial Sequence
  Synthetic
tggcaatctccactgtgggca

SEQ ID NO: 21287 - DNA, 21 bp, Artificial Sequence
  Synthetic
gatggcaatctccactgtggg

SEQ ID NO: 21288 - DNA, 21 bp, Artificial Sequence
  Synthetic
gcccacagtggagattgccat

SEQ ID NO: 21289 - DNA, 21 bp, Artificial Sequence
  Synthetic
ttccggatggcaatctccact

SEQ ID NO: 21290 - DNA, 21 bp, Artificial Sequence
  Synthetic
cccacagtggagattgccatc

SEQ ID NO: 21291 - DNA, 21 bp, Artificial Sequence
  Synthetic
gtggagattgccatccggaac

SEQ ID NO: 21292 - DNA, 21 bp, Artificial Sequence
  Synthetic
gccatccggaacacgggcgat

SEQ ID NO: 21293 - DNA, 21 bp, Artificial Sequence
  Synthetic
ctggtccgcatcgcccgtgtt

SEQ ID NO: 21294 - DNA, 21 bp, Artificial Sequence
  Synthetic
gcggaccagtggtgcccactg

SEQ ID NO: 21295 - DNA, 21 bp, Artificial Sequence
  Synthetic
cggaccagtggtgcccactgc

SEQ ID NO: 21296 - DNA, 21 bp, Artificial Sequence
  Synthetic
cgtctgtcagagtctccagca

SEQ ID NO: 21297 - DNA, 21 bp, Artificial Sequence
  Synthetic
tgctggagactctgacagacg

SEQ ID NO: 21298 - DNA, 21 bp, Artificial Sequence
  Synthetic
gagactctgacagacgctgag

SEQ ID NO: 21299 - DNA, 21 bp, Artificial Sequence
  Synthetic
agactctgacagacgctgaga

SEQ ID NO: 21300 - DNA, 21 bp, Artificial Sequence
  Synthetic
actctgacagacgctgagatg

SEQ ID NO: 21301 - DNA, 21 bp, Artificial Sequence
  Synthetic
cttctccatctcagcgtctgt

SEQ ID NO: 21302 - DNA, 21 bp, Artificial Sequence
  Synthetic
ctgacagacgctgagatggag

SEQ ID NO: 21303 - DNA, 21 bp, Artificial Sequence
  Synthetic
atggagaagaagatccgcgac

SEQ ID NO: 21304 - DNA, 21 bp, Artificial Sequence
  Synthetic
gaagaagatccgcgaccagga

SEQ ID NO: 21305 - DNA, 21 bp, Artificial Sequence
  Synthetic
aagaagatccgcgaccaggac

SEQ ID NO: 21306 - DNA, 21 bp, Artificial Sequence
  Synthetic
atccgcgaccaggacaggaac

SEQ ID NO: 21307 - DNA, 21 bp, Artificial Sequence
  Synthetic
cctcgtgttcctgtcctggtc

SEQ ID NO: 21308 - DNA, 21 bp, Artificial Sequence
  Synthetic
tgcattgatgccactgatcca

SEQ ID NO: 21309 - DNA, 21 bp, Artificial Sequence
  Synthetic
attgatgccactgatccagag

SEQ ID NO: 21310 - DNA, 21 bp, Artificial Sequence
  Synthetic
ttgatgccactgatccagaga

SEQ ID NO: 21311 - DNA, 21 bp, Artificial Sequence
  Synthetic
tgatgccactgatccagagaa

SEQ ID NO: 21312 - DNA, 21 bp, Artificial Sequence
  Synthetic
atcgcagccagtttcccttct

SEQ ID NO: 21313 - DNA, 21 bp, Artificial Sequence
  Synthetic
aagggaaactggctgcgatat

SEQ ID NO: 21314 - DNA, 21 bp, Artificial Sequence
  Synthetic
aaactggctgcgatatgtgaa

SEQ ID NO: 21315 - DNA, 21 bp, Artificial Sequence
  Synthetic
gatatgtgaattgggcttgct

SEQ ID NO: 21316 - DNA, 21 bp, Artificial Sequence
  Synthetic
atatgtgaattgggcttgctc

SEQ ID NO: 21317 - DNA, 21 bp, Artificial Sequence
  Synthetic
atgtgaattgggcttgctcag

SEQ ID NO: 21318 - DNA, 21 bp, Artificial Sequence
  Synthetic
tgaattgggcttgctcaggag

SEQ ID NO: 21319 - DNA, 21 bp, Artificial Sequence
  Synthetic
gaagagcaaaatttattccca

SEQ ID NO: 21320 - DNA, 21 bp, Artificial Sequence
  Synthetic
aagagcaaaatttattcccac

SEQ ID NO: 21321 - DNA, 21 bp, Artificial Sequence
  Synthetic
tttattcccactggaaatcaa

SEQ ID NO: 21322 - DNA, 21 bp, Artificial Sequence
  Synthetic
atggctctgttgatttccagt

SEQ ID NO: 21323 - DNA, 21 bp, Artificial Sequence
  Synthetic
aatggctctgttgatttccag

SEQ ID NO: 21324 - DNA, 21 bp, Artificial Sequence
  Synthetic
aaatggctctgttgatttcca

SEQ ID NO: 21325 - DNA, 21 bp, Artificial Sequence
  Synthetic
ctctccccgcagccaatcgcg

SEQ ID NO: 21326 - DNA, 21 bp, Artificial Sequence
  Synthetic
ccccgcagccaatcgcgccgg

SEQ ID NO: 21327 - DNA, 21 bp, Artificial Sequence
  Synthetic
cctcgcccggcgcgattggct

SEQ ID NO: 21328 - DNA, 21 bp, Artificial Sequence
  Synthetic
ccgcagccaatcgcgccgggc

SEQ ID NO: 21329 - DNA, 21 bp, Artificial Sequence
  Synthetic
cgcagccaatcgcgccgggcg

SEQ ID NO: 21330 - DNA, 21 bp, Artificial Sequence
  Synthetic
aggagctcctggtctggtaca

SEQ ID NO: 21331 - DNA, 21 bp, Artificial Sequence
  Synthetic
ggagctcctggtctggtacaa

SEQ ID NO: 21332 - DNA, 21 bp, Artificial Sequence
  Synthetic
gagctcctggtctggtacaat

SEQ ID NO: 21333 - DNA, 21 bp, Artificial Sequence
  Synthetic
agctcctggtctggtacaatg

SEQ ID NO: 21334 - DNA, 21 bp, Artificial Sequence
  Synthetic
tcttccccattgtaccagacc

SEQ ID NO: 21335 - DNA, 21 bp, Artificial Sequence
  Synthetic
gtcttccccattgtaccagac

SEQ ID NO: 21336 - DNA, 21 bp, Artificial Sequence
  Synthetic
tgcctcctgatgcacttatca

SEQ ID NO: 21337 - DNA, 21 bp, Artificial Sequence
  Synthetic
gtattcaatgataagtgcatc

SEQ ID NO: 21338 - DNA, 21 bp, Artificial Sequence
  Synthetic
tgtattcaatgataagtgcat

SEQ ID NO: 21339 - DNA, 21 bp, Artificial Sequence
  Synthetic
tgatgcacttatcattgaata

SEQ ID NO: 21340 - DNA, 21 bp, Artificial Sequence
  Synthetic
atgcacttatcattgaataca

SEQ ID NO: 21341 - DNA, 21 bp, Artificial Sequence
  Synthetic
tgcacttatcattgaatacag

SEQ ID NO: 21342 - DNA, 21 bp, Artificial Sequence
  Synthetic
gcacttatcattgaatacaga

SEQ ID NO: 21343 - DNA, 21 bp, Artificial Sequence
  Synthetic
gaatacagagggaagtttatg

SEQ ID NO: 21344 - DNA, 21 bp, Artificial Sequence
  Synthetic
atacagagggaagtttatgct

SEQ ID NO: 21345 - DNA, 21 bp, Artificial Sequence
  Synthetic
acagagggaagtttatgctga

SEQ ID NO: 21346 - DNA, 21 bp, Artificial Sequence
  Synthetic
agtttatgctgagagaacagt

SEQ ID NO: 21347 - DNA, 21 bp, Artificial Sequence
  Synthetic
tgagagaacagtttgaagcaa

SEQ ID NO: 21348 - DNA, 21 bp, Artificial Sequence
  Synthetic
atttagagtagaataacacaa

SEQ ID NO: 21349 - DNA, 21 bp, Artificial Sequence
  Synthetic
tgttattctactctaaatttc

SEQ ID NO: 21350 - DNA, 21 bp, Artificial Sequence
  Synthetic
tctagcccatgaaatttagag

SEQ ID NO: 21351 - DNA, 21 bp, Artificial Sequence
  Synthetic
tctactctaaatttcatgggc

SEQ ID NO: 21352 - DNA, 21 bp, Artificial Sequence
  Synthetic
acatttctagcccatgaaatt

SEQ ID NO: 21353 - DNA, 21 bp, Artificial Sequence
  Synthetic
atcaacacacatttctagccc

SEQ ID NO: 21354 - DNA, 21 bp, Artificial Sequence
  Synthetic
gctagaaatgtgtgttgatgc

SEQ ID NO: 21355 - DNA, 21 bp, Artificial Sequence
  Synthetic
tgtgtgttgatgcaaggactt

SEQ ID NO: 21356 - DNA, 21 bp, Artificial Sequence
  Synthetic
gtgtgttgatgcaaggacttt

SEQ ID NO: 21357 - DNA, 21 bp, Artificial Sequence
  Synthetic
tgtacaagaccgcctgatgaa

SEQ ID NO: 21358 - DNA, 21 bp, Artificial Sequence
  Synthetic
ttgggtgtacaagaccgcctg

SEQ ID NO: 21359 - DNA, 21 bp, Artificial Sequence
  Synthetic
ggcggtcttgtacacccaatg

SEQ ID NO: 21360 - DNA, 21 bp, Artificial Sequence
  Synthetic
ttctataagcttacctctgca

SEQ ID NO: 21361 - DNA, 21 bp, Artificial Sequence
  Synthetic
aggtgaggcatgaaattcaag

SEQ ID NO: 21362 - DNA, 21 bp, Artificial Sequence
  Synthetic
ggtgaggcatgaaattcaaga

SEQ ID NO: 21363 - DNA, 21 bp, Artificial Sequence
  Synthetic
ataaagatgtatggttccatc

SEQ ID NO: 21364 - DNA, 21 bp, Artificial Sequence
  Synthetic
tattctatacacagtattcca

SEQ ID NO: 21365 - DNA, 21 bp, Artificial Sequence
  Synthetic
attctatacacagtattccaa

SEQ ID NO: 21366 - DNA, 21 bp, Artificial Sequence
  Synthetic
ttccctttggaatactgtgta

SEQ ID NO: 21367 - DNA, 21 bp, Artificial Sequence
  Synthetic
ttctatacacagtattccaaa

SEQ ID NO: 21368 - DNA, 21 bp, Artificial Sequence
  Synthetic
tacacagtattccaaagggaa

SEQ ID NO: 21369 - DNA, 21 bp, Artificial Sequence
  Synthetic
aatagtaatttcagttccctt

SEQ ID NO: 21370 - DNA, 21 bp, Artificial Sequence
  Synthetic
caatagtaatttcagttccct

SEQ ID NO: 21371 - DNA, 21 bp, Artificial Sequence
  Synthetic
gtttggcaacatattgactgc

SEQ ID NO: 21372 - DNA, 21 bp, Artificial Sequence
  Synthetic
tttggcaacatattgactgca

SEQ ID NO: 21373 - DNA, 21 bp, Artificial Sequence
  Synthetic
ttggcaacatattgactgcat

SEQ ID NO: 21374 - DNA, 21 bp, Artificial Sequence
  Synthetic
atattcctgatacatatctat

SEQ ID NO: 21375 - DNA, 21 bp, Artificial Sequence
  Synthetic
acgttcacatagatatgtatc

SEQ ID NO: 21376 - DNA, 21 bp, Artificial Sequence
  Synthetic
aacgttcacatagatatgtat

SEQ ID NO: 21377 - DNA, 21 bp, Artificial Sequence
  Synthetic
gctcgctcccgtatccagggc

SEQ ID NO: 21378 - DNA, 21 bp, Artificial Sequence
  Synthetic
ctcgctcccgtatccagggcc

SEQ ID NO: 21379 - DNA, 21 bp, Artificial Sequence
  Synthetic
ggctgcatagagccccaggcc

SEQ ID NO: 21380 - DNA, 21 bp, Artificial Sequence
  Synthetic
ggcctggggctctatgcagcc

SEQ ID NO: 21381 - DNA, 21 bp, Artificial Sequence
  Synthetic
ggctctatgcagccaaggacc

SEQ ID NO: 21382 - DNA, 21 bp, Artificial Sequence
  Synthetic
tagaaaagcacacaatggtta

SEQ ID NO: 21383 - DNA, 21 bp, Artificial Sequence
  Synthetic
cgagtacattggcaccatcat

SEQ ID NO: 21384 - DNA, 21 bp, Artificial Sequence
  Synthetic
gagtacattggcaccatcatt

SEQ ID NO: 21385 - DNA, 21 bp, Artificial Sequence
  Synthetic
acattggcaccatcattcgga

SEQ ID NO: 21386 - DNA, 21 bp, Artificial Sequence
  Synthetic
ccgccggttggccacctcgtt

SEQ ID NO: 21387 - DNA, 21 bp, Artificial Sequence
  Synthetic
tcggaacgaggtggccaaccg

SEQ ID NO: 21388 - DNA, 21 bp, Artificial Sequence
  Synthetic
cggaacgaggtggccaaccgg

SEQ ID NO: 21389 - DNA, 21 bp, Artificial Sequence
  Synthetic
ggaacgaggtggccaaccggc

SEQ ID NO: 21390 - DNA, 21 bp, Artificial Sequence
  Synthetic
aacgaggtggccaaccggcgg

SEQ ID NO: 21391 - DNA, 21 bp, Artificial Sequence
  Synthetic
ccaaccggcgggagaaaatct

SEQ ID NO: 21392 - DNA, 21 bp, Artificial Sequence
  Synthetic
accggcgggagaaaatctacg

SEQ ID NO: 21393 - DNA, 21 bp, Artificial Sequence
  Synthetic
gaaaatctacgaagagcaggt

SEQ ID NO: 21394 - DNA, 21 bp, Artificial Sequence
  Synthetic
aacatgtagatgcctcgattc

SEQ ID NO: 21395 - DNA, 21 bp, Artificial Sequence
  Synthetic
gaatcgaggcatctacatgtt

SEQ ID NO: 21396 - DNA, 21 bp, Artificial Sequence
  Synthetic
tctacatgttccgaataaaca

SEQ ID NO: 21397 - DNA, 21 bp, Artificial Sequence
  Synthetic
atcacatgttcattgtttatt

SEQ ID NO: 21398 - DNA, 21 bp, Artificial Sequence
  Synthetic
aatcacatgttcattgtttat

SEQ ID NO: 21399 - DNA, 21 bp, Artificial Sequence
  Synthetic
gttgaccggcggccctgccag

SEQ ID NO: 21400 - DNA, 21 bp, Artificial Sequence
  Synthetic
tgaccggcggccctgccaggt

SEQ ID NO: 21401 - DNA, 21 bp, Artificial Sequence
  Synthetic
tcctcgtcatctctcacctgg

SEQ ID NO: 21402 - DNA, 21 bp, Artificial Sequence
  Synthetic
gcacaggaatggttaatgtac

SEQ ID NO: 21403 - DNA, 21 bp, Artificial Sequence
  Synthetic
cggccacacagttaggggcac

SEQ ID NO: 21404 - DNA, 21 bp, Artificial Sequence
  Synthetic
tcggccacacagttaggggca

SEQ ID NO: 21405 - DNA, 21 bp, Artificial Sequence
  Synthetic
cctgtgcccctaactgtgtgg

SEQ ID NO: 21406 - DNA, 21 bp, Artificial Sequence
  Synthetic
cacgacttcggccacacagtt

SEQ ID NO: 21407 - DNA, 21 bp, Artificial Sequence
  Synthetic
tcacgacttcggccacacagt

SEQ ID NO: 21408 - DNA, 21 bp, Artificial Sequence
  Synthetic
ccgaagtcgtgacatttgaca

SEQ ID NO: 21409 - DNA, 21 bp, Artificial Sequence
  Synthetic
gaagtcgtgacatttgacaaa

SEQ ID NO: 21410 - DNA, 21 bp, Artificial Sequence
  Synthetic
aatcatcatcatctccagccg

SEQ ID NO: 21411 - DNA, 21 bp, Artificial Sequence
  Synthetic
tctccagccggcgaatcccca

SEQ ID NO: 21412 - DNA, 21 bp, Artificial Sequence
  Synthetic
ctcctttggggattcgccggc

SEQ ID NO: 21413 - DNA, 21 bp, Artificial Sequence
  Synthetic
ctccagccggcgaatccccaa

SEQ ID NO: 21414 - DNA, 21 bp, Artificial Sequence
  Synthetic
tctcctttggggattcgccgg

SEQ ID NO: 21415 - DNA, 21 bp, Artificial Sequence
  Synthetic
ccagccggcgaatccccaaag

SEQ ID NO: 21416 - DNA, 21 bp, Artificial Sequence
  Synthetic
agccggcgaatccccaaagga

SEQ ID NO: 21417 - DNA, 21 bp, Artificial Sequence
  Synthetic
gccggcgaatccccaaaggag

SEQ ID NO: 21418 - DNA, 21 bp, Artificial Sequence
  Synthetic
cgaatccccaaaggagaggag

SEQ ID NO: 21419 - DNA, 21 bp, Artificial Sequence
  Synthetic
aatccccaaaggagaggaggt

SEQ ID NO: 21420 - DNA, 21 bp, Artificial Sequence
  Synthetic
tcctctcacctcctctccttt

SEQ ID NO: 21421 - DNA, 21 bp, Artificial Sequence
  Synthetic
ttcctctcacctcctctcctt

SEQ ID NO: 21422 - DNA, 21 bp, Artificial Sequence
  Synthetic
cttcctctcacctcctctcct

SEQ ID NO: 21423 - DNA, 21 bp, Artificial Sequence
  Synthetic
aaactgatagtcataggttag

SEQ ID NO: 21424 - DNA, 21 bp, Artificial Sequence
  Synthetic
gttgtgtggagtgtattgtgt

SEQ ID NO: 21425 - DNA, 21 bp, Artificial Sequence
  Synthetic
agagcagcaggcgtgaggggt

SEQ ID NO: 21426 - DNA, 21 bp, Artificial Sequence
  Synthetic
cagagcagcaggcgtgagggg

SEQ ID NO: 21427 - DNA, 21 bp, Artificial Sequence
  Synthetic
catcacagagcagcaggcgtg

SEQ ID NO: 21428 - DNA, 21 bp, Artificial Sequence
  Synthetic
tcatcacagagcagcaggcgt

SEQ ID NO: 21429 - DNA, 21 bp, Artificial Sequence
  Synthetic
agtcatcacagagcagcaggc

SEQ ID NO: 21430 - DNA, 21 bp, Artificial Sequence
  Synthetic
tagctaatatcacagtcatca

SEQ ID NO: 21431 - DNA, 21 bp, Artificial Sequence
  Synthetic
attagctaccacacatactgc

SEQ ID NO: 21432 - DNA, 21 bp, Artificial Sequence
  Synthetic
ccttggggacggtgagcagtg

SEQ ID NO: 21433 - DNA, 21 bp, Artificial Sequence
  Synthetic
cccttggggacggtgagcagt

SEQ ID NO: 21434 - DNA, 21 bp, Artificial Sequence
  Synthetic
cccccactgctcaccgtcccc

SEQ ID NO: 21435 - DNA, 21 bp, Artificial Sequence
  Synthetic
gcccttggggacggtgagcag

SEQ ID NO: 21436 - DNA, 21 bp, Artificial Sequence
  Synthetic
cgcccttggggacggtgagca

SEQ ID NO: 21437 - DNA, 21 bp, Artificial Sequence
  Synthetic
gctcaccgtccccaagggcgg

SEQ ID NO: 21438 - DNA, 21 bp, Artificial Sequence
  Synthetic
ttccagccgcccttggggacg

SEQ ID NO: 21439 - DNA, 21 bp, Artificial Sequence
  Synthetic
ctcaccgtccccaagggcggc

SEQ ID NO: 21440 - DNA, 21 bp, Artificial Sequence
  Synthetic
cttgcacttccagccgccctt

SEQ ID NO: 21441 - DNA, 21 bp, Artificial Sequence
  Synthetic
acttgcacttccagccgccct

SEQ ID NO: 21442 - DNA, 21 bp, Artificial Sequence
  Synthetic
cacttgcacttccagccgccc

SEQ ID NO: 21443 - DNA, 21 bp, Artificial Sequence
  Synthetic
gcggctggaagtgcaagtggt

SEQ ID NO: 21444 - DNA, 21 bp, Artificial Sequence
  Synthetic
aaagtgtgccaagcctgcagg

SEQ ID NO: 21445 - DNA, 21 bp, Artificial Sequence
  Synthetic
aagtgtgccaagcctgcaggt

SEQ ID NO: 21446 - DNA, 21 bp, Artificial Sequence
  Synthetic
ccatgtgcacctgcaggaaac

SEQ ID NO: 21447 - DNA, 21 bp, Artificial Sequence
  Synthetic
catgtgcacctgcaggaaacc

SEQ ID NO: 21448 - DNA, 21 bp, Artificial Sequence
  Synthetic
atgtgcacctgcaggaaacct

SEQ ID NO: 21449 - DNA, 21 bp, Artificial Sequence
  Synthetic
atgactctaagatgttggttt

SEQ ID NO: 21450 - DNA, 21 bp, Artificial Sequence
  Synthetic
acgtctcacaaaccaacatct

SEQ ID NO: 21451 - DNA, 21 bp, Artificial Sequence
  Synthetic
tggtttgtgagacgtgtgaca

SEQ ID NO: 21452 - DNA, 21 bp, Artificial Sequence
  Synthetic
actttctgcctaaaaccaccc

SEQ ID NO: 21453 - DNA, 21 bp, Artificial Sequence
  Synthetic
ctttctgcctaaaaccaccca

SEQ ID NO: 21454 - DNA, 21 bp, Artificial Sequence
  Synthetic
ttctgcctaaaaccacccatg

SEQ ID NO: 21455 - DNA, 21 bp, Artificial Sequence
  Synthetic
tctgcctaaaaccacccatgg

SEQ ID NO: 21456 - DNA, 21 bp, Artificial Sequence
  Synthetic
gagtgagcaggcagttcctcc

SEQ ID NO: 21457 - DNA, 21 bp, Artificial Sequence
  Synthetic
ggaggaactgcctgctcactc

SEQ ID NO: 21458 - DNA, 21 bp, Artificial Sequence
  Synthetic
gaggaactgcctgctcactct

SEQ ID NO: 21459 - DNA, 21 bp, Artificial Sequence
  Synthetic
gctcactcttggaagtgcaag

SEQ ID NO: 21460 - DNA, 21 bp, Artificial Sequence
  Synthetic
actcaccttgcacttccaaga

SEQ ID NO: 21461 - DNA, 21 bp, Artificial Sequence
  Synthetic
gtacactcaccttgcacttcc

SEQ ID NO: 21462 - DNA, 21 bp, Artificial Sequence
  Synthetic
cactcccttcccttaggcgtg

SEQ ID NO: 21463 - DNA, 21 bp, Artificial Sequence
  Synthetic
cccggcacacccggcacgcct

SEQ ID NO: 21464 - DNA, 21 bp, Artificial Sequence
  Synthetic
cccttaggcgtgccgggtgtg

SEQ ID NO: 21465 - DNA, 21 bp, Artificial Sequence
  Synthetic
tgtggtatgtggcagctttgg

SEQ ID NO: 21466 - DNA, 21 bp, Artificial Sequence
  Synthetic
gtggtatgtggcagctttggc

SEQ ID NO: 21467 - DNA, 21 bp, Artificial Sequence
  Synthetic
tggtatgtggcagctttggcc

SEQ ID NO: 21468 - DNA, 21 bp, Artificial Sequence
  Synthetic
ggtatgtggcagctttggccg

SEQ ID NO: 21469 - DNA, 21 bp, Artificial Sequence
  Synthetic
gtggcagctttggccgggggg

SEQ ID NO: 21470 - DNA, 21 bp, Artificial Sequence
  Synthetic
ggcagctttggccggggggca

SEQ ID NO: 21471 - DNA, 21 bp, Artificial Sequence
  Synthetic
tgagagcactgcgaacaggca

SEQ ID NO: 21472 - DNA, 21 bp, Artificial Sequence
  Synthetic
ctgagagcactgcgaacaggc

SEQ ID NO: 21473 - DNA, 21 bp, Artificial Sequence
  Synthetic
ggtgatagcactgagagcact

SEQ ID NO: 21474 - DNA, 21 bp, Artificial Sequence
  Synthetic
cacagtaagggtgatagcact

SEQ ID NO: 21475 - DNA, 21 bp, Artificial Sequence
  Synthetic
gacacagtaagggtgatagca

SEQ ID NO: 21476 - DNA, 21 bp, Artificial Sequence
  Synthetic
tcaccttgctgttgacacagt

SEQ ID NO: 21477 - DNA, 21 bp, Artificial Sequence
  Synthetic
ccttactgtgtcaacagcaag

SEQ ID NO: 21478 - DNA, 21 bp, Artificial Sequence
  Synthetic
agcagcatcaccttggtgatc

SEQ ID NO: 21479 - DNA, 21 bp, Artificial Sequence
  Synthetic
gagcagcatcaccttggtgat

SEQ ID NO: 21480 - DNA, 21 bp, Artificial Sequence
  Synthetic
atcaccaaggtgatgctgctc

SEQ ID NO: 21481 - DNA, 21 bp, Artificial Sequence
  Synthetic
ctgctcaagggctggcgttgt

SEQ ID NO: 21482 - DNA, 21 bp, Artificial Sequence
  Synthetic
tgctcaagggctggcgttgtg

SEQ ID NO: 21483 - DNA, 21 bp, Artificial Sequence
  Synthetic
cactccacacaacgccagccc

SEQ ID NO: 21484 - DNA, 21 bp, Artificial Sequence
  Synthetic
cgcacggatgatgggcgtggc

SEQ ID NO: 21485 - DNA, 21 bp, Artificial Sequence
  Synthetic
cgtggctggggcgtccgcacc

SEQ ID NO: 21486 - DNA, 21 bp, Artificial Sequence
  Synthetic
gtggctggggcgtccgcaccc

SEQ ID NO: 21487 - DNA, 21 bp, Artificial Sequence
  Synthetic
ggctggggcgtccgcaccctg

SEQ ID NO: 21488 - DNA, 21 bp, Artificial Sequence
  Synthetic
cttgcgaatcttctccagggt

SEQ ID NO: 21489 - DNA, 21 bp, Artificial Sequence
  Synthetic
cgcaccctggagaagattcgc

SEQ ID NO: 21490 - DNA, 21 bp, Artificial Sequence
  Synthetic
gctgttcttgcgaatcttctc

SEQ ID NO: 21491 - DNA, 21 bp, Artificial Sequence
  Synthetic
attcgcaagaacagcttcgtc

SEQ ID NO: 21492 - DNA, 21 bp, Artificial Sequence
  Synthetic
ctccatgacgaagctgttctt

SEQ ID NO: 21493 - DNA, 21 bp, Artificial Sequence
  Synthetic
ttcgcaagaacagcttcgtca

SEQ ID NO: 21494 - DNA, 21 bp, Artificial Sequence
  Synthetic
aacagcttcgtcatggagtac

SEQ ID NO: 21495 - DNA, 21 bp, Artificial Sequence
  Synthetic
acagcttcgtcatggagtacg

SEQ ID NO: 21496 - DNA, 21 bp, Artificial Sequence
  Synthetic
cagcttcgtcatggagtacgt

SEQ ID NO: 21497 - DNA, 21 bp, Artificial Sequence
  Synthetic
gcttcgtcatggagtacgtgg

SEQ ID NO: 21498 - DNA, 21 bp, Artificial Sequence
  Synthetic
acctctcccacgtactccatg

SEQ ID NO: 21499 - DNA, 21 bp, Artificial Sequence
  Synthetic
tcatggagtacgtgggagagg

SEQ ID NO: 21500 - DNA, 21 bp, Artificial Sequence
  Synthetic
catggagtacgtgggagaggt

SEQ ID NO: 21501 - DNA, 21 bp, Artificial Sequence
  Synthetic
cctttccctagatcattacct

SEQ ID NO: 21502 - DNA, 21 bp, Artificial Sequence
  Synthetic
tttccctagatcattacctca

SEQ ID NO: 21503 - DNA, 21 bp, Artificial Sequence
  Synthetic
ttccctagatcattacctcag

SEQ ID NO: 21504 - DNA, 21 bp, Artificial Sequence
  Synthetic
cctcctctgaggtaatgatct

SEQ ID NO: 21505 - DNA, 21 bp, Artificial Sequence
  Synthetic
gcctcctctgaggtaatgatc

SEQ ID NO: 21506 - DNA, 21 bp, Artificial Sequence
  Synthetic
agatcattacctcagaggagg

SEQ ID NO: 21507 - DNA, 21 bp, Artificial Sequence
  Synthetic
tacctcagaggaggcagagcg

SEQ ID NO: 21508 - DNA, 21 bp, Artificial Sequence
  Synthetic
acctcagaggaggcagagcgg

SEQ ID NO: 21509 - DNA, 21 bp, Artificial Sequence
  Synthetic
ggccccgccgctctgcctcct

SEQ ID NO: 21510 - DNA, 21 bp, Artificial Sequence
  Synthetic
cggggccagatctacgaccgt

SEQ ID NO: 21511 - DNA, 21 bp, Artificial Sequence
  Synthetic
ggcgccacctacctctttgac

SEQ ID NO: 21512 - DNA, 21 bp, Artificial Sequence
  Synthetic
tacctctttgacctggactac

SEQ ID NO: 21513 - DNA, 21 bp, Artificial Sequence
  Synthetic
acctctttgacctggactacg

SEQ ID NO: 21514 - DNA, 21 bp, Artificial Sequence
  Synthetic
tcctccacgtagtccaggtca

SEQ ID NO: 21515 - DNA, 21 bp, Artificial Sequence
  Synthetic
ctctttgacctggactacgtg

SEQ ID NO: 21516 - DNA, 21 bp, Artificial Sequence
  Synthetic
tacgtggaggacgtgtacacc

SEQ ID NO: 21517 - DNA, 21 bp, Artificial Sequence
  Synthetic
ccacactgtggttgacaaagt

SEQ ID NO: 21518 - DNA, 21 bp, Artificial Sequence
  Synthetic
cccacactgtggttgacaaag

SEQ ID NO: 21519 - DNA, 21 bp, Artificial Sequence
  Synthetic
tcccactttgtcaaccacagt

SEQ ID NO: 21520 - DNA, 21 bp, Artificial Sequence
  Synthetic
acccacactgtggttgacaaa

SEQ ID NO: 21521 - DNA, 21 bp, Artificial Sequence
  Synthetic
cacctgcaggttggggtcaca

SEQ ID NO: 21522 - DNA, 21 bp, Artificial Sequence
  Synthetic
agacgttgtacacctgcaggt

SEQ ID NO: 21523 - DNA, 21 bp, Artificial Sequence
  Synthetic
aagacgttgtacacctgcagg

SEQ ID NO: 21524 - DNA, 21 bp, Artificial Sequence
  Synthetic
acgtcttcatagacaaccttg

SEQ ID NO: 21525 - DNA, 21 bp, Artificial Sequence
  Synthetic
agccgctcgtcaaggttgtct

SEQ ID NO: 21526 - DNA, 21 bp, Artificial Sequence
  Synthetic
cttgtggcaaagaaagcgatg

SEQ ID NO: 21527 - DNA, 21 bp, Artificial Sequence
  Synthetic
tcttgtggcaaagaaagcgat

SEQ ID NO: 21528 - DNA, 21 bp, Artificial Sequence
  Synthetic
ccgcatcgctttctttgccac

SEQ ID NO: 21529 - DNA, 21 bp, Artificial Sequence
  Synthetic
tttctttgccacaagaaccat

SEQ ID NO: 21530 - DNA, 21 bp, Artificial Sequence
  Synthetic
gcccggatggttcttgtggca

SEQ ID NO: 21531 - DNA, 21 bp, Artificial Sequence
  Synthetic
ccacaagaaccatccgggcag

SEQ ID NO: 21532 - DNA, 21 bp, Artificial Sequence
  Synthetic
acaagaaccatccgggcaggc

SEQ ID NO: 21533 - DNA, 21 bp, Artificial Sequence
  Synthetic
caagaaccatccgggcaggcg

SEQ ID NO: 21534 - DNA, 21 bp, Artificial Sequence
  Synthetic
aaaggtgagctcctcgcctgc

SEQ ID NO: 21535 - DNA, 21 bp, Artificial Sequence
  Synthetic
ccttgcatgttgtaatcaaag

SEQ ID NO: 21536 - DNA, 21 bp, Artificial Sequence
  Synthetic
ggaacctctatgactttgaag

SEQ ID NO: 21537 - DNA, 21 bp, Artificial Sequence
  Synthetic
gtcgagtacctgtgcgattac

SEQ ID NO: 21538 - DNA, 21 bp, Artificial Sequence
  Synthetic
tgcgattacaagaagatccgc

SEQ ID NO: 21539 - DNA, 21 bp, Artificial Sequence
  Synthetic
ctacccacccccaacaggaac

SEQ ID NO: 21540 - DNA, 21 bp, Artificial Sequence
  Synthetic
caggaacaggaatattacctg

SEQ ID NO: 21541 - DNA, 21 bp, Artificial Sequence
  Synthetic
aatattacctggtgaaatggc

SEQ ID NO: 21542 - DNA, 21 bp, Artificial Sequence
  Synthetic
aatggcgtggatatccagact

SEQ ID NO: 21543 - DNA, 21 bp, Artificial Sequence
  Synthetic
tggcgtggatatccagactca

SEQ ID NO: 21544 - DNA, 21 bp, Artificial Sequence
  Synthetic
atatccagactcagagagcac

SEQ ID NO: 21545 - DNA, 21 bp, Artificial Sequence
  Synthetic
tatccagactcagagagcacc

SEQ ID NO: 21546 - DNA, 21 bp, Artificial Sequence
  Synthetic
atccagactcagagagcacct

SEQ ID NO: 21547 - DNA, 21 bp, Artificial Sequence
  Synthetic
gctcccaggtgctctctgagt

SEQ ID NO: 21548 - DNA, 21 bp, Artificial Sequence
  Synthetic
gccgtggctcccaggtgctct

SEQ ID NO: 21549 - DNA, 21 bp, Artificial Sequence
  Synthetic
gagagcacctgggagccacgg

SEQ ID NO: 21550 - DNA, 21 bp, Artificial Sequence
  Synthetic
tgcttgaggatacgcacacac

SEQ ID NO: 21551 - DNA, 21 bp, Artificial Sequence
  Synthetic
cgtatcctcaagcagttccac

SEQ ID NO: 21552 - DNA, 21 bp, Artificial Sequence
  Synthetic
taagtccttgtggaactgctt

SEQ ID NO: 21553 - DNA, 21 bp, Artificial Sequence
  Synthetic
tctaagtccttgtggaactgc

SEQ ID NO: 21554 - DNA, 21 bp, Artificial Sequence
  Synthetic
agctccctttctaagtccttg

SEQ ID NO: 21555 - DNA, 21 bp, Artificial Sequence
  Synthetic
cagctccctttctaagtcctt

SEQ ID NO: 21556 - DNA, 21 bp, Artificial Sequence
  Synthetic
ctcaatgccaagcgcagccat

SEQ ID NO: 21557 - DNA, 21 bp, Artificial Sequence
  Synthetic
tcaatgccaagcgcagccatc

SEQ ID NO: 21558 - DNA, 21 bp, Artificial Sequence
  Synthetic
gccatctgggacgcatcactg

SEQ ID NO: 21559 - DNA, 21 bp, Artificial Sequence
  Synthetic
catctgggacgcatcactgta

SEQ ID NO: 21560 - DNA, 21 bp, Artificial Sequence
  Synthetic
tgggacgcatcactgtagaga

SEQ ID NO: 21561 - DNA, 21 bp, Artificial Sequence
  Synthetic
cgcatcactgtagagaatgag

SEQ ID NO: 21562 - DNA, 21 bp, Artificial Sequence
  Synthetic
actgtagagaatgaggtggac

SEQ ID NO: 21563 - DNA, 21 bp, Artificial Sequence
  Synthetic
ggtggacctggacggccctcc

SEQ ID NO: 21564 - DNA, 21 bp, Artificial Sequence
  Synthetic
tgatgtacacgaaggcccgcg

SEQ ID NO: 21565 - DNA, 21 bp, Artificial Sequence
  Synthetic
attgatgtacacgaaggcccg

SEQ ID NO: 21566 - DNA, 21 bp, Artificial Sequence
  Synthetic
cattgatgtacacgaaggccc

SEQ ID NO: 21567 - DNA, 21 bp, Artificial Sequence
  Synthetic
cgcgggccttcgtgtacatca

SEQ ID NO: 21568 - DNA, 21 bp, Artificial Sequence
  Synthetic
acacggtactcattgatgtac

SEQ ID NO: 21569 - DNA, 21 bp, Artificial Sequence
  Synthetic
acatcaatgagtaccgtgttg

SEQ ID NO: 21570 - DNA, 21 bp, Artificial Sequence
  Synthetic
atcaatgagtaccgtgttggt

SEQ ID NO: 21571 - DNA, 21 bp, Artificial Sequence
  Synthetic
atcaccctcaaccaggtggct

SEQ ID NO: 21572 - DNA, 21 bp, Artificial Sequence
  Synthetic
gcagcccacagccacctggtt

SEQ ID NO: 21573 - DNA, 21 bp, Artificial Sequence
  Synthetic
tcgcagcccacagccacctgg

SEQ ID NO: 21574 - DNA, 21 bp, Artificial Sequence
  Synthetic
tcaaccaggtggctgtgggct

SEQ ID NO: 21575 - DNA, 21 bp, Artificial Sequence
  Synthetic
gtggctgtgggctgcgagtgc

SEQ ID NO: 21576 - DNA, 21 bp, Artificial Sequence
  Synthetic
ctgcgagtgccaggactgtct

SEQ ID NO: 21577 - DNA, 21 bp, Artificial Sequence
  Synthetic
aggactgtctgtgggcaccca

SEQ ID NO: 21578 - DNA, 21 bp, Artificial Sequence
  Synthetic
ggactgtctgtgggcacccac

SEQ ID NO: 21579 - DNA, 21 bp, Artificial Sequence
  Synthetic
gcacccactggaggctgctgc

SEQ ID NO: 21580 - DNA, 21 bp, Artificial Sequence
  Synthetic
cacccactggaggctgctgcc

SEQ ID NO: 21581 - DNA, 21 bp, Artificial Sequence
  Synthetic
acccactggaggctgctgccc

SEQ ID NO: 21582 - DNA, 21 bp, Artificial Sequence
  Synthetic
gcccccgggcagcagcctcca

SEQ ID NO: 21583 - DNA, 21 bp, Artificial Sequence
  Synthetic
caaacttgtgcagtgacgccc

SEQ ID NO: 21584 - DNA, 21 bp, Artificial Sequence
  Synthetic
cacaagtttgcctacaatgac

SEQ ID NO: 21585 - DNA, 21 bp, Artificial Sequence
  Synthetic
tgaccagggccaggtgcggct

SEQ ID NO: 21586 - DNA, 21 bp, Artificial Sequence
  Synthetic
agggccaggtgcggcttcgag

SEQ ID NO: 21587 - DNA, 21 bp, Artificial Sequence
  Synthetic
ctcgtagatgggcagcccggc

SEQ ID NO: 21588 - DNA, 21 bp, Artificial Sequence
  Synthetic
ttcgagccgggctgcccatct

SEQ ID NO: 21589 - DNA, 21 bp, Artificial Sequence
  Synthetic
cagcgggagttgcactcgtag

SEQ ID NO: 21590 - DNA, 21 bp, Artificial Sequence
  Synthetic
agtcatagccgcagcggcagc

SEQ ID NO: 21591 - DNA, 21 bp, Artificial Sequence
  Synthetic
cagtcatagccgcagcggcag

SEQ ID NO: 21592 - DNA, 21 bp, Artificial Sequence
  Synthetic
gcagtcatagccgcagcggca

SEQ ID NO: 21593 - DNA, 21 bp, Artificial Sequence
  Synthetic
tacccttctgtaccacacgat

SEQ ID NO: 21594 - DNA, 21 bp, Artificial Sequence
  Synthetic
ccccgggccacggagagcggg

SEQ ID NO: 21595 - DNA, 21 bp, Artificial Sequence
  Synthetic
ccgggccacggagagcgggaa

SEQ ID NO: 21596 - DNA, 21 bp, Artificial Sequence
  Synthetic
gccacggagagcgggaagagg

SEQ ID NO: 21597 - DNA, 21 bp, Artificial Sequence
  Synthetic
tggattgcccggccctccccc

SEQ ID NO: 21598 - DNA, 21 bp, Artificial Sequence
  Synthetic
ttgcccggccctcccccccgg

SEQ ID NO: 21599 - DNA, 21 bp, Artificial Sequence
  Synthetic
tgcccggccctcccccccgga

SEQ ID NO: 21600 - DNA, 21 bp, Artificial Sequence
  Synthetic
tcttccatccgggggggaggg

SEQ ID NO: 21601 - DNA, 21 bp, Artificial Sequence
  Synthetic
ccggccctcccccccggatgg

SEQ ID NO: 21602 - DNA, 21 bp, Artificial Sequence
  Synthetic
gccctcccccccggatggaag

SEQ ID NO: 21603 - DNA, 21 bp, Artificial Sequence
  Synthetic
ctccttcttccatccgggggg

SEQ ID NO: 21604 - DNA, 21 bp, Artificial Sequence
  Synthetic
ccctcccccccggatggaaga

SEQ ID NO: 21605 - DNA, 21 bp, Artificial Sequence
  Synthetic
tcctccttcttccatccgggg

SEQ ID NO: 21606 - DNA, 21 bp, Artificial Sequence
  Synthetic
ctcccccccggatggaagaag

SEQ ID NO: 21607 - DNA, 21 bp, Artificial Sequence
  Synthetic
ttcctccttcttccatccggg

SEQ ID NO: 21608 - DNA, 21 bp, Artificial Sequence
  Synthetic
tcccccccggatggaagaagg

SEQ ID NO: 21609 - DNA, 21 bp, Artificial Sequence
  Synthetic
cttcctccttcttccatccgg

SEQ ID NO: 21610 - DNA, 21 bp, Artificial Sequence
  Synthetic
acttcctccttcttccatccg

SEQ ID NO: 21611 - DNA, 21 bp, Artificial Sequence
  Synthetic
cacttcctccttcttccatcc

SEQ ID NO: 21612 - DNA, 21 bp, Artificial Sequence
  Synthetic
tcacttcctccttcttccatc

SEQ ID NO: 21613 - DNA, 21 bp, Artificial Sequence
  Synthetic
atcacttcctccttcttccat

SEQ ID NO: 21614 - DNA, 21 bp, Artificial Sequence
  Synthetic
atggaagaaggaggaagtgat

SEQ ID NO: 21615 - DNA, 21 bp, Artificial Sequence
  Synthetic
aggaggaagtgatccgaaaat

SEQ ID NO: 21616 - DNA, 21 bp, Artificial Sequence
  Synthetic
gccagcacttagcccagattt

SEQ ID NO: 21617 - DNA, 21 bp, Artificial Sequence
  Synthetic
aaatctgggctaagtgctggc

SEQ ID NO: 21618 - DNA, 21 bp, Artificial Sequence
  Synthetic
ctttcttctagtccaagtggt

SEQ ID NO: 21619 - DNA, 21 bp, Artificial Sequence
  Synthetic
tgaacttcttaccacttggac

SEQ ID NO: 21620 - DNA, 21 bp, Artificial Sequence
  Synthetic
tagtccaagtggtaagaagtt

SEQ ID NO: 21621 - DNA, 21 bp, Artificial Sequence
  Synthetic
tgcttctgaacttcttaccac

SEQ ID NO: 21622 - DNA, 21 bp, Artificial Sequence
  Synthetic
cttgccaactgaggcttgctt

SEQ ID NO: 21623 - DNA, 21 bp, Artificial Sequence
  Synthetic
aagcctcagttggcaaggtac

SEQ ID NO: 21624 - DNA, 21 bp, Artificial Sequence
  Synthetic
agcctcagttggcaaggtacc

SEQ ID NO: 21625 - DNA, 21 bp, Artificial Sequence
  Synthetic
gcctcagttggcaaggtacct

SEQ ID NO: 21626 - DNA, 21 bp, Artificial Sequence
  Synthetic
atttcccaggtaccttgccaa

SEQ ID NO: 21627 - DNA, 21 bp, Artificial Sequence
  Synthetic
ccagttctgaagtcaaaactg

SEQ ID NO: 21628 - DNA, 21 bp, Artificial Sequence
  Synthetic
ctaggcatcatctttccagtt

SEQ ID NO: 21629 - DNA, 21 bp, Artificial Sequence
  Synthetic
gacttagtgcatcagatgtaa

SEQ ID NO: 21630 - DNA, 21 bp, Artificial Sequence
  Synthetic
acagaacaaattataaaaacc

SEQ ID NO: 21631 - DNA, 21 bp, Artificial Sequence
  Synthetic
cagaacaaattataaaaacca

SEQ ID NO: 21632 - DNA, 21 bp, Artificial Sequence
  Synthetic
tagataataccttgaagacct

SEQ ID NO: 21633 - DNA, 21 bp, Artificial Sequence
  Synthetic
gagttggtccaggtagcaatg

SEQ ID NO: 21634 - DNA, 21 bp, Artificial Sequence
  Synthetic
aaagggtctcatcattgctac

SEQ ID NO: 21635 - DNA, 21 bp, Artificial Sequence
  Synthetic
agcactggcaacagcagataa

SEQ ID NO: 21636 - DNA, 21 bp, Artificial Sequence
  Synthetic
acacaagctctgcgccaatca

SEQ ID NO: 21637 - DNA, 21 bp, Artificial Sequence
  Synthetic
agacttgccctgtgattggcg

SEQ ID NO: 21638 - DNA, 21 bp, Artificial Sequence
  Synthetic
acagggcaagtctccgctgct

SEQ ID NO: 21639 - DNA, 21 bp, Artificial Sequence
  Synthetic
cagggcaagtctccgctgctg

SEQ ID NO: 21640 - DNA, 21 bp, Artificial Sequence
  Synthetic
caagtctccgctgctgtggaa

SEQ ID NO: 21641 - DNA, 21 bp, Artificial Sequence
  Synthetic
gagatgtgttaagccaaacag

SEQ ID NO: 21642 - DNA, 21 bp, Artificial Sequence
  Synthetic
aataaaagctttgcagagggg

SEQ ID NO: 21643 - DNA, 21 bp, Artificial Sequence
  Synthetic
gtgacaataaaagctttgcag

SEQ ID NO: 21644 - DNA, 21 bp, Artificial Sequence
  Synthetic
tgtgacaataaaagctttgca

SEQ ID NO: 21645 - DNA, 21 bp, Artificial Sequence
  Synthetic
tctgtgacaataaaagctttg

SEQ ID NO: 21646 - DNA, 21 bp, Artificial Sequence
  Synthetic
tttaaaaaggaaacaggaaga

SEQ ID NO: 21647 - DNA, 21 bp, Artificial Sequence
  Synthetic
gagcgagtacagcaagtacgc

SEQ ID NO: 21648 - DNA, 21 bp, Artificial Sequence
  Synthetic
gtacagcaagtacgcaagaaa

SEQ ID NO: 21649 - DNA, 21 bp, Artificial Sequence
  Synthetic
tacagcaagtacgcaagaaat

SEQ ID NO: 21650 - DNA, 21 bp, Artificial Sequence
  Synthetic
agcaagtacgcaagaaattgg

SEQ ID NO: 21651 - DNA, 21 bp, Artificial Sequence
  Synthetic
ggctgccggcacacacagtac

SEQ ID NO: 21652 - DNA, 21 bp, Artificial Sequence
  Synthetic
gtgtgccggcagccgtacgac

SEQ ID NO: 21653 - DNA, 21 bp, Artificial Sequence
  Synthetic
acgacgtgaaccgcttcatga

SEQ ID NO: 21654 - DNA, 21 bp, Artificial Sequence
  Synthetic
ttgcagatatcgcactcgatc

SEQ ID NO: 21655 - DNA, 21 bp, Artificial Sequence
  Synthetic
atgatcgagtgcgatatctgc

SEQ ID NO: 21656 - DNA, 21 bp, Artificial Sequence
  Synthetic
agggggtttatttacctgccg

SEQ ID NO: 21657 - DNA, 21 bp, Artificial Sequence
  Synthetic
gagggggtttatttacctgcc

SEQ ID NO: 21658 - DNA, 21 bp, Artificial Sequence
  Synthetic
gtttcctttgtcttagctgtg

SEQ ID NO: 21659 - DNA, 21 bp, Artificial Sequence
  Synthetic
tttcctttgtcttagctgtgt

SEQ ID NO: 21660 - DNA, 21 bp, Artificial Sequence
  Synthetic
tttgtcttagctgtgttggag

SEQ ID NO: 21661 - DNA, 21 bp, Artificial Sequence
  Synthetic
gtcttagctgtgttggagtag

SEQ ID NO: 21662 - DNA, 21 bp, Artificial Sequence
  Synthetic
aaccatgtaaaactgcacagt

SEQ ID NO: 21663 - DNA, 21 bp, Artificial Sequence
  Synthetic
gaaccatgtaaaactgcacag

SEQ ID NO: 21664 - DNA, 21 bp, Artificial Sequence
  Synthetic
tttgttcagaaatattgctta

SEQ ID NO: 21665 - DNA, 21 bp, Artificial Sequence
  Synthetic
ttgttcagaaatattgcttaa

SEQ ID NO: 21666 - DNA, 21 bp, Artificial Sequence
  Synthetic
tgttcagaaatattgcttaat

SEQ ID NO: 21667 - DNA, 21 bp, Artificial Sequence
  Synthetic
gtggaaatctgtatagctgtc

SEQ ID NO: 21668 - DNA, 21 bp, Artificial Sequence
  Synthetic
cagatttccacattgacttcg

SEQ ID NO: 21669 - DNA, 21 bp, Artificial Sequence
  Synthetic
agatttccacattgacttcgg

SEQ ID NO: 21670 - DNA, 21 bp, Artificial Sequence
  Synthetic
gaagttccaccgaagtcaatg

SEQ ID NO: 21671 - DNA, 21 bp, Artificial Sequence
  Synthetic
tgaagttccaccgaagtcaat

SEQ ID NO: 21672 - DNA, 21 bp, Artificial Sequence
  Synthetic
tggtaccagactgaagttcca

SEQ ID NO: 21673 - DNA, 21 bp, Artificial Sequence
  Synthetic
cccagaggacatggtaccaga

SEQ ID NO: 21674 - DNA, 21 bp, Artificial Sequence
  Synthetic
ttcagtctggtaccatgtcct

SEQ ID NO: 21675 - DNA, 21 bp, Artificial Sequence
  Synthetic
aaaataccccaatcttaccca

SEQ ID NO: 21676 - DNA, 21 bp, Artificial Sequence
  Synthetic
tttatttaataaagccaacag

SEQ ID NO: 21677 - DNA, 21 bp, Artificial Sequence
  Synthetic
cagatgaaaatttggcacgtt

SEQ ID NO: 21678 - DNA, 21 bp, Artificial Sequence
  Synthetic
aaatttggcacgttatgaatc

SEQ ID NO: 21679 - DNA, 21 bp, Artificial Sequence
  Synthetic
aatttggcacgttatgaatct

SEQ ID NO: 21680 - DNA, 21 bp, Artificial Sequence
  Synthetic
tcttggagttcatctgtgacc

SEQ ID NO: 21681 - DNA, 21 bp, Artificial Sequence
  Synthetic
ggagttcatctgtgacccaga

SEQ ID NO: 21682 - DNA, 21 bp, Artificial Sequence
  Synthetic
acacctcactctgggtcacag

SEQ ID NO: 21683 - DNA, 21 bp, Artificial Sequence
  Synthetic
tgacccagagtgaggtgttct

SEQ ID NO: 21684 - DNA, 21 bp, Artificial Sequence
  Synthetic
gacccagagtgaggtgttctt

SEQ ID NO: 21685 - DNA, 21 bp, Artificial Sequence
  Synthetic
atctccaaagaacacctcact

SEQ ID NO: 21686 - DNA, 21 bp, Artificial Sequence
  Synthetic
gaggtgttctttggagataag

SEQ ID NO: 21687 - DNA, 21 bp, Artificial Sequence
  Synthetic
catttatccaccttatctcca

SEQ ID NO: 21688 - DNA, 21 bp, Artificial Sequence
  Synthetic
tgctacaaatgtgtggtaaag

SEQ ID NO: 21689 - DNA, 21 bp, Artificial Sequence
  Synthetic
gctacaaatgtgtggtaaagc

SEQ ID NO: 21690 - DNA, 21 bp, Artificial Sequence
  Synthetic
tgggatgaaaaccttacctgt

SEQ ID NO: 21691 - DNA, 21 bp, Artificial Sequence
  Synthetic
atgggatgaaaaccttacctg

SEQ ID NO: 21692 - DNA, 21 bp, Artificial Sequence
  Synthetic
atccatgctgtgctcacttct

SEQ ID NO: 21693 - DNA, 21 bp, Artificial Sequence
  Synthetic
gtcctgagaagtgagcacagc

SEQ ID NO: 21694 - DNA, 21 bp, Artificial Sequence
  Synthetic
aaagccatacagtcctgagaa

SEQ ID NO: 21695 - DNA, 21 bp, Artificial Sequence
  Synthetic
cttctcaggactgtatggctt

SEQ ID NO: 21696 - DNA, 21 bp, Artificial Sequence
  Synthetic
ccccaaaagccatacagtcct

SEQ ID NO: 21697 - DNA, 21 bp, Artificial Sequence
  Synthetic
ttctcaggactgtatggcttt

SEQ ID NO: 21698 - DNA, 21 bp, Artificial Sequence
  Synthetic
ccccccaaaagccatacagtc

SEQ ID NO: 21699 - DNA, 21 bp, Artificial Sequence
  Synthetic
cgagggggtggagatggtcga

SEQ ID NO: 21700 - DNA, 21 bp, Artificial Sequence
  Synthetic
gggtggagatggtcgaaagaa

SEQ ID NO: 21701 - DNA, 21 bp, Artificial Sequence
  Synthetic
ggtggagatggtcgaaagaaa

SEQ ID NO: 21702 - DNA, 21 bp, Artificial Sequence
  Synthetic
aacggaaacggtgtggtactt

SEQ ID NO: 21703 - DNA, 21 bp, Artificial Sequence
  Synthetic
acttgtgagccctgccggcgg

SEQ ID NO: 21704 - DNA, 21 bp, Artificial Sequence
  Synthetic
cttgtgagccctgccggcggc

SEQ ID NO: 21705 - DNA, 21 bp, Artificial Sequence
  Synthetic
cacgcaccagatctgcaaact

SEQ ID NO: 21706 - DNA, 21 bp, Artificial Sequence
  Synthetic
agatctgcaaactgcgaaaat

SEQ ID NO: 21707 - DNA, 21 bp, Artificial Sequence
  Synthetic
aatgtggccttccaaaccatc

SEQ ID NO: 21708 - DNA, 21 bp, Artificial Sequence
  Synthetic
acatactagctcaggatggtt

SEQ ID NO: 21709 - DNA, 21 bp, Artificial Sequence
  Synthetic
tacatactagctcaggatggt

SEQ ID NO: 21710 - DNA, 21 bp, Artificial Sequence
  Synthetic
tacatcaggtacatactagct

SEQ ID NO: 21711 - DNA, 21 bp, Artificial Sequence
  Synthetic
gcaagagtcacacagaagaat

SEQ ID NO: 21712 - DNA, 21 bp, Artificial Sequence
  Synthetic
actatcgcaagagtcacacag

SEQ ID NO: 21713 - DNA, 21 bp, Artificial Sequence
  Synthetic
tccactatcgcaagagtcaca

SEQ ID NO: 21714 - DNA, 21 bp, Artificial Sequence
  Synthetic
ttctgtgtgactcttgcgata

SEQ ID NO: 21715 - DNA, 21 bp, Artificial Sequence
  Synthetic
cagtatggtatccactatcgc

SEQ ID NO: 21716 - DNA, 21 bp, Artificial Sequence
  Synthetic
tgggatgatcatcagaggagg

SEQ ID NO: 21717 - DNA, 21 bp, Artificial Sequence
  Synthetic
catctgggatgatcatcagag

SEQ ID NO: 21718 - DNA, 21 bp, Artificial Sequence
  Synthetic
tccatctgggatgatcatcag

SEQ ID NO: 21719 - DNA, 21 bp, Artificial Sequence
  Synthetic
ctcctctgatgatcatcccag

SEQ ID NO: 21720 - DNA, 21 bp, Artificial Sequence
  Synthetic
ctccatctgggatgatcatca

SEQ ID NO: 21721 - DNA, 21 bp, Artificial Sequence
  Synthetic
tcctctgatgatcatcccaga

SEQ ID NO: 21722 - DNA, 21 bp, Artificial Sequence
  Synthetic
ttctccatctgggatgatcat

SEQ ID NO: 21723 - DNA, 21 bp, Artificial Sequence
  Synthetic
ctctgatgatcatcccagatg

SEQ ID NO: 21724 - DNA, 21 bp, Artificial Sequence
  Synthetic
tgggcagaaccattctccatc

SEQ ID NO: 21725 - DNA, 21 bp, Artificial Sequence
  Synthetic
gtgggcagaaccattctccat

SEQ ID NO: 21726 - DNA, 21 bp, Artificial Sequence
  Synthetic
cttacatgttggcaaggtggg

SEQ ID NO: 21727 - DNA, 21 bp, Artificial Sequence
  Synthetic
ggggtcttacatgttggcaag

SEQ ID NO: 21728 - DNA, 21 bp, Artificial Sequence
  Synthetic
tggcttcccaggagtttgagg

SEQ ID NO: 21729 - DNA, 21 bp, Artificial Sequence
  Synthetic
gaagctattgttgacaaaaga

SEQ ID NO: 21730 - DNA, 21 bp, Artificial Sequence
  Synthetic
ttgacaaaagacaggataaaa

SEQ ID NO: 21731 - DNA, 21 bp, Artificial Sequence
  Synthetic
tgacaaaagacaggataaaaa

SEQ ID NO: 21732 - DNA, 21 bp, Artificial Sequence
  Synthetic
gacaaaagacaggataaaaat

SEQ ID NO: 21733 - DNA, 21 bp, Artificial Sequence
  Synthetic
gaatacacagtatttggttcg

SEQ ID NO: 21734 - DNA, 21 bp, Artificial Sequence
  Synthetic
aatacacagtatttggttcgg

SEQ ID NO: 21735 - DNA, 21 bp, Artificial Sequence
  Synthetic
ctgtttgtcataacctttcca

SEQ ID NO: 21736 - DNA, 21 bp, Artificial Sequence
  Synthetic
cggtggaaaggttatgacaaa

SEQ ID NO: 21737 - DNA, 21 bp, Artificial Sequence
  Synthetic
ttatgacaaacaggatgacac

SEQ ID NO: 21738 - DNA, 21 bp, Artificial Sequence
  Synthetic
tatgacaaacaggatgacact

SEQ ID NO: 21739 - DNA, 21 bp, Artificial Sequence
  Synthetic
atgacaaacaggatgacactt

SEQ ID NO: 21740 - DNA, 21 bp, Artificial Sequence
  Synthetic
aacaggatgacacttgggaac

SEQ ID NO: 21741 - DNA, 21 bp, Artificial Sequence
  Synthetic
tgggaaccagagcagcacctc

SEQ ID NO: 21742 - DNA, 21 bp, Artificial Sequence
  Synthetic
cagagcagcacctcatgaact

SEQ ID NO: 21743 - DNA, 21 bp, Artificial Sequence
  Synthetic
ttccgcacattacagcggggt

SEQ ID NO: 21744 - DNA, 21 bp, Artificial Sequence
  Synthetic
attacagcggggttggggtct

SEQ ID NO: 21745 - DNA, 21 bp, Artificial Sequence
  Synthetic
aaaaacagatattaaaaaggt

SEQ ID NO: 21746 - DNA, 21 bp, Artificial Sequence
  Synthetic
ttcttgttctagggtgaattt

SEQ ID NO: 21747 - DNA, 21 bp, Artificial Sequence
  Synthetic
tgttctagggtgaatttgtga

SEQ ID NO: 21748 - DNA, 21 bp, Artificial Sequence
  Synthetic
tactcattcacaaattcaccc

SEQ ID NO: 21749 - DNA, 21 bp, Artificial Sequence
  Synthetic
ggtgaatttgtgaatgagtat

SEQ ID NO: 21750 - DNA, 21 bp, Artificial Sequence
  Synthetic
aatttgtgaatgagtatgtgg

SEQ ID NO: 21751 - DNA, 21 bp, Artificial Sequence
  Synthetic
agtatgtgggtgagcttatag

SEQ ID NO: 21752 - DNA, 21 bp, Artificial Sequence
  Synthetic
atgtgggtgagcttatagatg

SEQ ID NO: 21753 - DNA, 21 bp, Artificial Sequence
  Synthetic
tgggtgagcttatagatgaag

SEQ ID NO: 21754 - DNA, 21 bp, Artificial Sequence
  Synthetic
gcttatagatgaagaagaatg

SEQ ID NO: 21755 - DNA, 21 bp, Artificial Sequence
  Synthetic
agatgaagaagaatgcagagc

SEQ ID NO: 21756 - DNA, 21 bp, Artificial Sequence
  Synthetic
gagctcgaattcgctatgctc

SEQ ID NO: 21757 - DNA, 21 bp, Artificial Sequence
  Synthetic
atgttcttgagcatagcgaat

SEQ ID NO: 21758 - DNA, 21 bp, Artificial Sequence
  Synthetic
gatatcatgttcttgagcata

SEQ ID NO: 21759 - DNA, 21 bp, Artificial Sequence
  Synthetic
gaaattagtgatatcatgttc

SEQ ID NO: 21760 - DNA, 21 bp, Artificial Sequence
  Synthetic
actttgtctagggtgagcata

SEQ ID NO: 21761 - DNA, 21 bp, Artificial Sequence
  Synthetic
ccattacttactttgtctagg

SEQ ID NO: 21762 - DNA, 21 bp, Artificial Sequence
  Synthetic
tttcccattacttactttgtc

SEQ ID NO: 21763 - DNA, 21 bp, Artificial Sequence
  Synthetic
ccagcatcaatgattcggtcc

SEQ ID NO: 21764 - DNA, 21 bp, Artificial Sequence
  Synthetic
gaatcattgatgctggtccca

SEQ ID NO: 21765 - DNA, 21 bp, Artificial Sequence
  Synthetic
aatcattgatgctggtcccaa

SEQ ID NO: 21766 - DNA, 21 bp, Artificial Sequence
  Synthetic
tgaaccgagcatagtttcctt

SEQ ID NO: 21767 - DNA, 21 bp, Artificial Sequence
  Synthetic
atgaaccgagcatagtttcct

SEQ ID NO: 21768 - DNA, 21 bp, Artificial Sequence
  Synthetic
aaaggaaactatgctcggttc

SEQ ID NO: 21769 - DNA, 21 bp, Artificial Sequence
  Synthetic
ctggcagcaatgattcatgaa

SEQ ID NO: 21770 - DNA, 21 bp, Artificial Sequence
  Synthetic
ttgggctggcagcaatgattc

SEQ ID NO: 21771 - DNA, 21 bp, Artificial Sequence
  Synthetic
atcattgctgccagcccaact

SEQ ID NO: 21772 - DNA, 21 bp, Artificial Sequence
  Synthetic
tgccagcccaactgtgaaaca

SEQ ID NO: 21773 - DNA, 21 bp, Artificial Sequence
  Synthetic
gaccacttctgtgtttcacag

SEQ ID NO: 21774 - DNA, 21 bp, Artificial Sequence
  Synthetic
tgtgaaacacagaagtggtct

SEQ ID NO: 21775 - DNA, 21 bp, Artificial Sequence
  Synthetic
aaacacagaagtggtctgtga

SEQ ID NO: 21776 - DNA, 21 bp, Artificial Sequence
  Synthetic
aacacagaagtggtctgtgaa

SEQ ID NO: 21777 - DNA, 21 bp, Artificial Sequence
  Synthetic
acttagtgcaaaaaggcctac

SEQ ID NO: 21778 - DNA, 21 bp, Artificial Sequence
  Synthetic
ctaagtgacattaaagcaggt

SEQ ID NO: 21779 - DNA, 21 bp, Artificial Sequence
  Synthetic
aacttaccttcaactacaacc

SEQ ID NO: 21780 - DNA, 21 bp, Artificial Sequence
  Synthetic
ccaagacattctaggttgtag

SEQ ID NO: 21781 - DNA, 21 bp, Artificial Sequence
  Synthetic
ttagctggtgctttgtgtgct

SEQ ID NO: 21782 - DNA, 21 bp, Artificial Sequence
  Synthetic
tgctttgtgtgctcagaaggt

SEQ ID NO: 21783 - DNA, 21 bp, Artificial Sequence
  Synthetic
gaagaaatgatttcttacctt

SEQ ID NO: 21784 - DNA, 21 bp, Artificial Sequence
  Synthetic
cagcacagaaggctgcctcct

SEQ ID NO: 21785 - DNA, 21 bp, Artificial Sequence
  Synthetic
agcagggcaagaatcacagca

SEQ ID NO: 21786 - DNA, 21 bp, Artificial Sequence
  Synthetic
cacgatgaaaagcagcagggc

SEQ ID NO: 21787 - DNA, 21 bp, Artificial Sequence
  Synthetic
ggcattcacgatgaaaagcag

SEQ ID NO: 21788 - DNA, 21 bp, Artificial Sequence
  Synthetic
atcaatgttcaggcattcacg

SEQ ID NO: 21789 - DNA, 21 bp, Artificial Sequence
  Synthetic
aatgcctgaacattgatatcc

SEQ ID NO: 21790 - DNA, 21 bp, Artificial Sequence
  Synthetic
gcctgaacattgatatccctg

SEQ ID NO: 21791 - DNA, 21 bp, Artificial Sequence
  Synthetic
cctgaacattgatatccctga

SEQ ID NO: 21792 - DNA, 21 bp, Artificial Sequence
  Synthetic
attgcaataccagtttccttc

SEQ ID NO: 21793 - DNA, 21 bp, Artificial Sequence
  Synthetic
cattgcaataccagtttcctt

SEQ ID NO: 21794 - DNA, 21 bp, Artificial Sequence
  Synthetic
agccaatgagatatgggcata

SEQ ID NO: 21795 - DNA, 21 bp, Artificial Sequence
  Synthetic
ccaatgagatatgggcataca

SEQ ID NO: 21796 - DNA, 21 bp, Artificial Sequence
  Synthetic
caatgagatatgggcatacag

SEQ ID NO: 21797 - DNA, 21 bp, Artificial Sequence
  Synthetic
tatgggcatacagagggacac

SEQ ID NO: 21798 - DNA, 21 bp, Artificial Sequence
  Synthetic
atgggcatacagagggacaca

SEQ ID NO: 21799 - DNA, 21 bp, Artificial Sequence
  Synthetic
ttctcaaagaaccttacctcc

SEQ ID NO: 21800 - DNA, 21 bp, Artificial Sequence
  Synthetic
tccacaagtcacaataaaact

SEQ ID NO: 21801 - DNA, 21 bp, Artificial Sequence
  Synthetic
acttgtggaagtgatggtgat

SEQ ID NO: 21802 - DNA, 21 bp, Artificial Sequence
  Synthetic
ttgtggaagtgatggtgatgt

SEQ ID NO: 21803 - DNA, 21 bp, Artificial Sequence
  Synthetic
aagtgatggtgatgtgaggat

SEQ ID NO: 21804 - DNA, 21 bp, Artificial Sequence
  Synthetic
agtgatggtgatgtgaggatt

SEQ ID NO: 21805 - DNA, 21 bp, Artificial Sequence
  Synthetic
gtgatggtgatgtgaggattt

SEQ ID NO: 21806 - DNA, 21 bp, Artificial Sequence
  Synthetic
gatgtgatggatagcagccaa

SEQ ID NO: 21807 - DNA, 21 bp, Artificial Sequence
  Synthetic
tagcagccaacagaaaacatt

SEQ ID NO: 21808 - DNA, 21 bp, Artificial Sequence
  Synthetic
gcagccaacagaaaacatttc

SEQ ID NO: 21809 - DNA, 21 bp, Artificial Sequence
  Synthetic
taaaacaggggcatcatgtcc

SEQ ID NO: 21810 - DNA, 21 bp, Artificial Sequence
  Synthetic
atcaaaggaaagacttaaaac

SEQ ID NO: 21811 - DNA, 21 bp, Artificial Sequence
  Synthetic
gatcaaaggaaagacttaaaa

SEQ ID NO: 21812 - DNA, 21 bp, Artificial Sequence
  Synthetic
ttaagtctttcctttgatcct

SEQ ID NO: 21813 - DNA, 21 bp, Artificial Sequence
  Synthetic
gaaagatgtccttaggatcaa

SEQ ID NO: 21814 - DNA, 21 bp, Artificial Sequence
  Synthetic
agaaagatgtccttaggatca

SEQ ID NO: 21815 - DNA, 21 bp, Artificial Sequence
  Synthetic
taattaccagaaagatgtcct

SEQ ID NO: 21816 - DNA, 21 bp, Artificial Sequence
  Synthetic
tgcaggcatcagctagttgtg

SEQ ID NO: 21817 - DNA, 21 bp, Artificial Sequence
  Synthetic
agctagttgtgatggatctgt

SEQ ID NO: 21818 - DNA, 21 bp, Artificial Sequence
  Synthetic
ccaattacaagtaaatacact

SEQ ID NO: 21819 - DNA, 21 bp, Artificial Sequence
  Synthetic
caattacaagtaaatacactt

SEQ ID NO: 21820 - DNA, 21 bp, Artificial Sequence
  Synthetic
acttcaagctaccaaccagac

SEQ ID NO: 21821 - DNA, 21 bp, Artificial Sequence
  Synthetic
agtcctggtctggttggtagc

SEQ ID NO: 21822 - DNA, 21 bp, Artificial Sequence
  Synthetic
gacttaataaagcacaacttg

SEQ ID NO: 21823 - DNA, 21 bp, Artificial Sequence
  Synthetic
tgccactttaggtctattcca

SEQ ID NO: 21824 - DNA, 21 bp, Artificial Sequence
  Synthetic
actttaggtctattccagtga

SEQ ID NO: 21825 - DNA, 21 bp, Artificial Sequence
  Synthetic
ttaacatatttcatctactca

SEQ ID NO: 21826 - DNA, 21 bp, Artificial Sequence
  Synthetic
acatatttcatctactcagtg

SEQ ID NO: 21827 - DNA, 21 bp, Artificial Sequence
  Synthetic
ttgtcattcttcactgagtag

SEQ ID NO: 21828 - DNA, 21 bp, Artificial Sequence
  Synthetic
atttgttcttgtcattcttca

SEQ ID NO: 21829 - DNA, 21 bp, Artificial Sequence
  Synthetic
atgaatacagtacaactgtat

SEQ ID NO: 21830 - DNA, 21 bp, Artificial Sequence
  Synthetic
tacaactgtatatgaaagttc

SEQ ID NO: 21831 - DNA, 21 bp, Artificial Sequence
  Synthetic
acaactgtatatgaaagttcc

SEQ ID NO: 21832 - DNA, 21 bp, Artificial Sequence
  Synthetic
caactgtatatgaaagttcca

SEQ ID NO: 21833 - DNA, 21 bp, Artificial Sequence
  Synthetic
gtatatgaaagttccagggag

SEQ ID NO: 21834 - DNA, 21 bp, Artificial Sequence
  Synthetic
atcacctggtgtccgactccc

SEQ ID NO: 21835 - DNA, 21 bp, Artificial Sequence
  Synthetic
aatcacctggtgtccgactcc

SEQ ID NO: 21836 - DNA, 21 bp, Artificial Sequence
  Synthetic
ccaatatttatgttaacagag

SEQ ID NO: 21837 - DNA, 21 bp, Artificial Sequence
  Synthetic
ctggaccaatatttatgttaa

SEQ ID NO: 21838 - DNA, 21 bp, Artificial Sequence
  Synthetic
ctgttaacataaatattggtc

SEQ ID NO: 21839 - DNA, 21 bp, Artificial Sequence
  Synthetic
tgttaacataaatattggtcc

SEQ ID NO: 21840 - DNA, 21 bp, Artificial Sequence
  Synthetic
taaatattggtccaggagatt

SEQ ID NO: 21841 - DNA, 21 bp, Artificial Sequence
  Synthetic
caacaaaccattcacaatctc

SEQ ID NO: 21842 - DNA, 21 bp, Artificial Sequence
  Synthetic
attgtgaatggtttgttgtac

SEQ ID NO: 21843 - DNA, 21 bp, Artificial Sequence
  Synthetic
gtttgttgtacctgaagatta

SEQ ID NO: 21844 - DNA, 21 bp, Artificial Sequence
  Synthetic
tttgttgtacctgaagattat

SEQ ID NO: 21845 - DNA, 21 bp, Artificial Sequence
  Synthetic
cctgaagattattggggtgtt

SEQ ID NO: 21846 - DNA, 21 bp, Artificial Sequence
  Synthetic
ggggtgttctgaatgacttct

SEQ ID NO: 21847 - DNA, 21 bp, Artificial Sequence
  Synthetic
attaaaaaattcaaattattt

SEQ ID NO: 21848 - DNA, 21 bp, Artificial Sequence
  Synthetic
tgagttcttggtggcccaacc

SEQ ID NO: 21849 - DNA, 21 bp, Artificial Sequence
  Synthetic
gatcttcaaggttgggccacc

SEQ ID NO: 21850 - DNA, 21 bp, Artificial Sequence
  Synthetic
ggcccaaccttgaagatcttt

SEQ ID NO: 21851 - DNA, 21 bp, Artificial Sequence
  Synthetic
gcttcataaagatcttcaagg

SEQ ID NO: 21852 - DNA, 21 bp, Artificial Sequence
  Synthetic
tcgctgaataaatctatacac

SEQ ID NO: 21853 - DNA, 21 bp, Artificial Sequence
  Synthetic
gtcgctgaataaatctataca

SEQ ID NO: 21854 - DNA, 21 bp, Artificial Sequence
  Synthetic
tgtatagatttattcagcgac

SEQ ID NO: 21855 - DNA, 21 bp, Artificial Sequence
  Synthetic
gtatagatttattcagcgacc

SEQ ID NO: 21856 - DNA, 21 bp, Artificial Sequence
  Synthetic
ccagaccaaatctccaggtcg

SEQ ID NO: 21857 - DNA, 21 bp, Artificial Sequence
  Synthetic
tcagcgacctggagatttggt

SEQ ID NO: 21858 - DNA, 21 bp, Artificial Sequence
  Synthetic
gataaatgcaggcactgtgca

SEQ ID NO: 21859 - DNA, 21 bp, Artificial Sequence
  Synthetic
gttattgcaccagccaacagc

SEQ ID NO: 21860 - DNA, 21 bp, Artificial Sequence
  Synthetic
tggctggtgcaataacattgc

SEQ ID NO: 21861 - DNA, 21 bp, Artificial Sequence
  Synthetic
ggctggtgcaataacattgcc

SEQ ID NO: 21862 - DNA, 21 bp, Artificial Sequence
  Synthetic
attcacctacgctcttaccag

SEQ ID NO: 21863 - DNA, 21 bp, Artificial Sequence
  Synthetic
ttcacctacgctcttaccagc

SEQ ID NO: 21864 - DNA, 21 bp, Artificial Sequence
  Synthetic
cacctacgctcttaccagctg

SEQ ID NO: 21865 - DNA, 21 bp, Artificial Sequence
  Synthetic
acctacgctcttaccagctgg

SEQ ID NO: 21866 - DNA, 21 bp, Artificial Sequence
  Synthetic
cctacgctcttaccagctgga

SEQ ID NO: 21867 - DNA, 21 bp, Artificial Sequence
  Synthetic
agtttactccctccagctggt

SEQ ID NO: 21868 - DNA, 21 bp, Artificial Sequence
  Synthetic
ttctgacaatggaagcgctgg

SEQ ID NO: 21869 - DNA, 21 bp, Artificial Sequence
  Synthetic
ctcgcccagcgcttccattgt

SEQ ID NO: 21870 - DNA, 21 bp, Artificial Sequence
  Synthetic
gccattctgacaatggaagcg

SEQ ID NO: 21871 - DNA, 21 bp, Artificial Sequence
  Synthetic
aggatacagccattctgacaa

SEQ ID NO: 21872 - DNA, 21 bp, Artificial Sequence
  Synthetic
caggatacagccattctgaca

SEQ ID NO: 21873 - DNA, 21 bp, Artificial Sequence
  Synthetic
cattgtcagaatggctgtatc

SEQ ID NO: 21874 - DNA, 21 bp, Artificial Sequence
  Synthetic
attgtcagaatggctgtatcc

SEQ ID NO: 21875 - DNA, 21 bp, Artificial Sequence
  Synthetic
ttgtcagaatggctgtatcct

SEQ ID NO: 21876 - DNA, 21 bp, Artificial Sequence
  Synthetic
agaatggctgtatcctgggag

SEQ ID NO: 21877 - DNA, 21 bp, Artificial Sequence
  Synthetic
ggctgtatcctgggagatgag

SEQ ID NO: 21878 - DNA, 21 bp, Artificial Sequence
  Synthetic
atcctgggagatgagatgggc

SEQ ID NO: 21879 - DNA, 21 bp, Artificial Sequence
  Synthetic
ccccaggcccatctcatctcc

SEQ ID NO: 21880 - DNA, 21 bp, Artificial Sequence
  Synthetic
tcctgggagatgagatgggcc

SEQ ID NO: 21881 - DNA, 21 bp, Artificial Sequence
  Synthetic
cctgggagatgagatgggcct

SEQ ID NO: 21882 - DNA, 21 bp, Artificial Sequence
  Synthetic
ctgggagatgagatgggcctg

SEQ ID NO: 21883 - DNA, 21 bp, Artificial Sequence
  Synthetic
taaatgaagagagcaatagtc

SEQ ID NO: 21884 - DNA, 21 bp, Artificial Sequence
  Synthetic
ataaatgaagagagcaatagt

SEQ ID NO: 21885 - DNA, 21 bp, Artificial Sequence
  Synthetic
ttgctctcttcatttatttgg

SEQ ID NO: 21886 - DNA, 21 bp, Artificial Sequence
  Synthetic
tgctctcttcatttatttggc

SEQ ID NO: 21887 - DNA, 21 bp, Artificial Sequence
  Synthetic
tcttcctgccaaataaatgaa

SEQ ID NO: 21888 - DNA, 21 bp, Artificial Sequence
  Synthetic
aatcttcctgccaaataaatg

SEQ ID NO: 21889 - DNA, 21 bp, Artificial Sequence
  Synthetic
tttaatcttcctgccaaataa

SEQ ID NO: 21890 - DNA, 21 bp, Artificial Sequence
  Synthetic
atttggcaggaagattaaatg

SEQ ID NO: 21891 - DNA, 21 bp, Artificial Sequence
  Synthetic
tggcaggaagattaaatgatg

SEQ ID NO: 21892 - DNA, 21 bp, Artificial Sequence
  Synthetic
aacagacaagggacaaagaat

SEQ ID NO: 21893 - DNA, 21 bp, Artificial Sequence
  Synthetic
attctttgtcccttgtctgtt

SEQ ID NO: 21894 - DNA, 21 bp, Artificial Sequence
  Synthetic
gctcaaaacagacaagggaca

SEQ ID NO: 21895 - DNA, 21 bp, Artificial Sequence
  Synthetic
tccagttgctcaaaacagaca

SEQ ID NO: 21896 - DNA, 21 bp, Artificial Sequence
  Synthetic
ttccagttgctcaaaacagac

SEQ ID NO: 21897 - DNA, 21 bp, Artificial Sequence
  Synthetic
agcaactggaaagaagaaatg

SEQ ID NO: 21898 - DNA, 21 bp, Artificial Sequence
  Synthetic
caggaaagacctggagcaaat

SEQ ID NO: 21899 - DNA, 21 bp, Artificial Sequence
  Synthetic
atatgttacacaggaaagacc

SEQ ID NO: 21900 - DNA, 21 bp, Artificial Sequence
  Synthetic
catatgttacacaggaaagac

SEQ ID NO: 21901 - DNA, 21 bp, Artificial Sequence
  Synthetic
tgtcgcctgcatatgttacac

SEQ ID NO: 21902 - DNA, 21 bp, Artificial Sequence
  Synthetic
ttgtcgcctgcatatgttaca

SEQ ID NO: 21903 - DNA, 21 bp, Artificial Sequence
  Synthetic
tgtgtaacatatgcaggcgac

SEQ ID NO: 21904 - DNA, 21 bp, Artificial Sequence
  Synthetic
gtgtaacatatgcaggcgaca

SEQ ID NO: 21905 - DNA, 21 bp, Artificial Sequence
  Synthetic
gtaacatatgcaggcgacaag

SEQ ID NO: 21906 - DNA, 21 bp, Artificial Sequence
  Synthetic
taacatatgcaggcgacaagg

SEQ ID NO: 21907 - DNA, 21 bp, Artificial Sequence
  Synthetic
atatgcaggcgacaaggagga

SEQ ID NO: 21908 - DNA, 21 bp, Artificial Sequence
  Synthetic
agagcctgccttcagcaagac

SEQ ID NO: 21909 - DNA, 21 bp, Artificial Sequence
  Synthetic
tgccttcagcaagacctgaaa

SEQ ID NO: 21910 - DNA, 21 bp, Artificial Sequence
  Synthetic
gccttcagcaagacctgaaac

SEQ ID NO: 21911 - DNA, 21 bp, Artificial Sequence
  Synthetic
tgactcctgtttcaggtcttg

SEQ ID NO: 21912 - DNA, 21 bp, Artificial Sequence
  Synthetic
ctcataggtagtcagtagcac

SEQ ID NO: 21913 - DNA, 21 bp, Artificial Sequence
  Synthetic
ttcatgtgctactgactacct

SEQ ID NO: 21914 - DNA, 21 bp, Artificial Sequence
  Synthetic
tgatgcatctttcaagcaaat

SEQ ID NO: 21915 - DNA, 21 bp, Artificial Sequence
  Synthetic
agatgcatcatttctaaaatc

SEQ ID NO: 21916 - DNA, 21 bp, Artificial Sequence
  Synthetic
agtacaacctactcacgattt

SEQ ID NO: 21917 - DNA, 21 bp, Artificial Sequence
  Synthetic
aagaacactccaagggaatct

SEQ ID NO: 21918 - DNA, 21 bp, Artificial Sequence
  Synthetic
tccacaacaagaacactccaa

SEQ ID NO: 21919 - DNA, 21 bp, Artificial Sequence
  Synthetic
ttcccttggagtgttcttgtt

SEQ ID NO: 21920 - DNA, 21 bp, Artificial Sequence
  Synthetic
atccacaacaagaacactcca

SEQ ID NO: 21921 - DNA, 21 bp, Artificial Sequence
  Synthetic
catccacaacaagaacactcc

SEQ ID NO: 21922 - DNA, 21 bp, Artificial Sequence
  Synthetic
cttggagtgttcttgttgtgg

SEQ ID NO: 21923 - DNA, 21 bp, Artificial Sequence
  Synthetic
cctgtgagcttcatccacaac

SEQ ID NO: 21924 - DNA, 21 bp, Artificial Sequence
  Synthetic
gttgtggatgaagctcacagg

SEQ ID NO: 21925 - DNA, 21 bp, Artificial Sequence
  Synthetic
ctgacaaggtcttatgcagca

SEQ ID NO: 21926 - DNA, 21 bp, Artificial Sequence
  Synthetic
tctgacaaggtcttatgcagc

SEQ ID NO: 21927 - DNA, 21 bp, Artificial Sequence
  Synthetic
ctctgacaaggtcttatgcag

SEQ ID NO: 21928 - DNA, 21 bp, Artificial Sequence
  Synthetic
ccctgctgcataagaccttgt

SEQ ID NO: 21929 - DNA, 21 bp, Artificial Sequence
  Synthetic
aacaggagactgaagactact

SEQ ID NO: 21930 - DNA, 21 bp, Artificial Sequence
  Synthetic
tcaacaggagactgaagacta

SEQ ID NO: 21931 - DNA, 21 bp, Artificial Sequence
  Synthetic
tagtcttcagtctcctgttga

SEQ ID NO: 21932 - DNA, 21 bp, Artificial Sequence
  Synthetic
agtcttcagtctcctgttgac

SEQ ID NO: 21933 - DNA, 21 bp, Artificial Sequence
  Synthetic
ggagttccggtcaacaggaga

SEQ ID NO: 21934 - DNA, 21 bp, Artificial Sequence
  Synthetic
tggatgggagttccggtcaac

SEQ ID NO: 21935 - DNA, 21 bp, Artificial Sequence
  Synthetic
ctggatgggagttccggtcaa

SEQ ID NO: 21936 - DNA, 21 bp, Artificial Sequence
  Synthetic
ctgttgaccggaactcccatc

SEQ ID NO: 21937 - DNA, 21 bp, Artificial Sequence
  Synthetic
ctcttggaggctgttctggat

SEQ ID NO: 21938 - DNA, 21 bp, Artificial Sequence
  Synthetic
ctcccatccagaacagcctcc

SEQ ID NO: 21939 - DNA, 21 bp, Artificial Sequence
  Synthetic
gctcttggaggctgttctgga

SEQ ID NO: 21940 - DNA, 21 bp, Artificial Sequence
  Synthetic
agctcttggaggctgttctgg

SEQ ID NO: 21941 - DNA, 21 bp, Artificial Sequence
  Synthetic
gtagagctcttggaggctgtt

SEQ ID NO: 21942 - DNA, 21 bp, Artificial Sequence
  Synthetic
ctgaggagggagtagagctct

SEQ ID NO: 21943 - DNA, 21 bp, Artificial Sequence
  Synthetic
actgaggagggagtagagctc

SEQ ID NO: 21944 - DNA, 21 bp, Artificial Sequence
  Synthetic
tccacaaaactgaggagggag

SEQ ID NO: 21945 - DNA, 21 bp, Artificial Sequence
  Synthetic
caggctccacaaaactgagga

SEQ ID NO: 21946 - DNA, 21 bp, Artificial Sequence
  Synthetic
tcaggctccacaaaactgagg

SEQ ID NO: 21947 - DNA, 21 bp, Artificial Sequence
  Synthetic
atcaggctccacaaaactgag

SEQ ID NO: 21948 - DNA, 21 bp, Artificial Sequence
  Synthetic
agatcaggctccacaaaactg

SEQ ID NO: 21949 - DNA, 21 bp, Artificial Sequence
  Synthetic
gagatcaggctccacaaaact

SEQ ID NO: 21950 - DNA, 21 bp, Artificial Sequence
  Synthetic
aagagatcaggctccacaaaa

SEQ ID NO: 21951 - DNA, 21 bp, Artificial Sequence
  Synthetic
tctcccacctcttccttggaa

SEQ ID NO: 21952 - DNA, 21 bp, Artificial Sequence
  Synthetic
taaaatctcccacctcttcct

SEQ ID NO: 21953 - DNA, 21 bp, Artificial Sequence
  Synthetic
ataaaatctcccacctcttcc

SEQ ID NO: 21954 - DNA, 21 bp, Artificial Sequence
  Synthetic
ttattcaacgctaccaggata

SEQ ID NO: 21955 - DNA, 21 bp, Artificial Sequence
  Synthetic
attcaacgctaccaggatatt

SEQ ID NO: 21956 - DNA, 21 bp, Artificial Sequence
  Synthetic
tttctcaatatcctggtagcg

SEQ ID NO: 21957 - DNA, 21 bp, Artificial Sequence
  Synthetic
aacgctaccaggatattgaga

SEQ ID NO: 21958 - DNA, 21 bp, Artificial Sequence
  Synthetic
accaggatattgagaaagaat

SEQ ID NO: 21959 - DNA, 21 bp, Artificial Sequence
  Synthetic
aaactcttgcagccatttctg

SEQ ID NO: 21960 - DNA, 21 bp, Artificial Sequence
  Synthetic
cgcctcagcagaaatggctgc

SEQ ID NO: 21961 - DNA, 21 bp, Artificial Sequence
  Synthetic
cttgcagccatttctgctgag

SEQ ID NO: 21962 - DNA, 21 bp, Artificial Sequence
  Synthetic
cagccatttctgctgaggcga

SEQ ID NO: 21963 - DNA, 21 bp, Artificial Sequence
  Synthetic
ctcagctttcactcgcctcag

SEQ ID NO: 21964 - DNA, 21 bp, Artificial Sequence
  Synthetic
ttctgctgaggcgagtgaaag

SEQ ID NO: 21965 - DNA, 21 bp, Artificial Sequence
  Synthetic
gagtgaaagctgaggtagcta

SEQ ID NO: 21966 - DNA, 21 bp, Artificial Sequence
  Synthetic
gaggtagctacagagcttccc

SEQ ID NO: 21967 - DNA, 21 bp, Artificial Sequence
  Synthetic
ctacagagcttcccaagaaga

SEQ ID NO: 21968 - DNA, 21 bp, Artificial Sequence
  Synthetic
tatcactacttctgtcttctt

SEQ ID NO: 21969 - DNA, 21 bp, Artificial Sequence
  Synthetic
atatcactacttctgtcttct

SEQ ID NO: 21970 - DNA, 21 bp, Artificial Sequence
  Synthetic
tatatcactacttctgtcttc

SEQ ID NO: 21971 - DNA, 21 bp, Artificial Sequence
  Synthetic
taccatggcatgtcagcattg

SEQ ID NO: 21972 - DNA, 21 bp, Artificial Sequence
  Synthetic
catggcatgtcagcattgcag

SEQ ID NO: 21973 - DNA, 21 bp, Artificial Sequence
  Synthetic
aaatttcagatgcatttgaaa

SEQ ID NO: 21974 - DNA, 21 bp, Artificial Sequence
  Synthetic
gcatttgaaaatgagacggca

SEQ ID NO: 21975 - DNA, 21 bp, Artificial Sequence
  Synthetic
acggcaaagaaagttaaacta

SEQ ID NO: 21976 - DNA, 21 bp, Artificial Sequence
  Synthetic
ttgtcccagcttcgaaagtgt

SEQ ID NO: 21977 - DNA, 21 bp, Artificial Sequence
  Synthetic
tgatccacacactttcgaagc

SEQ ID NO: 21978 - DNA, 21 bp, Artificial Sequence
  Synthetic
gtgatccacacactttcgaag

SEQ ID NO: 21979 - DNA, 21 bp, Artificial Sequence
  Synthetic
atatgggtgatccacacactt

SEQ ID NO: 21980 - DNA, 21 bp, Artificial Sequence
  Synthetic
ctgtctcaccatcaaacaaat

SEQ ID NO: 21981 - DNA, 21 bp, Artificial Sequence
  Synthetic
tacgaactcgacggggacccc

SEQ ID NO: 21982 - DNA, 21 bp, Artificial Sequence
  Synthetic
cgaactcgacggggaccccaa

SEQ ID NO: 21983 - DNA, 21 bp, Artificial Sequence
  Synthetic
gaactcgacggggaccccaag

SEQ ID NO: 21984 - DNA, 21 bp, Artificial Sequence
  Synthetic
ctcgacggggaccccaagagg

SEQ ID NO: 21985 - DNA, 21 bp, Artificial Sequence
  Synthetic
tcgacggggaccccaagagga

SEQ ID NO: 21986 - DNA, 21 bp, Artificial Sequence
  Synthetic
gaccccaagaggaaggaattc

SEQ ID NO: 21987 - DNA, 21 bp, Artificial Sequence
  Synthetic
catccaggaattccttcctct

SEQ ID NO: 21988 - DNA, 21 bp, Artificial Sequence
  Synthetic
tcatccaggaattccttcctc

SEQ ID NO: 21989 - DNA, 21 bp, Artificial Sequence
  Synthetic
atgaagctgaacaagtcatcc

SEQ ID NO: 21990 - DNA, 21 bp, Artificial Sequence
  Synthetic
catgaagctgaacaagtcatc

SEQ ID NO: 21991 - DNA, 21 bp, Artificial Sequence
  Synthetic
gatgacttgttcagcttcatg

SEQ ID NO: 21992 - DNA, 21 bp, Artificial Sequence
  Synthetic
cttgttcagcttcatgcagaa

SEQ ID NO: 21993 - DNA, 21 bp, Artificial Sequence
  Synthetic
tcacctcgcttctgcatgaag

SEQ ID NO: 21994 - DNA, 21 bp, Artificial Sequence
  Synthetic
tcagcttcatgcagaagcgag

SEQ ID NO: 21995 - DNA, 21 bp, Artificial Sequence
  Synthetic
gagggctcacctcgcttctgc

SEQ ID NO: 21996 - DNA, 21 bp, Artificial Sequence
  Synthetic
ccccttcccccagggacacct

SEQ ID NO: 21997 - DNA, 21 bp, Artificial Sequence
  Synthetic
atgcggttcacaggtgtccct

SEQ ID NO: 21998 - DNA, 21 bp, Artificial Sequence
  Synthetic
gatgcggttcacaggtgtccc

SEQ ID NO: 21999 - DNA, 21 bp, Artificial Sequence
  Synthetic
ggatgcggttcacaggtgtcc

SEQ ID NO: 22000 - DNA, 21 bp, Artificial Sequence
  Synthetic
aaggacctgtttggccatgat

SEQ ID NO: 22001 - DNA, 21 bp, Artificial Sequence
  Synthetic
caaggacctgtttggccatga

SEQ ID NO: 22002 - DNA, 21 bp, Artificial Sequence
  Synthetic
tcaaggacctgtttggccatg

SEQ ID NO: 22003 - DNA, 21 bp, Artificial Sequence
  Synthetic
cacgtacagcatgaacaggtc

SEQ ID NO: 22004 - DNA, 21 bp, Artificial Sequence
  Synthetic
tccgtcaccagcacgtacagc

SEQ ID NO: 22005 - DNA, 21 bp, Artificial Sequence
  Synthetic
ttcatgctgtacgtgctggtg

SEQ ID NO: 22006 - DNA, 21 bp, Artificial Sequence
  Synthetic
tcatgctgtacgtgctggtga

SEQ ID NO: 22007 - DNA, 21 bp, Artificial Sequence
  Synthetic
atgctgtacgtgctggtgacg

SEQ ID NO: 22008 - DNA, 21 bp, Artificial Sequence
  Synthetic
ctgtacgtgctggtgacggag

SEQ ID NO: 22009 - DNA, 21 bp, Artificial Sequence
  Synthetic
gtgacggagaagggcggcctc

SEQ ID NO: 22010 - DNA, 21 bp, Artificial Sequence
  Synthetic
tgacggagaagggcggcctcg

SEQ ID NO: 22011 - DNA, 21 bp, Artificial Sequence
  Synthetic
ggcctcgtggaggtcatcaac

SEQ ID NO: 22012 - DNA, 21 bp, Artificial Sequence
  Synthetic
agcttcttgttgatgacctcc

SEQ ID NO: 22013 - DNA, 21 bp, Artificial Sequence
  Synthetic
tcatcaacaagaagctgtggc

SEQ ID NO: 22014 - DNA, 21 bp, Artificial Sequence
  Synthetic
aagctgtggcgtgagatcacc

SEQ ID NO: 22015 - DNA, 21 bp, Artificial Sequence
  Synthetic
ctggtgatggacgtgggcagg

SEQ ID NO: 22016 - DNA, 21 bp, Artificial Sequence
  Synthetic
aaggctgcactggtgatggac

SEQ ID NO: 22017 - DNA, 21 bp, Artificial Sequence
  Synthetic
agggtgaaggctgcactggtg

SEQ ID NO: 22018 - DNA, 21 bp, Artificial Sequence
  Synthetic
caccagtgcagccttcaccct

SEQ ID NO: 22019 - DNA, 21 bp, Artificial Sequence
  Synthetic
agccttcaccctgcggaccca

SEQ ID NO: 22020 - DNA, 21 bp, Artificial Sequence
  Synthetic
gccactcactgggtccgcagg

SEQ ID NO: 22021 - DNA, 21 bp, Artificial Sequence
  Synthetic
gtccgccactcactgggtccg

SEQ ID NO: 22022 - DNA, 21 bp, Artificial Sequence
  Synthetic
cctcgtcccacccacagatac

SEQ ID NO: 22023 - DNA, 21 bp, Artificial Sequence
  Synthetic
gtacaggtacttcatgtatct

SEQ ID NO: 22024 - DNA, 21 bp, Artificial Sequence
  Synthetic
acatgaagtacctgtacccct

SEQ ID NO: 22025 - DNA, 21 bp, Artificial Sequence
  Synthetic
agtacctgtacccctacgagt

SEQ ID NO: 22026 - DNA, 21 bp, Artificial Sequence
  Synthetic
ggccccgcttctcacactcgt

SEQ ID NO: 22027 - DNA, 21 bp, Artificial Sequence
  Synthetic
aggccccgcttctcacactcg

SEQ ID NO: 22028 - DNA, 21 bp, Artificial Sequence
  Synthetic
cgcctgctgctcgctgacgac

SEQ ID NO: 22029 - DNA, 21 bp, Artificial Sequence
  Synthetic
ctgctcgctgacgacatgggc

SEQ ID NO: 22030 - DNA, 21 bp, Artificial Sequence
  Synthetic
tgctcgctgacgacatgggcc

SEQ ID NO: 22031 - DNA, 21 bp, Artificial Sequence
  Synthetic
gctcgctgacgacatgggcct

SEQ ID NO: 22032 - DNA, 21 bp, Artificial Sequence
  Synthetic
ttccccaggcccatgtcgtca

SEQ ID NO: 22033 - DNA, 21 bp, Artificial Sequence
  Synthetic
ctcgctgacgacatgggcctg

SEQ ID NO: 22034 - DNA, 21 bp, Artificial Sequence
  Synthetic
aaaggctgcgatgcagatggc

SEQ ID NO: 22035 - DNA, 21 bp, Artificial Sequence
  Synthetic
acggaggatggcaccaccacc

SEQ ID NO: 22036 - DNA, 21 bp, Artificial Sequence
  Synthetic
cacggaggatggcaccaccac

SEQ ID NO: 22037 - DNA, 21 bp, Artificial Sequence
  Synthetic
gccatcctccgtgcgcttcac

SEQ ID NO: 22038 - DNA, 21 bp, Artificial Sequence
  Synthetic
ccatcctccgtgcgcttcacc

SEQ ID NO: 22039 - DNA, 21 bp, Artificial Sequence
  Synthetic
catcctccgtgcgcttcacct

SEQ ID NO: 22040 - DNA, 21 bp, Artificial Sequence
  Synthetic
tgctcccaggtgaagcgcacg

SEQ ID NO: 22041 - DNA, 21 bp, Artificial Sequence
  Synthetic
cctgctcccaggtgaagcgca

SEQ ID NO: 22042 - DNA, 21 bp, Artificial Sequence
  Synthetic
acctgctcccaggtgaagcgc

SEQ ID NO: 22043 - DNA, 21 bp, Artificial Sequence
  Synthetic
agaccattaacctgctcccag

SEQ ID NO: 22044 - DNA, 21 bp, Artificial Sequence
  Synthetic
gcagccaccgaaggaaggcct

SEQ ID NO: 22045 - DNA, 21 bp, Artificial Sequence
  Synthetic
ctcagagatggcagccaccga

SEQ ID NO: 22046 - DNA, 21 bp, Artificial Sequence
  Synthetic
ttccttcggtggctgccatct

SEQ ID NO: 22047 - DNA, 21 bp, Artificial Sequence
  Synthetic
gctcagagatggcagccaccg

SEQ ID NO: 22048 - DNA, 21 bp, Artificial Sequence
  Synthetic
tgggctcagagatggcagcca

SEQ ID NO: 22049 - DNA, 21 bp, Artificial Sequence
  Synthetic
gacgttgatgcaatctgggct

SEQ ID NO: 22050 - DNA, 21 bp, Artificial Sequence
  Synthetic
tcaccacgacgttgatgcaat

SEQ ID NO: 22051 - DNA, 21 bp, Artificial Sequence
  Synthetic
attgcatcaacgtcgtggtga

SEQ ID NO: 22052 - DNA, 21 bp, Artificial Sequence
  Synthetic
ttgcatcaacgtcgtggtgac

SEQ ID NO: 22053 - DNA, 21 bp, Artificial Sequence
  Synthetic
tgcatcaacgtcgtggtgact

SEQ ID NO: 22054 - DNA, 21 bp, Artificial Sequence
  Synthetic
atcaacgtcgtggtgactggg

SEQ ID NO: 22055 - DNA, 21 bp, Artificial Sequence
  Synthetic
agctttgaccttcttagcaag

SEQ ID NO: 22056 - DNA, 21 bp, Artificial Sequence
  Synthetic
gctttgaccttcttagcaagt

SEQ ID NO: 22057 - DNA, 21 bp, Artificial Sequence
  Synthetic
tacaatgatgacaactttaaa

SEQ ID NO: 22058 - DNA, 21 bp, Artificial Sequence
  Synthetic
ttacaatgatgacaactttaa

SEQ ID NO: 22059 - DNA, 21 bp, Artificial Sequence
  Synthetic
tttgaggaagtgagattcatc

SEQ ID NO: 22060 - DNA, 21 bp, Artificial Sequence
  Synthetic
atctcacttcctcaaaaacag

SEQ ID NO: 22061 - DNA, 21 bp, Artificial Sequence
  Synthetic
cagcgggcagtcctactgttt

SEQ ID NO: 22062 - DNA, 21 bp, Artificial Sequence
  Synthetic
aaacagtaggactgcccgctg

SEQ ID NO: 22063 - DNA, 21 bp, Artificial Sequence
  Synthetic
gaccggcatagctgctcgaca

SEQ ID NO: 22064 - DNA, 21 bp, Artificial Sequence
  Synthetic
gcagctatgccggtcctaaag

SEQ ID NO: 22065 - DNA, 21 bp, Artificial Sequence
  Synthetic
gttctcagaagtactcacctt

SEQ ID NO: 22066 - DNA, 21 bp, Artificial Sequence
  Synthetic
gccaagagggtgatcctgttg

SEQ ID NO: 22067 - DNA, 21 bp, Artificial Sequence
  Synthetic
catggctggtgtgcccgacaa

SEQ ID NO: 22068 - DNA, 21 bp, Artificial Sequence
  Synthetic
caccagccatgtcccggcccg

SEQ ID NO: 22069 - DNA, 21 bp, Artificial Sequence
  Synthetic
tgcgtgtagagctctgcgggc

SEQ ID NO: 22070 - DNA, 21 bp, Artificial Sequence
  Synthetic
ctgcgtgtagagctctgcggg

SEQ ID NO: 22071 - DNA, 21 bp, Artificial Sequence
  Synthetic
atgatctgcgtgtagagctct

SEQ ID NO: 22072 - DNA, 21 bp, Artificial Sequence
  Synthetic
ttgactgcgatgatctgcgtg

SEQ ID NO: 22073 - DNA, 21 bp, Artificial Sequence
  Synthetic
ccaaaggcatgaaactggggg

SEQ ID NO: 22074 - DNA, 21 bp, Artificial Sequence
  Synthetic
tcttcccccagtttcatgcct

SEQ ID NO: 22075 - DNA, 21 bp, Artificial Sequence
  Synthetic
agtccaaaggcatgaaactgg

SEQ ID NO: 22076 - DNA, 21 bp, Artificial Sequence
  Synthetic
aagtccaaaggcatgaaactg

SEQ ID NO: 22077 - DNA, 21 bp, Artificial Sequence
  Synthetic
gaagtccaaaggcatgaaact

SEQ ID NO: 22078 - DNA, 21 bp, Artificial Sequence
  Synthetic
cgaagtccaaaggcatgaaac

SEQ ID NO: 22079 - DNA, 21 bp, Artificial Sequence
  Synthetic
gcgaagtccaaaggcatgaaa

SEQ ID NO: 22080 - DNA, 21 bp, Artificial Sequence
  Synthetic
acagtagcgaagtccaaaggc

SEQ ID NO: 22081 - DNA, 21 bp, Artificial Sequence
  Synthetic
acttcgctactgtgatgccaa

SEQ ID NO: 22082 - DNA, 21 bp, Artificial Sequence
  Synthetic
tacccgtttggcatcacagta

SEQ ID NO: 22083 - DNA, 21 bp, Artificial Sequence
  Synthetic
gtcttgttctctgcagatgcc

SEQ ID NO: 22084 - DNA, 21 bp, Artificial Sequence
  Synthetic
tcttgttctctgcagatgcct

SEQ ID NO: 22085 - DNA, 21 bp, Artificial Sequence
  Synthetic
cttgttctctgcagatgcctt

SEQ ID NO: 22086 - DNA, 21 bp, Artificial Sequence
  Synthetic
ttctctgcagatgccttgggg

SEQ ID NO: 22087 - DNA, 21 bp, Artificial Sequence
  Synthetic
tctctgcagatgccttggggg

SEQ ID NO: 22088 - DNA, 21 bp, Artificial Sequence
  Synthetic
gactactcaggttcctccaac

SEQ ID NO: 22089 - DNA, 21 bp, Artificial Sequence
  Synthetic
actactcaggttcctccaacc

SEQ ID NO: 22090 - DNA, 21 bp, Artificial Sequence
  Synthetic
ctactcaggttcctccaacct

SEQ ID NO: 22091 - DNA, 21 bp, Artificial Sequence
  Synthetic
actcaggttcctccaacctgg

SEQ ID NO: 22092 - DNA, 21 bp, Artificial Sequence
  Synthetic
gctctcccaggttggaggaac

SEQ ID NO: 22093 - DNA, 21 bp, Artificial Sequence
  Synthetic
ggttcctccaacctgggagag

SEQ ID NO: 22094 - DNA, 21 bp, Artificial Sequence
  Synthetic
gcttcagctctcccaggttgg

SEQ ID NO: 22095 - DNA, 21 bp, Artificial Sequence
  Synthetic
agcttcagctctcccaggttg

SEQ ID NO: 22096 - DNA, 21 bp, Artificial Sequence
  Synthetic
ggagcttcagctctcccaggt

SEQ ID NO: 22097 - DNA, 21 bp, Artificial Sequence
  Synthetic
aggagcttcagctctcccagg

SEQ ID NO: 22098 - DNA, 21 bp, Artificial Sequence
  Synthetic
ctgggagagctgaagctcctg

SEQ ID NO: 22099 - DNA, 21 bp, Artificial Sequence
  Synthetic
tgggagagctgaagctcctgc

SEQ ID NO: 22100 - DNA, 21 bp, Artificial Sequence
  Synthetic
ggagagctgaagctcctgctg

SEQ ID NO: 22101 - DNA, 21 bp, Artificial Sequence
  Synthetic
gagagctgaagctcctgctgg

SEQ ID NO: 22102 - DNA, 21 bp, Artificial Sequence
  Synthetic
agcatgactgcttcctccagc

SEQ ID NO: 22103 - DNA, 21 bp, Artificial Sequence
  Synthetic
cagcatgactgcttcctccag

SEQ ID NO: 22104 - DNA, 21 bp, Artificial Sequence
  Synthetic
agctgggaaaggacgtcggac

SEQ ID NO: 22105 - DNA, 21 bp, Artificial Sequence
  Synthetic
gcaggcagctgggaaaggacg

SEQ ID NO: 22106 - DNA, 21 bp, Artificial Sequence
  Synthetic
ctgcttggcaggcagctggga

SEQ ID NO: 22107 - DNA, 21 bp, Artificial Sequence
  Synthetic
tgcgctgcttggcaggcagct

SEQ ID NO: 22108 - DNA, 21 bp, Artificial Sequence
  Synthetic
ttgcgctgcttggcaggcagc

SEQ ID NO: 22109 - DNA, 21 bp, Artificial Sequence
  Synthetic
cttgcgctgcttggcaggcag

SEQ ID NO: 22110 - DNA, 21 bp, Artificial Sequence
  Synthetic
gcaagatagtggtgattgccc

SEQ ID NO: 22111 - DNA, 21 bp, Artificial Sequence
  Synthetic
gatagtggtgattgccccagg

SEQ ID NO: 22112 - DNA, 21 bp, Artificial Sequence
  Synthetic
tatgagctcgatgcagacccc

SEQ ID NO: 22113 - DNA, 21 bp, Artificial Sequence
  Synthetic
tgagctcgatgcagaccccaa

SEQ ID NO: 22114 - DNA, 21 bp, Artificial Sequence
  Synthetic
gagctcgatgcagaccccaag

SEQ ID NO: 22115 - DNA, 21 bp, Artificial Sequence
  Synthetic
tccttcctcttggggtctgca

SEQ ID NO: 22116 - DNA, 21 bp, Artificial Sequence
  Synthetic
ctcgatgcagaccccaagagg

SEQ ID NO: 22117 - DNA, 21 bp, Artificial Sequence
  Synthetic
tcgatgcagaccccaagagga

SEQ ID NO: 22118 - DNA, 21 bp, Artificial Sequence
  Synthetic
gaccccaagaggaaggaattt

SEQ ID NO: 22119 - DNA, 21 bp, Artificial Sequence
  Synthetic
catccagaaattccttcctct

SEQ ID NO: 22120 - DNA, 21 bp, Artificial Sequence
  Synthetic
tcatccagaaattccttcctc

SEQ ID NO: 22121 - DNA, 21 bp, Artificial Sequence
  Synthetic
catgaagctaaacaggtcatc

SEQ ID NO: 22122 - DNA, 21 bp, Artificial Sequence
  Synthetic
gacctgtttagcttcatgcaa

SEQ ID NO: 22123 - DNA, 21 bp, Artificial Sequence
  Synthetic
cctgtttagcttcatgcaaaa

SEQ ID NO: 22124 - DNA, 21 bp, Artificial Sequence
  Synthetic
ctgtttagcttcatgcaaaag

SEQ ID NO: 22125 - DNA, 21 bp, Artificial Sequence
  Synthetic
ttagcttcatgcaaaagaggg

SEQ ID NO: 22126 - DNA, 21 bp, Artificial Sequence
  Synthetic
cgctccccaccagggacgcca

SEQ ID NO: 22127 - DNA, 21 bp, Artificial Sequence
  Synthetic
gtgaaccgcgtgcccatcatg

SEQ ID NO: 22128 - DNA, 21 bp, Artificial Sequence
  Synthetic
tcgagcacctgcttcgccatg

SEQ ID NO: 22129 - DNA, 21 bp, Artificial Sequence
  Synthetic
aggcgaaacagagcgtacagg

SEQ ID NO: 22130 - DNA, 21 bp, Artificial Sequence
  Synthetic
cttggcggtcaccaggcgaaa

SEQ ID NO: 22131 - DNA, 21 bp, Artificial Sequence
  Synthetic
ctgtttcgcctggtgaccgcc

SEQ ID NO: 22132 - DNA, 21 bp, Artificial Sequence
  Synthetic
gccgcccttggcggtcaccag

SEQ ID NO: 22133 - DNA, 21 bp, Artificial Sequence
  Synthetic
gtgaccgccaagggcggcctg

SEQ ID NO: 22134 - DNA, 21 bp, Artificial Sequence
  Synthetic
tgaccgccaagggcggcctgg

SEQ ID NO: 22135 - DNA, 21 bp, Artificial Sequence
  Synthetic
agtcatcaaccgcaaagtgtg

SEQ ID NO: 22136 - DNA, 21 bp, Artificial Sequence
  Synthetic
gtcatcaaccgcaaagtgtgg

SEQ ID NO: 22137 - DNA, 21 bp, Artificial Sequence
  Synthetic
tcatcaaccgcaaagtgtggc

SEQ ID NO: 22138 - DNA, 21 bp, Artificial Sequence
  Synthetic
gaggtgatggtggtgggtagg

SEQ ID NO: 22139 - DNA, 21 bp, Artificial Sequence
  Synthetic
aaggcggccgaggtgatggtg

SEQ ID NO: 22140 - DNA, 21 bp, Artificial Sequence
  Synthetic
gggtgcgtagagtgaaggcgg

SEQ ID NO: 22141 - DNA, 21 bp, Artificial Sequence
  Synthetic
cgccttcactctacgcaccca

SEQ ID NO: 22142 - DNA, 21 bp, Artificial Sequence
  Synthetic
tggcctcactgggtgcgtaga

SEQ ID NO: 22143 - DNA, 21 bp, Artificial Sequence
  Synthetic
cccctggcctcactgggtgcg

SEQ ID NO: 22144 - DNA, 21 bp, Artificial Sequence
  Synthetic
ccgctgtccgcccctaggtac

SEQ ID NO: 22145 - DNA, 21 bp, Artificial Sequence
  Synthetic
gtacaggtacttcatgtacct

SEQ ID NO: 22146 - DNA, 21 bp, Artificial Sequence
  Synthetic
ggtacaggtacttcatgtacc

SEQ ID NO: 22147 - DNA, 21 bp, Artificial Sequence
  Synthetic
acatgaagtacctgtacccgt

SEQ ID NO: 22148 - DNA, 21 bp, Artificial Sequence
  Synthetic
agtacctgtacccgtacgagt

SEQ ID NO: 22149 - DNA, 21 bp, Artificial Sequence
  Synthetic
gcgctcgagtctcgcactcgt

SEQ ID NO: 22150 - DNA, 21 bp, Artificial Sequence
  Synthetic
tgtatgaactggacggtgatc

SEQ ID NO: 22151 - DNA, 21 bp, Artificial Sequence
  Synthetic
tgaactggacggtgatcctga

SEQ ID NO: 22152 - DNA, 21 bp, Artificial Sequence
  Synthetic
gaactggacggtgatcctgaa

SEQ ID NO: 22153 - DNA, 21 bp, Artificial Sequence
  Synthetic
tggacggtgatcctgaaagga

SEQ ID NO: 22154 - DNA, 21 bp, Artificial Sequence
  Synthetic
gatcctgaaaggaaagagttc

SEQ ID NO: 22155 - DNA, 21 bp, Artificial Sequence
  Synthetic
catccaggaactctttccttt

SEQ ID NO: 22156 - DNA, 21 bp, Artificial Sequence
  Synthetic
ataaagacgaagaggtcatcc

SEQ ID NO: 22157 - DNA, 21 bp, Artificial Sequence
  Synthetic
cataaagacgaagaggtcatc

SEQ ID NO: 22158 - DNA, 21 bp, Artificial Sequence
  Synthetic
gatgacctcttcgtctttatg

SEQ ID NO: 22159 - DNA, 21 bp, Artificial Sequence
  Synthetic
gacctcttcgtctttatgcag

SEQ ID NO: 22160 - DNA, 21 bp, Artificial Sequence
  Synthetic
cctcttcgtctttatgcagaa

SEQ ID NO: 22161 - DNA, 21 bp, Artificial Sequence
  Synthetic
cccctcttctgcataaagacg

SEQ ID NO: 22162 - DNA, 21 bp, Artificial Sequence
  Synthetic
ctcttcgtctttatgcagaag

SEQ ID NO: 22163 - DNA, 21 bp, Artificial Sequence
  Synthetic
tcacccctcttctgcataaag

SEQ ID NO: 22164 - DNA, 21 bp, Artificial Sequence
  Synthetic
tcgtctttatgcagaagaggg

SEQ ID NO: 22165 - DNA, 21 bp, Artificial Sequence
  Synthetic
aaccacagggacccccatcaa

SEQ ID NO: 22166 - DNA, 21 bp, Artificial Sequence
  Synthetic
catgatggggattcggttgat

SEQ ID NO: 22167 - DNA, 21 bp, Artificial Sequence
  Synthetic
ccatgatggggattcggttga

SEQ ID NO: 22168 - DNA, 21 bp, Artificial Sequence
  Synthetic
gccatgatggggattcggttg

SEQ ID NO: 22169 - DNA, 21 bp, Artificial Sequence
  Synthetic
caggatctgtttggccatgat

SEQ ID NO: 22170 - DNA, 21 bp, Artificial Sequence
  Synthetic
ccaggatctgtttggccatga

SEQ ID NO: 22171 - DNA, 21 bp, Artificial Sequence
  Synthetic
tccaggatctgtttggccatg

SEQ ID NO: 22172 - DNA, 21 bp, Artificial Sequence
  Synthetic
cccatcatggccaaacagatc

SEQ ID NO: 22173 - DNA, 21 bp, Artificial Sequence
  Synthetic
cttatacagcatgtacaggtc

SEQ ID NO: 22174 - DNA, 21 bp, Artificial Sequence
  Synthetic
acatgctgtataagctggtga

SEQ ID NO: 22175 - DNA, 21 bp, Artificial Sequence
  Synthetic
atgctgtataagctggtgacc

SEQ ID NO: 22176 - DNA, 21 bp, Artificial Sequence
  Synthetic
ctgtataagctggtgaccgag

SEQ ID NO: 22177 - DNA, 21 bp, Artificial Sequence
  Synthetic
tgtataagctggtgaccgaga

SEQ ID NO: 22178 - DNA, 21 bp, Artificial Sequence
  Synthetic
gtataagctggtgaccgagaa

SEQ ID NO: 22179 - DNA, 21 bp, Artificial Sequence
  Synthetic
gtgaccgagaagggaggcctg

SEQ ID NO: 22180 - DNA, 21 bp, Artificial Sequence
  Synthetic
tgaccgagaagggaggcctgg

SEQ ID NO: 22181 - DNA, 21 bp, Artificial Sequence
  Synthetic
ggcctggtggagatcatcaac

SEQ ID NO: 22182 - DNA, 21 bp, Artificial Sequence
  Synthetic
ggagatcatcaacaagaagat

SEQ ID NO: 22183 - DNA, 21 bp, Artificial Sequence
  Synthetic
gagatcatcaacaagaagatc

SEQ ID NO: 22184 - DNA, 21 bp, Artificial Sequence
  Synthetic
gatcatcaacaagaagatctg

SEQ ID NO: 22185 - DNA, 21 bp, Artificial Sequence
  Synthetic
atcatcaacaagaagatctgg

SEQ ID NO: 22186 - DNA, 21 bp, Artificial Sequence
  Synthetic
tcatcaacaagaagatctgga

SEQ ID NO: 22187 - DNA, 21 bp, Artificial Sequence
  Synthetic
aaggcggcgctggtgatggat

SEQ ID NO: 22188 - DNA, 21 bp, Artificial Sequence
  Synthetic
agggtgaaggcggcgctggtg

SEQ ID NO: 22189 - DNA, 21 bp, Artificial Sequence
  Synthetic
caccagcgccgccttcaccct

SEQ ID NO: 22190 - DNA, 21 bp, Artificial Sequence
  Synthetic
cgccttcaccctcaggacgca

SEQ ID NO: 22191 - DNA, 21 bp, Artificial Sequence
  Synthetic
gccactcactgcgtcctgagg

SEQ ID NO: 22192 - DNA, 21 bp, Artificial Sequence
  Synthetic
cctggccactcactgcgtcct

SEQ ID NO: 22193 - DNA, 21 bp, Artificial Sequence
  Synthetic
gccctggccactcactgcgtc

SEQ ID NO: 22194 - DNA, 21 bp, Artificial Sequence
  Synthetic
tgcttcctttcctccaggtac

SEQ ID NO: 22195 - DNA, 21 bp, Artificial Sequence
  Synthetic
catacagatacttcatgtacc

SEQ ID NO: 22196 - DNA, 21 bp, Artificial Sequence
  Synthetic
gcatacagatacttcatgtac

SEQ ID NO: 22197 - DNA, 21 bp, Artificial Sequence
  Synthetic
acatgaagtatctgtatgcct

SEQ ID NO: 22198 - DNA, 21 bp, Artificial Sequence
  Synthetic
agtatctgtatgcctatgagt

SEQ ID NO: 22199 - DNA, 21 bp, Artificial Sequence
  Synthetic
tgaggacgagtgtgccgtgtg

SEQ ID NO: 22200 - DNA, 21 bp, Artificial Sequence
  Synthetic
gaggacgagtgtgccgtgtgt

SEQ ID NO: 22201 - DNA, 21 bp, Artificial Sequence
  Synthetic
agtgtgccgtgtgtcgggacg

SEQ ID NO: 22202 - DNA, 21 bp, Artificial Sequence
  Synthetic
gtgtgccgtgtgtcgggacgg

SEQ ID NO: 22203 - DNA, 21 bp, Artificial Sequence
  Synthetic
tgtgccgtgtgtcgggacggc

SEQ ID NO: 22204 - DNA, 21 bp, Artificial Sequence
  Synthetic
gtgccgtgtgtcgggacggcg

SEQ ID NO: 22205 - DNA, 21 bp, Artificial Sequence
  Synthetic
cgagggcagccgtcacagcag

SEQ ID NO: 22206 - DNA, 21 bp, Artificial Sequence
  Synthetic
catctgctgtgacggctgccc

SEQ ID NO: 22207 - DNA, 21 bp, Artificial Sequence
  Synthetic
ggcaggccaggtggaaggccc

SEQ ID NO: 22208 - DNA, 21 bp, Artificial Sequence
  Synthetic
caggcaggccaggtggaaggc

SEQ ID NO: 22209 - DNA, 21 bp, Artificial Sequence
  Synthetic
ggaggggacaggcaggccagg

SEQ ID NO: 22210 - DNA, 21 bp, Artificial Sequence
  Synthetic
cggaggggacaggcaggccag

SEQ ID NO: 22211 - DNA, 21 bp, Artificial Sequence
  Synthetic
ggcctgcctgtcccctccgct

SEQ ID NO: 22212 - DNA, 21 bp, Artificial Sequence
  Synthetic
gcctgcctgtcccctccgctc

SEQ ID NO: 22213 - DNA, 21 bp, Artificial Sequence
  Synthetic
cctgcctgtcccctccgctcc

SEQ ID NO: 22214 - DNA, 21 bp, Artificial Sequence
  Synthetic
ctggggatctcccggagcgga

SEQ ID NO: 22215 - DNA, 21 bp, Artificial Sequence
  Synthetic
cctggggatctcccggagcgg

SEQ ID NO: 22216 - DNA, 21 bp, Artificial Sequence
  Synthetic
acctggggatctcccggagcg

SEQ ID NO: 22217 - DNA, 21 bp, Artificial Sequence
  Synthetic
tcacctggggatctcccggag

SEQ ID NO: 22218 - DNA, 21 bp, Artificial Sequence
  Synthetic
ctcacctggggatctcccgga

SEQ ID NO: 22219 - DNA, 21 bp, Artificial Sequence
  Synthetic
tccgctccgggagatccccag

SEQ ID NO: 22220 - DNA, 21 bp, Artificial Sequence
  Synthetic
caggctcacctggggatctcc

SEQ ID NO: 22221 - DNA, 21 bp, Artificial Sequence
  Synthetic
gcaggctcacctggggatctc

SEQ ID NO: 22222 - DNA, 21 bp, Artificial Sequence
  Synthetic
tggacacacgagcagtgggac

SEQ ID NO: 22223 - DNA, 21 bp, Artificial Sequence
  Synthetic
ggacacacgagcagtgggacc

SEQ ID NO: 22224 - DNA, 21 bp, Artificial Sequence
  Synthetic
ggactgttgcctgcaggcagc

SEQ ID NO: 22225 - DNA, 21 bp, Artificial Sequence
  Synthetic
tggactgttgcctgcaggcag

SEQ ID NO: 22226 - DNA, 21 bp, Artificial Sequence
  Synthetic
ataacaatgcagtgtataaag

SEQ ID NO: 22227 - DNA, 21 bp, Artificial Sequence
  Synthetic
tattgtagcactatgttggcc

SEQ ID NO: 22228 - DNA, 21 bp, Artificial Sequence
  Synthetic
attgtagcactatgttggcca

SEQ ID NO: 22229 - DNA, 21 bp, Artificial Sequence
  Synthetic
ttggccatggaaatgctatca

SEQ ID NO: 22230 - DNA, 21 bp, Artificial Sequence
  Synthetic
catggaaatgctatcaatgag

SEQ ID NO: 22231 - DNA, 21 bp, Artificial Sequence
  Synthetic
caatgagctgaaattccatcc

SEQ ID NO: 22232 - DNA, 21 bp, Artificial Sequence
  Synthetic
agaagatttggatctcttgga

SEQ ID NO: 22233 - DNA, 21 bp, Artificial Sequence
  Synthetic
gagaagatttggatctcttgg

SEQ ID NO: 22234 - DNA, 21 bp, Artificial Sequence
  Synthetic
acaggagaagatttggatctc

SEQ ID NO: 22235 - DNA, 21 bp, Artificial Sequence
  Synthetic
tacttactgacaggagaagat

SEQ ID NO: 22236 - DNA, 21 bp, Artificial Sequence
  Synthetic
cttacctttacttactgacag

SEQ ID NO: 22237 - DNA, 21 bp, Artificial Sequence
  Synthetic
cacttacctttacttactgac

SEQ ID NO: 22238 - DNA, 21 bp, Artificial Sequence
  Synthetic
tcacttacctttacttactga

SEQ ID NO: 22239 - DNA, 21 bp, Artificial Sequence
  Synthetic
actagatcatgctttacgatt

SEQ ID NO: 22240 - DNA, 21 bp, Artificial Sequence
  Synthetic
ctagatcatgctttacgatta

SEQ ID NO: 22241 - DNA, 21 bp, Artificial Sequence
  Synthetic
atttggaggcgtagaagggca

SEQ ID NO: 22242 - DNA, 21 bp, Artificial Sequence
  Synthetic
gaggcgtagaagggcacagag

SEQ ID NO: 22243 - DNA, 21 bp, Artificial Sequence
  Synthetic
cagtttccaacttacagcact

SEQ ID NO: 22244 - DNA, 21 bp, Artificial Sequence
  Synthetic
tgcatacaggattatgatctt

SEQ ID NO: 22245 - DNA, 21 bp, Artificial Sequence
  Synthetic
gaaaaaataatgtcctgtggt

SEQ ID NO: 22246 - DNA, 21 bp, Artificial Sequence
  Synthetic
ttaagagaatgatccatacca

SEQ ID NO: 22247 - DNA, 21 bp, Artificial Sequence
  Synthetic
tatggatcattctcttaaact

SEQ ID NO: 22248 - DNA, 21 bp, Artificial Sequence
  Synthetic
atggatcattctcttaaactt

SEQ ID NO: 22249 - DNA, 21 bp, Artificial Sequence
  Synthetic
ggatcattctcttaaactttg

SEQ ID NO: 22250 - DNA, 21 bp, Artificial Sequence
  Synthetic
aattgatcctccaaagtttaa

SEQ ID NO: 22251 - DNA, 21 bp, Artificial Sequence
  Synthetic
tgaattgatcctccaaagttt

SEQ ID NO: 22252 - DNA, 21 bp, Artificial Sequence
  Synthetic
ccgcagatcccggacacccgg

SEQ ID NO: 22253 - DNA, 21 bp, Artificial Sequence
  Synthetic
cgcagatcccggacacccggc

SEQ ID NO: 22254 - DNA, 21 bp, Artificial Sequence
  Synthetic
ccggacacccggcgggagctg

SEQ ID NO: 22255 - DNA, 21 bp, Artificial Sequence
  Synthetic
cggacacccggcgggagctgg

SEQ ID NO: 22256 - DNA, 21 bp, Artificial Sequence
  Synthetic
cacgagctccgccagctcccg

SEQ ID NO: 22257 - DNA, 21 bp, Artificial Sequence
  Synthetic
cggcgggagctggcggagctc

SEQ ID NO: 22258 - DNA, 21 bp, Artificial Sequence
  Synthetic
ggagctggcggagctcgtgaa

SEQ ID NO: 22259 - DNA, 21 bp, Artificial Sequence
  Synthetic
gagctggcggagctcgtgaag

SEQ ID NO: 22260 - DNA, 21 bp, Artificial Sequence
  Synthetic
gcggagctcgtgaagcggaag

SEQ ID NO: 22261 - DNA, 21 bp, Artificial Sequence
  Synthetic
cggagctcgtgaagcggaagc

SEQ ID NO: 22262 - DNA, 21 bp, Artificial Sequence
  Synthetic
gccagctcctgcttccgcttc

SEQ ID NO: 22263 - DNA, 21 bp, Artificial Sequence
  Synthetic
aagcggaagcaggagctggcg

SEQ ID NO: 22264 - DNA, 21 bp, Artificial Sequence
  Synthetic
gcggaagcaggagctggcggt

SEQ ID NO: 22265 - DNA, 21 bp, Artificial Sequence
  Synthetic
ccaaatttgccaatgtttcct

SEQ ID NO: 22266 - DNA, 21 bp, Artificial Sequence
  Synthetic
tctcaggaaacattggcaaat

SEQ ID NO: 22267 - DNA, 21 bp, Artificial Sequence
  Synthetic
ctccaaatttgccaatgtttc

SEQ ID NO: 22268 - DNA, 21 bp, Artificial Sequence
  Synthetic
ctcaggaaacattggcaaatt

SEQ ID NO: 22269 - DNA, 21 bp, Artificial Sequence
  Synthetic
tggagcgacagatctatgctt

SEQ ID NO: 22270 - DNA, 21 bp, Artificial Sequence
  Synthetic
acgaataatattgccatacat

SEQ ID NO: 22271 - DNA, 21 bp, Artificial Sequence
  Synthetic
gtatggcaatattattcgtgg

SEQ ID NO: 22272 - DNA, 21 bp, Artificial Sequence
  Synthetic
tatggcaatattattcgtggc

SEQ ID NO: 22273 - DNA, 21 bp, Artificial Sequence
  Synthetic
ggtcagataccgatcccagcc

SEQ ID NO: 22274 - DNA, 21 bp, Artificial Sequence
  Synthetic
tcggtatctgaccaaccaaaa

SEQ ID NO: 22275 - DNA, 21 bp, Artificial Sequence
  Synthetic
aaactccaatagcaaaaatga

SEQ ID NO: 22276 - DNA, 21 bp, Artificial Sequence
  Synthetic
ctccaatagcaaaaatgatcg

SEQ ID NO: 22277 - DNA, 21 bp, Artificial Sequence
  Synthetic
tccaatagcaaaaatgatcga

SEQ ID NO: 22278 - DNA, 21 bp, Artificial Sequence
  Synthetic
tagcaaaaatgatcgaaggaa

SEQ ID NO: 22279 - DNA, 21 bp, Artificial Sequence
  Synthetic
agcaaaaatgatcgaaggaac

SEQ ID NO: 22280 - DNA, 21 bp, Artificial Sequence
  Synthetic
gatcgaaggaaccggaagttt

SEQ ID NO: 22281 - DNA, 21 bp, Artificial Sequence
  Synthetic
atcgaaggaaccggaagttta

SEQ ID NO: 22282 - DNA, 21 bp, Artificial Sequence
  Synthetic
ggaaccggaagtttaaggaag

SEQ ID NO: 22283 - DNA, 21 bp, Artificial Sequence
  Synthetic
gaggtaaccgaggatttactg

SEQ ID NO: 22284 - DNA, 21 bp, Artificial Sequence
  Synthetic
gctgaggtaaccgaggattta

SEQ ID NO: 22285 - DNA, 21 bp, Artificial Sequence
  Synthetic
cttacagctgctgaggtaacc

SEQ ID NO: 22286 - DNA, 21 bp, Artificial Sequence
  Synthetic
tacttacagctgctgaggtaa

SEQ ID NO: 22287 - DNA, 21 bp, Artificial Sequence
  Synthetic
gagtaaactctccttccgagc

SEQ ID NO: 22288 - DNA, 21 bp, Artificial Sequence
  Synthetic
tccagcgcccgcgctcggaag

SEQ ID NO: 22289 - DNA, 21 bp, Artificial Sequence
  Synthetic
ctctccttccgagcgcgggcg

SEQ ID NO: 22290 - DNA, 21 bp, Artificial Sequence
  Synthetic
cgtccagcgcccgcgctcgga

SEQ ID NO: 22291 - DNA, 21 bp, Artificial Sequence
  Synthetic
gcgtccagcgcccgcgctcgg

SEQ ID NO: 22292 - DNA, 21 bp, Artificial Sequence
  Synthetic
gcggcgtccagcgcccgcgct

SEQ ID NO: 22293 - DNA, 21 bp, Artificial Sequence
  Synthetic
ggcggcgtccagcgcccgcgc

SEQ ID NO: 22294 - DNA, 21 bp, Artificial Sequence
  Synthetic
ccgctgcctatctaccgcggc

SEQ ID NO: 22295 - DNA, 21 bp, Artificial Sequence
  Synthetic
cggttgatggagacgcagtcg

SEQ ID NO: 22296 - DNA, 21 bp, Artificial Sequence
  Synthetic
caacgactgcgtctccatcaa

SEQ ID NO: 22297 - DNA, 21 bp, Artificial Sequence
  Synthetic
tctggggcacggcccggttga

SEQ ID NO: 22298 - DNA, 21 bp, Artificial Sequence
  Synthetic
atctggggcacggcccggttg

SEQ ID NO: 22299 - DNA, 21 bp, Artificial Sequence
  Synthetic
gggccgtgccccagatgccca

SEQ ID NO: 22300 - DNA, 21 bp, Artificial Sequence
  Synthetic
ggccgtgccccagatgcccac

SEQ ID NO: 22301 - DNA, 21 bp, Artificial Sequence
  Synthetic
gtgccccagatgcccaccggg

SEQ ID NO: 22302 - DNA, 21 bp, Artificial Sequence
  Synthetic
tgccccagatgcccaccggga

SEQ ID NO: 22303 - DNA, 21 bp, Artificial Sequence
  Synthetic
ttctccatcccggtgggcatc

SEQ ID NO: 22304 - DNA, 21 bp, Artificial Sequence
  Synthetic
ccccagatgcccaccgggatg

SEQ ID NO: 22305 - DNA, 21 bp, Artificial Sequence
  Synthetic
cttctccatcccggtgggcat

SEQ ID NO: 22306 - DNA, 21 bp, Artificial Sequence
  Synthetic
cagatgcccaccgggatggag

SEQ ID NO: 22307 - DNA, 21 bp, Artificial Sequence
  Synthetic
agatgcccaccgggatggaga

SEQ ID NO: 22308 - DNA, 21 bp, Artificial Sequence
  Synthetic
atgcccaccgggatggagaag

SEQ ID NO: 22309 - DNA, 21 bp, Artificial Sequence
  Synthetic
tgcccaccgggatggagaagg

SEQ ID NO: 22310 - DNA, 21 bp, Artificial Sequence
  Synthetic
tcctcctccttctccatcccg

SEQ ID NO: 22311 - DNA, 21 bp, Artificial Sequence
  Synthetic
cccaccgggatggagaaggag

SEQ ID NO: 22312 - DNA, 21 bp, Artificial Sequence
  Synthetic
ccaccgggatggagaaggagg

SEQ ID NO: 22313 - DNA, 21 bp, Artificial Sequence
  Synthetic
tggagaaggaggaggaatcgg

SEQ ID NO: 22314 - DNA, 21 bp, Artificial Sequence
  Synthetic
ggagaaggaggaggaatcggt

SEQ ID NO: 22315 - DNA, 21 bp, Artificial Sequence
  Synthetic
tttccaggaacatcatttaca

SEQ ID NO: 22316 - DNA, 21 bp, Artificial Sequence
  Synthetic
gctcgctgtaaatgatgttcc

SEQ ID NO: 22317 - DNA, 21 bp, Artificial Sequence
  Synthetic
tgctcgctgtaaatgatgttc

SEQ ID NO: 22318 - DNA, 21 bp, Artificial Sequence
  Synthetic
aatttcagcacagcaagtgtt

SEQ ID NO: 22319 - DNA, 21 bp, Artificial Sequence
  Synthetic
tttcagcacagcaagtgttta

SEQ ID NO: 22320 - DNA, 21 bp, Artificial Sequence
  Synthetic
tttctctaaacacttgctgtg

SEQ ID NO: 22321 - DNA, 21 bp, Artificial Sequence
  Synthetic
agcaagtgtttagagaaaaaa

SEQ ID NO: 22322 - DNA, 21 bp, Artificial Sequence
  Synthetic
caagtgtttagagaaaaaaaa

SEQ ID NO: 22323 - DNA, 21 bp, Artificial Sequence
  Synthetic
agagtatggtcattcctgttc

SEQ ID NO: 22324 - DNA, 21 bp, Artificial Sequence
  Synthetic
tggtcattcctgttcctgagg

SEQ ID NO: 22325 - DNA, 21 bp, Artificial Sequence
  Synthetic
gtcattcctgttcctgaggca

SEQ ID NO: 22326 - DNA, 21 bp, Artificial Sequence
  Synthetic
gttgctctctgcctcaggaac

SEQ ID NO: 22327 - DNA, 21 bp, Artificial Sequence
  Synthetic
cgttgctctctgcctcaggaa

SEQ ID NO: 22328 - DNA, 21 bp, Artificial Sequence
  Synthetic
gttgacgttgctctctgcctc

SEQ ID NO: 22329 - DNA, 21 bp, Artificial Sequence
  Synthetic
agttgacgttgctctctgcct

SEQ ID NO: 22330 - DNA, 21 bp, Artificial Sequence
  Synthetic
actattacaatcgcttgtaca

SEQ ID NO: 22331 - DNA, 21 bp, Artificial Sequence
  Synthetic
ctattacaatcgcttgtacaa

SEQ ID NO: 22332 - DNA, 21 bp, Artificial Sequence
  Synthetic
attacaatcgcttgtacaaag

SEQ ID NO: 22333 - DNA, 21 bp, Artificial Sequence
  Synthetic
acaaacttacgctgaatatga

SEQ ID NO: 22334 - DNA, 21 bp, Artificial Sequence
  Synthetic
attaacaaacttacgctgaat

SEQ ID NO: 22335 - DNA, 21 bp, Artificial Sequence
  Synthetic
ctcgttgtctagattaaaagc

SEQ ID NO: 22336 - DNA, 21 bp, Artificial Sequence
  Synthetic
aacgagcaaccagattatgat

SEQ ID NO: 22337 - DNA, 21 bp, Artificial Sequence
  Synthetic
aaccagattatgatatggatt

SEQ ID NO: 22338 - DNA, 21 bp, Artificial Sequence
  Synthetic
attatgatatggattcagaag

SEQ ID NO: 22339 - DNA, 21 bp, Artificial Sequence
  Synthetic
tatttaataaagtctcatctt

SEQ ID NO: 22340 - DNA, 21 bp, Artificial Sequence
  Synthetic
gactttattaaatagacttaa

SEQ ID NO: 22341 - DNA, 21 bp, Artificial Sequence
  Synthetic
ttaaatagacttaacagaaag

SEQ ID NO: 22342 - DNA, 21 bp, Artificial Sequence
  Synthetic
taaatagacttaacagaaaga

SEQ ID NO: 22343 - DNA, 21 bp, Artificial Sequence
  Synthetic
tggaaattaagcctttgcaat

SEQ ID NO: 22344 - DNA, 21 bp, Artificial Sequence
  Synthetic
ttgaaattatgattgacagac

SEQ ID NO: 22345 - DNA, 21 bp, Artificial Sequence
  Synthetic
taccagtaacagggggtatca

SEQ ID NO: 22346 - DNA, 21 bp, Artificial Sequence
  Synthetic
cagtaacagggggtatcacag

SEQ ID NO: 22347 - DNA, 21 bp, Artificial Sequence
  Synthetic
aactaactgctgctgatgtgt

SEQ ID NO: 22348 - DNA, 21 bp, Artificial Sequence
  Synthetic
ggcaagttgctgcctttgcat

SEQ ID NO: 22349 - DNA, 21 bp, Artificial Sequence
  Synthetic
cagcaacttgcccagcttcag

SEQ ID NO: 22350 - DNA, 21 bp, Artificial Sequence
  Synthetic
agattgctgtttctgctgaag

SEQ ID NO: 22351 - DNA, 21 bp, Artificial Sequence
  Synthetic
atgctgagattgctgtttctg

SEQ ID NO: 22352 - DNA, 21 bp, Artificial Sequence
  Synthetic
atgtgtctgttgcgaggaatg

SEQ ID NO: 22353 - DNA, 21 bp, Artificial Sequence
  Synthetic
aagagcagtttacctgtgctt

SEQ ID NO: 22354 - DNA, 21 bp, Artificial Sequence
  Synthetic
tagacatacagtcagaggtgc

SEQ ID NO: 22355 - DNA, 21 bp, Artificial Sequence
  Synthetic
atgcagcaaagtgggcgctgg

SEQ ID NO: 22356 - DNA, 21 bp, Artificial Sequence
  Synthetic
gaccactgcagatgcagcaaa

SEQ ID NO: 22357 - DNA, 21 bp, Artificial Sequence
  Synthetic
gtgcacctgttccaagtcgca

SEQ ID NO: 22358 - DNA, 21 bp, Artificial Sequence
  Synthetic
cttggctacctcactgcgact

SEQ ID NO: 22359 - DNA, 21 bp, Artificial Sequence
  Synthetic
ccttggctacctcactgcgac

SEQ ID NO: 22360 - DNA, 21 bp, Artificial Sequence
  Synthetic
ccaagtcgcagtgaggtagcc

SEQ ID NO: 22361 - DNA, 21 bp, Artificial Sequence
  Synthetic
caagtcgcagtgaggtagcca

SEQ ID NO: 22362 - DNA, 21 bp, Artificial Sequence
  Synthetic
cgcagtgaggtagccaaggaa

SEQ ID NO: 22363 - DNA, 21 bp, Artificial Sequence
  Synthetic
aaccccagctgtacctgaagg

SEQ ID NO: 22364 - DNA, 21 bp, Artificial Sequence
  Synthetic
tattggtggagtataatgttt

SEQ ID NO: 22365 - DNA, 21 bp, Artificial Sequence
  Synthetic
tggatgataaagccatattgg

SEQ ID NO: 22366 - DNA, 21 bp, Artificial Sequence
  Synthetic
ctggatgataaagccatattg

SEQ ID NO: 22367 - DNA, 21 bp, Artificial Sequence
  Synthetic
atatggctttatcatccagcc

SEQ ID NO: 22368 - DNA, 21 bp, Artificial Sequence
  Synthetic
tatggctttatcatccagccc

SEQ ID NO: 22369 - DNA, 21 bp, Artificial Sequence
  Synthetic
tgtacagctgaaatccctggg

SEQ ID NO: 22370 - DNA, 21 bp, Artificial Sequence
  Synthetic
caagctgtacagctgaaatcc

SEQ ID NO: 22371 - DNA, 21 bp, Artificial Sequence
  Synthetic
gatttcagctgtacagcttgt

SEQ ID NO: 22372 - DNA, 21 bp, Artificial Sequence
  Synthetic
ctgtccttacaagctgtacag

SEQ ID NO: 22373 - DNA, 21 bp, Artificial Sequence
  Synthetic
aggactgcttgtgcacaatgc

SEQ ID NO: 22374 - DNA, 21 bp, Artificial Sequence
  Synthetic
gaggactgcttgtgcacaatg

SEQ ID NO: 22375 - DNA, 21 bp, Artificial Sequence
  Synthetic
agcagtcctcagacacttccc

SEQ ID NO: 22376 - DNA, 21 bp, Artificial Sequence
  Synthetic
aattgttcatgggaagtgtct

SEQ ID NO: 22377 - DNA, 21 bp, Artificial Sequence
  Synthetic
ggaattgttcatgggaagtgt

SEQ ID NO: 22378 - DNA, 21 bp, Artificial Sequence
  Synthetic
tgtcaggcaggaattgttcat

SEQ ID NO: 22379 - DNA, 21 bp, Artificial Sequence
  Synthetic
ttgtcaggcaggaattgttca

SEQ ID NO: 22380 - DNA, 21 bp, Artificial Sequence
  Synthetic
tttgtcaggcaggaattgttc

SEQ ID NO: 22381 - DNA, 21 bp, Artificial Sequence
  Synthetic
ggtgcactgcatttgtcaggc

SEQ ID NO: 22382 - DNA, 21 bp, Artificial Sequence
  Synthetic
aggtgcactgcatttgtcagg

SEQ ID NO: 22383 - DNA, 21 bp, Artificial Sequence
  Synthetic
ggagaaacaacactgacatta

SEQ ID NO: 22384 - DNA, 21 bp, Artificial Sequence
  Synthetic
tattgatatgcacattgactg

SEQ ID NO: 22385 - DNA, 21 bp, Artificial Sequence
  Synthetic
tgtattgatatgcacattgac

SEQ ID NO: 22386 - DNA, 21 bp, Artificial Sequence
  Synthetic
gtgtattgatatgcacattga

SEQ ID NO: 22387 - DNA, 21 bp, Artificial Sequence
  Synthetic
agtcaatgtgcatatcaatac

SEQ ID NO: 22388 - DNA, 21 bp, Artificial Sequence
  Synthetic
ttaaggctgttggcgatggtg

SEQ ID NO: 22389 - DNA, 21 bp, Artificial Sequence
  Synthetic
cttgccacagttgctgccagt

SEQ ID NO: 22390 - DNA, 21 bp, Artificial Sequence
  Synthetic
cacagttgctgccagtatgga

SEQ ID NO: 22391 - DNA, 21 bp, Artificial Sequence
  Synthetic
tatgctgctgatggcactgct

SEQ ID NO: 22392 - DNA, 21 bp, Artificial Sequence
  Synthetic
ctatgctgctgatggcactgc

SEQ ID NO: 22393 - DNA, 21 bp, Artificial Sequence
  Synthetic
gctatgctgctgatggcactg

SEQ ID NO: 22394 - DNA, 21 bp, Artificial Sequence
  Synthetic
cttattaccatagagagaacc

SEQ ID NO: 22395 - DNA, 21 bp, Artificial Sequence
  Synthetic
accatagagagaaccacgaac

SEQ ID NO: 22396 - DNA, 21 bp, Artificial Sequence
  Synthetic
gagaaccacgaaccagaaaga

SEQ ID NO: 22397 - DNA, 21 bp, Artificial Sequence
  Synthetic
aaccagaaagattgggcttaa

SEQ ID NO: 22398 - DNA, 21 bp, Artificial Sequence
  Synthetic
accagaaagattgggcttaaa

SEQ ID NO: 22399 - DNA, 21 bp, Artificial Sequence
  Synthetic
gattgggcttaaatggaatag

SEQ ID NO: 22400 - DNA, 21 bp, Artificial Sequence
  Synthetic
atagcagagacaacagtagct

SEQ ID NO: 22401 - DNA, 21 bp, Artificial Sequence
  Synthetic
tagcagagacaacagtagcta

SEQ ID NO: 22402 - DNA, 21 bp, Artificial Sequence
  Synthetic
gagtaaactgtcgtttcgggc

SEQ ID NO: 22403 - DNA, 21 bp, Artificial Sequence
  Synthetic
cgaggcgtctagcgcccgcgc

SEQ ID NO: 22404 - DNA, 21 bp, Artificial Sequence
  Synthetic
cgggcgcgggcgctagacgcc

SEQ ID NO: 22405 - DNA, 21 bp, Artificial Sequence
  Synthetic
agcggaaaaccggcagcggct

SEQ ID NO: 22406 - DNA, 21 bp, Artificial Sequence
  Synthetic
aggtcgggcagatcctcacag

SEQ ID NO: 22407 - DNA, 21 bp, Artificial Sequence
  Synthetic
caggtcgggcagatcctcaca

SEQ ID NO: 22408 - DNA, 21 bp, Artificial Sequence
  Synthetic
gtgaggatctgcccgacctgc

SEQ ID NO: 22409 - DNA, 21 bp, Artificial Sequence
  Synthetic
atcgaggcgtattcgtgcagg

SEQ ID NO: 22410 - DNA, 21 bp, Artificial Sequence
  Synthetic
gcacgaatacgcctcgataaa

SEQ ID NO: 22411 - DNA, 21 bp, Artificial Sequence
  Synthetic
tctgcggcacggccctgttta

SEQ ID NO: 22412 - DNA, 21 bp, Artificial Sequence
  Synthetic
gggccgtgccgcagatgccca

SEQ ID NO: 22413 - DNA, 21 bp, Artificial Sequence
  Synthetic
ggccgtgccgcagatgcccac

SEQ ID NO: 22414 - DNA, 21 bp, Artificial Sequence
  Synthetic
gtgccgcagatgcccaccgga

SEQ ID NO: 22415 - DNA, 21 bp, Artificial Sequence
  Synthetic
tgccgcagatgcccaccggaa

SEQ ID NO: 22416 - DNA, 21 bp, Artificial Sequence
  Synthetic
ccgcagatgcccaccggaatg

SEQ ID NO: 22417 - DNA, 21 bp, Artificial Sequence
  Synthetic
cagatgcccaccggaatggag

SEQ ID NO: 22418 - DNA, 21 bp, Artificial Sequence
  Synthetic
agatgcccaccggaatggaga

SEQ ID NO: 22419 - DNA, 21 bp, Artificial Sequence
  Synthetic
tgcccaccggaatggagaagg

SEQ ID NO: 22420 - DNA, 21 bp, Artificial Sequence
  Synthetic
tcctcttccttctccattccg

SEQ ID NO: 22421 - DNA, 21 bp, Artificial Sequence
  Synthetic
cccaccggaatggagaaggaa

SEQ ID NO: 22422 - DNA, 21 bp, Artificial Sequence
  Synthetic
ccaccggaatggagaaggaag

SEQ ID NO: 22423 - DNA, 21 bp, Artificial Sequence
  Synthetic
ctgctgtgctgaaatagcccg

SEQ ID NO: 22424 - DNA, 21 bp, Artificial Sequence
  Synthetic
tttcagcacagcaggtgtatg

SEQ ID NO: 22425 - DNA, 21 bp, Artificial Sequence
  Synthetic
tctcgccatacacctgctgtg

SEQ ID NO: 22426 - DNA, 21 bp, Artificial Sequence
  Synthetic
tcagcacagcaggtgtatggc

SEQ ID NO: 22427 - DNA, 21 bp, Artificial Sequence
  Synthetic
gcacagcaggtgtatggcgag

SEQ ID NO: 22428 - DNA, 21 bp, Artificial Sequence
  Synthetic
acagcaggtgtatggcgagaa

SEQ ID NO: 22429 - DNA, 21 bp, Artificial Sequence
  Synthetic
cagcaggtgtatggcgagaag

SEQ ID NO: 22430 - DNA, 21 bp, Artificial Sequence
  Synthetic
ataatatggttataccggtcc

SEQ ID NO: 22431 - DNA, 21 bp, Artificial Sequence
  Synthetic
tggttataccggtcccagagg

SEQ ID NO: 22432 - DNA, 21 bp, Artificial Sequence
  Synthetic
agcaatattactttctgcctc

SEQ ID NO: 22433 - DNA, 21 bp, Artificial Sequence
  Synthetic
aagcaatattactttctgcct

SEQ ID NO: 22434 - DNA, 21 bp, Artificial Sequence
  Synthetic
cagaaagtaatattgcttact

SEQ ID NO: 22435 - DNA, 21 bp, Artificial Sequence
  Synthetic
cttactatgagtctatatatc

SEQ ID NO: 22436 - DNA, 21 bp, Artificial Sequence
  Synthetic
ttactatgagtctatatatcc

SEQ ID NO: 22437 - DNA, 21 bp, Artificial Sequence
  Synthetic
tactatgagtctatatatcct

SEQ ID NO: 22438 - DNA, 21 bp, Artificial Sequence
  Synthetic
actatgagtctatatatcctg

SEQ ID NO: 22439 - DNA, 21 bp, Artificial Sequence
  Synthetic
gctttggcatcttaaattccc

SEQ ID NO: 22440 - DNA, 21 bp, Artificial Sequence
  Synthetic
cattacttacgctgtatgtga

SEQ ID NO: 22441 - DNA, 21 bp, Artificial Sequence
  Synthetic
gaatcattacttacgctgtat

SEQ ID NO: 22442 - DNA, 21 bp, Artificial Sequence
  Synthetic
gctgaacagcctgattatgat

SEQ ID NO: 22443 - DNA, 21 bp, Artificial Sequence
  Synthetic
agcctgattatgatttggatt

SEQ ID NO: 22444 - DNA, 21 bp, Artificial Sequence
  Synthetic
attatgatttggattctgaag

SEQ ID NO: 22445 - DNA, 21 bp, Artificial Sequence
  Synthetic
gattctgaagatgaagtattt

SEQ ID NO: 22446 - DNA, 21 bp, Artificial Sequence
  Synthetic
tattcacaaatacttcatctt

SEQ ID NO: 22447 - DNA, 21 bp, Artificial Sequence
  Synthetic
gatgaagtatttgtgaataaa

SEQ ID NO: 22448 - DNA, 21 bp, Artificial Sequence
  Synthetic
gtatttgtgaataaactgaaa

SEQ ID NO: 22449 - DNA, 21 bp, Artificial Sequence
  Synthetic
gtgaataaactgaaaaagaaa

SEQ ID NO: 22450 - DNA, 21 bp, Artificial Sequence
  Synthetic
tggacatctgcccattgcaat

SEQ ID NO: 22451 - DNA, 21 bp, Artificial Sequence
  Synthetic
gacatctgcccattgcaattt

SEQ ID NO: 22452 - DNA, 21 bp, Artificial Sequence
  Synthetic
acatctgcccattgcaatttg

SEQ ID NO: 22453 - DNA, 21 bp, Artificial Sequence
  Synthetic
caatcatctcctcaaattgca

SEQ ID NO: 22454 - DNA, 21 bp, Artificial Sequence
  Synthetic
ttgaggagatgattgaccgcc

SEQ ID NO: 22455 - DNA, 21 bp, Artificial Sequence
  Synthetic
ggtattgttcggctgtaaatg

SEQ ID NO: 22456 - DNA, 21 bp, Artificial Sequence
  Synthetic
caacagcaactggcactcatg

SEQ ID NO: 22457 - DNA, 21 bp, Artificial Sequence
  Synthetic
tgtgcaagctgctgtttctgc

SEQ ID NO: 22458 - DNA, 21 bp, Artificial Sequence
  Synthetic
attactatttgcttgctgttg

SEQ ID NO: 22459 - DNA, 21 bp, Artificial Sequence
  Synthetic
tcacctgtgatgtgttggtgg

SEQ ID NO: 22460 - DNA, 21 bp, Artificial Sequence
  Synthetic
ctcacctgtgatgtgttggtg

SEQ ID NO: 22461 - DNA, 21 bp, Artificial Sequence
  Synthetic
tcctccaccaacacatcacag

SEQ ID NO: 22462 - DNA, 21 bp, Artificial Sequence
  Synthetic
ccctcacctgtgatgtgttgg

SEQ ID NO: 22463 - DNA, 21 bp, Artificial Sequence
  Synthetic
ctccaccaacacatcacaggt

SEQ ID NO: 22464 - DNA, 21 bp, Artificial Sequence
  Synthetic
tccctcacctgtgatgtgttg

SEQ ID NO: 22465 - DNA, 21 bp, Artificial Sequence
  Synthetic
cactagcagaatccaaagtct

SEQ ID NO: 22466 - DNA, 21 bp, Artificial Sequence
  Synthetic
aagcagcaaactgtgcactag

SEQ ID NO: 22467 - DNA, 21 bp, Artificial Sequence
  Synthetic
ctgcttctgctttggtgacat

SEQ ID NO: 22468 - DNA, 21 bp, Artificial Sequence
  Synthetic
gttgttctgatgtcaccaaag

SEQ ID NO: 22469 - DNA, 21 bp, Artificial Sequence
  Synthetic
ttggtgacatcagaacaactg

SEQ ID NO: 22470 - DNA, 21 bp, Artificial Sequence
  Synthetic
tggtgacatcagaacaactga

SEQ ID NO: 22471 - DNA, 21 bp, Artificial Sequence
  Synthetic
gaacaactgatgggattcaag

SEQ ID NO: 22472 - DNA, 21 bp, Artificial Sequence
  Synthetic
caactgatgggattcaagatg

SEQ ID NO: 22473 - DNA, 21 bp, Artificial Sequence
  Synthetic
agcaccacatcatccttcatc

SEQ ID NO: 22474 - DNA, 21 bp, Artificial Sequence
  Synthetic
agatgaaggatgatgtggtgc

SEQ ID NO: 22475 - DNA, 21 bp, Artificial Sequence
  Synthetic
gatgaaggatgatgtggtgct

SEQ ID NO: 22476 - DNA, 21 bp, Artificial Sequence
  Synthetic
aggatgatgtggtgcttggaa

SEQ ID NO: 22477 - DNA, 21 bp, Artificial Sequence
  Synthetic
ggatgatgtggtgcttggaat

SEQ ID NO: 22478 - DNA, 21 bp, Artificial Sequence
  Synthetic
gatgtggtgcttggaatcggg

SEQ ID NO: 22479 - DNA, 21 bp, Artificial Sequence
  Synthetic
ggcgtccttccagcctcaggt

SEQ ID NO: 22480 - DNA, 21 bp, Artificial Sequence
  Synthetic
tttattcttacctgaggctgg

SEQ ID NO: 22481 - DNA, 21 bp, Artificial Sequence
  Synthetic
gtctttattcttacctgaggc

SEQ ID NO: 22482 - DNA, 21 bp, Artificial Sequence
  Synthetic
tgtctttattcttacctgagg

SEQ ID NO: 22483 - DNA, 21 bp, Artificial Sequence
  Synthetic
gtgtaagcccttgtatactcc

SEQ ID NO: 22484 - DNA, 21 bp, Artificial Sequence
  Synthetic
agtgctgttggtgtagtacta

SEQ ID NO: 22485 - DNA, 21 bp, Artificial Sequence
  Synthetic
acaaagctgaacctgccgttg

SEQ ID NO: 22486 - DNA, 21 bp, Artificial Sequence
  Synthetic
tatttgaaggctgtaacaaag

SEQ ID NO: 22487 - DNA, 21 bp, Artificial Sequence
  Synthetic
aacttgaagtctgtgtaatat

SEQ ID NO: 22488 - DNA, 21 bp, Artificial Sequence
  Synthetic
acttcaagttcccacagtgca

SEQ ID NO: 22489 - DNA, 21 bp, Artificial Sequence
  Synthetic
gactcagtgcactgtgggaac

SEQ ID NO: 22490 - DNA, 21 bp, Artificial Sequence
  Synthetic
cttgatgactcagtgcactgt

SEQ ID NO: 22491 - DNA, 21 bp, Artificial Sequence
  Synthetic
acttgatgactcagtgcactg

SEQ ID NO: 22492 - DNA, 21 bp, Artificial Sequence
  Synthetic
tacttgatgactcagtgcact

SEQ ID NO: 22493 - DNA, 21 bp, Artificial Sequence
  Synthetic
caatcagaacctgagttgttg

SEQ ID NO: 22494 - DNA, 21 bp, Artificial Sequence
  Synthetic
ctgcaacaactcaggttctga

SEQ ID NO: 22495 - DNA, 21 bp, Artificial Sequence
  Synthetic
tgcaacaactcaggttctgat

SEQ ID NO: 22496 - DNA, 21 bp, Artificial Sequence
  Synthetic
gcaacaactcaggttctgatt

SEQ ID NO: 22497 - DNA, 21 bp, Artificial Sequence
  Synthetic
aatgttgttcccaatcagaac

SEQ ID NO: 22498 - DNA, 21 bp, Artificial Sequence
  Synthetic
taatcgaatgttgttcccaat

SEQ ID NO: 22499 - DNA, 21 bp, Artificial Sequence
  Synthetic
aactgatgaaggtacagttaa

SEQ ID NO: 22500 - DNA, 21 bp, Artificial Sequence
  Synthetic
tagagtttacagtggcaactg

SEQ ID NO: 22501 - DNA, 21 bp, Artificial Sequence
  Synthetic
gtcgtgcatttattggggcaa

SEQ ID NO: 22502 - DNA, 21 bp, Artificial Sequence
  Synthetic
aggtatatgtcgtgcatttat

SEQ ID NO: 22503 - DNA, 21 bp, Artificial Sequence
  Synthetic
taggtatatgtcgtgcattta

SEQ ID NO: 22504 - DNA, 21 bp, Artificial Sequence
  Synthetic
aataaatgcacgacatatacc

SEQ ID NO: 22505 - DNA, 21 bp, Artificial Sequence
  Synthetic
ggccagctttaaggcagatga

SEQ ID NO: 22506 - DNA, 21 bp, Artificial Sequence
  Synthetic
cggccagctttaaggcagatg

SEQ ID NO: 22507 - DNA, 21 bp, Artificial Sequence
  Synthetic
cagaggatgaagatgggacct

SEQ ID NO: 22508 - DNA, 21 bp, Artificial Sequence
  Synthetic
acagaggatgaagatgggacc

SEQ ID NO: 22509 - DNA, 21 bp, Artificial Sequence
  Synthetic
tgaatctacagaggatgaaga

SEQ ID NO: 22510 - DNA, 21 bp, Artificial Sequence
  Synthetic
ctgaatctacagaggatgaag

SEQ ID NO: 22511 - DNA, 21 bp, Artificial Sequence
  Synthetic
ttggaactgaatctacagagg

SEQ ID NO: 22512 - DNA, 21 bp, Artificial Sequence
  Synthetic
caccttggaactgaatctaca

SEQ ID NO: 22513 - DNA, 21 bp, Artificial Sequence
  Synthetic
ctcaccttggaactgaatcta

SEQ ID NO: 22514 - DNA, 21 bp, Artificial Sequence
  Synthetic
ctctgtagattcagttccaag

SEQ ID NO: 22515 - DNA, 21 bp, Artificial Sequence
  Synthetic
aaataactactcaccttggaa

SEQ ID NO: 22516 - DNA, 21 bp, Artificial Sequence
  Synthetic
tttatttcaacagggaaaatc

SEQ ID NO: 22517 - DNA, 21 bp, Artificial Sequence
  Synthetic
tcaacagggaaaatcatgaat

SEQ ID NO: 22518 - DNA, 21 bp, Artificial Sequence
  Synthetic
catgaatcagaaaagccagca

SEQ ID NO: 22519 - DNA, 21 bp, Artificial Sequence
  Synthetic
atagcagacaacacagtagcg

SEQ ID NO: 22520 - DNA, 21 bp, Artificial Sequence
  Synthetic
tagcagacaacacagtagcga

SEQ ID NO: 22521 - DNA, 21 bp, Artificial Sequence
  Synthetic
aatgccgtaagtctgtcccat

SEQ ID NO: 22522 - DNA, 21 bp, Artificial Sequence
  Synthetic
ccgtaagtctgtcccatgtgg

SEQ ID NO: 22523 - DNA, 21 bp, Artificial Sequence
  Synthetic
cgtaagtctgtcccatgtgga

SEQ ID NO: 22524 - DNA, 21 bp, Artificial Sequence
  Synthetic
gtaagtctgtcccatgtggat

SEQ ID NO: 22525 - DNA, 21 bp, Artificial Sequence
  Synthetic
gtctgtcccatgtggatggga

SEQ ID NO: 22526 - DNA, 21 bp, Artificial Sequence
  Synthetic
cacaactctttcccatccaca

SEQ ID NO: 22527 - DNA, 21 bp, Artificial Sequence
  Synthetic
tcacaactctttcccatccac

SEQ ID NO: 22528 - DNA, 21 bp, Artificial Sequence
  Synthetic
ccatgtggatgggaaagagtt

SEQ ID NO: 22529 - DNA, 21 bp, Artificial Sequence
  Synthetic
gagttgtgaagcaaaggttat

SEQ ID NO: 22530 - DNA, 21 bp, Artificial Sequence
  Synthetic
agttgtgaagcaaaggttatt

SEQ ID NO: 22531 - DNA, 21 bp, Artificial Sequence
  Synthetic
gttgtgaagcaaaggttattt

SEQ ID NO: 22532 - DNA, 21 bp, Artificial Sequence
  Synthetic
aaaggttatttgggaagacag

SEQ ID NO: 22533 - DNA, 21 bp, Artificial Sequence
  Synthetic
aaggttatttgggaagacagc

SEQ ID NO: 22534 - DNA, 21 bp, Artificial Sequence
  Synthetic
tgaacttcagtccttgtgggc

SEQ ID NO: 22535 - DNA, 21 bp, Artificial Sequence
  Synthetic
tggatctgaacttcagtcctt

SEQ ID NO: 22536 - DNA, 21 bp, Artificial Sequence
  Synthetic
agataattagcaagtgaactt

SEQ ID NO: 22537 - DNA, 21 bp, Artificial Sequence
  Synthetic
ttgctaattatcttcacaaaa

SEQ ID NO: 22538 - DNA, 21 bp, Artificial Sequence
  Synthetic
tgctaattatcttcacaaaaa

SEQ ID NO: 22539 - DNA, 21 bp, Artificial Sequence
  Synthetic
ctaattatcttcacaaaaatg

SEQ ID NO: 22540 - DNA, 21 bp, Artificial Sequence
  Synthetic
atggagagacttctcttaagc

SEQ ID NO: 22541 - DNA, 21 bp, Artificial Sequence
  Synthetic
aatcaaaatcttctggcttaa

SEQ ID NO: 22542 - DNA, 21 bp, Artificial Sequence
  Synthetic
aaaatcaaaatcttctggctt

SEQ ID NO: 22543 - DNA, 21 bp, Artificial Sequence
  Synthetic
atcttgacttgataccccttt

SEQ ID NO: 22544 - DNA, 21 bp, Artificial Sequence
  Synthetic
attcctggcagcgtgtgggct

SEQ ID NO: 22545 - DNA, 21 bp, Artificial Sequence
  Synthetic
ttcctggcagcgtgtgggctg

SEQ ID NO: 22546 - DNA, 21 bp, Artificial Sequence
  Synthetic
tcctggcagcgtgtgggctgt

SEQ ID NO: 22547 - DNA, 21 bp, Artificial Sequence
  Synthetic
cctggcagcgtgtgggctgtg

SEQ ID NO: 22548 - DNA, 21 bp, Artificial Sequence
  Synthetic
agtgtgcagcctgccaggtaa

SEQ ID NO: 22549 - DNA, 21 bp, Artificial Sequence
  Synthetic
cctgccaggtaacagaagact

SEQ ID NO: 22550 - DNA, 21 bp, Artificial Sequence
  Synthetic
ctgccaggtaacagaagactg

SEQ ID NO: 22551 - DNA, 21 bp, Artificial Sequence
  Synthetic
ggggcagctgcaggaggcagg

SEQ ID NO: 22552 - DNA, 21 bp, Artificial Sequence
  Synthetic
tggggcagctgcaggaggcag

SEQ ID NO: 22553 - DNA, 21 bp, Artificial Sequence
  Synthetic
gccacatcatggggcagctgc

SEQ ID NO: 22554 - DNA, 21 bp, Artificial Sequence
  Synthetic
tgccacatcatggggcagctg

SEQ ID NO: 22555 - DNA, 21 bp, Artificial Sequence
  Synthetic
cagctgccccatgatgtggca

SEQ ID NO: 22556 - DNA, 21 bp, Artificial Sequence
  Synthetic
agctgccccatgatgtggcat

SEQ ID NO: 22557 - DNA, 21 bp, Artificial Sequence
  Synthetic
aacagccccgatgccacatca

SEQ ID NO: 22558 - DNA, 21 bp, Artificial Sequence
  Synthetic
gaacagccccgatgccacatc

SEQ ID NO: 22559 - DNA, 21 bp, Artificial Sequence
  Synthetic
catcggggctgttctgcaagt

SEQ ID NO: 22560 - DNA, 21 bp, Artificial Sequence
  Synthetic
ggggctgttctgcaagtgtga

SEQ ID NO: 22561 - DNA, 21 bp, Artificial Sequence
  Synthetic
gggctgttctgcaagtgtgaa

SEQ ID NO: 22562 - DNA, 21 bp, Artificial Sequence
  Synthetic
cagcgtctccgttcacacttg

SEQ ID NO: 22563 - DNA, 21 bp, Artificial Sequence
  Synthetic
gtgtgaacggagacgctgcct

SEQ ID NO: 22564 - DNA, 21 bp, Artificial Sequence
  Synthetic
cagccctacacgaaccgccgg

SEQ ID NO: 22565 - DNA, 21 bp, Artificial Sequence
  Synthetic
accgccggcagaaccgcaagt

SEQ ID NO: 22566 - DNA, 21 bp, Artificial Sequence
  Synthetic
ccgccggcagaaccgcaagtg

SEQ ID NO: 22567 - DNA, 21 bp, Artificial Sequence
  Synthetic
ggcctgtgcagcctgcctacg

SEQ ID NO: 22568 - DNA, 21 bp, Artificial Sequence
  Synthetic
tgtgcagcctgcctacggcgg

SEQ ID NO: 22569 - DNA, 21 bp, Artificial Sequence
  Synthetic
ccgaatttgggcttgtcgcag

SEQ ID NO: 22570 - DNA, 21 bp, Artificial Sequence
  Synthetic
tctgctgcgacaagcccaaat

SEQ ID NO: 22571 - DNA, 21 bp, Artificial Sequence
  Synthetic
ctgctgcgacaagcccaaatt

SEQ ID NO: 22572 - DNA, 21 bp, Artificial Sequence
  Synthetic
tgctgcgacaagcccaaattc

SEQ ID NO: 22573 - DNA, 21 bp, Artificial Sequence
  Synthetic
ttctggttgctgcccccgaat

SEQ ID NO: 22574 - DNA, 21 bp, Artificial Sequence
  Synthetic
cccaaattcgggggcagcaac

SEQ ID NO: 22575 - DNA, 21 bp, Artificial Sequence
  Synthetic
tggcgcttctggttgctgccc

SEQ ID NO: 22576 - DNA, 21 bp, Artificial Sequence
  Synthetic
gggggcagcaaccagaagcgc

SEQ ID NO: 22577 - DNA, 21 bp, Artificial Sequence
  Synthetic
acgctgcctccggattgtgga

SEQ ID NO: 22578 - DNA, 21 bp, Artificial Sequence
  Synthetic
tgcctccggattgtggaaagg

SEQ ID NO: 22579 - DNA, 21 bp, Artificial Sequence
  Synthetic
ctgccccccgccaacagagcc

SEQ ID NO: 22580 - DNA, 21 bp, Artificial Sequence
  Synthetic
cccgccaacagagccgagggt

SEQ ID NO: 22581 - DNA, 21 bp, Artificial Sequence
  Synthetic
ccgccaacagagccgagggtg

SEQ ID NO: 22582 - DNA, 21 bp, Artificial Sequence
  Synthetic
gagccgagggtgtggagtatg

SEQ ID NO: 22583 - DNA, 21 bp, Artificial Sequence
  Synthetic
agccgagggtgtggagtatgc

SEQ ID NO: 22584 - DNA, 21 bp, Artificial Sequence
  Synthetic
tatgccggggctgtcagaccc

SEQ ID NO: 22585 - DNA, 21 bp, Artificial Sequence
  Synthetic
tgccggggctgtcagacccaa

SEQ ID NO: 22586 - DNA, 21 bp, Artificial Sequence
  Synthetic
ggggcaatggccacaatcctc

SEQ ID NO: 22587 - DNA, 21 bp, Artificial Sequence
  Synthetic
ggcggggagggcgaaggcaga

SEQ ID NO: 22588 - DNA, 21 bp, Artificial Sequence
  Synthetic
gggcggggagggcgaaggcag

SEQ ID NO: 22589 - DNA, 21 bp, Artificial Sequence
  Synthetic
cctgagaccagggcggggagg

SEQ ID NO: 22590 - DNA, 21 bp, Artificial Sequence
  Synthetic
ggcgcctgagaccagggcggg

SEQ ID NO: 22591 - DNA, 21 bp, Artificial Sequence
  Synthetic
ctggcgcctgagaccagggcg

SEQ ID NO: 22592 - DNA, 21 bp, Artificial Sequence
  Synthetic
actggcgcctgagaccagggc

SEQ ID NO: 22593 - DNA, 21 bp, Artificial Sequence
  Synthetic
cactggcgcctgagaccaggg

SEQ ID NO: 22594 - DNA, 21 bp, Artificial Sequence
  Synthetic
ccactggcgcctgagaccagg

SEQ ID NO: 22595 - DNA, 21 bp, Artificial Sequence
  Synthetic
ccgccctggtctcaggcgcca

SEQ ID NO: 22596 - DNA, 21 bp, Artificial Sequence
  Synthetic
cgccctggtctcaggcgccag

SEQ ID NO: 22597 - DNA, 21 bp, Artificial Sequence
  Synthetic
atttccactggcgcctgagac

SEQ ID NO: 22598 - DNA, 21 bp, Artificial Sequence
  Synthetic
tggacacatttccactggcgc

SEQ ID NO: 22599 - DNA, 21 bp, Artificial Sequence
  Synthetic
atgtgtccagcgacgttgcct

SEQ ID NO: 22600 - DNA, 21 bp, Artificial Sequence
  Synthetic
actcacccgtaggcaacgtcg

SEQ ID NO: 22601 - DNA, 21 bp, Artificial Sequence
  Synthetic
gcctccatggctgaggactgg

SEQ ID NO: 22602 - DNA, 21 bp, Artificial Sequence
  Synthetic
gactggctggactgcccggcc

SEQ ID NO: 22603 - DNA, 21 bp, Artificial Sequence
  Synthetic
ctgcccggccctgggccctgg

SEQ ID NO: 22604 - DNA, 21 bp, Artificial Sequence
  Synthetic
tgcccggccctgggccctggc

SEQ ID NO: 22605 - DNA, 21 bp, Artificial Sequence
  Synthetic
gcttccagccagggcccaggg

SEQ ID NO: 22606 - DNA, 21 bp, Artificial Sequence
  Synthetic
gcggcgcttccagccagggcc

SEQ ID NO: 22607 - DNA, 21 bp, Artificial Sequence
  Synthetic
tgggccctggctggaagcgcc

SEQ ID NO: 22608 - DNA, 21 bp, Artificial Sequence
  Synthetic
agacttcgcggcgcttccagc

SEQ ID NO: 22609 - DNA, 21 bp, Artificial Sequence
  Synthetic
gccgcgaagtctttcgcaagt

SEQ ID NO: 22610 - DNA, 21 bp, Artificial Sequence
  Synthetic
ccgcgaagtctttcgcaagtc

SEQ ID NO: 22611 - DNA, 21 bp, Artificial Sequence
  Synthetic
tccacaggtggcccctgactt

SEQ ID NO: 22612 - DNA, 21 bp, Artificial Sequence
  Synthetic
ttcgcaagtcaggggccacct

SEQ ID NO: 22613 - DNA, 21 bp, Artificial Sequence
  Synthetic
ggacgctcagacacctattac

SEQ ID NO: 22614 - DNA, 21 bp, Artificial Sequence
  Synthetic
agtacctctggtaataggtgt

SEQ ID NO: 22615 - DNA, 21 bp, Artificial Sequence
  Synthetic
catggcccatccctagcccca

SEQ ID NO: 22616 - DNA, 21 bp, Artificial Sequence
  Synthetic
atggcccatccctagccccac

SEQ ID NO: 22617 - DNA, 21 bp, Artificial Sequence
  Synthetic
catccctagccccacaggaga

SEQ ID NO: 22618 - DNA, 21 bp, Artificial Sequence
  Synthetic
gatcctgtctcctgtggggct

SEQ ID NO: 22619 - DNA, 21 bp, Artificial Sequence
  Synthetic
ggatcctgtctcctgtggggc

SEQ ID NO: 22620 - DNA, 21 bp, Artificial Sequence
  Synthetic
tagccccacaggagacaggat

SEQ ID NO: 22621 - DNA, 21 bp, Artificial Sequence
  Synthetic
tgcttcggatcctgtctcctg

SEQ ID NO: 22622 - DNA, 21 bp, Artificial Sequence
  Synthetic
ttgcttcggatcctgtctcct

SEQ ID NO: 22623 - DNA, 21 bp, Artificial Sequence
  Synthetic
gagacaggatccgaagcaaag

SEQ ID NO: 22624 - DNA, 21 bp, Artificial Sequence
  Synthetic
tcgagtcagctcaactttgct

SEQ ID NO: 22625 - DNA, 21 bp, Artificial Sequence
  Synthetic
aaagttgagctgactcgatac

SEQ ID NO: 22626 - DNA, 21 bp, Artificial Sequence
  Synthetic
atcacacgcagggcccaggta

SEQ ID NO: 22627 - DNA, 21 bp, Artificial Sequence
  Synthetic
cgaagagggtgagatcacacg

SEQ ID NO: 22628 - DNA, 21 bp, Artificial Sequence
  Synthetic
ccttgtttgaagtcgaagagg

SEQ ID NO: 22629 - DNA, 21 bp, Artificial Sequence
  Synthetic
gatgccttgtttgaagtcgaa

SEQ ID NO: 22630 - DNA, 21 bp, Artificial Sequence
  Synthetic
aagatgccttgtttgaagtcg

SEQ ID NO: 22631 - DNA, 21 bp, Artificial Sequence
  Synthetic
cacaagatgccttgtttgaag

SEQ ID NO: 22632 - DNA, 21 bp, Artificial Sequence
  Synthetic
ggatagcacaagatgccttgt

SEQ ID NO: 22633 - DNA, 21 bp, Artificial Sequence
  Synthetic
cgaggagccgggcgcaatgga

SEQ ID NO: 22634 - DNA, 21 bp, Artificial Sequence
  Synthetic
gaggagccgggcgcaatggag

SEQ ID NO: 22635 - DNA, 21 bp, Artificial Sequence
  Synthetic
gagccgggcgcaatggagcgg

SEQ ID NO: 22636 - DNA, 21 bp, Artificial Sequence
  Synthetic
gggcgcaatggagcggaagag

SEQ ID NO: 22637 - DNA, 21 bp, Artificial Sequence
  Synthetic
ggcgcaatggagcggaagagg

SEQ ID NO: 22638 - DNA, 21 bp, Artificial Sequence
  Synthetic
gcgcaatggagcggaagaggt

SEQ ID NO: 22639 - DNA, 21 bp, Artificial Sequence
  Synthetic
tgggagtgcccggcgctcccg

SEQ ID NO: 22640 - DNA, 21 bp, Artificial Sequence
  Synthetic
gtgcccggcgctcccgcaggg

SEQ ID NO: 22641 - DNA, 21 bp, Artificial Sequence
  Synthetic
tgcccggcgctcccgcagggc

SEQ ID NO: 22642 - DNA, 21 bp, Artificial Sequence
  Synthetic
gcccggcgctcccgcagggct

SEQ ID NO: 22643 - DNA, 21 bp, Artificial Sequence
  Synthetic
tctcccagccctgcgggagcg

SEQ ID NO: 22644 - DNA, 21 bp, Artificial Sequence
  Synthetic
ccggcgctcccgcagggctgg

SEQ ID NO: 22645 - DNA, 21 bp, Artificial Sequence
  Synthetic
ggcgctcccgcagggctggga

SEQ ID NO: 22646 - DNA, 21 bp, Artificial Sequence
  Synthetic
gcgctcccgcagggctgggag

SEQ ID NO: 22647 - DNA, 21 bp, Artificial Sequence
  Synthetic
cgctcccgcagggctgggaga

SEQ ID NO: 22648 - DNA, 21 bp, Artificial Sequence
  Synthetic
tcttccctctcccagccctgc

SEQ ID NO: 22649 - DNA, 21 bp, Artificial Sequence
  Synthetic
ttcttccctctcccagccctg

SEQ ID NO: 22650 - DNA, 21 bp, Artificial Sequence
  Synthetic
tcccgcagggctgggagaggg

SEQ ID NO: 22651 - DNA, 21 bp, Artificial Sequence
  Synthetic
cttcttccctctcccagccct

SEQ ID NO: 22652 - DNA, 21 bp, Artificial Sequence
  Synthetic
ctgggagagggaagaagtgcc

SEQ ID NO: 22653 - DNA, 21 bp, Artificial Sequence
  Synthetic
agggaagaagtgcccagaagg

SEQ ID NO: 22654 - DNA, 21 bp, Artificial Sequence
  Synthetic
gggaagaagtgcccagaaggt

SEQ ID NO: 22655 - DNA, 21 bp, Artificial Sequence
  Synthetic
ccggccgacagccccgacctt

SEQ ID NO: 22656 - DNA, 21 bp, Artificial Sequence
  Synthetic
gtcggggctgtcggccggcca

SEQ ID NO: 22657 - DNA, 21 bp, Artificial Sequence
  Synthetic
tcggggctgtcggccggccac

SEQ ID NO: 22658 - DNA, 21 bp, Artificial Sequence
  Synthetic
tcccgcctccccgcagcccga

SEQ ID NO: 22659 - DNA, 21 bp, Artificial Sequence
  Synthetic
cccgcctccccgcagcccgag

SEQ ID NO: 22660 - DNA, 21 bp, Artificial Sequence
  Synthetic
ccgcctccccgcagcccgagc

SEQ ID NO: 22661 - DNA, 21 bp, Artificial Sequence
  Synthetic
cctccccgcagcccgagcggg

SEQ ID NO: 22662 - DNA, 21 bp, Artificial Sequence
  Synthetic
gaacttcttcccgctcgggct

SEQ ID NO: 22663 - DNA, 21 bp, Artificial Sequence
  Synthetic
tgctgcggaacttcttcccgc

SEQ ID NO: 22664 - DNA, 21 bp, Artificial Sequence
  Synthetic
cgcgccagctgcggcttgctg

SEQ ID NO: 22665 - DNA, 21 bp, Artificial Sequence
  Synthetic
gcgcgccagctgcggcttgct

SEQ ID NO: 22666 - DNA, 21 bp, Artificial Sequence
  Synthetic
aagccgcagctggcgcgctac

SEQ ID NO: 22667 - DNA, 21 bp, Artificial Sequence
  Synthetic
gcgcgctacctgggcggctcc

SEQ ID NO: 22668 - DNA, 21 bp, Artificial Sequence
  Synthetic
tacctgggcggctccatggac

SEQ ID NO: 22669 - DNA, 21 bp, Artificial Sequence
  Synthetic
agtcgaaggtgctcaggtcca

SEQ ID NO: 22670 - DNA, 21 bp, Artificial Sequence
  Synthetic
aagtcgaaggtgctcaggtcc

SEQ ID NO: 22671 - DNA, 21 bp, Artificial Sequence
  Synthetic
ctgagcaccttcgacttccgc

SEQ ID NO: 22672 - DNA, 21 bp, Artificial Sequence
  Synthetic
agcatcttgcccgtgcggaag

SEQ ID NO: 22673 - DNA, 21 bp, Artificial Sequence
  Synthetic
ctcatcagcatcttgcccgtg

SEQ ID NO: 22674 - DNA, 21 bp, Artificial Sequence
  Synthetic
gctcatcagcatcttgcccgt

SEQ ID NO: 22675 - DNA, 21 bp, Artificial Sequence
  Synthetic
gcctgaacgccttcgacattg

SEQ ID NO: 22676 - DNA, 21 bp, Artificial Sequence
  Synthetic
ctgaacgccttcgacattgct

SEQ ID NO: 22677 - DNA, 21 bp, Artificial Sequence
  Synthetic
tgaacgccttcgacattgctg

SEQ ID NO: 22678 - DNA, 21 bp, Artificial Sequence
  Synthetic
ttgaccagctcctcagcaatg

SEQ ID NO: 22679 - DNA, 21 bp, Artificial Sequence
  Synthetic
gctgaggagctggtcaagacc

SEQ ID NO: 22680 - DNA, 21 bp, Artificial Sequence
  Synthetic
gtcaagaccatggacctcccc

SEQ ID NO: 22681 - DNA, 21 bp, Artificial Sequence
  Synthetic
atggacctccccaagggcctg

SEQ ID NO: 22682 - DNA, 21 bp, Artificial Sequence
  Synthetic
acctccccaagggcctgcagg

SEQ ID NO: 22683 - DNA, 21 bp, Artificial Sequence
  Synthetic
cgctcaccctgcaggcccttg

SEQ ID NO: 22684 - DNA, 21 bp, Artificial Sequence
  Synthetic
ccgctcaccctgcaggccctt

SEQ ID NO: 22685 - DNA, 21 bp, Artificial Sequence
  Synthetic
cccgctcaccctgcaggccct

SEQ ID NO: 22686 - DNA, 21 bp, Artificial Sequence
  Synthetic
gcccgctcaccctgcaggccc

SEQ ID NO: 22687 - DNA, 21 bp, Artificial Sequence
  Synthetic
gcaggggtgggacctggctgc

SEQ ID NO: 22688 - DNA, 21 bp, Artificial Sequence
  Synthetic
gggtgggacctggctgcacgg

SEQ ID NO: 22689 - DNA, 21 bp, Artificial Sequence
  Synthetic
gatgggcatggtgctagtgtg

SEQ ID NO: 22690 - DNA, 21 bp, Artificial Sequence
  Synthetic
cacactagcaccatgcccatc

SEQ ID NO: 22691 - DNA, 21 bp, Artificial Sequence
  Synthetic
acactagcaccatgcccatca

SEQ ID NO: 22692 - DNA, 21 bp, Artificial Sequence
  Synthetic
gcggccgagagctgtcccgtg

SEQ ID NO: 22693 - DNA, 21 bp, Artificial Sequence
  Synthetic
acgggacagctctcggccgcc

SEQ ID NO: 22694 - DNA, 21 bp, Artificial Sequence
  Synthetic
cgggacagctctcggccgccg

SEQ ID NO: 22695 - DNA, 21 bp, Artificial Sequence
  Synthetic
ggacagctctcggccgccgtg

SEQ ID NO: 22696 - DNA, 21 bp, Artificial Sequence
  Synthetic
cagctctcggccgccgtggag

SEQ ID NO: 22697 - DNA, 21 bp, Artificial Sequence
  Synthetic
gggttcttctccacggcggcc

SEQ ID NO: 22698 - DNA, 21 bp, Artificial Sequence
  Synthetic
cggggttcttctccacggcgg

SEQ ID NO: 22699 - DNA, 21 bp, Artificial Sequence
  Synthetic
gcgtggtgttgagccatacgc

SEQ ID NO: 22700 - DNA, 21 bp, Artificial Sequence
  Synthetic
tgcgtggtgttgagccatacg

SEQ ID NO: 22701 - DNA, 21 bp, Artificial Sequence
  Synthetic
ttgcacaggggctgcgtggtg

SEQ ID NO: 22702 - DNA, 21 bp, Artificial Sequence
  Synthetic
gtcaccatgaaggctttgcac

SEQ ID NO: 22703 - DNA, 21 bp, Artificial Sequence
  Synthetic
ggtcaccatgaaggctttgca

SEQ ID NO: 22704 - DNA, 21 bp, Artificial Sequence
  Synthetic
gcaaagccttcatggtgaccg

SEQ ID NO: 22705 - DNA, 21 bp, Artificial Sequence
  Synthetic
aaagccttcatggtgaccgac

SEQ ID NO: 22706 - DNA, 21 bp, Artificial Sequence
  Synthetic
ctgatgtcctcgtcggtcacc

SEQ ID NO: 22707 - DNA, 21 bp, Artificial Sequence
  Synthetic
ggtccatgtgtccccaggaag

SEQ ID NO: 22708 - DNA, 21 bp, Artificial Sequence
  Synthetic
gtccatgtgtccccaggaagc

SEQ ID NO: 22709 - DNA, 21 bp, Artificial Sequence
  Synthetic
catgtgtccccaggaagcagg

SEQ ID NO: 22710 - DNA, 21 bp, Artificial Sequence
  Synthetic
caccagctcttcctgcttcct

SEQ ID NO: 22711 - DNA, 21 bp, Artificial Sequence
  Synthetic
gcaccagctcttcctgcttcc

SEQ ID NO: 22712 - DNA, 21 bp, Artificial Sequence
  Synthetic
tgcaccagctcttcctgcttc

SEQ ID NO: 22713 - DNA, 21 bp, Artificial Sequence
  Synthetic
ggaagagctggtgcagcaggt

SEQ ID NO: 22714 - DNA, 21 bp, Artificial Sequence
  Synthetic
gaagagctggtgcagcaggtg

SEQ ID NO: 22715 - DNA, 21 bp, Artificial Sequence
  Synthetic
gtgcagcaggtgcggaagcgg

SEQ ID NO: 22716 - DNA, 21 bp, Artificial Sequence
  Synthetic
tgcagcaggtgcggaagcggc

SEQ ID NO: 22717 - DNA, 21 bp, Artificial Sequence
  Synthetic
cagcaggtgcggaagcggctg

SEQ ID NO: 22718 - DNA, 21 bp, Artificial Sequence
  Synthetic
agcaggtgcggaagcggctgg

SEQ ID NO: 22719 - DNA, 21 bp, Artificial Sequence
  Synthetic
aaccagctacgggaatatcag

SEQ ID NO: 22720 - DNA, 21 bp, Artificial Sequence
  Synthetic
accagctacgggaatatcagt

SEQ ID NO: 22721 - DNA, 21 bp, Artificial Sequence
  Synthetic
agctacgggaatatcagttgg

SEQ ID NO: 22722 - DNA, 21 bp, Artificial Sequence
  Synthetic
gctacgggaatatcagttgga

SEQ ID NO: 22723 - DNA, 21 bp, Artificial Sequence
  Synthetic
ctttacctgttataccaatta

SEQ ID NO: 22724 - DNA, 21 bp, Artificial Sequence
  Synthetic
ggcagaactgcatcctggctg

SEQ ID NO: 22725 - DNA, 21 bp, Artificial Sequence
  Synthetic
aactgcatcctggctgatgag

SEQ ID NO: 22726 - DNA, 21 bp, Artificial Sequence
  Synthetic
actgcatcctggctgatgaga

SEQ ID NO: 22727 - DNA, 21 bp, Artificial Sequence
  Synthetic
atcctggctgatgagatggga

SEQ ID NO: 22728 - DNA, 21 bp, Artificial Sequence
  Synthetic
gcccaatcccatctcatcagc

SEQ ID NO: 22729 - DNA, 21 bp, Artificial Sequence
  Synthetic
attcagtccattgccttcttg

SEQ ID NO: 22730 - DNA, 21 bp, Artificial Sequence
  Synthetic
ttcctgcaagaaggcaatgga

SEQ ID NO: 22731 - DNA, 21 bp, Artificial Sequence
  Synthetic
ttcagtccattgccttcttgc

SEQ ID NO: 22732 - DNA, 21 bp, Artificial Sequence
  Synthetic
tatacttcctgcaagaaggca

SEQ ID NO: 22733 - DNA, 21 bp, Artificial Sequence
  Synthetic
cccacattatatacttcctgc

SEQ ID NO: 22734 - DNA, 21 bp, Artificial Sequence
  Synthetic
ttcttgcaggaagtatataat

SEQ ID NO: 22735 - DNA, 21 bp, Artificial Sequence
  Synthetic
ggcaatgaccaagaagggacc

SEQ ID NO: 22736 - DNA, 21 bp, Artificial Sequence
  Synthetic
acagtggggcaatgaccaaga

SEQ ID NO: 22737 - DNA, 21 bp, Artificial Sequence
  Synthetic
gacagtggggcaatgaccaag

SEQ ID NO: 22738 - DNA, 21 bp, Artificial Sequence
  Synthetic
gtggacagtggggcaatgacc

SEQ ID NO: 22739 - DNA, 21 bp, Artificial Sequence
  Synthetic
ccagttagtaattgtggacag

SEQ ID NO: 22740 - DNA, 21 bp, Artificial Sequence
  Synthetic
cccagttagtaattgtggaca

SEQ ID NO: 22741 - DNA, 21 bp, Artificial Sequence
  Synthetic
cccactgtccacaattactaa

SEQ ID NO: 22742 - DNA, 21 bp, Artificial Sequence
  Synthetic
ccactgtccacaattactaac

SEQ ID NO: 22743 - DNA, 21 bp, Artificial Sequence
  Synthetic
cactgtccacaattactaact

SEQ ID NO: 22744 - DNA, 21 bp, Artificial Sequence
  Synthetic
gtccacaattactaactggga

SEQ ID NO: 22745 - DNA, 21 bp, Artificial Sequence
  Synthetic
tctcgctcccagttagtaatt

SEQ ID NO: 22746 - DNA, 21 bp, Artificial Sequence
  Synthetic
ccacaattactaactgggagc

SEQ ID NO: 22747 - DNA, 21 bp, Artificial Sequence
  Synthetic
ctgggagcgagaatttaatac

SEQ ID NO: 22748 - DNA, 21 bp, Artificial Sequence
  Synthetic
agcgagaatttaatacatgga

SEQ ID NO: 22749 - DNA, 21 bp, Artificial Sequence
  Synthetic
gaatttaatacatggacagaa

SEQ ID NO: 22750 - DNA, 21 bp, Artificial Sequence
  Synthetic
gcaggcagatgattcaacagt

SEQ ID NO: 22751 - DNA, 21 bp, Artificial Sequence
  Synthetic
tttgcagtacatttcatactg

SEQ ID NO: 22752 - DNA, 21 bp, Artificial Sequence
  Synthetic
tgaaatgtactgcaaagattc

SEQ ID NO: 22753 - DNA, 21 bp, Artificial Sequence
  Synthetic
atgtactgcaaagattcacgg

SEQ ID NO: 22754 - DNA, 21 bp, Artificial Sequence
  Synthetic
tcaaacttgtatgcgcctggg

SEQ ID NO: 22755 - DNA, 21 bp, Artificial Sequence
  Synthetic
agcgtcaaacttgtatgcgcc

SEQ ID NO: 22756 - DNA, 21 bp, Artificial Sequence
  Synthetic
gagcgtcaaacttgtatgcgc

SEQ ID NO: 22757 - DNA, 21 bp, Artificial Sequence
  Synthetic
ttgacgctctgatcaccactt

SEQ ID NO: 22758 - DNA, 21 bp, Artificial Sequence
  Synthetic
aatcatctcaaaagtggtgat

SEQ ID NO: 22759 - DNA, 21 bp, Artificial Sequence
  Synthetic
tgtcagattgtcctgagcttc

SEQ ID NO: 22760 - DNA, 21 bp, Artificial Sequence
  Synthetic
attgtcctgagcttcgtgaaa

SEQ ID NO: 22761 - DNA, 21 bp, Artificial Sequence
  Synthetic
gccattcaatttcacgaagct

SEQ ID NO: 22762 - DNA, 21 bp, Artificial Sequence
  Synthetic
aacacaacgccattcaatttc

SEQ ID NO: 22763 - DNA, 21 bp, Artificial Sequence
  Synthetic
aatggcgttgtgttatcattg

SEQ ID NO: 22764 - DNA, 21 bp, Artificial Sequence
  Synthetic
atcattgatgaagcccatcga

SEQ ID NO: 22765 - DNA, 21 bp, Artificial Sequence
  Synthetic
ctgcttgatagtctcaagcac

SEQ ID NO: 22766 - DNA, 21 bp, Artificial Sequence
  Synthetic
agtctcaagcacatggacctg

SEQ ID NO: 22767 - DNA, 21 bp, Artificial Sequence
  Synthetic
gaactcaccaggtccatgtgc

SEQ ID NO: 22768 - DNA, 21 bp, Artificial Sequence
  Synthetic
gtgagtagcaccttgtgttcc

SEQ ID NO: 22769 - DNA, 21 bp, Artificial Sequence
  Synthetic
aggaacacaaggtgctactca

SEQ ID NO: 22770 - DNA, 21 bp, Artificial Sequence
  Synthetic
ggaacacaaggtgctactcac

SEQ ID NO: 22771 - DNA, 21 bp, Artificial Sequence
  Synthetic
gaacaccattgcaaaatactg

SEQ ID NO: 22772 - DNA, 21 bp, Artificial Sequence
  Synthetic
caccattgcaaaatactgtag

SEQ ID NO: 22773 - DNA, 21 bp, Artificial Sequence
  Synthetic
ctgtttagcttgcttcatttc

SEQ ID NO: 22774 - DNA, 21 bp, Artificial Sequence
  Synthetic
tgtttagcttgcttcatttct

SEQ ID NO: 22775 - DNA, 21 bp, Artificial Sequence
  Synthetic
aaattgtgacggttccaagaa

SEQ ID NO: 22776 - DNA, 21 bp, Artificial Sequence
  Synthetic
gagggaaattgtgacggttcc

SEQ ID NO: 22777 - DNA, 21 bp, Artificial Sequence
  Synthetic
tggaaccgtcacaatttccct

SEQ ID NO: 22778 - DNA, 21 bp, Artificial Sequence
  Synthetic
cgtcacaatttccctcagaat

SEQ ID NO: 22779 - DNA, 21 bp, Artificial Sequence
  Synthetic
cttgagaaactctgattctga

SEQ ID NO: 22780 - DNA, 21 bp, Artificial Sequence
  Synthetic
ccttgagaaactctgattctg

SEQ ID NO: 22781 - DNA, 21 bp, Artificial Sequence
  Synthetic
tccttgagaaactctgattct

SEQ ID NO: 22782 - DNA, 21 bp, Artificial Sequence
  Synthetic
ccctcagaatcagagtttctc

SEQ ID NO: 22783 - DNA, 21 bp, Artificial Sequence
  Synthetic
agtccttgagaaactctgatt

SEQ ID NO: 22784 - DNA, 21 bp, Artificial Sequence
  Synthetic
aatcagagtttctcaaggact

SEQ ID NO: 22785 - DNA, 21 bp, Artificial Sequence
  Synthetic
atcagagtttctcaaggactt

SEQ ID NO: 22786 - DNA, 21 bp, Artificial Sequence
  Synthetic
tcagagtttctcaaggacttt

SEQ ID NO: 22787 - DNA, 21 bp, Artificial Sequence
  Synthetic
cttgagatccccaaagtcctt

SEQ ID NO: 22788 - DNA, 21 bp, Artificial Sequence
  Synthetic
gtcttgagatccccaaagtcc

SEQ ID NO: 22789 - DNA, 21 bp, Artificial Sequence
  Synthetic
aggactttggggatctcaaga

SEQ ID NO: 22790 - DNA, 21 bp, Artificial Sequence
  Synthetic
gactttggggatctcaagaca

SEQ ID NO: 22791 - DNA, 21 bp, Artificial Sequence
  Synthetic
actttggggatctcaagacag

SEQ ID NO: 22792 - DNA, 21 bp, Artificial Sequence
  Synthetic
atctcaagacagaggaacagg

SEQ ID NO: 22793 - DNA, 21 bp, Artificial Sequence
  Synthetic
tctcaagacagaggaacaggt

SEQ ID NO: 22794 - DNA, 21 bp, Artificial Sequence
  Synthetic
tttcctacctgttcctctgtc

SEQ ID NO: 22795 - DNA, 21 bp, Artificial Sequence
  Synthetic
cttaagaatggcctgtagctt

SEQ ID NO: 22796 - DNA, 21 bp, Artificial Sequence
  Synthetic
gccattcttaagccaatgatg

SEQ ID NO: 22797 - DNA, 21 bp, Artificial Sequence
  Synthetic
cattcttaagccaatgatgct

SEQ ID NO: 22798 - DNA, 21 bp, Artificial Sequence
  Synthetic
tcttctcagcatcattggctt

SEQ ID NO: 22799 - DNA, 21 bp, Artificial Sequence
  Synthetic
caatgatgctgagaagactca

SEQ ID NO: 22800 - DNA, 21 bp, Artificial Sequence
  Synthetic
atgatgctgagaagactcaaa

SEQ ID NO: 22801 - DNA, 21 bp, Artificial Sequence
  Synthetic
tgagaagactcaaagaggatg

SEQ ID NO: 22802 - DNA, 21 bp, Artificial Sequence
  Synthetic
gaaaaaaacttggcacccaaa

SEQ ID NO: 22803 - DNA, 21 bp, Artificial Sequence
  Synthetic
aaaaaaacttggcacccaaac

SEQ ID NO: 22804 - DNA, 21 bp, Artificial Sequence
  Synthetic
cacccaaacaggaaacaatta

SEQ ID NO: 22805 - DNA, 21 bp, Artificial Sequence
  Synthetic
acttcaataattgtttcctgt

SEQ ID NO: 22806 - DNA, 21 bp, Artificial Sequence
  Synthetic
aacaggaaacaattattgaag

SEQ ID NO: 22807 - DNA, 21 bp, Artificial Sequence
  Synthetic
gaagtagagctgactaatatc

SEQ ID NO: 22808 - DNA, 21 bp, Artificial Sequence
  Synthetic
gtagagctgactaatatccag

SEQ ID NO: 22809 - DNA, 21 bp, Artificial Sequence
  Synthetic
taatatccagaagaaatacta

SEQ ID NO: 22810 - DNA, 21 bp, Artificial Sequence
  Synthetic
aatagcccgatagtatttctt

SEQ ID NO: 22811 - DNA, 21 bp, Artificial Sequence
  Synthetic
aagaaatactatcgggctatt

SEQ ID NO: 22812 - DNA, 21 bp, Artificial Sequence
  Synthetic
agaaatactatcgggctattt

SEQ ID NO: 22813 - DNA, 21 bp, Artificial Sequence
  Synthetic
agaatttctccttcctttcca

SEQ ID NO: 22814 - DNA, 21 bp, Artificial Sequence
  Synthetic
gaatttctccttcctttccaa

SEQ ID NO: 22815 - DNA, 21 bp, Artificial Sequence
  Synthetic
cctgcccctttggaaaggaag

SEQ ID NO: 22816 - DNA, 21 bp, Artificial Sequence
  Synthetic
gacctgcccctttggaaagga

SEQ ID NO: 22817 - DNA, 21 bp, Artificial Sequence
  Synthetic
tgacctgcccctttggaaagg

SEQ ID NO: 22818 - DNA, 21 bp, Artificial Sequence
  Synthetic
gtatgacctgcccctttggaa

SEQ ID NO: 22819 - DNA, 21 bp, Artificial Sequence
  Synthetic
ggtatgacctgcccctttgga

SEQ ID NO: 22820 - DNA, 21 bp, Artificial Sequence
  Synthetic
tgttggtatgacctgcccctt

SEQ ID NO: 22821 - DNA, 21 bp, Artificial Sequence
  Synthetic
atgttggtatgacctgcccct

SEQ ID NO: 22822 - DNA, 21 bp, Artificial Sequence
  Synthetic
cctaatctacttaacacaatg

SEQ ID NO: 22823 - DNA, 21 bp, Artificial Sequence
  Synthetic
ctaatctacttaacacaatga

SEQ ID NO: 22824 - DNA, 21 bp, Artificial Sequence
  Synthetic
ttccctcaccattgatgagat

SEQ ID NO: 22825 - DNA, 21 bp, Artificial Sequence
  Synthetic
tgtagacaaagtgctttctat

SEQ ID NO: 22826 - DNA, 21 bp, Artificial Sequence
  Synthetic
aaagtgctttctatgcggatt

SEQ ID NO: 22827 - DNA, 21 bp, Artificial Sequence
  Synthetic
gtgctttctatgcggattgtg

SEQ ID NO: 22828 - DNA, 21 bp, Artificial Sequence
  Synthetic
ctttctatgcggattgtgaag

SEQ ID NO: 22829 - DNA, 21 bp, Artificial Sequence
  Synthetic
tttctatgcggattgtgaaga

SEQ ID NO: 22830 - DNA, 21 bp, Artificial Sequence
  Synthetic
cctccttcttcacaatccgca

SEQ ID NO: 22831 - DNA, 21 bp, Artificial Sequence
  Synthetic
atgcggattgtgaagaaggag

SEQ ID NO: 22832 - DNA, 21 bp, Artificial Sequence
  Synthetic
gcggattgtgaagaaggaggt

SEQ ID NO: 22833 - DNA, 21 bp, Artificial Sequence
  Synthetic
tatattgtccagaagggagct

SEQ ID NO: 22834 - DNA, 21 bp, Artificial Sequence
  Synthetic
agctcccttctggacaatata

SEQ ID NO: 22835 - DNA, 21 bp, Artificial Sequence
  Synthetic
gcttcagtatattgtccagaa

SEQ ID NO: 22836 - DNA, 21 bp, Artificial Sequence
  Synthetic
tgcttcagtatattgtccaga

SEQ ID NO: 22837 - DNA, 21 bp, Artificial Sequence
  Synthetic
ctgcttcagtatattgtccag

SEQ ID NO: 22838 - DNA, 21 bp, Artificial Sequence
  Synthetic
cttctggacaatatactgaag

SEQ ID NO: 22839 - DNA, 21 bp, Artificial Sequence
  Synthetic
cttctgcttcagtatattgtc

SEQ ID NO: 22840 - DNA, 21 bp, Artificial Sequence
  Synthetic
ctggacaatatactgaagcag

SEQ ID NO: 22841 - DNA, 21 bp, Artificial Sequence
  Synthetic
gaagaattctttgtcaagtac

SEQ ID NO: 22842 - DNA, 21 bp, Artificial Sequence
  Synthetic
tactagttcttgtacttgaca

SEQ ID NO: 22843 - DNA, 21 bp, Artificial Sequence
  Synthetic
ttcacaatgcagataggagct

SEQ ID NO: 22844 - DNA, 21 bp, Artificial Sequence
  Synthetic
cccttagctcctatctgcatt

SEQ ID NO: 22845 - DNA, 21 bp, Artificial Sequence
  Synthetic
tagctcctatctgcattgtga

SEQ ID NO: 22846 - DNA, 21 bp, Artificial Sequence
  Synthetic
tagcccattcacaatgcagat

SEQ ID NO: 22847 - DNA, 21 bp, Artificial Sequence
  Synthetic
gtagcccattcacaatgcaga

SEQ ID NO: 22848 - DNA, 21 bp, Artificial Sequence
  Synthetic
aatgggctactatctcccaac

SEQ ID NO: 22849 - DNA, 21 bp, Artificial Sequence
  Synthetic
tgggctactatctcccaacta

SEQ ID NO: 22850 - DNA, 21 bp, Artificial Sequence
  Synthetic
gctactatctcccaactagag

SEQ ID NO: 22851 - DNA, 21 bp, Artificial Sequence
  Synthetic
atctcccaactagagaaggat

SEQ ID NO: 22852 - DNA, 21 bp, Artificial Sequence
  Synthetic
tcctcttatccttctctagtt

SEQ ID NO: 22853 - DNA, 21 bp, Artificial Sequence
  Synthetic
ctcccaactagagaaggataa

SEQ ID NO: 22854 - DNA, 21 bp, Artificial Sequence
  Synthetic
atcctcttatccttctctagt

SEQ ID NO: 22855 - DNA, 21 bp, Artificial Sequence
  Synthetic
tatcctcttatccttctctag

SEQ ID NO: 22856 - DNA, 21 bp, Artificial Sequence
  Synthetic
tttaatccagactacgtagag

SEQ ID NO: 22857 - DNA, 21 bp, Artificial Sequence
  Synthetic
tccagactacgtagaggtgga

SEQ ID NO: 22858 - DNA, 21 bp, Artificial Sequence
  Synthetic
tacgtagaggtggataggata

SEQ ID NO: 22859 - DNA, 21 bp, Artificial Sequence
  Synthetic
tagaggtggataggatattgg

SEQ ID NO: 22860 - DNA, 21 bp, Artificial Sequence
  Synthetic
gatgagtctcacagtattgac

SEQ ID NO: 22861 - DNA, 21 bp, Artificial Sequence
  Synthetic
cccattgtccttgtcaatact

SEQ ID NO: 22862 - DNA, 21 bp, Artificial Sequence
  Synthetic
ctcacagtattgacaaggaca

SEQ ID NO: 22863 - DNA, 21 bp, Artificial Sequence
  Synthetic
tcacagtattgacaaggacaa

SEQ ID NO: 22864 - DNA, 21 bp, Artificial Sequence
  Synthetic
cacagtattgacaaggacaat

SEQ ID NO: 22865 - DNA, 21 bp, Artificial Sequence
  Synthetic
acagtattgacaaggacaatg

SEQ ID NO: 22866 - DNA, 21 bp, Artificial Sequence
  Synthetic
attgacaaggacaatggggag

SEQ ID NO: 22867 - DNA, 21 bp, Artificial Sequence
  Synthetic
ccaggtagtaaataacgggct

SEQ ID NO: 22868 - DNA, 21 bp, Artificial Sequence
  Synthetic
accaggtagtaaataacgggc

SEQ ID NO: 22869 - DNA, 21 bp, Artificial Sequence
  Synthetic
tagcccgttatttactacctg

SEQ ID NO: 22870 - DNA, 21 bp, Artificial Sequence
  Synthetic
catttcaccaggtagtaaata

SEQ ID NO: 22871 - DNA, 21 bp, Artificial Sequence
  Synthetic
tgaaatggtgctctctgccct

SEQ ID NO: 22872 - DNA, 21 bp, Artificial Sequence
  Synthetic
aaatggtgctctctgccctat

SEQ ID NO: 22873 - DNA, 21 bp, Artificial Sequence
  Synthetic
atgtgctatcctcatagggca

SEQ ID NO: 22874 - DNA, 21 bp, Artificial Sequence
  Synthetic
ccatgtgctatcctcataggg

SEQ ID NO: 22875 - DNA, 21 bp, Artificial Sequence
  Synthetic
tctgccctatgaggatagcac

SEQ ID NO: 22876 - DNA, 21 bp, Artificial Sequence
  Synthetic
ctgccctatgaggatagcaca

SEQ ID NO: 22877 - DNA, 21 bp, Artificial Sequence
  Synthetic
tgccctatgaggatagcacat

SEQ ID NO: 22878 - DNA, 21 bp, Artificial Sequence
  Synthetic
agctcccatgtgctatcctca

SEQ ID NO: 22879 - DNA, 21 bp, Artificial Sequence
  Synthetic
aggatagcacatgggagctaa

SEQ ID NO: 22880 - DNA, 21 bp, Artificial Sequence
  Synthetic
gggagctaaaagaagatgttg

SEQ ID NO: 22881 - DNA, 21 bp, Artificial Sequence
  Synthetic
gagctaaaagaagatgttgat

SEQ ID NO: 22882 - DNA, 21 bp, Artificial Sequence
  Synthetic
agatgttgatgagggcaagat

SEQ ID NO: 22883 - DNA, 21 bp, Artificial Sequence
  Synthetic
atgttgatgagggcaagattc

SEQ ID NO: 22884 - DNA, 21 bp, Artificial Sequence
  Synthetic
gggcaagattcgagaatttaa

SEQ ID NO: 22885 - DNA, 21 bp, Artificial Sequence
  Synthetic
tgactgaatccgtttaaattc

SEQ ID NO: 22886 - DNA, 21 bp, Artificial Sequence
  Synthetic
atgcaagacatgcagtgcctg

SEQ ID NO: 22887 - DNA, 21 bp, Artificial Sequence
  Synthetic
cagtgcctgtagagtccaagg

SEQ ID NO: 22888 - DNA, 21 bp, Artificial Sequence
  Synthetic
catacttacagcatttctgcc

SEQ ID NO: 22889 - DNA, 21 bp, Artificial Sequence
  Synthetic
ccatatgaaatcctctatcac

SEQ ID NO: 22890 - DNA, 21 bp, Artificial Sequence
  Synthetic
tccatatgaaatcctctatca

SEQ ID NO: 22891 - DNA, 21 bp, Artificial Sequence
  Synthetic
tcctgtgatagaggatttcat

SEQ ID NO: 22892 - DNA, 21 bp, Artificial Sequence
  Synthetic
cctgtgatagaggatttcata

SEQ ID NO: 22893 - DNA, 21 bp, Artificial Sequence
  Synthetic
tggtgggtcacagcattccat

SEQ ID NO: 22894 - DNA, 21 bp, Artificial Sequence
  Synthetic
atgctgtgacccaccactttc

SEQ ID NO: 22895 - DNA, 21 bp, Artificial Sequence
  Synthetic
cactttccagaatgccaaaag

SEQ ID NO: 22896 - DNA, 21 bp, Artificial Sequence
  Synthetic
tatatatattaattcagggat

SEQ ID NO: 22897 - DNA, 21 bp, Artificial Sequence
  Synthetic
agacttggcaaatccacatcc

SEQ ID NO: 22898 - DNA, 21 bp, Artificial Sequence
  Synthetic
atttgccaagtctgcagacca

SEQ ID NO: 22899 - DNA, 21 bp, Artificial Sequence
  Synthetic
gatggtttcatcctccagcaa

SEQ ID NO: 22900 - DNA, 21 bp, Artificial Sequence
  Synthetic
gtaaatttcatttgctggagg

SEQ ID NO: 22901 - DNA, 21 bp, Artificial Sequence
  Synthetic
ttcggtaaatttcatttgctg

SEQ ID NO: 22902 - DNA, 21 bp, Artificial Sequence
  Synthetic
tcctccagcaaatgaaattta

SEQ ID NO: 22903 - DNA, 21 bp, Artificial Sequence
  Synthetic
ccttcggtaaatttcatttgc

SEQ ID NO: 22904 - DNA, 21 bp, Artificial Sequence
  Synthetic
tccttcggtaaatttcatttg

SEQ ID NO: 22905 - DNA, 21 bp, Artificial Sequence
  Synthetic
tccagcaaatgaaatttaccg

SEQ ID NO: 22906 - DNA, 21 bp, Artificial Sequence
  Synthetic
ccagcaaatgaaatttaccga

SEQ ID NO: 22907 - DNA, 21 bp, Artificial Sequence
  Synthetic
gaaggaaagacctttcagtat

SEQ ID NO: 22908 - DNA, 21 bp, Artificial Sequence
  Synthetic
tacacgcgcttacctcaaata

SEQ ID NO: 22909 - DNA, 21 bp, Artificial Sequence
  Synthetic
tgcttgttagccaagctcttc

SEQ ID NO: 22910 - DNA, 21 bp, Artificial Sequence
  Synthetic
acaaaacgttgtattatgatg

SEQ ID NO: 22911 - DNA, 21 bp, Artificial Sequence
  Synthetic
tttatgtccttacaaaaaatg

SEQ ID NO: 22912 - DNA, 21 bp, Artificial Sequence
  Synthetic
gtccttacaaaaaatgatgaa

SEQ ID NO: 22913 - DNA, 21 bp, Artificial Sequence
  Synthetic
atgaaaagggctgtcatctgg

SEQ ID NO: 22914 - DNA, 21 bp, Artificial Sequence
  Synthetic
cctcaggaaaagctttgccag

SEQ ID NO: 22915 - DNA, 21 bp, Artificial Sequence
  Synthetic
gctggggcatgatcattatgc

SEQ ID NO: 22916 - DNA, 21 bp, Artificial Sequence
  Synthetic
tgctggggcatgatcattatg

SEQ ID NO: 22917 - DNA, 21 bp, Artificial Sequence
  Synthetic
tcatgccccagcaccaaaggc

SEQ ID NO: 22918 - DNA, 21 bp, Artificial Sequence
  Synthetic
ccaaatccttgcctttggtgc

SEQ ID NO: 22919 - DNA, 21 bp, Artificial Sequence
  Synthetic
tccaaatccttgcctttggtg

SEQ ID NO: 22920 - DNA, 21 bp, Artificial Sequence
  Synthetic
cccagcaccaaaggcaaggat

SEQ ID NO: 22921 - DNA, 21 bp, Artificial Sequence
  Synthetic
acttcacttactgaaatcaat

SEQ ID NO: 22922 - DNA, 21 bp, Artificial Sequence
  Synthetic
gtacttcacttactgaaatca

SEQ ID NO: 22923 - DNA, 21 bp, Artificial Sequence
  Synthetic
tgccctaggctatttgctttc

SEQ ID NO: 22924 - DNA, 21 bp, Artificial Sequence
  Synthetic
tcttctagaaagcaaatagcc

SEQ ID NO: 22925 - DNA, 21 bp, Artificial Sequence
  Synthetic
cctaggctatttgctttctag

SEQ ID NO: 22926 - DNA, 21 bp, Artificial Sequence
  Synthetic
taggctatttgctttctagaa

SEQ ID NO: 22927 - DNA, 21 bp, Artificial Sequence
  Synthetic
tttctagaagagaaggccaag

SEQ ID NO: 22928 - DNA, 21 bp, Artificial Sequence
  Synthetic
accctgcttggccttctcttc

SEQ ID NO: 22929 - DNA, 21 bp, Artificial Sequence
  Synthetic
gagaaggccaagcagggtctc

SEQ ID NO: 22930 - DNA, 21 bp, Artificial Sequence
  Synthetic
cctgaaaagcctctctccgat

SEQ ID NO: 22931 - DNA, 21 bp, Artificial Sequence
  Synthetic
ggagagacggcccagatcgga

SEQ ID NO: 22932 - DNA, 21 bp, Artificial Sequence
  Synthetic
taggagagacggcccagatcg

SEQ ID NO: 22933 - DNA, 21 bp, Artificial Sequence
  Synthetic
ggtaggagagacggcccagat

SEQ ID NO: 22934 - DNA, 21 bp, Artificial Sequence
  Synthetic
aggtaggagagacggcccaga

SEQ ID NO: 22935 - DNA, 21 bp, Artificial Sequence
  Synthetic
ccgtctctcctacctggcata

SEQ ID NO: 22936 - DNA, 21 bp, Artificial Sequence
  Synthetic
cgtctctcctacctggcatat

SEQ ID NO: 22937 - DNA, 21 bp, Artificial Sequence
  Synthetic
ctcttccaatatgccaggtag

SEQ ID NO: 22938 - DNA, 21 bp, Artificial Sequence
  Synthetic
ctctcctacctggcatattgg

SEQ ID NO: 22939 - DNA, 21 bp, Artificial Sequence
  Synthetic
cgctcttccaatatgccaggt

SEQ ID NO: 22940 - DNA, 21 bp, Artificial Sequence
  Synthetic
acgctcttccaatatgccagg

SEQ ID NO: 22941 - DNA, 21 bp, Artificial Sequence
  Synthetic
gcatattggaagagcgtcatc

SEQ ID NO: 22942 - DNA, 21 bp, Artificial Sequence
  Synthetic
catattggaagagcgtcatct

SEQ ID NO: 22943 - DNA, 21 bp, Artificial Sequence
  Synthetic
tggagtatctctaccaccacc

SEQ ID NO: 22944 - DNA, 21 bp, Artificial Sequence
  Synthetic
gagtatctctaccaccaccat

SEQ ID NO: 22945 - DNA, 21 bp, Artificial Sequence
  Synthetic
atgtgcctctcatggtggtgg

SEQ ID NO: 22946 - DNA, 21 bp, Artificial Sequence
  Synthetic
catcagcatcaaggcaattag

SEQ ID NO: 22947 - DNA, 21 bp, Artificial Sequence
  Synthetic
atcaaggcaattagcagagcg

SEQ ID NO: 22948 - DNA, 21 bp, Artificial Sequence
  Synthetic
gcagagtggtggcaatgtcat

SEQ ID NO: 22949 - DNA, 21 bp, Artificial Sequence
  Synthetic
gtcgatcatgtggaggtgctg

SEQ ID NO: 22950 - DNA, 21 bp, Artificial Sequence
  Synthetic
cagcacctccacatgatcgac

SEQ ID NO: 22951 - DNA, 21 bp, Artificial Sequence
  Synthetic
gcacctccacatgatcgacaa

SEQ ID NO: 22952 - DNA, 21 bp, Artificial Sequence
  Synthetic
ccatctctcttgtcgatcatg

SEQ ID NO: 22953 - DNA, 21 bp, Artificial Sequence
  Synthetic
gccatctctcttgtcgatcat

SEQ ID NO: 22954 - DNA, 21 bp, Artificial Sequence
  Synthetic
gatcgacaagagagatggcag

SEQ ID NO: 22955 - DNA, 21 bp, Artificial Sequence
  Synthetic
gtgtaaaacatgcagctcctg

SEQ ID NO: 22956 - DNA, 21 bp, Artificial Sequence
  Synthetic
cgagatcaaggcaaaaatgcg

SEQ ID NO: 22957 - DNA, 21 bp, Artificial Sequence
  Synthetic
cctcggtcacatgaatcacaa

SEQ ID NO: 22958 - DNA, 21 bp, Artificial Sequence
  Synthetic
ccatgtgaaaacctcggtcac

SEQ ID NO: 22959 - DNA, 21 bp, Artificial Sequence
  Synthetic
tggcggatcacaacactccat

SEQ ID NO: 22960 - DNA, 21 bp, Artificial Sequence
  Synthetic
cactcacccgtatgccaaaag

SEQ ID NO: 22961 - DNA, 21 bp, Artificial Sequence
  Synthetic
ctcacccgtatgccaaaaggt

SEQ ID NO: 22962 - DNA, 21 bp, Artificial Sequence
  Synthetic
gatatgtcaaatatgtcgacc

SEQ ID NO: 22963 - DNA, 21 bp, Artificial Sequence
  Synthetic
atatgtcaaatatgtcgacct

SEQ ID NO: 22964 - DNA, 21 bp, Artificial Sequence
  Synthetic
gttggttccatcctcctgcca

SEQ ID NO: 22965 - DNA, 21 bp, Artificial Sequence
  Synthetic
taaatctcattggcaggagga

SEQ ID NO: 22966 - DNA, 21 bp, Artificial Sequence
  Synthetic
gtaaatctcattggcaggagg

SEQ ID NO: 22967 - DNA, 21 bp, Artificial Sequence
  Synthetic
ttctgtaaatctcattggcag

SEQ ID NO: 22968 - DNA, 21 bp, Artificial Sequence
  Synthetic
tcctcctgccaatgagattta

SEQ ID NO: 22969 - DNA, 21 bp, Artificial Sequence
  Synthetic
ctttctgtaaatctcattggc

SEQ ID NO: 22970 - DNA, 21 bp, Artificial Sequence
  Synthetic
tctttctgtaaatctcattgg

SEQ ID NO: 22971 - DNA, 21 bp, Artificial Sequence
  Synthetic
cctgccaatgagatttacaga

SEQ ID NO: 22972 - DNA, 21 bp, Artificial Sequence
  Synthetic
gaaagaataatatttctgtct

SEQ ID NO: 22973 - DNA, 21 bp, Artificial Sequence
  Synthetic
gtatctaccttacctcaaaga

SEQ ID NO: 22974 - DNA, 21 bp, Artificial Sequence
  Synthetic
tctgtttatttctctaggttg

SEQ ID NO: 22975 - DNA, 21 bp, Artificial Sequence
  Synthetic
ctgtttatttctctaggttga

SEQ ID NO: 22976 - DNA, 21 bp, Artificial Sequence
  Synthetic
tgtttatttctctaggttgat

SEQ ID NO: 22977 - DNA, 21 bp, Artificial Sequence
  Synthetic
tttctctaggttgatgggaat

SEQ ID NO: 22978 - DNA, 21 bp, Artificial Sequence
  Synthetic
gtactcacattcccatcaacc

SEQ ID NO: 22979 - DNA, 21 bp, Artificial Sequence
  Synthetic
cacaaaaccctctattacgat

SEQ ID NO: 22980 - DNA, 21 bp, Artificial Sequence
  Synthetic
acaaaaccctctattacgatg

SEQ ID NO: 22981 - DNA, 21 bp, Artificial Sequence
  Synthetic
aaatggctccacatcgtaata

SEQ ID NO: 22982 - DNA, 21 bp, Artificial Sequence
  Synthetic
agaaatggctccacatcgtaa

SEQ ID NO: 22983 - DNA, 21 bp, Artificial Sequence
  Synthetic
attctgtgttagtacataaaa

SEQ ID NO: 22984 - DNA, 21 bp, Artificial Sequence
  Synthetic
gtactaacacagaatgatgtc

SEQ ID NO: 22985 - DNA, 21 bp, Artificial Sequence
  Synthetic
caccaggaaaagcactgccaa

SEQ ID NO: 22986 - DNA, 21 bp, Artificial Sequence
  Synthetic
attgaggaagaatcattatac

SEQ ID NO: 22987 - DNA, 21 bp, Artificial Sequence
  Synthetic
tattgaggaagaatcattata

SEQ ID NO: 22988 - DNA, 21 bp, Artificial Sequence
  Synthetic
attcttcctcaataccagcgt

SEQ ID NO: 22989 - DNA, 21 bp, Artificial Sequence
  Synthetic
gcccttacgctggtattgagg

SEQ ID NO: 22990 - DNA, 21 bp, Artificial Sequence
  Synthetic
atagcccttacgctggtattg

SEQ ID NO: 22991 - DNA, 21 bp, Artificial Sequence
  Synthetic
catagcccttacgctggtatt

SEQ ID NO: 22992 - DNA, 21 bp, Artificial Sequence
  Synthetic
gccatagcccttacgctggta

SEQ ID NO: 22993 - DNA, 21 bp, Artificial Sequence
  Synthetic
aggtttctcatcgatttcagt

SEQ ID NO: 22994 - DNA, 21 bp, Artificial Sequence
  Synthetic
ataatccttactgaaatcgat

SEQ ID NO: 22995 - DNA, 21 bp, Artificial Sequence
  Synthetic
atataatccttactgaaatcg

SEQ ID NO: 22996 - DNA, 21 bp, Artificial Sequence
  Synthetic
taggttatttgttatcaaagc

SEQ ID NO: 22997 - DNA, 21 bp, Artificial Sequence
  Synthetic
tatcaaagcgtgaaggccaag

SEQ ID NO: 22998 - DNA, 21 bp, Artificial Sequence
  Synthetic
gtgaaggccaagcagggtctc

SEQ ID NO: 22999 - DNA, 21 bp, Artificial Sequence
  Synthetic
gaaggccaagcagggtctcca

SEQ ID NO: 23000 - DNA, 21 bp, Artificial Sequence
  Synthetic
cagatcagataacggtttctc

SEQ ID NO: 23001 - DNA, 21 bp, Artificial Sequence
  Synthetic
ccagatcagataacggtttct

SEQ ID NO: 23002 - DNA, 21 bp, Artificial Sequence
  Synthetic
ccagagaaaccgttatctgat

SEQ ID NO: 23003 - DNA, 21 bp, Artificial Sequence
  Synthetic
tcgtctttcctacatggcata

SEQ ID NO: 23004 - DNA, 21 bp, Artificial Sequence
  Synthetic
cgtctttcctacatggcatat

SEQ ID NO: 23005 - DNA, 21 bp, Artificial Sequence
  Synthetic
gcatattggaaaagtgtaata

SEQ ID NO: 23006 - DNA, 21 bp, Artificial Sequence
  Synthetic
catattggaaaagtgtaatat

SEQ ID NO: 23007 - DNA, 21 bp, Artificial Sequence
  Synthetic
aatgacaagcagatcagcatt

SEQ ID NO: 23008 - DNA, 21 bp, Artificial Sequence
  Synthetic
ttaagaagttaagcaagttga

SEQ ID NO: 23009 - DNA, 21 bp, Artificial Sequence
  Synthetic
taagaagttaagcaagttgac

SEQ ID NO: 23010 - DNA, 21 bp, Artificial Sequence
  Synthetic
ggagtgtggaagtgatgtctt

SEQ ID NO: 23011 - DNA, 21 bp, Artificial Sequence
  Synthetic
gtggagtgtggaagtgatgtc

SEQ ID NO: 23012 - DNA, 21 bp, Artificial Sequence
  Synthetic
cacttccacactccaccacct

SEQ ID NO: 23013 - DNA, 21 bp, Artificial Sequence
  Synthetic
gcattcgtaggtggtggagtg

SEQ ID NO: 23014 - DNA, 21 bp, Artificial Sequence
  Synthetic
agcattcgtaggtggtggagt

SEQ ID NO: 23015 - DNA, 21 bp, Artificial Sequence
  Synthetic
acactccaccacctacgaatg

SEQ ID NO: 23016 - DNA, 21 bp, Artificial Sequence
  Synthetic
aagtccagcattcgtaggtgg

SEQ ID NO: 23017 - DNA, 21 bp, Artificial Sequence
  Synthetic
gaagtccagcattcgtaggtg

SEQ ID NO: 23018 - DNA, 21 bp, Artificial Sequence
  Synthetic
gctggacttccgtagtgacca

SEQ ID NO: 23019 - DNA, 21 bp, Artificial Sequence
  Synthetic
tgtgatactcactggtcacta

SEQ ID NO: 23020 - DNA, 21 bp, Artificial Sequence
  Synthetic
atgtgatactcactggtcact

SEQ ID NO: 23021 - DNA, 21 bp, Artificial Sequence
  Synthetic
cccggcggataatcacaaatc

SEQ ID NO: 23022 - DNA, 21 bp, Artificial Sequence
  Synthetic
tcccggcggataatcacaaat

SEQ ID NO: 23023 - DNA, 21 bp, Artificial Sequence
  Synthetic
accaagagtacaagctgtgtc

SEQ ID NO: 23024 - DNA, 21 bp, Artificial Sequence
  Synthetic
ctgggagtgtacagctgagct

SEQ ID NO: 23025 - DNA, 21 bp, Artificial Sequence
  Synthetic
tgacacactgggagtgtacag

SEQ ID NO: 23026 - DNA, 21 bp, Artificial Sequence
  Synthetic
ctgtacactcccagtgtgtca

SEQ ID NO: 23027 - DNA, 21 bp, Artificial Sequence
  Synthetic
acaccagcccagtgacacact

SEQ ID NO: 23028 - DNA, 21 bp, Artificial Sequence
  Synthetic
aacaccagcccagtgacacac

SEQ ID NO: 23029 - DNA, 21 bp, Artificial Sequence
  Synthetic
gaacaccagcccagtgacaca

SEQ ID NO: 23030 - DNA, 21 bp, Artificial Sequence
  Synthetic
aaagaacagtacctgtgtggg

SEQ ID NO: 23031 - DNA, 21 bp, Artificial Sequence
  Synthetic
acaaagaacagtacctgtgtg

SEQ ID NO: 23032 - DNA, 21 bp, Artificial Sequence
  Synthetic
gacaaagaacagtacctgtgt

SEQ ID NO: 23033 - DNA, 21 bp, Artificial Sequence
  Synthetic
tgacaaagaacagtacctgtg

SEQ ID NO: 23034 - DNA, 21 bp, Artificial Sequence
  Synthetic
atgacaaagaacagtacctgt

SEQ ID NO: 23035 - DNA, 21 bp, Artificial Sequence
  Synthetic
ttcactgagagaggccaggaa

SEQ ID NO: 23036 - DNA, 21 bp, Artificial Sequence
  Synthetic
ttcccttcctggcctctctca

SEQ ID NO: 23037 - DNA, 21 bp, Artificial Sequence
  Synthetic
cttcactgagagaggccagga

SEQ ID NO: 23038 - DNA, 21 bp, Artificial Sequence
  Synthetic
tcttcactgagagaggccagg

SEQ ID NO: 23039 - DNA, 21 bp, Artificial Sequence
  Synthetic
cagtcttcactgagagaggcc

SEQ ID NO: 23040 - DNA, 21 bp, Artificial Sequence
  Synthetic
gcagtcttcactgagagaggc

SEQ ID NO: 23041 - DNA, 21 bp, Artificial Sequence
  Synthetic
caagtgagcagtcttcactga

SEQ ID NO: 23042 - DNA, 21 bp, Artificial Sequence
  Synthetic
agcaagtgagcagtcttcact

SEQ ID NO: 23043 - DNA, 21 bp, Artificial Sequence
  Synthetic
acagcaagtgagcagtcttca

SEQ ID NO: 23044 - DNA, 21 bp, Artificial Sequence
  Synthetic
attgtgtctacagtcagtgtc

SEQ ID NO: 23045 - DNA, 21 bp, Artificial Sequence
  Synthetic
taccactgacagcttgtgtgc

SEQ ID NO: 23046 - DNA, 21 bp, Artificial Sequence
  Synthetic
cagtggtagcaaagacatctg

SEQ ID NO: 23047 - DNA, 21 bp, Artificial Sequence
  Synthetic
tttgcttcttagcatcaaggt

SEQ ID NO: 23048 - DNA, 21 bp, Artificial Sequence
  Synthetic
ttgcttcttagcatcaaggtt

SEQ ID NO: 23049 - DNA, 21 bp, Artificial Sequence
  Synthetic
aaggtcccaaaccttgatgct

SEQ ID NO: 23050 - DNA, 21 bp, Artificial Sequence
  Synthetic
gaccttgctcagcaggtggta

SEQ ID NO: 23051 - DNA, 21 bp, Artificial Sequence
  Synthetic
gcaggtggtactgagttcata

SEQ ID NO: 23052 - DNA, 21 bp, Artificial Sequence
  Synthetic
tggtactgagttcataccgag

SEQ ID NO: 23053 - DNA, 21 bp, Artificial Sequence
  Synthetic
tgaaagaatactcacctcggt

SEQ ID NO: 23054 - DNA, 21 bp, Artificial Sequence
  Synthetic
aacacaagtgacctgagcagc

SEQ ID NO: 23055 - DNA, 21 bp, Artificial Sequence
  Synthetic
agaggcagcaacacaagtgac

SEQ ID NO: 23056 - DNA, 21 bp, Artificial Sequence
  Synthetic
tgtgttgctgcctctcctcac

SEQ ID NO: 23057 - DNA, 21 bp, Artificial Sequence
  Synthetic
gaaacacagagtccttgtgag

SEQ ID NO: 23058 - DNA, 21 bp, Artificial Sequence
  Synthetic
aagaaacacagagtccttgtg

SEQ ID NO: 23059 - DNA, 21 bp, Artificial Sequence
  Synthetic
aaagaaacacagagtccttgt

SEQ ID NO: 23060 - DNA, 21 bp, Artificial Sequence
  Synthetic
tgaaagaaacacagagtcctt

SEQ ID NO: 23061 - DNA, 21 bp, Artificial Sequence
  Synthetic
actctgtgtttctttcatgca

SEQ ID NO: 23062 - DNA, 21 bp, Artificial Sequence
  Synthetic
cctcgctgcatgaaagaaaca

SEQ ID NO: 23063 - DNA, 21 bp, Artificial Sequence
  Synthetic
gtttctttcatgcagcgaggt

SEQ ID NO: 23064 - DNA, 21 bp, Artificial Sequence
  Synthetic
atctcttacctcgctgcatga

SEQ ID NO: 23065 - DNA, 21 bp, Artificial Sequence
  Synthetic
agctatctcttacctcgctgc

SEQ ID NO: 23066 - DNA, 21 bp, Artificial Sequence
  Synthetic
ttccaccttcctctaggacaa

SEQ ID NO: 23067 - DNA, 21 bp, Artificial Sequence
  Synthetic
cagagtaaaattctattgtcc

SEQ ID NO: 23068 - DNA, 21 bp, Artificial Sequence
  Synthetic
ggcttgggacagcgggtatcc

SEQ ID NO: 23069 - DNA, 21 bp, Artificial Sequence
  Synthetic
tgtttaaccacatgggcttct

SEQ ID NO: 23070 - DNA, 21 bp, Artificial Sequence
  Synthetic
gtcttgactttgtttaaccac

SEQ ID NO: 23071 - DNA, 21 bp, Artificial Sequence
  Synthetic
ttaaacaaagtcaagacaagt

SEQ ID NO: 23072 - DNA, 21 bp, Artificial Sequence
  Synthetic
acaaagtcaagacaagtttga

SEQ ID NO: 23073 - DNA, 21 bp, Artificial Sequence
  Synthetic
tttgaatgagcagatgtacac

SEQ ID NO: 23074 - DNA, 21 bp, Artificial Sequence
  Synthetic
atgagcagatgtacacccgag

SEQ ID NO: 23075 - DNA, 21 bp, Artificial Sequence
  Synthetic
agcagatgtacacccgagtag

SEQ ID NO: 23076 - DNA, 21 bp, Artificial Sequence
  Synthetic
acccgagtagaagggtttgtg

SEQ ID NO: 23077 - DNA, 21 bp, Artificial Sequence
  Synthetic
gtcctgcacaaacccttctac

SEQ ID NO: 23078 - DNA, 21 bp, Artificial Sequence
  Synthetic
cgtctcatctttcataaccac

SEQ ID NO: 23079 - DNA, 21 bp, Artificial Sequence
  Synthetic
gtctcatctttcataaccaca

SEQ ID NO: 23080 - DNA, 21 bp, Artificial Sequence
  Synthetic
aattccttgtggttatgaaag

SEQ ID NO: 23081 - DNA, 21 bp, Artificial Sequence
  Synthetic
cctgtaaaattccttgtggtt

SEQ ID NO: 23082 - DNA, 21 bp, Artificial Sequence
  Synthetic
agagtgacgtgcgatgtgtaa

SEQ ID NO: 23083 - DNA, 21 bp, Artificial Sequence
  Synthetic
tgtgtaaacgaggtcatcccc

SEQ ID NO: 23084 - DNA, 21 bp, Artificial Sequence
  Synthetic
ggggccgaagatgtggccctt

SEQ ID NO: 23085 - DNA, 21 bp, Artificial Sequence
  Synthetic
aggggccgaagatgtggccct

SEQ ID NO: 23086 - DNA, 21 bp, Artificial Sequence
  Synthetic
taggggccgaagatgtggccc

SEQ ID NO: 23087 - DNA, 21 bp, Artificial Sequence
  Synthetic
agggccacatcttcggcccct

SEQ ID NO: 23088 - DNA, 21 bp, Artificial Sequence
  Synthetic
ggccacatcttcggcccctat

SEQ ID NO: 23089 - DNA, 21 bp, Artificial Sequence
  Synthetic
gccacatcttcggcccctatg

SEQ ID NO: 23090 - DNA, 21 bp, Artificial Sequence
  Synthetic
gagatctgcccctcatagggg

SEQ ID NO: 23091 - DNA, 21 bp, Artificial Sequence
  Synthetic
gggtggagatctgcccctcat

SEQ ID NO: 23092 - DNA, 21 bp, Artificial Sequence
  Synthetic
tgggtggagatctgcccctca

SEQ ID NO: 23093 - DNA, 21 bp, Artificial Sequence
  Synthetic
tatgaggggcagatctccacc

SEQ ID NO: 23094 - DNA, 21 bp, Artificial Sequence
  Synthetic
agccagctgatttgtcctggg

SEQ ID NO: 23095 - DNA, 21 bp, Artificial Sequence
  Synthetic
aagccagctgatttgtcctgg

SEQ ID NO: 23096 - DNA, 21 bp, Artificial Sequence
  Synthetic
gaagaagccagctgatttgtc

SEQ ID NO: 23097 - DNA, 21 bp, Artificial Sequence
  Synthetic
gctggcttcttctcctggctg

SEQ ID NO: 23098 - DNA, 21 bp, Artificial Sequence
  Synthetic
ggcacactcaccagccaggag

SEQ ID NO: 23099 - DNA, 21 bp, Artificial Sequence
  Synthetic
cagggcacactcaccagccag

SEQ ID NO: 23100 - DNA, 21 bp, Artificial Sequence
  Synthetic
cccagggcacactcaccagcc

SEQ ID NO: 23101 - DNA, 21 bp, Artificial Sequence
  Synthetic
gcccagggcacactcaccagc

SEQ ID NO: 23102 - DNA, 21 bp, Artificial Sequence
  Synthetic
tctttcttccagattgtggac

SEQ ID NO: 23103 - DNA, 21 bp, Artificial Sequence
  Synthetic
cggttgttcttgtccacaatc

SEQ ID NO: 23104 - DNA, 21 bp, Artificial Sequence
  Synthetic
gcggttgttcttgtccacaat

SEQ ID NO: 23105 - DNA, 21 bp, Artificial Sequence
  Synthetic
ataagtccatagatggctcag

SEQ ID NO: 23106 - DNA, 21 bp, Artificial Sequence
  Synthetic
ttggtctcgtctgagccatct

SEQ ID NO: 23107 - DNA, 21 bp, Artificial Sequence
  Synthetic
tccagttggctttggtctcgt

SEQ ID NO: 23108 - DNA, 21 bp, Artificial Sequence
  Synthetic
ctcagacgagaccaaagccaa

SEQ ID NO: 23109 - DNA, 21 bp, Artificial Sequence
  Synthetic
gacgagaccaaagccaactgg

SEQ ID NO: 23110 - DNA, 21 bp, Artificial Sequence
  Synthetic
gaccaaagccaactggatgag

SEQ ID NO: 23111 - DNA, 21 bp, Artificial Sequence
  Synthetic
caccaggtacgtggtcatctc

SEQ ID NO: 23112 - DNA, 21 bp, Artificial Sequence
  Synthetic
accaggtacgtggtcatctcc

SEQ ID NO: 23113 - DNA, 21 bp, Artificial Sequence
  Synthetic
ccaggtacgtggtcatctccc

SEQ ID NO: 23114 - DNA, 21 bp, Artificial Sequence
  Synthetic
aggtacgtggtcatctcccgg

SEQ ID NO: 23115 - DNA, 21 bp, Artificial Sequence
  Synthetic
ggtacgtggtcatctcccggg

SEQ ID NO: 23116 - DNA, 21 bp, Artificial Sequence
  Synthetic
tacgtggtcatctcccgggag

SEQ ID NO: 23117 - DNA, 21 bp, Artificial Sequence
  Synthetic
cgtggtcatctcccgggagga

SEQ ID NO: 23118 - DNA, 21 bp, Artificial Sequence
  Synthetic
gtggtcatctcccgggaggag

SEQ ID NO: 23119 - DNA, 21 bp, Artificial Sequence
  Synthetic
tggtcatctcccgggaggaga

SEQ ID NO: 23120 - DNA, 21 bp, Artificial Sequence
  Synthetic
atctcccgggaggagagggag

SEQ ID NO: 23121 - DNA, 21 bp, Artificial Sequence
  Synthetic
ggttctgctccctctcctccc

SEQ ID NO: 23122 - DNA, 21 bp, Artificial Sequence
  Synthetic
aggttctgctccctctcctcc

SEQ ID NO: 23123 - DNA, 21 bp, Artificial Sequence
  Synthetic
caggttctgctccctctcctc

SEQ ID NO: 23124 - DNA, 21 bp, Artificial Sequence
  Synthetic
acctgctggcgttccagcaca

SEQ ID NO: 23125 - DNA, 21 bp, Artificial Sequence
  Synthetic
aagtagatgcgctcactgtgc

SEQ ID NO: 23126 - DNA, 21 bp, Artificial Sequence
  Synthetic
gaagtagatgcgctcactgtg

SEQ ID NO: 23127 - DNA, 21 bp, Artificial Sequence
  Synthetic
gcacagtgagcgcatctactt

SEQ ID NO: 23128 - DNA, 21 bp, Artificial Sequence
  Synthetic
gcgcatctacttccgggcgtg

SEQ ID NO: 23129 - DNA, 21 bp, Artificial Sequence
  Synthetic
cgcatctacttccgggcgtgc

SEQ ID NO: 23130 - DNA, 21 bp, Artificial Sequence
  Synthetic
ggccggatgtccctgcacgcc

SEQ ID NO: 23131 - DNA, 21 bp, Artificial Sequence
  Synthetic
aggccggatgtccctgcacgc

SEQ ID NO: 23132 - DNA, 21 bp, Artificial Sequence
  Synthetic
gggcgtgcagggacatccggc

SEQ ID NO: 23133 - DNA, 21 bp, Artificial Sequence
  Synthetic
ggcgtgcagggacatccggcc

SEQ ID NO: 23134 - DNA, 21 bp, Artificial Sequence
  Synthetic
gcgtgcagggacatccggcct

SEQ ID NO: 23135 - DNA, 21 bp, Artificial Sequence
  Synthetic
cgtgcagggacatccggcctg

SEQ ID NO: 23136 - DNA, 21 bp, Artificial Sequence
  Synthetic
catccggcctggggagtggct

SEQ ID NO: 23137 - DNA, 21 bp, Artificial Sequence
  Synthetic
gacccgcagccactccccagg

SEQ ID NO: 23138 - DNA, 21 bp, Artificial Sequence
  Synthetic
agtggctgcgggtctggtaca

SEQ ID NO: 23139 - DNA, 21 bp, Artificial Sequence
  Synthetic
tggctgcgggtctggtacagc

SEQ ID NO: 23140 - DNA, 21 bp, Artificial Sequence
  Synthetic
gtctggtacagcgaggactac

SEQ ID NO: 23141 - DNA, 21 bp, Artificial Sequence
  Synthetic
aagcgcctgcacagcatgtcc

SEQ ID NO: 23142 - DNA, 21 bp, Artificial Sequence
  Synthetic
agcgcctgcacagcatgtccc

SEQ ID NO: 23143 - DNA, 21 bp, Artificial Sequence
  Synthetic
aggttgcggtgaatggtttcc

SEQ ID NO: 23144 - DNA, 21 bp, Artificial Sequence
  Synthetic
caggttgcggtgaatggtttc

SEQ ID NO: 23145 - DNA, 21 bp, Artificial Sequence
  Synthetic
aaccattcaccgcaacctggc

SEQ ID NO: 23146 - DNA, 21 bp, Artificial Sequence
  Synthetic
ctcacctctggccaggttgcg

SEQ ID NO: 23147 - DNA, 21 bp, Artificial Sequence
  Synthetic
ttcaccgcaacctggccagag

SEQ ID NO: 23148 - DNA, 21 bp, Artificial Sequence
  Synthetic
ctctgcaacctcttctctcct

SEQ ID NO: 23149 - DNA, 21 bp, Artificial Sequence
  Synthetic
ttcctaggagagaagaggttg

SEQ ID NO: 23150 - DNA, 21 bp, Artificial Sequence
  Synthetic
cctctgcaacctcttctctcc

SEQ ID NO: 23151 - DNA, 21 bp, Artificial Sequence
  Synthetic
cctaggagagaagaggttgca

SEQ ID NO: 23152 - DNA, 21 bp, Artificial Sequence
  Synthetic
ctaggagagaagaggttgcag

SEQ ID NO: 23153 - DNA, 21 bp, Artificial Sequence
  Synthetic
taggagagaagaggttgcaga

SEQ ID NO: 23154 - DNA, 21 bp, Artificial Sequence
  Synthetic
ggagagaagaggttgcagagg

SEQ ID NO: 23155 - DNA, 21 bp, Artificial Sequence
  Synthetic
agaggttgcagagggagaagt

SEQ ID NO: 23156 - DNA, 21 bp, Artificial Sequence
  Synthetic
agggagaagtctgagcaggtt

SEQ ID NO: 23157 - DNA, 21 bp, Artificial Sequence
  Synthetic
cagaaatcttgtctatgcttc

SEQ ID NO: 23158 - DNA, 21 bp, Artificial Sequence
  Synthetic
aatatcaagacctactggcag

SEQ ID NO: 23159 - DNA, 21 bp, Artificial Sequence
  Synthetic
acctactggcagttgaacatc

SEQ ID NO: 23160 - DNA, 21 bp, Artificial Sequence
  Synthetic
cctactggcagttgaacatca

SEQ ID NO: 23161 - DNA, 21 bp, Artificial Sequence
  Synthetic
ctggcagttgaacatcaaggg

SEQ ID NO: 23162 - DNA, 21 bp, Artificial Sequence
  Synthetic
aacatcaaggggtgaaactgc

SEQ ID NO: 23163 - DNA, 21 bp, Artificial Sequence
  Synthetic
aacagcaaagtacctttaaac

SEQ ID NO: 23164 - DNA, 21 bp, Artificial Sequence
  Synthetic
agcaaagtacctttaaaccag

SEQ ID NO: 23165 - DNA, 21 bp, Artificial Sequence
  Synthetic
gaagaaattctttacaagact

SEQ ID NO: 23166 - DNA, 21 bp, Artificial Sequence
  Synthetic
actgaaacccaaagtcttgta

SEQ ID NO: 23167 - DNA, 21 bp, Artificial Sequence
  Synthetic
gagctagttgcttgggcaaca

SEQ ID NO: 23168 - DNA, 21 bp, Artificial Sequence
  Synthetic
agaaatcaatgagctagttgc

SEQ ID NO: 23169 - DNA, 21 bp, Artificial Sequence
  Synthetic
caactagctcattgatttctg

SEQ ID NO: 23170 - DNA, 21 bp, Artificial Sequence
  Synthetic
aactagctcattgatttctgc

SEQ ID NO: 23171 - DNA, 21 bp, Artificial Sequence
  Synthetic
gaaaaggtgtcttcgttacta

SEQ ID NO: 23172 - DNA, 21 bp, Artificial Sequence
  Synthetic
tttggtaccaatcctttagta

SEQ ID NO: 23173 - DNA, 21 bp, Artificial Sequence
  Synthetic
tgtgtaataggtacagtatat

SEQ ID NO: 23174 - DNA, 21 bp, Artificial Sequence
  Synthetic
taggtacagtatatcagaagt

SEQ ID NO: 23175 - DNA, 21 bp, Artificial Sequence
  Synthetic
ataaacggatttccaatggac

SEQ ID NO: 23176 - DNA, 21 bp, Artificial Sequence
  Synthetic
aataaacggatttccaatgga

SEQ ID NO: 23177 - DNA, 21 bp, Artificial Sequence
  Synthetic
ctaaaaataaacggatttcca

SEQ ID NO: 23178 - DNA, 21 bp, Artificial Sequence
  Synthetic
catccaggcatctaaaaataa

SEQ ID NO: 23179 - DNA, 21 bp, Artificial Sequence
  Synthetic
gcctggatggggtactcattg

SEQ ID NO: 23180 - DNA, 21 bp, Artificial Sequence
  Synthetic
cctggatggggtactcattga

SEQ ID NO: 23181 - DNA, 21 bp, Artificial Sequence
  Synthetic
ctggatggggtactcattgat

SEQ ID NO: 23182 - DNA, 21 bp, Artificial Sequence
  Synthetic
tactcattgatgggaatgaca

SEQ ID NO: 23183 - DNA, 21 bp, Artificial Sequence
  Synthetic
actcattgatgggaatgacaa

SEQ ID NO: 23184 - DNA, 21 bp, Artificial Sequence
  Synthetic
atccctttgtcattcccatca

SEQ ID NO: 23185 - DNA, 21 bp, Artificial Sequence
  Synthetic
tcacttgtttcagatcttgca

SEQ ID NO: 23186 - DNA, 21 bp, Artificial Sequence
  Synthetic
cacttgtttcagatcttgcaa

SEQ ID NO: 23187 - DNA, 21 bp, Artificial Sequence
  Synthetic
acttgtttcagatcttgcaat

SEQ ID NO: 23188 - DNA, 21 bp, Artificial Sequence
  Synthetic
ttgtttcagatcttgcaatgg

SEQ ID NO: 23189 - DNA, 21 bp, Artificial Sequence
  Synthetic
tgtttcagatcttgcaatggg

SEQ ID NO: 23190 - DNA, 21 bp, Artificial Sequence
  Synthetic
cgatccctcccattgcaagat

SEQ ID NO: 23191 - DNA, 21 bp, Artificial Sequence
  Synthetic
gatcgactcggccctttaaaa

SEQ ID NO: 23192 - DNA, 21 bp, Artificial Sequence
  Synthetic
gtgatagtacatggctaacgt

SEQ ID NO: 23193 - DNA, 21 bp, Artificial Sequence
  Synthetic
gaaattcataaccctctggct

SEQ ID NO: 23194 - DNA, 21 bp, Artificial Sequence
  Synthetic
aaattcataaccctctggctg

SEQ ID NO: 23195 - DNA, 21 bp, Artificial Sequence
  Synthetic
ctgtcccacagccagagggtt

SEQ ID NO: 23196 - DNA, 21 bp, Artificial Sequence
  Synthetic
tgacatactgtcccacagcca

SEQ ID NO: 23197 - DNA, 21 bp, Artificial Sequence
  Synthetic
gttgacatactgtcccacagc

SEQ ID NO: 23198 - DNA, 21 bp, Artificial Sequence
  Synthetic
gtcaacaattgttccaatggt

SEQ ID NO: 23199 - DNA, 21 bp, Artificial Sequence
  Synthetic
cccatgatgccttcttaccat

SEQ ID NO: 23200 - DNA, 21 bp, Artificial Sequence
  Synthetic
cagacattagctgctctgtct

SEQ ID NO: 23201 - DNA, 21 bp, Artificial Sequence
  Synthetic
acagacattagctgctctgtc

SEQ ID NO: 23202 - DNA, 21 bp, Artificial Sequence
  Synthetic
agagcagctaatgtctgttat

SEQ ID NO: 23203 - DNA, 21 bp, Artificial Sequence
  Synthetic
gagcagctaatgtctgttatc

SEQ ID NO: 23204 - DNA, 21 bp, Artificial Sequence
  Synthetic
agatactgcttcagttctata

SEQ ID NO: 23205 - DNA, 21 bp, Artificial Sequence
  Synthetic
aagatactgcttcagttctat

SEQ ID NO: 23206 - DNA, 21 bp, Artificial Sequence
  Synthetic
gaagatactgcttcagttcta

SEQ ID NO: 23207 - DNA, 21 bp, Artificial Sequence
  Synthetic
gtcatagctgtaggcaatgtt

SEQ ID NO: 23208 - DNA, 21 bp, Artificial Sequence
  Synthetic
tgtcatagctgtaggcaatgt

SEQ ID NO: 23209 - DNA, 21 bp, Artificial Sequence
  Synthetic
agaacaacacatcgaagtggg

SEQ ID NO: 23210 - DNA, 21 bp, Artificial Sequence
  Synthetic
cgacaagaacaacacatcgaa

SEQ ID NO: 23211 - DNA, 21 bp, Artificial Sequence
  Synthetic
aagtgcgacaagaacaacaca

SEQ ID NO: 23212 - DNA, 21 bp, Artificial Sequence
  Synthetic
atgtgttgttcttgtcgcact

SEQ ID NO: 23213 - DNA, 21 bp, Artificial Sequence
  Synthetic
tgtgttgttcttgtcgcactt

SEQ ID NO: 23214 - DNA, 21 bp, Artificial Sequence
  Synthetic
attgatgtccctaagtgcgac

SEQ ID NO: 23215 - DNA, 21 bp, Artificial Sequence
  Synthetic
tcgcacttagggacatcaatc

SEQ ID NO: 23216 - DNA, 21 bp, Artificial Sequence
  Synthetic
cgcacttagggacatcaatca

SEQ ID NO: 23217 - DNA, 21 bp, Artificial Sequence
  Synthetic
cacttagggacatcaatcaag

SEQ ID NO: 23218 - DNA, 21 bp, Artificial Sequence
  Synthetic
ttagggacatcaatcaaggag

SEQ ID NO: 23219 - DNA, 21 bp, Artificial Sequence
  Synthetic
agctgacaattgtgtagtagt

SEQ ID NO: 23220 - DNA, 21 bp, Artificial Sequence
  Synthetic
agtgctggggaggtcacgtcg

SEQ ID NO: 23221 - DNA, 21 bp, Artificial Sequence
  Synthetic
ggtgtgtgtcgcagagtgctg

SEQ ID NO: 23222 - DNA, 21 bp, Artificial Sequence
  Synthetic
aggtgtgtgtcgcagagtgct

SEQ ID NO: 23223 - DNA, 21 bp, Artificial Sequence
  Synthetic
caggtgtgtgtcgcagagtgc

SEQ ID NO: 23224 - DNA, 21 bp, Artificial Sequence
  Synthetic
gcaggtgtgtgtcgcagagtg

SEQ ID NO: 23225 - DNA, 21 bp, Artificial Sequence
  Synthetic
cgtgggtgcaggtgtgtgtcg

SEQ ID NO: 23226 - DNA, 21 bp, Artificial Sequence
  Synthetic
ctgcgacacacacctgcaccc

SEQ ID NO: 23227 - DNA, 21 bp, Artificial Sequence
  Synthetic
tgcgacacacacctgcaccca

SEQ ID NO: 23228 - DNA, 21 bp, Artificial Sequence
  Synthetic
gtgggccagcaagctggttcc

SEQ ID NO: 23229 - DNA, 21 bp, Artificial Sequence
  Synthetic
aaccagcttgctggcccaccc

SEQ ID NO: 23230 - DNA, 21 bp, Artificial Sequence
  Synthetic
accagcttgctggcccaccct

SEQ ID NO: 23231 - DNA, 21 bp, Artificial Sequence
  Synthetic
ggcccacccttggagatcacg

SEQ ID NO: 23232 - DNA, 21 bp, Artificial Sequence
  Synthetic
gcccacccttggagatcacgc

SEQ ID NO: 23233 - DNA, 21 bp, Artificial Sequence
  Synthetic
cttcctgcgtgatctccaagg

SEQ ID NO: 23234 - DNA, 21 bp, Artificial Sequence
  Synthetic
cccgcttcctgcgtgatctcc

SEQ ID NO: 23235 - DNA, 21 bp, Artificial Sequence
  Synthetic
cccttggagatcacgcaggaa

SEQ ID NO: 23236 - DNA, 21 bp, Artificial Sequence
  Synthetic
tggagatcacgcaggaagcgg

SEQ ID NO: 23237 - DNA, 21 bp, Artificial Sequence
  Synthetic
tgcacctggtggtgccagcca

SEQ ID NO: 23238 - DNA, 21 bp, Artificial Sequence
  Synthetic
ttgatggagatggtgtcatcc

SEQ ID NO: 23239 - DNA, 21 bp, Artificial Sequence
  Synthetic
gttgatggagatggtgtcatc

SEQ ID NO: 23240 - DNA, 21 bp, Artificial Sequence
  Synthetic
caccatctccatcaaccacaa

SEQ ID NO: 23241 - DNA, 21 bp, Artificial Sequence
  Synthetic
cattgacccagttgtggttga

SEQ ID NO: 23242 - DNA, 21 bp, Artificial Sequence
  Synthetic
ccattgacccagttgtggttg

SEQ ID NO: 23243 - DNA, 21 bp, Artificial Sequence
  Synthetic
aagcgccacatgttggccagg

SEQ ID NO: 23244 - DNA, 21 bp, Artificial Sequence
  Synthetic
aacatgtggcgcttcttgcag

SEQ ID NO: 23245 - DNA, 21 bp, Artificial Sequence
  Synthetic
acatgtggcgcttcttgcagc

SEQ ID NO: 23246 - DNA, 21 bp, Artificial Sequence
  Synthetic
acggcgcatagctcctgctgc

SEQ ID NO: 23247 - DNA, 21 bp, Artificial Sequence
  Synthetic
cagcaggagctatgcgccgtg

SEQ ID NO: 23248 - DNA, 21 bp, Artificial Sequence
  Synthetic
agcaggagctatgcgccgtgc

SEQ ID NO: 23249 - DNA, 21 bp, Artificial Sequence
  Synthetic
caggagctatgcgccgtgcag

SEQ ID NO: 23250 - DNA, 21 bp, Artificial Sequence
  Synthetic
aggagctatgcgccgtgcagg

SEQ ID NO: 23251 - DNA, 21 bp, Artificial Sequence
  Synthetic
gcgccgtgcaggaggaggtca

SEQ ID NO: 23252 - DNA, 21 bp, Artificial Sequence
  Synthetic
cgtgcaggaggaggtcagcga

SEQ ID NO: 23253 - DNA, 21 bp, Artificial Sequence
  Synthetic
gtgcaggaggaggtcagcgag

SEQ ID NO: 23254 - DNA, 21 bp, Artificial Sequence
  Synthetic
gcaggaggaggtcagcgagtg

SEQ ID NO: 23255 - DNA, 21 bp, Artificial Sequence
  Synthetic
caggaggaggtcagcgagtgg

SEQ ID NO: 23256 - DNA, 21 bp, Artificial Sequence
  Synthetic
agtggtggtgccagtcgggca

SEQ ID NO: 23257 - DNA, 21 bp, Artificial Sequence
  Synthetic
cagtggtggtgccagtcgggc

SEQ ID NO: 23258 - DNA, 21 bp, Artificial Sequence
  Synthetic
acctggcagtggtggtgccag

SEQ ID NO: 23259 - DNA, 21 bp, Artificial Sequence
  Synthetic
gactggcaccaccactgccag

SEQ ID NO: 23260 - DNA, 21 bp, Artificial Sequence
  Synthetic
actggcaccaccactgccagg

SEQ ID NO: 23261 - DNA, 21 bp, Artificial Sequence
  Synthetic
cttccctctgcccaggtcatc

SEQ ID NO: 23262 - DNA, 21 bp, Artificial Sequence
  Synthetic
cgagcaggacctcatgatgac

SEQ ID NO: 23263 - DNA, 21 bp, Artificial Sequence
  Synthetic
caggtcatcatgaggtcctgc

SEQ ID NO: 23264 - DNA, 21 bp, Artificial Sequence
  Synthetic
tcttcaaagttgatgcccgag

SEQ ID NO: 23265 - DNA, 21 bp, Artificial Sequence
  Synthetic
ctggtcgagtggctctgagac

SEQ ID NO: 23266 - DNA, 21 bp, Artificial Sequence
  Synthetic
atgaaagctggtcgagtggct

SEQ ID NO: 23267 - DNA, 21 bp, Artificial Sequence
  Synthetic
tcggtgacacatgaaagctgg

SEQ ID NO: 23268 - DNA, 21 bp, Artificial Sequence
  Synthetic
tcgaccagctttcatgtgtca

SEQ ID NO: 23269 - DNA, 21 bp, Artificial Sequence
  Synthetic
atggcctgccttcggtgacac

SEQ ID NO: 23270 - DNA, 21 bp, Artificial Sequence
  Synthetic
aggcaggccatcaaactccag

SEQ ID NO: 23271 - DNA, 21 bp, Artificial Sequence
  Synthetic
tcaaactccaggtggatgaca

SEQ ID NO: 23272 - DNA, 21 bp, Artificial Sequence
  Synthetic
gaatcttctgtgtcatccacc

SEQ ID NO: 23273 - DNA, 21 bp, Artificial Sequence
  Synthetic
agaatcttctgtgtcatccac

SEQ ID NO: 23274 - DNA, 21 bp, Artificial Sequence
  Synthetic
tggatgacacagaagattctg

SEQ ID NO: 23275 - DNA, 21 bp, Artificial Sequence
  Synthetic
atgacacagaagattctgatg

SEQ ID NO: 23276 - DNA, 21 bp, Artificial Sequence
  Synthetic
cacagaagattctgatgaaga

SEQ ID NO: 23277 - DNA, 21 bp, Artificial Sequence
  Synthetic
gcctaggggtccattcttcat

SEQ ID NO: 23278 - DNA, 21 bp, Artificial Sequence
  Synthetic
tggacccctaggcagcaaggt

SEQ ID NO: 23279 - DNA, 21 bp, Artificial Sequence
  Synthetic
ttccctcttaccttgctgcct

SEQ ID NO: 23280 - DNA, 21 bp, Artificial Sequence
  Synthetic
cttccctcttaccttgctgcc

SEQ ID NO: 23281 - DNA, 21 bp, Artificial Sequence
  Synthetic
caaacctccttggatggcctt

SEQ ID NO: 23282 - DNA, 21 bp, Artificial Sequence
  Synthetic
cctccttggatggccttaaga

SEQ ID NO: 23283 - DNA, 21 bp, Artificial Sequence
  Synthetic
ttccactcttaaggccatcca

SEQ ID NO: 23284 - DNA, 21 bp, Artificial Sequence
  Synthetic
ctccttggatggccttaagag

SEQ ID NO: 23285 - DNA, 21 bp, Artificial Sequence
  Synthetic
gttccactcttaaggccatcc

SEQ ID NO: 23286 - DNA, 21 bp, Artificial Sequence
  Synthetic
agagtggaacagcgtaaacac

SEQ ID NO: 23287 - DNA, 21 bp, Artificial Sequence
  Synthetic
tgcccaaggcgtcattcagta

SEQ ID NO: 23288 - DNA, 21 bp, Artificial Sequence
  Synthetic
gattcattactgaatgacgcc

SEQ ID NO: 23289 - DNA, 21 bp, Artificial Sequence
  Synthetic
tcattcagtaatgaatctagt

SEQ ID NO: 23290 - DNA, 21 bp, Artificial Sequence
  Synthetic
tctttcaaactagattcatta

SEQ ID NO: 23291 - DNA, 21 bp, Artificial Sequence
  Synthetic
tcagtaatgaatctagtttga

SEQ ID NO: 23292 - DNA, 21 bp, Artificial Sequence
  Synthetic
atctagtttgaaagaattgtc

SEQ ID NO: 23293 - DNA, 21 bp, Artificial Sequence
  Synthetic
ttgtcaagaacagcaaattta

SEQ ID NO: 23294 - DNA, 21 bp, Artificial Sequence
  Synthetic
atttactgaatgcaagtggct

SEQ ID NO: 23295 - DNA, 21 bp, Artificial Sequence
  Synthetic
gcaagtggctcagagcaggct

SEQ ID NO: 23296 - DNA, 21 bp, Artificial Sequence
  Synthetic
acactggtttctgagcctgct

SEQ ID NO: 23297 - DNA, 21 bp, Artificial Sequence
  Synthetic
tccagaaggggacactggttt

SEQ ID NO: 23298 - DNA, 21 bp, Artificial Sequence
  Synthetic
ctcagaaaccagtgtcccctt

SEQ ID NO: 23299 - DNA, 21 bp, Artificial Sequence
  Synthetic
tcagaaaccagtgtccccttc

SEQ ID NO: 23300 - DNA, 21 bp, Artificial Sequence
  Synthetic
agaaaccagtgtccccttctg

SEQ ID NO: 23301 - DNA, 21 bp, Artificial Sequence
  Synthetic
gaggtacttgcttctccagaa

SEQ ID NO: 23302 - DNA, 21 bp, Artificial Sequence
  Synthetic
agaggtacttgcttctccaga

SEQ ID NO: 23303 - DNA, 21 bp, Artificial Sequence
  Synthetic
cagaggtacttgcttctccag

SEQ ID NO: 23304 - DNA, 21 bp, Artificial Sequence
  Synthetic
cttctggagaagcaagtacct

SEQ ID NO: 23305 - DNA, 21 bp, Artificial Sequence
  Synthetic
gtccagaggtacttgcttctc

SEQ ID NO: 23306 - DNA, 21 bp, Artificial Sequence
  Synthetic
ggacagcactcaagactaaaa

SEQ ID NO: 23307 - DNA, 21 bp, Artificial Sequence
  Synthetic
cactcaagactaaaactgggt

SEQ ID NO: 23308 - DNA, 21 bp, Artificial Sequence
  Synthetic
actcttctccaacctagaact

SEQ ID NO: 23309 - DNA, 21 bp, Artificial Sequence
  Synthetic
ctcttctccaacctagaactc

SEQ ID NO: 23310 - DNA, 21 bp, Artificial Sequence
  Synthetic
ttctccaacctagaactcagg

SEQ ID NO: 23311 - DNA, 21 bp, Artificial Sequence
  Synthetic
tccaacctagaactcaggaag

SEQ ID NO: 23312 - DNA, 21 bp, Artificial Sequence
  Synthetic
ccaacctagaactcaggaaga

SEQ ID NO: 23313 - DNA, 21 bp, Artificial Sequence
  Synthetic
tagaactcaggaagaaggaga

SEQ ID NO: 23314 - DNA, 21 bp, Artificial Sequence
  Synthetic
actcaggaagaaggagactga

SEQ ID NO: 23315 - DNA, 21 bp, Artificial Sequence
  Synthetic
tttctttcagtctccttcttc

SEQ ID NO: 23316 - DNA, 21 bp, Artificial Sequence
  Synthetic
tgaaagaaagatgtatagcct

SEQ ID NO: 23317 - DNA, 21 bp, Artificial Sequence
  Synthetic
aaagaaagatgtatagcctgc

SEQ ID NO: 23318 - DNA, 21 bp, Artificial Sequence
  Synthetic
aaagatgtatagcctgcgaga

SEQ ID NO: 23319 - DNA, 21 bp, Artificial Sequence
  Synthetic
atgtatagcctgcgagaaaga

SEQ ID NO: 23320 - DNA, 21 bp, Artificial Sequence
  Synthetic
aaagaaagggtcatgcataca

SEQ ID NO: 23321 - DNA, 21 bp, Artificial Sequence
  Synthetic
gtcatgcatacaaagaggtca

SEQ ID NO: 23322 - DNA, 21 bp, Artificial Sequence
  Synthetic
tacaaagaggtcagcgagccg

SEQ ID NO: 23323 - DNA, 21 bp, Artificial Sequence
  Synthetic
cttccagattgtgagatgtgt

SEQ ID NO: 23324 - DNA, 21 bp, Artificial Sequence
  Synthetic
gttctgacacatctcacaatc

SEQ ID NO: 23325 - DNA, 21 bp, Artificial Sequence
  Synthetic
agttctgacacatctcacaat

SEQ ID NO: 23326 - DNA, 21 bp, Artificial Sequence
  Synthetic
tgggcagcacagctgtcaatg

SEQ ID NO: 23327 - DNA, 21 bp, Artificial Sequence
  Synthetic
ccatgggcagcacagctgtca

SEQ ID NO: 23328 - DNA, 21 bp, Artificial Sequence
  Synthetic
tcattgacagctgtgctgccc

SEQ ID NO: 23329 - DNA, 21 bp, Artificial Sequence
  Synthetic
ctttacaaatgtagggggccc

SEQ ID NO: 23330 - DNA, 21 bp, Artificial Sequence
  Synthetic
catgggccccctacatttgta

SEQ ID NO: 23331 - DNA, 21 bp, Artificial Sequence
  Synthetic
gcactgtcctttacaaatgta

SEQ ID NO: 23332 - DNA, 21 bp, Artificial Sequence
  Synthetic
tgcactgtcctttacaaatgt

SEQ ID NO: 23333 - DNA, 21 bp, Artificial Sequence
  Synthetic
ctgcactgtcctttacaaatg

SEQ ID NO: 23334 - DNA, 21 bp, Artificial Sequence
  Synthetic
acatttgtaaaggacagtgca

SEQ ID NO: 23335 - DNA, 21 bp, Artificial Sequence
  Synthetic
gtaaaggacagtgcagtggac

SEQ ID NO: 23336 - DNA, 21 bp, Artificial Sequence
  Synthetic
taaaggacagtgcagtggaca

SEQ ID NO: 23337 - DNA, 21 bp, Artificial Sequence
  Synthetic
gcagactgagggctgaacggt

SEQ ID NO: 23338 - DNA, 21 bp, Artificial Sequence
  Synthetic
ggcagactgagggctgaacgg

SEQ ID NO: 23339 - DNA, 21 bp, Artificial Sequence
  Synthetic
gttcagccctcagtctgcccc

SEQ ID NO: 23340 - DNA, 21 bp, Artificial Sequence
  Synthetic
gccctgggggcagactgaggg

SEQ ID NO: 23341 - DNA, 21 bp, Artificial Sequence
  Synthetic
gccctcagtctgcccccaggg

SEQ ID NO: 23342 - DNA, 21 bp, Artificial Sequence
  Synthetic
tctcagccctgggggcagact

SEQ ID NO: 23343 - DNA, 21 bp, Artificial Sequence
  Synthetic
cctcagtctgcccccagggct

SEQ ID NO: 23344 - DNA, 21 bp, Artificial Sequence
  Synthetic
attctcagccctgggggcaga

SEQ ID NO: 23345 - DNA, 21 bp, Artificial Sequence
  Synthetic
gtctgcccccagggctgagaa

SEQ ID NO: 23346 - DNA, 21 bp, Artificial Sequence
  Synthetic
gatggcccaattctcagccct

SEQ ID NO: 23347 - DNA, 21 bp, Artificial Sequence
  Synthetic
tgatggcccaattctcagccc

SEQ ID NO: 23348 - DNA, 21 bp, Artificial Sequence
  Synthetic
ctgatggcccaattctcagcc

SEQ ID NO: 23349 - DNA, 21 bp, Artificial Sequence
  Synthetic
ggccatcaggcatccctcagg

SEQ ID NO: 23350 - DNA, 21 bp, Artificial Sequence
  Synthetic
caggcatccctcaggctgggc

SEQ ID NO: 23351 - DNA, 21 bp, Artificial Sequence
  Synthetic
aggcatccctcaggctgggct

SEQ ID NO: 23352 - DNA, 21 bp, Artificial Sequence
  Synthetic
ccatactccaagcccagcctg

SEQ ID NO: 23353 - DNA, 21 bp, Artificial Sequence
  Synthetic
tccatactccaagcccagcct

SEQ ID NO: 23354 - DNA, 21 bp, Artificial Sequence
  Synthetic
ccctcaggctgggcttggagt

SEQ ID NO: 23355 - DNA, 21 bp, Artificial Sequence
  Synthetic
cctcaggctgggcttggagta

SEQ ID NO: 23356 - DNA, 21 bp, Artificial Sequence
  Synthetic
attccatactccaagcccagc

SEQ ID NO: 23357 - DNA, 21 bp, Artificial Sequence
  Synthetic
aggctgggcttggagtatgga

SEQ ID NO: 23358 - DNA, 21 bp, Artificial Sequence
  Synthetic
aatgaggcatctgatctgccg

SEQ ID NO: 23359 - DNA, 21 bp, Artificial Sequence
  Synthetic
tgggtctgcactttggccctt

SEQ ID NO: 23360 - DNA, 21 bp, Artificial Sequence
  Synthetic
ggtctgcactttggcccttat

SEQ ID NO: 23361 - DNA, 21 bp, Artificial Sequence
  Synthetic
gcactttggcccttatgaggg

SEQ ID NO: 23362 - DNA, 21 bp, Artificial Sequence
  Synthetic
gcccttatgagggccgaatta

SEQ ID NO: 23363 - DNA, 21 bp, Artificial Sequence
  Synthetic
cttctgtaattcggccctcat

SEQ ID NO: 23364 - DNA, 21 bp, Artificial Sequence
  Synthetic
atgagggccgaattacagaag

SEQ ID NO: 23365 - DNA, 21 bp, Artificial Sequence
  Synthetic
agggccgaattacagaagacg

SEQ ID NO: 23366 - DNA, 21 bp, Artificial Sequence
  Synthetic
aagacgaagaggcagccaaca

SEQ ID NO: 23367 - DNA, 21 bp, Artificial Sequence
  Synthetic
caatggatactcctggctggt

SEQ ID NO: 23368 - DNA, 21 bp, Artificial Sequence
  Synthetic
ggcaggctcttcttaccagcc

SEQ ID NO: 23369 - DNA, 21 bp, Artificial Sequence
  Synthetic
tggcaggctcttcttaccagc

SEQ ID NO: 23370 - DNA, 21 bp, Artificial Sequence
  Synthetic
tttctgaaactcagatcacca

SEQ ID NO: 23371 - DNA, 21 bp, Artificial Sequence
  Synthetic
ttctgaaactcagatcaccaa

SEQ ID NO: 23372 - DNA, 21 bp, Artificial Sequence
  Synthetic
tctgaaactcagatcaccaag

SEQ ID NO: 23373 - DNA, 21 bp, Artificial Sequence
  Synthetic
tgaaactcagatcaccaaggg

SEQ ID NO: 23374 - DNA, 21 bp, Artificial Sequence
  Synthetic
gcagtttctccccttggtgat

SEQ ID NO: 23375 - DNA, 21 bp, Artificial Sequence
  Synthetic
tcaccaaggggagaaactgct

SEQ ID NO: 23376 - DNA, 21 bp, Artificial Sequence
  Synthetic
gggagaaactgctatgagtat

SEQ ID NO: 23377 - DNA, 21 bp, Artificial Sequence
  Synthetic
gaaactgctatgagtatgtgg

SEQ ID NO: 23378 - DNA, 21 bp, Artificial Sequence
  Synthetic
aaactgctatgagtatgtgga

SEQ ID NO: 23379 - DNA, 21 bp, Artificial Sequence
  Synthetic
tgtggatggaaaagataaatc

SEQ ID NO: 23380 - DNA, 21 bp, Artificial Sequence
  Synthetic
aaaagataaatcctgggccaa

SEQ ID NO: 23381 - DNA, 21 bp, Artificial Sequence
  Synthetic
gataaatcctgggccaactgg

SEQ ID NO: 23382 - DNA, 21 bp, Artificial Sequence
  Synthetic
ccttacctcatccagttggcc

SEQ ID NO: 23383 - DNA, 21 bp, Artificial Sequence
  Synthetic
gcctgccttgaccccaggtat

SEQ ID NO: 23384 - DNA, 21 bp, Artificial Sequence
  Synthetic
cccgggcacagttcacatacc

SEQ ID NO: 23385 - DNA, 21 bp, Artificial Sequence
  Synthetic
ccccaggtatgtgaactgtgc

SEQ ID NO: 23386 - DNA, 21 bp, Artificial Sequence
  Synthetic
tcccgggcacagttcacatac

SEQ ID NO: 23387 - DNA, 21 bp, Artificial Sequence
  Synthetic
cccaggtatgtgaactgtgcc

SEQ ID NO: 23388 - DNA, 21 bp, Artificial Sequence
  Synthetic
atgtgaactgtgcccgggatg

SEQ ID NO: 23389 - DNA, 21 bp, Artificial Sequence
  Synthetic
tgaactgtgcccgggatgatg

SEQ ID NO: 23390 - DNA, 21 bp, Artificial Sequence
  Synthetic
tgtgcccgggatgatgaagag

SEQ ID NO: 23391 - DNA, 21 bp, Artificial Sequence
  Synthetic
caggttctgctcttcatcatc

SEQ ID NO: 23392 - DNA, 21 bp, Artificial Sequence
  Synthetic
tagaagatctgcctgtggtac

SEQ ID NO: 23393 - DNA, 21 bp, Artificial Sequence
  Synthetic
atagaagatctgcctgtggta

SEQ ID NO: 23394 - DNA, 21 bp, Artificial Sequence
  Synthetic
gtaccacaggcagatcttcta

SEQ ID NO: 23395 - DNA, 21 bp, Artificial Sequence
  Synthetic
gcagatcttctatagaacctg

SEQ ID NO: 23396 - DNA, 21 bp, Artificial Sequence
  Synthetic
ctaatgactcggcaggttcta

SEQ ID NO: 23397 - DNA, 21 bp, Artificial Sequence
  Synthetic
gccgagtcattaggccaggct

SEQ ID NO: 23398 - DNA, 21 bp, Artificial Sequence
  Synthetic
gctgtgaactgctggtctggt

SEQ ID NO: 23399 - DNA, 21 bp, Artificial Sequence
  Synthetic
ctgtgaactgctggtctggta

SEQ ID NO: 23400 - DNA, 21 bp, Artificial Sequence
  Synthetic
tgtgaactgctggtctggtat

SEQ ID NO: 23401 - DNA, 21 bp, Artificial Sequence
  Synthetic
aactgctggtctggtatgggg

SEQ ID NO: 23402 - DNA, 21 bp, Artificial Sequence
  Synthetic
aaactgggctgctaaataaat

SEQ ID NO: 23403 - DNA, 21 bp, Artificial Sequence
  Synthetic
aaagttcccttcatcatagcg

SEQ ID NO: 23404 - DNA, 21 bp, Artificial Sequence
  Synthetic
aaccccctggacggacagaag

SEQ ID NO: 23405 - DNA, 21 bp, Artificial Sequence
  Synthetic
aagaaataaaccgaacctcat

SEQ ID NO: 23406 - DNA, 21 bp, Artificial Sequence
  Synthetic
aaggccacacccctcctctag

SEQ ID NO: 23407 - DNA, 21 bp, Artificial Sequence
  Synthetic
aaggtactcaacatctcccat

SEQ ID NO: 23408 - DNA, 21 bp, Artificial Sequence
  Synthetic
aaggtcgaaaagccagcctgg

SEQ ID NO: 23409 - DNA, 21 bp, Artificial Sequence
  Synthetic
aagttcccttcatcatagcga

SEQ ID NO: 23410 - DNA, 21 bp, Artificial Sequence
  Synthetic
acaggtggccttgatcctccc

SEQ ID NO: 23411 - DNA, 21 bp, Artificial Sequence
  Synthetic
acatttcactccatcgctatg

SEQ ID NO: 23412 - DNA, 21 bp, Artificial Sequence
  Synthetic
acgtgtggtgttggctctaga

SEQ ID NO: 23413 - DNA, 21 bp, Artificial Sequence
  Synthetic
agaaataaaccgaacctcatt

SEQ ID NO: 23414 - DNA, 21 bp, Artificial Sequence
  Synthetic
agagtatctggtcacgactgc

SEQ ID NO: 23415 - DNA, 21 bp, Artificial Sequence
  Synthetic
agcaattgatgacattggctg

SEQ ID NO: 23416 - DNA, 21 bp, Artificial Sequence
  Synthetic
agctggcttccaaagtggcct

SEQ ID NO: 23417 - DNA, 21 bp, Artificial Sequence
  Synthetic
aggaaatacagcttgttcatt

SEQ ID NO: 23418 - DNA, 21 bp, Artificial Sequence
  Synthetic
agggtacaatataaatattgc

SEQ ID NO: 23419 - DNA, 21 bp, Artificial Sequence
  Synthetic
aggtaatgaggaaaaaaactt

SEQ ID NO: 23420 - DNA, 21 bp, Artificial Sequence
  Synthetic
aggtggccttgatcctcccat

SEQ ID NO: 23421 - DNA, 21 bp, Artificial Sequence
  Synthetic
aggttggaacaggccttggag

SEQ ID NO: 23422 - DNA, 21 bp, Artificial Sequence
  Synthetic
agtatttggcggtaattgcaa

SEQ ID NO: 23423 - DNA, 21 bp, Artificial Sequence
  Synthetic
atagcgatggagtgaaatgta

SEQ ID NO: 23424 - DNA, 21 bp, Artificial Sequence
  Synthetic
atggacgtgtggtgttggctc

SEQ ID NO: 23425 - DNA, 21 bp, Artificial Sequence
  Synthetic
attaaaaaagcagaaccccct

SEQ ID NO: 23426 - DNA, 21 bp, Artificial Sequence
  Synthetic
attcaaggtcgaaaagccagc

SEQ ID NO: 23427 - DNA, 21 bp, Artificial Sequence
  Synthetic
attgcaactgaattaaaaaag

SEQ ID NO: 23428 - DNA, 21 bp, Artificial Sequence
  Synthetic
caacagtgagtgatgttcaga

SEQ ID NO: 23429 - DNA, 21 bp, Artificial Sequence
  Synthetic
caaggtactcaacatctccca

SEQ ID NO: 23430 - DNA, 21 bp, Artificial Sequence
  Synthetic
caaggtcgaaaagccagcctg

SEQ ID NO: 23431 - DNA, 21 bp, Artificial Sequence
  Synthetic
caagtccaccacaaggtaatg

SEQ ID NO: 23432 - DNA, 21 bp, Artificial Sequence
  Synthetic
cacccaccctgagcatgctgg

SEQ ID NO: 23433 - DNA, 21 bp, Artificial Sequence
  Synthetic
cactttgtaccctcctagagg

SEQ ID NO: 23434 - DNA, 21 bp, Artificial Sequence
  Synthetic
cagacatggtcttagtatctg

SEQ ID NO: 23435 - DNA, 21 bp, Artificial Sequence
  Synthetic
cagcagatactaagaccatgt

SEQ ID NO: 23436 - DNA, 21 bp, Artificial Sequence
  Synthetic
cagcatgctcagggtgggtgg

SEQ ID NO: 23437 - DNA, 21 bp, Artificial Sequence
  Synthetic
cagccatgcgtgcagcaccgg

SEQ ID NO: 23438 - DNA, 21 bp, Artificial Sequence
  Synthetic
caggtggacagtgacaccatt

SEQ ID NO: 23439 - DNA, 21 bp, Artificial Sequence
  Synthetic
caggtggccttgatcctccca

SEQ ID NO: 23440 - DNA, 21 bp, Artificial Sequence
  Synthetic
catacaacagtgagtgatgtt

SEQ ID NO: 23441 - DNA, 21 bp, Artificial Sequence
  Synthetic
ccaaatggtgtcactgtccac

SEQ ID NO: 23442 - DNA, 21 bp, Artificial Sequence
  Synthetic
ccaacagccatgcgtgcagca

SEQ ID NO: 23443 - DNA, 21 bp, Artificial Sequence
  Synthetic
ccaagtccaccacaaggtaat

SEQ ID NO: 23444 - DNA, 21 bp, Artificial Sequence
  Synthetic
ccaccacccaccctgagcatg

SEQ ID NO: 23445 - DNA, 21 bp, Artificial Sequence
  Synthetic
ccagcatgctcagggtgggtg

SEQ ID NO: 23446 - DNA, 21 bp, Artificial Sequence
  Synthetic
ccatcgtgaagcctgtggcca

SEQ ID NO: 23447 - DNA, 21 bp, Artificial Sequence
  Synthetic
ccatgggagatgttgagtacc

SEQ ID NO: 23448 - DNA, 21 bp, Artificial Sequence
  Synthetic
cccaggttggaacaggccttg

SEQ ID NO: 23449 - DNA, 21 bp, Artificial Sequence
  Synthetic
ccccaagtccaccacaaggta

SEQ ID NO: 23450 - DNA, 21 bp, Artificial Sequence
  Synthetic
ccgtacagacctaggagtatc

SEQ ID NO: 23451 - DNA, 21 bp, Artificial Sequence
  Synthetic
ccgtcactttgtaccctccta

SEQ ID NO: 23452 - DNA, 21 bp, Artificial Sequence
  Synthetic
cctcattaccttgtggtggac

SEQ ID NO: 23453 - DNA, 21 bp, Artificial Sequence
  Synthetic
cctcatttggggctccactgc

SEQ ID NO: 23454 - DNA, 21 bp, Artificial Sequence
  Synthetic
cctgagcatgctggacgaata

SEQ ID NO: 23455 - DNA, 21 bp, Artificial Sequence
  Synthetic
cggacctcaccttcagctctc

SEQ ID NO: 23456 - DNA, 21 bp, Artificial Sequence
  Synthetic
cgtacagacctaggagtatcc

SEQ ID NO: 23457 - DNA, 21 bp, Artificial Sequence
  Synthetic
cgtcactttgtaccctcctag

SEQ ID NO: 23458 - DNA, 21 bp, Artificial Sequence
  Synthetic
ctcattaccttgtggtggact

SEQ ID NO: 23459 - DNA, 21 bp, Artificial Sequence
  Synthetic
ctcatttggggctccactgcc

SEQ ID NO: 23460 - DNA, 21 bp, Artificial Sequence
  Synthetic
ctccaaggcctgttccaacct

SEQ ID NO: 23461 - DNA, 21 bp, Artificial Sequence
  Synthetic
ctgctgggtaccgtttccatg

SEQ ID NO: 23462 - DNA, 21 bp, Artificial Sequence
  Synthetic
ctgttgtatggcaccaacccc

SEQ ID NO: 23463 - DNA, 21 bp, Artificial Sequence
  Synthetic
cttcccaggttggaacaggcc

SEQ ID NO: 23464 - DNA, 21 bp, Artificial Sequence
  Synthetic
gacgtgtggtgttggctctag

SEQ ID NO: 23465 - DNA, 21 bp, Artificial Sequence
  Synthetic
gattcttcagcgtgatggcca

SEQ ID NO: 23466 - DNA, 21 bp, Artificial Sequence
  Synthetic
gcatggctgttggctgtgtca

SEQ ID NO: 23467 - DNA, 21 bp, Artificial Sequence
  Synthetic
gctggcttccaaagtggcctc

SEQ ID NO: 23468 - DNA, 21 bp, Artificial Sequence
  Synthetic
ggaaggccacacccctcctct

SEQ ID NO: 23469 - DNA, 21 bp, Artificial Sequence
  Synthetic
ggacggacagaagctggaccc

SEQ ID NO: 23470 - DNA, 21 bp, Artificial Sequence
  Synthetic
ggagtgaaatgtacaggatgc

SEQ ID NO: 23471 - DNA, 21 bp, Artificial Sequence
  Synthetic
ggattcttcagcgtgatggcc

SEQ ID NO: 23472 - DNA, 21 bp, Artificial Sequence
  Synthetic
ggcaccaaccccctggacgga

SEQ ID NO: 23473 - DNA, 21 bp, Artificial Sequence
  Synthetic
ggccccctggccatcacgctg

SEQ ID NO: 23474 - DNA, 21 bp, Artificial Sequence
  Synthetic
gggggttggtgccatacaaca

SEQ ID NO: 23475 - DNA, 21 bp, Artificial Sequence
  Synthetic
ggggtcagcataaaaggcctg

SEQ ID NO: 23476 - DNA, 21 bp, Artificial Sequence
  Synthetic
ggggtccagcttctgtccgtc

SEQ ID NO: 23477 - DNA, 21 bp, Artificial Sequence
  Synthetic
gggtccagcttctgtccgtcc

SEQ ID NO: 23478 - DNA, 21 bp, Artificial Sequence
  Synthetic
ggtactcaacatctcccatgg

SEQ ID NO: 23479 - DNA, 21 bp, Artificial Sequence
  Synthetic
ggtccagcttctgtccgtcca

SEQ ID NO: 23480 - DNA, 21 bp, Artificial Sequence
  Synthetic
gtatctgctggatttgatgca

SEQ ID NO: 23481 - DNA, 21 bp, Artificial Sequence
  Synthetic
gtccctggtacttacatggct

SEQ ID NO: 23482 - DNA, 21 bp, Artificial Sequence
  Synthetic
gtggcaattccaccacccacc

SEQ ID NO: 23483 - DNA, 21 bp, Artificial Sequence
  Synthetic
gtggcctcaggagagctgaag

SEQ ID NO: 23484 - DNA, 21 bp, Artificial Sequence
  Synthetic
gtgtggtgttggctctagaag

SEQ ID NO: 23485 - DNA, 21 bp, Artificial Sequence
  Synthetic
gttgcaattaccgccaaatac

SEQ ID NO: 23486 - DNA, 21 bp, Artificial Sequence
  Synthetic
tatctgctggatttgatgcat

SEQ ID NO: 23487 - DNA, 21 bp, Artificial Sequence
  Synthetic
tattcgtccagcatgctcagg

SEQ ID NO: 23488 - DNA, 21 bp, Artificial Sequence
  Synthetic
tcaaggtactcaacatctccc

SEQ ID NO: 23489 - DNA, 21 bp, Artificial Sequence
  Synthetic
tcacaacagcaaacccattct

SEQ ID NO: 23490 - DNA, 21 bp, Artificial Sequence
  Synthetic
tcacagaatgggtttgctgtt

SEQ ID NO: 23491 - DNA, 21 bp, Artificial Sequence
  Synthetic
tcacagccatctgtgatgcat

SEQ ID NO: 23492 - DNA, 21 bp, Artificial Sequence
  Synthetic
tcactccatcgctatgatgaa

SEQ ID NO: 23493 - DNA, 21 bp, Artificial Sequence
  Synthetic
tcactttgtaccctcctagag

SEQ ID NO: 23494 - DNA, 21 bp, Artificial Sequence
  Synthetic
tcagctctcctgaggccactt

SEQ ID NO: 23495 - DNA, 21 bp, Artificial Sequence
  Synthetic
tcaggtggacagtgacaccat

SEQ ID NO: 23496 - DNA, 21 bp, Artificial Sequence
  Synthetic
tcatttggggctccactgcca

SEQ ID NO: 23497 - DNA, 21 bp, Artificial Sequence
  Synthetic
tccaaagtggcctcaggagag

SEQ ID NO: 23498 - DNA, 21 bp, Artificial Sequence
  Synthetic
tccctggcagtggagccccaa

SEQ ID NO: 23499 - DNA, 21 bp, Artificial Sequence
  Synthetic
tcccttcatcatagcgatgga

SEQ ID NO: 23500 - DNA, 21 bp, Artificial Sequence
  Synthetic
tctccaaggcctgttccaacc

SEQ ID NO: 23501 - DNA, 21 bp, Artificial Sequence
  Synthetic
tctgatgcatcacagatggct

SEQ ID NO: 23502 - DNA, 21 bp, Artificial Sequence
  Synthetic
tctggtcacgactgcaagaaa

SEQ ID NO: 23503 - DNA, 21 bp, Artificial Sequence
  Synthetic
tctgtattcgtccagcatgct

SEQ ID NO: 23504 - DNA, 21 bp, Artificial Sequence
  Synthetic
tgaggccccctggccatcacg

SEQ ID NO: 23505 - DNA, 21 bp, Artificial Sequence
  Synthetic
tgcaattaccgccaaatactt

SEQ ID NO: 23506 - DNA, 21 bp, Artificial Sequence
  Synthetic
tgccgtcactttgtaccctcc

SEQ ID NO: 23507 - DNA, 21 bp, Artificial Sequence
  Synthetic
tggaaggccacacccctcctc

SEQ ID NO: 23508 - DNA, 21 bp, Artificial Sequence
  Synthetic
tggacagtgacaccatttgga

SEQ ID NO: 23509 - DNA, 21 bp, Artificial Sequence
  Synthetic
tggagtgaaatgtacaggatg

SEQ ID NO: 23510 - DNA, 21 bp, Artificial Sequence
  Synthetic
tggattcttcagcgtgatggc

SEQ ID NO: 23511 - DNA, 21 bp, Artificial Sequence
  Synthetic
tggcttccaaagtggcctcag

SEQ ID NO: 23512 - DNA, 21 bp, Artificial Sequence
  Synthetic
tgtatggcaccaaccccctgg

SEQ ID NO: 23513 - DNA, 21 bp, Artificial Sequence
  Synthetic
tgtgagatcatgtcctccttc

SEQ ID NO: 23514 - DNA, 21 bp, Artificial Sequence
  Synthetic
ttcaaggtcgaaaagccagcc

SEQ ID NO: 23515 - DNA, 21 bp, Artificial Sequence
  Synthetic
ttcactccatcgctatgatga

SEQ ID NO: 23516 - DNA, 21 bp, Artificial Sequence
  Synthetic
ttcagctctcctgaggccact

SEQ ID NO: 23517 - DNA, 21 bp, Artificial Sequence
  Synthetic
ttcccaggttggaacaggcct

SEQ ID NO: 23518 - DNA, 21 bp, Artificial Sequence
  Synthetic
ttccctgtaggatgttcacca

SEQ ID NO: 23519 - DNA, 21 bp, Artificial Sequence
  Synthetic
ttctccaaggcctgttccaac

SEQ ID NO: 23520 - DNA, 21 bp, Artificial Sequence
  Synthetic
ttgatcctcccatgggagatg

SEQ ID NO: 23521 - DNA, 21 bp, Artificial Sequence
  Synthetic
tttcactccatcgctatgatg

SEQ ID NO: 23522 - DNA, 21 bp, Artificial Sequence
  Synthetic
tttccctgtaggatgttcacc

SEQ ID NO: 23523 - DNA, 21 bp, Artificial Sequence
  Synthetic
tttcttgcagcgaattcaagg

SEQ ID NO: 23524 - DNA, 21 bp, Artificial Sequence
  Synthetic
ttgcagttgttgctggttgac

SEQ ID NO: 23525 - DNA, 21 bp, Artificial Sequence
  Synthetic
accagcaacaactgcaacagg

SEQ ID NO: 23526 - DNA, 21 bp, Artificial Sequence
  Synthetic
ttctttatgtagctcatggac

SEQ ID NO: 23527 - DNA, 21 bp, Artificial Sequence
  Synthetic
gctcatggacatgggcttcac

SEQ ID NO: 23528 - DNA, 21 bp, Artificial Sequence
  Synthetic
tcccttgtgaagcccatgtcc

SEQ ID NO: 23529 - DNA, 21 bp, Artificial Sequence
  Synthetic
ctcatggacatgggcttcaca

SEQ ID NO: 23530 - DNA, 21 bp, Artificial Sequence
  Synthetic
tcatggacatgggcttcacaa

SEQ ID NO: 23531 - DNA, 21 bp, Artificial Sequence
  Synthetic
ggcttcacaagggaacatgca

SEQ ID NO: 23532 - DNA, 21 bp, Artificial Sequence
  Synthetic
gcttcacaagggaacatgcaa

SEQ ID NO: 23533 - DNA, 21 bp, Artificial Sequence
  Synthetic
gcctccattgcatgttccctt

SEQ ID NO: 23534 - DNA, 21 bp, Artificial Sequence
  Synthetic
gaacatgcaatggaggcactg

SEQ ID NO: 23535 - DNA, 21 bp, Artificial Sequence
  Synthetic
gcactgttgaacaccagcacc

SEQ ID NO: 23536 - DNA, 21 bp, Artificial Sequence
  Synthetic
cactgttgaacaccagcacca

SEQ ID NO: 23537 - DNA, 21 bp, Artificial Sequence
  Synthetic
ccagcaccatggagcaggcca

SEQ ID NO: 23538 - DNA, 21 bp, Artificial Sequence
  Synthetic
ggagtggtatatgatcatctc

SEQ ID NO: 23539 - DNA, 21 bp, Artificial Sequence
  Synthetic
agtggtatatgatcatctctc

SEQ ID NO: 23540 - DNA, 21 bp, Artificial Sequence
  Synthetic
acatagggttaaacatctctc

SEQ ID NO: 23541 - DNA, 21 bp, Artificial Sequence
  Synthetic
atacatagggttaaacatctc

SEQ ID NO: 23542 - DNA, 21 bp, Artificial Sequence
  Synthetic
aggtacggaacaaggcataca

SEQ ID NO: 23543 - DNA, 21 bp, Artificial Sequence
  Synthetic
gttccgtacctcacctggtga

SEQ ID NO: 23544 - DNA, 21 bp, Artificial Sequence
  Synthetic
actcgatcaccaggtgaggta

SEQ ID NO: 23545 - DNA, 21 bp, Artificial Sequence
  Synthetic
gactcgatcaccaggtgaggt

SEQ ID NO: 23546 - DNA, 21 bp, Artificial Sequence
  Synthetic
tgtaggtgactcgatcaccag

SEQ ID NO: 23547 - DNA, 21 bp, Artificial Sequence
  Synthetic
ggttggggttgcagtgggaag

SEQ ID NO: 23548 - DNA, 21 bp, Artificial Sequence
  Synthetic
tgaggtggttggggttgcagt

SEQ ID NO: 23549 - DNA, 21 bp, Artificial Sequence
  Synthetic
ctgaggtggttggggttgcag

SEQ ID NO: 23550 - DNA, 21 bp, Artificial Sequence
  Synthetic
gctgaggtggttggggttgca

SEQ ID NO: 23551 - DNA, 21 bp, Artificial Sequence
  Synthetic
acttgaagtagctgaggtggt

SEQ ID NO: 23552 - DNA, 21 bp, Artificial Sequence
  Synthetic
aacttgaagtagctgaggtgg

SEQ ID NO: 23553 - DNA, 21 bp, Artificial Sequence
  Synthetic
acctcagctacttcaagtttg

SEQ ID NO: 23554 - DNA, 21 bp, Artificial Sequence
  Synthetic
cgtccgacaaacttgaagtag

SEQ ID NO: 23555 - DNA, 21 bp, Artificial Sequence
  Synthetic
gccacaatgcgtccgacaaac

SEQ ID NO: 23556 - DNA, 21 bp, Artificial Sequence
  Synthetic
gctgtatatgacaaccgtctt

SEQ ID NO: 23557 - DNA, 21 bp, Artificial Sequence
  Synthetic
ctgtatatgacaaccgtcttc

SEQ ID NO: 23558 - DNA, 21 bp, Artificial Sequence
  Synthetic
ggatcgagtaaagtagcactc

SEQ ID NO: 23559 - DNA, 21 bp, Artificial Sequence
  Synthetic
caagatgtgtttgtaaaagga

SEQ ID NO: 23560 - DNA, 21 bp, Artificial Sequence
  Synthetic
ttgcccaagatgtgtttgtaa

SEQ ID NO: 23561 - DNA, 21 bp, Artificial Sequence
  Synthetic
catcttgggcaagtcagtcag

SEQ ID NO: 23562 - DNA, 21 bp, Artificial Sequence
  Synthetic
tcttgggcaagtcagtcaggt

SEQ ID NO: 23563 - DNA, 21 bp, Artificial Sequence
  Synthetic
cactctccatatctgtatatc

SEQ ID NO: 23564 - DNA, 21 bp, Artificial Sequence
  Synthetic
ctagatatacagatatggaga

SEQ ID NO: 23565 - DNA, 21 bp, Artificial Sequence
  Synthetic
agcagataaaccagaccttgg

SEQ ID NO: 23566 - DNA, 21 bp, Artificial Sequence
  Synthetic
taccaaggtctggtttatctg

SEQ ID NO: 23567 - DNA, 21 bp, Artificial Sequence
  Synthetic
accaaggtctggtttatctgc

SEQ ID NO: 23568 - DNA, 21 bp, Artificial Sequence
  Synthetic
aggtgaggtcatagcctagtg

SEQ ID NO: 23569 - DNA, 21 bp, Artificial Sequence
  Synthetic
aaggtgaggtcatagcctagt

SEQ ID NO: 23570 - DNA, 21 bp, Artificial Sequence
  Synthetic
gctatgacctcaccttcagca

SEQ ID NO: 23571 - DNA, 21 bp, Artificial Sequence
  Synthetic
tgacctacctcagtgctgaag

SEQ ID NO: 23572 - DNA, 21 bp, Artificial Sequence
  Synthetic
atttcctgacctacctcagtg

SEQ ID NO: 23573 - DNA, 21 bp, Artificial Sequence
  Synthetic
ggttgttctaggtccaagagt

SEQ ID NO: 23574 - DNA, 21 bp, Artificial Sequence
  Synthetic
gttgttctaggtccaagagtt

SEQ ID NO: 23575 - DNA, 21 bp, Artificial Sequence
  Synthetic
caaactccaaactcttggacc

SEQ ID NO: 23576 - DNA, 21 bp, Artificial Sequence
  Synthetic
aggtccaagagtttggagttt

SEQ ID NO: 23577 - DNA, 21 bp, Artificial Sequence
  Synthetic
aacttcacaaactccaaactc

SEQ ID NO: 23578 - DNA, 21 bp, Artificial Sequence
  Synthetic
aagttcgtgacctcaaaccca

SEQ ID NO: 23579 - DNA, 21 bp, Artificial Sequence
  Synthetic
agttcgtgacctcaaacccaa

SEQ ID NO: 23580 - DNA, 21 bp, Artificial Sequence
  Synthetic
ggccccattgggtttgaggtc

SEQ ID NO: 23581 - DNA, 21 bp, Artificial Sequence
  Synthetic
aagatgttggccccattgggt

SEQ ID NO: 23582 - DNA, 21 bp, Artificial Sequence
  Synthetic
gttaccaagatgttggcccca

SEQ ID NO: 23583 - DNA, 21 bp, Artificial Sequence
  Synthetic
atggggccaacatcttggtaa

SEQ ID NO: 23584 - DNA, 21 bp, Artificial Sequence
  Synthetic
ggggccaacatcttggtaaca

SEQ ID NO: 23585 - DNA, 21 bp, Artificial Sequence
  Synthetic
gggccaacatcttggtaacag

SEQ ID NO: 23586 - DNA, 21 bp, Artificial Sequence
  Synthetic
gccaacatcttggtaacagag

SEQ ID NO: 23587 - DNA, 21 bp, Artificial Sequence
  Synthetic
atcttggtaacagaggagaat

SEQ ID NO: 23588 - DNA, 21 bp, Artificial Sequence
  Synthetic
ttggtaacagaggagaataag

SEQ ID NO: 23589 - DNA, 21 bp, Artificial Sequence
  Synthetic
tggtaacagaggagaataaga

SEQ ID NO: 23590 - DNA, 21 bp, Artificial Sequence
  Synthetic
tatgtacacctggtatgccag

SEQ ID NO: 23591 - DNA, 21 bp, Artificial Sequence
  Synthetic
tgtacacctggtatgccagat

SEQ ID NO: 23592 - DNA, 21 bp, Artificial Sequence
  Synthetic
atgccagatgagaatgacagg

SEQ ID NO: 23593 - DNA, 21 bp, Artificial Sequence
  Synthetic
tgccagatgagaatgacaggt

SEQ ID NO: 23594 - DNA, 21 bp, Artificial Sequence
  Synthetic
taagaaagccgccaactgctt

SEQ ID NO: 23595 - DNA, 21 bp, Artificial Sequence
  Synthetic
gcaagcagttggcggctttct

SEQ ID NO: 23596 - DNA, 21 bp, Artificial Sequence
  Synthetic
cggctttcttagaaggcttct

SEQ ID NO: 23597 - DNA, 21 bp, Artificial Sequence
  Synthetic
atgatctcatagaagccttct

SEQ ID NO: 23598 - DNA, 21 bp, Artificial Sequence
  Synthetic
aggcgctttggaatgatctca

SEQ ID NO: 23599 - DNA, 21 bp, Artificial Sequence
  Synthetic
gaagatggaaatgaggcgctt

SEQ ID NO: 23600 - DNA, 21 bp, Artificial Sequence
  Synthetic
tgaagatggaaatgaggcgct

SEQ ID NO: 23601 - DNA, 21 bp, Artificial Sequence
  Synthetic
agcgcctcatttccatcttca

SEQ ID NO: 23602 - DNA, 21 bp, Artificial Sequence
  Synthetic
tcctgctcagtgaagatggaa

SEQ ID NO: 23603 - DNA, 21 bp, Artificial Sequence
  Synthetic
ctcatttccatcttcactgag

SEQ ID NO: 23604 - DNA, 21 bp, Artificial Sequence
  Synthetic
tcatttccatcttcactgagc

SEQ ID NO: 23605 - DNA, 21 bp, Artificial Sequence
  Synthetic
ctaactcctgctcagtgaaga

SEQ ID NO: 23606 - DNA, 21 bp, Artificial Sequence
  Synthetic
tctaactcctgctcagtgaag

SEQ ID NO: 23607 - DNA, 21 bp, Artificial Sequence
  Synthetic
ccatcttcactgagcaggagt

SEQ ID NO: 23608 - DNA, 21 bp, Artificial Sequence
  Synthetic
agcagctctaactcctgctca

SEQ ID NO: 23609 - DNA, 21 bp, Artificial Sequence
  Synthetic
aggagttagagctgcttatat

SEQ ID NO: 23610 - DNA, 21 bp, Artificial Sequence
  Synthetic
ttcagatcatcgatgtcaatg

SEQ ID NO: 23611 - DNA, 21 bp, Artificial Sequence
  Synthetic
cccaccattgacatcgatgat

SEQ ID NO: 23612 - DNA, 21 bp, Artificial Sequence
  Synthetic
tcgatgatctgaaatccaaca

SEQ ID NO: 23613 - DNA, 21 bp, Artificial Sequence
  Synthetic
tggtacttgtggtattcagtg

SEQ ID NO: 23614 - DNA, 21 bp, Artificial Sequence
  Synthetic
taccagtccaactctattcag

SEQ ID NO: 23615 - DNA, 21 bp, Artificial Sequence
  Synthetic
cagcagctcacctgaatagag

SEQ ID NO: 23616 - DNA, 21 bp, Artificial Sequence
  Synthetic
gccagcagcagctcacctgaa

SEQ ID NO: 23617 - DNA, 21 bp, Artificial Sequence
  Synthetic
cttcctacagatccagtggtt

SEQ ID NO: 23618 - DNA, 21 bp, Artificial Sequence
  Synthetic
ttcctacagatccagtggttc

SEQ ID NO: 23619 - DNA, 21 bp, Artificial Sequence
  Synthetic
cctacagatccagtggttctg

SEQ ID NO: 23620 - DNA, 21 bp, Artificial Sequence
  Synthetic
acgcaatgctctccagaacca

SEQ ID NO: 23621 - DNA, 21 bp, Artificial Sequence
  Synthetic
tcgaaagaacgcaatgctctc

SEQ ID NO: 23622 - DNA, 21 bp, Artificial Sequence
  Synthetic
tggcacggtcagcttgatcga

SEQ ID NO: 23623 - DNA, 21 bp, Artificial Sequence
  Synthetic
aacttggcacggtcagcttga

SEQ ID NO: 23624 - DNA, 21 bp, Artificial Sequence
  Synthetic
gaagtacctgtgacaaactgg

SEQ ID NO: 23625 - DNA, 21 bp, Artificial Sequence
  Synthetic
ggaagtacctgtgacaaactg

SEQ ID NO: 23626 - DNA, 21 bp, Artificial Sequence
  Synthetic
ttggaagtacctgtgacaaac

SEQ ID NO: 23627 - DNA, 21 bp, Artificial Sequence
  Synthetic
cttggaagtacctgtgacaaa

SEQ ID NO: 23628 - DNA, 21 bp, Artificial Sequence
  Synthetic
caaagccttgcaggggtacct

SEQ ID NO: 23629 - DNA, 21 bp, Artificial Sequence
  Synthetic
gcaaagccttgcaggggtacc

SEQ ID NO: 23630 - DNA, 21 bp, Artificial Sequence
  Synthetic
tcgagggcagcaaagccttgc

SEQ ID NO: 23631 - DNA, 21 bp, Artificial Sequence
  Synthetic
ttcgagggcagcaaagccttg

SEQ ID NO: 23632 - DNA, 21 bp, Artificial Sequence
  Synthetic
ccctgcaaggctttgctgccc

SEQ ID NO: 23633 - DNA, 21 bp, Artificial Sequence
  Synthetic
ggctttgctgccctcgaaggc

SEQ ID NO: 23634 - DNA, 21 bp, Artificial Sequence
  Synthetic
ctgaatgccattcatgccttc

SEQ ID NO: 23635 - DNA, 21 bp, Artificial Sequence
  Synthetic
ttctgaatgccattcatgcct

SEQ ID NO: 23636 - DNA, 21 bp, Artificial Sequence
  Synthetic
ctcgaaggcatgaatggcatt

SEQ ID NO: 23637 - DNA, 21 bp, Artificial Sequence
  Synthetic
cattcagaagtttcagatcca

SEQ ID NO: 23638 - DNA, 21 bp, Artificial Sequence
  Synthetic
atctcgatggatctgaaactt

SEQ ID NO: 23639 - DNA, 21 bp, Artificial Sequence
  Synthetic
ggacctgtcatctcgatggat

SEQ ID NO: 23640 - DNA, 21 bp, Artificial Sequence
  Synthetic
atctgtggacctgtcatctcg

SEQ ID NO: 23641 - DNA, 21 bp, Artificial Sequence
  Synthetic
tgagctgaaggcaggcgatct

SEQ ID NO: 23642 - DNA, 21 bp, Artificial Sequence
  Synthetic
cagatccagctgattaaaact

SEQ ID NO: 23643 - DNA, 21 bp, Artificial Sequence
  Synthetic
atcagctggatctgcctgcct

SEQ ID NO: 23644 - DNA, 21 bp, Artificial Sequence
  Synthetic
cagctggatctgcctgcctat

SEQ ID NO: 23645 - DNA, 21 bp, Artificial Sequence
  Synthetic
atctgcctgcctatgagagct

SEQ ID NO: 23646 - DNA, 21 bp, Artificial Sequence
  Synthetic
ctgcctgcctatgagagcttt

SEQ ID NO: 23647 - DNA, 21 bp, Artificial Sequence
  Synthetic
atagccaacagtagcatgtgg

SEQ ID NO: 23648 - DNA, 21 bp, Artificial Sequence
  Synthetic
gatagccaacagtagcatgtg

SEQ ID NO: 23649 - DNA, 21 bp, Artificial Sequence
  Synthetic
cacatgctactgttggctatc

SEQ ID NO: 23650 - DNA, 21 bp, Artificial Sequence
  Synthetic
acatgctactgttggctatcc

SEQ ID NO: 23651 - DNA, 21 bp, Artificial Sequence
  Synthetic
tgttggctatccaggagtgct

SEQ ID NO: 23652 - DNA, 21 bp, Artificial Sequence
  Synthetic
cccaaagccttcagagcactc

SEQ ID NO: 23653 - DNA, 21 bp, Artificial Sequence
  Synthetic
tccaggagtgctctgaaggct

SEQ ID NO: 23654 - DNA, 21 bp, Artificial Sequence
  Synthetic
attaggccagcccaaagcctt

SEQ ID NO: 23655 - DNA, 21 bp, Artificial Sequence
  Synthetic
gttcatggagcatgtactaca

SEQ ID NO: 23656 - DNA, 21 bp, Artificial Sequence
  Synthetic
atccattgtagtacatgctcc

SEQ ID NO: 23657 - DNA, 21 bp, Artificial Sequence
  Synthetic
ctacaatggatgtaagtttgc

SEQ ID NO: 23658 - DNA, 21 bp, Artificial Sequence
  Synthetic
gtttgccagaagcaagatccc

SEQ ID NO: 23659 - DNA, 21 bp, Artificial Sequence
  Synthetic
tttgccagaagcaagatccca

SEQ ID NO: 23660 - DNA, 21 bp, Artificial Sequence
  Synthetic
cccaagcagcttaaacttcct

SEQ ID NO: 23661 - DNA, 21 bp, Artificial Sequence
  Synthetic
tcccaaggaagtttaagctgc

SEQ ID NO: 23662 - DNA, 21 bp, Artificial Sequence
  Synthetic
ccccaagcagcttaaacttcc

SEQ ID NO: 23663 - DNA, 21 bp, Artificial Sequence
  Synthetic
cccaaggaagtttaagctgct

SEQ ID NO: 23664 - DNA, 21 bp, Artificial Sequence
  Synthetic
ccaaggaagtttaagctgctt

SEQ ID NO: 23665 - DNA, 21 bp, Artificial Sequence
  Synthetic
agctgcttggggatgacccaa

SEQ ID NO: 23666 - DNA, 21 bp, Artificial Sequence
  Synthetic
caggaagtaaacaaacctctt

SEQ ID NO: 23667 - DNA, 21 bp, Artificial Sequence
  Synthetic
cactttatacaggaagagaaa

SEQ ID NO: 23668 - DNA, 21 bp, Artificial Sequence
  Synthetic
actttatacaggaagagaaac

SEQ ID NO: 23669 - DNA, 21 bp, Artificial Sequence
  Synthetic
ttatatgttggtgccataaga

SEQ ID NO: 23670 - DNA, 21 bp, Artificial Sequence
  Synthetic
actcttatggcaccaacatat

SEQ ID NO: 23671 - DNA, 21 bp, Artificial Sequence
  Synthetic
tttcttatatgttggtgccat

SEQ ID NO: 23672 - DNA, 21 bp, Artificial Sequence
  Synthetic
tgctctgtgttcatattcaat

SEQ ID NO: 23673 - DNA, 21 bp, Artificial Sequence
  Synthetic
ttgaatatgaacacagagcac

SEQ ID NO: 23674 - DNA, 21 bp, Artificial Sequence
  Synthetic
cacagagcaccagagtgccgt

SEQ ID NO: 23675 - DNA, 21 bp, Artificial Sequence
  Synthetic
gcaccagagtgccgtctgggt

SEQ ID NO: 23676 - DNA, 21 bp, Artificial Sequence
  Synthetic
ccagagtgccgtctgggtctg

SEQ ID NO: 23677 - DNA, 21 bp, Artificial Sequence
  Synthetic
cagagtgccgtctgggtctga

SEQ ID NO: 23678 - DNA, 21 bp, Artificial Sequence
  Synthetic
tgaaggaaggccgtccattct

SEQ ID NO: 23679 - DNA, 21 bp, Artificial Sequence
  Synthetic
gaaggaaggccgtccattctc

SEQ ID NO: 23680 - DNA, 21 bp, Artificial Sequence
  Synthetic
aacatgcagtgacccctgaga

SEQ ID NO: 23681 - DNA, 21 bp, Artificial Sequence
  Synthetic
tccaaacatgcagtgacccct

SEQ ID NO: 23682 - DNA, 21 bp, Artificial Sequence
  Synthetic
ttctcaggggtcactgcatgt

SEQ ID NO: 23683 - DNA, 21 bp, Artificial Sequence
  Synthetic
agtccaaacatgcagtgaccc

SEQ ID NO: 23684 - DNA, 21 bp, Artificial Sequence
  Synthetic
ggacttctgtgctcatgccca

SEQ ID NO: 23685 - DNA, 21 bp, Artificial Sequence
  Synthetic
aagtctctgtgggcatgagca

SEQ ID NO: 23686 - DNA, 21 bp, Artificial Sequence
  Synthetic
gttgtgcaagtctctgtgggc

SEQ ID NO: 23687 - DNA, 21 bp, Artificial Sequence
  Synthetic
ctgcatgttgtgcaagtctct

SEQ ID NO: 23688 - DNA, 21 bp, Artificial Sequence
  Synthetic
cacagagacttgcacaacatg

SEQ ID NO: 23689 - DNA, 21 bp, Artificial Sequence
  Synthetic
ctaccaggtatgcactctcac

SEQ ID NO: 23690 - DNA, 21 bp, Artificial Sequence
  Synthetic
accaggtatgcactctcacta

SEQ ID NO: 23691 - DNA, 21 bp, Artificial Sequence
  Synthetic
cactctcactagagaagacaa

SEQ ID NO: 23692 - DNA, 21 bp, Artificial Sequence
  Synthetic
ttctcgattgtcttctctagt

SEQ ID NO: 23693 - DNA, 21 bp, Artificial Sequence
  Synthetic
ctctcactagagaagacaatc

SEQ ID NO: 23694 - DNA, 21 bp, Artificial Sequence
  Synthetic
aattctcgattgtcttctcta

SEQ ID NO: 23695 - DNA, 21 bp, Artificial Sequence
  Synthetic
ctagagaagacaatcgagaat

SEQ ID NO: 23696 - DNA, 21 bp, Artificial Sequence
  Synthetic
tagagaagacaatcgagaatt

SEQ ID NO: 23697 - DNA, 21 bp, Artificial Sequence
  Synthetic
gagaagacaatcgagaatttg

SEQ ID NO: 23698 - DNA, 21 bp, Artificial Sequence
  Synthetic
agaagacaatcgagaatttgg

SEQ ID NO: 23699 - DNA, 21 bp, Artificial Sequence
  Synthetic
atcgagaatttggaggaaaac

SEQ ID NO: 23700 - DNA, 21 bp, Artificial Sequence
  Synthetic
cgagaatttggaggaaaacct

SEQ ID NO: 23701 - DNA, 21 bp, Artificial Sequence
  Synthetic
aatttggaggaaaacctgagg

SEQ ID NO: 23702 - DNA, 21 bp, Artificial Sequence
  Synthetic
gactttgtataaaggcagaac

SEQ ID NO: 23703 - DNA, 21 bp, Artificial Sequence
  Synthetic
gtcagagactttgtataaagg

SEQ ID NO: 23704 - DNA, 21 bp, Artificial Sequence
  Synthetic
cctttatacaaagtctctgac

SEQ ID NO: 23705 - DNA, 21 bp, Artificial Sequence
  Synthetic
tatacaaagtctctgacgtgg

SEQ ID NO: 23706 - DNA, 21 bp, Artificial Sequence
  Synthetic
aagtctctgacgtggatgagt

SEQ ID NO: 23707 - DNA, 21 bp, Artificial Sequence
  Synthetic
agtctctgacgtggatgagtt

SEQ ID NO: 23708 - DNA, 21 bp, Artificial Sequence
  Synthetic
gtctctgacgtggatgagttt

SEQ ID NO: 23709 - DNA, 21 bp, Artificial Sequence
  Synthetic
cactcccaaactcatccacgt

SEQ ID NO: 23710 - DNA, 21 bp, Artificial Sequence
  Synthetic
gacgtggatgagtttgggagt

SEQ ID NO: 23711 - DNA, 21 bp, Artificial Sequence
  Synthetic
acgtggatgagtttgggagtg

SEQ ID NO: 23712 - DNA, 21 bp, Artificial Sequence
  Synthetic
gagtttgggagtgtggaagct

SEQ ID NO: 23713 - DNA, 21 bp, Artificial Sequence
  Synthetic
agtttgggagtgtggaagctc

SEQ ID NO: 23714 - DNA, 21 bp, Artificial Sequence
  Synthetic
tttgggagtgtggaagctcag

SEQ ID NO: 23715 - DNA, 21 bp, Artificial Sequence
  Synthetic
ttgggagtgtggaagctcagg

SEQ ID NO: 23716 - DNA, 21 bp, Artificial Sequence
  Synthetic
gggagtgtggaagctcaggag

SEQ ID NO: 23717 - DNA, 21 bp, Artificial Sequence
  Synthetic
ggaagctcaggaggagaaaaa

SEQ ID NO: 23718 - DNA, 21 bp, Artificial Sequence
  Synthetic
gaagctcaggaggagaaaaaa

SEQ ID NO: 23719 - DNA, 21 bp, Artificial Sequence
  Synthetic
cggagtggtgccattcaggta

SEQ ID NO: 23720 - DNA, 21 bp, Artificial Sequence
  Synthetic
tcgccgaaaagaactcagtac

SEQ ID NO: 23721 - DNA, 21 bp, Artificial Sequence
  Synthetic
ggcgaaaagtcaggatgttag

SEQ ID NO: 23722 - DNA, 21 bp, Artificial Sequence
  Synthetic
gccagtcaagacttgccgaca

SEQ ID NO: 23723 - DNA, 21 bp, Artificial Sequence
  Synthetic
ccagtcaagacttgccgacaa

SEQ ID NO: 23724 - DNA, 21 bp, Artificial Sequence
  Synthetic
agacttgccgacaaaggaaac

SEQ ID NO: 23725 - DNA, 21 bp, Artificial Sequence
  Synthetic
cgacaaaggaaactagaagcc

SEQ ID NO: 23726 - DNA, 21 bp, Artificial Sequence
  Synthetic
tagaagccaagaaagctgcag

SEQ ID NO: 23727 - DNA, 21 bp, Artificial Sequence
  Synthetic
gcagctgaaaagctttcctcc

SEQ ID NO: 23728 - DNA, 21 bp, Artificial Sequence
  Synthetic
cagctgaaaagctttcctccc

SEQ ID NO: 23729 - DNA, 21 bp, Artificial Sequence
  Synthetic
gctgaaaagctttcctccctg

SEQ ID NO: 23730 - DNA, 21 bp, Artificial Sequence
  Synthetic
tatttgagctgttctccaggg

SEQ ID NO: 23731 - DNA, 21 bp, Artificial Sequence
  Synthetic
ttatttgagctgttctccagg

SEQ ID NO: 23732 - DNA, 21 bp, Artificial Sequence
  Synthetic
tggagaacagctcaaataaaa

SEQ ID NO: 23733 - DNA, 21 bp, Artificial Sequence
  Synthetic
aacagctcaaataaaaatgaa

SEQ ID NO: 23734 - DNA, 21 bp, Artificial Sequence
  Synthetic
acagctcaaataaaaatgaaa

SEQ ID NO: 23735 - DNA, 21 bp, Artificial Sequence
  Synthetic
ccccatcacgtacaaaacaaa

SEQ ID NO: 23736 - DNA, 21 bp, Artificial Sequence
  Synthetic
cctgaaagtcgcaaaagttct

SEQ ID NO: 23737 - DNA, 21 bp, Artificial Sequence
  Synthetic
gggactgctgcatgactggtc

SEQ ID NO: 23738 - DNA, 21 bp, Artificial Sequence
  Synthetic
ttctgtagaggctggggctgc

SEQ ID NO: 23739 - DNA, 21 bp, Artificial Sequence
  Synthetic
tcccagcagccccagcctcta

SEQ ID NO: 23740 - DNA, 21 bp, Artificial Sequence
  Synthetic
cttctgtagaggctggggctg

SEQ ID NO: 23741 - DNA, 21 bp, Artificial Sequence
  Synthetic
ggtggctgcttctgtagaggc

SEQ ID NO: 23742 - DNA, 21 bp, Artificial Sequence
  Synthetic
tggtggctgcttctgtagagg

SEQ ID NO: 23743 - DNA, 21 bp, Artificial Sequence
  Synthetic
gggctgtggtggctgcttctg

SEQ ID NO: 23744 - DNA, 21 bp, Artificial Sequence
  Synthetic
ccaccacagccccagcagcag

SEQ ID NO: 23745 - DNA, 21 bp, Artificial Sequence
  Synthetic
tgctggggtctctgctgctgc

SEQ ID NO: 23746 - DNA, 21 bp, Artificial Sequence
  Synthetic
ctgctggggtctctgctgctg

SEQ ID NO: 23747 - DNA, 21 bp, Artificial Sequence
  Synthetic
gggtgatgtggctgctgctgc

SEQ ID NO: 23748 - DNA, 21 bp, Artificial Sequence
  Synthetic
agggtgatgtggctgctgctg

SEQ ID NO: 23749 - DNA, 21 bp, Artificial Sequence
  Synthetic
agcagccacatcaccctcaga

SEQ ID NO: 23750 - DNA, 21 bp, Artificial Sequence
  Synthetic
aagagttgacagactctgtct

SEQ ID NO: 23751 - DNA, 21 bp, Artificial Sequence
  Synthetic
ataagagttgacagactctgt

SEQ ID NO: 23752 - DNA, 21 bp, Artificial Sequence
  Synthetic
ctgtcaactcttattctgctt

SEQ ID NO: 23753 - DNA, 21 bp, Artificial Sequence
  Synthetic
tggtggatccagaagcagaat

SEQ ID NO: 23754 - DNA, 21 bp, Artificial Sequence
  Synthetic
atggattggtggatccagaag

SEQ ID NO: 23755 - DNA, 21 bp, Artificial Sequence
  Synthetic
tcatgtatggattggtggatc

SEQ ID NO: 23756 - DNA, 21 bp, Artificial Sequence
  Synthetic
tctggatccaccaatccatac

SEQ ID NO: 23757 - DNA, 21 bp, Artificial Sequence
  Synthetic
ggccgtctcatgtatggattg

SEQ ID NO: 23758 - DNA, 21 bp, Artificial Sequence
  Synthetic
ctggattgggccgtctcatgt

SEQ ID NO: 23759 - DNA, 21 bp, Artificial Sequence
  Synthetic
tttggataaggactaactgga

SEQ ID NO: 23760 - DNA, 21 bp, Artificial Sequence
  Synthetic
aagagtttggataaggactaa

SEQ ID NO: 23761 - DNA, 21 bp, Artificial Sequence
  Synthetic
aagtgtgtgaagagtttggat

SEQ ID NO: 23762 - DNA, 21 bp, Artificial Sequence
  Synthetic
tatctgaagtgtgtgaagagt

SEQ ID NO: 23763 - DNA, 21 bp, Artificial Sequence
  Synthetic
catagatatctgaagtgtgtg

SEQ ID NO: 23764 - DNA, 21 bp, Artificial Sequence
  Synthetic
cttcacacacttcagatatct

SEQ ID NO: 23765 - DNA, 21 bp, Artificial Sequence
  Synthetic
ttccatagatatctgaagtgt

SEQ ID NO: 23766 - DNA, 21 bp, Artificial Sequence
  Synthetic
ttcacacacttcagatatcta

SEQ ID NO: 23767 - DNA, 21 bp, Artificial Sequence
  Synthetic
ggctggtgcttccatagatat

SEQ ID NO: 23768 - DNA, 21 bp, Artificial Sequence
  Synthetic
atctatggaagcaccagccct

SEQ ID NO: 23769 - DNA, 21 bp, Artificial Sequence
  Synthetic
atgaggtggaatagaagttca

SEQ ID NO: 23770 - DNA, 21 bp, Artificial Sequence
  Synthetic
gcagcttgagatgaggtggaa

SEQ ID NO: 23771 - DNA, 21 bp, Artificial Sequence
  Synthetic
aacctgcagcttgagatgagg

SEQ ID NO: 23772 - DNA, 21 bp, Artificial Sequence
  Synthetic
gaacctgcagcttgagatgag

SEQ ID NO: 23773 - DNA, 21 bp, Artificial Sequence
  Synthetic
aatatgaacctgcagcttgag

SEQ ID NO: 23774 - DNA, 21 bp, Artificial Sequence
  Synthetic
tctcaagctgcaggttcatat

SEQ ID NO: 23775 - DNA, 21 bp, Artificial Sequence
  Synthetic
attcaaatatgaacctgcagc

SEQ ID NO: 23776 - DNA, 21 bp, Artificial Sequence
  Synthetic
tgggattagaagaattcaaat

SEQ ID NO: 23777 - DNA, 21 bp, Artificial Sequence
  Synthetic
tatttgaattcttctaatccc

SEQ ID NO: 23778 - DNA, 21 bp, Artificial Sequence
  Synthetic
ggtaagggttcatgggattag

SEQ ID NO: 23779 - DNA, 21 bp, Artificial Sequence
  Synthetic
cagggtaagggttcatgggat

SEQ ID NO: 23780 - DNA, 21 bp, Artificial Sequence
  Synthetic
ctaatcccatgaacccttacc

SEQ ID NO: 23781 - DNA, 21 bp, Artificial Sequence
  Synthetic
aaagcccagggtaagggttca

SEQ ID NO: 23782 - DNA, 21 bp, Artificial Sequence
  Synthetic
aaaagcccagggtaagggttc

SEQ ID NO: 23783 - DNA, 21 bp, Artificial Sequence
  Synthetic
atgaacccttaccctgggctt

SEQ ID NO: 23784 - DNA, 21 bp, Artificial Sequence
  Synthetic
tctgattcaaaagcccagggt

SEQ ID NO: 23785 - DNA, 21 bp, Artificial Sequence
  Synthetic
gggtattctgattcaaaagcc

SEQ ID NO: 23786 - DNA, 21 bp, Artificial Sequence
  Synthetic
attgcattgatatgatggata

SEQ ID NO: 23787 - DNA, 21 bp, Artificial Sequence
  Synthetic
aatatccatcatatcaatgca

SEQ ID NO: 23788 - DNA, 21 bp, Artificial Sequence
  Synthetic
atatccatcatatcaatgcaa

SEQ ID NO: 23789 - DNA, 21 bp, Artificial Sequence
  Synthetic
ggtttccattgcattgatatg

SEQ ID NO: 23790 - DNA, 21 bp, Artificial Sequence
  Synthetic
caatgcaatggaaacctatca

SEQ ID NO: 23791 - DNA, 21 bp, Artificial Sequence
  Synthetic
gtggacaactgctccccatat

SEQ ID NO: 23792 - DNA, 21 bp, Artificial Sequence
  Synthetic
gagaataggaacccagatatg

SEQ ID NO: 23793 - DNA, 21 bp, Artificial Sequence
  Synthetic
ggagaataggaacccagatat

SEQ ID NO: 23794 - DNA, 21 bp, Artificial Sequence
  Synthetic
gggagaataggaacccagata

SEQ ID NO: 23795 - DNA, 21 bp, Artificial Sequence
  Synthetic
ggggagaataggaacccagat

SEQ ID NO: 23796 - DNA, 21 bp, Artificial Sequence
  Synthetic
tcggctgagactggggagaat

SEQ ID NO: 23797 - DNA, 21 bp, Artificial Sequence
  Synthetic
atcggctgagactggggagaa

SEQ ID NO: 23798 - DNA, 21 bp, Artificial Sequence
  Synthetic
tattctccccagtctcagccg

SEQ ID NO: 23799 - DNA, 21 bp, Artificial Sequence
  Synthetic
gatccatcggctgagactggg

SEQ ID NO: 23800 - DNA, 21 bp, Artificial Sequence
  Synthetic
cagatccatcggctgagactg

SEQ ID NO: 23801 - DNA, 21 bp, Artificial Sequence
  Synthetic
acagatccatcggctgagact

SEQ ID NO: 23802 - DNA, 21 bp, Artificial Sequence
  Synthetic
tacagatccatcggctgagac

SEQ ID NO: 23803 - DNA, 21 bp, Artificial Sequence
  Synthetic
atacagatccatcggctgaga

SEQ ID NO: 23804 - DNA, 21 bp, Artificial Sequence
  Synthetic
atacctatacagatccatcgg

SEQ ID NO: 23805 - DNA, 21 bp, Artificial Sequence
  Synthetic
gcttagacagagggtcttggc

SEQ ID NO: 23806 - DNA, 21 bp, Artificial Sequence
  Synthetic
gtggtagactgagcttagaca

SEQ ID NO: 23807 - DNA, 21 bp, Artificial Sequence
  Synthetic
gggtggtagactgagcttaga

SEQ ID NO: 23808 - DNA, 21 bp, Artificial Sequence
  Synthetic
agtgtatggatgggtggtaga

SEQ ID NO: 23809 - DNA, 21 bp, Artificial Sequence
  Synthetic
cttggctggtaaagtgtatgg

SEQ ID NO: 23810 - DNA, 21 bp, Artificial Sequence
  Synthetic
aaaccttggctggtaaagtgt

SEQ ID NO: 23811 - DNA, 21 bp, Artificial Sequence
  Synthetic
atacactttaccagccaaggt

SEQ ID NO: 23812 - DNA, 21 bp, Artificial Sequence
  Synthetic
tacactttaccagccaaggtt

SEQ ID NO: 23813 - DNA, 21 bp, Artificial Sequence
  Synthetic
cagccaaggtttggaaatagc

SEQ ID NO: 23814 - DNA, 21 bp, Artificial Sequence
  Synthetic
ttacatctaaatacttaggtt

SEQ ID NO: 23815 - DNA, 21 bp, Artificial Sequence
  Synthetic
tacatctaaatacttaggtta

SEQ ID NO: 23816 - DNA, 21 bp, Artificial Sequence
  Synthetic
ggttatggaaaccaaaatatg

SEQ ID NO: 23817 - DNA, 21 bp, Artificial Sequence
  Synthetic
gttatggaaaccaaaatatgc

SEQ ID NO: 23818 - DNA, 21 bp, Artificial Sequence
  Synthetic
ttatggaaaccaaaatatgca

SEQ ID NO: 23819 - DNA, 21 bp, Artificial Sequence
  Synthetic
tttggtctaatggtacaactg

SEQ ID NO: 23820 - DNA, 21 bp, Artificial Sequence
  Synthetic
ttagaccaaatgtacatcatg

SEQ ID NO: 23821 - DNA, 21 bp, Artificial Sequence
  Synthetic
tagaccaaatgtacatcatgt

SEQ ID NO: 23822 - DNA, 21 bp, Artificial Sequence
  Synthetic
agaccaaatgtacatcatgta

SEQ ID NO: 23823 - DNA, 21 bp, Artificial Sequence
  Synthetic
aattgcctccttatcccactc

SEQ ID NO: 23824 - DNA, 21 bp, Artificial Sequence
  Synthetic
cctccttatcccactcatgag

SEQ ID NO: 23825 - DNA, 21 bp, Artificial Sequence
  Synthetic
atccatctcatgagtgggata

SEQ ID NO: 23826 - DNA, 21 bp, Artificial Sequence
  Synthetic
catccatctcatgagtgggat

SEQ ID NO: 23827 - DNA, 21 bp, Artificial Sequence
  Synthetic
agtggccatccatctcatgag

SEQ ID NO: 23828 - DNA, 21 bp, Artificial Sequence
  Synthetic
aagtggccatccatctcatga

SEQ ID NO: 23829 - DNA, 21 bp, Artificial Sequence
  Synthetic
catgaagtggccatccatctc

SEQ ID NO: 23830 - DNA, 21 bp, Artificial Sequence
  Synthetic
catgagatggatggccacttc

SEQ ID NO: 23831 - DNA, 21 bp, Artificial Sequence
  Synthetic
atgagatggatggccacttca

SEQ ID NO: 23832 - DNA, 21 bp, Artificial Sequence
  Synthetic
tgagatggatggccacttcat

SEQ ID NO: 23833 - DNA, 21 bp, Artificial Sequence
  Synthetic
ggtaatctagaggtggctccc

SEQ ID NO: 23834 - DNA, 21 bp, Artificial Sequence
  Synthetic
acctctagattaccacccaat

SEQ ID NO: 23835 - DNA, 21 bp, Artificial Sequence
  Synthetic
tgctcagattgggtggtaatc

SEQ ID NO: 23836 - DNA, 21 bp, Artificial Sequence
  Synthetic
tccatgtttggattgctcaga

SEQ ID NO: 23837 - DNA, 21 bp, Artificial Sequence
  Synthetic
cccaatctgagcaatccaaac

SEQ ID NO: 23838 - DNA, 21 bp, Artificial Sequence
  Synthetic
caaacatggactataaaaatg

SEQ ID NO: 23839 - DNA, 21 bp, Artificial Sequence
  Synthetic
agttatggattatgtgagaag

SEQ ID NO: 23840 - DNA, 21 bp, Artificial Sequence
  Synthetic
cactgtagttatggattatgt

SEQ ID NO: 23841 - DNA, 21 bp, Artificial Sequence
  Synthetic
tgcactgtagttatggattat

SEQ ID NO: 23842 - DNA, 21 bp, Artificial Sequence
  Synthetic
atccataactacagtgcagct

SEQ ID NO: 23843 - DNA, 21 bp, Artificial Sequence
  Synthetic
gcccggagctgcactgtagtt

SEQ ID NO: 23844 - DNA, 21 bp, Artificial Sequence
  Synthetic
aagagagctgttgaacatgcc

SEQ ID NO: 23845 - DNA, 21 bp, Artificial Sequence
  Synthetic
gaagagagctgttgaacatgc

SEQ ID NO: 23846 - DNA, 21 bp, Artificial Sequence
  Synthetic
tgcagggcatgaagagagctg

SEQ ID NO: 23847 - DNA, 21 bp, Artificial Sequence
  Synthetic
tttggagatgcagggcatgaa

SEQ ID NO: 23848 - DNA, 21 bp, Artificial Sequence
  Synthetic
catgccctgcatctccaaaac

SEQ ID NO: 23849 - DNA, 21 bp, Artificial Sequence
  Synthetic
atgccctgcatctccaaaaca

SEQ ID NO: 23850 - DNA, 21 bp, Artificial Sequence
  Synthetic
gccctgcatctccaaaacaag

SEQ ID NO: 23851 - DNA, 21 bp, Artificial Sequence
  Synthetic
agcatgtcattctccttgttt

SEQ ID NO: 23852 - DNA, 21 bp, Artificial Sequence
  Synthetic
aagcatgtcattctccttgtt

SEQ ID NO: 23853 - DNA, 21 bp, Artificial Sequence
  Synthetic
acatgctttcccacacagcta

SEQ ID NO: 23854 - DNA, 21 bp, Artificial Sequence
  Synthetic
ttgataacccattagctgtgt

SEQ ID NO: 23855 - DNA, 21 bp, Artificial Sequence
  Synthetic
tttgataacccattagctgtg

SEQ ID NO: 23856 - DNA, 21 bp, Artificial Sequence
  Synthetic
ctttgataacccattagctgt

SEQ ID NO: 23857 - DNA, 21 bp, Artificial Sequence
  Synthetic
gcttccagctcttaaccatga

SEQ ID NO: 23858 - DNA, 21 bp, Artificial Sequence
  Synthetic
agttctatcatggttaagagc

SEQ ID NO: 23859 - DNA, 21 bp, Artificial Sequence
  Synthetic
cagttctatcatggttaagag

SEQ ID NO: 23860 - DNA, 21 bp, Artificial Sequence
  Synthetic
acaagcagttctatcatggtt

SEQ ID NO: 23861 - DNA, 21 bp, Artificial Sequence
  Synthetic
atgatagaactgcttgtgtcc

SEQ ID NO: 23862 - DNA, 21 bp, Artificial Sequence
  Synthetic
tgatagaactgcttgtgtcca

SEQ ID NO: 23863 - DNA, 21 bp, Artificial Sequence
  Synthetic
acttaatttgtgtaagcctcc

SEQ ID NO: 23864 - DNA, 21 bp, Artificial Sequence
  Synthetic
aaattaagtgatgctaatggt

SEQ ID NO: 23865 - DNA, 21 bp, Artificial Sequence
  Synthetic
aattaagtgatgctaatggtc

SEQ ID NO: 23866 - DNA, 21 bp, Artificial Sequence
  Synthetic
aagcagccattggcactagtc

SEQ ID NO: 23867 - DNA, 21 bp, Artificial Sequence
  Synthetic
ctctgcaccagaagccacacc

SEQ ID NO: 23868 - DNA, 21 bp, Artificial Sequence
  Synthetic
tccagggtgtggcttctggtg

SEQ ID NO: 23869 - DNA, 21 bp, Artificial Sequence
  Synthetic
cagggtgtggcttctggtgca

SEQ ID NO: 23870 - DNA, 21 bp, Artificial Sequence
  Synthetic
cttctggtgcagaggacaacg

SEQ ID NO: 23871 - DNA, 21 bp, Artificial Sequence
  Synthetic
cctcatcgttgtcctctgcac

SEQ ID NO: 23872 - DNA, 21 bp, Artificial Sequence
  Synthetic
acgatgaggtctggtcagaca

SEQ ID NO: 23873 - DNA, 21 bp, Artificial Sequence
  Synthetic
gaggtctggtcagacagcgag

SEQ ID NO: 23874 - DNA, 21 bp, Artificial Sequence
  Synthetic
tcagacagcgagcagagcttt

SEQ ID NO: 23875 - DNA, 21 bp, Artificial Sequence
  Synthetic
agagctttctggatcctgaca

SEQ ID NO: 23876 - DNA, 21 bp, Artificial Sequence
  Synthetic
gagctttctggatcctgacat

SEQ ID NO: 23877 - DNA, 21 bp, Artificial Sequence
  Synthetic
agctttctggatcctgacatt

SEQ ID NO: 23878 - DNA, 21 bp, Artificial Sequence
  Synthetic
gctttctggatcctgacattg

SEQ ID NO: 23879 - DNA, 21 bp, Artificial Sequence
  Synthetic
ctttctggatcctgacattgg

SEQ ID NO: 23880 - DNA, 21 bp, Artificial Sequence
  Synthetic
cactcccccaatgtcaggatc

SEQ ID NO: 23881 - DNA, 21 bp, Artificial Sequence
  Synthetic
ccacggccactcccccaatgt

SEQ ID NO: 23882 - DNA, 21 bp, Artificial Sequence
  Synthetic
gagtggccgtggctccaactc

SEQ ID NO: 23883 - DNA, 21 bp, Artificial Sequence
  Synthetic
aatgagaattgacccatgagt

SEQ ID NO: 23884 - DNA, 21 bp, Artificial Sequence
  Synthetic
caatgagaattgacccatgag

SEQ ID NO: 23885 - DNA, 21 bp, Artificial Sequence
  Synthetic
caactcatgggtcaattctca

SEQ ID NO: 23886 - DNA, 21 bp, Artificial Sequence
  Synthetic
acactcaatgagaattgaccc

SEQ ID NO: 23887 - DNA, 21 bp, Artificial Sequence
  Synthetic
ctcacgctttgcacactcaat

SEQ ID NO: 23888 - DNA, 21 bp, Artificial Sequence
  Synthetic
ttctcattgagtgtgcaaagc

SEQ ID NO: 23889 - DNA, 21 bp, Artificial Sequence
  Synthetic
agctcacgctttgcacactca

SEQ ID NO: 23890 - DNA, 21 bp, Artificial Sequence
  Synthetic
ctgcatgccacaaccccttta

SEQ ID NO: 23891 - DNA, 21 bp, Artificial Sequence
  Synthetic
aacccctttaaagaatcccaa

SEQ ID NO: 23892 - DNA, 21 bp, Artificial Sequence
  Synthetic
acccctttaaagaatcccaat

SEQ ID NO: 23893 - DNA, 21 bp, Artificial Sequence
  Synthetic
attcctattgggattctttaa

SEQ ID NO: 23894 - DNA, 21 bp, Artificial Sequence
  Synthetic
gattcctattgggattcttta

SEQ ID NO: 23895 - DNA, 21 bp, Artificial Sequence
  Synthetic
tcctggtggggtgattcctat

SEQ ID NO: 23896 - DNA, 21 bp, Artificial Sequence
  Synthetic
tcccaataggaatcaccccac

SEQ ID NO: 23897 - DNA, 21 bp, Artificial Sequence
  Synthetic
atcctggtggggtgattccta

SEQ ID NO: 23898 - DNA, 21 bp, Artificial Sequence
  Synthetic
aaaagacgagggagatcctgg

SEQ ID NO: 23899 - DNA, 21 bp, Artificial Sequence
  Synthetic
taaaagacgagggagatcctg

SEQ ID NO: 23900 - DNA, 21 bp, Artificial Sequence
  Synthetic
tcttatgctggtaaaagacga

SEQ ID NO: 23901 - DNA, 21 bp, Artificial Sequence
  Synthetic
ctcttatgctggtaaaagacg

SEQ ID NO: 23902 - DNA, 21 bp, Artificial Sequence
  Synthetic
gctcttatgctggtaaaagac

SEQ ID NO: 23903 - DNA, 21 bp, Artificial Sequence
  Synthetic
atgctcttatgctggtaaaag

SEQ ID NO: 23904 - DNA, 20 bp, Artificial Sequence
  Synthetic
aggacgagtgtgccgtgtgt

SEQ ID NO: 23905 - DNA, 20 bp, Artificial Sequence
  Synthetic
ggacgagtgtgccgtgtgtc

SEQ ID NO: 23906 - DNA, 20 bp, Artificial Sequence
  Synthetic
gagtgtgccgtgtgtcggga

SEQ ID NO: 23907 - DNA, 20 bp, Artificial Sequence
  Synthetic
tgtgccgtgtgtcgggacgg

SEQ ID NO: 23908 - DNA, 20 bp, Artificial Sequence
  Synthetic
gtgccgtgtgtcgggacggc

SEQ ID NO: 23909 - DNA, 20 bp, Artificial Sequence
  Synthetic
tgccgtgtgtcgggacggcg

SEQ ID NO: 23910 - DNA, 20 bp, Artificial Sequence
  Synthetic
ctccccgccgtcccgacaca

SEQ ID NO: 23911 - DNA, 20 bp, Artificial Sequence
  Synthetic
ggggagctcatctgctgtga

SEQ ID NO: 23912 - DNA, 20 bp, Artificial Sequence
  Synthetic
tctgctgtgacggctgccct

SEQ ID NO: 23913 - DNA, 20 bp, Artificial Sequence
  Synthetic
ctgctgtgacggctgccctc

SEQ ID NO: 23914 - DNA, 20 bp, Artificial Sequence
  Synthetic
ctgccctcgggccttccacc

SEQ ID NO: 23915 - DNA, 20 bp, Artificial Sequence
  Synthetic
aggccaggtggaaggcccga

SEQ ID NO: 23916 - DNA, 20 bp, Artificial Sequence
  Synthetic
caggccaggtggaaggcccg

SEQ ID NO: 23917 - DNA, 20 bp, Artificial Sequence
  Synthetic
ggacaggcaggccaggtgga

SEQ ID NO: 23918 - DNA, 20 bp, Artificial Sequence
  Synthetic
gaggggacaggcaggccagg

SEQ ID NO: 23919 - DNA, 20 bp, Artificial Sequence
  Synthetic
gcggaggggacaggcaggcc

SEQ ID NO: 23920 - DNA, 20 bp, Artificial Sequence
  Synthetic
ccggagcggaggggacaggc

SEQ ID NO: 23921 - DNA, 20 bp, Artificial Sequence
  Synthetic
cctgcctgtcccctccgctc

SEQ ID NO: 23922 - DNA, 20 bp, Artificial Sequence
  Synthetic
ctgcctgtcccctccgctcc

SEQ ID NO: 23923 - DNA, 20 bp, Artificial Sequence
  Synthetic
tctcccggagcggaggggac

SEQ ID NO: 23924 - DNA, 20 bp, Artificial Sequence
  Synthetic
ggggatctcccggagcggag

SEQ ID NO: 23925 - DNA, 20 bp, Artificial Sequence
  Synthetic
tggggatctcccggagcgga

SEQ ID NO: 23926 - DNA, 20 bp, Artificial Sequence
  Synthetic
ctggggatctcccggagcgg

SEQ ID NO: 23927 - DNA, 20 bp, Artificial Sequence
  Synthetic
ctccgctccgggagatcccc

SEQ ID NO: 23928 - DNA, 20 bp, Artificial Sequence
  Synthetic
cacctggggatctcccggag

SEQ ID NO: 23929 - DNA, 20 bp, Artificial Sequence
  Synthetic
aggctcacctggggatctcc

SEQ ID NO: 23930 - DNA, 20 bp, Artificial Sequence
  Synthetic
cagaggtgcaggctcacctg

SEQ ID NO: 23931 - DNA, 20 bp, Artificial Sequence
  Synthetic
gacacacgagcagtgggacc

SEQ ID NO: 23932 - DNA, 20 bp, Artificial Sequence
  Synthetic
acacgagcagtgggacctgg

SEQ ID NO: 23933 - DNA, 20 bp, Artificial Sequence
  Synthetic
caggcagctggagcacctcc

SEQ ID NO: 23934 - DNA, 20 bp, Artificial Sequence
  Synthetic
gaggtgctccagctgcctgc

SEQ ID NO: 23935 - DNA, 20 bp, Artificial Sequence
  Synthetic
gactgttgcctgcaggcagc

SEQ ID NO: 23936 - DNA, 20 bp, Artificial Sequence
  Synthetic
agctgggtggtgagcctgag

SEQ ID NO: 23937 - DNA, 20 bp, Artificial Sequence
  Synthetic
gtgagcctgagaggaagatg

SEQ ID NO: 23938 - DNA, 20 bp, Artificial Sequence
  Synthetic
tgagcctgagaggaagatgt

SEQ ID NO: 23939 - DNA, 20 bp, Artificial Sequence
  Synthetic
gcctgagaggaagatgtggg

SEQ ID NO: 23940 - DNA, 20 bp, Artificial Sequence
  Synthetic
tccacccacatcttcctctc

SEQ ID NO: 23941 - DNA, 20 bp, Artificial Sequence
  Synthetic
gatgtgggtggaccgttatc

SEQ ID NO: 23942 - DNA, 20 bp, Artificial Sequence
  Synthetic
cctcagtgaaggccagataa

SEQ ID NO: 23943 - DNA, 20 bp, Artificial Sequence
  Synthetic
ccgttatctggccttcactg

SEQ ID NO: 23944 - DNA, 20 bp, Artificial Sequence
  Synthetic
tctggccttcactgaggaga

SEQ ID NO: 23945 - DNA, 20 bp, Artificial Sequence
  Synthetic
catggccttctcctcagtga

SEQ ID NO: 23946 - DNA, 20 bp, Artificial Sequence
  Synthetic
cttcactgaggagaaggcca

SEQ ID NO: 23947 - DNA, 20 bp, Artificial Sequence
  Synthetic
ttcactgaggagaaggccat

SEQ ID NO: 23948 - DNA, 20 bp, Artificial Sequence
  Synthetic
aggcagatttgtcatgccca

SEQ ID NO: 23949 - DNA, 20 bp, Artificial Sequence
  Synthetic
catgacaaatctgcctgctg

SEQ ID NO: 23950 - DNA, 20 bp, Artificial Sequence
  Synthetic
atgacaaatctgcctgctgt

SEQ ID NO: 23951 - DNA, 20 bp, Artificial Sequence
  Synthetic
caaatctgcctgctgtgggt

SEQ ID NO: 23952 - DNA, 20 bp, Artificial Sequence
  Synthetic
agaggtttcctacccacagc

SEQ ID NO: 23953 - DNA, 20 bp, Artificial Sequence
  Synthetic
tgctgtgggtaggaaacctc

SEQ ID NO: 23954 - DNA, 20 bp, Artificial Sequence
  Synthetic
tagaggcgatagaggtccag

SEQ ID NO: 23955 - DNA, 20 bp, Artificial Sequence
  Synthetic
cagacacatagaggcgatag

SEQ ID NO: 23956 - DNA, 20 bp, Artificial Sequence
  Synthetic
tcgcctctatgtgtctgtga

SEQ ID NO: 23957 - DNA, 20 bp, Artificial Sequence
  Synthetic
tctccttcacagacacatag

SEQ ID NO: 23958 - DNA, 20 bp, Artificial Sequence
  Synthetic
tatgtgtctgtgaaggagat

SEQ ID NO: 23959 - DNA, 20 bp, Artificial Sequence
  Synthetic
gtgtctgtgaaggagattgg

SEQ ID NO: 23960 - DNA, 20 bp, Artificial Sequence
  Synthetic
ggagattggtggattgactc

SEQ ID NO: 23961 - DNA, 20 bp, Artificial Sequence
  Synthetic
aggtcaacaagaacaaaaaa

SEQ ID NO: 23962 - DNA, 20 bp, Artificial Sequence
  Synthetic
tcaacaagaacaaaaaatgg

SEQ ID NO: 23963 - DNA, 20 bp, Artificial Sequence
  Synthetic
caacaagaacaaaaaatggc

SEQ ID NO: 23964 - DNA, 20 bp, Artificial Sequence
  Synthetic
acttgcaaccaacctcaatg

SEQ ID NO: 23965 - DNA, 20 bp, Artificial Sequence
  Synthetic
cttgcaaccaacctcaatgt

SEQ ID NO: 23966 - DNA, 20 bp, Artificial Sequence
  Synthetic
tgatgtgcccacattgaggt

SEQ ID NO: 23967 - DNA, 20 bp, Artificial Sequence
  Synthetic
tgcttgatgtgcccacattg

SEQ ID NO: 23968 - DNA, 20 bp, Artificial Sequence
  Synthetic
atactgctttttcaaggagc

SEQ ID NO: 23969 - DNA, 20 bp, Artificial Sequence
  Synthetic
ctggatatactgctttttca

SEQ ID NO: 23970 - DNA, 20 bp, Artificial Sequence
  Synthetic
attcaaaggcatagagacac

SEQ ID NO: 23971 - DNA, 20 bp, Artificial Sequence
  Synthetic
ccgttcaatcttgcattcaa

SEQ ID NO: 23972 - DNA, 20 bp, Artificial Sequence
  Synthetic
atgagccagagagaaagctc

SEQ ID NO: 23973 - DNA, 20 bp, Artificial Sequence
  Synthetic
tgagccagagagaaagctct

SEQ ID NO: 23974 - DNA, 20 bp, Artificial Sequence
  Synthetic
tcgacccagagctttctctc

SEQ ID NO: 23975 - DNA, 20 bp, Artificial Sequence
  Synthetic
cgaccgatacctcaccttca

SEQ ID NO: 23976 - DNA, 20 bp, Artificial Sequence
  Synthetic
cttccatgaaggtgaggtat

SEQ ID NO: 23977 - DNA, 20 bp, Artificial Sequence
  Synthetic
ctctctcttccatgaaggtg

SEQ ID NO: 23978 - DNA, 20 bp, Artificial Sequence
  Synthetic
ctcaccttcatggaagagag

SEQ ID NO: 23979 - DNA, 20 bp, Artificial Sequence
  Synthetic
agagcctctctcttccatga

SEQ ID NO: 23980 - DNA, 20 bp, Artificial Sequence
  Synthetic
acggcaggcagacttgagac

SEQ ID NO: 23981 - DNA, 20 bp, Artificial Sequence
  Synthetic
tgtctcaagtctgcctgccg

SEQ ID NO: 23982 - DNA, 20 bp, Artificial Sequence
  Synthetic
gtctcaagtctgcctgccgt

SEQ ID NO: 23983 - DNA, 20 bp, Artificial Sequence
  Synthetic
aggggcttcttgcccacggc

SEQ ID NO: 23984 - DNA, 20 bp, Artificial Sequence
  Synthetic
tgccgtgggcaagaagcccc

SEQ ID NO: 23985 - DNA, 20 bp, Artificial Sequence
  Synthetic
gtccaggggcttcttgccca

SEQ ID NO: 23986 - DNA, 20 bp, Artificial Sequence
  Synthetic
tagagtcggaacaggtccag

SEQ ID NO: 23987 - DNA, 20 bp, Artificial Sequence
  Synthetic
gtagagtcggaacaggtcca

SEQ ID NO: 23988 - DNA, 20 bp, Artificial Sequence
  Synthetic
cgtagagtcggaacaggtcc

SEQ ID NO: 23989 - DNA, 20 bp, Artificial Sequence
  Synthetic
cgcagacgtagagtcggaac

SEQ ID NO: 23990 - DNA, 20 bp, Artificial Sequence
  Synthetic
ctttgacgcagacgtagagt

SEQ ID NO: 23991 - DNA, 20 bp, Artificial Sequence
  Synthetic
tacgtctgcgtcaaagagat

SEQ ID NO: 23992 - DNA, 20 bp, Artificial Sequence
  Synthetic
acgtctgcgtcaaagagatc

SEQ ID NO: 23993 - DNA, 20 bp, Artificial Sequence
  Synthetic
cgtctgcgtcaaagagatcg

SEQ ID NO: 23994 - DNA, 20 bp, Artificial Sequence
  Synthetic
gtctgcgtcaaagagatcgg

SEQ ID NO: 23995 - DNA, 20 bp, Artificial Sequence
  Synthetic
cgtcaaagagatcgggggtt

SEQ ID NO: 23996 - DNA, 20 bp, Artificial Sequence
  Synthetic
agagatcgggggtttggccc

SEQ ID NO: 23997 - DNA, 20 bp, Artificial Sequence
  Synthetic
aggttaataaaaacaagaag

SEQ ID NO: 23998 - DNA, 20 bp, Artificial Sequence
  Synthetic
aaacaagaagtggcgtgagc

SEQ ID NO: 23999 - DNA, 20 bp, Artificial Sequence
  Synthetic
ctggcaaccaacctaaacgt

SEQ ID NO: 24000 - DNA, 20 bp, Artificial Sequence
  Synthetic
tgaggtgccaacgtttaggt

SEQ ID NO: 24001 - DNA, 20 bp, Artificial Sequence
  Synthetic
tgcttgaggtgccaacgttt

SEQ ID NO: 24002 - DNA, 20 bp, Artificial Sequence
  Synthetic
ggagctcgctgcactgcttg

SEQ ID NO: 24003 - DNA, 20 bp, Artificial Sequence
  Synthetic
ctgaatatactgctttttca

SEQ ID NO: 24004 - DNA, 20 bp, Artificial Sequence
  Synthetic
actgaatatactgctttttc

SEQ ID NO: 24005 - DNA, 20 bp, Artificial Sequence
  Synthetic
tcttgcactcaaaggcaaac

SEQ ID NO: 24006 - DNA, 20 bp, Artificial Sequence
  Synthetic
acgttcgatcttgcactcaa

SEQ ID NO: 24007 - DNA, 20 bp, Artificial Sequence
  Synthetic
gcctccggacgagcggagaa

SEQ ID NO: 24008 - DNA, 20 bp, Artificial Sequence
  Synthetic
cctccggacgagcggagaaa

SEQ ID NO: 24009 - DNA, 20 bp, Artificial Sequence
  Synthetic
gagaaagggactcgctttcc

SEQ ID NO: 24010 - DNA, 20 bp, Artificial Sequence
  Synthetic
tcgctttcctggacgagctg

SEQ ID NO: 24011 - DNA, 20 bp, Artificial Sequence
  Synthetic
ggaactgccgcagctcgtcc

SEQ ID NO: 24012 - DNA, 20 bp, Artificial Sequence
  Synthetic
cggcagttccaccacagcag

SEQ ID NO: 24013 - DNA, 20 bp, Artificial Sequence
  Synthetic
ggcagttccaccacagcaga

SEQ ID NO: 24014 - DNA, 20 bp, Artificial Sequence
  Synthetic
gctctcaccctctgctgtgg

SEQ ID NO: 24015 - DNA, 20 bp, Artificial Sequence
  Synthetic
tctgctctcaccctctgctg

SEQ ID NO: 24016 - DNA, 20 bp, Artificial Sequence
  Synthetic
gccttttaaaaaaatccctg

SEQ ID NO: 24017 - DNA, 20 bp, Artificial Sequence
  Synthetic
accgcagggatttttttaaa

SEQ ID NO: 24018 - DNA, 20 bp, Artificial Sequence
  Synthetic
ttttaaaaaaatccctgcgg

SEQ ID NO: 24019 - DNA, 20 bp, Artificial Sequence
  Synthetic
tttaaaaaaatccctgcggt

SEQ ID NO: 24020 - DNA, 20 bp, Artificial Sequence
  Synthetic
aaaaaaatccctgcggtggg

SEQ ID NO: 24021 - DNA, 20 bp, Artificial Sequence
  Synthetic
aaaaaatccctgcggtgggt

SEQ ID NO: 24022 - DNA, 20 bp, Artificial Sequence
  Synthetic
aatccctgcggtgggtggga

SEQ ID NO: 24023 - DNA, 20 bp, Artificial Sequence
  Synthetic
gctccttcccacccaccgca

SEQ ID NO: 24024 - DNA, 20 bp, Artificial Sequence
  Synthetic
agctccttcccacccaccgc

SEQ ID NO: 24025 - DNA, 20 bp, Artificial Sequence
  Synthetic
tgcggtgggtgggaaggagc

SEQ ID NO: 24026 - DNA, 20 bp, Artificial Sequence
  Synthetic
gggaaggagctggatcttca

SEQ ID NO: 24027 - DNA, 20 bp, Artificial Sequence
  Synthetic
tacaccagagtcactacttt

SEQ ID NO: 24028 - DNA, 20 bp, Artificial Sequence
  Synthetic
accagagtcactactttagg

SEQ ID NO: 24029 - DNA, 20 bp, Artificial Sequence
  Synthetic
tccgcctaaagtagtgactc

SEQ ID NO: 24030 - DNA, 20 bp, Artificial Sequence
  Synthetic
tactttaggcggattcgcga

SEQ ID NO: 24031 - DNA, 20 bp, Artificial Sequence
  Synthetic
actgattcttctcagaaacc

SEQ ID NO: 24032 - DNA, 20 bp, Artificial Sequence
  Synthetic
aggtttctgagaagaatcag

SEQ ID NO: 24033 - DNA, 20 bp, Artificial Sequence
  Synthetic
ggtttctgagaagaatcagt

SEQ ID NO: 24034 - DNA, 20 bp, Artificial Sequence
  Synthetic
gtttctgagaagaatcagtg

SEQ ID NO: 24035 - DNA, 20 bp, Artificial Sequence
  Synthetic
gcagcgttagaacaacttct

SEQ ID NO: 24036 - DNA, 20 bp, Artificial Sequence
  Synthetic
ggcagcgttagaacaacttc

SEQ ID NO: 24037 - DNA, 20 bp, Artificial Sequence
  Synthetic
gtaatactgttttaaagcaa

SEQ ID NO: 24038 - DNA, 20 bp, Artificial Sequence
  Synthetic
ctttaaaacagtattacttg

SEQ ID NO: 24039 - DNA, 20 bp, Artificial Sequence
  Synthetic
gaactttctcgtacttttct

SEQ ID NO: 24040 - DNA, 20 bp, Artificial Sequence
  Synthetic
aactcgacggggaccccaag

SEQ ID NO: 24041 - DNA, 20 bp, Artificial Sequence
  Synthetic
cgacggggaccccaagagga

SEQ ID NO: 24042 - DNA, 20 bp, Artificial Sequence
  Synthetic
ccaggaattccttcctcttg

SEQ ID NO: 24043 - DNA, 20 bp, Artificial Sequence
  Synthetic
ccccaagaggaaggaattcc

SEQ ID NO: 24044 - DNA, 20 bp, Artificial Sequence
  Synthetic
tccaggaattccttcctctt

SEQ ID NO: 24045 - DNA, 20 bp, Artificial Sequence
  Synthetic
atccaggaattccttcctct

SEQ ID NO: 24046 - DNA, 20 bp, Artificial Sequence
  Synthetic
tgaagctgaacaagtcatcc

SEQ ID NO: 24047 - DNA, 20 bp, Artificial Sequence
  Synthetic
ttcagcttcatgcagaagcg

SEQ ID NO: 24048 - DNA, 20 bp, Artificial Sequence
  Synthetic
atgcggttcacaggtgtccc

SEQ ID NO: 24049 - DNA, 20 bp, Artificial Sequence
  Synthetic
atgatggggatgcggttcac

SEQ ID NO: 24050 - DNA, 20 bp, Artificial Sequence
  Synthetic
tgtgaaccgcatccccatca

SEQ ID NO: 24051 - DNA, 20 bp, Artificial Sequence
  Synthetic
gtttggccatgatggggatg

SEQ ID NO: 24052 - DNA, 20 bp, Artificial Sequence
  Synthetic
catccccatcatggccaaac

SEQ ID NO: 24053 - DNA, 20 bp, Artificial Sequence
  Synthetic
ggacctgtttggccatgatg

SEQ ID NO: 24054 - DNA, 20 bp, Artificial Sequence
  Synthetic
aggacctgtttggccatgat

SEQ ID NO: 24055 - DNA, 20 bp, Artificial Sequence
  Synthetic
aaggacctgtttggccatga

SEQ ID NO: 24056 - DNA, 20 bp, Artificial Sequence
  Synthetic
gaacaggtcaaggacctgtt

SEQ ID NO: 24057 - DNA, 20 bp, Artificial Sequence
  Synthetic
cgtacagcatgaacaggtca

SEQ ID NO: 24058 - DNA, 20 bp, Artificial Sequence
  Synthetic
ccagcacgtacagcatgaac

SEQ ID NO: 24059 - DNA, 20 bp, Artificial Sequence
  Synthetic
cctgttcatgctgtacgtgc

SEQ ID NO: 24060 - DNA, 20 bp, Artificial Sequence
  Synthetic
catgctgtacgtgctggtga

SEQ ID NO: 24061 - DNA, 20 bp, Artificial Sequence
  Synthetic
gtacgtgctggtgacggaga

SEQ ID NO: 24062 - DNA, 20 bp, Artificial Sequence
  Synthetic
tacgtgctggtgacggagaa

SEQ ID NO: 24063 - DNA, 20 bp, Artificial Sequence
  Synthetic
gtgctggtgacggagaaggg

SEQ ID NO: 24064 - DNA, 20 bp, Artificial Sequence
  Synthetic
gacggagaagggcggcctcg

SEQ ID NO: 24065 - DNA, 20 bp, Artificial Sequence
  Synthetic
ggagaagggcggcctcgtgg

SEQ ID NO: 24066 - DNA, 20 bp, Artificial Sequence
  Synthetic
tcttgttgatgacctccacg

SEQ ID NO: 24067 - DNA, 20 bp, Artificial Sequence
  Synthetic
aggtcatcaacaagaagctg

SEQ ID NO: 24068 - DNA, 20 bp, Artificial Sequence
  Synthetic
gctgtggcgtgagatcacca

SEQ ID NO: 24069 - DNA, 20 bp, Artificial Sequence
  Synthetic
ctgtggcgtgagatcaccaa

SEQ ID NO: 24070 - DNA, 20 bp, Artificial Sequence
  Synthetic
cgtgggcaggttgaggccct

SEQ ID NO: 24071 - DNA, 20 bp, Artificial Sequence
  Synthetic
tgatggacgtgggcaggttg

SEQ ID NO: 24072 - DNA, 20 bp, Artificial Sequence
  Synthetic
cactggtgatggacgtgggc

SEQ ID NO: 24073 - DNA, 20 bp, Artificial Sequence
  Synthetic
gctgcactggtgatggacgt

SEQ ID NO: 24074 - DNA, 20 bp, Artificial Sequence
  Synthetic
ggctgcactggtgatggacg

SEQ ID NO: 24075 - DNA, 20 bp, Artificial Sequence
  Synthetic
ggtgaaggctgcactggtga

SEQ ID NO: 24076 - DNA, 20 bp, Artificial Sequence
  Synthetic
ccgcagggtgaaggctgcac

SEQ ID NO: 24077 - DNA, 20 bp, Artificial Sequence
  Synthetic
ccagtgcagccttcaccctg

SEQ ID NO: 24078 - DNA, 20 bp, Artificial Sequence
  Synthetic
tcactgggtccgcagggtga

SEQ ID NO: 24079 - DNA, 20 bp, Artificial Sequence
  Synthetic
cgccactcactgggtccgca

SEQ ID NO: 24080 - DNA, 20 bp, Artificial Sequence
  Synthetic
ccgccactcactgggtccgc

SEQ ID NO: 24081 - DNA, 20 bp, Artificial Sequence
  Synthetic
tctcacactcgtaggggtac

SEQ ID NO: 24082 - DNA, 20 bp, Artificial Sequence
  Synthetic
cccgcttctcacactcgtag

SEQ ID NO: 24083 - DNA, 20 bp, Artificial Sequence
  Synthetic
ccccgcttctcacactcgta

SEQ ID NO: 24084 - DNA, 20 bp, Artificial Sequence
  Synthetic
gccccgcttctcacactcgt

SEQ ID NO: 24085 - DNA, 20 bp, Artificial Sequence
  Synthetic
aactggacggtgatcctgaa

SEQ ID NO: 24086 - DNA, 20 bp, Artificial Sequence
  Synthetic
tcctgaaaggaaagagttcc

SEQ ID NO: 24087 - DNA, 20 bp, Artificial Sequence
  Synthetic
tccaggaactctttcctttc

SEQ ID NO: 24088 - DNA, 20 bp, Artificial Sequence
  Synthetic
taaagacgaagaggtcatcc

SEQ ID NO: 24089 - DNA, 20 bp, Artificial Sequence
  Synthetic
tcttctgcataaagacgaag

SEQ ID NO: 24090 - DNA, 20 bp, Artificial Sequence
  Synthetic
tcttcgtctttatgcagaag

SEQ ID NO: 24091 - DNA, 20 bp, Artificial Sequence
  Synthetic
cttcgtctttatgcagaaga

SEQ ID NO: 24092 - DNA, 20 bp, Artificial Sequence
  Synthetic
ttcgtctttatgcagaagag

SEQ ID NO: 24093 - DNA, 20 bp, Artificial Sequence
  Synthetic
gatggggattcggttgatgg

SEQ ID NO: 24094 - DNA, 20 bp, Artificial Sequence
  Synthetic
tgatggggattcggttgatg

SEQ ID NO: 24095 - DNA, 20 bp, Artificial Sequence
  Synthetic
atgatggggattcggttgat

SEQ ID NO: 24096 - DNA, 20 bp, Artificial Sequence
  Synthetic
catgatggggattcggttga

SEQ ID NO: 24097 - DNA, 20 bp, Artificial Sequence
  Synthetic
catcaaccgaatccccatca

SEQ ID NO: 24098 - DNA, 20 bp, Artificial Sequence
  Synthetic
gtttggccatgatggggatt

SEQ ID NO: 24099 - DNA, 20 bp, Artificial Sequence
  Synthetic
ggatctgtttggccatgatg

SEQ ID NO: 24100 - DNA, 20 bp, Artificial Sequence
  Synthetic
aggatctgtttggccatgat

SEQ ID NO: 24101 - DNA, 20 bp, Artificial Sequence
  Synthetic
caggatctgtttggccatga

SEQ ID NO: 24102 - DNA, 20 bp, Artificial Sequence
  Synthetic
catcatggccaaacagatcc

SEQ ID NO: 24103 - DNA, 20 bp, Artificial Sequence
  Synthetic
gtacaggtccaggatctgtt

SEQ ID NO: 24104 - DNA, 20 bp, Artificial Sequence
  Synthetic
tatacagcatgtacaggtcc

SEQ ID NO: 24105 - DNA, 20 bp, Artificial Sequence
  Synthetic
ccagcttatacagcatgtac

SEQ ID NO: 24106 - DNA, 20 bp, Artificial Sequence
  Synthetic
cctgtacatgctgtataagc

SEQ ID NO: 24107 - DNA, 20 bp, Artificial Sequence
  Synthetic
gtataagctggtgaccgaga

SEQ ID NO: 24108 - DNA, 20 bp, Artificial Sequence
  Synthetic
tataagctggtgaccgagaa

SEQ ID NO: 24109 - DNA, 20 bp, Artificial Sequence
  Synthetic
aagctggtgaccgagaaggg

SEQ ID NO: 24110 - DNA, 20 bp, Artificial Sequence
  Synthetic
ggtgaccgagaagggaggcc

SEQ ID NO: 24111 - DNA, 20 bp, Artificial Sequence
  Synthetic
gaccgagaagggaggcctgg

SEQ ID NO: 24112 - DNA, 20 bp, Artificial Sequence
  Synthetic
ctccaccaggcctcccttct

SEQ ID NO: 24113 - DNA, 20 bp, Artificial Sequence
  Synthetic
tcttgttgatgatctccacc

SEQ ID NO: 24114 - DNA, 20 bp, Artificial Sequence
  Synthetic
agatcatcaacaagaagatc

SEQ ID NO: 24115 - DNA, 20 bp, Artificial Sequence
  Synthetic
tcatcaacaagaagatctgg

SEQ ID NO: 24116 - DNA, 20 bp, Artificial Sequence
  Synthetic
catcaacaagaagatctgga

SEQ ID NO: 24117 - DNA, 20 bp, Artificial Sequence
  Synthetic
atctggagggagatcaccaa

SEQ ID NO: 24118 - DNA, 20 bp, Artificial Sequence
  Synthetic
tgtgggcaggtttaggcctt

SEQ ID NO: 24119 - DNA, 20 bp, Artificial Sequence
  Synthetic
tgatggatgtgggcaggttt

SEQ ID NO: 24120 - DNA, 20 bp, Artificial Sequence
  Synthetic
cgctggtgatggatgtgggc

SEQ ID NO: 24121 - DNA, 20 bp, Artificial Sequence
  Synthetic
gcggcgctggtgatggatgt

SEQ ID NO: 24122 - DNA, 20 bp, Artificial Sequence
  Synthetic
ggcggcgctggtgatggatg

SEQ ID NO: 24123 - DNA, 20 bp, Artificial Sequence
  Synthetic
ggtgaaggcggcgctggtga

SEQ ID NO: 24124 - DNA, 20 bp, Artificial Sequence
  Synthetic
cctgagggtgaaggcggcgc

SEQ ID NO: 24125 - DNA, 20 bp, Artificial Sequence
  Synthetic
ccagcgccgccttcaccctc

SEQ ID NO: 24126 - DNA, 20 bp, Artificial Sequence
  Synthetic
ctgcgtcctgagggtgaagg

SEQ ID NO: 24127 - DNA, 20 bp, Artificial Sequence
  Synthetic
tcactgcgtcctgagggtga

SEQ ID NO: 24128 - DNA, 20 bp, Artificial Sequence
  Synthetic
ggccactcactgcgtcctga

SEQ ID NO: 24129 - DNA, 20 bp, Artificial Sequence
  Synthetic
tggccactcactgcgtcctg

SEQ ID NO: 24130 - DNA, 20 bp, Artificial Sequence
  Synthetic
atacagatacttcatgtacc

SEQ ID NO: 24131 - DNA, 20 bp, Artificial Sequence
  Synthetic
ggctttcttctcacactcat

SEQ ID NO: 24132 - DNA, 20 bp, Artificial Sequence
  Synthetic
agctcgatgcagaccccaag

SEQ ID NO: 24133 - DNA, 20 bp, Artificial Sequence
  Synthetic
cgatgcagaccccaagagga

SEQ ID NO: 24134 - DNA, 20 bp, Artificial Sequence
  Synthetic
ccagaaattccttcctcttg

SEQ ID NO: 24135 - DNA, 20 bp, Artificial Sequence
  Synthetic
ccccaagaggaaggaatttc

SEQ ID NO: 24136 - DNA, 20 bp, Artificial Sequence
  Synthetic
tccagaaattccttcctctt

SEQ ID NO: 24137 - DNA, 20 bp, Artificial Sequence
  Synthetic
atccagaaattccttcctct

SEQ ID NO: 24138 - DNA, 20 bp, Artificial Sequence
  Synthetic
tcttttgcatgaagctaaac

SEQ ID NO: 24139 - DNA, 20 bp, Artificial Sequence
  Synthetic
tgtttagcttcatgcaaaag

SEQ ID NO: 24140 - DNA, 20 bp, Artificial Sequence
  Synthetic
gtttagcttcatgcaaaaga

SEQ ID NO: 24141 - DNA, 20 bp, Artificial Sequence
  Synthetic
tttagcttcatgcaaaagag

SEQ ID NO: 24142 - DNA, 20 bp, Artificial Sequence
  Synthetic
acgcggttcactggcgtccc

SEQ ID NO: 24143 - DNA, 20 bp, Artificial Sequence
  Synthetic
atgatgggcacgcggttcac

SEQ ID NO: 24144 - DNA, 20 bp, Artificial Sequence
  Synthetic
agtgaaccgcgtgcccatca

SEQ ID NO: 24145 - DNA, 20 bp, Artificial Sequence
  Synthetic
gcttcgccatgatgggcacg

SEQ ID NO: 24146 - DNA, 20 bp, Artificial Sequence
  Synthetic
cgtgcccatcatggcgaagc

SEQ ID NO: 24147 - DNA, 20 bp, Artificial Sequence
  Synthetic
agcacctgcttcgccatgat

SEQ ID NO: 24148 - DNA, 20 bp, Artificial Sequence
  Synthetic
gagcacctgcttcgccatga

SEQ ID NO: 24149 - DNA, 20 bp, Artificial Sequence
  Synthetic
ccaggcgaaacagagcgtac

SEQ ID NO: 24150 - DNA, 20 bp, Artificial Sequence
  Synthetic
cctgtacgctctgtttcgcc

SEQ ID NO: 24151 - DNA, 20 bp, Artificial Sequence
  Synthetic
gtttcgcctggtgaccgcca

SEQ ID NO: 24152 - DNA, 20 bp, Artificial Sequence
  Synthetic
tttcgcctggtgaccgccaa

SEQ ID NO: 24153 - DNA, 20 bp, Artificial Sequence
  Synthetic
cgcctggtgaccgccaaggg

SEQ ID NO: 24154 - DNA, 20 bp, Artificial Sequence
  Synthetic
ggccgcccttggcggtcacc

SEQ ID NO: 24155 - DNA, 20 bp, Artificial Sequence
  Synthetic
ggtgaccgccaagggcggcc

SEQ ID NO: 24156 - DNA, 20 bp, Artificial Sequence
  Synthetic
gaccgccaagggcggcctgg

SEQ ID NO: 24157 - DNA, 20 bp, Artificial Sequence
  Synthetic
ttccaccaggccgcccttgg

SEQ ID NO: 24158 - DNA, 20 bp, Artificial Sequence
  Synthetic
gacttccaccaggccgccct

SEQ ID NO: 24159 - DNA, 20 bp, Artificial Sequence
  Synthetic
tgcggttgatgacttccacc

SEQ ID NO: 24160 - DNA, 20 bp, Artificial Sequence
  Synthetic
aagtcatcaaccgcaaagtg

SEQ ID NO: 24161 - DNA, 20 bp, Artificial Sequence
  Synthetic
tcatcaaccgcaaagtgtgg

SEQ ID NO: 24162 - DNA, 20 bp, Artificial Sequence
  Synthetic
catcaaccgcaaagtgtggc

SEQ ID NO: 24163 - DNA, 20 bp, Artificial Sequence
  Synthetic
tgacttcccgccacactttg

SEQ ID NO: 24164 - DNA, 20 bp, Artificial Sequence
  Synthetic
gtgtggcgggaagtcacgcg

SEQ ID NO: 24165 - DNA, 20 bp, Artificial Sequence
  Synthetic
tgatggtggtgggtaggctg

SEQ ID NO: 24166 - DNA, 20 bp, Artificial Sequence
  Synthetic
ccgaggtgatggtggtgggt

SEQ ID NO: 24167 - DNA, 20 bp, Artificial Sequence
  Synthetic
cctacccaccaccatcacct

SEQ ID NO: 24168 - DNA, 20 bp, Artificial Sequence
  Synthetic
gcggccgaggtgatggtggt

SEQ ID NO: 24169 - DNA, 20 bp, Artificial Sequence
  Synthetic
ggcggccgaggtgatggtgg

SEQ ID NO: 24170 - DNA, 20 bp, Artificial Sequence
  Synthetic
gaaggcggccgaggtgatgg

SEQ ID NO: 24171 - DNA, 20 bp, Artificial Sequence
  Synthetic
agtgaaggcggccgaggtga

SEQ ID NO: 24172 - DNA, 20 bp, Artificial Sequence
  Synthetic
gcgtagagtgaaggcggccg

SEQ ID NO: 24173 - DNA, 20 bp, Artificial Sequence
  Synthetic
ctgggtgcgtagagtgaagg

SEQ ID NO: 24174 - DNA, 20 bp, Artificial Sequence
  Synthetic
tcactgggtgcgtagagtga

SEQ ID NO: 24175 - DNA, 20 bp, Artificial Sequence
  Synthetic
tctcgcactcgtacgggtac

SEQ ID NO: 24176 - DNA, 20 bp, Artificial Sequence
  Synthetic
ctcgagtctcgcactcgtac

SEQ ID NO: 24177 - DNA, 20 bp, Artificial Sequence
  Synthetic
gctcgagtctcgcactcgta

SEQ ID NO: 24178 - DNA, 20 bp, Artificial Sequence
  Synthetic
aagaacttgatcctgaagag

SEQ ID NO: 24179 - DNA, 20 bp, Artificial Sequence
  Synthetic
agaacttgatcctgaagaga

SEQ ID NO: 24180 - DNA, 20 bp, Artificial Sequence
  Synthetic
aggaagttgtccctctcttc

SEQ ID NO: 24181 - DNA, 20 bp, Artificial Sequence
  Synthetic
taaacttataaagctgctgg

SEQ ID NO: 24182 - DNA, 20 bp, Artificial Sequence
  Synthetic
ccataaacttataaagctgc

SEQ ID NO: 24183 - DNA, 20 bp, Artificial Sequence
  Synthetic
ccagcagctttataagttta

SEQ ID NO: 24184 - DNA, 20 bp, Artificial Sequence
  Synthetic
tataagtttatggaagacag

SEQ ID NO: 24185 - DNA, 20 bp, Artificial Sequence
  Synthetic
aaaacaggtggtttgttgat

SEQ ID NO: 24186 - DNA, 20 bp, Artificial Sequence
  Synthetic
aatcaacaaaccacctgttt

SEQ ID NO: 24187 - DNA, 20 bp, Artificial Sequence
  Synthetic
atcaacaaaccacctgtttt

SEQ ID NO: 24188 - DNA, 20 bp, Artificial Sequence
  Synthetic
tctttatagcccaaaacagg

SEQ ID NO: 24189 - DNA, 20 bp, Artificial Sequence
  Synthetic
agatctttatagcccaaaac

SEQ ID NO: 24190 - DNA, 20 bp, Artificial Sequence
  Synthetic
tctcttcaaactcttcagac

SEQ ID NO: 24191 - DNA, 20 bp, Artificial Sequence
  Synthetic
cttcagactggtttatcatc

SEQ ID NO: 24192 - DNA, 20 bp, Artificial Sequence
  Synthetic
ttcagactggtttatcatca

SEQ ID NO: 24193 - DNA, 20 bp, Artificial Sequence
  Synthetic
agactggtttatcatcaggg

SEQ ID NO: 24194 - DNA, 20 bp, Artificial Sequence
  Synthetic
ttaattttccagattgatag

SEQ ID NO: 24195 - DNA, 20 bp, Artificial Sequence
  Synthetic
atacagcaccactatcaatc

SEQ ID NO: 24196 - DNA, 20 bp, Artificial Sequence
  Synthetic
agattgatagtggtgctgta

SEQ ID NO: 24197 - DNA, 20 bp, Artificial Sequence
  Synthetic
tgtatggaagcaaatttata

SEQ ID NO: 24198 - DNA, 20 bp, Artificial Sequence
  Synthetic
aagcaaatttatatggacct

SEQ ID NO: 24199 - DNA, 20 bp, Artificial Sequence
  Synthetic
aattcaaaataggaatgcca

SEQ ID NO: 24200 - DNA, 20 bp, Artificial Sequence
  Synthetic
gaagcagctgaattcaaaat

SEQ ID NO: 24201 - DNA, 20 bp, Artificial Sequence
  Synthetic
ataagcagtttttacattgt

SEQ ID NO: 24202 - DNA, 20 bp, Artificial Sequence
  Synthetic
tgtttgtttaggtatctcta

SEQ ID NO: 24203 - DNA, 20 bp, Artificial Sequence
  Synthetic
taggtatctctatggttttg

SEQ ID NO: 24204 - DNA, 20 bp, Artificial Sequence
  Synthetic
ctttcactttggttcctgtt

SEQ ID NO: 24205 - DNA, 20 bp, Artificial Sequence
  Synthetic
accaaagtgaaagtaaaata

SEQ ID NO: 24206 - DNA, 20 bp, Artificial Sequence
  Synthetic
tccatattttactttcactt

SEQ ID NO: 24207 - DNA, 20 bp, Artificial Sequence
  Synthetic
gtgaaagtaaaatatggacg

SEQ ID NO: 24208 - DNA, 20 bp, Artificial Sequence
  Synthetic
tgaaagtaaaatatggacga

SEQ ID NO: 24209 - DNA, 20 bp, Artificial Sequence
  Synthetic
aatttcagtgcttttaatac

SEQ ID NO: 24210 - DNA, 20 bp, Artificial Sequence
  Synthetic
aaaagcactgaaattgatga

SEQ ID NO: 24211 - DNA, 20 bp, Artificial Sequence
  Synthetic
tgacggagaagttttatatt

SEQ ID NO: 24212 - DNA, 20 bp, Artificial Sequence
  Synthetic
ttatatttggtacattacta

SEQ ID NO: 24213 - DNA, 20 bp, Artificial Sequence
  Synthetic
atttggtacattactatgga

SEQ ID NO: 24214 - DNA, 20 bp, Artificial Sequence
  Synthetic
attactatggatggaatgtc

SEQ ID NO: 24215 - DNA, 20 bp, Artificial Sequence
  Synthetic
tttttttaaggtatgatgag

SEQ ID NO: 24216 - DNA, 20 bp, Artificial Sequence
  Synthetic
ttttttaaggtatgatgagt

SEQ ID NO: 24217 - DNA, 20 bp, Artificial Sequence
  Synthetic
aaggtatgatgagtgggtga

SEQ ID NO: 24218 - DNA, 20 bp, Artificial Sequence
  Synthetic
atgagtgggtgaaggctgac

SEQ ID NO: 24219 - DNA, 20 bp, Artificial Sequence
  Synthetic
tgaaggctgacaggataatc

SEQ ID NO: 24220 - DNA, 20 bp, Artificial Sequence
  Synthetic
tagaaccatttccagaagaa

SEQ ID NO: 24221 - DNA, 20 bp, Artificial Sequence
  Synthetic
agaaccatttccagaagaaa

SEQ ID NO: 24222 - DNA, 20 bp, Artificial Sequence
  Synthetic
agaaagttctccctttcttc

SEQ ID NO: 24223 - DNA, 20 bp, Artificial Sequence
  Synthetic
tcagcaattgtacaaattta

SEQ ID NO: 24224 - DNA, 20 bp, Artificial Sequence
  Synthetic
tacaaatttatggaagatag

SEQ ID NO: 24225 - DNA, 20 bp, Artificial Sequence
  Synthetic
agtacaggtcgtttgttaat

SEQ ID NO: 24226 - DNA, 20 bp, Artificial Sequence
  Synthetic
attaacaaacgacctgtact

SEQ ID NO: 24227 - DNA, 20 bp, Artificial Sequence
  Synthetic
aaatttcgatatccaagtac

SEQ ID NO: 24228 - DNA, 20 bp, Artificial Sequence
  Synthetic
ttcagacttgtacacaaact

SEQ ID NO: 24229 - DNA, 20 bp, Artificial Sequence
  Synthetic
agacttgtacacaaacttgg

SEQ ID NO: 24230 - DNA, 20 bp, Artificial Sequence
  Synthetic
tttgtccattagattgaaag

SEQ ID NO: 24231 - DNA, 20 bp, Artificial Sequence
  Synthetic
agattgaaagtggagctgtt

SEQ ID NO: 24232 - DNA, 20 bp, Artificial Sequence
  Synthetic
aaacaagtctaccaagatct

SEQ ID NO: 24233 - DNA, 20 bp, Artificial Sequence
  Synthetic
agacagggattccaagatct

SEQ ID NO: 24234 - DNA, 20 bp, Artificial Sequence
  Synthetic
ctgcagctgaatttaagaca

SEQ ID NO: 24235 - DNA, 20 bp, Artificial Sequence
  Synthetic
cctgcagctgaatttaagac

SEQ ID NO: 24236 - DNA, 20 bp, Artificial Sequence
  Synthetic
cctgtcttaaattcagctgc

SEQ ID NO: 24237 - DNA, 20 bp, Artificial Sequence
  Synthetic
catgtttccagatacttata

SEQ ID NO: 24238 - DNA, 20 bp, Artificial Sequence
  Synthetic
ctcaaaaccatataagtatc

SEQ ID NO: 24239 - DNA, 20 bp, Artificial Sequence
  Synthetic
cagatacttatatggttttg

SEQ ID NO: 24240 - DNA, 20 bp, Artificial Sequence
  Synthetic
cgcacttggactttcatgcc

SEQ ID NO: 24241 - DNA, 20 bp, Artificial Sequence
  Synthetic
caggcatgaaagtccaagtg

SEQ ID NO: 24242 - DNA, 20 bp, Artificial Sequence
  Synthetic
atgaaagtccaagtgcggta

SEQ ID NO: 24243 - DNA, 20 bp, Artificial Sequence
  Synthetic
gtccaagtgcggtatggacg

SEQ ID NO: 24244 - DNA, 20 bp, Artificial Sequence
  Synthetic
tccaagtgcggtatggacga

SEQ ID NO: 24245 - DNA, 20 bp, Artificial Sequence
  Synthetic
tccctcgtccataccgcact

SEQ ID NO: 24246 - DNA, 20 bp, Artificial Sequence
  Synthetic
attaaagattctgatgtcga

SEQ ID NO: 24247 - DNA, 20 bp, Artificial Sequence
  Synthetic
aaagattctgatgtcgaagg

SEQ ID NO: 24248 - DNA, 20 bp, Artificial Sequence
  Synthetic
ttctgatgtcgaaggtggag

SEQ ID NO: 24249 - DNA, 20 bp, Artificial Sequence
  Synthetic
aggtggagaggtcctttact

SEQ ID NO: 24250 - DNA, 20 bp, Artificial Sequence
  Synthetic
cgcagtaatgcaccaagtaa

SEQ ID NO: 24251 - DNA, 20 bp, Artificial Sequence
  Synthetic
ctttacttggtgcattactg

SEQ ID NO: 24252 - DNA, 20 bp, Artificial Sequence
  Synthetic
acttggtgcattactgcgga

SEQ ID NO: 24253 - DNA, 20 bp, Artificial Sequence
  Synthetic
attactgcggatggaatgtg

SEQ ID NO: 24254 - DNA, 20 bp, Artificial Sequence
  Synthetic
ttaattttagatacgatgaa

SEQ ID NO: 24255 - DNA, 20 bp, Artificial Sequence
  Synthetic
agcgggaggaggagcaggag

SEQ ID NO: 24256 - DNA, 20 bp, Artificial Sequence
  Synthetic
gcgggaggaggagcaggagc

SEQ ID NO: 24257 - DNA, 20 bp, Artificial Sequence
  Synthetic
ggaggaggagcaggagcggg

SEQ ID NO: 24258 - DNA, 20 bp, Artificial Sequence
  Synthetic
ggaggagcaggagcgggagg

SEQ ID NO: 24259 - DNA, 20 bp, Artificial Sequence
  Synthetic
gcaggagcgggaggaggagc

SEQ ID NO: 24260 - DNA, 20 bp, Artificial Sequence
  Synthetic
ggaggaggagcaggccttcc

SEQ ID NO: 24261 - DNA, 20 bp, Artificial Sequence
  Synthetic
cttgtagaggctgaccagga

SEQ ID NO: 24262 - DNA, 20 bp, Artificial Sequence
  Synthetic
tgaacttgtagaggctgacc

SEQ ID NO: 24263 - DNA, 20 bp, Artificial Sequence
  Synthetic
cagcctctacaagttcatga

SEQ ID NO: 24264 - DNA, 20 bp, Artificial Sequence
  Synthetic
gctccttcatgaacttgtag

SEQ ID NO: 24265 - DNA, 20 bp, Artificial Sequence
  Synthetic
agcgacacacgcccatcgag

SEQ ID NO: 24266 - DNA, 20 bp, Artificial Sequence
  Synthetic
gcgacacacgcccatcgaga

SEQ ID NO: 24267 - DNA, 20 bp, Artificial Sequence
  Synthetic
agatggggcaccctctcgat

SEQ ID NO: 24268 - DNA, 20 bp, Artificial Sequence
  Synthetic
gagatggggcaccctctcga

SEQ ID NO: 24269 - DNA, 20 bp, Artificial Sequence
  Synthetic
atcgagagggtgccccatct

SEQ ID NO: 24270 - DNA, 20 bp, Artificial Sequence
  Synthetic
ctctgcttgaagccgagatg

SEQ ID NO: 24271 - DNA, 20 bp, Artificial Sequence
  Synthetic
actctgcttgaagccgagat

SEQ ID NO: 24272 - DNA, 20 bp, Artificial Sequence
  Synthetic
cactctgcttgaagccgaga

SEQ ID NO: 24273 - DNA, 20 bp, Artificial Sequence
  Synthetic
tctctcccccagttaacctg

SEQ ID NO: 24274 - DNA, 20 bp, Artificial Sequence
  Synthetic
tagatcttccacaggttaac

SEQ ID NO: 24275 - DNA, 20 bp, Artificial Sequence
  Synthetic
ctgctttgtagatcttccac

SEQ ID NO: 24276 - DNA, 20 bp, Artificial Sequence
  Synthetic
gtggaagatctacaaagcag

SEQ ID NO: 24277 - DNA, 20 bp, Artificial Sequence
  Synthetic
ctacaaagcagtggagaagc

SEQ ID NO: 24278 - DNA, 20 bp, Artificial Sequence
  Synthetic
tacaaagcagtggagaagct

SEQ ID NO: 24279 - DNA, 20 bp, Artificial Sequence
  Synthetic
acaaagcagtggagaagctg

SEQ ID NO: 24280 - DNA, 20 bp, Artificial Sequence
  Synthetic
caaagcagtggagaagctgg

SEQ ID NO: 24281 - DNA, 20 bp, Artificial Sequence
  Synthetic
gaagctgggggcctatgagc

SEQ ID NO: 24282 - DNA, 20 bp, Artificial Sequence
  Synthetic
tgccttccttaccagctcat

SEQ ID NO: 24283 - DNA, 20 bp, Artificial Sequence
  Synthetic
gaggtgcccttgcaggtgac

SEQ ID NO: 24284 - DNA, 20 bp, Artificial Sequence
  Synthetic
aggtgcccttgcaggtgacc

SEQ ID NO: 24285 - DNA, 20 bp, Artificial Sequence
  Synthetic
aggtgaccgggcgccgcctc

SEQ ID NO: 24286 - DNA, 20 bp, Artificial Sequence
  Synthetic
gttcttccagaggcggcgcc

SEQ ID NO: 24287 - DNA, 20 bp, Artificial Sequence
  Synthetic
cgtacacgttcttccagagg

SEQ ID NO: 24288 - DNA, 20 bp, Artificial Sequence
  Synthetic
cgtcgtacacgttcttccag

SEQ ID NO: 24289 - DNA, 20 bp, Artificial Sequence
  Synthetic
gaagaacgtgtacgacgagc

SEQ ID NO: 24290 - DNA, 20 bp, Artificial Sequence
  Synthetic
aagaacgtgtacgacgagct

SEQ ID NO: 24291 - DNA, 20 bp, Artificial Sequence
  Synthetic
agaacgtgtacgacgagctg

SEQ ID NO: 24292 - DNA, 20 bp, Artificial Sequence
  Synthetic
gaacgtgtacgacgagctgg

SEQ ID NO: 24293 - DNA, 20 bp, Artificial Sequence
  Synthetic
aacgtgtacgacgagctggg

SEQ ID NO: 24294 - DNA, 20 bp, Artificial Sequence
  Synthetic
gacgagctggggggcagccc

SEQ ID NO: 24295 - DNA, 20 bp, Artificial Sequence
  Synthetic
cagcccaggcagcaccagcg

SEQ ID NO: 24296 - DNA, 20 bp, Artificial Sequence
  Synthetic
tggccgcgctggtgctgcct

SEQ ID NO: 24297 - DNA, 20 bp, Artificial Sequence
  Synthetic
gtggccgcgctggtgctgcc

SEQ ID NO: 24298 - DNA, 20 bp, Artificial Sequence
  Synthetic
gcgcgtgcacgtggccgcgc

SEQ ID NO: 24299 - DNA, 20 bp, Artificial Sequence
  Synthetic
gtagtggcggcgcgtgcacg

SEQ ID NO: 24300 - DNA, 20 bp, Artificial Sequence
  Synthetic
gcacgcgccgccactacgag

SEQ ID NO: 24301 - DNA, 20 bp, Artificial Sequence
  Synthetic
cgccgtacctctcgtagtgg

SEQ ID NO: 24302 - DNA, 20 bp, Artificial Sequence
  Synthetic
ccccgccgtacctctcgtag

SEQ ID NO: 24303 - DNA, 20 bp, Artificial Sequence
  Synthetic
cacgtatggcaggaccagcc

SEQ ID NO: 24304 - DNA, 20 bp, Artificial Sequence
  Synthetic
tcaggtgccgcacgtatggc

SEQ ID NO: 24305 - DNA, 20 bp, Artificial Sequence
  Synthetic
cccttcaggtgccgcacgta

SEQ ID NO: 24306 - DNA, 20 bp, Artificial Sequence
  Synthetic
ggcagatgaacaagccttct

SEQ ID NO: 24307 - DNA, 20 bp, Artificial Sequence
  Synthetic
agatgaacaagccttcttgg

SEQ ID NO: 24308 - DNA, 20 bp, Artificial Sequence
  Synthetic
tttataaagtgccaccaaga

SEQ ID NO: 24309 - DNA, 20 bp, Artificial Sequence
  Synthetic
tttataaatacatgaaagaa

SEQ ID NO: 24310 - DNA, 20 bp, Artificial Sequence
  Synthetic
aaatagggtattcgttctat

SEQ ID NO: 24311 - DNA, 20 bp, Artificial Sequence
  Synthetic
atagaacgaataccctattt

SEQ ID NO: 24312 - DNA, 20 bp, Artificial Sequence
  Synthetic
ctctgtttaaaacctaaata

SEQ ID NO: 24313 - DNA, 20 bp, Artificial Sequence
  Synthetic
actctgtttaaaacctaaat

SEQ ID NO: 24314 - DNA, 20 bp, Artificial Sequence
  Synthetic
tccctctaacagttaacctt

SEQ ID NO: 24315 - DNA, 20 bp, Artificial Sequence
  Synthetic
cagcttgaaacatagtccaa

SEQ ID NO: 24316 - DNA, 20 bp, Artificial Sequence
  Synthetic
gtttcaagctgctcaaaaac

SEQ ID NO: 24317 - DNA, 20 bp, Artificial Sequence
  Synthetic
tttcaagctgctcaaaaact

SEQ ID NO: 24318 - DNA, 20 bp, Artificial Sequence
  Synthetic
caagctgctcaaaaactggg

SEQ ID NO: 24319 - DNA, 20 bp, Artificial Sequence
  Synthetic
agataacagcccgccgtcag

SEQ ID NO: 24320 - DNA, 20 bp, Artificial Sequence
  Synthetic
aatatgtttccactgacggc

SEQ ID NO: 24321 - DNA, 20 bp, Artificial Sequence
  Synthetic
aaatatgtttccactgacgg

SEQ ID NO: 24322 - DNA, 20 bp, Artificial Sequence
  Synthetic
cataaatatgtttccactga

SEQ ID NO: 24323 - DNA, 20 bp, Artificial Sequence
  Synthetic
aaacatatttatgatgaatt

SEQ ID NO: 24324 - DNA, 20 bp, Artificial Sequence
  Synthetic
catatttatgatgaattagg

SEQ ID NO: 24325 - DNA, 20 bp, Artificial Sequence
  Synthetic
gatgaattaggcggtaatcc

SEQ ID NO: 24326 - DNA, 20 bp, Artificial Sequence
  Synthetic
atgaattaggcggtaatcct

SEQ ID NO: 24327 - DNA, 20 bp, Artificial Sequence
  Synthetic
gtggcagcgctggtgctccc

SEQ ID NO: 24328 - DNA, 20 bp, Artificial Sequence
  Synthetic
gcgggtacaagtggcagcgc

SEQ ID NO: 24329 - DNA, 20 bp, Artificial Sequence
  Synthetic
ataatgtctgcgggtacaag

SEQ ID NO: 24330 - DNA, 20 bp, Artificial Sequence
  Synthetic
gtacccgcagacattatgaa

SEQ ID NO: 24331 - DNA, 20 bp, Artificial Sequence
  Synthetic
ttacctttcataatgtctgc

SEQ ID NO: 24332 - DNA, 20 bp, Artificial Sequence
  Synthetic
cttacctttcataatgtctg

SEQ ID NO: 24333 - DNA, 20 bp, Artificial Sequence
  Synthetic
taataaatctttcatatggt

SEQ ID NO: 24334 - DNA, 20 bp, Artificial Sequence
  Synthetic
cctttaataaatctttcata

SEQ ID NO: 24335 - DNA, 20 bp, Artificial Sequence
  Synthetic
tttttttcaaaatatggcaa

SEQ ID NO: 24336 - DNA, 20 bp, Artificial Sequence
  Synthetic
tcaaaatatggcaaaggttc

SEQ ID NO: 24337 - DNA, 20 bp, Artificial Sequence
  Synthetic
ggttcaggtgaacaatgtag

SEQ ID NO: 24338 - DNA, 20 bp, Artificial Sequence
  Synthetic
ggtgaacaatgtagtggtgc

SEQ ID NO: 24339 - DNA, 20 bp, Artificial Sequence
  Synthetic
acgggttgtagaaaggagaa

SEQ ID NO: 24340 - DNA, 20 bp, Artificial Sequence
  Synthetic
aacgggttgtagaaaggaga

SEQ ID NO: 24341 - DNA, 20 bp, Artificial Sequence
  Synthetic
aactggaacgggttgtagaa

SEQ ID NO: 24342 - DNA, 20 bp, Artificial Sequence
  Synthetic
aggtgatctcgaactggaac

SEQ ID NO: 24343 - DNA, 20 bp, Artificial Sequence
  Synthetic
aaggtgatctcgaactggaa

SEQ ID NO: 24344 - DNA, 20 bp, Artificial Sequence
  Synthetic
actcgaaggtgatctcgaac

SEQ ID NO: 24345 - DNA, 20 bp, Artificial Sequence
  Synthetic
gatcaccttcgagtgcatcg

SEQ ID NO: 24346 - DNA, 20 bp, Artificial Sequence
  Synthetic
caggtcctcgatgcactcga

SEQ ID NO: 24347 - DNA, 20 bp, Artificial Sequence
  Synthetic
tgcatcgaggacctgtctga

SEQ ID NO: 24348 - DNA, 20 bp, Artificial Sequence
  Synthetic
cgccgcactcaccttcagac

SEQ ID NO: 24349 - DNA, 20 bp, Artificial Sequence
  Synthetic
ttttaaccctagacttggaa

SEQ ID NO: 24350 - DNA, 20 bp, Artificial Sequence
  Synthetic
ggaatggaaaattatctatg

SEQ ID NO: 24351 - DNA, 20 bp, Artificial Sequence
  Synthetic
gaatggaaaattatctatgt

SEQ ID NO: 24352 - DNA, 20 bp, Artificial Sequence
  Synthetic
agttttagactctgttttag

SEQ ID NO: 24353 - DNA, 20 bp, Artificial Sequence
  Synthetic
gttttagactctgttttagt

SEQ ID NO: 24354 - DNA, 20 bp, Artificial Sequence
  Synthetic
ttagtgggtcctgttcccgc

SEQ ID NO: 24355 - DNA, 20 bp, Artificial Sequence
  Synthetic
tgggtcctgttcccgcagga

SEQ ID NO: 24356 - DNA, 20 bp, Artificial Sequence
  Synthetic
atatgccttcctgcgggaac

SEQ ID NO: 24357 - DNA, 20 bp, Artificial Sequence
  Synthetic
acaaacatatgccttcctgc

SEQ ID NO: 24358 - DNA, 20 bp, Artificial Sequence
  Synthetic
tacaaacatatgccttcctg

SEQ ID NO: 24359 - DNA, 20 bp, Artificial Sequence
  Synthetic
aaggcatatgtttgtatttc

SEQ ID NO: 24360 - DNA, 20 bp, Artificial Sequence
  Synthetic
taggctgatgcacctaatcc

SEQ ID NO: 24361 - DNA, 20 bp, Artificial Sequence
  Synthetic
tctggaatgagtcctggatt

SEQ ID NO: 24362 - DNA, 20 bp, Artificial Sequence
  Synthetic
tctgcatctggaatgagtcc

SEQ ID NO: 24363 - DNA, 20 bp, Artificial Sequence
  Synthetic
attccagatgcagatgcagt

SEQ ID NO: 24364 - DNA, 20 bp, Artificial Sequence
  Synthetic
acgcctactgcatctgcatc

SEQ ID NO: 24365 - DNA, 20 bp, Artificial Sequence
  Synthetic
ctaattacttgtacctatcg

SEQ ID NO: 24366 - DNA, 20 bp, Artificial Sequence
  Synthetic
aataaattcttgtcctcgat

SEQ ID NO: 24367 - DNA, 20 bp, Artificial Sequence
  Synthetic
ggacaagaatttattagagt

SEQ ID NO: 24368 - DNA, 20 bp, Artificial Sequence
  Synthetic
aatatactgagacagaatta

SEQ ID NO: 24369 - DNA, 20 bp, Artificial Sequence
  Synthetic
atatactgagacagaattaa

SEQ ID NO: 24370 - DNA, 20 bp, Artificial Sequence
  Synthetic
gaaaagtctggttttactgg

SEQ ID NO: 24371 - DNA, 20 bp, Artificial Sequence
  Synthetic
ttagaaaagtctggttttac

SEQ ID NO: 24372 - DNA, 20 bp, Artificial Sequence
  Synthetic
agtaaaaccagacttttcta

SEQ ID NO: 24373 - DNA, 20 bp, Artificial Sequence
  Synthetic
aacattaccttagaaaagtc

SEQ ID NO: 24374 - DNA, 20 bp, Artificial Sequence
  Synthetic
cctttttcctctagcttcaa

SEQ ID NO: 24375 - DNA, 20 bp, Artificial Sequence
  Synthetic
ctagcttcaaaggaatattt

SEQ ID NO: 24376 - DNA, 20 bp, Artificial Sequence
  Synthetic
atattttggcatctaatccc

SEQ ID NO: 24377 - DNA, 20 bp, Artificial Sequence
  Synthetic
tattttggcatctaatccca

SEQ ID NO: 24378 - DNA, 20 bp, Artificial Sequence
  Synthetic
atgtggaatcttgtgaccct

SEQ ID NO: 24379 - DNA, 20 bp, Artificial Sequence
  Synthetic
aatgtggaatcttgtgaccc

SEQ ID NO: 24380 - DNA, 20 bp, Artificial Sequence
  Synthetic
tcacaagattccacattaat

SEQ ID NO: 24381 - DNA, 20 bp, Artificial Sequence
  Synthetic
cacaagattccacattaatt

SEQ ID NO: 24382 - DNA, 20 bp, Artificial Sequence
  Synthetic
tgttatcttcccaattaatg

SEQ ID NO: 24383 - DNA, 20 bp, Artificial Sequence
  Synthetic
gcgaggcgaggcgatggcca

SEQ ID NO: 24384 - DNA, 20 bp, Artificial Sequence
  Synthetic
cgaggcgatggccaaggtgt

SEQ ID NO: 24385 - DNA, 20 bp, Artificial Sequence
  Synthetic
cacgttcagcaccgacacct

SEQ ID NO: 24386 - DNA, 20 bp, Artificial Sequence
  Synthetic
caaggtgtcggtgctgaacg

SEQ ID NO: 24387 - DNA, 20 bp, Artificial Sequence
  Synthetic
ggtgtcggtgctgaacgtgg

SEQ ID NO: 24388 - DNA, 20 bp, Artificial Sequence
  Synthetic
ggtgctgaacgtggcggtcc

SEQ ID NO: 24389 - DNA, 20 bp, Artificial Sequence
  Synthetic
ggaaagggctcgggttctcc

SEQ ID NO: 24390 - DNA, 20 bp, Artificial Sequence
  Synthetic
aggggctgtggaaagggctc

SEQ ID NO: 24391 - DNA, 20 bp, Artificial Sequence
  Synthetic
aaggggctgtggaaagggct

SEQ ID NO: 24392 - DNA, 20 bp, Artificial Sequence
  Synthetic
gccctttccacagccccttc

SEQ ID NO: 24393 - DNA, 20 bp, Artificial Sequence
  Synthetic
accggaaggggctgtggaaa

SEQ ID NO: 24394 - DNA, 20 bp, Artificial Sequence
  Synthetic
aaccggaaggggctgtggaa

SEQ ID NO: 24395 - DNA, 20 bp, Artificial Sequence
  Synthetic
tctcgaaccggaaggggctg

SEQ ID NO: 24396 - DNA, 20 bp, Artificial Sequence
  Synthetic
agctgatctcgaaccggaag

SEQ ID NO: 24397 - DNA, 20 bp, Artificial Sequence
  Synthetic
aagctgatctcgaaccggaa

SEQ ID NO: 24398 - DNA, 20 bp, Artificial Sequence
  Synthetic
gaagctgatctcgaaccgga

SEQ ID NO: 24399 - DNA, 20 bp, Artificial Sequence
  Synthetic
actcgaagctgatctcgaac

SEQ ID NO: 24400 - DNA, 20 bp, Artificial Sequence
  Synthetic
cttcgagtgcagtgaagccc

SEQ ID NO: 24401 - DNA, 20 bp, Artificial Sequence
  Synthetic
cgagtgcagtgaagccctgg

SEQ ID NO: 24402 - DNA, 20 bp, Artificial Sequence
  Synthetic
tgcagtgaagccctggcgga

SEQ ID NO: 24403 - DNA, 20 bp, Artificial Sequence
  Synthetic
cccagcctcaccgtccgcca

SEQ ID NO: 24404 - DNA, 20 bp, Artificial Sequence
  Synthetic
gcccagcctcaccgtccgcc

SEQ ID NO: 24405 - DNA, 20 bp, Artificial Sequence
  Synthetic
atatctttgcagacctggag

SEQ ID NO: 24406 - DNA, 20 bp, Artificial Sequence
  Synthetic
cataaatgatcttccactcc

SEQ ID NO: 24407 - DNA, 20 bp, Artificial Sequence
  Synthetic
gagtggaagatcatttatgt

SEQ ID NO: 24408 - DNA, 20 bp, Artificial Sequence
  Synthetic
gaagatcatttatgttggct

SEQ ID NO: 24409 - DNA, 20 bp, Artificial Sequence
  Synthetic
tgttggctcggctgagagtg

SEQ ID NO: 24410 - DNA, 20 bp, Artificial Sequence
  Synthetic
atttgatcagatcctagact

SEQ ID NO: 24411 - DNA, 20 bp, Artificial Sequence
  Synthetic
tcagatcctagactcggtgc

SEQ ID NO: 24412 - DNA, 20 bp, Artificial Sequence
  Synthetic
gatcctagactcggtgctgg

SEQ ID NO: 24413 - DNA, 20 bp, Artificial Sequence
  Synthetic
atcctagactcggtgctggt

SEQ ID NO: 24414 - DNA, 20 bp, Artificial Sequence
  Synthetic
ggcccaccagcaccgagtct

SEQ ID NO: 24415 - DNA, 20 bp, Artificial Sequence
  Synthetic
ctggtgggccctgtgccagc

SEQ ID NO: 24416 - DNA, 20 bp, Artificial Sequence
  Synthetic
tggtgggccctgtgccagca

SEQ ID NO: 24417 - DNA, 20 bp, Artificial Sequence
  Synthetic
tgtgtctccctgctggcaca

SEQ ID NO: 24418 - DNA, 20 bp, Artificial Sequence
  Synthetic
atgtgtctccctgctggcac

SEQ ID NO: 24419 - DNA, 20 bp, Artificial Sequence
  Synthetic
acaaacatgtgtctccctgc

SEQ ID NO: 24420 - DNA, 20 bp, Artificial Sequence
  Synthetic
gagacacatgtttgtctttc

SEQ ID NO: 24421 - DNA, 20 bp, Artificial Sequence
  Synthetic
gagggatgggttgggggcgt

SEQ ID NO: 24422 - DNA, 20 bp, Artificial Sequence
  Synthetic
tgggatgagggatgggttgg

SEQ ID NO: 24423 - DNA, 20 bp, Artificial Sequence
  Synthetic
ctgggatgagggatgggttg

SEQ ID NO: 24424 - DNA, 20 bp, Artificial Sequence
  Synthetic
tctgggatgagggatgggtt

SEQ ID NO: 24425 - DNA, 20 bp, Artificial Sequence
  Synthetic
ctctgggatgagggatgggt

SEQ ID NO: 24426 - DNA, 20 bp, Artificial Sequence
  Synthetic
cagtctctgggatgagggat

SEQ ID NO: 24427 - DNA, 20 bp, Artificial Sequence
  Synthetic
tcagtctctgggatgaggga

SEQ ID NO: 24428 - DNA, 20 bp, Artificial Sequence
  Synthetic
ggcatcagtctctgggatga

SEQ ID NO: 24429 - DNA, 20 bp, Artificial Sequence
  Synthetic
cggcatcagtctctgggatg

SEQ ID NO: 24430 - DNA, 20 bp, Artificial Sequence
  Synthetic
catcccagagactgatgccg

SEQ ID NO: 24431 - DNA, 20 bp, Artificial Sequence
  Synthetic
atcccagagactgatgccgt

SEQ ID NO: 24432 - DNA, 20 bp, Artificial Sequence
  Synthetic
cacccacggcatcagtctct

SEQ ID NO: 24433 - DNA, 20 bp, Artificial Sequence
  Synthetic
acacccacggcatcagtctc

SEQ ID NO: 24434 - DNA, 20 bp, Artificial Sequence
  Synthetic
tgatgccgtgggtgtgactg

SEQ ID NO: 24435 - DNA, 20 bp, Artificial Sequence
  Synthetic
gaggaccacagtcacaccca

SEQ ID NO: 24436 - DNA, 20 bp, Artificial Sequence
  Synthetic
catggtaggtgcaggtgatg

SEQ ID NO: 24437 - DNA, 20 bp, Artificial Sequence
  Synthetic
ctcatcacctgcacctacca

SEQ ID NO: 24438 - DNA, 20 bp, Artificial Sequence
  Synthetic
cacctgcacctaccatggac

SEQ ID NO: 24439 - DNA, 20 bp, Artificial Sequence
  Synthetic
ctcctgtccatggtaggtgc

SEQ ID NO: 24440 - DNA, 20 bp, Artificial Sequence
  Synthetic
gatgaactcctgtccatggt

SEQ ID NO: 24441 - DNA, 20 bp, Artificial Sequence
  Synthetic
ctcggatgaactcctgtcca

SEQ ID NO: 24442 - DNA, 20 bp, Artificial Sequence
  Synthetic
tggacaggagttcatccgag

SEQ ID NO: 24443 - DNA, 20 bp, Artificial Sequence
  Synthetic
ggacaggagttcatccgagt

SEQ ID NO: 24444 - DNA, 20 bp, Artificial Sequence
  Synthetic
tgttgacgtagtagcccact

SEQ ID NO: 24445 - DNA, 20 bp, Artificial Sequence
  Synthetic
tctcacgcagctcagggttg

SEQ ID NO: 24446 - DNA, 20 bp, Artificial Sequence
  Synthetic
gcgggttctcacgcagctca

SEQ ID NO: 24447 - DNA, 20 bp, Artificial Sequence
  Synthetic
ggcgggttctcacgcagctc

SEQ ID NO: 24448 - DNA, 20 bp, Artificial Sequence
  Synthetic
agaaatctggcttcatgggc

SEQ ID NO: 24449 - DNA, 20 bp, Artificial Sequence
  Synthetic
gagaaatctggcttcatggg

SEQ ID NO: 24450 - DNA, 20 bp, Artificial Sequence
  Synthetic
tgggagaaatctggcttcat

SEQ ID NO: 24451 - DNA, 20 bp, Artificial Sequence
  Synthetic
ctgggagaaatctggcttca

SEQ ID NO: 24452 - DNA, 20 bp, Artificial Sequence
  Synthetic
catgaagccagatttctccc

SEQ ID NO: 24453 - DNA, 20 bp, Artificial Sequence
  Synthetic
gaagccagatttctcccagg

SEQ ID NO: 24454 - DNA, 20 bp, Artificial Sequence
  Synthetic
aagccagatttctcccaggt

SEQ ID NO: 24455 - DNA, 20 bp, Artificial Sequence
  Synthetic
ggccccacctgggagaaatc

SEQ ID NO: 24456 - DNA, 20 bp, Artificial Sequence
  Synthetic
tcttcctgccccagctccag

SEQ ID NO: 24457 - DNA, 20 bp, Artificial Sequence
  Synthetic
ccaagatgttccgctggagc

SEQ ID NO: 24458 - DNA, 20 bp, Artificial Sequence
  Synthetic
ccagctccagcggaacatct

SEQ ID NO: 24459 - DNA, 20 bp, Artificial Sequence
  Synthetic
tcgaggccaagatgttccgc

SEQ ID NO: 24460 - DNA, 20 bp, Artificial Sequence
  Synthetic
acatcttggcctcgaacccc

SEQ ID NO: 24461 - DNA, 20 bp, Artificial Sequence
  Synthetic
catcttggcctcgaaccccc

SEQ ID NO: 24462 - DNA, 20 bp, Artificial Sequence
  Synthetic
gcgggtcacccgggggttcg

SEQ ID NO: 24463 - DNA, 20 bp, Artificial Sequence
  Synthetic
tatggaagcgggtcacccgg

SEQ ID NO: 24464 - DNA, 20 bp, Artificial Sequence
  Synthetic
atatggaagcgggtcacccg

SEQ ID NO: 24465 - DNA, 20 bp, Artificial Sequence
  Synthetic
gatatggaagcgggtcaccc

SEQ ID NO: 24466 - DNA, 20 bp, Artificial Sequence
  Synthetic
tgatatggaagcgggtcacc

SEQ ID NO: 24467 - DNA, 20 bp, Artificial Sequence
  Synthetic
tgacccgcttccatatcaac

SEQ ID NO: 24468 - DNA, 20 bp, Artificial Sequence
  Synthetic
gacccgcttccatatcaact

SEQ ID NO: 24469 - DNA, 20 bp, Artificial Sequence
  Synthetic
gtcccagttgatatggaagc

SEQ ID NO: 24470 - DNA, 20 bp, Artificial Sequence
  Synthetic
tgtcccagttgatatggaag

SEQ ID NO: 24471 - DNA, 20 bp, Artificial Sequence
  Synthetic
tgttgttgtcccagttgata

SEQ ID NO: 24472 - DNA, 20 bp, Artificial Sequence
  Synthetic
atcttcaaagaaatttgtga

SEQ ID NO: 24473 - DNA, 20 bp, Artificial Sequence
  Synthetic
gatggtatcatctcttataa

SEQ ID NO: 24474 - DNA, 20 bp, Artificial Sequence
  Synthetic
attcttttgcagattcttcc

SEQ ID NO: 24475 - DNA, 20 bp, Artificial Sequence
  Synthetic
agattcttcccggcaagcac

SEQ ID NO: 24476 - DNA, 20 bp, Artificial Sequence
  Synthetic
tggagctgccagtgcttgcc

SEQ ID NO: 24477 - DNA, 20 bp, Artificial Sequence
  Synthetic
gtggagctgccagtgcttgc

SEQ ID NO: 24478 - DNA, 20 bp, Artificial Sequence
  Synthetic
tttgggggaaggttcaaaag

SEQ ID NO: 24479 - DNA, 20 bp, Artificial Sequence
  Synthetic
cctactttttctttggggga

SEQ ID NO: 24480 - DNA, 20 bp, Artificial Sequence
  Synthetic
ccttcccccaaagaaaaagt

SEQ ID NO: 24481 - DNA, 20 bp, Artificial Sequence
  Synthetic
tgaacctactttttctttgg

SEQ ID NO: 24482 - DNA, 20 bp, Artificial Sequence
  Synthetic
gtgaacctactttttctttg

SEQ ID NO: 24483 - DNA, 20 bp, Artificial Sequence
  Synthetic
tgtgaacctactttttcttt

SEQ ID NO: 24484 - DNA, 20 bp, Artificial Sequence
  Synthetic
atgtgaacctactttttctt

SEQ ID NO: 24485 - DNA, 20 bp, Artificial Sequence
  Synthetic
ctcataataatcagcattcc

SEQ ID NO: 24486 - DNA, 20 bp, Artificial Sequence
  Synthetic
tctatggtgataagatctag

SEQ ID NO: 24487 - DNA, 20 bp, Artificial Sequence
  Synthetic
ctctatggtgataagatcta

SEQ ID NO: 24488 - DNA, 20 bp, Artificial Sequence
  Synthetic
tctctatggtgataagatct

SEQ ID NO: 24489 - DNA, 20 bp, Artificial Sequence
  Synthetic
agtgaggatctgcttctcta

SEQ ID NO: 24490 - DNA, 20 bp, Artificial Sequence
  Synthetic
atagagaagcagatcctcac

SEQ ID NO: 24491 - DNA, 20 bp, Artificial Sequence
  Synthetic
ctgtcttatagtaaccagtg

SEQ ID NO: 24492 - DNA, 20 bp, Artificial Sequence
  Synthetic
cactggttactataagacag

SEQ ID NO: 24493 - DNA, 20 bp, Artificial Sequence
  Synthetic
ctgacatgctcaaagtcttt

SEQ ID NO: 24494 - DNA, 20 bp, Artificial Sequence
  Synthetic
caaagtctttcggaatgctg

SEQ ID NO: 24495 - DNA, 20 bp, Artificial Sequence
  Synthetic
tgctttcttcagaagtacta

SEQ ID NO: 24496 - DNA, 20 bp, Artificial Sequence
  Synthetic
gctttcttcagaagtactat

SEQ ID NO: 24497 - DNA, 20 bp, Artificial Sequence
  Synthetic
tatgggcgtaaatccccagt

SEQ ID NO: 24498 - DNA, 20 bp, Artificial Sequence
  Synthetic
atgggcgtaaatccccagtt

SEQ ID NO: 24499 - DNA, 20 bp, Artificial Sequence
  Synthetic
acaaacatctctcccaactg

SEQ ID NO: 24500 - DNA, 20 bp, Artificial Sequence
  Synthetic
gacaaacatctctcccaact

SEQ ID NO: 24501 - DNA, 20 bp, Artificial Sequence
  Synthetic
cgacaaacatctctcccaac

SEQ ID NO: 24502 - DNA, 20 bp, Artificial Sequence
  Synthetic
ttcgagctgaggaaaaaggt

SEQ ID NO: 24503 - DNA, 20 bp, Artificial Sequence
  Synthetic
tcgagctgaggaaaaaggtt

SEQ ID NO: 24504 - DNA, 20 bp, Artificial Sequence
  Synthetic
cgagctgaggaaaaaggttg

SEQ ID NO: 24505 - DNA, 20 bp, Artificial Sequence
  Synthetic
accaaagagcccctaaaagc

SEQ ID NO: 24506 - DNA, 20 bp, Artificial Sequence
  Synthetic
cccagcttttaggggctctt

SEQ ID NO: 24507 - DNA, 20 bp, Artificial Sequence
  Synthetic
ccaaagagcccctaaaagct

SEQ ID NO: 24508 - DNA, 20 bp, Artificial Sequence
  Synthetic
atgaactgcccagcttttag

SEQ ID NO: 24509 - DNA, 20 bp, Artificial Sequence
  Synthetic
gatgaactgcccagctttta

SEQ ID NO: 24510 - DNA, 20 bp, Artificial Sequence
  Synthetic
tgatgaactgcccagctttt

SEQ ID NO: 24511 - DNA, 20 bp, Artificial Sequence
  Synthetic
cagttcatcattgaatacct

SEQ ID NO: 24512 - DNA, 20 bp, Artificial Sequence
  Synthetic
agttcatcattgaataccta

SEQ ID NO: 24513 - DNA, 20 bp, Artificial Sequence
  Synthetic
gttcatcattgaatacctag

SEQ ID NO: 24514 - DNA, 20 bp, Artificial Sequence
  Synthetic
catcattgaatacctagggg

SEQ ID NO: 24515 - DNA, 20 bp, Artificial Sequence
  Synthetic
gttcactgacgacctcccct

SEQ ID NO: 24516 - DNA, 20 bp, Artificial Sequence
  Synthetic
aggggaggtcgtcagtgaac

SEQ ID NO: 24517 - DNA, 20 bp, Artificial Sequence
  Synthetic
tcgtcagtgaacaggagttc

SEQ ID NO: 24518 - DNA, 20 bp, Artificial Sequence
  Synthetic
tttatcttctctttaggaac

SEQ ID NO: 24519 - DNA, 20 bp, Artificial Sequence
  Synthetic
tgaccactactgcctgaacc

SEQ ID NO: 24520 - DNA, 20 bp, Artificial Sequence
  Synthetic
tatccaggttcaggcagtag

SEQ ID NO: 24521 - DNA, 20 bp, Artificial Sequence
  Synthetic
tactgcctgaacctggatag

SEQ ID NO: 24522 - DNA, 20 bp, Artificial Sequence
  Synthetic
actgcctgaacctggatagt

SEQ ID NO: 24523 - DNA, 20 bp, Artificial Sequence
  Synthetic
ccatcccactatccaggttc

SEQ ID NO: 24524 - DNA, 20 bp, Artificial Sequence
  Synthetic
cctgaacctggatagtggga

SEQ ID NO: 24525 - DNA, 20 bp, Artificial Sequence
  Synthetic
caatcaccatcccactatcc

SEQ ID NO: 24526 - DNA, 20 bp, Artificial Sequence
  Synthetic
ggtgattgacagttaccgca

SEQ ID NO: 24527 - DNA, 20 bp, Artificial Sequence
  Synthetic
gtgattgacagttaccgcat

SEQ ID NO: 24528 - DNA, 20 bp, Artificial Sequence
  Synthetic
cagttaccgcatgggaaatg

SEQ ID NO: 24529 - DNA, 20 bp, Artificial Sequence
  Synthetic
atcgggcctcatttcccatg

SEQ ID NO: 24530 - DNA, 20 bp, Artificial Sequence
  Synthetic
acagctatggttgatgaatc

SEQ ID NO: 24531 - DNA, 20 bp, Artificial Sequence
  Synthetic
cacagctatggttgatgaat

SEQ ID NO: 24532 - DNA, 20 bp, Artificial Sequence
  Synthetic
cacaatttgggtcacagcta

SEQ ID NO: 24533 - DNA, 20 bp, Artificial Sequence
  Synthetic
atttctgcatttcacaattt

SEQ ID NO: 24534 - DNA, 20 bp, Artificial Sequence
  Synthetic
catttctgcatttcacaatt

SEQ ID NO: 24535 - DNA, 20 bp, Artificial Sequence
  Synthetic
caaattgtgaaatgcagaaa

SEQ ID NO: 24536 - DNA, 20 bp, Artificial Sequence
  Synthetic
tctctttacaggtctgttaa

SEQ ID NO: 24537 - DNA, 20 bp, Artificial Sequence
  Synthetic
ggtctgttaatggagtatac

SEQ ID NO: 24538 - DNA, 20 bp, Artificial Sequence
  Synthetic
gttaatggagtataccggat

SEQ ID NO: 24539 - DNA, 20 bp, Artificial Sequence
  Synthetic
taagagcatagagtccaatc

SEQ ID NO: 24540 - DNA, 20 bp, Artificial Sequence
  Synthetic
gctcttaaagacatgccagc

SEQ ID NO: 24541 - DNA, 20 bp, Artificial Sequence
  Synthetic
ctcttaaagacatgccagct

SEQ ID NO: 24542 - DNA, 20 bp, Artificial Sequence
  Synthetic
taagtgagttcagtcccagc

SEQ ID NO: 24543 - DNA, 20 bp, Artificial Sequence
  Synthetic
agatgacttgctgcttcgtc

SEQ ID NO: 24544 - DNA, 20 bp, Artificial Sequence
  Synthetic
gatgacttgctgcttcgtca

SEQ ID NO: 24545 - DNA, 20 bp, Artificial Sequence
  Synthetic
gtgactgtgtgtatctgatg

SEQ ID NO: 24546 - DNA, 20 bp, Artificial Sequence
  Synthetic
tgactgtgtgtatctgatga

SEQ ID NO: 24547 - DNA, 20 bp, Artificial Sequence
  Synthetic
tgtatctgatgagggatagt

SEQ ID NO: 24548 - DNA, 20 bp, Artificial Sequence
  Synthetic
gatagtcggcgcacccctga

SEQ ID NO: 24549 - DNA, 20 bp, Artificial Sequence
  Synthetic
gcgcacccctgatggccacc

SEQ ID NO: 24550 - DNA, 20 bp, Artificial Sequence
  Synthetic
acggaccgggtggccatcag

SEQ ID NO: 24551 - DNA, 20 bp, Artificial Sequence
  Synthetic
gacggaccgggtggccatca

SEQ ID NO: 24552 - DNA, 20 bp, Artificial Sequence
  Synthetic
tgacggaccgggtggccatc

SEQ ID NO: 24553 - DNA, 20 bp, Artificial Sequence
  Synthetic
gataggactgacggaccggg

SEQ ID NO: 24554 - DNA, 20 bp, Artificial Sequence
  Synthetic
gtcgataggactgacggacc

SEQ ID NO: 24555 - DNA, 20 bp, Artificial Sequence
  Synthetic
agtcgataggactgacggac

SEQ ID NO: 24556 - DNA, 20 bp, Artificial Sequence
  Synthetic
ataacagtcgataggactga

SEQ ID NO: 24557 - DNA, 20 bp, Artificial Sequence
  Synthetic
aatgtgagataacagtcgat

SEQ ID NO: 24558 - DNA, 20 bp, Artificial Sequence
  Synthetic
gaaagatgtcaagtttatct

SEQ ID NO: 24559 - DNA, 20 bp, Artificial Sequence
  Synthetic
tctttcgcattgagaagctt

SEQ ID NO: 24560 - DNA, 20 bp, Artificial Sequence
  Synthetic
tccattgttttagagaggaa

SEQ ID NO: 24561 - DNA, 20 bp, Artificial Sequence
  Synthetic
agagaggaacggtttgcctt

SEQ ID NO: 24562 - DNA, 20 bp, Artificial Sequence
  Synthetic
acggaaataatggtgaccaa

SEQ ID NO: 24563 - DNA, 20 bp, Artificial Sequence
  Synthetic
tttcgtggggacggaaataa

SEQ ID NO: 24564 - DNA, 20 bp, Artificial Sequence
  Synthetic
agtggtgtgtttcgtgggga

SEQ ID NO: 24565 - DNA, 20 bp, Artificial Sequence
  Synthetic
ggagagtggtgtgtttcgtg

SEQ ID NO: 24566 - DNA, 20 bp, Artificial Sequence
  Synthetic
tggagagtggtgtgtttcgt

SEQ ID NO: 24567 - DNA, 20 bp, Artificial Sequence
  Synthetic
atggagagtggtgtgtttcg

SEQ ID NO: 24568 - DNA, 20 bp, Artificial Sequence
  Synthetic
cacaccactctccatcccgt

SEQ ID NO: 24569 - DNA, 20 bp, Artificial Sequence
  Synthetic
agaaccgacgggatggagag

SEQ ID NO: 24570 - DNA, 20 bp, Artificial Sequence
  Synthetic
ttatgatagaaccgacggga

SEQ ID NO: 24571 - DNA, 20 bp, Artificial Sequence
  Synthetic
ttcattatgatagaaccgac

SEQ ID NO: 24572 - DNA, 20 bp, Artificial Sequence
  Synthetic
gttcattatgatagaaccga

SEQ ID NO: 24573 - DNA, 20 bp, Artificial Sequence
  Synthetic
tctatcataatgaactattt

SEQ ID NO: 24574 - DNA, 20 bp, Artificial Sequence
  Synthetic
ctatcataatgaactatttc

SEQ ID NO: 24575 - DNA, 20 bp, Artificial Sequence
  Synthetic
aagggaatgatctcatagag

SEQ ID NO: 24576 - DNA, 20 bp, Artificial Sequence
  Synthetic
actctatgagatcattccct

SEQ ID NO: 24577 - DNA, 20 bp, Artificial Sequence
  Synthetic
ctatgagatcattcccttgg

SEQ ID NO: 24578 - DNA, 20 bp, Artificial Sequence
  Synthetic
cattcccttggaggctgtag

SEQ ID NO: 24579 - DNA, 20 bp, Artificial Sequence
  Synthetic
attcccttggaggctgtagt

SEQ ID NO: 24580 - DNA, 20 bp, Artificial Sequence
  Synthetic
ttcccttggaggctgtagtg

SEQ ID NO: 24581 - DNA, 20 bp, Artificial Sequence
  Synthetic
gtccccactacagcctccaa

SEQ ID NO: 24582 - DNA, 20 bp, Artificial Sequence
  Synthetic
ggtccccactacagcctcca

SEQ ID NO: 24583 - DNA, 20 bp, Artificial Sequence
  Synthetic
agtggggacctgctgtgtgt

SEQ ID NO: 24584 - DNA, 20 bp, Artificial Sequence
  Synthetic
ataaaggtccaacacacagc

SEQ ID NO: 24585 - DNA, 20 bp, Artificial Sequence
  Synthetic
gacctttatacgtattgtaa

SEQ ID NO: 24586 - DNA, 20 bp, Artificial Sequence
  Synthetic
tacctttacaatacgtataa

SEQ ID NO: 24587 - DNA, 20 bp, Artificial Sequence
  Synthetic
ggacccatagggagacccaa

SEQ ID NO: 24588 - DNA, 20 bp, Artificial Sequence
  Synthetic
agggagacccaaaggagtaa

SEQ ID NO: 24589 - DNA, 20 bp, Artificial Sequence
  Synthetic
tcttgctcctttactccttt

SEQ ID NO: 24590 - DNA, 20 bp, Artificial Sequence
  Synthetic
atcttgctcctttactcctt

SEQ ID NO: 24591 - DNA, 20 bp, Artificial Sequence
  Synthetic
atgtgtacatctgtgattat

SEQ ID NO: 24592 - DNA, 20 bp, Artificial Sequence
  Synthetic
tccggtggatcttgtaaaac

SEQ ID NO: 24593 - DNA, 20 bp, Artificial Sequence
  Synthetic
gatgttattcgctgtatctg

SEQ ID NO: 24594 - DNA, 20 bp, Artificial Sequence
  Synthetic
ctgtatctgtggcctctaca

SEQ ID NO: 24595 - DNA, 20 bp, Artificial Sequence
  Synthetic
tgtggcctctacaaggatga

SEQ ID NO: 24596 - DNA, 20 bp, Artificial Sequence
  Synthetic
tgagaccttcatccttgtag

SEQ ID NO: 24597 - DNA, 20 bp, Artificial Sequence
  Synthetic
gatccagtgtgacaagtgca

SEQ ID NO: 24598 - DNA, 20 bp, Artificial Sequence
  Synthetic
tcaccatgcacttgtcacac

SEQ ID NO: 24599 - DNA, 20 bp, Artificial Sequence
  Synthetic
atggcagcactgtgattgta

SEQ ID NO: 24600 - DNA, 20 bp, Artificial Sequence
  Synthetic
tggcagcactgtgattgtat

SEQ ID NO: 24601 - DNA, 20 bp, Artificial Sequence
  Synthetic
tatgggagtgaactcagatg

SEQ ID NO: 24602 - DNA, 20 bp, Artificial Sequence
  Synthetic
ttgggtcacactgctcacaa

SEQ ID NO: 24603 - DNA, 20 bp, Artificial Sequence
  Synthetic
tttgtgagcagtgtgaccca

SEQ ID NO: 24604 - DNA, 20 bp, Artificial Sequence
  Synthetic
tacagaggttgtttgtttta

SEQ ID NO: 24605 - DNA, 20 bp, Artificial Sequence
  Synthetic
acagaggttgtttgttttat

SEQ ID NO: 24606 - DNA, 20 bp, Artificial Sequence
  Synthetic
tgtttgttttatgggccacc

SEQ ID NO: 24607 - DNA, 20 bp, Artificial Sequence
  Synthetic
ttttatgggccacctggaac

SEQ ID NO: 24608 - DNA, 20 bp, Artificial Sequence
  Synthetic
agagtctttccagttccagg

SEQ ID NO: 24609 - DNA, 20 bp, Artificial Sequence
  Synthetic
acctggaactggaaagactc

SEQ ID NO: 24610 - DNA, 20 bp, Artificial Sequence
  Synthetic
accagagtctttccagttcc

SEQ ID NO: 24611 - DNA, 20 bp, Artificial Sequence
  Synthetic
gcactcattggcaagtgctc

SEQ ID NO: 24612 - DNA, 20 bp, Artificial Sequence
  Synthetic
cttgccaatgagtgcagtca

SEQ ID NO: 24613 - DNA, 20 bp, Artificial Sequence
  Synthetic
ttgccaatgagtgcagtcaa

SEQ ID NO: 24614 - DNA, 20 bp, Artificial Sequence
  Synthetic
tgccaatgagtgcagtcaag

SEQ ID NO: 24615 - DNA, 20 bp, Artificial Sequence
  Synthetic
atccccttgactgcactcat

SEQ ID NO: 24616 - DNA, 20 bp, Artificial Sequence
  Synthetic
aaagagtagcatttttcatg

SEQ ID NO: 24617 - DNA, 20 bp, Artificial Sequence
  Synthetic
gtagcatttttcatgaggaa

SEQ ID NO: 24618 - DNA, 20 bp, Artificial Sequence
  Synthetic
gtgctgattgtctaagtaaa

SEQ ID NO: 24619 - DNA, 20 bp, Artificial Sequence
  Synthetic
tgctgattgtctaagtaaat

SEQ ID NO: 24620 - DNA, 20 bp, Artificial Sequence
  Synthetic
gattgtctaagtaaatgggt

SEQ ID NO: 24621 - DNA, 20 bp, Artificial Sequence
  Synthetic
gctacgattgctgtttgatc

SEQ ID NO: 24622 - DNA, 20 bp, Artificial Sequence
  Synthetic
aattgatgggcgcatctgat

SEQ ID NO: 24623 - DNA, 20 bp, Artificial Sequence
  Synthetic
cgtcaaaaaaaataattgat

SEQ ID NO: 24624 - DNA, 20 bp, Artificial Sequence
  Synthetic
tcgtcaaaaaaaataattga

SEQ ID NO: 24625 - DNA, 20 bp, Artificial Sequence
  Synthetic
attttttttgacgaaattga

SEQ ID NO: 24626 - DNA, 20 bp, Artificial Sequence
  Synthetic
ttttgacgaaattgatggtc

SEQ ID NO: 24627 - DNA, 20 bp, Artificial Sequence
  Synthetic
ttgatggtctggctccagta

SEQ ID NO: 24628 - DNA, 20 bp, Artificial Sequence
  Synthetic
tggctccagtacggtcaagc

SEQ ID NO: 24629 - DNA, 20 bp, Artificial Sequence
  Synthetic
tcttgcctgcttgaccgtac

SEQ ID NO: 24630 - DNA, 20 bp, Artificial Sequence
  Synthetic
gcaggcaagatcagattcac

SEQ ID NO: 24631 - DNA, 20 bp, Artificial Sequence
  Synthetic
ttccaccctgctagctctta

SEQ ID NO: 24632 - DNA, 20 bp, Artificial Sequence
  Synthetic
atccataagagctagcaggg

SEQ ID NO: 24633 - DNA, 20 bp, Artificial Sequence
  Synthetic
accctgctagctcttatgga

SEQ ID NO: 24634 - DNA, 20 bp, Artificial Sequence
  Synthetic
tccatccataagagctagca

SEQ ID NO: 24635 - DNA, 20 bp, Artificial Sequence
  Synthetic
atccatccataagagctagc

SEQ ID NO: 24636 - DNA, 20 bp, Artificial Sequence
  Synthetic
gctagctcttatggatggat

SEQ ID NO: 24637 - DNA, 20 bp, Artificial Sequence
  Synthetic
atggatggattggacagcag

SEQ ID NO: 24638 - DNA, 20 bp, Artificial Sequence
  Synthetic
tggatggattggacagcaga

SEQ ID NO: 24639 - DNA, 20 bp, Artificial Sequence
  Synthetic
ggatggattggacagcagag

SEQ ID NO: 24640 - DNA, 20 bp, Artificial Sequence
  Synthetic
ggacagcagaggggaaattg

SEQ ID NO: 24641 - DNA, 20 bp, Artificial Sequence
  Synthetic
agaggggaaattgtggtcat

SEQ ID NO: 24642 - DNA, 20 bp, Artificial Sequence
  Synthetic
tggtcattggtgctacgaac

SEQ ID NO: 24643 - DNA, 20 bp, Artificial Sequence
  Synthetic
ctatagatcctgctttacga

SEQ ID NO: 24644 - DNA, 20 bp, Artificial Sequence
  Synthetic
gatcctgctttacgaaggcc

SEQ ID NO: 24645 - DNA, 20 bp, Artificial Sequence
  Synthetic
cgaccaggccttcgtaaagc

SEQ ID NO: 24646 - DNA, 20 bp, Artificial Sequence
  Synthetic
aattctctatcaaagcgacc

SEQ ID NO: 24647 - DNA, 20 bp, Artificial Sequence
  Synthetic
ctttatcaggcaggctaaag

SEQ ID NO: 24648 - DNA, 20 bp, Artificial Sequence
  Synthetic
caacaggcttagtaaacact

SEQ ID NO: 24649 - DNA, 20 bp, Artificial Sequence
  Synthetic
taagcctgttgaccctgatg

SEQ ID NO: 24650 - DNA, 20 bp, Artificial Sequence
  Synthetic
aatacctcatcagggtcaac

SEQ ID NO: 24651 - DNA, 20 bp, Artificial Sequence
  Synthetic
attaaactaatacctcatca

SEQ ID NO: 24652 - DNA, 20 bp, Artificial Sequence
  Synthetic
gattaaactaatacctcatc

SEQ ID NO: 24653 - DNA, 20 bp, Artificial Sequence
  Synthetic
tttattacagtgacataatc

SEQ ID NO: 24654 - DNA, 20 bp, Artificial Sequence
  Synthetic
cactgtaataaagcaaccaa

SEQ ID NO: 24655 - DNA, 20 bp, Artificial Sequence
  Synthetic
attacagatgaaaggtccat

SEQ ID NO: 24656 - DNA, 20 bp, Artificial Sequence
  Synthetic
ttttactgattacagatgaa

SEQ ID NO: 24657 - DNA, 20 bp, Artificial Sequence
  Synthetic
tctatctggattgtattcta

SEQ ID NO: 24658 - DNA, 20 bp, Artificial Sequence
  Synthetic
tacaatccagatagagatcc

SEQ ID NO: 24659 - DNA, 20 bp, Artificial Sequence
  Synthetic
tcacctccaggatctctatc

SEQ ID NO: 24660 - DNA, 20 bp, Artificial Sequence
  Synthetic
tctaggggctgtttgtttta

SEQ ID NO: 24661 - DNA, 20 bp, Artificial Sequence
  Synthetic
tgtttgttttatggccctcc

SEQ ID NO: 24662 - DNA, 20 bp, Artificial Sequence
  Synthetic
ttttatggccctcctggcac

SEQ ID NO: 24663 - DNA, 20 bp, Artificial Sequence
  Synthetic
aggttttacctgtgccagga

SEQ ID NO: 24664 - DNA, 20 bp, Artificial Sequence
  Synthetic
aaggttttacctgtgccagg

SEQ ID NO: 24665 - DNA, 20 bp, Artificial Sequence
  Synthetic
tcctggcacaggtaaaacct

SEQ ID NO: 24666 - DNA, 20 bp, Artificial Sequence
  Synthetic
accaaggttttacctgtgcc

SEQ ID NO: 24667 - DNA, 20 bp, Artificial Sequence
  Synthetic
agctaatgctctggcaacca

SEQ ID NO: 24668 - DNA, 20 bp, Artificial Sequence
  Synthetic
gcattcattagctaatgctc

SEQ ID NO: 24669 - DNA, 20 bp, Artificial Sequence
  Synthetic
ttagctaatgaatgcagcca

SEQ ID NO: 24670 - DNA, 20 bp, Artificial Sequence
  Synthetic
cagccaaggagacaaaaaag

SEQ ID NO: 24671 - DNA, 20 bp, Artificial Sequence
  Synthetic
aagccacttttttgtctcct

SEQ ID NO: 24672 - DNA, 20 bp, Artificial Sequence
  Synthetic
gtggctttttttatgcgaaa

SEQ ID NO: 24673 - DNA, 20 bp, Artificial Sequence
  Synthetic
gagcagattgtttgagcaag

SEQ ID NO: 24674 - DNA, 20 bp, Artificial Sequence
  Synthetic
agcagattgtttgagcaagt

SEQ ID NO: 24675 - DNA, 20 bp, Artificial Sequence
  Synthetic
gattgtttgagcaagtgggt

SEQ ID NO: 24676 - DNA, 20 bp, Artificial Sequence
  Synthetic
agtgggttggtgaatctgaa

SEQ ID NO: 24677 - DNA, 20 bp, Artificial Sequence
  Synthetic
gtgaatctgaaaggcaactt

SEQ ID NO: 24678 - DNA, 20 bp, Artificial Sequence
  Synthetic
acttaggcttctttttgatc

SEQ ID NO: 24679 - DNA, 20 bp, Artificial Sequence
  Synthetic
tcatcaaaaaatattataga

SEQ ID NO: 24680 - DNA, 20 bp, Artificial Sequence
  Synthetic
atattttttgatgaaataga

SEQ ID NO: 24681 - DNA, 20 bp, Artificial Sequence
  Synthetic
tcttgtctgctagagcgaac

SEQ ID NO: 24682 - DNA, 20 bp, Artificial Sequence
  Synthetic
gcagacaagatcagatccac

SEQ ID NO: 24683 - DNA, 20 bp, Artificial Sequence
  Synthetic
agataaagaaaaattacctg

SEQ ID NO: 24684 - DNA, 20 bp, Artificial Sequence
  Synthetic
atcaaccctccttgctctta

SEQ ID NO: 24685 - DNA, 20 bp, Artificial Sequence
  Synthetic
accctccttgctcttatgga

SEQ ID NO: 24686 - DNA, 20 bp, Artificial Sequence
  Synthetic
tccatccataagagcaagga

SEQ ID NO: 24687 - DNA, 20 bp, Artificial Sequence
  Synthetic
atccatccataagagcaagg

SEQ ID NO: 24688 - DNA, 20 bp, Artificial Sequence
  Synthetic
ctaatccatccataagagca

SEQ ID NO: 24689 - DNA, 20 bp, Artificial Sequence
  Synthetic
ttatggatggattagataat

SEQ ID NO: 24690 - DNA, 20 bp, Artificial Sequence
  Synthetic
tatggatggattagataata

SEQ ID NO: 24691 - DNA, 20 bp, Artificial Sequence
  Synthetic
atggatggattagataatag

SEQ ID NO: 24692 - DNA, 20 bp, Artificial Sequence
  Synthetic
aggggtgaaattgttgttat

SEQ ID NO: 24693 - DNA, 20 bp, Artificial Sequence
  Synthetic
actctatagatcctgcactc

SEQ ID NO: 24694 - DNA, 20 bp, Artificial Sequence
  Synthetic
gatcctgcactcaggagacc

SEQ ID NO: 24695 - DNA, 20 bp, Artificial Sequence
  Synthetic
cgaccaggtctcctgagtgc

SEQ ID NO: 24696 - DNA, 20 bp, Artificial Sequence
  Synthetic
aattctctgtcaaaacgacc

SEQ ID NO: 24697 - DNA, 20 bp, Artificial Sequence
  Synthetic
tttgatcaggcaggttgaag

SEQ ID NO: 24698 - DNA, 20 bp, Artificial Sequence
  Synthetic
ttctcagggatgtaaccaag

SEQ ID NO: 24699 - DNA, 20 bp, Artificial Sequence
  Synthetic
cagggatgtaaccaagaggc

SEQ ID NO: 24700 - DNA, 20 bp, Artificial Sequence
  Synthetic
tttatctgtggccagcctct

SEQ ID NO: 24701 - DNA, 20 bp, Artificial Sequence
  Synthetic
gatgttaaagcgtttatctg

SEQ ID NO: 24702 - DNA, 20 bp, Artificial Sequence
  Synthetic
ctttaacatcttcagcaaac

SEQ ID NO: 24703 - DNA, 20 bp, Artificial Sequence
  Synthetic
taacatcttcagcaaaccgg

SEQ ID NO: 24704 - DNA, 20 bp, Artificial Sequence
  Synthetic
caaaccggtggatattgaag

SEQ ID NO: 24705 - DNA, 20 bp, Artificial Sequence
  Synthetic
aagacctcttcaatatccac

SEQ ID NO: 24706 - DNA, 20 bp, Artificial Sequence
  Synthetic
agattatcttgaagtaatca

SEQ ID NO: 24707 - DNA, 20 bp, Artificial Sequence
  Synthetic
tgaagtaatcaaggaaccaa

SEQ ID NO: 24708 - DNA, 20 bp, Artificial Sequence
  Synthetic
attactgttgataagtccat

SEQ ID NO: 24709 - DNA, 20 bp, Artificial Sequence
  Synthetic
acataattacctgactgcaa

SEQ ID NO: 24710 - DNA, 20 bp, Artificial Sequence
  Synthetic
tcaggaaatcctttgcagtc

SEQ ID NO: 24711 - DNA, 20 bp, Artificial Sequence
  Synthetic
agatgaggtcaatatctttc

SEQ ID NO: 24712 - DNA, 20 bp, Artificial Sequence
  Synthetic
ctaaagcattgctacagatg

SEQ ID NO: 24713 - DNA, 20 bp, Artificial Sequence
  Synthetic
tttagagtataatccagata

SEQ ID NO: 24714 - DNA, 20 bp, Artificial Sequence
  Synthetic
tataatccagataaggaccc

SEQ ID NO: 24715 - DNA, 20 bp, Artificial Sequence
  Synthetic
aatccagataaggacccagg

SEQ ID NO: 24716 - DNA, 20 bp, Artificial Sequence
  Synthetic
ttacctcctgggtccttatc

SEQ ID NO: 24717 - DNA, 20 bp, Artificial Sequence
  Synthetic
ttgaaaccccatcaagtaga

SEQ ID NO: 24718 - DNA, 20 bp, Artificial Sequence
  Synthetic
ttcttaccatctacttgatg

SEQ ID NO: 24719 - DNA, 20 bp, Artificial Sequence
  Synthetic
tttcttaccatctacttgat

SEQ ID NO: 24720 - DNA, 20 bp, Artificial Sequence
  Synthetic
gtttcttaccatctacttga

SEQ ID NO: 24721 - DNA, 20 bp, Artificial Sequence
  Synthetic
ttttaggtgttcagtttatg

SEQ ID NO: 24722 - DNA, 20 bp, Artificial Sequence
  Synthetic
tttaggtgttcagtttatgt

SEQ ID NO: 24723 - DNA, 20 bp, Artificial Sequence
  Synthetic
aaaaaaacaaagaaatctcc

SEQ ID NO: 24724 - DNA, 20 bp, Artificial Sequence
  Synthetic
acaaagaaatctccaggttc

SEQ ID NO: 24725 - DNA, 20 bp, Artificial Sequence
  Synthetic
gcaagaatgcatcctgaacc

SEQ ID NO: 24726 - DNA, 20 bp, Artificial Sequence
  Synthetic
atgcattcttgcccactgta

SEQ ID NO: 24727 - DNA, 20 bp, Artificial Sequence
  Synthetic
tgcattcttgcccactgtat

SEQ ID NO: 24728 - DNA, 20 bp, Artificial Sequence
  Synthetic
cttgcccactgtatgggcct

SEQ ID NO: 24729 - DNA, 20 bp, Artificial Sequence
  Synthetic
cttaccaaggcccatacagt

SEQ ID NO: 24730 - DNA, 20 bp, Artificial Sequence
  Synthetic
tcttaccaaggcccatacag

SEQ ID NO: 24731 - DNA, 20 bp, Artificial Sequence
  Synthetic
gggccttggtaagactttac

SEQ ID NO: 24732 - DNA, 20 bp, Artificial Sequence
  Synthetic
ttacctgtaaagtcttacca

SEQ ID NO: 24733 - DNA, 20 bp, Artificial Sequence
  Synthetic
agttcttttgtgtgacaaac

SEQ ID NO: 24734 - DNA, 20 bp, Artificial Sequence
  Synthetic
tgacaaactggatttcagca

SEQ ID NO: 24735 - DNA, 20 bp, Artificial Sequence
  Synthetic
ggatttcagcacggcgttag

SEQ ID NO: 24736 - DNA, 20 bp, Artificial Sequence
  Synthetic
caattcaaagcagtattaag

SEQ ID NO: 24737 - DNA, 20 bp, Artificial Sequence
  Synthetic
ctcttaatactgctttgaat

SEQ ID NO: 24738 - DNA, 20 bp, Artificial Sequence
  Synthetic
ggatgaatgaatttgagaag

SEQ ID NO: 24739 - DNA, 20 bp, Artificial Sequence
  Synthetic
tgaatttgagaagtggcaag

SEQ ID NO: 24740 - DNA, 20 bp, Artificial Sequence
  Synthetic
gaatttgagaagtggcaaga

SEQ ID NO: 24741 - DNA, 20 bp, Artificial Sequence
  Synthetic
aaaagatgatgagaagcttg

SEQ ID NO: 24742 - DNA, 20 bp, Artificial Sequence
  Synthetic
agcaactgtgaaacgtcctc

SEQ ID NO: 24743 - DNA, 20 bp, Artificial Sequence
  Synthetic
agcatgtagcttctctcctg

SEQ ID NO: 24744 - DNA, 20 bp, Artificial Sequence
  Synthetic
agagaagctacatgctgcag

SEQ ID NO: 24745 - DNA, 20 bp, Artificial Sequence
  Synthetic
gaagctacatgctgcagagg

SEQ ID NO: 24746 - DNA, 20 bp, Artificial Sequence
  Synthetic
ctgcagaggtggcaagaaga

SEQ ID NO: 24747 - DNA, 20 bp, Artificial Sequence
  Synthetic
cagaggtggcaagaagatgg

SEQ ID NO: 24748 - DNA, 20 bp, Artificial Sequence
  Synthetic
gatggtggtgttatgatcat

SEQ ID NO: 24749 - DNA, 20 bp, Artificial Sequence
  Synthetic
atgtatagaaatcttgctca

SEQ ID NO: 24750 - DNA, 20 bp, Artificial Sequence
  Synthetic
atagaaatcttgctcaagga

SEQ ID NO: 24751 - DNA, 20 bp, Artificial Sequence
  Synthetic
aaggaaggaatgtgaagagt

SEQ ID NO: 24752 - DNA, 20 bp, Artificial Sequence
  Synthetic
agaaatatttaacaaagctt

SEQ ID NO: 24753 - DNA, 20 bp, Artificial Sequence
  Synthetic
aacaaagctttggttgatcc

SEQ ID NO: 24754 - DNA, 20 bp, Artificial Sequence
  Synthetic
catcacaaacaacaaaatca

SEQ ID NO: 24755 - DNA, 20 bp, Artificial Sequence
  Synthetic
tcatcacaaacaacaaaatc

SEQ ID NO: 24756 - DNA, 20 bp, Artificial Sequence
  Synthetic
gattttgttgtttgtgatga

SEQ ID NO: 24757 - DNA, 20 bp, Artificial Sequence
  Synthetic
atgcttcattttttagaata

SEQ ID NO: 24758 - DNA, 20 bp, Artificial Sequence
  Synthetic
ctatgaattctatacgatca

SEQ ID NO: 24759 - DNA, 20 bp, Artificial Sequence
  Synthetic
tgaattctatacgatcaagg

SEQ ID NO: 24760 - DNA, 20 bp, Artificial Sequence
  Synthetic
attctatacgatcaaggagg

SEQ ID NO: 24761 - DNA, 20 bp, Artificial Sequence
  Synthetic
aggaggaggattattttaac

SEQ ID NO: 24762 - DNA, 20 bp, Artificial Sequence
  Synthetic
tcaattaggttattttgaag

SEQ ID NO: 24763 - DNA, 20 bp, Artificial Sequence
  Synthetic
atattaactcacactcaatt

SEQ ID NO: 24764 - DNA, 20 bp, Artificial Sequence
  Synthetic
ttctctcttagatcattgta

SEQ ID NO: 24765 - DNA, 20 bp, Artificial Sequence
  Synthetic
ttgtatggttaattttatca

SEQ ID NO: 24766 - DNA, 20 bp, Artificial Sequence
  Synthetic
tttatcaaggaaaatttact

SEQ ID NO: 24767 - DNA, 20 bp, Artificial Sequence
  Synthetic
aaatttacttggatccatta

SEQ ID NO: 24768 - DNA, 20 bp, Artificial Sequence
  Synthetic
ttggatccattaaggagttc

SEQ ID NO: 24769 - DNA, 20 bp, Artificial Sequence
  Synthetic
tctattcctgaactccttaa

SEQ ID NO: 24770 - DNA, 20 bp, Artificial Sequence
  Synthetic
tttataaatccaattcaaaa

SEQ ID NO: 24771 - DNA, 20 bp, Artificial Sequence
  Synthetic
gcacactgaccattttgaat

SEQ ID NO: 24772 - DNA, 20 bp, Artificial Sequence
  Synthetic
tcagtgtgcagattctacca

SEQ ID NO: 24773 - DNA, 20 bp, Artificial Sequence
  Synthetic
catcactctgacatctacca

SEQ ID NO: 24774 - DNA, 20 bp, Artificial Sequence
  Synthetic
attctctatgagatgttagc

SEQ ID NO: 24775 - DNA, 20 bp, Artificial Sequence
  Synthetic
gatgttagctggatgtgttc

SEQ ID NO: 24776 - DNA, 20 bp, Artificial Sequence
  Synthetic
aacacatattcgtgttttgg

SEQ ID NO: 24777 - DNA, 20 bp, Artificial Sequence
  Synthetic
gctaacacatattcgtgttt

SEQ ID NO: 24778 - DNA, 20 bp, Artificial Sequence
  Synthetic
tactacttagatcacttaac

SEQ ID NO: 24779 - DNA, 20 bp, Artificial Sequence
  Synthetic
tatttcttttgatcaggtgt

SEQ ID NO: 24780 - DNA, 20 bp, Artificial Sequence
  Synthetic
ggtgtgggcaataatagtga

SEQ ID NO: 24781 - DNA, 20 bp, Artificial Sequence
  Synthetic
gtgggcaataatagtgaagg

SEQ ID NO: 24782 - DNA, 20 bp, Artificial Sequence
  Synthetic
aataatagtgaaggtggaag

SEQ ID NO: 24783 - DNA, 20 bp, Artificial Sequence
  Synthetic
tagtgaaggtggaagaggaa

SEQ ID NO: 24784 - DNA, 20 bp, Artificial Sequence
  Synthetic
gaaggtggaagaggaaaggc

SEQ ID NO: 24785 - DNA, 20 bp, Artificial Sequence
  Synthetic
tacttaacatctgaaaatct

SEQ ID NO: 24786 - DNA, 20 bp, Artificial Sequence
  Synthetic
ttcagatgttaagtagaata

SEQ ID NO: 24787 - DNA, 20 bp, Artificial Sequence
  Synthetic
gtagaatatggactcatcct

SEQ ID NO: 24788 - DNA, 20 bp, Artificial Sequence
  Synthetic
tagtctagctgcaaacacca

SEQ ID NO: 24789 - DNA, 20 bp, Artificial Sequence
  Synthetic
tgaacaacttgttgtagaat

SEQ ID NO: 24790 - DNA, 20 bp, Artificial Sequence
  Synthetic
tggtacgacatgatgacagc

SEQ ID NO: 24791 - DNA, 20 bp, Artificial Sequence
  Synthetic
ttagaaacaagtttcaaaaa

SEQ ID NO: 24792 - DNA, 20 bp, Artificial Sequence
  Synthetic
gaaacttgtttctaaaatcc

SEQ ID NO: 24793 - DNA, 20 bp, Artificial Sequence
  Synthetic
tgatgatgtcatagtagtct

SEQ ID NO: 24794 - DNA, 20 bp, Artificial Sequence
  Synthetic
ttgatgatgtcatagtagtc

SEQ ID NO: 24795 - DNA, 20 bp, Artificial Sequence
  Synthetic
cgaattatatttaaggcaat

SEQ ID NO: 24796 - DNA, 20 bp, Artificial Sequence
  Synthetic
acgaattatatttaaggcaa

SEQ ID NO: 24797 - DNA, 20 bp, Artificial Sequence
  Synthetic
tttttcacgaattatattta

SEQ ID NO: 24798 - DNA, 20 bp, Artificial Sequence
  Synthetic
ttgcttcacttgtgttacga

SEQ ID NO: 24799 - DNA, 20 bp, Artificial Sequence
  Synthetic
tttgcttcacttgtgttacg

SEQ ID NO: 24800 - DNA, 20 bp, Artificial Sequence
  Synthetic
aacacaagtgaagcaaaagc

SEQ ID NO: 24801 - DNA, 20 bp, Artificial Sequence
  Synthetic
tgcaagatatgtcgaaagaa

SEQ ID NO: 24802 - DNA, 20 bp, Artificial Sequence
  Synthetic
gaaaggcgatgctgaaaaca

SEQ ID NO: 24803 - DNA, 20 bp, Artificial Sequence
  Synthetic
gaaaacatggttctttgtga

SEQ ID NO: 24804 - DNA, 20 bp, Artificial Sequence
  Synthetic
ttctttgtgatggctgtgat

SEQ ID NO: 24805 - DNA, 20 bp, Artificial Sequence
  Synthetic
tctttgtgatggctgtgata

SEQ ID NO: 24806 - DNA, 20 bp, Artificial Sequence
  Synthetic
ctttgtgatggctgtgatag

SEQ ID NO: 24807 - DNA, 20 bp, Artificial Sequence
  Synthetic
gagctttggtcgaacacagt

SEQ ID NO: 24808 - DNA, 20 bp, Artificial Sequence
  Synthetic
ctgtgttcgaccaaagctca

SEQ ID NO: 24809 - DNA, 20 bp, Artificial Sequence
  Synthetic
gaaaaaaataccttgagctt

SEQ ID NO: 24810 - DNA, 20 bp, Artificial Sequence
  Synthetic
ttttttcagactgtgcctga

SEQ ID NO: 24811 - DNA, 20 bp, Artificial Sequence
  Synthetic
agactgtgcctgaaggagac

SEQ ID NO: 24812 - DNA, 20 bp, Artificial Sequence
  Synthetic
ggacaaaaccagtctccttc

SEQ ID NO: 24813 - DNA, 20 bp, Artificial Sequence
  Synthetic
cgttgctttggtcgacattc

SEQ ID NO: 24814 - DNA, 20 bp, Artificial Sequence
  Synthetic
agtcttctagaacgttgctt

SEQ ID NO: 24815 - DNA, 20 bp, Artificial Sequence
  Synthetic
ggtacttcacgatcttgtgg

SEQ ID NO: 24816 - DNA, 20 bp, Artificial Sequence
  Synthetic
agcggtacttcacgatcttg

SEQ ID NO: 24817 - DNA, 20 bp, Artificial Sequence
  Synthetic
tcgtgaagtaccgcttcagc

SEQ ID NO: 24818 - DNA, 20 bp, Artificial Sequence
  Synthetic
accgcttcagctggcccttc

SEQ ID NO: 24819 - DNA, 20 bp, Artificial Sequence
  Synthetic
acctgaagggccagctgaag

SEQ ID NO: 24820 - DNA, 20 bp, Artificial Sequence
  Synthetic
gaacacagcactcacctgaa

SEQ ID NO: 24821 - DNA, 20 bp, Artificial Sequence
  Synthetic
agaacacagcactcacctga

SEQ ID NO: 24822 - DNA, 20 bp, Artificial Sequence
  Synthetic
ggagcctgtgaccagagatg

SEQ ID NO: 24823 - DNA, 20 bp, Artificial Sequence
  Synthetic
tcggcctcatctctggtcac

SEQ ID NO: 24824 - DNA, 20 bp, Artificial Sequence
  Synthetic
tgtgaccagagatgaggccg

SEQ ID NO: 24825 - DNA, 20 bp, Artificial Sequence
  Synthetic
gtagtcctcggcctcatctc

SEQ ID NO: 24826 - DNA, 20 bp, Artificial Sequence
  Synthetic
gatcacatcatagtagtcct

SEQ ID NO: 24827 - DNA, 20 bp, Artificial Sequence
  Synthetic
tgatgtgatcacgcacccca

SEQ ID NO: 24828 - DNA, 20 bp, Artificial Sequence
  Synthetic
gcactgtctgaaagtccatg

SEQ ID NO: 24829 - DNA, 20 bp, Artificial Sequence
  Synthetic
tgcactgtctgaaagtccat

SEQ ID NO: 24830 - DNA, 20 bp, Artificial Sequence
  Synthetic
ctgcactgtctgaaagtcca

SEQ ID NO: 24831 - DNA, 20 bp, Artificial Sequence
  Synthetic
gtgcagaacaaatgttcctg

SEQ ID NO: 24832 - DNA, 20 bp, Artificial Sequence
  Synthetic
tgcagaacaaatgttcctgt

SEQ ID NO: 24833 - DNA, 20 bp, Artificial Sequence
  Synthetic
cacagagcggtagctcccac

SEQ ID NO: 24834 - DNA, 20 bp, Artificial Sequence
  Synthetic
tgggagctaccgctctgtgc

SEQ ID NO: 24835 - DNA, 20 bp, Artificial Sequence
  Synthetic
taagaaactcctgcacagag

SEQ ID NO: 24836 - DNA, 20 bp, Artificial Sequence
  Synthetic
gcaagtgtttaccaatgctg

SEQ ID NO: 24837 - DNA, 20 bp, Artificial Sequence
  Synthetic
gcagttgtaaacctcagcat

SEQ ID NO: 24838 - DNA, 20 bp, Artificial Sequence
  Synthetic
gctgaggtttacaactgccg

SEQ ID NO: 24839 - DNA, 20 bp, Artificial Sequence
  Synthetic
agcttagcacatggctgcca

SEQ ID NO: 24840 - DNA, 20 bp, Artificial Sequence
  Synthetic
cagccatgtgctaagctgca

SEQ ID NO: 24841 - DNA, 20 bp, Artificial Sequence
  Synthetic
tcaccatgcagcttagcaca

SEQ ID NO: 24842 - DNA, 20 bp, Artificial Sequence
  Synthetic
tgcaaagtttgtcgaaagaa

SEQ ID NO: 24843 - DNA, 20 bp, Artificial Sequence
  Synthetic
cctcagacaaaacaggtgga

SEQ ID NO: 24844 - DNA, 20 bp, Artificial Sequence
  Synthetic
ccttccacctgttttgtctg

SEQ ID NO: 24845 - DNA, 20 bp, Artificial Sequence
  Synthetic
ccggcctcagacaaaacagg

SEQ ID NO: 24846 - DNA, 20 bp, Artificial Sequence
  Synthetic
ccacctgttttgtctgaggc

SEQ ID NO: 24847 - DNA, 20 bp, Artificial Sequence
  Synthetic
gggccggcctcagacaaaac

SEQ ID NO: 24848 - DNA, 20 bp, Artificial Sequence
  Synthetic
tctggtacttcatagagggc

SEQ ID NO: 24849 - DNA, 20 bp, Artificial Sequence
  Synthetic
gccctctatgaagtaccaga

SEQ ID NO: 24850 - DNA, 20 bp, Artificial Sequence
  Synthetic
accatctggtacttcataga

SEQ ID NO: 24851 - DNA, 20 bp, Artificial Sequence
  Synthetic
caccatctggtacttcatag

SEQ ID NO: 24852 - DNA, 20 bp, Artificial Sequence
  Synthetic
atgaagtaccagatggtgag

SEQ ID NO: 24853 - DNA, 20 bp, Artificial Sequence
  Synthetic
gggcactgccactcaccatc

SEQ ID NO: 24854 - DNA, 20 bp, Artificial Sequence
  Synthetic
cagtagcgggctggcaagct

SEQ ID NO: 24855 - DNA, 20 bp, Artificial Sequence
  Synthetic
gcagtagcgggctggcaagc

SEQ ID NO: 24856 - DNA, 20 bp, Artificial Sequence
  Synthetic
tgcgcctggcagtagcgggc

SEQ ID NO: 24857 - DNA, 20 bp, Artificial Sequence
  Synthetic
taatgataggattatcctga

SEQ ID NO: 24858 - DNA, 20 bp, Artificial Sequence
  Synthetic
taggattatcctgatggaga

SEQ ID NO: 24859 - DNA, 20 bp, Artificial Sequence
  Synthetic
catgggactccatctccatc

SEQ ID NO: 24860 - DNA, 20 bp, Artificial Sequence
  Synthetic
tggagtcccatgatgcagcc

SEQ ID NO: 24861 - DNA, 20 bp, Artificial Sequence
  Synthetic
gaaaggccaggctgcatcat

SEQ ID NO: 24862 - DNA, 20 bp, Artificial Sequence
  Synthetic
ggaaaggccaggctgcatca

SEQ ID NO: 24863 - DNA, 20 bp, Artificial Sequence
  Synthetic
cacaggctctaggaaaggcc

SEQ ID NO: 24864 - DNA, 20 bp, Artificial Sequence
  Synthetic
gggttcacaggctctaggaa

SEQ ID NO: 24865 - DNA, 20 bp, Artificial Sequence
  Synthetic
aacgtgggttcacaggctct

SEQ ID NO: 24866 - DNA, 20 bp, Artificial Sequence
  Synthetic
agagcctgtgaacccacgtt

SEQ ID NO: 24867 - DNA, 20 bp, Artificial Sequence
  Synthetic
ctcaccaaacgtgggttcac

SEQ ID NO: 24868 - DNA, 20 bp, Artificial Sequence
  Synthetic
gtgaacccacgtttggtgag

SEQ ID NO: 24869 - DNA, 20 bp, Artificial Sequence
  Synthetic
tgaacccacgtttggtgagt

SEQ ID NO: 24870 - DNA, 20 bp, Artificial Sequence
  Synthetic
ggtacccactcaccaaacgt

SEQ ID NO: 24871 - DNA, 20 bp, Artificial Sequence
  Synthetic
cggtacccactcaccaaacg

SEQ ID NO: 24872 - DNA, 20 bp, Artificial Sequence
  Synthetic
cacgtttggtgagtgggtac

SEQ ID NO: 24873 - DNA, 20 bp, Artificial Sequence
  Synthetic
taggatttttgatgatgcgc

SEQ ID NO: 24874 - DNA, 20 bp, Artificial Sequence
  Synthetic
gcgcatcatcaaaaatccta

SEQ ID NO: 24875 - DNA, 20 bp, Artificial Sequence
  Synthetic
cgcatggtggaaaaatccat

SEQ ID NO: 24876 - DNA, 20 bp, Artificial Sequence
  Synthetic
ctatggatttttccaccatg

SEQ ID NO: 24877 - DNA, 20 bp, Artificial Sequence
  Synthetic
tatggatttttccaccatgc

SEQ ID NO: 24878 - DNA, 20 bp, Artificial Sequence
  Synthetic
atttttccaccatgcgggag

SEQ ID NO: 24879 - DNA, 20 bp, Artificial Sequence
  Synthetic
gagcagccgctcccgcatgg

SEQ ID NO: 24880 - DNA, 20 bp, Artificial Sequence
  Synthetic
cctgagcagccgctcccgca

SEQ ID NO: 24881 - DNA, 20 bp, Artificial Sequence
  Synthetic
ccatgcgggagcggctgctc

SEQ ID NO: 24882 - DNA, 20 bp, Artificial Sequence
  Synthetic
catgcgggagcggctgctca

SEQ ID NO: 24883 - DNA, 20 bp, Artificial Sequence
  Synthetic
atgcgggagcggctgctcag

SEQ ID NO: 24884 - DNA, 20 bp, Artificial Sequence
  Synthetic
cgggagcggctgctcagggg

SEQ ID NO: 24885 - DNA, 20 bp, Artificial Sequence
  Synthetic
gggagcggctgctcagggga

SEQ ID NO: 24886 - DNA, 20 bp, Artificial Sequence
  Synthetic
gtccaggtacaccagctcag

SEQ ID NO: 24887 - DNA, 20 bp, Artificial Sequence
  Synthetic
ctcctctgagctggtgtacc

SEQ ID NO: 24888 - DNA, 20 bp, Artificial Sequence
  Synthetic
caccagctcagaggagtttg

SEQ ID NO: 24889 - DNA, 20 bp, Artificial Sequence
  Synthetic
agccgcaaactcctctgagc

SEQ ID NO: 24890 - DNA, 20 bp, Artificial Sequence
  Synthetic
gtttgcggctgatgccctcc

SEQ ID NO: 24891 - DNA, 20 bp, Artificial Sequence
  Synthetic
gcagttgtcaaataccagga

SEQ ID NO: 24892 - DNA, 20 bp, Artificial Sequence
  Synthetic
ggcagttgtcaaataccagg

SEQ ID NO: 24893 - DNA, 20 bp, Artificial Sequence
  Synthetic
tctggcagttgtcaaatacc

SEQ ID NO: 24894 - DNA, 20 bp, Artificial Sequence
  Synthetic
caactgccagactttcaacg

SEQ ID NO: 24895 - DNA, 20 bp, Artificial Sequence
  Synthetic
agtcatcctcgttgaaagtc

SEQ ID NO: 24896 - DNA, 20 bp, Artificial Sequence
  Synthetic
aacgaggatgactctgaagt

SEQ ID NO: 24897 - DNA, 20 bp, Artificial Sequence
  Synthetic
ggatgactctgaagtaggca

SEQ ID NO: 24898 - DNA, 20 bp, Artificial Sequence
  Synthetic
gactctgaagtaggcaaggc

SEQ ID NO: 24899 - DNA, 20 bp, Artificial Sequence
  Synthetic
tccagacatgtctagtctgc

SEQ ID NO: 24900 - DNA, 20 bp, Artificial Sequence
  Synthetic
gacatgtctagtctgccgga

SEQ ID NO: 24901 - DNA, 20 bp, Artificial Sequence
  Synthetic
acatgtctagtctgccggaa

SEQ ID NO: 24902 - DNA, 20 bp, Artificial Sequence
  Synthetic
actcatcattgtcacccttc

SEQ ID NO: 24903 - DNA, 20 bp, Artificial Sequence
  Synthetic
gagtttcttctgctttgtga

SEQ ID NO: 24904 - DNA, 20 bp, Artificial Sequence
  Synthetic
agtttcttctgctttgtgat

SEQ ID NO: 24905 - DNA, 20 bp, Artificial Sequence
  Synthetic
ctttgtgatgggtgtgaccg

SEQ ID NO: 24906 - DNA, 20 bp, Artificial Sequence
  Synthetic
ggcagtaaatgtggcagcca

SEQ ID NO: 24907 - DNA, 20 bp, Artificial Sequence
  Synthetic
tgggacgatggcagtaaatg

SEQ ID NO: 24908 - DNA, 20 bp, Artificial Sequence
  Synthetic
ttactgccatcgtcccaaga

SEQ ID NO: 24909 - DNA, 20 bp, Artificial Sequence
  Synthetic
ctgccatcgtcccaagatgg

SEQ ID NO: 24910 - DNA, 20 bp, Artificial Sequence
  Synthetic
cagcctccatcttgggacga

SEQ ID NO: 24911 - DNA, 20 bp, Artificial Sequence
  Synthetic
tctgggacagcctccatctt

SEQ ID NO: 24912 - DNA, 20 bp, Artificial Sequence
  Synthetic
ttctgggacagcctccatct

SEQ ID NO: 24913 - DNA, 20 bp, Artificial Sequence
  Synthetic
aagatggaggctgtcccaga

SEQ ID NO: 24914 - DNA, 20 bp, Artificial Sequence
  Synthetic
aggctgtcccagaaggagat

SEQ ID NO: 24915 - DNA, 20 bp, Artificial Sequence
  Synthetic
tacagaaccaatctccttct

SEQ ID NO: 24916 - DNA, 20 bp, Artificial Sequence
  Synthetic
gtacagaaccaatctccttc

SEQ ID NO: 24917 - DNA, 20 bp, Artificial Sequence
  Synthetic
ttggttctgtactgtctgtt

SEQ ID NO: 24918 - DNA, 20 bp, Artificial Sequence
  Synthetic
gggaagacgaacttcttctg

SEQ ID NO: 24919 - DNA, 20 bp, Artificial Sequence
  Synthetic
ggggaagacgaacttcttct

SEQ ID NO: 24920 - DNA, 20 bp, Artificial Sequence
  Synthetic
aggggaagacgaacttcttc

SEQ ID NO: 24921 - DNA, 20 bp, Artificial Sequence
  Synthetic
gttcgtcttcccctccaaca

SEQ ID NO: 24922 - DNA, 20 bp, Artificial Sequence
  Synthetic
ttcgtcttcccctccaacat

SEQ ID NO: 24923 - DNA, 20 bp, Artificial Sequence
  Synthetic
agcatttacccatgttggag

SEQ ID NO: 24924 - DNA, 20 bp, Artificial Sequence
  Synthetic
gagcatttacccatgttgga

SEQ ID NO: 24925 - DNA, 20 bp, Artificial Sequence
  Synthetic
agagcatttacccatgttgg

SEQ ID NO: 24926 - DNA, 20 bp, Artificial Sequence
  Synthetic
actagagcatttacccatgt

SEQ ID NO: 24927 - DNA, 20 bp, Artificial Sequence
  Synthetic
tgtgcttctctggcaggtgg

SEQ ID NO: 24928 - DNA, 20 bp, Artificial Sequence
  Synthetic
ctctggcaggtggcggagag

SEQ ID NO: 24929 - DNA, 20 bp, Artificial Sequence
  Synthetic
gagagaggtgcgcatcaaga

SEQ ID NO: 24930 - DNA, 20 bp, Artificial Sequence
  Synthetic
agagaggtgcgcatcaagaa

SEQ ID NO: 24931 - DNA, 20 bp, Artificial Sequence
  Synthetic
tcaagaagggcagccaccga

SEQ ID NO: 24932 - DNA, 20 bp, Artificial Sequence
  Synthetic
gaagggcagccaccgatggc

SEQ ID NO: 24933 - DNA, 20 bp, Artificial Sequence
  Synthetic
aagggcagccaccgatggca

SEQ ID NO: 24934 - DNA, 20 bp, Artificial Sequence
  Synthetic
agggcagccaccgatggcag

SEQ ID NO: 24935 - DNA, 20 bp, Artificial Sequence
  Synthetic
gggcagccaccgatggcagg

SEQ ID NO: 24936 - DNA, 20 bp, Artificial Sequence
  Synthetic
aggtctccccctgccatcgg

SEQ ID NO: 24937 - DNA, 20 bp, Artificial Sequence
  Synthetic
accgatggcagggggagacc

SEQ ID NO: 24938 - DNA, 20 bp, Artificial Sequence
  Synthetic
accaggtctccccctgccat

SEQ ID NO: 24939 - DNA, 20 bp, Artificial Sequence
  Synthetic
cagggggagacctggtatta

SEQ ID NO: 24940 - DNA, 20 bp, Artificial Sequence
  Synthetic
acctggtattatggcccctg

SEQ ID NO: 24941 - DNA, 20 bp, Artificial Sequence
  Synthetic
cccacaggggccataatacc

SEQ ID NO: 24942 - DNA, 20 bp, Artificial Sequence
  Synthetic
cctggtattatggcccctgt

SEQ ID NO: 24943 - DNA, 20 bp, Artificial Sequence
  Synthetic
attatggcccctgtgggaag

SEQ ID NO: 24944 - DNA, 20 bp, Artificial Sequence
  Synthetic
gcttcatcctcttcccacag

SEQ ID NO: 24945 - DNA, 20 bp, Artificial Sequence
  Synthetic
tgcttcatcctcttcccaca

SEQ ID NO: 24946 - DNA, 20 bp, Artificial Sequence
  Synthetic
ttgcttcatcctcttcccac

SEQ ID NO: 24947 - DNA, 20 bp, Artificial Sequence
  Synthetic
gcaatttccagaagtgatca

SEQ ID NO: 24948 - DNA, 20 bp, Artificial Sequence
  Synthetic
tacattaccttgatcacttc

SEQ ID NO: 24949 - DNA, 20 bp, Artificial Sequence
  Synthetic
ttagtacctgagccgcaacg

SEQ ID NO: 24950 - DNA, 20 bp, Artificial Sequence
  Synthetic
tgtgtaccacgttgcggctc

SEQ ID NO: 24951 - DNA, 20 bp, Artificial Sequence
  Synthetic
ggacactgtgtaccacgttg

SEQ ID NO: 24952 - DNA, 20 bp, Artificial Sequence
  Synthetic
tgaagctgaagtgctctcgg

SEQ ID NO: 24953 - DNA, 20 bp, Artificial Sequence
  Synthetic
gactgaagctgaagtgctct

SEQ ID NO: 24954 - DNA, 20 bp, Artificial Sequence
  Synthetic
ttcagtccccgtatgcctgt

SEQ ID NO: 24955 - DNA, 20 bp, Artificial Sequence
  Synthetic
aaatctccaacaggcatacg

SEQ ID NO: 24956 - DNA, 20 bp, Artificial Sequence
  Synthetic
gaaatctccaacaggcatac

SEQ ID NO: 24957 - DNA, 20 bp, Artificial Sequence
  Synthetic
agaaatctccaacaggcata

SEQ ID NO: 24958 - DNA, 20 bp, Artificial Sequence
  Synthetic
ccaaggacctagctctttgc

SEQ ID NO: 24959 - DNA, 20 bp, Artificial Sequence
  Synthetic
tagtatgattctgactgaaa

SEQ ID NO: 24960 - DNA, 20 bp, Artificial Sequence
  Synthetic
gactgaaatggaaactcatg

SEQ ID NO: 24961 - DNA, 20 bp, Artificial Sequence
  Synthetic
tggaaactcatgaggatgca

SEQ ID NO: 24962 - DNA, 20 bp, Artificial Sequence
  Synthetic
aagtttacaggaagtagaaa

SEQ ID NO: 24963 - DNA, 20 bp, Artificial Sequence
  Synthetic
ggaacaagtttcaagtttac

SEQ ID NO: 24964 - DNA, 20 bp, Artificial Sequence
  Synthetic
gtaaacttgaaacttgttcc

SEQ ID NO: 24965 - DNA, 20 bp, Artificial Sequence
  Synthetic
ttaataactttcttataacc

SEQ ID NO: 24966 - DNA, 20 bp, Artificial Sequence
  Synthetic
gaaagttattaagaagccta

SEQ ID NO: 24967 - DNA, 20 bp, Artificial Sequence
  Synthetic
ctaattgtggaaaaatccat

SEQ ID NO: 24968 - DNA, 20 bp, Artificial Sequence
  Synthetic
acttagtttctctctaattg

SEQ ID NO: 24969 - DNA, 20 bp, Artificial Sequence
  Synthetic
attagagagaaactaagtag

SEQ ID NO: 24970 - DNA, 20 bp, Artificial Sequence
  Synthetic
agagcaaaggtttcaaggtt

SEQ ID NO: 24971 - DNA, 20 bp, Artificial Sequence
  Synthetic
catctagagcaaaggtttca

SEQ ID NO: 24972 - DNA, 20 bp, Artificial Sequence
  Synthetic
aaacctttgctctagatgtc

SEQ ID NO: 24973 - DNA, 20 bp, Artificial Sequence
  Synthetic
aagcctgacatctagagcaa

SEQ ID NO: 24974 - DNA, 20 bp, Artificial Sequence
  Synthetic
aatgaagatgattctgatat

SEQ ID NO: 24975 - DNA, 20 bp, Artificial Sequence
  Synthetic
gtactgccaaatctgtcgaa

SEQ ID NO: 24976 - DNA, 20 bp, Artificial Sequence
  Synthetic
tactgccaaatctgtcgaaa

SEQ ID NO: 24977 - DNA, 20 bp, Artificial Sequence
  Synthetic
tatctccctttcgacagatt

SEQ ID NO: 24978 - DNA, 20 bp, Artificial Sequence
  Synthetic
gaactgcttcttctttgtga

SEQ ID NO: 24979 - DNA, 20 bp, Artificial Sequence
  Synthetic
ctttgtgatggctgtgacaa

SEQ ID NO: 24980 - DNA, 20 bp, Artificial Sequence
  Synthetic
aatcttgggtctatggcagt

SEQ ID NO: 24981 - DNA, 20 bp, Artificial Sequence
  Synthetic
ttgttgtaatcttgggtcta

SEQ ID NO: 24982 - DNA, 20 bp, Artificial Sequence
  Synthetic
tctgggattgttgtaatctt

SEQ ID NO: 24983 - DNA, 20 bp, Artificial Sequence
  Synthetic
atctgggattgttgtaatct

SEQ ID NO: 24984 - DNA, 20 bp, Artificial Sequence
  Synthetic
aagattacaacaatcccaga

SEQ ID NO: 24985 - DNA, 20 bp, Artificial Sequence
  Synthetic
caacaatcccagatggagac

SEQ ID NO: 24986 - DNA, 20 bp, Artificial Sequence
  Synthetic
gacaaaaccagtctccatct

SEQ ID NO: 24987 - DNA, 20 bp, Artificial Sequence
  Synthetic
ggacaaaaccagtctccatc

SEQ ID NO: 24988 - DNA, 20 bp, Artificial Sequence
  Synthetic
ttgtccagcttgcattgcta

SEQ ID NO: 24989 - DNA, 20 bp, Artificial Sequence
  Synthetic
cttaccttagcaatgcaagc

SEQ ID NO: 24990 - DNA, 20 bp, Artificial Sequence
  Synthetic
acgtgaactgcgtattccat

SEQ ID NO: 24991 - DNA, 20 bp, Artificial Sequence
  Synthetic
ctgcgtattccattggaata

SEQ ID NO: 24992 - DNA, 20 bp, Artificial Sequence
  Synthetic
tgcgtattccattggaatat

SEQ ID NO: 24993 - DNA, 20 bp, Artificial Sequence
  Synthetic
tttgcatacccatattccaa

SEQ ID NO: 24994 - DNA, 20 bp, Artificial Sequence
  Synthetic
gagacaagaataagaaactt

SEQ ID NO: 24995 - DNA, 20 bp, Artificial Sequence
  Synthetic
acaagaataagaaactttgg

SEQ ID NO: 24996 - DNA, 20 bp, Artificial Sequence
  Synthetic
caagaataagaaactttgga

SEQ ID NO: 24997 - DNA, 20 bp, Artificial Sequence
  Synthetic
aactttggagggcgccttca

SEQ ID NO: 24998 - DNA, 20 bp, Artificial Sequence
  Synthetic
aatatgctacttctccttga

SEQ ID NO: 24999 - DNA, 20 bp, Artificial Sequence
  Synthetic
gtagcatattatgctccatg

SEQ ID NO: 25000 - DNA, 20 bp, Artificial Sequence
  Synthetic
ctccatgtggaaagaaactt

SEQ ID NO: 25001 - DNA, 20 bp, Artificial Sequence
  Synthetic
tgcctaagtttctttccaca

SEQ ID NO: 25002 - DNA, 20 bp, Artificial Sequence
  Synthetic
gcagtaccctgaagtaataa

SEQ ID NO: 25003 - DNA, 20 bp, Artificial Sequence
  Synthetic
tatgtacctttattacttca

SEQ ID NO: 25004 - DNA, 20 bp, Artificial Sequence
  Synthetic
gtatgtacctttattacttc

SEQ ID NO: 25005 - DNA, 20 bp, Artificial Sequence
  Synthetic
tttcagtatctcagcagaaa

SEQ ID NO: 25006 - DNA, 20 bp, Artificial Sequence
  Synthetic
tctcagcagaaatggaataa

SEQ ID NO: 25007 - DNA, 20 bp, Artificial Sequence
  Synthetic
atggaataatggatatctca

SEQ ID NO: 25008 - DNA, 20 bp, Artificial Sequence
  Synthetic
tggaataatggatatctcaa

SEQ ID NO: 25009 - DNA, 20 bp, Artificial Sequence
  Synthetic
cttcagtgcaaaaataagag

SEQ ID NO: 25010 - DNA, 20 bp, Artificial Sequence
  Synthetic
ttcagtgcaaaaataagagt

SEQ ID NO: 25011 - DNA, 20 bp, Artificial Sequence
  Synthetic
aggattatgaggggttgaag

SEQ ID NO: 25012 - DNA, 20 bp, Artificial Sequence
  Synthetic
ggattatgaggggttgaaga

SEQ ID NO: 25013 - DNA, 20 bp, Artificial Sequence
  Synthetic
gagggtgctccgttccttac

SEQ ID NO: 25014 - DNA, 20 bp, Artificial Sequence
  Synthetic
ggggtctcacctgtaaggaa

SEQ ID NO: 25015 - DNA, 20 bp, Artificial Sequence
  Synthetic
acagaggggtctcacctgta

SEQ ID NO: 25016 - DNA, 20 bp, Artificial Sequence
  Synthetic
ttcattataggcccataaga

SEQ ID NO: 25017 - DNA, 20 bp, Artificial Sequence
  Synthetic
tataggcccataagatggcc

SEQ ID NO: 25018 - DNA, 20 bp, Artificial Sequence
  Synthetic
gaaaggccaggccatcttat

SEQ ID NO: 25019 - DNA, 20 bp, Artificial Sequence
  Synthetic
ggaaaggccaggccatctta

SEQ ID NO: 25020 - DNA, 20 bp, Artificial Sequence
  Synthetic
tactggttcaaggaaaggcc

SEQ ID NO: 25021 - DNA, 20 bp, Artificial Sequence
  Synthetic
gggtctactggttcaaggaa

SEQ ID NO: 25022 - DNA, 20 bp, Artificial Sequence
  Synthetic
cattagggtctactggttca

SEQ ID NO: 25023 - DNA, 20 bp, Artificial Sequence
  Synthetic
ggtgcatcattagggtctac

SEQ ID NO: 25024 - DNA, 20 bp, Artificial Sequence
  Synthetic
aataatctggtgcatcatta

SEQ ID NO: 25025 - DNA, 20 bp, Artificial Sequence
  Synthetic
taataatctggtgcatcatt

SEQ ID NO: 25026 - DNA, 20 bp, Artificial Sequence
  Synthetic
aatgatgcaccagattatta

SEQ ID NO: 25027 - DNA, 20 bp, Artificial Sequence
  Synthetic
ttaataacaccataataatc

SEQ ID NO: 25028 - DNA, 20 bp, Artificial Sequence
  Synthetic
agattattatggtgttatta

SEQ ID NO: 25029 - DNA, 20 bp, Artificial Sequence
  Synthetic
tggtgttattaaggaaccta

SEQ ID NO: 25030 - DNA, 20 bp, Artificial Sequence
  Synthetic
ggtgttattaaggaacctat

SEQ ID NO: 25031 - DNA, 20 bp, Artificial Sequence
  Synthetic
caactcatgtacttacccat

SEQ ID NO: 25032 - DNA, 20 bp, Artificial Sequence
  Synthetic
tttttaagaccttgccacca

SEQ ID NO: 25033 - DNA, 20 bp, Artificial Sequence
  Synthetic
ctctttcttccatggtggca

SEQ ID NO: 25034 - DNA, 20 bp, Artificial Sequence
  Synthetic
ttgtactctttcttccatgg

SEQ ID NO: 25035 - DNA, 20 bp, Artificial Sequence
  Synthetic
tctttgtactctttcttcca

SEQ ID NO: 25036 - DNA, 20 bp, Artificial Sequence
  Synthetic
acgatattatgaaaagctga

SEQ ID NO: 25037 - DNA, 20 bp, Artificial Sequence
  Synthetic
tgaaaagctgacggaatttg

SEQ ID NO: 25038 - DNA, 20 bp, Artificial Sequence
  Synthetic
acgacagttatcaaaaattt

SEQ ID NO: 25039 - DNA, 20 bp, Artificial Sequence
  Synthetic
tggtaaaatggggagtcact

SEQ ID NO: 25040 - DNA, 20 bp, Artificial Sequence
  Synthetic
ttctgcacactggtaaaatg

SEQ ID NO: 25041 - DNA, 20 bp, Artificial Sequence
  Synthetic
cttctgcacactggtaaaat

SEQ ID NO: 25042 - DNA, 20 bp, Artificial Sequence
  Synthetic
acttctgcacactggtaaaa

SEQ ID NO: 25043 - DNA, 20 bp, Artificial Sequence
  Synthetic
attcgagaacttctgcacac

SEQ ID NO: 25044 - DNA, 20 bp, Artificial Sequence
  Synthetic
actcacttagattcatcata

SEQ ID NO: 25045 - DNA, 20 bp, Artificial Sequence
  Synthetic
ggatcttgcagattttatat

SEQ ID NO: 25046 - DNA, 20 bp, Artificial Sequence
  Synthetic
gattttatattggctgtgat

SEQ ID NO: 25047 - DNA, 20 bp, Artificial Sequence
  Synthetic
gctgtgatcggtgtcagaat

SEQ ID NO: 25048 - DNA, 20 bp, Artificial Sequence
  Synthetic
cggtgtcagaattggtacca

SEQ ID NO: 25049 - DNA, 20 bp, Artificial Sequence
  Synthetic
ggtgtcagaattggtaccat

SEQ ID NO: 25050 - DNA, 20 bp, Artificial Sequence
  Synthetic
tggtaccatgggcgctgcgt

SEQ ID NO: 25051 - DNA, 20 bp, Artificial Sequence
  Synthetic
agatgccaacgcagcgccca

SEQ ID NO: 25052 - DNA, 20 bp, Artificial Sequence
  Synthetic
cgttggcatcttgcaaagtg

SEQ ID NO: 25053 - DNA, 20 bp, Artificial Sequence
  Synthetic
tcctctgttgactggcactg

SEQ ID NO: 25054 - DNA, 20 bp, Artificial Sequence
  Synthetic
tcatggcatcctctgttgac

SEQ ID NO: 25055 - DNA, 20 bp, Artificial Sequence
  Synthetic
tacagtatgatgaccattgt

SEQ ID NO: 25056 - DNA, 20 bp, Artificial Sequence
  Synthetic
acagtatgatgaccattgta

SEQ ID NO: 25057 - DNA, 20 bp, Artificial Sequence
  Synthetic
gtttgtgacaaaccctacaa

SEQ ID NO: 25058 - DNA, 20 bp, Artificial Sequence
  Synthetic
tgtagggtttgtcacaaact

SEQ ID NO: 25059 - DNA, 20 bp, Artificial Sequence
  Synthetic
gtagggtttgtcacaaactt

SEQ ID NO: 25060 - DNA, 20 bp, Artificial Sequence
  Synthetic
tagggtttgtcacaaacttg

SEQ ID NO: 25061 - DNA, 20 bp, Artificial Sequence
  Synthetic
atgttcagcagtataccatt

SEQ ID NO: 25062 - DNA, 20 bp, Artificial Sequence
  Synthetic
gtggcttcacacattccaaa

SEQ ID NO: 25063 - DNA, 20 bp, Artificial Sequence
  Synthetic
atgtgtgaagccacctcttg

SEQ ID NO: 25064 - DNA, 20 bp, Artificial Sequence
  Synthetic
tgtgaagccacctcttgagg

SEQ ID NO: 25065 - DNA, 20 bp, Artificial Sequence
  Synthetic
tctggcacctcctcaagagg

SEQ ID NO: 25066 - DNA, 20 bp, Artificial Sequence
  Synthetic
acctcttgaggaggtgccag

SEQ ID NO: 25067 - DNA, 20 bp, Artificial Sequence
  Synthetic
tcctctggcacctcctcaag

SEQ ID NO: 25068 - DNA, 20 bp, Artificial Sequence
  Synthetic
aggaggtgccagaggacgag

SEQ ID NO: 25069 - DNA, 20 bp, Artificial Sequence
  Synthetic
tcacactgccactcgtcctc

SEQ ID NO: 25070 - DNA, 20 bp, Artificial Sequence
  Synthetic
ggtgctgctgcgctcagtgc

SEQ ID NO: 25071 - DNA, 20 bp, Artificial Sequence
  Synthetic
gctggaccagctgcaagaca

SEQ ID NO: 25072 - DNA, 20 bp, Artificial Sequence
  Synthetic
cggggtccttgtcttgcagc

SEQ ID NO: 25073 - DNA, 20 bp, Artificial Sequence
  Synthetic
tgcaagacaaggaccccgcc

SEQ ID NO: 25074 - DNA, 20 bp, Artificial Sequence
  Synthetic
gctgcgcaaatatcctggcg

SEQ ID NO: 25075 - DNA, 20 bp, Artificial Sequence
  Synthetic
ggctgcgcaaatatcctggc

SEQ ID NO: 25076 - DNA, 20 bp, Artificial Sequence
  Synthetic
gggctgcgcaaatatcctgg

SEQ ID NO: 25077 - DNA, 20 bp, Artificial Sequence
  Synthetic
cacgggctgcgcaaatatcc

SEQ ID NO: 25078 - DNA, 20 bp, Artificial Sequence
  Synthetic
tgcgcagcccgtgagtctga

SEQ ID NO: 25079 - DNA, 20 bp, Artificial Sequence
  Synthetic
gcagcccgtgagtctgaagg

SEQ ID NO: 25080 - DNA, 20 bp, Artificial Sequence
  Synthetic
gcccgtgagtctgaaggagg

SEQ ID NO: 25081 - DNA, 20 bp, Artificial Sequence
  Synthetic
cccacctccttcagactcac

SEQ ID NO: 25082 - DNA, 20 bp, Artificial Sequence
  Synthetic
cccgtgagtctgaaggaggt

SEQ ID NO: 25083 - DNA, 20 bp, Artificial Sequence
  Synthetic
acccacctccttcagactca

SEQ ID NO: 25084 - DNA, 20 bp, Artificial Sequence
  Synthetic
aaattaggtaccagattatt

SEQ ID NO: 25085 - DNA, 20 bp, Artificial Sequence
  Synthetic
ttaatgtgatccaaataatc

SEQ ID NO: 25086 - DNA, 20 bp, Artificial Sequence
  Synthetic
ggatcacattaaacatccca

SEQ ID NO: 25087 - DNA, 20 bp, Artificial Sequence
  Synthetic
ctcattgtggcaaagtccat

SEQ ID NO: 25088 - DNA, 20 bp, Artificial Sequence
  Synthetic
cctcattgtggcaaagtcca

SEQ ID NO: 25089 - DNA, 20 bp, Artificial Sequence
  Synthetic
ccatggactttgccacaatg

SEQ ID NO: 25090 - DNA, 20 bp, Artificial Sequence
  Synthetic
actttgccacaatgaggaaa

SEQ ID NO: 25091 - DNA, 20 bp, Artificial Sequence
  Synthetic
ttctaaccgtttcctcattg

SEQ ID NO: 25092 - DNA, 20 bp, Artificial Sequence
  Synthetic
aggaaacggttagaagctca

SEQ ID NO: 25093 - DNA, 20 bp, Artificial Sequence
  Synthetic
ggaaacggttagaagctcaa

SEQ ID NO: 25094 - DNA, 20 bp, Artificial Sequence
  Synthetic
taaaaacctccatgagtttg

SEQ ID NO: 25095 - DNA, 20 bp, Artificial Sequence
  Synthetic
aaacctccatgagtttgagg

SEQ ID NO: 25096 - DNA, 20 bp, Artificial Sequence
  Synthetic
aatcctcctcaaactcatgg

SEQ ID NO: 25097 - DNA, 20 bp, Artificial Sequence
  Synthetic
caaaatcctcctcaaactca

SEQ ID NO: 25098 - DNA, 20 bp, Artificial Sequence
  Synthetic
actgcatgaagtacaatgcc

SEQ ID NO: 25099 - DNA, 20 bp, Artificial Sequence
  Synthetic
ctgcatgaagtacaatgcca

SEQ ID NO: 25100 - DNA, 20 bp, Artificial Sequence
  Synthetic
tctatagaacacggtgtccc

SEQ ID NO: 25101 - DNA, 20 bp, Artificial Sequence
  Synthetic
caccgtgttctatagagccg

SEQ ID NO: 25102 - DNA, 20 bp, Artificial Sequence
  Synthetic
caccgcggctctatagaaca

SEQ ID NO: 25103 - DNA, 20 bp, Artificial Sequence
  Synthetic
aaattgaagggcgcttgcac

SEQ ID NO: 25104 - DNA, 20 bp, Artificial Sequence
  Synthetic
gatcagtatttttgatcccc

SEQ ID NO: 25105 - DNA, 20 bp, Artificial Sequence
  Synthetic
tgatcccctggagatcatat

SEQ ID NO: 25106 - DNA, 20 bp, Artificial Sequence
  Synthetic
tcttccaatatgatctccag

SEQ ID NO: 25107 - DNA, 20 bp, Artificial Sequence
  Synthetic
atcttccaatatgatctcca

SEQ ID NO: 25108 - DNA, 20 bp, Artificial Sequence
  Synthetic
catcttccaatatgatctcc

SEQ ID NO: 25109 - DNA, 20 bp, Artificial Sequence
  Synthetic
cactcatctcttgagcagtg

SEQ ID NO: 25110 - DNA, 20 bp, Artificial Sequence
  Synthetic
gagtgagtgcaacagcaaca

SEQ ID NO: 25111 - DNA, 20 bp, Artificial Sequence
  Synthetic
gcaacaaggaaaacagcgag

SEQ ID NO: 25112 - DNA, 20 bp, Artificial Sequence
  Synthetic
ttagttcttaagcagacagg

SEQ ID NO: 25113 - DNA, 20 bp, Artificial Sequence
  Synthetic
cgcttagttcttaagcagac

SEQ ID NO: 25114 - DNA, 20 bp, Artificial Sequence
  Synthetic
cagagtcaaaaagaaaaacg

SEQ ID NO: 25115 - DNA, 20 bp, Artificial Sequence
  Synthetic
gaggccctccccagcgccca

SEQ ID NO: 25116 - DNA, 20 bp, Artificial Sequence
  Synthetic
cgtgccgtgggcgctgggga

SEQ ID NO: 25117 - DNA, 20 bp, Artificial Sequence
  Synthetic
gcgtgccgtgggcgctgggg

SEQ ID NO: 25118 - DNA, 20 bp, Artificial Sequence
  Synthetic
ccggcgtgccgtgggcgctg

SEQ ID NO: 25119 - DNA, 20 bp, Artificial Sequence
  Synthetic
ccccagcgcccacggcacgc

SEQ ID NO: 25120 - DNA, 20 bp, Artificial Sequence
  Synthetic
gccggcgtgccgtgggcgct

SEQ ID NO: 25121 - DNA, 20 bp, Artificial Sequence
  Synthetic
ggccggcgtgccgtgggcgc

SEQ ID NO: 25122 - DNA, 20 bp, Artificial Sequence
  Synthetic
cgcccacggcacgccggcct

SEQ ID NO: 25123 - DNA, 20 bp, Artificial Sequence
  Synthetic
ggccgaggccggcgtgccgt

SEQ ID NO: 25124 - DNA, 20 bp, Artificial Sequence
  Synthetic
tggccgaggccggcgtgccg

SEQ ID NO: 25125 - DNA, 20 bp, Artificial Sequence
  Synthetic
gggagggcactggccgaggc

SEQ ID NO: 25126 - DNA, 20 bp, Artificial Sequence
  Synthetic
ggcctcggccagtgccctcc

SEQ ID NO: 25127 - DNA, 20 bp, Artificial Sequence
  Synthetic
ctccgggagggcactggccg

SEQ ID NO: 25128 - DNA, 20 bp, Artificial Sequence
  Synthetic
cttgggctccgggagggcac

SEQ ID NO: 25129 - DNA, 20 bp, Artificial Sequence
  Synthetic
cagtgccctcccggagccca

SEQ ID NO: 25130 - DNA, 20 bp, Artificial Sequence
  Synthetic
gcgcaccttgggctccggga

SEQ ID NO: 25131 - DNA, 20 bp, Artificial Sequence
  Synthetic
tgcgcaccttgggctccggg

SEQ ID NO: 25132 - DNA, 20 bp, Artificial Sequence
  Synthetic
cgatgcgcaccttgggctcc

SEQ ID NO: 25133 - DNA, 20 bp, Artificial Sequence
  Synthetic
acgatgcgcaccttgggctc

SEQ ID NO: 25134 - DNA, 20 bp, Artificial Sequence
  Synthetic
ggagcccaaggtgcgcatcg

SEQ ID NO: 25135 - DNA, 20 bp, Artificial Sequence
  Synthetic
tactccacgatgcgcacctt

SEQ ID NO: 25136 - DNA, 20 bp, Artificial Sequence
  Synthetic
gtactccacgatgcgcacct

SEQ ID NO: 25137 - DNA, 20 bp, Artificial Sequence
  Synthetic
acagccctccgtccgccccc

SEQ ID NO: 25138 - DNA, 20 bp, Artificial Sequence
  Synthetic
gccctccgtccgcccccagg

SEQ ID NO: 25139 - DNA, 20 bp, Artificial Sequence
  Synthetic
gcctcctgggggcggacgga

SEQ ID NO: 25140 - DNA, 20 bp, Artificial Sequence
  Synthetic
ggcctcctgggggcggacgg

SEQ ID NO: 25141 - DNA, 20 bp, Artificial Sequence
  Synthetic
ggaggcctcctgggggcgga

SEQ ID NO: 25142 - DNA, 20 bp, Artificial Sequence
  Synthetic
cacaggaggcctcctggggg

SEQ ID NO: 25143 - DNA, 20 bp, Artificial Sequence
  Synthetic
gtacacaggaggcctcctgg

SEQ ID NO: 25144 - DNA, 20 bp, Artificial Sequence
  Synthetic
agtacacaggaggcctcctg

SEQ ID NO: 25145 - DNA, 20 bp, Artificial Sequence
  Synthetic
tagtacacaggaggcctcct

SEQ ID NO: 25146 - DNA, 20 bp, Artificial Sequence
  Synthetic
gtagtacacaggaggcctcc

SEQ ID NO: 25147 - DNA, 20 bp, Artificial Sequence
  Synthetic
atgaacttgtagtacacagg

SEQ ID NO: 25148 - DNA, 20 bp, Artificial Sequence
  Synthetic
tcgatgaacttgtagtacac

SEQ ID NO: 25149 - DNA, 20 bp, Artificial Sequence
  Synthetic
ctacaagttcatcgagaagt

SEQ ID NO: 25150 - DNA, 20 bp, Artificial Sequence
  Synthetic
gttcatcgagaagtcggccg

SEQ ID NO: 25151 - DNA, 20 bp, Artificial Sequence
  Synthetic
cgagaagtcggccgaggaac

SEQ ID NO: 25152 - DNA, 20 bp, Artificial Sequence
  Synthetic
ggccgaggaactggacaacg

SEQ ID NO: 25153 - DNA, 20 bp, Artificial Sequence
  Synthetic
cacctcgttgtccagttcct

SEQ ID NO: 25154 - DNA, 20 bp, Artificial Sequence
  Synthetic
cgaggaactggacaacgagg

SEQ ID NO: 25155 - DNA, 20 bp, Artificial Sequence
  Synthetic
caacgaggtggagtatgaca

SEQ ID NO: 25156 - DNA, 20 bp, Artificial Sequence
  Synthetic
ggtggagtatgacatggacg

SEQ ID NO: 25157 - DNA, 20 bp, Artificial Sequence
  Synthetic
ggagtatgacatggacgagg

SEQ ID NO: 25158 - DNA, 20 bp, Artificial Sequence
  Synthetic
tggacgaggaggactatgcc

SEQ ID NO: 25159 - DNA, 20 bp, Artificial Sequence
  Synthetic
cgaggaggactatgcctggc

SEQ ID NO: 25160 - DNA, 20 bp, Artificial Sequence
  Synthetic
ctcattgacgatctccagcc

SEQ ID NO: 25161 - DNA, 20 bp, Artificial Sequence
  Synthetic
gatcgtcaatgagaagcgca

SEQ ID NO: 25162 - DNA, 20 bp, Artificial Sequence
  Synthetic
atcgtcaatgagaagcgcaa

SEQ ID NO: 25163 - DNA, 20 bp, Artificial Sequence
  Synthetic
acatgctctgcgacacggcg

SEQ ID NO: 25164 - DNA, 20 bp, Artificial Sequence
  Synthetic
aacatgctctgcgacacggc

SEQ ID NO: 25165 - DNA, 20 bp, Artificial Sequence
  Synthetic
aaacatgctctgcgacacgg

SEQ ID NO: 25166 - DNA, 20 bp, Artificial Sequence
  Synthetic
ctcaaacatgctctgcgaca

SEQ ID NO: 25167 - DNA, 20 bp, Artificial Sequence
  Synthetic
gagcatgtttgagttcctga

SEQ ID NO: 25168 - DNA, 20 bp, Artificial Sequence
  Synthetic
ccttctcgaagcggtccatc

SEQ ID NO: 25169 - DNA, 20 bp, Artificial Sequence
  Synthetic
cctgatggaccgcttcgaga

SEQ ID NO: 25170 - DNA, 20 bp, Artificial Sequence
  Synthetic
agtgcgactccttctcgaag

SEQ ID NO: 25171 - DNA, 20 bp, Artificial Sequence
  Synthetic
gaacagttaaaacattgcaa

SEQ ID NO: 25172 - DNA, 20 bp, Artificial Sequence
  Synthetic
acattgcaatggcattttga

SEQ ID NO: 25173 - DNA, 20 bp, Artificial Sequence
  Synthetic
agaagcatgctgcctatgct

SEQ ID NO: 25174 - DNA, 20 bp, Artificial Sequence
  Synthetic
tttatagaaaggccaagcat

SEQ ID NO: 25175 - DNA, 20 bp, Artificial Sequence
  Synthetic
ttggcctttctataaaccag

SEQ ID NO: 25176 - DNA, 20 bp, Artificial Sequence
  Synthetic
gcatccactggtttatagaa

SEQ ID NO: 25177 - DNA, 20 bp, Artificial Sequence
  Synthetic
ccaagtgcagaagcatccac

SEQ ID NO: 25178 - DNA, 20 bp, Artificial Sequence
  Synthetic
ccagtggatgcttctgcact

SEQ ID NO: 25179 - DNA, 20 bp, Artificial Sequence
  Synthetic
tgatgtcatggtagtcatgc

SEQ ID NO: 25180 - DNA, 20 bp, Artificial Sequence
  Synthetic
tggggtgcttaatgatgtca

SEQ ID NO: 25181 - DNA, 20 bp, Artificial Sequence
  Synthetic
tgacatcattaagcacccca

SEQ ID NO: 25182 - DNA, 20 bp, Artificial Sequence
  Synthetic
tgacagtgctgaggtccatg

SEQ ID NO: 25183 - DNA, 20 bp, Artificial Sequence
  Synthetic
ttgacagtgctgaggtccat

SEQ ID NO: 25184 - DNA, 20 bp, Artificial Sequence
  Synthetic
cttgacagtgctgaggtcca

SEQ ID NO: 25185 - DNA, 20 bp, Artificial Sequence
  Synthetic
catggacctcagcactgtca

SEQ ID NO: 25186 - DNA, 20 bp, Artificial Sequence
  Synthetic
tgggtaccttgacagtgctg

SEQ ID NO: 25187 - DNA, 20 bp, Artificial Sequence
  Synthetic
cctccttctgcagcggaaga

SEQ ID NO: 25188 - DNA, 20 bp, Artificial Sequence
  Synthetic
agatggagaaccgtgattac

SEQ ID NO: 25189 - DNA, 20 bp, Artificial Sequence
  Synthetic
gatggagaaccgtgattacc

SEQ ID NO: 25190 - DNA, 20 bp, Artificial Sequence
  Synthetic
cctgtgcatcccggtaatca

SEQ ID NO: 25191 - DNA, 20 bp, Artificial Sequence
  Synthetic
ccgtgattaccgggatgcac

SEQ ID NO: 25192 - DNA, 20 bp, Artificial Sequence
  Synthetic
cagcaaactcctgtgcatcc

SEQ ID NO: 25193 - DNA, 20 bp, Artificial Sequence
  Synthetic
aggagtttgctgctgatgta

SEQ ID NO: 25194 - DNA, 20 bp, Artificial Sequence
  Synthetic
gggattgtacttatagcagt

SEQ ID NO: 25195 - DNA, 20 bp, Artificial Sequence
  Synthetic
tcccccagatcacgatgttg

SEQ ID NO: 25196 - DNA, 20 bp, Artificial Sequence
  Synthetic
gccacaacatcgtgatctgg

SEQ ID NO: 25197 - DNA, 20 bp, Artificial Sequence
  Synthetic
tgccacaacatcgtgatctg

SEQ ID NO: 25198 - DNA, 20 bp, Artificial Sequence
  Synthetic
ttgccacaacatcgtgatct

SEQ ID NO: 25199 - DNA, 20 bp, Artificial Sequence
  Synthetic
attgccacaacatcgtgatc

SEQ ID NO: 25200 - DNA, 20 bp, Artificial Sequence
  Synthetic
agatcacgatgttgtggcaa

SEQ ID NO: 25201 - DNA, 20 bp, Artificial Sequence
  Synthetic
cctacacaaggtagtgatga

SEQ ID NO: 25202 - DNA, 20 bp, Artificial Sequence
  Synthetic
aggtagtgatgaaggctctg

SEQ ID NO: 25203 - DNA, 20 bp, Artificial Sequence
  Synthetic
tgtggaaacatcagttcgca

SEQ ID NO: 25204 - DNA, 20 bp, Artificial Sequence
  Synthetic
atcagttcgcatggccattc

SEQ ID NO: 25205 - DNA, 20 bp, Artificial Sequence
  Synthetic
atggccattccggcagcctg

SEQ ID NO: 25206 - DNA, 20 bp, Artificial Sequence
  Synthetic
gcatccacaggctgccggaa

SEQ ID NO: 25207 - DNA, 20 bp, Artificial Sequence
  Synthetic
tgacagcatccacaggctgc

SEQ ID NO: 25208 - DNA, 20 bp, Artificial Sequence
  Synthetic
gcctgtggatgctgtcaaac

SEQ ID NO: 25209 - DNA, 20 bp, Artificial Sequence
  Synthetic
cccagtttgacagcatccac

SEQ ID NO: 25210 - DNA, 20 bp, Artificial Sequence
  Synthetic
cctgtggatgctgtcaaact

SEQ ID NO: 25211 - DNA, 20 bp, Artificial Sequence
  Synthetic
tgctgtcaaactgggtctac

SEQ ID NO: 25212 - DNA, 20 bp, Artificial Sequence
  Synthetic
caaaattataaaacagccta

SEQ ID NO: 25213 - DNA, 20 bp, Artificial Sequence
  Synthetic
tataaaacagcctatggaca

SEQ ID NO: 25214 - DNA, 20 bp, Artificial Sequence
  Synthetic
ataaaacagcctatggacat

SEQ ID NO: 25215 - DNA, 20 bp, Artificial Sequence
  Synthetic
ttaatagtacccatgtccat

SEQ ID NO: 25216 - DNA, 20 bp, Artificial Sequence
  Synthetic
tggacatgggtactattaag

SEQ ID NO: 25217 - DNA, 20 bp, Artificial Sequence
  Synthetic
gacttgaaaacaattattat

SEQ ID NO: 25218 - DNA, 20 bp, Artificial Sequence
  Synthetic
acttgaaaacaattattatt

SEQ ID NO: 25219 - DNA, 20 bp, Artificial Sequence
  Synthetic
aatgtaacagttggtgaaca

SEQ ID NO: 25220 - DNA, 20 bp, Artificial Sequence
  Synthetic
cttgttgtaaatgtaacagt

SEQ ID NO: 25221 - DNA, 20 bp, Artificial Sequence
  Synthetic
caactgttacatttacaaca

SEQ ID NO: 25222 - DNA, 20 bp, Artificial Sequence
  Synthetic
attaggacaatatcatcagt

SEQ ID NO: 25223 - DNA, 20 bp, Artificial Sequence
  Synthetic
cattaggacaatatcatcag

SEQ ID NO: 25224 - DNA, 20 bp, Artificial Sequence
  Synthetic
cactgatgatattgtcctaa

SEQ ID NO: 25225 - DNA, 20 bp, Artificial Sequence
  Synthetic
tttccagcgtttgtgccatt

SEQ ID NO: 25226 - DNA, 20 bp, Artificial Sequence
  Synthetic
atgtggtggtgaagacgctc

SEQ ID NO: 25227 - DNA, 20 bp, Artificial Sequence
  Synthetic
tctggaaacaccagttcgcc

SEQ ID NO: 25228 - DNA, 20 bp, Artificial Sequence
  Synthetic
ggtagaagggccaggcgaac

SEQ ID NO: 25229 - DNA, 20 bp, Artificial Sequence
  Synthetic
cacgggctggtagaagggcc

SEQ ID NO: 25230 - DNA, 20 bp, Artificial Sequence
  Synthetic
ctggcccttctaccagcccg

SEQ ID NO: 25231 - DNA, 20 bp, Artificial Sequence
  Synthetic
gcgtccacgggctggtagaa

SEQ ID NO: 25232 - DNA, 20 bp, Artificial Sequence
  Synthetic
tgcgtccacgggctggtaga

SEQ ID NO: 25233 - DNA, 20 bp, Artificial Sequence
  Synthetic
atttgattgcgtccacgggc

SEQ ID NO: 25234 - DNA, 20 bp, Artificial Sequence
  Synthetic
ttcaatttgattgcgtccac

SEQ ID NO: 25235 - DNA, 20 bp, Artificial Sequence
  Synthetic
gttcaatttgattgcgtcca

SEQ ID NO: 25236 - DNA, 20 bp, Artificial Sequence
  Synthetic
cgcaatcaaattgaacctgc

SEQ ID NO: 25237 - DNA, 20 bp, Artificial Sequence
  Synthetic
ggcagcagctacgcaccggc

SEQ ID NO: 25238 - DNA, 20 bp, Artificial Sequence
  Synthetic
taaaataattaaaaacccaa

SEQ ID NO: 25239 - DNA, 20 bp, Artificial Sequence
  Synthetic
aattaaaaacccaatggata

SEQ ID NO: 25240 - DNA, 20 bp, Artificial Sequence
  Synthetic
attaaaaacccaatggatat

SEQ ID NO: 25241 - DNA, 20 bp, Artificial Sequence
  Synthetic
ttaaaaacccaatggatatg

SEQ ID NO: 25242 - DNA, 20 bp, Artificial Sequence
  Synthetic
taatagtccccatatccatt

SEQ ID NO: 25243 - DNA, 20 bp, Artificial Sequence
  Synthetic
ttaatagtccccatatccat

SEQ ID NO: 25244 - DNA, 20 bp, Artificial Sequence
  Synthetic
gactagaaaataattattat

SEQ ID NO: 25245 - DNA, 20 bp, Artificial Sequence
  Synthetic
gagtgcaagcgaatgtatgc

SEQ ID NO: 25246 - DNA, 20 bp, Artificial Sequence
  Synthetic
aatgtaacaatttgtaaaca

SEQ ID NO: 25247 - DNA, 20 bp, Artificial Sequence
  Synthetic
aaattgttacatttataaca

SEQ ID NO: 25248 - DNA, 20 bp, Artificial Sequence
  Synthetic
attagcactatgtcatctgt

SEQ ID NO: 25249 - DNA, 20 bp, Artificial Sequence
  Synthetic
cattagcactatgtcatctg

SEQ ID NO: 25250 - DNA, 20 bp, Artificial Sequence
  Synthetic
cacagatgacatagtgctaa

SEQ ID NO: 25251 - DNA, 20 bp, Artificial Sequence
  Synthetic
gctactgcgacagcatcctc

SEQ ID NO: 25252 - DNA, 20 bp, Artificial Sequence
  Synthetic
ctactgcgacagcatcctca

SEQ ID NO: 25253 - DNA, 20 bp, Artificial Sequence
  Synthetic
tcttggatagcatctccctg

SEQ ID NO: 25254 - DNA, 20 bp, Artificial Sequence
  Synthetic
gatgctatccaagaagcacg

SEQ ID NO: 25255 - DNA, 20 bp, Artificial Sequence
  Synthetic
ggcgtaggccgcgtgcttct

SEQ ID NO: 25256 - DNA, 20 bp, Artificial Sequence
  Synthetic
agaagcacgcggcctacgcc

SEQ ID NO: 25257 - DNA, 20 bp, Artificial Sequence
  Synthetic
cttgtagaagggccaggcgt

SEQ ID NO: 25258 - DNA, 20 bp, Artificial Sequence
  Synthetic
cactggcttgtagaagggcc

SEQ ID NO: 25259 - DNA, 20 bp, Artificial Sequence
  Synthetic
ctggcccttctacaagccag

SEQ ID NO: 25260 - DNA, 20 bp, Artificial Sequence
  Synthetic
gcatccactggcttgtagaa

SEQ ID NO: 25261 - DNA, 20 bp, Artificial Sequence
  Synthetic
ggcatccactggcttgtaga

SEQ ID NO: 25262 - DNA, 20 bp, Artificial Sequence
  Synthetic
ctacaagccagtggatgccg

SEQ ID NO: 25263 - DNA, 20 bp, Artificial Sequence
  Synthetic
gccagtggatgccgaggccc

SEQ ID NO: 25264 - DNA, 20 bp, Artificial Sequence
  Synthetic
tccagggcctcggcatccac

SEQ ID NO: 25265 - DNA, 20 bp, Artificial Sequence
  Synthetic
gtcgtgcagctccagggcct

SEQ ID NO: 25266 - DNA, 20 bp, Artificial Sequence
  Synthetic
gtggtagtcgtgcagctcca

SEQ ID NO: 25267 - DNA, 20 bp, Artificial Sequence
  Synthetic
cgtggtagtcgtgcagctcc

SEQ ID NO: 25268 - DNA, 20 bp, Artificial Sequence
  Synthetic
tcgggtgcttgatgatgtcg

SEQ ID NO: 25269 - DNA, 20 bp, Artificial Sequence
  Synthetic
cgacatcatcaagcacccga

SEQ ID NO: 25270 - DNA, 20 bp, Artificial Sequence
  Synthetic
tcacggtgctgaggtccatc

SEQ ID NO: 25271 - DNA, 20 bp, Artificial Sequence
  Synthetic
ttcacggtgctgaggtccat

SEQ ID NO: 25272 - DNA, 20 bp, Artificial Sequence
  Synthetic
cacgtactttcacggtgctg

SEQ ID NO: 25273 - DNA, 20 bp, Artificial Sequence
  Synthetic
cgcgcggccacgtactttca

SEQ ID NO: 25274 - DNA, 20 bp, Artificial Sequence
  Synthetic
ctgtgtgttgcagaggaaga

SEQ ID NO: 25275 - DNA, 20 bp, Artificial Sequence
  Synthetic
gtgttgcagaggaagatgga

SEQ ID NO: 25276 - DNA, 20 bp, Artificial Sequence
  Synthetic
cctgtgcgtctgggtactct

SEQ ID NO: 25277 - DNA, 20 bp, Artificial Sequence
  Synthetic
ccgagagtacccagacgcac

SEQ ID NO: 25278 - DNA, 20 bp, Artificial Sequence
  Synthetic
cgagagtacccagacgcaca

SEQ ID NO: 25279 - DNA, 20 bp, Artificial Sequence
  Synthetic
cagcaaagccctgtgcgtct

SEQ ID NO: 25280 - DNA, 20 bp, Artificial Sequence
  Synthetic
gcagcaaagccctgtgcgtc

SEQ ID NO: 25281 - DNA, 20 bp, Artificial Sequence
  Synthetic
agggctttgctgctgatgtc

SEQ ID NO: 25282 - DNA, 20 bp, Artificial Sequence
  Synthetic
agcaattcgagaacatcagc

SEQ ID NO: 25283 - DNA, 20 bp, Artificial Sequence
  Synthetic
atacaatcccccagaccacg

SEQ ID NO: 25284 - DNA, 20 bp, Artificial Sequence
  Synthetic
tcccccagaccacgaggttg

SEQ ID NO: 25285 - DNA, 20 bp, Artificial Sequence
  Synthetic
gccacaacctcgtggtctgg

SEQ ID NO: 25286 - DNA, 20 bp, Artificial Sequence
  Synthetic
ggccacaacctcgtggtctg

SEQ ID NO: 25287 - DNA, 20 bp, Artificial Sequence
  Synthetic
tggccacaacctcgtggtct

SEQ ID NO: 25288 - DNA, 20 bp, Artificial Sequence
  Synthetic
atggccacaacctcgtggtc

SEQ ID NO: 25289 - DNA, 20 bp, Artificial Sequence
  Synthetic
agaccacgaggttgtggcca

SEQ ID NO: 25290 - DNA, 20 bp, Artificial Sequence
  Synthetic
gggccatggccacaacctcg

SEQ ID NO: 25291 - DNA, 20 bp, Artificial Sequence
  Synthetic
acgaggttgtggccatggcc

SEQ ID NO: 25292 - DNA, 20 bp, Artificial Sequence
  Synthetic
tacctggagcttccgggcca

SEQ ID NO: 25293 - DNA, 20 bp, Artificial Sequence
  Synthetic
tcgggttacctggagcttcc

SEQ ID NO: 25294 - DNA, 20 bp, Artificial Sequence
  Synthetic
ctcgggttacctggagcttc

SEQ ID NO: 25295 - DNA, 20 bp, Artificial Sequence
  Synthetic
gagtggtgctcaagacacta

SEQ ID NO: 25296 - DNA, 20 bp, Artificial Sequence
  Synthetic
tatggaaacaccagtttgca

SEQ ID NO: 25297 - DNA, 20 bp, Artificial Sequence
  Synthetic
gctggaaaggccatgcaaac

SEQ ID NO: 25298 - DNA, 20 bp, Artificial Sequence
  Synthetic
atggcctttccagcagcctg

SEQ ID NO: 25299 - DNA, 20 bp, Artificial Sequence
  Synthetic
gcatccacaggctgctggaa

SEQ ID NO: 25300 - DNA, 20 bp, Artificial Sequence
  Synthetic
tgacggcatccacaggctgc

SEQ ID NO: 25301 - DNA, 20 bp, Artificial Sequence
  Synthetic
ttcagcttgacggcatccac

SEQ ID NO: 25302 - DNA, 20 bp, Artificial Sequence
  Synthetic
cacagggaggttcagcttga

SEQ ID NO: 25303 - DNA, 20 bp, Artificial Sequence
  Synthetic
tgcccacactactcacaggg

SEQ ID NO: 25304 - DNA, 20 bp, Artificial Sequence
  Synthetic
taatgatcttatagtaatcc

SEQ ID NO: 25305 - DNA, 20 bp, Artificial Sequence
  Synthetic
taagatcattaaaacgccta

SEQ ID NO: 25306 - DNA, 20 bp, Artificial Sequence
  Synthetic
cattaaaacgcctatggata

SEQ ID NO: 25307 - DNA, 20 bp, Artificial Sequence
  Synthetic
attaaaacgcctatggatat

SEQ ID NO: 25308 - DNA, 20 bp, Artificial Sequence
  Synthetic
tttattgttcccatatccat

SEQ ID NO: 25309 - DNA, 20 bp, Artificial Sequence
  Synthetic
gggaacaataaagaagcgct

SEQ ID NO: 25310 - DNA, 20 bp, Artificial Sequence
  Synthetic
gcttggaaaacaactattac

SEQ ID NO: 25311 - DNA, 20 bp, Artificial Sequence
  Synthetic
caactattactggaatgctc

SEQ ID NO: 25312 - DNA, 20 bp, Artificial Sequence
  Synthetic
gaatgctcaggaatgtatcc

SEQ ID NO: 25313 - DNA, 20 bp, Artificial Sequence
  Synthetic
taaacatagtgttgaagtcc

SEQ ID NO: 25314 - DNA, 20 bp, Artificial Sequence
  Synthetic
aaattgttacatctacaaca

SEQ ID NO: 25315 - DNA, 20 bp, Artificial Sequence
  Synthetic
agactatgtcatctccaggc

SEQ ID NO: 25316 - DNA, 20 bp, Artificial Sequence
  Synthetic
attaagactatgtcatctcc

SEQ ID NO: 25317 - DNA, 20 bp, Artificial Sequence
  Synthetic
tggagatgacatagtcttaa

SEQ ID NO: 25318 - DNA, 20 bp, Artificial Sequence
  Synthetic
gagcagctcaagtgctgcag

SEQ ID NO: 25319 - DNA, 20 bp, Artificial Sequence
  Synthetic
gtgctgcagcggcatcctca

SEQ ID NO: 25320 - DNA, 20 bp, Artificial Sequence
  Synthetic
tcttggcaaacatctccttg

SEQ ID NO: 25321 - DNA, 20 bp, Artificial Sequence
  Synthetic
ggcgtaggcggcgtgcttct

SEQ ID NO: 25322 - DNA, 20 bp, Artificial Sequence
  Synthetic
agaagcacgccgcctacgcc

SEQ ID NO: 25323 - DNA, 20 bp, Artificial Sequence
  Synthetic
gtagaagggccaggcgtagg

SEQ ID NO: 25324 - DNA, 20 bp, Artificial Sequence
  Synthetic
cttgtagaagggccaggcgt

SEQ ID NO: 25325 - DNA, 20 bp, Artificial Sequence
  Synthetic
cacaggcttgtagaagggcc

SEQ ID NO: 25326 - DNA, 20 bp, Artificial Sequence
  Synthetic
ctggcccttctacaagcctg

SEQ ID NO: 25327 - DNA, 20 bp, Artificial Sequence
  Synthetic
acgtccacaggcttgtagaa

SEQ ID NO: 25328 - DNA, 20 bp, Artificial Sequence
  Synthetic
cacgtccacaggcttgtaga

SEQ ID NO: 25329 - DNA, 20 bp, Artificial Sequence
  Synthetic
cttctacaagcctgtggacg

SEQ ID NO: 25330 - DNA, 20 bp, Artificial Sequence
  Synthetic
ctacaagcctgtggacgtgg

SEQ ID NO: 25331 - DNA, 20 bp, Artificial Sequence
  Synthetic
gcctgtggacgtggaggcac

SEQ ID NO: 25332 - DNA, 20 bp, Artificial Sequence
  Synthetic
cccagtgcctccacgtccac

SEQ ID NO: 25333 - DNA, 20 bp, Artificial Sequence
  Synthetic
cctgtggacgtggaggcact

SEQ ID NO: 25334 - DNA, 20 bp, Artificial Sequence
  Synthetic
tgatgtcacagtagtcgtgt

SEQ ID NO: 25335 - DNA, 20 bp, Artificial Sequence
  Synthetic
tgacatcatcaagcacccca

SEQ ID NO: 25336 - DNA, 20 bp, Artificial Sequence
  Synthetic
tgattgtgctcatgtccatg

SEQ ID NO: 25337 - DNA, 20 bp, Artificial Sequence
  Synthetic
ttgattgtgctcatgtccat

SEQ ID NO: 25338 - DNA, 20 bp, Artificial Sequence
  Synthetic
cttgattgtgctcatgtcca

SEQ ID NO: 25339 - DNA, 20 bp, Artificial Sequence
  Synthetic
catggacatgagcacaatca

SEQ ID NO: 25340 - DNA, 20 bp, Artificial Sequence
  Synthetic
tcttgttttccagtctaaac

SEQ ID NO: 25341 - DNA, 20 bp, Artificial Sequence
  Synthetic
tgttttccagtctaaactgg

SEQ ID NO: 25342 - DNA, 20 bp, Artificial Sequence
  Synthetic
cacgggcctccagtttagac

SEQ ID NO: 25343 - DNA, 20 bp, Artificial Sequence
  Synthetic
ctgagcatcacggtactcac

SEQ ID NO: 25344 - DNA, 20 bp, Artificial Sequence
  Synthetic
cctgagcatcacggtactca

SEQ ID NO: 25345 - DNA, 20 bp, Artificial Sequence
  Synthetic
ccgtgagtaccgtgatgctc

SEQ ID NO: 25346 - DNA, 20 bp, Artificial Sequence
  Synthetic
taccgtgatgctcaggagtt

SEQ ID NO: 25347 - DNA, 20 bp, Artificial Sequence
  Synthetic
caccaaactcctgagcatca

SEQ ID NO: 25348 - DNA, 20 bp, Artificial Sequence
  Synthetic
agcagttggagaacatcaat

SEQ ID NO: 25349 - DNA, 20 bp, Artificial Sequence
  Synthetic
agggttgtacttatagcagt

SEQ ID NO: 25350 - DNA, 20 bp, Artificial Sequence
  Synthetic
gtacaaccctcctgaccatg

SEQ ID NO: 25351 - DNA, 20 bp, Artificial Sequence
  Synthetic
caaccctcctgaccatgagg

SEQ ID NO: 25352 - DNA, 20 bp, Artificial Sequence
  Synthetic
ccaccacctcatggtcagga

SEQ ID NO: 25353 - DNA, 20 bp, Artificial Sequence
  Synthetic
ccctcctgaccatgaggtgg

SEQ ID NO: 25354 - DNA, 20 bp, Artificial Sequence
  Synthetic
gccaccacctcatggtcagg

SEQ ID NO: 25355 - DNA, 20 bp, Artificial Sequence
  Synthetic
atggccaccacctcatggtc

SEQ ID NO: 25356 - DNA, 20 bp, Artificial Sequence
  Synthetic
tgaccatgaggtggtggcca

SEQ ID NO: 25357 - DNA, 20 bp, Artificial Sequence
  Synthetic
gggccatggccaccacctca

SEQ ID NO: 25358 - DNA, 20 bp, Artificial Sequence
  Synthetic
cacctggagcttgcgggcca

SEQ ID NO: 25359 - DNA, 20 bp, Artificial Sequence
  Synthetic
aagcctcacctggagcttgc

SEQ ID NO: 25360 - DNA, 20 bp, Artificial Sequence
  Synthetic
caagcctcacctggagcttg

SEQ ID NO: 25361 - DNA, 20 bp, Artificial Sequence
  Synthetic
aactgatgagacaattgcag

SEQ ID NO: 25362 - DNA, 20 bp, Artificial Sequence
  Synthetic
ggaaatgaaaagaaagcact

SEQ ID NO: 25363 - DNA, 20 bp, Artificial Sequence
  Synthetic
ggagcaataaaatcagtcac

SEQ ID NO: 25364 - DNA, 20 bp, Artificial Sequence
  Synthetic
gtgactgattttattgctcc

SEQ ID NO: 25365 - DNA, 20 bp, Artificial Sequence
  Synthetic
ttaatgatcatggagtagcc

SEQ ID NO: 25366 - DNA, 20 bp, Artificial Sequence
  Synthetic
cattgggtgtttaatgatca

SEQ ID NO: 25367 - DNA, 20 bp, Artificial Sequence
  Synthetic
catgatcattaaacacccaa

SEQ ID NO: 25368 - DNA, 20 bp, Artificial Sequence
  Synthetic
tcatggtactaaaatccatt

SEQ ID NO: 25369 - DNA, 20 bp, Artificial Sequence
  Synthetic
ttcatggtactaaaatccat

SEQ ID NO: 25370 - DNA, 20 bp, Artificial Sequence
  Synthetic
gttcttgatcttttctttca

SEQ ID NO: 25371 - DNA, 20 bp, Artificial Sequence
  Synthetic
tcagtccatagaagaactaa

SEQ ID NO: 25372 - DNA, 20 bp, Artificial Sequence
  Synthetic
agttacctttagttcttcta

SEQ ID NO: 25373 - DNA, 20 bp, Artificial Sequence
  Synthetic
ctctggtttattgtaaatca

SEQ ID NO: 25374 - DNA, 20 bp, Artificial Sequence
  Synthetic
gctttataataaatggtctc

SEQ ID NO: 25375 - DNA, 20 bp, Artificial Sequence
  Synthetic
ctttgcagctttataataaa

SEQ ID NO: 25376 - DNA, 20 bp, Artificial Sequence
  Synthetic
agaagactctcctgccagtc

SEQ ID NO: 25377 - DNA, 20 bp, Artificial Sequence
  Synthetic
caatcatcttccagactggc

SEQ ID NO: 25378 - DNA, 20 bp, Artificial Sequence
  Synthetic
ctggcaatcatcttccagac

SEQ ID NO: 25379 - DNA, 20 bp, Artificial Sequence
  Synthetic
ggaagatgattgccagtcac

SEQ ID NO: 25380 - DNA, 20 bp, Artificial Sequence
  Synthetic
gatgattgccagtcacaggt

SEQ ID NO: 25381 - DNA, 20 bp, Artificial Sequence
  Synthetic
tttggagacctacctgtgac

SEQ ID NO: 25382 - DNA, 20 bp, Artificial Sequence
  Synthetic
tctgacacaggcttcagaaa

SEQ ID NO: 25383 - DNA, 20 bp, Artificial Sequence
  Synthetic
ttctgaagcctgtgtcagaa

SEQ ID NO: 25384 - DNA, 20 bp, Artificial Sequence
  Synthetic
gaagcctgtgtcagaaaggc

SEQ ID NO: 25385 - DNA, 20 bp, Artificial Sequence
  Synthetic
ggggcctgcctttctgacac

SEQ ID NO: 25386 - DNA, 20 bp, Artificial Sequence
  Synthetic
gtgtcagaaaggcaggcccc

SEQ ID NO: 25387 - DNA, 20 bp, Artificial Sequence
  Synthetic
tgtcagaaaggcaggcccca

SEQ ID NO: 25388 - DNA, 20 bp, Artificial Sequence
  Synthetic
aaggcaggccccagggtaca

SEQ ID NO: 25389 - DNA, 20 bp, Artificial Sequence
  Synthetic
ggccccagggtacaaggatg

SEQ ID NO: 25390 - DNA, 20 bp, Artificial Sequence
  Synthetic
caccacatccttgtaccctg

SEQ ID NO: 25391 - DNA, 20 bp, Artificial Sequence
  Synthetic
tcaccacatccttgtaccct

SEQ ID NO: 25392 - DNA, 20 bp, Artificial Sequence
  Synthetic
ttcaccacatccttgtaccc

SEQ ID NO: 25393 - DNA, 20 bp, Artificial Sequence
  Synthetic
ggtacaaggatgtggtgaaa

SEQ ID NO: 25394 - DNA, 20 bp, Artificial Sequence
  Synthetic
cttggccacctgcagaccca

SEQ ID NO: 25395 - DNA, 20 bp, Artificial Sequence
  Synthetic
ttcaggctagttaagtccat

SEQ ID NO: 25396 - DNA, 20 bp, Artificial Sequence
  Synthetic
cttcaggctagttaagtcca

SEQ ID NO: 25397 - DNA, 20 bp, Artificial Sequence
  Synthetic
ccttagagagatttctcttc

SEQ ID NO: 25398 - DNA, 20 bp, Artificial Sequence
  Synthetic
cctgaagagaaatctctcta

SEQ ID NO: 25399 - DNA, 20 bp, Artificial Sequence
  Synthetic
ctgaagagaaatctctctaa

SEQ ID NO: 25400 - DNA, 20 bp, Artificial Sequence
  Synthetic
agagaaatctctctaagggt

SEQ ID NO: 25401 - DNA, 20 bp, Artificial Sequence
  Synthetic
taagggtcggattcgcacca

SEQ ID NO: 25402 - DNA, 20 bp, Artificial Sequence
  Synthetic
gtctcgcaggaattgggcca

SEQ ID NO: 25403 - DNA, 20 bp, Artificial Sequence
  Synthetic
catcaggtctcgcaggaatt

SEQ ID NO: 25404 - DNA, 20 bp, Artificial Sequence
  Synthetic
gcatcaggtctcgcaggaat

SEQ ID NO: 25405 - DNA, 20 bp, Artificial Sequence
  Synthetic
acatcagcatcaggtctcgc

SEQ ID NO: 25406 - DNA, 20 bp, Artificial Sequence
  Synthetic
cattttggaacatcagcatc

SEQ ID NO: 25407 - DNA, 20 bp, Artificial Sequence
  Synthetic
cattgtacattacagcattt

SEQ ID NO: 25408 - DNA, 20 bp, Artificial Sequence
  Synthetic
tgatcatcatgtataccata

SEQ ID NO: 25409 - DNA, 20 bp, Artificial Sequence
  Synthetic
tcatgtataccatatggctg

SEQ ID NO: 25410 - DNA, 20 bp, Artificial Sequence
  Synthetic
gccgcatctccacagccata

SEQ ID NO: 25411 - DNA, 20 bp, Artificial Sequence
  Synthetic
ggagagctgcagctaatcat

SEQ ID NO: 25412 - DNA, 20 bp, Artificial Sequence
  Synthetic
aacaggctgcaggaagacat

SEQ ID NO: 25413 - DNA, 20 bp, Artificial Sequence
  Synthetic
tgtcatctgtaacaggctgc

SEQ ID NO: 25414 - DNA, 20 bp, Artificial Sequence
  Synthetic
ggtgctatgtcatctgtaac

SEQ ID NO: 25415 - DNA, 20 bp, Artificial Sequence
  Synthetic
gttacagatgacatagcacc

SEQ ID NO: 25416 - DNA, 20 bp, Artificial Sequence
  Synthetic
tgcacaatgctgtggtagcc

SEQ ID NO: 25417 - DNA, 20 bp, Artificial Sequence
  Synthetic
gctaccacagcattgtgcag

SEQ ID NO: 25418 - DNA, 20 bp, Artificial Sequence
  Synthetic
ctcacctctgcacaatgctg

SEQ ID NO: 25419 - DNA, 20 bp, Artificial Sequence
  Synthetic
gttctttttttttaggccta

SEQ ID NO: 25420 - DNA, 20 bp, Artificial Sequence
  Synthetic
ttaatagttgacaaatccat

SEQ ID NO: 25421 - DNA, 20 bp, Artificial Sequence
  Synthetic
attaagaaaaacatagaaaa

SEQ ID NO: 25422 - DNA, 20 bp, Artificial Sequence
  Synthetic
gctgaaattcagctgtgctt

SEQ ID NO: 25423 - DNA, 20 bp, Artificial Sequence
  Synthetic
agaccatgatgtctatcaca

SEQ ID NO: 25424 - DNA, 20 bp, Artificial Sequence
  Synthetic
ctgccatgtgatagacatca

SEQ ID NO: 25425 - DNA, 20 bp, Artificial Sequence
  Synthetic
tgatgtctatcacatggcag

SEQ ID NO: 25426 - DNA, 20 bp, Artificial Sequence
  Synthetic
acttcctccgccagcttcag

SEQ ID NO: 25427 - DNA, 20 bp, Artificial Sequence
  Synthetic
tttacctctgaagctggcgg

SEQ ID NO: 25428 - DNA, 20 bp, Artificial Sequence
  Synthetic
cggtttacctctgaagctgg

SEQ ID NO: 25429 - DNA, 20 bp, Artificial Sequence
  Synthetic
ccccggtttacctctgaagc

SEQ ID NO: 25430 - DNA, 20 bp, Artificial Sequence
  Synthetic
gctttcagaaaagatcccca

SEQ ID NO: 25431 - DNA, 20 bp, Artificial Sequence
  Synthetic
ggaaaagcaaaaaatccatg

SEQ ID NO: 25432 - DNA, 20 bp, Artificial Sequence
  Synthetic
aggaaaagcaaaaaatccat

SEQ ID NO: 25433 - DNA, 20 bp, Artificial Sequence
  Synthetic
caggaaaagcaaaaaatcca

SEQ ID NO: 25434 - DNA, 20 bp, Artificial Sequence
  Synthetic
attttttgcttttcctgtca

SEQ ID NO: 25435 - DNA, 20 bp, Artificial Sequence
  Synthetic
ggagcaattgcatccgtgac

SEQ ID NO: 25436 - DNA, 20 bp, Artificial Sequence
  Synthetic
gtcacggatgcaattgctcc

SEQ ID NO: 25437 - DNA, 20 bp, Artificial Sequence
  Synthetic
tttattatcattgaatatcc

SEQ ID NO: 25438 - DNA, 20 bp, Artificial Sequence
  Synthetic
aatgataataaaacatccca

SEQ ID NO: 25439 - DNA, 20 bp, Artificial Sequence
  Synthetic
ataaaacatcccatggattt

SEQ ID NO: 25440 - DNA, 20 bp, Artificial Sequence
  Synthetic
ttcatggtgccaaaatccat

SEQ ID NO: 25441 - DNA, 20 bp, Artificial Sequence
  Synthetic
tttcatggtgccaaaatcca

SEQ ID NO: 25442 - DNA, 20 bp, Artificial Sequence
  Synthetic
agctacaattttgtctttca

SEQ ID NO: 25443 - DNA, 20 bp, Artificial Sequence
  Synthetic
taatgaatacaagtcagtta

SEQ ID NO: 25444 - DNA, 20 bp, Artificial Sequence
  Synthetic
caagtcagttacggaattta

SEQ ID NO: 25445 - DNA, 20 bp, Artificial Sequence
  Synthetic
ataatgcaatgacatacaat

SEQ ID NO: 25446 - DNA, 20 bp, Artificial Sequence
  Synthetic
aacttgtagtacacggtatc

SEQ ID NO: 25447 - DNA, 20 bp, Artificial Sequence
  Synthetic
agataccgtgtactacaagt

SEQ ID NO: 25448 - DNA, 20 bp, Artificial Sequence
  Synthetic
cttcgccaacttgtagtaca

SEQ ID NO: 25449 - DNA, 20 bp, Artificial Sequence
  Synthetic
tctacaaaaagttgtcctaa

SEQ ID NO: 25450 - DNA, 20 bp, Artificial Sequence
  Synthetic
aagttgtcctaaaggattta

SEQ ID NO: 25451 - DNA, 20 bp, Artificial Sequence
  Synthetic
tatgcttccataaatccttt

SEQ ID NO: 25452 - DNA, 20 bp, Artificial Sequence
  Synthetic
tatggaagcatagtttttca

SEQ ID NO: 25453 - DNA, 20 bp, Artificial Sequence
  Synthetic
atggccctttcaacgtcctg

SEQ ID NO: 25454 - DNA, 20 bp, Artificial Sequence
  Synthetic
gcatccacaggacgttgaaa

SEQ ID NO: 25455 - DNA, 20 bp, Artificial Sequence
  Synthetic
agcatccacaggacgttgaa

SEQ ID NO: 25456 - DNA, 20 bp, Artificial Sequence
  Synthetic
tgtagtttcacagcatccac

SEQ ID NO: 25457 - DNA, 20 bp, Artificial Sequence
  Synthetic
taccattataaaaaacccaa

SEQ ID NO: 25458 - DNA, 20 bp, Artificial Sequence
  Synthetic
atccattgggttttttataa

SEQ ID NO: 25459 - DNA, 20 bp, Artificial Sequence
  Synthetic
taattgtatttaaatccatt

SEQ ID NO: 25460 - DNA, 20 bp, Artificial Sequence
  Synthetic
ttaattgtatttaaatccat

SEQ ID NO: 25461 - DNA, 20 bp, Artificial Sequence
  Synthetic
aaatacaattaagaagcgct

SEQ ID NO: 25462 - DNA, 20 bp, Artificial Sequence
  Synthetic
ggagaataaatattatgcga

SEQ ID NO: 25463 - DNA, 20 bp, Artificial Sequence
  Synthetic
aaattgttatttatataaca

SEQ ID NO: 25464 - DNA, 20 bp, Artificial Sequence
  Synthetic
ataagaacaatgtcatctcc

SEQ ID NO: 25465 - DNA, 20 bp, Artificial Sequence
  Synthetic
tggagatgacattgttctta

SEQ ID NO: 25466 - DNA, 20 bp, Artificial Sequence
  Synthetic
agaaacatttttcatatgca

SEQ ID NO: 25467 - DNA, 20 bp, Artificial Sequence
  Synthetic
acgtcaacaggattataaaa

SEQ ID NO: 25468 - DNA, 20 bp, Artificial Sequence
  Synthetic
aacgtcaacaggattataaa

SEQ ID NO: 25469 - DNA, 20 bp, Artificial Sequence
  Synthetic
tcctgttgacgttaatgctt

SEQ ID NO: 25470 - DNA, 20 bp, Artificial Sequence
  Synthetic
cccaaagcattaacgtcaac

SEQ ID NO: 25471 - DNA, 20 bp, Artificial Sequence
  Synthetic
cctgttgacgttaatgcttt

SEQ ID NO: 25472 - DNA, 20 bp, Artificial Sequence
  Synthetic
tgacaacgtcatagtagtta

SEQ ID NO: 25473 - DNA, 20 bp, Artificial Sequence
  Synthetic
tgacgttgtcaaaaatccga

SEQ ID NO: 25474 - DNA, 20 bp, Artificial Sequence
  Synthetic
gtcaaaaatccgatggatct

SEQ ID NO: 25475 - DNA, 20 bp, Artificial Sequence
  Synthetic
ttaatagttccaagatccat

SEQ ID NO: 25476 - DNA, 20 bp, Artificial Sequence
  Synthetic
gatggatcttggaactatta

SEQ ID NO: 25477 - DNA, 20 bp, Artificial Sequence
  Synthetic
ttctttaatttaggagaaaa

SEQ ID NO: 25478 - DNA, 20 bp, Artificial Sequence
  Synthetic
aatggataaccaagaatata

SEQ ID NO: 25479 - DNA, 20 bp, Artificial Sequence
  Synthetic
tgtatgcatccttatattct

SEQ ID NO: 25480 - DNA, 20 bp, Artificial Sequence
  Synthetic
taaggatgcatacaaatttg

SEQ ID NO: 25481 - DNA, 20 bp, Artificial Sequence
  Synthetic
gtcacaacttcgtgatctgg

SEQ ID NO: 25482 - DNA, 20 bp, Artificial Sequence
  Synthetic
attgtcacaacttcgtgatc

SEQ ID NO: 25483 - DNA, 20 bp, Artificial Sequence
  Synthetic
agatcacgaagttgtgacaa

SEQ ID NO: 25484 - DNA, 20 bp, Artificial Sequence
  Synthetic
catcctccttcgcaaaacct

SEQ ID NO: 25485 - DNA, 20 bp, Artificial Sequence
  Synthetic
gctgctccaaggttttgcga

SEQ ID NO: 25486 - DNA, 20 bp, Artificial Sequence
  Synthetic
cttctcttggagctgctcca

SEQ ID NO: 25487 - DNA, 20 bp, Artificial Sequence
  Synthetic
cttggagcagctccaagaga

SEQ ID NO: 25488 - DNA, 20 bp, Artificial Sequence
  Synthetic
cagctccaagagaaggacac

SEQ ID NO: 25489 - DNA, 20 bp, Artificial Sequence
  Synthetic
tgttgcctgtgtccttctct

SEQ ID NO: 25490 - DNA, 20 bp, Artificial Sequence
  Synthetic
aggcaacatcttcagcgagc

SEQ ID NO: 25491 - DNA, 20 bp, Artificial Sequence
  Synthetic
cgagccggtccctctgtctg

SEQ ID NO: 25492 - DNA, 20 bp, Artificial Sequence
  Synthetic
gttacctcagacagagggac

SEQ ID NO: 25493 - DNA, 20 bp, Artificial Sequence
  Synthetic
attcggttacctcagacaga

SEQ ID NO: 25494 - DNA, 20 bp, Artificial Sequence
  Synthetic
aattcggttacctcagacag

SEQ ID NO: 25495 - DNA, 20 bp, Artificial Sequence
  Synthetic
ggtctaggtagtcaggtacc

SEQ ID NO: 25496 - DNA, 20 bp, Artificial Sequence
  Synthetic
ttgatgtggtctaggtagtc

SEQ ID NO: 25497 - DNA, 20 bp, Artificial Sequence
  Synthetic
tgggctttttgatgtggtct

SEQ ID NO: 25498 - DNA, 20 bp, Artificial Sequence
  Synthetic
agaccacatcaaaaagccca

SEQ ID NO: 25499 - DNA, 20 bp, Artificial Sequence
  Synthetic
agtccatgggctttttgatg

SEQ ID NO: 25500 - DNA, 20 bp, Artificial Sequence
  Synthetic
ttcatggtgaaaaagtccat

SEQ ID NO: 25501 - DNA, 20 bp, Artificial Sequence
  Synthetic
cttcatggtgaaaaagtcca

SEQ ID NO: 25502 - DNA, 20 bp, Artificial Sequence
  Synthetic
tttcaccatgaagcagaact

SEQ ID NO: 25503 - DNA, 20 bp, Artificial Sequence
  Synthetic
caccatgaagcagaacttgg

SEQ ID NO: 25504 - DNA, 20 bp, Artificial Sequence
  Synthetic
agcctccaagttctgcttca

SEQ ID NO: 25505 - DNA, 20 bp, Artificial Sequence
  Synthetic
aatcatcaaaattcaggtag

SEQ ID NO: 25506 - DNA, 20 bp, Artificial Sequence
  Synthetic
cctcaaaatcatcaaaattc

SEQ ID NO: 25507 - DNA, 20 bp, Artificial Sequence
  Synthetic
cctgaattttgatgattttg

SEQ ID NO: 25508 - DNA, 20 bp, Artificial Sequence
  Synthetic
gaattttgatgattttgagg

SEQ ID NO: 25509 - DNA, 20 bp, Artificial Sequence
  Synthetic
tgaggcagttgctgacgatg

SEQ ID NO: 25510 - DNA, 20 bp, Artificial Sequence
  Synthetic
ctgcctcaagtataacgcca

SEQ ID NO: 25511 - DNA, 20 bp, Artificial Sequence
  Synthetic
tgtccttggcgttatacttg

SEQ ID NO: 25512 - DNA, 20 bp, Artificial Sequence
  Synthetic
ccggtagaagatggtgtcct

SEQ ID NO: 25513 - DNA, 20 bp, Artificial Sequence
  Synthetic
ccaaggacaccatcttctac

SEQ ID NO: 25514 - DNA, 20 bp, Artificial Sequence
  Synthetic
caaggacaccatcttctacc

SEQ ID NO: 25515 - DNA, 20 bp, Artificial Sequence
  Synthetic
cactgctgcccggtagaaga

SEQ ID NO: 25516 - DNA, 20 bp, Artificial Sequence
  Synthetic
cacgaagccgcactgctgcc

SEQ ID NO: 25517 - DNA, 20 bp, Artificial Sequence
  Synthetic
agatgctgatgcggtggacg

SEQ ID NO: 25518 - DNA, 20 bp, Artificial Sequence
  Synthetic
tgtcaaagatgctgatgcgg

SEQ ID NO: 25519 - DNA, 20 bp, Artificial Sequence
  Synthetic
ggttgtcaaagatgctgatg

SEQ ID NO: 25520 - DNA, 20 bp, Artificial Sequence
  Synthetic
catcagcatctttgacaacc

SEQ ID NO: 25521 - DNA, 20 bp, Artificial Sequence
  Synthetic
catctttgacaacctggatg

SEQ ID NO: 25522 - DNA, 20 bp, Artificial Sequence
  Synthetic
caacctggatgtggtgtcag

SEQ ID NO: 25523 - DNA, 20 bp, Artificial Sequence
  Synthetic
catcctctgacaccacatcc

SEQ ID NO: 25524 - DNA, 20 bp, Artificial Sequence
  Synthetic
ggatgtggtgtcagaggatg

SEQ ID NO: 25525 - DNA, 20 bp, Artificial Sequence
  Synthetic
agaggatgaggaagcccccg

SEQ ID NO: 25526 - DNA, 20 bp, Artificial Sequence
  Synthetic
ggatgaggaagcccccgagg

SEQ ID NO: 25527 - DNA, 20 bp, Artificial Sequence
  Synthetic
attctcaggggcctcctcgg

SEQ ID NO: 25528 - DNA, 20 bp, Artificial Sequence
  Synthetic
cattctcaggggcctcctcg

SEQ ID NO: 25529 - DNA, 20 bp, Artificial Sequence
  Synthetic
ccattctcaggggcctcctc

SEQ ID NO: 25530 - DNA, 20 bp, Artificial Sequence
  Synthetic
cccgaggaggcccctgagaa

SEQ ID NO: 25531 - DNA, 20 bp, Artificial Sequence
  Synthetic
gccattctcaggggcctcct

SEQ ID NO: 25532 - DNA, 20 bp, Artificial Sequence
  Synthetic
cttgttgctgccattctcag

SEQ ID NO: 25533 - DNA, 20 bp, Artificial Sequence
  Synthetic
ccttgttgctgccattctca

SEQ ID NO: 25534 - DNA, 20 bp, Artificial Sequence
  Synthetic
ccctgagaatggcagcaaca

SEQ ID NO: 25535 - DNA, 20 bp, Artificial Sequence
  Synthetic
tccttgttgctgccattctc

SEQ ID NO: 25536 - DNA, 20 bp, Artificial Sequence
  Synthetic
cctgacttgggagtagcagc

SEQ ID NO: 25537 - DNA, 20 bp, Artificial Sequence
  Synthetic
ccagctgctactcccaagtc

SEQ ID NO: 25538 - DNA, 20 bp, Artificial Sequence
  Synthetic
ttcttatgtttgcctgactt

SEQ ID NO: 25539 - DNA, 20 bp, Artificial Sequence
  Synthetic
gttcttatgtttgcctgact

SEQ ID NO: 25540 - DNA, 20 bp, Artificial Sequence
  Synthetic
gtcaggcaaacataagaaca

SEQ ID NO: 25541 - DNA, 20 bp, Artificial Sequence
  Synthetic
taagaacaaggagaagcgca

SEQ ID NO: 25542 - DNA, 20 bp, Artificial Sequence
  Synthetic
attgtggtggtggtgatggt

SEQ ID NO: 25543 - DNA, 20 bp, Artificial Sequence
  Synthetic
aaacattgtggtggtggtga

SEQ ID NO: 25544 - DNA, 20 bp, Artificial Sequence
  Synthetic
tcgcagaaacattgtggtgg

SEQ ID NO: 25545 - DNA, 20 bp, Artificial Sequence
  Synthetic
tgctcgcagaaacattgtgg

SEQ ID NO: 25546 - DNA, 20 bp, Artificial Sequence
  Synthetic
tggtgctcgcagaaacattg

SEQ ID NO: 25547 - DNA, 20 bp, Artificial Sequence
  Synthetic
caccactcccaagctgccag

SEQ ID NO: 25548 - DNA, 20 bp, Artificial Sequence
  Synthetic
cacctctggcagcttgggag

SEQ ID NO: 25549 - DNA, 20 bp, Artificial Sequence
  Synthetic
cactcccaagctgccagagg

SEQ ID NO: 25550 - DNA, 20 bp, Artificial Sequence
  Synthetic
tagaccacctctggcagctt

SEQ ID NO: 25551 - DNA, 20 bp, Artificial Sequence
  Synthetic
atagaccacctctggcagct

SEQ ID NO: 25552 - DNA, 20 bp, Artificial Sequence
  Synthetic
agctgccagaggtggtctat

SEQ ID NO: 25553 - DNA, 20 bp, Artificial Sequence
  Synthetic
gctgccagaggtggtctatc

SEQ ID NO: 25554 - DNA, 20 bp, Artificial Sequence
  Synthetic
agctcccgatagaccacctc

SEQ ID NO: 25555 - DNA, 20 bp, Artificial Sequence
  Synthetic
agaggtggtctatcgggagc

SEQ ID NO: 25556 - DNA, 20 bp, Artificial Sequence
  Synthetic
ggtctatcgggagctggaac

SEQ ID NO: 25557 - DNA, 20 bp, Artificial Sequence
  Synthetic
acacccctgatgccccaccc

SEQ ID NO: 25558 - DNA, 20 bp, Artificial Sequence
  Synthetic
tggccggggtggggcatcag

SEQ ID NO: 25559 - DNA, 20 bp, Artificial Sequence
  Synthetic
ttggccggggtggggcatca

SEQ ID NO: 25560 - DNA, 20 bp, Artificial Sequence
  Synthetic
gttggccggggtggggcatc

SEQ ID NO: 25561 - DNA, 20 bp, Artificial Sequence
  Synthetic
ataggaagttggccggggtg

SEQ ID NO: 25562 - DNA, 20 bp, Artificial Sequence
  Synthetic
aataggaagttggccggggt

SEQ ID NO: 25563 - DNA, 20 bp, Artificial Sequence
  Synthetic
taataggaagttggccgggg

SEQ ID NO: 25564 - DNA, 20 bp, Artificial Sequence
  Synthetic
cggtaataggaagttggccg

SEQ ID NO: 25565 - DNA, 20 bp, Artificial Sequence
  Synthetic
ccggtaataggaagttggcc

SEQ ID NO: 25566 - DNA, 20 bp, Artificial Sequence
  Synthetic
cccggccaacttcctattac

SEQ ID NO: 25567 - DNA, 20 bp, Artificial Sequence
  Synthetic
accggtaataggaagttggc

SEQ ID NO: 25568 - DNA, 20 bp, Artificial Sequence
  Synthetic
ccttaccggtaataggaagt

SEQ ID NO: 25569 - DNA, 20 bp, Artificial Sequence
  Synthetic
gaggtggccttaccggtaat

SEQ ID NO: 25570 - DNA, 20 bp, Artificial Sequence
  Synthetic
gtacatcgagaagtctgcag

SEQ ID NO: 25571 - DNA, 20 bp, Artificial Sequence
  Synthetic
cgagaagtctgcagaggagc

SEQ ID NO: 25572 - DNA, 20 bp, Artificial Sequence
  Synthetic
gtctgcagaggagctggacg

SEQ ID NO: 25573 - DNA, 20 bp, Artificial Sequence
  Synthetic
cgaggaagtagagtatgaca

SEQ ID NO: 25574 - DNA, 20 bp, Artificial Sequence
  Synthetic
agtagagtatgacatggacg

SEQ ID NO: 25575 - DNA, 20 bp, Artificial Sequence
  Synthetic
agagtatgacatggacgagg

SEQ ID NO: 25576 - DNA, 20 bp, Artificial Sequence
  Synthetic
tggacgaggaggactacatc

SEQ ID NO: 25577 - DNA, 20 bp, Artificial Sequence
  Synthetic
cgaggaggactacatctggc

SEQ ID NO: 25578 - DNA, 20 bp, Artificial Sequence
  Synthetic
tggatatcatgaatgagcgt

SEQ ID NO: 25579 - DNA, 20 bp, Artificial Sequence
  Synthetic
gaatgagcgtcggaagacag

SEQ ID NO: 25580 - DNA, 20 bp, Artificial Sequence
  Synthetic
aatgagcgtcggaagacaga

SEQ ID NO: 25581 - DNA, 20 bp, Artificial Sequence
  Synthetic
gggtgtaagtcccatcccgc

SEQ ID NO: 25582 - DNA, 20 bp, Artificial Sequence
  Synthetic
tcaaagatctcctgcgggat

SEQ ID NO: 25583 - DNA, 20 bp, Artificial Sequence
  Synthetic
ctcaaagatctcctgcggga

SEQ ID NO: 25584 - DNA, 20 bp, Artificial Sequence
  Synthetic
ggtactcaaagatctcctgc

SEQ ID NO: 25585 - DNA, 20 bp, Artificial Sequence
  Synthetic
aggtactcaaagatctcctg

SEQ ID NO: 25586 - DNA, 20 bp, Artificial Sequence
  Synthetic
ggagatctttgagtacctaa

SEQ ID NO: 25587 - DNA, 20 bp, Artificial Sequence
  Synthetic
tgagtacctaatggaccgac

SEQ ID NO: 25588 - DNA, 20 bp, Artificial Sequence
  Synthetic
ccttctccagtcggtccatt

SEQ ID NO: 25589 - DNA, 20 bp, Artificial Sequence
  Synthetic
cctaatggaccgactggaga

SEQ ID NO: 25590 - DNA, 20 bp, Artificial Sequence
  Synthetic
agtacgactccttctccagt

SEQ ID NO: 25591 - DNA, 20 bp, Artificial Sequence
  Synthetic
tgttctgttgaggacaacac

SEQ ID NO: 25592 - DNA, 20 bp, Artificial Sequence
  Synthetic
gacaacactggacctgctgc

SEQ ID NO: 25593 - DNA, 20 bp, Artificial Sequence
  Synthetic
actggacctgctgcaggaga

SEQ ID NO: 25594 - DNA, 20 bp, Artificial Sequence
  Synthetic
caggatccttctcctgcagc

SEQ ID NO: 25595 - DNA, 20 bp, Artificial Sequence
  Synthetic
ggttctgcgaagatgtgtgc

SEQ ID NO: 25596 - DNA, 20 bp, Artificial Sequence
  Synthetic
agaaccagtcaacttgagtg

SEQ ID NO: 25597 - DNA, 20 bp, Artificial Sequence
  Synthetic
cttgcctcactcaagttgac

SEQ ID NO: 25598 - DNA, 20 bp, Artificial Sequence
  Synthetic
tgtttaggttccagattacc

SEQ ID NO: 25599 - DNA, 20 bp, Artificial Sequence
  Synthetic
gatatgaattccaggtaatc

SEQ ID NO: 25600 - DNA, 20 bp, Artificial Sequence
  Synthetic
ttggcttggatatgaattcc

SEQ ID NO: 25601 - DNA, 20 bp, Artificial Sequence
  Synthetic
ggaattcatatccaagccaa

SEQ ID NO: 25602 - DNA, 20 bp, Artificial Sequence
  Synthetic
agtagaaaaatccattggct

SEQ ID NO: 25603 - DNA, 20 bp, Artificial Sequence
  Synthetic
ctcatagtagaaaaatccat

SEQ ID NO: 25604 - DNA, 20 bp, Artificial Sequence
  Synthetic
caatggatttttctactatg

SEQ ID NO: 25605 - DNA, 20 bp, Artificial Sequence
  Synthetic
tggatttttctactatgagg

SEQ ID NO: 25606 - DNA, 20 bp, Artificial Sequence
  Synthetic
ttctactatgaggcggaagc

SEQ ID NO: 25607 - DNA, 20 bp, Artificial Sequence
  Synthetic
gtcccacctgtaccgcacct

SEQ ID NO: 25608 - DNA, 20 bp, Artificial Sequence
  Synthetic
ctccaaggtgcggtacaggt

SEQ ID NO: 25609 - DNA, 20 bp, Artificial Sequence
  Synthetic
cctccaaggtgcggtacagg

SEQ ID NO: 25610 - DNA, 20 bp, Artificial Sequence
  Synthetic
ccacctgtaccgcaccttgg

SEQ ID NO: 25611 - DNA, 20 bp, Artificial Sequence
  Synthetic
actcctccaaggtgcggtac

SEQ ID NO: 25612 - DNA, 20 bp, Artificial Sequence
  Synthetic
cctcaaactcctccaaggtg

SEQ ID NO: 25613 - DNA, 20 bp, Artificial Sequence
  Synthetic
ccgcaccttggaggagtttg

SEQ ID NO: 25614 - DNA, 20 bp, Artificial Sequence
  Synthetic
caccttggaggagtttgagg

SEQ ID NO: 25615 - DNA, 20 bp, Artificial Sequence
  Synthetic
gtcctcctcaaactcctcca

SEQ ID NO: 25616 - DNA, 20 bp, Artificial Sequence
  Synthetic
tcatgcagttggtaactata

SEQ ID NO: 25617 - DNA, 20 bp, Artificial Sequence
  Synthetic
agcattatacttcatgcagt

SEQ ID NO: 25618 - DNA, 20 bp, Artificial Sequence
  Synthetic
gcaggcggacagctgctcgg

SEQ ID NO: 25619 - DNA, 20 bp, Artificial Sequence
  Synthetic
cccgcaggcggacagctgct

SEQ ID NO: 25620 - DNA, 20 bp, Artificial Sequence
  Synthetic
catagatgctgatacgatgc

SEQ ID NO: 25621 - DNA, 20 bp, Artificial Sequence
  Synthetic
cttcagtaatgattttgagt

SEQ ID NO: 25622 - DNA, 20 bp, Artificial Sequence
  Synthetic
tcttcagtaatgattttgag

SEQ ID NO: 25623 - DNA, 20 bp, Artificial Sequence
  Synthetic
tgaagatgagctaactgccc

SEQ ID NO: 25624 - DNA, 20 bp, Artificial Sequence
  Synthetic
attgcattcggtgatatcct

SEQ ID NO: 25625 - DNA, 20 bp, Artificial Sequence
  Synthetic
tattgcattcggtgatatcc

SEQ ID NO: 25626 - DNA, 20 bp, Artificial Sequence
  Synthetic
caccgaatgcaatagtaaca

SEQ ID NO: 25627 - DNA, 20 bp, Artificial Sequence
  Synthetic
ttccttgttactattgcatt

SEQ ID NO: 25628 - DNA, 20 bp, Artificial Sequence
  Synthetic
agtgaacagcctcagttccc

SEQ ID NO: 25629 - DNA, 20 bp, Artificial Sequence
  Synthetic
ttggacttgccagggaactg

SEQ ID NO: 25630 - DNA, 20 bp, Artificial Sequence
  Synthetic
agggtttcttggacttgcca

SEQ ID NO: 25631 - DNA, 20 bp, Artificial Sequence
  Synthetic
gagggtttcttggacttgcc

SEQ ID NO: 25632 - DNA, 20 bp, Artificial Sequence
  Synthetic
gtccaagaaaccctcatcca

SEQ ID NO: 25633 - DNA, 20 bp, Artificial Sequence
  Synthetic
tccaagaaaccctcatccaa

SEQ ID NO: 25634 - DNA, 20 bp, Artificial Sequence
  Synthetic
gcccttggatgagggtttct

SEQ ID NO: 25635 - DNA, 20 bp, Artificial Sequence
  Synthetic
ttctttttgcccttggatga

SEQ ID NO: 25636 - DNA, 20 bp, Artificial Sequence
  Synthetic
cttctttttgcccttggatg

SEQ ID NO: 25637 - DNA, 20 bp, Artificial Sequence
  Synthetic
ctcatccaagggcaaaaaga

SEQ ID NO: 25638 - DNA, 20 bp, Artificial Sequence
  Synthetic
ggattccttctttttgccct

SEQ ID NO: 25639 - DNA, 20 bp, Artificial Sequence
  Synthetic
tcctgctccaagcatgcatc

SEQ ID NO: 25640 - DNA, 20 bp, Artificial Sequence
  Synthetic
accagatgcatgcttggagc

SEQ ID NO: 25641 - DNA, 20 bp, Artificial Sequence
  Synthetic
ggaagtaccagatgcatgct

SEQ ID NO: 25642 - DNA, 20 bp, Artificial Sequence
  Synthetic
gctgggctgtgggaggtgga

SEQ ID NO: 25643 - DNA, 20 bp, Artificial Sequence
  Synthetic
ggaagctgggctgtgggagg

SEQ ID NO: 25644 - DNA, 20 bp, Artificial Sequence
  Synthetic
tacggaagctgggctgtggg

SEQ ID NO: 25645 - DNA, 20 bp, Artificial Sequence
  Synthetic
ccatacggaagctgggctgt

SEQ ID NO: 25646 - DNA, 20 bp, Artificial Sequence
  Synthetic
cccacagcccagcttccgta

SEQ ID NO: 25647 - DNA, 20 bp, Artificial Sequence
  Synthetic
accatacggaagctgggctg

SEQ ID NO: 25648 - DNA, 20 bp, Artificial Sequence
  Synthetic
acagcccagcttccgtatgg

SEQ ID NO: 25649 - DNA, 20 bp, Artificial Sequence
  Synthetic
gagtccaccatacggaagct

SEQ ID NO: 25650 - DNA, 20 bp, Artificial Sequence
  Synthetic
tgagtccaccatacggaagc

SEQ ID NO: 25651 - DNA, 20 bp, Artificial Sequence
  Synthetic
agcttccgtatggtggactc

SEQ ID NO: 25652 - DNA, 20 bp, Artificial Sequence
  Synthetic
ggatgcctgagtccaccata

SEQ ID NO: 25653 - DNA, 20 bp, Artificial Sequence
  Synthetic
gcagcgggggtgcttctggc

SEQ ID NO: 25654 - DNA, 20 bp, Artificial Sequence
  Synthetic
gcaggcagcgggggtgcttc

SEQ ID NO: 25655 - DNA, 20 bp, Artificial Sequence
  Synthetic
tagtaggcagcaggcagcgg

SEQ ID NO: 25656 - DNA, 20 bp, Artificial Sequence
  Synthetic
gtagtaggcagcaggcagcg

SEQ ID NO: 25657 - DNA, 20 bp, Artificial Sequence
  Synthetic
ggtagtaggcagcaggcagc

SEQ ID NO: 25658 - DNA, 20 bp, Artificial Sequence
  Synthetic
cggtagtaggcagcaggcag

SEQ ID NO: 25659 - DNA, 20 bp, Artificial Sequence
  Synthetic
atgtagcggtagtaggcagc

SEQ ID NO: 25660 - DNA, 20 bp, Artificial Sequence
  Synthetic
cttctcaatgtagcggtagt

SEQ ID NO: 25661 - DNA, 20 bp, Artificial Sequence
  Synthetic
caggtggcttctcaatgtag

SEQ ID NO: 25662 - DNA, 20 bp, Artificial Sequence
  Synthetic
tgagaagccacctgaagacc

SEQ ID NO: 25663 - DNA, 20 bp, Artificial Sequence
  Synthetic
tctgcatccaggtcttcagg

SEQ ID NO: 25664 - DNA, 20 bp, Artificial Sequence
  Synthetic
acctgaagacctggatgcag

SEQ ID NO: 25665 - DNA, 20 bp, Artificial Sequence
  Synthetic
acctctgcatccaggtcttc

SEQ ID NO: 25666 - DNA, 20 bp, Artificial Sequence
  Synthetic
catactctacctctgcatcc

SEQ ID NO: 25667 - DNA, 20 bp, Artificial Sequence
  Synthetic
tgcagaggtagagtatgaca

SEQ ID NO: 25668 - DNA, 20 bp, Artificial Sequence
  Synthetic
ggtagagtatgacatggatg

SEQ ID NO: 25669 - DNA, 20 bp, Artificial Sequence
  Synthetic
agagtatgacatggatgagg

SEQ ID NO: 25670 - DNA, 20 bp, Artificial Sequence
  Synthetic
tggatgaggaggaccttgcc

SEQ ID NO: 25671 - DNA, 20 bp, Artificial Sequence
  Synthetic
tgaggaggaccttgcctggc

SEQ ID NO: 25672 - DNA, 20 bp, Artificial Sequence
  Synthetic
ggaccttgcctggctggaca

SEQ ID NO: 25673 - DNA, 20 bp, Artificial Sequence
  Synthetic
tcaccatgtccagccaggca

SEQ ID NO: 25674 - DNA, 20 bp, Artificial Sequence
  Synthetic
ttcattcaccatgtccagcc

SEQ ID NO: 25675 - DNA, 20 bp, Artificial Sequence
  Synthetic
tggacatggtgaatgaaaaa

SEQ ID NO: 25676 - DNA, 20 bp, Artificial Sequence
  Synthetic
aatgaaaaacggcgagtaga

SEQ ID NO: 25677 - DNA, 20 bp, Artificial Sequence
  Synthetic
atgaaaaacggcgagtagat

SEQ ID NO: 25678 - DNA, 20 bp, Artificial Sequence
  Synthetic
gcgagtagatgggcacagtt

SEQ ID NO: 25679 - DNA, 20 bp, Artificial Sequence
  Synthetic
tgcagatacctttgagctgc

SEQ ID NO: 25680 - DNA, 20 bp, Artificial Sequence
  Synthetic
ccggtctaccagcagctcaa

SEQ ID NO: 25681 - DNA, 20 bp, Artificial Sequence
  Synthetic
cctttgagctgctggtagac

SEQ ID NO: 25682 - DNA, 20 bp, Artificial Sequence
  Synthetic
agtatgactctttctcaagc

SEQ ID NO: 25683 - DNA, 20 bp, Artificial Sequence
  Synthetic
caactggaagaaacagtgta

SEQ ID NO: 25684 - DNA, 20 bp, Artificial Sequence
  Synthetic
aaatcaacaggttgtctaaa

SEQ ID NO: 25685 - DNA, 20 bp, Artificial Sequence
  Synthetic
atttagacaacctgttgatt

SEQ ID NO: 25686 - DNA, 20 bp, Artificial Sequence
  Synthetic
ggatattcaaccaaatcaac

SEQ ID NO: 25687 - DNA, 20 bp, Artificial Sequence
  Synthetic
agatattatagataccccaa

SEQ ID NO: 25688 - DNA, 20 bp, Artificial Sequence
  Synthetic
atagataccccaatggattt

SEQ ID NO: 25689 - DNA, 20 bp, Artificial Sequence
  Synthetic
tactgttccaaaatccattg

SEQ ID NO: 25690 - DNA, 20 bp, Artificial Sequence
  Synthetic
ttactgttccaaaatccatt

SEQ ID NO: 25691 - DNA, 20 bp, Artificial Sequence
  Synthetic
cttactgttccaaaatccat

SEQ ID NO: 25692 - DNA, 20 bp, Artificial Sequence
  Synthetic
caatggattttggaacagta

SEQ ID NO: 25693 - DNA, 20 bp, Artificial Sequence
  Synthetic
aatggattttggaacagtaa

SEQ ID NO: 25694 - DNA, 20 bp, Artificial Sequence
  Synthetic
agtaagggaaactctagatg

SEQ ID NO: 25695 - DNA, 20 bp, Artificial Sequence
  Synthetic
gtaagggaaactctagatgc

SEQ ID NO: 25696 - DNA, 20 bp, Artificial Sequence
  Synthetic
gggaaattatgacagccctt

SEQ ID NO: 25697 - DNA, 20 bp, Artificial Sequence
  Synthetic
tgtctttgcaaaactccaaa

SEQ ID NO: 25698 - DNA, 20 bp, Artificial Sequence
  Synthetic
atgtctttgcaaaactccaa

SEQ ID NO: 25699 - DNA, 20 bp, Artificial Sequence
  Synthetic
tggagttttgcaaagacatc

SEQ ID NO: 25700 - DNA, 20 bp, Artificial Sequence
  Synthetic
ttgcattgctaaatatcagc

SEQ ID NO: 25701 - DNA, 20 bp, Artificial Sequence
  Synthetic
tacaccaaacaaaagatcaa

SEQ ID NO: 25702 - DNA, 20 bp, Artificial Sequence
  Synthetic
attacctttgatcttttgtt

SEQ ID NO: 25703 - DNA, 20 bp, Artificial Sequence
  Synthetic
gaatgtgatagaattatcag

SEQ ID NO: 25704 - DNA, 20 bp, Artificial Sequence
  Synthetic
atagatcaacttttgaatct

SEQ ID NO: 25705 - DNA, 20 bp, Artificial Sequence
  Synthetic
gatatagcagcagcttttgc

SEQ ID NO: 25706 - DNA, 20 bp, Artificial Sequence
  Synthetic
ggtatgtacacaaatcaaca

SEQ ID NO: 25707 - DNA, 20 bp, Artificial Sequence
  Synthetic
gggtatgtacacaaatcaac

SEQ ID NO: 25708 - DNA, 20 bp, Artificial Sequence
  Synthetic
ctactacagtacagtacttc

SEQ ID NO: 25709 - DNA, 20 bp, Artificial Sequence
  Synthetic
gctactacagtacagtactt

SEQ ID NO: 25710 - DNA, 20 bp, Artificial Sequence
  Synthetic
cgaattgtgtaaagatcggt

SEQ ID NO: 25711 - DNA, 20 bp, Artificial Sequence
  Synthetic
cattcgaattgtgtaaagat

SEQ ID NO: 25712 - DNA, 20 bp, Artificial Sequence
  Synthetic
gacttgttaatcgattttac

SEQ ID NO: 25713 - DNA, 20 bp, Artificial Sequence
  Synthetic
ggaggctgtctgcgttagtt

SEQ ID NO: 25714 - DNA, 20 bp, Artificial Sequence
  Synthetic
gaggctgtctgcgttagttt

SEQ ID NO: 25715 - DNA, 20 bp, Artificial Sequence
  Synthetic
ctcaggttcgttaaatgttc

SEQ ID NO: 25716 - DNA, 20 bp, Artificial Sequence
  Synthetic
gatcttgcaattacactctc

SEQ ID NO: 25717 - DNA, 20 bp, Artificial Sequence
  Synthetic
aaaatgcacagaaggattct

SEQ ID NO: 25718 - DNA, 20 bp, Artificial Sequence
  Synthetic
tttactgtgtagcatttgat

SEQ ID NO: 25719 - DNA, 20 bp, Artificial Sequence
  Synthetic
tgtgtagcatttgataggac

SEQ ID NO: 25720 - DNA, 20 bp, Artificial Sequence
  Synthetic
ttagggttcagatgactgtt

SEQ ID NO: 25721 - DNA, 20 bp, Artificial Sequence
  Synthetic
atgactgtttggtaaagatt

SEQ ID NO: 25722 - DNA, 20 bp, Artificial Sequence
  Synthetic
ctcttaatgtagataacaag

SEQ ID NO: 25723 - DNA, 20 bp, Artificial Sequence
  Synthetic
cgcttgttatctacattaag

SEQ ID NO: 25724 - DNA, 20 bp, Artificial Sequence
  Synthetic
ttctgcagaaatttcagata

SEQ ID NO: 25725 - DNA, 20 bp, Artificial Sequence
  Synthetic
tgagaatacaatgattgctg

SEQ ID NO: 25726 - DNA, 20 bp, Artificial Sequence
  Synthetic
gagaatacaatgattgctgc

SEQ ID NO: 25727 - DNA, 20 bp, Artificial Sequence
  Synthetic
agaatacaatgattgctgcg

SEQ ID NO: 25728 - DNA, 20 bp, Artificial Sequence
  Synthetic
gtgataaaattattagagtg

SEQ ID NO: 25729 - DNA, 20 bp, Artificial Sequence
  Synthetic
gccccagttgctgtgctcca

SEQ ID NO: 25730 - DNA, 20 bp, Artificial Sequence
  Synthetic
tccttggagcacagcaactg

SEQ ID NO: 25731 - DNA, 20 bp, Artificial Sequence
  Synthetic
gtccttggagcacagcaact

SEQ ID NO: 25732 - DNA, 20 bp, Artificial Sequence
  Synthetic
tgtccttggagcacagcaac

SEQ ID NO: 25733 - DNA, 20 bp, Artificial Sequence
  Synthetic
gctgtgctccaaggacacac

SEQ ID NO: 25734 - DNA, 20 bp, Artificial Sequence
  Synthetic
taattgatcctgtgtgtcct

SEQ ID NO: 25735 - DNA, 20 bp, Artificial Sequence
  Synthetic
aggatcaattacatctttac

SEQ ID NO: 25736 - DNA, 20 bp, Artificial Sequence
  Synthetic
tactttttagtttagcccga

SEQ ID NO: 25737 - DNA, 20 bp, Artificial Sequence
  Synthetic
tagtttagcccgatggccaa

SEQ ID NO: 25738 - DNA, 20 bp, Artificial Sequence
  Synthetic
tttgagagcctttggccatc

SEQ ID NO: 25739 - DNA, 20 bp, Artificial Sequence
  Synthetic
ctttgagagcctttggccat

SEQ ID NO: 25740 - DNA, 20 bp, Artificial Sequence
  Synthetic
catgtatctttgagagcctt

SEQ ID NO: 25741 - DNA, 20 bp, Artificial Sequence
  Synthetic
caaaggctctcaaagataca

SEQ ID NO: 25742 - DNA, 20 bp, Artificial Sequence
  Synthetic
caaagatacatggtttccac

SEQ ID NO: 25743 - DNA, 20 bp, Artificial Sequence
  Synthetic
atggtttccactggtgctga

SEQ ID NO: 25744 - DNA, 20 bp, Artificial Sequence
  Synthetic
tggtttccactggtgctgat

SEQ ID NO: 25745 - DNA, 20 bp, Artificial Sequence
  Synthetic
aactgtcccatcagcaccag

SEQ ID NO: 25746 - DNA, 20 bp, Artificial Sequence
  Synthetic
ctgatgggacagtttgcttt

SEQ ID NO: 25747 - DNA, 20 bp, Artificial Sequence
  Synthetic
acaactgcttcataacttaa

SEQ ID NO: 25748 - DNA, 20 bp, Artificial Sequence
  Synthetic
ctgcttcataacttaatggt

SEQ ID NO: 25749 - DNA, 20 bp, Artificial Sequence
  Synthetic
tgctgatgaagtatttgttc

SEQ ID NO: 25750 - DNA, 20 bp, Artificial Sequence
  Synthetic
aacataattctggaatcaaa

SEQ ID NO: 25751 - DNA, 20 bp, Artificial Sequence
  Synthetic
taacataattctggaatcaa

SEQ ID NO: 25752 - DNA, 20 bp, Artificial Sequence
  Synthetic
tccagaattatgttatctgc

SEQ ID NO: 25753 - DNA, 20 bp, Artificial Sequence
  Synthetic
tcctgcagataacataattc

SEQ ID NO: 25754 - DNA, 20 bp, Artificial Sequence
  Synthetic
atgttatctgcaggacatga

SEQ ID NO: 25755 - DNA, 20 bp, Artificial Sequence
  Synthetic
atgatggcagcatatttata

SEQ ID NO: 25756 - DNA, 20 bp, Artificial Sequence
  Synthetic
tgatggcagcatatttatat

SEQ ID NO: 25757 - DNA, 20 bp, Artificial Sequence
  Synthetic
ttcaagttctgcgatttttt

SEQ ID NO: 25758 - DNA, 20 bp, Artificial Sequence
  Synthetic
aaacgtggatgcttacagtg

SEQ ID NO: 25759 - DNA, 20 bp, Artificial Sequence
  Synthetic
agtatccaattttgtaacaa

SEQ ID NO: 25760 - DNA, 20 bp, Artificial Sequence
  Synthetic
gatcaccattgttacaaaat

SEQ ID NO: 25761 - DNA, 20 bp, Artificial Sequence
  Synthetic
aattttgtaacaatggtgat

SEQ ID NO: 25762 - DNA, 20 bp, Artificial Sequence
  Synthetic
aatgttttaaggttcctaag

SEQ ID NO: 25763 - DNA, 20 bp, Artificial Sequence
  Synthetic
ttcctaagtggtagcagaga

SEQ ID NO: 25764 - DNA, 20 bp, Artificial Sequence
  Synthetic
ttccatctctgctaccactt

SEQ ID NO: 25765 - DNA, 20 bp, Artificial Sequence
  Synthetic
gtagcagagatggaacagca

SEQ ID NO: 25766 - DNA, 20 bp, Artificial Sequence
  Synthetic
gagatggaacagcacggatt

SEQ ID NO: 25767 - DNA, 20 bp, Artificial Sequence
  Synthetic
catcaaccaccttctttccc

SEQ ID NO: 25768 - DNA, 20 bp, Artificial Sequence
  Synthetic
atcaaccaccttctttccct

SEQ ID NO: 25769 - DNA, 20 bp, Artificial Sequence
  Synthetic
tcatacccagggaaagaagg

SEQ ID NO: 25770 - DNA, 20 bp, Artificial Sequence
  Synthetic
tcatcatacccagggaaaga

SEQ ID NO: 25771 - DNA, 20 bp, Artificial Sequence
  Synthetic
tttcacattcatcataccca

SEQ ID NO: 25772 - DNA, 20 bp, Artificial Sequence
  Synthetic
cactggaacagcaaaagggc

SEQ ID NO: 25773 - DNA, 20 bp, Artificial Sequence
  Synthetic
cagcccttttgctgttccag

SEQ ID NO: 25774 - DNA, 20 bp, Artificial Sequence
  Synthetic
gatccactggaacagcaaaa

SEQ ID NO: 25775 - DNA, 20 bp, Artificial Sequence
  Synthetic
agatccactggaacagcaaa

SEQ ID NO: 25776 - DNA, 20 bp, Artificial Sequence
  Synthetic
gggtaggcactgagatccac

SEQ ID NO: 25777 - DNA, 20 bp, Artificial Sequence
  Synthetic
tacagtacaatacaaggggt

SEQ ID NO: 25778 - DNA, 20 bp, Artificial Sequence
  Synthetic
caactacagtacaatacaag

SEQ ID NO: 25779 - DNA, 20 bp, Artificial Sequence
  Synthetic
gcaactacagtacaatacaa

SEQ ID NO: 25780 - DNA, 20 bp, Artificial Sequence
  Synthetic
agcaactacagtacaataca

SEQ ID NO: 25781 - DNA, 20 bp, Artificial Sequence
  Synthetic
ctgatggtattgaggtcagt

SEQ ID NO: 25782 - DNA, 20 bp, Artificial Sequence
  Synthetic
caactgacctcaataccatc

SEQ ID NO: 25783 - DNA, 20 bp, Artificial Sequence
  Synthetic
ctgacctcaataccatcagg

SEQ ID NO: 25784 - DNA, 20 bp, Artificial Sequence
  Synthetic
gtctccgcctgatggtattg

SEQ ID NO: 25785 - DNA, 20 bp, Artificial Sequence
  Synthetic
attttcaagtctccgcctga

SEQ ID NO: 25786 - DNA, 20 bp, Artificial Sequence
  Synthetic
gacttgaaaatcgcttttac

SEQ ID NO: 25787 - DNA, 20 bp, Artificial Sequence
  Synthetic
ggagaatatcagcattaatg

SEQ ID NO: 25788 - DNA, 20 bp, Artificial Sequence
  Synthetic
gagaatatcagcattaatgt

SEQ ID NO: 25789 - DNA, 20 bp, Artificial Sequence
  Synthetic
aatatcagcattaatgtggg

SEQ ID NO: 25790 - DNA, 20 bp, Artificial Sequence
  Synthetic
gctatattgaacataatgcc

SEQ ID NO: 25791 - DNA, 20 bp, Artificial Sequence
  Synthetic
gtctggctcattgaaagtcc

SEQ ID NO: 25792 - DNA, 20 bp, Artificial Sequence
  Synthetic
gctttaactataggactgtc

SEQ ID NO: 25793 - DNA, 20 bp, Artificial Sequence
  Synthetic
attttagctgctttaactat

SEQ ID NO: 25794 - DNA, 20 bp, Artificial Sequence
  Synthetic
acaagattcatctctttctg

SEQ ID NO: 25795 - DNA, 20 bp, Artificial Sequence
  Synthetic
gattcatctctttctgaggt

SEQ ID NO: 25796 - DNA, 20 bp, Artificial Sequence
  Synthetic
agatgttatagatactcctg

SEQ ID NO: 25797 - DNA, 20 bp, Artificial Sequence
  Synthetic
ttcacagtgctgaagtccac

SEQ ID NO: 25798 - DNA, 20 bp, Artificial Sequence
  Synthetic
cagcactgtgaaagaaactt

SEQ ID NO: 25799 - DNA, 20 bp, Artificial Sequence
  Synthetic
gtgaaagaaactttggaagc

SEQ ID NO: 25800 - DNA, 20 bp, Artificial Sequence
  Synthetic
actttggaagcaggaaacta

SEQ ID NO: 25801 - DNA, 20 bp, Artificial Sequence
  Synthetic
aggaaactatggtagtcctc

SEQ ID NO: 25802 - DNA, 20 bp, Artificial Sequence
  Synthetic
tagtcctctggaattttata

SEQ ID NO: 25803 - DNA, 20 bp, Artificial Sequence
  Synthetic
acatccttataaaattccag

SEQ ID NO: 25804 - DNA, 20 bp, Artificial Sequence
  Synthetic
ctttggagttgttgaatatt

SEQ ID NO: 25805 - DNA, 20 bp, Artificial Sequence
  Synthetic
tttattagaggtataagctt

SEQ ID NO: 25806 - DNA, 20 bp, Artificial Sequence
  Synthetic
atacctctaataaaaagtca

SEQ ID NO: 25807 - DNA, 20 bp, Artificial Sequence
  Synthetic
tacctctaataaaaagtcaa

SEQ ID NO: 25808 - DNA, 20 bp, Artificial Sequence
  Synthetic
tacccttgactttttattag

SEQ ID NO: 25809 - DNA, 20 bp, Artificial Sequence
  Synthetic
tgctgaattagagtcacata

SEQ ID NO: 25810 - DNA, 20 bp, Artificial Sequence
  Synthetic
gctgttcagttctgtaacaa

SEQ ID NO: 25811 - DNA, 20 bp, Artificial Sequence
  Synthetic
agttctgtaacaatggagac

SEQ ID NO: 25812 - DNA, 20 bp, Artificial Sequence
  Synthetic
tctagtttaagatttgttag

SEQ ID NO: 25813 - DNA, 20 bp, Artificial Sequence
  Synthetic
tttgttagtggaagtcgaga

SEQ ID NO: 25814 - DNA, 20 bp, Artificial Sequence
  Synthetic
tagtggaagtcgagatggaa

SEQ ID NO: 25815 - DNA, 20 bp, Artificial Sequence
  Synthetic
gagatggaacggcaagaatt

SEQ ID NO: 25816 - DNA, 20 bp, Artificial Sequence
  Synthetic
tgcacccgttgcagtccttc

SEQ ID NO: 25817 - DNA, 20 bp, Artificial Sequence
  Synthetic
gcacccgttgcagtccttca

SEQ ID NO: 25818 - DNA, 20 bp, Artificial Sequence
  Synthetic
tggccctgaaggactgcaac

SEQ ID NO: 25819 - DNA, 20 bp, Artificial Sequence
  Synthetic
atggccctgaaggactgcaa

SEQ ID NO: 25820 - DNA, 20 bp, Artificial Sequence
  Synthetic
tagaagctgaatggccctga

SEQ ID NO: 25821 - DNA, 20 bp, Artificial Sequence
  Synthetic
tggaagtaatagaagctgaa

SEQ ID NO: 25822 - DNA, 20 bp, Artificial Sequence
  Synthetic
agcttctattacttccatac

SEQ ID NO: 25823 - DNA, 20 bp, Artificial Sequence
  Synthetic
tatcacttttcttacctgta

SEQ ID NO: 25824 - DNA, 20 bp, Artificial Sequence
  Synthetic
aagttttgtccatcaactaa

SEQ ID NO: 25825 - DNA, 20 bp, Artificial Sequence
  Synthetic
ctgtttgtgcctttagttga

SEQ ID NO: 25826 - DNA, 20 bp, Artificial Sequence
  Synthetic
aacagatacctcacttctac

SEQ ID NO: 25827 - DNA, 20 bp, Artificial Sequence
  Synthetic
catcagcaccagtagaagtg

SEQ ID NO: 25828 - DNA, 20 bp, Artificial Sequence
  Synthetic
ctcacttctactggtgctga

SEQ ID NO: 25829 - DNA, 20 bp, Artificial Sequence
  Synthetic
ctgatggaacaatctgtttc

SEQ ID NO: 25830 - DNA, 20 bp, Artificial Sequence
  Synthetic
taagatgcataagagaattc

SEQ ID NO: 25831 - DNA, 20 bp, Artificial Sequence
  Synthetic
aagatgcataagagaattct

SEQ ID NO: 25832 - DNA, 20 bp, Artificial Sequence
  Synthetic
agatgcataagagaattctg

SEQ ID NO: 25833 - DNA, 20 bp, Artificial Sequence
  Synthetic
tgtgtagcatttgaccgaag

SEQ ID NO: 25834 - DNA, 20 bp, Artificial Sequence
  Synthetic
gtgtagcatttgaccgaagc

SEQ ID NO: 25835 - DNA, 20 bp, Artificial Sequence
  Synthetic
taaaaattcttctcccgctt

SEQ ID NO: 25836 - DNA, 20 bp, Artificial Sequence
  Synthetic
atgactgtttagtaaaaatt

SEQ ID NO: 25837 - DNA, 20 bp, Artificial Sequence
  Synthetic
tgactgtttagtaaaaattt

SEQ ID NO: 25838 - DNA, 20 bp, Artificial Sequence
  Synthetic
cgccttcttgctacacttcg

SEQ ID NO: 25839 - DNA, 20 bp, Artificial Sequence
  Synthetic
gtccacgaagtgtagcaaga

SEQ ID NO: 25840 - DNA, 20 bp, Artificial Sequence
  Synthetic
ctctgctgaaatttctgaca

SEQ ID NO: 25841 - DNA, 20 bp, Artificial Sequence
  Synthetic
gaaaacactcttattgctgc

SEQ ID NO: 25842 - DNA, 20 bp, Artificial Sequence
  Synthetic
tgctgcaggcagctgtgata

SEQ ID NO: 25843 - DNA, 20 bp, Artificial Sequence
  Synthetic
gtgataaggtagtaagagta

SEQ ID NO: 25844 - DNA, 20 bp, Artificial Sequence
  Synthetic
aagcccatccatttgatcaa

SEQ ID NO: 25845 - DNA, 20 bp, Artificial Sequence
  Synthetic
gatcctttgatcaaatggat

SEQ ID NO: 25846 - DNA, 20 bp, Artificial Sequence
  Synthetic
tgatcctttgatcaaatgga

SEQ ID NO: 25847 - DNA, 20 bp, Artificial Sequence
  Synthetic
agtatgatcctttgatcaaa

SEQ ID NO: 25848 - DNA, 20 bp, Artificial Sequence
  Synthetic
caaaggatcatactttcagc

SEQ ID NO: 25849 - DNA, 20 bp, Artificial Sequence
  Synthetic
atactttcagcaggtcatga

SEQ ID NO: 25850 - DNA, 20 bp, Artificial Sequence
  Synthetic
tactttcagcaggtcatgat

SEQ ID NO: 25851 - DNA, 20 bp, Artificial Sequence
  Synthetic
atgatgggaacatttttatt

SEQ ID NO: 25852 - DNA, 20 bp, Artificial Sequence
  Synthetic
tgatgggaacatttttattt

SEQ ID NO: 25853 - DNA, 20 bp, Artificial Sequence
  Synthetic
ccacaccgacttcaaggaca

SEQ ID NO: 25854 - DNA, 20 bp, Artificial Sequence
  Synthetic
cctcagatcgttcttgatgt

SEQ ID NO: 25855 - DNA, 20 bp, Artificial Sequence
  Synthetic
atcgttcttgatgttggctg

SEQ ID NO: 25856 - DNA, 20 bp, Artificial Sequence
  Synthetic
cttgatgttggctgtggctc

SEQ ID NO: 25857 - DNA, 20 bp, Artificial Sequence
  Synthetic
ttgatgttggctgtggctct

SEQ ID NO: 25858 - DNA, 20 bp, Artificial Sequence
  Synthetic
cttgggcggcaaaaaacgac

SEQ ID NO: 25859 - DNA, 20 bp, Artificial Sequence
  Synthetic
tcgttttttgccgcccaagc

SEQ ID NO: 25860 - DNA, 20 bp, Artificial Sequence
  Synthetic
ttgccgcccaagctggagca

SEQ ID NO: 25861 - DNA, 20 bp, Artificial Sequence
  Synthetic
tttccgtgctccagcttggg

SEQ ID NO: 25862 - DNA, 20 bp, Artificial Sequence
  Synthetic
gattttccgtgctccagctt

SEQ ID NO: 25863 - DNA, 20 bp, Artificial Sequence
  Synthetic
agattttccgtgctccagct

SEQ ID NO: 25864 - DNA, 20 bp, Artificial Sequence
  Synthetic
tggagcacggaaaatctacg

SEQ ID NO: 25865 - DNA, 20 bp, Artificial Sequence
  Synthetic
agcacggaaaatctacgcgg

SEQ ID NO: 25866 - DNA, 20 bp, Artificial Sequence
  Synthetic
acggaaaatctacgcggtgg

SEQ ID NO: 25867 - DNA, 20 bp, Artificial Sequence
  Synthetic
cgcggtggaggccagcacca

SEQ ID NO: 25868 - DNA, 20 bp, Artificial Sequence
  Synthetic
agcgtgctgggccatggtgc

SEQ ID NO: 25869 - DNA, 20 bp, Artificial Sequence
  Synthetic
caccatggcccagcacgctg

SEQ ID NO: 25870 - DNA, 20 bp, Artificial Sequence
  Synthetic
gacctcagcgtgctgggcca

SEQ ID NO: 25871 - DNA, 20 bp, Artificial Sequence
  Synthetic
gccactgacctcagcgtgct

SEQ ID NO: 25872 - DNA, 20 bp, Artificial Sequence
  Synthetic
ggccactgacctcagcgtgc

SEQ ID NO: 25873 - DNA, 20 bp, Artificial Sequence
  Synthetic
ccctgcccgcctgcaggtct

SEQ ID NO: 25874 - DNA, 20 bp, Artificial Sequence
  Synthetic
ggtgaagagtaacaacctga

SEQ ID NO: 25875 - DNA, 20 bp, Artificial Sequence
  Synthetic
caacctgacggaccgcatcg

SEQ ID NO: 25876 - DNA, 20 bp, Artificial Sequence
  Synthetic
tgaccacgatgcggtccgtc

SEQ ID NO: 25877 - DNA, 20 bp, Artificial Sequence
  Synthetic
ggaccgcatcgtggtcatcc

SEQ ID NO: 25878 - DNA, 20 bp, Artificial Sequence
  Synthetic
gaccgcatcgtggtcatccc

SEQ ID NO: 25879 - DNA, 20 bp, Artificial Sequence
  Synthetic
tgcccgggatgaccacgatg

SEQ ID NO: 25880 - DNA, 20 bp, Artificial Sequence
  Synthetic
catcgtggtcatcccgggca

SEQ ID NO: 25881 - DNA, 20 bp, Artificial Sequence
  Synthetic
cgtggtcatcccgggcaagg

SEQ ID NO: 25882 - DNA, 20 bp, Artificial Sequence
  Synthetic
ggtcatcccgggcaaggtgg

SEQ ID NO: 25883 - DNA, 20 bp, Artificial Sequence
  Synthetic
catcccgggcaaggtggagg

SEQ ID NO: 25884 - DNA, 20 bp, Artificial Sequence
  Synthetic
acacctcctccaccttgccc

SEQ ID NO: 25885 - DNA, 20 bp, Artificial Sequence
  Synthetic
gacacctcctccaccttgcc

SEQ ID NO: 25886 - DNA, 20 bp, Artificial Sequence
  Synthetic
ggaggtgtcactccccgagc

SEQ ID NO: 25887 - DNA, 20 bp, Artificial Sequence
  Synthetic
ggtgtcactccccgagcagg

SEQ ID NO: 25888 - DNA, 20 bp, Artificial Sequence
  Synthetic
tgatgatgtccacctgctcg

SEQ ID NO: 25889 - DNA, 20 bp, Artificial Sequence
  Synthetic
atgatgatgtccacctgctc

SEQ ID NO: 25890 - DNA, 20 bp, Artificial Sequence
  Synthetic
gatgatgatgtccacctgct

SEQ ID NO: 25891 - DNA, 20 bp, Artificial Sequence
  Synthetic
gcaggtggacatcatcatct

SEQ ID NO: 25892 - DNA, 20 bp, Artificial Sequence
  Synthetic
catcatcatctcggagccca

SEQ ID NO: 25893 - DNA, 20 bp, Artificial Sequence
  Synthetic
atcatcatctcggagcccat

SEQ ID NO: 25894 - DNA, 20 bp, Artificial Sequence
  Synthetic
ttgaagagcatgtagcccat

SEQ ID NO: 25895 - DNA, 20 bp, Artificial Sequence
  Synthetic
gttgaagagcatgtagccca

SEQ ID NO: 25896 - DNA, 20 bp, Artificial Sequence
  Synthetic
gctcttcaacgagcgcatgc

SEQ ID NO: 25897 - DNA, 20 bp, Artificial Sequence
  Synthetic
tcaggtacttcttggcgtgg

SEQ ID NO: 25898 - DNA, 20 bp, Artificial Sequence
  Synthetic
gcttcaggtacttcttggcg

SEQ ID NO: 25899 - DNA, 20 bp, Artificial Sequence
  Synthetic
gctgggcttcaggtacttct

SEQ ID NO: 25900 - DNA, 20 bp, Artificial Sequence
  Synthetic
aagaagtacctgaagcccag

SEQ ID NO: 25901 - DNA, 20 bp, Artificial Sequence
  Synthetic
agtgctcaccgctgggcttc

SEQ ID NO: 25902 - DNA, 20 bp, Artificial Sequence
  Synthetic
accccccagtgctcaccgct

SEQ ID NO: 25903 - DNA, 20 bp, Artificial Sequence
  Synthetic
taccccccagtgctcaccgc

SEQ ID NO: 25904 - DNA, 20 bp, Artificial Sequence
  Synthetic
atggtaggaaacatgtttcc

SEQ ID NO: 25905 - DNA, 20 bp, Artificial Sequence
  Synthetic
ggaaacatgtttcctaccat

SEQ ID NO: 25906 - DNA, 20 bp, Artificial Sequence
  Synthetic
aggtggacgtcaccaatggt

SEQ ID NO: 25907 - DNA, 20 bp, Artificial Sequence
  Synthetic
tgcaaggtggacgtcaccaa

SEQ ID NO: 25908 - DNA, 20 bp, Artificial Sequence
  Synthetic
cgtccaccttgcacccttca

SEQ ID NO: 25909 - DNA, 20 bp, Artificial Sequence
  Synthetic
catccgtgaagggtgcaagg

SEQ ID NO: 25910 - DNA, 20 bp, Artificial Sequence
  Synthetic
gttcatccgtgaagggtgca

SEQ ID NO: 25911 - DNA, 20 bp, Artificial Sequence
  Synthetic
tagagctgttcatccgtgaa

SEQ ID NO: 25912 - DNA, 20 bp, Artificial Sequence
  Synthetic
gtagagctgttcatccgtga

SEQ ID NO: 25913 - DNA, 20 bp, Artificial Sequence
  Synthetic
cacggatgaacagctctaca

SEQ ID NO: 25914 - DNA, 20 bp, Artificial Sequence
  Synthetic
ctacatggagcagttcacca

SEQ ID NO: 25915 - DNA, 20 bp, Artificial Sequence
  Synthetic
agttcaccaaggccaacttc

SEQ ID NO: 25916 - DNA, 20 bp, Artificial Sequence
  Synthetic
cactcaccagaagttggcct

SEQ ID NO: 25917 - DNA, 20 bp, Artificial Sequence
  Synthetic
agggcacactcaccagaagt

SEQ ID NO: 25918 - DNA, 20 bp, Artificial Sequence
  Synthetic
aggtaccagccatctttcca

SEQ ID NO: 25919 - DNA, 20 bp, Artificial Sequence
  Synthetic
ccactccatggaaagatggc

SEQ ID NO: 25920 - DNA, 20 bp, Artificial Sequence
  Synthetic
ccagccatctttccatggag

SEQ ID NO: 25921 - DNA, 20 bp, Artificial Sequence
  Synthetic
aggtccactccatggaaaga

SEQ ID NO: 25922 - DNA, 20 bp, Artificial Sequence
  Synthetic
tttccatggagtggacctgt

SEQ ID NO: 25923 - DNA, 20 bp, Artificial Sequence
  Synthetic
gggccgacaggtccactcca

SEQ ID NO: 25924 - DNA, 20 bp, Artificial Sequence
  Synthetic
gtggacctgtcggccctccg

SEQ ID NO: 25925 - DNA, 20 bp, Artificial Sequence
  Synthetic
cggcacctcggagggccgac

SEQ ID NO: 25926 - DNA, 20 bp, Artificial Sequence
  Synthetic
gtcggccctccgaggtgccg

SEQ ID NO: 25927 - DNA, 20 bp, Artificial Sequence
  Synthetic
ggccctccgaggtgccgcgg

SEQ ID NO: 25928 - DNA, 20 bp, Artificial Sequence
  Synthetic
atccaccgcggcacctcgga

SEQ ID NO: 25929 - DNA, 20 bp, Artificial Sequence
  Synthetic
catccaccgcggcacctcgg

SEQ ID NO: 25930 - DNA, 20 bp, Artificial Sequence
  Synthetic
actcatccaccgcggcacct

SEQ ID NO: 25931 - DNA, 20 bp, Artificial Sequence
  Synthetic
ccggaaatactcatccaccg

SEQ ID NO: 25932 - DNA, 20 bp, Artificial Sequence
  Synthetic
ccgcggtggatgagtatttc

SEQ ID NO: 25933 - DNA, 20 bp, Artificial Sequence
  Synthetic
tgagtatttccggcagcctg

SEQ ID NO: 25934 - DNA, 20 bp, Artificial Sequence
  Synthetic
gtatttccggcagcctgtgg

SEQ ID NO: 25935 - DNA, 20 bp, Artificial Sequence
  Synthetic
tactcaccaccacaggctgc

SEQ ID NO: 25936 - DNA, 20 bp, Artificial Sequence
  Synthetic
gaggccctactcaccaccac

SEQ ID NO: 25937 - DNA, 20 bp, Artificial Sequence
  Synthetic
cccaggacacatttgacatc

SEQ ID NO: 25938 - DNA, 20 bp, Artificial Sequence
  Synthetic
tccggatgtcaaatgtgtcc

SEQ ID NO: 25939 - DNA, 20 bp, Artificial Sequence
  Synthetic
atttgacatccggatcctga

SEQ ID NO: 25940 - DNA, 20 bp, Artificial Sequence
  Synthetic
cagacttggccatcaggatc

SEQ ID NO: 25941 - DNA, 20 bp, Artificial Sequence
  Synthetic
acttgacagacttggccatc

SEQ ID NO: 25942 - DNA, 20 bp, Artificial Sequence
  Synthetic
ggccaagtctgtcaagtaca

SEQ ID NO: 25943 - DNA, 20 bp, Artificial Sequence
  Synthetic
caccgtgtacttgacagact

SEQ ID NO: 25944 - DNA, 20 bp, Artificial Sequence
  Synthetic
aacttcttagaagccaaaga

SEQ ID NO: 25945 - DNA, 20 bp, Artificial Sequence
  Synthetic
cctgtgcaaatctccttctt

SEQ ID NO: 25946 - DNA, 20 bp, Artificial Sequence
  Synthetic
ccaaagaaggagatttgcac

SEQ ID NO: 25947 - DNA, 20 bp, Artificial Sequence
  Synthetic
tttgaatgggatttctatcc

SEQ ID NO: 25948 - DNA, 20 bp, Artificial Sequence
  Synthetic
gcagcatgtggaatttgaat

SEQ ID NO: 25949 - DNA, 20 bp, Artificial Sequence
  Synthetic
tgcagcatgtggaatttgaa

SEQ ID NO: 25950 - DNA, 20 bp, Artificial Sequence
  Synthetic
aaattccacatgctgcattc

SEQ ID NO: 25951 - DNA, 20 bp, Artificial Sequence
  Synthetic
aattccacatgctgcattca

SEQ ID NO: 25952 - DNA, 20 bp, Artificial Sequence
  Synthetic
ccagccctgaatgcagcatg

SEQ ID NO: 25953 - DNA, 20 bp, Artificial Sequence
  Synthetic
ccacatgctgcattcagggc

SEQ ID NO: 25954 - DNA, 20 bp, Artificial Sequence
  Synthetic
ctgcattcagggctggtcca

SEQ ID NO: 25955 - DNA, 20 bp, Artificial Sequence
  Synthetic
ttcagggctggtccacggcc

SEQ ID NO: 25956 - DNA, 20 bp, Artificial Sequence
  Synthetic
tggtccacggcctggctttc

SEQ ID NO: 25957 - DNA, 20 bp, Artificial Sequence
  Synthetic
caaaccagaaagccaggccg

SEQ ID NO: 25958 - DNA, 20 bp, Artificial Sequence
  Synthetic
caacgtcaaaccagaaagcc

SEQ ID NO: 25959 - DNA, 20 bp, Artificial Sequence
  Synthetic
tggtttgacgttgctttcat

SEQ ID NO: 25960 - DNA, 20 bp, Artificial Sequence
  Synthetic
tgctccacagaatgaccgtg

SEQ ID NO: 25961 - DNA, 20 bp, Artificial Sequence
  Synthetic
cggggctgtggacagccaca

SEQ ID NO: 25962 - DNA, 20 bp, Artificial Sequence
  Synthetic
caggggctctgtcggggctg

SEQ ID NO: 25963 - DNA, 20 bp, Artificial Sequence
  Synthetic
gtgggtcaggggctctgtcg

SEQ ID NO: 25964 - DNA, 20 bp, Artificial Sequence
  Synthetic
agtgggtcaggggctctgtc

SEQ ID NO: 25965 - DNA, 20 bp, Artificial Sequence
  Synthetic
cagtgggtcaggggctctgt

SEQ ID NO: 25966 - DNA, 20 bp, Artificial Sequence
  Synthetic
cgacagagcccctgacccac

SEQ ID NO: 25967 - DNA, 20 bp, Artificial Sequence
  Synthetic
gcccctgacccactggtacc

SEQ ID NO: 25968 - DNA, 20 bp, Artificial Sequence
  Synthetic
acctggtaccagtgggtcag

SEQ ID NO: 25969 - DNA, 20 bp, Artificial Sequence
  Synthetic
cacctggtaccagtgggtca

SEQ ID NO: 25970 - DNA, 20 bp, Artificial Sequence
  Synthetic
gcacctggtaccagtgggtc

SEQ ID NO: 25971 - DNA, 20 bp, Artificial Sequence
  Synthetic
tgacccactggtaccaggtg

SEQ ID NO: 25972 - DNA, 20 bp, Artificial Sequence
  Synthetic
gcaccgcacctggtaccagt

SEQ ID NO: 25973 - DNA, 20 bp, Artificial Sequence
  Synthetic
ggcaccgcacctggtaccag

SEQ ID NO: 25974 - DNA, 20 bp, Artificial Sequence
  Synthetic
actggaacaggcaccgcacc

SEQ ID NO: 25975 - DNA, 20 bp, Artificial Sequence
  Synthetic
cgaacagtggtgactggaac

SEQ ID NO: 25976 - DNA, 20 bp, Artificial Sequence
  Synthetic
ccttggcgaacagtggtgac

SEQ ID NO: 25977 - DNA, 20 bp, Artificial Sequence
  Synthetic
ccagtcaccactgttcgcca

SEQ ID NO: 25978 - DNA, 20 bp, Artificial Sequence
  Synthetic
tcaccactgttcgccaaggc

SEQ ID NO: 25979 - DNA, 20 bp, Artificial Sequence
  Synthetic
caccactgttcgccaaggca

SEQ ID NO: 25980 - DNA, 20 bp, Artificial Sequence
  Synthetic
accactgttcgccaaggcag

SEQ ID NO: 25981 - DNA, 20 bp, Artificial Sequence
  Synthetic
tcccctgccttggcgaacag

SEQ ID NO: 25982 - DNA, 20 bp, Artificial Sequence
  Synthetic
tgagagcgtgtcccctgcct

SEQ ID NO: 25983 - DNA, 20 bp, Artificial Sequence
  Synthetic
aaggcaggggacacgctctc

SEQ ID NO: 25984 - DNA, 20 bp, Artificial Sequence
  Synthetic
aggcaggggacacgctctca

SEQ ID NO: 25985 - DNA, 20 bp, Artificial Sequence
  Synthetic
ggggccctgcgctaccgtgt

SEQ ID NO: 25986 - DNA, 20 bp, Artificial Sequence
  Synthetic
gaacaccgacacggtagcgc

SEQ ID NO: 25987 - DNA, 20 bp, Artificial Sequence
  Synthetic
gctaccgtgtcggtgttccc

SEQ ID NO: 25988 - DNA, 20 bp, Artificial Sequence
  Synthetic
ggcgccggggaacaccgaca

SEQ ID NO: 25989 - DNA, 20 bp, Artificial Sequence
  Synthetic
tggtgaggaggcgggcgccg

SEQ ID NO: 25990 - DNA, 20 bp, Artificial Sequence
  Synthetic
atggtgaggaggcgggcgcc

SEQ ID NO: 25991 - DNA, 20 bp, Artificial Sequence
  Synthetic
gatggtgaggaggcgggcgc

SEQ ID NO: 25992 - DNA, 20 bp, Artificial Sequence
  Synthetic
ggcgcccgcctcctcaccat

SEQ ID NO: 25993 - DNA, 20 bp, Artificial Sequence
  Synthetic
gtcgccgatggtgaggaggc

SEQ ID NO: 25994 - DNA, 20 bp, Artificial Sequence
  Synthetic
cgtcgccgatggtgaggagg

SEQ ID NO: 25995 - DNA, 20 bp, Artificial Sequence
  Synthetic
tcgcgtcgccgatggtgagg

SEQ ID NO: 25996 - DNA, 20 bp, Artificial Sequence
  Synthetic
cgttcgcgtcgccgatggtg

SEQ ID NO: 25997 - DNA, 20 bp, Artificial Sequence
  Synthetic
ctcaccatcggcgacgcgaa

SEQ ID NO: 25998 - DNA, 20 bp, Artificial Sequence
  Synthetic
ctcgccgttcgcgtcgccga

SEQ ID NO: 25999 - DNA, 20 bp, Artificial Sequence
  Synthetic
acgcgaacggcgagatccag

SEQ ID NO: 26000 - DNA, 20 bp, Artificial Sequence
  Synthetic
cggcgagatccagcggcacg

SEQ ID NO: 26001 - DNA, 20 bp, Artificial Sequence
  Synthetic
cctgctgctccgcgtgccgc

SEQ ID NO: 26002 - DNA, 20 bp, Artificial Sequence
  Synthetic
ccagcggcacgcggagcagc

SEQ ID NO: 26003 - DNA, 20 bp, Artificial Sequence
  Synthetic
gcagcaggcgctgcgcctcg

SEQ ID NO: 26004 - DNA, 20 bp, Artificial Sequence
  Synthetic
ctgcgcctcgaggtgcgcgc

SEQ ID NO: 26005 - DNA, 20 bp, Artificial Sequence
  Synthetic
ccgggccggcgcgcacctcg

SEQ ID NO: 26006 - DNA, 20 bp, Artificial Sequence
  Synthetic
cctcgaggtgcgcgccggcc

SEQ ID NO: 26007 - DNA, 20 bp, Artificial Sequence
  Synthetic
ggtgcgcgccggcccggact

SEQ ID NO: 26008 - DNA, 20 bp, Artificial Sequence
  Synthetic
gcgcgccggcccggactcgg

SEQ ID NO: 26009 - DNA, 20 bp, Artificial Sequence
  Synthetic
cgcgccggcccggactcggc

SEQ ID NO: 26010 - DNA, 20 bp, Artificial Sequence
  Synthetic
gatgcccgccgagtccgggc

SEQ ID NO: 26011 - DNA, 20 bp, Artificial Sequence
  Synthetic
gggcgatgcccgccgagtcc

SEQ ID NO: 26012 - DNA, 20 bp, Artificial Sequence
  Synthetic
agggcgatgcccgccgagtc

SEQ ID NO: 26013 - DNA, 20 bp, Artificial Sequence
  Synthetic
cccgtactcacggctgtaga

SEQ ID NO: 26014 - DNA, 20 bp, Artificial Sequence
  Synthetic
ccccgtactcacggctgtag

SEQ ID NO: 26015 - DNA, 20 bp, Artificial Sequence
  Synthetic
acggctgcactctgtctctc

SEQ ID NO: 26016 - DNA, 20 bp, Artificial Sequence
  Synthetic
cacggctgcactctgtctct

SEQ ID NO: 26017 - DNA, 20 bp, Artificial Sequence
  Synthetic
agagacagagtgcagccgtg

SEQ ID NO: 26018 - DNA, 20 bp, Artificial Sequence
  Synthetic
gagacagagtgcagccgtgt

SEQ ID NO: 26019 - DNA, 20 bp, Artificial Sequence
  Synthetic
tgaaggactgcttgcccaca

SEQ ID NO: 26020 - DNA, 20 bp, Artificial Sequence
  Synthetic
gcagtccttcatcatcaccc

SEQ ID NO: 26021 - DNA, 20 bp, Artificial Sequence
  Synthetic
cagtccttcatcatcaccct

SEQ ID NO: 26022 - DNA, 20 bp, Artificial Sequence
  Synthetic
gcagcccagggtgatgatga

SEQ ID NO: 26023 - DNA, 20 bp, Artificial Sequence
  Synthetic
gaggacgctgttgcagccca

SEQ ID NO: 26024 - DNA, 20 bp, Artificial Sequence
  Synthetic
tgaggacgctgttgcagccc

SEQ ID NO: 26025 - DNA, 20 bp, Artificial Sequence
  Synthetic
tgggtgtggcgaactggatg

SEQ ID NO: 26026 - DNA, 20 bp, Artificial Sequence
  Synthetic
atccagttcgccacacccaa

SEQ ID NO: 26027 - DNA, 20 bp, Artificial Sequence
  Synthetic
taccgttgggtgtggcgaac

SEQ ID NO: 26028 - DNA, 20 bp, Artificial Sequence
  Synthetic
gggccacgtaccgttgggtg

SEQ ID NO: 26029 - DNA, 20 bp, Artificial Sequence
  Synthetic
aaggagggccacgtaccgtt

SEQ ID NO: 26030 - DNA, 20 bp, Artificial Sequence
  Synthetic
gaaggagggccacgtaccgt

SEQ ID NO: 26031 - DNA, 20 bp, Artificial Sequence
  Synthetic
ttgtagaaggaacagaaatc

SEQ ID NO: 26032 - DNA, 20 bp, Artificial Sequence
  Synthetic
ggttttcaggatgttgtaga

SEQ ID NO: 26033 - DNA, 20 bp, Artificial Sequence
  Synthetic
acaacatcctgaaaacctgc

SEQ ID NO: 26034 - DNA, 20 bp, Artificial Sequence
  Synthetic
caacatcctgaaaacctgcc

SEQ ID NO: 26035 - DNA, 20 bp, Artificial Sequence
  Synthetic
aacatcctgaaaacctgccg

SEQ ID NO: 26036 - DNA, 20 bp, Artificial Sequence
  Synthetic
tgtggccccggcaggttttc

SEQ ID NO: 26037 - DNA, 20 bp, Artificial Sequence
  Synthetic
aacctgccggggccacaccc

SEQ ID NO: 26038 - DNA, 20 bp, Artificial Sequence
  Synthetic
ctccagggtgtggccccggc

SEQ ID NO: 26039 - DNA, 20 bp, Artificial Sequence
  Synthetic
gccggggccacaccctggag

SEQ ID NO: 26040 - DNA, 20 bp, Artificial Sequence
  Synthetic
accgctccagggtgtggccc

SEQ ID NO: 26041 - DNA, 20 bp, Artificial Sequence
  Synthetic
acacagaccgctccagggtg

SEQ ID NO: 26042 - DNA, 20 bp, Artificial Sequence
  Synthetic
gctgaacacagaccgctcca

SEQ ID NO: 26043 - DNA, 20 bp, Artificial Sequence
  Synthetic
cgctgaacacagaccgctcc

SEQ ID NO: 26044 - DNA, 20 bp, Artificial Sequence
  Synthetic
agcggtctgtgttcagcgag

SEQ ID NO: 26045 - DNA, 20 bp, Artificial Sequence
  Synthetic
agaggaggaagaggaatatg

SEQ ID NO: 26046 - DNA, 20 bp, Artificial Sequence
  Synthetic
ggaggaagaggaatatgtgg

SEQ ID NO: 26047 - DNA, 20 bp, Artificial Sequence
  Synthetic
aaaagttctcgaccgtcgag

SEQ ID NO: 26048 - DNA, 20 bp, Artificial Sequence
  Synthetic
tctcgaccgtcgagtggtaa

SEQ ID NO: 26049 - DNA, 20 bp, Artificial Sequence
  Synthetic
ctcgaccgtcgagtggtaaa

SEQ ID NO: 26050 - DNA, 20 bp, Artificial Sequence
  Synthetic
ctttgccctttaccactcga

SEQ ID NO: 26051 - DNA, 20 bp, Artificial Sequence
  Synthetic
tcgagtggtaaagggcaaag

SEQ ID NO: 26052 - DNA, 20 bp, Artificial Sequence
  Synthetic
aagtggagtacctcctaaag

SEQ ID NO: 26053 - DNA, 20 bp, Artificial Sequence
  Synthetic
ggagtacctcctaaagtgga

SEQ ID NO: 26054 - DNA, 20 bp, Artificial Sequence
  Synthetic
gagtacctcctaaagtggaa

SEQ ID NO: 26055 - DNA, 20 bp, Artificial Sequence
  Synthetic
agaatcccttccactttagg

SEQ ID NO: 26056 - DNA, 20 bp, Artificial Sequence
  Synthetic
ctgagaatcccttccacttt

SEQ ID NO: 26057 - DNA, 20 bp, Artificial Sequence
  Synthetic
gtttcagtgaggacaacaca

SEQ ID NO: 26058 - DNA, 20 bp, Artificial Sequence
  Synthetic
tttcagtgaggacaacacat

SEQ ID NO: 26059 - DNA, 20 bp, Artificial Sequence
  Synthetic
atgggagccagaagagaacc

SEQ ID NO: 26060 - DNA, 20 bp, Artificial Sequence
  Synthetic
gggcaatccaggttctcttc

SEQ ID NO: 26061 - DNA, 20 bp, Artificial Sequence
  Synthetic
caatgaggtcggggcaatcc

SEQ ID NO: 26062 - DNA, 20 bp, Artificial Sequence
  Synthetic
gaaactcagcaatgaggtcg

SEQ ID NO: 26063 - DNA, 20 bp, Artificial Sequence
  Synthetic
agaaactcagcaatgaggtc

SEQ ID NO: 26064 - DNA, 20 bp, Artificial Sequence
  Synthetic
cagaaactcagcaatgaggt

SEQ ID NO: 26065 - DNA, 20 bp, Artificial Sequence
  Synthetic
actgcagaaactcagcaatg

SEQ ID NO: 26066 - DNA, 20 bp, Artificial Sequence
  Synthetic
cttgctcaggatgcactcgg

SEQ ID NO: 26067 - DNA, 20 bp, Artificial Sequence
  Synthetic
ccgcttgctcaggatgcact

SEQ ID NO: 26068 - DNA, 20 bp, Artificial Sequence
  Synthetic
ccgagtgcatcctgagcaag

SEQ ID NO: 26069 - DNA, 20 bp, Artificial Sequence
  Synthetic
ccttgcggagccgcttgctc

SEQ ID NO: 26070 - DNA, 20 bp, Artificial Sequence
  Synthetic
cctgagcaagcggctccgca

SEQ ID NO: 26071 - DNA, 20 bp, Artificial Sequence
  Synthetic
ggcgggccgcacgcaccttg

SEQ ID NO: 26072 - DNA, 20 bp, Artificial Sequence
  Synthetic
tctctccccgcagggcaagc

SEQ ID NO: 26073 - DNA, 20 bp, Artificial Sequence
  Synthetic
gcagggcaagctggagtacc

SEQ ID NO: 26074 - DNA, 20 bp, Artificial Sequence
  Synthetic
agctggagtacctggtcaag

SEQ ID NO: 26075 - DNA, 20 bp, Artificial Sequence
  Synthetic
gagtacctggtcaagtggcg

SEQ ID NO: 26076 - DNA, 20 bp, Artificial Sequence
  Synthetic
acctggtcaagtggcgcggc

SEQ ID NO: 26077 - DNA, 20 bp, Artificial Sequence
  Synthetic
accagccgcgccacttgacc

SEQ ID NO: 26078 - DNA, 20 bp, Artificial Sequence
  Synthetic
gtcgcgggggactcacttgg

SEQ ID NO: 26079 - DNA, 20 bp, Artificial Sequence
  Synthetic
tgctttgcagacataacagc

SEQ ID NO: 26080 - DNA, 20 bp, Artificial Sequence
  Synthetic
gctttgcagacataacagct

SEQ ID NO: 26081 - DNA, 20 bp, Artificial Sequence
  Synthetic
cagacataacagctgggagc

SEQ ID NO: 26082 - DNA, 20 bp, Artificial Sequence
  Synthetic
acataacagctgggagccgg

SEQ ID NO: 26083 - DNA, 20 bp, Artificial Sequence
  Synthetic
ggagccggaggagaacatcc

SEQ ID NO: 26084 - DNA, 20 bp, Artificial Sequence
  Synthetic
gggtccaggatgttctcctc

SEQ ID NO: 26085 - DNA, 20 bp, Artificial Sequence
  Synthetic
aggagaacatcctggacccg

SEQ ID NO: 26086 - DNA, 20 bp, Artificial Sequence
  Synthetic
ccaggagcagcctcgggtcc

SEQ ID NO: 26087 - DNA, 20 bp, Artificial Sequence
  Synthetic
cctggacccgaggctgctcc

SEQ ID NO: 26088 - DNA, 20 bp, Artificial Sequence
  Synthetic
ggaaggccaggagcagcctc

SEQ ID NO: 26089 - DNA, 20 bp, Artificial Sequence
  Synthetic
tggaaggccaggagcagcct

SEQ ID NO: 26090 - DNA, 20 bp, Artificial Sequence
  Synthetic
ctcacttcttctggaaggcc

SEQ ID NO: 26091 - DNA, 20 bp, Artificial Sequence
  Synthetic
gcgtcctcacttcttctgga

SEQ ID NO: 26092 - DNA, 20 bp, Artificial Sequence
  Synthetic
gtcagcgtcctcacttcttc

SEQ ID NO: 26093 - DNA, 20 bp, Artificial Sequence
  Synthetic
agagcctgaagaatttgtcg

SEQ ID NO: 26094 - DNA, 20 bp, Artificial Sequence
  Synthetic
ctagatcgacgtgtagtgaa

SEQ ID NO: 26095 - DNA, 20 bp, Artificial Sequence
  Synthetic
tagatcgacgtgtagtgaat

SEQ ID NO: 26096 - DNA, 20 bp, Artificial Sequence
  Synthetic
acgtgtagtgaatgggaaag

SEQ ID NO: 26097 - DNA, 20 bp, Artificial Sequence
  Synthetic
aagtggaatatttcctgaag

SEQ ID NO: 26098 - DNA, 20 bp, Artificial Sequence
  Synthetic
ggaatatttcctgaagtgga

SEQ ID NO: 26099 - DNA, 20 bp, Artificial Sequence
  Synthetic
gaatatttcctgaagtggaa

SEQ ID NO: 26100 - DNA, 20 bp, Artificial Sequence
  Synthetic
ctgtaaatcccttccacttc

SEQ ID NO: 26101 - DNA, 20 bp, Artificial Sequence
  Synthetic
aacacagtgctgacaatact

SEQ ID NO: 26102 - DNA, 20 bp, Artificial Sequence
  Synthetic
acacagtgctgacaatactt

SEQ ID NO: 26103 - DNA, 20 bp, Artificial Sequence
  Synthetic
ggacaatctaaattttcttc

SEQ ID NO: 26104 - DNA, 20 bp, Artificial Sequence
  Synthetic
agaaacgcttcaatcaattc

SEQ ID NO: 26105 - DNA, 20 bp, Artificial Sequence
  Synthetic
tgttggcgagcacgtcttcg

SEQ ID NO: 26106 - DNA, 20 bp, Artificial Sequence
  Synthetic
tggcgagcacgtcttcgcgg

SEQ ID NO: 26107 - DNA, 20 bp, Artificial Sequence
  Synthetic
tggagagcatcgagaagaag

SEQ ID NO: 26108 - DNA, 20 bp, Artificial Sequence
  Synthetic
cgagaagaagcggatccgca

SEQ ID NO: 26109 - DNA, 20 bp, Artificial Sequence
  Synthetic
aagaagcggatccgcaaggt

SEQ ID NO: 26110 - DNA, 20 bp, Artificial Sequence
  Synthetic
ccccgcgccgccctaccttg

SEQ ID NO: 26111 - DNA, 20 bp, Artificial Sequence
  Synthetic
ctcttccccccagggcagag

SEQ ID NO: 26112 - DNA, 20 bp, Artificial Sequence
  Synthetic
ccagatactccactctgccc

SEQ ID NO: 26113 - DNA, 20 bp, Artificial Sequence
  Synthetic
ccagggcagagtggagtatc

SEQ ID NO: 26114 - DNA, 20 bp, Artificial Sequence
  Synthetic
gagtggagtatctggtgaaa

SEQ ID NO: 26115 - DNA, 20 bp, Artificial Sequence
  Synthetic
gagtatctggtgaaatggag

SEQ ID NO: 26116 - DNA, 20 bp, Artificial Sequence
  Synthetic
atctggtgaaatggagaggc

SEQ ID NO: 26117 - DNA, 20 bp, Artificial Sequence
  Synthetic
cccttgcaagatataacacg

SEQ ID NO: 26118 - DNA, 20 bp, Artificial Sequence
  Synthetic
ccttgcaagatataacacgt

SEQ ID NO: 26119 - DNA, 20 bp, Artificial Sequence
  Synthetic
aagatataacacgtgggaac

SEQ ID NO: 26120 - DNA, 20 bp, Artificial Sequence
  Synthetic
atataacacgtgggaaccgg

SEQ ID NO: 26121 - DNA, 20 bp, Artificial Sequence
  Synthetic
ggaaccggaggagaacatcc

SEQ ID NO: 26122 - DNA, 20 bp, Artificial Sequence
  Synthetic
gggtccaggatgttctcctc

SEQ ID NO: 26123 - DNA, 20 bp, Artificial Sequence
  Synthetic
aggagaacatcctggacccc

SEQ ID NO: 26124 - DNA, 20 bp, Artificial Sequence
  Synthetic
cgatcagcagcctggggtcc

SEQ ID NO: 26125 - DNA, 20 bp, Artificial Sequence
  Synthetic
ggaaggcgatcagcagcctg

SEQ ID NO: 26126 - DNA, 20 bp, Artificial Sequence
  Synthetic
tggaaggcgatcagcagcct

SEQ ID NO: 26127 - DNA, 20 bp, Artificial Sequence
  Synthetic
ctggaaggcgatcagcagcc

SEQ ID NO: 26128 - DNA, 20 bp, Artificial Sequence
  Synthetic
tgctgatcgccttccagaac

SEQ ID NO: 26129 - DNA, 20 bp, Artificial Sequence
  Synthetic
ggacgctcacctgttctgga

SEQ ID NO: 26130 - DNA, 20 bp, Artificial Sequence
  Synthetic
tgggggacgctcacctgttc

SEQ ID NO: 26131 - DNA, 20 bp, Artificial Sequence
  Synthetic
ggatgaggaggagtatgttg

SEQ ID NO: 26132 - DNA, 20 bp, Artificial Sequence
  Synthetic
ggaggagtatgttgtggaga

SEQ ID NO: 26133 - DNA, 20 bp, Artificial Sequence
  Synthetic
ttgtggagaaggtgctagac

SEQ ID NO: 26134 - DNA, 20 bp, Artificial Sequence
  Synthetic
gaaggtgctagacaggcgcg

SEQ ID NO: 26135 - DNA, 20 bp, Artificial Sequence
  Synthetic
gctagacaggcgcgtggtta

SEQ ID NO: 26136 - DNA, 20 bp, Artificial Sequence
  Synthetic
ctagacaggcgcgtggttaa

SEQ ID NO: 26137 - DNA, 20 bp, Artificial Sequence
  Synthetic
gcgcgtggttaagggacaag

SEQ ID NO: 26138 - DNA, 20 bp, Artificial Sequence
  Synthetic
aagtggaatatctactgaag

SEQ ID NO: 26139 - DNA, 20 bp, Artificial Sequence
  Synthetic
gaatatctactgaagtggaa

SEQ ID NO: 26140 - DNA, 20 bp, Artificial Sequence
  Synthetic
tacccagggagcacaatact

SEQ ID NO: 26141 - DNA, 20 bp, Artificial Sequence
  Synthetic
acccagggagcacaatactt

SEQ ID NO: 26142 - DNA, 20 bp, Artificial Sequence
  Synthetic
ttcccaagtattgtgctccc

SEQ ID NO: 26143 - DNA, 20 bp, Artificial Sequence
  Synthetic
ttgggaacctgagaaaaact

SEQ ID NO: 26144 - DNA, 20 bp, Artificial Sequence
  Synthetic
gggcaatccaagtttttctc

SEQ ID NO: 26145 - DNA, 20 bp, Artificial Sequence
  Synthetic
taaattcagaaattagctca

SEQ ID NO: 26146 - DNA, 20 bp, Artificial Sequence
  Synthetic
ataaattcagaaattagctc

SEQ ID NO: 26147 - DNA, 20 bp, Artificial Sequence
  Synthetic
cggccgaatccatcatcaaa

SEQ ID NO: 26148 - DNA, 20 bp, Artificial Sequence
  Synthetic
ccgccgtttgatgatggatt

SEQ ID NO: 26149 - DNA, 20 bp, Artificial Sequence
  Synthetic
ccgaatccatcatcaaacgg

SEQ ID NO: 26150 - DNA, 20 bp, Artificial Sequence
  Synthetic
tcggatccgccgtttgatga

SEQ ID NO: 26151 - DNA, 20 bp, Artificial Sequence
  Synthetic
catcaaacggcggatccgaa

SEQ ID NO: 26152 - DNA, 20 bp, Artificial Sequence
  Synthetic
ccgggcggcggctcaccttt

SEQ ID NO: 26153 - DNA, 20 bp, Artificial Sequence
  Synthetic
tcagggacgcatcgagtacc

SEQ ID NO: 26154 - DNA, 20 bp, Artificial Sequence
  Synthetic
gcatcgagtacctggtgaaa

SEQ ID NO: 26155 - DNA, 20 bp, Artificial Sequence
  Synthetic
cgagtacctggtgaaatgga

SEQ ID NO: 26156 - DNA, 20 bp, Artificial Sequence
  Synthetic
gagtacctggtgaaatggaa

SEQ ID NO: 26157 - DNA, 20 bp, Artificial Sequence
  Synthetic
agtacctggtgaaatggaag

SEQ ID NO: 26158 - DNA, 20 bp, Artificial Sequence
  Synthetic
acctggtgaaatggaagggg

SEQ ID NO: 26159 - DNA, 20 bp, Artificial Sequence
  Synthetic
cccaccccttccatttcacc

SEQ ID NO: 26160 - DNA, 20 bp, Artificial Sequence
  Synthetic
cctggtgaaatggaaggggt

SEQ ID NO: 26161 - DNA, 20 bp, Artificial Sequence
  Synthetic
gactcggcaggtacagcact

SEQ ID NO: 26162 - DNA, 20 bp, Artificial Sequence
  Synthetic
actcggcaggtacagcactt

SEQ ID NO: 26163 - DNA, 20 bp, Artificial Sequence
  Synthetic
gtacagcacttgggagcccg

SEQ ID NO: 26164 - DNA, 20 bp, Artificial Sequence
  Synthetic
ggagcccgaggagaacatcc

SEQ ID NO: 26165 - DNA, 20 bp, Artificial Sequence
  Synthetic
gagtccaggatgttctcctc

SEQ ID NO: 26166 - DNA, 20 bp, Artificial Sequence
  Synthetic
cgagtccaggatgttctcct

SEQ ID NO: 26167 - DNA, 20 bp, Artificial Sequence
  Synthetic
aggagaacatcctggactcg

SEQ ID NO: 26168 - DNA, 20 bp, Artificial Sequence
  Synthetic
ctgcaatgagccgcgagtcc

SEQ ID NO: 26169 - DNA, 20 bp, Artificial Sequence
  Synthetic
aacaactcacttttgttcga

SEQ ID NO: 26170 - DNA, 20 bp, Artificial Sequence
  Synthetic
cggcgagcaggtgttcgccg

SEQ ID NO: 26171 - DNA, 20 bp, Artificial Sequence
  Synthetic
tgttcgccgtggagagcatc

SEQ ID NO: 26172 - DNA, 20 bp, Artificial Sequence
  Synthetic
cttcttccggatgctctcca

SEQ ID NO: 26173 - DNA, 20 bp, Artificial Sequence
  Synthetic
gcatccggaagaagcgcgtg

SEQ ID NO: 26174 - DNA, 20 bp, Artificial Sequence
  Synthetic
ccttccgcacgcgcttcttc

SEQ ID NO: 26175 - DNA, 20 bp, Artificial Sequence
  Synthetic
ccggaagaagcgcgtgcgga

SEQ ID NO: 26176 - DNA, 20 bp, Artificial Sequence
  Synthetic
tcagggtaaagtcgagtatc

SEQ ID NO: 26177 - DNA, 20 bp, Artificial Sequence
  Synthetic
aagtcgagtatctggtgaag

SEQ ID NO: 26178 - DNA, 20 bp, Artificial Sequence
  Synthetic
gagtatctggtgaagtggaa

SEQ ID NO: 26179 - DNA, 20 bp, Artificial Sequence
  Synthetic
atctggtgaagtggaaagga

SEQ ID NO: 26180 - DNA, 20 bp, Artificial Sequence
  Synthetic
catgaaggagcttactttgg

SEQ ID NO: 26181 - DNA, 20 bp, Artificial Sequence
  Synthetic
acatgaaggagcttactttg

SEQ ID NO: 26182 - DNA, 20 bp, Artificial Sequence
  Synthetic
cacatgaaggagcttacttt

SEQ ID NO: 26183 - DNA, 20 bp, Artificial Sequence
  Synthetic
ctctccccaggtacagcacg

SEQ ID NO: 26184 - DNA, 20 bp, Artificial Sequence
  Synthetic
tctccccaggtacagcacgt

SEQ ID NO: 26185 - DNA, 20 bp, Artificial Sequence
  Synthetic
tggctcccacgtgctgtacc

SEQ ID NO: 26186 - DNA, 20 bp, Artificial Sequence
  Synthetic
ggagccagaagagcacatct

SEQ ID NO: 26187 - DNA, 20 bp, Artificial Sequence
  Synthetic
gggtccaagatgtgctcttc

SEQ ID NO: 26188 - DNA, 20 bp, Artificial Sequence
  Synthetic
cttggacccccgcctcgtca

SEQ ID NO: 26189 - DNA, 20 bp, Artificial Sequence
  Synthetic
cgtaggccatgacgaggcgg

SEQ ID NO: 26190 - DNA, 20 bp, Artificial Sequence
  Synthetic
tcgtaggccatgacgaggcg

SEQ ID NO: 26191 - DNA, 20 bp, Artificial Sequence
  Synthetic
ctcgtaggccatgacgaggc

SEQ ID NO: 26192 - DNA, 20 bp, Artificial Sequence
  Synthetic
cctcgtaggccatgacgagg

SEQ ID NO: 26193 - DNA, 20 bp, Artificial Sequence
  Synthetic
ccgcctcgtcatggcctacg

SEQ ID NO: 26194 - DNA, 20 bp, Artificial Sequence
  Synthetic
tctcctcgtaggccatgacg

SEQ ID NO: 26195 - DNA, 20 bp, Artificial Sequence
  Synthetic
gacaccgtacttctcctcgt

SEQ ID NO: 26196 - DNA, 20 bp, Artificial Sequence
  Synthetic
cggccgaagccctcctgaag

SEQ ID NO: 26197 - DNA, 20 bp, Artificial Sequence
  Synthetic
gcgccgcttcaggagggctt

SEQ ID NO: 26198 - DNA, 20 bp, Artificial Sequence
  Synthetic
ccgtatgcgccgcttcagga

SEQ ID NO: 26199 - DNA, 20 bp, Artificial Sequence
  Synthetic
ccctcctgaagcggcgcata

SEQ ID NO: 26200 - DNA, 20 bp, Artificial Sequence
  Synthetic
tccgtatgcgccgcttcagg

SEQ ID NO: 26201 - DNA, 20 bp, Artificial Sequence
  Synthetic
ctttccgtatgcgccgcttc

SEQ ID NO: 26202 - DNA, 20 bp, Artificial Sequence
  Synthetic
aagcggcgcatacggaaagt

SEQ ID NO: 26203 - DNA, 20 bp, Artificial Sequence
  Synthetic
tttgcacccgcagggacgca

SEQ ID NO: 26204 - DNA, 20 bp, Artificial Sequence
  Synthetic
gcatggaatacctcgtgaaa

SEQ ID NO: 26205 - DNA, 20 bp, Artificial Sequence
  Synthetic
ggaatacctcgtgaaatgga

SEQ ID NO: 26206 - DNA, 20 bp, Artificial Sequence
  Synthetic
gaatacctcgtgaaatggaa

SEQ ID NO: 26207 - DNA, 20 bp, Artificial Sequence
  Synthetic
acctcgtgaaatggaaggga

SEQ ID NO: 26208 - DNA, 20 bp, Artificial Sequence
  Synthetic
accatcccttccatttcacg

SEQ ID NO: 26209 - DNA, 20 bp, Artificial Sequence
  Synthetic
ttccctttaggtacagcaca

SEQ ID NO: 26210 - DNA, 20 bp, Artificial Sequence
  Synthetic
tccctttaggtacagcacat

SEQ ID NO: 26211 - DNA, 20 bp, Artificial Sequence
  Synthetic
taggtacagcacatgggaac

SEQ ID NO: 26212 - DNA, 20 bp, Artificial Sequence
  Synthetic
gtacagcacatgggaaccgg

SEQ ID NO: 26213 - DNA, 20 bp, Artificial Sequence
  Synthetic
ggaaccggaggaaaacatcc

SEQ ID NO: 26214 - DNA, 20 bp, Artificial Sequence
  Synthetic
gcatccaggatgttttcctc

SEQ ID NO: 26215 - DNA, 20 bp, Artificial Sequence
  Synthetic
ctgcgagcaagcgagcatcc

SEQ ID NO: 26216 - DNA, 20 bp, Artificial Sequence
  Synthetic
tcgcttgctcgcagcctttg

SEQ ID NO: 26217 - DNA, 20 bp, Artificial Sequence
  Synthetic
tgctcgcagcctttgaggaa

SEQ ID NO: 26218 - DNA, 20 bp, Artificial Sequence
  Synthetic
gggtctgtacctttcctcaa

SEQ ID NO: 26219 - DNA, 20 bp, Artificial Sequence
  Synthetic
catggcttcccaggagtttg

SEQ ID NO: 26220 - DNA, 20 bp, Artificial Sequence
  Synthetic
agctattgttgacaaaagac

SEQ ID NO: 26221 - DNA, 20 bp, Artificial Sequence
  Synthetic
gacaaaagacaggataaaaa

SEQ ID NO: 26222 - DNA, 20 bp, Artificial Sequence
  Synthetic
acaaaagacaggataaaaat

SEQ ID NO: 26223 - DNA, 20 bp, Artificial Sequence
  Synthetic
aaatgggaatacacagtatt

SEQ ID NO: 26224 - DNA, 20 bp, Artificial Sequence
  Synthetic
ggaatacacagtatttggtt

SEQ ID NO: 26225 - DNA, 20 bp, Artificial Sequence
  Synthetic
atacacagtatttggttcgg

SEQ ID NO: 26226 - DNA, 20 bp, Artificial Sequence
  Synthetic
cagtatttggttcggtggaa

SEQ ID NO: 26227 - DNA, 20 bp, Artificial Sequence
  Synthetic
gtggaaaggttatgacaaac

SEQ ID NO: 26228 - DNA, 20 bp, Artificial Sequence
  Synthetic
atgacaaacaggatgacact

SEQ ID NO: 26229 - DNA, 20 bp, Artificial Sequence
  Synthetic
tgacaaacaggatgacactt

SEQ ID NO: 26230 - DNA, 20 bp, Artificial Sequence
  Synthetic
cagttcatgaggtgctgctc

SEQ ID NO: 26231 - DNA, 20 bp, Artificial Sequence
  Synthetic
cacatttttcacagttcatg

SEQ ID NO: 26232 - DNA, 20 bp, Artificial Sequence
  Synthetic
catggcttcccaggagtttg

SEQ ID NO: 26233 - DNA, 20 bp, Artificial Sequence
  Synthetic
agctattgttgacaaaagac

SEQ ID NO: 26234 - DNA, 20 bp, Artificial Sequence
  Synthetic
gacaaaagacaggataaaaa

SEQ ID NO: 26235 - DNA, 20 bp, Artificial Sequence
  Synthetic
acaaaagacaggataaaaat

SEQ ID NO: 26236 - DNA, 20 bp, Artificial Sequence
  Synthetic
aaatgggaatacacagtatt

SEQ ID NO: 26237 - DNA, 20 bp, Artificial Sequence
  Synthetic
ggaatacacagtatttggtt

SEQ ID NO: 26238 - DNA, 20 bp, Artificial Sequence
  Synthetic
atacacagtatttggttcgg

SEQ ID NO: 26239 - DNA, 20 bp, Artificial Sequence
  Synthetic
cagtatttggttcggtggaa

SEQ ID NO: 26240 - DNA, 20 bp, Artificial Sequence
  Synthetic
gtggaaaggttatgacaaac

SEQ ID NO: 26241 - DNA, 20 bp, Artificial Sequence
  Synthetic
atgacaaacaggatgacact

SEQ ID NO: 26242 - DNA, 20 bp, Artificial Sequence
  Synthetic
tgacaaacaggatgacactt

SEQ ID NO: 26243 - DNA, 20 bp, Artificial Sequence
  Synthetic
cagttcatgaggtgctgctc

SEQ ID NO: 26244 - DNA, 20 bp, Artificial Sequence
  Synthetic
cacatttttcacagttcatg

SEQ ID NO: 26245 - DNA, 20 bp, Artificial Sequence
  Synthetic
catggcttcccaggagtttg

SEQ ID NO: 26246 - DNA, 20 bp, Artificial Sequence
  Synthetic
agctattgttgacaaaagac

SEQ ID NO: 26247 - DNA, 20 bp, Artificial Sequence
  Synthetic
gacaaaagacaggataaaaa

SEQ ID NO: 26248 - DNA, 20 bp, Artificial Sequence
  Synthetic
acaaaagacaggataaaaat

SEQ ID NO: 26249 - DNA, 20 bp, Artificial Sequence
  Synthetic
aaatgggaatacacagtatt

SEQ ID NO: 26250 - DNA, 20 bp, Artificial Sequence
  Synthetic
ggaatacacagtatttggtt

SEQ ID NO: 26251 - DNA, 20 bp, Artificial Sequence
  Synthetic
atacacagtatttggttcgg

SEQ ID NO: 26252 - DNA, 20 bp, Artificial Sequence
  Synthetic
cagtatttggttcggtggaa

SEQ ID NO: 26253 - DNA, 20 bp, Artificial Sequence
  Synthetic
gtggaaaggttatgacaaac

SEQ ID NO: 26254 - DNA, 20 bp, Artificial Sequence
  Synthetic
atgacaaacaggatgacact

SEQ ID NO: 26255 - DNA, 20 bp, Artificial Sequence
  Synthetic
tgacaaacaggatgacactt

SEQ ID NO: 26256 - DNA, 20 bp, Artificial Sequence
  Synthetic
cagttcatgaggtgctgctc

SEQ ID NO: 26257 - DNA, 20 bp, Artificial Sequence
  Synthetic
cacatttttcacagttcatg

SEQ ID NO: 26258 - DNA, 20 bp, Artificial Sequence
  Synthetic
catggcttcccaggagtttg

SEQ ID NO: 26259 - DNA, 20 bp, Artificial Sequence
  Synthetic
agctattgttgacaaaagac

SEQ ID NO: 26260 - DNA, 20 bp, Artificial Sequence
  Synthetic
gacaaaagacaggataaaaa

SEQ ID NO: 26261 - DNA, 20 bp, Artificial Sequence
  Synthetic
acaaaagacaggataaaaat

SEQ ID NO: 26262 - DNA, 20 bp, Artificial Sequence
  Synthetic
aaatgggaatacacagtatt

SEQ ID NO: 26263 - DNA, 20 bp, Artificial Sequence
  Synthetic
ggaatacacagtatttggtt

SEQ ID NO: 26264 - DNA, 20 bp, Artificial Sequence
  Synthetic
atacacagtatttggttcgg

SEQ ID NO: 26265 - DNA, 20 bp, Artificial Sequence
  Synthetic
cagtatttggttcggtggaa

SEQ ID NO: 26266 - DNA, 20 bp, Artificial Sequence
  Synthetic
gtggaaaggttatgacaaac

SEQ ID NO: 26267 - DNA, 20 bp, Artificial Sequence
  Synthetic
atgacaaacaggatgacact

SEQ ID NO: 26268 - DNA, 20 bp, Artificial Sequence
  Synthetic
tgacaaacaggatgacactt

SEQ ID NO: 26269 - DNA, 20 bp, Artificial Sequence
  Synthetic
cagttcatgaggtgctgctc

SEQ ID NO: 26270 - DNA, 20 bp, Artificial Sequence
  Synthetic
cacatttttcacagttcatg

SEQ ID NO: 26271 - DNA, 20 bp, Artificial Sequence
  Synthetic
ggcttccgaggagctgtacg

SEQ ID NO: 26272 - DNA, 20 bp, Artificial Sequence
  Synthetic
ccttttatgaacaggttgaa

SEQ ID NO: 26273 - DNA, 20 bp, Artificial Sequence
  Synthetic
ttgaaaggattgttgacaaa

SEQ ID NO: 26274 - DNA, 20 bp, Artificial Sequence
  Synthetic
gacaaaaggaaaaataaaaa

SEQ ID NO: 26275 - DNA, 20 bp, Artificial Sequence
  Synthetic
acaaaaggaaaaataaaaaa

SEQ ID NO: 26276 - DNA, 20 bp, Artificial Sequence
  Synthetic
aaaagggaagacagagtatt

SEQ ID NO: 26277 - DNA, 20 bp, Artificial Sequence
  Synthetic
ggaagacagagtatttggtt

SEQ ID NO: 26278 - DNA, 20 bp, Artificial Sequence
  Synthetic
agacagagtatttggttcgg

SEQ ID NO: 26279 - DNA, 20 bp, Artificial Sequence
  Synthetic
gagtatttggttcggtggaa

SEQ ID NO: 26280 - DNA, 20 bp, Artificial Sequence
  Synthetic
gtggaaaggctatgacagcg

SEQ ID NO: 26281 - DNA, 20 bp, Artificial Sequence
  Synthetic
atgacagcgaggacgacact

SEQ ID NO: 26282 - DNA, 20 bp, Artificial Sequence
  Synthetic
tgacagcgaggacgacactt

SEQ ID NO: 26283 - DNA, 20 bp, Artificial Sequence
  Synthetic
cgaggacgacacttgggagc

SEQ ID NO: 26284 - DNA, 20 bp, Artificial Sequence
  Synthetic
cagttcacgaggtgctgttc

SEQ ID NO: 26285 - DNA, 20 bp, Artificial Sequence
  Synthetic
acagcacctcgtgaactgtg

SEQ ID NO: 26286 - DNA, 20 bp, Artificial Sequence
  Synthetic
tgtattcctcacagttcacg

SEQ ID NO: 26287 - DNA, 20 bp, Artificial Sequence
  Synthetic
tgtggcgtctgttgaagtcg

SEQ ID NO: 26288 - DNA, 20 bp, Artificial Sequence
  Synthetic
ggcttctggggacctttacg

SEQ ID NO: 26289 - DNA, 20 bp, Artificial Sequence
  Synthetic
cgcgtccccgtacctcgtaa

SEQ ID NO: 26290 - DNA, 20 bp, Artificial Sequence
  Synthetic
atcttgtatcgcaggttgaa

SEQ ID NO: 26291 - DNA, 20 bp, Artificial Sequence
  Synthetic
ttgaaaggattgtagacaag

SEQ ID NO: 26292 - DNA, 20 bp, Artificial Sequence
  Synthetic
gacaagaggaagaacaagaa

SEQ ID NO: 26293 - DNA, 20 bp, Artificial Sequence
  Synthetic
ggaagaacaagaaaggaaaa

SEQ ID NO: 26294 - DNA, 20 bp, Artificial Sequence
  Synthetic
gaagaacaagaaaggaaaat

SEQ ID NO: 26295 - DNA, 20 bp, Artificial Sequence
  Synthetic
aatgggagtatcttatccga

SEQ ID NO: 26296 - DNA, 20 bp, Artificial Sequence
  Synthetic
gagtatcttatccgatggaa

SEQ ID NO: 26297 - DNA, 20 bp, Artificial Sequence
  Synthetic
cttatccgatggaaaggcta

SEQ ID NO: 26298 - DNA, 20 bp, Artificial Sequence
  Synthetic
ttatccgatggaaaggctac

SEQ ID NO: 26299 - DNA, 20 bp, Artificial Sequence
  Synthetic
tgctcccgtagcctttccat

SEQ ID NO: 26300 - DNA, 20 bp, Artificial Sequence
  Synthetic
gaaaggctacgggagcaccg

SEQ ID NO: 26301 - DNA, 20 bp, Artificial Sequence
  Synthetic
acgggagcaccgaggacacg

SEQ ID NO: 26302 - DNA, 20 bp, Artificial Sequence
  Synthetic
cgggagcaccgaggacacgt

SEQ ID NO: 26303 - DNA, 20 bp, Artificial Sequence
  Synthetic
caccgaggacacgtgggagc

SEQ ID NO: 26304 - DNA, 20 bp, Artificial Sequence
  Synthetic
ctccggctcccacgtgtcct

SEQ ID NO: 26305 - DNA, 20 bp, Artificial Sequence
  Synthetic
cagtgcaagaggtggtgctc

SEQ ID NO: 26306 - DNA, 20 bp, Artificial Sequence
  Synthetic
gcaccacctcttgcactgtg

SEQ ID NO: 26307 - DNA, 20 bp, Artificial Sequence
  Synthetic
actcctcacagtgcaagagg

SEQ ID NO: 26308 - DNA, 20 bp, Artificial Sequence
  Synthetic
taaactcctcacagtgcaag

SEQ ID NO: 26309 - DNA, 20 bp, Artificial Sequence
  Synthetic
gagtttattgatgaattcaa

SEQ ID NO: 26310 - DNA, 20 bp, Artificial Sequence
  Synthetic
agtttattgatgaattcaat

SEQ ID NO: 26311 - DNA, 20 bp, Artificial Sequence
  Synthetic
ctggctttcagttctagacg

SEQ ID NO: 26312 - DNA, 20 bp, Artificial Sequence
  Synthetic
ttcagttctagacgtggtaa

SEQ ID NO: 26313 - DNA, 20 bp, Artificial Sequence
  Synthetic
agacgtggtaaaggctcaca

SEQ ID NO: 26314 - DNA, 20 bp, Artificial Sequence
  Synthetic
taaaggctcacaaggattcc

SEQ ID NO: 26315 - DNA, 20 bp, Artificial Sequence
  Synthetic
caaggattcctggcccttct

SEQ ID NO: 26316 - DNA, 20 bp, Artificial Sequence
  Synthetic
cacaggttccaagaagggcc

SEQ ID NO: 26317 - DNA, 20 bp, Artificial Sequence
  Synthetic
ctggcccttcttggaacctg

SEQ ID NO: 26318 - DNA, 20 bp, Artificial Sequence
  Synthetic
tcatccacaggttccaagaa

SEQ ID NO: 26319 - DNA, 20 bp, Artificial Sequence
  Synthetic
ttcatccacaggttccaaga

SEQ ID NO: 26320 - DNA, 20 bp, Artificial Sequence
  Synthetic
ggggcataagattcatccac

SEQ ID NO: 26321 - DNA, 20 bp, Artificial Sequence
  Synthetic
aataatctgataatagttag

SEQ ID NO: 26322 - DNA, 20 bp, Artificial Sequence
  Synthetic
taataatctgataatagtta

SEQ ID NO: 26323 - DNA, 20 bp, Artificial Sequence
  Synthetic
ttaataatctgataatagtt

SEQ ID NO: 26324 - DNA, 20 bp, Artificial Sequence
  Synthetic
taactattatcagattatta

SEQ ID NO: 26325 - DNA, 20 bp, Artificial Sequence
  Synthetic
gtgtctcgtttaggccccca

SEQ ID NO: 26326 - DNA, 20 bp, Artificial Sequence
  Synthetic
catgctggaaatatccatgg

SEQ ID NO: 26327 - DNA, 20 bp, Artificial Sequence
  Synthetic
ccatgctggaaatatccatg

SEQ ID NO: 26328 - DNA, 20 bp, Artificial Sequence
  Synthetic
ccccatggatatttccagca

SEQ ID NO: 26329 - DNA, 20 bp, Artificial Sequence
  Synthetic
tccatgctggaaatatccat

SEQ ID NO: 26330 - DNA, 20 bp, Artificial Sequence
  Synthetic
ctccatgctggaaatatcca

SEQ ID NO: 26331 - DNA, 20 bp, Artificial Sequence
  Synthetic
attcagtttcttctccatgc

SEQ ID NO: 26332 - DNA, 20 bp, Artificial Sequence
  Synthetic
agcatggagaagaaactgaa

SEQ ID NO: 26333 - DNA, 20 bp, Artificial Sequence
  Synthetic
atggagaagaaactgaatgg

SEQ ID NO: 26334 - DNA, 20 bp, Artificial Sequence
  Synthetic
tggaggtttatactgtacca

SEQ ID NO: 26335 - DNA, 20 bp, Artificial Sequence
  Synthetic
aggtttatactgtaccaagg

SEQ ID NO: 26336 - DNA, 20 bp, Artificial Sequence
  Synthetic
gtcatttacaaattcctcct

SEQ ID NO: 26337 - DNA, 20 bp, Artificial Sequence
  Synthetic
atgacatgaagaccatgttc

SEQ ID NO: 26338 - DNA, 20 bp, Artificial Sequence
  Synthetic
ctttcgacaattcctgaaca

SEQ ID NO: 26339 - DNA, 20 bp, Artificial Sequence
  Synthetic
aggaattgtcgaaagtataa

SEQ ID NO: 26340 - DNA, 20 bp, Artificial Sequence
  Synthetic
ggaattgtcgaaagtataat

SEQ ID NO: 26341 - DNA, 20 bp, Artificial Sequence
  Synthetic
gaattgtcgaaagtataatg

SEQ ID NO: 26342 - DNA, 20 bp, Artificial Sequence
  Synthetic
aagtataatggggaaagtag

SEQ ID NO: 26343 - DNA, 20 bp, Artificial Sequence
  Synthetic
ctctaaattatcagacatct

SEQ ID NO: 26344 - DNA, 20 bp, Artificial Sequence
  Synthetic
ggtggttctcacagaactgc

SEQ ID NO: 26345 - DNA, 20 bp, Artificial Sequence
  Synthetic
tgcagttctgtgagaaccac

SEQ ID NO: 26346 - DNA, 20 bp, Artificial Sequence
  Synthetic
agaaccaccggcctgcctac

SEQ ID NO: 26347 - DNA, 20 bp, Artificial Sequence
  Synthetic
gaaccaccggcctgcctact

SEQ ID NO: 26348 - DNA, 20 bp, Artificial Sequence
  Synthetic
aaccaccggcctgcctactg

SEQ ID NO: 26349 - DNA, 20 bp, Artificial Sequence
  Synthetic
taccccagtaggcaggccgg

SEQ ID NO: 26350 - DNA, 20 bp, Artificial Sequence
  Synthetic
aggtaccccagtaggcaggc

SEQ ID NO: 26351 - DNA, 20 bp, Artificial Sequence
  Synthetic
ggcctgcctactggggtacc

SEQ ID NO: 26352 - DNA, 20 bp, Artificial Sequence
  Synthetic
ttccaggtaccccagtaggc

SEQ ID NO: 26353 - DNA, 20 bp, Artificial Sequence
  Synthetic
cttattccaggtaccccagt

SEQ ID NO: 26354 - DNA, 20 bp, Artificial Sequence
  Synthetic
gggtacctggaataagaaga

SEQ ID NO: 26355 - DNA, 20 bp, Artificial Sequence
  Synthetic
gagtgccgtcttcttattcc

SEQ ID NO: 26356 - DNA, 20 bp, Artificial Sequence
  Synthetic
tcatccgcgcgcgagacccc

SEQ ID NO: 26357 - DNA, 20 bp, Artificial Sequence
  Synthetic
catccgcgcgcgagacccct

SEQ ID NO: 26358 - DNA, 20 bp, Artificial Sequence
  Synthetic
gggcccaggggtctcgcgcg

SEQ ID NO: 26359 - DNA, 20 bp, Artificial Sequence
  Synthetic
cgcgcgagacccctgggccc

SEQ ID NO: 26360 - DNA, 20 bp, Artificial Sequence
  Synthetic
agacccctgggcccaggaca

SEQ ID NO: 26361 - DNA, 20 bp, Artificial Sequence
  Synthetic
tcaccgtgtcctgggcccag

SEQ ID NO: 26362 - DNA, 20 bp, Artificial Sequence
  Synthetic
ctcaccgtgtcctgggccca

SEQ ID NO: 26363 - DNA, 20 bp, Artificial Sequence
  Synthetic
gctcaccgtgtcctgggccc

SEQ ID NO: 26364 - DNA, 20 bp, Artificial Sequence
  Synthetic
gggctagctcaccgtgtcct

SEQ ID NO: 26365 - DNA, 20 bp, Artificial Sequence
  Synthetic
ggggctagctcaccgtgtcc

SEQ ID NO: 26366 - DNA, 20 bp, Artificial Sequence
  Synthetic
tttcttttctcagaagctcc

SEQ ID NO: 26367 - DNA, 20 bp, Artificial Sequence
  Synthetic
tcagaagctcctggactatg

SEQ ID NO: 26368 - DNA, 20 bp, Artificial Sequence
  Synthetic
gaagctcctggactatgagg

SEQ ID NO: 26369 - DNA, 20 bp, Artificial Sequence
  Synthetic
cactgtccacctcatagtcc

SEQ ID NO: 26370 - DNA, 20 bp, Artificial Sequence
  Synthetic
ctatgaggtggacagtgatg

SEQ ID NO: 26371 - DNA, 20 bp, Artificial Sequence
  Synthetic
aggtggacagtgatgaggag

SEQ ID NO: 26372 - DNA, 20 bp, Artificial Sequence
  Synthetic
ggtggacagtgatgaggagt

SEQ ID NO: 26373 - DNA, 20 bp, Artificial Sequence
  Synthetic
tgatgaggagtgggaagaag

SEQ ID NO: 26374 - DNA, 20 bp, Artificial Sequence
  Synthetic
gagtgggaagaagaggagcc

SEQ ID NO: 26375 - DNA, 20 bp, Artificial Sequence
  Synthetic
agtgggaagaagaggagcct

SEQ ID NO: 26376 - DNA, 20 bp, Artificial Sequence
  Synthetic
gtgggaagaagaggagcctg

SEQ ID NO: 26377 - DNA, 20 bp, Artificial Sequence
  Synthetic
ctgtgggacagggactcccc

SEQ ID NO: 26378 - DNA, 20 bp, Artificial Sequence
  Synthetic
ggagtccctgtcccacagtg

SEQ ID NO: 26379 - DNA, 20 bp, Artificial Sequence
  Synthetic
gagtccctgtcccacagtga

SEQ ID NO: 26380 - DNA, 20 bp, Artificial Sequence
  Synthetic
agtccctgtcccacagtgag

SEQ ID NO: 26381 - DNA, 20 bp, Artificial Sequence
  Synthetic
gtccctgtcccacagtgagg

SEQ ID NO: 26382 - DNA, 20 bp, Artificial Sequence
  Synthetic
taccccctcactgtgggaca

SEQ ID NO: 26383 - DNA, 20 bp, Artificial Sequence
  Synthetic
ttaccccctcactgtgggac

SEQ ID NO: 26384 - DNA, 20 bp, Artificial Sequence
  Synthetic
catccttaccccctcactgt

SEQ ID NO: 26385 - DNA, 20 bp, Artificial Sequence
  Synthetic
acatccttaccccctcactg

SEQ ID NO: 26386 - DNA, 20 bp, Artificial Sequence
  Synthetic
tgaggatgatgatgacgaca

SEQ ID NO: 26387 - DNA, 20 bp, Artificial Sequence
  Synthetic
gaggatgatgatgacgacat

SEQ ID NO: 26388 - DNA, 20 bp, Artificial Sequence
  Synthetic
tgatgatgacgacatgggag

SEQ ID NO: 26389 - DNA, 20 bp, Artificial Sequence
  Synthetic
catgggagaggatgaagatg

SEQ ID NO: 26390 - DNA, 20 bp, Artificial Sequence
  Synthetic
gaggatgaagatgaggacga

SEQ ID NO: 26391 - DNA, 20 bp, Artificial Sequence
  Synthetic
ccgccagaaactgaaggcca

SEQ ID NO: 26392 - DNA, 20 bp, Artificial Sequence
  Synthetic
agaaactgaaggccaaggag

SEQ ID NO: 26393 - DNA, 20 bp, Artificial Sequence
  Synthetic
gaaactgaaggccaaggagt

SEQ ID NO: 26394 - DNA, 20 bp, Artificial Sequence
  Synthetic
caggaactcgtcccactcct

SEQ ID NO: 26395 - DNA, 20 bp, Artificial Sequence
  Synthetic
caaggagtgggacgagttcc

SEQ ID NO: 26396 - DNA, 20 bp, Artificial Sequence
  Synthetic
gtgggacgagttcctggcta

SEQ ID NO: 26397 - DNA, 20 bp, Artificial Sequence
  Synthetic
tgggacgagttcctggctaa

SEQ ID NO: 26398 - DNA, 20 bp, Artificial Sequence
  Synthetic
gggacgagttcctggctaag

SEQ ID NO: 26399 - DNA, 20 bp, Artificial Sequence
  Synthetic
gaaagcgcttccccttagcc

SEQ ID NO: 26400 - DNA, 20 bp, Artificial Sequence
  Synthetic
gtcctgcaacctgtgaagat

SEQ ID NO: 26401 - DNA, 20 bp, Artificial Sequence
  Synthetic
agccgatcttcacaggttgc

SEQ ID NO: 26402 - DNA, 20 bp, Artificial Sequence
  Synthetic
cacacgcagccgatcttcac

SEQ ID NO: 26403 - DNA, 20 bp, Artificial Sequence
  Synthetic
ctgtgaagatcggctgcgtg

SEQ ID NO: 26404 - DNA, 20 bp, Artificial Sequence
  Synthetic
tgtgaagatcggctgcgtgt

SEQ ID NO: 26405 - DNA, 20 bp, Artificial Sequence
  Synthetic
gaagatcggctgcgtgtggg

SEQ ID NO: 26406 - DNA, 20 bp, Artificial Sequence
  Synthetic
gcggctgacagagactgcgc

SEQ ID NO: 26407 - DNA, 20 bp, Artificial Sequence
  Synthetic
ctgcgcaggcgatgacctga

SEQ ID NO: 26408 - DNA, 20 bp, Artificial Sequence
  Synthetic
cgaactgctgcagtaccttc

SEQ ID NO: 26409 - DNA, 20 bp, Artificial Sequence
  Synthetic
gcagttcgcagcctgcttcc

SEQ ID NO: 26410 - DNA, 20 bp, Artificial Sequence
  Synthetic
cggcagggtctccaggaagc

SEQ ID NO: 26411 - DNA, 20 bp, Artificial Sequence
  Synthetic
ctgcttcctggagaccctgc

SEQ ID NO: 26412 - DNA, 20 bp, Artificial Sequence
  Synthetic
cctgggccggcagggtctcc

SEQ ID NO: 26413 - DNA, 20 bp, Artificial Sequence
  Synthetic
cctggagaccctgccggccc

SEQ ID NO: 26414 - DNA, 20 bp, Artificial Sequence
  Synthetic
ggagaccctgccggcccagg

SEQ ID NO: 26415 - DNA, 20 bp, Artificial Sequence
  Synthetic
ctgctcctcctgggccggca

SEQ ID NO: 26416 - DNA, 20 bp, Artificial Sequence
  Synthetic
tctgctcctcctgggccggc

SEQ ID NO: 26417 - DNA, 20 bp, Artificial Sequence
  Synthetic
ggcgtctgctcctcctgggc

SEQ ID NO: 26418 - DNA, 20 bp, Artificial Sequence
  Synthetic
cttgggcgtctgctcctcct

SEQ ID NO: 26419 - DNA, 20 bp, Artificial Sequence
  Synthetic
ccttgggcgtctgctcctcc

SEQ ID NO: 26420 - DNA, 20 bp, Artificial Sequence
  Synthetic
ccaggaggagcagacgccca

SEQ ID NO: 26421 - DNA, 20 bp, Artificial Sequence
  Synthetic
agacgcccaaggcctccaag

SEQ ID NO: 26422 - DNA, 20 bp, Artificial Sequence
  Synthetic
gacgcccaaggcctccaagc

SEQ ID NO: 26423 - DNA, 20 bp, Artificial Sequence
  Synthetic
ctctcccgcttggaggcctt

SEQ ID NO: 26424 - DNA, 20 bp, Artificial Sequence
  Synthetic
cctctcccgcttggaggcct

SEQ ID NO: 26425 - DNA, 20 bp, Artificial Sequence
  Synthetic
ccaaggcctccaagcgggag

SEQ ID NO: 26426 - DNA, 20 bp, Artificial Sequence
  Synthetic
gtctctcctctcccgcttgg

SEQ ID NO: 26427 - DNA, 20 bp, Artificial Sequence
  Synthetic
ctcgtctctcctctcccgct

SEQ ID NO: 26428 - DNA, 20 bp, Artificial Sequence
  Synthetic
ggcagcagctgggccaggac

SEQ ID NO: 26429 - DNA, 20 bp, Artificial Sequence
  Synthetic
ggagcggcagcagctgggcc

SEQ ID NO: 26430 - DNA, 20 bp, Artificial Sequence
  Synthetic
gtgcaggagcggcagcagct

SEQ ID NO: 26431 - DNA, 20 bp, Artificial Sequence
  Synthetic
cgtgcaggagcggcagcagc

SEQ ID NO: 26432 - DNA, 20 bp, Artificial Sequence
  Synthetic
cagctgctgccgctcctgca

SEQ ID NO: 26433 - DNA, 20 bp, Artificial Sequence
  Synthetic
ttcacattgccgtgcaggag

SEQ ID NO: 26434 - DNA, 20 bp, Artificial Sequence
  Synthetic
ctcctgcacggcaatgtgaa

SEQ ID NO: 26435 - DNA, 20 bp, Artificial Sequence
  Synthetic
tcctgcacggcaatgtgaac

SEQ ID NO: 26436 - DNA, 20 bp, Artificial Sequence
  Synthetic
tcccgttcacattgccgtgc

SEQ ID NO: 26437 - DNA, 20 bp, Artificial Sequence
  Synthetic
cggcaatgtgaacgggagca

SEQ ID NO: 26438 - DNA, 20 bp, Artificial Sequence
  Synthetic
acgggagcaaggtcatcatc

SEQ ID NO: 26439 - DNA, 20 bp, Artificial Sequence
  Synthetic
cgggagcaaggtcatcatcc

SEQ ID NO: 26440 - DNA, 20 bp, Artificial Sequence
  Synthetic
ggtcatcatccgggagttcc

SEQ ID NO: 26441 - DNA, 20 bp, Artificial Sequence
  Synthetic
ggcagtgctcctggaactcc

SEQ ID NO: 26442 - DNA, 20 bp, Artificial Sequence
  Synthetic
agttccaggagcactgccgc

SEQ ID NO: 26443 - DNA, 20 bp, Artificial Sequence
  Synthetic
gttccaggagcactgccgcc

SEQ ID NO: 26444 - DNA, 20 bp, Artificial Sequence
  Synthetic
ttccaggagcactgccgccg

SEQ ID NO: 26445 - DNA, 20 bp, Artificial Sequence
  Synthetic
gtccccggcggcagtgctcc

SEQ ID NO: 26446 - DNA, 20 bp, Artificial Sequence
  Synthetic
ggttgctgagcagtccccgg

SEQ ID NO: 26447 - DNA, 20 bp, Artificial Sequence
  Synthetic
tgtggttgctgagcagtccc

SEQ ID NO: 26448 - DNA, 20 bp, Artificial Sequence
  Synthetic
ggactgctcagcaaccacac

SEQ ID NO: 26449 - DNA, 20 bp, Artificial Sequence
  Synthetic
gcaaccacaccggcagcccg

SEQ ID NO: 26450 - DNA, 20 bp, Artificial Sequence
  Synthetic
ggctccgcgggctgccggtg

SEQ ID NO: 26451 - DNA, 20 bp, Artificial Sequence
  Synthetic
ggaggggctccgcgggctgc

SEQ ID NO: 26452 - DNA, 20 bp, Artificial Sequence
  Synthetic
aggtggtggaggggctccgc

SEQ ID NO: 26453 - DNA, 20 bp, Artificial Sequence
  Synthetic
taggtggtggaggggctccg

SEQ ID NO: 26454 - DNA, 20 bp, Artificial Sequence
  Synthetic
tgtgcaggtaggtggtggag

SEQ ID NO: 26455 - DNA, 20 bp, Artificial Sequence
  Synthetic
gtgtgcaggtaggtggtgga

SEQ ID NO: 26456 - DNA, 20 bp, Artificial Sequence
  Synthetic
ggtgtgcaggtaggtggtgg

SEQ ID NO: 26457 - DNA, 20 bp, Artificial Sequence
  Synthetic
gggggtgtgcaggtaggtgg

SEQ ID NO: 26458 - DNA, 20 bp, Artificial Sequence
  Synthetic
ggtgggggtgtgcaggtagg

SEQ ID NO: 26459 - DNA, 20 bp, Artificial Sequence
  Synthetic
gggggtgggggtgtgcaggt

SEQ ID NO: 26460 - DNA, 20 bp, Artificial Sequence
  Synthetic
cgctgggggtgggggtgtgc

SEQ ID NO: 26461 - DNA, 20 bp, Artificial Sequence
  Synthetic
gcacacccccacccccagcg

SEQ ID NO: 26462 - DNA, 20 bp, Artificial Sequence
  Synthetic
ggcatcctcgctgggggtgg

SEQ ID NO: 26463 - DNA, 20 bp, Artificial Sequence
  Synthetic
cggcatcctcgctgggggtg

SEQ ID NO: 26464 - DNA, 20 bp, Artificial Sequence
  Synthetic
gcggcatcctcgctgggggt

SEQ ID NO: 26465 - DNA, 20 bp, Artificial Sequence
  Synthetic
ggcggcatcctcgctggggg

SEQ ID NO: 26466 - DNA, 20 bp, Artificial Sequence
  Synthetic
gatggcggcatcctcgctgg

SEQ ID NO: 26467 - DNA, 20 bp, Artificial Sequence
  Synthetic
ggatggcggcatcctcgctg

SEQ ID NO: 26468 - DNA, 20 bp, Artificial Sequence
  Synthetic
gggatggcggcatcctcgct

SEQ ID NO: 26469 - DNA, 20 bp, Artificial Sequence
  Synthetic
ggggatggcggcatcctcgc

SEQ ID NO: 26470 - DNA, 20 bp, Artificial Sequence
  Synthetic
ccgggacttagaggggatgg

SEQ ID NO: 26471 - DNA, 20 bp, Artificial Sequence
  Synthetic
ccgccatcccctctaagtcc

SEQ ID NO: 26472 - DNA, 20 bp, Artificial Sequence
  Synthetic
gagccgggacttagagggga

SEQ ID NO: 26473 - DNA, 20 bp, Artificial Sequence
  Synthetic
gcttgagccgggacttagag

SEQ ID NO: 26474 - DNA, 20 bp, Artificial Sequence
  Synthetic
cgcttgagccgggacttaga

SEQ ID NO: 26475 - DNA, 20 bp, Artificial Sequence
  Synthetic
ccgcttgagccgggacttag

SEQ ID NO: 26476 - DNA, 20 bp, Artificial Sequence
  Synthetic
cctctaagtcccggctcaag

SEQ ID NO: 26477 - DNA, 20 bp, Artificial Sequence
  Synthetic
ggaaatgagccgcttgagcc

SEQ ID NO: 26478 - DNA, 20 bp, Artificial Sequence
  Synthetic
cggaaatgagccgcttgagc

SEQ ID NO: 26479 - DNA, 20 bp, Artificial Sequence
  Synthetic
cttctcatacactgagttct

SEQ ID NO: 26480 - DNA, 20 bp, Artificial Sequence
  Synthetic
agaactcagtgtatgagaag

SEQ ID NO: 26481 - DNA, 20 bp, Artificial Sequence
  Synthetic
atgagaagcggcctgacttc

SEQ ID NO: 26482 - DNA, 20 bp, Artificial Sequence
  Synthetic
ggcctgacttcaggatgtgc

SEQ ID NO: 26483 - DNA, 20 bp, Artificial Sequence
  Synthetic
taccagcacatcctgaagtc

SEQ ID NO: 26484 - DNA, 20 bp, Artificial Sequence
  Synthetic
gtgctggtacgtgcacccgc

SEQ ID NO: 26485 - DNA, 20 bp, Artificial Sequence
  Synthetic
ggaagctctgtagcacctgc

SEQ ID NO: 26486 - DNA, 20 bp, Artificial Sequence
  Synthetic
tggaagctctgtagcacctg

SEQ ID NO: 26487 - DNA, 20 bp, Artificial Sequence
  Synthetic
ggtgctacagagcttccagc

SEQ ID NO: 26488 - DNA, 20 bp, Artificial Sequence
  Synthetic
gcacgggcaggtgctcctgc

SEQ ID NO: 26489 - DNA, 20 bp, Artificial Sequence
  Synthetic
acctgcccgtgccgtgccag

SEQ ID NO: 26490 - DNA, 20 bp, Artificial Sequence
  Synthetic
tccactggcacggcacgggc

SEQ ID NO: 26491 - DNA, 20 bp, Artificial Sequence
  Synthetic
tagctccactggcacggcac

SEQ ID NO: 26492 - DNA, 20 bp, Artificial Sequence
  Synthetic
atagctccactggcacggca

SEQ ID NO: 26493 - DNA, 20 bp, Artificial Sequence
  Synthetic
gtcacatagctccactggca

SEQ ID NO: 26494 - DNA, 20 bp, Artificial Sequence
  Synthetic
ccgatgtcacatagctccac

SEQ ID NO: 26495 - DNA, 20 bp, Artificial Sequence
  Synthetic
ccagtggagctatgtgacat

SEQ ID NO: 26496 - DNA, 20 bp, Artificial Sequence
  Synthetic
ctatgtgacatcggtgccct

SEQ ID NO: 26497 - DNA, 20 bp, Artificial Sequence
  Synthetic
ggtgccctcggcccccaaag

SEQ ID NO: 26498 - DNA, 20 bp, Artificial Sequence
  Synthetic
ctgtcctctttgggggccga

SEQ ID NO: 26499 - DNA, 20 bp, Artificial Sequence
  Synthetic
actgtcctctttgggggccg

SEQ ID NO: 26500 - DNA, 20 bp, Artificial Sequence
  Synthetic
tcggcccccaaagaggacag

SEQ ID NO: 26501 - DNA, 20 bp, Artificial Sequence
  Synthetic
gctgccactgtcctctttgg

SEQ ID NO: 26502 - DNA, 20 bp, Artificial Sequence
  Synthetic
cgctgccactgtcctctttg

SEQ ID NO: 26503 - DNA, 20 bp, Artificial Sequence
  Synthetic
acgctgccactgtcctcttt

SEQ ID NO: 26504 - DNA, 20 bp, Artificial Sequence
  Synthetic
gacgctgccactgtcctctt

SEQ ID NO: 26505 - DNA, 20 bp, Artificial Sequence
  Synthetic
cagtggcagcgtcccctcca

SEQ ID NO: 26506 - DNA, 20 bp, Artificial Sequence
  Synthetic
agtggcagcgtcccctccac

SEQ ID NO: 26507 - DNA, 20 bp, Artificial Sequence
  Synthetic
gtggcagcgtcccctccacg

SEQ ID NO: 26508 - DNA, 20 bp, Artificial Sequence
  Synthetic
cctggctgggccccgtggag

SEQ ID NO: 26509 - DNA, 20 bp, Artificial Sequence
  Synthetic
cccctccacggggcccagcc

SEQ ID NO: 26510 - DNA, 20 bp, Artificial Sequence
  Synthetic
ccctggctgggccccgtgga

SEQ ID NO: 26511 - DNA, 20 bp, Artificial Sequence
  Synthetic
ccctccacggggcccagcca

SEQ ID NO: 26512 - DNA, 20 bp, Artificial Sequence
  Synthetic
gccctggctgggccccgtgg

SEQ ID NO: 26513 - DNA, 20 bp, Artificial Sequence
  Synthetic
agtgccctggctgggccccg

SEQ ID NO: 26514 - DNA, 20 bp, Artificial Sequence
  Synthetic
gagatgggagtgccctggct

SEQ ID NO: 26515 - DNA, 20 bp, Artificial Sequence
  Synthetic
cgagatgggagtgccctggc

SEQ ID NO: 26516 - DNA, 20 bp, Artificial Sequence
  Synthetic
tcagcgagatgggagtgccc

SEQ ID NO: 26517 - DNA, 20 bp, Artificial Sequence
  Synthetic
gcactcccatctcgctgaag

SEQ ID NO: 26518 - DNA, 20 bp, Artificial Sequence
  Synthetic
gacttcctcttcagcgagat

SEQ ID NO: 26519 - DNA, 20 bp, Artificial Sequence
  Synthetic
tgacttcctcttcagcgaga

SEQ ID NO: 26520 - DNA, 20 bp, Artificial Sequence
  Synthetic
ctcgctgaagaggaagtcag

SEQ ID NO: 26521 - DNA, 20 bp, Artificial Sequence
  Synthetic
tcgctgaagaggaagtcagc

SEQ ID NO: 26522 - DNA, 20 bp, Artificial Sequence
  Synthetic
cctgcgcttcttcatgaatt

SEQ ID NO: 26523 - DNA, 20 bp, Artificial Sequence
  Synthetic
cccaattcatgaagaagcgc

SEQ ID NO: 26524 - DNA, 20 bp, Artificial Sequence
  Synthetic
gcctgcgcttcttcatgaat

SEQ ID NO: 26525 - DNA, 20 bp, Artificial Sequence
  Synthetic
atgaagaagcgcaggcacga

SEQ ID NO: 26526 - DNA, 20 bp, Artificial Sequence
  Synthetic
gaagcgcaggcacgacggcc

SEQ ID NO: 26527 - DNA, 20 bp, Artificial Sequence
  Synthetic
ccatgtcttcagcaccaatc

SEQ ID NO: 26528 - DNA, 20 bp, Artificial Sequence
  Synthetic
ccagattggtgctgaagaca

SEQ ID NO: 26529 - DNA, 20 bp, Artificial Sequence
  Synthetic
attggtgctgaagacatgga

SEQ ID NO: 26530 - DNA, 20 bp, Artificial Sequence
  Synthetic
tgaagacatggacggcttcc

SEQ ID NO: 26531 - DNA, 20 bp, Artificial Sequence
  Synthetic
ggacggcttccaggcagaca

SEQ ID NO: 26532 - DNA, 20 bp, Artificial Sequence
  Synthetic
cggcttccaggcagacacgg

SEQ ID NO: 26533 - DNA, 20 bp, Artificial Sequence
  Synthetic
cttccaggcagacacggagg

SEQ ID NO: 26534 - DNA, 20 bp, Artificial Sequence
  Synthetic
cctcctcctccgtgtctgcc

SEQ ID NO: 26535 - DNA, 20 bp, Artificial Sequence
  Synthetic
ccaggcagacacggaggagg

SEQ ID NO: 26536 - DNA, 20 bp, Artificial Sequence
  Synthetic
agacacggaggaggaggaag

SEQ ID NO: 26537 - DNA, 20 bp, Artificial Sequence
  Synthetic
cacggaggaggaggaagagg

SEQ ID NO: 26538 - DNA, 20 bp, Artificial Sequence
  Synthetic
ggaggaggaggaagaggagg

SEQ ID NO: 26539 - DNA, 20 bp, Artificial Sequence
  Synthetic
gaggaggaggaagaggagga

SEQ ID NO: 26540 - DNA, 20 bp, Artificial Sequence
  Synthetic
ggagggcgactgtatgatcg

SEQ ID NO: 26541 - DNA, 20 bp, Artificial Sequence
  Synthetic
ctgtatgatcgtggatgtcc

SEQ ID NO: 26542 - DNA, 20 bp, Artificial Sequence
  Synthetic
cgtggatgtcccggatgctg

SEQ ID NO: 26543 - DNA, 20 bp, Artificial Sequence
  Synthetic
gtggatgtcccggatgctgc

SEQ ID NO: 26544 - DNA, 20 bp, Artificial Sequence
  Synthetic
ccttctcacccgcagcatcc

SEQ ID NO: 26545 - DNA, 20 bp, Artificial Sequence
  Synthetic
cccttctcacccgcagcatc

SEQ ID NO: 26546 - DNA, 20 bp, Artificial Sequence
  Synthetic
gcagaggtccaagccccgtg

SEQ ID NO: 26547 - DNA, 20 bp, Artificial Sequence
  Synthetic
aagcggctccacacggggct

SEQ ID NO: 26548 - DNA, 20 bp, Artificial Sequence
  Synthetic
gccccgtgtggagccgcttc

SEQ ID NO: 26549 - DNA, 20 bp, Artificial Sequence
  Synthetic
tccggaagcggctccacacg

SEQ ID NO: 26550 - DNA, 20 bp, Artificial Sequence
  Synthetic
ctccggaagcggctccacac

SEQ ID NO: 26551 - DNA, 20 bp, Artificial Sequence
  Synthetic
gctccggaagcggctccaca

SEQ ID NO: 26552 - DNA, 20 bp, Artificial Sequence
  Synthetic
tgtggagccgcttccggagc

SEQ ID NO: 26553 - DNA, 20 bp, Artificial Sequence
  Synthetic
gtggagccgcttccggagct

SEQ ID NO: 26554 - DNA, 20 bp, Artificial Sequence
  Synthetic
tggagccgcttccggagctg

SEQ ID NO: 26555 - DNA, 20 bp, Artificial Sequence
  Synthetic
ggagccgcttccggagctgg

SEQ ID NO: 26556 - DNA, 20 bp, Artificial Sequence
  Synthetic
gccgcttccggagctggggg

SEQ ID NO: 26557 - DNA, 20 bp, Artificial Sequence
  Synthetic
accacccccagctccggaag

SEQ ID NO: 26558 - DNA, 20 bp, Artificial Sequence
  Synthetic
ttccggagctgggggtggtg

SEQ ID NO: 26559 - DNA, 20 bp, Artificial Sequence
  Synthetic
tccggagctgggggtggtgt

SEQ ID NO: 26560 - DNA, 20 bp, Artificial Sequence
  Synthetic
ccccacaccacccccagctc

SEQ ID NO: 26561 - DNA, 20 bp, Artificial Sequence
  Synthetic
ccggagctgggggtggtgtg

SEQ ID NO: 26562 - DNA, 20 bp, Artificial Sequence
  Synthetic
cggagctgggggtggtgtgg

SEQ ID NO: 26563 - DNA, 20 bp, Artificial Sequence
  Synthetic
agctgggggtggtgtggggg

SEQ ID NO: 26564 - DNA, 20 bp, Artificial Sequence
  Synthetic
ggtggtgtgggggtggacac

SEQ ID NO: 26565 - DNA, 20 bp, Artificial Sequence
  Synthetic
tgtgggggtggacaccggca

SEQ ID NO: 26566 - DNA, 20 bp, Artificial Sequence
  Synthetic
cgcggtcagggtggccttgc

SEQ ID NO: 26567 - DNA, 20 bp, Artificial Sequence
  Synthetic
cagtgggctcgcggtcaggg

SEQ ID NO: 26568 - DNA, 20 bp, Artificial Sequence
  Synthetic
caccctgaccgcgagcccac

SEQ ID NO: 26569 - DNA, 20 bp, Artificial Sequence
  Synthetic
accctgaccgcgagcccact

SEQ ID NO: 26570 - DNA, 20 bp, Artificial Sequence
  Synthetic
acccagtgggctcgcggtca

SEQ ID NO: 26571 - DNA, 20 bp, Artificial Sequence
  Synthetic
cacccagtgggctcgcggtc

SEQ ID NO: 26572 - DNA, 20 bp, Artificial Sequence
  Synthetic
ggatgcacccagtgggctcg

SEQ ID NO: 26573 - DNA, 20 bp, Artificial Sequence
  Synthetic
gctctcaggatgcacccagt

SEQ ID NO: 26574 - DNA, 20 bp, Artificial Sequence
  Synthetic
tgctctcaggatgcacccag

SEQ ID NO: 26575 - DNA, 20 bp, Artificial Sequence
  Synthetic
agctgccgccggggcgatgc

SEQ ID NO: 26576 - DNA, 20 bp, Artificial Sequence
  Synthetic
tgccgccggggcgatgctgg

SEQ ID NO: 26577 - DNA, 20 bp, Artificial Sequence
  Synthetic
cggggcgatgctggaggagc

SEQ ID NO: 26578 - DNA, 20 bp, Artificial Sequence
  Synthetic
atgctggaggagctggagtg

SEQ ID NO: 26579 - DNA, 20 bp, Artificial Sequence
  Synthetic
tgctggaggagctggagtgc

SEQ ID NO: 26580 - DNA, 20 bp, Artificial Sequence
  Synthetic
gctggaggagctggagtgcg

SEQ ID NO: 26581 - DNA, 20 bp, Artificial Sequence
  Synthetic
gagctggagtgcggggcgcc

SEQ ID NO: 26582 - DNA, 20 bp, Artificial Sequence
  Synthetic
agtgcggggcgcccggcgcc

SEQ ID NO: 26583 - DNA, 20 bp, Artificial Sequence
  Synthetic
gtgcggggcgcccggcgcca

SEQ ID NO: 26584 - DNA, 20 bp, Artificial Sequence
  Synthetic
tgcggggcgcccggcgccag

SEQ ID NO: 26585 - DNA, 20 bp, Artificial Sequence
  Synthetic
gtggcggctcccctggcgcc

SEQ ID NO: 26586 - DNA, 20 bp, Artificial Sequence
  Synthetic
tgtggcggctcccctggcgc

SEQ ID NO: 26587 - DNA, 20 bp, Artificial Sequence
  Synthetic
ggcgccaggggagccgccac

SEQ ID NO: 26588 - DNA, 20 bp, Artificial Sequence
  Synthetic
ccgacctgtggcggctcccc

SEQ ID NO: 26589 - DNA, 20 bp, Artificial Sequence
  Synthetic
ccaggggagccgccacaggt

SEQ ID NO: 26590 - DNA, 20 bp, Artificial Sequence
  Synthetic
gggcccgaaccgacctgtgg

SEQ ID NO: 26591 - DNA, 20 bp, Artificial Sequence
  Synthetic
cgcgggcccgaaccgacctg

SEQ ID NO: 26592 - DNA, 20 bp, Artificial Sequence
  Synthetic
tggtctatctttgcaatcca

SEQ ID NO: 26593 - DNA, 20 bp, Artificial Sequence
  Synthetic
aacttcttaactggaaaagc

SEQ ID NO: 26594 - DNA, 20 bp, Artificial Sequence
  Synthetic
ccttgtattaacttcttaac

SEQ ID NO: 26595 - DNA, 20 bp, Artificial Sequence
  Synthetic
ccagttaagaagttaataca

SEQ ID NO: 26596 - DNA, 20 bp, Artificial Sequence
  Synthetic
caggcgcttaaacggcagac

SEQ ID NO: 26597 - DNA, 20 bp, Artificial Sequence
  Synthetic
tcaggcgcttaaacggcaga

SEQ ID NO: 26598 - DNA, 20 bp, Artificial Sequence
  Synthetic
acaagattcaggcgcttaaa

SEQ ID NO: 26599 - DNA, 20 bp, Artificial Sequence
  Synthetic
gcgcctgaatcttgtcccaa

SEQ ID NO: 26600 - DNA, 20 bp, Artificial Sequence
  Synthetic
cgcctgaatcttgtcccaaa

SEQ ID NO: 26601 - DNA, 20 bp, Artificial Sequence
  Synthetic
gcctgaatcttgtcccaaag

SEQ ID NO: 26602 - DNA, 20 bp, Artificial Sequence
  Synthetic
tcccctttgggacaagattc

SEQ ID NO: 26603 - DNA, 20 bp, Artificial Sequence
  Synthetic
tgtcatcggctttccccttt

SEQ ID NO: 26604 - DNA, 20 bp, Artificial Sequence
  Synthetic
atgtcatcggctttcccctt

SEQ ID NO: 26605 - DNA, 20 bp, Artificial Sequence
  Synthetic
ctgatcgtctgacatgtcat

SEQ ID NO: 26606 - DNA, 20 bp, Artificial Sequence
  Synthetic
cgatgacatgtcagacgatc

SEQ ID NO: 26607 - DNA, 20 bp, Artificial Sequence
  Synthetic
gatgacatgtcagacgatca

SEQ ID NO: 26608 - DNA, 20 bp, Artificial Sequence
  Synthetic
aagtaaaagccccgatttag

SEQ ID NO: 26609 - DNA, 20 bp, Artificial Sequence
  Synthetic
ccaaagaggcctctaaatcg

SEQ ID NO: 26610 - DNA, 20 bp, Artificial Sequence
  Synthetic
ccccgatttagaggcctctt

SEQ ID NO: 26611 - DNA, 20 bp, Artificial Sequence
  Synthetic
tccaaagaggcctctaaatc

SEQ ID NO: 26612 - DNA, 20 bp, Artificial Sequence
  Synthetic
gtccaaagaggcctctaaat

SEQ ID NO: 26613 - DNA, 20 bp, Artificial Sequence
  Synthetic
agaggcctctttggacacct

SEQ ID NO: 26614 - DNA, 20 bp, Artificial Sequence
  Synthetic
gttttccaaggtgtccaaag

SEQ ID NO: 26615 - DNA, 20 bp, Artificial Sequence
  Synthetic
cacatgacagttgttttcca

SEQ ID NO: 26616 - DNA, 20 bp, Artificial Sequence
  Synthetic
cttggaaaacaactgtcatg

SEQ ID NO: 26617 - DNA, 20 bp, Artificial Sequence
  Synthetic
ttggaaaacaactgtcatgt

SEQ ID NO: 26618 - DNA, 20 bp, Artificial Sequence
  Synthetic
tttagaccgaaacttgtcaa

SEQ ID NO: 26619 - DNA, 20 bp, Artificial Sequence
  Synthetic
ttagaccgaaacttgtcaac

SEQ ID NO: 26620 - DNA, 20 bp, Artificial Sequence
  Synthetic
accgaaacttgtcaacggga

SEQ ID NO: 26621 - DNA, 20 bp, Artificial Sequence
  Synthetic
cccttcccgttgacaagttt

SEQ ID NO: 26622 - DNA, 20 bp, Artificial Sequence
  Synthetic
ccgaaacttgtcaacgggaa

SEQ ID NO: 26623 - DNA, 20 bp, Artificial Sequence
  Synthetic
tttcttaaaaagttatctaa

SEQ ID NO: 26624 - DNA, 20 bp, Artificial Sequence
  Synthetic
atttcttaaaaagttatcta

SEQ ID NO: 26625 - DNA, 20 bp, Artificial Sequence
  Synthetic
aatagaatcgaaaccagtat

SEQ ID NO: 26626 - DNA, 20 bp, Artificial Sequence
  Synthetic
gactgtgctctggccaatac

SEQ ID NO: 26627 - DNA, 20 bp, Artificial Sequence
  Synthetic
aatcaatgatgactgtgctc

SEQ ID NO: 26628 - DNA, 20 bp, Artificial Sequence
  Synthetic
agtcatcattgatttgacag

SEQ ID NO: 26629 - DNA, 20 bp, Artificial Sequence
  Synthetic
tgagcagccagacagtcttg

SEQ ID NO: 26630 - DNA, 20 bp, Artificial Sequence
  Synthetic
ttgtggtccacaagactgtc

SEQ ID NO: 26631 - DNA, 20 bp, Artificial Sequence
  Synthetic
cttcagaatttagtttattg

SEQ ID NO: 26632 - DNA, 20 bp, Artificial Sequence
  Synthetic
attctgaagcctctccctcc

SEQ ID NO: 26633 - DNA, 20 bp, Artificial Sequence
  Synthetic
ttctgaagcctctccctcca

SEQ ID NO: 26634 - DNA, 20 bp, Artificial Sequence
  Synthetic
tgaagcctctccctccaggg

SEQ ID NO: 26635 - DNA, 20 bp, Artificial Sequence
  Synthetic
tattgcctccctggagggag

SEQ ID NO: 26636 - DNA, 20 bp, Artificial Sequence
  Synthetic
ccatttattgcctccctgga

SEQ ID NO: 26637 - DNA, 20 bp, Artificial Sequence
  Synthetic
ccctccagggaggcaataaa

SEQ ID NO: 26638 - DNA, 20 bp, Artificial Sequence
  Synthetic
gccatttattgcctccctgg

SEQ ID NO: 26639 - DNA, 20 bp, Artificial Sequence
  Synthetic
ctggccatttattgcctccc

SEQ ID NO: 26640 - DNA, 20 bp, Artificial Sequence
  Synthetic
aatggccagcgagaagacac

SEQ ID NO: 26641 - DNA, 20 bp, Artificial Sequence
  Synthetic
atggccagcgagaagacact

SEQ ID NO: 26642 - DNA, 20 bp, Artificial Sequence
  Synthetic
tggccagcgagaagacactg

SEQ ID NO: 26643 - DNA, 20 bp, Artificial Sequence
  Synthetic
gatccccagtgtcttctcgc

SEQ ID NO: 26644 - DNA, 20 bp, Artificial Sequence
  Synthetic
agaagacactggggatcagc

SEQ ID NO: 26645 - DNA, 20 bp, Artificial Sequence
  Synthetic
gaagacactggggatcagca

SEQ ID NO: 26646 - DNA, 20 bp, Artificial Sequence
  Synthetic
aagacactggggatcagcag

SEQ ID NO: 26647 - DNA, 20 bp, Artificial Sequence
  Synthetic
ggatcagcaggggttgttga

SEQ ID NO: 26648 - DNA, 20 bp, Artificial Sequence
  Synthetic
ggccattcagaacgacaagt

SEQ ID NO: 26649 - DNA, 20 bp, Artificial Sequence
  Synthetic
tgccaacttgtcgttctgaa

SEQ ID NO: 26650 - DNA, 20 bp, Artificial Sequence
  Synthetic
aacgacaagttggcatttcc

SEQ ID NO: 26651 - DNA, 20 bp, Artificial Sequence
  Synthetic
atgtctgaaagggtctctcc

SEQ ID NO: 26652 - DNA, 20 bp, Artificial Sequence
  Synthetic
tttgcaaggaatgtctgaaa

SEQ ID NO: 26653 - DNA, 20 bp, Artificial Sequence
  Synthetic
ttttgcaaggaatgtctgaa

SEQ ID NO: 26654 - DNA, 20 bp, Artificial Sequence
  Synthetic
agacattccttgcaaaacag

SEQ ID NO: 26655 - DNA, 20 bp, Artificial Sequence
  Synthetic
cattccttgcaaaacagagg

SEQ ID NO: 26656 - DNA, 20 bp, Artificial Sequence
  Synthetic
tccttgcaaaacagaggagg

SEQ ID NO: 26657 - DNA, 20 bp, Artificial Sequence
  Synthetic
ccctcctcctctgttttgca

SEQ ID NO: 26658 - DNA, 20 bp, Artificial Sequence
  Synthetic
ccttgcaaaacagaggagga

SEQ ID NO: 26659 - DNA, 20 bp, Artificial Sequence
  Synthetic
aaaacagaggaggagggtgt

SEQ ID NO: 26660 - DNA, 20 bp, Artificial Sequence
  Synthetic
gaggaggagggtgttggctg

SEQ ID NO: 26661 - DNA, 20 bp, Artificial Sequence
  Synthetic
gaggagggtgttggctgtgg

SEQ ID NO: 26662 - DNA, 20 bp, Artificial Sequence
  Synthetic
ggtgttggctgtggaggtgc

SEQ ID NO: 26663 - DNA, 20 bp, Artificial Sequence
  Synthetic
gtgttggctgtggaggtgca

SEQ ID NO: 26664 - DNA, 20 bp, Artificial Sequence
  Synthetic
ttggctgtggaggtgcaggg

SEQ ID NO: 26665 - DNA, 20 bp, Artificial Sequence
  Synthetic
tgtggaggtgcagggaggag

SEQ ID NO: 26666 - DNA, 20 bp, Artificial Sequence
  Synthetic
agggaggagaggcgactccc

SEQ ID NO: 26667 - DNA, 20 bp, Artificial Sequence
  Synthetic
actcccaggaatgttcgcca

SEQ ID NO: 26668 - DNA, 20 bp, Artificial Sequence
  Synthetic
gctccgtggcgaacattcct

SEQ ID NO: 26669 - DNA, 20 bp, Artificial Sequence
  Synthetic
agctccgtggcgaacattcc

SEQ ID NO: 26670 - DNA, 20 bp, Artificial Sequence
  Synthetic
atgttcgccacggagctgcc

SEQ ID NO: 26671 - DNA, 20 bp, Artificial Sequence
  Synthetic
gtcagctccgggcagctccg

SEQ ID NO: 26672 - DNA, 20 bp, Artificial Sequence
  Synthetic
agctgcccggagctgacgag

SEQ ID NO: 26673 - DNA, 20 bp, Artificial Sequence
  Synthetic
tcgggccactcgtcagctcc

SEQ ID NO: 26674 - DNA, 20 bp, Artificial Sequence
  Synthetic
ctcgggccactcgtcagctc

SEQ ID NO: 26675 - DNA, 20 bp, Artificial Sequence
  Synthetic
cctttctggggcacattctc

SEQ ID NO: 26676 - DNA, 20 bp, Artificial Sequence
  Synthetic
cccgagaatgtgccccagaa

SEQ ID NO: 26677 - DNA, 20 bp, Artificial Sequence
  Synthetic
tcctttctggggcacattct

SEQ ID NO: 26678 - DNA, 20 bp, Artificial Sequence
  Synthetic
aatgtgccccagaaaggagc

SEQ ID NO: 26679 - DNA, 20 bp, Artificial Sequence
  Synthetic
aactgtcctgctcctttctg

SEQ ID NO: 26680 - DNA, 20 bp, Artificial Sequence
  Synthetic
caactgtcctgctcctttct

SEQ ID NO: 26681 - DNA, 20 bp, Artificial Sequence
  Synthetic
ccaactgtcctgctcctttc

SEQ ID NO: 26682 - DNA, 20 bp, Artificial Sequence
  Synthetic
ccagaaaggagcaggacagt

SEQ ID NO: 26683 - DNA, 20 bp, Artificial Sequence
  Synthetic
caggacagttggagtgaagc

SEQ ID NO: 26684 - DNA, 20 bp, Artificial Sequence
  Synthetic
aggacagttggagtgaagct

SEQ ID NO: 26685 - DNA, 20 bp, Artificial Sequence
  Synthetic
ggacagttggagtgaagctg

SEQ ID NO: 26686 - DNA, 20 bp, Artificial Sequence
  Synthetic
gacagttggagtgaagctgg

SEQ ID NO: 26687 - DNA, 20 bp, Artificial Sequence
  Synthetic
gctgaacaaggagaactgga

SEQ ID NO: 26688 - DNA, 20 bp, Artificial Sequence
  Synthetic
ggacggttgtgaagactctg

SEQ ID NO: 26689 - DNA, 20 bp, Artificial Sequence
  Synthetic
tatcatacacatcttctaag

SEQ ID NO: 26690 - DNA, 20 bp, Artificial Sequence
  Synthetic
aagatgtgtatgatatttgc

SEQ ID NO: 26691 - DNA, 20 bp, Artificial Sequence
  Synthetic
agatgtgtatgatatttgct

SEQ ID NO: 26692 - DNA, 20 bp, Artificial Sequence
  Synthetic
gatatttgctgggcaactga

SEQ ID NO: 26693 - DNA, 20 bp, Artificial Sequence
  Synthetic
atatttgctgggcaactgat

SEQ ID NO: 26694 - DNA, 20 bp, Artificial Sequence
  Synthetic
ggcaactgatgggaatttaa

SEQ ID NO: 26695 - DNA, 20 bp, Artificial Sequence
  Synthetic
tttaatggcttctgcctctg

SEQ ID NO: 26696 - DNA, 20 bp, Artificial Sequence
  Synthetic
gatggctgtgttatccacag

SEQ ID NO: 26697 - DNA, 20 bp, Artificial Sequence
  Synthetic
tggataacacagccatcata

SEQ ID NO: 26698 - DNA, 20 bp, Artificial Sequence
  Synthetic
ggataacacagccatcatat

SEQ ID NO: 26699 - DNA, 20 bp, Artificial Sequence
  Synthetic
tttgctgacatcccatatga

SEQ ID NO: 26700 - DNA, 20 bp, Artificial Sequence
  Synthetic
gaacataaaagttatgtcca

SEQ ID NO: 26701 - DNA, 20 bp, Artificial Sequence
  Synthetic
gttatgtccaaggagtaacc

SEQ ID NO: 26702 - DNA, 20 bp, Artificial Sequence
  Synthetic
ttatgtccaaggagtaacct

SEQ ID NO: 26703 - DNA, 20 bp, Artificial Sequence
  Synthetic
aagggtcccaggttactcct

SEQ ID NO: 26704 - DNA, 20 bp, Artificial Sequence
  Synthetic
aggagtaacctgggaccctt

SEQ ID NO: 26705 - DNA, 20 bp, Artificial Sequence
  Synthetic
ggagtaacctgggacccttt

SEQ ID NO: 26706 - DNA, 20 bp, Artificial Sequence
  Synthetic
atattgacccaaagggtccc

SEQ ID NO: 26707 - DNA, 20 bp, Artificial Sequence
  Synthetic
tagcaacatattgacccaaa

SEQ ID NO: 26708 - DNA, 20 bp, Artificial Sequence
  Synthetic
gtagcaacatattgacccaa

SEQ ID NO: 26709 - DNA, 20 bp, Artificial Sequence
  Synthetic
ttgctactctgagctgtgac

SEQ ID NO: 26710 - DNA, 20 bp, Artificial Sequence
  Synthetic
tttggtatgacgagcaagat

SEQ ID NO: 26711 - DNA, 20 bp, Artificial Sequence
  Synthetic
acgcacaacattgacggctt

SEQ ID NO: 26712 - DNA, 20 bp, Artificial Sequence
  Synthetic
agaaaaacgcacaacattga

SEQ ID NO: 26713 - DNA, 20 bp, Artificial Sequence
  Synthetic
gttgtgcgtttttctccaac

SEQ ID NO: 26714 - DNA, 20 bp, Artificial Sequence
  Synthetic
ttgtgcgtttttctccaact

SEQ ID NO: 26715 - DNA, 20 bp, Artificial Sequence
  Synthetic
tgtgcgtttttctccaactg

SEQ ID NO: 26716 - DNA, 20 bp, Artificial Sequence
  Synthetic
gatgctaaaatttccccagt

SEQ ID NO: 26717 - DNA, 20 bp, Artificial Sequence
  Synthetic
aactggggaaattttagcat

SEQ ID NO: 26718 - DNA, 20 bp, Artificial Sequence
  Synthetic
actggggaaattttagcatc

SEQ ID NO: 26719 - DNA, 20 bp, Artificial Sequence
  Synthetic
ggggaaattttagcatcggg

SEQ ID NO: 26720 - DNA, 20 bp, Artificial Sequence
  Synthetic
attttagcatcgggaggaga

SEQ ID NO: 26721 - DNA, 20 bp, Artificial Sequence
  Synthetic
cagatgctgtcatcctattg

SEQ ID NO: 26722 - DNA, 20 bp, Artificial Sequence
  Synthetic
tgctgtcatcctattgtgga

SEQ ID NO: 26723 - DNA, 20 bp, Artificial Sequence
  Synthetic
tatcattcaccttccacaat

SEQ ID NO: 26724 - DNA, 20 bp, Artificial Sequence
  Synthetic
atgaaatgtcactgagggtg

SEQ ID NO: 26725 - DNA, 20 bp, Artificial Sequence
  Synthetic
acaccctcagtgacatttca

SEQ ID NO: 26726 - DNA, 20 bp, Artificial Sequence
  Synthetic
tcaccatgaaatgtcactga

SEQ ID NO: 26727 - DNA, 20 bp, Artificial Sequence
  Synthetic
ctcaccatgaaatgtcactg

SEQ ID NO: 26728 - DNA, 20 bp, Artificial Sequence
  Synthetic
tggggacgaaggtccagcga

SEQ ID NO: 26729 - DNA, 20 bp, Artificial Sequence
  Synthetic
gtccagcgatggtgccttcc

SEQ ID NO: 26730 - DNA, 20 bp, Artificial Sequence
  Synthetic
ggccaggaaggcaccatcgc

SEQ ID NO: 26731 - DNA, 20 bp, Artificial Sequence
  Synthetic
cgtggaagaaatggccagga

SEQ ID NO: 26732 - DNA, 20 bp, Artificial Sequence
  Synthetic
cttcctggccatttcttcca

SEQ ID NO: 26733 - DNA, 20 bp, Artificial Sequence
  Synthetic
cgtccgtggaagaaatggcc

SEQ ID NO: 26734 - DNA, 20 bp, Artificial Sequence
  Synthetic
ctggccatttcttccacgga

SEQ ID NO: 26735 - DNA, 20 bp, Artificial Sequence
  Synthetic
gtaaccgtccgtggaagaaa

SEQ ID NO: 26736 - DNA, 20 bp, Artificial Sequence
  Synthetic
aaatgagcagtaaccgtccg

SEQ ID NO: 26737 - DNA, 20 bp, Artificial Sequence
  Synthetic
caaggagcccgtgtacagcc

SEQ ID NO: 26738 - DNA, 20 bp, Artificial Sequence
  Synthetic
tggaagtccaggctgtacac

SEQ ID NO: 26739 - DNA, 20 bp, Artificial Sequence
  Synthetic
ctggaagtccaggctgtaca

SEQ ID NO: 26740 - DNA, 20 bp, Artificial Sequence
  Synthetic
tacagcctggacttccagca

SEQ ID NO: 26741 - DNA, 20 bp, Artificial Sequence
  Synthetic
acagcctggacttccagcat

SEQ ID NO: 26742 - DNA, 20 bp, Artificial Sequence
  Synthetic
ccgtcccatgctggaagtcc

SEQ ID NO: 26743 - DNA, 20 bp, Artificial Sequence
  Synthetic
cctggacttccagcatggga

SEQ ID NO: 26744 - DNA, 20 bp, Artificial Sequence
  Synthetic
gacttccagcatgggacggc

SEQ ID NO: 26745 - DNA, 20 bp, Artificial Sequence
  Synthetic
acttccagcatgggacggct

SEQ ID NO: 26746 - DNA, 20 bp, Artificial Sequence
  Synthetic
tccagcatgggacggctggg

SEQ ID NO: 26747 - DNA, 20 bp, Artificial Sequence
  Synthetic
tcctcccagccgtcccatgc

SEQ ID NO: 26748 - DNA, 20 bp, Artificial Sequence
  Synthetic
ggctgggaggatccacagac

SEQ ID NO: 26749 - DNA, 20 bp, Artificial Sequence
  Synthetic
atccacagactggcgtctgc

SEQ ID NO: 26750 - DNA, 20 bp, Artificial Sequence
  Synthetic
cgccggcagacgccagtctg

SEQ ID NO: 26751 - DNA, 20 bp, Artificial Sequence
  Synthetic
cagactggcgtctgccggcg

SEQ ID NO: 26752 - DNA, 20 bp, Artificial Sequence
  Synthetic
cctgacattggtgtccacgc

SEQ ID NO: 26753 - DNA, 20 bp, Artificial Sequence
  Synthetic
ccggcgtggacaccaatgtc

SEQ ID NO: 26754 - DNA, 20 bp, Artificial Sequence
  Synthetic
cggcgtggacaccaatgtca

SEQ ID NO: 26755 - DNA, 20 bp, Artificial Sequence
  Synthetic
gccccagtttaccctgacat

SEQ ID NO: 26756 - DNA, 20 bp, Artificial Sequence
  Synthetic
ttggtattgacagatctgga

SEQ ID NO: 26757 - DNA, 20 bp, Artificial Sequence
  Synthetic
ttaagagattatcaactgaa

SEQ ID NO: 26758 - DNA, 20 bp, Artificial Sequence
  Synthetic
atcaactgaatggtttaaat

SEQ ID NO: 26759 - DNA, 20 bp, Artificial Sequence
  Synthetic
taaattggcttgctcattct

SEQ ID NO: 26760 - DNA, 20 bp, Artificial Sequence
  Synthetic
ttgcatactcgctgatgaaa

SEQ ID NO: 26761 - DNA, 20 bp, Artificial Sequence
  Synthetic
tgcatactcgctgatgaaat

SEQ ID NO: 26762 - DNA, 20 bp, Artificial Sequence
  Synthetic
ctcgctgatgaaatgggcct

SEQ ID NO: 26763 - DNA, 20 bp, Artificial Sequence
  Synthetic
tcgtctgtattgtttttcca

SEQ ID NO: 26764 - DNA, 20 bp, Artificial Sequence
  Synthetic
tttcatgaacatcaattata

SEQ ID NO: 26765 - DNA, 20 bp, Artificial Sequence
  Synthetic
attatatggaccttttttat

SEQ ID NO: 26766 - DNA, 20 bp, Artificial Sequence
  Synthetic
agcggtactaccaataaaaa

SEQ ID NO: 26767 - DNA, 20 bp, Artificial Sequence
  Synthetic
caggaagtaagagtggagag

SEQ ID NO: 26768 - DNA, 20 bp, Artificial Sequence
  Synthetic
cgctctccactcttacttcc

SEQ ID NO: 26769 - DNA, 20 bp, Artificial Sequence
  Synthetic
cctttgccaggaagtaagag

SEQ ID NO: 26770 - DNA, 20 bp, Artificial Sequence
  Synthetic
ccactcttacttcctggcaa

SEQ ID NO: 26771 - DNA, 20 bp, Artificial Sequence
  Synthetic
cactcttacttcctggcaaa

SEQ ID NO: 26772 - DNA, 20 bp, Artificial Sequence
  Synthetic
agtctgaatttccctttgcc

SEQ ID NO: 26773 - DNA, 20 bp, Artificial Sequence
  Synthetic
ggcaaagggaaattcagact

SEQ ID NO: 26774 - DNA, 20 bp, Artificial Sequence
  Synthetic
gcaaagggaaattcagactt

SEQ ID NO: 26775 - DNA, 20 bp, Artificial Sequence
  Synthetic
ggcttctcaaatgaatgctg

SEQ ID NO: 26776 - DNA, 20 bp, Artificial Sequence
  Synthetic
atgaatgctgtggtttattt

SEQ ID NO: 26777 - DNA, 20 bp, Artificial Sequence
  Synthetic
tgacattaacagcagaaaca

SEQ ID NO: 26778 - DNA, 20 bp, Artificial Sequence
  Synthetic
aatagataagaactcatgaa

SEQ ID NO: 26779 - DNA, 20 bp, Artificial Sequence
  Synthetic
ggacgcatcatcagaccaaa

SEQ ID NO: 26780 - DNA, 20 bp, Artificial Sequence
  Synthetic
tatattaaattttaaccgtt

SEQ ID NO: 26781 - DNA, 20 bp, Artificial Sequence
  Synthetic
tgaaattttattaaaagata

SEQ ID NO: 26782 - DNA, 20 bp, Artificial Sequence
  Synthetic
tattattttaaggcattcct

SEQ ID NO: 26783 - DNA, 20 bp, Artificial Sequence
  Synthetic
tattttaaggcattccttgg

SEQ ID NO: 26784 - DNA, 20 bp, Artificial Sequence
  Synthetic
cattccttggaggtctaaat

SEQ ID NO: 26785 - DNA, 20 bp, Artificial Sequence
  Synthetic
attccttggaggtctaaatt

SEQ ID NO: 26786 - DNA, 20 bp, Artificial Sequence
  Synthetic
atgcccaatttagacctcca

SEQ ID NO: 26787 - DNA, 20 bp, Artificial Sequence
  Synthetic
ggtctaaattgggcatttat

SEQ ID NO: 26788 - DNA, 20 bp, Artificial Sequence
  Synthetic
gggagtcatcattctttaat

SEQ ID NO: 26789 - DNA, 20 bp, Artificial Sequence
  Synthetic
tattaaagttttatacagaa

SEQ ID NO: 26790 - DNA, 20 bp, Artificial Sequence
  Synthetic
ctattaaagttttatacaga

SEQ ID NO: 26791 - DNA, 20 bp, Artificial Sequence
  Synthetic
agtgataaggagacgatgat

SEQ ID NO: 26792 - DNA, 20 bp, Artificial Sequence
  Synthetic
aatcatcgtctccttatcac

SEQ ID NO: 26793 - DNA, 20 bp, Artificial Sequence
  Synthetic
gtagaggagttccagtgata

SEQ ID NO: 26794 - DNA, 20 bp, Artificial Sequence
  Synthetic
tctttgagggaattctgtag

SEQ ID NO: 26795 - DNA, 20 bp, Artificial Sequence
  Synthetic
agaattccctcaaagagctc

SEQ ID NO: 26796 - DNA, 20 bp, Artificial Sequence
  Synthetic
caaagaccagagctctttga

SEQ ID NO: 26797 - DNA, 20 bp, Artificial Sequence
  Synthetic
gcaaagaccagagctctttg

SEQ ID NO: 26798 - DNA, 20 bp, Artificial Sequence
  Synthetic
gtaaagttgtcttacttttc

SEQ ID NO: 26799 - DNA, 20 bp, Artificial Sequence
  Synthetic
aattttaaaggttttcttcc

SEQ ID NO: 26800 - DNA, 20 bp, Artificial Sequence
  Synthetic
attttaaaggttttcttcct

SEQ ID NO: 26801 - DNA, 20 bp, Artificial Sequence
  Synthetic
ttcttcttcaaaatcttccc

SEQ ID NO: 26802 - DNA, 20 bp, Artificial Sequence
  Synthetic
gaagattttgaagaagaaca

SEQ ID NO: 26803 - DNA, 20 bp, Artificial Sequence
  Synthetic
tttgaagaagaacatggcaa

SEQ ID NO: 26804 - DNA, 20 bp, Artificial Sequence
  Synthetic
ttgaagaagaacatggcaaa

SEQ ID NO: 26805 - DNA, 20 bp, Artificial Sequence
  Synthetic
catggcaaagggagagaata

SEQ ID NO: 26806 - DNA, 20 bp, Artificial Sequence
  Synthetic
tggttatgcaagccttcaca

SEQ ID NO: 26807 - DNA, 20 bp, Artificial Sequence
  Synthetic
atggctcaagctccttgtga

SEQ ID NO: 26808 - DNA, 20 bp, Artificial Sequence
  Synthetic
ttaactcggcgtaacagaaa

SEQ ID NO: 26809 - DNA, 20 bp, Artificial Sequence
  Synthetic
acgccgagttaagaaagatg

SEQ ID NO: 26810 - DNA, 20 bp, Artificial Sequence
  Synthetic
tttccacatctttcttaact

SEQ ID NO: 26811 - DNA, 20 bp, Artificial Sequence
  Synthetic
ggaaaaatctcttcctgcca

SEQ ID NO: 26812 - DNA, 20 bp, Artificial Sequence
  Synthetic
aaaatctgctcaaccttggc

SEQ ID NO: 26813 - DNA, 20 bp, Artificial Sequence
  Synthetic
tcttaaaatctgctcaacct

SEQ ID NO: 26814 - DNA, 20 bp, Artificial Sequence
  Synthetic
ggttgagcagattttaagaa

SEQ ID NO: 26815 - DNA, 20 bp, Artificial Sequence
  Synthetic
ttttaagatggattttaact

SEQ ID NO: 26816 - DNA, 20 bp, Artificial Sequence
  Synthetic
aattacaaagccctcagcaa

SEQ ID NO: 26817 - DNA, 20 bp, Artificial Sequence
  Synthetic
agccctcagcaaaggttcca

SEQ ID NO: 26818 - DNA, 20 bp, Artificial Sequence
  Synthetic
gccctcagcaaaggttccaa

SEQ ID NO: 26819 - DNA, 20 bp, Artificial Sequence
  Synthetic
gcccttggaacctttgctga

SEQ ID NO: 26820 - DNA, 20 bp, Artificial Sequence
  Synthetic
tgcccttggaacctttgctg

SEQ ID NO: 26821 - DNA, 20 bp, Artificial Sequence
  Synthetic
ggttccaagggcagtacctc

SEQ ID NO: 26822 - DNA, 20 bp, Artificial Sequence
  Synthetic
aaagcctgaggtactgccct

SEQ ID NO: 26823 - DNA, 20 bp, Artificial Sequence
  Synthetic
cataatgttcaaaaagcctg

SEQ ID NO: 26824 - DNA, 20 bp, Artificial Sequence
  Synthetic
aggctttttgaacattatga

SEQ ID NO: 26825 - DNA, 20 bp, Artificial Sequence
  Synthetic
gtggtttaatgaggtagcaa

SEQ ID NO: 26826 - DNA, 20 bp, Artificial Sequence
  Synthetic
acataaacagtatcaaatag

SEQ ID NO: 26827 - DNA, 20 bp, Artificial Sequence
  Synthetic
caaatagtggaacgtataat

SEQ ID NO: 26828 - DNA, 20 bp, Artificial Sequence
  Synthetic
tccaatcaaaagtcagcagc

SEQ ID NO: 26829 - DNA, 20 bp, Artificial Sequence
  Synthetic
accagctgctgacttttgat

SEQ ID NO: 26830 - DNA, 20 bp, Artificial Sequence
  Synthetic
atcctgattattactgcaaa

SEQ ID NO: 26831 - DNA, 20 bp, Artificial Sequence
  Synthetic
tgccatttgcagtaataatc

SEQ ID NO: 26832 - DNA, 20 bp, Artificial Sequence
  Synthetic
tgattattactgcaaatggc

SEQ ID NO: 26833 - DNA, 20 bp, Artificial Sequence
  Synthetic
gattattactgcaaatggca

SEQ ID NO: 26834 - DNA, 20 bp, Artificial Sequence
  Synthetic
agctgcactctgagtatgga

SEQ ID NO: 26835 - DNA, 20 bp, Artificial Sequence
  Synthetic
ttccatactcagagtgcagc

SEQ ID NO: 26836 - DNA, 20 bp, Artificial Sequence
  Synthetic
tccatactcagagtgcagct

SEQ ID NO: 26837 - DNA, 20 bp, Artificial Sequence
  Synthetic
tcccagctgcactctgagta

SEQ ID NO: 26838 - DNA, 20 bp, Artificial Sequence
  Synthetic
tcagagtgcagctgggaaga

SEQ ID NO: 26839 - DNA, 20 bp, Artificial Sequence
  Synthetic
aatgcatgcttgaaactttt

SEQ ID NO: 26840 - DNA, 20 bp, Artificial Sequence
  Synthetic
gcattgatgagtattttagc

SEQ ID NO: 26841 - DNA, 20 bp, Artificial Sequence
  Synthetic
tttgaaaaaaacaaagaacc

SEQ ID NO: 26842 - DNA, 20 bp, Artificial Sequence
  Synthetic
attaaatactgaatctctcc

SEQ ID NO: 26843 - DNA, 20 bp, Artificial Sequence
  Synthetic
agattcagtatttaattaaa

SEQ ID NO: 26844 - DNA, 20 bp, Artificial Sequence
  Synthetic
cagtatttaattaaatggaa

SEQ ID NO: 26845 - DNA, 20 bp, Artificial Sequence
  Synthetic
atttaattaaatggaaagga

SEQ ID NO: 26846 - DNA, 20 bp, Artificial Sequence
  Synthetic
ggtcccatatccacaacact

SEQ ID NO: 26847 - DNA, 20 bp, Artificial Sequence
  Synthetic
gtcccatatccacaacactt

SEQ ID NO: 26848 - DNA, 20 bp, Artificial Sequence
  Synthetic
ctcccaagtgttgtggatat

SEQ ID NO: 26849 - DNA, 20 bp, Artificial Sequence
  Synthetic
tctcccaagtgttgtggata

SEQ ID NO: 26850 - DNA, 20 bp, Artificial Sequence
  Synthetic
cttctgtctcccaagtgttg

SEQ ID NO: 26851 - DNA, 20 bp, Artificial Sequence
  Synthetic
tctaacattctgctgcttga

SEQ ID NO: 26852 - DNA, 20 bp, Artificial Sequence
  Synthetic
ctctaacattctgctgcttg

SEQ ID NO: 26853 - DNA, 20 bp, Artificial Sequence
  Synthetic
ctcaagcagcagaatgttag

SEQ ID NO: 26854 - DNA, 20 bp, Artificial Sequence
  Synthetic
tgttagaggaatgaaaaaat

SEQ ID NO: 26855 - DNA, 20 bp, Artificial Sequence
  Synthetic
tcacctacgctcttaccagc

SEQ ID NO: 26856 - DNA, 20 bp, Artificial Sequence
  Synthetic
cctacgctcttaccagctgg

SEQ ID NO: 26857 - DNA, 20 bp, Artificial Sequence
  Synthetic
ctacgctcttaccagctgga

SEQ ID NO: 26858 - DNA, 20 bp, Artificial Sequence
  Synthetic
accagctggagggagtaaac

SEQ ID NO: 26859 - DNA, 20 bp, Artificial Sequence
  Synthetic
gccagtttactccctccagc

SEQ ID NO: 26860 - DNA, 20 bp, Artificial Sequence
  Synthetic
attctgacaatggaagcgct

SEQ ID NO: 26861 - DNA, 20 bp, Artificial Sequence
  Synthetic
cattctgacaatggaagcgc

SEQ ID NO: 26862 - DNA, 20 bp, Artificial Sequence
  Synthetic
cagcgcttccattgtcagaa

SEQ ID NO: 26863 - DNA, 20 bp, Artificial Sequence
  Synthetic
ggatacagccattctgacaa

SEQ ID NO: 26864 - DNA, 20 bp, Artificial Sequence
  Synthetic
ttgtcagaatggctgtatcc

SEQ ID NO: 26865 - DNA, 20 bp, Artificial Sequence
  Synthetic
tgtcagaatggctgtatcct

SEQ ID NO: 26866 - DNA, 20 bp, Artificial Sequence
  Synthetic
ctgtatcctgggagatgaga

SEQ ID NO: 26867 - DNA, 20 bp, Artificial Sequence
  Synthetic
tgtatcctgggagatgagat

SEQ ID NO: 26868 - DNA, 20 bp, Artificial Sequence
  Synthetic
ccaggcccatctcatctccc

SEQ ID NO: 26869 - DNA, 20 bp, Artificial Sequence
  Synthetic
cctgggagatgagatgggcc

SEQ ID NO: 26870 - DNA, 20 bp, Artificial Sequence
  Synthetic
ctgggagatgagatgggcct

SEQ ID NO: 26871 - DNA, 20 bp, Artificial Sequence
  Synthetic
tgggagatgagatgggcctg

SEQ ID NO: 26872 - DNA, 20 bp, Artificial Sequence
  Synthetic
gggcctggggaagacctgcc

SEQ ID NO: 26873 - DNA, 20 bp, Artificial Sequence
  Synthetic
acacctggcaggtcttcccc

SEQ ID NO: 26874 - DNA, 20 bp, Artificial Sequence
  Synthetic
cgcatagtaacacacctggc

SEQ ID NO: 26875 - DNA, 20 bp, Artificial Sequence
  Synthetic
aaatgaagagagcaatagtc

SEQ ID NO: 26876 - DNA, 20 bp, Artificial Sequence
  Synthetic
tattgctctcttcatttatt

SEQ ID NO: 26877 - DNA, 20 bp, Artificial Sequence
  Synthetic
gctctcttcatttatttggc

SEQ ID NO: 26878 - DNA, 20 bp, Artificial Sequence
  Synthetic
gcaggaagattaaatgatga

SEQ ID NO: 26879 - DNA, 20 bp, Artificial Sequence
  Synthetic
caggaagattaaatgatgaa

SEQ ID NO: 26880 - DNA, 20 bp, Artificial Sequence
  Synthetic
aagggacaaagaatcagaaa

SEQ ID NO: 26881 - DNA, 20 bp, Artificial Sequence
  Synthetic
cagttgctcaaaacagacaa

SEQ ID NO: 26882 - DNA, 20 bp, Artificial Sequence
  Synthetic
ccagttgctcaaaacagaca

SEQ ID NO: 26883 - DNA, 20 bp, Artificial Sequence
  Synthetic
ccttgtctgttttgagcaac

SEQ ID NO: 26884 - DNA, 20 bp, Artificial Sequence
  Synthetic
actggaaagaagaaatgcag

SEQ ID NO: 26885 - DNA, 20 bp, Artificial Sequence
  Synthetic
cttggattcagatttgctcc

SEQ ID NO: 26886 - DNA, 20 bp, Artificial Sequence
  Synthetic
tatgttacacaggaaagacc

SEQ ID NO: 26887 - DNA, 20 bp, Artificial Sequence
  Synthetic
ctttcctgtgtaacatatgc

SEQ ID NO: 26888 - DNA, 20 bp, Artificial Sequence
  Synthetic
gtcgcctgcatatgttacac

SEQ ID NO: 26889 - DNA, 20 bp, Artificial Sequence
  Synthetic
tgtaacatatgcaggcgaca

SEQ ID NO: 26890 - DNA, 20 bp, Artificial Sequence
  Synthetic
aacatatgcaggcgacaagg

SEQ ID NO: 26891 - DNA, 20 bp, Artificial Sequence
  Synthetic
tttcaggtcttgctgaaggc

SEQ ID NO: 26892 - DNA, 20 bp, Artificial Sequence
  Synthetic
cctgtttcaggtcttgctga

SEQ ID NO: 26893 - DNA, 20 bp, Artificial Sequence
  Synthetic
ccttcagcaagacctgaaac

SEQ ID NO: 26894 - DNA, 20 bp, Artificial Sequence
  Synthetic
gaaaacgtgactcctgtttc

SEQ ID NO: 26895 - DNA, 20 bp, Artificial Sequence
  Synthetic
tgtgctactgactacctatg

SEQ ID NO: 26896 - DNA, 20 bp, Artificial Sequence
  Synthetic
gaaacgaatgaatacctcat

SEQ ID NO: 26897 - DNA, 20 bp, Artificial Sequence
  Synthetic
ttttctctcacagattccct

SEQ ID NO: 26898 - DNA, 20 bp, Artificial Sequence
  Synthetic
ccacaacaagaacactccaa

SEQ ID NO: 26899 - DNA, 20 bp, Artificial Sequence
  Synthetic
cccttggagtgttcttgttg

SEQ ID NO: 26900 - DNA, 20 bp, Artificial Sequence
  Synthetic
tccacaacaagaacactcca

SEQ ID NO: 26901 - DNA, 20 bp, Artificial Sequence
  Synthetic
ttgttgtggatgaagctcac

SEQ ID NO: 26902 - DNA, 20 bp, Artificial Sequence
  Synthetic
tcttatgcagcagggagctt

SEQ ID NO: 26903 - DNA, 20 bp, Artificial Sequence
  Synthetic
tgacaaggtcttatgcagca

SEQ ID NO: 26904 - DNA, 20 bp, Artificial Sequence
  Synthetic
ctgacaaggtcttatgcagc

SEQ ID NO: 26905 - DNA, 20 bp, Artificial Sequence
  Synthetic
gctgcataagaccttgtcag

SEQ ID NO: 26906 - DNA, 20 bp, Artificial Sequence
  Synthetic
ctgtaagtttacctctgaca

SEQ ID NO: 26907 - DNA, 20 bp, Artificial Sequence
  Synthetic
gtcttcagtctcctgttgac

SEQ ID NO: 26908 - DNA, 20 bp, Artificial Sequence
  Synthetic
ggatgggagttccggtcaac

SEQ ID NO: 26909 - DNA, 20 bp, Artificial Sequence
  Synthetic
gctgttctggatgggagttc

SEQ ID NO: 26910 - DNA, 20 bp, Artificial Sequence
  Synthetic
tcttggaggctgttctggat

SEQ ID NO: 26911 - DNA, 20 bp, Artificial Sequence
  Synthetic
ctcttggaggctgttctgga

SEQ ID NO: 26912 - DNA, 20 bp, Artificial Sequence
  Synthetic
agagctcttggaggctgttc

SEQ ID NO: 26913 - DNA, 20 bp, Artificial Sequence
  Synthetic
ggagggagtagagctcttgg

SEQ ID NO: 26914 - DNA, 20 bp, Artificial Sequence
  Synthetic
tgaggagggagtagagctct

SEQ ID NO: 26915 - DNA, 20 bp, Artificial Sequence
  Synthetic
ctactccctcctcagttttg

SEQ ID NO: 26916 - DNA, 20 bp, Artificial Sequence
  Synthetic
aggctccacaaaactgagga

SEQ ID NO: 26917 - DNA, 20 bp, Artificial Sequence
  Synthetic
caggctccacaaaactgagg

SEQ ID NO: 26918 - DNA, 20 bp, Artificial Sequence
  Synthetic
gatcaggctccacaaaactg

SEQ ID NO: 26919 - DNA, 20 bp, Artificial Sequence
  Synthetic
ggagcctgatctcttttcca

SEQ ID NO: 26920 - DNA, 20 bp, Artificial Sequence
  Synthetic
tcttccttggaaaagagatc

SEQ ID NO: 26921 - DNA, 20 bp, Artificial Sequence
  Synthetic
tgatctcttttccaaggaag

SEQ ID NO: 26922 - DNA, 20 bp, Artificial Sequence
  Synthetic
tctcttttccaaggaagagg

SEQ ID NO: 26923 - DNA, 20 bp, Artificial Sequence
  Synthetic
ctcttttccaaggaagaggt

SEQ ID NO: 26924 - DNA, 20 bp, Artificial Sequence
  Synthetic
aaaatctcccacctcttcct

SEQ ID NO: 26925 - DNA, 20 bp, Artificial Sequence
  Synthetic
agattttattcaacgctacc

SEQ ID NO: 26926 - DNA, 20 bp, Artificial Sequence
  Synthetic
cagattctttctcaatatcc

SEQ ID NO: 26927 - DNA, 20 bp, Artificial Sequence
  Synthetic
attgagaaagaatctgagtc

SEQ ID NO: 26928 - DNA, 20 bp, Artificial Sequence
  Synthetic
tcttgcagccatttctgctg

SEQ ID NO: 26929 - DNA, 20 bp, Artificial Sequence
  Synthetic
ttcactcgcctcagcagaaa

SEQ ID NO: 26930 - DNA, 20 bp, Artificial Sequence
  Synthetic
gctgaggcgagtgaaagctg

SEQ ID NO: 26931 - DNA, 20 bp, Artificial Sequence
  Synthetic
atcactacttctgtcttctt

SEQ ID NO: 26932 - DNA, 20 bp, Artificial Sequence
  Synthetic
tatcactacttctgtcttct

SEQ ID NO: 26933 - DNA, 20 bp, Artificial Sequence
  Synthetic
acagaagtagtgatatacca

SEQ ID NO: 26934 - DNA, 20 bp, Artificial Sequence
  Synthetic
tctgcaatgctgacatgcca

SEQ ID NO: 26935 - DNA, 20 bp, Artificial Sequence
  Synthetic
attgcagaagaaatactaca

SEQ ID NO: 26936 - DNA, 20 bp, Artificial Sequence
  Synthetic
gccattttgatgaaagacct

SEQ ID NO: 26937 - DNA, 20 bp, Artificial Sequence
  Synthetic
acctaggtctttcatcaaaa

SEQ ID NO: 26938 - DNA, 20 bp, Artificial Sequence
  Synthetic
agatgcatttgaaaatgaga

SEQ ID NO: 26939 - DNA, 20 bp, Artificial Sequence
  Synthetic
gtcccagcttcgaaagtgtg

SEQ ID NO: 26940 - DNA, 20 bp, Artificial Sequence
  Synthetic
atccacacactttcgaagct

SEQ ID NO: 26941 - DNA, 20 bp, Artificial Sequence
  Synthetic
gatccacacactttcgaagc

SEQ ID NO: 26942 - DNA, 20 bp, Artificial Sequence
  Synthetic
gatcacccatatttgtttga

SEQ ID NO: 26943 - DNA, 20 bp, Artificial Sequence
  Synthetic
tctcaccatcaaacaaatat

SEQ ID NO: 26944 - DNA, 20 bp, Artificial Sequence
  Synthetic
gtctcaccatcaaacaaata

SEQ ID NO: 26945 - DNA, 20 bp, Artificial Sequence
  Synthetic
cttcgagattatcagctaga

SEQ ID NO: 26946 - DNA, 20 bp, Artificial Sequence
  Synthetic
atcagctagaaggtctaaac

SEQ ID NO: 26947 - DNA, 20 bp, Artificial Sequence
  Synthetic
taaactggctagctcattcc

SEQ ID NO: 26948 - DNA, 20 bp, Artificial Sequence
  Synthetic
agctcattcctggtgcaagt

SEQ ID NO: 26949 - DNA, 20 bp, Artificial Sequence
  Synthetic
tttttctacctacttgcacc

SEQ ID NO: 26950 - DNA, 20 bp, Artificial Sequence
  Synthetic
tgtaatccttgctgatgaaa

SEQ ID NO: 26951 - DNA, 20 bp, Artificial Sequence
  Synthetic
gtaatccttgctgatgaaat

SEQ ID NO: 26952 - DNA, 20 bp, Artificial Sequence
  Synthetic
ctaggcccatttcatcagca

SEQ ID NO: 26953 - DNA, 20 bp, Artificial Sequence
  Synthetic
cttgctgatgaaatgggcct

SEQ ID NO: 26954 - DNA, 20 bp, Artificial Sequence
  Synthetic
tggtctggatggtctttcct

SEQ ID NO: 26955 - DNA, 20 bp, Artificial Sequence
  Synthetic
gaggaatgatatggtctgga

SEQ ID NO: 26956 - DNA, 20 bp, Artificial Sequence
  Synthetic
aggagaggaatgatatggtc

SEQ ID NO: 26957 - DNA, 20 bp, Artificial Sequence
  Synthetic
caggtaggagaggaatgata

SEQ ID NO: 26958 - DNA, 20 bp, Artificial Sequence
  Synthetic
gttggtggaacaggtaggag

SEQ ID NO: 26959 - DNA, 20 bp, Artificial Sequence
  Synthetic
ctggtgttggtggaacaggt

SEQ ID NO: 26960 - DNA, 20 bp, Artificial Sequence
  Synthetic
acagctggtgttggtggaac

SEQ ID NO: 26961 - DNA, 20 bp, Artificial Sequence
  Synthetic
ttccaccaacaccagctgta

SEQ ID NO: 26962 - DNA, 20 bp, Artificial Sequence
  Synthetic
ggccatacagctggtgttgg

SEQ ID NO: 26963 - DNA, 20 bp, Artificial Sequence
  Synthetic
aggggccatacagctggtgt

SEQ ID NO: 26964 - DNA, 20 bp, Artificial Sequence
  Synthetic
taagaaaggggccatacagc

SEQ ID NO: 26965 - DNA, 20 bp, Artificial Sequence
  Synthetic
aagggacgactataagaaag

SEQ ID NO: 26966 - DNA, 20 bp, Artificial Sequence
  Synthetic
aaagggacgactataagaaa

SEQ ID NO: 26967 - DNA, 20 bp, Artificial Sequence
  Synthetic
taaagggacgactataagaa

SEQ ID NO: 26968 - DNA, 20 bp, Artificial Sequence
  Synthetic
atgaggtgagggtggataaa

SEQ ID NO: 26969 - DNA, 20 bp, Artificial Sequence
  Synthetic
catgaggtgagggtggataa

SEQ ID NO: 26970 - DNA, 20 bp, Artificial Sequence
  Synthetic
ctttatccaccctcacctca

SEQ ID NO: 26971 - DNA, 20 bp, Artificial Sequence
  Synthetic
tctctgccatgaggtgaggg

SEQ ID NO: 26972 - DNA, 20 bp, Artificial Sequence
  Synthetic
ctctctctgccatgaggtga

SEQ ID NO: 26973 - DNA, 20 bp, Artificial Sequence
  Synthetic
actctctctgccatgaggtg

SEQ ID NO: 26974 - DNA, 20 bp, Artificial Sequence
  Synthetic
ttcaaactctctctgccatg

SEQ ID NO: 26975 - DNA, 20 bp, Artificial Sequence
  Synthetic
ggcagagagagtttgaaatc

SEQ ID NO: 26976 - DNA, 20 bp, Artificial Sequence
  Synthetic
gcagagagagtttgaaatct

SEQ ID NO: 26977 - DNA, 20 bp, Artificial Sequence
  Synthetic
ggcaccagagattaacgtag

SEQ ID NO: 26978 - DNA, 20 bp, Artificial Sequence
  Synthetic
taaaccactacgttaatctc

SEQ ID NO: 26979 - DNA, 20 bp, Artificial Sequence
  Synthetic
attaacgtagtggtttacat

SEQ ID NO: 26980 - DNA, 20 bp, Artificial Sequence
  Synthetic
tgacctgatgagcagaaata

SEQ ID NO: 26981 - DNA, 20 bp, Artificial Sequence
  Synthetic
acaccgtatttctgctcatc

SEQ ID NO: 26982 - DNA, 20 bp, Artificial Sequence
  Synthetic
tgtttttttcttatagatac

SEQ ID NO: 26983 - DNA, 20 bp, Artificial Sequence
  Synthetic
tatagatacgggaatatgaa

SEQ ID NO: 26984 - DNA, 20 bp, Artificial Sequence
  Synthetic
gaacttcaatcttttggttt

SEQ ID NO: 26985 - DNA, 20 bp, Artificial Sequence
  Synthetic
tgaacttcaatcttttggtt

SEQ ID NO: 26986 - DNA, 20 bp, Artificial Sequence
  Synthetic
tgcgttgaacttcaatcttt

SEQ ID NO: 26987 - DNA, 20 bp, Artificial Sequence
  Synthetic
tgagatcctcttgaaagata

SEQ ID NO: 26988 - DNA, 20 bp, Artificial Sequence
  Synthetic
tacacaccttatctttcaag

SEQ ID NO: 26989 - DNA, 20 bp, Artificial Sequence
  Synthetic
gtttttactttagactgtgc

SEQ ID NO: 26990 - DNA, 20 bp, Artificial Sequence
  Synthetic
tttttactttagactgtgct

SEQ ID NO: 26991 - DNA, 20 bp, Artificial Sequence
  Synthetic
ctgtgctgggcagtattaac

SEQ ID NO: 26992 - DNA, 20 bp, Artificial Sequence
  Synthetic
tgtgctgggcagtattaact

SEQ ID NO: 26993 - DNA, 20 bp, Artificial Sequence
  Synthetic
cagtattaactgggcctttc

SEQ ID NO: 26994 - DNA, 20 bp, Artificial Sequence
  Synthetic
agtattaactgggcctttct

SEQ ID NO: 26995 - DNA, 20 bp, Artificial Sequence
  Synthetic
taactgggcctttctgggag

SEQ ID NO: 26996 - DNA, 20 bp, Artificial Sequence
  Synthetic
ggcttcatccactcccagaa

SEQ ID NO: 26997 - DNA, 20 bp, Artificial Sequence
  Synthetic
tgggagtggatgaagcccat

SEQ ID NO: 26998 - DNA, 20 bp, Artificial Sequence
  Synthetic
gtcatcattcttcaaccgat

SEQ ID NO: 26999 - DNA, 20 bp, Artificial Sequence
  Synthetic
agtcatcattcttcaaccga

SEQ ID NO: 27000 - DNA, 20 bp, Artificial Sequence
  Synthetic
ttgatttcaagtccaaccat

SEQ ID NO: 27001 - DNA, 20 bp, Artificial Sequence
  Synthetic
cgtaatcaggagcctatggt

SEQ ID NO: 27002 - DNA, 20 bp, Artificial Sequence
  Synthetic
caaccataggctcctgatta

SEQ ID NO: 27003 - DNA, 20 bp, Artificial Sequence
  Synthetic
aaccataggctcctgattac

SEQ ID NO: 27004 - DNA, 20 bp, Artificial Sequence
  Synthetic
accataggctcctgattacg

SEQ ID NO: 27005 - DNA, 20 bp, Artificial Sequence
  Synthetic
tccccgtaatcaggagccta

SEQ ID NO: 27006 - DNA, 20 bp, Artificial Sequence
  Synthetic
gaagaggggtccccgtaatc

SEQ ID NO: 27007 - DNA, 20 bp, Artificial Sequence
  Synthetic
tttgagggaattctgaagag

SEQ ID NO: 27008 - DNA, 20 bp, Artificial Sequence
  Synthetic
ctttgagggaattctgaaga

SEQ ID NO: 27009 - DNA, 20 bp, Artificial Sequence
  Synthetic
tctttgagggaattctgaag

SEQ ID NO: 27010 - DNA, 20 bp, Artificial Sequence
  Synthetic
agaattccctcaaagagctc

SEQ ID NO: 27011 - DNA, 20 bp, Artificial Sequence
  Synthetic
caaggaccagagctctttga

SEQ ID NO: 27012 - DNA, 20 bp, Artificial Sequence
  Synthetic
gcaaggaccagagctctttg

SEQ ID NO: 27013 - DNA, 20 bp, Artificial Sequence
  Synthetic
cggcataataaagtgcagca

SEQ ID NO: 27014 - DNA, 20 bp, Artificial Sequence
  Synthetic
cttgctgcactttattatgc

SEQ ID NO: 27015 - DNA, 20 bp, Artificial Sequence
  Synthetic
caggaaggagcttacttctc

SEQ ID NO: 27016 - DNA, 20 bp, Artificial Sequence
  Synthetic
tcttccctaggtttgaattt

SEQ ID NO: 27017 - DNA, 20 bp, Artificial Sequence
  Synthetic
cttccctaggtttgaatttt

SEQ ID NO: 27018 - DNA, 20 bp, Artificial Sequence
  Synthetic
gaagattttgaagaagacca

SEQ ID NO: 27019 - DNA, 20 bp, Artificial Sequence
  Synthetic
aagattttgaagaagaccat

SEQ ID NO: 27020 - DNA, 20 bp, Artificial Sequence
  Synthetic
ttttgaagaagaccatggga

SEQ ID NO: 27021 - DNA, 20 bp, Artificial Sequence
  Synthetic
tttgaagaagaccatgggaa

SEQ ID NO: 27022 - DNA, 20 bp, Artificial Sequence
  Synthetic
ttgaagaagaccatgggaag

SEQ ID NO: 27023 - DNA, 20 bp, Artificial Sequence
  Synthetic
cattttctctccccttccca

SEQ ID NO: 27024 - DNA, 20 bp, Artificial Sequence
  Synthetic
catgggaaggggagagaaaa

SEQ ID NO: 27025 - DNA, 20 bp, Artificial Sequence
  Synthetic
tggctaccagagtcttcata

SEQ ID NO: 27026 - DNA, 20 bp, Artificial Sequence
  Synthetic
ctagcaccttatgaagactc

SEQ ID NO: 27027 - DNA, 20 bp, Artificial Sequence
  Synthetic
tgctagagcctttccttctc

SEQ ID NO: 27028 - DNA, 20 bp, Artificial Sequence
  Synthetic
ttgactctccggagaaggaa

SEQ ID NO: 27029 - DNA, 20 bp, Artificial Sequence
  Synthetic
cttttttgactctccggaga

SEQ ID NO: 27030 - DNA, 20 bp, Artificial Sequence
  Synthetic
ccacatcttttttgactctc

SEQ ID NO: 27031 - DNA, 20 bp, Artificial Sequence
  Synthetic
ccggagagtcaaaaaagatg

SEQ ID NO: 27032 - DNA, 20 bp, Artificial Sequence
  Synthetic
gaaatcccttcctgctaaag

SEQ ID NO: 27033 - DNA, 20 bp, Artificial Sequence
  Synthetic
ctgttccactttagcaggaa

SEQ ID NO: 27034 - DNA, 20 bp, Artificial Sequence
  Synthetic
tctgttccactttagcagga

SEQ ID NO: 27035 - DNA, 20 bp, Artificial Sequence
  Synthetic
agaatctgttccactttagc

SEQ ID NO: 27036 - DNA, 20 bp, Artificial Sequence
  Synthetic
ctaaagtggaacagattctc

SEQ ID NO: 27037 - DNA, 20 bp, Artificial Sequence
  Synthetic
taaagtggaacagattctca

SEQ ID NO: 27038 - DNA, 20 bp, Artificial Sequence
  Synthetic
agtggaacagattctcaggg

SEQ ID NO: 27039 - DNA, 20 bp, Artificial Sequence
  Synthetic
cttgtaatactgtttctgaa

SEQ ID NO: 27040 - DNA, 20 bp, Artificial Sequence
  Synthetic
acttgtaatactgtttctga

SEQ ID NO: 27041 - DNA, 20 bp, Artificial Sequence
  Synthetic
tttgcaggtggattctgacc

SEQ ID NO: 27042 - DNA, 20 bp, Artificial Sequence
  Synthetic
gattctgaccaggaattaca

SEQ ID NO: 27043 - DNA, 20 bp, Artificial Sequence
  Synthetic
ggcaagagccttgtaattcc

SEQ ID NO: 27044 - DNA, 20 bp, Artificial Sequence
  Synthetic
aattacaaggctcttgccaa

SEQ ID NO: 27045 - DNA, 20 bp, Artificial Sequence
  Synthetic
gctcttgccaaaggaacaag

SEQ ID NO: 27046 - DNA, 20 bp, Artificial Sequence
  Synthetic
tgtgctgcctcttgttcctt

SEQ ID NO: 27047 - DNA, 20 bp, Artificial Sequence
  Synthetic
ggaacaagaggcagcacatc

SEQ ID NO: 27048 - DNA, 20 bp, Artificial Sequence
  Synthetic
tggttttcttaatattgtga

SEQ ID NO: 27049 - DNA, 20 bp, Artificial Sequence
  Synthetic
ggggtttaatcagatagcag

SEQ ID NO: 27050 - DNA, 20 bp, Artificial Sequence
  Synthetic
cagatagtagaaagagtaat

SEQ ID NO: 27051 - DNA, 20 bp, Artificial Sequence
  Synthetic
gaagacaagtaaatctacat

SEQ ID NO: 27052 - DNA, 20 bp, Artificial Sequence
  Synthetic
aagacaagtaaatctacatt

SEQ ID NO: 27053 - DNA, 20 bp, Artificial Sequence
  Synthetic
ttgggtcaaacagattttcc

SEQ ID NO: 27054 - DNA, 20 bp, Artificial Sequence
  Synthetic
tatatgaaatagctcatagt

SEQ ID NO: 27055 - DNA, 20 bp, Artificial Sequence
  Synthetic
aatagctcatagtcggaagc

SEQ ID NO: 27056 - DNA, 20 bp, Artificial Sequence
  Synthetic
tcgggctcatttgagggtgc

SEQ ID NO: 27057 - DNA, 20 bp, Artificial Sequence
  Synthetic
agatattcgggctcatttga

SEQ ID NO: 27058 - DNA, 20 bp, Artificial Sequence
  Synthetic
tagatattcgggctcatttg

SEQ ID NO: 27059 - DNA, 20 bp, Artificial Sequence
  Synthetic
agcccgaatatctatgtaaa

SEQ ID NO: 27060 - DNA, 20 bp, Artificial Sequence
  Synthetic
atccatttacatagatattc

SEQ ID NO: 27061 - DNA, 20 bp, Artificial Sequence
  Synthetic
catccatttacatagatatt

SEQ ID NO: 27062 - DNA, 20 bp, Artificial Sequence
  Synthetic
cgaatatctatgtaaatgga

SEQ ID NO: 27063 - DNA, 20 bp, Artificial Sequence
  Synthetic
gaatatctatgtaaatggat

SEQ ID NO: 27064 - DNA, 20 bp, Artificial Sequence
  Synthetic
tcccctattcagagtgtagc

SEQ ID NO: 27065 - DNA, 20 bp, Artificial Sequence
  Synthetic
cccagctacactctgaatag

SEQ ID NO: 27066 - DNA, 20 bp, Artificial Sequence
  Synthetic
cccctattcagagtgtagct

SEQ ID NO: 27067 - DNA, 20 bp, Artificial Sequence
  Synthetic
tcccagctacactctgaata

SEQ ID NO: 27068 - DNA, 20 bp, Artificial Sequence
  Synthetic
ttcccagctacactctgaat

SEQ ID NO: 27069 - DNA, 20 bp, Artificial Sequence
  Synthetic
tgggaagatgaagccctcat

SEQ ID NO: 27070 - DNA, 20 bp, Artificial Sequence
  Synthetic
ctggaatttctttccaatga

SEQ ID NO: 27071 - DNA, 20 bp, Artificial Sequence
  Synthetic
tctggaatttctttccaatg

SEQ ID NO: 27072 - DNA, 20 bp, Artificial Sequence
  Synthetic
ggaagctgtcaatgcaattc

SEQ ID NO: 27073 - DNA, 20 bp, Artificial Sequence
  Synthetic
gcattgacagcttccacagt

SEQ ID NO: 27074 - DNA, 20 bp, Artificial Sequence
  Synthetic
tttttgagttgttcctactg

SEQ ID NO: 27075 - DNA, 20 bp, Artificial Sequence
  Synthetic
taatagtgaaactattgaaa

SEQ ID NO: 27076 - DNA, 20 bp, Artificial Sequence
  Synthetic
aaaggtcttagattcaagac

SEQ ID NO: 27077 - DNA, 20 bp, Artificial Sequence
  Synthetic
aaggtcttagattcaagact

SEQ ID NO: 27078 - DNA, 20 bp, Artificial Sequence
  Synthetic
gattcaagactgggaaagaa

SEQ ID NO: 27079 - DNA, 20 bp, Artificial Sequence
  Synthetic
tcaagactgggaaagaaagg

SEQ ID NO: 27080 - DNA, 20 bp, Artificial Sequence
  Synthetic
cttaatccttttgcagccac

SEQ ID NO: 27081 - DNA, 20 bp, Artificial Sequence
  Synthetic
tacagtagtagatgctccag

SEQ ID NO: 27082 - DNA, 20 bp, Artificial Sequence
  Synthetic
gtatatgcgattgaagctaa

SEQ ID NO: 27083 - DNA, 20 bp, Artificial Sequence
  Synthetic
gaagctaatggcgaccctag

SEQ ID NO: 27084 - DNA, 20 bp, Artificial Sequence
  Synthetic
cagtgtcaaagtcaccacta

SEQ ID NO: 27085 - DNA, 20 bp, Artificial Sequence
  Synthetic
tcagtgtcaaagtcaccact

SEQ ID NO: 27086 - DNA, 20 bp, Artificial Sequence
  Synthetic
tggtgactttgacactgaaa

SEQ ID NO: 27087 - DNA, 20 bp, Artificial Sequence
  Synthetic
tttgacactgaaaaggatga

SEQ ID NO: 27088 - DNA, 20 bp, Artificial Sequence
  Synthetic
aaatccagtacctcatcaag

SEQ ID NO: 27089 - DNA, 20 bp, Artificial Sequence
  Synthetic
ccttccacttgatgaggtac

SEQ ID NO: 27090 - DNA, 20 bp, Artificial Sequence
  Synthetic
ccagtacctcatcaagtgga

SEQ ID NO: 27091 - DNA, 20 bp, Artificial Sequence
  Synthetic
cagtacctcatcaagtggaa

SEQ ID NO: 27092 - DNA, 20 bp, Artificial Sequence
  Synthetic
acctcatcaagtggaagggt

SEQ ID NO: 27093 - DNA, 20 bp, Artificial Sequence
  Synthetic
accaacccttccacttgatg

SEQ ID NO: 27094 - DNA, 20 bp, Artificial Sequence
  Synthetic
ggtcttacatccacagcaca

SEQ ID NO: 27095 - DNA, 20 bp, Artificial Sequence
  Synthetic
gtcttacatccacagcacat

SEQ ID NO: 27096 - DNA, 20 bp, Artificial Sequence
  Synthetic
cttcactctcccatgtgctg

SEQ ID NO: 27097 - DNA, 20 bp, Artificial Sequence
  Synthetic
cttcactttctgttgctgta

SEQ ID NO: 27098 - DNA, 20 bp, Artificial Sequence
  Synthetic
caccctgcacatgtatcagt

SEQ ID NO: 27099 - DNA, 20 bp, Artificial Sequence
  Synthetic
ctgcacatgtatcagttgga

SEQ ID NO: 27100 - DNA, 20 bp, Artificial Sequence
  Synthetic
tgcacatgtatcagttggaa

SEQ ID NO: 27101 - DNA, 20 bp, Artificial Sequence
  Synthetic
atcagttggaagggctgaac

SEQ ID NO: 27102 - DNA, 20 bp, Artificial Sequence
  Synthetic
tgaactggctacgcttctcc

SEQ ID NO: 27103 - DNA, 20 bp, Artificial Sequence
  Synthetic
gaactggctacgcttctcct

SEQ ID NO: 27104 - DNA, 20 bp, Artificial Sequence
  Synthetic
gctacgcttctcctgggccc

SEQ ID NO: 27105 - DNA, 20 bp, Artificial Sequence
  Synthetic
ctacgcttctcctgggccca

SEQ ID NO: 27106 - DNA, 20 bp, Artificial Sequence
  Synthetic
ggtgtcagtgccctgggccc

SEQ ID NO: 27107 - DNA, 20 bp, Artificial Sequence
  Synthetic
tagaatggtgtcagtgccct

SEQ ID NO: 27108 - DNA, 20 bp, Artificial Sequence
  Synthetic
ctagaatggtgtcagtgccc

SEQ ID NO: 27109 - DNA, 20 bp, Artificial Sequence
  Synthetic
caccattctagctgatgaga

SEQ ID NO: 27110 - DNA, 20 bp, Artificial Sequence
  Synthetic
accattctagctgatgagat

SEQ ID NO: 27111 - DNA, 20 bp, Artificial Sequence
  Synthetic
ccccatctcatcagctagaa

SEQ ID NO: 27112 - DNA, 20 bp, Artificial Sequence
  Synthetic
ccattctagctgatgagatg

SEQ ID NO: 27113 - DNA, 20 bp, Artificial Sequence
  Synthetic
ctagctgatgagatggggct

SEQ ID NO: 27114 - DNA, 20 bp, Artificial Sequence
  Synthetic
gaggaagacgatggtttgta

SEQ ID NO: 27115 - DNA, 20 bp, Artificial Sequence
  Synthetic
gagtgagtagaggaagacga

SEQ ID NO: 27116 - DNA, 20 bp, Artificial Sequence
  Synthetic
cttcctctactcactctaca

SEQ ID NO: 27117 - DNA, 20 bp, Artificial Sequence
  Synthetic
cctccttgtagagtgagtag

SEQ ID NO: 27118 - DNA, 20 bp, Artificial Sequence
  Synthetic
cctctactcactctacaagg

SEQ ID NO: 27119 - DNA, 20 bp, Artificial Sequence
  Synthetic
gactcccagggccacacaaa

SEQ ID NO: 27120 - DNA, 20 bp, Artificial Sequence
  Synthetic
agggaccttttgtgtggccc

SEQ ID NO: 27121 - DNA, 20 bp, Artificial Sequence
  Synthetic
ccaggaagggaccttttgtg

SEQ ID NO: 27122 - DNA, 20 bp, Artificial Sequence
  Synthetic
ccacacaaaaggtcccttcc

SEQ ID NO: 27123 - DNA, 20 bp, Artificial Sequence
  Synthetic
agtggggcactcaccaggaa

SEQ ID NO: 27124 - DNA, 20 bp, Artificial Sequence
  Synthetic
gagtggggcactcaccagga

SEQ ID NO: 27125 - DNA, 20 bp, Artificial Sequence
  Synthetic
tagagagtggggcactcacc

SEQ ID NO: 27126 - DNA, 20 bp, Artificial Sequence
  Synthetic
gttaatgatggtagagagtg

SEQ ID NO: 27127 - DNA, 20 bp, Artificial Sequence
  Synthetic
agttaatgatggtagagagt

SEQ ID NO: 27128 - DNA, 20 bp, Artificial Sequence
  Synthetic
cagttaatgatggtagagag

SEQ ID NO: 27129 - DNA, 20 bp, Artificial Sequence
  Synthetic
cactctctaccatcattaac

SEQ ID NO: 27130 - DNA, 20 bp, Artificial Sequence
  Synthetic
actctctaccatcattaact

SEQ ID NO: 27131 - DNA, 20 bp, Artificial Sequence
  Synthetic
ctaccatcattaactgggag

SEQ ID NO: 27132 - DNA, 20 bp, Artificial Sequence
  Synthetic
taccatcattaactgggagc

SEQ ID NO: 27133 - DNA, 20 bp, Artificial Sequence
  Synthetic
ctcccgctcccagttaatga

SEQ ID NO: 27134 - DNA, 20 bp, Artificial Sequence
  Synthetic
gggagcgggagttccagatg

SEQ ID NO: 27135 - DNA, 20 bp, Artificial Sequence
  Synthetic
ggagcgggagttccagatgt

SEQ ID NO: 27136 - DNA, 20 bp, Artificial Sequence
  Synthetic
agaatttgggtgcccacatc

SEQ ID NO: 27137 - DNA, 20 bp, Artificial Sequence
  Synthetic
gtgggcacccaaattctatg

SEQ ID NO: 27138 - DNA, 20 bp, Artificial Sequence
  Synthetic
tatgtcaccacatagaattt

SEQ ID NO: 27139 - DNA, 20 bp, Artificial Sequence
  Synthetic
gtatgtcaccacatagaatt

SEQ ID NO: 27140 - DNA, 20 bp, Artificial Sequence
  Synthetic
attctatgtggtgacataca

SEQ ID NO: 27141 - DNA, 20 bp, Artificial Sequence
  Synthetic
ttctatgtggtgacatacac

SEQ ID NO: 27142 - DNA, 20 bp, Artificial Sequence
  Synthetic
ggtgacatacacgggtgaca

SEQ ID NO: 27143 - DNA, 20 bp, Artificial Sequence
  Synthetic
acacgggtgacaaggacagc

SEQ ID NO: 27144 - DNA, 20 bp, Artificial Sequence
  Synthetic
cacgggtgacaaggacagcc

SEQ ID NO: 27145 - DNA, 20 bp, Artificial Sequence
  Synthetic
cattctcacgaatgatggcc

SEQ ID NO: 27146 - DNA, 20 bp, Artificial Sequence
  Synthetic
gaattcattctcacgaatga

SEQ ID NO: 27147 - DNA, 20 bp, Artificial Sequence
  Synthetic
tgagaatgaattctcctttg

SEQ ID NO: 27148 - DNA, 20 bp, Artificial Sequence
  Synthetic
tttgatggcattgtcctcaa

SEQ ID NO: 27149 - DNA, 20 bp, Artificial Sequence
  Synthetic
tttgaggacaatgccatcaa

SEQ ID NO: 27150 - DNA, 20 bp, Artificial Sequence
  Synthetic
ttgaggacaatgccatcaaa

SEQ ID NO: 27151 - DNA, 20 bp, Artificial Sequence
  Synthetic
tgaggacaatgccatcaaag

SEQ ID NO: 27152 - DNA, 20 bp, Artificial Sequence
  Synthetic
gaggacaatgccatcaaagg

SEQ ID NO: 27153 - DNA, 20 bp, Artificial Sequence
  Synthetic
agctttcttgccccctttga

SEQ ID NO: 27154 - DNA, 20 bp, Artificial Sequence
  Synthetic
caagaaagcttttaagatga

SEQ ID NO: 27155 - DNA, 20 bp, Artificial Sequence
  Synthetic
ataattatgttggcagaggg

SEQ ID NO: 27156 - DNA, 20 bp, Artificial Sequence
  Synthetic
atgttggcagagggaggcac

SEQ ID NO: 27157 - DNA, 20 bp, Artificial Sequence
  Synthetic
catacgatgtcaggagaaca

SEQ ID NO: 27158 - DNA, 20 bp, Artificial Sequence
  Synthetic
tgatcagctcatacgatgtc

SEQ ID NO: 27159 - DNA, 20 bp, Artificial Sequence
  Synthetic
tgagctgatcaccattgatc

SEQ ID NO: 27160 - DNA, 20 bp, Artificial Sequence
  Synthetic
accattgatcaggcagcact

SEQ ID NO: 27161 - DNA, 20 bp, Artificial Sequence
  Synthetic
accaagtgctgcctgatcaa

SEQ ID NO: 27162 - DNA, 20 bp, Artificial Sequence
  Synthetic
cagcacttggttccatccgc

SEQ ID NO: 27163 - DNA, 20 bp, Artificial Sequence
  Synthetic
agcacttggttccatccgct

SEQ ID NO: 27164 - DNA, 20 bp, Artificial Sequence
  Synthetic
cacaagacaggcccagcgga

SEQ ID NO: 27165 - DNA, 20 bp, Artificial Sequence
  Synthetic
catccgctgggcctgtcttg

SEQ ID NO: 27166 - DNA, 20 bp, Artificial Sequence
  Synthetic
ctaccacaagacaggcccag

SEQ ID NO: 27167 - DNA, 20 bp, Artificial Sequence
  Synthetic
ggcctgtcttgtggtagatg

SEQ ID NO: 27168 - DNA, 20 bp, Artificial Sequence
  Synthetic
ggcctcatctaccacaagac

SEQ ID NO: 27169 - DNA, 20 bp, Artificial Sequence
  Synthetic
ctggttgttcttgagtcgat

SEQ ID NO: 27170 - DNA, 20 bp, Artificial Sequence
  Synthetic
actggttgttcttgagtcga

SEQ ID NO: 27171 - DNA, 20 bp, Artificial Sequence
  Synthetic
actcaagaacaaccagtcca

SEQ ID NO: 27172 - DNA, 20 bp, Artificial Sequence
  Synthetic
aaacctcactcaccttggac

SEQ ID NO: 27173 - DNA, 20 bp, Artificial Sequence
  Synthetic
gccccatcttttagtttttc

SEQ ID NO: 27174 - DNA, 20 bp, Artificial Sequence
  Synthetic
ccccatcttttagtttttca

SEQ ID NO: 27175 - DNA, 20 bp, Artificial Sequence
  Synthetic
tagtttttcagggttctcaa

SEQ ID NO: 27176 - DNA, 20 bp, Artificial Sequence
  Synthetic
gatcataagttgctgctgac

SEQ ID NO: 27177 - DNA, 20 bp, Artificial Sequence
  Synthetic
aaccccattgcagaataatc

SEQ ID NO: 27178 - DNA, 20 bp, Artificial Sequence
  Synthetic
ctccagattattctgcaatg

SEQ ID NO: 27179 - DNA, 20 bp, Artificial Sequence
  Synthetic
cctccagattattctgcaat

SEQ ID NO: 27180 - DNA, 20 bp, Artificial Sequence
  Synthetic
cccattgcagaataatctgg

SEQ ID NO: 27181 - DNA, 20 bp, Artificial Sequence
  Synthetic
tcctccagattattctgcaa

SEQ ID NO: 27182 - DNA, 20 bp, Artificial Sequence
  Synthetic
gggtgaggaagttcaggaga

SEQ ID NO: 27183 - DNA, 20 bp, Artificial Sequence
  Synthetic
tctctggggtgaggaagttc

SEQ ID NO: 27184 - DNA, 20 bp, Artificial Sequence
  Synthetic
acttaaatctctctggggtg

SEQ ID NO: 27185 - DNA, 20 bp, Artificial Sequence
  Synthetic
cacttacttaaatctctctg

SEQ ID NO: 27186 - DNA, 20 bp, Artificial Sequence
  Synthetic
ccacttacttaaatctctct

SEQ ID NO: 27187 - DNA, 20 bp, Artificial Sequence
  Synthetic
accacttacttaaatctctc

SEQ ID NO: 27188 - DNA, 20 bp, Artificial Sequence
  Synthetic
tcttctggctcttagcaact

SEQ ID NO: 27189 - DNA, 20 bp, Artificial Sequence
  Synthetic
tctggctcttagcaacttgg

SEQ ID NO: 27190 - DNA, 20 bp, Artificial Sequence
  Synthetic
ctggctcttagcaacttgga

SEQ ID NO: 27191 - DNA, 20 bp, Artificial Sequence
  Synthetic
tagcaacttggagggcttcc

SEQ ID NO: 27192 - DNA, 20 bp, Artificial Sequence
  Synthetic
caacttggagggcttcctgg

SEQ ID NO: 27193 - DNA, 20 bp, Artificial Sequence
  Synthetic
atatgtcagcaaactcctcc

SEQ ID NO: 27194 - DNA, 20 bp, Artificial Sequence
  Synthetic
gtttgctgacatatccaaag

SEQ ID NO: 27195 - DNA, 20 bp, Artificial Sequence
  Synthetic
tttcttgatctggtcctctt

SEQ ID NO: 27196 - DNA, 20 bp, Artificial Sequence
  Synthetic
aatcatgcagtttcttgatc

SEQ ID NO: 27197 - DNA, 20 bp, Artificial Sequence
  Synthetic
caagaaactgcatgatttgc

SEQ ID NO: 27198 - DNA, 20 bp, Artificial Sequence
  Synthetic
aagaaactgcatgatttgct

SEQ ID NO: 27199 - DNA, 20 bp, Artificial Sequence
  Synthetic
agaaactgcatgatttgctg

SEQ ID NO: 27200 - DNA, 20 bp, Artificial Sequence
  Synthetic
tgctggggccacacatgctg

SEQ ID NO: 27201 - DNA, 20 bp, Artificial Sequence
  Synthetic
ttgagtctccgcagcatgtg

SEQ ID NO: 27202 - DNA, 20 bp, Artificial Sequence
  Synthetic
acacatgctgcggagactca

SEQ ID NO: 27203 - DNA, 20 bp, Artificial Sequence
  Synthetic
acgatgagctctgtcttggc

SEQ ID NO: 27204 - DNA, 20 bp, Artificial Sequence
  Synthetic
ccgaacgatgagctctgtct

SEQ ID NO: 27205 - DNA, 20 bp, Artificial Sequence
  Synthetic
ccaagacagagctcatcgtt

SEQ ID NO: 27206 - DNA, 20 bp, Artificial Sequence
  Synthetic
caagacagagctcatcgttc

SEQ ID NO: 27207 - DNA, 20 bp, Artificial Sequence
  Synthetic
gacagagctcatcgttcggg

SEQ ID NO: 27208 - DNA, 20 bp, Artificial Sequence
  Synthetic
ttgcatcttacttctgcatg

SEQ ID NO: 27209 - DNA, 20 bp, Artificial Sequence
  Synthetic
cttgcatcttacttctgcat

SEQ ID NO: 27210 - DNA, 20 bp, Artificial Sequence
  Synthetic
tcttgcatcttacttctgca

SEQ ID NO: 27211 - DNA, 20 bp, Artificial Sequence
  Synthetic
catcctgactcgaaattttg

SEQ ID NO: 27212 - DNA, 20 bp, Artificial Sequence
  Synthetic
aggcctcaaaatttcgagtc

SEQ ID NO: 27213 - DNA, 20 bp, Artificial Sequence
  Synthetic
tttgaggccttgaattcacg

SEQ ID NO: 27214 - DNA, 20 bp, Artificial Sequence
  Synthetic
gaggccttgaattcacgagg

SEQ ID NO: 27215 - DNA, 20 bp, Artificial Sequence
  Synthetic
gccttgaattcacgaggtgg

SEQ ID NO: 27216 - DNA, 20 bp, Artificial Sequence
  Synthetic
cccaccacctcgtgaattca

SEQ ID NO: 27217 - DNA, 20 bp, Artificial Sequence
  Synthetic
ccttgaattcacgaggtggt

SEQ ID NO: 27218 - DNA, 20 bp, Artificial Sequence
  Synthetic
ttcacgaggtggtgggaacc

SEQ ID NO: 27219 - DNA, 20 bp, Artificial Sequence
  Synthetic
tgatattaagcagcgacacc

SEQ ID NO: 27220 - DNA, 20 bp, Artificial Sequence
  Synthetic
gtcgctgcttaatatcatga

SEQ ID NO: 27221 - DNA, 20 bp, Artificial Sequence
  Synthetic
ccacgggaaaaaggtatgga

SEQ ID NO: 27222 - DNA, 20 bp, Artificial Sequence
  Synthetic
gcagccacgggaaaaaggta

SEQ ID NO: 27223 - DNA, 20 bp, Artificial Sequence
  Synthetic
ccatagcagccacgggaaaa

SEQ ID NO: 27224 - DNA, 20 bp, Artificial Sequence
  Synthetic
gtggttgatgatgcggtgga

SEQ ID NO: 27225 - DNA, 20 bp, Artificial Sequence
  Synthetic
tccaccgcatcatcaaccac

SEQ ID NO: 27226 - DNA, 20 bp, Artificial Sequence
  Synthetic
acctgtggttgatgatgcgg

SEQ ID NO: 27227 - DNA, 20 bp, Artificial Sequence
  Synthetic
ttcacctgtggttgatgatg

SEQ ID NO: 27228 - DNA, 20 bp, Artificial Sequence
  Synthetic
agggaccgaggattcacctg

SEQ ID NO: 27229 - DNA, 20 bp, Artificial Sequence
  Synthetic
gccccacagtgtggataaaa

SEQ ID NO: 27230 - DNA, 20 bp, Artificial Sequence
  Synthetic
ccccacagtgtggataaaaa

SEQ ID NO: 27231 - DNA, 20 bp, Artificial Sequence
  Synthetic
cccacagtgtggataaaaag

SEQ ID NO: 27232 - DNA, 20 bp, Artificial Sequence
  Synthetic
attaccactatctagtaaaa

SEQ ID NO: 27233 - DNA, 20 bp, Artificial Sequence
  Synthetic
accactatctagtaaaatgg

SEQ ID NO: 27234 - DNA, 20 bp, Artificial Sequence
  Synthetic
ccctccattttactagatag

SEQ ID NO: 27235 - DNA, 20 bp, Artificial Sequence
  Synthetic
ccactatctagtaaaatgga

SEQ ID NO: 27236 - DNA, 20 bp, Artificial Sequence
  Synthetic
taccatatgaccagtccacg

SEQ ID NO: 27237 - DNA, 20 bp, Artificial Sequence
  Synthetic
accatatgaccagtccacgt

SEQ ID NO: 27238 - DNA, 20 bp, Artificial Sequence
  Synthetic
tcccacgtggactggtcata

SEQ ID NO: 27239 - DNA, 20 bp, Artificial Sequence
  Synthetic
atatgaccagtccacgtggg

SEQ ID NO: 27240 - DNA, 20 bp, Artificial Sequence
  Synthetic
catcttcctcccacgtggac

SEQ ID NO: 27241 - DNA, 20 bp, Artificial Sequence
  Synthetic
catttcatcttcctcccacg

SEQ ID NO: 27242 - DNA, 20 bp, Artificial Sequence
  Synthetic
gcttatgttcttcgtattca

SEQ ID NO: 27243 - DNA, 20 bp, Artificial Sequence
  Synthetic
tgcttatgttcttcgtattc

SEQ ID NO: 27244 - DNA, 20 bp, Artificial Sequence
  Synthetic
aagaacataagcaaagctac

SEQ ID NO: 27245 - DNA, 20 bp, Artificial Sequence
  Synthetic
agcgagagttctttgtcaag

SEQ ID NO: 27246 - DNA, 20 bp, Artificial Sequence
  Synthetic
gcgagagttctttgtcaagt

SEQ ID NO: 27247 - DNA, 20 bp, Artificial Sequence
  Synthetic
gagttctttgtcaagtgggt

SEQ ID NO: 27248 - DNA, 20 bp, Artificial Sequence
  Synthetic
agtgggtaggactatcctac

SEQ ID NO: 27249 - DNA, 20 bp, Artificial Sequence
  Synthetic
tatcctactggcactgctcc

SEQ ID NO: 27250 - DNA, 20 bp, Artificial Sequence
  Synthetic
atcctactggcactgctcct

SEQ ID NO: 27251 - DNA, 20 bp, Artificial Sequence
  Synthetic
ggcccaggagcagtgccagt

SEQ ID NO: 27252 - DNA, 20 bp, Artificial Sequence
  Synthetic
ctggcactgctcctgggcca

SEQ ID NO: 27253 - DNA, 20 bp, Artificial Sequence
  Synthetic
ctcctgggccaaggagcttc

SEQ ID NO: 27254 - DNA, 20 bp, Artificial Sequence
  Synthetic
tacctgaagctccttggccc

SEQ ID NO: 27255 - DNA, 20 bp, Artificial Sequence
  Synthetic
tcctagtacctgaagctcct

SEQ ID NO: 27256 - DNA, 20 bp, Artificial Sequence
  Synthetic
ggatcaccaggattactgtg

SEQ ID NO: 27257 - DNA, 20 bp, Artificial Sequence
  Synthetic
ttactgtgaggtgtgccagc

SEQ ID NO: 27258 - DNA, 20 bp, Artificial Sequence
  Synthetic
tactgtgaggtgtgccagca

SEQ ID NO: 27259 - DNA, 20 bp, Artificial Sequence
  Synthetic
tgtgaggtgtgccagcaggg

SEQ ID NO: 27260 - DNA, 20 bp, Artificial Sequence
  Synthetic
gtgaggtgtgccagcagggt

SEQ ID NO: 27261 - DNA, 20 bp, Artificial Sequence
  Synthetic
tgaggtgtgccagcagggtg

SEQ ID NO: 27262 - DNA, 20 bp, Artificial Sequence
  Synthetic
gaataatttccccaccctgc

SEQ ID NO: 27263 - DNA, 20 bp, Artificial Sequence
  Synthetic
gaggtggtaggcacgagggc

SEQ ID NO: 27264 - DNA, 20 bp, Artificial Sequence
  Synthetic
agacgaggtggtaggcacga

SEQ ID NO: 27265 - DNA, 20 bp, Artificial Sequence
  Synthetic
cagacgaggtggtaggcacg

SEQ ID NO: 27266 - DNA, 20 bp, Artificial Sequence
  Synthetic
atcaaggcagacgaggtggt

SEQ ID NO: 27267 - DNA, 20 bp, Artificial Sequence
  Synthetic
caggatcaaggcagacgagg

SEQ ID NO: 27268 - DNA, 20 bp, Artificial Sequence
  Synthetic
gctcaggatcaaggcagacg

SEQ ID NO: 27269 - DNA, 20 bp, Artificial Sequence
  Synthetic
gccttgatcctgagcttgac

SEQ ID NO: 27270 - DNA, 20 bp, Artificial Sequence
  Synthetic
cccggtcaagctcaggatca

SEQ ID NO: 27271 - DNA, 20 bp, Artificial Sequence
  Synthetic
ccttgatcctgagcttgacc

SEQ ID NO: 27272 - DNA, 20 bp, Artificial Sequence
  Synthetic
tctggagcccggtcaagctc

SEQ ID NO: 27273 - DNA, 20 bp, Artificial Sequence
  Synthetic
tgagcttgaccgggctccag

SEQ ID NO: 27274 - DNA, 20 bp, Artificial Sequence
  Synthetic
gagcttgaccgggctccaga

SEQ ID NO: 27275 - DNA, 20 bp, Artificial Sequence
  Synthetic
accgggctccagagggcaaa

SEQ ID NO: 27276 - DNA, 20 bp, Artificial Sequence
  Synthetic
tccatttgccctctggagcc

SEQ ID NO: 27277 - DNA, 20 bp, Artificial Sequence
  Synthetic
gggcagctccatttgccctc

SEQ ID NO: 27278 - DNA, 20 bp, Artificial Sequence
  Synthetic
attaggtactcacacagtga

SEQ ID NO: 27279 - DNA, 20 bp, Artificial Sequence
  Synthetic
cattaggtactcacacagtg

SEQ ID NO: 27280 - DNA, 20 bp, Artificial Sequence
  Synthetic
atccttggccccctaggaga

SEQ ID NO: 27281 - DNA, 20 bp, Artificial Sequence
  Synthetic
cttggccccctaggagaagg

SEQ ID NO: 27282 - DNA, 20 bp, Artificial Sequence
  Synthetic
ttggccccctaggagaagga

SEQ ID NO: 27283 - DNA, 20 bp, Artificial Sequence
  Synthetic
ggagtactgccgcgtatgca

SEQ ID NO: 27284 - DNA, 20 bp, Artificial Sequence
  Synthetic
tactgccgcgtatgcaagga

SEQ ID NO: 27285 - DNA, 20 bp, Artificial Sequence
  Synthetic
tgccgcgtatgcaaggacgg

SEQ ID NO: 27286 - DNA, 20 bp, Artificial Sequence
  Synthetic
gccgcgtatgcaaggacggc

SEQ ID NO: 27287 - DNA, 20 bp, Artificial Sequence
  Synthetic
ccccgccgtccttgcatacg

SEQ ID NO: 27288 - DNA, 20 bp, Artificial Sequence
  Synthetic
ccgcgtatgcaaggacggcg

SEQ ID NO: 27289 - DNA, 20 bp, Artificial Sequence
  Synthetic
agatgcacgcgtcacagcac

SEQ ID NO: 27290 - DNA, 20 bp, Artificial Sequence
  Synthetic
tagacaatgaatgtggtagg

SEQ ID NO: 27291 - DNA, 20 bp, Artificial Sequence
  Synthetic
gtttagacaatgaatgtggt

SEQ ID NO: 27292 - DNA, 20 bp, Artificial Sequence
  Synthetic
gagggtttagacaatgaatg

SEQ ID NO: 27293 - DNA, 20 bp, Artificial Sequence
  Synthetic
tgggaatgtcaggcagggga

SEQ ID NO: 27294 - DNA, 20 bp, Artificial Sequence
  Synthetic
ttgggaatgtcaggcagggg

SEQ ID NO: 27295 - DNA, 20 bp, Artificial Sequence
  Synthetic
ccattgggaatgtcaggcag

SEQ ID NO: 27296 - DNA, 20 bp, Artificial Sequence
  Synthetic
cccctgcctgacattcccaa

SEQ ID NO: 27297 - DNA, 20 bp, Artificial Sequence
  Synthetic
accattgggaatgtcaggca

SEQ ID NO: 27298 - DNA, 20 bp, Artificial Sequence
  Synthetic
caccattgggaatgtcaggc

SEQ ID NO: 27299 - DNA, 20 bp, Artificial Sequence
  Synthetic
cattcaccattgggaatgtc

SEQ ID NO: 27300 - DNA, 20 bp, Artificial Sequence
  Synthetic
ctgacattcccaatggtgaa

SEQ ID NO: 27301 - DNA, 20 bp, Artificial Sequence
  Synthetic
ggacacagccattcaccatt

SEQ ID NO: 27302 - DNA, 20 bp, Artificial Sequence
  Synthetic
gggacacagccattcaccat

SEQ ID NO: 27303 - DNA, 20 bp, Artificial Sequence
  Synthetic
tttccactcactgtgcatcg

SEQ ID NO: 27304 - DNA, 20 bp, Artificial Sequence
  Synthetic
gtttccactcactgtgcatc

SEQ ID NO: 27305 - DNA, 20 bp, Artificial Sequence
  Synthetic
tgtttccactcactgtgcat

SEQ ID NO: 27306 - DNA, 20 bp, Artificial Sequence
  Synthetic
aaccctgcacccctatcaaa

SEQ ID NO: 27307 - DNA, 20 bp, Artificial Sequence
  Synthetic
cctgcacccctatcaaatgg

SEQ ID NO: 27308 - DNA, 20 bp, Artificial Sequence
  Synthetic
ctgcacccctatcaaatgga

SEQ ID NO: 27309 - DNA, 20 bp, Artificial Sequence
  Synthetic
tcaggccctccatttgatag

SEQ ID NO: 27310 - DNA, 20 bp, Artificial Sequence
  Synthetic
ttcaggccctccatttgata

SEQ ID NO: 27311 - DNA, 20 bp, Artificial Sequence
  Synthetic
attcaggccctccatttgat

SEQ ID NO: 27312 - DNA, 20 bp, Artificial Sequence
  Synthetic
atcaaatggagggcctgaat

SEQ ID NO: 27313 - DNA, 20 bp, Artificial Sequence
  Synthetic
aggagaagcgcaaccaattc

SEQ ID NO: 27314 - DNA, 20 bp, Artificial Sequence
  Synthetic
tgaattggttgcgcttctcc

SEQ ID NO: 27315 - DNA, 20 bp, Artificial Sequence
  Synthetic
gaattggttgcgcttctcct

SEQ ID NO: 27316 - DNA, 20 bp, Artificial Sequence
  Synthetic
gttgcgcttctcctgggctc

SEQ ID NO: 27317 - DNA, 20 bp, Artificial Sequence
  Synthetic
ttgcgcttctcctgggctca

SEQ ID NO: 27318 - DNA, 20 bp, Artificial Sequence
  Synthetic
ggtgtcagtgccctgagccc

SEQ ID NO: 27319 - DNA, 20 bp, Artificial Sequence
  Synthetic
tcagggcactgacaccatct

SEQ ID NO: 27320 - DNA, 20 bp, Artificial Sequence
  Synthetic
caccatcttggctgatgaga

SEQ ID NO: 27321 - DNA, 20 bp, Artificial Sequence
  Synthetic
accatcttggctgatgagat

SEQ ID NO: 27322 - DNA, 20 bp, Artificial Sequence
  Synthetic
gcccatctcatcagccaaga

SEQ ID NO: 27323 - DNA, 20 bp, Artificial Sequence
  Synthetic
ttggctgatgagatgggcct

SEQ ID NO: 27324 - DNA, 20 bp, Artificial Sequence
  Synthetic
tggctgatgagatgggcctt

SEQ ID NO: 27325 - DNA, 20 bp, Artificial Sequence
  Synthetic
ctgtctgtacagttttccca

SEQ ID NO: 27326 - DNA, 20 bp, Artificial Sequence
  Synthetic
cttcctgtattccctttaca

SEQ ID NO: 27327 - DNA, 20 bp, Artificial Sequence
  Synthetic
cctccttgtaaagggaatac

SEQ ID NO: 27328 - DNA, 20 bp, Artificial Sequence
  Synthetic
cctgtattccctttacaagg

SEQ ID NO: 27329 - DNA, 20 bp, Artificial Sequence
  Synthetic
tttccttacctccttgtaaa

SEQ ID NO: 27330 - DNA, 20 bp, Artificial Sequence
  Synthetic
atttccttacctccttgtaa

SEQ ID NO: 27331 - DNA, 20 bp, Artificial Sequence
  Synthetic
ttctcaaagggtcattccaa

SEQ ID NO: 27332 - DNA, 20 bp, Artificial Sequence
  Synthetic
gctcactaggaaggggcctt

SEQ ID NO: 27333 - DNA, 20 bp, Artificial Sequence
  Synthetic
gaggggcgctcactaggaag

SEQ ID NO: 27334 - DNA, 20 bp, Artificial Sequence
  Synthetic
agaggggcgctcactaggaa

SEQ ID NO: 27335 - DNA, 20 bp, Artificial Sequence
  Synthetic
aagaggggcgctcactagga

SEQ ID NO: 27336 - DNA, 20 bp, Artificial Sequence
  Synthetic
tagaaagaggggcgctcact

SEQ ID NO: 27337 - DNA, 20 bp, Artificial Sequence
  Synthetic
gttgatgatggtagaaagag

SEQ ID NO: 27338 - DNA, 20 bp, Artificial Sequence
  Synthetic
agttgatgatggtagaaaga

SEQ ID NO: 27339 - DNA, 20 bp, Artificial Sequence
  Synthetic
cagttgatgatggtagaaag

SEQ ID NO: 27340 - DNA, 20 bp, Artificial Sequence
  Synthetic
ctctttctaccatcatcaac

SEQ ID NO: 27341 - DNA, 20 bp, Artificial Sequence
  Synthetic
tctttctaccatcatcaact

SEQ ID NO: 27342 - DNA, 20 bp, Artificial Sequence
  Synthetic
ctaccatcatcaactgggag

SEQ ID NO: 27343 - DNA, 20 bp, Artificial Sequence
  Synthetic
taccatcatcaactgggagc

SEQ ID NO: 27344 - DNA, 20 bp, Artificial Sequence
  Synthetic
ctcccgctcccagttgatga

SEQ ID NO: 27345 - DNA, 20 bp, Artificial Sequence
  Synthetic
gggagcgggagtttgaaatg

SEQ ID NO: 27346 - DNA, 20 bp, Artificial Sequence
  Synthetic
ggagcgggagtttgaaatgt

SEQ ID NO: 27347 - DNA, 20 bp, Artificial Sequence
  Synthetic
taggttacgacatacatgtc

SEQ ID NO: 27348 - DNA, 20 bp, Artificial Sequence
  Synthetic
catgtatgtcgtaacctatg

SEQ ID NO: 27349 - DNA, 20 bp, Artificial Sequence
  Synthetic
atgtatgtcgtaacctatgt

SEQ ID NO: 27350 - DNA, 20 bp, Artificial Sequence
  Synthetic
cgtaacctatgtgggtgaca

SEQ ID NO: 27351 - DNA, 20 bp, Artificial Sequence
  Synthetic
gctgtccttgtcacccacat

SEQ ID NO: 27352 - DNA, 20 bp, Artificial Sequence
  Synthetic
cattctctcggatgatggca

SEQ ID NO: 27353 - DNA, 20 bp, Artificial Sequence
  Synthetic
gaactcattctctcggatga

SEQ ID NO: 27354 - DNA, 20 bp, Artificial Sequence
  Synthetic
caaaggagaactcattctct

SEQ ID NO: 27355 - DNA, 20 bp, Artificial Sequence
  Synthetic
acgaatggcattgtcttcaa

SEQ ID NO: 27356 - DNA, 20 bp, Artificial Sequence
  Synthetic
tttgaagacaatgccattcg

SEQ ID NO: 27357 - DNA, 20 bp, Artificial Sequence
  Synthetic
gaagacaatgccattcgtgg

SEQ ID NO: 27358 - DNA, 20 bp, Artificial Sequence
  Synthetic
tgccattcgtggtggcaaga

SEQ ID NO: 27359 - DNA, 20 bp, Artificial Sequence
  Synthetic
ggccttcttgccaccacgaa

SEQ ID NO: 27360 - DNA, 20 bp, Artificial Sequence
  Synthetic
caagaaggcctcccgcatga

SEQ ID NO: 27361 - DNA, 20 bp, Artificial Sequence
  Synthetic
ctgagataccttcatgcggg

SEQ ID NO: 27362 - DNA, 20 bp, Artificial Sequence
  Synthetic
cccctgagataccttcatgc

SEQ ID NO: 27363 - DNA, 20 bp, Artificial Sequence
  Synthetic
tcccctgagataccttcatg

SEQ ID NO: 27364 - DNA, 20 bp, Artificial Sequence
  Synthetic
ttgccttcatgtgcagaaag

SEQ ID NO: 27365 - DNA, 20 bp, Artificial Sequence
  Synthetic
cataggatgtcagcagcaca

SEQ ID NO: 27366 - DNA, 20 bp, Artificial Sequence
  Synthetic
gtcaatggtgatcaattcat

SEQ ID NO: 27367 - DNA, 20 bp, Artificial Sequence
  Synthetic
tgaattgatcaccattgaca

SEQ ID NO: 27368 - DNA, 20 bp, Artificial Sequence
  Synthetic
caccattgacatggctattt

SEQ ID NO: 27369 - DNA, 20 bp, Artificial Sequence
  Synthetic
accattgacatggctatttt

SEQ ID NO: 27370 - DNA, 20 bp, Artificial Sequence
  Synthetic
gcccaaaatagccatgtcaa

SEQ ID NO: 27371 - DNA, 20 bp, Artificial Sequence
  Synthetic
ctattttgggctctattgat

SEQ ID NO: 27372 - DNA, 20 bp, Artificial Sequence
  Synthetic
tattttgggctctattgatt

SEQ ID NO: 27373 - DNA, 20 bp, Artificial Sequence
  Synthetic
tgattgggcctgcctcatcg

SEQ ID NO: 27374 - DNA, 20 bp, Artificial Sequence
  Synthetic
ggcttcatccacgatgaggc

SEQ ID NO: 27375 - DNA, 20 bp, Artificial Sequence
  Synthetic
gatgggcttcatccacgatg

SEQ ID NO: 27376 - DNA, 20 bp, Artificial Sequence
  Synthetic
tcatcgtggatgaagcccat

SEQ ID NO: 27377 - DNA, 20 bp, Artificial Sequence
  Synthetic
ctgattgttcttcagccgat

SEQ ID NO: 27378 - DNA, 20 bp, Artificial Sequence
  Synthetic
actgattgttcttcagccga

SEQ ID NO: 27379 - DNA, 20 bp, Artificial Sequence
  Synthetic
gctgaagaacaatcagtcta

SEQ ID NO: 27380 - DNA, 20 bp, Artificial Sequence
  Synthetic
atctgcttcaccagttcttc

SEQ ID NO: 27381 - DNA, 20 bp, Artificial Sequence
  Synthetic
tctgcttcaccagttcttcc

SEQ ID NO: 27382 - DNA, 20 bp, Artificial Sequence
  Synthetic
cattcaatacccggaagaac

SEQ ID NO: 27383 - DNA, 20 bp, Artificial Sequence
  Synthetic
cagttcttccgggtattgaa

SEQ ID NO: 27384 - DNA, 20 bp, Artificial Sequence
  Synthetic
gtgagtaaccattcaatacc

SEQ ID NO: 27385 - DNA, 20 bp, Artificial Sequence
  Synthetic
cagtcagcaacagcttgtgc

SEQ ID NO: 27386 - DNA, 20 bp, Artificial Sequence
  Synthetic
cagcacaagctgttgctgac

SEQ ID NO: 27387 - DNA, 20 bp, Artificial Sequence
  Synthetic
agcacaagctgttgctgact

SEQ ID NO: 27388 - DNA, 20 bp, Artificial Sequence
  Synthetic
gacaccattacaaaacaatc

SEQ ID NO: 27389 - DNA, 20 bp, Artificial Sequence
  Synthetic
tcttccagattgttttgtaa

SEQ ID NO: 27390 - DNA, 20 bp, Artificial Sequence
  Synthetic
tcaactttctcacccccgag

SEQ ID NO: 27391 - DNA, 20 bp, Artificial Sequence
  Synthetic
tacttactggaacctctcgg

SEQ ID NO: 27392 - DNA, 20 bp, Artificial Sequence
  Synthetic
atacttactggaacctctcg

SEQ ID NO: 27393 - DNA, 20 bp, Artificial Sequence
  Synthetic
catacttactggaacctctc

SEQ ID NO: 27394 - DNA, 20 bp, Artificial Sequence
  Synthetic
acatacttactggaacctct

SEQ ID NO: 27395 - DNA, 20 bp, Artificial Sequence
  Synthetic
tttttctttctgaagcaatt

SEQ ID NO: 27396 - DNA, 20 bp, Artificial Sequence
  Synthetic
tctttctgaagcaatttgga

SEQ ID NO: 27397 - DNA, 20 bp, Artificial Sequence
  Synthetic
aagcaatttggaaggttttt

SEQ ID NO: 27398 - DNA, 20 bp, Artificial Sequence
  Synthetic
caatttggaaggttttttgg

SEQ ID NO: 27399 - DNA, 20 bp, Artificial Sequence
  Synthetic
ggagtttgctgacattgcca

SEQ ID NO: 27400 - DNA, 20 bp, Artificial Sequence
  Synthetic
gtttgctgacattgccaagg

SEQ ID NO: 27401 - DNA, 20 bp, Artificial Sequence
  Synthetic
tttttttatctggtcctcct

SEQ ID NO: 27402 - DNA, 20 bp, Artificial Sequence
  Synthetic
tgtcatgcagtttttttatc

SEQ ID NO: 27403 - DNA, 20 bp, Artificial Sequence
  Synthetic
aaaaaaactgcatgacatgc

SEQ ID NO: 27404 - DNA, 20 bp, Artificial Sequence
  Synthetic
aaaaaactgcatgacatgct

SEQ ID NO: 27405 - DNA, 20 bp, Artificial Sequence
  Synthetic
aaaaactgcatgacatgctg

SEQ ID NO: 27406 - DNA, 20 bp, Artificial Sequence
  Synthetic
tgctggggccgcacatgttg

SEQ ID NO: 27407 - DNA, 20 bp, Artificial Sequence
  Synthetic
tggggccgcacatgttgcgg

SEQ ID NO: 27408 - DNA, 20 bp, Artificial Sequence
  Synthetic
ttgagccgccgcaacatgtg

SEQ ID NO: 27409 - DNA, 20 bp, Artificial Sequence
  Synthetic
gggcatgttcttgaacacat

SEQ ID NO: 27410 - DNA, 20 bp, Artificial Sequence
  Synthetic
acaattagttctgtcttgga

SEQ ID NO: 27411 - DNA, 20 bp, Artificial Sequence
  Synthetic
cacaattagttctgtcttgg

SEQ ID NO: 27412 - DNA, 20 bp, Artificial Sequence
  Synthetic
acgcacaattagttctgtct

SEQ ID NO: 27413 - DNA, 20 bp, Artificial Sequence
  Synthetic
gacagaactaattgtgcgtg

SEQ ID NO: 27414 - DNA, 20 bp, Artificial Sequence
  Synthetic
tcccaactcacttctgcata

SEQ ID NO: 27415 - DNA, 20 bp, Artificial Sequence
  Synthetic
ctcccaactcacttctgcat

SEQ ID NO: 27416 - DNA, 20 bp, Artificial Sequence
  Synthetic
gtgcttcaaaatttcgagtg

SEQ ID NO: 27417 - DNA, 20 bp, Artificial Sequence
  Synthetic
tttgaagcactcaatgcccg

SEQ ID NO: 27418 - DNA, 20 bp, Artificial Sequence
  Synthetic
gaagcactcaatgcccgagg

SEQ ID NO: 27419 - DNA, 20 bp, Artificial Sequence
  Synthetic
gcactcaatgcccgaggtgg

SEQ ID NO: 27420 - DNA, 20 bp, Artificial Sequence
  Synthetic
tgcccgaggtggtggcaacc

SEQ ID NO: 27421 - DNA, 20 bp, Artificial Sequence
  Synthetic
cacctggttgccaccacctc

SEQ ID NO: 27422 - DNA, 20 bp, Artificial Sequence
  Synthetic
acacctggttgccaccacct

SEQ ID NO: 27423 - DNA, 20 bp, Artificial Sequence
  Synthetic
ccacattcagcagagacacc

SEQ ID NO: 27424 - DNA, 20 bp, Artificial Sequence
  Synthetic
ccaggtgtctctgctgaatg

SEQ ID NO: 27425 - DNA, 20 bp, Artificial Sequence
  Synthetic
gtctctgctgaatgtggtga

SEQ ID NO: 27426 - DNA, 20 bp, Artificial Sequence
  Synthetic
ccacagggaagaggtatgga

SEQ ID NO: 27427 - DNA, 20 bp, Artificial Sequence
  Synthetic
gcagccacagggaagaggta

SEQ ID NO: 27428 - DNA, 20 bp, Artificial Sequence
  Synthetic
ccattgcagccacagggaag

SEQ ID NO: 27429 - DNA, 20 bp, Artificial Sequence
  Synthetic
tccaccgaatcctcaaccac

SEQ ID NO: 27430 - DNA, 20 bp, Artificial Sequence
  Synthetic
acctgtggttgaggattcgg

SEQ ID NO: 27431 - DNA, 20 bp, Artificial Sequence
  Synthetic
ggtacctgtggttgaggatt

SEQ ID NO: 27432 - DNA, 20 bp, Artificial Sequence
  Synthetic
tcagctggtacctgtggttg

SEQ ID NO: 27433 - DNA, 20 bp, Artificial Sequence
  Synthetic
gtgtgctcagctggtacctg

SEQ ID NO: 27434 - DNA, 20 bp, Artificial Sequence
  Synthetic
gacttgcagtgtggacaaga

SEQ ID NO: 27435 - DNA, 20 bp, Artificial Sequence
  Synthetic
acttgcagtgtggacaagaa

SEQ ID NO: 27436 - DNA, 20 bp, Artificial Sequence
  Synthetic
acttgatcaagtagtggacg

SEQ ID NO: 27437 - DNA, 20 bp, Artificial Sequence
  Synthetic
acgtccactacttgatcaag

SEQ ID NO: 27438 - DNA, 20 bp, Artificial Sequence
  Synthetic
tccactacttgatcaagtgg

SEQ ID NO: 27439 - DNA, 20 bp, Artificial Sequence
  Synthetic
cccgccacttgatcaagtag

SEQ ID NO: 27440 - DNA, 20 bp, Artificial Sequence
  Synthetic
ccactacttgatcaagtggc

SEQ ID NO: 27441 - DNA, 20 bp, Artificial Sequence
  Synthetic
gcgggacttaccttacgatc

SEQ ID NO: 27442 - DNA, 20 bp, Artificial Sequence
  Synthetic
taccttacgatcaggcttct

SEQ ID NO: 27443 - DNA, 20 bp, Artificial Sequence
  Synthetic
accttacgatcaggcttctt

SEQ ID NO: 27444 - DNA, 20 bp, Artificial Sequence
  Synthetic
tcccaagaagcctgatcgta

SEQ ID NO: 27445 - DNA, 20 bp, Artificial Sequence
  Synthetic
tcaggcttcttgggagagtg

SEQ ID NO: 27446 - DNA, 20 bp, Artificial Sequence
  Synthetic
ttcttgggagagtgaggatg

SEQ ID NO: 27447 - DNA, 20 bp, Artificial Sequence
  Synthetic
gagtgaggatgtggagatcc

SEQ ID NO: 27448 - DNA, 20 bp, Artificial Sequence
  Synthetic
gcttgaacaggtcgtaatcc

SEQ ID NO: 27449 - DNA, 20 bp, Artificial Sequence
  Synthetic
tccaatagctctgcttgaac

SEQ ID NO: 27450 - DNA, 20 bp, Artificial Sequence
  Synthetic
ccttggaggggcggccagag

SEQ ID NO: 27451 - DNA, 20 bp, Artificial Sequence
  Synthetic
ttcacaaagaactgccgctc

SEQ ID NO: 27452 - DNA, 20 bp, Artificial Sequence
  Synthetic
agcggcagttctttgtgaaa

SEQ ID NO: 27453 - DNA, 20 bp, Artificial Sequence
  Synthetic
cagttctttgtgaaatggca

SEQ ID NO: 27454 - DNA, 20 bp, Artificial Sequence
  Synthetic
aatggcaaggcatgtcttac

SEQ ID NO: 27455 - DNA, 20 bp, Artificial Sequence
  Synthetic
tgtcttactggcactgctcc

SEQ ID NO: 27456 - DNA, 20 bp, Artificial Sequence
  Synthetic
gtcttactggcactgctcct

SEQ ID NO: 27457 - DNA, 20 bp, Artificial Sequence
  Synthetic
ctcctgggtttctgaactgc

SEQ ID NO: 27458 - DNA, 20 bp, Artificial Sequence
  Synthetic
tacctgcagttcagaaaccc

SEQ ID NO: 27459 - DNA, 20 bp, Artificial Sequence
  Synthetic
aaagctggagctgcactgtc

SEQ ID NO: 27460 - DNA, 20 bp, Artificial Sequence
  Synthetic
cattcttccgctgatagttt

SEQ ID NO: 27461 - DNA, 20 bp, Artificial Sequence
  Synthetic
accaccatatggaattctgt

SEQ ID NO: 27462 - DNA, 20 bp, Artificial Sequence
  Synthetic
ccaccatatggaattctgtc

SEQ ID NO: 27463 - DNA, 20 bp, Artificial Sequence
  Synthetic
ggaattctgtcgggtctgca

SEQ ID NO: 27464 - DNA, 20 bp, Artificial Sequence
  Synthetic
ttctgtcgggtctgcaagga

SEQ ID NO: 27465 - DNA, 20 bp, Artificial Sequence
  Synthetic
tgtcgggtctgcaaggatgg

SEQ ID NO: 27466 - DNA, 20 bp, Artificial Sequence
  Synthetic
gtcgggtctgcaaggatggt

SEQ ID NO: 27467 - DNA, 20 bp, Artificial Sequence
  Synthetic
tcgggtctgcaaggatggtg

SEQ ID NO: 27468 - DNA, 20 bp, Artificial Sequence
  Synthetic
gatgtggtaggaagaaggac

SEQ ID NO: 27469 - DNA, 20 bp, Artificial Sequence
  Synthetic
cagtggatgtggtaggaaga

SEQ ID NO: 27470 - DNA, 20 bp, Artificial Sequence
  Synthetic
attcaggcagtggatgtggt

SEQ ID NO: 27471 - DNA, 20 bp, Artificial Sequence
  Synthetic
ggggattcaggcagtggatg

SEQ ID NO: 27472 - DNA, 20 bp, Artificial Sequence
  Synthetic
gaagtgggggattcaggcag

SEQ ID NO: 27473 - DNA, 20 bp, Artificial Sequence
  Synthetic
tctctggaagtgggggattc

SEQ ID NO: 27474 - DNA, 20 bp, Artificial Sequence
  Synthetic
ttggggatctctggaagtgg

SEQ ID NO: 27475 - DNA, 20 bp, Artificial Sequence
  Synthetic
gttggggatctctggaagtg

SEQ ID NO: 27476 - DNA, 20 bp, Artificial Sequence
  Synthetic
cgttggggatctctggaagt

SEQ ID NO: 27477 - DNA, 20 bp, Artificial Sequence
  Synthetic
ccgttggggatctctggaag

SEQ ID NO: 27478 - DNA, 20 bp, Artificial Sequence
  Synthetic
ccacttccagagatccccaa

SEQ ID NO: 27479 - DNA, 20 bp, Artificial Sequence
  Synthetic
cattcaccgttggggatctc

SEQ ID NO: 27480 - DNA, 20 bp, Artificial Sequence
  Synthetic
cagagatccccaacggtgaa

SEQ ID NO: 27481 - DNA, 20 bp, Artificial Sequence
  Synthetic
gacagagccattcaccgttg

SEQ ID NO: 27482 - DNA, 20 bp, Artificial Sequence
  Synthetic
ggacagagccattcaccgtt

SEQ ID NO: 27483 - DNA, 20 bp, Artificial Sequence
  Synthetic
gggacagagccattcaccgt

SEQ ID NO: 27484 - DNA, 20 bp, Artificial Sequence
  Synthetic
atggctctgtccccgttgta

SEQ ID NO: 27485 - DNA, 20 bp, Artificial Sequence
  Synthetic
cagtcactcaccgtacaacg

SEQ ID NO: 27486 - DNA, 20 bp, Artificial Sequence
  Synthetic
tcagtcactcaccgtacaac

SEQ ID NO: 27487 - DNA, 20 bp, Artificial Sequence
  Synthetic
atcagtcactcaccgtacaa

SEQ ID NO: 27488 - DNA, 20 bp, Artificial Sequence
  Synthetic
agaccaccaggactattgcg

SEQ ID NO: 27489 - DNA, 20 bp, Artificial Sequence
  Synthetic
tattgcgaggtgtgccagca

SEQ ID NO: 27490 - DNA, 20 bp, Artificial Sequence
  Synthetic
tgcgaggtgtgccagcaagg

SEQ ID NO: 27491 - DNA, 20 bp, Artificial Sequence
  Synthetic
ggatgatctcaccgccttgc

SEQ ID NO: 27492 - DNA, 20 bp, Artificial Sequence
  Synthetic
cacggggacaggtatcacac

SEQ ID NO: 27493 - DNA, 20 bp, Artificial Sequence
  Synthetic
catgtggtaagcacggggac

SEQ ID NO: 27494 - DNA, 20 bp, Artificial Sequence
  Synthetic
ctgtccccgtgcttaccaca

SEQ ID NO: 27495 - DNA, 20 bp, Artificial Sequence
  Synthetic
cagaccatgtggtaagcacg

SEQ ID NO: 27496 - DNA, 20 bp, Artificial Sequence
  Synthetic
gcagaccatgtggtaagcac

SEQ ID NO: 27497 - DNA, 20 bp, Artificial Sequence
  Synthetic
ggcagaccatgtggtaagca

SEQ ID NO: 27498 - DNA, 20 bp, Artificial Sequence
  Synthetic
tgcttaccacatggtctgcc

SEQ ID NO: 27499 - DNA, 20 bp, Artificial Sequence
  Synthetic
cgggatccaggcagaccatg

SEQ ID NO: 27500 - DNA, 20 bp, Artificial Sequence
  Synthetic
ggtctgcctggatcccgaca

SEQ ID NO: 27501 - DNA, 20 bp, Artificial Sequence
  Synthetic
ccttctccatgtcgggatcc

SEQ ID NO: 27502 - DNA, 20 bp, Artificial Sequence
  Synthetic
cctggatcccgacatggaga

SEQ ID NO: 27503 - DNA, 20 bp, Artificial Sequence
  Synthetic
tcgggagccttctccatgtc

SEQ ID NO: 27504 - DNA, 20 bp, Artificial Sequence
  Synthetic
ctcgggagccttctccatgt

SEQ ID NO: 27505 - DNA, 20 bp, Artificial Sequence
  Synthetic
cgacatggagaaggctcccg

SEQ ID NO: 27506 - DNA, 20 bp, Artificial Sequence
  Synthetic
gacatggagaaggctcccga

SEQ ID NO: 27507 - DNA, 20 bp, Artificial Sequence
  Synthetic
agaaggctcccgagggcaag

SEQ ID NO: 27508 - DNA, 20 bp, Artificial Sequence
  Synthetic
gggcagctccacttgccctc

SEQ ID NO: 27509 - DNA, 20 bp, Artificial Sequence
  Synthetic
tgggcagctccacttgccct

SEQ ID NO: 27510 - DNA, 20 bp, Artificial Sequence
  Synthetic
gccagacactcacgcagtgt

SEQ ID NO: 27511 - DNA, 20 bp, Artificial Sequence
  Synthetic
ggccagacactcacgcagtg

SEQ ID NO: 27512 - DNA, 20 bp, Artificial Sequence
  Synthetic
tggtcctttactgcaggaga

SEQ ID NO: 27513 - DNA, 20 bp, Artificial Sequence
  Synthetic
cctttactgcaggagaagga

SEQ ID NO: 27514 - DNA, 20 bp, Artificial Sequence
  Synthetic
cacactgcacccgtaccagc

SEQ ID NO: 27515 - DNA, 20 bp, Artificial Sequence
  Synthetic
actgcacccgtaccagctgg

SEQ ID NO: 27516 - DNA, 20 bp, Artificial Sequence
  Synthetic
ctgcacccgtaccagctgga

SEQ ID NO: 27517 - DNA, 20 bp, Artificial Sequence
  Synthetic
tgaggccctccagctggtac

SEQ ID NO: 27518 - DNA, 20 bp, Artificial Sequence
  Synthetic
ttgaggccctccagctggta

SEQ ID NO: 27519 - DNA, 20 bp, Artificial Sequence
  Synthetic
accagctggagggcctcaac

SEQ ID NO: 27520 - DNA, 20 bp, Artificial Sequence
  Synthetic
gccagttgaggccctccagc

SEQ ID NO: 27521 - DNA, 20 bp, Artificial Sequence
  Synthetic
aagagaagcgcagccagttg

SEQ ID NO: 27522 - DNA, 20 bp, Artificial Sequence
  Synthetic
tcaactggctgcgcttctct

SEQ ID NO: 27523 - DNA, 20 bp, Artificial Sequence
  Synthetic
caactggctgcgcttctctt

SEQ ID NO: 27524 - DNA, 20 bp, Artificial Sequence
  Synthetic
gctgcgcttctcttgggccc

SEQ ID NO: 27525 - DNA, 20 bp, Artificial Sequence
  Synthetic
ctgcgcttctcttgggccca

SEQ ID NO: 27526 - DNA, 20 bp, Artificial Sequence
  Synthetic
caggatggtgtcagtgccct

SEQ ID NO: 27527 - DNA, 20 bp, Artificial Sequence
  Synthetic
ccaggatggtgtcagtgccc

SEQ ID NO: 27528 - DNA, 20 bp, Artificial Sequence
  Synthetic
ccagggcactgacaccatcc

SEQ ID NO: 27529 - DNA, 20 bp, Artificial Sequence
  Synthetic
caccatcctggccgatgaga

SEQ ID NO: 27530 - DNA, 20 bp, Artificial Sequence
  Synthetic
accatcctggccgatgagat

SEQ ID NO: 27531 - DNA, 20 bp, Artificial Sequence
  Synthetic
acccatctcatcggccagga

SEQ ID NO: 27532 - DNA, 20 bp, Artificial Sequence
  Synthetic
ccagacccatctcatcggcc

SEQ ID NO: 27533 - DNA, 20 bp, Artificial Sequence
  Synthetic
cctggccgatgagatgggtc

SEQ ID NO: 27534 - DNA, 20 bp, Artificial Sequence
  Synthetic
ctggccgatgagatgggtct

SEQ ID NO: 27535 - DNA, 20 bp, Artificial Sequence
  Synthetic
cttgcccagacccatctcat

SEQ ID NO: 27536 - DNA, 20 bp, Artificial Sequence
  Synthetic
tgagatgggtctgggcaaga

SEQ ID NO: 27537 - DNA, 20 bp, Artificial Sequence
  Synthetic
gagggagtaaaggaacacga

SEQ ID NO: 27538 - DNA, 20 bp, Artificial Sequence
  Synthetic
gttcctttactccctctaca

SEQ ID NO: 27539 - DNA, 20 bp, Artificial Sequence
  Synthetic
cctccttgtagagggagtaa

SEQ ID NO: 27540 - DNA, 20 bp, Artificial Sequence
  Synthetic
cctttactccctctacaagg

SEQ ID NO: 27541 - DNA, 20 bp, Artificial Sequence
  Synthetic
ttactccctctacaaggagg

SEQ ID NO: 27542 - DNA, 20 bp, Artificial Sequence
  Synthetic
tactccctctacaaggaggt

SEQ ID NO: 27543 - DNA, 20 bp, Artificial Sequence
  Synthetic
cctgcccacctccttgtaga

SEQ ID NO: 27544 - DNA, 20 bp, Artificial Sequence
  Synthetic
gcctgcccacctccttgtag

SEQ ID NO: 27545 - DNA, 20 bp, Artificial Sequence
  Synthetic
tctctccagggccactccaa

SEQ ID NO: 27546 - DNA, 20 bp, Artificial Sequence
  Synthetic
ctctccagggccactccaaa

SEQ ID NO: 27547 - DNA, 20 bp, Artificial Sequence
  Synthetic
agggccctttggagtggccc

SEQ ID NO: 27548 - DNA, 20 bp, Artificial Sequence
  Synthetic
ccaggtagggccctttggag

SEQ ID NO: 27549 - DNA, 20 bp, Artificial Sequence
  Synthetic
ccactccaaagggccctacc

SEQ ID NO: 27550 - DNA, 20 bp, Artificial Sequence
  Synthetic
gctaaccaggtagggccctt

SEQ ID NO: 27551 - DNA, 20 bp, Artificial Sequence
  Synthetic
aggggcgcgctaaccaggta

SEQ ID NO: 27552 - DNA, 20 bp, Artificial Sequence
  Synthetic
gaggggcgcgctaaccaggt

SEQ ID NO: 27553 - DNA, 20 bp, Artificial Sequence
  Synthetic
tggagaggggcgcgctaacc

SEQ ID NO: 27554 - DNA, 20 bp, Artificial Sequence
  Synthetic
cagttgatgatggtggagag

SEQ ID NO: 27555 - DNA, 20 bp, Artificial Sequence
  Synthetic
ccagttgatgatggtggaga

SEQ ID NO: 27556 - DNA, 20 bp, Artificial Sequence
  Synthetic
ccctctccaccatcatcaac

SEQ ID NO: 27557 - DNA, 20 bp, Artificial Sequence
  Synthetic
cccagttgatgatggtggag

SEQ ID NO: 27558 - DNA, 20 bp, Artificial Sequence
  Synthetic
cctctccaccatcatcaact

SEQ ID NO: 27559 - DNA, 20 bp, Artificial Sequence
  Synthetic
gcgttcccagttgatgatgg

SEQ ID NO: 27560 - DNA, 20 bp, Artificial Sequence
  Synthetic
ctcgcgttcccagttgatga

SEQ ID NO: 27561 - DNA, 20 bp, Artificial Sequence
  Synthetic
gggaacgcgagtttgagatg

SEQ ID NO: 27562 - DNA, 20 bp, Artificial Sequence
  Synthetic
ggaacgcgagtttgagatgt

SEQ ID NO: 27563 - DNA, 20 bp, Artificial Sequence
  Synthetic
gtgggcgcccgacttctacg

SEQ ID NO: 27564 - DNA, 20 bp, Artificial Sequence
  Synthetic
taggtgaccacgtagaagtc

SEQ ID NO: 27565 - DNA, 20 bp, Artificial Sequence
  Synthetic
gtaggtgaccacgtagaagt

SEQ ID NO: 27566 - DNA, 20 bp, Artificial Sequence
  Synthetic
cttctacgtggtcacctaca

SEQ ID NO: 27567 - DNA, 20 bp, Artificial Sequence
  Synthetic
ttctacgtggtcacctacac

SEQ ID NO: 27568 - DNA, 20 bp, Artificial Sequence
  Synthetic
tctacgtggtcacctacacg

SEQ ID NO: 27569 - DNA, 20 bp, Artificial Sequence
  Synthetic
ctacgtggtcacctacacgg

SEQ ID NO: 27570 - DNA, 20 bp, Artificial Sequence
  Synthetic
ggtcacctacacgggggaca

SEQ ID NO: 27571 - DNA, 20 bp, Artificial Sequence
  Synthetic
gctctccttgtcccccgtgt

SEQ ID NO: 27572 - DNA, 20 bp, Artificial Sequence
  Synthetic
gggggacaaggagagccgct

SEQ ID NO: 27573 - DNA, 20 bp, Artificial Sequence
  Synthetic
aggagagccgctcggtgatt

SEQ ID NO: 27574 - DNA, 20 bp, Artificial Sequence
  Synthetic
ggagagccgctcggtgattc

SEQ ID NO: 27575 - DNA, 20 bp, Artificial Sequence
  Synthetic
cgttctcccgaatcaccgag

SEQ ID NO: 27576 - DNA, 20 bp, Artificial Sequence
  Synthetic
ggagaacgagttttcctttg

SEQ ID NO: 27577 - DNA, 20 bp, Artificial Sequence
  Synthetic
ccgaatggcgttgtcctcaa

SEQ ID NO: 27578 - DNA, 20 bp, Artificial Sequence
  Synthetic
cctttgaggacaacgccatt

SEQ ID NO: 27579 - DNA, 20 bp, Artificial Sequence
  Synthetic
gaggacaacgccattcggag

SEQ ID NO: 27580 - DNA, 20 bp, Artificial Sequence
  Synthetic
aggacaacgccattcggagt

SEQ ID NO: 27581 - DNA, 20 bp, Artificial Sequence
  Synthetic
cgccattcggagtgggaaga

SEQ ID NO: 27582 - DNA, 20 bp, Artificial Sequence
  Synthetic
taccttcttcccactccgaa

SEQ ID NO: 27583 - DNA, 20 bp, Artificial Sequence
  Synthetic
gaagaaggtattccgtatga

SEQ ID NO: 27584 - DNA, 20 bp, Artificial Sequence
  Synthetic
agcgagccctcaccttcata

SEQ ID NO: 27585 - DNA, 20 bp, Artificial Sequence
  Synthetic
atttgatctgcacttctttc

SEQ ID NO: 27586 - DNA, 20 bp, Artificial Sequence
  Synthetic
cataggaggtgagcagcacg

SEQ ID NO: 27587 - DNA, 20 bp, Artificial Sequence
  Synthetic
aatggtgatgagctcatagg

SEQ ID NO: 27588 - DNA, 20 bp, Artificial Sequence
  Synthetic
gtcaatggtgatgagctcat

SEQ ID NO: 27589 - DNA, 20 bp, Artificial Sequence
  Synthetic
tgagctcatcaccattgacc

SEQ ID NO: 27590 - DNA, 20 bp, Artificial Sequence
  Synthetic
caccattgaccaggccatcc

SEQ ID NO: 27591 - DNA, 20 bp, Artificial Sequence
  Synthetic
accattgaccaggccatcct

SEQ ID NO: 27592 - DNA, 20 bp, Artificial Sequence
  Synthetic
gcccaggatggcctggtcaa

SEQ ID NO: 27593 - DNA, 20 bp, Artificial Sequence
  Synthetic
cgatggagcccaggatggcc

SEQ ID NO: 27594 - DNA, 20 bp, Artificial Sequence
  Synthetic
ccactcgatggagcccagga

SEQ ID NO: 27595 - DNA, 20 bp, Artificial Sequence
  Synthetic
ccatcctgggctccatcgag

SEQ ID NO: 27596 - DNA, 20 bp, Artificial Sequence
  Synthetic
catcctgggctccatcgagt

SEQ ID NO: 27597 - DNA, 20 bp, Artificial Sequence
  Synthetic
aggcccactcgatggagccc

SEQ ID NO: 27598 - DNA, 20 bp, Artificial Sequence
  Synthetic
ctccatcgagtgggcctgcc

SEQ ID NO: 27599 - DNA, 20 bp, Artificial Sequence
  Synthetic
caccaggcaggcccactcga

SEQ ID NO: 27600 - DNA, 20 bp, Artificial Sequence
  Synthetic
catcgagtgggcctgcctgg

SEQ ID NO: 27601 - DNA, 20 bp, Artificial Sequence
  Synthetic
ggcctgcctggtggtagatg

SEQ ID NO: 27602 - DNA, 20 bp, Artificial Sequence
  Synthetic
ggcctcatctaccaccaggc

SEQ ID NO: 27603 - DNA, 20 bp, Artificial Sequence
  Synthetic
ggtgggcctcatctaccacc

SEQ ID NO: 27604 - DNA, 20 bp, Artificial Sequence
  Synthetic
ctggttgttcttgaggcggt

SEQ ID NO: 27605 - DNA, 20 bp, Artificial Sequence
  Synthetic
actggttgttcttgaggcgg

SEQ ID NO: 27606 - DNA, 20 bp, Artificial Sequence
  Synthetic
tggactggttgttcttgagg

SEQ ID NO: 27607 - DNA, 20 bp, Artificial Sequence
  Synthetic
ccttggactggttgttcttg

SEQ ID NO: 27608 - DNA, 20 bp, Artificial Sequence
  Synthetic
cctcaagaacaaccagtcca

SEQ ID NO: 27609 - DNA, 20 bp, Artificial Sequence
  Synthetic
aagaacaaccagtccaaggt

SEQ ID NO: 27610 - DNA, 20 bp, Artificial Sequence
  Synthetic
cagcgccacctaccttggac

SEQ ID NO: 27611 - DNA, 20 bp, Artificial Sequence
  Synthetic
tctcctcccctcagtttttt

SEQ ID NO: 27612 - DNA, 20 bp, Artificial Sequence
  Synthetic
ctcctcccctcagtttttta

SEQ ID NO: 27613 - DNA, 20 bp, Artificial Sequence
  Synthetic
gattacaagctgctgctgac

SEQ ID NO: 27614 - DNA, 20 bp, Artificial Sequence
  Synthetic
attacaagctgctgctgaca

SEQ ID NO: 27615 - DNA, 20 bp, Artificial Sequence
  Synthetic
gaccccccttcagaacaacc

SEQ ID NO: 27616 - DNA, 20 bp, Artificial Sequence
  Synthetic
ctccaggttgttctgaaggg

SEQ ID NO: 27617 - DNA, 20 bp, Artificial Sequence
  Synthetic
cctccaggttgttctgaagg

SEQ ID NO: 27618 - DNA, 20 bp, Artificial Sequence
  Synthetic
cccccttcagaacaacctgg

SEQ ID NO: 27619 - DNA, 20 bp, Artificial Sequence
  Synthetic
tcctccaggttgttctgaag

SEQ ID NO: 27620 - DNA, 20 bp, Artificial Sequence
  Synthetic
ctcctccaggttgttctgaa

SEQ ID NO: 27621 - DNA, 20 bp, Artificial Sequence
  Synthetic
gctcctccaggttgttctga

SEQ ID NO: 27622 - DNA, 20 bp, Artificial Sequence
  Synthetic
ggagatggaacagctcctcc

SEQ ID NO: 27623 - DNA, 20 bp, Artificial Sequence
  Synthetic
gagtcaggaagttgaggaga

SEQ ID NO: 27624 - DNA, 20 bp, Artificial Sequence
  Synthetic
tctctggagtcaggaagttg

SEQ ID NO: 27625 - DNA, 20 bp, Artificial Sequence
  Synthetic
tcaacttcctgactccagag

SEQ ID NO: 27626 - DNA, 20 bp, Artificial Sequence
  Synthetic
acttgaacctctctggagtc

SEQ ID NO: 27627 - DNA, 20 bp, Artificial Sequence
  Synthetic
gtgactcacttgaacctctc

SEQ ID NO: 27628 - DNA, 20 bp, Artificial Sequence
  Synthetic
agctttttgttgcagcaacc

SEQ ID NO: 27629 - DNA, 20 bp, Artificial Sequence
  Synthetic
tttttgttgcagcaacctgg

SEQ ID NO: 27630 - DNA, 20 bp, Artificial Sequence
  Synthetic
ttttgttgcagcaacctgga

SEQ ID NO: 27631 - DNA, 20 bp, Artificial Sequence
  Synthetic
cagcaacctggagggcttcc

SEQ ID NO: 27632 - DNA, 20 bp, Artificial Sequence
  Synthetic
caacctggagggcttcctgg

SEQ ID NO: 27633 - DNA, 20 bp, Artificial Sequence
  Synthetic
actcctccaggaagccctcc

SEQ ID NO: 27634 - DNA, 20 bp, Artificial Sequence
  Synthetic
agatgtcagcaaactcctcc

SEQ ID NO: 27635 - DNA, 20 bp, Artificial Sequence
  Synthetic
ggagtttgctgacatctcca

SEQ ID NO: 27636 - DNA, 20 bp, Artificial Sequence
  Synthetic
cttcttgatctggtcttcct

SEQ ID NO: 27637 - DNA, 20 bp, Artificial Sequence
  Synthetic
ggtcatgcagcttcttgatc

SEQ ID NO: 27638 - DNA, 20 bp, Artificial Sequence
  Synthetic
caagaagctgcatgacctgc

SEQ ID NO: 27639 - DNA, 20 bp, Artificial Sequence
  Synthetic
aagaagctgcatgacctgct

SEQ ID NO: 27640 - DNA, 20 bp, Artificial Sequence
  Synthetic
agaagctgcatgacctgctg

SEQ ID NO: 27641 - DNA, 20 bp, Artificial Sequence
  Synthetic
tgagcatgtgcggccccagc

SEQ ID NO: 27642 - DNA, 20 bp, Artificial Sequence
  Synthetic
tgctggggccgcacatgctc

SEQ ID NO: 27643 - DNA, 20 bp, Artificial Sequence
  Synthetic
tggggccgcacatgctcagg

SEQ ID NO: 27644 - DNA, 20 bp, Artificial Sequence
  Synthetic
ttgagccgcctgagcatgtg

SEQ ID NO: 27645 - DNA, 20 bp, Artificial Sequence
  Synthetic
gcacatgctcaggcggctca

SEQ ID NO: 27646 - DNA, 20 bp, Artificial Sequence
  Synthetic
tgacgtgttcaagaacatgc

SEQ ID NO: 27647 - DNA, 20 bp, Artificial Sequence
  Synthetic
acaatgagctcggtcttggc

SEQ ID NO: 27648 - DNA, 20 bp, Artificial Sequence
  Synthetic
ccggacaatgagctcggtct

SEQ ID NO: 27649 - DNA, 20 bp, Artificial Sequence
  Synthetic
ccaagaccgagctcattgtc

SEQ ID NO: 27650 - DNA, 20 bp, Artificial Sequence
  Synthetic
caagaccgagctcattgtcc

SEQ ID NO: 27651 - DNA, 20 bp, Artificial Sequence
  Synthetic
gaccgagctcattgtccggg

SEQ ID NO: 27652 - DNA, 20 bp, Artificial Sequence
  Synthetic
ctccacccggacaatgagct

SEQ ID NO: 27653 - DNA, 20 bp, Artificial Sequence
  Synthetic
gcatctggctcagctccacc

SEQ ID NO: 27654 - DNA, 20 bp, Artificial Sequence
  Synthetic
ccatcactcacttctgcatc

SEQ ID NO: 27655 - DNA, 20 bp, Artificial Sequence
  Synthetic
actacaagttcatcctcaca

SEQ ID NO: 27656 - DNA, 20 bp, Artificial Sequence
  Synthetic
catcctcacacggaactttg

SEQ ID NO: 27657 - DNA, 20 bp, Artificial Sequence
  Synthetic
gtgcctcaaagttccgtgtg

SEQ ID NO: 27658 - DNA, 20 bp, Artificial Sequence
  Synthetic
ctttgaggcactgaactcca

SEQ ID NO: 27659 - DNA, 20 bp, Artificial Sequence
  Synthetic
tttgaggcactgaactccaa

SEQ ID NO: 27660 - DNA, 20 bp, Artificial Sequence
  Synthetic
ttgaggcactgaactccaag

SEQ ID NO: 27661 - DNA, 20 bp, Artificial Sequence
  Synthetic
tgaggcactgaactccaagg

SEQ ID NO: 27662 - DNA, 20 bp, Artificial Sequence
  Synthetic
gaggcactgaactccaaggg

SEQ ID NO: 27663 - DNA, 20 bp, Artificial Sequence
  Synthetic
gcactgaactccaagggggg

SEQ ID NO: 27664 - DNA, 20 bp, Artificial Sequence
  Synthetic
cactgaactccaaggggggc

SEQ ID NO: 27665 - DNA, 20 bp, Artificial Sequence
  Synthetic
tacttggttcccgcccccct

SEQ ID NO: 27666 - DNA, 20 bp, Artificial Sequence
  Synthetic
tgatgttgagcagcgatact

SEQ ID NO: 27667 - DNA, 20 bp, Artificial Sequence
  Synthetic
atcgctgctcaacatcatga

SEQ ID NO: 27668 - DNA, 20 bp, Artificial Sequence
  Synthetic
ggtggttgcagcactttttc

SEQ ID NO: 27669 - DNA, 20 bp, Artificial Sequence
  Synthetic
ccacagggaagaggtagggg

SEQ ID NO: 27670 - DNA, 20 bp, Artificial Sequence
  Synthetic
cagccacagggaagaggtag

SEQ ID NO: 27671 - DNA, 20 bp, Artificial Sequence
  Synthetic
gcagccacagggaagaggta

SEQ ID NO: 27672 - DNA, 20 bp, Artificial Sequence
  Synthetic
ggcagccacagggaagaggt

SEQ ID NO: 27673 - DNA, 20 bp, Artificial Sequence
  Synthetic
ccacggcagccacagggaag

SEQ ID NO: 27674 - DNA, 20 bp, Artificial Sequence
  Synthetic
ttcaccgaatcctgaaccat

SEQ ID NO: 27675 - DNA, 20 bp, Artificial Sequence
  Synthetic
cacacctatggttcaggatt

SEQ ID NO: 27676 - DNA, 20 bp, Artificial Sequence
  Synthetic
caggcacacacctatggttc

SEQ ID NO: 27677 - DNA, 20 bp, Artificial Sequence
  Synthetic
cgcctgcaggcacacaccta

SEQ ID NO: 27678 - DNA, 20 bp, Artificial Sequence
  Synthetic
gtgttgcagctttgacaaga

SEQ ID NO: 27679 - DNA, 20 bp, Artificial Sequence
  Synthetic
tgttgcagctttgacaagaa

SEQ ID NO: 27680 - DNA, 20 bp, Artificial Sequence
  Synthetic
gttgcagctttgacaagaag

SEQ ID NO: 27681 - DNA, 20 bp, Artificial Sequence
  Synthetic
ttgcagctttgacaagaagg

SEQ ID NO: 27682 - DNA, 20 bp, Artificial Sequence
  Synthetic
atgtgcactacctgatcaag

SEQ ID NO: 27683 - DNA, 20 bp, Artificial Sequence
  Synthetic
gcaggtctttccacttgatc

SEQ ID NO: 27684 - DNA, 20 bp, Artificial Sequence
  Synthetic
aggtgcactggtcgtagggc

SEQ ID NO: 27685 - DNA, 20 bp, Artificial Sequence
  Synthetic
tgccctacgaccagtgcacc

SEQ ID NO: 27686 - DNA, 20 bp, Artificial Sequence
  Synthetic
gccctacgaccagtgcacct

SEQ ID NO: 27687 - DNA, 20 bp, Artificial Sequence
  Synthetic
tcccaggtgcactggtcgta

SEQ ID NO: 27688 - DNA, 20 bp, Artificial Sequence
  Synthetic
ctcccaggtgcactggtcgt

SEQ ID NO: 27689 - DNA, 20 bp, Artificial Sequence
  Synthetic
catcgatctcccaggtgcac

SEQ ID NO: 27690 - DNA, 20 bp, Artificial Sequence
  Synthetic
gtcgatgtcatcgatctccc

SEQ ID NO: 27691 - DNA, 20 bp, Artificial Sequence
  Synthetic
tgacaaagaactctctctca

SEQ ID NO: 27692 - DNA, 20 bp, Artificial Sequence
  Synthetic
ttgacaaagaactctctctc

SEQ ID NO: 27693 - DNA, 20 bp, Artificial Sequence
  Synthetic
agagagagttctttgtcaag

SEQ ID NO: 27694 - DNA, 20 bp, Artificial Sequence
  Synthetic
gagagagttctttgtcaagt

SEQ ID NO: 27695 - DNA, 20 bp, Artificial Sequence
  Synthetic
gagttctttgtcaagtgggc

SEQ ID NO: 27696 - DNA, 20 bp, Artificial Sequence
  Synthetic
agttctttgtcaagtgggca

SEQ ID NO: 27697 - DNA, 20 bp, Artificial Sequence
  Synthetic
agtgggcagggctgtcctac

SEQ ID NO: 27698 - DNA, 20 bp, Artificial Sequence
  Synthetic
tgtcctactggcattgctcc

SEQ ID NO: 27699 - DNA, 20 bp, Artificial Sequence
  Synthetic
gtcctactggcattgctcct

SEQ ID NO: 27700 - DNA, 20 bp, Artificial Sequence
  Synthetic
cacccaggagcaatgccagt

SEQ ID NO: 27701 - DNA, 20 bp, Artificial Sequence
  Synthetic
ctggcattgctcctgggtga

SEQ ID NO: 27702 - DNA, 20 bp, Artificial Sequence
  Synthetic
ctcctgggtgaaggagctac

SEQ ID NO: 27703 - DNA, 20 bp, Artificial Sequence
  Synthetic
cacctgtagctccttcaccc

SEQ ID NO: 27704 - DNA, 20 bp, Artificial Sequence
  Synthetic
agaccaccaggattactgtg

SEQ ID NO: 27705 - DNA, 20 bp, Artificial Sequence
  Synthetic
ttactgtgaggtgtgccagc

SEQ ID NO: 27706 - DNA, 20 bp, Artificial Sequence
  Synthetic
tactgtgaggtgtgccagca

SEQ ID NO: 27707 - DNA, 20 bp, Artificial Sequence
  Synthetic
tgtgaggtgtgccagcaggg

SEQ ID NO: 27708 - DNA, 20 bp, Artificial Sequence
  Synthetic
gtgaggtgtgccagcagggt

SEQ ID NO: 27709 - DNA, 20 bp, Artificial Sequence
  Synthetic
tgaggtgtgccagcagggtg

SEQ ID NO: 27710 - DNA, 20 bp, Artificial Sequence
  Synthetic
ggatgatctccccaccctgc

SEQ ID NO: 27711 - DNA, 20 bp, Artificial Sequence
  Synthetic
tcctgtgcgacacctgcccg

SEQ ID NO: 27712 - DNA, 20 bp, Artificial Sequence
  Synthetic
ccctcgggcaggtgtcgcac

SEQ ID NO: 27713 - DNA, 20 bp, Artificial Sequence
  Synthetic
cctgtgcgacacctgcccga

SEQ ID NO: 27714 - DNA, 20 bp, Artificial Sequence
  Synthetic
gagatggtaggccctcgggc

SEQ ID NO: 27715 - DNA, 20 bp, Artificial Sequence
  Synthetic
atacgagatggtaggccctc

SEQ ID NO: 27716 - DNA, 20 bp, Artificial Sequence
  Synthetic
catacgagatggtaggccct

SEQ ID NO: 27717 - DNA, 20 bp, Artificial Sequence
  Synthetic
ggcctaccatctcgtatgcc

SEQ ID NO: 27718 - DNA, 20 bp, Artificial Sequence
  Synthetic
gtccaggcatacgagatggt

SEQ ID NO: 27719 - DNA, 20 bp, Artificial Sequence
  Synthetic
ctgggtccaggcatacgaga

SEQ ID NO: 27720 - DNA, 20 bp, Artificial Sequence
  Synthetic
cgtatgcctggacccagagc

SEQ ID NO: 27721 - DNA, 20 bp, Artificial Sequence
  Synthetic
ccttctccagctctgggtcc

SEQ ID NO: 27722 - DNA, 20 bp, Artificial Sequence
  Synthetic
cctggacccagagctggaga

SEQ ID NO: 27723 - DNA, 20 bp, Artificial Sequence
  Synthetic
cgggagccttctccagctct

SEQ ID NO: 27724 - DNA, 20 bp, Artificial Sequence
  Synthetic
tcgggagccttctccagctc

SEQ ID NO: 27725 - DNA, 20 bp, Artificial Sequence
  Synthetic
agagctggagaaggctcccg

SEQ ID NO: 27726 - DNA, 20 bp, Artificial Sequence
  Synthetic
gagctggagaaggctcccga

SEQ ID NO: 27727 - DNA, 20 bp, Artificial Sequence
  Synthetic
agaaggctcccgagggcaag

SEQ ID NO: 27728 - DNA, 20 bp, Artificial Sequence
  Synthetic
gggcagctccacttgccctc

SEQ ID NO: 27729 - DNA, 20 bp, Artificial Sequence
  Synthetic
ggggcagctccacttgccct

SEQ ID NO: 27730 - DNA, 20 bp, Artificial Sequence
  Synthetic
tgccaaggcttacacagtgg

SEQ ID NO: 27731 - DNA, 20 bp, Artificial Sequence
  Synthetic
ctgccaaggcttacacagtg

SEQ ID NO: 27732 - DNA, 20 bp, Artificial Sequence
  Synthetic
tctgccaaggcttacacagt

SEQ ID NO: 27733 - DNA, 20 bp, Artificial Sequence
  Synthetic
ctctgccaaggcttacacag

SEQ ID NO: 27734 - DNA, 20 bp, Artificial Sequence
  Synthetic
tggcctcctcccccaggaga

SEQ ID NO: 27735 - DNA, 20 bp, Artificial Sequence
  Synthetic
cctcctcccccaggagaagg

SEQ ID NO: 27736 - DNA, 20 bp, Artificial Sequence
  Synthetic
ctcctcccccaggagaagga

SEQ ID NO: 27737 - DNA, 20 bp, Artificial Sequence
  Synthetic
actggatcccctccttctcc

SEQ ID NO: 27738 - DNA, 20 bp, Artificial Sequence
  Synthetic
ggagttctgccgcgtgtgca

SEQ ID NO: 27739 - DNA, 20 bp, Artificial Sequence
  Synthetic
ttctgccgcgtgtgcaagga

SEQ ID NO: 27740 - DNA, 20 bp, Artificial Sequence
  Synthetic
tctgccgcgtgtgcaaggac

SEQ ID NO: 27741 - DNA, 20 bp, Artificial Sequence
  Synthetic
ctgccgcgtgtgcaaggacg

SEQ ID NO: 27742 - DNA, 20 bp, Artificial Sequence
  Synthetic
tgccgcgtgtgcaaggacgg

SEQ ID NO: 27743 - DNA, 20 bp, Artificial Sequence
  Synthetic
cgcccccgtccttgcacacg

SEQ ID NO: 27744 - DNA, 20 bp, Artificial Sequence
  Synthetic
caggtggtaggaggaggggc

SEQ ID NO: 27745 - DNA, 20 bp, Artificial Sequence
  Synthetic
aatgcaggtggtaggaggag

SEQ ID NO: 27746 - DNA, 20 bp, Artificial Sequence
  Synthetic
caatgcaggtggtaggagga

SEQ ID NO: 27747 - DNA, 20 bp, Artificial Sequence
  Synthetic
gcaatgcaggtggtaggagg

SEQ ID NO: 27748 - DNA, 20 bp, Artificial Sequence
  Synthetic
gaggcaatgcaggtggtagg

SEQ ID NO: 27749 - DNA, 20 bp, Artificial Sequence
  Synthetic
gttgaggcaatgcaggtggt

SEQ ID NO: 27750 - DNA, 20 bp, Artificial Sequence
  Synthetic
gcgggttgaggcaatgcagg

SEQ ID NO: 27751 - DNA, 20 bp, Artificial Sequence
  Synthetic
gcggcgggttgaggcaatgc

SEQ ID NO: 27752 - DNA, 20 bp, Artificial Sequence
  Synthetic
tctcgggcagcggcgggttg

SEQ ID NO: 27753 - DNA, 20 bp, Artificial Sequence
  Synthetic
ttgggatctcgggcagcggc

SEQ ID NO: 27754 - DNA, 20 bp, Artificial Sequence
  Synthetic
tttgggatctcgggcagcgg

SEQ ID NO: 27755 - DNA, 20 bp, Artificial Sequence
  Synthetic
ccgtttgggatctcgggcag

SEQ ID NO: 27756 - DNA, 20 bp, Artificial Sequence
  Synthetic
ccgctgcccgagatcccaaa

SEQ ID NO: 27757 - DNA, 20 bp, Artificial Sequence
  Synthetic
cattcaccgtttgggatctc

SEQ ID NO: 27758 - DNA, 20 bp, Artificial Sequence
  Synthetic
ccattcaccgtttgggatct

SEQ ID NO: 27759 - DNA, 20 bp, Artificial Sequence
  Synthetic
ccgagatcccaaacggtgaa

SEQ ID NO: 27760 - DNA, 20 bp, Artificial Sequence
  Synthetic
ggcagagccattcaccgttt

SEQ ID NO: 27761 - DNA, 20 bp, Artificial Sequence
  Synthetic
gggcagagccattcaccgtt

SEQ ID NO: 27762 - DNA, 20 bp, Artificial Sequence
  Synthetic
gaacactcacagtacagcgc

SEQ ID NO: 27763 - DNA, 20 bp, Artificial Sequence
  Synthetic
ggaacactcacagtacagcg

SEQ ID NO: 27764 - DNA, 20 bp, Artificial Sequence
  Synthetic
ccagctccgggagtaccagc

SEQ ID NO: 27765 - DNA, 20 bp, Artificial Sequence
  Synthetic
ctccgggagtaccagctgga

SEQ ID NO: 27766 - DNA, 20 bp, Artificial Sequence
  Synthetic
tccgggagtaccagctggaa

SEQ ID NO: 27767 - DNA, 20 bp, Artificial Sequence
  Synthetic
accagctggaagggatgaac

SEQ ID NO: 27768 - DNA, 20 bp, Artificial Sequence
  Synthetic
gccagttcatcccttccagc

SEQ ID NO: 27769 - DNA, 20 bp, Artificial Sequence
  Synthetic
tgaactggcttctttttaac

SEQ ID NO: 27770 - DNA, 20 bp, Artificial Sequence
  Synthetic
ttctttttaactggtataac

SEQ ID NO: 27771 - DNA, 20 bp, Artificial Sequence
  Synthetic
ctgcagaaaaaactgtattt

SEQ ID NO: 27772 - DNA, 20 bp, Artificial Sequence
  Synthetic
ctgtattttggctgatgaga

SEQ ID NO: 27773 - DNA, 20 bp, Artificial Sequence
  Synthetic
tgtattttggctgatgagat

SEQ ID NO: 27774 - DNA, 20 bp, Artificial Sequence
  Synthetic
ttggctgatgagatgggcct

SEQ ID NO: 27775 - DNA, 20 bp, Artificial Sequence
  Synthetic
tggctgatgagatgggccta

SEQ ID NO: 27776 - DNA, 20 bp, Artificial Sequence
  Synthetic
tggactggatggttttccct

SEQ ID NO: 27777 - DNA, 20 bp, Artificial Sequence
  Synthetic
aaggaatgtgatggactgga

SEQ ID NO: 27778 - DNA, 20 bp, Artificial Sequence
  Synthetic
ctgaaaggaatgtgatggac

SEQ ID NO: 27779 - DNA, 20 bp, Artificial Sequence
  Synthetic
tatttctgaaaggaatgtga

SEQ ID NO: 27780 - DNA, 20 bp, Artificial Sequence
  Synthetic
ctctcagaaatatttctgaa

SEQ ID NO: 27781 - DNA, 20 bp, Artificial Sequence
  Synthetic
ctttcagaaatatttctgag

SEQ ID NO: 27782 - DNA, 20 bp, Artificial Sequence
  Synthetic
atatttctgagaggaatcca

SEQ ID NO: 27783 - DNA, 20 bp, Artificial Sequence
  Synthetic
cgataatgagaaaagggccg

SEQ ID NO: 27784 - DNA, 20 bp, Artificial Sequence
  Synthetic
gaggggcgataatgagaaaa

SEQ ID NO: 27785 - DNA, 20 bp, Artificial Sequence
  Synthetic
agaggggcgataatgagaaa

SEQ ID NO: 27786 - DNA, 20 bp, Artificial Sequence
  Synthetic
gttagtgatggtggagagag

SEQ ID NO: 27787 - DNA, 20 bp, Artificial Sequence
  Synthetic
agttagtgatggtggagaga

SEQ ID NO: 27788 - DNA, 20 bp, Artificial Sequence
  Synthetic
cagttagtgatggtggagag

SEQ ID NO: 27789 - DNA, 20 bp, Artificial Sequence
  Synthetic
ctctctccaccatcactaac

SEQ ID NO: 27790 - DNA, 20 bp, Artificial Sequence
  Synthetic
tctctccaccatcactaact

SEQ ID NO: 27791 - DNA, 20 bp, Artificial Sequence
  Synthetic
ccgctcccagttagtgatgg

SEQ ID NO: 27792 - DNA, 20 bp, Artificial Sequence
  Synthetic
ccaccatcactaactgggag

SEQ ID NO: 27793 - DNA, 20 bp, Artificial Sequence
  Synthetic
caccatcactaactgggagc

SEQ ID NO: 27794 - DNA, 20 bp, Artificial Sequence
  Synthetic
ctcccgctcccagttagtga

SEQ ID NO: 27795 - DNA, 20 bp, Artificial Sequence
  Synthetic
ctaactgggagcgggagttc

SEQ ID NO: 27796 - DNA, 20 bp, Artificial Sequence
  Synthetic
gggagcgggagttccggaca

SEQ ID NO: 27797 - DNA, 20 bp, Artificial Sequence
  Synthetic
cattcatctctgtccatgtc

SEQ ID NO: 27798 - DNA, 20 bp, Artificial Sequence
  Synthetic
atgaatgccattgtgtacca

SEQ ID NO: 27799 - DNA, 20 bp, Artificial Sequence
  Synthetic
ctggctgccgtggtacacaa

SEQ ID NO: 27800 - DNA, 20 bp, Artificial Sequence
  Synthetic
accacggcagccagatcagc

SEQ ID NO: 27801 - DNA, 20 bp, Artificial Sequence
  Synthetic
gcctgctgatctggctgccg

SEQ ID NO: 27802 - DNA, 20 bp, Artificial Sequence
  Synthetic
ggatcatctgcctgctgatc

SEQ ID NO: 27803 - DNA, 20 bp, Artificial Sequence
  Synthetic
gatgatccagcagtatgaaa

SEQ ID NO: 27804 - DNA, 20 bp, Artificial Sequence
  Synthetic
tgtacaccatttcatactgc

SEQ ID NO: 27805 - DNA, 20 bp, Artificial Sequence
  Synthetic
aatggtgtacagagacgccc

SEQ ID NO: 27806 - DNA, 20 bp, Artificial Sequence
  Synthetic
cctcagggaaaccccctttc

SEQ ID NO: 27807 - DNA, 20 bp, Artificial Sequence
  Synthetic
acttgaagactcctgaaagg

SEQ ID NO: 27808 - DNA, 20 bp, Artificial Sequence
  Synthetic
aacttgaagactcctgaaag

SEQ ID NO: 27809 - DNA, 20 bp, Artificial Sequence
  Synthetic
gaacttgaagactcctgaaa

SEQ ID NO: 27810 - DNA, 20 bp, Artificial Sequence
  Synthetic
ggaacttgaagactcctgaa

SEQ ID NO: 27811 - DNA, 20 bp, Artificial Sequence
  Synthetic
caaatgttgtgatgacgacg

SEQ ID NO: 27812 - DNA, 20 bp, Artificial Sequence
  Synthetic
tcaactctgggcagtctgct

SEQ ID NO: 27813 - DNA, 20 bp, Artificial Sequence
  Synthetic
agtgaatcttcttcaactct

SEQ ID NO: 27814 - DNA, 20 bp, Artificial Sequence
  Synthetic
cagtgaatcttcttcaactc

SEQ ID NO: 27815 - DNA, 20 bp, Artificial Sequence
  Synthetic
cagagttgaagaagattcac

SEQ ID NO: 27816 - DNA, 20 bp, Artificial Sequence
  Synthetic
aagcccacagactgaagaat

SEQ ID NO: 27817 - DNA, 20 bp, Artificial Sequence
  Synthetic
gttcctattcttcagtctgt

SEQ ID NO: 27818 - DNA, 20 bp, Artificial Sequence
  Synthetic
agttcctattcttcagtctg

SEQ ID NO: 27819 - DNA, 20 bp, Artificial Sequence
  Synthetic
gaataggaactgcaaacttc

SEQ ID NO: 27820 - DNA, 20 bp, Artificial Sequence
  Synthetic
taggaactgcaaacttctgg

SEQ ID NO: 27821 - DNA, 20 bp, Artificial Sequence
  Synthetic
aggaactgcaaacttctgga

SEQ ID NO: 27822 - DNA, 20 bp, Artificial Sequence
  Synthetic
tctggagggtctaaagctta

SEQ ID NO: 27823 - DNA, 20 bp, Artificial Sequence
  Synthetic
gggtctaaagcttatggccc

SEQ ID NO: 27824 - DNA, 20 bp, Artificial Sequence
  Synthetic
gaacataaagtgcttctcac

SEQ ID NO: 27825 - DNA, 20 bp, Artificial Sequence
  Synthetic
aacacccttgcagaactctg

SEQ ID NO: 27826 - DNA, 20 bp, Artificial Sequence
  Synthetic
acccttgcagaactctgtgg

SEQ ID NO: 27827 - DNA, 20 bp, Artificial Sequence
  Synthetic
tcctccacagagttctgcaa

SEQ ID NO: 27828 - DNA, 20 bp, Artificial Sequence
  Synthetic
ctcctccacagagttctgca

SEQ ID NO: 27829 - DNA, 20 bp, Artificial Sequence
  Synthetic
cttcagtttgttaaattttc

SEQ ID NO: 27830 - DNA, 20 bp, Artificial Sequence
  Synthetic
gtctctgaaggaaactgtga

SEQ ID NO: 27831 - DNA, 20 bp, Artificial Sequence
  Synthetic
tccttcagagaccgctttct

SEQ ID NO: 27832 - DNA, 20 bp, Artificial Sequence
  Synthetic
tccaagaaagcggtctctga

SEQ ID NO: 27833 - DNA, 20 bp, Artificial Sequence
  Synthetic
ttcagagaccgctttcttgg

SEQ ID NO: 27834 - DNA, 20 bp, Artificial Sequence
  Synthetic
accgctttcttggaggaatt

SEQ ID NO: 27835 - DNA, 20 bp, Artificial Sequence
  Synthetic
tccaaattcctccaagaaag

SEQ ID NO: 27836 - DNA, 20 bp, Artificial Sequence
  Synthetic
atttggagatctgaaaacag

SEQ ID NO: 27837 - DNA, 20 bp, Artificial Sequence
  Synthetic
agatctgaaaacagaggagc

SEQ ID NO: 27838 - DNA, 20 bp, Artificial Sequence
  Synthetic
tcctaaaaccaatgatgctt

SEQ ID NO: 27839 - DNA, 20 bp, Artificial Sequence
  Synthetic
gccgaagcatcattggtttt

SEQ ID NO: 27840 - DNA, 20 bp, Artificial Sequence
  Synthetic
taaaaccaatgatgcttcgg

SEQ ID NO: 27841 - DNA, 20 bp, Artificial Sequence
  Synthetic
ttcagccgccgaagcatcat

SEQ ID NO: 27842 - DNA, 20 bp, Artificial Sequence
  Synthetic
tcggcggctgaaagatgatg

SEQ ID NO: 27843 - DNA, 20 bp, Artificial Sequence
  Synthetic
tcgtctcttgtttgggagca

SEQ ID NO: 27844 - DNA, 20 bp, Artificial Sequence
  Synthetic
tcaatgatcgtctcttgttt

SEQ ID NO: 27845 - DNA, 20 bp, Artificial Sequence
  Synthetic
ctcaatgatcgtctcttgtt

SEQ ID NO: 27846 - DNA, 20 bp, Artificial Sequence
  Synthetic
caaacaagagacgatcattg

SEQ ID NO: 27847 - DNA, 20 bp, Artificial Sequence
  Synthetic
acaagagacgatcattgagg

SEQ ID NO: 27848 - DNA, 20 bp, Artificial Sequence
  Synthetic
gtagtactttttctggatat

SEQ ID NO: 27849 - DNA, 20 bp, Artificial Sequence
  Synthetic
tggcacggtagtactttttc

SEQ ID NO: 27850 - DNA, 20 bp, Artificial Sequence
  Synthetic
agttcttctcgaggatggca

SEQ ID NO: 27851 - DNA, 20 bp, Artificial Sequence
  Synthetic
ggaaaagttcttctcgagga

SEQ ID NO: 27852 - DNA, 20 bp, Artificial Sequence
  Synthetic
ggaaggaaaagttcttctcg

SEQ ID NO: 27853 - DNA, 20 bp, Artificial Sequence
  Synthetic
gaacttttccttcctgacca

SEQ ID NO: 27854 - DNA, 20 bp, Artificial Sequence
  Synthetic
aacttttccttcctgaccaa

SEQ ID NO: 27855 - DNA, 20 bp, Artificial Sequence
  Synthetic
acttttccttcctgaccaag

SEQ ID NO: 27856 - DNA, 20 bp, Artificial Sequence
  Synthetic
cttttccttcctgaccaagg

SEQ ID NO: 27857 - DNA, 20 bp, Artificial Sequence
  Synthetic
atttgcccccttggtcagga

SEQ ID NO: 27858 - DNA, 20 bp, Artificial Sequence
  Synthetic
gctgatttgcccccttggtc

SEQ ID NO: 27859 - DNA, 20 bp, Artificial Sequence
  Synthetic
gttgtgctgatttgccccct

SEQ ID NO: 27860 - DNA, 20 bp, Artificial Sequence
  Synthetic
atcatggtgttgatgagatt

SEQ ID NO: 27861 - DNA, 20 bp, Artificial Sequence
  Synthetic
catcatggtgttgatgagat

SEQ ID NO: 27862 - DNA, 20 bp, Artificial Sequence
  Synthetic
caatctcatcaacaccatga

SEQ ID NO: 27863 - DNA, 20 bp, Artificial Sequence
  Synthetic
tcaacaccatgatggagctg

SEQ ID NO: 27864 - DNA, 20 bp, Artificial Sequence
  Synthetic
gcacttcctcagctccatca

SEQ ID NO: 27865 - DNA, 20 bp, Artificial Sequence
  Synthetic
aaccatccctacctgatcaa

SEQ ID NO: 27866 - DNA, 20 bp, Artificial Sequence
  Synthetic
caccattgatcaggtaggga

SEQ ID NO: 27867 - DNA, 20 bp, Artificial Sequence
  Synthetic
gactcaccattgatcaggta

SEQ ID NO: 27868 - DNA, 20 bp, Artificial Sequence
  Synthetic
tgactcaccattgatcaggt

SEQ ID NO: 27869 - DNA, 20 bp, Artificial Sequence
  Synthetic
cccctgactcaccattgatc

SEQ ID NO: 27870 - DNA, 20 bp, Artificial Sequence
  Synthetic
tgtagaagttgatcgcatct

SEQ ID NO: 27871 - DNA, 20 bp, Artificial Sequence
  Synthetic
agaagttgatcgcatcttgg

SEQ ID NO: 27872 - DNA, 20 bp, Artificial Sequence
  Synthetic
agttgatcgcatcttggagg

SEQ ID NO: 27873 - DNA, 20 bp, Artificial Sequence
  Synthetic
cttggaggtggcccacacca

SEQ ID NO: 27874 - DNA, 20 bp, Artificial Sequence
  Synthetic
tgtttctgcatccttggtgt

SEQ ID NO: 27875 - DNA, 20 bp, Artificial Sequence
  Synthetic
ctgtttctgcatccttggtg

SEQ ID NO: 27876 - DNA, 20 bp, Artificial Sequence
  Synthetic
cacaccaaggatgcagaaac

SEQ ID NO: 27877 - DNA, 20 bp, Artificial Sequence
  Synthetic
acaccaaggatgcagaaaca

SEQ ID NO: 27878 - DNA, 20 bp, Artificial Sequence
  Synthetic
caccaaggatgcagaaacag

SEQ ID NO: 27879 - DNA, 20 bp, Artificial Sequence
  Synthetic
ctcccctgtttctgcatcct

SEQ ID NO: 27880 - DNA, 20 bp, Artificial Sequence
  Synthetic
caaggatgcagaaacagggg

SEQ ID NO: 27881 - DNA, 20 bp, Artificial Sequence
  Synthetic
ggatgcagaaacaggggagg

SEQ ID NO: 27882 - DNA, 20 bp, Artificial Sequence
  Synthetic
gatgcagaaacaggggaggt

SEQ ID NO: 27883 - DNA, 20 bp, Artificial Sequence
  Synthetic
ccaggtaatgtgttacctcc

SEQ ID NO: 27884 - DNA, 20 bp, Artificial Sequence
  Synthetic
ccaggaggtaacacattacc

SEQ ID NO: 27885 - DNA, 20 bp, Artificial Sequence
  Synthetic
taacacattacctggtgaag

SEQ ID NO: 27886 - DNA, 20 bp, Artificial Sequence
  Synthetic
gtagtgagcaccacttcacc

SEQ ID NO: 27887 - DNA, 20 bp, Artificial Sequence
  Synthetic
taccatatgaagaaagcacg

SEQ ID NO: 27888 - DNA, 20 bp, Artificial Sequence
  Synthetic
accatatgaagaaagcacgt

SEQ ID NO: 27889 - DNA, 20 bp, Artificial Sequence
  Synthetic
tcccacgtgctttcttcata

SEQ ID NO: 27890 - DNA, 20 bp, Artificial Sequence
  Synthetic
agaaagcacgtgggagctag

SEQ ID NO: 27891 - DNA, 20 bp, Artificial Sequence
  Synthetic
tcaaattctttaacttttgc

SEQ ID NO: 27892 - DNA, 20 bp, Artificial Sequence
  Synthetic
aaacatcattgagaagatcc

SEQ ID NO: 27893 - DNA, 20 bp, Artificial Sequence
  Synthetic
cctggacagtcttagatgcc

SEQ ID NO: 27894 - DNA, 20 bp, Artificial Sequence
  Synthetic
cctggcatctaagactgtcc

SEQ ID NO: 27895 - DNA, 20 bp, Artificial Sequence
  Synthetic
ggcatctaagactgtccagg

SEQ ID NO: 27896 - DNA, 20 bp, Artificial Sequence
  Synthetic
tctaagactgtccaggaggt

SEQ ID NO: 27897 - DNA, 20 bp, Artificial Sequence
  Synthetic
aacatgagccaccaacctcc

SEQ ID NO: 27898 - DNA, 20 bp, Artificial Sequence
  Synthetic
tgtttgttacaggttcaccc

SEQ ID NO: 27899 - DNA, 20 bp, Artificial Sequence
  Synthetic
agtcgaacggaggttctcct

SEQ ID NO: 27900 - DNA, 20 bp, Artificial Sequence
  Synthetic
aagtcgaacggaggttctcc

SEQ ID NO: 27901 - DNA, 20 bp, Artificial Sequence
  Synthetic
aggagaacctccgttcgact

SEQ ID NO: 27902 - DNA, 20 bp, Artificial Sequence
  Synthetic
aacagctccaagtcgaacgg

SEQ ID NO: 27903 - DNA, 20 bp, Artificial Sequence
  Synthetic
tagaacagctccaagtcgaa

SEQ ID NO: 27904 - DNA, 20 bp, Artificial Sequence
  Synthetic
gttcctacttacattgtaaa

SEQ ID NO: 27905 - DNA, 20 bp, Artificial Sequence
  Synthetic
ttcctacttacattgtaaat

SEQ ID NO: 27906 - DNA, 20 bp, Artificial Sequence
  Synthetic
ggcccatttacaatgtaagt

SEQ ID NO: 27907 - DNA, 20 bp, Artificial Sequence
  Synthetic
acattgtaaatgggccacaa

SEQ ID NO: 27908 - DNA, 20 bp, Artificial Sequence
  Synthetic
cttttcgagctcttccattg

SEQ ID NO: 27909 - DNA, 20 bp, Artificial Sequence
  Synthetic
cacaatggaagagctcgaaa

SEQ ID NO: 27910 - DNA, 20 bp, Artificial Sequence
  Synthetic
ttgatcttctgtgcgatgcg

SEQ ID NO: 27911 - DNA, 20 bp, Artificial Sequence
  Synthetic
cacagaagatcaagcgattt

SEQ ID NO: 27912 - DNA, 20 bp, Artificial Sequence
  Synthetic
caaactcagggaataccagt

SEQ ID NO: 27913 - DNA, 20 bp, Artificial Sequence
  Synthetic
actcagggaataccagttgg

SEQ ID NO: 27914 - DNA, 20 bp, Artificial Sequence
  Synthetic
ctcagggaataccagttgga

SEQ ID NO: 27915 - DNA, 20 bp, Artificial Sequence
  Synthetic
accagttggagggagtaaac

SEQ ID NO: 27916 - DNA, 20 bp, Artificial Sequence
  Synthetic
gccagtttactccctccaac

SEQ ID NO: 27917 - DNA, 20 bp, Artificial Sequence
  Synthetic
taaactggctacttttcaat

SEQ ID NO: 27918 - DNA, 20 bp, Artificial Sequence
  Synthetic
ctgcattttagcagatgaaa

SEQ ID NO: 27919 - DNA, 20 bp, Artificial Sequence
  Synthetic
tgcattttagcagatgaaat

SEQ ID NO: 27920 - DNA, 20 bp, Artificial Sequence
  Synthetic
tttagcagatgaaatgggtt

SEQ ID NO: 27921 - DNA, 20 bp, Artificial Sequence
  Synthetic
ttagcagatgaaatgggttt

SEQ ID NO: 27922 - DNA, 20 bp, Artificial Sequence
  Synthetic
catagagaaatgtaatggac

SEQ ID NO: 27923 - DNA, 20 bp, Artificial Sequence
  Synthetic
tatctcatagagaaatgtaa

SEQ ID NO: 27924 - DNA, 20 bp, Artificial Sequence
  Synthetic
ctctatgagatatatttgaa

SEQ ID NO: 27925 - DNA, 20 bp, Artificial Sequence
  Synthetic
atatatttgaaaggaatcca

SEQ ID NO: 27926 - DNA, 20 bp, Artificial Sequence
  Synthetic
caattactaaaaaagggcca

SEQ ID NO: 27927 - DNA, 20 bp, Artificial Sequence
  Synthetic
atggggcaattactaaaaaa

SEQ ID NO: 27928 - DNA, 20 bp, Artificial Sequence
  Synthetic
aatggggcaattactaaaaa

SEQ ID NO: 27929 - DNA, 20 bp, Artificial Sequence
  Synthetic
gttggggattgtggacaatg

SEQ ID NO: 27930 - DNA, 20 bp, Artificial Sequence
  Synthetic
agttggggattgtggacaat

SEQ ID NO: 27931 - DNA, 20 bp, Artificial Sequence
  Synthetic
cagttggggattgtggacaa

SEQ ID NO: 27932 - DNA, 20 bp, Artificial Sequence
  Synthetic
cattgtccacaatccccaac

SEQ ID NO: 27933 - DNA, 20 bp, Artificial Sequence
  Synthetic
attgtccacaatccccaact

SEQ ID NO: 27934 - DNA, 20 bp, Artificial Sequence
  Synthetic
cctttcccagttggggattg

SEQ ID NO: 27935 - DNA, 20 bp, Artificial Sequence
  Synthetic
ccacaatccccaactgggaa

SEQ ID NO: 27936 - DNA, 20 bp, Artificial Sequence
  Synthetic
cacaatccccaactgggaaa

SEQ ID NO: 27937 - DNA, 20 bp, Artificial Sequence
  Synthetic
ggaattccctttcccagttg

SEQ ID NO: 27938 - DNA, 20 bp, Artificial Sequence
  Synthetic
cggaattccctttcccagtt

SEQ ID NO: 27939 - DNA, 20 bp, Artificial Sequence
  Synthetic
tcggaattccctttcccagt

SEQ ID NO: 27940 - DNA, 20 bp, Artificial Sequence
  Synthetic
gggaaagggaattccgaacc

SEQ ID NO: 27941 - DNA, 20 bp, Artificial Sequence
  Synthetic
cgttcaactctgtccaggtt

SEQ ID NO: 27942 - DNA, 20 bp, Artificial Sequence
  Synthetic
aacctggacagagttgaacg

SEQ ID NO: 27943 - DNA, 20 bp, Artificial Sequence
  Synthetic
aaccacgttcaactctgtcc

SEQ ID NO: 27944 - DNA, 20 bp, Artificial Sequence
  Synthetic
ttgaacgtggttgtgtatca

SEQ ID NO: 27945 - DNA, 20 bp, Artificial Sequence
  Synthetic
tgaacgtggttgtgtatcat

SEQ ID NO: 27946 - DNA, 20 bp, Artificial Sequence
  Synthetic
atgggagtcaagctagtcgt

SEQ ID NO: 27947 - DNA, 20 bp, Artificial Sequence
  Synthetic
gtacatttcatacaactgaa

SEQ ID NO: 27948 - DNA, 20 bp, Artificial Sequence
  Synthetic
aatgtacttcaaagatcccc

SEQ ID NO: 27949 - DNA, 20 bp, Artificial Sequence
  Synthetic
aacctgtgaaggtttacctg

SEQ ID NO: 27950 - DNA, 20 bp, Artificial Sequence
  Synthetic
cttatagggtcgagtgataa

SEQ ID NO: 27951 - DNA, 20 bp, Artificial Sequence
  Synthetic
ttatagggtcgagtgataaa

SEQ ID NO: 27952 - DNA, 20 bp, Artificial Sequence
  Synthetic
tatagggtcgagtgataaag

SEQ ID NO: 27953 - DNA, 20 bp, Artificial Sequence
  Synthetic
gatgatggcatgaaacttat

SEQ ID NO: 27954 - DNA, 20 bp, Artificial Sequence
  Synthetic
catctcaaatgtagtgatga

SEQ ID NO: 27955 - DNA, 20 bp, Artificial Sequence
  Synthetic
tgactgattgtcctgagctg

SEQ ID NO: 27956 - DNA, 20 bp, Artificial Sequence
  Synthetic
catggaatattccgcagctc

SEQ ID NO: 27957 - DNA, 20 bp, Artificial Sequence
  Synthetic
ctgagctgcggaatattcca

SEQ ID NO: 27958 - DNA, 20 bp, Artificial Sequence
  Synthetic
tcaatgactacacagcgcca

SEQ ID NO: 27959 - DNA, 20 bp, Artificial Sequence
  Synthetic
tagtcattgatgaagcccac

SEQ ID NO: 27960 - DNA, 20 bp, Artificial Sequence
  Synthetic
aagcccacaggctgaagaac

SEQ ID NO: 27961 - DNA, 20 bp, Artificial Sequence
  Synthetic
gttcctgttcttcagcctgt

SEQ ID NO: 27962 - DNA, 20 bp, Artificial Sequence
  Synthetic
agttcctgttcttcagcctg

SEQ ID NO: 27963 - DNA, 20 bp, Artificial Sequence
  Synthetic
gaacaggaactgcaagctgt

SEQ ID NO: 27964 - DNA, 20 bp, Artificial Sequence
  Synthetic
caggaactgcaagctgttgg

SEQ ID NO: 27965 - DNA, 20 bp, Artificial Sequence
  Synthetic
aggaactgcaagctgttgga

SEQ ID NO: 27966 - DNA, 20 bp, Artificial Sequence
  Synthetic
gttggagggactcaagatga

SEQ ID NO: 27967 - DNA, 20 bp, Artificial Sequence
  Synthetic
gggactcaagatgatggact

SEQ ID NO: 27968 - DNA, 20 bp, Artificial Sequence
  Synthetic
ggaacacaaagtgctgctga

SEQ ID NO: 27969 - DNA, 20 bp, Artificial Sequence
  Synthetic
gaacacaaagtgctgctgac

SEQ ID NO: 27970 - DNA, 20 bp, Artificial Sequence
  Synthetic
aaccccactccagaacactg

SEQ ID NO: 27971 - DNA, 20 bp, Artificial Sequence
  Synthetic
ttccacagtgttctggagtg

SEQ ID NO: 27972 - DNA, 20 bp, Artificial Sequence
  Synthetic
cttccacagtgttctggagt

SEQ ID NO: 27973 - DNA, 20 bp, Artificial Sequence
  Synthetic
tcttccacagtgttctggag

SEQ ID NO: 27974 - DNA, 20 bp, Artificial Sequence
  Synthetic
agagttcttccacagtgttc

SEQ ID NO: 27975 - DNA, 20 bp, Artificial Sequence
  Synthetic
cttcagcttgcttcatttct

SEQ ID NO: 27976 - DNA, 20 bp, Artificial Sequence
  Synthetic
gtttctgaagggaagcgact

SEQ ID NO: 27977 - DNA, 20 bp, Artificial Sequence
  Synthetic
gcataaatgtggtttctgaa

SEQ ID NO: 27978 - DNA, 20 bp, Artificial Sequence
  Synthetic
tgcataaatgtggtttctga

SEQ ID NO: 27979 - DNA, 20 bp, Artificial Sequence
  Synthetic
accacatttatgcaagaatt

SEQ ID NO: 27980 - DNA, 20 bp, Artificial Sequence
  Synthetic
accaaattcttgcataaatg

SEQ ID NO: 27981 - DNA, 20 bp, Artificial Sequence
  Synthetic
tgatctaaaaacagaagagc

SEQ ID NO: 27982 - DNA, 20 bp, Artificial Sequence
  Synthetic
ttgagacgtctcaacatcat

SEQ ID NO: 27983 - DNA, 20 bp, Artificial Sequence
  Synthetic
gatgttgagacgtctcaaag

SEQ ID NO: 27984 - DNA, 20 bp, Artificial Sequence
  Synthetic
agaggatgtagaaaagaact

SEQ ID NO: 27985 - DNA, 20 bp, Artificial Sequence
  Synthetic
aataatagtttcttctttgg

SEQ ID NO: 27986 - DNA, 20 bp, Artificial Sequence
  Synthetic
caataatagtttcttctttg

SEQ ID NO: 27987 - DNA, 20 bp, Artificial Sequence
  Synthetic
tcaataatagtttcttcttt

SEQ ID NO: 27988 - DNA, 20 bp, Artificial Sequence
  Synthetic
ttcaataatagtttcttctt

SEQ ID NO: 27989 - DNA, 20 bp, Artificial Sequence
  Synthetic
aattcttctcaaggatggct

SEQ ID NO: 27990 - DNA, 20 bp, Artificial Sequence
  Synthetic
tgtgaaattcttctcaagga

SEQ ID NO: 27991 - DNA, 20 bp, Artificial Sequence
  Synthetic
gaaatgtgaaattcttctca

SEQ ID NO: 27992 - DNA, 20 bp, Artificial Sequence
  Synthetic
aatttcacatttctttccaa

SEQ ID NO: 27993 - DNA, 20 bp, Artificial Sequence
  Synthetic
ttcacatttctttccaaagg

SEQ ID NO: 27994 - DNA, 20 bp, Artificial Sequence
  Synthetic
acatttctttccaaaggcgg

SEQ ID NO: 27995 - DNA, 20 bp, Artificial Sequence
  Synthetic
gttagcttgaccaccgcctt

SEQ ID NO: 27996 - DNA, 20 bp, Artificial Sequence
  Synthetic
atcatagtgtttaataggtt

SEQ ID NO: 27997 - DNA, 20 bp, Artificial Sequence
  Synthetic
taacctattaaacactatga

SEQ ID NO: 27998 - DNA, 20 bp, Artificial Sequence
  Synthetic
attccatcatagtgtttaat

SEQ ID NO: 27999 - DNA, 20 bp, Artificial Sequence
  Synthetic
taaacactatgatggaattg

SEQ ID NO: 28000 - DNA, 20 bp, Artificial Sequence
  Synthetic
aatcatccgtaccttatcaa

SEQ ID NO: 28001 - DNA, 20 bp, Artificial Sequence
  Synthetic
gccttaccattgataaggta

SEQ ID NO: 28002 - DNA, 20 bp, Artificial Sequence
  Synthetic
gggcagccttaccattgata

SEQ ID NO: 28003 - DNA, 20 bp, Artificial Sequence
  Synthetic
tcataattttttctaccact

SEQ ID NO: 28004 - DNA, 20 bp, Artificial Sequence
  Synthetic
ctcataattttttctaccac

SEQ ID NO: 28005 - DNA, 20 bp, Artificial Sequence
  Synthetic
cagtcgttcagtaaaaaagc

SEQ ID NO: 28006 - DNA, 20 bp, Artificial Sequence
  Synthetic
cttttgttgcagaaggaatc

SEQ ID NO: 28007 - DNA, 20 bp, Artificial Sequence
  Synthetic
gttgcagaaggaatctggag

SEQ ID NO: 28008 - DNA, 20 bp, Artificial Sequence
  Synthetic
gcagaaggaatctggagagg

SEQ ID NO: 28009 - DNA, 20 bp, Artificial Sequence
  Synthetic
tggagaggaggtagaaattg

SEQ ID NO: 28010 - DNA, 20 bp, Artificial Sequence
  Synthetic
gctcttatcttcattgtcag

SEQ ID NO: 28011 - DNA, 20 bp, Artificial Sequence
  Synthetic
ctcttatcttcattgtcagt

SEQ ID NO: 28012 - DNA, 20 bp, Artificial Sequence
  Synthetic
gtgggcatctatagaagatc

SEQ ID NO: 28013 - DNA, 20 bp, Artificial Sequence
  Synthetic
gcaaaaaattaaacgattta

SEQ ID NO: 28014 - DNA, 20 bp, Artificial Sequence
  Synthetic
cagattatgtggaggttgac

SEQ ID NO: 28015 - DNA, 20 bp, Artificial Sequence
  Synthetic
tgtggaggttgaccggataa

SEQ ID NO: 28016 - DNA, 20 bp, Artificial Sequence
  Synthetic
tacgtgcaaagtccattatc

SEQ ID NO: 28017 - DNA, 20 bp, Artificial Sequence
  Synthetic
ttgcacgtagcacagatgac

SEQ ID NO: 28018 - DNA, 20 bp, Artificial Sequence
  Synthetic
tgcacgtagcacagatgacc

SEQ ID NO: 28019 - DNA, 20 bp, Artificial Sequence
  Synthetic
gcacgtagcacagatgaccg

SEQ ID NO: 28020 - DNA, 20 bp, Artificial Sequence
  Synthetic
tagcacagatgaccggggag

SEQ ID NO: 28021 - DNA, 20 bp, Artificial Sequence
  Synthetic
gatctcctgttacctctccc

SEQ ID NO: 28022 - DNA, 20 bp, Artificial Sequence
  Synthetic
ccagatagtgagtcacaggc

SEQ ID NO: 28023 - DNA, 20 bp, Artificial Sequence
  Synthetic
ccagcctgtgactcactatc

SEQ ID NO: 28024 - DNA, 20 bp, Artificial Sequence
  Synthetic
ttcaccagatagtgagtcac

SEQ ID NO: 28025 - DNA, 20 bp, Artificial Sequence
  Synthetic
tgactcactatctggtgaag

SEQ ID NO: 28026 - DNA, 20 bp, Artificial Sequence
  Synthetic
ttccttatgaagacagcacg

SEQ ID NO: 28027 - DNA, 20 bp, Artificial Sequence
  Synthetic
tccttatgaagacagcacgt

SEQ ID NO: 28028 - DNA, 20 bp, Artificial Sequence
  Synthetic
tcccacgtgctgtcttcata

SEQ ID NO: 28029 - DNA, 20 bp, Artificial Sequence
  Synthetic
atgaagacagcacgtgggag

SEQ ID NO: 28030 - DNA, 20 bp, Artificial Sequence
  Synthetic
aagacagcacgtgggagcgg

SEQ ID NO: 28031 - DNA, 20 bp, Artificial Sequence
  Synthetic
cagcacgtgggagcggaggc

SEQ ID NO: 28032 - DNA, 20 bp, Artificial Sequence
  Synthetic
catagatcaagcaaagatcg

SEQ ID NO: 28033 - DNA, 20 bp, Artificial Sequence
  Synthetic
ccagctacgggaatatcagt

SEQ ID NO: 28034 - DNA, 20 bp, Artificial Sequence
  Synthetic
ctacgggaatatcagttgga

SEQ ID NO: 28035 - DNA, 20 bp, Artificial Sequence
  Synthetic
tacgggaatatcagttggaa

SEQ ID NO: 28036 - DNA, 20 bp, Artificial Sequence
  Synthetic
acgggaatatcagttggaag

SEQ ID NO: 28037 - DNA, 20 bp, Artificial Sequence
  Synthetic
atcagttggaaggggttaat

SEQ ID NO: 28038 - DNA, 20 bp, Artificial Sequence
  Synthetic
ttaattggctgctctttaat

SEQ ID NO: 28039 - DNA, 20 bp, Artificial Sequence
  Synthetic
tgctctttaattggtataac

SEQ ID NO: 28040 - DNA, 20 bp, Artificial Sequence
  Synthetic
ctgcaggcagaactgcatcc

SEQ ID NO: 28041 - DNA, 20 bp, Artificial Sequence
  Synthetic
ctgcatcctggctgatgaga

SEQ ID NO: 28042 - DNA, 20 bp, Artificial Sequence
  Synthetic
tgcatcctggctgatgagat

SEQ ID NO: 28043 - DNA, 20 bp, Artificial Sequence
  Synthetic
ccaatcccatctcatcagcc

SEQ ID NO: 28044 - DNA, 20 bp, Artificial Sequence
  Synthetic
cctggctgatgagatgggat

SEQ ID NO: 28045 - DNA, 20 bp, Artificial Sequence
  Synthetic
ctggctgatgagatgggatt

SEQ ID NO: 28046 - DNA, 20 bp, Artificial Sequence
  Synthetic
tcagtccattgccttcttgc

SEQ ID NO: 28047 - DNA, 20 bp, Artificial Sequence
  Synthetic
tacttcctgcaagaaggcaa

SEQ ID NO: 28048 - DNA, 20 bp, Artificial Sequence
  Synthetic
attatatacttcctgcaaga

SEQ ID NO: 28049 - DNA, 20 bp, Artificial Sequence
  Synthetic
cttgcaggaagtatataatg

SEQ ID NO: 28050 - DNA, 20 bp, Artificial Sequence
  Synthetic
ttgcaggaagtatataatgt

SEQ ID NO: 28051 - DNA, 20 bp, Artificial Sequence
  Synthetic
gtatataatgtgggcatcca

SEQ ID NO: 28052 - DNA, 20 bp, Artificial Sequence
  Synthetic
gggcatccatggtcccttct

SEQ ID NO: 28053 - DNA, 20 bp, Artificial Sequence
  Synthetic
caatgaccaagaagggacca

SEQ ID NO: 28054 - DNA, 20 bp, Artificial Sequence
  Synthetic
agtggggcaatgaccaagaa

SEQ ID NO: 28055 - DNA, 20 bp, Artificial Sequence
  Synthetic
cagtggggcaatgaccaaga

SEQ ID NO: 28056 - DNA, 20 bp, Artificial Sequence
  Synthetic
gttagtaattgtggacagtg

SEQ ID NO: 28057 - DNA, 20 bp, Artificial Sequence
  Synthetic
agttagtaattgtggacagt

SEQ ID NO: 28058 - DNA, 20 bp, Artificial Sequence
  Synthetic
cagttagtaattgtggacag

SEQ ID NO: 28059 - DNA, 20 bp, Artificial Sequence
  Synthetic
cactgtccacaattactaac

SEQ ID NO: 28060 - DNA, 20 bp, Artificial Sequence
  Synthetic
actgtccacaattactaact

SEQ ID NO: 28061 - DNA, 20 bp, Artificial Sequence
  Synthetic
tcgctcccagttagtaattg

SEQ ID NO: 28062 - DNA, 20 bp, Artificial Sequence
  Synthetic
gggagcgagaatttaataca

SEQ ID NO: 28063 - DNA, 20 bp, Artificial Sequence
  Synthetic
atgaacactattgtgtacca

SEQ ID NO: 28064 - DNA, 20 bp, Artificial Sequence
  Synthetic
tattgtgtaccatggcagtc

SEQ ID NO: 28065 - DNA, 20 bp, Artificial Sequence
  Synthetic
accatggcagtctggccagc

SEQ ID NO: 28066 - DNA, 20 bp, Artificial Sequence
  Synthetic
gcctgctggccagactgcca

SEQ ID NO: 28067 - DNA, 20 bp, Artificial Sequence
  Synthetic
ctgttgaatcatctgcctgc

SEQ ID NO: 28068 - DNA, 20 bp, Artificial Sequence
  Synthetic
aaatgtactgcaaagattca

SEQ ID NO: 28069 - DNA, 20 bp, Artificial Sequence
  Synthetic
aatgtactgcaaagattcac

SEQ ID NO: 28070 - DNA, 20 bp, Artificial Sequence
  Synthetic
gcttagggacgcctcatccc

SEQ ID NO: 28071 - DNA, 20 bp, Artificial Sequence
  Synthetic
acttgtatgcgcctgggatg

SEQ ID NO: 28072 - DNA, 20 bp, Artificial Sequence
  Synthetic
cgtcaaacttgtatgcgcct

SEQ ID NO: 28073 - DNA, 20 bp, Artificial Sequence
  Synthetic
gcgtcaaacttgtatgcgcc

SEQ ID NO: 28074 - DNA, 20 bp, Artificial Sequence
  Synthetic
tgacaaaatcatctcaaaag

SEQ ID NO: 28075 - DNA, 20 bp, Artificial Sequence
  Synthetic
cattcaatttcacgaagctc

SEQ ID NO: 28076 - DNA, 20 bp, Artificial Sequence
  Synthetic
ctgagcttcgtgaaattgaa

SEQ ID NO: 28077 - DNA, 20 bp, Artificial Sequence
  Synthetic
attacggtttttcagtcgat

SEQ ID NO: 28078 - DNA, 20 bp, Artificial Sequence
  Synthetic
aattacggtttttcagtcga

SEQ ID NO: 28079 - DNA, 20 bp, Artificial Sequence
  Synthetic
tatcaagcagcttgcaatta

SEQ ID NO: 28080 - DNA, 20 bp, Artificial Sequence
  Synthetic
gcttgatagtctcaagcaca

SEQ ID NO: 28081 - DNA, 20 bp, Artificial Sequence
  Synthetic
tagtctcaagcacatggacc

SEQ ID NO: 28082 - DNA, 20 bp, Artificial Sequence
  Synthetic
cctccatttctaggaacaca

SEQ ID NO: 28083 - DNA, 20 bp, Artificial Sequence
  Synthetic
gaacacaaggtgctactcac

SEQ ID NO: 28084 - DNA, 20 bp, Artificial Sequence
  Synthetic
tcttctacagtattttgcaa

SEQ ID NO: 28085 - DNA, 20 bp, Artificial Sequence
  Synthetic
gtttagcttgcttcatttct

SEQ ID NO: 28086 - DNA, 20 bp, Artificial Sequence
  Synthetic
gattctgagggaaattgtga

SEQ ID NO: 28087 - DNA, 20 bp, Artificial Sequence
  Synthetic
ttgagaaactctgattctga

SEQ ID NO: 28088 - DNA, 20 bp, Artificial Sequence
  Synthetic
cttgagaaactctgattctg

SEQ ID NO: 28089 - DNA, 20 bp, Artificial Sequence
  Synthetic
ctcagaatcagagtttctca

SEQ ID NO: 28090 - DNA, 20 bp, Artificial Sequence
  Synthetic
tcagagtttctcaaggactt

SEQ ID NO: 28091 - DNA, 20 bp, Artificial Sequence
  Synthetic
cagagtttctcaaggacttt

SEQ ID NO: 28092 - DNA, 20 bp, Artificial Sequence
  Synthetic
agagtttctcaaggactttg

SEQ ID NO: 28093 - DNA, 20 bp, Artificial Sequence
  Synthetic
ctttggggatctcaagacag

SEQ ID NO: 28094 - DNA, 20 bp, Artificial Sequence
  Synthetic
ggatctcaagacagaggaac

SEQ ID NO: 28095 - DNA, 20 bp, Artificial Sequence
  Synthetic
ctcaagacagaggaacaggt

SEQ ID NO: 28096 - DNA, 20 bp, Artificial Sequence
  Synthetic
accacaggttcaaaagctac

SEQ ID NO: 28097 - DNA, 20 bp, Artificial Sequence
  Synthetic
cagcatcattggcttaagaa

SEQ ID NO: 28098 - DNA, 20 bp, Artificial Sequence
  Synthetic
ttgagtcttctcagcatcat

SEQ ID NO: 28099 - DNA, 20 bp, Artificial Sequence
  Synthetic
gatgctgagaagactcaaag

SEQ ID NO: 28100 - DNA, 20 bp, Artificial Sequence
  Synthetic
agaggatgttgaaaaaaact

SEQ ID NO: 28101 - DNA, 20 bp, Artificial Sequence
  Synthetic
aaaaaacttggcacccaaac

SEQ ID NO: 28102 - DNA, 20 bp, Artificial Sequence
  Synthetic
tcaataattgtttcctgttt

SEQ ID NO: 28103 - DNA, 20 bp, Artificial Sequence
  Synthetic
ttcaataattgtttcctgtt

SEQ ID NO: 28104 - DNA, 20 bp, Artificial Sequence
  Synthetic
atatccagaagaaatactat

SEQ ID NO: 28105 - DNA, 20 bp, Artificial Sequence
  Synthetic
tatccagaagaaatactatc

SEQ ID NO: 28106 - DNA, 20 bp, Artificial Sequence
  Synthetic
tagcccgatagtatttcttc

SEQ ID NO: 28107 - DNA, 20 bp, Artificial Sequence
  Synthetic
gaaatactatcgggctattt

SEQ ID NO: 28108 - DNA, 20 bp, Artificial Sequence
  Synthetic
aatttctccttcctttccaa

SEQ ID NO: 28109 - DNA, 20 bp, Artificial Sequence
  Synthetic
atttctccttcctttccaaa

SEQ ID NO: 28110 - DNA, 20 bp, Artificial Sequence
  Synthetic
tttctccttcctttccaaag

SEQ ID NO: 28111 - DNA, 20 bp, Artificial Sequence
  Synthetic
tccttcctttccaaaggggc

SEQ ID NO: 28112 - DNA, 20 bp, Artificial Sequence
  Synthetic
acctgcccctttggaaagga

SEQ ID NO: 28113 - DNA, 20 bp, Artificial Sequence
  Synthetic
tatgacctgcccctttggaa

SEQ ID NO: 28114 - DNA, 20 bp, Artificial Sequence
  Synthetic
gttggtatgacctgcccctt

SEQ ID NO: 28115 - DNA, 20 bp, Artificial Sequence
  Synthetic
gttaagtagattaggcatgt

SEQ ID NO: 28116 - DNA, 20 bp, Artificial Sequence
  Synthetic
atcattgtgttaagtagatt

SEQ ID NO: 28117 - DNA, 20 bp, Artificial Sequence
  Synthetic
taatctacttaacacaatga

SEQ ID NO: 28118 - DNA, 20 bp, Artificial Sequence
  Synthetic
aaccacccatatctcatcaa

SEQ ID NO: 28119 - DNA, 20 bp, Artificial Sequence
  Synthetic
caccattgatgagatatggg

SEQ ID NO: 28120 - DNA, 20 bp, Artificial Sequence
  Synthetic
cctcaccattgatgagatat

SEQ ID NO: 28121 - DNA, 20 bp, Artificial Sequence
  Synthetic
ccctcaccattgatgagata

SEQ ID NO: 28122 - DNA, 20 bp, Artificial Sequence
  Synthetic
agaaagcactttgtctacaa

SEQ ID NO: 28123 - DNA, 20 bp, Artificial Sequence
  Synthetic
tagacaaagtgctttctatg

SEQ ID NO: 28124 - DNA, 20 bp, Artificial Sequence
  Synthetic
ttctatgcggattgtgaaga

SEQ ID NO: 28125 - DNA, 20 bp, Artificial Sequence
  Synthetic
tatgcggattgtgaagaagg

SEQ ID NO: 28126 - DNA, 20 bp, Artificial Sequence
  Synthetic
cttttttcttagctcccttc

SEQ ID NO: 28127 - DNA, 20 bp, Artificial Sequence
  Synthetic
cttcagtatattgtccagaa

SEQ ID NO: 28128 - DNA, 20 bp, Artificial Sequence
  Synthetic
gcttcagtatattgtccaga

SEQ ID NO: 28129 - DNA, 20 bp, Artificial Sequence
  Synthetic
gctcctatctgcattgtgaa

SEQ ID NO: 28130 - DNA, 20 bp, Artificial Sequence
  Synthetic
ctcctatctgcattgtgaat

SEQ ID NO: 28131 - DNA, 20 bp, Artificial Sequence
  Synthetic
agcccattcacaatgcagat

SEQ ID NO: 28132 - DNA, 20 bp, Artificial Sequence
  Synthetic
tactatctcccaactagaga

SEQ ID NO: 28133 - DNA, 20 bp, Artificial Sequence
  Synthetic
cctcttatccttctctagtt

SEQ ID NO: 28134 - DNA, 20 bp, Artificial Sequence
  Synthetic
cccaactagagaaggataag

SEQ ID NO: 28135 - DNA, 20 bp, Artificial Sequence
  Synthetic
tcctcttatccttctctagt

SEQ ID NO: 28136 - DNA, 20 bp, Artificial Sequence
  Synthetic
taatccagactacgtagagg

SEQ ID NO: 28137 - DNA, 20 bp, Artificial Sequence
  Synthetic
cagactacgtagaggtggat

SEQ ID NO: 28138 - DNA, 20 bp, Artificial Sequence
  Synthetic
cgtagaggtggataggatat

SEQ ID NO: 28139 - DNA, 20 bp, Artificial Sequence
  Synthetic
tgagtctcacagtattgaca

SEQ ID NO: 28140 - DNA, 20 bp, Artificial Sequence
  Synthetic
cacagtattgacaaggacaa

SEQ ID NO: 28141 - DNA, 20 bp, Artificial Sequence
  Synthetic
acagtattgacaaggacaat

SEQ ID NO: 28142 - DNA, 20 bp, Artificial Sequence
  Synthetic
cagtattgacaaggacaatg

SEQ ID NO: 28143 - DNA, 20 bp, Artificial Sequence
  Synthetic
tattgacaaggacaatgggg

SEQ ID NO: 28144 - DNA, 20 bp, Artificial Sequence
  Synthetic
ctagcccgttatttactacc

SEQ ID NO: 28145 - DNA, 20 bp, Artificial Sequence
  Synthetic
ttcaccaggtagtaaataac

SEQ ID NO: 28146 - DNA, 20 bp, Artificial Sequence
  Synthetic
tttcaccaggtagtaaataa

SEQ ID NO: 28147 - DNA, 20 bp, Artificial Sequence
  Synthetic
ttatttactacctggtgaaa

SEQ ID NO: 28148 - DNA, 20 bp, Artificial Sequence
  Synthetic
gcagagagcaccatttcacc

SEQ ID NO: 28149 - DNA, 20 bp, Artificial Sequence
  Synthetic
atggtgctctctgccctatg

SEQ ID NO: 28150 - DNA, 20 bp, Artificial Sequence
  Synthetic
tgccctatgaggatagcaca

SEQ ID NO: 28151 - DNA, 20 bp, Artificial Sequence
  Synthetic
gccctatgaggatagcacat

SEQ ID NO: 28152 - DNA, 20 bp, Artificial Sequence
  Synthetic
tcccatgtgctatcctcata

SEQ ID NO: 28153 - DNA, 20 bp, Artificial Sequence
  Synthetic
ctcccatgtgctatcctcat

SEQ ID NO: 28154 - DNA, 20 bp, Artificial Sequence
  Synthetic
gctaaaagaagatgttgatg

SEQ ID NO: 28155 - DNA, 20 bp, Artificial Sequence
  Synthetic
ctaaaagaagatgttgatga

SEQ ID NO: 28156 - DNA, 20 bp, Artificial Sequence
  Synthetic
gcaagattcgagaatttaaa

SEQ ID NO: 28157 - DNA, 20 bp, Artificial Sequence
  Synthetic
tcaactcagggaatatcaac

SEQ ID NO: 28158 - DNA, 20 bp, Artificial Sequence
  Synthetic
ctcagggaatatcaactgga

SEQ ID NO: 28159 - DNA, 20 bp, Artificial Sequence
  Synthetic
atcaactggaaggactcaac

SEQ ID NO: 28160 - DNA, 20 bp, Artificial Sequence
  Synthetic
tcaactggctcttgttcaat

SEQ ID NO: 28161 - DNA, 20 bp, Artificial Sequence
  Synthetic
tcttgttcaattggtacaat

SEQ ID NO: 28162 - DNA, 20 bp, Artificial Sequence
  Synthetic
ctgcatcttagcagatgaaa

SEQ ID NO: 28163 - DNA, 20 bp, Artificial Sequence
  Synthetic
tgcatcttagcagatgaaat

SEQ ID NO: 28164 - DNA, 20 bp, Artificial Sequence
  Synthetic
ttagcagatgaaatgggtct

SEQ ID NO: 28165 - DNA, 20 bp, Artificial Sequence
  Synthetic
cagtcagaaggatttcatag

SEQ ID NO: 28166 - DNA, 20 bp, Artificial Sequence
  Synthetic
ctctatgaaatccttctgac

SEQ ID NO: 28167 - DNA, 20 bp, Artificial Sequence
  Synthetic
atccttctgactggtataag

SEQ ID NO: 28168 - DNA, 20 bp, Artificial Sequence
  Synthetic
gtcctcttataccagtcaga

SEQ ID NO: 28169 - DNA, 20 bp, Artificial Sequence
  Synthetic
agtggagcaataatcaggaa

SEQ ID NO: 28170 - DNA, 20 bp, Artificial Sequence
  Synthetic
tagaaagtggagcaataatc

SEQ ID NO: 28171 - DNA, 20 bp, Artificial Sequence
  Synthetic
cagtttgcaatagtagaaag

SEQ ID NO: 28172 - DNA, 20 bp, Artificial Sequence
  Synthetic
cactttctactattgcaaac

SEQ ID NO: 28173 - DNA, 20 bp, Artificial Sequence
  Synthetic
actttctactattgcaaact

SEQ ID NO: 28174 - DNA, 20 bp, Artificial Sequence
  Synthetic
gggagagagaatttcgtacg

SEQ ID NO: 28175 - DNA, 20 bp, Artificial Sequence
  Synthetic
gtggactgatattaacgttg

SEQ ID NO: 28176 - DNA, 20 bp, Artificial Sequence
  Synthetic
attaacgttgtggtttatca

SEQ ID NO: 28177 - DNA, 20 bp, Artificial Sequence
  Synthetic
ttaacgttgtggtttatcat

SEQ ID NO: 28178 - DNA, 20 bp, Artificial Sequence
  Synthetic
gtatcatttgtctgctaatc

SEQ ID NO: 28179 - DNA, 20 bp, Artificial Sequence
  Synthetic
agcaatacgagatgtacttc

SEQ ID NO: 28180 - DNA, 20 bp, Artificial Sequence
  Synthetic
gcaatacgagatgtacttca

SEQ ID NO: 28181 - DNA, 20 bp, Artificial Sequence
  Synthetic
gatgtacttcagggattcac

SEQ ID NO: 28182 - DNA, 20 bp, Artificial Sequence
  Synthetic
ttctaggggcgtatcattcg

SEQ ID NO: 28183 - DNA, 20 bp, Artificial Sequence
  Synthetic
caaaagtggtgatgatggct

SEQ ID NO: 28184 - DNA, 20 bp, Artificial Sequence
  Synthetic
catttcaaaagtggtgatga

SEQ ID NO: 28185 - DNA, 20 bp, Artificial Sequence
  Synthetic
accacttttgaaatgattct

SEQ ID NO: 28186 - DNA, 20 bp, Artificial Sequence
  Synthetic
tccaagaatcatttcaaaag

SEQ ID NO: 28187 - DNA, 20 bp, Artificial Sequence
  Synthetic
acttttgaaatgattcttgg

SEQ ID NO: 28188 - DNA, 20 bp, Artificial Sequence
  Synthetic
gaaatgattcttggaggctg

SEQ ID NO: 28189 - DNA, 20 bp, Artificial Sequence
  Synthetic
gagagcttaatgcaattgaa

SEQ ID NO: 28190 - DNA, 20 bp, Artificial Sequence
  Synthetic
tgattattgatgaagcacat

SEQ ID NO: 28191 - DNA, 20 bp, Artificial Sequence
  Synthetic
taaaaattgtaaactcttag

SEQ ID NO: 28192 - DNA, 20 bp, Artificial Sequence
  Synthetic
aaaaattgtaaactcttaga

SEQ ID NO: 28193 - DNA, 20 bp, Artificial Sequence
  Synthetic
gggcctgaaactcatgaatc

SEQ ID NO: 28194 - DNA, 20 bp, Artificial Sequence
  Synthetic
ttaccagattcatgagtttc

SEQ ID NO: 28195 - DNA, 20 bp, Artificial Sequence
  Synthetic
tcactttttgtaggaacaca

SEQ ID NO: 28196 - DNA, 20 bp, Artificial Sequence
  Synthetic
gaacacaaggtgcttttgac

SEQ ID NO: 28197 - DNA, 20 bp, Artificial Sequence
  Synthetic
ttcaactgtattttggagag

SEQ ID NO: 28198 - DNA, 20 bp, Artificial Sequence
  Synthetic
cttcaactgtattttggaga

SEQ ID NO: 28199 - DNA, 20 bp, Artificial Sequence
  Synthetic
tcttcaactgtattttggag

SEQ ID NO: 28200 - DNA, 20 bp, Artificial Sequence
  Synthetic
atagttcttcaactgtattt

SEQ ID NO: 28201 - DNA, 20 bp, Artificial Sequence
  Synthetic
ttcactttcttgaaccctta

SEQ ID NO: 28202 - DNA, 20 bp, Artificial Sequence
  Synthetic
gattcagaaggaaaccttaa

SEQ ID NO: 28203 - DNA, 20 bp, Artificial Sequence
  Synthetic
tgattcagaaggaaacctta

SEQ ID NO: 28204 - DNA, 20 bp, Artificial Sequence
  Synthetic
tgcataaatgttgattcaga

SEQ ID NO: 28205 - DNA, 20 bp, Artificial Sequence
  Synthetic
tcaacatttatgcaagaatt

SEQ ID NO: 28206 - DNA, 20 bp, Artificial Sequence
  Synthetic
caacatttatgcaagaattt

SEQ ID NO: 28207 - DNA, 20 bp, Artificial Sequence
  Synthetic
aacatttatgcaagaatttg

SEQ ID NO: 28208 - DNA, 20 bp, Artificial Sequence
  Synthetic
atttggggatctgaaaacag

SEQ ID NO: 28209 - DNA, 20 bp, Artificial Sequence
  Synthetic
ggatctgaaaacagaggaac

SEQ ID NO: 28210 - DNA, 20 bp, Artificial Sequence
  Synthetic
tattcaggtacagaaacttc

SEQ ID NO: 28211 - DNA, 20 bp, Artificial Sequence
  Synthetic
gtctcaacatcattggtttc

SEQ ID NO: 28212 - DNA, 20 bp, Artificial Sequence
  Synthetic
tttaatcgtctcaacatcat

SEQ ID NO: 28213 - DNA, 20 bp, Artificial Sequence
  Synthetic
gagacgattaaaagaagatg

SEQ ID NO: 28214 - DNA, 20 bp, Artificial Sequence
  Synthetic
agaagatgtggaaaagaagt

SEQ ID NO: 28215 - DNA, 20 bp, Artificial Sequence
  Synthetic
tcaatgatggtttcttcttt

SEQ ID NO: 28216 - DNA, 20 bp, Artificial Sequence
  Synthetic
agtaagttctacttcaatga

SEQ ID NO: 28217 - DNA, 20 bp, Artificial Sequence
  Synthetic
atattcaaaagaaatactac

SEQ ID NO: 28218 - DNA, 20 bp, Artificial Sequence
  Synthetic
tattcaaaagaaatactacc

SEQ ID NO: 28219 - DNA, 20 bp, Artificial Sequence
  Synthetic
gaaatactaccgggctatct

SEQ ID NO: 28220 - DNA, 20 bp, Artificial Sequence
  Synthetic
agttcttttccaagatagcc

SEQ ID NO: 28221 - DNA, 20 bp, Artificial Sequence
  Synthetic
aacttttcttttttatccaa

SEQ ID NO: 28222 - DNA, 20 bp, Artificial Sequence
  Synthetic
tcttttttatccaaaggagc

SEQ ID NO: 28223 - DNA, 20 bp, Artificial Sequence
  Synthetic
attagtttgtcctgctcctt

SEQ ID NO: 28224 - DNA, 20 bp, Artificial Sequence
  Synthetic
acaaactaatgtacctaact

SEQ ID NO: 28225 - DNA, 20 bp, Artificial Sequence
  Synthetic
atcatggtattgaccaagtt

SEQ ID NO: 28226 - DNA, 20 bp, Artificial Sequence
  Synthetic
taacttggtcaataccatga

SEQ ID NO: 28227 - DNA, 20 bp, Artificial Sequence
  Synthetic
tcaataccatgatggagctc

SEQ ID NO: 28228 - DNA, 20 bp, Artificial Sequence
  Synthetic
acatttcctgagctccatca

SEQ ID NO: 28229 - DNA, 20 bp, Artificial Sequence
  Synthetic
aatcatccatatcttataaa

SEQ ID NO: 28230 - DNA, 20 bp, Artificial Sequence
  Synthetic
tagctaccttttataagata

SEQ ID NO: 28231 - DNA, 20 bp, Artificial Sequence
  Synthetic
agtctctttttgtgaagata

SEQ ID NO: 28232 - DNA, 20 bp, Artificial Sequence
  Synthetic
ttttgtgaagataaggatac

SEQ ID NO: 28233 - DNA, 20 bp, Artificial Sequence
  Synthetic
tgaagataaggatactggtg

SEQ ID NO: 28234 - DNA, 20 bp, Artificial Sequence
  Synthetic
tttactaagtagtaaataac

SEQ ID NO: 28235 - DNA, 20 bp, Artificial Sequence
  Synthetic
ttatttactacttagtaaaa

SEQ ID NO: 28236 - DNA, 20 bp, Artificial Sequence
  Synthetic
tgccatatgaagatagtact

SEQ ID NO: 28237 - DNA, 20 bp, Artificial Sequence
  Synthetic
gccatatgaagatagtactt

SEQ ID NO: 28238 - DNA, 20 bp, Artificial Sequence
  Synthetic
tcccaagtactatcttcata

SEQ ID NO: 28239 - DNA, 20 bp, Artificial Sequence
  Synthetic
atcttctagaaccgtaaaaa

SEQ ID NO: 28240 - DNA, 20 bp, Artificial Sequence
  Synthetic
agtacttacttcctttttta

SEQ ID NO: 28241 - DNA, 20 bp, Artificial Sequence
  Synthetic
ttcttttcttagatatcacc

SEQ ID NO: 28242 - DNA, 20 bp, Artificial Sequence
  Synthetic
tctgtatcaatcatcactcc

SEQ ID NO: 28243 - DNA, 20 bp, Artificial Sequence
  Synthetic
gctcctatcttcactgtgag

SEQ ID NO: 28244 - DNA, 20 bp, Artificial Sequence
  Synthetic
ctcctatcttcactgtgagt

SEQ ID NO: 28245 - DNA, 20 bp, Artificial Sequence
  Synthetic
ggcccactcacagtgaagat

SEQ ID NO: 28246 - DNA, 20 bp, Artificial Sequence
  Synthetic
tttcaaaagctgctcttctg

SEQ ID NO: 28247 - DNA, 20 bp, Artificial Sequence
  Synthetic
agcagcttttgaaagataaa

SEQ ID NO: 28248 - DNA, 20 bp, Artificial Sequence
  Synthetic
tgaatcgtttgattttctgc

SEQ ID NO: 28249 - DNA, 20 bp, Artificial Sequence
  Synthetic
gacagctaatcgtactcatg

SEQ ID NO: 28250 - DNA, 20 bp, Artificial Sequence
  Synthetic
tgacagctaatcgtactcat

SEQ ID NO: 28251 - DNA, 20 bp, Artificial Sequence
  Synthetic
gtgacagctaatcgtactca

SEQ ID NO: 28252 - DNA, 20 bp, Artificial Sequence
  Synthetic
acatggagaggatcacatct

SEQ ID NO: 28253 - DNA, 20 bp, Artificial Sequence
  Synthetic
tggtgttgaaggacatggag

SEQ ID NO: 28254 - DNA, 20 bp, Artificial Sequence
  Synthetic
tccatgtccttcaacaccaa

SEQ ID NO: 28255 - DNA, 20 bp, Artificial Sequence
  Synthetic
gccgttggtgttgaaggaca

SEQ ID NO: 28256 - DNA, 20 bp, Artificial Sequence
  Synthetic
caggctgccgttggtgttga

SEQ ID NO: 28257 - DNA, 20 bp, Artificial Sequence
  Synthetic
caacaccaacggcagcctgt

SEQ ID NO: 28258 - DNA, 20 bp, Artificial Sequence
  Synthetic
ggtggccaacaggctgccgt

SEQ ID NO: 28259 - DNA, 20 bp, Artificial Sequence
  Synthetic
ctttgcaggtggtggccaac

SEQ ID NO: 28260 - DNA, 20 bp, Artificial Sequence
  Synthetic
cttgcggtctttgcaggtgg

SEQ ID NO: 28261 - DNA, 20 bp, Artificial Sequence
  Synthetic
aatcttgcggtctttgcagg

SEQ ID NO: 28262 - DNA, 20 bp, Artificial Sequence
  Synthetic
ccgaatcttgcggtctttgc

SEQ ID NO: 28263 - DNA, 20 bp, Artificial Sequence
  Synthetic
cctgcaaagaccgcaagatt

SEQ ID NO: 28264 - DNA, 20 bp, Artificial Sequence
  Synthetic
ctgcaaagaccgcaagattc

SEQ ID NO: 28265 - DNA, 20 bp, Artificial Sequence
  Synthetic
ggtcaataacccgaatcttg

SEQ ID NO: 28266 - DNA, 20 bp, Artificial Sequence
  Synthetic
ggcctacaggaaggaactcg

SEQ ID NO: 28267 - DNA, 20 bp, Artificial Sequence
  Synthetic
gcctacaggaaggaactcgt

SEQ ID NO: 28268 - DNA, 20 bp, Artificial Sequence
  Synthetic
gtgggccacgcgcgcagagt

SEQ ID NO: 28269 - DNA, 20 bp, Artificial Sequence
  Synthetic
ccaggcctactctgcgcgcg

SEQ ID NO: 28270 - DNA, 20 bp, Artificial Sequence
  Synthetic
ccacgcgcgcagagtaggcc

SEQ ID NO: 28271 - DNA, 20 bp, Artificial Sequence
  Synthetic
cgcgcgcagagtaggcctgg

SEQ ID NO: 28272 - DNA, 20 bp, Artificial Sequence
  Synthetic
gcagagtaggcctggtggag

SEQ ID NO: 28273 - DNA, 20 bp, Artificial Sequence
  Synthetic
ccgtggggtgccactccacc

SEQ ID NO: 28274 - DNA, 20 bp, Artificial Sequence
  Synthetic
cctggtggagtggcacccca

SEQ ID NO: 28275 - DNA, 20 bp, Artificial Sequence
  Synthetic
agaggatgttggcggccgtg

SEQ ID NO: 28276 - DNA, 20 bp, Artificial Sequence
  Synthetic
aagaggatgttggcggccgt

SEQ ID NO: 28277 - DNA, 20 bp, Artificial Sequence
  Synthetic
gaagaggatgttggcggccg

SEQ ID NO: 28278 - DNA, 20 bp, Artificial Sequence
  Synthetic
agcactgaagaggatgttgg

SEQ ID NO: 28279 - DNA, 20 bp, Artificial Sequence
  Synthetic
gccaacatcctcttcagtgc

SEQ ID NO: 28280 - DNA, 20 bp, Artificial Sequence
  Synthetic
gccagcactgaagaggatgt

SEQ ID NO: 28281 - DNA, 20 bp, Artificial Sequence
  Synthetic
agtcatagccagcactgaag

SEQ ID NO: 28282 - DNA, 20 bp, Artificial Sequence
  Synthetic
cagtgctggctatgactaca

SEQ ID NO: 28283 - DNA, 20 bp, Artificial Sequence
  Synthetic
ctgccatgcaggtgatgatc

SEQ ID NO: 28284 - DNA, 20 bp, Artificial Sequence
  Synthetic
gcaggtgatgatctggaacc

SEQ ID NO: 28285 - DNA, 20 bp, Artificial Sequence
  Synthetic
cccactacccaaaagtctgc

SEQ ID NO: 28286 - DNA, 20 bp, Artificial Sequence
  Synthetic
ccaaaagtctgcgggcacag

SEQ ID NO: 28287 - DNA, 20 bp, Artificial Sequence
  Synthetic
cgggcacagaggcaacgttt

SEQ ID NO: 28288 - DNA, 20 bp, Artificial Sequence
  Synthetic
gcaacgttttggatgtcaag

SEQ ID NO: 28289 - DNA, 20 bp, Artificial Sequence
  Synthetic
cgatctcaaaatcatcaaaa

SEQ ID NO: 28290 - DNA, 20 bp, Artificial Sequence
  Synthetic
gcgatctcaaaatcatcaaa

SEQ ID NO: 28291 - DNA, 20 bp, Artificial Sequence
  Synthetic
tgtggcatcttcagaacagg

SEQ ID NO: 28292 - DNA, 20 bp, Artificial Sequence
  Synthetic
cactgtggcatcttcagaac

SEQ ID NO: 28293 - DNA, 20 bp, Artificial Sequence
  Synthetic
tcccctgccagattaagatc

SEQ ID NO: 28294 - DNA, 20 bp, Artificial Sequence
  Synthetic
ggatgctccagatcttaatc

SEQ ID NO: 28295 - DNA, 20 bp, Artificial Sequence
  Synthetic
acccagagtcattacctttc

SEQ ID NO: 28296 - DNA, 20 bp, Artificial Sequence
  Synthetic
gccggaaaggtaatgactct

SEQ ID NO: 28297 - DNA, 20 bp, Artificial Sequence
  Synthetic
tgccggaaaggtaatgactc

SEQ ID NO: 28298 - DNA, 20 bp, Artificial Sequence
  Synthetic
ggatctacaggctgccggaa

SEQ ID NO: 28299 - DNA, 20 bp, Artificial Sequence
  Synthetic
gctggggatctacaggctgc

SEQ ID NO: 28300 - DNA, 20 bp, Artificial Sequence
  Synthetic
ccgaggagctggggatctac

SEQ ID NO: 28301 - DNA, 20 bp, Artificial Sequence
  Synthetic
cctgtagatccccagctcct

SEQ ID NO: 28302 - DNA, 20 bp, Artificial Sequence
  Synthetic
actggaattccgaggagctg

SEQ ID NO: 28303 - DNA, 20 bp, Artificial Sequence
  Synthetic
tactggaattccgaggagct

SEQ ID NO: 28304 - DNA, 20 bp, Artificial Sequence
  Synthetic
ttactggaattccgaggagc

SEQ ID NO: 28305 - DNA, 20 bp, Artificial Sequence
  Synthetic
attaacttactggaattccg

SEQ ID NO: 28306 - DNA, 20 bp, Artificial Sequence
  Synthetic
tgacatcgtaaagaatccca

SEQ ID NO: 28307 - DNA, 20 bp, Artificial Sequence
  Synthetic
ttgatggtggagaggtccat

SEQ ID NO: 28308 - DNA, 20 bp, Artificial Sequence
  Synthetic
cttgatggtggagaggtcca

SEQ ID NO: 28309 - DNA, 20 bp, Artificial Sequence
  Synthetic
tggacctctccaccatcaag

SEQ ID NO: 28310 - DNA, 20 bp, Artificial Sequence
  Synthetic
gcttccgcttgatggtggag

SEQ ID NO: 28311 - DNA, 20 bp, Artificial Sequence
  Synthetic
ctccaccatcaagcggaagc

SEQ ID NO: 28312 - DNA, 20 bp, Artificial Sequence
  Synthetic
gtccagcttccgcttgatgg

SEQ ID NO: 28313 - DNA, 20 bp, Artificial Sequence
  Synthetic
tgtgtccagcttccgcttga

SEQ ID NO: 28314 - DNA, 20 bp, Artificial Sequence
  Synthetic
atcaagcggaagctggacac

SEQ ID NO: 28315 - DNA, 20 bp, Artificial Sequence
  Synthetic
tcaagcggaagctggacaca

SEQ ID NO: 28316 - DNA, 20 bp, Artificial Sequence
  Synthetic
cagggcaataccaagagccc

SEQ ID NO: 28317 - DNA, 20 bp, Artificial Sequence
  Synthetic
ccacgtactgccagggctct

SEQ ID NO: 28318 - DNA, 20 bp, Artificial Sequence
  Synthetic
ccaagagccctggcagtacg

SEQ ID NO: 28319 - DNA, 20 bp, Artificial Sequence
  Synthetic
acgtcgtccacgtactgcca

SEQ ID NO: 28320 - DNA, 20 bp, Artificial Sequence
  Synthetic
gacgtcgtccacgtactgcc

SEQ ID NO: 28321 - DNA, 20 bp, Artificial Sequence
  Synthetic
ggcagtacgtggacgacgtc

SEQ ID NO: 28322 - DNA, 20 bp, Artificial Sequence
  Synthetic
ggctcatgttcaacaatgcc

SEQ ID NO: 28323 - DNA, 20 bp, Artificial Sequence
  Synthetic
tgtcttgcgattatagagcc

SEQ ID NO: 28324 - DNA, 20 bp, Artificial Sequence
  Synthetic
actgcaaaacttatagactc

SEQ ID NO: 28325 - DNA, 20 bp, Artificial Sequence
  Synthetic
tactgcaaaacttatagact

SEQ ID NO: 28326 - DNA, 20 bp, Artificial Sequence
  Synthetic
tcgaactctttatgaccatg

SEQ ID NO: 28327 - DNA, 20 bp, Artificial Sequence
  Synthetic
ggcacgtgacttcatccaca

SEQ ID NO: 28328 - DNA, 20 bp, Artificial Sequence
  Synthetic
gttctgttgggtggaaagca

SEQ ID NO: 28329 - DNA, 20 bp, Artificial Sequence
  Synthetic
ccaggatctgttctgttggg

SEQ ID NO: 28330 - DNA, 20 bp, Artificial Sequence
  Synthetic
ccacccaacagaacagatcc

SEQ ID NO: 28331 - DNA, 20 bp, Artificial Sequence
  Synthetic
aagccaggatctgttctgtt

SEQ ID NO: 28332 - DNA, 20 bp, Artificial Sequence
  Synthetic
gaagccaggatctgttctgt

SEQ ID NO: 28333 - DNA, 20 bp, Artificial Sequence
  Synthetic
acagaacagatcctggcttc

SEQ ID NO: 28334 - DNA, 20 bp, Artificial Sequence
  Synthetic
agatcctggcttctggttca

SEQ ID NO: 28335 - DNA, 20 bp, Artificial Sequence
  Synthetic
gatcctggcttctggttcaa

SEQ ID NO: 28336 - DNA, 20 bp, Artificial Sequence
  Synthetic
aatcccttgaaccagaagcc

SEQ ID NO: 28337 - DNA, 20 bp, Artificial Sequence
  Synthetic
gtgcactcccccaccaaccc

SEQ ID NO: 28338 - DNA, 20 bp, Artificial Sequence
  Synthetic
tgcactcccccaccaacccc

SEQ ID NO: 28339 - DNA, 20 bp, Artificial Sequence
  Synthetic
catgaacccggggttggtgg

SEQ ID NO: 28340 - DNA, 20 bp, Artificial Sequence
  Synthetic
tcatgaacccggggttggtg

SEQ ID NO: 28341 - DNA, 20 bp, Artificial Sequence
  Synthetic
gtcatgaacccggggttggt

SEQ ID NO: 28342 - DNA, 20 bp, Artificial Sequence
  Synthetic
cgtcatgaacccggggttgg

SEQ ID NO: 28343 - DNA, 20 bp, Artificial Sequence
  Synthetic
gcacgtcatgaacccggggt

SEQ ID NO: 28344 - DNA, 20 bp, Artificial Sequence
  Synthetic
cgctgcacgtcatgaacccg

SEQ ID NO: 28345 - DNA, 20 bp, Artificial Sequence
  Synthetic
tcgctgcacgtcatgaaccc

SEQ ID NO: 28346 - DNA, 20 bp, Artificial Sequence
  Synthetic
atcgctgcacgtcatgaacc

SEQ ID NO: 28347 - DNA, 20 bp, Artificial Sequence
  Synthetic
gcagcgatgacttcagagcg

SEQ ID NO: 28348 - DNA, 20 bp, Artificial Sequence
  Synthetic
atgacttcagagcgcggttt

SEQ ID NO: 28349 - DNA, 20 bp, Artificial Sequence
  Synthetic
tgctatgtcacatcacataa

SEQ ID NO: 28350 - DNA, 20 bp, Artificial Sequence
  Synthetic
ctataggtagctacacggca

SEQ ID NO: 28351 - DNA, 20 bp, Artificial Sequence
  Synthetic
ctctactataggtagctaca

SEQ ID NO: 28352 - DNA, 20 bp, Artificial Sequence
  Synthetic
gtagctacctatagtagaga

SEQ ID NO: 28353 - DNA, 20 bp, Artificial Sequence
  Synthetic
taactgtccatctctactat

SEQ ID NO: 28354 - DNA, 20 bp, Artificial Sequence
  Synthetic
gatggacagttaatagctac

SEQ ID NO: 28355 - DNA, 20 bp, Artificial Sequence
  Synthetic
atggacagttaatagctact

SEQ ID NO: 28356 - DNA, 20 bp, Artificial Sequence
  Synthetic
tttagaatttttggaaaaaa

SEQ ID NO: 28357 - DNA, 20 bp, Artificial Sequence
  Synthetic
gagaatgtatttagaatttt

SEQ ID NO: 28358 - DNA, 20 bp, Artificial Sequence
  Synthetic
tctaaatacattctctcaag

SEQ ID NO: 28359 - DNA, 20 bp, Artificial Sequence
  Synthetic
aagactctgtagctaaactt

SEQ ID NO: 28360 - DNA, 20 bp, Artificial Sequence
  Synthetic
agactctgtagctaaacttt

SEQ ID NO: 28361 - DNA, 20 bp, Artificial Sequence
  Synthetic
attaacggaacatatagcat

SEQ ID NO: 28362 - DNA, 20 bp, Artificial Sequence
  Synthetic
ggcactagaattgtaattaa

SEQ ID NO: 28363 - DNA, 20 bp, Artificial Sequence
  Synthetic
agtgccaatatgtacgtaac

SEQ ID NO: 28364 - DNA, 20 bp, Artificial Sequence
  Synthetic
gcttccagttacgtacatat

SEQ ID NO: 28365 - DNA, 20 bp, Artificial Sequence
  Synthetic
tatgtacgtaactggaagca

SEQ ID NO: 28366 - DNA, 20 bp, Artificial Sequence
  Synthetic
tacgtaactggaagcaagga

SEQ ID NO: 28367 - DNA, 20 bp, Artificial Sequence
  Synthetic
aggacggctgcatcaaatta

SEQ ID NO: 28368 - DNA, 20 bp, Artificial Sequence
  Synthetic
ggacggctgcatcaaattat

SEQ ID NO: 28369 - DNA, 20 bp, Artificial Sequence
  Synthetic
ggctgcatcaaattatggga

SEQ ID NO: 28370 - DNA, 20 bp, Artificial Sequence
  Synthetic
agcagcagcagcagatcaaa

SEQ ID NO: 28371 - DNA, 20 bp, Artificial Sequence
  Synthetic
aaacggtcagcccgcatgtg

SEQ ID NO: 28372 - DNA, 20 bp, Artificial Sequence
  Synthetic
ctcacactcaccacacatgc

SEQ ID NO: 28373 - DNA, 20 bp, Artificial Sequence
  Synthetic
cctcacactcaccacacatg

SEQ ID NO: 28374 - DNA, 20 bp, Artificial Sequence
  Synthetic
ccgcatgtgtggtgagtgtg

SEQ ID NO: 28375 - DNA, 20 bp, Artificial Sequence
  Synthetic
gtggtgagtgtgaggcatgt

SEQ ID NO: 28376 - DNA, 20 bp, Artificial Sequence
  Synthetic
tgaggcatgtcggcgcactg

SEQ ID NO: 28377 - DNA, 20 bp, Artificial Sequence
  Synthetic
tgtcggcgcactgaggactg

SEQ ID NO: 28378 - DNA, 20 bp, Artificial Sequence
  Synthetic
gtggtcactgtgatttctgt

SEQ ID NO: 28379 - DNA, 20 bp, Artificial Sequence
  Synthetic
tggtcactgtgatttctgtc

SEQ ID NO: 28380 - DNA, 20 bp, Artificial Sequence
  Synthetic
tgtcgggacatgaagaagtt

SEQ ID NO: 28381 - DNA, 20 bp, Artificial Sequence
  Synthetic
gtcgggacatgaagaagttc

SEQ ID NO: 28382 - DNA, 20 bp, Artificial Sequence
  Synthetic
tcgggacatgaagaagttcg

SEQ ID NO: 28383 - DNA, 20 bp, Artificial Sequence
  Synthetic
cgggacatgaagaagttcgg

SEQ ID NO: 28384 - DNA, 20 bp, Artificial Sequence
  Synthetic
tcgggggccccaacaagatc

SEQ ID NO: 28385 - DNA, 20 bp, Artificial Sequence
  Synthetic
acttctgccggatcttgttg

SEQ ID NO: 28386 - DNA, 20 bp, Artificial Sequence
  Synthetic
cacttctgccggatcttgtt

SEQ ID NO: 28387 - DNA, 20 bp, Artificial Sequence
  Synthetic
gcacttctgccggatcttgt

SEQ ID NO: 28388 - DNA, 20 bp, Artificial Sequence
  Synthetic
acaagatccggcagaagtgc

SEQ ID NO: 28389 - DNA, 20 bp, Artificial Sequence
  Synthetic
ggcgcagccggcacttctgc

SEQ ID NO: 28390 - DNA, 20 bp, Artificial Sequence
  Synthetic
gcagctggcactggcgcagc

SEQ ID NO: 28391 - DNA, 20 bp, Artificial Sequence
  Synthetic
cccgggcccgcagctggcac

SEQ ID NO: 28392 - DNA, 20 bp, Artificial Sequence
  Synthetic
tttgcggcagatgcagtaga

SEQ ID NO: 28393 - DNA, 20 bp, Artificial Sequence
  Synthetic
ctactgcatctgccgcaaac

SEQ ID NO: 28394 - DNA, 20 bp, Artificial Sequence
  Synthetic
agcagttgatgtccggtttg

SEQ ID NO: 28395 - DNA, 20 bp, Artificial Sequence
  Synthetic
atcatgaagcagttgatgtc

SEQ ID NO: 28396 - DNA, 20 bp, Artificial Sequence
  Synthetic
ggtgtgacaactgcaatgag

SEQ ID NO: 28397 - DNA, 20 bp, Artificial Sequence
  Synthetic
aactgcaatgagtggttcca

SEQ ID NO: 28398 - DNA, 20 bp, Artificial Sequence
  Synthetic
actgcaatgagtggttccat

SEQ ID NO: 28399 - DNA, 20 bp, Artificial Sequence
  Synthetic
ctgcaatgagtggttccatg

SEQ ID NO: 28400 - DNA, 20 bp, Artificial Sequence
  Synthetic
ggttccatggggactgcatc

SEQ ID NO: 28401 - DNA, 20 bp, Artificial Sequence
  Synthetic
tgatccggatgcagtcccca

SEQ ID NO: 28402 - DNA, 20 bp, Artificial Sequence
  Synthetic
catccggatcactgagaaga

SEQ ID NO: 28403 - DNA, 20 bp, Artificial Sequence
  Synthetic
tggccatcttctcagtgatc

SEQ ID NO: 28404 - DNA, 20 bp, Artificial Sequence
  Synthetic
gatcactgagaagatggcca

SEQ ID NO: 28405 - DNA, 20 bp, Artificial Sequence
  Synthetic
agaagatggccaaggccatc

SEQ ID NO: 28406 - DNA, 20 bp, Artificial Sequence
  Synthetic
gaagatggccaaggccatcc

SEQ ID NO: 28407 - DNA, 20 bp, Artificial Sequence
  Synthetic
tggccaaggccatccgggag

SEQ ID NO: 28408 - DNA, 20 bp, Artificial Sequence
  Synthetic
gtaccactcccggatggcct

SEQ ID NO: 28409 - DNA, 20 bp, Artificial Sequence
  Synthetic
ccgacagtaccactcccgga

SEQ ID NO: 28410 - DNA, 20 bp, Artificial Sequence
  Synthetic
ccatccgggagtggtactgt

SEQ ID NO: 28411 - DNA, 20 bp, Artificial Sequence
  Synthetic
catccgggagtggtactgtc

SEQ ID NO: 28412 - DNA, 20 bp, Artificial Sequence
  Synthetic
actcccgacagtaccactcc

SEQ ID NO: 28413 - DNA, 20 bp, Artificial Sequence
  Synthetic
tggtactgtcgggagtgcag

SEQ ID NO: 28414 - DNA, 20 bp, Artificial Sequence
  Synthetic
tcctctactcgctgccgcac

SEQ ID NO: 28415 - DNA, 20 bp, Artificial Sequence
  Synthetic
gcgttgacaggatgcctgtg

SEQ ID NO: 28416 - DNA, 20 bp, Artificial Sequence
  Synthetic
cacaggcatcctgtcaacgc

SEQ ID NO: 28417 - DNA, 20 bp, Artificial Sequence
  Synthetic
gatatcacacctgcgttgac

SEQ ID NO: 28418 - DNA, 20 bp, Artificial Sequence
  Synthetic
ccatcgggactgaaacaagc

SEQ ID NO: 28419 - DNA, 20 bp, Artificial Sequence
  Synthetic
ccagcttgtttcagtcccga

SEQ ID NO: 28420 - DNA, 20 bp, Artificial Sequence
  Synthetic
gtttcagtcccgatggagcc

SEQ ID NO: 28421 - DNA, 20 bp, Artificial Sequence
  Synthetic
gtcaggagccgggctccatc

SEQ ID NO: 28422 - DNA, 20 bp, Artificial Sequence
  Synthetic
ggtcaggagccgggctccat

SEQ ID NO: 28423 - DNA, 20 bp, Artificial Sequence
  Synthetic
tggagcccggctcctgacca

SEQ ID NO: 28424 - DNA, 20 bp, Artificial Sequence
  Synthetic
ctggtccgtggtcaggagcc

SEQ ID NO: 28425 - DNA, 20 bp, Artificial Sequence
  Synthetic
tctggtccgtggtcaggagc

SEQ ID NO: 28426 - DNA, 20 bp, Artificial Sequence
  Synthetic
cgctcttctggtccgtggtc

SEQ ID NO: 28427 - DNA, 20 bp, Artificial Sequence
  Synthetic
gatctcgctcttctggtccg

SEQ ID NO: 28428 - DNA, 20 bp, Artificial Sequence
  Synthetic
aaactcggatctcgctcttc

SEQ ID NO: 28429 - DNA, 20 bp, Artificial Sequence
  Synthetic
actgggaagcagagtaaact

SEQ ID NO: 28430 - DNA, 20 bp, Artificial Sequence
  Synthetic
gctgaacatggacggcaaag

SEQ ID NO: 28431 - DNA, 20 bp, Artificial Sequence
  Synthetic
caaaaagaaagtgacgcatg

SEQ ID NO: 28432 - DNA, 20 bp, Artificial Sequence
  Synthetic
ccaatcacagcatgggttca

SEQ ID NO: 28433 - DNA, 20 bp, Artificial Sequence
  Synthetic
ccctgaacccatgctgtgat

SEQ ID NO: 28434 - DNA, 20 bp, Artificial Sequence
  Synthetic
accaatcacagcatgggttc

SEQ ID NO: 28435 - DNA, 20 bp, Artificial Sequence
  Synthetic
ccaggaaccaatcacagcat

SEQ ID NO: 28436 - DNA, 20 bp, Artificial Sequence
  Synthetic
cccatgctgtgattggttcc

SEQ ID NO: 28437 - DNA, 20 bp, Artificial Sequence
  Synthetic
gccaggaaccaatcacagca

SEQ ID NO: 28438 - DNA, 20 bp, Artificial Sequence
  Synthetic
gatctacggaggctgtggcc

SEQ ID NO: 28439 - DNA, 20 bp, Artificial Sequence
  Synthetic
tgtttgatctacggaggctg

SEQ ID NO: 28440 - DNA, 20 bp, Artificial Sequence
  Synthetic
tttcactgtttgatctacgg

SEQ ID NO: 28441 - DNA, 20 bp, Artificial Sequence
  Synthetic
aattttcactgtttgatcta

SEQ ID NO: 28442 - DNA, 20 bp, Artificial Sequence
  Synthetic
tagatcaaacagtgaaaatt

SEQ ID NO: 28443 - DNA, 20 bp, Artificial Sequence
  Synthetic
agatcaaacagtgaaaattt

SEQ ID NO: 28444 - DNA, 20 bp, Artificial Sequence
  Synthetic
tgacaggagggctacatcct

SEQ ID NO: 28445 - DNA, 20 bp, Artificial Sequence
  Synthetic
ggagggctacatccttggcg

SEQ ID NO: 28446 - DNA, 20 bp, Artificial Sequence
  Synthetic
gtgagttgggtgccacgcca

SEQ ID NO: 28447 - DNA, 20 bp, Artificial Sequence
  Synthetic
ccacggtgctggggtgagtt

SEQ ID NO: 28448 - DNA, 20 bp, Artificial Sequence
  Synthetic
cccaactcaccccagcaccg

SEQ ID NO: 28449 - DNA, 20 bp, Artificial Sequence
  Synthetic
gccacggtgctggggtgagt

SEQ ID NO: 28450 - DNA, 20 bp, Artificial Sequence
  Synthetic
tcaccccagcaccgtggctg

SEQ ID NO: 28451 - DNA, 20 bp, Artificial Sequence
  Synthetic
caccccagcaccgtggctgt

SEQ ID NO: 28452 - DNA, 20 bp, Artificial Sequence
  Synthetic
aacccacagccacggtgctg

SEQ ID NO: 28453 - DNA, 20 bp, Artificial Sequence
  Synthetic
gaacccacagccacggtgct

SEQ ID NO: 28454 - DNA, 20 bp, Artificial Sequence
  Synthetic
ggaacccacagccacggtgc

SEQ ID NO: 28455 - DNA, 20 bp, Artificial Sequence
  Synthetic
accgtggctgtgggttccaa

SEQ ID NO: 28456 - DNA, 20 bp, Artificial Sequence
  Synthetic
ccctttggaacccacagcca

SEQ ID NO: 28457 - DNA, 20 bp, Artificial Sequence
  Synthetic
ccgtggctgtgggttccaaa

SEQ ID NO: 28458 - DNA, 20 bp, Artificial Sequence
  Synthetic
cgtggctgtgggttccaaag

SEQ ID NO: 28459 - DNA, 20 bp, Artificial Sequence
  Synthetic
gtggctgtgggttccaaagg

SEQ ID NO: 28460 - DNA, 20 bp, Artificial Sequence
  Synthetic
gagcatgatatctccccctt

SEQ ID NO: 28461 - DNA, 20 bp, Artificial Sequence
  Synthetic
aagggggagatatcatgctc

SEQ ID NO: 28462 - DNA, 20 bp, Artificial Sequence
  Synthetic
gatatcatgctctggaattt

SEQ ID NO: 28463 - DNA, 20 bp, Artificial Sequence
  Synthetic
ctggcggcaaatgcaataca

SEQ ID NO: 28464 - DNA, 20 bp, Artificial Sequence
  Synthetic
gctggcggcaaatgcaatac

SEQ ID NO: 28465 - DNA, 20 bp, Artificial Sequence
  Synthetic
gccgccagcctcacaacaac

SEQ ID NO: 28466 - DNA, 20 bp, Artificial Sequence
  Synthetic
acctgttgttgtgaggctgg

SEQ ID NO: 28467 - DNA, 20 bp, Artificial Sequence
  Synthetic
gccagcctcacaacaacagg

SEQ ID NO: 28468 - DNA, 20 bp, Artificial Sequence
  Synthetic
cccacctgttgttgtgaggc

SEQ ID NO: 28469 - DNA, 20 bp, Artificial Sequence
  Synthetic
ccagcctcacaacaacaggt

SEQ ID NO: 28470 - DNA, 20 bp, Artificial Sequence
  Synthetic
atgacccacctgttgttgtg

SEQ ID NO: 28471 - DNA, 20 bp, Artificial Sequence
  Synthetic
gctgtgaccgctgtgaagaa

SEQ ID NO: 28472 - DNA, 20 bp, Artificial Sequence
  Synthetic
catgaaaccattcttcacag

SEQ ID NO: 28473 - DNA, 20 bp, Artificial Sequence
  Synthetic
cgctgtgaagaatggtttca

SEQ ID NO: 28474 - DNA, 20 bp, Artificial Sequence
  Synthetic
atggtttcatggcgattgtg

SEQ ID NO: 28475 - DNA, 20 bp, Artificial Sequence
  Synthetic
tggtttcatggcgattgtgt

SEQ ID NO: 28476 - DNA, 20 bp, Artificial Sequence
  Synthetic
cgattgtgtgggcatttctg

SEQ ID NO: 28477 - DNA, 20 bp, Artificial Sequence
  Synthetic
gtgggcatttctgaggctcg

SEQ ID NO: 28478 - DNA, 20 bp, Artificial Sequence
  Synthetic
tgggcatttctgaggctcga

SEQ ID NO: 28479 - DNA, 20 bp, Artificial Sequence
  Synthetic
gcatttctgaggctcgaggg

SEQ ID NO: 28480 - DNA, 20 bp, Artificial Sequence
  Synthetic
tgaggctcgagggaggcttt

SEQ ID NO: 28481 - DNA, 20 bp, Artificial Sequence
  Synthetic
ctcgagggaggcttttggaa

SEQ ID NO: 28482 - DNA, 20 bp, Artificial Sequence
  Synthetic
gggaggcttttggaaaggaa

SEQ ID NO: 28483 - DNA, 20 bp, Artificial Sequence
  Synthetic
ggaggcttttggaaaggaat

SEQ ID NO: 28484 - DNA, 20 bp, Artificial Sequence
  Synthetic
gaggcttttggaaaggaatg

SEQ ID NO: 28485 - DNA, 20 bp, Artificial Sequence
  Synthetic
cttgcagaatggtgcagttt

SEQ ID NO: 28486 - DNA, 20 bp, Artificial Sequence
  Synthetic
acttgcagaatggtgcagtt

SEQ ID NO: 28487 - DNA, 20 bp, Artificial Sequence
  Synthetic
gctgcccaagctgcggaccc

SEQ ID NO: 28488 - DNA, 20 bp, Artificial Sequence
  Synthetic
cggaccctggatgtgttttc

SEQ ID NO: 28489 - DNA, 20 bp, Artificial Sequence
  Synthetic
gcagccagaaaacacatcca

SEQ ID NO: 28490 - DNA, 20 bp, Artificial Sequence
  Synthetic
cgcagccagaaaacacatcc

SEQ ID NO: 28491 - DNA, 20 bp, Artificial Sequence
  Synthetic
ctggatgtgttttctggctg

SEQ ID NO: 28492 - DNA, 20 bp, Artificial Sequence
  Synthetic
tggatgtgttttctggctgc

SEQ ID NO: 28493 - DNA, 20 bp, Artificial Sequence
  Synthetic
ggatgtgttttctggctgcg

SEQ ID NO: 28494 - DNA, 20 bp, Artificial Sequence
  Synthetic
gatgtgttttctggctgcgg

SEQ ID NO: 28495 - DNA, 20 bp, Artificial Sequence
  Synthetic
atgtgttttctggctgcggg

SEQ ID NO: 28496 - DNA, 20 bp, Artificial Sequence
  Synthetic
ttctggctgcggggggttgt

SEQ ID NO: 28497 - DNA, 20 bp, Artificial Sequence
  Synthetic
tggctgcggggggttgtcgg

SEQ ID NO: 28498 - DNA, 20 bp, Artificial Sequence
  Synthetic
ggctgcggggggttgtcgga

SEQ ID NO: 28499 - DNA, 20 bp, Artificial Sequence
  Synthetic
tcggagggattccaccaagc

SEQ ID NO: 28500 - DNA, 20 bp, Artificial Sequence
  Synthetic
acgggcgctcacctgcttgg

SEQ ID NO: 28501 - DNA, 20 bp, Artificial Sequence
  Synthetic
cctacgggcgctcacctgct

SEQ ID NO: 28502 - DNA, 20 bp, Artificial Sequence
  Synthetic
cacagcgtgtcagagatgcc

SEQ ID NO: 28503 - DNA, 20 bp, Artificial Sequence
  Synthetic
caggcatctctgacacgctg

SEQ ID NO: 28504 - DNA, 20 bp, Artificial Sequence
  Synthetic
aggcatctctgacacgctgt

SEQ ID NO: 28505 - DNA, 20 bp, Artificial Sequence
  Synthetic
cgctgtgggccatcgagatg

SEQ ID NO: 28506 - DNA, 20 bp, Artificial Sequence
  Synthetic
gctgtgggccatcgagatgt

SEQ ID NO: 28507 - DNA, 20 bp, Artificial Sequence
  Synthetic
cgcagggtcccacatctcga

SEQ ID NO: 28508 - DNA, 20 bp, Artificial Sequence
  Synthetic
catcgagatgtgggaccctg

SEQ ID NO: 28509 - DNA, 20 bp, Artificial Sequence
  Synthetic
gatgtgggaccctgcggccc

SEQ ID NO: 28510 - DNA, 20 bp, Artificial Sequence
  Synthetic
accctgcggcccaggcgttc

SEQ ID NO: 28511 - DNA, 20 bp, Artificial Sequence
  Synthetic
gccggaacgcctgggccgca

SEQ ID NO: 28512 - DNA, 20 bp, Artificial Sequence
  Synthetic
agccggaacgcctgggccgc

SEQ ID NO: 28513 - DNA, 20 bp, Artificial Sequence
  Synthetic
gttgttcagccggaacgcct

SEQ ID NO: 28514 - DNA, 20 bp, Artificial Sequence
  Synthetic
ggttgttcagccggaacgcc

SEQ ID NO: 28515 - DNA, 20 bp, Artificial Sequence
  Synthetic
gcgttccggctgaacaaccc

SEQ ID NO: 28516 - DNA, 20 bp, Artificial Sequence
  Synthetic
tggagccggggttgttcagc

SEQ ID NO: 28517 - DNA, 20 bp, Artificial Sequence
  Synthetic
ctgtgaacactgtggagccg

SEQ ID NO: 28518 - DNA, 20 bp, Artificial Sequence
  Synthetic
tctgtgaacactgtggagcc

SEQ ID NO: 28519 - DNA, 20 bp, Artificial Sequence
  Synthetic
ctctgtgaacactgtggagc

SEQ ID NO: 28520 - DNA, 20 bp, Artificial Sequence
  Synthetic
cggctccacagtgttcacag

SEQ ID NO: 28521 - DNA, 20 bp, Artificial Sequence
  Synthetic
gcagtcctctgtgaacactg

SEQ ID NO: 28522 - DNA, 20 bp, Artificial Sequence
  Synthetic
ctgcaacatcctgctgaagc

SEQ ID NO: 28523 - DNA, 20 bp, Artificial Sequence
  Synthetic
catcctgctgaagctggtca

SEQ ID NO: 28524 - DNA, 20 bp, Artificial Sequence
  Synthetic
cagccatgaccagcttcagc

SEQ ID NO: 28525 - DNA, 20 bp, Artificial Sequence
  Synthetic
ctgctgaagctggtcatggc

SEQ ID NO: 28526 - DNA, 20 bp, Artificial Sequence
  Synthetic
tgctgaagctggtcatggct

SEQ ID NO: 28527 - DNA, 20 bp, Artificial Sequence
  Synthetic
gctgaagctggtcatggctg

SEQ ID NO: 28528 - DNA, 20 bp, Artificial Sequence
  Synthetic
ggggagaccaccaactcccg

SEQ ID NO: 28529 - DNA, 20 bp, Artificial Sequence
  Synthetic
ccgctggccgcgggagttgg

SEQ ID NO: 28530 - DNA, 20 bp, Artificial Sequence
  Synthetic
ccaccaactcccgcggccag

SEQ ID NO: 28531 - DNA, 20 bp, Artificial Sequence
  Synthetic
cagccgctggccgcgggagt

SEQ ID NO: 28532 - DNA, 20 bp, Artificial Sequence
  Synthetic
ctggggcagccgctggccgc

SEQ ID NO: 28533 - DNA, 20 bp, Artificial Sequence
  Synthetic
tctggggcagccgctggccg

SEQ ID NO: 28534 - DNA, 20 bp, Artificial Sequence
  Synthetic
cggccagcggctgccccaga

SEQ ID NO: 28535 - DNA, 20 bp, Artificial Sequence
  Synthetic
ggccagcggctgccccagaa

SEQ ID NO: 28536 - DNA, 20 bp, Artificial Sequence
  Synthetic
ctcccttctggggcagccgc

SEQ ID NO: 28537 - DNA, 20 bp, Artificial Sequence
  Synthetic
gctgccccagaagggagacg

SEQ ID NO: 28538 - DNA, 20 bp, Artificial Sequence
  Synthetic
atctccacgtctcccttctg

SEQ ID NO: 28539 - DNA, 20 bp, Artificial Sequence
  Synthetic
catctccacgtctcccttct

SEQ ID NO: 28540 - DNA, 20 bp, Artificial Sequence
  Synthetic
gcatctccacgtctcccttc

SEQ ID NO: 28541 - DNA, 20 bp, Artificial Sequence
  Synthetic
ggagacgtggagatgctgtg

SEQ ID NO: 28542 - DNA, 20 bp, Artificial Sequence
  Synthetic
gacgtggagatgctgtgcgg

SEQ ID NO: 28543 - DNA, 20 bp, Artificial Sequence
  Synthetic
acgtggagatgctgtgcggc

SEQ ID NO: 28544 - DNA, 20 bp, Artificial Sequence
  Synthetic
gtgcggcgggccgccctgcc

SEQ ID NO: 28545 - DNA, 20 bp, Artificial Sequence
  Synthetic
tgcggcgggccgccctgcca

SEQ ID NO: 28546 - DNA, 20 bp, Artificial Sequence
  Synthetic
ccgctgaagccctggcaggg

SEQ ID NO: 28547 - DNA, 20 bp, Artificial Sequence
  Synthetic
ccgccctgccagggcttcag

SEQ ID NO: 28548 - DNA, 20 bp, Artificial Sequence
  Synthetic
atgccgctgaagccctggca

SEQ ID NO: 28549 - DNA, 20 bp, Artificial Sequence
  Synthetic
catgccgctgaagccctggc

SEQ ID NO: 28550 - DNA, 20 bp, Artificial Sequence
  Synthetic
ggttcatgccgctgaagccc

SEQ ID NO: 28551 - DNA, 20 bp, Artificial Sequence
  Synthetic
agtaggtgcgcgaattgaag

SEQ ID NO: 28552 - DNA, 20 bp, Artificial Sequence
  Synthetic
agagtttttgaacttggagt

SEQ ID NO: 28553 - DNA, 20 bp, Artificial Sequence
  Synthetic
ctccaagttcaaaaactctc

SEQ ID NO: 28554 - DNA, 20 bp, Artificial Sequence
  Synthetic
caccagagagtttttgaact

SEQ ID NO: 28555 - DNA, 20 bp, Artificial Sequence
  Synthetic
caagttcaaaaactctctgg

SEQ ID NO: 28556 - DNA, 20 bp, Artificial Sequence
  Synthetic
ctctggtggtttccttcctc

SEQ ID NO: 28557 - DNA, 20 bp, Artificial Sequence
  Synthetic
tctacccgtttacctgagga

SEQ ID NO: 28558 - DNA, 20 bp, Artificial Sequence
  Synthetic
ggcttctacccgtttacctg

SEQ ID NO: 28559 - DNA, 20 bp, Artificial Sequence
  Synthetic
acagctactgcgactactac

SEQ ID NO: 28560 - DNA, 20 bp, Artificial Sequence
  Synthetic
actgcgactactaccggccc

SEQ ID NO: 28561 - DNA, 20 bp, Artificial Sequence
  Synthetic
ccaggaggaagaaccggggc

SEQ ID NO: 28562 - DNA, 20 bp, Artificial Sequence
  Synthetic
ccggccccggttcttcctcc

SEQ ID NO: 28563 - DNA, 20 bp, Artificial Sequence
  Synthetic
ttctccaggaggaagaaccg

SEQ ID NO: 28564 - DNA, 20 bp, Artificial Sequence
  Synthetic
attctccaggaggaagaacc

SEQ ID NO: 28565 - DNA, 20 bp, Artificial Sequence
  Synthetic
cattctccaggaggaagaac

SEQ ID NO: 28566 - DNA, 20 bp, Artificial Sequence
  Synthetic
tcttcctcctggagaatgtc

SEQ ID NO: 28567 - DNA, 20 bp, Artificial Sequence
  Synthetic
agttcctgacattctccagg

SEQ ID NO: 28568 - DNA, 20 bp, Artificial Sequence
  Synthetic
caaagttcctgacattctcc

SEQ ID NO: 28569 - DNA, 20 bp, Artificial Sequence
  Synthetic
tgtctccttcaagcgctcca

SEQ ID NO: 28570 - DNA, 20 bp, Artificial Sequence
  Synthetic
caggaccatggagcgcttga

SEQ ID NO: 28571 - DNA, 20 bp, Artificial Sequence
  Synthetic
gagggtgagcttcaggacca

SEQ ID NO: 28572 - DNA, 20 bp, Artificial Sequence
  Synthetic
ggcagcggagggtgagcttc

SEQ ID NO: 28573 - DNA, 20 bp, Artificial Sequence
  Synthetic
gaagctcaccctccgctgcc

SEQ ID NO: 28574 - DNA, 20 bp, Artificial Sequence
  Synthetic
catgcggaccaggcagcgga

SEQ ID NO: 28575 - DNA, 20 bp, Artificial Sequence
  Synthetic
ccatgcggaccaggcagcgg

SEQ ID NO: 28576 - DNA, 20 bp, Artificial Sequence
  Synthetic
cctccgctgcctggtccgca

SEQ ID NO: 28577 - DNA, 20 bp, Artificial Sequence
  Synthetic
ctccgctgcctggtccgcat

SEQ ID NO: 28578 - DNA, 20 bp, Artificial Sequence
  Synthetic
agcccatgcggaccaggcag

SEQ ID NO: 28579 - DNA, 20 bp, Artificial Sequence
  Synthetic
actgatagcccatgcggacc

SEQ ID NO: 28580 - DNA, 20 bp, Artificial Sequence
  Synthetic
aggtgcactgatagcccatg

SEQ ID NO: 28581 - DNA, 20 bp, Artificial Sequence
  Synthetic
atgggctatcagtgcacctt

SEQ ID NO: 28582 - DNA, 20 bp, Artificial Sequence
  Synthetic
gtgcaccttcggcgtgctgc

SEQ ID NO: 28583 - DNA, 20 bp, Artificial Sequence
  Synthetic
caccttcggcgtgctgcagg

SEQ ID NO: 28584 - DNA, 20 bp, Artificial Sequence
  Synthetic
accttcggcgtgctgcaggt

SEQ ID NO: 28585 - DNA, 20 bp, Artificial Sequence
  Synthetic
gcccacctgcagcacgccga

SEQ ID NO: 28586 - DNA, 20 bp, Artificial Sequence
  Synthetic
cccccacaggccggtcagta

SEQ ID NO: 28587 - DNA, 20 bp, Artificial Sequence
  Synthetic
acaggccggtcagtacggcg

SEQ ID NO: 28588 - DNA, 20 bp, Artificial Sequence
  Synthetic
ctgggccacgccgtactgac

SEQ ID NO: 28589 - DNA, 20 bp, Artificial Sequence
  Synthetic
agtacggcgtggcccagact

SEQ ID NO: 28590 - DNA, 20 bp, Artificial Sequence
  Synthetic
acggcgtggcccagactagg

SEQ ID NO: 28591 - DNA, 20 bp, Artificial Sequence
  Synthetic
gcgtggcccagactaggagg

SEQ ID NO: 28592 - DNA, 20 bp, Artificial Sequence
  Synthetic
cgtggcccagactaggaggc

SEQ ID NO: 28593 - DNA, 20 bp, Artificial Sequence
  Synthetic
gatggcccgcctcctagtct

SEQ ID NO: 28594 - DNA, 20 bp, Artificial Sequence
  Synthetic
tgatggcccgcctcctagtc

SEQ ID NO: 28595 - DNA, 20 bp, Artificial Sequence
  Synthetic
taggaggcgggccatcatcc

SEQ ID NO: 28596 - DNA, 20 bp, Artificial Sequence
  Synthetic
gcgggccatcatcctggccg

SEQ ID NO: 28597 - DNA, 20 bp, Artificial Sequence
  Synthetic
aggggccgcggccaggatga

SEQ ID NO: 28598 - DNA, 20 bp, Artificial Sequence
  Synthetic
atcatcctggccgcggcccc

SEQ ID NO: 28599 - DNA, 20 bp, Artificial Sequence
  Synthetic
tctctccaggggccgcggcc

SEQ ID NO: 28600 - DNA, 20 bp, Artificial Sequence
  Synthetic
gagcttctctccaggggccg

SEQ ID NO: 28601 - DNA, 20 bp, Artificial Sequence
  Synthetic
cagagggagcttctctccag

SEQ ID NO: 28602 - DNA, 20 bp, Artificial Sequence
  Synthetic
acagagggagcttctctcca

SEQ ID NO: 28603 - DNA, 20 bp, Artificial Sequence
  Synthetic
aacagagggagcttctctcc

SEQ ID NO: 28604 - DNA, 20 bp, Artificial Sequence
  Synthetic
agagaagctccctctgttcc

SEQ ID NO: 28605 - DNA, 20 bp, Artificial Sequence
  Synthetic
gcagtggctccgggaacaga

SEQ ID NO: 28606 - DNA, 20 bp, Artificial Sequence
  Synthetic
tgcagtggctccgggaacag

SEQ ID NO: 28607 - DNA, 20 bp, Artificial Sequence
  Synthetic
caaacacgtgcagtggctcc

SEQ ID NO: 28608 - DNA, 20 bp, Artificial Sequence
  Synthetic
gcaaacacgtgcagtggctc

SEQ ID NO: 28609 - DNA, 20 bp, Artificial Sequence
  Synthetic
cggggagcaaacacgtgcag

SEQ ID NO: 28610 - DNA, 20 bp, Artificial Sequence
  Synthetic
cactgcacgtgtttgctccc

SEQ ID NO: 28611 - DNA, 20 bp, Artificial Sequence
  Synthetic
actgcacgtgtttgctcccc

SEQ ID NO: 28612 - DNA, 20 bp, Artificial Sequence
  Synthetic
acgctcagctggcaggcccg

SEQ ID NO: 28613 - DNA, 20 bp, Artificial Sequence
  Synthetic
cacgctcagctggcaggccc

SEQ ID NO: 28614 - DNA, 20 bp, Artificial Sequence
  Synthetic
ccacgctcagctggcaggcc

SEQ ID NO: 28615 - DNA, 20 bp, Artificial Sequence
  Synthetic
ccgggcctgccagctgagcg

SEQ ID NO: 28616 - DNA, 20 bp, Artificial Sequence
  Synthetic
ggcctgccagctgagcgtgg

SEQ ID NO: 28617 - DNA, 20 bp, Artificial Sequence
  Synthetic
caccaccacgctcagctggc

SEQ ID NO: 28618 - DNA, 20 bp, Artificial Sequence
  Synthetic
ctgccagctgagcgtggtgg

SEQ ID NO: 28619 - DNA, 20 bp, Artificial Sequence
  Synthetic
catccaccaccacgctcagc

SEQ ID NO: 28620 - DNA, 20 bp, Artificial Sequence
  Synthetic
agtttgtgagcaacataacc

SEQ ID NO: 28621 - DNA, 20 bp, Artificial Sequence
  Synthetic
tgtgagcaacataaccaggt

SEQ ID NO: 28622 - DNA, 20 bp, Artificial Sequence
  Synthetic
cctctgttgcaggttgagct

SEQ ID NO: 28623 - DNA, 20 bp, Artificial Sequence
  Synthetic
ctctgttgcaggttgagctc

SEQ ID NO: 28624 - DNA, 20 bp, Artificial Sequence
  Synthetic
ggttgagctcgggtcctttc

SEQ ID NO: 28625 - DNA, 20 bp, Artificial Sequence
  Synthetic
gggtcctttccggaccatca

SEQ ID NO: 28626 - DNA, 20 bp, Artificial Sequence
  Synthetic
cgcaccgtgatggtccggaa

SEQ ID NO: 28627 - DNA, 20 bp, Artificial Sequence
  Synthetic
tgtctcgcaccgtgatggtc

SEQ ID NO: 28628 - DNA, 20 bp, Artificial Sequence
  Synthetic
catcgtgtctcgcaccgtga

SEQ ID NO: 28629 - DNA, 20 bp, Artificial Sequence
  Synthetic
agacacgatgtccgacctgc

SEQ ID NO: 28630 - DNA, 20 bp, Artificial Sequence
  Synthetic
cacgatgtccgacctgccgg

SEQ ID NO: 28631 - DNA, 20 bp, Artificial Sequence
  Synthetic
tgtccgacctgccggaggtg

SEQ ID NO: 28632 - DNA, 20 bp, Artificial Sequence
  Synthetic
attccgcacctccggcaggt

SEQ ID NO: 28633 - DNA, 20 bp, Artificial Sequence
  Synthetic
gacctgccggaggtgcggaa

SEQ ID NO: 28634 - DNA, 20 bp, Artificial Sequence
  Synthetic
ctccattccgcacctccggc

SEQ ID NO: 28635 - DNA, 20 bp, Artificial Sequence
  Synthetic
gaggctccattccgcacctc

SEQ ID NO: 28636 - DNA, 20 bp, Artificial Sequence
  Synthetic
ggaggtgcggaatggagcct

SEQ ID NO: 28637 - DNA, 20 bp, Artificial Sequence
  Synthetic
gcggaatggagcctcggcac

SEQ ID NO: 28638 - DNA, 20 bp, Artificial Sequence
  Synthetic
gtaggagatctccagtgccg

SEQ ID NO: 28639 - DNA, 20 bp, Artificial Sequence
  Synthetic
gcactggagatctcctacaa

SEQ ID NO: 28640 - DNA, 20 bp, Artificial Sequence
  Synthetic
cactggagatctcctacaac

SEQ ID NO: 28641 - DNA, 20 bp, Artificial Sequence
  Synthetic
actggagatctcctacaacg

SEQ ID NO: 28642 - DNA, 20 bp, Artificial Sequence
  Synthetic
ggactgaggctccccgttgt

SEQ ID NO: 28643 - DNA, 20 bp, Artificial Sequence
  Synthetic
acaacggggagcctcagtcc

SEQ ID NO: 28644 - DNA, 20 bp, Artificial Sequence
  Synthetic
agcctcagtcctggttccag

SEQ ID NO: 28645 - DNA, 20 bp, Artificial Sequence
  Synthetic
tgcctctggaaccaggactg

SEQ ID NO: 28646 - DNA, 20 bp, Artificial Sequence
  Synthetic
ccggagctgcctctggaacc

SEQ ID NO: 28647 - DNA, 20 bp, Artificial Sequence
  Synthetic
cctggttccagaggcagctc

SEQ ID NO: 28648 - DNA, 20 bp, Artificial Sequence
  Synthetic
ctggttccagaggcagctcc

SEQ ID NO: 28649 - DNA, 20 bp, Artificial Sequence
  Synthetic
tggttccagaggcagctccg

SEQ ID NO: 28650 - DNA, 20 bp, Artificial Sequence
  Synthetic
gtgcgccccggagctgcctc

SEQ ID NO: 28651 - DNA, 20 bp, Artificial Sequence
  Synthetic
tgggctggtactgtgcgccc

SEQ ID NO: 28652 - DNA, 20 bp, Artificial Sequence
  Synthetic
cacagtaccagcccatcctc

SEQ ID NO: 28653 - DNA, 20 bp, Artificial Sequence
  Synthetic
acagtaccagcccatcctca

SEQ ID NO: 28654 - DNA, 20 bp, Artificial Sequence
  Synthetic
tgtggtccctgaggatgggc

SEQ ID NO: 28655 - DNA, 20 bp, Artificial Sequence
  Synthetic
cagatgtggtccctgaggat

SEQ ID NO: 28656 - DNA, 20 bp, Artificial Sequence
  Synthetic
acagatgtggtccctgagga

SEQ ID NO: 28657 - DNA, 20 bp, Artificial Sequence
  Synthetic
ccttacagatgtggtccctg

SEQ ID NO: 28658 - DNA, 20 bp, Artificial Sequence
  Synthetic
cctcagggaccacatctgta

SEQ ID NO: 28659 - DNA, 20 bp, Artificial Sequence
  Synthetic
gtgccattaccttacagatg

SEQ ID NO: 28660 - DNA, 20 bp, Artificial Sequence
  Synthetic
ctttcaggacatgagtgcat

SEQ ID NO: 28661 - DNA, 20 bp, Artificial Sequence
  Synthetic
tcaggacatgagtgcattgg

SEQ ID NO: 28662 - DNA, 20 bp, Artificial Sequence
  Synthetic
cattggtggctgcccgcatg

SEQ ID NO: 28663 - DNA, 20 bp, Artificial Sequence
  Synthetic
caaggggatgtgccgcatgc

SEQ ID NO: 28664 - DNA, 20 bp, Artificial Sequence
  Synthetic
ccaaggggatgtgccgcatg

SEQ ID NO: 28665 - DNA, 20 bp, Artificial Sequence
  Synthetic
ccgcatgcggcacatcccct

SEQ ID NO: 28666 - DNA, 20 bp, Artificial Sequence
  Synthetic
cggcacatccccttggcccc

SEQ ID NO: 28667 - DNA, 20 bp, Artificial Sequence
  Synthetic
ggcacatccccttggcccca

SEQ ID NO: 28668 - DNA, 20 bp, Artificial Sequence
  Synthetic
agtctgaccctggggccaag

SEQ ID NO: 28669 - DNA, 20 bp, Artificial Sequence
  Synthetic
cagtctgaccctggggccaa

SEQ ID NO: 28670 - DNA, 20 bp, Artificial Sequence
  Synthetic
ccagtctgaccctggggcca

SEQ ID NO: 28671 - DNA, 20 bp, Artificial Sequence
  Synthetic
ccttggccccagggtcagac

SEQ ID NO: 28672 - DNA, 20 bp, Artificial Sequence
  Synthetic
atcgcgccagtctgaccctg

SEQ ID NO: 28673 - DNA, 20 bp, Artificial Sequence
  Synthetic
gatcgcgccagtctgaccct

SEQ ID NO: 28674 - DNA, 20 bp, Artificial Sequence
  Synthetic
agatcgcgccagtctgaccc

SEQ ID NO: 28675 - DNA, 20 bp, Artificial Sequence
  Synthetic
gcgcgatctgcccaacatcg

SEQ ID NO: 28676 - DNA, 20 bp, Artificial Sequence
  Synthetic
atctgcccaacatcgaggtg

SEQ ID NO: 28677 - DNA, 20 bp, Artificial Sequence
  Synthetic
gagagccgcacctcgatgtt

SEQ ID NO: 28678 - DNA, 20 bp, Artificial Sequence
  Synthetic
tgagagccgcacctcgatgt

SEQ ID NO: 28679 - DNA, 20 bp, Artificial Sequence
  Synthetic
atcgaggtgcggctctcaga

SEQ ID NO: 28680 - DNA, 20 bp, Artificial Sequence
  Synthetic
gcggctctcagacggcacca

SEQ ID NO: 28681 - DNA, 20 bp, Artificial Sequence
  Synthetic
tctcagacggcaccatggcc

SEQ ID NO: 28682 - DNA, 20 bp, Artificial Sequence
  Synthetic
gcaccatggccaggaagctg

SEQ ID NO: 28683 - DNA, 20 bp, Artificial Sequence
  Synthetic
ataccgcagcttcctggcca

SEQ ID NO: 28684 - DNA, 20 bp, Artificial Sequence
  Synthetic
gtgggtataccgcagcttcc

SEQ ID NO: 28685 - DNA, 20 bp, Artificial Sequence
  Synthetic
tgcggtatacccaccatgac

SEQ ID NO: 28686 - DNA, 20 bp, Artificial Sequence
  Synthetic
acccaccatgacaggaagaa

SEQ ID NO: 28687 - DNA, 20 bp, Artificial Sequence
  Synthetic
gccgttcttcctgtcatggt

SEQ ID NO: 28688 - DNA, 20 bp, Artificial Sequence
  Synthetic
ggccgttcttcctgtcatgg

SEQ ID NO: 28689 - DNA, 20 bp, Artificial Sequence
  Synthetic
tgcggccgttcttcctgtca

SEQ ID NO: 28690 - DNA, 20 bp, Artificial Sequence
  Synthetic
aagaacggccgcagcagctc

SEQ ID NO: 28691 - DNA, 20 bp, Artificial Sequence
  Synthetic
agaacggccgcagcagctct

SEQ ID NO: 28692 - DNA, 20 bp, Artificial Sequence
  Synthetic
gaacggccgcagcagctctg

SEQ ID NO: 28693 - DNA, 20 bp, Artificial Sequence
  Synthetic
ggagggccccagagctgctg

SEQ ID NO: 28694 - DNA, 20 bp, Artificial Sequence
  Synthetic
agcagctctggggccctccg

SEQ ID NO: 28695 - DNA, 20 bp, Artificial Sequence
  Synthetic
gcagctctggggccctccgt

SEQ ID NO: 28696 - DNA, 20 bp, Artificial Sequence
  Synthetic
cagctctggggccctccgtg

SEQ ID NO: 28697 - DNA, 20 bp, Artificial Sequence
  Synthetic
gcaggagcagaccccacgga

SEQ ID NO: 28698 - DNA, 20 bp, Artificial Sequence
  Synthetic
cgcaggagcagaccccacgg

SEQ ID NO: 28699 - DNA, 20 bp, Artificial Sequence
  Synthetic
ccacgcaggagcagacccca

SEQ ID NO: 28700 - DNA, 20 bp, Artificial Sequence
  Synthetic
ccgtggggtctgctcctgcg

SEQ ID NO: 28701 - DNA, 20 bp, Artificial Sequence
  Synthetic
ggggtctgctcctgcgtgga

SEQ ID NO: 28702 - DNA, 20 bp, Artificial Sequence
  Synthetic
gtctgctcctgcgtggaagg

SEQ ID NO: 28703 - DNA, 20 bp, Artificial Sequence
  Synthetic
tctgctcctgcgtggaaggt

SEQ ID NO: 28704 - DNA, 20 bp, Artificial Sequence
  Synthetic
acaggacccaccttccacgc

SEQ ID NO: 28705 - DNA, 20 bp, Artificial Sequence
  Synthetic
gggtcgcaggctttgccggc

SEQ ID NO: 28706 - DNA, 20 bp, Artificial Sequence
  Synthetic
tgcggggtcgcaggctttgc

SEQ ID NO: 28707 - DNA, 20 bp, Artificial Sequence
  Synthetic
aagcctgcgaccccgcagcc

SEQ ID NO: 28708 - DNA, 20 bp, Artificial Sequence
  Synthetic
ctgcctggctgcggggtcgc

SEQ ID NO: 28709 - DNA, 20 bp, Artificial Sequence
  Synthetic
tgttgaactgcctggctgcg

SEQ ID NO: 28710 - DNA, 20 bp, Artificial Sequence
  Synthetic
gtgttgaactgcctggctgc

SEQ ID NO: 28711 - DNA, 20 bp, Artificial Sequence
  Synthetic
ggtgttgaactgcctggctg

SEQ ID NO: 28712 - DNA, 20 bp, Artificial Sequence
  Synthetic
gatgagggtgttgaactgcc

SEQ ID NO: 28713 - DNA, 20 bp, Artificial Sequence
  Synthetic
agttcaacaccctcatcccc

SEQ ID NO: 28714 - DNA, 20 bp, Artificial Sequence
  Synthetic
gggcaggcaccaggggatga

SEQ ID NO: 28715 - DNA, 20 bp, Artificial Sequence
  Synthetic
ggggcaggcaccaggggatg

SEQ ID NO: 28716 - DNA, 20 bp, Artificial Sequence
  Synthetic
cggtgtggggcaggcaccag

SEQ ID NO: 28717 - DNA, 20 bp, Artificial Sequence
  Synthetic
ccggtgtggggcaggcacca

SEQ ID NO: 28718 - DNA, 20 bp, Artificial Sequence
  Synthetic
ccctggtgcctgccccacac

SEQ ID NO: 28719 - DNA, 20 bp, Artificial Sequence
  Synthetic
cccggtgtggggcaggcacc

SEQ ID NO: 28720 - DNA, 20 bp, Artificial Sequence
  Synthetic
cctggtgcctgccccacacc

SEQ ID NO: 28721 - DNA, 20 bp, Artificial Sequence
  Synthetic
gcctgccccacaccgggaac

SEQ ID NO: 28722 - DNA, 20 bp, Artificial Sequence
  Synthetic
gccggttcccggtgtggggc

SEQ ID NO: 28723 - DNA, 20 bp, Artificial Sequence
  Synthetic
ttgtgccggttcccggtgtg

SEQ ID NO: 28724 - DNA, 20 bp, Artificial Sequence
  Synthetic
gttgtgccggttcccggtgt

SEQ ID NO: 28725 - DNA, 20 bp, Artificial Sequence
  Synthetic
ggttgtgccggttcccggtg

SEQ ID NO: 28726 - DNA, 20 bp, Artificial Sequence
  Synthetic
ccagtggttgtgccggttcc

SEQ ID NO: 28727 - DNA, 20 bp, Artificial Sequence
  Synthetic
ccgggaaccggcacaaccac

SEQ ID NO: 28728 - DNA, 20 bp, Artificial Sequence
  Synthetic
cgggaaccggcacaaccact

SEQ ID NO: 28729 - DNA, 20 bp, Artificial Sequence
  Synthetic
aaccggcacaaccactgggc

SEQ ID NO: 28730 - DNA, 20 bp, Artificial Sequence
  Synthetic
ggccagcccagtggttgtgc

SEQ ID NO: 28731 - DNA, 20 bp, Artificial Sequence
  Synthetic
aaccactgggctggcctcta

SEQ ID NO: 28732 - DNA, 20 bp, Artificial Sequence
  Synthetic
ttccatagaggccagcccag

SEQ ID NO: 28733 - DNA, 20 bp, Artificial Sequence
  Synthetic
actgggctggcctctatgga

SEQ ID NO: 28734 - DNA, 20 bp, Artificial Sequence
  Synthetic
gcctctatggaaggctcgag

SEQ ID NO: 28735 - DNA, 20 bp, Artificial Sequence
  Synthetic
cccactcgagccttccatag

SEQ ID NO: 28736 - DNA, 20 bp, Artificial Sequence
  Synthetic
cctctatggaaggctcgagt

SEQ ID NO: 28737 - DNA, 20 bp, Artificial Sequence
  Synthetic
tatggaaggctcgagtggga

SEQ ID NO: 28738 - DNA, 20 bp, Artificial Sequence
  Synthetic
catgggctcggggttggtga

SEQ ID NO: 28739 - DNA, 20 bp, Artificial Sequence
  Synthetic
cgtcaccaaccccgagccca

SEQ ID NO: 28740 - DNA, 20 bp, Artificial Sequence
  Synthetic
gtcaccaaccccgagcccat

SEQ ID NO: 28741 - DNA, 20 bp, Artificial Sequence
  Synthetic
cttgcccatgggctcggggt

SEQ ID NO: 28742 - DNA, 20 bp, Artificial Sequence
  Synthetic
cctgcttgcccatgggctcg

SEQ ID NO: 28743 - DNA, 20 bp, Artificial Sequence
  Synthetic
ccccgagcccatgggcaagc

SEQ ID NO: 28744 - DNA, 20 bp, Artificial Sequence
  Synthetic
acctgcttgcccatgggctc

SEQ ID NO: 28745 - DNA, 20 bp, Artificial Sequence
  Synthetic
tacctgcttgcccatgggct

SEQ ID NO: 28746 - DNA, 20 bp, Artificial Sequence
  Synthetic
gagcccatgggcaagcaggt

SEQ ID NO: 28747 - DNA, 20 bp, Artificial Sequence
  Synthetic
ccacctacctgcttgcccat

SEQ ID NO: 28748 - DNA, 20 bp, Artificial Sequence
  Synthetic
cccacctacctgcttgccca

SEQ ID NO: 28749 - DNA, 20 bp, Artificial Sequence
  Synthetic
ctgggtggagcacgcggccc

SEQ ID NO: 28750 - DNA, 20 bp, Artificial Sequence
  Synthetic
gctgctctgggtggagcacg

SEQ ID NO: 28751 - DNA, 20 bp, Artificial Sequence
  Synthetic
ccacacggtgctgctctggg

SEQ ID NO: 28752 - DNA, 20 bp, Artificial Sequence
  Synthetic
ccacccagagcagcaccgtg

SEQ ID NO: 28753 - DNA, 20 bp, Artificial Sequence
  Synthetic
tcaccacacggtgctgctct

SEQ ID NO: 28754 - DNA, 20 bp, Artificial Sequence
  Synthetic
ctcaccacacggtgctgctc

SEQ ID NO: 28755 - DNA, 20 bp, Artificial Sequence
  Synthetic
agcaccgtgtggtgagcgtg

SEQ ID NO: 28756 - DNA, 20 bp, Artificial Sequence
  Synthetic
gcaccgtgtggtgagcgtgc

SEQ ID NO: 28757 - DNA, 20 bp, Artificial Sequence
  Synthetic
actcccgcacgctcaccaca

SEQ ID NO: 28758 - DNA, 20 bp, Artificial Sequence
  Synthetic
gcgggagtgtgcccgctccc

SEQ ID NO: 28759 - DNA, 20 bp, Artificial Sequence
  Synthetic
cgggagtgtgcccgctccca

SEQ ID NO: 28760 - DNA, 20 bp, Artificial Sequence
  Synthetic
gtcagggaagccctgggagc

SEQ ID NO: 28761 - DNA, 20 bp, Artificial Sequence
  Synthetic
tgtcagggaagccctgggag

SEQ ID NO: 28762 - DNA, 20 bp, Artificial Sequence
  Synthetic
gtaggtgtcagggaagccct

SEQ ID NO: 28763 - DNA, 20 bp, Artificial Sequence
  Synthetic
ggtaggtgtcagggaagccc

SEQ ID NO: 28764 - DNA, 20 bp, Artificial Sequence
  Synthetic
agggcttccctgacacctac

SEQ ID NO: 28765 - DNA, 20 bp, Artificial Sequence
  Synthetic
cgaagagccggtaggtgtca

SEQ ID NO: 28766 - DNA, 20 bp, Artificial Sequence
  Synthetic
ccgaagagccggtaggtgtc

SEQ ID NO: 28767 - DNA, 20 bp, Artificial Sequence
  Synthetic
cctgacacctaccggctctt

SEQ ID NO: 28768 - DNA, 20 bp, Artificial Sequence
  Synthetic
gatgttgccgaagagccggt

SEQ ID NO: 28769 - DNA, 20 bp, Artificial Sequence
  Synthetic
ccaggatgttgccgaagagc

SEQ ID NO: 28770 - DNA, 20 bp, Artificial Sequence
  Synthetic
ccggctcttcggcaacatcc

SEQ ID NO: 28771 - DNA, 20 bp, Artificial Sequence
  Synthetic
gcaacatcctggacaagcac

SEQ ID NO: 28772 - DNA, 20 bp, Artificial Sequence
  Synthetic
catcctggacaagcaccggc

SEQ ID NO: 28773 - DNA, 20 bp, Artificial Sequence
  Synthetic
tgacctgccggtgcttgtcc

SEQ ID NO: 28774 - DNA, 20 bp, Artificial Sequence
  Synthetic
gcgccgccccactgacctgc

SEQ ID NO: 28775 - DNA, 20 bp, Artificial Sequence
  Synthetic
caatgccgtgccaccgcccc

SEQ ID NO: 28776 - DNA, 20 bp, Artificial Sequence
  Synthetic
tttggccaggggcggtggca

SEQ ID NO: 28777 - DNA, 20 bp, Artificial Sequence
  Synthetic
atggctttggccaggggcgg

SEQ ID NO: 28778 - DNA, 20 bp, Artificial Sequence
  Synthetic
ccaatggctttggccagggg

SEQ ID NO: 28779 - DNA, 20 bp, Artificial Sequence
  Synthetic
ccgcccctggccaaagccat

SEQ ID NO: 28780 - DNA, 20 bp, Artificial Sequence
  Synthetic
aagccaatggctttggccag

SEQ ID NO: 28781 - DNA, 20 bp, Artificial Sequence
  Synthetic
caagccaatggctttggcca

SEQ ID NO: 28782 - DNA, 20 bp, Artificial Sequence
  Synthetic
ccaagccaatggctttggcc

SEQ ID NO: 28783 - DNA, 20 bp, Artificial Sequence
  Synthetic
cctggccaaagccattggct

SEQ ID NO: 28784 - DNA, 20 bp, Artificial Sequence
  Synthetic
gatctccaagccaatggctt

SEQ ID NO: 28785 - DNA, 20 bp, Artificial Sequence
  Synthetic
aagcttgatctccaagccaa

SEQ ID NO: 28786 - DNA, 20 bp, Artificial Sequence
  Synthetic
aacggcatcctgtaccgagt

SEQ ID NO: 28787 - DNA, 20 bp, Artificial Sequence
  Synthetic
atcctgtaccgagttggtga

SEQ ID NO: 28788 - DNA, 20 bp, Artificial Sequence
  Synthetic
caccatcaccaactcggtac

SEQ ID NO: 28789 - DNA, 20 bp, Artificial Sequence
  Synthetic
ggtacacaccatcaccaact

SEQ ID NO: 28790 - DNA, 20 bp, Artificial Sequence
  Synthetic
tggtgtgtacctgccccctg

SEQ ID NO: 28791 - DNA, 20 bp, Artificial Sequence
  Synthetic
acgtgaaggcctcagggggc

SEQ ID NO: 28792 - DNA, 20 bp, Artificial Sequence
  Synthetic
ttgaacgtgaaggcctcagg

SEQ ID NO: 28793 - DNA, 20 bp, Artificial Sequence
  Synthetic
cttgaacgtgaaggcctcag

SEQ ID NO: 28794 - DNA, 20 bp, Artificial Sequence
  Synthetic
acttgaacgtgaaggcctca

SEQ ID NO: 28795 - DNA, 20 bp, Artificial Sequence
  Synthetic
tacttgaacgtgaaggcctc

SEQ ID NO: 28796 - DNA, 20 bp, Artificial Sequence
  Synthetic
gggcacttacttgaacgtga

SEQ ID NO: 28797 - DNA, 20 bp, Artificial Sequence
  Synthetic
ccgtgggcgtttcacgggac

SEQ ID NO: 28798 - DNA, 20 bp, Artificial Sequence
  Synthetic
ccagtcccgtgaaacgccca

SEQ ID NO: 28799 - DNA, 20 bp, Artificial Sequence
  Synthetic
tcccgtgaaacgcccacgga

SEQ ID NO: 28800 - DNA, 20 bp, Artificial Sequence
  Synthetic
tccttccgtgggcgtttcac

SEQ ID NO: 28801 - DNA, 20 bp, Artificial Sequence
  Synthetic
ctccttccgtgggcgtttca

SEQ ID NO: 28802 - DNA, 20 bp, Artificial Sequence
  Synthetic
acgcccacggaaggagcccg

SEQ ID NO: 28803 - DNA, 20 bp, Artificial Sequence
  Synthetic
catccacgggctccttccgt

SEQ ID NO: 28804 - DNA, 20 bp, Artificial Sequence
  Synthetic
tcatccacgggctccttccg

SEQ ID NO: 28805 - DNA, 20 bp, Artificial Sequence
  Synthetic
acggaaggagcccgtggatg

SEQ ID NO: 28806 - DNA, 20 bp, Artificial Sequence
  Synthetic
gggtacaggtcctcatccac

SEQ ID NO: 28807 - DNA, 20 bp, Artificial Sequence
  Synthetic
tgggtacaggtcctcatcca

SEQ ID NO: 28808 - DNA, 20 bp, Artificial Sequence
  Synthetic
acctgtacccagagcactac

SEQ ID NO: 28809 - DNA, 20 bp, Artificial Sequence
  Synthetic
tccggtagtgctctgggtac

SEQ ID NO: 28810 - DNA, 20 bp, Artificial Sequence
  Synthetic
agtatttccggtagtgctct

SEQ ID NO: 28811 - DNA, 20 bp, Artificial Sequence
  Synthetic
gagtatttccggtagtgctc

SEQ ID NO: 28812 - DNA, 20 bp, Artificial Sequence
  Synthetic
tgatgtagtcggagtatttc

SEQ ID NO: 28813 - DNA, 20 bp, Artificial Sequence
  Synthetic
aaatactccgactacatcaa

SEQ ID NO: 28814 - DNA, 20 bp, Artificial Sequence
  Synthetic
gttgctgcctttgatgtagt

SEQ ID NO: 28815 - DNA, 20 bp, Artificial Sequence
  Synthetic
ctacatcaaaggcagcaacc

SEQ ID NO: 28816 - DNA, 20 bp, Artificial Sequence
  Synthetic
ggtagggctcaggggcatcc

SEQ ID NO: 28817 - DNA, 20 bp, Artificial Sequence
  Synthetic
gcccctgagccctaccgaat

SEQ ID NO: 28818 - DNA, 20 bp, Artificial Sequence
  Synthetic
gccaattcggtagggctcag

SEQ ID NO: 28819 - DNA, 20 bp, Artificial Sequence
  Synthetic
ggccaattcggtagggctca

SEQ ID NO: 28820 - DNA, 20 bp, Artificial Sequence
  Synthetic
cggccaattcggtagggctc

SEQ ID NO: 28821 - DNA, 20 bp, Artificial Sequence
  Synthetic
ctgagccctaccgaattggc

SEQ ID NO: 28822 - DNA, 20 bp, Artificial Sequence
  Synthetic
ttgatccggccaattcggta

SEQ ID NO: 28823 - DNA, 20 bp, Artificial Sequence
  Synthetic
tttgatccggccaattcggt

SEQ ID NO: 28824 - DNA, 20 bp, Artificial Sequence
  Synthetic
tctctttgatccggccaatt

SEQ ID NO: 28825 - DNA, 20 bp, Artificial Sequence
  Synthetic
gacagaagatctctttgatc

SEQ ID NO: 28826 - DNA, 20 bp, Artificial Sequence
  Synthetic
ttctgtcccaagaagagcaa

SEQ ID NO: 28827 - DNA, 20 bp, Artificial Sequence
  Synthetic
gtcccaagaagagcaacggc

SEQ ID NO: 28828 - DNA, 20 bp, Artificial Sequence
  Synthetic
ggcctgccgttgctcttctt

SEQ ID NO: 28829 - DNA, 20 bp, Artificial Sequence
  Synthetic
gggcctgccgttgctcttct

SEQ ID NO: 28830 - DNA, 20 bp, Artificial Sequence
  Synthetic
attttgatgtcagtctcatt

SEQ ID NO: 28831 - DNA, 20 bp, Artificial Sequence
  Synthetic
gattttgatgtcagtctcat

SEQ ID NO: 28832 - DNA, 20 bp, Artificial Sequence
  Synthetic
atgagactgacatcaaaatc

SEQ ID NO: 28833 - DNA, 20 bp, Artificial Sequence
  Synthetic
tgagactgacatcaaaatcc

SEQ ID NO: 28834 - DNA, 20 bp, Artificial Sequence
  Synthetic
tccgggtcaacaagttctac

SEQ ID NO: 28835 - DNA, 20 bp, Artificial Sequence
  Synthetic
acctgtagaacttgttgacc

SEQ ID NO: 28836 - DNA, 20 bp, Artificial Sequence
  Synthetic
gtggacttgtgggtgttctc

SEQ ID NO: 28837 - DNA, 20 bp, Artificial Sequence
  Synthetic
gctcgctggagtggacttgt

SEQ ID NO: 28838 - DNA, 20 bp, Artificial Sequence
  Synthetic
agctcgctggagtggacttg

SEQ ID NO: 28839 - DNA, 20 bp, Artificial Sequence
  Synthetic
tgcgtggtagctcgctggag

SEQ ID NO: 28840 - DNA, 20 bp, Artificial Sequence
  Synthetic
atgtctgcgtggtagctcgc

SEQ ID NO: 28841 - DNA, 20 bp, Artificial Sequence
  Synthetic
agagcaggttgatgtctgcg

SEQ ID NO: 28842 - DNA, 20 bp, Artificial Sequence
  Synthetic
cagacatcaacctgctctac

SEQ ID NO: 28843 - DNA, 20 bp, Artificial Sequence
  Synthetic
cctcgtcgctccagtagagc

SEQ ID NO: 28844 - DNA, 20 bp, Artificial Sequence
  Synthetic
cctgctctactggagcgacg

SEQ ID NO: 28845 - DNA, 20 bp, Artificial Sequence
  Synthetic
gctctactggagcgacgagg

SEQ ID NO: 28846 - DNA, 20 bp, Artificial Sequence
  Synthetic
ctggagcgacgaggaggccg

SEQ ID NO: 28847 - DNA, 20 bp, Artificial Sequence
  Synthetic
gagcgacgaggaggccgtgg

SEQ ID NO: 28848 - DNA, 20 bp, Artificial Sequence
  Synthetic
ggaggccgtggtggacttca

SEQ ID NO: 28849 - DNA, 20 bp, Artificial Sequence
  Synthetic
cacagccttgaagtccacca

SEQ ID NO: 28850 - DNA, 20 bp, Artificial Sequence
  Synthetic
ggtggacttcaaggctgtgc

SEQ ID NO: 28851 - DNA, 20 bp, Artificial Sequence
  Synthetic
gtggacttcaaggctgtgca

SEQ ID NO: 28852 - DNA, 20 bp, Artificial Sequence
  Synthetic
tgtgcagggccgctgcaccg

SEQ ID NO: 28853 - DNA, 20 bp, Artificial Sequence
  Synthetic
ggccgctgcaccgtggagta

SEQ ID NO: 28854 - DNA, 20 bp, Artificial Sequence
  Synthetic
gccgctgcaccgtggagtat

SEQ ID NO: 28855 - DNA, 20 bp, Artificial Sequence
  Synthetic
ccccatactccacggtgcag

SEQ ID NO: 28856 - DNA, 20 bp, Artificial Sequence
  Synthetic
ccgctgcaccgtggagtatg

SEQ ID NO: 28857 - DNA, 20 bp, Artificial Sequence
  Synthetic
ctgcaccgtggagtatgggg

SEQ ID NO: 28858 - DNA, 20 bp, Artificial Sequence
  Synthetic
caggtcctccccatactcca

SEQ ID NO: 28859 - DNA, 20 bp, Artificial Sequence
  Synthetic
ggacctgcccgagtgcgtcc

SEQ ID NO: 28860 - DNA, 20 bp, Artificial Sequence
  Synthetic
acacctggacgcactcgggc

SEQ ID NO: 28861 - DNA, 20 bp, Artificial Sequence
  Synthetic
gagtacacctggacgcactc

SEQ ID NO: 28862 - DNA, 20 bp, Artificial Sequence
  Synthetic
ggagtacacctggacgcact

SEQ ID NO: 28863 - DNA, 20 bp, Artificial Sequence
  Synthetic
gtgcgtccaggtgtactcca

SEQ ID NO: 28864 - DNA, 20 bp, Artificial Sequence
  Synthetic
tgcgtccaggtgtactccat

SEQ ID NO: 28865 - DNA, 20 bp, Artificial Sequence
  Synthetic
gtccaggtgtactccatggg

SEQ ID NO: 28866 - DNA, 20 bp, Artificial Sequence
  Synthetic
ggccgcccatggagtacacc

SEQ ID NO: 28867 - DNA, 20 bp, Artificial Sequence
  Synthetic
gaagcggttggggccgccca

SEQ ID NO: 28868 - DNA, 20 bp, Artificial Sequence
  Synthetic
cgaggaagtagaagcggttg

SEQ ID NO: 28869 - DNA, 20 bp, Artificial Sequence
  Synthetic
tcgaggaagtagaagcggtt

SEQ ID NO: 28870 - DNA, 20 bp, Artificial Sequence
  Synthetic
ctcgaggaagtagaagcggt

SEQ ID NO: 28871 - DNA, 20 bp, Artificial Sequence
  Synthetic
caaccgcttctacttcctcg

SEQ ID NO: 28872 - DNA, 20 bp, Artificial Sequence
  Synthetic
ccacctcgaggaagtagaag

SEQ ID NO: 28873 - DNA, 20 bp, Artificial Sequence
  Synthetic
ccgcttctacttcctcgagg

SEQ ID NO: 28874 - DNA, 20 bp, Artificial Sequence
  Synthetic
caagcaggggcaccacctcg

SEQ ID NO: 28875 - DNA, 20 bp, Artificial Sequence
  Synthetic
gcttttgctctttgcattat

SEQ ID NO: 28876 - DNA, 20 bp, Artificial Sequence
  Synthetic
gtgcattgatgcggaaaccc

SEQ ID NO: 28877 - DNA, 20 bp, Artificial Sequence
  Synthetic
tgatgcggaaaccctggaag

SEQ ID NO: 28878 - DNA, 20 bp, Artificial Sequence
  Synthetic
gatgcggaaaccctggaagt

SEQ ID NO: 28879 - DNA, 20 bp, Artificial Sequence
  Synthetic
atgcggaaaccctggaagtg

SEQ ID NO: 28880 - DNA, 20 bp, Artificial Sequence
  Synthetic
tgcggaaaccctggaagtgg

SEQ ID NO: 28881 - DNA, 20 bp, Artificial Sequence
  Synthetic
gacacagtcccccacttcca

SEQ ID NO: 28882 - DNA, 20 bp, Artificial Sequence
  Synthetic
agacacagtcccccacttcc

SEQ ID NO: 28883 - DNA, 20 bp, Artificial Sequence
  Synthetic
agcggttttgaggaatcatc

SEQ ID NO: 28884 - DNA, 20 bp, Artificial Sequence
  Synthetic
tgctagatacagcggttttg

SEQ ID NO: 28885 - DNA, 20 bp, Artificial Sequence
  Synthetic
caaaaccgctgtatctagca

SEQ ID NO: 28886 - DNA, 20 bp, Artificial Sequence
  Synthetic
gcaaaccttgctagatacag

SEQ ID NO: 28887 - DNA, 20 bp, Artificial Sequence
  Synthetic
gtcttctgattccagggtca

SEQ ID NO: 28888 - DNA, 20 bp, Artificial Sequence
  Synthetic
attccagggtcacggcgctg

SEQ ID NO: 28889 - DNA, 20 bp, Artificial Sequence
  Synthetic
ttccagggtcacggcgctgt

SEQ ID NO: 28890 - DNA, 20 bp, Artificial Sequence
  Synthetic
ctcccacagcgccgtgaccc

SEQ ID NO: 28891 - DNA, 20 bp, Artificial Sequence
  Synthetic
cagggtcacggcgctgtggg

SEQ ID NO: 28892 - DNA, 20 bp, Artificial Sequence
  Synthetic
ctgtgggaggacagcagcaa

SEQ ID NO: 28893 - DNA, 20 bp, Artificial Sequence
  Synthetic
tgtgggaggacagcagcaac

SEQ ID NO: 28894 - DNA, 20 bp, Artificial Sequence
  Synthetic
ggcagatgtttcacgcccac

SEQ ID NO: 28895 - DNA, 20 bp, Artificial Sequence
  Synthetic
cacgcccactggttctgcgc

SEQ ID NO: 28896 - DNA, 20 bp, Artificial Sequence
  Synthetic
acgcccactggttctgcgct

SEQ ID NO: 28897 - DNA, 20 bp, Artificial Sequence
  Synthetic
tgtcccagcgcagaaccagt

SEQ ID NO: 28898 - DNA, 20 bp, Artificial Sequence
  Synthetic
ctgtcccagcgcagaaccag

SEQ ID NO: 28899 - DNA, 20 bp, Artificial Sequence
  Synthetic
gctgggacagacacagtcct

SEQ ID NO: 28900 - DNA, 20 bp, Artificial Sequence
  Synthetic
ctgggacagacacagtcctc

SEQ ID NO: 28901 - DNA, 20 bp, Artificial Sequence
  Synthetic
tgggacagacacagtcctcg

SEQ ID NO: 28902 - DNA, 20 bp, Artificial Sequence
  Synthetic
cacagtcctcggggccacgt

SEQ ID NO: 28903 - DNA, 20 bp, Artificial Sequence
  Synthetic
gagggtccgacgtggccccg

SEQ ID NO: 28904 - DNA, 20 bp, Artificial Sequence
  Synthetic
cggggccacgtcggaccctc

SEQ ID NO: 28905 - DNA, 20 bp, Artificial Sequence
  Synthetic
cagctccagagggtccgacg

SEQ ID NO: 28906 - DNA, 20 bp, Artificial Sequence
  Synthetic
ggaccctctggagctgttct

SEQ ID NO: 28907 - DNA, 20 bp, Artificial Sequence
  Synthetic
ccaccaagaacagctccaga

SEQ ID NO: 28908 - DNA, 20 bp, Artificial Sequence
  Synthetic
ccctctggagctgttcttgg

SEQ ID NO: 28909 - DNA, 20 bp, Artificial Sequence
  Synthetic
tccaccaagaacagctccag

SEQ ID NO: 28910 - DNA, 20 bp, Artificial Sequence
  Synthetic
gttcttggtggatgaatgtg

SEQ ID NO: 28911 - DNA, 20 bp, Artificial Sequence
  Synthetic
agatgactttcactttgctg

SEQ ID NO: 28912 - DNA, 20 bp, Artificial Sequence
  Synthetic
acaaagccccctccgaaaac

SEQ ID NO: 28913 - DNA, 20 bp, Artificial Sequence
  Synthetic
caaagccccctccgaaaact

SEQ ID NO: 28914 - DNA, 20 bp, Artificial Sequence
  Synthetic
catggcccagttttcggagg

SEQ ID NO: 28915 - DNA, 20 bp, Artificial Sequence
  Synthetic
ccatggcccagttttcggag

SEQ ID NO: 28916 - DNA, 20 bp, Artificial Sequence
  Synthetic
cccctccgaaaactgggcca

SEQ ID NO: 28917 - DNA, 20 bp, Artificial Sequence
  Synthetic
tccatggcccagttttcgga

SEQ ID NO: 28918 - DNA, 20 bp, Artificial Sequence
  Synthetic
ctccatggcccagttttcgg

SEQ ID NO: 28919 - DNA, 20 bp, Artificial Sequence
  Synthetic
ctccgaaaactgggccatgg

SEQ ID NO: 28920 - DNA, 20 bp, Artificial Sequence
  Synthetic
cacctccatggcccagtttt

SEQ ID NO: 28921 - DNA, 20 bp, Artificial Sequence
  Synthetic
acaccaggcactcacctcca

SEQ ID NO: 28922 - DNA, 20 bp, Artificial Sequence
  Synthetic
cttatctcccaagggaggca

SEQ ID NO: 28923 - DNA, 20 bp, Artificial Sequence
  Synthetic
catggatcccgagtccctgc

SEQ ID NO: 28924 - DNA, 20 bp, Artificial Sequence
  Synthetic
ggatcccgagtccctgctgg

SEQ ID NO: 28925 - DNA, 20 bp, Artificial Sequence
  Synthetic
gatcccgagtccctgctgga

SEQ ID NO: 28926 - DNA, 20 bp, Artificial Sequence
  Synthetic
atcccgagtccctgctggag

SEQ ID NO: 28927 - DNA, 20 bp, Artificial Sequence
  Synthetic
tcccgagtccctgctggagg

SEQ ID NO: 28928 - DNA, 20 bp, Artificial Sequence
  Synthetic
tccccctccagcagggactc

SEQ ID NO: 28929 - DNA, 20 bp, Artificial Sequence
  Synthetic
gtccccctccagcagggact

SEQ ID NO: 28930 - DNA, 20 bp, Artificial Sequence
  Synthetic
tccctgctggagggggacga

SEQ ID NO: 28931 - DNA, 20 bp, Artificial Sequence
  Synthetic
cccgtcgtccccctccagca

SEQ ID NO: 28932 - DNA, 20 bp, Artificial Sequence
  Synthetic
ccctgctggagggggacgac

SEQ ID NO: 28933 - DNA, 20 bp, Artificial Sequence
  Synthetic
tcccgtcgtccccctccagc

SEQ ID NO: 28934 - DNA, 20 bp, Artificial Sequence
  Synthetic
agacctacttctaccagctg

SEQ ID NO: 28935 - DNA, 20 bp, Artificial Sequence
  Synthetic
ataccacagctggtagaagt

SEQ ID NO: 28936 - DNA, 20 bp, Artificial Sequence
  Synthetic
agtcttgatcataccacagc

SEQ ID NO: 28937 - DNA, 20 bp, Artificial Sequence
  Synthetic
aggagaacgcctttaagcgc

SEQ ID NO: 28938 - DNA, 20 bp, Artificial Sequence
  Synthetic
gcctttaagcgccggcgatg

SEQ ID NO: 28939 - DNA, 20 bp, Artificial Sequence
  Synthetic
gccacatcgccggcgcttaa

SEQ ID NO: 28940 - DNA, 20 bp, Artificial Sequence
  Synthetic
cctcacagacgccacatcgc

SEQ ID NO: 28941 - DNA, 20 bp, Artificial Sequence
  Synthetic
ccggcgatgtggcgtctgtg

SEQ ID NO: 28942 - DNA, 20 bp, Artificial Sequence
  Synthetic
gtgtgtcagcagcctgagtg

SEQ ID NO: 28943 - DNA, 20 bp, Artificial Sequence
  Synthetic
tgtgtcagcagcctgagtgt

SEQ ID NO: 28944 - DNA, 20 bp, Artificial Sequence
  Synthetic
gctttacatttcccacactc

SEQ ID NO: 28945 - DNA, 20 bp, Artificial Sequence
  Synthetic
tgggaaatgtaaagcctgca

SEQ ID NO: 28946 - DNA, 20 bp, Artificial Sequence
  Synthetic
atgtaaagcctgcaaggaca

SEQ ID NO: 28947 - DNA, 20 bp, Artificial Sequence
  Synthetic
aaatttaaccatgtccttgc

SEQ ID NO: 28948 - DNA, 20 bp, Artificial Sequence
  Synthetic
tgcaaggacatggttaaatt

SEQ ID NO: 28949 - DNA, 20 bp, Artificial Sequence
  Synthetic
aaggacatggttaaatttgg

SEQ ID NO: 28950 - DNA, 20 bp, Artificial Sequence
  Synthetic
atggttaaatttggtggcag

SEQ ID NO: 28951 - DNA, 20 bp, Artificial Sequence
  Synthetic
ttaaatttggtggcagtgga

SEQ ID NO: 28952 - DNA, 20 bp, Artificial Sequence
  Synthetic
tggcagtggacggagcaagc

SEQ ID NO: 28953 - DNA, 20 bp, Artificial Sequence
  Synthetic
gcaagcaggcttgccaagag

SEQ ID NO: 28954 - DNA, 20 bp, Artificial Sequence
  Synthetic
agcaggcttgccaagagcgg

SEQ ID NO: 28955 - DNA, 20 bp, Artificial Sequence
  Synthetic
ggcttgccaagagcggaggt

SEQ ID NO: 28956 - DNA, 20 bp, Artificial Sequence
  Synthetic
gcctgacctacctccgctct

SEQ ID NO: 28957 - DNA, 20 bp, Artificial Sequence
  Synthetic
gacatcgtcgggcagcgaga

SEQ ID NO: 28958 - DNA, 20 bp, Artificial Sequence
  Synthetic
cgctgcccgacgatgtccgc

SEQ ID NO: 28959 - DNA, 20 bp, Artificial Sequence
  Synthetic
tgcccgacgatgtccgcagg

SEQ ID NO: 28960 - DNA, 20 bp, Artificial Sequence
  Synthetic
taccgcctgcggacatcgtc

SEQ ID NO: 28961 - DNA, 20 bp, Artificial Sequence
  Synthetic
ctaccgcctgcggacatcgt

SEQ ID NO: 28962 - DNA, 20 bp, Artificial Sequence
  Synthetic
cgacgatgtccgcaggcggt

SEQ ID NO: 28963 - DNA, 20 bp, Artificial Sequence
  Synthetic
cccatggtacctaccgcctg

SEQ ID NO: 28964 - DNA, 20 bp, Artificial Sequence
  Synthetic
tcctcccaggctcaaagatt

SEQ ID NO: 28965 - DNA, 20 bp, Artificial Sequence
  Synthetic
tctttccaaatctttgagcc

SEQ ID NO: 28966 - DNA, 20 bp, Artificial Sequence
  Synthetic
aagagacagcttaacagaaa

SEQ ID NO: 28967 - DNA, 20 bp, Artificial Sequence
  Synthetic
cttcccttaggaatgtgtga

SEQ ID NO: 28968 - DNA, 20 bp, Artificial Sequence
  Synthetic
aaagaatcagttatgtgact

SEQ ID NO: 28969 - DNA, 20 bp, Artificial Sequence
  Synthetic
taattcttctttacgtaatt

SEQ ID NO: 28970 - DNA, 20 bp, Artificial Sequence
  Synthetic
acgtaaagaagaattatccg

SEQ ID NO: 28971 - DNA, 20 bp, Artificial Sequence
  Synthetic
cctgctgtaggagggctacc

SEQ ID NO: 28972 - DNA, 20 bp, Artificial Sequence
  Synthetic
aaagggatttgactttagcc

SEQ ID NO: 28973 - DNA, 20 bp, Artificial Sequence
  Synthetic
ggacaaatctttatttaaaa

SEQ ID NO: 28974 - DNA, 20 bp, Artificial Sequence
  Synthetic
aggacaaatctttatttaaa

SEQ ID NO: 28975 - DNA, 20 bp, Artificial Sequence
  Synthetic
tttaaataaagatttgtcct

SEQ ID NO: 28976 - DNA, 20 bp, Artificial Sequence
  Synthetic
aaagatttgtccttggagaa

SEQ ID NO: 28977 - DNA, 20 bp, Artificial Sequence
  Synthetic
agcatgagcaccgttctcca

SEQ ID NO: 28978 - DNA, 20 bp, Artificial Sequence
  Synthetic
acggtgctcatgcttacaac

SEQ ID NO: 28979 - DNA, 20 bp, Artificial Sequence
  Synthetic
cggtgctcatgcttacaacc

SEQ ID NO: 28980 - DNA, 20 bp, Artificial Sequence
  Synthetic
gcttacaaccgggaagtgaa

SEQ ID NO: 28981 - DNA, 20 bp, Artificial Sequence
  Synthetic
ctagacgtccattcacttcc

SEQ ID NO: 28982 - DNA, 20 bp, Artificial Sequence
  Synthetic
aagcaggtcagtttgtgctg

SEQ ID NO: 28983 - DNA, 20 bp, Artificial Sequence
  Synthetic
gaagcaggtcagtttgtgct

SEQ ID NO: 28984 - DNA, 20 bp, Artificial Sequence
  Synthetic
tgaagcaggtcagtttgtgc

SEQ ID NO: 28985 - DNA, 20 bp, Artificial Sequence
  Synthetic
agcacaaactgacctgcttc

SEQ ID NO: 28986 - DNA, 20 bp, Artificial Sequence
  Synthetic
aaagtgcacttacctgaagc

SEQ ID NO: 28987 - DNA, 20 bp, Artificial Sequence
  Synthetic
tctagtgtgtactgtaagca

SEQ ID NO: 28988 - DNA, 20 bp, Artificial Sequence
  Synthetic
cacctgtgtcccatcgacac

SEQ ID NO: 28989 - DNA, 20 bp, Artificial Sequence
  Synthetic
ggccggtgtcgatgggacac

SEQ ID NO: 28990 - DNA, 20 bp, Artificial Sequence
  Synthetic
tcgatgaggccggtgtcgat

SEQ ID NO: 28991 - DNA, 20 bp, Artificial Sequence
  Synthetic
ctcgatgaggccggtgtcga

SEQ ID NO: 28992 - DNA, 20 bp, Artificial Sequence
  Synthetic
gatattcttctcgatgaggc

SEQ ID NO: 28993 - DNA, 20 bp, Artificial Sequence
  Synthetic
gttcgatattcttctcgatg

SEQ ID NO: 28994 - DNA, 20 bp, Artificial Sequence
  Synthetic
aatatcgaactcttcttttc

SEQ ID NO: 28995 - DNA, 20 bp, Artificial Sequence
  Synthetic
gatgggtcatcatcatagat

SEQ ID NO: 28996 - DNA, 20 bp, Artificial Sequence
  Synthetic
gatgatgacccatctcttga

SEQ ID NO: 28997 - DNA, 20 bp, Artificial Sequence
  Synthetic
attccttaccttcaagagat

SEQ ID NO: 28998 - DNA, 20 bp, Artificial Sequence
  Synthetic
tattccttaccttcaagaga

SEQ ID NO: 28999 - DNA, 20 bp, Artificial Sequence
  Synthetic
tctgctctaggtggtgttaa

SEQ ID NO: 29000 - DNA, 20 bp, Artificial Sequence
  Synthetic
ggtgttaatggcaaaaatct

SEQ ID NO: 29001 - DNA, 20 bp, Artificial Sequence
  Synthetic
atcttggccccataaatgaa

SEQ ID NO: 29002 - DNA, 20 bp, Artificial Sequence
  Synthetic
ttggccccataaatgaatgg

SEQ ID NO: 29003 - DNA, 20 bp, Artificial Sequence
  Synthetic
tgatccaccattcatttatg

SEQ ID NO: 29004 - DNA, 20 bp, Artificial Sequence
  Synthetic
gtgatccaccattcatttat

SEQ ID NO: 29005 - DNA, 20 bp, Artificial Sequence
  Synthetic
agtgatccaccattcattta

SEQ ID NO: 29006 - DNA, 20 bp, Artificial Sequence
  Synthetic
ataaatgaatggtggatcac

SEQ ID NO: 29007 - DNA, 20 bp, Artificial Sequence
  Synthetic
tggtggatcactggctttga

SEQ ID NO: 29008 - DNA, 20 bp, Artificial Sequence
  Synthetic
tggatcactggctttgatgg

SEQ ID NO: 29009 - DNA, 20 bp, Artificial Sequence
  Synthetic
tggctttgatggaggtgaaa

SEQ ID NO: 29010 - DNA, 20 bp, Artificial Sequence
  Synthetic
ggaggtgaaaaggccctcat

SEQ ID NO: 29011 - DNA, 20 bp, Artificial Sequence
  Synthetic
acaggtgctgaagccgatga

SEQ ID NO: 29012 - DNA, 20 bp, Artificial Sequence
  Synthetic
tacaggtgctgaagccgatg

SEQ ID NO: 29013 - DNA, 20 bp, Artificial Sequence
  Synthetic
agaatgtattcggcaaatgc

SEQ ID NO: 29014 - DNA, 20 bp, Artificial Sequence
  Synthetic
atttgccgaatacattctga

SEQ ID NO: 29015 - DNA, 20 bp, Artificial Sequence
  Synthetic
gggatccatcagaatgtatt

SEQ ID NO: 29016 - DNA, 20 bp, Artificial Sequence
  Synthetic
atgggcgcatactcgggact

SEQ ID NO: 29017 - DNA, 20 bp, Artificial Sequence
  Synthetic
tatgggcgcatactcgggac

SEQ ID NO: 29018 - DNA, 20 bp, Artificial Sequence
  Synthetic
ccaaatatgggcgcatactc

SEQ ID NO: 29019 - DNA, 20 bp, Artificial Sequence
  Synthetic
cccgagtatgcgcccatatt

SEQ ID NO: 29020 - DNA, 20 bp, Artificial Sequence
  Synthetic
cccaaatatgggcgcatact

SEQ ID NO: 29021 - DNA, 20 bp, Artificial Sequence
  Synthetic
ccgagtatgcgcccatattt

SEQ ID NO: 29022 - DNA, 20 bp, Artificial Sequence
  Synthetic
gcccatatttgggctgatgc

SEQ ID NO: 29023 - DNA, 20 bp, Artificial Sequence
  Synthetic
tcctgcatcagcccaaatat

SEQ ID NO: 29024 - DNA, 20 bp, Artificial Sequence
  Synthetic
ctcctgcatcagcccaaata

SEQ ID NO: 29025 - DNA, 20 bp, Artificial Sequence
  Synthetic
gatctacatcagcaagattg

SEQ ID NO: 29026 - DNA, 20 bp, Artificial Sequence
  Synthetic
ctacatcagcaagattgtgg

SEQ ID NO: 29027 - DNA, 20 bp, Artificial Sequence
  Synthetic
tcgagtcggaattgctctgc

SEQ ID NO: 29028 - DNA, 20 bp, Artificial Sequence
  Synthetic
caattccgactcgacctatg

SEQ ID NO: 29029 - DNA, 20 bp, Artificial Sequence
  Synthetic
caggtcctcataggtcgagt

SEQ ID NO: 29030 - DNA, 20 bp, Artificial Sequence
  Synthetic
cttgttgatcaggtcctcat

SEQ ID NO: 29031 - DNA, 20 bp, Artificial Sequence
  Synthetic
ggacctgatcaacaagatcg

SEQ ID NO: 29032 - DNA, 20 bp, Artificial Sequence
  Synthetic
ttacctcgatcttgttgatc

SEQ ID NO: 29033 - DNA, 20 bp, Artificial Sequence
  Synthetic
cctgttctctttcaagacca

SEQ ID NO: 29034 - DNA, 20 bp, Artificial Sequence
  Synthetic
ctgagaagaggaagcccatc

SEQ ID NO: 29035 - DNA, 20 bp, Artificial Sequence
  Synthetic
tgagaagaggaagcccatcc

SEQ ID NO: 29036 - DNA, 20 bp, Artificial Sequence
  Synthetic
aagagagacagcacccggat

SEQ ID NO: 29037 - DNA, 20 bp, Artificial Sequence
  Synthetic
aaagagagacagcacccgga

SEQ ID NO: 29038 - DNA, 20 bp, Artificial Sequence
  Synthetic
catcaaagagagacagcacc

SEQ ID NO: 29039 - DNA, 20 bp, Artificial Sequence
  Synthetic
cgggtgctgtctctctttga

SEQ ID NO: 29040 - DNA, 20 bp, Artificial Sequence
  Synthetic
ctctttgatggaatcgctac

SEQ ID NO: 29041 - DNA, 20 bp, Artificial Sequence
  Synthetic
gctggctggtgcagggctcc

SEQ ID NO: 29042 - DNA, 20 bp, Artificial Sequence
  Synthetic
tgcagggctcctggtgctga

SEQ ID NO: 29043 - DNA, 20 bp, Artificial Sequence
  Synthetic
gctcctggtgctgaaggact

SEQ ID NO: 29044 - DNA, 20 bp, Artificial Sequence
  Synthetic
ctcctggtgctgaaggactt

SEQ ID NO: 29045 - DNA, 20 bp, Artificial Sequence
  Synthetic
tgcccaagtccttcagcacc

SEQ ID NO: 29046 - DNA, 20 bp, Artificial Sequence
  Synthetic
gctgaaggacttgggcattc

SEQ ID NO: 29047 - DNA, 20 bp, Artificial Sequence
  Synthetic
gaaggacttgggcattcagg

SEQ ID NO: 29048 - DNA, 20 bp, Artificial Sequence
  Synthetic
ggtggaccgctacattgcct

SEQ ID NO: 29049 - DNA, 20 bp, Artificial Sequence
  Synthetic
ggaccgctacattgcctcgg

SEQ ID NO: 29050 - DNA, 20 bp, Artificial Sequence
  Synthetic
acacctccgaggcaatgtag

SEQ ID NO: 29051 - DNA, 20 bp, Artificial Sequence
  Synthetic
cattgcctcggaggtgtgtg

SEQ ID NO: 29052 - DNA, 20 bp, Artificial Sequence
  Synthetic
ggagtcctcacacacctccg

SEQ ID NO: 29053 - DNA, 20 bp, Artificial Sequence
  Synthetic
ggtgtgtgaggactccatca

SEQ ID NO: 29054 - DNA, 20 bp, Artificial Sequence
  Synthetic
gtgtgaggactccatcacgg

SEQ ID NO: 29055 - DNA, 20 bp, Artificial Sequence
  Synthetic
tgtgaggactccatcacggt

SEQ ID NO: 29056 - DNA, 20 bp, Artificial Sequence
  Synthetic
ggactccatcacggtgggca

SEQ ID NO: 29057 - DNA, 20 bp, Artificial Sequence
  Synthetic
ccgcaccatgcccaccgtga

SEQ ID NO: 29058 - DNA, 20 bp, Artificial Sequence
  Synthetic
ccatcacggtgggcatggtg

SEQ ID NO: 29059 - DNA, 20 bp, Artificial Sequence
  Synthetic
ggtgggcatggtgcggcacc

SEQ ID NO: 29060 - DNA, 20 bp, Artificial Sequence
  Synthetic
gtgggcatggtgcggcacca

SEQ ID NO: 29061 - DNA, 20 bp, Artificial Sequence
  Synthetic
tgggcatggtgcggcaccag

SEQ ID NO: 29062 - DNA, 20 bp, Artificial Sequence
  Synthetic
cgacgtacatgatcttcccc

SEQ ID NO: 29063 - DNA, 20 bp, Artificial Sequence
  Synthetic
caggggaagatcatgtacgt

SEQ ID NO: 29064 - DNA, 20 bp, Artificial Sequence
  Synthetic
aggggaagatcatgtacgtc

SEQ ID NO: 29065 - DNA, 20 bp, Artificial Sequence
  Synthetic
ggggaagatcatgtacgtcg

SEQ ID NO: 29066 - DNA, 20 bp, Artificial Sequence
  Synthetic
catgcttctgtgtgacgctg

SEQ ID NO: 29067 - DNA, 20 bp, Artificial Sequence
  Synthetic
gcctttatcctcccagatcc

SEQ ID NO: 29068 - DNA, 20 bp, Artificial Sequence
  Synthetic
tatcctcccagatccaggag

SEQ ID NO: 29069 - DNA, 20 bp, Artificial Sequence
  Synthetic
atcctcccagatccaggagt

SEQ ID NO: 29070 - DNA, 20 bp, Artificial Sequence
  Synthetic
tcctcccagatccaggagtg

SEQ ID NO: 29071 - DNA, 20 bp, Artificial Sequence
  Synthetic
atgggccccactcctggatc

SEQ ID NO: 29072 - DNA, 20 bp, Artificial Sequence
  Synthetic
gatcgaatgggccccactcc

SEQ ID NO: 29073 - DNA, 20 bp, Artificial Sequence
  Synthetic
ggagtggggcccattcgatc

SEQ ID NO: 29074 - DNA, 20 bp, Artificial Sequence
  Synthetic
ggcccattcgatctggtgat

SEQ ID NO: 29075 - DNA, 20 bp, Artificial Sequence
  Synthetic
gcccattcgatctggtgatt

SEQ ID NO: 29076 - DNA, 20 bp, Artificial Sequence
  Synthetic
ccccaatcaccagatcgaat

SEQ ID NO: 29077 - DNA, 20 bp, Artificial Sequence
  Synthetic
cccattcgatctggtgattg

SEQ ID NO: 29078 - DNA, 20 bp, Artificial Sequence
  Synthetic
cccccaatcaccagatcgaa

SEQ ID NO: 29079 - DNA, 20 bp, Artificial Sequence
  Synthetic
ccattcgatctggtgattgg

SEQ ID NO: 29080 - DNA, 20 bp, Artificial Sequence
  Synthetic
acgatggagaggtcattgca

SEQ ID NO: 29081 - DNA, 20 bp, Artificial Sequence
  Synthetic
gacgatggagaggtcattgc

SEQ ID NO: 29082 - DNA, 20 bp, Artificial Sequence
  Synthetic
gagcagggttgacgatggag

SEQ ID NO: 29083 - DNA, 20 bp, Artificial Sequence
  Synthetic
cttgcgagcagggttgacga

SEQ ID NO: 29084 - DNA, 20 bp, Artificial Sequence
  Synthetic
catcgtcaaccctgctcgca

SEQ ID NO: 29085 - DNA, 20 bp, Artificial Sequence
  Synthetic
atcgtcaaccctgctcgcaa

SEQ ID NO: 29086 - DNA, 20 bp, Artificial Sequence
  Synthetic
cgtagaggcccttgcgagca

SEQ ID NO: 29087 - DNA, 20 bp, Artificial Sequence
  Synthetic
ccgtagaggcccttgcgagc

SEQ ID NO: 29088 - DNA, 20 bp, Artificial Sequence
  Synthetic
cctgctcgcaagggcctcta

SEQ ID NO: 29089 - DNA, 20 bp, Artificial Sequence
  Synthetic
ctcgcaagggcctctacggt

SEQ ID NO: 29090 - DNA, 20 bp, Artificial Sequence
  Synthetic
caggatggtacctaccgtag

SEQ ID NO: 29091 - DNA, 20 bp, Artificial Sequence
  Synthetic
tccgacctctcagagggcac

SEQ ID NO: 29092 - DNA, 20 bp, Artificial Sequence
  Synthetic
acctctcagagggcactggc

SEQ ID NO: 29093 - DNA, 20 bp, Artificial Sequence
  Synthetic
ggtagaactcaaagaagagc

SEQ ID NO: 29094 - DNA, 20 bp, Artificial Sequence
  Synthetic
accgcctcctgcatgatgcg

SEQ ID NO: 29095 - DNA, 20 bp, Artificial Sequence
  Synthetic
gccgcgcatcatgcaggagg

SEQ ID NO: 29096 - DNA, 20 bp, Artificial Sequence
  Synthetic
tgggccgcgcatcatgcagg

SEQ ID NO: 29097 - DNA, 20 bp, Artificial Sequence
  Synthetic
ccttgggccgcgcatcatgc

SEQ ID NO: 29098 - DNA, 20 bp, Artificial Sequence
  Synthetic
cctgcatgatgcgcggccca

SEQ ID NO: 29099 - DNA, 20 bp, Artificial Sequence
  Synthetic
gcatgatgcgcggcccaagg

SEQ ID NO: 29100 - DNA, 20 bp, Artificial Sequence
  Synthetic
catgatgcgcggcccaagga

SEQ ID NO: 29101 - DNA, 20 bp, Artificial Sequence
  Synthetic
gggcgatcatctccctcctt

SEQ ID NO: 29102 - DNA, 20 bp, Artificial Sequence
  Synthetic
ggggcgatcatctccctcct

SEQ ID NO: 29103 - DNA, 20 bp, Artificial Sequence
  Synthetic
gagatgatcgccccttcttc

SEQ ID NO: 29104 - DNA, 20 bp, Artificial Sequence
  Synthetic
tctcaaagagccagaagaag

SEQ ID NO: 29105 - DNA, 20 bp, Artificial Sequence
  Synthetic
ttctcaaagagccagaagaa

SEQ ID NO: 29106 - DNA, 20 bp, Artificial Sequence
  Synthetic
attctcaaagagccagaaga

SEQ ID NO: 29107 - DNA, 20 bp, Artificial Sequence
  Synthetic
cttctggctctttgagaatg

SEQ ID NO: 29108 - DNA, 20 bp, Artificial Sequence
  Synthetic
ctggctctttgagaatgtgg

SEQ ID NO: 29109 - DNA, 20 bp, Artificial Sequence
  Synthetic
ctttgagaatgtggtggcca

SEQ ID NO: 29110 - DNA, 20 bp, Artificial Sequence
  Synthetic
tttgagaatgtggtggccat

SEQ ID NO: 29111 - DNA, 20 bp, Artificial Sequence
  Synthetic
cctcttgtcactaacgccca

SEQ ID NO: 29112 - DNA, 20 bp, Artificial Sequence
  Synthetic
ccatgggcgttagtgacaag

SEQ ID NO: 29113 - DNA, 20 bp, Artificial Sequence
  Synthetic
catgggcgttagtgacaaga

SEQ ID NO: 29114 - DNA, 20 bp, Artificial Sequence
  Synthetic
aacaatgacaggactcgaat

SEQ ID NO: 29115 - DNA, 20 bp, Artificial Sequence
  Synthetic
aaacaatgacaggactcgaa

SEQ ID NO: 29116 - DNA, 20 bp, Artificial Sequence
  Synthetic
cgagtcctgtcattgtttga

SEQ ID NO: 29117 - DNA, 20 bp, Artificial Sequence
  Synthetic
cgatgccatcaaacaatgac

SEQ ID NO: 29118 - DNA, 20 bp, Artificial Sequence
  Synthetic
ttgtttgatggcatcgcgac

SEQ ID NO: 29119 - DNA, 20 bp, Artificial Sequence
  Synthetic
ctacctagtcctcaaagagt

SEQ ID NO: 29120 - DNA, 20 bp, Artificial Sequence
  Synthetic
tacctagtcctcaaagagtt

SEQ ID NO: 29121 - DNA, 20 bp, Artificial Sequence
  Synthetic
tgcccaactctttgaggact

SEQ ID NO: 29122 - DNA, 20 bp, Artificial Sequence
  Synthetic
cctttatgcccaactctttg

SEQ ID NO: 29123 - DNA, 20 bp, Artificial Sequence
  Synthetic
cctcaaagagttgggcataa

SEQ ID NO: 29124 - DNA, 20 bp, Artificial Sequence
  Synthetic
aaagagttgggcataaaggt

SEQ ID NO: 29125 - DNA, 20 bp, Artificial Sequence
  Synthetic
cgtcgcttctgaagtgtgtg

SEQ ID NO: 29126 - DNA, 20 bp, Artificial Sequence
  Synthetic
tgtgaggagtccattgctgt

SEQ ID NO: 29127 - DNA, 20 bp, Artificial Sequence
  Synthetic
cttcacggttccaacagcaa

SEQ ID NO: 29128 - DNA, 20 bp, Artificial Sequence
  Synthetic
tgttggaaccgtgaagcacg

SEQ ID NO: 29129 - DNA, 20 bp, Artificial Sequence
  Synthetic
gttggaaccgtgaagcacga

SEQ ID NO: 29130 - DNA, 20 bp, Artificial Sequence
  Synthetic
ttggaaccgtgaagcacgag

SEQ ID NO: 29131 - DNA, 20 bp, Artificial Sequence
  Synthetic
gatattcccctcgtgcttca

SEQ ID NO: 29132 - DNA, 20 bp, Artificial Sequence
  Synthetic
tcaaatacgtgaacgacgtg

SEQ ID NO: 29133 - DNA, 20 bp, Artificial Sequence
  Synthetic
ctctctttcagattgaagaa

SEQ ID NO: 29134 - DNA, 20 bp, Artificial Sequence
  Synthetic
tctctttcagattgaagaat

SEQ ID NO: 29135 - DNA, 20 bp, Artificial Sequence
  Synthetic
ctctttcagattgaagaatg

SEQ ID NO: 29136 - DNA, 20 bp, Artificial Sequence
  Synthetic
agaatggggcccatttgact

SEQ ID NO: 29137 - DNA, 20 bp, Artificial Sequence
  Synthetic
ggcccatttgacttggtgat

SEQ ID NO: 29138 - DNA, 20 bp, Artificial Sequence
  Synthetic
cgccaatcaccaagtcaaat

SEQ ID NO: 29139 - DNA, 20 bp, Artificial Sequence
  Synthetic
ccgccaatcaccaagtcaaa

SEQ ID NO: 29140 - DNA, 20 bp, Artificial Sequence
  Synthetic
ccatttgacttggtgattgg

SEQ ID NO: 29141 - DNA, 20 bp, Artificial Sequence
  Synthetic
catttgagagatcgttgcat

SEQ ID NO: 29142 - DNA, 20 bp, Artificial Sequence
  Synthetic
acatttgagagatcgttgca

SEQ ID NO: 29143 - DNA, 20 bp, Artificial Sequence
  Synthetic
tctcaaatgtgaatccagcc

SEQ ID NO: 29144 - DNA, 20 bp, Artificial Sequence
  Synthetic
aatgtgaatccagccaggaa

SEQ ID NO: 29145 - DNA, 20 bp, Artificial Sequence
  Synthetic
ccatacaggcctttcctggc

SEQ ID NO: 29146 - DNA, 20 bp, Artificial Sequence
  Synthetic
ccagccaggaaaggcctgta

SEQ ID NO: 29147 - DNA, 20 bp, Artificial Sequence
  Synthetic
ctcaccatacaggcctttcc

SEQ ID NO: 29148 - DNA, 20 bp, Artificial Sequence
  Synthetic
gagaaggatgctcaccatac

SEQ ID NO: 29149 - DNA, 20 bp, Artificial Sequence
  Synthetic
tttctgagcacagagggtac

SEQ ID NO: 29150 - DNA, 20 bp, Artificial Sequence
  Synthetic
tgagcacagagggtacaggc

SEQ ID NO: 29151 - DNA, 20 bp, Artificial Sequence
  Synthetic
ggtaaaattcgaagaagagc

SEQ ID NO: 29152 - DNA, 20 bp, Artificial Sequence
  Synthetic
ggcgtgagtaattcagcagg

SEQ ID NO: 29153 - DNA, 20 bp, Artificial Sequence
  Synthetic
tggggcgtgagtaattcagc

SEQ ID NO: 29154 - DNA, 20 bp, Artificial Sequence
  Synthetic
gctgaattactcacgcccca

SEQ ID NO: 29155 - DNA, 20 bp, Artificial Sequence
  Synthetic
gaattactcacgccccaagg

SEQ ID NO: 29156 - DNA, 20 bp, Artificial Sequence
  Synthetic
aattactcacgccccaagga

SEQ ID NO: 29157 - DNA, 20 bp, Artificial Sequence
  Synthetic
gccccaaggagggtgatgac

SEQ ID NO: 29158 - DNA, 20 bp, Artificial Sequence
  Synthetic
gccggtcatcaccctccttg

SEQ ID NO: 29159 - DNA, 20 bp, Artificial Sequence
  Synthetic
ggccggtcatcaccctcctt

SEQ ID NO: 29160 - DNA, 20 bp, Artificial Sequence
  Synthetic
cggccggtcatcaccctcct

SEQ ID NO: 29161 - DNA, 20 bp, Artificial Sequence
  Synthetic
gtgatgaccggccgttcttc

SEQ ID NO: 29162 - DNA, 20 bp, Artificial Sequence
  Synthetic
caaacatccagaagaacggc

SEQ ID NO: 29163 - DNA, 20 bp, Artificial Sequence
  Synthetic
ttctcaaacatccagaagaa

SEQ ID NO: 29164 - DNA, 20 bp, Artificial Sequence
  Synthetic
tgagaatgttgtagccatga

SEQ ID NO: 29165 - DNA, 20 bp, Artificial Sequence
  Synthetic
aatgttgtagccatgaaggt

SEQ ID NO: 29166 - DNA, 20 bp, Artificial Sequence
  Synthetic
cctcttgtcgccaaccttca

SEQ ID NO: 29167 - DNA, 20 bp, Artificial Sequence
  Synthetic
ccatgaaggttggcgacaag

SEQ ID NO: 29168 - DNA, 20 bp, Artificial Sequence
  Synthetic
catgaaggttggcgacaaga

SEQ ID NO: 29169 - DNA, 20 bp, Artificial Sequence
  Synthetic
gcagcaggtctacaaccact

SEQ ID NO: 29170 - DNA, 20 bp, Artificial Sequence
  Synthetic
tctcggggtcggtcaccgag

SEQ ID NO: 29171 - DNA, 20 bp, Artificial Sequence
  Synthetic
gttgttgagcttctcggggt

SEQ ID NO: 29172 - DNA, 20 bp, Artificial Sequence
  Synthetic
cgtagttgttgagcttctcg

SEQ ID NO: 29173 - DNA, 20 bp, Artificial Sequence
  Synthetic
tcgtagttgttgagcttctc

SEQ ID NO: 29174 - DNA, 20 bp, Artificial Sequence
  Synthetic
ctcgtagttgttgagcttct

SEQ ID NO: 29175 - DNA, 20 bp, Artificial Sequence
  Synthetic
ctacgagcccttctcccccg

SEQ ID NO: 29176 - DNA, 20 bp, Artificial Sequence
  Synthetic
ccgtacacctcgggggagaa

SEQ ID NO: 29177 - DNA, 20 bp, Artificial Sequence
  Synthetic
cccttctcccccgaggtgta

SEQ ID NO: 29178 - DNA, 20 bp, Artificial Sequence
  Synthetic
cccgtacacctcgggggaga

SEQ ID NO: 29179 - DNA, 20 bp, Artificial Sequence
  Synthetic
ccttctcccccgaggtgtac

SEQ ID NO: 29180 - DNA, 20 bp, Artificial Sequence
  Synthetic
cttctcccccgaggtgtacg

SEQ ID NO: 29181 - DNA, 20 bp, Artificial Sequence
  Synthetic
ggtctccccgtacacctcgg

SEQ ID NO: 29182 - DNA, 20 bp, Artificial Sequence
  Synthetic
aggtctccccgtacacctcg

SEQ ID NO: 29183 - DNA, 20 bp, Artificial Sequence
  Synthetic
gaggtctccccgtacacctc

SEQ ID NO: 29184 - DNA, 20 bp, Artificial Sequence
  Synthetic
ggaggtctccccgtacacct

SEQ ID NO: 29185 - DNA, 20 bp, Artificial Sequence
  Synthetic
cggggagacctccttcgacc

SEQ ID NO: 29186 - DNA, 20 bp, Artificial Sequence
  Synthetic
ggagacctccttcgacctgg

SEQ ID NO: 29187 - DNA, 20 bp, Artificial Sequence
  Synthetic
ctgggccaccaggtcgaagg

SEQ ID NO: 29188 - DNA, 20 bp, Artificial Sequence
  Synthetic
catctgggccaccaggtcga

SEQ ID NO: 29189 - DNA, 20 bp, Artificial Sequence
  Synthetic
catcaatcatctgggccacc

SEQ ID NO: 29190 - DNA, 20 bp, Artificial Sequence
  Synthetic
cttgatctcatcaatcatct

SEQ ID NO: 29191 - DNA, 20 bp, Artificial Sequence
  Synthetic
tcttgatctcatcaatcatc

SEQ ID NO: 29192 - DNA, 20 bp, Artificial Sequence
  Synthetic
gaccgacgacgacctgtttg

SEQ ID NO: 29193 - DNA, 20 bp, Artificial Sequence
  Synthetic
gtccacaaacaggtcgtcgt

SEQ ID NO: 29194 - DNA, 20 bp, Artificial Sequence
  Synthetic
cgacgacctgtttgtggact

SEQ ID NO: 29195 - DNA, 20 bp, Artificial Sequence
  Synthetic
gacgacctgtttgtggactt

SEQ ID NO: 29196 - DNA, 20 bp, Artificial Sequence
  Synthetic
acgacctgtttgtggacttg

SEQ ID NO: 29197 - DNA, 20 bp, Artificial Sequence
  Synthetic
cgctccccaagtccacaaac

SEQ ID NO: 29198 - DNA, 20 bp, Artificial Sequence
  Synthetic
ctgtttgtggacttggggag

SEQ ID NO: 29199 - DNA, 20 bp, Artificial Sequence
  Synthetic
atctctctgatcataggtgt

SEQ ID NO: 29200 - DNA, 20 bp, Artificial Sequence
  Synthetic
tctgatcataggtgtgggcc

SEQ ID NO: 29201 - DNA, 20 bp, Artificial Sequence
  Synthetic
tgtgggccaggtcgtgctcc

SEQ ID NO: 29202 - DNA, 20 bp, Artificial Sequence
  Synthetic
cagcaacctggagcacgacc

SEQ ID NO: 29203 - DNA, 20 bp, Artificial Sequence
  Synthetic
agttggtggcagcagcaacc

SEQ ID NO: 29204 - DNA, 20 bp, Artificial Sequence
  Synthetic
atagtgatgtttgcagttgg

SEQ ID NO: 29205 - DNA, 20 bp, Artificial Sequence
  Synthetic
accaactgcaaacatcacta

SEQ ID NO: 29206 - DNA, 20 bp, Artificial Sequence
  Synthetic
gccatagtgatgtttgcagt

SEQ ID NO: 29207 - DNA, 20 bp, Artificial Sequence
  Synthetic
cgtcgagaaagcagacatcc

SEQ ID NO: 29208 - DNA, 20 bp, Artificial Sequence
  Synthetic
agacatcccggccaagtatg

SEQ ID NO: 29209 - DNA, 20 bp, Artificial Sequence
  Synthetic
catcccggccaagtatgcgg

SEQ ID NO: 29210 - DNA, 20 bp, Artificial Sequence
  Synthetic
tcacctccgcatacttggcc

SEQ ID NO: 29211 - DNA, 20 bp, Artificial Sequence
  Synthetic
ctcacctccgcatacttggc

SEQ ID NO: 29212 - DNA, 20 bp, Artificial Sequence
  Synthetic
tccgctcacctccgcatact

SEQ ID NO: 29213 - DNA, 20 bp, Artificial Sequence
  Synthetic
gtttctttccttccagacca

SEQ ID NO: 29214 - DNA, 20 bp, Artificial Sequence
  Synthetic
tgaactcgcggtccatggtc

SEQ ID NO: 29215 - DNA, 20 bp, Artificial Sequence
  Synthetic
agaccatggaccgcgagttc

SEQ ID NO: 29216 - DNA, 20 bp, Artificial Sequence
  Synthetic
cttcctgaactcgcggtcca

SEQ ID NO: 29217 - DNA, 20 bp, Artificial Sequence
  Synthetic
tggaccgcgagttcaggaag

SEQ ID NO: 29218 - DNA, 20 bp, Artificial Sequence
  Synthetic
tcatccacttcctgaactcg

SEQ ID NO: 29219 - DNA, 20 bp, Artificial Sequence
  Synthetic
agttcaggaagtggatgaaa

SEQ ID NO: 29220 - DNA, 20 bp, Artificial Sequence
  Synthetic
aggaagtggatgaaatggta

SEQ ID NO: 29221 - DNA, 20 bp, Artificial Sequence
  Synthetic
tttccctttcagttggagag

SEQ ID NO: 29222 - DNA, 20 bp, Artificial Sequence
  Synthetic
gcgatttcctctcagaagag

SEQ ID NO: 29223 - DNA, 20 bp, Artificial Sequence
  Synthetic
atttcctctcagaagagtgg

SEQ ID NO: 29224 - DNA, 20 bp, Artificial Sequence
  Synthetic
tttcctctcagaagagtgga

SEQ ID NO: 29225 - DNA, 20 bp, Artificial Sequence
  Synthetic
gctccctccactcttctgag

SEQ ID NO: 29226 - DNA, 20 bp, Artificial Sequence
  Synthetic
gggagcgaatcgccaacacg

SEQ ID NO: 29227 - DNA, 20 bp, Artificial Sequence
  Synthetic
acgctggccatacctcgtgt

SEQ ID NO: 29228 - DNA, 20 bp, Artificial Sequence
  Synthetic
tttgtgaataattttgcctt

SEQ ID NO: 29229 - DNA, 20 bp, Artificial Sequence
  Synthetic
taattttgcctttggtcctg

SEQ ID NO: 29230 - DNA, 20 bp, Artificial Sequence
  Synthetic
ttttgcctttggtcctgagg

SEQ ID NO: 29231 - DNA, 20 bp, Artificial Sequence
  Synthetic
gtgatccacctcaggaccaa

SEQ ID NO: 29232 - DNA, 20 bp, Artificial Sequence
  Synthetic
ttcagctggtgatccacctc

SEQ ID NO: 29233 - DNA, 20 bp, Artificial Sequence
  Synthetic
tgaggtggatcaccagctga

SEQ ID NO: 29234 - DNA, 20 bp, Artificial Sequence
  Synthetic
tggatcaccagctgaaggag

SEQ ID NO: 29235 - DNA, 20 bp, Artificial Sequence
  Synthetic
ttgcaaaccgctccttcagc

SEQ ID NO: 29236 - DNA, 20 bp, Artificial Sequence
  Synthetic
ggagcggtttgcaaacatga

SEQ ID NO: 29237 - DNA, 20 bp, Artificial Sequence
  Synthetic
cggtttgcaaacatgaagga

SEQ ID NO: 29238 - DNA, 20 bp, Artificial Sequence
  Synthetic
cagaggtgcaaagggtttcg

SEQ ID NO: 29239 - DNA, 20 bp, Artificial Sequence
  Synthetic
ctgaagttcagaggtgcaaa

SEQ ID NO: 29240 - DNA, 20 bp, Artificial Sequence
  Synthetic
tctgaagttcagaggtgcaa

SEQ ID NO: 29241 - DNA, 20 bp, Artificial Sequence
  Synthetic
ctgtttattctgaagttcag

SEQ ID NO: 29242 - DNA, 20 bp, Artificial Sequence
  Synthetic
ataaacagtagaaacttgag

SEQ ID NO: 29243 - DNA, 20 bp, Artificial Sequence
  Synthetic
cctgtggctcctgcagacat

SEQ ID NO: 29244 - DNA, 20 bp, Artificial Sequence
  Synthetic
catcggcaccatcatgcgcg

SEQ ID NO: 29245 - DNA, 20 bp, Artificial Sequence
  Synthetic
cggcaccatcatgcgcgtgg

SEQ ID NO: 29246 - DNA, 20 bp, Artificial Sequence
  Synthetic
gagctccaccacgcgcatga

SEQ ID NO: 29247 - DNA, 20 bp, Artificial Sequence
  Synthetic
ggtggagctctcgcccctga

SEQ ID NO: 29248 - DNA, 20 bp, Artificial Sequence
  Synthetic
gtggagctctcgcccctgaa

SEQ ID NO: 29249 - DNA, 20 bp, Artificial Sequence
  Synthetic
gctctcgcccctgaagggct

SEQ ID NO: 29250 - DNA, 20 bp, Artificial Sequence
  Synthetic
cacgacaccgagcccttcag

SEQ ID NO: 29251 - DNA, 20 bp, Artificial Sequence
  Synthetic
ccacgacaccgagcccttca

SEQ ID NO: 29252 - DNA, 20 bp, Artificial Sequence
  Synthetic
ccctgaagggctcggtgtcg

SEQ ID NO: 29253 - DNA, 20 bp, Artificial Sequence
  Synthetic
tccacgacaccgagcccttc

SEQ ID NO: 29254 - DNA, 20 bp, Artificial Sequence
  Synthetic
gaagggctcggtgtcgtgga

SEQ ID NO: 29255 - DNA, 20 bp, Artificial Sequence
  Synthetic
aagggctcggtgtcgtggac

SEQ ID NO: 29256 - DNA, 20 bp, Artificial Sequence
  Synthetic
agggctcggtgtcgtggacg

SEQ ID NO: 29257 - DNA, 20 bp, Artificial Sequence
  Synthetic
gtgtgcaggtagtaggagac

SEQ ID NO: 29258 - DNA, 20 bp, Artificial Sequence
  Synthetic
gtcgatagtgtgcaggtagt

SEQ ID NO: 29259 - DNA, 20 bp, Artificial Sequence
  Synthetic
tggtgcggtcgatagtgtgc

SEQ ID NO: 29260 - DNA, 20 bp, Artificial Sequence
  Synthetic
tgcaaatcctgcagcctgtg

SEQ ID NO: 29261 - DNA, 20 bp, Artificial Sequence
  Synthetic
ggaggttccgcacaggctgc

SEQ ID NO: 29262 - DNA, 20 bp, Artificial Sequence
  Synthetic
cgttctcggaggttccgcac

SEQ ID NO: 29263 - DNA, 20 bp, Artificial Sequence
  Synthetic
ggcactcacgtcgttctcgg

SEQ ID NO: 29264 - DNA, 20 bp, Artificial Sequence
  Synthetic
ggcggcactcacgtcgttct

SEQ ID NO: 29265 - DNA, 20 bp, Artificial Sequence
  Synthetic
cacaaaacagcagctggtcc

SEQ ID NO: 29266 - DNA, 20 bp, Artificial Sequence
  Synthetic
agtcatcacaaaacagcagc

SEQ ID NO: 29267 - DNA, 20 bp, Artificial Sequence
  Synthetic
tgttttgtgatgactgcgat

SEQ ID NO: 29268 - DNA, 20 bp, Artificial Sequence
  Synthetic
gttttgtgatgactgcgatc

SEQ ID NO: 29269 - DNA, 20 bp, Artificial Sequence
  Synthetic
ttttgtgatgactgcgatcg

SEQ ID NO: 29270 - DNA, 20 bp, Artificial Sequence
  Synthetic
ggggactcaggcagtacatg

SEQ ID NO: 29271 - DNA, 20 bp, Artificial Sequence
  Synthetic
gtactgcctgagtcccccca

SEQ ID NO: 29272 - DNA, 20 bp, Artificial Sequence
  Synthetic
ctgcctgagtccccccatgg

SEQ ID NO: 29273 - DNA, 20 bp, Artificial Sequence
  Synthetic
gctccgccatggggggactc

SEQ ID NO: 29274 - DNA, 20 bp, Artificial Sequence
  Synthetic
tccccccatggcggagcccc

SEQ ID NO: 29275 - DNA, 20 bp, Artificial Sequence
  Synthetic
tccgggggctccgccatggg

SEQ ID NO: 29276 - DNA, 20 bp, Artificial Sequence
  Synthetic
ttccgggggctccgccatgg

SEQ ID NO: 29277 - DNA, 20 bp, Artificial Sequence
  Synthetic
cttccgggggctccgccatg

SEQ ID NO: 29278 - DNA, 20 bp, Artificial Sequence
  Synthetic
ccttccgggggctccgccat

SEQ ID NO: 29279 - DNA, 20 bp, Artificial Sequence
  Synthetic
cccatggcggagcccccgga

SEQ ID NO: 29280 - DNA, 20 bp, Artificial Sequence
  Synthetic
accttccgggggctccgcca

SEQ ID NO: 29281 - DNA, 20 bp, Artificial Sequence
  Synthetic
cctctcctctcaccttccgg

SEQ ID NO: 29282 - DNA, 20 bp, Artificial Sequence
  Synthetic
acctctcctctcaccttccg

SEQ ID NO: 29283 - DNA, 20 bp, Artificial Sequence
  Synthetic
cacctctcctctcaccttcc

SEQ ID NO: 29284 - DNA, 20 bp, Artificial Sequence
  Synthetic
ccacctctcctctcaccttc

SEQ ID NO: 29285 - DNA, 20 bp, Artificial Sequence
  Synthetic
cggctgcccccgcagggagc

SEQ ID NO: 29286 - DNA, 20 bp, Artificial Sequence
  Synthetic
ggagctgtcacctctgtctc

SEQ ID NO: 29287 - DNA, 20 bp, Artificial Sequence
  Synthetic
ccttcaggtgccggagacag

SEQ ID NO: 29288 - DNA, 20 bp, Artificial Sequence
  Synthetic
tgcaaatgttgcaatatctg

SEQ ID NO: 29289 - DNA, 20 bp, Artificial Sequence
  Synthetic
gatacacacgtcattctcgg

SEQ ID NO: 29290 - DNA, 20 bp, Artificial Sequence
  Synthetic
ggggatacacacgtcattct

SEQ ID NO: 29291 - DNA, 20 bp, Artificial Sequence
  Synthetic
agtcatcacagaagagcaac

SEQ ID NO: 29292 - DNA, 20 bp, Artificial Sequence
  Synthetic
ttctgtgatgactgcgatcg

SEQ ID NO: 29293 - DNA, 20 bp, Artificial Sequence
  Synthetic
acggggtgagacagtacatg

SEQ ID NO: 29294 - DNA, 20 bp, Artificial Sequence
  Synthetic
agggggctcagacatggacg

SEQ ID NO: 29295 - DNA, 20 bp, Artificial Sequence
  Synthetic
cagggggctcagacatggac

SEQ ID NO: 29296 - DNA, 20 bp, Artificial Sequence
  Synthetic
tcagggggctcagacatgga

SEQ ID NO: 29297 - DNA, 20 bp, Artificial Sequence
  Synthetic
tccatgtctgagccccctga

SEQ ID NO: 29298 - DNA, 20 bp, Artificial Sequence
  Synthetic
accttcagggggctcagaca

SEQ ID NO: 29299 - DNA, 20 bp, Artificial Sequence
  Synthetic
ctgggcaacttaccttcagg

SEQ ID NO: 29300 - DNA, 20 bp, Artificial Sequence
  Synthetic
tctgggcaacttaccttcag

SEQ ID NO: 29301 - DNA, 20 bp, Artificial Sequence
  Synthetic
atctgggcaacttaccttca

SEQ ID NO: 29302 - DNA, 20 bp, Artificial Sequence
  Synthetic
gatctgggcaacttaccttc

SEQ ID NO: 29303 - DNA, 20 bp, Artificial Sequence
  Synthetic
tttgcctctctgcaggaagt

SEQ ID NO: 29304 - DNA, 20 bp, Artificial Sequence
  Synthetic
ttggagctgccacctgtgtc

SEQ ID NO: 29305 - DNA, 20 bp, Artificial Sequence
  Synthetic
tcaacaggtccagacacagg

SEQ ID NO: 29306 - DNA, 20 bp, Artificial Sequence
  Synthetic
ctttcaacaggtccagacac

SEQ ID NO: 29307 - DNA, 20 bp, Artificial Sequence
  Synthetic
tgcaaatcctgtatcctctg

SEQ ID NO: 29308 - DNA, 20 bp, Artificial Sequence
  Synthetic
gcaaatcctgtatcctctgt

SEQ ID NO: 29309 - DNA, 20 bp, Artificial Sequence
  Synthetic
tgaggtcccacagaggatac

SEQ ID NO: 29310 - DNA, 20 bp, Artificial Sequence
  Synthetic
cattctctgaggtcccacag

SEQ ID NO: 29311 - DNA, 20 bp, Artificial Sequence
  Synthetic
caaactcacatcattctctg

SEQ ID NO: 29312 - DNA, 20 bp, Artificial Sequence
  Synthetic
cgcagaagagtagctggtcc

SEQ ID NO: 29313 - DNA, 20 bp, Artificial Sequence
  Synthetic
agtcatcgcagaagagtagc

SEQ ID NO: 29314 - DNA, 20 bp, Artificial Sequence
  Synthetic
ttctgcgatgactgtgaccg

SEQ ID NO: 29315 - DNA, 20 bp, Artificial Sequence
  Synthetic
aacagtacatgtgatagcct

SEQ ID NO: 29316 - DNA, 20 bp, Artificial Sequence
  Synthetic
catgtactgtttaaatcccc

SEQ ID NO: 29317 - DNA, 20 bp, Artificial Sequence
  Synthetic
gtactgtttaaatcccccgg

SEQ ID NO: 29318 - DNA, 20 bp, Artificial Sequence
  Synthetic
tctgggggctcagccaccgg

SEQ ID NO: 29319 - DNA, 20 bp, Artificial Sequence
  Synthetic
ttctgggggctcagccaccg

SEQ ID NO: 29320 - DNA, 20 bp, Artificial Sequence
  Synthetic
cttctgggggctcagccacc

SEQ ID NO: 29321 - DNA, 20 bp, Artificial Sequence
  Synthetic
ccttctgggggctcagccac

SEQ ID NO: 29322 - DNA, 20 bp, Artificial Sequence
  Synthetic
ccggtggctgagcccccaga

SEQ ID NO: 29323 - DNA, 20 bp, Artificial Sequence
  Synthetic
tcatcatcattaccttctgg

SEQ ID NO: 29324 - DNA, 20 bp, Artificial Sequence
  Synthetic
ttcatcatcattaccttctg

SEQ ID NO: 29325 - DNA, 20 bp, Artificial Sequence
  Synthetic
cttcatcatcattaccttct

SEQ ID NO: 29326 - DNA, 20 bp, Artificial Sequence
  Synthetic
acttcatcatcattaccttc

SEQ ID NO: 29327 - DNA, 20 bp, Artificial Sequence
  Synthetic
tctcatttcttgcaggaagc

SEQ ID NO: 29328 - DNA, 20 bp, Artificial Sequence
  Synthetic
gctggagctgccacttatgc

SEQ ID NO: 29329 - DNA, 20 bp, Artificial Sequence
  Synthetic
ctggagctgccacttatgct

SEQ ID NO: 29330 - DNA, 20 bp, Artificial Sequence
  Synthetic
tgagcagttcccagcataag

SEQ ID NO: 29331 - DNA, 20 bp, Artificial Sequence
  Synthetic
tataacaatgcagtgtataa

SEQ ID NO: 29332 - DNA, 20 bp, Artificial Sequence
  Synthetic
aacaatgcagtgtataaagg

SEQ ID NO: 29333 - DNA, 20 bp, Artificial Sequence
  Synthetic
acaatgcagtgtataaaggt

SEQ ID NO: 29334 - DNA, 20 bp, Artificial Sequence
  Synthetic
aatttattgtagcactatgt

SEQ ID NO: 29335 - DNA, 20 bp, Artificial Sequence
  Synthetic
ttgtagcactatgttggcca

SEQ ID NO: 29336 - DNA, 20 bp, Artificial Sequence
  Synthetic
gctcattgatagcatttcca

SEQ ID NO: 29337 - DNA, 20 bp, Artificial Sequence
  Synthetic
gaagatttggatctcttgga

SEQ ID NO: 29338 - DNA, 20 bp, Artificial Sequence
  Synthetic
aggagaagatttggatctct

SEQ ID NO: 29339 - DNA, 20 bp, Artificial Sequence
  Synthetic
cttactgacaggagaagatt

SEQ ID NO: 29340 - DNA, 20 bp, Artificial Sequence
  Synthetic
cttctcctgtcagtaagtaa

SEQ ID NO: 29341 - DNA, 20 bp, Artificial Sequence
  Synthetic
acttacctttacttactgac

SEQ ID NO: 29342 - DNA, 20 bp, Artificial Sequence
  Synthetic
tagatcatgctttacgatta

SEQ ID NO: 29343 - DNA, 20 bp, Artificial Sequence
  Synthetic
caatatttggaggcgtagaa

SEQ ID NO: 29344 - DNA, 20 bp, Artificial Sequence
  Synthetic
catacaggattatgatcttt

SEQ ID NO: 29345 - DNA, 20 bp, Artificial Sequence
  Synthetic
atacaggattatgatctttt

SEQ ID NO: 29346 - DNA, 20 bp, Artificial Sequence
  Synthetic
ggtgaaaaaataatgtcctg

SEQ ID NO: 29347 - DNA, 20 bp, Artificial Sequence
  Synthetic
aaaaataatgtcctgtggta

SEQ ID NO: 29348 - DNA, 20 bp, Artificial Sequence
  Synthetic
aagagaatgatccataccac

SEQ ID NO: 29349 - DNA, 20 bp, Artificial Sequence
  Synthetic
tggatcattctcttaaactt

SEQ ID NO: 29350 - DNA, 20 bp, Artificial Sequence
  Synthetic
atcattctcttaaactttgg

SEQ ID NO: 29351 - DNA, 20 bp, Artificial Sequence
  Synthetic
accggacgcgggacatgggc

SEQ ID NO: 29352 - DNA, 20 bp, Artificial Sequence
  Synthetic
ccggacgcgggacatgggct

SEQ ID NO: 29353 - DNA, 20 bp, Artificial Sequence
  Synthetic
cggacgcgggacatgggctg

SEQ ID NO: 29354 - DNA, 20 bp, Artificial Sequence
  Synthetic
gggacatgggctggggcgtg

SEQ ID NO: 29355 - DNA, 20 bp, Artificial Sequence
  Synthetic
ctggggcgtgcggtccctgc

SEQ ID NO: 29356 - DNA, 20 bp, Artificial Sequence
  Synthetic
tccctgcaggacatcccacc

SEQ ID NO: 29357 - DNA, 20 bp, Artificial Sequence
  Synthetic
gcctggtgggatgtcctgca

SEQ ID NO: 29358 - DNA, 20 bp, Artificial Sequence
  Synthetic
tgcctggtgggatgtcctgc

SEQ ID NO: 29359 - DNA, 20 bp, Artificial Sequence
  Synthetic
cgcagacaaaggtgcctggt

SEQ ID NO: 29360 - DNA, 20 bp, Artificial Sequence
  Synthetic
tcgcagacaaaggtgcctgg

SEQ ID NO: 29361 - DNA, 20 bp, Artificial Sequence
  Synthetic
cactcgcagacaaaggtgcc

SEQ ID NO: 29362 - DNA, 20 bp, Artificial Sequence
  Synthetic
actcactcactcgcagacaa

SEQ ID NO: 29363 - DNA, 20 bp, Artificial Sequence
  Synthetic
cgcaccctctgcaggtatgt

SEQ ID NO: 29364 - DNA, 20 bp, Artificial Sequence
  Synthetic
gcaccctctgcaggtatgtt

SEQ ID NO: 29365 - DNA, 20 bp, Artificial Sequence
  Synthetic
caccctctgcaggtatgttg

SEQ ID NO: 29366 - DNA, 20 bp, Artificial Sequence
  Synthetic
ctcagaagccgacgttcgag

SEQ ID NO: 29367 - DNA, 20 bp, Artificial Sequence
  Synthetic
agaatcttcctctcgaacgt

SEQ ID NO: 29368 - DNA, 20 bp, Artificial Sequence
  Synthetic
ccttattgtcgagatcaaag

SEQ ID NO: 29369 - DNA, 20 bp, Artificial Sequence
  Synthetic
cctctttgatctcgacaata

SEQ ID NO: 29370 - DNA, 20 bp, Artificial Sequence
  Synthetic
gcttctcgccctgcaggacg

SEQ ID NO: 29371 - DNA, 20 bp, Artificial Sequence
  Synthetic
tctcgccctgcaggacgggg

SEQ ID NO: 29372 - DNA, 20 bp, Artificial Sequence
  Synthetic
aggtttactgcatcgacgcg

SEQ ID NO: 29373 - DNA, 20 bp, Artificial Sequence
  Synthetic
tgcatcgacgcgcggttcta

SEQ ID NO: 29374 - DNA, 20 bp, Artificial Sequence
  Synthetic
gcatcgacgcgcggttctac

SEQ ID NO: 29375 - DNA, 20 bp, Artificial Sequence
  Synthetic
ggttctacgggaacgtcagc

SEQ ID NO: 29376 - DNA, 20 bp, Artificial Sequence
  Synthetic
cgcagtggtggttgatgaac

SEQ ID NO: 29377 - DNA, 20 bp, Artificial Sequence
  Synthetic
ccaggttgggctcgcagtgg

SEQ ID NO: 29378 - DNA, 20 bp, Artificial Sequence
  Synthetic
ccaccactgcgagcccaacc

SEQ ID NO: 29379 - DNA, 20 bp, Artificial Sequence
  Synthetic
gcaccaggttgggctcgcag

SEQ ID NO: 29380 - DNA, 20 bp, Artificial Sequence
  Synthetic
acgcgcacgggcaccaggtt

SEQ ID NO: 29381 - DNA, 20 bp, Artificial Sequence
  Synthetic
cacgcgcacgggcaccaggt

SEQ ID NO: 29382 - DNA, 20 bp, Artificial Sequence
  Synthetic
tgaacacgcgcacgggcacc

SEQ ID NO: 29383 - DNA, 20 bp, Artificial Sequence
  Synthetic
ggtgcccgtgcgcgtgttca

SEQ ID NO: 29384 - DNA, 20 bp, Artificial Sequence
  Synthetic
tgggccatgaacacgcgcac

SEQ ID NO: 29385 - DNA, 20 bp, Artificial Sequence
  Synthetic
gtgggccatgaacacgcgca

SEQ ID NO: 29386 - DNA, 20 bp, Artificial Sequence
  Synthetic
gcgcgtgttcatggcccacc

SEQ ID NO: 29387 - DNA, 20 bp, Artificial Sequence
  Synthetic
tcatggcccaccaggacctg

SEQ ID NO: 29388 - DNA, 20 bp, Artificial Sequence
  Synthetic
ggggaaccgcaggtcctggt

SEQ ID NO: 29389 - DNA, 20 bp, Artificial Sequence
  Synthetic
gggggaaccgcaggtcctgg

SEQ ID NO: 29390 - DNA, 20 bp, Artificial Sequence
  Synthetic
accaggacctgcggttcccc

SEQ ID NO: 29391 - DNA, 20 bp, Artificial Sequence
  Synthetic
tccgggggaaccgcaggtcc

SEQ ID NO: 29392 - DNA, 20 bp, Artificial Sequence
  Synthetic
aggcgatccgggggaaccgc

SEQ ID NO: 29393 - DNA, 20 bp, Artificial Sequence
  Synthetic
tgctgaagaaggcgatccgg

SEQ ID NO: 29394 - DNA, 20 bp, Artificial Sequence
  Synthetic
gtgctgaagaaggcgatccg

SEQ ID NO: 29395 - DNA, 20 bp, Artificial Sequence
  Synthetic
ggtgctgaagaaggcgatcc

SEQ ID NO: 29396 - DNA, 20 bp, Artificial Sequence
  Synthetic
gggtgctgaagaaggcgatc

SEQ ID NO: 29397 - DNA, 20 bp, Artificial Sequence
  Synthetic
gatcaggcgggtgctgaaga

SEQ ID NO: 29398 - DNA, 20 bp, Artificial Sequence
  Synthetic
cttcagcacccgcctgatcg

SEQ ID NO: 29399 - DNA, 20 bp, Artificial Sequence
  Synthetic
agcacccgcctgatcgaggc

SEQ ID NO: 29400 - DNA, 20 bp, Artificial Sequence
  Synthetic
ctcgccggcctcgatcaggc

SEQ ID NO: 29401 - DNA, 20 bp, Artificial Sequence
  Synthetic
gctcgccggcctcgatcagg

SEQ ID NO: 29402 - DNA, 20 bp, Artificial Sequence
  Synthetic
gctgctcgccggcctcgatc

SEQ ID NO: 29403 - DNA, 20 bp, Artificial Sequence
  Synthetic
atcgaggccggcgagcagct

SEQ ID NO: 29404 - DNA, 20 bp, Artificial Sequence
  Synthetic
tcgaggccggcgagcagctc

SEQ ID NO: 29405 - DNA, 20 bp, Artificial Sequence
  Synthetic
tgcgtacccgagctgctcgc

SEQ ID NO: 29406 - DNA, 20 bp, Artificial Sequence
  Synthetic
tccctccccaggtttgacta

SEQ ID NO: 29407 - DNA, 20 bp, Artificial Sequence
  Synthetic
gcgctctccatagtcaaacc

SEQ ID NO: 29408 - DNA, 20 bp, Artificial Sequence
  Synthetic
catggcagggacatcgctcg

SEQ ID NO: 29409 - DNA, 20 bp, Artificial Sequence
  Synthetic
cggcgttgacacaggggatg

SEQ ID NO: 29410 - DNA, 20 bp, Artificial Sequence
  Synthetic
acggcgttgacacaggggat

SEQ ID NO: 29411 - DNA, 20 bp, Artificial Sequence
  Synthetic
cacggcgttgacacagggga

SEQ ID NO: 29412 - DNA, 20 bp, Artificial Sequence
  Synthetic
catcccctgtgtcaacgccg

SEQ ID NO: 29413 - DNA, 20 bp, Artificial Sequence
  Synthetic
tgtccacggcgttgacacag

SEQ ID NO: 29414 - DNA, 20 bp, Artificial Sequence
  Synthetic
ctgtccacggcgttgacaca

SEQ ID NO: 29415 - DNA, 20 bp, Artificial Sequence
  Synthetic
gctgtccacggcgttgacac

SEQ ID NO: 29416 - DNA, 20 bp, Artificial Sequence
  Synthetic
ggggcatggctcgctgtcca

SEQ ID NO: 29417 - DNA, 20 bp, Artificial Sequence
  Synthetic
tacttgtagttgctggggca

SEQ ID NO: 29418 - DNA, 20 bp, Artificial Sequence
  Synthetic
agacgtacttgtagttgctg

SEQ ID NO: 29419 - DNA, 20 bp, Artificial Sequence
  Synthetic
gagacgtacttgtagttgct

SEQ ID NO: 29420 - DNA, 20 bp, Artificial Sequence
  Synthetic
agagacgtacttgtagttgc

SEQ ID NO: 29421 - DNA, 20 bp, Artificial Sequence
  Synthetic
atttctgtcgatgttcatgg

SEQ ID NO: 29422 - DNA, 20 bp, Artificial Sequence
  Synthetic
tatttctgtcgatgttcatg

SEQ ID NO: 29423 - DNA, 20 bp, Artificial Sequence
  Synthetic
atatttctgtcgatgttcat

SEQ ID NO: 29424 - DNA, 20 bp, Artificial Sequence
  Synthetic
gatatttctgtcgatgttca

SEQ ID NO: 29425 - DNA, 20 bp, Artificial Sequence
  Synthetic
cagaaatatcactcatctgc

SEQ ID NO: 29426 - DNA, 20 bp, Artificial Sequence
  Synthetic
tcctccagcaactgcatgtg

SEQ ID NO: 29427 - DNA, 20 bp, Artificial Sequence
  Synthetic
gccgcacatgcagttgctgg

SEQ ID NO: 29428 - DNA, 20 bp, Artificial Sequence
  Synthetic
ctggccgcacatgcagttgc

SEQ ID NO: 29429 - DNA, 20 bp, Artificial Sequence
  Synthetic
gccagctcagcatgcgctgc

SEQ ID NO: 29430 - DNA, 20 bp, Artificial Sequence
  Synthetic
accagcagcgcatgctgagc

SEQ ID NO: 29431 - DNA, 20 bp, Artificial Sequence
  Synthetic
catgcgctgctggtacgaca

SEQ ID NO: 29432 - DNA, 20 bp, Artificial Sequence
  Synthetic
tcatctgtccacaggatggc

SEQ ID NO: 29433 - DNA, 20 bp, Artificial Sequence
  Synthetic
tgttgaactctggcaggagc

SEQ ID NO: 29434 - DNA, 20 bp, Artificial Sequence
  Synthetic
gctcctgccagagttcaaca

SEQ ID NO: 29435 - DNA, 20 bp, Artificial Sequence
  Synthetic
ccgccatgttgaactctggc

SEQ ID NO: 29436 - DNA, 20 bp, Artificial Sequence
  Synthetic
cctgccagagttcaacatgg

SEQ ID NO: 29437 - DNA, 20 bp, Artificial Sequence
  Synthetic
ggctccgccatgttgaactc

SEQ ID NO: 29438 - DNA, 20 bp, Artificial Sequence
  Synthetic
ttgcattcgaagatcaaggg

SEQ ID NO: 29439 - DNA, 20 bp, Artificial Sequence
  Synthetic
tggttgcattcgaagatcaa

SEQ ID NO: 29440 - DNA, 20 bp, Artificial Sequence
  Synthetic
gtggttgcattcgaagatca

SEQ ID NO: 29441 - DNA, 20 bp, Artificial Sequence
  Synthetic
gcaaccacgcgtgctcctgc

SEQ ID NO: 29442 - DNA, 20 bp, Artificial Sequence
  Synthetic
accacgcgtgctcctgctgg

SEQ ID NO: 29443 - DNA, 20 bp, Artificial Sequence
  Synthetic
tcctccagcaggagcacgcg

SEQ ID NO: 29444 - DNA, 20 bp, Artificial Sequence
  Synthetic
atttcggcagttcctccagc

SEQ ID NO: 29445 - DNA, 20 bp, Artificial Sequence
  Synthetic
cattctgtacgacgcgattt

SEQ ID NO: 29446 - DNA, 20 bp, Artificial Sequence
  Synthetic
accgaacagccaagatgggc

SEQ ID NO: 29447 - DNA, 20 bp, Artificial Sequence
  Synthetic
ccgaacagccaagatgggct

SEQ ID NO: 29448 - DNA, 20 bp, Artificial Sequence
  Synthetic
cgaacagccaagatgggctg

SEQ ID NO: 29449 - DNA, 20 bp, Artificial Sequence
  Synthetic
gaacagccaagatgggctgg

SEQ ID NO: 29450 - DNA, 20 bp, Artificial Sequence
  Synthetic
aacagccaagatgggctggg

SEQ ID NO: 29451 - DNA, 20 bp, Artificial Sequence
  Synthetic
gtgggatggtctgcagggcg

SEQ ID NO: 29452 - DNA, 20 bp, Artificial Sequence
  Synthetic
cgccctgcagaccatcccac

SEQ ID NO: 29453 - DNA, 20 bp, Artificial Sequence
  Synthetic
gccctgcagaccatcccaca

SEQ ID NO: 29454 - DNA, 20 bp, Artificial Sequence
  Synthetic
cccctgtgggatggtctgca

SEQ ID NO: 29455 - DNA, 20 bp, Artificial Sequence
  Synthetic
ccctgcagaccatcccacag

SEQ ID NO: 29456 - DNA, 20 bp, Artificial Sequence
  Synthetic
tcccctgtgggatggtctgc

SEQ ID NO: 29457 - DNA, 20 bp, Artificial Sequence
  Synthetic
gatgaaggtcccctgtggga

SEQ ID NO: 29458 - DNA, 20 bp, Artificial Sequence
  Synthetic
cgcagatgaaggtcccctgt

SEQ ID NO: 29459 - DNA, 20 bp, Artificial Sequence
  Synthetic
tcgcagatgaaggtcccctg

SEQ ID NO: 29460 - DNA, 20 bp, Artificial Sequence
  Synthetic
ggtgacttactcgcagatga

SEQ ID NO: 29461 - DNA, 20 bp, Artificial Sequence
  Synthetic
ttcctgtcccacaggtatgt

SEQ ID NO: 29462 - DNA, 20 bp, Artificial Sequence
  Synthetic
tcctgtcccacaggtatgtc

SEQ ID NO: 29463 - DNA, 20 bp, Artificial Sequence
  Synthetic
cctgtcccacaggtatgtcg

SEQ ID NO: 29464 - DNA, 20 bp, Artificial Sequence
  Synthetic
ggagctgatctctgatgctg

SEQ ID NO: 29465 - DNA, 20 bp, Artificial Sequence
  Synthetic
tgctgaggctgatgtgagag

SEQ ID NO: 29466 - DNA, 20 bp, Artificial Sequence
  Synthetic
ccttgttgtctaagtcgaag

SEQ ID NO: 29467 - DNA, 20 bp, Artificial Sequence
  Synthetic
cctcttcgacttagacaaca

SEQ ID NO: 29468 - DNA, 20 bp, Artificial Sequence
  Synthetic
ccccctgccccaggatggag

SEQ ID NO: 29469 - DNA, 20 bp, Artificial Sequence
  Synthetic
tgcagtacacctctccatcc

SEQ ID NO: 29470 - DNA, 20 bp, Artificial Sequence
  Synthetic
tgcatagatgcccgttacta

SEQ ID NO: 29471 - DNA, 20 bp, Artificial Sequence
  Synthetic
gctgatgttgccatagtaac

SEQ ID NO: 29472 - DNA, 20 bp, Artificial Sequence
  Synthetic
ggctgatgttgccatagtaa

SEQ ID NO: 29473 - DNA, 20 bp, Artificial Sequence
  Synthetic
cacacaggtggttgatgaag

SEQ ID NO: 29474 - DNA, 20 bp, Artificial Sequence
  Synthetic
tgatgttggggtcacacagg

SEQ ID NO: 29475 - DNA, 20 bp, Artificial Sequence
  Synthetic
gaatgatgttggggtcacac

SEQ ID NO: 29476 - DNA, 20 bp, Artificial Sequence
  Synthetic
accccaacatcattcccgtc

SEQ ID NO: 29477 - DNA, 20 bp, Artificial Sequence
  Synthetic
cccggacgggaatgatgttg

SEQ ID NO: 29478 - DNA, 20 bp, Artificial Sequence
  Synthetic
ccccaacatcattcccgtcc

SEQ ID NO: 29479 - DNA, 20 bp, Artificial Sequence
  Synthetic
acccggacgggaatgatgtt

SEQ ID NO: 29480 - DNA, 20 bp, Artificial Sequence
  Synthetic
gacccggacgggaatgatgt

SEQ ID NO: 29481 - DNA, 20 bp, Artificial Sequence
  Synthetic
tgcagcatgaagacccggac

SEQ ID NO: 29482 - DNA, 20 bp, Artificial Sequence
  Synthetic
gtgcagcatgaagacccgga

SEQ ID NO: 29483 - DNA, 20 bp, Artificial Sequence
  Synthetic
cttggtgcagcatgaagacc

SEQ ID NO: 29484 - DNA, 20 bp, Artificial Sequence
  Synthetic
tgcgtggaaatcgcaggtct

SEQ ID NO: 29485 - DNA, 20 bp, Artificial Sequence
  Synthetic
aggcgatgcgtggaaatcgc

SEQ ID NO: 29486 - DNA, 20 bp, Artificial Sequence
  Synthetic
gaactgaagaaggcgatgcg

SEQ ID NO: 29487 - DNA, 20 bp, Artificial Sequence
  Synthetic
gatgtctcgggaactgaaga

SEQ ID NO: 29488 - DNA, 20 bp, Artificial Sequence
  Synthetic
tcttcagttcccgagacatc

SEQ ID NO: 29489 - DNA, 20 bp, Artificial Sequence
  Synthetic
agttcccgagacatccggac

SEQ ID NO: 29490 - DNA, 20 bp, Artificial Sequence
  Synthetic
gttcccgagacatccggact

SEQ ID NO: 29491 - DNA, 20 bp, Artificial Sequence
  Synthetic
ttcccgagacatccggactg

SEQ ID NO: 29492 - DNA, 20 bp, Artificial Sequence
  Synthetic
ctccccagtccggatgtctc

SEQ ID NO: 29493 - DNA, 20 bp, Artificial Sequence
  Synthetic
cctccccagtccggatgtct

SEQ ID NO: 29494 - DNA, 20 bp, Artificial Sequence
  Synthetic
ccgagacatccggactgggg

SEQ ID NO: 29495 - DNA, 20 bp, Artificial Sequence
  Synthetic
atccggactggggaggagct

SEQ ID NO: 29496 - DNA, 20 bp, Artificial Sequence
  Synthetic
tccggactggggaggagcta

SEQ ID NO: 29497 - DNA, 20 bp, Artificial Sequence
  Synthetic
accctagctcctccccagtc

SEQ ID NO: 29498 - DNA, 20 bp, Artificial Sequence
  Synthetic
tcctctgacaggtttgacta

SEQ ID NO: 29499 - DNA, 20 bp, Artificial Sequence
  Synthetic
tcccgtcttctgcagggacg

SEQ ID NO: 29500 - DNA, 20 bp, Artificial Sequence
  Synthetic
tcttctgcagggacgtggct

SEQ ID NO: 29501 - DNA, 20 bp, Artificial Sequence
  Synthetic
cttctgcagggacgtggctc

SEQ ID NO: 29502 - DNA, 20 bp, Artificial Sequence
  Synthetic
ttctgcagggacgtggctcg

SEQ ID NO: 29503 - DNA, 20 bp, Artificial Sequence
  Synthetic
gtgcccattccctgtgtcaa

SEQ ID NO: 29504 - DNA, 20 bp, Artificial Sequence
  Synthetic
acaccgttgacacagggaat

SEQ ID NO: 29505 - DNA, 20 bp, Artificial Sequence
  Synthetic
cacaccgttgacacagggaa

SEQ ID NO: 29506 - DNA, 20 bp, Artificial Sequence
  Synthetic
cattccctgtgtcaacggtg

SEQ ID NO: 29507 - DNA, 20 bp, Artificial Sequence
  Synthetic
ccatccacaccgttgacaca

SEQ ID NO: 29508 - DNA, 20 bp, Artificial Sequence
  Synthetic
ccctgtgtcaacggtgtgga

SEQ ID NO: 29509 - DNA, 20 bp, Artificial Sequence
  Synthetic
cccatccacaccgttgacac

SEQ ID NO: 29510 - DNA, 20 bp, Artificial Sequence
  Synthetic
cctgtgtcaacggtgtggat

SEQ ID NO: 29511 - DNA, 20 bp, Artificial Sequence
  Synthetic
ctgtgtcaacggtgtggatg

SEQ ID NO: 29512 - DNA, 20 bp, Artificial Sequence
  Synthetic
ggatggggagccctgccctg

SEQ ID NO: 29513 - DNA, 20 bp, Artificial Sequence
  Synthetic
tacttgtaatcctcagggca

SEQ ID NO: 29514 - DNA, 20 bp, Artificial Sequence
  Synthetic
gtacttgtaatcctcagggc

SEQ ID NO: 29515 - DNA, 20 bp, Artificial Sequence
  Synthetic
agatgtacttgtaatcctca

SEQ ID NO: 29516 - DNA, 20 bp, Artificial Sequence
  Synthetic
gagatgtacttgtaatcctc

SEQ ID NO: 29517 - DNA, 20 bp, Artificial Sequence
  Synthetic
gttgcgatcgatgttcatgg

SEQ ID NO: 29518 - DNA, 20 bp, Artificial Sequence
  Synthetic
gatgttgcgatcgatgttca

SEQ ID NO: 29519 - DNA, 20 bp, Artificial Sequence
  Synthetic
tcgcaacatcacccacctgc

SEQ ID NO: 29520 - DNA, 20 bp, Artificial Sequence
  Synthetic
ccccctactcacctgcaggt

SEQ ID NO: 29521 - DNA, 20 bp, Artificial Sequence
  Synthetic
gccccctactcacctgcagg

SEQ ID NO: 29522 - DNA, 20 bp, Artificial Sequence
  Synthetic
cgggccccctactcacctgc

SEQ ID NO: 29523 - DNA, 20 bp, Artificial Sequence
  Synthetic
gccccagcactgcacgtgtg

SEQ ID NO: 29524 - DNA, 20 bp, Artificial Sequence
  Synthetic
cgtccacacacgtgcagtgc

SEQ ID NO: 29525 - DNA, 20 bp, Artificial Sequence
  Synthetic
tctagctccaactgcctgtg

SEQ ID NO: 29526 - DNA, 20 bp, Artificial Sequence
  Synthetic
gagctggccgcacaggcagt

SEQ ID NO: 29527 - DNA, 20 bp, Artificial Sequence
  Synthetic
ggatgctgagctggccgcac

SEQ ID NO: 29528 - DNA, 20 bp, Artificial Sequence
  Synthetic
tgtgcggccagctcagcatc

SEQ ID NO: 29529 - DNA, 20 bp, Artificial Sequence
  Synthetic
gccagctcagcatccggtgc

SEQ ID NO: 29530 - DNA, 20 bp, Artificial Sequence
  Synthetic
accagcaccggatgctgagc

SEQ ID NO: 29531 - DNA, 20 bp, Artificial Sequence
  Synthetic
catccggtgctggtatgaca

SEQ ID NO: 29532 - DNA, 20 bp, Artificial Sequence
  Synthetic
gcaccttgtcataccagcac

SEQ ID NO: 29533 - DNA, 20 bp, Artificial Sequence
  Synthetic
ctaggatgggcgattgctcc

SEQ ID NO: 29534 - DNA, 20 bp, Artificial Sequence
  Synthetic
gctcaatcttgttaaattcc

SEQ ID NO: 29535 - DNA, 20 bp, Artificial Sequence
  Synthetic
ttacactcgaaaatcagcgg

SEQ ID NO: 29536 - DNA, 20 bp, Artificial Sequence
  Synthetic
tggttacactcgaaaatcag

SEQ ID NO: 29537 - DNA, 20 bp, Artificial Sequence
  Synthetic
gctgattttcgagtgtaacc

SEQ ID NO: 29538 - DNA, 20 bp, Artificial Sequence
  Synthetic
gtaaccaggcgtgctcatgc

SEQ ID NO: 29539 - DNA, 20 bp, Artificial Sequence
  Synthetic
ttctccagcatgagcacgcc

SEQ ID NO: 29540 - DNA, 20 bp, Artificial Sequence
  Synthetic
gctggagaaactgcaagaac

SEQ ID NO: 29541 - DNA, 20 bp, Artificial Sequence
  Synthetic
ctggagaaactgcaagaacc

SEQ ID NO: 29542 - DNA, 20 bp, Artificial Sequence
  Synthetic
ctgtgcacagtagaattatt

SEQ ID NO: 29543 - DNA, 20 bp, Artificial Sequence
  Synthetic
gaattatttggtcttgtgat

SEQ ID NO: 29544 - DNA, 20 bp, Artificial Sequence
  Synthetic
gtgaagaaatacttgctgtc

SEQ ID NO: 29545 - DNA, 20 bp, Artificial Sequence
  Synthetic
gacagcaagtatttcttcac

SEQ ID NO: 29546 - DNA, 20 bp, Artificial Sequence
  Synthetic
acagcaagtatttcttcact

SEQ ID NO: 29547 - DNA, 20 bp, Artificial Sequence
  Synthetic
cactgggagtcgagacaaaa

SEQ ID NO: 29548 - DNA, 20 bp, Artificial Sequence
  Synthetic
gtctgtattaggtggttgtc

SEQ ID NO: 29549 - DNA, 20 bp, Artificial Sequence
  Synthetic
tctgtattaggtggttgtct

SEQ ID NO: 29550 - DNA, 20 bp, Artificial Sequence
  Synthetic
ctgtattaggtggttgtctg

SEQ ID NO: 29551 - DNA, 20 bp, Artificial Sequence
  Synthetic
actccagagattgtcatttc

SEQ ID NO: 29552 - DNA, 20 bp, Artificial Sequence
  Synthetic
tgtcctgaaatgacaatctc

SEQ ID NO: 29553 - DNA, 20 bp, Artificial Sequence
  Synthetic
gtcatttcaggacactttga

SEQ ID NO: 29554 - DNA, 20 bp, Artificial Sequence
  Synthetic
atggtgtccaagacctagtc

SEQ ID NO: 29555 - DNA, 20 bp, Artificial Sequence
  Synthetic
tggtgtccaagacctagtct

SEQ ID NO: 29556 - DNA, 20 bp, Artificial Sequence
  Synthetic
ctggatcccagactaggtct

SEQ ID NO: 29557 - DNA, 20 bp, Artificial Sequence
  Synthetic
gacctagtctgggatccaga

SEQ ID NO: 29558 - DNA, 20 bp, Artificial Sequence
  Synthetic
ctccttctggatcccagact

SEQ ID NO: 29559 - DNA, 20 bp, Artificial Sequence
  Synthetic
gtgataataaattctccttc

SEQ ID NO: 29560 - DNA, 20 bp, Artificial Sequence
  Synthetic
ggagaatttattatcactgt

SEQ ID NO: 29561 - DNA, 20 bp, Artificial Sequence
  Synthetic
gaacactacatcttggaaac

SEQ ID NO: 29562 - DNA, 20 bp, Artificial Sequence
  Synthetic
tctgcgtgactgtcaaactg

SEQ ID NO: 29563 - DNA, 20 bp, Artificial Sequence
  Synthetic
cagtttgacagtcacgcaga

SEQ ID NO: 29564 - DNA, 20 bp, Artificial Sequence
  Synthetic
gaacttctcattaggtgaga

SEQ ID NO: 29565 - DNA, 20 bp, Artificial Sequence
  Synthetic
gctagtaagaacttctcatt

SEQ ID NO: 29566 - DNA, 20 bp, Artificial Sequence
  Synthetic
ctgtttccagagatcgaacc

SEQ ID NO: 29567 - DNA, 20 bp, Artificial Sequence
  Synthetic
caatgaccaggttcgatctc

SEQ ID NO: 29568 - DNA, 20 bp, Artificial Sequence
  Synthetic
gagatcgaacctggtcattg

SEQ ID NO: 29569 - DNA, 20 bp, Artificial Sequence
  Synthetic
ctgctttttccacaatgacc

SEQ ID NO: 29570 - DNA, 20 bp, Artificial Sequence
  Synthetic
cagaaagtgctttctctctg

SEQ ID NO: 29571 - DNA, 20 bp, Artificial Sequence
  Synthetic
gctttctctctgtggacatg

SEQ ID NO: 29572 - DNA, 20 bp, Artificial Sequence
  Synthetic
ctctctgtggacatgaggat

SEQ ID NO: 29573 - DNA, 20 bp, Artificial Sequence
  Synthetic
ggacatgaggattggattag

SEQ ID NO: 29574 - DNA, 20 bp, Artificial Sequence
  Synthetic
tgaggattggattagaggag

SEQ ID NO: 29575 - DNA, 20 bp, Artificial Sequence
  Synthetic
attggattagaggagtggaa

SEQ ID NO: 29576 - DNA, 20 bp, Artificial Sequence
  Synthetic
ttggattagaggagtggaat

SEQ ID NO: 29577 - DNA, 20 bp, Artificial Sequence
  Synthetic
ggagtggaatgggcagcctt

SEQ ID NO: 29578 - DNA, 20 bp, Artificial Sequence
  Synthetic
caaaatttcatactgaccaa

SEQ ID NO: 29579 - DNA, 20 bp, Artificial Sequence
  Synthetic
aatcttgtgaacagcttgct

SEQ ID NO: 29580 - DNA, 20 bp, Artificial Sequence
  Synthetic
aagattgcctgataagaata

SEQ ID NO: 29581 - DNA, 20 bp, Artificial Sequence
  Synthetic
acagcttccatattcttatc

SEQ ID NO: 29582 - DNA, 20 bp, Artificial Sequence
  Synthetic
gttgttgttaccaacttgaa

SEQ ID NO: 29583 - DNA, 20 bp, Artificial Sequence
  Synthetic
ggcggtgtgaccattcaagt

SEQ ID NO: 29584 - DNA, 20 bp, Artificial Sequence
  Synthetic
ctgtatgcaattgactcggg

SEQ ID NO: 29585 - DNA, 20 bp, Artificial Sequence
  Synthetic
ccactgtatgcaattgactc

SEQ ID NO: 29586 - DNA, 20 bp, Artificial Sequence
  Synthetic
cccgagtcaattgcatacag

SEQ ID NO: 29587 - DNA, 20 bp, Artificial Sequence
  Synthetic
tccactgtatgcaattgact

SEQ ID NO: 29588 - DNA, 20 bp, Artificial Sequence
  Synthetic
catacagtggatttgtaaac

SEQ ID NO: 29589 - DNA, 20 bp, Artificial Sequence
  Synthetic
cagtggatttgtaaacagga

SEQ ID NO: 29590 - DNA, 20 bp, Artificial Sequence
  Synthetic
agaaactaattcagtagaag

SEQ ID NO: 29591 - DNA, 20 bp, Artificial Sequence
  Synthetic
cagaaactaattcagtagaa

SEQ ID NO: 29592 - DNA, 20 bp, Artificial Sequence
  Synthetic
ccagaaactaattcagtaga

SEQ ID NO: 29593 - DNA, 20 bp, Artificial Sequence
  Synthetic
ccttctactgaattagtttc

SEQ ID NO: 29594 - DNA, 20 bp, Artificial Sequence
  Synthetic
tctactgaattagtttctgg

SEQ ID NO: 29595 - DNA, 20 bp, Artificial Sequence
  Synthetic
ctgataatcaagtgattcac

SEQ ID NO: 29596 - DNA, 20 bp, Artificial Sequence
  Synthetic
tgataatcaagtgattcact

SEQ ID NO: 29597 - DNA, 20 bp, Artificial Sequence
  Synthetic
acttacagtttttgaacttc

SEQ ID NO: 29598 - DNA, 20 bp, Artificial Sequence
  Synthetic
tctttttaaattttagatat

SEQ ID NO: 29599 - DNA, 20 bp, Artificial Sequence
  Synthetic
ttaaattttagatatgggca

SEQ ID NO: 29600 - DNA, 20 bp, Artificial Sequence
  Synthetic
tctgcttgcctcagcttgta

SEQ ID NO: 29601 - DNA, 20 bp, Artificial Sequence
  Synthetic
cttccctaccttacaagctg

SEQ ID NO: 29602 - DNA, 20 bp, Artificial Sequence
  Synthetic
ttaaaagcagtgcatcttca

SEQ ID NO: 29603 - DNA, 20 bp, Artificial Sequence
  Synthetic
gtgcatcttcaaggccatga

SEQ ID NO: 29604 - DNA, 20 bp, Artificial Sequence
  Synthetic
ccgcataaacaggtccttca

SEQ ID NO: 29605 - DNA, 20 bp, Artificial Sequence
  Synthetic
ccatgaaggacctgtttatg

SEQ ID NO: 29606 - DNA, 20 bp, Artificial Sequence
  Synthetic
acagcatgcaccgcataaac

SEQ ID NO: 29607 - DNA, 20 bp, Artificial Sequence
  Synthetic
cggtgcatgctgtttaccag

SEQ ID NO: 29608 - DNA, 20 bp, Artificial Sequence
  Synthetic
tgcatgctgtttaccagagg

SEQ ID NO: 29609 - DNA, 20 bp, Artificial Sequence
  Synthetic
caggatctgatgtcctcctc

SEQ ID NO: 29610 - DNA, 20 bp, Artificial Sequence
  Synthetic
acgatcagtgtacataatgc

SEQ ID NO: 29611 - DNA, 20 bp, Artificial Sequence
  Synthetic
cagattctgctgttcgactc

SEQ ID NO: 29612 - DNA, 20 bp, Artificial Sequence
  Synthetic
actctggagacagtgctagc

SEQ ID NO: 29613 - DNA, 20 bp, Artificial Sequence
  Synthetic
tgctagccggtcatgaaaac

SEQ ID NO: 29614 - DNA, 20 bp, Artificial Sequence
  Synthetic
gctagccggtcatgaaaact

SEQ ID NO: 29615 - DNA, 20 bp, Artificial Sequence
  Synthetic
atttacccagttttcatgac

SEQ ID NO: 29616 - DNA, 20 bp, Artificial Sequence
  Synthetic
actgggtaaatgcagttcac

SEQ ID NO: 29617 - DNA, 20 bp, Artificial Sequence
  Synthetic
tggcaacctgtgttttacaa

SEQ ID NO: 29618 - DNA, 20 bp, Artificial Sequence
  Synthetic
aacctgtgttttacaaaggt

SEQ ID NO: 29619 - DNA, 20 bp, Artificial Sequence
  Synthetic
ttcctacctttgtaaaacac

SEQ ID NO: 29620 - DNA, 20 bp, Artificial Sequence
  Synthetic
ataatctcactggctgctgt

SEQ ID NO: 29621 - DNA, 20 bp, Artificial Sequence
  Synthetic
gaagcagataataatctcac

SEQ ID NO: 29622 - DNA, 20 bp, Artificial Sequence
  Synthetic
gagattattatctgcttcca

SEQ ID NO: 29623 - DNA, 20 bp, Artificial Sequence
  Synthetic
gagaatcatggttttatcca

SEQ ID NO: 29624 - DNA, 20 bp, Artificial Sequence
  Synthetic
tggataaaaccatgattctc

SEQ ID NO: 29625 - DNA, 20 bp, Artificial Sequence
  Synthetic
ggataaaaccatgattctct

SEQ ID NO: 29626 - DNA, 20 bp, Artificial Sequence
  Synthetic
atctggagcccagagaatca

SEQ ID NO: 29627 - DNA, 20 bp, Artificial Sequence
  Synthetic
caatcaaaatgtcttgatct

SEQ ID NO: 29628 - DNA, 20 bp, Artificial Sequence
  Synthetic
ccaatcaaaatgtcttgatc

SEQ ID NO: 29629 - DNA, 20 bp, Artificial Sequence
  Synthetic
ccagatcaagacattttgat

SEQ ID NO: 29630 - DNA, 20 bp, Artificial Sequence
  Synthetic
aacacttgcgtaatcgtagg

SEQ ID NO: 29631 - DNA, 20 bp, Artificial Sequence
  Synthetic
ctgaacacttgcgtaatcgt

SEQ ID NO: 29632 - DNA, 20 bp, Artificial Sequence
  Synthetic
agaaactttccgtttcgaat

SEQ ID NO: 29633 - DNA, 20 bp, Artificial Sequence
  Synthetic
gaaactttccgtttcgaatt

SEQ ID NO: 29634 - DNA, 20 bp, Artificial Sequence
  Synthetic
actttccgtttcgaattggg

SEQ ID NO: 29635 - DNA, 20 bp, Artificial Sequence
  Synthetic
ttccgtttcgaattgggtgg

SEQ ID NO: 29636 - DNA, 20 bp, Artificial Sequence
  Synthetic
cacctccacccaattcgaaa

SEQ ID NO: 29637 - DNA, 20 bp, Artificial Sequence
  Synthetic
cacatgcagctctcgtacta

SEQ ID NO: 29638 - DNA, 20 bp, Artificial Sequence
  Synthetic
gtacgagagctgcatgtgta

SEQ ID NO: 29639 - DNA, 20 bp, Artificial Sequence
  Synthetic
tacgagagctgcatgtgtat

SEQ ID NO: 29640 - DNA, 20 bp, Artificial Sequence
  Synthetic
gctgcatgtgtatgggagtg

SEQ ID NO: 29641 - DNA, 20 bp, Artificial Sequence
  Synthetic
gtgtggtccctgtgagcagc

SEQ ID NO: 29642 - DNA, 20 bp, Artificial Sequence
  Synthetic
tgtggtccctgtgagcagcc

SEQ ID NO: 29643 - DNA, 20 bp, Artificial Sequence
  Synthetic
taggatcccggctgctcaca

SEQ ID NO: 29644 - DNA, 20 bp, Artificial Sequence
  Synthetic
gtaggatcccggctgctcac

SEQ ID NO: 29645 - DNA, 20 bp, Artificial Sequence
  Synthetic
gctgaaatttagtaggatcc

SEQ ID NO: 29646 - DNA, 20 bp, Artificial Sequence
  Synthetic
tcctactaaatttcagcatc

SEQ ID NO: 29647 - DNA, 20 bp, Artificial Sequence
  Synthetic
acctgatgctgaaatttagt

SEQ ID NO: 29648 - DNA, 20 bp, Artificial Sequence
  Synthetic
tgttgctccgtgcagggatt

SEQ ID NO: 29649 - DNA, 20 bp, Artificial Sequence
  Synthetic
gggatttggcatgctgctga

SEQ ID NO: 29650 - DNA, 20 bp, Artificial Sequence
  Synthetic
atttggcatgctgctgatgg

SEQ ID NO: 29651 - DNA, 20 bp, Artificial Sequence
  Synthetic
agaatagctagagaagaaca

SEQ ID NO: 29652 - DNA, 20 bp, Artificial Sequence
  Synthetic
gaatagctagagaagaacat

SEQ ID NO: 29653 - DNA, 20 bp, Artificial Sequence
  Synthetic
gctagagaagaacatgggtc

SEQ ID NO: 29654 - DNA, 20 bp, Artificial Sequence
  Synthetic
ctagagaagaacatgggtct

SEQ ID NO: 29655 - DNA, 20 bp, Artificial Sequence
  Synthetic
gggaaaatcgctgtgatatc

SEQ ID NO: 29656 - DNA, 20 bp, Artificial Sequence
  Synthetic
ttcgatttttctgcaggggt

SEQ ID NO: 29657 - DNA, 20 bp, Artificial Sequence
  Synthetic
tttctgcaggggtcggcacc

SEQ ID NO: 29658 - DNA, 20 bp, Artificial Sequence
  Synthetic
gatctttctataataattcc

SEQ ID NO: 29659 - DNA, 20 bp, Artificial Sequence
  Synthetic
aggaattattatagaaagat

SEQ ID NO: 29660 - DNA, 20 bp, Artificial Sequence
  Synthetic
gaagggattctggatcctga

SEQ ID NO: 29661 - DNA, 20 bp, Artificial Sequence
  Synthetic
tgacgaaagggaagggattc

SEQ ID NO: 29662 - DNA, 20 bp, Artificial Sequence
  Synthetic
cacaggttgacgaaagggaa

SEQ ID NO: 29663 - DNA, 20 bp, Artificial Sequence
  Synthetic
ccacaggttgacgaaaggga

SEQ ID NO: 29664 - DNA, 20 bp, Artificial Sequence
  Synthetic
ccttccctttcgtcaacctg

SEQ ID NO: 29665 - DNA, 20 bp, Artificial Sequence
  Synthetic
gggtccacaggttgacgaaa

SEQ ID NO: 29666 - DNA, 20 bp, Artificial Sequence
  Synthetic
agggtccacaggttgacgaa

SEQ ID NO: 29667 - DNA, 20 bp, Artificial Sequence
  Synthetic
cctaaaagctgagggtccac

SEQ ID NO: 29668 - DNA, 20 bp, Artificial Sequence
  Synthetic
cctgtggaccctcagctttt

SEQ ID NO: 29669 - DNA, 20 bp, Artificial Sequence
  Synthetic
cagggattcctaaaagctga

SEQ ID NO: 29670 - DNA, 20 bp, Artificial Sequence
  Synthetic
acagggattcctaaaagctg

SEQ ID NO: 29671 - DNA, 20 bp, Artificial Sequence
  Synthetic
tgatattgtgaagagcccca

SEQ ID NO: 29672 - DNA, 20 bp, Artificial Sequence
  Synthetic
taatggtagaaagatccatg

SEQ ID NO: 29673 - DNA, 20 bp, Artificial Sequence
  Synthetic
ttaatggtagaaagatccat

SEQ ID NO: 29674 - DNA, 20 bp, Artificial Sequence
  Synthetic
cttaatggtagaaagatcca

SEQ ID NO: 29675 - DNA, 20 bp, Artificial Sequence
  Synthetic
tggatctttctaccattaag

SEQ ID NO: 29676 - DNA, 20 bp, Artificial Sequence
  Synthetic
agtgtctaacttcctcttaa

SEQ ID NO: 29677 - DNA, 20 bp, Artificial Sequence
  Synthetic
attaagaggaagttagacac

SEQ ID NO: 29678 - DNA, 20 bp, Artificial Sequence
  Synthetic
gttagacactggacagtatc

SEQ ID NO: 29679 - DNA, 20 bp, Artificial Sequence
  Synthetic
ctggacagtatcaggagccc

SEQ ID NO: 29680 - DNA, 20 bp, Artificial Sequence
  Synthetic
atatcatcgacatactgcca

SEQ ID NO: 29681 - DNA, 20 bp, Artificial Sequence
  Synthetic
aatatcatcgacatactgcc

SEQ ID NO: 29682 - DNA, 20 bp, Artificial Sequence
  Synthetic
ggcagtatgtcgatgatatt

SEQ ID NO: 29683 - DNA, 20 bp, Artificial Sequence
  Synthetic
ggcttatgttcaataatgcc

SEQ ID NO: 29684 - DNA, 20 bp, Artificial Sequence
  Synthetic
ataatgcctggttatataac

SEQ ID NO: 29685 - DNA, 20 bp, Artificial Sequence
  Synthetic
tgttttccggttatataacc

SEQ ID NO: 29686 - DNA, 20 bp, Artificial Sequence
  Synthetic
tatataaccggaaaacatca

SEQ ID NO: 29687 - DNA, 20 bp, Artificial Sequence
  Synthetic
atataaccggaaaacatcac

SEQ ID NO: 29688 - DNA, 20 bp, Artificial Sequence
  Synthetic
tgtatacccgtgatgttttc

SEQ ID NO: 29689 - DNA, 20 bp, Artificial Sequence
  Synthetic
ctcagagattatcagaagat

SEQ ID NO: 29690 - DNA, 20 bp, Artificial Sequence
  Synthetic
agattatcagaagattggcc

SEQ ID NO: 29691 - DNA, 20 bp, Artificial Sequence
  Synthetic
atcagaagattggcctggac

SEQ ID NO: 29692 - DNA, 20 bp, Artificial Sequence
  Synthetic
gaagattggcctggactggc

SEQ ID NO: 29693 - DNA, 20 bp, Artificial Sequence
  Synthetic
aaagtttggccagccagtcc

SEQ ID NO: 29694 - DNA, 20 bp, Artificial Sequence
  Synthetic
actggctggccaaactttac

SEQ ID NO: 29695 - DNA, 20 bp, Artificial Sequence
  Synthetic
gagattcttcctgtaaagtt

SEQ ID NO: 29696 - DNA, 20 bp, Artificial Sequence
  Synthetic
ctttacaggaagaatctcaa

SEQ ID NO: 29697 - DNA, 20 bp, Artificial Sequence
  Synthetic
gaagaatctcaatggcatat

SEQ ID NO: 29698 - DNA, 20 bp, Artificial Sequence
  Synthetic
ggcatattggcagatgaagc

SEQ ID NO: 29699 - DNA, 20 bp, Artificial Sequence
  Synthetic
gcatattggcagatgaagct

SEQ ID NO: 29700 - DNA, 20 bp, Artificial Sequence
  Synthetic
attggcagatgaagctgggc

SEQ ID NO: 29701 - DNA, 20 bp, Artificial Sequence
  Synthetic
ttggcagatgaagctgggct

SEQ ID NO: 29702 - DNA, 20 bp, Artificial Sequence
  Synthetic
gcccacctagcttgtaacga

SEQ ID NO: 29703 - DNA, 20 bp, Artificial Sequence
  Synthetic
accttcgttacaagctaggt

SEQ ID NO: 29704 - DNA, 20 bp, Artificial Sequence
  Synthetic
taccttcgttacaagctagg

SEQ ID NO: 29705 - DNA, 20 bp, Artificial Sequence
  Synthetic
tcttaccttcgttacaagct

SEQ ID NO: 29706 - DNA, 20 bp, Artificial Sequence
  Synthetic
ttttttgctttgtaggtaat

SEQ ID NO: 29707 - DNA, 20 bp, Artificial Sequence
  Synthetic
tttttgctttgtaggtaatt

SEQ ID NO: 29708 - DNA, 20 bp, Artificial Sequence
  Synthetic
ttttgctttgtaggtaattg

SEQ ID NO: 29709 - DNA, 20 bp, Artificial Sequence
  Synthetic
ttctcacaacaacaagatgg

SEQ ID NO: 29710 - DNA, 20 bp, Artificial Sequence
  Synthetic
cttctcacaacaacaagatg

SEQ ID NO: 29711 - DNA, 20 bp, Artificial Sequence
  Synthetic
acttctcacaacaacaagat

SEQ ID NO: 29712 - DNA, 20 bp, Artificial Sequence
  Synthetic
aacttctcacaacaacaaga

SEQ ID NO: 29713 - DNA, 20 bp, Artificial Sequence
  Synthetic
gaagttgtaacatactcaag

SEQ ID NO: 29714 - DNA, 20 bp, Artificial Sequence
  Synthetic
aagttgtaacatactcaagt

SEQ ID NO: 29715 - DNA, 20 bp, Artificial Sequence
  Synthetic
gggagcttgaattgaaacgt

SEQ ID NO: 29716 - DNA, 20 bp, Artificial Sequence
  Synthetic
gaattgaaacgttggtgtcc

SEQ ID NO: 29717 - DNA, 20 bp, Artificial Sequence
  Synthetic
tatgagaggattttgagtcc

SEQ ID NO: 29718 - DNA, 20 bp, Artificial Sequence
  Synthetic
atatgagaggattttgagtc

SEQ ID NO: 29719 - DNA, 20 bp, Artificial Sequence
  Synthetic
ctcaaaatcctctcatatat

SEQ ID NO: 29720 - DNA, 20 bp, Artificial Sequence
  Synthetic
tgtggctgccaatatatgag

SEQ ID NO: 29721 - DNA, 20 bp, Artificial Sequence
  Synthetic
tctttgctttgagttctctg

SEQ ID NO: 29722 - DNA, 20 bp, Artificial Sequence
  Synthetic
agaactcaaagcaaagagac

SEQ ID NO: 29723 - DNA, 20 bp, Artificial Sequence
  Synthetic
cctctctgtgctgcaggagt

SEQ ID NO: 29724 - DNA, 20 bp, Artificial Sequence
  Synthetic
gacgtggaagctgttgggtt

SEQ ID NO: 29725 - DNA, 20 bp, Artificial Sequence
  Synthetic
atgcagacgtggaagctgtt

SEQ ID NO: 29726 - DNA, 20 bp, Artificial Sequence
  Synthetic
gatgcagacgtggaagctgt

SEQ ID NO: 29727 - DNA, 20 bp, Artificial Sequence
  Synthetic
tgtaggacgtgatgcagacg

SEQ ID NO: 29728 - DNA, 20 bp, Artificial Sequence
  Synthetic
cgtcctacactcagttcttc

SEQ ID NO: 29729 - DNA, 20 bp, Artificial Sequence
  Synthetic
gtcctacactcagttcttcc

SEQ ID NO: 29730 - DNA, 20 bp, Artificial Sequence
  Synthetic
tcctacactcagttcttccg

SEQ ID NO: 29731 - DNA, 20 bp, Artificial Sequence
  Synthetic
gccccggaagaactgagtgt

SEQ ID NO: 29732 - DNA, 20 bp, Artificial Sequence
  Synthetic
gtgtgaaggcggtgaggccc

SEQ ID NO: 29733 - DNA, 20 bp, Artificial Sequence
  Synthetic
gcactcgtgtgaaggcggtg

SEQ ID NO: 29734 - DNA, 20 bp, Artificial Sequence
  Synthetic
ccagcgcactcgtgtgaagg

SEQ ID NO: 29735 - DNA, 20 bp, Artificial Sequence
  Synthetic
ccgccttcacacgagtgcgc

SEQ ID NO: 29736 - DNA, 20 bp, Artificial Sequence
  Synthetic
cttccagcgcactcgtgtga

SEQ ID NO: 29737 - DNA, 20 bp, Artificial Sequence
  Synthetic
acgagtgcgctggaagtgcc

SEQ ID NO: 29738 - DNA, 20 bp, Artificial Sequence
  Synthetic
gctgcatctcatcaatgacc

SEQ ID NO: 29739 - DNA, 20 bp, Artificial Sequence
  Synthetic
tgatgagatgcagcgcgtga

SEQ ID NO: 29740 - DNA, 20 bp, Artificial Sequence
  Synthetic
gatgagatgcagcgcgtgaa

SEQ ID NO: 29741 - DNA, 20 bp, Artificial Sequence
  Synthetic
gcgtgaagggcatgaccgag

SEQ ID NO: 29742 - DNA, 20 bp, Artificial Sequence
  Synthetic
agggcatgaccgagaggcac

SEQ ID NO: 29743 - DNA, 20 bp, Artificial Sequence
  Synthetic
gggcatgaccgagaggcact

SEQ ID NO: 29744 - DNA, 20 bp, Artificial Sequence
  Synthetic
gaccgagaggcactgggaag

SEQ ID NO: 29745 - DNA, 20 bp, Artificial Sequence
  Synthetic
aaccgcttcccagtgcctct

SEQ ID NO: 29746 - DNA, 20 bp, Artificial Sequence
  Synthetic
aagcggttttcaccctgcag

SEQ ID NO: 29747 - DNA, 20 bp, Artificial Sequence
  Synthetic
gtaacacacagacctctgca

SEQ ID NO: 29748 - DNA, 20 bp, Artificial Sequence
  Synthetic
cgtaacacacagacctctgc

SEQ ID NO: 29749 - DNA, 20 bp, Artificial Sequence
  Synthetic
cgatcagaagcagacgttgt

SEQ ID NO: 29750 - DNA, 20 bp, Artificial Sequence
  Synthetic
gccgctgcacaataccttcc

SEQ ID NO: 29751 - DNA, 20 bp, Artificial Sequence
  Synthetic
tccaggaaggtattgtgcag

SEQ ID NO: 29752 - DNA, 20 bp, Artificial Sequence
  Synthetic
acaataccttcctggagctc

SEQ ID NO: 29753 - DNA, 20 bp, Artificial Sequence
  Synthetic
catggtccagagctccagga

SEQ ID NO: 29754 - DNA, 20 bp, Artificial Sequence
  Synthetic
cttcctggagctctggacca

SEQ ID NO: 29755 - DNA, 20 bp, Artificial Sequence
  Synthetic
gcaccatggtccagagctcc

SEQ ID NO: 29756 - DNA, 20 bp, Artificial Sequence
  Synthetic
ctggaccatggtgcacttcc

SEQ ID NO: 29757 - DNA, 20 bp, Artificial Sequence
  Synthetic
tgggaccaggaagtgcacca

SEQ ID NO: 29758 - DNA, 20 bp, Artificial Sequence
  Synthetic
atggtgcacttcctggtccc

SEQ ID NO: 29759 - DNA, 20 bp, Artificial Sequence
  Synthetic
tggtgcacttcctggtccca

SEQ ID NO: 29760 - DNA, 20 bp, Artificial Sequence
  Synthetic
tcctggtcccagggatctcc

SEQ ID NO: 29761 - DNA, 20 bp, Artificial Sequence
  Synthetic
gcctggagatccctgggacc

SEQ ID NO: 29762 - DNA, 20 bp, Artificial Sequence
  Synthetic
ggtagggcctggagatccct

SEQ ID NO: 29763 - DNA, 20 bp, Artificial Sequence
  Synthetic
aggtagggcctggagatccc

SEQ ID NO: 29764 - DNA, 20 bp, Artificial Sequence
  Synthetic
aggggagctcaggtagggcc

SEQ ID NO: 29765 - DNA, 20 bp, Artificial Sequence
  Synthetic
ctcagaggggagctcaggta

SEQ ID NO: 29766 - DNA, 20 bp, Artificial Sequence
  Synthetic
cctcagaggggagctcaggt

SEQ ID NO: 29767 - DNA, 20 bp, Artificial Sequence
  Synthetic
cctacctgagctcccctctg

SEQ ID NO: 29768 - DNA, 20 bp, Artificial Sequence
  Synthetic
ctacctgagctcccctctga

SEQ ID NO: 29769 - DNA, 20 bp, Artificial Sequence
  Synthetic
gggccctcagaggggagctc

SEQ ID NO: 29770 - DNA, 20 bp, Artificial Sequence
  Synthetic
ttcactgggggccctcagag

SEQ ID NO: 29771 - DNA, 20 bp, Artificial Sequence
  Synthetic
cttcactgggggccctcaga

SEQ ID NO: 29772 - DNA, 20 bp, Artificial Sequence
  Synthetic
tcttcactgggggccctcag

SEQ ID NO: 29773 - DNA, 20 bp, Artificial Sequence
  Synthetic
ggcccccagtgaagagagcc

SEQ ID NO: 29774 - DNA, 20 bp, Artificial Sequence
  Synthetic
atcctggctctcttcactgg

SEQ ID NO: 29775 - DNA, 20 bp, Artificial Sequence
  Synthetic
aatcctggctctcttcactg

SEQ ID NO: 29776 - DNA, 20 bp, Artificial Sequence
  Synthetic
taatcctggctctcttcact

SEQ ID NO: 29777 - DNA, 20 bp, Artificial Sequence
  Synthetic
gtaatcctggctctcttcac

SEQ ID NO: 29778 - DNA, 20 bp, Artificial Sequence
  Synthetic
ccactttatggtagtaatcc

SEQ ID NO: 29779 - DNA, 20 bp, Artificial Sequence
  Synthetic
ccaggattactaccataaag

SEQ ID NO: 29780 - DNA, 20 bp, Artificial Sequence
  Synthetic
actaccataaagtggtcata

SEQ ID NO: 29781 - DNA, 20 bp, Artificial Sequence
  Synthetic
gtaaccttatgaccacttta

SEQ ID NO: 29782 - DNA, 20 bp, Artificial Sequence
  Synthetic
aagtggtcataaggttacac

SEQ ID NO: 29783 - DNA, 20 bp, Artificial Sequence
  Synthetic
agtggtcataaggttacaca

SEQ ID NO: 29784 - DNA, 20 bp, Artificial Sequence
  Synthetic
gtcataaggttacacagggt

SEQ ID NO: 29785 - DNA, 20 bp, Artificial Sequence
  Synthetic
tgacacagccatttattttg

SEQ ID NO: 29786 - DNA, 20 bp, Artificial Sequence
  Synthetic
ttagttctcctcaaaataaa

SEQ ID NO: 29787 - DNA, 20 bp, Artificial Sequence
  Synthetic
gaggagaactaagagagatg

SEQ ID NO: 29788 - DNA, 20 bp, Artificial Sequence
  Synthetic
aggctttttgtcggttagaa

SEQ ID NO: 29789 - DNA, 20 bp, Artificial Sequence
  Synthetic
cctcgtataaggctttttgt

SEQ ID NO: 29790 - DNA, 20 bp, Artificial Sequence
  Synthetic
ccgacaaaaagccttatacg

SEQ ID NO: 29791 - DNA, 20 bp, Artificial Sequence
  Synthetic
caggataacgtcctcgtata

SEQ ID NO: 29792 - DNA, 20 bp, Artificial Sequence
  Synthetic
gaggacgttatcctgcaacc

SEQ ID NO: 29793 - DNA, 20 bp, Artificial Sequence
  Synthetic
aggacgttatcctgcaacct

SEQ ID NO: 29794 - DNA, 20 bp, Artificial Sequence
  Synthetic
cccacactcacccaggttgc

SEQ ID NO: 29795 - DNA, 20 bp, Artificial Sequence
  Synthetic
tttctccacgggcagcactc

SEQ ID NO: 29796 - DNA, 20 bp, Artificial Sequence
  Synthetic
ctccacgggcagcactcagg

SEQ ID NO: 29797 - DNA, 20 bp, Artificial Sequence
  Synthetic
actcaggaggccttgaagag

SEQ ID NO: 29798 - DNA, 20 bp, Artificial Sequence
  Synthetic
ctcaggaggccttgaagagc

SEQ ID NO: 29799 - DNA, 20 bp, Artificial Sequence
  Synthetic
gacaaagtgcccgctcttca

SEQ ID NO: 29800 - DNA, 20 bp, Artificial Sequence
  Synthetic
acgtcctgagcatccttgtg

SEQ ID NO: 29801 - DNA, 20 bp, Artificial Sequence
  Synthetic
gcagccgcacaaggatgctc

SEQ ID NO: 29802 - DNA, 20 bp, Artificial Sequence
  Synthetic
agatgcgctgcagccgcaca

SEQ ID NO: 29803 - DNA, 20 bp, Artificial Sequence
  Synthetic
cagcgcatctgcaaccaccc

SEQ ID NO: 29804 - DNA, 20 bp, Artificial Sequence
  Synthetic
agcgcatctgcaaccaccct

SEQ ID NO: 29805 - DNA, 20 bp, Artificial Sequence
  Synthetic
ggggctcgacgagcccaggg

SEQ ID NO: 29806 - DNA, 20 bp, Artificial Sequence
  Synthetic
gccggggctcgacgagccca

SEQ ID NO: 29807 - DNA, 20 bp, Artificial Sequence
  Synthetic
tgccggggctcgacgagccc

SEQ ID NO: 29808 - DNA, 20 bp, Artificial Sequence
  Synthetic
agatgagtaaactgtcgttt

SEQ ID NO: 29809 - DNA, 20 bp, Artificial Sequence
  Synthetic
gatgagtaaactgtcgtttc

SEQ ID NO: 29810 - DNA, 20 bp, Artificial Sequence
  Synthetic
gtaaactgtcgtttcgggcg

SEQ ID NO: 29811 - DNA, 20 bp, Artificial Sequence
  Synthetic
taaactgtcgtttcgggcgc

SEQ ID NO: 29812 - DNA, 20 bp, Artificial Sequence
  Synthetic
agacgcctcgaagccgctgc

SEQ ID NO: 29813 - DNA, 20 bp, Artificial Sequence
  Synthetic
gaaaaccggcagcggcttcg

SEQ ID NO: 29814 - DNA, 20 bp, Artificial Sequence
  Synthetic
tcacagcggaaaaccggcag

SEQ ID NO: 29815 - DNA, 20 bp, Artificial Sequence
  Synthetic
gctgccggttttccgctgtg

SEQ ID NO: 29816 - DNA, 20 bp, Artificial Sequence
  Synthetic
agatcctcacagcggaaaac

SEQ ID NO: 29817 - DNA, 20 bp, Artificial Sequence
  Synthetic
ggtcgggcagatcctcacag

SEQ ID NO: 29818 - DNA, 20 bp, Artificial Sequence
  Synthetic
gaggcgtattcgtgcaggtc

SEQ ID NO: 29819 - DNA, 20 bp, Artificial Sequence
  Synthetic
cgaggcgtattcgtgcaggt

SEQ ID NO: 29820 - DNA, 20 bp, Artificial Sequence
  Synthetic
ttatcgaggcgtattcgtgc

SEQ ID NO: 29821 - DNA, 20 bp, Artificial Sequence
  Synthetic
acgaatacgcctcgataaac

SEQ ID NO: 29822 - DNA, 20 bp, Artificial Sequence
  Synthetic
cgaatacgcctcgataaaca

SEQ ID NO: 29823 - DNA, 20 bp, Artificial Sequence
  Synthetic
cggcacggccctgtttatcg

SEQ ID NO: 29824 - DNA, 20 bp, Artificial Sequence
  Synthetic
gccgtgccgcagatgcccac

SEQ ID NO: 29825 - DNA, 20 bp, Artificial Sequence
  Synthetic
tccggtgggcatctgcggca

SEQ ID NO: 29826 - DNA, 20 bp, Artificial Sequence
  Synthetic
gccgcagatgcccaccggaa

SEQ ID NO: 29827 - DNA, 20 bp, Artificial Sequence
  Synthetic
tccattccggtgggcatctg

SEQ ID NO: 29828 - DNA, 20 bp, Artificial Sequence
  Synthetic
gatgcccaccggaatggaga

SEQ ID NO: 29829 - DNA, 20 bp, Artificial Sequence
  Synthetic
tcttccttctccattccggt

SEQ ID NO: 29830 - DNA, 20 bp, Artificial Sequence
  Synthetic
ctcttccttctccattccgg

SEQ ID NO: 29831 - DNA, 20 bp, Artificial Sequence
  Synthetic
caccggaatggagaaggaag

SEQ ID NO: 29832 - DNA, 20 bp, Artificial Sequence
  Synthetic
ctcctcttccttctccattc

SEQ ID NO: 29833 - DNA, 20 bp, Artificial Sequence
  Synthetic
aatggagaaggaagaggagt

SEQ ID NO: 29834 - DNA, 20 bp, Artificial Sequence
  Synthetic
tttaggaacatcatcttcag

SEQ ID NO: 29835 - DNA, 20 bp, Artificial Sequence
  Synthetic
ttaggaacatcatcttcagc

SEQ ID NO: 29836 - DNA, 20 bp, Artificial Sequence
  Synthetic
gcgggctatttcagcacagc

SEQ ID NO: 29837 - DNA, 20 bp, Artificial Sequence
  Synthetic
atttcagcacagcaggtgta

SEQ ID NO: 29838 - DNA, 20 bp, Artificial Sequence
  Synthetic
agcaggtgtatggcgagaag

SEQ ID NO: 29839 - DNA, 20 bp, Artificial Sequence
  Synthetic
gcaggtgtatggcgagaaga

SEQ ID NO: 29840 - DNA, 20 bp, Artificial Sequence
  Synthetic
tggcgagaagagggataata

SEQ ID NO: 29841 - DNA, 20 bp, Artificial Sequence
  Synthetic
gagggataatatggttatac

SEQ ID NO: 29842 - DNA, 20 bp, Artificial Sequence
  Synthetic
tatggttataccggtcccag

SEQ ID NO: 29843 - DNA, 20 bp, Artificial Sequence
  Synthetic
ttactttctgcctctgggac

SEQ ID NO: 29844 - DNA, 20 bp, Artificial Sequence
  Synthetic
caatattactttctgcctct

SEQ ID NO: 29845 - DNA, 20 bp, Artificial Sequence
  Synthetic
gcaatattactttctgcctc

SEQ ID NO: 29846 - DNA, 20 bp, Artificial Sequence
  Synthetic
tactatgagtctatatatcc

SEQ ID NO: 29847 - DNA, 20 bp, Artificial Sequence
  Synthetic
actatgagtctatatatcct

SEQ ID NO: 29848 - DNA, 20 bp, Artificial Sequence
  Synthetic
ctatgagtctatatatcctg

SEQ ID NO: 29849 - DNA, 20 bp, Artificial Sequence
  Synthetic
tttggcatcttaaattcccc

SEQ ID NO: 29850 - DNA, 20 bp, Artificial Sequence
  Synthetic
tgtatgtgaatgagctgctt

SEQ ID NO: 29851 - DNA, 20 bp, Artificial Sequence
  Synthetic
ccttctgtcagcttttagtt

SEQ ID NO: 29852 - DNA, 20 bp, Artificial Sequence
  Synthetic
tgaacagcctgattatgatt

SEQ ID NO: 29853 - DNA, 20 bp, Artificial Sequence
  Synthetic
tcagaatccaaatcataatc

SEQ ID NO: 29854 - DNA, 20 bp, Artificial Sequence
  Synthetic
gaataaactgaaaaagaaaa

SEQ ID NO: 29855 - DNA, 20 bp, Artificial Sequence
  Synthetic
catctgcccattgcaatttg

SEQ ID NO: 29856 - DNA, 20 bp, Artificial Sequence
  Synthetic
tcatctcctcaaattgcaat

SEQ ID NO: 29857 - DNA, 20 bp, Artificial Sequence
  Synthetic
atcatctcctcaaattgcaa

SEQ ID NO: 29858 - DNA, 20 bp, Artificial Sequence
  Synthetic
atgattgaccgcctagaaaa

SEQ ID NO: 29859 - DNA, 20 bp, Artificial Sequence
  Synthetic
gaccactgcctttttctagg

SEQ ID NO: 29860 - DNA, 20 bp, Artificial Sequence
  Synthetic
gctgaccactgcctttttct

SEQ ID NO: 29861 - DNA, 20 bp, Artificial Sequence
  Synthetic
ttgatgttgctggtattgtt

SEQ ID NO: 29862 - DNA, 20 bp, Artificial Sequence
  Synthetic
ccagttgctgttgatgttgc

SEQ ID NO: 29863 - DNA, 20 bp, Artificial Sequence
  Synthetic
ccagcaacatcaacagcaac

SEQ ID NO: 29864 - DNA, 20 bp, Artificial Sequence
  Synthetic
ttcctccaccaacacatcac

SEQ ID NO: 29865 - DNA, 20 bp, Artificial Sequence
  Synthetic
cacctgtgatgtgttggtgg

SEQ ID NO: 29866 - DNA, 20 bp, Artificial Sequence
  Synthetic
cctcacctgtgatgtgttgg

SEQ ID NO: 29867 - DNA, 20 bp, Artificial Sequence
  Synthetic
atccctcacctgtgatgtgt

SEQ ID NO: 29868 - DNA, 20 bp, Artificial Sequence
  Synthetic
gggttttgtttctaagactt

SEQ ID NO: 29869 - DNA, 20 bp, Artificial Sequence
  Synthetic
acagtttgctgcttctgctt

SEQ ID NO: 29870 - DNA, 20 bp, Artificial Sequence
  Synthetic
ggtgacatcagaacaactga

SEQ ID NO: 29871 - DNA, 20 bp, Artificial Sequence
  Synthetic
gtgacatcagaacaactgat

SEQ ID NO: 29872 - DNA, 20 bp, Artificial Sequence
  Synthetic
actgatgggattcaagatga

SEQ ID NO: 29873 - DNA, 20 bp, Artificial Sequence
  Synthetic
attcaagatgaaggatgatg

SEQ ID NO: 29874 - DNA, 20 bp, Artificial Sequence
  Synthetic
atgaaggatgatgtggtgct

SEQ ID NO: 29875 - DNA, 20 bp, Artificial Sequence
  Synthetic
gatgatgtggtgcttggaat

SEQ ID NO: 29876 - DNA, 20 bp, Artificial Sequence
  Synthetic
atgatgtggtgcttggaatc

SEQ ID NO: 29877 - DNA, 20 bp, Artificial Sequence
  Synthetic
tgatgtggtgcttggaatcg

SEQ ID NO: 29878 - DNA, 20 bp, Artificial Sequence
  Synthetic
gtgcttggaatcggggtgaa

SEQ ID NO: 29879 - DNA, 20 bp, Artificial Sequence
  Synthetic
aatggcgtccttccagcctc

SEQ ID NO: 29880 - DNA, 20 bp, Artificial Sequence
  Synthetic
tattcttacctgaggctgga

SEQ ID NO: 29881 - DNA, 20 bp, Artificial Sequence
  Synthetic
tctttattcttacctgaggc

SEQ ID NO: 29882 - DNA, 20 bp, Artificial Sequence
  Synthetic
aatgtctttattcttacctg

SEQ ID NO: 29883 - DNA, 20 bp, Artificial Sequence
  Synthetic
tttctctctaggagtataca

SEQ ID NO: 29884 - DNA, 20 bp, Artificial Sequence
  Synthetic
ttctctctaggagtatacaa

SEQ ID NO: 29885 - DNA, 20 bp, Artificial Sequence
  Synthetic
ctgttggtgtagtactactg

SEQ ID NO: 29886 - DNA, 20 bp, Artificial Sequence
  Synthetic
cttgtatgtacaagtgctgt

SEQ ID NO: 29887 - DNA, 20 bp, Artificial Sequence
  Synthetic
tgtacatacaagtccatcaa

SEQ ID NO: 29888 - DNA, 20 bp, Artificial Sequence
  Synthetic
catacaagtccatcaacggc

SEQ ID NO: 29889 - DNA, 20 bp, Artificial Sequence
  Synthetic
aaagctgaacctgccgttga

SEQ ID NO: 29890 - DNA, 20 bp, Artificial Sequence
  Synthetic
gaagtctgtgtaatatttga

SEQ ID NO: 29891 - DNA, 20 bp, Artificial Sequence
  Synthetic
ttgatgactcagtgcactgt

SEQ ID NO: 29892 - DNA, 20 bp, Artificial Sequence
  Synthetic
cttgatgactcagtgcactg

SEQ ID NO: 29893 - DNA, 20 bp, Artificial Sequence
  Synthetic
tgccaattctgcaacaactc

SEQ ID NO: 29894 - DNA, 20 bp, Artificial Sequence
  Synthetic
aacctgagttgttgcagaat

SEQ ID NO: 29895 - DNA, 20 bp, Artificial Sequence
  Synthetic
gcaacaactcaggttctgat

SEQ ID NO: 29896 - DNA, 20 bp, Artificial Sequence
  Synthetic
caacaactcaggttctgatt

SEQ ID NO: 29897 - DNA, 20 bp, Artificial Sequence
  Synthetic
tttacagtggcaactgatga

SEQ ID NO: 29898 - DNA, 20 bp, Artificial Sequence
  Synthetic
tggggcaatagagtttacag

SEQ ID NO: 29899 - DNA, 20 bp, Artificial Sequence
  Synthetic
tatatgtcgtgcatttattg

SEQ ID NO: 29900 - DNA, 20 bp, Artificial Sequence
  Synthetic
gtatatgtcgtgcatttatt

SEQ ID NO: 29901 - DNA, 20 bp, Artificial Sequence
  Synthetic
ggtatatgtcgtgcatttat

SEQ ID NO: 29902 - DNA, 20 bp, Artificial Sequence
  Synthetic
taaatgcacgacatatacct

SEQ ID NO: 29903 - DNA, 20 bp, Artificial Sequence
  Synthetic
ggaacagcacttaaagtcct

SEQ ID NO: 29904 - DNA, 20 bp, Artificial Sequence
  Synthetic
tccatcatctgccttaaagc

SEQ ID NO: 29905 - DNA, 20 bp, Artificial Sequence
  Synthetic
gccagctttaaggcagatga

SEQ ID NO: 29906 - DNA, 20 bp, Artificial Sequence
  Synthetic
tgctgcagcggccagcttta

SEQ ID NO: 29907 - DNA, 20 bp, Artificial Sequence
  Synthetic
aacttgacagtttgctgcag

SEQ ID NO: 29908 - DNA, 20 bp, Artificial Sequence
  Synthetic
agcaaactgtcaagtttcca

SEQ ID NO: 29909 - DNA, 20 bp, Artificial Sequence
  Synthetic
agaggatgaagatgggacct

SEQ ID NO: 29910 - DNA, 20 bp, Artificial Sequence
  Synthetic
aatctacagaggatgaagat

SEQ ID NO: 29911 - DNA, 20 bp, Artificial Sequence
  Synthetic
gaatctacagaggatgaaga

SEQ ID NO: 29912 - DNA, 20 bp, Artificial Sequence
  Synthetic
ccttggaactgaatctacag

SEQ ID NO: 29913 - DNA, 20 bp, Artificial Sequence
  Synthetic
cctctgtagattcagttcca

SEQ ID NO: 29914 - DNA, 20 bp, Artificial Sequence
  Synthetic
tctgctatgttgttcagtgc

SEQ ID NO: 29915 - DNA, 20 bp, Artificial Sequence
  Synthetic
agcagacaacacagtagcga

SEQ ID NO: 29916 - DNA, 20 bp, Artificial Sequence
  Synthetic
agacaacacagtagcgatgg

SEQ ID NO: 29917 - DNA, 20 bp, Artificial Sequence
  Synthetic
gtaaactctccttccgagcg

SEQ ID NO: 29918 - DNA, 20 bp, Artificial Sequence
  Synthetic
taaactctccttccgagcgc

SEQ ID NO: 29919 - DNA, 20 bp, Artificial Sequence
  Synthetic
ctccttccgagcgcgggcgc

SEQ ID NO: 29920 - DNA, 20 bp, Artificial Sequence
  Synthetic
gtccagcgcccgcgctcgga

SEQ ID NO: 29921 - DNA, 20 bp, Artificial Sequence
  Synthetic
cggcgtccagcgcccgcgct

SEQ ID NO: 29922 - DNA, 20 bp, Artificial Sequence
  Synthetic
gtagataggcagcggcttgg

SEQ ID NO: 29923 - DNA, 20 bp, Artificial Sequence
  Synthetic
gcggtagataggcagcggct

SEQ ID NO: 29924 - DNA, 20 bp, Artificial Sequence
  Synthetic
aagccgctgcctatctaccg

SEQ ID NO: 29925 - DNA, 20 bp, Artificial Sequence
  Synthetic
ttgccgcggtagataggcag

SEQ ID NO: 29926 - DNA, 20 bp, Artificial Sequence
  Synthetic
gctgcctatctaccgcggca

SEQ ID NO: 29927 - DNA, 20 bp, Artificial Sequence
  Synthetic
atgtccttgccgcggtagat

SEQ ID NO: 29928 - DNA, 20 bp, Artificial Sequence
  Synthetic
gatcaggcatgtccttgccg

SEQ ID NO: 29929 - DNA, 20 bp, Artificial Sequence
  Synthetic
gagacgcagtcgttgagatc

SEQ ID NO: 29930 - DNA, 20 bp, Artificial Sequence
  Synthetic
acgactgcgtctccatcaac

SEQ ID NO: 29931 - DNA, 20 bp, Artificial Sequence
  Synthetic
cgactgcgtctccatcaacc

SEQ ID NO: 29932 - DNA, 20 bp, Artificial Sequence
  Synthetic
ctggggcacggcccggttga

SEQ ID NO: 29933 - DNA, 20 bp, Artificial Sequence
  Synthetic
tgggcatctggggcacggcc

SEQ ID NO: 29934 - DNA, 20 bp, Artificial Sequence
  Synthetic
gccgtgccccagatgcccac

SEQ ID NO: 29935 - DNA, 20 bp, Artificial Sequence
  Synthetic
cccggtgggcatctggggca

SEQ ID NO: 29936 - DNA, 20 bp, Artificial Sequence
  Synthetic
ccgtgccccagatgcccacc

SEQ ID NO: 29937 - DNA, 20 bp, Artificial Sequence
  Synthetic
gccccagatgcccaccggga

SEQ ID NO: 29938 - DNA, 20 bp, Artificial Sequence
  Synthetic
tccatcccggtgggcatctg

SEQ ID NO: 29939 - DNA, 20 bp, Artificial Sequence
  Synthetic
ctccatcccggtgggcatct

SEQ ID NO: 29940 - DNA, 20 bp, Artificial Sequence
  Synthetic
tctccatcccggtgggcatc

SEQ ID NO: 29941 - DNA, 20 bp, Artificial Sequence
  Synthetic
gatgcccaccgggatggaga

SEQ ID NO: 29942 - DNA, 20 bp, Artificial Sequence
  Synthetic
gcccaccgggatggagaagg

SEQ ID NO: 29943 - DNA, 20 bp, Artificial Sequence
  Synthetic
tcctccttctccatcccggt

SEQ ID NO: 29944 - DNA, 20 bp, Artificial Sequence
  Synthetic
ctcctccttctccatcccgg

SEQ ID NO: 29945 - DNA, 20 bp, Artificial Sequence
  Synthetic
caccgggatggagaaggagg

SEQ ID NO: 29946 - DNA, 20 bp, Artificial Sequence
  Synthetic
ttcctcctccttctccatcc

SEQ ID NO: 29947 - DNA, 20 bp, Artificial Sequence
  Synthetic
gatggagaaggaggaggaat

SEQ ID NO: 29948 - DNA, 20 bp, Artificial Sequence
  Synthetic
gagaaggaggaggaatcggt

SEQ ID NO: 29949 - DNA, 20 bp, Artificial Sequence
  Synthetic
ctcgctgtaaatgatgttcc

SEQ ID NO: 29950 - DNA, 20 bp, Artificial Sequence
  Synthetic
tagagaaaaaaaagagagta

SEQ ID NO: 29951 - DNA, 20 bp, Artificial Sequence
  Synthetic
tatggtcattcctgttcctg

SEQ ID NO: 29952 - DNA, 20 bp, Artificial Sequence
  Synthetic
ttgctctctgcctcaggaac

SEQ ID NO: 29953 - DNA, 20 bp, Artificial Sequence
  Synthetic
ttgacgttgctctctgcctc

SEQ ID NO: 29954 - DNA, 20 bp, Artificial Sequence
  Synthetic
tattacaatcgcttgtacaa

SEQ ID NO: 29955 - DNA, 20 bp, Artificial Sequence
  Synthetic
tgaatatgaatgaactgttt

SEQ ID NO: 29956 - DNA, 20 bp, Artificial Sequence
  Synthetic
cgagcaaccagattatgata

SEQ ID NO: 29957 - DNA, 20 bp, Artificial Sequence
  Synthetic
tctgaatccatatcataatc

SEQ ID NO: 29958 - DNA, 20 bp, Artificial Sequence
  Synthetic
aaatagacttaacagaaaga

SEQ ID NO: 29959 - DNA, 20 bp, Artificial Sequence
  Synthetic
atcataatttcaaattgcaa

SEQ ID NO: 29960 - DNA, 20 bp, Artificial Sequence
  Synthetic
agcagttagttcagatgcaa

SEQ ID NO: 29961 - DNA, 20 bp, Artificial Sequence
  Synthetic
ttgctgtttctgctgaagct

SEQ ID NO: 29962 - DNA, 20 bp, Artificial Sequence
  Synthetic
attgctgtttctgctgaagc

SEQ ID NO: 29963 - DNA, 20 bp, Artificial Sequence
  Synthetic
ttttggatgtgtctgttgcg

SEQ ID NO: 29964 - DNA, 20 bp, Artificial Sequence
  Synthetic
acagacacatccaaaagcac

SEQ ID NO: 29965 - DNA, 20 bp, Artificial Sequence
  Synthetic
gagcagtttacctgtgcttt

SEQ ID NO: 29966 - DNA, 20 bp, Artificial Sequence
  Synthetic
tgttttagacatacagtcag

SEQ ID NO: 29967 - DNA, 20 bp, Artificial Sequence
  Synthetic
agatgcagcaaagtgggcgc

SEQ ID NO: 29968 - DNA, 20 bp, Artificial Sequence
  Synthetic
cactgcagatgcagcaaagt

SEQ ID NO: 29969 - DNA, 20 bp, Artificial Sequence
  Synthetic
ccactgcagatgcagcaaag

SEQ ID NO: 29970 - DNA, 20 bp, Artificial Sequence
  Synthetic
ccactttgctgcatctgcag

SEQ ID NO: 29971 - DNA, 20 bp, Artificial Sequence
  Synthetic
acctgttccaagtcgcagtg

SEQ ID NO: 29972 - DNA, 20 bp, Artificial Sequence
  Synthetic
acctcactgcgacttggaac

SEQ ID NO: 29973 - DNA, 20 bp, Artificial Sequence
  Synthetic
ttggctacctcactgcgact

SEQ ID NO: 29974 - DNA, 20 bp, Artificial Sequence
  Synthetic
aagtcgcagtgaggtagcca

SEQ ID NO: 29975 - DNA, 20 bp, Artificial Sequence
  Synthetic
gtagccaaggaacagaacac

SEQ ID NO: 29976 - DNA, 20 bp, Artificial Sequence
  Synthetic
gtggccagtgttctgttcct

SEQ ID NO: 29977 - DNA, 20 bp, Artificial Sequence
  Synthetic
actggccacaacaacataaa

SEQ ID NO: 29978 - DNA, 20 bp, Artificial Sequence
  Synthetic
caacaccgtttatgttgttg

SEQ ID NO: 29979 - DNA, 20 bp, Artificial Sequence
  Synthetic
aacggtgttgtccagccttc

SEQ ID NO: 29980 - DNA, 20 bp, Artificial Sequence
  Synthetic
ccccagctgtacctgaaggc

SEQ ID NO: 29981 - DNA, 20 bp, Artificial Sequence
  Synthetic
gaaaccccagctgtacctga

SEQ ID NO: 29982 - DNA, 20 bp, Artificial Sequence
  Synthetic
ggtggagtataatgttttag

SEQ ID NO: 29983 - DNA, 20 bp, Artificial Sequence
  Synthetic
aacattatactccaccaata

SEQ ID NO: 29984 - DNA, 20 bp, Artificial Sequence
  Synthetic
ggatgataaagccatattgg

SEQ ID NO: 29985 - DNA, 20 bp, Artificial Sequence
  Synthetic
gctggatgataaagccatat

SEQ ID NO: 29986 - DNA, 20 bp, Artificial Sequence
  Synthetic
atggctttatcatccagccc

SEQ ID NO: 29987 - DNA, 20 bp, Artificial Sequence
  Synthetic
tggctttatcatccagccca

SEQ ID NO: 29988 - DNA, 20 bp, Artificial Sequence
  Synthetic
tacagctgaaatccctgggc

SEQ ID NO: 29989 - DNA, 20 bp, Artificial Sequence
  Synthetic
gctgtacagctgaaatccct

SEQ ID NO: 29990 - DNA, 20 bp, Artificial Sequence
  Synthetic
agctgtacagctgaaatccc

SEQ ID NO: 29991 - DNA, 20 bp, Artificial Sequence
  Synthetic
tttcagctgtacagcttgta

SEQ ID NO: 29992 - DNA, 20 bp, Artificial Sequence
  Synthetic
gtacagcttgtaaggacagt

SEQ ID NO: 29993 - DNA, 20 bp, Artificial Sequence
  Synthetic
ttaagtggtttgtagtggtg

SEQ ID NO: 29994 - DNA, 20 bp, Artificial Sequence
  Synthetic
tgggattaagtggtttgtag

SEQ ID NO: 29995 - DNA, 20 bp, Artificial Sequence
  Synthetic
tgcacaatgctgggattaag

SEQ ID NO: 29996 - DNA, 20 bp, Artificial Sequence
  Synthetic
gactgcttgtgcacaatgct

SEQ ID NO: 29997 - DNA, 20 bp, Artificial Sequence
  Synthetic
ggactgcttgtgcacaatgc

SEQ ID NO: 29998 - DNA, 20 bp, Artificial Sequence
  Synthetic
ttgttcatgggaagtgtctg

SEQ ID NO: 29999 - DNA, 20 bp, Artificial Sequence
  Synthetic
gtcaggcaggaattgttcat

SEQ ID NO: 30000 - DNA, 20 bp, Artificial Sequence
  Synthetic
tgtcaggcaggaattgttca

SEQ ID NO: 30001 - DNA, 20 bp, Artificial Sequence
  Synthetic
gtgcactgcatttgtcaggc

SEQ ID NO: 30002 - DNA, 20 bp, Artificial Sequence
  Synthetic
tgaggtgcactgcatttgtc

SEQ ID NO: 30003 - DNA, 20 bp, Artificial Sequence
  Synthetic
aaacaacactgacattattg

SEQ ID NO: 30004 - DNA, 20 bp, Artificial Sequence
  Synthetic
gtattgatatgcacattgac

SEQ ID NO: 30005 - DNA, 20 bp, Artificial Sequence
  Synthetic
tcaatgtgcatatcaataca

SEQ ID NO: 30006 - DNA, 20 bp, Artificial Sequence
  Synthetic
agttttaaggctgttggcga

SEQ ID NO: 30007 - DNA, 20 bp, Artificial Sequence
  Synthetic
gtggcaagttttaaggctgt

SEQ ID NO: 30008 - DNA, 20 bp, Artificial Sequence
  Synthetic
agcaactgtggcaagtttta

SEQ ID NO: 30009 - DNA, 20 bp, Artificial Sequence
  Synthetic
tgccacagttgctgccagta

SEQ ID NO: 30010 - DNA, 20 bp, Artificial Sequence
  Synthetic
gtccatactggcagcaactg

SEQ ID NO: 30011 - DNA, 20 bp, Artificial Sequence
  Synthetic
ctttggcactctgtccatac

SEQ ID NO: 30012 - DNA, 20 bp, Artificial Sequence
  Synthetic
cagtatggacagagtgccaa

SEQ ID NO: 30013 - DNA, 20 bp, Artificial Sequence
  Synthetic
gcactgctgggagtaacctt

SEQ ID NO: 30014 - DNA, 20 bp, Artificial Sequence
  Synthetic
atgctgctgatggcactgct

SEQ ID NO: 30015 - DNA, 20 bp, Artificial Sequence
  Synthetic
tatgctgctgatggcactgc

SEQ ID NO: 30016 - DNA, 20 bp, Artificial Sequence
  Synthetic
gtgccatcagcagcatagca

SEQ ID NO: 30017 - DNA, 20 bp, Artificial Sequence
  Synthetic
acaccttgctatgctgctga

SEQ ID NO: 30018 - DNA, 20 bp, Artificial Sequence
  Synthetic
gaaccacgaaccagaaagat

SEQ ID NO: 30019 - DNA, 20 bp, Artificial Sequence
  Synthetic
aaccacgaaccagaaagatt

SEQ ID NO: 30020 - DNA, 20 bp, Artificial Sequence
  Synthetic
agcccaatctttctggttcg

SEQ ID NO: 30021 - DNA, 20 bp, Artificial Sequence
  Synthetic
ccatttaagcccaatctttc

SEQ ID NO: 30022 - DNA, 20 bp, Artificial Sequence
  Synthetic
ccagaaagattgggcttaaa

SEQ ID NO: 30023 - DNA, 20 bp, Artificial Sequence
  Synthetic
agcagagacaacagtagcta

SEQ ID NO: 30024 - DNA, 20 bp, Artificial Sequence
  Synthetic
ccccctctgatgtggccgga

SEQ ID NO: 30025 - DNA, 20 bp, Artificial Sequence
  Synthetic
cccctctgatgtggccggat

SEQ ID NO: 30026 - DNA, 20 bp, Artificial Sequence
  Synthetic
ccctctgatgtggccggatg

SEQ ID NO: 30027 - DNA, 20 bp, Artificial Sequence
  Synthetic
ctttatgaaggtgccccatc

SEQ ID NO: 30028 - DNA, 20 bp, Artificial Sequence
  Synthetic
cggatggggcaccttcataa

SEQ ID NO: 30029 - DNA, 20 bp, Artificial Sequence
  Synthetic
ctgcacagactcctttatga

SEQ ID NO: 30030 - DNA, 20 bp, Artificial Sequence
  Synthetic
gaattcatttctgaatactg

SEQ ID NO: 30031 - DNA, 20 bp, Artificial Sequence
  Synthetic
catttctgaatactgtggtg

SEQ ID NO: 30032 - DNA, 20 bp, Artificial Sequence
  Synthetic
atctctctagctcatctctc

SEQ ID NO: 30033 - DNA, 20 bp, Artificial Sequence
  Synthetic
ctagctcatctctcaggatg

SEQ ID NO: 30034 - DNA, 20 bp, Artificial Sequence
  Synthetic
caggatgaggctgatcgacg

SEQ ID NO: 30035 - DNA, 20 bp, Artificial Sequence
  Synthetic
tgaggctgatcgacgcggaa

SEQ ID NO: 30036 - DNA, 20 bp, Artificial Sequence
  Synthetic
attgaggttgaagaggaagc

SEQ ID NO: 30037 - DNA, 20 bp, Artificial Sequence
  Synthetic
ttcctcttcaacctcaataa

SEQ ID NO: 30038 - DNA, 20 bp, Artificial Sequence
  Synthetic
taccattattgaggttgaag

SEQ ID NO: 30039 - DNA, 20 bp, Artificial Sequence
  Synthetic
gtgacttcataccattattg

SEQ ID NO: 30040 - DNA, 20 bp, Artificial Sequence
  Synthetic
actttatacagattttgtag

SEQ ID NO: 30041 - DNA, 20 bp, Artificial Sequence
  Synthetic
attttgtagtggatgctact

SEQ ID NO: 30042 - DNA, 20 bp, Artificial Sequence
  Synthetic
gtagtggatgctactcggaa

SEQ ID NO: 30043 - DNA, 20 bp, Artificial Sequence
  Synthetic
aatcccaactgttatgccaa

SEQ ID NO: 30044 - DNA, 20 bp, Artificial Sequence
  Synthetic
tcacctttggcataacagtt

SEQ ID NO: 30045 - DNA, 20 bp, Artificial Sequence
  Synthetic
ctcacctttggcataacagt

SEQ ID NO: 30046 - DNA, 20 bp, Artificial Sequence
  Synthetic
aggttactgggactcacctt

SEQ ID NO: 30047 - DNA, 20 bp, Artificial Sequence
  Synthetic
tatcctgcttgcagtggtca

SEQ ID NO: 30048 - DNA, 20 bp, Artificial Sequence
  Synthetic
cttgcagtggtcatggtgaa

SEQ ID NO: 30049 - DNA, 20 bp, Artificial Sequence
  Synthetic
tcatggtgaatggagaccat

SEQ ID NO: 30050 - DNA, 20 bp, Artificial Sequence
  Synthetic
gtgaatggagaccatcggat

SEQ ID NO: 30051 - DNA, 20 bp, Artificial Sequence
  Synthetic
tgaatggagaccatcggatt

SEQ ID NO: 30052 - DNA, 20 bp, Artificial Sequence
  Synthetic
tggcaaagatcccaatccga

SEQ ID NO: 30053 - DNA, 20 bp, Artificial Sequence
  Synthetic
ggattgggatctttgccaag

SEQ ID NO: 30054 - DNA, 20 bp, Artificial Sequence
  Synthetic
gattgggatctttgccaaga

SEQ ID NO: 30055 - DNA, 20 bp, Artificial Sequence
  Synthetic
gccaagagggcaattcaagc

SEQ ID NO: 30056 - DNA, 20 bp, Artificial Sequence
  Synthetic
gccagcttgaattgccctct

SEQ ID NO: 30057 - DNA, 20 bp, Artificial Sequence
  Synthetic
aagagctcttctttgattac

SEQ ID NO: 30058 - DNA, 20 bp, Artificial Sequence
  Synthetic
caccatctgacgtggcaggc

SEQ ID NO: 30059 - DNA, 20 bp, Artificial Sequence
  Synthetic
accatctgacgtggcaggct

SEQ ID NO: 30060 - DNA, 20 bp, Artificial Sequence
  Synthetic
ccatctgacgtggcaggctg

SEQ ID NO: 30061 - DNA, 20 bp, Artificial Sequence
  Synthetic
catctgacgtggcaggctgg

SEQ ID NO: 30062 - DNA, 20 bp, Artificial Sequence
  Synthetic
atgaattcatttttctgcac

SEQ ID NO: 30063 - DNA, 20 bp, Artificial Sequence
  Synthetic
gaattcatctcagaatactg

SEQ ID NO: 30064 - DNA, 20 bp, Artificial Sequence
  Synthetic
catctcagaatactgtggag

SEQ ID NO: 30065 - DNA, 20 bp, Artificial Sequence
  Synthetic
caagatgaagctgacagaag

SEQ ID NO: 30066 - DNA, 20 bp, Artificial Sequence
  Synthetic
aagatgaagctgacagaaga

SEQ ID NO: 30067 - DNA, 20 bp, Artificial Sequence
  Synthetic
tttctgttcaacttgaacaa

SEQ ID NO: 30068 - DNA, 20 bp, Artificial Sequence
  Synthetic
ttttttctttttagattttg

SEQ ID NO: 30069 - DNA, 20 bp, Artificial Sequence
  Synthetic
tttctttttagattttgtgg

SEQ ID NO: 30070 - DNA, 20 bp, Artificial Sequence
  Synthetic
tgtggtggatgcaacccgca

SEQ ID NO: 30071 - DNA, 20 bp, Artificial Sequence
  Synthetic
gtggtggatgcaacccgcaa

SEQ ID NO: 30072 - DNA, 20 bp, Artificial Sequence
  Synthetic
acgaattttgttacccttgc

SEQ ID NO: 30073 - DNA, 20 bp, Artificial Sequence
  Synthetic
aacgaattttgttacccttg

SEQ ID NO: 30074 - DNA, 20 bp, Artificial Sequence
  Synthetic
aattcgttttgcaaatcatt

SEQ ID NO: 30075 - DNA, 20 bp, Artificial Sequence
  Synthetic
aatccaaactgctatgcaaa

SEQ ID NO: 30076 - DNA, 20 bp, Artificial Sequence
  Synthetic
ctaccttttgcatagcagtt

SEQ ID NO: 30077 - DNA, 20 bp, Artificial Sequence
  Synthetic
caaactgctatgcaaaaggt

SEQ ID NO: 30078 - DNA, 20 bp, Artificial Sequence
  Synthetic
gtgtctctttgcagttatga

SEQ ID NO: 30079 - DNA, 20 bp, Artificial Sequence
  Synthetic
tttgcagttatgatggttaa

SEQ ID NO: 30080 - DNA, 20 bp, Artificial Sequence
  Synthetic
tgatggttaacggtgatcac

SEQ ID NO: 30081 - DNA, 20 bp, Artificial Sequence
  Synthetic
gttaacggtgatcacaggat

SEQ ID NO: 30082 - DNA, 20 bp, Artificial Sequence
  Synthetic
gccaagagagccatccagac

SEQ ID NO: 30083 - DNA, 20 bp, Artificial Sequence
  Synthetic
gccagtctggatggctctct

SEQ ID NO: 30084 - DNA, 20 bp, Artificial Sequence
  Synthetic
cagctcttcgccagtctgga

SEQ ID NO: 30085 - DNA, 20 bp, Artificial Sequence
  Synthetic
aaaacagctcttcgccagtc

SEQ ID NO: 30086 - DNA, 20 bp, Artificial Sequence
  Synthetic
aagagctgttttttgattac

SEQ ID NO: 30087 - DNA, 20 bp, Artificial Sequence
  Synthetic
ggcggcagcgggttcggcgt

SEQ ID NO: 30088 - DNA, 20 bp, Artificial Sequence
  Synthetic
ggcagcggcggcagcgggtt

SEQ ID NO: 30089 - DNA, 20 bp, Artificial Sequence
  Synthetic
gaacccgctgccgccgctgc

SEQ ID NO: 30090 - DNA, 20 bp, Artificial Sequence
  Synthetic
aacccgctgccgccgctgcc

SEQ ID NO: 30091 - DNA, 20 bp, Artificial Sequence
  Synthetic
ggcccggcagcggcggcagc

SEQ ID NO: 30092 - DNA, 20 bp, Artificial Sequence
  Synthetic
aggcccggcagcggcggcag

SEQ ID NO: 30093 - DNA, 20 bp, Artificial Sequence
  Synthetic
gcacacaggcccggcagcgg

SEQ ID NO: 30094 - DNA, 20 bp, Artificial Sequence
  Synthetic
ttcgcacacaggcccggcag

SEQ ID NO: 30095 - DNA, 20 bp, Artificial Sequence
  Synthetic
actcagttcgcacacaggcc

SEQ ID NO: 30096 - DNA, 20 bp, Artificial Sequence
  Synthetic
gcctgtgtgcgaactgagtg

SEQ ID NO: 30097 - DNA, 20 bp, Artificial Sequence
  Synthetic
cccgcactcagttcgcacac

SEQ ID NO: 30098 - DNA, 20 bp, Artificial Sequence
  Synthetic
cctgtgtgcgaactgagtgc

SEQ ID NO: 30099 - DNA, 20 bp, Artificial Sequence
  Synthetic
ctgtgtgcgaactgagtgcg

SEQ ID NO: 30100 - DNA, 20 bp, Artificial Sequence
  Synthetic
tcttcatgtctcggcagaag

SEQ ID NO: 30101 - DNA, 20 bp, Artificial Sequence
  Synthetic
tgccgagacatgaagaagtt

SEQ ID NO: 30102 - DNA, 20 bp, Artificial Sequence
  Synthetic
gccgagacatgaagaagttc

SEQ ID NO: 30103 - DNA, 20 bp, Artificial Sequence
  Synthetic
ccccgaacttcttcatgtct

SEQ ID NO: 30104 - DNA, 20 bp, Artificial Sequence
  Synthetic
ccgagacatgaagaagttcg

SEQ ID NO: 30105 - DNA, 20 bp, Artificial Sequence
  Synthetic
cgagacatgaagaagttcgg

SEQ ID NO: 30106 - DNA, 20 bp, Artificial Sequence
  Synthetic
gagacatgaagaagttcggg

SEQ ID NO: 30107 - DNA, 20 bp, Artificial Sequence
  Synthetic
atgaagaagttcggggggcc

SEQ ID NO: 30108 - DNA, 20 bp, Artificial Sequence
  Synthetic
tgaagaagttcggggggccc

SEQ ID NO: 30109 - DNA, 20 bp, Artificial Sequence
  Synthetic
cacgactgcttcatgcgccc

SEQ ID NO: 30110 - DNA, 20 bp, Artificial Sequence
  Synthetic
gcacgactgcttcatgcgcc

SEQ ID NO: 30111 - DNA, 20 bp, Artificial Sequence
  Synthetic
tgaagcagtcgtgcctgctc

SEQ ID NO: 30112 - DNA, 20 bp, Artificial Sequence
  Synthetic
cggcagtgcactgccggagc

SEQ ID NO: 30113 - DNA, 20 bp, Artificial Sequence
  Synthetic
aactcacggcagtgcactgc

SEQ ID NO: 30114 - DNA, 20 bp, Artificial Sequence
  Synthetic
gaggcacagcacggctgagc

SEQ ID NO: 30115 - DNA, 20 bp, Artificial Sequence
  Synthetic
caggtaggagaggcacagca

SEQ ID NO: 30116 - DNA, 20 bp, Artificial Sequence
  Synthetic
ggatgtcaggcaggtaggag

SEQ ID NO: 30117 - DNA, 20 bp, Artificial Sequence
  Synthetic
ctcctacctgcctgacatcc

SEQ ID NO: 30118 - DNA, 20 bp, Artificial Sequence
  Synthetic
caccaggatgtcaggcaggt

SEQ ID NO: 30119 - DNA, 20 bp, Artificial Sequence
  Synthetic
cagtcaccaggatgtcaggc

SEQ ID NO: 30120 - DNA, 20 bp, Artificial Sequence
  Synthetic
ctgcctgacatcctggtgac

SEQ ID NO: 30121 - DNA, 20 bp, Artificial Sequence
  Synthetic
gtgccagtcaccaggatgtc

SEQ ID NO: 30122 - DNA, 20 bp, Artificial Sequence
  Synthetic
tgtcataggtgccagtcacc

SEQ ID NO: 30123 - DNA, 20 bp, Artificial Sequence
  Synthetic
gactggcacctatgacaaga

SEQ ID NO: 30124 - DNA, 20 bp, Artificial Sequence
  Synthetic
gatggtcaccttcttgtcat

SEQ ID NO: 30125 - DNA, 20 bp, Artificial Sequence
  Synthetic
cccacctctggggtcgtaga

SEQ ID NO: 30126 - DNA, 20 bp, Artificial Sequence
  Synthetic
ggccacagctttcccatcac

SEQ ID NO: 30127 - DNA, 20 bp, Artificial Sequence
  Synthetic
gccacagctttcccatcact

SEQ ID NO: 30128 - DNA, 20 bp, Artificial Sequence
  Synthetic
tcccagtgatgggaaagctg

SEQ ID NO: 30129 - DNA, 20 bp, Artificial Sequence
  Synthetic
gagtactggatcccagtgat

SEQ ID NO: 30130 - DNA, 20 bp, Artificial Sequence
  Synthetic
ggagtactggatcccagtga

SEQ ID NO: 30131 - DNA, 20 bp, Artificial Sequence
  Synthetic
cactgggatccagtactccg

SEQ ID NO: 30132 - DNA, 20 bp, Artificial Sequence
  Synthetic
actgggatccagtactccgt

SEQ ID NO: 30133 - DNA, 20 bp, Artificial Sequence
  Synthetic
acaaggctcccacggagtac

SEQ ID NO: 30134 - DNA, 20 bp, Artificial Sequence
  Synthetic
tgtggtgtacaaggctccca

SEQ ID NO: 30135 - DNA, 20 bp, Artificial Sequence
  Synthetic
gtcagtggatgtggtgtaca

SEQ ID NO: 30136 - DNA, 20 bp, Artificial Sequence
  Synthetic
gatggtcttgtcagtggatg

SEQ ID NO: 30137 - DNA, 20 bp, Artificial Sequence
  Synthetic
catccactgacaagaccatc

SEQ ID NO: 30138 - DNA, 20 bp, Artificial Sequence
  Synthetic
atccactgacaagaccatcc

SEQ ID NO: 30139 - DNA, 20 bp, Artificial Sequence
  Synthetic
cacccggatggtcttgtcag

SEQ ID NO: 30140 - DNA, 20 bp, Artificial Sequence
  Synthetic
gggcaggagcctcacccgga

SEQ ID NO: 30141 - DNA, 20 bp, Artificial Sequence
  Synthetic
taagcgaaatagtacccatg

SEQ ID NO: 30142 - DNA, 20 bp, Artificial Sequence
  Synthetic
cacctgactcctcacctcat

SEQ ID NO: 30143 - DNA, 20 bp, Artificial Sequence
  Synthetic
ccacctgactcctcacctca

SEQ ID NO: 30144 - DNA, 20 bp, Artificial Sequence
  Synthetic
tgctcctgtcctgcagggct

SEQ ID NO: 30145 - DNA, 20 bp, Artificial Sequence
  Synthetic
ctgtcctgcagggctgggtg

SEQ ID NO: 30146 - DNA, 20 bp, Artificial Sequence
  Synthetic
gcagggctgggtgtggtcac

SEQ ID NO: 30147 - DNA, 20 bp, Artificial Sequence
  Synthetic
ggtgtggtcactggcagcgc

SEQ ID NO: 30148 - DNA, 20 bp, Artificial Sequence
  Synthetic
caggaccaccgcgtgtgctc

SEQ ID NO: 30149 - DNA, 20 bp, Artificial Sequence
  Synthetic
aggagccggagcacacgcgg

SEQ ID NO: 30150 - DNA, 20 bp, Artificial Sequence
  Synthetic
accgcgtgtgctccggctcc

SEQ ID NO: 30151 - DNA, 20 bp, Artificial Sequence
  Synthetic
cccaggagccggagcacacg

SEQ ID NO: 30152 - DNA, 20 bp, Artificial Sequence
  Synthetic
ccgcgtgtgctccggctcct

SEQ ID NO: 30153 - DNA, 20 bp, Artificial Sequence
  Synthetic
cactgtgctgtcccaggagc

SEQ ID NO: 30154 - DNA, 20 bp, Artificial Sequence
  Synthetic
gagcttcactgtgctgtccc

SEQ ID NO: 30155 - DNA, 20 bp, Artificial Sequence
  Synthetic
gggacagcacagtgaagctc

SEQ ID NO: 30156 - DNA, 20 bp, Artificial Sequence
  Synthetic
ggacagcacagtgaagctct

SEQ ID NO: 30157 - DNA, 20 bp, Artificial Sequence
  Synthetic
cacagtgaagctctgggaca

SEQ ID NO: 30158 - DNA, 20 bp, Artificial Sequence
  Synthetic
ctgcctggccgaaggccacg

SEQ ID NO: 30159 - DNA, 20 bp, Artificial Sequence
  Synthetic
aacggaagccacgtggcctt

SEQ ID NO: 30160 - DNA, 20 bp, Artificial Sequence
  Synthetic
ctgagtcaacggaagccacg

SEQ ID NO: 30161 - DNA, 20 bp, Artificial Sequence
  Synthetic
gagcagcagcactgagtcaa

SEQ ID NO: 30162 - DNA, 20 bp, Artificial Sequence
  Synthetic
tgactcagtgctgctgctcc

SEQ ID NO: 30163 - DNA, 20 bp, Artificial Sequence
  Synthetic
acagacagagtgacccaccc

SEQ ID NO: 30164 - DNA, 20 bp, Artificial Sequence
  Synthetic
gggtgggtcactctgtctgt

SEQ ID NO: 30165 - DNA, 20 bp, Artificial Sequence
  Synthetic
ggtgggtcactctgtctgtc

SEQ ID NO: 30166 - DNA, 20 bp, Artificial Sequence
  Synthetic
caagttgacgttgcgatctc

SEQ ID NO: 30167 - DNA, 20 bp, Artificial Sequence
  Synthetic
acaagttgacgttgcgatct

SEQ ID NO: 30168 - DNA, 20 bp, Artificial Sequence
  Synthetic
gagatcgcaacgtcaacttg

SEQ ID NO: 30169 - DNA, 20 bp, Artificial Sequence
  Synthetic
agatcgcaacgtcaacttgt

SEQ ID NO: 30170 - DNA, 20 bp, Artificial Sequence
  Synthetic
atgggctaggaaacactgga

SEQ ID NO: 30171 - DNA, 20 bp, Artificial Sequence
  Synthetic
ggtcatgggctaggaaacac

SEQ ID NO: 30172 - DNA, 20 bp, Artificial Sequence
  Synthetic
gtgtttcctagcccatgacc

SEQ ID NO: 30173 - DNA, 20 bp, Artificial Sequence
  Synthetic
gcacagcctggtcatgggct

SEQ ID NO: 30174 - DNA, 20 bp, Artificial Sequence
  Synthetic
ggtacgcacagcctggtcat

SEQ ID NO: 30175 - DNA, 20 bp, Artificial Sequence
  Synthetic
gggtacgcacagcctggtca

SEQ ID NO: 30176 - DNA, 20 bp, Artificial Sequence
  Synthetic
attgaagggtacgcacagcc

SEQ ID NO: 30177 - DNA, 20 bp, Artificial Sequence
  Synthetic
aggctgtgcgtacccttcaa

SEQ ID NO: 30178 - DNA, 20 bp, Artificial Sequence
  Synthetic
gttagctttgcaccattgaa

SEQ ID NO: 30179 - DNA, 20 bp, Artificial Sequence
  Synthetic
tgttagctttgcaccattga

SEQ ID NO: 30180 - DNA, 20 bp, Artificial Sequence
  Synthetic
ttcaatggtgcaaagctaac

SEQ ID NO: 30181 - DNA, 20 bp, Artificial Sequence
  Synthetic
cagccatttccttgtctctg

SEQ ID NO: 30182 - DNA, 20 bp, Artificial Sequence
  Synthetic
agccatttccttgtctctgc

SEQ ID NO: 30183 - DNA, 20 bp, Artificial Sequence
  Synthetic
gccatttccttgtctctgcg

SEQ ID NO: 30184 - DNA, 20 bp, Artificial Sequence
  Synthetic
tccccgcagagacaaggaaa

SEQ ID NO: 30185 - DNA, 20 bp, Artificial Sequence
  Synthetic
ggtcactccccgcagagaca

SEQ ID NO: 30186 - DNA, 20 bp, Artificial Sequence
  Synthetic
ttgtctctgcggggagtgac

SEQ ID NO: 30187 - DNA, 20 bp, Artificial Sequence
  Synthetic
gtgaccggaaaatcaaattc

SEQ ID NO: 30188 - DNA, 20 bp, Artificial Sequence
  Synthetic
tgaccggaaaatcaaattct

SEQ ID NO: 30189 - DNA, 20 bp, Artificial Sequence
  Synthetic
ggtcccagaatttgattttc

SEQ ID NO: 30190 - DNA, 20 bp, Artificial Sequence
  Synthetic
ttttagttcaattgctgtgt

SEQ ID NO: 30191 - DNA, 20 bp, Artificial Sequence
  Synthetic
acagcaattgaactaaaatt

SEQ ID NO: 30192 - DNA, 20 bp, Artificial Sequence
  Synthetic
atgtcattttcaagatcttc

SEQ ID NO: 30193 - DNA, 20 bp, Artificial Sequence
  Synthetic
aagagttgatgggtatactc

SEQ ID NO: 30194 - DNA, 20 bp, Artificial Sequence
  Synthetic
gagtatacccatcaactctt

SEQ ID NO: 30195 - DNA, 20 bp, Artificial Sequence
  Synthetic
agtatacccatcaactcttt

SEQ ID NO: 30196 - DNA, 20 bp, Artificial Sequence
  Synthetic
gtatacccatcaactctttg

SEQ ID NO: 30197 - DNA, 20 bp, Artificial Sequence
  Synthetic
ctcatccccaaagagttgat

SEQ ID NO: 30198 - DNA, 20 bp, Artificial Sequence
  Synthetic
actcatccccaaagagttga

SEQ ID NO: 30199 - DNA, 20 bp, Artificial Sequence
  Synthetic
catttcagtgaaactgcttt

SEQ ID NO: 30200 - DNA, 20 bp, Artificial Sequence
  Synthetic
tgaaactgcttttggttaca

SEQ ID NO: 30201 - DNA, 20 bp, Artificial Sequence
  Synthetic
gaaactgcttttggttacaa

SEQ ID NO: 30202 - DNA, 20 bp, Artificial Sequence
  Synthetic
atcctgttatactatattgc

SEQ ID NO: 30203 - DNA, 20 bp, Artificial Sequence
  Synthetic
taccagcaatatagtataac

SEQ ID NO: 30204 - DNA, 20 bp, Artificial Sequence
  Synthetic
caacacggaacattgttgac

SEQ ID NO: 30205 - DNA, 20 bp, Artificial Sequence
  Synthetic
ctttagatgcatattcaaca

SEQ ID NO: 30206 - DNA, 20 bp, Artificial Sequence
  Synthetic
tgagaactttgactgtgtag

SEQ ID NO: 30207 - DNA, 20 bp, Artificial Sequence
  Synthetic
tctttaggcagatgatgttg

SEQ ID NO: 30208 - DNA, 20 bp, Artificial Sequence
  Synthetic
ctttaggcagatgatgttga

SEQ ID NO: 30209 - DNA, 20 bp, Artificial Sequence
  Synthetic
attagacaaatcattccacc

SEQ ID NO: 30210 - DNA, 20 bp, Artificial Sequence
  Synthetic
gtgtttgtgcaaaatccagg

SEQ ID NO: 30211 - DNA, 20 bp, Artificial Sequence
  Synthetic
ttcgtgtttgtgcaaaatcc

SEQ ID NO: 30212 - DNA, 20 bp, Artificial Sequence
  Synthetic
gaatgatttcctttctttac

SEQ ID NO: 30213 - DNA, 20 bp, Artificial Sequence
  Synthetic
tttcctttctttactggaaa

SEQ ID NO: 30214 - DNA, 20 bp, Artificial Sequence
  Synthetic
cttccttttccagtaaagaa

SEQ ID NO: 30215 - DNA, 20 bp, Artificial Sequence
  Synthetic
gaagttgatttcaagccatt

SEQ ID NO: 30216 - DNA, 20 bp, Artificial Sequence
  Synthetic
gtatgaagtaaggttccgaa

SEQ ID NO: 30217 - DNA, 20 bp, Artificial Sequence
  Synthetic
aactgagtaggtatgaagta

SEQ ID NO: 30218 - DNA, 20 bp, Artificial Sequence
  Synthetic
tgttggactgagaactgagt

SEQ ID NO: 30219 - DNA, 20 bp, Artificial Sequence
  Synthetic
tactcagttctcagtccaac

SEQ ID NO: 30220 - DNA, 20 bp, Artificial Sequence
  Synthetic
tcagttctcagtccaacagg

SEQ ID NO: 30221 - DNA, 20 bp, Artificial Sequence
  Synthetic
gtaaagttttctcctcctgt

SEQ ID NO: 30222 - DNA, 20 bp, Artificial Sequence
  Synthetic
ctttacctttcagatatata

SEQ ID NO: 30223 - DNA, 20 bp, Artificial Sequence
  Synthetic
ctttaccttatatatctgaa

SEQ ID NO: 30224 - DNA, 20 bp, Artificial Sequence
  Synthetic
taggctgacatgacatgtag

SEQ ID NO: 30225 - DNA, 20 bp, Artificial Sequence
  Synthetic
gctttcgagaatatcatgaa

SEQ ID NO: 30226 - DNA, 20 bp, Artificial Sequence
  Synthetic
ggcttcagacctttttgatg

SEQ ID NO: 30227 - DNA, 20 bp, Artificial Sequence
  Synthetic
ttcaataaaccacatcaaaa

SEQ ID NO: 30228 - DNA, 20 bp, Artificial Sequence
  Synthetic
ggaaattactattatggaca

SEQ ID NO: 30229 - DNA, 20 bp, Artificial Sequence
  Synthetic
ttcggtgaggcttcattggg

SEQ ID NO: 30230 - DNA, 20 bp, Artificial Sequence
  Synthetic
ggattcggtgaggcttcatt

SEQ ID NO: 30231 - DNA, 20 bp, Artificial Sequence
  Synthetic
cggattcggtgaggcttcat

SEQ ID NO: 30232 - DNA, 20 bp, Artificial Sequence
  Synthetic
tgagtcatgcggattcggtg

SEQ ID NO: 30233 - DNA, 20 bp, Artificial Sequence
  Synthetic
aattatgagtcatgcggatt

SEQ ID NO: 30234 - DNA, 20 bp, Artificial Sequence
  Synthetic
gcagcaaattatgagtcatg

SEQ ID NO: 30235 - DNA, 20 bp, Artificial Sequence
  Synthetic
cataatttgctgctcaacta

SEQ ID NO: 30236 - DNA, 20 bp, Artificial Sequence
  Synthetic
ctatggtctctaccgaaaaa

SEQ ID NO: 30237 - DNA, 20 bp, Artificial Sequence
  Synthetic
tcacatagatttccattttt

SEQ ID NO: 30238 - DNA, 20 bp, Artificial Sequence
  Synthetic
cctcagcattggctttgtga

SEQ ID NO: 30239 - DNA, 20 bp, Artificial Sequence
  Synthetic
ccctcacaaagccaatgctg

SEQ ID NO: 30240 - DNA, 20 bp, Artificial Sequence
  Synthetic
tcctcagcattggctttgtg

SEQ ID NO: 30241 - DNA, 20 bp, Artificial Sequence
  Synthetic
cttggtcatctcctcagcat

SEQ ID NO: 30242 - DNA, 20 bp, Artificial Sequence
  Synthetic
gtagtcatcgctgtggtact

SEQ ID NO: 30243 - DNA, 20 bp, Artificial Sequence
  Synthetic
atttaatgtagtcatcgctg

SEQ ID NO: 30244 - DNA, 20 bp, Artificial Sequence
  Synthetic
cgacatgttatctggacgga

SEQ ID NO: 30245 - DNA, 20 bp, Artificial Sequence
  Synthetic
catccgtccagataacatgt

SEQ ID NO: 30246 - DNA, 20 bp, Artificial Sequence
  Synthetic
actccgacatgttatctgga

SEQ ID NO: 30247 - DNA, 20 bp, Artificial Sequence
  Synthetic
ctgtactccgacatgttatc

SEQ ID NO: 30248 - DNA, 20 bp, Artificial Sequence
  Synthetic
tatttctttcaagtcaacgt

SEQ ID NO: 30249 - DNA, 20 bp, Artificial Sequence
  Synthetic
ctttcaagtcaacgttggtg

SEQ ID NO: 30250 - DNA, 20 bp, Artificial Sequence
  Synthetic
gaggactgtccagtattcga

SEQ ID NO: 30251 - DNA, 20 bp, Artificial Sequence
  Synthetic
tcaaacaggccatcgaatac

SEQ ID NO: 30252 - DNA, 20 bp, Artificial Sequence
  Synthetic
acaactgacagaactcaaac

SEQ ID NO: 30253 - DNA, 20 bp, Artificial Sequence
  Synthetic
gagttctgtcagttgtctac

SEQ ID NO: 30254 - DNA, 20 bp, Artificial Sequence
  Synthetic
ttctgtcagttgtctactgg

SEQ ID NO: 30255 - DNA, 20 bp, Artificial Sequence
  Synthetic
gttgtctactggtggttctg

SEQ ID NO: 30256 - DNA, 20 bp, Artificial Sequence
  Synthetic
ttgtctactggtggttctgt

SEQ ID NO: 30257 - DNA, 20 bp, Artificial Sequence
  Synthetic
ttaagtttcacagcacttgc

SEQ ID NO: 30258 - DNA, 20 bp, Artificial Sequence
  Synthetic
gaaacttaataagcagcaga

SEQ ID NO: 30259 - DNA, 20 bp, Artificial Sequence
  Synthetic
agacggacatcgctgtgaat

SEQ ID NO: 30260 - DNA, 20 bp, Artificial Sequence
  Synthetic
gacggacatcgctgtgaatt

SEQ ID NO: 30261 - DNA, 20 bp, Artificial Sequence
  Synthetic
gacatcgctgtgaattgggc

SEQ ID NO: 30262 - DNA, 20 bp, Artificial Sequence
  Synthetic
acatcgctgtgaattgggct

SEQ ID NO: 30263 - DNA, 20 bp, Artificial Sequence
  Synthetic
catcgctgtgaattgggctg

SEQ ID NO: 30264 - DNA, 20 bp, Artificial Sequence
  Synthetic
atcgctgtgaattgggctgg

SEQ ID NO: 30265 - DNA, 20 bp, Artificial Sequence
  Synthetic
cggacttctttgcatggtgc

SEQ ID NO: 30266 - DNA, 20 bp, Artificial Sequence
  Synthetic
gcaccatgcaaagaagtccg

SEQ ID NO: 30267 - DNA, 20 bp, Artificial Sequence
  Synthetic
atgcctcggacttctttgca

SEQ ID NO: 30268 - DNA, 20 bp, Artificial Sequence
  Synthetic
gcaaagaagtccgaggcatc

SEQ ID NO: 30269 - DNA, 20 bp, Artificial Sequence
  Synthetic
gtaacagaagccagatgcct

SEQ ID NO: 30270 - DNA, 20 bp, Artificial Sequence
  Synthetic
ttacgtcaatgatatcgtct

SEQ ID NO: 30271 - DNA, 20 bp, Artificial Sequence
  Synthetic
tgatatcgtcttggccatcc

SEQ ID NO: 30272 - DNA, 20 bp, Artificial Sequence
  Synthetic
atactttagcagttccagga

SEQ ID NO: 30273 - DNA, 20 bp, Artificial Sequence
  Synthetic
aggcatactttagcagttcc

SEQ ID NO: 30274 - DNA, 20 bp, Artificial Sequence
  Synthetic
ctgatcctaggtatcaccag

SEQ ID NO: 30275 - DNA, 20 bp, Artificial Sequence
  Synthetic
tgatcctaggtatcaccaga

SEQ ID NO: 30276 - DNA, 20 bp, Artificial Sequence
  Synthetic
tgtcaatgtacagcaccctc

SEQ ID NO: 30277 - DNA, 20 bp, Artificial Sequence
  Synthetic
attgacattgatattcacca

SEQ ID NO: 30278 - DNA, 20 bp, Artificial Sequence
  Synthetic
attgatattcaccatggtga

SEQ ID NO: 30279 - DNA, 20 bp, Artificial Sequence
  Synthetic
tattcaccatggtgacggcg

SEQ ID NO: 30280 - DNA, 20 bp, Artificial Sequence
  Synthetic
cctcttccacgccgtcacca

SEQ ID NO: 30281 - DNA, 20 bp, Artificial Sequence
  Synthetic
ccatggtgacggcgtggaag

SEQ ID NO: 30282 - DNA, 20 bp, Artificial Sequence
  Synthetic
ggaagaggccttctacacca

SEQ ID NO: 30283 - DNA, 20 bp, Artificial Sequence
  Synthetic
aggccttctacaccacggac

SEQ ID NO: 30284 - DNA, 20 bp, Artificial Sequence
  Synthetic
ggccttctacaccacggacc

SEQ ID NO: 30285 - DNA, 20 bp, Artificial Sequence
  Synthetic
gacccggtccgtggtgtaga

SEQ ID NO: 30286 - DNA, 20 bp, Artificial Sequence
  Synthetic
cacagtcatgacccggtccg

SEQ ID NO: 30287 - DNA, 20 bp, Artificial Sequence
  Synthetic
gaaaggacacagtcatgacc

SEQ ID NO: 30288 - DNA, 20 bp, Artificial Sequence
  Synthetic
actgtgtcctttcataagta

SEQ ID NO: 30289 - DNA, 20 bp, Artificial Sequence
  Synthetic
gtactctccatacttatgaa

SEQ ID NO: 30290 - DNA, 20 bp, Artificial Sequence
  Synthetic
aagtatggagagtacttccc

SEQ ID NO: 30291 - DNA, 20 bp, Artificial Sequence
  Synthetic
ggagagtacttcccaggaac

SEQ ID NO: 30292 - DNA, 20 bp, Artificial Sequence
  Synthetic
gagagtacttcccaggaact

SEQ ID NO: 30293 - DNA, 20 bp, Artificial Sequence
  Synthetic
agagtacttcccaggaactg

SEQ ID NO: 30294 - DNA, 20 bp, Artificial Sequence
  Synthetic
tcccaggaactggggaccta

SEQ ID NO: 30295 - DNA, 20 bp, Artificial Sequence
  Synthetic
cccgtaggtccccagttcct

SEQ ID NO: 30296 - DNA, 20 bp, Artificial Sequence
  Synthetic
cccaggaactggggacctac

SEQ ID NO: 30297 - DNA, 20 bp, Artificial Sequence
  Synthetic
acccgtaggtccccagttcc

SEQ ID NO: 30298 - DNA, 20 bp, Artificial Sequence
  Synthetic
taaagggcgttctcacccgt

SEQ ID NO: 30299 - DNA, 20 bp, Artificial Sequence
  Synthetic
ggcctttttaattaggatat

SEQ ID NO: 30300 - DNA, 20 bp, Artificial Sequence
  Synthetic
gcctttttaattaggatatc

SEQ ID NO: 30301 - DNA, 20 bp, Artificial Sequence
  Synthetic
cctttttaattaggatatcg

SEQ ID NO: 30302 - DNA, 20 bp, Artificial Sequence
  Synthetic
tttaattaggatatcggggc

SEQ ID NO: 30303 - DNA, 20 bp, Artificial Sequence
  Synthetic
taggatatcggggctggcaa

SEQ ID NO: 30304 - DNA, 20 bp, Artificial Sequence
  Synthetic
gttaactacccgctccgaga

SEQ ID NO: 30305 - DNA, 20 bp, Artificial Sequence
  Synthetic
ttaactacccgctccgagac

SEQ ID NO: 30306 - DNA, 20 bp, Artificial Sequence
  Synthetic
catcaatcccgtctcggagc

SEQ ID NO: 30307 - DNA, 20 bp, Artificial Sequence
  Synthetic
tcatcaatcccgtctcggag

SEQ ID NO: 30308 - DNA, 20 bp, Artificial Sequence
  Synthetic
actcgtcatcaatcccgtct

SEQ ID NO: 30309 - DNA, 20 bp, Artificial Sequence
  Synthetic
gattgatgacgagtcctatg

SEQ ID NO: 30310 - DNA, 20 bp, Artificial Sequence
  Synthetic
cggcttgaaaatggcctcat

SEQ ID NO: 30311 - DNA, 20 bp, Artificial Sequence
  Synthetic
ctatgaggccattttcaagc

SEQ ID NO: 30312 - DNA, 20 bp, Artificial Sequence
  Synthetic
gccacttaccggcttgaaaa

SEQ ID NO: 30313 - DNA, 20 bp, Artificial Sequence
  Synthetic
ttaggtcatgtccaaagtaa

SEQ ID NO: 30314 - DNA, 20 bp, Artificial Sequence
  Synthetic
ctggaacatctccattactt

SEQ ID NO: 30315 - DNA, 20 bp, Artificial Sequence
  Synthetic
ggagatgttccagcctagtg

SEQ ID NO: 30316 - DNA, 20 bp, Artificial Sequence
  Synthetic
gatgttccagcctagtgcgg

SEQ ID NO: 30317 - DNA, 20 bp, Artificial Sequence
  Synthetic
gtaagaccaccgcactaggc

SEQ ID NO: 30318 - DNA, 20 bp, Artificial Sequence
  Synthetic
cactgtaagaccaccgcact

SEQ ID NO: 30319 - DNA, 20 bp, Artificial Sequence
  Synthetic
agtgcggtggtcttacagtg

SEQ ID NO: 30320 - DNA, 20 bp, Artificial Sequence
  Synthetic
tgtggctcagactccctatc

SEQ ID NO: 30321 - DNA, 20 bp, Artificial Sequence
  Synthetic
gtggctcagactccctatct

SEQ ID NO: 30322 - DNA, 20 bp, Artificial Sequence
  Synthetic
tggctcagactccctatctg

SEQ ID NO: 30323 - DNA, 20 bp, Artificial Sequence
  Synthetic
cagactccctatctggggat

SEQ ID NO: 30324 - DNA, 20 bp, Artificial Sequence
  Synthetic
tccctatctggggatcggtt

SEQ ID NO: 30325 - DNA, 20 bp, Artificial Sequence
  Synthetic
acctaaccgatccccagata

SEQ ID NO: 30326 - DNA, 20 bp, Artificial Sequence
  Synthetic
aacctaaccgatccccagat

SEQ ID NO: 30327 - DNA, 20 bp, Artificial Sequence
  Synthetic
tgcttcaatctaactatcaa

SEQ ID NO: 30328 - DNA, 20 bp, Artificial Sequence
  Synthetic
caaaggacacgccaagtgtg

SEQ ID NO: 30329 - DNA, 20 bp, Artificial Sequence
  Synthetic
cttgacaaattccacacact

SEQ ID NO: 30330 - DNA, 20 bp, Artificial Sequence
  Synthetic
taacctgcctatgctgatgc

SEQ ID NO: 30331 - DNA, 20 bp, Artificial Sequence
  Synthetic
aacctgcctatgctgatgct

SEQ ID NO: 30332 - DNA, 20 bp, Artificial Sequence
  Synthetic
ctcccagcatcagcataggc

SEQ ID NO: 30333 - DNA, 20 bp, Artificial Sequence
  Synthetic
ctgcctatgctgatgctggg

SEQ ID NO: 30334 - DNA, 20 bp, Artificial Sequence
  Synthetic
ccgcctcccagcatcagcat

SEQ ID NO: 30335 - DNA, 20 bp, Artificial Sequence
  Synthetic
cctatgctgatgctgggagg

SEQ ID NO: 30336 - DNA, 20 bp, Artificial Sequence
  Synthetic
atgctgatgctgggaggcgg

SEQ ID NO: 30337 - DNA, 20 bp, Artificial Sequence
  Synthetic
acaccattcgtaacgttgcc

SEQ ID NO: 30338 - DNA, 20 bp, Artificial Sequence
  Synthetic
gcaccgggcaacgttacgaa

SEQ ID NO: 30339 - DNA, 20 bp, Artificial Sequence
  Synthetic
ttcgtaacgttgcccggtgc

SEQ ID NO: 30340 - DNA, 20 bp, Artificial Sequence
  Synthetic
tgtctcatatgtccagcacc

SEQ ID NO: 30341 - DNA, 20 bp, Artificial Sequence
  Synthetic
ctgtctcatatgtccagcac

SEQ ID NO: 30342 - DNA, 20 bp, Artificial Sequence
  Synthetic
ctggacatatgagacagctg

SEQ ID NO: 30343 - DNA, 20 bp, Artificial Sequence
  Synthetic
aggacgctcgatctcgcact

SEQ ID NO: 30344 - DNA, 20 bp, Artificial Sequence
  Synthetic
agggctgcggtcaggcgctc

SEQ ID NO: 30345 - DNA, 20 bp, Artificial Sequence
  Synthetic
tgagcgcctgaccgcagccc

SEQ ID NO: 30346 - DNA, 20 bp, Artificial Sequence
  Synthetic
ggcgatccagggctgcggtc

SEQ ID NO: 30347 - DNA, 20 bp, Artificial Sequence
  Synthetic
ccgcaggcgatccagggctg

SEQ ID NO: 30348 - DNA, 20 bp, Artificial Sequence
  Synthetic
ccgcagccctggatcgcctg

SEQ ID NO: 30349 - DNA, 20 bp, Artificial Sequence
  Synthetic
gcgctgccgcaggcgatcca

SEQ ID NO: 30350 - DNA, 20 bp, Artificial Sequence
  Synthetic
cgcgctgccgcaggcgatcc

SEQ ID NO: 30351 - DNA, 20 bp, Artificial Sequence
  Synthetic
ctggatcgcctgcggcagcg

SEQ ID NO: 30352 - DNA, 20 bp, Artificial Sequence
  Synthetic
tcgcctgcggcagcgcggcc

SEQ ID NO: 30353 - DNA, 20 bp, Artificial Sequence
  Synthetic
gttccaggccgcgctgccgc

SEQ ID NO: 30354 - DNA, 20 bp, Artificial Sequence
  Synthetic
ggcagcgcggcctggaacag

SEQ ID NO: 30355 - DNA, 20 bp, Artificial Sequence
  Synthetic
gcctggaacagaggtgtctg

SEQ ID NO: 30356 - DNA, 20 bp, Artificial Sequence
  Synthetic
accgcagacacctctgttcc

SEQ ID NO: 30357 - DNA, 20 bp, Artificial Sequence
  Synthetic
tctgcggttgtcagcccgcg

SEQ ID NO: 30358 - DNA, 20 bp, Artificial Sequence
  Synthetic
gttgtcagcccgcgaggcct

SEQ ID NO: 30359 - DNA, 20 bp, Artificial Sequence
  Synthetic
agcccgcgaggcctcggaag

SEQ ID NO: 30360 - DNA, 20 bp, Artificial Sequence
  Synthetic
ctcctcttccgaggcctcgc

SEQ ID NO: 30361 - DNA, 20 bp, Artificial Sequence
  Synthetic
gctcctcttccgaggcctcg

SEQ ID NO: 30362 - DNA, 20 bp, Artificial Sequence
  Synthetic
cgaggcctcggaagaggagc

SEQ ID NO: 30363 - DNA, 20 bp, Artificial Sequence
  Synthetic
gaggcctcggaagaggagct

SEQ ID NO: 30364 - DNA, 20 bp, Artificial Sequence
  Synthetic
caggcccagctcctcttccg

SEQ ID NO: 30365 - DNA, 20 bp, Artificial Sequence
  Synthetic
ctcggaagaggagctgggcc

SEQ ID NO: 30366 - DNA, 20 bp, Artificial Sequence
  Synthetic
aggagctgggcctggtgcac

SEQ ID NO: 30367 - DNA, 20 bp, Artificial Sequence
  Synthetic
cccgtcctgacctgtgcacc

SEQ ID NO: 30368 - DNA, 20 bp, Artificial Sequence
  Synthetic
cagcccagagtatgtatccc

SEQ ID NO: 30369 - DNA, 20 bp, Artificial Sequence
  Synthetic
tgaccagggatacatactct

SEQ ID NO: 30370 - DNA, 20 bp, Artificial Sequence
  Synthetic
ctgaccagggatacatactc

SEQ ID NO: 30371 - DNA, 20 bp, Artificial Sequence
  Synthetic
cagagtatgtatccctggtc

SEQ ID NO: 30372 - DNA, 20 bp, Artificial Sequence
  Synthetic
agagtatgtatccctggtca

SEQ ID NO: 30373 - DNA, 20 bp, Artificial Sequence
  Synthetic
atccctggtcagggagaccc

SEQ ID NO: 30374 - DNA, 20 bp, Artificial Sequence
  Synthetic
gacctgggtctccctgacca

SEQ ID NO: 30375 - DNA, 20 bp, Artificial Sequence
  Synthetic
ggacctgggtctccctgacc

SEQ ID NO: 30376 - DNA, 20 bp, Artificial Sequence
  Synthetic
gtcagggagacccaggtcct

SEQ ID NO: 30377 - DNA, 20 bp, Artificial Sequence
  Synthetic
ggagacccaggtcctaggca

SEQ ID NO: 30378 - DNA, 20 bp, Artificial Sequence
  Synthetic
gacccaggtcctaggcaagg

SEQ ID NO: 30379 - DNA, 20 bp, Artificial Sequence
  Synthetic
ctcctccttgcctaggacct

SEQ ID NO: 30380 - DNA, 20 bp, Artificial Sequence
  Synthetic
gctcctccttgcctaggacc

SEQ ID NO: 30381 - DNA, 20 bp, Artificial Sequence
  Synthetic
cctgcagctcctccttgcct

SEQ ID NO: 30382 - DNA, 20 bp, Artificial Sequence
  Synthetic
cctaggcaaggaggagctgc

SEQ ID NO: 30383 - DNA, 20 bp, Artificial Sequence
  Synthetic
gaggagctgcaggcgctgtc

SEQ ID NO: 30384 - DNA, 20 bp, Artificial Sequence
  Synthetic
gtagatggcgtcgaactgtc

SEQ ID NO: 30385 - DNA, 20 bp, Artificial Sequence
  Synthetic
cgacgccatctacttccacc

SEQ ID NO: 30386 - DNA, 20 bp, Artificial Sequence
  Synthetic
acgcaccgggtggaagtaga

SEQ ID NO: 30387 - DNA, 20 bp, Artificial Sequence
  Synthetic
gtccggggacacgcaccggg

SEQ ID NO: 30388 - DNA, 20 bp, Artificial Sequence
  Synthetic
agagtacctttcactgcgcg

SEQ ID NO: 30389 - DNA, 20 bp, Artificial Sequence
  Synthetic
tacctttcactgcgcgcggc

SEQ ID NO: 30390 - DNA, 20 bp, Artificial Sequence
  Synthetic
ggccagccgcgcgcagtgaa

SEQ ID NO: 30391 - DNA, 20 bp, Artificial Sequence
  Synthetic
cactgcgcgcggctggccgc

SEQ ID NO: 30392 - DNA, 20 bp, Artificial Sequence
  Synthetic
actgcgcgcggctggccgca

SEQ ID NO: 30393 - DNA, 20 bp, Artificial Sequence
  Synthetic
ctgcgcgcggctggccgcag

SEQ ID NO: 30394 - DNA, 20 bp, Artificial Sequence
  Synthetic
gcgcggctggccgcaggggc

SEQ ID NO: 30395 - DNA, 20 bp, Artificial Sequence
  Synthetic
cagctgcagtccagcccctg

SEQ ID NO: 30396 - DNA, 20 bp, Artificial Sequence
  Synthetic
cgcaggggctggactgcagc

SEQ ID NO: 30397 - DNA, 20 bp, Artificial Sequence
  Synthetic
aggggctggactgcagctgg

SEQ ID NO: 30398 - DNA, 20 bp, Artificial Sequence
  Synthetic
ctggtggacgctgtgctcac

SEQ ID NO: 30399 - DNA, 20 bp, Artificial Sequence
  Synthetic
ctcactggagctgtgcaaaa

SEQ ID NO: 30400 - DNA, 20 bp, Artificial Sequence
  Synthetic
tcactggagctgtgcaaaat

SEQ ID NO: 30401 - DNA, 20 bp, Artificial Sequence
  Synthetic
tgtgcaaaatgggcttgccc

SEQ ID NO: 30402 - DNA, 20 bp, Artificial Sequence
  Synthetic
aaaatgggcttgccctggtg

SEQ ID NO: 30403 - DNA, 20 bp, Artificial Sequence
  Synthetic
gggcagctctcacctcacca

SEQ ID NO: 30404 - DNA, 20 bp, Artificial Sequence
  Synthetic
ggggcagctctcacctcacc

SEQ ID NO: 30405 - DNA, 20 bp, Artificial Sequence
  Synthetic
ctctcacgccgtaggcctcc

SEQ ID NO: 30406 - DNA, 20 bp, Artificial Sequence
  Synthetic
tctcacgccgtaggcctccc

SEQ ID NO: 30407 - DNA, 20 bp, Artificial Sequence
  Synthetic
cgtaggcctcccgggcacca

SEQ ID NO: 30408 - DNA, 20 bp, Artificial Sequence
  Synthetic
ctctggccatggtgcccggg

SEQ ID NO: 30409 - DNA, 20 bp, Artificial Sequence
  Synthetic
ctcccgggcaccatggccag

SEQ ID NO: 30410 - DNA, 20 bp, Artificial Sequence
  Synthetic
tcccgggcaccatggccaga

SEQ ID NO: 30411 - DNA, 20 bp, Artificial Sequence
  Synthetic
gccctctggccatggtgccc

SEQ ID NO: 30412 - DNA, 20 bp, Artificial Sequence
  Synthetic
cgccctctggccatggtgcc

SEQ ID NO: 30413 - DNA, 20 bp, Artificial Sequence
  Synthetic
cgggcaccatggccagaggg

SEQ ID NO: 30414 - DNA, 20 bp, Artificial Sequence
  Synthetic
tggcagccgccctctggcca

SEQ ID NO: 30415 - DNA, 20 bp, Artificial Sequence
  Synthetic
ggccagagggcggctgccaa

SEQ ID NO: 30416 - DNA, 20 bp, Artificial Sequence
  Synthetic
gccagagggcggctgccaac

SEQ ID NO: 30417 - DNA, 20 bp, Artificial Sequence
  Synthetic
acccgttggcagccgccctc

SEQ ID NO: 30418 - DNA, 20 bp, Artificial Sequence
  Synthetic
gttgaacacacagaacccgt

SEQ ID NO: 30419 - DNA, 20 bp, Artificial Sequence
  Synthetic
gttctgtgtgttcaacaacg

SEQ ID NO: 30420 - DNA, 20 bp, Artificial Sequence
  Synthetic
cttggcatgtgcagctgcta

SEQ ID NO: 30421 - DNA, 20 bp, Artificial Sequence
  Synthetic
gcacatgccaagcagaaaca

SEQ ID NO: 30422 - DNA, 20 bp, Artificial Sequence
  Synthetic
cacatgccaagcagaaacac

SEQ ID NO: 30423 - DNA, 20 bp, Artificial Sequence
  Synthetic
gtgtagcccgtgtttctgct

SEQ ID NO: 30424 - DNA, 20 bp, Artificial Sequence
  Synthetic
agcagaaacacgggctacac

SEQ ID NO: 30425 - DNA, 20 bp, Artificial Sequence
  Synthetic
tgtacccaggatcctcgtcg

SEQ ID NO: 30426 - DNA, 20 bp, Artificial Sequence
  Synthetic
ccagtccacgacgaggatcc

SEQ ID NO: 30427 - DNA, 20 bp, Artificial Sequence
  Synthetic
ccaggatcctcgtcgtggac

SEQ ID NO: 30428 - DNA, 20 bp, Artificial Sequence
  Synthetic
caggatcctcgtcgtggact

SEQ ID NO: 30429 - DNA, 20 bp, Artificial Sequence
  Synthetic
gcacatcccagtccacgacg

SEQ ID NO: 30430 - DNA, 20 bp, Artificial Sequence
  Synthetic
gtggactgggatgtgcacca

SEQ ID NO: 30431 - DNA, 20 bp, Artificial Sequence
  Synthetic
ctgggatgtgcaccatggcc

SEQ ID NO: 30432 - DNA, 20 bp, Artificial Sequence
  Synthetic
tgggatgtgcaccatggcca

SEQ ID NO: 30433 - DNA, 20 bp, Artificial Sequence
  Synthetic
gggatgtgcaccatggccag

SEQ ID NO: 30434 - DNA, 20 bp, Artificial Sequence
  Synthetic
gatactggatcccctggcca

SEQ ID NO: 30435 - DNA, 20 bp, Artificial Sequence
  Synthetic
caaagagatactggatcccc

SEQ ID NO: 30436 - DNA, 20 bp, Artificial Sequence
  Synthetic
ggggatccagtatctctttg

SEQ ID NO: 30437 - DNA, 20 bp, Artificial Sequence
  Synthetic
ggtcatcctcaaagagatac

SEQ ID NO: 30438 - DNA, 20 bp, Artificial Sequence
  Synthetic
atctctttgaggatgacccc

SEQ ID NO: 30439 - DNA, 20 bp, Artificial Sequence
  Synthetic
tccgcacccctgctcacctg

SEQ ID NO: 30440 - DNA, 20 bp, Artificial Sequence
  Synthetic
gcagcgtcctttacttctcc

SEQ ID NO: 30441 - DNA, 20 bp, Artificial Sequence
  Synthetic
agcggtgccaggagaagtaa

SEQ ID NO: 30442 - DNA, 20 bp, Artificial Sequence
  Synthetic
tcctggcaccgctatgagca

SEQ ID NO: 30443 - DNA, 20 bp, Artificial Sequence
  Synthetic
cccatgctcatagcggtgcc

SEQ ID NO: 30444 - DNA, 20 bp, Artificial Sequence
  Synthetic
cctggcaccgctatgagcat

SEQ ID NO: 30445 - DNA, 20 bp, Artificial Sequence
  Synthetic
agaagcgcccatgctcatag

SEQ ID NO: 30446 - DNA, 20 bp, Artificial Sequence
  Synthetic
gctatgagcatgggcgcttc

SEQ ID NO: 30447 - DNA, 20 bp, Artificial Sequence
  Synthetic
gcatctgactctcgcaggaa

SEQ ID NO: 30448 - DNA, 20 bp, Artificial Sequence
  Synthetic
cgtctgcatctgactctcgc

SEQ ID NO: 30449 - DNA, 20 bp, Artificial Sequence
  Synthetic
agagtcagatgcagacgcag

SEQ ID NO: 30450 - DNA, 20 bp, Artificial Sequence
  Synthetic
gagtcagatgcagacgcagt

SEQ ID NO: 30451 - DNA, 20 bp, Artificial Sequence
  Synthetic
agtcagatgcagacgcagtg

SEQ ID NO: 30452 - DNA, 20 bp, Artificial Sequence
  Synthetic
cagatgcagacgcagtgggg

SEQ ID NO: 30453 - DNA, 20 bp, Artificial Sequence
  Synthetic
agatgcagacgcagtggggc

SEQ ID NO: 30454 - DNA, 20 bp, Artificial Sequence
  Synthetic
gatgcagacgcagtggggcg

SEQ ID NO: 30455 - DNA, 20 bp, Artificial Sequence
  Synthetic
agacgcagtggggcggggac

SEQ ID NO: 30456 - DNA, 20 bp, Artificial Sequence
  Synthetic
gacgcagtggggcggggaca

SEQ ID NO: 30457 - DNA, 20 bp, Artificial Sequence
  Synthetic
gtggggcggggacagggcct

SEQ ID NO: 30458 - DNA, 20 bp, Artificial Sequence
  Synthetic
gcaggttgacagtgaagccg

SEQ ID NO: 30459 - DNA, 20 bp, Artificial Sequence
  Synthetic
gcttcactgtcaacctgccc

SEQ ID NO: 30460 - DNA, 20 bp, Artificial Sequence
  Synthetic
tgtcaacctgccctggaacc

SEQ ID NO: 30461 - DNA, 20 bp, Artificial Sequence
  Synthetic
tgggcacctggttccagggc

SEQ ID NO: 30462 - DNA, 20 bp, Artificial Sequence
  Synthetic
agggtgggcacctggttcca

SEQ ID NO: 30463 - DNA, 20 bp, Artificial Sequence
  Synthetic
gagggtgggcacctggttcc

SEQ ID NO: 30464 - DNA, 20 bp, Artificial Sequence
  Synthetic
gatgtcctgccaggttggga

SEQ ID NO: 30465 - DNA, 20 bp, Artificial Sequence
  Synthetic
atgtcctgccaggttgggat

SEQ ID NO: 30466 - DNA, 20 bp, Artificial Sequence
  Synthetic
cagcgtttcccatcccaacc

SEQ ID NO: 30467 - DNA, 20 bp, Artificial Sequence
  Synthetic
gatgggaaacgctgactacg

SEQ ID NO: 30468 - DNA, 20 bp, Artificial Sequence
  Synthetic
tgggagcagcaggtgcagga

SEQ ID NO: 30469 - DNA, 20 bp, Artificial Sequence
  Synthetic
ccagtgggagcagcaggtgc

SEQ ID NO: 30470 - DNA, 20 bp, Artificial Sequence
  Synthetic
cctgcacctgctgctcccac

SEQ ID NO: 30471 - DNA, 20 bp, Artificial Sequence
  Synthetic
caaaggccagtgggagcagc

SEQ ID NO: 30472 - DNA, 20 bp, Artificial Sequence
  Synthetic
gctgctcccactggcctttg

SEQ ID NO: 30473 - DNA, 20 bp, Artificial Sequence
  Synthetic
cagtcacctcaaaggccagt

(The sequence listing continues in the following parts.)

What is claimed is:

1. A method for treating cancer in a subject in need thereof comprising administering to the subject a therapeutically effective amount of a combination therapy comprising one or more agents targeting the expression, activity, substrate or products of WDR77 and BRD4.

2. The method of claim 1, wherein the cancer is Acute myeloid leukemia (AML), NUT (nuclear protein in testis) midline carcinoma, or multiple myeloma.

3. A method for treating inflammation in a subject in need thereof comprising administering to the subject a therapeutically effective amount of a combination therapy comprising one or more agents targeting the expression, activity, substrate or products of WDR77 and BRD4.

4. The method of claim 3, wherein the inflammation is caused by an autoimmune disease.

5. The method of claim 3, wherein the inflammation is caused by a pathogen.

6. A method for reactivation of HIV in a subject in need thereof comprising administering to the subject a therapeutically effective amount of a combination therapy comprising one or more agents targeting the expression, activity, substrate or products of WDR77 and BRD4.

7. The method of any of claims 1 to 6, wherein the one or more agents targeting BRD4 is selected from the group consisting of AZD5153, PFI-1, CPI-203, CPI-0610, RVX-208, OTX015, I-BET151, I-BET762, I-BET-726, dBET1, ARV-771, ARV-825, BETd-260/ZBC260 and MZ1.

8. A CD8+ T cell for use in adoptive cell transfer comprising a CD8+ T cell treated with a combination of one or more agents targeting the expression, activity, substrate or products of WDR77 and BRD4.

9. The CD8+ T cell of claim 8, wherein the CD8+ T cell is a CAR T cell.

10. The CD8+ T cell of claim 9 or 10, wherein the one or more agents targeting BRD4 is selected from the group consisting of AZD5153, JQ1, PFI-1, CPI-203, CPI-0610, RVX-208, OTX015, I-BET151, I-BET762, I-BET-726, dBET1, ARV-771, ARV-825, BETd-260/ZBC260 and MZ1.

11. A method for treating cancer in a subject in need thereof comprising administering to the subject a therapeutically effective amount of a combination therapy comprising one or more agents targeting the expression, activity, substrate or products of SETD6 and INO80.

12. The method of claim 11, wherein the cancer comprises an MLL fusion, such as Acute myeloid leukemia (AML).

13. A method for treating cancer in a subject in need thereof comprising administering to the subject a therapeutically effective amount of a combination therapy comprising one or more agents targeting the expression, activity, substrate or products of KAT6B and CHD8.

14. The method of claim 13, wherein the cancer is Acute myeloid leukemia (AML).

15. A method for treating cancer in a subject in need thereof comprising administering to the subject a therapeutically effective amount of a combination therapy comprising one or more agents targeting the expression, activity, substrate or products of ATRX and SMARCAL1.

16. The method of claim 15, wherein the cancer is Acute myeloid leukemia (AML).

17. A method for treating cancer in a subject in need thereof comprising administering to the subject a therapeutically effective amount of a combination therapy comprising one or more agents targeting the expression, activity, substrate or products of MTA1 and MTA2.

18. The method of claim 17, wherein the cancer comprises Acute myeloid leukemia (AML).

19. The method of claim 17, wherein the cancer comprises a rearrangement in TEL or MLL.

20. A method for treating cancer in a subject in need thereof comprising administering to the subject a therapeutically effective amount of a combination therapy comprising one or more agents targeting the expression, activity, substrate or products of HDAC1 and HDAC2.

21. The method of claim 20, wherein the cancer comprises Acute myeloid leukemia (AML).

22. The method of claim 20, wherein the cancer comprises a rearrangement in TEL or MLL.

23. A method for treating cancer in a subject in need thereof comprising administering to the subject a therapeutically effective amount of a combination therapy comprising one or more agents targeting the expression, activity, substrate or products of CHD3 and HDAC2.

24. The method of claim 23, wherein the cancer comprises Acute myeloid leukemia (AML).

25. The method of claim 23, wherein the cancer does not comprise a rearrangement in TEL or MLL.

26. A method for treating cancer in a subject in need thereof comprising administering to the subject a therapeutically effective amount of a combination therapy comprising one or more agents targeting the expression, activity, substrate or products of ING1 and ING2.

27. The method of claim 26, wherein the cancer comprises Acute myeloid leukemia (AML).

28. The method of claim 26, wherein the cancer comprises a rearrangement in TEL or MLL.

29. A method for treating cancer in a subject in need thereof comprising administering to the subject a therapeutically effective amount of a combination therapy comprising one or more agents targeting the expression, activity, substrate or products of ASF1B and ASF1A.

30. The method of claim 29, wherein the cancer comprises Acute myeloid leukemia (AML).

31. The method of claim 29, wherein the cancer comprises a rearrangement in TEL or MLL.

32. A method for treating cancer in a subject in need thereof comprising administering to the subject a therapeutically effective amount of a combination therapy comprising one or more agents targeting the expression, activity, substrate or products of ING4 and ING5.

33. The method of claim 32, wherein the cancer comprises Acute myeloid leukemia (AML).

34. The method of claim 32, wherein the cancer comprises a rearrangement in TEL or MLL.

35. A personalized method for treating cancer comprising administering to a subject suffering from a cancer having a deficiency in function or expression or a mutation in either gene in a pair of genes selected from the group consisting of MTA1 and MTA2, HDAC1 and HDAC2, CHD3 and HDAC2, ING1 and ING2, ING4 and ING5, ASF1B and ASF1A, ARID4A and JADE2, ARID4A and SMYD1, ARID4A and SETD9, ATRX and HIRA, SLBP and HIRA, CREBBP and CARM1, ARID3A and RAD54L2, JMJD6 and WDR5, DPF2 and SMYD5, JMJD6 and MBD2, MSL3 and SRCAP, KMT2C and KMT2D, HDAC3 and SETD1B, KMT2A and KMT2B, KDM3B and KMT2D, SMARCA4 and SMARCA2, BRD8 and SMARCA1, WDR77 and BRD4, SETD6 and INO80, SMARCAL1 and ATRX, KAT6B and CHD8, ARID1B and ARID1A, WDR77 and HDAC6, WDR77 and KAT6B, KDM3B and ARID1A, KDM3B and CHD3, SETD2 and NSD1, MTA1 and DOT1L, KDM3B and BRD1, KDM4A and KAT6A, IN080 and CBX1, HDAC6 and EZH2, SMARCAL1 and HDAC8, KAT5 and CHAF1B, SUV39H1 and HDAC6, KDM3B and BRD4, KMT2B and BRD8, PRMT5 and KAT5, SIRT4 and CBX1, KAT6A and CHD6, WDR77 and DOT1L, KAT2B and EHMT1, KMT2E and KAT6A, KDM3B and DOT1L, KDM3B and KDM3A, CHD8 and BRD1, HIRA and ATRX, KDM5C and KDM3B, PRDM6 and KDM3B, KAT6B and KAT6A, SMARCB1 and KDM6A, MECP2 and KDM4B, KAT2A and HDAC5, SETD2 and KDM3B, RFWD2 and CHD6, SMARCB1 and ARID3C, SETMAR and BRD1, HDAC2 and DIDO1, HDAC2 and DNMT3B, KDM4D and BRD1, PRDM1 and HDAC8, SMARCA5 and KAT6A, and KMT2D and ARID1A a therapeutically effective amount of one or more agents targeting the expression, activity, substrate or products of the gene not having the deficiency or mutation.

36. The method of claim 35, wherein the cancer comprises Acute myeloid leukemia (AML).

37. The method of claim 35, wherein the cancer comprises a rearrangement in TEL or MLL.

38. A method for treating cancer in a subject in need thereof comprising administering to the subject a therapeutically effective amount of one or more agents targeting a first gene and one or more agents targeting a second gene for one or more gene pairs, wherein said one or more gene pairs are selected from the group consisting of MTA1 and MTA2, HDAC1 and HDAC2, CHD3 and HDAC2, ING1 and ING2, ING4 and ING5, ASF1B and ASF1A, ARID4A and JADE2, ARID4A and SMYD1, ARID4A and SETD9, ATRX and HIRA, SLBP and HIRA, CREBBP and CARM1, ARID3A and RAD54L2, JMJD6 and WDR5, DPF2 and SMYD5, JMJD6 and MBD2, MSL3 and SRCAP, KMT2C and KMT2D, HDAC3 and SETD1B, KMT2A and KMT2B, KDM3B and KMT2D, SMARCA4 and SMARCA2, BRD8 and SMARCA1, WDR77 and BRD4, SETD6 and INO80, SMARCAL1 and ATRX, KAT6B and CHD8, ARID1B and ARID1A, WDR77 and HDAC6, WDR77 and KAT6B, KDM3B and ARID1A, KDM3B and CHD3, SETD2 and NSD1, MTA1 and DOT1L, KDM3B and BRD1, KDM4A and KAT6A, INO80 and CBX1, HDAC6 and EZH2, SMARCAL1 and HDAC8, KAT5and CHAF1B, SUV39H1 and HDAC6, KDM3B and BRD4, KMT2B and BRD8, PRMT5 and KAT5, SIRT4 and CBX1, KAT6A and CHD6, WDR77 and DOT1L, KAT2B and EHMT1, KMT2E and KAT6A, KDM3B and DOT1L, KDM3B and KDM3A, CHD8 and BRD1, HIRA and ATRX, KDM5C and KDM3B, PRDM6 and KDM3B, KAT6B and KAT6A, SMARCB1 and KDM6A, MECP2 and KDM4B, KAT2A and HDAC5, SETD2 and KDM3B, RFWD2 and CHD6, SMARCB1 and ARID3C, SETMAR and BRD1, HDAC2 and DIDO1, HDAC2 and DNMT3B, KDM4D and BRD1, PRDM1 and HDAC8, SMARCA5 and KAT6A, and KMT2D and ARID1A, and
wherein the one or more agents target the expression, activity, substrate or products of said first and second genes.

39. A method for treating cancer in a subject in need thereof comprising administering to the subject a therapeutically effective amount of one or more agents targeting a gene selected from the group consisting of:
a) MEAF6, SRCAP, WDR77, CHAF1B, TAF5, CSTF1, WDHD1, BRD4, DNMT1, WDR61, GTF3C2, PRMT5, RBBP5, HDAC3, TRIM24, CHD7, HIRA and SMC1A; or
b) HDAC3, PRMT5, DNMT1 and TAF3; or
c) BRD4, KMT2A and CHD7; or
d) SMC2, SMC3, TAF1, WDR92, KDM2B and HUWE1,
wherein the one or more agents target the expression, activity, substrate or products of said gene.

40. The method of claim any of claims 1 to 39, wherein the one or more agents comprise a small molecule inhibitor, small molecule degrader, genetic modifying agent, antibody, antibody fragment, antibody-like protein scaffold, aptamer, protein, or any combination thereof.

41. The method of claim 40, wherein the one or more agents comprise a histone acetylation inhibitor, histone deacetylase (HDAC) inhibitor, histone lysine methylation inhibitor, histone lysine demethylation inhibitor, DNA methyltransferase (DNMT) inhibitor, inhibitor of acetylated histone binding proteins, inhibitor of methylated histone binding proteins, sirtuin inhibitor, protein arginine methyltransferase inhibitor or kinase inhibitor.

42. The method of claim 41, wherein the DNA methyltransferase (DNMT) inhibitor is selected from the group consisting of azacitidine (5-azacytidine), decitabine (5-aza-2′-deoxycytidine), EGCG (epigallocatechin-3-gallate), zebularine, hydralazine, and procainamide.

43. The method of claim 41, wherein the histone acetylation inhibitor is C646.

44. The method of claim 41, wherein the histone deacetylase (HDAC) inhibitor is selected from the group consisting of vorinostat, givinostat, panobinostat, belinostat, entinostat, CG-1521, romidepsin, ITF-A, ITF-B, valproic acid, OSU-HDAC-44, HC-toxin, magnesium valproate, plitidepsin, tasquinimod, sodium butyrate, mocetinostat, carbamazepine, SB939, CHR-2845, CHR-3996, JNJ-26481585, sodium phenylbutyrate, pivanex, abexinostat, resminostat, dacinostat, droxinostat, RGFP966, and trichostatin A (TSA).

45. The method of claim 41, wherein the histone lysine demethylation inhibitor is selected from the group consisting of pargyline, clorgyline, bizine, GSK2879552, GSK-J4, KDM5-C70, JIB-04, and tranylcypromine.

46. The method of claim 41, wherein the histone lysine methylation inhibitor is selected from the group consisting of EPZ004777, EPZ-6438, GSK126, CPI-360, CPI-1205, CPI-0209, DZNep, GSK343, EI1, BIX-01294, UNC0638, GSK343, UNC1999 and UNC0224.

47. The method of claim 41, wherein the inhibitor of acetylated histone binding proteins is selected from the group consisting of AZD5153, PFI-1, CPI-203, CPI-0610, RVX-208, OTX015, I-BET151, I-BET762, I-BET-726, dBET1, ARV-771, ARV-825, BETd-260/ZBC260 and MZ1.

48. The method of claim 41, wherein the inhibitor of methylated histone binding proteins is selected from the group consisting of UNC669 and UNC1215.

49. The method of claim 41, wherein the sirtuin inhibitor comprises nicotinamide.

50. The method of claim 40, wherein the genetic modifying agent comprises a CRISPR system, shRNA, a zinc finger nuclease system, a TALEN, or a meganuclease.

51. The method of claim 50, wherein the CRISPR system comprises a Cas13 system.

52. The method of claim 51, wherein the Cas13 system comprises Cas13-ADAR.

53. The method of claim 40, wherein the one or more agents target an active site.

54. The method of any of claims 35 to 39, wherein the cancer is Acute lymphoblastic leukemia (ALL) or Acute myeloid leukemia (AML).

55. The method of any of claims 1 to 54, wherein the agents are administered concurrently or sequentially.

56. The method of any of claims 1 to 55, wherein an additional cancer therapy is administered.

57. A DNA construct comprising a sequence encoding two CRISPR guide sequences positioned in an inverted orientation to each other and flanked by convergent regulatory sequences, wherein each guide sequence is operably linked to the regulatory sequence flanking the guide sequence, wherein each guide sequences is specific for an orthogonal CRISPR enzyme, and wherein the regulatory sequences do not have 100% sequence identity to one another.

58. The DNA construct according to claim 57, wherein each regulatory sequence is a RNA polymerase III (RNAP III) promoter.

59. The DNA construct according to claim 58, wherein one RNAP III promoter comprises the U6 promoter and one RNAP III promoter comprises the H1 promoter.

60. The DNA construct according to any of claims 57 to 59, wherein the orthogonal CRISPR enzymes comprise S. aureus Cas9 and S. pyogenes Cas9.

61. The DNA construct according to any of claims 57 to 60, further comprising a sequence encoding a CRISPR enzyme operably linked to a separate regulatory sequence.

62. The DNA construct according to claim 61, wherein the CRISPR enzyme is S. aureus Cas9.

63. The DNA construct according to any of claims 57 to 62, further comprising a sequence encoding at least one selectable marker.

64. The DNA construct according to claim 63, wherein the at least one selectable marker is an antibiotic resistance gene.

65. The DNA construct according to claim 63, wherein the at least one selectable marker is a fluorescent gene.

66. The DNA construct according to any of claims 57 to 65, wherein each guide sequence further comprises a barcode sequence.

67. The DNA construct according to any of claims 57 to 66, wherein one or more of the regulatory sequences are inducible.

68. The DNA construct according to any of claims 57 to 67, wherein one or both of the guide sequences comprise an aptamer sequence.

69. The DNA construct according to claim 68, wherein the aptamer sequence comprises an MS2 aptamer.

70. The DNA construct according to any of claims 57 to 69, further comprising primer binding sequences flanking the guide sequences.

71. A vector comprising a DNA construct according to any of claims 57 to 70.

72. The vector according to claim 71, wherein the vector is a viral vector.

73. The vector according to claim 72, wherein the viral vector is a lentivirus, adeno associated virus (AAV) or adenovirus vector.

74. A library for the combinatorial screening of phenotypic interactions between a set of target sequences comprising a plurality of vectors according to any of claims 71 to 73, wherein the library comprises vectors comprising all possible pairwise combinations of guide sequences specific for the set of target sequences.

75. The library according to claim 74, wherein the set of target sequences comprises sequences targeting expression of at least two protein coding genes.

76. The library according to claim 75, wherein at least one protein coding gene is selected from the group consisting of:
a) genes in Table 1; or
b) DNMT1, KDM5A, KDM5B, KDM5C, KDM5D, SETDB1, SETDB2, BAZ2A, BAZ2B, ASH1L, KMT2A, KMT2B, SUV39H1, SUV39H2, JARID2, KAT2A, KAT2B, CHD3, CHD4, CHD5, CHAF1A, ZMYND8, BRPF1, BRPF3, BRD1, MBD2, MBD3, MBD1, HDAC4, HDAC5, HDAC9, BRWD1, BRWD3, KDM2A, PHIP, PBRM1, CXXC1, SETMAR, EHMT1, EHMT2, ATAD2, ATAD2B, KMT2C, KMT2D, KMT2E, MGMT, WBSCR22, CARM1, KDM4A, KDM4B, KDM4C, KDM4D, KDM4E, ARID4A, ARID4B, PHF2, PHF8, SP140L, BPTF, BAZ1A, BAZ1B, KDM7A, TRIM24, TRIM33, TRIM66, KAT5, KAT6A, KAT6B, KATE, CHD1, CHD2, CHD6, CHD7, CHD8, CHD9, SMARCA2, SMARCA4, SMARCA1, SMARCA5, EPC1, EPC2, KDM1A, KDM1B, DNMT3A, DNMT3B, WHSC1, WHSC1L1, NSD1, ZMYND11, SHPRH, MBD4, MBD3L1, MBD3L2, MECP2, ASF1A, ASF1B, ELP3, ING1, ING2, ING3, ING4, ING5, SLBP, SAP30L, SAP30, HAT1, HDAC1, HDAC10, HDAC11, HDAC2, HDAC3, HDAC6, HDAC7, HDAC8, DOT1L, MEAF6, FBXW9, FBXL19, TAF5L, TAF5, WDHD1, WDR48, WDR5, WDR61, WDR77, WDR82, WDR92, CHAF1B, CSTF1, CORO2A, DDB2, ELP2, EED, GTF3C2, HIRA, KDM2B, MTA2, MTA3, MTA1, RBBP4, RBBP5, RBBP7, RFWD2, TET1, TET3, CBX1, CBX2, CBX3, CBX4, CBX5, CBX6, CBX7, CBX8, CDYL2, CDYL, CDY1, CDY1B, CDY2A, CDY2B, SIRT1, SIRT2, SIRT3, SIRT4, SIRT5, SIRT6, SIRT7, SMC1A, SMC1B, SMC2, SMC3, SMC4, PRDM1, PRDM11, PRDM14, PRDM16, PRDM2, PRDM6, PRDM9, SMYD1, SMYD2, SMYD3, SMYD4, SETD1A, SETD1B, SETD2, SETD3, SETD4, SETD5, SETD6, SETD9, SETD7, SMYD5, EZH1, EZH2, ARID1A, ARID1B, ARID2, ARID3A, ARID3B, ARID3C, ARID5A, ARID5B, CREBBP, EP300, SP100, SP140, TAF1L, TAF1, BRD2, BRD3, BRD4, BRD7, BRD8, BRD9, BRDT, CECR2, HR, JMJD1C, JMJD4, JMJD6, KDM3A, KDM3B, KDM6A, KDM6B, UTY, PHRF1, PHF1, PHF10, PHF12, PHF13, PHF14, PHF19, PHF21A, PHF21B, PHF23, PHF3, TAF3, AIRE, DIDO1, DPF1, DPF2, DPF3, INTS12, KAT7, MSL3, MTF2, METTL13, MORF4L1, PRMT1, PRMT2, PRMT5, PYGO1, PYGO2, RSF1, TRIM28, UHRF1, UHRF2, EP400, INO80, RAD54L, RAD54L2, SET, SMARCAL1, SMARCB1, SMARCAD1, SRCAP, TBP, TSPYL2, ATRX, CHD1L, IL4I1, JADE1, JADE2 and JADE3; or
c) DOT1L, EZH2, EHMT1, EHMT2, SETD7, SMYD2, DNMT1, PRMT1, PRMT3, PRMT5, PRMT4, PRMT6, PRMT8, KDM1A, KDM6A, KDM6B, HDAC1, HDAC2, HDAC3, HDAC6, HDAC8, SIRT1, SIRT2, SIRT6, BAZ2A, BAZ2B, BRD4, BRD9/7, EP300, CECR2, SMARCA4, P300, CDK7, EED, SMYD3, BRPF1, KDM4A, KDM4B, KDM4C, KDM4D, KDM4E, KDM5A, KDM5B, KDM5C and KDM5D.

77. The library according to claim 75, wherein at least one protein coding gene comprises a protein domain selected from the group consisting of PF00439:Bromodomain, PF00145:C-5 cytosine-specific DNA methylase, PF02373:JmjC domain, hydroxylase, PF00385:Chromo (CHRromatin Organisation MOdifier) domain, PF00850:Histone deacetylase domain, PF01388:ARID/BRIGHT DNA binding domain, PF02375:jmjN domain, PF00856:SET domain, PF13508:Acetyltransferase (GNAT) domain, PF06466:PCAF (P300/CBP-associated factor)N-terminal domain, PF01853:MOZ/SAS family, PF11717:RNA binding activity-knot of a chromodomain, PF08241:Methyltransferase domain, PF13847:Methyltransferase domain, PF05185:PRMT5 arginine-N-methyltransferase, PF12047:Cytosine specific DNA methyltransferase replication foci domain, PF11531:Coactivator-associated arginine methyltransferase 1 N terminal, PF12589:Methyltransferase involved in Williams-Beuren syndrome, PF01035:6-O-methylguanine DNA methyltransferase, DNA binding domain, PF02870:6-O-methylguanine DNA methyltransferase, ribonuclease-like domain, PF00628:PHD-finger, PF05033:Pre-SET motif, PF00004:ATPase family associated with various cellular activities (AAA), PF02463:RecF/RecN/SMC N terminal domain, PF02146:Sir2 family, PF01426:BAH domain, PF02008:CXXC zinc finger domain, PF06464:DMAP1-binding Domain, PF00400:WD domain, G-beta repeat, PF08123:Histone methylation protein DOT1, PF09340:Histone acetyltransferase subunit NuA4, PF10394:Histone acetyl transferase HAT1 N-terminus, PF13867:Sin3 binding region of histone deacetylase complex subunit SAP30, PF12203:Glutamine rich N terminal domain of histone deacetylase 4, PF04729:ASF1 like histone chaperone, PF12998:Inhibitor of growth proteins N-terminal histone-binding, PF15247:Histone RNA hairpin-binding protein RNA-binding domain, PF00583:Acetyltransferase (GNAT) family, PF01429:Methyl-CpG binding domain, PF14048:C-terminal domain of methyl-CpG binding protein 2 and 3, PF00956:Nucleosome assembly protein (NAP), PF01593:Flavin containing amine oxidoreductase, PF06752:Enhancer of Polycomb C-terminus, PF10513:Enhancer of polycomb-like, PF12253:Chromatin assembly factor 1 subunit A, PF15539:CAF1 complex subunit p150, region binding to CAF1-p60 at C-term, PF15557:CAF1 complex subunit p150, region binding to PCNA, PF00176:SNF2 family N-terminal domain, PF09110:HAND and PF04855: SNF5/SMARCB1/INI1.

78. The library according to claim 75, wherein each pairwise combination of guide sequences comprises a guide sequence selected from SEQ ID NOS: 1-552 and a guide sequence selected from SEQ ID NOS: 553-1104.

79. The library according to claim 75, wherein each pairwise combination of guide sequences comprises a guide sequence selected from the group consisting of SEQ ID NOS: 1105-23903 and a guide sequence selected from the group consisting of SEQ ID NOS: 23904-45515.

80. A method of combinatorial screening of phenotypic interactions between a set of target sequences in a population of cells comprising:
a) introducing a library according to any of claims 74 to 79 to a population of cells, wherein two orthogonal CRISPR enzymes are expressed in said cells;
b) selecting for cells comprising a vector of the library;
c) selecting for cells having a desired phenotype; and
d) determining in the cells having the desired phenotype the enrichment or depletion of combinations of guide sequences as compared to the representation in the library introduced.

81. The method according to claim 80, wherein the phenotypic interaction is lethality, wherein combinations of guide sequences depleted in viable cells indicate lethal combinations.

82. The method according to claim 80, further comprising treating the population of cells with a drug, wherein the phenotypic interaction is sensitivity or resistance to the drug.

83. The method according to claim 80, wherein the phenotypic interaction is differentiation, wherein combinations of guide sequences are detected in cells expressing a differentiation marker.

84. The method according to claim 80, wherein the phenotypic interaction is modulation of a cell state, wherein combinations of guide sequences are detected in cells expressing a marker of the cell state.

85. The method according to any of claims 80 to 84, wherein selecting for cells comprising a vector of the library comprises treating the population of cells with an antibiotic.

86. The method according to any of claims 80 to 85, wherein the population of cells is a population of cancer cells.

87. The method according to any of claims 80 to 85, wherein the population of cells is a population of stem cells.

88. The method according to any of claims 80 to 85, wherein the population of cells is a population of immune cells.

89. The method according to claim 88, wherein the method comprises screening for combinations of targets capable of altering the cell state in the immune cells.

90. The method according to claim 89, wherein the cell state is an effector or suppressive cell state.

91. The method according to claim 89, wherein the combinations of targets identified are used to treat autoimmunity.

92. The method according to claim 89, wherein the combinations of targets are used to treat cancer.

93. The method according to claim 89, wherein the combinations of targets are used to modulate cells for adoptive cell transfer (ACT).

94. The method according to claim 81, further comprising prioritizing candidate drug targets comprising determining epistatic genes, pseudo-essential genes, essential genes, pseudo-synthetic lethal genes and synthetic lethal genes, wherein candidate drug targets comprise synthetic lethal gene pairs.

95. The method according to claim 94, wherein determining epistatic genes, pseudo-essential genes, essential genes, pseudo-synthetic lethal genes and synthetic lethal genes comprises applying an algorithm to the pair wise combinations identified.

96. The method according to any of claims 80 to 95, wherein the orthogonal CRISPR enzymes comprise a Cas9, dCas9, Cas12, dCas12, or dCas13.

97. The method according to claim 96, wherein the dCas9 or dCas12 are fusion proteins comprising an activation or repression domain.

98. The method according to any of claims 80 to 97, wherein one CRISPR enzyme activates a gene and one CRISPR enzyme inactivates a gene.

99. A method for generating a library for the combinatorial screening of phenotypic interactions between a set of target sequences comprising:
a) synthesizing a first set of oligonucleotides, each oligonucleotide comprising a guide sequence specific for a target sequence in the set of target sequences and specific for a first orthogonal CRISPR enzyme, wherein the oligonucleotides comprise a first non-palindromic hybridization sequence at the 3′ end and a site for cloning into a vector at the 5′end;
b) synthesizing a second set oligonucleotides, each oligonucleotide comprising a guide sequence specific for a target sequence in the set of target sequences and specific for a second orthogonal CRISPR enzyme, wherein the oligonucleotides comprise a second hybridization sequence at the 3′ end of the sequence that is complementary to the first hybridization sequence and a site for cloning into a vector at the 5′end;
c) hybridizing the first and second set of oligonucleotides;
d) performing DNA extension using the hybridization region as priming sequences to generate a pool of dsDNA oligonucleotides comprising pairs of inverted guide sequences specific for orthogonal CRISPR enzymes, wherein all pairwise combinations of guide sequences from the first and second set of oligonucleotides is represented in the pool;
e) joining the oligonucleotides from the pool of dsDNA oligonucleotides into a vector comprising two convergent regulatory sequences flanking a cloning site, wherein the two convergent regulatory sequences do not have 100% sequence identity to one another, and wherein the oligonucleotides are joined between the convergent regulatory sequences.

100. The method according to claim 99, wherein the ends of the oligonucleotides comprise restriction enzyme sites and the vector comprises compatible restriction enzyme site(s) between the convergent regulatory sequences, whereby joining is by ligation of compatible restriction enzyme digested ends on the oligonucleotides and the vector.

101. The method according to claim 99, wherein the ends of the oligonucleotides comprise homologous sequences configured for recombination and the vector comprises compatible homologous sequences between the convergent regulatory sequences, whereby joining is by recombination of the oligonucleotides into the vector.

102. The method according to any of claims 99 to 101, wherein the convergent regulatory sequences are RNA polymerase III (RNAP III) promoters.

103. The method according to claim 102, wherein one RNAP III promoter comprises the U6 promoter and one RNAP III promoter comprises the H1 promoter.

104. The method according to any of claims 99 to 103, wherein the orthogonal CRISPR enzymes comprise S. aureus Cas9 and S. pyogenes Cas9.

105. The method according to any of claims 99 to 104, wherein the vector further comprises a sequence encoding a CRISPR enzyme operably linked to a regulatory sequence.

106. The method according to claim 105, wherein the CRISPR enzyme is S. aureus Cas9.

107. A method for treating cancer comprising a mutation in the MAPK pathway in a subject in need thereof, said method comprising administering to the subject a pharmaceutical composition capable of inhibiting the expression or activity of MAPK1 and MAPK3.

108. A method for treating cancer comprising a mutation in the MAPK pathway in a subject in need thereof, said method comprising administering to the subject a pharmaceutical composition capable of inhibiting the expression or activity of ERK1 and ERK2.

109. The method according to claim 107 or 108, wherein the mutation in the MAPK pathway comprises BRAF V600E, KRAS G12S or NRAS Q61L.

110. A method for treating cancer comprising a mutation in PIK3CA in a subject in need thereof, said method comprising administering to the subject a pharmaceutical composition capable of inhibiting the expression or activity of AKT1 and AKT2.

111. A kit comprising vectors according to any of claims 71 to 73 or a library according to any of claims 74 to 79 and instructions for use.

112. A system for generating a library for combinatorial screening, comprising a vector comprising convergent RNA polymerase III (RNAP III) promoters flanking a cloning site configured for accepting an oligonucleotide comprising inverted CRISPR guide sequences, optionally, a restriction enzyme and buffers specific to the cloning site.

113. A combination of one or more agents targeting a first gene and one or more agents targeting a second gene for use as a medicament, wherein said first and second genes are selected from the group consisting of MTA1 and MTA2, HDAC1 and HDAC2, CHD3 and HDAC2, ING1 and ING2, ING4 and ING5, ASF1B and ASF1A, ARID4A and JADE2, ARID4A and SMYD1, ARID4A and SETD9, ATRX and HIRA, SLBP and HIRA, CREBBP and CARM1, ARID3A and RAD54L2, JMJD6 and WDR5, DPF2 and SMYD5, JMJD6 and MBD2, MSL3 and SRCAP, KMT2C and KMT2D, HDAC3 and SETD1B, KMT2A and KMT2B, KDM3B and KMT2D, SMARCA4 and SMARCA2, BRD8 and SMARCA1, WDR77 and BRD4, SETD6 and INO80, SMARCAL1 and ATRX, KAT6B and CHD8, ARID and ARID1A, WDR77 and HDAC6, WDR77 and KAT6B, KDM3B and ARID1A, KDM3B and CHD3, SETD2 and NSD1, MTA1 and DOT1L, KDM3B and BRD1, KDM4A and KAT6A, INO80 and CBX1, HDAC6 and EZH2, SMARCAL1 and HDAC8, KAT5 and CHAF1B, SUV39H1 and HDAC6, KDM3B and BRD4, KMT2B and BRD8, PRMT5 and KAT5, SIRT4 and CBX1, KAT6A and CHD6, WDR77 and DOT1L, KAT2B and EHMT1, KMT2E and KAT6A, KDM3B and DOT1L, KDM3B and KDM3A, CHD8 and BRD1, HIRA and ATRX, KDM5C and KDM3B, PRDM6 and KDM3B, KAT6B and KAT6A, SMARCB1 and KDM6A, MECP2 and KDM4B, KAT2A and HDAC5, SETD2 and KDM3B, RFWD2 and CHD6, SMARCB1 and ARID3C, SETMAR and BRD1, HDAC2 and DIDO1, HDAC2 and DNMT3B, KDM4D and BRD1, PRDM1 and HDAC8, SMARCA5 and KAT6A, and KMT2D and ARID1A.

114. A personalized method for selecting a cancer treatment comprising determining in a subject suffering from cancer a deficiency in function or expression or a mutation in one or more pairs of genes selected from the group consisting of MTA1 and MTA2, HDAC1 and HDAC2, CHD3 and HDAC2, ING1 and ING2, ING4 and ING5, ASF1B and ASF1A, ARID4A and JADE2, ARID4A and SMYD1, ARID4A and SETD9, ATRX and HIRA, SLBP and HIRA, CREBBP and CARM1, ARID3A and RAD54L2, JMJD6 and WDR5, DPF2 and SMYD5, JMJD6 and MBD2, MSL3 and SRCAP, KMT2C and KMT2D, HDAC3 and SETD1B, KMT2A and KMT2B, KDM3B and KMT2D, SMARCA4 and SMARCA2, BRD8 and SMARCA1, WDR77 and BRD4, SETD6 and INO80, SMARCAL1 and ATRX, KAT6B and CHD8, ARID1B and ARID1A, WDR77 and HDAC6, WDR77 and KAT6B, KDM3B and ARID1A, KDM3B and CHD3, SETD2 and NSD1, MTA1 and DOT1L, KDM3B and BRD1, KDM4A and KAT6A, INO80 and CBX1, HDAC6 and EZH2, SMARCAL1 and HDAC8, KAT5 and CHAF1B, SUV39H1 and HDAC6, KDM3B and BRD4, KMT2B and BRD8, PRMT5 and KAT5, SIRT4 and CBX1, KAT6A and CHD6, WDR77 and DOT1L, KAT2B and EHMT1, KMT2E and KAT6A, KDM3B and DOT1L, KDM3B and KDM3A, CHD8 and BRD1, HIRA and ATRX, KDM5C and KDM3B, PRDM6 and KDM3B, KAT6B and KAT6A, SMARCB1 and KDM6A, MECP2 and KDM4B, KAT2A and HDAC5, SETD2 and KDM3B, RFWD2 and CHD6, SMARCB1 and ARID3C, SETMAR and BRD1, HDAC2 and DIDO1, HDAC2 and DNMT3B, KDM4D and BRD1, PRDM1 and HDAC8, SMARCA5 and KAT6A, and KMT2D and ARID1A; and
selecting a treatment targeting the gene without a deficiency in function or expression or a mutation if a gene pair has a deficiency in function or expression or a mutation in only one gene in the pair.

115. The method of claim 114, wherein the cancer comprises Acute myeloid leukemia (AML).

116. The method of claim 114, wherein the cancer comprises a rearrangement in TEL or MLL.
